United States Patent Application Publication US 2011/0014706 A2 - sequence listing, part 22

SEQ ID NO: 38414 - DNA, 15237 bp, Arabidopsis thaliana landsberg
  unsure (1)..(15237): unsure at all n locations
tttgttctgatagaaactattttgggttaaatgggaaacgggtcaaagcatagggggctagtgttgtaatttattagattggggaggagtttcaaatctgaacgctgaagataaatcacaagggaggtgcttcgtcctcgaagcttttagaacttagccaagcagctgttgtttcttagttgactccctctccgacgaaaatggtgtccacgagcaagatcaaatccgttgatttctataggtttatgtctgttactttgtgtatttttttcccagatttctccagcttctttctcctgttatatagatttcgaatttcatcgatctaggcatgtgacttggatttgtagtggtagtttactatgaattttacttggggagaatcaacattttgtggattttcttactcattagtgatagggtttagttgtggacaagcgatcctgaagttgtaggttttgcctctcgtgtatgtgcattgtcattgtcttttgatcttagtgatattgagctgtttagatgctattttctggaatttaagatgatcattagtcacttcgatttcggtattgttgctaagagagttgcttcaaagttcaatggaatctgagatttgtgattgtggacgataatacagtacttcaaatttcatatatattctttggaaactctgtgcctacaggaaaatcccgagggatttgacagaggcgtctctgtctggtgctggattgtccattatagcagccctctctatgatatttctatttggaatggtaagtttcaccagctcactggacttgtcattatgtggatgattttgaccattctgtgccgattgttcaagtttcattttgtccttaatttatattaactgctccgtttgttactattaggaaaaatgaatgttgttttgactttgtaagtttcttattacaggagttgaataattatttggctgtcagcacttccacatcggtcattgttgacaggagcgctgacggagacttcttgcgcttagattttaacataaggtacattatattcaattttgtttctcaatacaaatgtcttatagttttaatatttttaacagaatgtcatatgtgtggcctacttaaagtcatgcaaagttcagcacctgtctgattgctaaccagatacagattctattttttggcagcttcccgtcactttcatgtgaattcgcatctgtggatgtcagtgatgtattaggaactgtaagtttggtttcatcataagttgaagtctctatctcttttctgttgctcttgaaaattctttgttttaaaagtatttaaaattttgtgaacaaagaaaaagtattttaatatctgctatgtacgttcaaaaagtttggactgacaatattttcttcaagggaaacccgaaaatgtcaaattgtgaaagagtctatcgtatgtgtggtttgaaaatagtgttattctttcagaacattggtccatttggtcactcaaaatttgcggttgttccttccctcctgattttgctaacttttgttttcagaacaggctaaatgtaacaaagacaattcggaagttttctattgattcgaatatgagacccactggttctgagtttcatgccggggaagttttatcactcattaatcatggagatgaaactggtgaagaaatagttgaagattcggtaccacttactggacgcaactttgacacatttacacatcagtaaggagtttaagtctgtattgtgcattttgtaagtatatgcaaatatactaggaatgtattcctagtacgaacttgtttgcttctggtgacaacatatgaagcatacattttgcagatttccaatcttggttgttaatttctatgctccgtggtgctattggtgtaatctcctggtaactccttatcttctctcttcatctcctacagtttctagatgtcactgcatattttccatccagaatcatattttgctgcctgttggcaagggttatatgactcatattagccttcttgcttgaggaaattctacatgtttggtgccttagactcgccaatattgcaatttacagtaacttagtcaatctttcctgtagtcgtaataatttcctcatggaaagactagacttatctaaggatcaacttgatattgaatatcaaacttatgaagtagactagtatctggtgatatcatatgcacattatagtgataattttgctgatctttacgagaagactctaactttggtctccattgtcagaaaccatcatgggagaaagcagctaaacagataaaagagaggtatgccattacactctctctagagaaagaatatgtgatactatttctccttataacttttttgtttgtgtagatatgatccagaaatggacggacgtgttattttggcaaaagttgactgcacccaagaaggtgatctctgtcggaggtatatcctatcacattttatctggtttcccatcctgactgcttaagctacgaaacttaactaatttccactacagtgcaaaaagtaatatccaagaagctataactccttttccaccgaatatgtcatttgaatttgtgcaaaaaatttcaattgaaactgggtcttcaggagtgtgggataatatgccagtaatgtattggtgactatttcaggtgtctttaactcatttctctgttaactaaggtctaagatgcattttctactcgtaacaagagggagggattctcagttactttataagtttgtattggcttcgtctaaacgatttctattttatgtaaaatactacatgtaccttttcaaaagatagttatggtcaaaccaaagaagacataccatacataggttaacgactttctttaggatttcatttctttagtataatgcactctctgtaaacttataccagctttaaggtataatttatgctcataatttcctctgcaaataatatccaggaatcatatacaagggtatccatccattcgcattttccgcaaaaggcagtgatcttaagtaagagaaagtttaattgttcatattatgcatgaccatcatttactcgttctcgtaaatttattttctcaacttttctttcctctgcttaattttcttgataatagggatgacaatgcacaccacgaccatgaatcctactatggagatcgtgatacggaaagcttagtgaaggtagctgttggtctaagtttcttttcaactttttttttccgtgccccttagaaaagttagactagagtcgctgtttgcacctcatttgttgcttgtttctgaaaatgttaccttctcctatagatggtggtgagtctggttgaaccaatccatctagagccccataatctagcattggaggacaaatcagacaattcatcgagaactctaaaaaaggcaccttctacaggaggatgtcgagttgaaggatacatgcgtgtaaagaaggtatgattgggaaactactactgctttgtcttccttttagaccaccccttaaacactttaatagttaatactttatggtctttgcaggttccaggcaatttaatggtttcagctcgctcgggatctcattcctttgattcttctcagatgaatatgtcacatgttgttaaccatctatcctttgggcggaggattatgcctcagaaattttcggagtttaagcgcttgtcaccttatctcggcctaagccacgaccgtttagacggccggtccttcataaaccaacgagatctcggcccaaacgttaccgtaagtttgtataactcagaaatttttatttggatcacctgatatgctttatagcatgatttaaggtgttgttttccatggacagattgagcattatcttcaaatagtaaagactgaggtagtgaaaagcaatggacaggcattggttgaggcgtatgagtacacagcacatagcagcgttgctcatagttactatttaccagtggccaagtttcactttgagctctcaccgatgcaggtaggcttaaacattttttgtttgctgcctttctcacatgtgttacacagattagggatggtaagatgggttggaattacactctgctcatctttctctttgtttgtttgcaggttctcataacggaaaactccaagtccttctcacatttcatcaccaacgtatgcgccattattggtggtgtcttcacggttagtaaagaagtttgaagcctcttcttcttgtaactattcattaatgtattcccatatgactcgtatttttgcctcttttcaggtggccggaatcttggattctattctccatcactccatgacactcatgaaaaagatagaacttggtaaaaacttctgaagctccctaagggttttatttcgttttcctctgtaacgagtcagaaatttttgccctagttataccagacgtcacttaaataattcggttatatatattcacaaactgttatccttttgaacatatataagtattatcgatgtctctgaagtctttgggagttttagtagaacaaattgttatcacttaaatcaggggaatttacttccaaattctccaataccaaaatacagcttcttgtgagttggttcatactgatgatggagaaatgtaatttttagccaacaaggtttcaactttcaacgtttgaaactagatttgagcacaaatatagcaatcaactttcccccatggctgcttatagcaatcatcgacggaagtcacagcagaacggagagtcctctcgttccctttggacagagttgcatcctctactagaattttacttaggtagaagtaagtatccacagtaaagaatctccttcttgttacaattttcaattttgtgttctcttcaagctaattattagtttagttagcttagcatgattcaactttagccttggtatagaatcataacatagaaccatataaacgaaaataagactaagatcaaaagaacaaaaaactttgagttttgcaaacaaggtttcaaacttgaataatgtctgttaattgagcacatactgttantgttttttccaaaaacactaattnccgaatccattaatcaaaaaagacagacaacagaattgtagataatatttgatcaggcagtgatctccttcttgagttttgcaagctcttgcctgacaacaccagctttctgcaaacagcaaaaaaacccattaacatttcagttctgacatgaatgaacactaccacagaatttcaaacatctaacaatttaacacactgaccttgatcttggccaacatgatcttgaacctatcaaagtcgttaaggttagccctacgtttctgcacgataagcttcctaccccatgagcttttctcccacttgttcttcacatctgcaagacttttccagttaagattgaaacacttcaaaattcaaatatttacattacgcagcactcaccagccttttccattgcctcgatcaaagccttcttctttggcacacggttgatgtcaatgacactatcggtaagagacaacctcttgaagttcatctggatcctctccatatcaggggcatgcaccaaagcctaaatgacgagaacataataagaactccataaaaacaactagacaatattcagctcaatattcaccaaggaaatgcaataggctccaatcaatgatgcaaactgagttataactgtaagccaattatgcaaccaaagtctcaagctaaatcaaaattttccttaatcaaacaatttaccgaaacatacacagtagcattacggaatcaagcattaaaacagctgaaactcatcaatacatacatgataaagagatggaaatcttcataacctaagaatgaaataaacttactctgttctggtcaacaacgtcgacgataacgacgagctttccatgatcttctccgtagttcacaagtgctactctcccgatctcaacgtacctcttgaaaccctaaacaaccaatcaccagaaaatattaaatctaacaactttggactctaacctatacacaaacgtaacttgattgagaacgtcaaaagcctaatccccaaaaaaaaagatctagaagaaagaaatccgaaatgtgctatgaacatgagctaaatacaggagataatcacgtagaacacagacgaactaaccaaggtattagctcaataagagagtatatctcaccattttcgccgccggtagattggaaggtctaagctccgagtgtaaatgtagacgagcgacagcagaggaaaaaatcgattaggttttgcactatatataatcttcattctagggttttgtggtttgggcctatctttactaaataaatatcacaaaggcccaacattaaacgcccaatatggtaaagagagaaaacggcgtcgttttatgttggatatttttgggggaaaaaaaaaaaaagacacagtgtctctttcatgtggaagaagataaattagagagaagtgatggagaaactccgttatttgtggaggcaacaactattgtgtaatgagaccagctcatcaatcatcatctccagaaaaaaggaatgatacaagaaacttagttgatagatagacgacaggaaaataatatacgcagaaagaaacctaaaaaaaaaagtttctgtctttagactccaatccactaagctccaagctgggtccccttaaattctcaatctttttctccctaaatttcctttaatttcttcattgatcattgctcattgatcgatcttctgagttttgaggggaccccgatccaaagtgtatctctttctgttttgctcagcatttggatttgatttcttttttttcccgggaaagtttgatagagatgtggggaggcgcaggtgagccagcagattcttactaccaagttcgtcctgagtgcaccgatgtccccaagaccagattcaaaatcaaggttacttctttcgatcccttcttcttcattttctccgatttttgcttattctagttttgcttcttcgttgggtcgtctctgttttatgattacgaatacgatatgtgattgctgattcggttccaattacatccagattctctggttatctatgttttcgaaaatgcattgtctctgttgtgaacttgttcctgacattgtaatgttcataaatctgattccttatgaggagatattgatcttaggagctgttcagggtctcatatatattcttgatcccactggatttttttttcagtagcatcacatgaatgattgttttagtgagattgtcactttttccagacataagcttgaaaggattttaacttcttgactccagggtctttaggaagatacataagataggaagataggttatgtgcttgactggtactaatttggaactagattgaataattttgaacctttacattacaggccataaaagcctatatcattccatgtcttgtggtcataatgtatcatgaataattgcatcatgttgaggccaggaagtttttgctatgttgctgacaacacgggtcatatttatgatgtttgtgcagcctggtaaaactctaagtgtaagaaaatggcaggctgtatttgtacaagaagggtctctccatattggcaagactctaagacgcatccgaagaggggtatgtttgtttggataagtctttgtaaagactgatttatcctttcatttgttctgtatctttgataacttatgttactttaatattcctttacaatcaatctatagggaatccatccatcaattagaggcgaagtatgggaattcctacttggttgttatgacccaatgagcacattcgaagaaagagagcaaattcgacaacgcagaaggtagaattttgtcctcatatcctatatatatgtatcgcatttggcataattacatgtttctttcagttcattcataaaccatcgattcagttttgtgaatcctaccgctaattctcttctttcagattgcagtatgcttcttggaaggaagagtgtaagcaaatgtttcctgtcattggaagtggaagatttactaccgcacctgtaattactgaaaatggtcaacccaactatgatcctcttgtacttcaggaaataaatttaggtaaaattttgcctttctattacggaaatttaatgttgaactcttacataaacttgtaataggcatttgaagttttcatgtggctttctcaggtacaaactcaaatggttcagttttttttaaagagctcacaagtcgtggacctcttgataaaaaaattatccaatggctgctaacacttcaccagataggttagcgactgatcatggcctcctttatcgccggctagactatactgaatatctggttcactcagttgcttaatgtatgtttttcaggtcttgatgtgaaccgtacacacagggccttggtattttatgagaaaaaggagaacttatcggagctctgggatattctgtctgtttacgcctggataggcaacgatgtcgggtattgtcaaggtaagcagttaaatataaagaaagaacagggtttatcctttgttcaagccctgattgattcttatgttttgatctatctactctttcttctgagtaggaatgagtgatctttgttcccctatgattatgcttcttgaggacgaagctgatgctttttggtgtttcgaaagattgatgcgccgattggtactatacctctatgttttgtgttcatataagtttgtcttgactctctctgtaatcagataatactaaaggttttttattcttcttttgaacttgaaagcgagggaattttcgtgacacggggagatcagttggagtcgaagcacagcttactcatttggcttcaatcactcagattattgaccccaaacttcaccatcacttaggtactacagtactactactactgcaatttctttgcatatatgtatatattcagcggttaatcgagtgctgggtcataaatgcagagaaattgggtggtggtgactatctctttgctattcgaatgataatggttcagttccgaagagaattctccttttgtgactccttgtacctttgggaggtaatgatactgattttttgtctcactctctcttatatgtatttgatctcatgccaaacactattcctgcagatgatgtgggccctcgagtatgaccccgatcttttttatgtatatgaggcgcatcaatgcgggaatgagaaaacagaagggttaaaaggtaaaccgaagtcaattaagcaatgtggaaagtatgagaggcaaaacatgaggaatggaggaaaaagtgcagaaggtcctttacctatatcggtatttctagtggccagtgtcttgaaagacaagagttataagctaatgactgaagctcgtggactcgacgatgttgttaagatacttaacgatacgactgggaacttggatgccaaaaaaacatgttctggagccataaaaattcacaagagatatctaagaaaggttatttctatgtttctttgatctgcctgggcttctgtctctctcaaagttttgtctgaaagttctctcttctgtggtcttctctcttattgcaggctaagaaatagcattggtaaacattcatgattctgccgccgaatcatgagaagctatcttttgtaattcgctaaatctggggaggaaccgaatcttcctatcgttttttctaacgatttttttgggtggaagctgggagaaccttggagccttgaataacccttaacacacatacacacacacaagaaaaatatacttagtaagctgttcataaaagtttatgttgtatcccttcatatataaacaaacatggtttttgttactaacgggaaaataaaaaggaaagagattgttcttaagtttacaaatgatcattttatgttctaaaagaagaaatattttgaaacttggggtaagaagtgtttcagataaatatctggatcgtgttgatttgaccagaaacagaggaaatcggtttatgaagtaaagaggtcaagaggccaagagtgtaataataactaatgagtgagaatcaatctgctttagttcctttccgattatggatacaagtttcttggatcaaccaaaactgtgaatagagagatacatatacaaaacgttctcttcaagtttcttgagcatgacatggctaaacagaaatcaatttacataattaactaaagcatctacacaccagttagtaagcgatcagtgatcgcatgaaatgttgtgatcgcgagaagaatcgaaggcaagaatcggataccggataatctcatcccggaactctttttagggaaatacttaggaagctcacattcttctccattgaagaaaactctcttaggaaatccatctcctcctatgatattcaaactccccaaattcttcttcttaaacgagataaccgactgcattttcccgggaatctgcgggtctctcgcaggattcgttccgtttgtgataccaatcaagtagttcataccaggaagtccttggaagaaaatggtctggttcttaggtggaactcttgatccattaaaggagtaaatattctcatatcctaaaccagctttgcctaaatccaaagccccaaaccaatcctccactgcattatttccccagttaaacaaagttactcttgcggaccacccattaccgtaatccgagttaagatgccagtttaagctgattccgcagttgtcaggacaaggaagtttctttggataagccatgtgcttctgctttgcccatacctttgccttgagcgttcggttatcaaacggtaccaagagtgtgtcagtagggaggagaagctgtcgggcattggcgttgcaagtgtcggtatcgatatctttgcagccgcaagcgcaggtgttacaaggaatggccgagtcgttgtaaaaggctgagaaggagacgcagcaacgtgcagcttgtggtttaggcttggttatattgcagatgacttgccagctggcgatagcgtaggttgtggcttggagaccgctagggtcagggaacggggtcgcgtccacccgaataggtggtccgcatttgtacgtcggattcactataccatcaatcttccagtttcgaggaggaaagaatgctgttctgttctgatcaggtggtaccttgtaaacctaaaccaaacatcaaaaccggtttagttgtctttagacctaaatttagtcaccaaacactataaatggtaagttttgggggaaaacctgtaactggaaaatggctttggatttagaaggatccatgtgagtgggcaaaagagtgccattcttgcagcagaaaggcaatttaccggtgacattatcgtctttacgctcagctggtaaatctttgattattggtttcttctggcaattagcaacctgagagaaatcaagatccccgtagaactgtcccgccttgctgcttaagcattccaacgtgttcttctcggccgcgtaggctccacgcatcgagtggatgaactctcctcgcatccactcccatgtcaagttccaatggtctaaccgtcccagcgggctagtgttatctatagtcacctgtccaaaacaaatcaattttggattacgttatgtatatatgactctctcgaggttatattgatacaattgatggatccggcgactaacctgcgccatgtagctgcttgcataggcttgaagaacgtcgtagattatgttcaggtcaccgtgttgtctaggcatgaacttggttttcaccttttctttagctttaaactttgggttcctcttgcagcaaacttgcattgtaccgcctaccgatgaaaatataccgaaccaatcgaaaactggtcactacagattgtttcttctcgaacaagaaactaaggtttttttcatgaaataggtttcgttacctttagaagtagcagcagggcattgccatccatcgtttgtgagcttgatcgatttcggcatcggcgtagctgtacctttcccgccaaaaaccgttccggttatctcgatattggtcgagatctgagtgtaatcgccagctgtcaggatcgaggtctttaggtccgtattctgagacccgataaacgtagtaccgttggttgcatcgaccgggaagtcaccgtcagatgagacagctccagtcgcggaaacgatgatctctctgtgatgaaaccctacgaacatttgccaacctttgacctcttcgataccagtgttcacgatcatggccgttgatttaaaagaccaagcttgagcagtcgcgtttgtggtgcgaggatacaacttttctcggccaccggaactgtaagacatgtaaactccgttgcaacgggccagacctggcggtggagtatcatccttctttggttcatcgtagtcttgagccaatgataatgtcggaaactgaagattgattagaggtaatagaaggagaaggaggtttaaatggacgtaacggagcttcttcatctctatcgtgtttcccaagtttcttaggaacgcaagaaagagaaaacagagaaaagagagatggtaataaaacttaagcgaattagagaggcagagcataacggtttctcttcctctagttttcccctgtttctccggagaaacagagatattatacaaaagagaatatactaataacgttaatcagtaaatgtataagtaccaatttctgtatgtttgtcacattttttctatattctatagaaaatctggattagactgatccaaaccgcatattcctctaagttagttcattagaatttttttattaaactttttacaaaagttatagaaccctaattaagatttactaaagcaaccatgatatcatattcttacacaagactttgtgtgaacaccttgtgagcaccataaatggcaaacattgtttaacttgaggaataaagatttactaaagcaaccatgatatccatttcttttgtgtgtttattttattttctaatggtaagacaaacaacaattttaaacatatggtatttcatgtactgtatatggatgcaagcctaaggatctcaaactagtaaaataagaacaagaaggtatatgacccaaacaccatcatgttgcagtgagcacctaaggcttttaactcttgtttttgacaaacgattttacccgagaaacacaactaagaaactgagatctcttccatgccgctaatttcttcagtcagctgatgctgtactttgggctccaagtcgatgaactggtttgacttgcttgctagatgtgagatactaactcttccttgacgtttgatgtaatctgcaaccgcattcatctcttccattgatatgtaaatgtatttccctctatcatccatgacccccgagagccgccctgaacaaaagagaatgggttcagttcttaagcgtcccatcattgtttcacatcagtgtctcacctgcttattcctattgcttcgggtttactatacccatcgcaaattacagactgccagatgagacaaatgctctttttataattggatagagagaaaaataccaatgctctccaaagaggcgatcctgttgatgcattcctaagaggacaaacaattgaatcagactaaaaagccctgacaaaaggtattctttagttttccacataaatatgtagccagatgatacctgagtacgtagatgaaattctgcagcgagatcttcaagtggaacacatttctgtttctgcaatcacatcacacagcaaaaggaaggctcaacatgtgggtacattgatatgggctgaaacaacatttacatctatacttcattgtgagcgtgtttctattggcaacatttgtatctccactttacttttcgtttgtttatattcacagaataacgattagaatcgaagatcaaaaagtgtttggtatagggttattcaagatagatatacctttatgtattcaacaaattctgaaagcaaatcttgattcccaccttgcacttcctctgtagtaccttcagcatcaactgaaaattcccctttccatttgtcaaactctaacgcagctgcctcttcttctttggcttgtcgcgctttttcttcttcttcctacgtaacaatgtcacaattagccaagcccagtatttcaaaagcaggaagactataacaaaacgaaatctgagatgattgacctaccaacttcagctcttctgcctcgcgttcttcatccttcttcctccgcatttctgcataccaatcttgttttgtattccttgactcgcgtgtagcttcctcagcctataccaaaaaaaaagaacagaacttaatcaggaaagtcgtcccaaaagagatgtaatattctgccaatgctctatccttaagtcggaatctaaaactatcacaatgtaacttaccaactgatattcctagaatttctcatccttaatcctgccaaaaattctagtagaataaatagaaaaatctcacttgtctttgtgcttcccgctcttgtcgcttcttctctttcttctttgatgctctggcttgagttccaccagcttcatcttcatcttcatcttcactcccactgccgttttctgtttcacacatacccaataattttgttccaaggccaattgttcatttagttccaagacttttctaaacttaaactacattcacagcaagatagattacaaatgaaactaaaaagttatcgagtattcttgaataaatgatggtttcgagtgttcgctagctatagtaaactctaaccaataacacaactatctacataaggttgcttcaaattacaaagatagcagaaactcaatcctcaaaactcaaagagaaacaaaagctgtcaaatacaaaccttgaacattggatgtagaggagctagcaccagaagctgcaggtctcctacgcatcctccgtccaccaccagcacgtgccacgttttcacgaggttgaacctttgcatttcacatgaacaaccaatcaaatcccagaaggaaaaaaaaaacgagacattaccaaaattcaaatccattttcgcaaacaatgataaattacctgtggtggttcagcaacttcctcccgtgatctagcatctctccgacgtttccaaaagaacaaaggaatcaccgcaactatgagaatca

SEQ ID NO: 38415 - DNA, 3707 bp, Arabidopsis thaliana landsberg
  unsure (1)..(3707): unsure at all n locations
atatggaaaattagtaagtttttattggtcaacggaaatgaggtgtattaatcgaaatgtttatattggctgttgattttaataaggtgtcaaactgtaattaactgaaaaagctgaggtttcagcacaggaaagacttatagtgtttttatggtgttgactaaaaaaaaaccacaaccttattcaaacttatgaatgtcacgcagttagttcccaacaagaaaatttgttataaaaaaagctaaaaagatttgagtgtgatagaaccttccctttattttcgggatattattaactagtttaattttttttcactaattttaatgttaagattgtttaatagaaatctataccagtatattttccctgattattttggattctcgccgtatacatgaatgaatgatcatattactcttccgtaaccagagaaaaagatgctcaagggatttactcgctcaagcactagtcctcagttgtgcagcctttacttcaaaggtttggttggcgatgactcattggctggatttggggttgcaatttgcgggcatagagatgatatcttgtttcagatgaaaggaccaattcatcatgactccaacattacacctttggaggctgagcttaccgcattgaagcgaggactaaccgaagctgcgaatttggggatcactcatatctcaatatattgtgatgattatccaatttacgaatttgtaagttttcttttttgttggcttttaaggttcacatgcgtaatcatatagataacatgatcagatttacttgttttagaagctaacatgtacgactctttttataaagttaggtgttctaaagtttccacagtatttattnntttaagcacccaatagaacatgtgatctttctcccttctccttctcatgtgggtgtcacaaaataaaatatttcaatgggtgttcaggggttttaatctagatacttggtttggcctttggaatggtatcaggtcactggggggatatttcggtcccccagaagccaagaataacccatcgccttgctaatggatgatgtgcaatgcataaggcgagaactgacatctagcattcctgttactgtgactgaaaatcaagccaagtttgcttataagtttgcaatggaatcaataagcatacgtgcgcctcctaccgagcagaaggcttgcggtgaggttaatatcgaacatgaactgatgttttctgttgctttatgccgtcatcaattctgtgtagagtggatgaaacaacatatagaagtgagactaatcgagggagatgttccgagatgccctcattatcaatgcgagtccaagttaaatgttgtacgctgtgccaatcttttgactccggaactaagagagatgtgggaacataggatcaaagaggagttcatccctgtatgtgacagatttcattgcccaaatccaaggtgttgggctttgatgtcgaaaaccgagctcgttgagtctactgaagatggagttaggagatgctgctttaaatgccgcaaagccttttgcattaactgcaaagttctgtggcatagtgacttgtcatgcggtgattacaagaggttgggttcaaatcctaatgcaaatgatatgaagctaaaaattctagcaaatcagaaattgtggcgtcaatgtagaaattgcaaacacatgatcgaacgttcggaaggatgcatcaaattaacatgcaggttttcgtcacattctctagctgttataacttttaaaaaaaatttgattatgtttctctcacaattaataacattgtaataatgtttatgcatggttgatgaataggtgtggctattcgttttgctacatatgtggtgccgaatggaagcaaggaggttgcactcaccgccgagcggcaatcggtacttttatcttagttgttattgccgttttaataattgatctatattttatggttaacgctagacttaaagtagtttactaatcagtttttttacattgttcatgttgaatactaataattaaacattatcaatagtttaaaaaacaatggtgaagcatatcataaaaaggaaaaaaaaatgacgagtgaaataacaaagagagatctttattgctgtagaatgtagaaaatcttcttctttcactcttcatgagcaagaggaacagcttgagcctgcaagagaaataagagactttgagatattactgcaccagagacaacaacactaagaagggtctaataaaatgtggtaagaagagagagtgtataccagtgggcggtacttcagtgcgtagaacatctcaaggtatcgacgactctcaagacggtcaaggttcgagacatgtttccaaaagccgtagacaccagtcaatgtcaagagcctctgtgagtatatttgccaagtatatctacaaaaccccacgacaagattaatgttaaaaacattcaaactataaaaaagaagaacacacttatagttttatacttacttctcctggatcctctcaagtcctcccaatgagatctgatcccagtgagatgggtcatgcttacacttggtgaagaaatcagcaagactctcagctgccttgtcaccatgatatggatcaatgtggaaaccagattttccatgcacaatgatctcagcaggaccgccattacaagtagcgaaagtcggtaacccacaggtcatagcctcaacaacagtcaacccaaaggcttcataaagagcaggctgcacaaatgcacctttagtgtcacatatgtaacggtaaagctcaccgtttctcactctgttcatctgtgaagagatccatcggaattgcccgttgagtttgtattcctctatcagttcatacattttcttcatctcggccttctcttcgttgtcctgtgactctttcctcctgtctccacccacaaccaccaagttcaccagttcgcgcaagcgagtgttcttaccgtaccactcaacaagacctgataagttctttacacggtcaagcctagccatggtgaaaattattggcttcttcttgtccttaagcacacatctgttttcaagtataagcataaataatgttaggttttttttcgtgacatatttaaagatcaagattagtcatataaaaggcttacaagtgctcttcgttttcaacatcactatagaggagctcctcgatctctagatggaatgcagttaatctacgcttctcctcggtgtaagcgaagtagatgctcatatctgctccaggagagacaatgttgaactttggatcaaacacatcaataccgtgaactacacggtacaacccgggaagtgtgaaagatctgtggctctcatattgaccaacagtgtccttgctataaaagaaaagaggttgcttttaactcaaacgttaaaccaatggaaattgtagaaaattcttgttttcttgagactcaagtcttctctctttaccttccagcaatttcttggaaagtacttgtgatgatgaaatctgtgtggttcatggcgataagatcagccgtgaactggcaagaaaagtgatacttctcgtcgagcttcttccagtagatatcagaatccgggtacttagtcttctccaaagcatgagcgatggtgcactgtgtaataataaatcaaaagattcttagctttagagcaagacaacatatttctcaatggctatggat

SEQ ID NO: 38416 - DNA, 1390 bp, Arabidopsis thaliana landsberg
gttaactgttcaaagaaccctcctgtatcgaaagcaagaaaaagaacaccttctcctagttgatgtttactaagatgacttacttgtcacaggttctagtttggagttgatagtcgagttcagaagaggaatgccgtctaagttcgaaatgagtgatctcgagacattgacatattatcttggtatagaagtttgacaaaaaacataagacttctccaagatattgacgtaaatgaggcacatgagattgaggaattttccaaatagatccttgtagtcggcgaggagaaactaaatgagcctaacgatggaataactcagatccaaataccagatgatattcttattcctgatggagacaaccctatagaatcgatcattaaagcagtttatgatacaacctttgctcaagagaaatctcctacgtttttccaagacagagctattttgtgtccctccaatgacgatgttaactcaattaacccaacatatgctttccaagctaacaggttagtgaatgtccttttttcattactcaaaagcatatatatacatataactttatctgctgttacggataagtgtatatgatattgaactattatttttttcaggtgaagaaaggatttatcgaagttctgattctattgatccttctgacacacgtggagataataacctcgtatatacacctgattttctcaataaaattaagctttctagagtacctaaccatatattttggttaaaagttggttgcccgttatgttgttgcgtaatcttgatccacatggaggtttgatgaaaattgtacaaggcttcagattgttagacttagagataaagttttgcaaggacgtctattaatatgtataagagttggtaaattggtcgttattcccaagatgctcctaactcattgggatagtatattaccctttaaaatgggattgactctggtacattacccaaactatactgattcttcagtatacaccctaaactttttgcttcttttttatacaccataaacaactttttgcctctattaaacatcgcgaactatagattcttttttaattgcaacatagtgattctcaattgtgattaggtttagtgaatcgataattgcgtttagaaacccatgattaccttaaataagcaaaaccaataaacccattaatttttgttgagaatttcttcaatacacgcttcttgtatgttttgggattttgtctttgttttcaactagactgattgttataagcatcagagtattgaaagatagagaaggttctgaataattctcttactaagactgaaacgaatttggtatttttataccttacaacagaatgatcgaaggaaactcaactcacctaaatccaaa

SEQ ID NO: 38417 - DNA, 6395 bp, Arabidopsis thaliana landsberg
  unsure (1)..(6395): unsure at all n locations
aatttcactttcccttgtgtaatcaaaatttgtgaaggaattggtgataaacacagaaacaaaaacaaaagcggtatttacaaagggttttggagtgttacctcagtagaatgtcctggagatgtagtcatccatatctgcttgagtgtactccgcatgcatgacaggttttgatgtggctcggccatctcctcgtcattgtgctagatcgcaaccccagcaggttgtggagcacgatgatcatgtgttctcctgcccgatattatccggcctttgcttgatgaatgtacagttctagcactcttcctcctcttgttttccattggctcatgagacggggaacttgtagaacggtgtgatccctatgtttatagtaaattgccttggcggagcaatgtcatggtgggtggatgacatgtcttcaggcgggttgtcattgaagtcatgtcgggcattttcacttctccttgcgattaagtggtttgggcaattccactaggagaccacttgatcacaccattgccatgttgcgatcgagtggtatgacattgtcgttgagaatgatgttgtcccaaaaccactagatcgcactctcgagcttttactctcgtcttgcgatagactaattcatcaaaaatttgaatttttttatttgaacactcagttgcatgcctgttgttgctccagctgtttttcatttcctgagaatcaaaaacaaaaccaaaacaaatcaaaagtaacaaaaataaaaactatatacaaggataggcatgggacttcctcccaagtgagcttgttttaagtgtctagcttgactcctcacactcattaggctcaaggagggtgatagagtagaattgacgtatcctctccttccttagtagatacaacatcaaattcagcatgctctcatgacaagtctgtaattgagtactcaatgaccctttcttggtaagctcctttttcatcatctggatagtcgtcttttctggactgttttgatgtgaattcacatccttcttttctaaccataggactaacttcatcatttgggacgtccttgatgtcgagtggagcttggttggctttcccatggagctctttgacttgatccttcggctctttcacagtgtgtgttagctctcttatagcttagccgtgccattttgacctctccttgagtttaaccaatcatttgatgccctcacgcttgactctagctgtttggttgagcattctagtcgagtattagttgagccttcctcgttcaatgtaacatcctctgtttctgacgcaatgacacctttaaagatctctgatcctggtacttcgttgtgtgagtctaatgacatctcatagctcaaggtctcactggagagaaatccagcttcactacttttagttaaagtagtttgaaggtgatctctgtcaacaatctcctctagcagttcattacctagctgatccatttcctcaactaagaaggtttgtccttctattgttggcttcttcatagcgtccctgatgtcaaacttcattttgacatcctctcccagattaagattaatttttccttgcttaacatctattactgctccaactgaagccaagaaaggtcttcctaagatcagaggatccttagattcttcatccatctcaagcacaacaaaatcagtaggcacctctactccattaatcattactggcacatcctctaaaaggccaaaaggtctctttgaagtcctatcagcaagaatcaaggttagatcacaaggcttgtattgaacgaatcccagcttctttacaacagagagtggcattaagctgactgaggctcctagatcacataaacaattgttgaaagtcaattgcctaatggagcatggtagagtaaaagatcccggatcttccaacttttcttgaataatgttcttctggatgattgcactacactcgtgaggtaacgccactgttccttgaacttctttgatcctctctgtaatcatgtccttcacacgtttgtgtgagtccggtattagcgcaagacagtctactagaggcattgtgatttcaaggtccttcaattttttttccaagagagcttcatacttctttatcagttgcttcttaaatcaccctggaaatggtaatggaggcttgtagggtggaggaacaaagactttatccttggttttagcagatgcaggctttttaactgaagaaagtactacttgagcttgggatcgagtactgtgatcgagtatgggctcatctaatgctattttagcttgtatttcattctgaacaaaatcctccccttcttgaactttactgcccctagtgatagaggtagaggcatgtcgagttggcagctctcgatcatggcatatattgatggcgtgagcagttgcatactcctttggattctgtatggacttccctggaagtcctatgactttaggtacagaggtagatgctgattgtccttccaaatatctgactttggtattcaatgcctccactttggcattcaggtcattgtagttgcagtccagcttatggtgcaattcggataattttttaggaatttccattgagcttgatgcttgtccctgtagcagctgttgtaccatctgtttcatttcagcatcaggagcagcaggaccttggttttgctgaggtgcaaacccaggtggtggtggcggctggtagttcccctggaattgctgcttgggatagaaaccttggttgtagggaacaaaaggtttgttctgaccttgttgttgctgtggaggatacacatgatcctgaggattagcaacgttggtgctgcggtaggagaggttggggttgttggttttaaagttgttgtatcctttgtagccaccttggttgttgttgatgtagctgacttcttccggctggttaccctccccatcttggacttgaaactgctcgtcatcaacaaggaagtgtacatgcttctactggctaagaagaatcctgttcagcttgtcattcagcgctttgatctccttcttgtgtttgtcatcagagtcagctgtgcgtttgacggtcctatcgcagtccttgttgtaattgctgtatgattgaacaaggttctcaaccaattcccagcttcttcaacatccttgtctggaaattcccattgctgcggtatccagaagcattctgatgcgtgctaggactcctctgtaatgtgtgctgagtagagaggctttagtaaagccatgatgagggcattggttggtgtaacccttgaaacgctnnnnnnnnnnnnnnnnnctttcaccagtcttctgtgagaaaccagaaatctcatttctgagtcttgcagttctggcattggagaagaactttgatagaaaagccttcttgtaatcatcccaggtggtgattgagtcatggggcagattcttctcccagatatgtgctttgtcacccaaggagaatggaaacaaacggagcttgaatccgtcttcactgacaccattgatcttcgttaggttgcagagcctatcgaattcatcaaggtggtcgagtggatcctccattggcaaaccatggaatttgttcccctgaatcatcgagatgagaccactcttaatctcgaagttgttgttctggatagcaggaggtgcaattcccttcctctgacggtgatcacgtggtgcatctccagcaccaatgttggcatggccattttgttgattctgttcttcagccataacgagtggttgctgaggtacagggttgactgtggttctcctttttctgagttcgcgagctgtgcggttgatgttgtcgttgaaaaggaggttctgattgcctgttgatcgagttcgcatacagtagaggtgtacctggatcaagaagacaacaagaaaaacacacagttagtaactgaaaagaaaattgaaaaagaacttgatctaagcaagtctgaaatctcaaatgtaacaaacaaacacccaattggcaacggcgccaaattgataataggtttttagtcaattatcctaaaacaccaatcatgtcattgtagtattttaggttgtcaatccaaatgggtgtgatgctaacaatcaagatgtgatcagaagtcactaagtcaagccaagcaataacaggttttggtgtgttccagcagtcctaagtgaacatgcagaaaacagaaaatcaaacagaaacagtaaaacactcgaccacctagcaaaccagacagagaatgtaacaggagtactcgattgcacagtctgttgccagacaattgggtggtcaagtgtcagagtgataacaggcgaaaaatgcaaaaactaaacaagaggcaataaaaacaagtaaatgatagcaatttaagcaaagaaatcaaatggaatagaaattcaagagcatggggtaattgagtagctaagtttccttaatctacatgtgattgacatgcacaatacattgtctttacacaacaagttcaataaccaaatctaagtgccaccgcaacaaagatcctcaagttaaactagtcccagactcaatcgccattgacatgtgctaacctaacaggcattatgaatcaacaagttaaagcaaaaacgctccttgtgaccaataccttcgtacaaagccacgtatcactggaattagtggttcagacatttcgtcgaacactttttgggtggggaaatgtctgggcccaaattccagttgatcagaaagcaatttgcattaagaataactaatccagaagggatatataaatcaaactcaaccacctagcaaaccaaggattttaagctactctaatccatcctcagaaacatagtcactactcagacttcattacagataaaataaacgatgacatgtataaaaacatcatagcaacagagtaataacaagatgataacaggatgaacaacttagtaaacgaaatgaaaagcaaatattgaatagattaacagaaatctggattacaaaatgtcaagaacacaaactgtctgcagaataaaacttagtctcgagaataaaagatacatcctacatatagcaaaatattctaaaaccctaatattcaaaacggcacagtattgggatggattaagaacagtactcgaccctagtacttgagtgatgggtcgagtgatgagctggagccttcatctcttccttatgctcgaatgtctggtttagtgtggaatggagaagactctgaagctagctgtcgagtatgatgtcgagtggtggatgatggtggtactcgaccatgtaatcgagtggaggtgatcgagtgaacgtcgagtggtagagtttgtgatactcgaccagggggtcgagtggtggtgagaagtggtgatgccttctactcgaccagggggtcgagtggtgaacaagagtgttgcggtcgagtgactagctgcagaggtcctgacaaagtgcttcagaaagtccatcttccaattagctcgccaacgactccaaatcaccttaaaacaacgcaaatatggaacatggatgcacaactatcttaaccatgcaatgtgatgacaaatgatgagaaatggtataaaacagtggtgatatgatgctaaagtgaatacaaatggatgctcaaaacatgtaaaatgcacacttatcactactcttaacgagatttgtacatgaaaaatattcgaaaacaatgttctaacaagtaattttaggtccgtaatatagcatagataatggaaaggtccgaaaaaatacttaaaggtaaaaatttggagtcgacaaaaaatcaatggaagaattccattgtcctgcttctttcgtcggagggctatctttctgcttatgagaaggggcatgaccatgccaagagaggaaacactttcttttgggaacttctctcaagatccatagcagatcttgttgcacaggtactatagatagatacgtctgctgatttttgcaaaaaatatgaaacttaatttccattttacttgtagggagagactgaggaagagaagcttgattcttacgatatgcacttttacgctccgagtgctgatgagatagaaggtgaagtggacaaagaagggtcttttgaattagagaggttagagatgttagaagtgaagaaggacaaagggaataacgagggtgatataagttatggcaaggcggttgcgaagacggtgagagctggtcacgaatcactgcttgctcaacactttggggaaaagattcttgacaagctctttgatacatattggagaatggttgacgatgacttagctaaggaatacataagacccatcacatttgttgttgtactaagaaagaagctctgaaactgaaacactgcaacatatgtatgtagcgtttattccaaaacc

SEQ ID NO: 38418 - DNA, 293 bp, Arabidopsis thaliana landsberg
tttatcattgtaaagagaaggaaaggggatacctatcacatcgataggattataaatccaatattatttctaagcaataccaataaacaatgagatcaaagagatataatgttcgatcatgtaatattaatcttgacaagaaattatctacatgataagataaaatgtgtatcacaaacacaagggctatagctcacgctaggtagagcacctcgtttacacgtgcgccaaagtttttcagaggagtccatcacgcaatcaaaccacttgattgatcttattaagaaaacgat

SEQ ID NO: 38419 - DNA, 12655 bp, Arabidopsis thaliana landsberg
ggaagagcctgctcagcaagatcctgagtcgccggatactgacaatccagctaacagccacccttcgtctcaagggaacaacttccaagaggaagctcctgggacattgcgggagcttcaagaagactcggcggtggctctgcaagatattctctcagtgccaaacagggagcagtggacttgtgtattgtctccaattcctaggccaaaaaccgtgtggtaagtctatcttcctttaatttgttttcgtgttatctgcctttgtagtgtaagtagacttgtgaatcctgcaagatagttgtgaatgatgggttttgttgcatgtttgttatgtgttgtgtaacatagtagccttgtgaatactcgtgtgtgctcttgtcaatactcgtgtgtgttcttgtgaatacttgtgaatacttgtctttgcttcgatttgaatactcgtgtgtgctcttgtgaatacttatgaatactcgtgtgtgctcttgtgaatacttgtgaatactcatgtgtactcttgtgaatactcgtgtgtccttgttcagttctatacttgtgaatcgtgttctcttgttaatcgagtctcttgttaatcgtgttctcttgatgttctattgtggaagttgactttgatgtctgttaattgtgttctgttgctactcatgctcttgttatgttctatagtatgttctcttctctactgtgttctgttgcaactcatgatctattgttgaacatagttgacttttgaacttagttgtgttatattttgttgtgtgcttttgacttttgaactcatactcatttcttattaattgtgttctatactgttgtgtgctcttgttcagttctatagtgtatgttctgttgtgaatctgcctcagttctgcctgtgtagtgtgtaacatagtagacttgtgaatctccctcagttctatagtctgttctcatagctgttgttgtgttttgattttttaacatgtttacttctttcattgttgcatgtgcttggaggtttactcgcgacagaggatctaaactggttagaaagatcacaaggatctttactcaaaagttcaatgctccttactataaatggtcctctgtgccattggctaaaagagagagactgtttttagagttcgcggtaagcttcctgactctttgttttgttcagtctttgttttattgtctgctcaagttcagttcactaacttcttctttttttgtataaaactcaccactgggatcccttaatcatagggactgtccaatattacttcaatgagatcatcaagaggcgcttgaaggacatggtttgcaccgcaaggagaactcgagagcagcctccatggattggagaaactctgtggggaacaatgtgtgcttactgggacacagaagaagcccagaaaaggagtcagacctattctaaagctcggctctctgaccgtaatgatctcggtccacacatccactactttgggccaaagtcttatcaagaaatccaagatgaattggtaagtgtttcagcatcctttcatgtcttttagagtcgttcaaatcataagttagagttttattgtgtgtcttgttcagttcaagcagtctttgacttgtgaggatattgatctgtgtttgtgataagtgtgtattttgcatgttttgagcatccatttgtcatcactttagcatcatatcatcactgttttataaaatttcacatcatttgtcatcactttgcatgtttaggatagttttgcatgcatgttgcatatttgcgttgatttcatgtgatttggagctgttgacgagctatctggaagaagcggacctgatcatgacaaaccactcgacccagaggtcgagtaggagcttcaagatctcaagagaccactcgaccaccaggtcgagtagaggacatcactacttcacttcaccactcgaccacgaggtcgagtgccctcgtttccatcactcgatcacttcactcgatcacttcactcgaccatgaggtcaagtgtcttcaccttcactgccagaccactactcgaccacatcactctgcctagaggtcgagtacctccatcacaccactcgactgcatactcgatgacaagcttcagagccttcttcattccgcactcaaccagacactcgagcacaaggaagaaaagaagactccagctattcactcgacctctcactcgaccacctgggtcgagtacagttcttaacccgtccaaatacttcgtcgttttgagtattagggtttcgggatatttggctataagtagcatgtacttctcattttcgcagaaaagaagtttttacctagttttatttccgcagaccttgtgttctagactttttgtaatccggatttctctttatctattcagtattcagcttttgttcttgattttgtttactgtagttcattctgttatcatcctactgttacactgttgttagcatgttttcaacttgttcaacgtttatgctttctgttatgatgtctgagtggtgaataggtttctgaggatgggttagagtagtgtagaattctcagtatgctaggtgattgagtattgattgatagatcccttatggattagttgttcttaatgcctattgctttctgatcaactggaatttgagcccagacatttccgcgcccaaaaggtgttcgatgaaatgcctgaaccactaattccagagattcgtgaccctgtaccaaggtattggttgcagggagcgttttggctttaacttgttgattcgtaatgcctgttaggttaactctcgtcaatggtgattgagtctgggactagattagcttgagagtctctgttgcggtggcacttagatttggttaatgaacttgttgtctagggttaatttattgagcatgtcaatcacctgtaaactgaggaaacgaaactactcaattatcccatccttaggaattctttatctaattgattttattgtttactctactactgtttactgcatcctgtcatctgttgcttagtttctgcaattctttactgttactcgatctgatactcgaccacccagttgtctggcaacagactatgcagtcgagtatccctgtttcatttcctgtctgttactcgacctgtcactcgacctcacccagagctctacaaagagctgtgttggtcgagtgttttactgtttctgtttgattttctgttttctgcatgttcacttaggactgctggaacacaccaaaacctgttatgcttggcttgacttagtgacttctgatcacatcttgattgttagcatcacacccatttggattaaaaacctaaaatactacaatgacatgattagtgttttaggataattgactaaaaacctattatcaatttggcgccgttgccaattgggtgtttgtttgttacatttaagatttcagacttgcttagatcaagttctttttcaattttcttttcagttacttactgtgtttttcttgttgtcttcttgatttaggtacacctctgctgtatgcgaacccgatcaacaggcaaccagaacctccttttcaacgacaacatcaaccgcacagcccgcgaactcagaaaaaggagaaccacagtcaaccctgtacctcagcaaccactcgttatggctgatgaacagaatcaacagaatggccatgccaacattggtgctggagatgcaccacgtgatcaccgtcagaggaagggaattgcacctcctgctatccagaacaacaacttcgagattaagagtggtctcatctcgatgattcaggggaacaaattccatggtttgccaatggaggatccactcgaccacttggatgaatttgataggctctgcaacctaaccaaatcaacggggttagtgaagaaggatttaagctccggttgtttccattctccttgggcgacaaagcacacatctggggaaaaaatctgccgcatgactcaatcaccatctgggatgattgcaaaaaagcctttctagcaaaggttttctccaacgccagaactgcaagactcagaaatgagatctctggtttttcacaaaagactggtgaaagcttatgtgaagcatgggagcgtttcaaaggttacattaaccaatgccctcatcatgacttcaagaaagcctctctgctcagcactctatacaaaggtgttctaccacggataagaatgcttctggataccgccatcaatggaaatttccagaataaagatgttgaagaatgctgactcggaccataacagctgactcgcatggcaaacacaagaaggagattaaagcgcaaaatgacaagctggacaagattcttcttagccagcagaagcatgcgctcttccttgttgattatgatccgtttcgagtccaagatggggagggtaaccagttggaagaagtcagctacatcaacaacaaccagggctgctacaaacaatacaacaacttcaaaaccaacaaccccaacctctcctaccgcagcaccaacgttgctaatcctcatgattaggtgtatcctccacagcaacaacaagggcagaacaaaccttttgttccttacaaccaaggtttcattcccaaacaacaatttcaggggaactaccagccgccaccaccacctgggtttgcacatcagcaaaaccaaggtcctgcttctcctgaggctgatgtgaaacaaatgctgcaacaactgcttcacgggcaagcctctggctccatggagatggcaaagaagatatctgagttacataacaagttggactgtagctacaatgatctcaatgtcaaggtggaaacactgaataccaaagtccgatacttagagggacatgatctgcatcttcttcagctccaaaacagacaagccaactaccagggaaagtagttgagaatccaaaagaatatgctcatgctatcacactgcgtagtggaaaagtacttccaactagggaggaaccaaagacagtcactgaggacagtgaagatcaagatggggaggatttaagtctcgagcaaccactcgagcaaccactcgaccgtgctactcgacctatcttcccagcagaatcatcaactcctccaaaaccagttgccgtcaaaaataaagaaaaggtctttgtccctcctccctacaaaccgcagcttccatttcctgggtcgtcacaagaaagcgttagtagacaagtatagagctatgtttgccaagaatattaaggaggttaagttgcggatacctcttgttgacgctctagcgctaatcccagactctcacaagtttctgaaagactcgatcgtggagagaattcaaaaaatacagaagaagatcattcctaagaagcttagtgatcctggttcattcactctaccatgctctttaggtccattggctttcaacagatgcctatgtgatttaggagcatcagtcagtctcatgccgctctctgtcgccaaaagattggggttcactcaatacaaatcctgcaatatatccctcatcctagctgacagatcagtaaggatccctcatggtttgctcgaaaacctaccaatcaagatcggagctgtggagataccaactgactttgtagtcctggagatggatgaagagcccaaggaccagttgattctagggagacatttcttagcaactgcaggagctatgattgatgtcaagaaagggaagattgatctaaaccttggcaaggattttaggatgacctttgatgtcaaagacgcgataaagaagcctaccatagaagggcaactcttttggatcgaagaaatggattagctagctgatgaggtactgaaagagcttgcacaagaagatcaccttaacagcgctttaaccaaaagtggtgaagatgggtttccgcacttggagactttgggatactagaagcttttagactcacataaagcaatggaagaatcagaagcgtttgaggaattgaatggaccagcaatagagataatggtgatgagtgaagaagggtcaacacaagttcaacatgctcactcgagtacatactcgaccagtcactcggccgcaacagccagcgactctggggagctgatcattccgacttcaaatgactggtctgaactcaaggctccgaaggttgatctcaaaccacttcctaaaggtttaaggtacgcattccttggtccaaactctacttcatccgtgatcattaatgatgagttaaatgatgatgaagtgaacctgctattatctgagcttagaaagtataggagagcaattggttattcattatctgacataaagagaatttcacctagtttatgcaatcataggatccactttgaaaacgaattctattctagcattgaaccacagaggaggttaaatgctaacttgaaagaagtagtgaaaaaaaaaattttgaaactgcttgatgctagtgtcatctaccctatctctgatagtacttgggtttctccagtgcgttgggtccctaaaaagggcagaatgacttttgttataaatgaaaaggatgaattgatccctactagaactataactgggcatagaatgtgtattcattatagaaagctaaatgctgcatctaggaaagttcattttcctttaccattcattgatcaaatgcttgaacgcttagctaatcacccatactattgctttcttaatggatataatggtttctttcaaataccaattgaccctaatgatcaagagaaaactactttcacatgtccttatggaacttttgcttataagagaaggccatttggtttatgcaatgctcctacaacatttcagaggtgtatgacctctatattttcagatttaatcgaggagatggtggaggtcttcatggacgatttttcggtctatggcccctctttctcctcatgtttgttgaatcttggcagggtatagaccaagtgcgaggagatgaatcttgttctcaattgggaaaagtgtcatttcatggtgaaggaaggcataatgtttggtcacaagatatcagaaaagggtatagaggttgacaaaggaaaaattgaagtgatgatgcagttgcaaccaccaaaaacggtgaaggacattagaagtttccttggtcatgctgggttctacagaagatttattaaagacttctccaagatagccatgccgttaaccagactattgtgcaaggagatcgaatttgatttcgatgaggactgcctcaaatcctttcacaccatcaaggatgctttggtgtcttctcctgttattcgagctcctaattggaatatccattcgagattatgtgtgatgcatcaagttacgcagtaggagctgttttaggccagaaaatagacaaaaagcctcacgtcatatattacgccagccggacgttggatgaagctcaaggaagatatgcaacaactgagaaggagctttagctgttgtattcgcatttgaatagtttagaagctagttggttggatttaaagtcactgtctatacagaccatgctgctttgaggcatctgtgtgccaagaaggatactaaaccaagactgttgagatggatacttctgttgcaagagtttgacatggaaatagtagacaagaagggcactgaaaatggttcggctgaccatctgtcaaggatgagaattgaagaacccattccgatagaagactcaatgccagaagaacaactcatggttgtagaattcttcggtgagagttacagcgggaaagagttccaccaactgaatgctgttgagggaagatctccatggtatgctaatcacgtcaattatttggcatgcggagtagatccccccaacttgaccagttatgaaaggaagaagtttttcagggacatacaccattactactaggatgagctttacctttacactctttgtaaagataagatctacaggagatgcgtctcagaagatgaagtagaaggtatcctgctacattgccaccgctctgcatatggtggccacttcacgacatttaagacagtgtcaaagattctacaagcaggcttttggtggccaacaatgtttaaggacgctcaggagtttgtttcaaaatgtgattcatgccagagaaagggcaatatcagcagaagaaatgagatgccttagaacccaatcttggaagttgagatctttgatgtatggggaattgattttatgggtccattctcatcttcatacggtaacaagtatatactggtcgccgtagattatgtatcaaagtgggtcgaagctattgccagtcctaccaacgatgcaaaagttgtgctgaagctattcaagaccataatcttcccgagatttggagtttcttgggtagtaatcagtgatggtggaaagcatttcatcaacaaggtttttgagaacctcttgaagaagcatggagtaaagcacaaggtcgctactccctatcatccacagacgagcgggcaggttgagatctccaatagggagataaaaacaattctggaaaagactgttgggattacaaggaaagactggtctgcaaagctcgatgacgcattatggacttacaagacagctttcaagacccccattggtacaactcctttcaatcttctctatggaaaatcatgtcaactacatgttgaactcgagtacaaagcaatgtgggcggtaaaacttctgaactttgacataaaaacttctgaggagaagcgattgatccaactcagtgaacttgacgagatccgtttagaagcttatgagagctctaaaatctacaaggagagaactaagcttttccatgacaaaaagatcatcaccaaggattttcaggttggtgatcaggtgctgctattcaactctcgtttgaaaatctttccaggaaaacttaaatccagatggtctggccccttctgtatcactaaggtccgtccttatggagcagtcactctagctggtaagagtggagacttcacagtaaatggtcaaaaactcaagaaatacttagcagatcaaatccttccaaaggtgacatcggttcatctccaggaacttcttgatgattaaaggagtaaaggagtcaagctaatgactttaaacaagctcacttgggaggaagtcccacgactatctctgtaaataaatttttattttcttgttatttctgatttgtcttagttgtgtttgtggttctcaggaacaaaggaacaacgtggagatagagtaaaaattcaaaacttttactctacagaagacctggagatcgagtgtatagcccgttggaatacaaaattttgaaaatcttctgttgcacctggagaccgtgcactcgagtacattggtcgagtatgtgtgatgtttaaaacccaaaaatttttaaatcatcattttactcgaccaacagaaggtacagaatcttatctaaagagtttatcaagtttacagaagattgcaggatttccttgggattttacagtgaacagagagcatagaagaaagacaagaagacacagtgtgacccacaactgacgcccatgtcctccatgcagcagaccaagagacattgaatctcttcacaccccatcccttcactcgatctccacgaaaccccatcttcaccttacccactcgacttcttctccttcactcgacctcgttttctcctccataacccaataaactcgaccccatccctcttcattcatcaccaccaacaaaccaaactctcatctctcttctctcaaccactcgaccccatccttcttaaatcaacgctcccttttcttctttactcgacctcgtcatctcctcctcaccacctctcattcatttcgttcactcgaattcgtcattccccaacatcaacaacgtcactcgattccttatcatcatcttcttcatcgcctcatcgctcggccacaactctcttcacctctccatcatcaccgcttgccccctctctccaaaagaacaactcgacctctaccccaagaccatcactcgaccgccgcagctcacttcttcaccaaagccaccaccgtcttctcttcttccgcgagttcaacatcactcgagttctcatcaccattgtcattctcacaagcttcattcgatctcttcacctccatcttcataaccgagtcactcgattcactgtatctctctcatcatcgctcactccaattctcaccaagtactcgatttcaaaccatcaacaacttcaccgctttactcaattcactcgacttcgcggctagagcacatccgcctttcaagcccacattcgtcactcgaccgctcctctcctgcctttcacagccactcgacctcgccaagacacaccgcctcaccatcacacgactgccacagaattcactcgacctaaccggaaaaaaaaaaaaaaaaaaaaaagttttttggtacactcgacctgtttttggtgtgtgtggtttgtgtttctggttttgttggaactaacgtattaacgtttatttttgagttacatctgttttcaggttccgtaatgagtaactacagcgaagaatcctctatggaccctaattacaatgtggatgaagctgagtcctggtctgctagaccgagagaacaacatgtttaccagagcttcagggatgaattcgaacgctctgcagcccgacgtaatcagagaagggctgaaatcgccagaggaaagagggcgatgtcaagtaggtatgagctgattgatgaggatatcgaaagtgagtatgagcccgagtcatggcgcaaggagacgaagctgctgaacaaacctgacgaggttacagtggaggagtatatcaggttctttgagataaatgatttctggggaacgcggtattcgtgctatgagactttagcccagctggggttactggaggacgtgcaggatctgttcgagaagtgtcacctggagacactcatgtcttatccttaccctgcctataaggaggagacaatcgagtttctttccacgctgcaggtggagatgtatgaggcactaacagactttgagctggataccatggggttaggcttcttgacattctcagtggatgaacagcggtatcagctttcgatcaagaagttggaagaactgtttggtttccctagtgggaagggaaccaaacccagatttgacagagaggagcttaaggatttgtgggccactataggcaacaatctaccgctaaactcggcgcggtctaagagcaaccaaatctggagtcctgtgatccgctactttcagcgatcggttgccaacgtcttttactccagggagtctacaggcaccgtgtctaacacggacatggagatgatagattatgcgcttacagggattctccgccggacgaagggaaagaatgtcttgagcggcgatctcaacaacgcaccaccagtaatgcctctgttgatccatctgtgtggatacaggaagtgggcgttgacgaacggaaagaagaaggtgagaggagcactatgcgtgggtggcgttgtgactgccaattttgcaagcttgtggagtaccgctcaacgaaccagggttagcaccgaggatgatgaacttagatcatttgcgccgatgtgatttcttggagtttgacatggctggcgactttcaccgctacaggttcgagcattcatcgattaaaatcgccaacattcttctcccctgcattgatgctactaggattctcgagggcaggaacattgacttcaagcctgcgcttaaagatctttatttcgagggccgtccaccaactgaggagatcagtcataccgaaggagctacaacagaagatgttgatgagacggatgatatagatgaggcggagtttgacacgagtatgtatcatttcagtgagcatatacctcctgcgagggaaagcaagagtttgagcgaagctcacaggaacaacagcaagctgcagaagtggtgcaagaaacaggataagttactcgccaagtgcctcagggctatcaagtttctggaggacaagatcagctgctcctcttccactacagcaattctgtagggacagctccctcatgacatgccttcgaggagatatgacgcgcccgagccaagtcagcgcaggcctgagcctagagagcaggagattcggcatgtccctgcgaggcattcatcattcgagcctcgtgaatctgggaggaagaggaggaccacactcactcgatctagcagcaggagcagaccacttctgcaaactagtagtttactcgaccgcggtgctggccacagcagaaggagagaggtcgagtatcctcagagcggtgttggccgccacagagctgatgaggtcgagtacccacctgctggagctgatacagaacaaggcggttcgtctatggcctgagagcaatcacaagcagccattgacgagcaactacgttcattcttcgactggggtaagcgcctcaatttaccattgtattatatcatctgttgtgatttgtttcttcattttgtttctgtgattggatttgtcctgagtactctctaaaaagaatattcgcacagtggactgtgtgatttaagtttgggggagggctcaggaagtgtgtgagcattgtgt

SEQ ID NO: 38420 - DNA, 1665 bp, Arabidopsis thaliana landsberg
ataagaagcccatagcctactttagtgaaaagctcggtggtgccacattaactatccgacttatgacaaagaactctacgctttggtcagcgatgtagtgacccgcataagggcattaggcatgaccattggaccgaatgagaaagttttgcccgaatgcaaagctaattgactgcatatgcccaaacggtgccaaaacttcaacgggcaaagatgggcaagaatgggcacagtgatgtttgccccgccgtccgcggaaagatgggcaaagatgggaatagtagggccttcaacgggcaaagatgggcaaagacggtaaaagtagggcgtgccacggtgatgtttgccccgccgtccgcggaaccgacatgggtaggacacctcacacgcggtgccttgcggctcaagtaatcaatcttggagccgaagttggctgggtcttgaagccgaagctgctggggtggtggagtgacacccatcgccactagttgccacgccatcacccgagacaactatcgcttgttggcgtcacagctgtccggacataaggcagcaagcagtgcattctggccgaccttgggcgggatataaatagagctttctgcgcccaaattcatttctgaaggcgagagagagagagactgtaaggctgtccgatcgttaacccgtccgaaaaccgagaaaagcttgcccgaatttagtacaatttgcccttggtcgaggaaactctgtccgagactcgagaatcatcgcctgtaggcaagaaaacttgaccgtgagtaaggaattgtcgatcgtgctcgagaagttctgttcgaaacccagaaaactttctgagctatcgaatccgtgagttgtggtcgaattgtgtgtttgtttgcatgttttctagagctagtgtttagattatatgcatgcttactcacttagacttaactaatcggaattcggcttaagttagaacttgaatcttaaagtgaatatgggcatttgacgaacttgataatactatcactaaggaatgaaacggactgggtgcatgactaggtaaattgaatatggccttaactaagtttacttgatgaattgagaagatacaaagaaaaagactcatatagactacaactacaccaacaaagctttgagaagcaagaagaagcttggttagtgttttggagtcaaatatgacttgatgtcatgtttatcattgagtataacaactagaaccgcaaccggatcttaaaagccttgtatccttgttagaagatacaaagccaaagactcatacgcactacggctacaccatcaaagctttaagaagcaagaagaagcttggttagtttctaggattcaaatatgactagatgtcatgtgtatgattaagtataagaacttaaaccgcaatcggatcttaaaagcctaagtagtgtttccttgttagaagatacaaatcaaacgactcatacggacttctgctacacaatccaagttttaagaagcaagaaaaagcttggttagtgttttggaaacaaatatgactagatgtcatctgtacgagtgagtataacaactagaacttcaatcgaatcttaaaagcctaactattgtatccttgttagaagtacaaagccaaagactcaacagactacggctagaccatcaaag

SEQ ID NO: 38421 - DNA, 1645 bp, Arabidopsis thaliana landsberg
ttacatgcttttaacttggttaaactatgtacagatttacattatattaaactccttgaatagagtatatcatatatgcaagaatatatatgatagaaaatggacaaaaccaaattataagaagaaaaatagcattcatcactgatattatataatagtccctcaaagggttgtacagataatcacaccaccacaacgagaaaaattatcagagtatttgcttattttcctccctacaaatctaagataatataaccaaactggttttatagatcactcttagaggcatctctagagttagtctcgttctaatagaaacacttaccccattatattgtaccccaaaatcacctaaaaattttaaaggctagctaaaacagatctttatcatcaaaaataaaaacctaaatatatgttggctgaagcatagaggtgatgagagatttgaaagctatttcctcacaagggatagtgagacccatgttgtgatcgaagccaaactcttcctcagcttgttgtagaagaagctgaaactcgggtcgggtcaaaaacgaaatgggtaagacgtacctgacccgattccctcctacgtagaccacgaagtgacctttgggaacatccagaggaagagagtctccatcatgttcatgtgtatcgttatactcactgctctgtttctttcccaaacttgaacacctcttcaagatttgctttatcatagtcgtttgtgtcagcttgctccggtttataatcgccattcccttgggaaatggggttttctttgttatcttctatgtttttgttgtggtttgctagaggagtgaggagatagtgaagaagggtatgctgagttatggttttggggtatttatggatggttacactaaatatatagagttttataaataaatttatatactactttataatattagagtcttgtgatgggtctaaccgtctaagattaacttaacagatcctagttttggaccgggtcaatgtggttttgattaaggattgcaagaaaaaatattatattttggagttgtcattacataagagtctctataagaccaattaggtggaggttttaaacctgaaatcagaattttgttcgttaataatccaaaattgttagaccatttttatttgtatgcgtggttggagccactaaattctccatccaaactaaataaatggacttattcatctttcaaaatcaactacaactagatgtatcataatccccttgctagatttattattctttttgtcttaatatcttataatagttaatagtcattaataaagaaaaatttttcttccattacaaatttctacaaaattgattaggatttgatctaacaacagggaattttcgggaaatgcaaaaagatggaagactctctatagatctgcatctatctatatttgaattatctatacatatgcaagcaagggaggaaaatgaacttttttttgtttgtctagtctaatttgaacttcccccccaaaaaaattcactttttagcttgttgatagaggtttactgagtagtaaacaagaatatcgataaaaaaaaatgatttgaaagaaaaatgcatttttatgggttttcgtttaattctgataaactaaccgttcc

SEQ ID NO: 38422 - DNA, 11452 bp, Arabidopsis thaliana landsberg
gactgagtactcgagacctatcatctagtttcttcaaaaactgcttgtctatttttgcatatgccgtacaaccaaagattcatgtgtggtcaacgattggtttcttctctctgaagcattcatatggggttctatccttaagagctcttgtagcgactctgctgattagataggtagagtgtcttatggcttccccccacaaataattaggcatgtgcatatgcttcagtatgcttctcgccatctccaatagagtcctgtcacgtctctctacttcaccgtttagttgtggtgtatatggagcagtgagatgccttcttatccctgcctttcgcagtaaggaattgaactctccagacacgaactctcctcctctgtcagttatgaaagtttgaatcttcttccagattctttctctaccaaagctttgaagtttttaaacttaagaaaagcatctcccttctcctttaacagcactgtccacatgtaacgagaataatcatcaatgagaacaaagatataacgatttccagcacttgtttttggtgttattggaccacacagatctccatgtatcagctcaagcttcttggttgctctaaagacggtcgcttgtgggaatgactgccttgtctgctttccaagtaagcaagaaccacaaacctccgactcaatcactaaacttggagctccttggatcaattccttatcaatcatagactttagtgtgatgagactcacgtgtcccattcttgcgtgccacagacttgacatacttgtacttgttaggtataaacatgcttcctttcttaagcccatctttactttgtatagacgattcctagacctctcagcttttaccaacagctttccttcttgatcatgcatagttagatatccatccttcaattttatttcacatcctgactcagtagcttgtccaaggctaattatgttgctcttgagttcaggaataaaatagacatctgacattactcttggtttaccattcaagtctatgaaagctattgtgccctttcccttaatgtcgatgcgtgaatcatctccaaagcgtactttcccggtaatagaatggtccatcttgtcaaagtatcgacgatctcctgtcatgtggttactagctccgttgtccaggtaccaaacattctctccatcaacgtttgtttcaaagctgcttggcatacaactttgttcatttagataaaccacctcatgcatcataagctcatccacgacttgggtctccttattgtcattttcttgagtttcctgcaattgcaacaatcgatcaggacaatacgaagcatagtggccgatcttatcacatctaaaacatgttatctgtgatgcatctctgccaccattccgtcctcgtcctcttcccctataggatcctctttttctacgtcccctgtttcttgaatctccatggtagcttgaatctgtactagtgtacattagtttgctttgatcctcttgagtatcttcctcatcatcacacacacgttcttcgtatacttttatacgtccgacattgtcttcaaaacttgtgtttttcaagtctaaaacttgttagagagaagctacgatctgtatatacttctttcttggaagactcttgagaaacttcttgactaacttctctgttttatgttctctcccaaagtagctgactttgaagctatctcaggcaattttccagaaaaagcatcgatggtttaagattctttcatcttgagacgatcaaattcattcattaggttctgcaaccttgcctcttttacactatctgctccaacatgtttttcttttattgcgtcccagaccttcttcgctgttcccaactctccaatttgtaatgtcatcacctcgggtatggattggaacaagagatgcatggctatattattattctcttcacacggttctcctgtttcaatgatttcccaagctttgtgaaccttgagagcgatcttcatctttaaagcccatattgtatagtttgttgtattaagcatagggaattgaatcgatgtacatgctccagattcttttgttcttcccgttgaaacagcgagttctgacatcgttgcaaggctctgataccaaatctagtattcaagaaagattaagaacacaagtataaagaatatctctctttattagtttaggaaaattctctcaaaacctaaactctcaatctctcttaaaacccataagttgtatcacaccttgatacctccttatataataagtttttaaccttatcctaattattagataactcctaatataagataactcctaacaatatattctagattatctcctaaaataataaaagcttaatttccttatctctttagtaacttgctcttcaagtcacttcttctctttcaagcttatcccaacattttcccctttaagcttgaaatcttctttcaccacatcttgaactcccacaagatccctcatctctttgaacttaatccttccaagagctttggtcaaaatgtccgccttttgctcattccccggaacatgctcgacttcaatttgtccggtctctacacactctcttatgaaatgatatctcctatgaatgtgtttgcttcttccatgaaaaacaggattcttggtgagagctatagccgatttgttgtcaatgagtatagtaacctttccacacactgttccgatgatctcacttagtagttcttgaagccaaatagcttgttttgccgcttcagtccctgccataaactcagcttcacacgatgacagagccacaacatcttgtttcgacgagcaccatgttattggactttctccaagataaaacacatgtcctgcagtacttctaccatcatccggatccacattgtggctgctatcgctgtaccctactaattttggtacctctacgcttcgaataaacgatataccaagtgtagtagttccttttaagtatcttaaacattgtttcatagcagctctgtgagactcctttggtttttgcatataacagctttaaattcctacacaatagtttaagtctggtcttgtatgtaacaaataacgaagacaacccaccattctttctgaatctcgtggcatcaatatcattttcttctacagatttgcttaattataaacccgactccattcgtgtgtgaaccaagttacaatctaacattccagcttcttctaagatacgtttagcataccggtgttgagttagtgttattccttcttcatgttgacatacctcgattccaagataataggttagctttccaaggtcactcatctcaaacttggatgacatctctcttttaaaatcatcaatgatcttggtgtttgttcccgtaacaaagagatcatctacatacacagccactaaaagagtaatattctcactcattaccttacgataaaccgatggttcttaataacatttttcgaatttaagcttcttaagaactcgattcaacttattgttccatgccctcggtgcttgccgcaaaccatacaacgctttgttgagtttgtagactttatcttcatgacctttctccttgaatccctccggttgagtgacataaacagtttcctttaactcaccatgaaggaaggttgtcttaacatcaagatgatgtatctcccaaccattcgacgctgcaaggttgacaaggagacgtattgtttcaatccgggctacaggagcaaacacttcctcaaagtcgactccatatttctgcacataaccctttgctacaagtcgagccttatacttattgatgcttccgtctgagttgcgtttaatcttgaatacccactttaaaccaattggtttaactcctagtggaagttccataagattccaagtatcattcttagtgatagaatggatctcttcttcacatgcttgtatccactctttcgattcttttgcttcattaaagtttcttggctcatcgtttaaactaagcaagacataattttcaagatacttaggcttattaatcccccttctgccatcttctcaaaacggtagcaagacttgtaacatctttccgcagtcccatgttcttctccttctttgtgttgtgttacattctcggcctctatttcttatgtatcactatgcgcttgctcgtcatgctctgaagtaatggactctcgaaagtcttgaagtccatgatttccataactgtgaaacgtcataccaaagtttccatcttcatctttgatccttttgctgtatctccaatcccattcttttgcttcatcaaagacaacatctcggctcacaactattttttgcgcttgtggatcaaactattcatatgcctttccgacctgcgtctgtcccctgattgaacaagaactcttgacctgctatctagctttctcaattgttgcttgtcgatttttgcatatgtgatgcatccaaagattcaaatgtgcacaactattggtttcctatctatgaagcattcataaggcgtcttgtctttaagggatcgtgtcatgactcttttcaggagataggtggaatgtctgatagcttcccccatagataatttggcaaatgcatgtgtttgaaaatacttctcatcatctccatcaaagtcttatttcttttttcaactacactgttttgatgtggagtgtaggggctgtaagatgtctcgttatacctgattcttcacagaacatgttgacatcatgtgacacaaacactcgtcctctgtctgttctgaaaatctggattcttgcattagactctttttcgaccaagctcttgaagttacaaaatttctgaaacgcatcttctttgtccttagtacaacttctaggtaccttcttcagaggagttgattggagataccagaaggctctagatgcagcgagcaatggtaacttcaatacacgttacccaactgatgctacaaccctgatagagaaccttgcttgcagcaatagtaccaagaatgctgattttgagaggaagaagattgcaggagcaatttcaggaaatcagatggcagaggtgaatgctaagctggattcggttcataacttgcttacagggaaaaagcatgtccactttgcagctgaagaagagactattgagcctgagcctgagtcagagaaaggagtcttctacatagatggtcagggatacaagaagttttgggcagccacagggacacttcagttggcaacaggtttacagagaaccagggttcctccaactacactccaaagcctgctttccagaagacctttccttagagaaactttcagaggacctatggtaattcagcttaccaagcctcccctccacccacagaagagacaagaatggaatcgatgcttgagcagattctggagagccaaacaaagctcgttctggaattccattgtcaacttctttagcttacttcccttagaattctttcccttttcttatcaacaatgaattcacccttttctttcttttaaacatatcccaacccatgatataagcgcccacctagttctatccaatcctgaaaacgcgaactagaactacatgagacactatctctatcgttacgaacctaacactttttaccatgctcaatcgggataagacctgacaaacactcacaagtgataaatggcttgaaagaaggtttaggtttagggtcggggttaactgctccaatgaggggagtcagctacttggactaacaagagtggttaaaatgagtaaggaagtccaaataatgtagggtctacatgagttcgaattcgatgctaagacatgataattctaaatcagattcaggttcaaattgattgggaatggtatcaaatcatgacagtgtggcgagtagagcaatctaggcatggtgcagttttatttcaatttgattgactacgcatcagacaactaacaacgaggacactaagtttatccggtgaaccaaaatgcttacaaggctatctaatcattaccccctatgcatatgcaacaatcctaaatgaaacactctagactcgatcctaaatgtaatgcaactacatgaacactctttttttgtgaaatcattttctgaaatttttcaaatttttttggtttttctatgccttagatgaatgcagactcaaaaatatacacagtgcaacacacacttcctgagccttcccccaaacttaatcacacagtccactgtgtgaataaacttggaagagagtactcaggacaaatccaatcacagaaacaaaatgaagaacaaatcacaacagatgatataatacaatggtgaagtgaggcgcttacctcagtcgaagaatgaacgaagttggtcgtcaatggctgcctgtgattgctcctaggccatagacgaacagccctgttctgtatcagttctagcaggtgggtattcgacctcatcagctctatggcggccagcacaactctgaggatactcgacctctcttcttgtgctgcggccagcaccgcggtcgcgtaaactacgagactgcagaagtcgtctgctcctgctgctagatcgagtgagcgtggtcctcctcttcctcccagattcacgaggctcgaatgatgaatgcctcggagggacatacggaatctcctgctctctaggctcaggcctgcgccgacttggctcgggcgcgtcatatctcctcaagggcatgtcctgagggagctgtccctacggaatagctgtagtggaagaggagcagctgatcttgtccttcagaaacatgatagccctgaggcacttggcgagcaacttatcatgtttcttgcaccacttctgcagcttgctgttattcctgtgagcttcgctcaaactcttgctttccatcgctggaggtatatgttcactgaaatgatacatggtcgtatcaaactctgcctcatctatatcatctgtctcatcaacatcttctgttgtagctccttcggtgtgactaatctcctcagttggcgtgtcctcgaaataaagatcttcaagcgcaggcttgaagtcaatgtttctgccctagagaatcctagtagcgtcaatacaggggagaagaatgttggcgattctaatcgatggatgctcgaacctgtagcggtgaaagtcgccaaccatgtcaaactccaagaactcacatcggcgcaaatgatccaagtccatcattctcggtgttaaccctggttctttgagcggtactccacaagcttccagaattggcgtcacaacgccacccacgcatagtgctcctctcaccttcttcttgccgttcgtcaacgcccacttcttgtatccacacacgtggatcaacagaggcattactggtggtgcattgttgagatcgcctctcaagacattctttccctttgtccggcggagaatcccagtaagcgcggaatctatcatctccatgtccgtgttagatacggtgcatgtagactccctggagtagaaaacgttggcaaccgagcgctgaaagtagcggatcacaggactctggatttaattgctcttggaccgcgccgagtttagcggtagattgttcccaatcgtagcccacaaatccttaagctcctctctgtcaaacctgggtttggttccctttccactagggaaacctaacagttcttccaacttcttgatcgaaagctgataccgctaatcatccactgagaacgtcaggaaccctaaccccatggtatccagctcaaagtccgtgagaccctcatacatctccacttgcagtgtggaaagaaacttgattgtctcctccttatacgcagcgtaaggataagccatgagtgtctccagatgacacttctcgaacagatgctgcacatcctccagtaaccccagctgggctaaagtctcatagcagggatacctcgttccccagaagtcgttcatctaaaaaaatctgatatactcctccgctgtaacctcgtcgggtttgttcagcagcttcgtctccatacgccatgactctggctcatactcagtttcgatgtcctcatcaatcagctcatatctactcgacatcgccctctttcctctggcaatttcagctcttctctgattacgtcgagcagcagagcgttcaaattcatccctgaagctctcgtaaacatgttgctctctctccggtctagtgtaccaagactcagcttcgtctacattataatcaggatcaattgaggattctccactgtagttactcataatgagacctaaaaacaaatgaaactcaaagataaacgttaatacgttagtcccaacaaaaccaaaaacacaaaccaacagagtaaaccgatcgagtatatcttaaccggttctgaattttttttttttcggtttgtggattgttggtcgagtgattttggaaggtcgagtgaagtgatggagcttgagcggtgaaaacgatgagtttatgtaggagttgcggtcgagtatagtgagagatgagttgcggtgatggtcgagtgtggcgaatcgagtgattggtgaacgagaaccggctcggagatggtgaagagaacgagtcgagtgatgagaaagatgacgaaggcgttgcggtcgagtatcctacatggagctgcgtgaacggtggtggaggagaggaggaggtgctcttgccgtgaagtcgagtgatgaggtgaaacgtaatcggtggtcgagtgttgaaggaggtcttgaataggcgggtgatgagctcaaagctagactcggtttagaagttgagtcttgttctccttcttctttgtttgcgattgagtgtctatggtgaagagagaaactcacggcggtcgagtgaatggagcaaagcggtgaagatgatgatgatttgaaaacgagtacttggtgagaatgagagtgagcgttgaggaatcaagtgcgtgaggaagagagatggtgaggtcgagaggttgagagaaaagagatgagagtttggttgagtttggatgagaaatggaggtcgagtttaatgggactggaagagatgacgaggtgatgaggtcgagttaagagggatgggggtcgagtgcaggagaacagatgaggagagatttcttgtcctttggtctgtttcatggaggacatgggcgtcagcggtgggtctcacaatgtcttcttgtctttattttgtactctttgtttactgaaaaccccccagaaaatcccgcaatctcctgtagacttgataaactctctgtaagactcagtagctttcgttggttgagtaaaatgatgattgaaatttttttgggttttaaacatcactcatactcgaccaatgtactcgatctctaggccatatgtagagtaaaagtttttaatttttactctagcttcacgttattcctctattcctgagaaccacaaacacaactaaaacatataaaaaataacaagaaagtaaaaattatttacaaggataatcatgggacttcctcccaagtgagcttgtttaaagtctctagcttgactcctcacacttattaagaagaaaatgaatgatagagagggtttgcatagtcctctctaatatcatcatcatactcagcgtcatccctggagaggtatacaacagaatactcaattcccctttcttcaaaataggcttctttctcttcaggagggtaatctgtctcttcagaccttcttgaagtgaacttctttctcgggatagtgtcaatcctgcctttaggttgagcttacttctgcaactgattcagcttacttctaagttcctcaacagagtgggctagcctctctatagtttcttcttgcttattagacctctttttaagctcttttactttctcagtctcatatccttctcctgggatcactttatcatctccaaagtttttttcatcttcttttgactcttgtggagttttgttgatgtcgaactgcaacttgatgtgctttccaaggttgagacttattttcccttccctgacatcatcattgctcccattgaggctaggaagggtcttcccaagattaggggattcttatgctctacttccatatccagcaccacgaagtctgtaggcacttccactccattaatcatgactgggagatctttcagcatgccgaagggttttcttaaagatctatcctcaaggatcaaagtcaggtcacaaggtctgtactaaataagctgacattaagctgacagaggctctgagatcgagatttctcacatctttgtgaggatcaggaatcaggttgagaacttccattagtggcatcactgcttcaatctcgtccaactgcttcgctacaacagacttgtatctctccatccatgctttcctgaatgtccacggaagagcacgtgagggtagtggagtaggtttgaatcgttttaccattctctcgattatggcggtcttctcttccgcgggggactgaatgagatggcgagaaccagcagaatggtcgaattcaacaaaagagacttcaacctgagtagaagcctccccttgttgaacatcactatccccaatgattaaatcagggacaggtcgagttgacagctctcgatcatggcacatggtgatggcgtgagcagttgcatacttcttgggattcttaattgacttccctggaagtcccataactttgggagcagaggtagatgcggattgtccttctaagtatctgactttggaatttaacgcctccactttggcattcaggtcattgtagctgcagtccatcttctggtgcacagtcaggtaacttcttagcaatttccattgagctaaatgcttgtccctgtagcagactgttgtaccatctgtttcatttcagcatcgggagcagcaggaccttagttttgctgaggtgcaaacccatgtggtggttgcggctggtagttccactgaaattgctgcttgggaacaaaaccttggctgtagggaataaaaggtttgttctgaccttgttgttgttgtggagggtacacctgatcctgaggattagcaacgtttatgctgcggtaggagaggatggggttgttggttttgaagttgttgtatcctttgtagccaccctggttgttgttgatgtagctaactgtggatgtcggatctcatatctttgctttggcccgagatctgtcatcattctttaaatgggcctgagtgaaagcctcaacgatgagtccaggattgtcaaatatggagtgggccgaaataagcccaccagagccaggtcaatttgaagaatcatttttaagcgtcacgtaacggaaatctgcggagtaaatgagaatgcgttaatgcgcgaggtggatatgtgaaacgtaaacattaatgagacatgattcgcggcgtgattcaagcgttcatttacttcgtagatattcgattaatttg

SEQ ID NO: 38423 - DNA, 5064 bp, Arabidopsis thaliana landsberg
  unsure (1)..(5064): unsure at all n locations
aacagatatggccgatatacgtcgaggttgagtgcaaattatgttgcaatcagcacctcttagggatgatatttcttcttccaatataaattgaggaagctgtgttgttttaccacacccggtctctcctgaaactaccaatacctgaaaaataaacaacggacacaactataagcgcaagatcaacacaacacaagacaactaaaaaaaatagcttgacaatattattggagagaggcagaaataatagctgatggaatacagagaagaaaaacataccaaacaattacctggttttgtgaaacagagttaagaaactcctctttcattttaaaagcaggtagcttttctctgaacgctttaagtgcttttacactctcagttgcctgtgttgaaacggttataaattgatgttatgtccagaatctacatctaccataatgcatacggtttactttagcaatacatgtaccttaagcttttcctgcctttccttgagtgcaaaactgaatttttctttctcaagagaatccggcaatttggaagcagaatcaggtcttttcaagccaagagttgaagtacgatcctgttgatcgttaaaagctgaagcagaggcaccagaggaccctgattcttgtgttgttttcaaaagacttccaagttttctctcagtctctgtggacattntaatctacaagaaaaagagtataagcgttttagcagccaccactgagtacaaaactttcgtactagcaacatctctattacctctttctgagtggatccatgccgttcatcaagatccgctcgataatctggtaaaggaactttgctaacaacaagagccttccctttattgtacgcatgacttccattccaaaaaacgataagcaaattcatgacatactctcaccatatgaacttaaaacgaagttgtcgaagaagatatagagtcttacaagtaaagacccatctgcaaagccatatcagaaagtgtttgctgatctccacggctaaaattacgcttaattagcatctcttgttctcctcctgttttccattgctcaatcttgttccaccattcattctcatcaagtacttccatctgagataaattatgactacttcatcatctgattcgaaattatgtatcaatgtctaatcgttaaattgaagtaatgaactcagaatctacaagaacaatgtatcaattacctcagcttgttgctggcgcaaacgctcagctctccacacaggatcccaccatcgctgttccccccggccgccaccaccaccgccacgaccgccgccgccgcgtccaccacgacgaccggaggaatgacctccgcctcgacgaccaccttgagaattaggaccgtgaggaggcatagcggcggtgtgaaagagaggacgaagcggagagagtttggaagaaaatggaaggagaaagcgaagcgtggagaaacaagagagggactgttgcattcgtaatgaatataaagtttgaaacagtttaaagttgaactcgcactgacgactatttttgcttattggaaaattttgtattgaattttgtattacactatacaagataacacacacatatgatatgagtgacttaaacctaatttagcttcaactttcaaccatacatacacattacacatatgagtaaatctaatatcattagccggaagatatgcgctttttgtgaaattactagatcaacagtatttgatacatcaccaaactgatagcaaattagtaatgatggaactaatttgtgacaccaccaaactgagtcaactatgagacttggacaacttattccaagagtgagttaacaataaaaaaacaatgtcaggatcataacatttttttctctcttattatttcttccaaactttttatgcctagtagtaagtgtttcctttatatatttggcctaagtaggctcaattagtgtttgagtgtaatttcatatgttttgagtatccggcccaaatatatggcttgaaggtcataaattgtttatctaaattcatattgttttagatgacatagcctatagaatatatgattgggaatccggagctatgggttttaaaagcccatagttactctactgattggggaaaaaaagaattgaaaaattggaagagcggcggcaataattaagtgttcaataacaatggtgtattcgaatatcaattaaaattcactgaatacattcattcttcaccaaatgaatccgcccctggataatatacgttcatttatctccattcttaattacatgtatatctgtttatatactatcatagctagtgtatattaaaatatacatcatgcgagcatgcaatgacgcattttcttcattaataacaactgtccaacagattgttttccattatcatttatgccttgtgttagtaacttggccgccaagtgaatgattcttatcctatggtagtttgccaaaatataattttatgtaatacaaatgttaatgcccacgactcaattggttaaatttggatttcctagtatatacaaattatttacctacaattatattttattttattgtcttgccacttttaggagaaaaacaaaactttatattaatcttctaatatggagagatttcaaagttttaaatattctaatactaaaataagataacactgcgactttaaaagcaagtgaaggaaactaaacgttgcttaggtgacatgattggacttaaataagcctgaataaaggagataactaaacgtacataaacaacaagattagtatataagtacaacgttgacttcaaactaattcagcgtaaaccttctctaatcttagccactggcccctccctacattcctaaatcaaatcttaatacatgtcacacgttaaattcattagccctgtatccaattcaattgtgcaactaagtgttttatgtttgaaataaacaacgaattaatgggtcaatatatttatatatgcgttatactattacagtattaccaatacaatattagaaaatttatacattgaatatttttttaaccatccacaagtcacacaattcttgctttgctttgacaagctttcttatcctcattcacatgcatttcctccctttgtctctctctctctctctcttagcgttgacttttgataaccccaagatgcttcaatttacattgtcttatatcaaatcgctgaccaaaaacctctccattatttctcctcttcctcctcccaaacccattaaacaaaaccatcaaaccaaacccgccatgaacaatttccaaccaccgccaccgtccgagatgccggactacaacggcctcctcggcacggacgacataggaggatttcgatacggaatcggtgtctccatcggggtcctcctcctcatcaccaccatcaccctcacctcatactattgcacacgtaaccagctctcttcttcaccttcacaaaccaaccaagattcaacacgtatccatcaccatcaccaccatgtcatcatcgacgttgtccccggtcttgacgaggacaccattcaaagctatccaaagattctctactcggaagcaaagggaccaacaacggcgtcgtgttgtgccatttgtttaggagactacaagggaaaacatctgctgcggcagctaccagattgcaaccatctcttccaccttaaatgtatcgacacgtggcttagactcaatcctacgtgtcctgtgtgtcggacttcgccgcttccaactcctctgtctactcccctcgccgaggttgtccctttagcctcctccgtggccgccacaagaatgtcctagtgatttgtttattttataaccgaagaaatcgaaatcttgactaatctccggcttaaactcgttattaattcttcttttaattccttgtaaatttgttatttttggtcactaactgatcactgtatatacactcttcgaagccgaagatttgtaagagaaaggaggttaaggatgaatttttcacaattttgttggattagtttttctttaagcaatgtgaacgagtttatctatacatacgtaccaagaaagagtaattaaagtcgttttgaatattggcaaatatgtttcttggcttgtattgaactttgagagatcattttaaatattgagacgtcaaagaaaaaaaaagagtttgaggacaagttggaacttaagataatgggatcgaatcaattaggcgtttttgatagtcagtctgacaatctttctcaatcatatggtttatttattagcaattttttttttgttaaacaaaaccagatatttaacagcgtatttgtcttattgggtaaaccgttagccaatacatatgatgatatgagaaaaagacttttatgaggaccttaagaaaagatataaaacgttgattaagagatataaatcaagaagaaaaaagacacttgaaaacgattgtttttgtctccaatcttaagctggctgaaattaagtaggtgagatgataaaaatgagttgaccatgataaaactactcttatcttatttaaagtattcggtaaacaaaaatattactccaaatattaggaaccatgatcgagagagaaaacatggtgaaaagctcaatttctcattaatgattcaaagagtttgttacaatcgtttatagtcaacagactcaataaccagaaataaccaaagatatgctcaaattcatttttacaaacactcaaaagtgatatgctctttctctcggctctgtattcctttcataacaagacaaaccgaggtcgttcaaaccatcatcggtaacgtcgaaggcttcaacttgaagcaatgatgctgatttaagacttattgtgctaggcttcttaatattttggcccatctgccagaattaatgatgaatactttcatattgggccctgagaaattgactaagacccaattgttcacagcaacgtcaaaacatttacccaaaaaatctttctaaaccatcaattaacttcaacttttattacttttttatataatctattttgct

SEQ ID NO: 38424 - DNA, 546 bp, Arabidopsis thaliana landsberg
ctttctttttgcagaattcgagcatcctatcgtttctccaacgaggatgcatttccatctgagggccaagataacaaactcactacaaaagatttttgatgaactttcacatatgatatgaagaacctatacctggcaaacggcagggatcagttcagcaaatcctagcagcttattgagcttagtaactgtaaagttacagacaccgatattcctgacgagactgtccttggaaagattctccatttctctccaaactccttccatgtcaaagtcaagaacgtcccctgcctttggtggcttactggctccttctcttagccggaaaggccagtgaatctgcacaaaattgaattgtgaagagaggaagaagagtaacaagaaagactaaaacttgattcacaacttaccaagtagagatcaaggtactctaattgaagctctttaagggtgttttgcagagcaggacgcactctcttaggagataactcagtgcaccttttgtttaaacatgtaccaaccaaaacattcatcagtggcgatgat

SEQ ID NO: 38425 - DNA, 8175 bp, Arabidopsis thaliana landsberg
  unsure (1)..(8175): unsure at all n locations
tcctccatggaagcagaagaaggtcatcagcgtgaccgcctctgcgactattgcgactcctccgtggctcttgtctactgcaaagctgactccgccaagctctgcctcgcctgcgacaagcaagtccacgtcgccaaccaactcttcgccaaacacttcaggtcacttctctgcgactcctgcaacgaatctccctcttcccttttctgcgagactgaaaggtctgttctttgccagaactgcgactggcaacaccacaccgcctcttcctcccttcatagccgcagaccctttgaaggatttaccggctgtccctccgtgcctgagttgctggccatcgttggcctcgatgacctcactctcgattccggattgctttgggagtcacctgagatcgttagcctcaacgaccttattgtttcgggcgggtccggtactcataacttccgggccacggatgttcctcctctgcctaaggtataacttgctctgtttttttctagccaattgctctgttttattttctttctctgaaatgttttgaaatgctccagaatcgtcacgccacctgcgggaaatacaaagatgagatgatccgacagctccgtggactatccagatctgagcctggttgtctgaaatttgaaaccccagatgctgagatcgatgccgggttccaattcctagcgccggatttgttttctacatgcgagctggtaatagagactgctattggttgtgttttcttgtgcttgtcaaatgattttccagcttataaatctctcttgtcaatatgaaggagagtggactgaaatggttcgatcagcaagatcatgaggactttccatattgctctctgctaaagaacttgtcggagtcagatgagaaacctgagaatgtagaccgagagtcatcggtgatggttcccgtttccggctgcttaaaccgatgtgaggaagagactgtgatggttccggttatcactagtacaaggtcgatgacacatgagatcaacagtcttgagaggaactctgctctctctcgctacaaagaaaagaagaagtctcgaaggtaaacaagctaattttaaaagtgagacaccaccaataggattgggatttgaatcatgtgttgatgaaacaggtacgagaaacacatcaggtatgaatcacgcaaggttcgtgcagaaagcaggacaagaatcaggggacgtttcgccaaggcagcagatccatgaatgatgatgaggttactttgataatcaaaaatcttttgtattaatcgaatcatatagtgtgtatgatcagataagtttttgtattctaagcttaggagttatcactgtatatcgaccacactctcaaaattgtcacttaagaatagttttttttttgttttgcctccgattcctaatttgccaaagggcaagcatggacgagcacagaacaaaacatggttcacagttatatacaatctcaagacaagcaagcagcaaaagaacttgttgtaatgttagaaagtgagattggacccattaaagatccatggagcaagaagggcttgatgtaattgatattatgggctcaagttgtaacatagtaaacccaatataggttggcatgtttgggccattttcttttaaagcccaaatataaaagcgtctcttcccgatggccggcgaaacagaaattccgctgccgtcgcagctttcactcttgtttttttattcagatgaaattggatggccgatgaagacaaacatccaaaggcatgggctcgcggcaacaaatatttgcaatctaccaatatataataatctgaggcagtataaaaatacaaaaaaaaatgacaacactttttggcagatcattcctgctacgatgaatctgtcccaatgataatctgagaagtaaagtaagttttggttgaacaaggaatctggagtgggttttacttgttgagcaatcagtaagcactaaatcatgtatcagagttgtggttatattctctatgttcttcttagaattcaaatatgaatctgacttggagttctttattttaatgatggttaattttactgttaatatttttggatttgaacatttggtgaagagtggttgcagcttgaagcaattttgcatctctcactcttcgtttactgtttgttgacgttgaagattaggccccaacaaacttgtatataagagcccttctctgtttattctcctgtcttaagagcgctaaatcccttggagacatcttcaccacactgttcagagatctgtcatgggccccggcggaccaggaggacccggaggaccagggttcttgccaccgggaggaccaggcttcttcccacccattggtggtttcttttctgggttctccgacatgatatgttcctggtaaagacattctctgttttgctatgtgttttgtaaagagttaagtggttagtctgactctggaatcttgcagtctatcttgtctgtgctgctgctggctgctacgagattgctttggcggcccaccgcatcaaggatcgccacttctgccaccctattattgacacatctgactcgattggtcactcgaataatattanagctatctctgtataggatatgcagatgtttgtcagatcaatcttaaatataataattcaaatgtcttaatttctgctctgtgtggatatatattacccaaaaaacgatcaaattaattatcagagaaatgaaatcatagtctggaactacaatcactagcaacacaatgcaacaacaacaacaacaaacacaatctactgtcttcgattcttgactcttctcttgtatggacttgccaagacttttgaaactatgtacacacacttctaagacgaggccaaaccagtcttctctttcaacatgatacaactaaataaacacggagtaacagggtttgatggaattaatcattcacatgctatcttggtgtcgaaactgctgaggcaaatggtgaaggcctggaaggcagagatagggtactgataatccattgtgaacacatcttttccgacttttccaaactggagaatcacgttttcgtgctcaggtcctgcaggtccattctcaggagcagctaccagctgaaagtttttgacggaagcaactgtgactctcccattgaagttgaggcaccagcactggagctgttcgtgccatctgggcgctttgtttttcaggacaagcagtccttccttctgagcagcagatgatggaccagaagggagactctctgcacgaattgatttcgacctgaagaaggagaatgaggggaaactatcaagattgctatggacaagttccgtctgagttggagctgttcctccaggttctacagctgatgcagggatggcatccatgacacactgcatcctcctcggtcctctggtatgatacgacaatgttcacaattagcaaaagccatattaagcaactaccgttttatctcacaatgtatctgtaagcaaggagataaatcacctggaacccaagacgttaagctcatatgagatatgtgctacaggatagttgccagatggaattctcgggctcacttgtttcaaactgagaagtctgcttgaacgggttctggtaacctgagttccaggattcgtcggctgagcgtcatagacagtgaacttggtccccagaaagttagatctgaaagaaagttaagataagagaaaggttatggcaaatatatgaaaaaaccatggggtcaatctgtagctaagtacctaagctttccgatataggtattgcttcctcgagagacatcatcgcagtttaaggagatgatgtagtcagtgcaagttggcctccgaaacctcttggcagcaagaaggaactttccatcatcatttgaagctgctgctggaccagaaaaagtaaacctttgagtgttattcagaaagagattaggtatgcaaagagaaaagaagaagcatctgttagtttcaccttggtttaacccgaggtatagatagtaggtttgattgctgcggtttctcataatatagcattgaacaagtgatcctctaggacccggctaaaaggaagtagggaagaacgattagcctggataagcacacaagtcatttataaagtaaagagagaatgtgatgggatactcaacctgtttgagggagataggaaaagtgagtttgctagaaagctcaggaactctgacgatctctttgacgatttctcgccagttcctgcagacaccagcgcaagaaacaacatttttcctagacggccaagtgtcttcggattgctcaatcctcataagaacatctctcaggagctccggaggcatactagcccagcagctctgcttgaaagcatcaacaggaacagaagtatcctgaacaacacgttgagacctggatctaccatacccgaatctgacatcgaatccctttctggatatactcccaagctctcctctcatgtcctgaatgagactcttgaaggacatggctctgaattctaactaataacgaactagaagcagtctctatatatttcttggtaatgcacctaattcaaagttgcagactttttcaagaaccctaataaacccacattcggaacgaacgagatctcaacgaactaaaacacaagctcctccaaattattaaaaaaaaaaaacacgcttcttattacattcagatcaagagtactaacccaataggtacaagatccgattatagatagagatccggatacagagaataaatacctaagaaatcccaagcgaaattaaaaaggccgcatcgattcacaagttatacgagcttcacatcaataagaatccaggtggagcttgggaacagtacccaggtcccagattggggcatcgaaatcgacaaccaacactcgaaagcgaatgccttttacaacccacagaagaagaagcggtcagaggaaatagattttagggtttgacgggggagtgaatatgtatgtctgtctctgggttatccaatcgcttccttccttgtctcatttttaattgttgtcagtcagtcattttattattttatcattattttcttcaaactaaatttggtaacaaagttttacatttcattctattgaccgtattcttaccgatttatcttctgcctttttaattaagggatctatctaaagaaagcttttcaattatagaaataaattaagctgccacatgataacgaaattaaagtgtgctttctatgtatttctctttctcgttgttatcttttgttttggtaatgtttctagaaatgttggaacttcaccgaaataaacatggtaactgactagattctaaaaaatcttgttcaaaattcctcatataaaatagacatctgaagataagaagacttacaaatagaatactttggtttaatggaaactttctttccgtttttcctctttttacgcaattgtatttgacaaaacaaaactaagcagagtaagctttttgttgccgtgatcacagcactttcgccgctttaatggtccaaaaggtgttttaacgttttactttatataattaagatgaaatcttccttctttggatataaataatgatttggacaactactgatttggtcaaaacgtaaacaaaaacaaacaaacaaaggaaaacgtcaaaaaaaaaaaaaggtgttatgagttataaaaaataacattattgggccgtaagaatcctttttttcgtctatatgggccgaattgaagtctaaatgggtctcgatcataactatgcctacacagcataaagaagttaatcactacaacaaaatcatcatttggccttataatagatattcattctcaggcactctaagacactgtgaagtggatcttttgatgcttatgttcatcttactagattgcataggtgagctttttctctcaaatcatattatctttgccactgctatggtagagaccttggggacttatctttgccaaggaatgttccattgcatagctatttaaactttaaagtgagcagaattctcagtctttgagctacttacttacaaagcctctattgtgcaactcctttgacccggtacgaccttggaagacaaagaaggcctcactgcttgcaaggngcaatggcgaagaagatgatcagagacggtcaagcttgcagatgctcctgaaacacctcaccaacagtgaaggagattcgacaatgcctacatctacatgagaccgaggaggctgacttgagttgaaaacattccacattaaagaagagagctcttcatttttctgaacgattgaagaaatgcattctgcttaacatttgaaacctttacgacagacagcaaaatatatgtatttgtgcggtgaaggaaaaaaggataaaatggaaagaaatgaagaaaaggccaaaagaagaggataaaaagaagactaagacacaaagagagatagcgtctgtgaatggcaacaaaggcagttcttctcccgtggcttatcccatcgccgagacacgtatcgctgttcccagtggttcaattgccggcgttggagaccgccgggtggtgtgtaagaaagaggagggcagaagacgtagcagtctccgtcgccttcaatccttctggcaatttcgacatctctgccttcgagaatgaccaaggttcgtacttgctcaattgattcagaatgataaataaaaaaaggctgctactaattaattatgtgaaaggcgtagcagattcagataaagtggaacctccgatgcctccaacgaccggccggtacgaagtagtgatcgacaacgactcaattgggcggcttgacctatccccgtttcagagagccatcggcataacctcgcctgatgattttggtgtagctgaaccaaaacggtatttggatcgaaccatcggattcaccatcaattacaagagagaagaccccggggatccgcgggagctgtcagagtacccggacgtaagactatggttcgtgaggctcgacgcgatgtacccttggctgcctctgctgctggactggcgagctggagaacttgctcgatacgcagccatgttagtgccgcaccagatgagcttgagaatgggtgtcgttttcaatccggaggcgttggagcttttcgtaatgaacaaagtgtttgtggtttatccgtggctgaaacggcacggcgtcccaaagcccaggttgaagacgagcgacatggccaggatgctcggattcggtatcggcgatgagctcttcgacttgatcgatcacaatgaatgaaaaacgatgtgttctatcttcaaattacatacgtgggcctaattgtgggcttacaatgaaaaaggcctggggatggtaattaagaggatttttttgggtatttgatacacacgtggcgaatattcattggataagttgtattaatagccgtaaaatctgggaaaataaattcaaaatctcgaatatctgaagagaagagagagcccattcaaaatttgaaaaacaaatcaacaattggtttattcgtatctttctcatttctctctagtctatatcgctctcagaatacaattggaaaaaagaacaaggtatttaggaatctctcattcttgagtagctaagcattgaggtctcctttgcgtttatagattattttttttggttgaaattgtttggttctgttgggatatgttgttgtgttagggaagagaacacaaaaagaaatggttagagaagaggagaaatcgagatggtggtggttcgagagccacaagagctccaaacattctcaatggcttcaatcaacactcgctggttggttctttttctcactcagttcttctctatgttttgtggtttttgccaactttttggtgtgaaacgtttgtggtgcagagcttgatgcaaagacaaaggcaatgttgaagttgttagacggaaacgcagactctttcgctcagcgtgctgagacttactacaagaaacgtcctgagcttatcagctttgtcgaagacttttatcgagctcaccgttccttagccgtgaacttcgaccacctcaagtcttccgaccactatggatctcgctccgctaaggttccccaacaatccatggagtccgtttgtgacagcaattctca

SEQ ID NO: 38426 - DNA, 5525 bp, Arabidopsis thaliana landsberg
tttttcctctaaaaggcattacaaattgtgaattttatcatctgaattttagaattttacaacatatgagacaaccagaatttgaagacaaaagccaaattaatacatacaacatattccctctttttaagatttttacaatggagaagacgaagcaaaatcacagacaagaaaaagggaaagaagaacatttttgcttcttgttgtttcttcttctctgtgagaggagttttttttaaagtattggtatcatcagattgcttactccattaagagctgtctatgtcgagtgagatcgttaaggtaagaggaagaggtgtgatctaagtcgcaatcgtcgagactcactgttcttgctccacctggtttttgttcagctaactggtcatctccgcgcaacagctgaaccaactgcatccaaaaacagaacaattcatcattcaagttgttagttactattagaatctattgacaacaatagtgagactgctaaacacatacccggttcatgtcaggacgcatagtggatacatggtgtatgcacattgaagctgtttgcatcactcgtttcatctcggtttcatcaaagtcattgcctagctgaggatcaactatttcttccatgttgttcttctccagaagaggttttgcctatgtgaaaacattcaagctgttttaactgtttgctttagaagatggaagatgcatatgaagagaaaggaaaggcagatcattacccacataactatgctttgccggctatcggtatcaacagctcgacgaccagttatgatctctagaagcaatacaccaaaagcaaaaacatccgtcttctcatcgacaatcccgtgcatgaagtactctggagctagatatctgtaagaaaaaacaaaggaccaaccagtttttggactcaaaaacatcaagaagaaaggttcacagaaagagattgtagctgtggagttctatgtctaacccgaatgtgccttcgatagggaaaacaatgtgatgaggccaatgctctgggagccacttagctagtccaaaatccgaaatctgcaaaaccgattcatatcgagttctcaatacgcacagaaaagttaactgcttgtcgttgaatcaatcaatcagtcaatacctgagcttcgtagtcttgagagagcaaaatgttggaagctttgatgtctcggtgaataatccgtcgagggcaatcgttatgaagataactcaaaccatcagctatacccaaagccactttataccgtttcttccaatccaaacactcctctgatcctacattaaagtttcaagaacatcatcaacaacaacaacaacaatgtctaaaaccaaccaagaagagatttttgtaccaaagagtagagaagcaagactgccatgagaagagtactcaagcacaaaatgcaaaccgcgatcacaactgaaaccacgaagcctagctgcgtttggatggttaacatgtgcgattatcccaagctccgataagaaatcactgactcgttcttctacttcctttgcatgtctcgtcagcttcttgatcgccacagtctctccgtccggtaaaacccctttgtacacctccgcatgtcctcctttcccaatcatgttctctaacaacaacaattcataagactctgtttcacaaggttcgaaaacttactttggggataatatcgtcttttcaagatttgaactttaccgggattaaaattgtcggtggcggcaacgagttcgtcgaaggtgaaattacgccacgaaggtttagcgacgaggatttgatcacaatcgaagtcgttttctgaacaaggagatagtttcggttgtttctttttgcgggtgagctcgtagctagcgaggagaggaatgacagagaatctcctaattgatttcttcttgatggattcgatcatcttgttccattgatgaaaagacgaaacgtttggaggagttgttgataatggcgacgatgatttatcaggagaacacgagctacaactgctgctgttatcggaatctgaactcattaccggaatttcaagcacgcatcttggagatgggtcttcgattgataagtcgtttttatgtagctccgtctcttggcttcctttgatcttcttctccatctctgcaacgaatcagaaggaagaattttgtttctaatttctcgatgcacataacgtaaaaataatataaatttagagttggtgttataccttcaacagccatagcttggagaaaaattacgtcgtctgggattcttcttcggaaaaatcccagtcaaaggttcatacaatattcacccagaaaacaaaaagaacacaaaagagggaagcagagtaacatctccggagaggagaagccgaaagctcagagccggagagaatccggagaaacagggaaacagaagttttgtgtttttgtgtgtttttctgttgtttgttgtctcgttaaaagatatctttagaaaatggttattcttagaagattttagagaaagaagaaagatgaggttttgatgactggtaatggattggtatctctgctatatttatacaactccaccatgcaaagtcaagttagctttataaaattatgaaacatttttttataagaagaagatgaaaagatatgatgccgtaactaacgccttccaacgaacagacacgccgacggttgaaatatccaaagaccaaagctagtcaatggcatttccgtaattatagagaatgataagacaaaacacccctctttgttttttatttattcgaaattacaatttcacttaatttgtactttcagcaatttaatattaaccatgtgaaatactgacatcttgttttttttttctttggttttggtccagcatttgtcttcattaatgtaaacctacacagaacttatttacgaaatgccgtcgaatgtgaatctttcgaggtaagaatatggcaatatgctatcttatttccggttatcgtgtcgctatcgtaacgagtgtgtaaacatatggcaaagaagcttgaccaccatagagcaagccaataaaacattgttgttacttgacatcttaatataatacaccccatatggatcacggtttatagctaagtaagatagaaaacatttatgagattgttttggttcacgacacgacattcacgagtcatcatgaagctttgtaaaaaaaacatatattccgaaccacatcaggcgcaacatagtttattagagcatccacaacggtggagctttctcacttaaactcataattaaaatatttgaaaataatagaaagaaatcaggaagagagacaataggagagagttttatcaaataaactctctgtagagagattttgacacacatgagagaacctctactttacacatgttttaactttattggtgaataccaattaagtaatttaaatttaattacataataaaattctaataaaaataatattgttttattcattgcatacccattttagagagtccaccgttgtggatagccttagtagttcatttggtcccaccacttcaagctctcatttgtcattaataacttaggaattacgtgaaataaaacttagtttatgatttagcttacgtgaggcgatcgtgagtataaattagaaagaagtacgatatgcattgaagaaaaatccaacgaaaactataagtataaacatagatgtgtctaatttccactacatatatgtgggtttagtaaagttgagtcgttaactaacatgagttgtttttcttgggtcaaactgataattttcttagcttaaaccaaaggagaagaaacctccaagttacaagacttctccaacacaataaattttcctctaaaaaatgttagtagatttgatgattatttgttttggatttgtttttgagctttgttatgacaaaagcgattttctttacgtgtatttatttgttgtaatattatctagacaagaagatataaaaacaacaagttaagtgaagttgttgctggaaaaaattatcttttagccttttggtgaaatgagaaatgcttaacgtaatgaaatgattagttaattggtaatttcagtgagaaaggtgataaggagagaaaaagaggtttcttgtatagtgggtgaactaaaccccttaactaattttgactcctccaaatgtaatctctttcgctctctaaattgggccccaaagtccaaatcaaaatagccaccaaactcaccaatgccaagttctgtcggagaagtcagtctaaccgatttcattctcacttaaacagtcataaacacactctcctgttcaatccgaaattcagttaggtttttagttgacttctggtttagttttttcatttactgatttagagcaattagtaatcaaagattcaaatatgtcaccgtgaaacacaattgcgttaaccgtaattttctgtgattgttctattgcattgccaaaagattaatagaaaatttgaaatgagttacgtgtaaacttatgaatcaaatgacaatctaagaggcgatcacttaatccaacaacggattagagaatattatttcgtaaaatacagacatgtctatagaaaatctaaccgaaccacaacgatagtggatgtgacatgaaagtgtttacgtctacatggaaaattgttatcgtcatcattcatgaattgaaaagacaaacaggttatttaataaccaagatatcgttttcatgtgatcaaatcaattatcttatcaaataaattaactaattaagtgatctctccatcaacgactcgggttgcctaaaactaatgactaacaaaaatattataattagttttgttgcataacaagagatcaaataggcgcctgtagctcagtggatagagcgtctgtttcctaagcagaaggtcgtaggttcgacccctacctggcgcgatttattttgtatccttttatcaaaaaaagttttataagcccattagcccagcccaaaagagtctagacaccagaaaaactgaaaataagaccttgtcattttttagcacaaggactgagtacaaacagtgaaacacacacacgcacacacaagaaacaagagtaagaaaaaggctatattacacacagcaacaagggatctgctcaacgaccatgttgagcacttgaaaacgttaccgtagctccaccagagcttaccgatgtagtattcgaagaggatacatgatatgttgcgacaggcattttggtcggaagatgaggcactggtgcttcaagattcaagacttggattgcttgttttattgaaggcctcgtgtttacatcaggatgagcacaccataatcctacaatcatgagacattctgcttgtttctcatcgaaaccaccgatcctgagtttctcgtcgatagctgtaataacttcttctttttcataaaggtcccacattttctttacaaggtttgttacaggctctactctttcttgtcttcgatccacaaattttcttcctgta

SEQ ID NO: 38427 - DNA, 3894 bp, Arabidopsis thaliana landsberg
acactatacgcaaaccctacaacctaaaccctaagcctaaacccttaacccgaaaggtatatcctaatctcgaaacgcgaaacactaaacccttaactttaaacccaataccttaaaacctaaacaccaaaccctaaaccatagaccctaaacatgaaaacctaaaccccaaaccctgaacgctaaatcctagtcatatttgacacataaacgcaaaccatgtttcttcttgcttctgaaagaattatggtgtagccaaaattcgtatgatttttggttttcaatcttcttaaaggtaaagactactctagcttccgagatctgggtgcggctctagttcttatactccatcatacacatgtcatctggtcatatttgactccaaaacgataatcaagattctactgtgttcttagtgtacatttgctcctaaactgtaatccctaactcgcaaaccctaaacactaaaccctaaaccttaaaaacaaaatcttaaatcataaccctcaacacataaccctaatactaaaccttaaactacaaatactaaaccctaaactttaaaccctaaaacctaacattaaaccctaattcatactttatattacaggatttaggtgcagttctaaatgttatactaattgatacacaagtaatcttgtcatatttggctacaaaccgtaaaccaagcttcctcttaattctcaaagctttgatggtgtagccgaagtccttatgacatttgattaaggatcttcttacagggaaaaactactttagcttccctaaaccctcaaccctaaatcctgaaccctaaccttaaaccctaaacctgaaatcctaatttatatttcgagatctagttgtagttctagctctagttcggatactcaatgatacacaaagcatctagttatatttgactacaaaaacgctaacaaagcttcttcttgattctcaacgctttgattgtgtggccgaagttcttttgagtttttggttttgaattgtataataggaaaatactagtttacctttcaggataagttttaatactcaatcttaccgagaacatctagtcatatatgacactgaaacgcaaaccaagcttcttcttgcttctcaaagatttgacgatgtagctaaaattcatatgttttttttggttttgaatctcttaacaaagaaagactgctttatgctttaaaaagaagcttggtaatccctaaaaaaacctaaaccctacatcctactttagcttccgggattcggttgctgttctagttgttatagtcaatgatacactagacatctagtcgtatttgactccaaaacgcaaataagcttcttcgtacttctcaaagctttgatggtgtagccaaggtccgtataatatttggttttgaatataaggaaagactactttaggttcctagctttggttatggttttagttctaaaactaaagcatacatgtgtcatgtagtgatatttgactccaaaacacataccaagattcttcttacttcttaaagcatagttgctcctcaacactaaaccgtaaatctgaaaccgtaaaccctaaacataaatcctacaccctaaactcccaaccccaaaccctaaaacctaaaccctaaaccctaaatcctaaacccttagtgtaacgcccccgaatcgccctatggccggacaagccacgggcgacccagttacgctacagtgaagatgatcaaccataacttagtagaggttccacattaatctgttccttaaccaaattataatcgaccctcctcccactaggaacacgacttacttaggattgccaaccctcatgttagtctagtgatgagcgacccggactaggtcttatatctttaaacactcggctgcctttaagaaaacactttatgcatagtatatagcttatacttggcaaagagttacccaaaaatatatctttatatcggatctttgttaaatttagataataacaagtaattttccagaagcaacgtaaaacatcctatttctggcatttcctagtgtttgtcttcccgctatggtcatcccactatggttacctgtaagacaagtagaatcatgagtaatctaagattactcagtgagctgggtctatgcacaaataaatctctagggtttaatcaacttaataggtaaacttatccatcagagatcacagagcacgtaataaacgtattataatatacttataataataccagaatatgcagccaaactagacacatgaatgaaccttgggcccaacatactcccaaccttaccaaaaaggtgcaccacaacatcagcacaaactcccgcatacgtgtatacatgttctccacacgtatgctaccacacacacgtacgtgcacacccacacacacgtacacaactatgaacatccgagctatagccacaaaggcttataaccggaacatcactttaatgcatcatcatgcattacccggcatacgctccgagtcttgtgccatcatataagtgaccattcaggatcaagtcttactgacacaatcacaaaacaaaaaggaaggcagcagattactttaatcatgatggtatcgtgtaaacttagaataccacttagacacaataacctcatgtagtactatatataagtattttaccacacctcaaacaagtataatacaatcaataactaattcacatatttatagttatacataatatagcaaggaaagtatgccctcatagcatatctcatataagtataacaatctaacaaggaaagtatgccctcgaatcatttcttaattcatcaagtaaacttagtttagtccatattcgcctagcctagtcaagtactagtccattccactccttgtgatatcaagtccgtcaaatgcccatatcattttaagattcaagttttaacttaagcagaattccgattagttaagtttaagtgagtaagcatgcatatgatctaaagactagctctaaaaatattcaaacaaacacacgattcgacaacaactcacagattcggtagtttcagaaagttttttgggtcacatgcaaaactcctcgatcacggtcgacgatcccttactgacggtaaagttctctcgaccacaggcgtcgattctccaggcatggacagagtttcctcgaccacgtgcaagatttactgaatttgggcaagttttctcggttgcggacgagttatctgtcaggcagccttacagtctctctctcgccttcaaaaatgaaaacgggcagaggtgagcatcatttatagtccgcccaaggtcggccatgcagcatcgccccctgccacatgtccggacagctgtcgtgcccacatgcgacaggtgtgtctcagacgatggcgtggcgacaggtggcgacgtgatatgatcatggaaaacattaaggatatggagcatgaaccggagcttgaacgtgagcttgtagccgaggaaggagctaagcttgtagccaaggatgagcttgtagcggaggagaagcttgaggcagaggatgttcttgtcacaccggacgttccaatgactcgttctagagttaagctattcaaccaagccattggatggatgcttaaccacatttgggaccaaccaaatgacttgagccaagtcactacctccttggttttgattcaagctcaaggacctcatcaagatggataagtgattcatgagtgctctttttccctgcttttggttttgtcccaatggatttttcaaaggaaggtttttaatgaggcttatgtattcgcttcatataatccattttgatgattcaaggcccaagcccactaaaataaagagacaatttcgtggcctttgacattgaaggggtactttt

SEQ ID NO: 38428 - DNA, 5588 bp, Arabidopsis thaliana landsberg
cactgactgaatgaatgcttgatttttgaatcttaaaattacctttgcaggatagaactgactttgagctggtaacacttccggctcttgttcctgttctgagtactgcttcaggagatacattactgctgcttgtgaaacatgcagatcttattactaacaaggtaaagttgatcaattctatacaatactggcttatgtttttcttaccctgcacttgtttgtttctgcttaagttcttctgattggacatagtatgatggaatgaaggatgtatgtatacaatatggttcactttaacaacacatcaactcgatattatagtcttttgtgctgtcataacctgatacatgcagatatagtcagatacatatttggttgtaaggttccacgttgaagatacacagactgttatttgtttctggatccagttgtacattgaaatcaatatcttttttctaatgcatatagggtgagatccttactcggcttacgtttatgtcaaacttttcagactgatagtgagcatcttgtatcgcacgtcctccctttgcttctgcgagcctacaatgataacgatgtccgcattcaggaggaagttcttaaaagatccacatctgtggctaagcaactcgatggtcaggtgatgctcaatgctttgttttaatgttttattggaataatatgtttttctccgagaagagtagaatcaatttttgatgtatggctttgtggtattgcagagtagtgtcggttaattatgctggatgagttcttctaattatcattttttccctgtctttctttatttaggttgtgaggcaagcaattttgcctcgtgttcatggcttggctctcaaaactacagttgctgcggtatgttatgctttgttagattatctcagctcgagttgcttctaataccagtgtctttaatagcttgagaaagaaagagaaaatgaacataactgatcccagcttcttataaataattgactggaatgtacttgttgcgcaggtcagagtaaatgctttgctctgcttagctgagttggtgcaaacgcttgataagcctgccgctatcgaaattctggaaacaattcaacggtgtactgccgtagatcgttctgcaccaaccctaatgtgtacccttgctgtggcaaacgcaatcctcaaacaggtaggattcaggtcaaattttctccttaatgtttgaaatttgaatgtcttgacttcccctcgttttgatatgtggtatcgttgtatctcattatctgcatttttcatcattgttttctagtatggagttgaattcacagcagaacacgtgcttcccctgattataccacttctcactgcccaacaattgaatgtccaacagtttgccaaatatattctatttgtcaaagatattctcaggtatacctccgaccaatcccgtcctgtttccaagttcttattccccttataactgcatactgttgtaattgtttttcaacatctggtttgtctatcctctggtcactgaacaggaaaatagaggaaaaaagaggagtaacagtgaacgattctggagtcccagaggtgaaaccgcattctgctgccaatggacttcagtttcagtcatcaacccaaatacctgagaaggttgcttctgcagccaagagcagtcctgcatgggatgaagattggggctccccgagcaaagattctgctgtgggaaatcctgcttcttctcgtcataacacaaacgatcagtttaacaaatccacagatcagtcacagccatcgatcatgtctactctgcccaacaagacaacagcgccaacaacatgccctgcaggggacattgagtggccttcaaggcaatcttcatgcctcactgctccagcttctgatattcagacacaactaaacacaggaacatcattggcttcgggtttcgatgagttagatccgtttgctaattggcctccacgtcccaacaatggtgcttctgttgcttctaccggtctcaagaatggcgctgcatccaattttagcaacaatttaccaggcggcacccattttcagacagctaacaatgacaactgggcattcagcagtgcctccttgtcttcgctaaaaccaccccagcaagggaatcaaggtatctctgcaaataatcaagatccactcaactctttcggtgtaccaaaacagagccaaggaatgccatctttcaccagtggttcatacaacaaccagaagccagcagacatcagttccatattcggttcaagcaaaaccgaaccgtccgcaatgaaactcgcaccaccaccttcaatagcaatgggaagaggaaggggtagaggtagaggtggtactggcacatctacctcaaagcccagtggttcacaaccatctctattggatctattatgaccacagttcttggtgttgaacctcttcgtgtggtgttggtgtttggtcgtgtgattaagagaagcatatacacatggagattgcgctccgtgctttgtgatgcagagaaaactgttcagaaaaatggagatgttatgtaaacatcttctgggattagcttcttccactatataaactttactacagcttcaggttgttttatgtctttctcaaattgtacaaattttgttatgttttctcaccattgcttcatttgtcacacataatattattttgcggcggctacgctattttcatgtatactttttcttcttttggcagttcctggatcattttctgttggtaagttggccgtaccaccgagtgactgttctagtgttccaaccacgtccgacattacatgtggacctctgatactaaaatatgccatgaatggattctcagtttctcactatttgtacagtcatgatcgtaagtaaagtccactacatctatatatgactaccaccaaagacgtttattacataaatagaaaatacaaacgagtcttttggagtacacagttgacaaattcagtataaacacgaacaagacgttacacaacatttgcttcacaaacgcttaaagagaacacttcacacttgtaagggctttgtgttgttttctacaacacttttctgtgaaccagtcaagtttatatgaagtgagaatgtgggcgatggcgagtccacaaaacaaaccaggtacatagcctattgcagctgctatccagctaaatactttatctttatctttctcttccttttcttcttcttcttctccaccgcattttttttggagaggagcaccgcatagactgggattccctataaatgaagaactattctggctttgaatctgagtgccttgtggtattggaccttcaagcatgttgtaagagaagttcatccgcgctagaaatgtgagttccccgagctctcctgggatactgccggataatctgttttgagatagatccaatgattggagattgctcaagtttgatagagatggtggaagatggcccgtgaaagcgttgtttgacatgttgagcacaatcagttccttgagtataccgatggattctggaatatctccttcaagtctgtttctggagacatcgatggtcttgtagatttcgaaaccactccctaccagttccatattcaatcctttgatcgtcagaaccacagatttatgaaaggattcttggtcatctcctacaaccgtaaatccaggcgtattatcaataatgtctacaaacgatgacattacactccaaccaacaaagtaatctgatggcaagactccactgaagcgattttctgaaatgtcaaaaaatcgtagtttggggaaacttaaagaatctccaggagaaaatattggcccatggaactcgttagaacgaaggacaagcagctgtagattgggcaatgatttcaaccaggatggaaatgtgtcattgattcggttctcttccacgttcaaaaactcgagacgagtgcagttgatcagagacttggggagttctcctgataaccgattgagaccaacatcaagtgattgcaatagatgactgatagattcctctagaaaaataccagagaggctgttattccgaagatgcaagacccaaagagttaaattcccaaaacaccttggaatagaaccgctgaagttgttgtttgacaaaacaagtatccaaagattatccaattcgcatattgttttaggaatctctcccgagaatctattattggagctgaacaagtaagtcatagagactactggtaacaaaggaaatggatcctggaatgtgtttgaacttatgtccagcataattagttctccacatctttgaataacatctgctggtccttcaaaaccattgaaagaattctgagaaatgtttacataccgcaactctggcagactccataaccactctggtacttggccttcaatttgattggcagagatgtctaaataggataacatggtttggtttcgtagaaatttgggaaactcggaaatattgcaggacgataaaataaaggtgtatatggatgagggaagactgacggttgaactgatcttcaaattaatcccggaaagatccaaatgaccaagtgacaagagaggtgagaatatactcaaatcaacaatgcctggattgaaattgtttcttccaatgtttaaatgttgaagattagattgtgaagagatattcccaatctcaagagggccggtgaagtggtttcctcccaggtcaagtaaaaccaacgaagggagcatgaagagagaagagggaatggttccagaaaatgaatttccaccaataaaaatatactccagtttggagaggctactcatgctagatgggaggatacctctgaacttgttatccctaaggtcgatccaggtgagcgaatctgtcagtcggtttaggttgcccatcgaatctggtggttcactagtgaactcattatccgaaagatcaagatgagtgagataagaaagacttccgagtgaagaagaaatctttccatagagattgcaatccttaaaactcaaaaacctcaaatatttaaggttgccgatggaatctggtagcgtaccccaaatattattgctgccaaggtctaggatctgaagatgttgtagtctaaacaggctactattagatctcaaagggccattgagaccattgaactcgaggtctaactcaacaaccactcccgtcttgggatcacaagaaacaccatcccaagaacagcaatcagtgttgttcctccacttctctatatctgtatcaccattcgcagagggatcgaactcttggacatagaactcgttcttgaattcccaaagagcatccctctggtctggaagacacaagtgtttagcaataacaattattgagtttgaaaggtagaagattaaacacaagctccattttattgttatcatcctcctctctctacaagactgcttcatattttttgtttgatttgttttgtttctgtttttctgtacgtgaaacgatttgatgattggattgtctcatataaaatttgtgggaaaccattaaagcttgacttaaaaagtctacctgtgaagagcta

SEQ ID NO: 38429 - DNA, 10457 bp, Arabidopsis thaliana landsberg
  unsure (1)..(10457): unsure at all n locations
ctacggattctctaatcctagggagacctttcttagcctcagcgggagcgatgatagatgtcaaagacgggagaataagtctcaaccttgggaagcacatcaagctgcagtttgacatctacgaaactttgcaaaggtcaactgtagaagaaaagatcatggctcaacctcagccttcgaattcaatcacccgaccaagcacaacctctacacctgacttgtgagaactaaaaagaaatctgatgagcaagaagaaactatagaaaagctagctcagacagttgaggaacttaagagtaaactagatcagatacaagagaaagctcaaccaaaatgcgggattgatactatcccgagaaaaaagtttacttcaagatggtctgaggagatagattatccaccagaagagaaagaggcctatttcgaggaaagaagaattgagtattcttctacacatctctcaagagaggatgctgaatatgatgatgagatcagagaggactatgcagatcctctttatcactcattttcttcttaatgagtgtgaggagtcaagctagagactttaaacaagatcacttgggaggaattcccaagactgtttctgtaaataaaacttttattttcttgttattttttatttgtttttggttgtgtttgtgattctcacgaacagagaaacaacgtggaggtagagtaaaaatttaaaaaatttactctatagagcaacacaggatcgagtatgtcagaaattcaagaatttgaaaaacttctgttgcacttagaggccatgaggtcgagtaagttggtcgagtattagtgatgattttaagaaccaaaattttgaaattatacttatactcgaccaacagaagctacagagacttgcatggagtttaacaagtttacagaggattatagaaggttctaatcaacagggaacagtgcttcaggacaaacagaccaagtgcggcccaccttctctcctctttgtcctcccccacgcgtttttagtgataaggaaatcccaaggcttcatcacagccactcgatccaacctcatctcttcccaccgacgccatctctccctcacaactctcacatgaccaaacctcactcgtcatctctccaccngtcttctttcactcgattgaacgtcctctccaattgccgtttactcgaccacctgaccttcccgtctctccgtcgccttcgttcactcgaccttgccgttccagcttcaccattcctcacagctccgtctccttctcactcgaccacaactcgacgtctccgcgcttcatcttcatttactcgactttgcaggagctcctcgccgttccagctttgccatctctcaccgctcatcatctctccttcactcgaccacttcacgcttcgcctcaacatcttcgccggagattctcgccattcaccgcgctttcgtcgcctccgtttactcaacgacctcacgccattcactcaccgcaagcttgacttggccaccaaggaactcgcctctccctcctcaccgttcaagccccctctcaaccactcgtcctcatcgttgccatctctcatcaaactgccaccgtcttctcttcattcaccgtttactcgaccaaactgcaactgcaatccaccaaacaagcctcgccaccattcactcgaccacgccgttaccgtctctcattcactttcactcgaccgcaaaaccgcaaaactcgtagccacaatttcaacgtactcgaccggtttactcgaccgtgtctcatgtagttctaattcgcgttttttggactagataagactaggtgggcgcctatatcatgggttgggatatgtttaaaagaaaagggtaaattcaatgttgataaggaaagggaaagaattctaggggaagtaagctaaagaagttagaaaaaaaaaatctagtaaaggttttgggaatgttaaagaaaataatgaggttcttgttagctaaagaagaagggttaaaagcctttgttttaaagattaaaaactggaaccttagttgttaaagaaatccaaatccgctagatgtatcagagtgttgagaaagcttctcctagagttaagagaaaagaaaagaatgatatgaaaaagagtttaaaagattcacgagtgcaaagggtagagttaagttcttgtattgggactggagttaggattaccattagagcttcactgttatactctgggtagatgtgatcttatctctgtatgcatagcttgggacttacctttagcattctactaaagctcaatcattttttgagagatcccctgttactgaagcctattctgtaagggaccacctttgtctcttgacctttaccttagccaaatgagttcattgataatgcattgcctgattcacgttccacaactaatgaatgttaaagggattggtagatttgaaagcatgtgttggtcgagtctaagagacggctagattgataacaaggcatggctaacgtttttgagtaaaattcaatcatatcgcatcttagaactaccaacttggacattgattttattggctctatcatatgctttggttctgagtctccgccttcaaacctctccttcaactatgtcttcttatttacttgagggcaagcaaagacaaagtttaggggagttgatatgtctataatgtgcatgttttcagtgtccattcatcaccgttttgagtccagtttttcgtatcattcatcactgttttatatcatttctcatcattcttgcatactttgcatgattaggatagctttgcatacatattgcatttctgagttgttttcaggtgatttggagctgtctgcgagcaaattggaagaaacgagccagaaccagaagatatactcgaccaccaggtcgtgtgcatacagtgcaatactcgaccccctggccgagtgactttggagtcattcttcccatctactcgacccccaagtcgagtatcctcagctcatgccactcgatgacgccactcgaccccctggttgagtatcactttgccacaccacctgaccacactcggacgttctcatatcttcatagtctactcaaatccgcactcaaccagacaagctgagcacaaggaagagaagaggagaagacgaagtgtttggaagcggcctggacctccatcggatcacgaagcccatctcggcccattatcattctatgggccgggcgattaggttattgacccgtctactatcattttattttgttttgtataaatagatgtcttagggttctgtcttgagacatctagtcgacattgagtttttgcttcagttttattttctgttttactctactgcgccgcttttgcttctacaatctgtaattcgagattttttccaagttattcagattccacatttgatttcatttgtcatcttgtttctctactctttatctctttacttatgcaatattatcatttatctgcgtttatgtctttgagcatgttgtctgagtagtgacttagaattcttaaggatgggatagagtagttgtggaatccgtagtctgtagaatggttaagttttagaattgattgaatcccttcaggactagttgcgtttactgcttatttctttctgatcaactggaattcgatcccaagcattctcgcacccagaaggtgttcgatggaatgcttgatccaatagttcctgagatattcatctctatcccaagggattggccgtttagagcgtttattgactttatcagtctgttcttattgcctgcatagttagattccgttaatgggaattagtctaggctagctttgcttgaggatttctatcacgggagtgaattgatctgttgttgaacctgttgtctagggatagcttgattgcgcttgttaaccattcgaatatgctaggataccactctactcgattaccccatccttaagaatttctcgtctatattatttctctgttttatcgttatcgcttaatcgttctcattgcctgtttcttagtttttgcaattactcgaccaacttactcgaccacacccagtgtctggcaacaaactgtgcagtcaagtacagttgtctcatttcatgtctgttactcgaccagtatactcgaccacacccagtgtttggcaacagactgtgcagtcgagtatatttgtttcacatcctgcctgatactcgaccacatcctacttctggcatcagcctgttgtggttgagtgattttagtgattctgttattgtttctgttttctgcatgttcgcttaggactgtaagaaaccccaaaactgttattgcttggcttgacttagtgacttctgatcacatctcatctgtttgcatcacactcatttggattgacaaccttcagtactacaacgacatgatagtgctttaggttcaattgacttaaaaaccttacatcaagtggtatcagagcacactccgaaagttgagtggtctatatctatcatattgtgtctgttcatattcagatatgtgtgcagctgtcaccttgatttaatttacataattatttgaagcgtgctaaaatttcgaaattaactggaacgggttcgaaaaagaatctaatattttgtaaaatagcttctgaaatatatgggaacgtgatgataatttatagcatccgaacaagtgaaactgttgtaattagggttctagggcatctgaagggtcatttcgtgtggtcatttcgtgtttgtttcaaaagaactagttactggtgttgttttgttgtctctattgcagaaagaatgcctgaatctaaggaggaagagactagccacaatcgtaacaacaaacttttggtataagtctttgagaaaatgatggacaccaaacttaatgcttttcgccgagagtttcatgagaaactagagttggggcagactcgtcctcgagaatgaaggagagttaatgagccgcttgaggaaagagatgaagctacagatcagtactatgggcataggagcacttcatctcacaatagtcaaaggagacaccatagacgtgctagagaaggtagagatcttttgcaagacaatcttggaggtcttaagcttaaaattccaccattccatggaaagaatgatccagatgcttatttggaatgggaaaagaagattgaattggttttcaaccttcaacactacaccgagatcaatagggtaagagttgctgctaccgaaatttatgactatgctttgagttggtgggatcagctagttacttcacggagacgtaatcaagagcttccattggaatcttggtccgaaatgaaagctattatgaggaagagattcgtccctagtcactaccaccgtgagctgcatttcaagttgaggaatcttacacaagggaaccgttctgtcgaagagtactacaaggaaatggagactttgatgttgcgggctgataattctgaggatagagaagcaactatgtcaaggtttcttggggatttaaacagagatattcaagacagattggagactcaatactatgttgaaatagaagagatgttgcacaaggcgattttgtttgaacaacaagttaagaggaagagttcatcacgatctagttatggttcaggaaccgttgctaagcctacttaccaaagagaagagagaaccagcagctataagccgattctcagttcaagggctgaaagtaaaccatatgctgcagttcaagatcacaaaggaaagactgaaatttctacatctagagtttgtgatgttaggtgttacaaatgtcaaaggaaaggactgataataagtttttaagtcaattaaacctaaagcactatcatgtcgttgtagtactgaaggttgtcaatccaaatgggtgtgatgctaacaatcaagatgtgatcagaagtcactaagtcaagccaagcaataacaggttttggtgtgttctagcagtcctaagtgaacatgcagaaaacagaaattcaagcagaacgagtaaaacactcgaccaacacagctctttgcagagcactgggtgtggtcgagtgacaggtcgagtaacagacagaaaatgaaacagggatactcgactgcacagtctgttgccagacaactggatggtcgagtatcaggtcgagtaacagtaaagaattgcagaaactaagcaacagatgacaagatgcagtaaacaaaagtagagtagacaaagaattcaatcagataaagaattcccgaggatggggtaattgagtagtttcgtttcctcagtttacaggtgattgacatgctcaataaattaaccctagacaacaagttcattaaccaaatctaagtgccaccgcaacagagaccctcaagttaacctaatcccagactcaatcaccattgacgagagctaacctaacaggcattacgaatcaaacaagttaaagccaaaacgctccctaaaaccaataccttggtacagagccaagaatctctggaattagtggttcagacatttcatcgaacactttttggacccaaaaatgtttgggctcaaattccagttgatcagaaagcaataggcattaagaacaactaatccagaagggatctataaatcaaactcaaccaccttgcatactgagaattctaaacaactctaacccatcctcagaaacttattcactactcagacatcattgcagaaaacataaacgttgaatggaatgaaaacatgataacataagagtaataacaagatggtaacaggatgaacaatagtaaacgaaatcaagaacaaatattgaatactgaatactgaatagataaagagaaatccgaattaccaaaggtcaaaaacaaagtgtctacggaataaaacttagataaaaacttgttctcgaaaatgttaagtacatgctacttatagcgaaatatttcaaaatcctaatactcaaaacgacgcagtattgggacggattaagaatggtacccgacccaggtggtcgagtgagtggtcgagtgatgagctggaggtgatgtatgtactcgaccatgtggtcgagtagtatgatcgagtgaaggtgatgtggtggacgtgatgatactcgaccagggggtcgagtgatgtgatcgagtggttgtcttggtggtactcgacctgggggtcgagcggtgatgtgcagtgatgaggccatctactccaccagggggtccattgttttgttgaaatcatataaccatctactctaccaggggctcgagtctaacagcttgtctagcttttcattcagatccttgatatctttgctctatttattctcactacctccagttcctctcattgagcgatcatagtcttcattgtagcacccattgatcttggtaaggctatagagcctatcaaaactgtcaagatggtccagggggtcttccataggtaagccatgaaacttgtttccttggatcattgagatgagaccactacttgatctcaaagttgttgttctgaactggtgaaggcactatcccttgtctttggtgatgattccttggggcatcaccagcaccaatgtttcttggttgatcaacattaggtgggtcttgaacatcaactggtctgttctgttaatccatagcagctggtatttgctgataacaggctgcctttactttggtttcttgtaactcacgagctattttgtcaattgtgtctttgaatggtaataggtgtgcagaacctttggatggagtttgcatgcacaaagattagtacctataccacaaaaacaagcagacgaaatgatgagttagtaacttgataaatgtaaaagaacttgatcttaaaagtttctgatatcttgaatgtaacaatgcaacaatgaattggcaatgccaccaaattgataagcaggtttttaaggtctccttatggtgaatgctgtgtgattcagttcaattcccctaaaacacaaacatgtcgttgcagttatagaggatgtcaatccaatccctgtattgctagcaatcaagatgtgcacaaaatactactaatttcaagttcagattataatgatggtgggttcctagtaacgatcctaggtcaggattcaaacaagtaaaaataagaacttaagagccctactcgatcattgggtggagtataaccaacaagtgacaaaattaagaaacctaaatgcaatcaacaggggatacaaataacaggtaaataaaagtgcaatcaacaggggatacaaataaatgtaatagaagatctaaggatggattcattgataagggtaactctagtattcaccaaatggttaataggtgaaaggtagatacccttgacgatagattcaaaaaccgggtcaatccactctcgtgacagagaccctcataactctactacttcctaatctcaactctcattgatgaaacatagcagagcagggtttaagaatcaatctaccaaagtcattaagcagtctaaacatccaatctcttcgaatagaatctacaaatctctggaattcgtagatcatgcatccatttgaacgtcttttggacgctggatacctatggtcgaattcccacattagccagcgaaaaccgcataggggccaacgaatccagaagggatctaacctaatcttaaccacctgactaacctagagattaccctaatctaatccatcctcaagaaccctaatcactactcaagcaacataagtaagaacacaaacccagaaattactgaaatcatatcacaatgtagatctaaacaagctaaacaactttgttcaaagaactaaatgcaaaaacgaaatatattaagagtaattaaggtttttaagattcaagaacacaaagaaaaactaagagataaaagctagatccattggacaaatcccaaagtgatctatttatactaaattttgaaaaccctagattcatttgaagacaagagagttgaggcggtttggacgattgctcgatcttggggatcgagtaaacaaggtgctgtaaagtctgcacctttgcctccatgttccgagtgatcaattggtcgagtagatgcttatcctctcctattcttatgctaagatgtctggttgagtggagaatgaggaggatcagaagacgctttgatagatcaacaagtcttttagagtaggtcgcctttggtcgagtgattgggtcgagtaggggatcgagtaggagggttgagtagtgtctgctgcctcctctgtggctgcctggatcgagtaaaaaggtcgagtggttgctctgctgcttccctcctggcttgatagagtagagggtcgagtataatccttgtaaactccttctgcacctgaaaacacaccaaaacatgcaatatgtatgcaagatgatcctaaatgcctaggtgtgcaaaataagctaaatgtgatgcaaaatgatatgaaataatgagtgatcactaagctaaatgatgataaatacatgtctagaatgagtaaaatacaatgttatcaagcttccagtttcccttacagtgagagatttgatcgcacatcctatccttcagctttgcttcaaactatatcctaactctctagtttattgcacggtcccagttgtatacttgctacaaaacagacagaagatatatcaaaaagtgcaatcaagtcaaaaaattaacacaagaaaacatagtcacatcatctttacacaacagccaaatacaaagcactcaaatttctaaattagcacaagataacaagacaccaattgcacttacagcaaaagtttcaaaccaacgagtgatcactagttgcggtgtcattgtccaattaacatgtggttctttgaaatctctcttaaatatgctgcggacagtgccagcaacagaagggtcttcgttaaacctaaaaaaataattcaatcggactaattagtataatcatctaaaaccaaaacattttaccagattgttatgctaaaccaaacaaaacatctacacaactaaccctaaaaccagaatagaaaccaaaatattttaccagattattatgctaaaccaaacaaaacatctacccaactaaccctaaaccataatagaaaccaaaacattttaccagattgttatgctaaaccaaacaaaacatctacacaattaacccttaaaccataatagaaacctaattattgttcgaatgaaggacatcaacctaccaaagagtttccaaaggacgattaaggtctactctcgtcagagatgcacgaccgggactatcaagcaactcatcaagtgtcaggttgttgaaacgcccagatataggattaggatgattattagaagcttgaggcgatttgattttgatgtgtagaaagaaagtcccatgccccttgaagagttttgaatttggttggagtccagaaaaaaaaggaggggaagggc

SEQ ID NO: 38430 - DNA, 3177 bp, Arabidopsis thaliana landsberg
agaaatctcatctcgcaccttccgaataaagactagaactggcatcacccgtggttcctagttaaaaagagccctgcctcgatcgggaacctcccggacttgctccccacgcagtggaccacttagcgcggtagttattagttcatgcatatgagcttcatttacttcttgccttatctgaccagtttctattttccacttcgcagcttttattgcacctacccttcctactgctgagttcgtcgaattcttcaaaattatcattgaaggggagaccctttggaactctttcactctcgagcggttcatagaagccaaccgcaagctcagaataagtccgcctggacagcttctataacttccaccacctcccgctctacctcacggaacctcagcccgggctatcgctacacgacgtaagacattatccaagccgatggcagaggcttgtgaagcaaacaagacatttcttacgccggttatcgacaaaagaggataaagtaggactctactggttgacgatggcattgctgagggtgctagatctgctggtgctttcagatcaacatctcgacatgaaaatcgtagcggtcgctcacctcaaagagatcgatcccccccccccccaacgtgactctccccgacactcttctcgggataggctgagcagcgaaccgattgtggatttgatccgaaaaagagagagagaccagctcgtggcaactcttcccctaagagggagaaatcgagagctcaaactgactgttcccctcgatcttctcccccacctcgctctatgggtcctcttgtaacgcccgcatcccgcgttcataaagaggcctgtttattttaggggaaactagaccatggtcgaggaacttagtcggaagaacgagaaagttcaagctgaaccagctaggtgaggtggacaagctggatgaactagctagctaagttaggttagctaaaccagctggaagactagctagctcagctatgtgagctgaccgacagctcgactgacctcggtgagctgatcgtgtactgacccagctgggtggtccgatcagctgacactcgagctggtggactgtggtagctcacgggtgaagaggtgtctcagccaaatggtgtaaggtcgagcgggtaccaacgaagggttgcattgcccaaaggatgcaaggaacggatgtgaccttttggaaggatgcaaggaacgaatgtgaccttttagaagggtgcaagtaacggatgtgatgcttcgggaagcatccattcgccccctatataagggaggacgcccaaggcctttgtgaatctcacatcatctcacaacatccaaaacaccataaaacattcttaaaggagtcccaacacatcctagagttgttggtcggaaaggggtgcggctgggcgagtataactcgaccgaattgatgcgcatactacctcccggtccaacggtttgatggagtgtagaggatggagagggtagaccgttcgtcttagagacgaatcggatctggtagaccgatcgtcggatcggatcagccagaccgatcgtcggacggatcggatcagccagacggatcggatcagacagatcgatcgtcggacgggtcggatgggacaggccgatcgtctaacggaacaggtcggacagaccgatcgtcggatgggatggatcgagaaaattgttcgaggaagcacaaggataagtgcatccgaacacacccaagggtcgcccatggatgcaatcttaccgataaagggagaaagcaccaagaatgggtaaggaacgtgattcaccatataggatcaacatcgcggctgtcttcatgtatttatctcctcaaccatggtgaaaccgatcagagatcggtaagaccaaagggtgactcgacggataaccaacgggaaagtccacggtgggaaccgatagacaaaacggatgttggaccggcgagcaaacctaaggccgacggaagaaagatttcatgggctagcctacgatgatccagtggatgaatccacggacccttgggtgtgataaggatatcgttcggaccgcatggatggatcattaagccgaaagctttatcgaccactatggaccggacgggtaaacggttagtaaaccgtgggcggtcgtagtgttaaacgaccggaacggaaacatggatgattcgataagccattggctctatcgtccaccatggaaccgaaggggcgtacgtttggaggacagatggaccaataagccaagagcttgattcggccatcgtgaaccaagggaatcgtacgatccccaatctctatcgttgtacttagaccagagcggttggttggttgtatggctaagtaacgatagggattggttcatcaattcacgatcgcatacaaatcgttgaacgaatagaataaggcgacaaatgggctagggaatcaaatccgcatattggccaaggtatgtgacgatgtagcttactagttaggatagacgtttgggaatcgaccgtgaaaataggataaaggaatatgcgattgttaggcctagaatggttaccgaacaatatgcatgtcttgaccgagtaaaggattgatctaagtctaagggacaaagacgatgaaacctgtacaagagttgaatcgcaaggcaattctaaggttagaaagacttccgctgtgtaataagagagcgattatagaatttagcctcgtaaaggcaattctatgttgaatcgcgaaaaattaagaggttcggccgggaagaggcgcgaacttgagtacaacgtcgccggacgccgagacgtccgggacggggtctcacaggatgagctacggtgttagcatattgaggattgattatggagtgtttagtcaattgtgtgttgttggagtcctagcatcatcttctccgagccttaaatgagattccacggtaagttgtttgtgatatattcgtttgttttagtttcttagccatttgttcttgagtagcgcagatggttagaggagctggagttcgtgctcgtggtcgcggtaggggacgaatcctcgggggtaccggcgagagtgatggcacagggtactggctcgattcgtatcatggtcatgctgttcctgtgtgaattgtatctgccacaattgacacacatcgagcggaagataagtgta

SEQ ID NO: 38431 - DNA, 6424 bp, Arabidopsis thaliana landsberg
cggcatgaaggtacacaaatctttccgtatcttttgcaactctggataacatgaactcatcacatcacgtgacttattagttagttctattgactcttgtttttatctatttttgctaagggtccaaagctataaagccaaaccttttcattattaacattcatagcaaaagaaataataatggaaatggagttatgacttatatgatgaaaaagaaggcgacatttcattacatttttaaaaattatgaaaaaatggttataagtaatttgggattaaaaaagaagttaatataaagaaacgcaattctgtgaaactcattttataaaattttacggttaaaagtgaaatgtacaaagataaaaaatacatgacattcgatttttatttttttatttttttttgtttattttgtcaagattcattaaaacagtttataaaagaaaatgtacataataaaaagttgtaacatttgttaacgttcaaaatttgtgtttacagtttacatgatattagctagttagataaaattgtgattgatcttggcaagaagtgttaaaatagttatcatgttgacatgttggtatacgactgactattagttagttgtactttgactaatgcatttaagcgtatgtgcatttcttgtaagaaatgttcatgtatcataattaattcatgtgtatcaagtttgtgtatatatagaggctgatgaattgggaagaagaacaaaatacaactcactacaaacacacagtttaatccaaaaaaaaatcaaaagatgaatgccacaaagttttctgtgcttctcgtgattggcgttttgtgtgccattgtcaccgcaaggcaggtcgaagaagtgtccaaagagaccaaattaggtatctctactccaaaaactactatccaaggcgttggagctcagctttctactaggggcagaactttcagcaactctgggggctctagctttgctagagctactcatggtcgcaaaggtccagaagctgatgcatccgaaggtggcttcacaagtaccggcgcagaaatcattgccaagggtcgcaagacaaaagtttcttctaaaagtgcttcagtctcacaaggaggctctaaagctgcagcgaatcgcaaagctgctgctgcctctgcaggtggtgccacaggttccgaatccagggtgaagggttcctctgagaagaagaagggcaaaggaaaaaaggattgagcgtgaggtcatctcatggttattgtccaaacctatatattaataatatcctacaaactacaaactcacaatctctttcttgatcataaataaaaccagagattgtcacctttacttatcatgaaatgctactactatctttctgtaatggctattgatgatatataaataatagcaaaatttataatattctgaatgatacattatatcttctctttattgatattatgaaatgcctatatcttctctttattgatgttatgaaatgctactactatctctctgtaatggctttaaaattaaaatgattctcaaatatccaccgaccacaagcattgcttatagcattctttgtacattctcatacaagtggataagagttccgagtatgaaactttatgtcagtcttttccacagggtaatctggagaacaagaagagaaatgtatcggttttaagagaattgggaatgcctcacaagttgttattccccttgcttatatccgttggtcaacctgtatgtggaaaagatagatttaatacgtctctcaagaaggtagttgagatgggttttgatccgaccaccgcaaagtttgtcaaagctctccacgtatcttacgaaatgaacgacaaaacaatagaagaaaaagtcaatgtctacaaatggttaggcatggctgtgggagatgcaatgttcaaaaagcttccacactctctcacaatctcggagaagaagataactcaaacatgaattaatggatattttcactggaaagaagagaaaaaatgaattgtatatgttacttgttcattacctttttcttgtaacttgatgtgattacaattacaagatgcattaatccatccgtggcgaagtatctttcttctatattctcaacatcttcaaaagattcttattcaaggaaaagtcaataattatagcttaaccattggaaattcttgagaattataacaacaaattagagagacacatatttataattttctttagaatattacttcttcttgttttgtaaaatttatgactcctcctcaacaaaaataattccgaacgactagagtcaattagaaaaagtgacggcaaaaaaacatttatatggaagaataatactttgactaactttcgactcccataagtaacgagttgcaagtagcttaggaagtgatacaacagagcaatgtaataaatgacatggagctggagtgaggagctcaacacataaatggcaatatacgctccaagagacagttgttgagatggtgtcttggaaaggatattggaagtttgtatagtttaaacataagaagaagttcctttttcatctacaaaaaggaaatatgtcaatttcaccaacgtgttgttggcccagtggtaaatctctcagatagaggtgctggattcgaggcacgttgagaaggatctcttttccaaagaagatgaatttctggtatgggtcccgcctctgggagatgtagggcctttgggcctgaacttccagatattcaaaaaaaaaaaaaaaaatgttaatcataccaagccttttcactaaatgtttttggtatagaaaatcaattactcttagtggcatggcatttcataagtcaagtcttttatatatttggtgttgataggaggatcggagaaggtaaattaccttttgggataacaaatgacggaagtggctatcacggggaattgttcgggctttaacgattacatataagaaaatgatagtactagacaagtcgaatgccgaactagtcttagagatagaatgaagtaatattttgtgactctttctctcagttatgtgatttttttttctgacacgtaagctgatccggtccaacgttatctaaagccctattcaaaattataatttttgacatcgtttatgaatgttataattttataaacaaaaagaacagaaaattttattggtaagaacaaagaaaagaatcatcaaaaaaaacgatgggatccaaatttcatcattttcagtaaacaaaaaaaaacaaatcagaacaaattgataaaataaaacccgtcaatcatatatataaaataacataaccacatacattttaaaagaattatttgttacaattaagttagacaagtttcagattacaagtaatataactacatatattttctcaatatatattatatattgttgttgtatgagttcatgatagtgaaaaattatgataataggtatataagtattcatattatagtaaaattgatatgtcgagttatagatgaatataatcacacaaaaattataattatataaaatagatatgaatttagtaattccataataacaaaacacagaaaataacatcaaaatcaacaaaaaaaccataatcataatgttttccaacaatttaaaaagtaaaaactcatacttagcatgagtgttcatctagtaatattagtttggaagaagtgatttactcattcaatgtaattatggaccaaaagcccaaaacttttgagttttttttttgttatttcgacgaaatttataatttttttacaaaattaatttagtatacatgatcttcgtaaattgacaggtgtacatttggaatgatatgggctcatttggtatgcatattacatttgggctcaccaaatagatctaatgtcatgggatgacactttaataaaatttggaaaatatacggtcaagtctcgctactatacataacaaatgatgaagcaaggtggaaacaaactcgctaatttttcctggataccaaacctctttcaagcttactcttggaaagttcaatatcaaccaaaattgagacattttgtttagcaatttattactggatatgtgccgcttccttcaaatctgaggaaaagagatattaattttgatacggtttgtggtagatgtgtgaccctataggagacaattaatcatatgatttttgagtgtcccacagcccttcaaatatggacactaccgcaaatatcaacagtttggaatattcccattcatcactacttgtgaacattgatcatttttttagaggacacctagcaaattcctaaattcaagttatccttagatcatgttatacatttgtaaagtacggaatggtgggatgatgaagaggcaatgctaatgtgtactaccacggtttcaaaaagatggtgatgaatgcaaaaaggttttaaataattgatttggccacctatgtcaccaaagtgcacttatcatttcagtcaaacgtcctgagagaactccacaattaagcgtgcttggactggagtagtttcagggtggctgacctttcaggaagtgattgtcgtaaccatgcgagtgggaacaaagcatggggaaagatcatgtggtaatttgtagggttggtaacaagtctttagaaccttctggacgcagagagaggatgtggggaccgctggcaggtacgttcgtagcgttacaattttttttgtcaatattttaatatttttgttcatagatatttcgtcaaaaatgttttggatatttggttttttcgtttttttttggtattttgtgtaaaataacgggaaccaaacggaacggatatctattaatggcccctatcatactcttcgactctgcatctaacaatccaagcttactcccggtagttgtataaaaatcaccttgggcctgtttaatctagagccaacctgcgatttgagtatgcatacggtatgtgcgatgagatcaataccctttgttgtcgaccatccaaaaagccatccccattctcttacctttttccccgcacaagcttctttaatttgcagtttctgtgcaacgattaagaagcttgatcccacatacatctgtatcgaatgtgtcttcgtgatccatgaacattgtatgggtttcccacatgtcataaggatatcccgtcacaaccaccatatctcttttacctcttctcttccatccggaaatctgtcttgcggagtatgtcatcaacaagttgacaacgattatggtgcatactcttgcgagatatgtgatgcttattttgttcattcgaaatgtgcattacttccaaggatttgggatggaaaagaacttgaaggagtaccagaagaagatgatatgatagatgatggggagccgttcaagaggatagctgatggaataatactccatccttttcattgtcacaatctgcatcttgagacaactagagcttatgacgaaaataagtattgtcgagggtgtgcccttccaatctacgaaggtcaattctattcatgcattgaaagcgacttcatcctccatgaacattgtgcaaatgctccacgcatgaagcgacatcccttacatccacatccacttacactagttgttgccaccaggggacctggtaatgaggaaggtacatttcaatgtgacgcatgtcatcgtaaaggtactggcttcttctatgagcatcatactgatcaagaaaacatcttcatgctagacatacattgtgcctctattttcgaaccctttcaatatcaaggccatgaacatccattattcctaccttcagaaccaaataaatggggaagatgtcagatgtgcacatacgaatacgttgatttaaatttaaattgcttggaatgcgattatattttatgtttccattgtgctaccttgccatacaaggtaaggtataagcatgacagtcattttctcaagatttgtaatgggaaggaggcaaatgatcaatcatactggtgtgagatttgtgaaggcaagatagaggaaggaacggaaagagcgttttacaatactccaaagaaggacacgtcattttacaaatgcaatgcctgctgcaccactcttcatcaacggtgcttacttgggatagatacttacatgaaacctggagaaactgtaaaagactacctttcttcaatcaagtatgcatctgaaggtcaaagcaaggaatcaatcacagatgttcggattcttctcaacagttctctcacccgaccaatttgcactcgatgtctttgccgttgtccatttccaatattttttaaagggcacaacacaatattttgttcttgggattgtgttgaagattcggccatgcgatcctaccaacgacttctctattcgtttatatcgggttaaggagtagcaaagataag

SEQ ID NO: 38432 - DNA, 3793 bp, Arabidopsis thaliana landsberg
tggtttggacggtcggttttcggtttcgtttttcccgccctattaattaacattttatattatggattcaagcctacttcattttagtggggtttaatggacatatctatggttatattcaaacttcaaagccttgggtttgtaaagttttacatctagcctaagtgtatatgtaaacatatcatgtaagcactgatttattaggagaatgaaaacaaacaaaacactcttttatgaagcaaaaagaaagcaagcacaaataagcttactctaaggcccactaaattttaacaaatacccattaaagcccatttaggaacaaggaaaacaaaactggaccgtatcaaaacgacaaaacaaagctagaagctcttcagattcaatgatatccaatgggggctggagcttcttttagctcacgaccttggtaatgaatatcctgcaaagtaaaaccataattgatcagtaacacacgattttaagctttagaatttagtctcaagcaaataatatacttacagatgcaaaatggtttacatcacggtgatgagcctcgtcagcacgaacaaccatcacaacatcacgaagtgtcgcatcagcaggaagcctccagtaatcaatagcaatagccggagcaggaacattctcaatgttacctttgtcaagttccttgagaaactcagtataagaatggatcgcttcttcttcaaggtacccaaccatacgatgagcaaacttgggagagattaagtaaccaaggaaataagcgttgaagaagactccttgcacagtgatcacgagcgctctctcgtaccatttcggtttcgcgacttccatgaatgtcataagatgcattctctcattctctgcttcctcaagaagagccttaatccatcctccactttgctcaaaacgtcgaagcgatttgcagtgtagtaacattcctccaaccattacaggtactgctgctacagtttcaagcatcatagctcgacatccatatctcctctgttttaattcacaatatcacaatcagaccaacaattaaccaataattcattacataatgataattaaccatcaattaaccaagaatccaaagcactaacgaagtgattaatataataaacacatatattccaaaataatcaaacaaaatattgactagttgctataataagaatgaaataaaatatttaaggttacacgtaatcaatgacgatatcagatttggatcatttccatatcataaaattggcaaaaaatgtaaagaaattttccatgggagaagaagaagaagatcagtacctggaagaacaaatcggtaggccagcgaagagatttaacagtccaataagctattctatcaagaaacgtcgttggaacatgatgcttcttcagatctatcgttatatcagctttatacgtctcccatggctgcaaaaatccaaagaaatttcaacaaatttacacagatcaacgaagaacaacactgtatacgaatctagctataacgtaccctgaaacagttccacttccattcagaaccatcttctttagtaatcttattaggttcaacaccccaatagctcgcgattcctttatctcccttgttattacctccggcggcgtctccaccggtggattcgttctctgttttcttctgattcgcgtcctcctccttcatcgaagttttctctcccagagtgatcgtgctagcaaatctaaaacctccaatcgtcggagctctagtccatatccaagcagatgaacaccaggcttcaaaatatggctgctgataaagcctcgtaacgaaccgtcggaccgtcgagaacaaacgtggtccagccgccattaacagcgatttcgccgccttggctccaccgcgagttatcatcattgtttcaaatcggaaaaagtgaaatctcaaatccaagaatttaggaaaattgtaggagaactctttttttttttggtttactttgtcgtctttatacgcttcacacgcaggtctcgagcaaggtttatatagtaagaaaacgaacggttgatgatcgaaactcttcacgtagatgtaatgagactatgacacgtgtataaagtataacagttttcttgtgtggtttatatttaggatgactgtgttacccttgtggtcatgagagagactatgtttacgacttttctttgactgagggtgtttatgtaaatttaaagccggtgtagatttttcttggagagcaagatggaagatacttgcgtggtcgccaagagctagattcttattggtcaaatttaatgatatcgtgtgtgggtattattacgcgttgtggtgttttagggggaggtattggatgagagaatttaatagaatagaattgaagacataaattatagattttcaagtattgtaaaagattttcaaatctttcttttcaattctaacaatttattttgcagtattttcctagaattaaaaagatatcaatgaattactatagaattattgttctacgttgctctctatcacccaccatgtccaaaccctaaaaatcccagaaacgaccaacatctcttctacccagaaatgacctacgttgacatttatggaattctatcaaacttatggaagagatccctattttaacaccaacgacaatgtcatcaccaccatttatttcctctttgtctctctctctctcgatttacacactctccccctcaatataatctaatggatgatgatctgacgagcaattagccggatcatgagatcacaaattgtagatgtgttagattaataacactctccctcagatttgagaaaagcatatgaaggagaaaagtagacgatgaattttggatgtgttgaaatattctatcaaaatctcaactcaaaaccagagaatttgttcttcacattttagactaaattttctattaaattcctgtcaagtaacgatggcatacaatttcaacataaacttgaataacaattgcaattaatagaattaagaaatgagtaactttaataacacaagagtttaaaagaatttgtaaaatctctacttgaataacaccagaatttatgattctattaaattctatcaaactcatgcgtccaataccccctcctaaacgatttcaaataagatatccttttcttatttatgattatcagattatgtaaacaacatacgtaattttccccaccacatttgtagagtgatgtaattcccgatctaaggtaagactaaaacaatataatgaatagatgtagttagatagtaaagcttttttgctgttgatgagcatgaggctcattgttttggagaagcctatgcaaagcatgattgtgtaataattatgagagaaaaatggttaaaggggaccatgaaatatatattggtctatacctggaccataatgtgttacgtattccttattattaagagttgatacctactatggaaaaatatacgagtgaaaaatccagatcttcgtgtagatatatcatttaaattcctttttttaactagataaatataccaaagtaaaaaatttatttactattgaagtcttttcttttaataaattagagtcactcagtaaaaatgatttttttcttaactagataaatataccaaaataaaaaaactttattaccattgaagtattttcttttaataaattggagtcactccgtaaaaatgatccttaacttaattgtaaagtaaataatttaacttaaaagttggttttgccattttttgaatagtttgtagatttttat

SEQ ID NO: 38433 - DNA, 2839 bp, Arabidopsis thaliana landsberg
acacaccgccgtggaaggcgagaggcaccaacaatactccaccaccactccacccacatcccgaactctgccaagtcaaactattgactcaaaacaagcacttagtggagcgaatccactggttttatttttcttttccctttcttttattttctcttatttttgatttatttttcccgctttctctggatttgaatgccactggggacagtgtcgtttaagtctgggggaggttcttacttataatgcttttatttataaaaaaacatttttttagtttagttaggaatcatgatctatatttctcatgtttattgcctgattgatgagtgctccaggttcgagtcaatccgactattggaaaatctagatggcaaaccaacagacttgaggatatcctagtttccaactcaaccactaagtctggagctaatctcactgctcttccttttacctcttcaaacggttagtattcatagatcttgactccttgttcatacctgatattgagacccatgtgataaaaaaaaaaagttcctctccccttataaaaagaaaaagaaatgatagattgataggattttcagatactgtatagaggtaggaatgtttcctatgaccccattattatacattatttggaatgatcaattgcaaaggttggaaaaataccgaggttgtcgatccagtatgcgagttctcctttgtttactctctaaaacgaataagtctggggagagaaaaaacaccaatgaaaaatatatatataaagaatggtcgattcatcatggtatagtacaggaatgagtatagaaggatcttgaatgttagcttgtttgatgagacccaacgatgaaaccctggtggatatagttgtggaacttaggtatggaatctagaaagttgtgtaagcttgcagagaagtacatgttggttaggatttgattaaacttgttaagcatatggacttagtttggatgatcatgacaataggctagagaatgttgggagttcctttgttttcaaaacctcttccacgggttcggcttttgtgttttgcttgagggcaagcaaaagctaagtctggaggagttgatataaccctatttttattgatttaatctatgttttaggtatatgattttgagtctttatgttatttctcgagtctttttagtggcttttcaggtattctatgcaatgggacaacaatggagataaggagatattttggagcaaaagctaaggaaaaggaagctaaggacgatttcagttccagattcagcgagagtgtcgatcgacacacacctcgtgttgatcgacaccagtttcggcccagcaaagtccataacgctttcaagtttacaaaagtgcaaatttgctctagaagactttcttatttgcattattagtccctgaacgtttattaggtcatatatatagttttagaggtcattgtttagacctatcaagctttttgcaaatccctattttcagagacataagctattcatcccctgttctcgagagattcattcagattccaatacagtgaagagatcctttctaactcttttctttattgttgtgctcatgctttcttattcaattatgttgcttgtttcattcaatatgtttgagtagtttgcttgttagggttagggtttctcattagggattcatatggtttagtaaatcgcctctttgctaggttatatgtagaattcttcatctttaattgttcttaatgctaattctagagtaattaactataacttcaatccagacgatagatatacccgccataggtaactgtagttggatctattatttgatgagcttggtttataggtgtgtaataagaatcggcctatttactaaggtgaactgaattgaagtcgtttataatgcatgtctaagtatcagatttgtcggcttctctggttattcttagctataggcatagggagtttcgcggaacgccaccggttattccaaaattagagttagagtttaagaatggtttgataacaacctaactatcattagatatactaaccaatagtttcctgagaataccctaaacctaactctttattatattgtttcacaacctccaatctgctggttatttactttcattttctttttattttactcattctcttctagcttaatcttgacactctactcattgtgtgaaagaagaactccgtgaattcgatcctaaaatactacaattgatctcttatttgagagagtagttctaggtaatttgaaccatatcaaatttggtgccgttgccggggttcttaggaatcatcattgagtttactcacgcgtttttgttttcttcttttctatgtttcaggtgtatgcctaggcaaacaaggagcacaaaacagaaggagcttatcaacttgtctgttctggacttggaaaaacttgaacgcaccaaccgaaaaactcagaaattagcaatggctgacagagtcatcagagctgatgcagaaggagttttgacagatgaggatgggcaagcctacaatgaggctggtcagagattggatgatcatggactcatcctacctgaggacgccaatgaggatcaagcgcgcctcaatgccaaatagctgccagagacgcagtagggctcgctgtcgatcgacataacagaggtgtcgatcgacaccatcgggagcagcacgacgacgcgattggtgtcgaacgacacaatagaggtgtcaatcgacaccaacaccagattcctgcagctattcctccagctacggaaccacgtcgtactcttggggatttcaacaggccagacctgttctat

SEQ ID NO: 38434 - DNA, 2862 bp, Arabidopsis thaliana landsberg
attctctagtttgattgtttccctacccgaatccatttcgtccctagagctgcttggttctagtatctgcttttttttgttttcaggctaaagttagtgtcaacaaaagctggattcctctgacgagcttggtcgctgcaaaaacgttttcaggtggcgtagctactgaattagtgaattctctcagccttgcaagctcacaagccccaagccaagtatccttcaaattctttattcattcataatctcacatggtaaatttctatgttcttgtcagtagttcagacttgtctttctttgacagctgttctcttggaccttttttctctatttttaggatccgaagaaagtgattgaaatctatgtcccacttactgtacttgcaaaccatgttatctttgcttatacatgtcttagtatatttgacgtgtcgcaagatctgagtatattaacaaaaacatttcaattattaataggtaatcaaagcataaccatacattagatttcccttattgataagagagtattatatgtgtcatttgcctctttttcatttgagcatcactggcagcaatgaccaccactgagtttcaaagctgcttcatcttcctcctcttatgtctcttctcactcgtctgttactctctctttttcaggaaaccaagctcaagacgggacgcccatggctgtgatctgcctccgagccctccttctttgccagtcatcggccatcttcaccttatcctctcttcccttgtccacaagtcttttcaaaagatctcctccaactacggacctctcctccatctccgcatcttcaacgttcccatagtcctcgtctcctctgcgtcagtggcctacgatatcttcagggtgcatgacttgaacgtctcttctcgcggctcccctccgtttgaggagtcactgttgttcggatctaccggcttcattagtgctccctatggagattatttcaagttcatgaagaaacacctggtcacaaagctccttggaccacaggcactcgagcgctcacgcctcatccggacaaatgaactagaacggttttacataaacctgcttgataaggcgacgaagaaggagagcgttgaaattggtaaggaagcgatgaagctcagtaacaacagcatctgcaagatgatcatggggaggagttgtttagaggaaaagggtgaggcattttttgtcaggggtttgattatcgagtcgttttacttgacgaagaaatttttcttggcattcactttgcgcgggctgctcgagaagcttggaatctcgctgttcaaaaaagaaataatgggagtttcccgcagatttgatgatttgctcgaaaggtatcttagggaacatgaagagaaaccagatgctgagcatcaagatacggacatgattgatgcactattggcagcttatcgagacgaaaaggccgagtataagatcactaggaaccagatcaaggcgtttttagtggtaaatgtttccatcatcagttttgatttattatgataaaccatacttaaacaccattgatcttccttgactaagataagttttacaaatgcaggatattttcattgcgggcactgacatctcggcgctaacaacgcagggaacaatggctgagatcattaacaaccctaacatatttgtgagaattagagaagaaatcgattctgttgtagggaaatcaaggctgattcaagaaacggatctaccaaagctcccttacttgcaagcggtagtcaaagaagggcttagattgcacccgcctacgcctctcatggtaagggagttccaagaagggtgtaaggtcaaaggtttctacataccagcgagcacaacccttgttgttaatggttatgctgtgatgagagatccaaatgtctgggaagaccctgaggagttcaagccggagaggtttttagcttcttcaagattaatgcaagaggacgagataagagagcaagccctcaagtacatcgctttcggtagtggaaggagaggctgcccaggagcaaatgtagcttatatctatgtaggaaccgcgattggaatgatggtgcaatgctttgactggagaatcaatggagacaaggttgacatgaaagaggccattcgaggactgaacctgaccatggctcatccccttaagtgcattcctgttgctagaaacctaaaccctttggcttgctcgaaccttaaaccctgtaactttgaatttgcaaaaaagttgttggtgagaggaagctctgctccgctttgtatgttcccgtgtccaagtctcccggtttaagtggctaccttttggtttagtttggtttattgtgtgaaattgtaaataattgtgtagtgttcttcggtttaaggcatatatcggtttcattgttcactgacttcactgacttcattcacttcaaatcttgtgtttatgatcttaaaaatgcagcggtttttaaggttgattttgttttctccgattcgattctctgtataatgcgatcccactcatatgtgactaattgggtttttgcccatataaaggaagcaaaattcaggtgatgaaggaaaaagatgaagatgtcggctttgaagtgaagaaattggagatttaacaaattcagaagtttgagggaaatttacagcattggaatccctctagacactgctggttaggattgggaatggaggaattaacagctgcaagatcaagaaatcccctaagcagctgaatcgtgtgaccagaaaggggctgattgttgtgaattgtgatcgtctgcttttcttttacttgagattcttgaatctgatttctgatagcgttcgagcgagagagagattttc

SEQ ID NO: 38435 - DNA, 5077 bp, Arabidopsis thaliana landsberg
acatatggacaagattaagtaaacaaactctaattttcaaaatcagaaacagagtactaagggcaggggtgatgagatctttacttagattcaggaactgtaatccatttccaataagcaggagaatctccccaaatgatcgtcaattccatcgctgataacatataacacttcttcccactagctttctccacccaaaagctctgattttttcacaaaaatcaacacgcaaaatcagataattatacgattataaacaaaaccctagtttcacattctcgagatcagattcaaattcgttacctttttgccattttcaaccaacacagagttatcagcgagagataaaaagatctcctttttcgataaatgattcgctgattgaagaacaagagacgagtactccgacggaagaaacatctcccaaaccaaatccgattgcaaagaaaatttcaccgatttcgaaaccgaagccacaacacaagcgtcccgaggactcgtatgtgaaatcaccttcgagatacaatcttccggcaatgcatcgaaacgcgacgctctcgtcacagaaatctcatcgttccggctacttcctcctcctccgccgccggaattcgaatcgccgccgtgaatttgttccattgttttcgaatctgaattttggaatcgtatcttatgaaacggtgtgttttgttatgtagtgagcgtggcaatgaagtggatatttatatccttggtgattcgcgaaagacttagaggttaagattttaatgtgatattccgataatacccttataagtgttaacgttttttgatgatagaaactcaaaagttttggctttatctaatcaggcaaagcaagtgacttttgttacgtgtttaacttacctatgaagtctttgttacatgataataaattatattagtcagaaaaagtcaataatttataaatttagtgagtctttgtttaaaatcacaccatgtaaataacagctcacccaaaaaaaaattatggaagtaacaaatatattcattgttttttttgaacaaatttaatttgttattctatctctattgtttttggctaaatggtgactgaactgcacagtgcggtgcatttcaaatagtaacgaaattttctatatatatatatgtatgtatatatttttgttattatttgaaccgcatcgtattttatctgcagttgaaccgcacgtctttcattcttagcctagataatatgtgcaaaagcatggtagagtatatgaaaacaaaaaaaaacaattcctttattaaaatatgttcatgtgagaatgatgaacatccaaatcaaacagtgcaatatccaaaaactagaaacaggtagtgttacccatacaacaaagtttttcacttgcttatataatgaacatccaaatcaaacagtgcaatatccaaaaactaaaaacaggtagtgttacccatacaacaaagtttttcacttgcttatatatagaacaggcttttggtgggacggaattcgattccttgaatgatcaaaccgcgcttccaattaggattcttaatctcaagaatacttgtgtcaacgacatcacaacctgactcattgaagaattgaccaagctcagcttccatccaaccatcttttcttttagttggtctcgttacatctctcgtttctctgtctctcctttgatccgtaggcccaacaaagtatatgtgtctttgagaagattcttgtcccaccaatccaactgtagcttctgctggcacatcccccaaattaggacatccattctttgtcttgaacacaatgtaagccgagtaacgggttccaggagataggtctttagtattcatgccccctcggacctcaaaccaacacacattgagcagctctggtacttcttcaaacctgcatgagtgtatcatcataatcatcaacatgagaatgagtgattatacaatcgaaatgaatgaccaaaaaagaagttctacctagcttcaggaatcgaaatccatcgccaatactgaggagtactaacccatgtgatccacatagatttcttcggtgataacatgaaacactttttcccattctctttctctaaccagaagctctatatttttggaaaataaaagatataattcaaaaattaaaacaataaaaacaatcataaatatctcaatagatgcatgaaatgtataacttgacaactacaccaaaattgttccattgtatcaataaaaaccgatgtaatatatatacctttccgccatcttcgactagaacaggattgtcgcatatagcgaaatagagctccttcttcgatgagaaaactcgagatggaggaactagagacgaataatccgatggaagaaacttgtcccacacgctatcggaattaacagccgattcaaaggttttcgaaacggaagctgcaacgcaagcgtcacgaggactcgtgaaagagatgatgttggagatgcaatcctccggtaagttatcaaacagtgacggtccggagatgatcgctcctccgctatgtttttgcaccatcgacgaagaaccgggattttttcggcctttgcctctagagtcaacgctttgtttgtgtcccattgttgcttgtattatctttcttcatctggaaactcagaatttaaagaaatcttctaaagtcggcctatgttgttaaaaaatagaaaatgactcgtttatagtcgtccacacatatttacgaaactacccttattcgcatcaatgccctgccgcgtgcgtccttacacgttcacgcaacgctgcctgttttttaactgactattggtttattttttcagaaagcaaattttactcttgggtttggttttttcttattaacaatggtctacaaaatctgagaactttactaagaccagttgatgtacagacacgttcatgtacataaatttattcatatgttatcctgtctctatagtttttgctaagtaaagtgtacaaaagcattgtagatgattaaaacacgttttgatttatttattgtaatgtgttcatgtgtgtgaatgatttgcatcaaaatcaaacattaaaaatatcttaagaactaaaataagttagtgttagtttttcacttgcttaacgtgattttccgataattgcattttaagtgtaacgtcttgaaaaaatatcaaaaggttttcaatttcacatagaaaggtttttgccttttagtactgaatcaaagaccagaccaataaaacataattttattcattgttattctagttctattgtttttggccaagtaaagtgaacgaaagcattgtagacatatgataagaaaatcaaacacaatttctttattaaaatatgttcatgtgagaatgatgaaaatcaaaatcaaacattacaataaaaaaaaattaagatatttacaatacaaattttttttcacttgcttatacattaaactgaagcaaccaaacatataccagaatcatcgaaaccaagtatcagtttacatgctttttcgtagggcggaattcgattccttgaatgaccaaaccacttttccaataagaattctcatcaataacacttacttcaacatcaccacaacttgtttcattgaagaactcaccaagctcagcttccatccattcatcttctctttgatctggttttgttacatctctcgtttccctccttccccttcgatccctaggccctatgaaatatatgaatcttttagaagattcttgtcccaccaaaccaagtccaacttctggcggcaaatgccctaatccaggacatcgatctttcgtcttgaacgcaatgtaagccgagtaacgagttccaggagatagcacacgagcgcttgtcttgccacgaatctcaagccaacacacatcaagaagctctgctattttgttaaatctatataacaacaatgtgtgcaaatcatcatcatattattgccaattccaaggatttaaagagggggaaaaaagagttacctagattcaggaattgaaatccattgccaatattcaggactacttccccatgtgatccaaagttcctttgaagataacatgatacgcctttttccactcgcttttttctaaccaaaagctctttgatttttcggaaaataaaataaaacatcaaaataatcagaattacaactacaccaaaaatgttctatcgtagcaagaatcaattttcttaaattaggtttttaacaaatctatgcgaaaactcgttgatttaacacatgattttcaatttgatcattgttctccaacgtataaaccaaagaatagatagaatcatataaatacctttttgccatcttcgattagaacaggattgtggcagagagcgaaataaagttccttcttcgatgcaaaaactcgagatcgagaaaccaaagattcatactccggtggaagaaacttgtcccatacgcaatcggaactaacagctgattcaaaggttttggaaaccgatgcagcaacgcacgcatctcgtggacttgtgaaagagattatgttggagatgcaatcctccggcaagacatcgaaaggtgacggccccggaaaaacgatctctccaccgctttgattttgccccatcatcgatcggtgcctttgatcaaatcgtatgtgtttgcaaaacttaataaactcgtgagttctgactctttcaaactcgcttctgttgtaatagagcaatataaaagacgtgtaatgttgtccacacatatttacgagactacctttcattacacgcttcatgatttcactgttggttgtttttgcacttttttggttatgaaaattacctaaataaccgactacgataaatttattatttcagcaaaaacatctaaatgatttttttgacgaaaatgtcaatgtgatacaagagagaataactaaagttgtcacctacaattgaaatatagtccattcataacgaatatgattttgttaagtaaatggagcatgatctaagaatcggtgtatagagcgtggaatactttataactgtcacaatcgtcaccggatataacgt

SEQ ID NO: 38436 - DNA, 4990 bp, Arabidopsis thaliana landsberg
aaatttctctactttttgaaagcagcatacaacaaatttctgtgtctatgtcacagttactacatctccaatctcattagatctatttctgttcatgcaatacaaagtctcatgtgaaataagcgacttatttcacatttacttggaatcgtagcttcaaggaaaagctctcatatctggtacacaagtcctacattacagtgagcctagtcgagtgggctttatgtctgtatcaaacttcttgtgtgagcttattttacagtttccctctaatcctctctctggaagtgagcttatatatcagcttagttcattgtacttgaattgaggtactaattagggataatattggtgtgagttgggtcatcgatcttgtcaaattccaaagatattacattaacatgtacaacttacactggattgagaaataattatttgataacttctaacaagtacattaaattgtatttgagctatgaggaaacgagaagactaaagtcatgaagtgactctaatacagaggcttttacattacaaggagaagaatgaagactctcactcaaagagaaggccttagccattcaacatttcaacttaaagaaaagcacaaggacgtcacgtgcttcttgcctaaaacggaactgcgtcgttttagatctagttctaatgtaagaacatttcaggaaaacttggggacaaataagcaagtagattcgtgtcttgttcttggcaagcccaagatagaccttgatatgaacctgatccaacccatagagtgacaaaatgttatttttttttttttttttttacaacaaaacaaattcatccatttaagccagaaacgggcggttttcttcgggaaaaaaccagtccagagtagatgagcttacatggaaaaaaatagaacctcgtgctcttgccttcttagcaagacaatcagcacggacattgtttaaacgtggaataaaagataaagaaaaacgaggaaatctacgctttaaagcataaaaatcttctaactcagaagaaaaagcgagccactcatcaggagtgtccaaaagctgcgtcaactccttgcaatctgtctcaaaagtaatgtctgtaatggataaggatgtaagggatcgcattgcccagaggagagcctcgaactccgtatgtagaggagataaacactgtcgaatactttttaacccaagattagagaagcgtcgatctgaaccaacaatccatccaatgccgctgagggaggagccttgtacccaagagccgtcgatctgacaagcaggagggctagagtctagctgacttacggggggctctaggcaggtaggagctgtgtcaagaaacgcatctcgagctctagccacatggaaggactcagcttcgctgcaggcgaattgtaacgtatctgcagggtgggtatctatattcccaaaaacttttgaattacgtgccttccaaataaaccacataatccatgggaagtctctaatagagtcctcacttccacccaactccttcgctcgccaatagagatgatcaagatttgcaaaaatcgaggaggtatggaagacaccatgaataagagggatacgggagagcgaccaaacctgaaaagcggggggacattcaaataggacgtggttaatagactcgtcacacatcccgcaccgggggcagaccttgtctgttcctaaatgacgatcaacaagtcgttgggaggttgctagacatcccgtggcagtttgccagacatcccgtggcagtttgccagagaaagtgtttaattttttggaggattggattttccatacttgtgcctgaagtgccgaaacacctggtccctgaaaaggggggtcgcaatctcctcgtggggaagccttcgctgcccagtagccggatctgacagagtaattgccagactttgtaaaggcccacatgtaagaatctctcgagaatgacaaactcagatgtagccctagaatgtgggggatatcttctgggacaatcagttcttgcagcttggcaatgttccaagtcttagaggactgatcaatcagctcattaacatagagattaggattcgttgttaccaatttacttgtcgctgggcgtgctggtagcgttgggatccaaggatcactccaaacttttgtgtcccacccggagccgatattcttccgaaggccagacaacagaaggggtctagtcgcaagcatactacgccatccatatgagggtagatatgagggcttgacgtggagggggctctggtagcggaagtaccgacctcttaaactgcgagcgagtacacagttagggtatcgtgctagtctccacaactgtttgctgagaagagctaaattaaattcttccaacatcttgaagcctaagcctccttcagatagaggcaaactcagcttatcccaagcaatccagtgaataccattactattctcattagttttccaccagaaatttgcaatagcactactcaactttgagcgaatagccttgggcaataaaaaacacgacataacatatgtcggaagtgcttgggccactgacttgataagaacctctttgcctcctttggacaagaatttggctgaccaggtattaatcctgcttctcaagcgatcttggacaaaagcgaaaacttgagctttagatccgtgaatttgttctggaagtcctaggtatgtacccatctcgccttcttggtggattcctaggatccgcttaatgtcagacttcatctgaggttggatcttacttccgaacatgaccgaagatttggagaagttgatttgttgtcccgaagcctcgccatactggcggataatggagataatctctgagctttgttgacagtcagctttgcaaaagaaaagactatcatccgcaaagagaagatgagagaccggggggctagctcgggagagatgaagcccttgaattttgccaaaccactctgcttgcttaatcctagctattagagcctctgtgcaaatgatgaagtggtagggtgaaagaggatccccttgcctgattcctcgggagggtgaaatgctacctttaggttcgccgttgatgagtacctgataggaaacagtctcaatgcaagtcatgatccagtctacccattttaatgaaaacccgagctttagcataagagttctaaggaatgaccattccactctatcgaaggcttcactcatatctgtcttgatggccatgaaatctttcctgcaggagtcattagtgcggagggcataaaagttttcttgtgcaattaggatgttatcggtgattaatcgtcttgccacaaaggcggattgggtctctgatatgatttttgggagaatcattcggagcctgttgcagagaacttttgagatgattttatagcctacattgcacaaactgattggcctgaaacctgtcatttctctgggtcttccaatcttagggatcaaacatatatttgtttgattcagcttcgggtctaggacacccgtagagaagaagcttttgatggtgcttaccaggtcgagtcgaactatgtgccagaatttttggtagaagagtgttgtcatgccgtctgggcctggtgccttgctaagattcatctcgaagagagcttttttgatctcagcttcggtgacatctctcgtaagacagttattcatttcttcagtaactaactcgggaatttcccagaggatctcatgctccgtagattggaggctagaggtaaataaatgggtaaagtagttggatgccacgttctcaatttcttcttcggatttgacccaatcgccattcgagtttaccaggcctataatcctgtttctagctcgtcgttgtttagttgaggcgtgaaaatacttggtgttttcatctccttcttttaaccagtttgctctacttttttgcttccaatgcagctcctcttctctaaaggcatcgcaaagcttgaatttcaattgagtaatttcggaggggtctttgttttcatcaagttgagcttcatctagctcagcagtcaaagcttctatgagtttagctgagttagagttagcaagctcactttttctccaagtggatatggcttttctacaaaattggatttttttaacgatatcgcatgcatctcctgaagaatcaccccaacctgctagaatcgcgtcttcaaggccctctttgccaagccaacgtttatcaaattggaagctcctcataggttttttgttttttgagataacgtgtgccaataacgggcgatgatcggagccccagaggcgtaggtactccacattagtgtgggaaaaagtggtgtgccagtcttctgtaccaaaagctttatcgagcatacattttatgagaccattgcgccttcttccgacccaagagaaagggtttcccttgtaggggaagtccacaaggccacaattatgaatcatagtgttgaaagggagaaaggagttgacagatctttttttacctccttgtttctcatgattccctgttaactcattgaaatctccaatcaagaaccaaggaccggagcgatcaacacctatacgagtaagacgttcccaaacattttctcggtacttaacgaccggattaccataaacaaaagataaaaatactttatttccatcaataatagtctcaacatcaatcaaacgactagtaaaagaaaggatagtagtggagaaatcgtctgaaagaaaagagctaagcccccgctggacccttctggctctacagtaaaaaggttatcgtaaccaagctccagttgtctttcttctaagacaccattaattgtaaaaacgttttaattacattaagattttaatatatatgtttaagtatgacgcttgaacccagtccattcctttaaaatccaattcatatgtaagtcttaccttaatcgggaatttattactataaattaattgaactttacataagatac

SEQ ID NO: 38437 - DNA, 4470 bp, Arabidopsis thaliana landsberg
ctccatacacaattcatctaacatacttctggaggtgtcaagtaatcattctccagagctttgtggcccaaacaggtcgtgacctctttctgttctcttgacaaagactatgcatacagatagtttcctcgcgcatatactcagcctggttcatcagggttcaacatttgacaatacaatgcaaggaaaagaaaggcttttatggctcacaagaagcaagattttcaaggtggtataaaagaaaaagaggttagtcttaacattgagtttgctaatgccatcaaactgaaaaaagatattgaagactctgaaagatctgaatgtgtacaaaagactgacattacggtggttcctcatgaaccaccgcagtatcagtaaggcatcattagttggaattgccaaggactgaagaatccttagacaattcgacatttgagggaaatgaaaaaggaacatttcccagatattatgttcctcatggagaccatgaattctgacctgtttatattgaaagtttttagttggttgggttatgattactttcatactattgaaccggaaggaaagagtggtgggttagcaattttttggaaacaacaccttcacatagattttctttttgaagacaaaatctgttggatttggagatatctcaaggtagtaagagatggtatatctcttgtgtctatggtaatccaaggcagaatctcagacacttgctcctggaaaaattaagcaacattggtgtgaatagaaaagcagcttggtgtatgataggggattttaatgaaatcatgtctaataaggagaagttaggtggcccctatagagtagaatcatcctttcacgatttcaagaatatgctatcatcttgtgatatgcatgaattgggtggtacaaggaatagttttacctcgggaggaacaagaaatgaagaatggattcaatgtaaattggatcgctgctttggaaattcacagtggttttctttgtttcctaattcacatcaatggtttttggagaaacttggatctgatcacagaccgattctggtgaaatttgttaatgattaggagattttccatggaactttccgctttgataaaaggtttgctgaagaccctctttgtcaagctgctattcacagagcctggataggtaaactttcttctcagtatccttcttgtatgctgcgtttggttgaatgtaattaatccattagtcaatggaaaaaaagaaaggattataatgcagagagttgaataaaggctttaaggttcgatttggatgaagaaaagagtgctcaatttccgtgttggactaagatgtttgttattcaagatcagttgggtattgcttttagagaggaggaatcattttggagattgaaaagcagagataaatggatggctggaggggataagaactctaaattttttcaggcttctgtgaaagctaatagagttaaaaattccttgagctttctagttgatgagaatggttttgagcagactctcaatagggagaaaggcaaaatagcaaaacaattttttgagaatctgtttacttcctcttatcctacaaatatggattcagttttagaaggttttccgaatcgagttacacaagatatgaattatgaactcacacaggaagttacagagcaggagatctataatgttgtcttttccattaatgctgagagtgcgtcaggtcctgatggttttactacggcttttttccagacacattggcttttggtcaaggatcaaataattgcagacattatgggtttctttatacaggcatccttcttgaagaatgtaatcatactcatttatgtctgattccaaaggttccaaatccagagcgaatgagtgacataagacctatcagtttatgttcggttctgtatatggcctttcttacaaggaattctaatggctttgggttttagtagccaatggataagttggataatgggatgtgtctcttctgtttcttattcagtactgataaatggacagccttatggtcatattttgccacaaagaggtatcagacagggtgatcccttatcaccatttttatttttcatctgcactgaagctctaactcatatcttaaaccaagcagaaagatttggaaaaatctctggaattcgatttaatgatgcaggactttcagttaatcatttgttatttgctgatgatactttgatcatctgtaaagcaacacaagaggaatgttctcagattatgcattgtttatcacaatatgggcatatttcagggcaaatgattaatgtggaaaaatcttcagtcacttttggaaacaaggttgaagcagaaacaaaagattggatcatgcatagatctggaattcatgttgaaggaggcaccgacaaatatttaggattaccagaatgtttcagtggatcgaaacaggttttgtttggttttcttaaggagaagttgtactctagatttactggttggtatgctaaaaccttatctcaaggtggaaaggaagtgttgttaaaatccattgctatggtgttccctgtttatgccatgtcttgttttaaacttccaaagagtctatgtacaaagctgattgctgtcatgatggatttctggtggaatatgttgccagagaagaaaaaaattcactggattggagctcaaaaattaatgctgcctaaaagtttgggaggctttgggtttaaagatcttcagtgttttaatcaggctcttttaactaaacaggcttggcgactccttaatgatgaagatagtctcctttctcaggtcttcaaaagcagatattatctaaattcagatttcctctctgcgacaaatggaaaatgtccatcctatgcatggtagagcatcctatatggtcgaggtttatggagtaaaggtctgaaaaaggtcataggaaatggggaaaaaactatgctttagatagataaatggctttttgagggtcagactagaagaccagagagtgttcaggtgatggtggatattaccttaaaagtcagtcaactgattgatccggtttcaacgaattagaatttgaatatgcttaaagacttatttccatggaaagatactcagttaatccgtgatcaaagaccaatggttttgaaagaggattcttttttttttttttttttttttttgaaagaggattcttattgttggtcgggaagtaatcatggtctatacacagttaaatcaggatatgatttgagtagtaggcagcttcctaaggagatgtttcacgaagcacaggaacaaccatctgtcaatcctattttccaaggtatttggagtctttacacagcaccaaatatcaaagtttttttatggaaagcagttaaaggtgcagtggcggtggaagacaggttaaggacaagaggaattctaatagaagatggatgttctatgtgtcctgaggagaatgagacaataaaccacattttgtttcaatgtcctttggcccgccaggtatgggctttatctctgttgcagtcaccattttctggttttgggaattcgagttttactaatatgaatcatgtgcttcacaactgtaagaatcaaagtatttctaggttcctgagatctgttagtccttggattatatggattttctggaaaaacataaataaagttctctttgaaggtgacggttctgtatcacacagcatagtacataaagcatatgaggattgcaaccattggctttctgctcaagatccaaattctcagactgaagaaacaaaaaagggaatgaaatggattcctccgccgcagaatgaactgaagtgcaacattggtgtggcttggtcaagaaaaactcaattggctggtgtttcgtgggtggtcagagatgatacaggaaaagtgctcttacacagtaggagatcttactcacaggtacattctcattttgatgctaaactgaaaagttgggaatgagctttagagagtatggatcaactacatttggacagagttacttttggagcttcatctcatgatattatcaaagcaatgaacaaaccaaaagaatggccagccttgaggggacatttggatgcattgatagctctcactttggacaaaccacattggtatatggcaatggaaataagacagtgtaacacaggagctaatgagatagcaaagagtgtgattactggaatgaggtggcaaagttatgttgctcgagggtctcctcattggctacattatatttttgactctgaattggttcagtagagatgacgatggttttcttctctagtggagagtgttgtggtgaagtgtctaaagagtatgaatggtacatgtgaaggccttcttgtcagatagtcaaaaagagtttttgtcttatcctacatcacaagacgataacttcagagaaaggaagcgtgtgatctttgttttgtttggcatc

SEQ ID NO: 38438 - DNA, 963 bp, Arabidopsis thaliana landsberg
atcggcccttagtcgttttaagcagttccatctatcactttattgtgaaataccagattggcccgttccgccataagtacctccatattctgctgaatgggattcgacaatgagtttgagtcaatgattgcaaaacttccttttctcgatcttgatttgcgtagaattttaggtcaggaactatggtccgatttgaatcggagaggtccgaattcacacgggtgtcctagaattccttttttttaatagcatattattaggtatcatatgaacaggcttgagaaaaaccttgtatagcttcctcgatttctcgataaaaagaaatatgaccaactgtggttcgaatatatatacaaaaattttcgatacatgcactccttcctgctaaatagggtgcactgatcgaatgcgaggcacccaaagattcatagcgagatgcttaacggactgccttagatattgaaccaaagagagaagaacaactacaagcttgatgaaaccggagaaaaggagagttctcgtcacttcacagtcaaagaacttaacgatatggtttatctacaagcagcattgtcagaatctcttagactctatccaccaattccaatggaaatgaaacaagcgaccgaggaagatgtgtttccggatggaactttcttgagaaaaggctcaagggtttacttctcagtctatgcaatgggaaggatggaatcgatttggggaaaagactgtgaaatgttcaaaccagaaagatggatacaaggagggcaatacgtgagtgatgatcagtttaaatacgtcgtgttcaatgcaggtccaagactttgtttagggaaaacatttgcttacttgcagatgaaaatggtggctgcttcgatcttgctgaattactcaatcaagggtgatcaagatcatgttgttgttccgcgagttacaacgactttgtatatgaaacatggtctt

SEQ ID NO: 38439 - DNA, 3735 bp, Arabidopsis thaliana landsberg
tgcaagtcttttctccaaccaaacccatggtaaacacttttgtccgaaaccataactgtgtttcattcaaaaactttgtttgaccaaaagttcatagagaatacaaattatgcatgctaggtatgaccttcaaattattgttatgcgatcgtctcataaaacctcatctacgacttcattttattatataaacatatgcatgctaggataacaactagcaataggctactcgtaaaatgcagctgatgcaaaacaattgctaacaagtactatatgtaagttgagatcttaagaaataaagaatcgatgaaatctctaaactcaatcataactattaacttaaaatgacgagagggaataaaataaaataagagagagaaacgtgtaatgaattaaagatatatgttttaaaatatacttagggcatctccaaccctactatattttagagtaaaaatgcaaaaatcttctccaattctattttataattgactcaaaaatagagatttctgcagattgactctatatatagagcaactctattttctactctatttttgagttcaatttttttatttatactttagtccctcaaatttaaacttttttatttaatacatataattattttacaaacaataattacaacacataattttataaacttaacaaacaaacaaatactaaatttaaaataatttataaacttaacaagaaacaagtacctaatttaaaataaacaacataagaaaactaaaacataaaattaactagtgatttaatagtctctaaattgcttgtggatctaccaagataggcaaaatattatccaaatgaagtagatggaagaggagtttcttgatcttgatcttttcgttggacacgttgtttttgtaaaatccgtccttgttcactctcaaagtatgcccgaacatgtgagttttgaaaggaattcaaatcacaaaataaaatttgtaatgttttattattgttatatgatgtaataaataagtagtgtttaatttaaataatatcatattttctggaaatgtttacaaatctataatatataattgtaaattatataattaaaaagtattagtatataaattagaaatagaatatttctaagaatattcttttttagagtagaaaatagagttatacactgaagagaaatccatctctaaaatagagtaactctattttagagcaagatatagagctatacattatagatggtcttaatacatagtcaaaattgattacttaatgaaaaaatatggatttcttattttattttctcataccagtgattgttttgatgtattggggctgaaaagtgttttttcagcacatcagagaagaaagttaagaatagtgtgttaagcagtaaccacactctttaaaaccgtagattaattattcaagaaattaaaacaactaattaaacaaaaatcctagcagaatctatttgaatgaaccatatccaaatccacaaagtcagtcccccaaatgttgaaacacgtaaattaaacacacaacaacaaaaatataattaattaaacataactaatgaattttataatttacacaaaaatcaatcattatttttttaactattttatattcatttctaactacttttatatttatatgttattagaaaatattaatatatatatattttttatcaaccacacatatattaaaaaataactctatgatcggctgcccaatttagaggagaagagtttacaaaaataacatcagacaacaataaacgagaaaaacaggttaaacaatatgctttagaattacataaacggtaaaaataagaaatcgaaccaagtgtcgttagctcaattggtaaaagaccctagacaaagcttagaggtcgccggttcgagtgacacttgagacgaaactaatgttacatactgcggttttgggcctaagggattactggtttcggcccagaacctcctagtattcagaagaaaaaaaaaatccaccacaagatgatcgctttaaaatcttaatagtcaaaaattcaaattgaagtttctatccttgtataaataagtcagagattattggtctttttgtcacgtgtcaagaaagattaacaaaacattcttcttctatcaagtaacaatgttatatagcataagagagacaaatgggcatgaatcgaagaagagctaatacataatgttgtaaagatggcacaagaagaaacgatgctttgtctggctatgattaatgtttaacgattgacgactacatcaatggtgataatcacgtggtcaacatgattactcgggccttgaattgatttcgtcacggagcttttcttattgttagtgattaccacatgatcaaagtatttactctgaccatgaatttgatttggtcatggtgctttcttctttttggtggtgatgaccactttatccgtagctttgtcaagcaacggttgccttctttagagctggtgggaaaaactaagtcaaagtatagaaacagaaccacaactaaacatcactaattaagtaagataatctctctaggacaatcaataatcatctcttttctagttcgtgggttaaaaatgacacagtttttgaatcaaaagcatagaccaggcaaacaacaatatattcaagttggcattagaccacacatcacataatcagctaaaacacgtaataaccaaacatattcaactatgtaaagattacacaacaaaccaacagtcatgagtttcaaagcatagaccacacaagcagctaatatatttaagttagtattagaccacacagtacacagattcaagtaagtgaaattcattgaacaactaacaaattcaagccaaagcttcaaaagcatagattagatacaaagaataggtcatgcaactacgaaaagaattcaagtcatgggttcgaattacacaacgcaccaatgaaagaatatacacaaaccaaccgaatcaagtaatagcttcaaagcatagaccacacaagcaaccaataaattcaagttaccattaaaccacacagttgacaacttgacattacacatgttcaagtagctgaaaaccatgtaattccaataataaattcaatccaaagcttcaaatacaaagagctttggacaccctttcaagcaactgcataggcaaatttatacatgtattatatatatgcctttttacttgtgattttattcaatcactcacatgtctctcctataagttcatagatcaaattagtaagccgtgggttttacttatagacacaatgtggttgtgttttagtcaaagagctcccaaaaattatacgagtaagggagttattcaaaccgaaatagggactaagccttgggttttttacagacacaatgtgactatgttctacttagagagcttacaaaaatcagacgagtgaggaagttttttgaactgacaatgggactaagccgtgggtactgtcttcccgtttcaggacaaacattaacataagttagagatattagctgaagagattatgtagtcctcaaagccttctcttcttggatcatcgaccaaacttgttgagaagaatgctttctatggttccttatacaaactacaatattgttaagcaaagataagtcccgatgccaatttcaatttcagttatttttgatcttttatatcagcaaagagattgtgaactaaaaccaaaatta

SEQ ID NO: 38440 - DNA, 3804 bp, Arabidopsis thaliana landsberg
ggttgtgagcttatctttcatcatacaaatcgttcagattacttagagcatctccaatggagagagcctcattgagagcctctctatgggctctctccatttttttatgattaaatttccaaaaatgttacaagagagtttttgtgtatttttttttgtttttcatactctaatggtagtctttcttatgtaggttctctgaaaaaatattattattttaaaattatttatttcatataacttaataattatttgcaaatcataaaatattaaacatacattattttgaaacattttaaaatagatgtgcaaaacaaaaatcggaataacgatcaattgttctgtcgattgttgcaattttttttgcatatatgctcaagcaaatcacctttcaattgtagatgcatctctcgataacgaacttgatttcaaatatccataaaatctctgagttttgtaggtatagtagaatatgataaatcgacttgtgaggttcggtttgcttcgaagttgcataatattaatcttatttggttacatggaggaatagtgcatgctcaaaacatggtacaaaagaaatggatgaatagtgcaggctcataacatggtgcacaagaaattaaaccataacatgtaacaatggacattgcaagtgttgaataccatttgtattttacagtcttcagattcaaaaacaaatcactaaaaacttaatttcagaaaataaagaaagatcaattaactaggtacttttgtcgacatcaaaagctttgctgtttgtttcatctcttcttgccaatcgttctctacaccggctctttttgcattgccttcgccttcactctagtttccgtctgtcttgattcaaaccataaacggagtggcaaatcaacccagaaaattaaacaatttggtgggaatatcaacaacagtcatacgaaactgcaggaaaaagcggatcacggtttagatttacggtttgaaagttataaccaatttactaagacagagccggaaggtaacaaacctgcaagcagtcaactttggaaacaatttcccatcaaacagcaagacaactagaagatgatctttatgtccatggaaagatctcgctgtcaagtttccagaacatctttcaagtctaaaacccaatatctatagccaaagaaatgaagacgacaaaaccaatgaaaaaccatgtcgtgttgtgtattgactttacttgattttccactacagcatgtaaagtagattggtgacaaccggtttaccgatgtaagtgtgcgtctttgtgcccacaattaacactttgttcagaacaatctgcacaagagaaagaattaaagatatggacttcatgaatcaccaaaaagcaacaaagaacaacttaacaatgttaacatagataaaaacagaacatcaacaaaacatttgttcttcatcttccatggttactagacaaatgaagaacacatcacatagaagaattcaaatcaaatgtgcctatacttggtcatcgacatttgcatctttctgcctcttagtgtaaaaatatctccttggaaacactaaactattcaaccaaagagaacaacactaaactaaattagagatagtaatacaaaacatatgttctgcatttcaatacaaaaaccaaactttagaaacccccaaaataggtggagtctgtaaactctgacacccatacatgatttcttctaaccgtaacacaaaattgacgaacaagattatagcaaatctaacaccatgagatccaactcgataaattcgattacaacataaaacggttacttcataaacgttggagaaagtcgtgtttttctcggagaaagcaaagcaactcgtactgttttttttttttttcaaaacaaaacatcgaatcacatgtggacatgtgtcgccactctcattttctcaaaacctcacttcacagagacgactctctcatttttaatcagttttgattaatttttcatcccatatttcaaaagaacctccaatgtttttaaacccgacacggacagtgaatcggactactttttgggtcactggatcatcagatcaaccaggttggaccacggatcaattgattaaaatttatttattaaatgtaatattaatagagattttagagttttcagagttcttataaatttaaaaagaaaaataatcatatcatgtttataaaatataaaatcagattatgtttaataaaatataaaattatttagaccaaaaaaactgaaaacaaaatatatatatatatatatatatatatatatatgattaaattttttaaatccaactaaatatctaataccgtaacaaatatagtaggagatcaccaattacggaaataaattaataaaacattgtaaattcacgcaactaatatcgggtgtctcagtcaccattcgattcattttttaaggcagcattgtgaagtcttcacaaaaatctaaaacatcaaatgagtttaagaactgaaattttttctaaaaatgattgaataaagtataaaatctcatattttattctaaaatcaagagaattttgtaaaaccgatccctgatcggttcaaccggttcaccgagtcacgagttaatggtgagttttttggatttttttggttttgaacttgtcgggttttagcactaaacccaaaccgaaaaagtatttgagtcacggttcaaggtcggaccgggcggtccgggtcgggcgtgaaaacacaagtaaaattttcatgaacaaaaaatacaaaccgatggggctccgagaagatccgaccgactttgccccacccgccaagaaatccttctaaaaatactatagagatttgtcgtcttatttactagcgatcattgtcgaatattctaaagtctttttttttgtgtgtggaagatatgttggttatagaataaatgaaacaaaagggaacaagcaaagttttatggaacccaaaaacaagtaaaaaggcccatatcacatgaaaagaataggtcaattggttatagtagtgtacagtgtatatatatataaaattagacacttaggtagtacatttgactaagaaagagttcattttgtatatgtgtgtgtttgtttaggttttcgtttaaaatatctatttttgtagactaccactagagatgaagtgagggctatgatcagatgcctcagcaaatgcatcttggcgttaaactcaagtctgatggaagagggcctagccgttgatgatacagtggttcaacctaaagccgacgactccgagcaaagaaccaccgacgagcatagagacaatgcgaaaaaacttcttaagtttttgaagaatcatgcccttgaggactatttaagtgctttgcaccctcttcctaccaccgaagctagtgaggcatttcgtactctcaccatcatcagatctgaggtgagttcttgtgataggcttattgaccgtgtcatgtatgaagcttatgattgcataacaacaacagatgaagaagaagacgatgatgaatgagatatacagttgtatctcattttatggttgtgtaaacgatttatgtttatggctgtgtttactcagatctatgtctgtttgaaacctatgtgtgtttttatgtctgtgctaacataattatgtttgtttaaaacctaaatggtgtgttctcctagatttaaggacatgcaaatgttttttatctcccggtttagcctatttttgtctctatattataatcaaatcatgggatatgtgtggtctttcttttgacccaaaaaaaaaat

SEQ ID NO: 38441 - DNA, 9406 bp, Arabidopsis thaliana landsberg
aacgcattaaaatctctctgaaaagtccgtgaccgaatgttgagagtcgggcacgactagttcgtcccgaggagcttccggggaatgccgaagttctaccgagtagattaattaggcgattagaggttgattaggattaggattagatcgagtctaaaccgttcaaccgaattaaggtaagtttctagttatgtttgattgcgtgttgcatgtggttccatgtagtcgacgtactcatggtaaccagcttgattgtttattttattgattgcttaaggttatgctttcaatattgttatacttccgcatactgcttgttattttgggttttgggtttgggaattattgcatgttagagggagctaggatttattgggcgattagcgctcattcccccccctctcttttgtaggtaaccttagttagaaactttagtttaagcatggatgttagggaagccggtatagttttcattgcctttgtaaaatgatatttttgtatcgtagtatttacgactcgattgagctttgtttttatacccaaaacctatacttgtatttggtaatgtatttcaatacattatctatgaataagaaattggttttcttaaaactctcgtgtatcctcttattagtctagtccggactaatcccaacttgcggtcgcggtacgggttgcaaggcctctaactcccgtggtcgcgaggggcggtcttctgcggtcgggcctggccttgggtgatcttttgttggattcgtctacgggcggtcgccaaccatacgtgacgctttcggattcgttccttggtcctaggacggttcgggggtgttacaagtttggtatcagagcatggttcaagatgctctcgaggacatgggttgatttttcaaatgttttatcgagtaaaaagagtcgcaaaggcaattaggaaaccggctcatccatgtgataggattaggttagatagaataggatttacccttagagtgtattaggtaaaccttagagatttaggtgaaacccttttagtcttttagtggtagagttgtctcttaatccttagaattcgaggacaaattcttttaaggagggaagaatgtaatacccctggccaggactaggactaggccaaggaattttagtcgatgatttagcaagccgtacaatcggaacgatcggaaaaagtccttatgggaagagtattgtttgtcggaccaacggtctggcagttttggagatattcatgagcaagtggtcggggaaccggatgggtgagtcgagtggaacggagacttgggtgactgagattaatgtgttgatgcgttgggtgaacccgtcatggttacggttctacgagaagtagataggaacgaatatggataagttcgttcatgcctatctattccgtatggataagatcgatcaagtgtattccggacggataaagtggatcaaagttattcggacgttgtggatagagttactaataaagctcgtttgagcctatgttgccacctcgtgcttacctaaccggcctaccacccctataaataatgcttctgcctcattattggttattcacaaaaaaacgcacgaaaatctatctgaaaagtccgcgagcgagcgttgacagtcaggtacgactagttcgtcccgaggagcttccgggtaatgtccaggatctgccgagtagattagttaggctatcgcagactgagtttggattaggagtagatctagtctaaaccgttcagctgaaacaaggtaagtttctagttatgcttgattgcgtattgcatgtggttctgtgtagtttgagtactcatggtagccagctagattgtttattttattgattgcttgaggttatgctttcaatattagtatacttctgcatgctacttgttatattgggttttgagttggggatttattttttgttacagggagctaggactcatagggcgagtagagctcatccccccactctcttttgcagataaccttagatgtaaactttagtttaagtatggatgttagggaagccgatttagttttcaattgcctttgtaaaatggtatttttgtaaactagtatgtacgactcgattaacgtcgccttttgtacccaaaacctatacatgtatttggtaatgtatttcaatacattatctatgaataagaaatcgtgtatcctctcattagtctagtctggactaatcccaacttgcggtcgcagtacaggttgcaaagcctctaagtctcgtggtcgcgaggagcggtcttttgtggtcgggcttagccttgggtaatcttaggtcagattcgtctccaggcggtcgccaacgatcgtgatgcttccggggggtgttataggtatcctccgcatatttccaacctttgcaatttatgattccttagaatgtaaaataaatgggatcaaaggaaatatatctagccctttacactataggacatcatctcaatttctctcttttcatattttttttagtatataagggagaggaatactattctcttcacattggtctcatttatcaggtataaagaaggagtcaagttctgtaaatactatcctttttgatgaggtaaaagaaagagcagtgagattagctccagcttaaatggattatgttggaaaagtggatatcctctagtcagttggtttaccttctggattttccattagtcgtatttagccgaacctccaacattaatcaaccaggcaataatctaaaaaaatacagatcataatttctaactaactagactcaataataacgtttttttctttagaaaagaaaaatgactcaaagataagaacaacgaaaaatactaagactcaaaaataaaagcatagttagtaagcgcctcccctagactcaaacgtcactgtccccagtggcattcaaaattgaagtgaggagaaaaataaaatgaaaaacttatgtgaaagaaaagaaaaatgaaaacatactagtgggttactttccattaagcgcttgtatataaaaacataccagtgagttctagtttgcccaaatcagtagacagattgatcaggtccttttcttttgagcttcttatgagtctaggcatacaactgaaacacagaagaaaagaaaaacaagaaacgtgtaagtctcaaaagaaaaataaaagtttagacaaaatctctaaactaaacctaatggtgattcctaagaactttgtaacggcacccaattttatatgggatcaaattaatcctagaccactctctcaaataaagaggtcatttgcagcacttagggatcgaatgcacaaagctctcggatcacgcaatagactaaggttttgaattaagctaagtaaaacagtaatgaaaataaagagaaacaaaaagtaagcaatagcaatcgattggatggttgtgaaacaagataataaaagcgtcaggcttgtggtattctgaagaaacagatgattagtatatctagtgatagctaggttgttatcaaaccgttcataaactctaactcttattgtggaataaccggtgggcggtccgtgaaactccctatgcctagagctaagaataaccagagaagccgagaaatcttatacttaatcatgcattataaacgaattcaataaagtcaccttagtaaatcggccgattcttattacacacctatagagcaggctcatcaaataaaagatacctatggcgggtatatctattatctggaatcaagttctagttagctactctagaactagcattaagaacaagaacaactaagataaagaatcctaacagataacctagcaagggggcaatctactaaatcatttaaatccttaatgagaaaccctaaacctaacaagaaagctactcaaacatgatctaaggaacacaaattaaagtctgaataagaaatcaataatgaaaataacaaaagaaagagtaagaaagatcttctctagcgagtctccatagggttttgctcccaagtacaaaagagataaggagattagcctctccaagcttaggtctaaataatgaactttagaattatatatatatgacctaaaacgttatgggccttctttagaaataagggaaagttctgagccaaattttgaaatcttcaaaacttcaattttctgcatttttgaattgtcgtcaggtattggtgtcgctcgataccaggggtggtgtcaatcgacacctacgtgaagttttgtctcctgattgcttctgcagcataatttctctcttttactcaagaatgttccataatctccaaatgcatccaaaatatgtaaagacctgaaaaagattagaaaatacactagaaataacaaaaggaacaactataccttaatcatagctaaaagaagtgaaaatcgggttatatcagccatcataattctagtaccaaaatctatatgcctagcaagtctagtcaaatcctaaccaaaatgtatttctccgcaagctttacacaagattctagattctatacctaagtttcactactatattcattaggctttcattgttgggtctcatcaagcaagctaatattcgagaaccttcgagactcattcatgtactataccatgataaatcgaccattctttatattactttttttggtattatttctctcccctaaacttattctttttagagaggaaacaaaggggaactcgcatagtggattgacatcctcaacatatttccaaccttcgtaattgatcattcctaataatatataataatgggatcatgggaaacattcctacccctatacactaccaaaaatcatatcaatctcttgctttcttctttttttttaataaggggagaggaatacttttttttttcacgtaggtctcaacatcatgtatgaacaaggagtcaagttctatgaacactaaccgttttgatgaggtaaaaggaagagcagtgagattagctccagcctaaatggattgtattggaaactaggatatcctcaagtttgttggtttgccatctggattttccaatagtcggattgagtcaaacctgtagcattaatgaaccagacaataatctaaggaatagagatcataattcctaaaaacttttgactcaataaaacgagtcaaaaaaaagaaaaagaagagtaagcataagactcaaaaagaaaaacgtagttagtaactgcctcccccaaacttaaacgacactgtccccagtggcattcaaatctggagtaagcgagaaaaataaaagaaaaacgaaaaataaaagaaaaagaaaaagaaaaagaaaaccataccagtgggttgcctcccactaagcgcttgtttgtagtcaatagcttaactttggtggagtttggggatcaggtggatcaaaaggtggcagtaaatatcgaagagaaagacctctcatcatccatgctagcgtagaagcagttagcgcatgaggtctatctaggaagagaggagcatcagtagtgtgggactcaggtatgggtggaatactcctttacgtgcacaatcatcaaaagaccaaacaagcgctcgacgagaaactcgtggcttgctaaaccgtgaaacagtctttggaaattttaaagtcaaattgatgatatctgtaggtttaagaggaagatatgagtaccgttgcctcttcggaggtggatgcagttgtagagacgcagtggttgtcgtgacaacaggtcctagaatagcagcagtgatctgaacttgcgaagcagctttagtacacagttctggttcagcccgtttggggtgtcgatcgacacaggtactggtgtcggtcgacaccatctctgcaaatcgattctcagcaacgaatccagagcttgcttcatgtggacgcttgctgttgcgaagtacctgttcagagacaaccactgtgtctatagaggtctccacagagtatggctgaccatcgatggtggatggcttctctataatcctacatgggactatgtcactgacctgttccaagacaaccactgtctttgtcttgtcatcctgcttctctggagcatcatctcgtatcatagcactctgaagagggggtgacaacttctctataacaaccggaggcaactgaagtagaatctcatccatgatacccatgcaaagcatctcaggaattttctgcttggactatcgaggtagtagacaacaacttctggtgtgtagacttgtctactaacaagtgcagatgcaaggcatactagggcagtctgagtccagtgtggatcgccactaggttagtgttggtcgaccctactgtttggcatcgatcctgctttgtcaaacgacaacactggcttgtcagtgtggtgttggtgtcgatcgacatgaggtgggtgtcgtttgacaccatcaagaataagtttctcctcctctgtaaaattatcgattccactcgacaaaggcaaaagagagtcgtcaagagtaattggtgtcgatcgacaccctaatgtatcgattgacattgagactttttatgcaactggaatagatgagttctgagctaaaccttcgcgctgaaggatttgtttagttgctttccactgcgtagtgtgactgcattgatagatgctgatgtaggagaaggctcaaataaattagatctcagattgttgatcttcccactaagatctgtgtagagagaatcaaacttgccattaagatcaaccacgagctttgtttggctctcaaaaaactgcgcaagcatataccctattcgtgtgtctgagtagggtggacgggggcagagataaaagatgtgataggtggagaagcaatgcgtgtagatccttgttcctctctgtgattgtcggaagcctcagcaaattttcttcgatcatagtctatttcctttgtggagagacttgtgacagcgttgttgacaagaactgatgcttcagttggagtctttgtcatgtaattgccattacttgcatcatcaaaacataaccgatactgcttatcgattccacgaaagaatatgttgattagtttgctttcctagaaaccatgttgtggacaatccctctgataggatttgaatctgatccaagctaccttcaaaccttctgttggagcttgagaaaacgaagagatcttctcccttagtaattttgtcactgaatcatcaaggaagtggatcatgaatgcgttcttcgtgtcactccaattggttagcgaaccgggttctagttgtcgcagccatgatgttcctctgccagcgagagagtgtgggaagagtttgcaaagatgataatcagcttgtaccccatctgctttgattgaggacactaagtcttcgaagacctctagatgatctagtggtgattcatcaaaatgacctcgaaactttcctcgtgaaacaagattatagtaggcagggtgaatagcaaattcttctcttgcaataggaggtagctggatcgctgatcgattggaatagaaaagctcagctctgttgaagtcgcctatggtagctggtttgttctgtagatggtgtacaacgacaccaacatatggtgtcgaactacaccaacagatggtgttgaacgacaccaacagggtgtcgatcgacactgtcgttgaaatctgccagctgtttgttgcgttccatcttgtagtttccctgtcataggaaaaagaagaaagaaaacgtgtgagaaacaaaagaaagaaaaataaaaacttagtctaaattctacacctagtctaatggtgaatcacagagaacttcggcaactgcggcaaatttgatataagtcaaattaatcctaagaccactctctcaaataaagaggtcagttgcagcacttagggatcgaattcacaaagttctcggatcacgcaggagactaatggctaatcaaattaagctaagtaaaatagtaaagaaaataaaagaaacaaaaagtaagcaataacattatgagttgtgaaaacaagataataaaggtgttaggcttagggtattctcaggaaatagatgatagtagatctagaaatagctagattattatagaaccgttctcgaactcaaactatgattttagagtaaccggtggtgttccgcaaaactctctatacttagagctaagattaccggaaaagccgagaaatcctatactaaagcattcattattatcaagtttgattagttcacctagtatctaaaccagagcctttctatgagcctacctgttctttcttaaatgcttaggatcatctatgataggtcaaataacaagtacctatggtgggcatacctattatctaatatcaagttctaggtgatcaatctaaaactagtagtaagattaatcgtgatgaagaaccataaaaataaccctaaggggttgtcgatctactaatccatctaaatccctattgaaactccctaaacccaacaaggtgattactcagacatgataaaagaaacacaaatcatattctgaatagtctgcattgatgaattaagagtaaatgtaaagaagttaaccattcgaataggctaggataccactctattcgattaccccatccttaggaatttatcgtctatctgatttctctgttttatcgttatcgcttaatcgttctcattgcctgtttctttgtttttccaattactcgaccaacttactcgaccacacccagtgtctggcaagagactgtgcagtcgaatacagttgtctcatttcctgtttgttactcgaccagcatactcgaccacaccgaagcgctggcaacaaactgtgcagtcgagtatagctgtttcatttcctacctgttactcgatcacatcctgcttctggcatcaatcagttgtggtcgagtgattttagtaattctgttaaaaattttgttttctgcatgtttgcttatgactgttagaaacctcaaaaccgttattgcttggcttgacttagtgacttctgatcacatctcatctgcttgcatcacacctgattggattgacacctaaaatactacaacgacaagatagtgttttacgataattgactaaaaacctactatcacataatatctagttgaagggtattttgttattgatttgaattgaactgtttaaaaaagttataaaaaaacataaaatgagtctcttttgatatgaaactagaaaaaagtgtgccattatgtatctcaccctataaataggggcaagttctttatatcttgtgcttcctgctttagaaaaatggaaaaagctgcttaaacaataacttgtggaacttgtggatctgtatctattgggcgtctacggtatttacctcattacctaattccagtttaggtgtctctatattgatgtttctctt

SEQ ID NO: 38442 - DNA, 2915 bp, Arabidopsis thaliana landsberg
ggacgtatattaccaggtactagagttggtaaactggtcattattcccaggatgcccctaactccttctgattttagattgccatttaaaatgaaaaggagacagtttcctttatctgttgcatttgtgatgacgatcaataagagccaaggctagtcattaggcaatgttggtatatatttaccgaagcctgttttctcacatggacagttgtatgtcgctatgtctagagtgaaatcaaagggagggcagaaagttcttattacagacaataaaagaaaacagaagaatgaaacatttcatagaaatattccaaaacctttaatagattatttcttcaggtatgatttatttattttgattattataaaataaatatcattataaaaaattatataacatactaacttaatcgtttttatatttgcaggttggaataattaataaaagcatttccttttcccattttcttaatgcaagcttttttaataccagcggagaattatgtagtctattcttttttattactttttttttaatttatgagttttaagtataaataaagacattttccaattattatttgtcaaattttataattcatttacatgttaatgacatacacggaaatgtacaaatctactatgtgtacatctacatatacaaaatatacaattacgttcccaaacgtacataccaactatagacatatatttttccatgctacaaaccgaggaaactacatatactaaacaaaatatggtttgacaagactaaatatatttatttgattccaataatacatgatatacaactatatgtttacatataatgaaaataaagtagagtttctctcgaatacacagaattgagatttgattattgattaaacaaaagataccgtgcgtagcagaggtactgacctagtaatttttaaagttgaatgtagttgtaaaacgtagatatgttgtcttctataaatagtaatatacaaatatcactaaccataatattccaaatttcataaatttaaagtatacaaaactgaatacaatgatagatatatataatactttttaatttattaaacattctaggtgaaacatcctattatagcactttgttttataatccgactaatagtgttttaatattacctttttgtcaattttataaagaggctgtgaagaagagatgacatgtaaccaagaaaccttactcacaatcaaacgtagagaaacccgagatttataatgcaacaagagaagatatactaaggttgattttctttgtccaaaacaatcaatctatataaacctgaattttgatttactcaaaataaatttgatattttttaagtgagattaagaagaaatttaatatttttgatatttgcatgaaagccatagatgatagatataggtatttatatttaaatatcagtttggatttataaaaatatttaaattttacgattaaaagagtttaaatggcggtttgggtttacaaaggagaattagggtttatattttgtaattaaaggagattatatatcggtttggatttataattataactttaatttattatgtaatttaagtaggatttgacatgacatgtttttattggttaatgaaaaagaaggtgaataaaagggttcacccttaaacccaagttttgttcaaaatagatacaaattttattttattttatttttctgatactaagaaaaaatgatgatagcacaattcatataattttaaccacggtttccggtttagaaaaaaaaattactattaaaaaattgaaagttccaatattaattagataaggaagagggaaaaaaaaaggccagtcatgttgtgttattgaaggcccaattgtctaattgggaatcttttgtttagtttaatatgtaatcctaagtacaataatcgaggaataagtaggtttaaaggtaaaagtagtataaatatgaatgtaacgaatcaaggtaaaattaagaaaaaaaaggttaagctaagagggtgaacaaaatccttcattggtatcaaagctaattgttctcggtgacctacaatactgaaaagaaatcaaaggcagaaagtgagtcgagtgatcgagcaataataacaaacacaaagaaatcaaacaggtaaccataagatcatacatgaagctaagtagaaatgtggtgtgtgatgggaaaattatagtatgtggatcataaagatgaaggctgcttaagtgtaaagagttgcacaaagtagtgattgaaggaggtatcaccgagtcacaagttagtcatacatgcacatgatgcaaagaaaatattgttggagtggggaaaactagaaatgaaagatgaaattgctctttatactgttgttcagtgttttgtttctggagaaattttcagtactagcgcacatttccgattccaagacttcaaaagatgcatggaaagtgttaaagctgaagttctaagaagattcaaaaggctccatgataatgatgtaaaggtttgatcatatttttaagacatctgaattaatacatagtacataaaaaaaaaaaaaatctaaacccaatttcattgataagaggagtggggagtttagaaaaaaaaaaaaatcttcgaagtacctctaaaataattaaagcaaaaattttaaaaaaattttaaattaaattataattgattttgatttcaattactttaattccaaaactaccatttctaaatgcaattaaacactttctacacgtaattgaagtaaataaatgattggcaatgttccaaatgtactcttcttataatataactaagatttgttttggatgaaaaccgatttgatttacaagttttttaccccatgggataaaaatattggattgtaattttatttggcttt

SEQ ID NO: 38443 - DNA, 4093 bp, Arabidopsis thaliana landsberg
gtccaagaccatacattttgatgaatgcaacttagaaaaatttgttgaatagatagatagattgaaaagatcataactatacttaacaaaaaaatactaagaaaagtccacatgcggcgaaggttttttgttgctgtcggaaaaaggagaagtccaactcctagtaaaataggtactggaagtggaatgaaagggatgatccatgaatattgatatgtatgttccataaaataaaaaatcctttttattttattcttaaattttattttttcttattcactggtttgtatatatatatttttttttcaaaggggacaataaaaaagcacgcgatttcaaatttcaaacctaaatagaaatgttttcgaattaatataatccttcataaatctttgaaaagcaatatatattcaaataaaaaaattagaaatgattaaaaaatattactaagttactgtcaaaagattttatttgtctttttttattactactaaataaaattttattgtgattttatgcaaatacagaaaaagtgaattataattccatattacaataatttatatacatatattaagaatagaacaaagatttccacgacaaaaaaaaacttaatattaattatataaaaaaagcttgacctaaaacaaagttatttgagtttgattatttaggattgttaaggaatggattttcatcgtggaatttagtgattgtctttcagtacactaagtgagctttttttatttatattttttaagaaagattactataatgatatgttttttttacatatgatgtgaagaaatattataatttttttataatataagctatcagtatagattatttaaatgagtactctcatacggatttcaaacgttaaaaaaaaagttgggtttgaaacttttgaatgtcttttttgttttgaaaataatatataataaaatttgaaagaaaaaaactcgtacggagtacgaaagaataaaataataaatgtctttgacatccaattataccactgaaatttttttttcatttttgaatggcagttccaaaaaaacgtacttctatctcgaaaaagcgtattcgtaaaaaaatttggaaaaggaagggatattggacatcgttgaaagctttttcattagggaaatcactttctacaggtaattcaaaaagtttttttgtacagcaaaataaataaaaaacactataataattagaattagcctaacttaaaaaccaatttgtttaaatacatctaaaaaaaataggaagcaaaagaagaaaaaaagacaatatatagataaaatatataaaaaataaaggttcgcatttttttagttccaaaaaggggattcgtatttttcccatcactaccttgagacaataataaaaaaagatcttttatttcctcttaatgaggaaataaaagatcttgaaattaattactttaagtgagcaaaaaatcttatgtttgtacaatataaaaagatacatcaaaaaaaatattttgataatttttttgatttctcttgagcaattaggaaaatctaattttatttaaaattgctaaggattttgaagaagtttttatttttcgaaaaagcatttttttatcaattttttttcatataaatgaaaaaaaatgataaagagcatttagagttttgtctttgggttgaagttccaactactttaatttagttacatttttcattgtattctcgaaaaaaatataaaggacaaaaagtcaattgaaataattttaaaaatcaattggaaattttaataaattggcttctttatttaaattttaatctcgacgattgaatcaaaacttgttaatattgttttgaacaagttgccgctatggtgaaattggtagacacgctgctcttaggaagcagtgctagagcatctcggttcgagtccgagtagcggcataagatcttctaaaagagatattataagttttataatcaaaataatacccgacttttttctaaaatcgggtaaaacctagtattaatttattaatttttaacaaattttttatgattttttcaattttagagcatatattaactcatatatctttttcggtcgtttcaattgtgctgacaatttattttttaactttattagttaatttagatgaaatcataggattttttgattcatcagataaaggaatcataattacgttttttggtataacaggattattattaactcgttggatttattcaggacattttccattaagtaatttatatgaatcattaattttactttcgtgggctttggcaattatccatatggtttcctattttaataaaaaaccacaaaaataagttaaacccaataactgcgccaagtgttatttttattcagggttttgctacttcaggtcttttaaacaaaatgcctcagtctgcaatattagtaccagctctccagtcccagtggttaatgatgcacgtaagtatgatgatattaggctatggcgctctgttatgcggatcattattatcaatagctcttctagtgattacatttcgcaaagtcggacctactttttggaaaaagaatataaaaaaaaaatttttattaaatgaattattttcttttgatgtactttactacataaatgaaagaaattctattttactacaacaaaacattaattttagtttttctagaaattattataggtatcaactgattcaacaattagatttttggagttttcgtattattagtcttggatttatctttttaaccgtcggcattctttcaggagctgtctgggctaatgagacatggggttcatattggaactgggaccccaaaagaaacttgggcatttattacttggactatattcgcaatttatttacatattaaaacaaataggaatgttaggggtataaattctgcaattgtggctttgatcggttttattttaatttggatatgctattttggcgtcaatcttttaggaataggtttacatagttatggttcatttacatcgaattaaagtaacaaataagaaggaatcgaaatctaaataaaaaaatagcatctatatctaacttcatataagttaagaaatctcatttagttttagtagtaaatcataaagaaccttttgaatcaagtagtacaatgattcaaaaggttctcacaatacaaagaccaaagacttctgcttcgaagcactttcttgcgcaatgcaaacctggcgtccatatttctcaagatccgttctctgtgcttcgattgttttctctagcaactcaatcttttccttttgtgcagcattatctgactttgtctcatgcagcacatgatttaattcagcaagctgtttcataactgattccatagactccgaagcagatgacttcgatctatttgattcttcaacttctttttcaagttcatgaaccttgttcttccattcttctactgagctattagtgcaagattcagccattttagcagcttcaagatcaactttaagctgttcaactaatccttcttgctctttcagactactctcaaggatactaactttttcaagctcccctctcaacaattcaatctcagacttcagtttagacactatctcattaccttcaatagcttccttttcttcctttgaaccgagcaatgcctttaaccgccctaattcagaagcaagaatctcagctttctcagcatgaatttcagcaatcttcgtcgcttcctcagcatggctaagcgccttgtttttagcatcagcggtcatagacaattcatgttttaccctctggagttcttctgtggtggagaggagagctgagatatccaacgcatgctgacttctaatagactctagctcgttccttgaagttacgtcctttttctgaacagcttcaagtccagcctgttccagttcaacagctcggaatttctcaacctcgaaactctcctcagctcgtttctgtgctgccaatgcttctttaagtttctcattggcttcttcaacaagttttttcggattctttaagatcatctatagccttagcctttatctttcttg

SEQ ID NO: 38444 - DNA, 4949 bp, Arabidopsis thaliana landsberg
ttactttccaatctggccataagcgtacctgaacatctggctctgtgtatgcaaggccttgccttttggagcatgttttttaatgttcttatcaccaatctcaagattaaacccttcaggatcttcagggttttgttcaatgtcatgtaacatctctgttagtttgttcttctcctttttctttccctttttagtgtctgagctgcttcctggcattggtggtaaagcagcatctgatccaggttttgcttggcttaaacctctcatcaaatcaggctgtttcatagatttcctcctcgaaaatgttcgagaaaacgattgttgcagctcggttgcatgcttctttgcaatatctttggcagatttccatttctctcgcgattgcgaatcacgcacactctgcactgctttttctctggattttgcctgccttctttctctcgttgcaagcacttgatcagagcagttgtataagattatgagcaagaaacctagcccggcctacacagtacaataaccaagggtcaaatgatcagaaataaccaacaaaatagatgaaactaaggagagatcaattatgactcacgaaaagcatgattccatatgctgtgatattctgatttgttgatcttggattacacgttgccaacttaaaacaatctgcaaaatattcatcagagaaaagacaccgtaagttctttgcttctccttctttatctctgatataacaagtagtgttgtttggacaaaatacatcacttactcagttctgcagtagaacctgtcctgcagtaatgtctggagaaaacaaaagattagtctacctgattagagaaagatgaatcttcaaagaaagtaatgaaaatcattcttagttagttaccctttagtacaaggaagcttgtcgatagtggaaggacaaaaggatccagctgaacagaaaacttcactactactaccaatatcagcccaaatatcagctccaccacaagtatgatttggctgaccagaaggaagctggtaatgatatctgcaaaaacaataatcctgcagcaatcttaccatatgttcaagacaaacttagaaaaatgagcaaaaacaagacttacgggtcgcataatcctgttgttctgttcagattagcttctggacaataagctcccaaaggacaagcttcacatcatagtgaggaaacaacattagaaatggatcaacaaccgaatctttcatcgtttctgaatgtttaaagggaggttaacttacggatcatgcaggtgataccacgagggcagaagaaacctgcgcaacaaggcgcacattgctgagttctaacaggaacattcttgtcgtctttaaggtcaactttcacatctttagcagtacgacaagcccatccaggctcacatccagacatccatgaagatagattgcagttcttgttcggtttcaagtaattagtagctctctttgcccctcctaataatccattgaagtatattctcacttctgcagccgtacatatcctctgcatcatgtcacctattctcaaaccaaaaacatcagcaaaattaaaatattatttcggcttctgtcaatgaaacagaggatgtataaatataccttttgtggttttaccacatgcgtttaagaaatctggctttgtagagaaattaaaggcttcgttataatcttcttttctgaaacaaagacaataacataaacatcttcaatgctataggataaaggttaatgccattttgaaactaacacattggtaatgcagaatccgagctctcttttgatgtcatcctcaaaaacttcggtgagattcgatattttgtcgaaaacaaattggttatagagacgattagccgcgggattatccaagctgctatcttcttgacaaatcactatttcttgctgaagaatcaacacgataaacacgaagaacaatggaacaaaattccctggaaaatatgaatttctccttcccatccctgaaaattttccaagaaaacaacgttgcaaagaattgtcttgagatcaggatggatcaaggagacattagacaattgaaggagacagaaagagagaattagggtttgtttgttttttctttttttctttttctttttggggagagagagattgttgtgtatcttgagagtcaagaaatggatgagaggaaggcatggcgatatatgaggaggaaagagacgaaaacagattttaatttgaccgtttgactttctctaactcgtgtcatggtaatagattcttcaccaaggaatcatactatgtaatttacagttaaggctctgtatttgataatgtttctactgtgacctctatagttttgacatttttggtgcaatatgtcaaatagaaaagatttgtttttctgaaaaatataaaaataaatttaccaatgtgttctgaaggcaattcagctataaactataaaaggataatgaacaaattggtttattcatcaataaattggtttattttggtttaaacatcggttttgttcgatggtccggttaagacggattgttaattattgtcgttgaaaattcaacaacttttttttggtgagaaaaactgaaagacacaaaatcagtcacgaaaacccccaaatccacagattaattagggttttcgatttctctgatgaaactgagaagaatctctcattagggttcttcattcttcagagggatttctcatatctctctcattgagcttgctaaagctgaaatctgagtttgaaattggaattcagattcccatcccatgttgacctcttctgctcttcttcgtctctcctctgccatcgcccagctctctctagttcgcgttccaagtttagggttccttgtcgaactgttttctctcctgctcttaccaagatttcccctttaactgcttcttcaccttctaagtccgccaagcatgtacgcttctttcttcttttctctgtttatattcaaaagtatgaaactttgaattgaaaaagagactttggtgtttgaattgtgttgaaattgaggaatcttggattcgaatagcactgtggattcagtttatttacgaaagagagtgctttttgataaggatttgcttggattactagtagttttagaaatttgtggtttcttgaggttttagtaatcttgtgacttctttattgtaagaattcaatatttgtattgatgcagtgtcaaatggttaatggaagaatcggtagtttgtctccaatgtattaaactttggggctattttctgcagaaatggaagattttgtgttttagaaatgaagattctgctcccgagaatccggagcattttgtgcctgaggaattagttaagccagatcaagattctccatgtacagataaaacagattggaaggcaacttttcaaaaggtaaagatctatggacgttactggatacttgtacagttgaagaagaactaccttctgtctctgttttagtctgacaaaccggttttgatattagggtctagactctagaggttaggactgcagcagaatcttatatttgtcaataaactgttatgtatatatccattatccactctttgtttttttttgtttactagtgaaaaataagaatttgaggtttcttttgatctggaaatgtgccatacaaattgatgaggctttctatttactaaatgtgatggcaaaaatgcaaataaggaaactctcacaaaggcttatcgatcttgtgttcaacctattattattgggtctaaaaagcactttgtttcgttggttttcaggctgcagatgcagttttgaaggccattgggactcgttggaaggtaccatggactgtcgagaccattgtgcaggtacctacatcttaatgttacttaacctcttttgtattaccgtatcatattcataacttttacacaagaacattattgaaacctatatagaaattttacgggattatctgataagagtgtattatggatattgagtctgtgtaagacgtagttttttaatgtatagacatttaaacgtgggctaatatccttgacttagtaactagggactacaagataacatcaagctaatagtattatagatgctttggttcatacaaaagaagcaaaacatacagtaatgagaaatgagttatataccaaagctttcagttatttccttggttaatcctgcgataatctgccatgcccctaacatacactttttcatgtaatgtttctgtgggtagccgctttctggttcattggttcatggatgatcccattcatggctcatatatcaggtttccacaaagaatccctaacatttagaggccaagctttgttcagtctgataaccgatgtaacagaaggcctacccgggattgctatcctccaccgttgcctctccatgttccgtccacttgcaagtgattggttccgctttacccttaaaggaaactggcaactagatgttatcataggctgtttcatgttccctttcgttaaccggctctcccaattaaacctaaacctcttgccactcccaccaacctcaagtccagtctcactctcaagtgtcgagcagtctataatggctagagaccctgtggcaatggcactgtatgcagttgtagtatcaatttgtgcaccggtttgggaagagatagtgttcagagggttcttgttaccgtctctaactaggtacatgccagtttggtgtgcgattcttgtgagttcgattgcatttgctttggcacatttcaatgtgcagaggatgttaccattggtgttccttggagtggtattgggtttgatattcgcaaggtcaaggaacttgttaccttcaatgctgttgcatagcttgtggaacggctttgtattcatggaattgatgcgatgatgactatcttttgtaggtgtcagtgt

SEQ ID NO: 38445 - DNA, 5530 bp, Arabidopsis thaliana landsberg
gatgaactaaagccacaagcccacaacttattgaggacccttttggttatttatagttgcgtcgttgtcatgagaaaagaaaatcccaaatttattttatgtttcttgctggttgggtttcttagtgtttttttaaaaactgatactttggaatattgggcttggcttagcttagcccatgtttccagattttttataacccgagtcttcaaatacgctctatctcggcaactgcactttgggattcttttaaggtgtcaagattgttggcgaaatgacacgaatgttaaattttcaattctaacacgaaatgggaccaacataacgtatcgacactcttgtccttgtaagcttcgttagatcaatagagtaagtgtactttagttgggcttattaggactaacattaaaatttttaagtataaaatctaccgctaactttagtaacatcacacaacaacttcaaaaataagtttaaaaactataaaatcactcgacaataaattttttacaatcaagctaacaaatttatctataacaatataatatttatacagtcacacttgaaaaaatcaaccgaccaaatttaccgtcatttcgcaaggacgacgtacaaaagattcggaaccttttctaaagtttttttatatctccaagaagcaaccagcttgaacgtggccttcatatttatcatgtgtttccagttttaaccatcgagaattgctcatatcccaattataccctacacttggttcgccgtaccgagccgaaccgatcacaaccaggttttcagacctccttatcgccacgtaagatacattgcacacgtcagcaggtagattcccaactttataccgcgtgtcatctttcatcatcatcagatcacggcgacaacaagcatataaatctccgttttcaccggcagcacaaagcggaggccacatagtcatctccgaagagagaaactcttctccttgtggactccaccgccatgtggtgacgtcgaacgattcagcacttttactaaattgcccttgttcctccgtggagtaaccaccgatgacatggaatttgccagcgtggaaaatagctgtgcattcgtctcgctcacggcccatatccggcaagaaagcccatttgtcttctgccacgtcatacaccagagctgacatcatcgcgttcttgtcttcgtcgtgtcctccagccacaaagacgttccgttgagaatcagaagcgcaggcgaagaaggaacgcggtccacctggcatgctcttcccgacgcgccacgtggaggtcaagaagctgaaaacgaagaccgaatcagaggtacgccatgtaaccgggtcaagcccgcccaatacaacaagatccgacccgacagagactaatctgcagaacagaggcaacccgttggaatgacctggaaccggaggcagctcgctccttagaccggtaccaagttcaagaaccgagattcggtacacgggggtggggatggttttattacccgatacgagttctttaaccgggtcgacccgagcttgagacaagacaacaagctcttgactatgtcctgaagctttccggtgtcggaaaaaatcagagaggctgatttctcgctgccagagtttgcaaacagaggccataagagggaattgcttgtaggaggagcgtaggagacactcgtaggctacagtttcgggaagatcaggaataagctccatctttttagaaagtttcaagatttgaagttcttgatttagaaaaaaatgaaaatgttcaggttgagagagatatgaatgaggtgatgagagaagacagaagagtgtggctactttatagagggataagtcttctagaacaataaaaaaggaaagtgtattttcaattgggaaaaatatcatttaaatcagcactagtttaccatttttgttggttttagaacatgaacttttgacctagtgatttaaatccttaattttatattgacttaaaatttaattacgaacttgactaatccagttaatacacattattagaaattttccaaaccacaaaccctagatctctaaaatcaatttcaaatttttctcgctttttatacggattttctcttttccttcggattctctatttttttcgaattcaaagtaatctcttgtctctaggtcaattgatggcgtcgaaaaagaagaatttgtgcctcaattgtttagtcaactagaattcgtgattaaattaaaagtcaacataaatttgaggatttaaatcaccatgtcgagagttcatgcttcaaaccaacgaaaatggtaaactaacaatttaatgacatttttcccattgtgaagagtttatgacgacgctttgaacaagtttttaacaactaaagttctgtaccatcttaagatttgattagtcgtcactcatttgatgtggagacaaaccttttgacaataaactcaacaagacaaacaatcaatgattctcatatcttttttatgaataattaacaattggataacaagcatccaacattggtgctttttgattctcaatacgactagtccaatcagagtcacagaaaccaaccacattatcatcattgtctttagaatagaaaataccgtaatcagaagtttcgttgacgtatttgatgatacgtttgaccatggtgagatgagatttctttgggcaagcttgatattgttcgcagatcccaacactgacacaaatcgggtcggctggttgtgaaatacaagaaacttccaatcatgctttgatgtgttgatacatcaacattttcaccttcttcatgtttgattagttttattgttgtactcatcgatgttttaaatgttttacttgttacaagaccaaatttctctacaagggaaatccttttgaaatttgtttgatttgaagaccaaaacattacctttactctcttaccatactcatctcaaattcttgagtcatggtggttataaacttttgtaactatttttgcgaagttgagccaaaaacaatgacatcgacttatatttgaatcacacactctcccggtccttttgtgtaatcatttatgagaaaaaattgtttgagtctcttgtaccaagctctaggagcttgcttccgaccagataagacattcttaagttaataaacaagttcaacatgatgaagatctttgaaaccctttggttgttcaacataaacctcttatcgtaatttgcagttgaggaagtcactttggacgttcattttgttaaccttaaatcaataagatattctaactctacaacaaatatccacaatcttatcacgagaaaaacgctataaaatgtcattcagaacgttttcataaacgttgtcttatgccgcagttatcgtatttgcctcatatacaatatcgataaatatgaatgctatcttagagtcctttagtatagctttagcgaaacgctttgtgatcgagcttttctaaatttctaaaattatataatcagtcatgtcatagctatattatagggatttagttattgatttatagctttactgtatgttctgatacagtattttattgcgcctaaggatgttaattgcttttttcaattacttattttgacagctatgaaagatgattctaacatagcattactaaaatattacatcgcattaattgattgttatttaatagcacctttctagatgcgattataactgcttaaacgataattgcttgttgttcacataaaatcttttgctcattattataaaatctccaaattcgtcattggttgggaatccaaaacacagtacacacaatttttaacacaaaagtcttgttcacataaacttgacaagttttaattataattgaaaataaagtaggagcagtagataataaaccttaagccattatcattttgacctctggccatgctacaaatgtgccaagggcatcttccataatggcgatttcatctgttggccttctgacttctgcctcacttaccttcatgatatctatctactttaactacattagaacccaagggaacaaagtggtacttgtggtctggatcttttgttgcccatcatccttcgacaacaacccgtttctttctggcaatgttcatcaacaagcactttttattttccttggaaccaacttgattgataggctgccatgtttgcaagaaaaaaacgtaagaaaatatatccaaacagaagcaatttcataaactattgaaaacatttaccttagattgtgtgtgaggagattgtgaatctggtgatgcatcatcaataggacattcagaaaccttttgctgcagatttagaaccagttgctttagtaacagtgccaacagatttagatgctgatggtatatctgttgagggagaatgatgagcagttgcatatggggtgttttctaaaccaactttatggataggccatgatacaaaagccaacaaacagtcttcaaggtatgtagtatccattgtaggcctccatataaatgtatctggctgatgtattgaatccataaagatttttactgcttttggtccaagaggaagtccattaactaatgcactttcatcttgtgtcagccaaggaccctcagcaataatcacctaacaatcattttggttaagtgttggcggattaagtaattttagattcccacttatgatctttcattcatagcttttatcatgggcttttataaattaccaaaataaaaacttatctttcataacagttacagaaaatgagctatcctcgtgtgctatcaatgtatcctcttgtgctattaatgtggatatttgttgtagtgataacaagattaagacttcaatcttatatgttgctagcagtcatcctcaatgattgtcggatcaatttgccaaagaaagcattgttgggcagcaaagaactttgtaaagagtgaggactgatagatgagatgacacaaagattgaggttggggagtcatctaaatatctatcaattgtgacagataatgaactgaagaaaaaaataatgaaagtttcaagaacatcagtttggggagttgcgatacctccaaagaagagataatatcactctacaaatactgtcatccactttttggtatcacgtagtttcgacaaagcaggaaaaggttatttcgttttttttttctttaacccagtttttaagaatttgtgtgtgttaactttcaggtaaaagatgaagactagcctatgttgtagagtcttctaatgatctttggctattctcattacgagctcattaatccttgaatgttcaagatgttatggtcgagcttcaagtaacttaggatacttttggttctgttgaagtagggattgtcagtactctgtttgataatccaaaacttgtaatagttagcaggctttaaagcttgtaggtggttgtacccacttttataatgtttggaacctctctgtttctaaacaaaaagaacactttgtgaaaaaaaattaaaaatagaatggtc

SEQ ID NO: 38446 - DNA, 3121 bp, Arabidopsis thaliana landsberg
gactacgtcgggggttgcagcaacgtgggatcacaacgtgtttgagagtgagctcgtcgagtactccggtgacgtttagctggaagtttctctggtacatttcgacggcgttcttgagaatatcgtcgaagtcgtcagtgaagtttccggagagattagtttcggtgatgtaaccaaaatgttgaaaatattgtttgagcttatagagcccatcgtatttcttgccggcgtgacatccagtgaaattcaagaatgagttccaggggtttccggtggcgtttcggagaagctccggcggaatggctgaggagtttgtatagaaaccggcggagactggagaaggaatgaagaacaacaagaaaaccatgaaaacacaaatcctcaccatccaaaagagaaatattaaaaagattaagtgaagaggtattattgagatttacaagagaattagagagaggacatagataaagctaagctactatgatccctaaattgaattttcaagtgaccctgtgatcgagtgcgatcgagtggatgtcatgaggtggtgatcgagtggtttcttcggcttctcttctcttctttgttcttagcttgtctggttgagtgcagaatgagcagataggcttcctggtgatcgagtggttctgatggggtgattcctccggcttcgcgattgagtgaaactgagctgtttgcttctccggggttgcgatagagtgatttgccctggcagggctccgaggctgcgatagagtacttttgctgaaggcgtcattgggcattctgacttcatgttctgtttttcctctgtttgaactccaaaagcatccaaagtacctgaaaacaaccaaatatgccatgcacatgcaatcctaatgcaaaatcgtcctaagtatgtaaaacacactaaaacgactcctaatgagatgaaatgtggatgaaacaatgacaaagtggtgaagaatgaatgcctaaatcatgcaaattatagacatatcacttgctctgatcagctttgaaacataacataccgaactttcagcgcactattaaatccttaggaaagcaaacttaaggactagagcctcgtagttttagttctcactccatttatattaagcatgaaacctcttcattgatccctttgatgtaaatttctaagacgtgtaatacgattttcaaatgactacttcaaaaaaacacaaaaatatgtgatcaaatcagagaactttgaacaagagacaatattggtggttttaaaagtgatggtttgaactttgaacaagagaatataagccaaaaataataataacgtacgcaggggaactaatttcaagcacctattcgcaatgttgaccacaagagatgagcataaggtcagcaatattgactgattcaaagctgcaaaaatagcggtttataaagtccatggatatagctcaaaacgtcaagtggaggagggggaacctagacgagaacgttagactgctatcattaaacgtttctttttcattgagctcacataacaacattgtcattttcatatccctgttagctagcgtgttaggccaagaacctaatgtacaatccaaacatttcaactgtaaaaattttccatatcacacagtttcttaacgcccaaggatcacagattgggtcatctcattgacggtgatcaaaccctgagacagagattcttcatctctcgtgtgcactacaaatgtgggctgttttggtgatgtaagatctgatgttgtggtgagcatagacaacaactccattgtgtttggtctatcagcaggttggtgttgaacacatagcaaaccaatctgcacacatctctcaacttctaatgggtgacatgaatcagcaacatctttatccaaaagatcgattcctccactttcacaccaagattcccatgcctgttgtttaggtttcaggtcttcagaatgtaacagcaagaaacatttttgaaacatctacaagtgtataaaaacctaaaagccttacttacatatgcaagaagggtttttccttgtctaccatagctgaatcttgagatcttctccccggtgatgatttccaacagtataactccaaaactgtagatatctgatttctcagagaacatcccagtccatgcatactcgggagccatatatcctctacacatatatcaaatagtttaaatatgattataactatgaatcattcacaagcatgtaattaaagacatgttcttacagagttcctgcaaccctacgagtgttgtcctgatattcggttcccttatacatccgagccaatccaaagtctgatatttttgggttcatcttctcatccagaagaatattgctaaccttaagatcacggtgaatgaccctgaggcatgagtcacggtggagatagtgaagcccacgcgcaatgccttcaatgatattaaatctcttaggccagtcaatctcaagcctttttcttgaatctaagcaataataccgtatagaaacgatcagaactgacagttccatgtagaaaaaaagctgctaatagaaaagaaatgaggcaagaaggaacccaccgaagagaaaagtgtcaaggcttttgttcagcaaaaactcatataccaacagcctctcttctccttcaatgcaacatcccagaatcctaaccaagtttttatgttgtagtttcgagatgagtactatttcattcatgaactcctcttttccctgtccggagctgctagaaagccgttttacagcaatttctttcccatcttgcagctttccctaaaacagattgcagaaagtcatctcgtgaacataaaggcgaatacatagaagcaaagaaaagaaaaaaatctcttaccttgtaaactgagccaaatccaccttgtcctagtttatttgagagactgaaattatcagtggcagtttgaatggtattcatctcaaagaactttaaacctgagacatcttgtggctctagatcattattccatgcctcttttgaagcaatctttgatatcttcgctgaaactagactttcaataatagtcagtgtgttaccatgcattagctagcaaatgaataaacaaaaaactcgaaatcaatag

SEQ ID NO: 38447 - DNA, 942 bp, Arabidopsis thaliana landsberg
aacggaaagaacgacttgcctttccctggtctccttcctcctcgcgacccgtgtccactctttcgtcggggaagtagacagtggagtcctccggatcagcgagtttccagctccagcctttccggagatgatctttctccgaagagcaggaagttgcgcttttccggcattttcggggtttgttggaggagacttcttttctggcggatccgcgatacggtgcaaaattccctcttcatccgctacagacgagatcgtcccaaagcggaacacggatccgggacgcatgttgatcttgctgtagaaggtgacggccattgagctagcttgggtcaacgacacaccccctacctggcgcgccagttgtcggtgtttagagtctgaccgcacacccagggttaccccttgcagtgcttttgggtaggacggtgctgttgaatgttgactgtaactcaatggttcatgctagacgcacgagaaagtgacatgcaattttctataggtttgggccgcttagagaggcgtaataccctacttcctaggatggatctatatgtggtggattacaagagaagtctcctgaatggagaaaagctaatgagttgagtagatggtcgatggaaatgatggggtaccccctaggccttatatacacgaccgtggggcactccatgcgtgtatgatgatgatgtgtttcctaaacaatagtgaaccaactgaacagatctcccgaaaacaacgccgactcatccctaatctgccccaacatttgagggtatcggtgccacacgcgggaaagttagacagtttctttggatagcgcatgatttgacgggatgcccgagcttgagtctatctccttctcaggttggcccattacgctagtagcttttgcccggcccatgaagggatggccttgcgaggtaacatgccaaggccccg

SEQ ID NO: 38448 - DNA, 3197 bp, Arabidopsis thaliana landsberg
ttaaccccatatgactaatatcccttgcttcatcttaagaaagaagccgactctttgtgttcatctcaagtcgtctccattgatttcttaacaaaaatctagcttgatgaagcttcaacatcaagtcttttagctagaaaagagttgtttaatttaaacacaaccatacatataatatcagttcacaaatttttacctagttcttaatgcctcatgatcaaatcatattcatacttgcttcatttgttcccagttgaattatattagctatttactatgagaaaacagggtgaagttagtattcatttagttgacaaaaaataataaaaaagggtgaaaattttggttatcgatacaaatttgaaaaatccggtctgtatatctttctatacactatatatacaaatttgaaaattttctctattttctgaagaaaaacaaaattaattcttgatggctttatgtgcaaggaaacgagtatctagaacgtgaggatgccttaaatgaagaagaaagccctcatgtcttaacatatctgtaaatgtgtgcattttaagtaacttttcttgactttcattggcccaaagccgcccactactacaagattgcaccctttcgagaaagcaatgaaaagtcaaacgcgtcaaagtcagctgactggtttactataaaccgggttagcttctaaaccattgaaccaaaaccctaccgagttatactttcagagcatgttctgttctgcctataaacgctgacagttatctaaagcttaattcttggccaaacgacctttcacatttcacaagacatagaccaaattgaatcagcaaaaaagtttgagattcaactgtatatataaagttgtatcaagaaacaagtacatgaatccattaaagagtcttgtgaaactttcttgagtgcaaattgcaaactagcttgcaatttttccaaaacatctttagaaagataaagaatctgacactttctctggtttttattttaagaagtgtgtatcttctctctgttcagttattgaaatataggaagatcaggcttagctggctcgggaccagcacttgtttctccaacagatacaatagtcttactactgcttgaagaagctccttgctcaatctctttcgtcatctttatgaaataactgtgcctgcaaaaaaatgaaaccggaaagagtaaaaacagaccatatagatcattgctgcaaatatcaaaagatcggggaaaatgttaatcaattaccatcgagtgtctgcagtaagctcgggatgaaaagcagttgctaacaagtttccttgcttcacagcaacaatgacttttgtttcaggaagagcatcttcctgatttatccccaaaaaatgaaaccaacaagaagggattcatacatgtgctcacaaaagagtaatcgtttcatgaaaattagtgcaaaattaagcaaacctcttgaatttgtacggtggagcttgaatacaagaccttgtttgatgggacgggataatccgccaggacttcgacatcaggacctacatcaagaacagctggagcacgtatgaacactcccctgtatgtctctggcccaccttcttgagatgttagttgaggtactaagatatcagcttcaaaactttgaatctacacatcgaaaacaaattcgagaacaatctaagattttcacaacatcttatttgatactaagagtgaatgagaatccatatgaaattactcccattgattcatgaaaagaccgagttttatatatcagtacaccacaactcatgctaatataagcagcttctttttccacatattgcaagtcaagattgatttaaatatgtgtttacacattttcttaacatgaacccggaatcttggtaagagacataacctggctaccgaagaagttcctatgtacggtgcaatcaaggccaccaactaattcctgacctccctctttctgacctgaaaatttcaacatttactcaagtttctaaattttccgcaacagaaatgacaggaagatgaattcaagtactcaccaactgctctgtctgccaagaatataagacctgcgcatgtcccccaaacaggtttccccatcttaacaaactcacgtagagccggaaacttcaaaagagcaacaaatgaaagaaaattagaacagagaagagacattttacactattcttcgtcctcaccactaaaactgtaaaaacaaccaaatctaaacaaggagtttggtaaagataaaagtaaatgatagctctccctttcctacacttatcaccgcttccattaaagacagaaaatatcatccataagatcaacgagtagtttggtccacaatgtttaaaggtttcagatacaaaacattacttcatgtacttgaaggctaactaatcccaaagttccttcattttcaatctcaaagctaattactttcaacagtactaactgaattattcaggtataagagacgttttgactgaaattctggagaattttggtgaataacgccagattcgtgtcaaaacacacataaaaaaggaacctttaactagtttcttcaagtgggtcctcgcaaacaataactttagattctagagagagaggagcggaccaagttatgatactcggcgagtttggccatggtggtgctctcgccgccaggaatgataagagaagaaacggtgagaagctggtcagccttcctaatctcgacgccttggacaccgagccgccgcagagccgcgatgtgctcattgaaagaaccttgcaaagctaaaactccgacggtcattgcggcggcgacggtcaaagaaagagagtgtcagatattattaaacactaaaactttgtgaatggaattgggacactcacaaaagcctttttgtaacaaccatcgacgattttgttttgtgtttctttctttgcccacgatttggatttctattcagatattttcttataataacatttttaaatataaagatatcacggtattaataactattgtgaacaaattcaattaaaaagccataaacaattatgctaacataacaaaaatatacacttattaagctgttatgtgattataattcaaattctctaggaaaaattggaatctattttacaaaaatttaaagatgatgatataatattatatatacacacataaaaaaact

SEQ ID NO: 38449 - DNA, 2580 bp, Arabidopsis thaliana landsberg
  unsure (1)..(2580): unsure at all n locations
gggttgattttgctgcgatggcggtcaagcgaggggtccctgcattggagcttcctagaaactatagcgggtttttgaagctagtggaactttgtaaaggcctcgtagtgttaccctgcctcgcctccttggtagaggtgtatgggagtggccttctcttggcagatgggtaacatgacttatgggtaaagatgtgcaacctctgcagactgtcacactggtatatcagccgtgcccacggtcatgagaggctcggacccttacatgattaatttatggaacacaattcaatttatcatatgcattgtattgcgggtgttgttactcacttttattctactacttaattgggttggtatttacttatacttagtaattgctaataaaattttgaccaactttaaaagcaatgctcagctctaaccatcctctttggtaagccttacacttcacgtgagctcccacctttggcgagttcatgcacattattccccacaacttgttgagcgatgaacatatgtgagctcactcttgctgtctcacacccccccacaggtcaagaataggtaccgcaggatgaggcgcttggaggatgctgcgatatgttcgagagaggtctaggccgtcgtctcccagtcaactttgggttgctggaccgttgtctccttataatataattacttatttattttgtatagaactcctattatatagtaaagatgtgacattcgatcctgtgccatgattcatcatatgtgtgagacttggtcccagcatacctggtgattgttcgcgcccgggtcttggtgccccgaaatccgggtgtgacagaagtggtatcagaggaatgttgactgtaggacgaaacctagatagaaatggacaaaacccttacctacttactgttggggccttcgtcctctgaaggtcctcaaaaacgtgatttaacaatatctaccaagtgtaacatgtgaataggtacttcggactcgggctaaaaagtatgtacgatgtaaaaagcatgatcgtgacgaaggttggagttactctgaagctacatgcaggggagcttcggctaaatggcggaaaaaggaannnnnnnnnnnnnnnnnnnnnnnnctagtcctcatagaattgtctataagttaataataaatgtaaagggcatgggtgtaattttacatgggctgtgtcctgtgcctataaataggtgaacagtatcttcgtactgttcacgctgactaggcatttgctttcgcgtcacgcttgtacccttgctttccttcgagccgaagtacatttgtaatttgttactgttaatacagtaacacaaataagaataaattgataataatgtttaaagcgtttatgttatttttttatatcttacatatgaattcttcttcatcatttattgtgcttatgaaggtttgtccttcataaccttcgtccaaaaatcattatatccgaagggagataatgcttcaaaggacgaagaactttaacatttaacactttttatgttgccttgttnnnnnnnnnnnnnnnnnnnnaacaagtctccaacattggcgcccacctccggtgaactcacttccacttttgagtttcgaacactttcggcaagcatagaccttcgtcatgccgccaaagaaagcttcagcaacaggggttgccgctctgcagccgctggaccccaaccaggagactctctctctctgaaaggccagaagccaaaagaggaaggccaccagtccaacacttcaggaggaggagttggacaggagatcagggacctagaaattattcaccagcaggtgcaaaggaaaaaggagaagatcgcttagctggccgaccttcagaagaagatcgatgaagctactgaggaagtgcgtcatcttactcaagatgatcacgaccgaagccccaacaccgggagctttgttaagagggctcattcaacgaagatgaatggtacgatgattttaatcatggtacctttgcttttgatgatgcttctcctctggcagcagaattgcaggctatcccatggccacaatcctacaagccacctcaactccccatgtacgacggacattcagatccgaagcagttcctgatgagctacgaagcaacaatatcttcctatggtgcaatactgcagtcatggcgaagtctttcgttatggctgtcaagaacgttgcacaaacctggtactcctcccttcggccaggaacaatcacatcatggcagaagctgaaggatatgctgatcaccagtttccaagggtttcaaacgaagccggtcaccgctcaagccttatttcagtgcaccgaagatcacgaagaatatcttcagacgtatgtccgaaggttcttacgcctgagggcacaagcgccaacagtgcccaatgaaattgtcattgaggccatgattaaagggcttcggccgggaccttcagcccaatactttgccaggaaaccccctcagactctagagaaattgcttcataagatggatgaatacatccgcgctgacaatgactttcgacagagaagggaggaagcttacagattctcc

SEQ ID NO: 38450 - DNA, 9438 bp, Arabidopsis thaliana landsberg
taaagctagactttttctacgtctttagcttacttctcctagaattcttttcccttttcttgtcaacaatgaactcaaccctttttctcttttaaactcttcccaacccatagaacaagtacccacctagtcctatctagtccggataacgcgaactagaactacatgagatactatctttgtcgttacaaacctaacactttctaccaagcttaatcgaaaatagacctcacaaacactcacaagtgatatatggcttgaaagaaggcttaggttagggtatggggaaactgctctataggtgagagacagctatttggatcaacaagagtggtgaaatgaataagaagatccaaatattttaagggtgaccatgagtttaacaaacaatgcatagtatgataattaaaagtcaaattatgattcaaattaatagggaatagcttcaaatcacagcaagtttcgactaaggagagatcaaatatatgaattcaaaagatggtgcggtttactttaagatcaatcggtaagcactagacaactaacaacaagggcattgaaattatctagtgaacattgcaaatttacaaggctataatcatcattatcccctatgcaagtgcaaaatgcaacaacctatatgataacattctaaaaacagccctattaatgcaaatgcaaactacatgacactctattttttttggaatcattttcgaaaattttcaaatttttatgggttttctatgccttagatgatgcaaaaatttgaataagaaaacatgaaacaatgttagatacatcttgaaccctcccccaaacttaaattacacagtcccttgtgtaataaaaattcaaagaagaattcaagagaaataaccacacaaagcaagaaataaaagaaatgcaatgatatgtacagtgaaatggagtgatacctcaacatttagacgaagaggttctggacaaactcgtccaggcggtcttgtgtgtactcaggatcacgtgtggaggtgttggggttgttggcgttgtactcggttgaccggtcgagcatatatcccgagtagtactcctctcggcttgggtcagcgttcaaaaccaactggttcactggaccgggtgggcggctgttgaaacggcgatctgagaaggtggagctcctcccgagctcgtaatttgaggctcttggcgggtcgaaacgagcgtcccttcgcggtgccacactcgttgagttacttctcctaaactcgggtcgaggtggtggtgatctctgtcttcgttgcagctcctgaatctgaaccgccatgccatccattgctctcttcatcttcctcaccttcttcttcaacccactgaacaacttcctctgaaacttgcccagacctttgagcattcccaacttcttgtgaacttgaccgggatctctctctggatcggactcagcataatcctcaaagaaaaactgctccgctgcagcttcgcacgaatcttcttgttcatcaaactgttcagcttgactgaactcagcttgctcaaactcgtcctggcaatactcggcctgctgaaagttactcggccgagtataagcttcctgctcggcttcttcttcattccactctgctccttcttcttgagactcacttcctatgctcggctctacttgtagaggcgcaaggacattgactaagatcgattgaggaggatcaaagtcaatgttgttcccaatcctaatggtggtgaacttcttgcaaggtagtgctagcctagagagacctagcgtggagtgcttgaacttgaagtagagttggtccgctggagcagacctatccaagtagcacttcctcttcaagtactccatatcgatgtaggttgctgtgtgagtgggggtatgaagaggaactccagcggctattaggatgggcgtgatcactcctccagcacataagcttcctccatagccggattggtggattccggctgcatactccctaaaaccaatcaagtgatcaatcaacaccaccgaaagggatgtatcagccctatccccttccatctctatcccattcctcgtgtgccccaaaatgaagcataaggtgagatcaagcaacttcagctctccctcattaacatggccggttgtcttcttcgggaagaaggcacttgcaatgcaaaggtggagatacctaagcaccgggctccttatcaacgaactcttggccctagatgacttgtaggggagtggaccggcgattgtcaaccatagatcaaggagctcgtccttgctgaagttttggcggattccatacttggtggggaacttgaaaatagcatccaactgcctaatgggaaccgagtattgaattccaaacaccatgaaagtgatgtaaccaactcccttatgcagctctctctccctttcttcagcatagaaatggagcttcaaagtggctaggaattggcagctctcagttttgtatccttcatactggtaggagaagaaggtctccagcttggccatctccatgaggtagtcaacatctctacatatccccaaagcttgcatggtaggtctatggggatatcttgtcccctcaaaactcagctccatgagatattggtagtgctcttctatggtaggttctttctttctcctcatgctgttccttcttctacttgtaggaactatcgggacctcttcatcaacttgcacatcttcctcagatgcttccttctctatctcaggcacttcttcttctgcaactggctcggactcccagaccctcttgcctcttgctatttcctcttgagcagcggcagaacgacccacagaggactccggggccatattcggccattgtactcggcctgtcatccgagtaaaaccaggactcgcagctttctgattctttgactgattcttctcgttaatcatctcaaaccctcttgccactgctcgagcagaggctctccttcttgattcttcgggattcatgatcttggggtaatttactgcagatagtcaccacaaaataaccaaaggtaggtcaaagtagaagagaaattgatgtttaaaaatgaacaaagagtgtaagagaggctttgaaaaggtttgtaacaagagattttggcaaagtttctgagaaatctagagaagtgagagtaagaacttaaaatgtttggagagaaggagtaaaattcgaaatttttgagcaaaaaagagagtgtgagtgacttagcttgttgagtgtggttttatagacaagaagatttgatcctagccctccaaacaccttagatcctcacccttcatttggtcaaggggacatgtctcactatttgcagcagaatctttgaagggctttggggagcaggatttgattggtggggcccagcaaattcgaattcaaattcgaatttgaattgtgttgacctcgcacgtgtgaactcggccgacatactcgacgcgcgtgtcgagtacagtgttgggcctgatgggcttctttttctgactcggcttcgggccgagtgctgcatcttgttgggcctttgaacagtgaggcccatactcgaccttgggccgagtggtgtggtccgagtactattcaatcttgggcctttggtcgattgaagcccacactcggcctacagccgagtagtacggtcgagtgtggcttgaaattctccagaagtctttttccgtgaaacacttaaacaaaaacatcaaaaataacaagaaagcaatatatacaaggatagacatgggacttcctcccaagtgagcttgtttaaagtcactaagcttgactctcacaatgtttaggtagagaagagattgaggagaggaactgagaagtcctcatcctcacttgctgaatccccaaagtctgaatcatattccgcattttctctttatagctcgagtgtggaatactcatttgatctttcctcaaagtaagcctccttctcatcagtactatagtcctcttttccaagatcgggttcctcaaagtattcatcaatctcaggacctgggtaacctttaatcatctccttaagctccaggatagcgtagttcagctcctccatcttgaggtccaacttttccatggtctctccttgagctccatactgtttcctgagctccataagctctctagcaataggaccaacatcaaaatggttcctctcagtctcaacctctaaactaggtcctccttctatcataagaagctcctcgggctctcctaggtggtgagtcggaatggagtacggaataggattttccaacccactcaacaactcagcatctaaatttccttcttcaataaagaaaagctgcccgtctatagtggacttcttcatcttcttagcaatatcaaagctcatatggagattcttaccaaggttcaagtcgatcttacccatttgcacatcgataagagcgcccgcagttgctaaaaatggtctcccaagaatgagagggtctttcggttcctcatccatctctagaaccacaaagtcggttggaatctcaaccgatccgatctttaccggtaagtcttctagcatcccatgaggcactctcactgatctatcagctagaataagatgaatgctgctaggcttgaacttatcaaatcccaatctctttgcaacagacaaaggcatcaaactaaccgaagctcccaaatcacaaagactattgttgaacactaagggtcctagtgaacaaggtagagtaaaggaacctggatcacctagcttctttggtatcaccttcctttgaatgatagcgctgcactcaaaactcaattcaactatttgctgagcttcttggggtctttccatgattacttccttgggagtatcaaccaaaggtatcttctcttctaactctttgatacactttatgaacatcatcttgtgtttctggaagatccttgcattaacttgtgcaatcctttctggaaagtatggtttaggttcataggcaggtggaatagggattgggttgctcgggtcatatgctcgttcgacaagccgagcaaagaagtcgagttcaatctcctgtcttgattttggtctcaaaacctccccttcttgaatcccactgtcctcagtggcagaagtactcactgtggtgatagcatgggcatactcctttggattttgaacagattttccaggaagttgtccggggtgtttaggagttgaagtagaagcaatgtgtccctccatggtcttgactctagtgttaagtgcatctatctttatattcaggtcgttataagagcaatcgatcctagtggtgagctcagctagcttcttatccatggtcatggagcatgaggcctgtccttgcaaaagctgatgaagtagagtcttcatctctgagtcttgtgcagaagtttgctgtggctgctgggtgaagcctggaggtccaaagtgctgcttttggttgtagccttggttatagggtataaagggcttagcttgaggcggttggttctgtggggggtagacttgatcttgtgggtttgccacattgttgcttctgtaagagagattagggtgagggggtttgtagttgttgtatcctttgttgtagccaccttgattctgtaggtagctcacctcctcaatagtaagattctccccttcttggagttgtgtaagctcttcttctgtaatgtagtggacatttctctgttgagcaagcaccaatttgtcaatcttatcattaagagctttgatctccttcttgtgcctatcctcagaatcgctactgcctctgttagtgcgatcgtagtcctcattgtaattcccatcagattgtgctagattttcaacaagttcccaaccttcagctacatctttgttgagaaagttaccattggaagctgtgtccaagagcatccggatttttggtaaggcacctcggtatagagtactgagtagggaggctttcttgaagccatgatgagggcattggttggtgtaacccttgaaacgctctcatgcttcatagaagctttcaccagtcttctgtgaaaaacaagagatctcatttctgagtcttgcagttctggcgttggagaagaactttgccagaaaggccttcttgcaatcatcccagatgtgtgctttgtcgcccaaggagaatggaaacaaccggagcttgaatccatcttcactgacaccgttgattttggttaggctgcagagcatatcaaatttatccaagtgatcgagtgggtcttccataggcagaccatggaacttgtttccctgaatcatcgagatgagaccactcttaatctcgaaattgttgttttgaactgttggtggcactatcccttgtcttttatgatgattccttggggcatcaccagcaccaatgtttcttggttgatcaacattaggtgggtcttgaacatcaactagtttgttctgttgatccatagcagttgatctttgctgatcataggctgcctttgctttggcttcttgtaactcacgagctattctgtctattctgtctttgaaaggtagtaggtgtgcaaaacctttggatcgagttttcatgcacaaacattagtacctattccacaaaaacaagcagacgaaaagatgagttagtaacttgataaatgtaaaagaacttgatcttaactttttctgatatcttgaatgtaacaatgcaacaatgaattggctacgacgccaaattgataagtaggtttttaggcctacttatttgctgaagtgaggttcagttcaattccccttaaacactaacatgtcgatgcagctatagggggtgtcaatccattccactgttattgctagcaatcaagatgtgtaaatgcaactaagtcaagccagattatatgatgttggtttctagtacaatcgtaggtcaggattcgacaacagaaataaaaacttaaaagccctactcgatcattccgtcgagtagaaccaacaggcaacaaatttaaaaattaaaaatgcaatcaacaggtgacacaaataacaggtaaataaagtttttttagggggtgaatacaaataaatctaggaggagtagatgtcctaacgatgtattcattgataagggcaactctaggattcatcaggtggctaacaggtaaaaggcagaaaccctagacgatagattcaaaaactgggtcaatccactctcgtgacagagactcccataactgtaccacatcctaatctcaactctcgttaatgaaacatagcagagcagggtttaagcaacaatctaccgaagccaataagcagactagccaatatcttggtctatagcctacaaatctctggaattcgtagaccaggcatccatttgaacgtctttttaacgctggatacctatggtcaaatttccacagtagccagcgaaaaccgcataggggccaacgaattcagaagggatctaacctaatcttaaccacctgactaacctagagattaccctaatctaatccatcctcaagaaccctaatcactactcaagcaacataactaataacacaaacccagaaattactgaaatcataccaaaatgtagatctaaacaaactaaacaactttactcaaagaactaaatgcaaaaatgaaatatattaagagtaattaagttttgaagattcaagaacacaaagaaaaactaaaggataaaatctagatcctttggacaaatcccaaagtgatctatttatagtaaaatgttgaaaaccctagattcactagaagacaagagacttaaggcggtttgggcgagtgctcgatcttggggatcgagtaaagtgggtgctgcaaagtctgcgcctttgtgtctatgctccgagtgatcaattggtcgagtagatgcttcttcctctcttatctgtatgctcagatgtctggttgagtggagaatgaggaggatccgaagacgctttgatagattaacaagtctggtagagttggtcgccgttggtcgagtaaatgggtcgagtagaggatcgagtagaaggggcgagtagatcgatcagctgcttcttatgaggctgccttgatcgaggaagagggtcgagtgaattgctgcctcctctgtggctgtctggatcgagtgagtgggtcgagtagaatgcccagctgctttcctcctggttggatagagtagagggtcgaatagaatccttttaagctccttctgtagctgaaaacacaccaaaacatgcaatgtgtatgcaagatgatcctaaatgcctaagagtgcaaaataagctaaaatggtgcaaaatgatatgatacaatgaccaaatgcaaagctaaatgatgataaatatacacctaaaatgagtaaaatataaggttatctgcgaaggcggatcatattgcataggttcatgtcgagtggatccgcttctcctaaaaggcatgtccggtgggtttgccgtagtagaagaagaatagctgaactagagttggagagcgttaaaattcttgttgagtgctgcgagagccttgtcttgaagtttactccagctttagagaaaaccaaggcgcttgtaaatttctttatagtctttactttgcctcggtgtggagtactcttgaaagtaaaactgatgtgttgcgtaagactcgtccataggttctgtctcattatctgaatgatggattggggcctcatcatcattcactccttccatcggcacagcttcatcacctgatatatagaggttctccattggtgggcaaaactcaatgttgtcaccatctctgatcgaagtggaagcaaggtttgggaggagaaaaatggattgtcctgatgtggggtgatcgaacctatacttatatagaccattattctactgcgaccaaaaactcttggaattgataaggtgttgcatatcaatccatctcggaggaatcggtgttgaatgtagaggtacattgcaagctctcagaattggtgtcacaactcctcccacaaccctttttcctggtttcttaagtcccttagcccatcctctgtaactcagcaggtgctcgattaggtagaatgagaccgaagtgtctgtctgatctctagctagaactgtaccgtctgatgctaaaccaagcaactcttgcagtactatctccatcaactctagttctctattaacaaaggtcccatttctctctcttgcaaatagtgcactggctaaagacctatgaaaatatctaaccaccggactctttatttcgttgctctttgtcctagaggacgaaaacccatgtttagacccaagcgtggcccagaatgactgaagctctctcttatcaaaacaatgactcgtgccttttccgcttggatatccatacatcagctcgagatgctcgattttctgtcgatactctacgtcatacacacagaac

SEQ ID NO: 38451 - DNA, 5964 bp, Arabidopsis thaliana landsberg
gatttatgtttgatgattttgtatgatgtgtttttggtttgaggatgatttattcctttggtcttacttttctctttttgtgaatttaagcagtgaagcttgaatcatggcctcgagaattgctaaagatgtgactgaagtaaggctttcaagttctttcactgttcatttcacgaaggagtgagctttgttccatgttcatgtattgattgattctatttggcagttgattgggaacactccattggtgtatttgaacaatgttgctgaaggatgtgttggtcgtgttgctgctaagcttgagatgatggaaccgtgctctagcgtcaaagacaggtttcttctctagtccagaaactatgtgttgtttctcgcttcgagtttcggttttgtgaagaccttgtactttgtttatttctgcaggattggttttagcatgatttctgatgcagaaaagaagggtcttatcaaaccaggagaggtcagtttcgattatctgaatcttcaaaccactattttgtttttgttttcattgtttctgactttttgtttgttctttagagtgtgctgattgagccaacaagtggaaacactggagttgggttagcattcacggcagctgccaaaggctacaagcttattattacaatgccagcttctatgagtactgagagaagaatcattctcttagcttttggagttgagttggttttaactgacccagctaagggcatgaaaggagctatcgcaaaggcggaagagattttggcgaaaacacccaatggttacatgcttcagcagtttgagaaccctgccaaccctaaggtatgcttattatttactattgctttagtgtatctgtttttgtctgtttttgaaccatattaagtcgatggaatttcactgtcaaatgcagatccactatgagactacgggacctgagatatggaaaggcactggtggcaaaatcgatggctttgtttctgggattggtactggtggtaccattacaggtgctgggaagtatcttaaagaacagaacgcaaacgtcaaggtgagagctccatcttttcgaacaactggctttgttatctaagtgactaagtggtgtgtctttgcacggtttctcattttgtttcctcttctgttagctgtatggagtggagccagttgaaagtgctattctatccggtgggaagccaggtgattttggttccccctgcgtttattacgataaccatgcatgcatgttcctcgtttctcggtttgcctcatgtcttattttttatcctcggagtttcctaacacatgatgtttgctgaaaatatcaaggtcctcacaagattcaagggataggagctggttttataccaagtgtattgaatgttgatcttattgacgaagttgttcaggtaagactgctttttatattatcgactgatagcaaaacacaattgaatgcaagagagcttcatttcttacttgactctcttcattttcctgtaacgcttcaaacaggtttcaagtgatgaatccattgacatggcaaggcagcttgctcttaaagaaggtcttcttgtaagtgtttcacatttcacaacaaaaagctatctccatcagaattacaacttcgttctgtttctaaaaacaaaagctatactgtaggtgggaatatcatccggtgcagcagctgctgcagcaattaaacttgcacagaggccagaaaacgctgggaagctatttgtggtaagctctttgattctatcatcaccccaaagccaataagctctgattacataacccggatttctttctgattctgatgtaaacgaaatcaactgaattattttacaggcgatattcccgagtttcggggagaggtatctatcaacggtacttttcgatgcgacaaggaaagaagcggaagccatgaccttcgaggcttgaacattctccatttcttcttaagagacgccaaaataaaagagatgttcagtttctcctatagagactcttcatctttagttacattgcgtctttgcttccatctgtatcttctcttgtgtgccaataaaagtcaaactagattttctctgtttcttttgtgaaccacttgcttgttaatgaagtttaaatttgctatgtaactttgttcatatcatactgtttcatgatcaaaactaaaccaacataacccaagtcaatatttcaggctaaatataagattaggataagaagaaggtaatgctcaaaaggagtgattccgataattctctttatcatcatctacacaaatcaacaatgtttcgatttctcattgcaatcactaaaaattgtacacacaaattttaccattttcaattcacaggatcagctgaagaagtcttgaacacctcttccgatgaacactcgatcagagagttcagccaaaaggaaattgacagtgagcaagacgacgctagagccagcgataacaccgagcacgacgccggtagttccgagaactttctgaaacgccggccactcaatctccttcacttcctccgcaactccactaagaaactcgttcttccctttctcttcctccgccgttttcctctgctccatcgctgcttttatctctgctcctatcgcgctaatctccacttccttatcttctccgcttccactctcttccgccggtgacggagtcgcttctgattccgattcagatccagctgtatctcgtctctgttctatagccttagccacaaaacacgccgatttcctcagattactcgtcgtcatagttcttatctcagtgtaaaccggaaatacacggagattagacagtgacggttttgtatcccggagactcctggttattccggtgaccggcggcgagaattgtgcggttagtgacatttttcgaaattgggaacttttttaagttttctcaattttagatttgtggataattcagatatctgaagactgaagtaaatgatcagatacagcaatgagtatagtaagagttgctacaattattatgggccttataaagcccaaatatttatttgaaaaaatttaaatttaggataaaaaatgctctggcgacggcgacggagaaagtaaccagaggagcgtatcggcgaaagcagagccgatgaatctgtgagtatgtttcggtttcaaatagagataacagaatagcagttcgtgcaagtattctctatcggcgacgacgtctctcgttaaatctctagcttccaccatctctctcatcgatcttccgaaatctctgtacggatccggtgactctatgtgcttcattatcgccgtcccgccgcttaaaagcttcgaaacggaggtggtggtttcgtcttcttcttcttcttcgcggcggttagtggagaacaccccggcggggttctcggaactgtgtcggcggtggaggggagaagaaacagagagctgatcgtaaagagagttgaagttgttgataaagattgagggagtgtgatgaggatgagattgagcgttgtgatttgatacgatgatcggagaggaaggaatcgacggtgagagaccaccggatgaggagaaacagaggtgtagcttcttccttagaaaattagacatttttggtttgtttagtttttaatcaaatgtaattaaggaggcaatgcttatttatacatgcaaaaatacgtgtattaagacttaagaggaggtcacgtagtgaatgcaatgtccataatgtagctggatccaatttttttatatgtttttataacgcggattttaccaagtcttgaaattagaagattttgatcataatcgactaagtttatagtacaaagatataaataaatgttaagcctaaactaataaagattaccaataatccttacaagaacatatcccatctttaaaccgatgaaaccggttattgtctctcacaatgatctctcgtttaacactcccagagacaaacttgaagaagctgtggcaatctccgcagattctaaggttcttggtgattctgattgggacactgagtggtaaagataacaatccaaatgctagagccagtttctcactgtggtgcgagacttctgctgctttttcttcttcctccagatcgtaaagcgagagtttcaggtcgggtttgtaccctgcagcttccatttcgttccttagcttggccagcgttgtttgaatttctttgttcagtatgtgggatctgtccttggcttgaaaggcatggacttggttcttcactgtgatccaactgtatccggctcctttcttgatccctacgcctttcatctcctctcttacggtgttggcttccgcccacctatcattgattagttataatatagttagatcataagtaactgaagacaaaataaatggttggtctcccctgcttcatgtttaacacaagtttcatctatttaaaactcgattcagataatgctcagatactcctagttttgtagtctttcttctaaacatttgggtggctcttgtttacaaagcatcgtgtggcttcttttgaattgattagaatatgatttcaacctaacaagatgaataaaaattgaatagaatcaatgcggttcatttacctcccagccgctgcaaacgtattggaaagcagaacgtggttgcctgaatccttagggtcgagtttgaaaaggttctcagctgctagtaatcccagctgtggcttaccatgcatcctacaagcattctgaagagcaccccaaaccgaaattgtcggttgaattggcattttctttatgaattcataagcccgttctaccattcccgctcgccctagcatgtccacgatgcatgaataatgctcagcccctggctcaatgccataagtactcctcatcgaatcaaatatcttcataccattttccacagcccctgctctactacaagcggaaagcaaggacacaaaagtcatataatttggagttggaccacatccacgtggtgccatttcttcaaataaagccaatgccatatcaacctgaccctgatgagcatatcctccgatcaatgaattccgagtcactaagttcttctcaggcatctcatcaaacgcttgttctgaatcttctatacatccacattttccatacatgtcaacgagggcacttccaacaaatatagtcctttcaacacacgccttcacagcgtgagcatgtatcgatcttcccaactcaagaccagccataccagcacacgcactcagaacacttgatatcataaaatcagaggtctcaacaatatccttccttgagcgtaaatataatacagacgccttctcatcctcatgattctgcacatatgcagcaaccaatgaacaccaagaaacagcatttttagttcccatttcagtaaagataatctcactgctacgtatctgcttacactttccatagaaatcaatcaacccattgcaaacagagacgtctgtatcaaacccacttcgtaacacaagcccgtgtaactgcattcctagattcaagtgtaaccaatccgaacaagcattaaggaaagcacaaaaagttatcgaattcgggtgcccatcaatccttctaaactcaataaacgcttcaatagcttccctaggccttccatcagtcacagagttagatataaaagcattccaagtttcaaggttcctctcaggaatttcatcgaacaacttccgtgcatcatctctaagcctagttttgcaatacatatcaaaaacactacacccaacaaacacatcaagtatcctaccacacttcacagcaagcgcatgaatctgcttcccagtaacgggtaaacgcagagaagccacagctttaaaagcacaagggaaagtgaagtaatttgaaacaacaccttctcgtcgcatctcgaagaattcaaccaaagcggtggagaaatgaccgttctgagcaagtccga

SEQ ID NO: 38452 - DNA, 2570 bp, Arabidopsis thaliana landsberg
gactcttcagccgaacatatgaaaggtaaaatatgctaagcaaaagaatgctaaaccacaacttattgtactgagagtctgagagtacataggatcaattttaagaaatgtcctagatcttacagcagaagaagccaaatagttaaaacatgaagttgaaaaggaatcacatattagattacctcggatatatatattggaacaagaactgtgttgacgccaataccaagaccaacaagaaatcttccacataagatctcatccaaggagtgagcttgtgcactgagaaaaaaagacgagtttttgttatgctgctacctcacaacttaaaacatcatcatggaattgttactaacataacgaaatcaacattcaccttagtaacaagatattacctcacaagggcaccaagaatgaggggtatcgtgaaaatctgaaaggtgcgtcggtagccaaacttgtcaactagtggaccggcgactatgctaccaataaatgcaccggcaataaatatgctcacaacaagaccctcaagaatagaattgccttcaaacccaagttcacgcgcaatagacacgatggggccattcatcactctgcaagaacaaactgatattattataagtactaagctttcgaaaaactaatccagatcaacctgactaactcatattcttctcactggaagctaacaaattgtcaagacggggacaaatcaacactctgtaaaaacaatctaatcaacatctttgtaagctcacactgaagctggtctcatcagcaatgtcacaatgaaaacttttattcgaattccataacacaaccaagcattaacactactacaagaacagagtttaatctcctcgtatagaaatcaaactaggccagtaaaacaaacaacattgactgtttctataaagtcacaaatttggcaacagtgaactggctatattattacccaatgtgataaccaaagagaaaattggccatagaagcaactgatacatgaggaaaagccgataaccatcccaaatcagcggaaaatttctccagcttctcaactgacggaactggcgatatctcgtgatcgtcatctgttaaaattttgaataaagtttgatttttttttacagataaacattagcaaagagattggtaagtcaatggaggtgagaaagctgaacctggtttcttcgtcgacaatgtcgtaacacgcttcttccttttccgagaccgaaagaaacgggaaaaggaagaggttttacgagagtgggcgattcgggtcgggtaagaaaaggttaatcgggtcagagcattgggatgatgtagaagtacggtattcgtcacccacatgatcggagagctagactagacggaagagagagaaatacgtcggcgaagccgaaaataataaatttgaggcgacggaaaataataaacttgtaatcacgtgacactcacgtgctcaaataatgagtgatttcccttttatttttgcgttctcagaatttcctttttgttttctttttaaaataaatttcctttttcaaagttaaatttcctttttgtcggtgataacgttccttatagatactatactaatctctgattctcttcttacggatcaaagttctcaacctccgaagagcaaaaccctaaagtgctatttcttcttcttctgcttttaaaaacttgagtttcttcttgagcaagttatgtcgaagagccgttatgaatctcattctcgcttcttcgtcgaaggttatttaggatgatgccatacaacggctattttggatgatgctgaatgatcgttacgaatctcatgaacaagtgagtgtcaattcgttgttcgcccaaattagtttgtctgggttcattcgatgacgatccatgtggaatcttttctccggcgtcgtggcggttagtttgtggtgtcacacggttgcagtctctctctcatcgccatgtcaacgacgccaccgccaagtcatcgaaaccctagggtcctacaaggcccaacaaaaaacagaggaaattttcaacccatcaagcccatgaagattattggccaggtaattcttggagattatttgtgatgatgtcacacaacggctattttggatgatgtcatacactgcctgttttggaatttggttcagcatagagaacagaggactacagtgaagatttgtgagatgactgagagacgacgacttggagaggtatcagataaggaaaagagtctcgcattacatcgatttcagtacgatttcaggtgaatttcctttccctttaaaaatccaaattgcgtttctaaatattcacttggatggttatattttttttttgtattaaagattcgttttatactagatttacaaaacgatatgaaaactaacgagactttagatcccgtcatttgacatagtcatttgatcgttagcaattttataagtttaatttgttttctatcgttatgtacctttatcattttagtttagtatagttttgttaaaactaaatttcaaaacaatgtgaaaactaccggactttgatcccgtcgtttt

SEQ ID NO: 38453 - DNA, 3800 bp, Arabidopsis thaliana landsberg
ttaaggtatagagctttctttgtagatgcgtagtttcttgatttggaagatccctgattttctggatcggatccttcatgatatgtattttagttgaatggtaacaatggcgtaacgtattggttaagtcggtgcgaagtattggtcaatgcatatattagttgcgacaatgatgtaaagcattggtcaagttgttggagtaatttatctaaataaaataattagcaaacgtgaggtgattaaccactatgatttcttataaactcacgttgacttctgagaatttttgaaagtctgacatcagatctatgacaagaggagcaggaggggagacagtggcatggagttacttttgcagagatgttgtgccgttcactgcaatggtcgcggtggagtgtgttacggttggatctaatacactgttcaaggctgcgacattgcgaggattgagcttctatgtctttgtcttctatacctatgttgttgctacacttgttcttcttccactttccctcatttttggaaggtactgatctcttcaagtactcttgaccagtataaaaatttcaagaatgtgaacatagtttatgtgcaggtcaaaacgattaccttctgccaagacccctgtcttcttcaatattttcttacttgcgcttgttgggtaatgatatactccttatactaccagatttagcctcatttaactgtttttcttttctagtttgctaacttttgggaaacaggttcatgtctctgatagttggttgtaaaggtatagaatatagttcaccaactcttgcctctgctatcagcaatctgacaccagctttcacatttacgctcgccgttatcttcaggttccacctctttttctttcgtttccgttctgggatagtatatagataatttagttaacaatgcggtagttccacacttatttaaccgttcaaagttttaagccttttgcttttgtcacagccactagtacaagtacaaccttgtggttgcataaaaaatgttgtgcccacatgttgttctaagagacagagagaaatatgggtaaactagaggggtgtttgtttctatcagctgaacatttaactcttgttgttactgcttccttgtgtgactcaaaagaatggaacaaatagtcttaaggagctccgcgactcaggccaaaatcattggcacgatagtatctatatctggtgctctggttgttattctgtataaaggcccacaagttctcgcctttgcatcttttacaactgtattacctaccgttacacttcaccagcatttgacctcaatagagtcaagctggataatcggagggctcttgcttgcttcacagtattttcttatatccgtctggtatattcttcaggtacaaacacttgaaaatttcactaaaaaagactttgggtttacacattaaattctgtagctgtatatggtttcagactcgtgtcatggaggtttaccctgaagagataaccgtagtcttcttctacaatttatttgcaacactaatctcagtaccagtatgtctttttgcggagagcaacttgacttcttgggtgcttaaaccagacatttccctcgctgcaatcatatactcggtgagaagaatcagatcttataatctgcttcaagaactgaagattttataaactcagaaattaacactttgtttcagggagtcttcgtttcattattcagcgcgcttacccacacatggggtctgcatctgaagggtccggtatacatatccttgttcaggccattgtctattgcgattgcagtcgccatgggtgctatattcctcggcgatgcacttcaccttgggaggtaccatctcttttatcttcttactttccagcgtattcagaatattttatctgtactgagaaatatagtactcagctcttggtagttgaaatgctatctatggaatcacatttagagagttatatggtttctggattctattctacatgagctctcatatatggtttcttctgtattatttcacatgtgagaaacacttagtctccacaattccactgtatatctctgtgtaaactgcaataagcattttgagacagtaataacgtatagaagttttgcatattttgtgttgggcagtgtcattggatcaatgatattgtgcattggattctacactgtgatttggggcaaagcaagagaggatacaatcaaaactgtagctggttctgagcagtcacctttgctgcttacacatatcatagaagatggagcctttccattaagctaggattgatgcaagtgaaatccttatactatttattaataaatatggatccctaaaagaggtgtaccatatatgtttatatatgtctatagctacatataagatatctgttctttttttcttgttttattttgatgttacatatgaatgagaattatgaatctataagaaatatttggtccttttaattatcttatcagtgcgttcacaaccttacataagtttctggtagataaatccctgccctctttgaagagtaaaagaggtagagctccatggccaaatattatctttctaaggtatagagctttctttgtagatgcgtagtttcttgatttggaagacctcgtcagcagaagcagatgcggaactgagaagcgagctgagggatttgctggcagcgcaagaagcaggaactgcgtttatattgggacattcacatgtgaaagcgaaacaaggatcatcggtgatgaagagattagcagttaatttcggttataatttcttgagaaggaactgtagaggacctgacgtggctcttaaggttccacctgtttctcttttagaagtcggcatggtttatgttgtttgactcgttgatcttacttgatgtacaggacctaattccttgtttgtaagtccgtcgcgtgtagtcccagaattctaggtatccctgcttgttaggtaggggttcacatctgaacacttcttacgagctacccggtcagaggatccgaccatcaaaatgaaaactcttattgcctactgtcattgttgctcgtagccacattattattattggtgttattattttgatgactggaaccgttcataatggacgtgatcgctgccgctagagccgccgcaaagtttggatcggacgcaattgctgcactggcagcactaacgctctcggccaccgaggaagtggccgcgatctgcagtggctgagccggtaactgtaaaccagaaaacttggactgttgttggttattgtacatagcttgaccaaccacttgaggcaaaactgccgggttgaaaccgggccgttgagcgaactgcatcaacgggttattagtggtcatattagggttgttaccgttgggtgaattggtgaggtccaatgtgatggttgggaatggtgcggaggctgagattgtagccatgcttgaggagcaaggcaagatagctcgagctaggaggtttgttgggttcattaaaccgtcttgactcgacattgagcccgagaggagcatgcttgcagctgcggtggttgttgaggccatggccatagcggctggtgggagtggatggttgtggtttccttcgtaggtggttatgagaatagatctgtcttctgcgcaacgctgcacctgttaagacatcattggttacggcttcctttgtttcaaacgcaaattatatagtagatcttaattatatttttatataatcatgccgacgtaaaatgtaaaagcatacgtacttgcttgcgaactggaca

SEQ ID NO: 38454 - DNA, 6785 bp, Arabidopsis thaliana landsberg
  unsure (1)..(6785): unsure at all n locations
cggatcttctgacgacgtatgtctccttttcgtccttaatgctcctttccgaaatacacactactggaatgattcttttgacttctggatcgtatattgatgccagggctgcaagtctttgaccacctcaagatatgcctccattcgtgagtcttttgcttcataatcaccattgaacaggttaaccaccagttgggaatcatagtaggcgaccacttcatcggccccaactccctgtgccaacctaagtccagcaattaatgcttcgtattctgcttcattgttagaggcggtgaataacaatcgaaatgactgttcaaggatttccgaagtgggagattccaacttgattcccaccccggatccattttttgacgacgatccatcaacatgcagcttccaagtctgattttgcggctggtcctgccctccgggtatcggtaattctattaaaaaatcggctaggacttgagctttcatggcgactcgattcttgtactctatatcatattcacttaactccaccgcccatttcgctaatctaccggactgggtcgggctatggagaattgttcgaagtggctgatttgataacacctcgactgggtgagattgaaaatacgagcgaagcttccgagctgaggttactactgcgagtacaagcttctccatcatcgtatacctggtctccggatccgtcatggatttgcttatgtagtaaattggtttttgctctcctcggtcttctcggatcaagactccgctaactgcatgacctgagaccgagacgtatagataaagcttctcatccgcttccgatttagacaatataggtagagtggtcagatatgctttaagctgtccgaatgcttcctcgcacttcacatcccaaaggaactccttgttcccttttaaaatttgaataaaaggcaatgatttatcggtcgatcttgaaataaaatgattcaatgccgcaatccgactggttaaccgctgtacttccttgaaatttcttggagatggcatgttgagaaaggcattaatttggtttggatttgcctcaattcctcgctttgtaacgatataaccaaggaattcctcggataggactccaaacgtacacttcgccgggtttaacttcatttgatactggttaaggatcgtgaaacattcctctaaatgcttaacatgatcttcctttttcaatgatttgactagcatatcatcaatatagacttccattgtcatcccaaggtgctcgctgaacattttcttaaccagccgttgataggtcgctcctgcgttctttaagccgaaaggcattaccttataacaatagatgcccctatccgtaatgaatgacgttttctcttgatcttctggattcatcatgatctgattatatcccaaaaaagcatccatgaaagttaacaattcgtttccggcagttgattccacaagacgatctatatgtgggagtgggaaactgtcttttggataagctntgttgagatttgtgaaatcgatgcacaccctatcctttccattcttcttttaaccacaacggtatttgctaaccaatccgggtactgcacctcccttatagatccgatctttaagagtttatccacttcgtcgtttactgcttttgctctgtccactccgagttttcttcttttttgtttcatcggtttaaaactcgggtctacgtttcactcgtgacaaattatacttggatctatgccaggcatatatatctgccgaccaagcaaatgatttcttgtttgtttttaacatctcaattaaggcttcctttaatttgcccgataaagtagctccgattcaaactttctgatccggtttgtgtgcttatagaattacttccaccacgacatcatccactttctgcccgctaggaaatctcgggatcacacctttctttgcgggtttcgttaattgctattgaatttttaatcggtggccagctaaataacaagttcccgaagcttcttgatctccccgaattgtttccactccgctcgaagttgggaatttgaggcattggtgataagtagaagagaccgctttcatttgataaatccatggagttccaagaatgaagttataggccgctggtttatctaaaacgataaaatccacaatcttcgagatctttccagccaaaactggtagcttgatagttccgagagacattgctgattcacttgtaaaagccactaagggtgatggaggtcctaccacgtctgccctgcttatccccattctttccaaagtgctaagaaaaattagatctaccgaactgccaatatcaatgaggatccttgacacttcgaagttggctacatccaacgtaattacgagtgcatcatcgtgaggtctttcgagatgtcgtgtctccttttcttcgaacaataacgaagtgccttgaaagtctacttcttcacttaagcttgatttcaaatgaacattgagcctatgcttcttgattgcactgatggaatcacggcagagtttagatcctccaaaaattacattgattttatcctttgaagctcttggttcctcttcgccagccggtcttggtcttttagagttttgagcctctggattatcccttgactcatgatattgcttgatgaagttctccatgatgaattttgaaaggtctccgcttgcccatagttctgcgagatgcctcttcaggacactgcagtctttggtcagatgtgataataagttgttagttaattatcctaaaacactaatcatttcgttgtagtattttaggttgtcaatccaaatgggtgtgatgctaacaatcaagatgtgatcagaagtcactaagtcaagccaagcaataacaggttttggtgtgttctagcagtcctaagtgaacatgcagaaaacagaaaatcaaacagaaacagtaaaacactcgaccaacacagctctttgcagagcactgggtgaggtcgagtgacaggcaggaaatgaaacacagatactcgactgcacagtctgtnnnnnnnnnnnnnnnnnnnnnnnnnnnnnnnnnngtaactagaaagaattgcagaaactaagcaatagatgacaaaatgcagtaaacagcagtagagtaaacaataaattcaatcagatcaagaattcccgaggatggggtaattgaatagtttcgtttcctcagtttacaggtgattgacatgctcaataattatccctagacaacaagttcattaaccaaatctaagtctcgccgcaatagaaaccctcaagttaacctagtcccagacacaaccaccatttacgagagctaacctaacaggcattacgaatcaacaagttaaagccaaaacactccctgcaaccaatactgataataggttttttagtcaattatcctaaaacaccaatcatgtcgttgtagtattttaggttatcaatccaaatgggtgtgatgctaacaatcaagatgtaatcagaagtcactaagtcaagccaagcaataacaagttttggtgagttctagcaatcctaagtgaacatgcagaaaacaaaaattcaagcagaaacaataaaacactcgaccaacacagctctttgcagagcactgggtgtgatcgagtgacaggtcgagtaacagacagaaaataaaacacagatactcgactgcacagtctgttgccagacaactgggtggtcgagtatgaggtcgagtaacagtaaagaaatgcagaaactaaacaacagatggcaagatgcagtaaacaacaatagagtaaacaaagaaatcaatcagataaagaattcccgaggatggggtaattgagtagtttcgtttcctcagtttacaggtgattgacatgctcaataaattaaccctagacaacaagttcattaaccaaatctaagtgccaccgcaacagaaactctcaagttaacctagtcccagactcaatcaccattgatgagagctaacctaacaggcattacgaatcaacaagttaaagccaaaacgctccctgcaaccaatacctttgtacagggccacgaatctctggaattagtggttcagacatttcatcaaacaccttttgggcgtggaaaagtctgggttcaaattctagttgatcagaaagcaataggcattaagaacaactaatccataagggatctatcaatcaatactcaaccacctagcatactgagaattctacactactctaacccatcctcagaaacctattcactactcagacatcattgcagagaacataaacgttgaacaggatgaaaacatgataacaacaatgtaatagcaaaacgataacaggatgaacaacagtaaacgaaatcaaaaacaaatactgaatgttgaatagataaagagaaatccggattacaaaggtctagaacacagtgtctgtggaataaaactagaaaaaagttgtttgcgaaaatgtgatgtacatgctacttatagccaagtattccgaaaccctaatacttaaaacgacgcagtattgggacggactaagaactgtactcgacccaggtggtcgagtgggagatcgagtgaatagttggagtcttcttttcttccttgtgtttgagtgcagaatgaagaagactctgaagctcgcaatcaagtatgtagtcgagtggtggtaatggtgatactcgacttcaaggtagagtggtgagatcgagtagtggtctggtaatggaggtgaagacactcgaccccggggtcgagtgatgtgatcgagtgatggtcaggtgatggagatgaagacactcgacctcggggtcgagtggtgaggtgaagtggtgatgtcctctactcgaccagggggtcgagtggtctgctgaggttgtgaagtgctactcgacctgggggtcgagtggttttgtatgatcaggtccgcttcttataattagctcgtcaacagctccaaatcaccctttaacaacacaaatatgcaacatgcatgcaaaactaccctaaacatgcaaagtgatgacaaatgatgagaaatggtatagaacagtaatggtatgatgctaaagtgatgacaaatggatgctcaaaacatgcaaaatacacacttatcagttagcgtttcagagtgaaatatgattagatgtcatgtgtatgattgaatataaaattagaacctcaacgagatcccgaaaagtaaagtagtgcttccttgttatacgattcaaaacaaaaaactcataagaactttgacttgaccatcaaagctttgagaatcaagaagtggcttggttagcggatttatagccaaatatgactagatgctttgtgtatcgttaagcataagaacgagaaccgcaaccggcttccaaaagctaaagtaggattttggttataaagtttggggactatggttttgggtttaggtttaagggtttaggggtaagagtctagggtttagggttttaggttttgggtttagggtttagggttttggatttttagtttagggtgtaggatttatgtttagggtttaaggttttaggtttagtgttgaggagcaaatatactttaaaaagtaagaacaaactttgtaagcgttttagaatcaaatatctcaagatgataggtggatgattgagttttagggctaaaaccacaaccagggctatgaacctaaatttatctttccctgttagaagatccaaaactaaaaatcatacggacttagtgtcacgcccgtctcccacaacattgagacgccgcgctttccccttacttatatctttcctcgattccactttcttaattcaaatacaaaattgtcttaaaaataatcttaaatcattgaaaactctttaataaatcgtataaaaaataacaatagtagaaaataaatctgaggttcccaaaatacaccataagcgagacggacttgagtgactacacacgattctcaccgtgacctggagaaaaaggaaaaaaggggtgagtaaagaattactcagtgagaggatcctttccgcccactgaaaaaacggtacacgattctacctttaaaccacaatcaacaatcacatagaaaaaaacataacactcttatagtctgcactattatgcaaactatagcacaaacatcattcttgcttaagcaagatctccacatcataaccaggttcgatcatctccctgacctttgaacctatctagttccactggactcgttagtcttttattgagctacaaagaacccgtcaattcagtttagaccattttccactgttccattgttccacttttccactattccactttctcatcatctcaaaagatggtgattccactttctcatataacgcatataattacttgctatcacaagtacaataattcaatcaccctatattactagaacaatcatcatatcatcagtcctaattaacaattcattattactaagcaaacagatctattcctatgcaatgaatcatgaagcataaaaatagaaacatgtaatcgaatctccgcagatcacaccctcaccttggccacttgctgattcgaacacatgtttcagctgccttaaagacgccttaataactcttcaatgaaccgttaacgttttaatccctctgttgattatctatccagtagtaccatgaagctctccaccaaatttcgtcccgatcggcatagtttcagacctccaaacgtcgcctcgaagaagtcaatatgaaatagatttctcggattccagattctg

SEQ ID NO: 38455 - DNA, 9820 bp, Arabidopsis thaliana landsberg
  unsure (1)..(9820): unsure at all n locations
ggtatttcgcttaatttaatcccgacgtgtcattgttaaaacttaaaagacgagtagaccatatacttttctcaaggagttttagcagatttttttgtaaaacgaagaaaaatagtattttagagtaattattacggttatatataatcaaaaagtccaatgtcaactcttttgtcacatacagggaatatttttcgtggacttagaacgtagaaaattgcgtttgaagccgttcccttataaccagaacttgtttgattttcgaaactcagaacctaaacaaaacttgtctttgtgttctttttaccattaccaatggctcaaagattgcatctccttcttcttctcttattgatttaatttgttaatcttatttctttttcaagtcaacaagacttaagtttcatctacaatggctttaaccaagaccgaaccaatttaatccttgacggttctgcaaaattcctacaagatggacttttgcagctaaccgatgggacgactcaggaaaagggtcatgccttcttcaaccttccattcgagttcggttcagcttcatctcagtctctctccttctttactcatttcgtttgcatgcttgtccctaagccaggagttgatggtggtcacgggattgcttttgtgctatcatcttcaaatgatttcagaaaagcagatccaagtcagtacttaggactcttcaacatctcaactaatggatctccttcttctcacgttttagctgtcgagcttgatacggtccaaagcgcagagtttgatgacatcgataataaccatgtcggtatagacgtaaacagcctccaatccgtcttttctgcttcagcttcctattattccaacagagaagggaaaaacataagcttattactcttgagtggagatcctattcaggtatggattgattatgaagatactcaactcaatgttactttagcacctctaagagaacagaagccaagtaagcctcttttgtcaagaaccactaatctcactgcaatcttcccggatcgaagagcatttctcgggttttcggctgcaactggatcacttataagtaaccaatacatcttagggtggagtttcagcagaagcagagtgttattaaagagccttgacatttctaaaccgcatataacatcatcttttctcttttttttggaaacaagattttatctgcttattttagttcttttggttatactcgccctcatagtaatcgcggttctaggaggatgttatctgtacagaaggaagaagtatgcagaagttagagagccatgggaaaaagaatatggtccgcttcgttattcctatgaatctttgtacaaagcaacaaaagggtttaacaaagatggtcgtctaggaaaaggcggttttggagaagtgtataaaggaagcctgcctctagtaggagatatagctgtgaagagactatcacacaatgcagagcaaggcatgaaacagtttgtggccgaagttgtgacaatggggagcttacagcacaagaatttagtacctcttctcgggtattgcaggagaaaaggcgagttattgctggtctctaagtacatggaaggaggtagcgtcgatcaatacttgtttaatggcgataaaccacctctttcttggtctcaaagactcgcaatactgagagatattgcatctgcactctgttacctgcatacaggagccagtcaagttgttttacacagagatatcaaagcttctaatgtcatgttaaacgaaaattttcaagcttttttaggagattttggaatggctaggtttgatgatcatggagctaacctctctgcaacagcagctgtaggaaccataggttacatggctctggagttaatatcaacaggaacttccacaaaaaccgatgtgtatgcatttggtgcattcatgcttgaagtaacatgtggtaggagaccatttgatcctgagatgccagtagagaaacgacatctggtcaaatgggtttgtgaatgctggatgaaacattctctaattgacgctatagatacacggttgagagataaatttacactcggggaagtcgaaatggttctgaagctcggtttgctctgtacaagcattataccagaatcaagacctaacatggaaaaagtggtgcgatacataaacagagaccaaccattacctgatctctctccagatactcccggaatcggagtttccactctgatggtaatgggaatacctcgcttggcaatcacttcaagttcagtgaccgtatgagtatcaggaccattagtctctcctccctctaccaactcaatgttcatctctcacagcatcttaaatggtgatggaagatgaaatttaacaactttcttcacatttatttgttgtacatgattcagatctcagtaccaaaccaccttatctgtcttattgtctctaatgtttaaactttgtatcaatttaacactcaaatgttttgtaaaacttagtaactaaagacaacgaaagaagaagctacaacagttatgtgataagagactaatgatggtttgtttattagtccaattgatttcgagctttctcttttcctctaaatcagcagcaacatttcatcacagtttcttccaaattcagagaaaaagagaaagctgaatcaacctgggatctgattggatattaccttgaaatcaaattttactttctgatctttgagattcattgtcgaaaaccttatctgaaaattcaacacgaagaatctttcttaaattcaagcaaatttctgaaattaaaaatgaattacgaaccttctcgacttgtgattggagaagaaaatcgccacgggagatacagttgcttgttctatcttagctccgtaaagagagaagctcgatttcacaagaatcggagacgcaaagtgacgactgacgaatacaagatctgttcgctgcctccgtttcactgcccaaatccatctctgtcttctctttttccggtgaccgggattttttccgtttttgtatctgttgaatattgtattttccaggcctaagcccaactgggagtgggccttatattaacttttttataaaactaaaaaaaaaaaaaaaaatcacaaaaaaacactatttttatcagaaatttggaaatataaccaacaaaaaaactatattactaaccaaaaaaaattgaaaattacccaaattgacacaaatatacaaattaataactagattaacaccctaattttgtaattaactagaatgacacaaattatgtgtaaattgaccaaaaatccattttaattctatcttccttccaaaaactaaaaataatacaaaacaaaaaaaaaaacaagaaattaactgctttagaggcaacaatattcagaatttatgtaggagcatagtggtaacgattcctctactcaactccacatacatgggtttgagtcccttagcttcttttttcaaaaaacgatttttttttttccagttttgtttaaaatctaaacgattatactaattactaagtttctttttattttattatattaaactagataaacacctatgttacgtatgaatttttgtttataaaattgtcgaagaaaatgattatagttttttgttgattttgatgttcattttgataaattcatctattttgttataactagagaaagagatagaagaaatgagtgtgttattccattgaataaagggtcatttatatagaagtataagagaagggtaaaaccctagagagatctagatgatgggccttataatgggcatccatctttattcataacactcccccttgatgaccattatagtaccataatggtaaagtatttgaaatgctgcctcattaaaaaccttaccaggaaaactcaatgagaaaaaccatggttaagaaaaaaagagtgcaacatacaattactcccccttatgagtatattcatcgagatatttgagacagcgtaatccgatacgatagactaacttcttgaaaatagcagtaggtagcgccttggtgaataagtcagccagattatcattcgaacggatctgtagaactcgtacatcgccgctcttttgtagatcgtgtgtgaagaagaattttggtaggatgtgctttgttctatcgcctttgatgtatccgtctttgagttgtgcgatgcatgctgcattgtcttcgtacataattgttggagtctttttccctgcatacataccacaatcttcttgtatatggtgaactacagatgttagccatacacactcgcggctagcttcatgaattgctaaaatctctgcatgattggaagatgtggctgcaatagtttgcttcatagagcgccaagaaatagctgtacccccgcatgtgaagacatatcctgtttgcgatctaccattatggggatcagataagtatcctgcatctgcaaaaccaattaaatcttccttggattggttaggaaaaaaacagacccatgtctttcgtaccttggaggtaacgaagtatatgtttaattccattccaatgtcttcgagttggacatgagctaaaccttgctaataaattcaccgcaaatgatatatcgggtcttgtatgactagcaagatacatcagtgctcctactgcacttaagtatggtacttcaggactaagaacttcttcattgctttcccgaaggcggaatggatctttatccacatcaagtgatcttacaaccatcgggctactcaaggggagtgctccatccatatagaatcttttgagaacattttctgtatatgtctcttgatgcaccagaattacattatttaggtgttcaatttgtagtcccaaacaaaattttgtttttccaaaatctctcttctcaaattctttctttaaatattctactgtgaaggagatctctgcagaagttcccataatatttaaatcatcaacataaactacaattataacaaatcatttcccaaatctgtttataaagatgcatggactaacatagtctttttttgtatattcttttagcaagtcactaaggcgattataccacatacaccatgattgttttaatttataaagggatcgatttaattttatgcagtattgttctcgagaatttgattgtactgcttctgacattttaaatcattctgggattttcatataaatgtcatttttcagtggaccgtataaataggttgtgactacatccatcaaacataaatcaagtccttcttttactgctagactaataaggaaccaaaatgtagttgcatccaccacaagagagtatgtctcttcatagtcaattccgggtctttgtgggaatccttgtgcgactaaacgtgttttatgcctcacaatttcaccatttgcattcttctttcgtacaaagacccatttatgtcctactggttttacacctttgggtatacggactactggtccaaacacttctctctttgccagagattttaattctgcatctattgcttcattccattttggccaatcacttctttgtgtacactcttcaatagatgttggttcatgatcctcatccataacatcaactgctacattgcatgcaaaaatatcatcgacgtcgatttgctttcggttccattttaatccagacatgacataactaattgagatctcttcattgtcaggtacctgaatttctttctgtgtcatgtctaaggtctcttctggagattcttcatttgtaattatttgctctgttttatctatgccaatttctgccccttttctttttcgaggatttttatctttggaaccaataggtctaccacgctttaaacgtgctttagactcatttgtagtttgattttgtccttctgcgatatttattcttattggagcatttgcacccggtatatgtgatttgatcacactttttgggtcagtgaatgcatatggcagctgatttgctaaactctgtaaatgaattatcttttggacttctaattcacactctttagtccgaggatcaagataagacattgataattcattccaaagtatatcacttcccgactgtttattttctccccctaatgttgggaaaacagactcattaaaatgacagtctgcaaatcgagctttgaataaatctcctgtagatggctcgagatacttaattattgatggggaatcataaccaacatatactcccaaccttctttgaggtcccatcttagatcgctgtggtggagcaattggaacatatacagcacatccaaaaattttaagatggaaaatatttggttcctgaccgagaaccagttgagatggagagaacttatgattacttgttggcctgatgcgaactaatgctgctgcatgtaatatagcatgtccccaagctgatattgggagttttgatttcattagtaatggtctagcaattaattgaagacgcttgattagtgattctgctaaaccattttgtgtgtgaacatgtgctacaggatgttcaacacttatcccaatagacatacaatagtcattaaaagcttgagatgtgaattcaccagcattatcaagacgaattttctttaaaggaaaatctggaaaatgtgcttgtaatgtaatcaactgagcaagcaatcttgcaaacgccaggtttcgagttgataacaaggttacatgtgaccatctactagatgagtcaattaaaaccataaagtatctaaaggttccacatgatgggtgaatcggcccacaaatatctccttgtattcgttccagaaaattgattgattcgaaatttatcttagctggtgaaggccgtataattaacttgccttgtgaacaagcaacacatgagaaatcattaggacgaatctgctggttctttaatgaatgtccacatgaattagtgattatctttcgcatcattattgtaccgggatggcctaaccggtcatgccaaactttaatgttttctgtagacttctggtttactgtagcatttacttcaattgtattaattgtagtataatataaaccagtggagaaagcaggtagtttttccagaatatttttagagccttggatattacttgtgatttggaggtattcgatattaccttcgctcatagtctcaatatgatatccatttctgcggatgtctttaaaacttaataagtttctttgagatttaggagagtataaagcatccacaatttctaattgtgttcccataggcattgaaatattcgctcttccagagcctttaattatctttgcactacctgttacggtagttacacttgcttctttcattgtcaaagaagagaaatatctcttattttttaaaatagtatgactagttgcactgtctgccaagcaaatatcaccaccattcattgtttcttcaaataaataaaataaaataaattaatatcataaataagataatgaatccaataattaaaataaatcaacttgaataataattcgtaaaataaaataactgaaagccaaataaataaaaatcaaataactgaaagcaaaagaaataaataaagaaataaaacatagttcttcaaatagttgtagtttgatcactttgtctcttcttcaggaagaaaatcgtcaatgtccaagtgagtgaaatcatcaaagtcaaaatcatcaactccgtcttcatacaccaaatttgtttcaacatccttccccttgcctttgactgattgttgatagagctcaacaaggtgctttggtgtacggcacgtacgagaccagtgatctttcgctccacaacggtaacagatattcgcatatggtgttttcacttgtttgttaccatctttgttttcccacttcttgtgagagtttgagtttttaaaatgaactccactgcctcgtcctccagtgtatccacgtccacgaccacgaccgcgaccacgaccacgaccatgaccacggccacggccacggttgtaaccactttcttgaccataggatgtcacattcgcttcagggaatggagcagaacctgatgggcgtagtccatgatttttcaaaagcaactcattgtttttctcagctacaaggagacaagaaataagttgggaatacttcacgaatcccttttcacggtactgtgtctgcaggacaatgttattagcatgaaaagtagagaatgttttctccaacttatctgcatccgtgattttctctccacataactccaatttggatgttattttgaacaaggctgagttgtactcacttacagacttatagtcctggagtctcagatgagtccaatcatatcgggccttaggtaagatcactgtcttttgatgatcatacctatcctttagatcgttccaaaggatctgtggatctttcacactgaggtactcattcttgagatnnnnnnnnnnnnnnnnnnnnnnnnnnnnnatagcttttgatttttctctgcttggagtttgattaccatctttaatagtatcaaggagatcctttgaatctagatgaatttcagcatctagtgcccatgccaagtagttatctcccgtgatatcaagagctccaaattcaaggctcatgagttttgacatgattcactgaaatattaagaaatttaattaaatttcataaatgatacaattaatatatatatatatatttctttacaataattgtatataaaaataaatgaataacgatgtcatatttatattattaataaataacagattgtgatttcaatttatcaaactaaatcaaacaattgtaccaactaaaccagtcaataaaataatataaaaaaatgaagcaataaatttatcaaatgagcataagtcatcatcgatcgtgtaacttgatcagattattaaattaattttcatataatattagacatgtgatggcaaatgaaatgaaccgtatattcatgtttgacttttctttaagatagcatatttaataaaaatgaaaaatatttacttatcataacaacaaaataaacgagacgacgaccatgatatataacgattaaacatgtggtgtacaatttatcaaaatcaggacgtgatgaaaataataataaataatatacgatttatcaaaaactgatttgaacggcaaacgtatgggcgtattaaattattgacgaagcacgcggcggcatagaaataataaagaagaaactcaagccatcatcaaccgattaatgtatgaatcggattcaagccatcatggtttttttttttttatcagaaaattttttagtacctattagcttaggcagctcgtgctgataacgtgttagaaaagaagaagaagaagaagaagatttgtgtgtattattccattgaatgagaggtcctttatataggagtacaaggttagggtttcacaaagcatctataggataattctagaatattctattctagaaagatctagaagatgagccttataatgggcatccatctaatattcataacagtttctgcgattttagttatatttggttttaacatattaaatcggttactctcttattttagcgattaaaatattaattttttaataataactaatataaaaggcttaattaggtacccatttatttgtgcgaaatcccatttaataaatgtatttagttgggctaacccatttaacctcatttaacttttttaaaaaaattagtttaaatggatcaatttctcttagacatactcgttaattaaacatactcattaattatttgaagtttgcatacccatattaacattattac

SEQ ID NO: 38456 - DNA, 3183 bp, Arabidopsis thaliana landsberg
ggccgcgtgtgatctgtacgacctaaggcattctggaaattttttcatctggcggggtaagagaaatgatcaccgggtggattgcagattggatagggctatgtcgaacagctcttgggcagagacttacccttttagtcacagcgaatatttaagattcgagggctctgaccatcgacccatcctcactgttctggacctgacaaagaagaaaaagaaaggcatttttcgttatgatagaagacttagagcaaatgaggaagtgaaaaacatcattcaggcagcttggtctgcagatgatcaggaagacgtgcacgaaaagataaacagatgccgcagagacattatcacctggacaagagaaactcatcagaatatcaaccaatcactccttgaggcctacaaagaagaagaaatcttctcgaaacaaagaagccgtcagttatggcttgcttcgggtgacaaaaactcaggctattttcacgctattactaaagggagagcaaccataaacaaattttctatcattgagggtaatgacggttttcctcagtttgaagaagatggcattttacgggtcatcactgattatttccagaatctatttacatctcaagatggagaaagagctgaattgataaaggaggcaatccaaccaagaatctcagctgaaactaatctttacctcactgctcagccgtcggatgaggaaattaaaggagcatgcttctctatccatcctgataaagcaccaggacctgatggcttctcagcctgcttcttccaatccaattgggacacggtgggaccccatgtgatctctgaagtccaatctttcttcctctcagactctctgcctggaaaaataaatctcacacacatcagactcattccaaagattcatagcccccaaaaaatggttgactatagacctattgccctatgtactgttttctataagatcattgcaaagctgctctctaggcgtcttcaaccagttctacaagacattatttctgagaaccaatcggcttttgtccctaagagagctatcactgataatgtgttgatcacacatgaggtgttgcactacctaaaaacctcaaaagctaaagacatttgctatatggctgtcaaaactgacatgagcaaagcatatgatcgcattgagtgggagtttattaggctggttatggaaagaatggggtttcaccctaagtggattggctggataatgcaatgcatttctacagtcacctactcttttctcttaaataattcagcacaaggttccattgtacctcagcggggaatcagacagggagaccccttatccccttacctgtttatcctttgcagcaaggttctctctggactatgtcaaaaggctcaacacaacggagacttacttggaataagagcatcaaaaggcagcccaagattaaatcatcttctgtttgcaaatgaaaccatgttcctttggagatctgacatcacaagctgcagaaccttatgataatcccaaaaaaatatgagaaggcatcaggacaaatgatcaataaaagcaagtctgctatcacgttttcaacaagtgggcggtttgggaaaatatctaggattacatgaattgtttggtcgaaaaaagaaggacttgtttaacatgataatcgatcgcatcagacaaagagctaagagttggtcttgtagatttctgtccacggcaggaaaagcaaccatgctaaaagcggttctagctgcgatgcccacttacacaatgtcatgctttaagctcccgagctctctctgcaaacgcatccaatcagccttaaaaaaaatctggtgggactcttcaatgggaaaacagaaaatgagttggattgcttggtcaaaactagctaaaacaaagagagatgggggcattggttttaaggatatacctagcttcaatgatgctcttctggctaaagtgagctggcgcatactcactaaaccatcgggtctgttggcaaagatccttattggcaaatactgtcattcagcctctttcttagactgcaaagtctctaataacgcttcacatgggtggcgtggtatatgcattggaagagaccttctaaagactcaacttggaagagccattggcaccgggaaagacactaggatctggcaggatccatggatttccctctccaaaccagtcactccaatgggaccagcaacgcagacctctcatgacctaacagtggcggatcttatctgtccattctccaactcctggattaaagagaaaatccaattgctactacctgagtatgaagcagagattctagaaatcagaccaagtaaaagaggagctcaagacagattcatttggctacttacaaagtctggggactactctgctaaatctggctatcttgctgcaaacattcaggaggagaagctaagccagagccctccaacatttgagtttgactggctccgagagatctggaacataaaaacttctccgaaaattaagttatttctttggaaagctatgaaacaggctctccctacgggagaaaatttgaaatctagaggcattaatcttgcagcagtctgtccacactgtggagaggaagaaaccaatacgcaccagttttttcactgcagctatgcgatgtcaatctgggaaaaagccccctttaagatctcctttagctccccccgaatctcgtctctgaggaaaggccttgaatcttcaaagctcctaattaatttgccacccacaggtcttggtgaagttcccctcttgccgtggatactctggacaatttggacctcccggaataaacaaatttttgagcagaaacaaatctcagagtcggatgcgttgtctcaggccatctcccaagctcgtgaatggagtgttgctcaacttgtctcaacccaatctcctcagcaacgcctgccggaccagatcgatgagattgggttagatacaatcagatgcttcacagatgcagcttggaatgctgacacaaaagaggcgggctttggatggatcttcactgatttcctctgcaacacaaagcgccaaggcagttcttcagcttccaatgtccgatcccctttaatggcagaggctatggcgttgctctaagcgatccagcacgctttagatcttggttacacaaaact

SEQ ID NO: 38457 - DNA, 5515 bp, Arabidopsis thaliana landsberg
tcactattgatgttaacgtctttccgaggtccacgcaagctcttcatcgaatacagtggagatcaatctcaagcgtgagagcgacgacaagtgtgatgatgctcctctgttccaaatcactcaacttatcttaaaagacgtcgttaactttgatccacacaagacctctcctctcctcgaaacaatctttccagacagtatctcaggcactcgtctctgcgttgagatggctttagcatccgaacgagttccagcgccgtttgacatgtaccttcacgtcacagtgagattcgtcgaagaatccacttctagttctcctctagaaaacaagacatgcgctatttgtttggaggatatgtcacaggatgtacatgactatcaggagatgccgaattgtccccatgtctttcataatgactgtatctacaaatggttgggtcatagtaatttgtgccctctctgccgcactgttcttgaagatgaagatgacgacgattatccctactactcctaaacagagtcatgaagatttctttttttaggttaagaatgatgatttgttgattttcttgagatgatattgtaatgattcgatttgtttgagataatattgtaatgattcgatctgttgattttcttaagataatatcttaatctaccttttgtttattttggtcattaaactctttgtagagaacgaattaggtttacttggtatatcttctcatcttaataaacttgagtattttaagcctctcggacctaatatctatgaacatgttcaacatacactccttataagctcacctcatggctctatttcttacacctatctcttaactgttgctgtgtagaccaacattcgattggcttaaaaggaatttgggttttagtgaacatatctgaatcatcaagttagagacgtgttagagacaagttagagacgtgtaatattacaactttaaaatgaaattcagtatgccccattaaacgagattctttgcatcttccaagcaactaatttaaagagagaatgtcacacacgcgagtttggataataaaaaacaaaataaaaacaataactagaagttgtaatgtatttaagaacaatattctgtcaaaataacattgagaagcaactagttcttaaacccgagtacgattcaaaaggtggtaaggactctctagaaggtatcaaaacacgagtaacagagtaaacctctacggagatacaaagagccttttcacttaaagcatttggcgtccaaaagagcctcgccttcaaatggctcagcgtcttcaatcatctggctaacacgctccttctgtgcttcatcggagatatcaaccttcgtccactcgtacagctccatgtcgtacacctcatccattatgaacttggggatctctggtccacggaaaagccataaacccttcaccttgaaaggaccctctgacccgcaaataagcatctttccaaaggagtatttacgtgccaagtccatacgctgaaggaaccctcctaccttgttgagtgtaacaaaggagaccatgttctcatcgttgtacttgtagtcacagaaccatagtgagtacccctccgggtcatacatgtcccagaatcctgcattgaagaaaaacattcaaggcagtgagcttaatagaatgtactttaagactctgggtcatacatgtcccataaaccatagcgagtacccctctaagtctactatatctatcttaggaggcaatttagtagactagagcagctgtgaattgtttagagagtcgttagtaagcactggtattataaggatgtcacagcagattgtctcggatttttgtagctaacttaacaagttgattccataaacctagaacaatttcttctaaaaaacaattaacagaagtcatcatataacatacctttgatagcaacctcacggaagttggatttggtgttcgagtaaagcctcttccagtcatcgagaaccattgggcttggtggtagcaagtcaagaggattcttggctttaggctttggtgcttcctcctcctcagcaggctttggtgcctctgctacaggggctgccttcttgggctcctccttgggcttagcaggctgtggagctttcttagtaggaactggagggacagcttcagtttgtttggcatcacccaacaccttcttgaattctggctggttaaccattgtccagaagtatctctcaacatgagggaatgcagaggtaaatttcttggtcatcacagtagcaaatcccaagttcaagttgcagattgtgacaatatcagcaagggtgacagagtgtccaacaaggaaagtgttggaggcgagatgtgtgttcagagcctcaagtcctctcttcaatgcagaaattgccgcttcctcagccttcattcagataaaaccattaaaaagattagtcaagcttagactagtctaatactaatcttagcgagtaaggagtagcaagatttgttagtacagagagtgcatgagacaaggcacaaaaaatgagggaaagcttactggggcagagaaaggagcatagcccattcttggagcaaaccacttcaacatgttagcatcaatctccaatgaggagaaatcgatccattgctcaatgtgagcctgaaaagtaaacacatgcagatagacatgaatcaatgatagtaaacaagagataagctcaaaggtacgataattttaaaaggaaaggccattggataaacaggagcttacgtattcaataagggaggatccattcaaagagttgtcaccattcttacggctcactgaaggggggataacaaacattcatcatatccaattaataccaagcaatagataggtgcatcaaagagaaacagaaggaaatgaagttataccgtatcgggcaatggcattgctctcaaatatgggaccttcaggagtcttaagcacaggaacctagtagaatcataaccttttactgctaggaacattacagtcaacatcaccgaacacttatggacatgagagttccatacctacaccaatacgagcgattcactcttacaggacactcatcgcgacgtcgctatgcgaacgcccatctgaacgtctgcggactcctcgatcttcacacccgcatactctgcagcaatttgtgccttattggcacctttgtttcccttgaatgtgtgcatgacctgatgaatagtatgatttacacaaacttcatcaatgaaactcaacagaaattgcatagctatactcaacaaaatagtttttcaatgcaccacaaaatccaattctcagattaataacaatcggccaagaaacataaatcattctaaaatcaaactatcttcctagatttaagatacatgaatcaaaattcataaactatcatcaacagatcagtaaaaccaatcgtgacggatctgatcaaacgtgtaatgagctcagaagtgagtacttaccaacgccattgctcaaacggagaagatatacgaactcggagattttctgagttcagatctagttaccaaagaaaacaccaagtaaaaatcagttaatcgtcgatacaatttcgaaacgagagaagcaaatatgaataagaagtttatagatcgattcttacgagagaggtttctgcaaaattttccgagagagcaaagcgagagagaagaagatacaaaagcggcggcgagaaatagtattagagtgtggaaattagggatgtgtgaagtcggttttggagaatattcctttttggtttgattcggtttagcttttggttttgtcaaatttggtttgcttatttttaagggttaaacgattataacttttgcatttatatataacataataaaaattagcgtattgttttacccaaagtaaagttggagttttttttttgcattttttgacagattttgctgacatttccccatggccattttgatatgtagtttagttggttgtatccatatccttggtgtgccaaactcgcatgttgttgaaaaagaagaaaaagaaacactagttcatcgaaattcgtagaagcaacctcacaatgttacttctctgattcatgtctctatgtggtttcttcctctccaagatatcctaaacgataaccaaaaacaaagttttagaccatacaaactaaactttaaatccgaaaatgatgtatcctttttttaaaataagttgtgttgtgctttttaaattcaaaagggttattatgcaagattgatccatagatgtaaactaaaacgttaccacgtaccatgccaattaatataattaggtttttgatacaccaactccaagtatgggtttgaataaatacaaaattgatgaattttgtaacccttctttcactttgtgaaaatgaaataaaatctcttaattaagtagcttccaaaactattagagggcattattggtaggtccactaaactatgtattgtcatatgtcatacatatatagatgtttttttattgagttcgatttcttctacgaagtttacaaaattggtaccttccacaagtctttgcgtatcatttcttcacaacttactccttttggtcaacagtaccaacaactttaatttcaagcatattccgcctcttcttcttctgcactgcgtttactttgtgtgaccaaaaatccaaactaaagatatggaggttccaatctggcaatggtgtttgatcgtcatagtgatcatattcttggcaattgcttcccattttctgggaagaatcttgtgtagccctcgagagagaatcgcagatagtaaagccgagaaaaaacatggaccagccgaagcagacaagactgcgaaaggtggctccgaccaactcgtgtgatgatctcaaagagcatgcatatatcatgttttttttcaagtttggtttgtaatttgtaagttcatgttttttttactattattgtaaaataataccaattgttcacatccatatatacatatgtgtctataaatatatatgtgtgtgatcaattccaatttcacaaaaaaaagcaatggagagaacgctgtgccaaaaaaaaaaaaaaaaaaaaaaaaagcaatggagagaacactagtccgctcctaaatttgttttccattagtcatcaactaatcgacaagtctaagataccaaaatgtaattcggtttttcaacattacatggttagtttcatattatgggaaattaaactttgatagttattcccataaataaacgttgatagtgttgaccttggtgatggaaatctaatgatatcgtaacttttaaccgtgggttggctatgtgcatcggattagatccgataattgagctgctgtagactcgctgtaggtttggttaaatgtccatgttatgttaataggctgttataactgttgaaacaaagtttcacatcaaccaaattaaaaaaaaagttgttgtaacaaagcatgctataaaaaggtagagcaaggacccatcatgtgt

SEQ ID NO: 38458 - DNA, 911 bp, Arabidopsis thaliana landsberg
  unsure (1)..(911): unsure at all n locations
acccaacgacccggcggcaaaaagaagagaggccaacccacccggaacaaaaggggcaaaacccnccacgccccacgccgggagaacgggagggaccacaccgggaagaccaaaaggggcggacacccacaaaccaggaccacaaaaacccgcaacaagaaacgcgccaaaaccgaagcaagcttctcattaatgaaacacacgaaccccaaaagagcgggggcaaattcaaagaagggggccctgcacgcccaccacaaaaaannncaagaccccaacacacccaatgccaaattgctgccaagaagcacaaaccagaaattcctagccttgctccggcccacccagacgagaccaaagacccggttgagacagagncccccccgngacaacccaaccgccccacgagacggggagaccaaaacgagacaagaaaggcacaaacgacagacccgggcaccacaccggagcaagaacggggacggagggaccaaaaacngctaanncacacagagccaacgaaccagcccaaccagcaacaagagcagcatgcaaaaaacgaacagcaagaaaacgaccgggaccaaccaagacaacagcaagaacacgacaccaaggcaaacccaaggaaaaacccccgaaggaacgaaaaaaacacaccacgcaaccttaaagcacgggaaaaaaacatgaaacggacccacccaaaacaggaaacaacagcggagaaaggaaaaaaaacctgaccaaccccgacagaaaaaaaggaacacaccaaaacacagaaaaaaagggaagcggaaccaaacgaaacacgacaagggccaaaccgcaccgggggaaaaacacaagatcaaagaaccaaaaaagccaacggaagtgaccactcaaaagcccgccagaaaaaaacc

SEQ ID NO: 38459 - DNA, 3368 bp, Arabidopsis thaliana landsberg
gaactctgattagcagaaaagtccatatttatgcaagtatttttttaatttaaaactttataggatcaatatgtctatatttgttacaaataatataagttatccgttttatgtggatacatatcagatgaaacagcgatgactgcagctattcatccggtttggtggttggtcattcatggttcagtggttatccatcagggatcgaatagcaatgcatgcaaatcgaaacctctgtcttgttcacataaatatatatatgtctgcgtatatatatcacatacatatatgtgacaccaatcaaggtattccaaaataccttttttcatttattataatcattttaaagttatgaatatatttaggaaatggcaaatagaataatgttgagttgaaaaaaaaagctaacgtctccggatttaatggattcttttcatttatttatttttttgctgccaataagttagtagagtgtaagataaatctgaattggtcgagtaaaattcaattggtagacagaggtttacgtgtatgtaaccatgaatgacccaatacagtgaatcattaagatgcatcacatgtatgtatgtctatcagttcagtacatgtgacccaaatacagaagaaaagctgttatgtatcactattattcttacacacatcaaagagtcaagacaaaggatgttacataaagatgagtcctcaaaaccaatgactcatttattttaagtaaaaccaaaaacttccacattagctttagattaatgcaacggatcaacaacttggccaatgaacagaaccactcctgttatgttctctgtgaccaccaatagaaacggatggtctgcaacaaaatctatttcatcttcctccataagcaatcctcttagctttataactccagctgatgcagctgcagcttctgttccctcttcattcacttcgatacacgctttatggaaaatgttcgatacgcatagattcttccccattggaaggtgaatcaaccatctcagttaaaccacctccattattaaatggtgaagtcagccccatatctttcagaacatttgatgcactaaactcgaaagagaatttaaactttggcattctaaaagcaccatctgatctacagtggagcggaatatggttatcgaagaaacttggttcggagcctatcttctcaagcagaggagctaatccttctttatcattaggaagataaatgtacatggagaatcgacgttgatcctctatataagggaggcgcaaaactttgaaaccatcatagcttcttaggtactggtcctcgtaattggtcataaaggggactttcaccgaggtacccccaaccagatgaaaatcgtttttttttgtcatgtttgcatcaaatttagggggccacgggcctttgaaatatacagcatttgcaagaacgagtgtgctgctacggatagtatcgatagaatcgcgtgaaagaatctgcttgatgagtccattggtgtggacttcagcccatgtattcacctcatcaatcacttcagaaggcttcatgataagcaatcataaaatttgacaaatcattccacaaattggatgttatataaattcaagaaattcaaaatttgtccatcaagaaagaaaaaacgttaccttgcttgcgaagtcaacttgactacaagttgccttgtaagaattctccaaaaggtctttaaaggaaagcttcaaggagaaaaacttgtctatccaaacaccattggctatagacaagcgcaaatcacttttctcggtgccgccgtagatgatctgagccaagacgaggttgaggtgatccgttgacggtaacatgaggaatgagaggatttgttctttggtgactgaacatcaacctgccgcgatgaggctgagcaaaacgttgattgatatcggtgagaagacaagattggagccattggcgacggtagcgatgacatgcttcgttagtcttatccacaacgtcgtttttgttctcaatcgattttcccaactccatgtttttcgagaccaaataaagaagtctggacgaatgtttctaaataggtagagatgatgaatgtggttttaaataaactaattagaaatttcgttttaagattctgaaaattactagtcaataataaagtaatgctcgccacttagctaggtgtcaaagtaaaaattgtatcgtgggaaccaatacaaaatgaattagtcaacaaaaccacaaccctaattaaaggcgactactttttggtaatagtggggaatttgttttccctttactcgtcgtttgttgtaactagtaatcgttgaccagcaccgttttcttaagcaagttcaagttataggagctctggcaacacaggcagctctggcaacacagaggaaccaagaaattttctgtttaggtcaatgtaccattcgtccaaattattatacttcgtgttatatttagcgttaaattatccgtttgtatagagtatagaactatatataaatcgttcaaatataaatttatcgaaatacgtttcgtttaacgagagacaacattttctttatcgaaataagagaaaacaaataaagcgcgtgagatactacagctggtacgagtgagagtggcttaaaaaaaccaaaccacattttgctccatcgaacaagacacgttaaccaacgaacaaacaatcctgtataaaaaatctctcctcttcatcatcttccaccatctcaaatgaccctttttttttacgattatacccttctccttcccagttctcttattttcctcctaacatttcttctctagatctgagaaatcaccatgggagtcgctgttcttcatcctcatgattctttaatcaatcatttctccacaaacacgtcccctcctctccgtcataaaaaaccgatcaccaatcgccgtcgccggagtccgtcacgtcaccaatcccagatctctcatcctcctccgtctcctcataaccacaccaatcatgtacgaattctgaagcgtggcgaagatatcaacgttaagataccgattgaaaaaccagatctgaaatctaatcgtcagatcggatcagatccgatgaaaatttcgactccgatcagaatttcaaatcggaaatccatgccggctttgttttacgctggtccagtcacatcaacatctccgccgccgagtgaagtccctttaccggctttcttcgctaataaaaccgtcgccggattcgaaccgaccgatgcaaccaacgatctgatcaaaatcctgcgattagatatcgcatgattcatttctttctccgatcatccaaatccaccttaaaccggtccgatctcgcattctctccgat

SEQ ID NO: 38460 - DNA, 6380 bp, Arabidopsis thaliana landsberg
  unsure (1)..(6380): unsure at all n locations
ttgtgttttatgtgtgcgttcgtgggtaggaactagggcttctggaagtgggaagcctctttacttgacttcatgcctgaaaatagctgagggggtggcctgaactctgctctacatacatcagaatcctggcttgactcatgggaatttgaaatcgtccaatgtcttgttaggtcctgattttgagtcctgcctcacggattacggcctcagcactctccatgaccctgactcagttgaagaaacaagcgcagtgtctctcttttacaaagctccagagtgcagagacccacggaaagcctctacacagcccgctgatgtgtatagctttggggttcttcttctcgagcttctaacaggtagaacaccattccaggaccttgttcaagaatatgggtcagatatctcaagatgggtgcgtgcagtgagagaggaagagactgaatcaggtgaggaaccgacttcttcaggcaacgaagcatcagaggagaaacttcaggcacttttaagtatcgcaacggtttgtgtgaccattcaacccgataaccggcctgtgatgagagaggtgttgaagatggtgagggatgcaagggctgaagcaccattctcgtctaacagtagcgaacattcgcccgggagatggtcggataccgttcagagcttgccaagggatgatcaagtgagcatttagagaaattgggtgggccttcttcattgctttcatagaatgacacgtgtgattcttgaagtagggttcatagtgtaaagcttcttttttattttgtaacgccattttgattcatcgaccttgtaggacttgcataagatctattgaattgagatgctggcattgagtagttgaagaacagaagaatcttttttttttcattcttactctttctttaaataacacgacattcaatagcatcttttcattgacatgtaatacaactttaaggaggaaaagaaatcaagtatagtataggaacaagcctaacttgacattgacatggcaagtaactaagttgcatgtcccttcatattgtgctccaactattagaaatcaaaggattgataaaaagaacgcaaaaacaacaaaatgaaaatgtgatatcggatatgcaggtgcccttctgttagtagcctttgtttcctcgaatcctggctctcatgtctacctagagaaaacacaattcgacatccaatgagaccaagagactgtaagggtgaatgtaactcttaagtgttcgcaagcatgcttaatcttattccacggcaggtatggttcgtatcttttaaacatgatggatgatttcaaagctacattatcacaatgggtttagtgaacaaattgaggcttttcaagtggtgagagcaaaacatacctgtcctcttttacagttgaagtaggtttctcttaggccaacacactcactcggtatacatgggcttttttcaccagtgcagtccctaattgatcgtttctcgccctataacacaatcagaaaacaaatgaagtgaactggtaattagttaacaggtaatgaatacacttataatagcttcatcttcagacattttatattaccttgacacaaatcgattcactgagacatttgacaagctcttcagcaaggcccttacaagacttcgccatttcaactgttcatatgcaaaaaggcaaccaatacatgagagcatgtttctaacaaatgaaatgagctttcaggatattgtgatgctaaactgcagtgtgtcaaggatttattatgaagatacaagaagatatgggtaaacaatcaacaaatgcatagtccaggaatctcgcaaaaaggcaaccaatgaatcagagcatgttcttaacaaattagttttcgaggtactacaaagcttcaccgcagagcctcaaagggagtgttgtgaagaaaaatgagctctagtataatactcaacaagtacacatcatctgaaaatccctccaaacacacgaacaactgcccacgtgtgtaagtaactatgaatggtttcacttaatagaaatcacaagtatcaagcatcgaacttcaaacaacaaatngcagttgagcttcacaaaagaagaaagctttgcttttgcctattgggaacaatccaaaagtcccgtttcaataaacataaaatacttcctttcttcatttgatgatcacgaagaatctaaagaactcccctttctaagaatctcaaacttatgataaatccttggaaaaaatcccgatttctccacaggaaaatatttctctttcaatcacagataaaccatctgattcctctgttctatttttcgctaaaaactcattcttgtctcaaaagaatatgatcaagagccaaaattacagagcaatacaacaaagatgatctaaagaaagaagattgacggttaccgacttaccggcgacggtgagtaaaaaacggatcaatgtcgacgaagacccgaaagacggaggtttttccaaagggtttggttttcttcaatttggcctttgccgaataacgcgtgggccgcgtggctctctctctgcccatcggtcaactcaattttggttcggtttaacaaattaaccgggtaaaatccgatataatttggtttgatcggattctcaattaaatgcgggtttaaaattcaattatgttccagctctcttcccggtctgagcaggctcaagaacattatgaaccaaacgttttgattcgttgcctctagtatctttctttgtgtgtgtttagcattaaccaattttaacctagaatttacgatgacaaaaatgttatgatgtatttttttccaattacagctattttatgttactaaacaaatttgttcagttgtaaacttactcttcaaaagcattaaaaagtaaaaaatatgctgcctttagttagtagaaatatatttaacaattttttttttttgtatatttaagaatgatgtttattgaaattgtttttcatatgtaaaactcaaatgtaaatgcaaaagtgaagtttaaaaaaaaaaatcaaaacttccgaaacttgaaaagtgagtagagataaactgtaggtcagtaaaatcatatcccttgtacattgacaaacaacgactcaaaaggctgtttcatcatgcctttacggaatctagtagcttgtaccacctccttgttttgcgttttagggtcttccaaaggtgtttctaaagaagctgtgcatgtcggtgtgcagtgaaggtttatgcgcactcggctaagagaagaaagagctcttcatcagttatcgctcccatttccatcgctctttctagaacgcttagccctccatcgtcctctatcgacggacgtgctcctctgcgttttcaaaaacaatttaagaaaatataaatacaaccgcattatgagccaaaactaccaacgactaattcaagaaaaatgcaatggaagagccaagctaccaaagaaacagagtcatggaatcaaggggaagtggaactaggaggttttagtttgagtcctaacattcattaagagtgcgtttcttaagagttaaaatataccttcgcagtagaatctttgcaaatttgtggttccctgatgatatgcaatggtgcaacggagtccttccgtgataatctcttatgtttaggtcagcaccaaactgcaacaacaattcaagcaagacagagtcaccaatgtgacaagccacatggagcaaggagcatccttgaagacagcttcttggttcgttggattctttaattctctgacatacagttggatcatgtcttttctttactgctttctctgctgcatcaatatggtgatatgcatcgatatcagttatatcatcaaacttggtattgatgatatttacatccccagtagtaactataagtcgatagatttctcgtatgtttctgctttgaacagcttcccatattctactcgcagcagaaaggtttgcttcactttcatccttgatgactaatgctttctccaggtactggcccaaacacaaaacatcaatcaaggtttagtattagttgctttttacatctttgccttttcacaaagcataatctagttcaataaatgagtaaaatgatcaatcatccccgtgaagatacatttcacaacttggacattagaaagtaacaactaatgtcatacctttcctagaatgtatttctccttcacactaaaggaatcttctggacatggttttgaaactgaagcatgcgacaatgctgatccgtcttcgctgcaaaaagccacactgtttatcacgatgtacctcatcagctacatgcatgatatatgaaacaggagaatgttggaagatagagtgtatgataattggtctatacttcaaaatacaaaacaaatgttttatccttagagatcataccagtcatcgtcaaggtgaagtagtccctcccacagtgaattacagtatacattacccaaatttctaaataagtccaagaatcgttggctcccacactttcacatctaatgagagggacctcacctgcagtttgtggggtacaacatttatgaaatcagcttagagatataggactgacaccaaagaaaattccattaaccaacttaatccggatacttgaaccctccaaaggttatagctacagtgatgttgacttttttgcaaaaaatttgaacgttggtggagtcagttttacaaagaaattctagaataccacattgagttctacaaatccgccatgcacgaagagaagaattcgcggacgtggtataagacaagccagctcatacagcaagaaatctcaagggaagatgtttaacaacattgttccaagaatatttcagcacttcacaccttggatatatgagaccccgagattcctgtgaacaccagagcattgaatgcacaacaaaactccaagatttaacgatgcccaatcgggctcaggagcattgcactctgcacatgcattatttcccggaagtcctctgagtattgttgagacatcatccccgatattttgtcttgaatcattatgtcgaatttgatccccggagacgacagcattagcaggagcagaactggagttgtctttatccaagtatcgcacaggtgactgcagaaacgatatgtattactaataaggctttgctatcaatttagtttgtaactgaaagccagaggcttattgtgtcaaccaacctgttgcagaaaatgagaattgagaagcgtccctatagcttttgtgatcttatttacccagtccatcctatctgctccattttcagcctggtaaggtagcataattgttgtcagcattctgaagtacttggatcaggggaagaaggaattagtatagagatacttaagtatcaattgctaagagggtccatgcaggttgtctacaaggcacagctctctttttcatataatgaatttggaaaaacccaacaggaaaaattcagactaagtaagcccggtgacttgcaacctagtctatagcgagtaaactgggtacctgaagtgtgtaagttttttgaggagaaataattctgaaacagagacgaagatccatgtcttctgcgtctagttttatcaaagaagtgcgaagatcaatagtattatagcctaagctgccctcagtgagcgaacctgatcgattatgtcttgcccgaaatcgaccaaaaactccagtattatggtcagatgatccactatagtgatgatgagatccctgagaacacgagtagcagatgaaggcaaccattataaacaaacataaactataaatctaaagaaagatataggatctgctgaactgctaaatagatggttagttgcagaatctatacttctatagataaaaacaacagcgtgaggaagtgccaggtaaattttacgtgcaactactcattaaaggcttaatattcctggacctgataggcttatatcaaaatccactataattttagaaatttcctatcacatgatatcacagagtgttatctgatagttgatacagcagggtgatcatagacttatctatttgttcacatatattttcccgttatttcataacaaatctattattcatttcaggggaagagaaggacttatgaaacgattaatgagatttaagagattgtaacaattggcatgttgaactataacgcaaatttgaaagaactaatggaggtctctcatggaaatgaggcaggaaaaagaggtttgcacgcgtaccattgatttattaccattagttctgtaatagtacatggggccatgactatcaaggacaaacaactttcttttccaatcagttctcacacttgacgaacgctttaatagatacccctgtttaatta

SEQ ID NO: 38461 - DNA, 9086 bp, Arabidopsis thaliana landsberg
  unsure (1)..(9086): unsure at all n locations
agctatcatcgtagtgtttttggagtgcccttgcttgtccggacatagagcgattcgagggtgttacagccatggcttttaaaattaaaagaatgggatattatatgcccactatgatcacagattgtgttaagtacgcccagcggtgtaagcttgccaacttcatgcacctctaatccaccagccttaggagttgttttcggatcctctttgaaaatcatacataatatacttagtaagatcttacaaaaagccataaaatatacattggtttgtcctaagtcacgagcggcctctactaggttggttaactaaggtttcccgcacaaaaagtagcatcataagtaatctagtattacttaatgagccccagatctagacagagctaccctaatacctctaccctaagcagcatcgacggatactaatactacgacctaagaagaataaaatacgaataatgcaaataacacacagacaaagaaaacacgcaacaagcaatgcaagcaagacataatacacaaagaaaaatgcatgcaaactcgatttcctaatatgtagtggacaactaatgcaagtatgcttctaacaacctaggtaaggccttctacgaatccttgatctcccaggacatgcctccatctcttagacacaaagtctacaagagacatagcattccttaatactacatcgtcatgtagtgcccggtcggtagcgaccgagccccgagccttcgtataccataacggaacgtggttacacgcgacgcacaacatacggacgggatcctcatggttcggttaatgttagtcatctaattaaagactactaacatgacaacagactcatatactattatgcaactatcctatatacaaaactatactaatcaaacaattaatcgtacttaattaccactaatcacggttagttcccctaatctaggtttaactagtcctaatcatgcttagagaatactaatcctaattaggcatcactaatcctaattaactactactaaacctaattaactatcctaatcagggattaagcgaataattaagctaactaatcctaattaacctcctaagctatattaaggaaataaatgaataaactatcctattcacgtgctacttcacgtgactcaagtactcacatggattttcgagcggtttggcttctaaggtcttctcccgcgagctaggcattttctagtggatttttgggtctgaggaacaaatgggacgaagtggagtatttatagggtcttaagtcggtcacaagatcggccaaaacaagcacgaggtggcccggaccaatcaaaactcgataaatgtcactccacgggcgctccgggacactaatcagtctccgattgggttcctccattttttctggataaacatcatccaaaatggataagctcgaccctaaaggataaggatgaccggaattatagataagcttgagccttaacggataaacatgaaccacagttcaatcctggccgtccgtttcttcattccggcgaaacccatgatctgtcacgggccgcaagaacattgatagggcacacttcatctctaatgtctcatgagggtcaatgacacagatcaaggcttctttaggactataacacgtttcatgccagaattaaccgactaagctcgctaacgtcacttatccgcattttccgttcaatccctcgactattcacgacccatactcatattccactgcccaaatggattcccctatggtctcctagtccttctaaggttttctagtccttctaaggtttcctaaaactaaggttttcttaagctatcctaggtctaagggctagcctaatggtttcggggtttaccgataatcgcatcgtagctaagcttagtccgtctgatggagagtcattcctttacccgtggacttgatccattgcaatgctccttacccatgacttgccacatcaaatggccgaactggtcttgccttttcttggcatgatctcgcattttactcgatagactgcacgttcggccgcatagtcaaggtcatgggcattacatcattggaccattgcactgatcaacttgaggcgtacaatatgtcttggtcttcactgattacttttcaaagtggattgaggccgaggaatacgtaagcatcaaggattcggcggtaaaaactttcatttggaaaaatatcatatgcccgcatggtgttccatacaagatagtcacaaacaaaggaccacaatttatttcacacaaattcaaagctttctatttggattggaaaatcaaagtcagttattccaccccgcgatattgatagtaggattttactcaattaatccctaaaacactatcttgtcgttgtagtattttaggatgtcaatccaatccggtgtgatgcaaacagatgagatatgatcagaaagctctaagtcaagccaagcagaaagttggttggttctaacagtcctagtatgcaataacagaaatgaagtgaaactaaaagcaggaatggcaatagcaggcaagtgaatgacaaagaagaaatgataacaggcaatcaaatggataaacgattcctaaggatggggtaatcgaatagtgtggtctacttaatctattcaggcggttgacaaaacttcacagaagctatccctagacaacaagttcaacaacagattaattcactcccgtgatagaaatcctcaagcaaagctagacactgacctaaatccctttagcgatctctaactaagcaggcattatcgaatcaacatgttaaagtcaataccctctctacagccaatcccttggggtagagtcagantatctctggaattaataggattcaacgcccattaaacgccttctgagcgctggacgtctggactcatattccacattagccggggaggcaagcaataaccgcaactaatctaaaagagattctagtattctaaactcaaccacctaaaacgaccaagtaaaccacaactaatctatcccatcctcagaaatacggttcactactcagacataataaaagacaatagcaaagcaacgattgaaaacatgataacagaaatgacgaaagacttaaacgcaaactgaatatcaaatacttgaaagtgaaaatacaaaatcgcaggagaaacactacaactatgaaagttgcgaaaatgtaaaagttgatgagaaacggaataacaacggatgccttagggaaaaccctaaggggcagtttatataagcgagtgataagtgtgtattttgcatattttgagcatccatttgtcatcactttagcaccatatcatcactgttttataccatttctcatcatttgtcatcactttgcatgtttaggatagttttgcatgcatgttgcatatttgtattgatttcaggtgagttggagctgttaacgagctaattggaagaagcggacttgatcatatcaaaccactcgaccccgaggtcgagtagacgcttcacgacctcaagagaccactcgaccccgaggtcgagtaggagcttcaagatctcaacagatcactcgaccccctggtcgagtagaggacatcactacttcaccacatcactcgaccccgaggtcgggtgtcttcatcccatcacctgaccatcactcggtctcatcactcgaccacgaggccgagtgtcttcaccttcattgccagaccactactcgacctcttcactctacttggaagtcgagtatcaccatcaccaccactcgactgcatactcggtgacaagcttcagagccttcttcattccgcactcaaccatacactcgagcacaaggaagaaaagaagactccagatattcactcgacctcccactcgaccacatgggtcgagtacagttcttaatccgccgcaatacttcgtcgttttaagtattagggtttcggaatatttggctataagtagcatgtacttcacattttcgcaaacaagtttttatctagttttattccgcagacactgtgttctagacctttgtaatccggatttctctttatctattcagtattcagtatttgttcttgattttcgtttactattgttcattctgttatcatcctgctgttacaccgtcgttatcatgttttcatcttgttcttcgtttatgctttctgctatgatgtctgagtagtggataggtttctgaggatgggttagagtagtgtagaatgttcagtatgctaggtgattgagtattgattgatagatcccttctggattagttgttcttaatgcctattgctttctgatcaactggaatttgagcccagacatcttcgcgcccaaaaggtgttcgatgaaatgtccgaaccactaattccagagattcgtggccatgtatcaaggtattggttgcagagagcgttttggctttaacttgttgattcgtaatgcaagttaggttagctctcgtcaatggtgattgagtctgggactaggttaacttgagggtctctgttgcggtggcacttagatttggttaatgaacttgttgtctagggacaatttattgagcatgacaatcacttgtaaactgaggaaacgaaactactcaattaccccatcctcgggaattctttatctgattgaattctttgtttactctactgttgtttactgcatcttgtcatctgttgcttaatttctgcaattatttcttgttactcgacctcatactcgatcacccagttgtctggcaatagactgtgcagtcgagtatctgtgttatactttctgtctattactcgacctcacccagtgctctgcaaagagttgtgttggtcgagtgttttactatttctgtttgattttctgttttctgcatgttcacttaggactgctagaacacaccaaaacctattattgcttggcttgacttagtgacttctgatcacatcttgattgttagcatcacacccatttggattgacaacctaaaatactacaacgacatgattggtgtttcaggataattgactaaaaacctattatcaatttggcgccgttgccaattgggtgtttgtttgttacatttgagatttcagacttgcttagatcaagttctttttcaattttcttttcggttactaactgtgtgtttttcttgttgtcttcttgatccaggtacacctctgctgtatgcgaactcgatcaacaggcaatcagaacctccttttcaatgataacatcgatcgcataactcgcgaactcagagaaattagaaacacattcaaccttgtacctcagcaaccactcgaaatggctgacgaacggaatcaacaaaatggccctgtcaacattggtgctggagatgcaccacgtgatcaccgtcagaggaaagaaattgcacctcctgctatccagaacaacaacttcgatattaagagtggtctcatcttgatgattcaggggaataaattccatggtctgccaatggaggatccactcgaccacttggatgaatttgataggctctacaacctaacaaaaatcaatggtgtcagtgaagacggattcaagctctgtttgtttccattctccttgggcgacaaagcacacatctgggaaaagaatctgccccatgactcaatcaccacctgggatgattgcaagaaggctcatttctgagtggcttttcacagaagactggtgaaagcttctgtgaagcatgggagcgtttcaagggttacaccaacaaatgccctcatcatggcttcaagaaagcttctctgcttagcactttatgcagaggagttctaccacggatcagaatgcttctggataccgccagcaatgagaattttcagaacaaagatgttgaagaagggtgggaattggttgaaaaccttgctcaattagatggtaattacaacgaggattgcgacagaactatcagaagcacaactgactctgatgacaaacacagaaaggagattaaagcgctgaatcacaagctggacaagattcttcttagccagcagaagcatgtgcacttccttgttgatgacgagcagtatcaagtccaagatggggagggtaaccagttggaagaagtcagctacatcaacaacaaccagagtggctacaaaggttacaacaacttcaaaaccaacaaccagagtggctacgaaggttacaacaacttaaaaccaacaaccccaacctctcctaccgcagcaccaacgttgctaatccacaagaccaagtttatcctccacagcaacaacaaggtcagaacaaaccgtttgttccttacaaccaaggttttgttcctaagcagcaatttcacgggaactaccagccgcaaccaccacctgggtttgcacctccgcaaaaccaaggtcctgctgctcctgatgctgaaatggaaattgctacagggacaagcatcgagctccatggaaattgctaagaaattatctgaattgcaccataagctggactgcagctacaatgacctgaatgccaaagtggaggcattgaataccaaagtcagatacttggaggaaaattccgcatctacttccgctcaaaactagataagccaacttccaggaaaagcaattcagaatccaaaagaatatgctcatgctatcaccatacgctgtggaaaagcacttccaaccagagaggaacctaagatagtcaccgaggacacagtagatctagatggggaaaattttagttttagtaaagatcaagctaacaaggaacttgagcagccactcgagcagccactcgagcagtcactcgagcaaccactcgaccagtcacttgagcagccactcgacctatcactcgagctgccactcgaccacttcactcgaccgaccttcccaccaacatcaccaactgctccaaaacatgttgctgtcaaaaacaaaaaaaatgtcttcatttgtcatccttacaagcccccacttccatttcctggtcgacataagaaagagttagaagataagtacagagctatgtttgccaagaacttcaaggaagtcgaattaaggatacctcttgctgatgctctaacgcgtatcccggattcccaaaagttcctcaaagacttgatcatggagagaattcaagaggttgagaaagcagcagttatgagccattagtgtagtgccataatacaggagaaagatgaaccagagaagctaggagaccctggttcattcactctaccatgctccctaggttcattgacattcaataaatgcctttgtgacctagcagcatcagtaagtctaatgccactctcagtagctaagaggttgggttttaacaaatataaatattgcaatatcttcttgattttggctgatgggtctgttagacaacctcatgggttattagaacatttgcctatcaagattggaaatgtggaggtgcctacagacttcatagtgttgaacatggatgaagaaccaaaagatcccttgatcttaggaaggccctttttggctacagctggagcaatcatagatgttaagcaaggaaagattgatcttaatatggggaaggatttagaaatgaagtttgatatcaatgatgctatgaagaagccgacaatagaagaacaaaccttcttagttaaggaagtggaacagttagctggtgaactgctagtggaacttgaagaagcaaataattcaaaaactgttttgaccaaaagtggtaaaggtgggtatctccctagtgaaactttgagttctgagaagtcattagactcacacaaggcagcagttgactcagaggtttacaagggcttgatggggtctggcacaaaggttatgaaagctaatgaagtaagttcaacacatgctcgaccaactgattccaccaacaactcgaagaagcctccaacttgccctaaaagctcatgcttgaccaaacaactcatggcaagcactcagacgttagatgattggttagaactcaaggagagatctaaatggcaggacaaagccatacaagagctaacacatattgtgaaagagctgaaggatcaaatcaaggagctcaatggaaaagccaaccaagtaccactcaacatcaagaacgcccctgacgatggagccactattcttgtcagcaaagaaggatgtgaattcacatcggaatggtctagaggagaagactatcttgataaaaaagaagcttactgtgaggacatggcctctgagtacccaattgcagacctgtcaagaaaccctaatgagtatgatgatcactctactcaagaaagagaggagaccacatttcctctctgcaacctaccctgagcctaacgagtatgagaagtcaagcttagagacttaaaacaagctcacttgggaggaaatcccatgtctatctttgtacatatctttatttttccttgttgattttgatgcatttggttagtgtcttcaggagataagtataaagagacgagtgaaatggattctggctctgcgagtaaagcagtatactcgaccacagagaaatgaaaaatactcgaccatgttttagcttaaaaacgccaagagatcactcgaccgcggtgctggccgcagtagaagaagagaggtcgagtatcctcagagcggtactggccgccacagagctgatgaagtcgagtacccacttgctggagctgatacagaacagggcggctcgtctatggcctgagagcaatcacaggcagccattgacgaccaactccgttcattcttcgactaaggtaagcgcctcacttcaccattgtattatatcatctcttgtgatttgttctttattttgtttctatgattggatttgtcctcagtactctcttccaagtttattcacacaatggactgtgtgatttaagtttgggggagggctcatgaagtgtgtgttgcattgtatatattcttgagtctacattcatctaaggcatagtaaaaacaaaaaaatttgaaaaatttcagaaaatgatttcacaaaaacagagtgttcatgtagttcattacatttaggatcgagtctagagtg

SEQ ID NO: 38462 - DNA, 6928 bp, Arabidopsis thaliana landsberg
gctcctgtgctttccgataccatctcatcgacaaagccaacgacggaaagtatctcaactctttgctgtttaacatccgaacacagacggttaaacacaaatatatcataaaaacaatctgttgtgagaagatggaaaaagtaacaatacctgcaaagttgagaatgttgcgcttaattgcaggatttccctgaaatgttattcatgtagttgaacaaatcatcacacagtcagttaaaaataactcaaaggaactatatattatatcagcagcctaatgagtcctcaccttacgcagccttttgaatttcatttcatttggttgttcaatgatgttcctgaaccacaaaaaacaaacatagtatcttcagtcatataacaatggaattacatctacagacacgcttataagtttccaagagctgaaaaaagtacctgactattttgagaagcatttgtaacacagtggttgcttgaccggggctgacttcatttctcaaggcctttatggctttcttgagacggttagagatgatggtaacagagtcttggatcctctggatttcttgatcatctggatccggctcatcaacctccatgattgtttccctctctgtgaccaccaggttatagtctggatacggttctgcattattaggctcaggtgtcgcctgcgtagcttcatctgcattcagattcccacacaacattacagtgtcatttacaattttcatattttcaacttcccctatacttgtgtgtgtttctgagtcatccggatcaggctcatcatcatctttagtaggatgcgcaagatcacttgccatttcatatgaatgacatgattcggttttggttgcatcatctgcattggtatcatcaggatcaggctcaaacttagtcatagaatcagactgagctttagggagaacaagctgtttattctcatcacgaacatcaaccaagtcatcaggatcaggttcttcgctgagttttgaaacacttgtatgggagagacggcgataagcagcagcaacagacgattcacgagcatttccaagattatcggactggtttccaccaagcctttgagaaacagtttcattttcatcgaagaagtagtcttcctcatcatcgtcattgataaattttgttccattcaaagtgtgaccccttgatttagtccaatctaagctttcagcttctttgttcaactgtcacacaaacactcattcgtaaaatctctaccgaaactaaatttgcgattaaaataacataaaccatcactgttgtatatatacattacctggctatcaagagcataaaatttctcatcatgctccgagtataccatgtgagcctgacattttgattcagagaatataagctctcaaattcaagttcgtatagaaatgttcatagttatcagggaactgtacaagctcatgcaatagagtcttttttatgctctgatactttctgaatcccttgagatcatcagtccgaaggcgtagagaaatctcctctccttgattctactcaagatttgggaaaatcaaaatcagaacagactaggagaaacacaagaagtggttttgtcttataaacaaaacatgcgtaccttgttaaaccccagaaggcatggtggactaacaccaacataaccaactggagcaagttcagtcataatccctactctccatcgatgctacaaatatgaaacagaatctattagttcaacatcaataaacagaccattgaattataagttgctcgcaatttagatataaccttgttcataacagcaataataccagggtctgctgcaagcatgtgcattctctttagagcagcaccagcaggcgggtttaactccataaccgaacatctcgtgtcactttatagccaggcagatctataagttcggggcgggcagattatcaggaaataagtttatggtacataagagagcaagatagtagcaccaaaggacatagacaaaagtctgaacatatcatattacgtactggataacgtaagtgctaatgttagacatggatattcagaggattacttgcctctattcccgggagatgaagagtgcggaaatcaccgaagatgtgagtcccttgcgcaagcttaattgaaccgctcggaacatgcgacttcttggaatgaaccttctttcctaatcctcaaagccaagtatcctcatgtcagacactgcctcttttagaacaccttcgacctcttcttcagacactcccatcattctgatagttttatcctataaaacgaaaagaaagtaccaaagaagtatatttaaaacagattaagtgactttcaccaattggtaagtgcaagctttaggtattgttcaattgttcttggcttcttgataataaccaccaattcatgattaataaaggaacaatcttttctgtgctaatcaagaaccttaagcaaaaatctacctaagaaaatgaacaaaattgaatttttacttactctgctacatatcaataacctcaaaatgcactcttaagctataatgcaataacactaatgacaaaatcaacttatctcttagcttcctaattgtaaccaccagttcatgatcaataaaggaagaaacttttattttcttaccactaaccttaagcaaaaacctacccataacaatgaagaagattgatttcaatgcactgattaagatataactaaaaaaacaaagactaacctcaattatgtttgattcctgcaaactcaagctcgagtgttcatcagaaaagggtaacatcaagcttgatcctttttcattcaaccttggaacgatcaaacgaagcgtctccgatgtaacgccggttaactttctcaattcgtaacctaaatctttcagagaagctccagaatcgatctcaacagagtatttgtttcctttccaaagaagagaaactctgattttttttcctgaatcttccatgcgatgagagaccattgattcggttaatctgaagatcaagaaatctgagaatttgtgataaaaaaattcttcaatttagacagaaccgtaaagattagtatgtaagaacaaatttattattatccattggacttgttgaagaagaaaagaaagatctctctctctctatctctgatgatacgtatgcacatacgatgaatgacgtaatcgaaagtagttctgttcttttttttggctgcaaagattacaataaccgttccgtttcggttcggtaagttctgatcggatatggcaatataataaccattcagatattttaggattacaattcgggtcgattcggttattttattaaatttggtttagtttggatttttagccagaagaaccgaaatgagccgaatagaagtgaaattaatcggaaaaaatacaaagaagaaaaatattagaaagaaaagtataattttgttttattttgtaaaagagtatttaattttgaaaaatataactaacaatatttgaatatgctgcttatataaagtatttgattgtttgatttctaaacgtaattaatattttgagtttataattatagttatgggtattaattttggatattttctaagtttctggatattttggttaatcgtttggttatggtttggtttattttatttaaaacttagatcaataacttaattaaattatatgcattaaagtaatatattcgatagacttataaaatctctaaatgagttatcgactgtcacgtcattgatacacggaagggctatgttgcaggagatttttcagattgtggtttgacctatatttatttgatatggaggtttatcttgcaaaaaaaaaatacattgaggatttttttgcacaaaattcttatgttttcaaacggagttatcgagtgtcagatcatcgatatatgagagggttgtattgcgggtgactttaaagatggtggggttgacttgcataattcggatttggagggtaaacttgcaaacgagattgacttggagggttattttgcagaaaacccttaattaaaacgaaatatttgcgattttcacccataacaatcttattataaaaattaaattatggttttcaagtagtaagacatataatcgtcatagatatcaagtttattgatcacaaaaaaaaaaattttattaattttaaaaatataattataagaaattataaatttaaacaattttaaaaatataaaagataataacaagaaaactaaacttatgtctttagctgcatagaattggaagcaggtacgcagaagcgaaagcgtaaaagccagtttttaaaaatatttagaaagcagatacgtgttgtgttggaagcgtatatatatatatatataccatgtatattatatatctatatcccaagtattttttatatatttatatatatatatatattataaaataccaaacataaaatcatttagaataaattagataataatcaagttagaatatattagttaaaaactaaatttcaaatactaaagattagaagttaaaagcatagaaaattcaaaaacttctttaagtttttataaacttaggagagtatatagttttttccgtcgaaaatataattatattaatttgaattgtcaagatacaattgttcactaagccataatagcgggtacatacaatcaaaaaaagtaacaactagtttgacatccgcgtttagctaatagatgtaatgtcttattaccactcctcttcgtgaagctaaacttaatgttttgaaaattttctgtccaataggcgatatcttgatgaattccggcgatagatatatcataggtttttccattggtcatattgatcggatatcgcaatctccttcaagaattatagatcaaaatctttttatccatacttgttgcaatgccgataaaagggtttcagcttcagcttccaagggtgatattcttgtaacaagatatgatgctccctaacttagtgactgtaacgcccgcgggcatgatcatggccggtctaaccacggccatcccgggggtggggtggggggggggggggtcatagatggagagaaccagtcgcaattcggctaaggtcccagggttccggatcttcggccgattcgtatccggtcatctccccactagattcactgcgtaggcttgccaacccttgcggtgaacccggtgttgtgcggttcggacaaagccttatatcattacgtaacattcccgatttgtaaaactgattgtacttgtatatgtactagatattatatgaataaaacatcaccaaatccatacatatatatttatattcggatccaagttttccaaaatacttagtacaaaaacggttttacaaaagcaacataaaacaataccctagttcggcggtcttaacgttcgtcttccctctactggttgattgcgacgggttacctgtaagacaagtagaatcatgagtaatctagtattactcagtgagccgggaccatgtaacaaagaacctattgcaactctaagccgatctaatgcaattctaaaaacctagaggggttaacaaacgaatgaaaagtaaacatgcgacaaacaaatcagagaaacacgcagcaagcaagcaaacatgcaaagataaacaaacaagcaaagagactcgacaatactctagacgcgaacctatgggtcctgagctccattcctcctccctaaatattggaagttgagttctcctatatggatctatcaacccgacaacaactcattgaatccacacatgaaaccaacaagatcacgacttattgaacccacccagtataccaataagcccaatgcatcgtcatgcactcttggcttaggttccaagactaaccggcgagtgattccttgggaccaaaactcactggcttccacacacacaggcaggaatcggcagtgcactaaactagactcacctatgacacccggatcccgcatccaaggtatcctacaacaagaaagctcatctctcatgaacagactcagcctgattgctaaacctttgaacatgttctcggtaatagcttccttacctagatcttagggattaaatgaacgagtccatgggagggttttagatggtacttatgtacaattcctctttcaatatgaacttgatcttttatcatttcaaagaagagagccttggctctttaataattggtttgtagttaatcaaagatgggaaatctttcttgccatagattttcttactaccatagaattgtgggttcagattaggggaataccaatgccttatgtctgtgtggaaactgttagtgacattgctcatgatcttggtcatattatccatatagacttccatgaggccactactaatcaaattgcctatatccgagtaagagttagatttggaataaatgatcgcctaaggttctttcaaaggattaggtttgactctgggaaactgctatacttcgttttcagtatgaaaagttaagaagaatatgcagtcactgtcttcgttttacgcatcaaaggaatccttctccctactcattaccattacttgcaccaagacatgaagacagagttcagatctctgctgagagggtaagaagggtattacatgatgaattgtgtaggtcggatatgaactctcaatcccaattatcagatgattcgtttccggcacctttaacaccacctcttacagttcctactctgcctctgaatcttgcagaacttgcagctacaagacttgagctatttccaccaacaacagtaacaagttctcagaagttgatggttcatcgtcctcaggttggaattccagcccaccaaagcaggccaaatgttcgactgtatccattaacggaagaggaggacgcttcatggttctcgtggatagt

SEQ ID NO: 38463 - DNA, 3625 bp, Arabidopsis thaliana landsberg
  unsure (1)..(3625): unsure at all n locations
tgtccattatccatttaaagcattccaataactaaaaaaataagagtattctcgtgacccacactcatatggaccctacataatgacgtggatgagtcctacgtgttacacaacgaaacgttcatgtcctccctggctttcaacccaaactcatacattacaccctctctctctcttctcttcaatttccgtcttctcactctctaatcttttcgcctttagttgaatctctgggatcattctacctttttgtggatttaggatcgaagaagagatcactcctactgttgaattttggttttacttgagagagtttttcaattctgatctgctgttttgcgatggcgatcaaagaggagacggaggagagttgcggaagcagagccgtggtagcttcaataacgaaagaaagccctagacagcaccgtatgaaactggaggtgtacggtgaggttcttcaacgaatccaggaatccaattacgaagaagctaatttccctggttttgatgatctcctctggcttcacttcaatcgtcttcctgctcggtaatctttttggatcctatgataataaatgttttcaaatttgacttcctgctgaaatggatttttgtgtatagatatgctttggatgtaaatgttgagagagcagaagatgtacttactcatcagagattgttgaaattggctgaagatcatgctactagacctgttttcgaagttcgttgtgtgcaggtgtgatcatttaaccatcttccccactttttaatattgcatagcatgcttcttcagacttgcacttttcttacaggtttctcccacattgaatggaaattctggtgacgttgatccttcggatcctgcggtcaatgaagatgctcaaagctcctataactcgaggtctcttgcacctccaacttttggttcttctccgaatttagaagctcttactcaagcttacaaagatcatgctcaagacgatgatagtgctgtcaatgcacagttgcctaattcccggtgagatatatacttttgacacttaacttacttgagtcttcttgtctgcatatacttgaagaggcgttctttgtagcatggtatcgtctgttttgcaggattatttgatttaattttacaaccatgtgtggtgatattatcctttgttgtctatcttatagaccgatgcacgaaatcaccttttctacaatcgacaggccgaaactccttagtcaggttggtgatgttgcttcttccatttctttttatgtcagctctgatattggaaacatgtgactttgtgttcttttacaattgctttttctcttcgtttgagtagagtgatgtataggattccctctctacttttaaggatccattagatacagtcatgtagagaatgggtggttatgtttctattaagccattatctgactgagaatcggtttgttttctttccagctaacttccatgcttggtgaacttggattgaatattcaagaggctcatgctttctctaccgccgatggtttctctctcgatgtatttgttgttgatggctggtcgcaggaggtatagtttcagttttctgtatggttcacaacatctttcagaaccatcatgttacttgtgactgatggattaagtaaacgactttgaaagattttgaccattgagtaaatgacttttgacttatgtaataagtaaatgacttcgaaagatattgaccattgatgacctttctgcccctgccatctaaactggttgcaactttatacacttttgaaatacaggaaacagaaggtttaaaagatgcattgaagaaggagataagaaagtttaaggtatcttttgttagtctattgtcatgagcattccttatcttcatgagattccttatattagactccatgccacattcataatttaaattccgaaagtgcaagtaatggtttagaattagctcactccgaaactgaatgcaccactgtactgatgttttttttgctatgttttgaatcaattttgatagtcgtcatgtctccatattccacactggctgctctgcaggatcaaccttgttcaaaacagaaatctatcactttctnnnnnnnnnnnnnnnnnnnnnnnnagctgctacctgcgtgtgttgaaatacctacggatggaactgatgagtgggaaattgacatgaagcagctcaaaattgaaaaaaaggtggcatgtggatcatacggggaactgtgagttttcatattgaaaaatcttgtttttaatactatatgaggaaattaacagctatatattcttaatggctatgcagatttagaggaacctattgtagtcaggaagtagctatcaaaattctaaagcctgagcgtgttaatgcggaaatgctacgagagttttctcangaagtatatataatgaggtgtgctgcaatttgattctaattgcaactcgtactcttataggatatgtattctaataaatctccaaaaattccatttcgtggtgtatacgtagaaacatgcatgagtatacctcattttctaacaaccagtgtccattgaacaaagttaatattcagaaacctccactactgatacttccctatttgtaggaaagatcggcataaaaatgttgtccagttcattggtgcatgtacacgatcaccaaacctctgcattgtgacaggtaagttgtcagtagattatgaataggagactggttccatctagatcgtttttttttgttggttttgtatcttcaagcgtggtgagaaagttgtttcagcaggacattgaggttctatagagtattgtttagtaaataccgtaacatttcatttcctagttttggcctttacatgtattcatggtcggatgattttatccttttgtatcagagttcatgactcgggggagcatttatgatttccttcacaaacacaaaggggtttttaaaattcaatctttgctcaaagtggcactcgacgtctcgaaaggaatgaattatctgcatcaaaacaatattattcatagagaccttaagactgctaatcttcttatggacgaacatgaagtaagtctcaatctttggccactgatcatgtagtcttttcagcttgtaaacctttaaagttctacaaaaaacttaatttcctctttccgtctccacaaaactcttttaatcttcttagaacagaggtacatgtctttaatttctacataattttggacaggttgtcaaagttgccgattttggtgttgccagagtgcagactgagtcaggggttatgacagcggaaacagggacataccgatggatggctccagaggtattacttttttgtctggggctttgtcttgactttccatgcttttgacactagactctgtgaacccaggtcattgagcacaaaccttacaatcacaaggcagatgtgttcagttatgcgatagtgctatgggaacttcttactggtgacgtaagaatctatctacttacaattctctgtgtgaatctttgatgctagtaagagagatactgatgtatcatgcataaatgaaatgaaaacagatcccatatgctttcttgactccactacaagcaactgttggcgtg

SEQ ID NO: 38464 - DNA, 4886 bp, Arabidopsis thaliana landsberg
ttatagataccaggaagtttgggagacaaatcgataacacgaacatctgtggtgttgttaagctttttaacacttattgaaaaataaagtatatatcaaccttttagagtgtaagattctgcaaaatttcaatgcatgtaataattaatatataaatacaaaagtctaagcttcttattaaattaaacgaaaacagactcttatgaaataaaacaaaaattgtttagaaaataaattaccatatatattgattttaatattggtgagttatatatgtaaaattatatgttttctattgttcttctttttagttaacaaactagaaaggcagattgtattactactactatcttgctgtataaataactttttctcttttgaatgagtgtatatcaatctatctcgtacttaaatgtttttttttttgctttcttttttttgcttcttcataaatttctcggaacttgaatcaactacattcattacagaagatggagaaacccagctgacatcccaactttaaaaaataatttatatcacaaaccaaggctacatattattgtgtcacaaggtaaagcccaaataaagatccatttcacaaagataagccctttaccgtacacagatatgtttgttgtaacagataatgatacaaactagtattagacttagactacatgttttggtcggagcacgacggcggacattgttctgggagcaaaaggggtacttcagaaagatgaagatgaacatgaataaggcagtttcgtaatttcacataaggacttcaccgttagattaatctcgaaaatttccatatctcagtgttgttgtttttttgtgtgatacagattggtaatttcgaagatatgctttatttgttcgtaaatttgtaaagggatcagtagctttttaaaataaacgtcccttgggcctcttaaaaatgggttgtaactatttatcttatataaaaacccattatgagatgaaattcctgaatagtccactccaaaaacccaatacaatttttacatttttagctattcgtttgattgataatttcaggaatgatgtaaatcttcttgtcgtgaatagtatagtgacggcttcctttttatttggaacttccaaaaaaaaaaatgtaatatttttagaatagcctttgactcaactttaacaaagaaaaacatgtttaaattgatgttcatgcactttgtttcggcagcccattttgggtttggcttacctaattctgaatttatcagctcggtcaaggaagtgggtgtgcatgcattgtttcccaaaatatactaatgaaattgaatgttattcaatcaaaataaggttcgaattaatgtttgtctgatttggggacgtcatgcatgcagaggataattagcactagtataatgacgtttaaagattataagtcacaattcgtattctaaggaatattcgaaaatgttgaattatgcttatctttagagggacagggaccccaaccccatgtatgctttcaaaaaatcgattccacttatacgtcaagttggatcaatttttttagctcccttttttctttagatgtcaagcttatgagcatttgatttaccgttttgtcagaaccaacggcgggtgctgtcacctatatacgtatctaaatattcaaataaattctctttaaagtttaacgcaatgttgttgccggaaaaaaaaaaaaacagaaaacgcaatcatgttgtagttgaatctatttctaatataactttaggattctttggcataacaagaagtatatgttaatactctaaatctctaatcaataaaaacatattccactaatatgtatttatagacttacactattttttttttgtcaccaatcttttataaaactatccatcaaaagataacttgattacaagagctggaataaacatcagccaaaagaaagaaattgcagaaattactgccattagagcatctacattgaacaaataaggagagtgtcttcttacacttaaaatataatatattccaaaaaatattattttaatttttggatgtctttaaaataaagacacaatatcttaaatgtctaagaatagacatttttgagaggatatgatatctccaatttaaagatccttcatatttgaatattaatattttgtaaatttaatgttttaatattattaaagatatcctctttctattgtgcaatgaagttgctcttaaggtcaaacaataaacataagaacaggagaataaaagaacaatcctaacactcaaaaccataaaagatatcgagtgaaacgatgtcattggaaacaaagaacactaagcgtgatctattgtacgggattgacgctccaactaggacaacaattccaatcaaagatttggctaatgctaagccaactaagacacaagagaaagatctctccgaagaacatcctctcaacaaaatgggaagggataaaggtgaacatcttctcaacaacttgggaagggataacgatgaaggagggctctcacttcgagtaggaggaatgtacatctccttgtcttggtaggatggaaaaggagactgaggaagcacgatgtcttgatgcaggagatgaggtgaaagaagcgacaaagagaaattagaaaaattagggcaaaccaaataaaaactcacagaggcctaattgtcaattgagcccataaagaaaattaggctagaactgccccaacagaaaaggttgttgttgggccaagccaaaaccaagaacaacctttgcatcctgtaacccagaatttgacctagctcatacacacgagcaacttcacggcggctggcggaggagagaggagcagaggagtccgaaaacgctaacagcaaactctgaaacatcggaaattcggatgaaacgaggatggagagagaaaaggcgggaggatctggtaaatatttgaggataggggcggaagagatgtgaatagatcttcagtgaagaaccggaacaaacttcaaaccaaccacgaccagagagacagcaagagaagacgtcattggaatcagctcttcggaaccacccaaaggcgagacttacgacatcaaactctgtcaaaagaggatccgtgaggaggccggaaaagcgcaaagcgacggtaaccggtagcagaaaacataagagaaaggtaaggaagcaaatagcagaaccaaaagtccgacgccggcgagccacaactttatcggcgtcggaaaagaaatgcgaaatacaagtctcgattatcacgtctgaaagagaaagctttacacgttttggagtgacttacactgcttattaagtagctaattagagaataatttaagattaaaacaagaatagaattagctaagggaataagatagaaacattttttaagttaaattttatcaaccaacccaaaaagaacatttacaagagatctagtttgagttttgctttaacttatgacaacaaaatgaaaaaattcaaaatagcagaggaaaaacttaaatacacttatagggtcgatggctgagccaaagcaaaagacatgcttcatatataacgattgaaacttcttctttttttccggtgttatcttaaaatttcgcatttcttgatttactatttgtatgtattttgtcagagatatatatatatatatatatatatatatatatatatatatatgtgtcttattaattaatagaacaatcaagttgtgtagtaggagtagatatcccataccaaggaaggaggatcaccactttgtcccatttgctagacaatttccattatgttcaactaggttattttaaaactatgtataccatagagtttcaacctttttaggtcctgttcgtttctccatttgagagatccatccaactgatccattcaacatgtccatctagatgattcattcgactcttgttcgttttatttttagtcggttcatttgactggaccatccgaatgagatgttgttcgtttacttatctctatctccatccaaatgatttgcaataatacaaatacctaaaatatccatgctttcatctaattcttaatctaaaatatatttaaaagtaaataaatttcaaataatagttttttacatttataaatttattttacggttttggcgggaaacgtgattttatgatttgacgggaaaactcgattttacagttttggcggaaaacaaaattttacgtttttggcgggaaaacgtgatttttgcggttttggcgggaaaacatgattttatggttttggcgggaaaacgtgattttacggttttggcgggaaaacgtgattttacggttttggcgggaaaacgtgatttttgcggttttggcggaaaacacgattttacggttttggcggaaaaacgtgattttttctgttttggcaggaaaacacgattttactgttttggcgggaaaacgtgattttacgattttggcgaaaaacgtggttttggcgggaaaacgtgattttacggttttggcggaaaaacggaattttacggtttctgcaggaaaaaatgattttgctgttttggcgggaaaacgtaattttacggttttggctgaaaaacggaattttacgagtttagcgaaaaaaatgattttgcggttttagcggaaaatttaattttttatttttaaaaaaataattgtaaaatatgatttaagtctatttgttttttatctaaaaaatacatctaaataatcaattgaaataattagggtatttttgtcatttgttattttagattgaatcatctccgtccaaatgatccaatttagttcagccaaatgagtttcaaaatttagcctaaattttcaggggatcctctagagtcga

SEQ ID NO: 38465 - DNA, 3584 bp, Arabidopsis thaliana landsberg
ctcaggttttgtcttactattgtaacatattcttctccaattctctgccattcgagacactgaatcatttttccaagagccaagctcactacccgatgagctaggccatacccggtacaggctcgtagtcccatcccaaacgacaacaacttttgatttagcttttcatttttgaacctctctggcttgaacatttctgggtcttcccatatagacgggtctctatgcatggaccatacgttcaccaataacatcgacccacgtggaacgtcgtatcctgccaatatgcaatcatctgacgtcatgtgtggaatatttgttggagctacagggtaaagacgtaaggtctccaacacaatccattggagataaggcagatttttagtatccgcttcatctattaaccggtcaaaaccgacttcggtatcgatttcggtcctcgctttctctaatacttctggatggttcaacaaattaagcatcgcccattctaaagtccctgctaatgtttcagtcccggcaagtatcataacctgtaaacttaaaatcaataataagctatcataaagtttgattagtgttgttacatatagtatatgaattcctcaaacttacaattatgattcctttaagagtgacatctgtatagtaatcaggctgagtttcttggagagaaagcaagtgatccatcatagtgttacccttttctttatgcacacgtctctcatccaccagactctgcaaaaactcatcgacccgactcgccaactccttgacccctttctcaaaatctgtgatccaacgcaaaatcggtatataatcggctgcattcccagcgccagccctgtacacaatctcgtcaatcagttgtgtcactcgccgcgcaacttcatcttgttctgtcccctctccataaaatcgtttcccagccaccattcgaagaatgttgttgatagtcaaatcataaaacaattgtctcatctcaacctttgcaaaaccctgattttaattataatcacataaacaaatgattaatcctcaaactttcaaaatcatacttcacaatcttcatttggtatagaatatttttggcgtctacaatctacattttgcacatgcacatggccaagtataaacctatataatgaaacagtgacggcactatcacaaatcaataggttataatattttctggctaagtaaaatgttttgatatgtagaagaagctcacatacatgttgcgagttttttgagaggcgcaataacaagtgtcggatctcatctttacggacagataaaaagccgttgagcttgtgtgacgaaaagatctccagggtagcaatgcggcgcaagtttcgccagtggtcaccataaggcgcactagtcatagtggtggcgttgctcaatatgttcgcctagatcttaactctggcctattggcgaaaacaatgtcgttttttgtaaaacattcttcagcgatggagtatgaagagactacaaccgtgagacggtttccgaggcggaggcagaaaattggggcgccacctaaggattgagagaaagagaggaatgtgcggtgaagcgggagtttcaggaggtgaaggtgtccaatcaacggcaggggcctagccggacttggtggtaggttaaacttgctaagccgtttaccaaacaaaagtttaacagaaatgaaaaggaagaaggcgagagataaaagtaggaaataggtttccatatttagatctaagaatttgtaaatgtgttgaattgaaacatgcatggggggttagaagttatagcttagtttataacgtaagcgcgagagttcaaattttggtattgtcatggagtttatcccacccgtcactaaagatatattcacgtcccatgcaattaaacacgtgtaatatatatcaaacattattaataaattcagattggccagcacaaatagcatagagctattcaagatctttgagttcaagaattcagctaagttaggaaaataggcaacacaaaaaaaatgagaggtcaaaatgtgcggggtaaaataatgattaaataaatacatcgtagttaactacaaatttattgtatcatcattattcagaatccgaaacttgtttcgtaacaaaaaacatgtattatattttattattttattgaagcagagatttttagtatcagagttagctttacccgtaaattgattgaaaaacaacaaagtgcattccttaattgcatatgttatcaatttaaatgtgatctcttttttatttttattatttgtgtgagatatgtataaataatactaataaaaaatctgttaatattctagtaaatgttagacaatgaatgaaatagattacaaatctctacgaacacaacatgtcagcatgacattttcattaataacatataagagtaagtttttattaagaatgtttctcaattaatatataaaggataatatatatatataaggaataataataatcacatgacaaaatctcttaaaattttaacacaatgtttttttattaaatatcattagaaaattgtactcaatatacactctttttaactaatttgaaacaagttcacacttctgtattatataaaattttagttaataagataactttgcagctggctgttgacataattatgctagaaattggtaagaacatgatttcttgccacaacaattttacaagaatatagaaaatcataattttaaatctgttgaccattatatattgggttagcaaatcataatgatatattacaaaaatctcacttaatattgttgaagaacaattgttatatataccactaagattaaaactcataatttttatacgaaattcaagtctaatacctctaaattactattaaaaagaattattactactaaaagtctatacaaaaaaaatgggaagtaatgagggtcaagaaacacatgtcctaatggtagcattagcattccaaggtcatctcaatccaatgctcaaattcgcaaaacatctcgcacgaaccaatctacacttcactctcgccaccactgagcaagcccgtgacctcctctcttccaccgctgacgaacctcatagaccggtggacctcgctttcttctcagacggtctacctaaagacgatccaagagatcccgacactctcgcaaagtcattgaaaaaagatggagccaagaacttgtcaaaaatcatcgaagaaaagagatttgattgcatcatctctgtgccttttactccctgggttccagctgttgcagctgcacataacattccttgtgcaatcctctggatccaagcttgtggagctttttccgtttattaccgttattacatgaagacaaatcctttccccgaccttgaagatctgaatcaaacagtggagttaccagctttaccattgttggaagtcgagatctccgtcattgatgttacttctcaaggagctaatgtcaatacctaatggcggaatttcagattgtttgaaagatgtgaaatgggttttggttactcgttttacgactcgaacagagatcacgagtctagctgatt

SEQ ID NO: 38466 - DNA, 6236 bp, Arabidopsis thaliana landsberg
  unsure (1)..(6236): unsure at all n locations
tcaccattccaactcgcctttactatccttccaaagagaatcccaagaccatcctcctccacccgttgaaatcgctaaaacccacttttgaaactctctctttcatcatctcatttttgcaattctctatctctcacaaagctttgaaccttctctccaaacgctccctatcactccttaaaaatcctttccccttcaccaatactccaccaaagtcactcgatcactccaaagtctatcctcaagcattcaatcggtttcaagctcgaaatttcatcaccaaagaaaccgattcccttccactttgatacctcttggagagttttcttgtttgaactgttgaagctcaccaccaatctctatggattccagaacaaagagttcatctcgagctagaagatcctccattgataacgaagaggttgaggcgtttgacatgagtggcatgactgaacgccaaattcgccaagctcgccgtgcccaaagatcaagattgattcaaggtggaagctcaagccgctcagccatgcaaagagaagaagtagctcggggaaagagggtcgttgaagctgaagaagaacaccatgaagaggcaccctttgaagaagcggtttccgaggaagaggttgagatcatcggggatgatacaccagcccctgttgggagacgaaactggctaaagaggaagggagagccaaccccaaacgagtactatcaatatttgaaggagttgaagtttgagggaactaaataccctcataagtaaacgatgcaagagcttggtatttgtggtgatgtggaatacttgatggaattggtcaatcttgcaacattcatgagctgccaatgtgggggatataaagaggagagctgccaactccttgcaaccctcaaggttcgcttatgtgttgatgattcggagaaagaagagagaggaggtcttggttacataaatttaaaggttagggatgtcgagtatactctttatattcgccatcttgataccattttcgggtttccaagtgaagaagttatccgccaagactatgatcaagatgagctaaagttcctttggaaaataatcgccggtcngaagccctactcgccagccaagagcaagagttcttcaattcgaaatcccgtgattagatacgtccaacaatgcatcgccaacaccctctttgcaaagaaagccaccagatttgttggtgaagaggagctatgcatgatagaccaatctttggtcttcattctaagagagacaacagatgggaggaagatggcaggtgatagagcagacacttcgctgagtgttgttcttttggatcacctattaagctacagagagtatgctgcaactatccatcgctcgggaattcgcggaagcctttgtgttggtggtctcttaacgccaatactgggagctgtggggatggaatttggaacctctgacatgttccccaagttcattgacctcgactatctcaaggggaaagattttcttgagaaaacaactttggcggatcgctatctcttcaagttcaaccatccgaagctttgaccttctcttctacccctaccatgcgagaaccggaatttggtgaagacaaggcgcaacatcaatttcatgtcatctccctccgccttgaacatcgacattggaggagctcgggaagatgaaccagaatatagtccagccgactatgagcaacatgagtactttaatcaagctgattatgaggagcaaatcgagtttgagcaacatgttgatcaatcggagcatgggggcagcgaacaagagcaagctcattatgaagaaggtgccaaccaaggagaagatgagtttgctgaagttcacaagaagctcggtgtacttgaagagcttgggaaccttcacagtaagacaatgaagggtttcaagaagaagatgagaacaatgaagaagtcgctcaagagtatggctgctcaactcaaggacttccagagcaagccaaggccaccatctccaaccgccgaagtaagaaggagcggttcaacgagctcagctgcaaggagagctgaaaggatcgtcaagcccgagcttcatcttttgagcctcgggaagtgatctccgagttgagagagccaaggagcaggcagagacgagcttccacacgctcgatcggacagaacgagcaacaccctcccgcctcaacttcagcccctgcctatacccaagagagtatggatgactatgtctccatctacttcacctgaaaactgaggtaacaccacctctccattgtatataccatagcatctttttatttttctttgtgtgttttgtgttttgtgctttggtcttgaatgctctttcagatttttattacacaagggactgtgtaatttaagattggggagggttcaagacatgtttaacattgtgttctcttttcttatttcaaattttgcatcatctaaggcataaaaaaaaccataaaaatttgaaaacatttcagaaaaagattttacaaaaacagagtgtcgtgtagattgcatttcattttaggattgtatatagagtgtttgcatttaggattgctcatttgcataggagataatgatgatttcaaaccgataagcatgttttgattcaatgaagtaagttcgatgcccagtttgttagttctctattgcataaccgattgtttctctgaagtaagaccgcaccgcaccctgctttgaatttacaacttgactatactcctttaattcgaaactcgctcatctgatgacattccctatctattagaacctgaactaaattggcaattatcatgtccatgcattgtttccagacactgggtgtgggatagagacgcatatctcaggaactagtggatcaagcattccatcgaacaccttctgggtgcgggaaagcttgggatcgaattctagttgatcagaaagaaataagcagtaaacgcaactagtcctaaagggattcaatcaattctaaagcttaaccattctacagactacggattccataactactctatcccatccctaagaattctaagtcactactcagacaacatgctcaaagacataaacacagataaacgataatattgcataagtaaagagataaagagtagagaaacaagatgacagatgaaatcaaatgcagaatctgaataacttggaaaaatctcgaattacaggttgcagaagcaaaagcggcgcagaagagtaaaacagaaaataaaactgaagcaaaaactcaatattgactagatgtcccaagacagaaccctaagacatctatttatacaaaacgaaataaaataatagtagacggaccaataacctaatcgcccggcccatagaatgataatgggccgagatgggcttcgtgatccgatgaagctctggaccgcttccaaacacttcttcttctcctcttctcttccttgtgctcagcctgtctggttgagtgcgtttttgagtagactctaaagatgtggtcaagtgcttggtcgagtactggtgttggtggtgagtgatgatactcgacccgggggtcgagtaatgtggtagagcgaatggccgagtggtatgacgaagtgaaactcgaccagggggtcgagtgatgtcatcgagtggcctgagctgcggttactcgaccacggggtcgagtagatgggaagaatagctccaatgtcactcgatcagggggtcgagtatggtgctggatgtactcgtcctgggtggtcgattatgtcttctggttcaggctcgcttcttccaatttgctcgctaacaaccccaaatcacctgaaaacaactcagaaattcaatatctatgcaaagctatcctaatcatgcatagcatgcgttatgatgagaaatgatataaaacagtgatgaatgatatgcacctagactcaaaccgatgatgaatgaacacagaaaacatgcaaattatagacatatcaagctcttccagcagctccatagaatctagttgaagaggttccacgggtccaaccagctcctgtggtcatccctcctataggtacgagctttcatttttgatttgatgctcggttnnnnnnnnnnnnnnnnnnnnnnnnnnnnnntgaacggttatgtttgttcagctcctcccgattctagctctacttcagaccttccagagattctagagatttgtgaattctagcctaacagaatgcatgtgtagacggcatgttgcttaaggcagatggttgcttaaacccagcttggctatgtttcatcacccagagttgagattaggaagtggtagagttataggggtctctgtcacaagagtggattgacccgggttttgtagctatcatctagggtatctgccattcacctgttagccacctgatgaaccttgtagttgcctttatcaatgaatatatccttaggacttctattcttcttagatttatttgtattcaccccttgtttgtcttttatttaccttttatttgtatcccctgttgattgcatttaggtttcttaattttgtcacctgttggttctactcgacccaatgatcgagtagggcttttaaaagttctttttttgttgtttgaatcctcacctaggattgttactagaaacccaccatcactataatctggcttgacttagtagcttctgtacacatcttgattgctagcaatacagtggactggattgacaccccctatacatgcatcgacatgtttatgttttaggagcattgaactgaatctcacacacattcaacataagcagacctgaaaaacctgcttatcaatttggcgtcgttgccaattcattgttgcattgttacatgaagatatcaaaaacttttaagatcaagttcttttacatttatcaagttactaactcatattttcgtctgcttgtttttgtggtataggtactaatctttgtgcatgcaaactcgatccgaaggttttgcacacctattaccattcagagacagaattgacaaaatagctcgtgagttatcagaaaccaaagcaaaggcagcctgtgatcagaacagaccagctgctatggatcaacagaacagaccagtttatgttcaagacccacctaatgttgatcaaccaagaaacattggtgctggtgatgccccaaggaatcatcaccaaagataagggatagtgcctccaccagttcagaacaacaactttgagatcaagagtggtctcatctccatgatccaaggaaacaagtttcatggtttacctatggaagatcccctggaccatcttgacagctttgatagactctgtggccttaccaagatcaatggtgtcactgaagatatgtttaagctcaagctatttcccttctctttgggagacaaggcacaccagactccgcccacctgaggggacgattgtaaaaaagcttttcttaaaaaagcttttcttgtcaagttcttctctaacgctcgcaccgctagattgaggaacgagatctcaggtttcaaccaaaaaaacaatgaaactttctgtgaagcttgggagaggtttaaaagctacacccctcggtgcccccatcacggattcaagaaggcttcattattgagcacactttacagaggagctttaccaaagatcagaatgctacttgacaccgtctccaatggaaacttcctgaacaaggatgtagcataaggctgggagttggtcgaaaatctagcacaatctgatgggtgttacaatgaagactatgatcgctcaatgagaggaactggaggaaatgaggataaacagagcaaggatatcaaggctctgaatgaaaacttaaacaagttgttgctggctcagcagaagcagatacactacatcactgatgaagagcacttccaaatgcaagaaggggggaatgatcaaactgaagagttgtgctacattcagaaccaaggagggtttaacaagggctacaacaactacaagcccaacccaaacctctcctccagaagcactaatgtagctaacccccaagatcaagtgtatccaccccaacagaatccgtccaagccttttattcagtacaaccaaggttatgtccctaaacaacagtttaatggaggctaccaatagcagaattcatcaccagggttcactcaacaaccacaacaagccccagcagcccaagatcctgacaccaaacgaatgcttcaacaaatcatccag

SEQ ID NO: 38467 - DNA, 6608 bp, Arabidopsis thaliana landsberg
  unsure (1)..(6608): unsure at all n locations
cccacttaaattggaccagatacaacgctaacaagtaacaacaataactaacccgattcgaaagctatgattgaccaaattagcaaatatggaacttaacgttcatctggttatctaaagtgagccggtttatatatatttctccaattgcgctaaaccgaaccaagaataaaaccaaacgaagccacaactcaatttggtgcatttgcaattgaactctagggtttacggttaagataaatagaaagtgttgtggtgaaggattagtttaatctctttgcttgctccaagagaatatacagagaaaaagatttgacaacatttgcggcaatggcggcgagtctaccagacggtgtttccgatgactttgactacgaacattggtctccaatcgcggaaacgagactggtggagaatggtgtttgggatgttgttcaaaacggagtctcaccaaatccaacgacggatccagaggtagcggcgactattaaggtcgaagatcttacccaatggagaaatcgtatgattgaagacaacaaagcgctcaagataatgcaatctgctctcccagattcggttttcaggaagactatctcggttgcttnnnnnnnnnnnnnnnnnnnnnnnnnnnnnnaaggtaacgataccaaagaagctaaaaagctacgtagattagagaaacaattcgaaaaccttatgatgtacgaaggagaacgaatgaaattgtacttgaagagacttgagaaaatcattgaagagttatttgttttgggaaatccaatatcggatgataaggttatcgcgaagctgttgacttcgctgccacggccatatgatgattctattcctgtgttgaaggaattcatgactttgcctgatctgactcatcgtgatcttcttaaggcttttgaaatgtttggatcaaaacctaaaactatgcctcaggagttgatgaagttcattaacattcttagaaaagcccactctgatcggttgccgtgtcccgggtactataagaacaatcccatcaaagatgctaagcttcttagattagagaaacaattcgagaagcttatgatgtatgacggagaatctatggattcttacttggtgcgagttttggataccattgaacagttccgcgcttcgggaaatccgttatccgatgatgatgttatcgctaagctgttaacttcgctgtcatggccatatgatgatgctattcctgtgttggaggaactcatgaatttgcctgatatgactcctcatgatcttattggtgttttggagatgtttggatcacatcctgaaattatgcctcaggggttgaaggatttcgtcaaaagtcttagaaaagccaaggctgagcagttgtggtgtggtgtgtgcaagatgtacaatcactaccaagaagactgttattacaaccctagggtagtgaacttaggtggtggagaaagagggcattgtgctagagactgctgtaacacaaggaatttgcaacccggggcgacactacaagctcagaagagagaagtgaacgatgatttcacttatgatgaggatatgtggatgctatacaccaccactgagaatcacatgactccatatgagaagtttttcacatctttggatagaacatacagagctggggttcaattagcgggcgtgaatgttgtcatggtagaagggataggagatgtcaagttcacgatgaagggagtgaagatgacaatcaaggatgtgcttttcgttcctcggatcaacaaaaacgttttgagttttagtcggatgaaaaaaagaggctattcattggaaatggaaggaggtgaatgcactattagggatgagaagggcaacatatttgttcaaaccttgcgggaaaagagaggcattgctctgcgtttgcaggtgactgaaaggtatttgctttgaataaatttatttggtagtagtagtatcaagtcttttatgtcgtttcaatttggatttattcgcctaagtaaagctaattcgtatactgctactgcaatatgaattagtttggtcttttattggttttttggaaactcttttgtattcactatgtattgcttttgttaagttttgctaatggtgaaaggagacgattctagttaacaacttaacaatgaaagggcttttttattaaattgatcaatatatgattacaatccaaacttaattgagaaaatttaccgaaatagaaaggagaataaattctgctttaaatcttagattagctataatcacacaagtgacaagtccaaatcatggttagagagaagcttgcgtgcggtgtacggacgtacggttaatcacttaaccggaccaacccactagaattgaaccagatacaacattcgttaacaaaaataacttaagcgactcaaaaactccgtatgatcaaccaaattcacaaacgtatttgaaatatgtatgaatttaacattcatttggaagtgatgcgattcattggtttatagtttatacatatttctccaattgtgttaaaccgaaccaagaaataaaagcgaaaccgagccactactcaactaggtgattttgcaattgaactttagggtttatgattaagcgcactatataaataaaatgttctggagactggagagggattagtttagtcactttgcttgatccaagagaatatacagagaaaaaagcttgacgacagttgaggctatggcggcgaatctccaagacggtgtttctgatgactttgactacgagcattggtctccaatcgcgaaaaagagactcgtggaaaatggagtttgggatgttgttcaaaatggagtctcgccaaatccaacgaagattccacagttagcggcgactatccaagccgtagatctagaacaatggagaaatcgtgtgattaaagacaacaaagcgcttaagataatgcaatcttctctcccagattcggttttcaggaagactatctcgattgcttcagccannnnnnnnnnnnnnnnnnnnnnnnaaggtaacgataccaaagaagctaagctacgtagattagagaaacaatttgagaagcttatgatgtacgaaggagaaccaatggatttgtacttgaagagagttgaggaaatcactgaacggttcgaagttttgggaaatccgatatcggatgataaggttatcaccaagctgttaacttcgttgtcatggccatatgatgattctattcctgtgttgaaggaattcatgactttgcctgatctgactcttcgcgatcttcttaaggcttttgaattgtttggatcacatcctgaaactatgcctcaggagttgatgaagttcattaacattcttagaaaagctcactctgagcggatgccgtgtggtatctgcgtgaagaacaatcacaaccaagaagaagacttgtattacaaccataggcctagggtagtgaatttaagtggagccaatcaatttagaggacaagggcattatgcaagagattgcagcaacactagaaatctgcaacaagctgagaagaggatccaaaaacctgagcatctgatgttaggggtaactgttggtggtatcacatttgatgagggcatgtggatggtacacaccactacaacggatcacatgactccatatgagaagtttttcacgactttagaccgatcatacagagctagggttggactggcggacgggaaagttgtcatggcagaagggaaaggagatgtcatgattatgacgagggaagggaagaagaggatcaagaatgtgctttttgttcccgggatcaacaaaaacgctttgagtgttgctcagatgacagaccaaggctgttcagtaacatttggaggaggcaaatgcattatgaagaatcacactgggaaagtatttggagaagccatgttggaagagacaggttatgttattcgtttgcaggtgattaaagaagttatctggcactaggcttaactcgtatggtggacgtattagtttggtattcttctgttttaagtttctttgcctaagaataagaaagctactgctgctgcagtatggattagtgtggtctttttttaacctaggacggtttggaatcaatctagtttttgggaaactgttttgtatccacaatgcaatgcttttgtcaagttttgctaatggtgaaagaagacgattcttgtagaaagataaaagggcttttggtaaattgatgatcaaatatacgattacagaccaaacttaattgagaaaatttaccgaaattgaaagagagagatagacatgcagaaggtgggttgttgaatcagtagcggcagatcttggccgtaggcattgtgacacaaacttgtgcgtatttcttcttggccgcctctgtccctcgcttgggctcttcttcttcagccatggctaccttagccaaagaacaaaccgctgcagctgcagccgtgaacatgaggtccctcctcattgtggtgctgctctgttccttgacttctaagctgggtgtgttgtcgctcgtggaggctctgactacggagagccttcgtccgccggtggctgagggaaccttggcgacggccgggaagaaggtagcggtcatggtcatcgatgccattgcttgatagttgattctactcgctagttggctctcggttaatggtttgtgaggtgatgggaatgtgtttaagaagttgggtaatttgagtttgtggaattgtggagaaatgatatccatttccttatccaaatatgattttcgtgcaaatgggttgtggccacgtgtcatgttctatcttttgttaagaaaaaaaaccatgagaggttctcgcaccaaaataaaaaagtgtacagtgtagatacttttgttgtggagtcccacatgtaggtcccatcttggatttaatttaatgaaacagaataatgattcgaaattacaacactggttaaaccccaacccttggtctaagtctaacgccgttagtcgttcttctctgttctctccatcaaattcgtcagaaaccaaagaagattcatcaattctcctctaacaccaatcctgcttgctttcactttccttctccgatttcgttctcacgccttcgcattcctttttttaatttcgtttcgaaacgcgtttcaaggttacgtcgatctcaaagtaacatcgccttcggagagaaattgataaaccttgctccaattccattgttattcatggctcttagaaactttacctagattactcggattcaatcgtcaagtttatattggatcgttgtgtcgtaggaaccctaatttcgagggcctgtgcactcactcactcactcaatttgcacaacaccctcagagaccaacaagagcaacatgaacgctccgatcataggtaagctctattttgcacttgggcttcctttcccattgttcggttcttcatcgatggtatttgtttacctttttcctgtgtagatccattgcaaggagattttcctgaggtgattgaagaatnnnnnnnnnnnnnnnnnattaaatgcgttgcctttaatcaccgtggttctcttctcgctggtaataattttcttcccaatttagcttttgctgtttcgttatctatgaatttggttaaagtttggatttttatagtacttacattgatggtgatatcttgcattgtttatttgttagcgggatgtgccgatggtggctgtgtaatctgggatttcgaaacaagaggcattgcaaaggagattcgtgatagtgattgttctgctgctataacaagtgtctcctggtccaaatatgggcaccgcctgcttgtctcagctgcagataagtcattaactctttgggatgtctcaaccggagagaagattgctcgtacgattcttcagcagactccgttgcaggctcgtttaaaccctggcttaagttctccttctctctgtctggcgtgcccgctctcatccgctccgatgatagttgactttgatattgattgtactactttgcttccagtctctgtgcctgagatgcctgatgtattagctcctccgcaacgcagtaaatgtcctgaatcaaatcctcctttctctccagctgcagcatgctttaacaagtgtggggatcttgtttatataggtaattccaaaggggagatacttatagttgattataaaagtgttcgagttcttgctttggtttctgcgtctggtgcggcacctgtgaaaaacatagtgtttagcaggaatgggcagtatcttctcacaaattcacatgatcgaaccattaggatatatgaaaatcttctcccagcaaaaaatgtgcttaaatcccttgaggacctggggaagaacatagatgggcttgatggtattgagaaaatgaagacagttggatcaaaatgcttaacactcttcagggaattccaagattcagttacaaaaatgcattggaaagcgccttgtttcagtggtgatggtgagtgggtagttgggggttctgcgtgcaaaggggaacataagatctacatatgggaccgagctgggcatcttgtgaaaatattagaaggtccaaagaagcgttgattgact

SEQ ID NO: 38468 - DNA, 2230 bp, Arabidopsis thaliana landsberg
gcaaatattgaaatctcaaatacatgatcctcttgcttttttctttttcttgcagcgtcgtatgaagagcgagctgcgaaactgaaaccaaggaaagaagaaactttggcatgtgtagtgtaagggggcaatctcggcgaccatcaaaagaatagagaggctttgagtctgttgtttgtagcagttgattgtttgcattgattacatatacagtaataatatactaatatatggttttaatatttctctaagaaattaaatttttgttagagctggtctctctaacttatattgtatgaaacaaatttttttttttgcttttaaacttgagtgttgtaggatatactctataatttttgattataaaaataaccaaaattttatgtgagtttttcattttggaataattaaaataagaatttgtgtatatcgtttgaataagttaatgcatctagagtctttgtaatttattgcggaaagagcttttctaaattgtaaatccaaaactaaaaacaaattaatatctaaaacactaattagataaaattatctcagcttcatatttgtctagaaatttaacaattaaatcaaatctctttatagattaattaatatttatttatgctataaaatacttcctatgttccgtattgattgactttttttagcaaaatacatatattaaaaattgattataaatgtatttacaattttttataattctaaactaatgatattcaattttcttttttgaagtttacaattcatcaataataactaataaatattacatacaaaacctaaaaactctatcgttgtgaaacaaatttctagaaaatcaatttttttttccgacaaaagcaattttattgattaatcagagatattacaaagatgttaattgagccacaggaaaagtaccaaaatcagagtaaaaaaaaaataactacaaccaaattttgccaaatcatgcgctaatgtatcccctctctcctaatgtaactaaacttaatgcttgaaaactttgcagcccaaaaatgtatatccatgagtagatttcttaaggagctctgagatgtagagccattaactagagtttttttttttttttttttttccttttttttttatccattaaggataaaaaacatacaaagccctcaggcccaaccaagggtacgcagacccaacattacaaggccgaagcccaaaggaggggcacgcaggccttaacaaaagataagaactgaagaaaagcagaaaagaggaagctcagaggcccaaaagaaaaggaagacttaccctgataacaccgcacgaagaaggaccttagtgcacctgaaaaacactgaaccaacaggcttacagagaaggaccggggacttctgatgctgaagacgagagagagggtcgaggagcgcccgaacagtcaactagatgtccttaatgacctgagcagatgaacggaacgttgcggagtggatcctcgcgttgcgctccttccaagtgaagtaaatcacagcttgaaagaggatctaaagaatgaaggatatttttttatctggagaaggcgacctctcccaaagaagagaatccttgaaagaaaacggcggagagagaccagaagcagaaatgaagaatctccaaacctggctgctaaagtggcaatcaaaaaacaggtggtctctagtctcatcacaagagttgcagagaacgcaggaggagggaatgttgaggctccatcttctcagcctatcccgagtgtgaagacgattccaagcggacacccaacaaatgaaggcatgcttcgggatgtggttcttgaaccaaactgctttatgccaatcgacacggttaccaattgggtggagggcaagccaagtatctgcagaggagaaaagagacttaggagacctatgattcggtttccatagaaacctataatcctcttctctgctttatttgccacaggaggaagaatccccttaatcaaactgatgataaggttcctgctgcgactcgcagagatccaccagtcattccctctcagagcatctctaaccgcagagtctctaggcaaaccagtaatctgaggaccggtaggaccagtcaagtcaattaaagggccatgagaggtccaattatcaagccagaagttcgctgtgacacctgatccaacctcacagacaataaagggacgagctaaagtccgcaacttacataatcttcg

SEQ ID NO: 38469 - DNA, 9567 bp, Arabidopsis thaliana landsberg
aagtttaaatattataggtatttaaaaggatattatctctacaaaaaaaacccaaaccacaaattaaaaaataaaatacagaatttttataaaaaactaatatacaacaaatatcaaaatataaaacatgaattacccaagctttacatagataaaaattatgtgtcaagaatatattattcatatacaaataataattattataaaaaacatgtataacttttcaataaacatatacacccgcggtacaccgcgggtcaatatctagtagctataaaaattgtattatggttataaattgtaaaacactgttgatacggtacatgatgatggcttaaaaaatccaattgaagagtcaatttatctttaatcctaaatgattttgaaagttcaatcttttctaatcacaacagctaaagctgattaagttaaactggaaaatatgattaacggctattttgtatcaagtcatagcatgatcgagatttaatattcacgtttagttcgtacaatgttcacgtttagttcgtatcagattacgtgcgaggaagtaaagaaagtcaaagaagacgacaaactatttattatgttcaaaacctaaaacgaagaagacaaactaaagaaaatggagcatttcatcctcatctccctcctctgtttccctatcgtcatcttcttcatcttcttccccaagaattcttcttcagaatttggtttcaagtcgtatccgatcgttggaagcttacctggtcttgtgaataaccgtcaccgattcctcgactggacggtggaaactctgtctcgatgcccaacccaaacggcgatttttcggcgaccagggaagctgcagttcgtcatgacggcgaatccagctaacgtcgagtatatgctcaagacgaaattcgaaagtttccctaaaggcgaacggttcatctcgattctcgaggattttctcggccgcgggatttttaactccgacggtgagatgtggtggaaacagaggaagacggccagttatgaattcagtactaaatctctccgtgacttcgttatgagcaacgtcaccgtcgaaatcaacactaggtataataattcaatttcactttcaatttcaatttcgttactgagattttctcttttcaggcttgttccagtgttagcagaagctgcaaccaacggaaaattgatagatcttcaagacatattggagcggttcgcgttcgataacatctgtaaattagctttcaacgttgattcagcttgtctcggcgacgacggagcagccggtgtaaacttcatgcaggcctttgaaacggcggcgacgatcatctcgcaacggtttcagtctgtgatttcgtattcatggaagattaaaaagaaactcaacattggatcagagagagttctgagagaatcaatcatgatcgtccataaattcgcagacgagatcgtgcgtaacaggattgaacaaggaaaggtaagtgatcacaaggaagatttgctttctcggtttatcagcaaggaggagatgaattctccggagatacttcgtgatattgtcataagtttcatacttgcaggacgagacactacttcctctgctttgagttggttcttttggttactctctatgcatccagaggtggaagataagattctgcaagagctaaactcgattcgcgcacgaactgggaagcgaatcggggaagtttacgggtttgaacatcttaagatgatgaattatcttcacgctgctataactgaatctttaagattgtatccacctgtgccagtggacataaagagttgtgctgaggacaatgtattgcctgatgggacatttgtaggtaaaggttgggcaataacctataacatatttgcaatgggaaggatggagagtatttgggggaaagattgcgatcgttttgatcctgagaggtggattgatgaaacaaatggtggttttagaggtgagaatccttataagtttcctgcgtttcatgcgggaccaaggatgtgtttagggaaggagatggcttatattcagatgaaatcgatagtcgctgcggttttagagaggtttgtggttgaggttccagggaagaaggagcgtcctgagattctaatgtcggtgacacttagaatcagaggaggtttgaatgtgagagtacaagaaagatcttgagttacttgttgtagaagcaacctttgtttgctcttctcatatcttatagcgaccatgaccatattttactgtaaacaaacacgttttagtggattatcaaaatacattcttggtgtgaccaacaatggttgaactcccgtcgcccacgcagggtcacatcgcatttcaagtttagtttcatttgtgtgtgcattcgtgagaagtgtgagctttcttcttgactaaagctcgaacaaatcttggtctgggatcttcaaaaacataaattagtctcacttgggctctatcctcctagagcataacggagtcaagactcttggtaatcaatagctgagctatgaaaatttgcctaacctaaacagagagccataccacttggagaatcaacttgcttaacacagctattttgaactcatctctaaaatctcattcgtgtaaactcaaagagaaattaagtactacaaaaatatttaacaagtgccattttttggtaattaacacaacattgaaataaataaaaaaacgttcaaatggttggaagacggaaagaatcaaagaactaatctattttgttgtcctttcagaagaacagttttcagctcactaaatgatttttatgattctaaattttatgaatgataatgaaccgaaaaaacagttttgtctaaagacgaaatcactgattagagtgagtgattacacttgtctaatctttctcaaatcaggaatcccaccggaacggtcaaaccgattttaaccctaaattaacactttcctggctattggatagtaaacaattcactgagaaaaccaaaagcaactatctctatctccttcatcgggcgacttcgtcttcttcttcgttcgctgtcagatttttttttaccaaattaacaatttttgagtctccgttgcctctctcagttgaagcgtcttccttctctctatcggttagatcttcagctcgattatcttgttttttttttccttagattgtgaccatttcaatgcgttaaggatcacgcttcatgatcatatcactttctattttaaccctaagagtttccttcttcattttgtatatggaactttgatctgacgaaatgcagaaattctcatttcgagatagtttttttttttttaagattcgttgattttggatcctatttcctgtcattgttgattttgttagattagggttaccaatctgggataattcttcgcattaattttctttacgatattttccattttgttgctcaggtttctgattctatgttcctgtaaaattttcctttaatggcaatcgaaatcttcaattttttacgatacgattgattctatactgcagatgatttttccagttttggctcattccttgtcataaatctcgtcaaaattctttaccttgtcgtcttatttttttccattgataatgcttttctctcagaatgatggaggccaaaccaaaaaggaggattgttacagagaatggagatacaggtgaagatttagttcttgcaacattgattggaaacggtgatgatgtaggtcctctcgttaggcatgctttcgaaatggggaggcctgagcctctcgttcatcagctcaaccaatgtgcgaggaagaaggaagctgaaattgaggatctatgcaagactcactatgaagaatttattgttgcagttgatgagcttcgtggtgtgttagttgacgctgaagagcttaagagtgatcttgcaagtgacaatttccgtttgcaagaggttggtagtgccttattggttaaactggaagagcttctcgagtcttatgcagtcaagaagaatgtaaccgaagctattaaaatgtcgaagatctgcgttcaagcactggagttgtgtgttaaatgtaatagttacatatctgaaggacagttttaccatgccctgaaaaccatggatttgattgagaagagttacctgaagcttatcccacttaaagttctaaagttggttatagagagaagaattccagtgatcaagactcacattgagaaaaaagtgtgtagccaatttaatgaatggcttgttcacattaggagttcctctaaaaatattggacagactgctattggcctcaccgcttcagctcgccagagggaagaagaaatgctggaacgtcagaggagagcagaggaacagaatacaggtggtttgggagaattggcatacactttagatgttgaagactcggaacaagactctgtattgaagtttgatctgacacctctgtatcgagcttatcacatccacactattcttggagtcccagaacggttccgtgactattactatgagaataggctactacagctccaatcagatctgcagatcacttatacacagccatttgtggaatcataccaaacatttctagcccaggttgcaggatatttcattgtggaggatcgggtgattaggacagctggagatttcttgttggctgatcaagttgagacaatgtgggaaacagccatttccaaaattgtagccatattggagaaccaatttgccagaatggattcgcctactcatctgcttttggtgaaagattatgtaactctccttggcacaacccttagacagtacggttatgaagtgggtccagttcttgatgcccttgacaagagccgagataaataccacgagcttcttcttgaagagtgtcgaaagcaaattgtgactgctattacagaggacacttatcagcagatggtaatcaagaaggaagctgactatgaaaacaatgtcttgtcgtttaatcttcagacctcagacattatgccggctttcacttacattgcgcccttctcttctatggtgccagatgtttgccgcatcatcaggtcatacataaaaggatctgttgattacttgtcctatggagtgaacactaattttttcagtgttctgaggaagtacctcgacaaaatcttgattgatgtattgaacgaagttatcctcgagacgattagcaacaattcaattggtgtatctcaagctatgcagattgcagcaaacatatctttcctcgaaaaggccagtgattattttctccgacatgcagctcaactttgtggcatcccaagccgatcagttgagaggcctcaagctagtttagctgcaaaggttgtcctcaaaacatcaagagacgcagcctatcttgctttgttgaatgtggttaacaccaagttggacgagttcatgaagctcacagaaaatgttaactggactacagaggaaatgccacaagggccgcacgagtacataaacgaggttgttatatacctcgagactgttatgtcaacggcacaacagatcctcccaatggatgccttatacaaagttggagttggggctatcgaacatatctcaaactccatcgtctctacattcctcagcgatagcatcaagagattcaatgctaatgcagtctcggccattaaccacgatctgagagtgatagaaaactttgctgatgagagatatcactcaagcgggttaaatgagatctacaaagaaggaagctttagaagctatctggttgaagctaggcagttgataaacctgttgtcgagtagccaacccgagaacttcatgaacccggtgattagagagaggaactacaacactttggattacaagaaagtggctacgatctgcgagaagtttaaggattctgcagacgggatattcggaagcctggctaatagaaacacaaagctgacagccaagaagaaatcgatggacatgctcaagaagagactcaaggaatttaactgattctcaataaacactagtaggtcctgaccttcccactcacatcatcatcatcgtcatcattatcctttagctttactattcccttaatttgcttcttctggttaacctctaatcttgtttatgtctttcttcttcttttctctgtttttgttctatgatccaattcattaatcaatttcagttttgtcctaatcgacaaaattcatctttatggctcacaggctcaggattaatctttagtgtagaatgaattgataatctaagttaaagagcttctagcttttagattcaaattattgatgaaagttgcacaacaagcctggattgggaggatatttacgtattttctctatctgtgtggaccggagactccatttgtcttccaagtcaccttatccaaagtgtcaccaaaacctgaaaactttcaacctcaaaaaatccaaacttgagctttgtattccgacaaaaaaatggcgactgcgtctctagttccgacatctaaaatcttctctgtctctccgaaatcctcagcttcgattaaagcaaggagcagagtagttgttgcatcgtcgcaacaacaacaacaaccaagaaggagagagcttctgctgaaatcggcggtggcgattccggcgattctgcaattgaaggaagctccgatatcagcggcgcgtgaggtggaagttggatcgtacttacctctgtctccgtctgatccttctttcgtcctgtttaaagccaaaccttcagatactcctgctctccgcgcaggtgatgcctaatcccactctccctgttctgcatcgtccgttaacttaaatgtattttgattatcaatctaaacaaagttaagttgcgtaatttagttagtgttggtgagttacttagttcagttttggcttgttcacaactttaccgtttgatatgattggtgttattaacttttaaattaatgatctttgaaatctagtctggttgcaggaaatgttcagccctatcagtttgttctaccgccgaattggaaacagttgcgaatagccaatattttgtcaggtaattactgtcaaccgaaatgtgcagagccatggatcgaagtgaagtttgagaacgagaagcaaggcaaggttcaagtagttgcatctcctttaatccgcttaaccaacaaaccaaatgcaactattgaagatctcggtgagcctgagaaagtgattgcttctcttggtccttttgtcaccggaaactcttatgactctgatgaacttttgaagacttcaatcgaaaaaattggagatcaaacggtaatgacacaacaagtgaagtgattgcttctctgactgatcaatcattgaggaaagtttctgatcatttttttttttggtttatgtcttcttgtgtttttatgacagtactataagtatgtgttggagacgccatttgcgctcacgggaagtcacaatcttgcaaaagcgacagcaaagggaagcacggttgttttgtttgttgtaagtgctactgaaaagcaatggcagagctcacagaagactcttgaagccattcttgattcttttcaactgtaaatcagagtttttgttatgactctggacttgagaaactaaagagcaaacagtttatgctaaggagtgtctgtgcgtagtaacattaactcattcttttctactgtaaattcgagctatgactctgagacagatctcagtggtttatgctcagcatgtctttgttgttgtataactttctcaggtataaaagaacaaaagattacaaggttaggattcctatatctcgattcaagaaccgaactctgactccaatacattgtgtggaaactcccttcttcgtatggtttctacatacagagcaagtcaactggtcatgagatgagggacatctggtcgtggaagaacgcaagagtatgttatatacttcacaccgtccacaagcacgactatgaaaactcgggactgtggttttgttcctcccatcatcccatcgatgtctccattaccgccttctctgggatcaacaagcacagacactaccattgatgggcctggcttggtttcccggaacttgtctttgctagagctgttatgatcttctttggtaagattaaagtcagataccggaagaccaccactgaggattcttctgttctttttccccttttgtgtatcactggtgttcttacactgttgagtatgtggagaagcaggaatgatggctcctgagtttgaggagacatcaaactgaaacacttcagtgcacatccccgaactgaacattggccctatcagtggatacattaaagaaaaataggtgttattatatgcaaatgcaaacgtttcagttcactattctagctaaaaggctgctctccaagtctcaaggagagaatcagtaacattggaagcttgtgaatacctgcaacaccttcacgaaaccattgctgcattttaccattggctattgttgatttgagttggtcgttcgaagcatcatcagaaccagaagatgacaggcctttccccgtttcgctatagaggtgcttagacacatccctggtccttgggcttgtggagtcaggtaaaggcaatgcaggagataaagttttagttgtagttgctagaacacttttcccttcttcgttctttgtttcagaatccctggctttctcgctcgccaaaacagaatgaataatcaaatttccatcgatcttgacaagcttttcattcctcggaacaaatagcgatgcaactagaggttcactactatttcgaggaggccccaaattctctgtttcagatacgtttcttcccactccttgatcagaatctcccccacaatgtactctactactatcaacaaccaaaactcttcctctagactgatcataaaccccgtcagtaacatagttagacttatactccccatagctaatgttcaccaatgcaccaaacaaaaacatacaaaacagaaaaccaaaaacactaaaactagcaaccttcttgaacttcttcaccttagcaacagaatgttttggtttcaaccgaggaataggaagcaaagccacttgagaaccttgtggtttaaccatataagccggatactgcatccatggataaacaattggaaccatcggtggtccacttgagaaccttgtgcccatctgttgcctcaaagtgacattctcagccacgaaataagacatcttactgctcaattccgatatagtggaatgcatattcttaactttatcttcaagctcctccacgtaatgcttcttcctctgtcttgaaaggtgagcactttcacggtttctaactagtctcacgttcttcttcttctcatcatcttcttcaccaccaacttttataacacttgcaaaaccatctttacccaatctcctggattcgtcgcttgaatcttcttcaatctctgttttcctcttggcagaatcttgccccgaaaaactcaagctctgactagtaccggagaaatcagaatccgtaggtgattctctattgtagcagcttgaagtag

SEQ ID NO: 38470 - DNA, 8792 bp, Arabidopsis thaliana landsberg
accaatacaacaacaatggattcacttccctctctttcaccaaaccattccccactcctctcttgatcgaaaaacaatccattcaccggacccaactcgaagctttagactctgtcattacagacctcgaaacctccgctcaaaaaggcatctcattaaccgaaccagagatcttcgcttctcttctcgagacctgctacagcttaagaactattgaccatggcgttagagttcatcaccttatacctccctatctcttgcggaacaacctggggatttcatcgaagcttgttagactctacgcctcttgtggctacgcggaagttgcacacgaggtgttcgatcgaatgtctaagagagactcatcgccttttgcttggaactctcttatctcaggctacgctgaattgggtcagtacgaagacgccatggctctttactttcagatggctgaagacggcgtgaaaccagaccggttcacatttccacgtgttttaaaggcttgtggaggaattgggtctgttcaaattggagaagcgattcaccgtgatttggttaaggaaggttttggatacgatgtctatgtgctcaatgctcttgttgttatgtatgcgaaatgcggcgacattgttaaagcgaggaatgtttttgacatgattcctcacaaagactatgtttcttggaactccatgttgactggttaccttcatcatggcttgttacacgaggcattggacatttttcgtctaatggttcagaatgggattgagcctgataaggttgctatctccagtgttctagctcgtgttttgtctttcaagcatggacgtcagctacatggatgggtaattaggcgaggcatggagtgggagttatcggttgcgaatgctttgattgttctatactccaaaaggggacagttgggtcaagcctgcttcatatttgatcagatgctcgagagagataccgtatcttggaatgctattatctctgctcattctaaaaattctaatggtttaaagtattttgagcagatgcaccgtgctaatgctaaaccagatggtatcacgtttgtctcggttttatctctctgtgctaatacaggaatggtcgaagatggagagaggttgttctctttgatgtcaaaggaatacgggatcgacccgaagatggaacactatgcgtgtatggtgaatctctacggaagagcagggatgatggaagaggcttactcaatgattgttcaagagatggggcttgaggctggtccaactgtttggggagctctgttatacgcttgttacctccatggaaatacagatataggagaggttgctgctcaacgtcttttcgaattagaacctgataacgaacacaatttcgagctgttgataagaatttatagcaaagcaaaaagagcagaggatgttgagagagtaaggcagatgatggtggatagaggattggagacataaactggttcttcccaaaaggtacttccgagtttatcttcttaattcagcccatgatgtcatgccatgttgagttatgaacttacacacatacacaagagacctgtttgttcatagagaaaaagatcacatgccgtgtgtgaacgcgtctgattggttagctgttaggagtgatttcggctttgtagattctcgtgggatgtcttctttaagaattgacttaaaccaatgtcatcactagattctacttttcccgctgcattattcaattgataagctattcctcgtgaccagtgtttcatatggtttagacacatgggtttagtcattggtcacgtgcattaggacccaccacttcaatatatagaaagctaggatccaaatatgttgtagatgatgacaaatagttacagctcttatcctctgttattggtattcacattgcagcacatttattgatgtttcaactaactcccatttttgctctaaaaaaaggatagtgctttttgtgtaaagatttaaggatcaatgtatctgcattcacacattcattattcttttctctataaaaccctggacccttattctgctactctcatttgtagttgttaaactaaaataacccatttgtgttttaaatctaaaatggctagaaatttcgagctttctttgattctctttgttctgtatctgtccactgcagcaatagtcatggctagaaaccttgaagaggaatcaagtggtgatacagagttcattaaagcctcttgtgagacgacgtcgtacccagaccgatgcttccagtctctgtcttcatatgcaagcgagatcaagaagcagccacgtaagcttgctgagaccgcgcttgccgttagcatagcccgagcaaagtcagccaaaacctatgtatcagagatgactgattataaaggaatcacaaagaggcagcacgaggctgtagcggactgtctagaggagatgggagacactgttgacaggttgagcaattcgctgaaggaactgaagcatctggaggaaggtgacagcggagaagacttttggttctgtctgagcaatgtccggacgtggacaagcgcagcactgacagatgagaccacgtgtatggatgggtttggagggaaggccatggctggggagctgaaaagtttaatcagaacacacattgtgagtgttgcggaagagacgagcaatgccttggctttgatcaatgactttgcttccaagcattgaaatcatttcaaaggggtttagtctttgggacaagagtttttctcgtattcaacactgcttgtgtttttttttctctctttaaagtttctactttatcttaacttatcatttttcatattatgcataaattaatctgtattaaaattaaaatacttcataattcatttcacaattttctcgagggaattaccgtaagctgaagtaaaatggtacatgaaatgaaaccctcaattgggatcttctaatttagattaaagttttaagctatgtcttaatacgaatctgttgtatcatcatccctaaagtttttcttcgtgtacagattattatttaattattttgaatcttgcataaggagccaacttccataaacttgcaatacaaacacactccccatcttctcctctgccatgacttgaacccatgtggtggagcttagccctctaaccaaatgagctacaagatcaggcactgtatcatcgcctataaaacattaagtacctttgtttccgttcctactataagtaaagatgaaaattcttattgggccaaagaactcttaaaaggcttcctctacactcataaaaaaacaatattcaggttttatccagcccataaaaaattgaatatgaattcctctattttctaaactctacactaattttgtttgcgtccgttattaattttagatcatatgatcattaacgcttattttattacaaagtggtctaattataaatttttgtaatgaaaagtatttatatatattacattttaatcgtcatcgtcatcgtcatctgtcatctgagagagaactccacaaagactcgatttttatagacggagataacagtagaagcgatttcaggcgagagacaatcaatctgatgaaagctcttctaaatcctgaatcttccttttgtctttcttcgatttcttcctcacagatcaagaggtctttacactttaacggattgagttcttcatgtctccggtttcctttaaccgattttgccggacgtttacggcggcggaagctcactggtgggttgtgtataaaggcagttttggactctgcaatgatggagcagttagggcttaaggaatcagatgttaagaatccggctttatcttctacttatcggggatcggagattccgaagccaaaccttactgttcttgatgctcaagctagggtttgtacaggtccgactcagactaggcctcttagtgaagaacaagcttttaaggtgtttgatactatattaagatcaggtaagctttttcgttctccaaatttggacttaatcgattttgatagatttcaatttgccctttttagctcgaggcctaagcattcaaaagtttcaacctttgtatccattatgctgcttaattagaatttgggatagaatgtgaaaaacccaagtggagtatgatttgcttacgcttcttggttcttggttagcaactttgtttattgatcggttcgatagagttcttagccttattagtcagtctcactgggatgcagctagaggggagctaaaagatgaagagcctgtttcaaaggcgcaacttggggctttttttgcgggaatgacaatacgtgcaaatgcatttccggaggaaactcaatggagcgaaggggaaaagcgggcgatggatgtgttttggccactcttggttagggcactacctcctgatgtgctctttattgctgatcctgaaggctctcttttgggtacgggaaattctgttggaccaacttttgttggtaatgaaactcgtgagatgagattggttggtgcgcttagagagattttggctggaggtcacttaggttatgaggaggttaagggtgttttaagagacgttcttccgcttgaaacggaaggtagtttaaactcgggagtaagcgagtcattgctttcggcgtttttgattggtcaacgtatgaacagagaaacagatcgcgagcttaaagcttactgccttgcattcgatgacgaacatggtaaaaaactcttttgatatatgatagtttcaggcaaggatacaaagttctgccttgagttaacgcatcttctactaatttcaggggctcctccagttgctgatgtcaaatccttaacccattatggcgagccttatgatgggaatactcgattctttcgaagcactttgtttgtggccgcagttagatcttgctgtggtgaatcttcattgctccatggcgtggaatggatgcctccaaaagtattactaacaaaattgaatcgttttcagtattactagtttcctagagatgactagagatgatgatgcttttgtggaatagttttagatttcttttcattaacttttcaagtcttcaggggggtgtgactgaggaacaaatgctgaagtttatgggagcaaacacacacttgtctgttcagcaggcaaaagaactcatcgaggtgcctacaataatttaaactaatgtcctacaggttttctctattttttatgtctatctttctcctgtcagcctatatctatgatttacgcaatctataaaaatgctgtttgattcttccaggacgagaaggctggatttgcatatctcagtctacgagaagctcggccatctttgtatgaaatctgagaaacatttatttgtgatatacaaatgcatacgacattttcctgttcttccataagcagtttggtggaaaagataacatctgatcgtattgacaaatttctttgacaaatttgcagatattcactaatcgaaatgagggagcatataaagaagcgccctcctctggcaacaacggagaaagttcagcaatttgtgagggtaagggatctatgaaatgtcaccgccttatatgctccacgcaaatagaatttaacaactcatgtgactaagacaagtttaagggggaaagatatcatagggcttgacagaaagtgaccgtatgcagacatttcatggactgtttttcaatgcaggcgacagggaaagaagccattgttgctgggttttaccatgaaggctacgaagagcctctcttaatgcttatgagacgaagaggtgtccattctggtttggtggttaaggttgactctctctcttttaccatcaaatatatattaatgccctacgagctactacacacttgggacgtagacttagaacctgaattctgttggaagctctttccatatgaagttttgaacttttagtagagaaaatttcaggtctgattgtaagggaatttataaggcttcttttggtaatgcagggtgaggagggggccctttcaatgacaacacgggtgcgagctgcaagtgcatcaaaagggtttccagtcaactactgttccgggtttcgttcattgagttcggacacggctctagaagctgacggttagaatagctataataactttccttgtttcaaactagaatctactgcttgaatatatgaaccgagtccagacagggttgacacttaatttcacaggtgcaaattagtgttgtagtaaaccggattgtaggtggtaggagttcataggctaataaactattagctaatcttatatttggtcgatatggagtcatgatgtatcattttaccttggtgatggaagtcttttggtggattagcctaatctagagtgctatgaaatctaattcagattagattggtctttgtgctatctgatattaaacttatttgccttatgccttggtactagtatatgtcttgttgtacatcaatatagtttatgctcctaaaactcatggctaaactaacttctggaatcgtaggtgtatcgcgtcagagtttcaatcttgaggtggatgcgagaaactatgggtttgaaccaaccgagactccacgaactgatcgttcggtaaaacttccagaagccatttgtttcacaatgttgaggactgttagaaaaagaaaaaaaaagagaaaacttaagtcatacttttgtttaatgaacaggtgtcaaagaacatagagctggggctggcagcgcttaaaagtgagaaaggagcggcttatgatagaatcgtcctaaatgctgggattgtggaccatttgttggaaagtaaaggtgcagaggatgtagctgtggcaatggagagagcaaaggaagctattgacagtgggaaggctttaaagaaacttttgaattacatagaaatctcacgcaagataaaatagttcaaccaacctgaagagtctgaaaaatcatacacggaatagagaaaagcatacacctttctgattcttattgatttcgttttctgtaatatgtttttgaaacttgaaagtgtttttttacagaattggacacacaacacaatgtggatgtctagtgaatcacgtgtacagagtctgagaacaaaacttggttatttctaatgtgtttaatgtttcttaatcattttgcacattcatgttacttaattagtttagtcccgtcaaagattctgatggagacattcgagccactcttttctcttgaggataatgggaaacaaacaagcgagtcaatgtccggaaaatgacattgaagccgaaggcaagggacgtgggacgattttataggttgtgttgcagaaaaaacagagtccatatcaattctctcactcgttttttttaatccgttttgtagcaaaaagctagaaatgacttttggttataaaatctttctttttgccgattcaagtggctcagctgcttcgtctttttgtgttctccttatgccacatgatctgatcagacgagtgtccaaattcacgtcagacacacaattgtaatctaccgaagattttattttaatatcatataaaacgctattgcaataagcgcccacacaagtctttcttacttgccctgctctggaacgtgactttggaggtaacgaaactgtgtcgtgagttgatctaaggttggtataatttcttgtagttttgtccgatttcgaaaacccatttcaaaaggtgtcgcctttacttttatatcgtttgagactgttctgtagattttgagttgtggggttcactctctacgtgggttggtgatgatttttttttagctctgttcactgttgttttattggaataagttgatggtacgttctgtagttatagattcgataaaaaaccaatctttatgatcgactcaataagtcaaatcttgttgtgttaagtgaaatctatagtagtgaaagggtctccacttagctgtttggttagtcttgttataagctcgattatgtcctttcttgtgatcagtgtattaatacatctgcttattttggttgtagaggggaagtgaggaatcattttgcttttagctttgaaaagtaaatcctggaaatgtctctcaaggcgttagactacgagtccttgaatgaaaacgtgaagaattgtcagtatgcagtcagaggtgaactttatcttcgtgcttctgagcttcagaaagaaggcaaaaaggtaacaactttgttatgcgtttgcagttatgagcttcattagctgttgagatatgggaagcgtctttggtttcctaactttcacaattacagattattttcacaaatgttggaaaccctcatgctttaggacagaaacctctgacttttcctcgtcaggtataatatgcaattctcatgttttttgccaagctatagatttaagcctaaacatattgaaaaccaatgcaggtggtttctttatgccaagcaccatttctgttagatgatccaaatgttggtatgatattcccagcagatgctattgcaagagctaagcattatctttccttgacttctggtggtcttggtatgtcttttattagagaactcagatcatggttaatattggcttaggtttgtacaaataacatgaaagtttttgctttacttttaaccaggtgcttacagtgactcaagaggtcttccgggagttcggaaagaagtcgctgagttcattgaacggcgtgatggatatccaaggtgattgcttcatggtgattgttcatgcaatgaaataata

SEQ ID NO: 38471 - DNA, 7127 bp, Arabidopsis thaliana landsberg
ggagaaaaagtcagctcctttgtggtcattctgagacaaatgggatttggagtaggtggtggaggtggtagaatgttggatttgaggattgtccaaaatcacaagcgttcaaataggtaaaatgtccacttcttaacaactacttcttaacttgtagaaatgtgtctctcttttctgttaatggattcccttgctgccatgggtttggtagaaactggaattttgagagttatggttgcaaagttattcagatcttctgttgttacagttttttgtggtcctgaacaagataatgagtctgttataacttttaaatattgctagtgtaatgggtgaagaactaacgatttaaaattttgtctgatacacattggatttaagagtgattctttctttgcaaatgctctctctgaacagtgccagctttccagaaaagaaaagagttgaaggagataaaacctcaaatagttctcatgaagcctctcaacgaatgaagctggtgagtactatcatctctttttgcttttttacttgttaaagttgagataaagtgtattggtatttgttaaagaacagcctaagacgctgagacatgattctcttgccttcttggatttatctttctgttttttttactaattagtatctttttttccccaagctgcttttttatttgcattttttttgtgaaaagccttttacacatatgtttcgctatacatctttgtatgcttcttatttgtcttacatttttttaaaagaatttcctttctggtatcacattattagaaactaatctctcttataaatgaaatgaagtgagtccaaagctgtttctattttcttactaaacctcttgtgagacagattatttgtttacggattttttctgacttggtttaggacatgggacgttcaaatgaatcaaagcataatcaatatcattcaaacacggagacttcattgaagcaagaggtatgtgtactgttcgttggttaggctcaataatctgacttgtttggttggttaggctcaataatcttgtcctgtgattggaatcacagattactcacctcgagacaagattacaagatcagtttaaggttcgttgtgcattagagaaagccttaggttatcgaacagcatcttcttacgtactgactgaaacaaacgacattgccatgcctaaggtcagttacttacatttcccaaaactgagttgtttagaaatgagctttgtgcattataaggaattgccatcttggttttgatttcatcttcagccagctactgatttaatcaaagacgttgcggtgctcgaaatggaagttatacatttggaacagtatcttctttcattatacagaaaagcctttgagcagcaaatctcttctgtatctccaaatttagagaacaagaagccaaaatctcctcctgttacaacccctagaaggcgtctagacttttctgaagatgatgataccccctcgaaaacagatcaacacacagttcctctgcttgatgataatcaaaatcaatcaaagaaaacagagattcctgcggttgaccgagaccagatggaccccagttttcgccgtagtcactctcaacgttcggcatttgggagtagaaaagcttctcccgaagattcttggggtaaagccagccgctcttgtcactcacaaccactgtatgtgcagaatggagataacctaatcagtctagctgaacatcttggcacccgaatctcggatcatgttccagaaacacccaacaagttatctgaaggaatggtcaagtgcatgtcagaaatatactgcaagcttgcagagccaccttctgtgctacatcgtgggctttcatctccaaactcgtctttatcatcaagtgcattttcgccctctgaccaatacgatacatcgagccctggattcggaaacagctcctcttttgatgttcggctagataactctttccatgtagaaggagaaaaggacttcagtggaccttacagcagcattgttgaagtgctttgcatttacagagacgccaaaaaggccagtgaggtggaagatcttctgcaaaacttcaagtgagtcgccttgagactaaagctcgtccttttagacatttgagttgttacatatgagggtggaatttgataggaagtgaattgggatataatgatgcataatcttgaaatttaaaactcttgcaggtcacttattagtagattggaggaagtcgatccaaggaagttgaaacatgaagagaagctagcgttttggataaatgtgcacaatgcacttgtgatgcatgtaaaacctctttctttcaagaacttatctcagtttttctatacgcctacattttggtttcttatcaaaatttctttgaatatattttaggcgtttttagcttatgggattccacagaacaatgtgaagagagtcttacttctactcaaggtaacaaacatatcttgcaaggagaatgattacagttgaaccatcatttctagattctgaaattatcgttctttcacattttttcaggctgcatataacattggtggacacacaattagcgccgaagcgatacaaagttcgattcttgggtgcaaaatgtctcatcctggacaggtacacaagataaatcataaaacttcgaaacacttgtcttcaaagaacaaaagcatgataataatgattcgttcttttcatttttcttagtggcttagactactatttgcttcgaggaaattcaaagcaggggatgaaagattagcttatgcaatcgatcatcctgagcctctcctgcattttgcacttacttcaggcagccactccgatcccgcggtacttaccattgatctgtgaaacacttcaaaaaatcctttaatgctattaaaactcaagtctctgcgtctttgtttcaaccaggttcgtgtatatacaccgaaaagaatccagcaagagcttgaaacgtcgaaagaagagtacataagaatgaacttaagcatacgcaagcagagaatcctattgccaaagcttgtggagacgtttgcaaaagactccggtttatgtccggcgggtttgacagagatggttaaccggagtataccggagtcttcaaggaaatgtgtaaagagatgtcaatctagtactagtaaaccacgaaagacaattgattggatccctcacagctttacatttagatatcttattcttagagaagctgccaaatgaaattattccaagattcataatatatagaagagagtgtgtgtatatataagatatcgctgtctatgtccccactttctgattattataatgttgtttctgtctctctgatatggaagagaagagagatcattggatcttgtctgctcacagttacttggcattaattcacagcttaacatcaatcagatcatagcataataatattcgatttttagataaaccaaacgattagcaaaaaaaacatataattctctctttatttaaagcttttgatgatgaatcccaatttgctagtaaggcttttggccaattatatttccaggaggattgtaaaaacaaatggtcaacaccgttgactctttcgtacacgtggcttgagcacacccgagctctttagagtttctccagacgacttgtttataaaccccgcacgtgtggttcgcagcacacgtgtctgacttgtaattgtagaaaggtttctccttcacccaagtctccacagcaagagacggtgtcacggctactaagcccttagcccaaagctggttcgcgccgtattttccagggtttagactcgcgaactcacacttcttttggttcctctggtaacgagccaaccgactcgcagcagcttccaacgtctggctccaaactagtggcggaacaccaaccatggctctggccttgttgtgcgcatcggtgaaagctttagctgctgcagagattgttggaggaggtggaggagaagtggaaacgatttgtttgggtttcagtttcgccgccggtgagatggctttgacggagatgacaagaagtgccacgaagatgatgtgatgggttaaagccattcttggtttattcgcaacctgaaaaagatcagtgtttggtttatatagtcattaaagatgtataaaaaaactatatgttaaaagtgagataattagagatgtataatagagaaagatatgagactggtggaagaagacaaaataagaggaagagaggatcatggcacgtgaatgttgattgatccattctcaagttgtctgtgttgcatgtgacagacagatacccaacgttatttaattccaatttctgttgttgctttcaggcccattaatgcttatagggccaaggggtccagccctctttacctcatattcattttttgccaaactatacacatgttaataattgttgttgttcgacatcataatcgaagaatatccaatcatgtatatttgctttcttttgtattattgcatttttatatggtgcaaattcaacccacaaaaagaaaatttaaatggattttcagtattagtggcaacagagaatttgaaatgttgttgtctttatagttttctactcggttgtttttgttgtcacgttgtatttttgtgctattgttgtattagtagtcccgaatgcatagagataatgagaaaccgatgtgataaatatgcagaagagaagtaagaatggaccacaacttcatcaagcatatctgatcattaataatccttatcttgtttcttaaataaaaaattgttccgccatatttggcattttgcaaaacagccttatcattcgaaattatttcactttgctggattggattggatcggaaactatgttaaacacaaagggtatgaaattttagagattagaaaatttaacaagatggataatattacacatgaaaggattcatatagctacgaaattgcaatgttattaagattggaatcacatcaatggaatatcttcatcctcgtgcccatttctcaattactgagcaataaaaaaaacatctactggataatttgttctccataaaaaaaaagtcaaacatttctaattacaatttatacgtcggtccatttttttctcaaaatgactaaattgaccctactcggcgatcgtgctcaaattagccgtgaatcgcctcttccctttaccgcaacctcttccgccaccaccgtttgtcttaactccggcaatgtttttcttttggtaagttttttccgatttcgttacatcgtcgtcgccggaaacccaaccgactccaccgctcttggtcaacgccgaactagctttaacagccaaagcagccatttcctccgctcttaacggatgattgagccacgtcagaggtaagacaaaataaagctgccctggccgaagctcttcgttgccggcgacagctgacactgcgtcgtcgaagtccatttcgtctgagttacagacgaaactcgtagggttcttttgcaaaatctgccaaactttgaccggacatgagaactcctgtaaagtaccgtcgagtaatatcagcttcgctgaatcactcctcaaagattcacgtgaagcgcacgctcccatttttagtttaagtgatcactgaaacatatagaccttctgacttgactcgtgagtataaatttattcttaagagttgtgattgtgaattgaaagagacgaccttgtgacgagtttatatatactaaaggaagaagaagaagacagcattcagaatctaagtccacgtaggaagtgtcgtgtggtgattacaagtaaacatgacagcgcatggtgggttatagtttctgtgaaaacggaccctatcgtgaagggtagttctgggaaataaggagagagaatgtggcgaataatgagagaggaaggagcataggtggtgacttgtgagggaggaagatgccacgtggcagacagaggcaggaccggcaagcagacaagattgagttggccggaggtttagcgtcaccggtgggttagatctcacgtgaagactattggggctggtcaggctggcatgtgtgattgggtccctttagattctttttggacccttttggtagatacaagagtcacctaccttcatttttttattgttacttttttattttgcatgaatgtggcatttattaggaagacctttaaaattatagagtctatttttatggtggatttggacggtatgcaaaaagctgtataaaatttgatttttgtattgtgtttacgatattatattgcatggtttaatgatttcatttttttcgtttttttggagagtttcgtctttcattttgtgttaaaggggactgatcacttttaaaatatcatttgctatgttaatgattaagtaaaatatctttttaagtggtcgacaagtaaatatctaatttccctactactttatactttctgaatatagagttagttcaaaccaattattcattcacttacacacaaagaatgaaagaaatatcttttttttttccttccctgcctatgtctttgtgggactgaaatcacccacgtctccaccgatgtctaattttacgatgggtttttttaaatattttacttgattttgtctgatatatcttttgtttttacatacgtaaaaacttgtcccaagttcctataaccattttgtttgaatatttaaataatggttcgtcaggtcactcaggtctagtggatattaatctgccacggtaatgacaaaaacatatataaggacaacaatagttattccatgaggtgaaattagacaataatacaattttgcttacgatatacttccatttcgagcacgaggcacattcttgttcctatttgataatactcttatggtaatttatttgaagttctttgttactgtctttaatatctataaattaatttgctataaaacaatagtgattttagatttcgaacatgtgattaggtagtactaacacacgctcatacaatctactgctacaagatctgaaaattttggccgagtgaatgtaagatttgtactatgcattgcgatgaatccgatctatctgaaatataaaatagaattatg

SEQ ID NO: 38472 - DNA, 1800 bp, Arabidopsis thaliana landsberg
cctgtatttgataagtcgagttgaatttttatcacctgaacactctatataatcgtcatatgagttattattttgcttcttcaatcatttcagatgttctatgcatacaaaatgaatagaccggtcagattgtcatgtctaacacctggttagaagatctaattagtaattagatagtaactatttgatccaaaaaaaaggatagtagtaactatttttaagaaaaagatgaaataattgggctttaatttgttagtatcaaaatgttggactgggccaacagagtgttacaggtcaattatataattaaggcctcccttgtaggctaccatttaagattaatgtaaagcttaaacgattgacaacttgatgcatgcgcaataaatgacgatcgtaccataatttcatggccatatatagttgctaaattgaaagaagaacaaaaaggtttgtagtaactttgtagtgaaataattcgatattttattatgttgaatagttctttttgttcgtttctgaaaagtgaaattctaagttctaaagaggactgttaaaatataaatggcaactaagtcaataacttcgaaccaaacgtattaacggcaaatattaaaatatagtgattttgactttagagatgaattatgatattgaaatgtcaccatcaaatttatgaaatcactatagatttttatgttatataaaactatatatatactagattttatcccgcggtacactgtagggacaatttatttttttaaagttagtataattttttttttgcaaattgtatctatctataatatatttttattttatagtttgcaattgttattaagtaacgtcctcccaaactcatcccgccaaacccgtcccgtacaaaaaccatttatttatattaatgttgatcttatttatgatatgtttataaatcattgtctaaatatttttgtcgatgcgggacgttgaacccacatattttttgctaattggttaatatatgttcatttttaaaatattgaattataaaatatgacggaaaaaattaagatttttttaaactctatatattatataatgatgttaaaaaattgtaatatatcaaactttttataagtttaaatattaataatgttttataaattttaaatatataaataataatatttaaaaaattaatatttttgcttataaggtaataacataataactctaaaagcaagaatttagaagatttaaatctttaattaaatattttcattaataaataattaatgtcagtgacatgacattgtaaataagttcaaatacaaaatttatttatttaaacaaaaaacgtttagtaagaataatatttatttaacaaaaaagtttgttttaaaatattgttaacaaatatatttatgctaattttaagggattgatttgaagtatgatgagattaaatttgattgataatgtgattgacaatttaaatcaaaaatttaaaggaaaattaattattttggaaaaaagatttaatgctaatgacattaaattgtaaataaatcaaagtctaggatttatttgctaaaatggctgcaaaaatgtatatatagattaagagtttaactatgccatttgacttataaacacgataaatacagttttataaacttacggtcgaataaatgtattttctgtgtgatagaaaacaaagtgatttcattgtttggttccttaatttatcggataatcgaagtgttcagagcaaacacaacttatcctaaaagtccaatgagttaaaaaaattcacca

SEQ ID NO: 38473 - DNA, 5372 bp, Arabidopsis thaliana landsberg
cgatctataatcaattcagcattattgctaaaattcaaattaagaagacggcatgatttgttaaaaccataaagaaatacaaaagggtcaatgataaaactgtttaaacgaatcagtctacccaagagccgtctctcgaatactagttttaaattcataagcgtatagagtttagtgattccagaacactttacaggccaaaatctaatatttcgatattttgaaacgacatttttagtcctataattaaatttgcaacgtattagattacttttaaaatgtgatactgcgaagaaaatgaatcaaaagattgaatcgaatattcgaacagacggacaagaacctacgaagcgatacagatcagaaactctgcttctttttttaacaagagatcacaaacttggttgacttgagttcatattataatgacgtactcagtgattcgaatattccataaatagtcgtaagaataaagaccttaatgtatacattgttcatttcgtatgccacattgacgaagatcactgatataaatttcaattatataaatgtaaaataacaaaacaaaaagttacatgttatcaaatagtgtcattagctaaataacatgttacttggccaccacatcacttttgttgagaaatttctaaaatttggctatttagtgcatataccctttaaaacttgttgtaaaagcaaggaagaggaaaaaagattgaacctatagcaaaggaaaaagaaaagagagtacatattcttaagtcttgattacaatattttgttcttcaacatattctcttagagttgagataacataaattataatatagatgctctattgggtagcagcagatagaagaacatatgctgaaaatcatttttatagatctagcaaatcacctttataaaggatccagattttttttttttaactttttgaaagtcaacttgatcatatgtgaaagttattatgcatcttcgtgcatagacaaaatgcatgcacgagctcacacgatcctgtttttttttttttctttcttaatgaggtaattttcttgctgtcatttttttttctaaagttaagattcatataaaaaccatatcaggtaattccttaattttgtgtaataattaagaaatcaggatcattagatctttgaccaccaaaactcaaatttgttcccaaatacactcagttaaagtactatctttaatcatttcatattcgttactttgtaaattagtacaaagtaagtaacaaattttagtttacccaatgaaatggaatgaagttaatgaaaagattcgttcttttagaatattcttctgctcttaacagtgtttaattatttaattttcttacttgaaaaaataaaattgaccaacaattatttttcttacctcatgtagataacttacaaaataaaacatatatatatatatatattttttttttttttcaagtcagaaataaataattctaacgaaaaaatatgaaataaaaaaaaaatctgacttaaaaagcgcgcatcggtcatgccaacacactccctcgtctataaatacttcactctgctttcctcaatcacatccatctatgaatctgattccacatattaaacccttattccctaaacatcgaatttggttccttgtcccacaatccggagagattgactcttttgaggtttggctattcctttttttttttcagtttgagttttgttttgattaattcgtgattttcggtcagtctaccaaatcccctgtttttccggcgattcagttgtcaacagattttgcttttctttttccctttttgtgtaaaaaaactcatttcctttttgatctgatgattacagaagaagtaagagggtggtgaagaagatttgattgatcggcgataatggcgggtcggaacatagagaagatggcatctattgatgctcagcttcggcaactcgttcctgctaaagtcagtgaagacgataagcttgttgagtacgatgctcttctccttgatcgctttctcgacattctccaggatgggcatggggaggatgtcagagaattcgtatgttttcctccttttctcactctttcttctttcttaaatactggatttttgctaaaattttgaacttttagttacatagtgggttacccatcagtgaatcatcatgtgggtttgttgtttctgcttagattatccataaagttgaatccttctcagtgatatcgagcagatcagatcacactgtgttaagattgttcatgttattctctgtttttgttgggtttgtgagtatatttgtttgcttcagtggctcattgagtttgcatctgtgattgtttctgatgattttcagtttactgaatcatataatgtcttttgttttgtctaaaaggttcaagaatgctacgaagttgcagctgattacgatggaaaccgcaacactgagaagcttgaggagcttggaaatatgctgacgagtttggatccaggggattcaattgttgtcactaaatcattctccaacatgcttagcttggctaatctggctgaggaagtccagattgcttaccggcgtaggattaagaaactcaagaaaggtgatttcgctgatgaggcctctgcaacaacggaatctgacattgaagagactctcaagaggcttttgcagcttaacaagactcctgaagaggtctttgatgctcttaagaatcagactgttgacttggttttaactgctcatcccactcaatctgttcgtcggtctttgctccaaaagtttggaaggtttgtttaacttttttagtgtcttgacattttggattcctcgtgtgtgtgacttgactgatgtattttttttgtctcaaatgttttcaggattcgtgattgtttgtcgcagttatatgcaaaggacattactcctgatgacaagcaggagctagatgagtctctgcaaagagaggtaagaactcaacctcactggattgtaacatgttgatttgatataatcctcggataatagatagattggcctttgaaactctgtttttgttgcaccagattcaagctgcttttcgcacagatgaaatccgaagaactcctcctacaccgcaagatgaaatgagagctggaatgagttatttccacgagacaatctggaaaggtgtccccaagttcttgcgccgtgtggacacagctctgaaaaacattgggattgatgaacgtgttccttacaatgccccattgattcaattctcttcttggatgggcggtgatcgtgatggtacactcttgcttctttcttatctcaaaccattaaaacatgaattggttcttatgagtgaaaacattttctgaatctaggaaacccgcgagtaactcctgaagttacaagagatgtatgcttattagctagaatgatggctgctaatctctacttctcccagatagaagatcttatgtttgaggtagcaaaaattttattcacatcacagcaatttagtttattggttaatgttaaggacagagatcttattttttttggtttgatgtgtttgtttgcagatgtctatgtggcgttgcaatgaggaacttcgggttcgtgcagaacgtcaaagatgtgcgaagagggatgcaaaacactatataggtgtgtgttacattcttgacatttttttatgtgtccgacatgttaacagtttgttatattatgtttgatgtatgatcgatttttggatggatgtagaattctggaaacaaatccctgcgaatgagccataccgagctattcttggagatgtgagggacaagctgtacaacacacgtgaacgtgcacgtcagttattgtcaagcggagtttcggacgttcctgaagacgcggttttcacaagtgtggatcaggtgtgttttcttgctgtttgcagatcaactaaagatgtttaagccatataactgcaacttcaattctttgaaaattagaatcctttttgattaaacatggaagctataccatactgatgcatagattatttggtaactatttttctaaatttgaaaatccccaaacaaaagagaaccaaaatatggattgaaccactctaagatcaaagctgttgtttgtttcttgtttgattgattttataattttctaacctttgattgtttctgtttctttccaaagtttttggagccacttgagctttgttacaggtcgctctgtgattgcggtgacagacctattgctgatggaagcctgcttgatttcttacgccaagtgtcaacatttggccttgctcttgtgaaacttgatatccgtcaagaatctgaaagacactctgatgtcttggatgccatcacgacgcacttaggtattggttcttacaaagaatggtcggaggataaaagacaggaatggctgttatctgagctaagcgggaaacgccctctctttggaccggatcttcccaaaaccgaagaggttgcagatgtgttggacactttcaaagtcatttctgagcttccttcggatagttttggtgcttatattatctcaatggccactgctccatcagacgtgctcgctgttgagcttttgcaacgcgaatgcgggatcactgatcctctgagagttgtcccgttgttcgagaagctagcggatttagaatccgcacctgctgcagttgcccgtctcttctccatagaatggtacagaaacaggatcaatggaaagcaagaagtcatgatcgggtactctgactcgggcaaagatgctggtcgtttatcagcggcttggcagttatacaagactcaagaagagctcgtgaaggtggcaaaagaatacggagtcaagctgacaatgttccacggaagaggtgggaccgttggacgaggaggtggacctacccatcttgctattttgtctcagcctccggataccattcatgggcaattgagggtaacggttcaaggtgaagttattgaacagtctttcggagaagagcacttatgctttaggactcttcagcgtttcacagctgcaacacttgagcatggaatgcatccaccggtttcccctaagcctgagtggcgtgtcctcatggatgaaatggctataattgccactgaagaataccgttctgttgtcttcaaggagccccgttttgttgagtacttccgtctggtaagttcttaaccagctcaattactcctctcttaaacaaattgtagttaaaaaagagagtctaagttcaggtttgggtttgtatcctaggcaacaccagagctcgagtatggaaggaaaaacataggaagaagaccatcaaaacgtaaaccaagcggaggagtcgtgtccctgcaagca

SEQ ID NO: 38474 - DNA, 11112 bp, Arabidopsis thaliana landsberg
aattggagaatgatttcatgatatctcttcaggctgaggttaattcatgactcttctcttttatagtctctcattaataagaagcactcagatttgttttccttacttaggctatagagagtggtgaattggaggctatcaagcctctgccttggtatcctaagaatcttgcttggcattctaatttttcacgcaaggagattaggaaaaaccagacacttgagaggtacattttcactgacatatgaatgcttctagtcactttatattattagaatgacctattcaggttacttaggcaattatagagactctgtgaacggttaaggaactagtgtgtttgttgtgctatacacatgatgggttcttctttgtggtctattcaggtttcatgagtttctgaagactagaaaatgaagttggaaatattactaggcaggaagctgttagcatggtaagatagcttcaaactcgcttcggcctttagtacttctttgttggtacaagagaacttataaacccgtgttaaatttaatcatgcaggtacctcctctcttccttgatgtacatccagatcattatgttctcgacagtgagtgaactgtattcaacattattacagatggctatggacttgaggagtaatataggtaactgattcacttgtctgaacagtgtgtgctgcacctgggtccaagacatttcagctgcttgaaataatacatgaatcatcagaaccaggatctctacctaatggaatggtttgtaatactctctcatctttactcatttctttggtggatagatcatgtttatttctaattttgtttggttgaatcaggtggtggcgaatgatgttgattataaaagatctaatcttcttattcaccaaacgaaaagaacatgtacgaccaatttgatggtcactaacaacgaaggtcaacatttccccagttgcaacaccaagagaaccttgtctgtagcatctgagactaatcctcatcccatcgatcagcttctttttgatcgtgtcttatgtgatgtcccgtgtagtggtgatggtactctgcgcaaggctccagacatatggcgaagatggtttctctatttatgagtttttaaattgacatgtgttgattccaattgcttcaagattcttacttgttttcctcggtttctgcacaggaattctggatctggcaatggacttcatagtctacaggttgtgcttgccatgagaggtaagcttttttctcagatgatccgagtctcagaatcttatgttttgatttttatctgcattgtatggtttcaggtttatctctgctaaaagttggtgggagaatggtatactcaacctgctcaatgaacccaattgaagatgaagctgttgttgctgaagtaatttgatagtttcttcttctttctccgttgacctattcttctggatactgatatattgttagtattcttcagattctaaggaggtgtggagactctgttgaacttttagatgtttccgataagcttcctgaacttatacgaagaccaggacttaaggcatggaaggtcggtttctaccttcattaacgagtgaacaaaccctcagctctagaatctaatgggattactcatcttttttttccttgtctttgttaaatctaggtgcgtgataaaggtgggtggtttacttcttacaaagatgttccacaaaaccggagaggtggagttcttgtgagcatgtttccttctgggaaatacctcaaggactcaactgaaaccacggaaaagaacgagaatggtgatgttaatggctgtgaggatggactcaaagaaacagatatttctgtggtggatgctactcctgaagaacaagctgaggaagtctctgatcttccacttgaacgttgcatgaggataatacctcatgatcagaacaccggagccttcttcattgcggtccttcaaaaaaaatctcccttaccaggtgaactttctttttttcttggtgaacttcagattcttacattaacagctatggttctgtagaacttataaatagtttactcacagaatttcaggagaaaccaaatacgaaaaggaactcaactgctaagtctactgactcgacagaaaagtctccgagtaaagaatctgttgttacagtggatgctggtgtaccagatgagagtgcagtggagaaagttattgaagcagattcaaacattgagaaaaatgatagcttggagcctgagaagaaaatcacagaaggagaaagcatcacggaagataaagaggccaattcgagtaatgcggtaggcaagagaaaagtaccgatgcaagggaagtggaaaggctttgacccagttgttttcgtgaaagatgaaacagtaatcaatggcatcaaggaattctacggtatcaaagatgaatcatttccattacatggtcatctcgtggcaagaaacaccgatcacaagcagcgttaagaggatttactatgtttcaaaatcagttaaggaagttcttcagttgaattttgcagtcgggcagcagcttaagatcgcttctgttggcctcaaaatgtttgtaagtaaaaaattcttttccccacttatcatttcggttgattaagcacaagctccagaagtgaaacttaagaatatttgcaactaattgaaacgcaggagagacaatcggcaaaagaaggttcaagcacgctgtgcccattccgtatatcatccgagggactacctgtgattcttccatacattaccaaacaagtactttatactccaatggcagacttcaaacttctcctgcaagacaaatcaatcaagtttcacgattttgtcaatccacagttggcccagaaagcaactgaccttgttatgggaagctgcgtggtgattctcagcgatggtgcgtattgattggtcttcatagatatacatttgaatttgatcatgcaggatgtgatttatatggttttactggtgcttcaggtgaagtaccggtgaaagcggatgcatcaacaattgccatcagttgctggagagggaaggctagtttggctgttatggccactgtcgcagattgccaggagctgctagagagatttgccgagaaaacaccaaaaacagaaggtggttcggtaaatggaagcaacggcgattcgggcggtccactagctatggagacttaagccctcccttcttcataacttcaaattgtactcctttgttgtggtttgactattcccttactacctccaaattatttttcatataagcataatcatgatgacttttgttggaacgacataaaaaaaatgaaagattttgttctaaaaatcaacgtacactacacaaaactcactatctaaaaaccaaatcaaaacaatatttttgaagtatatgaaatggtttattttattctaaactgtaatggaccaaatcgagaagactgacttattgagctgcaacacacggtggtcttagaagaatgacttgtgagctgcaagacacggtggtcttagcgagattcttcttgttcacctagttgaagatctcagtcaagagagtgttgaaagagttctcgacatttgtggagtttagtgctgaagtctcaaggaaaaaaagcccttccttctctgcaaattccttggcatcttccacaggaaccgatctctggttctctaaatccgtcttgttaccaatcaagatgatgacaatgttcttatccgcgtgcactcgtagttcttccaaccactgaggaatgtgctcaaagctttcacgtattgtcatatcgtaaactaacattgcaccaacagcacctttgtagtaggcttatgtaatagctctgtgtctactcacagcaaaagaacaagaatgtcactaatcaaaccaaccacattgctatgtacaatggagaaaacatgccatgcacaatgattagccacttggatgtgaatgtgatcatcactacataatttgattcttcaggagaatgctataacaacacattacaatgttgccgaagaacaaaatcgaacaattccaacactaatggtccaacttctaaaagagtcgattactctctagtcaaaatgaggtcactctcaggtacacacgaagatcaaaatcgaaattgaacagcaacactgtaacatcatcgagttcgaagcaatattttatccattgttaaatcagagaagatagaactaagatcggagaaggatatagtaccgtttctggcctgcgatgtcccagatctgagctttgatgttcttatcgtcaataacgagcgttcgagtattgaaatcgacaccgaattgtggctttggaatccatactgaatacgtctcttgtgaaccgagcccgtatctgtgatttcccaaccgcggaatcgccgatcaacaccactttgaacacataatcaatcttctgcgacggatctccgtatcctcctccactagtcatcttcttcaacctctctctctcgctaaatcctctcttgctaaatcctctgttttaagcttttaccgaaaagtgagcttttttgaagttttaaacgcagagagagatctgatacggtcgtattgtcgtcgttgtcaactattagtcaatatttttaattaatgatgacgtgtctaaatattaaccgttggattctgccggctcggtgagatttgacggattcgacaattatctttctgtcaggcgcatgtttttgggtgatgatgtcatcaaatagggtaatttcgaatgttaaaagtcttttaaaattgggccttattaggcccattaagttataataaagggccgttatttggttgattacgtgtcgctatccgaattgacaaaaagtgacctaagcgttttcagaagaaaacaaagcaaacgtcgcgacggagagagagcgagagagacgatggaggaagaggagcacgaggtttacggtggtgaaattccagacgtcggagagatggatggagatatggaggttctcaaccccgatttggatatggctgctgctgatgatgatgcggttaaggtctactattatctctttctctcttactgttttgctcatctttatttgactgagctcgattgatttgttatcgcgtgtatatgtgtttgattgttgtgttattgctgttgtaattctaggagttggatgaaatgaagaaacgattgaaagagatggaggacgaagctgctgctctgcgtgagatgcaggctaaggtcgagaaggaaatgggagctcaaggttttcgtctctttgatttggttttgctataactcgcttctttgatatgattatcatcgtgcttcccgcaattcgctaggtttttgataattggtagctacttggtggtgtttgaatccatcttagaattccactgtgaattatgatatgtatatggagtttttttttgcttcttgactaaagtttttggttcaattttgttattccagatcctgctagtattgcagcgaatcaagcaggcaaggaggaggttgatgctcgatcagtttttgttggcaatgtaagaaaataaatgtaagagcgcctctatcaaacctcaagccatcttagcatgctcctgcgtgatgttcatgggtcaaaactcaaatggaactatatgagcctaggataagactatgaattgtgccttttttagctctcttgatacaaaaccttttatctagggtgttagaattattatcgtagaaatctattatctgattatgttctcttcctgatccatgattgcattctctacatttagtgcttgtatatatcactagtttactctgacttttggtgtaatgtcacatctttgttgctatggattcttgtctattcagtgagaactcttattagatgaaattgttgaatggtaaaaagttggtgcttagcgtgaagactttatcttcaaatgaaaactagtgaggggtttctgttgttagtgatattgagggttttggaaagtagattgagtcttcatattactggtggaaccttagccttcaaatataattgaaaacttcatatgtttagtaacttttctgtgcaaatttgaggatgctatagtttttgttttctggcgttgagttttacttttcttatgatttttctcactacaatcgcaggattttgttcctgaagttcttaattgctctgggttatatcaattaggttttgtggggtctttacattttccttttatggagttgaaaaagatctgttctgttttgttgtggaacatgatgaaaaaagctaaaaaaaagatgcaaaaaagcattgaataaagctatgaaaaaagaataaagaaaaggaaatgaatacgctttagagcaatatatgagggaaaaagagatatctggagaggggacaatgtttgagtggagtatttctcaatccatcctcgaggagatagcgtttgaagtgctgcatcaagatgctggatgctttctagtcaaggctcattagctgcgttggtgagaagcagctgtttgatggtaacataaaattaagcttggcataaagtttatgctcggtacacagcgtaagggatcttttcaactcaaaggctgctcaagtatactagattccactttgctttcctattgttctgctttaccttgcacatatatttatgttggtgtgtgtgtaatgaaggatagtaaaagaggaatgtctttgctacgttttcttgtttagctgaactaattaatttgatggattactctttgtgtgctcggtgaaggactccatgggtttatgctagtttgttatatactataactgcatatttgactgtgcaggttgattacgcttgcacacctgaagaagttcagcagcatttccaaacatgcggcactgtccatcgggtgaccattctgacagacaaattcgggcagccaaagggatttgcatatgtagaattcgtcgaagtggaagctgtacaagaggctctacaactgaatgaatcagagctacatggtcgtcaattaaaggtacacatcttactataccatcaaacaaaacactttttaccatgaaaaaaccccttatgattccatcgttttctcatctggcttaaaataatttcaggtcttgcagaagagaacaaacgttcctggattgaaacagttccgtggtagacgattcaatccatacatgggttaccggttccgcagacctttcatgtctccttatatgtattccccatatggatacgggtaagttggtttaacatcaagacatatatgttgattgtggtcacacagctttatccacttctcacactttttggtgttttttttttgcagaaaagctcctaggtttagaaggcctatgcgttacatgccgtaccaataaaaccgtcatcatggttaagcatagaacggattcgctatccagtgtggatgcgtgtattggctatatccatccttcattgagctttctttatgactttggctctttcgccttttagaactttgcgcgtaaacattttcgaacctagactggtattataagtttcatatcgttttgatatggtgcatataatgattggatcaagtgttgcttatataatggggactattgggttatagctgaaatctgttaaatgaaagtgttgactctttttattcgcttagcaaatcaactccaaagatgttccgcgcattttaaacttttattgtcgaggctttgctaccatgcgcctgtaagaggttctcttctgatgatggacgtcaaggtcgtagccatttcttgcaatgacctgagatttaaccagtcacttgtcacagacccgaaaagacgataatgtccttatcgcttccttctcgatacgctctcttctccggctcgactcctgttcgcatcagcaggaggagcaacctctgcttcgccgtctccgccacacgagcttctcgccgggattctatatcattcccccagcctatcttcctccgccacgtcatctctacccagtcgaatttcgagatcgatcgaaattatagagctcatgcgtcctctatcggatcattcgaggatagctcttcttctaacttactagaagacgccagttccgatggtatcgatttgggcagctttgtttctttcgcggaagcgctttgtattttatcatccgccgtgatttcagtggttctcgcggtgaattacgtggtggttggtgaaattgggaaaaaggttttgtctttaggtttcgttggattggttggctcagtcgccactggttcttggcttagacgacgacaatggatgaggatttgcaaaggcgcgagagaaagtgaggggactaatctaattcgaaggttggagaaacttgaaaaggatttaaaaagctcgacttctattgttagagttctttctaggcatctggagaagctgggaattcggtttcgggtcacacgaaaagctctaaaggaacccatttctgaggtattgttatctttctcgagctttgcttcatcaaatgattccattgaaaacgtcccattctctatgtcactatgtgagtgaaattgcatgaaagtggaacaagtgatgatttgggaattgatctagagttgttgaatgtctgaggaagtaacaaatgttctagtgtttgaatcaatattttggagatttaggataatcttgcagaaaatatcagtttttgagtttatgactggtcaatgtagctgtctttgtggctgtatgtatctgaagagtttggtttgttttgtccaaaagactgcagctttagctcaaaagaattctgaggctacgagggtattagtttgcacggcaagagattctacagaaggagcttggcgaatgtcaagaggtgctgcttgctatgcaggtatatatctattaaccaatgatccgatttgttttggtattagttatttgagtgtgtaaaagggtatcttctaagattttgccatggctgaattgaagaagtccatactagtgtcgtttgagctcatgaaagctggttgcttgctttgctatgcaggaacaacagcgaaagcaactcgagcttatccttacaattgcaaagagcagcaagctgtttgagagcagtactagtagcaagcaagcccctagtgaacaacggaaaaataaagcagaggaaccctcaacacccaaacagatactcgttcaataaacagacgtaatgacaatgtgtaagttttgtatggacaatactctttgaagtcaagagagcgataacactgaatatggagaaactcactgtggttacgtagctgtattatcatcattgttttgggttttgtaattttcacttgtttcgaattaaagtttttttccttctaataagaaagttcttgatgacgaataatgttaaaaagtttggacataaaccaaacctattcgtaatcaacaagtaacgattatcatatagattttcttgggcttttgggcctcttccagttgtcgaaaaggccttattgtttttattcgattttcttaatttctttgttaatgacagtcaaagcatcatcatgatttattattatttaaatcacgcacgaaaagcagttttacgacgaatgtcggcttttttagtctcaactctgactggacacaacgactgtcataattgcgatttgtttcgaaagacttttccatctaacaacagctccaacaaatgtaaacgaagaaagaaaatcaaaagtttggtttttctttgtaaaagacagagttttacagttttactttctcttcctaaagagttttcaactagccgaagtggaaccatccaagcctaagtattgttggttttattcgtcgagtgaatctttcttgctggaattattctctttccctttttggattttcttctccgcatcgatttttttttttgttgggcactttctttttctttttgctgttcccaaatctgagtttctcaaattttcttgagatttggggtcaatatctctgtttttccgtgaaaactgaagaattctctgagttatttggatttttatcttttgggtaactgaaaaaagttcgtttttttattactattgtagaattttgaatttagaaagtctcggattcctatagtaaatccactctatctaatctacaaacttaaaaatatgttttaacttttgtttcaaaggtttcttgtagatgtcacaatttcttagagaatccaacgttttcaattttggtagctcttagaaaaatggctctgcttattatcactgccttagtttttagtagtttatggtcatctgtgtcaccagatgctcaaggtaatttcattctccttcataactctctttggtggtttctaagtttgtcaaagtaaagatttttttgttaaactcttgcaatttcgttattaggggatgcattatttgcgttgaggagctcgttacgtgcatctcctgaacagcttagtgattggaaccagaatcaagtcgatccttgtacttggtctcaagttatttgtgatgacaagaaacatgttacttctgtgtaagtttcatgttacttggtctaaattggtcaaaacttcagtttagttatggttttaactatatatggttgtgatttgcagaaccttgtcttacatgaacttctcctcgggaacactgtcttcaggaataggaatcttgacaactctcaagactctgtaagtgcctactttggaactgtgaacttgtggaaagttctgttacatgtgttttgttatatgaaattttctgttgtgttattttttcgcttgtagtacattgaagggaaatggaataatgggtggaataccagaatccattggaaatctgtctagcttgaccagcttagatttggaggataatcacttaactggtcgcattccatccactctcggtaatctcaagaatctacagttcttgtaagtatattcttctcccccacaagtgtctttgaacttgtttgagatctctaggacacagaatgaagatcatatcattgtttctctgtttggccacgcaggaccttgagtaggaataaccttaatggttctatcccggattcacttacaggtctatcaaaactgataaatat

SEQ ID NO: 38475 - DNA, 9133 bp, Arabidopsis thaliana landsberg
ttaattaccggctctctaacgtatgatctagaataattaactggatcactaacaaggatccagagtacttaatgaatctctaaattccatgatctagaataaaagccgaatctttaaaccagtttgtcatttcatcgccttcaacttgattgattgaaccatgaaaaggaagattaggccaatgataagaagacatgtagcataagacatgaattttcgaataataagtctatgaagtagtaaaatcagattaaaacacccatctcaaggaatcataacaaaacttccagtgtaaaccaggtactctaaaactatttacctactgagaccccctccttcaaagttatataagatgagaaccagattatagcatcgtgacttaaactcagaagaccggacacaagccgataaagagtttactcttctttctccgaccatggaaatctgctgcctttgaatctcttacacttgcttgtagaagaggacataggcttgatcgtgcaacaccagttttgtccctatgggggtcacagaggcatcatcaaaccttagccattgaccattctttcgtcgagcatctgtggtgtagtgtccttttgagggatcccatccgtggtgggtaattgttgccacaagttcatatctcaaactctacaagaagaaatttgactagttcacaacagagggatatcacatagagagtaagagaaatgtgaaacatagacagttctgcttcggctttatacctcattggatagagaaacaagatggctgcggtttaagttgagttcaaggggaaatttaacgcctttacgcagcttagtactcccttggcttccgtagctaaaacgcattaggtgcagtatcattatctttgagagtttctgtatctttatcgacttactagcactcactacaccagtctgaaatgagagaatccaaacaagtaacgaggcaaattattatttgaaatccataagaaatattttgggtcctaaaatcccacagcttcaatatagtaaaaagagaaatagtttaccttcccagtaaccgaggctctatatccttcaagatcttcttgggcagaaaacaaatgcaacgcgtcttctattccttgcacaccgtccggatgaatatcaaggtgtagcaagagatacggctgtacagtagccgaagctttagttcctgtaccataaatgacatatgagaaaattctatcatgaaagaaatttagaatgattacaaaaaatacaaataccttttgccttcactacgcttttaagctgcccgccaaatatctcactaagctcagacggaacaaaactttgtgttcttgtcacagctgatttgtttttgggtccaactgtttcccattcatcaccatcatcgttggcagaagaaataaccgatgacttagaagcggtgactttgggggactgttccttgagtttcaacaactcatcatgcatttggtccattataaaactcaaaaactcttgagcatcttcctgcctgccagtacatgcacacaaagttagaatagggacatacatatgaactatttaaaacagaggaaccatcaaaatttagactgtgtaagggagtcactaaccttggcctaccagacatgttgttgagtacatctggggtaaaatttctaaggactccttcgaacatggcaggtctaaaaggtctaccagcctcaacaacagtaacgttatttctgatgctggaactgcttggcacatccaattcggagatgaactcggaaaatgcagctaaggttggagagtcagcctgataaaaaagaaaatggaagaatatcgataagaaaacaaatattataggaaatagaaccaaaatcacaaaaggaacaatgtacgttaaaaacctttagaatatcttggagttgaattttctggaggagctgcacaaaaggagaacatgaaagcaacgcttgtagtgttgcattcaggaagcacaagtttccagcgtttattaatcctcttggtgtaaagtctttaacaggtggaacagattcagtaggaaccttcaggtttttctttctttgaatgcttccagacgaagagtcacttgagaaatcttcattgtccagcgcttgaaatttagagctcgaagctttatacacaggatcactttcaccatcagacatagacaagttatccaaaccaataggatctgttttcaccgccacaccattgttgagagatttgttgctttcagagatctcttttatgattccattttgtaccacatgctctggaactctcaaagagttctttcttgggagttttgcatcactatcattgttcttatccgagctggcaggtctagaagcatcaagtctctcttgagacccagcagatttaactgtcccatcagcctcacctttcttcaactcgccattagtatttactgaagaattttccgcagcaagattcaaggagccaaattgaatacttcccacacacttgtctttagaattctgaggatccttagtgggtttctgctcaaaaaatgacctagtttcatgttctgtaaaggatccaaacacaaatacctgccatgaataaaagtagaatagcaaatgtaagtttcaaaggagaatcatttacagaacaattaagaaaccaaatgataatgaaagttaagtctctcggatatacattgacctcagagaaaaactacaaaatgatcaaaacgaagctataaaaagatactatctccatgaaactaaaccacctaaaactagtctctattgcaattaggtgagctccaaatgcacctctgcatcgttctctagaccatgagaactaaaccttaagggaaacaaaataagtgaagaaactcaagaggcaaacaacaagtagtaggaaattaccttcttttcactcatatttggcacatagaacgcaacggagaagagattgaagagcagcacaacaacaacaagagcccaaaagacgtaatctgattcagagagagatccgaaacgaaagaagcatgagaaatctcaaaagcgaaatcaaaaactagggtttgatgcaccaacaaccctggatgagagtcgtagacttgagaagacatgaaaggggtagagagacggaggaagaagaaagagaggatttgttcttctctgcaaattcgtaatgggtaatcatccgaatttggaggagagctaagttagagagatagatagagagagagacggacctttcggggattttgagaaaaggaaattagggttaggtttctgcttctgtcttttgtcggatagttttgaggaggagaacggagcttagcttagcgccgtgtttggatcttcttcgtctcctttttcgtcaaaggcgtcgtcgtatctttacaaatataaatctcggttcggttttgtattcactttggtttaattcggttattcaacaaaactatctcaaacagttgttgttactcctgtttggtctgaacggttattaaaaactcacgtgtctgtaggggttccatgtctcgggttcgaagcttgtctgaaattaattttaaaccttaaaaaaatctagagagagaccaaaaagccgacgattagtccaccgtgactccaccggtccctccaccgtgacttcaccggtccctcctccgattagttactcttcttcttcttcttcccccgtttccgatttgatttgtttctgaagttgctgatttatacatgtatcaggaaatggctttaagagacttttggtgatcaaagggcatgactttcacagattttccagcaaaagtcgtcaaatgtccaagactcattttctccactgttgttgttgataagagtctgaaacaacaaggttcgtattggattcctcaataatataatataataaattatgttgattgattttctttcttcgaatcctgagctgttttttcacataaaaattgataagcttttgacttattattgaaaatcatgtaggtcacgacgacgatgagctgctgctgatgtgagagagacctttgtttttattcgtcttaccaaaccataaagaaagaagagagaaaactagaggaagaagaagaagaagaaaggagacaaaacaatgagtgtgtctttgagtgtgatgtcattcaatcttcacgatgatctacctgaagaaagccctaattcatggctcaaaaggaaagatttgtgtctcactgtcatcactagttactcccccattgttctctgtacccaacaaggtaataatctttagccacaatggatcaatgcttgttagatctttgattccttcttcgtattggtgattcaatgcttgttagatcttgcttccttctttatattggttctccaagaaggcttctttttcctgaatgctggagattgattcttgtgctttttcttgccttctgaaatattgaacagagataggattttcgttttgatcttttgttatcatgtttacattggttaggtgtgaagtcgcagttggattatcttcagcaggggttgccaggtataattgaattctctttgatttatggaagtctaatctctacttaaatggtgtgagttaggtctaattgaaccctgtttgtatacagcagtctgcttcttcttaagttcacagactagtgtgaatcttgttatcaatcgtagaccactcactcttgttctcaatctactatgtaaatctatttgtgatctactagatttaattctatttttagtatatgttggtattgcttaaatctgatagccaatttgtcaatccgtatccttttttgcatcaagttcaagttagtgtttttaggctacaaaagccggagtctagtgcacttaatgcatctgttttatggcaatggaatgcatgatattctcacatttacaggtgctttctttgaaatgatggtggtattgtttatctggtttttgttactgtgaaccatggagcttagcttctagtttcacatgccttaataatacttcagtttgcattgtttctttgaacttaaatagatggtagtactctttgcttgcagcctatgatcaatttggcatatcaagaacaggacctggggatgctaatgatgaacactgcaccatcttcttcaacaaggaaaaagtattaattcggttgataagacaatacataactacgctctaaataattaatacgctgcttgatactatactttatactaattgaaggtagagctgctagagggtggaactttttggttgtcagagtctccctcggtccctggaagcacggcatggggttccgcagttccttgtatagcgacatgggctatatcctttttactagttgggttcattttagttaaactataattagattagtttatgattttggtgtttttgtcctatatatcagtattttggttttctttgacaagctgcctacacattccaacttaaaggagcggagccgcctggtttttcgtttcagatagtcaacacaaacttggatgaaatcagccctcgtgcccgtaggcgaagtgctttactcacatggcaacacatagcatcattacctcccactttgccggttgtgtactgtggaggattcaacacacagaaggaatcaacaacagggcggtttctgttgggcagatctaggtaccttaatatcacattcacaagttttgtgctttttaccaatctcctagagttttctttcagggctcctagttaatgcaagaatggctaaaccattcttcacacactgatcaactagtttcaaatcaaagcatatttacttatttgactgctgatgaatggcttttgggcatcattcaacttgcagagagcatggtgtggtaggagatatgagagacgcatggccaagtgcccgagtaagaaaaaacgtcgctctcataagaacataccatgatttcaaaggtgtgaaacattccaccctctcatgagctataaaaatcatttatctccaaagcttctagatcataacatgttgggcctttgttcaggtgacaagcagggaacggtcgagttcctgaagctgatattcagagcgttatgcctctgctgggaccgacagacgcaagatctacacacggattggatactttacagaggtagatctatagttcctgtaatgtgcgagatcgtaaatgataagattgacgacttgtatccttcatctcactaccctgtgtttgctgagtttatgcttcctcgttctgtaagaatgcttgaacctactcctcctgtttctgctcctgctcaagaggaaagctagaacacatgtcctcacttgcttaagctttggactatactgattgttgtgcaaatgagctctgtttttttctcggcgcctttatttattgatttgagctaaaacatattcaaaagagatttaaataaattgttttgtttgctcctaatagtttgtgttattattgatgaccactgaaacataagattgacgacttgtatccttcatcttgtgctcctaatagtttgtgttattaggtaagtgatgttacggaacacaagaatatctacaaatagtcaaatactttcaaatgggtaactcgtcatattcaagcgtcacacttcacagttcacacaagcaaataaaaacccttttacctctctgagaatgttaaataagaactgggagcacaaagatcacctgcctacatcttaagaagaattgttctgtacccactcaacaagtgtcgcaactccaaacccagtcgcagctttcttcttctcgttccacacccgtccagccatatctatgtgcaaccactcaacattctcgctaacaaactgcaaccattaaccaaatccggttcttcgttagagaacaatagaatcagtattgaagtgtgtttttttgtttccactcttatggtatcctcacccgtttcaaaaagagagctgcggtgatggatccacctgcacggcctccaaagttaaccatatctgcaacacctgacttcatcatctcccaataactctcttccataggcattctccataacttctctccactcctctgtgatgcagcaattacctccttggcaagctcatcactagctgtgtacatgcctgcagaaatcaaaaatcgaaaccaatattcaatcatcacgaaagaatgtcattctgtctattttatacacaagactatgtacctgccattgatggtccaagagcaacaataatctccccggtcaatgttgcaatgtcaacaatctgcaaatatatatgattcacaagttgagagaaaacccagcagaaagaatgttattgataaggggaagaatctttgaaacaataccttatcgacaccctggttgcaagcataaactagagcatctgcaagtgttagccgaccttcagaatcggtgttgttgacctgcaataccacccacaattagtttggcgtaaaactaacaatggaaagctcgaaccttttgaagctgaattcatatggaaacggtgttatgatacctcaatcgtctttccgtttgaggctgtgaggacatctccaggtctcattccggtaccacttatcatattctcacaagctgcgacaataaagtgcacctgattgtgcaacgaagcatttgtttaggtacattcacttaactcagaaactcaagctccgtgtgataaacttacctcaacaccgggaggcttaatttcaccaatggcttttgcagcgccaagaacagcagctgaacctcccacatcgattttcatgagctcaattattaattcaggcccaattttaatgttgtagccaccgctgtgaacaaaaaccagatggtcaataaccaataagtataaaagaaagagattgatgcggcaaacagaagacaacagctcttgcgagtacctgtcaaatgtcaatccttttccaacaagagcaagtttggttttaacagggccactagaaggtttgtagataaggtggatgaaatgaggtggattagctgaagcagcagctacagcaagatatgaacccatcttcaattctttgcattgctcctctttcaagatgtttgcagtcatgacattactgtacatggaagccagattcgaggcttcctcagctagtacggctgtaagatacaaagcagattagagtcaaatgtttgaaataaacttcaatagacatgatgctcacattataaaaaacatgagaagtctaagagtatgattataatccataccaggggagagaacattggctggtgaattaacaagttctttcgtgaaaattacgccataagaaacatgttcagcatacttaagcttgttctctagttcaggtccagtgccaaagccaatgaatactacagatttgagagatggtttctttgactcagacttataccgactgtcttcaaacaaaccaagcactgtgcctgtcaaaagtaaaaaacgattccacaaaaggatcagttcaaaaatggtaatgaaacaagcacttctcaaggtttactaaaagaaatcacaacctgaagctatatctgaagcagaactgagcttagattcatcagaaaaactctcagaggaggcgagaacaactgcaacactgctagcttgagaagctttagcagctgcagcaacagcctcaccaagactctgaaaagccgaaagggttgaagcagatttttcaagaccaatcaaaccgacccgctttgagccgagacccggaagcctaagaactgttgactggccaggttttccagaaaaaattttcctcaggcgagacatgagctagaagtccacccaagtgggcatcaagcttcttcagtatggggtgctcgaacttggagttggcatccttagccatatctttctgcgtcactccaacagggagcatatcaccttttcattcatggacgttaatctccttcccggaaaatgagatctgatacagaaaacttgagtaatcagaatccacttaagcatctggaaagctaatctctgacaagactagaccataatcgaagtaagcaaatcaccggatcatcttaatcggaaacaggatagtgaccaatctacaaagcattcactagtctagcgcttaaacacataacagctaagtcaaaccttacg

SEQ ID NO: 38476 - DNA, 1929 bp, Arabidopsis thaliana landsberg
gattttttaatctacatccctgaaacttagtggattgatagatggtgatttcttaagtacaacgtgtgtgtgtggttagggattttacggggatccagcgcttaagccctttgatcattacataggtataaaaccaatgggtttacagaggtataaaacagagaccatctcttcccaatatgcgcttactgataaagactttcgcgcatactgggaagacatggtctatgtttgtctccaaaaactcaaccaagacaaggttagttctttctccttttcctgcatactagtgtagatgggtatagctcataagtctgaatcaagaatactaactaaaggtctagctgttagagaggtctggattggtattttgtctgagcttgaggattcagtctcttaggtgttaacagtagcaatggttaggttgacaggcttcttagaagttgtgttctggctattgtttaagaattttcaacgctgaaaagtattcaacgcaaacttggcattaacattatcattcctttcttattgtggttgtaggaatcgaatgtggagttggttgaaattgtgagaggttattatcgcgcaggaccgagatcaaagtcatacattacatttatggcgagggagaaaccggatggacctcttgtggagtatcaagccaaagtcatgatctatgcaggaaacgagaaacctcctttcccgatactttgcagaccaagtcctaaactctctgtttaatttaacatgcatttgaggtatgatatcattctttgtgtgttgtagtcatttaagtatatgtgtaaagtgtaatgtgttagtttttattagatctcatgggatgattgactttaatctttctttctaaattgcagattgtatatgttgacgcctagctaatcaagcttcagatgcattgaggttatagttctaagctttatgttaagcgtttggtgtaatcaagtgtgggacctatatatgtgacctatgagtctatgagtataatattatgttgtgcctttaatggttatcaatgagtttatgttctaatcatactaagaagatagccatatacttcaactagtgtaaaaaatacaagtcaacggaaacttgcacattattagagtcaattaaaaaaaaaaatcagaaatacacagtcgataaaaacaacaataataacgataattacatccataaaaataataataaattatttaccatcttcacaagataattaaatatgtttttattttaaaacttataattagttaaccaattcactcacgtaaaagataggacaagtctttttgatgataattcttgcatatccgttgaatccccattttgtcccccacgtgttttggacaatgaaaaacaatttgctatcttttgttgtgccaaaacccacaatgatcaaagcgtgcctttccatattttcttttggttcaggcagaacatagatctccttgaactgtttcacataaacaatcataaataaattttatcggttaatagccgttgtattgatggatagttttattctatacaaatacaaactatacatttctttagttacctcataaacttgacgaaatattccacataaatcaacacttataccaataggaccttgagtgagtagtaatcctcggatttcctccggagtcgcgttgggtttggtaataaaacttgcctttattttatacatctgctaaacatatataaaaaatcacacatatatagtatgtggaaacgcttgtcactttgttttttttttcctaaacaggatattagaaacaaactatatgcacaaagagctaaaaatgcatgtaacatatagaaaaagtatatccttctttattataaacgaatggaaacctgtgtgccataatctctttcaattcctttctcgaaaatgtagtcaatagc

SEQ ID NO: 38477 - DNA, 3289 bp, Arabidopsis thaliana landsberg
tactccaatacaaattgtttagtcgtatgtggactattatagattctgattcgcttgtcataatcaaatcattcataatacaattttagtgtttatattgtgtgaaacacgaacatagtccaccgcccaccgccactaccgttttaaattgaaatttgtgaacaaataagcgacagtcacctatctatatactttgaaataaaaaacttaaaacaaaagtgttcaaaaagaataatctctaaatagagtaataaacaaacaaaagatctccggtacattacaatatagtaatgtcttttctaagacagcgaacaaatgaaacaagatcaattttttttggactttaatttcaaaagctgcttgatcgatccaacaaagaaacaaataatttttaattcttctcaaaaaataaagtaataggataaatccaattatccattttaaaagtaaaaaatttaacgtaaatgattgaaaaacgtgtcccttgtttcctactttctcgaacattcattctttattctttttaattcccgaatagttacgcttacgatagaaaattaatgagcttacataaatttaacttctgacatttacggatgctttagaagaaaaaaactaaattactctattagtagtactaattgttatcggaaacatacgtttgcttggtacattataataatggaaagaatcttaagagataaatatacaattactgggaaagggccgtacattacattgataagctcaatagtctccaaacctgtgttgcctactgcgacctactctctctctctctctatgcgttatctccgtatcattttttttttttatcaacgtgtctttgtttttccacgaaagataaaaaatcatgtcattattattagttttgactgttgttagtactaatttaaactttaaacatatgtgacaaaaaaaaaaaaaaaaactttaaacataaaagcaacgtcatgaccaaactttagcattattagccacataagtacaattattttcattttttgtcaaaaaattgatttataaggttggtaaagaaaagactaaaatatgtatcatgatgttttcccgataattaggtaccaaaaattatagtcatcgattaaaaccacaccggtgaattttatctttgaaggaatttttttatacgttttactcattttcaaatgcctcaaatatttcaattaaacgtttgtgtgtgcctatttcacataaataagcttgtttgggaattgtgatagtcaaatattgcgaccatcattacaaatcatgttttatttttcatgtcactcaccaccatgaattctatgtgagttttttccttctttaaatagttgtatccctatgtagtataagttaactcgaatcttagcaactaaagctaaacaaaatctataaatccaagtattaaaccacaattaaagatgtgtttttaagtgtgtgtgtgtttatccattgttcaaagtccaaaactgaaaactttgaaaacagagccatctacgtatgaagagagccgacttcatagggatgaaaaacagagcatttcactgtttacaataatctcatagccgactcaacaattccaaagctaaacaataataaacaaatcctcataaaaagacaaatttcaaagacaagagagaagagagagatagagagcgtggcctctaatcaacccaacaccctctgtcaaaaacaagcctgactttcttctccatccccatttctatctgcgcatgtctctctctttcttctccataaaaaaccaaattctcactctctcgtaccctaaagtttcaacctttaaaccctaaaaccaaaaaagcttcagtcttttgcatcacttcccttaaagcttcaacctttctccgattatgccgacgtctgactccggtgaaccacggcgaatagctatgaaacctaacggcgtgacagttccgatttctgaccagcaagaacagcttccatgtcctcgacgtgactcagacaacaccaagttctgttactacaacaactacaacctcactcagcctagatacttctgcaaaggttgccgtcgttactggacacaaggtggttctctccggaatgttcccgtcggtggtggaactcgtcgtagctcctcaaaacgtcaccgctctttctccaccaccgcaacttcctcttcctcctcttcttccgtcatcaccaccacgacacaagaaccagccacgactgtagcgagtcagactaaggttagtaatgtaacttcaggtcatggaagctttgcttctctgttgggtttaggaagtggaaatggtgggttggattacgggtttgggtatgggtacgggtacgggcttgaggagatgagtattgggtatcttggagattcttccgtaggagagattccggtggttgatggttgtggtggtgacacgtggcagattggggagattgaaggtaaaagtggaggagacagtttgatatggcctggtcttgagatctcaatgcaaaccaacgatgttaagtgaaaatgaaaccgtttctgatttcttgcatttgtcttcttttgttggtgtctttttggaaatttctgtttgttttcttttttgtcctagaaagaagagcaaaagaaaccaaattgaagcaaaaatgtttttatttatcttagtttttgaggtccaacaattctggtgtataaatcctctgttcatgtgacgaacatatttgaatggatttatgagtaaaaagtaaaaacatttctttcgttttatttttggttggttaatattttgaaaggaatagtcaaatgtaggaagatggattgagcataaaagtccaaaaagggcaaaagtacgtaagtactgttgcagaagtgagtaagagatactctgttgctacatctttgaaatgaggaaattgcgttgaacttaattttgtttttattatagataaacatcaacaacaacattgttcatttgcagtgtagaagattttgtatatcaaagtcatgtgagtctagtgtttagcatatgagacaattcatatgaatgctaaaaaaaaacctttcattcgatcaatggattagaaattattagggttaatgtagattatggtgtacttatcagctagtgttatttttttgtaaaaatctttaggtttaatccttgtgtcaaacatctcagctagagtgtacttggttaaacgttcaaataaaatttgaatgtagggaatatagctaatagatattgttgtgtagtctcctattgtggtcaaagcaagaaaaggg

SEQ ID NO: 38478 - DNA, 5061 bp, Arabidopsis thaliana landsberg
cacttgtcactgttatcttcctgtatgatgctgagtagtgataggttctgacgattggttagagtagtgtagattctcagtatgctaggtgattgagtgctagggagcgttttcgctttaacttgttgactctgtaccaagatagaattccagagattcgtgactctgtaccaaggtattggttgtagggagcgttttggctttaacttgttgattcgtaatgcctgttaggttagctctcgtcaatggtgattgagtctgggactaggttagcttgagagtctctgttgcggtggcacttagatttggttaatgaacttgttgtctagggttaatttattgagcatgtcaatcacctgtaaactgaggaaacgaaactactcaattaccccatccttaggaattctttgtctaattgattttattgattactctactgctgtgtactgcatcctgtcatctgttgcttagtttctgcaattctttactgttactcgacctgatactcgaccacccagttgtctggcaacagactgtgcagtcgagtatccctgtttcattttctgtctgttactcgacctgtcactcgacctcacccagtgctctgcaaagagctgtgttggtcgagtgttttactgtttctgtttgattttctgttttctgcatgttcacttaggactgctagaacacaccaaaacctgttatgcttggcttgacttagtgacttctgatcacatcttgattgttagcatcacacccatttggattgacaatctaaaatactacaacgatatgattggtgttttaggataattgacttaaaaacctattatcagggcctctcctacttacgtggcaatctttgaccggtcccgagcccattatgcgggatccgacaccaacaatatttgactccaaaatactaactaagcttcttcttgcggctcaaagctttgatggtgtagctgtagtacgtatgactcattggctttgtatcttctaacaaggaaacactacttaggcttataagatccgattgcggttctagctcttatacctaatcaaacaaatgatatcaagtcatattcaactcctaaacattaaccaagcttgttattgcttctcaaagctttgatgatgtagccgaagtttgcgataataagttttaatcaattatcctaaaacattaatcatgtcgttgaaggattttaggttgtcaatccaaatgggtgtgacgctaacaatcaagatgcattcagagttcacagagtcaagccaagcaataacagttttggggtttctaacagtcctaagcgaacatgcaaaaaacataaacaataacagaatcactaaaatcactcgaccacaacagactgatgccagaagtaggatgtggtcgagtaacatgcgggatatgaaacaaatatactcgactgcaaagtctgttgccagacactgggtgtggtcgagtatactggtcgagtaacagacatgaaatgagacaactgtactcgactgcacagtttgttgccagacactgggtgtggtcgagtaagttgctcgagtaattgcaaaaactaagaaacaggcaatgagaacgattaagcgataacgataaaacagagaaataatatagacgagaaattcctaaggatggggtaatcgagtagagtggtatcctagcctattcgaatggttaacaagcgcaatcaagctatccctagacaacaggttcaacaacagatcaattcactcccgtgatagaaatcctcaagcaaagctagcccagactaattcccattaacggaatctaactatgcaggcaataagaacagactgataaagtcaataaacgctctaaacggccaatcccttgggatagagacgaatatctcaggaactagtggatcaagcattccatcgaacaccttctgggtgcgggaatgctttggatcgaattccagttgatcagaaagaaataagcagtaaacacaactagtcctgaagggattcaatcaattctaaaacttaactattctacagactacggattccacaactactctatcccatccttaagaattctaagtcactactcagacaacatgctcaaagacataaacgcaggtaaatgataatattgcataagtatagagataaagagtagatgacagatgacagatgaaatcaaatgcggaatctgaataacttggaaaaatctcgaattataggttgcagaagcaaaagcggcacaaccagagtaaaacagaaaataaaactgaagcaaaaactcaatgtcgactagacctcttaggacagaaccctaaaacatctatttatacaaaacgaaagaaaatgatagtagacgggccaataacctaatcgccacgcccatagagtgataatgggccgagatgggcttcgtgatccgatggaggtccaggccgcttccaaacacttcggcttctcctcttctcttccttgtgctcagcttgtctggttgagtgcggatttgagtagactatgaagatgtgatcgagtgccaagtcgagtgatggtgttggtggtgagtgatgatactcgaccagggggtcgagtaacgtggtagactgaacggtcgagtgtggtctggtggtgtggcgaagtgatactcgaccaggggtcgagtggcgtcatcgagtggcctgagctgaggttactcgacctggggatcgagtagatgggaagaatggctccatagtcactcgaccagggggtcgagtatggtgctggatgcacacgacctggtggtcgagtatgtcttctggttctggctcatttcttccaatttgctcgcaaacaactccaaatcacctgaaaacaactcagcaacgcaatatgtatgcaaagctatcctaatcatgcaaagtatgcaagaatgatgagaaatgatataaaacagtgatgaatgatacaaaactggactcaaaacgatgatgaatggacagtgaaaacatgcaaattatagacatatcacccatcacgatggttgcataatctctcatttcatcctcatttgaacccaaatcagcatagttcttaccaagagaacttttattgatgacctccactctagacagtttctcgggcaattctggtggagtgatgacgtcaacagtcaaaggatatctactaaccatttcacctgaaaatatatagacaccgacatcctcatcatcactaatgtgtatctcttgagttggtcccaacatcactgcattgtacttcatttgcaatttaaccttactttcatctaatccaaggttcgagcaaatcttactttctaacatagagagagttattttccctcctgggtattcatcatcaagctgtacgttcaatcttttcatctaaaatatatgatcaccttctccaccattgtatcctacgacaacaatacaaaaactctgtcaaaaaaactagttatactacaattttgggtaacacaagtataactagtcatactacacctatctgtataatacatgtataactaataatactaaatgaaaattggtaatactactgtaccaaataaatactacatgaaaattggtaatacaactgtaccaaataaatactacatgtaaatggttaatactagtgcaacaaagtcatactacatatatattttcaattgaatcatgtgcagttatactcagttctaccagatgtatttcccgacaagagctcaaattgaatggtttcgggttcaaaactataattcactatgattcagttattgtaatctatttcttatccatttacagatctattcaacctatacagtatgcataaacttccaatgtgcatacccaaacacaatttgcttaatcttaaatctaattgacaaaatctcttagttctaatcttcaattttaagctctattcagctcgaaaaacataccttttctttctacgtcgacgaagctcaccgaagataaggatatggcaacaatggtgatgtaaatcgaattccggcaagagagaaatgagtgagcgaggagagagagtgagctcgagctttagaggagagagagagagagaggagaggagagagagagagtttcacggattctgttttttttttccggtttcaatttttttttctttctaaaattatttaattttaaaatgaaaattagagaaagaaggaggaggggtaaattggtctatacacatctcattaaaagagaaagggatatagagataataagaggagttgagagatttgttgtttgcagaaagggagttatgagatcatttctccgtggacgaggagagacaagagggcgtctgtatcgctactatcgtggaggaggagagacacgagaaagtctcaatggaagaggagagagacgaggacgtctcaatggaaaaacccgtggaggaggaggggaggagacacgaggacataaatgtatttggttcaaatattaaatataaaataaacttttatatgtataaatctatgaataagtatatgtaatttcgggtaagttgatactctttcaggtatcgggttcagatcggctattatcctatacccacgggtacgacaatctaaaacccaatagggtaaatagctaatatacgtacccgccccaaaccggtttttcggatcggtttcggttcgagttttcaggtacggtttttttgccaaggcctaccataacttatatttattatttcttatttaagacatataattatgttttcttatctatctttttttaccgctttctccgtcttcttcttatttactctacataatgaatcaattttatgatgtttacattgctaaacaaagtctatataatgtgatatgcgcataaacaaaatatgcttatgttttgcttatgttatgtatatattttgcttatgttatgcatgtatctatatctttataatttactatcatctaatcttttcatatttctataaagcctgcactttcttctctccttcgtgatcttcgaaagaacatgttctttaattaataaaaatttctttaattacttt

SEQ ID NO: 38479 - DNA, 245 bp, Arabidopsis thaliana landsberg
aacggggacgacaaaaagccaacagaaaaggaccaacgccccgccacacccgacggagggccgacaacgggcaacccgaaaaggcagcacacgccaagccaggccacacggacgaaaagcaaaggcggcacaaagccccaaccaaaaaaaaaaaggggaaacacaaaagagggacgcaacacgaggaccacccgggaggacacccaaccaagaacaacgcacgcccaagcacgcagaacagcgga

SEQ ID NO: 38480 - DNA, 2654 bp, Arabidopsis thaliana landsberg
taccctggcaacgcctccttgcttttcagaggaatcaatgatgccattgaaatcgccagtgcggtatcagggatcacttctatatttgcctaaattggtgagcagttcccaaatggctttccgctttgctttatctggttcaccatatatgaaagtaacatagaaaaattttccggcatcctttatatgtgtgtcaataaggttattgtaggtagatagaatcttcacttccacttcctgtttccagagaagggctaggtcaccgcctcctagactatgagggggaacaagatgatgtgcaaagtagttcatctagtttaaagaggtgagtcgagtcattagtattcttggtttccataaggaacatgattgtggtgagattttagagtgcatctcacgcagccgctggcctattgtggggctccccaacccacaacagttccagctcaatacttttaaggaatctgatttggtggatggtgaaaatccaccttgtctttcactcttgctggtatgatattaactgttggactacgtaagtttgtggagggatttgacactccaggttggagattcagcttttgcttggctttaatagttctactaggtccaacagcctcttgaatgactctgcgttttcttgcagcactttcagttgggtctgcacaactcacatattgaagagtaacatctcttaggtctcccatgatttgatcatttgtagggatgggaggtggtggtggtggtgtgacctcaaaggtgataataggtttttagtcaatgaaacctaaagcagtatcatgtcgttgtagtatttgaggtagacaatcgatctgagtgtgaggctaacaatccagaggccgtcagagttcacatagtcacgccaagcaacaacagggctgagagtttctagtagtcctaagtgaacatgcatgctacagaagttcacgcagatacagtcaaacactcaaccaacacagcttgttgccaagccctggggggggggtcgagtgataggtcgactaatagacagaaaatgtaacaaggatactcaactgcacagtctgttgtcagaaaactgggtggtcgagtatcaggtcgaggaacaggaaaaatgcaaaaactaagcaatatgtaacaagatgcagtaaacaacagcagaataaacaaagaaatcaattagataaagaatttctgaggatggggttattgagtagtttcgtttcttcagtttacaggtgattgacatgctcaataaattatccccagacaataagttcgataaccaaatctaagtgccaccgcaacagagaccctcaagttaaaccagtcccagactcaatcaccattgacgagagctaacctaacatgcattacgaatcaacaagttaaagccaaaacgctccctgtaaccaataccttggtacagaaccacgatctctagaattaggggttcagacatttcatctaacaccttttgggtgcagaaatgtctgggctcaaatttcagttgattagaaagcaataggcattaagaacaactaatccataagggatctataaatcaaactcaaccacctagtatactgaggattctaactactctaacacatcctaagaaacctagtcactactcacacatcattgtagaaagcataaacgatgataagaatgaaaacatgatagcaacagagtaatagcgaaatgataataggaagaacaacttactgaatgaaaagcaaatactgaatagactaagagaagtcgtgattacaaaatgtcaagaacacacagtgtatgcggaaagaaacctttttccaaaaaatgtaaagtagaagctacttatagcaaaatattcccaaaccctaatgctcaaaacgacacagtattgggacggatttaagaacggcactcgacccagttggtcgagtgattggttggagtcttcttctcttccttgtgcttgattgtttagttgagtgcgtaatggagaagactctgaagctggcagtcgagtatgatgtcgagtggtggaagatggtggtactcgactttgtggtagagtgattggtcgagtgtgcgatgatgaagggactcgaccatgtaatcgagtgggagatcgagtgaaggtgatggtggtactagaccaaggggtcgagtggtgatgtgatatgatgggttcatctactcgaccagggggtcaagtggtctgttgaggtcttgaagcttctactcgacctcggagtcgagtggtttgacatgatcatgtccgcttcttccaattagctcgtcaacagttccaaatcacctgaaatcaacacaaatatgcaacatgcatgcaaaactatcctaaacatgcaaagtgattacaaatgataagaaatggtataagcagtgatgatatgatgctaaagtgatgacaaatggatgctcaaaacatgcaaaatacacacttatcaactcccccaaacttagtctttgcttaagaacaagctggaggtgaggtttgaaagcggggactcagaaggtggggactcggagccaaagcagcagataaaccagatgaaatcaatgtccaagttgaaagttctaagttgcgatatgatcgaattctactcaaaaacgttagccatgccttttatcaacaatcgact

SEQ ID NO: 38481 - DNA, 2819 bp, Arabidopsis thaliana landsberg
aaccggtacaccgcgggaacaatttatcttttaaattaatatatataaaaatttgtaaattgtatctatctataaaatgtttttattttatattttacaattgttattaagtaacgtcctgtcaaactcgtcccgccaacccgtcgtgtaaaaaaaactcatttattttattaatgttgatattatttatgatatgtttatgaattattgtctaaatattttgtaattttgtagtaattaaatgctattaaatatctctgcggtttgatgattataatcgaattgttataatcatgcagaaaagcaatatcaaaaatgataattttgtagtaattaaatgatattaaatattttagaagatttattttaataatcaatcatgtagttaatgtcgagagattttaagaagattgttaaatgtcaaatatttaattagaagattttttttctaattatcaaaaacaaacattaaaattcaatggcagccattgtaaataagtctcaactacaagatttatttcataaaatggatggaaaaatgtatatgtagatgctgaaatcacaatgttaccgacaataccctaaccatatgactataaaaactcagctggttacgaccaaaatctgtcttgagatcaagataatgtacaataagccaaaagaggtaaaaatttaactaaactcataataagccaacaaatttaggtttagtttagtaatcaaccccatcattaatatattacagtatatcgatgaacccacatctatcaaataaattaatgagtctaatgatgatataacaacacaaacaattccacaataaacaaatactccatagtccagacttaaacattagaaagaaacatattcaagttgtcccttcgggaacatgtatccgattttttttttttttaaatcgggttaaaaactgtttacatatgtacaccatgtgctttagctcctatacgtttacgcagaaaaaacgtttttcttaaaagtcaaaataagaatctaatctaaagtacaattcgagccctttatgtcaaaaaaactttgcttcctttgttggcaatccttattttttattttatccggtggtgatccgtttatactttatataaatttctttcgacttgattattgaaaataactcattcatacttaattaaatttaatcaagacaactagaaaactcaaattataactgaggagtaggcctcacagtgtctgcatgggcaacacgtgtctgtgtataagaagacaatggccatgattctgtaataagccacacaggctctcactgagcagaaacttcagcttttagcattttaaccttttataacacaaaaccctaaaaaaatacactgggccactctcgtcttcagtgtgctaaaaacccacctataattattttttgtgagatcatttttcttgcaacttgttacacttatctcagttccccgacaaattttgtatgttttacgttccaaattattgtagtttaaattacactgtacatatgttgtttcggaaagaaattcacaaaagaagaaactgggtccacatcattaggtagtatattattatctattacttttgtaataaactaatggaaagtttctgcagccgtttctcattttaattgtgtgtattaacctcaccaattctcgatacaatattataagttataacacttcaacatcgtacaaacattcttagagagagactaagagagcgatagagatctatagagagagagagaggatgggtcatcactcatgctgcaacaagcaaaaggtgaagagagggctttggtcacctgaagaagatgagaaacttattagatatatcacaactcatggctatggatgttggagtgaagtccctgaaaaagcaggtgatcttacttgtatattagttttcaagtaacatatttttttctctaaccaattataacgatcttgcgttaattaacatatatagttaatgtaactaattttaaaatgcatgtttgatcaaatttagggcttcaaagatgtggaaaaagttgtagattgcgatggataaactatcttcgacctgatatcaggagaggaaggttctctccagaagaagagaaattgatcataagccttcatggagttgtgggaaacaggtttccatttttactaactcgacttaattttttatatattatcaattcaagatagtgtattattatagaccgttacaggaagtcttataagattttcaatactgataccattttcaataataagtttgttggggtgggatacatacatagtacattttatacttatattcagtttatcatgttagacttgaaatttaacaattatatgtttagtttggccacggtttgaagcaacgactagcctactgtcgatgaccaaagcatttttcacgtgtagtttcattcatctagctcgtttacttttgtctacttggtcgagctattaagtagtacactttagttacttcattgaacattctcaaaatgtgatacatacatattttcttatattactctttctttctttttttttttttttttcaggtgggctcatatagcaagtcatttaccgggaagaaccgataacgagataaaaaactattggaattcatggattaagaaaaagatacgaaaaccgcaccatcattatagtcgtcatcaaccgtcagtaactactgtgacactgaatgcggacgctacatctattgccactactatcgacgcctctaccaccacaacatctacgatcgataacttacattttgacggtttcactgattctcct

SEQ ID NO: 38482 - DNA, 3295 bp, Arabidopsis thaliana landsberg
agaggccatctctttttccatgggcgctaatattatggtatttaactttttaactaatacttatctgggaacgataagaatttggtggccgccctctaattccgtgaaaaggagaatcatcttatagagaagaagagagtgaacgaatccattatcttccacttgagcgaaagtcaatttttcagtttgcacttccacatcatttacccatcaattgaaaatcagataatcaatcgcgggaagcttccgctccggttcctctccggttcatctaccatttccccattttttttctttccccaattcctcaaacctaggttccagatttggatatttagggtccaccgtttcggatctgctacctccgcaactttaccgggttccgacatgcgcttcagttgacggttacaacatcatctctcttctgggcagcaccagcaagtgcttttaagtcttcgtatcttggttttgtttttctaaacgtaagtttctcctttcattctctctctcttttcctctcttcgttcgatcttcctctcactctccgatctggttgttaatgaaggtacgattcacatgagacatcttaaggtcgctcctgtttctcatacggtttatgcagattcaatattgggcattagattggcggtgtttgttatcctagttttggtgaatcatctcaactggataattgattaggtatgtgttatgtttattaattaaatcggttatcaaggtttgatttttttcacttttgttatgtgttgtgtgactaattgaattgagctgatgtggttttatagttcgatagatccatttgttctacttgtgccgacaaagctatgatttcaaagcaaatcatgtttgtgtttttggatctgaatatgaactttcttttctatatgaaattgccactagattcttttccacaaagtttgagtctttacgtttctttattggtgtagccttcaaatttgttactaatctattctggttgttaatgtatttcagatttttgttgtgtacgtgtatttgtgagacgtggtgggtgcaagaggcgcctaaagacatttctattaataaaggaggagctaataatgttgatgatttaggagaagaaatttcaaagattagaggtccaagaataaaagattcacaagtttaaatataagagttgtacgaaattatcttttaagttttagttttgctttgtactataagttttttaatcatggtttcatatcaatgcaataaaagatggctttctttaaatttgtaaaattattcaaaaaaaaaacaacaacatagggaacaattacagaaatttatccctaaaagttaaaaaaaagtgctatgaataaatcaattaataacaaaggatatttgctattataaaatatataattgcataaaagaaaacgatatatttgacgaagatacgataacaatgctaaaaaatgctatctaaagtgtctcacctacgatgacgagcgcagaaatagcgcttgataaaacgctatgaattagttagatagcgttattcggatgctaccaaaagccaacatgcatgttggcccctaaagctatttgacaagtttaaagaaggagataattgtttagggtttcttatcttgtggttttactatttttcttttatacttataaataaacttggagggcttcaaccatctaagctgctccttaactccattttgtggtcagtaaactatctattatatgtttttcttttgacgaatttctttgcaaaaccaaatcttggattaaaacatgagcaattttgagaaaatatgggcataaactatctcaaatattaaaagaggagacaatgaatcgcattggaagtaagaacttggccccttgaagaaacgacatacattaacaacacaacacccagaagatcaaaacctggaacaaaatcatgaacaaaaagtccaagatggaatttttgcgtagtaatcatcaaagtgtctaagagaacaccatgcaaagctagaatcgaccgaaaacttaagctaattttgactagatcaaaatcctaggctagaaccatccagaaaccctaggttagaaaaactaattgaataaagttttgatggagaatccaaacgagatgataatatagattggtttgttgtgtgttcaagcgtatcatacaaagatgccaaccatgagctttgtaatagtttggcttggcaatgagacaaccaccaatctttttctcctgctttcattaggagtctgagaatggtacctaacatacaaattggctatgagttcagttagatgataagtttttttttttgtgcactcagttagctaattcaaatgttatttttaaggtataattgttgtatgtgtcatctaaaataaacttcaaatgttgcacaaaataatatgatttaaattttttaatttttaaaatttcttataaaccaagataaagaggataagaaatcttttctgcccaatcagattcttgattttgatttaggttacttgattcctatcttactctgacatatatataaggaagttttttttcttttttgttaaaaagtgtaaagtaagaaattttctaagcattttcacattaattcccaaaaagaaatatatctgtgtaccttatatagttcttttgttgatacctaatatagttcttcctaatttgttttttatatttcttctaaatatatacctaagcaaccaaatatttttaaatttgatttcaattttggcataccaaacaaagtgtgttctactacatataaaaacctctttaggagatgtatttttcctgatctcatttatttgattcttatatatcttactctaaacataaatataaacaagtgtattttctttttgttaaaaaaatactataaatgtataagaagattttatgagtattttcaccttaattacgaaagaggaatatatcacataactagatatagttcttcctaatatatttcttcttaatatatacctaaataaccgaatattttcaaagttgacttcaattcttttcatccaaacaaagcatgttctactaaatctaaataccattttaggtgacttattttgtgcttccaaagaagcttgttttttattgtatgttccattttgccaccagtatatacttttaatagaattgcccatacccccaaaactttacttacaccattcaaaagctatgttgtttttgagactctctattcatccaaatattgagaacttagaatcttatttaaaaggtattgatcgtatgaataca

SEQ ID NO: 38483 - DNA, 3762 bp, Arabidopsis thaliana landsberg
tttttgtcatatccactttcccttcttgtgttttcatctttatagttctttataactttctttgcaattttttagtttttattatctttactaaagtacaaaaacacacgacttcaatcctctttttctattgcaattttgaaactttcttcgtagtttcttggaagtgtatgtattttatatttgatttagacagcctgtcgacaaatatcgacagctacttatgttgactttaaatatctccaagcttcagaaataagttcaaacaataatgtaaaataacccacataagcttagacttggaaattggactatatattcgtaaccgcaaagtaaaaatgatggaaatttcaaatgaataaatctatgaggttgttctgaagaaagcaaactaataaattgctaatttggaagcagattaataatgggcaaacgattttatatgatcagaaaaaaaaatctaagcagagagtgaaaacagaaaaacggagaaaaagagagcaaactcgaaaaaagagattgaaaccagtcgttgtgcatcattcacatgtaaagcccttcagggacgccttctttcttcttgaacataaccttctcctttgctttcttgaaatcaggatgtgtcacctgaacaaacccaatttaaacacattagagtcagtgactaataatgcctaagtggtgtgtgtgtgcttgaactgaattgtttagagtctttaccttcatacgacgctccctcagagcaagtagaccagcctcagtgcatatagcctttatatcagctcctgagaattcgtcttttgtcatcacaaactcttccaggtttacatcttctgagagagtcatcttcgatgtgtgtatctattttataaaaataacccacaaactcaatgaacaagaaagttatgaacaagttattgatttgttatcttagcagagttatcaattacctggaagattcgtcttcttgttttgatatctgggagagggaactcgattttcctatcaatccttccaggtcgaagcagtgccgggtcaagactctcgattctgtttgttgcaaggatgaccttaacatctcctcttgaatcaaatccatcaagctggttcagaagttccaacatagttctttggatctcacgttcacctcctgagtgagcgtcatacctgttgttttaaacaacgagtaatcagataccattaccaatgggttatggatcaggtttgtgtaatagtttgacttaccgcttggtaccaacagcatcaatctcatctatgaagacgattgatggtgaaaggtcatcagcaactctgaaaagctcccttacaagcttaggaccatctcccaaatacttctgaatcagctcactaccaacaactctcaagaaagtagctgatgtagaattcgcaaccgcctaaaataagatcaagttagaaagagctcattcccattgcaacaatctcatgcttgtgacagagagaaacgagaaaggaagatattaatagaaacaagtgaattcacaagattctcatccatgagaaaaaaacttctttctatgatctactgtatgaaatctaggtgaccagcatgacaacaaaggtctggcctttgaccgaacaaacgattcactgaatgtaattcacacgttaagtagtaaactaagctatactgcaaacaaacactaatactcattagattctaggtagaaagacaaaccttagcaagcaaaggcttcccagttccaggctcaccatacaaaatcacaccctttggtggtttaataccaatatcttcatacaactcaggatgagtcaaaggaagctcaacagcttccttaatctcctgaatctgagcttctaaacctccaatatcagcatatgactccaaaggagctttctcaactttcatcacagacaccattggatccacttcatcttgtagaatcccaacaacagagagaacctaacacaaaacaaatcagaaaccctgaatccacaacaacacacaatcgtaatcacaacaaaaacaagattcttaaaccctaaattcacataccttattatgcatcaaaatcgaacatccaggttcaagctgatctttatcaacgaaggacaaaatcccaacgtagtactcaggtccaacagaagaagaaacaatagcgtgattctcgtcaatcaactctacaagattgccaacactcataggtgtaccacgaagatcatcaactttagatctatcttcctcagctttctcttcctgaggtttcaacctctcttgattcgccacaaactcttcctccatcaacaaataatccttgatccgttccaatttcagtaaccggagcttacacttagtagacggagtcaccgtcggaagtctcgccgccgcctctggccctttctgcttcctttgcttcctccctacacgtgccggtggtgccgcgggctcaaacttcttctctttcttatctccaccatcaggtttccgatctccttgccgattcaatcctcccgatggtccttgtcccatgattcttctctcttctctcaatttctgaggttcctttgtttctctctttgtactgagattttctggctttgggaagaagaaatgtttgttttaattatcttactttttaaggcccatatataaatattaggcccaaaacaacgttgggcttgtaattgaaactaacatacaattattgataccaaagattatacatcatgatataatttttttttagatctatgtggggttagactgatgagtccaattctgattcacttgtaggtgcagacactggagagatgtttccaagttttgatggaccatcccatgtatacatgaaatattctccttcgaactttttgttgcggacatagactccttcttcttttgcagtccatctacatacattaggatgcataccagtacatgtaccatctataaaatctttgtctggacgaaacgcatcaaaaaccacatggtgtttgtaatttggtccctataacaaacaaagatgaaataaaaatttggtcaaaaatttatagtacaatcactgatactcatcttaatttttatacatgacaatatgtaaagaaatgtataaaaaagttaaaaatgtgttttctcacctgccataaattacaccaatactgagtttttggataaattttaaatttaaactgaaaactttcaccaattttaagatatgtgattgggaaattgtgagatttgctcttgcaatgaactttcagtatcttgtgaaactcaagttgatttactatttggacattgaactttctgaagagaggaggcatcaaataagagtttatagaatcaaacgaaaggaggataacaaataaacttagcaaagattttcccatttttctaaaatctttcttgtcaaatgtaaaaaaacttatgtcagaggtaaatgtgttacaatgtctttatatatttgttcatatatttgctaagtttttcttcttcttcttcttcttatcctcctttccttttaattctataaactctaaattgttgactccgatctctatatttaatgctttgactttgttttcaagagactattgtcatacaatgtattctagtgtcaccattagtacttgtatatatggtcataaataagttgaacgaaaacgaatccatgatccatactctcttagaaatgattgacccatgagacccccataaataacaaatacataaaatctcatactgataatgaattagtagta

SEQ ID NO: 38484 - DNA, 4424 bp, Arabidopsis thaliana landsberg
tgttgtgctcctgggattcaaatgacgaatgcttagttttgacatgtgagactctctgctcactgagcggttgcctgtgctcacgctcatcaaatctcctcgatagaatctctagaggaggctgtccctgtggaatagcagtagcggaggaggaacaactcagcttatctgtcagaaacttgatcgtcttgaaacacttggcgagcagcttgtcctgcttcttgcaccacttctaaagtttactgttattcctatgagcttcacgcaagctcttgctctccctcgctgggggtacatgttcaccaaagtgatacatgctagtgtcgaactccactgctctgtcttcatccatcccatcctcagcatcctctcctagaagatcgtcctcatctaatggtggagcgttctcatagtagaggcgtccaatctcaggcctaaaatcaatgttatctccctcgattatccgtgtgacctcagggctagggagaaggatgttatctctcctgtctatagagtgctcaaacctgaacctgtggaaatcgtcaaccattgcaaactccaggaattcgcagtgacgtaggtgctcgatatccattgctcgcggctcgagtccagcagaaatgagtgggactccacaagctatcagaataggtgtcaccacgccacctatgcacagagcgcctcgtgctctcttgcggttattgctgaccgcccagtttttgtatccacacagatggatcagaagaagtatagagagaggtgtgtcattgacttcaccttggagggacatgccatttttagtttggcagagagttcctttgagggccattgcgatcatctccatatcagagttagtgacagtccctgtaatctctcgggagtagagtacgttggctacagaacgctggaagtacctgatgacagggctgcgtatctgattgctctttgacctggaagcattcaacggtacagagctgccgatggtgatccacaagtctttcaactcttctctttcatacttgggcatagatcccgttccactgggaaagccaaacaatccttccaagcgcttgattgataacctatactcatgaccatacacagaaaatcacaagaatcccaatccttcacaatccaactcatcagaggtcataccttggtagagctctacttgtagcgtggaaaggaattgtattgtctcatcttcatacgctacataagaataagctatcagagtgtccagatgacaactttggtacaagtgctgaacatcttccaacaatccgagttgtgcaagtgaggtcgagcaaggatacctcgtgctacagaactcattcagcttgaaaagcctaacatattcctcagcaggcaatacgtcagtcttgtgcagaagtttggtagctctgcgagtctgttcaggcatgtactcgtcttccagatcttagtgtataagctcatacctctctgtcatcgctctcttccctcgggctatctcagcctttcttctgaagctatcatattctctttgttctctttctggccttgaagatgacggctctgtctcatccatgttgtagtcaggatcaacataagaacagccgctgtaattgctcatgattcccctgtagaaatttagaactcaaagctaaaatgtcaatacattagctcaaagatagcaatgaaaccaaaattgttatcaatatgcaatgaaatagaccctattgatcgagtacagttctgtactcgagtagactgagctgttcctgagttccccttagacaaactggatcgagtaacttctccgaagttggaaggctctgtcaaattttaagaacaagaagtcgagttgctgttgtaggggtcgagtgcttttctgtggtcgagtgcttctttgaaatcggctgaggcggtgtcggtcgagtgcggctatgagactgggaaacgaggtcgagtaacttcttttgaaagagacggcggttgatgtggatgaattggtcgagtatagcaaaaaggaatcgattgatctggtctggtcgggtgacggatggaatgaaatggtgacggcggcggggaggtcgagtgattcctgggggtcgagtagatcgatgggtcgagtgaatctttgaattctgctgaggcggcggaggtcgagtgcagctaaggattattaagtcgagtaaatttttttgatcgagtggtggaaaacagaagatagcaaggtcgagtgaaatgtaaaaaggaatggctgagattgagtttgagattctctatccatcttatcctcagcgcgtggtccacactctgttgactgggaaaatttgcagaaaacctactgtaaactgcaggaaatccctacaagtctctgtagcttctgtgggtcgagtaaaataatgatttaaaagtttttgggttttaaacatcactcacactcgaccaatgtactcgatctctagaccatcagtagagtaaaagttttgaatttttactctaccttcacgttacttcttttttttttttttttcctgagaaccataaacacaactaaaacaaatcaaaaataacaagaaagtaaaaattatttacaaggataatcatgggacttcctcccaagtgatcttgtttaaagtctctagcttgactcctcacactcatcaagaagaaaatgaatgatagagagggtctgcatagtcctctctagtatcatcatcatacccagcgtcctccctggagaagtttgtagcagaatactcaattcccctttcttcaaaataggcttcctggaagtttctggagggtaatctgtctcttgagaccatcttgaagtgaattattttctcgggatagtgttaatcccgcctttaggttgagctttcttttgcatctgattcagcttactcctaagttcctcaatagtgtgggctagcttctctatagtttcatcttgcttatcagacctctttttaagttctttcactcgttcagtctcatatccttctcctgagatcgctttatcatttccagaggttcttccatcttcggttgacccttgtggagttttgttgatgccaaactgcaacttgatatgctttccaaggttgagacttattttcccttccttgacatctatcactgctcccactgacgctaaaaagggtcttcccagtattaagggatccttatgctctacttccatatccagcaccacgaagtctgtaggcacttctacgccattaatcatgactggtaggtctatcagcatgccgaacggttttctagaagacctatccccaaggatcaaagtcaggtcacaaggtttatattgaatgaactctaaccttcttgccacagagagtggcatcaagctaacagaggctccgagatcgcacagacaatcgctgaaagcaaattccccaatggaacatggtagagtgaaagatccaggatcttctaacttctcttgaacaatcctcttatcagcagctcgagatggagtggcatcactttcatcatccgaatcgtgatacatcttgattttttccagtattaaattctcacatctttggaggatcaggaatcaggttatagcctttccattagtggcatcacagcttcaatctcgtccaactcgttcgctgcaacagacttgtatctctccatccatgctttcctgaatgtccacggaagagcacgtgagggtagtggagtaggtttgaatcgttttaccattctctcgattatggcggccttctcttccgaggtggattgagtgagatggcgagatgacagatggtgatggcgtgagcggttgcatactcttttggattctgtatggacttccctggaagtcctgtaacttttggtgcagaggtagatgctgattggccttccaagtatctgactttggtattcaatgcagtctagcttatggtgcaattcagataatttcttagcaatttccattgagctagatgcttgtccctgtagcagctgttggaccatctgtttcatttcagcatcaggagcagcaggacctcggttttgctgagatgcaaacccaggtggtggtggttgctggtagttcccctggaattgctgcttaggaacgaaaccttggttgtagggaacaaaaggtttgttttgtttctgttgttgctgtggaggatacacctgatcctgagggttagcaacgttggtgctgcggtaggaaatgttggggttgttggttttgaaatcatatttcttgttgctaaattgtgtggaaatctgaacactgaacatgtttattgatatcaggtgattcccaatgactgaacaaggagatgctatcacattctttgagtgtgtccttgcttcatatggacatgagtattgttgctttgcgtctacccagactatttaagctcttgaggtcttatatattaatt

SEQ ID NO: 38485 - DNA, 6861 bp, Arabidopsis thaliana landsberg
  unsure (1)..(6861): unsure at all n locations
cgatctagaggatcccctataaatattcaaattatgatccaatactcagttagaaaatttttttaaatctatttttgacccgttataataatttttcatgtcttgaacagtttatattcgtttttaaaaattcaaattatggcatatgcgaaaaaactctaattatttttttataacgataatattattttttcgcaaaaatagaatcatataaagatgagaggtgaactataataattaataaaaaattaatatgataatttagatatcaaatctaatttgttgattttaattggttacttttttggaaattaataatatatttcattttttaattaaatttaattaattaaattagtatttgactttttaatttttcaagagatgaatttatttactctttaaattttatttctaatggcatacctatgtaattacttacaaaaagtaaggttacatttaaaatgtaattcccaaataatatagtaggatcaaaacagaaaagaaagtgatgagaagtatgacaaatggtgaggttgcaattttggactagcgtttggaagccatggataagagtctggaggtggcataacgcagttatcaccgttgaagtaaatgcgcctcggaaacgcccatcctttctcgaatgtgaactccaatgggttcttttggaagagaagctctgactgtacattgcctactagaccagcttgccttaaaaagatcattgtagaacttgattccccatagcatggccgtgtcatcttcaatatatgatccaaaacattatattattagaaaccaaacatttcttaagaacaagagaaagaatctgaatgagaaacttacttatgttcgcgtaaggattaagcggtttgtagttgaaactgaaaagctgagtgagattgtcgaagttgggatgctgaacgactaagttccactgagagtagttcatattgtagttaaagtttgtgatggcaaccttcactctccagtactctttgtagctagtttttacatgccaatgaactcgaatgggacacatatgttgcgtacattgcaagagaggttcgaggttgttcttccctaaggctggtactactgaagctattttagggctgtcacaagaaatgaatcagaaaagagataagaaaacaaaaccaagatggagtttctaagagtataggaacttactcaacacatgtaccagcttgagaactattttgacatccacaagaacaagttggacatggtactatagtttcattgtagaaggctgagagtgagacacaacaagtcggagttttccgtgctagaaactgcgaatatgtgcaagtaatgttccatgtaactgcaataagaaaacatcaagagaagtgggattagaaacaagaaaatataacttatagatgctaacacaaaagctaaacttacccaaagactaagtctttcttcgtttatcaacagaaatgaatttactctgctacttggtcttctatacgcacatggagtaattcagctcgccattgtccagtctctcccaaactgtgtgacaatccagctctatgtgctttgttctttcatggaacacaggatttgtggctatgtaaatagcagctgtgctatctgaatataacacaggaaccaagtagctagcttttaaagacatgagcaaagtgtgaagccaaaccagttcacacgtagccaatgccaatgcacggtactcagcctctacaaaagatctggaaaccacatgttgtttcttggatctcaatgatataagggaatcaccgacgaacatagtgaaaccagtagtggaatgatgactatcaggacaagatgtccaatccgagtttgataattctttcaaagtaagatcagaagaagcagaatagaataagtcttgaccaacagtgcctttaatgtattgaagaactctgtgagcagcctgaagatgtgcagtcctaggtgcataagagaattgacataacttgttcaccgcaaacgtgatatccggcctagttatagtcaaatacatcaacttgccaacaattcgacgataatgttctctatcctcaagctcaccatcagctttcatcagtttcaaatttggaaccattggaactgaaacaggtttgcaatttatcataccagtagatgccaacaactccaaagcatattttcgctgacacaatgagattcctgcttcagttctagcaatttccaatcccaaaaaatacttcaaatctccaagatctcttaacttgaaaagattatgtaaatcctgactcaactgtactagcaatgacaatatcatcaacatacactaacacaaccacatactcacctccacaatctttgagaaacaatgtgtgatctccatgtgttttgaagaatcccaaactgagtaaagatgcggaaaatttcttacatcattgtcgagaagcctgtttcaaaccataaatggacctttttaaacgataaactgcatttgatggtaagatataccctttctctcagcagatccttcaggtaacttcatgtatatttcttcctccaactccccattcaagaaagaattagacacatcaagctgtttcagaaaccatttcttagaagcagaacatcaacttgatcgttgtcatcttagcaactggaaaaaatgtatttgtataatctagaccctccttctgagtataacccttagcaaccagtctagccttatacctctcaagactaccatccgccaaaaatttcaaagtaaacacccatttacaacccactgccttcttaccctttggtaatgttgtaatctctcatgtattcgtagattccatagcaccaatctcaacatcaacagcttcacaccattctttagtgccctgtgcctcagcaaaattggtgggaataggaatttttgtgatattattgatataacacatgtgagatggagaaatttgagagtaagagatagtagaagatataggatatttttgatcagattgcatattgttgcaaacataatctgacagatgaataggaggtttcctaactctctgtgaagaaatttgtggtggtagatcagaaatttgtgatggaagagaagagaaagaagattgttgttgaatacctgaaggcacannnnnnnnnnnnnnnnnnnnnnnnnnnnnnnctgctgactttttagtaccagccaaaggaaacacctcctcatgaaacaccacattcctggaaataaaaatggcattactctccaaatccataagtttataacctttataaccaaacgggtatcccaagaagatacaagcttttgatcgaggctgaaacttatatctttgcttcggtgatgtagaactgtaacataagcaaccaaatgttctgagttgtccatattgaggagcagtaccactgagcatctcataaggagtcttatttgaaagaagctgtgaaggtgtcctgttgataaggaaaacagctgtgaagacacattcaccccataaagaaagtggtacctgagattgaaacatgagagcccttgccacattaagaatgtgctgatgtttacgttctacaaccgagttctgttctggagtctctggacaagaatgaaaagccataatccctttctgttgatacaaacttgtaaaacgcaattctggagcattgtcagatcttacagctttcaatttaaccttatactgattctccacttgctgaatgaaatcatgaaatattgtaagaacttcagacttagttttgagcaaataaatccatgttgcacgagaatgatcatcaactattatagttgtcaagaaatatttataaccatccactgtttcaactgagaaaggcccccaaatatcaatgtgtaacatctcaaaaatctcattacaaacattattctgagaagggaaagacaactttctctgcttagctagatgacaaacatgacaataatctgatcctttattcttgtgtttagtattttccaatggttctgaaataacatccagtctttgtagagaagcatgaccgagtctgttatgccacgtactgatatccacaactgcattcactgaaacatttgtatcttcaacatccatgacataaagattagccactctcctaccgtgaccaagcatccgcccttgataagatcctgaatttcacaagcatgttgatcaaatatcactcttgaaccaatatcatctgtcaatgaacttatactgatcagattaagacaaaattcaggtatgaacaaaacattcttgaaaagaatatcatctttgagtctcaaagtaccaactccactaatcttcacaatgggaccagctagtaaattcattgagctcaaaacaaatgtattcaaagtcaaaaaacagatctctatcatgtgaaacatgatgtgtagctcttgaatctatcacccatgttttagaggaaagagtatgttgagcaacagtcaaaatcccaataaaactataggtggaaggagagaaagaaataccaatgttatcagcttgaaatgagctagctactgcagaattactgtgaggttgaggctgaagttgagagctaaacatagcaatgaactgttgaagttattctttgctcaaattgcccaccaaactctccagaccagaatgagtatcatcagattatgtagtagccaaagcaacattagcagcaacaggctttggtttatgtgttttatcaccaaccttatccttaggagtaaagcctggaggaaaaccatgcttcttatagcatcaatgtgaccaaccctattatagaaagaacacatcggtctccccttattaggaccattctgaacatagaagatagtaggatcaatgatattagcaacagtgacttcaaacacttggaaagcagctggtggagcaaccacatttgaaaatctttgttgactattgtcttgatccacaatgtgatacacctctgctaaactcggaagtatcttcttagcaataacctgtctgcgaataatagcataagattcattcaaaccagctaaaaacttcactatcttagctctttctaccttctgttgcagacgaagagctttaccacatgtacaaggatcatccaactcctctgtactatctaattgatcccacaatgtcctgagacaagtatagtactcggacaaagacaaagtaccttgacgcaaatcctgaatctcttgagtaagattatatgtacgtggaagattagtcatattgaatcgactattgagatcacgccatatatccgaaacatcattcatacgaagaatactcctgtaaatctgaggagacatagaattgagaagccaagatttcaccatgctattacatctagaccatagacaaaagttcttatccgtttttaaaggacgaggcagagttccatctataaatccagatttgttcttaacatctaacgaaatgagcattgcaacattccaatctccatagttcgtttcatcaagacgatgagagatgatattcaaacctggatgatcggcattgtgcaagaagaacggtgattgagtcggatcacttgatttcggtgaaacgatgactcgcgaagctctagaagtcttggatctagcaactggaggagaattcggaggagaatcatcaatgtcggtggatcgcgactgtctgcgagctgaacttgttcctgacttcgatcgagttgatgtccgggtcactcgagctactgtcaccactggatcttgagcttgagccatggagaagtcgattctgagcttgaaaacgaagatttcagatcgagtaacaatggaatttgagcttggatggctctgataccatattacgattgagagagatgagaaagtttgttagacatagatgaagatattttttcattaactctgtaaaatgtatttgtacaagtatatatactatgactatacaaacggttaatataatcgaaatacataatgaactaaaccacataaataaaccaacactctctgatagaagcggaagcgtttggaagcgtaacaacgagtttttgaaaaaatttaggaagcaggtacgtgttagaagcgtaaatatatatacatatcaaacataaaatcataaattagttgaaaactaatttcaaaatctaaacgttagagttatataatgtaattaatcgaaaataacactaatttaattcttctcaggtggctagttcgagtatctccgcacgaattagttttttatgtacttaaaacgaatagggtaaatttgtaattttcgtcgaggagtcatcttcttctttcttcttccccctaaaaaaacctaatcgccgtttcctcctatttttttttttccgaacatagctaacgctggaaacgcttccaatctatacatacgacgcttctcaatcggaagcgtaagcgatgtcgtacgacgatgttgagatagaggatatggagtggaacgaagagattcaagcgtacacgtatccttgtccttgtggtgatttgttccagattacaaaagaagatctccggctcggcgaagagatcgcgaattgcccaagttgttctctttatatcaccgtcatctacaatatggaagattttcaaaacgatacgaagaagaataacgaacctaaaactcgtcaccctgtggccgttgcctgaggtaacaaatcttccatctgattgaaagttttttttttttttttgggggattttgtagaaactggatcgtgtgatatagaattggagcttggttcatgaaaagctatgtcgttggattgttgagaggtagatatgattgaaagtaacagttgttaagctttaggtagatatgattgtgcatatgtttcatgttt

SEQ ID NO: 38486 - DNA, 1547 bp, Arabidopsis thaliana landsberg
gaccggaaggtagcatgcgcatcagttcggtcgagttatactcgccgagccgcaccccctttccgaccaacaactctaggatgtgttgggactcctttaagaatgttttatggtgttttggatgttgtgagatgatgtgagatgccttgggcgtcctcccttatatagggggcgaatggatgcttcccgaagcatcacatccgttccttgcacccctccgaaaggtcacatccgttccttgcatcctttcgaaaggtcacatctgttccttgcatcctttgggcgatgcaaccgtttgttggtacccgctcgaccttacaccttttggccgagacacctcttcacccgtgagctacgaaagtccaccagctcgagtgtcagctgaccggaccacccagctaggtcagtacttgatcagctcaccgagctcagtcgagctgtcggtcagctgacctagctgagctagctagtcttccagctggtttagctcacatagcttacctagctagttcatacagcttgtccagctcacctagctggtttggcttatactttctcgttcttcctacttagtattttggtccgttcctcgaccatgatctagttttctcctaaaacaaacctgcctctttatgaacgcgggacgcggtcgttacacgtgcctcctccgattccaaagcataatggttgcttccgaagagccgaaggtagacaccacccatgtgagcattaccagcacatatgtaaagaattgcgcatgtaaaggttgcagcggcgttccttggggcaattcgctctaagtgtaggatagctccctgaatgtcagactcatgtgtaacgagacgcagtccttcatggtaaatagtcgtggggttaccagcttgtaagcaccgtttgaagaagggtctatagtgaccttcggagttgatgtcatttggatcgtggcctgccgcgttttagtcatcgggatcgtcgcacatgctgaaaatgtttgcatctttgaggacatccggacggtagacaatgtctcttccacgaggaccggatttcaacataggtccgaggtaccaccaacatttgtcagccattttcttggctatcttcgcaagcaaatcatcatcaggaatatttgggtttgtcatatttaggtgtaaggtggttcaacaaaatgaaattccaacacttaaataagcatcattgaagatatggttgggtaagttatggttgtatttattgcaaaggtattaagtgatgatgtgtattcatattgtcaaatcaacgtaatagtattccatatataatttgttattgttgttatgagcaacctctttttaataacagcttaaaactagacgtgtacgtcttagtgtacgttttagtgtacgtccacatttacatttctacatttgcccaacaaacagtgtacgttttagtgtacgtccacatttatatttctacatttacccaacaaacagtgaaagctgtagtgtactatcagtgtacgtccattcataaatatcaccatttatagacaaacataaagacct

SEQ ID NO: 38487 - DNA, 6109 bp, Arabidopsis thaliana landsberg
  unsure (1)..(6109): unsure at all n locations
catttatattctgaatatataatctatcttagctaaagagaaagctgctcaagagaaggctgccaaagaggttgctgaagatgttgcagaagcaaataaaaagagacacttgaatgttgtgttcattgggcatgttggtatgactatctacttaatgatttttatttttatttttatgggcatgtttttgttaaagctggaggttgcaagataattgccttgtgtagacacagggtttcagagcttatgtaatacagatttgaaatccccattggccatgacctttctgtctgtgtacttttaagtttataatggctgacttctggcttcaatttttttcaattatagatgctggtaagtccacaattggaggacagattctttttcttagtggtcaggtggatgatcgacaaatccaaaagtatgagaaggaagcaaaagacaaaagtagagaaagctggtgagtgttcctgattggtcaaacctgaaatgagtgctttgctttctaactagttatgaaacttttatttcctgtatgttaggtatatggcatatataatggatacaaatgaagaagagaggcttaaggtacttcatgtgttttggtcaatgtttgttcttttgcttaaaatgcatgtatttgatgataatttgtttatggaaatcccatcaaggttattgttgaatatatgtttgctaagtgctatgaataatttgcttaatttgacagggcaaaacagttgaagttggaagggctcactttgaaacggagagcactagattcactattttagatgctccggtaagggatcaatctaaactaatcgttttccatttatttttgttttatgcggggaatctgggttgcagaatatttgttggatgagttttctgttctaattcttgtgtgcttttctggacttataggggcacaagagttacgtacccaatatgattagtggagcatctcaagcggacattggtgtgctggttagtcagcttataagttaatttgttttctgttgatttagcttctccagtaggaagcttattaacttccctacccacgcctctctgatataggtgatttcagctcgaaaaggtgaatttgaaacaggatatgagaggggtgggcagacacgtgaacatgttcaacttgccaaaacattgggtgtctctaaactgattgttgttgtgaacaagatggatgacccaactgtgaactggtcgaaagaaaggtaattagaagaccttttgattccttgtcaatgatgattttcgtatcttcttctgtacatccttgtaattatgtaaatcctatgcaggtacgatgaaatagaacaaaaaatggtaccgttcctgaaagcctctggctacaacacaaagaaaggtatgcactgaactgtaaacattgcagtttaactatggtcaaacagcatttttaatttcttctcttacttttttgttgttaagatgttgtcttcttgcctatatctggtctaatgggcaaaaatatggaccagaggatgggtcaagaaatttgtccttggtggagtggccctagcttttttgaagtacttgattctattgaaattccgccacgcgatcctaatggtccattcaggtgaaccgccgctgcccactttttgttttctctctttttattccggttgttctttgttattaattattggtcgttgcatttcaggaaatcaattacttgtgtataatcatgttttaaatggattaacacatctctgtgcattgttttatatatcacatgcaacttctacaactttggcatgtcttttactgtaaaccaatctctgtatgttgtagactgttaaccggaatcgattttatgaattgtaggatgccaattattgataagttcaaggacatgggaactgttgttatgggaaaagtagaatctggcagcattcgggagggtgattccttggttgttatgccgaacaaggtgctttcagatgtttttttctttctcagttcatatttcattgccagtttattgttttcctgatgactttcatgaatcaatgtaggaacaagtgaaagttgttgctatatattgcgatgaggataaagttaagcgtgcaggaccgggtgagaatttgagagttcgtattcctggcattgaagatgaggacatcctttctggttttgttttatccagcattggtgagtataatgctttcagattgccttcacaataaatgatttgcattgccatttttttttttggcttaatatccgaacccttactcttctcttagctgttttttctttgttttctgttacagtaaaccctgtccctgctgttaccgagtttgatgccaaactacnaatccttgagctgcttgacaacgtaaggcacacgttctagaatgttatttgtttgagtatatacagttttaaataatcttcattattttgctgctcgtgtaggctatttttacagctggttacaaggcaattctccacatccatgcggttgtcgaggagtgtgagattatcgaattgaaaagccaaattgatctcaagacaaggaaaccaatgaaaaagaaagttttgtttgtgaagaatggtgctgctgttgtgtgccgcatccaggtttgtctcctcctaactaccgtttcctgtttctcttatacacgtattcatagccagaagttttaagttacttatatttatatatttatatttcgcaaattattatttctcaacccttgctgtatcacttgcaggttacgaattcaatttgtattgaaaaattctcagatttccctcaacttggaagattcactctacgaactgaaggtaagaagagatttcagagatatcaaatgcaatgcttaatgcatttagttttactcatcctaattatctgagatacggtacaggaaaaacaattgctgttggaaaggttaccgagctcttaagttctgtctcaagcgcttgatccaaattttgtgagagaaaaggtgaggagtcttatgatttcaattatttttaagccaccatatggaagaattaactttagaaaatggccaatctaaacctgggttctgtttctttggaaagcaggagacggctttcgggttgcaccaggagggagattaggaaaacgcttcatgaatgattcggactaagaaatctgagttccctaaaacccaagtcctaatacctgtttttttcagtgcacagttgagatttacaagctgcggagaggtgttacctgagaccgatttccttatatttcaaagctagagagaattatgatgaacgtgagtgagagtttacttttctttcaaattaaattaacagttaatacgactacctcccttttggctggcgagtatgtttttggctatttggagattgatatttcatagttgaagaaactctattcgttccttaatacttgtcagacaagtattggtttctagctcattctagctttttgcttcatacgacaagttatttcgttgtttcggtcaggttaatccataaataacctcgtgcatccaagttcactcgaaatggattggattttgtctatagaacataagctgcaattatgaaaccgaattggatcaagttaaacacgatggaaatttattgaaattttatactggctataaaactttaacatacaacaattcttaaaattggaaggattcggtccgaggacattgaggtaaaggtcgacacaaacaatatacaactgaaagcttttctcaaccaaataaaacttgtggattacaatgaaacgacgagctctagtgtgtttttgtttttggtttgtctgaaaaagtgatgtggaagaaaaaacaagaatgatgaagagggaaaaaaagtgaggagcttctcagagacgatgatggtctcactagcttcatgtgtttcgtccccatcttcttcgtctctgttctttagtcgtcgggagagattacatttggtgaaagccacggtggatggcaggaaccagattgtcccaccggcaaaagatcaaatccctaacaaagtaagcagcacccttcttcatttcgattgtgtttgaaaagatagtgttagaccgatgaagagtcgtttcataacgaactccttcagagaaattcagttgaggagtacaaagcttatccaagttactttctggtcaaatttatattttgggactcttcgcataagtgttatgtgtttacttctagctctaggagatagaatttcatggaaccaaggtggttattagagttttggttgaatcgaatggaaattacatgaattctaactaactttaagattctgaatatatctaggcaactagtttttacttgattgtgaaatgattttgaaatgtagcaagtaacggagagtgtgaatgtattaaaaacggctgcaaaaactcggaaagttgcagcagatgagattttagctgctttctctgctatcgaaaaggctaagattgatccatccactttccttgaaacgcttggtggtcccgagtatcctggacgaacatggatgcttatcttcgccgccgaggtaccattagatattcaattagcctttacatgtttttataaatattgcagtcttgattgatccattcaaatcattgacttgggatcttatatgccataaatgcagaagaaactgacgaaaggtcgttatttccctctagctgctgttcaaaaatttgatgctgcggtaagtctctaaactggttctagtactgctttagggtctgattggtaaaagtgttgaggcactttaaaatcctgaaagccgatattttggaagtaacaaaacaattcttgtgcttgatttttcaaccagggaaaaagaatagagaatggggtgtatcttggtccatttggagcattaacattcgaaggaaggttttcatggaagaatcggatactagcttttgtcttcgaacagatccgcataaagattggaccattagatcctctagagttcagcttggggaagaaagacgctgtggaagagcctagtaataaagaccctttcttcatttggttctacatcgatgaagaaatagccgttgctcgaggtagaagtggcggtacagctttctggtgtcgttgtcgtcgcattgcttcctaatgactctcttctacttctcagaagctgcctctccttgtaaatgatatttgaagatattgagcctatttgtaatgttcggaaaaacggtctatttccccatgggaactatcgcatctggctagatgaagcccgatctttgacctcttgctatttacccatgaaatgaaagttaaacgtctatttccccaccaattaaaagttcaagagcttaatgtccccgaatcgtggttacttcggtttgatacgtaaacccgagacgaaaccatattatcggtcaaaaccaaaccaaaaaaacccggattcgtttttaaaacccgatccattgtcgaatcccaaatccaaaatctaaaaccccaaactcaaaactcaagaaccctaaatcgattcccaatttttttatttccagttgaaagatgagcaatctgtcatcaagttcgtcgggatctacaggacctcgtggtccaggaagagtggttggagtgccaaagagatgttggattatgtccagttctcagagcataatctataaccgcctctttgaacgcaactccactgaagaaactctgcttttggtacaaaaacccatcaccacgcctcacatgtatgtcggaactgtcgtcggctccttcaccatcgctctccgggtacacgtcgtggcgaattggtggttcgtcggtccactcgtttagcatttcttccaggtgaaagttatctctgtcttcagcttcgggatcgacatcaccatcaagatcggggtcgtgatggattaacgacatcccgacatcgatcgatcaaagttttagggtttggaaaaactggatttgaggattcgtcgggagtgaaattagggttcgtcgggagagaatttggggatttttttgtttaggttcgagagtcgggttacgggtcataattttggtttaaattaggtttattctggttccaaataggtttagttggt

SEQ ID NO: 38488 - DNA, 2221 bp, Arabidopsis thaliana landsberg
agaggcgtgtaacattgctctgaaattagtttattctgactttatcattcatctaactacgacaaaaaataaaattggaacgtggtatttacttcgtctaactctttgtttcatcaatcttcttctctctttttttggtcatttcaaagtaaaaccgtcgatccttatactgactcctagttatttatgtagactcttgtatatatgtacaaatggatgaaaaggacaaatatcctagtctccatcatatagtctaatttaaggacgccactttttaaagttttcttcttaaggctccaaatggtgattaagacattgaatcagctgaataagatgaataatgctaaaattatcccactaatcagtttttttttccaaagatcgatctacaaattcattaatttatattcgtttttttatcacatggcaatgggtttctcactctatcctaaatgtttttgtgtataattttgttggccttttgtctatttctcattgaagagatcatattctgtttgcaactattttttacggttccaaatacttctcacattatttatatagcgtttatgctaaattaattatgtatggctgtattttacttaattttctgcttaaaagtatttagtaatttctagttgtccaatggaagttttaaaaaacaacaataaaataataatcaaaattaaatattttatacattgaggtgtttcttttgttaatttaaaacgctataggcaccgcattgctctcatgccgctaggattttttttctttatatctataaaggctttttaatttgaaaacatagtaactaatacaagctatgactctttgggtcatatgattgtacaaagttatgggaaatttagcattaaaaagtcatacaaaagctatgaagacttaaggggtgatgacacggccgtgtccatggttgccacgacactcaacattttccaccgaccaccgcatttcttgaactgatgggaaggctggattggtctccctctcaaggaccttggagcattgacgaggtccacttattatggttccgcaaaggtgggaacaatatataaggaaaaaaactaaatatgtcgataaataaaactttaatggaagatgtactagtagctatggtaacggattgtacatcactgatgttgtgattttccaatgcaatagataaaaaaatatcccattagttacaaattacatagctaatttggatttatcaattatcaacaatgtgtgctgatattattggttatgtacttccaaaatatactgtgttgatgtgttcgacatcaaaacttcacgatcgaactaggaaccctgggtgacccaaacgcatgtgcccaatatctgtccacacgagtccgcgacccattcatcctctttgtacgacttagaaccggtttatgttttatgatgatcaaaagaaagtaactcgtaatatcataatatgatctccaaatctacttacttctttagctcttaaattcagaccacgtgcgtcaatctcacgtgcatggcttcattaagagttcacgtgcatgccttcgtcaatagtctaagtgctttctgcgggaaaaacggtttatagttatactcctatttttccctgaaatgaaagttctataacttaatgtacttcgagtaaatagttcgagatctataacccacatagctaggtttaatcagtttactgtatactttacccattgataaaccaattaaacttaattataaccagacttaacagtaattcagccgtttacaacccgatttcagttctataaccccaaaatcaaaaattcccaaattgaaaatattaaaaaccccaaaatcgacgaaccctagagagagaagagatttggtggatatatgtcgttgatgttgctgtaatggtttgattgagtttgggaatgttgggttgcgaattgtttttatcgaacaaattgaagtatgattggtggggttccttctcagccatggtgtgagaaagaagaagacgattttcaatatccaaaaaacacattaataccccactaaattgttacaggaaagaagagaagtgacgacttgttgcaggaaaaatgagtggtgatgtggcaaaactctcacgtgacaaaacttttgtgtttccttttttgtaaatgctttcctcttactatagaggcaatcgtagttagcctctgattcattcatgaacacgtttcga

SEQ ID NO: 38489 - DNA, 2864 bp, Arabidopsis thaliana landsberg
aaacttgtggcctcatcataatcagtgggtcgcgttctctgccgagtcctcgtctttgaagcgagtggacgagtgggtaagaggactggatgtcgaaaccgtggttccagtgaacgaggataaggatgtcttggccatcttcccaacctctcctaatactgagagatcacccttaggaaatgtggttcagtccggaaacgtctcagaggctatagtgcacgcaaatagccttattcaatcgctgagcaaatcatcgagcgtggctcacatctcgagcatcggcttgaaagctatcccgagcatctcacattttaccagcctcaagtcgattgatctatcaaacaacttcataggtacacactcttggatactacacattgttctgttttctaaagtgtgtgttgcttactggacattgttctgtttactgcagttcaaattactcctgcatcgcttcctaagggcctccacgcgttgaacctttccaagaacaagatcagtgttatcgaaggactaagagatttgacacgcctaagagtactcgatctaagttacaaccgaatttctcgcattggacaaggtaagattgcagtcattaagtagaaaacatacaatgcttgtttgtttccctgtcttaatcaaaagctatttatcaggtttatcaaactgtacactgatcaaagaactatacctagctgggaacaagatcagcaatgtagaaggcttacacagattgctgaaacttattgttcttgatcttagtttcaacaagatcgccaccaccaaagcaataggccagcttgtagccaactacaactctctcgttgctttgaacatcctcggaaacccgatccagaacaatgtaggcgaggaccagctacgcaagaccgtttccagccttctccctaagctagtttaccataacaagcagctcattaagccacaacgagccagggaagttctcaaagatagtgtagcgagagctgcgtttggtggtggagattctttgcaccacaggcgcaaaagaacatccaccaagagtgttgttggatcagcctcccctagcgttcaccaccgaggccacattgcaaaaggacgtggctccaaaacagaagccaacgtcaactaagaaaaacttcagctgcatttacgccatcacattgaattgttctttttgtttgagatctcatgaattggccaatgcaaattgcaaagccatctccattctttgattttgaaattcagcatcttttctaacgcttatgtttccggttcggtttcaattctggtttactgtctttttactttttagttgatccggttctcggaaacatgtaaaaccgaataacactttccggtttaactcaattttggagatttttcatataatcaatttcaaaaagaatcgtaactaatctcgggttaattccggtacggtacaatgttgggtaagtatctcggcttcggtgaacaaacagagaaactcagtgaaaatttacttttttgctatgaacttatttcataaacatgtggacaaatatcgaatcatattcttttttcgctgtataataagagttgttataaaaccaaagctgcaaagaaaaaaaaaatctagattctgaaaaatgggaactcacgaaaccagataaagaaatttcaccggcggtcttacgtccccggcgggataatatatttcatcccattcctcctttcttccccagatcgccaacacaagtttggatgatttgattccacactgtgaggcattggaacaaaaaaattaaacaagcggacaaaaacctgcgtctatgatcttcctcttcttcagattgattggcggtcggtgaatggtttttggcagatgagaagtctttgttcactgctgctttcaacctctattactcgagcttcccacttcaactgcgttatcgtctctctcgccttttccaccagctgtgccgtgtcacggattatcacccatccctgtacaaagttttgtttattatagctaccagaatacaagaaacaataatgttctttccaaagtaaacaaatgtgtacctctggacgaagcaatcggtcaatctctgtgaatatatcaataagtagacatgtttttcggggctgacttgtctgaagcgacaagagattgtctgcatgtaccaggtcatatgttctcgggtaagtcgggaatggttcacacctgaaaaaaaggagctgttcagaaacacttctatggctaaaatgaaaattcaataagacttttgaactgaccagttgtgcaatactccgacaaacccacggtcaaggatcatggggaggtggttaggtccagctgtagggaccacattcatgacccagactgattttcttgcttccaacaaggcggaattgagaccaccgaattgagcattcatatccagtacgtttctgagcatgttataaggcggtgatggatcttcatcgcctggtctctttggatgatcagagaatatcagaggagacaagagagaccagtattctcttactgttatcttccagttctcagcatcctctccaagcacctcggggtgaagacctaaaccaaccccaggaatcaaaatgagataacaaaaactgcagacatatggattcagaagcaatttgttactaaggagactaaccatataatgaaagttcagtcttgttcatgttagaccggctaggccatcttgtcctgccttcaatgggaatccacctccggctacgtgttccaccaatacacatctgaagcggcctgtaataaggagactcaacatcgtgccctttggacacacaaagggcccactccaggtttcctgtttataggcaaagcatccgtttct

SEQ ID NO: 38490 - DNA, 1765 bp, Arabidopsis thaliana landsberg
tgagaggaggatacggtatgtggaaacttgatttacttaatttcaaaggagacctacggagtcaaagagagagttagaccaactaattgtccagagggattgagattggaggaagggtattatggtactttacgaatactattacgttgattaatttggatactttgtcttcttcttcgtctctctcccctcgcgcatcttcggtgctataaaacaaactcacgactagatcatttttggagtgagatttacgtttgatagactactacaatgaaggagccaacgacggagatagagattgaaacttcagctgtcgcaacgatcctgcctcctcctcttcctccgacggcgtcacctcatcaagcgttagtcgagaggctcaaggattatggacaggaagatgttttctctctctgggatgaactctcaccggaagagcgagatctcctcctcagagatatcgaggtgaatcggagaataacacagttccagagtttcgtttatcgtttcccatcttacaaatatgctttgcattatcaaattcagctaaattagctgaagatcctgcaaataatgtggatcgttagttcgatttcgcatttgattagattatttaagttagatgtgttgattttcttccagaatttggatcttccaaggatagatcggatcatcagatgctcacttcactcacaaggtttatctcttgacttctagatatgcatttagaatctctagacttaatacttacggagattgagttctgtttttcacttcattagggttgccagtggcggcaatagaaccggtgccggagaattgtgtgtcaacggtggaggaaagaactaaggaagacagagaaaaatggtggaaaatgggattaaaagctatctacgaaggcaaattgggtgtggtgcttttatctggtggacaggtacttttaattattgatgcaatttttcttaagctatataattaagttgctgcttagagtgctaaatgattctcttgttgatggttgagattgggagttttggaataatgctgctactacctaacttaaaaagttgaattaattagattataaagactttagtgtagtgttgtgtactttatataattgctatatagtagtttgaaatggaaataaaagtgttgtttagataagtagggttattataagaggcgataataaaatctgttatattggcagacaataattcatgattagttttcagacaaatcactgtcggtggtgtttttgagtaattgcgttttctaggaggaaccttctgattaactataacggtgctgatgttgatcacgtgatctgaaagatgctttataggattccgtaactttttattattatattaggaggatgctctgtttcgtgtgttgtaaggaagcttgaaaaaaaatctggttttaaagatacgtgttgcttgatgtattacttagtttcggagattcataacttgagaagatcttttatacatcccagttaacttttttgcaacaatcctcaagtgatttgataatgaacatggtttggtttgattacttagtttcggagatttgagaagatcttttatatatcccagttaactgttttgcaactatccttgagtgatttgataatgaacatggtttggtaatgaaactaatgtagggaacaaggcttggaagctcagatccaaaaggatgtttcagtgagtaattctcatttttgttatgctctgaataagcttaggttgttgcattg

SEQ ID NO: 38491 - DNA, 355 bp, Arabidopsis thaliana landsberg
ctgtcgagctgggtgcctagtgggccttagtgatctgtcggtgctgtgtggctgggctgtcgctctccgtttcgcggtttctcttggggtcgcaggcggctcttcccctcgggctcgcgttgtcgggggggtttggcccctcgctgtcggctcttcgcctcctggggctgcagtatgttccaagggttgggctgttcgcccattaaagcggtacgtgagctgggttcagaacgtcgtgagacagttcggtccatatccggtgtgggcgttggggctttctggtttcgtcggcggaatctcgcgcctgggctcgctctcgttccgcgcgtgtgggggcccgtgctcgcggccgctg

SEQ ID NO: 38492 - DNA, 2336 bp, Arabidopsis thaliana landsberg
aaccttctacttctcactgtcatcaacactccatcaaaatcatcacaatgatttttccgaccaacaacaaaacactccatcgaaatcagatcgtttcttcgcctccaacaacgcacacaacattttcttcaccaacctccttcgatgaatccgataaatctaattaaaagattgttgatgcaaggaaatctaaaccctatggagataatgattagggaacccacggattctaattttagataggctttaaatcaattcattctaaatcaaatttaattgttattgttgacgaagcttcacatgaggttagtaacattagatcttgaaagaggattttcaaaggctggtcgattaggccttcaatctgcaattttttctaatcttaaattggagtttggaaatcggatacatggaacttttatggctggattttgggggaagaaaaactgatagattcaaagagacaaagagatgaatgtttaaggtgttcattgaataataggtattacgagtgttcttctttattggtttctgtgtgtttcgaattatgaggtttggatttccatttgtttgtgtgggtgatacatggatttatctgatatggttaactggtttgaaggattgtattgtagcttttctaaaaaagaggattaaacagtctttacaactgaatagaagtacctaaatctataaagcatatgagatatgtctgttcacaaaggcatagacttaattgtgccaatcccataattgatccaaagatctttttccattacaaatcaagatgactcaaaattattgattccatatactatttataagtgataattatttacattagatgttgatattatgcgcagcgatcattccgtactctctagctccaagagaggtatttaccaatctaccatacattctaactatctgtgtgaagagcttaacaaatgtatagtttattctgtatcgtccaaatatttattcagtaaaatatatgtgaattgaaacattttaattatgatgaatgtggggtttatataaccggtgaatcaataggagaagttataacagttttgactatgcaccaaaggaaggctgaaatgggtctccaagcggatgccttcatcgcacttcctggtttgtttgtttttattattctttttcaatctatgtcttttgtaaagaataaaaaagatgtctatatattgatcatgaaggttaataaaattaatttgtttggtgtttttgaacaaacaaaataagtggatatgggacattttaagacgtgttggaagacctcacccggtctcactttgggatttacacttaaccgttattaatttaattcttggggaaccccaaaaaaaaaaaactatcgtttagatatgacttatgagtacacatacgttgagactcgagtcagtaaaaatacgattatctcggcaaaccactaaaaaaaataaaaaatagagatgttgtcatatactatgtattttatggagaaatagagattttcctgatgaacttacacaaataagaagaagcaaatttctttgttggctatatatgtgggcatgtggcatgggttgaagtctatattcacatggaataatgtcttaactcttacctcttgacaacaacaacaaaaaaatgtcttaactcttacctaagattttgtcccaaaaaaaaacactcctacctaagatcaaaaaaagaaagagaatcatagttaaggttgtgaaaactactctaaaatcatatcgtacactaattaatgcatataaaaaagattagattaaaacatgtaatatacacacacgaagactttgtatacataatacatggtaaaaaaaaatgcgaaacctgagaatattaattaagtatataacataatgcgaagttaaaaaatgcaggtgggactattgaacgtggatggattctacgattcactattgacgtttatagataaggcagtggacgaaggcttcgtctcctccaccgctcgccgtatcattgtctcggctccaaacgctcctcaattacttcaacttcttgaggtttttttatttgcctttcattactttttgattattctatttaatactatagactaaatgaacgaatcccaaaataggataattaaattaattgaattcatttgtaatcgcaggagtatgttccaaaacacgacgattttgtattcaaaatggtgtgggacaataccacggatgctttcactttggaaggcgactcgttttagatatagtacatttgtatcttaagatagttttattttattattaaaaatctcgttttttattggccatttcacaattttg

SEQ ID NO: 38493 - DNA, 2476 bp, Arabidopsis thaliana landsberg
tgggacacagaccataccagaatcactaacttcgagactacttttcttgatcgcatttgatgctcactcaaatcgcagcatagctgggccaatttccattggatgcctctctaagctcaagactctcaatgtctccggcaactttcttgtatccttccccaaatctatccaacattgcaggtttcaccccataacttccacaaagctctcacaagacaacactcccaacaaagcataattcccatttatgttctctttttcttttttttcaggtcatttggaagaactaaatgcaaacttcaacaaactaatcagattacccgactccattggttttgaactcaccaatctaaggaagctctctatcaactccaacaagctaattagtcttccaatctccattactcacctcacatctctccgtgtccttgacgcccgtctcaactgcctcatgattctaccggatgatctcgagaatctcatcaacctcgagatcctcaatgtcagccagaatttccagtatctttccgctcttccatcttccattggccttttaatgaacctcattgagctcgatgttagctacaacaagatcactgtcttgccagagtccattggctgcatgagacggttaaggaagctgagtgttgaaggaaacccgcttgtgtcgccacccatagaggtgatggagcagaatttgcaggtggtgagagagtatctgacacagaagatgaatggtggctcaccaaggagtcccagcaaaaagaagtcgtggggattcggtaaattggtgaagtatgggacgttcaatggcggatcaagaagctggaatagagaggagagagaagggttcatcatgcctgagtaccgctccatcgacagtcttgcttcgcctaggtattctggaatgttctctccacgtcgtcttttttctccaagaacctatttcagcagataaaacagacaacagccaagagttttcacattcctacaagccatgtacacctctgtagcatcaaggccaaaacaatccaattttgtctatcattttaatagtagcatcaaaaaatgtgtaaagagtatttcaatatgttcatcagattctagaattcttgtttttttcatatctatgcttgcaccaggtccctatttgactatttctatgcacaccaaattttgttcacgaataaagtttgttctttcagaaaacctacccccttctctgcctgatcctttagctataagcaaaagacttaagatttatacagttaaataaagcaatacttaaaacctaacatacggggcgggacattctttaaccgtctagaactcactcagttacatactctgacaattgctgagaggaatcaacaatctatattcctctcttcaatttcacatatagtttgatgatcaaaattcaaaacaatgtacgtcataaaactaagtatcaaaactcaattcatagccaaaggagaatattttcactttacaaactcctagttcctctactacaagttaagtctgtctgaagattgaagtcaggcacacgaatccacttaaagatctcaacttttcttgacttctgactatagaatttgcacatagatatgcacaatgaggcaaagagaactcaattgaacaataattactaggactttaattcaaatccaaagagacatgcttcaaattggtgactacggaactgagttcgaacactaaaaaagacacaacttttcaagtgatcactactcttataagtcaagttcccattacacataatctaaaagctaatgaagataaccaggaatcttaatacggataaagagcatactcatgacataagcgatcacgatggaggagactccagcaacagcataagaagctttaacactcttggctttgttcttatcaagcgctaaatcaagcataacaatcccaattccaccgagaacgaacatgaatccagaagagagaccttcaatgatatattgcccgttaacccgacccgacataaacacaacgggtcgaatagttccagtagtcggatcctgagttgatccgatacccggaggctcgacaattacgtcgtagacgaaaccggagactactaaaaagtaggtaaggagaattagagcgtatacagtcatcggagaaggaagcgtgaacgatggaatcttcagacggaggcgcggtggtcggagaaatgagaatgggacgattcggagaaggtggaatattggatccattgaggattcatctgaaccgtctgatacactggagccggttgctagggtttttgaatcggatcttggagccattttgtcggatcctccttggatctcttcctctctcaccctatcgactgaatcaggaagagttcagaattggctttgttggacactagaataaaaatatttgatacaccaataaacaaacgtctatcaatttccttctttcgatttttccccacaag

SEQ ID NO: 38494 - DNA, 281 bp, Arabidopsis thaliana landsberg
ccttcactgcacgggggggggttatttttgagcttgaaatcatcagtctcgttgagcttactttctgctgtataggcactaaacatatcggccgccctgactctatgacttgatcctctcgctcggtaagtacgtatcgtaaagatagttatctcgcttccttgaagaactccttctggctctcgagctacgtctaccgccacaatccctctcatgtcccactagtcgagcagctctttttgcaaaactgcatatcttccgtattgaagggcatgcacgcc

SEQ ID NO: 38495 - DNA, 2160 bp, Arabidopsis thaliana landsberg
agttaaaaaaaaaaaaacttggtttcatttcttaataaaaagccttcaatctcaccaacaccaccactgtcacaactcacaaagcaaaacaaaaaaaaaactagtctcttctcctcagagaaaaaccctaaaatttcgtcatctatgtcaatcagagccatgggagaaaacaatcacaaagatcaaaaaacactttcttacgacaaatctaataaacccttttattcttcttcttcatctccatgttccttcacggccatcgtcgtcttcttgatcttcgtctcatatctcttatactcattcagtttcatttcttttctaaacccatattcaccttctaaatcccccaattctctcctcgtacccgttatccgtctcgggtcgggtcaaacacctgaggaacaaacggagctcaaacacatagtcttcggaatcgccgcgtcttcagatctatggaagcatcgtagagaatacgtgaaaacatggtgggaaacctaacggagtcatgaacggcgccgtttggctcgacaaacccatcaacgacaccgtttcttcttcatcagctttgcctcagatcagaatctcttccgacacgtcgagtttcaagtaccgttaccgtaacggtcacagatcagcgatcaggatcacgagaatcgtgtccgagacggtgaggatgttaaacggaacggaagcggagagaaacgtgaggtgggttgtgatgggtgacgacgataccgtgtttttcacggaaaatcttgttagggttttgagaaagtacgatcataaacagttttattacatcggagctccgtccgagagtcatttgcagaatcttcatcagttttcttatggaatggcgtacggtggaggagggtttgctataagttatccattagccaaggttttggagaagatgcaagatcggtgtatcgagagatactccgatttgtatggatccgatgatcggattcatgcttgtatggctgagcttggtgttcctctcactaaagagatcggttttcaccaggtaaagaacttgactcgtgttggtcaaatttttgttggacatttgttgattttgggcagaattggtagtaatttctggtgttgtaagaatggaattatagatttcttgaggtcttaattaagtgggaattgatgatgttgagtctagagaacttaagtttgttagctttgattgtttttttgtttagtgtaagtataagcaagtttgatggttggtggcaaaataggtgtttttaatgattttgtgacatgggtattgaaagtgttgatctttggaattggaatttactcaacaaagtttaagactttaagagttttgtttctagttttagaaggaatgactttgacttccaaacttttaaagtttgtagctttgtttgaagttacaacctttaatgtttttaatgatcttctgagaaagctttggtttaaaatctgaagctggtggtccgttcatgacttcaatttcgtctcttagctttgttctgttttttgtttggatgctattttgccaaaatttcctgtggtttggtaccgacaaatgggcgcgtgagtagctcaatgtcccttcatttacttgcgaatttgctaattgtaatgagtgggacccgcttttctgtttttaacaaattaaatgactcgttcctctcattgtttctacgcgccatgtgagcgactgatatacacgttccttctatcatcttgtgttctgtttctttgtttcagtacgacgtttacgggaacctctttggccttctcgctgcacacccagtaacaccgttcgtctcaatgcaccacctcgacgtggtggaaccgattttccctaacatgacacgtgtccgcgccctcaagaagattaccgaacctatgaagcttgactcagccgggcttctccagcagtcgatatgctacgacaagcacaagagctggaccatctcggtctcttggggctacgcggttcagatttttcgcggaatattctctccccgagaaatggaaatgccttctagaaccttcttgaattggtacaaacgggcggattacactgcttacgctttcaacactaggccggttagccggaacccgtgtcaaaaaccgtttgtgttttacatgtcgagcacgaaattcgatcac

SEQ ID NO: 38496 - DNA, 199 bp, Arabidopsis thaliana landsberg
actgagctggaccgactgctcgctacacaaacggggggacatctttaaaaaccacacactctccgcacactgacatatcccggtggcctaccgtggctgggaaccacctggaccggtccgcggtactttaaccgtggccgctgactgcatccgcgctgacgcactaccagacggggtccacagttgtgtcctgactgac

SEQ ID NO: 38497 - DNA, 2249 bp, Arabidopsis thaliana landsberg
  unsure (1)..(2249): unsure at all n locations
aagaataggcttgtgccacatcacatacatcttgcagtgataaacgatgaggagcagaggaagttgcttggtgatgtgatgattgcaaagatttgattttagcataattttgttcagaaaatgcaaatcttcttgagatatttgttttgaaattgattttattcattgcattttacgttatgactcatggagaaagcattgtaagaaatctaaggggttctgtttttagagttatctacccacacaaggtgtttgatgaattgacggtgagacagaaatcaagaaacaactctcccaacatgtcttatgcgatgtttgaagaagccttacaggaaatgtgactagactttatggaaggtcagatcccttgtccatctcagtattttttgtttaatggaagctttaaagattgaggaaggggacaaatatgttaaaatagttgaagataagaagaaacttttttcaaatttgagtcaagtcttgaagaaaatttagtcttattaatcttattttttgtttggttttgtagtgaggattaaggttcacggaggtcgttgttgattatgtgtcattgagaatgacatacctaatattgtagtcttccttattaacgtcacttataatctcagtcttccttatgaacgtcacttgtagtcttagtcttctttcaaatttattaacgtcacttataaggaagactatgagttatattacttcagtccagcgtctcgatttatgtttactaaccttgtaggtatttcctgtaacctccaagttatttttttaatcactcttttgtttttgcttttttaaatgagaattatgttagtgtagtctcttttgcannnnnnnnnnnnnnnnnnnngtatcttccccagtcttttacgtttaaaaatatgcacatgtgagacaaaatggttgaatctacttatgcgtgtacttaaagattcacctaaatgaaaagatctaaaacttggataggtatatacagtataaactctataaattaatactcgataaattaataaacacgataaattaataaagtttgccaatcccaagtcgggtcaatgtaaaaattaaccaaaatcgataagataataagataataattttttttgaaatccctatgtaaaaatatggtcccaatgatacgataaattaataatcataaatcttaagcatatattctaacaataattttatatgaaacttttattcaagccacaattacaactctttttagagtacagttggtatgatctcttttgtactcacagtaactgtttgcgtatttatccgtcatatttggttttgtaatattttttaatcattgctaagatttctacaaagaaaaattggattaaacctcatgttaacgtcgtaaataaaacagacacaatatcttgtaggaaaataaattaaaaagtcaagagaaaaataatttttgtaacataattgaatatacaaacaacaaaacataagaaaaactaaactaaaaaacatttttaaaagaatttagtattgtattttacgtaaatattactataacttaatatatattattttatcctataaattaatatttattaatttataggataaattaatatcactataaattaataaaatctcatggtcccaacattattaatttatagagtttgtactgtatattattattttttccttctaaataactatgaatttcagttatttgttaattgttttcctaggattgtttctgtgaaatgttacatctatttaccataatgtttttctaatactaatatactaaataaatgcttctgaggattctctttatcatatttgttttccataaaatttattcactcaagctcatataagtcttatataacctagttgttttttaatcctgcatggaagcttccagcgcagtccattagtgggacaataaaattagagagtagatgcatctggtggggagttcgcctaaccttctctttcattatatcattgccaccaacaatgaagtaacagacatgtcccagttttgctttcttatccgttccaagccatcttggatgtgtaaaacggtagaggtaacgcggacagagaggataatagtcactttcccattggcggaaaattccttttgcactgactaattagtcagatgctgcatacgcccaacagagaaggtgttgttgttggtttctaacaagacctacgaaaatcttccatgatgtgctagccaaaacagatga

SEQ ID NO: 38498 - DNA, 3090 bp, Arabidopsis thaliana landsberg
tcattatcgaccctgatgtactcatccatcttctagagaagcttttccagggcttaggggggctttcatgcgaaatattgtgttgttggccatggcgaagtcccttgatcatggcttcgatgataatctcatttgtcaccattagcacctgagctctgagaagtagaaatgttcggacgtatgcctgcaaatactccttgtggtcctgtgtgcactggaataaagcttgagcggtcactagcttcatctgaaacccctaaaagatagtgaccaacatatccttcaccttcttccatgatgtaattgttcctagactaagagaagaataccatgtcttgagcacacttctgactgccatgacgaaggattttgccatgacagcggtgttgcaccatatgaggatatggttgcttcatagctcatcaggaactgcttcggatctgagtgcccatcatacatggggagctggggtggcttgtaagatggtggccacgggttagcctgcaactctactgctagaggagaagcatcatcaaaagcaaagttaccattatgaaagtcatcataccattcatcgtcattgattgggctttcttgacgaagctccctgtgttggggccttcggctctggtcatcttgaacaagatgacgaacctcttcagaagcttcgtctatctgtctctgaagatcagctagacgagccatcgtctccttcttggctgcacctgttgctgaaggatctccaggttttggatctcctgatccaggtcatcctccggaggtgttggactaacagccttcctcttctggctttgggcttctctaagagaaaggacgtcctgattgggatccaacggctgtaaagtaccagcccctgtcgctgaagcttttttcggcggcatgacgaaggtgatgcttgccgaaagtgttcaagactcaaaaaatggaagtgagttcaccggaggtgggcgccaatgttggggacttgttctcaaatgctatgaatcaagaacaaggcaacataaaatgttaaatatcaaaagcccttcgtccttccaatcattatttccttcggatataatgaatttaggacgaaggtcaaagacaatatgattacgaaggttaaatctcgtacattgaattctaacagattgaataagataatataaaatatgaagtgtcaaaggtgaataaattataaacgaacaacattgcttttttattatatctatttaatatatttaagcataaaatacaatgatacctctgccttgacaaaggttgtattccgagaaatgcgatcactattacagaaaatgcgtgaacagtacggggatactgttcactatttataggcacaggacgcagcctgtgaggaattacaatcatgcccctcataagggattacaacagtgactcaaacatttatggactaaaaggtcattctatctttaagtcggttcgacccttcatcttcggatatgttgtaattccgaagcttcatgaatggtgccttcgacgtcacgtacgagcagcttcagctgaagctgtctctttcggcaggaccttcggcgacgaagcatggtcccaacagtagccccttcgcggtgctagatcgtttttcgtaacgagcttgatccgtgaaaaaagtctcttaggcttcaggaagccaaaggtccgaaaaacaccttccctgagctcgttgtcgagaaacgatacagtttccgagcgcgtagcggtcccaccatgcaggttcactattttggtccctgcggcccagcgtgcagcgggtgcgagcagctgtttgcctggtgtaaaaatcctggcgattcaccttcttacctgcagcactatataaacagtcaggtaggtgtgaagttaccacagcattcattgctattgcactgttttgctgccaaaaattttaaccatagccgaagcttgcttactgcatcgtcaaccgacgctattcattttgctcaagcttcgtaataagaaagagctcggcaaagttacaaaattttcaatttcatcaaaaaacaagaaattcaatcatcagatggctagggtacgctcaatagttagggttactcgcgacggagaggaagccgaaggtgccgaaaccgctccaatctctgaagtgatgcaacggtcagggctggtagtatcggaggatgcccctgccgctgaagctgagcaggtcgatgctgaagaatttgaatctgaagatgattacagcgctgtgctaactaaacccagccacttggagtttgggaaatccaccgttaccgaaggtgatatgtctaagatgatgaatttgggatattttagtgaaggaaagaaggagctggttcattttggcagggaggaaattaccccgaagctaggaaaggatgaagtagtggtcttcaaaagcttctttaaagctggattaagatttcctttaaatgggatgattgctgatgttttgaagaagtttgggatctaccttcatcatctaactcctaacgctatcgttaggcttagcgtttatatctgggccctccgaagccagggggtggaaccatttgtcgaaggcttctgccgagtgcacgagcttcattatcaaacaaaagctagaggagatgggctgcatgaaaactttggctgctacaattttgcatatcgcaagaatacaaaatttccagttatcagctatcgtagcaagtggccagctggctggaagtctgaatggttttacgtcaaagttgatgaagaaaaggagaagctggtccaaagtccgctagaattaatcttcggagaaaccagaccccagtgcaacatgacaccagggagtccaagccaaattgctctggctgaattttgagttattgcggagcatattggcactagggacttagtgcaagaattcttggctttcagagtgttcccaactttgaaagagtgggacatgccgaagctaaagggagaaaagaaaaagggggaacttattcggttgccctatcattataaattcaagaaacatttcgaagtgccttgccaagagtggttagacacgattgaagtaatgtgcaatgaaattctcggcaa

SEQ ID NO: 38499 - DNA, 4244 bp, Arabidopsis thaliana landsberg
aaccgttgaggagcaaaaatcaaaatcaaccgtacaagtgtaatttttcttttagccctcttcatcaaagaactgtaggatgaggaatactagatttttccgattcttctcgtctaagatcatcggtgaaccaagttattagaaacaaacaagcactgaggtccacaggaacattagggctcgagagaaatcaattctagtagcgcagaagaagaaattgcacggaacggcaagtagactaaattggcatcgagatttggagaaagaagacgaatgagaaatttgcaagtcagcaaaagcttaactcgtcgtcttcgtttaatccgctaatggacagtctagtgtagtgtagtgaaagcgaccaaagtcagagagagataagcgaaatataaggagtgtgataagttcacctacttatcataccctcggacggggtattattataaacttcaattaacgaggactggtttaaacgcaaaggatgcgggaatttgctgaaacaaaacaaacacagatacagtttcaaccgttattaaataagttaggagccgattggtaattattgataattctgcctctaaacaatataaacttttgttatatgaatttggtataagggctttgactatattataaatgatgattagtaaaaattgtgatggtagaaattacgattttaaataactaacaaatatggacgaagaatattatatatatgacatctataaattattattatatatatttaaaatattatatataaattttcttagtgaaatagaattttaatattgtttgttttacataaatttgtattaatttttggaagagttcatttttattatttttattacatcgataaaaaattttaaactaaataattatttatctacttgtaattggttttagaaatatattaattacaaagaaaaaactactttccatatagaattgttttaaaaattacaaaattaaaataatctctttataaattaattattaatttatcgataaatattatatagaattaatcacttatttcctcatagcccatgaaatttcccaattttgtggtttcatagaatctgccgaggaaaatctacgaattctcatttgcatttttacttttctaataaacttggcgtttgggcttagttttgagttttgacacagtttgtaatgcatttatggagagatccaaattccaaattacatacaaacgctacaagactattcaaagcaatcaatcgcgcaaaggagatggattactccgacaaaccgggcaggaactatgcaacttgagccacgcatcaatacattcagtatggaagcaatgttcacattcaggtaaacacctaacagtttctttggttgcatattccgacaaacaaatgggacaaacaacatcatttgacccggtcgggagtctcctactctcccctagctcaactttcttgtatgactcaattgtagactcatcgagacctatccttgcgacttcgttgcttggctgcgacgttacggatccagaaaggcgtgcaaccactgcttgttgtatctgtgaagagactctctcggaactgcacatgacaagaccgacacaaaaagtcaaggcggtgagtggtccgactagggagaggcacattatctttagtacttgtaagcctgtgttgtgaagtcctgttttcaaaacaacaaaacgggtcaacggtgaaacttgtatgtacaagtattcatatattctaatgttacgacattctctcatgtttgctatttgaaaagatattgatttattaatcaaagtcaatggtttaatgtcattatttaaagccaactagattcatttctttgtttaattaacaactccttggatttgaagctttcaaccatttatggattctttgggaaagacttttttcaaaagtagatgatgtcgttcaagttggaatatcgtgcagtacaaaagaacagagaagaattgagattgtacgcaccagggttaacagaactgaagcattcgacttgatgggaagtattgtttttgaatccacatcttgaattagtcctcctctcacaatctctacaatccggcgagtcccatttgagccacatgtctcgactgttttggccatcggggtatgtcgtgtaggcgacaaaccaagaaaatggaagaggtaatatcttaaagatgtgacaagaagatggcatcgaaccgagattctcaaactgcacaacaaagaaggaggaagtggtattaccaaggcaatcgatagctctgaaggatgcagtgatgttcgcttccttaggacagatcaagaacgtgtagttacgagagcgaagaaaagaaaaaggagatcctgaagggtcaaagttaagaagtcgtctggccaaacaattctcagggtcgttgaggcgaatacgctgtgtttcatagtcgatctccttaacaagaaagggttcagacttaggaagctttaaggtagtattggcatcatctttgcatatgaggttgaatcctgagtagccacatgactcaggttggtaggagaatagggagaaagggaaacgagcaacgacgctctcttgactacatgagaaactgtagcaaggtttttgttcggatgcgtttagaagcggaaagaagaagaggaagatgagattgaggaggagaggaagtagttttgaggtcataatgtggtttgacacaaagatatattaaaaagttagaaatgagtactttatacactaatggagaaggccctacgtttcctattttttactattattgcattttgaactagtattgcacaaagataaaccattgtcattttccgatttacggctatggtctaggccaaagtcaatctatatataaacctccaatcgtatattttgactaattaatgagaataagattattaacttatagaaaacccaatgatgttatttcatcaccataatgcattgacgagcatttttataaaatagctgcatgtcttttcttctcattaatctcccatcccgcgacttctatatggaagtgtttatatattggattttttcttttctgttttcagcaaaatgattatattaagaatgaaaacgatcatgctatcaaattacaagatttcggatatctaggaccagagaggaacgaagatgaatttcggatatctaggaccaaaggtggcatattcaaccgtcggaaattggtctttcattctctttgccagcttagaagaaaaaggcaaatatgcttttaaaaatacaaatcacacccagtgggattcgaacccacaatcgcttgattagaagtcaagcgccttatccattaggccatgggtgcttgtgtaattacattgaagttttataataaaaaagaacaaaataacgaaatacgaaacaaatttaccaatcatgcagtgtttaatcacaaaatagttttcttccttcttccaagagattcaatgaagtcatgaatttaagttctgtaaaacttaagagtactattgaacttgttcttagaacaaacttttgcatatttaaaacctaaggacaatagagtcatttggtacgaaaacttctctgcacagaaaaaacagcttaaagcataagcagcagagattaataaggaacgtttcctatagagggaccatctcgagatcattgtgttggcttttggcagatgatggggatgaggacgaagaagatgaagcgtctcttctctcctcagtgttcatctcttgaactgggggaggatccatagtagttgatgatgaggcttctgtatcagaaagatgattcttcatctccctgtgttcctggcacaaagcacaccagtgcaagcaacagtgaaccatgcaatgatcacaaggcgcattctgcaaaataatcacaaagatcaatcagagataatatctgatatatgagaacgatctgatgtgggatttttactttaccttgagatgatatttcttctggagttcttggcggaacaagcctgaatagattccacacatccaccaagcaaagaagaggccttcgcagatcacaactgttgtttgtggatcaatgtagccactgaagagtgcggttactgctgcaagtgccatacctccttcgacacatacagcatggcatacacatggttgggtccaaggaatctcttccctcacagcttcaatgttacgcccaaacagaacacacggacaaaagagaccagtcctgcctgcaaaatcatacaa

SEQ ID NO: 38500 - DNA, 1889 bp, Arabidopsis thaliana landsberg
tgtgcatatatgcatctagacagactgtctgcccctatttaacccccttcaaagttaaaagacccaagtcaagagaaatgaattcctccgacgtcaacttctccctactccagagccaaccaaatgttccggctgaattcttctggccggagaaagacgttgccccttcagaaggcgacctcgatctcccaatcatcgacttgagtgggttcttgaatggcaatgaggccgagacgcaacttgcagctaaggcagtgaaaaaagcgtgcatggctcacggtacttttctagtggtcaatcatggcttcaagtcgggcttggctgaaaaggcgcttgagatatcgagtttgttctttgggctatccaaggatgagaagctaagggcttataggatcccggggaatatctctggctataccgcaggtcatagccaaagattttcctccaatcttccgtggaatgagactttgactttggccttcaaaaaggggccaccccatgttgttgaagactttctaacctcaaggctaggcaaccatcgtcaagagatcgggtaaatctattgcatgcatatattgtagttatagtaacgttatgataaaccctatttgaatctagtgtgtggtggcataatgatgtagagtttagggtcaagggtttaaaatttttacgcgctcatgtttcatttcacatgtaaactttgcccttagaccgcttgatcacttgagttttcgtcaggtgatttagcggtggtgactttatttaaaactatttgccaaaggtttgctcgccccgggattagttgggcactttgacgaaacccgaattcccgttactaaatctgtaaaaaaaatcctacttgatgatgtttacattttaaaatgttaactgttttgttgcttgaaactcttgtttttttcagtcaagtgtttcaagaattttgtgatgcaatgaatggactggttatggatttgatggagctattgggtataagtatgggtttaaaagacaggacatactaccggagattcttcgaagatggaagtggcatcttcagatgcaactattatccgccgtgcaagcagccagagaaagcccttggtgttggcccccataatgacccaacggctataaccgttttgcttcaagacgatgttgtgggcttagaggtctttgccgcaggtagttggcagaccgttcgccctcgtcctggtgctcttgtcgtcaacgttggagacaccttcatggtacgttaccttttaatgaataaggctaccaaattttctcaacaatgacaaaatttattagatacaatacaactttccgaaaaattatgctttaactttttttatgcaaacgccattgttttgacaaaatgggatattacacgacatctactgtttttatattttttggggttgttgaacataaattaaatacacagttttataatatacaatatatatcaaataatgtgaaatgattaatttatagttttttttcttaatattttggatttgattttggaaggcattgtcaaatggaaactacaggagttgttaccacagggcagtggtaaacaaggagaaagtgagaaggtcattagtattcttctcttgtcctagagaagataaaatcatcgtacctcctcctgaacttgtggaaggtgaagaagcttctagaaagtaccctgactttacttgggctcagcttcagaaatttacccagtccggctatcgagtcgataacaccactctccataacttctctttgtggctcgtctctaactccgacaagaaatcaacttgacttcagctctctcgattcatatttcctggcgcccttcgattatcaactaataaaccatcttatgtgacccgcgtttttac

SEQ ID NO: 38501 - DNA, 9703 bp, Arabidopsis thaliana landsberg
agtggatcatccattggcaatccatggaatttgttcccctgaatcatcgagatgagaccactcttaatctcgaaattgttgttctggatagcaggaggtgcaattcctttcctcttttcctctgacggtgatcacgtggtgcatatccagcaccaatgttggtagggccattttgttgattctgttcgtcagccatttcgagtggttgctgtgttatttggttgactgtggttctcctttttctgagttcgcgagctgtgcggttgatgttattgttgaaaaagaggttctggttgcctgttgatcgagtttgcatacagtagaggtgtacctggatcaagaagacaacaagaaaaacacacagttagtaactgaaaagaaaattgaaaaagaacttgatctaagcaagtctgaaatctcaaatgtaacaaacaaacacccaattggcaacggcgccaaattgataataggttttttagtcaattatcctaaaacacaaatcatatcattgtagtattttaggttttcaatccaaatgggtgtgatactaacaatcaagatgtgatcagaagtcactaagtcaagccaagcaataacaggttttggtgtgttctagcagttctaagtgaacatgcagaaaatagaaattcaagcagaaacaataaaacactcgaccaacacagctctttgcaaagcactgggtgaggtcgagtgacaggtcgagtaacagaaagaaaataaaacacagatactcgactgcacagtctgttgccagacaactgggtggtcgagtacgaggtcgagtaacaagaaagaattgcagaaattaagcgacagataacaggatgcactaaacaacaatagagtaaacaaaaaattcaatcagataaagaattcccaaggatggggtaattgagtagtttcgtttcctcagtttacaggtgattgacatgctcaataaattaaccctagacaacaagttcattaaccaaatctaagtgccaccgcaacagagactctcaagttaagctagtcccagactcaatcaccattgacgagagctaacctaacaggcattacgaatcaacaagttaaagcagcgatcaagttatggtcaggagatactcgacttccaggttgaatgacgaggtcgagtagtggtatggcaatgaaggtgaagacactcgacctcggggtcgagtgatgtggtgaagtagtgatgtcctctactcgaccagggggtcgagtgatctgttgagatcttgaagctcctactcgacctcggggtcgagtggtttgacatgatcaggtccgcttcttccagatagctcgtcaacagctccaaatcacctgaaatcaacgcaaatatgcaacatgcatgcaaatctatcctaaacatgtaattaaagtgatgacaaatgatgagaaatggtataaaacagtgatgatatgatgctaaagtgatgacaaatggatgctcaaaacatgcaaaatacacacttatcagggacaagtatctagctccattgagattgctaaaaagatatctgaattgcaccaaaagctagactgcagctacaatgacctgaatgcaaaagttgaggcgttgaattccaaagtcagatagttggaaggacaatccgcatctacctcttctcccaaagttacgggacttccagggaagtcaattcagaatcccaaggagtatgttaatgttcacgctatcaccataaggagcggaagagagttatccactagagagagacccaagtcagtcgctacggatagtgcataccaagatggggaggatttcagtctcaataaagatcaagttgacaaacaactcgagcagccactcgaccagccactcgagcagccacttgaccaagatactcgaccaaccttccgagcaacatcaccaactgctctgaaaccagttgctgtcaaaaacaatgaaaaggtcttcattcctcctctttacaagcccccacttccatttcgtggtcgacacaagaaagagttagaagataagtacagagctatgtttgccaaaaacatcaaggaagtcgaattaaggatacatcttgctgatgctctaacgcgtatcccggattcccaaaagttcctcaaagacttgatcatggagagaattcaagaggttcagaaaacaacaattctgagccatgagtgcagtgccatcatacatgagaacgatgtctcagaaaagctaggagaccctggttcattgactcttccatgctccctaggttcattgactttcaataaatgcctttgtgacctaggagcataagtaaatctcatgccactctcagtagctgagagattgggttttaacatgtataaatactgcaatatctccttaatcttggttgataggtctgttaaactacctcatgtgttattagaagatttgcctatcaagattggaaatgtggaggtgcctacagacttcgtagtgctaaacacggatgaagaaccaaaagatcccttgatattaggaaggccctttttggctacagctggagcaatcatagatgttaagcaaggaaagattgatcttaatctagggaagaattttgaaatgaagtttgatatcaatgatgttatgaagaagcccacaatagaagaacagaccttcttagttaaggaagtgggtcggctagctggtgaactccaagtggaacttgaagaagcaaataactcaaaaactgttttgaccaagagtggtaaagttgggtatctccctagtgaaactttgagttttgagaagtcattagactcacacaagtcagcagttggctcagaagtttacaagggcttgatggggtctgacacaaaggttatgaaagctaatgaagtaagttcaacacatgctcgaccaactgattccaccaacaactcgaagaagcctccaacttgtcctgaaacctcatgctcgaccaaacaactcaagacgttagatgattggttagaactcaaggagagctctaaatggcaggacaaagccatacaagagctaacacatattgtgaaagagctaaaggatcaaatcaaggagctcaatggaaaagcaaaccaagtactactcaacatcaagaacgcccctgacgatggagccactatacttgtcagcaaagaaggatgtgaattcacgtcggaatggtctagaggagaagactatcttgataaaaaagaagcttactgtgaggacatggccactgagtacccaattgcagacctgtcaagaaaccctaatgagtatgatgatcactctactaaagaaggagaggagacctcatttcctctctacaacccaccctaagcctaatgagtatgagaagtcaagcttagagacttaaaacaagctcacgtgggagcaaatcccatgtctatctttgtacatatctttatttttccttgttgtttttgatgcatttggttagtgttttcaggagataagtataaagagatgagtgaagtggattctagctctgagagtacaacactatactcgaccacagagcaatgaaggatactcgaccatgttttagcttatccacggcaggagatcactcgactgcggtgctggccgcagcagaagaatggaggtcgagtatactcatggcggtgctggccgccatagaggcactgaggtcgagtacccacatgctggagctgagatagaacagggcggttcgtctatggcctgggagcaatcacaggcagccattgacgagcaactacgttcattcttcgactgaggtaagcgcctcacttcaccattgtattatatcatctatcttgatttgtttcttcattttgtttctgtgattggatttgtcctgagtactctcttccaagtttattcacacagtggactgtgtgatttaagtttgggggagggctcaggaagtttgtgttgcattgtatatatttttgagtctgcattcatctaaggcatagaaaaaccaaaaaaatttgaaaaatttcagaaaatgatttcacaaaaaaaagagtgttcatgtagttgcattacatttaggatcgagtctagagtgtttcatttaggattgcagcatatgcataggggatgatgatgagatagccttataagcattttgattcaccggataaactcagtgccctcgttgctagttgtctgttgcgtagtcaaggaatttgaaataaaactgaaccatgcctagattgctctactcgaccatactgtcatgatctgataccattccctatcaatttgaacctgaatctgatctttaattatcatgtctgcatcaaatttgaactcatggataccctaaaatacttggattttcttattcattttgatccctcttgttaatccaagtagatgactctccttattagagcagttaacccaaacccaaatctagactttctttcaagccctatatcacttgtgagtgtttgtgaggtcttattccgataaagcttggtagaaagtgttaggttcgtaacgacagagatagtgtctcatgtagttctagttcgcatttttcggactagataggactatgtgggcgctgttactttgggttgggatgtgtttaaaagaaaaaagggttgattcattgataagaaaaggtaaaagagtgtaggtgaagtaagctaaaaaagtagaaaaagtctagtaaaagttttgggatttgaaaagaaaagaaagagttcttgttagctattgaagatgggcaaaagcccttggttttaaaatgttaaaaacatgaaccttagttgttaaagaaatccaaatccgctagatgtatcaaagtgttgagaaagcttctcctagagttaagagaaaagaaaagaatgattagaagataaaaaaggcttaaaagattcatgaatgcagagggtagaataagatcttatattgcgattggagatgggattagtgttggtgcaggaattagcacttccgacaataccaatttaaaccaaggaataacgtgaataaaatcgagaatttgattaaaccggggtatcccggctagcctgttaatgggcctaagtcatgagctcgccagaagatttaggtcgacagttaacatcgccataggcggcttctcaggtcgtgtaaagggaaaacttccatttaagagaagaggatctcatgaagaatagaagtaatgaagatctagacttaggataattagaagtctatcatattttggtatattcgacccattgtatgaatagaggggtcaaaccccccattgagaccatttttcacctaatacaagagcctactattacagagcaaaccctagctttttgttcaagcaacttagttcttttcctttgattatttgtgagctaagagaggagtgaatttgtctaaatcccttagtacaaattcattgtttgcattagagcttcatttgatatactctgggtagatgggatcttatctctgtatgcatagcttgggacttacctttagcattctactaaagcttaatcattttttgagagatcccctgttactgaagcctattctgtaagggaccatctttgtctcttgaccttttaccttagccaaatgagttcattgatgatgcattgcttgattcacgttccagaactaatgaatgttaaagggattggtagatttgaaaacatgtgtgggtcgagcatatgagtcggattgattgataatgaggcatggctaacgtttttaagtagaattcgatcttgcagcttaaaactttcaacttggacattgatttcatctggtctatctagtgctttggctctgagtccccgctttcaaacctcacttccagcttgttctcgattgtttgcttgacggcaagcaaagactaagtttgggggagttgataaatgtgtattttgcatgttttgagcatccatttgtcatcactttagcatcatatcatcacggattataccatttcacatcatttgtcataactttgcatgtttaggatagttttgcatgcatgttgcatatttgcgttgatttcaggtgatttggagctgttgacgagctatctagaagaagcggacctgatcatgacaaaccactcgacccagaggtcgagtaggagcttcaagatctcaagagaccactcgacccccaggtcgagtagaggacatcaccacttcacttcaccactcgaccacgaggtcgagtgccctcatctccatcactcgatcacatcactcgaccatgaggtcgagtgtcttcacctccatcatcagacaaccactcgacctcgtcaatcaacctggaagtcgagtatctcctgacaaacactcgactgcatactcgatgacgagcttcagagcattcttcattccgcactcaaccagacactcgagcacaaggaagataagaagactccagctattcactcgacctctcactcgacaacgtgggtcgagtacagttcttaacccgtccaaatacttcatcgttttgagtattagggttttcgggatatttagctataagtagcatgtacttctcattttcgcagacaagaagttttttatctaattctatttccgcagaccttgtgttctagactttttgtaatccggatttctctttatctattcagtattcagtattcagtttctgttcttgatttcgtttactgttgttcattctgttatcatcctgctgttacattattgttatcatgttttcaatttgttcaacgtttatgctttctattatgatgtctgagtagtgaataggtttctgaggatgggttagagtagtgtagaattctcagtatgctaggtgattgagtattggttgatagatcccttctggattagttgttcttaatgcctattgctttctgatcaactggaatttgagcccagacatttccgcgcccaaaaggtgttcgatgaactgtctgaaccactaattccagagattcgtgaccctgtaccaaggtattggttggagggagcgttttggctttaacttgttgattcgtaatgcctgttaggttagctctcgtcaatggtgattgagtctgggactaggttaacttgagagtctctgttgcggtggcacttagatttggttaatgaacttattgtgtagggttaatttattgagcatgtcaatcacctgtaaactgagaaaacaaaactactcgattaccccatcctcgggaattctttatttgattgaattctttgtttactctactgttgtttactgcatcttgttatctgttgattagtttctctaattctttactgttactcgacctgatactcgaccacccagatgtctggcaacagactgtgcagtcgagtatccctgttatactttctgtctgttactcgacctcacccagtgctctgcaaagagctgtgttagtcgagtgttttattgtttctgcttgaatttctgttttctgcatgttcactcagaactgctagaacacaccaaaacctgttattgcatggcttgacttagtgacttctgatcacatcttgattgttagcatcacacccatttggattgacaacctaaaatactacaacgacatgattggtgttttaggaaaattgatcttaaaaacctattatcaggaggaaaaaactattcaaacatacacagtgtttccacaacttcacgttccattactgagataatctctctgtcaatgactctctggcacaaatggttgaagaatgcacataagggaaatattgatgtccttggaccttttggtaaatgccctctaagtgcattaggaagaagttgctgcatcaacacgtggaagtcgtgagacttgagtcgtgtggtcttaaaatcccctaatgatacaccccttgaatatattagaacaatattcatctggtcctttaaagtcaaataatcttttgcataatatttttttctctttaatatgacaaagaccaaggtgctgcatgtagatatgttctctttccttgtgtatttggatgcaaatccttcattataccaaggtgctggagatctctacgagcattaagaccatcttagattttccacaatgcaacaatgtaaaaacaatgcttgaagcaacatttttctcataatgcattacatctagcttatgccttacagggagatcttataacaaataaaagtatagttagattggatttgatccatacttaatcatagcataattgatcaattatgcaagcatacctcccaataagacagcttgaacaatatagatcgtttcttccaccttgataattcctcctggtctacttatgattcttcatcttcctcggattcactagacgaatctgaactctcaaaaactggatcaatataggcagtcttttttctctttctcccagaacctttaacatttccaaaatcgtttctgtagtttttcaggttttgatagacttcatgaccagttaaaattctcccctttctcccatgttcagtcttcccatcaaaccatgttttcttatctctatatctatgtgttggtgccaatccctttctatggcacatatacacatgcttccggctatacttcaaccacatagaatctgtattttttccacatacaggacaacccattttccctttaactttgcagccagcaagattaccataagcgggaaaatcactaattgtccagagaagcattgcctttagagtaaaagtagatttactataagcatcataagttacctctccattcttccacaaatgatttaaatcctcaataaggggttctaaatagacatcaatgctattaccaggttgttgtggaccaggaataagcaagcttagcattatgttctccttcttcatacataggtgaggaggcaagttgtagtttactataagaacatgccagcaactgtacttagtattcttcatgttgaatggattgaagtcatctgttgacagtccaagccgcatgttcctttctggtgaagcaaataaagggtacttgtcattcatcttttcccatgtaacagaatctacaggatgacgaagtttgccatcactagacttgttactgaaatgccatcttaagtcttttgccatttcctctgttctaaacattgtcttcagccgcgggattattgggaagtaccgtaatactttctgtggcacacctttcttgacttcacccgtctgcatattaatcttccaccttgaagcattgcatttgggacaattttccagcttcttgtacttctttctaaaaagacagcagtcatttacacacacatgaatcttttgatatcccatatcaaagctcttcaaaaacttcttcacatcatacaatgatgtgtgaagcacattgtccttgggaaacattttgggcagcgtctcaagaagctcatcaaagctcttgtcagaccatccattcttggtcttaagcctaaagagagacacaattgctgatagcttgctgtggtttaaacaatcaggatataaaggggtttctgcatctgctaccttggctaggaactcatcttctctcttgtcctcaccctctgcaatctcacctaagttagccactagattgtcacctacatcaccattagtagccaagtcttggtcattgtattcagcagctttgtataactcatgaatttcctcattcgaatcattgacttccctttc

SEQ ID NO: 38502 - DNA, 2048 bp, Arabidopsis thaliana landsberg
tcttgaggatccctttaatcatataacaattattctagctatcgcaaacacactaaaaatggatgtagatggtaagcatatccacctgtattttacggtgcatttcgtccgtaaacgcgaatcccactagtgctcttttcaatggctgcaacatgggcgagaagttcctgaacttgtttgaccttcttgccttcgtccgttgtcctgtaatcaaagaggatccttatgccctcacacaatctaagaactgtcgtaaattgcacaatccaatatttttattaaaaaaaaacatataagcgatgctgaacctttattgacactatccaagttctttagaataaatcaaagggatatataagaccttcagaaattcaaggcatccttagtacaagttatcatccaatgttcatattgtgtgctttcaactcatcaccacctgtgaataatactactaaaatatgtcaaatgatttgactcccaaaaataacttgtaaggtattaagagtagcttcttctacatgcgaaatccgacttctcactcgcagaactaactccacaacatgcagtccatcttcctctggaacaaggatcattgatgatttcctgactgagatcttccgccgacactgacagatcgatcagacctgtgtcaacaaccatagccaatatggagttagttttttcaaactatatgtagcatcggttattcagaagtacctaaaatttgatcaaggttgacgcttaaattaatgtcttataatgttggagttgtctatccttttgttggtggatattcgatttttacacagacatatacagcctaagatttatagtttatgtgtattaacaagtatgaacataactaaccggtgattgagtgattggtcgagggacttttaaatacaaagttattgtttctggggtacccttgtttctgatagtcaagtttttatcatcctttataccaaaaatactagagtataaaggtaccccaaatttgtttctcttgcttttcacttttatttctaaaacaacaaaatatgatttgaacttttaaaaaatatcaaagtctatatgtctgtatgtttcacattattcaaactcgtttccgcgacaaaatccggctaaaacaaaagcgaccgtgttttaactttttaatgtcaaataacacagactgatttgttgattcctagatagacatgcctttgagtatgcaaacaaattttcaaaactacctatctttagtaacatcaaatctatgtaagaaattagaatcatagatcaagtgaattataggctatattcaaagtcttaagcgaattcataccaggagtgtcaatcacattgattcccgtgccacatggtgttaccgctacacatgtttcacatttcatggtaacaccggttgctcgtgtttctgacctgaacacttgttttccgataagggagtttccagtggcgctttttccgtttccggtacgtcccaccaaaactatgttctttattggctctgatgctgaaggcaactcccaacggtcaacgtttttgacgggctctgacgctgaaggcaactcccaacggtcagttgtgttctgatcttcagccatctgaaaaagaaaaaacaaattttgtattagtaaaatattttaattccctacaaaatatagaagagtagagctatttcatatcacaagttttggtgatgcttgtaattgtgtttagaaatcgtgaaaattttgagccttggttggagctaataatccatacttacagctaattatccttttgacatacggagacagttgagaaaacttccgttcattacaagagatcaagttgaagattgtttaagagagaagacatacaactaatggaaagatatattgaaaactataagtagcacacaacggaaactcatatttttcttaccaaacagatcaagttgagcccacaaacagaaggacaaaactgagaataaatggacaagataatacattgatcttatataagttaaataggagaatgcttggccaaataattgtgcaaca

SEQ ID NO: 38503 - DNA, 4633 bp, Arabidopsis thaliana landsberg
  unsure (1)..(4633): unsure at all n locations
atgaattaaaaatatatgtaaatagcacaaaaattctatatgtttccacctaatccgaaggaagtcaagtcacgatgttcattacactacctgaccatctttttcagttgtggtctatttgaaacaaaaacactttaacttatactccattattatacttagccatttaggtggctcctgattaatgattacaaaaataaaatatactacgatataggtcgctcgttaatactcatagactcatacattacagaacaataaaaagaactgtctttgtatattgttatgagcaattgattatgaccatcttacactatttgtaggctttgtgcaaaattttattatgttaacttaaaacatgtatgaatactctaataacacatgcttaaagactatcctcattacgataaataagaaaaatgagagttttcttactagttgaatagtaagagacaaagacttttacactaacttgaaattgataaagtcaagtatcacaaaaatacatacaaactgttttcgatgtttctcaatagaatcaaatatttaagcaaacaaaaaacatattagggttaaaattaatcaaccactacaaacttaaggtccctaacacaaatcctaatctttcaccaagtcccactattttcagaagaacccaaaagctcctcaaggtactgttctcccaaatcctcaaagacaactacattatctaacttcacggagcggtgatcaaagtcactgtctttcgtctttttattggtcattctccgtctcatcgagtgtttcctcttcaacgccacaaccggagaacaaccatcctcgtaggtatacttaatctccgaaagcgactcttgaactctctccgccgaaaaattgagaatcgccgaggaccctctcatcgagaaagcagctatatcgtaggctaaagccgcatcttccgcgctttcgaacgttccgagccaaaccctaataccgtttttcgccggatcaggtatctccgccgcgaatttcccccacggtctctgcctcactcctctgtaatgcttcgccttcactgccgtctccgtaaccggtatcgctttctttggtttctcctccatcgccgtaaagttctcagttggctcgactttaaccgccggaaaatcaaaaagacagctcaagtccgatgatgacgtgtcaaaatggaaggcatctttgaggagtccgtacaccaacatgtcctctgaatcattctctttcaatggcaaacctccccaactctctgtgaaacacgaactcggtgttgactcattgagtcgcagctcgttctctcctcctcctcctagcaagtgacgtgttatcgactccaacaaagcgtagtcggattctatattgcactgtccgtacattttcagagaaactaactatagagttttttttgttttgttgattgatttatcaaatatctgaacttttttctatgtggaaggtggttaagaggtttatatagagggtacgaggttcacgaacctggaaaaaaagaaaaagtttttcatgtttttccaaatttgttttagtttagtgggtaattaaaaaatatgaaagttgtggatttttcgttactacgaaggttcgtgaattaaacacgtgcgctttatccacagatatcacaatgaagaagggtcaagatgacgtcatgtggtcatgacatttctggaagaaagatgctgatttggttttgtctctcaacttgtcccttgttttgtcgttcggttttgaatacgattcccggttttattaggcaaaactagtgtttaattagtttgttaatcgaaaaccaaggtcttaattcattatactttgttatatcgacataaattttcaactaaacttatatttcatcgccttacactagagtaataatttttgcttaagtatactttattagatagtattggcaagtatattatatgtttaattacatgaaatctaagcttagatcttgttatggtggtgaatgaaaaatcttaacgaggtgggccataattatatgaatggggacactgaaagtgtctgcaaaaatcgggatacatttcttctggtcaccaaccaattcatatcatcatctatccctttcaccttgcattattactaatttctaatatagaattgtcctaattgccaatgtcatgtttattttaggactcttcggtacaagatttcatgattgagaaagtcattagcgccactttagtcaataaatatggagtagtgaaatcatagtgataaagttttcatgcaaagctcaatttacaaaccacagtttaatccatatttgttgcatttcttttctttcttttttgaaaatataacagccttagatctttttgtacaccaatgatttggaattttgtggataattattgaatttccatctctttctattggctaaaagtcaataacaacaataaggctcaaagacaaattaatggtgggtctctcacgtatgtccacttgcaaaagggacctccttcacggaagcatagtttagtcaatagtcactcaaactctctaaaaattagtttactatatatttttaatctatattcgattccaagagtagttttggttcaaacacatcattctggtcagatggttatttcaattttgctgtttttgagtgtatatatgatgttatgtttgtaaacaaatgaaacttttaattgattacaagaacatgaatagctctaaatatgattaaaaacgaatttatttatttctttggtaaaagaataatgataatatacttatggatccaatcaggttaagttccgttttgcaattaaatactttgattaattaaatatgaaagtagtagttgaactttcgtttttatgtttgaactccgcagctaatcctcaaattatctctttggacgtttcacatacatccacttttgctgtatcttaggaatatattgttttcatattgtttcttgtttctttatgatttgggtttatataattttcaaatgtcatgatgatcatcatttaatcttagttgttttagtcacatcttattatgcttattattagtcggtgatagtttaattttaagacgtaaatcatctattctcatattatgctagaacaaactttttctttggcaacctcctagaacatatagtcgcctattatccatggatcccaggtactcctccaagaccaccgaaaggtttaattatggataggaaccctttggtctacgttaacaccttgattgacttcgagacgaagaggtggaaagtagatcgtctacgggagttgttcctcccccccccccaggatattaccttgattttagggataaaaccgaggctaaatgtctcgcgagatggatatagttggacattgactaagttcggtaattatactgtcaagacaagatatgaagctgcgagagccctctctcgcccgtcttgcgaccagcctcttcagggacctagtgttacggcactaaaggcgcaagcgtggaaattaaaaactacacgaaagctaaagcattttgtgtagcaatgtgtgtcagagtgtttagcaacttgtcaacgcctatattttcgccatattggtagagataaaaaatgtcctagatgtggggcggatgaagaaaccatcaatcatttaatatttgaatgtcccccggcaagacaagtctgggcgctatccggtattccctcctctccatctaggtttctttcgtcttctatatacaataatctcgattatctgtattgcagagcgaatgagattggagcttgtgagangcagcttacgggtctttccatggataatctggtatatttggaaagcgaggaacgaaaaatatttgaaaatgtggataaagatccgttagacgtattatgtttagcagaaaaagaggcacaatcttggcagttagctcaatttgagctcaattccgagaataacggttccatgggatcggaaaaacaaatttgggtccagaatatatcacacgataatatttattctggtttgcgttgttttgtgcacggatcttgaaaaggaagcgataagttttcttgattatggtggttttgcacatcatcaaatggagactcgccagccatgggagctgctaatcttcgtagaagtctttctccactccatacagaagtcgaagctctactttgggcgatgaagtgtatgattggtgccgacaaccaagaagtagcattttttacagactgttcagacatggtgaagatggtgtcttctccaaccgaatggccagcgttttcaacttatttggaggaattccggaccgacaaggaaaatttcataagttttttcttatcttaaatttctcgacgtgcaaatgttaaggtggacaaattggcacaaaaaattcgtactgaaccactacatatcacttttgtaaacaattttcctcgtaattggcttttctgaactctaaataaaatctgatgacaaaaaaaaaaaaaaaacatttttgagtttggatgaaattttgtgaatgtgatgagatgtttatggaaagcagggaaaaaagcagcagtgtatctaatgaagtcagattgtgaagatgtagttggtaaagtgagtggaagtggaag

SEQ ID NO: 38504 - DNA, 277 bp, Arabidopsis thaliana landsberg
caaacactccggggcggggatttattaatcagccaacaagcaacagccgcataatgcacactgtccactcgaaaagcgccaaagaacaagccaacaaagaattaatgactcgctccccgcgcacggagaggcgactaacgcaaagatacttatcccagaacaatgaccaacttctcccgggaaatgagcgttgtgctgcggcacacggtttcttctatcctccaggccggtggccgattgagccaagacataagggatgacgactgatagcacatgt

SEQ ID NO: 38505 - DNA, 4560 bp, Arabidopsis thaliana landsberg
taccatcttgttttgatctcaccactattatgacaccaatcaagattctattcacgctagcatcatctccgatctaaacatatacgaccaggcccacaaggttaaacggatgaatgaaccgtggagatcgccttgctaagcggcctacggagaaggacgcctgacctgacattccctaccggtctattcttttccatctcgctaacaccaatgttcggtccgtgttttttgttattctttggctcagctcattgattttctttgacttagctcattgtcaactatacataaaatttgggtggtctactggtcttgcataatagttgtgatttaattagaggtcagcacgtcaccgttataaacatactgtatatatatacggatattccatatgtctagtattgaaataatcgttgtgactaagttgttatttttttccattaatcctacctatataaaataaaactgtatattacttgaatcacaagtcactgagagacggtcaaatctacccatttgtttttttaatctacataaaaatcttaaatcacaaaaagaaataacttcaaatgcaccatcaaacaaaactttcctgatgaacttcttgtgttttagtagcatataaatggtttatcaacaaaacggtcatgacaatacaagcctggtcgttgactatacccccgtttcttgagaaacactctagcttcggaaaccaattctttgttcgtaatcttcttcttatcctttctcggcgcggacaatatcatctgaatcgcatcactgaatgctccataagcttttccagttcttgtcacataaacatcctctgatctctgatctgtttgacatccacttaatagaatcccattgtcggtaacggcattcaatcttgaagctccagaatcacctgcatcaacctcgcagtttcctaggtcacttaaacctctctgacgattcgggcttgggtcttcaccgaataatttgagaagtgtctgtctaattctcacaggttcgatattggtttgcccggtttgttccttgagaagacttaagtagctttcgaaaggtagatatcttgtttttatatcaagcgtttcgtctttctctaattctatctctcctctaaagctttcttcgccacctccacggtctctctgagattttgagactccacaagtcgctaacaaattcatcacaatgttaaggaagtaactagcaatcccgagttttggctgcttcatatggcttttcctcgatctgctccttaactttatcgaccggcttcatatggctttcaccgatctgctcctttacttcctggatgagaccaccactatgacaagagtccgagattatcgtcaactgacaaccttcttttacacgtgacaccatttctctaaattgctggtctacaaacacatttgtgcaaaaaaaaaaaaaaaaaaaagattagaaaaaacaaaaaaataatcgtaaacactaaaattcataatatcgatgtaaaaccagtggtaacacaaaaacgaccaagacttgttattttcaaactctatgaacttatccaaaaacgcaaaagatttgaggtaaatcgaaattgcgatcaaaaacgtattgctctgtttcaagaaacagagcgctctgttttctttatgcagctgagggctatgttttaaccaagaattttgtttggatgaatgcgtatgtactcgaagaaagaaacatgaaaaaaaaaaaaaaaaaaaaaggaagacgtcaaacccatacaaaaagcgattacttttgatctcataccctttattagattcatatcgcacggagtgatacactcgtcaaaccctgtagagtcgtctgagtcttctatcccaggcgggattctcgtgccatgtccactgtaatgaaagaccagaaaatctccagattgccctgatgcgatgagtcttttcagttcttcgcagatgtttttgcctgtaggttggatacatgatttgtctgtgtctatcattatgacgatgtccttgttggcgaacccgtaaagctcgattaggcatttctgcatccggtggacgtcgttgacacagccacgtaactccaccgtggttcctgggtagttgattcctatcaaaagtgctttcttcgccattgacgaatgaatgaatcataccttagttttttctttatgaagagcatttatttttctcgttatttataagcgaaagacttagcattttatctacctcgaaaggtttgaagacggcccaacatgcttgactgttatttagcctcttctcctaagagaaactatgtgtgctgttgctgttattggctttttacgtctcattttcaattttttccttggtctttggtttttaagtgacggctatttcctttatagtttttattatcaaatgttaatatcactctcatgttactattaataaaaagaaagtgttaatggactatggtctattattaaggaaaaaaacatgagtgtcattaagttaatcgtctggaatagtctacgggtggccaaaaaggaattatatgagtaggtttcattcattttaaaagagttggcattagcttgttgacaaagaaaaaataataaaaaggctggcattttctttactaattattccacatgcggttgtgaatctaagatccataaattaattcctattttaggaaactaaaattatgctcttgacttttgaatttctgtttgggtcgcacttagctgatccaaaaatgaaaaattcaccaattatcaaagtgagacaaaaacaaaacggtagtccgtagtaaatagcaaacacaatcggaatatgtaaggtccaatagtcaatattagctcaatagttaaggcccaatagtacttttaggccttttgtgtctgtaccactaaagcctccataggttcccttcgtttctgtgtaaagggcatgaatgatgaacaaaggcggtggttccggtggaggaagcggaccaacagctgctgcggcagccgctgcgttacagaagcaaaaggcgttgttgcagagagttgatactgacatcacatctgtcgtcgataacttcaatcaaatcgtcaatgtcgcaagggtaagtgattttaatttcgcttcgtctttggaaatttgtttacaattttttcgaattttgtgaacatctgtgggtttttttttttgtaggtgagtgatccgccaatgaagaactctcaggaagcatacatgatggagatgcgagcatcaagattggtaatttgatatcttcaatcaatcaaattagaatgattatcaaattaggcagatgcaattagggtttagggtttaggacagcatatgctcacagatatgaaatgtctggatatttgaaacattcactaatgagtctccaaaatctaatctttttacttttggttcaattgggtttgttttgctagcttttatgtaactgagttctatattaatggtgtggcaggttcaagcagctgattctcttttgaaacttgtatcagagctgaagcaaaccgcgattttttcaggatttgcatcattaaacgatcatgtagaacaaagaattgcagagtttgatcaagaggccgagaagacgaatcgattgttggctagaattgctgatgatgcatctgctagtcttaaagagcttgagtctcactattactcttctgctcagagatcgactctagacatctgatattagaatgcctggagacaccagaggaaacagataaaacaattggttcataaaccagaggaaacggccatcgaaggatatgcagtttgaagtcatggacaacgttttggactatcctttcccacattgatcatatttcctctctcaattcgcatattacttagcaatcttaaatgttccagtctgatgaacaagcgtttgatgttttcatcaatcattagtgatttttttgctgttatcctcttgtatgttttgataattacgtgaaattacattctcttaacctgcaaagtgtatatcgtccaagtaaaaccttcttgatttaattcgcgttgaaccaaatttaattatattccacttttggattgaaactatcaaattcaaattagcttgacttatgaaacaagaccgacccctcgaggttagtggacttttatgaaacgcgaccgactcttcaaggcccaaagaaaaagagaatattcggcgggataggggtacgtttgtaatttggcaaacgatgttatgttaaaccctaacttattatttctttcgattcaccactataaataaactcgaatcccaaacatagctttattccttgcttcatttttcgtcaccctagccgctttactctcttgcgatatctctgaggtaagctttttcgtcaccatcttcgatctgcttctttctccttctgttgatctgtgttgaatctgtttcgatccttctcgtttgtttgttgtaatctcttggattcgattctctttgtttatagatcgtttggaatttctgatctgtggtgtaaagttttatcgatttaggagaacaaagttttacagtgccatcgta

SEQ ID NO: 38506 - DNA, 3244 bp, Arabidopsis thaliana landsberg
acaaacacttgaccggaacatttcatcaatttcctctaacaaagcttaacccgaatcgatctcaagcgcaacagtctcagcggtataatttctccgacgtctcttccgccgtcgttacaatatctctcgctcgcttggaaccagctaaccggtccagtataccgggttttactcagattaaaccagctcaattaccttgatctcagcttaaaccggttcaccggtgcaatccccggtcagatcttcaccttcccgatcaccaatctccaattacaacgcaatttcttctacggcgtgatccaaccgccgaatcaggtaacaataccaaccgtcgatttaagctacaacagattctccggcgagctttctccgcttctctcgaacgtacagaatctatacctgaacaataaccggttcaccggtcaagttccggttagcttcgtggatcggttattggcatcgaatattcaaacactgtacctccaacacaacttcttgacgggaatacaaattagcccggcggcagatattccggtgagcagctcgctgtgtctgcaatacaactgtatggtgctaccggtacagacgccgtgtccggttaaagccggtttgcagaaaactagacccacaacccaatgcagcgagtggcgagggtaaagacgtaatttcaagaagttgtttgattttcgtgtctttctccggtagataacaaaaacgatttgtttattcgttggtgacttcgtgaattggtaaaatgataatgatgatgtatctcaactttaattgcatcacattatacatatgcttcgaataaaatgttatgaatggtattattttttgtttgatgatatggtaactctgaataaaagtgtcatttcataaagaaaaacatacttaattttcactctaaaaaggaatgtctgaaaccaaaccatgacagaagtatatctatatatacatttttgcagctattttgtgaaataaatcttgtagttgagacttatttacaatgggtgtcactggattttaatgtttgtttttgacaattagaaaaaaatctttgaattaaatatttgatatttaacaatcttccctaaatctctccacattaactacacgattagttactaacataaaattttcaaaatatgtaatatcatttaattactacgaaattatcatttttgatattgcttttctccataactataacaattcgattataatcatcaaactgcagaaatatttgatagcatttaattactacaaaattacaaaatatttagacaataattcataaacatatcataaataagatcaatattaataaaactaacgtttttttatgggacagattggcgggacgggtttggcaggacgttacttaataacaattgtaaactataaaataaaagtattttatagatagatacaatttgtaaacttttatgtatactaactttaaaaaataaattgtttccgcggtgtaccgcgggttaaaatctagtttaaacttggtttttttaatcataaatctaaaccttaatcctttctaataaacccaaaccgatacataattttgttttaaggaaagattagtttttttagttaaattaaattattatttttattattagatggcaaattctgattgactaaaattaaggaggtgaatgtaaaagttcacccctacgggtgaacccaaatatttttcttaattgttttaatttagttaattagatgacatggcaaattttaattggttaattaagaggaggtgaatgaaaggggttcacccctccaagtccttctcctctaaaatagagtaaatagtagaattgctctatatatagagtaattgtattctttaatattatctctattttcgagtaacatatagagtgatacattggagaaaaatcatcatgctctatttttggggaaaaaatagagatttacaatggagattgtcttaagacttatgaagaattcgttcaggatccactttacataagaccttaaaagatattcttaaatttggagattttaagaatgccaaattccactttgtaaacaactcatctctatttattattggaatcagagttttaatttaattcgttgtccttattgtgattatgattttgcagtaaaataataattgtaaatagtaagaaatcaacaggaaatcaacatgaatattttgaagacgcaagttcagtacaatataattaactacaacagttatatagtttgcagataatccacattcaacttgttctcgatatgatggacgctgtctatatggggaatatcttccgctgctacggtcctattgtgcaagtcaaagtagttagtaacctctcatacaattacgcattttttgacctttattaatggaactgaatagtgctgaatttgatggtcagatcattaacgtagagattgctcgtggaggagcctacaagtttgcttgaggcattgagtagacttaactatctcttcatggccacttcatcaccatattttactcttttctattttggtttatcttttcttttgtttgaatgtataatttggttggtactttgatttgcaaagcattagtacatccactatatatgaacgaaccggttaattactagttactagaaatcgacctacaagttatgtgggtttattggtatcatatactattctagttattttattttattgaacaatgtgttcctaaatatgaataagtagataattttattgaattatattttgaaattttgtctacaataatactatatatgaattgaattattaagtgtagtattgacttttgttttggtaagaaataataaaaatgttaaaagtgttaatagtggcgataatgttaaatgaataaaatttaaaaatagtttttatgtaataataatataaatattacattgtcttaatatatgaaaatatcaaatgatagtatcatgacttaatataatgttttgataaaaaaaaattagtgtcactaaacgatattatacatccaataccaaaagaatgtgatccttattgttcatgtccatgcataacattatcaatgctactttaatcctttcattgagatctaacgctcatgttttttttttttgagatatcaatatactgttgtaatccaatatttttctcaaaaacctaaaatgctttaaatatgctgattttctgactttttaaactaaaagcatttgaccagatt

SEQ ID NO: 38507 - DNA, 1207 bp, Arabidopsis thaliana landsberg
ggtttatctgacttcggaagtcctgatgacaaaagaagactctgattaacattgaccttaaaaacagttcttttttactacaaaaaaaaaaatcaaattggtaacatctattgactccacttaaaacgaattttgtttgaagcaacttcaagtaaatcaagaaatacttgattgattaaccactgcttgtttatttagttagcatcaatattcacttattaagcatatgaaggcatcacttagattgaacaataaaaagtaggattagatgatcgcacctcaatatagctcacaactacttaatcctatacgatcattaacaaaacaaacaaaaaaaacttcttaatctatatatactcgcttacgtactgggtttgaaacgtttagcatctgggctttacaacgtcaaggctcatctctgggcctgtgtactacgatctttagactcctacaaaaaatctttatattttggttaccatgattccatgaattccagagtttatttttaattatactttctgcgttgactccgaagataaatatttttttacaaaaaaaatacactgtaatctatatatacatttttgcagccattttgtgaaataaatcctgtagttgagacttatttacaatggttgccactggattttaatatttgtgtttgataattagaaaaaaaatcttcgaattaaatatttgacatttaaaaatcttcctaaaatctctctacattaactacacgattggttactaaaataaaactttcaaaatatttaatatcatttaattactacaaaattatcattattgatattgtttttctgcatgactattacaattcaattataatcatcaaaccgcagagatatttgatagcatttaattactacaaaattacaaaatatttagataatgatttataaacatatgataaataagatcaacattaataaaataaatgagtttttttacgggacgggttggcaggacgttacttaataacaattataaactataaaataaaaatattttatagaaagttacatagatagttacaaattgcaaacttttatatatactaactttaaaatataatttgtcgggtgaaaatctagtaactatatatatttaggtcgactttatgttttaaaaaaaaaaatctcacaccattaaattgagtgtgtgtatgtactttagtcttcaattt

SEQ ID NO: 38508 - DNA, 5650 bp, Arabidopsis thaliana landsberg
cggctaccaatgtcatgcggcgagacgagagccttcttattgatcccccaaagaggtaattcgaagttcatttttgataggcccgtgtttagagaaatttatgtacaggggaattagggtttctgataacagaaattcttttttttttcgtttcctgggaatgaatttcttagggtttcacttgcaggagatacaagtgtttctcgtggcctctcgcttgagaagaaaattgaggcccttgagagcctggccggacaagtgagtgcctttttcactcttgtttgattttcttcattacattttctgggaaatgttgtctatcgtatcggacagccaaaattgtgattctgttagtcagtttttttctgattaatacttgagatgtgattttcctgtatttcttcatctaaaggttgcttatttaagacaatgagattgattttacttgagatgaataattgaggttgatatacttgtagctaatgagtttttttttgctaatgcaggttagtaacaggcgatctcggagatggttaaatgatcgtattctgatggaacttgttcctcgtttggatgcccaagaaatcagaggcttgtttgctccaccaccgtggggtaatatgacattccattcaaagttttactcttcttgtataatctcaaattgagtttttttgccatgttttcgtctttttgctattgttaacatataacatcgtttcactgagtccacaaatgttctacaggtgatgatgtcccaccctcagcattttctttgactaatgttggagaatgggacaaatttagaaacatagacatggacaaggaggtaacttacatgtcttttgggactgtttctcagagaagaagtgcacgttactatatttctctgaatataatttgtttgtagaatcagtgatgtcatttgtttgacatacttggtcttaactattgttaggaattgtgtttttttcaggccaacatcatggattccttgaataggtcatccgtaaggcagaaaggtagcgtggacggtgataaaatcgctgtcttaaatgcttggagaagaatagattgtaggacaagagatgctcttcgacgtagctttttaccagaactaatcgagggatatgaggtatagattcttcagatatgacaatgtaagtcatacatgtaaatatagaccctttgcttctagaattcagaatcgtttattatttccacagagctgtataagtcacttcatcgaggaaggtggtgaaggagatgttcttgagctcaaggttcaagacccattccatagattgcttttacacggtgtttgtgaggtatgagccacgacatcacttgcgctattttctgctaagatgttgaatgaagatatagagagtaacaacctaaaagaaactgttttctttggagcagtatcacaatttggtatcaacaactgcaacagaacagataggaaggatagcaatgaagacaacgagcatcaaatggaagaagagtggcgattcaggggagaaaccaagcatcagcctagcgcattgcgttagggtgtcaaaggaaggagcttggtatcaacacatacactcctttgtagctgtggttttttatgaaaatcagcgccaatttaaagggctatttatgcagcaaaaagatctcaagactctctctctctctctttggcctttgctacttccccctatgtggcctcttgtaagcttgtatttgtatcctcaatttatacggttttatgattaaagaacgagatagacaatcaattttattgagtgctgattgtgaattttgaatctttaaagttatatttttgttattaacttgtcgaggcctttgagttacaaagcccaacagttggagttccagctcagccactaggcgttattacgcaggctaatttttcaacgtgcgagaaaccagatttcctttttcccgaagactatttagggaatttcctctcttgagccaaattttcctttttcccaaggggggtatttaggtattttcgtctctctctgggccaagtttcctttttccgttcctccgtaataaagctttcattctttttgtaggtttccattagaagttcagaaatactgtttataaatagaaatccagagtcagagatccattcgatagcactttcctctctttctctcatcgtaaaaccgttcttcgttttttctatttctctcgtctctttcttctacccagatcactgattgattagtcgtgaattttactctactctttcatcaattttactgtgtttaattcataaaacaaaacaaacgatcgatttttgtttttttttggggatgacgatcagaagcaaaaaaagcaaaggctatcgtcaagagatcaaatcaacttgcaccgactccaacactctgttctcaaaaggtacttttcgtcttgttggaatttttggccaaataacgtcttttttttatatggtatctaattactgtattctggttgatcgcaaaacaaagaattctcatgtttaaagtgggtttcgtctaatccaatttgaattttaggtcttatattatttccctagctctaaccctaatcatatatttctcaaagtttttgatttttattcaagattccttctaatcaattatttcttctttgtatgtagatgtggttgcaacttcggagcttttttcatctgtgatatcgtagcgtgtgaaagacggataattctacagagacaatgcatcatcccattcggctaggtcaattttcatctctatcttgtttataatctataatcttatagatagtttaattacaaaaaaggtttttatacttttgatttttcaaaacaaaatatatttctcaaagtttttgatttttaaaggttttaactcttttttatttttatttttttctataaatactaaattaatttgaagttgtgaaatctaatcggattttggatccggctaattaatcgtggtcattagcgattccacaaatccaacatgtttttcacatcttcatgtatatttagcatttattttttttttaaaaaattcaactctttttttaaaaggttatataaatattaaattaatatgatgttgtgaaatctaaccggattttggatcccgccattgaaccgtggttattagcgattccacaaatccaacatgttttcacattttcatgtatatttagcattttttttttttttttcttaaaagattttcaactctttttttctttttgatttttttctatacgtactaaattaaaatgacgttttgaaatgtaaccagattttggatcccaccatttaaccgtaatcattagcgattccacaaattcaacatgtttgtgtacaaatgcgtcatcattactcgagaaaccggtcgagaacattgtccgtatctcgaatcaggtgttcacattatttcgtggagcacgattactcgagggtactctcaggcactcaagccggttttggagaagaaggttttaagtatttctcatggatgagacaatcagggacaaaaccaacagattttgctcttgctagtttgctgagtgtttcaggaaacatggcagttattgagggaggcaggcaagttcacgcgcttgctctttgttttggtttagaacagaactccacggttcgtagtagtctgattaatatgtactcgaaatgtggaagtatcaaagaagcttcaatgatattcggagaaacagatagagatgatattgtttctctgacagctatgatcaatggatatgcagaacatggaaagagcaaagaagctattgatctgtttgagaagagtctaaaggttggtttcagacccgactctgtaactttcatcagcgttctcaccgcctgcactcattcgggacagcttgaccttggttttcactatttcaacatgatgcaagagacgtataatatgagaccagccaaggaacattatggttgtatggttgatctgttatgtagagcaggacggctaagtgatgcagagaagatgatcaatgagatgtcatggaagaaagacgatgtagtctggaccacacttctcattgcgtgtaaggccaaaggagacattgaacgtgggagaagggctgctgagaggattctagagctggatcctacttgtgcaactgcacttgtagcactagacaatatatatgcaagcacagggaacttggaagaagctgcaaatgtaaggaaagtaatgaaatcaagcggcgtgatcaaagtgcctggatggtcatcaactaagatcatggatagggattcaacgtgcagttggtctcattcacaaagtgaagatatatacagtatattggaattagtagtatccggtgcagaagctcataatatgattcttaactctaatatgttaaaacaaacttggcccttgatacaatagcagcacaagtggtatcattgaatgttaaaatagctcaatcaatatgaattataaggagaatcaaatgcattccttatacatcctaagtactgaaaattatcattctgtcatctgtcatctgtcatctttaaaccagttaagtagcacataaactgcaaaacctaaagcagacgcagcagcaaccagaaagacagctatttgtactgagaatgttgaggtaaaggcttcaagaacaagagagttccaagttacataccataaggtggagtaaacagaacccacgattgcacctacgaccacttgacttgtcgtgtgaagcttctgagaaacccttaaccacgtctataccccaaaataaaacatcagtgtcaatatttcgttttcaacgataattgttaacttgattcatgtcctaaaatgatatgaagacttacgaaataagaacccaatgcgaggatgaagccgctaaggaacagagagagtacattggttccaagccactccataactgtggaaataagagtaataaagtcatctttaagagttgatcaaatgcaagggaagaaacagatgagcattgtgactgattgtttcccggagaagacagaaaccccagagatgaaagaaatggattgggcatgagaagaaggcatcccaggatcagaacggagagtagcaacaggtctctcttggttaagtatacgtttcaaagctactgagagcacggaatttgaaaccgatccaatcacagcccacaaagctgcaccatcatgtcgtagaagcagaacggatccaaacagagctgctacaatccatttgctctgccatttgacaaaaatgcagtataaagaaaggaaaaagctttgcttagtgttttcatagaaatatgcattacatcaaacaggttgtgtgcatcagggaattcgaataccaaccagacgattagcgattgcttcaatcccacctccggcgtcggataccaactcgttctggagctccggagacgaattattgatgaaagcctcttgctcaagcgcttgaaatcgttcttcaccgtctctgcgagcattggtttttactaaatcggccatagatttaaagccagagacagaccagattcttcttcttcttcttcgatccaaagggaagattgagctcgaaattcgaaatcgagcggaattgatgtaagtgggaacagaggaagcggcgaa

SEQ ID NO: 38509 - DNA, 1565 bp, Arabidopsis thaliana landsberg
tatggggttccataagcgggtcaattacattaaatctcgcgtgccaaagcagcgcaggtagggccactggtcagataccgtcccaccactatgtccgtttagtaaaattagacacattatgtatttttgtttagatagttctttaattttgacaatgtttaattcaacatcaatttaaaagttttcattcaaatggttagtaaagttattgtaaagtttatatattataatattataaacacgtcctaccatctagtcctactatttaatcatgttcggtgaaattaattttttattttttttaataatatttttgttaaaagattcataatttaaatcaatttaaagttttctttcaaatgattatttaatttttaaatattttaaccattttggcaaaaataattaggccatgaaataagagcatatatattattttgaataagatttgctttgatttggtagttaattttcgcattgaataagctagtggcagccattgtaaataagttccaactccaggatttatttcacaaaatggttgcaaaaatatatatgtagatttgtttaccgttagaatttagaaagaagcaatctctcgtactctttctagcctcttccccaaaaactaaagagaaaagaattaaagagaaagtgaagttggtgaaagttctttttggattagttgtaaatccatgtgtttaaaattcgtttacttgttatattagttggagatcccgaccacgatatgttaaaaacacatcaaattgtataatgacttggaccagaaataatttagaatttatagacaaaacacaaatacctacttttctaccaaaaaaggcatttcaactcatagttttgtggttgataatacttgatatgaatgtaagttggaacaaaacccaccccacgtgtgtgccgacgacgacccacgtgccgaacattccgttgtggttacatgttgttgttgttgctgttttattggagattgatagatattgtaccgatttcattcattttgcctcacaaacaatacttcgtggggcacatgcttccttgattccttccactttcacttctctcttatttctccttttctttcttttagcttcttcttattcatataacaacatctttaatagtaacagaggagccaaacggcatgattatgatctcactttgataaaaagagggctaaaaaagggtttaaaatactaataaagcaaaagaaaaacaaccgttggagctcatttacccaaaattcagatccccacaacaaaagtattttgctttctctaaggtttggaccattcaaaattagctttttcattactgcattgatttctctaacttgaaatgattatataacttatacctgactaacacatatgataagagattataacacaaggacagtaagtatccaaatttccttgtatccatcaaatcaagggttcagaaaaatctatagggaacaaacaggaccgaacaagggtaaaatgacataagtagaggagccaaagaagaagaattcatcaaataaaatcaagattgattcatgc

SEQ ID NO: 38510 - DNA, 1901 bp, Arabidopsis thaliana landsberg
tttaagcaattcattatgtaaacgtttaatatgtaactatcaaaatcctatatatctattgtacggtttgaccccttcgtgtatgaatattggtctcagtaagtaacattaatacaataatttaaattcatatttttatttttggctgagctcaaaaacgtgtttgttgtcggctaagactagatattttatatttctactcaacattattcatccataagaatcgtcttatgttagatgttgacgatgataatttctaaatatgtttcgagtttacgtaggaattgacgctgtgactctgtgaggtccaaatataagcaaaaatattagtggttccaaataaagtcaacccgatgacgactgattaatcctaatcgctcattttcgtttttttgtaagaattcgttgaatcctcctcatcataaagaacaaaaaaaaacattttttcacgacgtttgtcaaaaagaagagatgtgtttgcatgttttgtcaaactacaagcaaattgcgatatagtaccttagaagttataactatatgatagtgcatgtatacatgaacttgtcactgtcaagtcctatcgatatctaatagatgtacgtaaagaaactttgtgtgtttcaagttttagcttttggagttagggtttaggatttgtagcttcaaatttaatgtttaggatttgcagtatagtttttacttttagggttaagcttgatgtagtgtacattgaagatcaacaataactacgtttatgatagagaaataaaaacagaactatctgtagtcattttcgtgtttatatacacaaacatcaatttggtttaagaaaaaaataattattttcttgaatcaaatcttcagtgaatctaaaggtaccttaagaagtttcatatatcttattatataaagtatgatttttaaaattactaactcataggattatgccatgtgtcaagtctatcgatcagatgttgacacgtgtaagaaaataattaacttttttcttcttaaagaaatagaaatactaaaaaagaaatcaattaacttttttcttcttaaagaaatagaaaactaaaaaataaatcattattaacatatactaattcaattaacttctttcttcttaacacgtgtctttttcttctaaatactaaattataataaagaaaaagtgtgtaggttactatttagacttcaaatatcatcaataaaattaaatgggtacattaaaataaaggggttattagagaagtaaacactttttagaaaataatttggaaactatatactttttttagaaatatgaggaatggaaagtttttgttgggcttttgagatagaaagcatgtgagatgagaaaaaatgtggttaaaatccaaaagaggtgtcaaatactattgtagccttgtgttttaaaaacacaaatttcgtctgggttcgaaaaaataaagactaatgggtatactaatttattcgtggcccatttactctatttcgtgttaagtgagcccaattattgagcccgaatgttacatttcgattttattcagaaaattattgagcccaagttaattgttgagattgttttactttactcttcttcgtttatcacgaaccctagccgactgtggtgtacaacaaatcgagagagaaccagtttgagaagagaaacgtttgagagaaacccagattcttatggcgtcaactagcagggatgatgattttaggacaactcgtagtggtgcgaaacggaggaaagaagatattggcaaaactggtgagttgttgttttagtcttttccgaaatatgattatcgtttcaaagtcgttttaaggtcgttggtggtcaatccaaatgttttttactggtgtcgtaaaaatgttttagtgagaattaa

SEQ ID NO: 38511 - DNA, 6082 bp, Arabidopsis thaliana landsberg
tcggcccaggtcgagtatggacctcactgttcaatggcccaacaagatgcagctctcggcccgaagccgagtcagaaaaagaagcccatcaggcccaacactgtactcgacacgcgcgtcgagtatgtcggccgagttcacacgtgcgaggtcaacacaattcaaattcgaatttgaattcgaatttgctgggccccaccaatcaaatcctgctccccaaagcccttcaaagattctgctgcaaaaagtgagacatgtccccttgaccaaatgaagggtgaggatctaaggtgtttggagggctaggatcaaatcttcttgtctataaaaccacactcaacaagctaagtcactcacactctctctttgctcaaaaatttcgagttttacttcttctctccaaacatttcaagtttttactctcacttctctagatttctcagaaactttgccaaaatctcttgttacaaaccttttcaaaacttctcttgcaacctttgttcattcttaaacataaatttctcttctactttgacctacctttggcaattttgtggtgactacctgcagtaaatcatcccaagatcatgaatcccgaagaatcaagaaggagagcctctgctcgagccgtggcaagagggtttgagatgattaatgagaagaatcagtcaaagaatcaggaagctgcgagtcctggttttactcggatgacaggccgagtacaatggccgagtatggccccggagtcctctgtgggtcgttctgccgctgctcaagaggaaatagcaagaggcaagagggtctgggagtccgagccagttgcagaagaagaagtgcctgagatagagaaggaagcatctgaggaagatgtgcaagttgatgaagaggtcccgatagttcctacaagtagaagaaggaacaccatgaggagaaagaaagaacctaccatagaagagcactaccaatatctcatggagctgagttttgaggggacaagatatccccatagacctaccatgcaagctttggggatatgtagagatgttgactacctcatggagatggccaagctggagaccttcttctcctaccagtatgaaggatacaaaactgagagctgccaattcctagccactttgaagctccatttctatgctgaagaaagggagagagagctgcataagggagttggttacatcactttcatggtgtttggaattcaatactcggttcccattaggcagttggatgctattttcaagttccccaccaagtatggaatccgccaaaacttcagcaaggacgagctccttgatctatggttgacaatcgccggtccactcccctacaagtcatctagggccaagagttcgttgatacggagcccggtgcttaggtatctccacctttgcattgcaagcgccttcttcccgaagaagacaaccggccatgttaatgagggagagctgaagttgcttgatctcaccttatgcttcattttggggcacacgaggaatgggatagagatggaaggggatagggctgatacatccctttcggtggtgttgattgatcacttgattggttttagggagtatgcagccggaatccaccaatccggctatggaggaagcttatgtgctggaggagtgatcacgcccatcctaatagccgctggagttcctcttcatacccccactcacacagcaacctacatcgatatggagtacttgaagaggaagtgctacttggataggtctgctccagcggaccaactctacttcaagttcaagcactccacgctaggtctctctaggctagcactaccttgcaagaagttcaccaccattaggattgggaacaacattgactttgatcctcctcaatcgatcttagtcaatgtccttgcgcctctacaagtagagccgagcataggaagtgagtctcaagaagaaggagcagagtggaatgaagaagaagccgagcaggaagcttatactcggccgagtaactttcagcaggccgagtattgccaggacgagtttgagcaagctgagttcagtcaagctgaacagtttgatgaacaagaagattcgtgcgaagctgcagcggagcagtttttctttgaggattatgctgagtctgatcaagagagagatcccggtcaagttcacaagaagttgggaatgctcaaaggtttgggcaagtttcagaggaagttgttcagtgggttgaagaagaaggtgagaaagatgaagagagcaatggacggcatgacggttcagattcaggagctgcaacgaagacagagatcaccaccacctcgacccgagttcaggagaagtaactcaacgagtgtggcaccgcgaagggacgctcatttcgacccgccaagagcctcaaattatgagctcgggaggagctccaccttctcagatcgccgtttcaacagccgcccacccggtccagtgaaccagttggttttgaacgctgacccaagccgagaggagtactactcgggatacatgctcgaccggtcaaccgagtacaacgccaataaccccaacacctccacacgtgatcctgagtacacacaagaccgcctggacgagtttgtccagaacctcttcgtctaaatgttgaggtatcactccatttcactgtacatattattgcatttcttttatttcttgctttgtgtggttatttctctttaattcttctttgaatttttattacacaagggactgtgtaatttaagtttgggggagggttcaagatgtatctaacattgtttcatgttttcttattcaaatttttgcatcatctaaggcatagaaaacccataaaaatttgaaaattttcgaaaatgattccaaaaaaaatagagtgtcatgtagtttgcatttgcattaatagggctgttttaagaatgttatcatataggttgttgcattttgcacttgcataggggataatgatgatcatagccttgtaaatttgcaatgttcactagatagtttcaatgcccttgttgttagttgtctagtgcttaaccgattgatcttgaagtaaaacagcaccatcttttgaattcatatacttgatcttccttagtcgaaactcgctgtgatttgaagctattccctatcaatttgaaccataaatttgacttttaattatcatactatgcattgcttgttaaactcatgatcacccttaaaatatttggatcttcttattcattgcaccactcttgttgatccaaatagctgtctctcatctttagagcagtttccccatacctaacctaagccttctttcaagccatatatcacttgtgagtgtatgtgaggtctattttcgattaagcctggtagaaagtgttaggtttgtaacgacaaagatagtatctcatatagttctagttcgcgttatccggactagataggactaggtgggtacttgatctatgggttgggaagagtttaaaagagaaaaagggttgagttcattgtttacaagaaaagggaaaagaattctaggagaagtaagctaaagaagttagaaaaagtctagtaaagggtttgagattgttaaagaaagagattgggttattgttagctaatgaagaagggtaaaaagccctaagcttaatagagatcaaaaacagaaccttagtactaaagaaagccaaacccgctagaagtatcaaagagaaaagaaaagcttctcctagagttaagagaaaaagaaaagaatgggttaagaaagagttcaaaagattatgaatgcaaaagggtagagtcaagttcttaattaggatgggagatgggattgccattaggtcttcattgatcatactttgggtagatgggatcttatctttgtaagcatagcttgggacttacctttagcattctactagagcttaatcattttttttcgagagatccctagtcactaaagcctattctttaagggaccatttttgtctcttgaccctttgcccttagccaaatgagattaatatgcattgtgtagtatgatccatgactcttgcttaataaatgttaaagggaatttgctgatttgaaggcttgaatagactaagtgaaagattaggttgtgttgtgaagaagatggctaaagtttttaagtagaggtcattcaacctagcactctagaactagcaacatggacattgagactatctattttacatgcatattttggttctgaatccccaccttcaaacctcactcctagcctagttctattgttgcttgaggacaagcaaagagctaagtttgggggtgttgataacactagattttaacctttttaagcccttgtttttcatgcatttagcttagtttcatgcccttttttatgcattcttagtctcttttccttcttttgcacattttgcattgcattgcatagcatacttgcatttggagtgttttgcagatgaattaggtacttttggactcaacttggaggtttctagcacaagggatggacagactcgagttcgggggacctaaggaaggatttgaagtatactcggcctatgtactcggctggaggccgagtggagcacacgtgaagaacaaggagcctactcgaccaaggcactcggctggaggccgagttgtgcacttaaggatgaagagaagctactcgaccaagacactcggcctagagccgagctgtgtgaccaagagcaagccactcggcttttctactcggcctagggccgagcgctcctgcgccgacttatcttttttgtcttattcccaattagggcaacctaggattgcctataaatagacctcttatgtttttgcccaagaggatcttcgttttgtccgctggtttttagggttctttgattttcttttgcattttctggttgttctgttgagaatttggatttgatttcttctgcaaacttgtttatctcattgagatctatcttttgctaagtttataatgatttctgagttttatgaattttctgggttttgttctatgatgttcttgagtgttcttgagtagtgttcttcagagttcttgagaatgggttaggtttaggtggattcctctcttctttagctagctaagtgtttatatgcatgattcccttctgttttaggagttcttaatgctattttctttctgatcaattgaaaattgatttcagactttctccatcctaaagatgtgtgatgaaatgtctgaaccaactaatttcagagatttgtagattctagcccaaggaattggatgattagactgcttattgacattaatagattggtgtttaaagcctgctttattatgtttcatcaacggaagttgagattaggaagttctaaagttatgagaatcattcatgcggaagtggcttgatttggttttgaatctattgtctagggatagcttgattgagtttgttagttagctaatggattgaggagtccactaagaccaattaccccattcttaagagctctgtttcgtttatttgtgcaaaactcgtgtttttagtactctgttcgtttcgtgcaaaattggtgtttttagtattgtactcgacctgcttactcgattgctcgaccgagtgctttacatagtgcttggtttactttatgttcttgttatttgatttgcatgttaacctgttgcttaggtttagtagaaacacaccaaacttattcacacttggcttgacttagtattctctgatcatatcctgattgatagcaattacacccatttggattgacaccttaaatgctgcaatgacataagatgcatttagggaattgacaccgaaaacctttgtatcagtatcttctaacaagggtacactaattaagattttgggatccgattgcgattttagttcttataatcaatcatacacatgacctctagtcatatttgaatccaaaacagtaaccaagcttcgtcttgcttctcaaagattaaaatggtgtaaaagaagtccgtataagtctttggatatgcatcttctaacaaggaaacacttctttaacttttaaaagccggt

SEQ ID NO: 38512 - DNA, 7221 bp, Arabidopsis thaliana landsberg
  unsure (1)..(7221): unsure at all n locations
gaaacgctatatcatccgctcgacataataggttgtggactttttgtagcgcttttttgttctgctatgattattggctttattacaacgctttttctgctgtaatctttaattatttaatagcgattagtttctgatataaataaccgttatacatagcatattgaatttgctacatataattagacaatagcatttagttaattgcaatatttatatattatggcattttaattatgcataatttctccaattaattacagttcataaattatattttaatcccaaattcagaaagaaattcatattatttggaaatcataacaaaattcagaaagaaattcatattatttggaaatcataacaaaattcagaaagacattcataaattcatattatataaaattcaagatcccaaattacattgaattggtcaaagtcttaacaaacaaaaacaaaaaaacacacataatgtttacacaaacatgattttatcagtaggtcaagccacaatactacctactacatcgacaatggtttgaattttagagtttggtctccacacagcagcatctccaatctttgaaacttctacacataccttgctcgcatttggacttaggggcatatgatggactgtatctgaagggttagaggtacatactcttccttatgctattctttctctcctgttcttgtaatctaacatgatgcattgcttcttggcagatttgatggtgctagcagtactgttacttaagctctataagaatcaaaaataataccaagcattcaggtgatggacttttctacgctgtaagttaaagtgcagaaatttaccagtggaggtgctggtcttttatctggtgatgttgtttcatacagtggaggagatgaattcacatattgtatactatgaagtggccatgcaatgttctcatttagtacatctcccataacaaactttcctggacttggtctccacaaatacgcggctttgtaaacaccttttcaacctaacaattccagcagaaggaccaagaggcatattgttcacaagttctagttggtctgttgaacacaactgaccctcaccaaccacagaatcagccatattccaatcaattatgatgattttaacggctgatgaatctttagcctaaggcatgatgcataaataataagtgactagagtcagtgtttaggttcagctagataattgacaagtgatgagaaaaagacattaccaaagatcctgcagtctgattctcagaaggtgatgatacatcaatgtctagaatgatcttatcgaaaggccatacaatcttgttccctaaagcttcacctagtgtgaaaactgatggtgtaggccttcacaaagaagctgtggcgtctgacactgacttcacaacaacagccgcagcattacgtccaagtggaatccgtccaatcttgttcatttgttcagcagaacagaattctccttcacctacaacaacatcatcatctgatcaccaatcaagtaactgacatcgaacttctgcactaacattactagcctcagacttagaaacctcttccacatgttcctgacaaaaacaatggaattagtaacatataacattcaattttgcttaatagcacaagtgtattcagttagataatttacctttttggcatctaagccactaactacattttgcaagtcctcaagctttgtcagcaaatcagcttgtgtagcttcaagcttctccacatgtgaatctctagctaacatgaatgctaacttagttgcagtgactcctctgcccatacctctaagtcttccaggcttgtctttacctaatacttgactcacagcatcttctttaagatcggtgaatgatgatgagtccatttcactatcaatagatttgattttttcctgaaacagaatgtaatgacaataagtactagcaaaacaaaaaaagaaagcaagtgaatgattgtcttacaatcgtctctacaaattcagggttgacagatctcccatctaagtgtgtatgacctgctatccaaaccttgcttcttgtcaccaatttagggttggaactttttttttctacaaaacagatagtgattagttgatggtaaccaatttacacaagcttaattgattacagagtagacatatactataccatctcatgggctaggcgaatcattcctttgcggcaggtggtgtatggaatctgtgccttcctcaacatcctgtacttgtcacttatttcttgcaaaagcaatgacattgactgttgagcagactccaatacataataatagtaggtacacacaatgaaaaaaattcaaacaatttcaccttgaaagttgtgctagtcctacacttaatccaagaattacaaactcgaatagatagtatattgcttggtttcagtttcattctctttgtgctactcttagcatctcgcacctgagttaggagcttagactttgtagacctccatatacaacccatctgtttgaaaatagcatatctctgccactcttccttcatgttaaacttttcctgtaaaaaaggtatatgttaatcttgatcaaatacgtataacatatgaatctgtatattgaaattcttaaacctgaatttcctcccaaatggtatcctttgtttgactatccagtttcctccagtcatcaagtgtcaccgaaacatgttcacgcacaatagtaccaagaaatgatgacagtgtgactaaatcagatcctacatattcacctagctcagtgaagtaaacttcaaccttttcttgaggatctttagccactttacacatcttggttggtccttttctcttctttacaggaggagctgactatggtgtttgtaatcttgatctactattcttctttataccagcattagtacgctgcgagtcttcttcccttacattagttcctactgccatatccttagtaggttctgcttccttatcagttggttctgcctccttctcagttggttctgcctccttctcagctcgttcagtttccatatctacatgtttagcttcggactgaacttccttatcttcctctacaacttctttctcaacatccacatcctcttgatcaccaacggaagcctctataccatctttctggacattttactcaccagcctgcacctcatcaacgacttcctgagcatctttttcaccttccagtatctcaagaacatcttctggagnnnnnnnnnnnnnnnnnnctatttttttcttctttgttttcatagtttttggccgctttgtgatctgtctagtctccacgcctcccaggcgttcattgggacggactaaccttcctcttgtcctcatcaatcaagatcctgaaaaaccatgaattaatagttagtcaatttttgacattcaaaataattccatatatactactctgccactatgatcccttcacaatcatttctaacataaaaactctcatcatcagaagattggttccctaaatcctctacttcaggaacagaataaggtgcaacaaactcctcttctgtttctaacttgtgaataccctctaggaggtgccctcataactacataccacggtgacgtgtcatcctctctagattaaacaacttgtttagcttgcgataggagaatatagggatcttgcatatatgacgcttgattcatatgaaggttcacaagcgtgaatccatcctcctgcttgacaccatatcctctattggcccaatggcatctaaataatggtactgtgattatttgatagtctagaagtattatttctttgatcactctataataggtcactatataagcagtttgtctagtatcatgtgctgtagatctacacatgctaaaagcttcataagttactccactgttctgagtcttccgcttgacgtcatcagtgtgaaagcgatgccctttaatgataaaccctttatggctttgcgcagttagtctcggtctaaaagccaaccacctcagcttcatcgaatgaacttctgagttagaagggatctaatgttcatataacaagatacatgaattaattttaaaaattagaaagagtgttagagtatgaaatagatatgtacaaaccttttttttttaatccattgggcaaactgttctgtatgaaatttccatagcaatgtttcatttctagcacatcgaccatcctgagactgcaattcttccaaatgcaatcctgttttccatagataaagcagttatcttactagtatatatgtaataaagaaactataaagacatagtataagtatcttactttctcaatatagggatccatagctgccatgtccatcaagacatatcgatgtgctatgtctctctctttctctgaaaggacaacttcttgacccctatgtaatggactgccttcaacaacacttccatcagcctcaacatcctcattacggtttacagcctcttgcagtggtacaaaattttgaaggaactctaagtagaaggcaatgcactctctggctaagtatccttcggccatacacacttctggtctagtatagttttttacatatgccttaagtattttcatgtacctacaactcgtacaatttgtagtcattgtttgaaattaacttttgtcaaagcacataatgtaaagatataaataaattcaaacctttcgaatggatacatccagcgaaagtgcactggacctcctaaccgtgcttctcttgctagacgaattgggaggtggaacgtgatatcaaacagagaaggaggaaagtacctctcaagttgacacattgtctctacaatttcagactccaaggaaattagattctctgggtcaatggtacgttggcaaaatctgttgaagtagttgcagactcgagtcactgcagccctaggtccgcttggcaacaagcctctcaaagcaacatgtaacaaattttggatgagtacatgatgatcatnnnnnnnnnnnnnnnnnnnnnnnnnnnggttgactgaaacacaatttgagatattagcgcaataaccatcaggccctctgaatttagctagcctactgcaaaacccctttttctctgtcttagataaccaataagctgcaggaggcaagtaagtcttctttcctcttacctctgtgtgtaagtgtgatcgaattcctatgtcttccaggtctagacgtgccttcaatccatcttttgatttaacactttgcatcaaaagtgatataatggcatcagaaatgtttttctccacgtgcattacatcgatgttgtgacgcactggcatatactaatcacaaataaagaaacagaattagtaagactactgaaaaaaataactatagaattatagtctaagattagctaccttccagtatgctaattcatagagtattgacctcttcttccaccgccactgatctgtattttcttcatattcgtcttctaaaaccagatcctcatctcccaaatctgttctgctcctctttgttttcttatccaaaggtcttccgaaatcatttctaaagtccttaagtgtctcaaatatgtcagatcctgtctgaattctattcacagttccatcctcaactgtgttgtcaaaccaagcctttttccttctgtagggatgtcctggccttagtcgcttcttgtttcccaaataaacatgcttccggcaattcttcaaccatctccaaggtgtgtcctttccacatacacaacatgcctgttttcctttcactttccagctagataaagtgcctaatactggatagtcactgattgtccataataacatagctctgactatgaacttctctttagacagcgagtcgtaaacctgaagaccttcattccatagatcctttagatcatctattagtggctgaagatagacatcaatattgcttcttagagctgttggaccaggaatcaacaaagccaacattatattctcagccttcatacaaagagttggagccatattgtagttcactaacaagactggccaggtactatacttggtgttctgaatggagaaagggttcattcgatctgtagacagaccgagacgaagatttcttggttccataacaaaatctggccatttatcatttacttgatcccacgttatagagtcaacagggtgcgcattgtaccatctccacttgcattgctagaatgccaatgcgattcctctacaatcctcttttatctaaacattctcctaaatctgtccttgattggaaaatatctcagtaccttcgctggaattgtcttctttacctcaccactattcttatctgtttcccatcttgaaacactacacctaaggcagctttccatcttatcaaactgctttcgatagaggatacaatcattcttgcatgcatgaatgacatcatatccaaacccaaaaatcttcaggaatttcttcattgcattagtagactgtggcagggcattctctttaggaagcatgtcatggaattacgtcaacaactgatcaaagtagttttttgacattccactcttcacctttatgcggtataaacccattattgcagaaacctcggtgtgattagagcacgtcgggtacaatggagtttcagcatctttcagtttctacctaaactcagagtcttctgcagtttcaccatccaaattctctcctccaaagttgtctaatggatgtgtaccttcaccactacaataagccgtccttagcaaatcataagcctcagattctaatgttggaccatgagtaatatcagactttctttcaccatgcatactcaaacaagaattcctcatgtacttcttatccatacccttgatcacaagatggtacaatactgtgtctacttcttgatggcaaacattacggcaatcgatgcagggacagaaaagttcagttggattccctaacctccttgatgcaacagtaacaaaatttgttgctcctttcacatactctcggcttgccctatatgtttcatccgataaagagagttcatatcactatattttcgactcaggcatgttattaaaatcatttaatcaaacaagacgcagtatcaacaagacgcagtatcaacaagactcataccttggaagccacacccatgccttgtccatatcacgacaataggaccacaactccaccaccaattatagatttt

SEQ ID NO: 38513 - DNA, 4157 bp, Arabidopsis thaliana landsberg
  unsure (1)..(4157): unsure at all n locations
tatgatattgccttgtccattaaacaacggacccatgaattcaacatccaaaaatctatctatttttttgcttgaaattagtacatattggtccgttattggtccgctatggtgaatgatgaattaggtgtggattggtcaaactttaatccgatccgcaatgtactatacaaccattcaaagattaatagtgttatacgaattttatatcttatgttgggttaaaaaaaagtaaatctcatactatatttcctatcttatgtacattttttttttggtttgaagtttctaaatcatgtgtatttggttattttctaaaaaaaaagcattagtgaagagctttcttcctcaattaatagcaatttagtaaactaattaagactcttaattagatttttgtagtataaaaagcgcatgcgcaaatttgagatccagattccatcttccatgatctcacacattgtaaaaacatttcttccgagaagcaagaatcttttaaaaaagccactcgaggacacgaggccaaatatatctgtttttccaatatataaataattgtaattcattcttttgaaatctggtttattcgacaaaagggctttgttttgttttcttcttcaagcatctctaaatcgttccaaaagctttcattattcatcaacttaacgaacgacggagatctcaagacacgaccctcgattctctcacggttcgtgcttcttcacctctcgtaaagatttattcttttgtcatcgttcactaattttgacttttgagtgatctagttctgagatcttttagtctaagctcctttttcgttcttttggattttgttaatgcatattgaagatacccatctgagaaaagtaaatttcggaattatgacgaaccctaaattcaaaattcagaatctgtagcaaatttgagtaatttataaggattgttgcagataacgaaaaccttattgggatgtgggagagttctaatccgtttaaaatctggatgacgttatgcagaagcggagaatcatcactgtgaacccctccgcgtctattgagatgagtcagtacgagaataatgatgttccttactcaagtgttggtgctgatgaggttccatcatcaccgcctaaagctaccgataagattcggaaagtttccatgttgccacttgttttcctcatattctatgaagtctcaggaggtccttttggtgttgaggatagtgtgaatgcagctggaccattattagctcttctagggtttgtgatctttcctttcatttggagtatccctgaggctttgattactgcagagatgagtacaatgtttccaataaacggcggttttgttgtttgggtctcctctgctttaggacccttttgggggtttcaagtaggttggatgaaatggctttgtggagttatcgataacgctttgtatcccgttcttttcctcgattatttgaagtccgcggtcccggctttagctactggtttgccaagagttgcatcgatcttgatcttgactcttttgcttacttacttaaactatagaggactaaccattgttggttggactgctgtgtttatgggagttttctctatgcttccgtttgctgtaatgagtctggtttcgattccgcagctcgagccttcacgatggcttgtgatggatttaggaaatgtcaactggaacttgtatctcaacactcttttctggaatctgaactactgggattcagttagtacgttagccggtgaagtggcaaatccgaagaaaacacttcctaaggctttgtgctacggtgttatttttgtcgctctttcgaacttcctccctcttttgtctggaaccggggctatacctttggatcgtgagttatggacagatggatatctagctgaggttgctaaatccatcggtggaggatggttacaattgtgggttcaagcggctgctgcaacatcaaacatgggaatgtttttagccgaaatgagtagtgattcctttcagctacttggaatggctgaactcggtatgcttcccgatatctttgcgaaaagatctagttacgggacacctttgttagggattctgttttcagcctcaggtgttttactcctatcaggattaagctttcaagagattgtagctgcagagaatttgctttactgtggtggaatggttttggagtttatagcatttgttagactgaggaagaaacatccggctgcatcgagaccgtataagatacctgttggaaccgttggttcgattctgatatgtgtccctcccattgtactgatatgtttggtcgttgttctatctactctcaaagtggctcttgtgagctttgtgatggtagtcattggtttcttgatgaaaccttgtctgaatcatatggatggaaagaaatgggtcaaattctcagtcagttctgattttgcagagtttcagaaggagaatttggattgtgaagagtctttgttacgttagggttacaaaggttaaaaagcttggaacctatagtcaaacaaactgtatatctttctgctcgttttttacatttntgtaaaaaaattgttcccttgttaagttcataagcacaagaagatatgtgtaaatgttgtatgtatcattcaattttccttttgaaatgaaactcattggtgattttctccaatacgtttattgaggcccatgagagcccaatagtaatacaaaattcatttgtagatctaccgtttatgtatgatgtgatcgagatgctcgcaaatgtttgaaagaagaaaaaagtaaaaaaccctaaacccccaaaatttgcttcgagaagaaaatgaatggtgtntntcgtcatcttcgagcttcttcacttccttcattagttcgcagctatggtggaatcaattcgatctgtcgattttcgtctcaatctgatggcttctctggttcgtcatttcccatttttatctctcccgatccatatttttcttcttcaattttgagttatgacccagaacaatgattgaatcgagaacacgttttctgggttttatctgatttatgcatttgtagttgttcaatcaaagttttggatttggcgtttaagttttccactatcgtcaagtgatgttgttctccataaaaatgtgtaatttcgttattagggattgtttaggattctaacctttgcctagaagtacaaaacgaggatttgaatcaattagtctcaaggatcagcttcttatggctctttaacaatttgctgtattcagaaattaggcaattattgcaattggtaacgagatatctacaaattatgaatctggaaaacatttcttgggtgcagctttagtctatatgcaaggagggaattataatgtatctgtattgattgattatttctttcgtggattcttcttgaacaggagggagattcagagagcaagtgccagttcctggagagtctgcaaataattcaggcttaccaaacacaggaagaatcggttcctctccggagcctaatccttcgactttgagaactttcggtgatatgaaagcaggcttgttaaacagaggagtcaatggtttctcggctcctaatgctcctcctaccttcaaaagttcactgagatcaagattaccaaactctctacctgatcagttcggtcagacgaatccaggcttaccaaacacgggaggaagcggattctctgctccaagtttatcaagctacgagaatttcactcaatcttcttcgcttcttaaggagaattctcgcagtggagggaagtcaagcgacctggactttgttagagaagtaatagannnnnnnnnnnnnnnnnnnnnnnnnnnnnnnnnnnnnnnncaacgcccaaacctcgaaacgaatgctgacatcattcacatcaagatgttgaggaacaacacttttgtcacggttacagattccaaaggaaacgtcaaatgcaaagctacatccggtagtttacccgatctgaaaggtggaaggaagatgacgaattacaccgctgatgcaactgctgaaaacattgggagaagagctaaggctatggggctgaaatctgtgggtgttaaggtgaacggatttacgcatttcgggaagaagaagaaagctattatcgcgtttagaga

SEQ ID NO: 38514 - DNA, 168 bp, Arabidopsis thaliana landsberg
ccaatgttaactttacggaagccaacattctcttttccgctttattcaccccccatcacgcggcgtctttttggaaaagtttaaccctcccctaccgatgcattttaacatcccacaggtgaggcagatcacttaaccccgttcatcttttgaccacgagcgctcggt

SEQ ID NO: 38515 - DNA, 1945 bp, Arabidopsis thaliana landsberg
gctactcgacctctctcttatactgcggctagcaccgcggtcgagtgatctctcctagcgtggagaagccaaaacaaggtcgagtgtctttgattgctctatggtcgagtgtactgctgtaccctcagagccagaatccacttcgcttagctcttcatacttatatcctaaaaacactaacaaaatgcatcaaaaacaacaaggaaatataaagatatgtacaaagatagacttgggacttcctcccaagtgagcttgttttaagtctctagcttgactgctcacacttattaagcttaagaagggtgatagagaggaattgaggtctcctcttcttccatgttagatacaacattgtattcagcatgctctcttgacaggtctgtagttgagtactcaatggccctttccttgtaagcttctttttcttctagtgggtagtcttcttcttcaaaccattcagaaccgaacgttttccgtgggatagcttcaatgctaagttgaggttgaatagcttctctttgcatctgactcactttatccctaagttcctccacagtgtgggctagcgtccctatagtttcttcttccatatcagacctctttttaagctcttttactctttcagtctcatatccttctcctgagatcactctatcgtcctcagaggtttttccatcttctgttgacctttgtggagttttgttgatgtcaaattgcagcttgatgtgcttttcaaggttgagacttattttcccttccctgacatctatcactactcccactaaggctaagaaaggtcttctcaggactagaggatccttatgttcttcttccatatccagaacaacaaagtcagtaggtacttctacttcattgatcattataggcagatcttctaacaggccaaaaggtctccttgaactcctatcaccaaatcaaggttaggtcacaaggcatatactgaaggaatccaagcttctttaccatagagagtggcattaagctgactgaagctccaagatcacatagataattgttgaaagctaaatgcatgatagagcatggcagagtgaaggatccagaatcttccaacttttcttgaacaattttttcacgagcagcttgaaacagagtggcatcatattcatcatctgaatcgtgatacctcttgatcctttctagtattaaatttatcacgtctttgtgaggatcaggaatcaggttgagaacttgtaacgcccgcgatcgtccggatcggggcctttcagaacttccatcagtggcattactgcttcaatctcgtccagctgcttcgctacaacagacttgtatctctccatccacgctttcctgaatgtccacggaagagcacgtgagggtaatggagtaggtttgaatcgtttccccattctctccattatggcggccttctcttccgaggtggattgaatgagatggcgagaaccagcagaatggttaaattcaacaacagactcttgaatctgagtagaagcctctccttcttgaacatcactgtccccagtgattaaatcagggacatgtcgagttggcagctctcgataatggcagatggtgatggcgtgagtagttacatactccttttgattctatatgggcttccctggaagtcctgtatcttttggcgcagaggtagatgctgattggccttccaaatatctgactttggtattcaatgcttccactttggcattcaggtcattgtacctgcagtccattgagctagatgcttgttcttgtagcagctgttgtgccatttgtttcatgttagcgtcaggagcgggaggaccttggtgttgttgaggtgcaaacctaggtggcggttgctgctggttgttcccctgaaattactgcttggaaacaaaatcttgcttgtagggaacaaaaggcttgttatgacctc

SEQ ID NO: 38516 - DNA, 8850 bp, Arabidopsis thaliana landsberg
  unsure (1)..(8850): unsure at all n locations
accattaatgttcaacagtctcactcatctctaggagttgtccttttcatgaaggtggacgtgttggttcgaagaggtggtagaagatcaaaatggttatataagaaataaggtttggtatcaattatcaaaaaaaaataagaaaataaaataagatttaagtctttgtaaccagtattctagaaggtggtgctttgaataaagtagtaataatttgagaagttattcttaaaatctcttcttttttaattctataaaataatattgacattatcaaatggagagaggctaaccatattaaccgctagaagtctatctccactacatatcgaagttaaaattcaactatgagcgatgaggtgtatgactggtgccgacaaccaatatataacattttgtacatactgttcagacctggtgaagatgatgtctacttcaactgaatggtcggcgttctcagcatatttagaagatttttagagcgacaaagagaaatttacgagtttcttttttcttgtaatgtgcaaatgtaaaaacggataacttgctaaccgctatatataacgcatgtaagcaatattctccaaaattggttttgttttagctttaaattaaaactgttgacaacaaaaaaaacattgaaagaagaataattcactctaatgcccttttctcaatgcgcttttgcaactctaccctttttttttcctattttcatttctaccctttctaatacttttctccccaaattacccttaatgagctacccacagacctaattcatttcttcactctctctcttcttcctccatcggaaattgtgaataccgttgaatcccatgccgtcggaaatagtgagtttactcgccgtgaaaacccatcttcgccgtcgtaagtagagctgtgtgtcgccgtcgaatctcttgcgtttcccaggtttgattttataatgttagcttaaatcttcgttttcgaattggttaattcgatttttgttgttgattatgtgaattcgttatttgaatcctgattcaatcgacagtttgacatttgcttaagcttcgaatttgaattttgtttgagatttgatgattgaatttgtttctaaaatccttgtacattcgttatactgttctaaaatccttttgaaattcgttatactgtttcgtgatatatttgcttatgtgaatttgttatactatttcgtaatagattttggttctggtttagtgtttacctcttttgcatatgctttcgtgatagatctatgccacttacgctttaaaacgatttgtaaaccatgttaaccacttttcaaagcttttaaaatcccttgtaaattattctatgctacttacttacgctttaaaacaatttgtaaaccatgttaaccacttttcaaagcttttaaaatcccttgtaaattattctatgctacttacttacgctttaaaacgatttgtaaaccatgttaaccacttttcaaagcttttaaaatcccttgtaaattattctatgctacttacttatgctttaaaacgatttgtaaaccttgtttctctctgtagtgacagtgtttttgtgggtgttgattttgttgttatttatcttatcaggttataatgctagaattgtattctgtttgtggcttgtggaagttgacaaacaatatgacttgggaatttgaattagacattgaattgggagcttctttagtgctcattgatgagcacattacctatcacgcgttggttgatattcttgtagaggattttcaaatagatagttcaaccaattctttgaagcttagttacaagttagtctccacgtctacaaccatacaatctcatcctctttatattaggaacgatagacagcttgcaacttttatgcacaaattctcacagagtggaggattgcttcagttatgtttgactgtagagcaaatttctgtgacagttgagcaggtttttcaataaccttcttgtgttataatttaaaaaatccttgtaaaatcattattaagtcagtgattgtgcttattacaggcttagactacttcaaatccttttgtttctcagtctgtccctactgctcaggtactaatcgttttaaaaatccttgtaaaatcattattaagtcagtgattgtgtttattacaggctgagacgacttcaaatccttttgcttctcattctgcatctactactcaggtaataatccttttaaaaaatcttgtaaaatcattattaacgtttttaaaccccttttaaaaatccttgtaaaatcattatttaagatagattgatgtttgaggtaagctttttattttggcagccgaggttaacctctaggattattgaggcgtgtgtatctgaaacatctagtattcttgatcaacggtattctagttttgcgttttcaacaggtttaagtgatgctgattctttgtttattggaaaatttttcaaagacaaagatgaaatggtattcacgttgcggatgtttgcagtgaagcacagctttgagtttcatacagtgaaatcagatctcacgaggtatgttcttcattgtattgatgaaaactgtagttggagactacgtgcaactagggctggtggatccgagagttatgttattcggaagtatgttagtcatcacagttgtgactcttcattaaggaatgttagtcatcgtcaagcatctgcaaggacattcggaagattgataagtaaccattttgaaggaggaaagcttcccctcagacctaaacagctgatagaaatatttagaaaagatcatggagttggaatcaattattcgaaggcttggagagttcaagaacatgcagcagaacttgcgaggggtttacctgatgatagttttgaggttttaccgaggtggttccacagggtacaagtgacgaatccaggttctatcacttttttcaaaaaagattctgctaataagtttaagtatgcgtttctggcttttggtgcatcaattagaggttataagttgatgagaaaagtcatatctattgatggtgcccatctgacatcaaagtttaaagggactttgcttggtgtctcagctcagggatgggaattttaatttgtatcctattgcttttgcaatagttgactctaaaaatgacgcgtcatgggactggtttttgaagtgtttgctgaatataatccctgatgagaatgatttagtttttgtatctgaccgagctgcttctattgcaagcggactttcagggaattatccacttgctcatcatggactttgcacttttcatttgcaaaaaaacttggaaacccatttcagaggttcttcacttattccagtttactatgcggcttctagagtttacacgaagacagaatttgattctttgttctgggaaatcactaatagtgataaaaagttagcacaatatctttgggaggtagatgttaggaaatggtctcgagcttattctccttcaaatcggtacaacatcatgacatctaatctagctgaatctgttaatgccttgttgaaacagaaccgcgagtatccgattgtttgcctatttgagtcaatcagatatattatgacaagatggtttaatgaacaacgtgaagagagtagtcaacatccgtctgctgttactataaatgtagggaagaaaatgaaagcgtcatatgatacttcaacatgatggcttgaggtttgtcaagttaatcaagaagagtttaaggtaaaaggagatgccaaaacgcatttggttaatctggacaaacggacttgcacatgttgtatgtttgatattgataaatttccttgcacacatggaattgcttctgctaaacatatcaatctgaacgaaaacatgtttgttgatgagtttcattctacttacaggttttatctctattcttcacaactttacaggcgtttttaaatgttttaataactctttttaaatgtgtttatgtggttttaatctcagtttacatcgctgtaatttacaggtggtgtcaagcatattcagagagcattcacccaaatggtgatatggaatattgggagattccagaaactattagtgaagttatttgtctccccccttctactcgtgtacctagtggcagacggaagaaaaagaggataccttctgtttgggagcatggacggtctcagccaaaaccaaaattacataaatgcagtaggtgtggtcagtcgggtcacaacaaatcaacttgtgttgctgcaatttatatatatctttatctctaaagaattgaatattgttgggtttttaatattttcttcattgtgtcgtgtcatttctctcgtttgttaaaattactatcaaacttttacaagtaattttgaaggttattccaatattttaccttttaaaatctcttgtaaaatcctgtttaaaacgtctgtttaaatccttttaaaatatcttgtaaatcattcgttatgccacttacatatactttaaacgattgtaaatcaagttaaacacttttacaagcttttaacttgaatcttttaaaatgtcttgtaagtcgtttactaaaattactatcaaactttacaagtaattttaatagtaattccaataatttacctttttaacatattttgtaaaagcctgtttaaaacgtatttgaaaatccttttaaaataccttgtaaatatttcgttatgccacttacatatacttttaacaattgtaaatcaagttaaacacttttacaagcttttaaaatcccttataaatcattttctgacattaacttattcttcttaaacgattgttaatcaagtaaaccccttttaaaagcttttaaaatcccttgtaaatcatgctttatcactttattatcctttaaaaccgatagcaaaccatgtaaactcttgttaattcgtttgcaaggcttagcaaggctttacaaatcctttaaaatgtcatataaatctttcgttatgtatataagctgtttatgcctttaaaatcacttgtaaatcatgacaattcttataaaaccataaacagttgacaatagtaaagcattttgattagatttgacagtcataattaaatatatataaccaaaatacaagtacaatcatagattccaaataacaaaagtaaaataaacatgtttgaaataagtcagtctaaagaactaaatccatttttgccttattagctctgtccttctctacctgcaaataaaattcaaactgtaagttattttttgcataacaataatattcaagtttttaaagatatatcgttatacaaaagaagagtttaacactaaccattattatcttgcagatttgttcagctaggtatttcacttctggatgagctcgaggcagtttgtcaggatgaatgagtaacgttgctttctttaatgctaatttgtatttcttctcgtcccacattttccaaatttcgactttttgccatttactgtcgggccaaaagaatctgaaatgtaaaaattccaaaatgattagaattaaaatcttttgcagcaaaacaatgacgtaatttaacttacttcttcaagtgacgatagcagatctctaattcctttgtctttcgcctatttttttaatttttaggtcaatttcttccattagttccttactcaaaatgacttgcgtcaaaggaatttcaactgatacaaaaacaaaaaaaatagtaatattagaagttgtttctcaaggcaaatcatctgtgaatgtaaaaacaacttaccactgctctgttcctgggtgattttttcttcttgagtagagagtggtgtttgtctaacatcttcatcatctttcttggtctcttttggaacctgtaaaccaaaacatcaaaacaaaatttttattttttgacaattttatcatgtctttttaaaaaatttaaggaatgcagacctctgttgtttcttctttttgaggttgtgattctttctctgtgggtgcagtcccattatcttcatcatctgacaaaattacatatgctttttgatcttcagtctcatcatgttcatcatgttcttctacgttttcttcttttggaacctgtaaaccaaaacatcaaaacaaatttttattttttgacaattttatcatgtctttttaaacaattaaggaatgcagacctctgttgtttcttctttttgaggttgggattctttctctgtgggtgcagtcccattatcttcatcatctgacaaaattacatatgcttcttgatcttcagtctcatcatgttcatcatgttcttctatgttttcttcttttggaacctgtaaaccaaaacatcaaaacaaatttttattttttgacaattttatcatgtctttttaaacaattaaggaatgcagacctctgttgtttcttctttttgaggttgtgattctttctctgtgggtgcagtcccattagcttcttgatcttcagtctcatcatgttcatcatgttcttctacgttttcttcttttggaacctgtaaaccaaaacatcaacacaaaatttttattttttgacaattttatcatgtctttttaaaaagttaaggaaaggagacctttgtttctttttttttttgttgtgattctttttctatgggtgcagtatcattatcttcatcatctaacaaatttatatacgcttcttgatctgcagcatcattatattcatcatgttcttctactttttcttcttttccttcttctctttccatttcttcatcgccttgtttgggattctcttgtttttctgtttcttcaacattgcaagtagaatgatgatctctgtattcaaactgtataaataattacaagttcccaaatacaagccaggacacagttattagtcatgtaaatcacttttaaaaagcttttaaaatccgttgtaaaatcttatcgaacactgcctaccctttaaaaacaaatttcaatcttttaaaaccccattaagaagtctttaaaatcccttgtaaatacatatctaacactgcctatctttttaaaacggctaaaaatctttaaaacacgatttataagctnttaaaatcccttgtaaaaacacataccttttcttcttcctcttattttccttcttcctcgtgcttttcttcttcctgctccttttattcgtcctcttctttttgttcttctctagtataactggcagaaactctttcgatgcctaaatagccctccagccttccaactttcttcttaagaacctcacaattttcatataccagttttaccttctcaccaaaggacattgatttcctttttctgctttgatgcacaactgtttcaattgcaggtttcaagacatgatcaattcttccttgatgtccttgttccacttgaatccatccctgacaccaatccttcttgctcattctatatcctttgatcacaagatcaaaaacatccaacagatccttgtcttcaggattcttctgtgaaaccaagtggtcgtattcatgagtatgaacaccaactattggtgtcacttcaacctgcaaagataaacaaaattccaaactgtgtaaaaataatgcacaattcttaattaaccttttaaaatccgttgtaaatagtttaaattgcttttaaccctttgtaaatccttaaaacttgattgtaaaaactattgtaaaacatactctttatttataaacagtgtttaaaacataaaaaaattcatagctaagaaaatgtaccttgtcaccatctgctatcattgttatagcttttgcacttggaaacgatgttgatctccattggagaattaatggaatatttccactagatgattcatctctagtgccaaacttttctcccaacttctgaaccgatgataatgcccatagctgaattggggagacaaatcgaaatagaacatattgtttccttaacaaaatgtcaatatcgaatttcttcacttcagttaccaaatttgagtaaacaatctgcgcccatggatacttgaataacttttcgaaatcagtagctctctgaagattctcaattggcagcgtggtagtcgaatttcgagctaacaatatcccctccattagtaacaagcccgcaatctcattctctcctctggcagcatctttttggaatggttttccaaaacatatgtaagatcgataaaacgcatatcctcattaatccacaaatcttttttctgctttctcttcaaagtctgattatcttttatccaccacttttctatcttctttctcttcacatttggactgcttcttgatgcatcatccattggaaatcatgttgttatgtaaactctctcacggagaatcgcataggttcatcagcaaatacaaaccacaattcgtcattgttggttagtatccttcttcggagtaaatgatggacgatatggcttgaaaaggctatgtcattgcattcagttaaatccactataggacccaagaacgtgtccattaatgtcttgacctctatcggctctaatgcttccctgaccatcaagacaattttgttggatgaatgctttgttacccttgtaatattatctatttcgctgcttggttggaacagccttgtagggaagtacagtttctttgaactcattttctcaaaacctcatgaaatacattaacacagtcattaaattaacacagttttgaatatcattttaaaaaacattttgaaaatctattatgcatgtgtagttttcgaaacataaacatagttattacaagttgttgtaaggactttaaaaacccttgtaaaacaatttttataagtcattaccagtcgtttt

SEQ ID NO: 38517 - DNA, 5372 bp, Arabidopsis thaliana landsberg
tttttttttttttttttttttttttaaagtaactcctagtttccactactatgtatgttgcttcacaaaatgttttttaaacaagaagtagctctttatatgtagatatgtattctttgaatatattagatttaacaaacacttttaaacctaattgattgatttatattacaccacatcaccaataatagagatatcaacatcaaacagtaaatatttacccatgatcagttgattgttctatttgtgtttcttggatcattttggtgtttttgctatgtatttgaataggctatacagtgttatcatggtatttatgtattactaaccacaaaccagctttaaaacactatatataaagctgtacatatatactttcgtttttggattatctatataagaagtaatttttgcattttacaatattttttagattcgaaatggcgaagatgtaccggaagttggcactctgcggtggtgagggaggacaagaatgggacgacgatgtatatgagggtgtaagaaaagtgtatgtagggcaagatctcaaccgtatcacttacatcaagtttgagtacgtgcaggaagacggcgaagtagtaacaactgaatatgggacaacaaatcagcaccctaaagaggttctcattgcatttattctcacccttaattttttgcgatactagtaaattactcttgtgaattcggattaacgttggataaatcctttaagacataaacaagaagaagcaagtatttctgaggcggataccctttagtgactctctaatttttttgtattacactacttgtgtaaatgaataagacacaaacactaagacaacgttataaaaccaaaactcagatactgtatattaggatcggactaggaaatcttgagaattatcctaaacctatcaatattaaatactataaattttattgaatatatgttactattacatacagtttgtaattcaatacccgtacgaacacatcatagcagtggagggaagttaccaccaagtggctctcattgccacagaggtgattacgtccctcatcttcaagacctcaaagggtagaaagtctccattgtttggtccaaacttgcttggaattacgaccggtacaaagttcgttattgaggatggaggaaagaagatcgtagggtttcatggacggtcgggtaatgctctcgacgcgcttggagtttactttgtacatggctctctaacaacgtgtccgcctgtttacaagctggatgcccaaggtggtacagacgggcgtgtttgggatgatggttcttacgacggcgttaaatcagtgcgtattggtcaagataattctcgtattacttatttagagttcgagtacgagaaaggcggtaagttagagacatgtcgccatggggtgaaacaagaaagatcactgaaggtaaatttctagaaactgtgagatatagtagaacaaccaaaatttaggtcttaaatataacttttgatatcttgcgacagaagtattcttaaattttgattttgttgcaggttgagcttaacccggatgaatacatcaaatcggtggaagcaacctatgataaaccggacattttccgcaatgtcgtcattacatcgcttacatttgaaacatcgaaggggagaacgtcattctctgggtataagggaggtaagaagtttaagctagcgcaaaagggtcgtaggcttgtcgggttccatggaaaggaaggttcagctattgatgcccttggagcatattttgcacctattcctactccgactcctataattccagccaagaaactaccagcaataggcggcagcggaggagttgcatgggatgatggtgtctacgatggtgtaaggaagatacttgtaggacaaggtaacgatggtgtagcctttgtcaagtttgaatacaataaaggaaaagatcttgtatctggagatgaccatgggaagatgacattactcggaactgaagaggtcagttccataaacaagagttatgttttttcttttttcagctaattttattttaaattatacacttatccttgttacttttgagtctttgcagtttgtgcttgaagatggtgaatatctcacggccatagatggctattacgataagattttcggagtcgagacaccaatgattatctgtcttcagtttaagacgaacaaaagggagtcaactccattcggaatggattcgggtgagaagttctcgcttggagagaaaggccacaagatcgtcggattccacggacaagctagtgatgttgttcacagcatcggagtcactgtcgtgcccattaccaacaccaagtgaaaaaccttttattatataagtaaaaccagccagtgccatgtcgactaaatgaaaacattcaataaggattggtgtgtttactctactacttttgatgtgtttgtaacttactgtttctgtcaaatatgtccaataagaattggtgtgctctcttcaactattcaataaatctaccatgagccgtgtcagagtagctaacattgaacacacagccccactgatgtaatgaaactttttacccactattttaattgctccttgtaacatttcaaagacatagacattagaaaaagaagctttctcattgttgtcttcctcaaagcccagatctctaaagtggtcttacaagatttgattatgcatatgttgcccaaatgactaaaagtaatcttaacaaaaaataatattaaaagtaatcgaaaatgagtcgtcctatatatttaggaaaataaatatatatttttcctacatatgaatctaatcatgactaaatatgttttttttctcaggattttcagattggagttgcacaatttcaccgaaatcaagatgaaaagtgatggaaattgccatctaattaatatttctaattccttttactcaatatatcaaatacttgatgtcatattttatcgtactcatttattcgaaaattttcagatcaaagcaaataataaaattaagtattcgattaaaacgaatcgaataacagaatatccccaattttccggatattcgatacgtgcccagacctagtgttcactacgcaacattaattagccaacaagtgagatttacgtgttgtaaaaatgaaaaaatgcaccacaagtcaccttttacctaggggtctaggtttagcaatacgacatatgaaatctaaactgccataacattttttattcaactttaacctgaaaagtctcttgcaaacggctggttggatcgaatgcaagcaaagttatgtagaaagagcaaagacaatgcatatcgttgttaaatctctttaggagatcgagcttcaagtttgtcccctcgtagatcaagaaaacaagaaactaagagatatgtacaacatgtcaataaaaagcacaaagagaggagactaatttttacatttttttcttttgaatatctggaagtgtaagcccaaaggccctacatctcctagaggcgagacccacaccattttagattcatctcctttgaaaaagaaatccctcccaacgtgcctcgaacctatcacctccacctgggagatttatcactagaccagcaactcgttgaccactcacaaaagttttcaatcaagatttacaaatatatcaaattatctttattaaaacaaacacatgagtttctatatgatcttatcataaccagatttattcttacctaataatgcaatacgttttctcgacacaaaccagaagtataaaacagattaaaacaaactcatcattaggtaaataacatcttatttaatatagtcaaatttagcgtgttattatttgaggttcttggtgttcatgcttctctcaacggtcttggctgtggctttaatagactccttagtttcctcagtttttccggtgaccgtatctttgatcttctctgtagtgtccttcaccttatcccaggcctcctctgcagtgttctttgccttatccttcaagttacccgccgcataggagatcgtctgtgccccttcgtctgccttcttggccacctacaccaatcatgtctagtttgggtaacggaagcataaaaccaaatgtaaagacaattacatataaagaaacaaaacagatttttttcttttagttttgttggctataggtggaatggccataaccttttatatactacttgatagtttctccaactttcgatgtgagactttcttcattaacatgtttgttacaaatttacaataaatatattataattaactatttcaaaattttaaacaaaatctatgtggtaattctaaatgtaaaagtcaaaaaaaaaatatagttaaaatattcaaacacaaattggatatgtaaacacgataggataccttttgttgggcctctgtagctttgtcacagacggagtctttcctcgtagaagtagtccccttgaatcattttttaaaaaatgaaggataattaatatttgttatacaaatattaattaaatgtatcataaattcatacgaaaaataaaagagattacatggacgagtcttgtcgggacgaaagcacgaactcttggagctcttgtgatgaatcttgcgacgaccgcgaagcttgtcatgtcttagggctcttctttctgttgattagcagtaatgtgattagtttgttaattagttgagtttgaaggatttaagtatatataagggaattgagaaaatgtataggagatgaggtgcatgtgaagaggacacatggtttgatttggatgggacagtggggaggttgactcgggacatcggatggttcaagttttaatttgctatttagagatgtgttagtgtgaaacacaatccttggcgtctctttttccttatttgatgcttgttcattgaccaattgagaataaataaatatttgcattacggaattttagtagcattctggaataaagtacgtttgatgagctaagaaaaaaaaaattgtatgtagtgaatataaagatggtaaaagtaacgttcacaatttttttgtgaaattaactagacgagaggatcaatttatagcacatattttgatagtggtttttagagattagtcaagtaaaatctgttttacaaaaaatctcattttgcagtgtttttttttttttttttaaaagatactgtattatatttttaacgtaaaatttcaaaaggaagctcacttattctgtttaaatttaattcattataatcattgatatattaaaataagcatatttgtataatattttttaatatataatgaatgtgtaaaacggtgaattcttgagtaggtggggttagtgaacacattctc

SEQ ID NO: 38518 - DNA, 3059 bp, Arabidopsis thaliana landsberg
atggtcaaaattttgatgattcgtgttggtttggttaatgattattttttttgaagtttcttattttaggggttttgagagagaaggaaaaaaaggagtaaagaaatcgaaagttgtttgctttttccgcgtaggcgtcagtgaggggtgaggtgaccagaaatctcctctatctcttaagaaaaacacttacgggtctttttcatcctttttttttagtgtctttcttcttcttaaaaatacaatcataattcaaaactatttgtaatctattttgtattattgagaaataatagtacatattgaactaagtgggtggtttaagaattaagatcgatttctagaagaagactagaagccattgatataatgaacatatgaatagtgaagcaacaactaaaataagaccaaaaactgaaatgtgaatagaaaaatctcgtcggtgaaaaagaatgaggtaggtgggatccatttacctagcttacgactgtccttgtgtgtgtaccttcgcagatatctatttttcatgttttcaaacccatttttatactctttttatattaatcaataaaattattttgtcgattatgaattactcattgatcttttttttttgtcctttgcttataattttgttgaatggtaacattgtcccataatcaaaatcaagcttgaaactaaaccaaattgtgtcgtttgacccaaataatatatggttttattatatattttcagtttctactttcgttaacggatgttataagtttctttaaagtattatgatgatatgtttattttggtatggtcaacaaatttctcatgtcttcaaatattagttaatatttaatttatgttttaaatggtcacatacaaagttgatatataaaatgtctacaatttgaaagctgattaataaaatcgttagaggtgataatggacgttagaggttccattaacgactgataaagacatgtctattttggcctggtcaacgaataattatgttttaaaagttagtcaacgtttagttcatgttttaaacggccgcatacgaagttgatgtataaaatggccattttttaaaagttgagggattaattgacattttttcctttatagttacaggacatacgttgagtgcagaaatcgtataactttctaacggtacagcaaatagtaaaccgtacaaaaataataaaaaagggtaagatgtagaagtataaaactaatagtacaaattaaaagattttggttccacttgtatgtataagtgattacatcaaaatggtattactaagtcatcatttagatttgatgaagtttgtattcgtgtcataaaccgggcgtaggtggagttattgtcagtttggtagcgttttacgaccacacataaaaacatgtttataaattgttaaaaaacaataagacatgtcataaatctaaatgccacaagtagaattatcgaaataaagcttttacataaatacacacacccaaactaaaaaagaaaaaataaagaaagagagagagagaagaagaatcgtggagatggcttcgaccccgaagcttaccagtacaatttcatcatcttctccatctcttcaattcctctgcaaaaaactcccaatcgcaattcatctaccatcatcttcttcctctagctttctctcgcttcctaaaaccctaacctctctctattctctccgtccccgtatcgccctactctcaaaccaccgctattaccactctcgccggttttctgtttgtgccagtaccgataatggagctgaatcagaccgccactacgattttgatctcttcactatcggtgccggaagcggcggcgtccgcgcctctcgcttcgccactagcttcggtgcatccgccgccgtttgcgagcttcctttttccactatctcttccgataccgctggaggcgttggaggaacgtaagatttcttccttcttgtggcttatatcgatagctagtgaatttgactttagtagtagctataccagaatttgaagcatttgcttgatgatttatggtttgattgtgttgtctactcatttttggttattttgcaggtgtgtattgagaggatgtgtaccaaagaagttacttgtgtatgcatccaaatacagtcatgagtttgaagacagtcatggatttggttggaagtatgagactgagccttctcatgattggactactttgattgctaacaagaatgctgagttacagcggctgactgggatttataagaatatactgcgcaaagctaatgtcaagttgattgaaggtcttggataggtatgccgaggctcggtgtttatatagttcatgagttaacctctatgtattgatttgagcttgagtatgtattttatatgtgtaggttatagacccacacactgttgatgtagatgggaaaatctatactacgaggaatattctgattgcagttggtggacgtcctttcattcctgacattccaggaaaagagtttgctattgattctgatgccgcgcttgatttgccttccaagcctaagaaaattgcaatagttggtggtggctacatagccctggagtttgcggggatcttcaatggtcttaactgtgaagttcatgtatttataaggcaaaagaaggtgctgaggggatttgatgaagatgtaagtaaaaaattgagaatgacttttgctgctttcgtttatccgtctggatattttctaattgtaattgttattcttgtttcaggtcagggatttcgttggagagcagatgtctttaagaggtattgagtttcacactgaagaatcccctgaagccatcatcaaagctggagatggctcgttctctctgaagaccagcaagggaactgctgagggattttcgcatgttatgtttgcaactggtcgcaagcccaacacaaaggtatagtgtgatttttattattttccaaaggatgtttataaaatgaaaactggtagcaaagttcatcctttaataatttgtctaagataaactgaccactgctgccccttgtttatgac

SEQ ID NO: 38519 - DNA, 1940 bp, Arabidopsis thaliana landsberg
gctatgcgctaaacataaggatgcttattttatggcctatctaccaacttgacattaagaatgcttatttacgacgtatgagaccgtttgcctgttttcatccccatatttgtggtaaatggtggttgagattttgaagacaaagttatgggactctcatctgctatcatttctagtacgtttgcgctatagttttttatcgaaaaactagattgaccgtgtttcacatatagagaggctaatcattttacggacatgttaacaaactatgcttgtctttaagcttttatgctcttgtttatgttctccggtgtgcggatgaaatcttacgggatgatgtttctagacctgtttgttcaagacgagtgattgtgtaattgttatttttgttttttaatagaagtcgggagacattctctcggttattcaccaaaaatgatttagtaactatgatcaaaaacttttgtttgagattctttggtttaacaaaaagaaaaagagtatgttaccgaattcaaattattaatatccacgtagcaattgaatacttaattttggtataccatatgaaataaatattatttgattataactagtttctacataatttatgatttttatatgcgattatgaaatctaaggctataccaagatatacctgattaaaatcgataagatcataaaatttgatatcacataagaagacaaaaaagaaagtttaacacatatgtaacatctcgatttttaaaatataactagattttaacccgcggtacaccgcgggaacaatttattttttaaattaatatatataaaagtttgtaaattgtatatagttataaaatgtttttattttatagtttacaattgttattaagtaacgtcctgccaaacccgtcccgccaacccgtcctctaaaaaaaactcatttattttattaatgttgatcttatttatgatatgtttatgaattattgtctaaatattttgtaattttgtagtaattaaatgctatcaaagatctctacggtttgatgattataatcatgtagaaaagcaatatcaaaaatgataattttgtagtaattaaataatattaaatattttggaagttttattttagtaattaatcgtgtagttaaggtagagagattttgggaagcactgtgacctctaaatctccacctacacaacccagtgctctactttcaacatcccatatcacagtgagaccttgaaagcaaagcaaacagataaaagtgtcaaactttgaacacagtattcaaatttcattgagaattgcaaaaatccaaagaacaagtagagttcatataagacctctttgaagtggttaaagagccaattgcggagacgcatatcctcaggagggaaatcacgagttcctttaggaggattgacatcgatcttcttgtgaaagtcttcttcagtcaccaaaggagcaacaatggaacctgacctgcctcctccattggcggcggcacagattaggcgcctagggatagagaactgtcgaggaggcgaacaagaagaaaccaagtcaagaagaagaataggtctaaagctcgagctcaatcgcgtcgtcacgatatgaatcgctcgcatctctctttctgcttcagctgagtgagatagagaattagcaaaagaaagagagaacacaatttctttttggtttgattcaaaattagattgggcatgtccggttaaagtccaaccggtttggttttcctcttattccaaactgaaactctaatgggctgggctttataatgatcgttataggccctgtaacttttttttttccatgcaatttaaacagaagaaatttcatccaaactatataattataaaaatcgacggtgatcagaatcaataatggtacaaaatgtaaaatgtttgatacatgcatgcaagagata

SEQ ID NO: 38520 - DNA, 3820 bp, Arabidopsis thaliana landsberg
acaggataaaacctaatcccctgatccttgcgacattgcctattgttttgaagtgcatcatcaacaaccttgctggatggtttttacgtttagagcattcaccaatctccattttcgcttttcctttgcccttgaagtcagaaagaagagctagaaaagtgatgctgagatatagctcttggattaacaagtctggaagcctgaattcccgcatcaaagtaagagtcatgagaaggtaaagatgccggaagaggaggctgtgatattggtgatgccggggatatgtctgaactgtttgagctagtcatatgagtttgatcagtgatagtattagaagcagcagcttcctcctaaacaggtacatcaagtacctctgcctcatcatcatgaatcacaggtgcatttaaaaaggacagttgttgacttgatgagtgataagacaacacttagtacatatccttcaaagcttctcatattcaaactcaatcttagaaccttctctagattcaaaacgaactctccaaaaaaaccgaagacggtctatgaatacaagtctgatcttaacacggataaaggcaacataagttgaagtatcttgattaaattccatctcaagaataggccccaacgttccagctatgaagctcacagttaattcagaaagataaggtagaggtatacctcggacttggacgcatagatcaataaaagtgagaaaatccggtcccaaaaaatctccacctttgtaaggcaacaaacgagtcattaaacatccatagagttctccttaaagcagttgccaagtcaatatatggatatataaattactactccctccgtttcaatatgggatgttttgaggcttagcacagtaattaacaaaaccattatttaataaaaacaatcaagtaaagtaattaaagcaattaaaacaattaaagagtaataattaaactctcaaacaacccaaattacttgaaaaaatggagcaactttttacataattaaatttttttttgtgtgcaaccataacagaagtaattttaaacaaacaatttcaaaatttttacatcggagccaaactaaaactttcttgaatcatacatgtttatgtgagttttttaaaaaaatgatttctaattttcttcacaattccaaattcttatttgagtatgtcacttctaagtgaagagaatgaattttttttgatttaaatgaaattccagaagaaactgtttatagtgatgatggagatgaatttttgtttgatttaaataaaatcccaccaagagaagaaactgttaacaggagcgatggagattttgcaggtatctatatatacatttttgaagccattttaacaaataaatcctggatttggacttatttacaactcaatgtcattagcattaaatctttctccaaaataattaattttactttaaattgttaaccacattatcaatcaaatttaatccaaacaaacttcaaatcaatcccttaaaattagcataaacatatttgtcaacaatattttaaaacaaaattttttgttaaaacaaatattattcttactaaacgttttttgtttaaataaataaatcatgtatttgaacttatttacaatgtcatgacactgacattaattatttaggaatgaaaatattaaattaaaaatctaaatcttctaaatccttacttttagatttattatgtcaataccttaaaggtaaaaaatattaattttttaaatataattatttatatatttaaacttaataaaacattatcaatatttaaacttataaaaattttaatatatcacaattttttaacatcattatataatatatagagtttaaaaaattttcaattttttttccgttatattttgtgattcgaaattttaaaaatgaacatatattaaccaatttgcgaaaaatgtgtgggttcaacgtcccgcatcgactaaaatatttagacaatgagtcgtaaacatatcataaataagatcaacattaataaaataaatgttttttttacgagacgggtttgacatgaagagtttggcatgacgttattaaataacaattataaattataaaatataaatattttatagatagataaaatttgcaagttttaatatatattacttttaaaaataaatcgtccccgcggtataccgcgggttaaaatctagttagattgaaactgtgatgtactcatatattttttaaaatgtccaaaaaaattaatgtaatttagctaagtgtgattacagaattctgctttatttatttaaaatatatctaaatacaagtatacaaaagtatacaacagccgaccgaggagactagtaaatctgaacatgtgtcataacataagaagttattaacagcgtaacgtatatgaaccttatcccactatcactatataataataacgtcatactcatatcccaactttataacgctattctcaaacaagcaaagaaccttaaccaaaaagaaaacgtctacggagacatatggagaggaaacatcacttcgtgttagttcacaacgcttatcatggagcctggatctggtacaagctcaagcccctccttgaatcagccggccaccgcgttactgctgtcgaactcgccgcctccgggatcgacccacgaccaatccaggccgttgaaaccgtcgacgaatactccaaaccgttgatcgaaaccctcaaatctcttccagagaacgaagaggtaattctggttggattcagcttcggaggcatcaacatcgctctcgccgccgacatatttccggcgaagattaaggttcttgtgttcctcaacgccttcttgcccgacacaacccacgtgccttctcacgttctggacaaggttaacaataaaataacaaaaataattttgatactagtagttttttataatttgaccaacttatcttaataccatgaaaataattcttggtttggttgatgataataataaagtatatggagatgcctggaggtttgggagattgtgagttttcatctcatgaaacaagaaatgggacgatgagtttattgaagatgggaccaaaattcatgaaggcacgtctttaccaaaattgtcccatagaggtattgttcccacaaatctctaaaatttgttacgccaaaacaacaaaatctatattcaaactatgtgctaaagttttcgaatatgaatcatcgtatgagatgattattaattagttttggtgtgtggttacatgatggttacactgtgaaggattacgagctggcaaaaatgttgcataggcaagggtcatttttcacagaggatctatcaaagaaagaaaagtttagcgaggaaggatatggttcggtgcaacgagtttacgtaatgagtagtgaagacaaagccatcccctgcgatttcattcgttggatgattgataatttcaacgtctcgaaagtctacaagatcgatggcggagatcacatggtgatgctctccaaaccccataaactatttgactctctctctgctatagccacagattatatgtaataatcttaaagaccgttttacttttttttcatcgttactaataagacaaacccctttttccgggtaactttaagtaaaaaaacaaaacttatgacataaaatttcatcctttcgatatgtttcattcttttgtaaagcaaatttagtaaccagacatcgaacatagataatcacttcaaaatttaagcaaaaatatttttgtttgcttgtgtttgtgtcatttatcaacagtatagagaaagatttctt

SEQ ID NO: 38521 - DNA, 8476 bp, Arabidopsis thaliana landsberg
tctcctcctaggcttaagcaaaattattgtagcttcgtaggggaaaaggaatttaatatttctacgtaggtgcgaaaagcaacttaatatatgttcgtgtaatgcagaaatggtaggccttcaacgattagtggcggaggaacaacgggagggctaacaacagttgatgctttgacatatcttaaagctgtgaaggatatgtttcaagacaacaaagagaaatatgagactttccttggagtcatgaaggacttcaaagctcagaggtatttttacttcgcttctcgtcttgtttagtttcattttgcctttcttatgtgttgtattgtggatgtcacattgtgaactgcgtatactcatggtgtcttatcttggttgcagaatcgacactaatggtgtcatagaaaggattaaagtgttgttcaagggttacagggacctacttttgggttttaatactttcttgcccaaagggtataaaataacccttctgccagaggaagagaagcctaagatccgggtggatttcaaagacgctatcggtttcgtcaccaagattaaggtatggatgtaatatggtactaaatggcatactaaggtaatgatgatttatatcagttaaggtttactggggtttctacttttgcagacgaggtttggagatgatgaacatgcgtataaacggtttctagacatcttgaacttgtatagaaaggagaaaaagtccatctctgaggtctacgaagaggtatgtttttttattactgcacagagtgttaattcttctgattttctgcttcacattttatttgttagagtcacagtttttagtgtatttctctgatatcatctgttggtgtaggttactatgttattcaagggtcatgaagatctgcttatggagttcgttaatttcttacctaattgtccagaatcagctccctcgacaaagaatgcagtaccgcgtcacaagggcactgcaactactgccatgcattctgataaggttactcttattcatctttattaaaggatataatttttgcagttagtaaggttttaatagatgttcatggtaacaaaactccattatggccatacatcctttcctccactgttttaagagtcttataaattaaaatcaaaattagccattatgatacagaatttatatagggagtttttgagtgaaatgttgatatagactcttatctgccacagaaaagaaaacaacgatgtaggcatgatgagtatactggacactctgatcaacgagaagatggtgatgagaatcttgtggcctactctgctggtaattctctgggaagtgagtatttgaatcacctgtagcattatttatttgcattgtttaattattattgcttggctcagcgcctagtgagagcatgataatacaaatagatgtcttctatttttcagtgattttgatatgaaagggaaattagtatatatatctacgtgacatattgccatcttctatactgtggttattgtcaatcttgtctctgcttatcgactggtcagtagttacgtggtgctaaggtccaactatgttaatgtttgcagaatcccttgctaatcaaggtcaatggccaggatatcctaaggtagaggacaccgaggggattcaaatttatgaaagtaacgggggccatgaaagagatccagacatcggaagtcaaaaaaatctactgtctacaaaccatatggccaaggcaataaatgaactggatcttactgactgtgcacaatgtacaccaagttatcgtcgcttgccagatgatgtgagcccttcttaaaccttaatgttattatctaccatacttcaatatagcgttgattttgtgctctataatcatacggttggctttctcttgtgtagtatcctattcagattccaagctacagaaattcacttggtgaaaaggtgcttaacgactcattggggatctggtcacatcggggagtgaggattacttattcaaacacatgcgcaaaaatcagtatgaagaaagcttgtttcgatgtgaggatgataggtcagacgtatatagtatatattaggttcctgtatttctttctgtatttaaactggagtctttcaataacattgggagttcatgattgttttctattcagttcagtcttcccttctaatttcactaagttgtctgaaacttttgtggataatattgtggggtttctctgctgacaattgaattcccaaagaagttctacttccatctgatctatcaactaactgatatggtttcaggtttgagttggacatgttactagagtctgtaagtgcagccatcaagcgtgtggaaagtcttctggaaaagattaacaacaatacaatctctatagagacaccaatttgtattagagaacacttatcaggcaagtagttatcttatcaaatctggctgtgataaatgttactatgtatgtttattattcttttactttgcctaatgaccttatatgtgactaattgatagagctgaacctaagatgcattgagcggttgtacggggattatgggcttgatgtcatggattttctgaagaagaattctcatatcgccttacctgtgattctaacacgcttgaagcagaaacaagaagaatgggctaggtgtcgcgctgatttcaggaaagtatgggctgaagtatatgctaagaatcatcacaaatcactcgatcatcgtagtttctatttcaagcagcaggactccaagaatttaagcacaaaaggtaagttttctttcaggactacaagttcattttgttttgactttgaacctaatttaggttaaaaacccattcatttcgtttggctacacttgaagctccatagaagattttgtggatatttcatattagcaatttctttctctacagggagagttcttaatataaaagcgtcactgattgttagaagaaaaaaatgatgaaacaaagagaatatcttgtatcatttaagtgcaagtttgtgtcgactaaagttggttgttatgtcccaaatgcaggtttagtggcggagattaaagatatcagtgagagaaagcataaagaagatctgcttcaagctattgctgttagagttatgcccttatttactcctgatgtggagttcaattattgtgatacacaaattcacgaggatctatatctgctaatcaagtattactgtgaagaaatatgtgccactgaacaatcagataaggtaatgaagctgtggataacctttttggagcccatgtttggcattctttctaggtctgaaactattgagacaatgaaggatgttgcaaagatggaagacaaccaagagcaccatgattcaagtgaggcagtgaaggaaaagacatgtgacggttatatggcctcaaaccttaaaccgttaacaccttcaaaaatgcctaacaaagaaaacccaatgatacaaggaagctcttttgcgcaagatttgccagtcaacacaggagaaagcattcagcaagataaactgcatgatgttgcagctataactaatgaggtaaccgtattgtttcttcctgagtacctttgttcttgacctgaggccgtattcacttttcactgagtaaatatagtcaaaggttcataaatctggactagtggtggtagagcgtattttactgttgggcaataaatgaaagttgcttaagttttcataatattcctgtatgtgaaaaaagatatttccttgatatttgtttttgtggttctacaggatagccagccttccaaactggtgtcaaccagaaacgatttgataatggagggtgtagagaatcgtagtagggtcagtgatgtatcaatgggagggcataaggtcgagcgagaagagggtgaattatcccccactgaaagttgcgagcaagaaaatttcgaggtttataaagagaatgggctcgagcctgtgcagaaactaccagataatgaaataagtaatacagaccgagaacccaaagagggtgcatgtggtactgaagctgtaacaaggagcaatgccctccctgaagatgatgataataaaataactcaaaagttatcagaaggggatgaaaatgcctcgaaatttattgtctcagcaagcaagtttggtggccaagtttcttccgatgaagagcataaaggagctgagagtgaaaatgaggctggagggatggttaattccaacgagggtgaagatggatcctttttcacattttcagaacggtatctgcaacctgtaaagccccttgcaaagcatgtgcctgggacactgcaagcaagtgaatgcgacacccggaatgattctcgagttttctatgggaatgattcactctatgtgctttttaggcttcatcaagtaagtgctacgaaacaaccttctcatgttcctcaaatgtcaattgtctcagttcaaaccgctaattctgctgattttccagatgttgtacgagagaatacaatcagcaaagatacattcagagaggaaatggaaagctccagatagcacatctactgattcttataccaggtggtttattttctaagcatcattggtactttttaattgaaaaaatattatttcctaactgatatttgaaagcttaggttcatggaagccctttacaatttacttgatggctctagcgacaatacaaagtttgaagatgaatgtcgagctattatcggagcacaatcatatgttctcttcacattggacaagctagttcaaaagtttgttaagcatgtaagcttccattttaccttgttatcgtcttgactctgcttctgttctctctcctttatttttgtttgctccgcactaatcatttaagtggcttggacatgcttcagcttcacgcagtcgcagctgatgagacagacaccaagcttctgcagctatatgcatacgagaactacagaaaaccaggaagattctttgatatagtgtaccatgagaatgctcgagcccttctccatgatcagaacatatacaggattgaatatgtatgcttctcttgatatgtgtggatacctgtttatatgttcccatatactaatctgtatttgcaaatttctgtgcagtcatctgcccaaacccgtctcggaattcaacttatgaacagctggaatgatcagcctgaagttacagctgtaacagtggaaccaggttttgctaattatctgcagaatgactttctttcgtttgtcagtgatgaagagaaacccggactatttctgaaaaggtgaatgaagcaatgattagagcataaccttttttcgtcttcagttgtggtagtacagttagtaatcaccttagcatactcttttcaggaacaaggcaaaattaagtggtccgggtgaagaatctctagggatgtcacgtgccttggaaggattgaacattatcaatgaggttgaatgtaagatagcttgcagttctttcaaggtaaaatactttcttgtgaatctcttgcactgataatcttttctcttttcacatgtatatatgattgatgagagtttacaatcttcattaggtcaagtatgaaccacacacagcagatcttttatatagaagaaagcagaagaaagcaacactgaatccaactggacctgaaaatgttaaaacctctgatagtagtgaactctcgagaaagaaacgaatatcgcgctttcacatgagtcttaaccgcagacttgtcgccttgccttaactcaagaacgccgtaagtaaccctcttgtcttttatttgcctgtggtgatcaatactgcaaatcatcaataatctctaactcacgataaattgtgcaggtgtgaagttctttgctgagaatgagatatgcaagaatgagtagtagtagagagagactagagaataactgtctttgacaaagattcttgcatcattttaggctcaaagagattcacatggcaacaaccatagtttttatcttctacagtctacactgcagctggagccgccagttttgctgtatagtgttagaatatcttttttttttttaaggatgatgctaaaattggatatttttaattcattcattgaacaattattgaattttccttctaatgttaattctctttcaaattaataatctctttaatcacatgttttattaatttattttggtttatccatttggttatttatctttaatcacatttgagtttgattatataatatgattttaagagaatatgaatatatattgactcttttatcacaggtgtcacgtgactcacgtgaggctgtgtacggaaaaccttcttatcctctcagagtctcttatattaggatcgctatctactgcttcactgaaattgtcctctcagttcctacgcgaagttttcaacagattcgccggagaatcttcgaatcaacggcggagaaatggctctatcacgcctctcatcacgatccaacatcatcactcgtcccttctccgccgccttcagccgattaatctcaacggacacaactccgatcacaatcgagacttcgcttcctttcacagctcacttatgtgatccaccgtcacgctccgtcgaatcatcgagtcaagagcttctcgatttcttcagaaccatggcgttgatgcgacgtatggaaatcgcagccgattcgctttacaaagcgaagctaatccgagggttttgtcatctctacgacggccaagaagctgtagctataggcatggaagctgcgattacaaagaaagacgcgattattactgcttatcgtgatcactgtattttcttaggtcgtggtggttcgcttcatgaggttttctcagagcttatgggaagacaagctggttgttctaaagggaaaggtggatctatgcacttctataagaaggaatcgtcgttttacggtggtcatgggattgttggtgctcaggttccattaggttgtggtattgcttttgctcagaagtataataaggaagaggctgtcacatttgctttgtatggtgatggtgctgcgaatcagggacagttgtttgaagctttgaatatttctgctctttgggatttgcctgcaattttggtctgcgagaacaatcactgtaagcgttgtcgaatcacccttactccctctgtatcttagaaggtcagtcaagtgctaggtattgtgtcactttttacccataggatcgcaagcaaagctattaacggcttctaagcaatagtctgttggttttagcctcttgtaagtaagaatgggtataagtgttgtctaaacaaaccttaaccagcttcaactcgtatagttactcaaatgcattggattgtgacacatattgaccataaaaacactaacgaagctatttactgcttttaagcaatttttgttggttttagcctcttttgggacaaaatgggtataagtattttctaaacactcctaatctatctttaattcttctaatgagtcaaatgcattggattgtaacacattttgaccataaaaacactaacaaagctatttactgcttctaaacagatttttgttggttttatcctcttttgggacaaaatgggtataagtgttgtctaaacacttctaatccatctctaactcagataattagtcaaatgcattggactcttcctttttcataggttgtcgaaaatattttagttcattattcgctcctcattcaccttggtcatctatagtatctttgtcatgagtgcttatgttagtcttataaaagaaatcttttgatttggctgcccgacctccaatttctatccctttgagagcattgatcaaccggtccttccactagagaaaattgacaacatacagaaaattgcaagttaactacgaaaatcaactccatgaaaaatacacaatcacaaaatttataagaatgggttataccactattagttaattacaaatcagataagtagtacacataattcattacatccgagcacataaactaacaatgtacagcaaaacattggaaaaatcagataaaaagcatgggacgatggtcgtttagttgcaataacaatatataccagctcaacaaaatgaaataaatatctaaaataaattacaggtgcattagctagatgtgtacctttcaagcatgagagaaatactgtcacaaggtatgatttgctgttgtagcatgcacttgtttgaaaaagcttaggggatccaagcttagtagaacatgtagattttgtccacaacgtgctggacgtttccttgcatctgatgaaagactatataagaaacagaactaaaagtcaaatctaaatttttcatccatgttcaaattataaagatcttctagacaaaaatgaaccaaaacgaaagtaatagaacaaacatatactctttccaagcttcaaattgatcttcaagacaaaagaaactttgacgagaaac

SEQ ID NO: 38522 - DNA, 3565 bp, Arabidopsis thaliana landsberg
  unsure (1)..(3565): unsure at all n locations
tcatattaaatgctttctagaaaacgggtttttaaagtgcatttatgttaatctagaggttggcaaattaaatacgcagtactatagaaaaactacgagtaatcaatgtgttagagtcattaattaatgaacaattcttggaattcattcattttctttttattaactaatcaaaatatacaacaatatgtcatgttatattatatttaaaaataaatcaaaactaaaatcagaaaacaaaacaaattaaagaaataaaaatttctagagaacagaaacgacatataattctatttaagtttaaaatctaaaccctaaccactcttttataaacccaaaacgatatatgattttgtttaattgtaaaatctaaaccctaaatttcatttttataaacccaaaccaacatatgattttgtataatagtaaactctaaactctaaatacttttttataaacacaaatttaattttgttgaattgaaaaatccaaatcctaatttttatttataaacccaaaccgatatttaattttgtttaattatcaaatctaaaaccaaaatcttatttataaacacaaactgatatttaacctttttcaattcaaaatatacagattttatttccttattctttttcggattttaattttgattaatttttaaataaagtatgatattacatattgttgtattttaattggttattaaagagaatgtgaatgaagttggttcaccctaaaggtgagtcgaaaaagttttctaaaatttataaataaaaaaagtgaatacaagagttcacccctatttggtgaacctaagaccatgcccaacggctatattttctgagtatcagaagcccaaaaaatattttaaaatggaccaaacaatgtttttgggtctgagccgtatcacttgattgatatttctgacacccaataacaaatgacgtggcacgtgctgattgttgttagaaacgcgtttttatctaagcagaggaaaaaaaaaaaattctattttttctcaccgctctctcccgagaaaacctagaacttccctcttctccgccgattttccctctcctccgctgattttccctctcctccgccgattttccctctcctccgccgattcttccttctcgatcttgcgttcggtccctctgcttctcttccggcttcagctcttccattgcatctattcgagnnnnnnnnnnnnnnnnnnnnnnnnnnnnnnaccttctctcttctctcagctcatcatgaagtttgttggctgttatgagtttgcctctcagactcctcgcagtggagagnnnnnnnnnnnnnnnnnnnnnnnnnnntacaagctttaccatcaagatcaaaaaacaaatttatccttaagcatgtttggagaatcctcaagatatatcagaaatggtgcaattagtgtgagaccaaactttctgccaagaagaaagctaaactttcatctgtagaagaagagagtcttaaaaggcctataagtgtgaaggcagccaaggctttagccaagtccaaagttaagggaaagagtgaaggaggactgacgctggttctggtgattaacttcagcatatgtgggaagtgaaagagaaagatttgattgtcaaagagagactctccaagcagaagctacttgacaacctacttaataggtctgatggattgagtgagatggaaattcaacttaaaaactctcttatccaagagtatctatctggaagcaatgtgtttgtttctgagaatgaatattctggtctttaggtatgtgttgttagttaggttgttttgttaacttaacatttattattatttgatattctttgcttttttatgtgcatgacctcctcttggaagctagtgatgtcggcaaggaaacgagatgtggggtattgatgcttgaatgtagggttgtgtaatattattcggatgtaccttctttttgtttttagtagttgttccggatgtaatgtagagttactagttgtttgttttttagtagcacatggcatatgaatgtttttgtggtcagaagccacttgtttttactttctatggtctttgttttccttctcaatgtatttctacaattctcttatatatatgtctttcttctcatattgtcatccattcaaacgattcttcctcttctcatattgtcattacaattcttcattacaattattctcaaacaaagactttgttttcatttacaaaccacaagactcttttaattgttttccttctcaaacccacttctctttaaattgtttttcttctcaaacccaattctcttttgaataataatggcatcacattctcatgatgatgatacgttggaggagatgtttggaggagatgtttgaataatgttttgaagatggtttagataattatagtagacgtgtagcggcgaaaaaaaggaaaaaaatggttgctaatacagagagagatcacgaagaaggtcatattcgattatgcaacgattacttttcggaagaccccgtttaccatgatcgcttgtttcgtcgacgctttcgaatgacgaggccattgttccttcgtattgttcaaagtctttctcaatttctatatttcgaacaaagggacgatgctactcggaaacaaggtctatccgccctacagaaatgtactgccgcaattaggcgtctgacatatggtcttgcaaacgatgcgatggacgcatacctccgcatggacgcaaccactgtgagtcaagcactagagaactttgtagatggcataataaatttattccaagatgaatatttgaggcggcctacacgtgagggtctagaacggttacttcattctggaaaggaacgcggatttccgggaatggtaggaaacattgactgtatgcattaggagtgaaagaattgtcctacaacttggaaagggcagtattcacgcggacatgaaaaacccactatcgttttagaggctgtgacatcacaagatctatggatttgacatgcttttttggggattccaaatacgtgtaatgatataaataattttgaccgctcaccggtggttgatgatatattagaagttcgagctccacgactcaggtatgaagtcaatggacatcaaacaaaatgagttattacctcacagatgatatatatccgaagtgggcaacattcacccaatcaattacccgtccacaagaactgaaagcatcattatttgctacttgtcaagaagaagtgagaaaagatgtcgaacgtgcttttggagtcttgcaggctcagtttgctattattcgaaatttatgtctgttttgggataaagagcgaatgggcaagataatgagagcatgtatcacattgcacgatatgattatagaagatgaacgagacgaaaatactcagtttgatttatctgatttcgtagaaagcgaagaaagcgggacttctcaagtagataactatttttctacagagacaactacaaatgtgaacaatttgatggcctatcgagccccaatacgtaatgaacaaatacatcgaaaatcaaa

SEQ ID NO: 38523 - DNA, 2618 bp, Arabidopsis thaliana landsberg
ctcaagtggttcctgatatttctatcaatcagcttgacaagtttctctgttctcgatgatgactctccgtgttttctatcattcctctcacgccaaggataaaggttggcaagtaatgccacttctcctcaagagttgtccaaacctacatactttagtcttaaaggtatcaataatgtccttactgcgattattttctcttgatattaatttattcatgtcaaattggtctctggtttcagggtcttgtccacagagtaactagtagatgtggagatgcatgcgcttgcatacctaagaagcagaggaagattgtacagaaagaagaggcattatgttgtctgcggacatgtcaagtgaaggtgctacagatttcagagtatggaggttattttcaagagctgaaacagatgagacatttcttgggcaagttggaatgtcttgaaaccgtgaaagttggtgttcacgcagaaaacaacaacaacagtgagttcttgcgagctaatgtgctgactcttcccagagtttcagcaaagtgcaacgtccacttcatctgattttctttctttatctttctttgttatatatatagcaatagtttatggttaagagaaacgcagaatattggggaattatcaattatgcaagtttagttgtgcttgtggcagcaatcatcaaaacttgcacatcaaattgtataagtgactcttttaggtaaaaaataaacataccagaaacacttgacaaggtttgtcatctctaatttacgcgctgccgtctatgaaaatgtatcctcacagagctgttttggagtggataaaactaagaacaaaagcaaaaaaagaaagatgattgaaacaagaggtgaccatggagagaaagggatcaaagtggtgaaacaatactatcaatccgttttaccaaatgtagtattagcccatcggcttctccgctatatcgtgctgcactctaaattcattactactctctacatttgaatttgcataggatggcagagtcatgtctttttatgttctatttgccttgctagacgtagccgagttcttaagctctactagtatttaaagtcgcttttgtaaaactaatcttttgtatatccattggataggagaatgatataaattcttcttccatatctactgaaccatgataaatgactcaagctacataatatttgcaacacaaaatctctgaactgttaataaagaagacgcaaaaacaataatgagatcgaaagaagcttcttaatgtcatggagaaagtgatataaaatctacctaattgaaccaactagcccaaaaggcaaaagcacaaaatacgttttttttcttagattctgaaattattaacctggttaggttacagtagtataaaaaagagctttgtctttctcttagattccattgtcaagcttttggtacacttcctcgtctcctctgccatcgtaagttccaaaaatctttcacttcctaaattacactctctccttcgatttaaaggatccatctttgattctgttttttttttgttcttgcttgtttagttgcaaaaacgtttcaataggataggaggaacctaatcgacagttgttttagtgtgtcgtaggtaatttttggggtatgatggattcaataaacaatttgccagatgagatacttgctaagatcttgtcctatcttcccacaaaacgagctgcttgcacatctcttatctccaaaaggtggaggaatctgttccattttgtagacagctttgatttggaagactcaacacctatcagaaatgctgatagcttctctgatttcatgaaagatacagtggctctgttaagcaattgtcccatcaagagactcactctcaattcccactatgaaaaatctagtgttaaccgttggattcgcagtgccctcaaacgcggctgcttggaacttaacttgcagtcccaatatgatcattatctggatatagggattttcttccgcaataatacattggttaaactcacattatctagttatcgaacttttcttcgaggcaatgttccacctgagggcagagtgtttttccctgcgctcaagacactttccctcggtgctgttgttgctaagccagctctgtataactggctcatctctggatgccctgtgctcgaggaattattcatacttgatgttggtagtggtgatgaccagccaacttggacgaggtctgtggttagtgcatccatcaagcgactcacgattgttttccactttcctcataacacatatccttatgaagacgatgttgagatcaagacaccgaatcttgagtttcttgactattctgctcttcgctccgatggttctgatgttgattatcttgattcgcttgccgaagctagactggatcttagattgtgggagttaactaacacttttgattttggtgaggttacaaatctggtttctgcgataagaaatgtcaagacccttcacctctcgtccagttctcttgaggtctcttattcttgctagttaccattgtctcatttctatctatatctgggtgctgactttgactataaatgaggcgttttactatctattgagagtgac

SEQ ID NO: 38524 - DNA, 4024 bp, Arabidopsis thaliana landsberg
gttgtcgaagatgaattttctgcctttgtcagattctgccttggctagggtctcgtcggtggttgttctcggttctgtggccatgggttcttggtatcttctggtcagttttgctgaccttctagtcgttttctttctttgactagatagggttagttgtttagtttttgtgtgcagaatttgtggccatcgattaggaagtcttttggtttgtttcgattttgattttgggtttgtggaagcggtcgttgcggtaatttcttttgggttttgtgacctcagagaagatgttagtaattccggatttggttgatctacgctatggctcggagaatgaggtctcttctatgctctttcctgccttaaagtttgttgctgctcttgagcctttcaacgtttctttgccgtcaagtttacttggttttggattgtagtttatctgctaatcctttgcctttcctcgctccctttgatttctcgctcagcctttggctccctttgggatcgcttcctttctaagcagaagtttcgtgtttattggttggttatggtagtcttcatagtttacagagttttcttctccttggtgtttgcggtgtttgttaactgtctcaatcctttgtcgctctcattcggagaatggtgatttttgagaggttttgcctcactccttgtccctgctttcaagatctgtttagatctgtcgctttttttaggattctagctagacgttaagtgacgcttcggtcttcgtcgcatccagaagtgttttcgaggttcaatgagtttctatgaattctctttgcttgccgggttctgatatccttggttctcgagagattgactctcaacttgataggaggtggtagatattatttctggtttggccgtgggcagccgtgataagtcgcatttgctggtctttcaaaagaagaagaggcttctctgttctcttagttctatcagttttcttaaggtttttgccttgttgcctctgcttttagttttaggagtcgtcctctttcgattgtgtttagatcatttctgcattgtatttccagtttcattttactctggttcccttcgatagggttttgttttccggggaatttcttttttgccccggcaatgtcttcggagacttttagttgtctgccgacttgagtttcccttatttgggcatatgacttgagtttcccataatatcataatactatcaccatcattatcatactattttcatcatgatgataacattttcataaactcgtaattttcccgccaaaaacatactcttaattttttcgccaaaaaagtaaacccgtcattttttcgccaaaaacgtaaacacataattttccgccaaaaaacgtaaaacccgtaatttccctgcgagaaaaacgtaaacctgtaactttctcaccaaaaaagtaaactcgtaatttttctgccaaaaacgtaaatccgtaattttcccaccaaaaatagaaatccgtaattttcttatcctaaacgtaaatccgttaaccagtcataaagctctcaaaaatgcaccaatttttaactgctaaatgagtcgttcaaaatgttttataacgcttgaatatgaaaccgtccaatcccgtaaactcatgcagtcgcaactgtaactgctgtgtttcaaccagtcaggcctttagataaggtttcttagtcatgggcattcggttatccattcagttttgattcgtatccatacggttatcggttctttcagttataaagtttagtatccattcaattattttaaaattttggttcggttttggttccgtttcggttctttcggttttaaaatttaatatacattcagctatttttctttgaatattttcggatatttcagttatttttgatattttcatatgtttttggtattttgagtatttttactattttatatatattctcaagtatttttaattatttagtttagaaataactaatacttttaaaaatatataattatatttcagatattttcggttacctaaaatatttcgatttgtatccattcggttttggttctttcggttatagaatttaatatccgtttgattattttcaaattttcagtttggttcagttttttttgcatcggtttcggttcggtacattcggttcggtttatttgcctaggtctaagttttatatttaagaattttaggcccatgtttttatataaattttagttttgaaagtagtttggttgggttaggcctatatcaaattttaattttgttaagttgatgagatgacatggaaaaatagtaagtttttattggtcaacataaatgaagtgtattaatcgaaatgttctgattggttgttgattttaatgaggtgtcatgctgagaacacttgaaaaaactgatgtgtcagcacaggagagacttttagagtttttatggtgttgaatgagttagtcattttatttagtgttggtgtgtcacataatatgtgtataactaaaacaaaaaagtttctctctagacaaggttgccctagccgccgcccaaaaatctccagatttcagatcgccctctccggtgaacggcgctcctcgtcgtagccgtgagagggcccctgctgcttctttcttttttgttgtagacttgtctccctcttctagttctggtgttcgatgttgaaggtagtttgcttggcgagttagacgggtcttcacagtgaggtttgttcggtgttcttctcttcaagagcgtccttctccctcccccaacgggttgtagaagatgaattttctgcctttgtcagattctgccttggctagggtctcgtcggtggttgttctcggttctgtggccatgggttcttggtatcttctggtcggttttgctgaccttctagtcgttttctttctttgactagatagggttagttgtttagtttttgtgtgcagaatttgtggccatcgattaggaagtcttttggtttgtttcgattttgattttgggtttgtggaagcggtcgttgcggtaatttcttttgggttttgtgacctcagagaagatgttagtaattccggatttggttgatctacgctatggctcggagaatgaggtctcttctatgctctttcctgccttaaagtttgttgctgctcttgagcctttcaacgtttctttgccgtcaagtttacttggttttggattgtagtttatctgctaatcctttgcctttcctcgctccctttgatttctcgctcagcctttggctccctttgggatcgcttcctttctaagcagaagtttcgtgtttattggttggttatggtagtcttcatagtttacagagttttcttctccttggtgtttgcggtgtttgttaactgtctcaatcctttgtcgctctcattcggagaatggtgatttttgagaggttttgcctcactccttgtccctgctttcaagatctgtttagatctgtcgctttttgtggattctagctagacgttaagtgacgcttcggtcgtcgtcgcatccagaagtgttttcgaggttcaatgagtttctatgaattctctttgcttgctgggttatgatatccttggttctcgagagattggctctcaacatgataggaggtggtaggggtttattcctggtttggccgtgggcatccgtgataaatcgcattcgcaggcgtttcaaaaggagagtttctctgttgttctcgggttctatcatatctctcaaagtttttgcctagttacctttgcttttagttttgggaatcgtcctcttttgattgtggcttgattatatctgctttgtgtgtctatttcagtttaattgtctccctttgatagggattaggtttccggagaatttcctttctcttctggctatgtcttcgggaacttgtttatccgccgacttagattttccttgtttgggcatatgtattttatctttggttccacaattagtatctttaataaagttttaagtgacaaaaaaaaaaa

SEQ ID NO: 38525 - DNA, 3524 bp, Arabidopsis thaliana landsberg
gaattcggatttacttttttattagcgtgaatgtgtatcaatgagaaaacattcattatttcttaatctttgaacttaagccccacaaaaatcttataaattgggacagatggactagataacaagcgtttcacctactccaaaatttccctataagtaactctttttgtaacctccttttcttcccaaaccatcactccttttgcattgtgtgaaaccttcgagttttctcttcatcttctcaaagtaacaaactttctccaaacagattattattaaaacaatctcatcaagaactacgatgaaattcccggctgtaaaagttcttattatctctcttctcatcacatcttctttgttcatactctcaaccgcggattcgtgtaagtatacacaatgcattttcttattttagatacttttctcattagaaatttagctttcttaataaaattgtattgtgatgatggattaattagcaccatgcggaggaaaatgcaacgtgagatgttcaaaggcaggaagacaagataggtgtctcaagtattgtaatatatgttgcgagaagtgtaactattgtgttccttcaggcacttatggaaacaaagatgaatgcccttgttaccgcgatatgaagaactccaaaggcacgtccaaatgtccttgatcatgttcttaagattatccttatagacacaatatcttgaaatgttaagattgtgcttgatgcctaaaataatgagcttgagatacttctatgaatgaatatgtgaaagattttgacaataaaatgatttgatgtattaaaatattcttagtgaagttatatatgtataaatgaagtatgaaatatacattgtatgttgctttacatgagaaagataaatctacaacaatccaatgtatgaaaattttactaagttgacaaactatctgatcagaaacgttaattatggtttagaatcttgtggagagatgattacttttgtaagagaaattgattgtttgttgtcaatgaggataaagtaagaagccatttctcaacacatggacttgatagcaaactaaacaaggctcaagcattgaaattgaaacgtctcgatagataagattggctcaagaaaagcaagtgttttttgttgcagaaaacagatattgattttactgtctactttgcaagtctggaacaaggtttgcgcaaaaaccaaaacgaacaaaatggcatatcatctaaagataacaaacagaagaagacatcaaaaactctactacccttaaacatttagctcaatcggaatcctcttctcaccaaaaggagaagcaaagtatcaccaaccataatgattctcttcttcaagacttgattcagtaaaagaagccaagaaccttgccaccaacattctttctcctggcttcttcgtggtccataataccagccgaggtcgtaagaacaatgtacccaaactgcacaatttaagaactcaatgtaagatcactgaatataagattgctctttaaaaaaccagaaccaaaatatgaacaagacttaaaagacagacctgtctggaaggaagtagacgagcagtccatccttcaatctccttaacaccgacatcgaaacgaggactaataactccacacttgttcagccttccattaagctcaacaacaatcttaccagacctgtggtcatcaacatactcaaactcgccaatgtaacctaaaaaccaagaagcatcattacacttgaaaactgtatacaggaatcaaacgctagctctgcaaagttactagcataccgtgcttttgcatgacgataaggaacttaatgataactttagaagaaggcctgatcataacctgcctctttcctctcttctctgcattgtacatactcttaagaccatcattgagcacactgattctcaccattcttcaaaatttcaaaaactgcaaaaacataaatcaacagcttcacgaatcttattgacatgtacataaaaacatctacagagggaacgaattcgattccctaaaaattacacactctgaaaatgacattggaatctagattctctggagaaacatcaaattggggagattaactaagccggtgttccaacaaaacaataaagcagttcatcggattagaggagagatggagattccggcgattactaacctgaaacctaagtagtagccgccgctccgacgtctcttgctcgcttggccttgaaaaagagattaaacagaagacggaactattattagggttttcgctttaatcgctttcacgggaaagattcatgtaatactaagccattataagtacatactaggccattagtgatcataattaggccatttgtaccaaacatggacttggttcaacattaatggcattctctaaactgattcgcgtttaggactaacacattattatttaggtattaagcccattttagcccgttaaaagataaacatcgaaattaattttaattcgctgcttaatggcccatttaaaaaggtgagagatgcttatccgttcactgccacagacggatttattctaatctaacggtacgtaatatattccacgtcatcaatcctcgtgaaacgagaattaaccaatctgtatctaattcatggtcatatatatacatgagctaccgaatcgtctaaacaacaaacacaaaacttgatctcacgactccatcttctaaaattcagaatctttctttgaaacttttttcgtgtgaagaaaatggcaccaaaggcagagaagaagccggcagagaagaaaccagtagaggagaaatcaaaagccgagaaagctcctgcggagaagaaaccaaaagccggcaagaaactcccgaaggaagccggtgccggcggcgataagaagaagaagatgaagaagaagagtgttgagacgtacaagatctacatcttcaaggttctgaaacaagttcatccagatattggtatttcaagcaaagctatggggattatgaacagtttcatcaacgacatctttgagaaattggcatcggaatcgtcgaagctcgcgaggtataataagaagccgacgattacttctcgggagattcagactgctgttagacttgttcttcctggtgagcttgcgaaacatgctgtttctgaaggaactaaggcggtgactaagtttactagctcttaggtttagccgtttaggtttcgaatcttggttcgttttgatatggaatctgatggtttttatgtaatttgttgaagattgtaatggtgttaatgttttctttttaatttggattttgtgtttagtgacttgggattctacaagaagtttgatatttatgaatgttaaattaaaatttggattttggtggatgattttgtacgatgaatcggtaattttgttgtgaattattcttgagcttagcttttgtttattcaccttaaaaatgattgatcaactaatcatcgaacaggttataacggatgatacgagtcttcttggaatc

SEQ ID NO: 38526 - DNA, 1341 bp, Arabidopsis thaliana landsberg
gatgcggaaatagtacttcaagatccattacgtgtccaaggtcttttgttcttcttaggatcggttgttttggcacaaatctttttggttcttaaaaagaaacagtttgagaaggttcaattatccgaaatgaatttttagatctgtctatttagctttatcaaattcgtaaaaaagaacaaaaaattatgaaaaccttttgcctctctttagatttgctattccttttcgactagatgtcaggaattacttatatcatagtcctaatactagtatgtatattgagaagaattcactttacccccctttatttatttttcaataaaaatttgaaaaatgagaaggggtgtgatgtaactctgtcgttattgaccaattgaaattgatagaatgtatcaataatcaagagtttttttctagtcaaatggcaaaatttgactagatactaaaataagataaggaacacacgcgccgaaaaaaaggggaaccataaatcggcgaaacaacaagttttagggactatagggagtattttttgtcttgctagtcttcgacacaagaaaaggaattttagacatccttttcttgtgtcgatcttgtccttcttgattcaattcgttaaaaactcctattcttagtttacatatatatatatatattatagtagttactttttgtagttttcttttttttttttcaattttgatgaaatactaaataaataaaatcagaaaaaacttctatttcgattctattatagtatagaccaaattttaaattttaatgatagatctaatgataaaaactattgtgtcagccggggaagcaggaaaagggaatgaagtgattccccttttttattctatctttgaaagattaaaaaatactatatgttcataatatactaatttagttaagttcatttttcaaaaacacgataaaaaattgttctgattattagcagttcaacgggaccccctcgaatcagacaaagaaggaagagttgggccccgttgagttcttatgttttcacgtctataactcagctcatccaatttctacagggatgaacctaatcctgaatatgaaccataaaagaaaatacctattaaaccgatcacaagaataccagctacagtacctattacccaaagaggaatccctccagtagtatcaactctatacaccgttgtcctgcacatttcatggagtggtgatgctagacaccctaacagacacagattattattatctattatccattcgactgggataataaaaatactaccctctatcgtggatatgattattctacgctcttttcttaatcgaagaaataat

SEQ ID NO: 38527 - DNA, 2735 bp, Arabidopsis thaliana landsberg
  unsure (1)..(2735): unsure at all n locations
cacatcatctcatcaccaatccacgactctactctcatcattcactactcgaccttgccgtccgactcactcgaccgcagctcctgcataaccttgtcgttttcacaactctatctccatcacttcactcggtcctccttaaccactcgaccaattacctacaaaacgaaaaaagaaaaatttcaaaaccgggttactccaccagtttactcaacctgtttttggtttgtggtttgtgttcctggttttgttggaactaacgtattaacgtttatctttgagttaaatttgttttcaggtttcgtaatgagtaactacagtggagaatcctctatggaccctgactacaatgtggatgaagctgagtcctggtccgctagaccgagagagcaacatgtttaccagagcttcagggatgaatttgaacgctctacagcccgacgtaatcagagaagggctgaaatcgccagaggaaagagggcgatgtcaagtagatatgagctgattgatgaggatatcgagaccgagtatgagccagagtcatggcgcagggagacgaagctgctgaacaaacccgacgaggttacagtggaggagtatatcagattcttcgagatgaatgacttctggggaacgaggtatccgtgttatgagactttagcccagctggggttactggaggacgtgcagcatttgttcgagaagtgtcatctggagacactcacttcttacccttaccctgcctataaggaggagacaatcgagtttctttccacgctgcaagtggagatgtatgaagcactcacagactttgagctggataccgtgggattaggcttcttgacgttctcagtgaatgaacagcggtatcagctttcgatcaagaagttagaacaactgtttggtttccctagtggaaagggaaccaaacccagatttgacagagaggagcttaaggatttgtgggccactatagggaacaatctaccgctactttcagcgatcagtcgccaacgtcttttactcnnnnnnnnnnnnnnnnnnnnnnnnnnnnnnnnncatggagatgatagattatgcgcttatagggattctccgccggatgaaggggaagaatgtcttgagaggcgatctcaacaacgcaccaccagtaatgcctctgttgatccatctgtgtggatacaggaagtgggcgttgacgaacggaaagaagaaggtgagaggagcactatgcgtgggtggcgttgtgacgccaattctacaagcttgtggagtaacgctcagggaaccagggttagcaccgaggatgatggacttggatcatttgcgccaatgtgagttcttggagtttgacatggctggcgactttcaccgctacaggttcgagcattcatcgattagaatcgccaacattctcctcccctgcattgacgctactaggattctcgagggcaggaacattgacttcaagcctgcgcttgaagatctttatttcgagggcagtccgccaactgaggagatcagtcacaccgaaggagctacaacagaagatgttgatgagacagatgatatagatgaggcggagtttgacacaagcatgtatcatttcagtgagcatatacctccagcgagggaaagcaagagtttgagcgaagctcacaggaacaacaacaagctgcagaagtggtgcaagaagcaggataagctactcgccaaatgcctcagggctatcaagtttctgaaggacaagctcagctgctcctcttccactacagctattccgcagggacagctccctcaggacatgccttcgaggagatatgatgagcggacttggcctgagcctagtgagcaggagattccacatgtccatgcgaggcattcatcattcgagcctcgtgaatcttggaggaagaggagaaccacactcactcgatctagtagcaggagcagacgacttttgcagtctcgtagtttacatgaccgcggtgctggccgcagcagaagaagagaggtcgaatatcctcagagcggtactggccgccacatatctgataaggtcgagtacccacctgctggagctgatactgaacagggcggctcgtctatggcctgggagcaatcacaggcagccattgacgaccaactccgttcattcttcgactgaggtaagcgcctcacttcaacattgtattatatcatctcttgtgatttgttctttattttgtttctgtgattggatttgtcctgagtactctcttccaagttaattcacactgtggactgtgtgatttaagtttgggggagggctcaggaagtgtgtgttgcattgtatatactcttgagtctgcattcatctaaggcatagaaaaaacaaaaaaaaattgaaaaatttcagaaaatgatttcacaaaaacagagtgttcatgtagttgcattacatttaggatcgagtctagagtgtttcatttaggattgttgcatatgcataggggataatgatgagatagccttgtcagcattttggttcaccggataaactctgtgccctcgttgctagttgtctgttgcgtagtcaatgaaattgaagtaaaactgaaccatccctagattgctctacttgaccacactgtcatgatccgatatcattccccttataaatttgaacctgaatttattctttaattatgatgcctgcatcaaatttgaacctatggataccctaaaaatccttg

SEQ ID NO: 38528 - DNA, 8885 bp, Arabidopsis thaliana landsberg
aaatcccaatctaaaccaaaatcgtcccaaaccatatagcttagattttatattggaactctaattcataaacaaaaaatatgcatgaaccaaaatcaaaactctgaattgaacacacctaaaaaaaatgaccaatggtttgtgtacctgcaaagcaaaaggtcgataaccatcaatatccacgtgaagtacaggcaaaaaattcaaggccgtatccgagtcaatattctctagattcttcaaagaagagagctcgacatttgcagtagctaccgtgaacggcacaccacctccatcaccgccacaactcaactgaagcttccggtcactttcctgccgcttcaaactccccgaaagcggatagtaatacccaagaagatcggataaagcctccctaagcaaagcttcaggccggttatcatcatcagcaacgttcttggctttgaaaacgtaacatgccttgtaaataacttcgttgtaaggatcattgtcaagtgttgaaaggttaagagtttgttgaggaatatgttttgagggttttaccatttcggtgagcatcttctcgaccattaaagggatcgatgaacctatgtgaatcggcatgttttaatttttatgtgtttgacaaatataagtgtataagtactctaagaacactcttgtcttttatagataaagttttggcttcatgttggccacgtttaaccttaaacattgtaagaagtaacaaatggcactcttatttatattctaagtaagcctttattgtccgcactgccaataaattaagaaaatggaaacggtttgacattgtagtttcattaaatgtcattttgaaaccaaacaaagctaagttatccttgttgtccgcacggccaatgaattttcatcattatttcaaaaggtaaaagcaaacgtacgtaacttttctcatgttaaaacatttggttttacaacaagtgatactatgtggtagccacggagggagagagtgaaaggaaattaaaggaaagtcttaaacaaattcaatttttacgaatatgtatgatttcaggagggtttagtgtgagagcaaatgctcaagtcttagcgctatacgttacgaaacgttacaacttgcagctggaacaaggatggctaacgttacggaactactatgtaactgatattaaagtttcaccaaggaagagtgtaatacgtattaccacctgtctttgcgtagtttgattgatcaatgtctttgatttcttaatatatatactgtaaatgagaaagccctcaataactcaaacaaacatcgaggcaaagccaaattaagttgtcacaacaatgttgtctcttctttcttctgattcttctctattatcactcctctttctctttctcatcccttgtgtgtttatcacaagctatataggcttgcctgtgttcttgctaaaactcatcggactcatcaaaatcaaagctgctcgagacaacgagaaacggtatagttcgcgttttctaatcatacttttagttttagtagtagttatatgttttagtactctcttaactaaaattttcaaacttgtcattaaaaacctacaaccttcaaataaaatttggcatgcatttagccaattagcaataacttaatctgctgtgtgttacacatatacattttttcatacaaaatgtcaatcttttaagttatatccacgctgtaaacttaataagcaatttctaccctcacatgttataaaacccttataaacacttgtctataccatatttataaaagtctgaaaatctagtttgtggtatttttgaatatggacaaaaacaaaatttggtgtttgaagagtggtattttgaaacaagacagttttggttggatcataacttaacattggctttttgtgtttgtgaagtgatgagggaacttatgttgtccgcgaggatgggttacaaagagaactaatgccgagacacgtggcattcatactggatgggaacccggagatgggccaaacgggccggattgacgacgtcacaaggccacgaggcgggagctaaacggcttatagatatcgccgagctctgcttcgagttgggggttcatacagtctcagcttttgctttctccacagagaattggggaagagacaaggtgtgacattttggaaaaagtatgtagcttacattctcatacaattatcgattctaacaatttgttgttattattaagattgagattgataacttgatgtctttgatccaacactaccgcaataagtccaacatcaaattcttccacaggtatgaaatataaatataataaaaaaaaattgtttaacatattggtaagctcatttattagcaagctcttcttgtttcagatcggaagttcgcgtttctgttatcgggaataaaacgaagatccctgaatctctcctcaaagaaatccatgagatagaggaagctaccaaaggctacaagaataaacatctcatcatggcagtagattacagcgggaaatttgatatcatgcatgcttgcaagattcttgtgaagaaatcagaaaaagggttgatccgagaggaagatgtagacgaggcattgatcgagagagagcttttgacaaattgtagtgacttcccaagtcctgatttaatgattaggacaagtggagaacagaggattagtaacttcttcttgtggcaacttgcttattccgagcttttcttctcgccggtattttggcctgatttcgataaggataagcttctagaggctcttgcttcgtatcagcgtagggaaagacgatttggttgtcgggtttgatccacctttcatcctctctattatgttttgttcatctgtaatttctaccaaacttcttgcgtatcattgtaatttgtgtcggtaaaaatcgaataaaatcagtgatgcgtttatttctttctccgtgcttcgctttatacgcatgttttatgtatcagttgacagttgttactaaaaccaataacttgctaaacaagtaactttaatacctcaaattcctctagttcaacaacattacaatttaaaactccaaaccatcaccccaaaactaggcaaagtttctgattttttaattaaaacatcttcaaaccaattcactttttttttgcgggaaatagattgataaagatccaaattcactcgattaaatgggtataagtgtcaaatcaaagtatattagcccaccttttcgaccacacaaaacaactgaagtccccagagagtgacacgtcacgaagcaaaaatccatgaatcaaaacctaaagtcaccgtcgcgcacagaagggtctccttttccgatcctcttcagaagcaccagacacaagaaaccaaaaaaggcttgtttcacaagaaaccaataaaagtcttgtgacacaagaaaccaatcacgtgggttctcaaagccctaatgcagctggaaaaagatagataaaccgttacaaacatcgattaacttaatataaatgattctccacggaagagtttaatacgtaagacctgtctttgcgtagtttgattgatcaaagcgacgtctttgaattcttagtatatatatgtgtatgacaaagcttcaataactcgaacaaattaacattaaagcaaagccaaattaagcattagcaaggacaagaatgttgtctcttctctctactctagtagccctcccctttctgtttctcatcccttgtctctttatcacaagctatatatgtttccctgtgttcttgacaaaactccttggactcatcaaattcaaagccgctcgagacgatgatgacaacgagaaacggtagtttacggttttttaatcatacttttagtttttagtaagttatgtttgtggaatgttttgtaaatctataatttgtaaaatgttttgtacaagagtgacatcatataaatggtatttttgaaagtctcccgagaagagaatcataatttaatttcaattttataatcactagttaatatctagttatcaacagaaattatactacacaagtacacatagagagagccttttgttagaattatcccacatcggaagaatttttggacaatatatatgtgttttagcaataattttttggttgtatagtgatgaggcaacttgtgttgtccgagaggaggagctacaaagagagctgatgccgagacacgtgtcattcatactagatgggaaccggagatgggccaaacgagacggattgacgacggcacaaggccacgaggctggaattaaacgaattatagagatagccgaggtctgcttcgagttgggtattcatacagtctcagcttttgctttctccacagagaattggggaagagacaaggtgtgacattttacattgtagatctcacaagtagattatattctcatacaattatagacactaacaaattttgttgttattatataagtttgaggttaagtgcttaatgtctttgttcaaccactacctcaagtccaacattcaatactttcaaaggtatatatacaaattcgattgtgattcttttgttttgacatgttctctctggttattcattaccaagaattatcttgttgttacagaaaggaagttcgcgtttctgttatcgggaataaatcgaagatccctgaatctctcctccgagttatcaatgaaatagaagaagctacgaaaggctacaagaataaacatctcatcatggcagtagattacagcgggaaatttgatatcatgcatgcttgcaagagtcttgtgaagaaatcagaaaaagggttgatccgagaggaagatgtagacgaggcattgatcgagagagagcttctaacgaattgtagtgacttcccaagtcctgatttaatgattaggacaagtggagaacaaaggattagtaacttcttcttgtggcaacttgcttataccgagcttttctactcgccggtattgtggcctgatttcgataaggataagcttctagaggccctcgcttcgtatcagagcagggaaagacgatttggttgtcgcgtgtgatccacctttcatcctctctattcatctataatttctatcaaactacttgctctttgtttcacgtttcattgtaatatatgtctttaaatcggataaaatcagtgatgtctttgcttctccttctacgcatgtatcagtttgttactaaaaatcaatatcttgctatacaagaaaatatctcagaaacctagtgttacagcactaaaattgaaaatcagtctttgcgggaaatagtttgggctttaaaggtccatgtccactcgatttaatgggcctagctgtcaaatcaatagcccaccttatcgacaacgcaaaaaaataactgaagaccccaaaattgacacgtcacgaagcaaataaaccaaattcccatgaatcaaaaaaatcatcagcgaccactgtgactccacttgagcgccggagccgccgccgtcgccgtcgcgtcggaactccattttcacgttcctcttcaaacacaccgacgcgtaaccagtttcattttttatcttttgcttcgtccatggccgttgtactttcctactgcaaaccttcgcctcctcttcgtcgattccatcgtcgctgcgtgagtttttctttggctatgatgttatctatggcttactcttacgaattcgtagctatacaattagacttttggattcagataattcaatctcatcatcatcttcatcatctctctgtagggaaatttgtggaagaaagaaaatgttaggagttcacgacgatcatcttcggttactgctatgttttggaagtccaataagcctgcggaagtaaaggaattcgatatatcacttagagattacactctaactgaatcaaacattgaggtatttcaatctctttgttgattattttttatgtaaacagctttcagacgctgttagctacgaacttttcgtgccaaattattcgctttaacatttgtactaaaatttaaagataatagaaaagttttaaattcttcattgtcgtttttcaaatcctccaaatacactgagaaggttggtcattcggttaggaaagacaccatcttcacctgatctgaatagtctattagaaaagctacgtcttgattgtcagcgccaatcatacacctcatcgtcagagaagcgcttccacttctgcatgtagtgaggatagacttcttaaagatttgcagttctcatggttgacgtctctccatttgatgatgtatagtaccattctgctccaaacaatttgtcgctttatttccatgatccatccatgtagtatcaatatccagaataattaatatcgtttgagatattcgagtttccaaatttaaagaatcactagatcctgtgcgggtttcaaaaggttgtaaattttccaatgattcccaattaatagtatagatagtttttagtataaaatttgagttaagctaactgtcacgattgtaatttctctacatttagtatttattaaactgatactttcatatttcatataatattccaaatatctttaaaagtcttatctggtactttgctctaataatgtctctagttataattttgatcatctcttagcatacgtacgtacacataatcattttttttgtcaagcacagcataaacattatttatttacaaagatatatagaatcatataaactcaaaatttatatgttagactaatagatatttactgatacttgcgattgtgctgtataccatacataattcacgttttccaagttcttatcatacaacacaattctaattagtaggtttgacaaaatccatatacatgaccattgtcctcgtcatccatatatcaacccattaaaaacaatagccttaaaacaaatcgtaattattttttacatcattgaaccaacaagacccccatcccacatagacccctcatctttgctaaatgctggtttcattatatgctttctttactagagtttcgaaggaaatatttttgtatttttattgtcttccttgcttgtatcgtttaaatgttgtccaatttcggaggacatgagtaataatatatactcatagaaatgataaatgttacaaccactatatgaacttataaagtcagcattaattactatacactaaatgaacatacaaagacagcaacagcaactaaatatactatacaaccactataaatataatgaatactgtgtatgaataataaccataattgaacgtacaaaatgatgaataatacaaccacaaatgctgtatacaatgtgagcttgtggacagtattgattgataactcttaaaaatcattaattaacaaggatacatgcgtagatgagcatacatgaaacctcaaccataataaacaacatcaaagcatattatattagatgaaaccatacatgcaaacccccatttattatattgaaaacatcatacaaacgatacacacacacacacacaaaaggagccatgtacgtatgagggtgatgatgatcatgatattaggtgatgaatgggtgatgtgaaagggatatttaggctttgagaacgtgatcatccatgtcagcagcgaggctcttgacgaacttcatgtagtgctgggctcaggcgaatcatcggttcgtttctcccaaatcattgtgatcttgcatacgatatcatcgggagacttttggctgaactgatatatgagatcatacactttaagctgctccatgacgtgaccttctagtcctctgaacgttatcaccatattctcatcgtctatctctttcctttccttgaacacttccggtttcccatctgcacatatatgcgtacatatttgtttcattcattaagttagcaccattctttggattcggcgaaatgtatttttaccgcatgtatagttccaaatcttgatggcttcatgagagtcccattcaccgtcgtggacagtgacaccttggatgtggtggccgatggcatcggggaagaggtggttctcatctctccaccgcttgtagtgtttatccgccgatcctttcaatggaacctccgtcacatatgttcccgatgtcgccatctctttgggtagtgaaagaaatatgttatgtgtgtgtgcgcttcttactttggttgatgactattttcacgtgtgatcttccttcgtttatatatagagtgtgtaacggtttagacgtaaaatagatgagccgggttttatacttatttgatatctactgctaatatatttagaatgagtcatatttcacgttgtccaagttcttatcatacaatgtattttgtttgttattaagataaggataggtttgacaaaatgcatataatgattttaccaacaaaaaaagaagcatataatgaatcaatgataaggattagagtagacaaatgcatacatcaattttaatttaaaccttaaacaaaccataattattgtttgttgatatgatgtattgttccttgaatgccgaaaagtccaccagataacgataccgtagatttcctgccagctgtgactttcattgatatttttaaaacaatatcttctattttgttcattttttctaaaacaatatcttctatttttgttcattttttaaaccaatcatcaaataacgtatataaacatcttaacttaagagaaacatctaaagtaaaatacacttcttagctttggattgttggtttgctttattttaattgcttttaatcttaagattttgctaagatacactactgagggtgatattatatgttatacacattcttttgataagaaaagattctatatagacctctaaaaatggatggcagt

SEQ ID NO: 38529 - DNA, 8532 bp, Arabidopsis thaliana landsberg
  unsure (1)..(8532): unsure at all n locations
gtcatgctttgatctccgaagattctttggctagactcaagagcaactgcgatctcaagacggagtctgcgagtgtaatgactgaggagtgcgcggtggtgtccgaccaaatagacatggatacatattacctcgacatctacaacatatacgctcccttgtgcctcaactccacgctcactcgcaggcccaagcgaggaaccacaataagggagtttgacccctgcagtgaccattacgtgcaggcctacctgaacagacctgaagtccaagcggccctgcacgcaaacgctacgaagctgccttacgagtggcagccgtgcagcagtgtgataaagaagtggaacgacagtcctaccacagtgattcctctcatcaaggagctgatgggtcagggcgtccgtgtctgggtgttcagcggagacacagnnnnnnnnnnnnnnnnnnnnnnnaccaaatactccctcaagaagatgaatctaacggccaaaacggcctggcatccctggtacctagggggtgaggtgggtggatacacagaggagtacaaagggaaattgacatttgccacagtgagaggggctggtcatcaagttcccagcttccagccaaagcgctctctttcactcttcattcacttcctcaatgacactcctctccctgacacctctcgttactaaatattctatctgagattgtaatttctctcttaattagcttttattcctcctcccatccattttttatctactatttcattacatacctttgaatgttaatatctgttttgctctcacgacctaaaaagagaaacttatctctttaccatctacttgtccacatcttctaaattaccaagatagtatattcattttatcatctttaggacgtaaagaacggtgcataccaagaactgatgaaccttgacatctttccgaccgaaccaggttcgtgattgcgcaatgcttgttcctgaatacctatgttttctgcttctaactgcaaagaggaaataacaggacagcttgcatcattgaccatgcccaccctcactctctaattatacatacactagtttacctttttgactttctgttggagttcatcaacagcctgctgtaaggattgtatagtttttgatacaatatcttcgtatacggtttccacttcagccatcgaatctaggctgaaaatgatcccttcctgtataaacacatcttctagcattttgatgtcttcgttgctcatcctctctttcatctgtataaaataacaataatgcaaatgtatcttctacatcccgttttctgaatattagagagaatgaggaaatggctgacgtagagtcttaaccttttctaggatcctcccacatttttcatctttggtaaccgaggagggttcctcctgtgccttcgcagatttcacttcactagcacgtggtgatgcttttatgtgttttgccctgtacagtaaatggaagcaaacatctctcttaaacacgttcaataacgtaacacatggagcaagaaaccgttactgtgctctgagatgcatacctcatgccaaacctgagagttgagagcgtctcagatgcatttaaagtgcttggtgagcaacagcaaagcagcgccattcgagaatttccaccctgtggcatgagagaccacaatagaattgagaacaagctagaaaattataaaataaaatcaacctgagaagatatactaaccagggcatcctgtaagatgcgagtaagcttggagtcacgatatggtatgtgattccctttgctagatggcccacttgtgagagcgtttatcacgttccccaaggctgagagcgatttattgatcgtcttcgcttcttcaagaaccctaccttctgctccagttttgtctgctttctctgagccagccaggtcgacaagaatcagttttcctgtttttaccctgttcacatgccagatatgtatataagctccaccactacagcatcacttttttctgattaattgtaaaaaatcgttaccttttatctttaactgaatcctgctggactgtgaacaagtaggcgcagtggcttctactgctggacatattcatttctgtcattcattgttaaactggaaacattcttcaagatgactctcaatcagttttaacctttcagtcaactcggagtagcataatcataatctcactatcgactaaatggggaaacattgaacaagtaagtgctgtaaaagctaagaggatacgggtttccccaactgcgcggttagctaaaccggtctgaaatggcaattggcatcagaaataagaaagaagaaggccgtataaggcaattaagaaacttagggtagctgctatcttacgcatagatgttgtaatgcctccaccgaatctgatacaggcacctgaagcaacgaatgattaaaacttgcctacccagtaaagatttttctcaacactagcaaatagaagatataagacaatgaagctagcctctgtaacgcctgacaagagtattccttgtgttttgttctccttgatctgtatgtttgcttttgataagtccaacaggtccctgagagatatatgaatttatcgataagctatataccctagaagaaatcagagggaattacatacacaatacctgactttctccatgtagatctcaacctagaggagacaaaagacacgtaagatgtctatacaggagagcttgaaaggagacttatagcaagtgcatttaagtcagtaccatagacaatttaacagtgtatcttgcaatatcattggaagagctgatttgctcaaacatcccatggaccactcttggaagaagtcctttattgtgctcatcacagtcctggatgcctggtccctgaatcaatcgaagaaaaccaaaatgagccagaagaaggaatggtccttgtgctacaggaagaggtatcaagatgagttaggtgacctccatggaataagtcttcccagcccctgtctgcatagtataacatgaaacgatcaaattgagatcaaaatctgccaaattaagaaaaagacattgaaagcatttccagataaaagagatcaggagaagaacaaacctgtccataagtgatgattgttccgtttataccatttacagcgtctgaaagtagtagtagtagtacaaaggtaaaagatgcaaaagacaaaggtaggaggaaaccaaaaccaaaaatgttgattacattgtaaaatcataagattggtgctcaaatgtttagatctaaaatccaaaagagaagatcaaggaatcaattagtacctctcatgatggggagagccagaaactcataaaccgcagcttgggtagagtcctcataaaaaactctatcgaggctaaatgtaaattcatcttccttgtcatcctacacgcaagtaaaaacgctatatagagtttgagagacaaagagagagagacaatattaatcaagcacacggcgtcgagtagacaaacttggaaaacgaaggtttcagcgtcgatgggtcgagcacagacaccatctctgctgggatcgcgcatctctttagagcttcgcggcctgaatcgcgcacagacggttacgttagacatctcctctccttatcggaacgagctcagtctacagtgaaacacccaaaatgagtcagcagaagatgaatgaaattggggaaatagtagcacaggaaatttgaagctgagagaaaaggaatcggaacttacctctcaaatggagtggagagtcagagtagggtttctcttacgggcgggaaagaagaaactcgaaatctgatttttgagaaaagagaaggaagaagaagaaggagaaggagaagaggtcaggaggatacgcgtgtgggttgttaaaagatctaatggtccataagaagacacgtgtcactaggaacacggtagctaaggtgcccgccacgcagagaataatagctcagaaagaatagggggtgttgttatccccttgggcgtggagtggattagggagactcgcactcttcttcttcttctttgtacccagaaagaaagagagctccaacaatggctgcttgcgctactcactcctctctcatgctagcatacgccgccgcatccactcgtgcccaggaccttacccatacaccatctcttttctcttttgccagctccagacccaaccacttgagcgtcccgcttcttctccttggaggttccaggaaccgtaaatgtgctgctattgacagagcttccaaccacaagtttattgtcaccgccgtggccgctgagactgacctcgacacgtagaaggacctgtagcagacaaacaccgccgtccttgatccgcccaagcctaagaaaggaaaagccgctttggttctcaagagagatagagtatgtgctttacctacttcaatttcgcttcctttactcgtgaatcatcactttgtttgcttacccattgacagacaaggtctaagaggtttttggaaatccaaaagctaagggaaaccaaaaaggagtatgatgtcaacactgctatctctttgcttaaacaaactgccaacacaaggtttgttgagtctgttgaagcccatttccgtctcaacatcgatcctaagtacaatgaccagcagctgcgtgcaacggtctgctttgccttttgctggatatacactctatcttgtgctgcttcattccacaacattttttaatctcaatgcattgtctttttgtataggtgagcctgcctaagggaactggccagactgttatagtcgctgttcttgcacaaggtatattgccccaccaaattcactgctaggacttaggacagagattatgctttaccatttcagtcaccaaattcactgttaggacttaggacagagataatgtttacggtatcagtcagtcagtcagtacttctctagatgcaacattgtttggtgcgattgactttttatttatatattgattggatggagttcttgtgtatcatgtggcttattctttctaaatctttggcttgcaccatttccatgctgaacttccaggtgagaaggttgatgaagccaaaagtgcaggggcagatattgtgggcagtgatgatttaatcgaacagattaaaggaggcttcatggagtttgacaagctgattgcatccccggatatgatggtcaaggtatgtgttgatgatataatgttctacttgttacagcatatgaaaccgtcatgcttggcaaataaggtggcatgagatacttgtaactcgtgatctattttctaacattcttgaacttggcgcttaggttgctggcctgggaaagattcttggaccacgggggctcatgccaaatcccaaggctggtacagtcacagcgaacattccccaggtaagcctactctgcaacatcttttcctgattctggtagtcatggcttaaagatgcataaatctctcaggctattgaagagttcaagaaggggaaagttgaattcagagcagacaaaactgggattgttcacattccatttgggaaagttccttttacagaggaagaccttctcataaacttccttgcagcagtggtaggctaattctccattcttattacgtatttctgtggtttaaaatactaacaataatgtagaggcaacagttaatgttggattgcagaagtcggtggagacggtcaagccaaagggagctaaaggagtgtactgcaagagcgctcacatatgctcgtcaatggggccttccatctagttgaacataagagagatgatagagttcaagcctcccactgcgaactaatcgacaacgccatttgtaaatggggtccttttgggagacgggcaatgccagtgtagacagagaagagaaacaccaagtctagtctgttagtaatcttttcacgcctcactgctttgtatcactttgatggccatttgcttcttgtcgttatttatttactattgcctattaaaatttggcaaggggctgtacatgtcaggacgcagaactctttagtactctctaaaagaaaagaccttacattgatctttaggttacatacgaggaggaggtttctgtgtacattacatgtgatttactactacaaatattacaaggccagactctgcttcgtcatttccattttggtgagaagccctctcatctcttcctccattctcatcttcatttcataaaactctctctgccctctctgcattgcctctaactcctcgtacctcctcctccttctctcctgtgcatcctccatactcaacttccccattctccgattgtactcttcttctatcttctccttcttcgctattgctattcgtttcagtccctctgcttctcttcgtgcatcatcggcccgcccttggaacatttctgcctctgcttgcttcattctcacaatgctctctagctcttcgaaacgaggttcctttggtgaaccccttttcaactccatctccactgcacatatttcaacttgcctctctctgtggaatgcatcagctacgctcgctgaccttttcagctgattatgcgggttatctgagcacaccgatctcagccacgccgtgtcctgactagggcttcccctctcatgcctgggttttggctgttcgtatatgaacggtgcactagtttcagcaggagtggaggaatcacagtctgcaatcaacaggcaaagtatcgacagattgttacaaggaatatctatggcacatatatcacaagaatttaaccaacatgtgttcactgtgtgatcatctatactaaaacagactaataaagccatatttgatacccagataaagctcacaatttatacaatttcgcgcacctgaaatgaaacccaatatgcgattgcaagcttcaggaaggcctatcaatttacttttcaaacttgccagcatcgcatcagcagcttgtctcagctgtttccctctagagtctttgcttgatgaaaatattttattgacatactccagttccttgcaaaagcgctcaaatttccattcctttgcaaaattcagaaacacttctttgacaaagccaaacatctctgagggatggttacaggcaacacagtgaaattgcatctcggtcattcctggagcaccagaagcattgatcccattccggatgtaagactcttttatcccacaatctgtgtggcaccagtgtaggcacacatcacacccaacccagctacaggtgttggatgccatatcaaaatttgagcacacaagacacatgcaagcactacaaaatccatccttccttgaacaaaccctgcaatcgcattcgtccacaggcaacagaaccctacaagaaagatttttgcatctcatgttcatgaaaatctcagctaaatgggaagacgagatgctgttgtccaaaagaaggaaatcagaacgcccagatttcagtgcgaccaagatctccaactgagcgcgatgagattttgtaagcaattccagtgttatatcagtcctgttctgcaaagcatcttgaaaagcaccaagttgtacattcttatccatgttcagcatcatctgccgaatgttttccttcaggctagtgatgtttcgagtgggcatttcatgaaatctcttggtcattacaggcatcgaatcggagagaatgtatctgatgacggtctcaacaaaatcatgcccaccggcttccagcccagttatccacgaattactaccactgtaaaagtccttggccgttttcttctcaacagtaaactttgaaccattttcaagagagcccgttcttggacatgctgatctaacatcaacacttttctggaaactcaattgtttctcaagtatatttgctgccttagagctcccatcgggcaatctaagatgctcttcatcagcttgacccgaaattaaattgcctttcattgctcgaggttgaactgaaccatttccattttccatcagtctttgatagactgtattctcattgtactttgaatcattatgagacagtgcctgccaatctataccctgaaatataggtcggctatgaactgactgctcattgtctccaatattgtgactcagcgaacagcttggattatgattgaacgaacgggaacctgaaaaggacatagacattgtaaagccatcagaattggtacaaaacgtgtctgtcaaagaccgaacacttccagaacggactggtgaccccagctgattagtatcctggccaccaatcggcaacaatacatctggtaggctaagtgacagatccagtggctccaacaacaacttctcatccttgtgcttattgacacctgactgctcagttttttttgctctcctaaccggagaactagagaacagttcaaaccctctgatactcggtcctccgaagttgtcatctttttcatcttctatccttgtcatgaagatcctcagtcttgcaatcaaaaaagagagcatttccacctaaatgtgtaagagggac

SEQ ID NO: 38530 - DNA, 1724 bp, Arabidopsis thaliana landsberg
aaggtattatctgagtggcccaagcacttatttgctgaggagaaactaagccaattcggagttgttgatgtttatacctgtctctcgttttgttaatttcgtgtacctattcgagacatccttatatttacaaaatctaaggaaagtatctgtatcaacgaaaatgattatctacttaacatggtgtggttctctcttctttaagaaatcagttaatataactaaattttgcaaaataatgagatcgcattattgtaaatacatattgtcttttactattttttatttatatttataaaaatgttaccagacaaaagtaacatacaatttatttaaaactcgcacgaaaaaactccattctcttacaatacttttacaaaataaaaatgtaacaaataacttccatacattggctatataccccctttcagaaccccttcaacataccttacgtctttccctgacgtatcaatatataccccccacacacaagactctctccttctcgtaaaacacagacacacaaaaagaaatcattcgtcgactttattacaaaaccctctcacaacaccatcacttcttcttcgtcttctgtctgagtccaaaatggaagactacagatccagatcgtacggtgacgggagaacatcagaccttcaacaatactctgctcaccgaagatccgacggtccagattcattcagtggtaacggtatgcaagatcttaggtcttacagtacttcctacacagattacccgacccggatacccgaagaccagaacccgaagaaaggaagatcatcttcatcgtcttcttggggatttgtggatccagatttacaaaggaagaagagagttgttagttacagagcttatactgttgaaggtaagcttaaaggttctttcagaaaaagcttcaaatggatcaaagataaatgcaacaaattacttaattaattctgtcaaatgtgttttacataagataataaacttttgtcacttcgatcggttgagtttcaatctttttttgtgtatgtgtgtgtgtgtttgtgtgtgtgttcttagcttatgagttgtgatcgatagtgattttgtaacaacaatacttaatagatgagtaagtgatttcttattcaatttttgacgtatcaaaacaagttacaatgttttaaacattttaattaaaacggtgattattcatttctttatcattgaaaacatccatgagttattattatcatgttttgtagtagtttcgtttcatattatgcgtgtctaaaaagataacttgttttatgcatgtgattatcttgtaaaaacgattagttcaggtatgttaagtaattacggcatgaatgttaaagttcttacgtttttaatttgcgatactcttccttcagttttgatgaataatttttcttatgaattatgaagtggttttgtttcattgtgtgtctaaaagtgtttacacgaaactttgttaattaagtgaatccaacgtttttagcgttacatgattataataacgtcttgatttgtagcgattggtgtgtttgagaaactatttttatttgtattgattagtatatacataagaagggactaattttttgtaaacaatgtatcactttgtaaagactagatatgatttataaaatatgttgtttttttaataatgattggtgagtttgatgaaaatggactgtggaggaaaacaaatagca

SEQ ID NO: 38531 - DNA, 1974 bp, Arabidopsis thaliana landsberg
attcctccggcttcgcgattgagtgaaactgagctgtttgcttctccggggttgcgatagagtgatttgccctggcagagctccgaggctgcgatagagtacttttgctgaaggcgtcattgggcattctgacttcatgttctgtttttcctctgtttgaactccaaaagcatccaaagtacctgaaaacaaccaaatatgccatgcacatgcaatcctaatgcaaaatcgtcctaagtatgtaaaacacactaaaacgactcctaatgagatgaaatgtggatgaaacaatgacaaagtggtgaagaatgaatgcctaaatcatgcaaattatagacatatcacaaaacaagatgcactttctcctcagaacgctcaatgtggtgcatgttctaagtatgtcaatgcccaccgtataggagagtagtgaaacgagtccgtggaggagacaaggaagcaacttaattgggaaaacgatgactacatatgtcgtggccacattctcaatggtatgtctgattctctctttgatgtttatcaaaatgtcgagtccgcaaaggaattgtgggatgcgttggaatcgaagtacatagtcgaggatgcttctagtaagaaattccttgtgagtgattttaataattacaagatgtccgattcaaggcccattatggagcaataaaccgaattacttcgcatcctaggccaattcactaaacacaacatgatgatggatgaatccatctcggtgtcgtgcatcatcgataagttgccgccttcatggaaggattttaggcgcatgttaaaacacaaaaaggaagagttatctcttgtacaacttggtagccatttgcgcatagaggaatctctaaaggtgcaagagggtggaaaacccaaagagaaagaggctgaaacttcttcaatcaatatgatggaagaaggtgggagttctaagatgaagaacaaagggaagaaacgcccctttgctaacaacaccaatgatggatctaacaaatgattgaagagcgtttgttggatttgtaacaagcggggtcacttcaaacgtgattgtcgggcaaggaaggataagaacaaaacgaaagggtctaaggatcaaggcccatcctctcatcaaggtcagatttctgttttatattcatactcaagtgtactatgtttcaataatagctgaggcattttatgtgcagtatgatgaggtgtcatggtggattaactcgggtgcaacaacatatgtttgcaaggatcgtggctagttcaagaattacgagccggttcaagatggatccgtactctatatgggcaacgagtcaaccgctcatatcctaggtcgtggaaaagtcgtgttagaatttagttcttggaaaactcttgatcttaaagatgtaattcatgttcccggaattaggaagaacttagtctccggtagtgtttaaaataagtgtggatttaagcaagtgtatgagttggataagtatgtcttatctaagtgtggtgtctttgttgaatttggatatttttgtaatggcatgtttatgcttaatattaataaagttttcaattatatttacatggcatgttctagcaaaaatgatatttctttatggcatgcaagattaggccacatgcattataaaagaatgattgatatgtctaaagaaggattaattcctacttttgacgtgaatatagagaagtgtagaacatgcatgttgactaagataatttgacaaccttttaaaagcattgaaagaaattatacggtgcttgaacttattcattgtgatttatgtgacttacatgctacaccatctttaggaaacaagaaatatttcatcacgttcatagatgattattctcgtttttgttatgtgtttttattgcatgctaaagatgaggccttagataaattcaaggtttataaaaccaaggttgaattacaacatagtgacttgatta

SEQ ID NO: 38532 - DNA, 3725 bp, Arabidopsis thaliana landsberg
cataagcaagagacaccaaacttataattagtatccctaatatgaaacaacaaaagcttttgatttttctgagagatatagggaagcatactgtacagatctttcggctgacataaacaactagagcaaatggaaaaggtccacaccaccaaagaaagtcccaggtcagagctttctccaaccgcgcgttctgcctcggtccatctttcatcaaaacctttcttgatttgttttcctaattcatcagaaaaaaatatcacactctcaaatatttctgtcattaataccacatttgaatcataaaaatgtaaagagaaaaaccaaaagttggcgcccagtctcgttgtcgatcctgaagaatggaaagtcgttcggattagcgaacaaatcatagaccccttccggaggcaatcctactgtcaactctatgtgcatgtggcaaagacccttttttgttgtcaccttcaaacatgaaaatataagaaatctttcatatttttttttttcttaattcttctacaaattccttttaagagaataaattcttaagtcttaccttgaccttaggaggagcatcataccatggtttcttcttctctgcagctctccaaagttttccttgcttctttaattcttctctgttctctggataagtctcagacactgacttagttttaacattcctagatcttttggactcggcctacaacaacaaatagaaacataactttaaatattgatgtgtcctcctagggtcctctggttgatggaaataaaactgacctctgtaggctgttgtaggttctggttgatccagccagggaatatacccatttctctctgaaaatgtagtctacaaatgatgcttacctgataaaaacaagagcaaacgaataaccaaagcttgtatatatgaggaatattgtaatataaagttgttatagattgagataatgtactagctgaggaggtaatggtggaggagtagtgtacgtatacagcgaaacaagaagtgagcagcatgattttagtgagttcttgacgtcgagctaagacctacctaaagaaagaggagaataaaggtattacctcgtgagcagtctgctgttctaacttataaaatcataaaacttttcccatttttcacagcacgaaacaaaaatcccttgatcgaattgacagattttaacagaaaatttctctgttttcatcagtaaagtttgtctattagttttgcatgtagagctccgaccaaaatactactgtgagttgatgttttaaagtcaaaaccctttatctaattcgatggtaagcacttacgaacatgtaatttcggaatcaatatttgatgtaaaataacatgacataatataatgttgtcgacaaaaatatatatatttacacttcgtcctttctctctttccattgcgtttaagaggatgtggcggggaattcacattattgaagaaaggaaggaggctcaactcgcgatgccagatatggtgccatctaatgataaggtgtcttttagctatagactagctagtgacgttaaaaggagctgccaacagatttctttgcggattaacgacatcgacatagttgaaaattattgcgtgtgggatttgaaacgagatgatgtggatgtgatcttagggtatgaatggctttcaaaacttggagagacagaggttaattggcagaatcagagtttttccttcatccataaccaagattgggtcactctatgtgctaagaataaagatcttgagcaaggtactaaaagggtgaagatgagaagtgaaaaggagcaaggaggaatgagaaatgaattagaaagcgattgtggaattgttgcttactaccttgcggacaaggtagctttaaaaggggagagtaaggttagttgtgtagaagtcactaatgaccgagactgtgaagatgagaagaggggtgaaaatcaagaaatgaagttaagtactgaatatccaaaggaagtttcttggttcaatgagtttgaacaaattgggatccttgttaagatgcaattcacccgtccaccagaagtgttcttggtcaagtgatggaacaaaagaacgttaaagcaaccattgaagttgatgtctgtgtggaaaaacagaaacgcgagattgaagatcacctagtcttagggttaaagacaggagaagacaaggttaggctgatggttgggagtttttcaaaacaccaggatagagtttacgagtgttgcatgatgttggagatgttgttggtttcgaatggggtctcatcattagagaatacacgtgcgttgaaaaggtcagctgaaatgagtaggtggaaacagtttggggtcacacataaggagggcaaggagagaggctctagccaaacaggttttggcggtacaatcgatcctagagctaagacaaaacacgagactaaggcgaacaaggcaatgatcaatgcccgagagtttcattttcaattccttccaccatgaggacatggtgaatctcaacgagagagtattgatagattatgatttgggcctaatgggctgtcgtttatggcttattgtttaaagcttgttttctttagttcttctatttaacattagcttttgtttctgaaacacttatcgattatgaacaaagaaaagtttatcttcttcatctcatctcttcttcttcctttccttctctgaatattctgcttcccatctctaattcttctactatctcatctcctttctgttacttaacttaatagcccattttgggtcttatcagtaccaccccatatattcgaagcatagatgaagctcagagacaccgtgttccagggcattacatatccagtggttaacaacaagtttgccatgcccttctcttatattcttttgtttagacatacacttttttcatcaaattttaatgacaatttctttatacggctatagccttccaaattagccaatgttttgtacaggaaataccgaaagctctttcgtttattcttttcagggtgacaaaatatggaatcgttacagtctagattaggactgaaagcaaagagagtcctccatctcttggagagaatagaggttgaagcagcttcgttagtgagaatgaaggacacgattccgacaagaagctcatctggaagacaatctattgaagccatgcaacacatagagactgactccatatctagtcgtacctaaaacatgaagcttaaactcaaagtcaactacttattaggaaaaaatattgcaacctaatagaaatcgacttcaactaaaatccaaatctgatttcatcaaattaaaacctagaagaaacggacataaaaaaacttacataagaattgatcgaagcggtgacagattatgttgttgcttcctggccaatctttaatctcctctcaattatattatgtcgtttcaaattgataatatagaccgtataaaatatacatatgtgtatctagtatattttattagcttatacaattttaagaaaaaaatatattcttcttttaaacgccattttgaattataagtttataacaaagattgaacttcaatttttgtttttaataaatatattgatgaataagaaatcaggtagctcacacaataattatttcagcagtttaaatattttcagttagtatcttccactttcgattgttactaatatctaaatacaggaaaatattaa

SEQ ID NO: 38533 - DNA, 5413 bp, Arabidopsis thaliana landsberg
  unsure (1)..(5413): unsure at all n locations
aaaaaataacgggaggggctcatttaatttggcttaaaagaaaagaacagtgaagaatttttttaacctactttaattcctttactctccaagcttttcattaggcagtcagtgagaaatttccctcctagtggagaccatacaacagcctgccaataaaagtatggtcaacaatcggagaatcacaatctacatcaatgctgtcagtcataattcacatggatgagaatttatagcagctacagatgactatggaaacgagagatgggaaactttctcctgcagtacaaaatccaaacccaaagaaacagcatcacaaagctgaattcttactaaatcgtgtaatacaagtaccttctgaagaacataaccatcatgcaccggtgaaatggttgtggatcctccaccgctagaaatacaataaagtgtcatcagtgcttctcaaattatacaccatacagaacaaggtagactttcacagcatatagagcagaagtggaacattagtagcttctacatactagagaaacttttaatacttaaagtcttaccagtcaacaaccaaagaagtagcacgcccagtagcaaaagacgtgagaacctagcaccaaaaacaccaaattcatgtagatagttagacatctgattacacaagagctgactggatatcaacattacagtgaacgtcatataataatctatcaaaaagaatgatgacccaagggagagggaatatacagggttcttagccataaacagtgccggaactttgtacttttcaaacattagctctgccgccctgtcaagcatatgatttgagaaaatcagtaacacaccaagataaagcaacagtggtaataaaggatatttcaaagcagataaatcatacttctctctctgctgttgagtgtttaaaggaggctcagctagcagcattggatgctccgtaggatcaatcatcagacaactccttaaaagacaaagtttttttagagatgaaatgcaaacaacaattaagagaaaatataatgctttacacatttacttgaaagcatgttcccatatattgtccaccaaatcccagtcagaaacgatgccatcttttataggtgacaaaacctggtgagagaaaatgcaatctgtaatttcaccaacaaagttataaactttaacattaatcaaggagaaaaactaacctccatatgatctctgcggtagctcatggcttgagatcctacatagagcttgcgtttgcccttttccttttcagactcggtcttcgaatcctcagagttcgaattagtctttgtagaatcaacatccacatccattgcctctacaccatctactgccccaataaccttatgaacacatcaaaaaaaaaactaagagtctgaagatacaagggacttgagcaaatctacaataacaccattaagcttatagtgacataaaatgctggtaattaagacttacggaagggaaaacggccttgggagcatcttcaccggcgtaaccagccttgcaagtgtgcgaacccaagtcaaccacaatagctgacacttcatctgtgaaaacccaccacggaaaaaaacagctcaggaatgtctcaaaagataaacgacaaagcaattcaagggtttaaaaagaaacccacctccgccgtacatggctgcagggaacgacaagggtggagcggttctctatctgagctttgtcgccggagggtttacacacgggacggggttctctgtaatctcggatccagctgaatcgggtcgacttggttttactcagttcgagttgtggggaccacaatacctttatttaatccgtcgggtttaaattagtcaagggactaaccgaaccgaacacaatttttctaaaccgaaccaacttttgtgaccaccctttttgcagtaaacgaagctgatttattgccaaataaaatgtctatgcttaatgaaagtgtataatttaaattacagccgaacaaatactgaaatccatattttcgagttacataatagaaattatgataaacaaataatctggttatcttttgatgtacaatttgctcaaaaaggattcaagtatggaaccaaaaaaaaattattaatgaatcagcaagaacactttgtagtttgttatatgaatatatgtaatgtaacaatgtcacttctaactgagttgctccatagattttcgagtgttgacaaatgttgcacttttgttgaacccctcaagcaaaagaatccttattgcctctaacccggtttggaatgtgtgatccaactgcatagcctaatacaatcaggtagtgtcgttctgaaattttttaagataattatgggataaatcggattttacctcttcctgttcctgtctattgaacggtcggagaacaaaattggctgtatccatcttccctggaggacgtccgatccctgaaatgaaacattcgacaatttgcaaaaccagagaagaaaatgggaagatatgtcggagtggagaaaaatgagaactgtacctattcttagtcgaggaaaatcacggctacctttgaggcggtctataatacttctcatcctgcaagtaaaagaacaacccatcatgttttcttgtagagtttctctatgatttgatagtgaaaccgtaaactattatccatccacattgcttcttaagtaaaaagtaagacaatacttaaaagttaaaacacaaatgaaaacatcaacaggccagatagagagtgaaaagcattgtacccattgtggcctccgtgaccaccttttggcaataaacgtagtttaccaaagggcaaatctaaatcatcgtaaacctgaaaaagacaaaaaaaattaagacggcatatgcactctagagccagaatttggagagtaagcgagagagaaggttaagtataccacaagtacttgctttaacgggatcttgtaaaatgaaacgatttgtccaaccttcaaagaattccagcaatcataaacagaaagaatcaaaataacaagtgataaaagttaaagagattggttaactaaataaaccaaagtttgtttccgatgagctcacttacagactcaccacttaggttcatgaaagtttgtggtttagccagcataatcggtatatttccaataacgcctatgataaaggaaaacaatacccaaagttagaaacaaaccagagacagaaaatgatatttatttcaatattcattctccggaaacagttagccattgtttctatcaccctcatcaaacatttgagacgtatgaaatttgaaagtttcaaactttgagataagaaaaccatttcaaaatgaaaattcacaatggagaagataagagaatgaaaaagagaacctttcccaaacaaggccttgaagttaacagtgttcatggagatgccttctgcatcagccaaagcgtccaccatctcaaaaccaacctgcaattcatgatcacgttaccgagctgaaaaggaaaatgcaaagtgagaaagcaagagagagacatacgttgtggcgcgtgccctggtacttcttgccgggattacccaaaccaacaatgagccatggcagctgcagtggcggagattttggcttcgaagaaggtaaagcttgaagtaattctgattccggttgagaggagaatgaattcgataaaaatgacaatgattgtgacgatgatgataaacactgagacatcaagccttcgacacctcttattcctttcgtcagcttccgacaaggcaatgccggcgataaaaacgtcgccggtgatcggaagaatagtgagcaacagttagaagggaagctaagatttgcgattttagcgggaaaagctacagctttcatcttttcttctggggaattagggtttatagtttatccccaaatggattttgttctgtcggtgtcgaccaaaaaaggtaaaaaggagaaagaaaactgaagggactagatttaaaagaccacaaaattgagggacgaaaccgaaaataacaaaaataaatcgccgttgccggggatcgaacccgggtcacccgcgtgacaggcgggaatacttaccactatactacaacgaccttgttgatacacaattcaatataataattatttaattcgacaaatacaaagcatacacttgtcgtcctctttttcactcagagacagcttctttgaaattagctttgacactgagctcatcgtacgcattcacgagattctcaagcctcgcgacgaattcgatcagtagcgaagcgaacgtagctagagaaagattactcgcgctctcgtacatttttcccggctctcccagtggtggctgtaacatacttcccggcgtaatagagatccggctaggccacgacggctgtttatgtatcatcgtccttgattgcaggtaaggaagcatcgtcgccgaactcaagttagctgcagttgtaacatcatcccaattcttcggtggacgaagagtggcttcactctgagatttatgagccaagatccgacttagatcagagtcgagattcgagattttttgttcatcagtcaaatccctaaccctaggccggttcccgatttcccaattcttggcgttcacgagaaggtatgatttcttgtcgattttgctctgtagttcttctgctgcttggtgaatctcgtagagtatgtcttctatagggtttagcttctccatcttcttcaggctttccccaatgtatcttagtacttttgctccttcgattcccactctttgaagctcattacgaaattctcgtcttctatcctctgcagcctgcaattactttgcatactcttgtctcaaatctctcttaagatctgaagattatagaatgtttctgacttaaagattggaaagtacctggatctctgagagaatgcagccatgtaacgccatgaccatgatagcacaatgcctcaatgcaccacctactttcacatacagtgcccatgggtatctaaaggatttgtacggtccgtgtggtggctcccatgatgcaaaactcatcttcacaatcacaccaacaacaagaaaaagatgtgaggatctcaagtaagctggtcttttgataatgttgttgctgttcttatgtgttaaaagaatcttaccagggtgtcttcttggcttgtagattgaacggctgatctgtaaccactgtacactggatcttccgcgacagcttcatagaccagaatcctagatgggattgtatcatatgctacgcactcaagatatccgttcacacaacctgcacaaaggaacattttccatggattggaaacagactaagaaagctttcaaccagaaactcanattcagggagagagttaaatataaaccttcagagaagtcgcttacgtcacaaaagt

SEQ ID NO: 38534 - DNA, 214 bp, Arabidopsis thaliana landsberg
agtcggaactctctatttcgttgtacaacgacgatacggagggattgagagcaatctcgttaccctccgtatcggcaggcaggtctacctgtggaacgacaaataaagtgggggtttccagaaacccaagaagacataacgagagtctcaataataagataactcgccctaacttcggggctatgaaaacaagaaagtaatataccacacccaa

SEQ ID NO: 38535 - DNA, 2311 bp, Arabidopsis thaliana landsberg
ctgattctttaaaaaaaaaaaagaatctctatagaggagtattttggagtaatctcatctcataaagactagtgacttgatcagcaacaggcaacagcccacataatggcttgtcctggtggaatcctcattagcattggaaacaatcctctccataaggccaataatccttcctctgcataaatccttctaatggcatcacccatccctttatatctcaccccactttcacagtctcaggttggtttgagccatcaacctcgttttgaccacatcaaatggttcgagcaaaatgtatggctcaactttgaatttgataatatattaaattaaacaaaaaattcaaataagaattttaaattgaataatttatatataccataaatctatatatacatttctgcagtcattttgtgaaataaatcctgtagtttgacttatttacaatggctgccactgaattttgatgtttgtttttgataattagaaagaaaatcttcgaattaaatatttgacatttaacaatcttccaaaatctcttcacattaactacacgattacacgattatttactaaaataaaacttccaaaatatttaatatcatttaattactacaaaattatcatttttgatattgcttttctccatgactataacaattggattataatcatcaaagcgcatagatataatttgatagcatttaattactacaaaattacaaaatatttagacaatgattcataaacatatcataaataagatcaacattaataaaataaatgggtttttttacgggatgggttgacgggacgggtttggcagaacgttacttaataacaattgtaaactataaaataaaaatattttatagaaagatgcaatttgtaaacttttatatatactaacattaaaaaataaattggtcccgcggtataccgggggttaaaatctactatatatatatatatcgtgattgcgtttaaagcagtgttttcacgcccgacccgaaccgtccggtccgaccggttaacccgtgacccgaacactttttcggtttggatttagtgctaaaacccaacaagttcaaaaccgaaaaaacccacaaaaactcgcaattaacccgtgacccggtgaaccggttgaaccgaccgggtgtgggttttaaaaagttctcttgattttacaataaaatatgagattttagactttattcaatttatttttaaaagttttttcagttcttaaattcatttgatgttttagattttggtgaagactttacaataccgccttaaaattgaatcgaatggtgagagagacaaccgagattagttgtttgaattcacgatgttttattaatttagttctgtcattgatgatctcctaatatatttgttacggtgttagacatttagttggatttcaaatttttaaccactttattattattgtttgattttttctacatatatatatatttgggtgtaaatgattttatattttgttaaacataatataattttatatttgattaaatatgatatgattaattttgttttctatttataatactattttttttttaataaaatactctaaaatttctattaatattaaatttattaaataaattttaactaattaacccgtggtccaagccggttgacccgatgacccggtgacccaaaaggtagtccggttcatcgtccgggtcgggtttcaaaacattggtttaaagtatttaaccaaaagtttgacccgactgaaatataattgcgtttgttaaccgagttagagtattaaaccattatctcgtcaaaagcaagacaatatcctacatgtctactctaaatttggttttctctaaatatttgctaaatatagtaacatattgactatgaacaaaagtaattgttggtcattgtccatcgatgattatcccctgctctacatcgtcagtcaaattgtccactctttcacccaccagatacctttcattgaagaccaattggtgaaggtacataataacatcacgtgttagcttggccataaaacagactgtgatcaaagctaataacgccggccaaatacacctttcaatagctgaattggtgctttgggagaatccaagcaacgggaataaaacctttcaacagctgaattggtgcttgtatacactaacaaaataacccttttttccctctccatctgtatacataagtgattacaactaaaaatttcttctagtactacatttctctaagaataactttagagcaaaaaacgcatactaataaaaatcaaagg

SEQ ID NO: 38536 - DNA, 3306 bp, Arabidopsis thaliana landsberg
  unsure (1)..(3306): unsure at all n locations
ctgaacttctatgattcatttagagtaggactaacaaacgttaatggaatgatactcaagacgctcacagatttttgaagcctgtgtctggtcacactttggtaaacttctctcgtttgatacacactggacgcggtgaggaagacgagccttgtgtgttgggattccacgaaagattggtgtactatgtggtagatgcacaagaaaaagaatggagtgttgttgtacatatccaaccaagagacttgtataatatggaagattctactagttcagatgaatttcctcctcaagtcatcattgaagatcctcctgttcaaagttcaatgattatatctgataatgttttcaatattagattaatgaggcaaatagaagatcttgaaagttctcacattccatgtgatttatatgataacatggaggtgattatatttgttgattatatttgcttggtttttgcttggtgattatgacttcaatattattctaacaactatgtttctatctttgtaggtttaaatatgtatgagacagattctttggccccacctcctcttggaccagaataagctagtggaaaatggagagttcatgtcatagatggttatagaaacattacagaggaaaagattttaggaaaagaagtgtggagcatgcttaaatcgcgggttatggttgattttaacaggagaggacaacctatcaaagattctggaggtttgcttggttcgtggttaggcacactaagaaatggtcttaatataatcctgattggctatacagattggaggagagttcacaagagcataaatggcttgtagagttattcaggaattttcattgcttctcatatacatgatctctggctgttaataatagctctggacacttcacattggataagttctctccatctatatatacatttttcagccattttagcaaataaatcctagactttgatttatttacaatctaatgccattagcattaaatcttttttctaaaataattaattttactttaaatttttgatttaaattgtcaatcacattatcaatcaaatttaatcccaccaaacttcaaatcaatcccttaaaattagcataaacatatttgttaacaatattttaaaacaaagttttttgttaaataaatattattcttactaaacgttttttgtttaaataaataaattttgtatttgaacttatttacaatgtcatgtcactgacattaattatttattaatgaaatatttaattaaagatttaaatcttctaaatccttgcttttagagttattatgtcattacctaaaaggcaaaaaatattaattttttaaatattattatttatatatttaaaatttttaaaacattattaatatttgaatttataaaaagtttgatatattacaattttttaatatcattatataatatatagagtttaaaaaaatctcaaaaaaaaaatcgtcatattttgtgattcgaaattttaagaattaacatatattaagcaattggcgaaaaatgtgtgggttcaatgtcccgcaacgactaaaatattttgacaatgattcataaacatattataaataagatcaacattaataaaataaatagtattttttttttgacgggtttggcaggacgttacttagtaacaatgataaattataaaataatttacaaatttttatatatatattaattttaaaaaatgaattgtctccgcggtatatcgcgggttaaaatctagtaataggctaaaaatcagaatgtatcgttttgccatatataaaatacagaaaaacgataccaatattattaaaaaatatgttagccagaatattgcgtttcccaatgcaatagctataaaaaaaatgatatcagcattatatgaatccaattaacgctcattgaattgtgtaatttgcttattatttatttttattgtttatttatcttagatggagccatgtgaattaaactagcaaatagcaatgttttattcgattccaatgcaagatgatattatgtgatctcatcatgtgttaaaacagcgcacctattgcatgcaatgtgaaacatgatccaaagatatctttaaatataaaaagaataaaacaaaataagaaagtactaagatttataaattactaattaagatatattagattttaacccgtggtacaccgcggaaacaatttattttttaatgttactatatataaaaatttacaaattgtatctaactataaaaaaaaaatattttatagtttataattgttattaagtaacatcctgccaaacccgtcccgccaatccgtcccgtaaaaaaaactatttattttattaatgttgaacttatttatgatatgtttatgaatcattgtctaaatattttgtaattttgtaataattaactgctatcaaatatctctgtgggttgatgcgtataatcgaattgttatagtcatgcaaaaaagcaatatcaaaaatgataattttgtaatttttaaataatgttaaatattttggaagttttattttagtaactaatcgtgtagttaatgtagagagtctttgggaagatagttaaatgtcaaatatttaatttaaagatttactttctaattatcaaaaataattattaaatgtcagtggcagccactgtaaataagtctcaacttgaggatttatttcacaaagtggctgcaaaaatgtatatgtagattcaaactttttttctttaaccacacattatttaaaaaataactttctaactatttttaaatttatatttagcattttttttaaaaaaataagtcgaattaaacacacactatagttttatatgcaattgataatgatatattaccctatagaaaacgtatccgttatattatattgtactcaagttatgtggaccacaatataatatatatcgaattaataaacattaagttgaagacaagctcagcgacctatcttcagtcaatcattgaaatttcttatcatcaaagaattgtagtaaagcatatacaaaaataagaagacatgtgtatgttattaagtgtttaaaaattaccgaaattgttttatgattcaaaaagggaagacatgaaaacaagttcatgctctctgcatgagacctctaaactaaatcgtctttcttttgcaatattattggaaacanaacaaaacataaatgtgctgtccatttctaatcaaattgatatacctctcaatttctccctatcttnttttgttcttttcaaagtataatttaacaaatt

SEQ ID NO: 38537 - DNA, 4479 bp, Arabidopsis thaliana landsberg
ggctcgagtgattgtctactgcttcctctatagctgctttgatagagtaactggtcgagtagctgctctgctgcttcccttctggtaatgatagagtagtgggttgagtaaactgctttgacacctgaaaacacaccaaaacatgcaataagtatgcagactgatctcgtgatttcttgtagcgcaagatcgttggaaccatcatcaacgctgaaatggaagtgatggtgatggcgctgaaggaaccctttggtgtgaccaagaacaacactgtgttggtaggtgacaagtctaactcttatgctgttttcttcttgctgtgccacctctagagctacaaggcatgtgatatgtctattatttgcatattttcagtgttcattcatcatcgtttcgagtccagtttcgtattattcatcactattttatatctttctcatcattcttgcatactttgcatgattaggatagctttgcatacatattgcatttctgagttgttttcaggtgatttggagctgtttgcgagcaaattggaagaaacgagctagaaccagaagatatactcgaccaccaggtcgtgtgcatccatcgccatactcgaccccctggtcgagtgactttggagccattcttcacagctactcgacccccaggtcgagtatcctcagctcaggccactcgatgacgccactcgaccccctggtcgagtatcactttgctacaccacctgaccacactcggccgttcactctaccacgttactctaccccctggtcgagtatcatcactcaccaccaacaccatcactcgaccggacactcgatcacatcttcatggtctactcaaatccgcactcaacgagacaagctgagcacaaggaagagaagacgaagtgtttgggagcggcctggacctccatcggatcacgaagcccatctcggcccattatcactctatgggccgggcgattaggttattggcccatcactactatcattttatttcgttttgtataaatagatgtcttagggttctgtcttgagacatccagttgacattgagttattgcttcagttttattttctgttttacactgttgcgccgcttttgcttctgcaacctgtaattcgagatttttccaagttattcagattccgcatttgatttcatctttcatcttgtttctctactctttatctctttacttatacaatattatcatttatctgcgtttatgtctttgagcatgttgtctgagtagtgacttagaattcttaaggatgagatagagtagttgtggaatccgtagtctgtagaatgattaagttttataattgattgaatcccttcagtattagttgtgtttactgcttatttctttctgatcaactggaattcgatcccaagcattcccgcacccagaaggtgtttgatggaatgcttgatccactagttcctgagatatgcgtctctatcccaagggattggccgtttagagcgtttattgactttatcagtctgttcttattgcctgcatagttagattccgttaatgggaattagtctgggctatcttatttctctgttttatcgttatcgcttaatcgttctcattgcctgtttcttagtttttacaatcactggaccatcttactcgaccacacccagtgtcttgcaacagactgtgcagtcgagtaagattgtcttgtttcctgtctgttactcgaccagtatactcgaccacacccagtgtctggcaacacactgtgtagtcgagtatagctgtttcatatcctgtctgttactcgaccactcactcaacatcacccaggctctgcaacgagctatgttggtcgggtgttttactgtttctgtttgactttctgttttctgtgataataggtttttagtcaattatcctaaagcaccaatcatgtcattgtaatactgaaggttgtcaatccaaatgggtgttatgctaataatcaagatgcaatcagagttcacagagtcaagccaatcaataacaggttttggtgtgttctagcagttctaggtgaacatgcaggaaacagaaattcaagcagaaacaataaaacactcgaccaacacaacttcggctataccatcaaatcttggagaaacaatacgaaccttggttagtgttttggagtcaaatatgactcgttgtcatgtgtatgattgagtataagaactagaatctcgaacggaacccaaaagctaaagtagtgtttccttgttagaaaaaacaaagccaaagactcatacaaacttcggctaatccctcaaagctttatgaagcaataagaagcttggttagtgttttagattcaaacatgactgatgagaacatgaccaatgcaaccaaaccacttgaaccacaagaagacaaggagcagcttgaagccgaggagcagcttgtaccggaggaagcattaatcgttccggcgggtcctctaacaagatcaaaatccaagaagttcaaccaagctatcaatggactactcaaggagctaaagaagaatcaagaagacgtggctcaatcctcattcatagtgatcacggctcaagaggctcggtaaagggttaagtgttgcttatgcactctttttcccttgtcaagttttgtcccaatgggttttcttgacaaggtttttaatgaggcctaagtaacactttcaagcctccctttatcagcccaattcgtggtccaaggcccactcacaatgccttggcccattctctcttttctattcaaactttgcatttattgcttttgttatttccaaaactctttgcatgagcttgcatgagtgtggacttgtgcatgctcttgcatgtctttcttctctcacctcttccccttctccctcctctcctatataaactcattgtatttctcatttgcaatcatcaaacattttaatcaaaaaccttctcttttacttgtttgatccgaaaagtgtgtaatatcttttcaacttgttttcttcttagtgtgtaatatctaagttggatccaagctagtagtctaagagtctttcatcactcttggaagtacaattcgttcccctttcattccgctgcatccactcgatcttgtcatcatcccggtttatcgtctttccgccgctttgtttcaaatcaatccattattcatcatcaagtacatcatttccaattcaaaaccaacaaagtgagtccttggagcatacatccacgtccaggagtgtatcatgtggtatcagagccaccttgttatcaggttttgaagttccaaccctaaaattttgttttctttttttcagatctccgttcaatcttgcgtgaattttacaaaatatttggctggttcaaaaattgtgaaaccaattgaattcgaaccatttacgagtctagtatttttagaaattaagttcggaatttttggagtcgttttgtccgtttttatttgcctgttttacttgttaaatttttaatttttcaggtacaatggtgacaagtgaagaagatgaagcgtcatctgcctctagtttggaaaggaggattttgaaaacagtcacatcagctatggcaacattaatcgatgaaaagcttggtgctctaaacttatatcaagtcaacccggacacaaatccacgtctaagacaagaagaaccaagggaagatgaagaggcaagaaattactatagtcacgcctcctctcacagtagccaacgtaggcatcgacgagagagaccaccacctaaagatcccttgggaggcctaaaactcaaaattcccgcattccatggaaccaacaatccggatacttacttggaatgggagcagaaaattgagttagtctttctttgtcaagaatttcttcagtccaacaaggttaaaattgcggctactgagttctatgactatgccttaagttggtgggatcaacttgttactagccgaagacgtacccgagactatccgatcaaaacatggaaccagctgaaaaccgtcatgcgaaagagatttgtgccgagttactatcatcgtgaactacatcagcggttgagaaatttggttcaaggaagcaaaaccgttgaagaatactttcaggaaatggaaacccttatgttaagagctgatcttcaagaagatggagaagcggtcatgtcccgattcatgggaggtcttaaccgagaaatccaagaccgtctagaaactcaacactatgtggagcttgaggagatgcttcacaaagcggtcatgttcgaacagcaaatcaagagaaagaacgcccgatcaagtcacaccaagaccaactacagctcaggaaagccaagttatcaaaaggaagagaagtttggttatcaaaacaattacaagccgttagtcaaaaaaaaaccggtcgatttagatccaaaaggaaagggtaaggaagtaatcacgagggctagagatatacgatgcttt

SEQ ID NO: 38538 - DNA, 329 bp, Arabidopsis thaliana landsberg
tacgagaaattctagagaatgtgctcgaccctggaagggaacatctttcttgaccgataaggagaaaaaaaaaataggaccaaaagaaaatgctattttggagttaatcaacaattttcttgtgtaggtggggatcctatattttctgaatccttatgtaaggaattacaaaaaaaattctttcaccaaaggtgtgaattaggaagggctggtcccatttataataagtggaggtgagtcttaatatacctcagaacaatatatttttgttaccacgagatgtgttagcagctgccgatcatttggattgggatgaaatttggaatggg

SEQ ID NO: 38539 - DNA, 3717 bp, Arabidopsis thaliana landsberg
aacatctttggactgataatccgtggtatttgttctcagacactgactgtactgatactgaaatccacaaagtaaagatattttcagtccctcaaattcaatgctgatgaataatgtcaggagataccaaaatgcataataataaaaaaaaacagaacctgatgagctcttagcaataatctgaggagactgagttgatctgggaagtaagatagaaggagaaacacctgcagaggttctggtaacaaaacctacaaaacccattatcaagaaaaacaatcataaaaccaaattataaagaataacagaccaagataatgacaatttcatagacacgagctctgtaatgaaaagaaacaaaaaaaaaaaaacaattaggaaagttctctactgcgacggaagacaaaacccagatatcagtttcatcaattagacaaaggctagagctaattttacaggttgagatagattctgctaaaagggagaaaacacttacgtgtagaaacgaaaatagaagaaggatgcgaaagcaaaattggtctaagaggaaaatcgaagaggtttactctggagaaattcatcagagagtatgaggagggagagtttcagggagaagaagaagacacactagctagccttcaagcgtttttttatccacttcgtttggtttgaaagatttttaatcaaaaaaaaattaattgcctattaataagttaatgaattcgttaaataccttcattagtggttagagattgttttttctcccattggaggagactcgagagaccccttcttcgatttttaataaaaccaaagaatttaataaggaagatgaaaacgagagaataaaagtgaatgagcaaacttcttcttcttgaaaaatgaagtaccattggagatggtcttacactacaattgagaacatgagggatatatatatggaagttaatgaattaactatacaagacttggtgacaaagttttatgatagcttggagcttaagttggataatagttttatggataattatccaatttcaacacaattttgttttttgagcaactctctaggttacacccatagttcacaatacatgactatatatatgagagattactagctagataacctaattacatgagtttggatggacttctttaaagataatagcttgggctttatgtgtactctaataatatatataccggactaatcccacctgatagccgatttcatcctgttccttttaagaaaactttcttttttgaagttacaatcagctaaatcatcgactaggaaagcttcgtggatcatcagagacttgaagacctactttttatgccctatgtgactcaaacacgttttccctttttattttctgaattcttttttactttccaaccaaatccttagtaataaccaaagtaaaagagaagtaattgattgacaaaaaaaaagagaagtaataatttaccgactaataatttgccctatttgactcaataatttactgactcaaaaacgttttgccgccctatgtgactaataatatacggactcaaaaaccaaagtaaaagagaaatccaccataccggtgtaccaaaactacgacgttacattggctatttttcaaaagatatatttacgtgtgcatatataaatcgtattgacgtatgaatgagttagaaagacaagtgtcaaatggcacacacaacgtaacagaactataaatgttaaagacaaatcaatgcccaagtctcgcaactactttctttcaatgtccctctttgctatttgcaaagtgtttttacatttttcaggccaacagagacaaatcaatgtgttgtgcgttatcagagagacatataatgatagatacataaacgtatcgttatataaaaacatttgagtccacctaatctatcacatttattacaatccccaaaatgtttgtctattctaattctatataaacacccttgcatgcaaaaactacatacacactcatgctactcacacaagcatcaaaagcagaaacaaatatatacatcaccataatcatcatcatcattagaaccttcatctttttgagcaacaaagttatgggtttctcgggaatttggttaaatctttatgtggtgtttggatctttaatggtttttgagagactggcggagacgaaggcacacccgccgcatccagcacttcttacacaaggggagccccatggaaggatcttaattcatggggaatctatctcttgaaagtttacaatcttctctactttcaaggcataccacatgaagtcagcttcaagaaatggcagacccagtagacttttgaacagacagattcaggttagaacttgcttctctcttagggcacaatatgacaaattgtacacaagaagaatagatgtgcaacagaaaaaataactcctcaaatattcagaaatagaagtttcaccgagtatctttcgacataaatctcaattcaaatgggcataacaataaaacatactgaaactttgagactaaagtagagagatggatgatcaggagatgagagagatgccagagaccaagagattgtcagcgagaatcttgttagcagcttccgttggatgaaatccgtcccaaaagacatactcagttgcattgttacatgttcctactgattttgggttgcacagtattgatgtctctagtaaccctgttccacaacaagctcttcttgcctctgcaaatcctgaaagttaaatacacacttattagtaggatgttagtaagaattgttttatatgctttgacatgtatgtataaataccaaattctgatggcctggtggcaagatcatagagaggctgatagatatcaaagacgactaaattgagtccaatgaggtttctcttgagatcctgtgacgtcgtattgagtttgttgttgaaggagattgcgtcgttgttaagcttctccgagcatccaccctcatgtggacccactacagttatggccgccggtaaacaaccgaggggcggaagtgtagtcactccgatccttcttgctcctaacgaatataaattctacagaatccccaaaacaaaacaaaaacagaacaaaattacactttaactatctcaacaatattaccattcccgccaccataatttgatcaacattttgactgtcttattccgattacaccatctaagtttatgatattgctcaaatcattctatcggatttctcatttaagcattatttaaacaaacaaacgaaaaatggagaaaaaataacctgaataaaactggagtaggagaggataaggagatcagagaactcatcaggtgattggtctctgtagaggagagggttgatatagtagttttgtatgaagtcgctgctccctgcgctgacgatatagatgccattggagattatggcactggcgtttgaattgttgtttgaggttgcgatttcttggattcgactaatgtagtctttgtaatgttctagctgttgcggcaacgatattgcactcttcataaccaacaatgaaaataagtaagaagacgtttttatctactaaagtttaattttgctgttagaggacgaaataagagctatggtactaacgtagagcttggctgtgccatcgtaataaccagaggctgcagaggcgaaattagctccaatcaaaaggttcttgccttttgc

SEQ ID NO: 38540 - DNA, 12146 bp, Arabidopsis thaliana landsberg
  unsure (1)..(12146): unsure at all n locations
tcctcttctgagctattatagtttcattatcccgtttcatgtactagctattttcattttggtttgcagtaataagtgatacagcgatctttgtctgcagggttggaacaaaaagtgagtatctctctctgctctcatgtcgattctggtttatgtagcaaaatcattagattgggacccatgacatgattgtcttgccaacagttgggatgaatgggttagtgcggatagattgttgaaacataccgaggagaatcttgtcaaacagaaagctctagacaaaaagcaaggagttgaaaaaggtaccaagtctggccgttccgctcagacaaaaactagaagctctgcaggtgagttgttgcctccacattgaccatgctgagagtacatgatacatattttggtcatccaggctaagaaactaactatttctttctgatcttgcacttgcagacacaaaggctgataaagatgacaccaagaccaatggtaggcaacatattaatttacgctccctttgtagttcagggttctcccaacaatttccaaggaaatgatttggtagactgggtgcaacttaaattatttaagctggtgtatagatgattacattttctgttgcagctgcaaaagggaagaaacgaaagcacgagtcaggcaatgaggtcaggcttgcaaaaacttagagatgtatttggttcatacctgttaggtctttgttaagattatattttacagtacaatagatggctgatgtgttgttatgcatatacacacatacgaaaagggtcaatttttcaggtcttctaatatcgataaggtttttgttttcatttgtaatctatagaaggataatgtaacggcggagaagctaatgaagatccaaattcccgcatcacttaaaaagcaactcattgacgactgggagtatattgcgcagaaggacaaggtatcatcaattttctctattttgtgcacatacttttagcactattagaattgttattgaatcagctagacttgaaagttaagagacataagtgtgtatttgtagtcgaatgaattgtgtataccaaagtgaagggaaattgatgtttggtaatctgtcttcaaatgattatataggttgtgaaacttcctcgttcacctaacgtcgatgagatattgtccaagtaccttgaattcaaaaccaagaaggatggaatgtgagtcttttactcgaacacagagtttgatatatttgaatcttttccgaaatccaacgatacaaaattttgtgtttctgtttttgtgcagggtaactgattcggtcgctgaaatattgaaaggtataaggagttatttcgacaaggcattgccagtgatgctcctatataagaaagagaggcgacaataccaagaatcaatcgtggatgatacttcaccttcaactgtttatggcgccgagcatttgctccgtctctttggtaaaatctcattaagttcttatttggacagtaaaattcgatgttctgaaattttatttttgctttttaaaaaaatctgcagtcaagttgccagatcttttttcatatgtaaacatggaagaagaaacatggagtcgcatgcaacaaacattatcagacttcctcaagtatatatctaatctctctgtttcatcactaccattttgatttctcggttttaacggttaaattcacaatttctggaaaaaaatctttacaggtttattcagaagaatcagagcactttcttgctaccatcagcatatgattctgataaggtttcagatggtaaaggcaaaggaaaagacgactgacatctccaggaaaaaaatattgttgtaatttagaattccttcatttttctgatgaattcataattgtaagatttgcagctgaatatgaaatattttacaggcctttgaagttaactatttggttcatgtaaatttctttaagtggtcaataaaacatccggaacaatggaaccttggttggtagaaggcaacaaaaaaaatggaaaaaataaaaaagtgtatgagatgagattatttatgtggctaatgtcatcggaataattacattggttctccttctctgttattattctttcatctttttcaccaagacgaacgactcttacacgcagagttcgcgagatcagaatcaatggtggcatgaaaaacgacgcttgagctcaaattcgtcgaccatggaacctgcaactcttactcgttcttcctctcttactagattcccttatcgtcgtggtttatccactctccgactcgctcgagtcaactcgttctcaattcttccacctaaaactcttctccgtcaaaaaccgcttcgtatctctgcttcccttagtcttccaccacggtcgattcgtctacgtgctgtcgaagatcaccatcacgatcatcatcacgatgacgagcaagatcatcacaaccaccatcatcatcaccatcaacacggatgctgttctgtggaattgaaagcggagagtaagcctcagaaggtgttgttcggattcgctaaagctatcggatgggttagattggccaattacctcagagagcatcttcatctttgctgctccgccgctgcaatgttcctcgctgccgccgtctgtccttaccttgctcctgaaccttacattaagtctcttcagaacgcattcatgattgttggttttcctcttgttggagtaaggttttctatagccttctctataaagctccttgctagttttataatttagccagatgatttagtaatttagctttatggtcatcgatgttgttaggtttcagcatctctcgacgcacttatggatatagctggaggaaaagtgaacatccatgtcttgatggcacttgcggcttttgcatctgtgtttatgggaaatgctttggaaggaggattgcttctagctatgttcaatcttgctcatattggttagaatttgaccttaataaggattagggatatgtcattgttaatgtttatcatgacggagaggtttgagcttttgtcttgtcatttttctgcagctgaggagttctttactagtcgatcaatggtggatgtcaaagaattgaaagagagtaatccagattctgcattgttgatcgaagtacacaatggcaatgttccaaatatatctgatttgtcatacaaaagcgttcctgtgcacagcgtagaagttggatcctatgttttggttggaactggtgaggtctgtgaaacttttctatttgctttcattacttgaatntcttaaatatgtgaccctgtatgtcattagtttagttttagcagggttacaattgcagctgttaagtaatggaatttttttttccatttagattgtgcctgtagattgtgaagtctatcaaggtagtgctacaattacaattgagcacttgactggggaagtcaagccgttggaggcaaaagctggagatagagtgcctggtggtgcaagaaatttggatggcagaatgattgtaaaggtattttttatcctattctcattgctttggcttgtctctttatttgaaatcctcatgcttatctcaatccatggaatttctaaatcaggctacaaaggcatggaatgattcgacgcttaacaagattgtacagctgaccgaggaagcacattctaataaacccaaacttcagagatggctggatgagtttggcgagaattacagcaaggttgtcgttgttttgtcacttgcaattgccttcctaggtccatttttgttcaagtggccttttctcagcaccgcaggtaagatgtcaggatcaagttctcccttcttaacattaccataaatcattgttgatgtgacaaactattcttgttgtttaataagatatatcaccatttggacaattgataagagtggaaaattgattggcttactttcattgcttgttaatgatgcagcatgtagaggatctgtttacagagcattgggacttatggtggccgcatcaccatgtgctctggccgtagctccattggcttatgctactgctattagttcctgtgcaagaaaggtattgttcaagtactctatgtgatcactacttatttactgcaattatcaagtgtatgttagctttcttggcgttgtgatgttttgcagaattgcacttttgagcattggtttgtatatattctcttgtagcaaattaagctttataagctaaataatcttatgtgcatcaaatgtcaatggtgaggaatgaatggtgcatatgcaacaacatcgtcttatctatgaagaccaccatatttcaactaactatttgatatcattttccttttgtccaaatccagttgaaaacatggtttattttctttttcctttttttttgctatgtaaaggtagtatcttcacgtgtaagtgtgtaaccccaccgtgtgtaactattatagggaatattgctgaaaggtgcacaggttctagatgctcttgcgtcttgccatactattgcttttgacaaaactggtaccttaacaaccggcggccttacttgtaaagcaattgaacccatttatgggcaccaaggaggaactaattcaagtgtaataacttgctgcattccaaattgtgaaaaagaagctcttgcagttgcggctgccatggagaagggcaccacgcatcctattggaaggtattgcttgtttagcatcaattactagtataaaacttaattaccacaaactctaaaaccatgcaagttgtgacctatgtgcatcccatcatcacatagttagtactggggcgcgtctataactcatgggaaataagttatcttgttggatggtacattcatttcaggagatatgttgacgtaaagaattttagtcctacatctagaacttattcttatttctagttcattaccacaatcggatgaaaggaaggggaaaaagcaaatttgaacgctatgaagctctctatctctggtttttacactggtttattagtttaaatgatgcttggtctggtaagagattgagactgaagagtactataggtcttttctgctgtttctgacacatttcatcttgctgcacagctgttgtagatcacagtgtgggtaaggatcttccttctatttttgttgaaagcttcgaatattttcctggtagaggccttactgctactgtcaacggtgttaaggtgagactcagttatttactagattcttatatatatccatttatctaccagattttatagtgtatagctgtgggtgatgtgtgtacatctctggctttcattcttaatatatatgatgttgtctctcaccacattttttggttttgtaatagacagtagctgaagagagtagattacgaaaagcatcacttggttctatagagttcattacctcacttttcaaatctgaagatgaatctaaacagatcaaggatgctgtaaacgcgtctacgtacggaaaggacttcgttcatgctgctcttttctgttgatcaaagggtatactacgactacttctttagctggtctaaagaacctctttcctacttcacagtctgtgattttcatctctcatctgaccatttattagtccataaaaacctctgtaacactgaaatttatgagccttgcaactaaattttgtcaggtaacattgattcacctcgaagatcagcctcgtccaggggtgtcaggagttatagcagaacttaaaagctgggccagactccgagtaatgatgttaactggggaccatgattcaagtgcttggagagttgcaaacgcagtgggtattaccgaagtctactgcaacctaaagccagaggataagttaaatcatgtaaagaacattgctcgggaagcaggtgatcattcattactctcgccatagttcccaatcaaaaacatctatcaagagactgagaatttagagttgtgatttttgctaggtggaggtttaattatggtaggagaagggattaatgatgctccagctctagcagctgcaacagtggggattgttcttgctcaacgagcgagtgccactgcgattgccgttgctgacatcttactgcttcgagacaacatcaccggtgttccgttctgtgtcgctaaatcccgccagacaacatcattggtagataaaacataaaagtctttgttcttaaccagtttcagatgttagattgcctgatttaacaagaatgtatcatgttgcaggtcaagcaaaacgtagctcttgcattaacatcgatattcttggccgctcttccttcagttttagggtttgtcccattgtggttgacggtacgtaagctaatacccactacaagcttttgttatccatcatttacccgagagacaaaaccgctaacctgcatttttgtgatcataggtacttctacatgaaggcgggactcttctggtgtgtctaaactcagtacgtggtctaaacgatccatcatggtcgtggaaacaagacatagttcatctaatcaacaagttacgctcacaagaaccaaccagtagcagcagcaacagtttaagctctgcacattagggggtaacttgctgttctttgtctaattctgcaaaagcaagacactgtgtgaattgtatgatcgcttatgaaacatcaaaatcgtatatatgtttcgtttcgactggtttcttcaggtcatatattatgtcacgtgagattatatttactacttttagtttatgtttgtttcctcgtaacaaacccatagaataaaagtttgagaagtgtttttgacttttcttcttcaagtttgtgtaaattgttaataaatgatcttgctttgcttttaattgaatcacgaaagaagatcatatgatgatgataacaaaacattttttgatttcgcttcctcctttcgtcgtctctactactggctctatacatgaaaagcctgaaacttttattttcccgagaaacagagggaaaacttgttcttatcactctactccatcttcccaattccgatttggttcactataaactctctaaacccaacacgacggctgtttacactttgtggcatacacgaaccgccacctccgccgccagaactactaccaccgacgtttcctcgctgtaaatccgccatgtaactcctcacctccgtccttatcatctcctgaaccaccgtcatgaactcaccaccgaatccaccagatatccctttcgcttcttcttcttctacttccacttgctcttcctttctaaccggaaacagctccgccgtataaccaccgtccataaccgtattctggttaagttgaaccggctcgttgactcgaaccgtctcgtcagtccaaggaagagacaaactaagataagttggaggatcttcaccagacgatgacgctgtaacctcagatctaaccgttggtttaaacacgtgtgcaccaccactagattgctcgctgacgtcagatcccgatgggcttccgggactcatatacaacccagtcgagacaccaccaccaccactcgccgtacgtttcaacggttgctcttctcctaaattaccatcataccctccattaccaccaaaatcacaactttgcccttcgacgctgcattttcgcttcagcgtcgagttccaatgattcttgatagcgttatcggttcgtccattgagaagacgagagatcgtagcccacttgttaccaaaccgagcgtgagctcgaataatcgtctcgtcttcttcctgcgaaaaagcacggtgctctacctccggagatagctggttacaccaccggagacgacaagatttgccggaacgtccagggattgatttgctaatcaaagaccagttcctcggaccatgtttctgaacaagcctctgcaacagatcatcttcttctggactccatggacctttaacacgatccgccttgaaacagatcttttgtttgtttgttgtagagaagaagaagaagaagaaggtggaggaaactgaagagaggagaaaaaaggtatttataacagagagagagatagagaggaggatggataataaccggtaaccggtagagacggtggagaaagtcatgcaccgcttcttccacgcaagcggttttgaaagttttgggatacagctgtaggtgtacacgtgtcatgatctcggtgcgtctgtttattagtttatggagcgtgtgatacagtcgaaagagagaaaagggaagagaagtgaagacacgcgcgcgtgagaagagagtgggaaaagaagggaagttaaagcgacaaaatcacggaaacctacaaggaaagagctctgatattattcgcacaatctgaggtgaaaacttagaaagctgttttgaatgttttatttgaaaaataataataatatctgagacgataacggttaggtttggccgtttgggtaaagacagtttttttatgcagatttctgacttttttgactgcccatcaaaaaattaaatcaaagttatcctcaagcgaactctcttcttccgccaaaccaaatactcctatctcctcttctctcatacccaattccccaacattttcctctacaatagtctcatcaatggcttcgtcaataatcatctcttccatgaaaccctcgatctcttcctctccatccgcaaacatggtctctacctccatggtttcaccttccctttggttctcaaggcatgcaccagagcctcgagtcgcaagcttgggattgatcttcattcccttgtggtcaaatgtgggtttaatcacgatgtggccgctatgacgagcctgctctctatctactctggatccgggcgtttgaatgatgcccacaaactgttcgacgaaattcctgacagaagcgttgttacttggacggctttgtttagtgggtatactacttcaggaagacacagggaagccattgatttgtttaagaagatggtggagatgggtgtgaaacccgaatagctactttattgttcaggttttatctgcttgtgttcatgtaggggatctcgacagtggggagtggatagttaagtacatggaagagatggagatgcagaagaattcctttgtgcggacaacacttgtcaatctctatgccaagtgtgggaagatggagaaagcacgttctgttttcgactcgatggtggagaaagatatagttacttggagcactatgatacaagggtatgcatcgaacagcttcccaaaagaaggaatagagttatttctccagatgttgcaggaaaatctgaaaccggaccagttttctattgtcgggtttctttcgtcttgtgcaagcttaggagcccttgatctaggtgaatggggaattagtttaatagataggcatgagtttttgaccaatctgtttatggccaatgccctgatcgacatgtacgcgaaatgtggggctatggctcgaggttttgaagtatttaaagaaatgaaggagaaagatatagttatcatgaatgctgcaatttctggtctggccaagaatggccacgttaagctctcatttgcggtttttggacaaacagagaagttaggtatctcacctgatgggtccacgttccttggactgctctgtgggtgcggtcacgcaggcctaatccaagacgggcttcggtttttcaatgccataagctgtgtttatgctttgaaacgcacggttgagcactatggttgcatggtagatctttggggcagagcaggaatgttagatgacgcataccgtttgatctgcgatatgcccatgaggccaaacgcgatagtctggggagcgttactgagcggatgcagactggtcaaagatacgcagttagctgaaactgttctcaaagagctcatcgctttggagccatggaatgcaggaaactatgttcaattatccaacatatactctgttggtggcagatgggacgaagctgctgaagtaagggacatgatgaacaagaaaggtatgaagaagatcccgggatatagttggatcgagttggaagggaaggtccatgagtttctagcagatgataaatctcatcctctaagcgacaagatatatgcaaagctagaagatttgggtaatgaaatgaggcttatgggttttattccaacgacagaatttgttttcttcgatgttgaagaggaagaaaaagaaagggtcttggggtatcacagcgagaagcttgcggttgcgttagggctgatcagtacggatcatggccaagtgattcgggtggtgaagaatctaagggtatgtggaccttgtcatgaagtgatgaagttgatatcgaagatcacaagacgagagatcgttgttagagacaacaataggtttcattgttttacaaacggctcttgttcttgcaatgactactggtgagctcgctatggtaaaacaaactgatgtgaaaacgtaattgttttgtagctttgacatttttggaagaaataaacatatttttggtgttacatggtttttaagaaaagttggcagagacagaaatataccttttttgacatgtcacatgtctaaacatactagataaatagtacatattgatgaacaaaatcaaagtatgaattttaaacttgttgcatatagatttaagtccggtttgttgagtagtacataactcaatactacaagaagacatatcaaacaaatcaatgtccattggtccatctcaaacatgtatgatcaaaatgttgcaattatagtaacggcccaaaaagcccaagcaactctataaatagtagtaatattgccgccacaacaaaatatatccacaaatccctaaattacattccctggttgatcaacggcgattcaactccgtcaatgtcttacccggaaagaaagaggaagaggagtcggtggtcaaagccgcattcgacccaaaacccgtcaccgtcacttcccgatgatgtgctattgagcatcttcgcacgcgtctcaagattgtactatccgactctctcacacgtatccgagagctttcgatctctcctagcttcaccagagctttacaaagccaggtcactctcgggaaacaccgagatctgtctctacgtgtgcttacggtgctctactggttatcgctggtttagcctcagccgtaaacctgatcaaaccctaacctatgaggagaggaagtcaagtggttatgctttggctagagtcccaattcccggtggttctcctaatgtacgatcttcgagtctcgtggcggttggttctgatatctataacatttgcggatccatcaacaaagcgtcctcctcctctagcgtctcaattctggattgtcagtctcacacgtggcgggaggctccaagcttgccggtggagctaagttcaatttctgctagcgtccgtgatggaaaccaaggcggccatgggtattctgattcccggaaaaactcctttaaggtgtttgcttacaattccaaggaaggtagatgggatcacctagttggacttggggcgggtagttttatgcttccagattcttattgcgtgatagataacgtttcgtactctgtatccgatggaatgttcagatggtatgacactgaggtaagaaggtggaaagatttgaggggtttgtttcagctacctaagttctctgcgggtgcttgtgttatattggctgattatggtggaaagatggcggtcttgtgggatcaattgccttatcatcatggctttcataagacgattcagtgtgcggtgattgcgcttgaaaggcgcacaagttttgtatttcgggagaaaagttgtcaaatttgggggaaggttgagtgggttgatgatttacttacagtccctacatcgtatgatcttgtgaaggttcttgttgctactctttgatgaatgcgtcacaaagattgaagagagactttgcgtctcttgtttcacttctaatcatattatgtcactcgttatttgttaagcttattttctgaccaaaacgttgttttttttttccacaccaaaacgttgtttcaagcactttttgtgttgaaatgatggaagctaaaaaaatgcatatgaaatgtaagagtgttaaagagtgtttcatgaatctgttaagagtgctttct

SEQ ID NO: 38541 - DNA, 3483 bp, Arabidopsis thaliana landsberg
gagtttgcatacgttttgatctaactcggatgatgtactcgacgtgctagtcgagtaagagtacctgcaagacagaaacaagcaaatgaagaaacaagtgagtaaccagaaagaaagaaagaaacagaacttgatcttaataactcagaaatcctaaatgtaacaagaaaaacacccaaatggcaacggcgccaaattgatacaaaggttttcggtgtgtcaattccctaaatgcatcttatgtcattgcagcatttaaggtgtcaatccaaatgggtgtaattgctatcaatcaggatatgatcagagaatactaagtcaagccaagtgtgaataagtttggtgtgtttctactaaacctaagcaacaggttaacatgcaaatcaaataacaagaacagaaagtaaaccaagcactaggtaaagcactcggtcgagcaatcgagtaagcaggtcgagtacaatactaaaaacaccaattttgcacgaaacgaacagagtactaaaaacacgagttttgcacaaataaacgacacagagctcttaagaatgggataattggtcttagtggactcctcaatccattagctaactaacaaactcaatcaagctatccctagacaatagattcaaaaccaaatcaagccacttccgtgtgagtgattctcataactttagaacttcctaatctcaacttccgttgatgaaacataataaagcaggctttaaacaccaatctattaaagtcaataagcagtctaatcatccaattccttgggctagaatctacaaatctctgaaattagttggttcagacatttcatcaaacatcttttggatggagaaagtctgaaatcaattttcaattgatcagaaagaaaatagcattaagaactcctaaaacagaagggaatcatgcatataaacacttagctagctaaagaaaagaggaatccacctaaacctaacccatcctcaagaactctgaagaacactactcaagaacaatgaagaacatcatagaacaaaacccagaaaattcatgaaactcagaaatcattataaacttagcaaaagatagatctcaatgagataaacaagtttgcagaagaaatcaaatccaaattctcaacagaacaaccagaaaatgcaaaagaaaatcaaagaaccctaaaaaccagcggacaaaacgatgatcctctgggcaaaaacataagaggtctatttataggcaatcctaggttgccctaattgggaataagacaaaaaagataagtcggcgcaggagcgctcggccctaggccgagtagaaaagccgagtggcttggtcttggtcacacagctcggccctaggcgagtggcttggtcgagtggcttctcttcatccttaagtgcacaactcggcctccagccgagtgcctggtcgagtaggatccttgttcttcacgtgtgctccactcggcctccagcctagtacataggccgagtatacttcaaatccttccttaggtcccccgaactcgagtccgtccatcccttgtgctagaaacctccaagttgagtccaaaagtacctaattcacctgcgaaacacgccaaatgcaagtatggtatgcaatgcaatgcaaaatgtgcagaagaaggaaaagagactaagaatgcatgaaaaggggcatgaaactaagctaaatgcatgaacaacaagggcttaaaaagggtaaaatctagtgtgatcatggactttggctacaccatgaaagctttgagaagacagaagaaggttggttagtgttttggagtcgaatatgacttgatgtcatgtgtatgtgataacactagattttaacctttttaagcccttgtttttcatgcatttagcttagtttcaagtctctttttatgcattcttattctcttttccttcttttgcacattttgcgttgcattgcatagcatacttgcatttggagtgttttgcagatgaattaggtacctttggactcaacttggaggtttgtagcacaagggatggacagactcgagttcgggggacctaaggaaggatttgaagtatactcggcctatgtactcggctggaggccgagtggagcacacgtgaagaacaaggagcctactcgaccaaggcacttggctggaggccgagtggtgcacttaaggatgaagagaagccactcgcctagggccgagctgtgtgacaaagaccaagccactcggcttttctactcggcctagggctgagcgctcctgcgccgacttatctattttgtcttattcccaattagggcaacctaagattgcctataaatagacctcttatgtttttgcccaagatatcttagctttgtctactagatattagggttcttcgattttcttttgcattttctggttgttgtgttgagaatttggatttgatttcttctgcaaaattgtttatctcattgagatctatcttttggtaagtttataatgatttctgggttttatgaattttctgggttttattctatgatgttcttcattgttcttgagtagtgttcttcagagttcttgaggatgggttaggtttaggtggattcctcttttctttagctagctaagtttataaatgcttgattcccttctgttttaggagttcttaatgttattttctttctgatcaattgaaagttgatttcagacatttatccacccaaaaggtgtttgatgaattgtctaaaccaactaatttcagagatttgtatattctagcccaagacattggatgtttagactgcttattgactttaatagattggtgtttaaagcctgctttattatgtttcatcaatggaaattgagattaggaagttctaaagttatgagaatcattcgcacggaagtggattgatttggttttgaatctattgtctagggatagcttgattgagtttgttagttagctaatggattgatgagtccagtaagaccaattaccccattcttaagagctctgtttcgtttattgtgcaaaacttgtgtttttagtactctgttcgtctcgtgcaaaattggtgtttttagtattgtactcgacgtgtttagtttcatgttcgaccgagtgattgtctctgtgcttggtttgctttcctgttcttgcatttgacagttcctggtctttagtttcatctctactcttatcatttgagttctttacattctgcttagtctagtttcattcttgcatgatcacttaggttgttagataatcgaaatcatctagacttggcttgacttagtattctctgatcatatcctgattgatagcaattacacccatttggattgacaccttaaatgctgcaatgacataagatgcatttagggaattgacacaccgaaaacccttgtatcaataactcagccataacacgatttgtgggataataagtcagccacaacgttctaataactcatccatacat

SEQ ID NO: 38542 - DNA, 6623 bp, Arabidopsis thaliana landsberg
  unsure (1)..(6623): unsure at all n locations
catttaggagttcacttacttgaaaaagtgaagcaagtaagtctgtattgtaccaccatacctgttttcctgcatttgtttgcgacaacctaaaattttcctttgccttctagatttgattttgtgttcaaatgtttatgtagaatgcagaggagaaaactgtcgtgtcttattctccgatcctggtggcgagacttgagaatgttggtcttcattccatgttcactgaccagcaaaaatttaaccaattatgtatagaggtataatcttgtgaggtgcaatagattggcttggttttcagggttgcagaaataagacatgaattttgtctttggatactgcaggctctaaatgtggatcacaaatgggcaggggcaccctttgcagccatgcttcgtcagcatcaatcaagttcaagtgacgcaaatggttgtctattcaaatgtgtattcattctagtatcaagtggttccagcgtcacacaagtcaagcactcctcgatagttttgcaggtataggcggttactgtgtcactcttcttgaaattttccttacccttttctcttcacactgtctaaattagtgacgggaattttaatagccagagtcaacttctggctctttaagtattgattgtattgtcatatatgcctgctggatatgatattcttacgttttacattgcagccagtcaatttgaacctagacgaagagactttaatgagagttgtggcattttggagatcatctctcagtacaaacacgcaaagtagtcaatattattttgatcattttgaaatccacccaataaaggtttgctctaacagttgctctatttgcctcctttttcagtttctactctatgttgtgttttacattctacctctgtttctcttttccttttcaattagattactgctaattttgttcctgggagttcatattcgagctataactcagctcaagaaactctgaggtcattactgcatagtgtggttaaggtatgggcatcagaaatttcattttatcttcttaattttgctgttttgcgtatattcacatgcacatcatattatatgagctaatgcttgtctggtacttcgttttctgtaggttcctcatatcaaaaatatggttgtagagctaaatggtgtattggtcactcatgctttaataactgttcgcgaactacttctccaatgtgtaaaacattactcatggtatcatcttttgtttctatgctaaaagctccgaagttatctgccctctgtttttagatattattaacgtgcataagtgctccctaggtatgcaatgagagcaatctacatagcaaagggcagtccgttgcttcctccagctttcgcatccatgtttgatgatttttcatcgtcctctcttgatgccttttttgatccttctcgtggcttggtgaacgtccctggtttgacagtgggtaagcaatgaccattcgtggtatcattaccttaaattttggcttccatatgtattaaatctcaattaaggtggaaatataatttgcttctatctgttgtaggcaccttcaaactcctcagcaaacttattgacaacaaaggattgtcagggacaagacgttactttggtgatcttgggaaaactgtaagtatcatatagtatatggctgatgaattttctagctttttccattcaacctcttatgcaaataccatgttgcagctaagaacagcaggatccaatgtcgtctttgttgctctcactgaaatctccgattctgttctgaggggtgcagaaatgaaaggtgttgatggactggtgaggactcatctacttattatccggtaggttgaatttaattaccactatcgtctttcttataatctccctctcttctctcaggttagcggtttccaccatggaatccttaaactggcaatggaaccgtctgtgataggaacagctttgatggaaggtggccctgatagaacaattaagcttgatcgtaaccccggtattgatgaggtgatattttatgccttgtcttctactttcaatttaaatattttcatttttatagagtataaaagagaactgagaaaactctatgcgtagagctttttctaatgtccatctacgtgtatgctcaaattcactcctttgcagttatacatcgaaggataccttcaagctatgttggatacaatgtataggcaagagtatctcagagtcaaagtcattgacgatcaggtaaataatatttctcgaacttagttttgctttgccattccaataaaagaaaacgtaaaccgattcattatgtttccaagagatgattaataccaacatatttcccttactgaccgaacatatttcacttataggttttcctgaaaaacctcccaccaagcaattctctcatagatgagatgatagaccgtgttaaagattttctcgaaagcaggggtttactcaaaggagatccctcaagctctcgtcctcgtcgccgtctccatggagacaaggtttaattccaatcccttttctctgcataaacataaacaccctcagtcatgtgaatatctctctcaatatgatcacaggaatggaagatcggaccaacggtgttgacattgtgtgaacatctattcgtcagttttgcaattcgcatattgaaacagcacgccactaaggccattacaagtctaaggccaaagaaagaagaagcagaggccgagacaagtgacagtggttccaatactgcaatggtaccagtagttagtgacaataagaagaagaaaatgaagttcatgtggaaagctggtattgggaacttcgttgcttcaggtatcgtagcttacatcgacggacgtttgtgccgacaaattcctaatccaattgctcgccggattgtgagtgggtttttgttaagttttctcgataaaagcagtgaacaataatcacttcctctgtatatatattcttctataatagaaccattacataaaataaaagtaataaagctcctttacgtttgttttcctcttctctgcatcaatcacgattcatcaacataggactatgagaccgatttcgaagtcttctgcatccgaggtgtgatatatcggccaatatagttttaatggggttattaaacttgtcccccaagcaaagacatgtaatttgttgatcagaagttcagaacagttttgtaaacaagattctactcaacttggcgtgaccaataagaggaataaaaatggaatgagagacgttgaacattgatcatcaaaattatgagaaccaatcaactaaaattactcaagtgattcattacaaataccttaaagaaaagtaacgttttggactgaatacgtacattcagtcagaagcagccttgtctgcaaggaccatgtatcaacagcctcaagtcttgtgaatccaactcctcttggaatctttttagaatctgtaggagaaatttgagaacattcgccaatgatccgttgtctggacactcgtccgtcttcttttctgcgtaagatttcgactttgtattgtcatcaccatctctgaaaaactactcatacttggtgatctgcaacaagttgctcttgtcatgaggccaaacatcactagtatcatccacaattacgacactttgcttatcagccacaacaagctcaagtgtcttcttactaggactttctttactggttatgactcgatctccaaagtaaactttgtccggatcaatcaacttcaacacggtctgtgcgtaagtgaataaacccattgtgtaaacatgcatagtgaaatgctcgttggctcctaatagaaattcatgaagaaaaggtcgaagtttaatgatatactcattggaatggcctttgttgatttccataaatctaaccttgaatcgacttgttcgagtagatacttctcctttttagaaatttacgaaacaagagtcgaatggataagcgtgtggttccaaacaaggactaggtgaagcttcttctccgtcttcttccccttcttcttttcatcgagattcaagtgttgtaatctcttgacagatttatcaagtatttattataagaaaaaggaaatatatatgtggcgatctccaataaaccgacgtacattatattgatcaaaaataataataatcaaaattgtaatttccttttttccgaaatacaatcccatctcaaaatttggaaacatctctctctatataatagacgagtagtctcatcacccacattattcatcaatatccctctgttctctctcgagtttcttctagccctagtttcttaagtacgttttctctgcgttgtttttctctcaaacacacaatggatttttctgatgatctcccaccaccatgtgtgaacgatcatgtgaagagaagaagcaagaaaagaagaacgataagaacgaagcatcttgaagaactaattagcaccgccataagagccgctcatgttgcaagagacaaagggttttacatagtctctccggaagccatacaatgcgttgagatccttagacatatgcgaaccttacctctcaacgctcgtcttattagcaaaaccgacggtttacgcgttcttctctttctctctaagaacggtaaccctaaaatcaggtctgagtctaacgccgtcattgatcactggaaaagtatcctccaaagaaaagttcactaacggaagagaagagatcattcacgaggactacgtacgaaggtttacatcatcaatggacgagtatagactagagattcacgaggatttcatcatcaaccggagagtatagggttagggttttattttgtatttttgttttaattgtaagaaactaatatctttttgtttctaatttcgaagttttacatgtttctaataatcgaaagtagcgtaattgaaagcagagtactatatgtatcaaattgagaattatggggtaataaagagatgattgattaatacggggtcaaaaacataaaaagagtaaaacttgtcctggtttatctctcgtgcctcagttttttttttttttttttttgaatttgtataatttttttttgttttggttttatctccgacaaagaggcagtgagtaggggtagggctttccttttttcccgacgattcgttccctcgcgcttcgtcgtctgacatcagcgcacgttagccaccgtcgtcgatatcatacgcccaccaccgccgtaggtaattttgcgccccttcctacacgccgtttcgagctgatttaaaagcgaaaacgaaaccctaactcgtcgatttttccatcacttaagctctgcgtttgttcgacgctggttttatcaaggatcgaatctgagaattgattgtttaaaattggtgaatttgattcaggggagattcttggattgattttccaatttttgatcaattcgtcactctagtagatctgaggcaatactctgcgaacaaatttgactgggagaagaatcagatctaggtttaaggtttgatgcgttggggatgttcagtgaccggcggaagcgggaaatggctaatcatggagatggaaacaagttctgcgtctgtgaatctgaataagtcttatggatatcaatctcatcatcagtataatcaatctggaggttatgggcgcnctnaanntnataaaagaagaacttcaagaattgttgtaacgtgtcacacaagaaatgattgtgatgacagcgtaaccaaacaaaactgtgacggagatgatggatttctcggatctttcctaggtgaagttgtgagagagcgtgaatcactaccacgtccactccgttgtacggaagagcaagtcaaagatgtgaagatagtcatcaagatcctacctattttcatgtctaccattatgcttaactgttgtctagctcagctctcgacgttttccgttcaacaagcttccacaatgaacacaaagctcgggtcctttactgtcccacccgcggcattaccagtttttccagtggtcttcatgatgatcttagctccgacctataaccacctcctcctccctctagcgagaaaatcaacaaaaaccgaaaccggcataacccaccttcaacgcatcggaacagggctagtcctttccatagtcgcaatggcggtggcagccttagtggaaacaaaacgcaagcacgtcgttgttagttgctgctcaaacaacaactcatcttcttattcttcttcgccgcttcctataacgtttctttgggtggctattcaatatgtgtttctcggatcagccgatctattcactctagccggtatgatggagtttttcttcaccgaagctccttctaccatgcgttcccttgcaacctcgctctcatgggcgtctcttgcgatgggatattactttagctctgttctcgtctcggctgttaatttcgtaacaggcttaaaccatcacaatccatggcttttgggggagaatctaaatcagtaccatctcgagagattctactggctcatgtgtgtgcttagtgggattaatttcttgcattatctcttttgggctagtcggtatgtgtaccgggcgaaccaagggtaaatcctaagcacata

SEQ ID NO: 38543 - DNA, 7134 bp, Arabidopsis thaliana landsberg
  unsure (1)..(7134): unsure at all n locations
gtccggcgacgagtgcttcgtactcggccacattggtagcttcgaagtttaacctgaatgactgctcgaagggcatcacccgttggcgaagtgaggcggatgcctacacccgagccttgttttgatgacgagccgtctacatgtaggagccaagttgtgtcgagcgggtttttccgagcctccttggtgggtatctcgacgataaaatcagctaggacctgtgattttgcacatgttttgttccgatactcgatgtcgtactcgctgagctcgattgcccacttagccagacgtcctgattggcttggactgtgtaagatggcgcggagtggcatggatcccattactgcggacattacgactgctaaagcaagtttctccatttgcggatagcgagattccgcgccggtgaaagtctgcgagacgtagaaaatcggcttctgctcgcctctgtcttctaggactaacactccgctgactgcagtatctgatacggcaatatacaaatatagtggctctccgattacgggtttggcgaggatgggtggagttgctcggtacttcttgagttcctgaaaagcttcttcgcatcgggttgtccattcgaactttttgtttccccgaagcacatcgtaaaaggctaagcatttgtctgttgatcgagagatgaagcggttaagtgccgcaactcttccggttaggcgctgcacttctcgcttgttctgaggcgacgccattcccaacaatgcctcgatttgctttggattcgcctcgatgccgcggtgtgtgaccaagtacccgaggaactcgccggatcttactccaaagcgacactttgcaggattgagtttgacattgtagaggttgagctgcttgaaacattagcgtaaatgggatatgtgatctttttctgtcatggatttcaccaacatgtcctcgatgtaaacttccattgtcttcccgatctgtaatgcgaagattttgttgacgaacgttgataggttgccccggcgttcttgagtccgaagggcatcactcggtaacaaaaaatgccttgttctgtgtaaaaaatggttttttcttgaacttcggggttcatcatgatctggttgtaaccaccgaatcgtccatgaatgacaatagttagtttctagaagttgattctacgaggcggttgatgtgtgggaatgggaagctgtctttcgggcacgctttgttaaggtctgtgaaatctacgcagaccctctatttgccatttttcttttttactacgaccgggttcgcgatccaatcgggatattttgcctcggtgatggatccgatccttaataatttctctacctcagctttcacggcttctgctcgctcccgacccaattttctcctcttctgcttgatgggcttgaaagtcggatcgatgttgagctcgtgcgatacgatgtcaacacttactccgggcaaatcttctggggaccaagcgaatgtattgacgttttctttaaggaaagctgtgagttcagctgttagttcttctcccagatctccgccgatttctacgcatcgctcgggcttttcgtcgtcaaggcagattaagaataccggatcgggagttggtgttgcagattcccgagcctcctcgatccttagctgctataactgctcggagattgacttctcttcagctcggccaagcttggctttcttatgattcgcgtcagccgtcgactcattgacggggttcctgagcttgtgtgctgccatgaagcaaatgcgggcatttttctgatttccccagatggttttcacgccgtcgcttgtgggaaatttcaggcagagatgatatgtcgaggcgacagctcggaattgatttaaccatggggtgccgataatcgcgttgtacacggtcggctggtcggtaacagaaaaatcgacgatttttgttaccccttttgctcggactagcaatttgatggtcccgagagtcatagtggtttcatttgagaacccgagcacaggtcgtggagttggcacgatttgcgtcatgtcgatcttcatttctcgcagagttgtaaggaaaatgatgtctagtgtgcttcccgtgtcgactaggactcgttcgacgttgaaatcaccgatggtcagtgtaatgactaagggatcgttgtgcggacggtctaaatcgttggtatcgctttcgtgaaaggttacttcgtcatttggcccattaaatggccgcgcctagttatgattcgcgtcggcctttctttgataagccttgattgatgccgccgtgtcttgacagaaagccgaatcccctaaaattgtgaagatccttccccgagcagcttctggttcatcgtcgtctgcttcgcgattatcccggcttcttttaggtccttcggggttcgccgcgagggcggtctgctcgggattggccacagcattgacctgctcggttttacctttttctgcctctaaatctttgtgggatacataaaccgatgcttggtgcnttctttatctcattttcctaccttttacatatttaattctttcttacactctactatctttctctcnaatttcaccgatagccgaaagagccgccacatcgttgattccttctactttggctagggtggatcagaattttgcgaggaaatctcgaagtggctcattaggctgctgagatagtgaccatagatcggcgtctgatgtgccgggatcgattagcaccgaatattgctttaggaaaagagtcgatagctcctgaaaactatccacagaatttccttcgagtctcgagaaccagtccagggctggccctttcaagtgctcgacgaacaggtgacagagaccagcgtctctttcttctggtctgaatttggctcgggccacagagatgatgattgacttcaagtgtcctttcgggtcggaagatccgttgaagtattcgatccttagctttccgggatctgagattattgcgttggagatcctgtgtgtgaaagatgtgttgtgggactcttccagaatgccgtcaatgttcgaggccaaggagactgcgttatgcatttgggatcttacgagcttcatccgttttctgccttggctagggagagcttgatagcgcttatttcctgttctctggcgtactcctcagcccaccgaacgttctcttctgaatcttcatcgtccaagaccccgatctaatcgacctgggcaatttctgccaggggaagaggaagctgtgggttggtttcctcagcttggttcgtcgtgtttcggtcatgaagatgccgtgcgcggaagcgggtagttcttgatcgtccaccttcttctaggaccgaagggagcagtggcctcaagagcatctgtctggactgaagggatcgggttttcctctgcgtcaacagtgttagcggggatctgattgttgaccattgtggattgaatggttggttctgtgttctaggagtaagagaaatctcaaattcccctccttctagcgcctaatagtgatagtcaaaactcacacaatggaaattgtatttagggtttcttcaaagaatggatctttgtgagattctcaaagaacaacaaaattattgattaccgcggaccctgttcttgattttattattgagataatgataattttatcgtacaagtgtttagaaatatataaattaggtgttttgccttcaaagtcagagcgtttttgatagcctgaagttgggagcgtttttgtgtgtgtcccctttctttgttctttgcggcgctttatatagggctctggcaaaccgcctctcacggtattctcgggagatttctctttatctctaagtcggcgatggaggacctttcttaaatggagattttctttattcttcaggagcttcggaaaaacttccagatttgataatatcctcggaggttctttaatatcattcccggaaacccggaaatgatatcttgatccttcatcgggttttgtacaagtattctcctcgggtggatttaacaatcttgggctcgggtgtgttttgtggtataactgcgccttccaagccgagcccaagcgatccccaaggtgtactcaagcttggctcgagtgtgttttctggaacaacacccgagccgattatcgtttatccgaggtgtttcccttggtctcgaggtgttcccgcaccgggctcgggatgtgtttcctggagcccgagccagaatagtgacgaacttagctccccaagtgctgatggtatctgtacgattggctcggttacctggatgaaatccgaccccaacagtttgccccccagctcgttgtctttaaccagaaggatgacgagcttcatggataagatagccgagctggccgtccgtcttcctaacccgtgacttttggcgtttcagcttctcgaacggtcaaacttccattgcgtgtggtcgcctgctttcttgagaagcagaagcgtctcgcttattcccgagatttgcgcgggcgtgctgtatcctcccgagctcacgcgcctttgacgcgttttatcaacttctttggacccgacgcgcctttatatctctatatatattaagctcttcctctgaaatcgttcacttgaagtttccgaagaaaaatttgaggtttgctctctcttctctgatcttgatttccttataacgttctcttttttccggtagatctccgccgctctttagataattttttatttctccggttagaaaattctcatcttctgaccctcatttcgtcaaaaagttgcgagccaagcatgagttcttcgcattctaacgcctctctttcggcccctaccgattatctcgtcaattccaatgactcgaatcaccgagacgatctccccccaattcacaaacgaagaatggtctagactgcatatgagggctccgagactgactttgtgtcatctactaacgcttccgaggaggcggcgcctttttttgctcgggaggattctaccgctaatattgctcgggacttggacctgcctaaagatcctgagccgtctctcatccgcagaacctgcgctccagctgttaatgaggctggagcatcaaactggcaagatgcgctcgagctacttttcccccaagttaagatcgaggagcatctttactttggtcaggatgagacagaaaacatcgtgcaatcgctcgagcagatggactttgagaaagccgagaagaagaaaaagaagaataataaaaaggtggtgagaacaaatcctcatggctcgtctttatgcaccgagcggtcgctatcacacttaaaagctaggttcgaatttggcgacgaagttactctcgcgttccaagcccagatgagcgcgccgacagtcctccagaaggtttcttcactttgtacaagggattcttttatctttgctttctctggttgccgatcccgaggctagtcctagagtacgcgaccgcgtatcagatagccctctctcagataacggcccgatctttgaggcatctcattcggatattggtgcgtggctatgagaccaaaaccaaggtcacgcttgcacatctaaggaattatttagagatccggcaagtctcgaagtccatggcagacagatactacatctcttctgctaaaaacaggaacattatcgagggttacccgagcaaagatgatgcctacaccgactactttttctttgtggctttagaagatgttgttcttgatgatctcctcgggaaagttccgacaaaatggggacttttgggtagtttagatattatggtttatttattcgtgcccgaggtgattgatataattttttgcttatatactttactttatcgcagatcgcccaatttgattccttgagccatgtcccgaagatctcctctcgtatcaacaagggttatccgccggaagtgcactggacaaagcatttctctcgagagcaacttgacgaagcgcttcaattgtttcacggtgttccttgcccctccagcttagaattgtcaaatcatcaaacccaattttttgtcgacatgcagactagcaaatctaccataagggaggtttatgagaggaagaggcttgctaccgagaagaagcgtgcggccgagaagaagcgtctcgcggtagagaaaatcgctgctgagagtgcgaatgttggtcccaacgcgaccagggattgggaaggtgcccccaaggctgctgtgcctgccgcatctgagcacgctaaagctggtgacaccggcttgattttgagagatccgccggttggagaagctaggcaagcaatcatcgtgcttttgaccaacgacaaggcctcacgaacgcgtccgcaggttgacgactccgaggagaagaagaggaagttgaagaagaagaaagcagcgaagagggaggagaagcctcctattttcgaggataaggctgcttcggcgaatctccgcgggaaatgtgcgggtcgcctacttccgtctccaaacactctactggaatctagaaagtacgtcgagagggtgtagcattttgtaagggtaagcgtgttactcattttggttctttggcgtgttttccgagctgttatttaatgtcgatgcttgcctctatgttttaggacgttggttcaatgaatcggatggtcctgtcttatgatcggtcatgcgaaacaatctggaggtggttaataagttggctaaagatgaggcaagggcgaaagaggccgagcaagcgagagatgcggcgatctccgaggttgccatcaagagagaggcctttgtcaacaaggagaatgccatcaagatggccaagcgcaaccttaagatggactccgaggttgttcgttgcagacgactgtttgccgaggcgagaggacttagggaaagcgaagtggctcgggctacgcaaacggcgaggcgagaaacttcggaggccttcaccgccaggctcaagatggctgaggagaagatgtcgctcttcgaggatgctaacaaccaattcatgtatttgtcccaagcgtgggctaatgcacaattgatcaaggcgctggaagacggtggatctttggcgatcgagaaaaaacaagtcgaggactcgcccaaggatttcgccaatgccgaggt

SEQ ID NO: 38544 - DNA, 2936 bp, Arabidopsis thaliana landsberg
tttttcatatccaaaataaataattgactgaagcaaatttttttttataatttatttaataaagatactgtagcaaataaacaataagaaagcaagaaaaaaaaatatatttgtttggttttcatatttataaaaattaataacaaaacagaaaaatcgaaaaagacataggttgaaaagatacaacattggggataggagcttttgaagctctgataccaaactgatgcaagaattggagctaatccatcctttgatcacttgatgatcaagagttccaaacttgccacacggaaggtgggatgatgaaggtggtgatctgacacgttgtcgatcgcttttctcgtgtgggatcgattcaaggagaattgatggatagaagggtgattgactcgctcaatcagtggggtaatcgactcactcgatcaataaacaaatgaaggatgttgaatcactcaacaaacttaatccgcagaatcttgaagtacttagtgactcactcacaaaaaactacaaaacaatgacaaagactcaaactttcacaagtagaaaacgtttttgttactttaaaatgatcaagggtcctttacaatgaatgagaattcaacttatatagagctgagtacaatgttctaagacttcaaagaaagaaacaaaacattaaagaaaatattggacattaattgtagaatatgtcaaaataaggcaagtgaggtgtgccttgtatcttgtcaacttggggaagaagttgtgacgtcttggaaggttctggagggtctcaatattctcacataagcgcacaaacaaagaaggaaagagttgttggtaatcgatcttataagatcggcttgtggtttaagtttttatactcaatcatacacatgacatcaagtcatattcgactccaaaacactaaccaaccttctccttacttctcaaagctttcagggtgtaaacaaagtccgtatgagtctttggctttgtgtcttctaacaaaaatacaattcttacgcctttaagatccggttgtggtttaagttcttatactcaatcatacacatgacatcaattcatattcgactccaaaacactaaccaagcttcttctagcttctcaaagcttttatggtgtagccaaagtctgtatgattctttggctttgtatcttctaacaaggaaacactacttaggcttataagatcgggttgtggtttaagttcttatactcaatcatacacatgacatcaattcatattcgactccaaaacactaaccaaccttcttcttgcttctcaaagctttcatggtgtagccaaaatccgtatgagtcttttgctttgttgttctaacaagtatacaattcttatgcctttaagatccgcttgcggtttaagttcttatactcaatcatacacatgacatcaattcatattcgactccaaaacactaactgatgtaagaattggagctaatccatcctttgatcacttgatgatcaagagttccaaactagccacgcggaaggtgggatgatgaaggtggtgatctgacatgctggcgatcgcttctctcgtgtgggatcaattcaaggggaaatgatggatagaagggtgattgactaactcaatcagtggggtaatcgactcactcgatcaatgaacgaatgaaggatgttgaatcactcaacaaacttaatccgcagatcctgaagtacttagtgactcactcacaaagaactacagaacaaatgacaaagactcaaactttgacaagtagaaaacgtttctattacttttaaaatgatcaagggtgctttacaatgaatgagaaatcagcttatatagagccgaatacaacgttctaaggcatcaaagaaagaaacaaaacataaatgaaaatattggacattaattgtagaatatgtccgaataaggcaagtgagttgtgccttgtatcttgtcaacttggggaggaagttgtgacgtattggaaggttctggagggtctcaagattctcacataagcgcacaaacacagaaggaaagagttgttggtaatcgatctcctttggctccatatatggtaagtagtaactcagcgggttcttgtgtggtaagatgtaccaaagttcgtgtggtacaagtcttgtgtggtctagatgttctcctggtttccatatgtagctttgaggtgcgtccaagtgtagaataaggaagatttccttgtttggcttcatttcgtgcggtacttcagaaggtagttcagcaggtagtcagcaagtagttcagccggtctgttagcaagtacatcaaatatatgtacttgtgatatcttcgaatcatttgcttggtaaatgattccttgatgacttgatgttgcctcgttaaagacctttctaggtaaacccattgggacaaaccctagataagggaaaaagagtgcaacggtcatatccccacaatatggtgactcggctcgctggtctttgacccttcttgaatcatcattagtcttcttatgattaatttgcttgtgaataattaaccctaggccttgtgcttgattgagactccaattgggcaagagtcctccaaaatgctcctcatcaatcggtttgataaatgtaccggctggtttggtatgctcccggtttggtttaatttggatgtccgcatcaagagcgtacttcagctgagataaaaacataccttatccacgactcacttcaataccgagaaaatacttcaatttccccaagtctttcatggagaaacaacgcccaagatactcctagaatttatgaagcatgtacccatcattaccgtaccggagatcaaaatgtcatcgacatagatcaacacgcgaagttcaatgccattacgtgcatatgaaaagagcgagtaatcttcatacgattgaacaaatccaaaacgcaaa

SEQ ID NO: 38545 - DNA, 5210 bp, Arabidopsis thaliana landsberg
  unsure (1)..(5210): unsure at all n locations
gaccttgggcggctgggcaagcaggtaaacaggtgggaagctctcatcataccaaaaatgtgatgaccacatcaagacctttggagttgcttcatatggacctcttcggaccggtcgcctatctaagtataggaggaagtaagtatggtcttgttatagttgatgatttttcccgcttcacttgggtattctttttgcaggataaatctgaaacccaagggacccttaagcgcttcctaaggagagctcaaaatgagtttgagctcaaggtaaagaagataaggagcgacaatgggtccgagttcaagaaccttcaagtggaggagtaccttgaggaggaagggatcaagcacgagttatccgctccctacacaccacaacaaaatggtgtagtagagaggaagaataggatgctcatagacatggcaaggacaatgcttggagaattcaagacgcctgagcgattttggtcggaagccgtgaacacggcttgccacgccataaaccgggtctaccttcatcgcctcctcaagaagacttcatatgagcttctaaccggtaacaaacccaacgtttcatactttcgtgtatttgggagtaaatgttatattctagtgaagaaaggtaggaattccaaatttgctcccaaagttgtagaaggctttttgttcggttatgactcaaatacaaaggcgtatagagtcttcaacaaatcatcgggtttggttgaagtctcnnnnnnnnnnnnnnnnnnnnnnnnnnatggctctccaagagagcaagttgatcttgatgatgtagatgaagatgatgttccaacggccgcaatgcgcaccatggtgattggagatgtgcgaccacaagaacaacaagagcaagatcaaccttcttcctcaactttggtgcatcccccaactcaagatgatgaacatgttcatcaagaagaggcgtgtgatcaagggggagcacaagaagaacaaaatatggaggaagaagcaccacgggcccctccaaatcaagtccgagcgacgatccaacggaatcaccccgttcaccagattctgggtgacataagcaagggagtaactactcgctcaagattagctaacttttgtgagcattactcgtttgtctcttctattgagcctttcagggtagaagaggccttgcaggatccggactgggtgttggccatgcaggaagagctgaacaacctcaagaggaacaaagtttggagcctggtgccatgtccaaagcaaaatgttgtgggaaccaagtgggtgtcccgcaacaagcaagacgagcacgggtagtgacacgacacaaggctcgacttgtggcaaaaggttatgcccaactcgcaggtatggatttcgaggagacttttgctcctgtggctaggctagagtctattcgaatattgttagattatgccgctcaccactctttcaggttgtttcaaatggatgtgaagagtgctttcctcaacgggccaatcaaggaggaggtatacgtggaacaaccccctggctttgaggatgataggtaccccgaccatgtgttcaagctctctaaggcgctctatggacttaagcaagccctaagagcatggtatgaatgccttagagatttcttaattactaatgctttcaaggttgggaaagtcgatcccactcttttcactaagacttgtgatgatgatctttttgtgtgccaaatttatgtcgatgacataatatttggttcttctaatcaaaagtcttgtgaggagtttagcagggtgatgacacaaaagttcgagatgtcgatgatgggcgagttgacctacttccttgggttccaagtgaagcaactcaaggacgacaccttcctctcccaaacgaagtacacacaagatcttctcaagaggtttgggatgaaggatgctaagcccgcaaagacaccaatgnggactgacggacatctcgacctcaacaaaagaggtaagtctattgatcaaatggcgtaccggtctatgataggttcattacattatctttgtgctagtaggccgaacattatgcttagtgtatgcatatgtgctagatttaaatccgaccccaaggagtgtcannnnnnnnnnnnnnnnnnnnnnnttaggtatttagtttctacgccttgcttcgggatctggtaccaaaaggggtctacttttgacttaattggatactcaaactctgactatgccgggtgcaaggttgataggaagagtacatcagggacatgccaatttctaggaaggtccctggtgtcctggagttccaagaaacaaagatccattgccctatccatcgctgaggccgagtacattgccgcaggaaagtgttgcgtgcaactgctttggatgaggcaaacccttagggactttggctacaatctgagcaaagtcccactcctatgtgacaatgagagtgcaatccacttggcggataatcctgttgaacacagccgtactaagcacatagacatccgacatcacttcctgagagaccaccagcaaaggggagatatcgatattgcatatattaacaccaaggtattttttgccgatttttttaccaagcctcttgatgaacaaacctttaacaaacttaggcatgagctaaatattcttgattctcggaatttcttttgttaacttgcactcatagctcatttgtatacctttgatcatatctccttcatatgctatgactaatgtgttttcaagtctatttcaaaccaagtcataggtgtattgaaagggaattggagtnnnnnnnnnnnnnnnnnnnnnnnnnnnnnnnnctcatccttcgccgtcactccaagcaactctccattcttgggggagaaaagcatgagcatcaaagaaaaggactttgtctttggggggagagagtaaaagcccaaagcaaaaggaccggacttcgtctttggtataatcttaactcatttatttatgaccaaaggggaagatagtacttcgatgggctctaatgattccgtttttggcgattcatgccaaagggggagaaaatatgagcccaaagcaaaaggaccgcaccaccaccaatttcaaaaatttagtgctttccaagagtatttatcaactggtatcctattgtgttcaaaaggaggagaaaattagttttcaaaaatgtatatcaaaaccctcttgaacactaagaggtggatctcctttagggggagttttgttaagtcaaaggaaaagtatttgaaacagggggagaaaatttcaaatcttgaaaatgctttgcaaactcttattcatttacctttgactatttgcaaaagatctttgaaatggatttacaaaagggatttgcaaaaacaaaacatgtggtgcaaacgtggtccaaaatgttacataagaaaggatcattccatgcatatcttgtaaagaagttatattggctcaattccaagcaacctttacacttacattacgcaaactagttcaattatgcacttctatatttgctttggtttgtgttggcatcaatcaccaaaaagggggagattgaaagggaattaggcttacacctagtccctaattaattttggtggttgaattgaccaacacaaaattggactaactagtttgcccaagtgtatagattatacaggtgtaaaacgttcacactcagccaataaaaaaagatcaagttttggattcatcaaaggagcaaaggggcaaccgaaggcacccctggtctggcgcaccggactgtccggtgtgccacggacatgtccggtgcaccagggggactcagtttcaaactcgccaccttcgggaattccctagaggcgactcggctataattcaccggactgtccggtgtacacggacagtgtccggtgcgccaaaggaggtcggcctcaggaactcgcctgcttcgggaaactccaacggcccgtccgctgaaattcaccggactgtccggtgtgcaccggactgtccggtgcgactccggagcaacggtcatctccgcgcaacggctctctgccgcgcattcaatgcgagtctgcgcgcgcaggagtcagaatcgcccatgctggacaccggacagcaaacagtacctgtccggtgtgcaccagacaccaaggcggcccacaagtcggaagctccaacggtcagaatccaacggcagtgatgacgtggcaggggcaccggactgtccggtgcgccatcgaacagacagtctcccaacgaccacttttggtggttggggctataaataccccaaccaccccaccattcattgcatccaagttctctacttcccatctactacaagagctctagcattcaattctagacacaccaaagagatcaaatcctctccatattccacacaacgccctagtgattagagagagagatttgcttgtgttctttcgagctcttgcgtttggattgcttccttctttcttgattctttcttgtgatcaaacactcacttgtaattgaggcaagaggcaccaattgtgtggtggtcnnnnnnnnnnnnnnnnnnnnnnnntgattgagaagagaagctcacttggtctaagtgaccgtttgagagagggaaagggttgaaagagacccggtctttgtgaccacctcaacggggagtaggtttgcaagaaccgaacctcggtaaaacaaatcatcgtgtctcactctttatttgctcacgatttgttttgcgccctctctctcggactcgtttatatttctaatgctaacccggcttgtagttgtgcttaagtttgtaaatttcagattcgccctattcaccccccctctaggcgactttcacatatcttatgaaaatttatattggcttaattctaagtaacctttgcacttacattatgcaaactagttcaattatgcacttctatacttgctttggtttgtgttggcatcaatcaccaaaaagggcgagattgaaagggaattaggcttacacctatttcctaattgattttggtggttgaattgcccaacacaaataattggactaactagtttgctctagtctataagttctacaggtgccaaaggttcacaataagccaataaaaagaccaagaaaagagttcaaacaaagagagcagatggacaaccgaagtgctccctggtttggcgcaccggactgtcggtgtgccaccggacagtg

SEQ ID NO: 38546 - DNA, 572 bp, Arabidopsis thaliana landsberg
taaatattgaatctgattaataactagtaattttttttatttctgtttatgtttaaaaaaatttttcgaaaaatctcttcgtttttaaaatgatgacgtatcaaaaaatccagtaagactttaccatactcatcttacttagtattagatagattgaattttggttgaatttaattagatttctttttttatttttaaacaaggccgtgtgataaaaaaagtaaccaagattgagtggggatacaaaaaaaaaagaaagtattatgaactttttgattgtagctagtgaacgaggaaaattcatataaaaaaattacaactatgaaaattaatgaagaaaaaggtttattctaaattataaattaagtatctatctcgatatatcgatagatagtgattggctccattgaaataaaatgaaattttccgttttattctgaacgatccccaggacttatggtttatgatatggaaattttttttatgaaccgagcaattaaaagtaacctgttagaaataaagaatacaaaaaaaagtaaaaaaatttatccaattattttgattttaatgtg

SEQ ID NO: 38547 - DNA, 1901 bp, Arabidopsis thaliana landsberg
aaaaataaatccagttggtttcagactagggtcaacacaagagtcatcattctctttggtttgctgaaccacacaagttttctgacggttcataagcagataggtctatactaggtcgtattagatgttatgtccattttggacatcagactatcttgtgtatggagggttctgcaggtattgaaattcagaaaaaaatcgctctcatcccggtcatcacctatgtgggattactttaattattaagtgaagataaaccccgaagagtgcaacaagttacagatgaatgttcaaagtgaaatagattgtgtcgatacaaaactctacagggcaatgacaagaattaccaatctgtatggggatcctaaaaatcttgcaggattcatcgctggacaattaacaactcgcgtttcttttcggagagcaatgaaaaccgctattgaattggctgaacaggcgaatacaaaaggaattcaagtacaaattgcaggacgtatcgacggaaaagaaattgcacgtgttgaatggatcagagaaggcagagttcctttacaaacaattgaagctaaaattgattattgttcctatacagttcgaactatttatggggttttaggaataaaaatttggatattcgtagacgaagaataaaaaaactttctttatctttatattttatccgacgataaaaaaacgaaaattatataacacgatacagacagtaataaaaaattgcagtcttcttttttatgtttaaaaataaaataagcaattctataagattgaataaaaatttccatcaaaactcctttgatataattgctatgcttagtgtgtgactcgttggtttaggattagataaagataaaaaaaaaagaaaaaagaacttacctataacagaaactaataactatagcattaataaataacctaagcaactcattgcttcacattatctggataaaaaaatcagtcaagatatgatggattgatcatattattgtagcaactgaaaaaaaaaaagaataaagaactataattataagttatgaaaggtaatcgaaaagtatgcggattcagtggaaggatgaaagaaagagagaaaaaattgaatattaatgatatatgattccaatttggaaagtctatgaggtcactgtaagaaaagcaatgtaataaagcatcaatacagattcattcagaataattagataaatctgttccgaaaacaaaaaaaattaagagccttgagccaataaaaactaagaaaattgactcaaaaacaaaaacaaataaaaaaaatgaaattcccgatttcatataagagctccattgtagaattcgggcctaatgattaatcaagaagcgatgggaacgacggaacccatgaatatagaggattctattgaaaaataaatcttagtaattcattggacaggatggcggaataaaccagattattatctattcttatttttattcagagatctcctgggataaacaacaaacttaatatagatattgaaagagtaaatattcgccggcgaatactttttttttaataaaagtaataaaaaacaaaaattaaaaagataaaagaaaataaggatttgttagaatattctaacaaaaacgacattcgagatgatgatattacgttacgttatttttaaataaatagaattaatcttggattccatttcgaaaaagacatacacaaatttagaagagatcagatgaaattgaatatcatgattaatagaattaatcattaactatatcttaatacaagcttttttagtccttttattcgcgaggagctggatgagaagaaactctcacgttcagttctgtagtagagatggaatttttaatttagaaccatcaactataacccaaaa

SEQ ID NO: 38548 - DNA, 10667 bp, Arabidopsis thaliana landsberg
atgtgcttttgagctgtaactcattctcttgagaagtcgtgctctgtctgattttctagagtcctacctttttcagcaaattcttgttgttgaaaatagtgacttcaactataatgataagactctggcactgttggctcacactcttctatgtaggccgggcttggctggggcacagttgagagccaaaatttatgatggtttcgttagttttgttaccgagagagcaagaggtatatgtgctgaagctttgagtctcaaggagttgactgcttgtcttccttctgctttccatattgagattcttcttatggctttccatttatcaaatgaagctgagaaggcaaaattctcaaatctcattgcttcatgtctgcataaagttgataccccggcaggaatatgtgatggtcctcagctgtcctcttgggcaatgctgatatctaggttgttagtgctgttgcaccatatgttgttacatccaaacacatgcccaacatcattaatgctagatctaaggtctaaactgagggaagttcgtagctgtggtagtaatttacatgtaactgttggtgatcatttatcttcgtgggcgtctcttgtagcaaggggtataactgattcatgggctgaggatgagtcagtcagccatctaatgagtcaaatgattgacttttcccctcatcctcctacatttcagaatgatgtgtctactgccaaaaccttaaacttggattatggagatttatctgcgagtttgtgtcgggttttggggctgtggaaggggaaaaaggcaggaaaagtggaagacctgctagtggaaagatacattttcatgctttcttcagatattgctcgtattaactgtgcattggatagccagccttctttgcatgttaattaccagaatgtggacatatctaactctgtggatctcatcagcaccagtcatttgcttgtaggcgacatcaatgttgttggtagaaatatcgagttgagaaacattctgatcggtgttttaaatcagctccaggcagcacctgagcaggtggttgaggatttgggttgggattatattcgcgaaggagcttggctctctcttctgttgtactttcttgatggtggcgtctgggattattgcaacaaaaattcatgttcagaaatcgatcccttctggaaggagtgcacatctgttgacgccaagtatgttgctgcagcagaaggggtagtctcttacttgatgaagactggtgatattgcagaattgctgagaatgctttcatcattggttggcaaatatttacgagtgtataagaaagctttccttgcaactttcagcgattggaatcatcacggtcatagttcgccttgtctgctacttctcaagcatactcaatttggtaaaagtctccaaggtgaatatgcgaagattggtgacaattctctccatcttcaatgcatcttttatctgtcaaaactggattccctgggagatggaagaggttcgggtgttttatggaaagtgttttgggaatttatggtacatgggtttcccactagtcttcaaacttctagtgcgattcttctttcatgtattctaagcataagatgcattgtgctgacaataaatggcttactcaaactgggtaactctaaggagaagtttggggtagatactagtgtacttcatcagctacttgattctatcatgattattaagtttgaccaggtattcgaaagctttcatgggaaatgtgaggagatccatcaaaatatatgtgccgtgttgcagcttccagatttgactgagttgtttctgatgaaagacatggaggggtttgtaagagatatcagtgctgagcagatagatagaagccaagtgcttgaaggggtgatcaccaagattgtagatgttatggacagtctaagcaaggattcttcgaaatctgatattttcaaattttatcttggtgtagatgcagtctctgagcataccagggaattttatgagttgcaacgtggagatctgtctgtgtttattgactcattggactactgttccttggaaccagtaaacataaaagtacttaacttccttgttgaccttttgtctgtggctcaatcccctgatctccggagaagagtacaacaaaaatttattgacatggatttgatatctttgtctgggtggctggagagaagactgttgggttccttcgttgaagaaatagatgggaaaaagactgcaaaaggaaattctcttcctttcagagaggcagcaatgaattttattaattgtcttgtgtcatctactaacgacctacagaccagagagttacagaatcatttattcgaggccttgctgatctccctcgataccgcgtttctctcatttgatatccatatgtctatgtcatattttcattttgttcttcaacttgcaagggaagacaacctgatgaagatggttttaaagagaaccataatgctgatggagaagcttgctgccgaggagaagttgcttcctggtttgaagtttatttttggtgtgataggcaccttgttgagcaaccgttctccaagtcatggagagagtttgtgtggaaagtccttggcaagctataagaatactgcaacaggtcctttggtcccaaaactttcaggaacaacgaaaaaatctgatacattggctctccccgtggatcaggaaggaagctcaatatcacttgaatgcgatgtcacttctgttgatgaagatgaagatgatggaacatctgatggtgaagtggccagcttagacaaggaagatgaagaagatgccaacagtgagaggtaccttgcctcaaaagtctgcacttttacgtccagtggcagtaatttcatggaacaacactggtatttttgttacacttgtgaccttactgtgtccaaaggttgctgttctgtttgcgcgaaagtttgccaccggggtcaccgtgttgtctattcacgatcgagtcggtttttctgtgactgtggagctggaggtgttaggggaagcagctgccagtgcctgaagccacgcaaatataatggaaatggaagtgctccagctcgtggtacaaataatttccaatcgtttttacccttgtctgaggatgcagatcagcttggagaaagcgattcggatgtggaagaagatggtttcggggaggaaaatcacgttgtcttatatatgcctaaagaaactcaatataagatgtcactgctactcgaagagctcgggatagaggaccgagtactgcagcttttctcatctttacttccgtctatcactagcaaaagagactctggcctgtcgaaagagaagcaggtcaatctcgggaaagacaaagttctttcatttgacacggatcttttgcagctgaaaaaagcatataaaagtgggtcattggacttaaaaataaaggctgattatactaattcaaaggaccttaaatctcttttagccaatggttcccttgtcaagtctctcctcagtgttagtgttcggggtcgccttgcagttggagaaggtgataaagttgctatatttgatgttggacagctaataggacaagccacaattgcacccataaatgcagacaaggccaacgttaaaccactttcaaggaatattgttcgttttgagattgtgcatctttcattcaacccagttgtggagaattatcttgctgtcgcaggccttgaagattgccagatacttactttgaatcatcgaggtgaagtcatcgacaggcttgctgttgagcttgccctgcaaggtgcattcatcaggcgtatagactgggttcctggttcacaggttcagttaatggtcgttacgaacaaattcgtgaagatttatgatctatcccaggatagcatcagtccaacacagtacttcactttgccaaacgacatgattgtggatgctactctttttgttgcttctcgtgggagggttttccttcttgttctttcagaacaagggaatttgtataggttcgaactatcttggggcggcaatgcaggcgcaacaccgcttaaggaaatcgttcagattatgggaaaggatgttacgggaaagggttcatctgtctatttctctccaacatatcgactgcttttcatatcctatcatgatggaagttcttttatgggtcgactcagctcagatgcaacatccttaactgatacatctggcatgtttgaggaagaatcagattgtaaacaaagggtggctggattgcatcgttggaaagagttgttggctggcagtggattatttatttgcttctccagcgtgaagtcaaatgctgtcttagctgtgtccttgaggggcgatggggtatgtgcacagaatctccgtcatccgacaggatcatcttcccctatggttggaataaccgcatacaaacctttgtcaaaagacaatgttcactgtctagttctgcatgatgatggcagccttcagatttattctcatgttcgtagtggagttgatactgactcaaatttcacagctgaaaaagttaaaaagttgggttctaagatacttaacaacaaaacctatgctggtgcaaagccagagtttcccctggatttctttgagagggcattttgcattacagcagatgtgagacttggtagtgatgctattagaaatggtgattccgagggagcaaaacagagcttggcatctgaggatggctttattgagagccccagtcccgtgggcttcaaggtatggttggaattctgcagtaatttttcttgataagtttatctgcatactatgcttggttattagtttagtactctgaagagtattttgtccgcccaattatgagtatatgggttgcttgtctccagttatctaacctccttctctctttcagatatctgtctccaatccaaaccctgacattgttatggttggcatccggatgcatgtgggtactacatcagcaagctctataccttcagaagtgaccattttccagagatcgattaagatggatgagggcatgaggtgctggtatgacatcccatttactgtggctgagtcacttctagctgatgaagatgttgtaatctctgtggggccgactactagtgggactgcactgcccagaatagactcgcttgaagtatatggtcgagctaaagatgaatttggctggaaagaaaaaatggatgctgtgctagatatggaagctcgtgtgcttggtcatggtttgcttcttccaggctctagtaaaaagagagcgttggcacagtctgcttcaatggaagagcaagttatcgctgatggtcttaagctcctatcaatctattattcagtttgtaggccacggcaagaagtagtgcttagcgaactcaaatgcaaacagctactagagacgattttcgaaagtgatagggaaaccctattacaaacgacagcttgccgtgttttgcagtctgtctttccaagaaaggagatatactaccaggtaatgtttctaccaaattcagtcttgcatgttcagtagatatttccgggcgcagatattctttaaatttgtatgttgtctttggcattgattatatctgttgctataggtcaaagacaccatgcgactccttggagtggtcaaggtgacctccattctttcttcgaggttggggattttgggtactggaggttcgattgttgaagagttcaatgctcagatgcgggcggtgtctaaagtagctttgacccgtaaatcaaatttctccgtctttctggagatgaatggtatatgctgtttcagttattatctacagtgtgtctatttgcatgtgtagttcaaaattcaaacacaattttgtttattatccttgtattatgtaataggagcggctgtttgtcatacaaatataatcttcctttcatatagttttgtttatatgagatatgtttgttatgtaggctctgaagtggttgataatctgatgcaagtgctatggggaattttggagtcagagccactcgacacacctactatgaacaatgtcgtgatgtccaccgttgaactaatctatagctatgcagagtgtttggcatctcaaggaaaggatacaggggttcattctgtagctcctgcagttcagttactgaaagcacttatattgtttcccaatgagtctgtgcaaacatccagcaggtgtgttcttgtgtatgttttttatactctgctctcttagatatgtactagtcttctaactcagtttctttacagcctagctatatcatcaaggttacttcaggttcctttcccaaagcaaacaatgttgacaacagatgatttggttgacaatgttacaactccttcggtgcctatcagaacagctggtggaaatacacatgtcatgattgaggaggactctataacttcatctgttcaatactgctgtgatggctgctccaccgtccctatactgagaagaaggtggcactgcactgtttgtccagattttgatctatgtgaggcatgctatgaagtgttagatgcagatcgtctaccaccaccacacactcgagatcatcctatgacagcaattccaatagaagtggaatcacttggtgcagacaccaatgagattcagttctctgcggatgaagtaggtatttcaaatatgttgccggtggtaaccagtagcattccacaagcttcaactccctccatccatgtcttggaacctggtgaatctgctgagttctctgcctcactgaccgatcctatttctatctcagcgtcaaagcgtgccgtaaattctttgattctctctgagtttctccaagagttgagtggatggatggaaacagtatccggtgttcaagctattcctgtgatgcaattgttctacagattatcatctgccattggtggagcctttatggatagctcaaagcccgaagaaataagcttggataagttaattaaatggctttttggtgaaatcaatctcagcaagccgtttgctgcttcaactcgctcttccttaggggaaattgtgattcttgtgtttatgtttttcaccttgatgcttcggagttggcaccagcctggtagtgatggtagtagctccaaattaggtggaagtacagatgtacatgaccggaggattgtccagagctccactgtagtagctactcagtcttctttacatgttcaagagagagatgactttgcatctcagctagttcgtgcgtgcagttgcctcaggaaccaagagtttgttaattatctgatgaacatacttcaacagctagtgcatgtttttaagtcacgtgctgccaatgttgaagctcgtggatcaagctctggttctggttgtggagccatgctcccagtcacaagagatttacctgcgggtaactattctcccttcttttcggattcatatgcaaaagcccatagagcagatatttttgtggactatcacaggctgctacttgagaatgtgtttcgcttagtatataccttagttagacctgaaaaacaagagaaaatgggggaaaaggaaaaggtatacaggaatgcttcttctaaagatttaaagctggacggtttccaggatgttctatgcagctatataaataaccctcatacggcttttgttaggagatatgctagaaggctgtttttgcatctttgcggaagcaaaactcaatactacagtgtcagagattcatggcagttttccaatgaagtgaaaaacctatacaagcatgttgaaaagtctggtggttttgaaaacaatgtttcatatgaaagaagtgtaaagattgtgaagtcgctttctacaattgctgaagttgctgtggcaagacctcggaactggcagaagtactgtctcaggcatggagattttctgtccttcctactgaatggtgtattccattttgcggaagagtctgtaatccagacacttaaactcctcaatttggccttttatcaaggaaaagatgtgagcagctcagtgcagaaagctgaagcaactgaagtagtgacaggctcaaaccggtcaggatctcagtcagtggattcaaaaaagaagaaaaaaggtgaagatgggcatgattcgggtttggaaaaattatatgtggatatggaaggggtggtcgatatcttcagtgccaattgcggagatctcttgaggcagtttattgatttctttctgctggaatggaattcgagctctgttcgcactgaagcaaaatctgttatttatggcttgtggcatcatggaagacactcgttcaaagaaagtctgttagcagctcttttgcagaaggttagatccctgccagcatatggtcagaatattgttgagtacacagatcttgtctccttgttgcttgacaaggctccagaaaacaactcaaagcaagcaattaatgagcttgtggatcggtgcatgaaccctgatgtgatagggtgcttttttgagacgctgcattcccagaacgaactcattgccaatcatccaaactcccgtatatacagcactctgggtaatcttgttgaatttgatggttattatcttgagagcgaaccttgtgttgcctgcagttctcctgatgtgccatatagcaaaatgaagcttgaaagtttgaaatccgagacaaagtttactgataaccgcatcattgtgaaatgtactgggagttatacgatacagtctgtgacaatgaatgttcatgatgcacgaaagtcaaagtcggtgaaggtcctaaacttgtattacaacaatcgccctgtctcggatttatcagagcttaaaaacaactggtcactgtggaagcgtgccaaaagttgtcatctgtcttttaaccaaactgaaccgatgcggaatctcctattcctatcactgcttgtaacttgatgatcgcgttggattctttctgtgagaatcttcaggcgttatctcttgaaccattgcaatgtcctcgatgcagccgacctgtcactgataaacatggtatttgcagcaactgccatgagaatgcttatcagtgcaggcaatgctttaacattaattatgaaaatttggattcattcctttgcaacgagtgtggctacagcaagtatgggaggtttgagtttaacttcatggcaaaaccaagcttcatatttgataatatggaaaatgacgaagatatgaagaagggattggctgctatagagtctgagtctgaaaacgctcacaagagatatcagcaactactgggattcaagaagccgcttctgaagatagtttcaagcattggtgaaactgaaatggattcgcagcacaaggacactgtccagcaaatgatggcatctttacctggtccatcatgcaagataaaccgcaaaatcgcacttttgggcgtactgtatggtgagaagtgcaaagctgcttttgattctgtcagcaaaagtgtacaaacactgcaggggcttcgtagagttttgatgagctacctccatcagaaaaattcaaatttttcatcaggtgcctcaagatgtgtggtctcaaagaccccaaacaattgttatggttgtgcaactacatttgtcactcaatgtcttgagattcttcaagtgctgtcgaagcatccaagatctagaaaacaacttgttgcagctggtattttgtctgagttgtttgaaaacaatattcaccaaggtccgaaaacagcccgtgctcaagctagagcagctctttctactttctcggagggtgatctgagtgcagtgaatgagttaaacaatctggtacagaagaaaataatgtactgccttgaacaccatcgttccatggatattgcgctcgccactcgtgaggaaatgttgttgctttcagaagtttgctctctcactgatgaattctgggagtcaagactgcgccttgtttttcagctactattttcatccattaaattgggtgctaaacatcctgctatatcagagcacataattcttccttgccttaagattatttctgtggcatgtacacctccaaaaccagatacggcagagaaagagcaaacgatgggaaaatctgctcctgcagtgcaagaaaaggatgagaatgctgctggcgtcataaagtattcatcagaaagcgaagaaaataacctgaatgtatctcagaagacgcgagatattcagcttgtgagttatttggaatgggagaaaggggcatcatatctcgactttgtgaggaggcaatacaaagcctctcagtcaattagaggtgcgagccaaaagtctagaacccacagatcagatttcttggcacttaaatatacacttaggtggaagcgaccgactatcaagacatctaaaggtggcttacaggcatttgagctctggtcgatggtcacagagcttattcttagtgcatgttctcaatctatcaagacggagatgtgcacattgattagtttactcgctgcccaaagctcacctaggcgctacaggctgatcaatttgctgataggctcgctttccgctacacttgcagagggtgaaagtagcgcacaatactttgagctactctttaaaatgattgatacacatcatgcacgttctttcttaactgaccagtgttgtttgacaacaatctgt

SEQ ID NO: 38549 - DNA, 11414 bp, Arabidopsis thaliana landsberg
  unsure (1)..(11414): unsure at all n locations
tctgttgttttggtgttacatataaatcaatcggtctttcttataacaaaaattaggtatgtatttttggatggttcttctgatggtatccaaagctaagttgtttcttcgcaagaatattagttgattggaaaactttattctacctcctattacttgccagttcttagatttcagatgccactctttagctaccaggtgatgtcatataaacctgggtaaaattagctgcaagtagatcttgttgggagacctgacctgcattgacaatggttaagttctttgccttccccgatctctctagctttgcagattcttctgcaatcctcttccttttcttctttgaaacttgatcttcttaatcaatccgcaccagaacttgtagaataataatcggataactttttgtttggcaaccattcttgcattgaagaatgaagtaaccctttccctcaaatcaacgaccgatttcaatccgtgattccagacattttcttcaaccgtgagctctaagaccaatttctgcaagtttgagcttaagaatttatcgatgtgtatattaatttctggaaatattgttggtattaatatgttaccattaaatttgaaaggcatcattagatggatgtcatgtgagtgagtacttgaaattttgaaactatccgttacggacaataaatccttatttaaatgatttgttagtaaaaaactatgctacaaataaaatcaaaacttcacatacgatacaggaaataaatatattatttattttgtcaaaactcaaaaccaggacctaaagctgaaaaaaaaaagatccaacggtgcagaaagctgcgtagatattggagagccaaaagatggaatctaacggtggaaaaaatagcgtcaaacctaagccaaaacctcccaaaattctccttattaaaaccccatctctctccctagtccctctcgccgcatcgcttcttaaacctcgacgacatcaacgtctgacttcgcttctcctctcacatggtgaacattctcttctcttttcccgatttcttcgtcttgtagtatttagatctcacgagatcgcttaatttcgttgatgtttcttttttcggattttactgaattttgttgtgatatcttgttcaggctctacctaaccaacaaaccgtggattaccctagcttcaagctcgttatcgttggcgatggaggcacaggtacagtattcttcgccgtgttttttgacctattgatttttgtgatctctgaaatttgatcgtcttttcactgtccccatctgaaagcattctcgtttaagagacggatttgagattttgatgatgtgctgattagatttgtacgattggtttttgataatatcaatgtttgattggttttaaagagaaccttacagactaggccttcgttgagcagatctttgggatatcgattcttagatgatccggaatgttgttttcattggctcagttttagtatggttcaatgtgtttgattagttcttgctaaacctatgattgctcttggtgttttgtacagggaaaacgacctttgtgaagagacatcttactggggagtttgagaagaagtatgaacgtaagtatagcaaagatgcttgtgaatgcacaatttctgtgaacatcatctgatgttgagtcctaatcttgtttgttgcagctactattggtgtggaggttcatcctttggatttcttcacaaactgcggaaagatccgtttttactgctgggatactgctggacaagagaaatttggtggccttagggatggatactagtaagtatacatatctccattgatatgtttgtgtgtatactcaatctagagtgtgtatagtttggattagctctggttggtttgtgcgtaaaattggcaaccgatttgttacctggacggtgggaataggaatcgtatgttgttgaagtaatctgttaagatctcaatatctattaaagtttgcattgttttgattagcgctggttaggttgtgaaattcaagaaccatctcacatgtcatgtttgcaactattgttacctggacaataggaatagctgactgggacttgaatgataatggtttgtttgatattccatctggatatattgctaatcttcggttttcttgcagcatccatggtcaatgtgcgataattatgtttgatgtcacagcacggcacacatacatgaacattgatagatggtaccgtgatctccgcagggtgtgtgaaaacatcccgattgttctttgtgggaataatgatgatgtgaagaacaggcaagccatggccaagcaggtaacattccacagaaagaagaacctccagtattacgagatatctgccacgagcaactacaacttcgagaagccattcttgtaccttgctagaaagctcgccgggtaagaaacaattcatcaattcaaccctcattgtagttattgtgaaacaacggaaaaatgaaaattgagatgttgcttgtttgtctcagggacgctaatcttcactttgtggaatcacctgcccttgctcccccggaagttcaaatcgacttggctgctcagcagcagtaagttctctaaaactaattttgttttaatttgttgctaaggtttgagttcgaggcttttcttcaattaacgattatatatttgtaggcatgaggcggagcttgcagcagcagcaagtcagccacttcctgatgacgatgatgacaccttcgagtagagaaagagagatgtgatctgtcactgattacccgttagggcttgtctgaactttttttgttcatggtgctatttttatgtgtccgtactttgaaatgaatcgatgacattagtaattttcatttttaagtttttaactgtcgctatgaaagtgaaaaccttttgattacaaaccttacatgcttcacaatttcaattgtatctctattaatcctagccgcgcaatctcatcaattctccacacccaacacacttaatagtttttttttacatcaatcatttcgaaaccacaagttcttagatactcaacaacatttttttttttttttttctgtagccaatcgatgttctaaagatcaagaatgttgtattatttctaccacttatggagtcaccaaggatatgtgaagggttttctttgtttatatatttttttaattgcgttttaggacatctccaatagaagtatctaaatgtagatactgatctctatcaaaacagattatggatatcatactagagtacattaaaaatttgcttctaagattttgagttcttggagtcattaacgcatcgctaagggtattttcgtaactttaaataaccccaaataatattttgcttcctccccaagaacctttttgcctctttctacttccgtcggccggattcagagtcataaataaatatataaaaaaaagtttcgatttttgcttttcttcttcgattcattgcgcgaatcatccgtgatgttggtgtctagggttttatcaagagtttctcgcagcgcaggcttacgctcgtctctctcctccgtcgttgctccgaagaggaatcagattccgattgttgcaagccgatttcactccctcgttcacggaacccccaacaaggttaggcttttaagctgattttacttgtaattcgttctggattttatcgtcgggtttatgctagggtttaaggggtttgtctaaacaaaagattgttatgttctgattctattgctctggtcttctttattacagtgtcacgaatttaattgtgtatgtctgaatgttaatgttttgattgctctttcatatgtcttaatttggatgtgaaattctggcaatccttgtgaatttgaaagctgagataaagctcattctaggatttgtgtacagtgaatttacttaatttggatcattttttttaatggcagcttgttgcagttccagtgtcgctcctaaaccatggaactctagatttgaatgttcttcaaaggttcggctttttttcctcttcctcagctgaaccgaagggaaatgagagtaacaccgaagtaccaaagaccggcgaaacttctgagaatgtggaggtggggaaagctacaggtgaggcaaaagattcatgtattttgacttagaataaagagagattactgtgtctaatactgaacgagtttctttttctgagttccagatgcagagattgacttcgacgatttgtcaagagacgatttagtgaagcttgtgagtgagaaggaagatcttttgaaggttcagcagaaagacataatggaaatgaaagataaatttcttcgcacttatgctgagcagcagaatcttatggacaggactaaccgtaatgctgaaagcgccaaaaagttcgctgtacaggtttacttctctactccgcgaatcctttttcttctttcttgtattaactcgttttgctttgtgtataatccagtgctgaatatgttttgttgtgctgcagaactttgcaacgagccttttggatgtggcggataatcttgaaagagcttcttctgttgtcaaagagagtttttcgaagatcgacacttcaaaagatttggctggtgctactccactgttaaaaaacctattagaaggagtggagatgactgagaaacaattagctgaggtaaaaacgtccattatatatatcttttgaggtaaacaatgataataagactggtgctgagaatgcaattttgtatgtaaaactgcaggtgtttagaaaagctggtttggtgaaagaagatcctttaaatgaaccgtttaatccaaacagacataacgcagtgttccaagtcccagatgcttccaagccaaaaggcacaattgctcatgtcctaaaggtactaaactattcaaaggattgctctctttcttgctataacttttaagcctatgttaactcttagaaatccacacaatatcataggattctctgccatcattttataactgcttttttttcttccatatttgcaggctggatactccttgtacgatcgagttattaggccagcttgaggttggtgttacttgcgccgtggagaatcaagaagnnnnnnnnnnnnnnnnnnnnnnnnntacttaaaacatcgagagttaagcttttgtttttaacatcttcatgagttctttttttagttaatagttctctttctttgcatattcattggaggaacaagattcccataaggtagcatgacaatgctctgtacttccagggaagccctggttctgtaacttttacacaaattcataagccaaagccaaactcttggtaaaagcttcaaatcttacatttatataacttcttcctaacttacaaacacactacatagagaactagaagacatcaaagtgcaataaacgcctagaataagatacaatataagacttcatcatagctgaacactttttatagttgcttcatcccaaatcaatatgattctcttcattcttcagtcccttcagaattcagacacagtcccagattcaaattaccagtttctgcttcctgcagagtaagtatataaaacacaagtatgaacaaaaggcaacactttcattacattgctgaattttaaatgaagcttaccttagtttggtccgagtctgttaggttcatgtctagctcaacagctttaggtaatggagattcagtgtcgaattcttcagtctcttcaatttcagaatccttagaaatcactttttctctatgctcaagcatcgcaatctacacaaaatcaatcattttccactaatcccacacaactaaaaccctaatttaatgatttgggaaagaaaaaaaacttactggagcgtatctgaatcttcgcttaggcggctcctccgtctcaccggaaccattagcgtcggaggcagtaaccgtcgctgaggtaagtggagtccacttatggagaagtagatggtgtggtgagttactgttgttgctgttgttacgaccgttggatttagatgctctgaaaacaccgacggatgaggttgagacacgtacccacttcttcttccatttccttacacggccactgaacaccgccgtcgccgccggaccactgtatctcgatgacgtccggctcaatctcgatcctacaccttccattctcttctctctcttctcactagccgggaaaatagttgctttatctatcagctagaaaacgctgcgttttgatgtgatatagccacaaacgcggcgtattaatgtgatatggcttcaaaacgcggcgttttagtgagataattgttaattagttgaaacgtagcgttttaaagagagatttgttgattagtcgaaacgcagcgttttaaggagataactctgtttatctgaaagtagaagcaagaagaagtggcgcttcattcattagctctgttcagtataagcaagaagagagagcgaaaatggagctctgtgttatcagcacgacgacgacggtgaaagcaattaatccgtttcttccgtctattacacgtcgtgttagttcccgtctcttccaatctgatagtgtgctacagtttggtgggaggttgaagagaccaattagcagtcctttggagatgtcctgtgtatctagaaattttggatttctcggagattctatgtcacatggtggtgattttaggctattcgcggcggcttctccagcggttgaaactagtgtaaaggaagacaaacttccagctgatcttaaggtcaccgagactgtacaggcgaattcaagtgtaagtgatttcaattcttttgtctatttgttttaggagaatatgtgtggcattgtacttggtctgatttttaagatgacctgaaatttgatgttactgtttgatttaggtgaaattgagtgtggaagttccagcaattgtttgtgaagattgttaccaacgagtccttacagaattcatgaaactctcgaaggtaaactaatattcatcttacatgaagacgaaatgttgaaacttgatctatgtaatgcttgctgttgattgtgattttacttggtttgaatcaggtgcctggattccgtcctaaaacaagagttccagagaatattattgttggtttcgttgggaggcaatatgttctgagagcaactgttgaatctatcttaaagagaacacttcctcacgccatggaatcagtaagttttcaaatgtttatattagtttgtttatgtttttcaatcttccgcggtttaatataatgttttggccatttggcaagaacaagtcttgtggtgtatctaaattcggtgtttcttgtcttggaacattatgcatatgagattttggtttttgtaggtgactggaagggctttaaaagactcgatacaaatagtaagcagctttccagatatggagaaggcttattctaagctcaagactcttaggtttttgtttcatcatcacatatactaaaaatcttttggagtaatgatgctaactaacttaacatgttttttttttctgattttctcttgttccttagttatgaggtggttgttgatgttgtacctgaactaaaatggaatcctgaggatgggtataaaaatatgaaggtcgttgtagaactaggcgatgagatagatgcaaaaaaagcttgtgaaagacaactaagacagaaatataagtctcttggtgcgttgaagattgtaaccgagcgagggctacaggtaaaggaatgcataaactccccatgtccttgcattgttttctgaaactagtgtggttttctttcgtggttcatttgaaatcatttaaggttgctaattgctgagttaaaataggaccgaccttttacctcgttagtcgttacatttaagttcatccactatagcttattatagatttaagttttttttaaataatttggctatgaatctggcttcatttgttcgtagttaactctgcaaagatgatatagttgctagaattgcttttttattatgtcctaaaaccgtgtaggtgggagatctagcagttgttgatatttctgctacaactatagatgaggacgggtcaacgggtcaagcgattccagatgctgaaagcaaaggttttagaactgttatatttcaacagagatttgtggttgaaatctcttagtccattgaaatcattgcttgcaaatgaatactgagattggcggttgtgtgaacaggttttcactttgacactgaagaagggaatagattacttcctggattccttgatgcaatcataggaattcgagcaggcgaatcaaagtcattcacgcttgtgtttcctgaatcatggaaacaagaaagtctacgtggccaacgtgctcagttcactgtgagctcgacttcctatataccaaacatagaaaaagatgattacagagagatcatatttgggacagctaattgtgtatgttttcttaaggttgactgcaaggaacttttctacagagatttaccaacattagatgactcactcgctgataaattacttcctggatgcaccactttaaaggaggtaatgaacacatgaattttattttcaacaacttatacaatttctttttttgtcttatatcagtgtaattcgctaatgaaacaagtaaacaggttgaagaaactctggctaaaagatgtcaagagatggagcagcaagccaaggagcaagcgacagacaacgccattcttgagcagattcgaaaggtcatcatctaattccatatatcatttgaagcattaacatcgtttacctaacatcatttgcttcttttgttttagatggttgaagtagagattcctcgatctttatttgaggaacaaggaagacagttttatggagctaggcttctagagattcaggcaagtgttttcagtgactgttgttgatctcttactctcttttactgtcactcagattcttaaggttgaatatggtgctgcagggaaacatgaagcttaacgaagaccagttggcttctctttcaagtcaaaaagcagtaaatgagtttctagaaactcaaagagagagcatcaccaacataatcaagcagaatatagctgttggagatatcttcaagcgcgaaaacttagaggtatatttatatgcatgatactctgtctccaagaaagaaacaatacatttttagtaacaaaaacattgtcgaaatacttgaatgcagttctcaacagatgaactagttaaagaggtcgaaaactcgatctcagaattcaagaaacataaacaagagttcgacgaggagcgtgtgaaagatcaggttagttctcttgtgaatctaagcactatcagtttcttgagcctatataagataactgaaagagagaggttcttcttgaattggtggttggttaggtacaagagattttagaaggagcaaaagtgcttgaatggttaaaagaccgagccgagattcaatacatcactcgttgattagcatataggtaatgtatgtatgattggcatgttctgtttttgtatgagcaatttggttttgatgtacaattatgattgattttgtcacaagaagagaactttgactatatttgaattgataggtgcaataaattattaacagaaacgttgctttttattttgtaatttaggtcactttctgattctatagtcaatgtgttttattggatatagatggtatagatataagtatttacgtcgatttcatattgaatttgccaactaacattgagtcattttgactatgacttgttttttatttcgacaaaaaaaaaaaaagagtctcttcgtcttttctagtttggttctatatggactaatcttccctctgacctcatcacttttgctacttgtcttagctgtatttacgaactacttcctcatgatccatgttaaattatggaaaggtaaattaaatttcaccaatccgagtaggctagtacttgcaccattttcccaactaataataaacacagttcaatacaaaaaaaaaagtttctaaccaactagtgatagggtttattaataaggaatcaaatcggagatattgctaattagaaaacagaattttatacaagatcagcaattctccggagaacttttcatctattttgaatgcaagactataacgtcaaagatgtcaatgtttgttctgagtatttcaaactaacatttataattctattttactttgtcaactgtatttgatattaattcaaaattcttaaaaatgttttatcctcttgcatcatacttttaaaaaatatgaatttctactgatagcgataataaatatttacagtattgtaattggatactataaatgataaatgtagtgatctatatatggtccctaaaactggtaaacaactttggttgtacagtaaatgtttttgtagagctacacataacatttaccataagttaacttggttagagaaaaccaaaacctattgaagcatttatttacttccgagaatctagtggtgagttataacgatattattgcacggtaagaaaagaaaagaaaaaaaaagtaaataacttgtgtggtcaaacaagcaaagaattaagaaccaagtcaaggaagactggaagagtaaaaaaagacacaagtctggctgtgaacactgtcatgtttgtaaataaagcaggaaactaggggtgaacattttgctaattggagtttccatcgtacttcaaaaaaaaaaaacgattgggtcccacactcacctctccgtctcttccacctccatagatagatttttttccttaagcaaaaaaggttttatctcactctcaatagtgttagtattgttacagagagagcttcagatctagaagaagaagcagagttcgtaaagagaaacccattttaaaccctagaaatcaagtgtcaatctcggtaattaaagtttatgcctttttctttttactgttagatttgatcaattttgaggtctttagtctgttccttcaggttttgattgctttggttttatcaccaatgctgtccgattctcttgaagtttctgtttctttttgttcagagatctgcttattctttctgtgctttgcttctgcttgatcggaattttagattttgcattctgagcttgacttcgtttgctttctgtgtcatggtgaaaaaaggggttttgagcttcgtaagttcaagatttttgtttccgattcttaatgtttggtctgtggagtttaatctttggttagagtgattaagaggttttagattccgaaaaagattctaactttgattgagaatatctacagagtatcttttggtgtttgctattgttttgttcttagcttcgtaatcttagttcagtttcattataatctgatgcagaaga

SEQ ID NO: 38550 - DNA, 2388 bp, Arabidopsis thaliana landsberg
tcaattatcctaaaacatcaatcatatcgctgtagtattttaggttgtcaatccaaataggtgtgatgctaacaatcaagatgtgatcagaagtcactaggtcaagccaagcaataacaggttttggtgtgttctagcactcctgagtgaacatgcagaaaactgaaaatcaagcaaaaagagtaaaacactcaaccaacacagctcgttgcagacaatgggtgaggtcgagtgactggtcgagtaacaaacagtaaatgaaacaaagatactcgactgcccagtctgttgccaaacaactcggtggtcgagtatcacgtcgagtaacaagaaagaattgcaaaaactatgcaacagatgacaagatacagtaaacaacagtagagtaaacaataaattcaatcagataaagaattccgaggatgggataattgagtagtatcgtttccttagtttacaggtgattaacatgctcaataaattatccctagataacaagttctttaaccaaatctaagtgccaccgcaacagagactctcaagttaacctagtcccagactcaatcaccattgacgagagctaacctaacaggcattacgaatcaacatgttaaagccaaaacgctccctgcaaccaataccttggtgcagggtcacaaatctctggaattagtggttcagaaatttcatcgaacactttttgggtgcggaaatgtctgggctcaaattccagttgatcagaaagcaataggcattaagaacaactaatccataagggatctatcaatcaatactcaatcacctagcatattgagaattctacactactctaacccatcctcggaaacctattcactactcagacatcataatagaaagcattaacgttgaacaagttgaaaacatgataacaacagtgtaacagcaggatgataacagaatgaacaacagtaaacgaaatcaagaacaaaagctgaatactgaatactgaattgatgaagagaaatccggattacaaaaggtatagaacacaaggtctgcggaataaaactagataaaaactttgctgcgaaaatgtgaagtacatgctacttatagccaaatattccgaaaccctaatacttaaaacgacgaagtattgggatggattaagaactgtactcgacccatgtggtcgagtgggaggtcgagtgaatagctggagtcttcttttcttccttgtgctcgagtgtctggttgagtgcagaatgaagaaagctctgaagcttgtcatcgagtatgcagtcgagtggtggtgatggtgatactcgacttccaggtagagtgatgaggtcgagtagtggtctggcaataaaggtgaagacactcggcctcggggtcgagtgatgcgatcgagtgatggtcaggtgatgggatgaagacactcgacctcggggtcgactgatgtggtgaagtagtgatgtcctctactcgaccagggggtcgagtgatctgttaagatcttgaagctcctactcgacctcgtggtcgagtgttctgctgtgatcaggcccgcatcttccaattagctcgccaacagctccaaatcacatgaaaacaacacaaatatgcaaaatgcatgcaaatctatcctaaacatgcaaagtgatgacaaatgatgagaaatgatataaaacagtaatgatatgatgctaaagtgatgacaaatggatgctcgaaacatgtaaaatacacacttatcaactcccccaaacttagtctttgcttgccctcaagcaaacaattaaaaacaagctggaggtgaggtttgaaagcgggggctcacagccaaagcactagataaatcagatgaaatcaatgtccaagttggtatttctaagctgcgatatgatcgaatttctattcaaaaacgttagccatgccttgttattaatcaatccgactcttatgctcgacctacacatgttttcaaatctaccaatccctttaacattcattaactatggaacgtgaattaagaaatgcatcagcaatgaactcatttagctaaggtataggtcaagagacaaagatgggccttttcataataggctgtagtaacagggatctttcaaaaatgatttttaaaaaatatgtggaaaactaaaatctatttcaaactgatgaaccctcacttcttcttcttaagaacatcaacaacattaagtccaatacaataagcaatagactgaacggtgaccatcggattaacccctaaagcggtcggaaaaacacttgtgtccgccacaaataacctttcgacctcccaagtctctcctgttggcctcaccgtggattcctccggcctaattcccatcctacaacttcccatttggtgagctgaacata

SEQ ID NO: 38551 - DNA, 6121 bp, Arabidopsis thaliana landsberg
gggcatgggagggctggcccgtggcgtgcttgccgacgcgcaccatgccgctgccgaagcctatgccggtttcgccgacttcgcgctgtggcggttggcaccgcagggtgcccacctggtggcagggttcgggcgcatccgcgacctgcgggcggccgcattgacgcacaccggcgaagacgacggcgagcgcgcggtacggtaacgcagtcgctatttccctaagcgcatcaccgccgccgggcgctgattcgcaccatggagtccttgccttttttcgcccttttgcctagttgaacaaaatatcaaactcgaccacgctgacacgcgttacagtccgatggagccgtcatccgtcgttgacctcaagtaaactcccgcgttgaggaggggtgccaatggaacaatccggggtgtggaaccatgcgcgcggcgcagaggcgttcgggttcgaggcgctcggcgccgtccattggaacgatcgccggcccatcctgatcgaggaggcgaatgttcagagataaggccaggctttattcgtcctggaatgctgcctgcctctttgagcgtggatcgcacttgcctatgaactcttgagtgtctttatacattgtgggccaccatagacctacttgcaacactttttgggcggtcttaaaagtagcgaaatgccctccataggtggagtcatggcaatgttccagtataccctgaacttctccttcagagacacacctcctgaatagcccatcatttccctttttatacaggtatggttcatcccaatagtaatggtgtatatctctacataacttcttctttttatatgcatccagactctgagatatcataccacttactaaataattgactaaatctgcataccaggacaacttttcttcttcaactgcatatgcttcatccagtatgtcctttgtgctgatatttttgttaacaaggtcgtaaaacatcaacttttcttccggcatagtgtcatctatcgggattgaatcctcaatcctcattttggagagatgatctataactccattctctatacctttcttactaatgacttccatgtaaaactcctgaagtaatagtatccaccttagaagccttggcttggtttccttctttgcgtagatgtcccttagtgttgcatggcttgcgtaaaccttcactttggaaccaaccaaatagcttctgaacttctcaaatgcgaaaaccacagctaacagctccttctcagttgttgcatatctttctgagcgtcatccaacgttcggctggcgtagtagatgacgtgaagtttgccatcaatcctttggcctaggacagctcctactgcataatcggatgcatcacacatgatctcaaatggatagtcccaattaggcgctcaaacaaacggagcagataccaaagcatccttaatggtttgaaaggatttgaggcagtcctcatcgaattcaaattcggtttccttgcacaataatctggttaacgggctggctatcttggagaagtctttaataaatcttctgtagaacccagcatgaccaaggaaacttttgatgtccttcaccgtttttggtggctgcaactgcatcatcacttcaaattttcctttgtcaacctctatacccttctctgatatcttgtgacccaacactatgccttccttcaccatgaaatgacacttttcccaattgagaacaagattcatctcctcgcacttggtctataccctgccaagattcaacaaacatgaggagaaagaggggccatagaccgaaaaatcgtccatgaagacctccaccatctcctcgattaaatctgaaaatatagaggtcatacacctctgaaatgttgcaggagcattgcataaaccaaatggccttctcttataagcaaaaggtgcataaggacatgtgaaagtagttttctcttgatcattagggtgaattggtatttgaaagaaatcactatctccatcaagaaagcaatagtatgggtgattagctaagcgtctaagcattttgatcaatgaatggtaaaggaaaatgatctttcctagatgtagcatttaacttcctataatcaatatacattctatgataagttatagttctagtagggaatcagttcatccttttcatttttgataacagtcattccaccctttttagggacgcaatgcactggagaaacccaagtactatcagagatagggtagatgacaccagcatcaagaagtttcaaaatttcttttttcactacttctttcaaattgggatttaacctcctctgtggttcaatgctagaataggattcgttttcaaggtggatcctatcgttgcataaactaggtgaaattcccttaatgtcggataatgaataaccaattgctctcctatactttctaaactcaaataatagcaggttcacttcatcatcatttaactcaggattaatgatcacatggtaagtagagtttggaccaaggaatgcgtaccttagacctttaggaagtggttttagatcaacctttggcgccttcagttcagaccagtcatctgaagttgggatgatcggctccccaaattcgttggcagacaagatcgagtatttgctcgagtgtgcaggttgaactcgagttgacccttcttcgctcattaccattacctctgttgctggtccattcaattcctcaaagggttctgattcttccatcgctttatgggagtctaacagcttctggtatcccaatgtttccaaatgcagaaacccatcttcaccacttttggttaaagcactgttaagatgatcttcttctaccagctcttccagtaactcatcagctaactgatccatttcttcgatccaaaagagttgcccttctatggtaggcttcttcatcgcgtctttgacatcaaaggtcatcctaaagtctttgccaaggtttagatcaatcttccatttcttgacatcaatcatagctcctgcagtggctaagaaaggtctccctagaatcaatgggtccttgggctcttcatccatctccaggactacaaagtcagttggtatctccacagcaccgatcctgattgggaggttttcgagcaaaccatgagggatccttactgatctgtcagctaggatgagggatatattgcaggacttgtattgagtgaaccccaatcttttggcgacagagagcggcatgagactgactgatgctcctaaatcgcataggcatctattgaaagccaatggacctaaagagcacggtagagtgaacgaaccaggatcactaagcttcttaggaatgatcttcttctgtatgatagcgctgcattcatgactcaataccaccatctcttgcacttcttgaattctctccacaatcaagtctttcagaaacttgtgagagtctggaattagcgctagagcgtcaacaagaggtattcgcaactcaacctccttaatgttcttggcaaacatagctctatatttgtctgccaacgctttcttgtgacggccaggaaatgaaagctgcggtttgtagggaggagggacaaagacctttactttgtttttgacagcaactggctttggagcagttggtgatgctgctgggatgacaggtcgagtggtcggtcaagtaacgctgtcgagtggcagctcgagtggttgctcgagtgactggtcgagtggtttgtcagcttgatctttctcgagacttaaatcctccccatcttgatcttcactgtcctcagtgaccgtgtttggttcctccctagttggaagtgcttttccactacgcaaggtgatagcatgagcatattcttttggattctgaactactttgcctagtagttggcttgtctgttttggagctaaagaagatgcacaatgtccctctaagtaacggactttggtattcagtgtttccatcttgacattgagatcattgtagctacagtccagcttgttatgtaactcagatatcttctttgccatctccatggagccagaggcttgcccgtgaagtagctgttgtaccatttgtttcatatcagcgtcaggagcagcaggaccttggttttgctgaggtgcaaacccaggtggtggtggttgctggtagttcccctggaattgctacttaggaacgaaaccttggttgtagggaacaaaaggtttgttctgaccttgttgttgctggggagggtacacctgatcctgaggattttcaacattagtacttctgtaagaaaggttgggatggttgggtttgaaagatggtgcatcctttgtagccaccctggttgttgacgatggagctgactttttcaactgggtacccttcccatcttggacttgagactgcttgtcatcaacaaggaagtgcacacgtttctgctggctaagaagaattttgtgtttgtcatccgagtcagttgtgcccctgatggtcttgtcgcagtcctcgttgtaattaccatctgattgagctaggttctcaaccaattcccacctttcttcaacatctttgttctggaaattctcattgctggcggtatctagaagcattctgatgtgtggtaaaacgcctctgtatagagtgctgagcagagaggctttcgtgaagccatgatgaaggcattggttggtataactcttgaaacgctcccatgcttcaaagaagctttcaccagtcttctgtgaaaatccagagatctcatttctcagtcttgcagttctggcgtaggagaagaaatttgctagaaaagccttcttgcaatgcatcccaggtggtgattgagtcatggagcagattcttctcccagatgtgtgctttgtctcccaaagagaatggaaacaactggagcttgaatccgtcttcactgacaccattgatttttgttaggttgtagagcctatcgaattcatcaaggtggtcgagcgggtcctccacaggcagaccatgaaatttgttcccctgaatcatcgatatgagaccactcctaatctcaaagttgttgttctggatagcaggaggtgcaattcctttccgctgacgctgatcacgtggtgcatctccagcaccaatgttggcagggccattttgttgattctgttcgtgagccatttcgagtggttgctgaggtagaaggttgactgtgtttctcctttctctgagttcgcgagctatgcggtcgatgttgtcattgaaaaggaggttctaattgcctgttgatcgagtttgcatacagcagaggtgtacctggatcaagaagacaacaagaaagacacacagttagtaatcgaaaagaaaatgggaaaagaacttgatctaagcaagtctgaaatctcaaatgtaacaaacaaacacccaattgacaacgtcgccaaattaataataggttttttagtcaattatcctaaaacaccaatcatatcgttgtagtattttaggttgtcaatccaaatgggtgtgatgctaacaatcaagatgtgatcagaagtcactaagtcaagccaagcaataacaggttttggtgtgttatagcagttctaaatgaacatgcagaaaacagaaattcaagcagaaacaataaaacactcgaccaacacagctctttgcaaagcactgggtgaggtcgagtgacaggtcgagtaacagacagaaaataaaacacagatactcgactgcacagtctgttgccagacaactgggtggtcgagtacgaggtcgagtaacaagaaagaattgcagaaattaagcgacagataacaggatgcagtaaacaacagtagagtaaacaaagaattcaatcagataaagaattcccaaggatggggtaattgagtagtttcgtttcctcagtttacaggtgattgacatgctcaataaattaacgctagacaacaagttcattaaccaaatctaagtgccaccgcaatagagactctcaagttaacctagtcccagactcaatcaccattgacgagagttaacctaacaggcattacgaatcaacaagttaaagccaaaacgctccctgcaaccaatacctggtacagggtcacgaatctctggaattagtggtcagac

SEQ ID NO: 38552 - DNA, 4483 bp, Arabidopsis thaliana landsberg
tcatgtctccacctcccatgagtggaactaatacacttggaatgagaactgtgatgccaagactcaacaagtaatgctggaaacccaacactgcggcttcaactgcaaacaccaaacatattacatttacacacacacacacacaaatagtaagatataacatgaataaccaaaatttaataaaacaaaacatacgccaaggaggaggactgttgacgcagtactggattccggggagttgttctttcaccgggtggggttgtaactcttccgtccggtttgctgctccgttgtttccgccaccaccgtttgtcatggttgccaccaccactattacaaaggttagaaaaaaaaaaaccaattctcgattataaagaatacagtaaaataaatcaataaatatattaaaaaacataaagaggctgcatgttttgcataagtcatcctcaccaatactaatacaaaacaaaatctgtagagatctcaaaacaaagtagtactagccaaaaaagaggagtgagatataaaacttacttttagatcaaagaagcttcgttagatacaagtcaagtgagaggttatgagagactttcgaaagaagtgaatgattggagagtgaagaagaataagaagtcaaagagacttggggattataagttgtaacctttccaacttttattatttgaatgattatacaattaatgtagtcataaaagtctaaaaattgtcagtttttgatatatgaaatttgaaatagaaatcttttgacatcatgagattctgtattttgagatcaaattttttttaaagaatattggtgtgaaatcaaaatgaatgtgtcgaatatattatacggtaacatgaattcattatctttgcgtaatcgacttactatttcttaatttaatctagttctaattattatgaagatttttaaaacaattttgaaggtaattaactaacgtttttccataagagacttatggcggctttatttcatataatgtctgttcttaagtcacttacaatatactttttagaaacaatcactctttagcaacccgaacaacctgtttccgaatatttttcccggaaaacagcccaacaagtgcagcgggagcgaggtcgaggccttcagatatatcttcgatgtagacaatcttgccttctttgtaatatctcttgacattttcaagaaactgtgggaagatatgaaggtaatcactctgcaagaacccttctagccttaaacgtttgtagatagcgctgtataggttcttgattccttgtgatgaagttgagaggctttgtaaagacaccattccacagagcgcgattcttccacgaaccttcatgttgaggagcgctgcatcaagcatggatccacccacgttatcgaagtagatatcgatcccctccgggaagtacctgttttagtaaagatattgaaacagttcagcttcacgtttttgtatagactcacattatgcaccatacctttctcattccctagagctagccacaagaaatcagtttaagtgacatagtcagagtatcttactattacctttatggatttatcttgtaattgcattgcgtctcatttgttctaactagagtgacagtgttgatcaaatgtgtaaatatagttgaatgatggtgaactttaaaagacttatggaacattcaaaagcctagagacaagccatattaacctcaagacaagcactactctgtaattgattctttaggttgaatcttgacatatatttacctcttcaaagcagtatcaagatcagcctcttccttgtagttaaaggcttcatcatatccaagctcgtttttaaggatctcaacctaaaatatgtccacaaaaagttacttcacaacgacaagtgagtaacaagagttgctaaaattagtttagagactaaccttttgcttactaccggcgctaccaacaacatagcagccgtgcaacttagctagctgaccaacaagttgtccaactgctccacatgctgcagagacaaaaacactgtcccctttcttaggacaacatatctcattaaaccctgcatatgctgtaaatccagccatccctgtaaaaaaggtgaattcagactgtttagatcaaacaaataattgctaccttcctcttatgctaaacaaaagacgggccgtaccgagaagtccgagatgataagaaagcggaatgtcgtcgtctaactgaatatttctcaactgtaggttatctgaactacgtagcaaactgtattcttcccaaccaatgataccagagactatatcgccgggcttataattagtatcatcagaatctatcactcttgctaaaccaaacccttcgatacgctgcatcaagattacaaaactatcagtcgcttaatacagagcatataacaaaggaaacgtcaaccaaagaaacatattaaagagtcattgaagaatatgaacaatttcaccaataaaatataacaaatctcaagtttcctcagcatataatatatccattcgtcaaaacatcgaaaacttggtgtgcatgatctctctaaagcatatatacagcatctacacatctctctctcttcaaatatgaacaattcagcaataaacaagacaaatctcaagacttcgcaacatttctagatacatacacaactaacacaagttccatcaaaacgtcgaacacttggtgtgcaaaaatctctctatcacacaaaaactctacttacctatccctcttcaaaatttgattttccaatgagcaaaaaccgatacccaaaagaccaattacagaaccaatcgacaaaaaaaaacaaaaaagctgaaaacttgaaaatgtgggaataatctatacttggccaggaacaaaaggcgggagataggaaccgtgaaaatcacgcatacgacctctcatgtaaggatcacaagacaagtatagatttttgacgaggaaacaagaagatccttttggtgcttttagctcaattgtttctccgagtttcacttccatgtctgtttctgtaggaataccatctacataattctttagtatcactttcttgttctccaccactgaaacttctcccatttgttatgagtctgtgatggagaagaagaagaagaagatgagttacaacaagttttgttgcaaagagatggttttggttgtgtaggagagagtttggtaagacgagtgtttctcgtttatgtgacgcgtaggttttttaaattttggttgaagtcatttaatgcgtatggttttttttggttcacccacttgattgggtttcctccggtttagattgttgtcttcttgcgtgaaattgttggccctttaatttttattcaattacacataccagtacaatattatgttctacacaaatatttattcacaatggttacgaagtatataaccatataataaattttaatagctacacaaatatttttatgtacaaccaatgtcatgtttaatattacaaatcttggtctgaacaaacgtatagaggtcatagacatccactaggtgtaaccaatccaagttgcttaccagaaacattcgtgcaagaagtctttgctgcttcaccgtaaaaagttagattaattgcctgcattcgaatcccagtgcatgggactttctcactgcaatccatctttatagcaatctctgtggccgatgttcccatgattccactatatattacatcgtttattttgattcctgactcctgaaaatttataatttcatatctaattaactttttgtgctgctaattttttctcttttgtgaccggtaacaatcatatatatggtatatatactgtagaggtaaatggttaccaatcaaactcattatttcaatcaaatatttggttagattctaaagtaattatttgactaacatacaaaaacaagataaaggtatatgaaacggacctgagaagggcaagaagaatcgccagggcaatagttctgatcaatgaggataggatatgagacattaaccataatagctcctaagaaccggaccctctctacgaacccgttgctatgtcgcggccacgacttgatcctaagcccattgtccgtccgtacaaacacagcattcttcacagttacgttttccacgccttgctcctctatggactttgctaagctcccaatgctgattccatgtccaggaccacaagtgatcccatcgaccataaggttctttgtacctggtccgattgagatacaatcgtctccggttttgatggaagcatttcggacttcgatatcggtagatagctgaatgtgaatgccatcagtgttaggactctcatcgggtgctatgattcggacatcttcaatctttatgtttctgcaacggtttattgccatgtggaacaattggctattcaacgataataatcctttgatcttcacgttgtttgagtccatgaatctcaatgt

SEQ ID NO: 38553 - DNA, 7490 bp, Arabidopsis thaliana landsberg
ctgatggggtaatgatcaatggccagggagtaagtactgtttattctatcaccgtcgacaaaggttcaatttaaaaactctagatattacgttagttacaagttacaaaaaaaaaaagattctcacatcacttttcgtggatcaattgataggtaaaacgtacagattcagagtatcaaatgtagggcttcaaacctccctgaatttagaaatattaggtcatcagcttaagctcattgaggtcgaaggaacccacacggtccaaaccatgtacacatcactcgacattcatgttggtcaaacttactctttcttggtcaccatggaccaacctcctcaaaactattccattgtcgtttccacaagatttatcaacgcagaagttgtgatccgagccactctccactactccaactccaaaggtcataagattatcactgcgcgacgacctgatccagatgatgtagaatggtctatcaaacaagcccagtccattaggaccaacctaactgcgtcggggccaaggactaaccctcaaggctcataccattatggtaaaatgaagatttctaggactttaatattggaaagctcagcggctcttgtgaaaagaaagcaacgctatgccataaatggcgtatcgttcgtgccttcggatactccgctgaagcttgcggatcatttcaaaataaaagatgtttttaaagttggaaccatccctgacaagccgagaagaggaggaggaataaggctagacaaagcagtgatgggagcacaccatagagacttccttgaaatcatatttcaaaaccgcgagaagatcgtccaaagctaccacctcgatggatatagtttttgggttgttgggtgagaataattaaagattagctatatctatcgtcctctatatatagtagctagtaataatgcattgcatgcatctgatgtttgtgagtactgtccacaggacggatagaggaacatggtcaaaagcaagcagacgagagtataatcttagggatgctatttctcgctccaccactcaggtacaaatagtttctaactccatatatcttaccaaaaatttttaaaaatcatctcaaaactagtatttggttgttgtaggtatatccagaatcttggacagccgtatatgtggcactggacaatgtggggatgtggaatctaaggagtgaatattgggcgaggcaatacttgggtcaacaattctaccttcgagtttattctccaacacactctcttagagatgaatatcttttgcctaagaatgctttgttgtgtggccgagcctccaataaacacaccactccttaatgactctactcagaccaatcgtcaatggctgatttagggatatgtattttattatattgagttctttattctttataatttcaatagctagatatatgttgcacaattattatatatacttcaaaaattgtaatgtatacccaaatttgatgaaaattttactgttttgtaacggttattgctaagtttgaagttaatttttgtaggcaaatgcaatgttttcatatgaatcaaccaagtaactctaccatatcaccaagcaaaatagtatagtttgaagagagagagtaaattaaaaaaaaaaaaaaaaccatacataacatattagaaacattaatttcgaataaacagactttaacgatgaaataaaaatttaaattattttccaccggtagatgttgaatgtttattggtatagaaagttgttctatttggtcaaagtttttgttgaccttgcaattacaaattacaaggctgtcaatcgaatgaaaaacatggcaatggaaaagatttgctaataatgccaagacaaacaaacgtttatttggaaggttaaaagccttttagagaagaaaaaaaaagagcagagagtcaactaattaagccatgcatgtgaatcaacaccaatccatagcatattctagtgatcagtgacattaatattgtagattactatattaacccgaattcaaagggcattaaataggtactttaatgaattgaattaagaagagtaatataatcaacggcttagattcgttgcgtgaaaaaaccataaccgaaaacagcggaatccacgaaataagtaagccaaacgcaatctagaccgtacgatgtgaatactttaatgacgccagaatactatggacagtgtagatcaggcgaatgggcgtaatacacgtggcgtaaaatcacgaggatagatatggtgcaacgtagttcaggccggtgtggtacgagagagtctgatgatccgacaaggaatacttctagtccacacaatgtcagcctttctttattttctcggtcgcttcgagattctcaattctgctctgtagaaaagatcctgatggttcacttttaatatccaacggttgatataacacaagcgcatgctcctcttatgagaacggccgtgggatataatttaatctcgccgttaaaaaatgtgacgaccgtgagttaacggtttatctgttaccaacctcatacctgtgcctaacggcagaggataacgccgtgagtatggatggatgggagagaaaagaagagagagagtgtgagtgaggaaatgaaaggagtcttttttatttgttatctctcatctctctctctctttctctctgagctttgctttttatcaaacaagcatcatcatcacatccacttccttcttcttcctttctctgtctgtctctttacccaaatgtggactctttgagccgttattagatctctgccgcttcaataatggggagcttatcttctgaggaagacgacgaagtctcttccgagagatgcggaagttacagtcccagcgccgacattagcgagtccgagagttccagcagcttctcctgccaccgcttcgacggcgagggtgcctctagctccatcccttcttcccctcgagttgtcgctggtagaggattttacttcccggccccagtcatgcttccggtgatcggcggcaaagatgtggtctgggatgacaaacaaccagacaacgatttatccggtataaaagtttccaaatttgacctcttttgtaaacattgatgaacactaggattcaatttcccttttgtttcctattgggtttcagaaattgagatgatgaaggagagatttgctaagctacttctcggggaagacatgtctggtggaggtaaaggggtttgtacggcgcttgctatctccaacgccatcaccaatctctctggtaccatctcaatcttcttccctttttgttagttggtatatatagtaggggtttctagttttttaataaggctagtgtccacacagcgactgtgtttggcgaactatggaggcttgagcctcttgctcctcagaagaaggccatgtggcgcagagaacttgagtggctgctctgtgttagcgattctatcgttgagctcattccttccattcagcagttccctggaggcggaacttatgagatcatggagacccgtccacgttctgatctctatgccaatctccctgctctcaagaagctcgatgctatgttgatcgatatgcttgacgctttctccgatactgagttctggtacactgatcgcggcatagttcttggtgattgtgacaaggattcttacaattctccagcttccgttaggcaggaggacaagtggtggctgccttgccctaaggttccgcctaacggtttgtcagaagaggccaggaagaaactgcagcagtgtcgggactttgctaaccagatactcaaggctgcattggcaattaacagtggcgtgcttgccgaaatggagattcccgacccttacttggagactttgcccaaggtatgcgccttctcgagctcaaggattagctttttcattgctgctggagcataaattcttttaccgttatatgtgattagctcattgagttatgattttaaacttaatgcagagcgggaaggaatgtcttggagagatcatctaccagtacttaactgcaaacaagttctctcccgaatgcctcctggactgtcttgatctctcatcggaacatcagactcttgaaatcgccaaccggattgaggcggctgtgcatgtttggagacaaaagaatgggaggaggcacaagaagcaggcgaaactaaagctgtcttcttggggtggcaaggttaaaggccttgttaatgacaacgaaagaaatgatttccttgtgcagagagccgagaccctcttgcagagtctcaggatccgtttcccgggacttccccagacaacgctggacatgaacaagattcagtacaacaaggtacattatagtttggagtgtgctttgctggttgcatcatgaaacgatgcttagataatttaagagtttgtgtgtgttcttgcaggatgtagggcaatcaattctggagagttactctagggtgatggagagcatggccttcaacatcacggccagaatagatgatgtgctttatgttgatgatgccatgagaagatccatctctgtcacagaatcgctatccctattcagcatcaatggactcaaccctcaaaaagcgttctctgtgcagagctctccgcacggttcaccatttgcaacgcctgccctaagtgtagcatcaagaagcccgaggagagcaccgccgctgtattcagtgaagaggaatgggacgagagagaagggaatagtgggagaaacagagaaagcatggtcgtatgcagggaatttgagttcaagaagagtaacgggagtgacgccggaaagagattaagattgaaaatagaagaatgtaaatcaatggttgtagagactgtagttgtttcttgtttgtctgactacgaagacgaatgtggtaatagcaacaagaatgttatcttatgtggagttttgaaatgttgttaacaaatcaattccttagctcatttaccaagtttacaaagattatggtccaagtcctaaaactgaatgaacatcacatacccgtctcttgagtgatttaatcatgttcttcattgcactaaagcgacaacttttggttcaaatatagactatgactatatggtttgttttgcacaggattaaagttgatgttccaattttataattaaaaagtcagaaaggggttttcttgttattttttacttgttcttataagctatcgggacgacacggagttttaaagagttttccgttttgctgagcggaggcgagagagggtttagagtgatggagcaaagtagcgggagagtcaatccggaacagccgaacaacgtcttggcgagccttgtcgggagcatcgtggagaaaggaatatcggagaataagcctccaagcaagccgcttcccccaaggccctcccttctttccttccccgtcgctcgtcatcgttctcacggacccgtaagccaatccaatcctctagtgcgtgctttttaggtttccatcttccttttgttgccttcttctagattttaagcaccttctactgttgtttagtacttgggactccacaatttttcaccgtgcctgaccttgtaattcagctttctgagacatctaatttttgtttctcatgtttgattttgtagcatttggctcctgtgggaagcagcatagcacaacctaaggattacaatgacgatcaggaagaagaagaagcagaagaacgtttcatgaatgcagactccattgctgcttttgctaaaccgcttcaaagaaaagagaagaaagacatggacctcgggaggtggaaagatatggtctctggggatgatcctgcatccacacatgtccctcagcaatcaaggaaacttaagatcattgaaacgagaccgccctatgttgcttcagccgatgcggccactacatccagcaacactttactggctgccagggcatcagaccagagagagtttgtttctgataaagcaccgtttattaaaaatttgggaaccaaggaaagggttcctttaaacgcttctcctcccctagctgtttcgaatggacttgggactcgacacgcgtcttcgtctcttgaaagtgatattgatgttgagaaccatgcaaagttgcagacaatgtcacccgacgagattgctgaggctcaggctgagttattggacaagatggatcctgcactactctccattttgaagaaacgaggtgaggcaaaattgaagaagcgaaagcattctgtgcagggggtttccatcaccgatgaaacagcaaagaattcaagaactgagggtcattttgtcactcctaaagtgatggcaataccgaaagaaaaaagtgtggtgcaaaagcgagggatagcccaaggattcgtgtgggatgcatggactgagagggttgaggcagccagagacttgagattttcttttgacgggaatgttgttgaggaagatgttgtctcgccagctgaaactggtgagtagaacaatacaactgaaacacatgacaatcttaggttgcttacactttgactgtacaggtggaaagtggtctggtgttgaatctgctgccgaacgtgatttcttgagaaccgagggggatcctggggccgcaggttacactatcaaagaagctattgctcttgcacgaagtgtggtatgtatgattgccacatattttaattttgatgctaattaatggttaaattcttttttccctccattttggctttagctgaacaaaacctgtaggctgagactgcgtttttttcgttatcactgctcattgatttgtatgtattattgatatatatatcagattcccgggcagagatgtcttgctttgcatctgcttgcatctgtactcgacaaagctttgaacaaactttgtcaaagcagaataggctacacaagggaagaaaaagataaatccactgactgggaagccatctgggcttatgcccttggaccggaacctgagcttgtcttagcattgaggtaatttcctgatgggtgtaattttgagacttatttgtgaagttgtcactcataaatcataaattgtttgttcttatcaatataagtttcttttcttctttaggatggctcttgatgacaaccatgcctctgttgttatagcatgtgtaaaagtgattcagtgtctactgagctgttctcttaacgagaatttctttaatattctggaggtatagttgatttttctcactcctaagaagttatagtcctcatagaacgtgattatacatgttcaaactgataaaacccatttctatttccagaacatgggaccacacgggaaagatatcttcacggcctcggtgttcaggagtaagccggaaattgatcttggcttcctccgtggttgctactggaagtacagcgctaaaccctccaatattgttgcgttccgtgaagaaatcttggatgacgggacagaagatactggtactattcaaaaggatgttt

SEQ ID NO: 38554 - DNA, 5866 bp, Arabidopsis thaliana landsberg
tggaaacctaccagaaaatccattgttctgcacttgaagcctcttcagacttaggcattcaccaatggagttaggcaatgacccttcaaagaaattcgagtggagagaaaggttaataagccttttaccactgcaaatgccactagggaaagagccagataacttattctgtgagacatcaagagacactaagttcttgagagaagggcctaatgatcgaggaatctcaccactcaggttgttcaaactcagatccaaggttctcaaacttgtcaaaccaacaaacgaagtaggaatctctccatggaaccctgacctatgcaacagaagctgttcaagcttgtctagcttcccaagaaaagaaggaatctcactaaccaaatagctgttttcagacaaatcaagaacaacaagctcacttagcttcccaatagcaggagggacgataccagtgagcaaattacttcccaagttgagaacttggagattaaacaataaccctaaatcttctggaatcataccttcgacatggttactgctaaagtcaataactttcaaggaactaaactcagaaatctgatcagggattgtgccccagatgagattagagctgagattaagagtctctaaagtaacacaacgagacaactgaagtgggataggctgattgaagaagctcaaggagaggtcaaggtgagtgaggtaagggaggtcacaaatggagttagagatttcaccagaaagattcaaactttgaaggttaatggaagagacgtaaagagtaggagctctagtacatgtgataccagtccagttacaatggtgcgaagaagaagtgttaaaccaacctgaaagagagccttttggatcatcaaaggaggctttgaatctgagaaggttaccaagttcctcgttctctgtgaaagagaaggtcttggtgaagaagaagaagaatgtcaaggctagtgagattgaaaactggtgcttgaatctggtagccattaatgagttaagaatagagaatgaagaggatctgctgaatgagtgaagtagtgagagagtgagagtgagagtgagagtgagagtgagagtgaattgaatttcaggtgttgaaaatacggggtgggttttgcaattataagatagtagggttggttaatggtaaaaataaagagtatagggtttagtttgtaatttcccgttaaattttggtcgagggtctatggggaactggtagatttgtttacaaaattacgtctcggagattggaatttcggatcgtgtctctctctgtttctttgtttcaatccgatttcgaatcaagccctttacttgtgcaccttcaagatttcgtttttccaggtcagtttcttcatcaagccaacctttttttctagggtttttcttcctttgttttttttctgggagttttctccttcacagtcctaagaagctacttgttaactctgtctttttgcttttgaagttaaacctagttgactttctcaagcttaaagagttcagctttttttttttttaattggtgattttgttcttaattttgagctaccaaaatcatcgaattaaatgttaatctcttgaattctgtttcggtggtagtttcttggtttgaaatcatagctgcagcttcatgccgaattctcactggttctagatttagagtttagctttttttttttactttactcggatatgaatactgagtaaggaattgagtcaactcggatgtgaatactgaatagtttttgttctagctagagttgcaaaactaagagattcagctactgaagctactttagtgtcattcaaactgaattgaaatgatgtgtgtgagtgtgactgtacctaatttttcaaactcaggcattttcgactgtgccaacaccttaagtctcaatgattttgactttgatccgcgagctaagcttaaggtctgaatgagtttctcagactttgtagattgtgcaagctacatgtctgattgggtttgatgaattgctttaaaggttgtgtttttgatgggctatttttgtcagtctgttagctacaaacagattgttcttacatatttgactttgtgacttatggtagtcagcagaatttcccttaggacactttgaataagtaaaggactctttagcattctttagctggcttgtttaactgaaacaaactagagaacctttttcttgactttataggacataattgaaaactatgttagcaaaagagatggtatgtaatgctgtttttttttgtgctcattcagcgcagccaatgctccgggtgaccaacatttgttcctgattcatttcctattggttcgtattggtaggtgttgatctttcttttatattctatcacctaattttgttctttctgtctttttttctttttcttaatttccttccgaatcctggcagtctgtgcacacaagagaaatttcaagaagttgttactaaaagagaggccacaagtggatattgtctttgttatcaagtgttagtacagaaaagtggtgagaaagtaatatggctgataccagtccgagaactgatgtctcaacagatgacgacacagatcatcctgatcttggggttagctcataatctggctagattttatcagttatattcttcaaaatagtgtgattttttatggaccaaacaaaaattctggtgttaattttaatgcagtcggagggagcactagtgaatactgctgcttctgattcgagtcaccgatcgaagggaaagatggatcaaaaggtaacatgtccatctctgtagataagatcactgtttttattcagccaatttataatctctttttgtttccttatattttgatccatagactcttcgtaggcttgctcaaaaccgtgaggcagcaaggaaaagcagattgaggaagaaggtatattaccttccattggttttatctttttttactttttcttttctttttaaattggtgcatcgctagaagcatagctatttggtactacgttaattccttttaattgctccctccataggcttatgttcagcagctagagaacagccgcttgaaactaacccagcttgagcaggagctgcaaagagcaagacagcaggttcaaatttgtttcttatttctaattgatttttattttgttattctgtatacctaacggtaaatttcttgtttctagggcgtcttcatttcaggcacaggagaccaggcccattctactggtggaaatggttggttgcttattctccattagttttaattatgtttattttttggcttctaatttgtgtataagttaagttcatatatcaacttcctgttgacttggtatagactgatcaattagtacatcatatctcatcccattacaatacactgggttatcagagtcagtggcagactgacatggttctgatagcaaaaactgttattctaattagcactggtgtagatttagatttacaagatgacgaatctcatgggtttgttttgatcatgtataaattttttaattcaggtgctttggcgtttgatgctgaacattcacggtggttggaagaaaagaacaagcaaatgaacgagctgaggtctgctctgaatgcgcatgcaggtgattctgagcttcgaataatagtcgatggtgtgatggctcactatgaggagcttttcaggataaagagcaatgcagctaagaatgatgtctttcacttgctatctggcatgtggaaaacaccagctgagagatgtttcttgtggctcggtggatttcgttcatccgaacttctaaaggtgaggtcaaatttcactttgtcttcaccgattgcatctgtttctacatagaacataaaaagaatggtcatagggaaaaatgtgttgaaacagcttctggcgaatcagttggagccaatgacagagagacagttgatgggcataaataacctgcaacagacatcgcagcaggctgaagatgctttgtctcaagggatggagagcttacaacagtcactagctgatactttatcgagcgggactcttggttcaagttcatcagggaatgtcgcaagctacatgggtcagatggccatggcaatgggaaagttaggaacactcgaaggatttatccgccaggtacaacacttgtgatgttttgagatgatatcttagttaagagtatatatatatatcaataggttaataatcgtctcttggttggtggttgcaggctgataatttgagactacaaacattgcaacagatgataagagtattaacaacgagacagtcagcacgtgctctacttgcaatacacgattacttctcacggctacgagctctaagctccttatggcttgctcgacccagagagtgaaactgtattttggtcacatgtcagctgtacaaaatccatatggacacaaaaccaggagagactattaatcaacacttgtcagattcttcttaccaaatccatcaacaaataagcaaatttctgggaaacaaaagactctttgtatgtaggtttcttctacatggttgtggtaattcatgttgttttagttgtagtcatcagtttttaatttagcatttgaaaagttcaatgttgtttatatagcatcttcgattatcttagaaaggttattgaattttgtttttttttgttacttttgtgtgtggtaaaggtgttttaaccttgcaacttctgtactgtaatcatttaacaatattaagatgttctatttgagttttgtagtttcatcgcttgtgtcttaaatcttatttagtgaggattctaatgtaaacttccaagagatgatgaaaatgaatttacattcaaagtaagtgtgatagatttttttgtaataaaaaaagggacatgtcattgtcaaaaccaagaattattttgtttttagaaaaaagagagtgttgcaattttcagaggactttttaaccctcagcatctagaggtccaccatcacttgagtttcgtcttccattcctgttttttttcagagaccggcaaaataaaaaaaaagaagatcgtacaactaaaaatacctcaaagaaggaagatacaaaagtagtaacctttgttggtgattgatactatatctgttgtgggttttagacaaagaccacgtctttgcagttgtagattggaattttccggatctttctctaaatcgctttttctccgagcaacttttgtttggggttaagctcaaagaatccgttcttttcaggtgagtctcttcttcaatagtcttaggggttttagttcttcagttttcttattctgcctctgctttcatgattgtttttttccattgaagattttgacctttgagggaattttttcctttttgctttatgtacgtgttaaggatccaaaatcattatttcggacactatttaaacgaattggttgagatttgatgttatgaagcttgaattttgtgtcttttactctgtttccggggctagtttgctaaattctgaattatttagctctacttcagtctaatgttcagattagttactgtttcacctcacggagagctttacgctatagaagtccgttggttctcatttcaaatcatataggcgtgcttattgtttactttgattctctggctttgaatactcaaagttcttgaggtcattggttgcttcacagctatgtgttaagttaagtggtttggatctttatgttagtgtgacataaatagggtgatgtatcgaatcattgtttccactttcttgattctacttaatgcgttgttttttggctaaaattatgttttctttctctataactctaacctttgttaat

SEQ ID NO: 38555 - DNA, 3437 bp, Arabidopsis thaliana landsberg
  unsure (1)..(3437): unsure at all n locations
aagaaactccaggacaaccatacccatgctgtgttgatattagctcacctgagctgctggatcaaccgctgccggggggtgccatgtacggtgatgttgaaaccagcaccgatatttttgatgatgcaagcagtgactacttcagctctgtgccgtctctattagcnnnnnnnnnnnnnnnnnnnnnnnnnnntgctgttgcggtggatgaatttgatgacaacctgaatacagtgactagctcgatgccaacatcgccagcttatgaatctgatgacagtactagcagttacatgacgggagcttccagtcttgtgggagcttcgttcttggaaaagctctttccacgtcttcttccatcagaaaaggtcaaagctgttgtttctgaagacgttcaggtttctactcatccgttgcatgaagaagtgaagcttactacagaaactgacaacatgagtattggctttcctgtgaggacgccacagacactcggggagctgataatgatgagcagaaggagaagttatatgagaagagctgttgaaatgagaaagcagaatccttacacggtaagactctcaaatatcttttctcatagtcttccaaagccatatgcaccgtaacagtttatcacgcacatacctaaattcaatcgtgaaaaaagattctgaaatgttgacaagtgcctggataaattagcaggaatttacaaagaatggagctgatagctgctgcctctttgtgccaggtatgattcaaaatgatagccattattattaccaaagattcctttgtaggattcttgaaaaagaggcccaacccacttatgtatcaaacacttctctaggcccatataggtatcaatgaatccctaaagccagtagttaagtgtagagtgtcgctacaaattctgattccttcttctattttctccttttctcgatttcagagttgtagagtttccagaaatgcttccgcagagttcttcaggcgcttttgattaaccttctgattccggttccggtacaaataaatcgagcctccactgaatttcactggacaagactcatcacctaacaaaccagagcttctttctagggtttgtctcttgttcttctgttttcacttgtttggtatgcttgagacaaatcctttgagtctttattgtgtattctttttcagggtcggtgacattttcttggttgttgtaagactatggacagaatcagtgggttacctgatgaagtactggttaagatactgtcgtttgttccgactaaagttgcggtatcaacgagcattttgtcgaaacgatgggagtttctttggatgtggttgactatacttaagtttggtagtaaacattattcagagtctgaatgcaagaggttacagtgttttcttgataggaatttgccattacatagagctcccgttatagaaagcttccgtcttgtgttaagtgattcacgttttaaacctgaggatgccagaatgtgggttgtagtagcagtttctcgctacatacgtgagctagagatttgtagttcttattttcccgagaagcaaaacatattgccaagtagcttgtatacctgcaaatctctggtgatcttgaaactcgatggcgggattctcttggatgttcctcgaatggtttgtcttccctctttgaaaactttggaacttaaaggtgtgagctacttcaaacaagaatctcttcagcgtcttctatctaattgccctgttcttgaagatctattcgtgttgttacttcgttgtgacgacataggaatgtttattgttattgtcccatctttgcaacgtttgtcactctatttaagtcctcgttgtaatttagaagggtttgtcatagtcttagatacttctttagaatatttcaagagataagttggaaagttaaagacaaataaaataaagtaaaaatggtctctcatattatttttattctctctcaagataaagggtattatagtatttgatatgtattttgttttttagtctattagacatatcttctatctcacaaaaagcaaaaaaaatgtctatatctctaatttctaaaaaaaatacctactttacaaattatttttgaaaaagtgtctactttgccaataaacccatatttcaaacttgtggatcgtaattatgatcgtcacccatatatgattgagaatatgcctaagctgacgtcagcatatgttgaggttatatccgctgatcttaagagtcttgtcggatcaatcacttctgtcaagtacctaacaatattctcagaggtaatctgtctaaatctatcaactgcaagactttgatctcgcgcgctttttgttaatactttctttattcgtctgcatgctatgtttggtgacgctacatgtatgggatgacattccgtcgaatctccttgctcggttgctcaaagactctcctaagttacaagaactagtgtacgtctctgacaaagatgtaagttctttcgatcaactattatatcttatctattgcacattattttatattgttcaatctgattttctccttgatctcagaattataacgattttgagtttccctggaatcaacctagtactgttcctaaatgcttttgtccagtctacaaaagttcacctggacaaaatacttaggaagaccacaagacagagatattgcggtttacatcttgaaaaacgtttgtcgcttaatgactgcaacaatcatatctatgtgatacatgtttggttccagaactcgagatgataaaggagttgacacgttcttcccgagcttcatcaaccaacatgcgaattcaatttttcttgagcattttgaatcattagatgttttcattgatataataggactcctagtaaaatgtatattcctagatatataaagttgtgttcccatcaacgttcgtccaaatgttttcatcaacgttcgtccaaacacaacgatgtcttaggttcctaagaccttataaaaaccctccagacacaccaatattccttgacatgaaggttctgaaccatcaacatattatatccgaagcttaaataattattaaggactcaagacatacatatatgaggtctgaccatagccttgtcgagtctctttaagagaatgtccatggttagtatgagagataagggacatgagttatccttgacataagcccttttccccggaaatgagattacatacgagggagagacaaccactcttaaattcaatgaatgaaagtatgtagcaagattaatatgaaattcagatatatatatatatatatatatatatatatattctcagatgatttagtgagatctatctaaaggaatcttcttgatgttgtacccagtatgatgtacctcaaaagctagtaaggaattctcacgaataaattatcctctttc

SEQ ID NO: 38556 - DNA, 6397 bp, Arabidopsis thaliana landsberg
  unsure (1)..(6397): unsure at all n locations
tttatctgatactgttcaaacttgaccggatatgtactttaaaacagaaaggagattgaaacatataaaacctggcaactgcagatatcaaaaggggcatcctcttcaagaatcttgtctagctctacctgtaagcaattacacaattaggatttacaaatagtgaagctagaggaacttatctcattataccatgtcaacaagattcctaaactactagaggagcttagctcattatacctcaaaacaatccccacataataatcgagacggaaaactgaactttttacgccgttgatgatggtctgcatcaccgttataacgcgtgcgacaatcttcaatctgttattaagtacaacatagaagcacttctcaggtatagagataaaacatatatgcaaaataaagatacagctatcattcagccagtaaacttaccgacccttcagcaatatcaattccaacatagtacccgattctcgccttatcccacttgatcaaatcaccaccctggtaaaagcattacaatgagattagttttgagaaataacaattgacatgaacaataagattgttttaagtcaagaaccttcccacaggcaaggtcgagaacagcatcgtcaggacgagcataaagctggatcaaaacacttttaatctgtttgtataagaataagaaaaagaggaacaaaattgaattatcataatacaacaagtttcacggacagagagagatgttaaagagtaaccaacccaattgttaagtttcttcaaatgaatgatgggactagcttctcgctcttccaatgtttggtttgttctcctactgtaatgatcagcaactttccgggcaaaattctttgtagtctcatcttccagaaactgagaatcacctgaaagacagaatctgactttaagctttacacaatcatagtcattttggcgaaacgattgcttaaagaaacagactttaaacaattaaaaccatagaatccaaagtaaaagcttaagaactaaaactccaacaagacagcaaacacacagttaacactctatcagaatgaaaagcttgatagaaactataaagaaggaaactttttccaacgggcaaacaaaagcaactctcagggacaaagaaggaactagcaagggagggatcatcaataaacccttgtggaacacaaatcgaatcaacagaggaggaagagagggaaacgaaaccttcgggattagatttgaatctggaagaaggaggaggagcagagcttgaaggagaatcggagaatcctcgtttcataacaacagttaagatgtttgttacnnnnnnnnnnnnnnnnnnnnnnnnnnnnnnnnnttcttcaataataagaacccaattaagacaaccaaataaaggagaaaagatttggagttggggatttcttaaatcaaagatttgtttgtgtttctttggcaaaaagcaaaattttggtttaattatgttttactagcttgcggctgcggcttgtttccgccgctccgagtcggaggcgacaaattattttggccggtaaaaaaaggtacgatgtagacgatccactggggatcgaacccagaatctctggtttcgtagaccagcgccttatccattgggccatggaacctgatctgttacttttcgtaaaattaattatatatttgtgaaacaaaaaaatataaaagaagacctcaggatagaataatactggtaaaagagttcataacattaacatagtttttgacaatcacattattagtgtaaacttcaattcaataatactagagaatttgataccaacaacatgtttattttcatgggaatggcattgatagtgctacgtactggtaacaccgtaacaagtctatgatatttggtattttgccatcaaaactaattttatgtgcatgacaacatactatgattatcttctttttaaatgttcttgtaatttcacgtcgatgataacctatccataaatatttcataaaaatgaaaaaaggtttaagaatacgatcaaaactttatatgcctatgcaatggtcccatactctcatggcaaaaaccataaaaacatggaagcaatttagtctgtgtaagaaggaggaatagttttggatttgcaagcgtatacactatacagtatgaattttttttgtcaaaaaatgaattcatcccacgcttggaggtggattcaacgttaatggagcctctcctgttgctgaagatgttaagcctcctccggttctagggagagtatgagaatccatcatttcataacaaataagtcgtttcctcattatttagcaagcaaaattggttcaatcttcactttccgattaacttctttgtttctcttgcaagcaatattggtttgtatttaccgtgcattacaatgcttattgtttgtggtagtaaaatcaatgttatctctgttaacatgtaccaccatttcaagacccatagactttaatgcaaaatcaatgttatctctgttaaagcgaagaaacatgtaagactacaaaaacaattcgacatttcaaaaacacctattttctaagatcttgacttgtgtctctccatgtctaagtgtaaattctgtttcttttaacatattacttctgctctttctctgttactctcactctcagcttcgtgcatcccaaacatttgatcatacaacggcttgattaacgttttctgtaagtaaaaacgcaagcccaccttccattaactctgtaaaccgttaacaccccaaaagggtactctttccctaaaaccaccacaagcggcgccagaatcgctcccatttgagctgcttgagtcgcgcaacccaatgccgcgttcctcaccactgttggaaacagctccgcgatgtatatgaacagaagattgtacgttcctgccatcccgaatatccctaaaacccctgacaccattctaactgatttccatggaccagctccccatacagagaatccaacgaggcagaaaacgcagctgaaccactgcgtccctatggacagcggtttcctcccgtacttgtctagtaaaaccgcggttatagcaaatgccggcatttccgacaccgcgttgacaaagacgttgaggtaaagattggtcttgaggttgcctacgttgaggcttagtccgtagtataccctaccccactgtgaaacttatggcaaccgaaatgacaagtctcatccgcatgagaggcgctagtatatcgtctttcagcggaccctcaacagcggtattcctctccccgatgttattttccacatcgtcgtctacagcaagagtgacaccagctggaatgtgccgtccgttcgatttagcgatcgaatgcatcagcttcatcgcctcatatactttgcctctcacgagataccaccttggggactcggatatgaatgggataacaatgagtaggaacaagagagatggtatcgatgacactataaaaagctccctccgcgatctgaaaacgtaagccatgccggataaactgcaatgcccgcggagaagaagtagaaagttgacattccggcgacaccgcgtttgctcggtccaatgggttcagtggctaagacaaacgcggttaggccaacaccaccggtgctgaaaccagtcaagaaacggagaactacataggtccagtagtttggggagaaagctgtcgcgataccaaagattgcgttgataatgcatacaactgttagcgagccttttcttcctagcttagagtccgataaatgtccgaatactcctgcacctgcacattattgagtcggtacactatcattaggccatgtttgtaagttgtaattagaaaatgtaatcagaaaaaggtatacagtagttaaactttggttaaagacttatcaaatatttggtaagttcatcgggaccataacgcatgtatggtctacataaagttgctttttgagatatgttggaccaatgtttcacaatctttttttgttgacatgaaaacgatatcttcaaccatggaagatgacgtcttcatgccagttacatgtaaaatttttgactagtatgcaactctaattggatattccttcgtatatcctattcattgtataatgtgtatcaaatgtagagattggataatccagagccaaactgtccttttttataaagtaatctaaacattagccaaaataaggcaaacaactgttggtttttctattatttaggtgggtcatattataatgatcattttgtttgtttgtttgtgcaattatacatgtagttaagatgtttttggcctcgtttgtgtcaaatgtgaacgtgaatgttgttagcatcattcattaatatcatcatataaacgctaacgaatactgtgttaaccaagaccataactagatgtaaaaacaattacgggatgtcaaacatatttcaaactttcatcaataagtatagttcaaattttttttttaaagtaatgaaatgatgtggatgaacttatgtttttacgacaaaagagtcatgatttaagtctgaagcgtataacccaatgtttatttgcagacaaggccagaggggcaagccatgccgcgagagatttgtgtgtttcgactttacagatcaatgcaacgaattaagaaggaattttataactttaaaccaaaaaagcgaacaagataatatataatgtgatcaactcgttaatcagtcacacgtatattatacatttttttttgttcattttagtagttttgttttcttttttttggcaccaatcatacctatcaaagtctatcttttcttcttcgccaatcattttttttacgtgtgtgaacttggaccgcctaatgggttaaaattttaaagcattatcatccaaaatttataatatactatagaaatgaaaggtatatcggaaaaaaagtgaggtatatctttactctatagtgttattttctaaaattcggataatcataaaagattcatgtgatcaaggcacgtggtacgaatatccagattcaagccaacgtgcccattgatctgctcttactaatttattggtgcgatcgatatacactagctaagttatgcacacaactaacaactaatttattgtttgttgatatattcattaattatcggataatcacgtaaagagctaaatccactaaattacaagttcataattttagaatgatttttttttttgtcttatcgaattagataagacactcagaaactatactaaactcctaattatgtatttatttatttttcttaagaagataatccaagattagagtttaatcttctttttttgactgtaattagaaaaactattcgacgtgaaaaaaatcattttcacgctacagctgtaatttactgtttttgtaattttcctaaatcacaaaaaaaatatagaagggaaaaaaaaaacttaccgatcatgcagccggcgaagaagagagcctgaacaagaccaactttatacttgtcgccgcaaatcaatccccactccgacaccgtggagctccctttacccgccgtccattcccaagaactcggatccaactcgcagttcaatgacccgacccgacaatccgacccgacatacttncactcgggttcttgatcggcaaatatcatcaccatcgtgtggaacgcctctaaagcccaagcaatacacgtcaacacgaagtgtttcaactgccacctcccaaactcgccgcaatatctttgtaacatctcatctatgcataatctctcctctccctccgcttctttcttcaccggaattttctctagcagcggttgtcggacatcgttaccgtttctatcctccggagattccataatttatgttttgatttttacagtgtttttgtttttgtgtttgtgtttttgtttaaaaggcgttcttgatttggtttgacgcgaagaaggaggtggcttctttgtcgtatttatatctcttgtttatcggaaaacaatttttccttctttttttctctagcgttttttattctcttttgatttagtaactatttttttttgttgacgatattgactacatgctctgcttatatatattttaactatgtcatgttattaacgtttatgagttgtcactttgaaaattagtaagacacatcatgtattatttctcaaattagtattgtacatttcatttcaaagtcaaaaacacatgattctatatatggttgattacctaatgtgtaatcgtgaattagtaattaatacgacatgctaaaaattgattaatcatgtttagaaaaatatatactatgataaacctgaaattgtgtaacacaattttgatgaatgtatataccacatttccatattatacgttgtaaaagtaag

SEQ ID NO: 38557 - DNA, 10318 bp, Arabidopsis thaliana landsberg
  unsure (1)..(10318): unsure at all n locations
tacagagggttgtggtgaatctttgatcatgcaatctacgatttaaagtaaagagtcaacatctattagtaaccttttcatcgttttgaatgtttaaaaagagcatagatttggttttagatggtttcgtgctgggtccaaagaaattcgtagatcacttctccgagacaagagaggggaagcaatattcaaatccttcatttgatgcttaagggatagcgcataaaacgaactaagtcttaaaactagttataaagatcataaacagatggaagctatacgaggagaacgtgaagagagatatgcttcttgacaaaagtgagaagatgcaaaaaaagattaagagtttaccataacacacaacaaaattaagaaattaagccaccacactagacatatcttaggattatatcacaattttagtatattcagaataggtttgagggattgacactagagaatctgagtacaagatcttcatgatttaccaaaatcaaatctttcattaacaacgggaacatgaaaaagaaactaacagatgaagaaagacactgcaagatgaaagagaaaccaattacaaattgattttacctaaaagcataaacttttgactgtgtaaaaatgtagtctgaaaaggatgcaaaaagttttagggaatacaaaaggaaaatgaaaaaaacataatgcaagtgaacaacacaacacattccagaagtatcagaatgcaaatcagtttcatacaatccaaatgaacaacacaccatcactacaagaagatagataaagcaatagaagaagaaaaagcgtggattctgattctgattgtgattacaagggcatcatcatgtggttgtcgagcccctcagtttcggactcagtgaatgtgacctcgggcaaaacttcttgagcgagctttgctctcttggtcatttgaccagttactttgcgctcgtgctgcttgattgggctgattgagtcgtggaagagttttgatccgcccatgatgacttgaacttgtttttttagtatgctcggagaatccggagccgaagtggtttttggtttcttgctgggaggtgatgactccccgacttcttggtcctgactttgattaggcgtcagatccagctcagaaatgtcgaccacggtgatctcaccggatgcgaatttagctgctaagagacgacgcagagttttgcaatctttagtggcgtgtccattcatcttgtgaatctcgcaataggcattgggatcacgaacccacttattacttggannnnnnnnnnnnnnnnnnnnnnnnnnnnnnnnnnntttggctggggaacttttcggggaatcgcgcgagcgatccttttctaccacgaaggtattgagagaggttccagagttgtgcctcggtcacatcattcttgatgaaatatccgtactgcttgatgaaagcagttgataaatgcttgaaactatcaatggatccttcgctgagctgagtgaaccatgttagggctggtccagaaagattttcggctaagagtttgcaaagcccggcgtcttcttcgtgtggctcgaggcagacccgtcccgcggttacttgaaaggaggtgaggtgctccttgggatctcctgttccgttgtagttcgggagtttgtaatctgatgagtcccggatccttagcttggcaatccgggaggtgaaaggagtcctcctggtttcgtcaattacgcgctctacttcgggggcagaaattgttgcttgatggactttggagctcatggctttgatttgatcttgcaggctccgaatttccggactaacaggaactgcttgctgtgagacgggtcgtggaagttgaactggagttctcaccagggaatcagaagttacatttccgggtgccgcgatgggttggttttggacaggaggctgggacccatcccccacttcactctgcataccgagggggagatgagttggcagggcgccgccaggagttgcattagctggggactctgaactgccgagctcatggaaatccagtcggccgcgagctcctgtcgtgcgcagagtacctgcagtgcgagtatctacccgatctgcatatgcattatgggccaacctgatctcggcgtaacttgaggtgagggtagtgaactgggtgttgcaggaatcctggaaagagaccaacttttcagacaacacgtcggtagcttgttgttgccggtcggttttgtcggaaagatccttcaacaactgcttgatgtcgtcgagagtcgttgcttgctcaccgtcagaagccatcaggatgatcgaaaaaaggcaaaaaggagttaaaactagaaatcccctctctctagcgccaaattgtggatgttgaatctcacaatcgaatatttgtctaagttcaaataaaagagatctttagtttcggtaaacttgcctcaaacgaatcaaagtatttgtttttcagtgttttttgtattcaaaatcttctatcctccttttcgaggttttacgctgtacatatatagtaaaaccgagctaaacaataataaatgctccactcgattcacggccgcgtatctcgccttcattactgtttccgttttctcaatcccactcatcacgtcccgtaatcagctcttcccaatcattaatgactctaccgttacttcgatcgaaggatcttgaaaccaggaacccctttcgagctgatattctcttaatgggccttctacttccagtctcaagcccatgacgtatctggcccaagggtttgcgagatcctactcctacaacaaaggtgtaatttctctgcaatatcttcttgaagctttgaaatcattacgcctttagacaccacgatccagatcacaatgtcaaacgtaccacctatttcagcgaacttattgtggattttcttgaaaagggttgttttgcctacaccacccataccgtacagacccatgattccgactccatcttccataaggcggttccatgcctttttgagcatgtcttcttgacctatcgtaggctgagtaggcctctcttcaacttcagatcttggaggcggctgagaaacctcgtcaaaatttccctccgattttagtatcttaacctcttccaataacaagaatacctttttcccatatttgtagcttgaacatacatattttgaacataaaccgcagagacacaacttttgaagctcaacgggactaacacttagcagatctttgcactctatatcaatgctattgacacggtcaagccatacctggacagcttcaagcctttgttgatggcgtgcctcctctctcgctaccttgttctgtacctcatgttgagttgctctgagatcttccatttccctctgcagggctctgagattcttctcgagggttcgaatataacttttaccaattaagcaatcaaagatacgactcatcgtttgatcaccaacagcaatttgaaaagaaaaacaactccccatggtgatgagaatagagagaaaacttttagtaagcaaaaacgaagctaaagctgaaggtgaaggtgaagaagtgttttagataacatcttgctccaatacgggtgggttgagattatcaaagaaagatagaagataataaaagacattgctgtcactgattttcagaccacccattttccatatgaaggactttgatttttctcttctttttttggtagctagagtccatacaaattagtgtctggcaataatatggcatctaatgacttttcaaaatgacatatctttcattttcgtgtagactattagagtaaaaattgaataattctttctttcatgtttggaaattagtatcttttaccaacccacagcaaagtggtagaacatatgtaagtcctttgtcgctctgatacctagtgttgtagctaaatgaattgatgatagaactgccctctagatcgcgaagatcaaaaagcatgcactgctgagtgtgtaaaaatatgtagtttgaaaaggattaattcaatccgttttaactttgaagtaatacgatacggaaatgatgaaaaacataatccaagtgaacaacacactggtgaaagaaaaaaatgcaaaagaaaagtagtgaaaaagaaatccaaatgaacatattacaaattacaagaagaaagagagaacaacataaaaagaagccatggactctgcttttagccagtgaacaacttatgactaacccacatcacttaagaagaagaagaagcaaaaaaaaaaacacacttgacaattgtggaactgaatgaaattgagaggcataacctctctgctgggaatatcccgaaaaccacatctacctaattacttattaatatctaaagaagctgaacttattttaaggtttctcctccatatatttcttgtttgaaaggaaaagaaaagttagattttttttgttggtgatttgatcattagaagagtagaatacacatctttctttaaattttgaaaaattgatgacacataatctgaacatctattctgaaggcaaacagaagccaagccagatcatttatgcactcacgtataaacacgtctgagagacgactggtaaagcatggaattgtcggattgtttaaattagactagtccatttagctttcctgcaatatatacatctcctagacatgactactttcgacatagagatgatgaagattctccatactagccagtgatgatgtattgaatagcttttcttgaaaagcatgaatatgcagagaagtgatgcagttcaccaacctttgatagcctaaatgtttgatccaaacctaactctgtaggtatcgtaatggttagaacttgtagatgatgctccaaggaccaagggctgcagctccttcactaagcttcagaagtagtgtctttagtgattctggatcagagaaagaagatggaagaagattttacagactttgttgaagacaaagatgtgaatgatttagacaatgaagatttatattgaggaaaccaggtgcaaataattggggggttttaagatgcctaatgaaaaaactgatgccggctcatagagagattcccagacttctccagggcattgaagaatttgatgactcaagggactagtgaagaaaacgaaaccttcattttgagttattgtttaattggaaaccctcatgaatcttttgcatatccaatagctttatagtgtggaatgaagctagagaagatgagaagttgaacatacagtggtatggatgtcaaggatttggtcatctgaaaacagaatgttctaccgtcaaaagaatagattggcatttgcgctggactcaaaatatgattaatatctaaattcgaattgaggaaccagagattgagactagaagagaaagtgaagaagattgagaagagaagacgtaagaagaagaagcgtgaaagagggagaagaagaagatgacttcggtttaagtgtgaaagggctttcgggccacaaatgtacataaggcccaactagtaagtgggtttagaagtttgcacaaaaccatagattatatggtaagtttattattcataataaatataaatataaattaaaattatattcaagctttattattcagaataaattaaaatacaaattaaaattatattcaactttattattgataataaataaaaatacaaattaaaattatattcaaactttattattcattatatataaatatacaatcattttaatcctcatgttcttcttcattagaactatcatttgacttcatctgagtaatcactaggttcttctagttgtcgattgtcttgatcaagatgtacgacgctttcgagtgtatgttctggaacatgaatctctccttgtgtgttttgtagtggtacttcatcagagactccaacaatacgacctcttggtaaaatttcaatgacagataaccaagataccgcagtttgccgaatcttgggatatggaatgaaactgacttgttgagcttgagcagcaaggataaatggttgaaacctttgatatctctgagagtcattaacatctacaatgccgagattgtgtttcctcacaccgcgcttgataacaggatcataccactcacatttgaataatatgcatttcaaattaaccaatcctggatattgtatttctatgatttcttgcagcactccgtaataatctgtttcaccacgtactaaaataccaaagtttgttgttgtccgatgttgacagtgagcttgcacatgaaaagcatatccacgagtgaaatacatggatgcagtagtaattctcgcaagaggaccttggattaactcgtgaaaccaaacgggatgtctctatcccataatgtacctgtaaaatacaacattactaattagataaacatatataagataaaatgataataatttgatatataaggattattaagttattctacatattgttttaaccatcccgcaaagtccctgtctcttagcttcgctatttctttctcagatatatcggaaaatgtttttttcacttgtgttatgaaatactgcaattagagaggaactagttagcaatgatattaaattaatatatatatatatatatatatattgtgtaaaagatacctttcaaatggttgaacatattcgcaatttagaaaaatatacgtgtgggcactttgacgatctttatcggaccaccaaatttttttaacttgttcacttagtcttccaatttgtgcaaatatatcaggaacacctgtaacaggatatacaggtgccacaccaccatcatcataccgtcttggggcccttttccgtgttccaactatatgcggaaagtagtaggaagagaaataagacgtttcttcggtcaaactccctgcaataatcgagccttcaactcttgcaagatttttagcttttctttttagatgttttatgaatcgctcaaatgggtacatccannnnnnnnnnnnnnnnnnnnnaagggatgcttcatgtggtaaatggatgggtagatgttccataacatcgaaaaataaaagagaaaaatttttctcgatgttgcacaataagatcgcaatgctattatctagatgatctattccgtcttccgtaagagtccgtgtgcaaagatcacaaaagaaagttccaataatagcagattatgagtataattacatatattgctaactaaattaattaaattatcacacatacctacaactgcctcatgaacattttttggtaatagctctttgaaagcaaatggtaataggcgttgcgtaaaaacatggcagtcatggctttttcatacccgaaaactttttgccttgctcaacattctttgaaagtttagacacataatcatctaggaatttgacatcagatttaacccactcaaaaagcgctgtctttgcttcagaggataatctaaaagttggaacgagaaccttcccatctctcgtaagatgcaaatcaggtcgcgaacatatatcaggcaaatccagtcttgtttttaagttgtctttactacgcccctgcacattcaaaagtgtatgcatcatgttatcaaaaaaactcatttcgatatgcattacatcaaggttgtgcctcaacagaagatccttccagtaaggaagctgcaaaaaaatgtttttcttgtggcaattgtgattaaccagatatcaatctggcatattggcggggatgtgccaattatccccacatgaaatatctttttaagaatcccaataatctatctgctcaagcaaggcttctccagaaacataagctacaaatggtgattgagaaattgaaccaactgaatcagatgtataattataagttgaacaaaaataagttgaataataaaaatgagctgaataagatgaataagctgcagagaattaaaaagtatgtcaaatggtgaccatttagctgaatagttaaatgtagagaaatattgtttaaaataaaatctaatgttgccgacgagaactacgtcgacttgcagaccaaatttgctcagcaatttaatcacggacgatcttcatataattcccatcttgtgtttcttcttccactccaacactttgatcatcattggcatcatcactcacattttgttgcccatgtgaatcttcactttctttatttgcttcttcaaagtcagcatcttcaatgttgttccgccgaataaaattatgaagtcccattgtagcaaatatggcacgtctttgtactgcaatattatatcttggaaattcatttaaaaccctccattgttttttccaaactccgaatgtacgttcaataactgaacgaagggatgcatgtcatctgttaaacatctccttgctattctttggcggttcaccattgaaaaactcttgtagatgatatcttgtgccagtattactttgttttctatatggagccaaatatccacgtttgttggcataaccagaatctacaagatagtatttaccttcagcgggcgtaggaaacataggatcatctcgaatcgatgttgataacacacgtgcatcgtgtgctgatgccataccaacaaaacaatatgtaaaaagcatatcgaagtcgcacattgccaagagattgagacttgcattttctttccggttcacaaatcgaatggtttcttgtcctggaggcatcataacaggtatacgagtcccgtctaatgctccaataaatccactaaagtaaagacaatatctcttatctctttgtagacggtttgctatagcttcaagttcttgggtagttcttggccgtatgtagtccaccgccatacattccattgctccaaacacttcatgaaacttccgacatattgtttcttgtgcatgaccaaatcttagaccaatgtcaccttgagtgtcattctgcccacaaatcataagaaagatcgcaacactctcatcaacagacatattttgcgtgtcttgtaagctatacctctcttgtaatatttcacacaaacgttgaaatgctactgtactcatccgtatcagcttttgacatgcgatttcattgtcatagatttgattttgaatcattcgccatccactacctatatcttgtgtcactggttctttacaaaagaacttgccataatattccatcaaaggagagatgtgggtgtctaagatttcagcttcttcaagtaaaatcagttttgcaatttcttcatctgacagattttcaattcctcgtagatgtagttctgcaatagagcttcctgaaaaaaaaaaaaaaaagatttgtcatattaaaatatagacatgaaccttaaatattaaaatatagacatcagacatgatataccaaagacaaacacacgtacatactcatcgtttaccaagaagaagtgtgaaactaagtcaaaagcattacacgtacgtacccatacatgtttccttaaactgatattatcacatggaataccatatctatcaacgccaacaagcttttccaagaactgaattttgatctcttcactccataatttcataaatccatcacgaacatcctcgtcgttcatcagcaacctgtttgcttcccaccaaaacttttcccatcggttcaaccgacaatatttctagttcagccaaagcatctccaaatgtggctttttgatgatgtcgtgaccttaagacatccagtaaacctgtacgagactcttcaagacgttgaaaccatgtcttaacttgagtctcaaagttgtttcttctatactttgtacgtctagtagtcgtctttcgaacacccaaatttgatctattggtacgggacggagaacttcgtccttgttcattagtagtgggtatcggtgatggagcagctcgttgaagatcctcatcagatgttagctctagaggaaattgactcccattatcatctgaagcttcatccacttctacgtcatcatcgctaggcccttcattttgactttgttcgaggtttgttcgtagagtatgcggagaataatgatcatcctgctccacatcatgttggctataaatttgatcaagtatctttttgaatagaataggcctgttttgcaacactcgcacatgtttgccatttctcccaaattcctgaaatataatgatacaactaattataaaatagaattatatgtaaatataaatagatattatatgctaatatgtttaaagaactcacctgaactctatctttccaccgacgacagggcaataaatcattcctatacaaataatcgaaatccagtcggccttagaatttgttcc

SEQ ID NO: 38558 - DNA, 12899 bp, Arabidopsis thaliana landsberg
  unsure (1)..(12899): unsure at all n locations
atggctaaaggtaagtcccaggttatgcatacaaagataagatctcatctacccaaagtataatcagtgaagatctaatggtaatctcatctctcatcccaaataagaacttaactctaccatttgcattcatgatcttttaaactttttcttaacccattcttttctttttctcttaactccaggagaagctttcttaactctttgatacttctagcgggtttggctttctttagcaactaaggttttgtttttaatctcttttaagcttagagctttttacccttcttcattagctagcaagaacccattcttttcttttacaatctcaaaccctttacgagactttttctaacttctttagcttacttctcctagaattcttttccctttttttggtaaacaatgaattcacccatttttctcttttatcccaacccatagtataagtccccacatagtcctatctagtcaggataacgcgaactagaactacatgatatactatatttgtcgttacaagcctaacactttcttccaagcttaatcaggataagacctcacacacactcacaagtgatagatggcttgaaagaaagcttaggttagggtatggggaaattgctctaaagatgagagtcagctgtttggatcaacaagtgtggtgaaatggataagaagatccaaatattctagggtaaccatgagtttaacaagcaatgcatagtatgataattaaaagtcaaatttatggttcaaattgatagggaatagcttcaaatcacagcgagtttcgactaaggaagatcaagtatatgaattcaaaagatggtgctgttttacttcaagatcaatcggttaagcactagacaactaacaacaagggcattgaaactatctagtgaacattgcaaatttacaaggctatgatcatcattatcccctatgcaagtgcaaaatgcaacaacctatatgataacattcttaaaacagccctattaatgcaaatgcaaactacatgacactctattttttttggaatcattttcgaaaattttcaaatttttatgggttttctatgccttagatgatgcaaaaatttgaataagaaaacatgaaacaatgttagatacatcttgaaccctcccccaaacttaaattacacagtcccttgtgtaataaaaattcaaagaagaattaaagagaaataaccacacaaagcaagaaataaaagaaatgcaataatatgtacagtgaaatggagtgatacctcaacatttagacgaagaggttctggacaaactcgtccaggcggtcttgtgtgtactcaggatcacgtgtggaggtgttggggttattggcgttgtactcggttgaccggtcgagcatgtatcccgagtagtactcctctcggcttgggtcagcgttcaaaaccaactggttcactggaccgggtgggcggctgttgaaacagcgatctgagaaggtggagctcctcccgagctcataatttgaggctcttggcgggtcgaaacgagcgtcccttcgcggtgccacactcgttgagttacttctcctaaactcgggtcgaggtggtggtgatctctgtcttcgttgcagctcctgaatctgaaccgccattccatccattgctctcttcatcttcctcaccttcttcttcaacccactgaacaacttcctctgaaacttgcccagacctttgagcattcccaacttcttgtgaacttgaccgggatctctctctggatcggactcagcataatcctcaaagaaaaactgctccgctgcagcttcgcacgaatcttcttgttcatcaaactgttcagcttgactgaactcagcttgctcaaactcgtcctggccatactcggccgagtataggcttcctgctcagcttcttcttcattccactctgctccttcttcttgagactcacttcctatgctcggctctgcttgtaggggcgcaaggacattgactaagatcgattgaggaggatcaaagtcaatgttgttcccaatccactacaagaaaacagacaaacaacgactacagaaagcgacaacagatgtagtcgtcgtttttggcgactaagtcacgaccgttttacgacgcagatacgacaacatgaacattagtagtcaattagtcgttattttacgactaaatatgttagtcggcatatactcgtatagtaacgactatttaacgattatattatagaagaaaaacgtttgtcgttacatagtcgcaaatggacgactacattttccgactgcggttgttagtcgcccaatcggcgactaacatacgacacatatctgtaatcgtaaaatagtcgcaactgagtcgcagaatagtcgcattaagttgttggaaaacgttttccgcattgccaagttggtacacctaatttgtttgttgtagtcgtaaattagtcataaaaattcgtctatataatcaaattcacgacactcttctttcgcaaacaaatcaaaacaacaatcaaaagaaaaaaaaagaaaacaatagaaatttagtttattctataatggcgggaaactacaattatggcggtagtggcggtttctatcgagattggatgtacaagagattcgatgaagtgacggggaatttgtcagccgaatacgtcgcaggagttgaggaattcatgacattcgctaatagtcagcctatagtacagagttgtcgaggtaaatttcattgtccttgtagtgtatgcaagaatgaaaaacacatcatctcgggtagaagagttagtagtcatttgtttagtcaaggatttatgcctgatttttatgtttggtataagcatggagaagaaatgaatatggatatcggaactagttacatggataggacgtattttagtgagaatcatgaagaagtgggtaatgttgtagaagatccatatgtggatatggtgaacgatgcatttaattttaacgtggggtatgatgataacgtgggtcatgatgataactatcatcatgatggtagttatcagaatgtggaagagccggtccgtaaccattcaaataagttctacgacttgttagaaggtgcaaataatccattgtacgatggttgtcgtgaagggcagtcgcagttatcattagcatctcgactcatgcacaacaaagcggagtataatatgagtgaaaagttggtggactccgtttgcgagatgtttacagattttttaccagaaggaaaccaggctaccacttcacattaccagaccgagaagttgatgcgcaatttaggacttccatatcatacgattgatgtttgcaaaaacaattgtatgctattttggaaagaagacgaaaaagaagatcaatgtcgattttgtggcgcacaaagatggaagcctaaggacgaccgtcgaagaaccaaagtaccatatagtcgtatgtggtatctacctattgaagaccgattgaagagaatgtatcagagccacaagacagctacggcaatgcgatggcatgctgagcaccaatcaaaggagggagaaatgaatcatccttcagatgcagcggagtggagatatttccaagagttacatccccggtttgccgaagaaccccgtaacgtttatctcgggttgtgtactgatgggttcaatccatttgggatgtctcgtaatcattcgttatggcctgtgatcttgactccatataatttaccccctggtatgtgcatgaatacagagtacttatttcttaccattctcaattatggatcaaaatcatcctcgaggtagtcttgatgtgttcctccaacctcttattgaggagttaaaagagttgtggtctacttgatttaatgcgtacgatgtttcattaagtcagaattttaatctaaaagcagtactactctggacgattagggactttccggcgtatagcatgttatcaggatggactactcatggtaagttgtcttgtccagtttccatggaaagtacaaagtctatttatctacccaatggacggaagacatgctggtttgattgtcaccgtagatttcttcctcatggtcatccatcccgtaggaatagaaaagactttttgaaaggaagagatgcttctagcgagtatccaccggagtctttaacaggggagcaagtttattacgagctgttggctagtgtaaatccaacaaaacgaagcacgttggtgggaacggtcatgaaaagaagatgccaggctatggaaaggaacataattggcacaaggaaagcatcttgtgggagttgtcttactggaatgacctcaatcttcgacataatattgatgtgatgcatactgagaagaattttcttgacgacagcatgaacactctcatgagtgttaagtaaaaatcaaaagataatatcatgtcaagattagatattgaaatttgttgttctcgatcagacttacatattgatagtcagggtaaagctccatttccagcgtatgcattaaccgaagaagccaaaaagagtttattgtcatgtgtgaaacatgaggttaaattcccagatggttattcttcagatttggctacttgtgtagacatggagaatgaaaagttttcaagcatgaagagtcatgattgtcatgtttttatggagagaatactgccatttatctttgctggactccttgaccggaatgtccaccttgcattatcaggtacaataaatgttgtttaagttgcaacacttttttaaacctctgatttaacttaaacatatatatatatatatatatatatatatattttaagaatttgagcatttttccgggacttatgttcgagaactttgcagaaaagtcgcgttcaaattcttaagcagaacattgttttgatcatatgcaacttagagaagatcttcccaccatcattttttgatgttatggagcacctgcctatacatctcccctacgaagcagaattgggcggtcctgtccaatataggtggatgtatccttttgcgaggtttttaaaaaagttgaaaggaaaagcaaaaaataaaatatatgcggccggatcaattgttgagtcatatatcaatgacaagatttcttatttctcagagcactactttgccgataatatacaaacaaaatcaaggtacgtaactaataataattaattaaacatctgcaccaagcaagttttctatgcgcaaaaataaccatgaattacctcttttggatcaggttaacaagattcaatgaaggtgaagttcctgtatatcatgtccctggagtacctaatatatttatgcacgtcggccgtccaagtggtgaaatgcatgtagattggctttcagagaaagactagcaaagcgcacatgcatatgttttaagaaattgtgactattttaaaccatttgagaggtatttttaatcactcgttgtttgtaaattttcactaagatcactttgataaatttttcctcgtttgtaaatgtagtatgttcgaagattatctttctgccaaatatccatgcttgcccgaaaaagaactctacgcgagaagagcggaagaatatcatctatgggttaaagaatatgtaagtctacatcaattttggttcattcgaaaggtgatcatttaatatatactaattgatattgtttatctattatgtaggtaacatactggaacactacttctccatttcctacttgggttcaagagattgtgcaaggacctttgaacaaggttaaaacttggccaatgtatttcacaagaggatatttgtttcatacgcaaaatcacggtgctggacgaaagacatgtaactatggggtctgtgttaaaggtgaaaattacgctgattcatcagatgaagcggatttctacggtaccttaactgatattatagaactcgagtctgagggtatcgtcaatttgaggatcacactttttaagtgtaagtggtatgacccaaagatcgggagaggcactcgacgaagccatagtggcgttgtagacattctatctacgaggaaatacaataaatacgagccatttattcttggtacgtaattattcttaagtccaaaatacgtttcttttttaattattaataatctatctttgatatatgtatacaggatctcaagcagatcaagtttgttatattccgtatccatatacgaagaaaccaaagaacatttggctcaatgttctaaaagtcaatccgaggggaaacatttctggagaatatgaaaacaatgatccaactcttttgcaaacagaaaatgatgatgatgttttgctcactacaattgaagatcttgttcttgaaaccccggtagccaacttaaacccaataatccttgattacgatgtcggggatgctgaaccagaagacgaattccgatgtaatttatcgtcctcggacgaagatgaagtagaagatgaagatgtataactgtgttaatatatgtataattatttgaataaatattagaatgaattttgtttcataaaatcattgaacttttttatgatatacaaatatttcttcacatctagaattatatcaatttaaaagtgactattatgcgactaatgagcgacgaagataagttttattgggcttctaaacgttgaaatccaaacccattaaaatcggcgacaaaacgacgactattatgcgacaactgtttgatatgttgggctttaaaatttcggggcccaaacccattagtataggcgtctatattgtgactaaataccgacaagttttgatttgttgggctttgaaattttgaaacccaaacccagtataattggcgacaaaatgacgactattcaacgatacttgtttgattagttgggcttcaaaattttgaggcccaaacccaaattagtatgcgacaattatgcgactattatgcgacctctattgtgttgaaaaccctaaatcgagtcatttctcttcgagccaaacacttagccatttcttcttcttctttgtcttcttcgtctcgcaaaaccctaatccccaattctctttcttcttcgatcttcttcttcttctttctaagatcgatcgatcttcttcgatctctcaccttaaacctattcgatccaacctcctcttcttcttcttcttcatctcgaaaaccctaatccccaaaactctttctaagatcgatcctttctccttgtagatcgatcttcttcttcttcttataagatcgatcgatcttcttcgatctctcaccttcaacctctccgatctgcttcgtcttcttcttcttcttctcttcaatctcttcatttggctcactatcatgcctatcgccggtcgaggtggctcccggaagcgtaagacgacgccgaacgtcacttagagagccggcgccggcggatcaagacctgcaaatcttcctccccaatacaacttcactccggcgccggcggttcaagttcctgcgacggagtcagctcaacaacatggaccttcaacgtctgcaccccacgtccgcaactatccaccgcctctgcaactcttccagaactcaacgactcaaccacaacatcaagctcctccgcctctatctgaagaggtccactacactccgccgccaacagcgccacctcagcaaactcctcctcagtcgcgagattcagacgctccaggaaacagccacccgtcgtctcaagggaacaacttccaagaggaagttcctgggacgttgccggagctacaagaagactcggcgttggctctgcaatcgacactctctatgccaaacagggagcagtggtgttgtgtcttgtctccaattcccaaacctaaaaccgagtggtatgttctcttcctctattttattctagtgttcttagcctgtgtagtgtaactcgtgttatggtctgtagaatggcttgttagggtttgtgtaacatagtagaatctgcctttgttctaaactcgtgtgtgatcttgttaagttcttcactttgtctataatcttgttaggttatttattgtgttctgtggtgaatcatgaacataattgtggaacatttgttgattgttgaacttagcatgtttttggctttgacattgaggatctgtctttgttctatacttgtctataatcttgttaagttatttattgtgttctgttgtgaatcatgaacataattgtggaacatttgttgattgttgaacttagcatgttttcggctttgatattgaggatctgtctttgttctatacttgtctagaatcgtgttaagttatttactgtgtgatatcttgttatgttgactattgtgttctgtgtgtgatcttgtcggcttatacttgtctagaatcttgtagaatctgcctttgttcaattatatagtctactgtagttgtagtgttttggattttaaacatgtttactttctgtctgtgttgcatgtgtttggaggtttactcgcgacagaggatctaaattggttagaaagatcacacggatctttactcaaaagttcaatgctccttactataaatggtcctctgtgccattggctaaaagagagagactgtttttagagttcgcggtaagcttcctgactctttgttttgttcagtctttgttttattgtctgctcaagttcagttcactaacttcttctttttttgtataaaactcaccactgggatcccttaatcatagggactgtccaatattacttcaatgagatcatcaagaggcgcttgaaggacatggtttgcaccgcaaggagaactcgagagcagcctccatggattggagaaactctgtggggaacaatgtgtgcttactgggacacagaagaagcccagaaaaggagtcagacctattctaaagctcggctctctgaccgtaatgatctcggtccacacatccactactttgggccaaagtcttatcaagaaatccaagatgaattggtaagtgtttcagcatcctttcatgtcttttagagtcgttcaaatcataagttagagttttattgtgtgtcttgttcagttcaagcagtctttgacttgtgaggatattgatctgtgtttgtgataagtgtgtattttgcatgttttgagcatccatttgtcatcactttagcatcatatcatcactgttttataaaatttcacatcatttgtcatcactttgcatgtttaggatagttttgcatgcatgttgcatatttgcgttgatttcaggtgatttggagctgttgacgagctatctggaagaagcggacctgatcatgacaaaccactcgacccagaggtcgagtaggagcttcaagatctcaagagaccactcgaccaccaggtcgagtagaggacatcaccacttcacttcaccactcgaccccgaggtcgagtgccctcatctccatcaccagaccatcactcgatcacttcactcgaccatgaggtcgagtgtcttcacctccatcatcagaccaccactcgacctcgtcactcaacctggaagtcgagtatcttctgacaccactcgactgcatactcggtgacaagcttcagatccttcttcattccgcactcaaccagacacacgagcacaaggaaaacaagaaggctccagctattcactcgacctctcactcgaccacgtgggtcgagtacagttcttaacctgtcccaatacttcgttgttttgagtattagggttttcaggatatttggctataagtagcatgtacttctcattttcgcagacaagaagttttttatctaattttatttccgcagaccttgtgttctagactttttgtaatccggatttctctttatctattcagtattcagtattcagttcctgttcttgatttcgtttactgttgttcattctgttatcatcctgctgttacattgttgttatcatgttttcaatttgttcaacgtttatgctttctgttatgatgtctgagtagtgaataggtttctgaggatgggttagagtagtgtagaattctcggtatgctaggtgattgagtattgattgatagatcccttctggattagttgttcttaatgcctattgctttctaatcaactggaatttgagctgagacatttccgcgcccaaaaggtgttcgatgaaatgtctcaaccactaattccagagattcgtgaccctgtaccaaggtattgattgcagggagcattttggctttaacttgttgattcgtaatgcctgttaggttagctctcgtcaatggtgattgagtctgggactaggttaacttgagggtctctgttgcggtggcacttagatttggttaatgaacttgttatctagggtcaatttattgagcatgtcaatcacctgtaaactgaggaaacgaaactactcaattaccccatcctcgggaattctttatctgattgaattctttgtttactctactgttgtttactgcatcttgttatctgtcgcttaatttctgaagttctttcttgttacttgacctcatactcgaccacccagttgtctggcaacagactgtgcagtcgagtatctgtgttttattttctgtcttttactcgacctgtcactcgacctcacccagtgctctgcaaggagctgtgttggtcgagtgttttattgtttctgcttgaatttctattttctgcatgttcacttaggactgctagaacacaccaaaacctgttattgcttggcttgacttagtgatttcagatcacatcttgattgttagcatcacacccatttggattgacaaccttcagtactacaacgacatgatagtgctttaggtttaattgactaaaaaaccgatcatcaagtgttgtctaaacactcctaattcatctctaactctgataattagtcatatgcattggattgtgacacattttgaccatagaaacactaacaaagctgtttactgcttctaagcaatttttcgttggttttatcctcttttaggacaaaatgggtataagtgttgtgtaacaactccgaatacatctttaactcttataattagtcaaatgcattggattgtgacacattttgatcaaagaaacattaacaaagctattgactgcttctaagcaatcttttgttggttttagcctcttttgggagaaaatgagtataaatattgtctaaacacccctaatccttctttaactcttctaattattcatgtgcattggattgtgacactttttgaccgtaaaaacactaacaaagttgtttactgcttctaagcaactttttgttggttttagcctcttttaggagaaaataggtaaaagtgttgtctaaacactcctaatccatattttaactcttataattagtcaactacattggattgtgacacattttaaccataaaaacactaccaaagctgtttactacttctaagcaatattttgttggttgtagcttcttttgggagaaaatggatataagtgttgtctaaacactcataatccatatttaactcttataattagtcaaattaaatggattgtgatacaatttgaccatggaaacactaacaaagctatttactgcttttaaacacccttaatccaactctaactcatataatctgtcaaatccatttgattggaacacattttgacctagaaacactaaaaaaacgatttactacttttaagcaatgtcttgggggcttacgcttgttttaagagaatatgcgtgtcatgtgtcaccacgattccatctctaactcttattattagtcaactgcattggattgtgacacattttgaccatagaaacactaacaaagctattgactgcttctaagcaatttttgttggttttagccactttcgggacaaaatgggtataagtgttatctaaacactcctagtctatcccttattcttatgattagttaaatgcattggattgtgacacattttgaccatagaaacactaaaaaagctattgattgcttctaagcaattttttgttggttttaatcgcttttggaagaaaatgggtataagtgttgtctaaacactcctaattcatctctaactcattttattagtgaaatgcattggattatgacacattttgacgatagagacactaacaaagctattggctgcttctaagcagttntttgttggttttaccctcttttgggagaaaatgggtataaaggttgtctaaacacttctaatccatctttaactcttataattagttaaatgcattggattgtgacaccttttgaccatagaaacactaacaaaactatttactgcttctaagcaatgttttgttgggtttagcttattttaggagaatatgggtatatgtgttgtctaaacactcctaatccatgtctaactcttataattagtcaaatgcattggattgtgacacagttgaccatagaaacactaaaaaatctattgaatgcttctaagcaattttttgttgcttttagcctcttttaggagaatatggatataagtgttgtctaaacaatcctaatccatctctaactcatataaatagtcaaatgcattggattgtgacacatttttaccatagaaacactaacaaaactatttactgcttctaaacaatattttattggttatagcttcttttgggagaaaatgtgtataagatcctatttgtttctccatccaaatgatccacccaaatggagataaaaaatgatatttgtttttgacaatttaacaaacatttggatggatcatttggatgatacacttgaatgacattttaaatttagacaaatttatgaaacttatttggatgaatttgattgaaccatttagatggaga

SEQ ID NO: 38559 - DNA, 7802 bp, Arabidopsis thaliana landsberg
  unsure (1)..(7802): unsure at all n locations
ctcgacacttgattctgttactgaagaacttgtggaactcaggatttattacaaagctcaagaggataccattggagagctaacttacaaaatggaaggactgaaccatgcaatcttggaacttcaaaaaatggttacaggctacaccagttttgaatttgaggattggtcaaaggaacttggttcagaagaagaagactactctgctgctcagaaaaagcttattttgaagaaaaatcaaatgagtactcatcctaccatatctcaagagaggatgcagagtatgactcaagcactgaaaattcaaccactgaagatgaggacttctctgttcctctcttcaacctcttttctgactaagctctgtaagagtcaagcttagtgacttaaaacaagctcacttgggaggaagtcccatgtctatccatgtatataactttctatttttcttgttatttttgatgtttttgtttaagtgtttcaggtttatttcattgaccattatggagtcaacggtcgagtaaattcaaaccatgtcaagaaagatctcaaccgttgatcgagtagaatgaggaggagtgttttgagccgttgatttgaatgaccaaatgatagaagcatcaccaccgtttgatcgagtgatcaaaagcaaagaactctcaaccgttcgatcgagtattgcgcatttcaagaggatgctcgaccatttactcgagcttgaattatttggagaccaaggtataagtcgcgtgaccccacttgttcccccatcactccattactctatggacaaaacaattacccacaccctcactgtttccaactcgcttttctatcctttccaaaagaaaccaaagaccagccgccttcacccattgaaatcgccaaaccatctttgaaactctctctttcatcatctcatttttgcaaatcctctatctctcatcaatcatcaaaatctctattgcaaactctccctttcactcctcaagaattcgttcacatcttcaccatacctcaccaaacttactcgatcattcccaattccatccccaaattttcaatcggtttttaatctcaaactccagtcaccaagagccaaatcctttccactttgatacctcttggagaattgttcctgattgtcctgtagaagctcatcaccaaactccatggattcaagaagaaaggattcatctcggggtaaaagatcctttgttgatagcgaagaagtagcagcgatcgacatgggtagcatgactgagcgccaaattcgccaagctcgctgtgctcaaagatcaagcttgattcaatgggaaagttcaaatcgctcagccatgcaaagagaggaagtagctaggtgcaagaggattgttgaggctgcggaagaacaccaagaagaggcagtctttgaagaagcagtttctgaggaagaggttgagatcatcggggatgatacaccaacccctgttgggagaagaaaccggccaagaaggaagagagagccaaccccaagcgagtactatcaatacttgatggaattgaagtttgagggaactagataccctcataaggaaacaatgcaagagattggtattcgtggggatgtggaatacttaatagggttggccaatctcgcaacattcatgagctgccaatttgggggatttaaagaggagcactgccaactccttgcaaccctcaaggtccactttcatgttgatgactcggagaaagaagaaaggggaggtctcggttacattacctttaaggttaagggtgtcgagtatgtcctggatatcagccaccttgatactattttcgggtttccaagcggacagggaatccgccaagactatgaccaagatgagctactctctctttggacaacaatcgccggtccaaagccctactcgcccgccaagagcaagacttattcaattcgaagtcccgtgattaaatacctccaccaatgcatcgccaacaccctttttccaaagaagactaccggatttgttggtgaagaagagctatgcatgattgatcaagctttggtcttcattctgagaaagaccaaggatgggaggaagatggcgggtgatagagcagacacttcgctgactattgttcttttggaccacctattgagctatagacagtatgctgcaaccatccttcgcgaaagtctttgtgttggtggtctcttaacatcaatcctaggagctgtggggatacacttgggaacccctgacatgttccccaagttcctcgacctcgattatctcaggggaaaggattatcttgacaagacaactccggcggatcactacatcttcaagttcaaccatccggagcttggaccttctttgttacccctaccttgcgagaaccaaacttctgttaagacaaggcgcaacatcaacttcatgccatctccctctgccctgaacatcgacatcggaggagctagagaagatgaaccagagtatactcaagctgagtatgagcaacaagagtattatcctgttgagtttgagcaacaagtcgaattcgagcaacatagcgaacaaccggagcaagagaccaacaaattcgagcaagctcactatgaagaagatgctgatcaaggaggagatgagatagctgtagttcacaagaagctcagtgtgcttgaagagcttgggaaccttcataacaaaacgatgaaaggtttcaaaaagaagatgaaaccatgaagaagtcgctgaagggtatggctgctcaaataaaagacttcctgaacaagccacggcccccgtctcccactcccgaagtaagaagaagcggttccacgagctcggctgcaaggagggccgaaaggatcaatcaacctcgagcttcattatttgagcctcgggaagtatctccgagttgagagagccaaggagtaggcagagaagagcatccacacgctcgaccaactactccatcggacaggacaagcaaaaccctcccgcctcaccatcagtccttgctaatactcaagagagtatggacgatttcgtctccgtctacttcacctgnnnnnnnnnnnnnnnnnnccaccaccattgtctataccatagctttttattctctttgtttgttatgtgttttggtcttgaattctctttcagatttttattacacaagagattgtgtaatttaagtttgggagagggttcaagacatgtttaacattgtgttcacttttcttatttcatattctacatcatctaaggtagagaaaaaaccacaaaaaatttgaaaattttcaggaaatgatttcacaaaaacataatgtcatgtagattgcatttcatcttaggattgtatatagagtgtttgcttttgggattgctcatttgcataggggataatgatgacttcaaaccgttaagcatgttttgattcaatgaagtaagttcaatgcccaggttgttaattctctgttgcataaccgattgtttctctgaagtaagaccgcaccctgctttgaatttacaacttgactatactgctttgattcgaaactcgcttatcttatgccattccctatctattagaacctgaactgaatttacaattatcatgtctatgcattgtttgtgaactcatggctaccatatacatacttggattatcttattcacttcaccaccttttgttaatccaagtagctgtctctcaattttagaggagtttcccatacccttaccctagccttatttcaagacaaagatcatttgtgtgattgtgaggtctttttcgattgagcttggtataacatgataggtatgagccgacaagtgcagtctttcatgtagacctaccccacgctttttgggttagctaggactaggtggagactcgtatttgggattgggattgtgcatggaatgattggaaaagagaatgggaatgaaaaaaaaagaaaaaaaaagagagtaaaagtttagagttcttaagggggatacaaaaagtgttagtgtagtaaagggtttggaattcaaagaagttaggcattgtaattcaaagaaaagggtaaacgccctatatgctgagattagaagaaaagccttaagtgtgtcaaagtttaaaaccaaacccgctagactcttgaatcgttttaaagaagaaccccttacaacttgaaccaaaaagagaaagaatgagaaaaagggtagagttaggacacctataggactgggatcatcttctgagctatcatacgatatcattgggtagatgggagtccgttcttgtatgtttccattggattttacctttagcattctactaaagctcaatcattcttgagagatcccttgttactaaagcttattctttagaggaccatttttgtctcttgaccctttacccttagtcaaatgagtttaatatgcattgtatagtatgatccatggttcttgcttaatgaatgttaaagggaatatgctgatttgaatgcttgaatagactaagttaatggttaggttgtgttgtgaataagatggctcaagtttttaagtagagatcattcaacctagcactttagaactaccaacatggacattgagaccatttattttacatgcatattttggttctgaatccccaccttcaaacctcactcctaacctagttctatttgttgcttgaggacaagcaaagagctaagtttgggcgtgttgataacactagattttaaccattttaagtccttgtttttcatgcatttagcttagtttcatgtcccttttcatgcattcttagtctcttttccttcctttgtacattttgcattgcattgcatagcatacttgcattttgagtgttttacaggtgaatcaggtacttttggactcaacttggacatttctagcacaactagtggactagctcgagttcgtgggatcaaaggaaggacttggagtatactcgacttttctactcggctggaaatcgagtagagcacacaagggagaagcaaggactatactcggccaagacactcggctgaagctcgagtggtgcacatgaggaagaagggaagctgctcgaccaagttacttggcctagaccagagtgatgtgaccaaaggaggctgctcgactttcttactcggccaagacccgagtggtgaagcgccgacttttctattttgtctttttcccaattagggcatcctaggattgcctataaatagaccttttatgtttttgcccaagatatcttagctgtgtctgctggatattagggttctttgattttcttttgcattttctggttgttgtgttgagaatttggatttgatttcttctgcaaaattgtttatctcattgagatctatcttttgctaagtttataatgatttctgggttttatgaattttctgggttttattctatgatgttcttgagtgttcttgagtagtgttcttcagagttcttgaggatgggttaggtttaggtggattcctcttttctttagctagctaagtgtttatatgcatgattcccttctgttttaggagttcttaatgctattttctttctgatcaattgaaaattgatttcagactttctccatccaaaagatgtttgatgaaatgtctgaaccaactaatttctgagatttgtagattctagcccaaggaattggatgattagactgcttattgactttggtagattgttgcttaaaccctgctctgctatgtttcatcaacgagagttgagattaggaagtggtagagttatgagggtctctttgacgagagtggattgacctggttttgaatctatcgtctagggtatctgcctttcgcctgtcagccacctgataaaccctagagttgcccttatcaatgaatcaatccttaggacttctattcttcttagatttatatgtattcaccccatgattgcagttttattcatatgttatatgtgtcacatgttgattgcattttggttcttaaatttgttacctcttggttctactcggcccaataatcgagtagggctcttaaagttctcatttttgttgtttgaatcctgatttaggattgttattagaaacccaccatcactataacctggcttgacttagttgcttttgtatacatcttgattgctatcaataacaatggactggattgacaccccctatagctgcatcgacatgttagtgtttaaggggaattgaactgaactcacacagcattcagcatatataagtaggcgtaaaaacctgcttatcacaaagtttgctcagccgggcgtttaccgacctttgaccgcgccaaggactcgtgggctagctatgagcccaagcaacatagcttggagccgaattcttgaggaggagagcctaatttagatcccttggagccaaagctactccttccacctgtcatcatcctatagctgccgcatatgtgtcatcacgggcggatgaaacatatactagctgactcgcccttgttaccactatataagctcgatcggcctaaagaattttgtagggggagaaagagagagaaccgaaaggccgtcatgttattgagtgatcgtatgtaatcgagaaaacctgccaagaaatagttgaaaagaagtgttatcatcaaaggagctcggtccgtatcatctcaaacaccttgttggaaactggagtgagttccggatatggtttggttgcatgattatactatttcattcattgattggttttatgaattacatgagtattgattaatagtgtgaatgatagatttaggccgcatatgtgatcttttagattcttatgcttaaaagcttatgtttgggaggttatgttgagtaaagatattgatgattctatgtgtttgattaaccatatgtttcataatatcttaaaatcttgggtcttggtatgtggtccttgtggtaggaggtagagctactcactatgtgttcgaaccgttcttaaactcaaatcactaatataaagtaaccggtgatgtcccgtgctactcactatgcctagagctaaagatccccagtgatgtgccgatgaatacctaattctaaaaatgcattattataaagtttgattagttcactaagtatctaaaccagagccctcccatgagcctacatgttcgtttcttaaatacttaggcccatctatgatagttctggtaacaggtacctatggtgggtatacctattatcataaaatcaataactagttaattactttagaactagcatttagaacaatcaaagatgaaaaattctaaatatattatcctaacagggtttttgatctactaattcatctaaatccctaatgagaatcccttaaccaaacaagagaactactcaagcatgattatagaaaaaccaaaacatgattgaataagaagtcaatgatggaattaagaagagaaaagagtttagaagaatcttctctaaaaggagtctccataggattttgccccaaagtacataatagagaataatagttagatctaaacaatgaccataaaaatcaatatataagttcctaaaacgtgataggccttctaaaaaataagggaaagttctgggccgattttggaaacatcaataagttgcgcgattgacttgctgtcaggtattggtgtcgctcgacaccaggggttgtgtcgatcgacacctacgtcaatttttgtctccgaattgctaaagcagcttaagttatctgatttgcaccagaatgctccataatctccaaatgcattccaagcatttaaaaac

SEQ ID NO: 38560 - DNA, 7777 bp, Arabidopsis thaliana landsberg
accctaaagagtcaatgaaatgtgtttctttcttgtgggattaatcaattcactctttaacacttctttataccattgaagaaattagatgaaagagtcacgagttgcttaccaaatccctcacaagaattgagaactgataaaccaaattgagaagattaaatatcacgtctccttttgatctctattataattaatcgaaaataaaaataagagttttcaacaaaacgtgatcattggtttacgatcacttgcaaagtcaaacctaaaacgtagcattagtacactaaccttaaatactaattatatcatgcaaaccctaatgtcattacctaactatacatgtgtaatgtgttcaacagatcttcttaacccacattagatcaatattaaacaataaaaaagattcttatatattctactacttacttcttcttattcccatccatatttttctgtgccttaaggttctcaactaatctcatttaatttagctagcacacagagaaacacacacgtatataaataatatgataacacacaaaaagactcatatatataaataattagagtcattaaatgtggattcatcattaaatgaaacaactcttcttctctgtacaatttctcttcacaccttcaccaaattctttgacttcaaaaatcttataaaatttatatatctccaaaaccataaaaccaaaacgagttttcacaaataaattacttagttgaaatttcaaatctcattcaattagggtacactctctcaacaatccacattaatgagggttgctgcttctgatggctagcagtaacagttttatcgcctccacttcttaatgccatctttttcctcttccctctccttctctatatatattttctgactctgcaaaaccttaattcatccatctctcaaacaccatttttggaaacaccatttcacattccttaaacttttccattttagtatcatttcatattcattgatatggatgtctccaacacgatgctccttgtagctgttgttgcagcttactggctatggttccagcggatctcaaggtggctaaagggtccacgtgtttggccagttttgggcagtcttccgggtctgatcgagcagcgtgaccgtatgcacgactggatcactgagaacctccgtgcgtgtggcggcacttaccagacatgtatctgcgccgtacctttcttggcaaagaagcaaggtctcgtgaccgtcacgtgcgatcccaagaacattgaacacatgctcaagaccaggttcgacaactaccctaaaggtcctacgtggcaagccgtgttccatgacttcctcggccaaggcattttcaactccgacggtgacacttggctcttccagcgtaaaaccgccgctcttgaattcaccaccaggtacgtacttaccttaaccggtccggaccgggcattctttcatgcatgtacaattcacaattggtccatttgaaccaaattaaattttcttttcttagttatgtcttctttggttcggttatgtaaattgtcggctaaattaagggattggcttctgtgatgcaggacgttgaggcaagcgatgggtcggtgggtgaaccggggaatcaagctccggttttgtccaattctcgaaacggctcagaacaattacgagccggttgatctccaagacttaatactacggctcacattcgacaacatttgcggtttagcattcggtaaagacactcgaacctgcgcaccgggacttcccgagaacggtttcgcctcggctttcgaccgagccaccgaagcttctctccagcggtttattctaccagagtttctatggaggctgaagaaatggcttggactcggcttagaagtcagcttgagccggagcctaggagagatcgatgggtatttagatgctgtcattaatacacgtaagcaagaattgctgagtcagcaagagagtggggtccagcgtcacgacgatctcctctctcgtttcatgaagaagaaagatcagtcgtacagcgagacgttcttacgacacgtggcgcttaacttcatcctagctggacgtgacacgtcatcagtagcgttgagctggtttttctggctcatcacgacgcatccgacggtggaggataagatcgtccgcgagatatgctccgttctgattgagacacgtggaaccgatgtatcgtcgtggacggcggagccgttggaattcgatgaggtggaccggttggtttacctgaaggccgcgctctctgagacgttgaggctttacccgtcggtgccggaagattcaaagcacgtcgtgaacgacgatatcttaccggacggaactttcgtaccggcgggatcgtcggtgacttattcgatctacgcggcggggaggatgaagagcacgtggggagaggattgcttggaattcaaaccggagaggtggatctcgccggacgatggaaaattcgtgaatcacgatcagtaccgattcgtggcgtttaacgccggacctaggatctgtctaggaaaagatctagcgtatctgcagatgaagacgatcgcggcggcggttttactcaggcatagactaacggtggcgccgggacacaaggtggagcagaagatgtcgttgactttgttcatgaagaacggacttttggtcaacgtgcacaagagggatttggaagtgatgatgaagagtctcgtacccaaagagagaaacgacgtcgttgttcttaacggaaaatgcaacggcggtatcggtgaaggcgtcgccgttaatgcggctgtggcggttgccgtgtaatgcagcttctcgggttgataacatttttatagtaattaatacatacatttacctttgggttttgtgattgttgtgtaaaacagtaaaaaaaatgatttcgttgtgctatgtaaactttgtaagcaaatactcttcttcctaaagtaaaaaagtttgattgtttttgttttggtttctttttctccatccccatcaaattgtaagcttcaaaagagtcaagttccaaaaaaatacatcttttctttaacatgttactttatgaaacagaccagcgaaccattttgatctcactatcagatcaaatttataagcagagaaagaacaaatataaagcttcctcacacaatttcactgcagctattagtttcttggttctagtcgagaattttttctccggttgcgaacaagttccagaccagagttccaattagatacagtgcaactgctactttgaacacatcatcccatgaacctaaatgtttaggtaaaaaacaaacaacatggttaataatagtcggaagtactataatttgtccaccttatggttggcaagaatgtgaataaagatagaagatacctcgttggaggatgtaaccagtagctgcagtgccaaagacaccagctaggactcctgctgtgtttgatagtcctaagagtacaccctgcgagccaagccatagttaatgaagtggaacaagtttggtgacaaagtaataaaagagaaagaattgatgtttatctcacagcgtatcgtgggccaatgtcttgatgattagagtagagacccgactgagagaatgcatcagagccctgttggggacaacatgagtccttatgtcagagctgtacacaactcatgaatttttctaagggtgacaactgtatctttttgtagccgacattgtatttaagttggggtttaattatagttgtactctcacaagaataatcttgtgtcggcaggtgtgaaataaaaaacggcaaacatgtttttaacagttccaaacttatccataattctatggctctttcaatcatatgatctattgacaccaatacctgactgcatgccatgcagagaactgccattgctggagttttgacatggctcagctgactcaggaagaaggcagggcctagaaaaccaattgattgcataatctgcaataatcaagagtttattagtcgtgagtatcctttggagtagccataatagattcatgagagtagtttattggtataaagggtttgttgtcactcctttaactgaaagcagcataacaagtttggccttttgaggtagtagagacatgtaaatgatcagaaagtgaaagagtgtatttcttgcctttcgaacgtttgtaattgaaagacctctgctcacaagagtatcagcaatccaacctccaatattagcaaaaacagccatggttagccatggcaaaacgcatagtagcccggattcagtgaggttgaacttcaagacctgcagcgtgatcaaagaccaacaatagagaggagtctctttacttgttcacaaaaaatattaaacagtaaggatataactgaagctgaactccgtgcctgattgtaatatgtgggcatccatgtcaatagtatgaaagttccccaattatggcagaagtgggaaattatgagagcccagactgggggtttagacagtattagcttccatggaatcactgtaacaggttcccttggtttgctacctcccagtataacctttttttcttcttcacttaggtccgggtcatccttgggagagctatatgcctgagaagaattaaaaaggtgtttaaaatataattctcttggaggttttgtagatctcagatatttagcttatgtcatgaagaggagttcatacaaattttagccatagcaaaaaccatatacttccgagggagccaaacgagtagaaaacagatggccatccgaacttggtgattagcataggagagaatgccaatcctgtgacggaaccaagatacatgccactatagaccagtgcaagcgatctgcttctctctgagacagggatccatttagaaagcatgttgttcatagcaggcattgcaacaccctgaagcaaaggtagacagaaccagctagtgagaagttgtacaggtctgagacaagtatagcaagagaaaagaagaacagaagaggccaacctcgccaatgcccatgaacgcccgcactacaagcaaaaaaggaagaccaagtctagcagcaataggtgtcataatagtggcaaaggaccaccagacaacaccaaaacctaaaacaaccttcccgccaaacttatctgcccatatacctcccagaatctatgtccaagagaagatgagctaaagttagaataaatataccctctctttcgagttctataaaagatcagattctacagagagtgatagtattagacctgacctgagtaagtaaatagccccagaagaaagaggactgaattaagccaacagttgcactactccagttatattcttgtgacatgggaagaattgcaatgctcatgttcacctgccacaagcatctctcattaagtaatatatatcttacttcttcagataagtagagaaaataagcaagatatacaacttacacggtccatattgcaaagaagaaaagacgaaaagcataacaagacgatcacccagcgtctaggaaactgctgccaccatggagatgcgttctgtagatttccttcaactaaaatagcttcagctgagccatcagccgatggcacaactccttccgtgatatctgactcctctgatttgtagtaagcacgagatctgttgatcttgatactgttcctaaacctaattacactgtccattcttggttgaaggaaagatccaaaacttcttctcatgtgtcccgattcatgatgtaaactagcttgcagaggttgatgattacggcacaacaatgctacaaagattaagaaaatgcttaagcacaaattgcataatatagctaggtagagaggtataaaagataccgatatataccatttggaaaaagcttggaaacctctgcaccactttttccaagtctctgacaaccattgcctacaaagtaaagcaatcttagcaaatttggaagcaatgcacacattagtgatatcgttcgctacacagaagcaagctacgctcaagcctaatcactaacataatccgataaacaactaaaaagccctaacagattcaaaaagaggagggggatagatatacctgagccgatgaaggaaccgaagttccgatttgaaatcaagccaccgagggccatgttgcttctcagaacaaaaatgtcaagggaagaaggagaagaagaagagagaaggattcaagcttcttccatagaagcggagtaaacgaaggaacctttggataaagccgagagagagactgagagacgctgaagcgggaaaatccctctctattggggaaggaaggaagaggaaaggggggtcgatatagtgacacgtggcacatcatcttctactcgttggaacctccgttctgttctcatttcatgaatctacccccacgttgcaaagaggaaacatgggtactattggttaatggcaggggtattattggaagttattgtggaaaatatctgagccgttaccgccgaagatgacgtcacctttagagaaatagagagagctgacaaaagaaaaaggtaggttggttaatatattgggcttacaatctcatttgtatttttgatgggcttaaaaataaaattgtcttcaacatttttttgtttccatttgttcaaagttccaactgctgaaaagtgaaaacaaagagacatttattgctaaagtgcagcccataaaataactaaaatactaaaattaagcactaaaattgtacaacaatgtcattagtttttactaaaatcttgaggatttgtcattttgaacacttaaaactgtatgtatatataaaatgtttttgcaaaatatgtactttaaaccaaatactaaatcttaaaaacaaatctaacagactatatccacgtattaaatcgtatctattattaattaaaaatggcaaattcacaaactatatggaaaattgcaaaatcaacaaatgtcactttcaaaagtggctttctcataattgattctttaaaaaaaaaaaaaatgagacatatattaatatatataacaactttggtgactataagctcttagagtaaaacaaagtgactatattaaattttgagaagaaaaataatcctggaaaccttaatgttttatgatacaattttacacatagatatataattacatactttgaccacacacatatttttttttaaaaaatctccagtcagtggctatttgataaagccactaaaaattcttgaccaattttgtggccactatattgcttatagtataaatcattcacaatttggatcataggttttattcatcaattttgtccaaaaaaaaacttaaaattttgtcaaaaaactatagtataaaataggttttgtcaaaaaaatttaaaattatgctatttgtgaaaatttctcttttatctatttttaaattactttgttaattaatagtgctatattcttaattcttgtataaaaatgtgttattcttgcaaatcaccctttactttttctgatatattttccaaaataaaataactcttcatcttcctcactcactctctctctactccactcttcatcaagcgttgagtcatcgccgtgttgttccttttccttccctctctagcgtaagctccagatttcttctattctctgttttcacagtgaaatctctcgtttaatgaattttttcgattcccctatgcatttcgtgatttaacgcctttactcacttgttacttaaaaatatatttttgatttcggtaggtt

SEQ ID NO: 38561 - DNA, 3577 bp, Arabidopsis thaliana landsberg
attccaagttcactccaaatccaggaagaaatcgagccatttaacaaaggaagcatgtaactaaatttagcttcattcatgaggtgaagaactaactgaagctgcccctcaacatccattaagttctctacattactgttcagaggtgccacctgctcatgaaacacaacacgagagcatgatactcagtggcacatgtaagtctaatacaagctaaacatgattctcagggggacctgggagaagtaacacaaatgtaagagaatgtactatttactgatgaaaaattaaaaagaataaattattcaacctctccatagccaatgcttccatcctccaaagtcagggagagtatgaacccttctcgatggaattgagagaattcatcagaacatatggtaggtctgtcacacagtttgactctgcaaatagagtctttattagacaaaaagaaaagaaaacggtaatattcagatatagtctctgacggattcttacctgtactgcgaatattgtattccagagacttggcaaagaagtacatttttgatcatcggatgaagaaaagaacccccagcccctaatgcccagggaattttctgcggattggaaagcaaacctctccaaagtgctgtgggcgagtattcaatgtcaacaaagtgctccagaagtgaggacatgtaaaacccaaaaataaaacaaaagcccaaaataacctatgaacaatcgcgttagcgtttatagagctttcaacctccacaatgcaatccatctcctccacgcttggtacaaatagagcatcctcaagttcacttttcgtcccaacgtgaacatacctcacactgcatatatagcaatttggctgagttatttcttactgtaaaccatgacgaccctagataatcaaagacatcgtaaatcatggagaactgacgctactatagactaagctaccaaaactggattactttttcttgtattttctatcaatatctgtgctatggtcatgcgtatataaaacaaacttaacatgtaaaacattaaataatagcaaagtgggaaaggaaaacaaagtaaaaaatgtgaatatgttttttacccatgtgccaaacacaagttttcaatggaaatgtcatgtgctgtatagaaatattgatttaacacgctaggctctgttttctttgcaataggaagaagtcggaagattccacctccacggttgtttatcacaagaattgtcattggtttccttgcaatcctaacaagtcagattaaacaccagaaattaatcgttaattgacttaaaaaccatgacatatctgttcagtgtgtgaaatccaccaacagtgaaactacaacaataaaatagaggaaagggctacctctgcttcaaaatcgccaatccatttgtatcatgaaggaaagagatgtccccaaccacacagaccacctgatatacggtgtttgaccaatcaggaaatttgattttttattttgtaaacaaaacacatgagtaaatggttctgatacttcttcacgcataaaagggggaaaaaatcatttaaaatcttactctcttcttgcatcctacagcaaagccagtggccgagctgagcaacccatcaatgccactagctcctctatttccagttacttgtatccattgacatggtagttatgcactcaacatcatatctaccacatgagaagaattttctgaactacatccatacatatccacatcctttattggcattctattcccgatgaaaagagcagatttagaagttagggctttagaaagcatatgtgcaccgtaaggttcagtcagggagctttcagcagatatttgaaatgacatttcccgggcaatctgcatagaagaatgaactattaaaagcagtaagagttaaattgatctttttgcaatctacagcgatacatatgtttcagaaaacggtcatgtttgatcttataagggattttaagggaaagggttgtctggaggacatacagcgccatccaatgcctgtagatgaccatgcaacttgcttctcctccatggaaatcgagatttaagcacacaatcagcaaactgaacaatgttgctttggaccctgtgagtgaccaggtgtgatgggtcatgtcggcatgcatgcttatcacccaaaatgtatgcaaatggaaagcatttctctagcatctgagaaactcttttacttgttatccgacttccaacctattcatgatttcgttttacaaactcagtcagatacacatcaacataactaatttttactcaatgaattattggtttgaagtccgcatatgttaaaagaaccctaacatgcgatggatatgaaagatcgagtcatgctttacatagttccaattccttatcctaattgaaacttcttcaaggcgttcctaacccaaagaaatttttcaattgagaagtactacaagatatccaacagtacctgtgtaactctatctatcatcttcaatacttagtcttagatgcatgaagcaaaaataaaaggatgatatatttacctggataacaacatcaaactctatcaaattcctgacagagtctgaaaataaggcatgatcaagatgatcaacaaaaacatgcgtcaacttctcaacaaaaggtttaaaaagcttgcgcagccgtacaccagacaagacatctgcaactacagtccacatcagctctttcgccaacagaagcgaagcccaaatttcatcctctgtatggattgcaccaataagaagaagacccttcttagcctctttgattacttgtaagatctcagtaatttggccagttgttacaccatcgcttttatggctttgtacttgaaaatattttgtgaatggctcagcattagacatccacatgtctaatccatttaagcagttagatgaccaatttgttggactaccgtcaagtgggtctctaaaaggacaattgagatgtactggtccacaagcagatcctgttgcccaatgtagagcggagtctacagtcgtaaggaccattcggactggaataagatcggttggaggaggaagattgaagaagaatctgacgaacgaaccaaagtggtttatctgttacacatgaaaaaacaaaataaattgtaggaaaacgccaacagatccaactgggatacaaacgtatagtttcaaagaaaggtcttatctcgaccttacttgatttattgcttgatttgcgccaactccctgaagttcaggaggacgatctgcggtaagtagtagcagtggtaagaaatcctcactggcttcaacaacctttatttgtcaaaaatcattaaacaaaccctgtaagggaacacatgtgtttggcaaagtatgtagcatgcaacaagctaacaagataatttagtgaggcataaataagcacaactctgaccgctgaaagaagatttgaaacggcagttcctgatgatgttataatgactgctggtttgagggatcctttagcataaccaatagcgtgaaacgcaagagatcgttcatcaaagcatgcacgacacgttggaagggg

SEQ ID NO: 38562 - DNA, 4578 bp, Arabidopsis thaliana landsberg
tgaattcttaacgaacgaatgatctattgatcttaaagggcaagcctatgtaacttttattgctttggtttcaagctattttgtctcttgaatcggtaaagttactagattgtttcattgaacgaataggttgttggagtatatcagaagaaaataagaatccacatgggcaaacaaaatgtttagagattcagatttttggttcggttttggatttttttttaaaccgaactatgcaaaaactaaatgtattaaataatttttgatcaataatatattacggcatatttttttattggttgaattaaatgtagttaattgatttttttataggaaaaaaaatcaaatgagatttttatgtgtttttaatctttgtgaaatatgctcaaatattcccaagatattgctccaccatactttatatcgattcatttttgtctttaactgcttaaccctgaaacaagatctctggcgataatctgccgtcagaccaaatcgacggtaagttcttcactcccttccttgaatgtacgtttaccttagtgattaaaccctaggtttgagatataaaattgaaaaacttcatcaatgcattggatttgatttcggattttgatgtcgtcgtcgttgtttatgatttagtgatggggcgcgataggatcagcgaattaccagatggtttgctaaatcatatactcatgtaccttcacatcgaagaatctattaggacaagtgttttatctagcagatggagaaacctctggcttaaggtacctggtcttgacgtgaacgtacatgacttccctgctgatggaaacttatttgagagcttgatggacaagtttcttgaggttaaccgcggacgcctacaaaagttcaagttaaactatgaaagtaatttgtattatctaatggacagatttgtgccgtggatcgctacagtcgttgatcgcggtattcagcatctagatgttacggccactgattgtcctccatggaccattgattttatgcctaccaacatttgcaagagcaagacgttggtgtctttaaagctcgtaaatgtagggcttgacactccaaagtttgttgtttctctaccttgtcttaagatcatgcatcttgaagacattttttatagtcctttgattgcggagaagcttatctcaggctgtcctgttcttgaagatcttaccattgtaaggaatcatgaggattttctaaactttctgcgtgtgaggtctcaaactttgaagaacttccgtttaacatttgattggggaatgggtagtaacgatttttcggtcgagattgatgcaccaggacttaagtacatgagttttagagatagtcaatctgatagaatagttgtaaagaatttgagttccttggtcaagatagaccttgatactgaatttaatctcaagtttggcctaggcagtcctttgtttctcttgtactacactaaaacatatattatccgagattgtcttacctatatttctattttcaaacatatcatcatctctcatctaactctatatgtttctatatatattggaagtctccgcctctgatacaacaatccaatttacttttaatttctcacatgtatcattttcattattcttgcatgttctttatccttattccaaaatcggaccggttagaaaattccataacttatatcacttgcaggctgcgtactcctgctcatcgttacaactattgcatgaaattgttttaggtcatttggtgtttgagaaaattgatattttttgcctggatctacatggcaaatcatcctccactgggaaccactaaaccattaccattagaaatttagaatgagattccaatttctgaaccaaagaagaagaagaaattattgaactattgacatcaagtttcttataagcatatggtttgtatgtcattctcttctttccaatagttcaattattattttgtgcaaattcatatatagggataaaaagccaaaaaccaataggctttggctcatggttgcttataatgtttcaatttttggccgacattattattgtagaggtttgcaactttgcataaacttaagagttttttagtaataaaacctctcaactaaagatgaatcctaaaaacaccctcaactatatatttaataagaaatccctcaacttaaaatccgtttaataaatttcgtccatcaacattgtcgtgaaaattggacgaactacggttaaattgacattaaaaaccgacatatatacatttaaacacatgaatagtcaacaaaaacagcaaaatgttcttctcttcgattataaattcccaaactttagctctaaagttttcaaagtgataaatctaaattgatgaaattagtctctgaagtttatgtggtgttaaagtcgattatgagaaattctgaaaaatattacgttataatttgaactgtccaattataacgatactgtagatagagggaaattttcattagcatatttgaagttgaaggattaattactaaatatgaattgataggttttcttacaatatatctttagttgaggaggtttattactaaaaaccctaagctttatgttttaacttgttttggtcctcctcctttaggcccaactaaatgaaaaaactctaatccatcaattgtcacttggctatatatctccggcgataatctgtcgactgtcgacaaatcaaacctacgaaattacgtaagaaatattaatcgaaaatttgggataaaaattgagaaactaatagagcggattatgcggtgagctatcacaacaaacagaacgagatattgttccatatatttcggtaatcttagtttgttgtgatgtagatatgatctccgtagatattctaagatagtgtttgtaatctatttaagcgcttgtaatctcagttctgaacatatagaaaatacatttctcttccattacgatctctgaatctatagaaactagccctaggaatcgatgttgttgttgacttgtgttgttcatgatctagggatgggggagttcgattatatcagtgaattgcctgattgtttgctaactcagatactcttaaaccttcggaccaaagattctgttaagacaagcgtgttatcgaagagatggagaaatctttggttaaacgttcctggactcgaattattcacccttcaattcacatatcctcatcgcgaagaaattttggtaaggtttatggacagatatatggagtttaagtgcaggtcacgcctgcaaaagttcatgataacgtatgtcgattgtaaaggttatcgagatcgattaatggagttgatcggtacactggttgatcgtggacttgaacatttgtatgtttttatgcacacttgtaacagtgttgatttcacacgtctaaacatttacaagagcaatacattggtctctttgaagcttcataacgtagagttaaagaattcagactttgttgtttctctaccttgtctcaagatcttgaaactggagaatatttgtcacggtgaggatggtcctttggtcgtggagaagctcatctcaggatgtcctgttcttgaagatcttgagctgattaggccttttgatattttgacacacaaagttcttctgcttctgcgtgtgagctctcagactctgaaaagctttaccttacattttgcgatctataaggatcgtacagatttttcagttgagattgatgctccaagactcaagtatatgactgttgaacagagtcaatctgatagcattgtggtaaagaacctgagttccttgttcagcatcgacattggtactaaatttaatcctttgagacatgaggatctaaggatgcgtaatattttctatgattttttaaccgggatatctagtgtaaaacatatgagcatctgtttgtggagtctccaggtatgtgtttatataacaatttaatgtattaattctcaatgaaacatatctgatatgcatttattcttcttgcagaggttctctccttattccaaacccggactgattcccaaattccagaacttgtatcatttaaaagcacagatgtggagctcatcaacacacttattggaagcgtttcttgagagctgcccaaatctgaaaaacctcatcttggtaagaagaatctgtgattttggcaaaagaacattgttgaaacatatcgtaaaaactcagcttgttcatttcgcaggaatataatgttgaattggatcgagagcaagtggactttaccaacgtgcctcaatgtttaatatcgacgctggagtatgttgagattaaagaaccgaatgagaaaagtacgattaaactagtgaactactttcttgagaattcagcagtcctcaagaaacttactctacgtttctcatattcttcttctatccacataaagagctacaagaagcttcttacatcaacaaagctttctcccacatgtcaagttatctttggttgttgaacattgtttcagtgaccttattcctgtagttttgctttttgttgctttgatttcaatttcaggacagagtttcag

SEQ ID NO: 38563 - DNA, 3165 bp, Arabidopsis thaliana landsberg
cgccatccgaaacacaaacgctaacgcggccgcagccgcaaactcacaaaactttacttcagaggccgccgccgcaacttcaatcacagactcaaacggcgcctcctaagtctgatttgttcaagtgtagcatctgtgaaaaagtgtttacttcgtatcaagctttaggtggtcacaaagctagccacagtattaaggccgcgcaacttgaaaacgcaggcgcagacgctggagaaaaaacgcggtcaaagatgttgtcaccgtctgggaaaatccacaagtgtgatatatgtcatgttctgtttcccaccggacaagccctaggtggacacaaacgccgtcactacgaaggccttctcggcggtcacaaacgcggtaatgacgaggctgttctcaagttgagtcccaatagcaataagagcgttgtaacaaaagtgttagatgcagaacagagtttaagggcaagtgacaacattcacaaacgcaatcaggacgaggttgttcccagcagagacaagtggagtctcagtaatgtgagtgttgttaaaaatgtgttggatctaaagctgagcctaggggaaagtgacggcggtcacaaagacagtcaggacgaggttgttgttcatgaagacaagtatagtcctagtagcaatgggagtattgtaacaaatgtgtccgatccagagcagagcgtaaggagattgatagatcttaataacccgccttcactcgagtttgatcaatctagaggcggagacgtggaggaagttgaaagtgcaatgatattagcaaagcagccttgataagaaaaatgattttttcaattctaattgcattaagggtcttaatttgtgattttgattttgattttaattttgatgtttattttaatatccaacaatccagttatcctggttagtaaacaaagatatattaatgtgttttaccaaccaaagattgtgaatgcgtttgctacatccacgagaacagaaaaaaaaaaaaaaaaacctttttggggcattggccctctttagagtaacaagaatcgtgaattaatcattaaaagagttaatcactggtgtaaatattaaacttcaagatttggaaaggattacataacagagagatttaacagttaagcaaagagttagtaatacttaaaaacagagtaaatacaatatagagttttatgtttaagccagaaaggcaatggaaacaaagtttgtacttagaaaaaaagtcacttccgagaagaagaaaaagtaaattcaaatctggacttcttccattccttcaattttgaatattgcttttgacttttatctagtttaggaatatgctaaaagaatagaaatcaagcttatccgaatattctgagataaattatagcagaacttagccgattttaactcatatatatatatatatatatatatatatatatatatatctatatatatattgagtaaatccaacagaacacgtataagtcaactgtcgtttgtgcgaaacaatactctcccaagtttcgtaagaaacaagcaaacgaaaagtgtgtatctgatagattggaagaagaggtagtattggctctttcatcacagatgaaacaaccgtctaaggatgtgtccgctctgatcaaacgattagaatttgcgatgcaagaaagaaaagatgggttactagccgacgacaatgttttgattgagatgataatggaacttgaagggaatatttctactactaatggtgatgatgaagatccttattcacaaggcagggtaataaaagggattgaaccgatcgggctagacgaagacgatgagtgtgttgagattgggttggggagttgtgaacaatacaagagcgttttggtgatgataaagatccttcttcggatcacggaaacgtagaatctatccggctagaagaagaagacgccgttttgtttgagccttggttgaaaagcagggacagggaacagtctcaacgacaaggttttggtgaatacgaagattgtttctcggaacgcaggttcttacaagaagaagaagaagagtgttttggtgacgatgaagattctttctcggatcagatttcattcttggaatcgaaccggctagaagaagaatttgaagaagagaaagaagcagcccggttttcaaacgacaacgatttcgttgagcttttgtttcaaggtattgaacaatcaaaaccaaagccaaagaacatgttcttattatgatgatgatgattgatgatgatgatgatgatgatgatgatgatgatgatgatgatggtagtggtagtggtagtggtggtggttatgaagatggacctaaatggtctgttcaatcaatccccacaaagaaagaggtggagtatccgattatcgactcaggagattacgttgacgacggatatgattcatccggcgagctctctacaacgacgacgccgccgattcaaggaaatgagaaacctgaagttaacttgaaaaacgttttaactgggttgattgctattgttactggacggaataagaatccgttagatcagaaaaacccgtcttcgaatgtttcgtttcttggctctggcacgaacggggatacttttgttcattcgtctgtttacataccgagtgctccgcctctacttgaacctagtgggataaactatagtgtttacaaggagttgcttgaagctgaacctcctgagtggctacctgatagtttagctagtacttgcatgcagtgttctactccttttactgcaattacgtgtggtaggcatcattgtcggttctgcggagggatattttgtagaaactgttcgaaagggcggtgtttgatgcctagtcggtttcgggaaaggaatcctcagagagtgtgtgattcttgctacgagaggcttgatcctttgcaatgtgttcttattaactctattagtaatgctgtgcaagttgcaaagcatgatgttgttgattggacttgctcaagaggatggttgaatctccctgttggtctatccatggaagatgagatatacaaggctgctaatacgttgagaggttactgccaggtttgattctcatcctttgttttttcaagtacatatttgttctgtagagatgttcgagtagagaaaatgagtatcaaatgaacg

SEQ ID NO: 38564 - DNA, 1455 bp, Arabidopsis thaliana landsberg
cataatgtaatagcgtttactgacacaataaataaaccatgagttaaggcttttagcctcatatagtcatatatagtttcctattcccctcacgttgaagtaaatatgatgtatctccttttttggtaacatgtgatataactcatcatgtcttatattttagatgagtgttcttaattgcttatatgtccatctgtctgcaagttatcttatttctgtccttctatcaggtgataaatgacttactggatccaacagggcaaaatttacgtattagagaggattcccaggtttccatcttgttctctttctctcacacatgattacatatgtatatcaaacaagagcatttgcttgtttgtatgatttcattattttcactttaacaataacaaatatgatacttgatgaatagtccatgttacatccatcctgtttttatggattaccttggtttgatctagaggggatatttttttatagggcacttacgttgagggtatcaaggaagaagtcgttttgtctccaggccatgcgttatcattcattgcagctggggaagggtattagataatttaacccctgaaacatgttttgattttgtcaactctgtccttcccggctctacttaacattgctgttgtttttaattgcagaacatcgtcatgttgggtcaaataatttcaatttgttgagcatcagaagtcacactatatttacactggtacgtcttcatgctccaagctccaagagcttgtcatattgtaatttgtagcctcttttcagtgtcttggcctgatgtattgctcttacaaggtgtccttacaatgtacatgttttgaagtctaatttgtatgtgtttgcagatggttgaaagtagtgctactggacatgaatatgagggagtcatcttttctcaactcgtaagggcctatatctttttgctattgtataagatcaattagttttgaaaatgggacctaactgtatattttcttgtttagaatttgattgacttagctggatctgagagttcgaaaactgaaacaactggattgaggaggaaggagggttcatacatcaacaagagtcttctaactcttggaactgtaggtgtctatttttgattcgagctatctttctatttttcatctgtttctttagacatttaaggttggcatgtccatcagaagctttgttactgaataatgatgaacttgcttacaggagtaactcaattagtttccacattccattgttggcattagataatcagaaaggagtatgcagttgtgatgggaatatacttgggattttcagtacttttttttcttgatgtagtgctgctagtacttcttgatcgatgtttgatgttctgataagtagtctgttgcccttattatactttatgcctgtcggtggtagcatcttcagtcacttaaacctttgagatgg

SEQ ID NO: 38565 - DNA, 8084 bp, Arabidopsis thaliana landsberg
ccccattcttaagtactatctgaatctagcctcttcgtttatcctttcaaaatcaatcctcccgggagctcaatcttaccctcagtccctcaccgtaacttctcagaggaatttgctttacttgatcgctatttcggtaagctcaatgcaggaaccacagatggcatgtctactctgcttcttctactgacgaagttgcagtttgcgataaacccgtgtacacaatggagacttgcatgactggtctagacaagaaaaatgattttcaacttcagcttctgagatgactactagctttgggatcaggaacgaaaagaactaagtatcagagctaactcgccagcttccaatcccgggaagaaacccagttcacgcgtcgtgggaatacaatacacagaacagaagaaagatgcacctgagagtaaaaataaaaatattctctgaggacaacgattaccacaggaggagcaaataggtcgagacatccacagatagttaggcagaatcaatagcgctccacatgagagagaccaggatgaacgaggcttcaagtataagtccttcccaagcaaacatgtaatgtgtaggtggacacaacaatactcatcacacctataaaacccttcttctggatttatttttccctcacaagcttcacaccaatacgtcatgctacttgtcttcttcccataagaaagagggagtatgtgtttatcatgcttatacctcacttgttgtggtaaagtagcacatttgaaacacaaagcatagtcacactcctcctcaatgcaattgaaggtttccttggtgtactcgcctggcgctttggcgcaaaccgaacagtttctttcctcatttggtttggatgttaggaataaatgatgcatatgacttggatgaagtaaaggctctgaaattgtggcgcactgcacatgtagcctaaaatcgcaatctcttttactgcatttatagaagaaaccagctatacacaacgaaggacaagctgaacaataatcacgatcataactattccaaaactcgacatatctgagagggttatctgatactaaagtgagtagatgtggatgtattggatgatgtaatctacgagagagatttgcacattcttcatgtagaatgaaatcacattgcaaacaagagtaggagttaccaaaataaattggcatgatgcatgcttgacacagcttattctcgtcgttatctttgctcgtgttctcatcaagtgtcaaatgatgatcttcatgactgaaatgttgtatgattccatcgcttatcgtcacgaatggctcaagttcttccacttcttcttctgactctccttcacgttctataccatcccaaacatttggttgagtggcacattttgaatgaaccgcataaagacaacctttcttgatgcaatgataccccccgtaatcattgttaatcttccggcggcaaataccacaaatccaatctccttttgggaaagaatgggtaaaaaagataaaatggaggtggcgagaaatccgtatgacatgaggtaagctgaaacagctttgatgggcgataaagtagcaagggggacatatatagaaaagcaaatttgaatgtttcaaggcgcataggctgcaagtttggggatcttgacttggaaacagggcaagtgtatgctcatgccacttgggttggtcgatagacaagactggtgatttctttgcacatgtaaacttgagcccaaaatcgcaaggagagcaaaaataaaacatacttgcggtatcgtcacggagaagttcgtgacagcaatagcattgcctggttttgtcatcattgaacaaggcaagctggagagaatgtttaggatgaagagggtgtttgatctcgaccggagccttgctattatcttcatgatggtcgtcgccgttgccagccgagcagtgaaaatgggtgtagtcttctcctgaaaacttgtagcgttcaaattggcagtcccgcttttcattgatgcaccgctggacatttccagtcacttgatgttttccgtcgtgaaagcttacttgcacttgtgggcataagggaataagcttctcccgctgtggatccttaggtttggcgaggtagtaactttggtggaggagtgatatgagctccggctccggctcgagttcccttattttaaaaaagagcaacttgagcttctgatccgtagcagagtctatagagttgacgagatagatgttttcagatactaatgatatgaacttccttagcggcttcgaaatgggataacaaatccatagtgttgaagagagctatggtttgagtagtgagtgacatgagtttggtctccggttttggtagcgagtccaaatccatagagctgaggagatcgattatgcgactagtgactaatacgacataactcgttgcttcatccgaaatccaaaagagaggatcgacgaaagacactagttgactaatgcgtaataagagctccgtctgctgctccgaatccatagcgttcgccgatagagagtttatctgagtaattaagcgagagatttgaatgattttggtatgtttgctgctctctctatattggtatatgtttatctaaccaaacaatgtataatcatgtatacaggctatccactctccatcccatattacaggctgttcgagtacaaattcaacgatcaacttttagagattaaaaaaataaagtgtgacaagacaatctcaagctgtccgaattcaaagtcaacgatcattttagtctacccccgtagcttgcggatcgtgcctaagagtttttcttagactaataatgaagttaatgagggttacattggcgttggcctatgcaacttgcacctttttactttaaaaaccatttgaaattaggcgtgggctgagtcagaataactgattcaaagcaaagtactctctggaaatatctaatataagtggtaccggcaaagggaagatataaaattgtcaaccgaattacttgtgcatgatcaaaatttatactgtacttactttcaactaaggttgtggactatttagagaaaaaagaaaaacagagaagaaaaagaagacaagaacaaaactttgttttattaaaacagaaacttgttgttattttattaagacaagacacactcttatatacatgttcacataactactctacataaccgttggtaacagttgtaacttctccaacaagttacgtctcttactgcctccttttgtagtcacatgacattcgttgactttacatacaaactaatgaaattataacatatatgatactagataaggcctgccaatttagactgatataagatacaaaaataaatttttattgacaatatttgaattttgtataataatcaatatatttttctaaatatttaatttaataattattgtttaaaataaaatttcagtcttatgcattctattttaattatacacattcaatcttatctatgatatttgaattttaaatagtaactgattcttattttatatttatttttttagtgagttattttatatttaatttagtatctagaaagaaaaaaacaaatttctattttacacattcaattttgtaatacagtttaactatctatgtcatcataataaactcgatttaaattctacactttattttaagtgataacattttcatatcaaaattatatttatgacatatcaaatctatatcctagttagtattaaaaataattaacaattaacaaaacataattaaaaaaatagaaatccacaaaaatatttagaaaccaaacattgttgaaaatatattttttatatatgtcgtaatctcgtaagttaattttacatcatgcaaattaatattaaatgagtgaagattaataaatgaaaatattctcattaaaagtaattgaaaagttaaattctataagttatttttctcaaagtattctattttcacttatgattacatgagttaaaattcttaaaataaaacatagatgtagtaagtatatatttatgtaaatttataagattattaatttatgatattaatatatcatatatttacatagaaaattttaaatatatagtatttatcttattttcttttctttattttcagagaattttattttctttatattatcattttattaatttattgagtattaagatatttcaaggtatatcataaagcagacacacaacacacaacaccactaatatcacttgaaacatgaaaaacaacgataaatggttacgtgtaatcaaatgatttagtttttgtagtaggtcttcatcagtttatcctatttgtgtatttagatttcaattacttaaatttggcttaaaatctagaagccaaaaatggaattaggacagataattgagaaatatatcaatgcatggttccccattttcgggcagttgttagactaaccccatagtggtgagcaaattatttttcattgcaacgatgtaatattaaattttttaaaacaacatgattttccatatctacatccaaattaatacagtttatgatatttatcgaaaatattaaagcatgagttattttggaaaattgtaaaactaaataggtcgtgttacaactaactagtttccttcaggtatattgggggctacaagtacaataactaaacggtcacaaaagattcatttagccttcagcaacgagttctctggagactgaccagtgagaaatatgcacccgttggacctttacctaacaaggaagagtgtgttccacattcgacaactttccctttgtctaaaacagttatcgtgtcgcagttctggatcgtgctaagcctatgtgcgatcacaacgcttgttttccctaccatcacatgttcgagggcgtcttgcactacacgctctgattggctgtccaaagcgctagtagcttcatcaagaagcaatactgatggattcttcaaaactgctcgagcaattgcgatcctttgtttttgaccaccagacaattgtactcctctgtctccacagtttgtgtcatagccgttagatagtgatgtgatgaaatcatgagcgttcgctgcctttgctgcctcgataatctccgactcgttgatcttgtcagatgttcctccatacattatgttctctcggattgttcccgcgaataatgttggttcttgactaaccaaagacatgtgttgacgaagtgatcttaggtgatacgaccttatatcgcggccatcgattttcacaataccttgtaacgggtcatagaaccgctcaatcaaaccaattattgtggatttacctgacccacttgtacctactatcgctgttgacttcccctcgtcgatctcaatggaaaagttctcgaatataaccacatcaggtcgtgttgggtaagcaaagtccacattcagaaatgtaatttgtccttttatcttttctgcgacgtatccatctgggttctttggctcaatcgttgtgcagcgatctaacactgcaaacactgacccaactgcatgcaaacccctggctagatctgttgtcatggttccagcatcagcaataacccgacccgtagtcacaaagatcagaaatatctcaaagaatgcttttgacactatcttgccatcagcgattagtgtaccaccataccaaaaattcaaagccgaagtgcacgttataaggcttcttgaagtccccaacacaatgcctgctaaccatgatctgtggacgctttctctccgaggaccttcttggaccttttttagtagctttatgatccgttcttgtgacgagaaggcagtgattgttcgtatgtttgataccgcctctgccgctaatttactactttcatcttgggctttgcttgccttttcggacaagctcttgagcagaacacgttgagtgtagaagcaaacagcaattagtggttgcactgaaatcatcacgattgctaatcgccaagcgatgaccaagccaattatgcaagctatgattactgctgatatggtttgtacaagcaatgacatccgatcgccaaccatcgatctcacctatcataaaaatgcattacaacatcaagaaatggtaaaaatattgttttgttaaagttcaaataataatagagcggaagacataccacattagcatcttttgctagtctagagcaaattgcaccacttgagttatcatctatatcgaaccaattgacctcaaatgtcagtatcttcgagagcatctgttctcgaatacgttttgttaggtattctcccatgtatgcaaaaccgtaatgctgactaatattgaccaagaaagagaatatagctaaaccgacaaataacaacacatagatccttgttttctccttgatctggtcatggctcgttaggaaaaatactgatatcattgatcccgcagaatatgcagaaactggttgtaggaccccaactaaagctgcacttaaacaaccatataatgcatatttccattctggcctattcatcgccatcaatctcgtaaatgatggcacaagcggtagattatcattagggatcaaatcagaaacatttgtaacaatgcttgaactcgtgctaccaatagagttatgttgactatacttaaaatctttgctcaaactcatgacttggtcctttgtcacacttacattgatgttaacatttgattcttcattctccatttgttgtaagctgactagagaagtgtattgaccatctattctcttcaagagctcttcatgagatccagtttcgacaatctgaccattatggattacacagataacatcagcattacgaatggtagagaggcggtgggcaataacgatagtggtacgaccaatagaggcattgtccaaggattcttggacaaccctttcggattcggagtccaatgcgcttgttgcctcatctagaaggagaatttttggtgacttgattatcgctcgtgcaattgcgatcctttgcttctggcctcccgacatttgcactcctctctccccaacctttttgtttacagaaagcaaaacatacatcaatgttttttattacataaactaaaaaacaatttgttcttatattatgaatataacctgagttttgtaaccaagagggaactgagaaataaaagtatgagcattggaggccttggcagcttcaactacttcatccaatgatgcgtcttctttaccaaataatatgttctccgttattgatgtggcaaagagcactggctcttggctaactagacccatttgcgacctcaaccaattcacttgcagcttatcaatggacacaccatcaatgagaatctctcctgctatcgggtcatagaacctttgtaaaagtgatatcactgtcgatttacccgatccgcttccacctacaagagctacagttttcccagctggaatttttagacataaatcgtcaaagatagtggtttcgggtcgagacaaatatgtgaacttcacgtggttgaattcaacttctcctttcattctctccaaaatctgaccattcaagttgtctgaatctatatcagggactctttttatcattttttgaatccgttcccctgccacaaacgcctcggagaaatatttaagattcgacaatgcttgaccaagtgctctgcataatgtaaaataccaaatatcaaaactaagagatgtttttttttttgtgtgttaggaaatgccaagagacttaaacttaaatacttacgtgccaccaaaggtgacgcaaactgtgactgtggagacagtaccacctttgtagccatagttcataaccatccgacttccataccaagtcaagaacccccatatagcataaactataccattgctcccaatagcaattcctttagctagcccttgtctcaaccctagcttcaccgacccttgaagcgcatctgagaacttttctatcatcttcttctcactaacaaatgcgcagacggttctaaccgaagagatggcttgttcggcgatagaaccagcttcattgtactcctcacgtatattcctc

SEQ ID NO: 38566 - DNA, 238 bp, Arabidopsis thaliana landsberg
ctatgctctttttaacaactctctacacccggggggaaaatggggacaccctacatgaacaccttttactactctatctattatcacatgggcttgtgcacccatgcgtacacacccttcaaaactataccatcggaatctgtgccgcctgcgacaaattccttattaactcacacgacttggctaccgatgcccatgatcccaagagtagtgcatatcattctaccgtaagatgact

SEQ ID NO: 38567 - DNA, 8665 bp, Arabidopsis thaliana landsberg
gctgacttgataagttcagagtctgtatgagtataggcatcagctgaaccaaaaacacaaagcaaatatatatgatcccaagatttagagcaacaataatagtaagtccaaacgaaaagaaattgaaagtaaacctattgcagatttggtgtcagagatgaacttaggatgagtaataagattgctgaaaaggtgacgcttcacatactcagctgctctggatccaccatgacctgcaaaaatcaacaaaaacaaacatgaatactttgctctttcttataagcaaccctaatctatattactatatccaatttgagatcatataaaaccttcataaaaatgtcattgagacataatgtataaattcttgttaagagagtgaccaataataccatcaaagactccaaatagaccaactatttccccttcaacgccgtcgatcctagtttcaaaaaagtcctccattgatgacctttttccagctgagcttgcatatccatagctgaatttcccattctgactgtacatattagagtgttcattgaaattaatagcagcagcagcagcatctacagtcacatttctaggaatgatgccaatgcgcaaacatataatcacacatctaaactgcagatttatattcgaagaacgatttctacttttgaggagtgacatgtataattgagatattattttgcacaataactctttaactcacaccaacagagatgagcttccaataaagataagtataacgcaagagttatcagaagaaatcagccaagacaaggtttcaaatcagtagctaggacttgaatcagacattaataaaggctaaaaagggtatatgattctgagcaatctataatctgtagttgcattcttaatcctataacttaatactaaaaacctgagaaagattaagctggggagaaagagaaaagtgaacctgaggccaccaccgctaacaggtccatcgtcggagtgaacctggctcgaagatgacaaaacagaattcagatatcccataactcctcagaaatgctccaaacaccaatgcttcttgtctcaaacaaagatcaaattcaattctgaagctgattcagctacctttgtccaccaatcaaatcctaacacaacgtcgaaaaacatgtaaaacaatatgtcaataatcaacaaatgctcaacagacatatcaaaccaatgacgagaccgagtcctgaagccagaacgactatccacagcacaaataatgagcagataattggaaatagccaatggattgagcaaacaaattgaaatggcaatggattgagcacgatcagatcgaaaaataagagtaatttgggggagatttgagagtaatttgggcgtaccagaagaagaacgaagaagaagaagaagatacaggtatgacgagaatcacttgcaaatttgtaagattcaacgcccgacaagatttagggctcgctgtggtcttcgtttttgacaaaactggagaaatttatgacgaagaaccagctaactttttgaaatatgatacccaattaattatggatacaattatatgttttcattattagcaattaataataatgatttaattacggataagtagttggtaatttgagaaataaatatatttaatgttatctctataagcaaagagaaatctcgtgggcctaaaaagatgattattattccttccttttttttttttttttttgggtttgtcaactttacggtgaacccaagttagaatgaatcaaccgtccttctcactagatttcgacacgtggctgtcacatgcagctgattgttctacgcttgatttatctcacgtcctcctctgtactaactagtagtagtaaataatttcactttacttgctactcgttttcttgtttgtttccaaatcgaaaatgtgtttcccatattagacgcaactttagaaagaggatctgtctcgacaactagaagacgattttcaagtaccaaaactcgtcacaaatacaaaatttaagagataacattacagactatccaaaatgggacaaattaattaagaagcggacaatgtttttaattaacagcagaacaagaacgtctaatctcaccttcttcaccaactctcactcccatcaaactcatcttcaaaaaagactcagtccatctatcgaaaaaactctcctgatcattcgcaagaatctcaacaatcttcctcgtccgatcatcttccatgagagctgaatccgtttgaaacaaacccttgtgagccaacagattcttgtagtactgattatcgaacgtcgacgatgtctctggatcgttatcaaccaccgtggtcgttggatctagtgacgatgaacacttgtttacaagtgtttgcgcataggagttatcgagagacgcgtctattagttctaagttcccttttggatcaagcttaaacctgctgttgaacgtgttacaatgcgcagctccaatagtgtgcgctcctgagacccgtaatagatcgaaaattgaaggtttgttttaaagaaagatctctctttcttgaatatcaagaaagataacgtacctgagaggacaactagatcatgaacagataagcctttagaggaaaagatattgatcatcttatcaactgtgaaatcggtatctatgatgtttggtctgacatttgctgccattgagactctcccgtctctcctccctgtcggtatcggaactaccggtcctccgagctgtcccaaaaatagtattcacaacaacaagaaacagagttttaaaaaccaaaaataaagatacaaacagagcattttatgcaaaagtctggtttaagttattcagatatataaacatttcttatgtatgtgtgttttgatgaagttcttacagcttctactgcatctcttgcggcaagaacaagtatatcagcacaagagactgtgccgggacaaaagatttcgaggatatttttgacgctttctataacagcgaatcctcctagagacgcattcccagggtcgcttcgctctgtaccgtttcctcgaatcaacactgagccatcacaaccctaagacagcaatgacaagaacaaaaatctcattaaattggaaatgccttgttatgcaaggaagaggcagtcctgtgagaatgtaatgtacctggacgaagcagtcatggaagatgagacgtaggagcttcccaaggactgatggatcagaggaagaagcagatctaacggtgtttctgacgattaactcagctccaggacaagaaccggcgtagaagttgaaagagagctcagctactgaagaagaaagaagcaaaagtagaagaagagaggagaggaatgtatattttggtttgcatgaaaaaaactgcaacgccattttttaatgtgtctgtcacaagatggaaaatgaagttgcttaatcagccgagagagagaagagaagttgtagttgctgtgataaatgaaaactgtaaatgcatgtgcgttcgtgtcagagagagagagagatagtgatggttgagtcaggagaacttaatgacaatctctttactctcttatgcatgcatccatgagatcgagtcatcaattttacaaacaaaacaagaatttgaaagtggtgaatccaatcactgcatgcagtgaattttatgggttagaaaccctaaaatagtatgaatttctccattattgtgacaaaaatcagaaaacttttttttgtacctttcagatatttctttttgaagatttaaaaaaatcactcatgcttattgaattcatctttctttgacttgttatagtatatgtcacttttgcatacaaaaaaagaagagagaatctataaatagaaaaatgtacaaaaggatctaataatgtgcttcagaaactctttatttgttgatagtttctgttgataagccaattctttgtctttcatgtctcagaaaacctgaaaagtacaagaaatggtggaaatcagtaaaaggtttgtcgtttttagataataaactcgatatagaacaaaaataaacaagcaacggagatatttggattttaaaacctgggggtcgtggctttggactcgaattcaataacctaattaagcaataatcttataatttcgaaggaaacaaaacaagcaaattttttaatgttaggtttaaagctttgtgaaaaaataatagaaaaaatgtactccatctttttctaatcattttaagtttattccactttaattttgtagttttttttcttttcttctttattgactgatattataaatcacaaagttcaggatgcaatgattaaatttattagattacaatcaatgagtattagtttatagttattaaaaatatttaatataaaaaataaacagtcataaaataatgtttaatttttaatgtgtgtaaaatccaaaacatcaatgcttacggagatttccttaagattaataaagttgatttttatgtaataagaaacaaaatctcattaaactttaaaagtaaaaaaaataaaaatatgaagtgtcacttatggtagtagtatccaaaacaataagttaatggatttgtttctaaagaaaagaaaaacactataaacagaggatcctcaccatcaactttcactaatcatcacaacttcaacttttcaatactcagattaacaatggctattttctccaaattacatcttctcttcttctccttcatcatagccacatgtatacataaaacatttccaacattttaagatgactactttgatttaataatttatctgataatttttttttgttgtccgtcctaataattttttttgaattgtatattcttcaaggtacaatttctattgtctccggcaccgtcttcactttatcaaaccgctgcaactttactgtgtggcccggaatcctaaccgcaaaccgcacactactccgcggcggcggatttgccttagcttcaggttcttctgtaaacttaaccgtttctccaggttggtctggtcgaatctggggtcgaacgggctgcaacttcaacgcctctggttccagaaaatgtaaaaatgcaccggtgcaagaggagcaccaccagccacactagcagaattcagaatcggctcctctggaaagaaatacaccgtacaagattcttacgacgtgagtctcgtcgacggttacaacgttcaggtgaaaatcacaccacaaggtggctcaggcaattgtaaaaccgcgggatgtgtttcggacgtgaatgccatttgtccaaaagagctacgcgttaacggctcatcgggtgttgtggcgtgtaagagtgcttgtgaggcttttaacaaaccggagtattgttgcaccggcgctttcagtaaaccggagacttgcccgccgacgaaatactcgaagatatttaaaggagcttgtcccactgcgtatagctatgtgtacgattatgcttcgagtagatttacatgtactagtgctaattatgttatcagtttctgttcttaggcatagtatagccttttttattgttattattatcaacaataaataaataattaatcacttttaacatagttttatgtttttttttcatcactatgaaatgtattaaagcaaaaaagactaatgttaaaacttaaaagattaaaaataaaataaaaagaagttaaaatgacatttaaataacgtaaaaataaacgacgtcgtttagccaaagtttctactatctatgtatgtggtggaacgaggtccaatggttgaacaagcaaccttatgatatattttatgagaagaggcaaacaacacctaacattggattcgagctctctagtgaagaatccgccatggctgttccatttctaagctcttctctacaactcacacccacttctccgattctcttcactaaagtaacaccaacaccaataatccacaaccacagatcaacatgcactatacccacaaagcctcgtctacgtctcctccgccgctccgccgtcgctggaaccgccgtatctgatcaaacagaaggaggtggagatgttcttttaaaccctgaagaagagaaacgtgttgaggtggcggattatgattggacagaggaatggtatccattgtacttaactaaaaacgtccctgaagatgcgcctcttggcctcaccgtctacgatcgtcaaattgttttgtataaagacggtgaaggaacacttcgttgttacgaagatcggtgtcctcatcggtaagataaatcatctagcaaaaccacaaccactagttttgtacttttgtttaggaatctgaaattgagttttgtctttttttttataaaggttggctaagttgtctgaaggacaattgattgatgggagattggaatgtttgtatcatggttggcaatttgaaggagagggcaaatgtgtcaagattcctcaggttctttgtttactgatttttgctatttcgagattttctctttactctgtacttactggttttgggttctgtttctaacagcttcctgcaagtgctaagattccaaaggctgcttgtgtgaagacgtatgaggtgaaggattcacaaggagttgtgtgggtgtggatgtcaacaaagacacctccaaaccctgagaagcttccttggtttgagaatttcgctagacccggttttttcgacatttcgactactcatgagcttccttatgaccattccattcttttagagaatctgatggatcctgctcatgttcctatctctcatgatagaacggatttcactgctaaaagagaagatgctcagcctttggttttcgaggtcacagagcgaagtaatcggggtttcgcagggacttggggccgagagaaagaaggtgggaaagggagtaatttacttcggtttgatgctccttgtgttctgcagaacaatcgagagttcgaggggaaggatggagtgaagaactatttttcagggctgtttctttgtagacctacagggcaagggaagtctatgcttattgttaggtttggggtcacaaaaagatcgcctttggtttcggtgttacctcaatggttctggcatcagaatgcctgcaaggtttttgaacaagacatggggtttctatcgtctcaaaacgaggttctgatgaaggagaaagtaccaactaaggacttgtatttgaatctaaagtcatcggacacatgggtcgctgaatatagaaagtggatggacaaagttggtcatgggatgccttaccatttcgggcataggaccatatctctccccaaagtccctcctgtcgtggaacatgccccggcagggctcattgcagctctctctgcttcttaccctgcaaaaggcggaattgggactatgcatgctcccaatttggctaaccggtacttcagacatattattcattgtagaagctgcagcaatgtgatcaaatcttttgagctctggaaaaatatcctctctgccacggcagtggctttgacggctttggccattctggtggttagtagacagtggaaggctgtcctgttaggttcagcagcattgtgctcagccgcagcttatacctgcttaagagctataaatctaaacaccaataacttcattagaacacacagaagactatgaaaatgtatagtgtcatgtttcctcttcttccaacaatatgtatttcatgaaataaatttttgcttgtaaacgcaattatataattcagaaggttccaatgtttgccatcaatcttacagtttaaccatgaaatttctgttaaactggtttaaagttctatgttctaaaacttgagccatttcttctcattctctttgcttactatagcatttgaggcagctgcttgacatgctaatgtacttgccaatgcctttcggacttctttcaatcttctcgtcgcagcctctgaaacaactagatctttcttgtttctgttcaccatctgttctagtttcaacatttctaacttcaagtctctgacttcatcttggtattcaaccaaagctttcctgtctactggacctttgttttgcctattttttacagactcgctgtgtactttctcatggcgggtaggaaaaatttgttcattgattaagctaaacaaatcaagcttcgattcctcttcctgtttcgctgctttagctgcttctgcaaacttcttcccacgcttccttttcccacctctgctccttttcttcttttgtttctcgctttaacattctccattcctaatgtgctcaagagcataatccagtgaccgctttgctggaagtacttttactaagattggatttaatatcccttggccagagacgccaagacccatcccttcacggtaacccatacttgccatcatcttcgaagctattcctctagtatgattctcccatttagcaaataaggcagtgtcagtttggacacctcttggtagatttgtgctttctagaaagcctatgccttgtggagacccttcatcataatcacttgaaacagaatcttcagaatctgaagcactctgttgttcatcctcctcctcctcctcctcttccccatcatcatcagtcatctgagcgtaaactgataatgccaaagaatcagatcctagctttgcagagcttttgtatctc

SEQ ID NO: 38568 - DNA, 5240 bp, Arabidopsis thaliana landsberg
  unsure (1)..(5240): unsure at all n locations
aatggattgatccagatgtgtggaaaggtctagtacagttttggcaagatccaaagtcagaaaaaagagtaacaacagcagaaatgctagatatcatgatccggatggcaaagggcatctataaacaccgttcaggccagacctcatacaaagctcgtgcaagaaaacgggtacgataaatattcttctctccttaccattacttaatctagaattacatattgacatcttgtttatctctttgtgtttcagtgtgagaagactggagaaaaaaactcctgatttccttgagctgctagatgagacacacagaaaagcggatggaagcttcatcgatgggaagtcagaggagatctacaagcaagtaacatctaggattgaagaggaagagtctcatatgggttcaggggacaatccggagagcactggatcaggtggactttctgttcatgccaaaaacaagatatttactgaggtaaattttatgtgctctttctgttgtctacttcataatcactgttagcgttgtctacttgataatcactgttagcgttgtctagttgtgtctgaaatcttattgtgttgtctgaaatcttattgacaacttattgtgttgtctgaaatcttgacagcttattcattatactttgtgtagtgttgtgtttgaattgctttctattgtaagtgtggttgtgttgtgtacttgatagtcactgttagcgttgtctagttgtgtttgaattcttttgtcttgtgttgaacttgttttctcacttgttttctgttgtgtccttgtgagtttttgtgacctttgcaggttgctccgagaaagaaaggaaggatttatggtgttggatctctgcattttgaagcatcctcagcccatagtggtccaacacttcctagtgatgatccggttatactttctgagaagctggctgccgctgaagcttgcattcaaaatcaggctgggaagatcaacaacttcgatatcctctttgactatnnnnnnnnnnnnnnnnnnnnnnnnnnnnnnnttcttcgacgaggttcctcgacacagacaagaccggttagcgcaaatgaaccacctgtagctacagctccggaacagcaagccaatgaggagacagctgctgctgctaccctagctaaccttgcaacaggatcctctccatcatcagtattttgagaacaatgtctttgtctttttccttgtaatctttttagaacaaattgattatggtttcaaacattacaaacgtagtatacattttagataacttgtgaaatttcagctttcaattgtgtctttatttaagaagcaaaaatcatctctaatcaagccataatttattaattaagactaattaacaattaattagagtctaattaaccactaatcaagccttaatatatctgaaagacgttgcagaagacttgcaaatccatcacaaatgctgctagggatttgctaggcaaaaaaagaagaatcgcaaatccctcgtagcaattgcgaggaaagtactagaacgctaattgcgtgtgttttgcgaggaaaacggtttctcgcaaattttgtgagagaattgtgacattttaccatttgcgaggagcaatttgcgaggagcaatttgcgaggaacttgttgtcctcgcaaatcccttgcttttagctgtttgcgatggcgagtcaatttctttcccgtcgcaaatcgactgttttcttgtagtgattgtaccacatgtgaaagtggagatccacgatggttgttatagaagcattattattgatagtattttagattagttgttaggctaattagatatgaaatataatgtttttattaattatattgttaagaatgactcttatataaaagccaaactaaaatctaagaaccggatatgtggcattttatgattaggtgtttcatttttcttttgtttcttctttttctctctttcacacaacacgacatttaggcgtggacattcagatttcagatcggattcggttcgggttatttcggattcggataattcggatgaagaagtttattatccgtgcggattatatgactattcggttctgtttcggttcggatggtgtcagattcagatttcagatcagtttttgagaaaaaaaaaactaaaaaattgttcaattttaataaagatcgtttaattttactaaaatttggtttaattttgcaaaacattgtataattataataaatataactaaaagaattcggatatcaactaaaaaatatgttggacactagaactcgactttgtgatcgacgtgcgcatcaacaattaaaatttgatttgctcaagcatatatgaaaatgttttggcaaaaaatcaatagtgtaattaatcgttttcgtttatgtttacgtcatgtttgtttaaacttttatgtcatgtatgttttaaattttataagttgtaataattattaagattttcaaaactaaattttttgtatttttaaataaattttttttattaaaactctaagttaagatctcacaattgcatattgccaaaagtttaatttttttaaccaaattcttattcaaaatcaattataaaaatattcttaagaattaagctaagattaacctaagatactaccaataataatgttcctagtcctgttttagtcttcttttagttggttcatattttatttttaattaaatttaagtaaatgactaaattatatagaaaaaaaatcattgatattttaatattatatctatgaagggttctaaaccaatgtatatgctctcacgtgtttatatctagttgtttgtaaaatactgcggcgatagtattgactgagttgacatcataaatttataactgttttacaacttgcttcaattagttgcctcttttaaacataaagacaactgtatttttcttaaataaataattacccatatatgaaatattttagagagaacacccctaagactaacacacatattcactagtataaatagaataccttcttcgtagaaccatgtataccccttaaacacacaccttcaaagttgttgaaaaaaaaaaaaaatggtagaatttcatgagttgttgactgtgagggtttcactctttttagtaaagctatttcatttgatttatcaatggagcaatccaaagtgtaatggaaaacttcctccagggtcaatgggttatccgatcattggagaaactattgagttcatgaagcctcatgacgctcttcagttttcaacattcatcaagaagagagtcctcaggttctttttttttttttatgcattcatttgtcatgtatatcttaatcactacttacttaggttacgttgtcttttttattggttggtaaataaatatagacatggaccagtttttaggacaagcttatttggaggaaaagttataatttcgactgatattggattgaacatggagatagcaaagacaaatcatattcctggtatgccgaagagcttagcgcggctatttgggtcaaacaacttgttcgtgaataaggatactcataaacatgcccgcagcttgacaaaccagtttttaggttcgcaagctttgaaattaaggatgattcaagacatcgatttcttggctcgcacacatctgaaggaaggagctaggaaaggcagccttgacgtcaaggaaacgacaagcaaggtaaaacaaaaagtcatccattttgatagtttttgtagctcataacaagagaactttccacttaataaatcatcttatcaaatacatatataatcaaacgttacagattttaattgaatgccttgcaaagaaagtaatgggcgagatggaaccagaggcagcaaaagaactcacactctgttggacattttttcagagtggctggtttagattctttctcaaccttcctgggacaggtgtctataaaatgatgaaggtgtgggttttctataacctaaatatagtatcatttatataagagtaggctttttgtgcaatacactgaggctgatatttcgtggcaggcaagaaagaggatgctgaagttactaaggaagacagtgttgacaaagagagcatcaggagaggagttaggggagttcttcaacatcatatttggagaaatggaaggagaaggagaaacgatgagcgtagagaatgcggtcgagtacatatataccttctttctggttgctaatgaaacaacaccaaggattcttgcggctacagtaaagtttataagcgaccaccctaaagtcaagcaagagttacaaagagaacatgaaggaattgttcggggtaaggctgagaaggaaggcggcctaacatgggaagactacaaatcaatgcatttcactcagatggttagtatctaccaaaatgatacatataaacaaaaagagaactcattccttattataaatgttgacatatataggttttaatacaaatatggttcaggttatcaatgagtcgcttagaatcataagcacagcaccaacagttcttagagtacttgaacatgacttccaagttggtgattatacaattccggctggttggatctttatgggttatccttatgtgcatttcaatccagagaagtatgatgaccctttagcttttaatccatggcgctggaaggtgattttaatttgatgttcatcttttattttatttttacttacactaatcaaattcttaggaatttaagcatgcatatattaaactaaaatttcagggaaaagacttgagcacgatcgtctccaagacttaccttccctttggctctggtactagactatgtgtgggagctgaattcgttaagttgcaaatggccatttttatccatcatttgtttagatacaggttcgttttttctcatttaatgactctacgattcaagccaagtttaactgcactcaaagtttttttttacttacgtttattacctatggtgtgaaggtggtcaatgaaggcagagactactttacttcgaagatttatacttgtgcttccacgtggatctgatgttcaaatctcataagacaccaaacactcaaacaggataactctgtatagtgttatgagagaataataaaattcagtttttatacctttcactctttctccttataacttttcatgtaggtttggtatcatagccaatttcgattttctagtatttgctttataaaaatattgttattg

SEQ ID NO: 38569 - DNA, 690 bp, Arabidopsis thaliana landsberg
ttagaacaggactaacacactggggtacattgtgatattgccagagaaacaaagctttatccttttatggttgatccaaatacacaacactactactgtggatgtagctcaaatggcagagtacttgcctagcatgcacagggtcctaggttcgagccccagggaaaggaaaaacacacaaaatgcctcttattaaatgttattcagccgggccgggcgtggtggtccatgcctttaatcccagcacttgggaggcagaggcaggcggatttctgagttcgaggacagcctggtctacagagtgagttccaggacagccagggctacacagagaaaccctgtatctaaaaacaaacaaacaaacaagcaagcaaacaccaagccttatgcccacagcagccatccacactggtggaggatcacactggggccctatcccaggggcaggagctatgccactctgtcttcatcagggccacaccaggctaagtacctgcataagtatgtatatacatacatacagacagacatatacatatatacctttagtggatttggcagagtccttcaagccatacatatacatttggtgtgttgaatgggcagtgccccagagcctcgatattctttaattctttctttctttctttctttctttctttctttctgtctttcttgctttaaatcttt

SEQ ID NO: 38570 - DNA, 1129 bp, Arabidopsis thaliana landsberg
caaatatgggtgtcttttaaggttcagtaccagcgggattattaaccgtaccctttttgggaaaatgttaataagtttcaaaatccatttcgtcgtccagtagcgacaaccgtctttttgattggcaccgcggcggccctgtggttaggtattggagcaacattaccgattgataaatctctaactttaggtcttttttaattcaatttattcaattgtaaaataaacgacgtgggtatctagggaggtatctagggagtagtcatttccaaatgaattctccctagatacatatctaattctaattaatttaattaattaattaaaatgggttcgactggaaaatagaaattacgttgaaatttgaaaatccatttcaatttcaaattgactttttagtcttagtcaattttttttgaaatgttttttctattttttttctagaatgtctaatatcttttttacatcttctacgtgaaaatgttcaattttgataaggtcttcttgactgttattcaaaaggtccaataatgtatgtatattggattttttgagacaattgtagattctgggaggcaattctaattggtcaataaaaatatattgaaaggctagttcttttgttttttttttttttcttaggttaactaatcgattatgaaaaggaaaaaagggtaaagtaacttgatgttgattgttctctaaatagaacgtttcttcttctacatgtagaaaaggaataaataaattaatcaaattccggaaggcttgatgaagtgcttctttaggagttaaacttccatttgtccatatttgtatcaagagaatctcgtgtttttctttcccgttcccataagtgtcaatgctatgtttggcgttttccacaggcaggaataccgcatggataggatatcttcagtcttaggggtgggttcagtttttgagcctcaatgcattaggccttgctgtgtttctttccttcccccaccaagttggtttggttttggcagtgatcttctgcctaatatccggtatttccccactggccggtcgcataatgtcaaccgctgttattagttccggtccttggtccctaataggcgcggcgtgcgttccgctttgggagaat

SEQ ID NO: 38571 - DNA, 4829 bp, Arabidopsis thaliana landsberg
gctgctctccagacctgctgtgcataaaaacaatcaaaaaataaatgttgtgtagtttcctcttcttggcagcatcgtttgcagacaggttggttccggatgtgtcgtctcttcagtgtttcgccagtggctaaggctccagatagaagtttccacagaaagtattgtaattttgggactgttttaagtttccaaatccgtgtctttaaatctaagttccccgtggtggttatacgtttgagtctctgtaaagttgatttgctaaccagtaagcagatttaacagagtagagtccatccttagtataatgccatccaagcatgtcatgaggtgcatgggcgcttagtttcagggacagaattaagtttgcatcatcttttgtaaccttctctctgatgagatcctctttccacattgaaccttgaatgcattcattctgacaacagttgcttctcttcttgaccattctttacccgtggaggtcgtagagggtgaaccggtaaccaagggtctatccgtgcactgatattggagccgtcaccaattgcaaatcggagtccttgtttgattaaatcacggccctggagtagtgacttccaaacaaatgacgcctttcttttctgagtagcattgagaatatttgattcattgaaatatcttcttttcagaatccttgccatgagacactctggttttttaggatcctccaaatctgttttccaagtagagccaaattgaagttctcaaaatctctgaatcccattccaccttcttttttcgacaaagacattcttttccatgaaaatcaatgcatccttttttttatcttcaccactactccaccaaaacttagcaagaataccatttatttcttcacaaatggattgtgaaaacttgaagatgttcatggagtaaactggtaaggcaagagcaacaaccttgagaagcacctcttttcctcctgccgagaggaacttcttactccatccctgggtttttgaccgcacacgttctacaatatattgaaacatttcagcttttttcttctttatctcttctggaagtcctaaatatttgccttgacctccttcgttgtggatccgcataatacgtctcacccgagtcattacatgtggtttaactcggctaccaaaagaaattgatgatttccttaagttgacagcttgacctgaaaccttctcgtaaaggctgagtatctcgcgtatagtcttgcaggatttatcattcgctagcatgaagaagagagagtcatcagcaaataggagatgggtgattgctggtccttggtcactgattctgatgccttggaggtgacgctttaaatctgcttgtttcatcatgtgggacaagacttccgcgaataaaatgaataaataaggtgacataggatctccctgacgaatacctctctctggtatgattgatccttggggagagccattgatgaggaccgaaaagctgaccgaagaaacacatgtcattatccgctggatccggcgatcatcgaatcccatgtgctccgttgttgtcttcaaaaaactccaatctattcggtcatacgcctaggtgatgtctgtctttaaagccatataggattttgattggcgtttcctggccttaagcgcatggaagacttcatgggcaatgatattgttgtcagtaatcattctcccacggataaaagctgtctggttatcagagataacactagataagtgtttctttaatcggttcactaagatctttgaaatgatcttgtagctgacattgtagagggctattggcctaaactccatcatacttgttggtgcttccgtctttggtatgaggcagatgtttgtgtggttgtgttgctgatttagaaaaacctctgcaaagaatctctcaacttccttaataattgtagggttgatatcatcccagaactcgtgataaaacgctgctgaaaatccatcaggtcctggagctcatgtggtccaatactaaaaacagctgtctttatttcctcaggagtaacatgtcttgtgaggtccatattcatctcctgtgtaacccacttcggaaagtcttagaaaatctgagaatgcagatcagtagtagctggcgtagaactaaacagttcttggaagtaagaaatggcaacatctgcaacttccttgtctcctcttctcgcagtaccatctttgtcttctatggaaacaagtttgttgcgatctcttcttgtctttgtcactgcatggaaatacttggtgtttcgatctccctcatgagtccatttatttctgctcttgtgcttccaaaaaatctcctcttcaatataagcttggttaaggtcctgtttcagcttttgtctctctgcaggagatgaagttccaaaggaaaaagctttatctagattataacgtataatcccctaagattagccaaggctctctccgtcaatttattccaatcctttctagcctctcccaaaggtcatttctgaaactaggattaagaggtccatacacaaaggaaaaatagaaactagtttcattagatttcacaaggcaatctacaagattagggaattgaaataaaacagagacttctagtgaatgcttccataagactactaaaccaccactaaggcctacgggctgaactgttacataaaagggaaaacctaattcacaagcaacatcacgaacacgatcatcttgttgtttggtttctgaaaggcatatgatgtccgagagatagcagtgtgttatctccttgaggcgtcgaactgtgaggtctatgccgagaccttgacagttccagcagattgtaatcatggagcaagtggtggtatagggcccaccgcgcctctgcacttggtgttcctgccggaggaacagcttccttcacctgcttcctttgtcacgattccttcagtctccttcacctcagattgaactagatcatcatctcgcttgcgtttacctctctccatagcaattgcagactgacgctcacgagatgcatccatgttggacgaatcaggctggatgattgcagagaagcgtcggtaggatggattccctggaatgtctcctgtagcattctcaaagataggaataggattaaatagctcactcatattcctttcctctttgaaaattgagtaggctccatggggttcatcaagttcatcaccggttggtagttcattgcgcaggggagtgttgtcctccatagcttctgcattctcaggaatttcaacatttggtactatttcgcagcatccccgttctcttcatcatcagcaatctccctaatgatcactccatgattttgattgattgcaggagggagagcagcatcctcattgtcatcatctgagagatcctcgccaccaccattctgaataaggcaggctcctgaatcgtgagtaagcatcccacatacctcgcaaaatccccttagtctttcaaaccggaatcgtaagagagtattcacgttggcctcaaattgaaaatttcgctggaaccgaagaggatcttcgatgttccagttaacctgaacccgaacataatccacacgagccgctgtctctagaccgaagtcaacctccatcaagtttccaagagccctcccaacatgtgcaatgacttcatgagtgagatagtgataagggatgccccttatctgtatccaaaaaggtatgaaattgatgagcggttgatttgtagggaaccaccgctggagtatcaacatacggtcattgaacgcccatggtcctcgccgcatcaccgtatccaaggattcttcagatgggaagataaattgaaattgattccccgaaattagccgtccatggaccagccctgactgaccccagattctcggcattgaagccacaatcgatcgaatgttttgtctccttggcatcaccggccgtcccatcaaaatgaaacggttctctgcaaccgcttgtgccacgatctctgccggaagagcaaatggagtgtcgtctacattagctaaaagtcaataaactaggtaaattccaggcgagatattttttatttttaatccaaaaaattacataagagatggacattaatttatcattggttcctccctctgtctttcttcacagcgtgtgtcgcccatctactattattttccattgactctaaagagttcatctggatcattagtgactcataagctcttgtggatagatagaatgtaatattttgtgttgtggattgttagttgagtagagatagtaaattttgatttctagaatcatttttagctatcaattaaagatcatgaaaaatttcttacctgaacatccgtgcagtgagcaaagctctttaaaaaataaggctttaaactcaagcgcttagatttgtgtggatgcatgtgaagatcctccataaacctacttgtttactttatttgttttagtcgctatttagtcctaacacgctgtttaacgactactttgcgactcatagtgtagctggtaatatatgtattcttgtgatcaatatatattttatttttatttttttcactaatatataaattttcttaagaattatggatgaaaggtgctctaagagccaaagagattgattactttggcaaaaagaaaccataaagagcatttttcccaatttcttaagttacaagatagaaaattgcaagttttttttttgttttttttgttcaacaatttgctagtaattctaaattgtaagttgtaagtaatgggagaaattttcttccatggtggaactcatgtcatgccaagaaacactatcggttta

SEQ ID NO: 38572 - DNA, 6037 bp, Arabidopsis thaliana landsberg
  unsure (1)..(6037): unsure at all n locations
tgaaggttcgagtcatggggttattcgcttcttaggctctgtcgcaaagatcgtgcttccaatcatcggtgttatctctctattgtctgcatcaggatatggtccagagatgaggaaaagaggcgcttccttgaacctttttggacttctcccgcaccgagctaccagagggaatagatcacctaaccaatgtccaccagggaaagttcttgtgattgaagatggagaagcacggtgccttgttaaggaaagagtcgaaataccatttgactctgttgtagcgaaacgcgatgtaacttacggatacggttgagtttgaaagaaattaaacaccctcctctgtaatgttcattgcctgacattcagtgtgtaaagtttcaaccttttcttacctcttagatatgaaagccacatggtgctacataactctcacaagttttgttcatagttgtgcaaataaattggatgagggagagattcatttgagtagtataatctctgttctgccaatttgatcaatagattcagtgtatcccaacttataccacttggtgtggttggccaatacataaataagtaaattaatgagataaagagatctaaaagacttttctttagtgttttgactaataattggtcaagcctaccattacaaactatgttccattaccagtacagagcacatggtttcactttttaaccaagcaactttatcttaaacttgcttatcaagaactgtctcttcggtaacacaaaagggtcttttatcaaaacctatatataggatacttttcataattggagtaagatctacaaaacagagagttgtatactttaaatcatttagaggttgtgaaatattatggagagtgaaggaaagattgtgttcacagaagagcaagaggctcttgtagtgaagtcttggagtgtcatgaagaaaaactcagctgaattaggtctcaaactcttcatcaagtaagtaatgatcccattgatctctctctattttctttttatgtatatagtctgagatatgaactactattttgaactgtaggatctttgagattgcaccaacaacgaagaagatgttctctttcttgagagactcaccaattcctgctgagcaaaatccaaagctcaagcctcacgcaatgtctgtttttgtcatggtaataatcaatatcaaataacatgattttgcttatatattcgaatcaaagattgttgagttttggggtttattatcagtgttgtgaatcatcagtacttctgaggaaaacagggaaagttacggggagggagactactttgaagagacttggagccagccattctaaatacggtgtcgttgacgaacactttgaggttagtagttatttgtcatatctcaaaatgttctttatcatacaaatatgttaacttgattttttttggttgatgtaaaaatgatttataactgcaggtggccaagtatgcattgttggagacgataaaggaggcagtgccggagatgtggtcaccggagatgaaggtggcttggggtcaggcttatgatcaccttgttgctgccattaaagctgaaatgaatctttccaactaaaaaatcatatactattatatagttgtaaacttgtaataaatatttcattttgaattgttctcatgactgttgttctatttggtttggtttgatttagtgacaataatatatatatagtgtgcattccaaaatcctaatcattttgaatacaagtttcttactaattgttttgcccaaaaaaaaaatgtttcttacaaattgtattaagattatgatatttttgatagactttaaaataaatataattacttccaacagttttattctcactaagtcttggccttttacaacctgtaaatcttaagaaatgatgagcaaaatagagaaaaacagctacctaaaaaaggtaagatacaaaaactttttaccaggctcatgattttatcttagaacacttcaatatataattgaaaaaatgtcaaaaaaatcataaacttttaaatttggtacgtttaaatccccaacttccaaaataccactaaaataccaaacttgttattgattttagaattaatatataacttttgttgattttgtcgttttaagcacgtcgttaagtcaattgacagaaaaattaacggagtgaaatattcagttagaaatatataattggtaactcgtacgaaaatgtttaaatgttcaaattaaatcacttaaaatagactttactaagctgtcttacgtaattaattattattatttttcaacattacacgtttttggtttatggacaagaaacttaaaaggatatcaaactctaatgtatcaactttcacatgctcctaattaagagtttataacacgatggttaaacactcaaactgaaatactttgaaggggaatcatcctcgagaaataagggagcctacaactcccgcgattagggtcgttggatccccgagtacggcggaaatgacaaactgcacggctataccggcgatctcgcagcatttttgaactttacctttgcggctgctacggtggtgatgctcaagtgtgttctttaagaccaggctcttgtgttcaatgcttttaccatgttgtcctgtgtacagctctcgccaattctccaccaacatctctctcacacacgcgacatggagattgtactttttgcaagatgacctgtatttttgtgacaaaaaaaacaaacatatttagctgatttaaaacctgatttttattattaactggctcaaaattatgttgcaatgcattaatcaaggaatttgactctaaaatttctattttggtatataattttgataactaagaactaacgttatctatttaaaaacttcggcgatgacacatatataatgtgctaagtcagtgtataaacttgtaaagttctaacttagagtgcacgctatgtaacatgtctaccaattaccaagcacaagcatttctttgagaaaagagaaagtttgtgtttgaatgccattgctttaatttttcctttttctctaacatatattcggtttaaagccgaaattaatgttcaagaatcaataaataaacgtaatccaaaattttatcatattgctttaaaatattctttagagatgttgatttggaatatatgctaatgttgactaaaaacaccaatgaaaacagcggactataattaattaaaacacaaacaacttaagcaatgctcatttttttttccaattaccattctatatatttgatttgagttggatcttaattattttctaacatataacatactatatttgtaatatagcgaactatatatgttttcaaataaaacatgctaataataaaaaaaaaaagacgaaacgatttttatttttcttacatgctaattttgggcatcataataatgaaagaacaagaagagaatcaacaagagagacctgtaactccagctacggcctttttttccacatcgatgacaagacgaactaactttacgataaagaaagagtttggtctctccatcgtccaaaaccataggaagcatagcgcaacatgggtgaagatcaaacccacaagccttgcaatggtacaaaaaccccgatacatccttctcgcacgcattgcagtaccgtctttcgttccctggtggccgcgccacaaactgaaacgtacactttttgtagaacggatgtgttatggacgctgagggcagggcacagtgcgcatggagatcaaaatcacagcttccatgataatcaccggagcagcgatagcgagagccgataccaacttcattgcatccatcacatttgaagggtttctccgtgtagtcgaattagaggttgtgttgagggtgactaaaatgtgatatatctgcgtattgcattgtttttaaaaaatatttttatgttttgtttttttgaaaatcggttatgtctacaagagtttggtatgaatcataatttatagaggagattctggagaagctttaatcaagtgacttggagcatccaaaaagaaagatgggagtttatcaagtggaatctttaagttgctgcaaatgtaagaaagtccataagagaataagaatgtagaatatgaattggtataaaactttctgcccattattgatgaaattataaatattaacagtaaatgtttgtttgttttaactgtttgaaaccttcactcttttgaagttagaacccaactcttttgtaacaaaaaacaaatgtatatcctctgctgacatagttaaggatcagatatttatggtaattatagaaaaaaattcatctctcatataaaaaccttcactttttaaaattcaatacgcgaattcacttttttttttgaaaaaacttgatattttgtactattgactttgcttttgaaataagggtttttgttaatttatttttgatgagtaaacattaaagtacaaaaatatataaacttggaaagatttaggacataactcaactattaaccttaaaactagatttttaacactattttttaaagttaatatatattaaattttccaaattgtatctatttatagaatatttataatttatagtttagaattgttattaagtaacattctgccaaacccgtcccgccaacccgtcccgtaaaaaaaccatttattttattaatattgatcttatttatgatatgtttatgaattattgtctaaatattttgtaattttgtagtaattaaatgctatcaaatatctctatggtttgatgatattaaatattttggaagttttattttagtaactaatggtgtagttaatgttgagtgatttaaggaagattgttaaatgtcaaatatttaattcgaagtttttattctaattatcaaaaacaaacattaaaatctagtggcaaccattgtaactaagtcccaactacacgatttatttcacaaaatggctgcaaaaatgtatatatagatatataatttttaaaactatgtgaagtttatattttttgaaaaaactctttattatatactttcacacattactattttgtatttaatattaagtaaagaaaaaaaagcataatcctgttaggtcagattgggttggccttgggtacaattactaaatggccacatgcttgtttagtaatggaaaagacatagatgaaagtgtgtttcaagatttttcctttcaattttgtggaggatttggaaaatagagattgacctttgcttttatttaatgatcagttttatggcatgagagtgttggaaaaaaaaacactatatttgatggacaagaatgaaagtaaacagatagcctgaactacctaagacgttctgaacaaatcatgtaaaactttaatgggctaaggcaaacatcccaagctttggaacaatactacatactacaacctacctaggtcaacaaagtatgaaagtaatcagaaatggtcttcaccttcaccatcttttagcgttttaaaggatgaaaagcgagtttatgaaatggaatggaacaaaagcatatctaaaattaagaatcattgtaggtagaggccgaaactcctgcaatgacatagtgattcttagatggtactcgtaattggttaacaccaatttnnnnnnnnnnnnnnnnnnnnnnnnnncaaacctaaacccctaattccgattaaaccgtgagtcgtcgctctctgtttcctcctcttttcaaatccttctccaccggtcatctcctcttgcaatcactacgactccgtctgtttcccggacaaccgcagctctcctctcatcctataaagtgtttcagcttctatgtttaaaattcacacagagaagcctaatttttaaaacactactctgggaaatctttctttgggaaattgggcttagggatttagaccaacattgattggctcggctaatccttgaaagctatgctgagtaagttgtcaagggcgtgctactgcacttcttctgttcatcgggcat

SEQ ID NO: 38573 - DNA, 2345 bp, Arabidopsis thaliana landsberg
  unsure (1)..(2345): unsure at all n locations
tatccaggctgtttaaagctgagatagatttccccgatcctcgaccaccattctcggttagccgcggtggacctagtttcctcatgttcaccactctctcagccattttattacccatagccactgggctcaagttatcacagccacttccgccgttgcttgcctttgctcgcccacgcacaccagtgagactcccgttggtgttcccgataggagcccgacctctggacggcgaacaagattgccttcttgnnnnnnnnnnnnnnnnnnnnnnnnnnnnnnnnnnnnnnnnnnnnnnnnnnnnnnnnnnnnnnggtgctgaggctactccaggtctgcctcttgaagctgagaccggtctgtctgctaaagtcgtcctcagattcggtggagcttctaaagagaaaccaggcatctctggtggtttccacggcctcgacgaattcaaagtaggagaaggagaagtccctcgggacggagccttactcaacgaattcacagtaggagaaggagaagtccctcgcgacggaaccttactcgaaactattgatggaccggtcggggttgaaggcctgcgggttggtgtggctggccttgacactggcttttttgaagatgcagaagacggtcgaggattagaccgagttggagtagctgatctcgctgaaccgcttgaagtagtagtggttcgtggagctgctgtggatgtagtagcacgtgcagcagttaaggtggcacgtgaggtgggtgttgaggatctagaatttgaagctctggtggtcacgggccttgatgtggaggtggttggagttgtagaccttctggttggtgtggcaggtctgctcgttgaccttgagctaccagaagaagatggtcttctgagtccagctacagaggaagagcttgtttggggcttattattgttccctgagacgatatcttcacgacagttccctagctgcagaacccaacacaagagtttcaatgcttatcaggataaagaaataacttaaacttggaccagaggcattataagaaaatgaattagttctgtctaacaagttagtttatacccgagatttaagaaccgtgggtcgggaattgggagcatcgtgctgattcattacacttctatgtgactctttctcgaactgtggcgtgcctggaggtgttagcagcctaaacaagagacaagaacatcagaccaatgattcgctgaagaaggagacatataattactctctagcactaagctcaaatgaggtaaagcaagaataagtgccactttattgtgttaatttcaatctaattaggacaaattcaattactagacgtataatcctaaattaccatttctaattttagaatgcacatacacttgcaacaaaaaaaaattgagattttgcttgcaaatttctgatactagcatagatattttagaagcaaaataaaaatggaaacattaccaatcgtaatcagacttctcattctccgaatatagaaagttctcagcagcggttctcctgagaggataacgttgagacgacgccgtttcggagacaccagagagagcagccgccgccgcagccgtcaacgttgcgttgatactaacattatcagatcctaaaagagacagaacaaattcaatcaacattgccaaatgattattacataagtttatatatacatatagagagagaaagacagacctgttaaaagggaatctgctgtatgttctttctcgcgacgacgcatctcaaggaacagagagagttcttcatctctgtcgtgggtcaacattgacgaaagctgagattgaaattttctgggtctcgtgtctgaacttgcacaacaacaaattatctccaaaataaaaagaaaaatagaatcggaccaatcagatctgagatcacactaaggagaccttaagagagctggaacagccaccaatgagaataatagaagccactagagaacagaggacaagaacccaaaaccgttttttaattgattcagagagagagagagagagagagagagaagttttttgagttgaagaagaagaagaagaagaagaagaagggagagagtggggaagatgttcttcttctcaacaacgagatttttcttttctttttaatttgttcaatttttttaaaattctgatttcaaaccagacaaccccttggtcgtaccatatctcttgtttttttctctcttaaataattgaactatgggttttgaaagtttgaacagaacacgaagcatcgggttcaaaacgcagatgatctaaagaaagagcccacgggacacgtgctctgtctttacccatgaacatgctattt

SEQ ID NO: 38574 - DNA, 8984 bp, Arabidopsis thaliana landsberg
agtgtaagttaaggctcatcccagtcttattggtgtatgtctctaaaaaacttcttcctttcataactggtcaggttgggaggctctactccgcatgccaagtaatggacgttatcagcataccatggagatcctccttcaacaacattcaattggtggaactctttcccactgtagctccttccgaagaattctacaaccatgagctgctcttcttgcattgaatcatctatcggaatgggttcttcaattctcatccttgacagatggtcagctgcaccattttcaatgcctttcttatctactatctccatgtcaaactcttgcaataagagtatccatctcaacagtcttggtttagtatccttcttggcatacagatgcctcaaagctgcatggtctgtatacacagtgacctttgatccaaccaaatagcttctgaacttctcaaatgcgaatacaacagctagaagctccttctcagttgttgcatatcttccctgagcttcatccaacgttcggctggcgtaatatatgacatgaagcttcttgtctattttctggcctaaaacagctcctactgcgtagtttgatgcatcacacatgatctcaaatggatagtcccaattaggcgctcgaacaacaggagcatataccaaagcatctttgatggtgtgaaaggatttgaggcagtcctcatcgaattcaaattcggtttccttgcacaatagtctggttaacggtctggctatcttggagaagtctttaataaatcttctgtagaacccagcatgaccaaggaaacttctgatgtccttcaccgtttttggttgctgcaactgcatcatcacttcaatttttcctttgtcaacctctatacccttctctgatatcttgtgacccaacactatgccttccttcaccatgaaatgacacttttcccaattgagaacaagatttgtctcttcgcacctggtcaataccctgccaagattcaacaaacatgaggagaatgaggggccatagaccgaaaaatcgtccatgaaaacctccaccatctcctcgattaagtctgaaaatatagaggtcatacacctctgaaatgttgcaggagcattgcataaaccaaatggcattctcttataggcaaaagttccataaggacacgtgaaagtggttttttcttgatcattagggtgaattggtatttgaaagaaaccactgtatccatcaagaaagcaataatatggatgattagccaaacgttcaagcatttggtcaatgaatggtaaaggaaaatgatctttcctagatgcagcatttagcttcctataatcaatgcacattctatgaccagttatagttctagtagggatcagttcatccttttcatttttgataacagtcattccaccctttttagggacgcaatgcactggagaaacccaagtactatcagagatagggtagatgacaccagcatcaagaagtttcaaaatttcttttttcactacttctttcaaattgggatttaacctcctctgtggttcaatgctagaataggattcgttttcaaggtggatcctatcgttgcataaactaggtgaaattcccttaatgtcggataatgaataaccaattgctctcctatactttctaaactcaaataatagcaggttcacttcatcatcatttaactcaggattaatgatcacatggtaagtagagtttggaccaaggaatgcgtaccttagacctttaggaagtggttttagatcaacctttggcgccttcagttcagaccagtcatctgaagttgggatgatcggctccccaaattcgttggcagacaagatcgagtatttgctcgagtgtgcaggttgaactcgtgttgacccttcttcgctcattaccattacctccgttgctggtccattcaaatcctcaaagggttctgattcttccattgctttgtgggagtctaacagcttctggtatcacaatgtttctaaatgtagaaacccaccttcaccacttttggttaaagcactgttaagatgatattcttctacaagctcttccagtaactcatcagctaactgatccatttcttcgatccaaaagagttgcccatctatggtatgcttcttcatcgcgtctttgacatcaaaggtcatcctaaagtctttgccaaggtttagatcaatcttcactttcttgacatcaatcatagctcctgcagttgctaagaaaggtcaccctagaatcaacgggtccttgggctcttcatccatctccaggactacaaagtcagttggtatctctacagctccgatcctgattggaaggttttcgagcaaaccatgagggatccttactgatctgtcacaaaggatgagggatatattgcaggatttgtattgagtgaacctcaatcttttggcgacagagagcggcatgagactgaccaatgctcctaaatcacataggcatctgttgaaagccaatggacctaaagagcatggtagagtgaatgaaccaggatcactaggcttcttaggaatgatcttcttctgtatgatagcactgcattcatgactcaataccaccatctcttgcactttttgaattctctccacgatcaagtctttcagaaacttgtgagagtctgggattagcgctagagcgtcaacaagaggtatccgcaactcaacctccttaatattcttggcaaacatagctctacatttatctgccaacgctttcttgtgacggccaggaaatggaagctgtggttggtagggaggagggacatagaccttttctttcttcttgacagcaactggttttggagcagttggtgatgctgctgggaagataggtcaagtagttggtggagtaacgtggtcgagtggcagctccagttgttggtcgagtggctgctcgagtggttgctcgagtggtcgctcgagtggtttgtcagctcaatttttatcgagactgaaatcctgcccatcttgatttcactgtccttagtgactgtctttggttcctctctagttggaagtgcttttccacttcgcagagtgataccgtgagcatattcttatggattctgaattgctttgcctggaagttggcttatctgttttggagtagaggaagatgcagaatgtccttctaagtatctgactttggtattcagtgtttccaccttgacattcaaatcattgtagctacagtccagcttattatgtaactcagatatcttctttgccatctccatggagccagaggtttctccgtgaagcagctgttgtagcatttgtttcatgtcagcgtcaggagcagccggaccttggttttgctgaggtgcaaatccagcaaatccagttggtggttgctgcaaatccagccttcttcaacatctttgttctggaaattcccattgctggcggtatccagaagcattcagatgcgtggtagaacttctctgtaaagagtgctgagcagagacgctttagtgaagccatgatgagggcattggttggtgtaacccttgaaacgatcccatgcttcacagaagctttcaccagtcttctgtgaaaaaccagaaatctcatttctgagtcttgcagttctggcgttgaagaagaactttgatagaaaagccttcttacaatcatcctaggtggtgattgagtcaaggggcagattcttctcccagatgtgggctttgtcgcccaaggagaatggaaccaaacggagcttgaatccgtcttcacagacaccattgatttttgttaggttgtacagcctatcgaattcatcaaggtggtcgagcgggtcctccacaggcaggccatgaaatttgttcccctgaatcatcgatatgagaccactcctaatctcaaagttgttgttctggatagcaggaggtgcaattcctttccgctgacgctgatcacgtggtgcatctccagcaccaatgttggcagggccattttgttgattctgttcgtgagccatttcgagtggttgctgaggtagaaggttgactgtgtttctcctttctctgagttcgcgagctatgcggaaaatgttgtcgttgaaaaggaggttctgattgcctgttgatcgagttttcatacagcagaggtgtaccttgatcaagaagacaacaagaaaaacacacagttagtaacagaaaagaaaattgaaaaagaacttgatctaagcaagtctgaaatctgaaatataacaaaaaaacacccaattgacaatggcgccaaattgataataggtttttcagtcaattatcctaaaacaccaattatgtcgttgtagtattttagggtgtcaatccaaatgagtgtgatgctaacaatcaagatgtgataaaaagtcacatagtcaagccaagcaataacaggttttggtgtgttctaacagtcctaagtgaacatgtagaaaacagaaaatcaagcagaaataagaaaacactcgaccaacacagcttgttaccaagcactgggtgtggtcgagtaacagatcgagtaacagacagaaattgtagtaggaatactcgactgcacagtttgtcaccagacaactgggtgtggtcgagtatatgagtggtaataggaaagaaatgcaaaaactaagcaacaggtgataagaagcagtaaacaatagctgaataatcaaagaaatcaattggatgagaaattcctaaggatggggtaattgagtagttagtttcctcagtctacaagtgattgacatgctcaataaactatccctaaacaacaagttcgataaccaaatctaagtgccactgcaacagagacccttaagttaaactagtcccagactcaatcaccattgacgagagctaacctaacaggtattacgaatcaacgagttaaagccaaaacgcaccatgtaaccaataccttggtacagagccacaaatctacagcactagctcctgtaactcccaagggtccgaagaaaatggtcaaagtgatcatgggagggtcgaagctctttcgagattctatcagcgggattaagcagcacgagagaaaaatagtcacctcagtggcgaaaaaaaacaaaacaaatcgagctgattgtcccgagatttcgttttccgaagaggaaaccaacgacttcaataaaccccatgacaatgctttggtaattactctcgacattgcgaactgcgaggtgcagcgaattctcatcgatactggaagttcagtcgatctgattttccttgacactctcgtacgaatggggattcctaaaaaagacatcaaaggagctccgagtcctcttgtgtccttcaccagtgaaacttcaatgtcacttggtacaataacgctccctgtcaccgctcaaggaatcattaaaatgatcgagttcaccgtcttcgatcgtcctacggcgtacaatgccatccttggaacaccctggctatacgagatgaaggcggtcccctccacttatcattagtgcgtcaaatccttggaagtcagcgtgcatcgagaatgtcctatatgactgtacacaagctcaaaatcaaatagcaaccacaagtcgaggcggctcgcaatcctatcaaaaaagtcggagatgacctcgtagagagagtggtgattagtgaggagcacctggatcaacttgtcggcgtcggggttaatctgggtgaaagtttccgcaacaagttgatactttttctcaagaagaataagggaactttcgcctcgactgttgggaagatgactggaatcagtacggaagtcatttcgcatgagctcaatgttgaccaaactttcaaaccggtcaagcaaaagcgtcgaaaactcggctcagatcgtacagaggtagtgaattctaaagttatcatgcttctcgaagctggtttgatccgcgaagtcaaatatctggagtggcttgcaaatcccgtggttgttaagaaaaagaatggcaagtggcgcatttgtgtggatttcaccgacctcaacaaagcgtgtcgaaaggactgttttctgcttcctcacatcgaccgacttgtcgaatctaatacaggacacgaaatgttatcttttatggatgtttggggtacaatcaaatcttgatgaacccggaagatcaggagaagacatctttcatcatagagcgagggacctactgttataaagtgatgcctttcgaactaaaaaacgtgggggcaacttattagcgcttagtaaacaggatgttcaaggatctcttcggtaaaaccatggaagggtacatcgatgatatgttggtgaaatccgccttttctacgtcgcacctcgatcatcttcagcagtgtttcgatattttgaatgagttcgttatgaaattgaatccctcgaagtgcactttcgccgttccctcaggcgagttcctcggctatattgtgactgaacgaggtatcgaagcgaatccaaggcagataaacgcttttctagcaatgtcttcacctcggacaataagtgaagtccggcgtttgaccggtcgagtagctgccttgaacaggttcatctcactatctaccgacaagtgcttgcctttctaaactttacttcggaaggcgaatagaggttgcgaagacgcttttaagcagttaaagaactacctttcggaacctccagttctcgcaaaacccgaattcggagaaagactctttctctatatctctgtctcggtaagtgcggtaagcagcgtcttagtacgagtcgaacgaagtgacgagcgacctattttttacgttagcaaatccttttctgacgccgaaacaagatacccgatgatggagaagctggctttagccgtcgtaacttcagctcggaaactccggccatattttcagtctcacccaatcgtggttttaacatctctgccacttcgggccatccttcacagtccgtctcagtcaggacggctagccaaatgggccatcgagttgagtgaattcgacctcgaatttcgtgcgcggacaagtctgaagtctcaagttctcgctgatttcctgatcgaactccctctagctactgctgaatccgatgttccgagtcaaccctggatccttcatgtcgatggcgcttcatcaaaacaaggctctggagccggagttcgcctcaagttacctacgggcgaagtcctcgaacaatctttccggctcgctttcaacgcctccaataacgaagcagagtatgagtctctgctagccggtcttcgcctcgctattggagttggggtacgggacctacaagctcactgcgattcgcaactggttgcaagccagtactccggagactacgaggctaaagatagtcgaatggaggcttacctggatcaggttcgcgagctgacagcaaagttcgaaaagttcgagctgattaaagtccctcgtgctgagaattcggcagcagacgccctagcctctttagcgtctacttccgaaataaccgtcacacgaataattcccgtcgaaacaatagctcggccgagtatacgtctcgaggaaacgaattttgtcaccactcgagctatgcgtaggcgactcaacgaacaagcaggcagtcctgaacctcaacaacccgacgatgggatgatagtccagaatttgtacctcccattgccgaggacgaaatgcccgtggttagtaatcccgaggtttctaacccgatacctcacgattggggggcagattggagggaaccaattcggaattatatcctccacggagtgcttcctcccgacagatgggcagctcggaaattaaaagctactagcgcgcgtttttgcatagcaaatgacatcctttacaggagacttatttcggctccggatgctatctgtatcttcggcgaacagacccgaaccgtcatcaaagaaattcatgacgggacttgtggaaatcactccggaggtcgttctttggctttcaaagtcaagaaatatggatatttctggccgacaatgatggtagactgtgaagcgtatgcacgacgatgtgagcaatgtcagaaacatgcaccgtacatcttgcaaccagccgaacttcttacctcggtatctgcaccttatccattcatgaagtggtcaatggatatcatcgggccgctgcacgtttcaactcggggcgtgaggttcttactcgttttgaccgattacttttcgaagtgggttgaagcggcggcttattcaaacataactcaagttcaagtccgagctttcatttggaaggaaatcatttgcaggcacggcttaccatatgagattgtaaccgacaacggacctcagttcatctccgaacagttcgaatctttttgtgaaaaatggcaaattcgcctcagcaaggtaacggtcaggccgaggcaatgaacaaaaccatcgtttcaaacctcaagaaaaaactaaacgagtacaaaggtgcttggttcggggaattgcaaaacgtactatgggcagttcgcacgactcctagacgagctaccggtgagattccttttgctctggtacacggaatggaagcggtaatcccagccgagattaaagttccaagcacaagacgcatccgaaatcctcaaaacgaagccgcaaatagcgagatgatggttgacgttatcgatactatcgacgagcgacggaatcaagctttaattcggatgcagaactatcacaacgccgcagctcggtattacaactccaacgtacgaagcaggtccttcgaagttggaactctcgttctacgtcgaattcaacaaaacacagccgagaaaggagctggaaagctaggaattagctgggaaggaccttacaaaatcacccacgtagtccgcaatggagtctatcgccttatgaacatggaaggcaaaacagttagcagggcatggaactctgctcatgttaaacgtttttacatttgatgcagtttctctttg

SEQ ID NO: 38575 - DNA, 536 bp, Arabidopsis thaliana landsberg
atttattatcttcatgcataaagatactagattacctagtataaaagattgaaaaaccatcacaaacctcccttttttcttttctatttcaatttctggattattatatgatgattttgcaactttccatatatagaaatagaaagagatagactagaaacgacatctcttatgtcaatgacaccaaagggatattaaatgaatggaattgggatatggatggaatataatgaaatagagccgctttgaggttccctattaaattagctggaacggaccctacaaaattcgggggttacaagaaacttgattcatattggtcatggttgaaacgggaatgaactctatgagatctaatctccgtgtcctcatactatggtgacggcggtgtactgattggcgtagtcaatcctactggggattgttattccaatttaaattcaatgtagatgaacgttcgttgaccgtaagcgaaccgtcctggcttgttctatgctctattatgatccatctgtctggatttgagaatcccgcat

SEQ ID NO: 38576 - DNA, 6545 bp, Arabidopsis thaliana landsberg
  unsure (1)..(6545): unsure at all n locations
catcaaacttttcaaacctgaacagttaccggaagccatcaaatatttttctacaagatatacacttattatactcgccagccttcgtaacttgtagatcaagcttctcggtgtgcatgatatttcgtttcctccgtggaagactagcacatactttatgaaggaagaactcgcattgcacacatttgaagaatggatcagaactgatgggagtgatgcaagcgtcgcacagcatcttttcataaccggtaacatcatcatcaccaccaagtcttagattatgttcttcatgacaaaaatgaatgatttccttatcatttactaccttgtatggatcttcgatttcttcttcttcttcaggcacatcttctagttcttctccattccacacatcttcccttatggcacactttgaatgaacagcataattaggacaacgcttgcaagagtaagctccaagactccaatctatttctttacgacaaacaccacatgaaccccaatcgccgtggccgagatgataagtgcgagaaatgcggtggtcatgacggttgatgttgatcactcggggcaaatcaatgcagtcttttttgcagcatgaatccacattcaaaacaaaagtaaggattgcaatcaccaagcatcccacatgcgttacaagtgaatgtgatctttctcggcatgagggtgaatgtatgctcgtggctctttggttgataaatagtacgctgtggcggatgcctccaacaattcacatctacgctgaagttgcacaaggaacaatgatacatgggatcaacaagttcttctctacaaaaatgacatttgccatctgtatagtcaattgtcccgggcgagactttcttgagaggatgtctggagtgactcgggtggtcgatggtgtctggccactcgatgcattccgaatgtgctcgaaaactgcagcttgcgcagtagtagcagaagccataatcttcatcgcatcctgcgcaagtatttatatcatagtcatatgatccgggccatcctccacccttcagttgtatgtattctaacggatgattgcagggaatcttcactttttgctttggttgatccattggttggtccgtgatcggctccatttttgatgggtgaagaagtcgaaagattgaatatcagagagaaggcacaagtttgtacttttttgtcatgtgtgggtgggtgatatacttccttgctaactcatttttctttctatccctttgagctggtcatatacagtattttagtgttacccaatagtcattgactttaccgacaaaaccagctcatcatcgtgcaaattgcaacattaaatatttattaattatcaataaggccatttttgtcgtgttatatatatttttattgactttataaaattgatctaccaataacattacttttttgagtttttgattcagtattagctggattgctttttaatagttttatttttatatatgaatgaacagcatttcaaaatatgatcatggcataagccgtatacttcggatccgtgtgttagtggtcgtaatatattgttttaaaaaagttttcgtcaaatatattatctgttaatgaaatgcaaatgttttgttttcttatttttaagtgttttgagttgagcaaagttgtcaaaactcacatgcttgttattgtagtatcataataaattgttaatcaagatattaaagagtttttgttgatgattttcaatacgtacatttaagattcgaaacattgaatggttgcaacaacacacatattgggagttttccagccaacgcattggccaaatatgtatcccatcttgatgtgagccgtgtgacagtcagcaagcatttcacatgatccaatgcattggggttcagcttcaactttccctgtttttcatcccaaaaaaataatatatatatatatatatatatatatcttatagcatgcaaaatgtattcaaacattggacgacataaaagtacactctttatgcagaccacttatttttacttaaactatatatgtaatattagtagtaatattacatatatggttttttgaaaaaacaatctaaattttgtcacgccttgccgcctcctcacaaccaaatagaactccgttgaagctgtgatcaaacgttggctctcccatttatgatatcaactagattttaacccgcggtataccgcgggatgatttattttttaaaagtaatatatattaaaacttgtaaattttatttttataaaatatttatatttttacagtttataattattattaagtatttatatatattaattgttattaaaaataataaattaatgatttaacctgtattgaaacagtggattaattatatttttactttttgttaatgttgattcaaaaacacgtccctccaaatccgtcttgccaaaaagccatttattttattaatattaatttntatttatgatatgactctgaattataatctaaacattttagctaataacataggagtgcaccatatttatttaataagggaatgtaccatatgatccgaatgcacttttacccaaatccaccaaaaaggtcttgcaaaaatactatagagataagaaacgatagtcagttttgataggtataagattagcaaatatattagttagcttaaattagttaaagaatacaaattgaaaaggtatattacactttattcgaatatagtatcaaaacttatgtaacacagagatttgataattttttaattgttgaatacttttttttttgctaatttttatgtaattaagatttaattgatttcgtatataaaatatgaaattattttacgaacttatttgtttataatttggtaacagatagatatttgaatattcagtatattttgcttcagattaggaaatctttgatgacccgtctttagatccaataagccctataattaagagatgaatattgtcgttaaatgattttgataaccttaatgacatcataaaaggattttgtttttgattaaatttttctaatggtattatcacgtaattaattacaaaaattaaggttagatttaaaatgtagggaatttaatgaaaaaaaccctcaactttggccagatccatttttaaaccctaaactatgtttttagtaaaacaaaccctgaactaaaacctgttaataaacttaaccccacagtaattaaatattaatgagatattaatttccaaaaaaaacaacaacgagacatttgtatttagcgcaaaaaccacatgatgttctttaaaactgttttgaatttattacaaaaaacgttctaaatgattttgaattgcttaattagtttggattttagaagctgaaagaaagacataacaacttaaaataatccaaagaatcatgcttaaataaatccaaccaacataactatcgaagctgttgcaacacaacaatatttgtcacaaaaaaaaacaatcgtttcagagggacaagatattctaaagtaaagacttgtcaagcattaactttgaagagaagattgtattggctgagtgatagggttctcttcatccattgttttctgttttttccttggtcgtccttgaggtttcttgggtggttttggcactgctttacgcttgcatgaacgtttgttgtgtccgacttgttgacagttgctgcaagtctaaatatgcaaagattaaattaaataatttgaaaaggaagatcttgtgaaacataattcattgttctctattttaccatttgaactttttcacgtgtataaggaactttttgaggtggacgatcttcagttggatcacggattctgtcattgttctttggtcgatttttggaaattaatatcccattaatatttaattactgtggggttaagtttattaacaggttttagttcagggtttgttttactaaaaacatagttcagggtttaaaaatggatctggccaaagttgagggtttttttattaaattccctagattaatcaaataattggtaaatgggcctggtggacttatgtgaaacaactaataggcttttaaaattacggcccatataattctccgacggctccgtggaggtggagggatcgtgaaacactactttggctctgcgatttgatccaatttttttcagacgcgaccaacacgacacgagccagagccactcttcgtcttctctcatcgatcttcgggttcaacaactctgtttacatcgatcatccatctttctcccactgtgttgccaatcctttgcgtgaaatctaagcttggtgattttcgcaatcgccttgaactgtgatctgcgtatctgcgatgcgttttggaccactgataccctgaaatatgagctgctgctgcaaattttcaaatccagtaagtatctttggatcaaatcaagagcaccaccggcgaataaatcaagcgaacgaatcataatttagggtttgactcttactgcgatggatagaagttcggtcttaacacttcttctattgattttgttcatctccaatgcttcctccttcgatagatttcgtgagctagttgatgaagaaacacaaaaggataattcaaattcaaccactaaacaagtaaaattcgattcctttatgtgtttttaagtgttttgaacaatgtgatttgaatttactctgtgtttatgcttcaggagtctccgttgattaatcctcaacccatcggagatggaaaatctaatgtgacctcatcagaaccaactctgccaactagtaattcgacgaacactaatcctaaagagcctgattcaatgagtccacctcctccactgatacctgtaaatgagaagaatgatactaaagtgttaaatacaaccgagccgatgagcccgcctccgcctccagcgaacctaacggatagtcaggatagtggaaagctaccggctaacatggcaccgcctccaaagagtttggagagtgggaaaaatgagacagagccaggtaaggagagtcctcctttggctaaagatcctgctaagggaaaggatgataaggggagctcagagtctgccagtgtagatacctgtgtaggaaagtctaacatatgtagaactgagaattcattggtggcgtgcactttgagcattgataaaggtatatttgcgccttcttgtagtgatgttttctttggtattcttggtttcaacgtttactggaaatggtatctctagcatgtgcgttcctgtttatcgacaatgcaatagtattagtcgtgttagcttcttgaataaaagtcatattgcaggtgctgtttgtagcatagttggataagttgtaattcgctgggatgatggtttaggatatgttttactttattcagttattacgttgtgttaatttgtaaatgattgtgatctcaaggatatgaaactttcctagacattatagttattccccaacaatttgcaaggtctttgctttgtatgttctgttttctccactaggttttgtttgagttgattgaattttcatttcaaagctctgttttatgattgcaggtgctgctaactggttgattctagttcaaaatgaaggtgaaacatctctaaaagcaaaaattgttcttccggttaacgctttacaagagctgacactgccaaaacaccagagtcaaaaagtatgtctttcggttcttccgagttgattctatagataaaagtgttatctttgacatgacatatatatatatatatatataaaagtctgattttctttttgtgatttttaatgatacaacgcaaactttactctagttattccaaggtactaaactgaatcgatcttcacttggacaggtaaacatatccattagtggagatacaaacaagatcatactagatactggaaaaggacagtgtgcgcttcacatgtacccatcagaagaaagcaccttaccattccactttccctcatatgaaaaactagtgacgcccattaacggcgcttatttcttaatagtatccgtcattatttttgggggaatttgggcattctgtctttgccggaagaatcgccgtgcaggcagtggagtgccttaccgtgagctagaattgagtggaggaccaggcttggaaaacgagtcaggggtccatgatgtggagacagcagactgggacgagggttgggatgatgattgggatgagaataatgctgtgaaatcgccgggtagtgcagcaaagagtgttagcatatctgccaatggcttaacagcgagggctccaaaccgagatggctgggatcatgactgggacgactagagtgtttgtgttataatcattggatttcattacagaagattcaaaaccacttggatacagtttactgcaaagaaggcaagacaggaaaacaggttaatgtatacgcaattcgcctatatataaatatgttcaaattcttaattttttgcgaagttgaaatgtcaaagttttttactacagtctcccaaccaaaacctgtgtttgttta

SEQ ID NO: 38577 - DNA, 6444 bp, Arabidopsis thaliana landsberg
ataaaaaaaatatgcaggttatcattctgaattcaagtacaattaataatatttaataaatattttatctacatgtttacatttacaaaacaaaagagagagatattaataattcagaatgtttttttttattattatttactaacgctaaaaagaaaacttaactgactaaaatttaatttgtttttaaaactattcaagattttgtgcatcagtcacttcttaaagattctggaaatcgattatgtgaaggaagtcttatcaaaatttgcatgaaaaaaataaatataatggaaacaatataatagaaacataaaagcaaaatctaactttgtttttccgagccatctatttttgttttctatttttttgtttattttcacgggttatgaaaattttaaatcaaaaacccgcatatatgcgggtcctaatctagttatttatataagattcatcatatttagtacacatgatatccaaagatttttttactttaaattaaattaagattcaagagaatcaccatatatattataagaaaacatgtgagtagcatgaaaatattgcgtggaaataaatgtgtctctaaattgcatgtaattagcgtggaattaccatcgcattaacgattcgactcaatatcgtcgaaaatgtgtttggaaaattttcgtcgctaattcgaggcagataagcgtataattagcgacgaataaggatggactagtgtaattcaactcaacttcgtcgcaaatatgcttggaaataattcgtcgctaattcgaggcggataagcgtctaattagcgacgaatgtgagtcgaagtcaacagccaatccaattcatcgcaaagtacatgcacatttggtgtggaatttgcgtgtaaaaatttgacacaattgtgagacatatttgagacgaatatatatggtaggtgataaacgttttaaaatgtgctacctaactagtttacaattcctcgcaatatagtcgcaaaaattcgtcgcaaatagatttgtatgcctatataaagtcacgttgggatgagtaaggaacatcacaatctctcttcttcaatattaaacattcttcttcaaatttcgttttcaaatctttttttctcaaattttatatttcttttatcttcaaaataaatatatataatatgtcggcgtctcacgagatttatatccggcgggagtggatatataaacacaaagatgttgatggatcaatgacaagagagtttgcagataggctagaagaattcatgataaatgcaaatcaattgtcaatcatgcaagaaactggtaatatgtcttgtccatgtcgaaagtgcaaaattggtcgctattttctgtcaaaacggtcgcaaagcatttatataatagagggttcatggcaaattattatatttggttttggcatggtgaatgaaacgtctactaattctagttttcaacatgaagaggaacctaatatcacttttgagccccaacagtttgattataatcaacaaaatcataataaatttgaagatatggtctatgatgcgtttcatgaaacaacaacaatcaccgataaccatgaggaacctaatttagatgctcgacaattttattttatattagatgctgcaaatcaaccgatctacaatggatgtaaagaaggaatgtctagattatctgttgcatctagaatgatgaacattaaaacagataacaacttatctgagatttgcatggattcatgggttgaattaattaacgatattttgccagaggataatttagctcctgagtcatattatgagatgatagaagtttgcattgatgatcgcatgatattctggaaagaaaacgatcaattgcaggaatgttgagattgtggaaagctaacatataagctgagttcaagacgaatcaagatctcttaccaacgaatgtggtaccttacaataacggatagacttaagtgactatatcaatcagaaagaacatttacatcaatgacatgacatgcagagcattcacgtttagatggagaggtcacacatccatcagatgcaaaggcttgacaacattttaacacggtacattctgactttgcaagggagagtaggaatatttatcttggtctatacactgacgggtttagtccatttggtatgtccggtcggcagtattctttgtggccggtaatcgtgacaccatacaatctacctccatttatgtgtatgcagcgagaatttttatccttgagtattttagtctctagtcctaagcatcctaaacgttctcttgatgttatcttacaacctttgatctatgagttacatcagctttggtataccggagttcgtacatttgattactcacaacaacaaaattttacaatgcatgcaatgcttaagtggaccataagtgattttcctgcgtacaaaatgctatcacgttggactacacatggcaggttatcttgtccttattgcattcatcggacagatgcatttcaactgaagcatggtcgtaagacaagctggtttgattgtcatcgtcgttttcttccgatgagtcatctgtataggaaggacaaaaaaaaatttcaagaagaacaaagtagtacgtgaacctccacctgtacatgtgtctagagaaaccttgcttgagcagttagattattggggtgctcaagaaactattctatgtgggggtaattggcacatccccgccaatatgctagatggatatctagttaatcacaattggcaaatgaaaagcattttttggcagctttcttactggaaggatcttatgttgaggcaaaggatgtattgcatatcgaaaaaaaaaattttgataacatgatgcatacacttttgaatgtgcaaagacgtagtaaaaccaacttaaaaacaagactagatttgcctgatatgtatatgttcgctacctgatttgcatcttacaagagatgggaatttcagttcatatctttagattatcccaggaagtaaagatggcgttttttgaatgggttagatctgatatcaaatttttaaatggttgtgtgttaaaattttcaaaaaaaattgttaaagaaggccaaaaaaatttcggatatgaaaagtcataactgccattgttaatgggccgtcgttataaattcgtagttgggctctagtctcaatttcttcctcgtgtgcaaaaaacataaccacatcgaaaaagactaatctaataagaaaaatatcaataaaactgtactctatgatatctaaaagtccgacaaatcacatcaattccactttcttgttctaaaaaaatctaatacccatagcaaactgacaaaaaattcatacttcaccatatccaaaagaccaaaaccaataagctttaagtcttcttctcagtcgatttttttgtctttaatatgaatcttgaacaattcaacgatagtgaaagcttaaacaaaaatttggatctcaagattttattctcattcttcttattcaatggtagccaaactcaaagtttcacaacagcaataaacatcaaaatccaaaaacataaaccagaaaacatcaaagagaaacaacacaaagctaccattggatcctcaagatcatcatcatcaacatcaacaatctcagacagatctaagaaatctgaccacaatcagcaatgacaacaggcttagaagttcttccagagtcagatccaaccttctcaatatctctaacaacattcaatccctcaacaacttgaccaaacacaacatgtttcccatcgagccaatcagtcttcaccgtacagatgaaaaactgagagccattagtgttggggccagagttagccatagagagcatccctttcctctcatgtttcagctcaaaattctcatcgtcaaacttcaagccatagatagactcaccaccagtaccattcccggctgtgaaatctcctccttggcacatgaaatttgggatcacgcggtgaaacgaagatcctttgtagtggattggctttccgctacgtccgacgcctttctctccggtgcatagagctctgaaattctccgccgtctttggtgtcttgtcggtgtaaagctccatcacgatctttcccgccggtgcaccgccgatggtcatgtcgaagaaaactttagggtttgttgccatttctttttttctctgagattgattggagaagaagattaggttctgtgattgtgtgaaagagattagggttttggtagtgttttataaagagaaggaaatgatttttgtgaccgttgattttgacacgtggaggaagattgaaagggttcgtgttaactgtggttagtgttgaatctaactagggttaatagttgcgtggatccgaggcagagagagaatattgtgttttttttttctctacctttttactggataagatattaagtagtcgtttcattgatttatttacgggccaggaatattaagcccaatgtcgtaaaaagaagcccattggtttggagataaataagagttccgataatgtacatgtacttagcccaaaccactcttaaataattgtagagactgagaggattagcttcatagagcatcataatagtctattgacacaactctcatattttaaaccttggattatacgatataatttccaaatacaaaatttcaacctatattgttaatctaatgattattcaacttttctttactatatacatgaactttcgaaagagaattatcattttaaacaaaagaaaataatcttgacaaattacaaaagttaaagaaaattgtttccttgcaacatctatagctagagagagtaaagaaagcattacagattctgtgaagttatctctaccaacaactgcaacgttactatcgttcgtgtgttttcggtttcttatctcaagccccctaacaaagcgtgtgagatctacttcttcttctttgacttactcgaagattgagtgtacgaagtaccctgcattacacaatatattgagagcaatgtatcaataccaaaatgttcaatacattaaaagttaaaacccattatggagaaagttattaggtcttgtgcaacgaatacctcaagccattcatcatgcgaagcatctttagttgcggttccaacttcaacttttggtgctctctttgttttctgcgcaaagcattttcacagtaaccattctcaaagttagtaccatggaatgaaagtgcgataagatagcgaaataggatgtaccttggtcatatgcttcaaaacattttggatatagatggcgagaaaagcgataacaaagattaaaagaccactaaggaagactgactccattctgaagagaggaccatcttcaacaacttcaatagttccattataaaagatgctttggtatggcttaccatctatctcatagatgatggtgccaacaaaatcaaaagcacccgcctgcacgagcaaatggttacctcggattctattctatattttaatgtcatcttggagactagaagaactatatgattaacaaacatacctgcaggaacttgctgacagcaaaagcatatggcaaggtagcttgagcggaagttggcacagacgcgttgctgaaactctacatttagatgattcgacaaaatgaccaaataataagtagcaaacttaaagagcaaaggccagaaaaggaaaagaggagaaaactctatattcagcaaaagccattgtaagattctatatctagaaatgaaatggaatatagctagagccaaagcaagtatctggtatcaaaacataaatgataaagattaaaggctagagagagactttcttgcatttagatacagggatgtaacaagttcaggtattgttactaaaccatgaatgacctaacaaagagtgcatagtgtggagtaacatgagatgagacaaaacaggcaatgaaaagaacctaacaaagggaaaaactaatatggaaagacaagtgagatcacacaagcaataaatgtgagaagaagcaaaagatgattaattaccagagcagtgagattctgaacagcattttgatcaaaaggaagatgtaaactgcctttaacagcaacaatatctacattggattgacctattcatataacccaaccacaaagttagaaactttatagctaactttgcaagtaatcatttgatagaaaaatcactttcattaccatcatttttcattccaacaagcagctcagtctcaactccagcttttattactacagaaaatcagacaaaccaaattgagaagaagcctaatttcagaaattagattaaaaacagagtaaaaatctgtactttttgcactgttctaggggaaaacgcaaagggtctcaattccaggagctgaggtaagttccaaaccaaaaacttcctctgcatgactctc

SEQ ID NO: 38578 - DNA, 12774 bp, Arabidopsis thaliana landsberg
atgtggtctggcagattattagttcaaagtacggtcactgataataagaggggtcctatgattttcaaacctttccacttgatttactctattgtttgcttcaggaaaagcaagtctatgtctgggggagttgaataacatcgtattttcttacctatattagctatttttttcttatattttatgaaacatttggattaatttcaaggtctaagagatgataatcaagtatttaagaagcgaagaaggttttatgaggcaagcaaaatgcgttttctaacatattcaatgctttgagggttttacatccattggagaacttctcgtgcaccaaattgagagtttttggattctatggaaagctagaagagttagtaaccacataaagtaaactcatatgatcaacatttgttttcaatgcccattagagtgaagtcctgtctttgtgaccggtgaagagctaccggttgggaccaatcacaacccacatgatcggtgtgaagcctactctagcgaccagtcatgaagcatgtaccaattctcaagcattatcctgcacttaaatgaaactacgtaatgtttttccaaaatttcctaaacccactactaactttccgagacctattaatacttgttttagacacgaaaagagttgtgctcttcatgcatctcccttgtgccttcaccgagaagcttagaagcacaagaaccatttgtctcttggatctaaagctccaaagacaccaaatccctactttctactctttgtttcttatagatctattaaggtgaattcttacatcttgtattcgacaattagagaaataatctctaaaccctattgataaggttcaaattaccttaagaactactctctcaaacaagagatcaattgcagtatttaaggatcgattttcacaaagtttttttgttcacacaatgaattaaatatcgagattaagctagtagggaatgattgaaaataaaggagaacaaagtaaaaagacagcagattgattggttgtaaacgattaaataaagagcttggaacatggtattctcaggaacctattggttagtagatctaatgaaagctatgttgttatcgaaccattcttaaactcatactctaattatggaataaccagtggtgttccgagaaactccctatgcttatagcttagaataaccaaagaagccgagagatttttaacctaaacatgcattctaaacgatttcaattgtttaccttagtagataggtcgattcttattacacatctataaaccaggctcatcaaataatagatccaactgcagatacctatggtgggcatatctattgtttggattcaagatctagttaattactctagatctagcattaagtataatcaaagatgaataattctacagataacctagcgaagggggcgatccactaaaccatatgaatccctactgagaaactctattcctaacaagcaaactactcaaacatattgaatgaaacaaaaaacatatttgagtaagaaagcatctatttactttattgaaaattgaatgaatttctgaaaacaatggatgaatagcttatgtctctgaaaatagggattgcaaagaacttgataaaaggaacttaggtctaaaccatgacatctaaaactatatataaaccgtataaaacgtccagggactaataatgcaaatagggaagtcttctggggcaaatttccacttttgtaaatttgaaagcatcatggactttgctgggccgaaactggtgttgatcgacactctctctgaatctggaatccgaaattgtccttagcttccttttcctttgcttttgctctaaaatgtctcctcatctccattgttgtcccattgcatagaatacctgaaaagacactaaaaagactcgagaaataacataacgactcaaaattttatacctaaaacatagataaaatcaataaaaatagggatatataacctctcccagacttagcttttgcttgccctcaagcaaaacacaaaagtcgaacccgtggaagaggttttgaaaacaaaggaactcccatactctgtagccttttgccatgatcatccaaactaaatccacatgcctaacaagtctaatcaaatcctaaccaacatctacttctctacaagcttacacaactttctagattccatacctaagttccacaactatatccacgaggctttcatcgttgggtctcatcaaacaagctaacattcaagatccttctagactcattcctgtaatataccatgataaatcgaccattcttcatatatttttttttatttttctttgttgttctttctctcctccagacttatttttttttaaagagtaaacaatggggaactcggatactggattgacaccctcggccattttccaacctttgtaattggtcattccaaataatatataataatggggtcataggaaacattcctacgcctatacactatccgaaattcttttcaatctctcattttctttttatttttataaggggagaggaacacattctttctatcacattggtctcaatattaggtatgaacaaggagtcaagatatatgaatactaaccgtttgaagaggtaaaaagaagagcagtgagattagctccagccttagtggttgtgttggaaactaggatatcttcaagtctgttggtatgccatctagattttccaatagtcggattgagtcgaacctgcaatactcaccaatcaggcaataaacaagagaaatatagatcatgattcctaacttaagtaaaaaaacattcttttttttttttaggaaagaataaagaaataaccaaatgaactgcaaaacgaaaaatgataagaaacaaaaataaaagcaatattagtatgaacctcccccacacttaaacgacaattgtccccagtggcattcaaatccagagaaagcgggggaaataaatcaaaaatagaagaaaagaaaagaaagggaaaagaaaaatcaaaccagtaggttgcctcccactaagcgcttgttttgagtcaataacttgacttggtggggtttaagatgtgggtggactggtagaggattgttgttgcctcctcgccttccaaggcggatgtgtaaatggatttagttggagcagcttctggtgtcgatcgacactcaggggtgtgtcgatcaacactcgtctcgtcacaagcaagaacaataagaggaacaagctttcgaggaactctaggcttgttatcatgtgaagcagtctttgaataatccaaagaattaatcaaagataaacaggagaagagagagaagagaacttatcacataggtccttgagtggtgtgggttgaagagaatgtgcagaatttttcgtctatgaaacccgagggtgcgatcgacaggggtagtggtatcgatcaacaccgttgctcttcaactctcattaacgagctcaacgtgttggagcgttgtgtgtggctctgtggtgggattctgatcagtctaaggaggtgtgtctatgctggacgcaatgcaactaataggcttagtaagttctgaaccatccatgccaaactccatctccgaatcacaaaccttgagagagattctccctctcttcacatcaaacctagcaccagctgtagctaggaatgctcttccaaggataaggggatccttgggttccttctcatagtccaggaccacaaaatcagcacggataacagagttaccaatcttaacaggaacatcttcaaggattccttcaaggattcgcttggaacgatccgtgaaaggaagagtgatgcgagtaggtctgtagtgagtcatgcctagtctctcagcaacagacttaggcatgacgttgatgctggatcccatatcacacaaagagcggcataatctgcttgtggagatagagcaatcaagaacaaagctacttggatctggaagcttctcagttgtctgaccatgagtaataatgaggatgtactcagctatgtctactctttgtgccttctccttcttggccttaggcagcatgattgcactgatatctctggtaagcagcttagcttcatatgagctaattccattgtcaacaagtcgtttgacatacctgttgagtgaaggagaagatgtctcagaagcatccttaggaagagtatggagtatcttctccattatggttgtacacttagcagcatgaatctcctgcttggaacgatgcctcttcggatacgggacaggaggagtgtagacagactcgatctgcataggtatttgcacctcacagggtgcagtccggatccagtgtcgatcgacactggaggggtatcgatcgacaccgtcatattgagtcgtttctgagaaaagagtcccgtatggtgtcgatcgacactatctctgcaactgcgagctccaactcgtctttagtgtccaattcctcccaaacatcatctccttctctgatcaagatggcattgcagctgttccttgggttagcatcaggattaccacgaagaaaaccctcttgtcgcttgatagattgtgcagtttgagctacctgtacatctagcttcttcaagtgagagcttagattgtcgatcttcccattaagatctgtgtagacagcatcaaacttgccattaaaatccacaacaagctttgtttggctctctagaatctgctcaagcatcgattccattcttgtctctgatgagggtggagggggggggggcttggtaagctgaattaccataggttctctgaaagttgttctgaggaaaagtcttctggaaagcaggctttggagtgtagttggaggaaccctagttccctgcaaatctgttgccactgaagttgccttgtggcagcccaaacttcctgtatccctgaccatctatatagaagactccttcctttgactcaggctcatgctcaatagtctcttcctcggctgcaaagtggacatgcttcttccctgtgagcaagttatgaaccgaatctagcttagcattcacctctaccatctgatttcctgaaatagctccagcaatcttcttcctctcaaaatcagcattcttgttactgttgctacaagcgaggttctctatcaaggatgtagcatcagctaggtaacatgtgttgaagttaccattgctcgctgcacatctattatctccaatcaactcctctgaagaaggtacctagaagttgtacctcactgaaaccatgatgtgggcaatctcgttggtactccttgaaacgaacccaagcagccttgaaagcttcaactggaccccgtgtgaaagtagacagcttgtttctcaactcctcatacttagcatcatcgtagaaattgttcaagaaggctatcttgatgcttctccaagtcttgagggaacctgctttaagttgcttcagccaagaagttgcttccccagcaagtgaataagggaagagcttgcacagtaggtagtcctctgagactctattagccttgatgctgacaacaaggtcctcaaatcgctcgatatgatccattggctgctcatgagataagccatggaaaggatgttgccaactaaagcaaagtagcaaggcttcagctcatagtcgttctcctagaatggtgggggttcaatcgctgatcgattagcatagaacaggtctagcctgttgaaatccccaagattacgacgtggtttcccagctggaggaatagctgcaagaatctggtgttggtgtcgatcgacacctctgttatgtcgttcgacaccaattgatccgcttgctgctcccaatggtgtcgatcgacacctagttggtgtcgctcgacaccgagccctgctacgtttctggcagctaattgcgcattgaggcgcgcctgatcctcattggcgtcctcagggaggatgattccatgctcatccaatctctgattagcctcattgtaggcttgcccatcctcatctctcaaaactccttcctcatcaagtctgatgactttgttaaccattgctaatctctaagttttgcggttggtgcgttcaagttttcccaagtccagaacagacaagttgatcaactccttctgttgtgtgctccttgtttgcctaggcatacacatgacacacaaaaaagaagaaacgtgtgagtaacaaaataaaagtaaaaactagacgaaatctctaaactaaactcaatggtgactcccaagaactttggcaacggcgccaaatttgatatggttcaaattgctttaaacctactctctcaaataagagatcaattgcagtatttaagggttgaatttcctctaagttcttttgttcacacaatgaattaaatgtcaagattaagctagaagagtgtgagtaaaaataagagaaatcaaagtaatcaaatcgcagattgaaggttgtgaaacaataaaataaagagttaggagtagggtattctgaggaaattattagttagtagatctaatggaaactaggttgttatcgaaccattcttaaactcaaattctaattatggaataaccggtggcgttccgcaaaactccctatgcctatagctaagaataaccggagaagccgagagatcttatacctagacatgcattctaaacgagttcaattgttcaccttagtcgataggccgattcttattacacacctataaataaggctcatcaaataatagatccaactacagatacctatgacggatatatctattgtctggattcaagttttagttaattactctagatctagcattacaaacaattaaagatgaagaaattctacagataacctagcaaagggggcgatctaataaaccatatgaatccctaatgagaaaccctattcctaacaagcagattactcagacatattgattgaaccaaacaacataattgagtatgaaagcataaacacaccaataaagatgagggaaagaaaggatctcttcactgtattcaaaactgaatggatctttgaaaacaatggatgaatagcttatgtctctcagcaacagggttttgcaaaaagcttgataatagaaaactagggtctaaacaatgtatataaaccctataaaacgtctagggactaataatgcaaatagaaaagtcttttggggcaaatttccttttctgtaaacttgaaagcgtcatgaactttgctgagccgaaactggtgttgatcaacaccatgagtgtgttgatcgacactcctcttaatatggaactgaaaatcgtccttagcttccttttccttagcttttgctccaaaatgtctctttatcttcattgttgtctcactgcataaagtacgtgaaaagacactaaaaagactcgagaaacaacataaagactcaaaatctgatacttaaaacttagataaaatcagtgaaaatagggttatatcaaagatcctaaggttggttatatggatggaaatatcatgtcgtttgagattaatggggagaagttgattattatgttaaaacctcgttgaaacctgaaattgactttatttttccattgcatgcatttgatactcatgagcgttcaaccatcaaagaatatttcaaaagtatatgctacatttgtagtcatttttactgatgtgaatttgatcactttaccatggataattgtgtattacttggcacatatcatttcttgcactaacaggagaaggacaaaaggtctactgactcaaccttttgattcttatgattaataatttgtgttgagcgggatcgagtcgaacgagccctccgtcttcttcacggcgtttcctgtcctaccagttcagaatcttcggaccacgcgaagaaaaaagaagataaagagagacgcttggcggaagagaaacgccttgcgaatgcaggattgatttcgccgcgggtagcctctcccgatgcgactcaagtccgggatgttgctcccaaagttgtaggcccggttgacccgacgccttctgaagttcaagaggtcaatcctactgctgttgggcctttgcccgaggcgattgttgcgctgcctgcgagcgacaaggcggcgggtaagcgtgttcggacggatgattcatcgtccaagaagaaaagcaagaagaaggaggcctcgagtgccaaggcgggaaaagagctcccgatctttaaggatcggattacctcggcaaaccttctcgagggctgtgcgggtcctctgctccctccaccggatactctcttagagtcgcggaagtatgccgagacggcgtctcacttcttgcgggtacgtgtaacccttttccttctcgtttgcgcgttatttctaagttctgatctcgtaatttgtctctaatctgctctccaggctgtcgcctcgatgaaccggatggtgctgatatgatcagggatagcattaacgatatggagcatgaaccggagcttgaacgtgagcttgtagctgaggatgagcttgtagctgaggagaagcttgtagcggaggatgttcttgtcacaccggccgtcccaatgactcgttctagagctaagctattcgaccaagccattgccgggatgcttaaccacatttgggaccgaccaaatgacttgtgccaagtcactacctctttggttttgattcaagctcaaggacctcatcaagatggataagtgatttatgagtgctctttttccctgcctttggttttgtcctactgggttttccaaaggaaggtttttaatgaggcttatgtggcctttaaagttgaggagtgtattttaaattttaaactttgtttttaatttctgttgtgttctaggcagccttggagtatgttccaagacttgcctcttcatcttctcttctccttttctttatattctcttgtattctcttttgagaacttatttttcttttaatcaaaaaccttttctaagaagatcatcttggtgtgtatatccagcaaaatccttagtctcttttggtgcgcatatccaaaggatctaagtctcgatatcttgaaacccttccgcaagcttctgtgatatccatcgattcattcaaatctatccatcatcacggctttacagccacctctatcctttgcttaacctaagagtgtcgagtccttgggaggatctcatcttgtggtgatatgtctataatttgcatggtttcaatgtccattcatcatcgttttgagtccagcttcgtatcattcatcactgttttatatcatttctcatcgctcttgcatctttgcatgattaggatagctttgcatacatattgcatttctgagttgttttcaggtgatttggagctgtttgcgagcaaattggaagaaacgagccagaaccagaagacatactcgaccaccaggtcgtgtgcatccagcaccatactcgaccaccaagtcgagtgactttggagccattcttcccatctactggaccccctggccgagtatcctcagctcaggctactcgatgacgctactcgaccccctggttgagtatcacttcgccacaccacctgaccacactcggccattcactccaccaagttactcgaccccctggtcgagtatcatcactcaccacaaaccatcactcgaccagacactcgatcacatcttcatagtctactcaaatccgcactcaaccagacaagctgagcacaaggaagagaagaggagaagacgaagtgtttggaagcggcctggacctccatcggatcacgaagcccatctcggcccattatcactctatgggccgggcgattaggttattggcccgtttactatcattctatttcgttttgtataaatagatgtcttagggttctgtcctgagacatctagtcgacattgagtttttgcttcagttttattttctgttttactctactgcgtcgcttttgcttttacaacctgtaatttgagatttttccaagttattcagattccgcatttgatttcatctgtcatcctgtttctctactctttatctccttacttatgcaaaattatcatttatctgcgtttatgtctttgagcatgttgtctgagtagtgacttagaattcttagggatgggatagagtagttgtggactccgtagtctgtagaatggttaagttttagaattaatttaatcccttcaggactagttgcgtttactgcttatttctttctgatcaactggaattcgatcccaagcattctcgcacccagaaggtgttcgatggaatgcttgatctactagttcctgagatatttgtctctatcccaagggattggccgtttagagcatttattgactttatcagtccgttcttgttgcctgcatagttagattccgttaatgggaattggtctgggctagctttgcttgaggatttctatcacgggagtgaattgatctgttgttgaacctgttgtgtagggatagcttgattgcgcttgttaaccattcgaataggctaggataccactctactcgattaccccatccttaggaatttctcgtctatattatttctctgttttatcgttatcgcttaatcgttctcattgtctgtttcttagtttttgcaattactcgaccaacttactcgaccacacccagtgtctggcaacagactgtgcagtcgagtgcagttgtctcgtttcctgtctgttactcgacgtgttactcgaccacatcctgcttctggcatcagcctgttgtggtcgagtgaatttagtaattttgataatgtttcagttttctacatgttcacttaggattgttagaaaccccaaaactgttattgcttggcttgacttcgtgacttctgatcacatctcatttgtttgcatcaaatatgtggagagtcaatttgtatcaacctcgactccgaagcatcctcaacaaattccagagaaagcagttaagaatcctaaggattatgctactgcaaatgctatcaccatccaccaagaaaatgaatctccaccaagtcatctgactctcaatactgaggacagtatggttcaagaaggcggggattcaactcaaattgctgcacctgcccctaagcaattcatttggactatagagcacacacctttgttgaacactcaccatcctggaaaaaagttcaaaattgaaaaactcaagaaagatcagaatcaagagatgattagcagtgccagcactcaagaaacttacaagaagaaagtcatccaagaaaagcttgatgatctcggttcattcactctaccatgctctctaggaccactgacattcaataggtgcctttgtgatttgggagcatctgttagccttatgcctctctctacagctaaaaggctagggatcaaggaatacaagttctgcaacttagctttactcttagctgatgattctgttgcacatcctcatgggctaatagaaaatctgcctgacaagattggaaatgttgagatacctacagattttgtggtattggacgtagatgaagaaggcaaggatcccctgatcctaggcagaccattcttagcgtcagttggaacagtcatagatgtcaggaatggaaaaattaatctgaaccttgaaaaaggcatcaagatgaagtttgacatcagaaaagcttcagggaaatcaacaacaggaggtcagagttttgggattcaggacatggatgttgatgaagaaacataagctggaaccctaccaaaagtcaactatacttctcaactcagcaagctgaaaaggacttttgaccacaagaagagagcaacacaaaggctagcttagactgaagatcctacataagatgactggtatgagatgagaaaaatatttaaatggcaaagcagagtcatagagggattatcttcaagggtgatgaagctgaaagatcaactatggatgtttgaaaaaagagttaataagtattcaatgagtattgatccagagaagattggaactgcactagctatcaaggaggacgaacatttcccaacagaatggtttgcaccagaagatcagaaaggagttcacttagaggaaaaaagcctagagagcaagttgttgagtgagaaggaaatccctattccgacttattctctaggagtgcctaaacaacatattaacccctctgctgaagaacaacgcttgacacttgattctgttactgaagaacttctggaactcaggatagaatacaaagctcaaaaggataccattggggagctaactaacaagatggaaggactaaaccatgcaatcttggaacttcaagaaatggttaaaggctaccccaattttaaatttgagcattggtcaaaggagcctgattcagaagaaaaagactactctgctgatcagaaggaagcatattttgaagaaaaatcaaatgagtactcatccttccatatgtcaagagaggatgcagagtattattcagacacagaagattcaaccactaaagatgaggacttctctattcctctcttcaaccttttttttgactaagctctgtaagagtcaaactcagtgacttaaaacaagctcacttgagaggaagtcccatgtctatccatgtatataacttctattttccttgttatttttgatgtttttgttgaagtgtttcaggtttatttcattaaccctgaggaagtcaacggtcgagtaaactcaaaccaagtgaagagatgatctccaccgttgatcgagtaaaa

SEQ ID NO: 38579 - DNA, 8296 bp, Arabidopsis thaliana landsberg
aaaaatggactcaattatttatatggtaaggggcggttttaaaaatctgttgctatggtctgtgaaggtatgatccaatttttctggtttgctctgaagtcgacttgagtaaaccggttaaatattgggtcggttattttggtccagttttgggagttcaagaagaaaaattttgaattagaataggattaggaaaactctatagggtttgctatatatatctattctctatctctctttcttgtaacacaacatataatctctcttgtaatcttcttaagctctagttttgagcttgagagcaacctttggtctgttataatgaattgatgggttgaatccaactccagacgtagattcatcctatcggtgaatcgatctggataaacaatttatgtattcttgtggataaaccatttgtgtattcttttgtcgtcttcttcgatttatttttctttgaataattgctgagaatgctctttccacaccaccccttttcaattttactctttcctatttgcaactttcatttataccctcttaaaatttttaatgaccattttatctctatttggaaattgttttaagttaacaaaatgaaatattaatatttttttgcctaaaatattctaaaataaatttcacgccaaaaaaattccgtcaaaatattttcccgccaaaaaaattcgaaaaacattttcccgcaacaaattttcgaaaaaacaaatttcccgccaaacttttttttcaaaaacattttctcgccaaatttttttttgacgggaaatagattttcagggattttaaaataattttaaagatttacaagggattttaaaagggttttaaaagatttacaagagatttttaaagcgttttaaaagatttacaagaaatttttaaaaggttttaaaagatttacattggttttttaaagatttttaaacggtttaaaagtgttttaaaagatttacaagagctgtttaaagtgttttaaaagatttacaagagatttttaaagggtttaaaatagttttaaaagatttcagaaaaagaaaaccctttaaaaactcttgtaaatctttttaaaaccttttgtaaaggttaacaagagttttaaaatgattcaaaaagagttgtaaatgttttaaatacttataattctttttctaagagttaaaaaatgcttgtaaagactttataagagttttaaaaagatttacaaaggtttaaaatccttgtaaatccttttaaaactctttaaaaactcttgtaaatcatgttttacccttttataagctttgaaaatccttgtaaatcattcgataccacttacttatcttttaaaaacgattgtaaaccatgcaaaccttttttaaaatcccttgtaaatcattctttaacacttacatatgctttaaaaacgattgtaatcatgataacactaaaaaatcccttgtaaatcattcaatgccacttacttatgcttgaaaaacgattgtaaaccatgctaaccctttttaaataccttgtaaatcattctatgccacttacttatgctttaaaaacgattgtgaatcatgtttcacccttttataagcttttaaaatcccttgtaaatcattcaatgtcacttacttatgcttaaaaaacaattgtaaatcttgtaaaactattgtaaaaagttttgaaatgatttacgaaggtttaaaaaggggttttaaagtatttacctatgtttttaaacactttataaagattttaaaaggttttaaaatgatttacaaggctttttagcaactaccaaagcttttaaaaaactttacaaggttttttaaaagagtttttaaaaaatttacaagcatttttaaaagcatttttttttgctgggaaaaaaatttaacgagaaaattttttgacgggaaattttttttttggcgggaactttattttttggcgggaaaaaaagtttggcggaaatgtttttttggctgtgagaaataaattttggggccaaaaatttagcggaaaactttcagtttccaattacatgttcttattagatgagggtaatttggtcattctgttcaagggaagagatatttttaaaaatgaacaatataaaagggtattgttgcaaaagggtagtaaaaaaaaagcagttttgcaaatctccctattttctaatgaaaagaagaagttaatattttttaattgataatacaaaaaaaggaagatttttctggttttagtttaaaattttatatcttaaaactttttaatcattttgtacattcttagtttagtttagaaattgaaaaagctaactattataaaaatcaatatattaaatatatatgcaaaatatattatagtagatatagagtttgttttttattttacaacaccaaataaaactacatttttaatactaaaaataaattaaaaatataatttttgtaagtcaacgccgatcgacgtaagagttaattgaccggttaacctgaaaagtatgtttatgatgttgactacatgactctatatatttcgtatatgtgaccatgcaatccatatacatcaggtagcttattgtcctttcgtttagttggcatgtgtggccatgtgttcagctatactttagatagctaacaatcttttttttcaaaaagtaaccaaaaatcctacaaattaaaaatgtctccaacatacatacatgtgcatatttgcaaaagcacacacaagttcctcatttaaattccgacaaaactctgttcgccactacatgttctccgcattacaaaactcttctgatagcacccttgactctcccaacgtctcctctccacttttctagtgtcttttctgcttggaatcataaatttccggcttcttgttccgtggtgagtttgtaatctatgttttgctctgtagactttaaagcctgtttcttttctatctatgagttcgttttcgagttgcgtttaattttgacttatttttttccgaatctgatgttgtactcttgttgacatttctaaagcaatgatatttatgctcaaatgagcttattaagagaaatataaaactgaaattagatagctcattaagagctttattactcaaagaaactaaaagagggaagattaatttgttgtcaccaagaacacaatgattcaattgatactttcataaagatgagaaggaaagttgtctcaaaacaactctcaaagttacaatgaaagttctcattacataacaatatatatatgagtcactatcttgctaaccctaggtacatgggcttttggattacttatgagacactaaattgggcttcatatggatcctctaataggttgaacaacaagagctagactttgtatgcataagttgttctcggtcttagatggatttcacgattgtctaggattactattttttgagacaaaccaccaaagtgtaaatcttttgaaaccacctctaaaagccttcaccaaaaccgattgagaatgatttatcttccatttgcgaaaccgcgccaaacacttgaatgaatgttaaagagattgtaagtctttgctaatagttggagatttgaaatagagctatgcactaacaagagtatggagaagtacgaaagagtatgatgattgattcaagcaaatttgaactatactttgaagttgaatcctttgtttgatattttgtggctatgaatccccaccttcaaccctctttctcttcttatttcttagttcttgcttgaggactagtaagagataagtttgggggagttgatatctaatgtttttggttcttttaaaacctcttttctcttaattttttgttgctttgcattttatattttggcatatagtattgcatttgcatttgcatttgttttttttaggtacatgagtggagtttaaagttttggaagtaaaatggagcaaatggagcaaacaaaggagctaaaagattgcaaagtggccaaagaagagaagctagtaggaatctaccaaactggtcgattgcgtggtcgattggtcaggaccagagctacggaggaatatgaatctaccaaagtggtcgatttcgtggtctactggtcaaggattaatgttgcggacaatattgaatctaccaagtgatctattgcttggtcgattttcttccttaaccggatcaaaacccggtttgttccgggttgatccggtttattttctcattactataaatactcttaacctagttttagagagagggagcttttgtttagggataaaaacttctcttgaaggttctttatcttaggtttttgtatgaatgttgagttcttaagtttctatatcaagtatttcttttaaatttctcatctattctctaatgattataactttacaaagatcaaaccaattcctttgtatgatcatgatcatgatcatgagtgagtagtctcctagagttctttggttagggtagattagcatggtttagatgttgggttatggagtttagggctagattacttaagattcttacttattggttgcttttaaggctagatcaaccttgatcatgatgatttagacattaggaatttcatgcccggaaggtgttctatgaaattcccaaaccaaaatctttaagtgattttcataccttacctttggaaattgttgattagggtgattagtggctagatagacttgttatttatgcttattgatcatttgattgcctatggaaattgccgatgattgattgattagtaaagggattaatatcatggaaatgtgttagtcttgcttagtattctatgctccataatccatctctttatcatttctaaataactgataagtttattatatatatactattatataatttactaacaaaaaaaatattaatacaaacttttatcaaaaccatatgataatacttacaacccgcataatgtgttacactataatatatttcactaaaaatttattcatatacattttttaaaatataaaattttgtgtgcgggtcagaatctagtaaatgtcttaaaaatgatatagtttgcaattttttgtatataataaaaattttaaaatatcaaataattctgcagtgttcgcagattaattcttagttatgtatatttttgattttgtaggattaatttacatttattggtgaaaaagagtaaaattgtaaaaataatgaatgggagaacttttttttgcagaaaaacaaaaattaattcattaaattgttgacttttctagtgttctaagtctactatagttgataaggtttagaatgacgacaaagatatagcagaaagtatggtataggtttatccacaagtctctctcattttctactaaagatttgattccatgtattcaccttattttccgaaacaaatctcaggaacggacgtttggatatccacatatgttttaggaatggtaaaaaaaagctgaagggtaacaattagttatccaataaatggccaataccattcgtttgtcctttcttttctttcgagtcagagaaagattggtccttgggtaaacagggaataatatctagtgactaatttttctgtctcaaattccttttatggcttagaaaaaattcagagtcaactaataaagccatttgttttttttttttaaagcgcgctctctctctctctctgtactccaaatccagaagatactgttcataaatcatacaaatcatgtactatcccctcaattcttgtttgatcttgctcctcatcttctctttaatctacaatcttccttgtgcttcaagtaaacaaggatttggatggtgtgagactactcagtttcagtgtgggagtatcaccgcgggtttccccttctggggtgggaatcgtcctgaaccttgtggtcattcgtccctggagcttcgctgcaacagcaaaaaaatcacctctctaaacatctcaaactatgagtacaatgttatccatataaataaaacatctaatactcttagacttgtcagagctgattttgtaggttctttttgctccgctacattcaataccacaaccttccctcccgaaatctctgagcttccaatctacaatagccttacgattttccatcactgcaaccctcgttttcattacgtttcgagttatacatgtcctgggggagttgtggtctcagcgtatcaaaaccctatctatcaaagatcctgccaagaaaatttcactgtgagcgttcctcggacatattctccaggagagaaacagttgaatttaactcttttggaaagtgttcttagagaaggagttgaggtgacggtgaatactgatgaaataacatgtgaagaatgttcttcctcacgtaagttttactaaagtattgttacattttcttcttcttatttattttgtttccttcttccacaacaccagtcagttttgcttcgtgcatggtcttatcctagttttttttccctatgactgacttgcctctgtccctaacaaagtctctgttctatactatgtgtatcgatgatttttgtgatcccatcttgtgttttatcagctattgaccattacgaccgctgcagtcaaccatttcgatgcggcgatcagaccagtctcttgtaccctttttgggtacgtggcagacaagactgcggccaccccgaattcaagctcaattgtagcgcaggattcgcagagcttaccatctcctcagttagattcagaatcctagaggttaactatgaatctcatatcataagactcgccagatcagattatatcgacaatctttgtccccaagacccactaaatgtgcaattcacggaaagcgtcgtccgccttgctggcatcgagatgctaaccattttttacggctgcaaaactttatcagttcttattgatcattctagtaactataacgtaagaaagcttgattgtgttggtgaccaaaagggtattacaaactactttgtgacgagaaacaactcgtctccttttcgtggcaataatgaaggcgataaattatcttccttgaggaaatcttgcaaatccgtcaatatacctgtgcctttatcggcgttcaacacactgcggccagataatctaaagaagactcttgaacagggtttcgagcttaaacttaatcaagactgttcaatgtgcctggaatctaagggtgcttgtggatacaatcagacttcaagaggatttgtctgctattgtaacggtgggacctatgaaaacaattgtagctctgaaaagagaagtcctggtaaaccattaattgtcttctctgggtttgtgctttatttttatacaagtttggttcaattctaacaaattttgcttgttcaatggttgtacagtaacttttgggaaagaaattcgcataggttagtttgctggtcacagaattcgaactattttcctttctaagattgaaaatgctttagtgtactaataaaacatttttctccattttgttttttgtagtttcgggttcagtagcaggagttgttttgttcctggtcttattaaccttgtttctccgttttctccggaagagaaaaatacggctgagacaacagaagctgaaggctcttattccactagaacactatacttatgcacaagtgaagagaattacaaagtcatttgcggaagtgattgaaaaagccgcatttgaagctgtttatagaggagcactttatgatggtcgtagtgttgcggtgaaagtcttaaaagagtcgcagggtaatggtgaagacttcatcaatgaagttgcaagcatgagccaaacttcacatgtcaacattgttaccctcctaggattctgctgtgaaggttacaagagagcaattatttacgaatttatggaaaccgggtctcttgataagttcatctcaagcaagaagtcatcaactatggactggagggaactatatgggatcgcgttaggcgttgctcgtggtctagagtacttacaccatggttgcagaacaaggattgtacatttcgacataaaaccacagaatgtactcttagatgacaatctttccccgaaagtttcagactttggccttgctaagctatgcgagaggaaagaaagtatcttgtcactaatggacacaagaggaacgatagggtacattgcacccgaagggttttcaagagtgtacggtagagtctcccacaagtcagatgtgtatagctatggaatgttggctcttgatattataggagctaggaacaaaacatcaaccgaggaca

SEQ ID NO: 38580 - DNA, 8157 bp, Arabidopsis thaliana landsberg
cgataaattacatcgaaattcatcctctggttcatcatcttttacatcataatcgagtatgattgggtttaagctttctaccggattgtctagtacccgatcttcaattgtagtcagcaacacagcttcatcattttctgtttgcaaaagagtcggatcattgttttcatattctccagaaatgtttccccgaggattaacttttaaaacatttagccaaatgctttttggtttctttgtatatggatacggaatataacaaacttgatctgcctgcgatgctgaatacacaaattatacattaataaatatacaaaattatttaataatttataaagaaccttatgtattcttaattacgtacctagaataaatggctcgtatttattgtatttcctagatgatagaacgtctacaacaccactatggcttcgccaagtgcctctaccaacctttgggtcatacaacttacacttaaaaagtgtgattttcaaattgacgatcccctcatactcgagttctatgatatcagttaaggtaccgtagaaatccggttcattagatgaatccgcgtaattttttcctttaacacataccccatagttacatgtttttcgtccagcgccatgattttttggatgaaacaaatatcctcgtgtgaaatacattggccaagttttaaccttgttcaaaggtccatgcacaatctcttgaacccaagtaggaaatagaaaagtagggttccaatatgttacctacataataaataaacaatatcaacataatttaaatgatcacttttaaaaattactaaaatgatgtagacttacatattctttaacccattgataatattcttcagctcttttcgcgtagagttctttttcggacaaggttggatatttcacagaaagaaaatcctcgaacatactatatttacaaccaaagataaataaatcaaagttatcataatggaaattttaaattaaggagtgatttaaaatacctctcaagtggttgaaaatagtcacaatttcttaaaacatatgcatgtgcgctttggtagtctttctctgaaagtcattccacgtgcatttcaccacttggacggccgacgtgcataaatatgttaggtactctagggacatgatatacaggaacttttccttcatcgaatcttgttaacctgatccatgtaattgattttaattctgaagtatagcttgcgcatcgtaaaataaataattatatttaccttgattttgtttgtatatgatcgacaaagtagtgctctgaaaaataagaaatctcgtcattgatatatgactcaacaattgatccgtccgcatatcttttatgttttgcttttcctttcaactttttgaaaaacctcgcaaaaggatacatccacctatattggacaggaccgcccaattctgcttcgtaggggagatgtataggcaggtgctccataacatcaaaaaatgatggtgggaagatcttctctaagttgcatatgatcaaaacaatgttctgcttaagaatttgaatgcgacttttctgcaaagttctcgaacataagtccctaagaaacgcgccaacccctgaaaaaaaaaattgcatcatctcaagtgcaaatatgatataaagagtaaattatattcttattttacctgataatgcaaggtgaacgttccggtcgaggagttctgcaaagataaatggaagtaaccgctccataaaaacatggcaatcgtgactcttcatacctgataacttcccattctccatatcaacacaactactcaaatcagacgaataaccatcagggaatttgattgcatgtttaacacattgcaataaactcattttggcttcatttgtcaatgtataagctggaaatggagcttttcccttactatcaatatgtaagtcaggccgagaacaaaatcgttctatatccattcttgccattatgttgtcctttgatttacccttcacgctcataagagtattcattatgttatccaaaaaattcttctctgtatgcatcacatcgatacaatgtcggagattcagatccttccaatatggaagctcccataatatgctttccttgtgccagttatgttccttcccatagcctggcatcttcttttcgtgaccgttgccactaacatccttggttcttggtggatttataccagacaaccgctcgtaataaatttgctcaccggttaaagactcaggtggatactcggtagaagcgtctttttcttctcggaagtctttttcgttcttccgtaatggatgaccatgagaaagaaatcttcggtgacaatcaaaccagcacgtcttccttccattaggtagataaaaaaaagttagtactttccatgcaaattggacaagacagtttaccgtgggttgtcgatcctgataacatgttgtacgccagaaagtcgcttatcgtccacagcaacactgcttttagattaaaatttcgattcaaagacacatcatatgcatcgattccagtagaccataactcttttagctcctcaataagaggttggaggaagacatcgagactacctcgcgggtgatttggcccagaattcagaattgtaagaaacaagtactatgtattcatgcacatacccggtggtaaattatatggagtcaggatcacatgccacaaagaatgatttcgcgacatgccaaatggattaaatccatcagtacataatccgagataaacgttacggggttcttcggcaaacatgggatgtagctcttggaaatatctccacttcgccgcatttgaaggatgattcatttcttcttcttttgattggtgttcggcatgccaaagcattgcagctgtagtcttgtggctctgatacattctcttcaatcggtcaccaatgggtagataccacatacaactatatggcactttggttattcgacggtagtcatccataggcttccatctttgagcactacaaaaccgacatttatcttccttttcgtcttgtttccagaaaagcatacaattgttaatacaaacatcgattgtataataaggaaggcctaaattgcgcataaatttttctatcttgtaatggaaatcagtagcttggtttccttctggtaaaatatctgtcaacatttgacataccgaatccacacatctttcactcatattatgatccgccttgttctgcatgactcgagctgctaacgataattgagactggccttcacgacaaccatcgtacaatggattttgagcaccttctatcaagtcgtaaatttttttagaatggttacgtatcggttcctccacattctgattagtaccgtcttgatgatagttatcatcaaaccccacgttataacgcaatgcatcgttcgccatatccacatatagatcttctacaacatgacccacatccacatatggatcttctacaacattacccacactttcataattctctcttagatacgtactatcaacataaatactcgttcctacattcatgttgaaatcttcccaatgcttataccaaacataataatcaggcataaattttgactaaacaaatgactactaacttttctacccgagacgatatgttttttattcttgcacacagcacaaggacagtggaatttacctcgacaactttgtattataggctagctattagcaaatgtcaagaactcctccactcgtacgacgtattcttctgacaaattcaccgtcatttcatcgaacctcttgtacatccaatctcgattaaaacaactgctactcggataattatagtttcccgccattataagaccaataataaaactaaatatattttttaacgttttttttctttaaaaatgtttttttttcttaaaggtattatttgtattgtgtttgtgttgtgaatgaattttgtgtacgtgaaattttcattatataggaaattttagagtgactaaaacacgactaaattgtgtagtcgtttaaaataggtacaacaacttacaaaacgaaatacatgtgcttttttaatcgataattacgtctattttgcgactatatttaatgacacgccggagtagtcatacaatagtcgctagttaacggctattacggcgtgtcgtatattagtcgcaaaattgtgactaatttacgactaattttagcgactaattacagcgtgtcatgtaatagtcgccctaaacccttaaacctaaacactaaaccttaaaaccatagaccccaaacttgaaaacctaaatcctactttagcttcaggaatccgcttgcggttctagttcttatactcaatgatacacaaagtatctagtcatatttgactacaaatccgctaaccaagcttcttgattctcaaagctttgatggtgaagctgaagttcttatgagtgctcttgttttatcttaaaccctaactctaaaccattaatcgttcacccaaaacctcaaaacctaaaacctaaacgcaaaaccttaaccttaaaccttaaaccctaaatcctactttaacttcctgggtcttcttgcgtttctagttcttagcctgaatgataaacaaaacatcaagtcctattcgactacaaaaacacaaaccaagcttcttcttgattatcaaagctttgatggtgaagcctaagtacttatgagtttttggtgttttgaatcgtttaacaaggaagcactactttacttttcgagatctggttgaggttctagttttatattcaatcatacacataacatctagtcatatttaactctgaaacgctaacctagattctttttgcttcttaaagtattaaatatatttgctcttaaacactaaacataaaccctacaccctaaatccaaaaccctaaaatctaatccctaaaccctaaaccctaaatgataataggtttttagtcaattatcctaaaacacgaatcatatcgttgtagtattttaggttgtcaatccaaatgggtgtgatgctaactatcaagatgtgatcagaagtcactaagtcaagccaagcaataacaggttttggttcgttctagcagtcctaagtgaacatgctgaaaacagaaacagtaaaacactcgaccaacacagctctttgcagagcactgggtgaggtcgagtgacaggtcgagtaaccgacagaaaatgaaacacagatactcgactgcacagtctattgccagacaactaggtggtcgagtatcagatcgagtaacaagagagaaatgcaaaaactaagcaacagatgaccaaatgcagtaaacaacagctaagtaaacaaagaaatcaattagataaagaattcccgaggatggggtaattgagtagttttgtttcctcagtttacaggtgattgacatgctaaataaattatccctagataacaagttcggttaccaaatctaagtgccaccgcaacagaggcactcaagttaacctagtcccagactcaatcaccattgacgagagctaacctaacaggcattacgaatcaacaagttaaagccaaaacgctccctgcaaccaatacctttgtacagagccacgaaactctggaattagttggagtcttcttttcttccttgtgctcgtgtgtctggttgagtgcggaatgaagaaggctctaaagcttgtcatcgagtatgaagtcaagtgttgtgatggcgatactcgacctctaggttgagtgacgaggtcgagtagtggtctggcagtgaaggtgaaggcacttgacctgggggtcgagtgatgtgatcgagtggtgttagaagatactcgacttccaggttgagtgaagaggtcgagtggtggtctgatgatggaggtgaagacactcgacctcatggtcgagtgaagtgatcgagtgatggtctggtgatggagatgagggcactcgacctcgtggtcgagtggtgaagtgaagtggtgatgtcctctgctcgacctgggggtcgagtggtctcttgagatcctgaagctcctactcgaactcttggtcgagtggtttgtcgtgatcaggtccgcttcttccaaatagctcgtcaacagctccaaatcacctgaaatcaacgcaaatatgcaacatgcatgcaaaactatcctaaacatgcaaagtgatgacaaatgatgtgaaatggtataaaacagtgatgatatgatgctaaagtgatgacaaatggatgctcaaacatgcaaaatacacacttatcaattcccccaaacttagtctttgcttgccctcaagcaaacattcaagaacaagctggaagtgaggtttgaaagcggggactcagagccaaaacaccagatagaccagatgaaatcattgtccaagttgaaagttctaagctgcaagatcgaattctacttaaaaacgttagccatgcctcatcaatcaatcaatccgactcatatgctcgacctacacaagttttcaaatctaccaatccctttaacattcattagttctggaacgtgaatcaagcaatgcatcattatatgaactcatttggctaaggtgaaggtcaagagacaaagatggtcccttacagaataggcttaagtaacaggggatccctcaagaatgattgagctttagtagaatgctaaaggtaagtcccaagttatgcatacagagataagatcccatctacccagagtataacaatgaagttctaatggtaatcccaactccagtcccaacttaactctaccctttgcactcatgaatctttcaaactctttttcatatcattcttttcttttctcttaactctaggagaagctttctcaacactctgatacatctagcggatttggatttctttaacaactaaagttcctgtttttaatctttaaaaccaaaggcttttaacccattttctttagctaacaagaacctcattcttttctttaacattcccaaaatctttactggatttttttccaacttcttttagcttacttcccctagaattctttccctttccttatcaacaatgaattcacccttttcttttaaacacatcccaacccatgatataagcgcccacctagtcctatccagtccgaaaacgcgaactataactacatgagacactatctctgttgttttgaacctaacactgcctaccaagctcaatcgaaataagacctcacaaacactcacaagtgatatagggtttgaaagaaagtttaggtttgggttcgggttaactgctctaataaggagagtcaggtacttggattcacaagagtggttaaaatgagtaagaaaacccaagtatgtatatggtatccatgagttcaaattcgatgctaagacatgataattgcaagtcaaattcaggttcaaaattgatagggaatggtatcagataatgacagtatgatcgagtagagcattcaagacataatgcaattttacttcaattttattgactacgtatcagacaactagcaacgatgaaccaaaatgcttacaaggctatctcatcataatccccaatgcatatgcgataatcctatatgaaacatcctaaactcaatcctaaatgtgatgcaaactaaatgaacactgtgttttggtggaatacattttcagaaaaaaattcaatttttttagttttttctatggcttagataaagttaagactcaaatgatgcaaataagactcactagcaaacatgttaaatacttcttgaatccttccccaaacttaaattacacagtcccttgtgtagtagaagtctaaagaagagttcaagagacactaaaacaaaacgaaaacagaaaatggtatatacaatgatggttgtgtgtggtacctaggttgaaggcactggaaacgtagtcgtccatctcctctctggtgtaatcccatgcaatattgggaccttgttgttgttcttactcctgtggaactgaacactcgatctccatgtcaatcaggtgctcaatcgcacactcataacgctttgttccccttgtgatcgaaaattggtgaattttttttgaatttttatgaacgaaaaaaaaagaaactcgaccctccaactcgatctccacctatgagatggaggaaaat

SEQ ID NO: 38581 - DNA, 1014 bp, Arabidopsis thaliana landsberg
aggtcgactctagaggatccccttcctttcacgaagatacaattcaagattcaaaaatatcaagaaacctttttttcgtccaccaataaatatattcacagaattaaggaataacaactatgaaaataagggcttccgttcgtaaaatttgtgaaaagtgtcgactaatccgcaggaggcgacgaattatagtaatttgttccaacccgaggcataaacaaagacaaggataatcttactaaaggaactaaagtaaaagaaaaggcacttccaaagagttggaaaaaagggtctattttgacctgaaatggatatatccgtatatttcttgtgaaatgaaaaaaaatggcaaaacctatattaagaattggttcgcgtaaaaatacacgtagtggttcacgtaaaaatgtacgtagaataccaacgggagttattcatgttcaagcacgtttcaacattaccattgtagctgttactgatgtacgaggtcgggtagtttcttggtcctcatcatgcacctgtggatcctggggttcagtacgagatcctgcctttgatgtccccacctcatcagaaaatgctattatagcagtagtggatcacaggtatgcatcaagctgaagtaaggataaaaggctctgttctcgtaatagaggtggcattcgacgctattcgtagaagcggtatacttttaagtttcgtacgagatgtaacccctatgccacataatggttgtagaccccctaaaaaaagacgtgtatagaactaaaaaaaggctaaaagggtttcaagaaaaataaacgaatcaacgatctgatcaaataaaattcatatggcttgagagaaagtcatagtattgtctcggtcattacagtgtaagtgtgttcaatcagaaaaagccagtaagcgtgtttaccatgtgcgctatattctgtatccacttataaaagggccagctgacgcaataggcagtgcgatccgcagagcttgacttggcgaaatagaaggcacagt

SEQ ID NO: 38582 - DNA, 2690 bp, Arabidopsis thaliana landsberg
atacagttcgcccagacgcctgtggtggataaaaataattctgctgggcaaaactcgaatctacacttgaaatgaatgccaaagttattgtatgtatcatgagggagacagatatggagcgagtaatctctatccttatccaagaaaaggtatttctagtttgcatggtccaatcatttatcccgaaaatttctacaataaagttagctaggtcgataatatacttccctagccacaattctgctatttacatttactgaaaaaaatcaaattttttttgttgaaatatacaaggaatccctcatgggtaaaaaaagtaaagtaaatacgactttgatttggttatgatgtataaggtacgaaagattaaaattggatcagtgaatctttttttagtcgtttattgcatgataaatcactacaagtgacggagatacacgatttaaataacgaaaaatccaatatttaaaaattgtatcaagaattactggaaaggtagaaactagaccagataaaatttgctcataatgagcaaacccaaaatctttgtaaatataaccaatcattagttcccaaccgtaggcgaatggatgcgatacataatcagttaataaagaatcgaaaaagctttaattgtatcacttaaattatataggaattcttgaagcccaagaattcagaataaaaatcttttccttaccccatatggaataaccacttagaataacgaaagatattagatttgtcgagaagtgcaagattgtatggatattatactcattgggtatcttgatgaattggatcgtttctttgtggattcctagacgaaattgttgtaaattggtttctgggtattcctttatcatttcatcgagctggaatagttcctctaattgtatgaatttttctagaaaacttttttcattgaatatcattcaaaaaagtttcgcattgtctagtattccaccaattagtaatccaagttttcaaacttttattacagcagagagagatcaaccagggcaaaaagactatagatagaaaataaaaaaaaggaatgaatgctttcttttttgccattttgaatctgtgagttgttaatgaacctacctcatttgttgattctattagatctaatatttctatcgagcatgtgtttctattctaattcgaatagaatatagtgagcctatgaatccattttatcttttgctgttgattcaatactgagtctttgctttgaatctagaaagaatacagaaacagactcagaatacacttccaacttgaatcaagaaaaaatggggtttccgggatgttattcccccctttttcgatcaatactaatttcgagacaaataaactccttttcttttctatcaaatatatcaaaaaaacgagcataaaagaagagatgaatattcaattgaaaaaaaaaaagaaagaaattctttcgttttttcttcctactgccaaagcatttaattaattcatttcaaaatacttcaattggtacacgcaagaagtaagccaattcagcagctttttggctctaccccatgaatattccagtaataggtctttcttctaaacgaatacgatattgagatttttttattttattttttttattgacaagtactcgtactcaaaaaagttataatatttgaatttactatttgaattttttttctcaagccgtacgaggccaaaagcgactgtttaccaaaaacacaggtctctgcaaagtcgtaagacctaataatattttattatgatttagtttctgtctaattataaacacacatatatatatagtctctcaatcattactttaaaatttctctgcagagaaactattctcaatctctctcttatctctctcatactttattattattttatattttttagtcaataaaaaattatgtgagaaattactgatggaaatgctcgaaattttatagtatctgattccatgagtgattgtagaacttttgctcaaaaataaaaatcatctaaactatcatctggccctagaaaatcggtttcattgtgtaaaattattatatattgaaagagtgattatttaaagaaattatagttgattggttgtgagtcgtttacacatgtggatgagtggttttgttcgaaaaaaggaaatctaaaataatgtacattgggggggagaggagtattatttagataaaaccaaatttgggaataaggtatcttaatcattgattcatattcccttcattggtgcgcgtgccaccgcttaaatcaccgaacacgttcccaaagtctagtaccagcaagcaataccacgtggcgtctatgcacaactatacgaaatacgagtgtcgagacatcaaaccaccaatagcgtattgtgttcgaacgcaattctaatcacaatttaatatatggagcgggaccctttaaactgctgtttaatacacaaaataagaaaaagaactcttcaaagtacgtaatcaatactagattaaagaaaccaaatcagaatactgtaacttattcacattaataatactcattaggaaggaaaaaaattggtagagaagaggaccggaatacgacgtcgttttgacaaacaactgtgaaaaagagagagagccgcacatgagtgaaagcttttcaaatatttgaaaattgaaacaaaaaaaaca

SEQ ID NO: 38583 - DNA, 1131 bp, Arabidopsis thaliana landsberg
ggcatccataatctacagaggtcgtgagttttagtggcgtgttccgatcgcagatccacagctttggttccttagccagagttgtctatcgtgataatgcggaaaagctctatgtcgctatgctcgtgcaagtatggacagtgtatgtcactgtcagtggggtctttggccgagtcttagttcgagagatgcttgtggggctccacatacagttacagtcgctttttccatcgataggatcctccccactattgaccttgtttcttgaagctcattttttcttcttcattcatctgcaccaaacagacactcaacacttgtgactttgagaaagcttttgtatcctgtaggatttggtgttaagaaacttaccgatttctcaacttctttggctttatcttcgttaaacccgagcttctccaaaatctggcggcctgctgaatccttttgagaccaaacccccagaagcaagtaggccgtggttagttccccatccacatctgtgaccaaatagtttcagttggcaatataatataatggatgggaaacagcaaggatccacaaaatattaaggaggtgttgtttatgcacaccagatttattcttctcatcaatggcccaggcaatggccttttgagccggctcagttagaggaggatgctctgggctgaaaaagtacatgtctgatttccccagcaggcttaacgtctcatctcgaaccttgaaaagtgtgactccattccccctcaggaacttagcaactgtgctagtgcctaaaatcaaaaccaactatgacaagcttaatatacgtcagtaaaccacataatccaaaacgatttaccataaatgccttttgaataacagaaagaagaagggtataaaacacaaagataaaactttctttctcatgattccacccagttctctcctctcgatcaaaccgcataagcattcaacaactgaatataataaagttacagttttttatggttaccttatttcacatgtattttgttttataggaacaaacacagcctgtacttataaggtatgctcggaatcagttaagagggtggactaaagcacaaagcaggacagagaaatctttaccagcattatcttatacagatc

SEQ ID NO: 38584 - DNA, 2561 bp, Arabidopsis thaliana landsberg
ggggccggatgggacgagggacggtacatcccgttgtgcaacacaaagatccaggaagcgaaagacaaccgtatccgatggggggtcgaggtggacgaaacgatgcgggagcaatagagaatttatatgcagctcaccgactagaaagtgaccccatggatctatgacttatactttataatataggcctaaaacatacaagtgatggggaacataccaaagctttagaatatgattatggggcataagaacgaaaccccaatttaccacaagcttttaataatatggctgtgatctgtcattacgtgcgactatctccactatagaaaaaaagaacgaacgctagtcaataaaatactagaaacacaaaaaaagggctttctacataagcatcgcctaaaacgatttttatcagctgtagcaaataactaaacttcatccatcgaaatatgaagtgaagactagatatgcctaaatactttcttttctatggataaaaaaagatttaattgatagaggaagcaccgtaaagatcaattggaaaggttttggaccgacacaacaagagctgtttatttatatcataatatgagataaatcttaggaatctacttatgtaatagagtaatccccgaaggtattgagcagcggtgtagcatcagatcctaaagacagtaagtctttttcttttttatgaagtatgaaaaagtctttttcaaagattctatataaatttttatatgaaagcgggatagttacctttcagaaaattctaatatctaataacagtggacatgcttttttttctgaaggtaggagaaaagataaaacttattatattaattaatatattaattaaatcaaaatgaaagtttgaaactcatgtaattactctcttttgtttaatccaagaaaaacaaaaaatctataagaaatctcattcaattagacattcaattagatataaagttcaaagtaggttaaagttaaaaaactggtacaccaaaacaaaagagttggttgtcgagccgtatgaggtaggaaactctcaagtacggttctcagggagggaattgatccgcctattccgaccgtggagaacaggccattcaacaaggagattctgaaatggcggaggcttggttcgctcaagccgctgagtattggaaacaggctataacgcttactcctggtaattatattgaagcacagaattggttgacgatcacgaggcgcttcgaataagaactttccctttgtttctttttttttttattctattctataatatttgctatttgtttttataattaattgttttttggtttcttggtcctctcggtcaaataaaacagatccttgtttctattagaagaaccaataaaagacaaaaatttcattatatccttttctcaaatcgttctattttatctggtagtctctaggggtaagtagtacatgaatatgagaatatctatatatttagttttttctatttgttattttctactattaaaactaaaaccaataaaagatatttcaaaatgactaaatatcaatactagactttttcttagtaatgactaataagcatttattgaaataggataatattatctataaaaaaaataggctgagatctttatttcacttttaattacatagtgacaccccttttaacaattggccctaacatgtgggtataagtgatattacagtggtggaaactatatgccaaattaatatgatgatttaattatcgtactccgtttagggaatggtgaaaaacaaagtgacaagaccatattccccaatttctgagagttcttgggctgaaggagcttcttaacaatgccagcttcagttacaccatcttcaacctttggcactagccctacgaccagctcaagttaaagtctgaatctttgagctctcattccttccaatgtcccctctcgcctccccggtaaagactttttcctcttctccatttgcttgaacaaagctttatttcttttcttttttttttccttatataacccaactgcaattttagtatctaaacgcaactggttaatggttaatgatctctggtgttttgtattccctgaccaaaatctctgagcataacaaaaacacaaatatccgttattgtttggtacaagctatagtttcatggttttaacatccagccttttgcgtttgatatctaatggacatacttttcttctcaggttaggggagattaaacacagcattggtgaaaaaagaaagaacatttgattttgttcaaatttttcttgtgtagggttttggtaatcagatcgtagaaatattaagtgtgtatatatatgataacatctacaaatcgggtactgtacagactcatccaacattagactcgtgtatcgcatcacatgtatacgggtaccatatataattctattaattttttcatatatctccaaatagtcaagttttgaatcagccagtggcccaatgcataagctattatattcacagaatctgatgattttcaaacgaataaaaagggttttatc

SEQ ID NO: 38585 - DNA, 9188 bp, Arabidopsis thaliana landsberg
cacaaagacttctatgaatccctgagcgatggatggttgcagcatactctctatagctcaataggtggtccaaaagaacaacagttaacgaagtatctgctctatcacccgccatcttcctcccatccttggtctctctcagaatgaagaccaaagcttgattaatcatgcatagctctccttcatcaacaaatctggtagtcttcttgggaaaaagggtgttggcgatgcattggtggaggtatctaatcacgggacttcgaattgaagaactcttgctcttggcgggggagaatggttttggtccggagattgttgtccaaagagattttagctcattgataataggtttttaagtcaattaaacctaaagcactatcatgttgttgtagtactgaaggttgtcaatcaaaatgggtgtgatgctaacaatcaagatgtgatcaaaagtcactaagtcaagccaagcaataacaggttgtgatgtgttctagcagttctaagtgaacatgcaaaaaaccgaaaatcaaacagaaacagcaaaacactcgaccaacacagctctttgtagagcattgggtgaggtcgagtgacaggtcgagtaacagacagaaaataaaacagggatactcgactgcacagtctgttgccagacaaatgggtggtcgagtatcaggtcgtgtaacagtaaagaaatgcagaaattaaacaacagatgacaagatgcagtaaacaacagtagagtaaacaaagaattcaatcagataaagaattcccaaggatggggtaatcgagtagcttcgttttctaagtttacaggtgattgacatgctcaataaattaaccctagacaacaagttcattaaccaaatctaagtgccaccgcaacagagaccctcaagttaacctagtcccagactcaatcaccattgacgagagctacctaacaggcattacgaattaacaagttaaagtcaaaacgctccatgcaaccaataccttggtacagggtcacgaatctctggaattagtggttcagacatttcatcgaacaccttttggacgcggaaatgtcttggctcaaattccagttgatcagaaagcaataggcattaagaacaactaatccagaagggatctatcaatcaatactcaatcacctagcatactgaaaatcctacactactctaacccatcctcagaaacctattcactactcagacatcataacagaaagcataaacgttgaacaggttgaagacatgataacaacagtgtaacagcaggacgataacagaatgaacaacattaaacgaaatcaagcacaaaagctgaatactgaatactgaataaataaagagaaatccggattacaaaagtctagaacacaaggtctgcggaaaataaaactagataaaaagcttgtctgcgaaaatgtgaagtacatgctacttatagccaaatatcccgaaaccctaatactcaaaacgacgaagtattgggacgggttaagaactgtactcgaccccatgtggtcgagtgagaggtcgagtgaatagctggagtcttcttttcttccttgtgctcgagtgtctggttgagtgcggaatgaagaaggctctgaagcttgtcatcgagtatgcagtagagtggtggtgatggtgatactcgacttccaggtagagtgatgaggtcgagtagaggtctggcaatgggataaagtcactcgacttggggatcgagtatgcagtcgagtggtggttagaagatggagatgaagtcactcgacctgggggtcgagtgatgaaatcgagtggttgtcaagagatggagatgaagacactcgacctgggggtcgagtgatgtgaaagagtggtggtgtcttatactcgaccttggggtcgagtggtctcttgagatcttgaagctcctactcgacctcttggtcgagtggtttgtcatgatcaggtccgcttcttctagatagctcgtcaacagctccaaatcacctgaaatcaacgcaaatatgcaacatgcatgcaaaactatcctaaacatgcaaagtgatgacaaatgatgtgaaatggtataaaacagtgatgatatgatgctaaaatgatgacaaatggatgctcaaaacatgcaaaatacacacttatcaactcccccaaacttagtctttgcttgccctcaagcaaacaatcaagaacaagctggaagtgaggtttgaaagcggggactcagagccaaaacaccagatagactagatgaaatcaatgtccaagttgaaagttctaagctggaagatcgaattctacttaaaaacgttagccatgcctcatcaatcaatcaatctgactcatatgctcgaccacacaagttttcaaatctaccaatccctttaacattcattagttctggaacgtgaatcaagcaatgcatcatcaatgaactcatttggctaaggtaaaaggtcaagagacaaagatggtcccttacagaataggcttcagtaacagggaatctctcaaaaaatgattaagctttagtagaatgctaaaggtaagtcccaagctatgcatagagagataagatcccatctacccagagtacatcaaatgaagctctaatggtaatcccatctccaatcccaatacaagaactaaactctaccctttgcattcatgaatcttttaagccctttttctaatcattcttttcttttctcttaactctaggagaagctttctcaacactttgatacatctagcggattaggatttctttaacaactaaggttcctgtttttaacattttaaaaccaagggcttttgcccatctccaatagctaacaagaactctttcttttctttacaaatcccaaaacctttactagactttttctgcttctttagcttacttcacctagagtcctttaccttttctcatcaatgaatcaatcccttttttttttcttttaaacacatcccaacccaaagtataagcacccacctagtcctatctagtccgaaaaatgcgaactagaactacatgagacactatctctgtcgttacgaacctaacactttctaccaagcttaatcggaataagacctcacaaacactcacaagtgatatagggcttgaaagaaagtctaggtttgggtttgggttaactgctctaataaggagagtcagctacttggattaacaagagtgatcaaaatgaataagaaaatccaagtattttagggtatccatgagttcaaatttgatgcagacatgataattaaagatcagattcaggttcaaattgatagggaatggtatcagatcatgacagtgtggtcgagtagagcaatctaggcatggttcagttttatttcaaattcattgactacgcaacagacaactagcaacgagggcactgagtttatccggtgaatcaaaatgcttacaaggctatctcatcattatcccctatgcatatgcaacaatcctaaatgaaacactctagactcgatcctaaatgtaatgcaactacatgaacactctttttttttttttgtgaaatcattttctgaaatttttcaatttttttggtttttctatgtcttagatgaatgcagactcaaaaatatatacaatgcaacacacacttcctgagcccacccccaaacttaaatcacacagtccactgtgcgaataaacttggaagagagtactcatgacaaatccaatcacagaaacgaaatgaagaaacaaatcacaacagatgatataatacaatggtgaagtgaggcgcgtacctcaatcgaagaatgaacgtagttgctcgtcaatggctgcctgtgattgctcccaggccatacacgaaccgccctgttctgtctcagctccagcatgtgggtactcgacctcagtgcctctatggcggccagcaccgccatgagtatactcgacctccattcttctgctgcagtcagcaccgcagtcgagtgatctcctggcgtggataagctaaaacatggtcgagtatccttcattgctctgtggtcgagtatagtgttgtactctcagagccagaatccacttcactcagctctttatacttatctcctgaaaacactaaccaaatgcataaaaaacaacaaggaaaaataaagatatgtacaaagatagacatgggatttgctcccaagtgagcttgttttaagtctctaagcttgacttctcatactcattaggcttagggtgggttgtagagaggaaatgaggtctcctctccttctttagtagagtgatcatcatactcattagggtttcttgacaggtctgcaattgggtactcagtggccatgtcctcacagtaagcttcttttttatcaagatagtcttctcctctagaccattccaacgtgaattcacatccttctttgctgacaagtatagtggctccatcgtcaggggcgtccttgatgttgagtggtacttggttggcttttccattgagctccttgatttgatcctttagctctttcacaatatgtgttagctcttgtatggctttgtcttgccatttagatctctccttgagttctaaccaatcatctgacatctgagtgcttgccttgagttgtttggtcgagcatgagctttcaggacaagttggaggcttcttcgagttgttggtggaattagttggtcgagcatgtgttgaacttacttcattagctttcataacctttgtgtctgaccccatcaagcccttgtaaacctctgagccaactgatgccttgtgtgagtctaatgacttctcaaaactcaaagtttcactagggagatacccacctttaccactcttggtcaaaacagtttttgaattatttgcttcttcaagttccactagcagttcaccagctaactgttccacttccttaactaagaaggtttgttcttctattgtcggcttcttcatagcatcattgatatcaaacttcatttccaaattcttccccagattaagatcaatctttccttgcttaacatctatgattgctccagctgtagccaaaaaaggccttcctaatatcaagggatcttttggttcttcatccatgtttagcactacgaagtctgtaggcacctccacatttccaatcttgataggcaaatcttctaataacccatgaggtagtctaacagacctatcagccaagatcaaggagatattgcagtatttatacttgttgaaacccaacctcttagctactgagagtggcatgagatttactgatgctcctaggtcacaaaggcatttattgaaagtcaatgaacctagggaacatggtagagtgaatgaaccagggtctcctagcttttctgggacgtcgttctcctgtatgatggcactgcactcatggctcagaactgttgttttttgaacctcttgaattctctccatgatcaagtctttgatgttcttgacaaacataactctgtacttatcttctaactctttcttgtgccgaccagaaaatggaagtgggggcttgtaaggaggaggaatgaagactttttctttgttttttacagtaacaggtttcaaagcagctagtgatgttgttgggaaggtcggtcgagtgacagctcgagtgacaggtcgagtggctgctcgagtgactagtcgagtggctgctcgagtgactggtcgagtggcagctcgagttgtttgtcagcttgatctttattgagactgaaatcctccccatcttggtatgcactgtcctcagtgactgacttgggtctctctctagtggataactcacttccactccttatgttgatagcatgaacattagcatactccttgggattctgaattgactttcttggaagtcctgtaactttgggagcagaggtagatgcggattatccttctaagtatctgactttggaattcaacgtctccacttttgcattcaggtcattgtagttgcagtccagcttgtggtgcaattcggataacttcttagcaatttccatggagctaaatgcttgtccatgtagcagttgttggaccatctgtttcatttcagcatcaggagcaccaggaccttggttttgcggaggtgcaaacccaggtggtggtggttgctggtagttccccaggaattgctgcttgggaacaaaacctttgtagggaacaaaaggtttgttccgaccttgttcttgttgtggaggatacacttgatcatgaggattagcaacgttggtgctgcggtaagagaggttggggttgttagtcttaaagttgttgtaccctttgtagccaccttgattgttgatgtagctaacttcttctaactgatttccctccccatcttggacttgaaactgctcgtcatcaacaaggaagtgcacatgcttatgctggctaagaagaatcatgtccagcttgtcattcagcgctttgatctccttcatgtgtttgtcatctgagtcagctgtgcctctgacggtcttgtcgcagtcctcgttgtaattactatctgattgagctaagttctcaaccaattcccagccttcttcaacatctttgttctggaaattcccattgttggcaatatctagaagcattctgatgcgtggtagaactcctctataaagagtgctgagcagagaggctttagtaaagccatgatgagggcattggttggtgtaacccttgaaacgctcccatgcttcatagaagctttcaccagccttctgtaaaaagccagagatctcatttctgagtcttgcagttctggcgttggagaagaactttgatagaaacgccttcttgcaatcatcccaggtggtgattgagtcatagggcagattcttctcccaaatgtgtgctttgccgcccaaggagaatggaaacaaacggagattgaatccgtcttcaataacaccattgatttttgttaggttgcagagcctatcaaattcatcaaggtggtcgagtggatcctccattggcagaccatggaatttgttcccctgaatcatcaagatgagaccactcttaatctccaagttgttgttctggatcgcaggaggtgcaatggctttcctctgactgtggccccgtggtgcatctccagcaccaatgtttgcaggcccattctgtcgattttggttgccatccatttagagtggttgctgaggtataaggttgattgtgagcctgctttctctaaggtcacgagctacgcggtcgatgttatcgttgaaaaggaggtactggctgcttattgatcgagtttgaatatagcagaggtgcacctcaatctagaagagaacaagaaaaacacacagtcagtgtctgaaatgaaaattgaaaatgaacttgatctaagcctgtctgtaatctcaaatgtaacaaacaaacacccaattggcaacggcgccaaattgataataggattttaagtcaattaatcctaaagcactatcatgtcgttgtagtattttaggttttcaatccaaatgggtgtgatactaacaatcaagatgtgatcagaagtcactaagtcaagccaagcaataacaggttttggtgtgttctagcagtcctaagtgaacatgcagaaaatagaaattcaagcagaaacaataaaatcactcgaccaacacagctctttgcaaagcactgggtgaggtcgagtgacaggtcgagtaacagaaagaaaataaaacacagatactcgactgcacagtctgttgccagacaactgggtgtggtcgagtacgaggtcgagtaacagacaggaaatgagaaaactatactcgactgcacagtctgttgccagacactaggtgtggtcgagtaagttgatcgagtaatcgcaaaaactaagaaacagacaataagaacgattaagtgataacgataaaacaggagaaatcagatagacgagaaattcctaaggatggggtaatcgaatagagtggtatcctagcttattcgaatggttaacaagcccaatcaagctatccctagataacaggttcaacaacagattaattcactcccgtgatagaaatcctcaagcaaagctagcccaaactaattcccattaacgaaatctaactatgcaggcaataagaacagactgataaagtcaataaacgctctaaacggccaatcccttcggatagagacgaatatctcaggaactagtggatcaagcattccatcgaacaccttctgggtgcgggaatgctttgtcgaattccagttgatcagaaaaaaataagcagtaaacacaactagtcctgaagggattcaatcaattctaaaacttaaccattctatcccatccttaagaactctatgtcactactcagacaacatgctcaaagacataaacacaagtaaacaagtatattgcataagtaaagagataaagagtagagaaacaagatggcatatgaaatcaaatgcggaatctgaataacttggaaaaatctcgaattacaggttgtagaagcaaaagcgacgcagctagagtaaaatagaaaataaaactgaagcaaaaactcaatgtcgactagatgtctcaggacaaaaccctcagacacctatttatacaaaacaaaataaaatgatagtagacgggccggtaacctaatcgcccggcccatagagtgataatgggccgagatgggcttcgtgatccgatggagctccaggccgcttccaaacacttcttcttcccctcttctcttccttgtgctcagcttgtctggttgagtgcggatttgagtagactctgaagatgtggtcgagtgcttggtcgagtggtggtgagtgatgatactcgacttcgtggtcgagtaatgtggaagagtgaatgtcagagtggtgatcaggtggtgtgacgaagtgttactcgacctagtggttgagtggcctggagtgtggttactcgaccagggggtcgagtgattggtaagaacggcctcaatgttactcaaccagggggtcgagtgtgctgctggagttactcgacctggtggtcgagtgtgctgctggagttactcgaactggtggtcgagtatgttttttggttccggctctcttcttccaattccctcgccaacagctccaaaccaccccaaaacaaatcagaaatgca

SEQ ID NO: 38586 - DNA, 3671 bp, Arabidopsis thaliana landsberg
catgtaaaggtcaccgtaggctgttctgattagagtaaggaaggttggtcgttctgggcttttaggatttggcgatggtggctgatggcgagcatcatggacgacaggtctagtaattcattgatatttgtgaattctagtcaaacactgagattcttttgctcctttgttttttggtgttctgtttttcaatcaacttgtttttttgttttaaatcatgggtcaattaggtctataaccgtaattcaaagtttaattaagaatatagcactacatttgaaagaattaaaaccctaacatgaagcagaagtgaacagacgaaactagcgtcaaggagacagaagaaagagagtagttaagctgaggtgcaggtaagaaaattttatatttttttcgattttttcaacaccccattctaattgtaactcacattatctgttttaaaatattcagcaagtttatgattctttgataagaaaaagttaaatattgttctgcatctatgatgatttaaatttttaaaaacggatataaacttaccaaacaaaaaaatggttaaaacatataatgtttttgtctaaatagaatacataaaagaaaatagaatagaacaaagcttatttaattttattttattttgaaaagtttgtgtaaaatgcatttttaaaagataaacattataccctaatagacataacataagaaacccatacgattaagttaaatgcatagtgaaaaataattaatataccctaaatgatacaatatatggaacccaaacagtatataatcttgtttaattacaacatatgaatattattttcatatatcattcgtaaaatcccttttttttaaactcaaactgatatataatatcgtttaattacaaaatctaaaccctatttttcctttgtgaactaaaccaaaatcgacatttaaactcgttttgttcaaaccaaaatgtttgttccgatgaattcaaataatcaatgaaatacttttgatagaaagatactaaaccgtaaggggataatatatagggaacccaagggttttaatctaaaacaatgatcaaatcacttaatatctttaatcaaaacaaacaatttattttaaaacgcatatagtacaaggtatacgtaaatagtatattcacaaaatagaatagtatctctcaaaatcttacaaaatcaaaatcgatttattggctatttccctttagaatttctaccatcgtaaacccttcatcgcttctagatctaagaatgatccctaatttatcaatatttaagaatgatccataatttattgtagatatgtggtgagcctgtaactatgaagaacaaaaaaattaagtgataaattagtttcagaccataaatgcattttgatgttaaaattatgtttcaaaaaagacaaaaaagaaaaaacaaagcttagaacctaaataaatctcacaaaaaggtaattaatgaactgtaactaaaaacaaaaaaaagcaaagaggtcatttggagagaaagagaaaaagaagtaaggagaaaggcggagaggagagagagaagaagagagagaaggagagagggagagaaggagagagaagaaaaagaagtagggagacaagcggagaagggagagagaaggagagaaaaagaaggaagggagagagaaggagagagaaataaggaaggagggtaaagttgtgattaatatataaaatataaagaatatcatctcatttttttgttagtgttactttcttaattatagtttttttgtaggttagttttccaaatttccataaaacatatttataagaaattgtatagacttaagacggacgtagttgtttcaccgctacggcgttaccacttcctctactctgtttcttcttcttccttcaccgttttctaacttcagtgcaggctttctctggtttcgttatcttcaaatcctcctcgcgccattgtcttctctttcgagttgctctgtttcttactatcatcaggaaactttcccggcagaacaaatgttagagttaataataaaaaacttgtcagcataataaaaagcgcatctggtgtagtggtatcatagtaccctcccacggtactgaccagggttcgattccctggatgcgcattttttcatttttaattgttatcactattttcacacgagaggctactttgtatggtcatttatggatttgtacgagtaactcagtggatacgagaatagtttaggaatgtactgagtcatgatcctcatcgcaagagatctcccaaactctcagctcattggtgctctggttttcttaagggcataaccacttatcttggttcccaaggcgtcatgcaattgcagagcaagcaacttatcttcggttgaaaccgattgagtttaaagtccggctcttgaacaaagccatataattaaggttattctcagcttaacagttattggattattggagtcctttagtcaatattggttcgtgacatttaacctcttcattggtaaaatgtaacggttttgcaaatttggcgtttaaactctggtttttaattgcacaaatgtgaatgaacccaacaataacacaaaagaggaggatgatgatgacataaataatactgaaaacacaagtacataagccaagaaaagaaaatcactggactcgtttatttgggcaaaaggaaaagaaaagaagtgaagaaagagagagggtcactactgcttctggaggtcaataaccttagcccaagcaggcctggcagagatcttcttaatccactcgctaaccttagggcgagagtcaaagagcaccttggagtcagtacccaacaagtaatggatggctgggaggtggtgaagatcagcaagagtgaaggaatcaccagccaagaactcagatttggcgagcctagcctcgtagacatccaagactttctggagcttaccttcgagctcttggacagcggcagggtcagtggtcatgccgaacatgcctttaaagacacgctcgaaggcaagcttagaggcgttagggtcaaactgttgaccttcaacttgaagccatacgttagtggttgccttgactttcttgcagtcttgggagataagcttttcacctttctcactgtattcctctgctaggtactgtgtgatggctcttgactctgcaaatatattaccaacaaaaactttcagcaacaaaaataatcatcacagtctgtcatttcagataaatcgttatccaatacaaagtgactaaggcgtaatgatgtttctgtaaatctaaaaaagtcaaatcattgatcaaagcaaaaataaactgaccgaaaagcgtcaaatcaccgtcctcgagagcaggaatttgaccgaagggctgaaacaaaacaaagatcattgtcagataattggaaaaaccaaacataaagtgttttcagttttgtttgttcgtaaagagagagagggagaaaggggttacgttgagggcaaggtgggcctcttgcttgtgggcaccggctctcatatcgacggggatgagctcgaactggagatctttctcgtaaagagtagcgaggacgcgcattgtggcggtggacatgggaactccgtgaaccttgatactggccatgatgatcgaagaagaagaagaagaagaagaa

SEQ ID NO: 38587 - DNA, 13179 bp, Arabidopsis thaliana landsberg
  unsure (1)..(13179): unsure at all n locations
accgagaggttgctttggcttctcttctcttctttgatctcatttgtttggttgagtgcggaacgagcagataggggtcggtgtgatctagtggtgggagatgggtgactcctccggctttgcgattgagtaaaactgattgttagcttctccggggttgcgatagagtggtgtgccttggcagggctccgaggctgcaatagagtactttggctgaaggcgtcattgtgaaaccaaagtacctgaaaaacaaccaaatatacaatgcacatgcaatcctaatgcgaaaccatcctaagtatgcaaaacacactaaaacgactcctaatgagatgaaatgtggatgaaacaatgacaaactggtgaagaatgaatgcctaaatcatgcaaattatagacatatcagtctccgtgtctctcggctcatgatctaccacagagtcagcctgcttgggccggacatgtcttgcttgtaggtccttgtgggtgatgtttcctagagcttcgcggctagaaatttagctgctaattttgctctcaggctttgacacttagaagtataatgcccaaaggtcttgtggagttaccaatacctttgcttgttgtttgaaggttggtctcttttcgggctgtatctacttggtaatcgtgtgctccagagaagttacgtctctcatgatggacgaatggtccgctctgaatgcccctcttttgggtcaggaagtttgtgtgtactttctcggttcgtgcgtccttgctagcagctccatgtcctttttgtggcgaacgtaatacaaggcgcgaacaagggcgtctcggattgtcaaaggcttagacaaatttaactcttttcagaattcagatttgtacgacatggccttccttagggccgagagggcagcgacgtcgcttattcattcgactttagccagggttgacttgaacgttgcgacaaagtcccttagtggctcattgggttgttgagataatgaccaaagatatgcgtcggatgtccatgggtcgattagcatggagtactgcatgagaaagagcgtcaacggctcttggaaactctcaaccaaattccgatccaaactggagaacaaatcttgtgcagttcctttgaggtgtccacgaacaacaaacacaagctggcgtctctctctcctagtttgaatctgcctcatcaaacagctatcatgaaagacttttatatgtccctttgggtcgtatgacccgttcaaatactcgatcttgagctttcacaggtcagagatcatggcctaagtgatcatgcgtgtgaatggcgtattgtacgattcttccgggatgcggtcaatatggaggccaaggaggtcatgctatgcatctgcgaattcacgagcttcatgtcagcctcaacattggctagcgaggcttttatcacgtcgatctcatgctccctttcgtactcctcggtccatttgatgttttcctcagcttcttcatcgttagtgacttcaatctgtttgattgcattaacctctgcttggggatgcagttcttgatggttgccaagctcgtccgtttagtttgatgcgtctaaatctaacggctcagcatgattgttacagtaggggatgtcgagcggttgcttgacttggctcggcatcccctactgtaattcgtatgatcccgaggtgatccataaccattggcgtttggctcgatctcattaagtgggtgaaatctgaccctaacaattatgcttagtcaatttccattctttttacacctaaccctttatttcgataagagggttttgcaaaacccaacactgaaacccttctccgtaatttctcaactccaacacttaacccacttttttcttatctcatatgagctctattatacaaaccagaacatgacagcttaaaaaacagagcacaaacgctcatcaacaaaacacatatgccttaactctcgaaaaaaaaaaactaaatcatcctcctcgtttttcctcttcaattcgtgaatgtaaccaccgcggttttataaccaaattctactaatatgtaaagtccaatagttccacgatcttggcaatacaaagtgatgagaaatagaaacccaatctcaaatgcttataactactactttgattaaaataaaactacttaattccacgatctgacaccgttctaccgactggtttcgagaatcaactaccacactccaaaatatcacatatgcaaatcaggttgaaatccaccagtttcgtcttagaaaagccataagaagacatcttctagcctttatcatcttaacccgatttcttaacaaaaacgtttgtctaagacctatatgaagtactcttcatagtaattgacaaatatattactcccacataaaagtggaaccaatcgactatgagacgtaggaaatcaatcaatggtaaatgaaaatcgaattgaaatcctagttgaatctaaaacgaatactattaaaaccagaaaagccgattcaacaaagatgaaaaagatccaactcaaatcagaaattatatgtttaacaaaaaaaacttgcgttttcattaaccagatatcacattctctctagaaaatataattgagataagagagatctaatgcaaactattttttataattacgtttcaaaaattgtactatactacaaactcaccctaacttttaggcctgggagttcggattaaaccgatcaaaccgacccgatcaacccgaaattttcggttctcggcttagaccgaagagattaaaccaaaccgaacggcaaaattaatttggccaatcagatgtcggcttgggtcggtttggtaatcagttatcgatcgattacttcggtttaaaggaacatggtataaaaacataaaaccctagatctaattcatttcatctcttctcctccttttcgcctctcctttacgatccttctttttccactctcctcctctgcttatgatcttccttgttctttcttcttctccttccttctcttctaaactcttctacatcttaatcttcttcgttttcgtctcagccttccatgacatttaccgacgtgaggttcgtgttgggatttgattattggtattacttgattttttcgtagtgattgttttttcaagttctagatcttagaaatcgtttttattttattgatttaatagttttctttcttctttcagtgagaatgctaaaaacacattcatcaacctcattcaatgcaatctcgcttcaaggaataaatgtctggaatgccactatgtgcgaaaaagtaaccaggaatgccactcttctaattcttattttttgccaaattaaaaataaatgagagaaatccaaataattggcaaaagaccaaaaaccaagacgacccaacaaagtatccgatccaattaagatccatgcccagcgacccaaaactcatcccaaacacttaagcgaaatccctaatttctaaaatcaaaccgtttctgctctcagaaaattcaaattttccaaaatcaaattcataatttctcgcctttcacgattttccgacgaattcttgattcgtgtaatagttggatggctcgtgttagagacggtattgctggccctgtatatgattcgacggagaagtcgtcgtccggtgaggtttcgacatccgaaccagttacttcaaaaattgagaacgacggagatgccgtcgacttggttccgaccaaacctgcaggtccgacagaaccagaaacacgagatgttgcggcgaatgatactacaaaagaaactgctgaaattgaaaaggctatggaggaaccgcgtgttggtgatgagggttctgaaattgaaaaggctatggaggaaccgcatgatggtgatgagggttctgaaattgaaaaggctatggaggaaccgcatgatggtgatgagggttctgaaattgaaaaggctatggaggaaccgcgtgttggtgatgaggcttctcctaaaggaaccgccgaaattgaagagaatcagacagggacaactttgaaacctctaattgacgctgtcattcaacaattcgaagaagcgaaagacgggaatggggaggagttggaggaggaggaaatggtgatacaatttcaaaagaaggggtagagaatgttaatcgtcaggtatatacaattgaatctctatgacacacatttgttttgtttgagtattagttctcgtattagttagaaatgttcaactagttcatctgtgacacatgtttgatttaagtaatttgatggaactagttcaattggtacatatgaattgttagtttggtacatatgaattcttcaattggttaatgtttattgaatttgcaggatacttgtgaggccgaggatgatgaggtttctgttaaagagacagaggaagatgaggctggcaatgatggtttggaggatgatgatttagattctcagccactgccgccacagaccatgcattttcctttttcagaatacggcaaagtgtgcaagataagcagtaggtgccaggtcacgcagacagatgaactgatagagaggaagtttaaagaagaagctgtatggttcaaaagacacgatcagttcaagcatatattccacatgcctcaggagcctaaccaccagacgcaaggcatgtgggtgcttatgctgcgcacagtgaagacagatttgctcgaggaggcttggtttgtggtaaatggagtacctattaggtattccattaaagagcatgcgttgttaagtgggtttgattgccacagttacccaaaaaaaatgaatacaatggggaatattaactttgtgaagaggatattttaaaaagaatctgggataaaggttgtagatgttcttgctaagtgctcgaagatgaagcatggttcagataggttgaagttagtgctgttgtacttcttggtcaaggtagtaaaagctggtgcaaagaatgatggaaacattgaagagtttctgttaaggattgttggcgatttgaatgcgtgcgagacgtttccgtggggccgttacacttttttggaatgtatggcaggaataaggaaaatgatgaagaacatgaatggtttcgtgaaaccaaaagcttaaccttgcttcagaggattcattgtgcctcttgaggtaagtaatttatgattattatatgagtataaggtgtaatgtacaggttttatgatattaacattgttttgttatttgtagattctggcttatgaggctattccacagcttggactgaaatttagagtccctgtaaggttcgagaatgagtgtccgagaatgtgtaaggcctcattctctagtagtgtcatgaaagggttctcgctggaagagataaacgaggagcttgaaagtgtaaaggtaagagttgtcccagttatctctagcgttgtcctagttatttctagagttagcccagttatctatgagctagaatatgattattttttatgtttgaatttgtataggttatctctagcgttttggaaccggattacgaggagaaagatatgttgaggcggattgtagatggtgatcatgttgatgatgggatagggtttgttgatccggttgtcgatagctggagaaaccgtttgatcaaagagaggaagagaatcttctggaaggatatgtttgaagcggatgtccgggcccgaagcggcggcgagcaaatggaggaagagaatgttcagagannnnnnnnnnnnnnnnnnnnnnnnnnnnnnnnntgctctttgaaggaagctattgatgaaggctttaagagagtgatggcgatgttggcggaacacaatgaaaggcttgtaaccattgaaaggagacaagccggtgagagtgtgcctccatttgagaagaaggtccattccgatgtgaataaggagaaggaagatggtggtaagaatgagaagaacgtgaatgtggctattgagaccgaggctagtgttgagcccgagactagtgttgagcccgaggctagtgttgagcccgaggctagtgttgagcccgaggctaatgttgagcccgaggctaatgagacccatgatgttgagcccgaggctgttgagacccatggtgttgagcttgagggttttgtgcccgagtttgttgagcctgagggttttgtgcccgagtttgttgagcccgatgatccgagttctgccatggttctttatgttccgcatgttccaatcggtatggtttgttttgtcaatctttgatctttttaatatatgatgtttgttggttatgaatggttgtcttttcttttgaaggtgatgttcaagttgaaagggatactgaagcggataaaggcgatgatgagacgccgaagaaggaaacgaagaagaaagggaggaagggaaagggaaagtgcaacgataagaagaatgagaagaagaaaagagacgaggattctgaggacgaggatgaaggtggcaaaaagaagcgtaagataaatccatcgagattccacaagccaccttataccgcggagagaatgagagggccaagggtctggtttacgtttggagaaaaatgtattgaagacttgtgtttttgtgggaacgatttacttatgtatttcggatgtattgaagacttgtatttttgttatttaggatgattgatcatgttgttttgggatttatgttacttatgtatttaggatggctgatcttgtttttatgggatttatggtatttatgatgatgttcaaaacaaaaggtacacgtagtttatagttaggtacaactcaattccaaaagaggtacaactaacaaatcaaaacaagtacaaatgagttcaaaacaagtacaagtgagttcaaaaaagaggtacaagtagtttatagagaggtacaactcattttacttctttccaagcaacccgaacctcgcatcgttctggaagtttgcaccaaaaagcgagcttaaacctcgcatcttatactttaactcgtgtattttacacagcttcagttttagctcgtcagtcagacagcctcagcttcagctcgtcaatcagacagcttcagtttcagctcgccagcctcagtttcagctcgtcaatcagacagcttcagttttagctagtcagtcagacagcctcagtttcagctcgtcaatcagacaccttcagtttcagctggtcagtcagacagcctcagtttcagctcgtcaatcagacagcttcagtttcagcatcagtttcatctcgtctttcagacacctttcagttttaagctcgtcgatctgacagcttcagtctcagctcgtatttcagaccattagtttcagctcgtcaaaacaagtacaaatgagttcaaaaaagaggtacaagtagtttatagagaggtacaactcacttccgaaagaggtataaattacttcaaaacaagttaaaaaggtgcaaatgactctagaaatcttaggaattcaacatagtttcaaactttaacatacttgttgcaacataaaaaggaaatacaatcacaatgtcaattaaatcattttacttctttccaagtgcatccataagccttgcgatctctgcatctttcttgtccaagcggtcttcgaggtcctcaatttcagcacggatttggttaatctggacacgattactatcacctccaaatttgaatgcgttttgaatcaattccctatgctcgccaaatcgtttgtcgatgcaaaagcactgctcgtgaactgcaagatcccaacccttgtctacgtaataattatcatcttgaccactcatcggacatttgagaaatgtcttcttttgatcgccaataagacgctctacaagctcaagctgtttaccacaaaaacagatttggggaacaccaaaatcaccatcgtacttggaaggatcatcggatcgttcctctgaggaagaaggtgacgaataactaagtggcattctttggtacatagccaaacacatgaaaatcaaaaggggataaattccaaaatctaaaccctaacatccaaaccctagatctttaacaaaatccaaaatccaacccctagatatcaaactatcataaatggcaactctaattcctttgcaaaccataattcaatgaaattgggggaaaatcaaaaccctaatttcatttcaatccaacccgaaacttacnnnnnnnnnnnnnnnnnnnnnnnnnnnnnnaagattcggtggccggcgtcggcggaggttcgtcgtgttgttcgtcagcactgttcttcgagaatcggcagagaagagagaatgagagaagataacttttcgagagaagaaaggagaagaaggaaagaaagagagagaaagaaatgtaatttaatgagaaannnnnnnnnnnnnnnnnnnnnnnttgaaatacatagtgtgaacacatagtgtgaacacacaagagttattatggtaataaaagtggaatgcgagcccagacaaaagactgcgcattagccataattgtgccataagttattcagttgtccggtactcaagttatttgtactttgtggaagttttagtatttagagttggacttcattaagggaattaacttttagttggacagatgatataatatgtttaataataagatatcatgatttagttatataagttttcaaatatatgcgttttgccatgtttatatcaagatgatccaacatgatacaatgcataccatataatgtaagaagtgttttctgaattgatgagtataatatgttcaattgttttttagattgtatgataattagtataagtgattaataaatgttccagaacaatgtatagaaagattttccaagtatgaaactttttctttataattatgagaaaaattttaaaattacctcatttttaataatatcatattttagtagataaaataaataaactgtatttatctcataaatagtaaaaatatattaaaaatacagcttcttaaaaatttacatttaatatattagaaataattatagttttaattaaaagtagagagaggtgtatttttcatacaaaaaccatatgtttttcatacaaaaactcatattttgatatgataaaaatatttaaattaaattaaattgaagcaaatgtaagtaaaaaaaacaataataaaattatatttctttcttatatatataggaggaattttattgtaagagataaacatgaaagaactagtacatacaggacaagtacaaggtacatacataataacacttaacaaaattccaaagtacttaaaaaagatgcactaattcagacgacataagtacacggtccagacataagaacacaatactcaagaaaattccaaagtacttataaatgaagacataatacatgaagcaatagtacagacagcacaagtgcacggttcaaacattacaagcacacacaaaatacacatttaattatgagtcggcgttctcgggctgcaaccacgcgttgatattaattccaggctgaaacttgttgttagtcctctttcgacgacgttctcctgttaatggaaaccgggtttcttgatttctccccggtttaattgtggtatctggcggtaagactatcaattgtcttatctcatcaggaataatccaaactgatgaatgcgggactggataaatggttctgtggtatgccaatatccacgtattcatatggtaataatgcgaagttaggtcttccatttcgagaccatctaatatccattcggtccccacaaagtttcgggcagcggcaatcgcatgtacacacgggtacttgtcaacatcaaaacgtcggcaagaacaagttttccttagcaagtcaacagaataagacataccaccttcgccaatgacgctgtattgacgttcaaagctgttaagctcggtcaccggcatcgttttcgcaattgggcataaggagtgtatttcgttctccacaaccggcacaagaccccttgtttcagaatatttaacagactacttcctatgtttgttaaaccattctgaaattttctcaattatcgcatcaagcaaaggtaaaaggaagtatttccttgcacgcttaaacgtaatgttcaatgattcacacgcattgctcgtgtctatgttatacctatccccttcaaaatagcacctagcccaatttttcacaggagccaatcgatccaaatacgtaccgacattaggaaatcttctcctaaatcgagcatactctctcgtgatctcaacatgagtataaacatgtgcgcatgcaatgaagttagccgccgcttcttccttctcagttccactcgtactttaacgttttgagacaaatgccaaacacaatggtcatgtctcgcgtttggaaacacatgcataattgatttgatgatgctctgatgtctatcactcacaaaaaccaaacctggttcatctggtataactgttttcagcttgttaaagaaccacggccaactagcatcgttctccctatcaattacagcagacgcaatgatataattgtgatgattaggatcttgggctgttgcgaaaactagcataccgccgtatacggtcttaagaaaagtggcatccacaataacaactttcctcataactttgaacccttcaatgcaagcacccaaagcaacgaataagtacttgaacttttgttgtgcatccacttccacatatgatattgtcccgggattcacctcctttaatacgtacagataagagtacaagtcggtgtagcttttttcaggactaccacgcacatcattaacgtgttgtcttttccctctccatgcggtagcatacgagcaatgcaaacccattcttccccgaacaatactcattatgcttttaggtggtggagtttgaaactcacctggataatcctcatgcaaaatagacgcgattaatcgtggtgtgccggtatgtttacaattgcctgagttcttattagaccgcttgcatgtgttcatcttcctgtgaactctaacactaaaataatctgaactctttacttttgcacatcgtaaatactattgacaacctgttgttttatattaccgacatcgtaacatgagtcgctttggatctgacgctatagttgcggtcgcaaaacaatacttatttgcagctctgttaaccaaatcttgcacgacctccttagaaacaaattcttggtgcaattcaatccccgttccatcttcccattccgtaacactctgacttttctcactactctgacttccttcaccaacacatggaagctcataatactcaattctaccatcaacaccattatcttcagcaacatccatccggctatccacatgctctctatcttcaataactacattctccatagcctcttcaaaaacccggttatccgcattctcaatagcctcttctacactattagcctcttcaataatcggttcatcattcacacaattacctcctgcagtttctcctctaaaaatcgtcactactccaccattctccacatcaaatgcattcaactcctcataattaacactaactgaacttcttccctctacccttgaaatttgtttcaccctctcagattctttatttactacctccacgttcaaagctggtctaattcccttagcattcactaccattagataacctaaaaaatcatcatcatctacaatagatgtctctctctgagatgtgcatagaatataactcaatttcaccttccttgaggtttcatctatttcaatcttcttgcatatcttttctactaacatagagtatgttacctttgacgtcctcaacaatacaccgcttaaagaattgtttgaaatccactcatgctcttctaaataatacccattttcaaattgtatgaatgtgtgcttgttcttcatcatctcctataattacaaataaattataaaaacacaattacgtaatcattcagatttagacataattatacctatattataactcactaataccatttgtaccacctgtcatattgtatctcaataaaacacttgtaccgcttatactattatatctcagttttaccatttgtcccagttcgtcaattctgggtttcacaaatcgtaaatttcgattgaatactcactaaattctctgattcaaaacgataaaacagcccagaatgaacaatacaacaattttatgttatgaacaactaactccaacaagaaattcacattaatctacaaatcaaaacgagatcggatttacttttgccgttgaagaggaagctcactttgggagcagattatcggcttggaagctaagacgatatcggaagctaactcgccggtgaaattagagctcaaatcgccggcgaaatcggagctcaagtcgccggcgacgaaggcggaaaaaatcacgtccgaagtcgtcggagagaatcgcgggagcaacgaccgttttttttttttttttttactaaataatttactctttattttgaattctccctcagttattcattaaggagagagatgtaattacacatggtcgagtggtactcagaataaatggatggtactcagaatagattttccaaaatgatggtagaatagaacgtggctcctctgtgtctgagaatctttttctagaagatgggtttaaaccggagctggttataagagttttattattacgaaactggcaacaaaccggaattaaccggaatttagctgaaataactcggtatgattttattctgaaccgagcgtaaatcaacccatatcaatgtgttaatttgagaataaccaaatctgatataacttcgcttcttaagttttttttactcccaaacaaatttccaaacttctgaaccgaacgtttgcgatcattattttgttcatcacgtaagggctatttacaaaaaacagtagacaagaaagcagtagatatgagagttaggaacataggtttcttttcttctcctacacaaaccaaactatgaagaaaaaaaaaaaaaactcaattgcctaaagtctcgggttggttcagccaatcaaggtcactctttgggagctcttttacctcctgctctttttccagaatcacgttgattatcatcaacacacactgagtttccacgctgatgtctttgattgcatagagcgggctatccaaacc

SEQ ID NO: 38588 - DNA, 13529 bp, Arabidopsis thaliana landsberg
agaatgataacagaacgataacaagatgaacaacttagtaattaaaagcaaaatactcaatgaaagtaagagaaaatctagattaagaaatgttaagaacacaaactgtctaccgaataaaacctagtctcaaaaatataaagtacatgctacttaaaatattcttaaaccctaatactcaaaacgacacagtattgggacggatttaagataggcactcgacccaggtggtcgagtgattggtcgagtgataagatggagtcttcttctcttccttgttcttgagtgtctggttgagtgcggaatggagaagactctgaagctggcagtcgagtatgatgtcgagtggtggatgatggtggtactcaacttggtggtagagtgattggtcgagtgtgcgattatgatgggactcgaccatgtaatcgagtaagtgatcgagtgaaggtgatggtggtactcgaccagggggtcgagtggtgatgtgaagtgatgaggtcgtctactcgaccagggggtcgagtggtggtgagaagaggtgatgccatctactcgaccagggggttgagtggtgatccagagtgttgcggtcgagtgatgttgtacggaggccgtgaccgagtccttcagaaagtccaggatggaggtccacttcttccaattagctcgtcaacagctccaaatcacttgaaaataacacaaatatgcaacatgcatgcaaaactatcctaaacatgcaaaattatgacaaatgatgagaaatggtataacatagtggtgatatgatgataaagtgatgacaaatggatgcttaaaacatgtaaaatacacacttatcagaatacgaacatctaatggtttatttcactgctgattactacaaaaccattaggaatttccctgttcttagccaagctctggtcttttctgttttttgaaataatcgattttggttatgttttatttgtttttcattccatttcttagaatttagattcttagagatggatttgttaaagtttgataatttatagctccaagatgttttgagagacctaatttctgacaaatttgtcaacgttattgggttaaacccaaattggcatttctatgagttttttctctaaatctctttggtttagtcatattcaatttacttgtttgatgtagactggttatcttcaatcgctttagcgagattttgcacctgacgaccttgaaactctggaccaatatcttgattttgttgttttagaagattcattcttgatatgtttcttatttgtttctactcttctaggacagagttaaaccaatgaactgattcaataagttttgatttagcatctgtaattattacacataatctcctaaagtcaattttgagagaaattatttttttatgatttcatatatgagttgtataaaacaattgagttgatgaattggtttttgttctgaatctggtacaagagatctgaagagaagagataatgattgaacccagtagagttacattttgctaatggacgacacacaaatgatttactatatcaataaggttagtttcacatatctaagttccattgtagacacaatttaaagttgttgtttctctatatcttagttgtaatggaactaagcgttcttctttctgtcgttaatggttaaggatttgtctagaaataaaatttgcttacttacactaattgactttagctgttggattctaaagtattacaatgaatatgataagaaacctaactaattcaactattatattgcattctgaactattattgaaagaatattaaaatatgtaagaaacaaattattgtaaaatgaaaatagagaacattgttgttttaaacaacactagaatcatcttaacaacaacagaaggaatgaagctaaaacgatcctaactccttagattctgaaagatctctttgaaaacaacattcattgtttgactctgcgtgtttccttctttgtccacaataagaactttcaatccttttttggaagtgactcttgataaggcaacatatagctggccatgagaaaatactggtctaggaagataaattccaacttcgttgagtgattgtccttggcttttgtttattgtcatagcaaaagccacagctataggaaactgccttctcctcatctggaaaggcaattttgtatctgaaggtgatatctgtgattttatgattatcaccttgtctccgactctatctccagtaataactctagcttctagtatatgattacccatctgtgttacttgcaatctagtaccattacataggccaccttttggatcaatattccttaataacataaccggtgtaccaatcttaagagtgagattgtgatttggcaaaccagaaagctttatactattgaggaaatcaggtgtgaagacaggattgttcaatgacgctgcatcttgaggatcaatactatccgcacttaaataagtaactgattcacctgtttgaaaacaattgttagaattcttacaacaaaatagtcatagtacacgacaattataaacttagcttaccattaagtttctcgagcatgatgtcattgatggtgttaacatcagtattccgtggacacaatatagctttctgttggaaaaatttaggatcattattaggctgcaacaaatcaagatctccataaacagctttggtaatagcttcaataggatcattggcatctttaataagtaactcttcaggaatatcgatgagaacttcaccatcatttggctctgaaactcttccatctccaacggcaaggagccaattagagaattcttttatttcctctgcctcatctttatccaaatcattagacataagacgcatattctttgtcaaagtgagtaccttgcaatgttcccaaagataagatgaatttaaagcagctaaaacgatctctgccctaccagcaccatgtatcacaggaagtacttgtctgaaatctcctccgaagacaacgaccttcccaccaaatggctttccatcaatatttccaataacatcatttagacttctatccaatgattcaaagcagtaacgactcatcataggagcttcatcccatatgataagagatgcttcctttagcatattagcaaggtctgaatcaggcactatatgacaggttgtgaaatcatcaggattaataggtataccaaacctagaatgagcagttctcccaccttgtaacaacaaagaagcaattccgctagacgcgacgttaacagaaattaaacctctcattctaactgcagcagataaatttttccacatgaaagttttaccggttcctccaaaaccgtaaacaaaaaaaattccaccactgttttctaaaacagctttcatgatctcatcataaatccctttttgctcagaagtcatcttattaaaccaatcatcatgatcttctctcaatttttcgatgttgtaatttttctcttctgtaatgaaacggtttgaatgatcggtaccttctttagtaggtttaggcatgtctttgaagtcttgtaaagtacttccattacacaacaacatatcttctatctctaaaagagcataatttctcttctcagcatcagttagtactaaatctgaaaatggagaagaatataatttaattagaacagaaaaaaacccaacgaactatagggaataaatgtatatcaacgaacctggattgtcgtactgttttcttttctttgtttcaatgtcttcgattaaaattcaagaacatatttcccacacatactctggtctagcaagacatttatccagaagcatcatagaaaataaattccgaagatgatccccaaaaaaaaataaacttccttcgactatagtatcaatatatgcttgatcatctgtgagaataccacgtgccaaacatgcctccttgtatgtctcatacacaacatctttgtatgttctgatatcttcatcacttgttggacgagatacaatccggagaagtatcctcatgtaatattctggttccatctttatggaggcgtagttcattcttcctatacagaaaacctctttccctaagcttccactgcttattctgtccatcccatgtgaaatattgaggaatctctgtgtaagtgaactgtctagcaaactcacactcttgattcagtttcaggaaagccataaacatagaatcttcgttggcttttctttccaaaagttcatctatattctgagtgtcttcaaaacatagtggttgttttcctggtagatgatatgaaagcttcattacaggtgtagttctatactgaatgggaaatttgaatatcctccaaactgcttcagaggctgacacatatctatttagtaagaaaaatattagtaaaactatccaagaaaacaattagagaacgatatattccaagttaaaaaagtatatcatacctgcaatcgaagtaatctttgatttcatctgtacttttttctttactgcgagtttctgagccagtctgcatattagatgtcttgtccttaggttcaacaacaatagctacacgatcttgtcctttattaatatacttaaataagtattttatagaaccggattggttacaccactcaacgtttatgtgagccctataacgcaatgataaaagacgattataaggaacaacataagagttgtcacacttaataccccctttttcaacaaaatgttcagattctcgtcttctatatattggatacccgtctttaccaactgttgtttgctcaaccagtttcttaggaaaaaacttagaacacttaccatcaaccatacatggtgactctttgttggcagcaccacatggaccatgtatcatacaatcctttacaacttcatataacttagggtccttaaatttatctggaatctcagcagatattatgttgtcaatatcatcagaggttgggaatttgcaactcttatccatgaataagagtatatgagcatgtggtagtcctctcttctgaaactccactgtgtacatagctgcatattaaaaacgattttaagctctcttcattatagtcacagcgaatcaaataaacagaatctaaacttataaagaagatgagagaattaattaccagaaacagttttgcctagaagatgttcttctgttaaatctttcataagagagtcaagcttcatcttgaatatccgacacacaacatctggtctatcttcagcattaagtttacgctctttacaatatctagttatctctggccacttagggttacatgtaaatgtaataaaaaggtccgggaaaccatacattttacatatagccatagcatcatagtaagagttcaacatatagcgaggtccaccagtaaaagattgtggaattcggattgatttcccttgttcactcatgttagtgtttccagcttctctcgcagccttaacagtatcataattctcacatctgagattagattggttaaacttaatataggccaacctgttgctttctattgttgtgtatccatctaccaagaattgttggaacaaacgcttcgaacgcagtagggtctgagcttcatctgatctctcttgtattctaaaagcataccattgcctcatacttatacacttgtttgcttgttttcctgttctgcctgtatatcccttctgtattcctggtctaaaaccatcttcaccataattaaatatgagaggatgttgcattgggacataagaaggatgaacttcgcttattcttgatagctgtcctgttttcttatcttgaacgataatatcacgtgtaggcatttcaggacgaaagtctccaggaatcaaagctgcaacttcagacgttgtagggttacaataggttctgccatcctttcctaccctatcactaacaatctgcatgtagaatggttccccattattactatccaacttatcttttgctagcatgaaattttcaacgtatggattgcaagcatccaacattctgatgagcttttcaataagatcctttctcacttgatttttggctgttgctttcttcggattctttcccttgctaaacacagaattgttaacaaatcatattagtgaaaataccataaacttcaatacacaacgaagaataaaatgtaagaaaataaaatataaaaggtaccccatcacagtagatctgttttccacttcattctcagtatcaacaatataaagctgtgagaatttagcataatctccttcaccaggcaacatactaccagtcaaatgataattggctccatgtagctgaaactggttaggaccttttccctgtggattagatctatcaactttaccaccaagggaagtcatgctgaatagcatgttatatgctcggatattctcccggaaatgtctgctgagtgcatcatcacaacttaacaattctcttataagatcaggtgattctttaagaaatggcaatttaactgatccctgaagacaacatagagagaattttggtttcttgctattccttcttttgttgactcgctcatcgtaccaactcatagcaccacagtattgacatttccattttggatcaccgtgatctaaataaggaatgtcaatgagaggatctgcaaaaaaaaaaacagaaatcaaactcgacttttaaaatgttatttatatgttcattctgaaactaaaactaattaaatgatcatactgacctattttctttttcctgttgatatgtgctcctctagtatatctacttcgcttaagacttataccttttctacgtttaatacatggtgatctttgattctgtggatgcattgtttcatgtgtttcaacagaggtttcagtttcatatccagaactgctatcagaagccaaatcttcttgactactaacatcatattcctgttcgagatcagagatatcttcttcttctgtttgaaaacaatatgttattagtaaaaattgaatacataattcaaagcagaaatctataaatcacgattattaccatctaaagggatgctttcaaacagatttacttgacagtcatccaaatctttagtcttcttagtttttctttgattatgagattgctgtgatttttcgactgttgcaaattcaggaagattaataacttacgtctgaagtcatataaatattgatagaatacaatcattattattttcgtgatggatgataattgtatacttacggttgggtatgacattttctttgttttgtgcagtatattgaatcctgcttctaagtggctcagctcgtcctcttctatcaggttggtttgatatgtcccctaaaacccttttcttagttctattcgtatttgaattcactttcaatgtatcaagtttagaaacctggttaaacgaatctaacaaaaaaaaaagaacaaaggtttagagtgtaatttcatattagaattaagatgaataaaagcttaaagtcagaaactatataaaacagaaactcacgtttagtagcgtctcttcttatgtcggataagaaggtgtctgaaccaagttgagaataagattggcttattctgatagtctttatatttggatgattttctgttgcaatgtatgctgaaaacaggattgaattatttatgtaagaatgaaaaacaatggtatctacacaaaactcatatacaaaaactcatatatttcagttgctttgaattgacttcataaatgctagtgtagacaaattatgctcacatttgattgtttctgatctgattgaagttagaaagtcgttgctgccaagttctgaagttgactgtttaattggtatatcagataatattgatccatcagtggttaaacattcaagaggctctgcatacattgataagtatcgtttgaacataattcatgggttaaccaataaaaacaaaaaatatcaatgagataaacataccagaagaatttatatattgactccattgagagacattagatggagtcacaggcatagagcataaagaatatggtttttgataagacaatgattgtctaacagaaacaggtgttagatatgagttctcatcaattgagcctgaaaaaataagaaaagacacaaacaaaattgatgaaaatatcaaaagtcaatattgaatagaactatttgttatactcttattcgagagaatgctttacttgtatcagtcactgatagatttttaactaaaggagaaggaaactcttccaaaaccactgaagccattttgtacacataacaaagtagtgaagtcttaactacaggttcatatcaattagcatattgtagaatataacgatatacctgtataagactgtgctacaattttccctgtaggacaaagagactcttctaaaaccacgtggttggatttagttatgtctgtaattaaccgagcaaatatagatttcagtggaacgacaaacccatttctagatgatttagctttgtgttgactatggtaactgtttttgctcgatgaacacttcctcttagcagatggagtgatgtgggtttcacctttatcaaccaatgcacttcttttcttcatcaagctattgtttgttagacgatagaactgtaatttttctaaataatggagtctaaattaagagtcaacgatgagtagtaactatataatcttttgttaagatatcgaattgataagattgcaatcatatattattgttatatagattaccaaatcagaatatcattgttaagtatctattatattctctgcatctaataatgttgttgttgttattttaatttcaggttaatttgtaggctatcatataatcaagatgtcaatctaacgaatgtgggccgattttaaaggttagttcttcatcttcataaaatcttgatttgatgctgtagagaatctagagctattaagtacaactatataacttagacaaatttagattcatttcgcattttatatcaactttggcaattaaattatagaaaataacgtcacaaatgctagggccatgctgttctccacaataaaccaacagagacaactgattccttatctgagagagattcatcaattacgaaaagaatttggaatctttatttgtttagataatgaaagctgataggagtttagtattatatgattttgagaaactaagaagattaaaactcaaaagggaaaccaattatcatttaaggaactgaaacaaatgtggaaacatcaaagaaaaccacttattaaaactaaaaaaactaaaaaccacttattaaaactaaaaaaactaaaaaccacttattaaaactaaaaaaactaagcagaaacaaatgtaacctatcaaactaatcttatgtttactccgtcggcttcacattaactccattaacttcatctgcgtactccctcttctgcttaccattcagagaaatgagcttctcatcaacaactttagcttcattattcttttcaaccatctcctgttttatcttcacaatcttgattgagtcaaggcacagtttcttagttgatgaagaattatcagcaggtgaaatgcaagtttcaccactcctttttgaagatggagttgtagcctcaaaaggctcttcagagtaggttagcatgaggctaccctgagtctataagtcaattgacattagtgagtttttttactaataagtggcatttctttatgaaaaacaaacaatttaaaataatccatacctgatcaattgaatcatctggtatctcttcttctccaagaccatcataagcaagaactctagataccttataagtatcgagtccattccacacattctcattctcaacacaaaccagatactgataagttttgccaatcagattcttgattgaacctgggatgttgtctgggtcttcaatctcttcgaaagatccatcaagcaggttatttgctggacaaccaacaatctcagaagccatagcatcaaagagcatcagcttcatctcaccacttgaatccatcactttaacatgtagcttgtacctatataggtcacaatatttaatccactaaataacaggcaatatcatcttaacatttttcattaaatcaagattatgagacataccttgcaagcacattgtttactgctgctcggcaagtttcacaccagaactgtgctttcaaggaggtcgtgactaccttagtcacttttttattgcacttcttgcaggcaatatagtaccaagaccaatccctgtcaatgtcataaattgtacagaggaccttcaccctaccaacctgagattaaacaattataagcacgattaaaacaatgataagtctaaaccaacttcattagataaaggagcaggatattacatcaaacatctcagagacttctttaatggtctttttagcaaactgaagataaaaattcccagtaggaaactcagccacttccgattttggtttagactcaatgagagtaagagcaagaccatcttttggtaaagcgtctttaaattccagaatctcagggatatcaggattgatcaagatctgagatgtattgaaagcattggagatactcctaacatctacaaaacaaaacaaaagtatccatgtcattatatccgtagaccaaaacatatataaactttgaaacatatgtaagtcttgctatataacctttgtaagtcttgagcttggcaaatctgaccaaacatatgatcatttcaccattagcagtttcacaggcagtgaaaacttgttcagcaaatgaaccccagagagtacatggcaacctttcatccctatgttaatcaaacttaatattttgtattctatttaatattgtgtattctattactcatatccaagtaaacttacgtttgatccctcagttcgaaatcaatcttctttgttggtttattgtggacatcaatagtctccatttctccaacattcacgatctgaccaaccacatctaattcaaaaacgaatcacagctcaaaaaaaagtaatcacgtgaaagtttcttatttaaatggaaacgaaataagaagcaataaacataccaatcaggacgttttggttgagaccaccatttagaacatcattgaaagcagtcaaagagagaaaataagaatctgacaatggatcaattctcacaacacgggtttgagacatgaatcccattttgtaacgatgatcagttgctttgtattgacctgttgcataggtcaatccaaagttttcaatagacctccactctcctggaacaatgagcctctcgaacctgttcaaatgctctctcttaactgaggcatggatcttctttccctttcatttaaaagcacaaaatattagtatagaatagacgttttcatttgggaatatggacaatttatatagaaataacatgaatacttactctcacatctgacagaaccatgtcgaaagtctcaccaaacttcattgtgaacgttttccaggtatgaagaacacggacttgaactctccaagacgttttgtagggcttgatgtcatcaaggtaagcaattgcttgagccattgtttttatttagttgctagtaaatgcggtatttgagtgatggattgtgatgagaatggctttgatatttatagtgagaaaggatgctagggttgttggatctaatatttcaaagatattcgtcagaatcttggagtataagttgcaaatcaaagatgggataatgactaatgattcgaaaatatgggataatgactaatgattcggaaattgtttagttcatgattcgtaaatatgggataatgactaatgattcgaaaattgtttagttcataatgattttgtcattctctaaatcgttgtttttttaatcatttagaaaatatgggataatgactaagcaattctctaaatgatttgctatattcgaatatatagaagattataaaggaatatgcgtgtaacaatgtagatttcgttgagatatagaactcaacgtgttctgccttagattttggtaagattgcagtctttatggtccaccaaaaatgtagattttgctgtgatcgaaagcccattgaacgtaacccacccatctgaataaaacgcggatcctgtttacttaagtttttgtcttggacgattttaccctttaacatgaagaacaaaaaccaaaattgaaatcaaaattgaggataaattagacaaaaattcaatttgtacttctcttttaataataagaggatatttgttttgagaaataatctattttgatagttgtaaagtgggtaaactgaatcgaactatgtttactttttttttttttttgtcgtcattttcattacttcacaactaacttacatgagtccatgatattacatattgcatctttttggatcttgctacttttgcgagatgatcagctacatcattgattgtacgattcactttacttacaacaaaagaagctgaaattgtagcaagtttttgtatgtcctggatataagcggccaaaggggagttagttgtgggacatgccttcttgtccttttgcagatatggcgctacattctgatacaggattgaagcatcgacacaaaatttaacctcttcgtaacccaatctccgtacttgcatcattgccgacctaagggcttccgcttccgcttcaatcgaagagttagttggaggtatagaggccatacctttgagaaccatttgagctttgtcattgtaaaggacccacccaattcctgcacattcagttggggaaacccaagatgcatccacaaagcaacagtatgctttggcttctttcatgatatcttgtacattccccattaatgccccggtcttctgttggtcttgttgagaatttggttggggctgagtcaaatcgatgagcgctttgttgataatatctggtatagaccattttctgttgttgaagataaggtcattgctcattttccagatacgccaaccaatgaaagggaatagacttacatcctttctgtggttttttgtcagactcatcaatttctcaatattctccatataagagtttaagttccaagatgcacctggtatagaaaggttcggtgccagctcccagatttctctgctgattcggcattgaaagagcaaatggtttatgttttccggagcttcaccacatctgaaacaaatgtcatctgaagtcaactttctcctcttgaggttatctgcagtcggtaaagcattatggagtactttccaccaaaagtgtttaatctttggtggagtattaaggttccataatgttgacttttaaattttatgataaatatcttaaattatataaatacgatctaaaagtaactttaaatttaaagtttacatttagatatttgataaacttcatttaataatctttgtcaatgtgtctatataacctaatgtttgttcttgttttgttcttgttttttttt

SEQ ID NO: 38589 - DNA, 4729 bp, Arabidopsis thaliana landsberg
caacctcttacacactagagttcatcctcagtcacgggcaaacaacagttgatgcaattcctctctgtcaaatttctccacctttacagaactaacttcagttgatttgtatcagtagctactgatacaaatcaattggccatctcctcctccaaaagttgcaatagtgggtgctaggggataaaaagaaagaacagaggcatacatcaaaagctagctttatcaaaccacatgcgcaagaggtactcaaaccaatatcagaatcagaaaaacacgcttcatcaacaaggatacactaaagtgtgtccttatcatataagaaggggattcctctttctttttcccaagccttcacttcaaagattagatcttcaatcatggcttagaaaagaagacacaatactatcatgttaagcgtttgatcattacttcaaaaagagagggtaatatggttacgcgtataaagactcaccaggaatttgcatgacgagactactagcacgttctaagtgttcgtactctcctcttacgagttacaagattgaagaggtttccatcctataaagacgatcaagaatatataataagaaatgcttactttaatcaagtcaatcttctcttgatgtatcacaggtcttcacctaccttttcgtagtcacgaagccatctttcttcttccttagcttgcttccaggtttcaactgcatctattatgcctttccttcttaaagcttcagattttgcttcctcatattagcatccaatgcagcaccaatatcagatagagcacgatcacctgacaagataacttatcttttaagcatatctaaattgctgttttttttcttacaaatagaagagttcttcacttaccctcattatcagttagctcaatactgcctgtcgagctcgacaaaatgcctttaactcgtattgcttctgaagtacattcaccttcagggtttccccagttttagttttctttgccactttgtcagccttgtctttattagcaatcctcttcgttttgggagcaccagtggattcctttcttttaccagcatcattagtactcgtcttgggaagatattttgcacaactccatttttgttttttcttagggtgatgaatgacttggcctgaggtgagaaattgagagtgtagagacttttgcctttgtagttatactctgccaaactccatccttttagccaatcatccacaaactctatgggtaaatcatcatgattccttaagtaagctagtttagaagaagtgctcacaacttcttgacccatttgaaactgatgaacatagtaattgacactgccccactttataagagcaccattgcaattaaaatatccaagatgagcatttttagttggataaaagaagacccacgacttgttgctttctccctctagaaattgaaagttgatgaaatctcactcccatggactgcgatcaaatatttcaagatcgtctatccatggaattgcaacatcaactccaaaatctacacttttaaccaaactaatcataagttaaatttcaatttacaatcgtttattaatatagtgattaagtaagttatcaagtattaatttatagagttttatttttgtataaactaaccacgagttaaggaggtgttattggtttatgatttcaaaagagttttagtgacttaaagtatcatgtagaatctgttgttatttaatcaaaaaattttaaaagtatgttaaaagtttgtgttattcattaaagatttgtaaaaagtaatctaaaaatcttcataaattttagattattgaattcatacttttataaagtcagtaaattttttgtgttattctattaaaacaaaaaaatctctaattgtttatgatttaaattattatgttattggttcatgactttctacattttctttcacaaaataaagtcatagaaagtatcatcaaaatagagagattgtttgagaaaatttacaagatagtttaaaaccattcaccaagattataaaaaactctttaacaatagtttagaatttttcatttatttactttctaagatttgaagggattcatcaatttttttttaaattaggaaccaataatactgcttattatcaataaaaataaataaaaagcgtttgtttgacgtgttctaagcaaaatcagtgtattattaggtatttacccttacaatattatgttagttatcggtctattaatggtattataagctggtgaatatcagagttattaatctttttttttttttttatctttcgtttctgcttgacgtttcctaaaaaggttgattaccaagttagtgcgatctcaaagagttttaatgtccggcttcaggtttttttttttggcaaagaaattaatttcattaaggccattaaggcaactcaacaaaattacgaagagcttgtttcgctaaggcatcagcctcacgattttcctctcttggaatgaaaataaaacagattttactgaaactgaagatggatgaagaatatcattaagaatcccatggagtccggcatcaggtttctctaccccatatttgaggattaatacatatcacactctatgtaatgggttttctaagcccatttcaactcccatttactatgatattgttctctttgggtctacatgctcaaacccgcaaggatttgttattgggatccttcccaaaagatctcttactagttggagttggacttggcttatatattagaaacttattttctaaacttcagatgtgggacgttggtttgtacccaacaatctccccttcaaaccaaggaccacgaacatgggcgtccttcttgaggcacattcttatcgtgtcatgtttgagagattttcccacaccgatcatagcccaagccctaagtccactttttcaacctaggctctgataccatttaatgggctttctaagcccattccaacttccatttagtatgatattgtcctctttaggcttatatcctcaagcccgcaaggatttgttattgtggtttctttccaaaatacctcatactagttgtagttggacttggcttatataatagaaactctttttctaaactttcgatgtgggacctttgctttgtactcaacagtccgatcttccacatgatttggtggaggagattctctctaggcttccgttgatatctttaaaagcaatgcgatctacttgcaaaacctggaacgttctatccaaacatcggagctttgcaaataagcacatcggcaatgtaaccgcatcagggaaaagagatttgataatgattaaagattgtaaggtttattcaattggcgtcaatctccatggtattcagaacaacaacaacattattgatctatctataaagaataaaggtattcttcacctagaaaatttagatctaatattcaaggaaatattcaatgtctttcactgcaacggtttattgttgttatacggaagcatcactgatgatagtattaggcttgtggtttgtaacccgtattgggggaaacgtgaatgggtcaaacgcataaataattttgcaagttttgacaaacttgctttcggatacgacaaatcttgtggttgccacaaaatcttaagggttttcgatagttaccctaatagacttgaaatctacaatttgaggtctaattcacggatggtttctagtttccctcttaaatgggatatagcgtttatgcaagatggcgtgtctttgaagggaaatacttactggtatgctaaagatagaagatcagaagattgttatttaatatgctttgattttactagagagagattcggaccgcgtctgcctctacctcaacccttcatcgatgaatttttggggagtctatatgtggtaagagaagagaagcttgcggtgttagtaaagcggtggcggcgtggcaaatctgagatcgatatttgggttacgaacaagattgagcccgatgaagtgtcgtggagcaagttcttaaaagttgaaatgaaactacgtgttctgtcttggaatttcttgattgacaaggaaaagaaattcgcagttgtttttgataaagacaaggcaaaggggtttaaaaccaattacgacatagcttacgtcattggagaaaatggttattacagaagagtggatctccgtgaatctccaaacaaaccactttgccgtattgtgtcttgttatgttccaagttgtgtgcaaatcgagtaaaccaggtttagtcctttttacattttcgttttgctttcaacttctttgaattgttttctcattctcttttatccaatctgataatgaattaagttatttaatatttttactattttgggttgcaatcgaattctcaacatggttcttaatttacctttgttaactcattgcttaataacctatagactgtaaaaaatgcttagaaacagagttgattcaagcaggagacattgctcatgagtcttgacatatacacacaacacagactttagttttacagtataatacaattctcagtgttattctgttaaacctagtgatcttcatggtgtgatcaaactataagcaagagtgtgaaacagagaagcgaacacgcaacgcaatcgatcttacccctgcagctatacacaagtgacataattaccaaaacgataacaaatcagctcctcatcattgcttcacgcacataac

SEQ ID NO: 38590 - DNA, 3118 bp, Arabidopsis thaliana landsberg
aatatcactcacggagacagattttgcttcggtgtggagaaatctagcgccagagtttttacagtctatgaaaaatgacaccgcatcgtgttcaagattctctgttttgacgagacgacccgcgaaagggaagtagatctccaaggcgagcgagagagagtcttttagtcgagagatgatgagatggaaatctgagtcgggtttggagaagagaagacctctctgaggataatcgtattgaagaagacttagatcaaatggagtaagatggatcttagttcgaccagattggctgctgtttactggccgaacaatgctcgaggagactaaaactacccctcctcctgccatttttggtgttccaagtgaagttgtgaaggaaaaacgaccaatctaaaatagtagtgcccactgcccaccacatgccaaaaagcagaaggaaaatcctatccaattatgtccgtaaggatttaaatattttgtcttcattctttcattgtcaatctatcactttacgacatatatttcgtaatatcgtaatgataaaaaaaaacttagcttctaaatacattaaaatttactatgaatatatatgtacaaaaactcacgatcaaaattactatgaattcatcggagaggcttctcgttaaaataactaggactaaggaacaagatttcgaaaatctttaaagaaaaaaatatcaaactaaaactacctctcctcctgccatttttggtgttctcatgtgaagtcacctttgatccacttcacttgggacccgaacgaacctcttccgttacatatatatgacaattgaacttactcaagacttcgtaacaagatattaacctttaactagcttggtgttattatgatcgaaatattaaaaactcgttacattaatagtctaatattctggtgttcaccaaacaaatgatagatattaataagaaaatactaaattaagaataatgtacagtatgtttgacttgtgggattaaattttaatacaatgacgaaacagaggaatctttccgtaaccacgtagtcatataacacaagcccaagcattccgcgtacgatagctacagccaccattgtaagaaattttattattatttttcagtctattttcccaccaaatcatcattgagattttccgggtcaggtgtcttgtccaagtcaacaagctctaataacccgccgccaaagtcacgcttttgactaaaaacgcggcggcgtttgttgttctgcaccacggtcgcccctatcgcatctacttgagctcccacgtccgtagcctttttcctgatcgttgccgctgacatatcctcggcggaggtacacggcagaagctccgggaagttgagcgtacgagttggtcctctgaggtaaaagacagccgtgtcgtatgcacgcgccgccgcttcgggagtagagtaagagccgagccaaagtcttgaacgcttgttgggttctcgaatctccgcaacccatttcccccattttctcattctgatccctttgaatggtctttctctcttcattttgactgccacgtcagcttttactgctactccggcgtccatggcggctcggaagttgagtctcttactttccgagaggaggactttagaattgtgtttggggaaattatctggtttcttgatcaagggactctcttatatatgtgaagagagaaagagaccgaggttgcagttgtaggtagaggagaaaattccaaaagtccatgccgacttcgaattatagttggaaacttgaaatttttgcagccattttgtgaaataaatcatatagttaggacttatttacaataactatcactggattttaatgtttgtttttgataattagaaaaaaaatcttcgaattaaatatttgacatttaacaatcttccttaaatctctccacattaactacacgattagttactaaaataaaacttccaaaatatttaatatcatttatttactacaaaattatcatttttgatatatttttctccatgactataacaattcaattataatcatcaaaccgcagagatatttgatagcatttaattactacaaaattacaaaatatttagacaataattcataaacatatcataaataagatcaaaattaatgaaataaatagttttttttacggtacgggttggcgggacgggtttggcaggacgttacttaataacaattgtaaactataaaataaaatattttataaataaatataatttgcaaactttaatatatactaactttaaaaaataaattgttcccgcggtttaccgcgggttaaaatctagtcatattataattttcgaagtctttctcatcaaaattaaggatgtccagtcaagaaaatagtaaggtaaggtgatatgccaattaatgtttgcaccgttcgtttttgcgtttatgttgtatatgcgtgtgaggaaatgtagtggactctacaatcacttagtcgttatgaatcatcaatgtttaggaaatgaaagtagaatactatggaagattaagtcttcatgctccatgaaatcacataaagtaggtcttttaattcaaaggtttcttaagaaatttagtcagaagtgctcgttcgtgaagaatgtgtgcgttctcacttattcaaaccttcacacatgtatattagcatatatgtgtatatatgttgagtaggtgatcaataggtgcttgtagacgcagacatgcatattgcatgcaaatggtggggtaaaatgggcatgcgtggtctgtcgatatatatatatatgtatatatgaaattgatatagatatatatatataagaatcaaaaataaaagtgagtcatttggaaataagtgagtgcagataacatatatgaaaatgtcggctcttcgtaggacaaaaactccagttccactgtggtgtactcttgtcgctcactacctctcttcccttctctagaacggtagaatatcgttacatatgcaacatcatattcatatctatattatatacgatcattacactttagcatatatatcagctggttagtgaagatgctcgtttcacccggtgtcgggaactttactagtcgattttg

SEQ ID NO: 38591 - DNA, 1922 bp, Arabidopsis thaliana landsberg
agtttattttatacgtttaggtaataatgaaggtatatagtgatttaacaccaagacattcaaaagtaagcatatcttagcttaaggttacgttcagacaaaaacttaaccaggatcccataatataaagccgaactaataacaaaaagagttgcacattctatcacaccaaagagcttaaaatctttcttcttctatcagagaagggtaaccctctgaccgcagcataaactcatcagtgaaggtttcttcagatccggtttggtcctcagaagcattcctcgtcgaaggttgtcttcgtaccaaagcttcttagcaacgttgtacttgggtccaacagggtatgaagctatctcagccacgtcaacagaaatcttaccagtcttcttttgcagcgccttctctgcttcgttggaagaattaaactccacaaagccacagcccacaggctcacccatgtggtctacaataatttgaatatgaacaatttctccaacatcactgaagaaattgatgatagttggtactattagacgacagttgtaagggagattggcgacaaaaactgtattttttcttccagcaacttcctcaagaaaatcaggagtttcatcaagtccttccactccctcaacttctttaatgagaaggctctctcttcgaaggtagtcttcgtaccaaaccttgtgatctaggcaaaacttgggtggacggtgtggacctgtcttagctccgtcaagagaaatcttgtaattgtgcaaatattcaccgttctttaccagcgccttctctgcttcgttagcagaagcaaactcaacaaaaccccagcccgcatgcttgccctggctgtttacaataagtcgaacatgaacaacttctccaacatctttgaagaaattgatgatatctgatatctgaatggagtcacggagattggcaacaaagagcgtttttgttatggcagcttcctcagcaaaaccaggagattcatgtcctttcatcaacagaatcttatgattgtgcagatattcaccattcttctcttccagagccttgtttgctccgtaagcagaagcaaactcaacaaatccatagcccacatgcttaccctcgtggtttacaacaagtcgaacgctaacgacttgtgcaacaccatttaagaaacctttgatatgtgctattttagtttggggagagagattggaaacaatgactacttcgtcaacaaaatcaggaggtgtctcatcttcttcgatgagaaggctatctagttgaaaggagtcttggttccaaaccatgtgctcgatgcaaaacttgattggccggtatggacttgtctgagcaactttaagagaaatctcttgatcgtgcaaaacttcaccattcctcttttccagtgccttgtttgcctcactagcagaagaaaactcaacaaagccagaacgcaacagcttccccttgtggcttaaggcaaattcgaacattaacaacttctccaacatcactgaagaaatcgatgatatctgaaatttttgtttgcctagagagcccggatacaaagagcgttacggaaacagccttcgctgagattagattatcttgttgctcaagactacaagcaaatccttccgttgtctccttctcctcagacgtttccttatgtttcctgagaaacggtttggtctccaaatcatcttccggctttcgcttacccaagcgaacaaatttggcggccgattccttgctagaactctccatggagaagaagatgaaaacggcgacggcttattttccggggagctagggtttgttcaaagttaaagtttaaatactctttttgtaataaaaaataatatttggttagcaagatttatgtaattctcaattttttttttcttccaaagaaatccatgaaaccaatt

SEQ ID NO: 38592 - DNA, 3793 bp, Arabidopsis thaliana landsberg
taacgttttcgagtagaattcgatcatattgcagcacagaactctcaacttggacattgatttcatctggtttatctcgtgttggggctctgagtccccgctttcaaacttcacctccagcttgttcttaattgtttgcttgagggcaagcaaagactaagtttgggggagttgataagtgtgtattttgcatgttttgagcatccatttgtcatcactttagcatcatataatcactgttttataccatttctcatcatttgtcatcactttgcatgtttaggatatgcttgcatgcatgttgcatatttgtgttgatttaggtgatttggagcagttgacgagctaactggaagaagcggacctgatcatgtcaaaccactcgacccagaggtcgagtaggagcttcaagacctcaagagaccactcgacccccaggtcgagtaggggacatcaccacttcacttcaccactcgaacacgaggtcgagtgccctcgtctccatcactcgatcacttcactcgaccatgaagtcgagtgtcttcaccttcactgccagaccactactcgaccacatcactctgcctagaggtcgagtacctccatcacaccactcgactgcatactcgatgacaagcttcagagccttcttcattccgcactcaaccagacactcgagcacaaggaggaaaagaagactccagctattcactcgacctctcactcgaccacctgggtcgagtacagttcttaacccgtccaaatacttcgtcgttttgagtattagggtttcgggatatttagctataagtagcatgtacttctcattttcgcaaacaagaagtttttacctagtttttatttccgcagaccttgtgctctagactttttgtaatccggatttctctttatctattcagtattcagctttggttcttgattttcgtttactgttgttcattctgttatcactctactgttacactgttgttatcatgtcttcaacctgttcaacgtttatgctttctgttatgatgtctgagtagtgaataggtttctgaggatgggttagagtagtgtagaattctcagtatgctaggtgattgagtattgattgatagatcccttctagattagttgttcttaatgcctattgctttctgatcaactggaatttgagcccagacatttccgcgcccaaaaggtgttcgatgaaatgtctgaaccactaattccagagattcgtgacctgtaccaaggtattggttgcagggagcgttttggctttaacttgttgattcgtaatgcctgttaggttagctctcgtcaatggtgattgagtctgggactaggttagcttgaaagtctctgttgcggtggcacttagatttggttaatgaactcgtggtctagggttaatttattgaggatgtcaatcacctgtaaactgaggaaacgaaactactcaattatcccatccttaggaattctttatctgattaattttattgtttactctactgttgtgtattgcatcctgtcatctgttgcttagtttctgcaattctttactgttactcgacctgatactcgaccaccccgttgtctggcaacagactgtgcagtcgagtatccctgtttcattttctgtctgttactcaacctgtcactcgacctcacccagtgctctgcaaagagctgtgttggtcgagtgttttactgtttctgtttaattttctgttttctgcatgttcacttaggactgctagaacacaccaaaacctgttatgcttggcttgacttagtgacttctgatcacatcttgattgttagcatcacacccatttggattgacacttaaaatactacaacgacttgactaacagcatcgtctttaacactcatagacgcagtggagcccatttcactatcaattgatttgattttttcctaatttcaaatatttgatgtcaactaggagaatctaaaagattataaagctaaaatttgaaagcttacaatagtctcttcaaactctggtctcaaaggtctcccatctgcatgtgtgtgtcctgctacccaaaccttactcctagtcacctttgaggggtctgaactcttgttcttctacaattaaaagaattgaatgtggtgtatctgagactttatctcttacttcctatgattaaaaccatttagttaaagcattaccatctcctgagctagtcgtatcattcctttgcggcttgtggtgtggggtatctgagacttccgcatgcgtttgtatttatcactttgctcctacaaaataaagatactattgaatttctaatcatcacaattaaatatgtacttctcattgaaaaagtgagtctacatcaccttaaaactgctactagtcctactcttcacccaattgttccaaactatcacagagggaatgttgcttggtttcagctgaactaagtctgtctttgtcttagcaactctcactttcgccagaaggttggatttagaagccctaaacaaacaacccatatgtttgaaaatttctcttctttgccattcttggtccacattgaacctcccctacattagtatacaaatgtatagaaaatcactattctttacttaattagtttttcaagtaaatgtaataagatgatcaatacacttacctgaatttcctcgcatagtgtgtcccttattatatcatctagctgcctccaatcatccagaataatagggacgtactctctcacaagtgctccaagaaatgatgaaagtttaactgaaccagatcccacaaattctcccaattctgtaaattcgacatcaactttgtcttgtgcacttttggccactcttcgcagctttgtgggtcctcttagtctgtttttcttggtcactgacacttgtgttgatgtttcagcagtcgcagttttaagcctttcagtggaaggctggccaaaatcttcttcttgagcaggaggctccaaatcttcttcaatagggtctgttctctcaacttcttggtcatcagcttcttcatttttatccaatgaatcagcaccacgagaagcttgggttacttcctcaaactctacttgaactccatcttcatcattaaaagtcgtctccttgctgctttcttctatcacaggaataagcacttccttttgttgcttctttttcttcttcaaggatgatatgacaggactcgcatctagtcctttttgacgcttactacggcgtgggttcagttcacctttcttagccatttcagataacctgaaaaaccatcaaatctccaaagttaaacatgtattcttaacaataaatcatacattaatccactactgtaaccccttcacaatctgccctagcacaaaaactgtcatcatcagattgatttcctgaatcatcaattggttggaatgaaaatggtgcactattaaactcctcttcagtctctaactcatgataacctcttggtggcgctctcattaccacataccactgactcaaatcatcctctctagagtaaaacacttgtctcgcttgggatggcataatgtaaggatcttttacaaatgctgcttggctcaagtggaggttcacaagcgtgaatccttcttcttctctcacaccatgacctttatgggcccaattgcacttgaaaataggtatttggaacatatggtagtcaagcaataaaatctaaattatgactccataatatgtaactatgtcagcttggtgcctactatgacgtgcacttgaactgcgcata

SEQ ID NO: 38593 - DNA, 17537 bp, Arabidopsis thaliana landsberg
ctgatgagtcgcttccaaagtataccaaatctgatctgtctaaaggatcgcatggatttgttttagttttagcaatatttctaattattataaagaatttaatcaccactagctagtcattgtttaatgtgcctctcctcaatcattctcaataattggaaaatctacagggaatgaaatttacatatctaaatctttagagatccaccagagaaaactcatggagatgaccgaagcttccaaacatacaacaacacatggtaacttcactgtcttaacttctgtaaaaattgtttctattcttattgtcttcttaaaaataaaaaataaaaactgagaattccaaattttctttaaccaacagaagaatcagaacatgttcagaatcctgaaccagaccaagtcttgagccaaagacaactgttgcagctaaatcaaaagaaatggtggatctctgttctaatatgtcttttcttagtcctgcttggagattctcttgtcatacttctcttgaacttcttctatgttcaagaccgtcgagaagataataaccaagatctacaatacaaaggaacatggatgcaagctctgatccaaaacgctgcttttccaatcctcatccctctcttcttcattttcccttcaccaaaaccaaaccctgaaaccatcaatactcgcttcctctccattcgtctcatcttgctttacttctcccttggtgttcttgttgctgctcacagcaaattgtatgcacttgggaagttatactcaagctatggcttcttcatgctgatttcagggtcccagttgatctttaccttgattttcacagctatcattaaccgtttcaagtttactagatggatcatcatatcgatagttctcactcttgtgagctatgcttttggtggtcctgtattttcaggagagcctgatgaaaatgaacatttctacggcatccaagcttggttaactttcgctgcttcagttgctttcgcattatctctctgtttattccaacttagtttcgagaaactgttggtgaagacaaagagatatggtaacaagaaagtgtttagaatggtcatagagatgcaaatttgtgtctcttttgtcgcaacggtcgtttgtctcgtgggtttgtttgcgagtggtgagaataaggaactgcaaggcgatacaccaggtttaagaaaggagaaacgtattacgttttgagtttgatcgggttggcattgtcgtggcaggtttgggcggtcgggctgatgggtttggtgctttatgtttcgggtgtgtttggcgatgttgttcatatgtgtgcttcaccggttgtggctctgctagatgtgttggcatttgatttcatggacgatgagtttggttgggggagaattggtgctttgctaggggcggtcttggctctagcttcttacttctactccctgcacacaaaaaagaagaaggagatcgcagaactgaacaagagagagaacaacaacagtgaagcttagtctctctataatatacatagatgatactcttattactttatgtgtcttgcagatacaaatactgtgcttgtcctgcaagtgtcctttattgactcagaagttgtatacatccaaatgagagactaaaaatacatccgtgatgatatcgtatatatctatctcaataacagctacaaataatcccctcgcagataatcgaatctacgaggtttttgtatggatgagtttgaattttctgtaacatgtgcgtaaaacttttctcacataacccattcctcaaatcggccaagttgttttgaagaattcttcttccagaagggcttgatcgcagtgaaattaccagttttctgtcagaaaagaaatagcttcatcagtcaacaaaacatagaagtaggcatcgtgatcagtatgcatatatccacagctaaaataccttaaggcaaagacttctggttgtatcacaaacagggtaatcatgtggacaacaatgacgaccatccttgcaacacacagcggattctatctcgcagcatttccatgagaagcataaaccaaacaattctcttgcacagcaacaagtctctccagatgaacaatacgtgaaaaggttgcattttgtagggccaggaggggacggtggaggcgggtttggatgtgtcttgatgggatatgaagcaagcatgttgattccgcaaacgccgtctgaatttccagtgttacgctgcatgtgcataaacccatccattccccaactttttccccatgagtttttcacaatccaataatcaacaccattctgtgaaccatatcctactatgagcacagcatgatccaatgatgtcgaacacgagccagagaatattccctgcatcaaaaggtaaaatttctaaacaatgagacgttgaacattcagaaaatagagtaggttgatcactaatcttacaacttacactagaatatagctgaaacgctctctcgcttccacagatgccaacactaactggctgagccgctacagcctccattaacgctttctcatcatttgattttacgccagcatagctatcaattgtcacaaccttttgtttcaactgcagaacaaaagagacttgtgtacgttagtgatgtcaaagatcaaggaaacaaacagggaagagaacttaaaacaaggagaaacagctaaacagataccttatccttcttacaggtgccatcacgttcttgataaggatagtctttctctgtgtctattccatggtttttaatgacaaattcaaaagcatagtccatgagaccaccattacagccagcattgtaggacttgtcacaatcaatcagttcctgctcagagaggctgatgagatctcctgttactatctggttgattccctccatagctccagtcgccgagaacgaccaacatgcccctataatcatcacccactcaaatgatcaatatggattcatctgagaacaaatttactatttctgaccaaattcctacatttgcctactctatcaaacaataactttcataaaagatagcacaatgataattgcttctagactttcctaaaaagttcaatcactatattactctcggccataaggccataattaaatatgagaaaaagaaaggcaaacttattatactcctaatacgtacaaaaagcgtgaaagagatgcaaaattagattactgtgacaaactacgtcatgattggtcttcctgtaacatacattaaccacagaagatgaatctgcatcctcaaagattctaaattttaagactttctccgatctaaatccaatcttaaagttctgattctaaagtcttgatcttgaatcacatcctaagtcgcagaactaaaaactccaatcaaatctgaaattttgatgaagaagaaagttaaatcaaataccgcagcttccttgatctttgacattagtaacagctcccttctttctccaatcaacagaatctggaacctttacgctaccaccgagactctgtcccttactagccattatcaccgacggagcggaaacagagagaccaagacgagaagctttgaactcgtggtgagtcagatccgcgaaggcattgagagatagagaataagtagcgttagtgatgagattgtgttgggtaacgaagtcgttattatctttaaagatttgaatcctctgttgcctctcttcttctgaattgtacgttttgccatgtttctggcaccagtcgtcgaatagctcggagatgtcatcggaagatgacgataaagaaacgagaagaaggaagaagaaagtgagagagacaaaggaggacgatgagattgacatttctgtaatttttgtttgttagaatcgtggagatagttttggcctagaaataaggaatagcctggagatttgttttttcccatttcttttgagatttagccaataagattacaaaacgctggttttacgttggcgtttttaacaaaaagcgtttggcgttgaaaaattaccgaacaaaatgattcaggcagaagaagtgaaccacgtgtgtaaataggagggatgtagctagaattatccacaactttgccaccagaaaatttgaaattgctaaatttaattatacatactgtgaaatatgcattacaaacataatgtaatgttaataagtacgttcattatcttttattttttctcataagtattgtactttatctaaaactggtgttgcaaaatatacaacagtggaaacttccacttacattttgacatccatcttcacaacattaagcttttaaacacatgcccaaattaatgaaagcccaccagagaaaactaattcctgtaaggaagtaatagtcgtcgacaaagttgagacccgaggacagatgacgcataagtcgtcgccgttcatcgacgatttgataagcaacgaaaggcacctccaaaaccaccggaaaccgccagaacttcaagcacagaagtccatcggtttttaattagagaaacccataatcttcagcatcaaatctgcaatcttccccaggcaattgtttctcaaaatctgaaggacatcaacatagagagtaaaccaactgaactttcaacaacacccacacggcaaagcaaccatgttggcaaaagaaatagattttccggagagaacgaagagagacgataacagagacaactttaacaagcctacatcgtcaatcatatagattttgcattagaaactctcccaatctgaatctcgaaaaccaaaagcttgttaaccatgaagattattcataaaaaacaacaactatatcggataaaagaaactgaaagcaaagcggcaaggaagcgccaaaagcaaaccaatcatcgtcactatgtgagccgaacgatattggacgaaagccgatctaacaccacaataaagtcattggttgtcataagacaacccaactaatcgagatcttaaaatcggacggcaaaagaccaaaacggtaaactgcaactgctagaataagtaaaaaaacaaacataaactaaagaagatcaacgttggtgctataggagccaccaaacgttaatctccgaccaaaaaacagcgaagacttgagagctacttgaggagagagaagggagaaaacttcagaggaggttttcacgtctatgtgcgtcgccttagctttccgcttttataattaaatctagaggatatgcataaacttagaaaagaattaagaatctatctatgaactagaaaaacatgtcggagagatggaaaaaatgacatatataacctctattcgctgattctaaagcttcaacattttatattgagatggagttacgtagaaggtaaagtttaaacatttatgttctaatatcaactaatttactctagtatcactatttttttattttcacacattaatttttttcttatcacaccacccttgacgagtttttggaggacttttatttcttagataacgcttttgtatggcgagcaatcaagcaaattgtagaaggtataaagcaaatccatgaagcaaaaaatcatgcatcgggacattaatccgctaaacatttttcgggatgcccataagaatatgaaattatcagacttcagattgggtataatctttaacttatttatcttaagttttatccatttcagattttggttccacaataagacaatcatgttaaaaaaaaaaactttttaggcaagtttaaaaaaaaaaaacttttggcgatgctactattagcaaagatgttggttcctataatgaacgaggaacaaactttgataaagctccggaaattctagataaatcggatatgattgatgaaaaagcttgtccttgtgtatactattttacattatggttatactatatacattaagtttactcggttctcttaagtgatgtatttgtattgcaggccaacatttacggtttcagcattgtattctttgagttttggcaccgttttaggtccagcatggagaggattaaaaccttagaggctcttacactgagaagtgaattaccctcgaatgggaaaaagatcatcatgttcaggctgagctgtgatatgtctataatttgcatgttttcagtgtctattcatcatcactttgagtctagtttcgtatcattcatcactgttttatattatttctcatcattcttgcacactttgcatgattaggatagctttgcatacatattgcatttctgagttgttttcaggtgatttggagctgtttgcgagcaaattggaagaaacgagccagaaccagaagacatactcgaccccaggccgagtgactttggagccattcttcccgtccactcgaccaccaggtcgagtaacctcagctcaggccactggacgacgttactcgaccccctggtcgagtgccgtttcgccacgccacctgaccacactcgaccattcactctaccaagttactcgaccccctggtagagtaccatctctcatcaccatcactcgaccggacactcgatcacgtcttcacagtctactcaaatccgcactcaaccagacaagctgagcacaaggaagaaaagaggagaagacaaagtgtttggaagcggcctgaacctccatcggatcacgaagcccatctcggcccattatctttctatgggccaggcgattaggtgattgacccgtttactatcattttatttcgttttgtataaatagatgtcttagggttctgtcctgagacatctagtcgacattgcgtttttgcttcagttttgttttttgttttactctgctgcgccgcttttgcttctgcaacctgtaattcgagatttttctaagttattcagattccgcatttgatttcatctgtcatcttgtttctctactctttatctctttacttagacaatattatcatttatctgcgtttatgtctttcagcatgttgtctgagtagtgacttagaattcttagggatgggatagagtagttgtggaatctgtagtctgtagaatggttaagttttagaattgattgaatcccttcaggactagttgtgtttactgcttatttctttctgatcaacttgaatttgatcccaagcattcccgcacccagaaggtgttcgatggaatgtttgatccactagttcctgagatattcgtctctatcccaagggattggccgtttagagcgtttattgactttatcagtctgttcttattgcctgcatagttagattccgttaatgggaattagtctgggctagctttgcttgaggatttctatcacgggactgaattgatctgttgttgaacctgttgtctagggatagcttgattgcgcttgttaaccattcggataggctaggataccactctattcgattaccccatccttaggaatttctcgtctatattatttctctgttttatcgttatcgcttaatcgttctcattgcctgtttcttagtttttacaattactcgaccaacttactcgaccacacccaatgtctggcaacagactgtgcagtcgagtacaattgtcttatttcctgtctattactcgaccacacccagtgtctagcaacagactgtgcagtcgagtatatatgtttcatatcctgcctgttactcgaccacatcctacttctggcattagcctgttgtggtcgagtgattttagtaattttgttattgtttctgttttctgcatgttcacttaggactgttagaaaccccaaaacttttattgcttggcttgacttattgacttctgatcacatctcatttgtttgcatcacactcatttggattgacacctaaaatactacaatggcatgattggtgttttgggagaattgactaaaatcctattatcaaagctaatgatgctggatgtgctaaaaatgaaacattgttatggaaaaaccatactgagcagtttgcacaatggcttaaaataaaggtttccagctgcagcttgtcttcttgattatttgttatacagcttgttaaattatattgactgattaccttgttaccttcatgctaatgattagattgttagcttattgcttagcttgatgactgattttcgtggcacagattgttagcttcatgatcatgttttgcttaatgactggttagcttattgcttagcttgatgacactttttcctggcacagattgttagcttcatgatcatgttttgcttaatgacttgttagcttattgcttagcttcataatcattttagtacttcagcttcatgatcaagttctgaatttactgtggtagattaattcagactcaacaaatcattctaaggagacaaggtggttggcatttggatcaagaaatgttgccttagcacataaatgatttatcgttaatgggaaacggtttcatatagatgctattaagcggaagacacaaaacagtggagtaacttatgaagcatttagcatgtgtatatcaagtgctcgagatatgagacaagtcgctgatatgcttacatattatggagtgataaaggagattttacttatggactatcacatgttcaaagtgccgctgttcagatgcaattgggctaacacagggaatggtgtaaaggaggaagatggtttcacccttattaaccttcatatgaaccaaacaacctatttgaaagatccattcattctaccttctcaagcaaaacaggttttctattttagggaagatgatgattaaaattggtatgttgttatgagagtaccacctagaggctatcatgagttggaaacagaagaggatttaggtggtgcacctttgcctgtccaagaagtcgatgatttggatgatgaagctattgatgatgatagtgtttatgttaggaatgattgtgaagacttgttagttgtagattgatatataggtttttgtggtttttgtaaataatgaaatttattatggttttttaaacatttaaatatttatatattaattttaattggttttttacatttaattgattgaaataaaaattatattataaataaaaaatgatttgtaataattttaataaataaattttgaataatttaaaaacaaactaataacacgaaatatttgttatctttgatataggtaaaaatcaaactaatgagttttaataacatttgaatcacattactaaaaatattaaaaatttgcagaacagaaagcgctatcgttgtaaaaataactatagcacaacaagaatccgctattaaatgtgtccgacctacgataatgggcgatgtcagagcggctaaggaaacgctattatacaaaactcatagcgtttaacgcccgctattaataaccaaaatacttacaaggctatctcatcataatccccaatgcatatgcgataatcttatatgagacatcctacactcaatcctaaatgtgatgcaatatatgaacactctgtttttgtggaatacattttcagaatttttttcaatttttttgggtttttatatgccttagatgaaggtaagactcaaatgatgcaaataagactcactagcaaacatgtttaatacttcttgaatcctcccccaaacttaaactacacaatcccttgtgtagtagaagtctaaagaagagtttaagagacactaaaagaatacctcaattcaagaaggagaggagttggtcgtcaatagctgcatgtgattgctcccagtccattgaagaaactccctgttctgtctcagctccgccctgtgggtactcgacctcatcgacttcgtggcggccagcaacgcggtcgagtgtattccggatatagagaagtcgtgacttgcatcaacttcttgagccgctgcccattgactgtgaagtctccattcttcccagctagagtgataacaccataaggtcggactacagtaacagagaatggaccagaccatctggatttgagcttgcctggaaaaagcctcaggcgagagttgaacagcagcagttgatcaccaaccctaaaatctcttgaaattatatttttgtcatgaaaagactttgttcgctccttgtagattttggaattctcataagcttctaagcgaatcttgttgagatcgtttagttggatcaaccgcttctcctcagcggttttaatatcgaagttccagagtttagttgcccacatggctttatactcgagatcaacatgtaggtgacaggattttccatagagaagggtgaaaggagttgtgccaataggggtcttaaaagctgttatgtaagcccatagtgcgttatcgagctttgtagaccaatctttctttgtaatccccacagttttttagaattgtttttaccttcctgtcggagatttccccatgcccgcttgtttgtggatgataaggagtggctaccttgtgctctaatccatgcttcttcaaaagattttcaaaaaccttgttgatgaaatgtttccctccttcactgattccaactctcgggactccaaatctcgggaatataacggtcttaaacaacttcagcacaactctagcatcattggtgggactggctatcgcttccacccactttgacacatagtctactgctaccagtatgtacttgtttccataacaagatggaaatggacccatgaaatcaattccccaaacgtcaaaaatatcaacttccaagatcggattttgaggcatctcattccttctgctgatgttcccctttctctgacataaatcacattttgagataaattcctgagcatccttaaacattgtcggccaccataaacctgcttacaggatttttgacactgttttgaaagttgcaaagtggccaccataggcagatccatggcaatgcagtaggatgccttcagtttcgtcttctgagacgcatcgcctatagatcttatctttaagagtgtgcagagatagggtttgtcccagtaaaaatggttaatgtccttgaagaacttcttcttcacatagcccgacagactcggagggtcctcaccaccaaccaagtaattgaagtgatcagcataccacggaagcttgttctctactgcacaaacttgatcgagtgattttttagtttgagtcctcttgttaagttgttgaatcgctattagctgttcttctagcatggagtcgtcaatgggtacctcgtcttcaattctcatcctagaaagatggttagctacaccattttcaatccccttcttatcaacaatctccatgtcaaactcttggagcaataagatccatctcaacagcctgggtttggtatccttcttcgcatatatatgcctcaaagcaacatgatcagtgtatactgtcaccttagaacccaccaagtagcttctaaatttctcgaatgcgaataccacaaacagtaattccttctcagtggtggcatacctcacttgtgtatcatccatagtcctgctggcataatagatgacatgtagcttcttatcaatcttctgcccaagtactgctcctacagcgtagtctgaagcatcacacatgatgtcaaatggatagccccagttaggagctcggactattggagcagagaccaaagcttccttgattgtcttaaaagctgttagacattcttcatcaaatatgaattttgcctctttgcacagtagtctagtgagtggtcttgctattttggagaagtccttgatgaatcttctataaaacccggcatggcccaagaaaacttcttattcccttaaccgaatttggcggtgctagattggtcatcacatcaatcttagctctatcaacctctatacccttctcgaagatcttgtgacccaatactatcccatctctaaccatgaagtggcacttctcccaatttaacacaaggttagtctcctcacaacgtttcaagaccctacacaaattagaaagacaagaggcaaaagagtctccatagacggagaagtcatccattaaaacttcaaccacattttcaattagatccgagaatatagacatcatgcatctttgaaatgtagcgggagcattacacaaaccaaatggcattctcctatatgcaaatgtaccataagggcatgtgaaagttgttttctcttggtcatttggatgaatcggaatttgaaagaatcccgaatatccatctagaaaacaatagtgggtgtgattggctaacctctctagcatttgatcaataaacggtaaaggaaaatgatctttcctagaagcggcattcaattttcgataatctatacacatcctatgccccgttattgttctagttgggatcaactcatcaatatcattctttacaaccgtgactccacccttctttgggaccacatgaaccggagaaacccatgtgctatccgagatcgggtaaattattcccgcatctaagagtttgaggatctcttcccgtaccacatttctaaggttaggatttaaccgcctttgatgttcaacggaagtcattgactcattctcaagatggatcctaagcacacaaagagtttccgaaattcctttaatatcactaagagaataaccaatagcttttctatactttttcaattcctctattagggtggagacctctaaatcactaagctcgtcattaattataaccggataagtagagtttggtccaagaaatgcgtaccttagccccttgggaagaggttttagttccacctctggagtcctagaatttactctattctccatctatgctagacttaccattgctagtttcctccttgtttgtcacctcttcaatctcaacaacattaacctcatgactaacttctttcaactcaaggaaggttccatcttcattagaagacttgtgagaatcaagtatcttctcatacccctcactatcactttcaagtaacccaaactctccttgttttatagtcaaagtactatgaagtggatcctccattgctagctcttccaaaagctcatccactaaagcttccatctcttcgatataaaattcttggtttttcaatggtaggtttcttcatcacttttttaatatcaaaggttaatacctccttacccaagttcaaattaatctttcctcttcacacatcaatcattactcccgcggttctcaagaatgggcgtcctaagataagtgggtcttttggttcctcatccatctcaaggaccacaaagtccattggtatctcaaaatgaccaattatcacgggaagatccttaagcaaaccaaccggagttctaatagaacggtccgcaaggacaagtgcgattctacaatctttatatcttgtgaagtataagtgtttggcaatcaaaagaggcatcaagctaacactagcaccaagatcacacaagcaatggtcaaaggataaaggaccaagagcacatggaagtgtaaagctacccggatcatcaagcttctttgctacaatcttgttttggatgatagtgctacattcatgagtcaaaaggaccataccttgcaatgttttcttcttttctacaaccgcatctttaagaaacttgttgtaagtcgggtttaacaagaacacatctatgataggcatggtgatagtaacttctttcatttgctcatcaaacattgctctatacttctctatttgttgcttcttgaaacgatccacgaatggtaactttggttcataaggtggaggcacaaatagagtctctttcttagcaaaacttttatccttcgtggagatttctacttgggttttgtcttctttagactcttcaacaattttacccttctctttgtcaataatacacttttcaacatcaatctcttcttgacaaactttctcattcaatacctcctcttcatcaatctcactcacaccctccttttgtttaggctcaatgtctctattgagctctccactcggcaactctttatcacttctaagggttatagcatttatatactctttcggatttggttccggtttacccggtaaagttcccattggctgcttggaagtggatgaggattggctataaacttgggcattcaaactctctattttggcattgagctcaccataaaggtcatcaactttggtgtgcattcctttcatttgtgtggcgagatcgattgctcctcttccttgcccttctagaatttgtctaagaagagcatttgtatcatctgcttgaggtggaggattcgatgaactcccttggtgttggttgtggtggtaggcttgaggctttggttggaagttcccttggggtttaggttgatagttgggttgttgtgtgaaaccagggaggctttaaaggtgggtagctttgatcttatgggttctccacattattgctcctatatgaaaggttgggatgtcctatagttggggttgaatttgttgtacccttgtccactaacatagtttacctcatcttgtccctctacacagccttccatgtgttcttgatacccttggtagacatcactcttggatacaaaatggatcagtttttgatttgcaagaatcatcttatctatcttttcattcaaagctttgatctgtttgcggtgtagatcgctcatctcattactttctcttggagtgcggtcataatcttcaccatagttaccatcactttgagttagattctctaccaaagacagaccatcatcaatatcttggcccaagaagtttccattgcttgccgtgtccaacaacatgcgaaatttagggagaactcctctatacaaggtacttagtatagattctttagagaaaccatgatgagggcattgcattttgtatcccttgaacctttcccaagcttcacaaaaactttcattactcctttgagtgaagctagatatctcatttctcaaccttgccgttcttgttgtggagaagaactttgagaggaaggctcttttgcattggtcccaagaggtgatggagccttgaggtagattcttctcccaaatacgagctcgatctccaagagaaaacgggaagagtttaagtttgaatgcatcttccaagatcccattgattttcaccgtgctacacaacatatcaaattggtctagatgatccaaagggtcctccattgataaaccatggaacttagagctttgaaccatgttgatgaggcttgatttaatctcaaagttgttgttctcaaccggaggagcttgaataccgtttctatttccacggatgtttggttcatcaaaggctccaatgggttgatgagctctttgttgatgttgtggcatatgaccatccccattagcttggccatttccattatggcccccaactctgggttcattcatgacacctaactgagcaaggtgttcaagtcgttctcgttctcttcttgctctagcgttttctctttcaaccatggaacttagagctttgaaccatgttgatgaggcttgatttaatctcaaagttgttgttctcaaccggatgagcttgaataccgtttctatttccccggatgtttggttcatcaaaggctccaattggttgatgagctctttgttgatgttgtggcatatgaccatccccattagcttggccatttccattatggcccccaactctgggttcattcatgacgcctaaccgagcaaggtgttcaagtcgttctcgttctcttcttgctctagcgttttctctttcaaaccggcggatgtcttgaatttcttctactaagtttgctcgaccgtgatttcgtaggttcatacaccttcaaaacaagagcaaagatcaagtataaaggattggtaactaaagtaaaaggcttagtctcaagcaaatatgatatcctaatggctaataactattgcaaaccggcaacggcgctaaattgatgtagcatttatttctattaattatcgaaccacaatttgcaattaatcaactcaccaaaaatacacacaattgcttaatctaatctaataaggtgattttgagtgttcataatcttagtaacaatgcattatcaagcaaacaatgcaaaacaagataaaagaaagcaagaaacaaaagactaacaagtttcgaaagtaaacaaagcgggaaattaataattacttagtgataactaaagacaaattctcgggttaaggtaatcgattagaaatgataaagagatggattatggagcatcaaacaacttctaacaagcaatgatccttgggtcatagaacactaaacaagactaatacatttccatgatattaattcctttactaatcaatcaatcatcaacaatttccaaaggcaatcaaatgatcaaaaagcataaataacaagtctatctagccactaatcaccctaattaacaattttcaaaggtaaggtatgaaaagcacttaaagattttggttcgggattttcatcgaacaccttccggggatgaaattcctagtgtctaaatcaacatgatcaaggttgatctagccttaaaagcaaccaataagtaagaatcttaagtaatctagccctaactccataacccaacatctaaaccatcctaatctaccctaaccaaagaactctaaaagactactcactcatgatcatgattatacaaggaattggtttgatctttgtaaagccatgatcattagaaaagagatgagaaatttaaaagaaatacttgatatagaaacttaaaaactcaagattcatacaaaaacctaagataaaaaaacttaaatagaagttttgattcctaaacaaaaagctcccttctctaaaactaggttaagagtatttatagtaatgagaaaataaaccatatcaacccggaacaaaccgggttttgacctggttaaggaaggcaatcgaccaagcaatagatcacttggtagattcaatatcgtccgcaacattaatccttgaccagtagaccacgcaatcgaccactttggtatattcataatcctccgtagctctggtcctgaccaatcgaccatgcaatcaaccagtttggtagattcatattcctccgtagctctggtcctgaccaatcgaccacgcaatcgaccactttggtagattcaaatttcctctgtagctctggtccttgaacaatcgaccacgcaatcgaccactttggtagattcaaatttcctctatagctctggtccttgaccgatcgaccaggttacgaccacttggtctattgtcccgcacttctcctatttggtcactttgcattcttttagctcctttttttgctccatttgcttccaaaactctaaacttcactcatgtacctaagaaaaccaaatgcaatactatttactaaaatatgaatgcaaagcaacgaaaactaagagaaaaaaagtttcaaaacaaccaaaaacactagatatcaaataacttaatgaagactctaataaatccttttaaaaggaaaagcaactaaatccatttgattattgctcttgactgtctctccattt

SEQ ID NO: 38594 - DNA, 6612 bp, Arabidopsis thaliana landsberg
  unsure (1)..(6612): unsure at all n locations
ctcgacggattaaagaaacggctcgatgctaaaaaggtcgcgtggtccgacgaactcgaaggcgtgcgttggtcgcatcggacaactcctcgccgagccacaggagaaacccctttcgccttagtctatgggacagagtgcataattccggccgagatgatagttccaagcctacgacgaagcctatcccccgagaacactcctgataactctcaaaggctcctcgacaaacttgatctgattgacgaacaaagagattcggccctagttcgtatacaaaattatcataatgaaacggctcgtcattacaattcaaatgttcggcaacaaagattccacgaaggggatcgggtcctccgaaaagttttccagaacactgccgaaccgaacgctggaaaactcgggacgaactgggaaggaccatacttaatttctaaagtcatccgacccggagtgtatgagttcgctgacttaaacggtaaagccgttccaagatcatggaacgcaatgcacctaaggaaatactacaactaaatccaaggtgacaaaacttgaactacgaggtggcttgatccctgaaaagggtacgtaggcagctcgtctttagacgagttcagctaccccccattaaaaaggggggagtgggtccgtatatccatactcccatttatcatcttgttagtttttaactttggtgataaataaaaatcaattcacaatttctgaacgtattgaacaatacgatgagcgacggctcggagtatcttttatgcctgctcggcaacagcgcgctaaacaaataacgagataaaatctatcagataacctctgatcagaattttcatcttcagaaacccggctatactataaacgccggtattctagctcatttctaaacgctaaaaatgactcggatcgggtcgcaaccgaaacgtttcattccaaaatccaaattcaactgtacttatcagaaaaaggttcggatttaaataaagatcgaaaacttcggaattgattaatggataaagccatccaggcatgaattcataggttctaaacaagggataaagccatccaggcacaaaagtaaaaagaaaatcatcaaagtttattcttgaggctcggaaggaaggacatcagcagccggcaaatgcgaaccggattgatcggtaactcccatctcgtccgcgagagcttcaaccgacttatgcccgcctnnnnnnnnnnnnnnnnnnnnnnnnnnnnnnnnnnnnngcgcctcttccagcttggacgtaacttgcaccagttttgcctcggcgtctgcaaactctgagggccactcttcaaactgggccttcttgtaacgcccgcgatcctcaataggatcgttggctaggacttggtccgaaagaaggggagggtggacctacaagagagaaggacccggccctaagctcggacaaaggggaaaacatgcgggctaagcttggatcgtgaagaaatcaaatgggtctgctcgcccaaagctcaggctcagctggaaggagtgacagttactcaggtcgagtgacagtccagctcgggcagctggacgagtgacggatgagctcgaggtagctggacgagtgacggacgagctcgaggtagctggacgagtgacggacgaactgggcggttatgggcgaagagatacaactcttcggaaaggtgcaaggaacggatgtgttgatttgggaagcatccattcgccccctatataaggaagggcgcccaggaccattccacacaccacaacacaccgaaaacacaagaaaactcaccattaaaactctctccctcttgggagaataaatagtcttaggattcggtagccgggctgtggccgcaataaagaaggagggtcggatcgactagcctcgagaaggaagttaaggacctaagactttgagtctaagggttctaggatgtgagttagtagtcggatccttgaaaggatcaactagagggctgggtagtatccgggtcatgtgcatcctacacaagactcggtccgggtagggatcggctgaggcggggacgcggctcggcggaggaccggcgggtcttaactgacctgccgagaatcggccggactgatgcgcgatcttcccctctctgaattctctccgcggatccgagtagtgtatggcatatagagcattgcatggacttgcatatgattaagtaaatgagattacttatagctctatgactttcaggaacgaatggtgatcgtgggaaggacttggcttaggcgcgagagactcaaggccgggatgatgggtggtgatagttcggatagtctagggatcgattatataacttgtaatagcttatatacaaattcataggttgtatcgaatcctttgcttaatcaataaagtatccgattgtttgtttactctattcatctcatatattgaatcacggaatcatatggaacggattagactaggaaagaacctcataaacggttagggccgagtcacttagtggctttggtcgagagaactcgtccggactttaggcagtccggatcggggcctttcaatcccaccgttgaatatgtagatagtagtatcatgattaactccacggagtttcatcccgatcggacttcattacaagctccaaacgttgtcgtcaacaagtcatcttgaactgtcgtttagggtttcctggatttgacagactttgcagttacttgcccagaaagaaacactcataacttctcgaatataaatccgattgaaactctgccagttgatatggcttcatggcaacgtgatctttgcagatatgtcttatttagaaactcattctctatggtatgacgggaaacatccttgtataaccttaacttgaagctactattttctcttcatcttcttccttctttgcttcgcccattctctgattttactaagatctgtttcatctcacttctccttaatgacatgaaccaaatatctttctctctatcttcctccattgcggttgtgacgatccgttctcatccaaagcgtctcgccttctccactactccgtttacttctcttcgatcatctttctctttctcctcaagccaattcactctctcttaaatcaagttctctttctctgatggtgtttaatctctctctctcacatatctcgatgaagtcaacacgtcaacatgacccaacagtgtcacaattagtctcggcttcctccaccaccacccatgagctctttcccttttctttgatccaataaataaaactcaccacgacgtcgtctgtttggttactcggaggcggtggctgcgatcccactattatgccttagggtttctcaaggttttctttatttttcattcgcgcccaacaacgatggtatatatatatgcctttggactctaaatgggctgtctcatatttccaaaacaaaatagcccatcgaatgagggagtggggtgttacatgtaatgccatcttaaccagagatggagatgatgtgtgggaggaagttgatactgaagaagagctagaactcgctactatatagttggtgtcgaccgacaccttccagtgtcgatcgacactctatggaacactcttctctaagacgattccatatgacggtgtcgatcgacacacctcaagtgtcaatcgacactaggttcggactgcaccatatgaggtgtgaattctgatgaagcttgagtctgcttacactccttctgtctcttatccgaggacgcgtcgttctaagcaggagatccatgctactaagtgcacagccatcatggagaagatcctccatactcttcctaaggatgcttctgagacatcttctacctcactcaacaggtatgtcaagcgagttgttgacaatggaattagctcagatgaagctaagctgcttaccagagacatcagtgcaatcatactgccaaaggccaagaaggagaaggcactgagagtagacatagctgagtacatccgcaccatcactcctggtcagaccattgagaagctcccagatccaggtagcttcgttcttgattgctctatctccacaagcagattcagccgctctttgtgtgatctggaatcaagcatcaacctcatgcctaagtctgttgctgagagactaggcatgactcactagaggcctactcgcatcactcttctcttcgcggatcgttccaagcgaatccctgaaggaatccttgaagatgttcctgttaaggttggtaactctataatccctgctgatttcgtggtcctggactatgaaaaggaacccaaggatcctcttatccttggaagagcattcctagctacagctggtgctaggtttgatgtgaagatggagtttggcatggatggttcagagcttataaagtctatcagttgcattgcttccagcacaaacacacctcctcaaactgatcagaatcccaccacagagccacacacaacgctcccatccgctcagctcgcaaatgagagtggtagggcaacagtgtcgatcgacactactacctctgttgatcgacagccacgggtttcacagacagatgattctgcacattctcttcagcccacaccacttgaggacctatgtgataagttctcttctatctcttctcctgttttatctttgattaattctttagattattcgaagactgcttcactagataacaagcctagagttcctcgaaagcttgtttctcctgttgtccttgcaggtgacgtgatgagtgtcgatcaacacacccctgagtgtcgattgacacatgcagctgccccaaccagatctgagtggcgaggaggcatcagcaatcatccaccactccacccacatcctgaactccgccaagtcaagctatagactcaaaacaagcgcttagtgggaggcaaccaactggtttgatttttcttttcccttacttttattttcttttattttgctttatttttcccgctttctcttgatttgaatgccactggggacagtgtcgtttaagtctgggggaggttcttactaatgatgcttttatttttgtttcttataatttttcgtttttaagttaattgagtcattttcccttctcaagaagagaaaaaaaaaagaacgttttctttagtttagttaggaatcatgatgtatatttctcttgattattgcatggttgatgagtactgcaggtttggactcatttatgaatattggaaaatctagatggcaaaccgagagaccttaggatatcctagtttccaactcaaccactaaggctggagctaatctcattgctcttccttttacctcttcaaacggttagtattcatcgatcttgactccttgttcatacctgatattgagaccaatgtgataaaaaagaatatgttcctctccccttataaaaagaaaaataaataaataacgagagattgagatgactttcggatagtgtataggggtaggaatgtttcctatgaccccattattatacattatttggaatgatcaattacaaaggttggaaaacgccgagggtgtcgatccagtatgcgagttcccctttgtttactctctaaaaagaataagtctgggggagagaaagaacaccgaaaaagaaaaaaaaatatataaagaatggtcaatcacttccccgaatctccaaagaaagccataaattcttaaacaccaatgcgacacataataatgggacaaacaatcctactgtctcgaaacaacgtaaatctcaaaaacatttttaaatgtcgggtttcttttggaacatctgcggtttctataagaaagggaagcaagaagttgttagcgattggctgagagctggaaatttcaatttcggttgtttgattgaaacaaagattacagagaggagggcagataggattatgacatcagttttcaaaggctggtctgtcatgacaaattatgaggaccatcgactaggacgtttatggcttgtttggagaggtaatgttcgagtcacgccgatatacaaaacatcacaaatgataacctgctccatctatcttgaaggacgtaaagacgagtttttcatctctttcatttacgcctcaaattttgttgtggaacgcaaagtcttgtggaatgacctgaaacaccaccatgatgctcccatgtttcaaggtaaaccctggttgatatgcggtgattttaacgagattctagacggagaagagcattcattatatgtaaattcgccaaccattccccatgggatgagagattttctgagcttagtaacacattgtgagctaacagacttgagctatcagggaccaaagttcacttggtgtaacaaaagacatgatggagtaatctgcaaaaaactagatcttgttctagtaaacaaggaatggctgctaacatatgatcaatcttactcagtttttgagccgggtggatgttcggctcatatgagatgcagattcgtcattgtggtgtgagcgaaggaaatcaagactccctttacatttacatattctctggctacttgttcaggtaacaaagaaggagttggggaattctgaagaaatcaccgagtct

SEQ ID NO: 38595 - DNA, 2529 bp, Arabidopsis thaliana landsberg
attattactatctccattttcttcctcttgccttgaaggatttcaacaaatggccttctttaccttccaacattaggtaattaactaagtctctaattcttatgtctttatgagttttatttagataattaattaacgaattagttttgggttccattattcctatgagttttgggaaattgagaatttatagctagtataattgtaatccgatcatcttatagggaagcttgagactgaagtcagcaactagtttcagttgttctttattttcgttttctatataaagaagaccaaaactatgattctggtctttggtaaataatttacaaaataaatcaatataaaagaaaaatgattcatcattcatgtgttgttatgttgattggcaatcatgttaattacataatatatcaccatgttggttactttttctacttacaaacaatttacagtattttaattttaaatgtgcattcatcagattaaattaacgtatttccaagaaagagctatattttaattgaaactaaccttcttgtaaatttatctacatttaaacaaaaatttcttttttcctaaatctatatatacatttttgcagccattttatgaaataaatcctgtagttgggacttatttacaatggctgtcactggattttaatgtttgtttttgataattaaaaagaaaatcttcgaattaaatatttaacatttaacaatcttcctaaaatctctccacattaactacacgattatttactaaaataatacttccaaaatatttaatatcatttaattactacaaaaattattatttttgatattgtttttctccataactataacaattcgattataattatcaaagcgcagagatataatctgatagcatttaattactacaaaattacaaaatatttagacaatgattcataaacatatcataaataagatcaacattaataaaataaatggttttttttttacagaacggatttggcaggacgttacttaataacatttgtaaattataaaataaaattattttatagatagatacaatttgttaacttttatatatactaactttagaagaaaaaaaattgtctcactcatgatgtacttttattataaaaacataaaattaattaagtaatgatattttcgatttttttctagcgcaataagattagaattgttgtaaaaaataaaaatgattaggattaaattagctaggacaactttttcaaaaaagaaaattaacatgccgaaatcatgaacgtcgtaaatcatcaaacagctaggattcgttgtatcctacgcttaaaatgattagagagttgatctattactctagagtttacttgcaatgatctcaaacataaaaatattaaaacgtttatttgattccctatgcaatgaaaagtgaagatctttatgattagcacggaattttccaagcttaacttttgacttttgtctccctaatcattcattaataaccacttcatgtctttataaaaagcaccccgtacgaagttcttcactcaaagctcctcataccatagtatattttgagctttctaatcacatagtaataattttgaaaatggcgatcctaactcccgtcattaaactcgttgtttttaggcaaagtctacgaccacattctgctattgcattcctcgttgagtttctttgcttcgtcttagaattactcgacaaggagaaagatctagccaaaatattcggtatcgtatgtgcttgcgacacattaatcttcactttgctcgatcttatccaaagtttgatcgaggaagaagtgaaaatacaaagatgcggccgagtgttttggctttacacaaacgatgggagcctctattggcacacattaaacgcatatcttttgatgttatgcattgtccacgtcatcggttccacgatctcttacgtttctcataaacattatctagtcttgctcccgcttttcgcagccggactcgaactcgtcccacaagaagcctatcgagttcttgggaccgatcaagagtctggaaattctattgagcctcttaatggtccattaaatggtattgagcttggacaaggaatggttgttcatgttgagcctcttcaagagccactagatggtattgagctagagcaagaactcgtcccacaagaaaccaatcgggttcttggaccggaccaagagtcacaagactctatcgggcctcttaatgacccatcagatggaaaagaccaaaaccttcaagatgatattgtgctagatcaagagtcacaagattgtattattgcacctcatcaatgtccattagatggtattgacctacaacaagaaacggtagttcacgttgagcctcttcaagacccactagatggtattgagctagagcaagaagtggctattcatgttgggccaaatgatgacccataaactattagaagcctactatagaatgaaagctgaaacattatatagatggagacgtatgtttaatgt

SEQ ID NO: 38596 - DNA, 2238 bp, Arabidopsis thaliana landsberg
gctagtgaaacccctttctttttccgaattcactatcactcgatgttccacgctcttgtatttcgaattgcttagtatctgccggttttcaaaagagaaacatatacgttagtattgaaaattgcatctattgcatgactaacatatattgcacttcattaaacgttaataatgctcaatttgtgcatgcactttcggacaatttgtcttttgcaacatgattgttgtctacgatggtactctaaaagttaaaaccacaaaatatatttctgcatttatttatatttaatttagtcttgtataaaatcaaatcattttgatggcttgacgatacgaaaatgacataagtcattacaactttttggaaaaacttagtattatttaaaattttggcctgaagttgaaacggttaaccttttattgctattctaagtcatgtctaaaacgtggaactacaactaaggaatatgatcctctatcagtagttcagtaccaactatatcatgacaattattagtgttttaccttttatgtcaacattttcatgtaagtatataacgtaaaaaggaaaagaaaaaaagaataaattttcaggagaagaggttacctgaatatgatcgccgatattgacgataaaagcgtggcggagaggattgacagtgatccacgtgtcaccgtgacggacctgaaggccgacgacttgatcgtccggcaagaggatggtcatgccgccgggatcagaatgaggggagaggccgagggcaagctccggttgagggcactttgggtaataattaaccctcaaacatgcaccaacgtcttctccaccaaatgcttcttgaagaagtgctgctcttagccataaatttttcgattattatcgacattagtctcccacctagctggactaggtccttaccgtactcatcattcatttctctatatccattttaagaagtagaattaagcatattatacaaaatattgaatgtttacgttatatataaatactagattttaacctgcggtataccgccggaataatttattttttaaaattaatatatataaaagtttataaattatatttatctataaaataattttattttatattttacaaatgttattaagtaacgtccttccaaacccgtcctgtaaaaaaaaacccatttattttattaatattgatcttatttatgatatgtttatgaatcattgtctaaatattttgtaattttgtagtaattaaatgctatcagattatatctctgcgctttgatgattataatcgaattgttatagttatggagaaaagcaatatcaaaaatgataattttgtagtaattaaatgatattaaatattttagaagtattattttagtaaataatcgtgtagttaatgtggagagattttgggaagattgttaaatgtcaaatatttaattcgaaaattttctttttaattatcaaaaacaaacattaaaatccagtgacagccattgtaaataagtctcaactacaagatttatttaacaaaatggctgaaaaatgtatatatagatttaacaaaaattaattaatttgtaatagtagttgttatcctacctttaggggtatagcttttaatttgaaaccataagcagtctctaatactgactaatgaacccgtggttttctccactaaccatttttcaaatctaaactaatctatcaaccttactttgaacctttgaggagtggttaattaattaaagactaattgatatattaaatggaaaagaataaaataatttcaaaggaattaaatattcgcaatggccacgaggaacctttcatgtggcaactatactttgtaatttcaactatactaaggccagtgttttctttgacaataacattaacatccatatgctcatatgcatatatatatatttgattcgatcatatattattcgtatatgagacccacatatattagcatcatcattagtttttttatatattctatatataacaaaaatgtaaaatagagaggagtaagcatcttgtttgtccaaaaagaaaagaaaggagtaagtatatctcgtaaatcttggaaataatgtcacgaaacttagattaaaaaaagttaatgttgattgtttatggaatcattccaaatattaatgttaacttattgagacgcgcatttaatacccacaattgcatatattatgatgagacaataattcctta

SEQ ID NO: 38597 - DNA, 3406 bp, Arabidopsis thaliana landsberg
  unsure (1)..(3406): unsure at all n locations
atttgctgacttatgttatttcatgagaaagatgttcgattaattgggcatcagagacctctcatctctagcaaagactcttattgttgggctgggactaataatggtttatacacggtgaagtctggatatgaaagaagtagcagagagactttcaagaatctcttcaaggaggctgatgtttatccttctgttaatcctttgtttgacaaggtttggtctcttgaaacggttccaaaaattaaagtcttcatgtggaaagctttaaaaggtgctcttgcagtagaagacagattaagatcaagaggcattcaaactgcagatggatgcttattttgtaaagaggaaattgaaacaattaatcatctattgtttcaatgtccttttgctagacaagtatgggcactttcacttattcaggcacctgcaacggggtttgggacatctattttctccaatataaatcatgtgattcaaaattctcagaattttggaatccctcgtcatatgagaactgtgagttcatggttattgtgggagatatggaaaaacaggaataagactttgtttcatggtactggtttaacgagtagtgagattgtagctaaagcttatgaagagtgcaatctttggatcaatgctcaagaaaaatcaagtggtggtgttagtccttcagaacacaaatggaatcctccacctgcaggtgaactaaaatgtaacattggtgttgcttggtcaagacagaaacagttagctggagtttcttgggtgcttagagattcaatggggcaggtcttactacatagtagaagatcatattcttatgtacactctctatttgctgcaaaaattaaaagttgggaatgggcattagagagtatggatcatctacattatgataaaataacctttgccgcctcctctcctaatattattaaggctttgaataaaccaaatgacgggcattgatcatatttctgaattactcaagttcactaaggataaaccacactggtttatgatgatgaaaacagattattgtaatacaggtgcttttgaaatagctaagagtgtcatcacaggaatgcggtggcaatcttatgtagctcacagtttcccctattggttgagaagtctttttgataaggaattgacttatcaatagagtatttgagttttcacaaggaggttaagattagactctaggtttgtcttttataagagtagaaatcaaagttttttttaagaattctatcttttgaaatcattactcttaattggctaaatagttttgtattttctggttattttatttattttctcttaatcgtcatctttttacgtttttttcctctgttcaatattttctagacttatctttgacttagtttttttcttttgtccttagtcgatttttttaggtttcttttctttctgtggatactatatacagtaaaacttttataaattaatactcgataaattaataacctctataaattaataaattctttcggtcccaagttgggacagtgtaaaaagtgatacaaatcgataaattaataagataataatttttttgaaaatcctatgtaaacatatggtcccattaatatcataaattaataattgtattaaaatatcaaatatatatatatatatattatacttatatatacatatatagtgaacatgcatcattttagtgaaatatgactctattgttgtttgcttattcttgaacttgcattatttttggagctcacctataatcttccttactacattaaaaacttcttatttttacatatagaaaactttcaaaaatctgaaatcgcatcanatcgcatccaaaaacttatgaagtgaaattttgaaaacatagaattataacaaaacttcttatttttacatatagaaaattttaaaaaatctgaaaatcaaaaattctctttatatattaatttatcgataaattaatacctctctaaattaataaaatatcccggtcccaacattattaatttatagcagttttactgtattttcgaaaaataagaagttggaaagatcaatagattctctccttatctcattcatcttccacacaagaaaaaatagtagagaagaaaaagagtttttcttcaatgtcaaacttcaagaacttctctaatttgcgtcctaaaaaacaaaatggtttgtctttgttaagctactgaggttttggaattggcctcctaattacttcggggaagaacctactaatattttagttgatgagaaggtatgaaacttatatttacagtttttatttttataattgttgttatttaccggatcatacaaatataaaccaccatgaaagatttgatgagattttatatatgatctcagggacatcgaatcgatgcattgtctcctctacatgcatacaaagaagaaatcatttctacactaagagaaggacaatggtatctactctcatactttgaagtggttgtagctaacacacttgaaagattctcttctcatgtgttccaaattaagtttttacgaaagactacaatggaacatgttgttcctaaggtaagatgtcatttcattgagtgttttgatttctaccggatcaagaatgcaactgttgaaaagaaatttgttgttggtgagtattttagtttttgttttgtactatactcggctaaccactcaaaacaaagtattcttaacacttggttattataaattttcatggaatcagtctcaccaatcggaaaaataccttgggtgaagagggaataggaaagtgactatgaatccagataccttacttttacaattaaagatactgtgtaaggtttaaaactataatacattcagtatgatatatagatcttttggtttatttatttagttcacttcatattttaggtcctagtacatgaagtgcgttgttgtaggaaggtcttgtgatgagtttgaaagaaaatgctacaagaaaataagtgatgtggattttaggatggagcttgtgataattattctgcgtttttggaaaatttctgagtttgaaggttatattctttttaattcttagtatgatttttccaatgcaatttcatgagatttatgattaactatatcatgtgattgttaaacaggaaatccgtgcttgataagcgtttatgttgttcaaaagttcacattgatccaaattttcgaggaatagacaagaacaactatctataatctactgccttattatgtaaacatcgtctatacaaatatgtagtatatatatattaactttgttggatttttgttatctgtttcgtaggcgtaactttgctggatcagaagatgaagatggtgacattttcatagagtgtacacaccaatttctaatttc

SEQ ID NO: 38598 - DNA, 5306 bp, Arabidopsis thaliana landsberg
  unsure (1)..(5306): unsure at all n locations
agtttcattgaacaccacatttctacttgtagtgcatttcccttatttcggtaaacagactctatatcctttaataccacagggatatcccatgaaaactcctttgagtgctcttggacttgtcttgtcttgagtgacatggacataggctgaacatccaaacctcctgagatgacttaaatctggttttgtacctgtccacacttcctcaggtagcttgaaaccaataaacgagttcggtgttctgttgattaagtagactgccgtagaagtagcctcagcccaaaactcttgactcattcctgtctcagcaagcatacttctaactatatccataatggtcttgttcatcctctccgatacaccgttttgctgcggtgtataggtgcacgttctgtgccttttaattccagcttctttacacaagttgtcaaactgtgtattacagaattcaagaccattatcagtccttaaatacttaatcttcttgcccgtttgattctcaactgcttgtttccattctctgaacttgtgatatgcctcatccttggtcttcagaaaatacacccatactttctttgagaaatcatcaatgaagctcacaaagtacctacacccaccaagactttctggagtagaaggagatcccgagatatcagaatgtatataatctaatatacctttagtagtgtgcttagcagttgggaaactttgtttgtcagattttcgaagtacacaactctcacaaagttccagcttggttacttcttttcctaataagtagccttctttaaccagcacattcatgttcttcaagctcatatgacccagcctagaatgccataatctagtcatgtcaacgtctggtcttgccactgcaaattctccatttactacatttccttctagatagtaccgcccatcttgatattttccagaaatgatcttctgtccatctttgtagaaagtgactacaaagtcttttccttcatatttgcagctgctcttctccaattgaccatatgaaatgaggttccttcccattgtaggtatgtacctcacatttgttaagatgaccacataatcatctggatttaagatcttaatcttaccaatccctttcacttcacggtgagtcatattacccatgactttgcctccatcaaattcttgtaggccaaacggagaatccttgtctggtgtaatgtgaaaactacatccagaatccacaactgattcttcctttgtgtattgagggctagttgttaatactagtggctgttttggctccactgcaatgtttgctgaacttgaaggcttgtttgaagacttttcaggacactccctcttccaatgtccttctctacggcaaatgaaacaaccattgttgtttttattgtagtttggtcttgattttgatctgcctttgctcttagaacgtcctctccatggtttgccttttcctttttcaaacttcttctctgatctgcctcttgtttccacatacagaccttcactttgagagctttccactttctgtgagttctctttcctttgattttgcagctccaatgacttcattcaagctaaaagtgtctctgccatactttaacgtctctttgagctgatcataccggtcatataatgaactcaacaatagtatagcttgaacctcctctgtcacatctactcctatgttgtttagatcagtaactagcttaaggaaatcatccacattcccatctatacttctagaatcagtcatcttataagtatagaacttaagctgtaaggagattcgattaggtagagaagtctccatgtataacctgtttaatgtggaccacatggctgcagctgtctcacagtttttgatctttcttagtacttgatttcccacgtttagtactataagatcttttgccttctctgacttttcaaactttacaggatcaacattgggaggcagctcaaaatctccgacgtgatagtctcttccagctactgcagcttcctcttctataacaggtggatctcttagcagctgctcatcgttcaagataccttttagccctagaacaccataatgagccaacattctgaccttccacaaagagaagtcaccgattccatcaaatctgtcaacctcaacccgagcgttactactcatcttgtaaaacttcttgtaacccctgatctgaaactccttagctgaaactccttagcaaccctatacaagcctagagatctgataccacttgtggagaaaagagtgatagagattgcttgttaaaaaaataaacaaacacagaaattggtaaccgagttcacggcctcaaccgctacatctcgggggagatctcttgctcccaaagctttactatatccaagggattacaaacacaccactaacttgtgatgttgtcttttggttgttacaaatttgcactcaagaaaaacaaagattcaagaacaataaagaggaagaagaaagcttgcttaggaagttttttttatctctttttagattcttttctcacctactttcattacgttatacgttgtaatgcatatataggtgatataagtgggcccacaaatttttatccacacttttgttcttctccaccttccaatttcgttgacccaataaagcccaataattgtgttatgtgaaacccaaacaacaatataggtgtctcagcctacgaaagtaaacacattgtatcaaattcggaagcaaacagaagaaaaacaaagtatggaaagtttccctcgagagaatcattattgtacctccaagaaatagagatcgtcaaggtatcttttaatgtaattgattatattctttcaggtcaagaatatttggtagacctcattctgcaatatcaatcaaggtaccgctggcgatatcgagtttcctaacacaaaataaaaaaggagtagaaactctataaattaataatacttggactatgaaattttattaatttatagtaatattaatttaatctataaatttattaatattttttttttactgcaactgaattctatttatacttgtaaatctttacaaagcaaagttgtaagcctttgttgctggtttcctgtatcagcttgaaacaaagagtccgtaaattctaagaagcaagataaattaattaatattaatttatagaatatttacgtaaaacacaatactaaattattttcaaaatattttttaatttagattttctcatatttaattgtttgtatattgaattatgttagatctttaatttgaacttcgcctttctaattcattttcctgcaagatatattgtttccatatctacgacgttaacgtggagtttcatccaatttttcttaacaataatcttaacaatcatttttcatacattttttttttataaaaccgaatatgtcggatcacatatgcaagatgttatgtcagttcaaaagagatcattccgactcaactctaaaaaaagttgcaattgtgacttgaataaaagtttcatataacattagtcttaaaatatatgtttaagatttatgattattaatttatgatattattaggagcatatttttatatagagatttcaaaaaaaaaattatcttattatcttatcgattttggttaatttttacattggcccgacttgggaccgacaaaatttattaatttatcgtgtttattaatttatcgagtattaatttatagagtttctactgccctatttatttccaataaagcaatctttcataataaataacaatcttttttttttttttttttcaattactttataaaatttttaaaatgctctaatataattgtggacattgctctaacttaaccttttataaacaaaataatatagtcattttgcatattttactgccctttatttagagtattaattcaattgatgtattatttggcacaaggcaaatacttgctaattttcaagcatttatgactcgtcttcatctgaagcaagtactttctctatcaagctctcgtccataatcttgttacttgcaagtaactcgattccctttgttacttgtccactaacttgatccggcttgttacttttaagatacttgctatttaaatataaaaacaatatcctactatataaatcttaaaacattcataattccaaaaaaattatatcttttcagtttggcttttataagttataaactataaatatataaattcaaataagttcttaaaaccccttctatattaaagcaagtaacaagtcaaacaagcaaggtaagacttgtgcttgataataatatattttgagtacctgttatccggcttaccaacgacaagtacttgttttatcaaggcagtaacatgtatgggcaagtaacagatatttgtacagagccttgtgatgccatttttttttataacgaaataattatctatactgctatggcatatacgatatgtaatttataacccaaataacttgagtgagacacaaacatattctaaagatttgtattttcaaagtcaacgaataataggtttttttccacggcaaatcacttatattacaaccattcaaatataaatattgagacaaataaaataaattgaacacaatttcgatgaaaaagtggaaatggacctagtttttaaacggattcctaacatgcaatataataaatctttaaagtccgctctttatacattcgtaaaagcctaacattttatagatgaaactcctaaatgttttttacatcattttaactaaacaaaaaatttgatactgtttaagatgattcagaaacataattttggaagcatcatacatatctttgccgcctagtgtccattgtttcccttttcatagaaactgaattttccgactgagggaaagagagtgtaaaatgtaaatgtgaaaggatagattagtcattagttagtgtaacgtccgtgaaccggaaaatcagttagggtttgtatttaaatcatccggtttaatcggttggattaattggaaaccctagagtgtgcctataaaagaaggaaactcgaaattagggctttagttagccacttttcgttttataaaggaaaaagagagagaaggagaagaaccagagtcgttagggtttgggaaaaaacgattttaacatatcaaatcgttgtcaaaggtaacgaaatttggtagagtttttaccaagtcttttatcgtcattctccattttacagaattggattcggatttatatttcgtgagttatttgcagtttngtgagacacgttt

SEQ ID NO: 38599 - DNA, 8341 bp, Arabidopsis thaliana landsberg
tcacctgcgatggcttaaggcaaccaccaccgtactccttctacagttttagcctcgcacatctgatgaacactcaccgggttcgtctgcaagaagctgaaagaagacttgaagaaatctttatcccttaacccaatctcctaaattggaagctccgcctgagaccaaatgaaagtcctcgactacaacagagtcatatgaagcggcgaagatgttactccgatcaaagagaggaggcaagccgacggtaggacgaagagatccagagatcgcaagaggataatggattgaaagccttgtagaaagaggaaacaaaaaaaacttgatccaatcttaagtaaccaaattggatcttattagatccggattaaccggagattggtccgacgaagcggaaaaacaacaatctgactgcagtcggaaaactttaaatgtaaaaatggtgattcgaactggaaacccgttgtaaaactataaagatgttgtgttttcggatttaaattcgtataacctttaagatggatatgttgtgtcttcggatttaattgttgtgtccttggatttcaactaatgtcttaatgttatattgtgtcttctttctctcgatcacagtctctgtttttcaatctcttgtttgtgtttcgaatgaaaaaaattgaagaagaagaagaaaacaaaattcctaggtttattgattttcccctatgttttattaatatataaagtgttagagttccagttcgattagatatacatttgtggtcctaccaaaaaaaaagatatacgtttgtagttcaatggtaatgaacaagagcaacagatctctggttcgaatatttcttattatagattttttttaaatgaatttaaatggcaaaaggtcattttagttgaagaatatactacgtcaatacacatgtatcatttgactcaacaatcgttaaaattgactaacatttgttaacgttaactcataattacgcaatacgtcaacagtttaggtaggttttttgaaaattttacatgtttaggtataaatcaacatttctcgtttataccgattgaaaaacacactctctaaatagtcgagattgaaaaaaatattttaaaaaaacacactttttctcaacaaaaagacattagttgtattggcggtcgttaggtcccgactaggcgcttatgtgacacctagacaaccgtctaacccgcctaaaattatatatattttgttttactgtatttttctagtttttaactaagttttatctttatataaataattataaatgtttatataatgtttggtgatagtaggattttacgtcacttaatccctaaaacactatcctatcgttgtagtattttagaatgtcaatccaatccggtgtgatgcaaacagatgagatgtgatcagaagtcactaagttaagcgaagcaataacagttttggggtttctaacagtcctaagtgaacatgcagaaaacagaaacaataacagaattattaaaatcactcgaccacaacaagctaatgccagaagcaggatgtggtcgagtaaccggtcgagtaacagacaggatatgatccagttttactcgattgcacagtctgttgccagacactgggtgtggtcgagtatactagtcgagtaggggacaggaaacgagacaactgtactcaactgcacagtctgttgccagacactgggtgaggtcgagtaagttggtcgagtaattgcaaaacgaagaaacaggtaatgagaacgattaagcgataacgataaaacagagaaatcagatagacgagaaattcctaaggatggggtaatcaattagagagctatcctagcctattcgaatggttaaaaagtgcaatcaagctatccctagacaactggttcaacaacagatcaattcactctcgtgatagaaatcctcaagcaaagctagcccttactaattcccattcacggaatctaactatgcatgcaataagaacagactgataaagtcaataaacgctctaaacggccaatcccttgggatagagataaatatctcaggaactagtggatcaaacattccatcgaacaccttctagatgcgggaatgcttgggatcgaattccagttgatcagaaagaaataagcagtcaacacaactagtcctaaagggattcaatcaattctaaacttaaccattctacagactacggattccacaactactctatcccatccttaagaactctatgtcactactcaaacaacatgctcaaagacataaacacagataaatgataatattgcataagtaaagagataaagagtagagaaacaagatgacagatgaaatcaaatgcggaatctgaataacttggaaaaatctcgaattactggttgcagaagcaaaagcggcgcaacagagtaaaacagaaaataaaactgaagcaaaaactcaatgtcgactagatgtctcaggacagaaccctaagacatctatttatacaaaacgaaataaaatgatagtagacgggccaataacctaatcgcccggcccatagagtgataatgggccgagatgggcttcgtgatccgatggaggtccaggccgcttccaaacacttcgtcttctcctcttctcttccttttgctcagcttgtctggttgagtgcggatttgagtagactatgaagatgtgatcgagtgtccagtcgagtgatgatgttgatggtgagtgatgatactcgaccagggggtcgagtaaagtggtagagtgaacggccgagtgtggtaaggtggtgtggcgaagtgatactcgaccagggggtcgagtggcgtcatcgagtggcctgagctgaagttactcgacctgggggtcgagcagatgggaagaatggctccaaagtcactcgaccagggggtcgagtatgtgggaagaatggctccatagtcactcgacctgggggtcgagtatgtcttctgtttttggctcgtttcttccaatttgctcgcaaacagctccaaatcacctgaaaacaactcagaaatgcaatatctatgcaaagctatcctaatcatgcaaaatatacaagaatgatgagaaattatataaaacagtgatgaatgatacgaaactggactcaaaacgatgatgaatggacactgaaaacatgcaaattatagacatatcagttgtctttcatgatcatgtttcgataagtatttcaatttgatttgtgtgacatatatatttcacgtgtgattttcaggtcttgttggaatttcatgtgttatcttactagagctacattcagttaacgcactggagttttgtgggaaactagatgaggacatgatgcgagctgccgctaaacaatatgcaatcaaaactttcaatacattgtctccagaagaacgttctgcttgagtcttcaagtgcaaaagccgccaaccaaccccgaatgtttttatgtaatcagtgactctttgtttttaaattcaccaattaatagtgatgttcttaagaagattgcagaatgtttgtataataagatacataggataatattttcatgttatgttgaattcttgattaaggattttgtaaccaaaatgatattttttccccacattatggttactcaacttctttaaatctttggtaagtgcattatctgaataatacatacaacaacgggtaaccaacttaatacaacaggcctataaatagaaacgaaacacaattacaaagactacaacaggaacatataaacaagagtcatcaacaatacacacacaagaatgttcttcaagccacgcaattccatcttgcaaccttgaagatcattctctaacctaagcaactccttctcgaatccggaaacaacagattcacatgtccgagtctcaatggccagagtttccatctcgcattctacagcttgtacccctttttgtaatgtcaatgaagatccttcaagtttttcaatcttcggaaatatgtcttccatctcttccaccattgtttcatctgtccacctaaacaagtgaccacgaacattctgatgcataccaaatacagaagtcaaacatgttccagtagtgaacaatactaatagatccctataattacctccactccacatcgacaggcataaaagagtctccctgggtttttgacattcttagaagttctcaaaaccacatcttctccacagcgacatcgacttggaatccctctccctctatctcccattttcttttaactggacagtctcaatttggctcacgagaagtgaaggtatgaacccaaaatacagattacccccaaatcaaaacgacgacgggtgggcgcgttgtgtaatgagtggtcgaaattaaatagaaagcatatggctaaatggaatagtatagacatatgtagactatttccctccatctgcctatacacttttcaagtcagcatatagaatcagaaatgtaataaaccacattaaactgatagaaggtcacgaaccagtgaaatttcatctactaatccggtttatacaacaaacttcataaaccatatcatttcaaccggactgtttgttcataatttccataaaacgagtgaatggtttcattatgcacgaatatggtttgcgtttcttatgatttagcgcagtagtgcttttcaatgcactagtttcataatacagttcatataccgaattgcttgggttccttatgcagtattagggtttagtttttgaattttggaaataatttgagatcattaaaatagagactattgtaggtgtatttggtatgcatcagaaaatgagtgcttctttccataaggcactattatgttttggtttgcttatgatttaggccagtagtgatgttaaatgcaatagttacatttaaatgcaatagttacataatctagtgcgtaaacctatttgcttgggttccttaggcagtattagggtatagtttttgattttggtaaacaatttgatatcataaaatgcgagattacatcagtttgtaaacaatttgcgatcattaaacttgcaaacaattagaagacggaccaaataagtggaaatcgacaaaatgcggggtttctaatatatacatttcaaaaacggtgttacatggcatttcctaattacatcgggactcatgaaagcaacacaaatatacacgaattgcagggagcacataacaatcaaaataagaaagtatacacaacagttggatataccttactattttgaaaaatgtatcgtagcgtgcattagtagaagtagacactctcgcttccgcaaacaatgcgggaacaaccgttatttagcccataccagaaagttatatcataacacctaatatccccccccatagaagtagttgacttcttatatagcattacggcaggaggctttgttgtggcctgtgccacaacaacatgaacacctcctctgtgaagcggtcttcttgcgctgaaaattagaagtatagcagctgttagcttttaaaaaacagaatggacaacaatctgtgttacttttatgaacttgccttgaattcaccacgaaacaaaattcttatcttccttggtcttcctggtggccggtgcacaaatggtggatgcacctcccctgtagttcctgaagcaattccgggtgcgaccttgccaccaacagagtgaattggatagatttttccctcgtaacttagtttaactagctcattgaaatatccgtttgctgctaaagaatctgttggaactccaagccgagcagctgctgctattgcgtgagcacaaggtctccctaatccctgaaattccaaacaagaacacgtagactcgtcccctttgacaataaaatattcaccagtccttacttggacctggaactcaaagttgcaaatcggcttcacgaacattgacatcgcggcttgatagttttcctcaactcgctcctgaactctcggagctaaagttgtagggcagtcttcagcttgagcccttctagtagcaaaccaatccatcaaggttgttcttatgtactccaacatgcaaataagaggatactcccgtgcctctcttataacgttgttccatgactcacagatgttactatccatgatattgaaacgccgaccttttgaatgcactataaacgccgaccttttgaatgcacttttgaatgcactctaaagaatccattctgaaaaccctacatccaccaaaaataaagggttatgtaaacaactgaatctataactagtaaatatcaatctgtgcttgatgaccaatattatgaagaaggaaacaaacttactcaaatcaactaaatatgcagcacatcctgggtttaagttttatatcttgagaaatatcctattgaactcagtgacatcaaacgcttcgacagcttcagacattagctggcaaaggctttttggcttatacagatgtctgacattgcgccaaaggtgaactgtacaagcagtatggttggcttgcgtgtatacctgattggaatagtcaacaaatcagacattacttgtataatatacaaaagactgaatgaaaattgctgtgtttctcaccttactcaagccagtgtagatgctagcatggcggtctgatatgaacattaaatccggattgtctggagctataatgttgagcttgtgaaaaaaaccattcatatgcactatcattttcgttgttaacaataccaaaagcaagtgggaagatctggaaattcccatcttggcaacatgctgatattagacagccactatatcggctcttcatagaggttccatcaacaacaatgacgtttcgcataaatgcataacctttaatggaggctgcaaatgcaattaattggtacttgaaacaccgtggtccatttggctcatcatcatactctgtaaagcacagacttgcctgggttcgcttgctcaagtaggccagcgtatgcggggattagtgcatagctgcctgccatagatcctaatgacttctccatggcaacctctctagcacgccaagctttccaatatgatatactaacatggtagtcgtcaagcaggaacttcctaatcacacagcatttggcccaagtttaataccgagaaatcgagattgcataagtttgcctatgacttgagttgttgctaagcggtggtatctacgtctttgatcaatggtgcaggtgtgtctctgatttgcctgtcgcacttgaaagctatcagaagaatcaaccttagaagcatacacacgccatggacaagtcttagagatgcatttcaagaccataaactttggagtggatcgcgcagttcgaaagtgaaacttgcggttgatgacgtgtatagctatcttaatcttgcaatcagacttggacttaaatactctgccaacaaaccgcttgactccttcatatttaacatcaaagaatgcagagtctacacttgaaacacaatgaccatcattcagcacatgtatgataaacgatactgaaatagaaccaatcattctacatagaatggtatagaaaacataaactacgtaaacgaactatcaacttccaatgcattcagataaatcagcaaagcatgtatatatttatagacggattgcaggatataccttcaccttttccatcattaaatactggtggggcgtctcgaccgaataggattggatcatcactgaaatcagatagtatggtgtttaatgcttcttgtgctcgaccccaaaaaagaatgttatgcctttgaattgcagtttcttccacaccatttgtagtaggagatacatgatggccagtcggagttccaaccgcggcccttgatgaatcaacaccttaagcattaacattttctggaatgggatagctggcagattaggtagcattgtgaatgggactataagcaaatcatcgtcactgtcgctgtcttctgtcccactttgcctactaggaccagcaggccctgccttatcacttgtgtccattatgccttttcctttgtctgtaggtccacatgccgggcttttaagacgaatgtagtcttcaggctttctaatagttacgcctcctgtagggaaaagttccgtccttgtactacttcttgtagctggctctgttcctcccggagttgggtcttgcgttgcacccaccaaggcactttcaagtgcaaattggtgtagttcttcttcagagtcataatctgtgtcctcactgttagaattgaagtcatggcacgcaacagcaaccggagaaactggcatggaatgttggacgacagtaacacagagattgacctctaca

SEQ ID NO: 38600 - DNA, 1466 bp, Arabidopsis thaliana landsberg
taaacactcctactctatccctaattcttatgattagttaaattcattggattgtgacacattttgaccatagaaacgctggaaaagctattgattgcttctaagcaattttttgttggttttaatcccttttggaagaaaatgggtataagtgttgtctaaacactcctaattcatctctaactcattttattagtgaaattcattggattatgacacagtttgacgatagagacactaacaaagctattggctgcttctaagcagttttttgttggttttaccctcttttgggagaaaatggatataaatgttgtctacaaaagcctactccatccctaattcttatgattagttaaatgcattggattgtgacactttttgaccatagaaatactaacaaatatgtttactgcttctaagcaattttttgttggttttatcatcttttgggacaaaataggtatacgtgttgtctaaacactcctaatccatctttaactcttataattagtcaaatctattcgattgtgacacattttgaccattgaaacactaacaacgctattgactgcttctaagcaattttctgttagtagtagcttcttttaggataaaatgggtataagtgttgtctaaacactcataatctatctctaacttcttataattagtcaaatgcattggattgtgacacattttgaccatagaaacactaacaaatctattgactgcttctaagcaagttttgttgattttagcctcttttgggagaaaatggggataagtgttatctaaacactcctaatccatctctaaatcttatatttagtcaagtacattggattgtgacacattttgaccataaaaacactaacaaagctatttattgtttcaaatcaatggtttgttggttttagcttcttttaggagaaaatgaatataactattgtctgaacactcttaatccatctctaactcatataatttttccaatgcattggattgtaacacattttgactaaagaaacactaacaaagatattgagtgcttctaagcaatattttgttggtattagcctcttttggaagaaaatgggtgtaagtgttgtctgaacactcctaatccatctctaactcatataattatttaaatgcattggattgtgacacattttgaccaaagaaacactagcaaagctatcgactgcttctaagtaatgttttgttggttttagcctcttttgtgacaaaatgagtgtaagtgttgtctgaacactcttaatccatctcgagctcttataattattcaaatgcattggattgagacacagtttgaccatagaaacactaacaaagctgtttactgtttctaagcaaaatttttgtttgttttataaacaaagggacaattttgggtataagtgttgtctaaacactgctaatccatcttaactcgtataatt

SEQ ID NO: 38601 - DNA, 18567 bp, Arabidopsis thaliana landsberg
  unsure (1)..(18567): unsure at all n locations
gtcagtcgagtcaagggttgggccatgctcgcaaaactcattacgaaccttcggtaataccccgctagtccgagaaaactcctaatctcggtggcattccttggtcgtggccactcctttatcgatcggtattttctccggatcaaccgatactccttggtccgagataacatgaccaagaaaaccgatgctcctttgccaaaatgagcatttacttaacttcgcaaatagctcatgttcccttagccgttccagcaccgcccttagatgttcttggtgagcttcccaagattttgagtaaacaaggatgtcgtcaatgaagatgataacaaactcgtctaagaaatcccgaaataccccattcatcattttcatgaaggctgctggtgcattgatcaatccgaatggcatgaccacaaactcaaagtggtcgtaccttgttcggaaagccgttttcctcacgtccattggctctatgggaatttggtgatatcccgaggccaagtcgatttttgaaaaccagtgtgcacctccaagttaatccatcaactcatctatccggggtaaaggatatttgtttttcaccgtaactttattcaatcgccgatagtcgatgcatagcctaaagctaccatctttctttttcacaaacagaaccggcgcaccccatgttgagctactcggcctgatgaatcctttatccaacaactcctccaactgtttctttagctccgccatttccgccggtgccatccggtacagagctttagatatgggggttgtcccgggctcgagttctatcgtgaacgggtctgaccgatccgttggtacaccactaacggccgcaaacacgtccgagaactcgttgacgatcggaatgtctttcaactccgcactcgcccccacttccttggttgtgatcgtggctaaatatgcctcacatcctttccctcacatcctttcccgagcatcctttcagcgtggattgccgagattaccaagcttcccgaggttgttcttattctttggaattttaacataccctcgtccctctcgaattgtatccgtccccggtgacaatctacgtgagccttgtacttccccaaccagtccatccctaagataacatcatgtttctttagtggaacaatgattaggtccgcgggcatattgacaccgttcactacaatcgagatgccccgaacaagtccggtcggatacattgcctgtccgccggccgctcgtaccattccataatcggtgtttggttctttcctgaacccacctgtttgcaaccaattccgggactaacaaaacaatgtgtagccccagaatcaaatagagtgtgcgttactacgtcacctactctcaaggtccctacacattcccttagaatgctgagtacctcccctttcccatatgcatgatgcaatgcaaatgcagttattgaaataatgaatagggagttgtgagaacgtaccagtgatcgccctgaagtttccggcatcgttagcttcctccgacaactcataaactcgcggtgccacggcttgccgctttgggggaggcggcagtccattgcccccacgattgtccctttgtccggccggcttctccgcagtcaacttagggcactctcgctttagatgtccagtctttccgcaatagaaacaagtccttgtctcttcaccgagaaccttggactgtcctggttccattctcgggcaactttggatcgcatggtccttgcttccacaccggccacatgcacctatggccttccagcaagttccgctgtggctcttaccacaggtcatgcattccccggtcttagcatcggacttggtgttatccaccttgtcaaatttccttttcttatccgcgggtttggtggattgattgttctggatcggtgctttctcccggttcaagtacctctcctcctcgatcccttcctcaatcattgctgccctttcaaccaatttggaaaccgagtttaatgtctggaccaaacaatggttgcggatctctatccttagtccacggataaatcggcgcacttgagcttgttcctcctcaagttcacgtccaacataacgccttaggcggttaaattcctcatcatattcacgcaccgtgcggttcccttgaactaggtcgaggtacgcacattcaagcctatcccaagcctccggtggaaagtacttcttgttaaactcgtcttcgaaatccgcaaaggaccggacctcgtcccctctacgtttctcgacggttaaccaccagttatgggcgtctccttcaaggaagtggaccgcaatgtccctttggtaatcctcaaggcagcgggtagacttgaagttcctcttgagtctactcctccactcatcggccacaatcgggtccgtactgcccatgaagtgtctcgtgcccagccttgagacatgttcgagaagactcagatagtctccccttttccgtccatgattcaattgtggattcacttccacaacttccgagtcatcgtccttttggttatccacttttaggaccaccggatccgctacaacggccttggtcaatgtggctagttgcgccatcattcccttcatcaaatctcactgttcttgggccgttggagtattgttccggttatccgtgctgtcccttgcaccactactctccggtgcttcctcatttatggacttcttcccggcctcaggtccggccgagtctgtcccatcgagcattgtcccgactctggttttctcgttgatcatcgtttcctcctcaaccaaagtctcctcgacaatgcctttgtccttcttactctttcccgttttgctgctcttacccatctgcgaaacctctaaagttaatccacataactcctagttaaatcgcaaaagagtaaagaacaactaccgcgagattctcaagccgacgagtggtgataccccttaacccaacacctagtcctagaaccaagcatgctctgataccaacttgaaaggccccgatccggactgcctaaagtccgggcgagttctctcgacccaagccactaagtgactcggccctaaccgtttatgaggttctttcctagtctaaaccgtttcatatgattccgagattcaatatatgagacgaatagagtaaacaaacaatcggatattttattaattaagcaaaggattcgatacaacctatgagtttgcatataagctattacaagtcatataatcgatccctagactatccgaactatcaccacccgtcttcccggccttgagtctctcgcgcctaagccaagtccttcccacgatcaccattcgttcctgaaagtcatagagccataagtaatcttatttacttaatcatatgcaagtccatgcaatgctctatatgccatacactactcggatccgtggagagaattcagagaggggaagatcgcgcatcagtccggccgattctcggcaggtcagttaagacccgccggtcctccgccgagccgcgtccccgcctcagccgatccctacccggaccgagtcttgtgtaggatgcacatgacccggatactactcagccctctagtcggtcctttcaaggatccgactactaactcacatcctagaacccttagactcaaagtctaggatcccttaccttccttctcgaggctaggtcgatccgaccctccttctttattgccggccacagcccggctaccgaatcctaagactatttattctcccaagagggagagagttttaatggtgagttttcttgtgttttcggtgtgttgtggtgtgtggaatggtcctgggcgcccttccttatatagggggcgaatggatgcttcccaaatcaacacatccgttccttgcacctttccgaagagttgcacctttccgaagagttgtatctcttcgcccataaccgcccagttcgtccgtcactcgtccagctacctcgagctcgtccgtcactcgtccagctacctcaagttcaaccgtcactcgtccagctgcctcgagctcgtccgtcactcgtccagctgcccgagctggactgtcactcgacctgagtaaccgtcactccttccagctgagcttgagctttgggcgagctgacccaagtgatttctttacgatcctagcttagcctgcatgatttcccctttgtccgagcttatggccagctccttctcacttgtccgagactccaccttcctctctcggaccaagtcctagccaacgatcctattgaggatcgcgggcgttacaagtctcccccccttgaattggattcgtcctcgaatccgcatcaagttgatctttacccatctccttgaaccactccggaaaattggccttcatcttattctcggtttcccaagtgtattcctcacggcctccacaattccacaagacttttaacaaatcccttgattttccccgagtccctttcgtcattcggtccatgatccgtaccggccatgcttccaccgtcatattctcctttaacccgggaggtatatcttccacgctttcttcttgatcacttaaacacttccgtaattgtgacacatggaagacgttgtgaaacgcatttaattttggaggaaggtcaagtttgtatgccaccgcccctactcgttcgatcaccttgtacgggccaacataccttgggcttaactttttccttgaggtgaatcgccctgcccctttgtaggtcatcgcctttaagtacaccaaatctcctacttggaattccaattcctttcgacgtttgttggcgtagcttttctgtcgatcttgggcttcctttaacttgatttttaagaacttcattctctnnnnnnnnnnnnnnnnnnnnnnnnnnncaaacaaccgacgttcgcccacgggcgtccaacacaacggtgttctacaagctcggccatacaacgcctcatagggagacataccaatactagcttgaaaactattattgtatgcaaactctactaaccttagatatttctcccagtttcctccccaatctaagacgcatgccctcaacatgtcctcgagggtttgaatcgttcgttcggactgtccgtccgtctgtgggtggtaggcagtacttaggttcactcgagttcctaaggccttttggaaagccttccaaaactttgacgtgaaccttgtgtctcggtctgacactatactaaccggaatcccatgtagccgcacgatctcgtctatgtacttctcggcaatgatttctgctccatccttatccgagatcgccatgaagtgcgcagacttagtcaatcggtctaccacaacccataccgcattgtgtttggacttgatccccgttggcagtccggtgacgaagtccatcgttatgtggtcccacttccattccggtataggtaggttttgtaacaacccacttggtacttgatgctccgctttgaccagttgacaagtcgggcacttggccacccatctggccacgtctttcttcattcctacccaatggtagtaccttttaaggtcgcggtacatcttgtttgacccaggatggattgagaacttcgattgatgggcttctcttaggatctcctcctttaatgccctatcgttcggcacacatactcgaccgttcaccacgattgtaccattgttcgaggtttggtactcggtcttattgtttagtgcccatccttttatctcctcatcccgttcctgagccagccggatcctactaagcaggtcggcctgatcggcggctcccaaccctaagggttcaacttctttagacaaggcattcacatgcaatgtccccatcatgttaaccaagtccacttggctccgttccgcctcaacttccgagcgcctcctactcagggcgtcggcgacttggttggccttgcccggatggtacgctatatccaagtcgtaatccgccacaagttccatccaccttctttgccttagattcaactccggctgggtgaatatgtactttaggcttttgtggtcagtatagatttgaactttagcaccatacaagtatgatcgccaaatcttcaacgcaaatactaccgcggccatttccaaatcatgcgtagggtaattcttctcatgtttccgcaattgccttgatgcgtatgcgataacactccccttttgcatcagtacgcatcctagtcccactatggatgcgtccgtataaaccgtatagggctcaccttcctccggtaagaccaataccggtgcattagtcaacatggcctttaactccaggaagcttttctcgcactcatccgaccagttgaatgcggtgtcttttccggtcagtcgagtcaagggttgggccatgctcgcaaaactcattacgaaccttcggtaataccccgctagtccgagaaaactcctaatctcggtggcattccttggtcgtggccactcctttatcgaccgtattttctccggatcaaccgatactccttggtccgagataacatgaccaagaaaaccaacgctcctttgccaaaatgagcatttacttaactttgcaaatagctcatgttcccttagccgttccagcaccgcccttagatgttcttggtgagcttcccaagatttcgagtaaacaagtatatcgtcaatgaagatgataacaaactcgtctaagaaatcccggaacaccccattcatcattttcatgaaggctgctggtgcattggtcaatccgaatggcatgaccacaaactcaaagtggccgtaccttgtccggaaagccgttttcctcacgtccgttggctctatgggaatttggtgatatcctgaggccaagtcgatttttgaaaaccactgtgcacctccaagttgatccatcaactcatctatccggggtaaaggatatttgtttttcaccgtaactttattcaatccccgataatcgatgcatagcctaaagctaccatctttctttttcacaaacagaaccggcgcaccccatggtgagctactcggcctgatgaatcctttatccaacaactcctccaactgtttctttagctccgccatttccgccggtgccatccggtacggagctttagatatgggggttgtcccgggctcgagttctatcgtgaacgggtctgaccggtccggtggtacgccactaacggccgcaaacacgtccgagaactcgttgacgatcggaatgtctttcaactccgcactcgcccccacttccttggttgtgatcgtggctaaatatgcctcacatcctttcccgagcatcctttcagcctggattgccgagattaccaagcttcccgaggttgttcttattccttggaattttaacataccctcgtccctctcgaattgtatccgtcctcggtgacaatctatgtgagccttgtacttccccaaccagtccatccctaagataacatcatgtttctttagtggaacaatgattaggtccgcgggcatattgacaccgttcactacaaccgagatgccccgaacaagtccggtcggatacattgcctgtccgccggcgctcgtaccattccataatcggtgtttggttctttcctgaacccacctatttcaaccaattctggactaacaaaacaatgtgtagccccagaatcaaatagagtgtgcgttactacgtaacatactctcaaggtccctacacattcccttagaatgctgagtacctcccctttcccatatgcatgatgcaatgcaaatgcagttattgaaataatgaatagggagttgtgagaacgtaccagtgatcgccctgaagtttccggcatcgttagcttcctccgacaactcataaactcgcggtgccacggcttgccgctttgggggaggcggcagtccatttcccccacgattgtccctttgtccggcctgcttctccgcagtcaacttagggcactctcgctttagatgtccagtctttccgcaatagaaacaagtccttgtctcttcaccgagaaccttggactgccctggttccattctcgggcaactttggatcgcatggtccttgcttccacaccggccacatgcacctatggccttccagcaagttccgctgtggctcttaccacaggtcacgcattccccggtcttagcatcggacttagtgttatccaccttgtcaaatttccttttcttatccgcaggtttggtggattgattgttccggatcggtgctttctcccggtccaagtacctctcctcctcgatcccttcctcaatcattgctgccctttcaaccaattcggaaaccgagttgaatgtccggaccaaacaatggttgcggatctctatccttagtccacggataaatcggcgcacttgagcttgttcctcctcaagttcacgtcccacataacgccttaggcggttaaattcctcatcatattcacgcaccgtgcggttcccttgaactaggtcgaggtacgcacattcaagcctatcccaagcctccggtggaaagtacttcttgttaaactcgtcttcgaaatccgcaaaggaccggacctcgtcccctctgcgtttctcgacggttaaccaccaattatgggcgtctccttccaggaaatggaccgcaatgtccctttggtaatcctcagggcagcgggtagacttgaagttcctcttgagtctactcctccactcatcggccacaatcgggtccgtactgcccatgaagtgtctcgtgcccagccttgagacatgttcgagaagactcagatagtctccccttttccgcccataattcggttgtggattcacttccacaacttccgagtcatcgtccttttggttatccccttttaggaccaccggatctgctacaacggccttggtcaatgtggctagttgcgccatcattcccttcatcaaatcccactgttcttgggccgttggagtattgttccggttatccgtgatgtcccttgcaccactactctccggtgcttcctcatttatggacttcttcccggcctcaggtccggccgagtctgtcccatcgaacactgtcccgactctggttttctcgttgatcatcgtttcctcctcaaccaaagtctcctcgacaatgcccttgtccttcttactctttcccgttttgctgctcttacccatctgcgaaacctctaaagttaatccacataactcctagtaaaatcgcaaaagagtaaagaacaactaccgcgagattctcaagccgacgagtggtgataccccttaacccaacacctagtcctagaaccaagcatgctctgataccaacttgaaaggccccgatccggactgcctaaagtccgggcgagttctctcgacccaagccactaagtgactcggccctaaccgtttatgaggttctttcctagtctaatccgtttcatatgattccgagattcaatatatgagacgaatagagtaaacaaacaatcggacactttattaattaagcaaaggattcgatacaacctatgagtttgcatataagctattacaagtcatataatcgatccctagactatctgaactatcaccacccatcatcccggccttgagtctctcgcgcctaagccaagtccttcccacgatcaccattcgttcctgaaagtcatagagccataagtaatcttatttacttaatcatatgtatgcaagtccatgcaatgctctatatgccatacactactccgatccgtggagagaattcagagaggggaagatcgcgcatcagtccggccgattctcggcaggtcagttaagacccgccggtcctccgccgagccgcgtccccgcctcagccgatccctacccggaccgagtcttgtgtaggatgcacatgacccggatactactcagccctctagtcggtcctttcaaggatccgactactaattcacatcctagaacccttagactcaaagtctaggatcccttaccttccttctcgaggttaggtcgatccgaccttccttctttattgccggccacagcccggctaccgaatcctaagactatttattctcccaagagggagagagttttaatggtgagttttcttgtgttttcggtgtgttgtggtgagtggaatggtcctgggcgcccttccttatatagggggcgaatggatgcttcccgaatcaacacatccgttccttgcacctttccgaagagttgcacctttccgaagagttgcgcccttccgaagagttgcacctttccgaagagttgtatctcttcgcccataaccgcccagttcgtccgtcactcgcccatctacctcgagctcgtccgtcactcgtccagctacctcgagttcaaccgtcactcgtccagctgcctcgagctcgtccgtcactcgtccagctgcccgagctggactgtcactcgacctgagtaaccgtcactccttccagctgagcttgagctttgggcgagctgacccaagtgatttctttacgatcctagcttagcctgcatgatttcccctttgtccgagcttatggccagctccttctcacttgtccgagactccaccttcctctctcggaccaagtcctagccaacgatcctattgaggatcgcgggcgttacaacttgtaacgcccgtgtcccgagttagggagtaagcaagatcttacacacgccgaattcgaggacgaattcagtttaaggggggtagacttgtaacgaccgcgtcccgcgttcataaagaggccaggttgttttaggagaaaactagaccatggtcaagaaacggactaaaatacttagtcagaagaacgagaaagttcaagctgaaccagctaggtgagctggacaagctaggatgaactagctagctaagctaggtgagctaaaccagctggaagactagctagctcagctaggtgagctgaccgacagctcgactgagctcggtgagctgatcgtgtactgacccagctgggtggtccggtcagctgacactcgagctggtagactgtggtagctcacgggtgaagaggtgtctcggccaaaaggtgtaaggtcgagcaggtaccaacgaacggttgcatcgcctaatagatgcaaggaacggatgtgaccttttggaaggatgcaaggaacggatgtgacctttcggaagggtgcaaggaacggatgtgatgcttcgggaagcatccattcgccccctatataagggaggacgcccaaggcctttgggataatctcacaataatctcacaattatctcacaatcatccacacaccacaaaacattcttaaaagagtcccaacacatcccgaagttgttggtcggaaagggggtgcggatcggcgagtataactcgaccgaactgatgcgcatactacctcccggtccaacggttcgatggagtgtagaggatggagagggtagaccgttcgtcttagagacgaatctgatctggtagaccgatcttcggatcggatcggcaggaccgatcgacagacggatcagatcggccagacggatcggatcggacagaccgatcgtcggacgggtcggatgggacaggctgatcgtcagacggaatgggtcggacagaccgatcattggatgggatggattgagaaaagtgttcgaaaaagcacaaggataagtgcatccgaccacacccaagggtcgcccatggatacaatcttaccggtaaagggaaaaagcaccaagaatgggtaaggaacgtgattcaccatatagcatcaatatcgcggctgccttcatgtatctatctccttagccacggtgaaaccgattggagatcgataagacaaaagggtgactcgacggataaccaacgagaaagtccacggtgggaaccgatggacaaaacaaatgtaggacccgcgagcaaacctaaggccgacggaagaaggatttcatgggctagcctacgatgatccggtggataaatccacggacccttgggtgtgataaggatatcgttcggaccgcatggatggatcattaagccgaaagctttactgaccaccatggaccggacaggtaaacggttagtaacccaagggcggtcgtagcgttaaacgaccggatcggaaacatggatagttcgataagccgagggctcaatggtctactatgtaaccggaggggcgtacgcttggagaacggatggaccaataagccaagagcttgatttggccatcgtgaaccaagggaatcgtacgatccccaatctctatcgttgtacttagaccagtggggttggttggttgtatggctaagtaaagatagggattcgttcatcaatgcacgatcggatacgaatcattgaacgaatagaataaggcgacacacgggctagggaatcaaatccgcatattggccaaggtatgtgacgatgtagcttactagttaggatagacgtttgggaatcgaccgtgaaaataggataaaggaatatgcgattgttaggcctagaatggttaccgaacaatatgcatgtcttgaccgagtaaaggattgatctaagtctaagggacaaagacgatgaaacctgtacaagagttgaatcgcaaggcaattctaaggttagaaagacttccgctgtgtaataagagagcgattatagaattaagcctcgtaaaggcaattctatgttgaatcgcaaaaaattaagaggttcggccgggaagaggcgcgaacttgagtccaacgtcgccggacgccgagacgtccgggacggggtctcacatcatcaggcttttgcttttgtgtaggaatctgccttcctctgatgagttttgatcgaattgattaagtcgttgcagagctgagaccctcccatgatgaaatcgatgcgttacggggagaggtgctcggtctcgcttctgcagaatttcgagaggcgtaatggaaacctcatgtttttcttatgggggcgggggaaggtgtggtgactgatcttcctgtcctgccacctagatcgagttctacaaagactaggtctatgcgttctctcctagtgggggggngagagtcacctcccccggcgttcgttcccgtttcttttgtttgggagtttgctcctgctactgttcgtcgggaggaggggtttcaacttttgggtttgaaccttttttagttttgcccctagctgcgattaacttntaaaggcgcgacactcctcggtggaatgtccccttttcatgtgaaactacttcaatgatggaagccgctactttcgttagcaagggtggtgaaaactttaaagaaaacccaagtatgtatttggtaccatgagttcaaattcgatgctaagacatgataattgcaagttagattcaggttcaaattgatagggaatgatatcagataatgacagtgtgatcgagtagagcattcaagacatggtgcagttttacttcaatcattgactatgcatcaaacaactagcaacgatgaaccaaaatgcttacaaggctatctcatcataatcccctatgcatatgcgacaatcctatatgcaagcactctatatacaatcctaaaatgtgatgcaatctacatgacactctgtttttgtgaaattattttctgaaattttttcaatttttttatggttttttctatgccttagatgatgcagactcacaaatatacacaatgcaacgcacacttcgtgagccctcccccaaacttaaatcacacagtccactgtgcgaataaacatggaagagagtactcaggacaaatccaatcacagaaacaaaaaaaatgaagaaacaaatcacaatagatggtataatacaatggtaaagtgaggcgcttacctcagtcaaagaatgaacgtagttgctcgtcaatggctgcctgtgattgctcctaggccatagacgaaccaccttgttctgtatcagctccagcaggtgggtactcgacctcatcagctctgtggcggccagcaccgctctgaggatactcgacctctctccttctgctacagccagcaccgcggtcgcgtaaactacgagactgcagaagtcgtccgctcctagtgctagatcgagtgagtgtggtcctcctcgtcctcccagattcacgaggcttgaatgatgaatacctcacagggacatgcggaatctcccgctctctaggctcaggctcgtgccgacttggctcaggcgcgtcatatctcctcgagggcatgtcctgagggagctgtccctgcggaatagctgtagtggaagaggagcagctgatcttgtccttcagaaacttgatagccatgaggcatttggcgagtaacttatcctgtttcttgcaccacttctgcagcttgttgttgttcctgtgagcttcgctcaaactcttgctatccctcgctcgaggtatatgctcactgaaatgatacatgcttgtgtcaaactccgcctcatctatatcatctgtctcatcaacatcttctgttgtagctccttcggtgtgactaatctcctcagttggcggactgccctcgaaataaagatcttcaagcgcaggcttgaaatcaatgttccttccctcgagaatcctagtagcgtcaatgcaggggagaagaatgttggcgattctaatcaatgaatgctcagacctatagcggtgaaagtcgccaaccatgtcaaactcacatcggcgcaaatgatccaagtccatcatcctcggtgctaaccctggttccttgagcggtactccacaggcttgcagaattggcgtcacaacgccacccacgcatagtgctcctctcaccttcttctttccgttcgtcaacgcccacttcctgtatccacacagatggatcaacagaggcattactggtggtgcgttgttgagatcgcctctcaagacattctttcccttcgtccggcggagaatccctgtaagcgcataatctataatctccatgtccgtgttagacacggtgcctgtagactccctggagtaaaagacgttggcaaccgatctctaaaagtagcggatcacaggactccagatttggttgctcttggaccgcgccgagtttagcggtagattgttccctatagtggcccataaatccttaagctcttctctgtcaaatctgggtttggttccctttcaactagggaaactaaatagttcttccaacttcttgatcgatagctgataccgctgttcattcactgagaacgtcaagaagcctaaccccatggtatccagctcaaagtccgtgagtgcctcatagatctccacttgcagcgtggaaagaaactcgatcgtctcctccttataggcagggtaagggtaagacatgagtgtctccagatgacacttctcgaacagatgctgcacgtcctctagtaaccccagctgggctaaagtctcatagcacggataccgcgttccccagaagtcattcatctcgaagaatctgatatactcctccactgtaacctcgtcgggtttgttcagcagcttcgtctccttgcgccatgactctggctcatactcagtttcgatatcctcatcaatcagctcatatctacttgacatcgccctctttcctctggcgatttcagctcttttctgattacgtcgggctggagagcgttcgaattcatccctcaagctctggtaaacatgttgctctctcggtctagcggaccagtactcagcttcatccacattgtaatcagggtccatagaggattctccactgtagttactcatgatgaaacctgaaaacaaacaaaactcaaagataaacgttaatacgttagtaacagcaaaccaaaaacacaaaccgcacaaagcaaaaacaggtcgagtaaaccggtcgagtataccaaagccggttgtgaacttttttctcgattttctttttcgttttatgggtagttggtcaagtgattatggaaggccgagtgaagcgatggagcttgagtggtgaaagcgacgaggctatgcaggagcttcggtctaggaaaccgaacggcaaggtcgagtagtgtccttggagagagcaggcggtcgagtagtgaatgacgagtgtagagacacggattggtgatgagatgatgtgagaagaagtcgagtgattgtagacggttggtagatgcaatcgagtgatgaaacgatgaagaagatggtgattggggatcaagtaaagtggagctcgcggaagaagagaagacggtggtgtgaaggggtcgagtggttgtggtagtggagaggtgatgagagctgtggccgagtgattttgagcgagaagtgttgaaggcgaattgatggcggaggtcgagtgttgttagaggagcggtgattcgagtgattgaatcggtggtggagaagcggaggcgctcttgcgtgaagtcgagtggattcgtgagctagagaaggctgtgtagtggtcgagtgtattccttggagaggagaaacggctgtntgttgagcaaatgagagacggagatagatggttaggtcgagtgagtgaaatggagagctcgagttgtttccttggagagagtgagcaggcagcgatgatggagaggcggtgagaagcggcgatcgagtgaaggttgtggggaggagatgggtttggaggtcgagtgttttatgggagagaagtgggagaaatgaagtcgagtttatgaggtggtgaggaggaggtgacgaggtcgagtaaaggagataaaggagcgttgattcaagagggatggggtcgagtggttgagagaagagagatgagagtttggtttgttggtggtgatgaatgaggaggggtcgagtgtttaataggtgaggtggagataacgaggtcgagtaagtgataggtgggggatggtgatttcgtcgagttcgagtggtgtatggagatgggataaggtgagaggtcgagtggttgtgagaagaaggagttggatttcttgtctcttggttaggtgcgtgggagacatagggtgcagcagtgggtccctcgcttgtctctttgttctaaatcattactctatcttcactaggaaaatttcaggaaatcctaaaatctgttgtaaacttggtgagctccctgtaaaactctgtagcttctgttggtcgagtaaaatgatgatttaaaattttttgggttttaaacatcactcatactcgaccaatgtactcgagtgcaaggtctcgaagtgcaacgaaaaaaattctagtccactgggctatatactcgatctaaaggccttctgtagagtaaaagttttgaatttttactctatctctacgttgttcctttcctcctgaaaaccacaaacacaactaagacaaatcaaaaataacaagaaaagaaaaatttatttacaaagatagtcatgggacttcctcccaagtgagcttgtttaaagtcattagcttgactcttttactcctttaatcatcaagaagttcctggaaatgaaccaacgtcacctctggaaggatttgatctgctaagtatttcttgagcctttgaccatttactgtgaaatctccactcttaccagctagagtgactgctccataaggacggacctcagtgatacagaaggggccagaccatctggatttaagttttcctggaaagagtttcaagcgagagtttaatagcagcacctgatcaccaacctggaaatccttggtgatgaacttcttgtcatggaaaagcttggttctctccttgtagattttagagctctcataagcttctagacggatctcatcgaggtcactgagttggatcaatcgcttctcctnnnnnnnnnnnnnnnnnnagttcagaagttttaccgcccacattgctttgtactcgagctcaacaggtaggtgacatgattttccatagagaagattgaaagcagttgtaccaatgggggtcctcaaggctgtcctataatcccataatgcatcatcgagctttgcagaccagtctttccttgtaatcccaacagtcttttccagaattgtttttatctccctgttggagatctcaacctgcctgcttgtctatgggtgataaggggtggcgactttgtgctttactccatgcttcttcaggaggttcttaaaaaccttattgatgaaatgctttccaccatcacttatcactaccttgcgaactccaaatctcgggaagattatggtcttgaacagctttagcataacttttgcatcgttggtaggactggcaatagcttagacccactttgatacataatctacgacaaccagtatatacttgttactgtttgaagatgggaatagacccataaaatcgattccccatacatcaaagatatcaacttccaagattgggttctgaggcatctcatttcttttgctgatgttgccctttctctggcatgaatcacattttgaaacaaactcctgagcgtccttgaacattgttggccaccaaaagcgataaatgtagaatctttgacactgtcttgaatgtcgcgaagtgaccaccagatgcggagccat

SEQ ID NO: 38602 - DNA, 840 bp, Arabidopsis thaliana landsberg
tgttacctgtaagttttactgggtctgctctatatactgcctttgggcaaccctctcaacaactaagagatccattcgaggaacacggagactagttaacgtaatcagcctccaaatatttggaggctgattacgttaatgaagataatgaaaaattatttcattttttagttgaaattttaggtggttcccgaaaaaaaatagcgaaaaaaattatccctaaagtggatactaagagaaatgtataaaccaatgcttccataaatttgatcgtggtttacaattatagctttcatacctgttttgtttacgttttgttcacttgggaggataaagaaagaaacagagtcaaagaatcggcagcgatttaaataaagattcctacagtaccctacctattaaataaaataacaaacagacactagaagaaaaaaagcaatgttgcatcagactgcttgtcgttttgtagttggatctccaagtttttggaatgccccgaattccacttgagcatacaaagctggatcgataccatcaaaaacatctctgaagagggttctagctccatgccaaatgtgtccaaagaagaaatgcatagcaatccaagcatgtccaaacgtaaaccaacctcttgggctgcttccaaaaacaccatcagatttcacagtcgcaccgatctaattcaacaatctcacccaattcagcccgtcgagcatattttttcgcagttgcgggttcactataacccgctccattcagttctccaccataaaaaacaccagttacaccaacttgttcgacactatattttgattctgcccctccaaacggcacgacagg

SEQ ID NO: 38603 - DNA, 4804 bp, Arabidopsis thaliana landsberg
ctacttccaaagaacctgtcagttccgtgttaccggaactccaagctgataacataaaggctctaaacgacattcttcaagtgcctagtcgtgaggcgtggaccaccgttctttctcccataccgatagaaaaaacaactcggttagtcatcgttttatctggttttccaatattatttaggtggttggtctctagtttagaattaagtgtgtttggtctttgatttcttaacgttcagttgatgtgtctggtttcgatgtgtgaatgtattgattagagtctgagtgtattgatgtgtgtgagtgtattgtgaagtgtctagttagttgtgtaagtcccaagagtctgagtgtaatggaaatcgatgaagtttgtttgtgtctttcctgacattagctttgaaatttgagttaagacagtaaatgagaaatcgagtgttggagttaagattcattgagtattgaacctatggaacttgttttgataggagattgatcgagtggtcgttgccaacgcttgagcagtctccatgctttgataacctctggaacttgttttgatagcttttatgtaaagaggttctagttagggtttatgtttagctcagtctccatgcttttatgtgtttctttctcttttagctcattagctcattagctagctgtgctaagatttagtgaagtgttttggttacttgttatattttggttttgatgtctggttttgattggagaatgtgttttgatgtttggttttgatattgtcttgtttctttcttaacattgtattgtttctttcttaacaatgtattgattagagtccgagtgtattgtgtaagtgtattgtgtaagtgataagagtgtaagtttattgtgtaattgataagagtgtaagtttattgtgtaagtgtattgtttagttgtgtaagtgtctggtttagttgtgtaagtgtctggtttagttgtgtaagtgtgttagtgtattgtgtaatgtgtaatgttaagtgtctcctttagttgtgtaagtgataagagtgtaagtttattgtgatgtgtctgcttagtaataagagtccaagtgtattgtgtaatgttaagtgttaaacttagttgtgtaagttgtgtgagtgtcttatgcatttgatccgtgtattcttgtcatgtctttgcaggtttactcgtgacacatcttcgaggctggttcgaaagattactagagtatggacaaaaaaatttgatggtgtcttctatagctggtcatgtgttccacgggatcgaagagaaagatacttcctcgagtttgcggtatagtttttttctcttgcattcacttaaatgtttagctggtaattatcttcactaacatgtttttgttatttgtagaaaacacaccattgggatcctttgattacaggaaaagttcagtactattttgaagatatatgtcaaaaacggatgaaatatatgactagcactgtgaggactagtcgagagtgtcctaaatggatcatcgattcccatatctgggaaacgatgtgtgcatactgggatactaaagaagcaattgcaaagagtctgacatattccaaggctcgcatgtctgaccgtaatgggctcggtcctcacatccatttattagggccaacgtcctatcaacaaatccaatgagcaatggtaaataacttcttcttctctctgttatttgtttacatagtccattgcaagtttagatgttgtcttagtccttgttcatttttaacattgcaggaagaggaattaggaaggacagtgggtattggtgaggtctttgtcaagacgcataccaaaccagatggcacttatgtcaataagaaggctgagaagattgcaaagaactatgagcagaaattgtaggagaaagtctctgaaatggaggcagagacttcaaatggttcagacggggaatcacgacctcgggagctcacagcagatgactgtactctcatcttcctacaggtaaagtttacattttcataattatggtctgcatattcttatgctctttagtaattgtttgtctctttcttttcacagtccacaaagacagataatcgaggaaattattatggagtgggcagtcttaaggagcatcttccggatttagtcacaggaaaacgcaaacacttaggagaatcttcttctttcgtggcattgcaagtgcaactgaaggaagctcaacaaaaaattgaagagcaagctgctcataatgcaaaacgtgaggaagagcaaaccaaggctgtagctgagcagaaggacaagttggcacacttgtccttggttgagaagtatttgcgccaaactgatccatcatttctcacacttcatcgagtctcattcacctgaatcaactacaaagcctatctcatctccaactacatcttaagttacttctccctctttaaaactagcatgaacttgtagtcttttgctaatttagtgtaagttgaattgtgtttttgagaatttagtgtttgaatcttgtattttggttacaatattaatgaatttggtattttggttagaatcatgagtttggttttgaaatttagataagaatagttgtgaatgcattacaggattaagcaatgtaaattagaaatacaaatgacatttttttcttttgtctgaaaccatagtcgttactcagtcacatattagtcggtaattagtcgcagactatccctacaataatcgaaagttcatacagtttaatcgtaactttgtcgtaacatagtcttaacatatagcgactattttacgagtcgtaaattggcgactaaaaattacgactattgcgttcagcgactgtggatttgcgacaacagtgattagtcgtaacacagtcgtactatatatataattgattgtgtcaaaatacttttgaaaagtcgaacatgatattcacactccatcaatttcattaaaacaccacgacaattaacaacataactattgaggattagagtataagagcttcaatcttggaatcatatatatgaaaggtggctaactttctccatatgggtgacacatcatcataccagtgagagccacatattattctaaatttaaattatttaaaaattaacaaaagttagtgatgaaaaattaaaattttcacattgcattaaaccatacatcaatcccactcttaattaactatcttcaaaataaaagaaaaaaacacaaatcatgtgaatgtatcaaacactactttcattttactttttttattttttatttttaaaaattttaatggtcaatggtcatcactctataatgactaaatagttgtttatgttgtagtttatttgtttgctacctaatattagtgtagttattttaccttgattttttaattattattacgttatggttcatatcttatcatatgaaattctgtatttttatttttgtatctttaggtaagttcgtaacattgacattcaatatttttaagtaatagacttttgagacgttaaacataccacaaaattcaaaacaaatccatttatcttatatggctatatgcaatagcataaaatctaaaaagtgttactaaaataactctttaatttttgcttcttttttttttcttttcatacgaaaattcttgaaataaaaatatcttatattcttgttgtgatatattcatgataatgaacaaattttagaatcttggatataaaaataatcagattatacatgaaaatatatagaaattgatatttagagtcaaaaatgaatataacaataaaaaatgtatgtacataagatgagtctaattttactaagtataaaataacaaacaaaaaataaacataaattagcgacaaaaataattaacatatttttatctaaacaattttcaaaacaaacccacgcgtagcgtgggaattcatctagtttagaataatattactagatgatgaagggaaattaaaaaaaaaaaaacgatggctcagtttgtttaggtgaatgatttatttttttgtggtgggtaaatgacataatatcgcacgcggtgaataaataaataatatatgttcaccaagtatcattaacttaattggtaaagatcctagtcggagcttagaagttgtcggttcgagtgatgcttggtacgaaactaacattacatgttgtggtttcgggtctggggattacgggtttcggcccaaaatctcctggtattaaaaaaaaaaaaggatttaataacgtgaaaactaacgatgtacaatagataaaacaataacttatgagttattgtatgtggtatatatatatatatatatatatatatatatatatatatatgtgtttctaaaatctatgaaacttttaattccaaaagaaaaataataatttatttactgatatagccaatcaatatatctcctttttaagttttttgttttgttttctttgttttcggtaattacttgaatctagaaaataaaataataagttttatgtacttcaagcaaaacttttggcaagtatgatccaatttcttcgggttgaacttattaatgcgtaggacaaaaaacaaagaaaaaaacatggaaactttcgccatatcttgaaagaacgtcttgtcgttactatcataagttatggaccataggtattgtcatgtatcaaaattaactttgtagcatatgtgtatagtgaatcaatgaagcaatagagatataacattaggaaacgtctatatctctttggcatgacatcccaacttctcaccgtagccgttaaagctgag

SEQ ID NO: 38604 - DNA, 12910 bp, Arabidopsis thaliana landsberg
agatccgtctagaagcttatgaaagttctaaaatctacaaggagagaaccaagcttttccatgacaagaagatcatcactaaggatttccaggttggtgatcaggtgctgctattcaactctcgcttgaaactctttccaggaaaacttaaatccagatggtctggccccttctgcatcactgagattcgtctttatggagcagtcactctagctggtaagagtggagattttacagtaaatggtcaaaggctcaagaaatacttagcagatcaaatccttcgagaggtgacatcggttcatctccaagagcttcttgatgattaaaggagtaaaggagtcgagctaatgactttaaacaagctcacttgggaggaagtcccatgactatccttgtctataactttctatttttcttgatatttttgatttgttttagttgtgtttgtggttttcagagacaagagaacaacgcggagatagagtaaaaattcaaaacttttactctacagaagacctggagatcgagtgtacagcccgttggagtacaaaattttgaaaatcttctgttgcacctggagaccttgcactcaagtacataggtcgagtatgtgtgatgtttaaaacccaaaaaattttaaatcatcatttaactcgaccaacagaagctacagagacttgcagaaatttcctacagtttatagtagattttctgcaaagaaattttctcaatcaacagtgtgtggaccacgcgctgaggataagctggagagagaatctaaaactcaacctagaccactcattttgaagcgctactcgaccactccaaatccactcgaccttccacttttcatttcaccactgagaacttcactcgaccccctccctcgccgccgtcactagcccatcgactccgtcaaccgaccaaaccacttcactcgattacttccgtatactcgaccaattcatccgcatcaacagccgtctctttcaaaagaaaccgatcgacctcgcttcccggtctcgtagaggcactcgaccgacgctgtcctagccgacttcaagaaatcactcgacctcctgaaagcactcgacccctgcaataatctactcggcttcttgttcgtgaattcagtagcgccttccaacttcagagaagctactcgaccactagctttcacgattcactctatctctaagtttcactcgacctgctgaagcaccccaactcgacctctgagaagatactggattcatttcatctaagctcaggaacaactcaggttaatctagtacggaattgtactcgacctattcaatctgtttcattgcctattgacaataattttggtttcattgctatctttgagactaacctattgacatttgagctttgagttctaaatccctacaggagaatcatgagcaattacagtggcagttcttctgttgatcctgactacaacatggatgagacagaatcgtcatcttcaaggccagagagagaacagagagaatacgaaagtttcagaaggaaagctgagatagcccgaggaaagagagcgatgacagagaggtatgagcttatagacgaagatctggaggacgagtacatgcctgaacagactcgcagagctaccaaacttctgcacaagcccgacatattgcctgctgaggaatatgttaggctttttaagctgaatgagttctgtagcacgaggtatccttggtcgacctcacttgcacaactcggattgttggaagatgttcagcacctgtaccaaagttgtcatttggacactttgatggcttatccgtatgtagcatatgaagatgagacaatacaattcctctccacactacaagtagagctctaccaaggtatgacctctgatgagttggattgtgaaggattgggattcttgcgattttctgtgtatggtcatgagtacaggttatcaatcaagcgattggatggattgtttgattttcccagtggaacgggatctaagccaaagtatgaaagagaagagttgaaagacttgtggatcaccatcggcagctctgtaccgttgaatgcttccaggtcaaagagcaatcagatacgcagccctgtcatcaggtacttccagcgttctgtagccaacgtactctactcctgagagattacagggactgtcactaactctgatatggagatgatcgcaatggccctcaaaggaactctacgccaaactaaaaatggcatgtccctccagggtgaagtcaatgacacacctctctctatacttcttctgatccatctgtgtggatacaaaaactgggcggtcagcaataaccgcaagagagcacgaggcgctctgtgcataggtggcgtggtgacacctattctgatagcttgtggagtcccactcatttctgctggactcgagccacgagcaatggatatcgagcacctacgtcactgcgaattcctggagtttgcaatggttgacgatttccacaggttcaggtttgagcactctacagacaggagagctaacatccttctccctagccctgaggtcacacggataatcgagggagataacattgattttaggcctgagattggacgcctctactatgagaacgctccaccattagatgaggacgatcttcttgaagaagctgcttcggatgggatggatgaagatggagcagtaaagttcgacactagcatgtatcactttgctgaacatgtacctccagcgaggcagagcaagagcttgactgaagctcataagaataacagtaaattgcagaagtggtgcaagaagcaggacaggatgatcgccaagtgtttcaagcttctgacagacaagctgagttgctcttcctccaccactgctattccacaggtacaacctcctatggaaatgccatcgaggagaattaatgcacctgcgcacaggcctgagcttagcgagcagagagtcccacatgtccaggctaggcattcgtcattcgaatcccgggaacacaagagaagaaggaaggctacactcactcgatctagcagcagatcacgcctcattcactcgaggagatcactcgaccgcggtgctggccgcagcagaaggagagaggtcgagtttcctcagagtggtgctggccgccacagagctgatgaggtcgagtacccacccgctggagctgatacggaacaaggcggttcgtctatggcctgggagcaatcgtaggcagccattgacgagcaactacgttcattcttcgactgaggtaagcgcctcacttcaccattgtattatatcatctgtcttgatttgtttcttcattttgtttctgtgattggatttgtcctaagtactctcttccaaatttattcacacagtggattgtgtgatataaatttgggggaggctcaggaagtgtgtgttgcattgtatatatttttgattctgcattcatctaaggcatagaaaaaccaaaaaaaaatgaaaaatttcacataatgatttcacaaaaaaaggagtgttcatgtagttgcattacatttaggatcgagtctagagtgtttcatttaggattgttgcatatgcataggggatgatgatgagatagccttgtaagcattttgattcaccggataaactcagttcttaacccgtcccaatacttcgtcgttttgagtattagggttttcgggatatttggctataagtagcatgtacttctcattttcgcagacaagaagtttttatctagttttattccgcagaccttgtgttctagaccgtttgtaatccggatttctctttatctattcagtattcagtatacagctttagttcttgatttcgtttactgttgttcattctgttatcatcttgctgttatactgttgttatcatgttttcaacttgttcaacgtttatgctttctgttatgatgtctgagtagtgaataggtttctgaggatgggttagagtagtgtagaattctcagtatgctaggtgattgagtattggttgatagatcccttctagattagttgttcttaatgcctattgctttctgatcaactggaatttgagcccagacatttccgcgcccaaaaggtgttcgatgaaatgtctgaaccactaattccagagattcgtgaccctgtaccaaggtattggttgcagggagcgttttggctttaacttattgattcgtaatgcctgttagattagctctcgtcattggtgattgagtctgggactaggttaacttgagagtctctgttgcggtggcacttagatttggttaatgaacttgttgtctagggttaatttattgagcatgtcaatcacctgtaaactgaggaaacgaaactactcaattaccccatccttgggaattctttatctgattgaattctttgtttactctactgttgtttactgcatcctgttatctgttgcttaatttctgcaattctttcttgttactcgacctgatactcgaccacccagttgtctggcaacagactgtgcagtcgagtatccctgtttttttttctgtctgttactcgacctgtcactcgacctcacccagtgctttgcaaagagctgtgttggtcgagtgttttattgtttctgtttgattttctgttttctgcatgttcacttagaactgatagaacacaccaaaacctgttattgcttggcttgacttagagacttctgatcacatattgattgctagcatcacccccatttgggttgacaacctaaaatactacatcgatatgattggtgttttaggataattgactaaaaaacctattatcactggtttctataggagattcatcaaagacttcagcaaaatcgcaagacaactgaccgttttactctgaaaagaagtcaaattcgagtttacacaagagtgtcatgatgcctttcagcagtaaaacaagccttgatcagcgcaccaattgttcaaccaccaaactgggatcttccttttgaggtaatttgtgatgcaagtgattttgcagttggggctattctaggacacaggaaggataagaaacttcatgccatctactatgcaagtaggacacttgatgatgcttaaaggaattatgcaactatagagtaggagttgtttagctgtggtgtttgcttttgagaaattcagatcttatctcgttggatccaaggttattgttcacacacatcatgttgccttgaagtatttgatgcaaaagaaggatgctaagcctagacttttgagatggattttgcttcttcaagaatttgacatagagtttagagataagaaaggagttaagaatggtgtagctgatcatttgtcacgcattaggatcgatgatgatgtccctataaacgatttcatgcctgaagagaacatatacatgattgatacagctgaagaagatgactgcaaacgtgataggttgcagaatcgagcttcagtgtcgatcgacactcccattatgtcgatcgacactcacatttcagagaaagttgatattcgtagttccgcgatggtgtcgatcgacattattgcacctgtcgatcgacacccttctgaatcgacaagaaattggtcaccaactgagaaatgcgccctcacaggggtcgagaaggactacccatggtatgctgacattgttaattacctagctgcaaatgtggaaccggataatttcacagattacaacaagaagagattcctaagagagattaggcgatattattgggatgaaccttatctctataagcattgttctgatggagtttataggagatgcgttactgcaacagaggttcctgatatactatcgcattatcacagctctagctatggtggtcattttgcaaccttcaagatagtatccaaagttcttcaagcaggcttttgatggcctacaatgtttcgggatgctcagaagttcatatctcaatgtgatccttgtcaaagaaggggaaagattagcaagcgtagtgagatgcttcagaaatttatcctcgaagttgaagtcttcgactgttggggtaaagatttcatgggacccttcaaacctttcaacacgaatctctacatcctagtagctgtagattatgtctctaagtgggtagaggctatagctagtccgaagaacgattcagcaattgtcatgaaactcttcaagtctatcatcttccctcgatttggagtgccacgcatagtcattagtgacggaggtaagcatttcattaacaagattcttgcgaaagtgcttcttcagtatggagttcagcatccagtggctactccctaccatccacaaacaagcggtcaagttgaagtttccaaccgacagatcaaagagattgttgagaaaacagtgggtaaagcgaaaaaggagtggtcttacaagttcgatgatgtactgtgggcttataggacaactttcaaaactccgcttgggaccacaccttatcatcttctatatggtaaagcttgtcatcttccagtggaattagagcacaaagcagcttggacagtcaagatgatgaattttgacatcaaatcagctggagaaaggagacttattcagttgagtgagcttgatgagatacgaattcacgcttatgacaactcgaagctctacaaggaacgaacaaaaacctaccacgacaagaagatccttactcggacctttgagcctaatgaccaggtacttctttatgattttagattgacattatttcctggcatattgtcttctcgttggagaggtccctacacagtccactcggctaggccatatggaacaatcattctcaaaaacaacaatgacaaaccatttggtgtgaatggacagagagtcaaacactactgggctgaagctgagattccagtagaaaagcctttggatcttcaggacccacctgttgattaagcaactacaaagtcaagctattggctataaacaaccgcttagtgggaggcaacccactggtaagtatttctcctttttattcatttcattcatttgatttctaaccaaaaacgcgatggtctcattttccaggtaagtcgttttaacctaaaacttcatcttctttatttcatttttctcaaaaccgccgaattcactaaaacctccatagatccttcgattcttcaccatttctcgtgatttcaggctctaaactcaatagaatctcaccctctatcttctccaagtgtcaattccatcgatttgcaagatcacaggccagaaaaagaaggctaggaagagcgtcggactttcctcctcctccgccgtccctccacaccgccggtcacagcccttcccaaccggaatccgaaactgcagcccctcaacctcctattcatcgatttccatggccaaagcatccaaaagagagaattccttctcaaagggtttgggagaaagatatcaacaaggaattcactaaaggtgactatatcaatcgccctttttctccagattgggaagattatgatacattgttctataatgcctggatgaatgtagaaattttgcctactcgatttgcggatttcggtttgatgcagcgtttgcagatagagaaatcagttttaggactgctagatgacataggtttgggaaccatctgttgtaggcagtatgatttgtatcctgagttgattaaacaattcatggcctctgttagggtttcttatctgcatgacaggaaacgcaacgctcaggaaggaactcttatcttcttcattcgcggtgtcagatacagtttaccactgcgagatttgggtgacatatatgggtttgacaatgatctcactggagtttccctgcctggtcagtttaaggattctctgattttctggagcaggtttggtaatggaatctatgattccaaggacgcagttcattcagagatccgccaccctgttctgcgatatttggttaggcttattagtagcacactgttgtgcaagatggagcctggcaagatgagactatctgagttgttattgctctatcacgctcttcatgacttctttcctgacagccttggatttgagcaggttaaccgtaatgtcaactttggtgctgtgttcgctcatcacttggtttcttttaagatcaagccctttacaggtagaggacacaaatctgagagagttggcagtcttctcactcccatattcgagcatttccgcatcagctttgagggcgaagaagtcaacaccacgtgtttcactatggataagacttacctgaagaactctcactggcttaaaggcaacctactgtggtgcttcatagatgatacaggtcagcacatgattcagttacctcaccctgcacttacagagattacaggagagcatgaggagataggctttcatcccgatccctcccttctgcatgccgcaccacgcaccaggcgacagagaggttcaccttcaggatctgcacctacacagaccgaggacgagttcattgaccttgctgggggtccgacagttggatcttcctcatccgcttttccatatcagctgccttctcctccacccatcccgatggagaaacaggtctttcagtagtacgtcatcgacaatttcaagagcgtctggaacgccatagctacactttctcgctgcggttgtgttgcccctagttgtcgtcgttgtcgctctcccgcacccacctccggctccaagcatgaggactagccatcctccttctcgtcttttgttttctgactttgtttcttctttatttcagactattggttatttgttttgaaacttgttgcacttattttcttatgctttgttggaacaatccatgtgtgttttagtgatttaacagtctaactggaggatccatgtgaaaacactaaccaaggctctacaacaatgagtagcatttacaaagcaatgcgaaacgaccagagtgtcgatcgacccatccatggtatcgatcgacaccactctcaggtggcaactcacgtttctctaacttttaacttttgattatttttctttcgattcctctagcttaataactctggggacagtgttatctaagtctgggggagtcagttactaactttatcttttcttttcttatgagtcagttgtgtcattctaacttagatagtcgtttattgagtcaaaacttttgtctgaaattatgatctatctctcgagtttattgccaggattgcttaagtactgcagattcaaatcaatccgactaatggaaaatccagaaaaccaatcaacaaacttaaggacatccattccaaacataatccacaaaggctggagctaatctcattgcttttccttttacctcatcaaaacggttagtgttcataggacattactccttgttcatacctgataagtcgactactgtgataaaaagaaagtgttcctctcccaaataaaaacaaaaattaaaataatgggaaaataaataatgagagattgagaagactttcagatagtgtataggggtaagaatgtttcctatgacctcattattatacattatttgaaacgatcaattacaaaggttggaaaaatgccaagggtgtcgatccactatgcgagttcccttttgttcactctctaaaaagaataagtctggggaaagaaagaacaccaaagaaaaatatatacaaagaatggtcgatttatcatggaatagtacatgaatgagtctagaaggttcttaagcatttacttgtttgatgagacccaacgatgatagcctagtggatatagttgagtgctttggtatggaatctaggatgttgtgtgggctagcggagaattacatggtgatcagaatttgattagaactgtttagtgcatagatttggtttgtatgatcaaggtaataagctagacagattgagagtttcttgtttttaaacctctttcacagattcaaccttttgttttgcttgagggcaagcaaaagctaagtctggggagttgatatgtcctggtttttactgatttttaacttagtttcagaatggtttttagagtctttctagtctttttcgtatgttttgagtcatttcaggtacacttacacatatgggagctatggggcacaatatggaatttatgaagcttttcagcaataaagatcttgaaggacgtttttcagaaggcgtcgatcgacacccacacctgtgtcgatcggaaccctctattgctgcctaaggaattttcgttttcgaccaagtctttgagaagccctgaagtcttgcttatttgcaaagtagtccctgcacgtttttagtcacgaatatacctaattgtttggtcattgttagacctaagttttgttttagtttttgttacacatttttgagagaagaatccaattcttttagagaggattctgatctcctttactattattcttaattcatcaatgcaaactattcagattatgatttgtgtttctattatcgtgtctaggttatcaccttgttgggtttaggaagtctcaatagggatttagatggattagtagatcgaaaacccctttggattattcttagagttcttcatcttgattattcttattgctagtttaagattgatcacctagaacttgatattagataataggtatgcccgccataggtacttgttatttgaactatcatacatgagcctaggcatttaagaaagaacatgtaggctcatagaagggctctggtttagatactacgtgatctaatcaagctcattaacaatgcatgctttaacataggatttctcggcttcttctggttatcttagctttaagtatagagagtttcgcggaacgcccccggttactctataatcatagtctgagttcgagaacggtgcaataacaatcctaatattagctagatctacaatttatctatctcccgagacaattccttagacccgacgctttaatcacttgaatctacaactcatttacttgcttatttgtcttcaatattcaattacttcatttagcttattaaacaacatcataagtctattgtgtgaacatcgagagctcagtggaatttgatccttatgtgctaacgacgatctcttatttgagggagtaagcttaaggcaatttgagctatatcatagcacatagacgcacctgtttcctaaagttgcctttgcgactcattttgactcgataaaacatttgaaaacttgtgtccgttaagcatgaacaaaatcatgctctgataccactcttgtaacacccccaaaccattctagaactaagaccgaatctggaagcgttacgtgcgacgcccataaaagatccgatcgagttcccagaacacatccggtaccaaggtcagttcatttgcaaacatcgttcctctcgaacatggcctaaggcttttcaacccgtaccacattcgtgagttgtgttagtcaggacaagactaatattagagatacacaaggatttctaaaaaactcattttattaatcttaaaatatctcaaaatacaattgtgttcggctagccaaggcctaatgccacaatcaagtcatacaacatatatttttaaaaaaatatctttacaaaggcaacgaactctacaccggcttccttacgttcgtgctcccctctaaggtttctcactatggttacctgcaaaatagagtgagggatgagcaccaatcgcttagtgagtccaggctcccctaaacatgcaatattccccacccagaaacccaaaataataatcaaatgcatgcaatcaacaaacaatcatgcatcagacaatcaatgcaagattcgaatatactcgattgagtatacttgacaagaaatcaaccaattactcttggaaaagtgtaatgaacccaatcaatattaagcatgcatgcataactacactaaccgagcttacgcagcggaaccacttatactactctaaagcctttctcttttcagcgatttttatttcccacaaggcaatgtctctaacccttagccacaaatgctagaaggatcacatcccttcccccttactgtctacaagggaccaaatcccttacggtataatttgtactaccccatcgggccgcctcgggtggtagcgagccagtccgagccgttgggacaatcatgacatcgcttccgaactagtcataaaaatgactaatcacgtttacttactacgaccctattgaatctcaataccactcgtaataagatctacctcacaaccaaatgtctcaattactacctagcatgcaaagccaattacaaataagttaacaaagcaagtgcgagattaaccaacaacaatcaatcaatgataacaaacaagcaatcaatcaatactactctatcatgtcaataactaactacttattgaccacccgacaacgggtaacataatagttatactaacaacataacatgtattgcgaggtcatccagagcataacgtttacactaacgtctagcccaacctcacatctaacgctataaataaaatgtttataatttgtcgggatccctcggttaaccttgcaatcataaacgttaccagaatagtttagcatttgcccacacagacacaatgcaacctcctaggcgacattgtataactacttaagcaaatagtttaaataataagctaagttgttgtgatgttggtttcagattcaattttcaggtttggtctaaccgagaaattgattggagattgaagtcggtttagctcggtttgtcttgggtttcatctgaagaagaaaagaaggagtcaaagcctctagccgcgatagagtcctttatgacttaagtatgaaacagaaacattatcttcttcgatatataattc

SEQ ID NO: 38605 - DNA, 1277 bp, Arabidopsis thaliana landsberg
gacttcttatgtcaggatatggatcaaataataaatattcttttttaggtggtctgcgagctgctgcccaatcgattagttatgaaataccattaactctatgtgttttatcaatatctctacgtgcgattcgttgaaacagaaacgtttatttttactattccgtttcttctagacgaatcagttaaaaaacggaatatatatttatctttcgaattaatcgaaataattaataaaaggaatttgatagttatatatgagtgaaaaaaaaactgctctgaaatttgcagtaaaacgaaaaatgagtctcatttcctatgtacaaaggttaaacggaaataaacataagtgtaagaatcactttaccccaaggttggttgattagtcatcctgacttgaagcgggttaaatatattaaccggtaaccggatgacgttttcactatcagttatatagattaacatacatgtattacaaagtgagcggcaattaggtaaaagtgagtggatggttagaaacaccaaaatacacaaagaatttgtaatagagattaaccaaattgaaaaggatatttaggcctaacataagataaaaaaaagaaggttaattggggctttaaattagtagaaatgatcagacagtactccccaagattccgattcagagtatgctcctatccaccgacaaatgtaatgactatcagaaacgaaataatcctttattttttataagtctaccaacttttttctaaaaaagaaagaagaataggaacgaaacaaggctctttttttttcatatatttcgaaaataaaatcgaatttctgtcatgaataataaaaaaataggatgtctaattatttttcgtaatcgaaaaccacgatgggcttaaatactttttttttttaggagttttttattaaagggttaagttattactcaacaaatagaaattcaaatttgtaaaggggtgagatgaattccgaagcgcgttttttattcttagaatttgagcagacagaattccattggtataattcgggaccccagatatatttaatccattttagaacacatcatatccatctaaattataatctggtccttagatttatttatggcccccgaggagccgtatgaggccaagacctcatgtacggttctgaaatagcggtgaaaatagtaatgttctcgccgactaggattatctaacagtttaagtacagttgatatagttgaggcacaatcaaaatatggcttttggggatggaatttgcggc

SEQ ID NO: 38606 - DNA, 2037 bp, Arabidopsis thaliana landsberg
cggtatttacaatcgttacttctctattatattgctcaatacgttcacggataatattactaatttcgtcggctctaatggttaccatgagtattgtcctgattcttttggtggaagaaaaaaaaataatgcctataataatcgtaaggaaataattaatcagttatttctttcatcgtaccaaacatcccaatatttgcattaatagtcgtaaatgtactcattactcaaacaactatttagggttcctagggctaaatgaaaagcttgttggaaaacccgatagcggacttgattaaatggtctttggtggtcaaaaagaatgggttcatttttggaattttctaaatggttcaaaggttcataagggggacaaatcaaatgccatatttctcggtcgatatcaaagtctccattcacgctaaacttacccgcttgcgattcatacaatacccaagcagcgcccggacattacctaattggcgaataactccttcacgcagaacttctgaatttcgaataggtatttaatatcctctgctttcggttatctaataaatcatttaatgaaagtagattatctttccattcattaaaaaaaaagttctatgatcccttcccgaaccaaacatgaatctttcgattcatttggctctcatgctcacttattccaatcaattatttatgagacttcccttcccatctttttcatgcaatgagcctaccctctcccgagtttttttattcaattcatattcaatatatatttctatcgaaaaagatcaccaatccaagataaaaatattcggaggattcttctgaccaatgaaaaattaataattgtcagcaaagttgtttctttttttcttgaaatccaaagaattcttattattttatacgtaggttatcaattctgcattataaaaaaagactcaaaaaattttatcgacatgagtgttttatatcgaaaaaagtataacaattctttttgaaaattttattcatttttttatttagtctacatttagactatatatagtagaaagagtaccatgttgcatctgaacttcaaacggtttagctttaaccatgttaattaattgtcccaatttttggttaatagagaatcaaagtaaagcggacttaccaaagaataacgaaaggctatggttctcaaatatgatttttttattcagaagtaattcgcgggattatgcactctttcctagttatagtgccactgggtgaatccagcctattcttgaaatgaacaactcacacacactccctttccaaaaaagatcaatacaccgaaaactacacttagatttattggatttgttgctaaaatatcggtattaaatccgaaactcccggcggatggccagtgacccaagtaaacgaaagaatcggttaaatttttcatataatctcctcttctagctaaactataaaaaaagaactctgtccttttttttttattctttttattgaaaataaaaagaaatttgaatttaataatttaatttacctatttggatatttgtaaacagaatcaaaaacctattctatttacaaacgtattttccaaaatttttaattttcaataataataatgagacttattagaattaagctagaatttgagaccaagttttatgtcaagttcaaaaaacctaaacctacttttttcgcaacactccttaaaaaaaagtttctattaaactaaaagaataaggggaaggaagaaagcgaatcgatgtgctaattccccatcctcaaattagtccttcccaaggattgttgtctcaatgaataattgtaggagttaaatcttgatagaattaaaaaaactacaaaaaaaatccagaattttgtgatttctgggcttaaacaaaaggattcgcaaataaaagcgctaatgctacaaccaggccataaattgttaaagcttccataaaagccaaactaagcaataaagtacctagtatttttccttctgcctcaggttgtctcgcgataccttcgacagcttga

SEQ ID NO: 38607 - DNA, 7292 bp, Arabidopsis thaliana landsberg
  unsure (1)..(7292): unsure at all n locations
ccccatattatacattatttggaatgaacaattacaaaggctgtaaaaatgctgcgggtgtctttccagtttgcgagctccctttcgtttactctctaaaaagaataagtctggggagagaaagaacaccaaaaaaaattacatataaagaatggtcaatgtatcatggcatagcataggaatgagtctagaaggatcttgaatgttagcttgattgatgagacccagcgatgaaagtctggtggatatagttgtggaacttatgtatggaatctagaatgttgtgttagcttgcagagaagtacatgttggttaggatttgattagaactgctacgcatatggattgggatagaatgatcatggcaatagactagagaatattgggagttcttttgttttcaaacctcttccacaagttcggcttttgtgttttgctttaaggcaaacaaaagctaagtcatggggagttgatatatccctatttttaccggttttaactatgttataggtataggttttagagtctatttgttatttctagagtcttttttagtccttttcaggtctttacacgtttgagattcatttggagataatggaacattctggaagaaaccatataacttatgatatgctgcagaagaaatctggagactaaaaatcgcgtaggtgtcgagcgacaccaatacctgacggcaatttgaagatgcaacttattgacattctgaagatttccaaatttggcctagaactttctcctatgtttttaatgaaggcccatcacgtttttaagacacacacataaatatatatatatatatagtttttaggtcaatgtttagacctaagatttgggaggctattccctttttctattttgttcttgggagcaaaaccctgtggagacttcctttagataagattcttctaagctcttttctttagttattttcttattagatttgtattctaatcatgttgtttgctacaatctccatgcttgagtagtattcttgttaggtttagggtttctcattagggatttagatgatttagtagattgccccctttctaggttatctgtaggattcttcatcttgattgttcttaatgctagttctagagtagctaactagaacttgatattagataataggtatgcccaccataggtacttgttatttgaactatcatagatgagcctaggcatttaagaacgaacaggtaggctcatagaagggctctggtgtagatattaggtgaactaatcaaacttgataataatgcatgctttcgtataggatttctcggcttatctggttatcttaactctaagtatagagagtttcgcggaacaccaccagttactctaaaatcatagtttgagttcgagaacggtgcgataacaacctaactatttctagatctactatcatctatttcctgagaataccctaaacctgactcttttcccatccgacactacaagaaaacagttaaatacccactacacccggcgactacatacatagtcgctatatttggtgactatttggctacaattctacgactaatttacaactaacaaaaatatagacgttagttagtcgccaaattaccactgtagaggcgagacgccttggtagtcgctaaagggcgactattatatgacacatcttaatgagtcgccaaatgtagtcgtaaattagtcgctattttgcgattaatatacgacacgttgtaatagtcgttaaatagcgactattatatgacaactgcggcgtgtcattaaatatagtcgcaaaatagacgtaatttgccgactaatatacgacagctcgtaatagtcctctaaatagcgactattggatgactacaggggcgtgtcattaaatatagtcgcaaaatagacgtaattttcgattaaaaaaacatgcaattcgttttgtaagttgttgtacctactttaaacgactacactatttagtcgtgttttagtcactcaaaaattgcctatataatgaaaatttctcgtacaaaatattcattcacaacacaaacacaatactaatattacctttaaaaaaaataaacatttttgaagaaaaaaacgtttaaaaatatatttagttttattattagtcttataatggcgggaaactataattatccgagtagcggtggttttaatcaagattggatgtacaagaggttcgatgaaatgacggggaatttgtcagcagaatacgtcgcaggagtggaggagttcttgacatttgctaatagccagcctatagtacaaagttgtcgaggtaaattccattgtccttgtgctgtgtgcaagaataaaaaacatatcgtctcgggtggaaaagttagtagtcatttgtttagtcaaggatttatgccagattattatgtttggtataagcatggggaagatttcaacatgaatgtaggaacgagtaattatgttgatagtacgtatctaaaagagaattatgaaagtgtgggtaatgttgtagaagatccatatgtggatgtgggtcatgttgtagaagatccatatgtggatatggcgaacgatgcatttcgttataacgtggggtttgatgataactatcatcaaggcggttctaatcaagaatgtggaggaaccggtacgtaaccattctaaaaaaatttacgacttgatttaaggtgctcaaaatccattgtacgatggttgtcgtgaaggcaaatctcaataatcgttagcagctcgagtcatgcagaacaaggcggatcataatatgagtgaaagatgtgtggattcggtatgtcaaatgttgacagattttttaccagaaggaaaccaagctactgatttccattacatgacagaaaaatttatgcgcaatttaggccttccttattatacaatcgatgtttgtattaacaattgtatgcttttctggaaagaagacgaaaaggaagataaatgtcggttttgtagtgctcaaagatggaagcctatggatgactaccgtcgaagaagcaaagtgccatatagttgtatgtggtatctacccattggtgaccgattgaagagaatgtatcagagccacgagactacagctgcaatgcgttggcatgccgaacaccaatcaaaagaagaagaaatgaatcatccttcaaatgcggtgaagtggagatatttccaagagctacatcccatgtttgccgaagaaccccgtaacgtttatctcggattatgtactgatggatttaatccatttggcatgtcgcgaaatcattcttggtggcatgtgatcctgactccatataatttaccaccgggtatgtgcatgaatacatagtacttgtttcttacaattctgaattctaggccaaatcacccgcgaggtagtctcgatgtcttcctccaacctcttattgaggagttaaaagagttatggtctactggaatcgatgcatatgatgtgtctttgaatcaaaattttaatccaaaattagtgttgcttggacgataagcgactttccgtcgtacaacatgttatcaggatggacaacccacagtaaactatcttgtccaacatgagtgaaatttgactagatgtcatgtgtatgattgaatataaaactagaaactcaaagagataccgaaaagtaaagtagtgcttccttgttatacgattcaaaaccaaaaactcataagaattcggattcactatcaaagctttgagaatcaagagtaagcttggttagcggatgtgtagtcaaatatgactagatgctttgtgtatcattgagcataagaattagaactgcaaccggattccggaagattaaagtaggatttaggttttaaagtttaggatctatggtttagggtttaggtttaagggtttagggttaagagtttatggtttagggtttacggttttgggtttaggatttagggtttaggggttagggtttagggtttggaatgaaggtattcgaccctagggtttagtggtttcgaattggtttgacccttatagaattaactaatcttgtgtctatagtacaacccccatcacctaacgcaacacatgtaaggccacaatgccgaagactttttttttaaatcattttgaacacactcaaaagccactaacatttgttttatcgctagttttttgagccggtgtatagagaaagatacacatgcatgaaaaatgacctaaagtgtgttattgttattgccatgaggactgcctatatccatcccatcctccttccggttctttcctcttcagaacaccacctgacatttgatacattcttgcttgatcctccttcaaaggtaaggaagcagatgaggataattgccttgccacaagtgttgattcgtctcttccctctgtttcatgacctccaggaccagaatttaagtcaagtcctgacctaaaccatttcgcgccattgtccaaaacaccgccattgctaccaccgtttgggaggccaactatataaggtcttgggtaattagacggaactggaactccaggacccaatatttgagagttgacaccggggaagcaagctctcccgcttgaagaagaatccatgtgtgctgtagaagcaccagggaaattcgctggggtaacggggaagctgtttccaaaaggaaagacaggatactggaacgttgtggactgaaatggcatggctggagacgacgacaaaacaggacccctgtacccttcaggggaaaatgaggaaacaccagttgttggacccaacattctctgtgggccacgagtggcaatcattggaaaaggctgatcacctctctcaggcataattggaggcatgctcacagctgaataagcgttagcagcaggaaaccaagttgagaaactagccatgttttcgccattcactcgaattccagagagagatggttgtgatggcaagccacttcgtgaatgttgatttagaaccatagatggctcaacagctgcatcatcacccacaggtccatcatttaaatcaaaatctctacgaccaccagtcgatggtaatttaacctgctgaaaagatgaatctagccgatgactactgttcattgtgtagctgatcatatcagttgaatcatcaactttgtttagatcaagatcaaggcctccagaagaatgatcaagggcggaacccatgaccccagaacgtacttggtcaaaactattggtgatatcagatgtacaatttgtgggatttccagatctttgggaagccaaatcttcaaggactctctcgtcaggtacattcaagtcaaaatccagaaacgtccttgtctgtttgccagcagaagtagatgcatcagatgtagaggtgttgttaatgctcagtaacacatcctgagcttttcttggctcagctgggcggaaggcactagtggcagcagatcctctccaaccaacagcccctttatttctcaacagatcttcaggtggaacaaacggacctttggcagcagcagcaacagtaatagatgcacgagttccactagatacaggagccaccggaaaaggtaaggtcttaactggttgtagaggagtaggcgtcaaaaatacagatccagagaagttatttgagtccccatgttttgcatcgtctccatcaaaaccttcatttagatcaaatnnnnnnnnnnnnnnnnnnnnnnnnnnnnnnnnnnnnnnnnnnnnnnctgaaacggaagaagcatctctggcagcagacgtacattcccccgcttcatctccatcagcatcactggttttaggcgcattcggtctcttaagatcctctgcttctttaggtgataatcctggagtagctcttaatcctgagtaccgttccatgatttcaatattttctagattcccctccccaggttcaactttacctttagttacagatgagtccaaaccggctgaggcatcctttacagctcccacagaagtatcaaaatcctgcttaatcttctttatatctttttggtccatatgattaaacgcaatattattgaccatttcagttataggtctatcaatgcttacagcatccataccccttgaaatcccagaagaaacgggtacatcttcttccacttttttaactagctcagaactcaacgccgttgggggtttctcttctttcttatcatcatcaacaccttccaagggagtatgttcaacagccacagaatctaccattttacttacatctctacattcggttagcattgagcttgctactctttttgttaagtcagatgtgcaatcagcctctgatttaacatcagtctttatatccttcacttctccagagtcactatcatccaaaatattttccttaatgacttttgtgggtaaaggaggcgaagcaacgacaccatctgaattttcattgctctctaggcgctgatccacaaacctttgcagatcttcagtgtctgaattcgagctcttaacacgatctccggtcttagattcattttttatctctgactccaactgtgtgccactactgctaacatgttgctcaccttgctcattactgacagtggggcgaacagcttgatgttgcttatgaggcaagccatccgaagccattagctttgtattgttccctacagtagaattttcattcatcaaggaatttggaggctgagatactgagggtgatgcaacaggcgatttagacatctcatcagcagcaacactagcaagaagattcattccaacatcatccgaaccagccaaagaggcatttgtctcagagtatctgacacaactttcaatcaaagcattcatcgaactgagtgttccgccatgtctttctccagatttgaactcatttcctaatgaagatgtggctttaacattcccagatgctttatcagaatccttaagagccccttcgcgctcatcaccagcaacaacaagtggtgaaccagttgcctcttgcgagcctgtcaatatatcttttaattcattgctttgccaagactcggcattcaagacagagctcacatcagctcgataagaatgatttttttctctccagttattgtcacacagttcctgcttcaccgcatgcacaggtgaagaaactctgctattcactggtgcagggtcctccaaagagcctccactcacactttgagcaggacttcgaccccgcggcagcttcacaatcaatttattaccggaaccctcagtaagaggaaactcaagagtcttttcagatgtcaaactt

SEQ ID NO: 38608 - DNA, 7984 bp, Arabidopsis thaliana landsberg
gaccgtgatattatagttacgtctttagtggaagcctttcttggatatgctactactccaaattagttggacagaatcacacatcttatcttatagccaatcatcctcaacttgattttatctgtttttgtatgtgttcccaaactgctatctatttcttgaggaggaatgcacgtaggcatcaaagtagctagctagcttggctagggccaacttatccgctttatcggtaaagtgatatctagtgtttttggttgttttaaaaccccttttctcttagtttttgttgctttgcattcatattttggcatatagtgttgcatttgcatttgcatttggttttcttaggtacatgaatggagtttagagttttggaagcaaatagagcaaacaaaggagttaagagaatgtaaagtgaccaaagaagaaaagtgcaggacaatagaccaagcggccgattgcttggtctattggtcaggaccagagttacggaggaaatttgaatctagcaaagtggtcgattgcgtggtcgattggtcatgaccagagctatagaggaaatctgaatctaccaaagtggtcgattgcgtggtcgattggtcaagcattaatgttgtggacgatattcgaatctaccaagtgatctattgcttggtcgattgcttttctaaaccgggttaaaacccgggtttttcctggttgatctggtttattttctcattactgtaaatactcttaacctagttttagaaaaaaagcttttgtttgagagatcaaaacttttcttagggttctttatcttaagtttttgtatgaatattgcgttcttaagtttctatatcaattacttcttataaatctctcatctaccttctctaattatcattacacaaagaacaaacccattgctttgtgctttcataatcatgagtgaatagtcttttaaagttctttggttagggaagattatgatggtttaaatgttgggttatggagtttagggctagcttacttaagatccttacttattggttgctattaaggctagatcaacattgatcatgttgatttagacactaggaatttcatgcccggaaggtgttcgatgaaattcccgaaccaaaatctttaagtgcttttcataccttacctttggaaattgttgattagagtgattagtggctagatagacttgttatttatgcttattgatcatttgattgcctttggaaattgttgatgattgattgattagtaaagagattaatatcatggaaatgtgttagtcttgcttagtgttctatgacccaaggatcattgcttgttagaagttgtttgatgctccataatccatctctttatcatttctaatcgattaccttaacccgagaatttgtctttagttatcactaagtaattattaatttcccgctttgtttactttcgaaacttgttagtcttttgtttcttgctttcttttatcttgttttgcattgtttgcttgataatgcattgttactaagatttaagccctgaatgttttgtagtttttttattggtttttagtttttggtttttggattttggtttttagttttgatttttgtagtttttgattttgttgtaaattttagtttttgcagaatcatgaatgaaaatttgtttaatttttagtttttacctaaattgttataaaaaaaaaaaaaaaatttggtttttggattttttgaagaaataagcaaaatcttctaaaatctggtttccctattttctaaaaatctactttttttaaaatcatgaattgataaatatttagtttttgcaaaatcaaaatctaaaaactatcctaaaaactgcatccattcaaggccttagtattcaaattagcaagagatttgggatcaaacataaggtattagaaaaagcgactccacatatgaaagcagccaattgaaaatttacatggttgataaagttgcggagaaattgacttacttgatcgttttgaaaagtatggtcattgttgatgggttttgcaattagagtttcatttttgctaaaatcgaaagcaactcttggtgtattgcagcgtatacctggttgatatacatttgatacatatcagcctttccctagttgatgggttatatgtgatctacactgattcaactgaattgatagattcttttgtaaaagcagacttctcgcgtttcctgatttctgttcgcagttgaggaatatcggtctttaacagtctgagtaattcctctagcatgacttcagttctactctgagcaacggttggtgggtgggcttggatgtaagaagggatatatggagaagcaatgtgtgtagatccttgttctgctctgcgcatgtcggaagcctcagccgcttttctccgatcactttctatgtcctaagttgagagacttgggacaacattgttgataagtaccagtgcttcgctatgagaccttttcatgaaattgccatcacttgcaccatcgaaacacatcttatactactcatcgattccgcggaagaatatgttgatgagctggctttcttggaaaccatgttatgggcagtccttctgataggatttgaatctgatccaagctgccttcaaactttctgttggatcttgagaaaatgaagaaatattttctcgtagtaattctgtcactgaatcatcaaggaagtggttcatgaatgcgttcttcgtgtccgtccaatttgtcaatgaaccatcgtctagctgtgagagccatgatgctcctcttcccgttagagagtgagaaaagagttttcaaagaagataatcagctggtacatcatctgcttagattgaggacactaagtttttgaagatttccaaatgatctagtggtgattcatcaagagcacctctaaactttccttttgaaacaagatcataataggcaggtagaatagcaaatttttctcttgcaaaaggaggtagctagatcgatgatcgatttgagtagaaaagatcaacattgttgaagtcacctatggtagctggtttgttctgtagatggtgtcggtcgacatcctgttggtgtcgttcaatactgtcatcgatatctgccatcagattgttgcgttccatcttttagttttcccgtcagaggaaaaaagaagaaaggaaacgcgtgagtaacaaaagaaagaaaaaacttagtataaattctacacctagtctaatggtgaatcaaagagaacttcggcaacggcgccaaatttgatattggtcaaattaatcctaagaccactctctcaaattaagaggtcaattgcagcacttagggatgaaattcacaaagttctcggatcacacagtagactaatggctatcgaattaagctaagtgaaacagtaaagaaaataaaaagaaacaaaagtaagcaatagcagattgttagttgtgaaaacaaaataataaaagcgtcatgcttagggtattctcaggagatagatgatagtagatctagaaatagctaagttgttatcgagccgttctcgaactcaaactatgattttagagtaaccggtggtgttccgcaaaattctctatacttagagctaagataaccggagaagccgagaaatcctatactaaagcatgcattattatcaagtttgattagttcacctagtatctaaaccagagcccttctatgagcctacctgttctttcttaaatgcataggctcctctatgatggttcaaacaacaagtacctatggtggacatacctatgatctaatatcaagttttagttagctactctagaactaacattaagaacaatcaagatgaagaatcctacagataacctagcaagggggcaatctattaaatcatccaaatccctaatgaaataccctaaacctaacaagaaaactactcaagcatgatgaatgaagcaaacaacatgattgaataagaaatcaatgaataaaacaagaagagattaaggtatagaaagattttctctaaagggagtctccaaggttttgcttccaagtacaaaagagataaggagattagcctctccaagcttaggtttaaacaatgaccttaaaactatatatatgacctaaaacacgtgatgggccttctttagaaataggataaagttctgagccgaatttgaaaatcttcaaaatttcaataagttgcgtcttcgaattgccgtcaggtattggtgtcgctcgacaccaggggtggtatcgttcgacacctacatgcatttttgtctcccgactttcttcagtagcataaattctctgttttcctccagaaagctctattatctccaaatgaatctcaaacatgtaaagacctgaaaaagactagaaaagactctagaaataacaaatagactctaaagcctatacctaaaacatagttaaaaacagtaaaactagggatatatcaactctcgcagacttagcttttgcttgccctcaagcaaaacacaaaaagccggacccgtggaagaggtttgaaaacaaaggaattcccaatattttctagtctactgccttgatcattctaaccaaatccatatgtctagcagttctaacaaatcctaaccaacatgtaattctctgcaagcttacacaacattctagatttcatacctaagttccacaactacatccacaaggctttcatcgatcgatctcatcaaacacgctaatattttgagaaccttctagaggcataagctgtactataccaggatcaatcgacaattctataaaaaaaacgcatccatattattgcggacttgcttctatactcccagacttattctttttagagagtaaacaaaggggaactcgcatactggatcgacaccctcagcctttttccaacctttgaaattgaccatttcaaacaatgcataataatggggacatacgaaacattcctacccctatacactatctgaaaatcctgtcaatctgtcattatgatacattcttttatcacgggagacgaatacttttctttttaccacattggtttcaatatcaggtatgaacaaggagtcaagttctatgaacactaactgttttgatgaggtaaaaggaaaagcagtgagattagctccaaccttaaaggattgtgttagaaaccaggatatcctcaagtctcatggtttgccatctggattttccaatagtcggattgattcaaacctgcagcattaatcaaccaggcaataatctaaagaatatagatcataattcctaataacattttgattcaataaaacgactcaaaaagaaaaacaagagtaagaataagactcaacaagaaaaatgtagttagtaactgccctcccccagacttaaacgtcactgtccccagtggcattcaaatccggagtaagcaaaaaagaaaataaaagaaaaacacaaataaaggaaatagaaaaacgaaaaccataccagtggttgcctccaatagcttgacttggcgaagttcacgacttaaatgggggaacatgggacatgtgctgcaatctcgccttccaaggcggtgtgtaaacagatcgtctctatgctgcatctggtgtcgatcgaccctgattctctgcagctctcatctacgcgtgaattgaccctgccatgattctcctgcaaacttgtctcaaccgagtagatactttcttcaggcagaaaatcattgatagaaacgttatcttcatctgtgatccttgaaaaatgatcagaaactccattctcaatccctttcttatttgtacttcgatgtcaaactgttgaagaagaagaatccattgtagtaatcttggcttagcatccttgttatggataaggtacttgagtgctgaatgatctgtatgcacaatcacctttgacccaaccagataagagcgaaacttctcaaaagcaaaaactatagctaacaattctttatctgttgttgcataatttcgatgtgcatcatcaagtgttctacttgcgtactggataacatgaagtctattgttcttgctttgtcccaaaacagctccactaaagctttcttaaattaaaaggtaaattttagtccggagtttgaactattggagcactcactaaagctttcttaatttgattaaaagcagcatggtagttagaattgaagtcaaacttcacatccttacaaagcaaagttgttagtggcttggcaatcgtactgaaatccttgacgaacctcctgtaaaatccagcatgtccaagaaaactcctcactgatttcatgctatctggtgcctgtagacttgtcataacctctatcttggctttatcaaccgaaataccagcacctgaaactttgtgaccaagaactataccttcctaaaccaagaaatgacaattctcccaattaagaaccaaattcttctcttcacatctagctagaactttgcaaaggttctccaagcatgcttcaaatgaagacccataaacagaaaagtcatccataaagacttccatgaaattgtcaatcatgtctgtgaagatcgacatcatacatctgtgaaatgtcgcacgagcattacaaagaccaaacggcattctgtgataggcaaaagtaccatagggacacgtgaatgtggtcttctcctgatcatctggatggattggtatttgaaagaatccagagtacccatcaagaaagcagtattacttgtgattagctaacctttccagcatttgatcaatgaatggtagaggaaaatgatccttccttgttgcagcgttcagcttcctgtagtcaatacacatcatgtgggcggtaacagttcgtgtaggaatcagctcattcttgtcattcttaaccactgtaacacctcctttcttaggaaccacatgcactggactaacccaatcactatctgaaattggttagatgatcccagcttccaacagtttcattatctccttcttaacaacatctttcagatttgggtttagtcttctctattgcttaactgagggcttagactcatccttgaggtgaatcatatgcatatacaagtctggagagatacctataatatcatcaagagaatagccaagagctttgcgatacttgtgcagcttggttagcaataaagtgagctttgcggtgtttaaagaagcattaacaatgaacagggtaagtagaatttgcaccaagaaatgcgtaccttagccctggaggaagtggttttagatcaagtttaggagctttttttgggctccactcgccaactgttgatgcgtttgtagatgtgccaattaactcctcttgagcaactaattgcatcacgtgctcatttctatcgagcagcttaccatacccgtcgggaactttgtctattgaaggaattagagcatgtttcaaaggatcaacaagtgtcatcttcatgagaaattcgtcagccagagacgagatagtatccacataaaaagtctacccatcgatggtaggcttcttaaccatcttattcatgtcaaactgcattctaagatcacctacattcaagcctattctccccttccttaaaccaataatggcaccagtagtggctaagaaaggtcttcccaagattagaggatccttaggttctttctcataagataaaaccagaaaatctgtaggaatgtagctagaaccgacttataaagggacatcgcataggataccatcgggtcgacggacagatcgatcagcaagaacaagagtgatttgagtaggtgatatgagtcaaattaccctaatgactactctctcaaataaagaggtcagttgcagcacttagggattgaattcacaaagctctcggatcacacaatagactaatgacaaatcgaattatgctaagtaaaatagtaaataaaataaagagaaacaaaagtaaacaatagcaatcgattggatggttggaaacaagaaa

SEQ ID NO: 38609 - DNA, 1822 bp, Arabidopsis thaliana landsberg
  unsure (1)..(1822): unsure at all n locations
ctaagcagtccagacccaggctcggggctatttctctgtccagaaagctggcttgtttacccctaaacatcaaataatctaagtcagagtgtgaaaagaatgggtcaaatagatttttactttatgaacaccataccgattgcataattctgctgttttcaaataaaagataaatataaaacccaaactcacagatggtttgctacactgttttcggtaatgatagagcattccccggctgtcaagaacaaaaaaccttcttttccagtctcctctcaggtttgaagatcgtttagagagataaccttgccttattgtgtgcacctgaaagcaccaagaagtgttaatagtactctctggaagatgtatcaatcatatgttaaagacgttgatcaacctttcctcttgcagcagattgcattacggcgtctatcattttgtgagagcttctaccgattgcttgtatgccatctccatttggtgatccattagaaccatttgaaccccacctgctctctcgatcaacctgtcttttgtactcctgcatcttttcattaagtgctgcttgttcataatttgatctttctctggattgttgcgcatatgtcaagacctacaaaaaaagagttgatgtataagtagttttctaaatgccactatctccgcgttctcaacacatgtgaagattcatacatagtcgtagaagagaattatacataaaccccaaatatttagggatctatcacttgaagaaaaggaaaataacatttaaccgacctgattgatatatggttccatctgatgcaccaaaaaataagattgaaggcacctatgatgcgagccgacacaaactttcaaattccaagtatttctttttttttggcaccggtgtctcctcagacatttcaatgtctgttggtgccaagagggaaaagggctattaagctatataggggggtgggtgttgagcatcttgtggcacagtttctggtaagaccccccttctcgcttcgggtatggcgtacccctcatgcttttgctatgctcagttgcaatggtcatgacacgaactgttttagtagtgctagtacttgctggtctaagggtgtcagaggtaagaatgtgaaggttcccttccttatcgagagcaggcttgccggatttgtcccttttacccatgtcctcagcagttccgtgatctgcactcgcgtggtatatccctccgacctgtactaaggcatcaaggattgtctgcaaaccaggacaccaaaactaagtgagtcattgctactaagaacggtttctaacattcccatgtcacaaatttattgaaatcataccctcacagcacgatcagcagcttcacaggcaacaacagttgcttcaatatcaccagtatgccccaccatatctccatttggcaggtttacacgcacctgaaaatccattggcaccaaactcagaagccaattgttttaatgggttgatacaatgtgataagagaatacaccttacctggtcaaacttgccactaaggatagcatcccttgctttctcggcaatttccagtgctttcatctttggctggacattgaatgatattccactatcacttggaatctcaacgtactcttctaacttttcattgaaatatccagagcggttgccattccagaagaaggttacatggccaaacttcacagtctcactgtttcagtgaaataaaattntaataggttaatagctgagaattcattcattatatgtaactaaccatcaacggtataatctcatcaagaaaaagtgagctaggagattcact

SEQ ID NO: 38610 - DNA, 9057 bp, Arabidopsis thaliana landsberg
  unsure (1)..(9057): unsure at all n locations
atcgtctctcttttgttattggagcagaaaaacttgtaaggccagaaatggctgttcttatccaggttcttcttcctcctccgacgactatcgtcttctccaactcattttctacaaagttaatactcacgcgtcgtcttcgttgccgtatctctaattcgtcagaggtggttccaatttgattttttttttttaaatctcaattcgagcaattttgtacatatatgaaatgtgtgattttgaatttgattctcaggttaaatcagatgaaggagctccgaagttggagtataagccaggacctctcgacgatttcttcatgcaatcgttccggaacaaattggtcgaggtgagttgtgaaatcgattttttttttctggtttcttcatgaattttagtgttttgatttggagtggtaattaggttttaacattagtctaatgatcttctttatgttcaagtatgtgtaacaggaagtcgggtcggattcagagaaacccgggtacgttggacttattgagttggttaagcttctcttgttgaaaggtcgtactaggtcggagacaagtgatgctgcggtacatttctcattgagaagttatatttatagacactttaggttaaagttctgagtttttggttcttttttggttgatacaggttcgaatactgaaatcgttgtttcctccgctaattttagagctttacaagcttctcattgctcctatagcacaaggaaaattagctgctttgatggttggtgagttcttttgattcttcaatcttccatgtcaatgaaaagttgtcaaaatattggtaacaattagtgttttttgtttcccattgaagcaagagttactgtacttacatgtcaatggctcatgggaccgagcaaagtaaacatcatcgatcttcctaatggagaatcttgggatagcggggtaatgatgatactggaactatgcatctgtttcgatatgatttgttttgtcagttatttttctatcctttgataacgaagaggagtttgatgaatccaagtaggttttcgtggagaaatgtcagtatctagaagaaagcaagtgtgtaggagtatgcattaatacatgtaaactaccaactcaggtattcttctgcaatttaacaagccaatcaaccgattattactgtaacaagacatgaatttgattaatccctgaaaatgtggatttcgtttttttttccagacattctttaaagactacatgggagttcctttggtgatggaaccaaacttcaaagattatagttgccaggtacatcttgcttgccccttctctaaacaatagacatatcaactctaagttcatggatttacttatcgtcattcatcaactggtattaatcaaaattaacatgttgatgtttttgaatgttcccatttctattagcatcttctttggccagttattaacttcatgtttgaatcataacagttcaaattcggagtagctccaccggaggatgatggcaatgttaatgaaccatgttttgagacatgctcaatcgctggccgccggaaattaaaatccggggagtgtcctttagcgtaaatatatcgtttttatgtccatacactgacattttacgttgtgtaataacttgtgtatatcaacattctagctttgattacgaaagaaaacacaaaatttctttaactaagatctaatccaatttttatgaatatcaaagggtattataagaaatgttgtacatgtgaggttttacattacggtgtgaaaaagaataaaacggttgacatctataacgttcaaaggggtaaaaaattaatcgaatttgtggaaaatcaaaaaatattagaaggtcatacaagaaaggtcggacatgtgaaagagaaatagaaatctagttattttttttgtaaacctgaatatgacatctctaacgattgatctcctgtcggtactaagaagggaaccatggttgtataacaactggtttgtgacagctcagagatgggaggtaaatcgtacgtttcacctgttaacatctattgaattatgggttcagatgcgtggaattcctctgttgtatgtgtgtgaggaaactgctttagagatagcacatgagttaggagagatcatcagtctagattttcatgattccaccactactcaaatagcttatatccgtgtgagaatccggtttggaattacagatcgcctgaggtttttccaaagaatcatttttgattctggtgagactgctttgattagctttcagtatgaaaggcttagaagaatctgtagtagctgccttcagaatgactcatcacaggaactcatgtccttaccgtcagattgagcctctaaatagaatgactaactctactgctcaaaggaatgttagagaagaggtgcccatgagagatgaaaatctgagatcttcaatgaatgcacaatctcaaatgtctgagagttcgattcctactcctattgatccacctccaaggattcctcatcctcctttaaatcctgatgaattggtggctgcatattaccctcatacaagagctacctctttaccaaactttgcaggtcctttgcctcaggtacctcttagaagaaatgtggatgaaagggattctaacatccagcctttctccggacctgcatttgcagcacactctccacgtctggtggaagtaggtgaatcatcaaggtaaggtgagaatactcagaatgttcacacggtggaaaagggggattcatcaaaaagaaagaacatgggtggtcccaagtttaaagatgatgcaagaaagtccaatgaagatgagcatatgaatggagggattctgaaacctccaaaaaagcgttgatcactctgctataattctgtcatgttttttgatttagttgctttcagttcaatcaagcagccacaagatatgaagaagatggtatggcctaatatccttttttggttttggcatacccgaagtgtattgttatgtggtgtaatgctctgctctaattacccttactatannnnnnnnnnnnnnnnnnnnnntgactctctagttagataatctaatgttgtaagtggtaaaagtgtgtgtcaaactttgaaagtggatgttcttccactgttgtatcgtttacaactgatgtttttaataaaaagggtaatacttatgagaaaaaaaaaagacatctctaacgatcaaaagactggacaccaggttcagtttgttttcacagtaaatgcaatttaaccatcaatttttttcactaatttttgactcttcctcagaaaaggtaggatgataggatgataagtaaacaaatttaggaatatctgttttcaaacttgtatatatattattattttttgtcaatagtttttatttagagatcaaaatagtcaatctcaaaaaatattgtttacatatatggtatgatacggtttgatacgaatttttcgtgctaaattatctacttttacatttgcaatacgaaaaattaaagataaagaaaaagaagtgaactcttccttatcgctctgaaactcctccaaatacgatgaaaatgctgaccatttggttgggaaagacaccatcttcatcaggtctgaacagtctgtgaaaaacctacttcttggttgtcggcaccaatcatacacttcattgtccagaataaagcgtcgacttcggcatggagaggagaaagacttctacgaatattagcagctccatagnnnnnnnnnnnnnnnnnnnngtacaaaaccaccctatacctgaattttttttgctttctttccatgaaccgtccataaaacaacgaaggctagactacctattatcttgtgagatatccctcacccgaatttgtttttccgatcacaaagaaacatggttttcattgttgaactcaacttgagctaactgccacgattgtgcctatatttctgctagatataacacatctaacggatctttttcgatattttcaaatactttttcattcattgctttccaaatataccaaattatccacagatatgcgaatgaatcaaattctaaagggattcttgagaataagtgatccaaatttgcataaatggaagaagtggaaaaaacccttggtaccgtaggaatcttagaaagagcccatatttgtcttgccggatggcactgaaaaagagtatggtttattgtttcctctatagtgccacatctgacacatcctgaatcacaatttattcctcgtctccgcaaattctctgttactggcacgcagcctgctaatatttgccataaaaaatggtgcaacttaggcgggcattgcactttccacacttgggctttgagagctttgatctctgggccaatggaagaggagttaattcccaagatttccatccgtgctgtatggtagccggatttaactgtatagattccggtttttgtgaaatgccaacccggggaatctgcccttgttgacgcacccaagtgcagtgcacttattaacgagacatcttccggatcaaaaagcttttgtgaaagatcaatattccagaaatttgtccgtgagtctataagatttttcaccttcaaagaaggatcaaaagcgtaaccattttttaatgctggtctcgggaattgaattggaatccacggatcctcccaaactgagatggattctccagaaccgactcttttaataagtcatttattaaccagagatctagctgagcaaatactcctacaaccatatgatggagagtatgattttatattatccaaagggttggatttcagaaaataacgtcatttaaaaaccctcgcaaagagtgaatctggaaccgtgattaaacgccatatttgtttagttagaagagccgaattaaaatcgccaacattatgaaaacccaaaccctcttccgatttactataacacaccttatcccatgccattcaatgcatacctctagattcaccatttgaactccaccagaattttgcgatcgcactcgtgagcttcgatgtgattgttttcggtagtctataacaagacataacataagttggtaatgccgtagctaccgatttaatcatcacctcttttcctcctttcgataaaaacttagctgaccatccatttatcctattttgcaatctatctctaacaaaagagaagatttttgttttagatccacctagactttctggtaaaccaagataggagcccataccaccaagatttttgattctttatgttgcttttatttctgcctgaagtgaatgatcgaccttatgaccaaactgtatcgaagactttgtaaaatttatttgttgtcctgaaaccgtttcataatgctttaaaatttccaaaattactccacactgctttttgctagctttgcaaaagaataaactatcatctacaaataacagatgaattaccaagaggcttgccgtaactactttcataccagtaatcaatttttgttgttaagaataatattaacttatttaaccttttttgtctttgttttttttttaatttctattaaatgtatgttctaaaaatataggtgattttgaacaaaaactgaatttcaccagctcatcttaaaacagtgacaccgccggtcgaaaccaccgtttttctgatcgtttcttttccaaatcattcggcaaaaattgaaagcgaacctttttcttttcttccttcctttcacctctttaatcataatcaaatcagtcaccaaaagccacagataaatcccaaattggtttcatcgattataagcaggaaaaaaattgatcctttagggcacactagtttcgtcatcttcttcttgtgggccttcttcttcttcttcttctacgacctttaaattgacttttctttactctaatggaatctccttttcctccctctacgccactcgtttcgaatcagagtttcaggtactcttctgggcaattccccaattttgctcttataatctcaattcgattcttggttagtttttgcttaatttccacaatcagacgaaattcaaaagctttacttatgggtttgatctcaattactacaaaagcttgtttgatttcgtcgttttgctcaaagatttgaactttctgtgttgcatcttcgatatgatcacttctagttacttatttggattagttcttcttctccagtgtcagggaatgttagagaaagtttaagcttgagtggtagaagttgaattgtgtttgaatttgataatggcacgaaaaggaagtcatcagaagaatggaatggataaccaaacgaagcaaaaaaagaagactgcttctgattctttgctgtctaataagggacaagggaaaaataatgaggctgagagtgttctgaaagagaattgtcaagatgataagcagactaaaagtagtccagtttgtgaaactttagaaagagatatggatgaggcaaaaggcgctgcttctctcaaggatatagatcagtctgttgcttcggagagcgatttagctggaggtagtagacctcgtaatgaacctggttttacaacagaagaaactagatatattccgtttggtcgtgaacacattgacagtgttatgagaagcttgctggatatattgagcacgaatagcccgtcagagaatattgagttagcatataatgcagtactgaggaaactgaggatatccactgctactgtatcaagggaaatgactaagtgtatggaaagacacaggcctttgatagattctgtcaaattacgagtatataaaggtcgtgatcttgttctaacgaaaatgcggcaagtattcccggttgtcttcaggtggcttatgcactttggcagcataattcttcttctatctctggtttggttggactgtgcaatccggggttttgattcattcattcggatgggaacagcatcttttttctctatcatgtggtgtggtctcttttcagcgttttcgatgttcggcatgaccaaatttatactgatttcggtaagaatctcaaatgtgatttctttatatgtttactctttatgcatatgttaaatattcgataaatacaggttgcaactgttttggtggcattgttcattggcttcgtagttgggtctgttacgcttgccatttctggtttggttttgctatggctctatggtagcttttggacaacactgctcttcctcttctttggaggtaaaagtccttcctgtctcaatcttgtagcaacgaccaatctcttgcattattttgtctaatacagtgtgcattgttcgttaatataaaggtctggcattcatgatgaagcacgagcgcgttgcactgtttataatcacagtgtattcagtctatagtgcattgagttatgttggatggctaggtcttctattggcttttaatcttgctttcatctcaaccgatgctctcatatatttcttcaagaataaaataaatcagcagagcactgctgatagacccactgagcccgtaaatgattcatcttttgaaaatggccctggctttccgggagaccgtggcccaggagtcgcgtcaactagcggaacagactctgagttaacatctgaagatgaaattgctcggttactgaattgtcctgaccactattcagctttgggcttagctcgatatgggaatgttgatatggcttatctcaaacgagaatataggaaaaaggtaatgctgcttatttttctatttgaagtgaatgtttattggatactcctgagcagcaaaaaggtatgttgggtttataagcattgtggatgattcaataggcgatgctagtccatcctgataagaatatggggaatgagagagcagctgaagcttttaagaaacttcagaatgcatatgaggtaatgttttgtttccctttccgtttcatcaatttgtaatcgctgcatcaagaacccgcatctctaatctccttagctggcctttaggtattacttgattctgtaaagcaaaaatcatatgatgatgaattgaagagggaagaactactgaactactttcggaggtttcagaactcttctcaaaaggtatgtttattgttgtcttactctgaagtgcatctttcttgcttaaagtatcaggttttttgtccttcacacttgtaaacaagtaggcatgtttctctctactcggatatatgtgtttattttaagctgcaatgtataatcatgaaccaggacactcggggacacggtttctctgggtcgggttttggaagctcagaaggtgaaggagaggaagcatttagagagtgtagacagatagcgtgtaaaaaatgtggcaatctccatgcctggtttcttacaaagaaatcaaaatctacagctagatggtgccaggttttttccaactcttcccacctgcatctttaagatcctatatattacaccaattatgaaactacttgagagggaagtataatacatataacttaaactgatttacacgagctctgcttttgtatctcaaggattgcaaggaattccatcaagcaaaagatggagatggttgggttgaacaagcttcccagcacgtcttgttcgggctatttcaaaaggtattattttgtattcaaaatttcaattcatgggatagatggtaaattgctctatactggaactagatgctcttcactggttgattctcaagaagacgattttgtacaatcagatgacttgattgatatgcttctcatagtcatatgaaaggatttgttgttttaatgcaggttgatatgccgcgtgcttatgtttgtgcagacagcaaaatatatgaagcttctcagtggtatatctgtcaggtaccaaaaactttcgcttgctttcggcattttcataagagattgtttggtattttcttttatcggaatgattaaaatggttttgtttgatttgtcggaagggaatgagatgtcctgcaaacacccacaagccgagcttccatgtgaacatgaacgcgacagctgccaaacgagggac

SEQ ID NO: 38611 - DNA, 1710 bp, Arabidopsis thaliana landsberg
tcaaatccagataatatacctacaggagctagcacacagttgcttgcaagcgttaaaaaaaaacataggttgagtatcccatacttactcctcacacacggttgatacaatatctgtgttctcgacctccttcaactctttctggatatagtacatgaaacagaaagagagagtaaagctatttttagtaagtgttagagctcactagtaggaacaataggcaaacacattatctgtgcaacagagaaacttgggagaaggttaacttttaacatgcctcgatagatgataaccaagagagaatgatactaattggactatgatcaaaagtattcttgcacatccctaagaataagatcaacagagaaccattccaatagtggatccaaagagaacccagcagatttagattttaggaatacaattcatagagtcataaacaagactgactgaaatggtgccacttattgtcaagagaactaccatgctcttctgattggaacagatctgccatactggtttttgctttcacaggacacaatcttagcgacctttacctaattgttggaacaattgatctaaaaaggataattgagctatccacgagagacctacgtcggaatttgaaagagatacgagttagtttagctacctccaagaaagcgacttcctgttcaacgcgggcaagctctgcaaggatcctgtgcttgcccccgccgtgagaaacaggctcctcctgctcgtaaaccacagtttcctctcgcatcctctcgctagcaggtcgcagatctgacaacgtcagagagagtctggtcttagtccgtacaagtttgaattgtcgtcgaagtctctctctctctgactcaaatcgacttttcccttccatttgcagaaaaatgccaaaacgcccaatactattatttgggccaattcttgcaaatgagcccatgggctcaacaaagggatatgtgttgtcgcaacaaacaacgtgaccgtacataaacatgtggttggagtcagtactgactctgttagagttagagggtttagtcacactctcattctcgtttgtgtttttgattggcggagaattggtgatagataagcttcttcttccctcttctcaacttggtggatctgtcatcgatggcctctttgatgctcaacggggccattaccttccccaaaggtttaggttcccctggttccaatttgcatgccagatcgattcctcggccgaccttactctcagttacccgaacctccacacctagactctcggtggctactagatgcagcagcagcagcgtgtcgtcttcccggccatcggcgcaacctaggttcattcagcacaagaaggaggcttactggttctacaggttcttatccatcgtatacgaccatgtcatcaatcctgggcattggaccgaggatatgagagacgacgctcttgagccagcggatctcagccatccggacatgcgagtggtcgatgtcggcggcggaactggtttcactactctgggcatagtcaagacagtgaaggccaagaatgtgaccattctggaccagtcgccacatcagctggccaaagcaaagcaaaaggagccgttgaaagaatgcaagatcgtcgagggagatgctgaggatcttacttttccaaccgatatgctgacagatacgtttctgctggacaggatcctaatcttc

SEQ ID NO: 38612 - DNA, 206 bp, Arabidopsis thaliana landsberg
tcaactagctggggtggggggtcattcaatactcagttatccaacaacaagcacatcaactagcatttacaatactgaggctcggatgctagggttggtggtataactggtggagtgatgaacaacagacaggttagaagggtggtttccttattccaaaaaaaataaaacccggaagtgaagagctacatttaaatgtaaaaaac

SEQ ID NO: 38613 - DNA, 8430 bp, Arabidopsis thaliana landsberg
tctccagttaatttctccacgctcacctctcttggttttccaataaggtcatagagaattacaaatatctgtaacgaaagtttttttttctttacgtaagagcaatactgagtatgacatgcagtatacatattatcttaactgcagcatttattttcttaggctgcttagttagttttctgatggctgttaacaatcacaaatggaacatgggatttggatttatgtacctcttcacagtccttgctgcaaaaccacttttctcccaagattttatccaatgaatcacaggcaccatcataacgcaagcaactagggtgatctatatgaaccacatagcaaacaaaacatcatatcatttaaaatatcttgttgactctttatattagcattagggaagtattccatacatttaagttcgcattgcttgcaactgataaacttttcctccttggcatttgtgctagtagtctttagaaagaattgtccacatgcaccacaacaacatgactggcagaaccaatcaccatctggaacatcctacaaattccaacaagaacgtgttcagaaaccacaagaaaaagcggtgaagtttcaagaacggtcatagtgaaaattggtgaaaaagatcaaacctccagcccaagacaatttgcatggaaggcggatggacatccatcacagagaatcagtttgccaccatagtgacaaacggagcaaaatacatcgttctccccttgacgcaatttcatcttcaacatatcaggtggttgtgctttctttctttttttataggcttctacttggcattccaaaagagatcttccatcatccaggaaaatattggctgctccgctgcaggatgcaccattagcatgaacttcaaagccatttatggtgaaaactctacggcaacaactgcattttattccctcacgggttagtttcccctcttttctcacagttgtatccttttggttacagcatcgtatattttcccttggtagaaccacattgttgtccatgagccaggaaaaaatattacgtggactgtgatttcttgagatgggagttattactcgctgcgctctttatgttgatcgtaacacacggattttaccacgactagttactgtattcttgatatacattactgttatgagtgaccctgtttgtatgctccgattgacattatgtaaacctacagtcacttcgtccttcttaggtgtctgattacgcttactatgtcaccttacgatgatgccttgagcttgtgattttggctcgatcctgacacggagtgtcgctttctgacccggaaaggctattttgggacaaaaattgcagctatctctcgtaaagacctgctcggactcttgcgattcatactcaagcatggtatcagtagacagcttcactccttcaccaagagcgacacttctattaaaggcaggcaatgccaaaacaatagacctcatttcctgggtgctatacgtctggttttcactagacagagaaggagggttagccatccccggagtagtcagggatttatcaggttgtttcagtctgaaacatacttgacgaagagaatgctcttttagtcttccatttggtgagaggtagcgaaacctttgccttccagcttcgtctaccatatgttctatggtccatcccatatacttaagatgcatcctgacatgcatggccatgggcagtaacggtgacctgataaagctcgacacagcttgtgggcctgatttagcaagacagtcgaaaggatgccagattccaggtttcttgtgtagtatatcctttttatgagcggcagtagatttcttgctggaaatttctgttgccttattgatgtcactcgcctctgaccttatgccagaaacagaagtcaagacagacaaggactggcatctctggcttgccggtttgaaatctttgtcaatgcaggaaaattgttgttcttgtggagcaatcgttagcataccgctaagacaagcattggtctcataaaccgcctgagaagcttcatttaagagcttcaattgagggtatctttcagcgtcaaaatcatgaagaaactggtcaatggtgattctaagattatcttcaatcacctccagcatcaaatcttgccataaatgcttagtagagcaagtccattcttgaattcttacaaaaccaatcctgtctcgtatgtcataccaaagttgctttaccgaaaccgggagatagttatcttccttatatttctcaatcaaattaagaaacaaccaactcccacgacacttccacgtctctgtagcctcattccaatcttgagtaatacgtaaagattgaagatcagcatccaattcatcacccaaatcagggaaaaacaccctccttttctcagaaccattctcgtggtcaaagagcacaccttcccaccaagcatcactgaaaaacacatcgacgcagagcccatacgcaaggttcagtttagcaacatccagctttggcggcacaggtcttaaacgtccacggaaagtatcagaaacatcagtgcaatcatccaacccttctactatatcagaaacatcaacagtttccacaaaattaccagaaccatcatcagagagaatgttatcatatctgatacaacgccgacgtcgctttttagctgaagttacagttcctaaataccaagaacccagagacccctcttcaagactccttacctaaacaagcaacacaaatacttttccaggattagaagacgaagcaacattaaaagcaacatataagtttgcactaaaaatggaaactactaaacttttaacatctcaaaagctaaacaaaaagctacagagaaccaaaagggattataatggagaaacagacaatgtagcttttacaaaagttgaatccatcaattacactccacgatgaaactcaaaccttgaaaaaaatccgaaattgctcaaaaggttgagaaaatgaaaaaccctataaaccctacaatcaaaaagacccatggtggaaaggaaatagtcaggggggaaaacaacaagcgacctctattttatcaccgtcgagaagctttttccggcggagatttcgtctaccggtgctgttccagccgaatatcggctcttcttcctccgccgctggcattaaaagcttcgagtgagaaatttggagggaaaacaaaaacaaaaaacgcagtgttccgatagagcttggagaatattgaagagaagatttttgtgggtaagagaagagatttgggaggtacttgtgtgagtagcagctttctccccaagtaacgctgtactagtctctgcaacttttttagtctaatcccaattaaacagcgagattaattaaaactaaaggacattgatgttgttttttggttgatacacgcgaaaagagtggagatttttaattttggtcaatttgcactatttcctaattaaaaatccaaaatttacccatttcaccctcttatttctttatttcttctactttcgtactattaaagcttgctcatcactctttgactttgactctgtttttcactcttctcagatatagctcatgaatacgacattctttcttcggattcaccatatgacttttacttgtgaagatagtaagatactatctcattagttaccagttctttttatttacgtccatgaagaagaaattggcttccttcttttaaatcaagaagatagactaatgggccaaacctaggtctttaattatgggctttgaaacagatcattatcctcgtatagccccgcatcggtatttctggcccagaagtgcttggcgccaagtcgaagagagataattcactgcatttaggaccataaaagtcaatatggtctgtccaataaggctctgccatttggggttttgtcacagcgacgtcggctgataaaatagcaaatagcaatgcttagtcgctttcagttggtcccacatgcttcttattccattcattctagtcagattatggattcttgtgggtccttttcctaattgtacacttagacttttctacctttttcccctttttatttcgctttatatcaaaattaacctaacaatatatctcatcgtgaatacaagatcttgaccgtctgttttcagcatttttcataccattgtcttttgagtgactgacttataacaaatttttaaatattgatttgacattgggaatcaacagtgtttatgttaagaaacaggatataattatctaaaaattaataatttgtcgtgtatatatacagtatttgcactatcatattaatattatgactttacttatttattagaactgtaaattagaagaagagaaaataaatggctttgtgttatgatgtgagagagagccagtggagcagcttcgttaatgccgctgcaaaaagcattgatgggttcggttgcatgcatttggatttggtctggttgcaatacaaaacagtagtcgttttcaaaaaaatattattatacatttgcaatttattactacttttatatagtagtacaacattgtcatggatcacgaatcactatcttttaatataataatacaaacatagcgacagaaaatacaaagtttggtaaggtttgttcgaattctttccattaccgaatttaaatacacattattttagtctcttaggatatttgtattacctaatcgtctttttgttggaattgtcgaccgaaaaaaactgaacataaacgtcaatttctcgactttataataattatctcaattatctttaaactttatgataattaattttgatgaatataactcaaatcaaagctatgacaaaagagagttgctatcaagcgaaacccactcgagacggttccgattctgtgttttggtgcatgttgagattattctggggcggtgacaaaccaattaaaaagctatggttaattggttatataactctaggtaacaggcagtggttttatctttagctcgtgaatggagaagaaaagtaagtagctcattttaaaaacatgctgacgatgcatggtttccacgtcatcccaccaaaaaccggaaaaacgcgtgaagcgtgacaaaaccgatgagcgaagatcctctgtgtgaagtctaacgtacaccttcatttccttcagactttacaaattaaaattgaaagtaaaataaataaatagaaataaaaaagacgagagagaagtagaagaagaatgatggagatggtggttttgttttattatttagagtaagcttcttcatttttttaaaaacttctattattttgaccttaagaagaaagtgacaaggagaggaagaagagaaaaaaaacataatttgaggaagaagaaaaaaaattcggatttgttttttcaataaattgactaattgagtactcgtttaaaggaagtgaagagcggttttttggtagtggtggtcgagaaaagagagagtttgtctctgtgactcagaggtagaaaatctttactctttgtttctttgatttgattagtcactaatttagtttcagttgaatccatatatgtcgatttgttttagagtttgcagtttgtttttaattgttttgctgattggaaaatgagttaacaatatgattagttttcgatgttgcaaaagtggttaattatggatctgttggtgtttatttttggtttggtttgttttaaagttggaaactttgtatcccaaactaacaaactcttccttctctccttagcttaatcgtttctgcagtttttatttctgttttgtatgattttgttctatgtatattaccattttaatcagaagaaaaaagattcatccttttcaatttgttctgcaattttttttgcagtgaaatcaatagagcgggaaaagattgttgctttttttttgccatgggagttgatgagctgtctcacctcaaattctctcttctgctagaatcatcagcctgcaatgatttgtccggttttaagtctctagttgaagaagaaggtcttgagagcattgatggcgctggtttgtggtatgggaggagattaggatcaaagaagatgggttttgaggagaggacgcctcttatgattgctgccttgtttggaagcaaagaggttgttgattacatcattagtactggtcttgttgacgtgaaccgctcttgtggctctgatggtgccacggctcttcactgtgcggtctctggcttgtctgccaatagccttgagattgttactcttctgctgaagggctctgcgaatccggattcttgtgatgcttatggtaacaagcctggagatgtgattttcccttgtttgagtccggtttttagcgcgaggatgaaggttttggagcgtttgttgaaaggaaatgatgatttgaatgaagttaatgggcaagaagaaagcgagccagaggttgaggttgaggtttctgtttcgcctcctcgggggtctgagaggaaggagtatccggttgatccaacgcttcctgatatcaagaacggtgtatatgggacggatgagttccggatgtatgctttcaagatcaagccgtgctctagagcatactctcacgactggacggaatgtccctttgttcatccgggtgagaacgcaaggaggcgtgatccgaggaagtaccattatagttgtgtcccttgtcctgaattccggaaggggtcttgttccagaggtgatacttgcgagtatgctcatggtatctttgagtgctggcttcacccggctcagtaccggactcgtctctgcaaggacgagacgaattgctcgagaagagtttgtttctttgcccacaaacccgaggagctgcgtcctttgtacccttcaactggatcaggtgttccgtccccgcggtcttccttctcatcttgcaattcctcgaccgctttcgacatgggaccgattagtccgcttcctatcggagcaacaaccacacctcctttgagtcctaacggtgtatcctctccaataggtggaggaaaaacgtggatgaactggcctaacataacccctcctgcattgcagcttccagggagcagattgaaatctgcattgaatgcaagagaaatcgatttctctgaagagatgcaaagtcttacttctccaactacatggaacaacacgccaatgtcatctccattctccggaaagggcatgaacaggcttgcaggaggagcaatgagcccggtgaatagtctcagtgatatgtttgggacagaggataatacatcgggtttgcagatccgacgcagcgtcattaacccgcagctgcattccaacagtctttcatcatcacctgtgggagccaattctctgttttcgatggattcctccgcagtcttggcttcaagagcggctgaatttgctaaacagcgaagccaaagcttcatagaacgcaacaacggactgaatcaccatcccgcaatctcttccatgactacaacttgtttaaacgattggggctcattggatgggaagcttgactggagcgtccaaggagacgagctacagaagctcagaaaatccacttctttccgtctcagagccggtggcatggaatcaagactgcctaacgaagggactgggctcgaagaggagaacaaactggcaatgtgttgtgcacatacatgagaaaagatggtaaaaccaatgtttacttcttgagaaatctgcataccaaccaattagttttgatggggtgttccaagttcggttcaaatcttgtaaaagaatgtgattagtctttatggaaacagaggttgcttacaatattttagtttgactctatatgaatacaaaacaaagggtcttttttgatctattgaaactgtaccgggcgatttgggaacatataaataacaataggggtcaaaatgatattttaataaaagttttcttatccaaaacccaaaaatgtctttgctcttctgctaaaaccctctctccccttcttcttacttcacttcactcgtgctttctccaatggagtcactcctgcacgcgtcttcgtctctggtgtctctgagacccagaatcgacggtcgagattcgttcatcaacccgtcacgcgtgtgccttaatcctagtctcggccgcagaggatctaatcctactacgacggtcgtggcggtgaagaagaagacaagcgggaaagatgacactcataacttttcagctagacctgactaagccactgtggctcttactgaatccattcttctcaaagaggttcgatctcgtcgaactttcagatctttattgttgatccatcataggggttgaagctgaggccttgcttgtttttgtggattggatttgctgaagaagattgatgaagaaggtgatttactttcagagtttgctgatgctgaagaa

SEQ ID NO: 38614 - DNA, 6340 bp, Arabidopsis thaliana landsberg
aaatttgttggagacaaactacatatcggttttatttacctcaatcttcactgtgtaattgaagatgatttttttcactattttactgagcaagtcttatgattcctaacattgtttacagtttacaccaccataaataatatgaaagaacacaaagagggcaaaaacaagaagcaggaactgcattacaattccttaaaattcaaacttagaaacagccatagagaaaaaacaaaaggctttcaatttcagaaagctttaacaaaagaaagctactgaaatcctacaaagagaatgtacttatgaatcattattactttatggacgataataaacaaaaacaaacctaaacttttacttctctctactaaatcatcaagttcggtacttttcctctgcaactctcttccttcatctctgccataagtcggtcctttacgcctgtgtgtcctctaaaagagtaacatcagttgtctttctctctcgacttttgcttcagatgagtaaggctttcttttacctcagtttgtgatagtgttgtgtttcatctggttaaggtcttgttgtagcttggcgtcttcgtcatcatccgttttggtgaggaatttgtctacctgatctgcagcttgacgtccttctgagatagcccagacaaccaaagactggcctctccgacaatcacctgctgcgaaaacaccttccacggttgtggaaaaccggccatactcggccttaaagtttgacctgttgtcacattcgagacctagcttctcagcaagtgtctgtaaaatcaaaaacaagcaattggttttaaatcattgccacaagacccacaatatataagaagagggtacacaacgggaatcacttactggctcaggtccaaggaaacccatggccaagaaaacgaggtctgcttcaatgatttcctcagagccttcgatctccttgaactggaacctcccggtttcatccttctcccaactcacacgcacaagttcaagccccttcacgtttccattgtcatctcctatgaacctcttcgttaagacctcataggtcctagggtcttttccgaatttggtggtagcttcttgatgtccgtagtcaatacggaatacacgaggccactgtattcacacggaagctcattaaaatcaacaatatccaaccttgctcacaactctttttaatccaatggatgcaaaaatcttgaagaagttgctaaaaggattgagtgtagaagatctgaaacaaacctgtggccaagggtttccaggagctcttgttgagggtggctgaggaagaagctctaggtttacaatgttggtacatccatggcggatagatgttccgatgcaatctgtgccggtatcacctccaccaataacaacaacctttttcccttttgcagaaatgtaattgccatcctcatgattgctgtcaagtaaacttttggtgtttgcatgaagaaactccatggcaaagtgaacaccagatagatcacgaccaggcactggaagatctctgcaaaattaccccaataatgtctcggttagttcaccataatccatttgaacgtctggtatcataaataggaattcagcattgtttgaaacaaaatattaccttggttttgtggaaccaacagcaagaacgattgcatcattctcttccttaagggcatcaagggagtaagatgggtcctttccaatattggcattgaccacaaagttgataccttctttggtcataagatcaacccgccgttgaacgacgtcaattttgtcagtcttcatgtttggtactccatacatcatcagcccaccaattctgtccgagcgctcatacacggttactaaatggcccattttgttcagctggtcagccgcagctaacccagccggtccacttccgataatagcaacctttttcctgcaaaccacaagcagcagaagcatataaatcagccaaatgtaaactcacaacagtggaagacaagatgtatgtgagcctcacaacagtggaagataagataatatggaatagacttagaaagtataccctgttctcttgagaggaggccttggtaccatccacccttcctcaaaggctttatcgataatagcacattcaatgcttttgatagaaacagggttctcaattattccaagaacacaagaaccttcacatggtgcagggcatactcgcccagtaaattctggaaagttgtttgtctcaagtagacgattcaaggcttcttgccatctgttctggtagacaagttcattgaattcagggatccttattaccgagagggacacccagagttctcctgtaaattttcaaaaacaaaaatgttaaggatttcattcatgaaacacctagttgcaatttttccttgacatataaacaacaaaaccagtctttgacaagctgcaagaagaatacttggaaagaaaaaaggcattttatctgaggatgtatacctggtggcagaatggagttccacaatccatgcaacgagctgactgagttgtaaggagtggtccaggttttgattcctccatgacttcgttccagtcattaagacgaacattgggatccctgtacttaactccctcacgctcataagcaatgaaaccaccgtttttaacagcattatctaccttagaaggtctagcttcagctgccactccgtttcctgacatctcctcttttgacgaagcagctgccatgttcttcagttctgcaaatgcatctttctcctcgagttctttctcttcagtctcgtcagcttcctcagaagcccgctcgattgcttgcttggtgacctcttcgtgtttcatggctgataaaacacgtttgtaatctcttgggaaaaccttgataaacttgggcagcaaattctcaaagtctgcaagaacttcttgagcaagttggctgttggtgtgtctttgatgttgctggatcatcattttgagcgtcattttgtcctcctcatcttcaactttatccaaatcaaccagttcaaggttgcatctggtgttaaactttccgtccacatcaaggacataagcaataccaccactcataccagcagcaaagtttctaccagtctttccaagcaccacaacagtaccaccagtcatgtactcacaaccatgatcaccaagaccttccacaacagctttagcaccagaattacgaacagagaacctttcagcagccatcccattgaagtatgcttcaccactagtggcaccgtaaagtgctacattaccaataacgatattttcttttggatcaaagctgcttccttttggagggtaaacaacaactttacctccagagagcccttttccaacatagtcattgctatctccttcaagttctagcataattccaggacacaagagagctccaagactctgcccagcacttcctgtgaacttgatatgaattgtgtcctttggaagcccagtcaagtggtaacgtttggttacctcatggctcagcattgtcccaacagcacggttaacgttgcagataggagtttcaatgtacacggaagagatttctccagagcagatttagacaatgcaatcagctcttgatccaaagccatgtctaaaccatgatcttgtttctgaacacagtactgagcagccccaggacgaatctcagcagcaggtctgagcaaaagagataggtcaatgttctccagcttatcgttgttcttgacaacttccctatcaagttcaagcatatccgcacgaccaatcatctcagttacagttctaaaaccaagtccagacatgatctccctaacttcctcagcaagcataaagaagaagttaataacatgttcaggctccccagcaaatttttcacggagaactggatcttgggtagcaattcccacagggcaggtgttcttgtggcactttctcatcatgatacaccctagtgtgataaggggtgcagtactaaaaccaaattcttctgcaccaagaagtgcagcaactgcaacgtctctgccagtttttagctggccatctgtctgaagaacagtacggccacgaaggtcattggcaacaagagtttggtgtgtctcagctagacccagttcccatggaagaccagcatttttaataccggtccagcgagatgcaccagtacctccatcatgacctgctatcagaacatggtcagcatgccccttcaccacaccgctagcaataactccaacaccagcttcagatacaagcttaacactaatacgtgcgccaggattggcattctacaagagataaaagaaatggatgttagacaaaggacaataattcaaaaagtaagagttgggagagcataaataggaaccttaagatcgtgaattagctgggcaagatcctcgatggagtagatatcatgatgaggaggtggactgataagtcctacaccagcagtggaatttctggttatagcaatgtctcctatgaccttgtggcctggtagctccccaccttccccaggtttggcaccctgtatggcattcaagaaaaacgttagacacttgaaacagcatttagatgcaatattcacaaaacttttgacaaggcacctataactactttgtgcaaagagcattatctgatatgaaaaacaaaacattgagacagtagaaacccaaagatgtgcaaaaggtatgagaataagagaacattatgtcaagttatattttagggtacctgagccatctttatctgcagctcatcagcatttgtaagatagtagctagaaactccaaatcttccactagcaatttgtttgatcgaacttcttttggggttccttgaaccatccgtaagaggctccatacgggatggcagttcccctccctcaccttaagaagatcataaactgatgtcttagtattctttacaagagaacgaaaagggaacagcaaaattcatagagaaaaaaaatatacctgtattcgactttcctccaagcttgttcatggccattgcaagggttgtatgcgcctccagagaaattgatccataactcatggcaccagtgcagaaccgcttaacaatttcactggcaggctcgacttcatctagtggaattttcacatctgcgtctttaaacttcatgagcccacgcaaattactttgcttgttcaattcattgatacgctttgagtattccttgtaggcggccacactgttggtccgtgctgcctcttgtaatttggctattgcaagaggatcgttgagatgaatctctccatttttcctccagtgatagtttccagggttggtaagtgctgaagcttctgcacttcctggggcatagccacgggttggaaaggccaactcatgcaattgaagtccatctcgtgcaagcatctcaaatgttgctccttccactcggcttggggtaccggcaaaacatttctgaattacttcagatgaaagcccaagagcttcaaatatctgagcacctttgtatgaggctagagtagaaattcccattttggcaagaaccttcatcattccatagttacttgccttgtaatacttcttgaccaactcttctttggaatggaattccccattagatttgggtggtattttgccatcaacctgtaatctataaacggcctctacagccaaatatgggcagatagcatctgctccaaatccgacaagtgtgcagaaatgatgcacttcacgtggttcagcagattccactaccaaaccaacttgggtgcgcgcaagtgtcttaaccaggtggtgatgaacggcaccaacagccatgagggagctcacagcaacacgtgttgcagagaaagctaaacagtgaagacattaaaaaaaaaaagtaagaacatggcaaagactgatcaaagatgaataacagatcctagagtcaagagtttctaaggatgtcaattacctcgatcagacaaaaccagtaatgtgtagccctcctttattgcttcatttgcttcatcacaaattcggtccaaagtctcctctaacccttttgtacctctttcttttgcataagttatatccagaactttagtccgccagcctctgtagttcattttcttgatggcttccatctcttcgattttcaaaagaggaccttttagggagagacggtgacattgctcttcagttgtttcggttagatcgccttctggaccgatcatgcactccattgatgtaacaattttctcacgaataggatcaattggaggatttgttacttgagcaaacattttcttgaagtccttaaagcataattttttctctgtttgaca

SEQ ID NO: 38615 - DNA, 3325 bp, Arabidopsis thaliana landsberg
  unsure (1)..(3325): unsure at all n locations
ttattttttttttgtctcaatgcaaaacacatttgcatttagacttatgttttgtctgaatccaaatacatatttgtttgaatcctttacatgttgtctgaatcaaagttgtaaataaaacaagggacaatagccaaatgaaatcaaatatctcaatagtaaaaccaatacataatatatagtttcatgtttaganaatcaaatagaagaatacaagaatattgttaatttggtatacaagtgccttgttctcatccaatttttatatcaaatctgatatgcacttcttcttgtacctcttctgaagcatatctgaactgaaacaaaaacatatatgggcatatggcagtctcaatttttctcagtcttacaacactataataacatgatctttttattctacaactacaacttagacgataataacactacttgtaccttttgattctttaactacaacttagccttaactacaaacgagaatcactataataacaaaaccatccaagagagaagagagaagagagacatacaagtttccatccaaatcacattaatctatgttgtagttcaaattccagttcttaaaatgccattttcctgaaattccagttcaaattcaatttttagctaaacaaaagaaccatgaattcaattgccattgcaacaatttcatacgccaaaaccgtcacatgtacataaacttttgttacctggtcactgttgatactagatgattgatgaagatcggttttcacttttttatttccagttgttgcacttgcagtcacctataaaaaataaagtttctattatcttcatgatatgataacatttggatcagaaagaaattgtaacttacttggaattggctttttgatttaacaagaacaagaagagcatctgtcacaatgtctagcttctcttcaagtcccttcaaacgagtcttcatctctaaaatttcagtattagacgtcatagattcatgattcaaaagatacttggatggtgttactccacgtcccatacatcgaactcgacccgaaggttcataaccaaatacttgttcaaatgcatcatatggtctagactcagtactcgtcttggatgcttcatcttgaatattctgggtcattacttgggaaagcttatcctgcaaaacagacatgattaccaaagtgaaacacagaaccttcaatcaaaaagcaaagatgacaagtttaccaaagtgaatcttgcttcgttgcacaataaactttcatctgacttagtccttgatacaataaaaagttcagctcgatttggttctttgcctgtctcctcttcctaataaatggaaaattacaacaaattaaagaggattaacagaaccataaatctgactaagggtttaataaacgtaccatttcattaggttttcttgctaaactctttctttcaagtgtatgtggtattttatgattgtttcgactattaatattacgctctctcactttctttattacaacaaagcagtacatatttatatgtgatatatacaaactataaagtagggtaagcagattttaataggttttaccttagccttatcagtgaactgtatttccacaaattctctccattgatcttctggaattagtcctcgtcttgcttcaaatgctttctctatagtatttcttctatacttcatccaaatatgttgctntaagtccttacatctacctcctagtgcagataaaacatatttcctcttcctccttgattttttttttctgtttttatttaaaactagattttaactcgcggtacatcgcgagaacaatttattttttaaagttaatatatataaaagtttgtaaattatatttatttataaaatatagtttacaattgttattaagtaacttcctgccaaacccgtcccgccaacccgtccgtaaaaaactatttattttattaatgttgatcttatttatgatatgtttatgaatcattgtctaaatattttgtaattttgtagtaattaaatgctatcaaatgtttctgcggtttgatgattataatcgaattgttatagtcataaaaaaaagcaatatcaaaaatgataattttgtagtaattaaatgatattaaatattttaaaagttttattttagtaactcatcgtgtagttaatgtggagagatttagagaagattgttaaatgtcaaatatttaatttgaagattttttttctaattatcaaaagcaaacattaaaatccagttgcaagcattgtaaataaattccaactattggatttatttcacaaaatggctgcaaaaatgtatatgtagatatatcattgattacaaaaagtaatatatttataattaatatttaatatgtgtgaaaattctagaaaatcaattatttaggaataaaagagtttactttagcattttcgtattgtcaaattagtttagcattttctttagcatgttgatagagttttagagagaggcctaaaagtttgaaatcaaattaaagtttgggctaaatttaagtgataatgaacccttatatatcagaaaggatgtttgactttggtacattaggtgacggcccccagaagcatgtgtccgtgtctggcccatggaaagtggaagcttgcaaattcttactaatttatttttaggatgataattttaatttatttttttcattcttaaataaacagggttaatcgaaataccaaaatttcaaaaaaatacaagaaaaagaaatacattttagcaatacaaaagacaaaactaaaaaaaaaaaaccaaatcaatcatggattctacatcacaacataaaacgatatcttatcggaaaaacgcttgcatgtgttttagcaatacatatgagatataatatttacaagagaatattacgtgattagacacttttttaaaagtttgtccgtaattaggcacttaaaaatcattaggcactttgaataattaaaattacttgttcaccctcatatcgtcggttttctataaccaaacaaatcaaatccattttcactaaaccaattcagatttacggagcccacgattttgtagttgcctttgtgatttcaattttttttccagaatcgtaaaaatccaaatccaataaaaaatcctaaattacaatttctcgaaaaggggactccggcgacgggatatccatctcctccgtcactgtccaccaccagtgcttttcacactacactctcgtttgctctttcaaccgtaaaacaccaaacccaattctcttgtcatttcctctaaatctctgcaatttcttaaatcga

SEQ ID NO: 38616 - DNA, 6561 bp, Arabidopsis thaliana landsberg
  unsure (1)..(6561): unsure at all n locations
acattatatgtttttaaatatatacaatatttggcttagtcattttctatatttacttctcgtcaatatgatttttatatggtagaaactaaaattgaatttatggtaaaaactaattaaaaggataaatataagcataaagtcgtcattatgtgttgatatttattgatgaaaactaattactaaaattaatttcacgtgtaatattcttatagagataaatatgtacattggatcaagaaaattaattaatttagagagatattaatttatagataaattaataaaattgtacatcttttataaattcttgaatttttttgatatagaatgtagttttttctttataatcaatagtaattataagtagcaagcagttattaagtttaaaaaacaatacaattttttttatgttgtaaaatattagaattgaacattacaaagaattaataaaaattgaagaaaaaaatactacagtcatattttacatatgatatttataatatatattagtaaatttatactattattaatttatgctattggggagatcgtatatttatataagtttaaaaaaaaaaaaaattatcttattaatttatcgatttgtatcaatttttacattggtcccaacgcggaacctgaatagtttattaatttataaaaattattaatttatcgagtattaatttatagaggttatactatactttatgaaattgaaatcacaaatataacgaattttcccgtcaattcagttttagggattagagactgcaggagatgaggttttttccccactattttggttttgtgtacataacaaaacaccactataaccacttaaattttgtcagtacaaactcttagttaaaataccatatgagagattatgaagatcaaccttacataagaatatttttttttatattagcctaaagagagattacacacataaacgatgaaagtagtagagtcgctacatatacaaacacatggcatatttgatcaaaagttgacgaagctctctaagcagctggtgtctctatgactctctccatgtctcataccctcattactattttaaaacgccctttttgagaatctaacaccaataattgttttgtattcatacattaacaaaaggatgttttgcaataacttaaaaagaaataaggaaaaatgagaaagatgactcactcattcattcactcactgtcttcctttcttagtgcagcaagaagggcatttgtattgcttgatgctctctgctttggctggtgttatcttcacacacttcccatggtaccaacgttcacacacatcacaacatatccagaactcgtcgtttgtgtagtttcctccacaacttccacagagtgtgtctccatgctcatcgtcttcatcttcatagctctcttccattagtttcggcgtgctctttgtctgcccttcaattgatctctgcaacaattcaataccaaccaaaacacaactaatttattaatatcaaacccttctctgtctttgagaagaaaatactgttttgggatggtaaagattagtaaagagttcattatgatacctttacgccgtttctggatttgcttccgagatccatgcttggtttaccgtctttgatgggtttcctacccgtcactacttcaaagagagttgggagatcgttgatcagactaaatagacgtttcctgctcattgaatggaacatacataataagttcctagacccagtagcataatctcagaagactatcaaataagctcatatacccgcacatatgtaacttatgagcttcattaccagcataaacatagactcttatagaacgtaaaggaaataaaacttgaaggataactggataagtaacctagtgaataccacgatatcatcagctccgatagaacagatatgtattgaatgtagtagccatttctatatccaaacgatgcacaagttcaaaaaacagaaggattagtgaaaaatggtatgcatttaaagaaacttaacctaagaaggaaagaagctcattgacaagtagagttaaagtgacagaaagaatcaggaaacaaaaacaaaatagtgatgacacaagctcatgaatcatgatacagtccattgtccaaagacatattttttctcatcattaccaccacaatctagctagcacagtaaaactatcttcgacaatttataaaagtcactgaaacaagcaagaacaaaaggcaaacgtacctctcattgcgattaagacgagcgccgaagtaagaagaaacagagagtaaccaacaatcactgtggacagcaactaaagagagccaatctttacgctgcataccatctctagcgaaattgattccaagagctggctcaggtagctccggaggcacttcctcagctggaagattcacttcccatgtcccattcgggtgtccgtacaaacacagattctccatttctaagaccacccaataaacaaaaaaaggaacaaaatttatcaaaaagggtatctttttctgaaacttatccatggaaaaaacaaacacagatccgaaaaataaccatggaaagagctcgtttacccggatcgcataaagagtagaacttgtcaacatctagtaaaagagaggcaagaacaacaacatgtaaaattagaaagcttaacatttacgagaaaataggagaaaatgaggatagcgtcgtcgtctaacctacggagagagctcgaagaaaaccggagcgacgaccgctaaaatccttgaagatctcttcgacggtgcgagggttagaagactcagcggccatagatgtagtgacggaagaagcaaaaagaaagaaaattacaagtattgttagagaagacctaagtagatagatcagtggtgttagagatggattgaggtctgcatcaatggtttccaaaatccgatgcgcacggacaagagagatagagagagaccagagtttaagactttaagagtagtagtagtaaagtaacttctgtttttggtctctattttaaaatgggcctggcccatggcccatcgagttgaattctgataaaacgacgttttctctctgtatctctctgtaaatgagtaaagaagaagctgagagtgtggctttaatgagtatagtttgatcatcctcttcaggagtagtagtctcgaaacacttaggtagggttttacagaggaagaagatgccgagggagataattacgcttcaggttggacaatgtgggaaccagatcggtatggagttctggaaacagctttgccttgagcacggcatcagcaaagatggtattctcgaggacttcgctactcaggtcctctttcttcgaattcgtttctatgcatcgattaattgaattccatggttgctggtttgttgttgttgttcatagaattgtggatttgattgatgaactacttgtatgtatgtagggaggtgatagaaaagatgtgtttttttaccaagcggatgaccaacactatataccaagagctctcctcattgatttggagcctagagttatcaatggtattcagaatggtgaataccggaatctctacaatcatgaaaatatcttcctttctgaccatggcggtggtgctggtaataactgggccagtggatatcaccaagggaaaggtgttgaagaggaaatcatggacatgattgatcgtgaagctgatggaagtgacagtctggagggttttgatctttgccactctattgctggaggcactggctcaggtattttactttttattgccaatccctatcttcgattagcttatgtttattcactgaatgacttttttttatgtattttcacatgaaggaatgggatcttatttgttggagactttgaatgatcgttatagcaagaagttggttcagacatacagtgtatttcccaatcagatggaaacgagtgacgttgttgtccagccctacaactcactgttgacgctgaagcggcttacgttaaatgctgattgtgttgttgttcttgacaacactgcattgaacagaattgctgtggagcgtctacatttgactaatcctacttttgctcagaccaattctttggtgtcaactgtgatgtctgctagcacaacaacgttgcgttatcctggatacatgaataatgacttggttggcttgcttgcatctttgatcccaactccaaggtgtcacttcctcatgactggatatacaccgttgactgttgagcgccaggttagatatctcaatcagttttataactaatatcatcaaaccatttttatgggaagctgctgttatctggaacatgacttctgaatgttatgattgacattttcattgatttcctactctcttatgtgaattgttcttggcaggcaaatgttattcgtaaaactactgtgctggatgttatgaggagacttctacaggtgagctgtttgctttctccagtcttttttcgaaaattgaattagattttcttctaacatgattgtattcgcagacaaaaaatatcatggtttcgtcttatgctagaaacaaagaagctagtcaggcaaagtacatatcaatattgaatataattcaaggagaagtcgatcccactcaggtacttttatgtactagtttttttgttcgatatattgaggatgaatcggtaattctttcttgttgatgttatctgctctgttgtctcactacttgatattaggtgcatgagagtttgcagaggatacgagaaagaaagcttgtcaatttcatagactggggaccagcaagcatacaggttctaaccgaattgcgtcgtcaaattaattattgcttttggatttaccatggacttgcatcacaattttttccatatcttactctcaacaggttgctctttccaagaagtccccgtatgttcaaacttcccatagggtaatcttatatcactctatatatatctgtcatgcactcatgctgagagttggtactccttacagttaatgtctaaggctgcagttcctgctttagtagatacatcgaagactcttaagtttggtggtgtatttgatatttcaggtcagtggtcttatgttagcaagccacactagtatcaggcaccttttcagcagatgtttgagccaatatgacaaattgaggaagaagcaagcttttcttgacaattaccgaaagtttcccatgtttgctgtaagttgactgctcaaatatatcggctgatgtttagtgcaacccaccctattattagcattgacagttaatgttgaaatcatgagaatctacatgttgatatggacaggacaatgatctttcagagtttgatgaatcaagggacataattgagagtttggtagacgaatataaggcctgtgagtctccagattacatcaaatggggaatggaggtatataagctaagcttttgccatctatagtcacacactaaaggaagaacttataatgattatcgaatatatgtgactctctcaggaccctggacagcttatgactggtgaaggcaatgcttcaggagttgcggatcctaagttagcgttctgaacaaaaaataaaaactcaagagtaagtcatatgatgtttcacttttaactgagatatttcaggtgatcataggttttcttaaaaatgggttttggtaggagcagtagtaagtgttggcacgtaaaaccttggaatagtggtatgatgtggatgagttttttagtctgttagatgaatgtgtgtttcctgggattgagagcacacaaagttgcatctcctcactcctcaggagaaggaatctagaattgtaatatttatgggtgttttagctcatgtctctgtgatcggagtatcatgttctccatgtgtggttaaaagactcgaaaactctagaaagcaagaagcatgttgtgttgatgaaggaattgggtttaatggattctattttctttgtatatatgctgtgatctaaacttttactagtgccgtgttgatcatagtaaattctatcggtcaactctcctttgagtttctttttgcatacgannnnnnnnnnnnnnnnnatcaaacttaaccaacaatataaaatcatatttataaaaaaaaactttgcaagttgaattgaatttacttactatataagaatttaaatttcgaggacctcatattttataatataatgggattaggcaacaaattacactaatgattttccaagaagtcgttttagacgcgagtatttgtaaattagtaagcaaataataaaaagagatgttgacaaaagaataaacaatccgacatcaactgcgattaatttggccttatgatgaatagatattactttttagatatcgaaagtgtgtgcaactttgtttggaagccaagtgcttatctttcttcttattgtgaaactaagcagaatcttacgagtaaaaaccaaaatctgactaaagacctataacaacacttacttactagccgatacatatgttacactcaaagcataaatttttataataa

SEQ ID NO: 38617 - DNA, 4488 bp, Arabidopsis thaliana landsberg
cgagcatccagctaatccaagttcagcacaacccgttctttggagttacacaaaggagagtatggacgatttcgtctcctcctacttcacctgaaaactgaggtaacaccacctctccattgtatataccataacatctttttatttttctttgtgtgttttgtgttttgatcttgaattctctttcagatttttattacacaagggactttgtaatttaattttgggggagggttcaagacatggttaacattgtattctcttttcttatttcaaattttgcatcatctaaggcatagaaaaatcataaaaatttgaaaacattttcagaaaattatttcataaaaaaagaatgtcatgtagattgcatataattttgggattgtatatagagtgtttgcatttaggattgctcatttacataggggataatgatgatttcaaaccgataagcatgttttgattcaatgaagtaaattcaatgcccaggttgctagttctctgttgcataaccgattgtatctttgaaataagaccgcaccttgctttgaatttgtaacttgactatactactttgatcaaaactcgcttttctgatgtcattccctatctattagaacctgaactgaaattgcaattatcatgtctatgcattgtttatgaactcatggctaccatatacatacttggatcatcttattcacttcatcactgtctgttaatctaagcaatagcgccaaatttataataggtttttagtcaattatcctaaaacaccaatcatgtcgttgtagtattttaagttgtcaatccaaatgggtgtgatgctaacaatcaagatgtgaatagagttcacagagtcaagccaagcaaaaacaagttttggggtgttctagcagtcctaagtgaacatgcagaaaacaaaaattcaagcagtaatagtaaaaacaatcgaccaacacagttttgtgccaagcactaggtgtggtcgagtgacaggtcgagtaacagatagaaaatgttacagggatattcgactgcacagtctgttgccagacaactgggtggtcgagtatcaggtcgagtaacagtaaagaattgcagattctaagcaacagatgacaagatgcagtaaacaacagtagagtaaacaataaattcaatcagataaagaattcccgaggatggggtaattgagtagtttcgtttcctcagtttacaggtgattgacatgctcaataaattttccttagacaacaagttcattaaccaaatctaagtgccaccgcaacagagaccctcaagttaacctagtcccagactaaatcagcattgacgagagctaacctaacaggcattaggaatcaacaagttaaagccaaaacgctccctgcaaccaataccttggtacagagccacgaatctctgtaattagtggttcagacatttcatcgaacaccttttgggcgcggaaatgtctgggctcaaattccagttgatcagaaagcaataggcattaagaacaactaatccagaagggatctatcaatcaatactcaatcatctagcatactaagaattctacactactctaacccatcctcagaaacctattcactcctcaaacatcataacagaaggcataaacattgaacaagttgaaaacatgctaacaacagtgtaacagcaggatgataacagaatgaacaacagtaaacgaaatcaagaacaaaagctgaatactgaagagaaatctggattacaaaaagtctagaacacaaggtctgcggaaataaaactaggtaaaaaacttcttgtctgcgaaaatgagaagtacatgctacttatagcaaaatatcccgaaaccctaatactcaaaacgatgatgtatttggacgggttaagaactgtactcgacccaggtggtcgagtgagaggtcgagtgaatagctggagtcttcttttcttccttgtgctcgagtgtctggttgagtgcggaatgaagaaggctctgaagcttgtcatcgagtatgcagtcaagtgttgtgatggcgatactcgacctctaggttgagtgacgaggtcgagtagtggtctggcagtgaaggtgaaggcactcgacctcatggtcgaatgaagtgatcgagtgatggtctggtgatggagatgagggcactcgacctcatggtcgagtggtgaagtgaagtggtgatgtcctctgctcgacctgtgggtcgagtggtctcttgagatcctgaagctcctactcgacctcttggtcgagtggtttgtcgtgatcaggtccgcttcttccaaatagctcgtcaacagctccaaatcacctgaaatcaacgcaaatatgcaacatgcatgcaaaactatcctaaacatgcaaagtgatgacaaatgatgtgaaatggtataaaacagtgatgatatgatgctaaagtaatgacaaatggatgctcaaacatgcaaaatacacacttatcagaaacactaacaacgctatttacaatttctaaccaataatttgttggttgcagtatttttgggagaaaatgggaataagtgttgtctaaacacccctaatccatctctaacttatataatcagtcaaatgcattgaattgtgatacattttcaccatagaaacactaacaaaactatttactgcttctaagctaatttttgtgggttttatcctctttttgaagaaaatgggtataagtgttgtctaaacactccttatccatctctaactcttataattagtcaaatgcattggattgtgacatattttgaccataaaaacactaacaaagctttttaatgcttctaagcaattttttgttggttttagcctcttttgggagaaaatggttataagtgttgtctaaacactctttatccatctctaactcttacaattagttaaatgctttggattgtgaccataaaaacactaacaaagctatttattgcttctaagcaattttttattgtttttaacctcttttaggacaaaatgggtataagtgttgtctcaacacttctactctatctctaactcttatgattagtcacatgcattgcattatgacacattttaaccatagaaacactaacaaagctatttactcattttaaacaattgtttgttggttttagcctctttcgggacaaaatgggtataagtgtttgtctaaacacttctactccatctctaactcttatgattagtcaaatttggatttaatttaacgatagaaacacaaacaaggttggtttctgtttctaagcaatttttccctggttttatcttcttttgagaaaaatggttataagtgttgtctaaacactctttatccatctttaactcttatatttagtcaaatgcattagattgttacacattttgataatagaaacgctaacaaagctatttactacttctacgcaattttttgttggttttagccgcttttgggagaaaatgggtagaaatgttgtctaaacactgatactctatctctaactcttatgattagttaaatgcattggattgtgacacattttgaccatagaaacactaacaaagctgtttattgcttctaagcaattttttgttggtttttgcctcacttgggatcaacgggtataactactgtctaaacactgctactccatctttaactcttatgattagtcaaatgcattggattgtgacatattttgataaaagaaagctatttactgcttctaaacaatttttattttgttttcgcctcttttggaagaaaatgggtataactgttgtctaaacactcctaatccatctctaactcacataatttgtcaaatgctttggattgtgacaaatgttttaccatagaaacactaagaaaggcatttactgcttctaaacaattttttgttggttttatcctcttttgggacaaaatgggtataagtattgtctaaacactattagtccatctctaactcctatgattagtgatgtgcattggattatgactcattttgaccatatttacactaacaaagctattgatcgctgctaatcatttttttttgttaattttagcctcttttgagagaaaatgggtctctgtgtcgtataaaaactcctaagctatcagtaactcttatgattagtcagatgcattagattgtgacatattttggccataataacactaacaaagctgtttattgctactaagcaattttttgttggttttagcctcttttaggagaaaatgggtactaagtgttgtctaaacagtcctaaggcatctctaactcttataattagtcatatgcattggattgtgaaacattttgaccatagaagtactaacaaagctatttactgcttgtaagcaatatttagttggagatagctttctggggataaaacgggtattagtgccgtctatcactcctatacatacttaactctta

SEQ ID NO: 38618 - DNA, 4085 bp, Arabidopsis thaliana landsberg
aacgtaagccacgtgaacttcgatttttcatcaatgaaggttacaaaatacttattattttctctagataagcaaggtgatgtccacacatccgagtgaataagatcaaaacatttctcatagatagtgatagatttgggaaacacggatttgcgatgtttaccaagaatacatgcttcacattcatcatttttaaaagaaatacttggcaaccaaagttttaaagcgcgagagtgaggatgacctagtctagcatgccaaatttcactattcgcattatcaagaatggaactaaaatgagaagataagggaacggatggctttgtgtcttcaagaacataaagtccatcctttgtaactccttgaccaagcactctactagtctcaatatcctgaaaatgaacctcattaggaccaaagatagcataacaatttaaatcggttgtagctttcttaacggatagtaagttagaggtgaatttaggcatatagaaagctttagagctttatcaaacaaatctagatcacctactcctttaaccggaattctatcaccattagcgattactaaatttcctaaagccggttcaatattacttattaacttcgaatcactaatcatatgatgagaagctcccgagtcaaataataagaggctttaaagagctaagggcatgataagatttaccggcggactcctttagagccttaatgagagcttcgaggtcggaacgcctcactaggtcagaggaagctgccattgctgccccattacctcccaagtgttggtttgatgttccggattgctcttgagttccaaagttctctccggttacttgatttgctcttggttctctccttccgggtcttaggtgagggtgaagtgtccaacatttctcctttgtgtgaccgcttctcttgcaatgttcacattatagagcctttttattgttgtcatacttgtagttccctcggttagccgtagcgagatcacttagattgactgaagctagctttcctttgttcccaaataatccgagtgaaccttgttcctttttgatttgagagcatacttcctcaagatttgggacttgtcagctcgaaggaggtgcttgatgagatcattgtaggtcgagctcaaagtaaggagaagaccaaacactttatcttgttctctcctttcgattaggacctttggatctagagtgttaggtctcaacatctcaagttcggctcaaagcgacctaaactttccaaagtgttgagtgaactccatgtctccttgagaaagatcgttgatggctttctttacttcaaacactcggcttaagttggactggtttccaaacacattgaagagagtttcccatagctccttggcggtctcacaatatgagtaagtttcaagaaggtaagcctcaagcgagttttggagtagagctaagactgattggtcctcttggaaccatttttcttcaccgacaggaactatctccatgccttctcttatggtcgcctcggatggtgcttcactcgttaagatgtgagcccaaagtcctcggctgcacaaggttgtcttcgtggttcttgcccacagaaggtagttcactcctttgagtgcaaccggaacaaacaaagctttagtgttctccatggtttagatctgaacggaccggaggaaaaagcttttaaccgaagagtaaaaggactcgttttatagaagaggaagaagaataagaatgatgtagagtagaatgagtatatggagctttatggctctgataccatgtaagaatatggaactttaggttgcgagaatgggactcttgattaagagggttgagagtgagaaatgaacataaggaagagatagtattacggaaatagaagagagattgtgagaaaagagattttctctatttctttaaaaacatacataagatacaagctatatatggacattaggtaagtaaagatctcctaagaatatgctaaacacgtcgcactctatacaagtccacatcgtgtagacaagtcactatcgtactaaagaaagagacatgacctaacgtttggtttgctttaaacacatgtgatcttcttttgacttgggcgcttaagcttcaacggctacatgaggagtcttctaggtcttctagaagagcttaaggtgaagaagagtttatatgggcttctctcattgtgatgttgtacggatgggcttctcttcgtccgtatggtcgtttaggttaacttgcggaaggggtttccttcattaggttcaatactccccctcaagcttaaccggagatgagtcgagattaagcttggaaccaaattcaaccacctcattaaaaaccttggtgtaaaaaaacctcttgggataaaactacacacaagggaaaaagagtatgggatatttgataagaggatcatggccgggtttagggctcttcttctacaccttatcttcttcttcttcttcttcttcttcttcttcttcttcttctattgcttcttcttttccttgtttttcttcttcttcttcttcttcttcttcttcttcttctttcatgttctctggttgtgtgatagtctccggatttgaggttcttggtgttgtttgagtctgaatattacttacaccaagtctttcaaggatgatccggagatttgtagctctatccgagggagagtgagtaagatcttgaatatcttcccaattcttcttatcatagtagcttttagactcgagaaacttcacatctctagagataagaacttttcttgtttccggtacataacatttataccccttttgattaatagagtaaccaatgaacatgccttttgtactctttggttgtaacctgttcctttgttctcctgaaataagaacaaagcatacacacccaaatactcgtaagtgattgataaacggtttaactttattaagcacttcaaagggagaagagtctagtaagatcttagttggtgttcggttgattaagtaggacgctgagaccaccgcatcactccaaaaatgttttggaacatttgtatggaacatcatggctcgtgcgacctccataagatgcctattctttctttcagctactccattttgttgtggtgtgtatgggcagcttgtttgatggattattccatgtttgtttagatgttgtttaaaggcatgacttgtgtattcccctccgttatctgaccttaagatttttatcttagcatcataatgattagtcacataagtttgaaagttagtaaaagcttttaggactctatctttagaaggtgataacgtaagccaagtgaacttcgatttttcatcaatgaaggttacaaaatacttatgattttctctagataagcaaggtgatgtccacacatccgagtgaataagatcaaaacatttctcatagatagtgctagatttgggaaacacggatttgcgatgtttaccaagaatacatgcttcacattcatcatttttaaaagaaatacttggcaaccaaagttttaaagcgcgagagtgaggatgacctagtctagcatgccaaaaatttcactattcaccttatcaagaatggaactaaaatgagaagataagggaacggatggctttgtgtcttcaagaacataaagtccatcctttgtaactccttgaccaagcactctactagtctcaatatcctgaaaatgaacctcattaggaccaaagatagcataacaatttaaatcggttgtagctttcttaacggatagtaagttagaggtgaatgtaggcatatagaaagctttagagcttttatcaaacaaatctagatcacctactcctttaaccggaattctatcaccattagcgattactacatttcctaaagccgggtcaatattacttattttaggtttcgggcttaggatttagggtttaggggttagggtttaggggttgaattttaggttttgggattttgggtgtcgagttcaggttcagtgtttatgatcaactatactatgatacttagagaagcaagaagaatctgggttagcgttttggagtagaatat

SEQ ID NO: 38619 - DNA, 7832 bp, Arabidopsis thaliana landsberg
atatacagaatattcagatatggatgatgaacacatcagctttgatcactcccacggacgcggagattcgcagatttgccttctcgctttgctttttagttttgtcaacgcttcttgtaccttattggtacgaaccaagagacacttttcacagattcttcttttgaaatattcattgtcaacttctaaagtcaatggcttttgttataagttctctccaagttggtatatccgaatgagaagagttcttaagaggaccatttttacaccacaataaaaaggccaatgtttactttgagagagattcgaagtggcatttcgatattgggttggattctgttcgatttagtattacagtagtttggtttggttttaatgtaattaaaaaaggttattggttcagttcgacttcgaaccaaaccgaacagatcaggttgaagaatactttaaccaggcagttatgtgcatggattttactttggttttgggttgggatataatggttacctctaacagaaacacaatcaatttagttatcaatataagaacaaacccataaaaaatgggctttaccaccaagtttaggcgttcaaatgtaaccaccaatatttttggttactaacattttaaaatgagtttagaaacaagagtgtgagaatttgacaatgcaagtgtggtatatacgctatacattagtctctatgcatatttatgttacaatttcgagggcttcgtgttgataaaaagaacagtgaggtttctaagtcttgttgaatttaagcgtctcttggctttgggttgagctccgtctccatacttgtaggtagcttctgggttgaagcaacgccgccgaacttgcggaccaggattgtgaaacatggcagcaatacaacgtataacgtaataaagaaaaatggagttgctacgagccaccctattaactgcaataaccataggacttaatataagacttgcaagttactaaagataagatcacaaaagattaggctagggaatgcaagaagcggttcgacatttttcaccaatacgctaggacaaaaagagactcatcgtagctacttaccgcgttaccaatgcttaaaaagacttcctgagaggcttgaccagtgaaaaccttctttagagcatctgaagtcaaaggaaaatgaggtccaccagtgactatctcaccaagtcttagaaagggaccacgagacttcaataagaaagacatgaaaaggaaatcaaaaatccaagtcaggaagaaaactgatatgcatagtctttcgataaaagtggtaattcaaaagattaaaatgatataaggtttacgctagttctactggagtggcaatgatattagccaacattacggtcggagcatgacaagatgatccgagcaaggcaaaagctactccacatagtaacacaggaacacctattttataacaaaaatcacaccaaataaggaacatagcaatctcaaaacgcaacaacgcaagaagcagtaagcttaggaaatagaaaaatggcgagaaatacgcaccacagatcggaaatatccccaaggtaatacccagtgcagcagagaaagcaagctgctttggctcagtacctctacgaaaattgaaaacaaaaacaaaatcaaactcaaatcacttcgcaacatcaacatttctgcaacagagacagagatgctgatacatctatctctaacagatgcccaaaagttcctttatgagcaacatgaagatacaaggataaagctttttcctttaactattctaaatggtctatcttgcattccaataacaaacaaagagatgtttaaaaatcctttagaaactacatgatgatacaagcataaagactctatctttaactgtgctgatacatcaatctctagcagatgcccaaaagatcctttaggagccacatgaagatataataataaagactctacctttaactgttgtaaatggtctctcttgtgttacaataacaactaaagatgttttcaagatcctttagaactacatgaagatacaagaataaagactctacctgtaactattatacatggtctctcttacaataacaactaaacagatgttttcaagatccttgagaagctacattgaagatacaagaataaagactctacctttaactattatcaatggtctctcctgtgttccaataacaactaaacagatgttttaaagatccttgagaagctacattgaagatacaagaataaagcctctacctttagctgttctaaatggtctctcttgtgttccaataacaactaaacagatgtttttaagatcctttagaagctacaagtataaagactctacctttaactattctgtatagtctctaatgttccaaattaagtaaccaacaagaagcaaaatgcaaaactacagcttttaaagaccaatgatcaacaaagttgcacatgagatctatctgattcaataatcaataagcagaatatgagtgaccaaactagtcctaatttacagatctatgtaaaagagagacaaagagtcaaagaagacaaacctacgcaagatctggagaagaggatcagtgattttcttattgaaccatgcttttaatctaccttttgataaacccatcacgattctacaaaatcttcacgaaaattaattctccccagaaaaagttaacagatttcacacaaatgaacgttgatcgatcgtcttttgcgcgtctcttcacggaaccagttgaagatgggtatttccgtaaacgggtttgcgtaatcgggtcaagtattgatttttttaaatcaggcccaagcccaaacatttaagatcccaaaatgatttaagcgacccgattcgaaaaatccggttcaattatcggttagcatatacccaaattagaattgtttcgggtttcagttttgtccgggtcagatctaaaattcgaacatgtcttcgtaaaaaacccaaaacaatatacatatgataatcatatgtccgattgataacacatgactgtacaaatattttaattgcaaacatgagcgataattttttatggaataatgtaaaaaagtacggaaatatagtacataaaaattatacaaatactaagagtaatagtttaagtgacacttttgatatcacttttaagattgataactagattataacccgtgctatacaggatcggcattaatattttgtataaatataaataatatactttatttgaattatataaaaaatagtatagtatagtataaaagtgatgccataatatttttcaatgtttttactatttgcatataatgctgcattagattgactttgtttaaaaatgttatttttataataaatacaacatatgtagttttaagtaaatgtgtaaaatttgtatacaggttgttttggtaagaaacatgtttcctttgtattagaggatatttttggcctaacttagaattagtctttgtatagtattttggttatatttgtggacctaattggggcctatattagattatctttgatagagctgacaaaaaaacggacctgataaccaacccaatatccgaaccaaaaaaccgggttagggcggttaaaattttaggaaatttccttattgggtaaagttttagtaatccagtggatatccgattggtccagaaattgctcgttacccaaaaagagtattcaaaaacccaaacattaatttaatatctaaaatattaattatatttaatcgtaatattatctaattatctaagattataattataaatctaaatatgtcaattaattttggacctaaatatccaaaacaactaaactattcaaaaattatttgttatgtttgtcaaaatttagtaaaatatattcaaatataattaaatttattaaaacttaacaaatttaaaagtttttttttgtttggagacccgctatctacatacaagtttcccgtttctatttttttgggtatttttagggtctgaaactttttatccaaactgacccaaacccaactggatccgacccgaaccagaaccgaatatttagaattattctattgggtagtaaatcatatacccattaatctcaaacccgaactcgaatgggttactcatatgtccaaccctattctctgatttaattatctaaaaactccaaaaaaaacatatgttttgctgactactttttattcaaaaaaatttacatcctcttctgccaaaatcatttcataagacatcccaaaacccttggaataatgatttcatgaatgaagaatcctaatttgaatataccaagaggttttgaaaggttttaagtttttgataggtatgtatgtgagaaggtacatccatcgtgatgataatcggcttatttataattttaacttgcattatatagcaggtaggcttatattttagttaaactaaaaacttttattgtaaagttgattataaatatatgattttaaatgtatagtaaactgcgagttgtatatgttttgttgatattatttatattgtttagtgtttaaaattatatacttgtattttgattgttaattttagagtttcacatatagtataccatcttgtattaatattgatttaaacccgtcaattgtaggatttttcagcttgtattaaaaattaaatcacatcatacacattaaaaaatctaatatgttattaattattgtagtatataagattataaattttaaaataatatgtatgaaattgaatataaatattctaattatgccacagtactcagtactttttttttttaaatctacttttgacccgttatagtattttttcatgtattgaacagtttatattcgcttttaaaaattcaaattatggcatatgcgaaaaaactctaattatttttttataatgatgatattatgtttccgtaaaaatagaatcatataaagatgagaagtgaactataataattaataaaaaattaatatgataatttagatatcaaatctaatttgttgattttaattggttaattttttggaaattaataatgtatttcgttttttaatgaaatttaatttattaaattagtatttgactttttaatttttaaagagatgaattaatttactctttaaattttatttctaatggcatacctatgtaattacttacaaaaattaaggttatatttaaaatgtacttcccaaataatatagtaggattgtcaaacggtatattttatacttcaacggtatattttagtcctgagtatactggatctaaaatatctgaatcgactcaaaataacaaattcggttcggttcaggtttatatgtttaaaactttgaaaatgttacgtttttttgaattgtttggttttatgactttcatggtttataggataattcgggttaaaaaaaccgaatcaaaatatcgttcaatcataggttggggaccttggggtttaatcaaatttcaaaaaccaacccgaatccgagaataccataaccaaaccgagctaaccgaaacaatttcggttctcttttatatagacccaatcttcccagaattacccgaaatccggaagaaagactgatcccgaatcgacccgaaaacccgaatggtcagacgaagaaaccaacacactaaaaactcttggtctctttatcctccgaattttctcgccgtcgccggtgaattttgagccctagcaccgtcgtgaattaaggaggattcaacaaatcatgcttgtcggtgagaattgtgttcacgagacatactacgagattctctccgtgaaagaagatgctagctatgaagaaatccgaaatagctatcgttctgcgattctccactctcatccagataagctcaacaatacttctcgttctagctcagacgacgagaagtttctgaagattcaaaaagcttgggaagttctaagcgatgcagagctacgtgtagtttatgataatgatcttagatcttcaagacatgatggaatcactgctgatgagattagtattgaggatatgtcagtggagattactggtgatgtgattgatcttttttatcagggggggggtggtgattacttttgtgttgattctagtgagttaggaacaatggggtttgctttgttgagagatggtgattttgtttatgttaagagattgggtgcttctgtggcgtctgttgttcttccttgtggttcttgttctttgaaaacacgagtttgggttgattctgatatgaagattcctatctaggatggtctattgtgagcaaggtggtgatttgggttggtacagaattgagtaatctctattcaagatgagtttttaagactgaagtgatcgtcatagtctggttcggaggaggagttctgattgaggatggttatttgtgattgtgtggataggttcatataggaaaagtttggatggagatgatttcttgtgaccaatgtgatctcctgcaagcttttctgttgtgagttttttgtactcatttaatatagttgttgaacaacttttagtttgtaaggaacttaaattataatgagaaacaaaagggccctttggttttgctactctttttcccctctctggtttcagttatgtctccttttaaatttgctggaagctgaatattcacgtgaaattatctttatttttgcgttcttgcgaatatctgattcagaaccttcttaaagttttactgtgcgtacgtttgcggataagaacctgactgagaagaagtgatgtaggtgtacttgcagtagtacatcaggactgtgctttctcaaaagaatggtatttcttcttcacctgaatttattttccattttctactgaatttgtttgctgtggttatatcttgccttatctgatgtttacggtgatattgattgagattagatgtagaaaattaagtggttatgatttctgcagggactgatacagattactgcagtcccgactttgttgaaagacctagatcaaggttaatgttaatagtttctggattcacttttgttatcgttgaggtgtctccttgtgttttggttgaatattgttttcaggctcaacttggttttcaattttgttgtcacaataacttccacttgttgcagaaattgtttttacactgccaaatatggatgcgatgaggaacaaattgttggtctatggtagaccgaaggatgggcgataccacactagatagagtaccatgattcttcaggtatcaatctttctaagtgtgaacgtctaaagaagctgtgcatacttgttttattgaatctatactaagcaaagttaatattcaacttttttatttcggtatacaatatatgaaagtatgtgcttgttattttttcactgtttaccaactttttgaagtatatgatcttgagataataagctgaaatagaaaattattacttgatcccataggcctatatagtggacagaatttcctgagatccgccattctctttgacataggaaatgttagggctctattgtggaactgtgtcttctcttttgaagttttcttcactgcgaagaagcttctcactgtctgatcctactacaccttgtagaatgatggttttgtggaggccacctagtaagtcctcatagtctgtgtctcctttctctcccaaaaagaaaacagtttttgacatgtcaattcctcaccttattgaaagatacctaaactgtagccatcacatcaagtcgtggcatcttcactgttgaaattatacacatagagtttatgaatgaagaaattttttttc

SEQ ID NO: 38620 - DNA, 6324 bp, Arabidopsis thaliana landsberg
  unsure (1)..(6324): unsure at all n locations
ccgcttttgattttctacaatgtaacaatgtagagacaatgcttgaagccatatttttctctacatgcattacatccaagttatgccttaccaggagatcctatagagaatacaaatacaattataaggtttcacattaaacaaatatccgtttatcaattctgaaattatattaagctatacatacctcccaataaggcagcttgaataagataaatcgtttcttccatcttgataactcatcctcgtcaacttctacttcttcttcttcttcggattcactttatgaatcatcactatcagataatagaacagtcctttttgtcttcctcccagatcctttcacatttccaaaatcgtttctcaggttttgagaaacttcatgaccagtcaaaattctgccctttctcccatgttctgattttccatcaaaccaagccttcttatccctataactattgagttggccccaatccttttctatgactcatatacacatgcttcctgctaaacttcaaccacatactatctgtgtttttaccacaaataggacagcccattttaccctttaccttgcaaccagctaagtttccataagccggaaggtcacttatagtccagagaagcattgcctttagcgtgaatgtgcttttactgtaagcgtcataagtgacctctcccttcttccacaaatgattcaaatcatcaataagaggttctaagtacacatcgatgctattaccaggctgttgtggaccaggaatgagcagtgtaaggattacaggaggcaagttatagttaactaaaagagccagccaacaactgtactgtgtattcttcatattgaacggattgaagccatctgtagacagtccaagttgcatgttccttgcttcagctgcaaatgttggatacttatcattcatcttatcccaagtcacagaatccacaggatgacggagttttccatcactactcttgttagtgaaatgccaccttaagtccttggccatttcagctgtcttgaacattctcttaagtcgcgggataatcggaaagtaccgcagaaccttctgtgggacacctttctttactacaccactgtgagtattaatcttccaccgagaagctttgcatttgggacaattgtccagctttttgtacttctttctgaataggcagcagtcattcacacaagcatggatcttttcatatcccatgtcgaagctcttcaaaaatttcttgacatcatacaatgatgtgtgcagcacattatctttaggcaacatatttggcaatgtctcaagcagctcattgaagctcttgtcagaccatccattacgtgttttaatcctaaacagagacacaatcgccgagagcttgctgtggtttaaacaagtcgggtataaaggggtttcagcatctgctagtttggctaggaattcatcttctctcctgtcctcgtcttctgctatctcagctaagtcacccaatggagtgtctactaagtcccgcttgctagccagctcttcatcaaaatattcagcagccttgtatagctcaagaatttcatcattcctctgatttgttgtacttacgccttcagctgaagccacagagtctccatgatgataccattcgctttgcaacttgtatgcctcatccatccctttggttaccagatggaccaccacatcactgcttgagtggcggtacatgttacgacagtctttgcagggacatataatcatatcaatgtcgtctagagccgcagccacatcccgtacaaaactccgagctcctctctcataattgggatcagctcttcaatgaataagtaaaccgaaatagaaacctcttaagtatccaaaacccattaatgaacctaacctatatactgtaattccttacctgcatagatgaacccatgccttgtccaacattatatgttataagcctaaacatttttgacacaaattcaaaccataaccaacattaaaaagaaagatacaacattcagacagccactttgaatgctaaagacactatgctaaagacaaccaaagcacatttgaggtatgactaaagaaaaacaagcgtcagttcaagcttcacatttgggttatgaataaaaacaagcttcacaatcacaatcacggaaaatgaatcacaatcacagacaaagcaactaaagaggctaacctgtcgtgtgagtacaataaaagcaagcttcagttcaagcttcagcaacgtttcaatcacttgcaaaaaaaaaagttgcataatcagttgacaaacgaagcatactcgacaacttgtaagtgatttataactctaattactctaatcgattcacattacccagattgatatacaagaaccctaatttcagtacctcgaaaaaacaatcacaataatcacttctactatatcaaattcgatgcacataaaccctaaatcaataatcaaaatcgattggggagagatttgagagtaaaaaggaagctcgaaacacatgcctttgctttgagctcactggcggctgcgctggtgaatgtgacttcgacggagctcgaaattacagcagaccggcgagagagaagaagatacagtcgacggagctttgaattacagaagacaggcgagaaatttgatgtttgcgagagtataattcgaaagctaagtgaatctgaaaagtttgggtttttttctgaaacccttactctaagtgtttgtcgcggaaaataataatagatctggcgggttaagttcccgctcctgcattttctatcatagcgtttataaggaactattgtaaagaaacccaaaattaatttaatctttcatagcagtgacgaaaaatgtgctatcctcgtgtgctatgaatgtggatatttgttgtagtgttaagaacttcgggttcaccatcaaagttttaagaatcatgaagaagcttggtttgtgtttttgtagtccaaattgacttgatgttttgtttatcattcagtataaaaactagaaacgcaataagaacccggaagttaaagtaggattcagggtttaaggtttaaggttaaggttttgcgtttagggtttaggttttaaggtttagggtgtacggtttagggtttagtgttagggtttagggtttaaggtttagcgttagggtttggggtttagggtttagggaatagattttaggatttgggatttagggtgtagggtttatgtgtagtgttgaggagcaaatatatttaataatttaagaagcaaaaagaatctaggttagcgttccagagttaaatatgactagatgttttgtgtatcattgagcataagaactaaaaccgtaaccggattccggaagcctaaagtgggatttaggttttaaagtttgggatctatggtttagggtttaggtttaagggtttaagtttaaggatttagggttaagagtttatggtttagggtttagggtttagggtttagggtttcgggtttagggtttagggtttagggttggttctgtgttctgggagtaagagaaatctcgatagtcccctccttctagcgccaaattgtgagagtcaaaactcgcacaatagaaattgtactaagggttttttcaaagaacggatctttgtgagattctcaaagaccaacagaattctcaattcccgcggacggtgttcttgattttattaatgagaaagtaatggttttttcgtacaagtgtgttagaatatcagaaataggtgtttttgccttcagagtcagagcgtttttgatagcctgaagttgagagcgtttttgtgcgtatcccttttgtttgttctgtgaggtgcttttatagggtccgagaatatcacctctcgcgatattctcggaagatttctcaatatctttatcttgttgaaggagattgtttttatcttcgnaagattctgggactttctgtatccggtgatatctttgaagataatctcttccggggttttcagagatgatgtgttttgaacttataccggctaagtcttttgaagttttcctcgtctaacccgagactcttccgagccgtgattaagctggcctcgggtcgtgcttgggatgctcggtccacggtatttgaggacagattcccgaggtgtcttggagcccgcctcgggacgatttgccgggttttatgcccgaggcgtttcgaggtcgggtcaggggaccatttcatgagactgctccgaagcattctcgacatcgcctcggtgtggattcttgacgagatctccgaggcgttttgtggcccggttcgggataactgttgaaccaaggattcacacaatagatttgtttagagagggaaaacaaatctagtaatttctcttcattaggtattctatccaagactcgattacaaaggaggttataatgtcttatgaaatacattagggttttgctccaaaacaaagaaagaattagggtttttagaaggtatagctgcatccatgatggacttcctacgtaccctgtgaagggatcaagccattcgtagttctcaccaggggtataaagttatgtgtcttttgtgagtatcaaattgtatcctttgagaagttcttgaggcgctttatatagggtccttaaaccgcctctctagcgatattctcggaatatttccatttatcgttaagtctgttctagaggataatcgtcctaaggatattttccttattcttcggatgctttggaaatatttcctaattcgacattatcttcaaagattctcctgtatcatttccgaaagtcccataaaagatcctattttaccggaaatgatcctttgagaatgaatggtttttacaagtctttgcctcaggtgttcttcacggctcggtggtcgtttgagaggtggcttcgagcaaacggtatgtaccggttcggggcgcgcttgatgactgtccattaagctcagttggctgtctccaaagccgatatatatgtttcccgcaccgttttcacgattggctcgggctgtgttcataggattaacacccgagccattttacgaagtctctccaggacggttgatctaataaggtcccgagatgctttgttctagcctcgaagtctatcatatatttaatcatgaggtgattgttattcttatgactgtttggttcggtcttgcttgtgggggaatccgaccccaatataaatgtatcatttttagatgattctttcgtctttttatgtgatgataaatttaattagtgtattattttaaatacatgtttgttagctttggatatgaagtcatgtgaagttcaacgatggaaaccagttcttttatttaaattcctaccatggtttctacatggatatatgattctccttcttctttccccatcatatatggatcattaagaaagaaaatatcgctctatatagtttggcttagggaattgattacagaaccaaatgtgttacttttggattaattattaaagcttactttttcgtaaaattttgaatggcgtcaatttttgagtcaaaatataaccttttggcagccttagagttcaagtataggttatctttttaatttcatgtgaacttttatttgtctatacgtgaggatgatgggaaatatttggttgagtttatattttattttcttatgataaatgacttacctctaagagtttgccaaaaaataaaaaatgacttacctctataaatttttggattaatcgttgttactaacatgacatttttattggcctattctgagattatttgagagtggaaagttgatccagtttcgcccaatagttctaagtggacaataacacacctaactgtaaaggcataattataggattttagaagtttttttattagtttgttttagatgtgcttataatttaacaacacttacttatcatgttctcttgaaattccatcacaaggttttgttctttgccaaaacgttactttgtccaataacattgccaaataaatgtcaatgttatatgttacccagttaatgcaaggtttgtgttttctagagtttggaatcatatctgcctttatactccatattgttttgaagaaaggcggttttgatggcttcaatgtcacaaccaaaaatataaaaaaagaaagcaaacagactaaatttgttgttgtgacagaaataaaaagtgaactcaaactctatgtatgtagagactgcagctgctatcataactattaaaaaagcatctgttgcggcagtggatgtagttacaaatatcatacatttataattccttcgttacacaccttcaa

SEQ ID NO: 38621 - DNA, 3830 bp, Arabidopsis thaliana landsberg
ctgatcggatcaaaataaaaacaatttctatttctatataggatagaatttctatatagaattaagaatatcggattagatttctttctattgatttatttgtttatatttatatatatgtaataatatatagatactagcattattcctgttcttaaaataaaagttgacatacaagcactcaatttgatctatttcttgatttccccgtgaattgtatgtttataacaatagggacagaattttctcaattccaatcgactaggggtgttatgccgattcttttgagtaatatatctggaaattcccgcggcttctttcttaatatcatttcgaacacaactggtacattccaaaataattgttactcgaacatctttacccttggccatgaaacctcctttggatttatgattcacctcaatcttctattttaattttaggatccagaaagaacaagaacaaaaaaaatagaagctgttaactaaaaaaaattctgaaatatttcgttacaattaatattttatttattagtaattaaataaaaaaaataagtaatacaattatttatgattttgtgaaaactatatttaaaatctttgtacagtagtttttttaagtatctgataggttccctagcaacactttttttcgttctattactaatttcattggatcctgaaccctcgtttttatgacctttccccccccccaccttttctaatttattctactaattagaaaaggtgggggggttagtccccgattgttgattgtatctctaaatttttcacccctttctgatgttaataactagaatgaaaaaaagggaaatgttaatgcatctggaaataaacgattaatctctattaataaacctgctaacgaaccgaaccatagagtacttagtaccggtgctacggaaagatatgtttttagatctcgcattagaaatcctccttctttcttctttattgtattacattatatatagtaatatatataattacagatgtacatgtaattaagaagttcttgtatttgtatatgtaacttccgtccccccgctttcaaaattagaattttaatattgtcgactagaacgatcttatcgattccatttgaaaacgtaaaggcctatttatgtaaaatttagagaataaaaaaaaaaaagtaaattttttaattatatctttgttatctgatatgagaaaaaaagaagaaatgaatttgatataccaataaaaaagaaggaggatgtggaaaacaagacaggaattctctacaatgacactgtaaacctattgaaagggatgtagcgcagcttggtagcgcgtttgttttgggtacaaaatgtcacgggttcaaatcctgtcatccctacctattactgctcagaagagcagtaacgaggtatctattttgatcaattttttttatcggacatacatttaattctgaaatttatgatatactatgtatgatatagtatatacgtacaaaatcgagtcgggttaaagaatgccctctttctagccttttcgttttttagaaaaaaaaaaaaaagaaaaacgctcttagttcagttcggtagaacgtgggtctccaaaacccaatgtcgtaggttcaaatcctacagagcgtgatttcatagattgtatcaaaattccactgttcacaaattactgagcagcagtctgaattagacctcccgcataggaaagcaagaaggaggttagtaaaaaaacgagatgttaattaattaaaagtccaactgatcaccacgtctgtattgtaaataagcagttacgaataatccagccaaagtaataggaattagacctaagacgattccaaataaaaaaacttcaatcatttgaattttcttttgttttcatttttgaaagggagaaaagagaggtactatctattcctagctcttaatctgtattgccaatgaatctcaatgaccaaaatttggtaattaacacggtaaggaactatcgaacatattaataaataccaacgaaatccttttttataaaaaaatctgcattcaattaatttcaaataagtcgtattttgcttagaccaataaacagaactgaggttatagttaaagctgctagtagaaaaccgaaataactagttatagtaggcatgaagggactcaataaaatatgtttttttatacatatgtttcttaaagtacttccctaagtttcaattgaaattttttttaagaaatagagaaagataactagttccaagaattaaaaaaattcaattgaaaatttgtgaattatcaatcattataggtggtatgaacaaaaatagagaaagataaaaagaactcaattcatcgtctttggcatctgcactatctcaggagtcagaattaacgtaacttattaattgaaaaactctttaagaaattaatcataaaaaaaaataatacataaaaaaaataactctattatctaacttcagtcaaaacatataactttttttgaatgaatatgtaaaaatttgaaaataagttgtttgattctttttttttattgaccttagaacctagaatacgcctctttctactttattaaaattgaatttactaaaatttgaactcattagattaaattaaatagtagagcagttttcttcatttaatctatcgaatgagactaaaaagaaaagaggtatcctacacggagaacgagattagtaaaaaaaaagatttatttattttaactagattttaaacgataactagatttttaaaacttgtaattagcaatttctattatcgtttcctttcgaggttttaggtttttttctttcgagattatatagaaaatagagtgaaaaacccatcacccttgtagttagttaaagaaagaaaaaaacctttgaattgtgaattgaatacaacaaaacaatgcacgcattacaaatatttagtctttttttattatttttatttgttgttctttttaattgatccaatccaatccaaaactattgttctttttcttgtttctgcaaattaattccttaaaatgaaacaaaaagtaaaaggggggatcacattatcataaaaaaatctattctacaattatgcatatgcaatgaaaatgaaatttataaatttttcattcaattaacttgggaccatatgaaaatttgcttcatgaattattagaattagaaaccaacttcttggattttcattttatctaatctttagtttattttctagtccaaaacgaataaaggatcaaagcccctatagattacagtaatttgaaaaagtgggacacggttatacatcgacaagcaagaaaaaaagaaattatgtaacaccccatttctatactaattcaaattgcgttgctgtgtcagaagaaggatagctatactgattcggtagactctaaaaatacccttggtactttattgacgatctcacaaagatgcaatctcagtgaattttaatttacttattcatcttttacagaatcgattccctacgagaatatctggagttcagcatgtactggaagcacaggatatcgcaattttgttggaattattaccagcaatgaaatctgggacattcatagcaacactataccttcattattcataggatgataaccattcatgcgtagctaatgatggtaggaggggttcatcagccatcgatcaatcgagtgcagtacagagagccgatatgactatgcatttattatatgtcgcagggatcctaagaacaagtcttttgaattaagctgatgtttataggaggacccaacgactatagataggac

SEQ ID NO: 38622 - DNA, 406 bp, Arabidopsis thaliana landsberg
tattttgccgagttccttagagagagttgtctcgcgcccctaggtattctctacctacccacctgtgtcggtttcgggtacaggtacccttttgttgaacgtcgtaaaagcttttcctgggagtatagcatgggttactatagctccaaagcgcctgttactcgaacattggctcggggcattggctttaccccttcttaccctgaaaaaacagggacacctgcgtcttgaaccgatacatcttcggtaacctagcctctccgccctcgaccacaagggtagacaggaatatcacctgtgtcatcgactacgccttcggctgacttagcctgactaccctcgggacaccttgggagacccttggtttcgggcatggatctcaccatgttgcgtactaagcacatct

SEQ ID NO: 38623 - DNA, 3704 bp, Arabidopsis thaliana landsberg
  unsure (1)..(3704): unsure at all n locations
aattgtgaaaaaataggacgagagttttcgcttatgtattaactatcgggggttgaaccgggtcactttgaagaacaagtacccattgccaaggatcgatgagttgttggatcagttgaagggtgctacttgtttctcaaaaattgatttgacgtcgggttatcaccacatcctgatagcggaggcagatgtttgcaagactgctttcaggacgagatatggacattttgagtttgtggtgatgcctttcggtttgagtaatgcacctgcagcgttcatgagtttgatgaacaacatgttcgaggagtttctggatgagtttatgatcatctttattgatgacatcctgagttagagatcatctttattgatgacatccttgtgtattctaagagtcctgaggagcacgagtgataagtgtgcattttacatattgtgaacatccatttgttatcactattgcatcatatcaccactgatttataccatttctcatcatttgtcatcactttgcatgtttaggatagttttgcatgcatgttgcatatttgtgttgtttttaggtgatttggagctgttgacgagctaattggaagaagcggacctaatcatgtcaaaccactcgaccccctggtagagtagatggttccacgacttcaacaaaccactcgacnnnnnnnnnnnnnnnnnnnnnnnnnnnnttcacatcaccactcgaccccctggtcgagtaccaccaagacaaccactcgatcacaccactcgaccccctggtcgagtatcatcacctccaccacttcaccttcactcgatcacactactctaccagcaagccgagtaccatcatctttatcactcgactacatactcgactaccagcttcagagtcttcttcattccgcactcaaccagacactcgagaacaaggaagaaaaagaagactcgagcttatcactcgacctctcactcgaccacctgggtcgagtacagttcttaatccgtcccaatattgcgtcgttttgagtattagggtttcagaatattttgttataagtagcatgtactttacattttcaaggacaagttcttatctaagttttattccgcagacactgtgttcttgaccttttgtaatccggatttctctttatctattcagtattcagtattcaatatttgttcttgatttcgtttactgttgttcatcctattaccatcttgctattactctgttgttatcatgttttcattccattcaacgtttatgcttttttcaatgatgtatgagtagtgaataggtttctgaggatgggttagagtagtgtagaattctcagtatgctaggtggttgagtttgattgatagatcccttctggattagttgttcttaatgcctattgctttctgatcaactggaatttgagccaacacatttccgcacccaaaaggtgttcaatgaaatgtctgaaccactaattccagagattcatagcactttaccaaggtattggttgcagggagcgttttggctttaacttattgattcgtaatgcctgttaggttagccctcgtcaatggtgattgagtctgggactaggttaacttgagggtctctgttgcggtggtacttagatttggttaaagaacttgttgtctagggataatttattgagcatgtcaatcacttgtaaactgagaaaacgaaactactcaattaccatccttgggaattctttatctgatcgaatttattgtttactctactgttgttactgcatcttgtcatctgttgcttagtttctgcaattctttcttgttactcgacctgatactcgaccacccagttgtctggcaacagactgtgcagtcgagtatctttgttatactttttgtctgttactcgacctgccactcgacctcacccagaactttgcaaaaagctgtgttggtcgagtgttttattgtttctgcttgaatttctgttttatgcatgttcacttagctttgctagaacacaccaaaacctgttattgcttggcttgacttagtgacttctgatcacatcttgattgttagcatcacacccatttggattgacaaactttagtattagaacgacatgatagtgctttaggattaattgatctaaaaaaacctattatcattaaactacaacatacacgtgacatatagtcatatttcactccaaaacactaaccaagcttcttattgcttctcaaagctttgacggtgtagccgatgtccgtatgagtctttggctttgtatcttctaatagggtaacattactttagattttgggaaccggttgaggatttcgttcttatactcaatcatacacatgacatctagtcataattgactccaaaacactaaccaagcttcttcttgcttctcaaagctttgatggtgttgcccaagtccgtatgagtggacttttctgtttggtggactttctagctgaatctgatgatgacatatcaactatagtctctgctgctgtaacagattgttcttgtttctcgtcctctgtgacaagaaagctccctctggtctttgatttggttcttggaatctttcccatagccttgcctgaacccatttgtggtctacaacgtcttctctttcctgtatttttccaacttctaccagatttcatctcaggcagagaacttaaactccttttcttcggatacttttgattatggtcagattcagggatgtacgaggaagtactcagtgaatggttatcatcctcatcaacaccaaagttcgagtcaagatttgagcctttccgggacttgctgcgaggagattttccacagtggcggattttgctccacgatttgctttcttccttggacgagagtaacgtttgtggaagagtgatatggttttcgaagatggaagagcttgaactattgatcgtgatggttctgatccatgttttctgtgaaatggagtaggggtttcaacttgcccgcatctcatgtgattcacacggccggaccagtttacaatgccgagaagaatcataagaaactactggaaagtgcttacaagtaagcaagaaaacatatttctgtatagagtcaaatgttaaagtgttttagacaaccaaatcttttgcgatctgattggatcttcatgtttcttgctggtggatatgaagagtgaggaaagtacatgacattctctagtctctcatatatacctctctctgtgcattgtaatagttaatcagatcctgattttgtgtgttttggtttttcagcaaggagcaaacagaccattgtggtttgcatcctctcagagtctcacttacttacatggcaggtaatctttaaaacaagttttggatctttgattgctttacgaacttaatgatgttcagtagtgaagatgttgtgattcttgcagcttacctggagactatggattcgacccacttggtctttcagacccagaaggtactggaggattcattgagccgagatggctagcatacggagagatcatcaacggacggttcgccatgttgggtgcagctggagctattgctccagagattctaggaaaggccggtcttattccagcagagactgctcttccttggttccaaacctggtgtgattccacctacagggacatacagctactgggggatcctctagagtcgacctgc

SEQ ID NO: 38624 - DNA, 6507 bp, Arabidopsis thaliana landsberg
gtatgcaaaagccacagtgaaaaactctctcatcaaaaccatcccaaaaacatgttttcttgttgattgtttttccaagaagttgattatgttgcacgtacttgtgattcctccaagtaaccaatggctacactgaaccaaaccaatccaccaatagtgacacgtatctgtacttaactgcctagattttatggtcgttctcttcattgtctaaattcaccaaaagttgttgacacttgggactgagacatgtgatcttgtatcataaactgcagactttgaaatggtttagcctctgtgagaaactttacatgataagaaggaactctctgcaacaacttataagtcatgttaaaaaactcctattgattgagcatctttctatttcatcatccattgatttcgactcaagtctccttccttcactaaagtctattgacaatccatatgaccatattctttgcatgaccagagcaacctccaaattatatctttctcctgtttgtatttgaacttaatgttgaactttgcttctttcgttacttaagagcaaaagaaaagagaacatatttaggtttatgatgtaaccagaaatgctctgttttatctgtcgagagaaggagaacaaagtaagtgggaacttgtttttatttcactgagacaccaaagcaacgacttgtaacttctcggacactgatacccattcacaaccgacacgattgtgttatgacaccgttagacttttacatacacacttaattataggagtataacagaaaacggaaattctattacaaactaacacttacaagcttacaaatttttttatgtcttccattaacatgtccatcccatctaggtgaaggatcatcaagagatctatacttctataggtttccttcatttccaaggtattagccaatctgatgattacaaaaaccacaagaatgcctgcgcttgtagactcggaaatttgttttatcatcgtcggagttttagagtctttgtctaatttgctaaacaataagttaaaaggaacagacattaaaaacatgcaactgaaagaagtattaagacaatatctaagcccaacactaaattatcttcaacttggacgctactagcggagataatctgtaaaaattctctgagaacgataattaacgttaattgaaagataagctgtaacgataatggaaagattcgcataaacaaattcgttccctaaaatcaaaatctcatagcaagttgtaacccatcaaaactagcgaaaacagatacataggttcaaaagaagaagagctttgagttgcaatgcagacaatgaaatggtccttcttgaaggacatgatcaactctattcttctcaagccacaagagtgcttgcagttgtagactcgctgcaaaagcaagaacaagagttggcatcaaaattcaaagtcaagagatgataatcaagaactcttagatgttcaagtacttactacttccagacgggtgggagcttcttggtcttcttgtagtaacgagcaagacgatggattctgctctctacaagaatcagcctgaatttggaatccttatctttcctgttcctctcaagatgcttgcggatagcaacagctttcttgatcaagtgatacagatcctcagggatctcaggtgcaagacctagagagaattacaaaagatctcttagtttcagtgattattcaataagcaaaaaaaaaaaacacttacaaaagaatcaagagagattgaaaagtaccatgagctttcaaaattctgagaatcttgcttccagtaacacttttcacctgtggaattccgtgagagtcacgaagaatgacaccaatctgcgatggggtcaaacccttcttcgcaaacttgcagatggactcatcaacctaattcaattatcaaaacaaacatcaggaccaatcaaagtaaacactttattctcaaagaagtatcaagtaagctaacttggagagtgcaagcaaacacatcaatattgattgcatcacagatagtactcatcaacagattaaatcactaaaacgaactatcacatcaagatcataactctatttcttaatatgtcacaaaaggattgaaactaacaaacaacaaatcacatcaataaaatcaaattcaatgacaaaccaaaactaaaacgcagaagattctcatattccaaatttcctaaccaaaattagaatcaaatcctatgttaagccatgcgagaggtagcgataacattttcgaaacacaaattgaaaaacaaatcaaacagaaatctagattaagtctacgaatcttacatcttgaggggttgtcttgagccagctcggagatgaacgcttgtacggcaaagcagatgccgagatacccttactacagaacacacaacaaaatgtaagagaacaagttttcaaatcaagactcaatcagatacgagaaggaaacgaaccctctactatgcattcgacccatgactgcgacggcgaagtgatcgtcctctcactgagatcgttcttcctcggtttctttcttacggctgctgctgcgcttcagtgtatccacaaaccctaaattgcttctttatatatacctcgtatcttatggtcgtgccacaggtctttttgtcccctaatctatatgggctttagttttcatacataggcccaattaaaattaaaagtctacaaaaggaggccttgaaactcatgtataaaacaacacatatgtaaacgttaccgtttcgaaaatagataaaaactttcgttagttttaaattagttagcatttagttctttttcataatcagtattagcaggtttaagtatacaattttgttagttgtttattgtgtaatgaacttttaaattgaaactatattattacaataggatgcataagaaagtatccaatcgttctgattagaagtctatcaagtagtcatcaacctaaggataagtgaacaacaaagacgcattaatagcaaaactcattttaaacgaaagcggaacctagctaaattggtttatgcaataccaatctatctatcctactatattatttgggaagtacattttaaatataaatttattttttgtaagtaattacatatgtatgctattagaaataaaattttaaaagtaaattaattcatctctttaaaaattaaaaagtcaaatgctaatttaattaattaaatttacctaaaaaacccaatacattatttattaataacatattagatttttttatgtgtatgatgtgattcaatttttaatacaagctggaaaatcctagaattgacggtttagatcaatattaatacaagatggtatactacagttggaactcttaaattaacaatcaaactacaagtgtataatcttaaacattaaacaatatagataatatcaacaaaacatatacaactcacagtttactatacatttaaaataaaataaaataatattatatatttttaaatcatctttacaataaaaatttttagtttaactaaaatataaacctatctgcggtatactgcaggttaatatctagattatagggcttattggatctaaagacggatcatcaaagattttctaaactgaagcaaaatatattgaatattcgaatatctatctgttaccaaattataaacaaataagtttgtaaaacaatttagtattttatatatgaaatcaaataaatcttaatcacataaaaattagcacaaaaaaaagaattcaacaataaaaaatttatcaaatctctatgtgttatagattcaatctccgattctcacaatgaactcagctcaagaacacgaacgaacaagtaaagaagaacacaagactcgatttgttaacccggttcagctagatcggtgtgatgtaacctacgtccggagccgaatcaatccggcaaattcactagatcaaaggaagagttatgctcaaatttgagcttacaacaatggcggaatctctctctgttactctctctctctaagaacaagaattacaaaggaagaagaaagtgatgatgactttataacaaactcgggttggttaaaaccttatcccgtgagaaccgaagaccctccactgcagttagagactcctctttacttcatcatctttcggtttactcagccatcccaaaaccggagataaccgcctggtccaatgtccttagtctgattaaaccaatcaaaccaatgaaattgaatcagaactataaacaacaacactatgttatataagttttgatactatattcgaataaagtataatataccttttcaatttgtattctttaactaatttaagctaactaatatatttgctaatcttatacctatcaaaacagactatcgtttcttatcagtatagtatttttgcaagacttttttggtggatttgggtaaaagtgcattcgggtcatatggtacattcccctattaaataaatatggtgcactcttatgttattagctaaaatgtttagattataattcagagtcatatcataaataaaattaatattaataaactaaatagctttttggcaagacggatttggagggacgggtttttgaatcaacattaataaaaaataaaatataattaatccaccttttcaatacgggttaagtctttaatttattatttttaataacaattaatatatataaatacttaataataattataaactgtaaaaatataaatattttataaaaataaaatttgcaagttttaatatatattacttttaaaaaataaatcatcccgcggtataccgcgggttaaaatctaatacatttgtaaaagcgataaatatgaaacgatttagaaaagtcatgtggattagatggatatatcatgtgagcccctcttctttccctctcttcagtcttcaaaccaaaaaacgaaagagacaaaaatacaaaattgaaactttgaaaatattgaaagaaaagtgaaaaaaaagagagtttagtttttttaatcatatggggtttatatagtttattaccacacttcctcatgttaatcacttcatttatctctctattatctctctcacaatctctctggtttttgggcgtttcttcgttgaaagttgtttgcttttggtgagttagaatggcttcaagtgcttcaaagttcatcaagtgtgtgactgttggtgatggtgctgttggtaaaacctgtatgctcatctgctacaccagcaatacgtttcctacggtaacttttaatttcttagcaaacttgatatatatccagatatattttcaaattgatgttttaagatatttatgttaggctcttgagatctttgctcattttaaacgttgttcatggcaaattaataagagcctagtttcatcttttgcgtttatatttccatatccgtttaagcatatttttcctagaatcattaacgtgaaatatatctaaagctgaattcaaacccatgcttctggatttttgctatctgtttacttaagaaacatggtttaatgtatgttttttgatatataaatgatttaactatctaatttacaggattatgttccaacagttttcgacaacttcagtgcaaatgtggtggtcgacgggagtaccgtgaaccttggcctgtgggatactgccggtacgccgtatgattacttgattatactaaaactgattattaatgaatgctagttacgataaaagttattattgtggaattacaggtcaggaagattataataggcttaggcctttgagttacagaggagcagatgtgttcttactagcgttttcccttataagcaaggccagttacgagaatattcacaaaaaggtgacttttaaagtttccatccttttttttatagataagaaactatgattatatgataaaaagtatttctagaaagatttgtcgatactgaatgattaattaatctggtgattaatagtggcttccagagctgaaacattatgctcctggcatccccattgtgctcgtcggaacaaaattaggtaacgaaactttcccctttatgagttcgtaaagaaacttaatttatcaacatttgtgtcaaattagatatggtcttgagtaataatccgcagatgatacagtaataattacggaaaatggcaatatatatgggtaattttgcactaaattaggtaaatgaccatacacccttttcatttgcaaaagaaacaaaaacaattcactacaagaagctactttttttttgtaaaatagtactctattttattgataaaatctcttgttttattgataaatcttttattcagaaaaataatgttacacaaaaatgaattcagatttgagggatgacaagcagttcttgaaggatcatccaggagcagcttctataacaactgctcaggtaccataaacaaatctttaaaaagtaatctatatgaaaataaattcataaacaattatgaat

SEQ ID NO: 38625 - DNA, 5758 bp, Arabidopsis thaliana landsberg
tggcctctatgatcgaggtagtgtgtcggctgtcagaatggactggttcttctcctctgcgatcgaagtataactggtggactgccaaagtggactacctgggtcgcctctgcgatatagtaggattgcataatggactgcctccgctcctctgcggtcgagtaaaagtgtctggatggactgctgagctgactgcttccctctctgctactggtgatcgagtatgtttggtggaagtgtgactttctgttctgttttccctctttctgagcaccaaaagctccaaaacacctgaaacaactccaaaatgcagaatgtatgcaagactagtcctagactcgactatacaaacaagactcaaaatggtgataaaaggatgtgtaaaacatgcaaattatagacatatcagatggtgtagccaaagtccatatgagtctttgtctttgtatcttctaacaaggaaacacaacttaggcttttaggataaagttgcggtttaagttcttatactcaatcatgcacatgacaacaagtcatattcgactccaaaacactaaccaagcttcttcttgcttctcaaagcattgatagtgtagtcaaaaaccgtatgagtctttgtctttgtatcttctatcaagggaacaatacttaggcttttaagatcaggttgttgtttatgttcttatactcaatcatacacatggcatcaagtcatattcgactccaaacactaaccaagcttcttcttgctttgcagagctttgatggtgtagctaaactccgtatgagtcttcagctttgtatcttctaacaaggaaacactaccttggcttttaagatccggttgcagtttaagttcttatgctcaataaaacacatgacatcaagttatattcgactccaacacactaaccaagcttcttctctattctcaaagctttgatagtgtaaccgaagtccgtatgagtctttgtctttatatcttctaacaaggatacaatacttatgcttttaaaatctggatgcggttctagttgttatactcactaatacacatgacatctagtaatatttgactctaaaacactaaccaagcttcttcttgcttctcaacgctttgattgtgtagctaaagttcatatgagactttggctttgtatcttctaacaaggaaacactacttaggcttttaagatccagttgcggtttaagttcttctactcaatcatacagatctcatcaagtcatttttgatcacaaaacactaacaagcttcttcttgcttctcaaagctttgatggtgtaggcgaagtctctatgagtctttgtctttgtatcttctaacaaggatacaatacttaggcttttaagatatggttgtgattctagttgttatacttactcatacacatgacatctagtcatatttcactccaaaacactaaccaatattcttcttgcttctcaaagatttgatggtgtagcctgataagtgtgtattttgcatattttgagcatccatttgtcatcactttagcatcatatcatcactgttttataccatttcacatcatttgtcatcactttgcatgtttaggatagttttgcatgcatgttgcatatttgcattgatttcacgtgatttggagctgttgacgagctatcaggaagaagcggacctgatcgtgataaaccactcgacccagaggtcgagtaggagcttcaagacctcaagagaccactcgacccccaggtcgagcagaggacatcaccacttcacttcaccactcgaacacgaggtcgagtgccctcgtctccatcactcgatcacttcactcgaccatgaggtcgagtgtcttcaccttcactgccagaccactactcgaccacatcactttgcctagaggtcgagtacctccatcacaccactcgactgcatactcgatgacaagcttcagagccttcttcattccgcactcaactagacactcgagcacaaggaagaaaagaagactccagctattcactcgacctctcactcgaccacctgggtcgagtacaattcttaacccgtccaaatacttcgtcgttttgagtattagggtttcgggatatttggctataagtagcatgtacttctcattttcgcagaaaagaagtttttacctagttttatttccgcagaccttgtgttctagactttttgtaatccggatttctctttatctattcagtattcagttttggttcttgattttcgtttactgttgttcattttgttatcacactactgttacactgttgttatcatgtcttcaacctgttcaacgtttatgctttctattatgatgtatgagtagtgaataggttcctgaggatgggttagagtagtgtagaattctcagtatgctaggtgattgagtattgattgatagatcccttctggattagttgttcttaatgcctattgctttctgatcaactggaatttgagcccagacatttccgcgcccaaaaggtattcgatgaaatgtctgaaccactaattccatagatttgtgaccctgtaccaaggtattggttgcagggagcgttttggctttaacttgttgattcgtaatgcttgttaggttagctctcgtcaatggtgattgagtctgggactaggttagcttgagagtctctgttgcggtggcacttagatttagttaatgaacttgttgtctagggttaatttattgagcatgtcaatcacctgtaaactgaggaaacgaaactactcaattatcccatccttaggaattctttatctgattgatttaattgtttactctactgctgtgtactgcatcatgtcatctgttgcttagtttctgcaattctttactgttactcgacctgatactcgaccacccagttgtctggcaacagactgtgcagtcgagtatccctgtttcatttcctgtctgttattcgacctgtcactcgacctcacccagtgctctgcaaagagctgtgttggtcgagtgttttactgtttctgtttgattttctgttttctgcatgttcacttaggactgctagaatacaccaaaacctgttatgcttggcttgacttagtgacttctgatcacatcttgattgttagcatcacacccatttggattgacaaccttcagtactacaacgacatgatagtgctttaggattaattgatctaaaaaacctattatcacctagtttccaactcaaccactaaggctggagctaatctcactgctcttccttttatctcttcaaacagttagtattcatagatcttgactcgttgttcatacctgatattgagaccaatgtgataaaaagaatatgttcctctccccttataaaaagaaaaaaatataatgagcgattgagacgattttcaaatagtgtataggggtaggaatgttttctatgaccccattattatatattatttggaatgatcaattacaaaggctggaaaaatgctgagggtgtcgatccagtatgcgagttcccttttgtttactctctaaaaagaataagtctggggagagaaagaacaccaaaaaaaattacatataaagaatggtcgatttatcatggtatagtataggaatgagtctagaaggatcttgaatgttagcttgtttgatgagacccagcgatgaaagtctggtggatatagttgtggaacttaggtattgaatctagaatgttgtgtaagcttgtatagaagtacatgttggttaggatttgattagaactgctaggcatatggatttggttagaatgatcatggcaatagactagagaatgttgggagttcctttgttttcaaaacctcttccacgggttcggcttttctgttttgcttgagggcaagcaaaagctaagtctgggggagttgatataacccgattttcaccgattttatctatgttttaggtataggattttgagtttttatgttatttctcgagtctttttagtgtcttttcaggtattctatgcagtgagacaacaatggagataaggagacattttggagcaaaagctaaggaaaatgaagctaatgacgattttggtccatgaatcagcgaggagtgtcgatcgacacactcatggtgttgatcgacaccagtttctgtccagcaaaaaccctagacgctttcgagtttacagaatctcaagtttgccccagaagactttcctatatgcattattcgtcactggacgtttttagggtctatacatattgtttttagacttaagtttcttttatcaagtcttttatcaagttctttgcaaactctattgtgagagacataagctattcatccattgttcttgagagattcattccaatttttaatacaatgaagatatcccttctttccccttctctatttactgtgtttatgctttcaaactcgaatatgttgtttgcttcattcaatatgtctgagtcgtctgcttgttaggaatagggtttctcgttcgggattcatatggtttagtagattgccccctctgctaggttatctgtagaattcttcatctttaattatgcttaatgctagatctggagtaattaactagatcttgaatctagacaatagatatgcccgccataggtatctgtagttggatctattatttgatgagtctggtttataactatctaataagaatcggcctatctactaagatgaacaattaaactcgctaagaatgcatatttaggttgatagtttctcggcttctccggttattattagctatagatatagttcgcggcacgcgcaccgattattctataattagagtttgagtttaagaatggttcaataacaacctagctttcattagatctactaactaatagtatcctaagaataccttgttcctagctttttattaaatcgttcgcaacacaatcatcttgttgttttcttactttgttttcttactattttactcataccctgctagcttaatctcgagaggtaactcactgtttaaacaaaacaacaccgtgaattcgatcctaaaatagtgcaattgatctcttatttaagagagtagttctaggtaatctgaaccatatcaattatgaactacatatctataaactgcattattttccgcaggaccgatgtaaacgcaatccaccaatctataaacccacactttcatattttatatgaaagagtcttctctttccacatctcatatggatttttatcactcttcttgtgaggaatcttattcaagattgaattagccgtgagaatggcttcaccccataggttaggtggtgcacccgaatcgtttaacatgaaattcatcatctctttaagagttatatttttcctttcggcaactacgttttgcatcggagtgtaaggtgccgtagtttgatggatgattccatgtgtggaacaaaaatctgagaattcatttgatttgtattctccaccacgacctgattgggcaatttttattctcttatctaattgattttcaacttttgctttgaatttcttaaacatattcaaagcatcttccacgggtttggcttttgtgttttgcttgagggcaaacaaaaactatgtctggaggagttaatataaccctatttttactgtttttaactatattttagatataggtttttgactatgtttttgaaactatagtttcactataattttcaataatctggttagaa

SEQ ID NO: 38626 - DNA, 5093 bp, Arabidopsis thaliana landsberg
aatgtttgtcatgataattagagcttattgtgattaaacaatgaaatgtgaatgattgggattttgacaagtcttcaatctaacagattgtcacgaacaggttgtggtcacattaagttaagagtaatgcttccttagatcagtcttacttactacaatggcgactaatagtcatataggctgctcaacaaccttagcacgttcttgctgctgcaaagcctcaaattcccctcctcttttatcctgtatctgcttgattgattcttagaaaactctgtgttttatttttgaatatgtgtatcagtacgtatctaggtagtacagaatgtcaagtttgtatgtttttttttttgcggaaataacttacctcttctctgttctgttcatgttgaatctttgttctcggtctcacgattatgctctgcagttttacgcagattctcactcataatttccatagagccatactctttcagtattgtgtgatcttgttctgtaaccagatcagctgttgattggtctcagagatctgcctcagctacttaacaaccatttcttggtaagatttcatctcaaattccagcctcgtttggcctaatgagtaatacataaatacatatgatgcattcacaagaaccaaaaaactctaaatcccattgacaggactagagatgttaatgatgggttaaaacccactgggtacccaaaacccacataaaattttaagcccatacatctactttttctggaaaaaaaaacacaggtttaaaatgggctgggtacctaaataaataaaacccatatgggtttacctcattgggttatgggtacccacgggttttttttaagtcatttttcaagtgaatcaacattttgttgtcaatttttttttcacattttttccccaaaaccgtgatttaacaatttaacgccaaaaaagacattcaacattttcccgacaaaaaagacattcaacattttcacgccaaaaacgacaatcaacattttcccgccaaaacgcaattcaacattttcgcgccaaaaacgacattcaaaattttcccgccaaaacgcaattcaacattttcccgccaaaacgcaattcaacattttcccgccaaaaacgcaatttaacattttcccgccaaaaacgacattcaacattttcccgccaaaaaggatttcacattttccggtcaaaaacgcaatttaacattttcccgccaaaaatgatattcaacatttttccgccaaaaacacaattcaactttttttccatcaaataaatatgtaatatagaaaataaatacaatttaaaatatatttctaagcaaattatagatacaacatacatataatagtatattagcagttaaaataaactttaagaaaatgacaaaaactaagttcggtacccacgggtagtctcggaacaatcagttttttttttggcctttacccactaaatcaactttgatttatgttctgaataattatgattttgtcaaaatatgttttataattaatcaacttttagaacatgtcaattttaaaatgagtagaacatgttcaatgtataaaaatacatgatctaaaatatttagaatttagacaaaaattagaaaacatattctaaactttttagaacgaattttaactattttaaaaaaaaaacagttttcgacaaaatcataaattttcttctctaacacttcttcatcattattggtcaacatatgttttctgatctgaacttgacataaatgttaccttctttttcggtgattagagatgttaatgatgggttaaaaccgactggctacccacataaaattttaagcctatagatctactttttctagaaaaaaaacacgggtttaaaatgtactggatacccaaataaataaaacccatatgggtttacctcattgggttatgggtacctacggtttttttttaaatcctttttcaagtgaatcaacattttcttgtcaaaaaagatttcacattttttttctcctaaaacgcaattcaacattttaccaccaaaaaaaaaattcaaaattttcccgccaaaaaagacattcaacatttttccgccaaaaacgacaatcaacattttcccgccaaaacgcaattcaacattttcccgccaaaaacgacattcaacattttccgccaaaacgcaattcaacattttcccgccaaaaacgacattcaatattttccgccaaaacgcaaatcacatttttccgccaaaaacacaatttaacattttcccgccgaaaataatttaacattttcccgccaaaaacgcaatttaacattttcccgccaaaaacgacattcaacatttttccaccaaaaacgcaatttcacatttttcccatcaaatatatatgtaatacagaaaataaatataatttaaaatatatttatgagggatttttctgccaaacacgactcgtgatcttcacaaatagtagattggatccatctatgagggatttttattggacatctctaaaacaacgtcttcggctcgtactccaagcttctcttttactttactggcaaactcgcaggcaaactaatcgattttcctccatagtttcagattctaaattccaaaccaacggatcgaccttcacccattctcttataacgagcataacatgctcttaagtagtcatttatgcagcgtttacggttggtaggaggagaatcaatcaagtcctgattttttggttatttcaataataaacactaggcctcgacaaaatacccgaactcgaagaaccgaactgaactctatctaaaaatcagatccaaacccgaatccaaatttttaaaatatccgaacggatcttaaacttcaaaaaccaaaaacccaaatccgatccaaacccgaaccagatcaagtaccggaacatatccgaagtacgtatatatagatataatttattagtaataatcatatttacaacaacttaagtgcctaaaatattttggattttaacctattttgtatatttttgggtaatttaattattttcgattgattcggataaaaaatactcaagtttttataaatttttgaatagtttcaagtaattttaacctattttgatataaaagttttgagttttggatactcctgataaacccgaatccgaatccgaagtcttaaaatacccaaacggatcttagatttctaaatccgaaatacccaaatccgaaatacccgacccaaacccgacctgaatatccgaacgcccagacctaattgcaactttcacatattttagaaactaaagcagacatcatagccattgtcatcacattgcctcaacaaatttcttttgccaaattttggatagtaactcgaaatcattgactactagtattagacccgtacggagaaaaataactttaaagacgaagatgtaagagattaaacatgaactattaacacaaagtcactacctagagccatatacaaatggatcatcttcaaattcttttgttgttgtcagtttatctttcagtatgtcgtctttgttatgaagccatctccatggaaactccatatacatgatagcatcgtcttttcagtgacatttagtgcttgaacgtttgaataacgtttttgaattatttgtctcccttttgtcgtaattgttgtagctcgtagtcaaaagagaaacatgtatagacggataatagagatggattaaagaaatgagagatagtatacaaaagtcagctgtattttttaaatccttacacaaatattgaatgcaaagcagggtaatgtaaaatcataatcaagtattttgttacaaaacattatagtagaaaaaaaagtttgcacttgagtaacccgattttaaagctacataagtcacgtacttcgtaagtaatttgtaaactactcacattataaacatttatctttcagttagtgaatccaagaagactgaatcataaccaaactgttacaatccgatgacttaaagatcgattcaacacaactcgattcaatcacgacacaactcgatcaagcttcaattcgcggaacacttaatagatcgatcaagaacataatcaaacaaagaacgaaacgaacacacgattgtttacccagttcagatcaccggtgtgatgatcctacgtctggggctggattcaatccagcaatccactatgaatcaatatttactcaagctcaaaacccagagctcaagatcgtgttacaaaggagaagaattgagataagaattttctgttacaacgaacaaaggaagaagaagactatttataacagagtccaagtcaaaccctctaataccaagagagtctcttcaatcttctactgaactcaaaccgatttctcctttctccttaaaccaatacaaaaccggcattgaaccgtgatccaacaactaactgattaaaccaagtcgacatcaggctaaaccagaagtttgaatcacacctttacacaaacaaaatcattgattaaaaaccagaaactaattggcatttaattaataccctaaattaacttttaagtttatatttgtgtaccttttcctcctcgagaataacttgcatgcaaggacttttatctttgggctaaagctcttattattccattttgttttgaagagttttgtagggaggtaggagtataatccagtagggcattggtatgttcaacttgaatcatgtaaaatcagagaaaaagtaatatgtgatcaatataaaatgaaattgaatacagagtagtcataaatctggatcagtgactttgctaaattcagtgaatacgataaacacggaaatgaaacgacgaagagaagacaaactggcaatagagattagaaacaggaaaagagatgaatatgattaaacgatggaaattaaaagtgagaaaatagataagaggagttgattgttgggagttaaataagagatcaaacagtttcagatcgtgacatattttatattgaacgtggtttgtcctagtcccagcaaatttagggatgtaagatttatagagttaaagaaatgcagtttttcttattttt

SEQ ID NO: 38627 - DNA, 5182 bp, Arabidopsis thaliana landsberg
gttctagcattttccagacttagaaatacttcaaaggacataagtttctaagcttaaaagcatgtgctagtctcttcttcaattcctctatattttcatcattatttcccccaataacaatgtcatcgacgtatacaagtaaagcaatataagaattacctgtaatacgtgtgaatggagtgtgatcagcatgagatttcttaaatccaagtttcttcaaagtgaagctgaacttcaagtaccactgccttgaagcttgctttaatccatttaaagacttttgtaactttaaaacaggattattaggcaaaactcctccctcgttcactgaatatcctggaggtaaactcatatagatctcttctttcaaatctccattgagaaatgcatttgagatgtccagttgatgtagactccactctttaatagctgcaacagataacaaagtcttcgctgttgtctagctactggagagaaagtatcaccataatcaacacatctatagatacatttttgcagtcattttaacaaataaatcctggacttcgacttatttacgatctaatgccatcagcattaaatcttttttccaaaataattaattttactttaaattctttatttaaattgtcaatcacattatcaatcaaatttaatccaaacaaacttcaaatcaatcccttaaaattagcataaacatatttgttaacaatattttaaaacaaagttttttgttaaataaatattattcttactaaacgttttttgtttaaataaataaattttgtatttgaacttatttacaatgtcatgtcactgacattaattatttaggtatgaaaatatttaattaaagatttaaatcttctaaattcttgcttttagagttattatgtcattacctaaaaggcaaaaaatattaattttttaattattattatttatatatttaaaattcataaaacattattaatatttaaacttataaaaagtttgatatatcaaaaaaacttaacatcattatataatatatagagtttaaaaaatctcaaaaaaaaattcgtcatattttatgattcaaaattttaaaaatgaacatatattaaccaattggcaaaaaatgtgtgggttcaacgtcccgcatcgacaaaaatatatacacaatgatttataaacatattataaataagatcaacattaatataaataaatgtttttttttgcaggatgggttttgcgggacgggtttggcaggacgttacttaataacaattgtaaactataaaataaaaatattttatagaaagatacaatttataaatttttatgtatactaacttataaaaaataaattgtccccggggtataggttaaaatctagtaataataatatttggtagtagcaggttgcataaggtgatatattcaaaacgaaataacgttgcgattatgcgtatctttactatgttaatctttacataacataacatatgttaatctttcgtatgttgtaatcagccatactatataatgaatggggaaatcacaagctatgttcaagactctaatataatgggactctacatatataatggttattcttaacatttttagttagttttctttcataactatgctatgcatatcttttatcaaaatttcatcattccgcttgtgttgtgaatcaaaaacttataaaacatgatgaggaaaaaccatacacgtgagataatgcagtgtgggggaaggggcagatttggaaaaaggcaagaagttggctgtcaacatatctgaatctctaaccactgtttgatcaaattacaaatcgaatgattagcatccccacacccgcttctcccatcttgagaaaatatgaaaacagttttctttatattatagacctatagttttaaatacgcatataataatatgggattcataattgatatagttgttaagaacttaaatattgatacaaatatggacccacgttccatacaatgattcaaatattgtcgtaatgttgtagttacaccattgtcggtgtgtgcatcaaaatctgatagagctaggtcctaataacaagaacacttttctttagaccaatttaatatgcctttattcatttttatgtctatataatgagatttgaaaccattgagttcctacgattggtgaaacaaatacatatgtgtgatttaaaccactgagtaatatgttcacaaactctcagaacaggggaagtgccctcctattattattgtgcttatataataacaaaaactaaaccaaaagatgactcaagtcattcgacttagcaaagtccaaatacttctttatttgttttcttgaacgttggggtcgtttctcatcatcttcccaatgtcacctcctcaaaagcttaccggtactgaggagcaagttcaccgtccttgacgatgtaattctcagtagggaagtcttctcccttgaagtatctctccaacatgtctttcgtccccgccgcataccgtagctacaaattttgatcacacaaaatgttttagttccaaatttccaacattactttttggataaaacaacaccttttcattcgttagcaaaagtttccagagaaatttatgcatatgatatgtgtaacggttcaaggaaaacaatataacctgagcgtcaatggtggtgccggaggtatgaggggtcatagcctggttaggcatgtaacgccatggatggtccttaggagctggctgtgggtcccaaacgtctccgctgtaccctccaatgtgtccactctccaccgcatccaccactgcttgcctctccatgatggctcctcttgcgttgttcactatcaaaacgcctttcttcaatttccctatcaactctttgttgaacattcctctgaataaacaagaacccattggtcaaatctcagaaacaaaatctagttagtgttcgtctctttttgtttctgatagtagctgtggtaccttgtcttctccgtgagaggcatgttgatgactataacgtcacatttagggagcatttcattcagatcctcaacgaacttagctccagtctctttctccagctctggtgccatctgaagcctgtcatggtacaacaagttacacccgaatggtttcaaccgctgcagcaaaagctttccgattcttccagctcccacggttcctatggtcttcccttcaagatcataagctctgtacgcaatgcccgcgacgttccactcgcctttgacgacctggttgtaccctggtacgaagttgcgcatgaggattaagattctcatgagctcatcttctgccactgagaccacgttgcttcccgtgacttcagcaaccgtcaggccagcagctgcagctgcctggagatcaatatgatccgagccaataccagctgtgaggagaagcttcaagtttttggctttcttgattctttcagcagttacatacgccgggtggaagggagtggagattaggacgtgaagatccgggatatgtttctcaagttctgccattaataaataagagttgaatcaaaaggaggcttgcattcatatttatagtttgtgctatagaaaaacagaattaaagattttgaatctcttcaagtacttgttagattggaaaatacttaccgcaatcagggccttccttgtcatcagtgacgatgtactgatgtccttgggattcaagccagtcacggattcctaaggcattctcgacgcagccaaggaagttagggttcttggtagcgtattcgttggccttgtagaaaactcctacaatctttttgctatcaccagaagatgcctgtttcataagcaagttcaaaaagctatttaaattttaacatatacccgattcaaagaaacatgaatacatatataagaacaagaaaagatccgacgcatgtaagaactacctaaaactctgaaaaatcatcaaaaagtgcgtcttcccattacactgaaagagacaacatcttacagtaagacactaatctgttctgttttgaaactatatacaacgcccaaacgtttacaggcccgtttagaagcccatatcaaacatcgtgccgtttagttattacaaaaagagacaccatgtagtagttgggttccataatggaaactttagctggcctaatcagaaacgacagttgtgctttcctaattttagtcacacgtttcagtcatgcacagtcagtctgatcatatcacaacaaaatcaaaataggttctacaaaaccaaaatttgcatatcctcaaaatcataaggccaaagatccaaaaacatctatcccacacacaatcggaaacgttaccaaccgcaaacagtaaaatcaagcgaaatcaccacataaaactctgagaaactataaatatcaccagcttagaacctaaatcgtgaaaaagggagagagatcgaaagagtttttacattaaactgacgtcgagcgaagtaacccgaagaagaagaggaagaacaggccctgatcgttgccttagcggcttgtctcatcgccatggttgagaagagataaatatcaatttggttactctttggtcgatttttgttttgtgtgaaatcagtaattggagatgagaggatttatataggacgaaatgttcacgcacctgcaccaaatcatccttttcttcggaccagaatagctgtgccacgtgtaagacggctccatagacatcatcgttagactttaattatcgtacttatgttacttgacaagtactgttagacaaaaaaaatccttgaattctaaggaaatagttactaattcatgtataagtctatcctttccttgtttagaaaagctgactgtaatgtctatttagttatattcttttactttctttctttttggtaaggttcttttcctttttaattgattcctctccatgatattttcacactgacaaatccaattttaccaaatttccattgatacaaagtgtataaaccagaatcaaagatttccaaatattttagaaatcatgtttcttcttcaacaaaaaatacatcaaatccttttttaacatattttctgcagggtgctttataataaatacaagtgtatttacataaatttccagcaaatataataataattcaatttatactaacatctaagatgcaatgat

SEQ ID NO: 38628 - DNA, 1370 bp, Arabidopsis thaliana landsberg
  unsure (1)..(1370): unsure at all n locations
tgcggtgcagcagatgcagcacatctactcatggaatcattaatatccaacatcttctcaagcaatgtttgtatctccatctccatagacttccatgatctccccgatccaacggttggagacccagtgtcaacataccctgaaaccaaaacacatttcaatactttctcataattcataacaagatcagtatctgatacatacaacaatgcaattcttaaaaactgaaagctaatgcaaaacagtaagcttaacacacaaaaattcttcttaccttagtcattcacagaaaaataattttgacaggaatctgagagaaacattaccaattttaactttactctaccaaacaccacacatgaattaagcattggggaagcataacatagactgagcaaacaatggcgatcaaattcaattcggtgaagagatcatatccaacattgattcctagatctatatcacattacagactactaacccccacattcagatagtagacataacagcaacattcaaagcaatggaaataacaaagaaagacacagatagcatgatcaagcggaaaggaagaagaacgaaccgccttgagtaaacctggcgcctagcttagcgtaagaagagagcttaacgtctagatctccttcaattttacgagcttcccgcctaagttcttcccattcagattcctgcagatccagactcgattctgtcattttccgatcttcaacaattcagatcagtaacctctccgttcttagataactctccagctccgccgtgaaccaatgccggagctctcagtacaacgacgatctgattctcactgaaactgatggaaccagcgatgacgagaggatcgcatccctcttccctcctccgcttcttcgctccactggtgatgggccttttaatcaaggacttttattattgggctcaccatagtcatggacttttaatattgggctcacaataatcatggacttttaatattgggcttattaaggcttatagtaagcctgaattgggctctcgattaagttgacgttaaaagccgagtgacacgttcgtatatgtacgcactgtacggaaacacgaagctgatgagttgggatttatataagagaagtgtttggaacaaacttctttctgattcctattatcgaaaggtccaaatcaatttgttttttttttgtgattcggaaattgtgcttaacttcaactcatagtttttgctcatatatagctaatttaacttgggttaatagaaacagggatgggcaaaaagaaacatatatatgatcacgancaacgaatatcttcaccagctgggtgggtcatatncattatgaacgttaaacgtctttagc

SEQ ID NO: 38629 - DNA, 11154 bp, Arabidopsis thaliana landsberg
  unsure (1)..(11154): unsure at all n locations
tgttccccttcacttcattactcaatggacaaaccatttaccctttcctctcaccatttccaactcgcctttactatccttccaaagagaatccgaaggccatcctcctccacccattgaaatcgccaaaccacttttgaaactctctctttcatcatctcattttcacaaactctatatctctcacaaagcttccaaattttcaccccaagctctccctatcactcttcaagaattcgttctccccttcaccaatacttcaccaaagtcactgatcactccaaagtttatcctcaagcattcaatcggtataaagctcaaaatttcataactaaagaaaccaattcccttccactttggtaccgcttcgagagttgttcttgtttgcccagttgaaccttaccaccaatctctatggattcaagaagaaagagttcatctcgagctagaagatcgttcgttgataacgaagaggttgaggcgtttgacatgagtggcatgactgaacgccaaattcgccaagctcgccgtgctcaaagatcaagcttgattcaaggtggaagctcaagccgctcaaccatgcaaagagaagaagtagctcgaggaaagagggtcgttgaagctgaagaagaacaccatgaagaagcaccttttgaagaagcggtttctgaggaagaggttgagatcatcggggatgatacaccaacccctgttgggagaagaaaccggcctaggaggaagagagagccaaccgagcgagtactatcaatatttgaaggagttgaagtttgagggaactagataccctcataaggaaacgatgcaagagcttggtatttgtggtgatgtggaatacttgatggaattggccaatcttgcaacattcatgagctgccaatgtgggggatacaaagaggagagctgccaactctttgcaaccctcaaggttcatttttgtttgggggagggttcaagacatgtttaacattgtgttctcttttcttatttcaaattttgcatcatctaaggcatagaaaaaccataaaaatttgaaaatttttcaaaaaatgatttcataaaaaaagagtgtcatgtagattgcatatcgttttaggattgtatatagagtgtttgcatttaggattgctcatttgcataggggatgatgatgatttcaaaccgttaagcatgttttgattcaatgaagtaagttcaatgcccgggttgttagttctttgttgcataaccgattgtatctctgaagtaagaccttaccctgctttgaatttgtaacttgactatactactttgatcgaaactcgcttacctgacgccattccctatctattagaacctgaactgaatttgaaattatcatgtctatgcattgtttatgaactcatggctaccatatacatacttggatcatcttattcatttcatcaccctctgttaatccaagtagctgtctctcctttttagagcagtttctcataaccttagcctagccttatttcaagccaaagatcatttgtatgtgattgtgaggtctttttcgattgagcttggtataacatgttaggtatgagccgacaagagcagtctttcatgtagacctagtccacactttttgggttagctaggactaggtggagacttgtatttgggattgggaatgtgtatggaatgaatgggaatgagagtgagaatgagaatgaaaagaaaaaaaaaaaaagaaagagagtaagagtttagagttataagggggatacaaaagtgttaagtctagtaaaggatttggaattcaaagaagttaggcattgtgattcaaaaaaaagggtaaaacgccctatgtgctaagattagaagaaaagccttaagtttgtcaaagtataaaaccaaacccgctagactcttaaatcgtttcaaagagaaccccttagacttgaaccaaaaagagagaaagaatgagaaaaagggtagagttaggacatttatgggaatgggatcatcttctaagctatcatactatatcattgggtagatgagagtctgttcttgtatgtgttcgtaggcttttacctttagcattctactgaagctcaatcttttctctgagagtcccctgttactcgaccaaaccattagagggaacatttttgtctcttagcctaagcccgaaaccnnnnnnnnnnnnnnnnnnnnnnnnnnnnnnnnnnnnnnnnnngcttaatgaatgttaaagggaattggttgatgtgaatgcttgaatagattaaggcaagttgttaggttacattgtgacgagtatggctaacgtttttgagtaaggtctatcatcttgcaacctagaattagctacctggacattgagtttacccattttataggcatgcttcggtttttgaatccccaccttcaaacctctccttcgacttaagattttttgtttgcttgagggcaagcaagagataagtttgggggagttgataacattgtattttactcattttaggtgtgtgtttatcatcatttagctttgcatttgctcattatatcatatcattttgcaccattttagcttattttgcacacttaggcatttaggatcatcttgcatacgcattgcatgttttggtgtgttttcaggtgcagaaggagcttaaaaggaatctacttggtccattcactcgatccaggcagcttttgaagaggttgcagttcactcgaccctcttactcgatccaagcagctacagaggaaggtgggggttactcgaccctcttactcgatccaggcagccttagatgaagcaacagattgatctactcgcccctcctactcgatcctctactagacccatttactcgaccaagggtgactaactctacaagacttgttgagctatcaaagcgtcttcggatcctcttcattccccactcaaccagacatctgagcgtacggataggagaggaagaagcatctactcgaccaattgatcactcggagcatagacacaaaggcgcagactttacagcaccctccttactcgatccccaagatcaagcactcgcccaaaccacctcaagtctcttgtcttctagtgaatctagggttttcaacatttcactataaatagatcactttgggatttgtccaaaggatctagctttaatcctttggtttttctttgtgttcttgaatcttcaaaacttaattactcttcatctatttcatttttgcacttagttcttttagtaaagttgtttagcttgtttagatctacattttgatatgatttcagtaatttctgggtttgtgttcttagttgtgttgcttgagtagtgattagggttcttgaggatggattagattagggtaatctgtaggttagtcaggtggttaagattaggttagagcccttctggattcgcttggcccctatgcaatcgttggctaatgtggacgttcgagcataggcatcgagcgtctaaaagacgttcaaatggatgcctgatgtaacacccgtcccgccatagatgccaaaacggcatgttatttatctaatcttgccaaaccattttctttaaacttctcacacgaacaaaatattgcacataactaactccacacgcttacggtatactagccgacaacctttcattaaaacctcagcttaccgtttttaaaaaatcaacacttgttttctaaccacgtgtatccttccgttgcactattcagatgactgcttaaaagaacatataacttgtccatctccatcgaactctagagcacaagcagtgatcactattagagcccaaagtagaaggattgcgaacaaaacaactacttaggcaaacaagacctccaagctaactatcattcaacatgttcgtacaggctcacatgtgctgaggcacttgaccttggtttccttcccattccttttttttcaatagtttctagggctccttccccatcattgataatttaacatctttacatgtctatgaattagatggtttccatccgtcttaccttaaatgtctctaagctcttattctccgataatactttcttccatttcctttctcgataaccttactctttagcttttcattgctatcttgaacactgattcttacttgacactttttaacaccatactaaagcgaagaaaacatgagaatccaaattacatttcaattatcaaaagaaacgcaattacgtcttcccgaaaagaactaagcagatatgtaaaactcaatcaacaaaagattactcaacgcagtaaagaaatcaatctcaagttcaagcaatacacataattaatcattcaaaatcttttttttttaaattggttctaaaaatctgaccctccgggtcagaaccggagtggccttaaccggctctgataccaaatggaacacccgtcccgccatataggccaaaacgacatgttattcatctgatcttgccaaaacgttttcttaaacttctcacacgagcaaaatattggacataagtaactcctcacgcttactaacctgaggaaaaaaaggaaaaagaaagggtgagtaaagaatactcagtgaggggaatcaactctgcccactgaaacatagaacactttctaaagctatacaaccatcttcataacatataaacttagacacacgcaatcaacctatcatgctttaacttctaatatcacatttataataatcatcttatatatatattatataaacatacacatcgttaggtccagtcatcctcgtgacgacttgaacctaataagtggaggctggccctcgtggctcaaacactttcatgcattgcgggctcgtcagccggtcttgacctgcatgtaacccgtcagcctatcactatccacatcactagggagaccacggcccatagctcgattctccccagtctttcatacaaacatacataatcatcatacatacatacttatacttaacattctcatacataatatatcatagtcaaacatcatcaccatacatatcaaacaataatcatcaaatcatatcatcacacaatcttatcctatgcaatcagatctaagcctacatatcatgcgtcaagaagcaaaacaaaagataatgataccatgtttcgcaaataccaccctcaccttagcctagttgaaaatgaagaaaatttctattctcctttctctcctattagaccaacttagtataagagctttaactgcatattcttgagctccaccttagttctccatcaaccaaaaccttactccatagggctcctgcaaattcacagctcaaaccgaacccgattcccattcaaacaataaaaacttgtcatggtttactccatacaaaactgtctcagaaacatatgcataagtcagtaacgaaccgttagaaacgtgatccaccgttgaatatgtagatagtagtaccatgaacgtctgcacaaagttgcatccagatcagaatagtttcggacctccaaacgttgccgagaacgagctccctcgggttgtcttttatggatttctgggtttgacatactttgcaattacttggccagaaagaaacgtgcataacttcttgagtttaaatctgattgaagatctgtcggttgatgtggatttttgggagcgtattctttccatatacaccttattccttatctgagaccctctggtctgtcgggaattcaacctgtaataaaccttcttgaaactggtcttcctctttcctcttttctcttcttctgttttctttgctttgcccactctccgattttactaagatctgcttcatctcacttctccttattgacatgaaccagatctctttctcttcatgttcttccattgcggtgatgatgatccgttctcatctgaaacgtctcgccttctccactaatccgtttacttctctttgatcatctttctctttctcctcaaggcaattcactctctcttaaatcaagttctctttctctgatggtgtttaatctgtctctctcatctctcgacgaagacgacacgttgacatgacacaacggtgtcacaattagcctcggctttctccaccaccacccatgagctctttcccttctctttgatccaataaataaaactcaccacgacctcgtctgtttggtaactcggagacggtggctgcgatcccactattatgccttagggtttctcaatgttttctttctttttccttcttgataacaaatcaaagacgacgatatgcgtatatttataaatggatgcttttggactttaaatgggcttcctcatatttccaaaacaaatagcccattaaatgtgggagtggggtgttacaatctcccccacttaaataaaattcgtcatcgattttttggcggtgatttatttccatataaacctcttacttgtagctctagcaacgccacatccacatttgcggtatacaagtagacgacccttcattaaaacttccagcttaccgtttttaaaaatcgacacttgctttctaacgttggtaactcttttgatgcgcaactcttgtagcttagaaaactttaaacttttcaaccactgaactctagtgcacaaataaacattctgctctagcaccatatttacaaaagatcaaaatctcttttaccttgacatggcttctcatattcctaaatatgcttattgacatgggcttccttcccattctttttttttccacggtttctagggctccttccccgtcctcggtaatttaacatctttacatatccatgacttagacggtttccatccgtcttaccttaaatgtctctgcactctaattctctcataatactttgttccatttcctttctcgagaaacttatcctttagcctttcattgctatactggtacattgatccttacttgacacttcttaacgccatactaaagcaaagaaaacatgagaatccaaattacatttccagtatcacaagaaatgtaattaagtcttccaaaaaagaaactaagcaaatatggaaattcacttaatcaaataaacattttaattcaatcaaagcaatcagtcatagatcaagcaaaacatataatcaattattcaattgttttttttttttgataaaatctttttcataaaatggttttaagaaatctgaccctcctggtcggaaccgaagcggtctttaccagctntgataccaaatgtaacacccgccccgccatatagactaagacggcatgttatttatctgatcttgccaaaaacattttctttaaacttcatactcgaacaaaatattgcacacaactcctcacgcttactaacctgaggaaaaaagggaaaagagggggtgagtaaagaatactcagtgaggggaatcaactttgcccactgaaacatagaacactttctaaagctatacaaccataatcataacatatagatttatcatacacaatcaacctaacatgctttaacttctaacaacacattcataacaatcatcttatatatatattaatataaatatacacatcgttaggtccagtcatcctcgtgatgactagaacctcataagtggaggctggccctcgtggctcagacactcccatgcatcccaggctcgtcagcctttcttgaccagcatgtaacccgtcggcccatcactgtccacattactacggagaccacgacccatacctcgattctccacagtctttcatagaaacatacataatcatcatacatacatacttatacttaacataaacatacttataatatcatacataacatcacattatcaaacaccatactcaacaatcataaagtcatatcatcatgtaatcttatcatatacaatcagatctaagcctacatatcatgcgtcaaaaagcataacaaaagaaaatgataccatgcttcgcaaataccaccctcaccttagcctagctgaagatgacaacacacttttcctttttcctcatttagacaaacttatcatctcaactgcgaccacatgctcttaagctctaacttggttctccttcaaccaagacctgaagacctgagtccatgattaaggaaaactcttacaaagatttagctcaagccaagctcaatttcccaataaaacaataaaaactcgtcatgatttactccatataaatctgtctcggaaacatacctataagtcgagaactaaccgttagaaacgtaatcccaccgttgcatatgtagccagtagtaacatgaacgtcttcacaaagttttcctccagaatgctccattatctccaaatgaatcccaaacatgtaaagacctgtaaagaactagaaaagactatagaaataagaaatagactctaaaacctatacctaaatcataactaaaagcagtaaaaatagggttatatcaaggagaacttatcgcaaagctctgaaatgggtacctagaatcaaacatccaatcacttgggctagagtctacaaatctctagaattcgtagatcatgcatccatttgaacattttttggacgctggaatacctaggatcgaattccaaactgaagtgagtgaaataaccattagggccaacgaatccagaagggatctaaccaaatcttaactacctgactatcctagagattactctaatgtgtttagccatcgacttctactcttagtcttccaatagatctcctcatctatataggcttgattaagatcagttttcatatgtcttccctctatcaaagtagagccaccagttgcaatcgctctatccagcttatgctgaatgattttgattcactttgctgcattgatcttattttgttgcttccatgttgagataacctttctacaatgagtgagcttctccattaagggaacatgattatcatcgaccccattgtatctgttccagttgttaagcacaatgtctttgaaaccctctttatgagtgaggcgattgtcatagctgaagaaaccatgtctctcttccttataggttgagatgtttgtcacaagagggcgatggtctaattcaccaaactcctggaaatctgtctctgattctggaaataaagtgagctattcagtattagccattgtttgccaataaagtaggcgatggtctaattcaccaaactcctggatgtttattctttatctctataaatagaaatgtctacaatttatctctatttttcctttattttttaagaaactctattttagaggtgaccattgctccaatgcctctaaatataatcatttttaaaatagagaaaaatatagaggtaaccattggttatggtcttagtggaggtgaattgtaacaccccaacttcaggaatatggtggtgtatgaagagagatttataaaaattgatttgaccacctatgtcagtaaagtgaacttatcttttatgtcaaacgtcttgagaaaactctacagttaagcgtgcttgggttagagcgcttttaggatggacgacattcccaaaagtgattgttggaatcatccgagtgagaaaaaagcatggagaaagatcatgtggtgatttgtagggtcggtaacaaatctttaaagcctgccagacgtagcgcactgaccgtcagataggggtggacccatgggcccgagagaggacgtagggcccactgggcaatcggtgcgttacaaaatctctttaggattgttactataacaaatccccattctcatgagatcacgtcccccttatataaaaaatagaaacttgcacgtcaagtttctccaatcacacataagacatattttcaaatttcataagaaaaaagattttcctttttaccaattttctttattctttaagcaaacttccatttgcatgatatgattctgtttgtcttcaaataaagataattttctttttttttttacttaacacacgctcctaaatccaagtacttgagctcctcatcatcagttttgcatctcatcttcttgaatcatttcttgtactacttcttctactacttcgatgactacttcgctgactcgagctcctcaccatcagttggactctctcttttccgtcattaattggtttctcattaattgggctagttcatacccaaggcaaaaaggcttatgtacctcagtctctattctttattccttttttgcatgcaatttcaataaaatactcttatcaaaaaataattatatgacgtgattttcaatattcgtcgtagcttcagctcacaaaattgcttatacatttaataaagaaaacatgatccactacaaaattcaaaaggaaggagaatgtcttgcatgtacttgattaggtaaagaaagcaattaaatatatttgatcgacaataaagtagttgaatcattaatgatgcgatgaacaaagtaattaagaagtagtgaacaatcactctcaaaattaaataaaaacactagtaattgatttccttcattcgattctctatataatagtagccatgaacttaaagggactcactcattctcatagcgattccctaaactctatctgtaggtgacttaagagtaaaaaatggaagaggcagaggttgaagtagatgtggaaatcaaatctacggctgataagtttttcatgttctctagaagatcacaacatgcctccaaagccactcgctatgtacagggatgtgatctgctcgaaggcgagtggggcgaagttggaagcatactcttgtggaaattaactgttggtaatgaaagtattatttttatatatgtactttatgcaagaagattaacccttcaactatggtatatatactagacagctgcatttcacgggaaagaaaaaaaaaacatgatatatttgatttgtaaacttttctggtgtagatggagagccaaaagtgtcaaaggatatgattgaggcgattgatatgaagatgaatatgatccagtggagggtgttagagggacctctgaaggaagagtacaggagcttcttgaaaatgttgaaagtaagccctaagcaaggagggtctggaagtgtggtgaagtggaacttgaagtatgagagaattgatgaaaaggtggctcacctagagaggctccttcagttcttc

SEQ ID NO: 38630 - DNA, 8107 bp, Arabidopsis thaliana landsberg
ttccttctctcatccgcgggtttggtgggttgattattccagatcggtgctttctcccgattgaagtacctttcttcctcaatcccttcctcaatcatcgctgccctttcaaccaatttgaaaaccgaggtcaatgtctggaccaaacaatgattgcggatctctatccttagtccgcggataaatcggcacacttgagcttgttcctcctcaagttcacatcccacaaatcgcctaaggccgttaaactcctcatcatattcacgcaccgtgcggttcccttgaacttggttgaggtacgcacattcaagcctatcccaagcctccggtggaaagtacttcttgttaaactcgtcttcgaaatccgcaaaggaccggacctcgtcccctctgcgtttcttgacggttaaccaccagttatgggcgtctccttcaaggaagtggaccgcaatgtccctttggtaatcctcaaggcagcgggtagacttgaagttcctcttgagtctactcctccactcatcggccacaatcgggtccgtactgcccatgaagtgtctcgtgcccagccttgagacatgttcgagaagactcagatagtctccccttttccgtccatgattcaattgtggattcacttccacaacttccgagtcatcgtccttttggttatccacttttaggaccaccgaatccgctacaacggccttggtcaatgtggctagttgcgccatcattcccttcatcaaatctcactgttcttgggccgttggagtattgttccggttatccgtgctatcccttgcaccactactctccggtgcttcctcatttatggacttcttcccggccttaggtccggccgagtttgtcctatcgagcatcgtcccgactctggttttctcgttgatcatcgtttcctcctcaaccaaagtctcctcgacaatgcccttgtccttcttactctttcccgttttgctgctcttacccatctgcgaaacctccaaagttaatccacataactcctagtaaaatcgcaaaagagtaaagaacaactaccgcgagattctcaagccgacgagtggtgataccccttaacccagcacctagtcctagaaccaagcatgctccgataccaacttgaaaggccccgatccggactgcctaaagtccggacgagttctctcgacccaagccactaagtgactcggccctaaccgtttatgaggttctttcctagtctcatccgtttcatatgattccgtgattcaatatatgagacgaatagagtaaacaaacaatcggatactttattgattaagcaaaggattcgatacaacctatgagtttgcatataagctattacaagtcatataatcgatccctagactatccgaactatcaccacccatcatcccggccttgagtctctcgcgcctaagccaagtccttcccacgatcaccattcgttcctgaaagtcatagagccataagtaatcttatttacttaatcatatgcaagtccatgcaatgctctatatgccatacactactcggatccgtggagagaattcagagaggggaagatcgcgcatcagtccggccgattcttggcaggtcagttaagacccgccggtcctccgccgagccgcgtccccgcctcagccgatccctacccggaccgagtcttgtgtaggatgcacatgacccggatactactcagccctctagtcggtcctttcaaggatccgactactaactcacatcctagaacccttagactcaaagtctaggatcccttaccttccttctcgaggttaggtcgatccgaccctccttctttattgccggccacagcccggctaccgaatcctaagactatttattctcccaagagggagagagttttaatggtgagttttcttgtgttttcggtgtgttgtggtgtgtggaatggtcctgggcgcccttccttatatagggggcgaatggatgcttcccaaatcaacacatccgttccttgcacctttccgaagagttgcacctttccgaagagttgtatctcttcgcccataaccgcccagttcgtccgtcactcgtccagctacctcgagctcgtccgtcactcgtccagctacctcaagttcaaccgtcactcgacctgagtaaccgtcactccttccagctgagcttgagctttgggcgagctgacccagctgatttctttacgatcctagcttagcctgcatgatttcccctttgtccgagcttatggcctgctccttctcacttgtccgagactccaccttcttctctcggaccaagtcctagccaacgatcctattgaggatcgcgggcgttacattggtcctgaagatccaaaggctaatcttcagcccagtagtgtttgactcgctgtccattcacaacaaataatcttccattgttgtctgtaagaacgacggttccatatggcctaaccgagtggactatgtagggacctgacaaacgagaagacaattttccaggaaacaatgtcaatctagaatcataaacaagtgcctggtcattaggctcaaaggttcgagtgaggatcttcttgtcgtggtaagcctttgtgcattccttgtagagctttgggttgtcatacggatgaattcgtatctcatcaagctcattcaactgaaaaagtctcctttctgcaactgatttgatgtcgaaattcatcatcttgactgcccaagctgctttgtgctctaatttcactaaaagatgacaagctttaccatagagtagatgaaaatgtgtggtcccaagcggagttttgaaagctatcttgtacggccacagtgcatcatctaacttgtaggaccactcctttttcgctttacccactgttttctcaagaatctctttgatttgcctgttgcaaacttcaacttggccgctcgtttgtggatggtagggagtagcaacccgatgctgaactccatactgtaaaagcaatttcgctagaatcttgttaatgaaatgcttacctttgtcactaatgactatgcgtggcactccaaaacgagggaagatgattgccttgaagagtttcatgacaatcgctaaatcgttctttggactagctatagcttctacccatttggagacataatccacagctactagggtgtagagattcttgttggaaggtgggaatggtcccacaaaatctataccccaacaatcgaagactttgacttcgagtataaatttctgaggcatctcattacgcttgctgatctttccccttctctgacaagggtcacaatgtgatatgaacttctgagtatcccaaaagattgtaggccaccaaaagtctgcttgaagaattttggatactgttttgaaagttgcaaaatgaccaccatagctagagctgtgacaatgcgatagtatatgatataaccctatttttttactgattttatctatgttttagatataggattttgagtttttttaattgtttctcgagtctttttagagtcttttcgggtattctatgaagtgagactacaatggagatgaggagacattttggagcaaaagctaaggaaaaggaagttaaagacgatttcagtttcagaatcaaatgagaatgtcgatcgacacattcttggtgtcgatcgacaccagtttcggcccagcaaaaaccctagacgccttcgagtttacaaaagatcaagtttgccccagaagatttccctattttgttactcacgagttacttattatatcttcttttatgcgtaacaggtgtatgcctaggtaaataagaagcacacaacagaagcagctgtatcaacttgtctgttcttgacttgggaaaacttgaacgcaccaatcgcaaaactcagagattagtaatggctgacagagtcatcacagcggatgaggaaggagttttgagagatgaagatgggcaagcctacaatgaggctggtcagagattagatgattatggactcatcctacctgaggacgccaatgaggatcaggcgcgcctcaatgcgcaattaactgccagagagcagcacggctcggtgtcgagcgacaccaactgggtgtcgatcgacaccttcaagagcagaacgcagatgcgattggtgtcgagcgacacaacagaggtgtggaaccacgtcgtactcttggagatttcaacaggccagacctgttctatgctaatcgatctgcgatcgttcccccaccattctaaaggaacgactatgagctgaagcctggttcctttgctctcctaggcaagcatcctttccatgccttatctcatgataagccaattgaccatatcgagcgttttgaggcccttgtaatgagcattaaagctgatggagtctctcataattacttactgtgtaagcttttcccttattcccttgttggctgaaataactcaaagcaggttccctcaagacttggagaagcatcaagacagcattttagaacaatttttacgatgatgctaagtctgaggagtttttaaggctgtttgggtcccaaggtccgaaccggtctcaagaagtgacgcagacgtccaattctggtggagggtctgagggaagcaggcccttccattggtcttacactcacgaccgtgatcatctgatcattaaggacgaggctgggttggcgaatctgtttcgccacatcaaagggaagatctgctttccttgccggccacagtccggctaccgaatcctccgactatttattctcccgagagggagagagtttaatggtgagttttcttgtgttttcggtgtgttgtggtgagtggaatggtcctgggcgcccttccttatatagggggcgaatggatgcttcccgaatcaacacatccgttccttgcaccttttcgaagagttgcacctttccgaagagttgcgcccttccgaagagttgcacctttccgaagatttgtatctcttagggcactctcgctttagatgtccagtctttccgcaatagaaacaagtccttgtctcttcaccgagaaccttggactgccttggttccattctcgggcaactttggatcgcatggtccttgcttccacaccggccacatgcacctatggccttccagcaagttccgctgtggctcttaccacaggtcacgcattccccggtcttagcatcggacttagtgttatccaccttgtcaaatttccttttcttatccgcgggtttggtggattgattgttccggatcggtgctttctcccggttcaagtacctctcctcctcgatcccttcctcaatcattgctgccctttcaaccaattcggaaaccgagttgaatgtccggaccaaacaatggttgtggatctttatccttagtccacggataaatcggcgcacttgagcttgttcctcctcaagttcacgtcccacataacgccttaggcggttaaattcctcatcatattcacgcaccgtgcggttcccttgaactaggtcgaggtacgcacattcaagcctatcccaagcctccggtggaaagtacttcttgttaaactcgtcttcgaaatccgcaaaggaccggacctcgtcccctctgcgtttctcgacggttaaccaccaattatgggcatctccttcaaggaaatggaccgcaatgtccctttggtaatcctcagggcagcgggtagacttgaagttcctcttgagtctactcctccactcatcggccacaatcgggtccgtactgcccatgaagtgtctcgtgcccagccttgagacatgttcgggaagactcagatagtctccccttttccgcccataattcggttgtggattcacttccacaacttccgagtcatcgtccttttggttatccccttttaggaccaccggatctgctacaacggccttggtcaatgtggctagttgcgccatcattcccttcatcaaatcccactgttcttgggccgttggagtattgttccggttatccgtgctgtcccttgcaccactactctccggtgcttccccatttatggacttcttcccggccttaggtccggccgagtctgtcccatcgaacatcgtcccgactctggtttcctcgttgatcattgtttcctcctcaaccaaagtctcctcgacaatgcccttgtccttcttactctttcccgttttgctgctcttacccatctgcaaaacctctaaagttaatccacataactcctagtaaaatcgcaaaagagtaaagaacaactaccgcgagattctcaagccgacgagtggtgataccccttaacccaaacacctagtcctagaaccaagcatgctctgataccaacttgaaaggccccgatccggactgcctaaagtccgggcgagttctctcgacccaagccactaagtgactcggccctatccgtttatgaggttctttcctagtctaatccgtttcatatgattccgagatttaatatatgagacgaatagagtaaacaaacaatcggatactttattaattaagcaaaggattcgatacaacctatgagtttgcatataagctattacaagtcatataatcgatccctagactatccgaactatcaccacccatcatcccggccttgagtctctcgcgcctaagccaagtccttcccacgatcaccattcgttcctgaaagtcatagagccctaagtaatcttatttacttaatcatatgcaagtccatgcaatgctctatatgccatacactactcggatccgtggagagaattcagagaggggaagatcgcgcatcagtccggccgattctcggcaggtcagttaagacccgccggtcctccgccgagccgcgtccccgcctcagccgatccctacccggaccgagtcttgtgtaggatgcacatgacccggatactactcagccctctagtcggtcctttcaaggatccgactactaactcacatcctagaacccttagactcaaagtctaggatcccttaccttccttctcgaggctaggtcgatccgaccctccttctttattgccggccacagcccggctaccgaatcctaagactatttattctcccaagagggagagagttttaatggtgagttttcttgtgttttcggtgtgttgtggtgtgtggaatggtcctgggcgcccttccttatatagggggcgaatggatgcttcccaaatcaacacatccgttccttgcacctttccgaagagttgtatctcttcgcccataaccgcccagttcgtccgtcactcgtccagctacctcgagctcgtccgtcactcgtccagctacctcaagttcaaccgtcactcgtccagctgcctcgagctcgtccgtcactcgtccagctgcccgagctggactgtcactcgacctgagtaaccgtcactccttccagctgagcttgagctttgggcgagctgacccaagtgatttctttacgatcctagcttagcctgcatgatttcccctttgtccgagcttatggccagctccttctcacttgtccgagactccaccttcctctctcggaccaagtcctagccaacgatcctattgaggatcgcgggcgttacagagagcctgatcaagttctctacatggaacaacctgaaggattcgaagtaaatccagagaatatcaggtatgtttactaaagaaatcactctatggcttgaaacaggcaccaaggtagtggaacaagaagtttcatgctttcatgatgagtctccagtttgctcgaagtgaacatgactgatgcgtgtatgtgaaagaagttaaccctggtgagtttgtttatcttctactgtatgtggatgatatgttgttagctgctaagagtaagtcagaaattagcaagcttaaggaagctctcagtctgaattttgaaatgaaagatatgggagcagctagcagaatactcggaattgatattatcacgaacaggaaggaaggtactatgcttttatctcatacgagatatgttgataaggtgatacagagatttagaatggcagatgctaaggtagtgagtactccaatgggagct

SEQ ID NO: 38631 - DNA, 13205 bp, Arabidopsis thaliana landsberg
tcgaggtcgactcttgcgtctaaatcaagctaatagggttgaggaagggcacatactattcagtcttcggcttgggaatatgagacagtacggtggtccacatttccctcctgggaaccataagtatgtcattgagagccctcgctcagtcttcttgtagctccgacaacgattaaggagctccctcttgaaagttattgccttgagaagatggatggttgtatgcctgagagttgggatttggagactccggttgttcttggtttagaggagcttctggcggtggattaaactgcgcctcttcagattgcggcggcggcggatcaacacgctgagtggtggagctctggaatagttgttgcggcggcggatagttgcggtagtgggggggctgacgttgaggctccgacggcttgaggcggctgcatcagaggagcttgaggcgccggcgccggagtgaagtcgtactgctgaggcagggacgctggtcttccaaccggtgtggaccctccggctctctgtgtaacgttgggggtcatcttcctcttgcatgaacctccacgaccggcgataggcatgttcgaagaaagagaagacaacgaagaaagagaagatgattcgaagaagaagaggatctaatgaagagaagaggcgaagaagaagttgcagaacaagatcgaagaagaagaacttgaagaagaagatcgaattagatcgaagaagttcgaagaagaagaagttgaagaagatagatcgtagaggttttgtttggatgaaatgagaagtgaatcgatcgaattagggttttctttatacacgtagtcgcaatgtagtcgtattttagtcactaatttttttgggtttgggccgcgaaataagaaagcccaacaataaagacaaaagtcgccgaatagtcgttgagtagtcgttaatttttattggggttgggctttgggatttaaaagcccagcaaatttatggtggctcgcatgttagtcgtaatatcgccgttagctttactgggtttgggcttcgggattactaagcccaacaaataaacagtctgtcgcaagttaatcgtattatagtcgttaattcttttgggttgggatcgaaatataaaagcccaatatcattagaactcttcatcatcttcgatttcatcatcatctgaagacgataaattacatcgaaattcatcctctggttcagcatctccgacatcataatcgagtatgattgggtttaagctttctaccggattgtctagtacccgatcttcaattgtagtcagcaacacagcttcatcattttctgtttgcaaaagagtcggatcattgttttcatattctccagaaatgtttccccgaggattaacttttaaaacattgagccaaatgttctttggtttcttcgtatatggatacggaatataacaaacttgatctgcttgagatcctgtatacatatatcaaagatagattattaataattaaaaaagcaccgtagtttggacttaagaataattacgtaccaagaataaatggcgcgtatttattgtattttctcgtagatagaatgtctacaaccccactatggttttgtcgagtgcctctcccgatctttgggtcataccacttacacttaaaaagtgtgatcctcaaattgacgataccctcatactgaagttctatgatatcatataaggtaccgtagaaatccgcttcatcagatgaatccacgtaattttctcttttaacacataccccatagttacatgtttttcgtctaacgtcatgatttttcgtatgaaacaaatatcctcgtgtgaaatacattggccaagttttaaccttgttcaaaggcccatgcacaatctcttgaacccaagtaggaaatggaaaagtagggttccaatatgttacctacataataaataaacaataacaatatcaacataatttaaatgatcacttttaaaaattactaaaatgatgtagacttacatattctttaacccattaataatattttttagctcttttcgcgtagagttctttttcggacgaggttggatatttcacaaaaagaaaatcctcgaacatactatatttacaaccaaagataaataaatcaaagttatcataatgaaaattttaaattaaggagtgatttaaaatacctctcaaatggttgaaaatagtcacaatttcttaaaacatatgcgtgtgcgcttttgtagtctttctctgaaagccattccacgtgcagttcaccacttggacgaccgacgtgcataaatatgttaggtactccagggacatgatatacatgaacttctccttcatcgaatcttgttatcctgattcaggtaattgaatgaagatcgaagtatagaaaatagttgaataaataaatgtatttaccttgattttgtttgtatatgatcggcaaaatagtgctctaaaaagtaagaaatctcgtcattgatataagactcaacaattgagcctgcagcatatcttttgttctttgcttttccttttaactttttgaaaaacctctcaaatgggtacatccacctatattggacagggccactgaattcagcttcgtgtggaagatcgataggtaagtgttccataacatcaaaaaatgatggtggaaaaatcctttccaagttacagatgattaaaactatgttctgtttgagaatttgaacgcgacttgtctgtaaagttctcgaacatagatctcggaaaaatgctccaattcctaaaatatatgtgcaagttaaatgattagattaaaaaaatattggaaaaaatatagtaagtatatattgtacctgatagtgcaaggtggacattccggtcaagcagttcagcaaagataaatggaagtagtcgctccataaatacatgacaatcatgacttttcatgcctgaaaactttccattatccagatctacacaactagccaaatctgaagaataaccatctggaaatctaatatcatatttcacacattgtaataaactctgtttggcttcttctgtcaatgtatacgctggaaatggagctttgccactactatcaatatgtaagcctgggcgtgaacaaaatttctcaatatccaatcttgacatgatattatcttttgatttacccttaactctcatgagagtgttcatgatgttgtcaagaaaattcttctctatatgcatcacatcaatattatgtcgaagattgaggtctttccagtaagacaactcccacaagatgctttccttgtgccaattatgttcctttccatagtctgacatcttcttttcatgaccgttcccaccaacgtccttcgtttttgctggatttacactagccaaccgctcgtaataaacttgctcccctgtcaaagactcgggtggatactcgctagaagcgtctcttcctttcagaaagtctttcttgttcctacgggatagatgaccatgaggaagaaatctacgatgacaatcaaaccagcatgtcttccttccattgggtagataaaaagactttgtactttccatgcagacaggacaagacaatttaccatgagtagtccatcttgataacatgctatacgccggaaagtcgctaatcgtccacagtagtactgcttttagattaaaattttgactcaatgaaacatcatacgcatcgactccagtagaccacaactcttttaactcctcaataagaggttggaggaagacatcaagactagctcgaggatgatttgaaccagaattcagaatggtaagaaataagtactctgtattcatgcacataccagggggtaaattataaggagttaggatcacaggccacaacgaatgattacgagacatgccaaatggattgaacccatcagtacacaacccgagataaaccttacggggttcttcagcaaactggggatgtaacccttggaaatatctccactcagctgcatctgaaggatgattcatttctccctcctttgattggtgctcagcatgccatcgcattgccgcagctgtcttatgtctctgatacattctcttcaaccggtccccaataggtagataccacatacgactatatggtactttggttcttcgtctttgaacgccgtaatccataggcttccatctttgagcactacaaaaccgacattgatcttccttttcgtcttctttccagaaaagcatacaattgttaatacaaacatcaattgtataataaggaagacctaaattgcacatcaatttttctgtcttgtaatgcgaatcagaagcttggtttccttttggtaaaaaatctgtcaacatttgacaaaccgaatccacacagctttcactcatattatgatccgccttattttgcatgactcgagaagctaacgataattgtgactgaccttcacgacaaccatcgtacaatggagtgtttgcaccgtctaacaaatcataaaatttctgtgaatggttacgtaccggttcttccacattctgataactaccatcctcattatagttatcatcaaaccccgcattataagcaaatgcatcattcaccatatccacatatggatcttctacagtattacccatatattcatgattctgatcgcttagataagttctatctacgtaattactcgttcctacatccatattgaattcttcccaatgcttataccatacataataatcaggcataaatctttgactaaataaatgactactaactcttctacccgagacgatatgtttttcatttttgcatacactacaaggacagtgaaatttaccccgattactttgaacgataggctggctattagcaaagttcatgaattcctccacccctgtgatgtattctggtgtcagatttcccgtcatttcgtcgaacctcttgtacatccactcccgataaaaaccgccattaccgccgctataattataattgcccaccattataaaaataatataaactaatttgattttgctgttgatatcgttccaaagaagcagtttcagggaggatatcaacagcaacagtaaacaccttgtttcccaccacatcaacatcaagcaccttcgcctcaggattcagacatgaagaacatgctcagcagatcattcaaggcaagccacaggcgcactgacatcgctaagacgcttgctgattaaacaacaaagcgacctacaaggcgttgacttaacagcaagtttgaatcactgagcactaggatgaaatatgtggaggcatcctcgcttcaccatctgttaataacaacccaggccagcttctagggaaagtaatccagaaccctaaggagtacaccactcgtcacgccatcactatctgccatgatcgacagctgccaactcgacatgcctctacctctgtcactagggacagtgacggtcaagaaggggaggattttgttcagaatgaaattccagctgaaatagcaatagaggagcccatactcgatcgcagtactcgatcgcaagctcaagcagtactttcttctgttaaaaagcatgtcgctgctaaaaccaaggataaagtctttgttcctccaccctacaagcctccactaccatttccagggagattcaagaagcaactaataaagaagtatgaagctctcttggaaaaacaattgaagaaccttgaaatcacaatgcctctagtagactgtcttgcactaatatcagactcagacaaacgtgtgaaggacatgattacagagaggatcaaagaagttcaaggaacggtggcgttaactaacaagtgtagtgcaatcatccagaagaacattgttcaagaaaagttggaagatccgggatcttttactctaccatgctctattaggcaacaggctctcagcaactatctatgtgatctagaagcttcagtcaccttaatgccactcaccatcgcaaggaagctgggattcgtccaatataagccatgcgacctatccttgatccttgctgataggaccttaagaaaaccctatggcatgctcgaagatctgcctatcaaggttaatggagtagaagtgcctacagactttattgtgctcgagatggatgatgaacctaaagatcctctgatcttgggaagacccttcttggccacagttggagcagtcatcgatgtcagggaagggaatatgagtctcgaccttggttggcctatcgagttgcagtttggcatcggctcatctccgtaagggtcatccgaagatgaaagagcctctggttatgatagagcgatctcaggtgatgggtatgagtctataagagtgggagcgcttagaaagaagtctaataagcagaatggggctatagaggagctggcccactccaatgaggaacttaggagtaagctgtgtcagatacagaaggaagctcaacctaaaggcggaattaacactatcccgagaaaaaagttcactttaagatggtctgaagagatagattcccctctagaagagaaagaagcctattttaaagaaagaggaattgagtgttctgctgcagacctctccagggaggacgctgattatgatgatgatattagagaggactatgcagaccctctctatcattcattttaatcttgataagtgtgaggagtcaagctagagactttaaacaagctcacttgggaggaagtcccatgtgtatccttgtaaataatttttactttcttgtaatttttgagttgttttagttgtgtttgtggttctaaggaagaaaggaataacgtgaaggtagagtaaaaattcaaaacttttactctactgatggtctagagatcgagtacattggtcgagtgtgagtgatgtttaaaacccaaaaacttttaaatcattactttactcgaccaacagaagctacaaagtcttccagggagtctttcaagttacagaggattgcgggatttcctagagtttttctagtgaacagagaatacagagaagagacaagaagacattctgggacccgccgctaacgcccatgtcctccatgcaacagacttaaggacaggaaatctctcctcatctcttctcctccactcgacgtcaacaccatcactcgaccaccatccctctttactcgacctcatcacctcgttttctcctccacaaccccataaactcgacccatcactctcattcatcaccaccaacaaaccaaactccaaaccactcgaccccatacctcttgaatcaacgctcctttatctcctttactcgacctcgtcacctcctcctcaccacctcataaactcgacttcatttctcccacttctctcccataaaacactcgacctccaaacccatctcctccccacaaccttcactcgatcgccgcttctcaccgcctctccatcatcgctgcctgctcactctctccaaggaaacaactcgagctctccatttcactcactcgacctatgtcagcaagccgccttcaccacttctagctcataaccactcgaccaagggccatctcccaagtccattcatcactcgaccatcgcctcttcacttgatcacgtctacacaccatctaccatcactgacctctttcaaaccgcttcactatctctcgcctctcaaggtcactcgatcgcaagcacactccattcacacaaccaaggaatcacttgacctcgagttcaccaaactggcaaagaaaaaaaaaaaaaaaaaaaagttttttgtacactcgaccagtttactctgttggtttgtgtttttggttttgttgggactaacgtattaacgtttatctttgagttacatttgttttaaggtttcatcatgagtaactatagtggagaatcctcaatggatcctgattataatgtggatgaagctgagtcttggtccactagaccagagagagaaaaacatgtttacgagagtttcagagatgaatttgaacgtccgcagcacgacgtaatcagagaagagctgaaatcgccagaggaaagagagcgatgtcgagtagatatgagcggatcgatgaggacatcgaaactgagtatgagccagagtcatggcgcaaggagacaaagctgctgaacaaacctgacgaggttacagtggaggagtatatccgattctttgagatgaatgacttctggggaacgaggtatccctgctattagactttagcccagttggggttactggaggacgtgcaacatctgttcgagaagtgtcatctggatacactcatgtcttacccttacgctgcctgtaaggaggagacaattgagtttctttccacactgcaagtggagatgtatgaggatctcacggactttgagctggataccatggggttagggttcttgacgttctccgtggctgaacagcggtatcagctttcgattaagaaattggaagaactgtttggtttccctagtggaaagggaatcaaaaccaggtttgacagggaagagcttaaggatttgtgggctactattgggaacaatgtaccgctaaactctacgcggtccaagagcaaccaaatccggagtcctgtgattcgctactttcagcgctcggttgccaatgttttttactccagggagtctacaggcaccgtgtctaacacggacatggagatgatagatttcgcccttacagggattctcggtcgtacaaagggaaagaatgttctgagaggcgatctcaacgacgcctgccaccagtaattcctctgttgatccacctgtgtggatacaggaagtgggcattgacaaacggcaagaaaaaagtgagaggagcactatgcgtaggtggcgttgtgacgccaattctggaagcttgtggagtactgctcaaggaaccagggttagcaccgagaatgatggacttatatcatttgcgctgatgtgagttcttggagtatgacatggttggcgacttccaccgctacaggttcgagcattcattgattagaatcgccaatattcttctcccctgcattgacgctactaggattctcgagggaaggaacattgatttcaagcctgcgcttgaagatgtctatttcgagggcagtccaccaactgaggagattagtcacaccgaaggagttacaacagaagatgttgatgagacagataaaattgatgaggcggagattgacacgagcatgtatcatttcagtgagcatatacctctagcgagggaaagaaagagtttgagcgaagctcacaggaacaacaacaagctgcagaagtggtgcaagaaactggataagttacacgccaagtgcctcagggctatcaagtttcttaaggacaagcttagctgctcctcttccactacagctatcccgcagggacagctccctcaggacatgccctcgaggagatatgacgcgcttgaggcaagtcggcgtaggcctgagcctagtgagcaggagattccgcatgtccctgcgaggcattcatcatttgagcctcatgaatctgggaggaagaggaggaccacactcactcaatctagcagcacgagcaaacgacttctccagtctcgtagtttacgcgaccgcggtgctgtccgcagcagaagaagagaggtcgagtatcctcatagcggtgctggcccccccagagctgatgagatcgagtacccacctgctggagctgatacagaacatggcggctcgtctatggcctgtgagcaacgacaggcaaccattgacgaccaactccgttcattcttcgactgaggtaagcgcctcacttcaccattgtattatatcatctcttgcgatttgctctttattttgtttttgtgattggatttgtcctgaatactcttttccaagtttattcacacagtggactatgtgatttaagtttgggggagggctcaggaagtgtgtgttccattgtttatattcttgagtctgcattcatctaaggcatagagaaacaaaaaacaattgaaaaatttcagaaaatgatttcacaaaaatagagtgttcatgtagttgcattacatttaggatcgagtctagagtgtttcatttatgactggtgcatatgcataggggataatgatgagatagccttgtaagcattttggttcactcagataagctcagtgccctcgttgttagttgtctgatgcgttgtcattgaaattgaattaaacactgcaccatgcctagattgctctactcgaccacactgttaggatctgatatcattccctatcaatttgaacttgaatctgatttagaattatcatgtcttggcatcgaatttgaactcatggataccctaaaatacttggattttcttacttattttaacgactcttgttgatccaagtagctgactctccttattagagcagttaacccatacccaaacctgaaatttctttcaagccctatatcacttgtgagtatttgtgaggtcttatttcgattgagcttggtagaaagtgttaggttcgtaacgacagagatagtgtctcatgtagttctagttcgcgttcttcggactggataggactaggtgggcgcttatatcatgggttgggatgtgtttaaaaaaaaaaagggaattcattgttcataaggaaagggaaagaattctaggggaagtaagctaaagaagttagaaaaaaaatctagtaaaggttttgggaatgttaaagaaaagaatgaggttcttgttagctaaagaagaagggttaaaagcctttggttttaaaggaaaaaaaaaaaaaaaaaaaaaaaaacaggaaccttagttgttaaagaaatccaaacccgctagatgtatcagagcgttgagaaagcttctcctagagttaagagaaaagaaaagaatgatatgaaaaagagtttgaaagattcatgagtgcaaagggtagagttaagttgggacaggagttgggatcaccattagaacttcattgttatactctgggtagatgggatcttatctctgtatgcataacttgggacttacctttagcattctactaaagctcaatcattcttgagggatcccctgttacttaagcctattctataagggaccatctctgtctcttgaccttcaccttagccaaatgagttcattgatgatgcactgcttgattcacgttccagaactaatgaatgttaaagggattggtagatttgaaaacatgtgtaggtcgagtataagagacggattgattgataacaaggcatggctaacgtttttgagtaaaattcaatcatatcacatcttaaaactaccaactttgacattgattttattagctctatcatatgctttggttctgagtccccgccttcaaacctctctttcaactatgtcttcttatttgcttgagggcaagcaaagactaagtttgggggagttgatatgtctataatttgcatgttttcagtgtccattcatcatcgttttgagtccagtttcgtatcattcatcactgttttatataatttctcatcattcttgtatattttgcatgattaggatagttttgcatacatattgcatttctgagttgttttcaggtgatttggagctgtttgcgagcaaattggaagaaacgagccagaaccagaagacatactcgaccaccaggtcgtgtgcatccagcaccatactcgaccccctggtcgagtgacattggagtcattcttcccatctactcgaccccgtggtcgagtaacctcagctcaggccactcgatgacgccactcgaccccctggtcgagtatcacttcgccataccacctgaccacactcggctattcactccaccatattactcgaccccctggtcgagtatcatcactcaccaccaataccatcactcgaccaagcactcgatcacatctttggagtctactcaaattcgcactcaaccagacaagctgagcacaaggaagagaagaggagaacaataagtgtttggaagcggcctggagctccatcggatcacgaagcccatctcggcctattatcactctatgggttgggcgattaggttattgggcgattaggttattgggcgtcttagggttctgtcctgaaacatccagtcgacattgagtttttgcttcagttttattttcttttttactctagctgcgccgcttttgcttctacaacctgtaattcgagatttttccaagttattcagattccgcatttgatttcacctttcatctactttttatctcttcacttatgcaatattatcatttacctgcatttatgtctttgaggcatgttgtctgagtagtgacttagaattcttaaggatgggatagagtagttgtggaatccgtagtctatagaatggttaagttttagaattgattgaatcccttcaggactagttatgtttactacttatttctttcttaccaactggaattcgatccaaaccattcctgcacccaaaaggtgttcgatggaatgcttgatccactagttcctgagatattcgtctttatcccaagggattggccgtttggagcgtttattgactttatcagtctgttcttattgcctgcatagtaagattccgttaatgggaattagtctgggctagctttgcttgaggatctctatcacgggagtgaattgatctgttggtaaacctgttatctaggaatagcttgattgtgcttgttaaccatctgaataggttaggataccaccccatttgattgccccatccttagaaatttcttgtctatttgatttctctgttttatcgttatcgcttaatcgttctcattgcttgtttcttagtttttgcaattactcgaccaacttactcgaccacacccagtgtctggcaacagactgtccagtcgagtatagttgtttcattttctgtctgttactcgacctgttactcgaccacatcctgcttctagcatcatccagttgcggtcgagtgattttagtaattccgttagaatttctgttttctgcatgttcgcttaggactgttagaaatctcaaaactgttattgcttggcttgacttagtgacttctaataacatttcatttgatatgcatcacacctgattgaattgacacctaaaatactacaacgacatggttagtgttttacgattaattg

SEQ ID NO: 38632 - DNA, 8202 bp, Arabidopsis thaliana landsberg
  unsure (1)..(8202): unsure at all n locations
gctcatagtgctcctaggaaagtagtaaatgaatcttctacaatttattgtgctttaaatgcttcctttgctatttatagaaaggataagaaaattgttgctaggaagataggggcaaaatgcaagggagacaaaacttgcatttgggtccctaaggatatttgcactaaccttgtaggacccaacatgagttgggtacctaagtcccaagcctaaatttgccttgcaggtttatgcatccgggggttcaagctggattatcgacagcggatgacaaaccatatgacgggggagaagaagatgttcacttcctacgtcaagaataaggattcccaagattcaattatattcggtgatgggaatcaaggcaaggtaaaagggttaggtaatattgcaatctctaatgagcactcaatttctaatgtgtttttagttgagtctttgggatataatttattatctgtaagtcaattatgcaatatgggatataattgtctatttacaaatgtagatgtgtctgtctttagaagaagtgatggttcactagcttttaagggtgtattagacggcaaactttatttagttgattttgcaaaagaagaagccggtctagatgcatgcttaatagctaagactagcatgggctggctgtggcatcgccgcttagcacatgtggggatgaagaaccttcacaagcttctaaagggagaacacgtgataggtttgactaacgtgcatttcgaaaaagatagaccttgtgcagcttgtcaagcaggtaaacaagtgggaggaacacatcacagcaagaatgtgatgaccacttcaagacctttggagctacttcacatggacctcttcggacccgtcgcctatctaagcataggaggaagtaagtatggtctagttattgttgatgacttttcccgcttcacttgggtattctttttgcaggataagtctgaaacccaagggaccctcaagcgcttcctaaggagagctcaaaatgagtttgagctcaaggtgaagaagataaggagcgacaacgggtccgagttcaagaaccttcaagtggaggagtttcttgaggaggaagggatcaagcacgagttctccgctccctacacacctcagcaaaatggtgtggtagagaggaagaacaggacgcttatagacatggcaaggacgatgctaggagagttcaagacccccgagtgcttttggtcggaagccgtgaacacgactttccacgccatcaaccgggtctaccttcatcgcctcctcaagaagacgtcgtatgagctactaaccagtaacaaacccaatgtttcgtattttcgagtttttgggagtaaatgctacattctagtgaagaagggtaggatttccaaatttgctcccaaagccgtagaagggtttttgttaggttatgactcaaatacaaaggcgtatagagtcttcaacaaatcatcgggtttggttgaagtctctagcgacgttgtatttgatgagactaatcgctctccaagagagcaagttgttgattgtgatgatgtaggtgaagaagatgttccgacggccgctatacggaccatggcgattggagaagtacggccacaggaacaagatgaacgagatcaaccttcttcctcaactatggtgcaacccccaactcaagatgacgaacaggtacctcaagtggaggcgcttgatcaagggggagcacaagatgatcaagtgatagaggaagaagcgcaaccggcaccnnnnnnnnnnnnnnnnnnnnnnnnnnnnnnnnnnnntcccgtcgaccaaattttgggtgatattagcaagggagtaactacttgatctcgattagttaatttttgtgagcattactcctttgtctcttctattgagcctttcagggtagaagaggccttgctagatccggactgggtgttggccatgcaggaggagctcaacaacttcaagagaaatgaagtttggacactggtgcctcgtccgaagcaaaatgttgtgggaaccaagtgggtgttccgcaacaaacaggacgagcacggggtggtgacgaggaacaaggctcgacttgtggcaaaaggttatgcccaagtcgcaggtttggactttgaggagacttttgctcctgtggctaggctagagtccattcgtattttgctagcatatgccgctcaccattctttcaggttgtaccaaatggatgtgaagagcgctttcctcaacgggccaatcaaggaggaggtgtacgtggagcaaccccctggcttcgaggatgaacggtaccccgaccacgtgtgtaagctctctaaggcgctctatggacttaagcaagccccaagagcatggtatgaatgccttagagactttttaattgctaatgctttcaaggttgggaaagccgatccaactctttttactaagacttgtgatggtgatctttttgtgtgccaaatttatgtcgatgacataatatttggttctactaaccaaaagtcttgtgaagagtttagcagggtgatgacgcagaaattcgagatgtcgatgatgggcgagttgaactacttccttgggttccaagtgaagcaactcaaggacggcaccttcatctcccaaacgaagtacacacaagatttgatcaagaggtttgggatgaaggacgccaagcccgcaaagacgccgatgggaaccgacggacacaccgacctcaacaaaggaggtaagtccgttgatcaaaaagcataccggtcaatgatagggtctttactttatttatgtgctagtagaccggatattatgcttagcgtatgcatgtgtgctagatttcaatccgatcctaaggagtgtcacttagtggctgtgaagcgaattcttagatatttggttgctacgccttgcttcgggctctggtatccaaaggggtctacctttgacttgattggatattcagactccgactatgctggatgtaaggtcgataggaagagtacatcggggacgtgccaattcttaggaaggtccctggtgtcatggaattctaagaaacaaacctccgttgccctatccaccgctgaggccgagtatnnnnnnnnnnnnnnnnnnnnngcgcaactactttggatgaggcaaaccctcagggactttggctacaatctgagcaaagtcccactcctatgtgacaatgagagtgcaatccgcatggcgataatcctgttgaacacagccgcactaagcacatagacattcgacatcactttttgagagacaccagcaaaagggagatatcgaagcgttttatgttagctccgagaactagctagccgatatctttaccaagcctctagatgaacaatcttttaacaaacttaggcatgagctaaatattcttgattctaggaatttcttttgttaacttgcactcatagctcatctgtatacctttgatcatatctctttcatatgctatgaccaatgtgttttcaagtctatttcaaaccaagtcacaggtgtattgaaagggaattggagtcttcggcgaagacaaaggcttccactacgtaactcatccttcgccatcgctccaagcaactctccgttctagggggagaaaagcatgagcatcaaagaaaaggaccggacttcgtctttggtataatcttaactcatttatttatgaccaaagaggagaaagcacttcgagggctctaatgattccgtttttggcgattcatgccaaagggggagacagtaagagcccaaagcaaaaggaccgcaccaccaccaatttcaaaaacttaacttaagtgttgaatattttcaattggtatcctattgtgttcaaacagggggagaaagtagtatttcaaaatgatacatcaaaaccctcttgaacactaagaggagaatctcatttagggggagttctgcttagtcaaaggaaaagcatttgaaacagggggagaaaatatcagatcttgaaaatgcttctcaaaatcttattcatatgcctttgactatttgccaaaggaattttgaaaagatttacaaaagattttgcaaaaacaaaacatgtggtgcaagcgtggtccaaaatgttaaaaacgaagaaacaatccatgcatatcttgtaagtattaatattggctcaattccaagcaacctttgcacttacattatgcaaactagttcaattatgcatttctatatttgctttggtttgtgttggcatcaatcaccagaaagggggagattgaaagggaattaggcttacacctagtccctaattaattttggtggttgaaattgcccaacacaaataattggactaactagtttgctctagtgtataagttatacaggtgtcaaaggttcacaacaagccaattaaaaagaccaaagttgggttcaaaatagagagctaaaggcatcccggaaggctccctggtctggcgcaccggacagtgtccgtcgaccaggggacttcgcgcagaactcctcagcctcaggaattttcagaagccgacgcgctataattcaccggactgtctggtgtgccacggacagtgtccggtgcaccaggggacttcacgctgaactcgccagcttcgggaactccgccgctataattcaccggacatgtccggtgcacaccggactgtctggtgagccagcggagcaacgactacttcgcgcgcaacggtcgactgcaacgcattaaatgcacgcctgcgcgcgcagaggacagagcacgcgcggtggcacaccggacagcctacagggcctgtccggtgcgccaccggacagccagacaggcccacaagtcagagctccaacggtcggaacccaacgacctggtgacgtaggtggcgcatcgnnnnnnnnnnnnnnnnnnnnnnnnnnnnnnnnnnnnnnnnnnnnagtttggtggttggggctataaatacaaccccaaccacctccacattcaagacatccaagttttccacttcccaactacttacaagagctctagcattcaagtctagatacaccaaagagatcaaatcctctccaaattccacacaaagcattagtgattagtgagagagatttgttgtgttcttttgagctcttgcgcttggattgcttctttctttcttgattctttcattgagatcaaactcacttgtaattgaggcaagagacaccaattgtgtggtggtccttgcgggaagtttggttcccaattgatttgagaagagaagctcactcggtccgagggaccgattgagagagggaaagggttgaaagagacccggtctgtgtgaccacctcaacggggagtaggacacctttgtggtggttgccgaacctcgggatattatcttgtgtctcttgtgttcttgctcattgtgtttgttcatgttcttcgttctctcaccattccgtggaagattgtttatatctttttggtgtgtggattttgagaagtgcccttctcagatctactactttgaaccctgtggatcatttagaacatctcatttccaaagttaactgggtgaatttcgagatcaattcagttttacccagtttgcttctagtttttgttgaaaaagttttaacttgcctattcaccccccccccctctaggcaactttcaattgttcaagcgattcaatgggaaaatactgcgctgccgtccgaaagctagaggacaaattcgaagggctggaatttcatcatgtagagagagatcgcaacgcgcagagacgcgttgtcgaaactaggatccagtcggacccaggtcccacctggggttttcgtccaagaagtgccacgcccgagtatttccttagaacaggaagaagattgcaatgttctgagccaaccagagtcagattcagatgactggagggagccaatcatcagatatattaagaatgaagaagaaccagacgacaagaactcggcagaacgcagttgccagacagtcggctcactatacactcattggggagacattgtatagaaggggtgcatcaggcgtcctcatgaagtgcatcctcctgtccactgggaagcaacttctggaggagaccacgccgggcaatgcgggatacacgcaaaatttaggactctagttgggaaggtcttcaggtctggtttctattggctgacagcaaagagtgatgcagctgagttagttcagagatgtgaagcttgccaattcctatcaaagcagcagcatttaccagcacagcaactgcaaaccataccagtgacatggccatttgcgtgctagggattggatatgattggacccttcaagaaatctcaaggaggtacactcatgtactagttgctattgacaaattcactaaatggatagagtacaaacccatcacttctctgacttcagctaaggcagtggaattcatacaagatataatattcaggtttggaataccgaatagcatcataactgacatgggatccaatttcactagttcggagttctttgatttctgcgaaaaaagaagcatccagattaaatatgcatcattagcacacccaagagtcaacggtcaggtagaaagagctaatggaatgatattggaagcactcagaaagaaagtctttgataagaacgaaaagttcgcaggaaagtggatcagagagttgtcgtatgtggtttggagcctaagaactcaacctagccgagctttgcatggaaacactcccttcttcatggtctatggttcagaggcagtgctacctgctgacctcaagtttggggcaccaaggctgatttttgaaagcatagcagaggccgaagcaactaggctggaagatgtctatgtactcgaagaagagcggctgaacacgataattcaatcagcacggtaccagcagaccctgaggcgctatcacgataagaccatgcgacgtcgatccgtcttagtaggagatctcgtcatccgccgaactctagcgggggagggacggcacaagttatcgcccttatgggaaggacccttcatagtagcagaagtcactcggcccggatcatatcgcctcactcagatggatggcacagaagtcgggaactcctggaacatagaacacctcaggaagttttatccctagctatattttagaagctatcgggacgacgacgtactctgtaaagtggaaatatgtcatcaataaaaaggggtttcaaagatactcagtttgttcacgattgacttgcattattacttaactcggggtgaccactatgccctactaacggagcaatcggcttaagtcaaaaacgccttaagtcggtgcgacatgtcacgcttacacgacttagggtgatcactataccctactaatggagcaatcagcttaagtcggaaatgccttaagtcggtacgacatgctcatgcttacttaactcggggtgacactatgccctactaacggagcaatcggcttaagtcggcaatgacttaagacggtgcaacatgctcacgcttactcgacttagggtgaccactataccctactaacggagcaatcgtcttaagtcagcattgacttaagacggtgcaacatgctcgcgcttactcgacttagggtgaccactataccctactaacggagcaatcggcttaagtcggcaacgacttaagacggtgcgacatgctcacgtctactcgacgtagtataaacatgcctacgatcactcatcctagggcgatctctatgcctcacaaagataggaagaagtttcaaaactagcatactagatttacttctgcaatcgtaacaactgttggattcaaacaacagaaaaacaaaaagcagcattcagtaccaagaacatgttctaacatagtattcaggcacattaatcacatacacatatggttcatgaatgtattcagtatttctacttggcaatgtttttctcaggagcaaccgatgaagaagggcaacttgaggagtcaggagcagctttgacatcggcgactatatcatcaagaacgatcacgccaggccttctcatcaaaatccgccccgcgcgaatgggtttatccatagctttgtcgcgctgggccttcagaatggtggaattgtcttcggcaatcttggtagccagttgagcagcttctcgctcacggacgaccgatcttttggaggcgcgcaaatata

SEQ ID NO: 38633 - DNA, 3713 bp, Arabidopsis thaliana landsberg
  unsure (1)..(3713): unsure at all n locations
tctcagtttccgatgagcacttcaaaacctcttcacatcgctttctcagcgatgctaagaagattgactgtacaaagccacctgaggaggccaatcttccagttgatactgcctcattgtaggcaagagcaacctgagaccataagattagatccaaaattaggaaatcaaagctgattacaaaagtcaaaatgtgaatcaatgttctttgtttcagttccatctttgcaggaacagtaccttgaggcttgagatggaaagtgaatcacacatgttactatcgcttttgacaagcagatcagccatcgaaccaatggttgtgtacaaagataaataaacctacaacagttatgtaacgtatactcaatattagaatacacattgccaaataaactgcatcaagaattgttccgttaaacattgaatagtagggttaggtggctgtaagtagcaatcacctgcaaaagagctggtctatccttgcttatacagtcaaacaacacttgcagacagaactccttgaattcagaatcagatctggatcaatgaatatgttagaattcgcccttctgagtttgccaagcaaactaccgaactctgttatgacttatggaactaaaagcacaaataaatgtgaatcaaccggataaaacagtacttacctgttattccaagatttgtcacagcacaactgtgcaaacgctattaggcttggatctgatgagaaagtgctgaccaagtgatcaacactatcagaatccagttctctatgactattagcaatcaaattagattctcccagagtccttaaaccaaaaacctgtatcacagaaagcatacaaacgtgtatcagaaccagttttctatgactgaatattaatctatctgagtcaagagtatatgatggcgtatacaaccttatgcattgctcgcgaaagcagtgactgacacccaactggatcatcaacatacgaacaagctcctactttccttttgacatatataacaccagaactgaagggatcactcttgtccccaaagctccaccaatttttctctatatttcattggataaaaataaattatcttaaaaccaggtagacaaaatgaccaaggacaaataaggaatatataagcaaatgcatcaaccaccttcggggactagctcaatttgttggggccagtatcggggaccacatacacaaattctctttagctgcaggatacaaatacatttttaggtgacgtggacgaaacaaacaggtagaatggctgagcaagtatttcatgaaaaaannnnnnnnnnnnnnnnnnnnnnnnnnnnnnnngcctagttttctgatgtttcaacttgcagttgccacaaatgtgcttctaccagaaaactatttttttttcataatcttgtagaaagcagtgtgacatgcaaatcaagaaaccttctgtagtttgttcataaaaaatatgcaaggcaagatgttgaacttttcttacaatatcacgctctggcagaatgcacggtgttatctcgcaaaattttgtttgtgaataaagtttcgtctctgttactgtgacttctagaggggcatagacaggcagaccagaatcaacatcaatggtctgcagccagcgagcctctgttgcaaggacatataaaagcctgaatgcctaaaanaaaggaaatctcaccttgtcagatgtattcttgcaaaagcataaatagcacaacaaaagtttgaaaccaacttccaagcttagcatgtctttgatatcacaatcgacaaagtgattggtgttgggtagcattttctatagaaaagcaactcttgcttctatagaattgacatattagacaaaaaagagcgatgcaaagaataaataagagatttaaacttgcctggaggtgacaacggttgtcatttggtccagaaggcaaccgtggatagagagtaatgagcaacattgccagtgagccattattcgttgaaaatgttcgcataccgcctccaagaaacaagaatcctgtggctaagctcacctaaaggaaagaaattatgatgctcatatttcacaaaaaaaagaaaagtataggcctctgctcaccaataaatatgcaatcgtaagctagctatagaaagtcacatttttcgatctcattgctcaaacaaaatcagcagcttttaaattactttacatggtgcaagtagttcactggtacattagagtcgaattgttttggccatatgaggttaatgcaataaatgagctagatcttctttatgtttttctgtgtgctcagtgacctgagattttatttattgtttacaagatccccagccccttcaagaaaataactgcttcagaaattacattttaatatccaaacttcaaaaataaaattcaaggcaattgaattacatgaaatcaaggaaccttcattttgcacaaaagtacttactgccatttgtgtgccatagttagcatgtccatcggcagagtttcggctgcggagaaatctcaacaaccgaaaaacttgcaagtctccagatcccgccatgacctacacaagtgagtccttccatataaagctactgactgagttgaaaaatgaaaattgttggacaggaaactttaagaagtattaccactgacagagaaataatgataagataaagacacatttcaagtgttccccgatcaacaaattttgatattcccctgggaaatgcatttccaggtgtggcagaaagaggcttgatctacatacgtgaaaacatataagctcacatagagatgaccagaagcaaacccagagaattattagcatttgaaggagaaaaaggagtaacaaatataacatttccatggatgatatacctcattcaaaagatagagagcgtaggagttaagtaagtcacgagcatttccatccctcgtaccagcaaatctcagccctatcaaggcgagcaatactcgcatccccttcaatcaatttgggatgccctcgatctgacatgtctcttgaaaagagtaacatgaagctcagaattgtgggtgtattcaatactcccaaataaaaaaaaaaggcgattggtctatggtcgattcagaaattcaaattgataggcgtacctcgtgaaaagaagaccttgttttgtcgaattacgcattcccttatctttctaaaagaaaataaatttggttttttatagttttatattattttatttttatataaagtaaacaaatatgtcatggttgcagaagtctatacatcgcatataagctttaagaatattgtggcataaccatcgaggtgacgcaggacctaaaagatcgaatggaacaatacatagacaaataaatcccgtatgaattttaaggcattcctttcacttaaggtaaagagtattccggcattcgaagggaagtagactactcaagaatttgacatttttttctgtcgtaatttttaattcactaaagaatttaaatagaaatcaaagaagaattaattgaatcaatgaaatgttggttggtttgcactgagaacttgagtaaggcgtagattctttttgggtttttcactttattttataaaatgaaatttgaaagcgagacccctttctttatttggtataactacttgagccggatgagaggaaactttcatgtccggttttgaggggggagatggtatagtggaccctatc

SEQ ID NO: 38634 - DNA, 445 bp, Arabidopsis thaliana landsberg
agccagtaggtttgcctacaagcagccacccttgaaagagtgcgtgatagctccctcttccttaccataggaagtatttgtgaaataacttcgatgagaagaaaaaagagggcgttaagagaccctactggcctaaccctagacactctaagatcggggatgaaagcagatcccgttgcgaggcaagagacaaataacatgaagaaaaggctcgaacggaacgagccctgcgccaccccggaaagaaaggggcgacctcggagcactaggccggggaagatacgtaggaaggagctcaatatgagatgcccaatggggccgaacctaaaccagggctcgagagagagctgaccatacacggaggagggaagtatgggttcccgagaagagaggagccatggaggaccgctccggaccggccggagcccacgagggaatagaaacg

SEQ ID NO: 38635 - DNA, 5346 bp, Arabidopsis thaliana landsberg
gctgagctctttattctgcatagcgtcctcatctttttcttgacgcattagccatcggtcgttaacgttttcccagaatttttcgtagaccccgctgagataaataatcttttctgtgcaattccaaatgtgaagtaagtcttcgtatcttattagtgaaactaaatacttgaaattcaacggatcccctgctttcttctttttgttcttcaaatgaaatgactatattttttatcataaaaagaaatccttccccttttaatatgaattgaaagatattaattttactgatcagtaataataatggtagtttttttgtacaaggatcttaatttaattatcaacctcttaattcttcattttagaaaaaaatctaaatttagatctcaaaaagaaggattctgttaatttatttatgaatccgctataattggtatctatgtgattgattaaattaatctcatgtataaagatttaatttaaaacaatccctcatatttgtgcatatagttgttttcatataccgtaacttattatatatagtaaaaagtatttatgattaaggaattggaaatcgcgtatacatgcgtattcttatcatactgaaatgatttccgttagtagtattaaaccaatagcgattcatacaagctaaatcttctaatttaaaattgggccaaagaaaggattttaaattaattaagttatttttatccttatcaagatcaagatctttctttttatgcaaaacggtggtcaagttttgaatattcttatcaaatcttgaatttgtatccctagcattttttttttttaagttgaaacaaattagaattcgaaattctctacgtcgtttaggggatagaattttttcagggacaaagaaatcataattatttttttttttatttacagttttgttttgatattttgtaatggatttttcaaaaaattttttattaatatagcttttttttttgtatcttttacttattttgtgtttatttttatgaaccaatgaaatacctatggttctatatataataagttgtccatcgttttgtacagacaaacgcacaggttcaataatcaatattccttttttcattaattttgcaaaagtgaaatttttctcaatcattagaatgtctaggctcatctctcctctttcaatagaagataccgctatttcgtttggattgtttagtctaaccaagagacagtatacttttacattattgagaattttttgattaaaaaaacaattccatcgcaattgaaaacgcgaatatcttgtcagaaataaatcaagttccgcttctgtattacttttgtattgttttttatttttacgtttttttattgttgattctgcaaaattttcttcaatatttttttcttggtttaatcgagctgcttcgggatttctttttgtttctttatctgattcaagttctacttgaccggccgattctttttcttctttattcagattataaaatcgaagggattctttttcatttgatggtataaaaccttttttctttcgaatgatctttttattaacatttatgttttcattaaaatttaaaagaagtaatttgattggtatgacccatggtttcattttatatgtactagaaaataagaaaaattccggaaagaaaaaaaattcaaaatttgttatacgctgatttagtatttcttcattcattcccatccaatcaaaaaagtttctttttttattagcaagatccgtctgcgttattttatcaattttttgataattctgaactttagtattaatatatttttttttactcttagtatcaacccaaggctcaatagttactttttttgtaaaccaaaagttaagaattctccaatccaaatattttctatgccgaatttcccccataccccgaatattatatttttctagaaaagaagagactaaacaattatctagggcaatgcctatagacatgtcaaaatttttttctgtagaatgaatagatttatagcaaaaaagattatatatagaatctttttttacattatgttttggatttaataatgagtcggcctcaaaaaatttttgttttttataattatcaaatttctttttttcatatgaatcctctttggttaaacttgggtttagaactagagaatctttatttattttatgtttccaattttgggttactaatctagcccatgaaatctggggtaaattgtattgatactgacttcgtaaccagtttttccattgatttacttcggaattcaaaaaggttttatttttcaattcataatgaaagattccgtgttcttgaaaaaaaacctttattttattcttaacaaaaaaggatgttatgcatatgttatattcaagaacagcctttaatttacaaaagttactaactttaatttgtgataatttgtaaaatacatatgcttgtgataaagagcataggtcataactcattttttttttattggatattaaattttttatagtcgaaataaaataaagagtatttttttttttttctccattttcttcattcttgtaaatatatttatcaagaattttttttgttgattcaaaaaaaagttgtgtagtaattcttggaatattaatgatacctagaaaaatagctatagacatttgttcgatgcaaaatttaaaaaaaaaaatggatttacgaattaatcgggtattttttcttttgaatgtctgccaaattttttttgatgactcaattattttagaatcataacgcagtttggtacaactattagttaagttttgtttttcttttgaaatttcttctatttgatttctgattgtcttttttctatcaatcaaatttttgatttttttttcgctaagtgaagaatttgtccactccaaggatttattttgaacagatagttcatgaatcatctgattacttattattgaatcttttttaggttcatttaattcatatatttctctcgggccaaataatggaattagatttcgttttgaaattccttttataaaaataaagtttttgagaatccagtttttagtttcttttgcgacttttaggaaaatgggtgctctttctttgaaaatctttaaaaccacaaaagactttttttttaattttttgattcttttttttaattctttagaaataggttcaaaaaaagaaggctttctttgggcagaaccaaacggtagttcggtttccattccccaaactgttaagaaacaaaaatcatttttttctcctttgtcttttgttttttttagtcgagccttctgagatgcttgaaatttagatttatgccaaggtttaagataaaaaggaaataggatttttatctgaataccatccgttaaccagtttcttggaaattctgtttcggatagttgaaccccattataagtacatttaacatgcatttcacgtttccaatcctttaaatcctgggaccactcgggaaattgaaataataacatacggacactgtttttaattattatcaataaaggtaatataatatattttctaagaattgattgagttactaagagagaacctcttattatttgagcaaataggaagctatcccaagtttctgcaatttctatccgtcttgtttcttctctttttgattgttcttcttcttttttatcaattttttttttccaaatgaaatttttaataatttttttttttagcccccatatatcaaacgaaaaaaaaaaaagtttatctattctatcaaaaaaaaggggggaatgtacttttgcttgaaaaaattcccaaataacagttttacgcctttgggaacgcatggatcctttaattatctctcgacgaaaatcagattgttgcgaataacggatcaaagccatttcatcgttttgatcagaattttgattatctttgagattagtataaatctcgccatgtggctctttatcagtaaaaaccactacacgttttgcttttcttgaacgaattccaggctccattggtacattttcttcattttcgccttccaattcttccaactcacttattaatttgtatgaccatcgaggaacttttttattgatttcagggaaatccataaaattttttataagcgtttgatcgttgctatcagttctaacaatatcaaataaaaatttgaaagttttgatttcttcttctgaattaattttttcttcttgttggggttctgaaaaaaaagaaagttttttctctattgacaaagattttctattaaatttttctattgtttgctcaaattttttataattaatcttcagaagtagaccatgaatcttgtttatccaggatcctcctaaattgttttttctataggtttcggttatgatttggaatggaggtaattttttgattcttccccgagagattccatgcaaaaaaggatcataaattttaggtaaatattcttttttagcttcgttataacaaaagcgagtcgttttttccagtatattttcaacagaccattccttatctaaagcttcaattctatttaaaaattctttttttaagttttcccttttttcttcatggatcaaactccaataagtagaaacttggtcaaaggtttttttttcttttgtaaatgaaggtatccttttttggatcatttcaaaaaaggtggaaaggttggggggatatgtaaaagatattcgttcttttccatcactttggcatgtataaaaaaaatattgtgacatttcatttcttacaatattttcaattttatcattttttatatatcggtttggtcgattccatcttttataatcgaaaactagagttacaaatggtttttcaaaccataaaaaatgatcctcttttttttttattttgaaaaattctaaattcgaattttctttatttccatatagattttcagaaacagttttatagttatagtatgttcgaacgtggaattcatcatccttattaattttgtcttttccattcactcggatttcttccatttcatcgattttgtccagatcttccccttcttccgaaaaaagagaaggaaaaggagcttcttcggtggatacctcttggtcctgtttagtcccacccgtttctgaggttcctttaagtttcttagtaaaaatgggtgatggtattctgcctaaatagtagacacaggtaataaataagagaatactaaagattcgagccatagaatttctcaattctgacacaaggaacttatacttattagatctaataactacattagacctaatagtaattattttgcctgtattccagtact

SEQ ID NO: 38636 - DNA, 7121 bp, Arabidopsis thaliana landsberg
  unsure (1)..(7121): unsure at all n locations
cgctttagggtagatgactgtgcaagaatcaacgacgaaagcttaagaaagaactccgaaagaagctgaaaataactaagtattagaaaataggaaagattagactagtaaaaaccacgttagacagagaaaatatcaatcaaggaaaccttattgctatcgagtggtgatcgacaagactatgagcaatgaatgagagtaatcgatagaatttatatctatcaaaaattcctccaaaaagatcggaggctattaagaaatctccatgaatggacgagaaatcctcaagcatgatcaagagtttctgagaaataatcgtacatgatcaagaaattacgtatcgtaaggtagctatcgatcattttgtgtcaaagttgtcgagcaagtatatgttctatctgacaaaaatcagattggttcctatttggcaagagttgaatgagaaaatatggatttgggtgagagatgaccgaggaatcaccaacaaattgaaagacgcggtcgagcgtgggcgaaggagtgacttgttaaccgactattgatcgtcgaccaactctttattgtcaaagacggtcgagattaacttgcttgcggctcaagcaacaaaaattggagccaaagtctagacacaatgggttcgaagactcacctcttggagctgaagcttcaccggctaactgtcgctaccgcgtgaatcatcaaacacttgcagggagacttttccgtagccgaccgcgacccccgtctgtgatacgtattgacgcacgacgacacatgaaactcgactcttgcctataaatagtcgatttattccgtttattttgttgtttgaggaaaaaaagagagaaacggttaagagaaactccggtttactgagaaaagttaccgttgatcgagaaagcaaattctcgtgatcgaggtgtctacacagggatcaaatcaatcattattggatgatcgagaagtttatgcagttatcggagaaccgtagtcttgtgatcgaaaaattcacaaattgccaaaattttgtgagctgtggtagattgtgtgatttactacccaaaattctagagcttgaatttagatacaaatgcatgcatgctcaaattcactaaggattgatgaaacctttaaaatgactaagttagaaatgagacatgatccacatgcgatgttttatcttaaattgataatcatctacaatattaaataataagtggtgcatttatagtaggatttttacgcaggtttttaattcagatgatcaattccctaacattatcatgtcattgcagcatttaaggtgtcaatccaaatgggtgtaattactatcaatcaggatatgatcaaagaatactaagtcaagccaagtgtgaataagtttggtgtgtttctactaaacctaagcaacaggttaacatgcaaatcaaattcagaaataaaactatactaagcagaagataaaggactcaaataacaagaacagaaagtaaaccaagcacaaggtaaagcactcggtcgagcaaacgagtaagcagtcgagtacaatactaaaaacaccaattttgcacgaaacgaacagagtactaaaaacacgagttttgcccgaataaactaaacagagctcttaagaatggggtatttggtcttagtggactcctcaatccattggctaactaacaaactcaatcaagctatccctagacaatagattcaaaaccaaatcaagccacttccgtgtgaatgattctcataactttagaacttcctaatctcaatttccattgatgaaacataataaagcagagtttaaacaccaatctattaaagtcaataagcagtctaaacatccaatgccttgggctagaatctacaaatctctgaaattagttggttcagacatttcatcaaacaccttttggatggagaaagtctgaaatcaatttttaattgatcagaaagaaaatagcattaagaactcctaaaacagaagggaatcatgcatataaacacttagctagctaaagaagagaggaatccacctaaacctaacccatcctcaagaactctgaagaacactgaagaacatcatagaacaaaacccagaaaattcataaaacccataaatcattataaacttagcaaaagatagatctcaatgagataaacaagtttgtagaagaattgcaaaaacttaaagattcaataggaaattaaagaaacatatttatgatttttacaaaagaggcaaagaaatctctagaacaaaagaaataaaaaaggaatttccattaggtaaagggaaggggtctatttatagcaaatactaggttgacctaattcgctagaagacaaaatagagaggcggtttggtccaactcaacctaaggtcgagcaggtgcaaatcttcaagatttattttttcttcacttgctcgacatgcacggccgagcaaaaaggccgagcttaacacaaatcttcaaaaatggcttctaattttctgctgtaactgttacactgttgcggcttttgatgtaccactcaaccttatcccatgcatagatctcgagcataacttcatttcttcgtgaggcatctctttagcttgatcactcgacgacatcccgagtattgaccccgagctcaacttcttagttccaaaaacttccaaaataggtccaaaagcacatgttttacctttaaatcacttaatatgcaaatatattatgcaatgcaatgcaaaacatgaaatgtgaaagaaaatgactaggaatgcatgaaaagagtcttgaaactaagctaaatgcatggaaagcataatctaaaaagtaggaaaattcagtgttatcagtgagtataacaacttaaaccgcaaccggatcttaaaagcctaagtattgttttcttgttagaagaaacaaagccaaagactcatatggaatttcgctagaccatgaaagctttgagaagcaagaagaaggttggttagtgttttggagccgaatatgacttgatgtgatgtgtatgattgagtataggaacttaaaccgcaatcggatcttaaaagcctaagtagtgtttccttgttagaagatacaaagccaaagtgtaacaccccaaacccaataacttgaacccaccctatttgttttgctaaaaaagagaaacaaacnccatgtggcccttttaagcccaagtgaagcaagtcacaaaataataagggtttaattacatgtatatgcatatgtatatatctccctcttgagtcttcacgcagcctcttctcacgtcttcttcatcaccatcacttccttatctcacatctcaatcccagccatcatcatcatcgttgtaacgccggagttgacgtcacgttgtggtcgtaagtgttctacgtggttggtttcgtcaccgttcatcgccggattgttagtaaggaaaacctatcatagttatgaactatactactgaaattgtttcacttagcaattgaattcatggatcataacttcaactattggatttttgtgtgaatatgtgaaagaaggaaacaattcaagtggtggaattggtgatccgtttcccgtcacgtccgaaggagtttggcgagttcttaacggttctgagtagatctcgttcccaagttttcataacagttttcagatccaaaattagaggtaagatcgatcggaaaatcgcatttaaagttgatgattagtcacagtttttcagagccatatttttccaagtatctgaaacagttgcgtcttagggttttaaggaggcatttccggtcactcctaagcatagatagaccaaaagacggttgtatccgatagaggaagtgttagagaagccatgggacccttcgtcgtcactagaaaaggtataccctagctgccacgtcgattgcttgttggacaagaatcacatgttttgccaaaactgcagaaaccctaatttgtctttgtgctgtcttcttctgctgcaagtttcagatattgtctaggcatcttcaacctttttctcccagtttgcgtctcattccgagttgctaaggtgagggtgtgttctattgagattcgattacaagtttctatgtttatgcttcatgattcattgcataggaatagatctgtttgcttagtaataatgaattgttaattaggattgatgataagatgattgttctagaaatataggatgattgaattattgtacttgtgataacagttaattatatgtgttatatgagaacgtggaatcaacatcttttgagatgatgaaaagtggaacagtggaaaatggtctacattgaattgacgggttctttgtagctcaataaaagactaacgagtccagtggaactagataggttcaaaggtcagggaaatgatcgaacctggaaatgatgtggagatcttgcttaagcaagaatgagttgtgtgttatagttttatataatagtgcaaactatatgagtgttatatctattttctatgtgattgttgattgtggtttaaaggtagaatcgtgtatcgtttttccagtgggcggaaaggatcctctcactgagtaattctttactcacccctttcttttccctttttccccaggtcacggtgagaatcgtgtgtactcactcaagtctgtctcgcttatggtgtattttgggaacctcagatttattttctactattgttattttttatacgatttattaaagagttttcaatgatttaagattatttttaagacaattttgtatttgaattaagaaagtggaatcgaggaaagatataagtaaggggaaagcgcgtcgtcttaatgttgtgggagacgggtgtgacaaatggtatcagagccaggtaaagtcaagccggtgctgacccggaaggctaagtcgaagagttttcttaaaagatagattttaacgaagtgttttaaaaataaaaaggttttagtatttgataaacgggaaggggatttttctaaaagataaaaaaacaccataagaagtaagactagagctttagttttgttaattagaattgttgtgattgttctgatattgatgtttggtttgtcagaatggcacccttaaggaaaagaggatgttttgcgaaccaaagagttaaccgtgttgaagatgcatccgctgattgacaagctcaaccaccagtaggtgatgttccagtcgaagatcaggctgccatcaatacatcactgttaggacagattcagggtatcagaagaatgtttgaagagttaatgaaccgaattccttaggcagcaccagcagcagctgcaacagctcagcaaccacaagaaaatgttctacctcagcaacaacagccaccacctccaccgccactacctccaccgccaccactaccagctcagatggcagagccttcctattaggagataatgaaggtcatgagaaccatgggcacaaagtactttactggaggtattgatctcgtcaaagcagatgattggaggaagttgttggagaataattttgagaatgctaggtgcccaatggagttccaaaaggacattgctgttcattttttgagagaggaggcacgtcattggtgggatggtgtagtgaggaacacactagtgcaacatgtgatttcctgggaagattttagggaagagttcaacagaaagttttttcctcaagaagcaagggataatttggaggatgacttcgaggagcttcgtcaggaagacagtcagagagtatgagcgggaatttagtcgtcttagcaggttttcagttagagcaggaagaggagagcagtcaatgattcgtagattcatgagaggattgaggccgaacattctgacctgatgtgcttctcgagaattttttagcatgatagacttggttgagaaggtagcaaggatagagagtggacttgttctagaagctaagcacctgaaaagtacttaagctcggacaactcaggtagttggatctcaaaagcgtacatgggataaccgtgaagcaggaccagttcagaaccgtttccccaagtgtactaggtgtaataggcagcatggaggggtttgttggatggattcagacaaatgttttcagtgtggtgaagtggatcatataagggagaattgtccggaaggtaataataagtgtaggaagtgtgggcagccgggccattatgcacgggagtgcactacgtgtctggtggaagggaatcaacggaacataaatgacgggaaccaaacacttcctaagaggcaagccataggacctcgtgtgtacgccgtagaagaaaaggggcttgatgttgagcaagataaagtttgaaattcaaattccaaggtcgaagaagttcacgttggagtggacagtttaatcgttttaagcaaagatttcttttaggaatttattctttttctttattgcagttttcagttgttggcatatgcttaaacatttttattcaattctttaatggtccttttaataattttggacgtctgagaactcaagttttcttttagtctttttatagaactggggtaaaccgaacactttaactttggacgtctgagaactcaagtttctggttcatttgtattcggaatcattttagtctttttatagtatgactctgaactattgcccaatttttttaggaaatgtgggacattggggattcaccttggggagcgcctgtgttatttgtgaagaagaaggacgagagtttcagcttatgtattgactaccgagggttgaaccaggtcacaatgaagaacaagtaccattttccaaggatcgatgagttgttggtggatcagttgaggggtgctatttgacgtcaggttatcaccaaatcccgatagcggaggcagatgttcgcaagactgttttcaggactagatatagacattttgagtttgtgtgatgcctttcggtttgactaatgcaccagcaacgttcatgaggttgatgatcagcgtgttttaggagtttttggacgagtttgtgatcatctttattgataacatcaaaatgtattctaagagtcatgaggagcatgaggtacatctcagcagagtgatggagaagctcgaagaacataccc

SEQ ID NO: 38637 - DNA, 8639 bp, Arabidopsis thaliana landsberg
  unsure (1)..(8639): unsure at all n locations
tctggatagcaggaggtgcaatttccttcctctgacggtgatcacgtggtgcatctccatcaccaatgttggcaaggccattttgttgattctgttcgtcagtcttttcgagtagttgctgaggtacaaggttaactgtggttctcctttttctgagttcgcgagctgtgcggttgatgttgtcgttgaaaaggaggttctgatttcctgttgatcgagttcgcatacagcataggtgtacctggatcaagaagacaacaagtaaaacacacagttagtgactgaaaagaaaattgaaaatgaacttgatctaagcaagtctgaaatcttaaatgtaacaaacaaacacccaattggcaatggcgccaaattgataataggttttttagtcaattatcctaaaacaccaatcatgtcgttgtagtattttaggttgtcaatccaaatgggtgtgatgctaacaatcaagatgtgatcagaagtcactaagtcaagccaagcaataacaggttttggtgcgttctagcagtcctaagtgaacatgcagaaaacagaaaatcaagcagaaacaaataaacactcgaccaacacagctctttgcagagcactgggtgaagtcgagtggcaggtcgagtaacaaacagaaaataaaacacaggtactcgactgcacagtctgttgccagacaactgggtgatcgagtacgaggtcgagtaacaagaaagaattgcagaaactaagcaacagatgacaagatgcagtaaacaacagtagagaaacaataaaatcaatcagataaagaattcccgaggatggggtaattgagtagtttcgtttccttagtttacaggtgattgacatgctcaataaattttccctaaaaaacaagttcattaaccaaatctaagtgccaccgcaatagagaccctcaagttaacctagtcccagactcaatcaccattgacgagagctaacctaacaggcattacgaatcaacaagttaaagccaaaacgctccctgcaaccaataccttggtacagagccacgaatctctggaattagtggttcatacatttcatcgaacaccttttgggcgcggaaatgtttgggctcaaattcctgttgatcaaaaagcaataggcattaagaacaactaatccaaaagagatctataaatcaaactcaaccacttagcatactaagaattctaaactactctaacccatcctcagaaacctattcactactcagacatcatagcaaaaagcataaacgttgaatggaatgaaagcatgataacaacaaagtaatagcaggatggtaacaagatgaaaaacagtaaacgaaatcaagaacaaatactcaatactgaatagataaagggaaattcggattacaaaaggtcaagcacacagtgtctgcgaaataaaacttagataaaaacttgttcacaaaaatgtaaagtacatgctagttatagcaaaatattctgaaaccctaatactcaaaacgacgcaatattgagacgaattaagaactgtactccacccaggttgtcgagtgagaggtcgagtgataagctggagtcttcttttcttccttgtgctcgagtgtctggttgagtgcgaaatgaagaagactctaaagctggcagtcgagtatgtagtcgagtgatagagatgttggtactcggcttggtggtaaagtgatcgagtgaaggtgatgaatggaccttgtggtagagtagggtgtccgagtgaaggtgaagtggtggaggtgatgatactcgaccagggggtcgagtggtgacgtgaagtgctgaggtattctactcgaccaaggggtcgagtggtctgttgaagtcgtgaagcatctactcgaccagggggtcgagtggtttgacatgatcaggtccgcttcttccagttagctcgtcaacagctctgaataacctgaaattaacacaaatatgcaacatgcatgcaaaactatcctaaacatgcaaagtgatgacaaatgatgagaaatggtataaaacagtgatgatatggtgctaaagtgatgacaaatggatgctcaaaacatgcaaaatacacacttatcatgtataagaacttgaaccgcaaccggatcttgaaggcccaagtagtgtttccttgttagaagatacaaagccaaagactcatatgaacttcggctacaccatcataactttgagaagcaagaagaagcttggttagtgttttggagtcaaatatgacttgatgtcatgtgtatgattgagtataagaatttaaagcgcaaccggatcttaaaggcgtaagaattgtatctttgttagaagacacaaagccaaagactcatatggactttggctacaccatgaaagatttgagaagcaagaagaaggttggttagtgtttttgagtcgaatatgacttgttgtcatgtgtatgattgagtatagcaacttaaactgcaactcgagcttaaaaggctaagtagtgtatcctcgttagaagacacaaacccaaagactcatatggactttggctacaccatgaaagctttgagaagcaagaagaaggttggttagtgttttcgagtcgaatatgacttgttgtcatgtgtatgattgagtataagaacttaaaccgcaactcgatcttaaaagcctaaatagtgtatccttgttagaagacacaaagccaaagactcatatggactttggctacaccatgaaagctttgagaagcaagaagaaggttggttagtgtttatttgtgcaaaactcgtgtttttagtactctgttcgtttcgtgcaaaattggtgtttttagtattgtactcgacctgcttactcgattgctcgaccgagtgctttacctagtgcttggtttactttctgttcttgttatttgatttgcatgttaacctgttgcttaggtttagtagaaacacaccaaacttattcacacttggcttgacttagtattctctgatcatatcctgattgatagcaattacacccatttggattgacaccttaaatgctgcaatgacataagatgcatttagggaattgacacacaaaaccctttgtatcaatttggcgccgttgccatttgggtgtttttcttgttacatttaggatttctgagttatataaaatcaagttctgtttctttctttctttctggttactcacttgtttcttcatttgcttgtttctgtcttgcaggtactcttactcgactagcacgtcgagtacatcaaccgagtaagatcaaaacgtatgcaaactcgttctcaaggttctggtaatctcctgcggtacagagacgacatcgacaggattcagcatgaactcagggaacaacaagccacttcaaacccagtagtcatggctaatgaggtgaatgctaatgagttgccaggcaacattggtgctggtgatgcacctagaaaccaccatcagagagctggtattgtcccacctcctattcagaacaacaactttgagatcaagagtggtcttatctccatgattcaaagcaacaagtttcatggactgccaatggaggacccattggaccatcttgacaactttgatagactctgtagtctcaccaagatcaatggagttagtgaagacagcttcaagctcaggttattccctttctcactaggggataaagctcatctttgggaaaagactttgcccgttgattctgtagacacttgggatgactgcaagaaggctttcctcgccaagttcttctctaactcaagaacggcttgattgaggaatgagatctcgggattcaatcagaagaattctgaatcattctctgaagcatgggaacgcttcaagggctacactactcaatgccctcaccatggtttcaaaaaagcctcacttcttagtactctatacaaaggagcattgcccaagatcaggatgctattagatacagcttctaatggcaactttctcaacaaggatgtagctgaaggttgggaacttattgaaaacttagctcaatctgatgggaattacaatgaagactatgatcgctctaacagaggaagtaacgattctgaggacaagcacaagaaggagatcaaagctcttaatgataagattgacaatatggtgcttgctcaacagagaaatgttcactacatttcagaagaagagcttacacaactccaagatggggagagtcttactattaaggaggtgagttacctacagaatcaaggtggctacaacaaaggatacaacaactacaaaccccctcaccctaatctctcttacagaagcaacaatgtggcaaacccacaagatcaagtctaccccccacagaaccaaccgcctcaagctaagccctttataccctataaccaaggctacaaccaaaagcagcactttggacctccaggcttcacccagcagccacagcaaacttctgcacaagactcagaaatgaagactctacttcatcagcttttgcaaggacaggcctcatgctccatgacaatggataagaagctagctgagctcaccaccaggattgattgctcttataacaacctgaatataaagatagatgcacttaacactagagtcaagaccatggagggacacattgcttctacttcagctcctaaacaccccggacaacttcctggaaaatctgttcaaaatccaaaggagtatgcccatgctatcaccacagtgagtacttctgccactgaggacagtgggattcaagaaggggaggttttgagaccaaaatcaagacaggagattgaactcgacttctttgctcgacttgtcgaacgagcatatgacccgagcaacccaatccctattccacctgcatatgaacctaaaccatactttccagaaaggattgcacaagttaatgcaaggatcttccagaaacacaagatgatgttcataaagtgtatcaaagagttagaagagaagatacctttcgttgatactcccaaggaagtaatcatggaaagatcccaagaagctcagcaaatagttgaattgagttttgagtgcagcgctatcattcaaaggaaggtgataccaaagaagctaagtgatccaggttccttcactctaccttgttcactaggacccttagtgttcaacaatagtctttgtgatttgggagcttcggttagtttgatgcctttgtctgttgcaaggagattgggatttgataagttcaagcctagcagcattcatcttattctagctgataggtcagtgagagtgcctcatggaatgctagaagacttaccggtaaagatcggatcggttgagattccaaccgactttgtggttctagagatggatgaggaaccgaaagaccctctcattcttgggagaccatttttagcaactgcgggcgctcttatcgatgtgcaaatgggtaagatcgacttgaaccttggtaagaatctccatatgagctttgatattgctaagaagatgaagaagcccactatagaagggcagcttttcttcattgaagaaggaaatttagatgctgagttgttgagtgggttggaaaatcctattccgtactccattccgactcgccacctaggagagcccgagaagcttcttatgatagaaggaggactagcttagaggttgagactaaggggaaccatttggatgttggtcctattgctagagagcttatggagctcaggaaacagtatggagctcaaggagagaccatgaaaaagttggatctcaagatggaggagctgaactacgctatcctagagcttcaggagatgattaaggggtacccaagtcctgagattgaggaatactttgaggaacctgatttgggagaataggactatactactgatgaaaaggaggcttactttgaggaaagatccaacgaatactctacactccagctaactagagaaaatgcaaagtatgattgagactttgaggattgagcaagtgaggatgaggacttcttagttcctgtcctcaatctcttctctacctaaacattgtgagactcaagcttagtgactttaaacaagctcacttgggaagaagtcccatgtctatccttggatatattgctttcttgctatttttgatgtttttgtttaagtgtttcaggaaaaaaaagacctctaggaatttttcgggcacactcgaccgtaccactcggctacaggccgagtgtgggctttaattaatcaaaggcccaagattgaaccatactcgggccagaccactcggnnnnnnnnnnnnnnnnngcctcatcatgcccaacactgtactcgacacgcgcgccgagtatgtcggccgagtacacacgtgcgaagtcaacacaattcaaattcaaatttgaatttgaatctactcgaccccacacatcaaatcctgctccccaaaggccatcaaagattcttctgcaaacagtgaaagcttgtctcgttgaccaaatgaagggtggagatctagagcgtttgaagggctaggatcaaatcttcttgcctataaacccacttaaacaagctaagtcactcactctttctctttactcaattaatttcgcactttgctacttctctctagatatttcaagattttactctcacttctctctagaattcccagaaattgaaccataatttcttactttctttccatacaaagcatttcaaaacctctcttaaagcttttgatcagttgaaaatttcaaattctcttctactttgacctactttcggttcttttgggtgattatctgcagtaactcaccacaagaccatggattctgaagaagcaagaagaagcaagaagaagagcctctactcgtgctgtagatagagggttgccatgatcaacaagaaatgtccggtttggaatcaggaagctgtgagtcctggttttactcggttgacaggccgagtacagtggctaagtatgactccagaatcttctgtgggtcgttctgctgctgccagggaggaagttgcaaggggaaagagggtttgggaggctgagccagctacaatagaggaggagcctatgttagagagggaagcatctgaggaagatgtagagattgctgaggaggtcttgccagttcttgtaagaaggagaatgaacaatccaaggaagaagaaagagcccaccattgaagagcactaccagtacctaatggagctgagttttgaagggacaagatatctccataggccaaccatacaagcattggggatctgtagggatgttgaatatctcatggagatggccaagctagagacattcttttcctacaagtgcgagggatacaaggaggagagctgccagttcctagccaccttgaagctccacttccatgccgatgagagacagagaaggaactacataaaggggtggagtatatcacattcatggtgtatgaaaatcactaatcccttgctattgtgcagctagatgttgtattcaagttccctaccaagtatggaatccgccataactttaacaaggaagagctccatgatttgtggttaacaatagctggtctgcttctctacaagtcagctagggctaagagttcagcaataaggagtcttgtgcttaggtatctccacctttgtattgcaaatgccttctttccaaagaagacaaccggccatgttattgagggagagctgaagatgcttgatcttaccttatgcttcattttgggttacacaaggaagaaaatagagatggaaggggataggtctgatacatctctttcggtggtgttgatagatcatttgataagcttctgggaatatgcaaccggcattcttcaatccggttttggagacagcttgtgtgctagaggagtgatcacacccatcctaatagctgctggagtccctcttcatactcccactgtcacagccaactatattgatattgagcatttgaagaagaaaggcttcttggataggtctgctccagttaagcaactccagttcaagtttaagcactccaagctaggtctctctaggctagcacttccttgcaaggagtacaccacagttagaactggaaacaacattgactttgatcctcctccatcaatcttagtcaatgtccatgcacctctacaagcagagccgagcataggaagtgagtctcaagaagaaagagcagagttcaatgaagaagaaggtgagcatgaagcttatactcggtcgagtgactttcagcaggccgagtatggccaggccgagtatgaacaagctgagttcagtcgagctgaacagtttgatgaacaagaagattcgtgtgaagctgcagcggtgcagtttttctttgaaaactatgctaagtccgatcaagagacagatcccggtcaagttcacaagaagttgggaatgctcaagggtttgggcaagtttcagagaaagatgttcagtgggttaaagaagaaggtgagagagatgaagagagcaatggacggcatggcggttcaaattcaggagctgcaaagaaggcagagatcgccaccacctccacccgagttcaggagatgtaactcaacgagtgtggcacaacaaagggatgctc

SEQ ID NO: 38638 - DNA, 1804 bp, Arabidopsis thaliana landsberg
aaaactctccgtttcagaaccgccatgtagatatttcgtctcattcgagctcggcctttaggtgcataacgaaaataatatatgtaagaatgggatgtcattatgaactaagcggggctaatgttttttacaagaaatccctagccaaccttcttgcaaaagatcttttcttactaccaagtgggttcatgctagataaaaataaaaaaggaaactctaaaaatttctttgttctcaacgcccctaagtttccaggaattagtcacttcaacagtcttcaatggttatacgggtatccaaaatacgaacgagatggatgtttattgttccaaccattttaattagtcccaatcccaacgaagaagaagaaagaaagggaatcatttttaagaaagttttcgtgttgttgatttctcggcgtagtgcttcttcccctatgcctcctattcgtatattgtattagtgtagtaggattgatctgtaatacgggaaccataggtaaaaaccttttgctcaatactataattcacaattgaagcatctaaggctgcattaatcgtggatacatgacagaagggattgttttttttatattataaacttcaccttcaaaagcgtagattttttttcaatactcgtttttctttctattccaatcaaaatcggcgagaaaaaaaataatgataatcaaatcgcaccatctctgtaataagtaaatgcctctttttctccggaagttgtcggaatgactcgtaataagatatcggctacaattgtaaaggttttatcaataaaatttccatttatacgcgatcttggcataggtagtaatccattctctaactctttttatttcctttaccttttcttttgtgagaaaattttctcacaaacaaaggaattgtatagtacgaactaacataaaagcggactcattaaaaaaaaccttctatctacttccaaattttccggtcaaaaagggtatctattaaccataatctaaaaaacgatgaataactcgctattcacccagatactcagtcataatcttgatgtcggagagatggccgagtggttgaaggcgtaacattggaactgttatgtagacttttgtttaccgagggttcgaatccctctctttccgtactttcaacaaattcaccaatcttacgtgattgaccacaatgtatcaaatccaataaaaaagaatcgatataagatctaccttgttttgattttgaaatagattctctattcctaatttctttcatatggaaaatgctgggaagagcaaacaagggatcccaatctccctaccaatctatgatacatgaataggaaaaatattctttgacaaaatcccttaccttgtgcctttttatttttaatggaaaaggggagttgtccgaactcttgtttttagtaattttttttttttttttacttaagttaggtttattaagtctgtcgagagtaatattctacgacaagcaattcatttattttcaaaccgacgcatttcctatctattatttgattgactaacccttcatattggaatgtgtgaagagtcagatggtttggcaattcctcagggcagatgaatcaagaagattttgaaccaaagttatagagttttgttcatccttctctgtaatactatcgcgcggtttgcagccatatcttgggacatggaccatgcggccatcaactaaaatatgtccatgattaactaattggcgcgcttgaggaatagtcaaagccatccccaatcgaaaaccactgttatccagacgcatttcaa

SEQ ID NO: 38639 - DNA, 1710 bp, Arabidopsis thaliana landsberg
ccattttgaccatgaaaacactaacaaagctattgattgtttcgaattatatttttgttgattttagcggcttttgggagaaaatgggtatacgtgttgtataaacactcctaagccatcagtaactcttatgattagtcaaatgcattagattgtgacacattttgaccataataacactaacaaagctgtttactacttccaagcaattttttgtatgttttaacctcttttaggaggaaatgggtataagtgttgtctaaacactcctaagtcatctctaactcttgtaattagtcatatgcattagattgtgatacattttgaccatagaaacactaacaaagctatttactgattctaagcaattttttgtgggttgtagtttttttgggataaaatgggtataagtattgtctaaacacccataatccatctctaacttatataatcagtcaaatacattggattgtgaaacacaaacaaagctatttactttttctcagcaaattgtgtaggttttagcttctttttggagaaaatggatataagtgttgtctaaacactcttaatccatctctaacccttataattagtcaaatgcatttgattttgaaactatttgaccatagaaacactagcaaacctatttaccttttctaagcaaatttttcttggttttagcctcttttggaataaaatgggtataagttctggttaaacactcctaatacatctttaactcttattattactcaaatgcattagattgttacacattttgaccctaataacactaataaagctgtttacttattctcagcaacttttgttgattttagcctcttttaggagaaaatgggtataagtgtagtttaaacactcctaatccgtatctaacacttttaataattagtcaaatgcattggattgtgacacattttgaccaaagaaataccacacaaagctattaactgattctaagcaatattttgttagttatagcgtcttttgggaaaaaatgggtataagtgttgtctaaacactcttaatccatctctaactcttataattagtcaaatgcattcgattgtgacatattttgaccatagaaacactaacaaatctattgactgcttctaagcaagttttgttggttttagcctcttttgggataaaatgggtataaatgttgtctaaacacccctaatccatctctaactcttataattagtcaagtgcatcggaatgtgacacattttgaccataaaaacactcagaaatctattgactgcttctaatcaagttttgtatattttagcctattttggaaaaaaatgggtataagtgttgtgtaaacactcctaatccatccctaactcttataattagtcaagtgcattggattgagacacattttgaccataaaaacactaacaaagctatttactgcttttaaacaaatttttgttggttttagccccttttaggagaaaatgggtattagtgtttgtctaaacactctttatccatctctaactcttatatttagtcaaatgcattggattgtgacacattttgaccataaaacactaacaaagctgtttaatgcttttaagcaattttttgttggctttagccttctttaggagaaaatggatataagtgttgtctaaacagtcgtaatccatctttaactcttattattag

SEQ ID NO: 38640 - DNA, 1736 bp, Arabidopsis thaliana landsberg
attcattccgaatttaagaattcagaatgtaagaatgaacgggttcgctttgaccgttaagagtcggtaacccgttccctgtgtctatgcttacattccgttgtatcggcgagcgaaatgggagcagcctaaaccgtgaaaacggggctgtgggagagcaaaaaaagcgtcgtgctgctaggcgaagcggtggagtgccgcaccctagatggcgagagtccagtacctggtaggatcgtgggcctatgatgtgctttgagtcgcattgggcacgtggtcttctgtgtgggtcagcaaggggtctttgacgggaactcacagttagtttgctaattacgatgacgattaaactttaccatatggattattgacgaccccaacaacactattctcctcctttgggtatgaaggaaccatgataaattataatctgcggactctaactatacatacatatagcaaagttcagtacctatgctgttttggcatgacatttctactttatctttacttatcagagcttaatcaattctaaccctaattaatcttcttacgcattcccatccgtgatctagcatatctaatattgcttgttaagtcagtttttcggaaagcggtgaagtcccacgagtaaaaaacaaagaaataaaatgggaagaagtgaaggatactgcagcctcaaaacttccccagtgagggatgagtaaagcactgtgccttgaagagtatgtagtgcttcacttgagcaactgacgtcctgcaaagccacatatcaaagtaaacatgcgagagtcaattcactctttaaacaaactaggatctctctcgatttcaagaaaaagatattgcaagagctgtacctggaaatcaacaaatgcaacaggagtcccatatgtaccctgaatcttcagcttcaagaatccacggcatctgagaggaaagagagtgaaaactatctctagtggttacagttttgcgtggagaatagagtattcttacctcgagaaaacttgaattagctcagcttcggtgcaatttggtcccatattcgctatgaaaagtgttggacaaggatctgccgccttactctgtcaaaggaacaaagattgtcatgttcactggtaagaatagtttacctcactgtttttcgtccagacagaaaacaatactcatatgaagtataaaataggcagaagcttacaggttttctagaagtcggtgccctcccagcaacattagcaattccttgactgaacgagcaaaaagaatataatgagaccctgagtttcgtgagctaatagctaagaaagaacaagcactctcgtaaccagtatctagacatgtgagctaggactagttcagctaatccttaagtaggtcagattttcaaggcagaggtacaagaaaagagtgtgcaacaaagaaacagaatctaagcattcacaaggaactagaaatgtgctcaagtagtgcagatgacctttgtgcaggtgaataaccaattgtgttgtaagcagaactactcattccaggagtttgaaagctgccaaaacctgctagtgcccaaacgtgcaagaatgtgcagtgtgagttttcagaaacgtgaaaccatgttgacggcacttaaagcccaagtgtgaaatcttaaaccaaaaagagctagcatgcatgagcgtgatggtcatgaagattggaagtttgaaaatatatatactacacaaacattcagtttcaag

SEQ ID NO: 38641 - DNA, 3841 bp, Arabidopsis thaliana landsberg
  unsure (1)..(3841): unsure at all n locations
tagccatctcatctgcctgtatttgtctttcaatcagacattattgcaaaccaagacaaaaattcaagcatatatagtaatgtcataatcaaaaagctgatcatataaaaacatttttcaaaaaaacattattcttctgcatcaatatagaaaaggaaaagaagaagaaggcagggaaagagaagataacaacacagggttgagaatcaagagaacactggaaaccgcaaaggtatttaggagtaggatacaattagggcactggcctaatctcgatgccataaacaataaggccctttttctcataaggaccctttgtctccttgaggctcatctctatttcacccaaatctcctctccttttaaagaactgtcccaattcaacctcgtaccaaccgtctcttctcagcacaggggactgaccttcttcgccgcctgaatcttgcatgagactaatcatggaaggctgaacaacattgtcagtgctctcggtgtcagccaagacaagggaggtttctacaggctggcgaaaaccgtaaggactatggttccacttaaagacgaagtaagctgcgtagagggtgtcatcagagagaagggtaatgttgatcttgccagtgatctcaagccaccagaccatgatgagctcagccacttctccgaacctgtttgtttgtgcacacaaaaacatttcatatcttataatagagcaatgcagaagaggaagtctagtttgaaacacagaaaaagaaagagacctggtgttagggagagagatccagtgccagtatctttgctcatgtccccaaactatattcaaggccctcgctgccatcatgtagcacttgttgccactctttctctcnnnnnnnnnnnnnnnnntatacaattcagtcagaatatatgatcacagcaataaaaagaagagaaagataagacatctctaaagtgataaagtccaaacccacataaaaccctaaaataagagtgattacaaaggtttcaggtctttgactacaagttacagaggtggtagatttgccggaacagaatttgaatttggcagaatctaattaagattatgaataacaatttgacacacacaacagagcttttgcacattttcgttaatccaggaacaggatcggacaacaatggacactactagtgtaatttctagacttaaagagtaacaacgtttggctgtataaaaacaaaactagaaaacggaaccgataaacagatgtgatgatgaatgtaaaaaggattaaaagaagaaggttggttaattaccaaaagagtgccgttgataagaagagggttatcgacgagggagaagaagagttgcttcctggtgggaagaccagcaggtgccgcaaagccggcggggaaatcagccggtaagaaatgattccagacatcgtcggagccggcggcggatctgaagatactggagaccgccgataaacggcaaacgtcgagaggagttgtcaaggaaaggatcttggcgatgcaatcttctgggagattattcattgcttcctccgattgattgcttatttgcttgattgattattttggggtttaaaagatcttttcctctttctcgattatatagatacgacttgttcgatcgagcaaagtatcgctcacatttaatgagttttatactagtagtaaaaaaaagagagacgtggaagtcgtgcattgattatttaaagtaaaaacggatacttagggatgaagccacacgtgtctattccttactcgtttttttcagattactttcctcatgactgactactagagtaagcaacacccacctgtccccttctctttactaattttatccagaaaatcagttttttttttttttgggacaatccagaaaatcagttaattgttacattcgagacacatttatgattctaagattttgaaaataaacacagaatattttttcggctttatattctatcattttccaattctttttgctcagaaatcgttatctttgctaaaatgaaaaaaacaaaaacaaaactaaatcatttatttgagatgaacgggccgtacattgggcccactttcttccgtttctgtcggtcattttatagcccagtttcttttttctgtttttttgggtactaaatgttttatgttcatgtaaagatacttttgacatgggtaaatctcacttgaaaatacaaaaggtaatgtatctcgaatttatggagagattaacaacaaaacatcattagaagaaacttgaaaatacaaaaggcaatgtatttcgaatttatggagagattaacaacaaaacatcattagaagaagctaaagggtttcgcttcggtagcttataacacactatcatcacacactaattaggttttctctgatttttatgacaaaattctaattttacattggatatctgactcctgcagctaatattctctgctgctccagctgcaaccactcaaaatattaaatcccacataattgttaacatatattactatcaatatatatgtgtatatttagctcacgtttttgccttctgtttgtgtgaatgtgagtaatatattaacaaaacaagtaagtacctggaagagttcatgcatcatgttcttgaggtaatgatactcatgctctactacctccagtcctctcaagcacctgaagcatcgtcacatttatgaagcattatattgacttaaatattgacctatatattaatacaaagaagtatatatatatagctcgtttaatttgtaccctgggcggttgctaagctcggaagcagaacgaaaggcaacgcagacgttacgaaccctacgagcaccaatgcttgaactgcttcccaccagctgattcaggtgtaatcctattttcttgtagtccgagaattctctatccatcctgttcatttatttatttgcattcgtcatcattcatatcatatatatacgtatacattttggaaccaaacaacatacaactatggaacacattaacaaagaaagaaactcacaacaataatctaaggttgcggagtaacttctcggattcatcaaagtagatattaatgacatcatacacaaagtttggtgaagtctcatcttgaannnnnnnnnnnnnnnnnnnnnnnncgtccagcactccctggtggaaaagagaggctaggagccggttgatgtcggcttgaagccggtccacacccaaccccaacatccacaacggcacacccgtcttgtcccgttttccgcttcaatctttcctctttctatatatttgtttttactaatgtgaacaggtcttgcttcaaactctagctagagaaggcttataattcgattttgggtttgttgagaggtatttataattgtatagacatgactacatgagatgaggtgacccacaattgtattcaaattttctaagagtcaggttacctttttcccccacttttaagtgaaagaatcgaggagggtgtggggaataaacgggaccgtcacaggaaaaagcactctacaagtattgtacgaccatattaatacactctgtgaccggctacagccgccagccggttaccccgcgtgactctgccaatagcggcgttcttcctcccgacaaccggcgtaccctgtcagaccagctggtcacccttcccgcagcctctacatttacatatttaacttaatacatctgccttaaattaaatcaacaacttttacaccaataatatgtactttctatctttaatttctcactgttgaaattaatctcttttcttttatcaggtctgattaagatgattatttggtctgtcaagtta

SEQ ID NO: 38642 - DNA, 3279 bp, Arabidopsis thaliana landsberg
acgaatttactaaccggaatccggctagactggccggagcgtgatctataagtacacgtggtatggtagcgtacgtgcgcaattggggtcagatcacggtcacatttctaatgaccaaacaccacttgttcgacacgaaagcaataagtggaaaacgtaaggaaaaagttgaaagaaaaagctcgttttaattgaaatcacggtttgtgttaattaatcacctttaacacgtgttgtacggagagccaactgatagtggggacgcgtggggacaaagcagcatgtgtaaacacgaacgtcggcattttttgggatgagctgtttgttttgaccccttgttcggtttttccagtggatcttttattacgtatagagtcaacattttttataagaataaattattgtggtaattaaataaaccttgtttttttcattaaataaaaacttgtttagtaagagaaatttcatattattttctttggttttaatgctaagagtcttaacgaaattaaacaattacatatcttgtcaattttgaatgcttaatttgcaactagaataaattgtatatatctagttttacttttttttttctttacttttttttggtaaaatatatagttttatttttgaattgacggaaacgtaagtgggttagttgagttgtttcttttttatatatacgtaattagatataaacgtgcggtatatcgtaggtagtcttatattttagttaaactaaaattttttattgtaaaaatgatttataaatatataatattattttatggattttaaatgtatagtaaactgctagttgtatatttttgttgatattattatattgttcagtatttaagattatacacttgtattttaattgttaattttagagtttcacctataattactatcttgtattaatatcgatttaaacccgtcaattctaagatttccaagcttgtattaaaaattgaatcacatcatacacataaaaaaatctaatatgttattaattattatagtatataagattataaattttcaaaataatatgtatgaaattgaatataaatattcaaattataacccgttacttagtagaaagttttctaaaatctatttttgacctgttgtaatattttttcatgtattgaacagtttatattcgtttttaaaaatataaattatggcatatgcgaaaaaactctaattattttttttataatgatgatattatttttcggcaaaaatagaatcatataaagatgagaagtgaactataataattaataaaaaattaatatgataatttagatatcaaatctaatttgttgattttaattggttacttttttggaaattaataatgtatttcgtttttctaattaaattaaattaattaaaatttaaatatcaaatcttatatgttgattttgattggttattatttttggaaattaataatgtatttcgttttttaattaaatttaattaattaaattagtatttgactttttaatccttaaagagataaattaatttactctttaaaattttatttctaatggcatacctatgtaattacttacaaaaattaaggttacatttaaaatgtacttcccaaataatatagtaggatgagagtcggttcccattatttagtgaatataattttatttgtttttttagtaacagtaataggatttttttcttttttttggatcaaatagtaataggattttaaaagtggataaatctagctttagttattattgtttgaattttgatgagtctttttttttttttttttgcatatacgattaatattgcttaaggatattgtatatatctttaacacacaaaaaaaaagatatagtatacatagttttgtttgatattcttttttttttcgcacaaaaaaaaaaaaaaaaatcttatttatactataatgaatctaaacatctgtccacctttaatccaagtacctctcccaactactgcgactaaatgacccatttgcctaaatgtagtcctttaccttactgaaaatagcgaggacaaatcagtcattcaccgccctaaaacacgctttgacatgtatttatccatttactgttattttatctgtaagaaatccaaataaactcatttctgtaaattaggaaacttctgagaaagtgacgaaagcgaagaaggtttcggaagtaaatatgtcttccttggggagcagcaaatccctgagggatgagatggaggtaacaaccgccgatgtttttccggaggttaacgccgccgctgtgacggaaaatcttgatcggaacgagcttgtgcttgctgacggagtcgtgtcggctgaggaaaggaatattgagccagacaatcgtggagagaggaagagagagagcgagtctcctccagaggatgatgtttgcccgatctgtttcggctcctttacggttccgtgtcgtggaaattgtggtcattggtattgcggttagtcttttcatctttcttcttcttcttgattctcttgagccatttcatctacattgaagtatcaagcttgtgtctttttgggatatttctgttcgtcagaggtaaatttggagaattgtttgggttggaattgatttagggttccttttggtagccaagaatgatttatcacaactgattaacttttgaaagtgttgatttttaaaccatgctctgttactatggagtgttgtttgcaatgtcacaaaaagatctgaaagtttcttaaaccggttgctgattttgttacaggaaattgcatcttgcagtactggaactatgctgcaatatctaggccttgcaagtgtcccatgtgtgttaggcacatcacgaagctgtcaccagaaccatctttgcaagagcgtcaggagcaagaggtgaaggaggttcttgataaagtccgtaggtataaccgtctctttgttggaggtctaactggctttgttcaggtacggtctttttgattcatgattttgttttgcttctctttactgtttcatgcatttcttatctatgtatatacttatttctcctttttatgacttggcaaaaccaccatctttcgaataattcagaaggtgcatgagcttccgtttctagtgaagagaatggtgtggcatatgatggatacagatgtgaacaatctgtattttcacgaagtgcgcatctttgcagttaagaaaatcttaccctgaaatttacatttcatagtttagtgtttagttatatctctgcccactt

SEQ ID NO: 38643 - DNA, 7413 bp, Arabidopsis thaliana landsberg
cctttgttgccagaatgcatcttccatgatatctaacataatttttgaaaggatccttgagcaaccctaggattgccggaaaattattaacaaaaactttgaaaaaatggtgtatttttccatagaatacaattcgctcaaaaaggacttcataagatgtcgatcgtaaatgcgaagaccgcttgcgtagaaaaaaaaagatggattcgtattcacatacatgagaattatataagaacaagaaaaatcttggattcaaaattgatttttttttaatataaaaattcttccaattacaatactcgtataaacagaaccgaaaaaaatgcaaagaagaggcatcttttacccggtaacgtagggtttgaaccaagatttctagatggatggggtaaggtattagtacatctaacacataattaaaatgtcctaatttgtcttctaaaaagggaaatattgaatgaattgattgtaaattataagatttttttaattgttttccttgaaaagaggatcctaatcttagggaaaatggaatttcgacaatcactgcaaataaaacagatatcatttgataatagaaaagactggtatgccccaaaaaggaattttggttcacatccttagtgggaataatcaaacgattctgttcatacattcgcaaaattaagcgtttcgtaattagtgaactatattttttgtcataatccgcattttccaagaaaatatagcgatttctatttaatctatttaaaccatgatcataagcaagtacataaatatactcccgaaaaaaaagtggatatagaaaactctgttgccgagccccatcgaactctaaatatccttgaaatttatccatttggattgaaattcgatttgaactgaaggtaaagtctttattttcttgagttctgaaatgacacatagtgcgatacagtcaaaataaggtattagactacgaaagctatagatatagatacctcataaacaggtagactgctaaccggattctctatctttaataggtttctgttcgttatattatagaataacaaaacaagattattagaaatcctttatttttttaacctaatcgctcttttgattttggaaatatatatattttttatcaatatactgcttcttttacacactccaacctaatccaaatggactagttaaaacaataattaggactcatgaaaaaattgataataacacgcaagaaaaaaatgccttcccatacccgtattaggcactaatctatttttaacatttaattagttggggtaatttttcaaattacgaatggaagctcgtttctttttttttcctggaataaggaaaactggtttttttatccatccatttatatttattcacttgacccaaattggaattcttttttttttttcgacatcaaaataagattgtaccgatcaggaaagcaaaaaaaatgttatctgaattctcccttgatacgacatgctattttttccattcattcctttcaggatcagtcgtggtcttacaaactctaccgcagatctggacgaatccttttcttcatacaaatgtgtaaaagatgctagtcgcacttaaaagccgagtactctaccgttgagttagcaaccccccccaaaaaaaaaagaacgtactgcaaatatgtagatacaatcagaataaagaaaaaaatacagtcgtgtgtgcgtcagggataaatagatccatttatctatgagagaattatatttggtccatacactgttgtcaatatgattatgaatttttcatatagtcaaaagaatagaaaaaataaataaataaaaaagcttaacctcttggttcattagttcatacaatgaatgaaaactaagccagttccagttaaggtaatctcaaatctttttatactttttagatccattttttttatggcctttaattttttatttttttatgatgaagaaattattcataataatataatattattataatataataatatatatatatttttttttattcagaattatatattatatttatatacagtattattcttttctatataacaataacagtaaaattttgtatttataaaaaaattcgaatttatatactctagatccaaaaaatttttcataaatttgtttatgattataaaacatagtagttgttagcaaggtattttttagtattcgtaccttaggaggaatactaataataaatagaaattataataaatcaaaataaatatgatggaagtgaaagagaagagtagataaaattttatatcacgttatatacgagtctttcacatcctcttttttatatttcattaatttcatttcgttttagtaagacttcattccgtaaaaatcccagccttctttgaaatatcatgagctgttcttgttggttgagctccttttttaagaaaatcgagaatagcagaaaggtttaaaaaagtttgattagttatgggatcataaaaacccaccttactaagatctcttccttctcttcggtatcgaacatcaattgcaaggattcgataaacggctcgttgggatagatgtatatgaataataccccccctagaaacgtataagaggttttggcctcgtacggctcgagaaaaaaaattcaaatagtaaattcaaatattaaatagagaaataaaaacattaaatcaattagccagtattaaaaccctaaatattttttccataaaaagcattcataacattcgtactctcgtaactcaagttaaacaactctcaaatatctcaccggagaatccttaagtactttttttattgagtagtctctagccctttttttgtttgtctcattgcaaattttagaatcaattttgattcttcagtttgatctagtttttcaaacaattgaaaacaggatttccttttttcaagattctttatccttactttgaatctttaggtttagacatgacttcggtgatcttgaatcgttttattaaaaaagggcagcaacaagccccttattttgtttatgatttctgttctttctatacaaagaatcatacaaacgcttgattcacgcatgatagacttttgattcaaagaattttacaattttaagaaaatttccttttccattgtaaaattgcttgaaaggacttttttcaatataaaaagacttacgaagttgttccaacttattaattcgcactaaccctagatccttactcctgcgaaaggactaaaaactttctattctcctcgagctccatcctgtactcttttttatattacaaaaaagtgtaggactcttgtaaaatagaatacaaaatgtcgagccaagagcacctatattcctaatataaaaataaaagtggcggatgaaaaaatccacagcagataatgtccttcaattcaagtcgtacgttgctttctaccacatcgttttaaacgaagttttaccataacattcctctagtttgtgtaattgattcaatgatggaatcatgaatagtcatagttcagtcagtatataataatctataccttttctttctctatgaatggaatagtttatttacgcgtaaaggttcggtcagaatgaaaatgaattccatattagtttgaatagaaatctatatttatatataaataaataaatatagatttttttattaaaactcttagaatctgcggttctaccttacttacccgcatcacacaaattaaaaaagcaaatagattttttttgaattcggttgaaataatgaaaaattaagtttattcttcttttcatttcaatattttattcttaaaaaatttggatttttaaacagaaagagaaagatggtgtacaaaggcaatagaagattgattctgtaatgactgtactctgggacggaaggattcgaacctccgaatagcgggaccaaaacccgttgccttaccgcttggctacgccccatttcgctttttattcaagactactaaaagagtaatattcctattggttgttcgtcaattcaaaatgaaatatagattacattggtgctaaagttttaacacgtgtagatagcaaataaaacttactttattgatcattacatagaattcaattaagatattgtatgaaaatattatttctttcattctcataagagaataaaaggatttttgattgagtaagttcaacaaagtctttttagactatctttctttattttttccttatataaaaaatatattaaaaactcaatcaaaattaaattatccacaagaacaccaatttttgttatgcttaatatatttaatttgatctgtattttttttaattctacccttttttcaagcacttttttagtcgccaaattgccagaggcctacgcctttttgaatccaatcgtagatgttatgcccgtaatacctcttttctttcttctcttagcctttgtttggcaagccgctgtaagttttcgataaaattcttaatactgtcttaaacaaattcacgattttgatttttccaacaattcaaaagatccaaaaaatcttgacgtatgaacgaactctcaattcaaacatttaatttttttggtagccatactaaatctggatcatttctatttcctaaattttatcctcttttccctaaatgaaagaacctaattagattcaagttcaccaaaaaaatatctagatgttggtatgcaaatctgtttgaatatgaaagattcgactattatcttaattacaaataactttctgaaacctttttttttattggtatcaaaattagatatttgatataaaaatagagaatctattctctttttttttagtaagatcttggagattgtgtaatgcttactctcaaactttttgtatacactgtagttatattctttgtttctctcttcatatttggattcctatctaatgatccaggacgtaatccgggacgtgaagaataaaaaagaaagtttttttattgctttatttaattcgtggaaatgctcgaattttattaggattttatctattacacaccatcaaaaggagaaggggaaagagagggattcgaaccctcggtacgattaactcgtacaatggattagcaatccaacgctttagtccactcagccatctctcctaatcgaaaagggatatttaattaggttccataaaaaaaaaaaaggcttgaaaaagaaccttctccactttattcttaaaaagctttctttttttgttatagatattctttatctttatattatatatatatattttttttttcattttctatatttttttctatattttattatattattatatatatatatattctttttgattatttgattatataaatatatatatcctatatttaaatatataatatatatataatatatatcctatatataaattatataaatcctatattatatatataatatatatataatatatattatataatatatatattactattatataactgtttttatagaactttctcagcaattctagttacattaaaaatttagctaaagattagataaaaaaggcgcgaactcaaaaaagaaataaataaaaccataatcatagaaatagagaatcctttttttattttgtctcgtcaaaacaaaaacacaagtaaaagatcttttttattttattttaatagcctggcctggtcagtccccagccgggcctttttttgttaaaattaaaaagactcatccgatggatttttagataaaaaaagatttgaaattaaaaaaaaagtggaattgaattcgcttttactaattttcttaagtcaactctagttttttctaaattttttcagatttttttattacacccccgattactttgttcgacaaaaggttaatttatatgcaataattgcattgtagcgggtatagtttagtggtaaaagtgtgattcgttcctttaatccctttaatattcaaagggtctctcggtttgattaatcttccgatcaaaaattttatttcttaaaaggatttagtcctttccctttcaatgaaagattcaaggaagattatagattctcgtaatttatatccaaagactctaatcaattgtaaatttggattatgaaattccgaaacataatttttgaattggatgactatttacaattcaataagtataacaagaggatccatggataaagctagaaaagtgtctttctaatcgtaactaaatcttcagttctattcattgtttggtatagaaaaaattgaagcaaaatagctattaaacgagaactttggtttactaaagacatcgacatattatattgttttagctcggtagaaaccaaatacttttcctaaggattccgttaaatagaaataaagaacgaagtaactagaaagattgttcgagttggcccgatctatcttctagaaggatcatctagaaagcaaaattttctgtgaaagtacccagacggaaaaaagctcacatagatgttatgggtcgaatttttatttcgttcccgtctttttttatttgggaatttctccatccatcataaaggagccgaatgaaaccaaagtttcatgttcggttttgaattagagacgttaaaaatataaaaatgatcaatcgacgtcgactaaaacccttagccttccaagctaacgatgcgggttcgattcccgctacccgctctaaattcacaattgccctttttttttattagagaaaatttgttatattagaattgtctaatagcaattgtgtattgaattcacttcaatacacaattgctaaaaagattttgcacattctttttttttaacaataggaaagtaaaaaaaagcgaaaagcgtccattgtctaatggataggacataggtcttctaaacctttggtataggttcaaatcctattggacgcaatataaatatcaatatatctatattgatatttatctattatttccatttctatatattatatataataatataatatctatttcgaaaaaagataagaaataaatagaataagaaagaaattctgaatgctttaagatttaatattaaacagatattagttagatacttctttctattatatatacttgacttatagacttctatttctagaatttcttaaaaaattaattaaaattaaagagtaaaattgactaaagaatcaaaaattaagaataatccgtttcgttttttatactttctcctgaagtaggaaacgttctagttgctcttgaataccttctttcaaaaagctttctgcttcagcggttaatgtcttggtagaggctatgatttcttgaaactgaggtttattcgtttttaagtaagtgcgtaattgaacgagaaattttcttact

SEQ ID NO: 38644 - DNA, 926 bp, Arabidopsis thaliana landsberg
aacttttcatcccccagatcgaacttgccgcgatgttccaaaatttctggttcacgcacctgagaaaatacgcgcccatatccacactcacaagcagttagaggcccgggacgcccttcctagtccccgggcaccatagtaaccactgttagccgttcctggtttgatcctcgccgtcaactaaaagcttagcccatccgaagaagctccagaatggatagatcagatcttcgtccatgagtgaataatcatagctcgaactgccgaatcggatcaattgggtgcaatcatataactatgcatcggccaagtcctcgagttggagataaccggtatctcgcataccgctgacatccgccacagggtaaaccaccgcctatcaggcccctgactggtacttcttatcgaggccaacgatcgacaagaacccccccccgaacacaggttgcaactagcatagcactgtgctccccaaagagccgctctgctcacaatctcacacggagccgagctggaatcccattccaactaagcattcttgtggctctagaggatccagctacaggagaaccaccagcggatagctatccagcgcttttggacgccccaactctttcgactgctggctttaagagtgggagatagcccttgttcgagccttactggccaacctggaagcggacaggctaatgcatgacacttatagcacaggggaatatgggcggtccgcgacccctggataccgacggcgtgcttggggtggctcttacttcctacggggaggagaccatggggtcgctccatgggttatccgtacttctgccctatacagctaaacggggggagcggagatcgtgtatcaacgatgcatcgaaggagaaaatggcgcctctgacccacagaacaaatgccgccagccgaacgct

SEQ ID NO: 38645 - DNA, 4913 bp, Arabidopsis thaliana landsberg
  unsure (1)..(4913): unsure at all n locations
gtaactcttattgactctagtattagtccagctttgccgttgtgggttttgaatgtaccggggtattcgagagattttgttagcgttttcgtttggttttgagaagctagtgagcttccggtgctcaaaggagatgactttatcggatattgatgctcataggatacttttgaagggaagaaatgggagagaagctgttgttgcttcgttaaacaagttaaaccatagctttgacattgcacaatggggtaattcagatgggattaatggtattccgatgcaagtgatttggtctagtgaagcgtctaaagaatggagtgacgaggggcaacgtgtagctaaggctcttccgaaagcaaagtttgtcacacattcaggcagccggtggcctcaggttagatattcttcggacttttaagtcattttagttttattgaattggtcaaaagcagaaggttttgtgtttatactaaaatcaagtatgtatctctagtaatgagtaaagttataaccagatccaatttcaaaatttagagcatctttatcaactatttttgagattgttagtatcggattgttctcttgaacatactttgttctcccattagtttgtattttactcggtaggagcagagcatctttagctctatagcctttatttttgggctgcttgacttgtttgaagaacacaaacttgtgtggtcttctagttgtaaaatagcaaaggcacattaatctgaaactgtgacgttttcaagtaggtgtagagttcttactggaacttgtatcattgaagggtatatatttgagtatgttcaagattggttttcgttgttttacttatcgtggtttttcgggtttaattccttaaaacttgtggtcgttttgataatgcaggaaagcaaatccggcgagcttgcagattacatatcagaatttgtctctctcctccctaaatccatcagacgggttgctgaagaacctatccctgaggaagtacagaaagtgttagaagaagcaaaggctggtgatgaccatgaccatcatcatggccacgggcatgcccatgctggttactcggatgcttatggtcttggtgaggaatggactactacttgatatgccttttgaagttcttgttattattttacgatgtactcttaatcttatgactattttgagatttttcttttgggagtttaaagtctgagatactacttccaaatatgaatctgtgttttgtactttttgtttgtaagtcatcaaatttcaatagaaaaatatcttaaagtcatcatatttttaaatatctacatatacatttttgcagccattttaacaaataaatcatagagttggacttatttacaacccaatgtcattagcattaaatctttttccaaaataattaattttactataaattcttgatttaaattgttaacgacattatcaatcaaatttaatccaaacaaacttcaaatcaatcccttaaaattagcataaacatatttgttaacaatattttaaaacaaagttttttgttaaaacaaatattattcttactaaacgttttttgtttaaataaataaatcatgtatttgaacttatttacaatgtcatgatactgacattaattatttaggaatgaaaatatttaattaacgatttaaatcttctaaatccttacttttagaattattatgtcattacctaaaaggctcaaaatataaaaattttaaatattattatttatatatttaaactttataaaacgttattaacatttaaacattattaatatttaaacttataaaaagtttaatatatcataattttttaacatcattatataatatatagagtttaaaaaaatctcaaaaaaatttccgtcatattttgtgattcaacattttaaaaatgaacatatattaaccaattggcgaaaatgtgtgagttctacgtcccacatcgaataaaatatttagacaatgatttataaacatatcataaataagatccacattaatataaataaatttttttttttttgcaggacgggttttgctggacgggtttgacaggacgggtttggcaggacgttacttaataacaattgtaaactataaaataaaaatattttatagatagatataatttgcaaatttttatatatactaactttaaaaaataaattgtttccgtggtataccgcgggttaaaatctagtatatataaaaatctgcaaactattcaaactattaaataattcatgactactatacactcattatttgagttaagattacagaaaaacatcttcgagtatgagaaaaccgataaaataattttattgaaaaacatataataacaaaataaatttagtattagtacaattaaatatgtaaaattaaataataaatacatcattaatctataaattagaagttgaagagcttacattaattatttagaggatacatggcaaatgctaaagtgatgatgtgtcaatcatatggaaagagttggccaactttcatatatatgattcttccttggatctcaatctcagaataaaaaatctaaagcttaaagttttcccaatattagtagatgaccaaagatgcaaaaaactattaatccaaaaactctatttttttttctaactcgaaaaagaggtgttttgcaagattttaatagcgtttaagttttcatgtagaagttctcgtctcctacaaagaaaaaaagatcacatgaatatcatctagcgcagagtaacttgtttacatgtttatttagaggtatcaaacggtctgttgacaaaaagtaactagtcaatggtgaaattacccatgaacacaaagaaataatgatatattatctcaaagtaaaaaatttaaagcttaaagttttcccagtagatgaccaaagatgcaaaaaactataaatccaaaaactctgtttgatttaatctactcgtacgtaacaccaaaatataaagtataaacacccaaactacacaattcaaaaccaaaacattccctaagaatttgtttacttgggcaagaagcatccaaattcaatggctctcattaagccaatcttcgtcaccatttaccaatctcttaaacatattcaagcatcttcttcttcacaactatcttaatcctttgcaacacattcttcgctgtctcctcagtgacaatcgcctcaatcctactaatcaaacccaatacgaatctgaattctgtagtacaataccaccataattgttccactacagcggtttcaacttccctaagagctttcccaagaaaccctaattccattcctctcttcaccgatttcaacatctcattcgcaagattctccaccaaatcaacacgtgtcgtctccaacaagtgaaccgccgcacagaaaccacccacaaaggccaaaccccactggctcgaactctcttcctctttgttacctaaacgttttaagatcgctggaagaagattctccatgagaggaatcaaaaactcctctccatccaaaggcatcgacaagctcttgaacacggaaaccactttcacaaactctgattccgctttagacgagataaactcacgcaggtcataccacgtttcttcctgaatggtgaatatctcgaaagcgacacggttcacgagcattgaaagaatctttaaactggtgtccgagacaacttgttcttcaaggcatgatatgagtataggcgagagtatgtgaaccactgctaaattcaaggaggcttcttctatgatgaagataacgtggagacatctcatcgcaccctctctgatctcgtatgggacgcgtggctctttcgaggagtagacacgcatgagcttgagggagaagcatcccgggtaattggcgacgcagaaacggaagaacttgatgtctttatcttctggattctccggtggctttgtgagggcggcgatgaattccaccgtcggttcaacgaggggattcgcaagaagcttgaaggcggctttggtgaagtcttgggaggttggttgcttcggcgacttctgattatccatgggaaggtaacagaaatttccgggagatcaatagagtctataaaacggttgaagaagaaaagtatatcactgctttagatatagatagataatgattcttatatagatagataatgattcttctgattatccaaacgcacgatttgntaaactctttttttaattcttatatagatagataatgattcgtaagttttaatttttctggtagaattttttttagagtttaatcttctactaattagntgccaaaaaaaaaaaaaaaggtattaaaatattcttagttttaaaaaaacataaatcataaatcataaatcctagatacttttaaatgacaactaaaattaaaagaaacgtggcaattacaaatatatactaccattaattgaaaatttcttttctttaaatttataaaaaaagaagcttatctgttctttgtttaattagttgtcatctgttgcaagccaacaataagatgaagtgtattatcaaatttgatgaatatataaaatatatttcaaaaacagcatatttcttttttacaatttattaaatatatttcaaaaacagcatatttaaattctccacccctcccaaaaataattaaattaccatcaaatattttagaaaatttcattaaaattactacaaaattaataaggttttctaaagaagactaaaatcaaattgattttatttcttgaaagattttatcttttatatatatatatatatatatatatatatatatatatatatacagagattttatatttttacataataatatattcatagaaaatactctcaagccctaatnggctaatttcattttccctc

SEQ ID NO: 38646 - DNA, 6891 bp, Arabidopsis thaliana landsberg
  unsure (1)..(6891): unsure at all n locations
aaaggtggggaggcttttgttatagcgttaaaccttttagccaaaaaagcccgttcttcttcggcattgatccagtttgttgctcgatgaagggcgtcctgaatcgattcggggcggtttacggttagagattcacggaaacgcgactcatgccacaaaccatttttgagggcggattgagctgccgaatcagacaggttgggcacttggaccatgatctctttgaaggcagtgatgtaagtccgaagtggatcgtcagctccttgagagaggttccaaagctgagcctcagtgacgtcacttttgataaagtacccgtactgcttaatgaaagcagtggagagttgcttaaagttatcgatcgaaccctcttctaactgggtgaaccaggtaagtgcgggacctgacaaactttctgagaatagcttgcagagccctgcatcttcttcatgtggctcaagcgggactcgacctgcgatgacctggaaaaaagtcagatattcttttggatctcccttgccgttgtaaccggggagtttgaaatctcggaaatcgcgaatacgaagctttgagattctcgaagtgaaaggtgtcctccttgttgcttcaataactttttccacttcgggggccgacgtggtagcctgatgaacctttgcgttcattgcccacatttgatcttgaaggttctgcagctccgagttgactgtgctcggctctggtcggggattagaattcgggagtctgatggcgggatccagtggagccggcgcccgagctattgtctcatctgagactgcagcaagacctgctgacggagattggatgactggattttgtgtcgatgttgctctgacgtcaaccggaggtgaaggagattgctgaccagaagcttcctgcgaattctggacgcttgggctcgcggcgcgctgaaagttgagtcgtgttcgaacacctgtagtccatgccgttcctgcagagaatcaacccgctcggcatatgcattgtgtgttgacctgatctcggaatggtttacagctaaagcggcgagctggccattgcaacgctcttggaaagatacgaacttatcggagagtgtcgttacggcgagctgctgtctgtcggttttctcggatagctgctgaagcagctgcttgatgttgtcgagggtggaggcttggccgccggaactctgatcgtcggtgttgctcatggtggattgatcgttgctctgaagtaaaagactttattcccctccttctagcgccaaattgtggatgtcggaatccgcaattagaatcttgtggttgtttttacgaggatctttagtcttgttaaacgaacaatgatcgaatcgagaagagaagaatgtgtttgtgaattttgtgtatagtattagtatttcatgaatcgtccccattacaattgtcatcaactcgtatttatactcaatacatcggatcaaacgtattaaactatttgctgatttcacgctgcggatctaaccttatttacgtcgtacgttacgaatcttcaactcgggactttaatgcgtggtttaagtcgtgatccttccgtttctgtattaatgtcggattattctttaaacggccaggctcacgctgggctgcgaattgggcccaattcacctcgaagcccattgaatgcggattagtccgaagtggaccgaatccgacatccacagtgaccggttaactgaaaaacatgatagcttgtattctccataaaatcaacttaaatgattgtatgactttgtccctcccatttttcccggttcacatatgggtccaacaataaccgaagataagattagtatattgttaagctctgtatagtaacgttaaaagcagttaaattaatggactagacgtattgagtatgagctgagatgcatcacatatagaagcagagatagagacgaacttgaagagtgtagctttagggattgtttttgtttttaacctctatttccaagttactaggaagcagaacgtaactatttaagatatggagaatccctgattaaagatgttgttaagaaattcaagtgaactgaaaaaacgctgacactaaaaagtcaatgggaacatctccttaaatagagatgaaagagatctctgcagcttcacatattcgtattgaagataagagactcaggatccagttttagcgcaaagcagataatcacaaagcatcacctttcttggagtaatacaaacgtgatcacaaagcatcactggattatatgtattatatatgtaaagctgcaccgacggaagtatgtgtccaaatcatcactaaagacagatgggtgatcgacgatatgataagggactacaactgtggtttgaatccaacaattaacctctcttgatttgtagattttcagctgttttcaatccaaagatgcacttgttgtaaaaacgttatttttcttttgaatataatttaacattattttcaaaagaaaaaaagaatttttaattgagatagaatttgtaaggacttgtatgttattagcaaataatataaggatttttggccaaaagtctaccaaaaatgtatatgtagattgtgaaatgggaaaaatttggacctctatatgtgttttccctgttctctgctagaaacatgtgctctttcatcatctataggcgttgactcattacctttcttttcctttggaaatgacactattctcaccatcctcatttcttgattcttttcgtttcctcctacgcactgattccgcatgtttccacgcattgtttcttaaattattgtggatgatatctctaatcaagttgtcatacgtcatatgttgatctctagacaagtcattccatttacggtacatgttttcctcagaaacaggaatcatatgtctgacccacacctattaacaacataaaattaaaagattaggttagttacatgtctcagaatttattaaagatctaaagcaaggtaaataaagaactaaagaagatcacacaaacctctccatgggcagccttctcagtttcaacgattttttaaaatttgatatgtgactgatttattctccaatcaagtagtagaacaccagtagttgttgctattttaattccataaagttctctcaatccaggcacgctcttacaaatccaaatcaacaaggcccggacacatccatgaatcacatatgtcttttttgtagtcaacaatcttcacagaaataactagagactcaaatgcaactcgaccccaaagatatttctcaaatgcctttggatcaagaactaatttagcgcttgacaaaaggattctacaaccgtgataaatcccatgaactccaacagataacaagcataacctaccaaccatcaacctcttttcataactccattccttgctaatatccattacatgcttcaactcaataaacaagggaccatcgtatgttccaacacccattatattgcaaaactcatagggggcaatttcacaagtggttgacttgtcaagaaaatcacaattgagacttgttatatccacaaattcagtaagagaaaatctagttggtcatccatcaatcacagatcaaagctcctgaaagttgttgacactcagctggtttgtaaagaagtagtgaacagttttgccagcccatatatattccgcatgagcaaactttataaagacaccaagtgatgatttcaacaaacctttccacacatcactacctaatcttgatctaatcttaaagatatttgaaacaaagcagcaatggtttatgctcctgttttgtagtggtgatttaccttctagataaagacggaggccggtaactatataaggttttgactagacgacacaataccttatcatagagaaaaacaatgttcaaagagattgtcataaagatttttgaacaaatctgtcactgaagacacatgataaattgagtaaatttgtcacaacatgaccctaattcaactacaaactatttccaaaggcgggaatatatttctaattttatttccagcgaatttggcataagttagctaccaaaacaatagattactaagaattaaaatctgaaaaggaatccaaacaatacactcggatatcaattgattactaaaaattgaaatccaaataataaacaatacactcgataggaataatgattcaccaataaagagtttttaggttttcttaaaaatttacctctaagtatgccgactagtttcgagagcagcgatgatgaaacaagaacacggtgaaggaatagttatgaaacaaaaaggggaaaattaatattgaaatcataatcaacaatacacgattgatagtaggatttttgtcaattaatcctaaaacactatcttgtcgttgtagtatttaaggatgtcaatccaatctggcatgatgcaaacaaataagatatgatcaaaattcactaagtcaagccaagcagaaatttgttggtttctaacaatcctagtgtgaaatattagaaatgaaatgaaactgaaatgtgaaatggcaataacacgaagactaataagtgagcaggtaaataacatgcaatcaaatggataaaagattccaaagaatggggtaatctgttattcagacagttaacaaaacttcatagaagttatccctagacaacaagttcaataacagattaattcactaccgtgatagaacccctcaagcatagctagtcacatacctaatcaccattagcgatctctagttttttccttgatttcttaccaatcatttcatttatgaatgcttgattgaagctgtttggtggagcatgagttttgtggacgagttgaaaggttactcaatgtaacattgccccaccccccccccacccccctcccagatcatattagacaattgtgttttaacattctgagttgaacccattagggcccataaccatcatacgtccagcgcccnagtcgtgtgttgtgtgtctatatcaaatggtgtatctatctccctcttagtgtgccgtcaaagagaaaaatgaatcaaaaccccttgagaagagcagcactcaaatcgctcatagtggagacgctatagttgtgctagtgctgttgatgtcattcgttcattaaaagaaagagatcgtgagccactgtttcgttgttgtcatggtgataggtcatccgtggagatatgactgagagagctgaaccaccatctgcatatacatttttgcagccattttgtgaaataaatcctgtagtttgacttatttacaatggttgccactagattttaatgtttgtttttgataattaaaaggaaaatcttcgaattaaatatttgacatttaacaatcttcccaaaatctctccgcatttccataactataacaattcgattataatcatcaaagcgcagagatataatctgatagcatttaattactacaaaattacaaaatatttagacaatgattcataaacatatcataaataagatcaatattaataaaataaatggtttttttttttagaggacgggtttggcaggacgttacttaataacatttgtaaactataaaataaaattattttatagatagatacaatttgtaaacttttatatatactaaattaaaaaaataaattgttccctcggtataccacgggttaaaatttagtatgtgtaacatgtttggatctcaaaattaaagagaatatattgaattaaaaaatgtagaaagagtgatggttcaagttctgattaattatatcctcctattttagttattatgttaaattaattactaattatgtattatttattttatgaagtctaggtggcaagctcttatgtgctgatgtgtcaaattgtgggagagagttgaccaactttcatatatatgattcgattataatcatcaaaccgtagagatatttgataacatttaattactacaaaattacaaaatatttagacaataattcataaacatatcataaataagatcaacattaataaaataaatgagtttttttagaggacgggttggagggacgggtttggcaggacgttacttaataacaattgtaaactataaaataaaaatattttataaatatatacaatttacaaacttttatatatattagtttaaaaaataaattatttccgcggtgtaccgcgggttaaaatctaattattcttatttttgctatgaaccataattattttaattattatagttatatatatttccctttggatgcattaaaaaaaggctaatgatcaaggacatgttatcgtctttgtattgaccattataatatctgaactttattttgtgttaaataatctctcgaataaataatctttctaaatgcatgcagttttattcacactttatctgtggacaacaacaacaacaaaaaagaaggaaaaaatagatttttgtaatttgtcaaaaatggtgaaactgttgcgagaccttacttttcaagtaattgtccattttcatgtttagtcataataataattaaatagtctatcaatgctctatcttatcaatactcttattttttcaaccgtttcatttactgattttcataatttcatcccctcctctcaatttaacttatcacattgaaaaaacaataaaaatgtatgttttttatttacttggtggtccaaaaatgcttttttcctttttttattaggtaaaaaatataatattattaaataaaattgctacaaaaggaaactgttcacacacagagtgatgtgagacaccagattctgtctatagggattcgacacgccactcgcctcttttagaacctccacgcgcttctctgaagaacgtgatctcacgcg

SEQ ID NO: 38647 - DNA, 1412 bp, Arabidopsis thaliana landsberg
ccccaccgatagtgcaatctttccctcacgacgatgaggtttcaaattatctactactcaaattcctgaaccacagatcgagaattgtgtatctaactttatcaacgctggcgcggctttatggatcggagatgttgtgcgagtatcgacaggacctaaattatcaacgggttccccaagcacgttgaaaattcgtcctagagtcgctccgccgactggaacacttagaggatttcccatatcaaccacgtccattcctctctttaaaccctctgccgtactcatagctacagctctaactcgattatttcctaataattgctgtacttcacaagtcacattaatttcttgaccaagagtatctcgacccttaaccaccagagcattgtaaatattaggcattttgcccggggggaaggctacatccagtaccggaccaatgatttgggcgatacgtcccaggttttttttttcacgtatcgaaacctctggatttgaagtagtaggatttgttctcataataaaaaaaatatgttaaattttgttacgaattttttcgaatacagaaaaaatcttcgatagcaaattaatcggttaattcaataaaaagtgggagtaagcactcgatttcgttggtcccacccaagcggatgtggaattcaattttttattcattcaatgaaggaatagtcattttcaagctcaactaactgaaacctagttttaaaataaaaaatatatgaataaaaaaattttttgcggaaagtcttttatttttttatcataataggaataggcaagcctttgttttatctagcgaattcgaaacggaactttagttatgattcattatttcgatctcattagccttttttttcgtattttcattttagcatatccggttatgcgtcccatttattcatccctttagcaacccccccttgtttttcattttcatggatgaattccgcatattgtcatatctaggatttacatatacaacagatattactgtcaagagtgattttattaatattttaattttaatattaaatatttggatttataaaaagtcaaagattcaaaacttgaaaaagaagtattaggttgcgctatacatatgaaagaatatacaataatgatgtatttggcgaatcaaatatcatggtctaataaagaataattctgattagttgataattttgtgaaagattcctgtgaaaaaggttaattaaatctattcctaatttatgtcgagtagaccttgttgttttgttttattgcaagaattctaaattcatgacttgtagggagggacttatgtcaccacaaacagagactaaagcaagtgttgggttcaaagctggtgttaaagagtataaattgacttactatactcctgaatatgaaac

SEQ ID NO: 38648 - DNA, 6537 bp, Arabidopsis thaliana landsberg
cattccttccgatggaccaaaaacagtgtctgcactgatatttgtcaatattatctttgatatttttataaagagaaaaacgatgtatttgtgtttcatctccaaatctaaattcacaatgatagcgagttcgtccccagtaagttttcctgaattcagcgaatattttcatactccctggaaaaaagtctctaatacgacgatacccatttctgctagtataacaaccagaatgtagcaccaaaccacctccgatatcgtttgtgatgtatacagatatcattggaaaaaattcccatttgaatatactcttacccatcactacaccgtattgagataatgctactttcatgagcaacgacgatagtatcacaaccattatcagttttctttgggaagccatcttttattctttattttatggtttgcaatgtttcgttacgagtatttatattgtgaatgtatgtttttagaccatgctaagtagtaaccgactgtgcgttaactctaacattggctagcttggtggtttctaaaaccattagtattattcacctgttttatgatctaataaccgttttgtattctcttgaaacacacatcattgttaatgctacattaaaagatctaatatcattgttaaagggttaaagcgacttgatttgatattctagaaagagggtcaaggcttatatgttaaacccaagaaacaatcaagtactttccttcatccgttacaaatgtataacaaaggagagtggctacatgatgatcatgatccctaaaccctacaacatgccaaaaatatactactcattgagaagcaaaacatgatggtgcatgaattttacactcaacggaattgcaacatttctaacttactttctgagttccctcgaacgtgctcagtccgatttgatccggccgagactctcagacactgatctcatcctcggacgaacctctggatccatttccgtgcagttcaaggcgacatgaatggctgcaataacttgcttatctgcgtgacctttgttcagaatctccgggtctaaaatctcactcaacggcttctcttccttgacccagttcctcacaacacgcacgagttcttcgccattgtttttagaggaagcattgggcaaacggccagtcaacaactccattaggacaaccccaaacgaatagacatcgcacttctgagataatttgcaaccagaagaagcccgagcctcaggtgcaaggtaagcaacagtgggagctgtgattcttgtcaccgttgtagcagaggttaagtaggtttggtctaagctttgccttgtggcggatagcgaaccgatgagtttggagtaacctgataccaaacgtgtaagaccgaagcctgagatgcgaggcagtaattcatcatcaagcaggattttggttgatttcaggttgccatgaacgtactttcttgggctgtactcatgtatatacatcaagccacgagctgttccttgtgcaataagtaatctttcaggccaagagagtgaaggcagagtattcgagggtccacctacaaaaaaatcaaaaccctcttctcaaatcaatgatcacaaacaacaaacaaattctggaaaaaaatctcaactctatgctcatatcttaatctgacctctgcttgtttctgtctcattaaacacgaccttaataccaatcttaacctcttaaacgtaaccaacaatattctctcatcaagctaagacaaatagaatctttgcaccaccttctacattgctctatcctaatccaaaactgtcgcaaaaacagaatttacgttgttgttttcgacgagaagaaaaatccaagtttctctggaaccataacagttaccaaacatgtgattttgaaacagaaaagaccaagaagaagacgccaacaaattttctattatcatacaatctaatatagacaaaaaaaaaactctatctatacagattcaccaatcaactggttcaagagcacaaactccaaaacaaacctctcttttttgtcaacaccaagattcataaaacaaaattgagattagtctcataattagtggttgattaatgaagattagtaaattaccatgtaaggcagagtacaagctgccgttgcgtatgtaatcagtgatcaagagcctctcgtcctcagcatagtaataagctcttagccgtacgatatttggatgttggactctacttatagcctccacttcattttcgaaatccttccgccgccacgtggcatctccgtcgcttagccttctcacagcaacgacggtggatgacgtaaacgtagccgccactgtacctgatcccattccggccactactctgtacacaatcccacttctgctctttccgacgacgtaagccgatgctctcagcaaatcctcgagctcgagctcgaatccttcgtccatcaccacgaatttaccttccttctcctcctcatccgccgcatcatccaatggcgccgccgtgttgtttttttccggtgtactcacagtggagcttaattttcttcgaatcagccatacggagatagaaactgctccgattacgattgagactccggagatgagagaaaccgttacggatccggtgatcggtttattctttcttccgtccttgtcgatgaagctagggtttggtttcttcgggaggatttgcgagccttctggttttggagcgacgagcttagggttcgtaccttgatctttacacagcttctgtaatgggaaaccacagagctcagagtttccggcgaacgctgttggtccttggtttaagagagagccaatctgaggtatttttccggtgagattattggggccggatctaagctgacaaagactggaaaacggccatacgacggcggaatttcgccggagaaactgttgtaagagagattgagtgtgccgactaagcttccgagttgagtgagtgactgagggagtgaaccgttgagtagattggaggagaaatcaatgtgagtgagattcttgagggattggatttgggccggaattgggccggagattgagttgtgagagagatcaatgtaacggagattaacggcgttgaagagacgagtcggcactggttttgagaaattgttacgagcaaggtcgagttttatgagtgagtcgagtagaccgagtttagagggtatgtaacctgagagtcttcttccggagagaacgagtgaggtgactcggccatgtgtgcagatgacccccaggggaagacatggccccgctgcctacttgaacgagagatgtcctgaaccactagacgatgggggcatacttgctcaaccgccatcatactatgatcatagtatgatcagtttttttaaattgtcaatataatgaaatgaaatggtatgactagcttataaggttttttcttttttctatagaattctatatcattttttttttacatttgtattcatattctaatcataattctataacaaataaatatactttctttttatatttgaagtggaaatattaaaattaaaaaataaataaaaaaaaaatctaaaaatcgtctagtacggaatcttttcaagaagtgattggtctaacataaaaaaaaaaaagaaaaaaagagggttaagtttcgttttttttttactttccttgatagattgcctcatctcattgttaagaaatagtagtatccctgtctaacactaatccaagaaagtcagccagaatccatcttctaattagggaaaaaggtggatttataagttaagttatcaaaaatttgcttttttttttttttttttagaaaattattgttcagaggataatccgtatctcttcatcacatgtcaagataaaatatcttgggtgtatgtcaacttgctgagtacatgtataaatcaaattaatttcgttcgatgcgctaggctattaaaaaaaaattcattgcatggatatttatcaaatccaatattaaaaaagcaaaaaataccccgttaagtaaatttgaagtcaattcaaattctcatttctagttcccaaatgagctactaaccactatgcgtctattgtatatatatttaatatatatatatatatagattttatttactaccggctcagtcaggaattaaaccaagacggcccttttaactcagtggtagagtaacgccatggtaaggcgtaagtcatcggttcaaatccgataaggggcttttacgttctttactttctaatagtcaaaatttcatttgaaagtctataatttaatttcaaattttgttaatttcattctaataaatttcattctaataatataataactaataataaagttagcgagtaatttaaaaaataaaaatgaacatttgtatattataatacaattacaatgaataatgataagtcgtctcttgaatcgccaaatatatattctttttttttttcgatttttcgatagattagaaatcgacaaatccaaaagaaaaagtaagtggacctaacccatcgaatcatgactatatccactattctgatattcaaattcgatagagattaaattgaaacagtagattttttttatttcatatttttgtattaggaaatccgtcgatatctcttattgaatcttcttgtttctatatatttcataggaaatatattgcgttcctgcctagagaaagagagtctttttgcaaagtaataactaaaagggcgtttcaatattttttttgattcgagaacataacaagatcctacattctctttgtattaagaatcaatttgtattaaaaataaacaaaaatcgaatcataatcatggcttcagatatcaattaaatatttccatattgatgcatccgagatgacaatgtaatgtgatcgaaggtgtatgtgagaaagaaactctcatttacagtttcctataattttatttaaatattgaattaaatataaataagaaattttccccttttttgacagatacataagggcatgtacatatagatatcaaagaaaatagaaaaaaatattaaaagttccctttttgcttcaacccgtcaactaaaaaaagggtataaaaggaaaataacaatagttgatactatagtatttaatagacaagtatttaatacacgcaaaaaagaaaaaaaaagttctttattctttatctgaataatgagtcatccgacaattcatgatttagattcaactacttatacttattaataaactaatagcaaggaagaaacaaattgagttgatccgtttacctaagtaaggaccaataaaatcaaaaattttgatcttcgaaaccaattaaatgaaattctaagggttccattttatggggcagtgcgcgagaaattaaatcataaacaaatgatagaatttgagcgccctgaaaatgccataatatataacatcaaaatctataacattaaggtgttcggaaatggttgaagtagatgaataggaggatcgctatgactatagcccttggtaaatttaccaaagacgaaaaagatttatttgatattatggatgactggtttcggggggaccggaaaacataaatatcaagttactcatcattgaatctgaaagctatcaagacaagataacaagtgacactaaagtttgttaatgttttgggaggaggtatgaaacagaaatgaagagtctcttacatgagaaaaaatattgttatacaatgtctgaacaacgtacgggtacctcaaactttacgctggttgtgttgctccattttgatctcgatcgctttatctctaactcgtaacaagactaatcaaaattgagtgtcttaaacaactatcagaatcataacacaatctaaagcaaaacaagattaaaagaaaccaaagaagtaaacatcttcaaacgcttatcgagtgatatcaatcaagcaaaaagtcaaaaagaatagaagagaaagtgaaactaacccaaaggattagacagcttgaagaagttcttggccatggcaattcgattagtacctgcaatgattaagagaaaaatcaaaactttatctgttaggctaaatcagaataaaaacctagaacccaaaaacttttcttgtttccctctattcaagtttctcaatgccatacaaaaccaaatcacatcaagaggatgacaaataaaaacaaaaccaaagtcctcaagtaaaacctgaacaaattaaccaagtaatcaccaaaacaacataaaagaacgaacaaaatctcgaatgctacatatgctaacaaagtgacattacttaacaagactgagatacaaaaatatccacggctgaatgaaatgtcaaaccataaacacaacagaattccacatgaggaatagcacttaagaagttgtaggtaaactttctgcaattaggttgatgaatcataatgattagagatagaccacaaccttggacaagagagaaactaaatcagagaaatagatggtgaatcgtttctttggtttttgtctcacagtcatttc

SEQ ID NO: 38649 - DNA, 1117 bp, Arabidopsis thaliana landsberg
ctaccccggtaactaggatcacctcttgtagaattattacgcggaagtgctagtgttggacaatccactttgacatcgtttttatagtttacacacttttgtattacctcttcttacggccgtctttatgttaatgcatttcctaatgatacgtaagcaaggtatttctggtcccttataaataatatagattctaggtatttgtacttacttattacttggtgaaggaacgatagtattttattgctataaatatggattattaaaaaaataaaacatgtatttggatatttcccttcaactccacaatattttattatttttttgacataaaaagttgaagggaattctatgaagagataatggattatgggagtgtgtgacttgaactattgatcgggccgtgcagaaatattactttatctgctacattggaattcacaaccaaatgtgtctttgttccaaccactgtgtaagccccatacaggggataggctggttcacttgaagagaatcttttctatgatcgtacccgacgctgtcgtggatgagtgggctccgtaaaatccagtagattaagggatggaacaaaatcctgattatgtttttagttattttggactaaaaaaaaaaaagaaaataattattaatagtaatagtatgtaaatgcattcattttctctgcatcgactcgatttatgatactatcggagtgaatacaggatctaatgaagagtagagggtagactccattagtaacaagtaaatcctttgtatttgaaaaatctcgatataattgttgagattaaggacgaatttataaggtatgagacgacccagaaagcacttaatcatgataaactttttaagcttacgtgggtgttgagcatttacctgtaagaatggaatttcttgaatctttagttgcaataactttggaatcggataattaatttttacatattaaattatattttttgtatgtattcatttagtttggttaattcttgctcgagccggatgataaaaaattatcatgtccggttccctcgggggatggatccataagaattcacctatcccaataacaaaaaaaccagatttgaatgatcctgta

SEQ ID NO: 38650 - DNA, 1750 bp, Arabidopsis thaliana landsberg
ggatgctattccctgctcccaatatcatgcatattgtctgtacatcgggccgcactttatgcttttttaacataaatagccattccagatattacccatccaccaagagtgcttatcaacacattatgatctttggtattcttttctatactgagatatatcactatgactaataagttgattcgagatttcggtatcaacctcttggcctaaaaaaaataatctttctcgataaagtcggttgattaggataattttttattccttaggagccgtacaggcaccttttggtgcatacggttcaataaaaattgtgaaaaaatcaatgtgttgattccaacctacccttttttcatagagggtttttctttctaacttataacggaagggcttgccccaaaagtaaaagaaattttgagttttggcgccttttattagatattaaaatcctctaaaaaaatgattgattcattgatatttttttttttcatcgagattcagttgaaatggcgatggttttttcttgttcctgaacgggcttcttcctttttttattccattttttaggtttatgctctaccccgagtaaaaggaaaaatttgcccgattttgatttgcacatataggacaaatgaaccaaataccgcgtctttttttactactccttcttttttttcaattcagttctttcacttgtcttctgtcaaatagtcaacaaattttgaattatattatatattatttgtatttgatttgagcaacagttttagatcgccctgtttcaattttttttatagagtttttatcataattttgcatataatagaagtagtaattataaaaatattatatattaattatcaattgggtttttgctaaacggagcctggatacttcattttattagtccgatcacgtaaaccataaaaaaattttgataatctaatatcaatctaaatactccctgcatttaattccactttattttttgcgcttcgcgttacaaatttttgataattcaatcaatctttttgagcgaaacagaggatatctcgatcgagggagaaaatggggaaatcccatatagcccgatatatctgacaagtcgcactatatgtcaacccaagatgtatctccttctccaggacttcgaaaaggtacttttggaacgccaataggcatgaaatgaaaaaaaaagagaatgaagttctctatttcactttgatgtggaaacgtaaaattggggtttcgttttttaatactattatccttttttcctactttattaatcatatttaaattaatgatatttaatacataagttgaataagctaaaataaaatataaaataaaagtaaagtaagagagaatgaataaaactaaaggaaattttttacgaacgggcttctgaatgatcaacaacaatagctatcttggttcatagaaaataggattaacccccattgcatattggtacttatcggatatagaatagatccgcttccctttttttctatgaattgaattgttccattattactaacagaatagaacaaatattaatcctttctccgaaataattacctaaaaagggggggtacgtagcatagttttttccaatgcaataaagttacatagtgtctatttttcgttgataaaggggtatttccatgggtttgccttggtatcgtgttcatactgttgtattgaatgatcccggtcgtttacttgctgttcacataatccatac

SEQ ID NO: 38651 - DNA, 2099 bp, Arabidopsis thaliana landsberg
tatactattataattttggtataattttgtttcaaaattgccaaagtatgttttgaaataaactttataataacaagaattctaaataacactaatttccaatattcaaatcattgtaatagcttcttgagttggttttctatacttttattttgtttaaatttatattgtcatttaagcccaaatattcatacgtagtattgttaatatgggctacccggcccgttaaggcacggacccgtttaggtccgcaaccgtttaacaacttttttgaagcccgtttactttatacccgtttaagcctgtcaaacttttaaaagcccgtttaggcccatctgaaaaaagttttacctgattttttcttttgaccatattttgagatttaattttgttttagaattgataactgaaatatgaagcatttgagaattgattaagtccaaaacataatacatctctaagatattaaaagtattatcaagaaaacaaaaaaaaatatgaaacatacgtgaaaaatgaaagtatgaaactatcacgtccaaaagaccaaaacatttaagagtgatttccaaatcatgaataacaaaatataaaacattacgtctagattccaaatcatcattgtttgaccgaacgcttgaatctctgtaccttgaaccctccactgctgaagtactccctacatttctaccatcttcattaccaatttcatcgttgacttcgatggtacctacaatttaaagatttcattattaggtaaaaattcacttaattatataattagttgaaacagagtattatctttatgatcttcagatcctcgtaaccaattacgagtgcaaactagagcttgtacattccttggaagaagtcggtacctatatggggtggacactcatagatcaaagagtgaacgctgattgcgcagctctgtggtgaaggggatacaaaacatttatagggccatattgcggctaattcacaactaggctgatggatgtccgaatcgggcctatatgacatgaccgatcaataaaaattcttgagcactccactattgtcatatattcaagaccttactagagcgatatcatatatatggaatactattcactttgaagatgtctaggtggtgaaatggatcttttctgttatcagcatttcctctatgagagcggtacagctggagttagggtcaagcgattgtaatagcatcgcatattgtcgtggtgtccgttgcgcaataggcggctcttctctatctaatgaatggggagggggagtccgctttgaaatcgtcgcgccctgcgccccgcagtatatgattcaacaggaatcacacaagggtagattgatacaatctaaacctctggtaaaaagccccccgtaacccggcagattcaagtacattacatagtccgttttagggattggtgacttacccattcagtgactttggcactggatggacgttaccaaaattggtactatcgggtcgggtgaattcaataatagacgcctggcggcattccagccttccttctcctttcaggacctatcctaaagagaatccagtacttcttggtcgtgaatatctgaatagggcgaaccactccgtggatatctttacttcggaacaaaacaattagaattaggctcggtcaactggaatgtgtcttatccatataggggatcttccaattgagaagatctatcgacctgagacgaagagaaaggtctatctattttatttagttattcagttgattcgttattggaacagatagcaacaacaatttaatccgacatgcgtatttttgattttccaatggatttccatcttttattaatggaaatttttttgatgtagtgagtaatagctccggttgttcgctgttcaagaattcttgtttaggcagttcataccatccatacatagtgttttgatctaagatttcaattcttccatgtttcagtagtagcatattgttccatggagctaagtggaagaaacaggtgtttatacaactctaccacccagggaattgcgttccatttaatccttttttcatggccacattacttcacggctaatgctt

SEQ ID NO: 38652 - DNA, 3337 bp, Arabidopsis thaliana landsberg
cctcgtctggccaatgatcaaggatctgtttaacattatgctcaatgctgcttattttaagatcttatacatttcgtttccaaatccagcttctgctgttttccctagaacataaccatgtctacaaaattgctccggaggcagctcacggatcgctgaagctcctataaaccacaataaccacatcgacattgattcatcgtaaacacctccgcttatataagaatcgattcaaaaacaaaatatctcaccattgatttgaaaatggcgatggataacatctcgaactctgagactttgatctacgaaaccaccatcgaattcgcttcccatttcttctaccgtcgcgcagagtttagctccatcgaccatagcctctccaatcgaagaagagttgctccatctcgaagcctcctcggattcggactcgtcatcgtcgtcgtcgatgaaagacgaattaggatctacggaacggagcgtgagcaacaacaaaccaaaaccgatgaagaaaaccacagatgataagagaatcgtcttcccgaacaaccgcttccgtcttgttccaccgcgtttcatctcttcctcatcgtttcttttctccgtcgtgggaaactcgaacaagtgtagagtttcttacatcagagctttggatgcgattgacgcggtgccgttttggattcgttcgtgtcggtggccgttaaactacgtcaaacggtatcgtattaacactaaactgggcctaactaactatatctattaaaagcccatcaagttggtaggcgtcgttttctgtttttggtgcactggtggtggatacatccacatgaccacatctaaatataatcatcattttaataaaattacaaagaaaactaatcttttcgtataagaagatattcatttgaggaaatttaaaaccccccaaaccaataacacaatattttaataataatgtaaaaatccgtaacccaagaatagttgaatctcaaaattatagttgtttcaacttagcctatttaacttcaaattatagttgtttcaactagactattttggtgaatcatgtacaagttatcagctatacatacattttcacaaaaaaattgtccaagactaattattgtggacgtttcctcacaataattatgatgataattttgatgaagaaaataccaattcaatttgaatggattcaaaacaacgttactatatgggtcgagatttaaaattattccgttttcatcgattaaataagagttaattttttgaaaaatatattttaagttatcaagttgaaaatatttaattaaagagatctgattataagttagtaaaggcaaaaacgaataaaaatttgaaattggggtagctgttcctaaggggcccgacgaatttttaattgtaattagagtatttttttttattgattggtttatcacattgtgatgttttacatgattaaatggacccattctaaaacaattagatgatgataaaattaacaaagattgggactccttatttcgatttaagaacatgcgaatagttccgtgattttgtctaagtgattgttgaagaatgccagacttgggcgaaatcgaataaaacggattcatgtgatctgcagagatcaatcccgaatctggcgaattattcctttttcttatatatgaaatatgggatttcactaagccaattcttatgaaatcttgaatcaaaccctttgtacttacttcaacaaagaaagcacggacctcctcgagagaagaatttttgtcccaattcaagactaaacaagttcgaactaattgaatacttgtgtcagaaattcctcgagttggtttgccatttccataaaggatatagttgaaaactcgaagttgaatattatccttttcccgaaagagatcttgtgggaagagtgttgccaaatttatactgtccgctatctcataggtggctacgggccgcaccaaaacaaaaaactttttcttggttggtgtaatccgttggacataaatccaatttttaaattttttggattccttcgagtttgtttttcctcttcctggcggtatcaagatgccactgtgtcgggatattttatctgtcttgtccggaaaatggatatcccctgaaaatattttgagttcaatcctttttttttttttctctactcggatcaacccgccgacttggcttcttatatttaaagtgagtcgtgtatccactccaatgatactatagttctgtaccattatggcagaggatgcggggaaaatatgcacttcctcaggaatgaaaaaaaagcgatctactttcatttcgtattttgtcttaattttttggactcctcgatactcaatcatatcctctttttggatgattgaatccgcctttagagtcccatatttaagaattccggaactctttcttcggtatctaggatcatcaaaaaaagcaaaaatactatttctacggaaaataccatttatgggtatttcaaccgagatacctgactgcggtatgaattctttctcttgctcttgaatcgattggaatggaatgagaaatctatttcttcgtctttttgctaataaatccgagttctcatgaaaaatagcagaatatattaaattataatgactagtacctaagtttccattcaattctgaataatcgtaaatccctaatttttttggatcggcaaaatcggaactaaaaaatttttggctcacttgatcattattcactgagaggctagaaatagattttctttcggcggaaagaaagggtatattcatttgatcttgatctttatggatcgaaaaacgaattagactagatccacatgaacctccggataatatccataaatgacttgtttttggtaagaggtggacattactatatgtaaattcgggtgcatgggacacatcagtactccagtgcatttcgccctctgagtcagaataaatatattttctaaccctctctttaaaatgaaaagtgtatgttccctcgcgactgttacctatcacttgctctgattccacatatcgagcattttgaactaaaagaaaactacttggtggaatagccacgctatgcataatatctgcgctctcaatactttcagacaggtgtatataacatagaaaggcaggatgcccgtgacgtgtacgtgcaggaagaaccaaagccctattggagatgagttttccatgatatggggctggcccatgtgaaagcggtacacactgcgaatactgccgctgactgaagagcatttagagataagtgagtccgcggctcaccgatcgattgagccgcgata

SEQ ID NO: 38653 - DNA, 1923 bp, Arabidopsis thaliana landsberg
taatacgatagttttgtctcctacgtcctccgatgctatatatccgcgtttaattctagtcattgaataaatcaaactttgatgaataactaattctttttttagttattcttttcccctttactagtctattaataaccaaacgaattattccaatgtataaaaaaaattccaatggcttttgctactctaaccttccccaccactattttttgctaggtattttcctttactttgaaaggccttgatataaaaaaatagaataactacaaaacgtagtaaatagaattggataaatagtgggttccatcgtttctatggttacttctaaaacggtgaggtcctctctatacaccggagctccttcttttaattaatcaatactattggtaacttgtacaattcacattctttggctctaccccatgaatattccagtaataggtctttcacaatgagatcccctttatacagtaacggtatttcattttgaaaattgattaggtcatttaccctgttagtccgttcttttctttcaaaagtggaatcttttttctaaaaaatggaatttcccccgcttaatggatactcatttgttatcattgggggttttctaaaaaatggagttgattggatttgcaccaatgtaaaccataagtttcagacacaatagagtatatgaacgatctatattttgtaaataatgaatcgagttcgtccattctattttattcataggtactgatccgtgatatttcaaaaagaatttcctttttatgtctcagtctatgatctaaacgagtcgcacatacacccgagtacatgttcctcgtcgctgagggcatccccgaagcgctggggatttcgtgacgtttcggattggctgtcttgtatttctaataagttgtttaatggttggcatacggaatcatataaataatgggctggtttagattagttctaaccggctaattctgaattacttctcttcaagattctcttcaatatttttttatttttatattgaagagaatattaaactaaacctttaatctaaaaagatataaaattctaaattgtagatttgcatgaaatcgctcctattttttattgaaccggtacaagatcaacaattccatgagcttgggcttgctgttgctgacataaaaacatcccgttccatgtcttcggatataacccatataggtttgcccgttctttgtacataaacccttgtgatggtttcgcgaagtttaagtaattcttccgcttccaagataaattctcccgtttgtgcctcataaaacgaactagcgggttgatggatcattaccctgatgatataatagaaaaggtttttctatttcgcagaatgagacgggataacaaaaaaaaaaaatagataaatttgaataaccgtacaggctttttttgtgcattgcatacggctccacaatggaattgacttttttgacctttccttaaatcatccaattaccatccttcttttttttgtaggagttaaaaaaatactatgatggttccgttgctttatatatcattgttttgattcgtcgatgattcagcaatcccaaagtgtctttttttttttttacggtgtgaaaacaaagtttgtgacgctgaaatgtgcccgaataggtaagatatcatttgaaaaacctcttccttatctcatactactctttcaatatataatcgaatttttttttaatctaaaaaatttcatattgaattcgaagtgccatgctattattacttaactaattcatatttcaaatggcgaaggcatagtatttttttctcgaaaataaaaaaactcattggcgccaagcgtgagggaatgctatacgtttggtaattgctcctccgactaggataaaggatgctattgaagcggccaat

SEQ ID NO: 38654 - DNA, 6818 bp, Arabidopsis thaliana landsberg
  unsure (1)..(6818): unsure at all n locations
agttgttgttctgaactggtggtggcactatcccttgtatttggtgatgagttcttgggacatcaccagcgccaatgtttcttggttgttcaacattaggtggattttaaacatcaactggtctgttctattgatccatagcagctggtctttgctgatcacaagctgcctttgctttggtttcttgtaactcacgagctattttgtctattctatctttaaaaggcagtaggtgtgcagaatctttggaccgagtttgcattcacaaagattagtacctataccacaaaaacaagcagacgaaaagatgagttagtaacttgagtaatgtaaaagaagttgatcttaacttttctgatatcttgaatgtaacaatgcaacaatgaattggcaacggcgccaaattaataaatagtttttttaggcatacttatgtgctgaagtgtggttcagttcaattccccttaaacactaacatatcaatgcacctatagggggtgtcaatccagtccattgttattgctagcaatgatgatgtgtacagaagcaactaagtcaagctagattataatgatggttggtttctagtaacaatcttaggtcaggattcaaacaacaaaaatgagaacttaagagccctactcgatcattgggtcgacaagaaccaacatgtgacaaatttccgccgtaaaatgcaatcaacaggggatacagatagnggatacaaataacaggtaaataaaagtgcaatcaacaggggatacaaataaatctaatagaagttctaaggatggattcattgataagggcaactctaggattcatcaaatggctaataggcgaaaggtagatacccatgacgatagattcaaaaaccgggtcaatccactctcgtgacagagacccccataactctaccacttcctaatctcaactctcgttgatgaaacatagcagagagggtttaagaaacaatctaccaaagccaataggcagaaaagccaatctcttggtcgagtctacaaatctctggaattcgtaggtccgacatccatttgaacgtctcttggacgctggacgtcatcgaatcttcacattagccaacaaaaaccgcataggggccaagcgaatccagaaggacataaacctaaacactaaccacctaacgaacctagagattaccgtaatctaatccatcctcaagaaccctaatcactactcaagcaacattctaaagaacacaaacccaaaaattactaaaatcataccaaaatgtagatctaaacaagctaaacaactttaccgaaatcttccttatttgaaagtagtccctacacgtttttagtcacgaatatacctaaatgtttggtcagtattagacctaagttttgtttttagagattgttacacattttgagagaagaatccaatccttttagagaggattctgaactcctttacttttattattaattcatcaatgcaaactgttgagattatgatttgtgtttctattatcatgtctgagtaatcaccttgttgggtttagggagtctcaatagggatttacatggattagtagatggaaaacgccttaggattattcttagagttcttcatcttgattattcttattgctagttttagattgatgacctagaacttgatattagataataagtatgcccaccataggcacttgctatttgatctctcatagatgagcctaggcagttaagaaagaacaggtaggctcataaaagggctctggtttagatactaggtgaactaatcagacttgataataatgcatgctttagtataagatttctcggcttctccggttatcttaactctaagtatagagacttttgcggaacgccaccggttactctaaaatcatagtttgagttcgagaacggttcgataacaacttagctatttctagatctactatcagctatctcctgagaataccctaagcctgacacttttattatcttgtttcataaccatccaattgattgctattgtttacttttgtttctctttattttatttactattttacttagcataattcgatttgccattagtctattccgtgatccgagagccatgtgaattcgatccctaaatgctgcaactgacctctttatttgagagagtggtcttaggattaatttgacctatatcaccagatattattaaatgaagacagcgattaatttagcttctaacgtggaaattaaccaaattaatttcttccacatcaacatgacccgcttgaacatccgctgcccttgacccactgcaatcactagaaaaactgctgttataataagcagctgtcccatcaacaaaattatcgagtcctaataagtgtgcattttacttgttttgagcatccatttgtcatcactttagcatcatatcaccactgttttataccatttctcatcatttgtcatcactttaaatatttaggatagttttgcatgcatattgcatatttgtgttgttttcatgtgatttggagctgctagggagctaattggaagaagtggacctgaacaaatcaatatactcgaccacaaagtcgactatcgtcatcctggactttctgaagtactcggccacaacctctaaagcaaatccctcgacagcaacactctatctatcactcgaccacgaggtcgagtgcagccatcaccatttctcaccatcactcgaccccctggtcgagcacatccatcaccacctatcgccattcactcgacccctggtcaagcaacaacgtcgtcacgtctcgtcattcactcaatcaccaccactcaaccccatggttgagtcccaccatcatcgttcacttgataaatcagtctgccaccaagtcgagttccaccatcatccaccactcgacatcatactcgactgccagcttcagagtcttctcaattcctcactctaccagacattcgagcataaggaagagaagaagactccagctaatcactcgacccattactcgaccacctgggtcgagtaccgttcttaatccgtctcaatactgtgtcgttttgagtattaggatttcagaacatttcgctataagtagcatgtactttatattttcgagactaagttttattccgtagatagattgtcttcttaaccaaatctgaagtcctgtgattcgctactatcagtgctctatagcgaatgttctcttctccagggagtctactggcactgtgtctaacacagacatggagatgatagattccacactcaaaggcattctctgtcgaacaaagggaaagaagatcctaaaaggtgatctcaatgatgcgccaccagtgatgcttctgttgatccacctttgtggatacatgaagtgggcgttgaccaacgtcaagaagagggtgcgagtttatctttgcataggtagtgttgtgacgctaattctgatagcatgtggagtaccgctcaaggaaccatggtttgaaccaaggacgatggacatagatcatatgcgttcctatgagtttctggaacatgacatggttggtgacgtctatcgctacagatttgagcatttgtcgatcagaaccgccaacattcttctcccctgcactgaagctactagaatactcgagggacaaaatattgatttcaagcctgcgcttgaagatatctatttcgagaacagcccaccaactgaggagattagtcacaccgaaggagctacaacagaagatgttgatgagacagatgaaatagatgaggcggagtttgacacaagcatgtatcagtttagagagcatgtatcatttcagtgagcatatacctccagcaaaggaaagcaagagtttgagcgaagctcacaggaacaacagcaagctgcagaagtggtgcaagaaacatgataagttactcaccaagtgcctcagggctatcaagtttctgaaggacaagatcagttgctcctcttccactacagctattccgcagggacagctcctcaggacatgccctcgaggagatatgacgcacctgagccaagtcggcgcaggcctgaacctagagagcagaagatttcgcatgtccctgcgaggcattcatcattcgagcctcgtgaatctgggaggaagaggaggaccacactcactcgatctggcaccaggagcagacgacttctacagtctcgtagtttatgcgaccgcggtgttggccgcaacagaagaagagaggtcgagtatcctcagaccggtgctggctgccacagagctgatgaggtcgagtacccacctgctggagctgatacagaacaggtcggctcgtctatggcctgggagcaatcacaagcagccattgacgaccaacttcgttcattcttcgactgaggtaagcgcctcacttcaccattgtattatatcatctcttgtaatttattgtttattttgtttctatgattggatttgtcctgagtactctcttccaagtttattcacatagtggactgtgtgatttaagtttgggggagggctcaggaagtgtgcgttacattgtttatattcttgagtctgcactctcctaggggttggttatccacctctcattttgttctaggatttttcctattcgtgggtcatttatggcacgcgggaagggctcgggcagcggcagcgggatttgaaaaaggaattgatcgtgattttgaacctgttctttccatgactcctcttaactaaagtagtaggtaaaacaaataggttcatattaaaaagtcttctttgtttctttcaattcaatctaaatttttctggctcggctatactatccagccgagccagaaaaatttatttatcatgctaagaagtaaaaaaagccaataaagagaaaaatagattcatccaacaaaaggagagagagggattcgaaccctcgatagttatttttatgaactataccggttttcaagaccggagccatcaaccactcggccatctctccgaaagataatttctattttatttttttttcgccaaatagaacatagccctatgagttaatacgatcactatgtagagaaagatatagggtgtgactttctttaataggtctataaatctggctatataaataaatgagatacgcgatccagtatacccgtttgtgaagtaaaaaagaacctttaacttcatgtccgaatagactaaaagtggtaaaaagaaattggaactaagtcatctcgaatcaacggattcatgataaaatccctttatttattaaaaatttttagtgggtaagaggattaaatggtgtatattcttttgttaatagcttggaggattaaaaacatgactattgctttccaattggcagtttttgcattaattattacttcatcaatcttactgattagtgtacccgttgtatttgcgtctcctgatggttggtcgagtaacaaaaatgttgtattttctggtacatctttatggattggattagtcttcttggtgggtatccttaattctcttatctcttgaattcattcgttgcagatccaaaaatgagatgaccccctcccattccttgaattacacattcaaattcaatataagtccataaaatgcaaataaagaaaaaattagagggggggtcgaacttatggaacttgaatgaaatatgaataaaagattaataaatagttactaaatatgaaatagttcctaaatatgaaatagtaataaaaaaaaataaataaaaaaaacgaataaaaaattgagatctgatatcaagtcaatatagaatataatattttatggaaatataagaataatatattcttgaatctggaattcaatattaaattaaattaatattcaagaattaatattaatatattaatatatagaataaatataatatatattattaatatatatatttataatatatatatatatattaatagaattgttaattgaatttatttggtggtagaattttatgaaatgaccccaaaccaaagagtgtatctcgtctagctttgaacaaatattatccataaatttcttataaagaagggcaaaaaatgcggatatagtcgaatggtaaaatttctccttgccaaggagaagacgcgggttcgattcccgctatccgcccaaatataaatggattcaaaaagagaaaatattcggtatagttgaccgggaaatattgtaattttttcctcgcgtcccaaaagacacgtattaatttatgacttgttagtagaatcaaacttacatttcttgaaaaaaaaaagttgcggagacaggatttgaacccgtgacctcaaggttatgagccttgcgagctaccaaactgctctaccccgcgctgaaacaaaaaaacttggactaaactctaataaacaaagaataattgaaggagcccctcttccatatctgtacaaatagaatagcctatttagacagaatggtaaaggggcctcatcgatcatagaaaaaaatagaaaaattaagggatacttaaatccttaccagcttgatcttgttgcccctggcaacaaacatgcctgaaccatttcccgaaggatgtgtccagatagtccaatggcttgatagaaagctctcgctctgccggggcctaagccacgaaacccaactacgggcgggcgcactattacgcggaggggatcgcgctaagctatgagtaagaggtgtctcacttgtgtgaaagcatattacttatgtgcttacccggcgcaacgcgctaaaaatgacctaacctgaccaacacatgtc

SEQ ID NO: 38655 - DNA, 1362 bp, Arabidopsis thaliana landsberg
aaaccaagcccatgtttgagtatcattcagcaactccttatcaattttgattcatttcaatatgaaaaataattcaccggattccatcaactagaatataacaaaaaagtacgaataaaaaaaatatttaggtaaaaaaaattttcaaatatatatcaaatacaaatatatatcaaatataaaaattgatccttaaaatatgaaatagtattcaatcaaatttaattgaatgaacggaaaaaatcataacatacacaaagttttctttggtctttaataatttagaacattttttattgacgagccacagaaattgcacctatcaaagcaactaaaagaattattgaaatgagttcaaatggcagaaaaaaatctgttgataaatgaattcctatttgttgactattacttataggatcttgctctagaatgtggtttaattttgtagtccaaataaccccgtaccatgacgtatcgagaatagtagacattaataaaaaaagaatagttgtacaaaccaacgaagtaatcccattcccaatggtccacagattgaaatctgtggaatattctgaatcattcatgaacatcacagcaaatatgattaaaacggttatggcccccacataaataaggagttgtgcagcagctacaaaatgggaatttgatagaatattctattaagatattctgtcaagttcaaatcctaaggaaaaggctgaaaatattgggttgggaagtaataccactcccagaccccctactagaagaccggatcccagaaaaactaaaagaaaatcatgtattggtccaggcaaatccattatattattaaaataagaaaaaatcgaaatccttttcatgaccttattaatttaaccaggaaatttgttttttatatgtttctaaatagagtgaaattagaatctaatggatatgaattgatgtagatacaattattagtattaggctgttttctctttttttttttctaaagtgtattttcaacctatcaatttcaagaaagtaattacgaatatattatattaaaagaatgtgccttaatacttaatattattattattatataaatacaatacaagtttttaattaaattctttatataaatataattcaacaacttggaattctttttttaatcaaattaaagggtttaccccattttttgtttgaggtgaattccaaattgttcgaatagtgtaatcgtcaattactgacattggtaacgacccaaagctatttgattataattcaattcgcacctcaaagggagattcaattctcagaaattgacaccagctgttggcaaactcaacacaattgccagaataggccaatgcc

SEQ ID NO: 38656 - DNA, 4482 bp, Arabidopsis thaliana landsberg
ccataaagttagaatagattcttcctgggtcgatgcccgagcggttaatggggacggactgtaaattcgttggcaatatgtctacgctggttcaaatccagctcggcccaataattagctgtctacataaccattttttttttttttgcataaatgacagagaaggggtaagaaaaaaaggtcaaatttcagggtatagggtatagttcgactttacttttttctttatttcttatgtttagttactttttttttccagaaaaaattccgatcttgatcttgctaaggattccgatatggatcctttaaagagaaactttaatgaacagagtcgataaaataatctatttttttgtaaaaaatagattatcaattgatttgataataatgtaaggattacccagtaatccgtcttgctctcactaaagtgatatccatatagatatcaatatatcacttgtgactttctttgttacaaaacaaaaatttgaatttaaaattgaaatgattaaaatgaaatcataagaaggaatatgtaagctacccgctttatttccatgggattgtagttcaattggtcagagcaccgccctgtcaaggcggaagctgcgggttcgagccccgtcagtcccggcggattcaatacatcaactcccctttttgtttccgagcaaggggatgaaaatggtttcatttatctttttatttgatttttcttttttcataaagcaaaagaaagggtcgattattttaactagggtagagaaacatatgtaaatgaattattgagagcattcaacacttcaagaaagagatactgtatggggtttccgctttttgtcaaccgctctcccataatttcgtgtaggaaaatggaataggatcgcgtataatacatttgccaagagtacctatatatacttttctttctatgaagtcaaggaattttaaatagttcgaattcaaccaaggaaagaggtttttttttaataaagataaaatgtgtcttccctaatgaataggctctttttaaagattagagtcgatgtcgaataaaaaactcgtaagaaaaattaactcgttaattttttttgaatattttcgtttttttaccgggactcgtctttgtcacattccctttctttgttttccaaaaagatgataaaccctttcaatttttttatttcaaattgaacttcgtacttgttttctctatattgatttctattgtttatttaaggttctttagaaactctttttgtaaagaatcgaagttttttatgatacttcatcagatgattgtacaaggaaagtaaactactaggttttagaaaggaaagccgggaaaaagaatcataaagaacttttttttttattggatcgggaatctcattatgtattcggtgtggataaaagatcttcctatgttatactattaaattcttgacgatgaatcgattttatagctccgatattgttattcatgatatttctttcattcgatatcatcgcaatctaattcatctgagtaagtttacaagcgaaagatttctcatctctatgggattaaatcccgagatattccaaagaaaaaaaaaataataataataaacgattaaattatggaagtaaatattcttgcatttattgctactgcactcttcattctcgttcctactgcttttttgcttataatttacgtaaaaaccgttagtcaaaatgattaatttgaataaaattttactatcaaaaaaaaaaaaaagatttcaatttctcgtcttaaatgaaaggaacgcattagactcagtagtagtatcctaaggggtccgctagtatggtagaaagagatctctttctaccatactagccattatggttattgtaatgtataaagatacaagtgaaatatcttaatatataggaatccacctatatctctctttttctttataaacgtcaatataaatgaaatagaatatgaaaagtatgtacatactttgtcaatttcatttgtttgtttgatccatttaatacagataatcccaattcgatggaagcttcttcagatttcgaaaggggttaccccatgaatggttaaccgtgtaaaccctgatagaaaaatagaaaatgagtcaataaaacataaatccaatttctaaaaaaaaaatcttaaaaaaaattgccgaacggtctagaaaacgaaaacaattgatacaggttgatagagtttgattattaccgcaattagaagtatttctagagtccacttcttccccacactacgagagagagggaaaatgtaaaaactaccattaaagcagcccatgcgagacttactatatccatgtgaattctgccccctatttctatgaatatgaagaaactattccattattgttcactaataatagtgaaatcactggtgcagagtcaaaaaaaagggagaggtttttggtcaccattgatgaactactccaaaaatccacttatcttataatgagtgattcttttttttttttatagaatttctagtagaatcgacaagatgtaaacacaagcaaaccgacatttttgaagtatccaaggaatctgactcacatgtagaaagaagaatactttttatttcttttatcgttttttatttttggaagtaaaatgaaaggcaattcttaatctaatctaatattgattgaatgtctgagcattccgagactttcatgagtatatatccaaagtatcttaggtccttttcaaaactattaatttaaatctctctccggctatccaatctaattgaagactcagtaagtggaactaaattagtagtggcaagtaaagatttacagatttccctccactactttaagttttccttgaatctgataggcaaaactttaggttagagaatagaacctcgcgagccaggggcttagaataatgaaaagaaagtataaagagtcttttcctacgtttgttatttaaagtttgttgctgaggcggcacccggatttgaactggggaaaaaggatttgcagtcccccgccttaccactcggccatgccgccaaaacgattccgaaaaaaatctatatatatagattttcaatcacaaaatatcgaatctagtacaaaccagaaccattaactattgactgtaaattcatgaccttttttgaatgaaaattaaaatctccagttttttatttctaataatattaagaaaatcattagaaatgcatttctaactaatctatattgagtttttttcaattaaaaagaaatcttcttcaatttaaattataacagtaatgatgagtatatgtaaaccccagaatcagaacatacgttacgttgtgttatagaactatagctctataatggggtattttatctctctagagatgcttttgaggagtaattctcaataaatttttatatttcaatttttcccttgaagagaacatttccttttttatagagcccagcatgcgctgtcccaaatagaactgtaccacaataaaagaagaaaaagagacatatatatctgtgcattcttttttattttaataataaaacaattaataaataaaaaaaaagttttcttacctacttcctattctattcaaaacaggtaaaaataaatctcttttctgcaaatatttgtttgaacaatgaaaaaaaatacatgaaaaagtaaagtggttaaaaaaaaagttttctatttattatatgtttatctgctcgaacagatccaatgatgaatacattttttatggtatgcaatcgaattggaatatgtaatatcataggtgaaaatgaaattactttttttttctagtctttacaaaactccgtaagttccagcggtatttctcaattctgttccatttggatctatttcttataaaaaattccaattgaatatagtctcccttcatacgtatttaatacattccatatatcttggagttggataaaatttcatgtgattcagtaaacagaatagaaattccattattgctagatcgaattctatggatatgattcggtgaagaatgagaaatgggatgggattttttcaataaacggataaatgggaaattcaaaaaagatgcttggggatgaaaaagagggaacatctgcaatacccggatttaatcagatacaatttgaagggttttatcggtttattgatcagggtttaatagaagaacttgctaagtttccaaaaattgaagatatagatcacgaaattgaattgcaattatgtggggtaacatatcacttggtagaacctctgataaaagaacgagatgctgtctatgaatcacttacatattcttatgaattatatgtatcttttgggattttattttggaaaaccaagcatgaatatgcaatgaactaaagatattcctattcggaaacattaccttttaaagaatttccctaggaaacttatataagtaaaacggaaatctac

SEQ ID NO: 38657 - DNA, 1418 bp, Arabidopsis thaliana landsberg
tccgaatatggtaaagtagctcccggatggggaacgacccctttgatgggtgttgcaatggctctatttgcggtattcctatctattattttggagatttataattcttctgttctactggatggaatttcagtgaattagactgagaagaatcttgaagttctagcttttagctcgatacaaaaaagtaaagtatgcaggtctaacaattttagcctattctcctttggtagttcgaccgcgaaatttttttctgcattgtatatttccggaatatgagtgtgtgacttgttagaattgaccctatggatagtacagagaatggggtctgtcatctttatcaagatggttttacttcgtcggatattcattcgagtatctggagcacgaaatagatcaaatagatcacaaagtattcgaactatgattcatacttaaatactcaaacctcgtagccggacttctttccgttctatcttataaactttaataaatcaaaaaaattttctgcttttaaactcttatttggatcaaaggacaaacgcttctttgtattttatgtttttagtcattatagctttttttttattgaataagtgatgatccaatggttctcactcagtgaactttggactttgaaggtttcattaaattatcgtggttctcgtatgaatctgaggtttcaattgattagttaagtagggtcttaacaagagaattcctatcaataataaagaaaacaagaagaaatccctgtccccgttccatacaaataccaaataaaaaaagacaataaagataggtaatctagaagattcaagaggcctgtaacgatcaacacaacataaagacgaatgagcttacttgattttttggcatttaaccacaaagacgagctttcgcattttgactctttcatatctttaaataataaaaaataatattgaatgagagacaagtttaaaactttatattccatatctgtttcaatcagtatttgggtctttttttgtttgagctgtacgagatgaaattctcatatacagttcttggagggggagtaaccttggtttacctatctcaataaagtttatgattggttcgaagaacgtcttgagattcaggcgattgcagatgatataactagtaaatatgttcctccgcatgtcaacatattttattgtctaggcggaatgacccttacttgttttttagtacaagtagctacgggatttgctatgactttatattaccgtccaaccgttactgaagctttgcttctgtcaatatataagactgaagctaacttggtggtaatccacagtcatcatggcgcagttgatggtcaagagacctgcctttctgttcctcaccggggttaaaaccccatactggtcgggggttgggatgcccatttg

SEQ ID NO: 38658 - DNA, 2439 bp, Arabidopsis thaliana landsberg
catttccagcttatacattgacaaatgaagccaaaatgagtttattgcaatgtgttaaacatgcaatcaaattccctgatggttattcgtctgatttgagtagttgtgttgatatggagaatggaaagttatcaggtatgaagagtcacgattgtcatgtttttatggagcggttacttccatttatctttgcaaaactcctcgaccggaacgttcactttgcattatcaggtaaaataagaatataatttactctttatatcatatatgcacttgagatgatgcaatttttttttccaggggttggcgcatttcttagggacttatgttcgagaactttgcagaaaattcgcgttcaaattcttaagcagaacattgttttgatcatttgaaacttagagaagatcttcccaccatcattttttgatgttatggagcacctgcctatacatctcccctataaagcagaattgggcggtcctgtccaatataggtggatgtatccttttgcgaggtttttcaaaaagttgaaaggaaaagcaaaaaataaaagatatgcggtcggatcaattgttgagtcatatatcaattacgagattttttatttctcagagcactactttgccgataatatacaaacaaaatcaaggtacataactaatagcaattaattaaacatctgcaccaagcaagttttctatgcgcaaaaataaccatgacttacctcttttggatcaggttaacaagattcaatgagggtgaagttcttgtatatcatgttcttggagtacctaatatatttagttctgttagtcgtccaagtggagaaatacgtgaagtatggctatcagaggaagactatcaatgcgcacatggatatgttatacggaattgtgattattttcaagtaattgagaggtatataacaaaagtcatactcccattttaagttaattataaatgtttgtttaccaacccttatatgttgtttttgtctttatagtatgttcgaagattttctttctattaaatatccaggattgaatgaaaaagaactctttgtgaaaagaggcgaggaatatcatgtgtgggtgaaagattatgtatgtctaaataatttatctatatattatttgcatttatttattgttattcttatctataatgatgtttatttcgaaattttcatacatgttacatattggaacctagtaatccatttccaacttgggtttaaggttttaggtttagtgttgaggagcaaatatactttaaaaattaaagtaagcacaatatttgtaagcgttttggaatcaaatatcacaagatgataggtggatgatttagttttagggctaaaagcacaaccagggctatgaacctaaatttatctttccttgttagaagatccaaaaccaaaaatcagacggacttaggctacaccatcaaagctttgaggagcaagaagaatctgggttagcatttcggagtgaaatatgagtagatgtcatgtgtatgattgaatataaaactagaacctcaacgagatcccgaagagtaaagtagtgcttccttgttatacgattcaaaaccaaaaattgttaagaacttcgggttcaccatcaaagctttgagaaatcatgaagaagcttggtttgtgtttttgtagtccaaattgacttgatgctttgtgtatcattcagtataaaaactagaaacgcaataagaacctggaagttaaagttggattcagggtttaaggtttaaggttaaggttttgcgtttaaggtttaggttttaaggtttagggtttaggtttagggtttagagttagggtttagggtttaaggtttatggttagggtatagtgtttagggtttagggattagggattagattttagggtttggaatttaccgtgcccggccactactacaggagactctttacataatgagattcgaaaaacgagtctgtcgtaggccatccagcagatcattcatataaaattagatctcttgaaagattttctttacatcttttctaataaggaactgtagttttatgaaagagggacctttaagaaattccataaattaatgaggacacatgtctcagcttatatgtctataaattatagaatatgtatgtatgcgatactccaaaaaagaaacagagtggaggtagttagatgatatttggcagctagcataaaatggtaaacaaatgaagcgaaagatttaacacattttcttatttagtgtttagtgtatagtactcgattatgcaaagccacactttacaacaaatcatgtttggtcgtgaatcatgtgctttatagtggacccttctattttgtacgcccatgcatttcatgttgatgagcatatgtggtcattagcccccccagaaaaggaatagccaacaagaagaagagta

SEQ ID NO: 38659 - DNA, 458 bp, Arabidopsis thaliana landsberg
tatataccgagaggccaaacttggcatgtgataccttttcggaaagcccaaagagagccctccgacgaaagaagcaagacaatggaacatatccattgtttttttgtcgacttcaaattttgacctttaagtactttttcgcgcattttcgtgatttgtggtatattgcggacccaaaattagttatttcaagcattgttttcgaatatttttcatgcatcaaagctcggcaagactagatggggtatccctacatggcgggggggacccacggcgaacggttcatcaagagcttaaactttagagctcatcggctggagcatggtcactgcctgcctcctgtcaagttctcatcgaggacctaaatcgtatgtgtacgatacagcagggcatgcatgtaagggagccgggttctaacgacaatctgtgcatagggagcacgagctcccctcatgaga

SEQ ID NO: 38660 - DNA, 18132 bp, Arabidopsis thaliana landsberg
  unsure (1)..(18132): unsure at all n locations
aatgtagacacagacttcaaatgtttcaatcgggacatcaggacctcgggagttcagcaatagatgatcatacagtcatctttctggaggtaaagtttacattttcacttgcatattgtctgcattttctcaaactctttattaatggtatggctatttttttcataggccacagagacaaattcaagagggaactattatgcagttggaagcctcaaagataatcttccggatctagtcactggaaagggcaaacatgcagcagactctacctcctttgtgtcattgcaagagcaactgaaagaagctcaacagaagatcgaagagcaggctgctcatcatgctagacgtgaggcagagcaagtccgagctgtggctgaacagaaagacaagctggatcacttggccttggtggaaaagtatttgcgccaaactgatccagactttctcacctttatggctactcattcatctgaagcaaccacaaccgatcctatctaatcttcaccatctcagttttaagttccctactttataactctcatgaattcctcaaaccttttagttttatgtcaaattactagaatcttgtatttggtatgttttggatattgagtttggtgtttttgaatcttttcaggtttttagtttgttttgaatcatggttttgtcttgttttttatgtgttttggaatggatttggatacaaacaaaatcagacaaactattttttttttttttgctgaaatggttgtcgcttaactgtcgttaattggtcactatttagtcgctaaattgtcgcaaagtagtctatacacgagtcgatatacatgtgattcaatcgtaacttagtcgtaactcagtcgtcatattacacgactatgttgcgacaaagcttacgacatcgaagattagtcgtctcgtagtcgttatttagcgactaaagttacaactatttgggttagcgactatggattcccgacatcgggaattagtcgtaacatagttgtaactactcctttaatgactactttgcggctaatattgcagtcgtaaaaaccgtgttttcttgtagcattagaagcagtatccaataacatccttatcttgggtaatgctcctctgtagagagtactaagaagtgaagctttcttaaaaccatggtggtgagggcattgagtaatgtagcccttgaagcgttcccatgcttcagagaatgaatcagaattcttctgtgtgaatcttgaaatctcattccgcaatctagctgttcttgagttagagaaaaacttagctaggaaagctgccttacaatcagcccaagtgcttatagaagaagtaggcaaagtcttttcccaaagatgtgctttatctccaagtgagaaagggaataaccggagcttgaaactgtcctcgctaactccgttgatcttggtgagactacagagtctatcaaagttgtcaagatgatccaatgggtcctccattggcagtccatgaaacttgttaccttgaatcatggagataagactactcttgatctcaaaattnnnnnnnnnnnnnnnnngtgggacaataccagctcgttgatggtgatatcttggtgcatctccagcaccaatgttgcctggcaactcacaaataatctcttcattagccatggtgaccagattcgaaaggaataagcaagttgtggtgatgctcgacccttacactcgacctgctagtcgagtatgagtggcctgcaaaacaaaaacaagcaaatgaagaaacaagtgagtaaaccgaaagaaagaaatagaacttgatcttaatgatgctgaggtcttaaatgtaacaaacaaacgcccaattggcaacggcgccaaattgatacaaaggtttttcggtgtgtcaattccctaaatgcatcttatgtcattgcagcatttaaggtgtcaatccaaatgggtgtaattactatcaatcaggatatgatcaaagaatactaagtcaagccaagtgtgaataagtttggtgtgtttctactaaacctaagcaacaggttaacatgcaaatcaaattcagaaataaaactatactaagcagaagataaaggactcaaataacaagaacagaaagtaaaccaagcacaaggtaaagcactcggtcgagcaaacgagtaagcaggtcgagtacaatactaaaaacaccaattttgcacgaaacgaacagagtactaaaaacacgagttttgcacgaataaactaaacagagctcttaagaatggggtaattggtcttagtggactcctcaatccattggctaactaacaaactcaatcaagctatccctagacaatagattcaaaaccaaatcaagccacttccgtgtgaatgattctcataactttagaacttcctaatctcaatttccattgatgaaacataataaagcaggctttaaacaccaatctattaaagtcaataagcagtctaaacatccaatgccttgggctagaatctacaaatctctgaaattagttggttgagacatttcatcaaacaccttttggatggagaaagtctgaaatcaattttcaattgatcagaaagaaaatagcattaagaactcctaaaacagaagggaatcatgcatataaacacttagctagctaaagaagagaggaatccacctaaacctaacccatcctcaagaactctgaagaacactactcaagaacactgaagaacatcatagaacaaaacccagaaaattcataaaacccagaaatcattataaacttagcaaaagatagatctcaatgagataaacaagtttgtagaagaaatcaaatccaaattctcaacacaacaaccagaaaatacaaaaaaaatcaaagaaccctaatatccagcggacaaagctcagatattttgggcaaaaacataagaggtctatttataggcaatcctaggttgccctaattgggaataagacaaaatagataagtcggcgctgcatcactaaggtcttggccgagtaaaaacgtcgagtggcttggtcttggtcacatcactcgggtcttaggccgagtggcttggtcgagtggcttggtcgagtggcttctcttcatccttaagtgcaccactcggcctccagccaagtgccttggtcgagtagactccttgttcttcacgtgtgctccactcggcctccagccgagtacatagacctagtatacttcaaatcctttcttaggtctcctgaactcgagtctgtccatcccttgtgctagaaaccttcaaattgagtccaaaaatacctaattcatctacaaaacactccaaatgcaagtatgctgtgcaatgcaatgcaaaatgtgcaaaagaaggaaaagagactaagaatgcataaaaagagacttgaaactaagctaaatgcatgaaaaacaagggcctaaaaaggttaaaatctagtgtgtatcaacacccccaaacttagctctttgcttgtcctcaagcaacaatagaactaggctaggagtgaggtttgaatgtggggattcagaaccaaaatatgcatgtaaaatagatagtctcagtgtccttgctgctagttctagagtgttaggttgaatgatctctacttaaaaactttagccatcttcttcacaacacaacataatcttgccttaatctattcaagcattcacatcaaccaattccctttaacattcattaagcacaaacaatggatcaagcaatgcaatgtttatgaactcacttggtttcaggcttaggctaagagacaaaaatggatccattaatggtttgatcgagtaacaggggactctcagagaaaagattgagcttcagtagaatgctaaagataaaagccaatggacacatataagaacagactcccatctacccagtgatatagtatgatagctcagaagatgatcccattcctagagatgtcctaactctaccctttttctcattctttctctctttttggttcaagttctaaggggttctctttgaaacgatttaagagtctagcgggtttggttttatactttgacaaacttaaggcttttcttctaatcttagcatatagggcgttttacccttttctttgaatcacaatgcctaacttctttgaattccaaaccctttactagacttaacacttttgtatcccccttaagaactctaaactcttacttttttttttttttttttttcattctcattctcattcccattcattccatacacaatcccaatcccaaatacaagtctccccctaatcctagctaacccaaaaagcgtgggctaggtctacatgaaacactgttcttgtcggctcatacctaacacgttgtactaagctcaatcaaaaaagacctcacaatcacacacaaatgatctttgacttgaaataaggctaggctaagggtatgggaaactgccttagatgatgcaaaatttgaaataagaaaaaagaacacaaagttaaacctgtcttgaaccctcccccaaacttaaattacacagtctcttgtgtaataaaaatctgaaagagaattcaagaccaaagcacgaaacacacaaacaaaaataaaaagatgctatggtatgtacaatggttgaggtggtgttacctcagtgatcaggtgaagtaggaggagacgaaatcgtccatactctcctttgtgtaactctaaggaacgggttgtgctgaacttggattagctggatgcttgactctttgctcgggttgttgatcgagtggctccttaagtggtgcagtagaatggcttgctccagcgtctgatttccttgttcttcttcgctttttcaacttgctcctcttttccgtttctctaggttaaaaggatcattgccttggtggtgaaggtgcagcatggtgttccctcggctcatatgacgactgtcttggtggttgaaggcggatcgaaatgcataggttcatgacgagtggatccgtttctcccaaaaggcatgttatgtggcattgttgtagttgaagaagaacagttgatcttgagttggagattgttaaacttcttgttgagtgtcgcgagagccttgttgtggaacatacaccagctctggaggaaaccaaggcgcttgtgaatttcctttgagtctttactttgactcggtgcggagtactcctcaaagtaaaattgttgtgttgcgtaagacacgtccataggttctgcctcattatctgaatgatggattggggtctcatcattattcattccttccatcggcacaacttcatcacctgaaaaatagaggttctctaatggtgggcaaaactcaatgttgccaccatctctaatcgaagtgaaagcgggatttgggaggagaaaaataaattgtcctgctgtggggtgatcgaacctatacttatataggtcattcttctcctgcgaccaaaaactcttggaattgataaggtgttgcatatcaatccatcttggaggaatcgacgttgattgtagaggtacattgcaagctctcagaattggtgtcacaactcctcccagaaccattcttcctggtttcttaagtcccttagctcatcctctgtaactcagcaggtgctcgattaggtagaatgagaccaaagtgtctgtctgatctccaactagaaccgtaccatccgatgctaaaccaagcaactcttgcagtgctgtctccatcaattctagtgccccattgacaaaggttccattccgctctcttgcaaatagagcacttacgaagtgtggccctgaatgactgaagctctctcttgtcaaaacgatgacttgtgtcttttccgcttggaaatccatacatcagctcgagatgctctattggaagccgatactctacatcatacacacaaaactccaggtatcccaaacttccgtatggcctgatttcatcgtccctctgactctccatataagagcaattccacagatgaaagaaactgaatggtctctttctcatacccctccattggccgaaacatgtgaatattcaggttgcattgcttaaacatatagtctacatcatcatagatgccgagtctctccatggtctcgggatgagggtaccgagttcctaataactcattgcgctttagcagcttgtagtattcatttcgagttgaacacttctttgattccaaatcatcatcgcctcctttctccgtttgatcatcttcctttggtgaagccatatcttcctcggagtcttcatctaccagctccagacctcctccccacaggcttcttccctcgagtgatatatgccttgttcctcgagaattctcttgtagaaagcttactcgactttcgggatcgagtatttccagctggagagctgaaggtctcctcttcttgcatcacttcctcctcttggctcgattcactatgatcgatctcgaaacttgcttgttctctcctgctcgaccccaagggtgatagttcagaaggtcctcgagctgctgcatgcgaagaaggtgtttggtacctcttcgatggggagagagctttgttccgaatccttgacaaaagtgagcgcctgttcatcatcaagaacaaaggtgggagaaactcaaaaccaaaattcagtagattaggagattgaatgatgggagaaacaaatgaatttatgaaaagtttttgataaggaagggaagtgaaggagataaagagaggattgtaacgattcgagatgaggatgctttggtatgggagatggagagatgaggttgctgagttcgggaattgcaatggggggaccaaagtaattatggaggggacaagaagaaaaagggacatcagcgtttcagtggaggcgggtcacgaggcgtcggtgactacgaagagggtctctttggtttcttcactcgatcggacggtgagaaatgctccatcttcaattactcgatcaaacggaccaaaatgaatcgcaagaaatcaaacggtggtgatgcttctctcatttggtcattcaaatcaacggccaaaaatactcctcctcattctactcgatcaacggttgagatttttctttacttgatttaaatttactcgaccgttgactccctcagggtctctaaaacaaacctgaaacacgtaaacaaaaatatcaaaaataacaagaaaagtagaaagttatatacatggatagacatgggacttcctcccaagtgagcttgttttaagtcactaaacttgactcttacagagcttagtgagaaaagaggttgaagagaggaacagagaaatcctcatcttcagtggttgaatttaaagtgcttgaatcatactctgcatcctctcttgagatatggtaggatgagtactcatttgctttttcttcaaaataagcttccttctgatcaacagagtagtcttcttcttctgaacaaggctcttttgaccaatcctcaattcaaaactggggtacctttaactatttcttgaagttccaagatcgcatggttcagtccttccatcttgtaagttagctccccaatggtatcctcttgagctttgtatccaacccagagctctaggagttcttcagcaacataatcatgaataaggtgttcttcttcagtagaggggttggtagactgtttaggcattcctggagaataagtcggaatatgagttttcttctcactcaacaacttgctctctaggcttctttattctaagtgaactcctttctgatcttctggtggaaaccattatgttgtgaaattttcgtcctccttgacagttagtgcagtttccatcttctctcggttaataccattggaaaactttttaactcttttttcaaacatccataattgatctttcagcttcatcactcttgaagataatccttctatgactctgctttgccatttaattttttttctcatctcataccagtcatcttctgtaggatcttcagtctgagatcgcctttctgttgctctcttcttgtggtcaaaagtcctctttagcttgctgagttgagaagtatagttgacttttggtgaggttctagctttgcttctttatcaacatccatgtcctgaatcgcaaaattctgaactccttttgttgatttcccagaagcttgtctgatgtcaaacttcatcttgatgcctttttcaaggttcagattaatttttccattcctgacatccatgactgctccagctgaagctaggaatggtctgcctaggatcaggggatccttgccttcttcatctacgtccaataccacaaaatctgtaggtatctcaatatttccaatcttgacaggcagatttactattagaccatgaggatgtgcaacagaaccatcaactaagagtaaggctatcttgcagaacttgtattccatgatccctagccttttagatgtagagagaggcataaggttaacagatgctcccaaatcacaaaggcacctattgaatgtcaatggtcctagagagcatggcagagtgaatgaaccgggatcatcaagtttttcgtggatgactttcttcttgtatgtttcttgagttgaggcactgctaatcatctcttgattctgatccttcttgagtttttcaattttgaacttttttccagaatgttgagtgtttcagcaaaggtgtgtgctctatggtccagatgaatttatggatggcagttgcagcaatttgagttgaatcccccccttcttgaatcatactgtccttagtattgggagtttgatgatttggtggagactcatcttcttggtgggtggtgatagcatttgcagtagcatagtccttaggattcaggactgctttccctggaagttgctgaggatgcttcggaggagaggttgatgcaaattgactctccacatacttgatttttgaattcagatcttcaaacttgacatttagatcgttgtaagaacaatatatcttgttgtgtaattcagctatcttcttgtcagaagccatacctccagtagcttgtccttgaatgatctgttgaataagttgcttgatttcaggatcttgagctgctggggcttgttctggttgttgagtgaaccctggtggtggattctgctgttggtagcctccattgaaatgttgtttatggacataaccttggttgtactgaacaaaaggcttagaatgattctattgtggtggatacacctgatcttgggggttagctacattagtgcttctgtaggaaaggtttgggttgggcttgtagttgttgtagcccttgttgaaccctcattggttctgaatgtaccacagctcttcaggttgatcattcccccttcttacatttggaaatactcttcatcagtgatgtagtgtatctgcttcttctaagctaacaacagcttgtctagcttttcattcaccgccttgatatctttgctctgtctatcttcagattcctccagttcctctcactgagcgatcatagtcttcattgtagcacccatcagattgttccagattttcgactaactcccaaccttctgctacatccttgttcaagaagtttccattggaggcagtgtcgagaagcattctgaatctttggtaaagctcctctgtagagtgtgctcaataatgaagccttcttaaaaccgtgatggggtaccgagtggtgtaacttttaaacttttcccaagcttcatagaaaatttcattgtttttctgtgtgaagcctgagatctcgttcctcaatctagatgtgcgagcattagagaagaacttggcaagaaaagctttcttacaatcgtcccaggagttgatggagtctgggggtagagtctttttccagtggtgtgccttgtctcccaaagagaaaggaaatagtctgatcttaaacaatcttcagtgacaccattgatctttgttaggctgcaaatcctatcaaactcgtccaagtgatcgagtggatcttacatagggaggccgtgaaacttgttgctctgaaccatggaaatgagatcgctcttgatctcaaagttattgttctgcactcgtggaggcactatcccttgtctttggtgatgaatccttggggcatcaccagcaccaatgtttctgggttgatcaatattaggtgggtcttgaacgtcaactggtttggtctgttgaaccatagcagctggtctttgcttgatcacagggtgcctttgctttggtttcttgtaactcacgagctattctatctattctgtctctgaatggtagtaggtgtgcagaacctttggatcgattttgcatgtacaaagattagtagttagtacctataccacataaataagtagacgaaaatatgagttagtaacttgataaatgtagaagaacttgatcgtaaaagtttctgatatcttgaatgtaacaatgcaacaatgaattggcaacatcgccaaattgataaacaggttttttaggcctacttatatgctgaagggtgtgaggttcagttcaattctcctacaaatagtaacatgtcgatgcagctatatggggtgtcaatccagtccactgttatcgctagcaatcaagacgtgtacagaaactattaagtcaagccagattataatgatggtgggtttctagtaacaatcctaggtcaggattcaaacaagcaaaaataagaacttaaaagccctactcgatcattgggtcgagtagaaccaacatgcaacaaatttaagaactaaaatgcaatcaacatgtgacacaaataacaggtaaataaaagtgcaatcaaggggtgaatacaaataaatctaagaagaatagaagtcctaaggatggattcattaataagggcaactctagggttcatcaggtggctaacaggggaaaggtagataccctagaggatagattcaaaaaccaggtcaatccactctcttctgatagagacccccataactctaccacttcctaatttcaactctcgttgatgaaacatagtacagcagggtttaagcaacaatctaccaaagccaataagtagtctagccaatctcttggtctatagtctacaaatctctggaattcgtagatcatgcatccatttgaacgtcttttggacgctggatacctatggtcgaattcccacattagccagcgaaaaccgcataggggccaacgaatccagaagggatctaacctaatcttaaccacctgactaacctagagattaccctaatctaatccatcctcaagaaccctaattactactcaagcaacataactaagaacacaaacccagaaattactgaaatcatatcaaaatgtagatctaaacaagataaacaactttgctcaagaactaaatgaaaaaacgaaatagattaagagtaattaaggtttcaagattctaaaacacaaagaaaaactacagaataaaagcttggtcctttggacaaatcccaaagagcatatttataataaaatcccaaaaaccctagattcactagaagaaaagagacttgaggtggtttggatggatgctcgatcttggggatcgagtaaagagggtgctgcaaagtctgtgcctttgcctccatgctccgagtgatcaattggtcgagtagttgcttcttcctctgctattcgtatgctcaaatgtctggttgagtggggaataaggaggatttgtagagttggtcgcccttgatcgagtaaaggggtcgagtagcgagtagaccgatctgttgcttcctctttggctgccttgagcgagtgaactggtcgagtgaattgctgcctcctctatagctgcctagatcgagtgaactggtcgagtagattgctcttctgcttccctcctggttggatagagtcgagggtcgagtagaatccttttaagctctttctgcacctgaaaacacaccaaaacatacaatatgtatgcaaaacgatcctaaatgcctaagtgtgcaaaataagctaaatgtgatgcaaaatgatatgaaacaatgagtgattactaagctaaatgatgataaatacatgtctaaaatgagtaaaatacagtgttatcaactttcccaaacttatctcttgcttgccctcaagcaaacaaaaatcttaagttgaaggagaggtttgaaggtggggattcaaaaaccgaagcatgaatatagaacgggtaagctcaatgtctaggtagctaattctaggttgcaagatgatagacccttacttaaaaacgttagccatactcgtcacaatgcaacctaacaacctgatttaatctattcaagcattcacatcaaccaattccctttaacatttattaagcacgaacaatggatcaagcaaggcaatggttatgaactcatttgtttttttgcttaggctaagagacaaaaatggtccctctaatgacatggtcgaaaatcaggggactctcatagaaaagattgagctttaaaagaatgctaaagataaaagctaacggacccatacaagaacagactcccatctacccaatgatatatagtatatatgatagctcagaagatgatcccagtcccttagatgtcctaactctaccctttttcccattctttctctcttttggttcacgatctaaggcgtgcttctttaaaacgattcaagagtctagcgggtttgcttntaaacttttacaaggtaanggcttttctctaatcttagcacagcggggcgtttacccttttcttttattacaaatgcctaagttctttgaattgcaaaccctttactagactaacacttttgtatcccccttaagaactctaaactcttactctttttttgttttgtttttcactctcattatctttcccactcaatccatacacaatccctaccctaaatacaagtctccacctagtcctagctaacccaaaaagcgtgggctaggtctacatgaaagattgctcttgtcggcccatacctaacacgttatcttgtcggcccatacctaacacgttataccaagctcaatcaaaaaagacctcacaatcacacacaaatgatctttggcttgaaataaagctaggctaaaggtatgggaaactgctctaaaaatgagagacagctacttggattgacagagggtggtgaagtgaataagataatccaagtatgtatatggtagccatgagttcataaacaatgtatagacatgataattgcaaattcagttcaggttctaaacgctcatcacgttcccgacaagctactcacgaaatacttggattgctctataagaattacgttggtggaattggacctaaggttctcccaatgcacgttgtcgaagcattcactaaacaatttcaaatcaaggtacgatttccaatttcttggctttctttgtttatgaattacaccttgttttcaaccaactaatcactaaagtcaatacattttgttagatggattactggaaggcttatcggacactaagatctgtccgagaattggttaggggtacaccagaaagggggtacgagcaacttccggtatacttgtacatgttaaggagggaaaatcctagaaccttcacgcgacttgaagtggatgaaactcagcgatttaagtacttgtttcttgcgtttggtgcaagtattttaggattccctttcatgaggaaagtggtggttgttgacggtacttttttacagggaaaatacttagggacacttcttacagcaacagctcaagatggtaactttcagatatacccgattgcttttgccgttgttgatactgaaaatgatgcctcatgggaatggttttttagacaactcagcagtgtgattccagatgatgaaagtctcgccattatttcagacagacaccaatccattaaaagagcaataatgacagtttatcctaagtctagccggggaatctgtacataccacttgtacaagaatatattagttcgctttaaaggtcgggatgcatttggcttggtaaagaaggcagcaaacgctttcagattagttgattttgaaaggatatttgatcagattttagctttgaatcctgctcttcatgcttaccttcaaagagctgatgtacgtttgtggattcgtgtgcatttccctggtgataagtacaacttgcttacaagtaacattgtggagtcaatgaataaggtcatgtcaccagcaagaagccatcctattgtacaactgttagaagaaattacatccatgatgacgagatggttttcagacagaagaaatgatgcattgaatttgtctacatatcttactcatggagtagagaagatcttgcaggtttcatttctaatacaaacataatttatacacgtccgtatattggtgattatagctaactaatgacaatgtattttttgtagagtcgtgtagagtacgccaaattgctaagtgaggcttttcgaccagttactgtccgagcagggacttgaatttgaaatagacatcggtcaggtcaagacatagatgcaaatcaagtacaagttacgtttggagcatctctgcatgttgttaatttgaaagactagaaatgttcgtgtcataggtttgatctaaaaaagattccatgtgcccacgcgattgcagctgctgaaaaacgaaaactttctcggatatcattgtgtcatccttactttcagaagaattatttatgcaagtcctatgctaatgccatcatgcccaggaactttgatatacctgttcccgagaatgtcgtgtcgaagatatgtttaccaccggaagctcgtcaacaaccaggtagaccaaagaaatcgagaattaagtctgcactagagattgctatggagaagaagaagcctagaagacgacacacttgtggcaattgcaagcaaattggacacaatcgtaagacatgcaaggcttaatgtcttttatgacttttttctttttatgttcatttctatgattctgttctaagacaataaatcccaacgattcccgtttgctgtttacattgcatatgtctgaaaccaagggaaaaaaaatacaacgaattcattaagcagccttctcctaaacgtccacaaagctttcactaatgcattcaatcaacagatgtatcccaatgaaaaccaaaaaatctgatttgcaaatttttgatgcttatataaaccaaaaaatcaaaagaacgatccgacattaatacagaaacggaaggatcacgacttaaaccgcgcattaaagacccgaattgaagattcgtaacgttcgacgttaataacgcgagatccgcggtgtgaagtcagcaagtattttaatacgtttgattcgatgtattgagtataaataggagtcgatgacatttgtaaaggggacgatggaagataggcatttttacctacttccagtttcgccatgaggtcaatattgttcacctcgagttcctggacccgtagctcggcgtctttcatccgcttcagcaccctgctggccctctccaccgtatgagcgttctcgtcttcatttcgcctaaagctgtcaagttcgctatccttgtcagaaagctgatcttcgtgactgcagaagacggagttgaattccaagattagctgcaaaatcaaagaaccgggggccacgagagtcctcatgatgtcggcaaaggaagacggcgtctttccaggctcttgacgaaatttggccttactgtcggtcaccggatgcttggccttctccgcagctcggagtttgctgtcttcaagggtccccgacatcacgaccctgtcagacaagatcctggccttttcttgatcagctctttccctctcacgcttcttttcagctcggtacgatggtccagacatctcagctttgcaaaatatacgaggagaaaagggaggtgaagagatagcgaggtcaggacgagtccgaagtcgtttaccagatgctcggattcggtccgaggtaagagcttcccaaccaaggtcttgacggcagaagtttgagaagtgagatgcaaatgcgcgattatcgcgggattccgcccgtctcaagtagctcgtcagctcgtccgtataaagtagcttgtcagctcgcccttctcaagaagctcgttagctcgctcctcatcgccaaactcttcagctcgcttttaagctattcaagctcctcagctcgtcctcaagctcctcagctcgtcctcaagctcttcccatcactcagtgaccatctcctcgcctagctgtcagctagtcagctcgtccaactccacgtctagctatcagctcatccctcgactgcaaaactcatctacctcctcgcctagcggcagttcgtccattgactgcatggtccacctatctcgtcgcccagctcgtctagaccttcagcaaacaactcggtttgtccaactcgtctctctaccacggttcatccagctcgtcagcaagtattttaatacgtttgattcgatgtattgagtataaatacgagtcgatgacatttgtgaacataacaaaataagaagcttaaaatggaacatggttcttaatagaagcttctactcatccatgaggcttgggaatttgaaggccttgcgacgaacctcagagtgtagtgttccagcattctcgcctaattcctcaaacatctccacagcaagtttagtccgtagggactgcatgttctcatcacacaagccatcaaaggacttgccaagcgccaagcattcgatgtattttattgagtagatagcacaatcacctgggtcaagattctccgggatcttcataatcctcttccactccaactttgagtagctcctcctacgttgctttgacggtataaatgaactcaacatggcaggaatcattgtcatcacaaacatgcactgtatcgccatttctgtatccgtagtcaagctcgggatgctatcataaacattgacccgtttctttgtcaagtcaatatccagagcgacccaatgattcccgttgacaaagaggtatgcatataggtgatccacatcaacaaaccatttcttgtttgtcaccgcttcacattgagctgtaccattgacttgatcctcataaaactccctgaatttgaagcacctataatctggttgaaactgtttgtagtctttgagcattgtggagatcaaatcttggtccaaaaaagctattctttggttgggatattttgacggatcacgattgaatcttcggcgaaacaatgacattgcagctcccatgtgctgcattataatcagaacaacaattattagagttacatatagtttcagccagccaatagtaaatgatttaatcaattgaaagcaaaaaaatttaaaagttgctatacttacataggctttcaaccatctatatttttctgttggccaatcgcttcttggagtcattatctgccagtagaaccgtgcattaaagttgctggtgttcaggccttctttttcactgcagaaaaaaaaaggaatgagtaatgatagcaattatatttgaagaaaaaaatagagacttacaaatcaggttcgagccaatccttcagcctatcaaattggtcatcagaaacaggttgaagatgttcaggtaccgatgaagacgatggtacatcggtgattatgcgtttcactgttgaatttcctacatactgatatttctgagaacccgctagctgtggcactcgtctcctcttactagtaataccgtccagattatctagtccttcttgaagtgctctcaatgcatcagtcgttgccttattagccatctgatctagaggattggagaatgtttcttctgaacgtgaagccattttcagattgtctgcattaaccttgtcagtgacatccacaacatcatcatcaaacgtctttgttgttggagctacaactgacttcttcttctcaggttttggactatctaccttctctaccttcacaactgtcttcttcatttcaggttttggtttttctaccttctctacatttacaattgtcttcttcttatcagattttgcaactttcttcttagtaaggacctttgtagcaacttccttgttcttcaccgaattaacagtcttc

SEQ ID NO: 38661 - DNA, 4607 bp, Arabidopsis thaliana landsberg
cgattaatttacataaaattgaaactaacatagcttttttatgatttcggttaaaacaaacttacttgtctggaggaacttgatctcttctaccttcaccttctcttctacattgccttcctccgccttctttggcgttttgtttacctttctcttcttcttcttcttcttatttttcttcttctggggtttttgctcttccttagttccttcatctccttctaactcgtcgacttccacagcatcgtctctctttctcttctttttaatcttcgtatcagtcttctcgcttgacccaccattcccaacttcattctctctgatttcgtcgtcttctctagcgaaagtttcgcaatttcttcgtttctctctcttcgacaatctgggtttgtggctagatgaatcaaggagcaatttcagagactgagattgtggatttgtttcggatacagagacagatagtgattcagccaaatcttgtcgaatcctctgcttcagcttcttgttcgacagcaccatcttcttcactgagaccgccaaaaacaaaaaacataaaaccctaattggatgattttgataccacctacatatgggccgggcttcagatttattatgggcttttcataaaacgtctactactgtaacaaagagccccaaaatgtttaactgttcatcctaatttgtatatttatgtaaaacacccattgaaactgtgcgttttggttacatttttgttatcttgcaaagatttattattttgaagggccatttttgcaaattagtgtttttttgtctctctgacatttttaaaaggtcaggaagtttcaaaagtggataaactgagaaagaagtgaatccataagagaagacaacaaaagatctatctctataccacatattacactttttctccaatggcttctctgaagctttcaccttcttctccaatctccatttctaaggttggtgtgattccttcctctaagaaaggactttcatttcttgtaaaagcagagcaccattcctcgtcttcttcttctcatcttcaaggtttgtcttttcttacgtgtttccgattcaaattactctctatattctgcttctctgaggaaaaaacgaatctttcttcaaacccttttataaagtttgtgtttttatttcgtttttttcagataaatgtcagagacgtctgattgtaacatttggtgttgttgctccttggatctcattgcttagtagagctccattatcatgtaagtaccctttttgtttgtcactaattttgcaatttttgtgtgtaattttgaaatgtttgatatggctcagttgctgcagaaagcaaaaaaggattccttgctgtctctgacaataaagatgcttatgcgtttctctatccatttggttggcaggtatcaattttgtgatcttctttgcccactttttaacaattacaatgtcttgtctcattgttttgaatgtgtgtttaggaagttgtgattgaaggtcaagataaggtatacaaagatgtgattgagcctttagaaagtgttagtgtgaatttggtcccaactagcaaacagactattaaagaatttggccctcccaagcaggtaatgttcttctcttttgtttggttgttgtttttcactctctttaatgattgaacttggtttggttacagatagctgaaacactgataaagaaagttttggcacctccaaatcagaaaacaacccttattgatgcatcagaggtttgctccttttgatagcttttttcgactaattgagtggaggctcttgaatgtaataataagagagagagagagggtggttttgattgtttggtttttgtttcgagtgctgcagcatgatgtcgatgggaagacttattatcagtttgagttcactgttcaagctagaaactacactcgccatgctctgggtaccatcacggttttcaacggtatatacatccccatgaattctcacattcatatctaatacacactgactgcagtatccaatgctcatcgagaaatggcgttttgctgtgcaggaaacttctacacactgacgacgggagcgaatgaaaggaggtgggagaagatgaaagataggcttcacactgtggtagattccttcaagatcactgtttgaaaatactgtaatcaagtttgctttggttgtctcttgttttgcccatttcttgtatttttgtccattcttcttctctctttcccttaacaatattcttttcctgtaagagagattcaataactcttgacttgcctccttacctctctctctgcttttaacctaacttcatcttgtttggtcaatttgatctctagtcatagttttgtagcttcagctactaaccagaaagggcttataaagtgtcatgttacagctacgagaaagtcagtaatcgaaatgctctgtcaagaattagctcaccagtaatatataaaaaatatgcaaactcgaagtcgctgtgtccgttagcagaaccagctcttgtgttacggtaggtgacggcacagtacactgcaacggcaacacaaattattataaaaaatctcaccaaaattattggaaaataattaaaagaaaaaaaaggcggaagaaaattatttcttcttctacgattcttcttcttcttcttcctctctacaaacttagcaacagatccagctaattttagaagaagaaaaaaacaaaatcaaaatccctaaaaatctgaaaatctagggttttcaacacagaaggtgttttgtgtggtgctcctccgaagatgatgatctctagaggtttattcggatggtctccgcctcatatgcaaccattaactccagtctctgaagtctccgagccacctgagtctccttctccttatctcgaccctggtgctgagtctggtggtggcacgggcacggcggcggcgctagcggaggctgatgaagagatggatgatcaagatgagcttgaaccacctcctgctgctgttcctttctctcagctcttcgcttgcgctgaccgctttgattgggtgcttatgattgttggctctgttgctgctgctgctcatggtactgcgcttattgtctacttgcattacttcgccaagattgttgatgttcttgctttctctaatgattctagtcagcagagatctgaacaccagtttgaccgactcgtccaggttagtgaaacttctgacaactcatgattttgctcggaattggcatttctggttttgtactccaatcatgtgttcctcttttaagttacttatgctctcatttttgtgcagctttcgttgacgatcgtgtacattgctggaggtgttttcatttctggttggattggtaagtttgtttttcgcttattgtatgcatcttttttccacaactgaaatgatgatgcttaacagttactaaatgtttctgataatagaggtgtcttgctggatactgactggagaaaggcagactgctgtgatcaggtccaagtatgtccaagtattattgaatcaagatatgagtttctttgatacatatggtaataatggagatattgtgagccaagtgctgagcgatgtcttactcattcagtcagctttaagcgagaaagtatgttcgtccaactccatttctagttttatcattcatatctttctttgtaactgtgagtattacttggttcttatttctctaatcttcttcctgatcctggactttgcaggttggaaattatattcataacatggctacgtttatcagtggacttgttattggatttgtcaactgctgggaaattgcattgattacactagccactggtcctttcatcgttgctgctggaggcatatcaaatatttttctacacagacttgctgagaacatacaggatgcatatgctgaagcagccggcattgctgaacaggtattacaattgataggtttattgggagattatggaattagcatcaagattttctcttggccactattcaaaacttggaagtttgttggtgccaattgtgatcgctgaccacttgaactatgaaatctggaagctaaaaactaaactctgtaaacatttgaaattaatcaattttcttatagtcatatgtgccttgttggcatggaacttctttttctgcatatataacgtagaattatgccttacaaagttcaatatcttttcttgttttttgctcttattaatcactcttctcttgttaagttcagaaaatggtaggtagaattgaagagggttaagattgtacttaggctctaggttacttcactagatacaatgaggttttattgtgatcaagaatcagttaaacttctgccagtttcatctcaaaatgtagaccaagggatagccttgtttttgttttgctaggatgtacatcactgggaatgcctagtaaccacactcgatagtctatgcatgattacaagtggttttgtaatgtgtaccctatagatcccattttctagtgctcccttccgacactagtttattgcctcagttagagtctggtgtcaatattctaattcttagaaagatttatcttaaatgtgcaggcgatct

SEQ ID NO: 38662 - DNA, 2076 bp, Arabidopsis thaliana landsberg
acattcctaatccatccttaactcttaaaattagtcatatgcattgtattgtgaaacattttcaccatagaaacagtaacaaagctatttactgcttttaagcaaatttttgttgggtttagcctcttttgggagaaaataggtataagtgttgtctaaacactcctaatatatctttaactcttataattagtcatatgcattggattgtgaaacattttgaccatagaaacactaacaaagctatttacttcttttaaccaaatggttgtttaaacactcctaatacatctctaactctattaatcagttaaatgcattggattgtgacaaatatttgaccataaaaacactaacaaagctattgacttgctctaagcaattttttgttggttttagcctcttttgggagaaaataggtataagtgttgtctaaacactcttaatccatctctaactcttataattagtcaaatgcattggattgtaatacattttgaccatagaaacactaaaaaagttacttactgcttctaagcaatattttgttagttttagcccattttgggagaaaatgggtataagttttgtctaaacactcctaatccatctttaactcttataattagtcaaatgcattggattgtgacacattttgaccatagaaacactaacaaaactatttacttgttctatgcaagtttttgttggttttagcctcttttgggagaaaatgggtataagtgttgtctaaacacccttaatccatctctaactcttattatttttcaaatgcattggattgttacacattttgaccattgaaacactaacaaagctatttactgcttctaagcaattttttgttggttttagcctcttttaggagaaaatgggtataagtgttgtctaaacactcctaatccatctctaactcttataattagtcaaatgcattggattgtgacacatttttaccataaaaacactaacaaaggtatttactgcttctatgcaaatttttcgttggttttagcctcttttgggagaaaatgggtataagtgttgtctaaacactcgtaatccatctttaactcttataattagtcaaatgcattggattgtgacacattttgaccatagaaacactaacaaagctatttactgtttctaagcaaatttttgttggttttagcctcttttgggagaaaatgggtataaaggttgtctaaacactcctattccaacttaaactctactaataagtcaaatgcattggattctgacacattttgaccatacaaactctaacaaagctattgactgcttctaagcaatgttttgttgattttatcatcttttgggagaaaatgggtataagggttgtctaaacactcctaatccatctctacctcatataattattcaaatgcattggattatgacacattctaaccatagaaacactaacaacgctatttacagtttctaagcaataatttgttggttttagcctcttttagcacaaaatgggtataagtgttgtctaaacacttctaatccatctttaactcttataattagtcaaatgcattggattgtgacacattttgttcaaagaaacactaacaaagttcttcactgcttctaagcaatattgggtttgttttagccacatttggaagaaaatgggtatcagtgttttctaaacactcataatccatctttaactcttctagttagttaaatgcatggattctgtcacattttgactatagaaacactgacaaagctagtcactgcttctaaccaattttttgttggttatatcctcttttgggataaaatgcgtataagtgttgtctaaacacacttaatccatcattaactcttataattagtcaaatgcattggattgtgatagatgtttaccatagaaacactaacaaagctattgattgtttctaagcaatagcttgttggttttagcttcttttggaagaaaatgggtataagtgttgtctaaacattcctaatccatctctaactcttctaatttgtgaaatgcattggaat

SEQ ID NO: 38663 - DNA, 4065 bp, Arabidopsis thaliana landsberg
ggtttgttccgggattgtgttttaggcggggggtctttttttttcggctgggtgcagtaacgatgacagtggctcgttctttagtgtgtttatgtgttcggatgcttgtgccgttgtatgttattgctatgggagcttgtgctattgcgggggggatgttcggtatggtttgttatagtgttgttcgtggtgttgatcagctgattcctgttgatgtctatttgccgggttgttttttttttgcagtgggtgttttagttgctttatcgaaggttcgtttggtaatagctagtgttttttataaggatcgaattagacctcaacagggtaatcggtgttttactaccaatcacaagttttttgttgtacgcagtccgcatattggaaattatgatcaagaactactctatccaccatcatctacttcagagatctctactgaaacattttttaaatacaaaagtccagtatcgtcccacgaattagtgaattagggaggcttttagagaatcagaaaaaaatcttcataaattagaattaacggtaaatgtgaaatacttaattttatataaaaaaaggtgtgggggaaataaaaaagatgcagggcactttgtccgtttggctagccaaacgcgggctggttcatagatcgttgggcttcgattatcaaggaatagagactttacaaataaagcccgaagattgacatgaaatagctgtaatcttatatgtatatggttcaatttatttgcgttcgcaatgtgcctacgatgtggcaccaggtggcctcagagccagcgtgtatcatctcacgagcatagaatatggtgttaatcaagcggcaagaagtctgcataaaagtatttactcacaggagtaatcctagaattccatccgttttctgggtttggaaaagtacggattttcaagaacgggaatcttatgatatgttaggaatcacttatgatagccatccacgactgaaacggatcctaatgcccgagagttggatagggtggcctttacgtaaggattatattgcccccaatttttatgaaatacaagatgcttattgaatgataaaaaatgagccaataggatgaactaaaaaaaaagagttctgcattatgaactttgtatcgcgcacataacttagtcaactttagtcacataactgggaatgaataaataagatcggaaagcaataaatgaaggggggggatacaattctatttctattgtatctaatgaaccttggggtatttttgcccttcaactatagtatactatacatatagacctttttttacttgtttgattcaacggaactcatttaacctttcctttcggatatgtattatgtatcaagtattatacattctttttgaacggctggattcacaacatgaacaaaaaaaagagaggggataaagcataattgcactttttttactaaagatacgtttaatttgaagaataaaaacttatcaaaattaataaatcctctgccaagaaccagatttgaactggtgacacgaggattttcagtcctctgctctaccaactgagctatcccggcgaaggatcatcctcgttttacgaatggtggcacaacgatttcaagtcccccggaaaaaagctatgtccaccattagtctactgaagtatcaagtatcatctactgaagtatcatgctcgttttcctaatggtgacacgaggatttcgagtcctctgcaaaaaagctatgtctacctttactgaaggatcattatcatgtgacacagggattttaagtcccccgcaattaagctatgccgaccattactgaggtatcatctactgaagtatcatcttgcttttactaatggtgacataaggattttcagtcctctactaatggtgacataaggattttcagtcctctgcaactaagctatgtcgaccattaccgaaggatcatcttgcttttactaatggtgacacaaggattttcagtcccccgcaattaagctatgtgtaccattaccgaagtataatctactgaagtatcagtatcattttaatatatgacttaggtctatgtcaatgaaaagaaactcaaaagtagtaaattcaaaaagttgtggaccgggaatttcttggattttataaataaaagaagactttctaagtttgaaaatgaaaaatgatatagattataaataattcaaataaataataacgaaaaaaaggtaaggtgtcaaccttttcggggagtagagctggggatagagggacttgaaccctcacgattttaaaagtcaacggattttcatcttactataaatttcattgttgtcagtattgacatgtaaaatgggactctatctttattctcgtccgattaattaagttccatcaaggatctatcagactatgaagtgaataattttattttaatcaagaaatattatttcttaaacttcgaattgattcacaacattttgattttgtttataaaaaaatagaaatcgagattcaggtcgtcatttttgagatcgttttgtgttacctaaatttatacaatataggtttttatccttcatcctttttgatttgaagtttcgatcgaaggattcctttatgaacacaaggtagtgaactccatttgttagaacagcttccattgagtctctgcacctatcccttttttcgcgctttgtaaactccggtttgttcgcgtaaaccaggatttggctcaggattgcccattgttaattccagggtttctctgaatttgaaagttatcacttagtaggtttccataccaaggctcaatccaattaagtccgtagcgtctaccaattccgccatatccccttttttaggatctcattatgatgtctttccttttttttcttatgccgaaacctcgggattcattacattatagatacttattttatgtctttgttatcttcttttatttttttgagctccatccatattgatttagtctaatcaacaaagattctatcatttttgtatttgcaattcaatatggttatatattacataacatatatatgttctttttttttttcatctttggcttaaattttcagaaatagtcgaacggtcgattctttttttttttttttactttcatgaaaagaaatttattattattattattgaaacttagaattctacaatgtgcaatggaaaaaaattctaagtctacttcgtaaatttgaaattctaataattctatactattctatgactatatagatatatagatagaattaaggttatgttttatttatttaatgatgaatgatagtcactatttatgtgagctatattctgttctagaatatatagaatatcattaattctaactagataaggaaaaatattaatagaatagttaattgatacgatctagtagtttagtgaatttgtatgcatgcgctattttatttgagcccgcttagctcagaggttagagcatcgcatttgtaatgcgatggtcatcggttcgattccgatagccggcttttccatattttttcgtttttttttacatgatttttaatgtactttcaaaatcaaagaagattgaaaagacttctttgacctttttccaagagttaccactccatttatattatgtcatataaacttccatattaggaatatatattgggtaaaagagtttgatctttgcaaaattaatcaagaaaataaaggaaaatttttgtgatttagttgatttatatatattgtatatacaataaaaaaaatctgtatattgagagaatatatcttcttactctttgtattccaatagtggagtgtatttcacgtcatttatcattatcatttagttcagttttaattttatttagttttgtacaatttcaatcaaaaaaggagtctttatgtcacgttaccgagggcctcgttttaaaaaaatacgccgtctgggggctttaccgggactaactagtaaaaggcctaaggcaggaagcgatcttagaaaccaatcacgctccgtaaaaaaatctcaatatcgtatt

SEQ ID NO: 38664 - DNA, 4211 bp, Arabidopsis thaliana landsberg
  unsure (1)..(4211): unsure at all n locations
ccagaattctttatcttgagaaaacctggttatgctttaacaccggtaccccagctcgttttttaacattggatagaaagtgaatcggatcgggtcgcaaacaaaaagtttcactcannnnnnnnnnnnnnnnnnnnnnnnnnnnnncaatgaaacgcttcgggtattaaagaaagaactcgaccagaaacttcaaatttcaagagaaaataaatggataaagccatccaggcataggttttacaaatcttcaaataaagccgtccaggcataggttctataaccgaacaaatactaacaaaatgcagaacaggtaaaaacctcccgcctcgggttcctaatcaggctcttcagacggacagactctctcaataggcaagagcgacccgaactggtcggcaactcccgcctcataggcaatattctcaaccgacctatgtacaccaggacttagaggggtgggctcgggagcaagagccttgagatcctcttttagctcaacgatgaaaacgttgagattagcctcagcatcggcgaaatgtttcaatcattctttgacctggtcattctcggttgcgagagccctgccatccttgagtgccttgatcagttgcacattagccctcgcttgggacaagtacatgaactggttgtcattgactccgtcgaggagcgatatcttctcctcggcaatcttaaatttgggaataaaagcttctgaaacttctcgcctcactatttgggcagcctgagccacctcgctgtcgcggagtcctctcgcctcggctaacatacgcttgagacagataacctcagaatccgctttaagattgagctcggccattttaatggcgttctccttgttcacaaaggcctccctctcggcctcatccattgccaaattcgccgcggtggctttagagaccgcctcatctctctcacgctgggcagtctgcgcccgagactcagctttggccaacttattgaccggctccatgttaatccgcatggccgagccatacaaatgtaccatccagttcattgaggcgatgacctgaagaacagataaaagcaaaatttatgggatcagaaccttaaacaacaaatgaacgagaagaaaaagaatgcatgtacccacaagaagtgagatgccgtctcggcgtacttccgcgactccagaagagtatctggaggagggagcaaaggacccactcagcccccgagaatgtttgctgaggccacccaatcttcaaagatcaggagctccttctcctcctcgtcgctcgagggtttcttcttcttgttcttcttcttcttggacgctgagtcattatttcgaatacgcttgccctcaaccttatcgctcgttggtagcggaataaccgcctcgggtgcaggcgcaaaagcaggcagatcggcctctcgggccttggtagaccccaaagcaatcggtactgtcacctcgggaataacttccctgtcatgagttgcgttggaggaaacccgcggtgagatttgccaacaaggaacaattacgttagcttttgggaaccgcttgcgattctagttcttatactcaatcatacacatgacatcttgtcatatttgactccaaaacactaaccaagcttcttcttgcttctttaagtatcatagaaaatttgatcctaaacacataaacctaaactctacaccctaaatcccaaaacctaaacatccaacactctaatcgcccaacccatgaatcctaaattctaaacccaaaaccgtaaaccctaaaccctaaactctttactctaaaccattaatcctaaaccctcaaccctaaaccataggtcccaaactttaaaacctaaatcctacattaggcttctggaatctggttgcggttctagttcttatgctcaatgataaacaaagcatctagtcatatttggctacaaatccgctaaccaagcttattgttgattctcaaagctttgatagtgaagccaaattcttatgagttttggttttgaatcgtttaccaaggaaccactactttacttttcgagatctagttgaggttctagttttatgttcaatcatacaaataaaatctagtcatatttcaatctaaaatgctaacccagattcttcttgcttcttaaagtattatagtatatgtactcctaaaccctaaaccctaaaccctaaaccctaaaccctaaaccctaaaccctaaaccctaaaaaccctaaaccctaaaccctaaaccctaaaccctaaaccctaaaccctaaacccttaaccctaaaccctccaatataaacattcatcacacaatattcatcaaacaataatcaatatttaacactctatccttactactgaatctttaaccctaagccactctatctatgtttgcactttttcttcttgcaaattctatttaaaagggaatgaaagaagagttatgtttgctaatcacctagtgcgatggagattgtaagagtaacaaccaaatcttgttttacaaccatacactatcatctaacaaaacagcattaaatcctaaaatccaattagattttttattagcaataatatgattaggagaaaatttagaaaagaaatgctatcggtgtattaagacatggtaactaattaagaataagaatcaaataatttagtttgcaaccaaaataatgctattctgatcaagaatccatcagtattatatcacacagactgtaaggcaccggcttgcaatgtatcttgtagagatgtaacagcgccttcgtagtttaagaaacccatgaaccaaaactcatggtcgtcgaccgagattacctggatgtacttttctgcaggattgactgtgcttatcgaagggttaaccgatttaagctgatgtaatgggattactacctgtttaagatgatgaagatataagtattactacctagtgttatcatagtctgcacaagaaattactcacagaatctaacgttcttcactttattcctattatctatgaggtcgctttctacaatagttatttatagcaaaaatttcgattgtctcaaaataaaaaggattaccttataatagctccattcagtttgaccagaatttttgtacgagagagggttatcgctacagtaagcaagtttagcagtggatacgtaaagaactcccatgactggaccagctgatgttgataagtagcacgcaaatgaattttgcagttgctcctctggaacagtttcaaaggtttgcctgaaaattttctcatatcctccttctgccagaacctttgtactttgtgcaattcttcccattgcagcatccgcaaagctcggagcagttttcactaattatgatgaatatcaagatttaatagttagttaccataaataatcccatcaaatcacagaataaacagaaaaaacaaaagttaatattcgctttgaaactccattgctcaaacctataatatctaactcatcaagaagtgatataccatgtagcatgacaatcacccaaatctatcaacaatctcagctcatagtatattttctcagggttaacgatgcaacaatacaagatcggaaactcacggtgttgccacgtgttcccggcaaggctctctgccttcattgcagcttctccaaccctccttccccatctcccaagcacacctttcacagattccatcgtttctgatccaatttcaaagagattttccaacggttacttacacatctcatagcataaaccaaaaagatactgacacagttttaaacacagtacctttcaacgaggcatccgaagtttcagtaggagtacgagcgacgtacggattagatctcgcggcagaagatgaggataaggccttctcatccggtgcgggagattcagaaaccaattcgggattccaatggaccgattttctcgatccggacgatgttcgattcggtgctcgatcgccttttgaatcgatttcgacctgtagcgtagtagattcatcagataaagcaatcacagaactcgcatcctcggctccttttgccgccacttgatccacatgtttcatatcactactatgcggtggcttcaaattctgatcctccgatttcagagtcgtgtctttcgtcagttgttccattctccgattgcgcaagtatcgtatcgtttttttattgtcgttgtatttgggatgtgcgtag

SEQ ID NO: 38665 - DNA, 4333 bp, Arabidopsis thaliana landsberg
agttctttaaattttgggaactggttgaagttctagctcttatactcaatcgtacacatgacctgttgtcatatttgaccacaaaacactaaccaagcttcttattgcttctcaaagctttgatggtgtagccgaagttcgtatgagtctttggctttgtatcttctaacaaggaaaccctactttagctattgggaaccagttgcggttcaagttcgtatactcaatcatacacttgacatctactcatatttgactccaaaacactaaccaaggtttttattgcttctaaaagcttcgatggtgtagcaaaagtccctatgagtcttagactttgtaaatctaacaaggaaacactactttagcttttgggaccggttgtgattctaattcttttactcaagcatacacatgacataaaatcatatttgactccaaaacacaaaccaagcttcttcttgcttctaaaagctttgatggtttagctggactccatatgagtttttatcttggtatcttctaacaaggaaacactacttaggcctttaggataaggttgcggtttaagttcttatactcaatcatacacatgacatctagtcatatttgactccaaaacactaaccaagcttcttcttgcttctcaaagctttgatggtttagccgaagtctgtatgagtgtttggctttgtatcttctaacaaggaaacaatactttatcttttgggatctggtcgagattctagttcttatactcaatcatacacatgagatctagtcatatttcactctaaaacactaaccaagtttcttattgcttctcaaagctttgatggtgtggccgaagtccgtatgagtctttggctttttatcttcttacaaggaaacactactttaggtttttaagatctggttccggtttaagttcttatattcaatcatacacatgacatcaagtcatatttgactccaaaaaactaaccaaccttctttttgcttctcaaagctttcatggtgtagccaaagtccgtatgagtctttggctttgtatcttctaacaaggaaacactacttaggcttttaagatcgggttgcggtttaagttctaatactcaatcatacacatgacatcaagtcatattcgactccaaaacactaaccaaccttcttcttgcgtctcaaagatttcatggtgtagccataatccgtataagtctttggctttgtgtctctaacaaggacacactacttaggattataagatccggttgcggtttaagttcttatactcaatcaaacaattttcgtttcattgttatctttgagactaacttactgacatttgagttttgagttccaaatcttctgcaggagaatcataagtaattatagtggtagttcttctgttgaccctgactataacatggatgagacagagtcgtcgtcttcaaggccataaagagaacagagagtatatgataccttcagaagaaaagctgagatagctcgagggaagagagcaatgacaaataggtatgagcttatagatgaggatctagaaggcgagtacatacctgagcatactcgcagagccaccaaacttctgcacaaacctgatgtgttgcctgctgaggaatatataaggctcttcaaacagaatgcgttctgtagcacaaggtatccatgctcaaccacacttgcacaacttggattgttggaggatgttcaacacctgtaccagagttgtcatatggacactctgatggcttatccgtatgagcatatgaagaagagacaactcaattcctctccacactgcaagtggagctttaccaaggtatgacctctgatgagttggaatgcgaaggattgggattcttgatattctctgtgtatggtcatgattataggttatcaatcaagcgcttggaaggattgtttggtttcctcaatggaacgcgtactaagcccaagtatgacagagaagagttgaaagacttatggatcaccattggcagctttgtaccgctgaactcttccaggttaaagagcaatttgaaatgcagccctgtcatcaggtacttccagcgttctataggtaatgtcctctactcctgagagatcacatgaactgttactaattctgatatggagatgatcgcaatggctctcaagggaactcttcaccaaactaagaatggcatgtctctccaaggtgaaatcaatgacacacctctctctgtacttcttctgatccatctgtgtggatacaagagcttggccgtcagcaataaccacaagagagcacgaggcgctctgtgcataggaggtgttgtgacaccgattctgatcgcttgtggagtcccgatcacttctgatggactcgagccacgaacaatggatatcgagcatctacgtcactgcgaattcctggagtttgcaatggttgacgacttgcacaggttcatgtttgagcactctacagacaagagagctagcatccttctccccagccctgaggttacacggataatagagggagataacattgatttttggcctgaggttggacgcctttactatgagaacgcttcgccattggatgatgatcttctagaagaagctgcttcggatgggatggatgaagacagagcagtggagttcgacactagcatatatcattgtagtgaatatgtacctccagcgagggagagcaagagcttgagtgtaacaacaacaagctacagaagtggtgcaagaaacaggacaagctactcgccaagtgcttcaaaactatcaagttcctaatagataagttgagctgctcctcttccactacagttatcccacagggacaccctcctctagacatgccattgaggagatttgatgagcctgagccaagtcaacacaggcctgagcctagtgagcagagagtctcacatgtccttgctaggcatttatcattcgagtcccgggagcacaagagaagaaggaaggctacactcgttcgctctagcagcaaatcacgccttatacacttgaggagatcactcgaccgtggtgctggccgcagtagaaggagagaggtcgagtatcctcagagcgatgttggccgccacatagttgatggggtcgagtacccacatgctggagctgacacagaacagggcggctcatctatggcctgggagaattcacaagcagccattgacgaccaactccgttcattcttcgactgaggtaagcgcctcacttcaccattgtattatatcatctcttgtgatttgttctttattttgtttctgtgattggatttgtcctgagtactctcttcaaagtttattcacatagcggactatgtgatttaagtttgggggagggctcacgaagggggcagcacatagggtattttttgagactgcatcatctaaggcatagaacaaccataaaaatttggaaaattttcagaaaatgatttcacaaaaacagagtgtcatgtagattgcatttcattttaggactgtatatagagtgcttgcatttaggattgctcatttgcatagaggataatgatgatttcaaacctatgagcatgtaaattcagtgaagtaagttcaatgcacaggttgttagttctctgttgcataaccgattgtttctctgaagtaagaccgcaccccactttgaatttacaacttgactatactacaagaaaacctgcattttgggacggttagttgtgaccttttattcagccacaaaatatagttacttctttgtgacgacgatctccgttacacattcaaatagaattcgtccttcccaatatcagccgacgacacgaccccagaagtcaccaccccaaacgatacaaaccccgactcctgctcgttctcactcgcaatctggctctcaacaaccgcctcttattcgtcgaaagcaacaacaacctcttgcttgtcaacatcagattccttatcttcaagaacagccttctcaggatccaccggagacacagttcataccaaaccatcaaaaccctaataatcatgaagaggaagatgaggaggacgatggggaagaagatggggacgaattcagggaagaagatggggaggaagtcgacgaagaagaacaaaaccctaatgtcgactaccaagagctgttggatcgcttacttgccttgccaagccgacaacatcttatgattctgtcgcaagagcctattccatgagtcgagactctttggtaagctctataattctctccttctagaaacagaagaagattatgaaatggtgataagctaagtatggtctggatctttgtg

SEQ ID NO: 38666 - DNA, 840 bp, Arabidopsis thaliana landsberg
  unsure (1)..(840): unsure at all n locations
tgtaggttcgggataatccgttattctatagtcctggggctatttacaactagccaattcagaattttcagatgtactaacaagtgcatctttgatgcagtcatcgattctcccgagagttcacaattaccgcgagcaaacatatgaatttaatgacttaatgatgaggaacgcatttttgctatgctactaatacttgctccgctattctgcccaagcctggctgaggaagagttacggggcttcaaaaaatatgctgattcggccgtttaaaaatactatatgtaaaattaaaaaagcgatagatataatagatatatatctaaattcaaataaaaaagaaggtcactccactctatttcgacaaaagacccatccccaagttccatagctttgagtccgctatcgctatcccgagcatgattttcctacccccccggagggaaaggtccttcccttttgggccggttgtgggcgaggagggattcgaacccccgacaccgtggttcgtagttgagcatccggttacgtccatacgttcaagtcacagatatttaatggactggatctgttcccaggagtttccctaacataacaaacgtgcctaatccgttcttaatttcggtcattgctgctcctgcatcattcactctatcgtcattgttaacaggctttgtgccgtctgattccatgaaacgaagttcctcaaatccttcgtctttgttatccacatcgagtcttttatcctgtggtttggtgtcaacgctatcgcacactgtctccattctattttgtagccctgcattactcttgatatcattgncttcactgcaagatgtt

SEQ ID NO: 38667 - DNA, 5060 bp, Arabidopsis thaliana landsberg
  unsure (1)..(5060): unsure at all n locations
gataaacatacacctaaaatgagtaaaatacagtgttatcaatttatttgtaagaaacttatagaaacaacttgtttnnnnnnnnnnnnnnnnnnnnnnnnngggcttgccccttatatgttacgagggccaaaatagatatgcacaagtttaaaaggggcttcaactactaaaaatgcccattaagcttggaaggacaaaaacgtaatttacagaggagacagaagggattttagggttcaaattccctataaatactcagaaagagcatgagctgagagacaaagagaattgttgccttgcctagaattgttgccttgcccaggatcgttggcttgcccaagatcgttgccttgcccgaaatcgttgccttgcccaggattgttgccttgcccaaaatcattgcctagcccgacatcgttgccttgccaggatcgttgccttgcccagaatcgttgccttgcccaggatcgttgccttacccgaaatcattgcctaccccgacatcattgcctaccccgacatcgttgccttgcccagaatcgttgccttgctcaggatcgttgccttgtccgaaatcattgcctaccccgacatcattgcctagcccgacatcgttgccttgcccaggatcgtcgccttgcccaaaatcgttgccttgcccaggatcgttgccttgtccgaaatcattgccttgcccgaaatcgtctcctcgcccatttctgcttttacgattaagtctcggctcggcggatagtctataaccgccgcggcgaaactaacttgttgtaatctctcgatctttcctatcgataataaaaaggaccagctccgttcaccctccaaaatctcgtatattattattggtgcatccccagtacaaacactagtggattccttaatccattagctaactaacaaactcaatcaagctatccatagacagtagattcaaaaccagatcaatccactttcatgacaatgatcctcataactttaccacttcctaatctcagttttcattgatgaaacatagcaaagcagactttaaacatcaatttattatagtcaataagcagtctaaacatccaatgtcttgggttaggatctacaaatctctgaaattagttggttcagatattttatcaaacacttattaggtggagaaaatctgaaatcaattttcaattgatcagaaagaaaatagcattaagaactcctaaaacagaagggaatcatgcatataaacacttagctagctaaagaagagaggaatccacctaaacctaacccattctcaagaactctgaagaacactactcaagaacaatgaagaacatcatagaacaaaacccagaaaattcataaaactcagaaatcattataaacttagcaaaagatagatctcaatgagataaacaagtttgcagaagaaatcaaatccaaattctcaacagaacaaccagaaaatgcaaaagaaaatcaaagaaccctaaaaaccagtggacaaaacgaagatcctctgggcaaaaacataagaggtctatttataggcaatcctaggttgccctaattgggaataagacaaaaaagataagtcggcgcaggagcgctcggccctaggccgagtggcttgcctttggcacacagctcggccccaggccgagtggcttggtcgagtagcttctctccatccttaagtgcaccactcggcctccagccgagtgccttggtcgagtaggctccttgttcttcacgtgtgctccactcggcctccagccgagtacgtaggccgagtatacttcaaatccttccttaggttccccgaactcgagtctgtccatcccttgtgctagaaacctccaagttgagtccaaaagtacctaattcacctgcaaaacactccaaatgcaagtatgctatgcaatgcaatgcaaaatgtgcaaaagaaggaaaagagactaagaatgcataaaaaggggcatgaaactaagctaaatgcatgaaaaacaagggcttaaaaaggttaaaatctagtgttatcaatgacatcaatcatattcgactccaaaacactaaccaaccttcttcttgcttctcaaagcttttatggtgtagccaaagtacatatgagtctttggctttgtgtcttctaacaaggaaacactacttaggctttacagatcgggttgcggtttaagtttttatacccaatcatacatattacatcaagtcctatttgattccaaaacactaaccaaacttcttctagctcctgaaagctatcatggagaagccaaagtacatatgattctttggctttgtatcttctaacaaggaaacattacttaggcttataagatcgggttgcggtttaagttcttatactcaatcatacacatgacatcaagtcatattcgactccaaaacaataaccaagcttctcaaacctttcatggtgtagccaaagtctgtatgagtctttagctttgtatcttctaacaaggaaacattacttaggcctttaagatccggttgtggtttaagttcttatactcaatcatacacatgacatcaagtcatattcgactccaaaccactaaccaaccttcttcttgcttctcaaagctttgatggtttagccgaagtccatatgagtctttgtctttgtatcttctaacaaggaaacactacttaggcttttaagatccagttgcggtttaagttcttatactcaatcatacacatgacatcaagtcatattcgactccaaaacactaaccaagcttctttttgcttctcaaagctttgatggtttagccaaagtccatatgagtctttgtctttgtatcttcgaacaaggaaacactacttaggcttttaggataagattgcggtttaagttcttatactcaatcatacacatgacatcaagtcaaatttgactccaaaacactaaccaagcttcttcttgcttctcaaggctttgatagtttacccaaagtccatatgagtctttatctttgtatcttctaacaaggaaacactacttaggcttttaagatcgggttgcggtttaagttcttatactcaatcatacacatgacatcaagtcatattcggactcaaaaacactaaccaagcttcttcttgcttctcaaagctttgatggtgtagccaaagtccatatgagtctttggctttgtatcttctaacaaggaaacactacttaggcttttaagatcaggttgtggtttaagttcttatactcaatcatacacatgacatcaagtcatattcgactccaaaacactaaccaagcttcttcttgcttctcaaagctttaatggtgaagccaaagttcgtatgaatatttggctctgtatcttctaacaaggaaacactacttaggctttcaagatccggttgcggttctagttatcatactcaatcatacacatgatatctactcatattctactccaaaacacttaccaaacttcttcttccttttcaaagcttcgatggtgtagccgaagttcatatgagtctttggctctgtatcttctagcatcgaaacacaacttttcctcttaagatctgattgcggttctagttcttatacttaatcataaacatgacatctggtcagatttgactccaaaacattaaccaatctttttcatgcttctcaaagcttttatggtgtagcaaaagtccgtatgagtctttggctttgtatctcctatcaaggaaacacaactttaacttttgggaaccggttgtggttctaggtcttatactcaatcatataaatgacatctagtcatatttgacttgaaaacactaaccaagcttcttattgcttctcaaaactttgatggtgaagccaaagtccatatgagtctttggctttgtatgttctaacaaggaaacactaccttagcttttgggaaccgattgcggttctagttcttatactcaatactacacatgacatatagtcatatttgaataaaaaaaacttataaagcttcttattgcttctcaaaactttgatggtgtagcccaagtccgtatgcatctttggttttgtatcttcaaacaacgaaacactactttggcttttgggaccccgctgcggttctagttcttatactcaatcatacacatgacatatagtcatatttgactctaaaatactaacccagcttcttattgcttctcaaagctttgatggtgtagccgaagtctgtaggagtctttggctttgttttttctaacaaggaaagactactttagcttttgggaatcagttgcggttctagttcttatactcaatgataggcatgacatctagtcatattttactctgaaacacaaaccaagcttcgtattgcttttcaaagctttgatggggtaggcgaaggccgaatgggtcttgggcttggtatcttgtagcacggaaacacttcttaggctactaggatcccattgcgctcctagtccttatactgaatgatacacatgacatctagccatatttgactccaaaacactaaccaaacttcttcttacttctcaaagctttgatggtgtagccgaagtccgtattagtctttgtctttgtatcttctaacaaatactcaatacttaggcttttaagatccggttgcggttctatttcttatactcaatcgtacacatgacatctagtaatatttgactccaaaacactaaccaagcttcttattgcttctcaaagctttgatggtgtagccaaaatctgtatgatctttcggcgttgtatcttctatcaaggaaacacaactttagcttttgggaatcaagtgcggttctagttcatatactcaatcatacacatgacatctagtcatatttaactctaaaccactaaccaagcttcttattgcttctcaaagctttgatggtgtaccccaagtccgcatgactcttgggctttgtatcttcttgtatggaaatactaattcagcttttgggatcaatttgctgttctagttttatacgcaatcagacac

SEQ ID NO: 38668 - DNA, 4162 bp, Arabidopsis thaliana landsberg
cacaaagaaaaactacagaataaaagcttcgtcttttggacaaaccccaaaagacctatttatagtaaaattccgaaaaccctagattcactagaagacaagagactttaggcggtttagaggaatgctcgatcttggggatcgagtaaaaagggtgctgcaaagtctgcacctttgcctccatgctccgagtgatcaattggtcgagtagttgcttcttcctctcctcttcttatgctccgctgtctggttgagtgtggaatgaagagaatccgaaggcgctttgaatgatcaacaagtcttgtggaatgggttgcttttggtcgagtacttggtcgagtagaggattgagtagggggtcgagtggtgtctactgcttcctatgtagctgcctggatcgagtgaatggtcgagtgaattgccctactgcttccctcctggtttgatagagtatagggtcgagtgatttccatgtatcctccttctacacctaaaaacatacaaaaacatgcaatatgtatgcaatatgatcctaaatgtctaagtgtgcaaaataagctaaatgtggtgcaaaatgatatgaagcaatgagtgaacactaagctaaatgatgataaacatatgagtaacatgagtaaatacagtgttatctgttcctaaaagataatagtgtatccttgttagaagacacaaacccaaagactcatatggactttggctacaccatgaaagctttgagaagtaagaagaagcttggttagtgtcttggagtcaaatatgacttgatgtcatgtgtataattgagtatgagaattagaaccgcaactggatcccaaaaggtaaagtagtgtttccttgttagaagatacaaagcctaagactcatatggactttagttacaccatgaaagctttgagaagcaagaaaaaggttggttagtgttttggagtcgaatatgacttgatgtcatgtgtatgattgagtataacaacttaaaccgcaactcgatcttaaaagcctaagtagtgtatccttgttagaagacacaaagccaaagactcatatggactttggctacaccatgaaagctttgagaagcaagaagaaggttggttagtgttttggagtcgaatatgacttgatgtcatgtgtatgattgagtataagaacttaaaccgcaacccgatcttataagcctaagtagtgtttccttgttagaagacacaaagccaaagactcatatggactttggctacaccatgaaagctttgagaagcaagaagaaggttggttagtgttttggagtcgaatatgacttgatgtcatgtgtatgattgagtataagaacttaaaccgcaacccgatcttaaaagcctaagtagtgtttccttgttagaagacacaaagccaaagactcatatggactttggatacaccatgaaagctttgagaagcaagaagaaggttggttagtgttttggagtcgaatatgacttgatgtcatgtgtatgattgagtataagaacttaaaccgtaacccgatcttaaaggcgtaagaattgtatccttgttagaagacacaaagccaaagactcatatagactttggatacaccattaagcctttgagaagcaagaagaaggttggttagtgttttggagtcgaatatgacttgttgtcatgtgtatgattgagtataacaacttaaactacaactcgatcttaaaagtttaagtagtgtatccttgttagaagacacaaagccaaagactcatatggactttggctacaccatgaaagctttgagaagcaataagaaggttggttagtgttttggagtcgaatacgacttgatgtcatgtgtatgattaagtataacaacttaaaccgcaacccgatcttataggcctaagtagagtttccttgttagaacatacaaagctaaagactcatacggactttggctacaccatgaaagctttgagaagctagaagaagtttcgttagtgttttggagtcgaatatgacttgaagtcatgtgtatgattaagtataagaacttaaaccgcagtcttatcctacaagccgacagagtgggggctcgatggaagaatcatagacgtggactgaggctcgaaacctctttgaaaattgaggactccttgcacagttttgtcgtcgtaccaacatccttggtattagaagagcttcgtgctgtcgaaatctacgtcaaagggaagtgaagaaatcaaacttatgtatacttcgtcatcgctttgcagtgtctttgagatcttggtctcatccactgtttgtctttggttctatgtgttttggattttcagattgcaaagcataataattgtttgttgtgttgcttaataacgctatgttaacgatctgattatttaaagagtagcagtagctaagagattccattaaattgtggcctgaaaaggaaattttgcaacgtgactagtagtagtatttttagtagaaaagaatactatatttggccacatggtagatagataaagacaatttggtttaattaatttgaattctggattcttctaacatgcaacaactaatgatgtcatgaatcaagagattgtacagtgattgctgagcgattcacgctatacaacaattaactttttttgtagctttagactaaaacatagtctcttctctatacgctgcagatctatgttacaataattacaataaaatgtttcgaatcaaaacaaaaataattaattcagttgttattagtcatatatcttcacctcagaggcatgcgaaagaaatcgacgtagacatatggtgggaataataattaattaaaaacgcccaagaatgttatctaattgaaaaaccttaatcgacgagctagttagccagaaacgccttaaaaacaatatcaccaaaaggtatatggaccgaaaaatcgactttgaagcaatcgtaccaaaagggacatgtcacaatcgtatgcgttacacaaagtttacaagtactaatcaagagagtcttgcatttggtaagcgacaataacaaaacatttgataaattttcaaagaaacataaactctacaagcgagagagagacacttgatatctctcattccactccattataaaggcgaaaaggacagtgaaaacaaaagaaataccaaagaacaaagacacaaacttggacaactcatgactgttattggtagaagaatgtggagggtaaagaattaaacccttctgttccactctgaccaagactgttttgatccacaaagccatcaagctcgaaggcaaacgtgtctatgcttgcatgcgcaacattccaatagctatccgtctccggaatcctcagttcagctccaaaacaagtactgggaggaagaggtggaagctcatgatcacaatgctcagcattactggttatagattgataaccacattcagcctcctgaggccacccattgtatgagaactcaatagagttctggttttggttgttggtcgatgagtagagattgttattgttgttattgttgctgttagtagcttctagttggcttggagcgttgaataactcggaaatgaaacgttgggattcatcaggagagacaaaggaagttactgaggagccacgaggcatatcggagtagacgaagttggttcgagcagtcaagcctcttatggaccgtgcggctctatcataagccaatgcagcctcctcggccgtgtcaaaagtacctagccaatacctctctttcgtcgtcgggtttcttatctcagctgcatatcttccccatggcctcctcctcactcctacatactttatttcttcaatatgttgttgtggctgtggctgcggttgttgctgcttttgcctatgactcttttttgatctagagcaagaaccggcattcaaattaccattgaactccatagctaattactatagtttatcaaatagtcaaaatgtgaaatgatagaaagataactagaaatgatggatttggttatgtttgaacaatgaatatgggtgtgcttaaatagatcaccttcactatgtgtttgtgtagggaccctctcttttattctaaaggtccctttggaattttttaagatacaaaaagtgggtcacatggaaatgtgc

SEQ ID NO: 38669 - DNA, 13016 bp, Arabidopsis thaliana landsberg
gatgtattaggagtgtttagacaacaattatacccatttactcccaaaagagtctaaaatcatttcatcttttgtagaagcattcaatagatttgttagtgtttctatgtacaaaatgttccaaaatccactgcattatgactaattataagagttagagatggagtaagagtgtttagacaatacttatacccattttttccaaaaagaagctaaaaccaacaaattttgttgagaagcactaaatagctctgatagtgtttctatggtcaaaaagtattacaatcgaatccatttgactgattatataacttagagatggattaggagtgtttagacaacttttatacctattttcttccaaaagaggctaaaaccaacaaaattttgcttagaaacagtaaatagctttgatagtgtttctatggtcaaaatgttttgcaatccaatgcatttgactaattataagagttaaagatggattacgagtgtttagacaacacttatactcattttctcctaaaagaagctaaaaccaacaaaacattgcttaaaagaagtaaacagcttttttagtgtttctaagatcaaaatgtgttacaattcaacgcagttgactaattacaagagttaaagatggattaggagtggttagacaacacctctacccattttgtccctaaaaacgctaaaaacaaccgaaaattgcttagaaatagtaaacagcattgttagtatttctatggtcaaaatgtgtcaatatccaattcatttaaccaatcataagagttagagatagagtaggagtgtttagacaacacttttacctattttattcaaaaagaggctaaaaccaacaaacaattgcttagaagaagtaaatagcttttttagtgttttcatgatcaatttttatcacaattcaaagcatttgactaattatatgagttagagacggattaggagtgtttaaacaacatttataccaattttcttccaaaagaggctaaaaccaacaaatatttgtgtagaagcagtaaattgctttgttaatatttctatagtcaaaatgtgtcattatccaatgcatttgactaatcataagagttagagatggagtagtagtgtttagacaacatttatacccattttctcccacaagaggctagaaccaacaaaaattgcttagaagtagtaaatagctttcttagcgtttctatggtcaaaatgtctcacaatccaatgcatttgactaatcataagagttagagatggggtagtagtgtttacacaacatttatacccattttctcccaaaagaggctaaaaccaacaaaaaattacttagaagcagtaaacaactttgttagtgtttctgaggtcaaaatgtgtcacaatccagtgcatttgactaatcataagagtgacagataaactgggagtgtttagacaacatttatacccattttctcccaaaagaagctacaaccaacataatattgcttagaaacaataaatagctttgttagtgtttatatggtcaaaatgtatcacaatctaatacattttactaattataagagttagagaaggattacgagtgtttagacaacagttatatccattttttctaaaagaagctaaaaccaacaaaccattgcttagaaacaataaatagctttattagtgtttttatggtcaaaatgtgtcacattccaatgcacttgactaattataagagttagatatggattaggagtgcttagacaacacttatacacattttctcccaaaagaggctaaaaccaacaaaaattgcttagaagcagtcaacagatttgttagtgtttttatggtcaaaatatgtcacaatccaatgcatttgactaaatataagagttggagatggattcagagtgtttagacaacacttatggtcaaaatgtgtcacattccaatgcacttgactaattataagagttacatatggattaggagtgtttagacaacacttatacacattttctcccaaaagaagctataaccaacaatatattgcttagaagcagttaataggtttgttagtttttcaatggtctaaatgtgtcacaatccaatgcaattgactaaatataagagttagatatggattaggagtgtttagacttcacttatacccattttctcctaaaagaggctaaaattaacaaaatattgcttagaaatgggtaaatagctttgttattgtttttatggtcaaaatgtgtcacaatccaatgcatttgactaattatatgagttagagataaattaggagtgtttagacaacacttataccaattttctcccaaaagaggctaaaaccaacaaaatattgcttagaagtagtaaatagctttgttagcgtttctatggtcaaaatgtgtcacaatccaatgcatttgactaattataagagttagagatggattaggagtgtttagacaacacttatacccattttctcctaaaagaggctaaaaccaacaaaaaattgcttagaagcagtaaacagctttgttagtgtttttatggtaaaatgtgtcacaatccaatgcatttgactaattataagagttagagatggagtagcagtgtttagacaacacttatacccattttctcctaaaagaggctaaaaccaacaaaaaattgcttagaagtagtaaatagctttgttagtgtttctatggtcaaaatgtgtcacaatccaatgcatttgactaatcataagacttagaaattgagtagtagtgtttagacaacagtttatacccattttctttccaaagaggctaaaaccaacaaaaaattgcttagaaccagtaaatagcttttgtagtgtttctatggaaaaaatgtatcacaatcaattgcatttgactaattatataagttagaggtggattaggggtgtttagacaacaattattcccattttctctcaaaagaggctaaaaccaacaaaaaaattgcttagaagcagtcaatagctttgttagtgttttcatgatcaaaatgtgtcacaatccattgtatttgactaaatataagagttaaaaattgattaggagtgtttagacaacacttatattcattttgtcccaaaagaggctaaaaccaacaaaaaattgcttagaagcagtaaatagctttgttggtgtttctatggtaaaattgtgtcacaatccattttatttgactaatcataagagttagagatggagtaggagtgtttaaataacatttatacccattttgtcccaaaagaggataaaaccaacaaaaaattgattagaaggagtcaatagcttcgttagtgtttctatggtcaaaatgtgtcagaatccaatgcatttgataaatacgaagagttaaagattgattaggaatgtttagataacacttatacccattttgtcccaaaagaggctaaaaccaacaaacaatgcttaaaatcagttaatagctttgttagtgtttctatggttaatatgtgtcagaatccaatgtattagactaattataaaaggtagagatttattaggagtattcagacaacatttatacctattttctcccaaaagaggctaaaaccaacaaaatattgcttagaagcaatcaataggtttgttagtgtttcaatggttaaaatgtgtcagaatccaatgcatttgactaattataagagttaaagatggattaggagtgtttagaaaacacttatacccattttgtcccaaaaaaggctaaaaccaacaaacaattgcttagaagcagtcaatagctttgtttgtctttctatgctcaaaatttgtcacaatccgatgcatttgactaattataagagtgagagatcaattagtaggttttagaaaacacttaaacccattttgtccaaaaagaggctaaaaccaagaaaaaattgcttagaagtagaaaataactttgatagtattgatatggtaataatgtgtcacaatctaatgcatttcactaaatagaagagttagatatggattaggagtgtttagacaacaattatacccattttttcctaaaagtggctaaaaccaacaaagaattgcttagaagcagtaaacaacttgttagttttgtattgccaaatgtttcacaatcgaatgcatttgactaattataagagttaaagatgtattaggagtgtttagacaacacttatacccattttctcctaaaagaggctaaaacctacaaaaaaactgcttagaagtagtaaacagctttgttagtgtttttatggttaaaatgtgtcacaatccaatgtagttgactaattataagagttatagatggataaacagtgtttagacaacacttatacccgttttctctcaaaagaggctaaaaccaacaaaaaattggttaaaacctgtcaatagctttgttaatgtttcaatggtcaaaatgtgtcacaatcgaatagacttgactaattataagagttaaagatggattaggagtgtttagacaacacgtatacctattttgtcccaaatgacgattaaaccaacaaaaaactgcttagaagcagtaaacatatttgttagtatttctatggtcaaaaagcgtcagaatccaatgcatttaactaatcataagaattagggatggagtaggcttttgtagacaacatttatattcattttctcccatacgaggctataaccatcaaaaaactgcttagaagcagccaatagctttgttagcgtctctatcgtcaaaatgtgtcataatccaatgcatttgactaatcataagtgttagagatggagtatgagtgtttagacaatacttatacctattttctcctaaaagaggctaaaaccaacaaaaagttacttagaagcagtcaatagctttgttcgggtttctaaggtcaaaatgtgccagaattcaatgcatttgactaattagaagagttaaagatgaattaggagtggttagacaacacttgtacccattttgtcccgaaaaacgctaaaaacaaccgaaaattgcttagaagtagtaaacagctttgttagtatttccatggtcaaaatgtgtcataatccaattcatttaaccaatcataagagttagagatggagtaggagtgtttagacaacacttttacccattttattcaaaaagaggctaaaaccaacaaacaattgcttagaagcagtaaatagctttgttagtattttcaagatcaaatttagtcacaattcaaagcatttgactagttatatgagttagagacggattaggagtgtttagacaacatttataccaattttcttccaaaagaggctaaaaccaacaaaaaattgcttagaagcagtaaatagctttgttagtgtttgtatggtcaaaatatgtcacaatccaatgcatttacctaatcataagagttagagatggagtaggagtgtttaaacaacacttatacccattttgtcccaaaagaggctaaaaccaacaaaaaattgcttagaagcagtaaatagctttgttagtgtttctatggtaaacatgtgtcacaatccaatgcatttgactaatcatatgagttagagatggagtatgagtgtttagacaacatttataccttatttctcccaaaagagggtaaaaccaaaaaaattttgcttagaagcagtaaatagctttgttagagtttgtatggtcaaatgtgtcacaatccaatgcatttgactaatcataaatgttagagatggattaggggtgtttagacaatgcttattcccattttatcccaaaaaacctacaacctacaaaaatttgcttagaagcagtatatagctttgttagtatttctatggtcaaaatgtgtcacaatccaatgcatatgactaattataagagttagagatggcttaggattgtttagacaacacttatacccattttctcctaaagagacgaaaaccaacaaaaaattgcttagaagcagtaaacagcttgttagtgttattatggtcagaatgagtcacattctaatgcatttgactcatcataagagttactgatggcttaggagtgtttatacaacacttatacccatattctctcaaaagaggctaaaattaacaaaacaattgcttacaagcaatcaatagctttgttggagtttttatggtcaaaatgtgtcacaatccaatgcacttgactaattataagagttagagatagatttggagtgtttagacaacccttatacccatttttcccaaaagaggctaaaatcaacaaaacttgcttagaagcattaaatagatttgttagtgtttctatgatcaaaatgtgtcacaatccaatgcatttgactaattataagagttaaagatcgattaggagtgtttatacaacacttataccctttttgtcccaaaagagggtaaaaccaacaaaaaattgcttagaagcagtcaatagctttattagtgtttctatggtcaaaatgtgtcacaatccaatgcatttgactttttattagagttaaagatggattcggagtgtttaaacaacacttatatccattttgtcccaaaagaggctaaaacgaacaaaacattgcttagaagcactcaatagcttttgagtgtttctatggtcaaaatgtattacaatctaatgcatttgactaattataagagttataaatggattaggtatgtttagacaacacgtataccaatttcgtcccaaaagaggctaaatccaacaaaaaattgcttagaagcagtaaacaactttgttagtgtttctatggtaaagatatatcacaatgcaatgcatttgactaatcataagtgttagagatggagttgtagggtttagacaatagttatatccattttctctgataacactgtattttactcattttaggtgtatgtttatcatcatttagccttgcatttccccattgtatcatatcagtttacacgaccctcttactcgatcaaggcaacctcaaatgaagcagcagattgatctactctcccctcttactcgatccactactcgacccattttcttgaccaagtgtgaccatctctacaagacttgttgagctatcaaagcgtcctcgaatcctcctcattccccactcaactagacatctgagcatacggatatgagaggatgaagcatctactcgaccaattcatcactcggaggatagacacaaaggcgtagactttgcagcaccctctttactcgatccccaaggtcgagtattcgcccaaaccgcctcaagtctcttgtcttctactgaatccagggtttcaacattttagtataaatagatcactttgggatttgtccaaatgatctatgctttatctttcagtttttctttgtgtttatgaatcttgaaactttaattactcttaatctatttcgtttttgcatttgattgtttaagtaaagttgtttagcttgtttagatctacattttggtataattttagtaatttctcggtttgtgttcttgataatgttgcttgagtagtgattagggtttttgaggatggattagattagggtaatctctaggttagttaggtggttagtgtttaggtttatacccttctggattcgcttggcccttatccggttttcgctggctaatatggagattcgatcatagacgtccagcgtccaaaagacgttcaaatggatgtctaatctacgaattccagagatttgtagacccgaccaagacattggcttgtcttcttattggctttggtagattgttgcttaaaccctgctctgctatgtttcatcaacgacagttgagattaggaagtggtagagttatgggggtctctgtcacaacagtggattgacccggtttttgaatctatggtcaggggtatctacctttcgcctattagccatttgatgaaccctagagttacccttatcaatgaatccatccttagaacttctattaggtttatttgtatcccctcttgattgcacttttatttacctgttatttgtatcctctatttgtatcccctgttgattgcatttaggtttcttaattttgtcacctgttgcttctactcaacccaatgatcgagtagggcttttaagttcttatttttacttgtttgaatcctgacctaagattgttactagaaacccaccatcattataatctggcttgacttagttgtttttgtacacatcttgattgctagcaaaacagtggactggattgacaccctctataactgcatcgacatgtttgtgttttaggggaattgaagtgaaatcacactcttcagcacataagcagacctgaaaaacctgcttatcatcttttctcttgtcgattcttagcaactaaaactcttctcttttctcttgtcttttctctaatccctgagcaacaaaactcttcagagatcatggatgcatcacgttccaacaagacgccatgtgtggatgacgcttccaacaaaaggccgtgtgtggatggctgttccagcagaaagctgcttgaaacggagaaacgtttcaaaggcatcatctctctcatcagatgcaacataaggtagacggaggaagcacacatcttggatctcaaactgccccagacacaagcgaaacttaatctcctaaagaaaatgaagaggatggaggacggatttaatgtggaggaggagttctagaaagtggaggagcaggtaagcaaggcttacaaagagaagaatgaattcaaggtgattagtattgattgggataaactggggtatggatcaatcgagagttcaagttttgaatcagatgaagaatcaagatggtgattgatgtgattgtatcgtcataacaaaattacatctccatgttatttgtatttaattttatgttattaaattgcagtactcctatgttatcaatgttaagtcttcatttttctattttctattcgcgtgtgtgattcataatctgtctctctttcagattattgtagattaacttgatgtttggttgagttattcgtgtgtgatggttgagttattctaacgttaaggcggacttaccgtagattaacttgatgtttggttgagttatacgtgtgtgatggctgagttattctaacgttaaggcggacttatcgtagattaacttgatgtttggttgagttatttgtgtgagatgcctgagttatcgcaagactggctgacttatttaaaattgacagtacaaggaagtccaaactgaaaaaaccaaatttagctaagctcacatatacttgttcaagctctcatacttcttctctagcgtttcaaatttctttccataagaaagttctttttcgcctaaggctcgacgtgcttgttgcctgctttcaggtccttcttcatctcagtcgtctcctcttttatcatgtcaaactcgtcacacaatgcaacagtccaccatctcttgaaaccgcatccttgaccgggacccttataaaaaaaccaggaggttaattcatagggatacaaaatgaaagaaaaaaaaataaagaacattaactcaagaaatgatgcttacatctgatatttcgtacggacaactgaaaaaaaaaattccgattgtaacaggatcaagagaagtggcaacgacaaccttagcattgcaatcacactcgatcggaacgcccttatcgcgcctcctgttttcgccgtacctcgttcgcatccttatttctatacggtcgagctcctacattaacacaaacatgatatactcgacgttagatgggcaacgatttgtactattcagatgtggagataaatacctcatcaatactagattcgccttggaaaagagacctctgagccatcatcttcactgcaattagtatgttactaaagcacaggttctatataatcctgtctgccacaaaatgtactaatcaaacgacggcgtctttctattggctgaataaatttagaagtggctgacttgtcatatcattgcggctgggttttcactgatttgttgctgagttatgtcgtcatacagtatgtcactacttagcgtgttgctttaggttgggtttatcgagattatttattatatcattatcgagataacaaacaacaactttatggggaaccgccagtaatgatttggtccacatgcacaggtacacacgcccgcagttaatattcaaaataattcaacgagttcgaaattattccttaactaaaccctccaataatcaaattttctgtttcgacgtggaataaaataacgttacggctgagttatgcaataagatttcgtgttttggccgagttatgagataccatatgttattatgatatatcaaaccagccaccaaattgttggttatattagtagcgtgaagatgtgcaatttgaaaacagaaaataacttttattttcagcaagtgtcgtttgacaaaacatggtctgtcaaaacctctaggaaatatgttgttggatatagtatgatgttggacaaagtaggctgttggataaagtttataggatatgatctactttcacggttccactatttggaatgtggttatgatatgttaattacttgattttcacaactgttggctcaagaaaagcactttcagggtttggccgagttataacaaagtgatggctgagttattcctatattgtggctgagttatgttagaattctgagaaaaatattctccgctattgaccagatacgacgtcggtttgttacagagtctccattattgaccagatacgtcgtcgtagtgacacacttataaatccccaaaacgaaaccctaatttataaaattccaatttctgatttcagatccggagctccttcttgcttttcgtctccgaatttcccagctaaaaattaaagaaatgagtagcaattccgagaactcgattgcgagtacgcaatccgtcagccgttggggacgtgggttaccatcgaagtgtcattgcggattagacgtggtcatttatacatcgacttacgcaaagaaccttggaagaccatacttccgttgtcctacgcgtaaagatgtaagtatataattgatttgagggttttatcggtttcgttgttaattgcggatgtgattgaatatgcaggaccatttgtttaaatgggtcgaagatggtacatacgaagtggttgtagacagttggccgaaattgtccgtcatggacaatgagttaagcgcggccaagtccgaggttgctgtcgagctagaagcgttacaggcgatggtgaaagaagtgaaggaagaagtgatgaggagcgaaagggaaaaccagatatggaaattgatgatcaaactttgctgcttttgacttgcctttactatcattgtcattgtttctggtatcttaatgttcccaaaaatcaacgaacagaggctttttcttggttactagtttgtttttatgtttgtatgaattgctagctactggaatccattatgtgtttgatgtttatctcagcgtatagggttaattcgtttttttggttcaagtagtagcttgcaatgaaatggaactttgtctttggccaagctaatccaatatcgttgactgagttatactggtaatgttgtggctgagttaatcatacgctgtggctgagttaatatctgttgtgtcttcggaaatataggttacggctgagttattataatgttgtggatgagttaattatacgttatgactgagttaatcatacgctatgactgagttatgataaaatttaacaagtaacctcaagcgataacaactgactttactgagaaggcgatcatagataatatgagatataaagccatcaccaaaaacaaaaaagagagtaacatactgagttcataggaatgagataaagggacgataagtaagagacacaaaagcattcaagacatgaaaccaacatcatctgggccaaattcagtaaacatgtccaccatatcattccaaactgttgtcgtcatccacctcggcttatctaaaccacgtgcccatccccgtttcagcgcccgcatattgtcccggtacaacgttctagccaccaaattaaattgcgtccacaccgtcagcgtgtgccttgaatcccaggtgtgcatacgctacaaagagagcaaatagtaagaatttggtctacggtttacaggaagtgctttatataaaaactcgatgcttatcgtaaggaggaaaaaccaccttgccttgaaaacaacgggaatcatccggtacgtcggccacgcatggtgaaagttgcgctggagtgtatcaccaatcgcgacagctagttggtgattgaatttgaaccacgtaacaatggttttgtcgacccatgtacccaatccagggtttagaactgggagatctgcacgatcaggagcggtgagcacgacttcgacatctcttagaaactgtccgtcgatgtgaggcaccatgtcgttaagatgtgaggatgagacgtctaaatgatgagttcaagtaactgatttatagaaaagaaaagacaggtagaggaatgcgaaaggttccgtgtctgttcgtttggcgggaaaaatttccgtactacggctgagtttggcggcaaaatatgttgttacgactgagttatactcaagacatgtaactattatacggctgagttgtcaagaattattaaaaaggacaggtaaaggaatgtgaaaggtttccgtgttttggcgggaaaatatttctggctacggctgtgtttggcggcaaaatatattcgtttcggctgagttacacgcaagacatgtaactattatacggctaagttgtcaagaattattaaaaaggaccagtaacggaatgcgaaaggttccgtgtttgacgggaaaatattccgtgctacggctgtgtttggcggcaaaatatattcgtt

SEQ ID NO: 38670 - DNA, 857 bp, Arabidopsis thaliana landsberg
accaggctttgtatatgtgtcgcattgtcgccacattaagatcctttagtgcaaccaaaacacactaaactctgctgaaatatggggcatcttgtaccttttaattatcgctgattactgattcacatcaaatatatggttccaaattattttattaactcaagtgtatagtaatgtttgactcttttttctgcaaatgtttcgaagacaaagtgctattaagttttatcaaaactatgatgttttgtagttttagatgattatataacgtttgtcaatctgtcttttaatttacttaaatcattagggcaggtaactatatttaaataaaaaacagagattgtgtatgagtttgaaataaaaacgtgttaaaatggaaaaaataaaccatgccaagtatttactttactacaaaggaaaaagtatacagaatttttacatgatgtcgtatgaattacatcatgtaataatagtaacttagatattctgtaagaaaattagatttgcataattacgttaatatccgagggtgtatataaataagaaagaaagaacagaggattaaaacccacaaattggcgttttatacatccccatttaaaaagaatggtaacgccgactctgtgaagcatttttcagcactcctttcctttccctcacaaacaaaacaaataatatctaacaaaaaaccattcacaaaaaaatagagagaatcatctgagagactagtagtgatgatatgagcttcttctcctacaatctcagaaaccttcgatcactgttttagataatctctacaacggatacaatggaaagcaccgattcttccggtggtacaccaccggcacaacctaacc

SEQ ID NO: 38671 - DNA, 1062 bp, Arabidopsis thaliana landsberg
ttgtgaacttttgagagagagactgattttgaaagaagagagactacacctacaaaagatgatgataggtttgttgtattaactccatatgtttgtttacgaagagataagaaggatccttcatcacttcttataatccagattatagacaaagaaaatatttgtttggtgtttgttattgtaatgaaacaataattaaagttattatattttttaaaaaaaatttaatggaaagaaaatccacatttaaggcataaaaaggttttttggtacctaaccttggaatccaaaggattttggaaactaactatggagtaacagtatcggttagaaaacaatttttatacctttttctgacaattttaccatctctcttatatgcagaccctctctctcttccatccagattctctctcttttcaactgggagacactctctctcttccatccctctcaacacgttggatctaaaaattcttaagatactacttttgtcccttcaatggtcaaatatgaacttcaagagagtattgtttacccccttaaatggttgactgtgattttttgcttgctatgctcgaatcgcatgtatatatgtacttaaattatgcaatttttataaatgaaatgatatatattttcaacaaatatgatcgtatcatatatatgtatgtaattaaaatcatgctgcttttataaactacatgatatttttaacaaatatgattatatcacatgtacatgtaattaaaatcacgatgttcttataaatgacacgatatatacatctaaaaataatcataccacatgctatttctatttactccaagaaatcatgatattttcttatatcacatgatatgtacatgataaatccctgtattttttacatgtttcatgccatttccttaaattcactatattctttctttcaccttgtactcggatctccatcgttaaacgtttctcttgtcggaaagtgttatcaccagatcgatcaacaccaccgaatcactctcacactttctctcctatttttccatgtcgatgatctatccctct

SEQ ID NO: 38672 - DNA, 571 bp, Arabidopsis thaliana landsberg
cggcggcccgacttggtgctgtacgtgaacggcatcgcagtggtggtgatcgagctcaagcgcagctttgtggttgccgccgaaggcatccgccagctgatcagcaaccaggagaaggcattcaacgagcgttttttcgccaccgcgcaactggtgctggcgggcaacgattcgcaagggcttttctacggcaccgtcagcacggaagaaaaattcttcacgcgctggaaacccatcgccaaacatgcggatgcaccgggcgtacatctggatggcccgctggccgaattgtgcgacaagccacggctgctggatttgatccgccacttcgtgatcttcgacgccggtttcaagaaggtgccgagcccgcaccagtacgccgccatcaaggctgcgcaggagcgcatccgccgtcacgaaggcggtgtcatctggcacacgcagggcagcggcaagagcatcctgatggtgcttttggccaagtggttgctggaacatgatcccgaggcccgcgtgctggtggtcaccgaccgcgacgagctcgatcagcagatcgaggacgtgatgcaca

SEQ ID NO: 38673 - DNA, 551 bp, Arabidopsis thaliana landsberg
cggcgatgagggactggggcactcagtttggctgaaaaggcactggcgggatattcgggaggaagtcttggtgctggagttttgactggttctggaggcgcgggtgcaggtacgggttttgctaagaatggtatgattggttcagcggaagaatggagcaaccggcctttgctggaaaccggtgacccggaaaacccatggaccatgatagaccgggctattctgggtgagctgccgcgggttaaactgatgtggagcgaggtgaactggtatccgccgaccggcgtgctggtttcgccggtatttaaactgccggcttcgctgaagatcagtgtatttgacaacgatgtacacaatactgagatcaaaactggggtttccaagaatgctgtaaggatactgcttgcgaaatcgcataaggtgatcggcagctacagggcttcttttacgacgccgatgaccaacagggatctgatgaaagaagtgccttttgacctgtcaaaatatgcaggccagctgggttatattgaggtggtggatagtactaagac

SEQ ID NO: 38674 - DNA, 876 bp, Arabidopsis thaliana landsberg
gacttcttcttcacattttagtactaatgatgatttgacagctcaaacaggatcatccctttgttttctaaggtaatatatgcggtttaggaaatgtttgaaattataatgacagccttccgatcgcatattttccctggcacttttatgacatggaattgcattaattgtgttcgatgtcttagatctatggataagtacgcgaggcttatgcagaagctagaaattgttaatgctgaattctttaaggtacaaatcctaatacttggaaattcgtagatttctctactctgctccctcgatttcatttctaacttttctcttacgtctgtttgaaattttgtagggaatatgccaattgtttggagtctttttctatttcgtgtttcaagtatttggtcaagaaaatactaattcaggtggaaaaggagtttccgactctttcaatcgtgagttactgattcgtttgcttttgatgctcttctttgtttgtaatgttactccccaccagtgtcagtatgagtcgtgttatgacttttaaggctacaatatctgcggaaagccattttgctcaacataagtatattttgaaatgcagatcgtttgaaaagctgcttatcacggatatcacaagagtgtgagcaatggataaaacctcacgtttcatcatcaccatcttcttcacttgcctttcccaacactgttcatagtcttgcggatgtgactccagcaagtcccttaaatacttctggtcacttatcaggcgtatcttttagtctcaaggtatataacttggggataggttttcatcaatttgaactacagttaatactgttttatgttcactagttaccctaaatagaactatcccaatgg

SEQ ID NO: 38675 - DNA, 594 bp, Arabidopsis thaliana landsberg
aaagctaaaatgggcccctgaaatatgttagaatcatgcgtctccttaaaaccttttttttttttgttttaattgtcggaaaatcagtagagagaggctttcgattaattttactttgtggccgccgtgacctttttcttagcgtcgctctctgtcaccttcaagttcactatctccggtgagtgctttcttcttcgtgtcttttccgcttctagatttggtgtaccgacaaccactgagctcaattaatcgagtcaaaacggagagatagttgctctgttgggaattcatcaattttggttagcattgggttatcgtgaatgtttgtttctatgaattagtaaattggtagacagtatttgtaggaaaacgtaaggattgaagatgaaacttttatttagctactctttggctgcttacttagatattcaaacgttgttggaccaaaccataatctctgttccaaaatctcaacatgaattaaattcttttcgttctcagttactatggtttagtttatctgagtatcttaatgtggtattcaaattcaagggttagtctctgaactttcatgtttgttttccttttttcaca

SEQ ID NO: 38676 - DNA, 715 bp, Arabidopsis thaliana landsberg
cactctcaggctgctgtctctgttgatccttcatctttgaaaatttgaaaacattcttagtctctcgctctgtcacagctccccagctcctcaagtggcattgtcaattcctgcggagcttgccgccgccattcccctcatcgatcgcttccaggttgaagcttttctgcggctaatgcagaaacaaatccagtctgctgggaagcgtggcttcttctattccaaaaagtcctctggctccaatgtccgcgagcgcttcacatttgaggatatgctttgctttcaaaaggtttttctttccccccctttcttccccattgacaatccattgactgaatatgtctctctccccttccttccttcaggatccaatccccacatctctcctcaagattaacagcgatctcgtcagccgtgctaccaagttgtttcatctcatcttaaaatatatgggtgttgattcatctgatcgatctacgcctcccagtttagatgaacgcattgacctcgttggaaagctcttcaaaaaaactttgaagcgtgttgaactcagggacgaactttttgcccaaatctccaaacagactagacataatcctgacaggcaatacttgatcaaagcttgggaattgacgtacttatgtgcctcctctatgcctcctagcaaagatatcggtggatatctatctgagtatattcataatgacgcacacga

SEQ ID NO: 38677 - DNA, 621 bp, Arabidopsis thaliana landsberg
aaccatgcggtttggttgcatgaatatttagaagaatttccaaacaagcaggacgaactgcgttatgtattaacttccattatgccagagaccagcgacagtgaatttacatggaaagattatcaagcccgtgtaaataatgaacttgtagctattttaggaaactttgtgaaccgtgtaatgattttgatgcacaaatatttcgaggggaaaaccttggatgcacaaaaccttaaagacaaagcaataaacgagcagattaaaaccgcttacgccgatattgataagcatttaacagactttaaattcagaaatgcgatatctgccttgatggatgtagccagattagggaacaaatatttaacagaaaaagaaccttggaaaacttttaaagagcaaccagaagcaacaagagaagttttacagaattgtttacacatcatcggccacttagccacactttcgcaggcgtttttaccgcatacaagtaagaaaattgctggtatgcttaatctttctgatgaagctaagggctatgatgaagctattacgtttgccaacgggcatcaattaaattcagcaactttattgtttgaaaaagtggaggatgagcaagtagaa

SEQ ID NO: 38678 - DNA, 692 bp, Arabidopsis thaliana landsberg
tcaaactagagctataataaaatttgaaagtgttcgaaacaacttgtcactaagaatttataaataattttgtccacacataattatttcaggagtcaggtcataggtccatatacatttcaatggggtatcaaaacggtcataataaaataaagttcaaactttttagtccataaatcttatcgatcaaatcggatcacaatactatttattgactagaattgtcaattttgttaaaatataacgccgtatatgaatttagagcatagactttggacttggatgtatactgttttgtcaattttttaaaaatttcttaaatttgcctcatatatataataatttggatgtagcaaataaattttaacgagtgaaatataaaattgtgaaccatatttcattcacgtggaatagtaatatcaataaaaaaatagttaattttggatgattgattttaaataaatggaaaaagaaagtagaccaactcttgtcggaaattataggtgaagaaattgagttatagtaatgaatggctaattgggaaacacatgacacaacaaactttacgtcctttttgccatatttaagcactctctataacaatgaccccgacccctactccaataatctacttcccctattctactattgtggtccagtttataccattatttataatccagattttagtt

SEQ ID NO: 38679 - DNA, 990 bp, Arabidopsis thaliana landsberg
  unsure (1)..(990): unsure at all n locations
aaaagttatctctggttatcgcaaagatggaaatggcctcttttggaaacctgtaaaagcaaataagaaccacactaggttcttgaggaacttaaccaaacaataaatatcaagattttgctctgtaattgttcaccatctctgttttagtgtcgagtagattcaactgatgtcttcaaactcatctgtataacgtaatgtccttttacgattacatcaactgtaagaagaaagaagacagattttgactgcataagaaccttattgttgcttcaagatcaaaacataatcaataccaagcctgtgaatttcagggtttttcagacccagaagattctccactagctataatcaaatcacctgatcaaccacaaaacanatgaatcactttgggaattatggaaagatcacacacttctgaagctgcagaatgtgatacttgctcatggatccattttagagagtcctgcaataatcaatgtagcaccacaatcagataatcttaatagtttggatgtgattcacaaaatcacacaccaattagcttcttcactccgctatcaacctctcaagagattatatattaactattaaataaccatgatcaaccttatctagatcaataaactactttgaggatgaaacttcttgtgatttctgctgctccaagatcatatgtctttaggacctgcacacgatttatataaaaaaacatgggtcgaaaatgagtctctttttacaaaatatgaaagtacatgcaaattctaaatagtttaagattaagatttgccgaagactagacatcaacatctgaccttgttgacaaggtcatttagatctgaagaccatttgaaattctaccaaatgagttggttcaaacccctttctccacacgttatcatacaccaccaactacctctatctcattctctaacttcctttagcatatcaccaattattcaccaagtcgaggcattcgtgtgaatgaac

SEQ ID NO: 38680 - DNA, 676 bp, Arabidopsis thaliana landsberg
tcataggccagccttgagctcacaagtaaaacattttattataattaaaacaaaaatgagaattaaatgtggggagggtatttatcataggccagcctggggcacacgtaaacctttgggccgcttataaccagcccatattagtgcatagacattattgcgcaatttaaggtaaaacacaacaaataaaagagagattcatgcgcaaatgatggtaaagaaaataatggaccatgcgaccaacaaacaaacaaagcattcttgcgatcataactacttctttctttcttctttttgttttaatctcaatgtcttaaacttaattgattggtttatgagaaacagaacaaacaaaaaaaagacttgattgaaattacaatctcatcacacctaattacttctgtcatatctgaacacaatcttctacatcaagactttttctcttttaacaacacttctacatcaagctagggttatcttttctttttgttttcaccttccatttttcgtattcactgttttcaacttataaccacataatatctgttactattaaagactaacaccaattaatactgtttgaaaaagatatatatataacctttttatttgttaaaagatttataactatttctttaaattttatataaaattttcataaatcgaacatttctta

SEQ ID NO: 38681 - DNA, 503 bp, Arabidopsis thaliana landsberg
atcaaacgaactgttattttgcgccgagagttgatgaaatgggatcgcatgcctcgcaactggccattgcggtttgcatctacagcccgcttcaatcccttttctggtatgatcgtccggaaggcgctctgttacatactggagaagcaggggggactatctccgttatcagggagacgcctgagttgacattttttgaccggttaccgactgtgtgggatgatactaaggtattggaaggctatccggggaaatatatttctgttgcccgaagaaaaggaagcaattggtttattggttgtattaatggtaaggaagaacgggaattcaggatcaacctgggcttcttgcccgaaggaaagcaataccaggctgttatttatgatgacgatccttctcagcagacaataacaaaagtgggtatcaaaaaaataattgtgaacagcagctcggtaataaaaaaagaggttctgccggaaaatggtctggctatatgtttgtcg

SEQ ID NO: 38682 - DNA, 739 bp, Arabidopsis thaliana landsberg
  unsure (1)..(739): unsure at all n locations
gagatgaaacttttgagtacgactttgagaatgtgcattctgttaaagaataaattgatggtttgtactttgtagaattcatcaaaaaagaaatgaagaagacattttaattaaaatgaatatataatttataaatgaatcatatggtataataagaagagcttgtgaaatttttatactgtatgtaacacgaattattcttaagaaacatatatattttattatttaccatgttttgtcatttatgcaggaaaattaaataccattacacaaaatttaaccttatacaaaaaccaaaaattaggcactgttttgaaaataagaagttgaaaatttttaaaacctcatttcccaaaaatatttgttcacatatcactattatattttgaatattgaaatagactctaaagaaaacatgactcgagtaaacaaccactactagtcgttgacaaaataagaaaagagacacccactagtcactaatgtattaattaatggatatncgaaaaaagatccaatgagggaaatggcagagtcgtaataaaagagggaagcagcggtttcatcacgaacttaacacaagaccgcttttatttgaaaatggctccacttcacgaggcttctctttctcccttatctctctctctcgccgtaggctttactcgagaaccagacccaaagatcacaccattattataatatacacattgattataaaaaagcacaatctttgaatgat

SEQ ID NO: 38683 - DNA, 1031 bp, Arabidopsis thaliana landsberg
ttcttcgtttagtcaccttgtgttacaagtcctttctataagccactgatcgttttgtataaataatcaataaatgcttggcagacccataattattttaataaacaattatcatagtcaacccaaagtacttccaattccagctatggttaagtttgacttcacgataagtttcacctcacgcttaaatatatatttccatctatcttttctttttgttaaaggataccttcattatgggttaaaaaagtgtaactgtcaatctgtaaattttttattggatacaaagaaaatttatattaacgacaacaggtatgtttaacacatgagacgataatcaattccaaatttccggtaacggcaactatgtcctaagcctcaccttgattgagtccatttaccacaattcgattttttttttttggttttttggtttgatatttagtaatatcaattcacaataatatttatgaaaatatcttaacatacttgttatcaatgctgatccaacgtcttaaccaacatacctaactgataactagttccagatgaatagtcgtccaacccatagcacacgatattacatgtacaacacatgattcaaaataaatcatactggattttgcgaaatgtttaccacgtatagctagaattttccaaaagtttttaaaaaatttgtactttggagatttaaatcctgatatggcatagaaacatgaattctttttaggccaccaccaaaccaaaatcgttttaagtttttatgtaccgttttcgtcagaatttaactcactgagtaacatgttggctctataattgtttagttaaaacaagaactgatgagaatggaatatcaatcattaaatgaccgcttcaattttacctgagtttatcgcttggccactattttatttccgaaacccaaaagtagataaactagtttcttttgcatggaaattttttccaccttactttggttagagattcttttactttgtttttctttaaagaagattttacataatctcatt

SEQ ID NO: 38684 - DNA, 918 bp, Arabidopsis thaliana landsberg
  unsure (1)..(918): unsure at all n locations
aagaattccagacgtatattcaccaattcgtaattattatacactatctaggattcatgttcaaattgttagcatctagacagatagactaaatttggagtcttcagatgacaacttcaaacatgcagcaacttctaactctactggaaaaagaaacttactgttgggaagatacaggtgttcctgcagaccaccatttgccatgaactcatacacaagcagcttatgactattgtctgagcaataaccaagaagtgccaacaagtatggtgaacgcagacggctcagtaactcaacctggcaccagatacaaaaaattgatcaatcaagtaatcaaaaacgctgcaaacagcaaaatgtgcataagctttgaaaaaataaagatcaaagagtaagctaaaaataatcaaacctccatcttgaattcttcttccccttgctttcctgcatgatccatgagcttgatagcaacttttctgccatcgttaagcacaccacgataaaccaagccaaacccaccattcccagccacattagacttgctannnnnnnnnnnnnnnnnnnnnnnnnnnttaaaggtgaaaatttgcaacccattgtcagtagcatcttgtactttctgacaatcgcctttttcctcacaatcaaaccctaaaaatcgacaggtaaaacaataacagattcaatacccagaacataaatcgaaccctaattgagcaattgtcttccaaaattattccttaattagaaccaaatttcagcatccggcgtaagaacaagaaatacaggtaaaaagataagaaggagaaatgaagtgtgaattgttgagcttactcttgctcactccctgacgcttagaaaccttgttacgaaaataacagtagtagctaaaggcgacgaacaaagaagataaagcaa

SEQ ID NO: 38685 - DNA, 602 bp, Arabidopsis thaliana landsberg
ctggatgaagaagaaaaagaggaatcatcagtcgaaactgagaaattggaatcgggcttcttcgtcgccggatatttcgtcactcgtggattcagttgtggcttcttcgtcatttctgttttcgtaaccttaaatctgttcccggtcgaacagaggatagctcgtgactcatctattggtttaaccggagaacgaagcttagaggctatagacatctgagagaagctttgaatggtaggagatggagaattcgaaggtaacgtgagggtaaaattggaaagataaggaatgaaatgagatcagtgagaaagagagagagagatggaacagagtatgaaagagcttaacgaaggtttttaaaaactgtagaacggtaacagataaagaaagcatgtaaaccggtcatagccggtgattattgcttacgtgtcggttaattttctgtttaatccttgttggtttcagaaaaaggacaccaaatggtttattacatgtcgtgcaaattacgcttttgtcattaattccggattaaaaagtttaaagcctgcattattttctaacttatggttaattaattttcgttcaataattaaaaataggtg

SEQ ID NO: 38686 - DNA, 895 bp, Arabidopsis thaliana landsberg
tggcaacacatatcattattactgtgttcctccaattatatttttccacgtatgtctccaatgttagtcccattttattacttgctattggtaattagactgtggtagatggttttgcacatggtttaaggaaagcttatagtactaaatataaaatactatgaacctgtttttgataaatcaagttttgcttataacaccagttggagtatctctttgaagattattttttaaaaactttagttttcttaggacatttctgcttagttttattttcctgtgattttgtacatttttacattcattttagggtgaatattttaactaagaaatgccaaactaaaactcaatatccatctaactacgattttatagaaggaaaatgaaaaagggtttattttgtggctttaaattgggtgcttgcttggtgggaagacaatattgaacgggtttttttaaccacaaatatattatcagagtttataaaagataattgaaattgtattttaacaatgaacaaaaaaaggtgggacggtgcattgaagaaggagacgggagttagatctgaccaacggtcccaactgtaaattataatcacactcttactatactattattcattcaaataccattatttgttgacggatcatgaacatatagtcaagataatttctttagatagtcaagataaattcattaattactctaattcttctgatatgtttccagagaaaaaccagatctagatccactgttataattcgagggcaaatgaaatactagtagctaacagaagaatactgttttagagttacgatctagaattctagatatatatacaacattttttgtacacctgatttgagatattacaaaagtgctgtgaaccttaaac

SEQ ID NO: 38687 - DNA, 954 bp, Arabidopsis thaliana landsberg
gtaaacggcgaactattaaattgaaaaaactagtgaattgagtatcacatatctgcgttaacgaatttagtaatttgttggacgaatgagatcaatcaagccatttaaaaaaatatatattcattcgcattgtagttttacacataccacctaacattgactataaaaaatatatatgaaaaagaaatctgttgcaagggagactaacctagcccaacaatttttaaagctctagggcaaaataaaaattcaggaccttatattcatgttaaaaaaaaaaaatttatatatttgggcatatttatactaaaaattattttgtttgggtcttttgaaattttattaccttgaaaacaggtcatactttacacttaaatggtaaaacattgggctacattttcattttgttatttaaacggaccggtatgagtgagacatgcatgatgatttaagcttatctactcaataggattaggctgagactgatatgattccatttttcgagaccgtgtgaacatagttcatgataactactgtgtagtaaagtagtaacaagacttcaatctcaagttttaatgggttttgttcggtggttcaagcgtccttatcataagtttgtttttctgtcttcactacacacatcttaatattgagttaatccaattaacagtaggcatatatcatatatcagaacattatttgtgttatgattaccttttatattatcaaagtccctagttaatttggtttgtttacaaagacgattacagtatattatatatccaaacaaaatttgtaatgatgataatcagcccagtatggttcaattcaatgttattgaaattctgttggtttctaaatcacacttggttattgagtcgggttggaaaaccaaattaaccacagcgcataaggacgaagccaaaatttaaaacagtagttgtacataacttc

SEQ ID NO: 38688 - DNA, 490 bp, Arabidopsis thaliana landsberg
tccgtctttgaaagtaatcaccaacgataaatcattttcttcatccacattcacaaaattcactcctgcactgtctagtttgtctgcgttgtacataatctttctgctcttcggtggctcgttttttgctatgttaatttgttcttctgtcaaagaaagtgtgctgacacggacacaccgaaacaaatctgtaaaatgttggaatctcacttcttctttgatctttccctcaaacctaaaagctcgaagggtaatatcacgaaacgtttccttagtattgacatttgaggaaaaaggttcaaagagtttctctaaaagggcataagggagttggttctcgagcaagattagatcttctaaaatggcggtagcgtttatgagacgactctggttgaaaagaatatcttctttcttgctgaagtttagagtacttccggtttgaatgaaaaacaatagtatgaacaccgagtcgtggaggatcatttctacg

SEQ ID NO: 38689 - DNA, 678 bp, Arabidopsis thaliana landsberg
agaatcttaccttgagaatgcaaaacaatgtatctggtgtggaatttgaataagaaaatagctacgcttttatgggacatcaaggagcacaaaagcacagtaacatgcttttcactctctgaaacaggagagtgtgtcttaagtggatcagcagataaaactatcagggtatgataatgattcaactctttgtttccaggacagatcactaggatcaggacaaaactgtatctatgtttgaccttcttttatataggtatggcagatagttaaaggaaaactggaatgtgctgaagtcataaaaacaaaagattcaataaggaaactggaagcattcggaaatatgatctttgttataacaaaagggcacaagatgaaggtagacatctctctctcattaagccacaagaaggcagagactatttacatagtaatatcatataatagttcccaagtcatatttaaacactcagaggctaataactttcttcagctgcttgattcatcaagaatatctcaaagtatcttcaaaggtaaaggtgtgaagagtatggtatcagctcaaggaaagatttatataggatgcatagatacaagtatacaggtatgtattgccatatataccttgcctttcatccaaatgatactaaattatgtaagatacgaagtaatttacat

SEQ ID NO: 38690 - DNA, 682 bp, Arabidopsis thaliana landsberg
cacatggggacattgttttattttgtcccttttctttgccatgcaaagtaattaaaagaaatttgcatgtagtgaatcttctaattacttgaaatttctatgacttaatctcattgagaatttggttggaaattaacaatatttctaaccctttggaataaaactgatgatatattttcactcactataatttatacacataaaataataaaatataaaatgaactatttttgttgactcggccaacgtctattaaacattcctcttatgttgttcaaaatccaccattcctcttgtcttcttctctgattcaagcccattaatccacgaaattttttacttcaacccctatatatatacatacataaacatacatagttgcacatacacttaacataagatactcaaagtcctattcatcatcccaacttcgatctaattacatcgcacgaggaaaccatgatctctagggttttcaacttcatgaaacaatccgaaacagttcagctaaacaacaaactatttctcgatctcctctcttcctcatcatcggccaaacccaaaattttgcacgacgtgttcatcaaccacagaggatccgacacaaagagaaacatcgcaacattgctttatgacaatctcaaatctcgtaacttacgtccattcttggattccaagaaca

SEQ ID NO: 38691 - DNA, 560 bp, Arabidopsis thaliana landsberg
gtgcttcaataagaactggcactggacaacaactcatacccatgtgctgccagcacatggaccaaggatagaactacagcgtccgcttctgcagcaacctggatacagaggaaagcttcttgtatgagatccaagttataaccacagtgacactagatgaaaacactttgaggagtcgtatggatgatttttacaccacaaattaatctaaaacgcttaacattatagggaaacagacacttttatattaattgaacagcttcatattacaggagcaacaactacaagtagcactgcacagagttataaacctcattccttagggaaaaggagaaaagagtcgcgaatcaaaatcaagagtatctgaataacgccaaattaagaatttgttgagtcaaactttactcattcgtataaaattgctgaacctaatccagagaacttaacgcagaagagccatgaatcggaaagagatggaatgatttcacaacaaaatcgagactttgaggttaagaacaaaagggcaaaagaaagaaggcaactttgccatgcagtcaacg

SEQ ID NO: 38692 - DNA, 599 bp, Arabidopsis thaliana landsberg
acggacaagcgctcgtgatcgatcgggttcatggcataactcctcaagatgaattgttgtctgcaaggtaactgcattcggtgtgtggggacagtctttttctcttagacatacacactgtaatcggagtttttaatcacgaaaattcgaatataattaatttccaattcgtaaaaacggaacatttattctgtcatgagcgcgatcaactacaagcatctgcattacttctgggtagtggcaaaagcaggcggcatcggccgcgccagcgaacggctgcatctgacgccgcagacgatcagcggccagatcgccctgttcgaggatgtgctcggctacaagctgttcaaccgcgtcggccgccggctcgaactgaacgatgccggccgcgtcgtactcagttacgccgatgaaatcttcacgctgggcgaagagttgcaggaagtgttgcgtttccgccccggcggctggccgctgcagttgcgcgtgggcgtggccgatgcagtgccgaaagcgatcgcctatctgctgctggagccagcgatggagctgccggaatcgctgcgcatcgtctgccgcgaaggcaagctgacgagcct

SEQ ID NO: 38693 - DNA, 730 bp, Arabidopsis thaliana landsberg
ttagaatagaaatgtaagtggaagggaccgagaataacatatacggtattcgatatcttatattatatgggaaataaaatattgaacccctaaataatcttgatttacatattgtgattatagaaaacgaacctgctttcccatgaatgacgggtgatacgaaacatgaaaaaactttgaaataaatatatttcttgtcggaagtcaaaatgggagtattagattaccacttagtttttgcatacattaaaattaaaatcgttggaaaattacatttgtgatggataaggatgataaggaccatatcaaaagtaatttatgtataatatgaccgagccagattgttagtcccgtttaaccacaatcctatataacaattccaattgttagttattgcaatagttccatttaagaaatatggtagtacaagcatatagaattttaaaatttgatttaaatcacttatattattaaagtatatttattgttttggtcaaacatgtttagagaattctaaaactaaaattgtttgaggtaaaataatttatgatacgtcattttctggcttagtgttttaaaatatggtctaaccggtcgcctaggctccaactaggcattaagcgatcaggtgaagcgtagataaccgtttcgactgccaaaactagtataaatctatttttagtgtatttgtttttaatttcaaactacatagatttaatttggaagtttc

SEQ ID NO: 38694 - DNA, 835 bp, Arabidopsis thaliana landsberg
ctgaatcctagcactatgaggttaaacttcaaaatctatctttaaaatgacttgcttgcatgaagataaaaaagatagaaagttttgaaaggtatggttttccaatatgaaaactttttccttcaaaactttcttgttttattaaacattgtggtcgtattgttagtgctgattatcaaaacgttgagacaaaattgaagtttctagatgaacaaaagaattcctcaaaaatcttaacatgtgtatctaaggagacaagtcagtggagtgggaaagaaaaccaataaatatatcaaaccggtgtattcaatatccggttttgatcttgaaattgtaaaactgatgggaacaactaacaagtacaaatagttggttgatgatttttactgtttgacgcaattttgttctatgagcttaaatgcttcttatgtttcttttttactagtggattgcaatgtttgggtttaacttaactacaaaataagaagttgaaagaaagaaactaactttaaaacagcagagtacaaaatatcaaaatcccaatctgagaactacaacaagaccttaaggcatgttgtgtggagcaacaagacaaatacttcccacatcatatagcctaattgttctgtatttcttcacttatattcttgactaaaagagggatttctatcagatcctaaatcacatctaatcccaataatcaaggctgctacattccatctctgtgtgatgtcgttctctagatatatcagatcacttacactgttttgatcggaaattctcagtggataataacgaagttaccagattctcgagccggctagcgcctggacca

SEQ ID NO: 38695 - DNA, 407 bp, Arabidopsis thaliana landsberg
tatgaaatgtatgtttgtataggcgcatttttttagtcacaaatgacacacatgcaacctaaatatccctctaactaatcatattgttaaaataaataaagctcttcggatatgtaaaatctacgatgaactcgatagctaattcagattatacccgtagttaagaccataatcgtaactgggatttatagaaattgaacccaactaagaaaccctaatcgaaaatgatgagtcatgagagaaatgtaggatcaccttggatgattctctcaacttgcttgatttctggtaaatatatataactatggatgcttaaagtttaacagaaatacaaattcatttggtatgttgtgtattggagcaatcctaagacttgattcgcgggtctagctaggtttgggatgatg

SEQ ID NO: 38696 - DNA, 452 bp, Arabidopsis thaliana landsberg
aatcgcctggaaataatacccagctcgatccaatatttttaacaatcattgattcgattttttattatcataaaaaaaaacaaaaaccgggattgtcggtaactttacctgtgttttctagcacgtacattctgctattgatgtttggccagtacctaatgatcacaacattaggccaagactcaaacatctatggtttcttctaacgatctcatttactttagcttagtcttaaatgaaatgatgccactttaaaaatattaagatcgacatggatacatgaatactttcaaaatgattgatctaccaagaattatccatgtagatcttaagatcagatataacctatccgttatagattcgtactagccaatattgaaattcttgctaaccaattttgccctgaaccagtttgattaaactatataagctatgctttgttacataacatt

SEQ ID NO: 38697 - DNA, 734 bp, Arabidopsis thaliana landsberg
aaaaaaataatttttatctttttgtttgaaagaaaaaataaggggagagacatgattttaaataaatatggccatgggaacatataaaaaaggaggaaagaaatattcataaatcattatggtttatataaaaaagaagaacatgattttatttataaaagaaaaaaggagggacagaatgaaatcattatgtagtagtacgtaccaacactcccataaatgttgaaattggggtgtaatgttcaagtaaaccatagctctgcatattagttttgattgtattagttatattgaaaagaaaaaaaaaatagtaataaaactcatttcaaagaaaaacaaactaaaaaaagagagtagaatgtacataaatcatataactttttatttaactaataagtaattttatttcaggaaaaaaaaaacctgaaacaaaaacgatagtcctgtaattaatgagcccaaacacatcatgatcgtcgcaacctgtaaataagtaattcacagaaagaacaaaaaaacaacgttaattaacttctggttacccactatatattatacagtttcactgattaaaaggatataaaacaaattataaccgttaaaagggatcgtcttccatatttatccacgattactattcctaaaacgcttgtcacagactgcaccacgctcgccatcattactcctacgttgttaggaaaccctacaaaataataaaattgcatattaaatag

SEQ ID NO: 38698 - DNA, 287 bp, Arabidopsis thaliana landsberg
aatgggaaaatctatcaatataatggaatgtggaccagttctgacccatggggaattgtatttgcagtcatggctgtagggcctaggtcttaagcactgcagctatgtagacccggacctggtacatagtaccagaaattactacctggctatccacaggaaaaaatgtgttgtgttctcagaagcccccacactgctcctggctctgacccttttccagagtacacaccttagagatgcttagatctactacagaaccaagttaaactcaacttctgccaagtgcc

SEQ ID NO: 38699 - DNA, 380 bp, Arabidopsis thaliana landsberg
  unsure (1)..(380): unsure at all n locations
tcttcctcagtcccaaacatttggtttagtaaaaactcaggtatcccagctccggtatgcgttaacctgttttcataatcccaatatcctcaatgcactgtttttaacatcatattatgcattctgattatgaatatatctattttacctgatctctagattagcaagatgcacagaacgcccgagctgatccttcctcagggaagctgaaacagttagctgacctccggatggtgtaaagtttacagccatcagcatgaaatctgccaagacttgttgaagcctaatactgtctccatacaaagtgtcagacattactttttctccggtctcatttgttatccgaacactctntccgttactcttcatcattacttgac

SEQ ID NO: 38700 - DNA, 283 bp, Arabidopsis thaliana landsberg
gttgctggtcgcggtatgggtccagacgatcgatatgtctttctgctgcgagatctgcgacggccccatgacgctggtgtcgtaaccgaccttgaagccgtaggtggagctggtgtaggtgtgcggagcggacagcggctgcacgcgcggtggtgggactcggcagggcgccggacagaccggggtggtggggatgagcagcttgcccacgatcgtcaggacgatgatcagagcgaggaccccggcgaccgatatcagccatggttgggctcgatgggacttg

SEQ ID NO: 38701 - DNA, 416 bp, Arabidopsis thaliana landsberg
  unsure (1)..(416): unsure at all n locations
attgtttaagtattttttggtattttgaatatttttatttattcactctaaaatagtaactataatgtttggtatgtaattgtattttggatatttttgagtatctgaaatatttaaattcaacagcggtttggttttaaattttttcagttttcaagttaaagatacattagagtattctagaatttttattcggtttcgattcggttctaaatcgatacttctagtttggaataaatgtcatcctatactattgttttggaaatatgtttatgaaaataactntactctatgtaaatagttattcagaaatgacattgataataaaattgcagagatcatattaatttagctcattaaagattaaacagtaaaatatatttataccattttaattaaatctagaaatgacagaa

SEQ ID NO: 38702 - DNA, 852 bp, Arabidopsis thaliana landsberg
gctcaccgatcttagcctaaaacaatgattatcagtaactctttcttatcgcgtcactcgataaaccacgacgactgatgtggtttatttattggacttttcttgtcagcttacatagaggcccattgcaaaatacaccggttttccgacccgacccgtaccgtttcatccgataatttaatttccatttttaaagtatgttctgaatttgattcttgaccaaattagtaagagttttttttttttttaaacaaattttagtaagtttaaaataattttagctgccaaatttctaaattctttttttctgttaccaaaatttccatccatttttttccgtggaaatatttcgaataaaataccattttaaaaaacatcttcgaataaatatctaaaattatcagttttttgttcttctcatattttcaacttgatgaggattagatttagattcacctaatgattacaataaacacgattaagcctcgttggttttttaagacaaacttacaatttttttgtttttttcttttcttcatcacacactctgtctcaccaacttattcaataaaagcaattggacttttaacacaaaatatattattcaacgacaaaatgatttcgtattaatgctatactatccaaggttcattaaatttgaactagctatatctttttattaaacttatagaatttagattccacaatttcttgatttccatgcacagaaaaaaaacttcaaatagattactattcccttctattaaaatataagatgttataaaagtttatcttttaaatattaaaaaatattttgttagtttctatgaaaattaaatgtttttgataatt

SEQ ID NO: 38703 - DNA, 686 bp, Arabidopsis thaliana landsberg
aaaacgttcaaatagtataaatcaaaggagtagccgagtaggactaaactaactaatctaacttgtctacggaaaaataaaaaatattagattctaacacgtacctgatgatggctctatatatcaaacttattttattggatcattctttttccttattttgaagcaaaatggcaatcttttaatctttgattgtgttcaagagcggaccttgggtaagggaggaatgggttggttaaccaacccccattaaatatatacatatatgctttaatgcatgtacaaacttaattaatcttaggtgacgacacccccactttagaacaattcagtaacagtttctattatataactatttttgagaatataaattaaggttcatattaattcgagttgcagttaacttttataatagataaccattccgatacaacacaggatacccaaaaaagaaaaagaaagcgtatgtttaatatttgagacttgtgtttatacctcaatgataacgcagtgacatatataaatcacaatgatacaaagttaatgagtcacattttcaaaaattttaataacaagataataatgataatgacttttgtatatatatattttttcaaacactcattttgatttaagtagggatattatatatatataaattggaaacggctttttttttttttttt

SEQ ID NO: 38704 - DNA, 495 bp, Arabidopsis thaliana landsberg
ggatcaccttgcgcgtcgccaggccggcagacacggccaccggattgccggactgcgtgccggcctggtacaccggccccagtggcgccaggcaatgcatgatgtcatggcgaccgccgaaagcgccgaccggcaagccgccgccgatgaccttgcccagcgtagtgaggtccggggtgatgccgtacagctgctgcgcgccgccgagtgcgacacggaacccggtcatcacctcgtcgaagatcaacaccgcgccatgcttggtgcactggtcacgcaatacttgcaagaagccattctgcgggacgatgaggttcatgttgccgacgaccggttcgacgatgacgcaggcgatctcactgccgatctgcgcgaacagttgctcgaccgcggcattgtcgttgtaaggcagcgtcaaggtgtgcgcggcgagttccggtggcacgcctgccgagcttggctggccgaatgtgagcgcgccggaacccgctttga

SEQ ID NO: 38705 - DNA, 876 bp, Arabidopsis thaliana landsberg
  unsure (1)..(876): unsure at all n locations
agaggagaaactgaaggtggaccaattcagattcatacaagaaattcatcttctacaaacacgtgtatgtcttagtctaaataggaagttaaggacatatataacgcacctaaccttataagtttatgttctctacatataaatacaaaaatttatcaaacttatatgagtttcgacgaccaacgaaaagatcaaacgaaaagaaaacatacgttgtttggtttggttaataattnaggttgttctctagttctttgtatcatcaaacacaaccttcactcgattaaacaccgtttctagattttttttgatgaaaataaaccctcaatttaaaaattaaaaacggcaaaacaattactaaagctattgtagatgtagatgacccataaaaacaaaaataaatttaaaatatcctttaaataaatctgctacaagcaaaataaccatgcttatcttcattttgagttgatttttctacttactcaagcttatgcttctgcattagtgagcctaataatttatttttcttaatgttgccctcagaatagtagtttaaaataagcaaatctcttaccaaactttaaaaaactgtttaaatgtacatgtaaagaaatagtattattttggtaaataatttagtaaggtaggatatgtcagtgatttcggatgaatcccaaattttccacatttaaaataaattcctatataatatgatgttttgcaactgttataaataaaaatattgtaattttgcatttgactaaattctttaaaatattattttactaaattttcggtttatatttttaaactaacatattatttaaatttttttggtaagatcctttaaattaacacaatagatttttttgaaaa

SEQ ID NO: 38706 - DNA, 594 bp, Arabidopsis thaliana landsberg
  unsure (1)..(594): unsure at all n locations
ctcagagatctacatattcccacagatttttaaactgacagcatataattctgacttctcgactaataaaacactatattaatactgcctggattactatgggcattatttttgtcgctacttgccaaaaaaaaacaaaaaacccttgctatctaatttatcaacaaacatataatgtcacgtaattgaagagattaatgacaccaaaaagaatgaacgaaaaagaaaaagaaaaaaggaagtaataatgaaggactataactttatcgcatataatgaaagaagtttcgtaattaagacatttaaaacaatgattatattaccattaacttttcttttagcattaaatcttctaagaaaccacatgtttcttcgctcttaactttttacaagcccaaattattcttctgattttgaaatttgacctaacgttttctccaacttgtgacttgtccttacgcgagttttttcttttttcctgctatttttgtatgatatatcacatgncaacaagttgtatggaaattaattttattaaattcgatcgggactttatcagttttcttttttgttttacgtcaaattaagacagag

SEQ ID NO: 38707 - DNA, 586 bp, Arabidopsis thaliana landsberg
gctttttgaaaagaggaaatcaagcctatctcctcccatccaacctctagcctagatctataattcgttcgaaaaagtctggacttgtataaaacaggagatttatcaaacaacacacaatagcgttgagaggctgatcgaagcgataaaatacaatcattccataaatgtcaagtctcaaaatggtttaatcaaccattatatgaagactttaaggatgtttacgattatggcagtgaaagttcggtaaaaaatttttccacggcgttttatatttctagacttgcactttttctctaaaagattatcttctaaatttctaggtaccaatgtttagctcactatagatttatgaattcgaaggccttattttgcaaagatgatattatctcatagaataatctgtatttgttgatctaaactatctaaaagatgttctagtttagtctgagaaaaatgaacgaataaaaggaacattatcataatgggattttattgagtttacaaccataaggttctttgagcagcctcagtccgttcagaacatcattcgagtgcatatatattattataaatatttcgtcat

SEQ ID NO: 38708 - DNA, 532 bp, Arabidopsis thaliana landsberg
gagcgacacaaccgcctggccgagctggtggcgctgcatgagcaggcctccgccgactacaaggccgccgaaaccagcaagaaggccatcaaggccgagatcctggacatcatcggccccaatgccaaggtcatgctcaacggctgctacatcagcgccagcaccacgaaggacagccctggcaccctaatcgaggcgcacatgatcggccagcgcattggcggtcggaaaggtttccgcaacatgcggatctatccgaccaaggcgtagcaccacaccgcactgcaccgcacgacctacgaagagaaacagagatgcctagaacgattgatctttctggaaaaaaattcggccggcttaccgcaatggctccagtcgggacagacaaacttggtcgcgttcaatggcggtgcgtatgcgaatgcggcggagagaaaatcgccccagcatcgtatctgagaaggctcgtaactaagtcgtgcggatgcctgcgcgtgaaaacaaaccttcgcgcactattgtgcacgggctt

SEQ ID NO: 38709 - DNA, 705 bp, Arabidopsis thaliana landsberg
tttttcttcggtctgtacaactgcacgtagaaaacgccaaggagaaaggaaatttttacttctttataatcacgacaagaaacaatctgatatgatcatataaactaatgtaatgtaatttgaaaaatgacaaattgtttgacacgttaaataggtttggtttgagtttatagattcagttcatttacttggttactaaacaaaaacattcatgggtgtgcggcgtgtgctgcacaaacggaaaacttagaacagcaagatatatgttccaatgcatggcatggtatagggattcacgttctatatttaacgaagtacaaataaccacgtctataagctattttaaaccaccgatgcatatgtttatgagccacgaacaagaggactaagatatgtactttctcagaatttagatcactgtcatgcttaatatataacagaatacaagaataatctcaacggtcatggttttacatatgaaaaagtccatttgatcgtgccaacccttcaattacttggttgaattttttaaaaggtggtttaccacgtccaatgctatatattcgtattttagtttaaataagctagctgacaaattatatatgtgaaaatgattacctaatacacataacttatttatgatatttaaactgaactagagccacaagctccaaaaagaaaaaaacccataatctaactaattga

SEQ ID NO: 38710 - DNA, 342 bp, Arabidopsis thaliana landsberg
gacgggagtgtagctaggatcccagctaacaaaacatccggggattatggagctttttgaccttatagacactctacataaagcatgacgggatacgctccttggaccacaggatgctaagccggcatgaaagtcccagcctgcgatagcaaaagagaaggggtggaaaggacactaagagccgagttatcgtcaacgaccccagagcgctaaccgaccaacggttatcaccgctgacatgatgaggaggagcgaaaaaatcgtattgacgttcccatcggagtggacagcatgtccacagaataatgcatacaccttccgaacatcctcttagaaaagtat

SEQ ID NO: 38711 - DNA, 757 bp, Arabidopsis thaliana landsberg
aatttgctgtaaaatagctccaacccttgaagacagaagcccagtagtaaatcataacgacatctgaatttatctctctcaaaagggtaaaacacatgttgtgctttgacgttcaatagtccaatgccacacactttagaagacctaagatcaacagctacatcacaattcggtaaaaaaccaacatcagtttctttatcaaaacccccaaaatcattgtgaagactttccatttcaatcattagaagtgagatcatttaacacaagaaacctatcaatttctgcaatcaattgatgataaagtaaatagaatcaaagctttaaacttacagctggaaacaattttgcagcgagaatgaagagaagcagaagcagatgaagaagaataaacccacaattcaccgatgaaaatcactaagattcctaatagaaacgacaagacgacgaagctaatgatcgagaaaactatcactgtacggaatcgcaaagctaacgaagagaaaaccctcttttgcttctttgtagtcgttaccgacgacgtcgtttcttcggaatccatttacactttcttctccggtgacggtgagtgagttttactcagaacaacaattcgaagaatccatttctcacggtgatcgaaacgacggacgccgggacagcaaatctcagcgaatgtcatattttttcttgcaactgcgcctttcttttttttcccttccgcgttgagtcttgaaatatgatgcgagtgtgttaaatg

SEQ ID NO: 38712 - DNA, 160 bp, Arabidopsis thaliana landsberg
tgaatactgaagacggacaccgaacaaacaaaggacccaaggaagggataaagagctttgacttttccgacccaagaacaagctatatggagactgataaaggacgatactgcgtacataaaaactgaaataaacttacacaaaaaaccaaaaaaacgag

SEQ ID NO: 38713 - DNA, 485 bp, Arabidopsis thaliana landsberg
ctgttttcctggcttcttattcgctttctcctatttaatgtttacaaggacagttagtaaccaagagcaaggaggacaaatatatggaacttagaactcttgcctacagtttttgcatacacacacctgtattgaaattgatgatgccatgttattctcatttgcagttggaagattctccatattggtttctttcatcgtcgggtcaacaaacttgagtctgtaaaataaaccagacaaaatgaatgcttctgtcaggagctatatgattcgctttagctgattggttgaagatttcatattctaattttgaaaaagtacccaagatgatcatatagaagcttcaaccaaggctcggtcttcaggtactctcctacaattgagacggaatctaccactgtacagataaaggtgatatcagtgaaaagacatgtcatatcacctctttaagggtcaaacttcagcaagtaaatgatctctggtct

SEQ ID NO: 38714 - DNA, 722 bp, Arabidopsis thaliana landsberg
  unsure (1)..(722): unsure at all n locations
gtcaggatatcatttcgtctatgccagaaataaaatatgatgagagggaaaaatgttaatagacctgagaaagttcaaacccattaggttcaggtgcatagatatctaaatcatgtggaggagaaggaaaggcttcttcttcttcaatcactgaaaggtttagagactctggcgtcccttcagtgcctgcaagacccaattactataaatctagaccaaaacctgctcgcactgactacggaacaggaggagagagctatttaccagccatttcctctggggtgttcatccactggtccaccagcctcttccactctctgtgcatcccatatataaaaacacaatctttatactcgggagccagaaagtaaggaagagtaaaatgttctaagtattgagctaacacaagagcagctccctaatgatcaaccaaggcttttataatgacattttacaatttgagacatcctacaaggcaactggtttgcatctaaatcaaaccgtggaggttcaatttttttggaacattttgccaaagtttaattcacatcacagatgcgagagtatgagaacaaatgaaactaagcacacaatgagaatgatgaaactcatacgcgaaaagagtcnttgcaagtttgctaatcttatcggaactatgtctcctcagaccattaacagnctttcaaattcagtatcctgcaagacgtaaacacttaaatact

SEQ ID NO: 38715 - DNA, 678 bp, Arabidopsis thaliana landsberg
attgttcttaccgattattatcacatggtgaaaatggtgtttcccctttaaaatagccaaacttttttgtttatttggagtaagtttataaccacaaagatgaattttatttatttattttcatgtttgatttgcgacgaatgttaaaacatataatttaacactaaaaatttgtactgaactgcaatacattacatatataaacaatattttctaaaaattggctcatttattgtaattctattcagttctagaaaagaactcgtagactcaacgactagtaattttaataaaattacgttaatttcgtattttttcttttttcttttgtcatcagatattatttagggccaatcttttaggaatcgcgtcatattacgttaatttcgttcaatagcgcaaaaaaaggtttcgatatctaaattattgatacagttcaaatcataataaattcggaattcagggtttaataaatttcggtttacatagatgaataatcggttcagttgagagtcgtgttttgtttaaaaaaatggggagaacagagaccggcgacgaatcgtcggcgagaaagatgcgacgtaaagtacccacgtcgatagaatctctagacgccgatatactgtgcatcatcttctcttttcttgatttgttcgacctcgttcattgtaccgtcgt

SEQ ID NO: 38716 - DNA, 571 bp, Arabidopsis thaliana landsberg
gccctgtggctgatttttttccctttttttaccgagggatatttttttatctgagattttatctcagtgtgttgggagggggtaaaggcttatttaccccagagaaaatcctaagaaaaaacgaaattatgtatttcattttcgtctttcatgtaaggttcaatttgtcatcataaataaatattagtagtttagtataaacttgttaagtcttcatatatcacaatcgatctaaatttttcaccaatgtgcatttcgtacgttgatacatacccacaacgaacaacgcataactgttataaaattaatttatacggccagcaaaaatgatcatcaaagtctactatctacccgtaatcaatgaccaagctgatttgtcctgtctcgttggacatatagaaaaagagagtagatgatcaaattgattttaatcactatttacattttctttaacagaatagtattatatcaatacaataataacaaaacttgtaaaaactcagatcttaaagaccagtaaaaggttgatacattagctttaattaactctacaattatgttttctaaaaaa

SEQ ID NO: 38717 - DNA, 520 bp, Arabidopsis thaliana landsberg
aagtttcatggtcagaaatattcctaaatgaagagcagtctaccaccttcttctcttttaacaatttctaatccttcgcaacatcttccgcgtgcatcacaacaaaagtaaaagatcgtacatgtgtcatttaaattcacaaaatttaatctctagttttaacataaaaagtcaatactaatgtgtgtctattacatatagtatgttcttgacctcgtggataaagcaatattatagttcactttaatactatatgatataatgtcaagccctttcatatgtttaacccaattatttgtctgatttgaatttagtccaaaagttgagacggttgtgagtcttgtgacttgacaaaatgtgttttgagatcttttgtttgggatcggagtactatattaaaaaaaaaatcataagaaaataaaagaatctttaatactatggaataagataaaaaagagagtggtataatagtaaagtaataagtagaaagtgattcttgaaatggaagatccgtaagaat

SEQ ID NO: 38718 - DNA, 1343 bp, Arabidopsis thaliana landsberg
  unsure (1)..(1343): unsure at all n locations
gcatgtttatactatgaaaatcatatatgatataaccaaattgtttttttctaatcgattaaactaactacacgggaagggttatatcaaataaaattcctggaccataaatatgtatctgacgttttgagttagtacctagagaaggatcaagattcctaatcttgagctctctgtattcttgacaaagagagcaacaagggcataggacatgactggcacaatctgaatatggagcttccacaagattaaattttctcctcattttttccctatactttgatcccatcacccagtgtgagcataaagccggcatcatcaataagtacatgaaagttccaagaggacaagctgcataaacaacggaatattagctattaaaaacatcatatttaatgaagaatctgatttcggtttcaaattgtgtaaagcagaacatactcatctctccttcatccatcacttctgctatttgtccaaatgttacacaaggtacaattgtggtcaaaacggctgcacaacaaagtttttaaagattagtgagtcaattaattctgaatttcttgcaagaaatataaatatctataatctcgtttaaaagtgtatttgggatacaataccattggcttggtctgcttgacaatcaaacaaaccagtgctccatggcctcccaacagataggttaacattagcttgctgataattcggcggcgcgaattgactcacgggaactctggttcgctggttcggtgtaccgggttgctgaaccggtaaaccgttgtttgaatcctcctcggatggagtagtgacacgacccattggttgatatgttaagtgtagcaagctagttttgacgtgaagggttgatttataggagaatttgagaaggagaaggattctatatttccttaagccatgaaattaatcaaataatattcaatagaaaaattgagtttttcttttgatttaacgaataaacttctatgctgaaaagaaagaagaaattttgaatgacgtagttcacatttaagttttgacttttcaacggtcgatatgtttaaagtcaatggatacccataataatactgagtaaaggtctcaatcaaagtcaacgtctcgaacctatccttttgataatttattttctaaaacaagttgcaaggaaaaacaaattaattagattcattagtatactcatcaatacatagnatatatatatatatatatatataatattttgggacaagtagtgttttggatagataccaatttttttttttttatagaaaaatatctatttttgtcaacactcaaaatttaatcggaaacttatgaattccttt

SEQ ID NO: 38719 - DNA, 801 bp, Arabidopsis thaliana landsberg
cattattaaagtttgtatatataatgatggggatggcagagtagtaatttgcttccttggaaacatggataagcaactgttttccagctgcgaactttaggcacttaattttaaagtcacaggtatacactacgcaaccaaagcaagatttcgctaataataattaaaattgcatcgaatctaactaaagaatctaaaaatacaagtatacccagtccccaacgttgtgtaggacgatatatgattataaagttttagtttagatattacataactatagatttctcataaataaagaaatcttccgttcatttcactaaaatatcgttcgaacaaataatacacagattaatatctaaacgtaaatcatataaacaaatagtgtaggatttaattatagtagcattttggcaaacacaaacagacaaacaaaggaagaggcagcgtgttttccggtagagaaaagacggagagagtaaaagccgaagttgtaaacgtggcaacatattgaccgcaggatctaaaacacgtgatgatcaacggtaagatatatcttgaccgagaagagttttgtgatattaattggtgtaaggaaaatctggaaaacaaacaaaaaagaaaagagagacagagaatttaataagagaggaagagtattaaggtgatggcggcgttgcaaagcgcgagacagagaaagaaacctctctgagatacatctctctctctttctctctaacccctcttaaaacacttcataccgacaaacaaattttttttcggaccaaaagaaaccttattcga

SEQ ID NO: 38720 - DNA, 1261 bp, Arabidopsis thaliana landsberg
aggatcttattctcaacgattcgaattgctcaaatcatatttttaagtccatcaccggctccaggggcggggtacaatgataacgacaatattgcgccaaccgtattcgacgtgacttcatttggagccatcggcgattgctcgaccgacgacacgtcagcattcaaaatggcatgggacgctgcatgtatgagtacagggcctaagtcagccctgcttcttgtgccttacactttctgtttcttggttaagccaaccaccttcaatggtccttgcagaacaaatcttgtactacaagtaagctaatttcataatcatactttaatgttctgtatatagtttttcatgtacggaaattttcttccttatagatcgacgggttcattgtatcgcccgatggaccgaggtcatggccatcgaactaccagaggcagtggatgatgttttacagagttaatggattatcaattcaaggctctggtgttatcaacggccgtggtcagaaatggtggaatcttccttgcaaaccacacaagggccttaacggaacgactcaaaccggtccttgtgacagtccagtagtaagccatcgcctcagaatcacactttttcttgttatgaaaaaattagtgaattacatttgctaaaaatgtcattttgattcgatatcaggcgattaggttatttcagagctcaaaagtaagaatccaagggattaacttcatgaacagcgctcagtttcatgtaaggtttgacaactgcagtgacgtcgtggttgattccgtgataatcaaggcaccagcttctagtcctaacactgatgggatccatattgagaatacacacaatgttcagattcacaattccatgatttccaacggtatgttttcccgttttcgcagttgcttaatagtaaaatttcattgattccaatcagttttatgttacttatttggctataacatgagatgattgtatttctatcggagcccgctgctttaatgtcgatattaagaatgttacgagcgggccaagccatgggattagggatcacattcataacttgcattaatatttccatttgccaaactctatgcgcctatcttatagaggaggctttagattcccaacctttaaggctgtgcttctcacaaagttttgttttttcgggtcgaagagtgaacaacgaacctatgggtaatgctgcagcataagcagccgttgaggccacaactcggatggctatgcctcgaacattaca

SEQ ID NO: 38721 - DNA, 402 bp, Arabidopsis thaliana landsberg
taaactttcatagtatagtttaccttacaatcttttgctggatgacaaaaactgattattattgttttgggacttggattgggaagacgtaagatgtataaacacattgtggttcaagctttatgattcatatatactcgtttttaaccatacatatatttctatggaagtatactttcagaagtatatatgtataaagtccaccgggcactacttatgattaacattactttatctctatctacagaacaaaagcactggagaacttagtttcttaactttcttcatgaactttgccgggtcaataggtacgaaggctcctttgtcggatgtctcttctagtttccagtggatatgtaataatctgtaatctcataatactttttttgtttccctcgcagt

SEQ ID NO: 38722 - DNA, 465 bp, Arabidopsis thaliana landsberg
aatcctctccactcatcatctggtacgtttgatgattccaaatcagaaacattaaaggacaagaaatgttcgaatttttgattgattctctctgattttcaatcatttggttgtagaagcaaaagggtttggttcattcattctctcgtgttgcccttatttcggattcggatagatttggagctaaattaggggttttgacttttttagtttctcccattcaataaatttcgaagcttgtgagggaaagtcttggtttttattgtcatttattactttgcttcttaaagcttgagagatcgattcgtatattgattcaaacacttgacagttgtgtcttaaactggaattgttgcaattaaatgtctatgttttcaatgagtctctctagttgagtttgatttcagcttcttgtcctatgaaggcctgcctgagacttaatcatcgtcctcttgtgagagcttt

SEQ ID NO: 38723 - DNA, 980 bp, Arabidopsis thaliana landsberg
ttataatgtaatatattattacaatattcattatatcaattgttctcatattgtatagtaatattttgaagtatattattaaaaattaggcttagttcataagacactataaatgtcatttacataaacattggttagttttaagaaaacgagaagccaatatttatttgttccaaaataatactcgttttaatggtgtattatactttcttgcaaagtatatcccatcgattcttgcagcccaagcgcgtagttgaccacatcgaggaataagtcttggtcgtgctttgtatacttcaacatcatatgaatactccatgctattgttaggtccttgccttaaaatacaattcctttttgttaaattgggtatttcatcatggaatttaattgtaaatggagtggcattaaagtctaatcttttcacgcctagatcatcaacattggagtaacaatgatattcgagaatacgaccaggagcgagtaggttaagaatcactacatgattttttatgcaagcttgatttagcccaaaacatgtaatagtaactaacattaaaaatatggtcactaacattaaaaatatgggattattcatttttggatataaactattattggagtaagaaggatatcaacatgtagtatttataattctcttttttgtgagatattttttcactcttttctttaattactagataatcgttttatgattttagctaaatctaaacataaataagaaccaattaaaacttgtaacggttttagctaaagcttatataataaaataaatttttttgtaaacacaaattttgagaagctaccatttgcctctccttttgacatgtgttttctttttttctcaaatcaaaatatttatacaataatatgatatttattaaatttaggtatattattaaacccaaatttatatccaaaacacctttttcctaaatttgtgttaattccattaaaaa

SEQ ID NO: 38724 - DNA, 699 bp, Arabidopsis thaliana landsberg
ctcctaacttttcccgcgccgagagaaatcaattattcgattctctcactgaacttttcttttcttcctcagcacttcaatgcatctatttcatcaattcttcttctttacaagttttgaattctggaaacagagtcgcataatctatcgttgcggatgatgcatgaaacagacagagatcttcacatctctgatggtaccatgaacaaggaagagcagagcccaaataatgaagagatggttgaagcgtttcgcaacttgcttctcctccatggccacttacctgataagcacggggatcataatacacttcgcaggtaatcttcaaaatcatcctataaccccaaaatcaccctggttgatttttcttctcaaaatgttaggtttcttaaaatgagagattttgatctggagaaatctaaagaggcttttctcaattatatgaagtggcgagtggactataaagtggatttgatctctcaggtgagttaaaaaggcgatcactttttcttgtttatgtttcgttaactaagattattagcttactcacaaggtgttcgacgaaattgtctgacagaagtttaagtttgaggaatatggtgaagtcaagaaacattaccctcatgggtttcataaggtagacaaaactggtaggcctatttacattgagagactcgggatgatgaccttaacgcgggt

SEQ ID NO: 38725 - DNA, 592 bp, Arabidopsis thaliana landsberg
ggagacaaccagagactgaagttctacttggtctgccacaagaacagacaatatttaataacatgcaacacaaccatcagcctgactcatacaggttttgtgactcaaccgaatttactctgttcttctcccggaatttccatattttctggtgattctgttttgttaaattctgcagaaggaagaaaataaatcaaacatttttcacttcttcaaaacatgagtaaatgcaaaaactgagatatgtaaacacacagcaattttttgatgaactggttttggctgtgtgatctttgtgtctatgcaattacgttttagttattctctactttataaggagagatgttaactgaaactgttattgatcatacaggaggaggcttagtcttgaaaacttacctggactatacaacatgtgttgtacacaactcttggctctggccaatgccacagacgacacaggttcatcaattggtgcatcatcatcatcgttaagctctcagcatacaacggattcttggattaatagctggaagatggactataatccgtggactttgagtaaaatgcaaaaacaacaatgtgagtaaaa

SEQ ID NO: 38726 - DNA, 490 bp, Arabidopsis thaliana landsberg
taatatgatatttttgtcaaaacattttaggtacatgactccgaataattttcttacaaattgttattttgtgtgaatatgataaaattatcaccaaatgtatggtgaacatgaatattacttaaaatttggtagctctaaaatagaaaacaaaacataaaggaatatgggttcatgtttgtatgatcggtccacacattttccaacggaagcttaaagcaaaaaagttgtgccacatgtccccgacctttatatgatatgacaaactatccaatttactaaaataccctgcatctccatttcttcagacacatactgtaatgtttttgttcctcaagaaaattagtcaagcaaactaaaaaatctcaaaatatataaaaaagactcttcgtttaattctggtgtcgatctgtcagtggataattgtttgtttagcgctgagagtcagtttagggtataccaacagaaacgtgtttttgaagatggtgga

SEQ ID NO: 38727 - DNA, 565 bp, Arabidopsis thaliana landsberg
agacaacaattaagtttagccaaacataggccacttgttaacttaaaaaggagaaaatctgtgttgtcaataaaaataggactcgtaataatgacaaaagatttccaccttataagttataactaaatgccaaatgtacagaaagatagtcaacttttttgttggcaaatagtcaatttgtttttgaaaaaaagaagaaaaagatcgtcaactttttccatgttttgattaaaatagtctttacatttaataaaattatgttaatttattaaattatatattaccagaccaaataaatcgattaattaatgctaatttttcttatgcatttatttttgagaaaaatgtgcggaacatcaaattgcaatatttaaaatataaaaaaatattttaaaactttttttacttcaaaaaaataacatgtaatctcacttgcaaactcatttgtatacctaattacaaaaaaaaaaaaaaaaaaggtatcgcacgtcaacgcagttgtataagaaaatacgttatcttttcaaatctctcgcgtaaatgcatttatgtatctaatttaaac

SEQ ID NO: 38728 - DNA, 837 bp, Arabidopsis thaliana landsberg
tctttcctctcttcttcaattatttacgttacaccttcttgttcttcagattcgcttctctttcttttcctcgaaacgattcagattcttctcccactatgcaactattggtttttgagttactcaaatcgagaaaccctaatttcataattctgagattttgagctcaaatcccaaatttcgaatctcactctgttttttcctctgtaatttctcagatttctaccaatggaaccttcattacaaagttcgagactttttattttctgcttcgtcttcttcttcatctctgcttctatcttcgttgactcaaaatcacaagattcttcctcaattactccaccaccaccgcctcctccaccgccactatccttatctccaccgccgtctcctataacggctgttgagagtaacaaggcgattcacgagaaacatcaccaccgaagaaagaaatggagacagagaagacaccataaacatccaccaccgcctcctccgaagaagcagaaggtgaacacaggaaagacggtggggcttttcttcgccggcgtagctgcagctttgcaagtagttgttgctgctttcttgattttcaaaagaagacagcttcttcttaagatcaatgattgacactgacatattccaagcttgttgtcacagaaatcgacattgttgaaaagagcttgaaatttagagttaatgcaatctcaattttggtccttttaaatctgtaaatttatagtcttttgacttaatttcaaaaattgttctttatatctgagttaatccatataaaaataaaacactgaattttggggatgattgttgatgcaataa

SEQ ID NO: 38729 - DNA, 918 bp, Arabidopsis thaliana landsberg
aagatttaacttatgagctttgcggtgtatacgtataagatactccgcaaaagcttttgactcgcatatgagaatgcttcatggacctctttcgctatattgggtcaccggtctgcgtcattttagctggaaagttcttcgcttatgggttcaaaacttcaaatgctcatataatataaagtacataaaaaagtgaaactgtataacagtcttttatcaaatcaaagttatcgctttgttgaataatatctgtagtttaggcaaaatcttttggcaatatgagttaaatatgtgaagaaaaactagattagatatgctttaacaaagaaaaactagattagattaaatggagagaacactaaatgcaacttctcctaaactattactaccactgccactttgtttttaatattcacacccacacgcatgcacacatagctttgaccctttgaccactcagtttacgattttacccctaatgtagtaatttcgcattattattttatttttacctttcatatcttaaccggatgtttcagagttagtcaaggttgtctatttggtgttattttaaagttactctaaaacactatttttctgttatctttcaaaaagaccaattaaaaaataaaaattataaacattcctacaccattctaaaacattcttaaaattttcatacaactgattttgcaagctttccaaaatgttatcttaaccgattgcggatatgatatcgtacataattgtatggtttattgttcttctaaatactacagaagttagaagtgtccatcgtaaataagaaaaaaatattggtaaaatatacatattaattttggaattattaactataaagctttggccaattggaagtgaagattgaatgtactaactaattgaacaaaatactgttta

SEQ ID NO: 38730 - DNA, 742 bp, Arabidopsis thaliana landsberg
  unsure (1)..(742): unsure at all n locations
tctttgattggttgactaaccgaaaaacctacttcgactcttcttgttgggtagttatgacttgtgtaagcttatgtaagctttcaaagacttgtgtccaaagtggatttgttcacctccaaacacttagtcaactattttaaccataaacccatatccataaagcttaataaattttttcctaaaagaacattttcatggctctactattcaccaattattatagcatttttaaagctggtaggtaaactagatttgggtatccataaaaccttagcattggatgtgtttgaatcttattcctcggtttattttaattgaagtagatggttaattgtaaaactataattggcaggctagagctagccgcccatactaattattaattactaaatttatctcntcgagtagtcatgtagtctcacgactaatcttgatatagagagcccacttgaggtaaagatcatcaactaataaaatcatcttaaaagaagttcgtcgaaccttgggttggttggtgaaggttgttaagaagaagtggcgtcgttggtcgttcgattttccttatttttcaataaaattaaaaatatagagagagatatggattatgggatagttgacgactataattaataaatgttactttttcttctgcccatttttatatcatagttagctagagcttttaaaatacaagttttcacaaaattatactcaatcctcgaaaagttcttgtttctta

SEQ ID NO: 38731 - DNA, 673 bp, Arabidopsis thaliana landsberg
ctcatttgaacattaaaaacattaatgtcatttgattggaagagtttattaatgaccattatttccttatttccaaacctaataaacccattatttccttatattaaattatggcttgattggtgcaatttctttctagctctttctgtttccgacttgattcgaataaaaacgacaaatgttatctctacccgtatccgattatgtttaatatattatgcattgatatttcacgctacgatctggaccgacgtttagtgtggaccctgtcacgagttttatctatgacggaccaaaagaaaaactaattaaagcagaatatcaaagttagtcgggtaagttccaactaataaccgagccctgtttggctttgagcattagtagtaatcaaagtaaacatatgatagaaaagttattataatctattatatacagattaatatgtacgattccagattctatttatgtttctcgtatgtaaaacatataatgtgaacctacttaaactatactaagactattagtttggtttcaaattagattaattagtttaacccaactgaacatatccctagattgtaaaaatctaatatatccactaataaattttgcttgccgacctctaatccacaactttttgttttttccatttccactgatttttaacattcca

SEQ ID NO: 38732 - DNA, 1615 bp, Arabidopsis thaliana landsberg
  unsure (1)..(1615): unsure at all n locations
ctggcttcggatactttgcctagtagcatgtatacgttctcctgtatcaacatgagtagattttagcaatccttgctttaaaagtagatcctttagtagagataatgtcaggtctgatcaattctttaacaagtttgtagttaccggtaaacggattgttctggagttttgaaatatagactttcttatggattgtcgaatccaccagtaagcgtaagtagcgaatctgcatccggattgcggtttgaatttttctacacttttcattagccccatgcttccttcctacgaaccattagataagcataagaagaagcatcaagagaaatggacatcaagttagatcactctatcccacaccaaaaaatactgaagagctcgagatatttttacaagaaaccttttgtgcctacacaaaaacaatgggttcatttgaagctaacctgcaataagtcctgaaagttgagtccacgattctgatattgtttagctatatggactaccagacgtaggtttgctgtaatcaacttttcccggctgcttctccctcggtggatatcagattttaagacaggggaacttatccccatagcttcagcccactcgcctattgttggttcgcagccgttttgagattcaagtttagtctttaccttctccaactttaataaatgctgatagatcaaagattatggaagttagcaccagggacaagaaggaagtccaaggacacatgaataaggaaagcatgaacctgtatatgtgatatcagctcagcttcttctttagcagtcagaagttgttttgtctcaggtccccacaagaagagctgaagcgcatcatcattatcagccccttgtttatactttttcttcgcactagttttctgaggaacataaccctcatcgtccacatcgtttgattttggagcccgtctgttctttgctcgtctctctagctgccgcttcgatcttactatgtttcccttttccggtaaggacatagaagagctaaaaccaaacatccagaaatacaaatcttttcacattacagcccacaagtagcagattgataagatacacaaacaaggttaaaaaaagcaacctagtggagagagaatccttggtgttgtcagatggatttgcttcagtgtcatcaactaacaatgcagcttgttttgaagctgataaagccttctgagctagtgcaaccacatcacaaagctctgcatcagctaaaggagacacaactgccggcaatttcgtttcagatgttaaaggagatattaatctgcaaacaaaagaaaggctacatcattcagaaaactcaaaaggttgtatgaaaactgaaactggtgggtttaagagaggaagagacattacaaattccataaaccagtagagtgaagaagttgctgttcaaatttctcatcttctcgagatgaaaccaattcatcaaactgcctcctctccagagtcaactaaaaatgcaaggaacccaatcgcattaaacaagaggactagaaagttgacaactttatgactgattcaatctcttaggacaatattgctgctaataaaacacacctgngatgttctatcgtctcttaacgcat

SEQ ID NO: 38733 - DNA, 670 bp, Arabidopsis thaliana landsberg
ctcttccgaaacaagcataaggtagatatgtcaaagtttgcgttaccaaagagagttaacacaacaagggacctagttatgtctaagtgactaattttacatttttcttttggaaaattaacatcacaagggatggcaggagaatgagaaactacctgaatgatgcccttaactctccaaactccatgcctgaacacaacgatctgcgggtcatcaggatgtaagtccttgagttcccaacgaatatcttcattgttagcattgtgttcagtcgacagctgaatagcagagagtccgccacagttgcctttctttccaagaacaacccgtgaatctccaagacttgccacaaaaagagtattttgatatatcactccaaccaaacaacaagtgccaacagttgccaaatttggtatttcttgccacagctctgacacaatggaagcgaatccttcttctgtcgcatgaaaggctctttctatcgtctctctcgtcacaactccttgtgtttccgctgatatttctgcataaccataaagcctgagcaatcaaaacataagagaggctcaacctcctttcataattacagtgcactcctagattgctcaagcctggtaatattcatgacactccaccatcaatgcaaaagccagggacccttatctaaatg

SEQ ID NO: 38734 - DNA, 552 bp, Arabidopsis thaliana landsberg
gtactcatcgccaaatcttttgtcttactagtaactgatttatcttccatctagttaaaaataaccgaaaatagcacattttctaagttaataaattttaaaatggcgtaacttcattaaaaattactcactaacaaccccctttgtctcagtgagcgaacatctatgtaggtctgtgaaattctgaaaattttgtgaaacctaattttactttggacaaatttgacagtaagtgccattttaaacttatgaaaaaatgtgtttttttttttttttttttctctggtaaaaccgtgtttatgttttttaacttttaatgcgacgagtcatcgcttctggcaattgaacccctttttttaatttttagtgttaatggtatctccccttttaatgcttttaggttctattgtttggttttgggtatttaattttacatcagaaaaaaaaaaaaagaacgagtcttgctaattaagtgcctgcatgataatgatatgtcaaatgaggatcagatacgtagttatgttaattttctttaggtttggcgttttgata

SEQ ID NO: 38735 - DNA, 801 bp, Arabidopsis thaliana landsberg
  unsure (1)..(801): unsure at all n locations
ggaatcaaagcataaattattaatattacatgaatctgatttttttttacatgtaattgatttggggggttggataatcaaccagttctggaaatccacaaccaaatgaagaatctcaaagaataacaattttctacaatggaaaaatgtgtttttcttcagatgttacccatcttcaggtatgtaacacattcatatctgtgattttttttttttttgggtggatttatgaattaataatgtttaacgaatgaatatgtaggcaagatcgataatatcgatcgcaagcggagaaatgaaaaccaagtcatcctcaaacgggtcggatcctccaaacaagtcgacctcatttcatcataatcagcttccaaatccaaaagcatcaatgaaaaaatctctccaaagttttcttcagaaacggaaaattcgaattcaagctacttcaccgtaccattcacgacgataatgatcattttattttatttagcagttttttctttgtttgatataatcctaatggactataattgtaatgttttttttttactgattagggaattactcctatttatattatatgattcatccgaagattgattttgaaatctgatttttttgttcgtatatgtttgataatcgtgactaatatatacattaaaccaaaccgatgttcttttgtataaagtatgtaaaataggacgaactaggttttgtagttatgagtccaattattgtttaagttcttgactattcacgacaanaaaatgaaaaaattagttgaatgttaaagaatataatttc

SEQ ID NO: 38736 - DNA, 567 bp, Arabidopsis thaliana landsberg
  unsure (1)..(567): unsure at all n locations
gcggatcagatgatcgttcaagaggaaacgcctgcaataagcccaagatgtcagcaaatactgagatgtaaccagaaaacagacaaaaatcataagattcgagctgtctgaaggttatcacctgaagtcctgaagtatcacagggcgggtagacccgtgtaatccgttctggaattctccaaagcacttcgatatgggacttagtccacgaagagttaaccatagctaaatgagtacatgacccaaccatcccatacatccagctaaaagctctgtaatagactaatttgcaagtagataaccaattgctacacaaaaaaagcaacaaacatcattacactaaacaaagaaatagaaacttttcacttttgaaaaacaccaaataagcaaggagataaccaaaacctcttagcaatggaagcatcattgttatacatagagttcctctgacgaacacgagaaatcatatccaaactaatagttggataatgagtatagcaaacaactntgcaaccaaagatccgagcaagaggatatgtaaacgcatatccactagtgtcaaggaaa

SEQ ID NO: 38737 - DNA, 653 bp, Arabidopsis thaliana landsberg
ggtactaaacgagagccccgctcataacttgatatgatgggtcgtcgtttggatgcaaatacagaagtaattcaagaaacaatacaagaggtatgtagattgaatgttgacaaaaacttctgtttcactgcagtgtcaagactttctgatgatgattctaactgttttctttataatatatcataatgtttaggtggctaagctacaggatggtacatcatttataaaggatgacgttaaggctgttttcgatgcttttgaaaatctggtgagaaaattcattgattgcatatgttcaccagtttgttctccctacaaaaatccaaaaaaaacaaaacagagaagtgatcttgtgatcttcataattttcaggcaagcaaagtgtgtcgtatagagggaaatcaggtaacagttgtcacagctgtagttggaattttgttttgctcattaggcagttgatttaatttaaatttcttggccatccataaaggatatcacacttagaggagttggggctctgcatgctcagtgtcaggagaaccaaagaattcaagagtccaacaaggcatgacccttctccattgcgcatgttattttaaagaaaatcgctacatatacatgttcatcttattaacccagacttcttttataat

SEQ ID NO: 38738 - DNA, 549 bp, Arabidopsis thaliana landsberg
acatagtaatgaaattattattgattaactcaactgaatttccaccggcgcttaggtcaacggtaaacgttggttaatagtcaacgtgaagctccaagtaaagtaatgagtttgtgcggtggcgatgcgattgtcacaaacacttgatgtgagaaataaacgacacttggagagaaaacattagagtatcttagtcgagttttgcaagtaatcgtgacggacatgtgactcttacctagtttcgtggcacatccaccgtccccacacgtgcaaggttttgcataggtttcggtttgagacaactcatgaactgcatgactcttctcaagttagaataacagtaaactgtcatatactgcgtaagtgacataagaatgaaatattattatttattcaattcaagtataataacttgcaacaaaaatgtgatattttaatttggtcttagtaggagggaggagttgatttcgtgaccaaatttccccccaatttatactatctcaagataagctgtgaatactattggttaatgaatacatttaatgcgaa

SEQ ID NO: 38739 - DNA, 601 bp, Arabidopsis thaliana landsberg
gctggtttagtccttaattttgctgttgatgctaaggaacaacacaggaagtatgagcttgttcagagatggttggctctagacatgtcaacaaagtcgcagatcagagctttcttgttgaagacactgtcggcacctgtgcctgatgttcgttcgactgcatctcaggtcattgctaaggttgcaggtattgagttaccacagaagcagtggcctgagctcatagtgtctcttctctcaaatattcaccagttacctgctcatgtcaagcaagccactttggagactcttggatacctatgtgaagaagtgtcacctgatgttgttgaacaggagcatgtaaataagatactcacagctgttgttcaaggtatgaatgctgctgaaggtaatactgatgttagacttgctgcaacccgtgctttatacatggctctcggattcgcccaagcaaatttcaacaacgacatggagcgtgattatatcatgagagttgtgtgtgaagcaaccctgtcccctgaggtgaaaattaggcaggcggcttttgagtgtttggtatctatcgctttcacatactatgagaagtgggcgcattacatgc

SEQ ID NO: 38740 - DNA, 880 bp, Arabidopsis thaliana landsberg
  unsure (1)..(880): unsure at all n locations
ctaagaaagtttcactcaaaatcatataatcaatggtcaaatttcttttataggagactttttggtttaatgattgatagtttactgcagtaaaacttttagaagttctgcaattcgtgtgtcatatagttctagaggttgcggtttctaacatccatgtatacgtgcattgtatgtagacagattcgtccattcgaaaaaataccatgatacattgagatattactatatcagtctaaaatgaccatctaggtgtttactcgaatcattttcaatttttcataacaagattaaatttctggctattttatattactttttcatatattatatataaatcatgcattaggtgatcatatataatctagcacatctgtgtttcgaagtgttggaaaaaaacaaaggggaaatggagtaatggactcaagagtttaggtcttagttattatataaatgaaaaatgtattcatctaattgagaaacaaacaaaaagagagtaatatacattgattaattccctttccttacaggattgctttgatcccacaaatttcatgtctcgacgaaaacggatgaacatttgtctacccctcttgctttctttattttttctgtctgccatatatatttttataattatattttacataataatgatgaactattattgagagggaattaatcgtatatacacaggcgtacgtaattatctattgtgtacgcatattctactaaattacgtctagatcttgccttaatttgataatcagcatcacttgtttttttttttaatttcaatttgacccttaaatcaaggtaatgtttgtgaatagtaatctcattttttcaagtgtaggccaattaatatttgncatatgtg

SEQ ID NO: 38741 - DNA, 542 bp, Arabidopsis thaliana landsberg
taaaattattgaaaattttggttttcaatatcaaagtattgataatttagtgaaacacacaattatttaaacattgaaaaacctttaaaaaatactaactaaatgatgtaactaatattcctcacttttctcaagtttttctcaaattttccttgagttatcctcaatttttcatttggcaaatgactaaatgatatggggaaaaaaaaacaattccataactttctctcaaaaattcctcaagttaagcagttagactcaatcatgtccaaacaaatattatatattttaataatatataattcaaaatgatgttattcttcaagttttccaaattattcattaatggtctggtttaatttggtttgttagttttgagaagaaaatcgatactatttatttaatttcatttttaaaggcataagaaaatagacatattaaatacgtccaacatttatgatgagatggcttattatcctcttctattggagaaggcgagaagcaatgggcactttgcgtgtctgccgcagaaataacaactc

SEQ ID NO: 38742 - DNA, 530 bp, Arabidopsis thaliana landsberg
aaaggactgcttgaattgctgcttctcctcagatcaaaaactaacgagctggacgggcttccttagaccttttagaagcaccagtctttctaggttctcgaccacgcgaccaatccgcatgttctggtccatagcagtagtcgaagaaaagctcctcaccttcttcgattgctctctccgcaaatagaccaatcctctgatctcctctcacaatcatcaactgcacacgaaaccataaattttcgtaacctaaattttctcgacaagaaaaaatcatttaaaatgagtttgagtttcttggaatatcttcaatatgaaaaccaatcaacgacgagtaaagttgatacacgatttaactaaagaaactaacataagtatttttgtttgtataatgttagtatttgttcaagataaagtataacggcttagtaccttggcgtagcagttaggtcttgctgagtgattgagaaatttgaactcgtttcctttacggcgagcatcgatttcgagctgtaaaataaatgtaactt

SEQ ID NO: 38743 - DNA, 702 bp, Arabidopsis thaliana landsberg
tctccaaaactctcccttaataaattcaaaaactattacgtaacaacaagcaaaaacacaaaacatcagagaatcatatccctaacctctcctggatcgtttgtacaatggtggtcaaatccatcggcatagaagaggtcttgttggtgctgggtagtgaaaagattccgagaccgacaaggatcaaaatgacaaagagtacaagtacgacaactgtgaaagtttgcgtcgaaaaagatttacgcggcttgttacggagctgcttcggtttcttcgccatttttgtttgatgatctagatagtttgaagaatcctattgagcgatcttaatcaaaagaacaaaagaagttataatgaaaacatgcatttgaagataaaagctataaagtataaataattttctttcttttttcgttgttttgtttttgtatcagcgtgtgtgttatatacataacaaagtgggcttcacataacttgagactatgcctccgtacgtgtaatatttatttgttagttttccgtattataataatgggttcaccctactttgctagagtagaagaataatttcattttattaactcccaactcattcattactcacttttgggatattgaggaagttaggtatttactattccgaagatgaaatgaagataattaatcgtttcaatctaaattacacattagatttcttttagc

SEQ ID NO: 38744 - DNA, 501 bp, Arabidopsis thaliana landsberg
ttgacaactccttcatagacgactctttaggtgcgtctggtgcgctccaagcatgccacagagtcgctttcatgaattcaaaccatttgtcctcatcgcgcactgttaaaatcaccttcgcttccggaaacgcgctaatcagttcgtcagtgaaaatagccgccgggaagtccgatacacccttaagttgttgttagtaagatataactagatcctaagcctagattctttgggggtgattactgcgaagccatctagaaaagcctcaaactcatttcgcccaaaaggagacccacgctgctcaaatttggcttccaaggcagcgatccactgtttttggtgctttaactttcccacgtcgcgcatgtggtagataggaccctggccaagttcggctaatgcatccgcgagagctaaatttctcgtcccccagagctccataacaaagcttgaaaaggcatacattgtgttccggtccgtggcatccctaatataaggatt

SEQ ID NO: 38745 - DNA, 776 bp, Arabidopsis thaliana landsberg
acaaccacatatgcctctgtttcgcttctgtatctataaatcgcaaaattccaaattctgttttcttcttgctctgtggtgaacaaagcccagcttttgaaacttccgaattcctctcatcaatctaatttctgagaatcaaactctaaagagtaaatttttactccttgtagtcaatgtcgattcgtttcagctcaaccatcgttgctgcttcagtcaatttcaaaagctcgaagaatttgaacattaatcgatctcggaactgcagattctctgtccgaagttgcgtgtctgaatcccaacatgcgcacaaggttttgttttttctcttttagccaaaaagcgagaatcatggaaattggatgaatgttacgatgacgttactttttttaatttcttacgcaatggctttcttcttcgcatatgccttttatgcttttttctgatgatatctgcagcaagttttcctctgtttctttcttccattgttggcattggaagctctgtttaagaaataaaataaaaacttagtcttttgcttatgtggtctcagaattgggttcttgagttccacaatacccattgaattggatgtttagactatggaatgtgtcttctgagttctgaggggattgtgtaatgaaagtttgggtttgtgaacatgtggtgcagctagttttggaagtaaaagaacggcttgcgaaagattgtactagtcttccacttggcatatatggaagagatgatgaggatatgatcctctgggtttttgaaag

SEQ ID NO: 38746 - DNA, 533 bp, Arabidopsis thaliana landsberg
atcgatcagcgagtatacctttgcaaagttgttgatgggttaaattctgctgctcttatctcggagaatcgtgtatcttatattctgtctgaaactcacagcagaatgtgattatattgtttgtatgtttgttttgtctttcactcattagagttaacgcgactactgggaatgcaacgcgggacacattgctttgcaactaaactatgaaatgtaaagctttggactgtgggagtcttcttcttataatttttctttgagatttgaccattggtgaagctttttgtgcatgttgttcaaagaatgtgtttgtatatattatgtactaatctcaagcttgaccttgagagattgattatgtataacttcccacatgctccgtctttgtggaggtgattagctactggtttttgttttatttattggtctgaatcacaagaattattatgacattttttttgcaacttttacttgtaaacttcatgcagtttgattaacaaatatagtgtgtataaattacgaaagcgtgtaat

SEQ ID NO: 38747 - DNA, 895 bp, Arabidopsis thaliana landsberg
aatcaatgcaggtaatattaacaatcccatccttatacaactcttcacacaactgagagttcccacatcccaattccaataccttcattacaacaacaaggaaaactcaaaaatcaattttttttttgcaatcatcaagagattaataacaaaagagagatagagagagggaatgtacggaagaagagggtttgatgttggatatgatgagatgctggaaatgagagtaatccttgaaccattcatagtgttcttcagaagagaatctctcgtccctgcattcttccaagacattcagaaacacaggaaagagagagggagactacttgtagctgaatgcaattcatgattaccagtagtgaggatcgaggtaggttaaagcagaaggaggaccaacggaatttggattctccatagctggacttgctcgattctcctccttatcagctcagccaataaaccctaaaccccttttcactaatcacactagttaactaactcttatggaattggtaacagttgacttgatcttggcataaactagcttaagagttaagggggcttgttttgttataacatatgggcctataaaagcagccgcatttcttaagcccatgtgattttcttacatctacaagtctctgttttttttttttattcacgtcttaacggattacttttgtccaaatcatttaagatcagcagacttattgcctgtgacgattatcaattcattctatatttttccttgttttgtacgacacttaacctatccaatgatttgcacacacaaaaaaaaaaaaaccctatccaatgactacattttctatgtatgtatgttattgtcaatgaaaaatatgccattctcaaaaatgaatattcttgtttttattac

SEQ ID NO: 38748 - DNA, 704 bp, Arabidopsis thaliana landsberg
gttcttaacaaagaagagcgtgaggatctgtttcatgtttttatctggatcttctcagacgtcagagagtttaaacagtgattgcatcaacttgagagattcctcaacgagttctgtagctgagaatccacgtgggatcaatggcagaagagagggtagatgttatggcgacagtcctgattgtgtgatagacattgacgacataggaagtccggaaagtgcagataaaaaaggcggtacaagaagaacatggagttcaccaaatgtaccaaatatcagtgcgttgaggattaatgtccctgttaatgcaaaagaagaagagagggagaagttcctatcacatattgaagacactcctaaagagaaaggagctaaacctatgttttggctgcagagatgtcgtgattataaccaggtaagcttctgcagtttggatcatctctacactattagaaaggatcataagtcttagttgtttatcattttgcagctctttgacagagtcaaggtttatcaaagacgatttcgcgttccattgagccgccctattaagctcattctttccttaacgctaatcttgattcttctatgtgagtccttcccttggttctcatgagttatgtcacaccacagttccatgacagtctctactctctataactgaatcaaattccttgttgatacccttcagatattcgtcatgc

SEQ ID NO: 38749 - DNA, 645 bp, Arabidopsis thaliana landsberg
tcgctccctcatataagtagcctctttgacaagaagatatttgaaagcatctcaactcttttattcatcacgcctacccaactatcctctttgagagtgctgatttttgggaagttctcatttttgtatagatatgtttctctttcttttttcttaggtgcaaaatattattctcttaaaacaatttttgaaatttgtttcctcttagaaataacctttgtttgttgaaaacaatcacattccaaaacatataaaataatcttctataagaaatatatataaatttgttgcttctaaagagtgttgtctgagatcacacatctctgaggacacgctacaattttaacatttgtggttgtaaagaatagagagcttcacgacaaaaacaaaaatcaaaggggtctttttatcataatgaataactttagggtctaaatttaatttccttacaaaactttttgccgttttgtcctggaaaattgtactgaactgaatccgacatgttggtgagatccaacgaattataaaattatcaaaaagaggcaaaatttaaaaagaaggtcgtgtgatcagagaatcacaaacacagagagattcatcatcgaatcataaagctctgttttcaagaagaaaatatgcatctga

SEQ ID NO: 38750 - DNA, 1766 bp, Arabidopsis thaliana landsberg
actattttgattattagaggtaataaatagaaaaatataattatataaatctactatattttttatttttatatttacattatgggatctacactgtatatatatccaactagtaaagaaacacattactccttttacggtgtcaatattggatatagataaagggattcactaattcttacaacagaagcaatgtccatcaagctatctggtcatgattttgttggttataagagatgttaattattttgattcgatcatgtatttcacattgtaatgatatttaatgatcttacccacaaaaaaaatagacttaagtaatgatgcaataaatatatctaatagtttttcttaaaacaataacagataagtaaccagtaaaacgtcataacgctccaactttttatcaaaacctaaactatgatagtctcataagtcttaaggcaaaggtccaattcaagcagaatcaagatgcagagctttagaccttaaagggaatttgcattagaagtcttgagccatttctgagagggcacaaattgtactgcttgccacatccagaagctgcaagtactcatccgccccgtctacaagtcgctggatacattaaaaataaaagatgtgagatattttattatcactagaggtaacagagacatccttagcaagattgcaacatatctacagattcaaatggcaaaaatctaagatgtgaacttcactcaaaacccgtaatataattgagtcaagatgttggtaattgatctcacttgaggctctaaaagagacacaagtaaggaaaattagtacgggaaagtcttaccttatcagtttcagctaaacatttgcagatcttagccttttgcatgtctgttatgtcactgtcagcctccgcaactatatcgaatagctgaaagagtgttgtatagaaggggttatagccacagttgcatgacttaaatggggtaaaaataagagaggaaaatagaaaacctgattgatgatttgagatgcaggatatccttctgcaactatgttatccacttccttgtttgcaatatcgaaatcaccacttttgcatgcagtaaaaagtttattgactacctctagaggaactacctgatagattcgttagacatccatattaaacatcagcaagtctgacatggctgaacctaccatacacttatgcaaatattgggttaacttcatccttaccccagacacattgagtaaatctgtagaagttattgttgatccaaacaaccgagtagcactctgcaatattcaggtagaaagagtgtttcacatttctatggtcgatttcgtctagtaacaaatatttcagatagttttatcttacctgcagatatgtgatggccctacggagatcaccttgtgatatggagctcaaagttgaaagagcctgaataggaaacggctacaataatcagctttcacaaaactaaaataatacggaaaacattgaagcatttgctcatacctctccatcaaggctgagaccttcttcattacaaatatgcaatatacggttactcatgacttcttcggaaagtggtttaaacctgaacttcgcacacctggaagcaaggggctctatgatcctacagaacaagagatcaaagtttgtaagggtgatcaaaatcagtaggttcatagttcagcaagtagctcactatgagcatgttccaaaatataacaaaagtataaacgaaaaagcaatcatatttcaataaccagagaga

SEQ ID NO: 38751 - DNA, 507 bp, Arabidopsis thaliana landsberg
  unsure (1)..(507): unsure at all n locations
ttgggctcttcctgaannnnnnnnnnnnnnnnnnnnnnnnngaactttttcagcagcacgtcgttgaggcaggacagcgacttgatcgtgcggtagtacagctgcatgaactgctcgaccgcgcggttgtggtcggagtggacatatccgaacagcgccgccaccttgatctggtgatcgaacagcagacggtcttcgcggcggccggtgatcatgtgcagggcgaagcgctcgcgccagatgaaatactggtcggcaaacagctgatcgcattcctgcttggtgagaaagccgcggtcgcgcagttcgatcaagttgcgggcgccggaatggctcttggtgacccagccgacggtgtggatgtcgcggaggccgcccgggccttccttgacggtgggctccagcttgtagccggtgtcgtcgtacttgcggtgacgtgcggcctgttcctcgcgcttggcgcggtagaaggcgtctgcgggccagatcctgtccggcgcgatggcg

SEQ ID NO: 38752 - DNA, 562 bp, Arabidopsis thaliana landsberg
gttatagtcaatgatgttcattcataaaactaactaattcgcacacaattatttttgtagggaatctagtttacgagagatattaacattttccaaaaacagtgatggaaccatcgtattcgagtgttttttatactttctgtaccgaatgtcttcacgccggaggaagacccactcatgcatggccctcatatgtaaaaaaccaagatctagaatggaaaaaccgacagctgtaatctataaactcgttaaaaacacaaccattcatggccttagcatcatgggctagtttctgtattttctaacgtttaatcacgtaaacatattaccgctaatccagtatttcattagcacaccatcacataaaaattggttgctattttgtttataaatgatatgaaaaaatgggactatcaaactaacgtaatttcaaacgtttctttacaagttgtgttatatatgctatacataacttggattgaacgaaactataataattagttttggattacactatgattagtgaagtaattaagattatttatttaaattaagaaagtca

SEQ ID NO: 38753 - DNA, 570 bp, Arabidopsis thaliana landsberg
gaaaactttatgccaaacccaaaaacaaaagtcaggtgaaattgaagagaagggacaacaaacagagggaattgatatcaatcagcgaaatgaatcacaaaacacacagaaaaacctaaaaaagtcgaaacctttatctctcttatctttccaaaacgaaacgaaacatgggttctcctggatctaatgaggtttttacccaaaaaataaaattagaaaaattataagcactccacggaatcccaagtttctttatgtgacaacgaccttcattattaacacgttgctccaatcaattataaaactaatttattaatctattcaataatggcaacatagatgacgcgtgtccttccctcttaaaggtcaagtcttttgtttattcttctaatttagttttttgatccaagattgaaagtatgttcatgacatatgttcatgcatcacatgacacatgtagtgttatcataacgtggtaaaaaatagacaacgaaagacttttctcggagaccaaagttttgaatggggctacattaaggcccagtcagcgtcacttatatgggctctagc

SEQ ID NO: 38754 - DNA, 485 bp, Arabidopsis thaliana landsberg
ctttttgaagagtgcatgaacctgaaaacacgtacccgtcgccttttgactaatttctgtgcaattactaaattatctccttttaaagaatgatcataattttcatacttgatacgtcaatgatattgttgtgtttttcttctaacaaatatgaggcacgaattctaagcatcaaaatctgagacaacgaattcaaaatggtcatgctaagttaacaaggacaaacaccattatagtttgtcttgctctataattatgtgtatataatgtatgtctatatcgaatctgattataatattcaagatttgatagatcatgcatgtccggtgctcgtgtctggaacttgttcccagaattgtttatattattcttttcgtctagttgttcaatactttggtcttgatttaataggagaaaccttcagaattcacgtacattcaaaaacatttttctaaagcaagagaatatcccctccatttcagatg

SEQ ID NO: 38755 - DNA, 848 bp, Arabidopsis thaliana landsberg
cacaactccacaaaagagtacaaaaacagaagacgatgcatattagaaagaaaaagaaatctcctagtctcatcaaagcgtttcaatatgtcataccaaatcctaagatcaaacaaggggataacaaaatgtacaccattatattcacaatgggaaaatacgaagcactcacgctattgttaaatcattttccttcctcctatcatactctgctgcgtctgagacccagacaagttttgagaaccattactactgttcgccggtttattatgcttcccgtctgcgctcccaaacacatccagatcttcaaacaatctgtatgatggaacaaacggcttctgtcctacagatacacctgaattgcttgcagttgaagtagcctgaggatctccagctcgtgtggggaatgagttggattgctgtagtgatcttccggctagggccgatgtgtctgtgtatgacgcacttgcattagcccgtggagtatagtatgcatttgctgatgttgaagcccatggcggaggcggatattcatacgggttctgaggtcgagttgacggttgcatctggacctgtgcttgcggttgcgattgagaatagccctgctgtggttgaggctgttgcagttgagagtagccctgctgttgttgagaatgttgaggttgagaatagccctgttgttgttgatgctgttgatgttgagaatagccctgctgtgcttgaggctgttgcggttgctgttgctgtgcccatggagcgacatagctatcaaaccgtggctgaggctgtggatagatatgggtgttttgatctgagccagcgggaggaggaggagaaggctgatagga

SEQ ID NO: 38756 - DNA, 441 bp, Arabidopsis thaliana landsberg
gactatgaagctcccatcgatgagtatggtgagtttgtaacaaagaagatcactgtgtagtgagataactcttcaacggttatataactaaatttctgtgtgctattattcctttatcaggattgcctagattaccaaaatggggacaccttaaggatctccacaaagctataatgctctctgaaaacttgctgataagtggcgagcatcaaaattttacattaggccattcactcgaggtacactttctgtatttaaacccgtcgggaaagacttctgtttctgtcagaatgttctttctgatggtttgttttcgattttcaggctgatgtgtacacagaacttttcgggaacttgtgctgcgtttttgtcaaacttggatgaaaaaaatgacaaggcggtgatgttttcaaacacattataccacttgcctgcttggta

SEQ ID NO: 38757 - DNA, 540 bp, Arabidopsis thaliana landsberg
tcgtgattctaatgatgggagtccgagtgtgtcggtggcggtttattattgcaagatctgaatctgtagaggggatagagaagaagactactccgggtcgagttaagaagatccgatcggaggtctgcacgacgatcgttaaagccggtgaatttgattcagtcgcgttgaggaaagtgaattcgttgccatctccaaattctgagaaatctgatacgaaaacagagcaagaagtgactatcattgagaattcgaagatcccagaagaagtcaaggagtttggtgtttgtcaggagatgatcgtatctgctaaatcaaacgaaaatgagcagattgacaatggcgaccaggagattggtgatcaagatgattatgaagaagatggagatgaggaggaggaaagagaagtggagaagaagaagtgtgatgtgaaggaaataaatggagccaaggaaaacagagttggtggtgttgagatttaaaaggttagtcaatttcaaaacagaacattttcatctccgtcgtccggtcgtaaaaatt

SEQ ID NO: 38758 - DNA, 670 bp, Arabidopsis thaliana landsberg
acagagtttgaatgctgattaacggtagcatgtagcaaagccactactagaatcggaattacttttgtcagacgaccaacacttataactgtcgttgcttatacattaatggacgtctcaaaaatttctccatccaataaaacttctcgatatacgaatacagattatggtctcttctaaaagatgtgaatattaactttatcgatttcatccgcagcgaatttccatattacataatgcactatgatactacagatcctggttgaatattatttgttaccccaaaaaacaacaaaactaactacgataagtaaattactgggtcatacgttcaacaaggaaaagttttgggtgagtaaaaacatttagtatttacaactagttcgaaaaaccgtagagctgacacacgctcattgctaatgctacagtggcagttacacttacttggaacttaatgacagaccacccatttgaacctctgtattcttagatgcctcgtgacaaacactttccctatattcatgcccataacaaatgaaagactgtgtaaaaataaaaatgtggtagctatacctgctttgtatttgatgagggcgaaatgacatcacagacagaataactgaaagagaagaagcccagagtgatcgtagataagaaattgatttaatct

SEQ ID NO: 38759 - DNA, 717 bp, Arabidopsis thaliana landsberg
cttcattggtttcaggttaatgtagaacaccttgaccggtttaatgatgagtttggatgtgaagaggatactgatgactgtgatggtgaaaagactacatcgaaaaatggaaactcaatcaaacaaaagtcttcaaaaccttctgactggcaagccctttttggtgcgaataacaacgatgatgagtttatgttaggcattaaacatacaaggtatatataagcctacatactctttagatttgaagtgcatgctttcggttggtatctaatttggtcgttgtgctgagacttgaatcctcttgtcaatttcaggaagagtattaggctatatggtgatttttattcctcagacattatagttgcttcccctctcaagttacatatggtaggcagccttgtctatcctttcataagatgatttagttatgcaaatcttcttgatttgatctctaatcaacttcgctcttgttaggccattggtgcagcagaagaaaacaaggaacgggatgttgattatctttcttccatagaggtacttcttttatcattgcttgcagaagatatattcaatagatagctgatggttgatgccaataatgttcagttactttagtctattattgctttatctcttaaacctgggttattactgcatgtattttcaaatattgacgtttattctgcattccttatttagttacaatattgttttcat

SEQ ID NO: 38760 - DNA, 481 bp, Arabidopsis thaliana landsberg
agattccgacactgaagacattcttcagacagatctttgtgcacttcctttttcttcaggaacaataggattacaaaaaggagtaatgctcacacatcggaatctcatagccaatctttgctctactctcttcggtgtcaggtctgaaatgatcggtcagatcgtgacgcttggtttgatcccattctttcatatttacggtatcgttggcatatgttgtgctacaatgaagaataaaggcaaagttgttgctatgagtcggtacgatctaaggattttcttgaatgctttgattgcgcatgaggtttcgtttgcgcctatagttccgccgattatattgaatcttgttaagaatccgatagttgatgagtttgatctttcgaagcttaaacttcagtctgtcatgactgctgctgctcctttagctcctgagcttcttactgccttcgaagccaagtttcctaatgtccaagtccgagag

SEQ ID NO: 38761 - DNA, 562 bp, Arabidopsis thaliana landsberg
ttgaggacttgcgtgaagatatgcagaaaggacgcctgctgtagattttgacatcattaaacctctcctaaattttacattctctcccatgatcgcagctacttctgtaacagcgtttgaaaccgttgtttcaccattaacttttggatgatcgaggttaagcttgaactcctgatagcatccattagagtgattagaaatgaaaagttgatatcaatatctcagacagtgcaaaggaaacaacataaatccataaatttaaataacaaaaaaggaaacaagcgagtacataaaaaactgacctcaaaaagctccggcccaaaggggaagacaccagaaacttgctgcgaactactctcaaccagcaaagcatgttttgccatacctaaagcctgcaagacatgtcaattttagaagacaaggaacagtaaaataaacaaaaagcccatcattcagcaacaaccaatgtgaaattgctatgggactaaccaagtactggaaaatctcattcctagcaacaaaatcagtctcacagttaagttcaataacagcaacctttcct

SEQ ID NO: 38762 - DNA, 866 bp, Arabidopsis thaliana landsberg
ttaaacaaaaaaaaacaaacaatagtttaccacctttgtgcatattttagcacaaagcacttttcatcatcatttctttgcttgtcctaatcttatctcattctctaatcaaaaatacttatctggtttcaagctataacaataactctgtttagaaacacttgttaccaacaaactactctttgaatgtgtttacgtggtaaggatttgatcccacagaagagaaatatttgtgacataagaaaaaaactcagctcttcaataatcgaagcttatacagatagttggattggttgattttgagattgtaacgaatagtaatcagaatttcacttaagaaattgtgattgaaccctctaaaccacagagagggttcttgacgtggtccatagttcttcagtggggcggcttgtggcttctttttcatttttccagaaaaccccataaacctctcgctctcgggaatttgattgattcccacgaggaaaaatcaatcttcccggaaaatggcagctaggttattgttccgtcgaagttctcaaatcctccgatcaattcaacgaaatcctcaaatctcatcgtcattcgaatcaccaccttgcccgatttttcactcattgaccaccgcctcaccagatccatcgcgattatcatccttaaccttcctccgatctctctccatcgctcgtcgcggtccaacacgtcctaagaaaatcgatatcggagccaaagcgcgtcagatgcagaatcgccgtttatggacctacgcgctaaccttcagctgcatcgccggattcgtagttatcgtccttaaccaatttcaggatcagcttgtcttctacctaacgccatcagacgctatggag

SEQ ID NO: 38763 - DNA, 683 bp, Arabidopsis thaliana landsberg
gagttatcttctttatcagttgcttggttagctctcaacggcttcgatgcatccagattctttcctttggcatcttgcgtagctgaaatatgtgaaccttgctccactttcactggtctagctggctctgacagcttgggcctcttaacagaagattgattcgaagaactccccttttcaagaggtctcttagcaggtgcctgagaactgtgcccttcagtcttaggtttcaaaccattccgatcaatattgttaaccaaaggtctcttctgttcaatatgaacaggcttgctacttgatgtacccacactggtctttgtctgaaccgttgaggacatgggagctctctcatccaaaactttctttttagtgtaatcactcaatccctgaggcctcatgttgctcttttgtactgcttgctgcgtactcccacgtcctgaagagcttggctgtttggtaacctctttagaatccaatttaagcctagcactcaatggtttatcatcctcagaatcctcatcatcacttttagacacagaaggagctttcccaaaaccgttcctctccttagcaacaacagatctatcatctcgcaacggtgacttcagagtcgaacgttgaacagatgaagatgacggtaatgctggtttcatcattgaacttctagtggatgaagaagctga

SEQ ID NO: 38764 - DNA, 912 bp, Arabidopsis thaliana landsberg
attccgtttaaaattacacaaaggaacaaaagaatgaaacgaacaaaaactgatgaattcatcaaagaatctaatgaaagaaacgtagaacgtgtattataaacaaaaatttcaatcatttcgattttgaccgtccatgtggcttcatcatcactttccacctcaaatttcgtcagaactagacaaatctttagcattccgaaaacggccaagccatgacataattttgtagaccaccgcagcgcaaactacgggttcttgttgtatagagacagcaagagtttgctgtagttgaactcaacagccatcaaaatacgttcgctccattctcttattgatctctggattctatgtgttgtacatgactgtgtgaagattattaagtatccaacactatgatctcggaatcgaagcaatggttcttctctccttgtatcgagctccataagcgtgttgaagtcattaaccaactgagaaacccacaaaattcaacaagatcttttataaccagaattcaagagctaaggaacttttcattagtggtccatattggagttgtgtgctctcaaactctagttgatgaattaatcaggtggctactacgtacagagccaagagcaaaatcttagtcacctgtgacaaatatgataacatcgtctcttttttggaattcaagatgtgagctcttgtccaagttttgtataacgtcaccttcaaatccatgttcactgttccaacaagaccagtttcagagtaaaaaatatatacaagcacaattttgttttagcatcaacaaagttgaggcctgaaaataaagtactcgagcatttgaagattgacttttgacttgtgctacgtaggatccatatatatgtggaatataaaggtattcgacgatataccacgtttaaa

SEQ ID NO: 38765 - DNA, 710 bp, Arabidopsis thaliana landsberg
ggggaaataagaaaagaaaaagttgaatggcttaggtatttcttaattccccatttttctttaaagtccggttaatttttttaatcccccttggagtagaaggaccaagtagaaggattatctttcctgcgattttcattggttggtatattaaaagggggtaaatatttttttcgaaaaagtatttgagaaaaataaaaataagggtgtaaatgaattgaaagagaaatgataaatggtttagggcaaacaagtgaagtagagtctagattatatagggtttgtgaaagtatttgttttttacgtaagaaattattttaatgtgggctttaatattattagtaagtaatgtgtggctttattcttttgcacatttggatgattaaattaggcaaaattttcaaactcatttgactaaacataattggacaatttggatggagatggattagtcaaaaataacaaatgacaaatatgctctaatttttcaaacgatcattttgtttataaaaaaaactaaataatcacagaaaaaaacaaaacaatctgcctatgcgattacaaagtgttaagaatttatatgcaatgagtcggaatcctaaactaagaaacattttttataatgatcggtacaagtatgtaaccgatcagttctggacatcttatgtactgactcttgcgattgtcaaggtcggtcgtgatcttcaatc

SEQ ID NO: 38766 - DNA, 1989 bp, Arabidopsis thaliana landsberg
ccaaagtgacatgagacagatcttacctttgtcacatgttccgtgtcacattctccaaagtgttaaggacttagctgtaccagtcgttgtctccgagtatcttcacgccaatcttggctgtgaatccgtcgtcgaggttattccttctgatggtcatcttcctcagcttagctcaccagattctgttattcctgtcatcctccgtcacattcgtaatgacattgctatgtgattgtaagagatttaattagttaattattaaacgatgtaagaaaagttgaaaaaaaatatctgatgtgatatgtctgtctagtctattgagaacattatttcgttgtcgtttggttctgattcgtttatcttgagtatcttgatctttgttgttcttatcttgtttaacgaaaagtctctgtcttttgtccacagctttgctcagagctcattattgcttgatgtaatagtgatgttcgtaattgatggtccatagtgaattattgcaactttgcaagagtgcttgtgctatactgtgtgaagagtaattaacatgtgatactaggaattagcattgagtttgcatttatggatgggtaatccaaaccataaaacatatatattgtgatggttttgaaatttgtttgtttgtgaacaaaaattagccaagttttaaacaaagtaaaatgaaattttagggttttgaattaggatggagttaagtcatattttgttaggtttgtttgcttatgaaattatggatttgtttgatgttattatagggatgcggtgcaaaagatattgttttctatattatcatttatcactaataactttcaaattttattgacgcgcctgctcagattttattcgatttgttgtttatgaaattagttatagattggtaagtaaatagctttaaaaaattagtgatacaaaacaaaatggtaaatattgtattgcttcttactagtcaatactatgattaaacttccattttataattcactttatataaaacttctatttattttcttaaaattattttattattgaaatttaaatatcatttggtacaatattatttcttcatcactagtcaaatactatgattagcctacccaaaaaaaaagtcaaatactatgattaaacttccatttttttaaaattcattgcaggtcatacaatttaaatgtttacatagtcatgaaagaattgagaacatatatatacttcaaatttgttctccaatacagtcacacacctaacttcaatttgcttagaatttctttggcaagacgattaacagagctagcccattgtaaaagggtaataaataataagtgggctaggcccatatatacacaacaaaaagtcacgtgacaagaaacttcatacgtgtgcgactcttgccccaaaatttgattagcaccacttattgagaagcagcagcagcaccacaagcaccaccaccagtatcacattcacattcaccatcatcgtctcttcgctcttatctctccgttacttttttatttactatctctctcttccccgttactttttttttcttccccgtttcgttctccgtcaaagtcttctctctttaccattttctccactgtactaatttccctttttacccctaaacccatcgttcccgtgacacgacggccacgaagaagagggataaaattgagaaagattaaataggcgattgatttctccatcggagacaccaccgctcaaaaaatggcgacggcgacggcgacatcggaacgattcgagttagccaagcactgcagttcacggaactggtctaaagcgatccgagttctcgattcgctccttgctaaggagtcttcaattttggatatatggtttggtttcgagatctttggtctctcattcaatttctccggatcggtatcaatgatttttctcccgttaatctcagtatttttttttgaatggggaattggtttcagcaatagagcg

SEQ ID NO: 38767 - DNA, 800 bp, Arabidopsis thaliana landsberg
gcgaagaacccatcaactgtttatttcttcattcttcaattataaaaacaaaaaccaaattcaattcatcactagacctttggatcgcagaaaataaaaatcgaaacttttcttacggttttatgtttggtggtgattttttatgtcgttaccacttctgtggttttatctgaccatattaaaacactgtaatcaatggagattttgtttttttggcgcaaatctaatttatttacttcaaatcccattaatgttttgattacatgtaacctcaggtttaggacaacaatcccacaaaaaacattgagtttcttcaagggttagataatgtaattaaatccacaattaaatttggtcacatctctttattttatttacaggtaagatatttggttatttccataatatcaaaacttttatcataatttttgtttatgctcctaatgccgttactaattatggagtcctaacaatgtatttaaggaatctgaattaaggtttataaacgtaattaaataagggaaaaaattgtttgcaaaaaaagaagaacaaacaaaaggtactattacctttaactttaaggctgtttgtcatacctttttcccctctctctttctagtcttcgtttacaaataatttcaagctttttgatgattaattagaagtgggttaattttcataagttttgagaaagaaaaaaagtcttcttaatgaattaattcgctttcttaggtcattaattaagaccaatccttgttgacagaaaaattgaccaaattctgatcatatcaataaactga

SEQ ID NO: 38768 - DNA, 655 bp, Arabidopsis thaliana landsberg
atacgaattcaacggtttctgtacaaaactttaaaataatttgaggcaatccactttcaaagccctaaatattcaactggaaaattcttttgcatgtatgttttcaatattgaataaaattcatagcttcaacaatctcataaaaaaaagagctgggctccattcgaagacacattaatttccatgggcctggtccacatacaaccatactaaatttgaagtaatttacccgccatttaaaaaaagcccataggctccttctcctagaagctggcgggaaaatcccaaaactttcccgggaaagtagaaaaagatttcggccattaaaggacaaaatcacaagaaagtagaaaccctagagattttgaaaccgaaaccccaaaaacccctttgacgcctccttcttcttatctctttataaaaaaccatttctttcctgcaacatcgttgcttatcatcagacgcacatcatctgttcgataaaattcctctgagagtgtttttttgttttccttctgacaaagaaatatgtatgtagtgaagcgtgacggaagacaggaaactgttcatttcgataagattactgcgaggcttaagaaacttagctatgggcttagcagggaccactgtgacccctgccctcgttgctcaaaaa

SEQ ID NO: 38769 - DNA, 686 bp, Arabidopsis thaliana landsberg
tttctttattattcaaaattcattaattttttcattattttattttctttatcaatacaaacacattaacaaatatatctagtttgcttaattatttaaaatgcatccccttttttcctaatcttgttatgggaaaaaaactcagtctacatgccttgtagtccaagtttcattgacagaccaaaaaaagccattagactaaaaaaattccactaattcgacgtcgtttcagccaatcaaaaatcaccaagggtatagtttcgtaaattaaaagtcaaaccaggggtagtttcccaaacgagatcctttatataccgtgtacacacaagcatttggttctccgagcgagagactgagaaatagaaggagcgtagcagagcagtttccgattttcatttctctctcttaatccagatttaagtattagggttttttcttctatcatcgccattactctctctctctgtttcgcttgtgtgtgtgtgttgctcaaagattatcatcatcatggttgctgtcacagactctgaactctttcatggctctccgatttcaacagatttctccaagaaacgcaaggtgtgttcttcgaatttcactccaatcttaatgcggtcgattcgtttcttgtatccgagtatgtacgcttgattcaaaagaaaagtataatcgatccgcgtctaata

SEQ ID NO: 38770 - DNA, 444 bp, Arabidopsis thaliana landsberg
cacatttctttattgtttattttgtcatcatgcaaccgaatgtcaaatatatctatactaaacgcattttataatctctaactatatcatataagtatattgtgaaagaaaaattattttcttcttctccattctaaaaacgaaattttacaataaaaaggaaaaaaagaaaaaaaaaactacagagataacatttatcaccataagatccaggctggatcaatccaaccatgagtgttaatgtttgggcttgaaatctgatgaaacataaattaattgagcttctgagcaatgtgtaaatgtgttataggtttaattacgttcaaccacttttttcatttatttaataagttgattttccaagaccactcgtaatcaactttcatggagtccgtttatggttaagaccactcgtaatcaacttacaagcaagttaaacagtgt

SEQ ID NO: 38771 - DNA, 812 bp, Arabidopsis thaliana landsberg
cgagtcccagagagaagaagaagaatcagtatcagagaattatggagatatctgggcctgggtcgggtctctttttggcccattagttttgttttaaaatccaattgctataaggaagttaaagttatcttcacgcgccgcctctaagcgttgtaaaagaaagtgtgattcacgcgctttgcttcttccgtttgccctaatcgactctgctagagaagacgaaggagagagaaaatccctccgattatattccgtacaatccgatcgatttcccggcgccagatctcaccgcgactcgtctactttccgatttggttcgtgttgactcagttacggtgagtcgattatctctatcttctcgtttttttccgatctccccttgatttgctctttatgcagatcttcgtgtacaaccacctttaacctgatgaattctgtagattaaactatggatccaatggatatagtcggcaaatccaaggaagacgcttctcttctaaaaggttagtgttattgctcattgatcattaaataggaggatttgtaaacctagctatatataactctgcttgaaggttataggattcatgagcatcataaacttcatttttttattatcttgctatgaatatgttttgttgttctctattgttttagctacgatgactagaattataaaggagatgttacaccagatgttcgtgtacaagagatggcaagatctctcattgaatgttgtgtaggtaagacatatagttctcctgagtcatctatatatgtgagagtcttggtgactactgtggttaaacatt

SEQ ID NO: 38772 - DNA, 376 bp, Arabidopsis thaliana landsberg
atattttccccggaaacatttctctagtcaattggctttgcttcttcttagctgttttcttatgtttgcttcttctcgccttctttctcctatattttttttttccatagtgtgataattaagggcttgaacctacaagagttttctttatttaattattttattaatgctttcaattttttcctaattattatatttgtaatagttaaatttaatatattatttttttcttttaaagaggtagaatgtggtgtgcaattaccaattaggagaggttggtttaaaaaaatggagaaaattaaataccctttttcagtttttgctttggactaagtttagctttttagctaaatatacgtaaaggctcgagcataac

SEQ ID NO: 38773 - DNA, 623 bp, Arabidopsis thaliana landsberg
tcttatgattatacttagaactgagcctaagattttgcttttctatcaaatcttagcttatccttgctagaataaagatgatatgaacaagttttttctctacttaaaggcctaacatcagcaagaacagactattctacaatcagctaactcaatgaactagaatttattagtggggggtgtatatacctccggactgagaaagtcatgaagcacaataattcgaggggaccaactgactacttcaggcttgacctgcactaaagaaaataaacattagctggaagcacacaaaacggacctagatttacagaagtaaaacaaaaaacgatacatgtgtgtgtaattttcatagtttcacaaagagatagtatatttaagaaatgtgtccgtactacaaacaatttaatttttctcctccatgtaccaattcttcaactgtagaggtatataaatgaaatttttaggcaaccataggccctaagaaaaaaaaacaactgcaaaatggatacgatatacttacattgccaatccgtaacaattctgcatctttgtcatttgcccaccgggagacatctgaaaataaacaagtcttgccattaatcgattcggtatcataacat

SEQ ID NO: 38774 - DNA, 1252 bp, Arabidopsis thaliana landsberg
actctaataatttggcatattcccagagagtaaacaccccgccttagccactagaatatttcctcagtagtttggtatccaaaataaacttttcctcaactcaatcatgttttcaactgtagctctatcctcacggcaaaaatctaactccaaattataaacctttaacttgtttctattgtaagatagacgggctagctgatcaatcttggctgcatggttctccgatgtgaattgcacatctgcatagcgtccttccctacccttaatggtttgatatgggtttctagtggcatgcaaataattctgttaaaaacaaattattttgtgtaattttttattttgttaactatgcttattttttaaaaaaacatattcatgtattttactatcttatatgatacactaaataaatctacatattaagaaaataaattacaagagaacaataagacaaaatggttcatagatatttttagtgcatatcatccttgtttagaatattttaacatttgtgacataaaagtattttttttaacatttacgtttaaaaaataaagacactaacttataaatttaaaagaagaaaaacagtgaaagaggcattgctaaatgatgaaataatagtaaaaataaaattagtgaaaaggagaaaataattgtgtgattgtcatgtatattcctatagaatacagatgttggaaaatagtggaggaaacaaacaaaaaaataaatgtagtgaagagacaacatcagatctgatctgtgttcaaacatgttaatgcttcatgtgtggacgagcaaacccgggctgcaccaaaaaccaaacaagcatattagtgaagtgtatgtacacagaatcttcttgatgaacaacttcactgttttagagtgttttgattatagcatcattgtagtaaagttacctgaagcagttttgaaggagcttcttgatgaacaagaccgtggcttctcgttttccttctatccaacgcaggactagtattagcaacggttatgtcccaaaagcttctctttttagctgctgcaactggagatgcaaaccgatgactcggacttttcagttccttttccttctcctttggtctcaagctccctcttgtgacaatcctccttgtttctttgcatctttctggagttttctcgctctttctactacaaagatctttcattaattcgtctttttgcttcttcatctgcaaaccatgttccctcttcattctctccatct

SEQ ID NO: 38775 - DNA, 588 bp, Arabidopsis thaliana landsberg
acaaggagtcaacttctctatccaagcttgacgcaacacagcatgcgtttgaatatgaactccctcaacagcatcaaccaaaaccaacgcaccgtcacttaaccgagcagctgttgagacttcactacagaaatccatatgaccaggagaatcaatcaggttcaaagaatagtctttatatttaagagaaatcgaagagctcttcatcgtgattgcacgtctctgttcttcatctagatagtccatgaacctaagcttcccggcaagtctcgggtgaagaacaccgccaccggaagaagcaattaggtgatcggcgagagtcgtcttaccgtggtctacatgtgctagtatacatatgttcctaactttcctaccttcagattcatccatctcttcaatttacaaaacacacagctacctgcagattcaatatacacaaggattacattatcagaatcgatgcgattcaaattagtagagaaaacttcaacaaaacataatccaaatcctaaaaccttgtgtgagaacttacgaatttttgaatcgaatccacagagtgtgcccgtctcgtaagaataaagagagata

SEQ ID NO: 38776 - DNA, 1590 bp, Arabidopsis thaliana landsberg
ttttacagatccattcatagtgattgaaatgtattatcttttttagatttacaattgtagattatgtgacagaaccaaaaggaaatattacagaacctgcaaaatgttcaatgcttttctcatgtccccattgctcagccgtacaagagctgccaaaccacagtcacttacaacaagcctagtccaattatgaaaaggaagcacaaaacaaagggttaaaagaaacaaatagtgaagagggaggatgaagaaaacacaataagaaagtttacaagaccgaaatagctataattctcacctttcagcttctattacatgtttaagacgttgactcatatgaactccatcaagaggggcaaatctaaatcgagtacatctcgactgcaaagctgggatgatcttattgacatggtttccaatgagcgcaaacctagtactcttagtgtatttctcaatcacttgcaaaatttaagaaaataaggacgccaaagatgttagaagttagaaccgtgcttaagcggaaggaccacatagagctagataacactaaaaggttttacctctacgcaaggcaaactgagcatcttttgtcatggcatctgcttcatctagcaaaaccaacttcaccgaagattttcctctacaatcatgaattttcttttatttctatatccacagcaaacttgttaaacacaaacttatgatgctacatttaaacatagctcacgcccatcacaatgcattcgatattatgagtaataaaagccagtttttgaggtatctaaatgcacaaatggaaacatgataggatactcacaaagagaaactctgcgtgctagcgaaatcttgaatctgctgccttacaacatcgattcctctatcgtctgatgcgttcagttcaagaatcatattccggtactttggtccatatagtttccgggcaacagctagaatggtggatgttttgccagtaccgggaggaccatacaacagaagatggggcaatttgttctcattggtcagcctatcaactgttttcaaaatcacaacaacaccttcagtgagcatataggtaataagctataacatgcattagcctactcaatcatatatgaaacaacatcaatttcaattttagaaaactgtaaacactaaatccctaaaaccctagggtatggggaaatagagggagagagtgttatgtgtaaagttcaattactcgtatcaataatgtcacgatgtgcagccacgtcatcaagcgactgaggtcgatacttctcaacccaaggcgtcgccttactctgcggcggaggtccaaaaccgacgacgtctttgcccttgtttatcggcttgcgaggctgaatttcgtctacgtcaatgtccatcgccgacgttagctcagtcatcttcaccgccgtaaaagaaattatttcagaatctctctcgctcagccctaatttcactctctccccggtaatggcgccaaaccctcaaggctctttccttccgccattttctctaccttcgttgtcgaattcccattttacccccaagaaatgtagcttatgctggggtcattttcgtaaagct

SEQ ID NO: 38777 - DNA, 541 bp, Arabidopsis thaliana landsberg
agaagctcggttaattgaatctcctgccgcaggtattatttcgagacgttctgtatatgatcctgtgaacacaggatttattgctatcgataggatgatccctatacgacgcggccagcgcgaattaatcattggtgactgacacaccggtaaaacagcagtagccacagattcaattatcaatcacacttttatacctgcgccaccctaactcctccaataactaatggcagtccacgcatggctagcgcattgtcctggacaattgaacaaggggcgacggagtactgtttagaagactctgaaacaggcgactaacccgctccccggcaaagcctccggccatgtactgcggcgaacatggctgaagacggactgtcccgcgttcatcgcactgtaatactatacgatcgattttttcgatacccgcactacgcttctggacaaggggtgtctcctattacgaggaccgccggcctcgagaagcatatccaggaaatgcttaatagtcacattcacctctgttagaaagagccgttaa

SEQ ID NO: 38778 - DNA, 528 bp, Arabidopsis thaliana landsberg
cgcggccggcctgatcctcggcctcggcggcgccggcacggccatcggcttcggcctgctcggcggcaagctgctcgaaggcgttgcccgtcagccggaaatggctggcatgctcaccggccgtatgttcctcgtcgccggtctgctcgacgccgtgacgttcgtcggtatcggtatcggcatgtacttcacgttcgcgaatccgttcgcggcagcggtcaaggcagcggcgggcggctaaggccgcttgtctcttccttcccgctcaccactaccggttccccggaaggggattgaacgatgaactttaacgctactctgatcttccagagcgtcgcgttcctgctcttcgttgcgttcacctggaagttcgtctggccgccgattctcaaggccatgaacgatcgccaggcgcgcatcgcagacgggctcgccgccgccgacaagggcgcgcgtgcgctgcaggatgcttcgaccaagagcgaggaagcgctgcatgctgctcgcgcgcaggctcaggacattctc

SEQ ID NO: 38779 - DNA, 2047 bp, Arabidopsis thaliana landsberg
gtcaatacccttaggggaaaaaagtgtattttggcaaattttccttaaatctaagagcaagaacaaaaattaaagtcacacatgaaagttgaaagtgatccaaagggatttgatattagaaaatagaaagtgagataaaaccaaaaataattttatatatttgcctggctttttacaagcatctcacccccactcactctttacatttaaggatgatgaaaaatacttcacttttgaaataatcaaacaccatttttaatctttataataactctgacgttgaagacatcaacaaacacctttaattacatataatagtttatggaatttctcttcttcttcttgaaatatattattttatttttggaaatagttcaatccctctgtctcttcttctggagtcttggacccaaccccatcattccagaaatgaccggctaaagtcaagaacctctctctgagctctcaccactttctctctctactccctctctgcgtgtaggatactactagacaattgacaaccaaagactaaagctgtgttgttggttcacttctgttctcttttccaatgttgtcatcagctaagcatcagagaaaccatagactctctgctacaaacaagaaccagactctcaccaaagtttcttccatttcatcctcatcaccatcgtcttcttcttcatcatcatcaacctcatcatcatctcctttaccttctcaagactctcaagcccagaagagatctcttgtcaccatggaagaagtttggaatgacatcaaccttgcttccatccaccacctaaaccgacacagccctcatccacaacacaaccacgagccaaggttcaggggccaaaaccaccacaaccaaaaccctaactcaatcttccaagattttctcaaaggatctttgaaccaggaaccagcacccacaagccagaccacgggttctgcgcctaatggcgattccaccacggtcactgttctttgcagctctccttttccacctcctgcaactgttctgagcttgaattccggcgctggcttcgagtttctcgataaccaagatcctcttgttacctcaaactctaatcttcatacccaccatcacctctcaaacgctcatgccttcaacacctctttcgaggctctggttccatccagttcttttggtaagaaaagaggccaagattccaatgaaggttcagggaatagaagacataagcgtatgatcaagaacagagaatctgcagctcgttcccgcgctaggaaacaggaatgtgcctctcctcttccctcctaatcttcttctactcatgtgtatcaaaagggaagaaaagaaatgtggttttgccatcaaattgcttttgatctaaaaaaaggtctcttggttttgattctcatttgcaggcttatacaaacgagttagaacttgaagttgctcacttgcaggcagaaaatgcaagactcaagagacaacaagatcaggtaaacaagcagagccaagttcttaatgttttacccttttgtagcactcatgtcattagatcaattccttgtagtttaaccaacttataaaaagagacagacagacagcctctggagtatatttgttttacacacttttttgtccaatgacattttgggtggttagattctgatacttcagttgtgtgtttattatgtgtgtgtgtgtgtgcagttaaaaatggctgcagcaattcagcaacccaaaaagaacacacttcaacggtcttccacagctccattttgagaaatctacaagtccttgtttctcttttggggattgagattgtctcatgaagaagtgaaaaaatggcaaaagtttgtacccttttttattagctataagtataactaagcctaaaattgtagaactaagatattgtaggggaaaaaagaagatgtaaaacaaaagacccggaaagagaaaaggatctttcaatttcctaaggcacaggaacacctgtcctgggtcctctcttaatgttctgtcgttttcctatgcaaacccttttttcac

SEQ ID NO: 38780 - DNA, 515 bp, Arabidopsis thaliana landsberg
attctttctatatatggatacactactgcgtccactgagcataaacaacaaagagaacaccaacttctattttttgcttcacatggaaatgaagctgtggtaagcagagactctctaccaagaatttatttttgtatccctttgtctgtgttcaagtttttggtttaccttacatggtattcgttgttgtagttgcgaaatgatgattctatgaagggggaacttgaaagattacagcttgcaattgagtatgtatctcactggaaaaagaacttgcgtttgttcttggttaaagtttcggcctttcatcggttttttctacttgttcgtgaacaggagacttaagggtaaggagcttgaaggtatgagtttcccggatcttatttctcttgaaaaccagttgaacgagagcttgcatagtgtcaaggatcaaaaggtgaagacaaaatactaatttattcaaacatcgagagatgatttttgattcatccctgtcttgaaaagttttgttttga

SEQ ID NO: 38781 - DNA, 583 bp, Arabidopsis thaliana landsberg
atgtttacacggcgctggatttcaccatgttttttaattagctattatatactatatgggtgcatgtttttttaatttaagtccatgtgcaggctaagttatacaagtatacaaaataagtatgtatatgcaagaaagatagattaaaatttgttattttgaagtgtataccttgtcagaacggcggcggcgaagttcagggttgaggtgttggagcttagaaacaagatcggaaatctgatcgtcagagattcttgagcttcctgactgtcttgaacgtgatgatcttctgctagacatcttctatcttgatatattataagtgtgtttgtttgggtgtagagagagagaagaatgcaagaaggataagtagttaatgtgtcagaaagagagaatgagagtggagaagaaggtgttgaagagggaggagcaaagtggatgtgtttttataatgcaaatttatgaagagagagaagatctagaagaagaaggagaagaagaagaaggaccagagacaagtgcatggagggagggaaaggaaaatgtttctttaataagggtgtctttagctttctaatattta

SEQ ID NO: 38782 - DNA, 407 bp, Arabidopsis thaliana landsberg
  unsure (1)..(407): unsure at all n locations
actctactgcaaactacctcttgtggacgatccagttcgagacttggctcaacaatcaacgtttgcttggttttgttactggtgctaatccgtgtcctaatgctacgagatctatcagaaatggagatcaagttacagaagctacaaatcctgactttctcacatgggttcaaaatgaccagaaaatcatggggtggctccttggttcgttggctgaagatgctctgcgttcagtctacgggttacacacatccagagaggtaaggatttctattgctaagaagtacaaccgtgtctgtgtctctaggaaaagtgacttgcaacgttgtttgaactatgtctctaagaatgggaaatctatcctggagtatctannnnnnnnnnnnnnnnnntgagaccagctagac

SEQ ID NO: 38783 - DNA, 445 bp, Arabidopsis thaliana landsberg
  unsure (1)..(445): unsure at all n locations
caacaattttattttttcccccaataacgaagctaagggggcatgtataatacgaacatcaatggtttgcctaacgttactcagacgtctaaagccaaagagatgttgcaaaatttgatcaaannnnnnnnnnnnnnnnnnnnnnnnacgacatacaataccattatagaacgattcctcaaagtaggtgatactgattccgctgtcgaaacttacagatagatgactgaaaacggcaaatctccaaatgttgtaaccttcaccagcttgatcaatggattctgcaaaagtaaccgaatggatctagctcttgaaatgacacaccaaatgaaaagcatggacttgaaacttgatcttccagcctacggcgcactaatagacgggttctagaaaaagaatgacatgaaaaccgcatatactttggtctctgaactgccggaactag

SEQ ID NO: 38784 - DNA, 758 bp, Arabidopsis thaliana landsberg
agtagcctctctggcttcttttgtgttgccaaggaggagactctgatcccggtaggagccctacttctccccttgattttggagtctttggtggcctctttagccccaggtcttcttcttcttcacccctccaccgaaacaaatggctttctcacaaagtcgggctttctcttctgagctccagcttcgaactaggcgatgatccattcagaagggactacattgtgcttgcccctcaggtcaaggtcaacaatgttaatacagcaactcccaagctttccagtgatccttgtgtcattgtggaggaaccaaggagatcaagctcatcatcccctatggatatcatctccacgtactctcgctccctctctgggcgtgagatggctctctctgaggactatacctgtataatttctcatggaccaaacccaaaaacaactcatatatttggcgattgcatcctggattgtgaccccaaggacttgggaaaagaagatattgagatacacgaagaaggggatgattcttttagcacagaaaaacctcaagatcacaggttcttctggctccaacttacaaagcagcattgagtggtctttttaaccttgaactaattacatctctgacattttatttccgtgaatgaacaatagggaagtatcagcagaaaaggaaagtgaaaacgctggtgctgaagaatcatgttacgaaaaggacgatctgcttcctatggcaatgccttttaaccgtaatgagat

SEQ ID NO: 38785 - DNA, 632 bp, Arabidopsis thaliana landsberg
  unsure (1)..(632): unsure at all n locations
cactgtttcctgctttgtacccactaaacaaaccatgtaacagttgtgatcgagaactcctcttaccaattccttgacgccataccgaaccacgaaacaccgccacacgatccatcaattcgtacttttcaactggaaaaggaggcggtgtgggtctaacacgggacgaatcaatggtactgttggttctcgcctcatcaccactaaagctcaagtgtttattacagtccttcacgatgaatttcttctcaccatccacttcaatctctttaattatcatagcagggaaccacgcaacttcagctttatctacaatagtactcacttccgccattgtcccggagctaaacatggacttatccaattccttcaaggaaaacaatcagaaacatcaaagtctacactaagaatcaaagtcaaagatcaagcctttaaccatttcaatcaaaacatagcatgcaacanaacagagacagctccaagcatganaaaaaaacgggattaataatggatcacaacatgcaacagantaaagtttcaatctttagtaacaaagcaacanaattaagaaaaaaaaacccacttggatacatcacctcgtacctgatatctggtcgagccatttcaaccga

SEQ ID NO: 38786 - DNA, 161 bp, Arabidopsis thaliana landsberg
aaatctttctcgaaaaccttattcgcagccgtatttgcggctattcaggatgtgagaaggaaaggagaattaggaagtcagaagagatgagaaatgtctcaaaatagctctgtgaaaagtggaaatatcggttgaaaatgcttggtggtttaaaggtggag

SEQ ID NO: 38787 - DNA, 1043 bp, Arabidopsis thaliana landsberg
tcagtttcacttcgtatatcgaaatgttcatgctttgtctagcaattactaattctttggttttgtttatgtttatgtttcgttaacagtgcgcaagacaaggatttgctttggggttgacattacctgttagcgttatttctagcattaatgtggaatctttgctgaatctcattgctgattctttgtctgtatcttcatccatgacgggacaagtaagtagcagtttttatatgcttcgttcttcatgtgattctgttatagagactcatatgctttgaattgaaattgacacaggatataaaggaatgcttattgggtcgattgtttgcttatggtgcgcttgcacgttctggaagactgattgaagattggcaatctgataaagactctccgataatcaaagaatttaccaatgctcttattggtcttgctgcaaaaaagcgttacttgcaggaaccagctgtgcatattcttctagactttgttgacaaggtataatagattcattcttatgtgcaaagtttagtgcgggtttattacacattgtgaagtttttttgtgatcctatcttttttattgtgcagttgcctactgaacctgttgttactcatgttatggaagctccagaactttataaatggtttgaacaagccaccgaggtgggaaacccagatgctttgctcttagcgctgaaactccatgaaaaggtttcagtcgatcatcctatatttagcaagctactgccagttcctttcagttccgggaagtttttttctgctgatcatctcactgccattggtaattgcttgaaggtacagcgcaaacccatctttttgctatgtagaatggttgaacatgttaagatcttgtctgcagattgttatgagtttgtaacttattaatatcaaaacatcttttttccactattaaaagatattttttgtgaacttctacaggaatctactttctgccagcctcgtgttcatagcttatggcctgttatagtcgatatgctgttaccggaagcagttgttcaaagc

SEQ ID NO: 38788 - DNA, 573 bp, Arabidopsis thaliana landsberg
atatataacataattctaccatttttctattttagagtaacatataaaataggttggagagaatgtattatataattgagtttttaagtgtataataacttagacagaaattccaccaaaaaaaaataacttaagacagaaatttatattttattctaattaaattgtctaatttgatttttttttgtttttatgtaattttctgaatcgtcacttgttagagaatcaacatgtattgttaaaaatgcatctctttatgtgctcatcaattcattattttttcactatttgatcttttctttagtatatgacacatattttttttttaataaatcatatctactgatttggtgaactccggtatgaacacatcaaaatattacaaagtagactttttcctacaaaatcaccattctatctattatgaaaataattttttactaatgcttggtggtagctaaatcgtctgttacaatatttcacatggatgtgatattttgttttcgagttgactcgactggatttatcacttatcagtattatccttaaaattttcatttaaaatttctaata

SEQ ID NO: 38789 - DNA, 606 bp, Arabidopsis thaliana landsberg
agtacgaagaaaaagcgtataataagctcttccacgaaccacattaactcaagagtaaaatagtcgctactaccactctccgaatttagtttctctctatggtaattcagctaagatgctattaaaacaaataaataaataaataaataaagaagaagttgggagagatgggaaacgcgtataccaaagatggtgaggtggtataagctttacatggctatgacctaaccccacatgcgacctcctcctatcgtgccatgttgacgttctctcttggtcctacatgtctccttcatcttcaacatcccctcctttcttgcctcatttcttgtgtttctccattttcttatcactatttgtttagttttttatttccccacaacaaaattctccagcaagtgtctttccagtctccttcctgtcaaaagcccgagtttaattcgtaattttacaaaaaaaacaattatgtaatatttgagtttcacgtccattgtattactcaatatccaagctaacatttcatataaattattcacccagcaaattacccataaattctttgcaatttccttaccaaaaaaaataaataattaaaattttatctac

SEQ ID NO: 38790 - DNA, 89 bp, Arabidopsis thaliana landsberg
aaatgctgaaaaaccagcattttcaaatttaagatcggtcattgcctaattgggaagctcaactggcagcaactaaacaaacttgattt

SEQ ID NO: 38791 - DNA, 371 bp, Arabidopsis thaliana landsberg
ctttccgatatttacataaagttcaaatacgtgacgctgggctctccctagttgctatcgtcaattagtgtaatctgtatctagtcgcatctcccacgttacatataatttacataattattcgaaagatcccaaataatatacttcaaatagcaattaaagaagcattatcgtgtacataatgcatacacataattaaacgcatccttcttttttagttaaattttaagtcttatcagaatcaaaacgaaaaaaatactataaatgtgtctatttgaatctgatatgcataatgctttttatggctatcatattcaaatacagaaattatacatgtaaaatcgtaattgacaaaaaaatgtgattatctt

SEQ ID NO: 38792 - DNA, 800 bp, Arabidopsis thaliana landsberg
gtaagaccaattaaaagaagttttacccgactgagatctttatccatatcaacagctttttcatgagtcctgttgatttgttcaccttgctgatgcaacatttcgagcgttcttgcaccatctgatcttatatcttcagcgatcttaagacaattattaacacctttggttgtttcttcagctttataaactgcatatttttctaattcttctgtcgtttggctctgcagaccaccagaatcgttgaaaccgttcttgtatttgtcgtcatcgtcgaaatctggtgttatcaggattggttctgaagaagtccttcttcctgcagtgattgttcctcctttgttgtttgatgattcattgggaagtttattgttccccggagatttgaaaaacccaaacatctatgtaacaatgaggtgatgatgattatcgattaaactgataaaaaagattgaatcaggaagaaatagaatttgatgggttggttacctgtgaaatctcaaagattagaaaaaaaaagattctaatcaagaaaacttcagggattagaaaaaagaaaatggttatccaaaaatagaaacctgtgacagagatatgtaataacgtcctatgcttctccctattttgggaccgttaagagtgtaataaccaaacactgtttcagagagaaggcttatgtcttaacatgtttaatggagaaatgtcaagacccatattaatttcgttttgcttgtgcatataggaagtgagatatgtatactaaaagatatgaacaaaagttagtttatttaacagttgaa

SEQ ID NO: 38793 - DNA, 770 bp, Arabidopsis thaliana landsberg
ttttcattattaattcagtacttttagagttttatgttctaactttctaataataaatgagaaactacatcaattgcgtgtagtacaatctttctttttaatgtgtataggatggatctctgaatggtaaataatctatagtattccgtacatttaatttgttctacataactgtgatctgatgttcttttgaaattgtctactttattcagatcggtagttcactaaacagcgaacggaaaacttcatgtgggaaatgaacaaaacttcgataagttaaatctagaaagaaatatcatatgatgtatgcatacatgcatgaagatgttaacttaattggtagtaatatgttgaattgaccaattgatgaaaggattacaactagtctagatacccctcaaactgcgttcacatgttcaaaatataactaagacaaaaaatggattaatttgtgtatatatttaagaacatttttacgctcctttttagtttattttcaaagtaggttaacctaaatcaaattccttggaaaaaattaattaactaatttataaatacaaatttgaataaaatatgttatagttttggattaaacctcgatcatcgagttatttaatactattgtaatagataatgtttttcgaagaacccgtgccctactcgttccggcacgagactgcgtgtggagagtaagacgacacataaaaatgcttaaagaaactttcattaatcatggagctattaatactaactaattggagacacataga

SEQ ID NO: 38794 - DNA, 169 bp, Arabidopsis thaliana landsberg
  unsure (1)..(169): unsure at all n locations
caccaggaccaggnaagaanccccgcgaagagccaaaccaagccgaaagcaccacaccagacggagcccnaccgacaaaaccggnacgccagaaccgngcaaacagaccccccccggaacccaaaaacacngacgncacagaaagggccaaagaagcacgagaagcaac

SEQ ID NO: 38795 - DNA, 899 bp, Arabidopsis thaliana landsberg
  unsure (1)..(899): unsure at all n locations
gtaatgaagattgaaacgtaaaaggttcggttttttgacattaccacatgcatcaggagagcaaactgcttcttccttagctcaagcaatctccaacttgcagtgctctctgcttcaagctcagcaatctccttgttcaattcatatataaccttctctgtctctgaccttggcggttgcgcagaaatcagttttcttatcgtctcacactcttctttatgctgtctatctattttactctcctcaagctgcttctttagatcttcaatctcagctttcgcctgcattatctgccttttcgtctcatctttcacctcattaaagctctctttctccctaaggtttgcttccacaaccgcttggctcttcagaagcggaatctcgaaagttgacagttcctgtaaaaaagctttggcaagtctaccgcagtcgttatagttctcttcttctttatccacctcgagtacaaaagaagtgaacttcttctgaagtttcttcaatggaggctcgcctcgagtggtcgtggttcgggttagaagccggtttcttatgattttgtcatcgtcaacaggatcaaatgcataattaaccttagttactacagtctctaatctaccagaaattctccttgctttaactgacatctcaacttacttaaaaacctcttaattcaatcctgcaaaggcaatgcacaaacaaagaacattcaacaaccaaacaatcttaacctacagaaataaagctaagggatacatattcaagcttggatctaaatagcagaactgaaacataaagtattacgatttacgcaatanatctctcgatttcttcttctcttcttcaattctcaatcaaacttaaatagatttttatgagcattcatcatcaaaatcttaact

SEQ ID NO: 38796 - DNA, 2142 bp, Arabidopsis thaliana landsberg
ggtttttaaaaaaaaatgtttcattctgttaccggaaatatatatatttaacatatcattgaaataaaaaaagagtgaagagcgcatttaaggaaattgtacacttcaagaacaatgaatgcctcacttaaatgcatcttggtgtactgcactatcaatctcgtctttaactcttgtggaagtcactagataataatctaatcaacagaaatatttttgtatatcatgacaaaacctcaatataaataaagacaataacattctcaaagatataaatttccaaactctctcacaaaccaaaaccaaattccaacatgaagaagacctacaagcttcaaagcctcttctcttctctcatcttcctcataatcttgctattgatttcgagagccgcggccgtcggctctggcggtgtctgccggcatccaccatcacaaaacagctgcaagacatgcatggcggagcaaatgaaatacgactgccctaagtgcgtgccggtgctccgatgcatggctcgttgtctttggggcggtgttactcagaggaagtgcaccaccacgtgtggatgcgacaccgcggccaagccgtcgttgccggagtgtaaacgctgcgtttctaggtgtaagtgtagctgtgcggcttaggaacaaatcgagtaaatgctctcttgatggtaaaataatatgttaaatgttaccatgttggatctttgtctctttaacttgatgttatatatgtatgttgaatctttttgtcgtttaacttgatgttgtatacgttgaatgctaaaagtatatagttcctatttatagtcatatatctaagagatatatcacattattcttttttcccggtcaatatactcacacacacacacatttgatgaatttgattccggattatgacacaagtattttgttccggtcaatatactcacacacacatagtaatcgtatagaattgactaactagtattttttttttcaaattagctatgcaattttttagtgtaggatcaaatctatttattttgcaattttgaattatgattcatgaataaacactaaaagatcaatacgcattcatagaattttgaatgtcaataattatttggataaataatttttagtaacaagttatttcactttaaaccatattttgacattaccatggacccaaatttgagttttagactttggagactaatttattgtttaagattcgtataacatacaaaaaaaaaagataattcgttcgttattaaccgtggaaattttcgttatttaatggaacataaacggactaaaaacaatagcaaacgatgacctatcgtacacggtacaccgcgacacaccggattaaaccgccgtcattctctgagaaatctctggaaacatctgaaacccaaatactgagcacagaatctctccatctcctcaccgcctctctctctacacatctcttcctccaccgcttcttcccaatacaaaggccacgcgccaccgccttgtccggagtctactccgccgagatcgttgtaattccaccattgaatttcgtctttagtctccgagattgaatcgagtatttcctgcatccctacgatcttacggctcactttcctccgagcttctctgatcgtcggatctaaaccagggacggagtctagtttcagaagcagagccatcagagtctcgttcattctcagacgttccttctcatcgcttctaatggcgtctactgtttcttgccgttggattatgctctgtacacggttcgcttcccgattgatggatgagattttcttgtataggtttcggatcctataagaacggtagccagactgaatcctcgctgctgcggcggtggcgtttgttttgacgttggctttcgtcgccggtaatggagtttcaatcgggatttctttggttgccggaggggtagtatggtcattatagaaagtgtgaataacggtggttgttgttgtcgacgatgagaattttcttgaacgtttcatttttttgttttcttttcttgatatggatgagattgtttttttttttgacggtggtcgttagtatataactcgtgaatgtggtataaataaatataactccctagtaattttgcaaagaccaatta

SEQ ID NO: 38797 - DNA, 646 bp, Arabidopsis thaliana landsberg
agcgcataatcatccttactaacttagttttattttggttactatattcataattataaattctaaaaaccaaaaaaaaaaaattgaactgagaacgtgattaattactattaacaaccttcaacaataacttagtattttctaatgtatttaatacttcaaaaaaattaaaatatttcatgatagcataggatccaagacctacttatacattaaaaatcggcttctttactaaattctattaaacaaaatttaagtggaagcaatgtaaagattcatctattttcgtattagtaaattattttttttcttatatatattgctttgacttatcacttttgtcaagtggctcaagcccataggctcctaattaactaatgtattagaaaatgcgttattagatcccctgacgcattataatgatcattttgattatcttatgccttttagttgaaattcgttaagtatattttttggttcttacaccataaaaaaaaaaatccaagatgctttgatgtacattttaacatttttgctatagttctattgtattgccacaacttgaaattaagagaaaacgatggggtttttttcttctaatacttaaaaataaaactttgattatctaattccaaaaattataata

SEQ ID NO: 38798 - DNA, 562 bp, Arabidopsis thaliana landsberg
cccaattaagctcgatcatgtgactctaattggccactaggtaacatgttaaaaataaaaagaaagttccctaaaaacttcaaactttttacttcaacaaagagaaaccaaaaaaaatctagtgttcatgagtttatcattcattttaattttaaacaccggttcttcgattcatctccaaaaaaatcccttcaaaatctagaaaccctaagggggtcgtgtgcctccatttcttttctctttcattttgtgaaatccaaaacattatcgtctatcatgtgtataaacaaaaatttgttgcattttttactaacaagataggttactttgcatacaatttaaagtgacgacattttgccaatcgataagtctctttctcaagagagaattaaaaatgcaaggcctgcagcctctggcagcaaaaataatacaagggtagtggaccgacaaaataataaatggggcactctataatcagaagacggccacgactcgagctggtaataagatactaattgacattgtaatgcatggcaaatgataattgcctatttaggacaag

SEQ ID NO: 38799 - DNA, 529 bp, Arabidopsis thaliana landsberg
  unsure (1)..(529): unsure at all n locations
tgagtaatcaaatcgtactttctacgcacgtgataacacatgtgctagttgaccggcttagggttttaatctttttaatctcactaatcagtaatcactgattaccttcctttaattacaattttattttataaaattaatgtaactacttaactagatatcctcaaataaagagtatatatctctcgtgtgtggtatgtgactgtgtgtatatgatcggaatgtactcacgtgacacaccagtgatcacgttctagttgctactaattccattcatttgcgtataaaataaacgccaaaccaaacgcaagtcgtggaatgatgataccataagtcccaagtcaaagtcaattgggattaaagtcaaaagaagatttagtttgactttatcaaccatttgttacgcgtggttcctaatagataacgttgtaatttcttataaagcaaaaacatangcacataatattaatacatgtaggattatgcaatttctaacaataaagagatcaaatngtctaaatatgacaca

SEQ ID NO: 38800 - DNA, 844 bp, Arabidopsis thaliana landsberg
agagaatcgaaacttttatcaagtatctatataatacaaaacggcaccagcttcagtaaacagtctccagtcgtcacatattccctgcgaacccttgtaatgctggaaatgaagagaaatttaaaaaccagaaagataaataatctttaacgaacagatcagagtatggccataaaaaaaaattacctccgaaaagaactgcaaggcgcaagttgttcgtgtactcgataacgcaatcaaggatggcgttgatatcagactgtaagattatacggaaaaaaaaaaacattaacaaaactaacatttcccaagaaaaaaaaatcagttaacaaaggaagcagttgtgaacctgtgggcagttgggtgtaatttccttaagtgtttctagttgccttcttatacgttcccgccgtttcttctaaggtatccaaagaagagaaaagagtaaatcaagagtttcttggggaagacgtatcataacaatacaactattattggttaccttcttcaacaaggtatcatgatcagatttgtctgaagatttaatcacgcactgtgtcttaactcgcttcttctttccttctctcctcgactcagctgacctcttttgccctactttctctacacctttttcgttgttgatcctacgcaagtcactattcgcctctggattagtgagcgagtatagtatctcaaaccattgccgaagaaatacttcgtccttgttcattcttttgatagttttaagtgattctttactgataagtttggctgatttgagtttaacgcagacatgcttcaagggtacttatacagggagaaaaggatatatatgtaaactact

SEQ ID NO: 38801 - DNA, 1004 bp, Arabidopsis thaliana landsberg
ttattctattgactagtatataagaagcccatgctactgacatgcgttaaattacttgcgactttgatttgttcttgtgttgtgaaaattattaactttacggtgtgtgttttcaactatatacctcgttcgtatgctttcaaattggaacataacatctgctataattaactatcgaatttttagtaaattcattttatatgatccagctttatatctagtgttttatagtaagttttatagaataattctataaataatgatgatcacgttcacatatccaatttgcggcgaacaaagtgaatgcacaaaagtttccaattgcgttctcaactgtgcagacagcagcatcaattccttaatgaagtatttttaaaatattggtcgtaaatttgtaaatatattttgatcgttcgcagcgtatgaagacttaaaaaaaaaagttaaagttatatatatttacactatatagttgttagtagtattttattttagtttttgcactgaaaacatcaatcgtacttgttcgcttgatgaatgcacaaactgcatcatttatttcattgcaacattcacttaacctcgtatatacaatttttgaaacaaaggaaaagcatatgggagacaattgctaaaagctgcagctatttgttcagcatctgcttttgattcaattattttattaagttcgtttttctggtactatttatacatatacaaaataattgttttattaaatatcagaattagaaagtgacattgtagagtccaaatgcttatagtggaatttgtaattgagaacatacacaacaaaatgcgaaaaaaaataatgaaaaaagcgtttaatcgtcaaattaaacaagggatctgattttactcaattactcaacatacatatctcattattttgaatatccttatcaaattcaacaagatatacacataaaaagacaagatttactacggcttctagaattgtcaaagatattaatgaaccgatggtt

SEQ ID NO: 38802 - DNA, 420 bp, Arabidopsis thaliana landsberg
tatggagatacatttgttctagtattttaaatgggagttattctttatagcgagacgtgattggtcagtacatcagatgtgtgtctaacaatgtctttgtccatggcgatctcttgcaagaggtccatatgagagtgcctataataagccattctttattcagctatattaagcctatgacttaaataataaataaaatgtttggagacatgaaggtgataaacaaatcatgccgttctcatattagaaaaccgaacatcttgccacttttgtagcggccggttcaaatttccagttctgatgaacggagtggtgagtgagccaaagccgccgacgagacgattcgatgactccgaattgcttattgaaaaccctgaagacagcttaacaaacttatacattcttaatctacaagctttt

SEQ ID NO: 38803 - DNA, 498 bp, Arabidopsis thaliana landsberg
gtactcgagttgtttccatagaggtagtaccgactacaatcgcaatcagtggaatataattactacatgtaggataatatcccaaaacaacatttgccaacaaaacaacatgtagtacaaagatttgttacattatataaccaagacaactatgatagttatactatatatctcatcaatcataaatgtctataaagacgtgtagttatgtaacatatcaatgtaataaatacaagggagagaaaagtccgtaccagaacatcagaagtggcgttgtcatagccagtggcagcagaagcaaaggtaacacctgttgcaaaatccgaaatgttataagaaggatccaagtacgccggaatgattggtttaagccctaaggcttcggacataaaatccgtcgcaatctttccgttacaaaaccgtccggtcggctttccaccaacaaagtcccgtccatatggctcaaagttgcttctagcaacagttgggatatagttg

SEQ ID NO: 38804 - DNA, 766 bp, Arabidopsis thaliana landsberg
accttgctcctcctcttcatcgaacggttctctttgatcatcttgctaagagataagaggaaaagtggcataaatccatgccgagattgctcttatcggtccctttatttgttggttggtcccaatcacttgcactggatatgtaactgtttctccatgttactccttctcttttaccaatatacccttcattttcttcaatttgggtgtagtcccaaatgtgactcttttggcctaattgtatcaacttgtttactttttcttatatatgttcatcaatgttacgacgaatgtaaaaaaaaaaatatgatttggaatttgataccgaatctcgacactattagtatattattggacccgtcatatgtatttatcaccagagagatgtgagttttatgatacatagtttttttctttcatctgaaaagaaaattaaacacatgtaaaataatttctgcctgtagtcttttaatcactgaagtaactcgaatttgatgttagataattttttcacaaaaatattcaaattcaacagattaagttgttgatgacagatagctctctgggaggaaaaaaagaagaaaagataatggtccgtattaatatagttgaaaacttgaaactactttttagtttgtatataatacagtagactagggatccagttgagtttctttctttattttgagtttgtgtttatgtttgattttacgtttttatatgtaaataagatattttaccgaattatggtttttatttgggtaga

SEQ ID NO: 38805 - DNA, 537 bp, Arabidopsis thaliana landsberg
  unsure (1)..(537): unsure at all n locations
agaggaccttaaatttgtaggatgtcggcttcttggtcgtcccagtagaattcttagcatgccactcatagtctcgaattatggctcgtccctttgcacttccatgatactccacaacattaaggagtggagcccaaagagaaaactctgatagccagtttggcattgttgaaagtggaaccaggactaaacaaggtcttgcaactccaaattcaaaataaagggaggagaggaatgcactagcagacacagtttttccaagccccatctcatcagcaagtattacattttttgatttatgccagcatctacgcagccaattcaaagcctcaagctgatgggcaaacaaggcacctcctctgagctcttgaggttnnnnnnnnnnnnnnnnnnnnnnnnncctttcccttgtgggattacccttactattcctttccaatgttttctgctcatactgatgaaaaagatctattaaatgggatgaatgtttaagaataggctcctgcaagctctcccacgtgcattcatcataagcta

SEQ ID NO: 38806 - DNA, 1431 bp, Arabidopsis thaliana landsberg
acaatcataacctcagttttaacagtttcaatcttataacattaccacttcggagctaccggtgatgaaagaagcacagtgtgtgggcacaaaaccgggtgcaactgcgttcacacgtgtatcgggggccatctcagcagcaagcgcctgaaacacatgatgaataatctcataaccatcatcatcataactattcaatcatgagatggggacaatgatacacataccttagttagtccgagaagagcagttttagtgacaccatacatagccatagctccttgtggtgaaaatccagcaatagaagttatgaagataacagaagaacccttctcaaggtgaggagccatatcctgataaaataaacatagaggagtcaaatcaaatctaaaaaaaaattgatctatcgggtcatggaaacaaaaagctaacacttacggaagctttacctgaaggagaagtatagaggatttgacattgatttcccaaagcttgtcaagaacagcttctttgctagacaaaattgggtctgtagatggattggcagcagcgttacagacaacaatatctatcttcccatatttctgaatccaatagacatctcttaggtaaaaatcaaagatgcgcaaatgtgagatactaagagcttaaagcacacaacaaatcaacaacaattaaaaaaaaaaaacaacttcttggttatgtaaagctgttcatgatcaactttgcaatgagctttgaaccaaaagctcgtaggatgtgttacctgaaccgtcttttcgacaagattgcggcgatgttgagcattggaaacatgacagacgattccatatgcatcaatccctttggatttgagttttgctactgcctcatcaacatttgcctgcacatatataatcaaattcaacccttttagtctaagaaaaattgcaaagctacaattcaagaacaaagaggcacaaatctacgaaaataagagtaaagttcaattccttaggaatgactcttttgagcttaatctaattaatatcggtcgacaaaaaaacagaaagagcaaagttcctttaaaaactttgaaaattgcgatcatacacttcacagtgattgttgtataattgcatctgtaacaaatcaaatccagaattatcaacaattcgcggtacgaaaagaaacctaatgaagcacaaatacaaagatcccatcactagaaaacgattcttcagtttgatccttttagttcaaattcggaagatgaaagtgagagatggtgaaacctgtttgcgggaagagacgactacggaagcgccttcgagaccgaaacgctcaatgattccgaaaccaatcccttgcgtcgaagccgtcacaatcgcgactttgccttccaatcttctcggtagtttcttcttccattcaatcttttttttttttttg

SEQ ID NO: 38807 - DNA, 654 bp, Arabidopsis thaliana landsberg
cggagagattttccatgatacagttgtagagtctgacgggacactactggaagacaataatccagagtctgaaataaaaatgcataaaagccctctggaagtgtcttcagaaggtctgagtactgaaccagacaacaaggacgtagaaagtattgaatctacaagtcccaagccatctctggatcaaaggaacagggacacagaaaccaaatctcctggtgagagcattcttgatgataattgcatagattccacacaagtgtataatctgaaccttttagagagtgaggctatcgaccaggcagttagagagcaaacatcttatgcaagccatgaagttgcagatgaggaattgctgcagtcaaatgtgttcaggggcttagagtttgaaccacaatcagcaggcttagaatttgcaccacaatctgcaggtatagaattgaacagacctaagcaagagttgaatctggatcctacttttcctagctttggttttatccctgagactattccgcccaatccagaggacatgccaccccttcctcctatgcaatggcttattggaaaggttccacattcttttcctaccttcatgggggaatcagtcgaaaccagttgttctgctttatcagcggcaccacctactgtttctag

SEQ ID NO: 38808 - DNA, 577 bp, Arabidopsis thaliana landsberg
atgtgtcttgctgacaaaatatttaaaaaaaaacatctttactctcttttaacttttatgcgatagaaaactttgtcaatgtttagttgatgaaattttcatatattttgaaaagtttagagactttttttttttagcgactttgcaacagtcaaacttgaatttaaaatgattaaatagatgatctccaaagatacttttagtctaattatttattaaaatcaatttatataacttttttaattaaatatatggaagattagttttgatgtcgtacgtagattatagtaatataaaattcgagatatctgttagctataattatatgattcgagtcatagctattacaaatcaaagacatcaattatgacgcactaagtatgtaaattgaaaataataaagatttagaacagaatatgtgtagaaaaggtttggagcaaaagacagtaaaagttagaacatccgctatcaaggctttttgagtgtatatttttgttgtcatgataggttttcgaaagattttctcctgtttggttctttattttggaaaatgaaattgattagaaaatggattgga

SEQ ID NO: 38809 - DNA, 333 bp, Arabidopsis thaliana landsberg
ccgctagggtgggaaactaggggtatcccgctgacctgggcgttatggcttgggtcatctacgcttgacagacaccgaaaagtatgatcagtaccaccgatgcggacctcagcgtctggtcgatttagcaccgctgcggaacacacggagaccagcttcgtccgcatacaaggagggaagacacattggacaccaggcacggccctcgcaaagttgggccacttggtcaagactcaggtacggatttgcttacacagatccatttcgtcgtcttacagcagagccgaaatcgtgcgaagcgttagactcagtgagaagatcgcccactcgtcg

SEQ ID NO: 38810 - DNA, 450 bp, Arabidopsis thaliana landsberg
  unsure (1)..(450): unsure at all n locations
aagccgaaagtcatgaagaaatcatgggcgagccgcgtatatnnnnnnnnnnnnnnnnnnatatattgggcgcttgttatnnnnnnnnnnnnnnnnnnnnnnnnnnnnnnnnnnnnnnnnnnnnnnnnnnnnnnncaccgtctcctggctgctataattgccgagattgtcgttttttctgtaataaaaaacggaaaaagactgcgcgaaatcaagagacacatccgcgatcacggcctattgtattcgctatgcttctgatatcgtatttggcgtgtcatttcacgcgctcgtatctggtaatgcgagctccgcatttatggtgatatatgagacagtgtcatactacctaatatatttcagtcacttgatttacatctacaaatcggatcgttctgaccagcctagtttcgccttaaaagtcacagcggttgtgtcatcgccatcctg

SEQ ID NO: 38811 - DNA, 507 bp, Arabidopsis thaliana landsberg
ggccgtgtaaacggggagtcccggagagacctgactaaatgtagcgcagacaacgggttcggtttttgttatatcgacgtacgcccagacttccttgggggctttatttccggaaggggtcaccggagtcgagtgggtatccatttccggagctgaccagcgaatccgcaccgatgtacaccgtgcctccaccggtgtcagcaatgttacggaccttagctgaaaaccgtccgggaattgcgccaagtagacgcaccgctctcccgggtgccacgctaacttgcccgacgctgaaatatgtactccgaacgtcgtccacgacacgtacgggtacaacatgttccggaggctgtaccttatccggcttgtcaacgtatccgcgtagagtttcacgctccccgtgtgtctcgacttcaaacgggatagggtattccgtatcgtcatccccaattggtgcgggtgcgtcacgatacgggaaatgtccctcagactgcaaagctccggaat

SEQ ID NO: 38812 - DNA, 590 bp, Arabidopsis thaliana landsberg
ccccagaatttcagcatattttcctctagatatagtttccttgttgaagccaatcttttcatatagtttggccaaggtaaatcttgctgcaacaagaagaacaaacagaagcaatcaagcatggcgactgggtgaaagagatagttgtacaaagattcagagcacaaaactttctctttggtaagtagaaaaagaaagatcaccagtgacaactccaattgagccagttaatgtcaaattttcagcaacaatggcgtttgcagccattgccatgtagtagcctccacttgctgccacatctgacattgacgcaatgacgggttttgtttcagccagtagtttgatctccctccacattctgtataccattatgaataatgaagattataataaagcctagaaggatttccaaagctattaaattcaaatccacacatgacctctaggctagatagatatcgtatttgcaagttactagatgctcaatatagcattcttaacccattctcttgatttaaaaagatagcgcttcaacttctaacctccattgacgaaaaatatataaaagtaatgggtctgagtgtatcatg

SEQ ID NO: 38813 - DNA, 700 bp, Arabidopsis thaliana landsberg
gaatcaaactccaccaactgaaaatgagaattgagaagaatatatttttaccagtagagaatattttttgcaagtctcttccaccgagattttctcctcaaaatcagatttttgagaatccgacgcatagaaaaacaaattttaaatctcccataccccaccaaaatggacaaacaaattacctaaattccccgaaaaagaaccctaagaatccagaatataaaaaaagatgtatcagttttgctgaatcggctccctgttttgtcgccgtggccaattgaatgaattcaaggaagagagagagtccgacgcatgttcttcgtgctcttttttattaaaagaccaaaccccaacaaactaaacaaaaaacaaaacagaaagactttcatctgaaccatggttagctacttaactacacaattgagtttagaaacttaaaccgggtatggttcgatttagtctttgtctcgagtctttgatacacgacgattgaaaaccccttagattatgtcatggtttttgtcaataattgattgacataattttcaattatgggttttgattaattaaaaatttgcaacagatctatctcaactggtgtagatctaaacaaatactatctgacccctcgagattagattctcatgttcataaaaataaataaaggggaaaccaaacccaaaattagaagtttgctttc

SEQ ID NO: 38814 - DNA, 195 bp, Arabidopsis thaliana landsberg
ctaactggcgcgtactacctatggcgcgggcactccaccagacgagaccctgtgggtagataaaacacagaaccatcttagctagactgactccactaaggcacaacacagactgtgctatcattaatcaaatatatagtgagcaacactaaaactcactaggagctcggatgctcgaactgagtcaaaactaat

SEQ ID NO: 38815 - DNA, 433 bp, Arabidopsis thaliana landsberg
tcttttttttttgtagcaacactactactgggaaactcgttttcatgacacaatctactctgtttggaggaaggagacaatgacatcaactggtgatcgcatcagcaagaaaaagacgaagaaaaaaaaacccaagtacattggacaaaccgattgggactttctgatggagtattgggatacaacacctgctcaaaagaaaagcaagtcagctgctaatagccgcatgtctgatcctcttaataaagggattcacaagcattgtgctggccctgtgccatttgtacggattgagtatgatatggtaagtgactttcttctaattttgctttgttattgttatatactttatttggttttggactaacattcctctttctttttgtttttgggtgagtacggattggattgaaccacccttccttttacaaac

SEQ ID NO: 38816 - DNA, 615 bp, Arabidopsis thaliana landsberg
cgcatgtctcatccaatgccaagtctcgtcgttcaaaaacatctgaacgaacatgtagcccgggaaaaattttctcgatttggtctgtttttgacctttgacgagctcgaccacgttttcagaggggatcaggatgtcgccgaagaggttttccatcttcgaagtcttgatcttctcttcgatggcttttttcgccgtcgcttcgcaaccggtttggacattcacgatgtaccatttcttatccatgttcatggtctacctcagaatatgattgatgaagaaggccgagaaaaggtcgaaagacgcaatgatcgcgctggagacgagaaccatgatcacaacgacaatcgtcatggcggtcacatctttgcgcgaggggaaaacgactttacgcacttcagacacaacctcttcgccccagacgagaatcttaggattgaactgaaggagggcaaaagtgaccagcgcaaacgcgatgggcagtccatggcgagccagatccgagtccgtcgctcgcgcgataacaccaaaagcaccggcaaaagccttgatcaacaaatgcatggtgaaacccaccaaggccgcggccaggcaaaactcagagtcaaaatcttc

SEQ ID NO: 38817 - DNA, 607 bp, Arabidopsis thaliana landsberg
ttatgtaaacctaccttactaaatttgagatttgatttaaactttaaactatcaaatgttacaatgaaaccctgcttcggaatttgtcaaactacaaatcactcactaaatttgggatgtattgtaaaccataaagtatcaaatgttgcaattaaacccttcttcgtcactttttgtttctttatctttcgttaaatgtacctaaacacaaaagcaagagagttataaaagaccattgttgatatagataagttttaatcacttggttaaaaaagaatccaaaatttttcacaaatcataaaggactttaaattgtcacaaatcaaatttaagcctttaaatatactcctgtcagaagccatttaattaaattttagttgctaaactaacaaaggaaagcaatagtcattctgtatcactgtaaatgtcacgcatttcaatggcatagtactagtaaacttgtctcttcaggctatttctagtgttcacacgtaggggattaggcgattagctataagcctatcaacattacttaagaaaaaagaaatcgtcgacaattattagttatttatacgatattatcaccgttcatgacagctttttgaat

SEQ ID NO: 38818 - DNA, 113 bp, Arabidopsis thaliana landsberg
ggtagcgcctgaactcctcccgtgtaggatcgtccatggcgccatcgtacaaagaactgctttctttccttatagggactgtgcccctgggggggtggcggcgggatactacc

SEQ ID NO: 38819 - DNA, 571 bp, Arabidopsis thaliana landsberg
gaatgacatacacaaactgtcccacagtcagatcagccgggactaggttcctgcttattgaaaaaagcttagttatcaagcactatgattaacaagtcaggtccgaatgaaaaggatactgatgccattaatatgcttactttttcttgtcgatggttggtatatcactcttctcagccttctcaacaatcacctggatcccacaaaaatataaatgcgtggcaatcatcatctcaagtgtcatttttaccaggtgaatcataaagcacttagctacatgaattattccagaatctacttatctaagccgtaaggtatgagctaatcagacaataataacttgataactctcttttagttgggtttccatttaataccagatggtatcccaataagatcattatcacccagagagaaataagcaattgtgaaaggaaagaaccacaaaagggcaaactaccatattgttgggccataaaacaaaataacttaagctgcacaaactcagtgaaacacatacgattggtccaaacgtggaaaagaaaacgatatgctaatcaaatttaacttt

SEQ ID NO: 38820 - DNA, 630 bp, Arabidopsis thaliana landsberg
  unsure (1)..(630): unsure at all n locations
acacatacaacttcaacctaaataattagaagacacttttataaaaaaaaaaaaagtatatacacttgcactttagtaagctatatttaagtgtgcggcataactttggcaccaaattttgtaaactccgtttatgaccattatagaagtttgaccacgtgctaaaacgcaaactgatttactaaactccattttaattagtttatgaactttgtcttaattctccacctgtttaatatatacaacaaatgaaatcaaaagaggaaatttgggtttgcgagtaggattatagtgttccgagaaagagtgaaatcgaattcaacttgaagaattatagtatgtgtttatgattttggatgaggtaaaacaaaaaagaaaaacaaaatcaatacaaattctgaaattttagccattgataaaggttgatctatattcacaagccaaacttattctcatcacgagggttatatgattcgaaggatctggtactaaaaacatatattgcctcgatgactagtagtagtacttgggtcgaaatatttcaatacaccttatttcttgaaaaatgttgaaaataccatactttcaccagatatttacggtaaaaggcattcngaatctactacaaac

SEQ ID NO: 38821 - DNA, 647 bp, Arabidopsis thaliana landsberg
  unsure (1)..(647): unsure at all n locations
aagatatagtagtgtgcaaattgcatatcaaatgcacttctaaaatccagtgaatcgttactcaaccataaaatctctctgaatttatcgagtacaactcggccagaatcttctttcgcataaggtgcgagacccatgattttgtactcatgttcatttcttctcattcccagataatcagttactcgaccatagagtgtacctatagaatctctagctgaaacgacatggtgtcgtttcacttggttgttcttatattcacaaattgaccctgacaagccgtctccttcaccatcgagcgtgataattagctgatcctgtgaggaatcagtaaacgccaatgcaccccacgcatgagcgagatggtgatctaggtgtaaaatctcttgagatggaaattttttctgtagaaattgattaattttacgcgctctaaaatattgattaaaaaatttctttattcgtttccagaaatctaagacatggagaatcttgtatctaaaaagtatagacttaacaaagacatcttcaacatcttcttttcgttgttgtcgtagtctcttattcttctgctcatcanagaatattgttttatatcgaccgccaccagaaataatcacaaccctgtcaaatgttttgatgtgata

SEQ ID NO: 38822 - DNA, 611 bp, Arabidopsis thaliana landsberg
ggctgtctgtctcttttttccagtatcggattttccacaatgatggctactgtcagcgccgccagcgacaatactgcataaaaaggccttttcaggaatagccaggctgtcataaaaacgatacacaaatacaacatgcatgttgccggcagtgagatatcgatatgcgctgtaacagaaaaaggcagcctgtctgtacgctcgatcagcccgttcatcagttgaatgcaaaaggaaacggctttgccggtatatgctcccgcggcaggaaggcactgtgctatcggtaataacagttccccgtaaagaatgatacctgataaaggcactgcaataaaattggtgaacaggaacaggttggggaactggtgaaaataatagagtatcagcggcagggtaaatacctgtgcagataatgtaatggcattcagttgccagataccattcagaagtttgttgtggcagtagataagccggtacaggggtttcatgaacagcagtatgcccagcacggctgcataggataactggaacccggcatcccataaaaaccagggatggtatgccagcaggcagaatgccgaagctgcaagtgtattgtatacctgtgt

SEQ ID NO: 38823 - DNA, 548 bp, Arabidopsis thaliana landsberg
aaccaagagcttataaaaaccaaatatggtctttatgaaaatataaaatttgaatatattactgaaaattgaaattcggcattttcagccaagcctcatgccttgttacattttcgattatcactgtcaaaattacgcttaaacagtgataaataatagacaaatatgcttaccatagctaaagatattgctgaaacagagttctactacagtgagaaatgacaattacaacagcaaaccaacataatctagtaagaatataattttcttatcttcttatttattttttaagaccatcgattttattgttctaataaaataaatgatttgctaatcgaaaaattaaattttggctaccaatgtattttcttaacgcatttttgattgtaattacaaaaatttgtcgaaacaatataaattttggctaccaatgtattttcttaacgcatttttgaatgtaattacaaaaattgtcgaaacaattttttttacggaattttgtcaccacaatttgaattataatgttcgtactttcgtatgcatttttt

SEQ ID NO: 38824 - DNA, 618 bp, Arabidopsis thaliana landsberg
cttgggaaaagagccatcacctcggtcagcaccccttcaaggaaagtaaaagtttcttctgtagggcaataaatactgttcccgcgattcggattagcggagccgggcgcaggtatacattttaattccgggtatgctcttaaagcagcatcagaatgagcgggcatttcaatctcagggatgatattgataaagcgttctgaggcatactgtaccacatcccggatctcatcctgcgtataaaagccggaatacggaacctcgtccggccagtctctgttccctccgaatgaggtctgcatcctggttcccccgacttcagtaagctttggatatctcttgatttcgatcctccatccctgtccgtcagtcaggtgccagtgaaaattattgagcttgtaggaagacatgatatcgatcacttttttgacctgtgccacagtgaaaaaatgacgggctacgtcgagcatcattccccggtgcctgaatctcggatggtcttcgatgatgaaaacagggaagctccacgcttccctgtgatgctaccggaaacagctgcatatatgactgtatcccgtaaaacaggccggctcccttgccatgatcatgatctacccg

SEQ ID NO: 38825 - DNA, 359 bp, Arabidopsis thaliana landsberg
cctttttccggtaaacctttcctttttatgttttcatccattagagcatccacaggatcaatcttcttcaagttccggttaacgagttgttgtcggttcttgaatttgacttggttaatcggttcaggtaccatgttgaaattggagaattccgaggatgagaccggttcgaagaacgagtcaaccggtgaagaaccgtgagagtttgactcggttatgcttgaatttgttttgattgtgagaagtttttgtaattgatctttagcttcgtctctttcttgacgagcaagtttgagaagatgaagaagattcttcacttcttcttggtgaagttttgtttcttcattagcttttgcttt

SEQ ID NO: 38826 - DNA, 643 bp, Arabidopsis thaliana landsberg
caaaaactacgaaaaaagctattatctctatgcatcaaatctgacactagtagccttatgtactgagtgttcgaagaaaaagtcattattatatttaattcaaattatttgtatatttttctatttttgagccgaatctgaaatgaaacattattgacattggataacctctttctaaaattttcgtgtcaatgaaaaaaggaaaatgttaatgtacaatctgtttttataattaattgattaagaccccaagtttatggagaaatatatggtgtttgaaagtaggtcataatttgtgggttttaactttagaggggacaatttcttcattatttcaaagatactgacaccaccatctccagtaattgtggctcaaaaatttaatatattttcttcaatttatatttgaataagatatacaataaatcttagagagttgtcttaagttgcataatcctactcaatcaaaaatattctgtaactaaatggtatagttattatggtttattttagacatttttgtcaactttaaattttttagcaaagaaagaaaatttaagagtggaaaatattttatgtaacagtgtagtcttaactcttaagatagaatctaaattactcttggtcgtttaatatgttttac

SEQ ID NO: 38827 - DNA, 496 bp, Arabidopsis thaliana landsberg
  unsure (1)..(496): unsure at all n locations
cagtttgagtttatggatagtggttatattttaaatgttacaattaaatgaaattataatttgtacaacatgcataatgattggcttaaagtaaaagaaggtttactcaaaaattgtcctaaatcttatctaatgttgtgggttagaatatgcaatatgcatcttttttccaaaatcttactttttaatctttaaattaacattctaactcatcttctcttatccacctattaattctacatatatacagaatttctacactctaataatatatttgtttaataaattcaacatcctgcctcacgatttttgtttcatatattttattattattatatttgcatttttgtgattaaattaatatacattatcgattaaaatttattaaaaataattaagagttagatagtcttataaatatattttttaaacctttttattttatattattcttacacatggtattgacggnttaaataattttgtacattgtgat

SEQ ID NO: 38828 - DNA, 3108 bp, Arabidopsis thaliana landsberg
acgtttcgttctccttcttcatcacctacagagtctttgctcccgccaaaaaatctccctctttaaggtaagcagtcataatggtgttgttaagtataagctctacataatccttcgtccccagtcgtcattcaatatcagggtcggaaagaatgagacgggttactctggaatttagggttaagagaagtgacggattcgattgaagtactctgataccaaattttccaaagactctgtgatctttctcgctgtttctatcttaggtcattgaaaagccgcgagagcttcctataagttcggtttcgtatctctttttcatgattcgtcacacaaccaaaaaaataagttctgagaattcttgccgacgacggcgagggagagacttctgagtctccgtgacatggctaaataacttggaccaaggaaacgacgtcgttctaactcaaaaaaacatattttggtcaacaacacacccttgagaagaaaaacacctattaattgccaattagtttcgattttggccaaatttgatccaacaaaaccattaattattgtacatcatttgtttctcgcatattttgttcatatcaattcaaaagaactaaaaagatctatgtacaaagtacaatatacaatgattaataacgctctatcatgttataaacctcaaagtattgagaaagagaatggaaaaaacccacaaaaaagattggataaatcctacattaatatatatatgtgtaataagatttacctatgtgatatatctctgtggttaagaaaacaaatagaggtgagagagagagtgtttagggaaactaattatctgattttcttctttcctcatcgtttgttgtgcaaaggatttgatcccgtcttaaccttccgtttatccggtaggatttcaccggcgtcgacgaccggaaaagtaggttgtgaagggagaaactctctggtttcaccagaaggtttggatgagaagcgtcgtctttcgacgtggattcttgaagctttagatagaacaataacgaggaagagaaaaacaatgagacagagaagacgaggacgactcggattcatatttttatttttcataagaatacaaaaatcttttcttgaagatttttttttttttttcttagagagatttttggtatatatgattatgagaagaaacaaggtgtgatgcacaaacttccatatgtgttgttgcgagtgtgtatatatttgcattttatttagggattaggtgtagacatatatggtccacttcataaagtttcttctttgtcaacattaatttcatattttacaatattcaaggttttcatttgataatttaagaatatacaagtttgaggtgcagttttagtaaatacattttgtgagtcaaaatactaaattttctatatttactggtggactaaaacatgtagtctagtgatttctattaatgtcatctggattcaaacatgcataatacatattgttgtcttttattatcccaatagtatttaaaaaaatcaacctactttagagtttagagcacatttacaaattttcgcttaataaaactttcattattatttgttttttgtttcaaaaaaaaatgggagatgatcaaaatagacaaacttatatttacaaaatttacaaaaacataactgtggaactgtcagtaacttgtaaaatggagagaatctgataaatacaatggtgaacggtgaaccccacttcccacctaaaaatggccggtttaaaagtgagtattgattatagatgctacgatttgaaatttaactcaaatgcaaaataaatatccaatagcatttaatgtgcaaggtcacacatacacatgcacgtacatcaatacattttttttaaagttcacatacacacatatataggtagatactataaatttttagtaatttaccatgtagtttgcacggataatattccaaattttgcaacattttatccataaacaaacaatttaattggtgaataactaaaggaaagtttttgtcatgatcaattttctgattagggttttcactaatgaaacgtaaaacataattttttttctttaaaacatatcagtttcatacctacgcgtgagtgttaagaagatttttaaggtgaaagtattcgtatgcagaatgatgaagctttgaatagcgacatgatttgtatgaatatcattatcaacaatatgaaacacaagagacaaagttacttataaagttacattttttctgttgacctttttgaaatgtgaccggaaaatttcttctttctttttctccacagactaattcaaaagtcatgattatcagtaatataataaaacctacgatttaaattattttgactagtgaaaacgactttgctctaatggtcgataaatagagtacaatatagatctcatgtttaactttaaaaccgactatagatgcaaaattctcaacatctcattatgtcaaacattgaactgttcgtggtggttatattattgtctattttcatagtttccggctgatataatactattttcttgactaacgaaggttgccgaccataagtgaaacattggccaatttcatttgatttggggctttgagaatttctggcccatccaacccaaatctgttaaaggttgccgaccacacctttcaatattggccagagaaagtgtggcgatggcccagaaaatctcaaagccccaaatccaatgattttctgttttcttgaccatataaccaaaactatttcaacaaattcttgctaaaatctgtttttggtcaaaactgtttcaacatggcatcagtctgacgattatgaacctactcagtccttggacaatgatcatgtgtctgatggctaatttggatataattagggggagcgttttctatacgcatataatttgcgattgttcagtgggaaagtataatcatccgtgccactatattgtgagcatccacttcacaagcaatcacacgagtgcgttggaactaagatctttttgctgatccttgggtaccctaagcaccctgaacattgctttaggatacaacatttggctagcgggaaccttttgtc

SEQ ID NO: 38829 - DNA, 860 bp, Arabidopsis thaliana landsberg
  unsure (1)..(860): unsure at all n locations
actgcgtaaaaataaaaaaataaaaaataacagaatttgcgtgctgatatgattttgacatgaaagattcccacatggtgtcacacaataaacaaaattcaatgttattatataagtggagttacacttgtgctttcgacatttccattaattatttatcccaatatggacttatgcctacggtgcgatatctaatactttctctaaccatttgtgggatatgcaccaaaactcgaatttgggaatgctatttttttagcaagacagacgtgatacgaaatatgtcaccgctttaagaaagaaattccgatatctatatattaaccatggaattaaaaatatagtctagccataccaaaaaaagaaactcaagtactcgaactcaaagctgttgaaccaaaaaaacggttatgtgtcgatttcatcggttttctagattatcccccacataaacctaattaacattttgagcacttgacttctgaaccgtcctcctacctttcacacgttccaaaccacaactcccgctcgtgcgaactctcatcttttattgtttatttgatacaccaaacaaaaaaaatgcacaccgaatttcattacattatccttcaagccattcatagttacatcgtactcgaccctcaagtagtaaaatttaatttatgatcacaagatcgatggccggaaaaaatagtttgaatatatactttttctagcctttgcattattttgcatgagtattattacttcggccatgctaattgttagaaaatacagcttacattttatttaacactgtattggtatatatgtatgtgggatatattatggtatcattagaaaatgctnattaatatgta

SEQ ID NO: 38830 - DNA, 275 bp, Arabidopsis thaliana landsberg
atgtaagaatatgagtcttatgcttaaattcccaatttttttatatgactatcaaactcgtttttcttctaagccactgagcttcgaagattgtcatgtgtttttgtgtacaaaatatttaaaatttggtactgagtggggtgttcgagactgattggcatgcattgtttttgttgatctgatcatctttccttcgagagccaatgattctttcttccacaaattcattcatcgagagccatttgcgaaggttaagttttttttttttttttttt

SEQ ID NO: 38831 - DNA, 657 bp, Arabidopsis thaliana landsberg
agaccctatataacaatcgaattttgtttatgattatttaatttttctgaacatgcaaaacctcttatttgaaagttgaaatcatagaaagtaacatataagaattcaactacacgtgtcagtgattagactaatgataaatctactccaaagtctccataacttggataattatacatttttttagggtaagagagataggtcgtgcccagaagagcatggtcctgaaaaccaggttttcttaaaataatcaagttaaaaattaggtttaatcataattaattctgaaagaaagaacataacagcctgagatttagacagtcttctcacactaatctccctttttgtttctagtgaaacacagaatcgtaagcttggtggtgtccactaattaatggcatttatgacggttaactaatgttaattattgcattagttaagttactagttgaaggttaatgtcgaagcaaaagaaccgttagcttgtttcagagaaaaaagagctatttaaaaactactatactcatatttttttcattccttacgttaatagtatatcatttttagttcaaagctgacaccgtcaatgaaatcagcacacttaagacaaagattttgtaaaaatgttgtcgtaccaaagcttgttaatttgaatga

SEQ ID NO: 38832 - DNA, 716 bp, Arabidopsis thaliana landsberg
ataaatcacgcatttatacaaaaagatccatccatgctcctataaattcgagcatataattaactaaagaatactcaacatgttcataagtacacctgtcttcacactcgtttcacacattgtaattgacataaattttaatatcttttaaagcaaagcataagttaaattatatagagtatttcttcaacacatttccggacgatatcaccacgaaaaatatcctatatcacctatgtgtcatgactcatgaccacaaggaaggaaaaatgtatttttatgatcaaacggttttcactttttttatcattcattctagaaaaaaattataatcgttttctttcattcctacgatacaataattcataacgatcttttagaatttttgttttgttttctgtgtgtatgggtaaatatctttcatacgtagacagatacataacaattaaagctggtgaagtaataattgagaagagacagagaaattgaaaaaagagagtttgtttttcgtctaagtaaataccgatgatgccctcacctttctaattccctcctttgtccctttccattttcatgtttatttctaacttctctgtccctttcaatccttctccaccagatatcctctgattcgatccccacaaattttttcataaaaattattattattctctctaagaacttcaagattagtttcgatttttcctctgaataat

SEQ ID NO: 38833 - DNA, 423 bp, Arabidopsis thaliana landsberg
ctactgggttcagagttcaacgccattggttacaaggtaaaccgttcttcagcgacttgctcaaaatactctgaatcaaacacatttctggtggatcttttaaactgttttatggttaataatagatcgttggggcatcaaacgaacaaatagatgttttcaacgaaatgtggtgccagctgctgctaaagacaggccaatcctccacgggtaaggcttgttgtagagtcttactaatttggatactcgtcttgcttagtatgatgataaacaatcgtggttctgatgtatgcagccaaagaagtaatcagagagaggattaaggccagagatgggattcctttcatgtggcgtttgctggtaatatacattcaaaagcagaacatcactttgttttagtgtactgtatgtgttatttggtat

SEQ ID NO: 38834 - DNA, 343 bp, Arabidopsis thaliana landsberg
atcaaacatcaaaattaaagcataactttgaagctacgttaattttactacttattagtaatgtgtagggttcccttttacttaaactaaagataaatgtatcgtatatatgcaaaaagaatcttgtaatctggtgcgtggacacgactaattttgattatcaaagaaagaaaagattgagtgcaagtaaaaaagaggaagaaagtttatttcaagagactttttgtgtactttaatagatcaactgaataagtatacgttgtgatatatacttgtaagaaaaatatattatatattaataatttaacaaaaaattataaaattataaatacaaagagatgtg

SEQ ID NO: 38835 - DNA, 330 bp, Arabidopsis thaliana landsberg
tttatatctatttcaagatcgcatctttgtgctagaagtgcatcatactgtttatgcttttagttgtctaaggagctgtttgaagatgaacttaataccttatttcctttctactgtttagcttgttggtgaaaaaatgccagaattgctggattttgctaatgaccttgttcacttagaagctgctttaaaggtatgcttgttattcatggttacttctgtgagcttccaccttcttgattattgcacctgctttattctttttttaaaaatgcagattgaattgaaaacgttggctgaagaaatgcaagcggcgactaaaggccttga

SEQ ID NO: 38836 - DNA, 943 bp, Arabidopsis thaliana landsberg
  unsure (1)..(943): unsure at all n locations
cagggaggcgtagcatgtcctgctcaacaaaaaagatgccaattagaaaactttttaataaggtcccattattcagactcatataagccaacatagataactgagagtcgtgtgtttatataatagtcccccagaaaaatgaagaaccaataacttaccgtaaacttctgtatcagtttcttgaccttttgcctggtccttttagtggtctcattgtacaaataattatctggcctgtcccaccgacaaagtttaagaacctcctttaactcagtttcaacattttttctattcaaatctaactgctccattacactggttagagaaatttaaattgagaacattaccctggcaaaataatcgtgaactaataatcttaagacagaattggaaaggagcttacaccggtagaaattgaatatagaatccaaaaatattgtagcacatttccaccctcctcttgtgtgaatcactgtcaaagtaaaagcgggagtcaaagacagtcaagttagaagtcaactgtaaaaacagcggaggagcaatcaactgtgaagacttaagtatataatgctgaaggccctttaaatccttcaagaatgatactgacgaggaaagaggaaaagaagaaatcaggcaataattcatacgcagctaaccttgaatatatccccaacgagctacccatacttaattgaagaaggaaacaaaagagaagctgaagacgtctcctaaattcaccaacatttgacgtttcaatgaactccaccaaactgcaacaaaaatatctgttagatgaccgaatacatgcaagaatggaaatgtaagcccacatcatttgtttggtgcacacctttgtgaaatgganctcgtttcatgttctgaaatttccacagcatccttctgaaacagaactgaaaacaaaggaagccacaactgcaacaag

SEQ ID NO: 38837 - DNA, 644 bp, Arabidopsis thaliana landsberg
agtcccccgaattgaaatatataatattttttccgaattttatttttcttcttggcaatgtaaaaacttgtatggaattaaaatttcagcttttagtgtggatgggggtaagtcggctttaattttattattatttagaatatataattttttataaacacaattcaacttgcgttatgtaaactagcacaatgttgtaagcttttacatagttttttttttcattttgattccattcaagttttttttttttttttcagttttggggaaaatgtatccaaattagaacacatttagttacagccagtgaaatatctataaaagaaaaaaaaataatattcaatcttaaacttacaaaaaataagaccttaagtgtaagtagactatatatatagttattattttaaaaccataatttagtatattgttgtaataagattttgacaccaaatttgctagtcttgacttttcatatgaattaaagttgacaaatatattatcaattatgtagttcacggaaggacatggtctcatagactaatcaaacatttgttacttaaatttattctggtagtagatacgtaatttagtacctacgtttgtcttaatctgttctggtagcaggtgcgttgttcattcacttt

SEQ ID NO: 38838 - DNA, 689 bp, Arabidopsis thaliana landsberg
  unsure (1)..(689): unsure at all n locations
tcagaactttggaaagcgagtattgtttagcataattttacttatttataaaggtacaaattttatttaataaaactgcagaaaaataaattcgagaatttaattgacacgtgtgtctttttttgttccctaaaatcatttgctttttagttattttggcttttctctatctgttacagaaattatacatatattctgggggaaaaaaaattacatgtaaaatcagattttcatgcattaagcacatgattcgcttttgttctctaatttgtatgcattgagcacatgattcactttaacagaaatgctgtctgcaattctaggtattttacctaaataggaagaacacaatctaaagggttctcaaactatatgttcatgcaccataaattctatactataaatggttatgtgttttttcttaacctacgtttttctttgttcacaaattttttagtaaagcttctagatgtaatgttgaagggtaaattttagagttatttttcttacaattcagtatgtctttaggtgtaacaagttttgaggaaaaatataaaatcggactatagaaaagttaacatattcgtttaccataatactgaatatcattatcacacanaattgtgaggatataatatatatatcatatatagagacagtaaaaaaaaatctgtaaatatagtttggat

SEQ ID NO: 38839 - DNA, 536 bp, Arabidopsis thaliana landsberg
agttttcccctacatctttgtcttcgtttaagttcttagaaattcgtttactcaactaggcgtctccaatttgaatatccgggctagggcaaaagaagtggtgacattcgacaattttggggctttactctgggctatgttacgtatagttgtttcttggaggtatatatttattctaattatatcaagataagcatttcaaattgcaagataatcttaaacaatacttttgtttaatttcgtttaacggtgtttgttacaattgtagacatctaaaatcctaattgccacatgtactctaagaaggtaattcacgattcatgaggatcaaattggtgattgaggacgattcgatccataagacaactcacacttttgctgcattgctttgagtgactttcctctgttttttttttggtttttgctggtgatgaaaaccgttaaaaatctgtttgtatgagtgacgtcgcttttgttgttttgcaggtttggctgaaggaacgttgccgctttgaggagtttttgcatccattgga

SEQ ID NO: 38840 - DNA, 1084 bp, Arabidopsis thaliana landsberg
  unsure (1)..(1084): unsure at all n locations
atgaatggtttaacattacattttatatatcttaaatcttttttcaaaaccttctaaggttttctattaaaatgatttatatgtttgtttttttgtcttaaatttaagttgtcagatcctaggtttcacatcacagaacagtccattgaagtaagtggttatgataatggaaaattattgtacttataatatagtcatgagtcatgaccacgtccaatgaaccttacactcaaattcaaacaaaaaaatgttagatctgtagtacgaaagagttactcatgaaatttcttcttttaacgtacatatgcattattggatgtttattaaaacgtaaatgttttgtttgatttattttcaagttttattcacaaaatttaaacgtagttacgtgttaagcgtttcttnnnnnnnnnnnnnnnnnnnnnnnctaccattaatattagtagtacctgaatagttatggatcaatttacatatatattccaactctatcaaacatgaaaaagattcgagggcatatatattgtttatatacgtgtgaaggtactcagaattggcaaattatttcctctcacacaaaaaaatccaatcatcttgtgaacctttagcatagaatatatggagatgggacacatatatacataatacaacactgatttatatttcaattcatatgagaaataaaaacaaaaacccgccgttgttcgtggtaagaagcatgttgcatgaggatgttgagggattaggctcaatacattgcacgtttgatctgtgattggactttggaccaccatgtgacatttgactctctttcctttttcattttcctttttcttccaacggttcatggttacattacattttgttgcccgattcggttttgcattattttcttattagtatagaatataaaaagaaaaataacactttgttccagaaaatgtgggaagagagtttttgtcggggcgacacactaaatacaatcgtctcagttctattatttacattaaataatgccacatttgaaataattaatatgtgtttaaaattctgtagaagcatatgttgaaccaaattaataact

SEQ ID NO: 38841 - DNA, 1020 bp, Arabidopsis thaliana landsberg
cctcagctgagttcgttctccggctcggccgcgacggcctcggccggggcgagcctggccgcgcaggccatcgggagcagcggcgtgctgatgagcccgctcggcatggccctggtcgcggccgaggtcgatgacggcaccggtcactcgcccgtgctcatcaagggtgagacggcgaccgggtggcgggcgccgctggcgtacggccagctgagcgagctgcgccagatgatgcgcgaggcggtcacgtccggctcggcgcagggcgctgacaccgacggcaagcaggtgtacgggcaggcgggcgtcatccagaccgggccgcatacctggctgagctggttcgccggctaccagggcacgaccgcggtcgcggctctgtcggccggagcctcgcccgagcaggcggcgtcgtcgctggccgcgtccttcctgtcctcggctagctgagcaaggccgccgggcaccgaaccccggtctagccagggattccgggctcggcacccggttgccagaattttatctaaaaaagatgccacgctaagcaaccatccagtcactggtgagcgtctttacctatgactgaggctcgcttggggggttgcggcccagtcgtcgtgagagccgggcctcatctcgggggaggcccggacttccagaccggctccgaccctgccggtcggccccagtgggcgcgtttcggccaccgccagcgcccgcgggggccattcacgtatctggccgcgtgccctggcatagagcctcgcctcactggcctggcgtcacgcgctcgccctggcggtatgttccgcctggcctcagccgccgcatcccccggcgcgtccaagcagcctcagccgccaccggctccctgctgccgccgccggaccccagcgccgccgcacctcagccgccaccagcggccgctggaatattcgatggctgaacctgcgttccttggagtacgatcatccgaagcggttcagcctcggctggtcgcggtataactcgataggggcg

SEQ ID NO: 38842 - DNA, 627 bp, Arabidopsis thaliana landsberg
  unsure (1)..(627): unsure at all n locations
aggccattttggtacttaacaaataaatagtttacctgatattatcggcaaaacaacgagagcaagaaccatcaataaaggtaatagaagagatgaaaactttttgattgccattatttatgtttctgcaaaaataaaatatttttaaaaaataataatcttctactctcacaaaaagcttattataagaaaactagatacaaaatcatttttcgaattaagaaattaaaatatgaaaataagtgttgtcttcttcaacaaaacaaaaaattagattacaatattgaaaatagttaaattaaaatttgaagagttacctttcttctcgatgatattctaaggattacaaaagttgactgtatttgtcttgaatttgtatatttatatacatgaacatatatacatacataatgatattatttcacatatatagctttaatatatattccatatttgaaaagttgaatattatataatgcatcttccataaaataaatcttgattatagatttagtcaaaagtttcataacttcttctaaagatctctatatatgtaaagttattatgtttttattaaaactctcaaagatttattaatttgtatcanaatattttcatataataaac

SEQ ID NO: 38843 - DNA, 216 bp, Arabidopsis thaliana landsberg
acctcttggaataactttatcgttgtttacatgctactactatcatctgctcatgattggcaatactgtcactaacactcgggggactgtaccaacacccatcagtgcgagcctcatcaatgcctatgcttactgtcttctaatcctttggaagagtctatctttcttcatacccaatattgaaagtgggtgttatggaacggggagcatgccact

SEQ ID NO: 38844 - DNA, 397 bp, Arabidopsis thaliana landsberg
aaaagcaaactcacagataaaatatatcatacaaaacatccatgagttctatgaaccaaacacacgggggcaatctggtccttgttaggccgcggattgttgtcaattcttccacgaacaacgcagcgggtgacaaagtggatgctgtcacaagacgcattaacgtttacctgggcgccaaagaccagagtctccacgggacgagatgtacttccctaagtaaagctttgtcaaaggatcggacaaggttctggctgagagcgaatgatcatcaaggcgacgatagattgatgtgattccgtaccaaaacaggtgtgccctttctcacaaaaagcccatatcttccaaggtctattacagaatcccacacaaagctcgtaatcggtaagcttgaccc

SEQ ID NO: 38845 - DNA, 734 bp, Arabidopsis thaliana landsberg
gcaggatttccaatatgatcgtttggtacaatgaggtacacatcatcgagacttacaaatctacaatgcttacttcactcagtgaacctgatgaggcttcaaactatatcttatgattttcagttcacaaatatcaggtgaaaatagaatgcagcagctcttaacaactagttggcagaaaataacataaaaggtcaaatttcactgcctgacaatcttcatattggagtagaaacaattcaggctaacgattttgtttggtcagatccaagacaatacttcctccacggaaagtaagagagtaagaggtatcacataacatcagaccaaaaatatgattattaattaatgagatccatgtgccaaatatacttgtgtacttctgaaaaaattaaaactaccttccaacttagaggggcacaaactgctctaagaagatttcgtcgaagatgtaaatcatcttgcaggtttccctgcacaaattcaaccatcagtgataggataaaaccatgacgatgcaacaactcttcaagactttaaaggttgagaaatagtcaacatagaatgtaccaaaaccagacaattacagtgagaaccttcttacctggcaacccatacgtgaaaagtaacatgcaatgaagtacaaggccggcctgggtaaaaagtcataattctttagataacagtagagccattcagcctctattattaaaagccaaccagtagtcgaacac

SEQ ID NO: 38846 - DNA, 632 bp, Arabidopsis thaliana landsberg
ctcaataacactagattttataattttttgaaaagaaatcaggaatgaagaatgacacaagatttgttatcttaacaaaaaacattctaaatagttgattgaaaaaagtaaattcacttcatattgattaacaaaaaagtcacatttacttaaacagtaatatgtatagacaattcttagtaaaatagattcactatatatcacttttgttttctacatgcaaatacatatatttagtaaaatcaaaaacataaatctgatcataatggaagcaagacatatgctcgtgacaatactcttgttatcatttgtgtttatgaatatcatgaaggtggaagctcaaaaagtaattggatatccagcaataggacgtgatggtgcacgtggatgtagtcctaaagatccttcatgtccacaacaaccggagaagccgtacaagcgaggatgtgagaaaattacaagatgtgaacgtgatcgccgtaagcaagcccatcttcggaatcctcgaaaagtactagatgtagtcgcagtgatggcaaaggccaagcagctctactgaacaatatatgattaaaattatagatatgcaaaatcatatgaaactattgcaactagacgaccattaatgaata

SEQ ID NO: 38847 - DNA, 703 bp, Arabidopsis thaliana landsberg
  unsure (1)..(703): unsure at all n locations
cgagacgatacatacaacaatcgttcatgaaaatataaaagaaaccaattgtcgttgttgttggcttacacaaacgggcccaagaaccaattatttgatgccacgtcacgatcaaagaaagaacatcaattttttttatcaattttaaaaataaataaaaaaagaacatcatttaagcagctcgactcatatgacaaactaaaagtacaatgtttgtagtaaaactaaaagaagatcatttagtctctcatctcttcaacaatcgcttcataactatcttttgagccgataatgggcctaacatggcccgttaatttagtatttctttagtttccgaaaaccccagtggtcgaaaaaagtatagaaatgttgattaaaaaaaacattttttaccagaaaaatgaaagataaacccaaacaaatctaaggacatatctcttttactttccccaaaatctaattatagagaaactattgtaatgttgatccaagaaaaaacaaataatgatcataataatgttgaaatgaagataaaacccaaacaaatctagacatcagatcataaatctttctttntgtccctcaaggttccatgcatgatgccatgatgttgctgtaggttgagggaatcaataccctattatatatatatntcatactaaaatccanaagaaaaagaaaaacttatgtttctcctctttac

SEQ ID NO: 38848 - DNA, 707 bp, Arabidopsis thaliana landsberg
ccttgcattccttattgatctcctcaacgctaatgcggtagtaaatgaactagtgggtcttattcatgacattatgatccctggcttattctttctctacaatctctttttcttacattcctagagcagcaaatgtgttggctgactgcctgagtctattgctgaagcgcctctctagtttctctagatggatcctcccctggtgcctggtggagcaaactagatctctttaagttttcgtaatgcaatcagtcttgtttttttttttttttgataaagggttttcaatatacacataattttaaacttttcgtttataattaggtttaggtgtaattgattgcttagtgaaggaataaatataagctatattatagtatatataaccaggaattatggactttgtcacatagtttctctgctaatatttaatcttgtgatgcttttggtaaatgcgagcaagtgtaaaatactcatcttttgttttggccacatatgtaagaataatcgcctttctttcttttgcctacttaacttccgcaaacgacaaaaaaaaaaaaacttccgcaataataagaaacaaacttgctataaaaaaaatcaaagattcgaagaaatagaaaatttagaaagaataaataatcagaattcaaaattttatcaggggagtgattagaggttttgattgagtcgtgaagtacgtcaat

SEQ ID NO: 38849 - DNA, 791 bp, Arabidopsis thaliana landsberg
gaaatctcaaacatttttcttatcaagttgctttgataaaatttttatttattttttttttctttaacgatacctgtacttttatctaaaagaaaacaaaattaattactcttggtagattttattgataaatagtttaatacaagaaagtaaataaataggaacaaaagaaaactctttttcaacaattgtgttttttagctaaggtttctcaccagtttcctctataacggactccaatatttgaactcgttaaagcctcttcttcctatcaacctttctctctcggaacctctcaatcctacttcaatttccaggtactaattcgtttttttctttcttctcgtaatcttccaagtcgatttaggtctactttgattgttggaaaattgatcttttaggaatcgatcgttgatcaaaagagatagcagttataaatacttgttcttgctttttttcaacttcaaagttcagtatcttctggtaaatttcgaatcaaggatcaatagcaatcttagttttggatttctgcaggagaagttgttttcttagttttggattctctgatacagtagaatttcccctgaaccttctatggctcctaagaattccagctggaacccttttgatgatgagaaggaggctgctaagagtttcagtttgaacccttttgatgatgatgatgatgacaaggaggttgagaaaagattcacttcatccttgaagcccttcggaggtaaagagaaccagacggttcaagaacttgagagctacgctgtgtataactctga

SEQ ID NO: 38850 - DNA, 662 bp, Arabidopsis thaliana landsberg
ggtttgtgcggcgagaggtccaagacctcggttttctcgtttatggaaaacaaggaacaggattggaactatctgtaaagctgccaaaatgattgcttgtgtaatgctctcttcatatgtttttgtgttctgcaatctcttttagagttagtgagtattgttaatctgcagataaaaggattgtcgaatgttaaagaagaagtttatggagcgcttgattccttcattgcttgggaattagagttccctcttgttatagttaagaaggcattagttatacttgaagatgaaaaagaatggaagaagattattcaggtatgcttgtttattaagcagtaagagctgtgtttttttttttagttagatgaatgtagaataatgtttatggattttgttaggtgacaaaatggatgctgagtaaaggccaaggaagaacaatgggaacttacttctcattactaaatgctttagcagaagataatcgccttgacgaagctgaggaattgtggaacaaattgttcatggaacatttagaaggaactcctagaaagttcttcaacaaaatgatctctatatattacaagagagatatgcaccaaaagctcttcgaggtacacttaaaaaatcttttttactaagtatttacaactggcagagattct

SEQ ID NO: 38851 - DNA, 385 bp, Arabidopsis thaliana landsberg
  unsure (1)..(385): unsure at all n locations
acttgataacgataaaattttatatattctataaaaacccaaatgataaaggcaagcgtttaatctaaattgaccttaaccaaatgagcaaatattgaccaaaggaaatcttttctatttttttgcgtttatcctaaaggaaatgtttgtttcatggcttcaaaagggaatataatttgagcaaaacaagtaaaaaagtaacaaattaccgttacagcaaaaacaactttaataaataataacagagcataataaaccgtggtcaaatatttgtatgaattatatgagatagcacggaacaatttattgatgggatttagtagttgagctaaataaataaaaagcaaaaacaaattaaataaaacacaattcttaagaanaaaaa

SEQ ID NO: 38852 - DNA, 882 bp, Arabidopsis thaliana landsberg
taagagacttgcttttttccttggataagggcccagggcctcggtcaaatactgaaaaataatgaaatgaacaattaaatttttaaagattctacatttaatgtaacagagaaaatttgaaacaaaaataggaaagaagactgaatattactttttgcatgtttcgaagaagtacttacttgatcacatttcaacgaatgcacagaaaaaatatatttgaagctttcaaatacaaaaactcaaacagttacaagcaaaataccatccaactcgctaggaatgtacttattgctacccattttattatgtattctctatatatctgtgttgcattgcattgcattactagtaagcaaatttattcagaaagaaaatgattcactaatctgttttagcacattcctcacaaagtagtactctcattcatgatcaaggacctaataaattaggacctttatagtcaccaatgaaaaatggagtttgatattgcacatttctcacatagtagtactctcatttaagaccatagacctaataaattaggacctttatagtcgccaattaacaatggactttgatatagtgacacacagaaagacatgtggaaaacaatctaaaacgctcatcaaacgcaccttcacatcgaggtcaagttgacttttctcctcggctaaacgctccaggtcttcttctgcctttgtaacgtcccgtaacaaattggctgccttggccttctcctcccttactgcatgccatctggcctggaggcatgatatatcacgttccatgtaaatctggtcatctctaagtttctccagctcaccgtgcaatttatccctgttcaagggtacataaggaagaaaatattggaaattatgtgtc

SEQ ID NO: 38853 - DNA, 761 bp, Arabidopsis thaliana landsberg
cttatcccccccaacatgttattgcctctgatcaccatttattgttttatttttttttgttaattacttgcgcaaatggcaaaagcttggtttttgtgatgactttgaatctttcttgcatggcttcttaagagtagatttacggatccgtctatgctttttgctttttgtttcgtttatttgtatttaaactaaatatgcattttcaagctaacgaagtattttctataagatatttcatatgaataaaatcttcaaggtaaagattacagttatttattgatttatgtggtgtttatctctgtgatttacaactagtttaaaatattgtcaaagacaactcaatattttgaatagaaaaagatagagacactttttagtattttggatattgtatctgattagtttaaaaaaattaaaaattttagcacttataaaaaaccttataatacgttttaatagtagtatataaaaatataattaaaaataaaataaatctaaataaaacaaaaacgattataggaatttgaaaataaaaacgataaaaaactttgaaaatctatttatgtttagagctaaaaaatattaaaaaaagaataactgaaaatataggatagaaaatgacgtggccaatagattgtataattgtgttgtatgcggaatgtaagataattatcgttatgggctttattcttgattgttgggggggggggttcccccggggggcgggggggggggattttttttttgggggggggggg

SEQ ID NO: 38854 - DNA, 970 bp, Arabidopsis thaliana landsberg
aaccgttgttatataaacagaacaatatataaaacacatctaaaatcttaaatttcttatgttttgagaagattagattcaatgtctttagtgagatagactgcaaaatccatgtatttgttcggagctggagaatctgcattaagcttctcgtattcccagctccatcttgctatacttctaccatgaagctttggtatgatctgaagattgcatgtgaaactactataattctccatcacatctccttcgaacacaaacacagtcattgatttgtttgcctcgtctatttcaactctctccttcattttctctacttttccatctgtaacacaaacccatgaagttagattgatacatagagtagcttatagtaagttgagacacaagaagttatgtttttaccaacagacaaagtccagttcttggtgcctttacagccatcaccaatatgctcctccacgctaagtattttctctggagatagttttggtacgctacgtgaagtagacttgatagcttggaaaatgattttccgaaaatcatatcagctgatacattgatctccacttctatcatggatttcgccatctgagccatcacatctctgttgttgatcctttagtctcagtgtaactctgcttatataagtgaagtcttttggaggaagaatatgtaccatgcctagcattaacgtaggcttatatgaatagtttctttgttctcttcacatacaagactcatttggggaattgattcaccaagaatctgaacacaaaaacaggctttcacaactgtgacagaacttcacttaattcacattccaagctttcaggggaacactttaagacgtgtcttttaacattctaaccgatgtgtaccacataccaataactggaaaagggcatttatgtatttggcacatttgaactatgcattccctgatccacaattggttaaattgaaaaac

SEQ ID NO: 38855 - DNA, 749 bp, Arabidopsis thaliana landsberg
ttgtttcgctgaggctttgaagttgtatgatcgagcaatatagcttttaccgagtaatgctacttaccatagcaaccgggcagctgcattgtcgagtttgggtcagattggtgaagctgtgaatgaatgtgaaatagctatcaaattagatccaaactttgcaagggctcatcaccgtttagcctcattgcttcttaggtaacatcaaatctttattatagaatgttggtagagaaaagatatctataatcagtttggtctttatttggtttgcagattaggttatgtggataatgcagggatacatttttattcagtggaggaaccatcacatccagtggtggtgaagatgcttcaacaagtagataaacacttgaacaaatgcacatatgcaagaagacgcggtgaatggagtattgctttgactgaagtaagtgcagccattgcgtctggcgctgattcttctcctcaggtaatgaacaaacattcatgtgttaatttgtgtaacttcatgaataaatgaagtgttttacatatataaatttttttagctagctatgtgtaaagctgaagcactactgaaacttcttcggcttgatgatgctcaaagagtactagaatgtgtccccaaagtggaaccattcccagcttctttctcacatactcggtttttcgatatggtcgctgaagcttacacatcttttgtcaaatcccaaatggagttggctctaggaaggtggaaaattata

SEQ ID NO: 38856 - DNA, 512 bp, Arabidopsis thaliana landsberg
gctccttcacttcctcgctggcccataaatatatatctatctattttcatctttcaattataatctcacagaatagtgaacatcatggggcaagcctcacggctcgtcctcctcgccgtcgtggcgctgctgtccgccggcctcctcccgcaggcgctgggtaagggtaggggaggcaggggacacggtggcgccgtcaacccgcaggtcgccggcatctgctctcgcaccccgttcccggaggtgtgcacgtccaccgccgggcggcacgcgtccaagtacccggtcatcgacaacctggccgtgctgaacatgcaggtggacgcgttcgccaagcgcaccgcgcaggcgcgcaagcacgtctcgaggtcggcccgcaccatcccgccgcagcagacgcaggcgctcacgttctgcgacaccatgtacatgaacacgcaggacaccatcggcgcggcgcagcgggccatcacgttcaaggacaccggcaccgccaagatcatgctgcagct

SEQ ID NO: 38857 - DNA, 386 bp, Arabidopsis thaliana landsberg
  unsure (1)..(386): unsure at all n locations
gcccctaggtgtccatgtgatcggcatcgatattggtcacgatggccatcaccgtcagcaggttgaggaacgacgcgtcggattcggcgggctcgaccacgatgtattcgccctggcccagctgcgcgttggcgcccgccgaattcaggcgtccgccgatcacgaaagtggggtccatgccgccggcggccagcacgctggccaccaggctggtggtggtggtcttgccgtgcgtgccggcgatggcgatgccgcgcttcaagcgcatcagctcggccagcatcaccgcgcgcggcaccaccggaatgcgcgccgcgcgcgcggtcagcacttnngggtttgtcgcccgccacggnccgtggacgtgacgatggcatcggcgccgc

SEQ ID NO: 38858 - DNA, 132 bp, Arabidopsis thaliana landsberg
aagaccatatcttgaccatggtctcaccgccacataaagacggagctttacactcccttatcatgcgcattaatcgcttgtctttagtaatatcacaaacatcaacaagtgggataagcacacatcacaagc

SEQ ID NO: 38859 - DNA, 786 bp, Arabidopsis thaliana landsberg
tttggtctcgttttatttcatttgcatgactatctacgatttactgcttatttctcagctggagctatcaggacataagctgtttgtaattaatttattaccaccgtttgcagattatagaacatattgaaaaaatctccactagtaggaaatgcagcttcatttcagcggcaagtgatatcttcaatgccaagatttctggtaccttcaagaggtattgcttgatgaaattcattaagaaagcaatataatactgctttagttttaattctgaattgggaatatcatttgcttttaggttttctaaccaggacatagatacaagatttctcatataagtgtgtctgcttttatacatgatccatactatagcgatacatatgggtcgttttgtaatccagatgtaagtagtattgtgtgtatatgtgtatatacagattctaagaataggatgctgcacattatattccctcagtattgttatttttattcatgtttgtctcctgttaagcttcttaagttagtttgaatttgaattaaccacaggagccagcttacccagggacgcaaagttttgcaaactcttgacatggtagcaaagctggttgatagggtaagatatttgttttccggtccttgagatactatgaacgcactatcactagttgaagtgatcatgcttatttcaacttagcagtacgaatcccttacttctcatgtatttacaggaacaatcactttcagctgtagtaacatgtgtggcaaatatgatacccgaggtaatta

SEQ ID NO: 38860 - DNA, 741 bp, Arabidopsis thaliana landsberg
gtgtgtcccccacgaacaatgaaattttaccaactcaagcataccataatcataaatacatgttatttattattttgtagaggagactatttgaacaaactaatgggtttatgctatcaaccttaatgtatctataatttatttggctttcagttttgttactttgtgtcattcctcatgatacctcatcattagttgtgacatctggtagcttttagttttggtgcttaattactcaactattttcaattgccgtgaaaaacactccataagaaataataatcaaagataattctctaattcgtaagcaatctcatattcttgcttttgaagttttgctacaagatgaactcatgttttgtgtgcttcatttgattttttttctttttttttttctgctttaaaccctaaaaacacttttaattttcacttgtagacttaggcctgatattaaaaattgaatcggtttttctgtaccgaatcaaaaccggatttgaggttttcggtttggaatttgttaataattcggttgttgatgttcattgaatcgaccagttaaccgtttattttttaatttttctaaccaacataaaccaattttatgaattataccaaaaattttaaaagttctatcctaacttaaccgatcgtccaaaccaaactgagttttgtacagatttttattacataaccgagccgagttaaccactaaccaaacagatctaagccgaatttttttgg

SEQ ID NO: 38861 - DNA, 856 bp, Arabidopsis thaliana landsberg
  unsure (1)..(856): unsure at all n locations
tgcacttatgtgttaatgtctcagaaatcagaatcgtcaatgtttttcattcggttgaaccgaaccaaccaattggtcagctcctcatcgtccttaaccgtagtctgaaccaaaccggccaattcaatcatctgcttattgtttttcttttctgtttcagccttcaacatctcaaccaaacaccaaaaatcatccgctagacgtctgcaacgccaaaataatccactcaagctctccttgcattctacaagtctcaccaaaagcagactaaaatcgttcagacnnnnnnnnnnnnnnnnnnnnnnnnnnnnnnnnnnnnnnnnnnnaaacaacacctgaagccgtaccataaccaatctcacaatcttgaaatagtcttcaatcactagctctctaatctcgtccacgatcttgttttggaacataggcggaatctccggtctggtacatatatgctcaaaaaaactcacaagagaatccgcttgtcttataatatacccggtttggtaagacgaaacacgatctttctcttcaactttatcttttggattcaccaacaaatttggaaaagatcctaataccttcggaacccacgagagacgatccaagtattgtccatacctaagttacattttttttttaaaaatgtcggtatgaacatgtccaaattattatgataatatcacaatcaaaaaagagaactaaaaaatctttttaaaagaagaagtagattaccatctaatccactgagacaattctatcgtgagattagaagatatgtctgaaaactcgttcaactctagattgtttcgaccatgacctaatccttcaaacttgtctcttgatgatttgataa

SEQ ID NO: 38862 - DNA, 534 bp, Arabidopsis thaliana landsberg
atccaatgatagtcacatcatgcacgttacatccaaatagctaaaatgctaaaaaatttgtagagaagtagtttagtagatttaagtaccctagctagaatactttccatttacattcatctacaaaagttaatacttcacatgcactatgttgtcctcataattttgatgttttttctccagaacaattaaacctaacgtccgctataagtcgtcatgtccatgtgatgtgagaacgacaacaaaacttcttcaaggattagtattagtccgattgtctcatacactgaaactgatcaagctcattcaagaaacgccgtcaattgaaaatttctcaaatttaaaaatttgtttattttaatgaaagaatagaacgatacgattggatttacataaattgatacaagcgttgaaggtctttttgtgatgaaatttgggagtaacctactctcttgttaagaaaaatatcggtaacaaatatattttttaatattacataaatgtaaacataacaaattattcgtaaactatgat

SEQ ID NO: 38863 - DNA, 982 bp, Arabidopsis thaliana landsberg
  unsure (1)..(982): unsure at all n locations
agagttagataggttgcaaggtgccagtacatataaactagatgcgaatttgaagggaaccacatatgtaaacgtgtctcgttttaggtagtaagttgctaagctttcgcaaactcttctttgataaatcttgtgacttatgataagttcaagaatctctgtttgtttatcaccattggctattgcatatttgcgagggactggcagaatttggtgtattacatttcttgttttgttggattgaataacttggaatattcaaacttttccttctgtttttgtaatgcagatgaagatcgggattaattttgcgtgatctttgaagtcttcagaaaagaaatatcttcccctgaactcatctcaagtgcttgttttgtctgatctttcctgtataagcgtttcttctccttctctttgacttcagctctggagttcttttcattcactgttttcgaatatgaacctaaagatttgtgttttcacaatctgaatctgtttgtatctggttaataatggcgaaatgataaaccttgcaatctaccttctgttatgagaatagagtttcagaatcagaatcagaatcattctgtttaaaatttggtttaagttgtattacaagtacatgcaaaagacaataagtgtttttgtagcagatggatcaagttcgaaacaatctttgtactgaaagaaaccatgtcatctatacaaagcagaaacagaatttcagaagaaaaaaattaaagttggcagttttcatgtctccaaagacatttgcaggtgtcagtttttttacagcttcttataaccggccgttctgttgttgtagacatggagaagactatcacaagcttgcctagaagatggtctctcttggggagaagttnttgtgcactgaagtgcaatctcaagcacctgacaagctgcgtcttcctcaaatggcacaagtggcttaagctntggatctatgagnttatctctcgca

SEQ ID NO: 38864 - DNA, 673 bp, Arabidopsis thaliana landsberg
tatctacacgaaaacttgtttttaatctatcaaactcaatcacagttttttattatatagaaaaagctcaatcagctgcgttgggttttaatttatttcaaacctaccgccgtatattttcaaactatatattgcagaaatataccgaaattattcctaatttatttccaaaatacacctaccatatataactcttactacttgagttcatacttagcgatagtttgaattcctaattgttctcttaccaatattctctaatgatcaaaacacacacacatgttatcaccactcaaagaaactagtcgttatgatataaaagtcggtctccgttttgaatatggaaactcgcatatcagaattttccagctactacccaaaatgctaggatcaattacgaatattaaaatataaatcattgacaaatataagtattctgttttttcgacgaaaaccaacttgtgtcaatttctaatatattttgacgttttatgattgaaatataaaaacgttattcacctgtacaattgtcatcattttcattattctactactattatgtacctaccatataaaaacgtttttgaactgtataccattttcatcatttcatgattttaccacaatgtaccatcatcgcagctatcagtctatcacaccgtgatgtcaatta

SEQ ID NO: 38865 - DNA, 516 bp, Arabidopsis thaliana landsberg
taaaacactagaagaaacaaacagatggatgtggttacaaatttatattttcaatttaagtcgatctatcttgggttgggacaaaccaatcatccatctctccatcatcactaatgttaccaagaagttcatctcttctccgatcataacattttgactctgtttcgatcttcgtattatcatcttttttcgctttagtcccattgcttctaattctctgtgtcatctccaacttccattgctctctcttttctgcgctctttgaaacattgcttctccctccctctactggaaatcccatgaaaccatcttcttcttcctcttcttcgccattgcatcgttttacactctcttcttctacaaagctccacgtctttgtaactccgctttgacgatcagcaactgtctttgaatcccgagtgacgtagtcagccttttgtcccatgggagcacccatcgaaccggaatgagttgctaaagtttaggagtatggtcacgtacggtttggaaagcacg

SEQ ID NO: 38866 - DNA, 958 bp, Arabidopsis thaliana landsberg
  unsure (1)..(958): unsure at all n locations
gctccatggggctcctgtttctcaaaagatggaccttctggttcttcaaattgcaccaaatcttgacattgatttggttctagatgttgacataatttccgatacctttctcttcaccagaaaagatgaagaatcatcaggtttcaccatccctgtatgaggacggtgtttcttgcagtacaaaaatccgggtagagatcggtgcttgcatttggtaccaagaacagtaacccctccgcacataggtgcttcaacagcaggagagccctcgttcttcatagattttgtggtgaaacgagaagctaaatgcacgcaacaataaacatcaccttcattcgcccacctcacacattgccttcctttcgattcaatgaaagctatgcattgctgactcttatttcccgaaccaaatggtttcttcagaactgattcatttatatgttggtcttgcgggtgagacagtccattagtttcttttgtcttcatgaactgtgaaccacctgcttcaacaacaatgccatcccatagatccaaaccattctctggtgtattcattacaggattttcttctttcatcgtctcaggagaatttgtgttgcctcgagaactgaaaaactctgagtcaattgcagataatccttgtggcgaagtatcagactccatatgtgttgcatttgttgtctctgcacgtcgaatctcaagttttggtcttttacgactagcctggacatctgagttaaacacacttttactatccggctgtgctatttcgccaacaccacggcgagatatagagaaccattttgcaatgtcatgctttcacgttttccattctgacaacaacaattggtgcattggagactcagaaagtgatttgacctcattccacttgatacaaatngtcaaatttctaaacacaaccagtataagtggttcagttaaggaaacaatcacatta

SEQ ID NO: 38867 - DNA, 641 bp, Arabidopsis thaliana landsberg
tctctcctttatttggccaggggactctgacttacctctcttatcaactgaccgcaagaggaggtgaggcaccatctgttgtaagtcattgtaaaaggtttcttatattctcagggtacacactctttaacttactcatgaaaattatatctattggtcattctgcaggtgattccagattctatcacaaccttatctcgacatctggatcgtataagacaagtgtttgctacatatggttagacatggtttctatttagttgaaataaaatctctgaatttctgtgacattttgtattgtgaattttctaggtaacaatgatgataacaactggcaagctcctaaccgttccagggaggatctgatcgcaagagaatgtcattggggggagttggcacatacgacaaggcgattgttgattggtgaagttgctgaatgtttatcagtatgttgacttcttctcttgaatcgagtttttaccacattccattatatgttttttgattttgggataaaattgttttcattgtgcagaatatttcaatgttgcttgtggatcaagtaaatgttacggacccatcagcccgaagattgcggcaagaaagagtggttgaatcacgaagccttttgtgtcacttag

SEQ ID NO: 38868 - DNA, 648 bp, Arabidopsis thaliana landsberg
taaagagtgttttaacttcacttaactacgtaatgcaaggacagatcagttaatgtccaatgttcaatacttatatagtacatatatattgctgaaaatattgactagaaacccttttttccacaagttgaaagtaattaactgttaactcaaaacacacattttcatacgtaaatataaataagtgatgtgtagagatctagatagggatctccacattacattacgtacgtatgatatagagtaaaagcctcactagagagatacaaaccctagttttttaacttcattttcatttcttcacttatctccgaacaagtatcctagagatgagcctccaccaggaaccgatttcaccttcgtcgttggacgatcctgaaattttaattataacccttatttgtttaattttcttttcggaaaaagaaagaaagtggagtttaattaataaagacttacggtgacgaagttgccggagttttggccctgaactctttggtagttgttgttagagatcttgggtttttggtcagcttcatggtcctcctctgtggaatctacaccgtacggtggtgcaggctttggggctaccggtggagcgggagtttttggaatctcattgtctgacccaaaaagataacctaacga

SEQ ID NO: 38869 - DNA, 1052 bp, Arabidopsis thaliana landsberg
agccaacccagaactgagagggtaaagagtatcatctatatctgtttgataatgtcaaaaacaattactttaaccagagaacgttgaaacttaaaaaccatcaaattgcaataaactaatgttaatattcaaatcccaatcctaaaaattcttcctttatcttaccaaataaaagacaatcatatttagcttcagagctttgctgaaagttgtcttcatacgccattttgataccaaatcacacctgaaaacaaaaccttaaccaactgattaactgaatctcaacgtcaccaacacacatttcacaaaaagttggaaactttgacatcagatcccatagattataaatctaactctttcaccatataacatttctatagatcagcagaaactacactctgaatcgaaatccaacaggggacaataatgaaaatactaaacgtaaaatcgtaactaaaagaaaaaagaaatcaattagccagatcgaaacatacagagaagaatcgaacaacagaataatcaatggagaaagggggaacccttttctgatcaatgaaacttcgcgaaagagaaatgaagaaaaaacaaaaaaggctttgaaggcaatatgtaaaccaaacgtttcaatggcgtacctcatgagtcatgactcatcgattggttgtcgttaaatctggagaaaaagcgtttttactcacgtcgacatctacgatttctccatgtgacgtttagattttccttcacgagataagcgaattattggatgacacgcgtcatttaggagccgaccaaacacttttcaaaatgtcgtgcgccttaatttactgccctccataaattcggttcggtttagtttattgctaatgtaccattacggtccagatggaccggatgattcaatcaaaggtaacttgaacaaaatttccatctatttatttgtttttcaaccatctaaatatttagccaatactgtgtatatatatattttaactagtgtttgtggtgtaaagcttcattttatttcatttaaataaaagtagtgaaatgtatat

SEQ ID NO: 38870 - DNA, 687 bp, Arabidopsis thaliana landsberg
gagcgtcataccgttattgaagggagaccctctgactcgtcaaggtctatatcttgaatttaggctcccaaacacttggtggggaactatttcacctgaaaagacttgagagatttctcggtctcttcgtcttctctgatgatgaagagtcgttctcccctttgttagacacttgctgacttgatttctcaagaacttttagaagatcactcatagatttgtcagaaacgaagccttgttttgcatctttaatctccttcacaggcaagtcgttgtgtttcacttttcgtgactccttcgaatggttcttttgcttaggcggctcacagatcggtgcatttgtgtcatgcttgttactctgatgctgattctttcctggaacagagagacttccaaccgcctcttggtcatctgatctcgacctctttgaagtcttttgcttaggcggctcagagactggtgcttctttgctatctcgtcttttcagcttttgaactacagactgatcttgattctttgctggaccagagggggttcttggacatacctcggtctcttggtcattcttctgctcactgtctcctctcgtcctcttcaaaatctttagaacagatgatgcatttgagtcatggactggagtttgatcgttgttatcctcttttgaggatttagaaacgaacaactcat

SEQ ID NO: 38871 - DNA, 277 bp, Arabidopsis thaliana landsberg
tttttatgcgttcattgtcggttacggtaattaaatgttaaatttgtgtccaatataagaacgaactatttttgtatgtcacgattaactttggccaagagagcagtcataccatgtgtttcataatatgatgtgtatagaatgcttacaaaagcaacatttattgctactatccatttgattttgattctaaccatgtttgcaaaactatggatccaaaacttatatacaggaggcgatgaattcagaaaagagctaatcttcactaattcatatg

SEQ ID NO: 38872 - DNA, 2049 bp, Arabidopsis thaliana landsberg
gaaagaagtgcatgcacatatgatcatatcagttttggataattaagccttgttttgaagactttgataattatgtggaagtatttatagtctggtatatatataattatgaaatgtctacaaatttattggatatatacgccacagtgacatgtttgaaaattcagtatatatgttgtcttcattgtttagaaaatcggacagtgaaatcttttttttttttttttttggtttatgtgaattactttgacgaaagttcaacagattatatgaacagtgaaatatttttggtttaagctgaaattttgcaagtgttatgattcgtatatttatggcttgcatgccaaacacataattcgaggaaccttaatatttaaactaacatcaataatcatttgacaaggacgatcagacaagtcacatttttaactggacgaggtatccgaataagcccaatcgaattcttttccaacccgaatacccggtgatgtaatatactctaataattatacttttctgttcataaaaattgaatattctagtttttgttgtttgttctacaaaacttgattttctagcgttttcattttatttttattgatatataataataaatcttaaacttgtaatgactgaaaatattaatcattaacttatttttggttaaagtaggtcaagacgcaagtggtttctaatgcaggtggacttccattgatgattctagcattgaatgcagcgttgcgtatccagactagcgtttggctcatgtttgttacttagtatttccttatgttttgcttgcgctttgctttttagttaagtttgcttgtgttagaaaaccaaaatcaaactcttgtgttagcttagattaaatgaaattgtgtattcttgatgatcctaagtactagattgataaaaatattagtctgttattagttagaatttaacttactaaaacgcttgtcatcatcgatgataacaaactaaaacgcaagatcacccatcatcgatgatgacaagcgttatcattaccgatgatgtagacactattcagaccatccgccaaatcaatgcagaggtcttcatcttcgggatcactgccggaaatgaccacaagttagcgtgtctagccgccggagcgacacagtgcgtcacaaacttcatagatgtcaaaaagattaaggatatcctcgaaagtctccccgacgtcccggtcccagccctccaccgtttaaatccacatcatcaacctcgatacattcattagtatatatatatatatatatatatatataaacagaagttaattatatgattattttaacattatgttacattcattatatatacattattaaaataacacaaaaaaaaacgttaaaaatttgtcttaacaaaaattcattacatgctattaattttcatagatagtggagacatacgctatagtgacactgacatcttaaaaaaaaataaatgtattaatttgtcttaactgtgttaagaaaattggacattgaaatattattcggtttgagttgaaattggcattgacgggatccgtggtttgcatggtgtaccaagcaagaatcgttggttaaaagaaaagaacacacattaattatcatgtttatgcgtaattgatatgtaagttaagtagattatatgcttctcaaaactaggtatttagacaatgagattagttagtcttaattattaaattaatatcccgatcttatcatataagccaaaatatacgaagattcttaagaataaacattttaatttcactaacctctctctatctctctcttcattatccgaattaagccaatcgaatccttttcaacccgacgggtcgtgaaattccccaaaagattcctctttctcagctcaatttccaaaagctccgacctttacgatcctctagattctcggcgccggtttctcggagtaaataatggctcagttcacgggtcgggtcgttggagactacttggtgggtcgtcaaatcgggtccggttcgttctctgttgtttgggaagcgag

SEQ ID NO: 38873 - DNA, 548 bp, Arabidopsis thaliana landsberg
gaacggcacttagctaaaatattcatactaatgagctgcgtccttactcaaagcgtaacgtcactttgtcgatacgaattaagaacgtagaatgtcatgatctcgtacatcaatacatcatgttcattggagtattcgctatgctcgagcaatagtcttttaatgctgagaagatcatgattttctactcgaatgctaacccagccaaaccggtttatctcgtctcattatccatatgctgaaatataaatttatatacaataagaataagtttcatatgtatattctcaaacattacagtataatgtgatctagatcctaatttcaatatgaagatatatctagtttagatagcatcaaaccattaacagttggattacagaatcaattttaacgatacaacaccttttgcacatgtatttatttccttgaaaacgtttaacttgtcttctcaatgacactctagttttctagaaaaaaattcattgctctttttcctctagaaaatttgtctctccagggcatgtatttaattttcttgctctttt

SEQ ID NO: 38874 - DNA, 208 bp, Arabidopsis thaliana landsberg
agaggcagggggttttaagaattcaagatggggcgtgcgaaagatgctagagggcaggttagttagaaagtcaggggtggtttgagcacggtgacgtgtaagaagaagctgacggtggatgcggtagagcggagcagagcaagagattatattaaggtcggagcgagacagcagcacaacaggttagggaggtacagttaaggttaag

SEQ ID NO: 38875 - DNA, 745 bp, Arabidopsis thaliana landsberg
ttctaaataaacaccaaaccaaagttctccacaaacctgtcggtttttaaccaaaccattgttactagcttaattcaaaaaaaaaaaaacaggactgattcggaaaccccaaattgacaaattgtcaaattgtcaaaaagtggtcatctttatcctttgacatctggttagtataaaaaattgtaataaatgcaaacataagatccaaaactacaccttattagaacggaggaattaagagtgacataactcactccaactacgaccagtacaagtagttggcgacattaactacctctcaccaaccaccaaacccaatccccacaatattaccattactctcatataactacacatattcatatttacattttttgccaacacaactccttataagatatacacttcatcaacctatagatctcactcacataatcaacctacaaaacaaaaacaagaaatgggtagatccaacgagcaagatctgctctctaccgagatcgttaatcgtgggatcgaaccatccggtcctaacgccggctcaccaacgttttcggatagggtcaggagacgtttgcctgatttttttcagtcggtgaacttgaagttcgtgaaacttggtaccactaccctataaaccatgcggtttatttggcgaccataccggttcatgtgctggtttttagtgctgaggttgggagtttaagcagagaagagattggaagaactctgggactatgatcct

SEQ ID NO: 38876 - DNA, 644 bp, Arabidopsis thaliana landsberg
agagacaaggaaaaaaaaacttcataaccataccagatcatatgcctgcatagccagtgtgactttctcgtcagcaatccggacactgtgtttctgttcatcaagtgcttcctctgagaactttgtaagagaggtattaggtgtgatatttccagctctgccccttcttatatcctctatttctttttcacagcgttgttcattttgtcgttggttttctgcttaaaccacaaaagacacaaacaaagatgaaagcaatccacataacaaatcaacaaagtgcatatatagatgctttacaaagtcttactttatactaaaacccagcaaacaactcatccgaaaacaacaaactatgcagcacatgaactacaacgaaatgggtttagtctaatgactaaagatcatgtctgcggtaccccttttctaacaaattactaatcagtgaggatacataatgacaacaatgatgccttaatctgctgtaagtacgactctattgattgttaccttgcaaacttttatccaaatcgcgcaggagagcatatttcttctgcaaaacatgggccagcgaaacaagatctgcacatagatatcaagaaagagttgcttcattattctcgattgaacgaggtcaaatattg

SEQ ID NO: 38877 - DNA, 503 bp, Arabidopsis thaliana landsberg
aaacatgtcgacagacgaggaaaatcacgtatgtagtaatctaagtaacacttctcatccagaaacttggcaatattgcgcaacaaaacagccaagtgatgcaaatccctacacatagatgtccaaagttaaaacgagttagtcatatacgtgttcaatcttaactcttcttctaatctaacaaactttagttttctgtaagaaaccatacagatgattgttaggcaaacagtctagcatgaaactacagttgtcggtgcaagattgatttttttcaggaaaccatctatggctagatcaacttttgtgccacgtttgaatcaaagcatatgcaacataacttatgttacagaatttcatactttcatgcagcaagagagaaccaattaagaaacgaggaaaaacaaagcattttgtagttaccaatcaaagatagctaatcattttgtaagcaaaacaggcaaaaagcacgaaacacagctttgtaaaccaatgtgcttact

SEQ ID NO: 38878 - DNA, 613 bp, Arabidopsis thaliana landsberg
aattattttgtcatcgcttcagcaatcatagttttgttgaatctttttttatttcttataggtgttgccaaaattatgtattttattacccactttagatacctctaattttacataagtttcaatataccttatatagttgactctattgctctagaattgtaaatattttttattttgcaataagttccaatttcagcattatttttcaccgggaaaatccttaaaatattctatgcaaaatccaatatattcactccacatagataataataaaaaacttataaaagaaataattgaagaaaggctgcccatgtgggcacttccaaataaatctccagaatcgatgcttcaaatacattggatgtttactaaacaacacagatatgaacaaacttcaacaaacaaacacacccacaaaggaaaatccgaagacccgatctttgttataaaacacacaacttctctctttttagaatctcttgtcttcttctttttaactttcttttgtaatctcttgtctgaaaaagaaatggatcatgtaagttcaagtgagttacttattgatgatcttcttgaggattactggttctttgagaacttatttacaaga

SEQ ID NO: 38879 - DNA, 320 bp, Arabidopsis thaliana landsberg
ccgccacctgaagagcgcgggcttcatcgccacccgcaccatcgagctgttctacgacccggtcaagggcatgttccggcccgagcgctacatcaagggcgaatgccccccctgccatgccaaggaccagtacggcgactcctgcgagaactgcggcgccgtctacgcccccacggacctcatcgaaccctacttgaccctgaccaacgccacgcccgtgctgaagtcgaacgagcatttattatttaaactgaccgacccgcgctgagtggaattcctgcacgaatggaccacgggcatcaacggccacagccgcaagc

SEQ ID NO: 38880 - DNA, 592 bp, Arabidopsis thaliana landsberg
taaaagtgtttctgaagctcgtgctacagcgtgggaggaagcggaaaaagctaagcacatggctaggtagtccaaagttgaattgtttgtcatagtcctctagttattctcgaaactttaagcttatgatgagttctgtaatctccaggttcagacgcgaagagatgaagattcaagcatgggagaatcatcagaaggcgaaatctgaagccgagatgaagaaaaccgaggtaaactacactaacatagctacgtaagttcaagtcatgattgtgaacaaacttggaaaaacatgaatgatgatggtggagttcttgatattgtaggttgaagttgagaggattaagggacgagcacaagaccggttgatgaagaaactcgctacaatcgagcgcaaagcagaggaaaagcgagcagcggctgaagcaaagaaggatcatcaggcagctaaaacagagaaacaagctgaacaaatccgaagaacaggcaaagtaccttcattggtggtctcttgctttagcttttggtcttaaatccaatcctattgtgaatgtgatgttgttaattctcaagaacacatctttctatcatc

SEQ ID NO: 38881 - DNA, 599 bp, Arabidopsis thaliana landsberg
gattttggtaaagacgatacacgattaatatattaggattttattctttctttgatgaacatttattccatgtaaatcaactaaccttgagaaaaagaccttccaagtgtcaagttgtttgcttgatactatgggatgataaaaacaaaatcaaaagaaaaaaaaaaaactgccatcctcattggtatatgacttagtatttgatagaaaataaaataaaataaatagattaataattttgcaattcgtgtgaaactaatattcacatgtcaatttacacaatttggcttttgtatttattgaaaagaccaacatatttagtgtctggctcatattaaaagtttatcacaataggggcaaatccacaaaaaggtgaagattatgataatattataactgatcttgatttttatatggaaaacaaatccaacatcttattattcatttgtatctgaggcattcaaatccaaagttggttcattatctaaagtacaaaatatcataatttcaaattatcatacaccatataatttcacactatacgacgatgtaggtggtgcatgtgtcaatttattgacaatattttaaggcgtgaaacg

SEQ ID NO: 38882 - DNA, 542 bp, Arabidopsis thaliana landsberg
tgttccttttgtgggaattgtcttttccattcccaccatttccttctccacctccgcccccactgccttgacctcctcctcctcctccacctccaccaccacctcctcctccgcctccgctcgtgattcacatttttcagtcttatttacattctgatcatctaaagcattttcaaactcaacggtcgaaatgttggcagtacttttagagtccaaaacgcttgaagaagtagcattcacaaaattactctcgcttgcatctctctcctttaggtctcgtaatccattaacacagtttgagtttagcaagaatacaacataagcaagaccgaacaagaaaagcatcaagcttgataatgaactctctcttacactctccattttaatttatcaaatagatcatcgaactatatccacttctatatgcttcgacaccctctcattcctctcccttttatactatttctatccactctaactgactgttaatcctatccaatttatttaattaatctcatgcgcatgcatttcccatacggaac

SEQ ID NO: 38883 - DNA, 666 bp, Arabidopsis thaliana landsberg
  unsure (1)..(666): unsure at all n locations
cattgtctgtatatccaatgtctgtgaagttatgaagatgttattggagtttatgcaaaagtatagagagagaaggggtattgagatcgaagaagcagccagaaagaaaggaatcactcttgcttgaaactattaagtcttttgatttttgtccccctatatatagcaaaagtaagagtaaagggggatttttggaaaagaaatgggaatatacagtttaaaaagtttcaagtcaatacgaattatacgtttaaaatgtcttctggttcagtttgtgttataagtttttcttcttcttttggatattgtagagtgttaataggaaagttcaatcattggctctctaatccaaaaaacaatgcatttcgttgggtattggcacaccatgttattgaacatccatcccgaagtcgagagctaactaacccaacaacatatgtgtttttgtttctagtaagtagtcgaactaacggtagaatgagtttactatctcctatcaagtaccaccagaccaaggccgtaaaacaacaactagtaatctccgagatccaaattgtttgtataaaaagatcgtaatccattcaacaagcagttaaacaacttgggactggccatagcaaggtttttgacgcctaaatagtnataataagctaaagagtaacaatc

SEQ ID NO: 38884 - DNA, 571 bp, Arabidopsis thaliana landsberg
aaactcggacggtagcacttcaacactcttttaaccacacttggtgtttcttttcaaaatgttatttccacactttttttgtgagtattcttttccctagttggcaaaaaaagaaatataaaacaaacaaaaaaacaataaagacagagccctatatcctcttatattgtcatggtcggtacatgcttcactgttcgccgaactatagcaaacaagataagaattcatggtgttaaggtcggttcacgatttactatgcaaagaaatagtatcagattaaagttcgatgtatttttattttgtcagaaaattaaaggtcgatgtatattgtccactatatgcaatgaaatagcatgataaactgaaagtctgtacttgcatactaaaaatttgaaaaatgtcctatctccatcatgtaagaactgagaagtaacttttgcaaaagaaaatccaagcgtgttaagatcacatttgagtcactttagaattttgacattgttttgtaactacattatactaatattggaaaataacactaattgtagtacaaagtataaatgaaccaatgctg

SEQ ID NO: 38885 - DNA, 1545 bp, Arabidopsis thaliana landsberg
tctgattttgaggtttatgtaagaagcttcatttaaaccgttgagtgtttgagctatatgaaagttcaaaaaaatgtcattcgtttaaataccatcaagaagaatgtgaatcaacttttctttttggatgaaaactagttttttgatatggtaactatgttttcaacacaacaaaattttatcgtcaaatgtccgaaatgataaagacactcttaaccttcatcggaaaaaatagcaattttttgtggtatatcaatagcggttacaatctaacttgttttgttgctgttattatgattagaactgtcaattgggtggaccgcatgtgggtttttacagtccaaatacacacggacggattatggtctggactccaaactaaaaaacataaaccaagcaatcaaaaagttagaataagatattttttagttaaaacaaaaatcgtaagtgaagaaggtctgaatttcttgaggaagataaacgggcacaaaaccggtgtacatacatggattatggatatgttctagaggaaaggtataattgaatactagtatccgttacagaaactaattgcattaagtttcgtctactgtttaagaccgcacgagatatatatgttagaccgactttgggaaagaggctacttaaattatttacgattaataatgccaacgtaacgcggacagacattttaattcaattattatttgttgcctgcgagattcgaaccatctcttatttcattacttaacccaaaccaaaaaaataaaaagttcatttcgaaagaagaagaagaaaacatcaaatcatgagtgggcaagagaatcatgatcatggccggatctcttctacgcccgccgccgcgtcggagccttccaaggctgctgctcactcctctgactacgctccttaccctaagctcgatcctaccgacgtcactcctcctcctcctcagcctattcccaccggtgccgccgcaaccaccatgccagcggaatccaatccttacgtttctccttcccctgccccaaggagtgagttcttcttctctctatccgatttcgcatcctaatccaatttctgcctttgattgattgattgatcttggtttggggacagatacgatggattcggtgaaggatacgttagggaaatgggggaaaatggctgccgacgccaccaagaaggcggaggatctcgccggaaatttttggcagcactgtaagcgcttcttcttcttcttcttcttccccctcgattagatgaattaccaattaatctgattaccgtctcttggagaatacgatggtattggttatgccccttctggttaagttagtgttcatcaattggcgcttcttcggaattttacttcgcgttcaaccaccgacactaaatctagccaacaattttgatattcatgctcttccgtttgagtttaagccaattagttctttgtatctggttattgcctttgactcttgaagcttctctagtataggttgttttggctttatttcctccgcttgtgtgatgaataagtat

SEQ ID NO: 38886 - DNA, 484 bp, Arabidopsis thaliana landsberg
gagcagcatgcaaagccctgcaaggataaagatgatgattttgccggtgatgtcactctgtttcggttggtaaattctgcgagcttcatcaacatctttgctccttcttccatatgctgtttcagcataaacagacatttccctcagagattgtttgaccgataacttttcagtattgtcaagaggaacttagatgataacaaaaagatatatactcagcaaagccaaatcccaacagaaaaagctgagaatatgtggaaagtagaaagtatgaatgggttcttgatcaacattacattaaaagatgatgagtgttttacgaaataagtaagagatgcttaaaagaaccctttttagctttgtttctccttttgtatactttgcttttttccaagacgtggaacaaagtaacaggtatcctgaagcatcaaacttttattggaagaaactgagatacaacaatgtcctcgcaagacaaccacaa

SEQ ID NO: 38887 - DNA, 525 bp, Arabidopsis thaliana landsberg
attcccttgatatcatactccaagctcctttcccatacttgttcaatccatcaagaaacaatctaaacaatcaaaatcccataatcgtcattatcaaggtcaaataaaaacattctctcacaaacacgattattcatcatcttaattcaacaatctaaagacgtttatcagaaaatcaaccaccaagattatcataatcatatgtaattcataagtctttgactaacccttaatgcatcaagtccagcaagatttaagactcttcctcaatcaaaagaaaccctaaatttatgtctttgacaaacctgtgttcctcttctgtccaaggaattatcctcggtatctgattcgtctccccgtgtttggactcagtcgcttccgtcagtgacacgtaataggcttccgggtacttgggtaatgcatacttacccgattcgatcagcacaacatcatagaccaatatgagacgtagtagtattcactcctccaaaggtttctgaaaactcggcaatgtactccaaaaat

SEQ ID NO: 38888 - DNA, 644 bp, Arabidopsis thaliana landsberg
  unsure (1)..(644): unsure at all n locations
cccctcccccccccccccccacccccccccccccccgtcccccccccccccccccggcccccaaatcccaccaaccccaacgccccccccccttccccccccnccccccccccccccccccccccaccccccccccccccccccccttcccccccccccgtgttccccccccgcccccaccacacatccccccccccccctccccccccccccttctcccccccccccccccccccccccccccccccccccccccccccccccccctccccccccccccccccccccccccccccccccccccccccccnncccccccctcttttttcccccccccggtatgtttcgccccccncccccccccccgccccccccccccccccaaaaaactcccttccccaccctcccccccccccctcccccctctcctcttcctctccccccccccccccccccccccccctccccccctcccccctccaccctccccccccccttcctccccccccccccccccccccccccccccccccccccccctcccccccccccccccccccccccctcccctccccccccccccccccccccctctcccccccccccccccctccccaccccccccctcccctcccccccccccc

SEQ ID NO: 38889 - DNA, 1012 bp, Arabidopsis thaliana landsberg
caataatttaatgcataagcacaataaaaataaattcttgtaaatacaataatttattgtatatgagttcctccaacatcgtgggactcataagctagttacaaaaaaaaacactccacttaattagagtataccaaggaaatacaagattttctccccaaacaagagaggactcttgtccttcggtttcactcgcacaattattttaaaaacaaaacccaacataacatatcatacttattttaaacccatgaccaacaaactctcattatgttccatgattatagcttgtgaatgattgatattacattcatatctcaaataactctcttcaattactcagtcttcttcttagaaagaaattcctttttgagacctggaagatgaacgttgacaatgtaatgctcccagtcaatgcctttgatatcgaacccaaacgtttttttctcttccattgacatctcctgtatcagacttgttgtattggtgttgtcaaacctatagtattgacttatgggatcagtaaaatctgatagctttttgcttaataaaagaacaaggccatgtatgttactaaccgagcttgaaagaatgtgtaaggctcatatgtttttgccaaggacacaaaatagtttagcttcctctttcccttcgtgctcaatcctcctccttcattatcaatcactctttcctgttttattattgtgttcgataaagcagaagtgaaaccctctaaggaactgtggattttcatatgctctaagtctatcactgtttcttccaatggaaagtcacacagatgttgatgagagaggtctatcaatttgccagcacgcatggggttcacatgagatgaagaagttaaattgtaaactttgaactctgggacaccacaaccatgctttgccatggctgctattgctgcgtttgcaaccatgtcaacaggtataatgtccatcaaagattaaagatctaaccagaagtcagaaatctggcctttggcataagccaa

SEQ ID NO: 38890 - DNA, 577 bp, Arabidopsis thaliana landsberg
aaccctgaaatgtgcgaatattgttataagcatgtggctaaaacatatctcttagagaatcgtcgtccatatgtaaaagggtcggtctggactgagcacgaatattcgattactaaaaccatcaagtgtatatcatcgaccttttgggttttgtttagtactttttggactatcaatctttggtaattgaatttcatgggacaagtatagacttgtcacccattaaacatttgaatctctcctgattgacgtatgtgtacaacaataatcgatcgatttatctcaatcagtgcggtaaaacaactagacgactgcaacattcatagtgactatacctataaagactctactataccacaaaaacaacatccttttaccggtgtaaatagtgtagtagctaaataattgaccgatggtgttgctaacttgttgttctcgtattactcagataagccataatgccctatatgcaaaagtcggagagggaaaaaacattatcctatataaatgggcagcagctttcgttcccaacatctctcgtggatagataaaagaatcattccagaagttatatttt

SEQ ID NO: 38891 - DNA, 331 bp, Arabidopsis thaliana landsberg
ttgtgtttgcatgtggacgattgaaatgaaaaataaatgaaggggttgcaacaaatttacctctttatttctaacggtacgaaacattgcattaaaaagtcttggaattttttgcagacataaaatgatttcctttttggaaattaaatttgggtacacgatggaaaatgaccctctatgtagttcaaaattgatgttctaagtatgtctacacttgtccaaaaaaaaaaaaacttttctgcaccataacattaagaccaataaataaatcctgccaaaaatgaaattgaatgctatcagcacgctatcgatcgtatatgaatcaaataca

SEQ ID NO: 38892 - DNA, 1118 bp, Arabidopsis thaliana landsberg
tgtttggtctcgcactcttcaagaaaaggcttatacatcgactgtaatttatcaaattgtcccttcacaatcttggtcggctaaagggaaaggattgaatcaatggatcagaaatacttttcaccgaaaaaagttaagcaacttccatgtttctgaaaccaattttaccaatatgatgtaatcaagaacatgactgggttctctctcaccttattagtgtcctctgcaaaaaacatgcgcaagtctcccatgtaagaaaggctgcatattttggcgtatagatcttcctgcgccagagttccgtgagttatagtgtgcagtctagtgaaacttcaaggtttctgagtgagcagtgaacagaaaaccaacctcggtgaatttcgatggcaagagaagaagagctgcagatattgcagctctcttattaacagaattcacatcctctatgtccagattatcaacaagcatatgaacctgcaaccaaaggcactttcataaaacatctcatgatttacagttattactaagaacaccaagcaactgacatacaggtttttgtaaacggccactcaagtagaacctcttccagtccagtatgtcatgtactaggtcatgcatccgaacaactccatacttgagcttctgcaaatagcttcacaaagaaggtaaatcatgcaagaaaaatggcttaagattacatacaatgctatcatcctgagcagaatgaaaacatatgaaaatataattaacaaacttagattgttcattaggttttaaacaactctacagttttgggaaatttcttaccctgtcgttccagttgacaaacggattgaagtgaactccaactcctactttatcggcaaaatttgtaatctattctcaaattaaagagaaactgtgagttcagtatttgattaagcccgtataagcaatgcaagaatatggtatatagagagtaaatatataccagcctagctccaccaaggtgaaccatccatgaagcatagtggatctgaatcattttcagattcttgtgtcatacaaaagaaaaatacttattaggaaccgggaggctttaaaatagctcctgggtctaaccattattaatccaaaag

SEQ ID NO: 38893 - DNA, 705 bp, Arabidopsis thaliana landsberg
gtccccgaggtaagacaattgtcaatggcatttttgtttttgctttttaaatttttcaaacaatctatttgctatcaggttgagaacgtagtggtgacactcttgacttctatgtaaccaactaattttatacaaaagagacaaaattatataaatgaaaataggtaataatggctcttaatcatgggtaaccttctcattatcatcctattcaacttgtgtttgaactttgaaccatgatcatcacatctagtaacacagtgaatgcaccttttcctttccatttgtcattctattgattttgttttttacggtttgatttgatacgtatgaaaaatcgatagattgatttcttgatcaaccttagaaattatcaaacaaaatcatcgaaagatatttgtttatcatttatctcgaaaaacaactccactttgatgataggataaccaaattcatttttttttcatgcaccatcatagtttcattaaaaaattgatacaaactggtttcacatattttggtccggttcttgggtcatttactcattattctcaaactgtccaacacgtattacattaattgtatatttttaggcaaaaaggaatataaaaaagagatgcttagtcaagtggttaaaaccattagactatgtcttttctatcggaattcgattccaataaattatgggaccccgtgtaatagaaa

SEQ ID NO: 38894 - DNA, 629 bp, Arabidopsis thaliana landsberg
caatcgtatctgtccaccgatgatctaaacgaccaatttggcatttcccagttactatcataattaatcatatttgtcacgtagattcagatgtaagattactaaaaaacatctcaattattttcacaatcttagacttaagtgtttatagcatgtggataagggatcatgatcataagtttatagttatgtttagtgttttgtttttggtagttttagtttcaggcggttttgaaacactttttccgatccgacctatactcattttattttttttgttttatttacaatttaatttacagattagacattaacacatattttcaatttctcaaaattatccaaaatattcatatcttaaagatgtgaaaatttatcagaattagtgaattcgaagtgtaatttagacgatttaaactatccgaatccgatcaaaactatacgattaaaactatccgaatccgagccaaaacggtatttagtaaaatttaatatttattccgtatatttctagcaatatatttaaatactcctgcccattacctgtttatacgcaattacctctaatcatctacatacctgtcccaattggacacttctggctttcccagtcacagcctaaacagagc

SEQ ID NO: 38895 - DNA, 839 bp, Arabidopsis thaliana landsberg
ctgcctcagtggtaagacccacgaacaaaaaatttcctaaacattatatctattaccattctaattagactactaattaaattacccattagaaaaaaataagtcaaaaaaataaaagcaaagaaaaaaaaggagaatgaaccctcacctgcctcttaagaggcaagagtaaggcagaagaagaactcgcggttcaactaacactcactacaacagtaagattttcgctttatttttctcgaatcaatatctcgatttatttttataactcgaatccgactaccttttctttgaacctaggaaaggaggatcgtagtggaacaaaatcatggcagacaagacggatataatttcatcatcttccgataaagcttctccaccaccaccatctgctttcagaaactacttatcctcaggaagtaaggaagcagtgcttctcttggaatcagctggtaaggaatcttgttgcatctttagagtccctgagagcttcgtagcattgaatcctgaagcctataagcccaaagttgtttccattggtccttaccatcacggtgaaaagcacctcgaaatgattcaacagcacaagcttcggcttctacagcttttcttacgcacggcaagcgtggatagagatgtcttgtttaacgctgcagtggattgggaagatgagataaggaaatcttattctgaaggtcttgaggaaagtccagaacaactagtgtatatgatgatccttgatgggtgcttcattctcatgttgttacttatcgtgtcaagaaagatagaattgtttgaaaatgacgatccaattcttaccatcccatggattcttccgt

SEQ ID NO: 38896 - DNA, 536 bp, Arabidopsis thaliana landsberg
gctggcattgtaggcgacgggctcgtccgccaggaattttgcggcgttctcggcgtagaagtcgcagttattttcgcatttctcgatctcggcctccgcctgggcgatcggcttgcccatctcgcgggtgatcatcgccgcatagcgggccttgccggcgcgcagcacgcgggccatcgcggccagcagggtgcagcgcccggcgaccggcaccttcctccaggcggcctgcgccgtcttcgccgcgccgagcgcgcggtcgacatgggcatcggcgtgcagcgcatggcgcgcaagctcgcggccgtcggccggattgatggaaacgatcatgctcttctcctggtgtggtcctgctgcgcacgccaggccggcaggaagccgaggctttccgcggtggctgcggacgagggaacgaattcgaagccgatggcgccatcgaaaccctgcgcgtcgagcacggcgaggacagccgtgaaatcgaaggcgccggtgcccggctcgtggcgtccgggatgatcggcgatatggacatg

SEQ ID NO: 38897 - DNA, 542 bp, Arabidopsis thaliana landsberg
attgtccatttctctttctctatatcttctccttgtagtacttctattacctaaatgtaccataaatcaacggataaggataaagattcataaaacaatagtaatcaagaacaaatcgtattatcaatttttgtaattaagaatgtagtaacattttcttgtaagccaagttttgatcttgcaaatccggtttaatagttcttgttttgtttttaattacatatattgattaaagttaagtgtcggtaaatgagccacttttcttcattatcctcaataatcacaacagaaatatagtgcttgttttgttttgtagtatgtgactgtgattaagattaggtgtcggtaattgagcttttcccatatattatatatagtacaattttttaattaaatcaaaaagttgaaaggtactactattctttattcaataacaaagaaaaagcaacataagcttaacgtttgatgtatatgtcgcattaaataaagatggttatagttaatgaccaaagacattttttcagtcacgcagccgatgagct

SEQ ID NO: 38898 - DNA, 964 bp, Arabidopsis thaliana landsberg
acataacagtaatttatgttttacttgacacacattatgatctattttttaataactttgaaaaccaaatttcatggggtaagattttagttacctaatttttagctaaaaccaaacacaacaaaacgaaaattgtatcaaaccaaaatatatatagttttgtggcaatttttaaaaaaataacaaattcagaagaaaaaaaaattcaaagaaaccgaaccgaaactaaaccattaatcgataaggctggaaattagagagattaatttatttttggcctccaaatgattccgataatcttacaaaacaggcaataaaatagtcaaaatacataactttatttcctaataaaaagatctttaaaaaccaaagatttgcaatgaagatttgataccaaaaacaaaaaaccattactcacaagtgtcttaatacgattagttgatcagatcagaaaaatacgaccgccacgtcatcgaccgcatgccctcgtcgtgtcttcgctcactcaacaaaaggtatccttcgctttcacgaacgtcgcataaaagctctgcaaaaaacacacaacacaactgagagagatcagacaaagagagatttgtaatatcaaatcatggggaagagaagaggtgtctccgccgtgaacgtggttttcgggtggctgcgacaacaatcgaacaaggttaaaatagctttaggaattatcatctctttgatcctcgtcgttcttgtgaaattcaccgttaggaatcacaatcactttttaatcgcctccgagctcatccacgccgccggaatcttgatcctcatctacaaactcactcgccaaaagacttgctccggtaacaataataatcccaccaccttatcataattcataagattttgactttaaatcatagacctttgtttcttggtaatgtgattagaagtgaaaacatgtatatgtttatattgtgacaat

SEQ ID NO: 38899 - DNA, 593 bp, Arabidopsis thaliana landsberg
atggggaagggcatacactgtacagcgattacggcaacctgtttacacaaacaggagagggcgcttccaacacagagaatatttttgtgaagatattcggcgtaagcaacagcaatgtgctgctgggccataacaattcgcgcgacctggagaacggccgtatggcgcctacacgcaacctgatacgtcagtacctgtacagcgatggattgcctgcatggaataatgatggcacagcttcggcaaaacgttccacctattttgtggccgaagcaaatgaaagcagctacaataccgttttcgataaccgagatccccgtgttgcctattcttactttaaagcgggcgatgaagcttaccagggaccctgggttcccaaaacatcactgggctcccgtacagcttttgcacccaagaaaggattcagcaaaacagaccagtacatcaatggcgcggacactaccgacaggatacttatccgttacgctgaattattgctcacactggtggaagccaagtatgaactgaacttgtccattaacgatgcagaccttaacagcaccattaatgcactgcgtacacgcgtgggtttt

SEQ ID NO: 38900 - DNA, 638 bp, Arabidopsis thaliana landsberg
cgcctagattttattttttttgaagattaatatgattttagtttgaaaattttcagtatctagtttttagtgttctctccgattcaaactaaaaaaaacataaatgttcttctcatgacctcaaatcaagtggtccaactaatgggatatgatatatgaattaaatgcaatatgattattaatgattaagttcatgtaattattatgtacgccatatgttaacgtcatacgttgccactacactcacctgaaaaacaaatgatcaatcacagcttcctgaatgtttggtcaccaccactaattcatttttttctctctcaatttgcagttctataagcgaagacaaataaataaaaaccatttttgcattataaactaattacttaaaaaatgaaaagaaaatatttttaactcgtgacacagctctttcaacaaccggattaaggctttaaacaaaatacaatctttttctctaaaaaactatataagtaatttttatttttctgaatctcattattggctttttactcgatcacatgcaacatgcttttaccattttaaagttggtgtggagccataaaacacacacactcacacacacaaaactacatactataaaatattagtttgagtaaaac

SEQ ID NO: 38901 - DNA, 684 bp, Arabidopsis thaliana landsberg
gtctaaagaaaattgaatatagggtttggtatctttgataatatgttagtgtctcactaaatatcaagtttccggatggaatactaatgtatattaaatggcataatgatcagcataacacaatacataaggtactcgcagtgattgttcgttgatttccatccttgtggtgaaagaatacgcgtaggcaaagaagaggtgaacatgtaatctcttccggctcaccacatagaagaaatggctttataactcccaaactccatgagcgagatcttgtggcaagtctatcttttagagcaaccaggtggtgaaggagtatctcagaatttgttgagaaaaccagaccagacgactccaagtaatgcgttggtgttgtagtcagatttgatatggtccatatggtgcttagcgggaaaaaacgtggtccaaagccttcctctttaacctccataaaggaacgtcttgcccacccgcatgagaaagcgaacaagtggttctaatgctcttaatgatttcccgaagatgagagctccgacgttgatgaatgatccaactagaggatgatacggtctccacgatctttgcatatttggttaagccaaagactccaaaccaaactcgcaaaatgagtattttaatttaggttatggaaagttatattagagtaatgtcgaaataatttaa

SEQ ID NO: 38902 - DNA, 220 bp, Arabidopsis thaliana landsberg
ggaatacgacgcttacaaccagttcttgacgcgctccttggccatgggctggctggatgagcgttcgaccatgggagacacgggcacaggcatgggagcggcgggcttgtggtcgataaacgatgcctgctgggaacatcccggtgccgaccccggcgcacggctggtgtcctggttccaagtgacggtcagtccgctagcggcgaatcggtcgctaccg

SEQ ID NO: 38903 - DNA, 305 bp, Arabidopsis thaliana landsberg
gaacaagaatttcaaccacacacagttgatagaagatctttaatttcagatgttctttaatcatcactagtggccctaatttgccaaagagcttaatctgtcaatttttttttgtcttggattgtttcttgactgaaacacaatgaagcaatagagatggtcttcttgtttaagttcaagccttgttttattaatcctcatataacaacaacatacaactaacagaactcaaaactttacagaagccaaatggaaaagaaaacataataaggactgaaagaaacaagacaaagagtttcttttgc

SEQ ID NO: 38904 - DNA, 2222 bp, Arabidopsis thaliana landsberg
aaatcttctatacgaaatgtatagaagtttccatgtatagtgtttgatgtaatttgtgaagaatctccgagaaaggggggggcagatacttgtctatttttagagatacacattttcaaaatcacctgtagaaaaagaaacaaacagtataacccaaaagcgtcttagataaattgactaattttggcgggtaagaaaaataaaccatagctgttacttgtttgcctgttattgattagagacaagtaattatgttattgcccattgggctcatacatttttttaatgacccattaaactcatactttttttgtaatgacccattgggctttaagtctagtaatgaaacaaaaaaaaaagagaaaaggaaaagcttgcaaaccataacgaaataaaccggtatagaatccgggtcgggtttaatttgcacacccggtaaaaaaccctaatttattttggttccaggcaatttttttttgtcttgagctcaaattgaaaacacgagcttcctaaaccctagcagcagagtcttccgtaaacccagctctcttagctctcacgcctcgtcaattgttgacctgtaggatagatatgggcaacgagagcaaaacctcggctttggaatcggagcagaaggctcttcttctccgttcggtagctcaatacttggaacgatgtggtttttccaaatgcttcaagaaattgctctccgaagctgaaatcgaggtttgtataatcaattttcgaactttaagagacttggcttttgccgtttggtggaaagaccaaaactttatccttaattgatgacttcactgtagattagattactatggaattgatactttgttaatatagcgtaggattctgacaatgaatctgctgttttgttattgtttcagaagaaggaattgaacactagtttacctgatttagaggaaattttcagcgagtttttgaacaagaggtaagcttgtctcgcttgtttcgcttctcaagtatgtaacaagatgttctttattcgaatttagttgcattgtatcattagtcatgttctgtgtcttgcagagatcatgaagctgcagctaatggaaataccgaggcgaatgtagtggaagctgtagagaatgtaaagaaggataagaagaagaagaagaacaaggaaacaaaggtggaggtaactgaggaagagaaggtcaaagagactgatgctgtgattgaagatggagttaaggagaagaagaagaagaaggaaactaaggtgaaagtaaccgaggaggagaaggtcaaagagactgatgctgtgattgaagatggagttaaggagaaaaagaagaagaagagcaagtcgaaatctgttgaggctgatgatgataaggagaaagtttcaaagaaaaggaaaagatcagagcctgaagagactaaagaagagactgaggatgatgatgaagaatcaaaacgtaggaagaaggaagagaatgtagttgaaaacgatgagggtgttcaagagacacctgttaaggagactgaaactaaggaaaacggaaatgctgagaaaagtgagacaaagtcaacaaatcagaagtcaggaaaagggctttctaactcaaaagaggtatttgcgtttgcatcagttgaatctttttgagggggatcgaggattgtgtactgatgtgttttttcatttatttacagccgaagaaaccgtttcagagggtgaacgttgacgaaattgtgtacactgagaatagcaactcgtgctattcaaaggttcgatataatcttcattgctccttgtatagcaatctttgttttatcaatgcctttattgaagtttgcttcactgtcttatagggtggtgctgaaattggctatggtcttaaagctcaagaggttctcgggccagtgagaggaaggtaatgctcctccccctatagacttattgtatagagttagacaacgaggctctaggttgttgattcagtttggttatttcgggtttgacaattcataactaaagtaaaacctagtatgttcctcaccctttggacttgtcctatatcactgatttaggctcatatcttgatctcttatatttcaccttgttttggtttagggatctccgacctcagaagacgaagaagaaacgaggaagctacagaggaaaattgatcgatcaagagtcacattcgactaagtttaataactcagacgacgtagaa

SEQ ID NO: 38905 - DNA, 604 bp, Arabidopsis thaliana landsberg
aatcgatcaccacataatgtaagacgacataaatatatgtaacccaattataaagttcgtttacgtattatacatgcagctaaagtactgagttgataattcggctcgtggtccattctaattgtgacctaggatccaacaaataaattattgaggaaatttactaagcctctcaaccattttttaataactatggaatttttccaaactaatctccaatgttcatagtgaccagccatgattttttagccaagatttatagatttgcaaccatatttaatgagtttagtgcttcgaaaccttgtttccataatgtaaatcatcaacggaaaatcaataacaagatttataaaccaatattttatcaaatatgttcctctattttctctattaaaaaaaagtgttaaaagggtcttttcgttgatggacaggttgattgacccatccattttcgggccatgtttgttcgaaaattatctgacacaaagttacggtttcgtatgaatccatataaaaaacaaacacagctttggtccctccatcccattcccttggatcccgaccgttgatcctcacccaaattttataaaatggtaggaatact

SEQ ID NO: 38906 - DNA, 1453 bp, Arabidopsis thaliana landsberg
tgaacaagcccatcctggaatacaagacaaagaggaatgagaaaatggttacatgatctaaccataagagtgttaacagaggaaaaaagattgcttgcagttttatagttaatgaaaaacaaaagctcaggcattagaaaggataggaagatcaaaagtacctgaccaccggtacctaaatgtcgaccacatggctcaatatcaaagaatacacgctggtttgtgttctcagttgctctgtacaatctgatcacacatataaatgatccatttcaaacacatgtcaacattataagagcttcaacatctaccatttctcaagctaagacttctattaacttgaacattgatgtaacgttaatcttaagctgctcatggctcattaagcattaatcttgtttacagcacttgttcttgcttctagattatattgtaaaacaagtatgagcttagaaaccaaagactacccaaaccaaaataaagaagtaaatactcacttatagactatttcaacagatttccgaatatcccagcaaagaatgtaaggatcctgaaaaagagcaaacaaaaaagaaacatttttttggtgaggttaggacaattcatcatcctattacatatcatactctaatattggacaccaacgagaatatctctggacagacgatactttcttccaaaaagggttatccttaaaatggaagtcaagttgcgatataatatgctcaacattcagagggtaaaatgtttataacagtatgttaccttgcgacctcctgtatataaatagttcccatcctttgaaaactggacctaaaagcaccaaaaattcgatcaataattgatcatatcccaatggacaaaaataaggcacatttagtggtcaatgcttacatgtgtaacaccgccttcttgaccatgtaaaacatacaatagctccatgttgtcttctctataaatcccagtagtttgcccgtaagaccccacagccaacattccagaattagttggggagaaagcaagagtagataatatacctggaaattatgaaccagttaaggttgttcttgtttctgtataatctgtaataatattgttatgcagcgtctgagtggaaaagaaagaaaaaaacctgcttggccctctttgtttttctgtagagttgaatactgcctaaaatctcttccaggacgatgaagatcaaacactctgatggagctgttgtaaccagcaaagatcctaaagacataacacaggcaaatgaacatagaccacttttaatcaattctttaccgggtgggaagatggatacaacttagatgaagtttttgcttacttggttccatcaggattgaatccaactgaaaatgcagcagttatttcatccatagcatcataggcccggtatgtgcatcgaagctgacattgtgttattcacatgtaaataaacaaa

SEQ ID NO: 38907 - DNA, 407 bp, Arabidopsis thaliana landsberg
ggcgcactgatacatgaccccgaagtactgatactggatgaactcatttgtggcctcgaccccaaccagatcggggagaggcgcaatgtaataaaagagcagggaaaggataagaccgtactgttttcctcccatatcttacaggaagtggaagccatctgcaaccggttggtcatcatagaccatggaaatattgtggcggatgatacactggagggactgaagaaaggcaggcgtgatcatcatattgtttccgtgcagttccatgaactggtggaaaagagcctgctgctgtcgcatatccacggtatacaacgcattgagcagccttcgccaggcaactggaaactgcagacaaccgaccccgaaaccatactcaggcagctgctccagctggcggtagacca

SEQ ID NO: 38908 - DNA, 779 bp, Arabidopsis thaliana landsberg
tggcactattattcggaattatagattcaatccggaattctttccgatccgatccagaaaaccggatatccaagataggtgaatccagatccagagaatgaatttacggatacgtataatccgaattataatttgattttaatttataatggtgggatacataccttcatctttgttgcctcgttccagcttgcatttctccgtagtaacatgttgcagatgattccttcctaaaggttttgattggtattttatattttgcgcggcccaattgtcacatacattttgattatatccgcataataaatgttgttagcaaacaaatgaggattaatattgaaaattgtccctagatcaaaaatttattactgaaatcatacctttctttgcatataccacataaaatgccaatgaatcaaaattcatcacaagaagcaatcatcactagtagctgatgtgtatatgtagacgtctctttagggtttttacaacaatctccatggaattttcgatcaacatgttttattaaatcatattgattttttattattttatgttttaaggtaaataagaaattgtttattttcttctttgtaaactattgtcggatcatatatttatgtgatgtagaagccatgttatcgtgtacaatgcgtgttaaaacttaaaattgtgaaacttttgtatgtaataatgattgattgactaattgattttaaaagatagaaaatatttaaattatgggtccacatggtaattttataaagaaaaaatcccgg

SEQ ID NO: 38909 - DNA, 1323 bp, Arabidopsis thaliana landsberg
  unsure (1)..(1323): unsure at all n locations
atttattttgactgaacaatctttcagaattcaagatagaaataaaagcaaaataaaaataaaatgactagagaaatgtaattctaatttgtcataaaaggaaaccactgagacattatctgtttaattattgatgtagaaggaaagactcccactagtcccacttggttcgatacccgcgcttcagccttcacaccatccacgtccagtgcaaaattcttcgggcttccactatataatcttctaaacaaagataacacaataaaatataacaagatgatatattcaaatataatcttatccgatcctctattttggagttggcgtgcgtgactgcatgccatgaagtataatatagatggaaatttgaataaacatgagatcaatcggctaaaagcaaggttgtgttatatcgatcatcttaattctgatgtaaatgttttgacataagcgtacgtataggtatgatactagtaaaaatacaagtttaaacctgtctaattgttcacatttcttaagttaaattagtcaatcgaaaagtgaagttttaaagagttaatgttgtttacattcgatggtatataagtgagttttccatcatttttagtttcattatgaaaacattgtctacttcaattttttgtttccaagttaggagaattaaacagaaaatttttcattgctactatttaagttctatttattttgtttttttgaatgctatcaaacaatcgaatggaatgccaataaatttatttgaatatatcattcttatttttttttgctggaaaatataattagtttacattgaggaactaccgaactatcatgggcataattacttctcatcagtcaagctctcattatatcgctgtgttttattaatccaacaaagtaataattaatttatttttttacttcatggacatctcatataaaacaagaaataattttctaggaataaaaaagaaaagaaaaagagagatataattaaaaaaaaaaaaaaaagatatgatttgagaaacaagaaagaaggaaaaaaagaggagctgatattacataagtaccctcttacattactactccataagaagatctcacatcttctctcctatcattttcaactaccaccatctctatctctctcttaatcgatcgatgatgatcaggtgcgacgtctgcgataaagaagaagcgtcggtgttttgcacggccgacgaagcatctctctgcggcggctgcgaccaccaagtccaccacgctaacaaactcgcctctaaacatctcncgttctctctcctttatccttcttcttccaacacc

SEQ ID NO: 38910 - DNA, 290 bp, Arabidopsis thaliana landsberg
aatcttttattttaacctatcatatgtctaaatgtactgaaaagaaacaccattttaattaattatacttccctcacatataactatcaaccaagtacaaaacttttgtcaattctcaaaatcaactttcaccacatatttatttaacatgtgtatgttccaaaaccagtttaaatagaattacttctcagaaaatacatgtatattaactctatctaataaagaagaaacacatacttatctcatagattccattcataaaactatgctttagtgagtaagaaaaccag

SEQ ID NO: 38911 - DNA, 683 bp, Arabidopsis thaliana landsberg
gcttcattgcgaagaaaccaagaagtcatgcaccggtggtgagaacaacacgcgcctccttggatgagaatcaatccccaacttccggaggagaacggtggcttctcaaaccagttggtcagaggctatttttttgtttctctaggtttaatatcaatgagcttctttaatctttttgagtcttgaaagtctttttgcctgaaaacttataggcgatggagacacaagacacattggttacaaagtggcaatgcctgctccttttgagatctcctctgtaagaaactatacattccactagattgattgattttgatgagtttttagtttttgctaagatcacaaaaatgggtattgagcagggccaagttaccatcggacggctaccggaaaaggctgacgtcgtgattcctgttgccaccggtatttctctgttcttgtggttttcggttttcttgaatttgtaatcaaagtgaatttggttttaatatgaatcaatttgatatagttttggtttcgggtttaggtttggattcggtactagattttcgattgtagatggtttattgctttagtttggatcagaatccaacactcctagtcccttaacctcagtgtcaggagtccatgcgacaatcaatacgaatgaaaagaaccttcttgtgacggatatgaacagcgcc

SEQ ID NO: 38912 - DNA, 476 bp, Arabidopsis thaliana landsberg
ctgacaacatgtgattgggtccacgtgtaaaacgggtcccttgaacttaccgtacgccatttagactgtggtcccaaagatcccatgtgattattacacgtgtctaaagtatttttatacgctaggccctgatgagaattgagatgaccattcccaccgttgacggctcttcgtatggaccatctcaattaacgctgtgctacatggttggttacatgttcttgtgttccacgaataattatgctccgttacatcattttctcacaaaaaaaaaaaaactgtttatatttttagccacttcacaaaaatttatcagatggtataatggatcatttcaatgtatatatactattacttacggagtatagagtgacgtcgatagtattggattaaacatgcaccatgtcaatgtgtaatgtgttacaaattcggtaggtataattattaatttactagcaaagagaaaaagacatcca

SEQ ID NO: 38913 - DNA, 522 bp, Arabidopsis thaliana landsberg
caatcattttttttgcgtggtatatggataatacatgggattggaaaaaatatgcctctatctgtacggactatgtatatctcaactctcaaatcactgtattttattattttcaagaatgaaaaataaaagtgttagctgtctagttctgttgatatattgaatgaaatttaacattttcacttgtccagctgtaacttcttagttcttacagtataaatacgttattttctttaataaaagagagatacgttgatgagttcactatggttaagaaataaagagttggttccactaaattccatcaattaaatatgatcgtcactttctttgtccccaagttgcgtatacctataaatacatctctttaccttctcctctgtttcctactcatctttcctttttccacatcaagttagaaaaacaaaagtagaagaaattatctccaaaacacacaagtccagagagaaacaaaaagagattacacacaacaacaacaaaaatgagaccattgagcgtaca

SEQ ID NO: 38914 - DNA, 362 bp, Arabidopsis thaliana landsberg
  unsure (1)..(362): unsure at all n locations
tccattgtttgagtatattccccatgcctctgcttttagaaaaactgttaatatattgtatacattcaactcttgccttatgagagacaggggtctgtatttttgatgtttacattttttttgcagtcaagcaccgaggaggagaatgagaaggctttccttattctgaacnnnnnnnnnnnnnnnnntaaagaggtaaatatactgtttgcttcgttgctatgttagtttgttggtgcttagggaaacaatacaatcactcaactacttaacattatcttgcctttgcatatacaggggaaagaagaacatatgaaagcagcttgtgatacactggttatggtgtataccaccctgaaaaa

SEQ ID NO: 38915 - DNA, 1036 bp, Arabidopsis thaliana landsberg
  unsure (1)..(1036): unsure at all n locations
aacacatccatccaaatcatataatgaaaaaaaaagttcgaggagaaacgcattttaagtggtaaccagtacaagctatatggttgatgcggggacactcgaacttgcggtctgtttcttgagactgagttacagtcgttgctctcacgcccattagtaccaaagccatcatcattgntgtcttgatcatattcatactcgacatcttcctttttgttttgtttttttctcttgttaagatttgtcaactactgaatcaacacattctgattatatataattttttgcataaaatgcatctcatgaccgttcagaagatggcagaattatgattaattagattgccacaaatttgccagtatattctgcaacaaatcttcagaatatattctacaataaatttccacatctttaacatttcgagatatatataacttgtttgaaactataatttaaaagtaataaagatggttatattatttacgaaatttgtaaggatttctacttttataagagcaattaaaagataaacattttaagtagagaatcaaaataagtaaaatcatgcacaaaaggaacatctgaattttggataaaatggaattaggacttcaaaaagtggattgaggtgaacgtggaagaaaatttaaatataaaatgtgataaaaatatttgtaactagaaggaaaattggtaaacttaaatttaaaaataaaaaattagtagatattttaaattaaatagttcttgatgactatatgtatactttaattataattaaattggtatccaatatactttttaagtatctaaacattataaattatctttatggttgaagattgcgataatatctaattaattggttaaagaatggggtggggggataatattagattgatttgttacattttttaccaaaaatctttataataaattggtgatttggtgattgatttattattaaattttgatgattttgagaaactttaaaaagaaaaattggaaagactgactagtgttcatgtggtgttac

SEQ ID NO: 38916 - DNA, 661 bp, Arabidopsis thaliana landsberg
  unsure (1)..(661): unsure at all n locations
atcgtaattggatggttagatattattatttggtgcatgatcgatcttctcgaaaattatttaggacccattaacttcgtagttatgttatgaaaaaaatcaattgattcaataagtttaagcaatagtgtgttagaatctgacttacgaagcttcttagctttagtggtgttagactcggttctagaaaggaaacaggtcaagtttatgcttatggccctcaatatctaagcataattctatcgctaatgaagcttcagtgcttggtaagaaatacaaagagaagaaagtggtcaagaaattgccaccaaaattcgcaccactcaaagttgttctgaagatagcgatgaatgtttttgtcttgttgatgagagatgaagtttgatagacttttagctatgctcaagactaaagagatggaatcattatagacgtaaatgtatagcattctctaaaatttattctgtttgagttctactcaaccaaaagaaatcagacctaaacattctaatttcagtcttcagtctacgatcgatttctaactttaattcatgccaaaagttttcaataactggagaatttagagtcttgcanagagattgcattaagaaccctagcttacaaaattgcctgtccaccaccagagtcagagagattcatg

SEQ ID NO: 38917 - DNA, 302 bp, Arabidopsis thaliana landsberg
gatatattatatatatggtcccatttcataagcttatacaagtagttatacattcaatcatatattttctgttaagtatatataacacactaattatatatacttaaaacaatttgaaaaatatattttgtacgtttacccgattatatcgaacattagacatcatttggttattttatttatgcgactaggtcttcatatataatgcttagaaattagaataacgttatgttttggtttctgtattagtttttaattattttaaaaattaagtccagtgttcacgaggattactatttttg

SEQ ID NO: 38918 - DNA, 841 bp, Arabidopsis thaliana landsberg
  unsure (1)..(841): unsure at all n locations
gactggggacatccgcatcatttcacccacccatttactgttttttcttcttctcaatggctttgagacattggggcacggggtatctcacactatcaaggccctttctatacttatcgttaaccaaatcgataaccgtttttctttagaccgtagtataactaaaaagctttgcgaaaacgaaaatttgggaccggataaaacaaaacataacggagtgcaactaaaaagaatatgcccgtgactcctgggccacgcccattagcaactatgaatgatcttatcaaaactgataaacaggcaactctcaatttttttggttactccaacttgtaataataacacttaacacttcaacaaacaaatgattaaaatcactaaatcttgtaattagttgactaacaatttatactaattattaaaggtgggcctataatccggaagaacaagccaaactaacttttaaaagttaaactctcgttttgtttataaatttgattaggtttattattttcaaaatcaaaaataaaacgatcgaacagtgatttatctataaccatatcaaactgaattaaaaaagatttcatttaatttcatttttttataaaactgaaaaaccttaaaccggatttcttacttctaaagttctactaattgttttaaattgatttttccctccaaaattaaccaaaaatagcaatcgttattgatcttctagaaaagattgactttagattatttactttttcagtaattagtatgaacaacattacatattcaaaaataaattacataaaaacaatttatttggctaaagcanaagatgaaagtaagttttctg

SEQ ID NO: 38919 - DNA, 326 bp, Arabidopsis thaliana landsberg
gatgtctgtgcaagagtatttagacaagcatatgctttctcggaaaatcgaagacgccgttaatgccgccgttagggctaaaacctcagatcccgttctcttcatcgtaagtttccttcgagtttcgatttacgtgtgtcgaagtgaaattatgttacattactcattgaatcttcaattggaaaagtgcaggctaatcatctgaagaaagctgtatcatctgtgataacgaaggtgaaagcactacacatccttgacagcagaggaattccaacagttgaagttgatctacacactaacaaaggcgtgtgttcgggcttctgttc

SEQ ID NO: 38920 - DNA, 675 bp, Arabidopsis thaliana landsberg
  unsure (1)..(675): unsure at all n locations
cataatcttagatcggtctgatctgcatcaactttgatcgttgaggtcagcagattgacggtgtgacgtgccactggtttttcatcgtgcacaccaccatgataatgagaagacagccaccgacttagcagcccaggactgttttctgaagccatattcctgtgaacaacagagcgacttccatttccctgatacatagagcttcaaagattcagtaaagatacagtacatcaccaatctgatctatatatgttttctcaaggaaggatcaaaaacacaattgtttttggttttgcaacttactgaagaccaattccatggcttgcggtaatagtatagcatcccacggctatcaaggataaagaatcttcttttccagtcacctctcaagtttgaggaacgtttagacagatacccttgtctgatagtctgaacctgaagaacagttatatcaacagataaatataaaacaagagagtataaagatgtgacagcagtttgacgagtaagcctcaatacaaaagatatttccttacctttccttttgcagcagannnnnnnnnnnnnnnnnngacttttggggagtttcttgagttatgtctcatggccatcccctgttggagaacacaggagtntctagtttcacgatcaacttgctnttggtattcctgcatc

SEQ ID NO: 38921 - DNA, 757 bp, Arabidopsis thaliana landsberg
  unsure (1)..(757): unsure at all n locations
tgatagagtcatagacatttcattttagttcgacattataatatagtacatgagaatgtccaaacatgtatcatgtatgaaggcccacattatccaatattcagtaacgcgcaatgaatatgatcgtgtttgcaatctgactaacatagattattcacttgcacttattggttaaggtttgtgttcgaagccacataaatgggagcttgtataaatgcataaacgagacatgctttgtgtccattatattcaatataactaatcatgaaactgaattataaacttttctgttcgcgcattttctatctcattaagttccttaatcacgataacaaggcacaccaattgcatattttgtcggccaataattccccatgatgttcttaaagaaaattactgataattaatgaaacatagttagtacaaatcttaactataaatatgaagaaaataaaaccaaccgaatttccgttttgacagttaaagaggtatcgattctatagaaatgtctttaagagaatcatagtgtaccattacataaaaatatatgtataatgttttatacctttgacactttctctgaacgctttgagtaaagtggttattgtttctatgatagtataatttactcttcaatgtacttatatatgattttgatgtgatggtacgcanaatttaggtttgatatatttttcaatcttctcttctgtcagaaaaaaatacattatttatcttgaatgtgactaatatagtggtg

SEQ ID NO: 38922 - DNA, 251 bp, Arabidopsis thaliana landsberg
gttttgcatgaactcaggggcgaagtcgcagcgcccggactagcaattagagcttcggggtatcgttgacgacgtctgcgcattgcgcacgatggcgcaaggcgtgatccatcagcaccagcgccaacatggcttcagcgatcggcgtcgcacgcacgccgacgcagggatcatgtcgtccggtggtctgcatcatcaccgcctggccccgcttgtcgatggagcggcgctcctgcgggatgctggaagac

SEQ ID NO: 38923 - DNA, 201 bp, Arabidopsis thaliana landsberg
ataatagggtttgagaaatcaaaaccatcagaagagagtttctcaagaaccttcctaaatgcactgtggctcattttccttccagcaatcctcgcaccacgccttttagtattaaccggtaaagggtacatcgaaacattagtggtacaacaagcagactgccattccccgcaaccccatcggtaacactgctgaggcttt

SEQ ID NO: 38924 - DNA, 541 bp, Arabidopsis thaliana landsberg
atgtggtcagcaggatgtggctgacgtgaaccatctcgggttgatcaaacttgtcctgattatcattgtagaatttttgcgcctgctcatcggtgatgatgattttcgagctgatctcacgttctatcaccttgcgcaacaccatctcatcttcaaccttcgactgcagctggctgacattcaagccattggcttccagacgccgcttgaaagcctcttctgagggcagctgctttctgatcttgtcgatgtaatccaaggcgaacttcttggcctccgccttgtcttccggcagcgccttggctgccatcagcttgctcatgatcaaacggtccagggtgacctgtttgatcttggcacggtccgcatcggtcaatggccggccctgggccacgagcgttgaggtcgtggcaatgaccgcctcggagagttcgctctccttgatctccacgccttttcctttcgccatcaccttgtcagggaaatgcggatcggccccgcggctggggaatgatgtaagtgcgaccagtgccgcagcggc

SEQ ID NO: 38925 - DNA, 3624 bp, Arabidopsis thaliana landsberg
aaatggaaaaataattaacgtattaaaaaattcgaatgcatttaagtcaaaaatgaattaattgggagcatatgatatgcaattgattcctcaaaacagctcaacaatttcaaaatgtcgaatcatccgctcctcctcctccagtagagttgcctccttccttctcttccaatggcgacttctgctttcaattcaacgatgaagcgaacgacgtctctagccaaatcctccgagagtggcgacgactcttcttactctacacggaggtcagcttctaggagacaccggagtttgagccgtttctctcaccgcatgccggatccagacattgaagtgactccgatgaggaagggaaagtttgttaacaccgtgagaggttctggattcggtgaaattagcctcgatgatttagctgtcgagttttttgaatcgttctccggcgagagcgagattagtagcggagaaagaggacgatctggtttaagaaattccggcggcggtaccggcggagaggttacgaattcgcaaaggaggggaaggtctgtttctagggttggttctggtggtggtaacggtggtttacggaggttagatgctgatactgaaagctcgaggcgacggaggtcgttgtctagacagccggctagtaataatcgtggtggttcaagtaaggttgattcggtgagcaacaattcgagccggcggaggtcggtttctagacaaccgaatgagagggttaaggtcgagaacagtggtggtgtaattgagggagatcgtgagaacgcgaattcgcggcgacgacggtcgctttctgttgtccgtcgtcggattgagaattctgaggtattacacttttgtgattgcttactttgtatcttcttattgtatagtttctcttgggccctcttgagtggtgtgatgtgatgcaatctattaggaactttttacctttttagttacatttggaactttattagaaagctataattatcaagccattataattttagctgtgattatgagataactttgtagcaacaggaccatgcttgcttggtttgttaggtctgattttgatatattcaatttattgtgcgtatttatgagtcgtataaacagttgtatcatttaccatcttgaattagtagaagctgcgtatgaacatttttcattgttgtgtgcatttggcttgttgatatgagtagtgatttgtatttgtatattggaggagtgtgatcgacatgaattattttacatttgcagagtgatgtagatcaagttcagtattcaagcagttcaagggatgtgaagagcttcatgagtggaaagagtcaaaatagtggttctcagaaatctgctgcttcagataatagacaaggtcttaggaggtcttttagccagaatccaatcaaataccatgatggctactctgtaagtctaaatataatttggtttaaagattctttttttgtttaaaaatcgttttgttgtgcgtgtttgtgtttctgtttaggggattcgttaatctttttgtgtatgatatatatttggtgtaactccataagctggaaatgttataattcttgttactaattggagaaaaattgtttggaatgttacagagccagtcttctgcagtcacagatgatgaaggaaaggattccagctccagcaagcatggaactgagaggataattcgaacagtatatgcccaaaataaggtttgtggtttcaaccaacgattatttctttatttttctcagaactatattaacttaattatatgagtgtccactctctgcttgaaaccaacctagtcctataaaaagggcagatctttctggatgtttcatttaactgagggaatctatatgaataagattttagaatggtttattagagatgatgactaaagtagaacaatatcctacaactgttaattgatgtattattattgttgctttaatgaacaacgtcaatacaggcaacaccaaagaaaagagaatctttggggaactctggttatggttcccagcggaaatctcttgatgataaccgtggtgtctccacatctacgaaaggttatgcaacaaaattgcaagaggtacaacttctctttgcgtctatttgctaggttctttcattgaagaattgaccaaatatacaacacttcgtttccccttaaattggcagtctgaggagcgcaagcgagagttgctggctgagattatgttggaggagcagcgtggtagagagctctctgtgaacttgaaagaaatactcactgaaaatagctctgaagctgaggaaaagccattgcggacgcgaaaggtgagtattacaactctcagaacagcatatgtttcctcttctggtttattctttgcataaaaagataaaattacattcttttattttgacagaggagcaaggaccggagcaggaggatgtccatgtgtttgacagatgaagcagagcaattcatcgacgaattcatttcaaacatagaagacacagacttttcatcactggaggatgagaggagcgaaagtagttcaagttttggaatgataaaaacacaaagctctcaaagcaccagtgctctgaagagtacttctgttgaaatggacggtgttatgctcccttggttgcaatgggaaactccagacgtgtctgctgcagtggcatgccttatcaagtcgccgcccaccccaaattcaaaatctcttgtctgggagtcggatacaactcaggtaacaatactttttgcactgaccgtactccttacgggtctaaaactatagccggttagatagatgactcgtagaaagtttctctgacatgaatgtatgctgataggatgcatcgagtgggcgagggacgagcattggtaccataagtagcagaggaagctggagcccatatgactcggtcacgaagcctgtgatgcccacaaaaacactaaagatagatgtagcggagtatctgaagcgacctaacagctcagatattctaaatgagacgtggaagctaaggcatagaatcagttcgggaagtcttgtgctatgtagccgctcattgatctaaggcagtgccgtgccaagcttccgagaaagatgatgcaaaagatagtgaaatgtgatgatgatgatgacattgtagtgattcttctcttaattttctttttttgttgtttcatttggtaaggtacgactatatatatggaaattagtatgtaattaaccattgttaatctcataaaacttgttagatttgtttgataatcaatcaaccaaatgtcaactaaattagtgtaaatcctacatataaagaaaaaaacgacaaaacgaaatttgatatttatttgtagttgttattagatcttttgcatgcatgtgtcatttttattaaatgtaataaatttcttactttaaaataaacatcctaattatatatttaataacataagaatataaaatatttaatcattgtgtggttgccaaaaaaaaaaaaaaaatatatatatatatatatgtataatttttttttacttaataaatatattaaatagttttctgttggccctttttagagtgttgtgattgtgtttgtgattggaaaata

SEQ ID NO: 38926 - DNA, 1546 bp, Arabidopsis thaliana landsberg
aagcatggagattttcaggtaattggtaaaaaaatatagtcatctaaattgcgtaagaatagagagaaaaagttaaactctcgcctgttcctggatgtcagctaccatcaaggtttagggaagtgggtggagattggaaactctgggatgttcagacccgaaatgcttctaccgatgggtctccccgaggatgttagagtcatcgcttggggtctctctcttgaaaggtacgagtttttaattcccttcaacatctcagggtcgctgctgattctttcttgctttttgttcgtaaaacagaccaacaatgatattatacggtatcgacaacatccgagatttgtttggacacaaggtatgcacaaaatcttcacttatcaagaaaactttgtgtaaacatttctttgttctgttggaaatatatatattcaatcaatgtgtcattattttgtcgcaggtggatctcgatcttattaaacggaatccgatctgccgagttggaatatgagtgatatattttgatttatctttttgattcaagatacttaatttgattatctcttggtattttcaattctacctttggttattggacttgacaattccatcttaaacatgtgtatactcttaattgcaatctggcttgtcaaatttaattttcacttagcatttggttttgtatggtataaagtttgtgaggtggtatttacgatgtaaggaataagaacttagatcaaataaataagtaactgggccaagaggcccattaagtgcaaagatgcaacgtggttagataacagcagcccatttattagcctcattcacacatcattacagaaacttttcgttttttatataattgccccaaagtataaaaaatttcgattcccaccacatacaaaacgaattgctagtttgctacccgagaatatcaaaactcaaaagactggtctggtttgatcatcgaaaaatattataaattaacgggaattttttatcaacaagagatcaaatcataaccacacataaaaaataattaaaaattgacgtcaaaaaataaatattgatcgtgtgtgtgtgtctttctttctatacatctttcatactccgtcgactcgacgcgccacggctacttcctctcgctgacgatccagtcgctaaaccctccgcctgagacagaaggctacttgttcccgccgcgacaggatcagacacgctctgtctccaactaccaaatattcgaccgctactcgaagatcctctcgaagatccagtcgtacgaaatctctcagattcgctgctgtcttctctcacaactctcagtggattctccaaggcttgtactatgtgtctcataagcggccgtctcgttggttttgggttaagacaagatctagcgacgattgccattgcccagacttcttctaagaggtcttcgtcgaccagaagagattggtctagaatgttcattacgggttctttctcatgcgatgaaatgtaaggcatgatctcggttaggacttgtttgaattgggttcattacatg

SEQ ID NO: 38927 - DNA, 255 bp, Arabidopsis thaliana landsberg
cagccttcggcgacttccgtgacggttgtggcggtctccgtgtcgaggctcgccaggaccgtctgttagcgttgtgtcttggtcacgtcgaggacgttctggatgacgacatgggaaaccccggcgtcgagtacgtcggcttcgaccgccgccgccagcttgtcggccagcgctgtcatgtacagaccgccggcggtgatgaggtcgctctgtgacagatacgggtaggcggatgcgtacggcacgatgcttatt

SEQ ID NO: 38928 - DNA, 279 bp, Arabidopsis thaliana landsberg
tatgacctgcatgcgcacacagggagtacattatgtagcgtaaattatatagcgttgcgtggtttatttgttggaatgaagtttgcacgcttttgcttgagctgcggtgcagcatggatgcagcgctgctcatgcgagcgacgattagcaggtatgcgccatatacctccggcatgccatgccatcggagaatgcaaccctgattgaccatacaactgtctaattcccctgtaggtgtgacgcgaacagttgaggcggaaagcccccccgggggggggg

SEQ ID NO: 38929 - DNA, 551 bp, Arabidopsis thaliana landsberg
aaaaaccttgaattgatttgtctgagatgtttatccccaagcccctagctctttactaagataatgaaaagaatatggccaccaaggatgcattgcttagaataatcgcaccagttgcgtcgtctgtaaatgcatcaactacagcctgaaagaaaaaaaagtgaaacttaaaattttcagaaaagtacataggattaactttgaattatatattttgggaccattttctacaaatacaacatatttatttgacataaaatagtgaagcatacatttttttttttacgagaagtctgtattattgatgataaaagtagtgttttaatcattgaaaattcaactaaattgagaaaagtgcatctagaatttttattttctttcttactttagcggacatatccctttggaaattgaatactataaaagaatgaccctagtggcccggacaataacaaagttagaaaacaagaaaattataattaattgacactcgttgatcgtatactataatttacactaacagacagtcacaaacgtcgaggacaataaac

SEQ ID NO: 38930 - DNA, 321 bp, Arabidopsis thaliana landsberg
acccactcgtgacttacttttccataattactatatatactaattttttgttttaactttatcgtttgttaaagatttttccaaaataatatagtcattgtatattcattttcgcagagccgtagtttatattttgatgataattttatgacttaaagagtgaaagctataaatatattacaattcaattgtggttgcgagagaataaacaaaaagagaaagagaaaaaaaaaacgttacagaagagaaagtgcagagctgtgcaggcgccacttgaaatgaaattaaaaaagaaaaagagatccaaagaaaattaaaatg

SEQ ID NO: 38931 - DNA, 901 bp, Arabidopsis thaliana landsberg
gaaccgagcaacgatgtcaagtacgatgcgaaaaacttattgtcttacaatttaagcctcctttgttgcacgatcatggccaaaagttcatcaaaagaactaccgtagattgcagcactccctagttttgaatttcagaatataaataaaaaacaagttacaaaaaacatgacatctcataccaaactaagattaccattttttttgctagattcgacacgacaccgaaggttgaagagtgcctcgatacaattaatggcagctgctttaacatcctacagagtgaatgtaacgagatcaaaacgaataccgaagaaaaggaagataatgcaaacagtttaaccataaaaagaaagaaaaatttcaaatgtcacctgattatcacttgacatgggaaccaaaagtacaggaaagcttgaaaaaacttgaatcaaccattcattattcccgctagagcaaagatacgaaaaacatctgagactttcaatttggacaagaggaggaacatctgcaagaagaagactgcagcataagaaaacaggatacgaaataaacagaaacagttaccagataatagattccacgagccttaacagcataaaacagacgagagaattatcaactaataaaaagtgggatcagtagtttataacatcaattataaactagcaggaaatataaatttccaagcaaaccttctcgtgagatcagtcgggatagaaacaaaacaggacagactttggcttctctcacacggaaatgaaggtgttccttgaagacatgccgcaaccgagttgttgcaaaaaagaaaaacaaatcctcaagtccgctagataaccttttgttcaaaacctaaacaaaggtgaagtgacacaaatacacctgtcagcattgcaattgg

SEQ ID NO: 38932 - DNA, 455 bp, Arabidopsis thaliana landsberg
cccctagttccatacaccatgaatgagaaaagagtttcgagaattctagaatttaatcattcaaatccgactatgtacataataggcatgtggacataacataagagactagttcagctcatgtgtctaaaattgtatctttataaatttccaagagggaaaggaaacctatgaactttcgatatagccgttttactttctgtcttctttgagagagaaagtaaattcctgaaaatactacaaaatctaggttcatagaagtttatgaagagcccctaaattatttattagtagccttagtacgcttttaagatccttcctaaatctaaaatttgtagtaaatgtatcccaaaaaaagtagtatacttcgaactaaaaattaatttttaacggtatttctcataatttctttttaatgggtaggtcttattatttcttaacccttttaaatggaa

SEQ ID NO: 38933 - DNA, 2249 bp, Arabidopsis thaliana landsberg
aaataatttggtttggtagcaagaatatggctcattcagttagaacaaaaaaaattgtatattagctctttcatcagtaagccaaattaaaagatttaaatattggataagcaagctacgcaatataagccttttttaggcctctatcacttaagcttgtaatagggaaaatgttgtaatgtaggcccaagtagtgtgagtataatctttaaggcccagcctagcacctttgggcatttggcgttgggcaacgagcgccttcaagtttgaagcaaacagaaagaatcattatgaagaaacaccaaaagacaaaactttctaagttgtaacttttgtacagttcatcttttatcattataaactatttatgatctcatcaatcaatatccacaatttttaaaaagaagaataaagacaaatccattgcttaatggttaattaacagtagtagcagatgacatatagaccacaagtagcatacacaaacagagacaagagacaagacatggggtaatatggtacagaacctgacatgaccaaagaaatgttcggaaggaaaattaaaagtctctttcataaagattggagaagcaaactactaacactagatttaaagatattgataaaaatgtggatgttttttttttacctccaagtctgtcatgtagaagcttctccttccaatcgaagccttttgcagactttttcatcactttgattgtttatgttcccaacttggctctctttcacttccattgaacatctcttgtatggcttaaatcctgtctgtctcgttttaagactcttgcatgttccaacaccgatcattactactccttcttggtctgcagcacaagaatcctggcttttaaattaggagccaatggcattgacgtgtcactttgttttctattcacattctctgccacttgaggaggcgaaaagctttgaggcaatctttctcttgcaaagagagcctgaaacgctatacgaccctgaaaatattttgatagtgttagttcccagaagaactctgcaatatccatgaatcattggtttttgttttacctcttcggagacttccttccacgaatcagtagttgcattgttgttgctgttgttgtctctcattttaatcttacggttatttaactcaataacatctggctgattctcatctgtctccttcacatcctctttatctttctccattttatctaatgcatcagtttctgcgtcactccctgaaggtgtatttgagccacaggatgagcggtccacaagatttttcttctgggcagtgtttgagtcatgcacagcggcagtaacaacaacctcctcaattttatcatcattggtttttgagtcggcatttagcttggttactccagtctcatctgaatcatcagatgatgaagctggagatttcgaagccaagttttgatcttgcagagctgtgttttgtttctcaaacggttgagtattttcaacggtatccatttcagtcattgctggagttggaactgcaacagttgagaatggaacacatgttattggagctggagcgcatacaggaagaagtccatgagaagcccaccaagcagttgcagcagctactgtagcagcggcaatggcagttatacttggaggagaagagctcattggggttgatgaatcaccagaattcccgacactcgcataaggccagaccgaagcagcgaatgtagctgcagcatgagctgcaggattctgtaggagagttgacataataagattggagaaagtagatgatatctggagaaacgaacggtaatcatcctgtgaatgacaagctggaaacgcttgatgagaagctgtagtagtagcagatgctgttgtagcttgaagatttgcgtgcccgtgagtttcttctctcataggatgaaacatgaagtcttgagataccatacctgagggatgattttgagggcattttgctatattcccgttcacaatatctgcgtggaaatgccaagggtagttttgcatgctgtgcacagtagtaccatcgttaccatctttgtctttgttcttcttgggaacatcttgaaccgcgttgtccacagttgaggtcttacttgttttaatgtcgccacttacctgcttaaaatagaatggaacaaattatttgtcatgcacttgaaagcattcatcagattcttcgactacaattttgtagcctttcttagactttactttcgttggtaagg

SEQ ID NO: 38934 - DNA, 628 bp, Arabidopsis thaliana landsberg
aaagttcattgcatttacaccaaggaaacaaaatgttactgtgtcaaattacataaacaaaaagcattcctatagcatttaatttatccaacacacacaaaacctatgtatagttagtaagcagacagtggtttatagttgaagtacaattactaatgtaaactattgaattctcatctgtatatggtgccaatgtggtaaataaattgtcaaaatgtttttttaaaaaacaacaacaatgaaaacatgtaatggttttaattagtgtcgtaaattactactcgtaattaatgttgtaaaataatacaccagtagaagtgtaaaggtggccccaaaacggcgagctataatggagccaggaagggcacgtgggtttcgagcggtctctttttctcccggtcacagctaagctattttccactttagcacgtgaccactcatcctcatcacgtgttgcgatctttgcacgtggcgttgatccgacttacccatttactacactaggtcgatgaggccagtattttgggccaaggcccaaactaaaaaattggttctgttttattttcactactgtagatcgatctttataaaaatgtttcatgtaaaagataaaatatagatactccat

SEQ ID NO: 38935 - DNA, 196 bp, Arabidopsis thaliana landsberg
  unsure (1)..(196): unsure at all n locations
aatgcgtgctactgttagcatgtcattgtcaataaataattatgtttttagagaaattnnnnnnnnnnnnnnnnnnnnnnnnnnnnnnnnnagacaagaacattcaatgatataatatgaatattcaaaattgatgaaactgaagacatcttattaaaaagagtcgtcattatcatcatcttttggtggtacaaca

SEQ ID NO: 38936 - DNA, 201 bp, Arabidopsis thaliana landsberg
aaagtttttttgagattggaactcaatttcaagagggggccatttgaccataagagaggctctctgattagaaggtggaggagcactatttcaaaactaactcatttggcaaggaatgcattagaccagagaatcgaacatgaaaggcaaatgggatattatgatgagctcaaatgctgcaggctgcggcaccaaaagatg

SEQ ID NO: 38937 - DNA, 574 bp, Arabidopsis thaliana landsberg
agcatgggataaaattaccgacaacaaaaaattaaaaacaaattcatggatgattataagaattgtggaacgaatttttaattgtcagagattatattagaaaactgtaacaaataaaaagtgagcaagaatcgtggacacatggttacatgtgagatacttctacctaaagatcccattcctcttaaccagaatcttttcctctttctctaatcatatcaaaagctcccttaaccatctctctatagctgcttatatatatataagcaaaatctgttctcttcactagattacaaaaccagtcaccaaaaaaataaaaacttgtatttttgttttctgtgatctctctaatggagcaacagcaacaacaacaactaccttctactactactagacccaagcccaagctactaaaccggctcaatacctacgtcggttcgagccgggttggcaaacggttcaaactcgccgaacgtaattcaactttcacgacggagctccgtgctggtaccgccactttcttaaccatggcttatatcctctccgaaacgctttaatcctttctgattccggt

SEQ ID NO: 38938 - DNA, 898 bp, Arabidopsis thaliana landsberg
  unsure (1)..(898): unsure at all n locations
atactaagtagccttgttatatggagttgcacatatagtttatttattggtaccttagtcgtataccgctgatgacaaggagaatgagactcattgaggtagaaaatgacactgtactgctaataatcatcccaatatacgctatacgctttgaactctcatactccaataccgcagttcccgctctccccttacaaaccggtgcggttccggtttgatttccgaaagaacaattgtcactttgccatacgccaccgggaggattaaccataacttgaaagctcataccggctataaccgtagctgtaaccataagattccctctagttttctctaaccaatcgccttgacgttttagatactttacgaaccactctgatgatgattcttcgtatcgatgaccttcttgaccgttgatctccatgatttgaagcgatgaatgctttacaaaagagttataattcttaaaatttatatatgtaacttctctctttgtcgagattataaaggaaaaaaaagaacgagtctttttaaaaaaggaaagggagatagaaatttctggtttgatcagcaaaagtctaatttgaaaccatttgtttgttgatcacgtacgggaattaaaaacctactctttgagaactatatgattctgatcaagtcagtcaacgatagcgacattagggaagaagcgtcgtcgttattttttatatatttctaactaaatacagtttttgaggtttataggagaatcgcaagacctcaaatttgactctgggagatcatatctctcatttgcgtcactcttctttcaacgtgtctcttctttcatagtactacatctgtcatcttgtcattgtatctaatgacttatacgactngtggtatataaagataaaga

SEQ ID NO: 38939 - DNA, 2202 bp, Arabidopsis thaliana landsberg
  unsure (1)..(2202): unsure at all n locations
gcgtaaaccaccgccttcaatttcaccggctgttttccttttttcgacgaccaaatctccgattgcgataaatgcaactaggagacttttcaagccggctaatatgcatctctccgtcacaaaacgctgccgtttaagtgtaaaggcttttaatttcaatccacttaagcccaatggttagaatatgggccttttctttatgaatttgctaaaatccacgtggacggtagagatgctacgatgcagagagcggtctatggtgagggttattacacgagatcatgacgttaacacgggaaacaggttgcttcaaaagaaatcaattcattcgtacgggcctttaatccacgcgccttcttcgcatccccacgcgcagtcgtgtgtgatgatggctaatcctccaacgttaccgatctcagaccattccggtggtggttcccaatctcagcaacccgtatcaacaccggcgtttcgcacgttcctctctcgcctctcgtcgtcaatccgccaaagcctatcgcagcggcgtccatggttagaactcgtagatcgaagcgcaatttcacgtccagagtctctcaccgatgcgtattctcggatccggaggaatctcccttacttcaaggtaaactacgtgacgatcgtctccttggtgctcgcgctctcgctcctctcccatcctttctctcttctcgntctcctatgcctcttctgcgcttggatcttcctctacctttttcgtccgtcagatcaacctttggtcgtcctcggccgtacgttttcagatcgcgagacgcttggtgttttggtaattttgacaatcgtctgcgtctttttaaccagcgttgggtctttattgacctctgctttgatgattggtttcggaatctcatgcttacacggcgcgtttagagttccggaggatcttttcttggatgatcaacaacctgctaacaccggcttattgactttccttagcggagccgtcactttcgccgcagttgccgccgcatcaactcctgcgtcaggtcgtgtttgaaggactctcttctctgtagacaacaaactcaattactatgattcttttattgtatttctgaatgcgactatgtaaggggaaatgtagaattgatcttcttggttttaagctgagaaattcttatgattcaaacattaaatgggttgaacaatatctcgcattactcttccttagctctctttgtgacaaagattatggaatggttgattactattaagctttgagactaattgtgtttagtgtggttagatgttgggaactaaaagtgtccgacgtaaaatggcagtgtcatcattccggctgttttaacgaatctcgtgtaaatacttttgttgggaactaaaagtgtccgacgtaaaatggcagtgtcatcattccggctgttttaacgaatctcgtgtaaatacttttgttgggaactaaaagtgtccgacgtaaaatggcagtgtcatcattccggctgttttaacgaatctcgtgtaaatacttttgtttttggttatggaaaatgacatgtgggataatcatcgagacaaaggagtaacgtaacaaagaagtttatcgtgaatgtttgttaaaatgtattatgaaagatttgaatattacttcaagagaaaaagtctatttcgttattggcagttagtttattgtttgaacgttacactctagtacagtgcataatatgctatgtttgttaagaaaaaaacaaaaacaataaaatgaaatcatgagattgttaaaccaatatgacccaacgtcccaattcatccgtgttctgactttaggttttctgcatctagatgttgtttgtattccaaattcatctttagagtttgagtctttgagatatgaatcttgatttacatttatatatattttttaaaatgaatggatttagacctacatatattattatgcaatagtcaattttcttataaataattaatattgttaagttattgagaaattcgtctaatacgaatagaaaattatttacccagtttttagagtttggataaccaatagaagatacaacaaaatcattaatctggttacatataattaaataatatacatgtgaccttgagtttttgtttacttttgtttgttaaaagagtggccttggtattaaattgccaaactattcttactgatgatgatta

SEQ ID NO: 38940 - DNA, 1003 bp, Arabidopsis thaliana landsberg
aggtttaaaaaaaaaaaaaaagataaaccctaaaaagagcaagagacatttagagttataagctgaacaaatttcagaaaacggaacaagaacaaaccatgcattcattaatataacacgatcaatcagtaataacaagatacaaaaaaacagtactaaagaaggaataagaaaaaacctgatggatctgagacagagagagattccgtaactcgtaaactgagagtccctgcttcgtctaaaacatcgaggaatacgaagaagaagaagaatgaaacaaaaaaagagactgaaacaggtgtcgaaatattagcggggctacaaaaaaagagagaaaaaagagaaggggagatatttttatggtttttattatgagcgtgtttgtgttgtgtgttaggctttttcaggttctctctttctcgtttataaccgcgagtgagggaatcccaatgaattacccaaaataccctctgtctccgtcgatagtaacggttctgattggatgagacaacgctctattttgggtaatcaattaaaatttgcttttcgatgaaaacgacgccgtctttagtggagacaaagtcttttatgcccctagttttctgttttctttcgagtggtagtgatgttgcgacaagtcacttctctgaattaataaaagtattaaaccgattaccgtcttaaccggtcagaactgattccttccctaatttcttatgacgtcatcgtaattttatgaacacttggtttttttttatttatattgttttttgggatattgcgaatgtttgtaatgatgatatcagctgaatgacccttttgaacttaattgatgtatgtatatgtttgttaaccccatttgatatgccactgctgatcatattcacctcatcctcaactaaaatacacctaacatgcctgtactttggagtaaaagatgtatacaatcaactggcgtcctcaaacctatcctaatacatacaaccgaagccaccatttcaat

SEQ ID NO: 38941 - DNA, 914 bp, Arabidopsis thaliana landsberg
aatcatacgagtgcgaaagcttatgcctgatccattgtgcacggagtatgacgcaaactaaataaagatattacttgatgacttagcaatcaaaatatcagttactgcaaaaatgtaaaagatcataaaagatctcttcatttcagcaaatattgaaacttagatggcttaagaacgaagatggaacaaagaatctttttatctctctctatatatctttctctaacgttaagaggctccggatgattgcctgaaattaacctggaacaccatggaagctgatgtctatttcctaaattactctgttttataatgaagacaaaagctttaatgctgctactgaagatgtgaagttactttgtctctcatgaagtcaagcatatgactttgtctctcacagtggaccctccattgataaaacttatgaatttcttcatcatcacataaagaaaaaagaaaaacttaagccacatagtttcttcaatagcattgtcatgtgatccgttttctggatatgattgagaacaacttaattagtgacaaagactctttgttctgctggtgagcaacttcatgtccccacataaatttgttcttatagaaaaaaaaatagcgatgagaattcaatatcagccacatagtcctttttttaaatatgaagaaacaagagcacatgccacattttctaacataatacaagattagaaatctgaaatgacagaaccatgtgaaactatgtccttgtatgtcccttgaaacacttgatagatcatatatataatggcccagaatagaacaaccatcctcataccatcaacaacaagaagcaatcaaaaacttgaatccttttctctgatcaatctttcttcatttcagacatttcaaagaccaagagtttcaaaaaaagaaaatgg

SEQ ID NO: 38942 - DNA, 588 bp, Arabidopsis thaliana landsberg
aaaccatcatgaacccttatatagctttggaataagaatgagtatgtccttgtgttaacaatgtaaaatgataatgtggtgggggattttagtgtagatcctaaacaactttgtattcaaagaaataaacaacagacactagaatgcactttaacatataactgcacattttgaaatgtgtacagaatcataatgcagtacctgagtataacaagtccttcccactgtatgaaaaccctttttccacaagggtcgcactgaaatgattgaagagcatacggtgacattaaatgccaaaacaaaagtttatatatggaagaagaacttttatatataagagagaaaagagtaccttatagtctcaaccttgtcagcgtgaccacttctttctccaaaagcactaccataatgaaatctaccacaagaaaccccagccttacttccaaggagttctatcatcttacctacagtcatacgactgtgacaagaaatatgttaatacattcgtcagttttaatacaaaatctcaagtaatcaagaacttcagatgaaactcgaaagctttggaacgaagggatgaagctaact

SEQ ID NO: 38943 - DNA, 558 bp, Arabidopsis thaliana landsberg
atttttatacccgttcaagtctataaattttaacgtcgtcactataaacctaagcttcaaaactaaagcagacaaaaattgatttcattttcaaatttcaaagtttaaaacgtatgatttggcatatctaattttgtttgttggagaacatcgtttgtgctaatttagtagtgagcggagataaactatgtaataactcttgggaagcaaacctaactcacttataataatttcataatttgtgctcctccattcaacttttggtagggattcttcaaaagacaaaaataacattactttttaatttaattaccaagtgtcaatgataaattagtatattaattattaatcactaggggttatcctaaggtatgcacatggttttctttggaatatgtattttccttagtttgattagaggatttcttaaaaattgatatttgatatgtatgatttcattgataatatcaatctatacgtgactgatacatctgaaatacaatatctaattaaatatgtttactaatatattaaaaatgatataatattttcgacttg

SEQ ID NO: 38944 - DNA, 978 bp, Arabidopsis thaliana landsberg
aggttattaatagtaagaactcacggcaagtaccttgctcctaaaaagtcatgtatatttacattatgatccagtttcttaaaagttttcttcaatgcctgcaattgagcaaaacaaatcagctcaaatttgtgtttcaaaaaaaaacaaaagttgatgatatacacagtgagtttttatgtctttacttcaaggctctccagtttcctgtaatattaaaagaaagagacttcaatttaggttcataacacaaaattacatcaggattgatagtaatttaaattttcaacataatgcttaccatacctttttgtcctttcttgtggagttaattgcgcaaacttggaaataacctcttcaatgcaactacacaaaagccaagttaagactaaaatcagtatattgctaaaaacttgaatacagaacctcaatctctcatccctctgagagattcaggaagccaaatcactcacgaagaacattatctaagaactgataacagaaaggaaactataaaaaaaaaactaggctctgttttagagtctctaatctctcccaaagccaaaagctcccaactaaaccaactggtcaaaataccccttatctgtgatcttctaaatacactcaccattcaaactaaatccttataaaaactttcagttcctaaaccaaaatcagtgaaaccttttttgtgatagaagagcaatgagaagattacacaatgcatcaaaaatggagatatgatgcatttaaacacagaactaaagatgataaaagaacaacaaaacataagaatgattttgataattatacctgtgttctccatggaaagcagtagctcttccggtaggggaaaacataagaaggacaatatcaatatcacacaaaatcgataactctttggctatcttcaaaatgccattgtttctcttcgtgtatgtaactcgcctgttgcttgtgctctcaagtcttttaatc

SEQ ID NO: 38945 - DNA, 593 bp, Arabidopsis thaliana landsberg
ggatcacattctaatgtataagtattacgggtttcaatgacctcagcagctgtcggctagaaacatgcatggggaggtacgatgggagggtttcgattttcatttatagattatatgcataaacgaccaaaacgatatttcagtggatcaacagcaaggtgaaatcttaagactaataataattatttagcgacaaagtataataattattaatttttttagtaaagaagagtaatggatttttaatagaagtaattaattatttagttagtcagacctatgataaggtggttaggttagttacgatttcattaaaattcggtggttaaattagttagcttttgcaaataataaaattaagtggttagagtatatatgagttgtaatctagaattggttatttttttataaatttagtttgattagaattagttgctttaattattaaggcttcacaattaatattttgtttatatattctaacctaattaataatgttatgttttattctagaaatgattgtttatctatatgtcttctcaaaataatattgtcacatgctacattgacctagagaccccaagagtcatgga

SEQ ID NO: 38946 - DNA, 563 bp, Arabidopsis thaliana landsberg
gttttcttgtcattgctatcagttgagaatctgaatatgcagtcggaaaagatgtagagaccaagaagattaccatagagtggcaaaaacacatccttatggttcccaacaccgcctacccagctttctctttgtttgctgacatgatctttcgcgaaagcaagtagctgattgtggaatttactcctccagtcgagtagttgtgccagggaaaagtctctgtttggtagtttctgtagatggtaacagcaaaactgcaagatcagaagcttttcttcatggtgattatcgatttccttgtcgaaaacccgcctcactagatcactacctccctttggtggggatgtgtaatctgcggtgttgaagacccatctcgagagatattgggaatactcattccagtgcccaaagatggaagataaatggttgaagctcagttccaagactttatctacttgagtaggaacttccacggcagtgaagaaacacttctgaacatccgtagccagttttgacctgatgacatcatcttcgtcctccaaccatttgaaacaggtgaaccc

SEQ ID NO: 38947 - DNA, 346 bp, Arabidopsis thaliana landsberg
ggtgaatttcttgcctcgggaaaggtctgagtaactaggagtatagggacaggtctttgttctagctgttggatttctcctggatagggactacagcgggttctgggagtatgaacacctgagtacatgtaaaatgaccacacactttgtgagtatgactgagcttacaaggtgagaatatctctacttaggcactgatgattgacaaggagagtggatctcgaccactttcttagcctgaatcagattatctgcaactgcctccgccttggagaagctaccgaatatatgagagatccatccattttacatctgagatacaggaacactgaatagcgcgatagag

SEQ ID NO: 38948 - DNA, 934 bp, Arabidopsis thaliana landsberg
ttaaaatgtatgaacgagggcataataaatcttgtaaaagctctatgttgcttgaaattaaatttctacctgtagggtttcagggtttttgacgaaattaagtttctttctttttgtttcaaggcgattacccttcttctgtaccaatgcaacagccgaggttataacgcacagagccaagactgaaaaagcaattgaagtctctgacactttcattcttcgtaatggtaatgatgggtttaagctcatagtcccaaatttcgttcttgaatcttctggtctatataacacgtgacattaaaaactatgtatcagaccaagacaacaatgttgtgtcttttgatgaactactgagaaaaaggtttccatgagattaccttatgaaattcttcattttatgccacaaagatggttcttttctgggctctgagccaaaactctgctcctcttgacgagtttctacaagtggggattataagattttaacattgtgtattaaaaattatgagtttcaattagattgggatagcattgtaccagtaggtccagtactactactagatcttctgagcgacgagaattcctctaccaacttgcgctccctctcgctaccatattcgatgtttcaagcagttttttagtatagaataacgacataaagggaaaaaaagggaagtgatgtgagacaaacctcagttttttggggatcgaaattttcactacaaagcaatggtctccccggattgaaggtctatccgtgtctggaactcctttcctagataattttacggtgtcgccaggttgagttcctggcggaatccgaagatccattgatccctcaaccgtttctacctgacaaagaaagatgtcatgtggctacaagattcatactttcgaataacgtcaccaggaataaacaattttataaccacct

SEQ ID NO: 38949 - DNA, 545 bp, Arabidopsis thaliana landsberg
gtttcgttgcttgctacttcattcttatttttagttcatattaaaactactcttaaacattcttcacataaaaacctcagccgtcggatgcgaatataagcggctttgattatataacgtattattttaatttttttcctgctttgttgaaatttgctgaggtagttattgcattttggccagctcatacactgctaataaagcaaataatctcttaaattattctataattagttaattacttactcacacggtgtgtgtgtgcatgatgtgtaattgtgtattatacactctagaagaagaaagttttatttggagatatgtaattttttaattccctgactatgatttcttttcttatagaactgatacacacttcacttaagtcaatttaacctggtttttataaaggctaaatgttagattaggatgctagtggtgaaatcaagtcgattctttcgacatgaccacgtttagaatttaagagaaaaagtactgaaacattcaattcgttaagatttaaggtttattgcaccgttaagtta

SEQ ID NO: 38950 - DNA, 795 bp, Arabidopsis thaliana landsberg
accgcatggacaagtgcttcatcatcaatcaagaagcatcatttattttttttttgtcacgactctctttgttcctgcaattgagtctgttggactattggtctctcgcttcttgttatcgagtatatagagtagttcactttggtttgatttggcttgtgtttgctgagtcttggctctgaaggagagagtgttactgctttgtctctgtaatataactcggttctgaaggaaaatcctctgtttgtgttcttaaatgtgaaatttctggtttcgattagctaaagctatggcgaatcttcaaaagtacaaagcttgagtcaataaattttagtcatatgttgtcagaacaaagtttgaacaaaacaaaatcatctagaaaaaagtaggccttgattgagataacaagcagctgtaggatccttaaggcatccacagaacgcctcttcatctttcggaaacgactttggcaatggatgatcaggagttacaccgacctatacaacaaccagcaaacgagtcaagactgtaagaacatgtttgtatgtagtgtagtgtagacacagagggggttactacaggaagaaagtagtttcatactttgtctatatctgtgtgagctggtgtttcatatcgagcaactgttactgccaagcccgaaccatcagaaagctcaaaaaccgactgtatcttgctgcaaaatccgttcacagtctcaggaattttacggttcggtctatgagaaaaagaataaaaaatagcgccattttgtttacccttttccggagttggttt

SEQ ID NO: 38951 - DNA, 547 bp, Arabidopsis thaliana landsberg
tctgtgtcatgttatttctactgtccctctctttattgctctctctctctctcacttactctcatctcctattttgtgttcaaccacaagaaaaagactaaacataatactaatatttactcaatttcctacacatttgtaatttttgtgtgggtggaatccaatgcaatgacccaaccccggagtggacaagtttcgacccattttgatagatcacataatttaccgacccattaacaagtttcgatccattttcataagcctgttgatgagtaattgagtaggaggtacacatttgtgatttgagagattagaggttaaaattatacattgtaatcatagttatggcttctggtttaacagtcttttactccatatatactgatatacatctcatttctagtctcaaacttttacatgacagcttatagattggtcaaatcttactgttaacataaatagaagctgtgaaatgacgatataatgtgcaaagacaagctcacgttaatgtcaaacacataatcaatatctgagagaatttaactta

SEQ ID NO: 38952 - DNA, 358 bp, Arabidopsis thaliana landsberg
aggaaacacgtcacagcctttgtggaatttcaaatcacaagttgcacaatagtttttttacccacgcctattcccagtgtattgatggcctttgcaggagatgcaaacggtgagcggtggatcaaatcgacagccaagtttgcgaggctttgctagatcagacataccacacaagggcttacttttgcttccgtccatggctggagaatctgtcaactatgactactcttgctttagagatagagatagacttccttacccactttgtaatgattattatgcaggcagctatttaattaaaacaggggctaactcgtatttgccaacttgagttacttttgctgacccaattacactt

SEQ ID NO: 38953 - DNA, 570 bp, Arabidopsis thaliana landsberg
aaataaatatctggaagtcttcaatgaaaaaaaaaaccatttattcaatttagaaattgtttggtacaactgtctcaaggggaaagaggagaaaaaaaaaacacttttgttttgcactttattgcctagtcagcacaaaagtgttgtcctctgagatgttccaaaagtcagacacgtgtcgttgtgtttaggtaatagagagaaggatagggatatggatggtttgttattctacgccactcgattatttttttattaccaaaaatttgttgcccactcgttttttttcggtgttttaagctatcgagttcatgtttttttttcttcaatcgctacatatttttgtagatcttacgaatctataatattcttagaaaaatacttgtaccagtaaaatactggtgtagtggccactaagaagttcttggttcatgtatttttgttgcttttttaaaagaaaaatcgaaatatatactttttcattattaaccgacgactatttgattactataaagaacagtcggtgcaagtgagagttctttcaacaatctaaacttatggacgaacaaa

SEQ ID NO: 38954 - DNA, 831 bp, Arabidopsis thaliana landsberg
aaaaaacttacatgatagaagttatcacaaagtaaaacaaactcatcaagaagttgttctatttaaacttatcattgtatactattgacttagttcatttctcttgttacaaaaatataagcaatgttatattatcacaattcacaaacattatattacatatcattaaataaataaataaaaacctttaatcacgaaagtaattttcagttgtcatcaatgagatgactcacagtctcacacggtcactggtcacgttgcttcaccactgtctccaagtaagatgtctaaaatcttgcaaagggccccaaagactcacactaaatgaaactagtgggctcaagcccacgtatgcacacgctctcttaacacacgtcaaaatttaaaaaattccacaacgagacgtcgacctttcacgcgcttcggcacgtggaaatccatggtcctttcctatgggttttgtcctaaaccatccttcggtccgaccaaaccgcgtaaggtaagaaagactccgaccgaacacggcaccttctcccacaatagtgtaaagtgatcgtgatcagaaacagatatttcgctaaagattagcccaatttaggaaagatgatgatgaagttagccaagagagagataacaaaaacatgtggctgtgtatgtaaaagaccgagtcacccgaacatcttcaccttcacgccattctcctaccactcggacctaaccaaccaataccttccacgtcatgtacaatccgagttcccgtgagatagggatctttacttgaagcaaccagacatgaccgcagagtcacacacacacacacacctaagcttt

SEQ ID NO: 38955 - DNA, 488 bp, Arabidopsis thaliana landsberg
gtagcatgtaaaaaatcgcggaggtggtagtagtgacggtcgatataacaataataataattgtcgtctcaaccagcccccaacttggatttacggtcctcctcaatcgccttatatgtatcctcacggtggaccacagtttttccataagaaaacgtacttcccgcaacaaccaccagtttacatgtcagtcacatcacacaagccgtcaccaaccagtatacttgagccatacaatccgtacttacatggtgatgctcgtgtgaattatatctcgacatccatggcagatcagtcgacgttcatgccatctcattttcctcaaacatacagttgcatgtctctctcagatcctcccgaagagatgtggtaaattggtaccatagccacaaatcacgttatgtcataactaggtaccctacaatttgttttctattcgagcactactttttaattacttgcttgaaatggatcatttactcatacta

SEQ ID NO: 38956 - DNA, 522 bp, Arabidopsis thaliana landsberg
cgaaataatgaaggcattgaaactccgaggtcagcccctaagcgctctagagtaaaatcctcagatcatccctctataggactagagggtctgtctgaccgcttacaatttaggtcctcctcaggcttcatgccatcgctgaagaagagacgtactggtagtgttctctgtttctctttgcctcaaaatctgttccccatttcacaagcatgagttgcgtgagcacataccgctatatatatgcatgagtctttgcttcgtgcaaatattggttttctcgactattgcagtcttgctggtgttgcacgttgttgatgccttgccgaatcagcttagatagaactgctctttcctttattttactagcacctatcttgtacactaaatttattgaaaacaggctcttgagatgatgcaactcaagttagtaccctccctaaatgtatatagtggcataaaaatgatcttcccttccggaattctattggaccattaactagtcgtccaacggaaacgagcgaa

SEQ ID NO: 38957 - DNA, 252 bp, Arabidopsis thaliana landsberg
ggacagttctggtgtatataaaaacaaaaacgcgaggtttttttggaggtgatgtgatggagggggtcgaacacgtggccgtcaacctggctgtcaggagttggtgaaagctcacatgctcgtgattgtaatagactctatcttgacctgtaccaacatcactttaccaggtctgctctttaatggcggtgctctgctgctttatcgttagaatatagcctttccagagctcattaatctctaattataata

SEQ ID NO: 38958 - DNA, 566 bp, Arabidopsis thaliana landsberg
ggatctacgggtctgcccgcgggcatttctattcacttgtttaaaagatgaatcattgaatacaataatgtctaaagaagtttgattcaaaccttttatacatgtataacaatgtacaaactaatatggtacaatgccttttatgagttaccttttttacaagttctgaattgtgaatcattgattaaaacatctagttacatacttacatttgacatctcctttaactcaaacgatgacatttatttaaactgaaaccaaacataagtacttaaacataactacagttaactgaaacactttttcatttacttaaactgaaaccaaacataagtacttaagtatataagagtgaaacaaaacataactacataaccaactaaacaaaaatactgaagtgaaactaaactaatgctaaaaagagaacctgcaactcatattcaaatctgaaattcaaactcaatacgtagaacaaatatcaatcctcaaaccaaacataagtacataactagctaaactcaattcaaaactgaaactaaactcaagctaagaatagaacgtgcaac

SEQ ID NO: 38959 - DNA, 627 bp, Arabidopsis thaliana landsberg
gaatccttatccatatattacatcttaagtcatacatatgtacacatgttaaaaaaattaatatatgattattatgcattttcaggtatatgaactggatagattatatcaagttcagaagatattgatgaagaacatggagatcaacaaatttactaccaagaacaatcatgtaaattcaggtctaggaacattcatcagaagagttgacaacgagattgaccggccggcgaaattctccggtggtaataataatatagagattatggatgagagtgagatcgagttaacccttggtccctcgtgttacggtggtgatgaaatgatgaggatgaacaagaagaagaaaaagaactctttgccggagatgatggacgggagtttaaattccggtcgccggagtttttcttcgtcttcgacaggatcaagtaataacaataacaacaatcttgaagaacaagtgaggcaagaaagaatgatgaaacatcagaagcagcagccatggcttcaagcattgaccttgaatgttatttgataataaatagtttttaatttttaactgtattctgaaatagatttgcatctctttttttcaatttagtaagttaatttttattttctgatgag

SEQ ID NO: 38960 - DNA, 1055 bp, Arabidopsis thaliana landsberg
taccacccatagcgctccatgctttcacaaaagcctatttattttattataaaaattatatgtattagaattcttaataagtcaaatggtgtgacaaaacttatgactacgttgtaggaaaatgaaaaacctaataatagttatgtatactcaaaggctgcatgatattatattggcttgaatttttttttgaaaacttacaaaattcagatattttcataatataaaacaagataaaattttgcaatataatacctttgaatcatcggtaataccatttccatcggcaccaaattcaagcacatcatagatttggccgtttacaagaatagaatgcagtaaagtcaacaagaacacaccacgtagtatgatttcctacaacatacaaaatcaatgttagaaagaaagaaaacatactaacttttataaaaaactttactaacttcttatcattgtgtgatgatgatcagatgtaactcttaccattgtgtgatgatgatcagatgtaatgtagtgtatatgtatgtgatgttgatcacttaaatatacacatacaaaatcatgggtatatcttattaaaacatgttcatggatatagttttaaactttacatattttatgcctaaaatcattagttattatggatattatttcgcatataagtgatataatctctcttttatataagatttagaaataaataaaatagaatttgaagaaatagtaaacaaatacaagttaaaatagaaatgaaaatacttgaatataagggggtactaagtaaaaaacattttggaaaactcaaaaatagaattaaatttggatattgtgatctcattgcattattaacttatatttaacaaatacgagtaatattctgtgtaactacacagccattgacattgaaaactaaaatgcttttctaattatttggtagtgtgatttgcaatatatatagacagtaacttgaactaaaatctgatatgatgaacttattaatataatgtattaatcggtttgatgtacgataaaatgttttaaattatccactagta

SEQ ID NO: 38961 - DNA, 503 bp, Arabidopsis thaliana landsberg
aagtgatctggatgcctttgtccacgttcggaagtgggatgggacggttttcacagactttgtgagctcttccgaccttgagaccggcacgtctcagggaatgcttgctgcggtaggtatcggcagcactttgcatgttgtccatatcgatgttgctgaaggagtgaagctccttcgacacctcgagtttgacatggcatctgacacctggagctcgactcaagaggttgtgaccctaggcgggtctgcgactctggcaggagatgttgttcaggctgcagctggcccatcgcgatcgctgcacgttgctgtttccgcgcgtagtgatgacgagtctacctacgatgtcatctacgcgagcaggacgtcgggcggcatgtggtcctcggagagtgtcgatactgggtttgccttggcgcccgtgtacgtttccgcggtgcaagctgatagctcgggacgggtgttgcttctggtggacgacggctccggtggtctttccgaca

SEQ ID NO: 38962 - DNA, 692 bp, Arabidopsis thaliana landsberg
aaaagctccggtgacttgtcaacaactgctcctcgtttcgtcgatttcaatcgtctttacatcgactggattagttttcgtgcatacattatagtaacactcttctttaatttgcataatgtattaagaatatacgaatggcttttgacaattgatttacaaataaagttttctaattaagtcaactccagattattattagttcttgtcaacgaatgataccagtattataattgtttgtgaaacccgttatgactatagaatctacaaataggaaacttacatctaaatttttctttacgaaggaaacctgataactagattcataatttttttttttgtcataagatattattaaagattttaaaaagataattctgagagaaattatttataaaagtgatatgtaacttggatttacatttctttttagattaatcataattatatcatattttagatccacttaaataaaatacagtaaatacgctattcgacgactgtacatcacattcgaaaatttcacgggtagtagaaaccaaatcatctttgataataagacaataatatttctttttaaactaaaaataatgactatctaaaagcgataaacaaaactacatttttttaacaatttttttagcataaatcttacacgaaaatctcataatgcttacactaaaatgaataaa

SEQ ID NO: 38963 - DNA, 585 bp, Arabidopsis thaliana landsberg
  unsure (1)..(585): unsure at all n locations
agagacggcgaatgtgatgctgatgaatcttaacatctgatagaattttctaaagattattgtctttgttctttcctttttaagatatgggcaagagtactcatcattttgcttgatcatgagcaaattgtcccaataatcttttgttttgtctcagtgtaacgtttactaagagttcatgcttggctcaagaatcggaggtaaaattaggtttcttggttaattgaatgcttctcttgtacatccaagttgagtttaattataacggatcaagtcagctaatctttgttaattatctaatatattaaagttaaaacaagatcccgtgtataaaggcatatcaacgtgcaaatgtatactagtcaaagtcgtcgccttgatctatattcttacaaagtctctctctgtctctgttcacatcggaaccacaagaatggagtctctcttctccacgatgattgncctgctctcggtttctttttcctgtctcatttctacaggtaaatttccttgtacacaatcacctgcatttgtcttttctaaaacttcaaaagtcttttatgttccttaatctgcagaagctct

SEQ ID NO: 38964 - DNA, 1206 bp, Arabidopsis thaliana landsberg
  unsure (1)..(1206): unsure at all n locations
tacataattttaatataatttacttagaaaacaaggacaagttgggatccataaaagaataattaaagaaaaagtatgggctccaaatgataatctggtgcacgcgataacacaaacaccggtttagtgggtcctttgtggcagagaagcacacgtcgactaaggaaggatcaccctctttctatgtctttgatcggctcaatccccaccgtacattctaatctctacgatttggctttgcttcgaacaagtttattccttaaggaagttaacggaccttagctcagtttgatcacaaataaaaaaaattcaggtcgagctcaatcaaccaaaccgtataatactaactcacacttgaaatctgtttttgattattagactacatacaagacattagagacttgtaaaacaatatattggttttatgtcgattagtaggtaatctatctttctaaccctagctaattaaaacaacaaaaccttagcttgccaaagctcatccattaattgaaaaaagatctactaagtaagtatagttttgtatatactaatttgtgggacaaacaaaatttcaaaatggctaatgaggacaagatttataccccaccattaaaacaatgtgactagttatatatcgagttgatatgatggctagcttagaggaataatttatagtatactacattgaaataaaagtaaattccattaagagagaaaaggaaaaaaaaaaagtgaagaaaaaaaagaaatattcttgcttcgaaggcccgtagttgaagccgttggctgagtgggctactgctctttaccttcgtttttacgtttctcctctctcttttttctattgataactttcttttatcgaaagagaataacaaattcattagcaaaacgcttacttgagtacctctaaatttaccaaagtaaattaagtttgaccacttttatcggatacacgtcgaaaaacctataagatttacctctcttattattatttttctgttggatcacaattagtataatactttaaaatttatactagtaaagaatattgggatatatattctcatagtatatttattattagaagatcattttattattctcattttctcacatttcttcaatataangtatataaccgtggaccatagtttctttctttgtcaacattatgtaatgtgtttctaataaatgaaaaataac

SEQ ID NO: 38965 - DNA, 527 bp, Arabidopsis thaliana landsberg
tgaattacggaattgggtttgatttcatggtgttccagagattggttttggagataatcaaacgcctggacttgttttaaggctgtctcaagttggggttttgaatccacaggtttttcaacaaatgggtaaagaacagttcagggttcttcatcatcattcacatgaagatcagcagcagagtgcagaggaaaatggttcataaagctcaaacctttaaatggcttttaattagatatatttagcgagaatgtgattgctagtgaaatctcaaacttgatagcttattcatagcttattttacttcgatcagcaagagaacaatggttcctaaagctcaaaccttttttggcgtttgctttagattgtgcatacataaagtgagaagatgaaatatggttttgctgaaatctcaatgtgctcattcatagtttattttgctcgacctttctttaatcaatagctttgatgtactgattactttataaagttaagaagtaagttctgctctttaaactgtactgaat

SEQ ID NO: 38966 - DNA, 501 bp, Arabidopsis thaliana landsberg
ctccaacaagactttcataacttagtttctgctatcttgaatctttttctatttattttgtgtgcgctcacagagacgagtggggatctctggttgcggccatctgccacactaggagtgtcctacaacacttgtttccgcatctctgctcctttatatgcagactgatacctaaactaccaaactcctaaaaccacacaataccatgtcaaagaagagtttgatggaaacatctgcgagaacatcaggagctctctacacaagaatacgatttttcgtggttccatccatcagcgtaaatcaggcatcagtgtattcttaaagggattaaaactcccaccagatttgctacaaagaactttgcttcagaatcacatcgacgtcaactaggccaagtgaatattatcagcctaattttcttaaacacaaacctgtgatttttacttatgtatgatgtatatatgaattctatttagagataatacaaatcctttccaatga

SEQ ID NO: 38967 - DNA, 687 bp, Arabidopsis thaliana landsberg
cttatacgttggactttttttttttttgtatcaatagtttatttggtaaaaaatattgtgtttatatatataatataagattagaattttggataatatcataattccaatattcgtgggagttagtctatagatgggtggcacgatctttaatctttactttgttcatgctttaagtaaagaaatgtaattcgacagcaaagtagatcaaatattttctaggtaactttattaaaaaatagtaaaatcaattaacttacatataaaaacacatcttatctgtgatgatcattcatattatctatcatatatggataatctagtttttaattcacagaactatgacaaatggtcataaaaacttcttaaatatttgaatctatacgtactgcaattatttgattttcaaatttgaatctagactaaaatattaaactagaaacgattttaccaattcaaataaacacataaaaataagtagagaggtcaatgtccacttgtttgagaaaatgggataaaaatcattagagcctgtaaacaactcacacaaatcttttaatattacaacctggtttagactttttagttataataaaaatttcgtatattgttccctttaattaattagccgtaatcaatataatagtttcgctcagacagacatccgcgaagtccgatgagacttta

SEQ ID NO: 38968 - DNA, 590 bp, Arabidopsis thaliana landsberg
ggtagcgttaccggaagacgagctcaaaataaagtttttttccttaattaatgacattggggtggagcagttttcagatggttcgaagggtaacatagctgtggactacttccaagagcttttttcttcttctcacccttgtgatgcatccaatctcctagctggtatgcttcctcgggttcccgcttgtatgaatgttgagttgactaaccctgtcactaatgaagaaattagacaagcagtttttagcataagaggtagtagcgcacccggtgctgatgggatgactggcctttttctccaaacttattggagtgttatcgggcagcaagtatgtgaggaagtaaggaatttttttgactcaggctcattcccagatgaatggaattttactcaaatttgtctgctgcccaagaaaccgaatccaaacagaatgacggatctccgtccaattagcttatgctcggtttcttacaagattatatccaagatcttatgctctcgtttgaaggtctatttacctgatattgtctctaagcacaaggtgcctttgtgtcggctcgacttatatcacacaatgcatcggtacc

SEQ ID NO: 38969 - DNA, 2696 bp, Arabidopsis thaliana landsberg
  unsure (1)..(2696): unsure at all n locations
agtaatatatgatccggtcacaggcggtccaaccggacaaccccatgcattaccgttaccttgaacatccatatatggacgatttagctatggatgttttattataatgtcacaaaatatgtctatatagagaatgcattagctaaaatgtataggtatgagttcattctatcgtttaatttgtagatatataatgacattttcttgtagagataaatctgatttattttattttagctagaatctttgacttgtaaaaagatgttaccgttggataaggtggtttccaatgccacggaggtggttgaccaatggactgcagcggcggcggccacaaaggtggaatcgctcccggcggataaacaccgggaagaccccaaacgggataagccatcacgggacggtgttgctgttgaaaaccgttataattacgttgacttggtctatggttctctctagattgtatccatctatggttatgatcatcctttggaagaatattcttcctatgctgccgaaatttctgctcatattttcaaaagattgtgtaacattttacaagaattcagaaatcttgcgaaacattcgacccttgggatctaagtacctgaaggtgactagctacattgtgtcttgttaaggtgcctactttcatcaactcaagaatccgtgaaggtatcgcttgatcaacgccgagttgctcaactgcttgcacaaacttcttgtgcagctctggtgtccaatccacctgtaaaaaagaaggcagtaacaatgataacgagagcctgaatcttttagcactaaggagcgtcaagagaaacacaacattaccttctttcgactagttttgttaccagacacgttcttgatcccggatgatttattaatcggtttagtcccatcttctttcttatgaatatcaactgaatctgtcttctcgcttatgagatctccggtttcaccttcttcttctttttcactgtcttctctctcttctttgacaaccactttgtcgtcatctaatttgcggtttgtagtgtcgactgatttagattcaccgatgtcttgatgatcttccatgttatctttctcggtcgaggaatttacattttccatcgagaaatttatgttctcttggcaatcaccgtctagtaaccgtgaatcttgtttcaattgcggtgttgatggcgctggatctttctcctcgattgtcatgtcggtctcaagatgaagcatcgagacaacggattctttcactggcttaagtgatatcgaaacattacttccaccatcattgaatgcctagcaacataaaaatgtaacaacaactttcttagattatgattatattaccgaggaattaaagacgcgaaaaaactaactaaaccttatgaacaacatgctgccaaatgttctttaatttctccggtgagagcggtttttgtaggaactcaactgcaccaagctgaaaaacacttatcaattctcatcatcacataaccaacattcttatacatctacgcaaatgcaagtcgcaatcacttaccgctatgcatttcattgtagtagtgatgcaatgatcggttgaaatcactgtaaagacataaaagaatccacattttaacaatcttttcgtattgtaaagatttgtgaaaaaataaaaagggtacttgtaaaaggttcacaaacttatagtaggaagaacgtctttggcagcctcaagaaacttgaaactctcactctcagcgctcatattcacctcgacgatggcaatgtggaagctctccgggttcttgacaaccgcagagagtgcttcagtttcatcggtgaatgtagtaactgcaagaaagttccaaaaaagcaaaaattgaatctataatcttaacattatgtgtttgatagtcaaaacacacagaaatccataaacagtttcgagataatttggatcctggttcataaatataaactaacaaaagtccaaaacataactgcacaagcttttactacttatgtacgtatcaactaaaagcgttgcattttacatattaatattatttttccccctatatatatacacaaataatggtatagttctattcataggctattgaccaatctaaagctgagtatgtctgtgtgtatttatgcaaatataatagaaggcgatccaatttagaattgtcacgggacatgtaagagctaaagcaactctaatattaaactagtatagtctcactcacataacttatgattaaatatttatgcataaccactgattaaataacctttaaagtaagaaacagaggaaaattagtggcttaccgatataatccattgattcgagctctgatcgagtctcggcggctgaggagccatctccgtcgctgtcacagccgttgaggagaagaagaaccttaagtcctttaggaaaattttcccattttgataaatcgttagcggtaatgaccatagctggttttgcatcgtttttgcggccaacaccgccgcttttcgccgccgtcactgtcgcnnnnnnnnnnnnnnnnnnnnaaaaaagtaaacactggctagattttattaataaaaaaaggggaaatgaatagaataaacaaaaccattagacagaataaagatacaagaaaagtaaaaattcaaaaggtgtgtgtattattgatgagataagaatgattcaggag

SEQ ID NO: 38970 - DNA, 996 bp, Arabidopsis thaliana landsberg
tttcccattaaagagttttctaaaactattctaatacactacatttatgataattaggggccctaaaattttttaatattttcgttacctgaaataaatatcttttttttgctaaataactaattagttttaagttggaatctcataatctaatatggaatgttaccactctgacaacattaattagttctaatatatatatatacatgctaaacttttctattgaaataaacaacgtgagatcaaagagtggaaaacaaaactaagacgagataaatagagttttttaaaaatttgtccgtaaggatatttgggccaaacatacacctgaaagagtagattaacaggctttatttcggtccatagtatcacttgaaacgtttacttatgcaagcactgaagcacccaaattttgaccataccaaaagagaacacacatgcaagtctctcgatcaattcacgtgtctctcaaccgctatgacgtggcctctatcctctgttcttataccttgctcttgaaggcaaagatgaaataattcaagaacaaaccaaaaatccccaaattggagatcaagatgtcatcggcgcaaatggatccacacgacaagatgagatcgcgtgacataagtaaagtcgcgagaggccagcaagcaccaagaccagctcacactcccggtacggtgtcacccccaccggaaaatgaggcaacgtttcgagcaaagagaggagatagtggaagagagacggatgccgcggtggaagaacgttttccagtgactaatgaaacgcgacattgtttcaatcggttcatgcaataccataagtaagttttaaaattgagttccactaaataaatgattaaagtgcatgattaacgtagtcacgatttttttttttaatacgtacataggtgtattgagaaaaatggaagagatgcgaatgattgcaacaacttgagagattacgtacgttcaatttgtcccgaagaattggtga

SEQ ID NO: 38971 - DNA, 768 bp, Arabidopsis thaliana landsberg
attttgactacgaattctttagcaagagatgaaaagtcttttctaccaataactaatcttttcattgagcagagttctcatagaccccatgtgcatgtatatacgtaataagctaagatatttttaaccgttacagaatttgactaacgatactgaacgattagggtaagtatttttttgacatgtataaattaatacttattaacggcatcattatatgttattatgttaagttccgaaaagaggcaaggttcaattaggtgggtgggagtgactcagtaaaccattgtggctctagttgtatataactttttcttcactatataatttcactaaaattttgttgatttatgacatggctatacaattttgttgatttatttaagagttgtatagccatgtgatatatatacatttctaaacaaggttacattatttagttttgaaatttatttatgtgatatacactaacaaacattttctttatttgatgacattttcacataatttaatagatgaggataacaaaatcttcaacgcaattgttcaaatgggggaagtctcatcatacaatgctggtttcaaagtcaaagaagttaccggttgcatttccaattttttttgttgctcaatcaattgaaactttacccatagcatttccttgtaaggcattgttgtatttaagtttttctttttataaaaatatataagttttaaaaaaaaaatcaaatcccttagaaatacatgtatgatcgataaagtttgttt

SEQ ID NO: 38972 - DNA, 1044 bp, Arabidopsis thaliana landsberg
taaagatcttgaggccgccacggatccgtgaaaagaaaaacggctcactctaggttccacccttggcgaacggcttcgcgaaccacgtgagtccacgggaattttttccaacagagcttggccgggttttttaagaaaaataaactccacctgctcgcccgcttggactttcttatcccgcagaagaattttacgcacctgtttggccggcaaaggaacgaaacttttcaacaacagccaggagctgagatgcagcttttcgaaagccgaatgaatgctgtcgatatccgagcgcgatgcactatcccaacagatatgcgccactcacgcgtattagatacagcaaatttattatcgagcataaaactctataatatagttttgagttattacctagaagattcagttccggataatattgtttttcatctagtgaacctagatcgactaataataaacctatataaaccccaattaagtaacatgttcatcgaaactttgcatttacttctttttttttatagtcgattatatttttcttcttcaacaaaagacacttatatatgtaatttttaattttctagtcaatacattttctccaaataaaatagggttttgtttacggagaatacttttaaaaaaagaaagagtatatgaacgcgttgacttacggcggccgagttagaagtggaaggaacaaaagagagaaggtggtccgtcatacatccgaataccgctcctaaaggtgacactgccaacgtgacagtgattgttcgatcttcgatttggtgttttgcctcacattttctttgtttaaccttacaacacgtttcttgtcctctctattattcttttttaattacatacactgtcaattatcaagagataagaaaacgttaattaatatgatttaactaattcacaaggtagatgaattatcacgaccggacttttctgactgaatataaggatgataaatgttcattattcgttgtttgctttctttttcggcgcactggattcttcatttcaattatagactat

SEQ ID NO: 38973 - DNA, 718 bp, Arabidopsis thaliana landsberg
attagtactattatatgtatgtactctcaatttctttcacttttgaatgttcattggttctttctcttattgattatttacattcccattatagattccagttttgtcaccttgtgggggaggccgattcactcttctcctcttcccttttcttggatatctcaattcacagtccgcaaaaagagtttctactgatgtcataatttaaacgcgttattttctcctatatattcgttttggtgggtttctcgtattttaacaactattgaaacaaataaaatgaatcacacgaaaaaacacactatagagtctatatcttcgataacatataacatacatgatttgatgaaagcaaactgagaaaacgtttttttttttttttttttctctgtttgggccaaagaagatgtttttattttattttatcaaattattatatagttttaactatatttttcatacgaggacagatttttttttgcatgtttgatatcttaattttttgaaaagttttgtggtttctagtacccatagttttctatttaaagtggtttcataaaacattaaaattctggtttcgatgtagttttctatacacactttaaagtgttaatagcactatttatagacagaaacgaaaattcaacactaattgattatgaaattttggaattgagttctcacgagcttgtgattatctgacttggacgtttttata

SEQ ID NO: 38974 - DNA, 250 bp, Arabidopsis thaliana landsberg
  unsure (1)..(250): unsure at all n locations
ggcgatcgttccggacgaaaaggaaccagggggagaccaccattcattgtgtctggagaatggttnnnnnnnnnnnnnnnnnnnnnnnnnnnttactattcgggacgattcagatcttcannnnnnnnnnnnnnnnnnnnnnnnnnnnnnnnnnnnnnnnnnnnntgatcctgccgggcaatggcgtgctgtatttccaggtgtccttcaagagacccgccccgcacccaccgcgtgcaggggcttgcgt

SEQ ID NO: 38975 - DNA, 572 bp, Arabidopsis thaliana landsberg
  unsure (1)..(572): unsure at all n locations
tgtggacgccatgccatgtgcacgtgcagcaagtcccacactgatggaatactttcttcaactccacacccacggcacacccacagtcggcgtaccaggctgttatacacaatcgggggacgcagaactgaagcttggtaaatacctacggcgattcaatggcggtggcagggcgcatcatataggcgaagaaagaagagctcctcaccagctgatgcaggggtgatgatacacatgccaccgttgcttgtcattatctcctgcacagtcgttcccttcatacatacgtcgcctcttacatgctctctgcacacaactcatgccagtacaatatactgccagtcctcgtcaaagccgtctttaattctttgctacggcttgaacatgttgcccggcaccacaaagtagtgcttgctgacggcggcagctggagacggcggcttgacgccaagcagggccggccgcgctgaccccgcggggagagcgccctgcagacagccgcccttggccgaccaacatgtccaagagctcaggcaattgctggggcaaaccgccncagcagctgtagcagt

SEQ ID NO: 38976 - DNA, 1069 bp, Arabidopsis thaliana landsberg
cagcaaagaaactcaatagctaatagatctaataactactaacttcacacacaaacaacaacaagctaacaattaccggatttgaaactatgtataagaagaacagagaagacataattacctcaaacggaaaaaacaaatcctggatgaaaaatggaagctcacaacgaagaagaagaagacgatcaaaaataagagagtctgagatattttggagaagaagagaataatttttaagaaactgtagaagatgaatagcaaagagaaagagagagagaagtgtcaaggtccttccattaaagcagaaaaaagcttaattatcatcacccagaaactcgtagccgagattaaaattaaattaactaaacaaagtggtagaatagaaaataagtggaaaaagttgcgtatttttatttacgaatggattctaatccaacggctcagatttgatcgtgctgataattctaagccgtcggatttaaatcagcagatatgaaccgttgatgtacaaatgtcgggagtcggatctttaaacaaaattatgccacttttctggctccacccgaaaggggatggttgtctgcaaatattaaattccgattctatccttttgtttctaatgactaatataacctctatgtgatgataaacgtgattaaggattgaagggtaaaatggtaaagatagaaaaagaggagtgaggaggggacaagaaagcggcattccaagtcggtttgccgggtggtgaatgggacatctaacctcttccactttcttcctttctctctctatctctactttattaatctaaaattaattaagacttgttaatctttttttataatcactttctttctttcggattaaatttaattaaattccgccaccttcctaatttctttaactttcattattacgtttccttatctttcaatttttttacttagattggcccaactggatggggcccattgagaaatgttagtccccccaaacttgaatttttcattttgctttttttttttggtttggcattcattgtagtcttctagatagatgaatgacttag

SEQ ID NO: 38977 - DNA, 797 bp, Arabidopsis thaliana landsberg
aaagcaaaatgatgtttaacttttcttttgctttgccacattaacatcattttcttctatttcaagtttcgagctagacctcgtgtaattcattaatttgtctccctaggtgttcgacgtgtccattttctactgcttgttgtctttcgtaattagttagagctgtctaatccacctccattagaagatacaaaatctaaatgaagtataaacccttttttgttcttctctgctttccactatatagactacctttttcagtactaaaggctttaatgttttatttattatgcattacttaagtttaataagtctcctcaatttaaacgaggacagaatcatctaaatttctcttctatatattacttttaagaagtctttggtgcaaaaatgtttgtgaagacgcgatttaccacacagaacttaagtttacgctaaagctatatagcctatatataggggaaactattaataaaagtctgctcgctggctggcaggctgggtatataaaaacatctctaactaaagaaacaagcatctacgagaagttgacaacgttttgtgaacataaaacaaagtaacaaacttcctaaagaattgaggaagaaattttttactttcgacaaaactcccaatcgatacaatcatcatggacatatatatagcttccagcatccgagaaacaaatcaggagctcacatttgccctcttccactatggttctctaggctctagctcaactcatccgatccttgacctaaccctaactatcatcgattccctttctttaaattttg

SEQ ID NO: 38978 - DNA, 644 bp, Arabidopsis thaliana landsberg
ataaatgaaattaaaaatttcagatttccatgatattaagttatttaagaaaacttggttaagaattcttgttctatatttttcttaagacttatactttcatcttacagaaaactagaactacattatacattattcatcacttggagaaaatatattttggtagatactttcattataaatcgaacgacatgatactcttttttcgggtcatgcacatgttacaacttatacctaacatagtgttgccactcgttcatgcaacacattaatgaaacgatgatgtgaactttgttattatattaactctttcttattttatttaaggtatatatctattcatgcttactaaaaatgttcatccacggattgttggatatgttatagtattggctaaattatttaagggaacatctctttaggtttcagtgacttcgtgcaatatttttattagaaaaagtagtaaattaagcgaataaacaatacgtctgaagactatagttattggtctcttcatttttatagtctttcatatccaatatcaaccgaaaaccatagtaaataattataaagtagagcaaatccataaatatataactattcttcctcaaactctcaactgatattatgtacaattcagattc

SEQ ID NO: 38979 - DNA, 459 bp, Arabidopsis thaliana landsberg
ggtttaaaatatcatcaaacatcttcctcgagctctccaaatcaccaacttcaccatagaaccggacaaaagaagtctgaacaaatggatcccatagaaaaccccgtttaagagcttggccatgtaaggcaacgccataagaaacagagaaagatgagcaagctgctttaatcagagaagggaaagtgaggttatttggttggacatggcttgcaagcatatgagtgaagagagcaagagaagtcttgtattctcctgtagtgagataggatcgaatgagagtgttgtagacgcatttcgtcttccatctcgaagcaaccaatgcgttgctggtcaaaagaactgtgtgaatctgcttaatctggtttgaggagtataagaaacgttggagaagatgaagtgcgtcttcaagagacaaactgaaacttgagaaggaagtacaacgcatacaatttgcac

SEQ ID NO: 38980 - DNA, 171 bp, Arabidopsis thaliana landsberg
tttcgagtccggtgtccataaataggagctagggactacacctaacttacatttgatagggtataggatgatgcagttgccaaacaggaaagacatggatcgctagctagacatagatgctcggtattatggtggtgggtcgcatagatattgccatcatgatcgaattgc

SEQ ID NO: 38981 - DNA, 916 bp, Arabidopsis thaliana landsberg
ctgagagtagagttcctggcattgtcaaagcatctcacataagcattaagacaacgtctgcaaataagcaatgattgatggcccgatagtacgtgctacattgtccttttcttggtggcagatatactagataagatattgggtttgttgtccaagtccccggagaataaaaagtaattaaagcgtaccattcattagcgtgttggtcgaaccaaaaaccgagaataatttctaaccaaatcaaatatctaaccaaatatctttaataatataaaatagaaaagtttaagaatattttggaaagcttacacctctgaaaagtcaacttgtaattcgtcgttaaactttaaactataagaataagaggaaaatgtcaatatttcacataggtgatggagaaaataataatatttttttattgtgaaaatttcataaaaacatcttcaagctagcaacgacttacactataaatttttaaagttttaaactttcacaataaaccatcaaagtaataatttgattttcatgtgattttccctttatttgtatgtactcaagtaagggtgggcaaaataaccaaatcccgaaaaccgtaccacaaagaaataaattatttggtttagttatggacttataattaagcatgaaatttggttgtaaattttattcaactatcggttagatttggtttggtttaaaaccataaaatcgaatgattttttttggtttttgattaaaactaaaaataattatatataattatattgtccaatttatattaagattaatataattaaaatttatctttggtgggcttataattattgattcttttactagaaattaaatgaattttattctttaaactatatttatcttattagtagacattatatttattgtaatcctacgattc

SEQ ID NO: 38982 - DNA, 485 bp, Arabidopsis thaliana landsberg
gtatccacaatgattcggtcaaaaagattataaaaaaatgcgttttcttcttcatcaaccaatggacctactccattgggacgggtcttaaggccatctttaactccaaagtcaaaaagataaactgttgttttttttccccctaaatttaaaaagataagctcgacgttaataaaaattaattacacttaatactgattctaaacctaaaaattactttacaaagattgacccgttaattagaaattgaagttacatttactgtaactgaaaataacttgaccaaaccgtgaatctgcaaggaaagaaacattgaaaaaggtcaaatctttcaataaaatcggcattaaacaaaagaatcagttcctaagaaaatcaatctattttctttaaagagatagattttatgcacatcattgtctaataacaaaaatacaaatatggtaaactcgatttttttcgaatctattatttaataaaatcca

SEQ ID NO: 38983 - DNA, 811 bp, Arabidopsis thaliana landsberg
aaacatgggcttcgataaaatacgattgctctacaaaaatcgataatcggagatggcataattagaaggtcaacaagagaaaatacccagaaaagaatacaacgatgatgttgatgattctgattatgatgatgatgatgataacaacattcaaagttcttcggaccttcgttgttgtttgttgacttgagatttttttttttttttttcttcccctttcctttggaagtatgaatttttctttcttttttttttggacatgaattttctgctttatttttttctttttctttttattattctcgggatctagtttttataattcgataggtttgatccaacggtctcagtttcatcgatcgtacttttttgctactttatttttttaattaatttccttgttttaaaatagtatttaattatgtggattgggctaccaagtcttcttgtgttttttgattacgaaattttgaagcgggcactactttacgctacgtacgacgtcgtttagttcgttttgctagtacatatggtaaagctatcgaataacatatctttaagaaactacgtgcggctggaataaaacagcaattgaagaaaactcttgttcaaaggaagtgacaatttgtgtaacaacttagaaagatgaaatggcaaaacatgtcattgaactcatacaaaaataagaatatgcaaatattgcatgatatggatatggttgtcttccattacatagatggtactagatagaagaaagaaaccaaaagacgagaaaagaaaaaaaagcagagattaaatcattataagccaa

SEQ ID NO: 38984 - DNA, 200 bp, Arabidopsis thaliana landsberg
tgagaatccgtgtaactgtgatttcttgcgattcgcgcccgccgattttactgccgcgatctgcggcttaggcggtggggtgtgaaccgggcacgaaccggctacgcggacggtgacgccagaccgacagctggggcgccagcttgagcagcgccgcctgatagacaccgcgcttgaacttgtcgaccttgtcgagcgga

SEQ ID NO: 38985 - DNA, 679 bp, Arabidopsis thaliana landsberg
tatatctcttatggatttgtgatctgttttctgtgttatataccacgtataagcaaagatattgtaagctaggtctgatagccgggttagataacaatgtcacaatctgactcttctccgacgaagaaacagaagctggaggatggtttaggtatatatctggatccttttgtttattacacattgaagattatgtatgagggatctcgatttgttctaaggttaatgtatcaaagaaattctgagtgttttatgttgtaggtaaaggaaaatctcagaacgagattggtgctgtagggattcgagaagagaaagataatattgaagttgagaatgctaaggtaaatctgttttattgaaggtctaaaaccatcgatcctttacaggatacagagatgtgatcggaattaaagtctttgtcttgtttttggttggtgtctttctatgtccttttgtgtgaatgtctctcaatgtaatttttcattgttaatgtagaataaaagtccacactacgatccttgtgaaagtgaaagcggtgcgccgagtttcttagtttctcgattgcttcacttccttgactctcctgattatgaagttaagaatgataaggtaatgatccttttacaggatacagagttgtgatcccttgcattgcatttgaagtctatcttgtttttgg

SEQ ID NO: 38986 - DNA, 902 bp, Arabidopsis thaliana landsberg
tcccccgactaagttctacaatttagttatttattcaaaaaaaaagaatatttcttacatcatttcctattaagtttttaaactggtgaaaaactaacatggtccaaaacaaaaaattatgtaaaaggcttaataaaaacaaaatggttcagtttcatcattttatgtcgaacaaatatcataaaacagagatacaaaaatgggttacatcatagtttcttaattatacatgaatcataactattgcaaaaaaaaaaaaaaaaaatgcatcttaatttcttagaaatcgtaactacatcatgatggctgttatacaaacataagaagatcgtatatttggtcacagaaagatttgttttgagatatgaaccaatttaaaatacaacttttagaccgagattaaaggacgtggtccaggatttggaaggcaaccgtcacaatatctgaagtatatagctgcagccatcactagattaaacggtttttgctcttatattatgagattatcttatacgttaacgtataatgaatattattagctgatggtatgtgaatatggtggcacttgtgcctactttcgtcatttatttggttagagtttttcttttgatgatgactaaactacggtagaaatatgttggtaacataacatgatatctttgtgattttaccgagtttttttaacccacgtgaaaaaatcatgaattatatcctattgttttactattgacaagtctaataaaattacgaaatgaatcacaatttcttattgcttcaaccgctttaagctactgaaattcccttgattattccaaaatcaaaacgcaatcgcaatacttatgacttggtcaacgatcaccacaaaaaagcgacccttagtcagccaaagagtcacaaccaaa

SEQ ID NO: 38987 - DNA, 611 bp, Arabidopsis thaliana landsberg
gaatattgcagcaaaaaagcttcaatgagttaaagccttcatttttctttttcagtttagccacgacgactagggaaaaacaaaacaaaacaaaaagcttgaaattgaactcccttacgtgttctttggcttcctttcacaaatctctcgcaaaacgcgatcgtctctcctccttcttcaagccctgaaagaatctccagattctctgcgactttctcggaaaaccaaaaaaaaaaatggacaacaatggtaataataagactcaattctctttcgtacggtacaatcacatactcaattttcaatttcttctctactatcgcaattctccgtcgttttctcgagattatctctctaggagttgatggaaatttatcactcgatgtgcttgtttgagaacgaaacgcttgaagatttcttaagctagcttcgatttcgtagttttattagaaattggaaagtgattgtagaaattaacttatagatgattgaagacaatctgtaatcgtttttgaggattttgtagtatctcaagagatgagtgttcctctataacgagtggttggtggaggaacaccttatgggtttaatgatgctgatccacttaaaca

SEQ ID NO: 38988 - DNA, 623 bp, Arabidopsis thaliana landsberg
aaagcctctacttatatggttttcttcaacaattatttcacttctgattacaacaaaaaaacttatttttatactatcatatgatattttcttggcaatataaaaaaaaaaaacaccgcaaaaatacattcacacgaggggagacaaaaaataaataagaacccccacaaaaacagacatcttccaccattttcaggctttcatcatttattaaattataaagtttcttggattcttgttaacttaaatataagctgccaaatatatatcagcttacacttataatggtcctgttttaattgaatttaaccttaaatctcattggaaagtgattgacaaaattcaaaaaaattatgaggaaaaatgaaaatttgaaaagtgaaaataaaataaaaataaaaactcaaatgatgtgtgcgggaaacgagcgacgtcgcgttattcgatgcacgaactcgagccaataagatgtttttaaatctaaaaatggctattagattcgtcattacttttgtatttttccacaatttaaattgactcttgccggagatgtaacttttaaactactttactacttctttctgcttttactcataaagatcacaaagattcactcacaagcg

SEQ ID NO: 38989 - DNA, 811 bp, Arabidopsis thaliana landsberg
ccctggtagaccatttagtcggactcagttgaaggaagaagcggacgtggagaatattggataatccggtgtggagagattctactgtgaggaagcgaacgggtttttaagagcgtaggacaacttgtcaaaatagtcaaataagtccttaatctttgtaaacatcaagtaataatacccaagttgttaaaactaacatttaagtcctaatcatagtggtttatgttaaagattccaattatcaatagataacgtctatagtttttttttttgtggatttgagaattgtctgcattttgtcttgtgtgattattttgttgtcggttgttcttagcaaatgattgctaactaccatgtaatcaatttattttttgttacttatgactaaaatacaaagattataatgtatatggtattgtgcctatatagaaatgtatcagaaatctgttgtggttatttatttgatacttttttgtctgtaaagtgtttattatataccttaattattattagtatcaaaaattcaaaaactcatcgcaatagcacaaatttcaaactaaaatttgtggcaaaattgtttttaattctttgtaaaatcatttgcactttactcagtagaatttgctaaggttagaagttttaacaaatatatggccgaattgtaaaatagttataatttaagattcattttgtattttttctgaaccttttataaaatacttttttttttgggtaggaaccttttttaaaatacttaggtttactttacattattattcatgtttttaactaaatatttccaaccacaggc

SEQ ID NO: 38990 - DNA, 1448 bp, Arabidopsis thaliana landsberg
ataatcctaccgttaacttttatatttttctaataaaaaagactactaggatcggtccatcaacattttagacgtaatatgtatagataaatgcatattattttggacattttaacaaagacatgtcgaagattgaggattttaagcgaatatagaagtagagatgttgttccaaaatgaacagccgaacaacgcaaatacaatgacacaaggttgttagagaaatgacaaaatatgattcggttgataaattacataaaactatttttaaattagactacaatattcgaacaacctacattttctttttggctacacccaactttttatttaaatccattatacagtaatctgacctttctctaacatttaaatcatgatgggctaattcaactacttttccttctatcatgccgtagattattttcacttagattagtatgtttctccttttaccataaagtcagggaacataataatttcgacccataaacaaactagagactgcatgatttttaattagtatcatagtttaagaaaaaagtaactaatattcggtttatcaaccgtagtaaaacggccaacaaaccggaatgaaccaccaaaccaaccaaatttatcactgaaccaagtttctcaaatgggcccaatacaaagattcagttcggcccaaatagtagattggcgctataacgataacgattcgtagggcatttaccacagcatcaacaatggcttcgccggcgttaaccggcggttaccggaacctcactgcgccggtatctctcctgcgtactttagcgtccacccgtgtcactactccattgtttcgttccaacaaacactctccacgtttcatttcttctccaaagagattcacttgcttatccttactcaaaaccgattctcaaaatgaaaccacactctcttcttcttccaattctgggtatgcttaaagtctgattcttttgattcaattcgttcaaatttcgatactttaatgtgaaatgtgtttttttcagataccatgaatacaatcgattgatgccatgtcctgcatataatcttccaccaagaattgaacatatggttgttttagaagacgacgttcttgtatctgagtttatctctaaacaattagatcttcctcctttgtaagtcactaactctttgtggtctaagtactcgtatgtttagagcttggaatggagtgtatataaaaaaattttcattctatgaagatatgttgcagatcttttcgatttgaagctgtacattacgctcttgtatgtcctaaacctccaccaactgcgactcctgaggaaattatactgtttgaagaagtaacctctccttctgtactaaagaagagatcttatattaaaggaaaaactgttagagaagctcagaaaacgtttcgtgtgactcataccaatcagtatgctaag

SEQ ID NO: 38991 - DNA, 2876 bp, Arabidopsis thaliana landsberg
tcgatttctcttcttcagttgtttcccatcgtggaaatccttctagctttggggtcttttaaaataatccccttaaatgcgtttttcttctcttccaaattcccgcaaataatcagccgccgataagataatcatggggaggagtaagatttctcttcttcaatttttattctttaattgattcaatttgcaactggatttgtttgttttagggttttaattgattactaatttactatgaaatctcttatataaccaatttctgttttcgttaacgcttttataaatttggatgctttgattaacttttgctggaattgtttttttttttgcagaatctcagcgtaagaacgcgacaatgtttgatagtgatgatgatacaagtagtgtaagctcttcctccaccatgccatctgagagattgttgaatcctggtatggatgaagttactgttctcaaggatgctttgttagatcaatcccttgatgctctctatgagaaaaggtttgtgtttctttgttttctttttgatgtgcttttgcttgattttgatgcaatactgatatttttggatttgaaggagctcaactagagagcaagctttggccaccattgttgacgcatttaacagcgacttgcagtatgagtttgttgaaaagaagtaaatatctgacactctttcctattttagttttatcaatccacgagtcttgtgtagtttaatcaatcatacatcatacagaatttaaccatgtttcttcttaatgagtgcaggtttgccactttattgcaccagtgtttacactgcaccaagaaagggtctactaaggagacttcattagcaactcatgtcattggtgagtctcttagtaatttacaattcatgcatttttttttgtcaagtcatattaacagttaatcgtggtggtttacagggttgctagcgttaactgttggactcggggatcatgcacaagaggttttggaagaatctgtcactcctctgtctcaagcccttaaatctggtcgtgaaatcttgaaaataacttcggtatggatgatttgataatcgatcagtttgtcattactttacaggtttcttaataaggttcatcttcgattcatggttgttgatattctgccttttcattgtagatacttgagtgtttagcagtcataaccttcgttggcgggaatgatccagagcaaaccgagaaatctatgcagattatctggcaaatgatccacccccaactagggtctaatgtatgcatcttacttttttctcattttacaagccttttcaatctgatttattaagaaagtaggctcacatgaaggttggcgttttttttgtaggttgtggcaactaaaccttcacctgctgtaataagtgctgttgtatcttcctgggcttttctgctcacaacagttgatcggtggactctaggtcctaaaatttttcaagagtaagtggggcatcatgcttttcttcgatctaattttacttattcatagactgattgaatattaatgtcattgcaggactgtaacttatctctctacattgttggaaaaggatgaccgatctgtacgtatagctgctggtgaagcgcttgcagtgatatatgagttgggaactctagagaagttcgctgccgaagtcaaagggtctgctaatggatcagtgaaagaaggaggtgtctctcaggaagcattgatgcacatgcatggcttgaaagctaaagtcactaaacaagttagagagctctctgtagaggcaggtggtaaaggttctgctaagaaagatctcaacacccaacgaaatttgttcaaagatcttgttgaatttcttgaggtatatcttcttcaccttttctcctgttgaggtttaagttagactattctgataggattttatatatgatgtgttttaatgatgattaggatggatatgctcctgaaacctcaacaaaagtcggaggggactatttacagacgtcaacgtggtatcagatgatacagttgaattatttgaagcatttcctagggggtggctttattaagcatatgcaggtctgttttcttatttaccctttcttttcaagtgtcgaactctcttaagttttctttgttataaagctgacgctgtactgttttatacaatttggttatcaggagaatgaattccttcatgatgtatttagtttcactccaaagaagattggtggaggaaagttgtctaatgaccaaaaggtatgtttccgggatcttcattcactgtctcgaatcttattccattgcaaaaaccttgttaacaaaactggattttgcgattatttgttgcagaggttgtttaaatcaccaaactcagctcttaacaaagcaagaacgcagttcctggccaagcaaaggatgttagctaaggtattataaattttgattaatcgtcttatctgggaattgtgttgtgcagaaagaataacaaagtgtgttgtttccaattgtgatgcagaatatgaacgttgggcattacgcagctacagcaatggaggaagaatgatggctctacaattgatttttgaagaatgatggcacactcatctgctgcttttggaaaatgttgttgttccattagtacactttttcttgtttcatgtttttgatttgataattggttccaatattataaccaactcttagaaatgtcttttcatttataacaattttcgaccgttgagtgtaattcctatgattcaacacttgttgtttctgttaagagtgccattgaccaattgtattttgagctaagactcgaaaatgtcactgaaaatttgtcagtgtattggtgacagacaaaatttaggccatgtttg

SEQ ID NO: 38992 - DNA, 842 bp, Arabidopsis thaliana landsberg
  unsure (1)..(842): unsure at all n locations
atattaaatacctaatccttaaaatgaaagttgatatacgataaaaaggtcagattaatataaaacaaaatggttcattgaacatgtatgtgtcagattgtaagtatgtcaaatcaaagtatatatctatctcactttcgaaatctgcaaaaatgactagtgaattgaggtgaaccggcaaaaaaatcacaatcgtaagaacagaatcacatgatgtgtagatctgttggtcgttcatttggacttttcttctgaaacgataactcaagagcatgtgctcatttgatctctctttgttgattctccgcttccttcaacatatccccacatgcttcattgttgtattttatttttattttcgaaactatattaatacagaggagaggaagatcgtcctcacaagtatttgcaaaaatgatacacaaatcaatgccaaaatgatgacgcagtgaaggtttagacagctcaagaatgatattgcacatcaatcactgattcaatgttttatttttgtcttcttcttttttttttttgttgaatgatactcattgtcaacataatatcataagccttttatcaaaataataataatacataatgtcctgcattttgtctttttgtgatgatttttgctcattatataaattgcaagtaactatgttttgcaaggttttttctgttcgtgacataaattgcgagtaaccatgttatgttattatatatgtacctatggtgcgaaggttagattttacatatggagataataagtattggatctggagataacataatgctacgactntatactatgtatgttgggatttattcccaaacaaaaaaaa

SEQ ID NO: 38993 - DNA, 809 bp, Arabidopsis thaliana landsberg
ctaaactaaaccaaagttgggtattttgtaatcttcttcagggttggacttactctgttagtagtgaattctcttacaatggctttaaaggttttttttttacatctttttattattttgtattccttattttatttacatattaaatgctataaatatttgactagctacaacacaaaatctataattatgattagttcatttccaaactatatagtatatacctagtgaaatctgtaaacagtttcatgtaacatttgtaggtttatttttgtatgctatatacaaacaacaatttcctcctcattttttattttgttaacgattttttttttgttgataacaaaaatgaagtagaaagcatatcatagcgctataaaaatcaaaacgaaaatgacattttaatttgttgtcgaagaatatagataaataatgattagcttatctatcaataattcaatactatcatatatacatgtatgtttgtataaaaaatctgacaatatctggattaatttattagacgtcatcttctagcggttgattggtttgttttttggggttttattttttcacttttgatgttcgtcaactaattgatgatttgtaagaatatcttaatcagaacaaaacaaacaaaaatcaagtatggcgtaccactatcagttgaagaatttaaagaagtatataccgatatgtatatattatcttaaaggctttagaattttcttgattttggtgactggttcacgccctcgagggcatagttaaaaggtcaatgcaagtactcatcttcaaatattcgtatc

SEQ ID NO: 38994 - DNA, 330 bp, Arabidopsis thaliana landsberg
gacggcgtgagcgacctgcccgacctcctcggtggtgtacaccggcagcgggtcaggatcgcggtctgaaccgggcacaccggcacgcaaccgggcgatctcctgttcgaggtcgacgtgagcgacctgcaaggcgctgtcgcgcagggtccgcagtgggcgcaccaatgagcgcgccaccagccacaccgccaacagggtggcggtgatcgcggccagcaccagcacgatgtcgcgaagggcggcggcgcgccggtccgcggcccggtcttccaccgccgcagtgacggcaccggtgttctcgttgatgagctgggcggcgatctggtc

SEQ ID NO: 38995 - DNA, 582 bp, Arabidopsis thaliana landsberg
ctacatgcaataagagacatgtgactgctatatcaagttttgatatccatctacggagaagaatgaggctgtgacacaagtgataattgtaatagtagatgtcactaatcccaacctaaatgcaaggtactaaagtgcagatacactatattatgcaatgcacacaagggacacgacaagtcgttaaaagtctgaataaaatttgattctgatcgccaagttgaaccgaaaatgactacaaaccacatggtgcctccaatatcaaaaataccctgtgaaaaatgcaaaccaatggcccacgggtccagaatcagctagttagctacttagaagttcagaaaaatacctggaatagtaaggggaaaaaatcagcacaagataaaatacatgacacggaaactgaaagaaagtattagaaaccatgaattttaatgatcctcattacaatctcatgatatattttgaatcctcagtaaaaatatttcataaacaggtttaatactgttagacgcagatgtgcacatatgacatgcttaaaaagatgcatgcttagccctatgagggtagcaaaaaacttacctt

SEQ ID NO: 38996 - DNA, 1756 bp, Arabidopsis thaliana landsberg
aggtgtaagcattactctcctttgtttaatagagttaggtaaatcaaatttagggacaaaaacgttttaaaagctcatacatattcaccatacaaaggccatatctatgttaagaatccaccttaatcagttgtaaggagaactacttagtatggaaaactacttagtatttacctcaaaagaaaaactcttgtcccgtgatgcacgatcttgaaggtaactgcaaaccagaggcgaattacaattatgcctctgtagtatgcataaataagacttgtgctgctgtttcgcaagagaagcaaacttctcacgattggaagcagacacacaatccagtaaaagggagattcgaataagtggaagttgtctaacttactccattgtttcctcaagagcagcaggaagtctcagttcttcattatacgctggaactattaaagacaaatacttctcggcagggtcggtaatatgagggcaaggaatctgataataaagtttgaaaaacagggtcaggaaaagtaaaatcagattcctcaaccaccagaaaatgcgatcaagcaagtcaaactcgttataattgacaagacaatctatgtatggattcaacattataatggaacacttaatttttctagctaagccactaacttaagagtttccaaagtctgcatctggaagagactccataaactacttatcaagtttcacacgactatacaatataacttctcaagcttctttgctaaaccaaaatgtaacatttgatacaaaaaaagagctaaactaatggaaacagttcctcttaaagactacgtgaagcttcaacattcgttttagcgaaacacagaatcaagtgttcaaatcgccaacgcaaaacctttttaacgagaaaatctcagttccattaactataattaactgattttcaaaacgctatcgttctttgccacactattgccagaaaatcactgtaaactaatacgataaatcaatcagacgttaccggttttatagatttcggatcgtcgagtgtagtcacggtctcgacagagctgagaaaatccaaaacaaatcaatcaaatcttatcctcagaaatcggaacaaattcgaagaaattgagtaaaacgtacacgttactgtgtctccttctccaagcttcaaaaacaacaacggatagaaatccgaataagacgatcagcagcagccagaggctgaattccgcaactgttaccagaaactccattgttgctcccgagatttgagatctgttttgctttcacgagaaagagagagagtgaagaaggagagatcgaaaccaatccgtgaagaataagcaagaaaagctaaagtctaatgattgatccgtgaagatggttcaatccctaatttcagattaaaatgcagcagagctcaatttgagatagccatttcggtttgacttttggtttagccatttaggttccggttcgtttggtagtgttaatgttgaacaaaatctcaaattataataaaataaagttttattgattaacaattttcaatatacagaaaaaaatgtggattaaaatatgttaaagaataaaactgatcaatattatgatttggaaatggcagattatatatatgaataactagaaaatgaatagatggaaatgacaaagtataatttggatattttaccatatgtatataatttttctttttcatgtacatgtctacataaatatttgaaaaatataatgaaaatttaagatc

SEQ ID NO: 38997 - DNA, 539 bp, Arabidopsis thaliana landsberg
aaactattaaactttttttttctttctgaaatgcatttaaatatacctaatagctgaccaagaggttgggaaatttctattctgatcacctataatgttaattcctcgagccgggttcgtctctgcgagaagtttaaggagttttattgatgattgcagcttaggaacaagagtttcgaaggtcttaattagagttaagtggattatcgtcgttatttgtagtaatgatttcattgattaatctaacagataacaaacgattgcaagtgagtacaatttttatgcaagataaatataaactaaaatacaataaatcttaagtttttgttaaatacaaaccataatacatagggtatgaaagatacattttgttaaaactgaaatgaagtatatgtggctttatctctgcttgtttcctaaaacaattaaaagaaatctgaaccaaaactgaataaaaactagataatataataaacattagaacacaacacacctaatttaaatcgccgtcgaacattcagttaatctgtcattggttg

SEQ ID NO: 38998 - DNA, 431 bp, Arabidopsis thaliana landsberg
aaagagggagagagagagatcaggtggggccgagagttccttcacttcgacttcttcgcatggagagctcagttctcagactagacaatctatcaccagtagcaacgtgataattctcgtaagcagctggagatagtttgtgtcccacaggtggaagacggctgcttctctccttggaccgtttctgcaatgctggtgctttacgagctgtggaggatccaggtttgtgagaactggatgcaccatggctactcttccggctactgtttttgagctctgatctaaggcctcggtccaactgatgtgtgcttgtcccgagccgagcatctttagtgccttgtctattatagtataccaaatttggcagaagtcccaaaaggtaccttctcagttgttcatcaccaacattcttctgtgcagggttacctttc

SEQ ID NO: 38999 - DNA, 476 bp, Arabidopsis thaliana landsberg
  unsure (1)..(476): unsure at all n locations
ggtgggtgaggacgggcctacacggcatggctgctatgatattgcatacatgcgctgtattcccaacctggtggttagtgcaccgatgaacgaacaggaattacgcaacctgatgtttacggcacagctggacagcaacccttatccttttgtgatcaggtacccccgcggagaaggtgttatgcccgactggaaaacaccttttgaagaattgcccatcggcaaaggcaggaagctgaaagacggaaaggaaattgccatactgagctttggnnnnnnnnnnnnnnnnnnccaggctgccatccgtgaattacgtacagaaggcattgatcccgcgcattacgatcttcgctttgtaaaaccgatagatgaagcgctgctgcacgaagtattcagcagatataacaagatcattaccgtagaagatggtaccgttgtaggcggctttggcagcgcggtactggaattcatgaacg

SEQ ID NO: 39000 - DNA, 832 bp, Arabidopsis thaliana landsberg
  unsure (1)..(832): unsure at all n locations
atatttattacgtttaaagtgtaagatttatatcacatttcattagtattaatttgagatctctgaccaattatatatgaaatgaatgcgaaatctccaagatgacttccccacaatttcatcgtgatcaaggggttaaaagcaagatttatagaagtgaaagtgaatatcaccttgggatgtcacatccggtgggttgccatcggtaatgaaggtagttcttgtccggccgaccaaacttttggcaatccaatccaatgaacggacaagttgatgttccataaagaggattagaagaattgtcataaatccaacgtccttggtaaatgttacactttgttgcgttcttgtaaccatcattggtcttatctgctaagacaccataatctgataaatcaacaagaaaaataagaagaaggagaaagaggacctgatggaaattcattttttgtaattagaagagacgatgtaatgtgatatatattaaggactaagttttgcatttataaaattaatacacgtattcgcatgagtgtaaaatttacgtaaattgctaaatatctataatttgggaaattaataaagaccttttgttgagaatagtcaatagtcaagaaaaagatctctttctctcttggttaattggactagaaaaaaatttctttctcttttcgtaaaacttattaatttagacgaaggatatatacattcttacgtttaatttcactcgattcagagtcttccagtggtggtgacctcttgcgtaacaatatgacaacatnaatattacttgatttaaatagttttactgaatgttttttttttttttttt

SEQ ID NO: 39001 - DNA, 385 bp, Arabidopsis thaliana landsberg
aatattaatctaagatcatataaccaatgtttagtagtccactaattcaaattcatcatataaattaaaattcagaccaaggaatcttccttcgagggtcaaagatttttccatctgtgataattaatcatagcacaatttatttatttacatattcacatgtaacaccactatgacaatgtcactaggtaccttatatattaaatcactattttattctcttggaaataaatatccataatttttaccttactttttgattctggtgcagtagtatgttcgagacatgaattgcgagattatagtttatatgatgtataagagaatagtatatagactcttaacccaaaactctctgactaattatgtcatttaaaacgtacac

SEQ ID NO: 39002 - DNA, 741 bp, Arabidopsis thaliana landsberg
aagtttatagtatctacatatgcatataaatgaaacatttgtttgttagtaaagaaatattgtaaatgtggaatatgtggacatttgtcacagatcgcagaagaaatgaagccaagtccttttgttatttcgatattaacaaagcttatttcgattatacccaaatggaaaatcattcctagtcaagatatcatcgagatttcatataaagagccagaaattagaaaacaggtatgtttctatataacatttagtaatcaaaaatgattagtttatcaaaaatctgtgtaagaaactgatcaatatgcttgatttaatttttgtacattttgctatatacgactaattaaggttagagaaaatcctttatgctcgaaaggacgaccacgcttgaaaactgcgtatgagctcttaaggatcagcaacgacttggagaagagacttcaagaggtatattataagtgattacatatatatatatccaagatttccataaatgcatatgatattcagattggactcaaatagtggtaattaagattctaacgttagattttttttgtctctgtaaaatataaatcatccgatcgagaactaatgcacataatgatgataataggtttcattgccgtttttggtattacacggagatgatgataaagtaacagataaagcagtgagccaagaactgtacaaagtttcttttgagcgctgacaagaccttatagttgttcccttgga

SEQ ID NO: 39003 - DNA, 853 bp, Arabidopsis thaliana landsberg
  unsure (1)..(853): unsure at all n locations
caaagcaacaaaatgttatagtaactaggataaggaaaattattttgaaaagcaaaaaaaaattggtgtagaggggagggtgcagctagctaataagtcctacttgttcaggttcaacattatgcaacacaatatataagaacaaacgaaggattcacaatcgaatttctcaatacatgcccactgttaacatatttcaactatcttaagagcatatccatttgctgaaagtttgtacatgcatgccacatctttatataaatagtcacaaaagaatcaaagatcctattggactaagtagtaagtacaaattcgccttaatcctaatcagtaaaaaaacatttgttgaattatacagaaatgaaactcttaattctactgtttataatataaacggagagaagtgaactgggccagcatgaaagacaatacatctagtttacctttttgaaaccagctaccacacgtagcggaacaaaaccctcattattcatgaaccctcgaaggtatatgtctgtaatcaaattttcatcactgtaacaaaagacacatttgcatctaaattagtatttccctatagtgaattgatcagtgggaatttcatcgtcgagaagaataagagaaattaaatacgagggtactacctaaaataatattgtatttgcttatgcagtttcatgtgtaacggaggatcttgataatggtagaagaactgcggaccatgcggaataggtgtcatgtaaggcatacggngataatacgacgactgtgccaattctgaaacggagaagacgcattagcaaatcataaatgaaattaaagacgtgattttcatgtgtctcaccagtaggag

SEQ ID NO: 39004 - DNA, 349 bp, Arabidopsis thaliana landsberg
ggctacggtctcgcgatgccgctggcgggccagctggtggcgcggcgcggcacgcgcttcgtggtgctgttcggcgccgccatcatcgccgtggcgtgcgcggtcacggtgtccgcgcgcacgccgttcgccttcgggctgtggttcggcatcgtgctctcggtggggctcgccttctgcagccccgtggccttcacgccgatcatcagccactggttcacgcgccagcgcggcatggcgctgttcttgctgtacaccgggtcgatggcgggcatggcgatcctcacgccggtgctcacctgggcgatcggtgttttcggctggcgtgccaccttggtcgcctttgcgg

SEQ ID NO: 39005 - DNA, 710 bp, Arabidopsis thaliana landsberg
  unsure (1)..(710): unsure at all n locations
ctagaatttcatttttgtagcatgcacattacgacccttatggttatggtggttctcgttttggaactggatccgatctctcagattacatccttaaatctcctacttacagccctacctctcctagttacagccctacctctcctagttacaggcctaactcttctagtgacagccctgactctcatagttacaggtctaactctcctagttacagccctacctctcctagtcacagccatacctctcctccttacagccctaactctccttacaggcctacctctcctagttacatccctactttttctggttaccgccataactctcctgcttaaagtcctacctctcctagttacagccctacttctcctactttcagccctgtctctcctgatcacagccttgtctctcctcaatactcccctacctctactcaccacagccctatcttgagctctcctcctgaagattatggttatggtcctgacgacattgaagctggaaaaatgaaaactgatcaactcaaggaaattggggatggaagtagccatgtggatggtagaaattaccacaaggctgagaccactcgcacaattcatgtcccatgtccaaaggtctggttttacatttttgactcttgtttcagtatcagctactgaaatttactatgcangtggatctactggttggtgctgcggcgactttac

SEQ ID NO: 39006 - DNA, 536 bp, Arabidopsis thaliana landsberg
aaacatgaagatttagtaaagattttgaatagtaagaagagtttgtgttatcctaattattagaaaacatgattgtaaatgggaaactgctaaaagcatacccggagttggagcttgtggacaaactcttagtcacagagagtaacgatacgaaatatgagttattggggtttggtgtttatttttatatataagttaggatttagagcaattatccacttagcttaggtgtacgtgattgcagcttagcctatataagaaaaaactcatgatcaataaaaaaaatagattttagtaattaacttaagtttctgatatggacatcatattcaaaaatcatatatttcatcaagagtttcttacacattttcatagatgcaccaaaccacatatgatcaagcaaattcgtccaagacatgaattaccattatttggaaccgaatgtcttaaatctcgattggctctctcccaaacttttggggcacgaattggagactctctacaccttgaaaatttcaagagtgcacaacttcatg

SEQ ID NO: 39007 - DNA, 624 bp, Arabidopsis thaliana landsberg
tgaatgtggaactgcacttacgtacacgatcctaataatgatatatatcaatgattttgtgctggtttttttaacaaataacatgttattataacatttatacgatcattccacgtcataatttaaatcggaacccacaataactacagtttgatttcagacagaaaccaaacctccgtgcgtgttatgtgtgtggaaagcctttactactttaaatttctaacctcacaagcctttctgattcgatcctcattattatccagatggataaactgtctttcattcagttattccagccaagtagattagttagccacgtcacgcaacaatgtttcgtcctagtgggtcacaagttgattctgtttactctttttttttttctataaatatatgggtcactaatcttttgttacctaaattagataattatgtataaatggacgaccccaagtgtcgaggtctatatttcaatttcaacgtgaaaagaaatatatatattttcaacttcaatttgcgtcatcgaatattcaatctttgatgtcataatcaactaccaaatcttatattcgataactaatgaattacgatgtttatctaccaaactcaaaaagaagtttattttta

SEQ ID NO: 39008 - DNA, 460 bp, Arabidopsis thaliana landsberg
gtgattatatgaatgtcacaatgggaaaagcaataaactcatcaacaaaggctacgttatgcatcactcttgtgagcttaactagagacctgactaccagataactagatcaaactcgaatttcaagtccactttcctattgattaaaaacacttgttttggttaagaattataagcttgagcagtagaattctaccacaggatagtaatatatgtgtagaattgtctatgcagatgttagaaagcaaacaaatttcatctatttcgagtcttgttcctccctaatcagacttccttcacagattctaagttccacagagcaaatatcttcaagcagcaattttcttttcaaaatcaaactaattccaaaaagactttgactgattcaacacataccttaagcctctgaaaacggctgcgtgcaccatcgctgcaggaatcagaagtcgtcgtggctgcg

SEQ ID NO: 39009 - DNA, 809 bp, Arabidopsis thaliana landsberg
gttaagaagcttttcgccggacaacaacatgaaggatttggtgctgttgtaagaaacagcatcggaaggtatccaacatgaaggattttgtggtgtttcattagttccaggtgtagtaatgaaaaagaggtttcatatgtgtgaaattttgcaggtttgagttcagatacttcgacccatttcttgtcctggatgaattctcaggtgggtcttgtctcttttcttcctctgtttttgctctgttcttttcaatccaacttgtcagattttaatgatctttaaaaactgcagtttcagctcctgcaggattcccagatcatccacacagaggttggttttgttatcgttattttaaacgcagtttacacgttaagtttgcgtttacacgagaaaaaacaaatattttgaataataaatttcaactttcataaagatgttagtatatacctttcatttgacgtttatgtttataattacttaaattaacatatgtataatttttcttaagatattttaagtcatggtttcatttggaagcacatttaatttatacacaaacctaagttgcaatgctaattaaaaatcaaggcattaatcttcaccttctgataaaagcagaatacatatgaccacactaaccaaagctatcactatatcatgattcttcttggttactatttgctttttcttttccaaaatcaggatttgagacagtcacttacatgttagaggtatcgatctcttctcatcttcttattcgatttctcaagaatcggcacgcgtaactcttgatgatatgtatacatagg

SEQ ID NO: 39010 - DNA, 735 bp, Arabidopsis thaliana landsberg
  unsure (1)..(735): unsure at all n locations
aaatacgttacattttccaatattcaaatatgaaattatataatttgtactcgaatatattgaagaatatgcttttgagatcccaaaactataattactacagtttcttattctccaattaatcgaccacacttatagtaaggttcaatcattcacaacttatagatgaaatattgttataatttggcaaagatataacaagaaattaaagttaaagagaaatgtatatgtctcaatgtctgtcatcttatctgaccttttttctgtgcatcaggttctctttgctattgtaaaatccaatctctctctcagtggtcctttattaacaatatacacagtttatgagaacactagtgccatagaaactagaaagtggaggacaacccacaaataccaccaaaaaaattaaagacatttcagttttatgatatgttaccaaatatcaatatttgaatccaattcctgctgttaaaagctttaaagaaattcgatttaaatctaagaagtaaaaaatcaactttcacaaaagaatatcagacaaagacccactagaaaaaagaccaaaacacagttattttcttataggagtgtgctgtttggtactatcctcttctattctttcagagtttctaaaaaaaaaaaaaaagaactcacatgtgtgtaaatcaaattttcttttcaaacacaaattcttcctgttttgggatgttngtgcaggacatgatattgatgaac

SEQ ID NO: 39011 - DNA, 646 bp, Arabidopsis thaliana landsberg
cgatgccgccggcgatactgtgaccgtttcttgacgacggcgtttgcgttacttttttcctggcggatctttcctcctccggcgcatttatcagatttagtagcaggcatgaggaaataaatcttaccacgttggagctcagcttcgggagggacgatgacgatctttgtggctgagatgacgtcacgctcgtcgtgatctgacgttggagaagatggtttcttgagtacgtgcttcgggtgagccttcatgatttcgctggccgtgatcgtgccactgatctcctccacgtgtccgtttgagtgaacgattctgatcacgtcaagcgctccacacggtagaatgcaagcgatgcaacacctgattgtctccttcattctttttcagtgaagaaaagcaaataatttaaagactttggttcttgtaaaaaatcatcagagaagattgaagatgaatatgagagagacgtaaggtagtgatcttgaagagagaagcttgaagaagaactaaatttaaattgtaattcttttctgtttttgaggaatttagaccatgtgtgtttattatttatttatagtcatgtcttttggtgcgtttattattttcgattttgatgtcgtcttgtaaactttgattattgtatagt

SEQ ID NO: 39012 - DNA, 673 bp, Arabidopsis thaliana landsberg
tttttttttggataattttggaaccgaaacccgcaaccaatttttttttaaaataaaccgtttaaattggcgccttggttggaacgttcggatcccaaaaaataatcggtatgaactatagttttattattcatcatttgaaacaattttatgatttcttggtatttcatcattttgaacaaatgataccgtatgaagtatagttttatgtatgaagtatagttttattatgaactatatacaaatgatgaaatgacttcttggtatctctgaaacatgatctgttgctatgtagcttcaagtgtgatcgcagtgtctgattgctgtctctagttctataatcaggaccatatattgcaaagaaattcaagatttcaagtgcattacattgcataaagtggttgtacaactcagtcatattctacacaaagatcttgattttcaatacaaagaaaatgttagacggaaacggccaaatgggattgcaaaatctgaatactgattggattgatctaatgacgtataagcatatcacttggtctgctttgttactgtcctttggactgttgaaactccatcaacgaactctgtccggaaaagaacattggcattgttgaacattccttctttcagcgaaaccacgataaactgtttaagcatcgagtttaaaaag

SEQ ID NO: 39013 - DNA, 168 bp, Arabidopsis thaliana landsberg
tgccatactgtgctgtgttttgtatgtccattttatgtagcctagccattggaagaatacacgcggatgactgacttatccgaggcatcaccagcacacgtattacatgcatcaggacaaactggactgtcagaaggcaaagtctacaccaaattctttacacatgcc

SEQ ID NO: 39014 - DNA, 541 bp, Arabidopsis thaliana landsberg
caaagttgtgtgattctatcatcaattaggcatcaagcatactaatttcaaggatacagcctgacttagcactatagtcagaaacatgagacgtgtttcaacacaagagagctacattgtttgtgtttagcccagtttatatgttttccacacaggagaatagaaaacaaattgcgttcaagcaaccaaagtaaccgaaacacaatgtcttacacatataacacctacagagaacacggaaagtcaagtaaactaaccacttcaatgaaatcttgtgttgagtctttgtaaaattgactgttttctaacgtcatccatcttccgcataatgtgctcttaatgtagtaaaggtaacgtaaagtagcacctttatagaaggtggtataatctgagggagtatagctcgaaccattactgtagatgaaaattacaaacaaagaagcctgtcagcttaaaggttgacacttgtaagccctaaccgttagtatatgtaccatcagcatcaagcatagtgtacgttattgttcatacagtattagag

SEQ ID NO: 39015 - DNA, 3214 bp, Arabidopsis thaliana landsberg
tataattttaaccgaagaacgatagaaaagtccatgggcactagcatgctttcttttattttattttgaaattacctatttagtactattgaaactaacatatacaagcgaacatggatcacatgcttactcgtttttagatcagcattatttaaggaattcacaactgcttatcatcatcacatgtgattatgcgaaccgtacatatcattcatttgaatttaatcaaacaatcattagctattataatttaaacgtacgtttactttttaaaaaatatccaaacataccactatctacacaattacatataaatacccgtcataaccgtttacgattattacttcaccctcacacttcaacaaaaaaacaaaacataaatactttacaaaatccaaaatctacaaagatctattactctttctctttgtaattaagaaacattaaacatggataataataagcttgtagctgttttgctgatgttcttttcaagtttcttgctgatgaaatcatcaacggctgcttccaactacaatgttgtcagcttcggtgctaaaccggacggtcgaaccgactccactaaagccttccttggcgcgtggcaagcagcttgccgttcagctgcagcggttactgtaacggtcccgagaggaagcttcttgctcaaaccggtggagtttcgaggtccatgccgcagtagaataacgtttcagatctatggaacgattgtagctccttcggattaccgcggtttgggaaattccggttattggatcttgttcgtgaaagttaaccggatctcaatcattggaggaactttagatgctagaggtgcttctttttgggcttgtcgaaaatccggaaagagttgccctgttggcgccagagtaagataaccgtttaactaacttttttaatattttcgtgggggtttttaatctgacatcggtgatgatatggtagtaagtttgacattggtgatgatgtttttttgcagtcaatgacgtttaactgggcaaacgacgtcgtagttagtggcttaacgtctattaacagtcaaacaacacatttagtgataaacagctgcaacaatgtaattgtccggaaagtaaagctagtggctccagaccaaagtccgaacacagatggcctccacgtccaaggttctgctggtgttaccgtaaccgatggcacttttcataccggagatgattgtatctctattggtccaggaactcgtaacctctacatgtctaaactcaattgcggtccaggccatggaatcaggttacgatctattattcttatttaatagcttggagagcaagattcaaaaatcttcttaatactgattattaaatattaattgtttgcagtattgggagtttagggagagatgcaaatgaagctggagtagagaacataacgttgataaactctgttttttcgggctcggataatggtgttcggatcaagacatgggctagacaaagtacaggttttgtaagaaacgttttgttccagaatctgatcatgaaaaatgttcagaatccgatcattgtcgatcaaaattactgccctagtaatcaaggttgtcctaaacaggtaaatttcttaatcgaaattgaaacctagcttcctacatatacaaaggaattctagaaacttgatttgattggcttgtatatttgtagggttctggagtgaagattagtcaggttgtgtatagaaacattcaagggacgtcgcggacgcaacaggctttaacgtttgattgcagtcgcagtaatccgtgccaagcgattagattgcatgatattaagctaacgtttaacggtcggtccgctacttcgacttgtaagaatattaaaggagttaaggctggtgtagtgatgcctcaaggttgtctttgatatataattcatggaatttgaagtgtgtttagatgacattacaccgtcatggacgcagagtattttttgccttctgtgatcgagttattttgttttgcgtcttcatccatatatatcttgaaacttcagtttgtaccctttttcgtacaaaatatatttggacctattaaagattcaagtcaaacattcgtttgatattttttttattaatgtaaagcgtatttgaatcaaaaatcaaaatgtttgtcccaagttcagctaggtatagagagatcaatgtatagttatactctaaaaaatattgaatgtaaaaagtatgaatacaaacaagtgagcatggacaatttacagttttaagtaggttggtaaatttactcaaaataaatacactgagctttttttttttgaagtcaacgtttgttgtggttattccggctctcctctacagttgacgagttactgtttttcttcccactctgcgacttgtatgagcttgaagaatctccatcgttcttcttgtgagacttagaactggagtctccttcgctcttcttgtgagacttagagctcgaatctccatcgctcttcttgtgagacttagagcttgaatctccatcgttcttcttgtgagacttggagctcgaatctccatcgttcttcttgtgagacttggagctcgaatctccatcgcccttcttctgagacttggagttggtgtctccatcgctcttcttctgtgacttggagcaggagtctccatcactcttcttcgaagacttggagttggagtctccatcgctcttcttcgaagacttggagttggaatccccatcgctcttcttcgaagacttggagttggaatccccgtcgctcttcttcgaagacttggagttggaatccccatcgctcttcttcgaagacttggagttagaatccccatcgctcttcttcgaggacttggagttagaatctccatcgctcttcttcgaagactttgagttggaatctccttcgttcttcttcaaactctgagatttggagttagatggattggagtcgatcctaagatttttagccgagaagcagtgccgaacatggacccggtggcacacagtctcagtcgaacaacctccttgtacattcaccacaagtattgcttctttatcccgtgtgtcctcacaccaccaattctgaggaatcccatctacaaactcttctaatgtatggaactcctcatggtgaaccgatacctcactgaactaaccgggtttatagttcctgcagctggcattacctga

SEQ ID NO: 39016 - DNA, 261 bp, Arabidopsis thaliana landsberg
tcctgcaccctgcagttacattggaaaacaaaacatgttttacgttcgaaagagataagagttgtcgatattttctctgcttacttggctagtgatggctatcagtagtattgtcaacacggtgaaaaggaagcaggggatgttcctattgaactcagccatgaagtagacaatgatcatgaagaatgtcgggtacaaaacgtgtgccaccatattacatagtgtactgtattactaatacacactaagtcttgacatttc

SEQ ID NO: 39017 - DNA, 566 bp, Arabidopsis thaliana landsberg
gcatatgaagattttgtcactgctggatctatagcagcatctaggttttaaaggacttgtgagtttcttcgtgatgtccatggattgagctgccttgtactaaaacatcttatgattctcttctcactgagttagcttgaattttttatttgttttgcagttgacatcagagggtaaagagtacattgttaaagaaggagatgtgatgcttttccgcttcaacgtatagcataaccctgagatctcaatcacttcttcacagaacacgacaggttgcgtttctgcgcggcttttattacattgagattcattgctcttggctttgcaaaatatagtgagatctttcttttatttatatactccaagtaatttttatgatacaaagatgagatgtataattttgcgtagaacaagaaatgacatacttcatgggattggcaatgagaattttatgcaataatcatgtgtatcgacaccatttcattccagcttatatgatgtggcgcatctctacatctggcctgagaggcaagatgcacgacattggatttcttgcaaatgctgac

SEQ ID NO: 39018 - DNA, 487 bp, Arabidopsis thaliana landsberg
taaaaccaaaggcatatgtctaggaattttcgctcttgacctgaaaaacaatttacttttgtgaataaaaagcaatatagcatctcttggtgccaatgtgaaatgtttttcttatcttacttttgcaccagaaaaagtaagtgtggttcaactttcaactgatgacatgaagacaaaatctctatattgtggaactatatggttttgacaccaatgatatacatatactagtaagtagtaacaaatacactttaaaaaaataaaattatataacaacatattcgatctgaactaccagctaatgcagagaatggtaagtgtggtaattacgatccgttacaagttgaattatatatggcaaatggcgactaaaattctcgaaaatgttgagttcatacacttcatacaacttcaattttcttgataaacatgttgcccaaaactcttattattaagatatttatttaatatgcctcgtacctgattt

SEQ ID NO: 39019 - DNA, 487 bp, Arabidopsis thaliana landsberg
agaatggttggattgttccaatgggacattcatgtggttctggattttcccatgaatggtgctacactgatccactcatcctcttggacgctttagggacgaaggactacgccttgaaatgatcgacccgtgcactatatcaagggagattgcctttcttgcgactaataataagggagtgggtctggttgatggggacgatacagtgagcattcatctcatgactgtttcggatcctaacttaaccatggaactctgttgtagtgactcatgtctgtaaacttatgagcgtatctatcaaaagagctttgagagatgcctttctaacaagaatccagcacgagctcgcttgtatgttggaagggatgatctgcgcgaagggtggataaggatttattgtgaatgcactagccaagcttgggtctttgtgacatgacagatcgacatatattgtgagacttatgctgctgctggaggacccggatga

SEQ ID NO: 39020 - DNA, 694 bp, Arabidopsis thaliana landsberg
ccacagaagacaggcaaacgtttggttaacaaaaaaacagttcaagaagaacaacttcaagaacatacccattaactaagcttttctaaagactaacttttagaaatatgaaactgaccctaattgtttgcatttactcttgaccctacatcgccaaccatcagagattcagtgtctttatagctttctgttctccttcatttgatatggatttattttcagacttttgatgttagtagaacagttttggtctttgagtggcatagttaatttctctatatggtcgcccagagtccagactattgtttgaaaaaatcaattgcatgggtctatcttacaaatattaactaacaatcatagggtcaggaaaaatagataattacaaatcttaagggtctacgatagagatgctcaacgaatattaggcaactgttttccattaagtggtcttaattaaggtttacgaacaaaccacctccacttatataattacacagttgtatcaataattttagactaaaatatgtaggattctgttattatcaatcaagtttgattgtaatctgaccttcactaagtaaacccaataagtgaaaatgttcacattttaactgaaaatggacccatttttctacgatgccttcattcaaaatgtttaaaatttccatacattaattaaagtgtccattcattt

SEQ ID NO: 39021 - DNA, 1056 bp, Arabidopsis thaliana landsberg
ggggttcgaatttgatgtatacgtgcgatcctttttacgtttctttttctgaaaagcaaagtgggttgggtgggactatacatttgcgtatttttttaaaaaatgcttagacttgcatatatagaaggaaacagaaaatatatattttaagtcgtcgatattattattcagagaacgatgttacgtaatattaactgtttaatcgctatacatatagaaaatcaagtgtaattcttttaacaaaacccgttttcaatataaacctatatacacatatgtatatatatatatatatatagaaaatgtgacataaaaataaagtactccaaatttgatacccacgttagaatgtataaacagaaaagccataaataaagcttagtttcatgccatgtccagttcttacccttttaaatcgatctaatccattagccctaatcaacttggctttatatgattcatgacgcaatcctttatttggtatgtttcaaattaggtcacacttttaatatataacaaactgcatatatttacatataaacatataaagcgagatgatgcaacaatgtggaatttaagagaagacattaaatgaaaatcacgaaaagtagaattgggtttcttggtggctaagaagagcaaaaggattggtgaatggtgagtgacataacaatgtgctaagtgtttgtttatatgcccattatgttttctttctcatccatcctcacttctcagtgaaatgacccatttgcctttctaatccttttttttcctttcaaattaaacaatgaaataaatatgtaaattctaatggagtcttcttttaagtaatggtgggatgccttttgattctttatgttgtcgctctctttgaccggttaattaaactatttaattagttcataactttagttagcggaataccattaacaaaaatataatttgccaaagtagtaataattaaataaaccactatggtattcattcattttctaattgtagaggttcggaggagtaagtccggaccggacataattaaagttatggtattattgt

SEQ ID NO: 39022 - DNA, 936 bp, Arabidopsis thaliana landsberg
  unsure (1)..(936): unsure at all n locations
tgacttggaaactagactacaataatacacatgcaattttcttttggttttaataacaatgataattttcgtttggctaaataaaattgattattaacattaccattatcaaaagtcaaaactgaaacaaattgtagagttacgacttcaacttctatatataatctattttttatatcaggcgagaaatgtacctgcataggatgattttatcatggccataaccacatcataagttgtgcccatatcttagatttttaaaacaccaatatcttctcgtgaattttgaaactgattgtgataacgatgctgttttgttccgttatctttgaaacattataaaccagtaagacaaatataaatatcagagttacaagttatgtatacacacaaagaaatgtttcacacttataattgatataatatatggatttgtgcacaaaaaacaaacaatgacttattcacatgcaagttttcgggaattgctaactttgcaaccacgtatatgggtacaattataaagtcacatagaatgacgactgcatagacctatattactaaaaaaaagaaaaattgtccattcgatcaagaatgatggatcataatttgatgtatatatacgtatgatgattataaaatcacatattttgggagactcacgtacgccttgaggagaccaaccataaccccaaagctttatctctttagcaacgacaacgacaaggcaccgcttacttctatggaatctttacacaatgtgtgtaataatctaacagctgagtagaatctgctcacactgatactacatacaaaatataattgtatcagtcattcacatgtgaataatgtatgttctaaacgaaacaatgtgtataattaaactgagataaaacacaaataaatatagntgatagtttatgtgtgatggtaggagat

SEQ ID NO: 39023 - DNA, 663 bp, Arabidopsis thaliana landsberg
ggtcttttttttcttttcttaaaattataacattttgatcatttagttttcattgatcttgtaacgtttcctcacgtgtgtaatgggacaaataaagtattgtggcggttcacggtggttagaggtagaagcttcctcttcctcgcgcttacccttcagctttgatacttctctaagctttatcttcaactcttcttgttcttctctgattcctctaaacgtttccattgataagttgttcttttcttgaagctttctaatcacagtataagattcggttatttgggtctcggattctgatctcatcttttcaagttcgtcatttcttttcctcagtgccttctctgtttctttcctctgcttcaactcctcaaaatacacatttttccattgtttagcctacaattgtttttgttatagatcacgagttagaaaagtttgatacttctaagctaaaaaaacatgttaaaaggaacttacatacctttttgagtgcatcaactgcagttttttcagcttcttcgcgcttagatgcctcaaagcgtgctttccttttcgaagcctcactttctgtgacagctaatttgatcagatgatcatcatctataactatacttccagtgcctctagatatgtcgggttgactcaaagaataagacgatg

SEQ ID NO: 39024 - DNA, 644 bp, Arabidopsis thaliana landsberg
ctttcattaaactattatactcaaggaaactggttgcttttctatttcttgtaaattaaaactgttcgtgttatttattcccatgataaaattgtaagagcgtgtgaatcacgagcttaggagagcgtgtgacatcaatatggggaggggcggctaaagactaacgagtaaaggcataagggggaaattaaggactgttcagagttcagaaatgtttttagtctggaaacgacaatacactttggacaaaaagctaaataacattttaaaagcttcatacaaattaaaaatataatcaaacaaaagctaacgtggccaagatagctaattacttttttggaatcattattagagataatggaaattaagaaatcatacagccaaaacaaaccgtagttattatattcgtaacaaaagatgggggaaaagttaatataaaacaaaccttatactagtatatataatacatggctcataatacattactgctaaatgagcaaaaacaaataaaggtaaagttcttaacggctttgtagagataggaatcattaattttagagaaaaaaaaatcttgaattgtacgtttacctttccagaattacattatttgttggcttttaattgttaatcatttttggtggttt

SEQ ID NO: 39025 - DNA, 479 bp, Arabidopsis thaliana landsberg
gcacacacacacacatagaacataagacacattatcatctccaaaaccatcaaagtttaatctacgcagtacacacctttgtaatgctcctttaccatggcttccaaccacaagcatatcaacaccaagcttctcagcagcttcacatatcgcttctttaggatttccaaattccaacacctttcttggagtaacctaatacacaacaaccaaaccaattagttccaaaacacacacgaatctgactaatttcatataagtgaagtcaaaccccagtctcagcacaaattttggttccttcatcaagacgattcaatccagcgttcttatgactctcttgcaatgagtttataagctcaatcgctacaacacataagaccaaaattttcaaactcaatttcaaaaaaatccaaccattatcaacaaaatgaaatcgccggaatccgatgaagaagattacttacgagcggcgccataag

SEQ ID NO: 39026 - DNA, 643 bp, Arabidopsis thaliana landsberg
  unsure (1)..(643): unsure at all n locations
tctctctcgctctatgattaaaagtatataacatactgtattgtatcaatttatattattttgagcaaatatgtgtttgatttagtacaaaaagaaaattaattacgcattaaaatcaaatatagcaatttcaaaagcaattggttagttcttatgtcagtatagcaacataattaaagaagaaatattattatcggacttctcttaatggtttttgctaataaaatttgtaaaggccatgtcatctcatttcattaattcgttaacgaagggtaatttggtaagatcacatacctaaggttgccgtcgtcgtcctctacctccgaaatgtttcccgttcacatcgttttcgttttgtccccaaaaccctaaaaaatcttcaacgcagggtttaacgaatcaaacctctacgacgtcgttttactcttcttcttcttcctctctgggttgcgttccctctttcacaaactcactggtaagccatttccctcttacatcaaaatcctgctttcgcatttctcagcttcgtcgtgatttaatcgtaattggttcaaatctgttgtaaacaaccctaatntcgaggaatcatttgcaatttcctcattttgcagacatcacatcctagagtcgtcccagaatgact

SEQ ID NO: 39027 - DNA, 630 bp, Arabidopsis thaliana landsberg
  unsure (1)..(630): unsure at all n locations
ttaagaaaaaaaataatgtgtcgacattacaaaactgtattaatcatcatttgaaacatttatcatttataaactatgtaacattacccccttaatcttctttccacctaacctttgtatcatttgttggtctttctattttataacattccttaaattattgaattaaaactatctaaattctgttaattactcacttgtaatccattttgttcactggaaatgtaaattttactgtcttattttgcaaaacactcttgaatttttttttttttttttttctggtcaataagacacaaacatgttggattataaactattgtgatcataactctgttcggtaatgttttcaatatcaaatttgatagttggtgattggatttgtcaacatctcttttttttttgtttaatcctttgctaagttaagtcggccacatatatattgggtacgattttcataggtctttcctcacgccagaagtgttgttttattttgttgattgagttattaattattggaagcttttctttcaagcaaagtaaaatgcgtaataatgattagtcacatccaatggttagtcagtctattacacccgtaatcaagctctggncatataacttttttatttt

SEQ ID NO: 39028 - DNA, 342 bp, Arabidopsis thaliana landsberg
  unsure (1)..(342): unsure at all n locations
taacttaagtataagaacactattttttatactgtatctttagcctatacaggggatgtgtatgaaacgctggctcacttgatgcgtcannnnnnnnnnnnnnnnnnnnnnnnnnnnnnnnnnnnnnnnnnnactacgtggaatacataatccttcctcgtataggacgctatgtaaaatccgatatgggagattggactatccttagatgtttgagaccctttccttaccctgtatgactactgtgcataacactgaccgaacagaaagcctgatgaagcaaccgtgatcactcgagcgtaaaacaaacaatagattacagacttatgaccgagattgggt

SEQ ID NO: 39029 - DNA, 583 bp, Arabidopsis thaliana landsberg
ttgcgcagttccagcagcttggcagtcagttcgaggacttctacgattttagatttactcatggggatcgggattgatgagttgtgctgcgaattacgaagtatggatcagcatttgcaagcgcacaacccgcagcgagcgccttcgcagagtaaatattcccaaaaaaaatatttatagtgataattaacccgaaccgaatagccgacgccggcttgatgaaagtatatccaacaaccatttcaaaactctgaccatattttagaccaatgaatgtagatcaattgaaaagctaccgtgaggaaatccgccggcatttgaccaatgaattgcttcctttctgggaaaaccgcgctgtggacaaggagaacggcggtttcattacccatttcgacaatgcaggcaacgattcgggtgaggacgaaaagtcgctgatcgcacaaacgcgaacggtttatactttctcctccgcacaccgtgcgggttatggtgaaggccgctatgccgaaatcgcacggcacggagtggatttcctgatcgacaaaatgtgggacaatgaatatggcgggttttactggctgat

SEQ ID NO: 39030 - DNA, 657 bp, Arabidopsis thaliana landsberg
ttcaatcatttgcattatacatgttgtggtttgatttatactgacctatgtatgtttaaaccaatacttaattaatatattaaagttttttttgtctttaaacctattaaggtattttataccatatttaaaatttcatccttttcaacaattatatatattttatgatatattatctaataaaattcaaataataatactccttgtacaaaagccataacactccccattgctcatgcgatggatctctcctctgttgatggtccaacgattttcatagcttttttttttttcttttaataaatttttttctcaaaatggactttttaaggctggtggggtaaaagagatacatgaataccaaaaaagagagatttaaaatagaaaccctagaaaacaaactctgaagaaggcagtacatgcatcggaaacgcatccgtcatcttccacatccgatgctaacaaggaatactttattgcggacaagactcgaagacaaacctttgggaggagctagcaaatcccaccgtaaattgtcgccgatagacttatctgaaccaaaaacaaacctttcatgaaaggatggaccaccacaaccgatacccagaccctctttttcccaacatgcatgaagagagacatcaaaacttaccttta

SEQ ID NO: 39031 - DNA, 546 bp, Arabidopsis thaliana landsberg
atgtggataaacaatattaagtgataatacataaaatgtttaatttaatttgttaaaaaaaaatttgtgaggggtagggcatcattatatatatgcaaatgcaaagaacaaaaatgaaattcctacaaaaaagaaggtgccacttgtcggccagatgcaaacctatatctaggttgcctattgtttgcaatataggctacaaaaaaccttgaaactatgaatctgattaattatacttatccaactaatcttttgattaaccaaagctttagttaatgctctcgaaaggaatgttgtttacctacgaatatggcccaatcttaaagttaggaaccatcttaaacttacgagtatgcatgaaactctaactgttttgagtacactcaattgtttttgttagtttatcattttaaatgtgaatatgcagtctggtgtaattacttgttttatacacattaataaaagtgtttgatatcaattaatcttttattaaaattaccaaaacaaataaacaattttttaatatcatggtcacctctatcaaaa

SEQ ID NO: 39032 - DNA, 591 bp, Arabidopsis thaliana landsberg
gaaataagcaaaccaatttttttttcttttttaaaaaaataagaaatctactgttattaaattagattaaaagataaaccgaaaaacctcatttctataatatcacattcaaagtttatatatagatttaaccacaattgtactaaaactgaaactgcatttaaaccaaatcaaaggtaatcctttggtttatattatctaaaattcaaaaaaccaaaaaccggattaggtactccagttaagtttttttacatgcttttttttgtttccatgtattcgtatagctatagacatgtaagacatgctcgctaccatcgagccatgggagctctaattgtatacgatattacgagtcacacaacgttcaagaatgttgagcagtggacttcgtggattctttgataccgaaaagctcatgatcatgctcgttggtaacaaatctgatcttgaccatcgtcgagaagtatcaatggaggaagcaaagtctttcgcagagaaagaaaaacttttattcattgaaacatcaactcttgatgccaccaacgtcgaagaatgtttcacaaatgttttgactcagatctacaatgatgt

SEQ ID NO: 39033 - DNA, 216 bp, Arabidopsis thaliana landsberg
gcctgtattttatcaaaatcttttaataattttcatatgactcctgaaccgagttcatttacgaaaaatgcatttgctctctaggtaaagctgtaactgtaataaagtaaaatcttgggtgacaaaaatataacaccgtaagaaagagaaggtaccaatagctgcatgactcccacttatattgcaatcagctgtccaaatggtacactcagagga

SEQ ID NO: 39034 - DNA, 766 bp, Arabidopsis thaliana landsberg
  unsure (1)..(766): unsure at all n locations
gatatgaatctatgttccataattcatatanttgttataagctaaatggtttaaattctgttaaatttctctggaaggttgtcatagatggatattcgaaacgaatttaaacccttttagctaataattagattggtttaatttgaaccggacagaaatgaagcatccaatatcatattcatgtaaatgttagaaaagttcaaactatgttgacttattgctctagatcaagcaccatacacattataataagagtcaagtgttcacatctaaagatcttataataattagtatacaaattgtacttatttaacttgtgaaggttaaaaggtttgattataaaaaatagatttcggttattaactaagcaatcaggaacaagaaaagaaaaaaaaagcgaagtgtttgacaaaaagaagagcatctctccacatgcaagggcttcagagattcaggaagctgatatcgcagtttccaaggtcatctctatctacttgtctaccaaactcactttagattatatattatactaccatatacactgatatgatttgtctacatgatcatctcgttaatatatactatagtttatttacattgatttcgttttaactactcgaactatttttaaatgatcacaagttgaccatattcttttacgcaagctatttctatatgtcaagattgataattggtgccacatcggtgaataaatcatgtttttaaattggaaaaaatacattttgtacttcataagagcgcaatc

SEQ ID NO: 39035 - DNA, 569 bp, Arabidopsis thaliana landsberg
ccttttgtgcatcatcctcagactcaaaagttatgaatcctaaacttttaggtctctgcgtttgctggtccttaataagacgagctataagacagtagcatacaaacgacacaattagttcagacacataatcatagccgtaaaacattcgattttgtgaatgtaccttctgtaatctgaccaaaaggcgcaaacagttgcctcagtgattgatctgtggtgtaagcagagagtcctgcaagagaacagtttgagaataaaaattcaaaaactgagaaaagcagaaaaactggagatgtgcaaagttgtagcatactgctgacgaaagaaagaaacctgaatttgaaacacaagtgagagtcttacctccaagtaaacgacggcgcttggatatagacgatctaggctgtgataatgttaacgagatattaagaaaggcccaaaataaagcccattataatgatccattaaccagtctagtaaagtttcataaggcgccccaataaaaagcaaaaaccctaattcgcatcttgtatttagttctcttgtaaactttgcctcttcgtctt

SEQ ID NO: 39036 - DNA, 702 bp, Arabidopsis thaliana landsberg
ataagatgtataaaacacgtagagacgtttaatataagcgcagttagccgtacgtagatagagacggatggtttcatatactataatagattatcaaaatggcaaaacataatcataactagtcgcattaaaacttttaaatctgtattataaagagaaaatataaggattcatgtgcaaatgcataagtgaacactattttagtattttttcaagacaatcttgtatttttattgatttttattagctatactaaaagatgatggtaacttaaaacgtaaacaagacatgatttttttttttttttgtgcacctacaagacatgaatttaaattgttgaatcaccaacctcctcccccaaaatggagtattttgtcctagaccctagttcgatactcggttaggaggcggtgtcgactttttttggggttttgggtttttatttttggtctgcctaacaatactggttgactccggacaaaacagagtatgtgctttgttctaaaaaaattcatctttctttaatgaataagatatgaaaaccaatggtcttatttaaaatctaaatgccaaagacttgatagcaagtttattttttatctttaaaaatggaaaagagttataatttcgaaaaatgtatcattattttataccaaatttaaacaatagttaagtattttttaagtttactattcattcaac

SEQ ID NO: 39037 - DNA, 1247 bp, Arabidopsis thaliana landsberg
gaaaatgggcttcagagatagctgcaagattgcaatctggtggcctctcttgcaaggttacaagaagcatatttttgttttatgataacgcagaagctgcatggatatactaaatgtgttcttttgtcggtgtttctgtggttaggtacttgacaaagaagcttttcagaagcaaatgttggagaaactcatttggatttgtgcatttatgcttgttggagctcgtcatccaggtgcaagtgttggcacggtggagaaagaatacagagatgaagtaccgaaattccattcctcgtttcgttttagcattcaaaatcgttgtttagtgctaattaattatacattcaggtgtcgagactcatccaagaacttgcagcagctgctgccgcggaaaaaggactaacctttgaagagaacatggtggaaagactatgtgcttattcacgagctgtttctcatttcccaactgctgttaaagaagtacatatatcacttttaccatccttgatctctctctttcaatgcatgtgcatgtgcatcagtatctgtttcacaactagttttctgattattgcagtttaaatggaggaatggttggttttattcactctcagagaaggcgattgcggaagggcaaccggatccgtgtcccctccataccgaatggctgaaagagcttaaagtgatatagagccagtctttctaaattgtgagtatctggattaagtatcattcttacatattttaagttgatgatctgaaactagtgtcaactgtgtacacgcctgagaagtgaaaaaaagatgtaattttttaataaagaaagagaatcagttcacgctttgtaaaatgtccagacttttatatgtgtaaacttgtgcattttcaagaatcaaaacttttctgcttctagactcccatcaattagggaagactagaatcttcaataataaacaaattatgacagatacctatgtagactctttggaatcatcaatagttgacaaagtaagaggcaggatcgtccacgcttgtttgaattttcagcctttgcaggcaaggtggtccaagtaggcaactgtggtttcttcggttagttactatataacacataattctatattagctttagctttagcttcacataacataactcagttttctacaaagaaaaaaaaacagagcataatgagcagagagaagttttccatatataacttgctctctcttctggttctgctgatcca

SEQ ID NO: 39038 - DNA, 793 bp, Arabidopsis thaliana landsberg
ctttatctgactcatcatcgctcccactgattaaccaggttccatcttttgtacattttatatgtgcatcctctggagatcttctagagcttggagaaaaggtggtctcatcggtagtattaccgttgtgccttggagaaaaggtcccatcactggttgtgccttgatcactctcagtatcgtcattaatcacaactacttcacctttttcattggtgtgcattggctcatcttcatcgtcgatggcaattactttatccttctcgtttctgtttagttccaaaccaatatgcacttgttgctcatcaatggattccttctcgttaccaatatgcacatgttgctcatcagtgggttccttcgcgttaccaatatgtaattgctgttcatctaccggctcctcctcgcataaatccatgtgcactgatctatcatctctaaaaacagggtcatttgtttccatgaaaggagttgcactagtctgattctccattaaactcacatttctcagctacacaatccacacaaaaaaaaagcattgcgcattggtatctcaatcacttgattatgcatctttagcctgaaacaaaggaaaagagagtataagtaatcgttaccttctctagtgcacattgtggcaaacacaagtttttcgtgagcaataaatggtagaacattgaactttgatagctttggcatgcccactcgtagttctgctactggaatctaacattggagaacaaacgactataattagaactttatacatcctaatactactactactactact

SEQ ID NO: 39039 - DNA, 866 bp, Arabidopsis thaliana landsberg
acttggacaacaactatgtcgaaagtgaggagaggaagcagtatttatgcatgaaaataatgcaattgagacgaaaggggggaggcagatcaaactataatagatgtgggatgcatcaatgtgttagacatataggtcctagccatgacgacaactttatcgatgaactcatcccgtctaaacattggcggaattaggaggactaggaagatcatatattccatcaccaaggcaaagcccatctatcctctcaacgaatcaaaattagatggactctaacttttacctgttgatacatgcatcctctgcacaacaacgaaccacaagaggagaagctacaaaatctgattgctttgagtgcaccaatcacctctaggataaaatggcaatcctagaagcaatcatttacagcccaaaccacaataacctcgacatagctttgcaacagaataatgtcgcagggaaattccagaagctagatagacaaggagcaccaataacattttataggagaaggtgtctctgagggattcgaatgcagctgctcctaggttcatctatctacaaaccaatacatatacaacaaagaaacctatcagactggtctaattgcagcactaaagattccttattgcaacatcactcactcacaatcacaaaaatctatcaccacaattccttgtctcaaatcttattgatcatcaccatcaagtcataacagacaaacagaggcacatattatccttaaacagcagagaaatgcaatcaaatttcagagaaaaagagaggggttcaaattccaaaatgaagccagatccagaaaataaaacacttaagtcattcatttggagaaaccaccacgctta

SEQ ID NO: 39040 - DNA, 450 bp, Arabidopsis thaliana landsberg
  unsure (1)..(450): unsure at all n locations
ataccaaatatctgcctttattcacttgactcccctcgagctggagtaggcggcatctcgatgttcagctcctgagtccatcacaaaagtacttaaaagctcggttaccacaacatgtttcatatgctcaatatctattctatatggtaaagaaacgggaggcttacctgcatccatgctttgtctgtatagtcttcttctgaagatgagatgggaggagggtgaggatgaatcagcttaggataaattaccatatctctaccaattaccaatattgctcccgcattttgtgcagttcctgctcatcacacacacaatgttttttattcacatgcctattatatgtatgcaaatgtcgaaataaatgaaagtttctataaacataacanatgtaccacagtaatttgtagcagaaaagactggtataagccgtccgtcagcgaatctttc

SEQ ID NO: 39041 - DNA, 2053 bp, Arabidopsis thaliana landsberg
  unsure (1)..(2053): unsure at all n locations
tccagaacttgcagaagctaaagagctgatactccgccttagcagaaggcacttgtaccaagtaacttttttatacaaactttacctttcttttggtgcttatttaggtaaagtatcgtccttctgaagaaagacatgtatgacttcttacttgcagttctgtaacgagtatgcggtaccaaaggacaaaatcgatcatttcaaacctatcactcctgaagatatcatctgtttctcaggtttgtaatctttaacacagcaaaataagaggaaactatttttatatacagtgaggacctttgccatatatacgtatcactctgatttaacagaagcaaacaagcttgacactaaaagaagaagatatagctgttacaaacgtcaagattgatttagctcgtgggagagaaaatcctcttgaatggtaaacaaagtacagtttagcttctctgttttctcaatttcctcattaaagttctaaccaacttatccttgtgcttgacttctttagcatcaacttctataaggtacatacataaaagtcttcgttcttgttatgcagatttgattctctaaatgtgtaaagagaggaaaccttgaaaataacacagagaatctcaataaacaaattgatttttctatggtatttacaggattataatagtgcagagaagtttgtgatacctgaggacagagttagccacttgttaccaacaacatatcaagaaatgatagtgagagtatatgccaaaaaaccagaattggtatgtgattattactctcttttatgattacattactgtttcgttttatttaaccacaaagtaacgtttttatttttctggtttgcaatgtttattctacaggtagaagcagtttctgaggcatttgaaaacttccaaatgagaacgtatggaatcaaagctcaagtactgatgtaactacgtggcttagccatgatttacttcattacatgggttcttgtttctgggggggaattggtgacggtggaagtaataagttttttttttttgttgaatattatatctcgacaagatttgaagaacaaagatatgttcatgtttggttgatctattttttggttttaacatccaatttttggttcgaaacacctgacgttcaggtgatatcggatacaaactcgttcactacgaatccatgcatttctactacacgagtttgtcagaattctctaaaaccaataacgatgcaagtctttcaacaatcatcaaattctttaagtcgtaaaccaaagatatgataaatggtatatacgtaataaaaaagtaacaggttttaaggttaaattagtgaaacttcttttgaaatcttacaagttacaacactacgaaaactcttatgtttggagtttcccatacattagcaacaacgggtcatgctgctttaaagaagaactcgatagcttcattatactgatccatgacaatgttgtgaagaagttgaacaggttcaaggagattcgagtagccacccataatgtcgcgagtcaaaggaggagtgtcctcgtcttttaaccaagcgtgctgagccacagacaagccgctcaggcagtaacatgtgtggtagaagtcacggggtttcctcggcttgtctctgaatccaccgtcagggatctgcgcatacaagtgtgtgtgcttgtgttatacaaatgttaagtgttaacttgactggatgttttgttctggactgaccttagagcacaagagtacatatctctgcaagccgaggctatcaaaaaccagttgcattctcctgttaatgtaggtggatgtatgatggattctgtgaccattcactgaatctgcaaatataagctaactaaaaatttcgttgtgttttgaattatcagatggacttgatggttgagaaatttgattgaataccttcatcgttgtcctcatcagaatcatcatcatcatcactgtcttcaaggtcatctcatcatgagcatgatgtcttcatttgtcgntctgatatatgtgatgaccatgacagcatgatcatggtgaat

SEQ ID NO: 39042 - DNA, 667 bp, Arabidopsis thaliana landsberg
gctttacataaacccctaactaactaatatatccgatgttactgttaaaggacctaaagtctttaagtggaagaggaagtgacaagagattcttgattcttcttggctctagaagccctgtgtcttttcttgaagttttcttgtctgaattttttggtttctatccctatctccatgaatggtctcttcactatatttctcttctctgtctccagtttctcctgtttcttagctaccgccattgctgctgcttcattcttttcctgctgcttctctgcttccctctaatcaataccaaaacaaatcaatgcttctttcagtgaattgatgtattaggattgataaagagagagagagagagagaagacctgaagatcgtggatgagacagtcgagagatttgatcttcctatgaggccaccgtggaatcccaaactctctgcatttctttttcaaaacagtgagaccgaccttgagattccgagaagcttccacgatagtgaggtcaaagtattttgaaagctcttctaaggatagttcagcaacatgtctcgatggtgtcctcttcttcttcttcaaaatctcagtcttagcatctgtgtttttacaataacccccgaattaatcaccaaaatgctttaaaacctggaccttgtaccaaaaaaaaa

SEQ ID NO: 39043 - DNA, 232 bp, Arabidopsis thaliana landsberg
tgtccggatccccgggggagtcctaacgagcttgggtgcatgaaaaatatgaataggcaatgcatgtgcgagatattctgggacccacatgtaggcccaatcacgataaggcgcgtaaaaggactttagggacaataaaggtggccttcactaggtctagggataggatccttagtctggcttatttcatgggaactctcttgctgatctggcccatagggtgtcacatgcc

SEQ ID NO: 39044 - DNA, 574 bp, Arabidopsis thaliana landsberg
agtatggcatggaggtaatttcactcttctgttagtcccaactttagactcattatagtttccaacaagaagtatcgcaagattcattggagctgaggaggccaatgctagatgtactataaacagcttgcttcttatttgccaatcactatggtgcaatggttttaactactcttaatttctttcagagctacaaagatttgacgggcacgtggtggagcattacatatttcgtcagtttctatgtcatcactattttacttctgttgaatttggtgagtttcactgacgccaactcctaagagcttgatcaaacagaggccatgattgttgtaaagaaacttaactctgcttcttagatcgacttataatgcgtgtttgtttcaggttgttgcctttgtcttggaggcgttctttactgagctggatcttgaagaagaagaaaaatgtcaaggacaggtttgttattgtctttgattcgccataaagttacagatgttggggagattagaaaagtaaagaaccttttggttcgtgtttaatcggcaatgttttcatctagggattgtattgt

SEQ ID NO: 39045 - DNA, 521 bp, Arabidopsis thaliana landsberg
ggcttgggcataaatacatccaaagaagagatgttctcttttttcttccactgcacaacatcgcttgcattgagggtcatttgttattcttcgtgaagtaagaatagagcctgtcgccaaagtttttgtgagagctctccacaggaaatgtttgatttttggtgttgtcttcatcttccatatcgcttccttctgttctgtttctcctggaggggggtcaaattccggattgttattaggcagatgagtagctagccagtaacccgatttaactgtatagacaccatcatccatataattccaaccaagcaaatctggtgatggctgactagttagacggagttgaagtattagcctagcatcctcctcatgaaacaggttttcgacaagtgatctgttccatctctttggtcgtgactcaattaactgattcacatgcgatacgtttggagtgattccttcaagacatcgtggggctctttggggatgcgttggtaaccaattatctatccagatgtttg

SEQ ID NO: 39046 - DNA, 626 bp, Arabidopsis thaliana landsberg
  unsure (1)..(626): unsure at all n locations
aagacaagttttgtagtttaccgcgggattgtcctttcgatcttgctcgtggccatcggggatacctcccagagatatactgccagccaaggatgtcacattccaaatcagcatccaaaagtgtatcccagaaatacttcattccccatttccatggaaggagaagaaacttcacagcaaagcttgaaacaatcactcttattctgttatgcatccatccggtagcccaaagctctctcattccggcatccaccaacggataaccggtcctgccttgtctccaggccttgaacttatcaacatcagcatcccaagggaaaaaccgaagatgactcaacaacnnnnnnnnnnnnnnnnnnnggaagttgaaacatatataccgagaatactctcttaaaccgattcccctaagaaaaagatctgcactttcttctccttcactgttcttatctcttgcccatataatttgtttcatccgggcacactggaaaacgtgtctgacgcttatttccccgaaatggagatacggagaaagtagtgaagtagaattcccaacaactttcttgctgntctttgcataatctatcaactgctcctcgatgaactcatttagtaacttatcagca

SEQ ID NO: 39047 - DNA, 648 bp, Arabidopsis thaliana landsberg
  unsure (1)..(648): unsure at all n locations
ggttttttcagactgagaatcacgtccagttacagtcttttgttatcacactctagaaacatgtttgcataagcgtgggggtgtcaaagatggttcgcatagtttcaacatccgctttcacctcacttctctttttacgttaactaatcgactatgggagactagtcttacattttggtcgctaaaactttgtttatgaatatatggattaccgaaaaataagggaccatgaaataactaataaatgaccaaataatatatgatgttaatttttttttacttttcagttttcatataataatgaaataacttggttactctctttcctcgccgtagtctgagtctgaaccctaaaacatcccgcttcgctgctcaggaccaagaatctcaggtaccttgttaactactcgctgtaactattatcgatatccatatttcttcacaaaattcgattctctttcgttcagattcaactgannnnnnnnnnnnnnnnnnngtttatgtcgggaatttggacccacgcgtcaccgaaagagaactcgaagacgaattcaaggccttcggtgttcttcgcaagtaagtcctatctctgtactcaattttgtttcgagccatacgcattatgactccgcctcttaaaaatcgcag

SEQ ID NO: 39048 - DNA, 750 bp, Arabidopsis thaliana landsberg
  unsure (1)..(750): unsure at all n locations
cctctgtgcggatgtaatggctagacaatgtaactatccttattatcatcgggttcttgtgaattgtacttccaattggtacttttcgatttcctgcttcttttgtattatcctctctttgaagcatcgttaataataatacaagaagaagtgtgtaacaaagtgatgaaacggattaacagaaatagaaacagggtgtttagcattaatgggctttgtccataagttgtataggtgaaagtatgttggctttgcttgtctccacaatgcaaccattcatcaccatttcttccagcatgaaatgagctttctccagatggaacattatgtctagctcacactgcataaaataaaaaagagtttatataaatcacaaagtgggaaacacaaaaaacaagagagtctattcgattcgagactactatgaacctatacagcttaccacatttccaaaatgcttgtccattgtctcgaccaaaagatgtatgaactctagaatcgccagctcgttctacgacaagaatcagagagaagagagtgtttcagtatcaacaagcaaacaatttcgagattgatgaaactaagccaaacattactgctgacaagagaggatagtttgcattatgagtcatcatacattgtaaacatgtataatgacatgatatgcataacgattgcttccttatgatctataaatcaatcataaacactcttctaaatngtatgcagctcaatacgaaaacagtgatg

SEQ ID NO: 39049 - DNA, 195 bp, Arabidopsis thaliana landsberg
cagatcccggtgcatgggctcggcttcaaagtaagttacgtgaattaagtatgcaaaatcacttctgactcacagctgcactcagactttacaggatattgcttactcatttaggatttgtgaatcggccattgaattggaagagccgttgaaagctaacatagctgcattgtgtgtcaacttaattggcgatat

SEQ ID NO: 39050 - DNA, 487 bp, Arabidopsis thaliana landsberg
  unsure (1)..(487): unsure at all n locations
aaagatttacacaaatcaaaaatagagttaatatttatacccacaaatatttccttgaacaaaagaggagtgaatctgaaaaatatttctgtaagagatttagatttatgtcttaaaattgtagtgaatctaataaatgctgagttacatgaccaataataggcaatatactaatcaaattgtaaagagttaaacttaacagtaacagtaactgactaacagttaaacttaacagtaacactaacagtgaaattaactttggccaaaaggataaaacaggtattttctctaaaagaaacttctaagaatttataaacgacataataatattcaaaaactaaaaagacataactctaaaacgacaaaacacatgaagaatatttgtctttaaaaaaataaatattatagaaataccctcaactttcgtttatcttctaccgntcaacgccggtgagaaaagacgaagactcgccggtaaaccactttc

SEQ ID NO: 39051 - DNA, 395 bp, Arabidopsis thaliana landsberg
gcccggcaactaaaattattcaccgcactcggcaccccgctggacttctatcatggcgtggacggctggttcgaatatcagggtgtggtcgtgactatcgaccttaccatgaatcgtcaggtcgacacttccaaaaaagccgacgtgattgtccatacgtatgaactcgaggacaagttcgagctggctgcacgggacatcaaagatgcgttcaaatgggcgaatactccatcagtcagaaaggagtcacccccatatgtatgtgttcaagtgtaaaaagtgcggcgaatatccggtggaagaaaatcatttcaagtcatttattaccccagaactgaaagtaaaacttgaaaagaaggacactaccggaagaaggatcatgctggatttcggca

SEQ ID NO: 39052 - DNA, 700 bp, Arabidopsis thaliana landsberg
aacgaaaccacaaagttccagcatgaggatggccagtaccacggatatagcagcctgaaaaatagactaatgagatgcctcgggtaacgcccaacctgcaagacaagagcatcacaatgttacaagccaagcctatccataatgtgatctatatgcaagtgttaaagacatcaaacgagcgaacttgagcctgttttgctgaactttgggagctttcagatttttaggtgattgcctaaaactcttagatgatgtctttgaaacccatacacacttacactggatcttgcaatcaaaacaatgggcctaaacctgaactttttacaaggtaatactcacaggaaagagggaatccaaagcatcccaagcttgatgacggacggcttttgtcgggtacattggacctccaggaggggttaaactgtataaacacgcctttaaccttgcgctagtagtcattctcagttccatacctgcagatgaaatcaaacatttcttataactttgatgacatgacagatgccgaatctatacacgctcctaagggagagaaacgcaccttgaagaatcttcatgagagaaagataatgtatcagcactggttacaccatcagttattgcagctgccgcaatcaaataagaaaaattcgatgagtgatgtgtgtgagacacttgtgagagaaattgaagatagtcataa

SEQ ID NO: 39053 - DNA, 482 bp, Arabidopsis thaliana landsberg
tcaggtttttagaaaaccactttttacttaatatagtatggtgcttaaattgttaccaaatcatgtttagtttccgggtctgttaagaaaattatacttaataaaaaactttaaatcatctagttctggctcctaaggatcatcgcaccgaataagggattacttagtaggattacccaacctataacttaccccaacccaacctagatattgctacttcaaatgtttggtacttatcgatttcagttgaagcgtcacttagttaacgtttctaactagagcttgatctgctcgtacaattctctagaatcttgcataattaagatccatttaggtttgaatctaaaactatgttttttaaaaagtaatcggaaactaaaacctaaatactcccggactaactccctaactactccgaaattattcaaacacctgtgttgaggaattttctctagaatacacccacaaactgtagaggtttt

SEQ ID NO: 39054 - DNA, 588 bp, Arabidopsis thaliana landsberg
gggaagatcccccaaaaactttggcgcctctacattctggaggcttttgagagctttaccccgtagcatggatggtgataacttactgggggatttctcccttgttgaaaccagtttatcaagttgctgcaatatttttgacgccatctcactggacttggtaggaacaaggttaaaacttgaaccaggaatatcctctgcactatctttagatgtatgcgtagttttttctccaccattggcacggacagaaagtgggctctcagaaacaggcagagccaagcttcgagatgaaaggttagatttttgccggatcctccttacagggcccacagatcctatatcattatctaagactgagctcctgcgtttaagaccctaaaaattaagtaaaagtcatgtcaatactttgtttcacagacgaatctgaaaccaatttggtgcatagttcaaaatgtctcaccgattgaaacccttgtctagaaccagaaggtaagctttcttcccatttgcttggagatgcttgaaaaagagacccaatctgtaaaaaaagaacacaaatgaaacagaatgggaagcaaggttgga

SEQ ID NO: 39055 - DNA, 623 bp, Arabidopsis thaliana landsberg
gtaacataagtcatacacatttagttgatcggatagcaaaactacttgaaacagactacgtgaaaaagcaaataatgtggggtcagaacgcttcaatgcataatcagaaacagactacgtgaaaaagcaaataatgtgtggtcagaactcttcaatgcataatcagaaacagactacgtgaaaaaagtaatcactcaatcaatagatcaagcattattttagatatttgctagttaaactgaacgattattcctaactttgagtggtgattcctgatcattcatcatattcgtatagtcattacaaagcaaatggtggtttaatttctgtttgagttattgagtatcaggcgacattacatatatgacaatctctcattaaaatacaaagttaaaacaataattagaagataaaccaaattaagaaaaaaatggatttggtgcaaatccacgatagattccggatatgattacatccacttttgtactatatataatgtaaaaaaagtagacgtaatttagtttagtgtatataattaattaaacgtcacacacacgaaagcattaagcatcgcactctaaaatttaaagttataatattacaggaacgtctaatgaatcgat

SEQ ID NO: 39056 - DNA, 487 bp, Arabidopsis thaliana landsberg
  unsure (1)..(487): unsure at all n locations
ggaggctcatgctctccaaactttagacaagcttaacgaggtatcatctacttatctacttctctctctcaatttacgttcgatctgaaagaaatatcgatctctctgtgtactgatctctgtactgtttgtttaatcttaaacttaaatcaccataagacatcacttcaaatccgattctcgtttatatttaatactcaaaaacgattgaattggggatttctgagtacaatttatatgatcgtttgcttttaaaccatattcaaattttgttgatttgttcattgcagacgcttgagatgctagagaaaaaggagaaagtactcttgaagaaagctggtgcagaggttgagaaggcaaaagaatactcccgggctaagaacaaacgaggtatgacctcttatttattatgactcatngtgtgttgctaatcactggagtacttaaaagctgtattggcgtttttgcagcggctatacagtgtttg

SEQ ID NO: 39057 - DNA, 1732 bp, Arabidopsis thaliana landsberg
cgttgattgaacgcgtagagaatatgaagaagcaatgtatgtatgtatatatgctggaagtataaaataatactagtaaattagtaatagtccacaaaattcttattatataaacacaaatttcaacggtcaacttggtaacccaaattgtcaggtatacgagtgagaattgagaaatgatatgaaaacagctggaaacacaaaaagtcacagactgtcttcttcccgtgagagtctgagaggagacgtcgatctccttttcccttcactttcatacacagactctccgtgtctctggctgctccttccccttgaactttttcctattttccgtgatttcaaatgggcctttttgggccctttttagtcagcccaaacctacctaagcagaaccgtttcttgctcagaaagcatgggtttcttcttatatgtttaatgggttattggatgccggttttagggttttaacgttttttttttgtggtaaaatttagggttttaacgtttcatacatacataggtttttttcactaacagatgaaaacaacaggttttaaatacttgaggatttcaatgttataatagtatgagttatttaagattcaagagttgttcaattcgaaaagttggcatttcactgacacataacgaggtggacaacaatacaagaagatgaaaacgcaagtggtaaaagcgaaagtaaaaaaaaaaagggtcttcttataactaggtttccttcttcttctcatcattggtatgaccaggaagcttctctttgatcttttccataaaccctttctccttggccttgtcattatgaggttcagcttcaggctttccattgtgacctccgggaagcttatcctttatcttctccataaaccctttctccttcccatcctcatggcctatacccgcaggaatcttctcctctgtttcacattgatcttcagcaacttcattcttcttcttcttcttcttcttctccttcttttccccattttcacccgcttcctcatcacttgactgcatatacatatatatcacatcctccatcaacaagtgttattaacatttctcatgcataagaacaagagtatacaattaagcttacagagctgtcagaaaggtggagtctttcagcgagagaaggcttctcctcttccttgggctccttggttacacgggcattctcggaagaatgtacatcttcgggtttcttcttgagaaagtcaaacatcccacagcctttggaagctgcagcatcagcttcttgctgctcagtagaacgaggatgatccgccatcttttaggaaaaacgcaaacaaggtattcaagactcacttttaatttaccaacgagactttcctttgctagctgtgaggactgatgagttacacaaacccctgcgacactgtatttatagtagctctagcttttagtttgtttattttagttacagttaatttatagtaattaacactcggttcgcgtttagccaaggtgttgccggcaaattgtactaacaagtcaatattttaaggaccgactttgatcggaacaaggtttgtttttttcggaaagtgtaataaaaaacatagtacatgtccgaatactctgcgtttcgtcgaccaatggattgtcggtggtggacggtccacgttatccaataaagagagcaaaagcactgtttaaattgtttagacattattagaaaaataagtttgaaatc

SEQ ID NO: 39058 - DNA, 148 bp, Arabidopsis thaliana landsberg
cagtagctgtctgttttgacccggatttgcgatcaacggccggagactgccaatcacaacccagtgttatgggaatcacacgatagacccatgcactgaggcatgcttaactatagatgacgctttgagtgcatactagaactgtact

SEQ ID NO: 39059 - DNA, 1109 bp, Arabidopsis thaliana landsberg
gcaacgcatttttttcaattttaacaagatgtaatacaattatttatatatggttgctcgtcgaaataaagagggggaggaaatgcaaaacaatgtgagccaaaattttcgaaagaagaaatattcgagggcatgcaacacatattagtaaagtccacctattagggaaaaagaagagtcgacctattagtttccatatcctgaaattcaggattcaaacatcaaactattcaaagaatcgtaatctttgtgttaccaataaattacaaatcaattaggataatagaatcattagcgaatacttttattaactgtattttctatgtgccaaattgattaatgggcgcaagagacatgaccaagtggtgtcaaatggatgcgcatttataatgttagtctatatttgtcatctccaatagaaaaggatattccttaatttggaaaatgtttctttcactgttgagctcaatctttgaacattcaagagtttcgttttactcgataaaactgatactaatccaaacaaagtaaaagattatatcattgaaagggttgtctttattaagtatgtagtaaaattattttcatcagggactctcatgaattatgtttttgaattaaacacatttcactgtaaggttttgacggaactagatatatatttctgtacaattttaagaatcctagatgtaatcattataagtggagaacctaatatacgttatagaaaatatccttatgagataatgtacatgtgtaaaataattctacatgtatagtacatatcatgtgtgatgtgtcgtaatcactttggttttcccatagcaactctttactttaacggtttaacctatagtttgatggtacgtatgaactcttaatcatgatgccacagccattttcccaatatgaatccatagttttatgataatcatgaaacgacatacattgaaactgtagtaagaggcttttttgattcatactcaattgttaacaggaccaagggacaaaagtacatttgcatggtttagtttcaaatggttattacatctaatcaccaaaggtttaagttcactaaaaaaacaggaggaagattttgcttttacttt

SEQ ID NO: 39060 - DNA, 790 bp, Arabidopsis thaliana landsberg
gataatttctattactttctggtgtttgttggatcagtgagtaaatgcagcaaagttagaattctgagctgattaggttattcactagttcttctttaagcaagttcatgtgccaactaaacacttcctaccattcttgttgtggaccacagttttctattactggttaacaattaatttcttttgaattcatgcatatacgtttaccctttttggttggttctgttttggttttattgaaattgattatgtgtgtacaatgcagtgtctgtggaatgtgtgaacatatgtaatctaacgaaaggagatgggaatgcaagaagcgattgcagtgctctctcctgtgcttggaaagctccaagagcgttaactgggtttctagctagcactgctcatccacctgtgtgttctgtgtattcatgtggcagaaatggaagaaagagcagaatgaaagctgtaagtatcctttattgcgtctgtttatgtagtccggtgttaagatattaatatgtggcttgaatggatatatcaagctccagaattgtgtttctactatttttgtacatgatcaccttgttcatattgccatggtggcagtatttgcaatctattcttatggtaactcctttggataatgtagtgcgcctggcagaggtatgaatatgaagtaggcttttctgaggctccttactttgtaaatgtgagaaatatcttgaagtccagattatcttgtggtggtcataaaagatgggaactgtattgcgtatcagctgaatcatattgtggagca

SEQ ID NO: 39061 - DNA, 1235 bp, Arabidopsis thaliana landsberg
aatgattttttaggtggtggtcttgtgaaaatgtagcagtagtgactggttcaaaccgcgggattggattcgagattgcaagacagcttgcggttcacggattgacggttgttcttacagctagaaacgtgaatgctggtcttgaagcagttaaatctttgaggcaccaagaagaaggtctcaaggtttattttcatcaacttgatgtcacagactcttcgtcgattagagagtttggttgctggcttaagcaaacatttggaggtttagatattctcgtaagatccttatcgattcgtaatcttggaggatagttctaatgttttcttagatttgaattacatgcatttgtgttgctatgtttttcaggtgaataatgcaggtgttaactacaatctcggctcagataatacggttgaatttgctgaaacagttatatctactaactaccaaggaaccaaaaacatgacaaaagctatgatacccttgatgagaccatctcctcatggcgctcgtgtagtcaatgttagttctcggctaggtagagtaaatggaagacgtaatgtaagaaactctttcactcatatctttgattttttttgaaaaaagaaaatctcgttgaaattcatgaattgcagagactggcaaatgtagagttgagagatcagctaagcagtccagatttgctgaccgaggaacttatagacagaactgtctctaaattcatcaaccaagtaaaagacggaacttgggaatcaggcgggtggcctcagacattcactgactactccatgtctaagcttgcagtcaatgcttacacgagactaatggcaaaagaacttgagagacgaggagaggaagagaagatttatgttaacagcttttgccctggttgggtgaagactgcgatgactggctacgccggaaatatgccacctgaagatgcagctgatactggagtttggcttagcctggtcctttccgaagaggcagtaaccggaaaattcttcgcagagagacgtgagatcaacttctgagggttgttgaatgtttgtaaacgttggaatagattgtgtcgtcttcgtttagtgccatagttttagtcaaaggtttacaaaatcaattgtaattggtaagtgaatggttgtagtcatgatacgcgtcagatttgccacaaaactaggagtttataatttaaatataattaatttttaattgcaattaacaaccgacct

SEQ ID NO: 39062 - DNA, 922 bp, Arabidopsis thaliana landsberg
tagaatcctcaggtgatttcataaacaccttgcagacgcttgtctaccaacaccattcccattctcaagaaccctaaccaaaggaccaaggacacctgatctgatcaaaacatgcctataagaaccaaacccagatataaaaaacacagctttggcagattcttcttgaatcccaatctcagaatcaagaaacccaacaagaacattaaccatatcactaatctcaatcagaatcttaacatatctatcatcttcctccatagcttcattcagcttaaccaaagcttgtttcttcatctccagatctccaatcttcattctcgttaacaaatgcctaatgtaaaacctcatgtcatctttacaagcattaccattaggcttgaacacaacgatcgcagatccatgacttagaatcccagctgagtaaatccgagatagattcctcgtatgtccatcgaatttgcccgccataacatctaaatcgctttgcatcaaaagcttaccactgaaggaaacgttaacgcagcgagtagcgagatcgtaagtgtctttgagagagattagaatggcggagattaagcttgagagagatgggtcgaatccagaattgagatttcggagagaatcgagaccagagtaaagctcttggagtttggttcttatgagttgccatttgatgttgaaggatttgattgagtgagagagtgaaatcaatgaagatattgcttcgattgctttctctatgcttgcttttgatgattcctcacaagcttcttcacccattttggttgataaagtcttcttctttcttgttcttatcaaagtggttttaaagcaaactcatcttcagccagtgaggatattagagggaaaatgatgaaaaaacgaagactttcacaggtaatctcgttgggttatcagt

SEQ ID NO: 39063 - DNA, 589 bp, Arabidopsis thaliana landsberg
ggccaccacctcgaggtcggtcgcggcctgctgctcgtcgagtccggcccttcgtttgcgcaaggcttcgccgccgagcaggatgaggccgttgagtgccaggaacaaggcggtcaggacgggtttgctcaggtacacgcggaacgcgtgctcaagcagcaggccggcgatgccgaccgggatagtcgcccagatgatcatccacgccaggcgctggtcggtattctgcggctcccagcgcctggtgccgggcgcggggctgatgacgtggccgatcgatgcgaggaaggcaccgataatccggtaccaatcacgccagaagtagatgatcatcgcgatcgccgtggcgacgtgcagcccgacaatgaacgcaaggtatggcgattcgggtgcggagacgttcaggtcttgcgcccagctgccgcccaccagcgccggaatgagcacattgtggccgagggacgatagcgggaacagctcggtgacgccctggatgagccccacgatgatcgcttcgggatacgtaagatgcggatcgatcacgtcgccctcgcacgctcgtgtaccagtctcgctgcctcggggagag

SEQ ID NO: 39064 - DNA, 359 bp, Arabidopsis thaliana landsberg
cactcccttgttctaccatggcttcttctgaaacaagaatgaacaaggcttgagttaaagaagaagccatagcaaatggagtgaagttgagagcacttcaagcgagtcttatgcagatgaagtcaagcccatcttccaattacagtctcagagacccttcttcctcttctgctgcttcacctgcttctcgtcctctccctaacctctctgctcatgattaccctgttttcactcctgtaactctctctctctctctcttttctcttttcccacttatcattcttcttgggtccatgaggttcgttctctttttcttgagtctcacttgattgatttttcgacattatgtatgggaattt

SEQ ID NO: 39065 - DNA, 715 bp, Arabidopsis thaliana landsberg
tattcctcaatcaccacatacttctagggtttttaatcgccgtcactaaaattaatctgttaatacgaatcatcaccgtcgactaagctagatctccggcgaaatcttccaaatcctcaagcaccaccaccattactcatcatcttcttaaactcatcaaaattaacgcaaccatcaccatcaatatcaactttactaatcatcttcttacaatcttgaacagagcacttctcacccaaattcttcatcactgaatgaagctctttcgccgagatccttccattaccatccaaatcatataactcaaacgcttctttcaaatcgcttacgtcgtttcgattattacctcctcctccgattccgatttggaaaagcgcgacgaattcgtccagatctatgaatccgttaccgtctagatcgaattgtttcatcatcgttactgtttcttctggtgatgctgttggtgagagagcgcggatcacttctttgagctcgtcgacggagattttcccgtcgccgtttttgtcgaatcgttggaagacttttttgatgtcgtccattgatcctaaacagctacgaacaactccgttcttcgatgacattgttgaagaaattgagattttgagatttgagatttgagagaagaaaaaaaacggttagagtagtgtgtgtgtgaagaagaaggatttggttatgaataagggaaagagagagg

SEQ ID NO: 39066 - DNA, 288 bp, Arabidopsis thaliana landsberg
aatcttttaacacaattagagtaataataataacaaaactgagatattggaacacgtggcagaaatcctgtggtacatagtgagcaatgtgttgtacaaaaacatacaagggacgagctcaagacccatagctgtgaaatttgtatgcagcaagaacattccatgtcgaggaatatcaatgcaaaacgttaaactggtcgatcaaactcaacaagatgtatccaaagcttcttgctccaatgtgaagttggacacccgaggaaatgtttttcctatttgcacttgatc

SEQ ID NO: 39067 - DNA, 509 bp, Arabidopsis thaliana landsberg
gcctttttggctatcgaaaatcatttgctacataatagttaaaaggagagcacacatattgtgatccattcatctatttgcatttagactgaaaaggaaaactcttaacaaaagaactgaaaaccaaaaagttcaaagaaaagaaacccgtaaaaataataccactacttaagaaaatccaaatacaattaaacttcaagaataaacatctttaaaatcatataaagcttttaacatgacaagctttatataaataatgaacgtggactggaatcacgtgtgagcgagcaactttggtttttacagtatctttctctgaaaagattggtggaagaaaaagaaaagttggagtaatgtatgagaaaacaactaaatgtctcagaaatcgaccaaagactgttatttttataaatagttttcatgcatgcaatgcagacaaagtggtccaagtacacttttgatattttgcatctctttgcgtaatgagagattcgacttctttgatacgt

SEQ ID NO: 39068 - DNA, 568 bp, Arabidopsis thaliana landsberg
cagacccttcccacaaacgttcccgactcataccattttgggccattcccacccatgtcgctcatgtatctggggctgttgttcctggcaatagcaagcctggtcggaacaatttaacaccacaacgccaccgatatgccggccatccgggaaatccacttaaaccgaccgctttcccgctccgagacctccgatggcaatcctctcggaattccggtgccacgacaaatgcttcctggtacgagcaatggcagagacaaagtgtgcattcatcgcgattcgcgctgcatctttgtctttctggataatggcgtccgcaatgccaaggtgaagctgcaggacttgcccccattcatccgcttcgtacacaagcttcagacctgcctcgcaggagtgggctaccgcggaactgataccgtccaacaaattcctgataagcgaatttctcgatgcgtcgacaataatgcgatgcagatgttggtcgtgaatcgagaactcatcatcggccacatgttttttcaactgttcggccacctcgcgaagcaaggctgtctcttcttccgtgatg

SEQ ID NO: 39069 - DNA, 628 bp, Arabidopsis thaliana landsberg
accttcttctgacacgtaagatttgtgcaagagatagaaccaagaccagtccgcacgacgaggctgtccaaaacatcatcttatcatatctcaaaattccaaattatatacttttatccgtttttacaaacatcatttcttgatgaatttttacgagacctatttttttcatcgtatgagtatagtgtttttaattgccactaaggtatttagttctgactataagggagtttatttagtactataacaaaattaaagccaaatatagttgttatttacgttgagaattcactttttgcagggagaaatgtactatatgtatatgaagttatatacacgttatgttactttttaaaaaaatgtaatgatgcgatgttaacacatgtcatgatatgtgacaacttcaaaatactttatgttaattattatcaatattgataaagtaaggagctaagtttctcttttcatgaaagaattgatttctcgtgacctattggaaagaaaaataaaaacactaagtgaaggtccatatagctttgcttggtttcttctttgctaaaaaacatcttaagaggacacttttgcttaaggactatcgatttaatctaaagccgctttttgctggttg

SEQ ID NO: 39070 - DNA, 836 bp, Arabidopsis thaliana landsberg
tttggtttcgggatcgacaagtttcggaaaggatctgatttttctatgggatctcccaggttttgccttgagcaagcgtttgtaaggacttcatgttcttatgacctagattcgttgttttagatgtggaatttggtgtttcactaatcgatttattcgatttctctggtttttggtgatgattgatcaacgtgatgatttgaagatattcattgttcatgtgcattgttgtaaagatgttttcaagtttccagtgtcttgattaatcaatcactgtgttatgggaaaagtttggaatcttaactgctaccattagcgtgttggtttgttaaatcactactttatatacttattatggtatgttgcttgtttctgcaacttaactcttattggttactgttggagccttgagaaacaatcagttaataaagtcaattagcagagataatcttgttctttcttttgcattatttcatttcatgaataaatcagatgttagtgttgtctttccctcttctgtttggtcttctcagatggtttttgactgttttgtggcttttattttggatctctagtgtctagaggctgttactgaagagttgattcatacggagagaggatagaaatggcagatgggatatcgagcttttggggtcctgtgacttctactatagagtgttgtgagatgaactacgcctactcatcctacattgctgagttctacaacactatatccaatgtccctggaatcctattggctctcattggtcttgtcaatgcattaaggcaaccgtttgagaagaggtttagcattcttcacatttcgaatatgatac

SEQ ID NO: 39071 - DNA, 614 bp, Arabidopsis thaliana landsberg
caacgcactgatcacaatgaattagatttaaacacataatattcacctgattattatttcggctaattctgattttgtctctttactttattttgtgttgcccgactttgccaaccttgcttccattcctcgcagttcagacatcaaggactatagcatatatagaataaatcattaaataacttcaaccaagcatcaaaagaaagacaaaagttaggttataactaacttgaatagttgttcccttctcgtcacacaatgacctaagtttatctcggtctaaagtaacctccaacaattttctcctttcaagctccaaaccattgtgtatagcttctaactcttcacgcagagtaacttcttgctgatttttctcttgttgttcatccatcaactatacaacaacataaaacatacgaatagttcatcagcatgccactctaaaacaaaagaggtcatggtataacattctacatacaataacataagataggagggggatatatactgaaatatctcaagactaccaagcataaaaaccatgaaaaaatccaactacataagtatttcatgtaaacaaagatcagtcccctctattatattaattttacatg

SEQ ID NO: 39072 - DNA, 531 bp, Arabidopsis thaliana landsberg
gatcaccaggttgacattgcccaggcccgcgaacacgggttgtgccttccagaaacccgttgccagcgcgagcgtggaggcaaccgccatcaacactgtacccacatcgcgcacccggaccaggcgcagcaatgacaccagcgccatcaatcccaggccgacaggcagcgcggcagcccgccacaggtcgttgacctggagcgccggcgtgatgatgaacgattccccttgcgcataatcgcaggccgagacgatgaccagcagcaggaacgcaagcgaagcggtttgcgcgaaagcgtccagaaacgcctgccagcgcggcccgacacgatcgaccagtgccgtcatgcgcatgtgctcgccacgccgcaacgccaccacggtacccagcatggacagccacaggaacagcatggaggccagttcatcggaccataccagcggaacgtgcagcacatagcgcgccaccacgccgctgaacagcacgacgatctcgacgaccagcagcgcggcgcatagcagctcgacaat

SEQ ID NO: 39073 - DNA, 670 bp, Arabidopsis thaliana landsberg
agcccacggctagatgccactctgcagccgcaagcccggcatcatttctaagaaatagtcattatacagtgatcagtgtactagtgcctagttgttaagcagatggttcagttgcataatatagctcacctatatggcataagtacagcaccagcatgacctccattgccttcaaattccaccttcaaacttgctggagcagcaatggcggttacaacaccgatatctaaacctgtggtcaaaaaatgatcttattaactaaattgaaagagagaaaaaacacaaaattcttcgacgcagaaaagggaagttaaccagaccttcgtcttcaagtatcggtccctgttcaatatgcaactctataaaagcaaaataacttcctttcttcaagaacacactcgataagtcgtcatctttgtcttctgcgtatcctgctgatctagctgcttctataaaagacacattttggccatcaacaactgtagtctttagtgcttctgcaagttctttgcttccagcaagcaagcggctatatcaaaaacattgacaagtaagacaaaaggaaacaaagcaacgatcttttctctgttcataaagatcaacacaagggtacctttctaaacaactgatcccaaatcgggtcggttcctcagatgtgaacaagattatc

SEQ ID NO: 39074 - DNA, 452 bp, Arabidopsis thaliana landsberg
  unsure (1)..(452): unsure at all n locations
ttaagaatcgacaccggataacaaaggtctggatcttaaccgtgagagtgatatggcgtatctctgacgacgccaagcgctggtcctgctatctacccggactccagaggacactggtagaggtggnnnnnnnnnnnnnnnnnnnnnnnnnnnnnnnnnnnnnnnnnnnnnnnnnnnnnnnnnnnnnnnnnnnnnnnnnnnnnnnnnnnnnnnnnnnnnnnnnnnnnnnnnnnnnnnnnnnnnnnnnnnnnnnnnnnnnnnnnnnnnnnnnnnnnnnnnnnnnnnnnnnnnnnnnnnnnnnnnnnnnnnnnnnnnnnnnnnnnnnnnnnnnnnnnnnnnnnnnnnnnnnnnnnnnnnnnnnnnnnnnnnnnnnnnnnnnnnnnnnnnnnnnnnnnnnnnnnnnnnnnnnnnnnnnnnnnnnnnnnnnnnnnnnnnnnnnnnnnnnnnnnnnn

SEQ ID NO: 39075 - DNA, 766 bp, Arabidopsis thaliana landsberg
aacaatcatatatacctactaagaaaattatatagtatatagtattacaacgttcacaaaaatcataacctttactatagataaacgggttttaagatggttaactctcattctctagatgataaacatgaagtgatgcaacacacttgtaatagaccaagaatatctcatcctaaatatagtctgaaagacggtcacgacgtgttttttcttcatcgtaaaagcggtttttctggtcgaacaattcaagtcgtctagtaatccagtccggtaaatctgagcaaagccagagagcttcacctgtatctttatgcttaaagtcgggttgctttgggttcttcttatttctcctgttgtcccaccaatcgtatggattcgaaaagaagacttgccacaagtatatctcatctttcttggattcttcaatatcatcctctaaggaaacaccaaagcacacaagtagcaggcaatatttatcatcttatcttgtaaaatgtatacaacattcaaaactaatgaatgaaactttttataaaccctaaggacacaaaaccagaagatataaaacctgtttcagtgtgaattcagcttggtacaaggttcttttaatcaacgtggattcatattcactaccaatagagacgatgatacgtagaagagataataacctgttttcgtttttgggtttttggatatctgagaatctaagacgtgacttggtggagccgcaacataattcacttctgccactttaacctgcaataat

SEQ ID NO: 39076 - DNA, 384 bp, Arabidopsis thaliana landsberg
acctatgaactgtacgggtcatcatgaccggagccattgatcacggagccatctttcctattgaagattactattcaattcatattgaggctaacgtatcatcaccattggaggaccttcgagcactttgtatataccgatttagggggggcctcctttttctagggctccatacttggggactttatgaacagaacgacgccatgcatgctaccggtactccgaggaaacaaaaatcgatcgctccttgatcggctcaacggatactggctgctcatgggagaacctcatatggattggatgaactgatatctgagacaagcgctccatcttttaatgctggttgcaggatatgaggaccagacgtggtatatgctattgatg

SEQ ID NO: 39077 - DNA, 855 bp, Arabidopsis thaliana landsberg
ctcaaattaccaataggacaatttaatgattgatatctgtgtttttttgtatgtacgtccacttcttccttttaaggaccttgtcacaacgaacttacaactaggtaagatactaccctgtgaatcaatttaccataaatatggaaacatattgaattttagattaattaatttaattaatttcagtgatatagaatcacaatcgaacgatagcaaaagctatcatgcaatctttgtataacagagaatatttttttttaaagaaagcttttaaagaagaaaataagttatagatcatatttcccttagttgaaagacgtttagtaaaacaaggcgatgagtcggtgacttggattcaaatgaaatctatatagttacattcgatacaaaaacaattacaagagcttttaataaaagcttagcaaaagtttaaagaaacgaaaacaaatctgcaaaggtttcattattattcctccctgccaaggtttatttttcattattcttttacttttgtgttaaggttttcattttaaatttatccatcagttgttaggtaaaactaattttagtcaaagtaaattttccgaaagcaatatatatttatcgcatccctaacgatcaacaattaaattagacaaaaaaacttgcgacactatatatatttttcaccgaacgaggtgtgtgatttacgaatgacacaatgcataagcctttgcaaacctgaaaacaaagcttaatctttttaccagtgccagagatgttttatttagactattaagatctaacacacttacgtctgatttcaaacactaccatacttactaaaatgtcatattggtgccaaacatccatctt

SEQ ID NO: 39078 - DNA, 908 bp, Arabidopsis thaliana landsberg
  unsure (1)..(908): unsure at all n locations
caatttaatttataacctttgattaaaactaagttgtaattttataaaaaccaaataaaaattaaactgattaagaaacaaagtgaagcctattaaaaaaaaaaaaaactaaatattcattcacttgattaaaagacgtatatattatcatctatatcgtttatttttaatagattggagcctcagaacgtcaaaagtgattttatatatgatgagcatttctaaatttttgtatactattgttgaacataagtgaaaaataaattatgcataagatgaacaaatcacaaaaagaacttgagaaatagtctaaaaaatattacgtctctatttgtaatcacggttatcgagtttaaaaatccaattagcgtaaatgtaatgttttcaaaaacattgcaaaacttgaaaacaaattgatcatatgattctgaatgagagagaccaatcaaacctacacacaaaaaaaaagtgataggcggccgagctaaacgcagtttaggcagctgaggaggagccaggaggtaacaacaaccattagagatctagtgacaggttcattcactcccgttcaattatccatctcacacttgctctttgcatcaacttatttgctatcttaatagattctaaagtgtattgattcatgttcaaagaacaatctttacaaaagaaaggaaaacagcagagaagataagaaaaagagatatccacgaaacatataatgtattgttgtaatatagactagttaatggtctccttctcctttccttttgccttatagtaccagagcttggttggaatagcaaaccatgtaaccaacaaaggaagatgctagcgaggtacaagaacaatgcacagtttcttgatatgacattccttggagcanaaacagtaatctccaataccag

SEQ ID NO: 39079 - DNA, 2001 bp, Arabidopsis thaliana landsberg
  unsure (1)..(2001): unsure at all n locations
atgattacgtaaaacacagagagaaaccaatcacaaacagacgagaaaaaagcatgtgtaaaattcttcactctctcgatcacaagtcacaacacaagacttgagactcccatccatatatacactttacaaattatagatatttcattcgagttttatgggactataaaaagagtcgtaaaactcttgtctcttattgcagtgagaatgagagaataggttctgaagactaaatggtctgatctttagagaaggtaaggaccactagaagctacctcaccaactccattagtgtcaaattaatccaaggccaacagtcctgaaaaagtctcctaactttttatgtctgcaactgtatatgggacatctctgattttcttaatcttgattcttgagttaaagcgaaaacccaaatatacaaatatgcatgaaacctaaaccttcaggaatggttcctcacattaagcatcctttgagttaagtatagtccataagactgtttatggtttaaattttaatatttgtgtgtttgggcctcccaaagattgttggcagaaaagttgtcattatcactggaccaaactcgcatgctcaatatttatcatcaccagttataattacatacaccgactgcttttttaattttattcattttatattctctcggcctcatggcaccgttacttcccgcctcacgttgacgatatatgagagaatattttatcatcatatcatagtgaagataatagcacaaaatcacaacacaagtttttggtaagtaatgatcgtccgctgtaatgatcgtccgctcaatagggttattggtaagtaagaatgaacctgagctataataacttgatatcaaaatcgtgtgtgattgtagaaaaaaaaaatcgtataaatgattatttgtttactttttgtcaaacacttatatataaggtatttaaaactagatataaggtattttagactggtaaaacaaaactaagaaaacaattatatgaactaaatatggacgacaaaaaaaaaaaaaaaaacataagaaaagttatttttttttcttttgtcgtccataattatttttctgtttgaacacacaaaggcgcacttgagagtttagaagtaccatggaaaatggttatttgaggttaaagatgaaaatgagtaagaagcaaccatataaatatatatccattctaatttggtcccatgaatcaaattgaaaactccagaaaaggaagactatttttaataattttgtgttatgttgaccttttgtgacttatgctcatgctcatgcacaccctactcgtctatattgtatattgcttttagtaatataacacctttttttttttgttaaaatagtaatataacactcaattgctttgttttgactttaattaatttccatctctaagagcatgcctttcgtgttccttaaggctaattgctcactaatttatgctgcttttgaaataaagtattatatatatatatataatgattaacatattatcaacttttatgaaaaaatcaaaacatattaagcaactccttttaactcgttgttgtggtcacaaactgtaacaagttttcttcttatccaatgtggaacgagttagcccaaaaaaaagacttgagagaaagaagacaaatatgaatgttttatgtcttataaatggaatgtaaaaccatttcaatagaaaaaaataacaaaaaaattcttataccaattttcataattaaatcttatcccgaatcccatttgcctgtaataatgagacttttaaaagtttttattcgagaagcagtgattcataatttcaacgatgtcgagaaaaaaaatgtgtataaccctaaataatagccaaaataagaaaagaataattaaattccaaaagaaatggttaaaaaagcgaattaacgaattaaattcgacatttatatttttgcaaccttcccttcgacgcanacatttctcttttttttctctaa

SEQ ID NO: 39080 - DNA, 673 bp, Arabidopsis thaliana landsberg
tgtgaaattgttagatgagagcttatgttttgttttgtttttcatagtccaatgatagtagtctctctagtatcagtttacctttttatcaatttcttttttgatatatattttttttgtcaaatttttgaaggaatgtttgatgtcttccctaaaagtttcttattgtatcacacattattacacattgaactgaatattgagaggatatagaggaacgatcattgctaaaatatgttatgagtcaaaatttcaaattcatgtcattttatattgtctcaaactatttttttaatagcgattgttttttttcttttcgaaaaccattttcgatttttttttaattaaccgtacaatctttttattcggtcttttatgagtcaaattgttttacatccattgaatgtcaaaaatatcttaaatgtggaaaaccagagtcattttaatcttttttagagttattttatttaattcaaaaagatattcccaaatatttgataatagattttggaacatgcttttttggaactttttttaatcattagatgtatttttgttgttgtgtggatagtaaaaataatcataattattattattatttttttagagttttcttgtatttgaaaaaaacatttctttggtatttcatgtaatttttaacaatttccaagtt

SEQ ID NO: 39081 - DNA, 192 bp, Arabidopsis thaliana landsberg
aaaaaccggccctaaaagaagaacggatagacccccgggcgcgacagcagcgggcaacttgatgattttttcggttgatgaatttttaacagagtaattgtttttaatatatttatgatttacaaatctgtattttatatgtttttcttatcatatattatgtttaaaattacatgtcatgcaattgattat

SEQ ID NO: 39082 - DNA, 292 bp, Arabidopsis thaliana landsberg
  unsure (1)..(292): unsure at all n locations
tcccacgaacttgaaataagtagaccatgcccaatccctgagccggggggagaattgtacaccacaaggagcccgccacgccagaaaagnaacaanaaccaaagagannaaccaccacacgacccncaaaagngaagccacaanccaccggccacgacaagccccacacaaagccgaggcaggcccgcccgaaaaaaccaacaccaaaccaaancaaacaannccacagncacaaaaancaaacaaanncccccacaaagaaagaagaaaaaacgaccccacacaagagaga

SEQ ID NO: 39083 - DNA, 2446 bp, Arabidopsis thaliana landsberg
aattctagtgatgaaggtaagctcttccaatcctctgttttgttaagaacgctgcccctatgcaattctaagttatgcatctccttgttttgcttactcgtggaaatggcccattgactctatgaatgataaaagattctgtctttggctgtgttgcagcatatgtggcctctccttaaggctggtggaggtagtggaacagatagagaagttgctgttgtagccaatttaagcgctcgagttggatccattggagataaccgactaacaatttgtttttttggtcaaacaattctttcagtcgtaagctagaatattacaagatagatgagattaaagaaatagtcccaaagtgcaagcaacaaaactaaaacattaacacaaacaaattctaaaatagagacacaaacttaacaaagcttgatacaatgaaacctcaatgaattaatactcgatatactaataccttaaaatattttttctagttctaaattaataatttaacctaaaaatatcatttctataaattaataattacgataatttaatgaaatttagtaaaccattaatctcaatattcttaatttatagaggttttactaaattgtagaaacaactaattcgagtacatccctgaattaataaattttagaaatgtgaattaacgaatacttttgttcttgtgaatggttaaaaaaagttacttatcaagacaagtatgaagtatcacgtgatcaaacgtttaatgacaccaacctaatgacaatttgtttgatttatttgtcacctaactagagactctctcacagtcaacgcagcttatgtgtcatagtaagactttttgtctactatagtagaaagacgaatttataacccctttaggttttttctaacacacgcctctaatctccgcgcacacacacacaccctcacgaagaagaagaagacgaagaagaatcaatggcttctgttatctctccctctccttttctatgcaaatcatcctccaaggttattcatctatccttcatttcttttctctctcgatttcacattttctcaatttcttataggttttgtcgattttcgcagagtgatttggggatttcttcgtttcctaaatcttctcagatttcgattcatcgatgtcagaagaaatcgatctcacggaagattgtttccgttatggctcctcaaaaggatcggtctcctggaactacaggatcggtataagcttcttcttcttcttcttctttctctctcgtttgattttacttcaatggttttgtgtgttggattttatcaggtgaaaactgggatgacaatgacggagaagattctagctagagcttcgcagaagtcattagtggttcctggtgataacatttgggttaatgttgatgttcttatgactcatgatgtttgtggtcctggtgcttttggtatcttcaagagagagtttggtgaaaaagccaaggtacgtattcttcttcttcttcttcttcttcttcttcttcttcttcttcttcttcttcttctgtaattatacaaattgagaagagttttgataggtttagtttaggtattagtgaattggtgatcacaatggttgtttagtgtaacttattgtgattgtttacttacttgctgaaggtttgggatccggagaagattgttgtgattccggatcattatattttcactgctgataagcgtgcaaaccggaatgttgacatcatgagggagcattgcagggaacagaatattaagtatttctatgatatcactgaccttggaaattttaaggtatgatggtttgaattgattctgttttgcttgcattcggatgaagtttaatgcttttttgtttgtttcactcatctgtaggctaatcctgactacaaaggtgtttgccatgttgcacttgcacaagaaggtcattgcaggccaggagaggtaacgatctctttcactggatatgattggctttcttgtgattgaatatggatttgtttgattatgttcgaaatgatgtgttttttctattataggttttgttaggaacagactcacacacttgtactgctggagcatttggtcaatttgctacagggattggaaacactgatgcaggttttgtgttaggcactggaaaaatcctccttaaggtttgtagaatagctgattcctttgattctctatgatatagttttattcagtgtgttaaatggaaatcagtgatgcctgtttcaacttgaaaaaggcttgttagaatagtttccccctctccaaattatactgtagtgtctgaagctcatatcctgacttcgcaggttccaccaacgatgaggtttatcttggatggtgagatacctagttatttgcaagcaaaggatctgattttacaagtgagtgtgatatgttttactgcatttatttcctttgc

SEQ ID NO: 39084 - DNA, 480 bp, Arabidopsis thaliana landsberg
actactaatctgatggcaatccaaccattcctaggcacggccattgtatttatatacggtggaccgtaatgattatatctcgacgacggatctctatcacttatgttatagttcccaaaccctactccaaccacatagaagctaaaaccatggagatgcataggatgagcgagtccaccaccaaccaaactagtcccttgaataactagctcaaccacttgaccgaactcaatcacctttacctcagtcgcgagtctcggagtttccaaaaacaatggctgattttctgcggtgaaattaaaaatcaacggtggaaactccggaaaccgcgttccataaacgcctttaatgtgatagtaataagcttttagtatgtccacgtgacttggtgtgataaacgatatgttgttcatactcgctgctaatctcgacccatttggaccttcgcacgagttttgaggacacatgcgaagatttatt

SEQ ID NO: 39085 - DNA, 1052 bp, Arabidopsis thaliana landsberg
aggccagatatggatgtgtagtgttgaagtctgaaccaccagataatagttttgtaatgatcggtaagcacatccccatccctagggcggggggtgaaaattagtggtagatgctgagaaggtatttctagttttctaaaatacaatagaaatacttgaagcgcaacaaactatcatgccaataatcatttacgaactccactttcccgtatgaatgcactaaaagattctaataaattagcacagagcctttaatccctagattctgctttagttttgtttcactccacacgtcatcagcaatctacttttacagtgttttaaaaccatggaagaatgagaaatgacataccgtgtcatcaaagccatcctgaagataatgataatactcataagaaccttggataatagatgccacaccctccgagactgcataacattgcacattcactaaacgaatcgagagaccgaaggatgaacaacggaaacaaaggcatacaaatagtactaacctccgctgctagggattccaatatgcacatctttgagcaaggtggaacctggcattgcccatgcaacttaacaattagaaccacggcaaatattgagacacagagagaaaattaagaaaacaggcaaacctaccccttctcttcatgttactctttgagtcatcattcacagacaaatccaaggcattagcaattcttaaaagagggcgatccagtggcagaccaagcctcaagtgtagcaattttctaacatcgactgcaaagaaagtatagaggtagaaccatataacaaatatcataaatcacataagggttgaggctgcaataagagtttacaaaaggatcacagttttgtgtggaggtaatggttctaagacactgcagaatgataagtttgctacacaatttattactcatgaactgtgatgtattaagtaagtttgccactaaaagttctgaatcttgcagatagaattatctacccagcatagtcttttaacataactacaattattaccctgcttcaaatctgtctctccg

SEQ ID NO: 39086 - DNA, 588 bp, Arabidopsis thaliana landsberg
gctgacgtcctttagtataatcccaaacaatattgttctgaatcaaacagttttatgtttcaataatttattcaaagaacctacatttgggaaaacatacataaaatcaacaaaatatcgtggagaaatgtaataattgaaatttaatgattttatatcaaccacaaaagaccaaacccaacaaagacgatgtcgtgctacttctttgtcctttctcctgccacaagataaaaaatgaacagagacaaacaacgtaccagaaaaaaaagtttaactattcttaaaaatagtttcaactccaatccttaattgttccattaaatggattctgatatttttctctcgtcgctccattagctacttctccggtggatactttagccagctttttttcgagcgtttatccttacgtgccatttcaaaggtctaaatctttctctttcttgatacatgtaagaagaatatgattggtctgtgacaagatctaaatgaaagctgatgagaaaccttccttgggttctgctcttattcctttctcttctgaatcaaggaaaccaaggttttagttctggtttaaaagtgaaaaaa

SEQ ID NO: 39087 - DNA, 436 bp, Arabidopsis thaliana landsberg
  unsure (1)..(436): unsure at all n locations
taaaacgcattgttgtggacattganctcatcatactcgccaactctaacataaacctcaactgcgtgcagattatagtggattaagctgactattgagcaaaaccagctgacaacatgtacctaagattcattttcaagaactatagggacttctaaaatacatatgctaccaatgacattcctaaatactgagaaaataatccgaatatgaaaggaaacaacaagaagaagagcagcatcataaaaaggaacctgaataaaagcttcaataggttgacaggcaacagacatatacatgccagcgataacgacatgtagatggactggcgcatacaacccacgagcaataggagtaccgtactttcgagttgcaccgggctgcagagctcctaatctgaggataccagtacggaccactaaagctatgattttgc

SEQ ID NO: 39088 - DNA, 664 bp, Arabidopsis thaliana landsberg
aatatatacactttcttactttaggtcaaccctatagaagtagaactagtctatacatagttattgacattgtgtgtgtgtgcgtatatatactagtacatgattgcaatattgaataaatattcttgtttcaacgaccagggtaaatataccattactcattatgaatcatttcaaatagtacacaattacacttattgtatctaggtgtgtgtttttttcagagatttgcgaaacaaatagtacatagtgcacttattatatgtgtaacgtaaaagggcaaaaataatcgattttgttatagttttgctggaaaaaaataatacatgcagtttacaagattaaacataaaattaaaatatttaaaaatatattttgttaattgacctagtagttgtataatgcatatttattacgtcatgtggtgaacttaattttaagctattttccgtttgcataaatatacatagaacccaagaaatgtagcatatataagtagtctatatatgaatataaaagatgtacttgaaagaagaaaaaaatgtgcagaaggaggatacggagcaatcgaggaagggataaaaggccttgaagttgggattttgataaacacgttggtattacttatccacgggccatgttcttccacgaggttgaccactta

SEQ ID NO: 39089 - DNA, 242 bp, Arabidopsis thaliana landsberg
atgggacatgttgcggccaccccaatgtagacgagtatggaaataactggtcagacacaggtcaggaaaaacgatgcgggcctcttgtggcaacgttcaccactgaatcacagaagacgtgccaaagttaagccgataacaacaatcccagaaaagcaggataagtggtgatctgctgacgatgagaggacgaaactactatcgatacagagccttctgggaggaaccgtatggcgcataac

SEQ ID NO: 39090 - DNA, 3519 bp, Arabidopsis thaliana landsberg
agcctgcaggtcgactctagaggatcccctggtgggctatttaccttaaacatatttatattgttcttttctctttctcttttgtttgctttgaattgggttacatttattgagataacttgtattatcatatggtgggttatatttattatattgggttatctacaatctacttagaaatatataaatcgagattatgatgatggtattttttttttgttacatatacactcaactaaaagatttacacaaatgcataagctacatcatattttattaagaaataaaattgacaacaaaatagaaaactatattatcgtaagcaaaccctaattataagtacctactaactaagaaaaaaaagaagtagaaaattagaatctgaacccatcaaatgacttttggtaacatgcatgtacctatgagactgtaaattatcattaacgttgtatcacacatggagttaatttcatgtggagttcattcccaaaacgccaaaagagacttcatgtggttgaagacttgaaggtttagtacagagaacaccaatagacaaaaagactacaacacctcgattttgtttagcttagtctggttcaaaaatagacagtaatgccaaagaccaaaccaatcacataaccggacgaaagccagtggttatacttatactactctacgtttcgagatttggaactggattagtgaaagaaaaagataaaccttggggcttcatcttgcaagcgtattttagaggaacaatggcaccggtatggctacaaaggctcacaatagcaggggcatgtccataataactccgcccttcgtcaacaagaaccactgggtcctgaggcctccggtgccacaccattttctcgggtaccaaatcattcacaccggctttttcccagtaatgagtgccgcgccagctctcatatttgaacacaccacataaccgagctttatgaccactcggacccacatgaacctccttacatcgtttgcaaacttttgaagggtaaacaagcaatagtttcttcacaccagctctcactttctcccacgccataagagcgtttgccccaacatatttgagatctccagcgggtaaactcctgatatcttcctcagagatttgcgggttatcgtgaatttccgaatattgaaggatttcttcaggatggatggctcctgcttgacaacatagttccaagattgcgggaacacgatcataatcaaacctctcttggtgtctgataacaccttgagagatgttgtgtaagtgataggattcaactggcacaagtatatcgtttctggaacctggaacccattcgtgtagcctattgttaccacgccgtatataactacgacatgtctcaatcaaatgtccttctttgccaacaaacacttctgaacagaatctgaaaagtttctacaagcctcagcactaaagcagagtctttttatttactaaactcaagaagaaaaagaacttgaaacttacttgcatgtcaagacaggaaacaccttaagaagagcggcgatgttactgattagattctttctagctataaggatttcttcagctacaggaacaatctctttaaccgggtaatctttagctcgattttcgattctctttagaatcattggccggagttttctaaggtcatcaagctttaatttgttgtttcttgaagatgtagttgagtaactagctctctgaaatgagctcaattttctccatagtttatgtctccaattcgacatagcagagattaatctacacaaagaacaatgaatcagtgaatgtatattgaaaagtacataagcagaaccatggatttatactgatgaatcgaaagtactgaattttcgataaattagataaaatcagaatcagtaacatttcgtcgagcaccttatgtgcaatttcaacagagagacgcaaaatccagcagattcgaattcatgatcgtagaaacaacacagggacgtaagcagaattagctgtgactcattacctagtttaccaaggcactcgatcgcattccgcggagaaaaattgaaggcgtgtgttttccgagcgacggcgacgaagaggatcctctccacgagatggtggactctctggggactcgccgtaaatctgaaacccattaaatggcttttattttgggccatacaatatgggcctatacttttaacaaaagagcttttctgctttgatgattgttttcacgtaatacaatttactttttggtttcaagaaattccataacctgaaattaaataattcgtataatctgtaacgtctttaataaaaatctttatttacatatcttgttttctgctttgatgtttatgactttatgtaattgcttaaaactatttatttattttgtatcatcaattcattaacatttttatttgttcaatagcctacctgttttctattgtttcagagaacaaatttaataaaaacttattaaaagtctttattatttaaatattttacaattcataaatttcatagatttgctaaattgttgtgatgagaaaatgggatactataaagtagtagtagactagtagttagtatagaaacgtttaaaaacatacaacaaacttttatcatctctttttgtgacaggcccacactatcaattcgaaaagtctaaacaaaagtcgccgtcatgaaagtagaacttgtgttcataccatcgccgggcgttggccatatccgagcaacaacggcgttagcaaagcttctcgttgccagcgacaaccgcctctccgtcactctcatcgtcattccttcacgagtctccgacgacgcttcttcctccgtctacacgaactccgaagaccgtctccgctacatcctcctccccgcccgagatcaaactactgatctcgtatcttacatcgacagccagaaaccacaagtaagagccgtcgtgtccaagctcgctggagatgtttcaacacgttcagactcacggctagctgggattgtcgtagacatgttctgcacgtccatgatagacatcgccgatgagtttaacctctcggcttatatcttctacacgtcgaacgcttcttatctcgggctacagttccacgttcaatctctttacgacgagaaagaactcgacgtaagtgagttcaaagatacggagatgaagtttgacgttccaactctgactcagccttttccggcaaaatgtttgccttcagtgatgctaaacaagaaatggtttccttacgttttgggtcgagctagaagttttagagcaacgaagggtattttggtaaattcggtggctgacatggaacctcaggcgttgagtttcttttccggtggaaatgggaatacaaatatccctccggtgtacgcggttgggcccattatggacttagaatctagcggcgatgaagagaagagaaaggagattttacattggctaaaagagcaaccgacgaaatctgtagtgtttctctgttttgggagcatgg

SEQ ID NO: 39091 - DNA, 483 bp, Arabidopsis thaliana landsberg
ccccaaacccaaaacccaaaaccccaacgtaaacgagagtaattgaaagctcactaacaggtgaacctataaaaggtcattgattttatattattgagatttatacaaatcaacaatggatcttaaatcgttaaaattagagaccaaatcgtattcttccacaaaggaaatcgagacaagtctcgaggatttggaagtgccagtcatgcccctttctgccagtttgaaaaggaaccgatgatttaccaatttaagcatcaacattaagaagagcaaattcttgcccaagaaaaagttcctactcgaggacaaatttgatattctggaagttctaggagctggagcctactcctgtggcaaatcagttatcgagaaagctacagacagaaaagttgcaatcaaaacttgaacaggtgagaccggtagagatattctcactaacgaataccgtttgcttaagagactccacggagatcatattat

SEQ ID NO: 39092 - DNA, 960 bp, Arabidopsis thaliana landsberg
  unsure (1)..(960): unsure at all n locations
gtaaagctttaagttttccaatggtgatcatatattgtcttgtaaggctctactccaatggttctctcttaaatattacactatgtgatacacacatataaatataatttgtattcatgttattatttcatcatcaacaattatatattgcttagctcaaccctttattcattcacttagtttcaaaaaatgacattttctgatcaaacaatatgtcaatttagtattaaaaaattattcaaaattgataactcacatgatcgcacatgtgtcatatctattaattagagattttttcatgtataaaatcattataaaaaattatataatattaattagaaatgttgcttatgttttgcatcttgcttatttttacttgattttttgtcaatacatttataaaaaaaattatatatgtttcttattaatacctctaaagttatgaatataaaaatggcttattgcttctatagccatagggctaaacttcatttcggcaattcaagaaacgctctgattacaccgtaccttcaattactccaaatatcttacaagcatgctttgactttgtgagcctcgattggaactgattgttcaaccaatagtcgtgttttacagtgactcatcaaggtttggtttacgtcgacccttcatagccgctggcactatcctcctctcaccattgtggtactacttatcggctatgcaatcgacgttggcgttttgataggtgattattgaccaatccatatgtattttactcattggtttatgtagcttaatccttagacatcgctgacatcatgttcaacgtccgtgtagggccttctagttgatgcagaagcgggaaatgctaagagaacacacgttgaataccagcttttataaaaatggcncgaaaaaaagacaaacatgcttcaattctctagtaattagaaagattgtaaatcaaatgcatgc

SEQ ID NO: 39093 - DNA, 577 bp, Arabidopsis thaliana landsberg
gctgacacatcattcttcatccaagaggttgttcttgcactgccagatgaagtttcctttgcagtaaactcggtgtttgagaaaacagcttcaatctgatacactttgggacttgaatgggacttttgcacaaacttcatttccccaaaattggtaagacccaatctccatctctctctccttcccaatcttcattagagctaatcaaaacatctctactcttctcttctctatgagtttcatcttccctttgtaacaacattctcgaataacgcgttttcaacaacacaagatcaagcattttcctcctcacattgtatatcgggttcggctcaatcaaacaccctttgctataagcttctcttagaaacaaagtctgactacttcctttcgtcgacacatagaaaatcccgggatgtttcaatataacttccctcacgtttacttcaataccaacatcctttcgaaaatgagctaatctctcaacttcaaccattttctctaccgtcaagctcagaagctcatggataactgcaacaacacgcttctcgaatcgctctaaccctcgagaaatctc

SEQ ID NO: 39094 - DNA, 579 bp, Arabidopsis thaliana landsberg
atcttgttgtatcctagctcgtttcacttttagtttgtagtttgtactaaacaaatactgttaatacacatgcatttctttcgctttatataaaaacatatacacatgctgcatgcacttcaatcatattgaaatctctaattggtacattttcgtacgatttgttgatatactggattcataggtaggtaagtggatttatttaaaagggccaaatttagaagaaaaagaaaagaaaagagaattagaaggcaagatatatatatatatatatatatcttgcgcggttgcatggttaagcatcaaggcacaaagggacaacaacgacattctataaagaaaaaagacgaagcatcaaaaggggtctacggaaattcaacatggagtatggagcttaaagattttttcaataaacccatatagtttttattatgcttttgtatgttagaaccttgaaaacgtgtggtgccaaataaggagaatagttttataacagtatttcttactttaatgtttatttaataaatttaattctgagttactttgctaaattttttattttatcgaattttaagatga

SEQ ID NO: 39095 - DNA, 472 bp, Arabidopsis thaliana landsberg
aagcgcattcgcggcgagcagcttttccagcggaccgtcgacgtggaatgacacgctgcgttcttccgatcgcacgcgcccgtgatactcctcgacgagcggcgccgcgaacaccttcggccgcacgccggtctcgtcaaacatccggttcgtaaaacgcacgatcgtcgccgatcgcggctcttgaaattctcgtttcatgcccaggcagggctcccgcagacagaattcaaaaagaggcggcgcgggttgcgcgccgccaggtctgcgtcgcttagggtcaacgcagggaggagatcgaaaatggcgggacgaaaaaccatgctcagtgcgaacgacgcctcagttcccggcgcccgcgccggccatagcgtcgcgaccggcggcagtgggggatgcgggcgacgcgccgctggggggttctgtcgcggtcgcgtaaaagctcgcgtgcgagatcgttccgccgtagtac

SEQ ID NO: 39096 - DNA, 870 bp, Arabidopsis thaliana landsberg
atgtaacatgtcttcgtgtatcacattttttagatgatatttcaaaaaaaaaggtttttattagttagatgttttcttttgttggaatatgcaaagaggaaagcaatgtaaaaaattccattatagctaaagcccattgtagtttttgatttttgagactagacccaataacacactaaaggacactaatcgaaccaagtatcttagggatccgttaagtctttcaccaaccggagacttggtcaagtataagtataaccgttgaagcataccataatccaagtcaaagatcagaatccttcagtggggatcttgcatccagaatcgatatgtatagtcacggtggcaattttgagccaagccagagacgaagcagctcaggaaaactcatcatgctttactttggattggtaaggacactgataagttgatcaccacatggaacatctttatcatctatctagttgtgtatttatgttagataaatgattatcaagacaggtcttcttgggttgggagatgtataaggtagtgattaagatgtatataaacacatttaaatgagtcaaatggttaaataagtcaattttttgtttgaagtaaaataaaataaataagttgtcttttatagagtaaacaaaatcattttaccttctttacaatttataagataaaacatgcaccaatcaccatttattaaatctattttccattttacctacattaaaagaggatgggatacgtcagcatcaatgtttggtcaaaatttattgagacacgtgtagccttgcatctctattgcccgttgaaaatgaacgaaaatggatattaatttgcttaacaactaaaagaaaaggactaaataacgat

SEQ ID NO: 39097 - DNA, 456 bp, Arabidopsis thaliana landsberg
cggcagcgcgtgcgtcgtcgagcgcggtctgcgagatcgccgcgaccgcaagctgcgcctcgtcgcgccgcaggcgctcggcggcattgcgcgcgttcgcctgcgcctggacgagctgcgcgcgaaccaccgccacttccggcgcgcgtttgccggtctgcagatcggcgtattgcgcctgcgcgaccgcgagctgccgcgccgcctgctgttgcgccgcccgctccggcgtcgcctcgagcgcgaacagcagcgccccggcgtgcacctcgtcgcctcgctgcaccgccagccgctcgagccggccggcctgcgacgaggcgacgtagacgaattcgccttcgacatagccctggaactgcgactgccgctgatcgccgcaggccgacaacaggcccgtcagcagcgtggccaacagcgcgccggcgatcaggccgtgtcggggttcgatcatgg

SEQ ID NO: 39098 - DNA, 280 bp, Arabidopsis thaliana landsberg
cattaaaagaccattttcctttatcgtaatgaaagtcaatctacttgtatgaaatttggtttcggttgccctaattattttcgaaattgaaaacacataagaaaaatgttttgcaactcgtgctctttttgtcggcgatttgatccgtacgtctagaaaaatcataataataatacgtttattattttctatacgtacgtatatcagtatttgcatatacgtctcaaagcatgtgttgaaacttgtattaaataaatatacatgattcgatgacattgat

SEQ ID NO: 39099 - DNA, 578 bp, Arabidopsis thaliana landsberg
tgaaagatgaacctccattcgccgattctgctctgttatcatgtgttgtaacttgccttccatcttcgcgggcgcgattggactgattcaccatcaccaccttctcctgttaacacctactccgtcgatacaccagaacgagttgacacacccatcactactacttcgaggatgacacagctctgatacctttgatacagaaaatctcacgatctccgattaacaaccaaaacaccaacacgattgaaagctctgtatattacttaaagaatcaaacaacgttcatgaaacgcagagtgattctcctctggttctcaagatgagaaaaacccagagattacaaagaaagttctagaagagagagagtttctataacaatcttcgatacagagaaaaataacaaacacactagctttattcttccgctaacggcacaatcgtactcgccaacttggccacgccacgcgttcctccgattggcttacgtattccacttgctaaaacaccaaagacccccacacgttggattgaagctaaaaagtgacaacacacgttggttctgtaacaaacctcccctg

SEQ ID NO: 39100 - DNA, 895 bp, Arabidopsis thaliana landsberg
caaaaaaaattacaacgttgatcgaatttggttgagttttaatctatttatggaattttgcagctacatgaattcaggacgagcaacaatgttttagagccaaactcatcgtggccatttcaaggcaagtttttttctattatattccttttttaaaagaagctttctttcaataataagcaaatgggttccacgtattactagtccttattgaaatttatatcaaaaataaataatttaagcagacctccaaatgtattacttgattgatggatgcataaactaatatatgtgtttgacaacataaatcctaatgaaatgtaactttaaaattatatagatttgaagtcagcgatggaggcatttggagaagttgaaagcagcaaagaaatggaaagagaatcaactaaacaaaacctgaagaagaaactctcttcaaaagcttctctattgtgtaattcatggtcaccaagattctcaagatcaagcaaagtccttgcttaactatttttcattttaatttaatttcccatgccattgtttatataataatatatagagagagagcatatagtgagatatcaatcttaatgttttcattcgagatgtcttttcagaagtgtgtacaaattaatattcatactgtcttcgcaatgatattggaatgtttttactaatttcacaaattactgtttcaaaaagtatccattaagatttttttctcttaatctaatgattatgacttcttttagataaatatttggtgttttcgaattttctttgagaaaaatgaataggatacaaatctagttcagtggtgtctgtgaatgtgatggaaagagacaatgggaacgacatctccgtttgggagaggaccggattccagcgggggaaa

SEQ ID NO: 39101 - DNA, 678 bp, Arabidopsis thaliana landsberg
tgggctgttgaaatactaaaccaacaagaaacaataaccgttggctgcgaagtcgctctcgtaatctctgcaacgtttattattataccattggagatttcacagattaagaaatgtccaaataccatttgtatacgatatacacgcatacatgtaatataatagttttccaattaggggaaagctgggaatgggcacgaatgggaatacttcttaaactaaaccatcaaccaagttggtttcgtgacaacctggatgtgtttttataaagggcatggtatatcataacatgggatatacatctattgttattgtataacttacaaaaaaaaatagagcctatttaaaccaaaataataataatctatttattaactaggtgttatccacgcttacatttatctaaaaatttgtaatttaaaaaacaaataataaaataagaccagaatatgcaatactaatgatgtggtttcatgctgagttaattagtgtgttaatatatcaaatttaaaatttattgttcttgaaaactaaactaattattgtatagttgaaacaaactacaattcatagatcattcttgctatcgttattatcacataatattaatggatcggaagagattgttttaaaacgatcaaagtatatgaattgctattattatttattttgacctat

SEQ ID NO: 39102 - DNA, 536 bp, Arabidopsis thaliana landsberg
gaccttcctttttcctcatctatgctcaaatcatctgattcatgctcctgctttccattatccgagaagctgttcaatgattcagaaagttccttttctccgctccgttggtttccatcgatctcgtcttccgcgagacaccagagagagctcacaggtgctgaagacgcagaagatgatgcaagagatccaaaaaccttgtctatcctcactctgaaactctcatccattgcaaaaacgaatttttgggacgacgatggcaaacgctggggaattttattcggtgttgggatatataagcctatgtggccaaacacaaaccgaccttttcacatcgtaccgtagtgtgaactaatgggccagattaaagtccagttatgttattgggcttactaaaaggcctaacccatttaacttgaaattcgtcgttaatctcaaccttctctcacctcagttccacgcgtaagcgtgtgcttgctgatacaggctgaagaatcatttcgatttcttcacacttttttttgtccgatttatga

SEQ ID NO: 39103 - DNA, 806 bp, Arabidopsis thaliana landsberg
catatatctgaatatagcgtttaaaaaataattgtgttatcattgtttgacactcaaaattttcattttttgccaagtttcttttagggtacattgataacataagatcaataaaaatatattatggcatcagttaggtaacatacagtatataaacaaaagccacatgttgaaaatacgtaaataagtatgcaacaacactatatcgtgataagaactaatattcaacaacactactttattatcgtagcaaagtatgataatcataaacatttattttcacacagtaactatttttttaaagataacatcataaaagtcaacattatattaaatatagttataacataatgtatattcttttttatttattgtactgtaaatttattcaacaaccaaaaaacttccttttatgaatatgaaaagaatttgagaagctttgaaatggtaatctttatattctacaataaatctttatattctactataaaaaaatattttcactgatgatcagatgatgcatcaaacttttttttttttttttccttttgcagaactcaatatactgatatttcaaatctgaaaaatacgaccaatttttttttattttttttaaacgaaaaagtgagaattgtagaattgtagtgatatagtgaagatcggattttaaaataattatatcattatacgatatttagacaaatcacttttttttttgcaaatgttcttttaagtttacatctaacattgaagatataaactcgataaaaatatattatggcattaataaagaacatatttaacat

SEQ ID NO: 39104 - DNA, 573 bp, Arabidopsis thaliana landsberg
ttaagaatttaatattatggtgtttgtaatagtccaaagtttgtataaatgagatgatgcttaacagaaaaaacagggatcaaaaaaaaaaggttagaactaatttagttataaatggattgaatgacctccttcacaaaatctaaaatatgataaaatggtttcattagtcaagtgatagtggttaagtggttcttacttgaagaagaattgcttcttatgtcgccaaatatcaattcttcttaaacgtgtgatttacaaaatcattttatttgatcaaatcgaaatggtgttatattttacgctcattaaaaaaccatgtcagtggactattcaatagctacatttactatatacagagacttttcgggtggtagaaaccccctatacacctgatttcattggctttatatggccttatgccgatatagtagtggacactgaacatactcttaagtcttgaaggatgcaccaaaaactaatactttgttaacatgggctaaacattttgcctagcatatatgatccggcccatttattaatatgtatctacatctttaagaagtaacgaat

SEQ ID NO: 39105 - DNA, 778 bp, Arabidopsis thaliana landsberg
tctttttggaacagatgaagtatatattttcatatacataataactattttaactttagtgtttattcattaaagtttgaatcacaaaattgaaactacagatttggttttcttgactaatataatgtggatagtctattttcttataccttatgtcaaaaccaactaaaaatacaagcatctaatattcgaatgtatatttacatttctactcctatattttttaatttttttactcgaccatggaacctaaggatctaattatgacattcacaaagtacttttaaaacgaaaaactacaactctttggttaaaaagtagctagcatgcttaatacttaactcttattgtgaaaataatcagaagcatcaagccaattcaaaagataatggtcacaaagttctcaaccacaactccaactccaaaaaagtgaaaactaaaagcttcttttgctttctctaatgttcattaaggaaattagaatctataaaggctttagaacaattactcattagagaaacaataatagatgtggaaactgataatcaatacctatatgaacacataaaggattcgatttctggaaatatgaattatgcagataactgaaaacaattttactgaagatttcaagtgtggtgcaaatagaatttttttattttggtcttgtgtgtttaggaaaaaaatcccatcataaacggcgtgtaagtagaatcgctgttcattgaggaatagctcgtaaaacattcactatcaaagtgttgtaggggtatagatc

SEQ ID NO: 39106 - DNA, 575 bp, Arabidopsis thaliana landsberg
agtaaaacttataaagagtctaagaatatcacaaagattttttgttgttgttgtcaacaatgtttatattataaagtcttttggggagtttttcaattctttttataactgattttaaaagttattctaagatgtttcgaaggtagaatcattcttaaatctcttttgtaatagtttcggaacctttgaaacattctaacagtttccatatttgttaaaaaatatagtagttaaaatcggtttttaatgtgtatgcgtagatgctgatttttctttaatatcgcttcgttgttactcctcatgttgtatttcctcgtgtcatgcctccacttgcccgtcactcgtatcttcacttatcgtcactcgtttttgatagttgcaaattgttaattatatgttcactattttccatttaacttttcttacgattcacacttttttctagtaacatctccttcattaattaatcatacttaaaattgctcttgttgtgcgcagcgtcatcaaaagggaactctaccaatggtgataacacgactattttatagaaatacaagtgaacctcgaatttcata

SEQ ID NO: 39107 - DNA, 588 bp, Arabidopsis thaliana landsberg
acactgagaaaaaataatgctgtgagaatgtggtacatgacagcttcgtttttctaacatatcctcttcccgaacattggcctgagtaatttatatggtcggtgaatgaaatcgaatcaaaaagacaaaaatccccaaattaccaaaatccttcgcgacaaagaggagagatagagagagagaaagaggcgaaactaatggcgtcgatccctccgccggagcttgacaacgactcactggcgtcatcgccgagatcggagtacgatagtcagccacgcgtacggttcatgtgtacttttggaggaaggatcttgccacgtccgccggataatcagctctgttacgtcggcggcgataatcgcatggtcgctgttcatcgtcacactactttcgcctctctccttagtaaacttgctaaactctccggtaagttaaaatcattcccttccgattttcgaatcgtgtcatgatgatcattgaaaaccgattagggattttagttggatgaatttgatatgatctcttattgggcctctgtgggcctcgtctaagaaaatcgccacaaggaaatttttagatatgatgagc

SEQ ID NO: 39108 - DNA, 347 bp, Arabidopsis thaliana landsberg
  unsure (1)..(347): unsure at all n locations
ctgttcttgaggaaactatacactgagtataattgtaaaattgtaagccttaagatgaattaaaccattaaaaaaactaaggatgaaagtatgattaaagtaaatggttagctttaattttggtcaataaccaaaaaacaaaagaaaaagctaaggtttccttgattccatctncatttaactgtaggaattttttttttttgtataaaggttgtcctgctttacaaggtacaacctatgagtcgtgaatgacaagtggtattttaatgattattacaccctctttttttttcctctcatttacaaattaagaatgaacaactcagctggtaagtcttactacgcag

SEQ ID NO: 39109 - DNA, 577 bp, Arabidopsis thaliana landsberg
tgtatgtcagtaagttgcagcgcacatgaatggatccaattatatgtttgtcaacgaaccaattacgatcatttcaaaaaaaaaataacgatcatttcttgaaatcgtttttaacgatgaagtgcgcaatttattttgtagacggtaacaaccatgcaaatagaattaaagaagaaaaataaacaaaaaaaagactaatctagacgaattaaaaaaaaaaaaaaactacacaaatgaaattttgaaacttattgtttataattttcttttgaaaattcaaaaatttatgcttaataatcttgtggcaaaaaaagcccaaaagagccaaaaagttcataaacacgaagatccatactgtaaaataaactaaaataaattgataataagatatgtaaagtcatgggtgaaatctcaaaaaatgatgaaaataagggggaaacattaaattaaattcaattgttcaaaaaaaaggaaaaaatcatatagaaagatagaagaaaagatgaagttggtgatgaggtggtaaagaagcaaacaaagaaatgagaggtctcaattttactttagcctcaaacac

SEQ ID NO: 39110 - DNA, 2542 bp, Arabidopsis thaliana landsberg
cctttctacgatttgattttggaccatacctttttcaatacgttccaaattttgtcaggaattcatcacacgagtgtaattgtacctacattgtaacatctcacatgcaaagttttttttaatgcaagttaaatgcacacgcttatacatctgtttttctacatatatgtagttgtatacctttaaatgaataatcatttcgaataataatttcaaattacttgaatttttattatttaccgaaagatggtgaatagttaaacatgtatatcatatactttgattaaaactgaaaagtgtgattagtgcaaaataatgttttaaaagtttccgttttcgctaaaagaaaaaccttaatattttattagttctccttaaaggtaaaaatccacagaatttattcgaaattttttggaattttttttctaaaatttaccttaaacttaaagcatagcctttaaaatttaactattttgtttaatttatatattttaagaaccttttttgcaaccattcttttagtttagaccccaaaaaaggagaaaacaaaggaaaaaattcaattagtcaattcttatctataaacagtacagaagacaagaacaaagagaaagataagagagaacacgtaagaggaatgagaaccaagtgagtgcatttcacatcaaagttgagagtgagcattggcatgttcattgtttgctcaacgaccctaaaagtgtctactggtggattgtgtccccattcctatgaattttgcacgctctaaagtattaacaggcaaaattttctgttttttttttaaaattgcagtgaagagtttgataggttttagtaattaacatgccacacgaaactctcaaagcttaggtatggattcttgtatcgttgacaatcgatatgcatatgagaacaaactacacaccatatttgataaatatgtaagaaaatgaatatttcttaacatgcgttgaacatggtttagcgtgaaaataacagttaacatggacccatggtgacataagtataaatgatattatcatgattcacctacctgcaggagatccatctattgggatcagaaaatccgttatactattatatagcatgtaaactctacaattatgttatcatctcccacacaatgagagggatttccaaaacagatttaacaaatgttacttcttataagcatacgtcttgttttatattgaacacgcaagcctctagcgactagcatctctgtatttcatgatcaagtttatacatatacttttttatttgttatactctttatgttttttttaataaaaaaaattgttttggatgaatatgaaaagaataagaaactagaaataactttttgattaataatagttcaatgatatgagtactaattattaatttaaaacacaaatgttgtatggaaaaacaaaaacaacaactaaaatgacaaagaattgttcaaccatcttataaactttaaacgtagggagcattactttaaacttgttgtaaaaacgataatgcttattggtaaaataacccatatacattttgatttgtcaatatgttcatatatgatctagtttttgttctcgttgtcgctagatagacaataaaattttttagtggacagtgattgtggaatgaatatacgcccaacacaaatataaacatcaaattaaggtgcatgcggtatgggaattgcaagttaaatgaacatagttatgcgtaatttcgagaagggattaattgtattaccttgctcgaaataccacatgggccgtgtccccaaaagcccatttaaaatgttttttttttttttttttttttaaatcatctctttagatatttttttcaactctttttcaacaaaatatatagtttcatatagatatttgtatttataataaatgttaaaatgaaattttacacaataattaaaataaaataaatagaaaaaacgttatttgagacagcatatcacatggccttaccatacttcctgcatccattattccattaagaacactcttcaccctcatccacatgcatctccctccccaattcatttactattgatcataattgtacaaacctatacttacaatttacagtgtgttgtctattattttattctatagtttcttgcaaacaaaacattacttttcacgaaaaaactgtctaaatgtgtataaaaaaaatgttaattctttgatacaatttgaccatcaatatttgatcatctattctaaacatctactctaccatataccaacctttacaaaaaaatgaaatattttcattaaaactaccccacaacagttgtgatcgagcttgatctatatgatcaacatgtccaacactagtttcattttttctactatgatatccgatgatccaatccgaactttacaaaatgtatctagatattttcttgaatcaatccgaataacgaatagttgcaaaacataaacctagcgtgatcgtgtggtagaaggacgaaggtcgagaagttctcttactcttatgattttct

SEQ ID NO: 39111 - DNA, 813 bp, Arabidopsis thaliana landsberg
cacggtgggcgatttctttttgttctccctttttttcttaaaaacacgcggagtcagtaagaagtaagaaccaagtattcaattaaataaagcaaccccgttagttagtcaaagtgtcaaaccaaaggaacaaataaaaattgtatttatttacatagggaacatatgtccgtcccatcattttattaccaaaacaaaattcgataccaagttgctaatcaaatgacaatatcatcaagtgagatctcctcttcttcgtttagttttttcattttctgcacataacaagaacacgatcttagtcattacacagagagaaagagagatattgagtgtacagaaatccaaagtgaagagatgctatacagtgaggaaagtttggggatcaaggaagctggaggatcctaagatcacttctctatcgagcttctccgtaagtttgtggcaaacccttaactgcaataacccaaaatgtatcagtaaccaaatcattgattacacataattcacaacaattttttttctcagaccggggtaaattttagtacctctgatctcgttgctcctcctactatgaacacgaaaatccgctgtccctttctcttgaacccactagatgctcgtcctagaaccgagtcactgaaatacatcgagagatttattaatcttcattaacaccctcatatgtcatccaaattactgggatgtaagattcggtgtaatatataactatcattagattcacgaataaaccagctctcagattacccacaaacaacgataaacaaagaaactaaacggaatacctgaata

SEQ ID NO: 39112 - DNA, 851 bp, Arabidopsis thaliana landsberg
  unsure (1)..(851): unsure at all n locations
aagatccctttgttatgcttgtttgttttttcctccaaaagtaatgcaaattttcattaggtacaaacaatctgagtgttaaaactgattgaaaggatataagaaaacaaatgggtccatattattttaagaaatgaccaattgtcaagcgcaaccaaaattacggttatcaatctaattgacttatcttgaaaatataatacgttacatttccaatattccttttttattatcaaattacgttacatgtagtcgtagacttgagcactaattagccgttgaatcaaaatctttaacgtggttctactacgatgctatcataaagtctatgtcaatttatcaacaaaatatacattctcgaaagaaatgttatcatgaatcgttttttagtttttttttcctacgactacaagtacagctacgcaaagttgcaaaccactcccctccatacacattaacttggactaaacccgatgatcatacaatgtcacaaattttagcgttactacattagtcttaacattttctaatatttgcaaatgttccatccctaaaatggatggtagttttaatttcaaagcccttttttacacttttttgtttggtatttgttttaattttctcgtatgtataaaatttgcttagctttagcctatcttgaattctatcatcgcatattcgcatggttatattatatcttacaaatcgtgtgaccaaactctgattttggaaaaattcttggcgacttcctaatgtatacatagtctaagaaaacttaaatttctactcaaatagtatttaaatttntcaaataaggagcaagtagtgtatggagccatagcnnatgagaa

SEQ ID NO: 39113 - DNA, 617 bp, Arabidopsis thaliana landsberg
cccgggcatcatgggagtttagatttccaagaagagctcagcaactcgcccttattatcaagtttaaaggtagagaaccgatataacactcaaaagggttaaagcttatctgcctttttcacctaattcaactacaataacttcatttgtcttctggtctattgcaggaaaaatccttagtacgctcttacacagaagtattgctcgtacctttgacaacccctgattttagcatgccttacaacgtaatcacgatcacatgcaccatcttcgcattgtattttggatcattgctaaatgttctacgtagacgaattggtgaagaagaaaggtttctcaaaagccaaggttagtcaccaaattttctgcggccaagatcacttgaggcttaatttggctgtcacaacactgattctaatgtcaaaatttatgattgtttctgttttctccagcaggaaagaaaacaggtgggcttaagcagttattatcgagaatcacagccaagattagagggagaccaattgaagcaccatcatcatcagaagctgaatcttcggtcttgtctagtaaacttatcttaaaaatcatattagttgcaggagctgctgcagcgtggc

SEQ ID NO: 39114 - DNA, 924 bp, Arabidopsis thaliana landsberg
aactactgccatacaatggctgcctttacaacctttaaaatttgtgtttatgtagttactgtcccattgctatgttaacttgcttataagtgttagagtaagataggtaataaaatggtcaatacttgtatgattttatgcgcatatcaagaattaacgagcgataacatacctcttgctccgtaggtgaaagtgtcacctttaaacccttaacaagcaagtctctaactgttgcaccactgctagtatcagcacacattttatcgtcccaaacaagctcatgcttgttatcagggtcaatccaaagcaactgtaagaagttgaaccatttaggtcagttcgataattttctgaaccagttgaataaggggttattcttatttttacctcgctctgatgaactgggtaccttggtggacatggacggatccacctaggacctaatccccccattgtcaaatttcctaagaatccagatagtgcctcatccctatcaccagatccaattctgggattcactccagcttgcacatcaaacctataagattatttgactcaatgatcattcatacaatcaacttcaaattggcacattaattataacacagaacattaagcttggaggaaaactggaagcttgaaagaaatagatcagattcaactgtatataacagttagaaagaaacagaatcccctgactcataggttacgtactctggagagttaggatcacacccacgaggaacatcaggatcatgcaatagctttttcagggaatagtctgcaaaaatgtgactagatggtccaggatcggctttgtcgccatactctcgttgcagctctcctagttccggaaaatcctgacagagcatccccatattagatcaataactggaaaaggtttctctaaatgttcgctaggtc

SEQ ID NO: 39115 - DNA, 912 bp, Arabidopsis thaliana landsberg
  unsure (1)..(912): unsure at all n locations
gtgagaagaaaaaagttaccagcccctaaatatactaatgcaagcattgatccttgcttccccgacaatagaattactggcgaactacaagcagatacaagagcgacagttctgatggcccaattcttgtctttttcggtgcaaaacatacgtgcagaagctaaaaggcagagctgcaccaatccaattacataaaccgtttgaggaatgcggtttcttcctcccgtcacttgaagcaaatgatccaaaccaaatatcttgctctccgaagcccaaagcaatgctatgaaaaagtagcttaccatactactaccagtaacatacttccacaccccctcattgggtgctttcgcaatggctacgtagagcacgcaaatgagtataagcactgacagaattggtgcaatttcaatcgcatatgtcaatgctggatggtctggnnnnnnnnnnnnnnnnnncgatggtgagctactcataaactgagaagttgcagcttgctttgttagcccaatatctatagaaactctgagaacaaaaaccatagcaagaaacataaaagcctgcagacaagataattaaaaatattacaatccaataagcaacttttaaggtaataaccagaagcaacaaagacatgtaatagataatactgacttctttccgcattgtttttctcataacagagtaccgcagcttgataagtccagttgttgccaggagaaagtttgcaacttttccttcttccactattgacaaaaaaattctctattagcataaagaaaaagagagcaaaacgcttaatctatatttacttgaaacttacagatatagctatttgaaagaaagctgcaagctcnaatcgttactataaagagagtgaaagctgcaccagtggataaccaagaacccact

SEQ ID NO: 39116 - DNA, 574 bp, Arabidopsis thaliana landsberg
gctggcgggtcaggacaactttctccatattccattttcaaacaagtttgtgttacctttataacctcttggttcccatatttctctttggccaactattcctctgcatagttcatctggacctccgaacccctttgcaagctttactcaacaatcaaataatcaacaaactgcattctccaataccaacgctggtggtctcaggtatcaacttttgtgggctttctccattttccaaattccgtaaaggggtgccttcatgaaaactctgtttccatatttctctctggccaatgattcctctacatagttcatctggacctccgaatgcctttgcaagctttaataaacaaccaaatgctttcagcgtcaacactcctcaacctgttccttcaggtactacttctaatgttaaactttgcttaaaggccaagagactcgccatcatctgaaacctcttttgcaaatgatcacaggtccctctggtttccaaaccaatccatcaacaacattcaaaccagcatcatttggacctggacccggatttgccacaactccacaaaacaataacatc

SEQ ID NO: 39117 - DNA, 594 bp, Arabidopsis thaliana landsberg
agtaacaagaaaaaagacagaaaaaaagaagaaaatttatatactttcgtgagaagatactactattagcgggaatgagtgcattacaaaaaactgtagcccaatgttataaacggtagtttcttctctcttttttgtatagatgatttatgtcactcactcactcattaatgtaaagatgtctgactgaattgtttataatattgtgtatattctgaacttttaattaatttgtttatatttttattctatcacgaaattgaaggtgtcgatgatgttcgttatcccgcggattagacataactcgtcaattacatcattttctcaaatatattttgatcttgttgtatttacatagaataacctatagaccaaatttaactcaatgtgtcatatgcaattatgatgaacgttttaacagacgattttaccgtagacacctctcctcgcatacaaaaattttcaaaagacaattctacttagatttcacccatgatacatagtataatgatggatagttctacatgcaatatgtaggaacctctagtaaattctacacctaaaattttgcattttatgaaatcaaatccaaat

SEQ ID NO: 39118 - DNA, 646 bp, Arabidopsis thaliana landsberg
  unsure (1)..(646): unsure at all n locations
agacgacattgaaaccatcttctgcaacaaatttattcccgatgcagatgatccttccaatggtatcagcaatataggatcattatatgccgcgatcaatggtgcaggttatggcgagatgtatgcttccaagacctaccttgacctggtgcgtcagtatcccatggatgtgcgcaacaaattcatcgagcctaactacaataccaattccaccaagatatgggccttgtatgtagataacaatgccaaatatgtacctgtggtggtgcagaaagtaggcaacgattaccaggtggtatcatcaggcgccatgctcgagaagcagacaaatatcaatggtgattatgattatttcattacacctgccggcatgagcaaacaaaaagtgatcattgaacgcgagatgaacctccgcaatggctatccccagttctttatcacaaaatgttccaggcaggaaggtaaaccgcagttgtggtcgcccattgtatccaggctggcagaaatgtacctgatccgtgcagaagccaatgccaaactgtgcaacggcaaagaagcgcttgatgatgtgaacctgatcaggacaagggcgggcattcctttttacggnctgtacaacatcaatgctttacccacaggcaaaacg

SEQ ID NO: 39119 - DNA, 483 bp, Arabidopsis thaliana landsberg
ttttgtcgttaatgatatcttcatttcaaaaattagctactatacgattcttacaaatgtgatattataaatttactatacgactcaaaacgagttgtgatattattttaatcgtctgaccacccacacaagctaagtaatgcttcaagttgattgatcaccatgagcattctttaatcccaacttgactttgtggaaagattaaagagattgaagatcctctactgcacttgaagagctgtatccatgtgtagaatacaaattactgtgttgctttcttttttttccttcactttattcactttctttacttttctaaatctttaatgtttgcgaattcctattttgagtctttttataatatttattaatccgacctgtttttcattgacatatataatataattcaaataaaatgactcattaaaaaattaaatgacaatcacttagccaattttactttgcaaatgcaagtcttattta

SEQ ID NO: 39120 - DNA, 555 bp, Arabidopsis thaliana landsberg
gatcaccatttgaaacttatctgattcaattttggttttgatgatcgaatctatgcagctggagcaacagattgtagcttctggtggaatgatcccggccgtcgaactcggattttgagtgaatttcataaacatctctgtccattgttgtttcattttggactctctcttcttcctctctttatgtgactatcaaaaaaaggttcttatgtgaacttctttctttgtgccattggaagagtgagacatgctaaaacgtttcttaatccacatctaaatcccacatatgtaaaataagatctcaagcaaacatatagtcatgagtcatgactacaattatatagagtttgatcaagataatgtacgcatcaaggtaatgtgatccggacaacttggttaggtattaggttgttgttttactgtaactgttagaagtagttagaagtcttgtagtccttgaccaaagaacacagatgggccatatgaactttagtagcccaagatgataacaaagggcccgtactaaacatccatgatgatcttggaaatcttttt

SEQ ID NO: 39121 - DNA, 532 bp, Arabidopsis thaliana landsberg
aaaatataaaaataatataactggcttggtacgattttaatttagattgatttcacaatatatctttagtttcaaattatttattttgttcatttattatttcgttcgttacctggttcgtataagagtttatacaatcaataaatgatcagatccagatgtgtgttttaaaactatctttagaacttaattacagaacatttttataaaaaagatcaaaaatcaaatagataataaatagagtaacgaattttgtggcgcaaaaaggattgtattacaaaactattaactaccacaaaccccaaaaatcttattcccttgttaaatctctctatattgggaagtgataaagaggcaacaatgcgagagacttagtccgccacactcaataatgatccatcaagctttagctctccctcgttctactctcaccagaggtaaagtttcggtttttcaatctgggttttcgattctcaatctcactctactaaatcgagtggcgggcttgttgatttcggctcaattcgacaca

SEQ ID NO: 39122 - DNA, 498 bp, Arabidopsis thaliana landsberg
  unsure (1)..(498): unsure at all n locations
gggtttccggctcgttttccactagtggcagtgcggatttattataatgcttctagtgctgcttccttgcggggcttggcgagcagacgggcgtacagggctaacttcttgctcatgattgctcctaataaaaaaataaaacacgaaaatggtggatacgcgctatcacgcttatccaccctactaaaaatctaaatactcgcttccagcacttccctgctcttatccagcgtcacatcctgatgctcaccgagtttgaccatgccatgactttcaagctgcgccagcagggcaggaatggcatccgcgctaatgttgtaggcggataagcgcgtcggcacgctgaggctttcgaaaaaagcgcgggtattttgnnnnnnnnnnnnnnnnnnnnnnnnctctgtacnnnnnnnnnnnnnnnnnnnnnnnnnnnnnnnnnnnnnnnnnnnggcgcgcttggattcgcgacgaacactcaacatggtcggcaggatgata

SEQ ID NO: 39123 - DNA, 573 bp, Arabidopsis thaliana landsberg
tactctttctatttcaaattatataatactaaagtgtttatgtaaatattatttatgtttaaactaaaatatcatttgttatgtaagtatacgattcaaacgatgattaatacagaatataaaagtaaaaattggaagtactattattatatttttctagattttaataataaaataaggcaaacggaaaaaaattgaaactttactaattgagtggagacggaaatattgtcgagtcagtgtctctaaccagagactcggaaaaaaatcagtcgccggcgatcgaaaacgacaactcgccgaacgtctttctctcttcttcaagcaaacactttcacatctctctctctctctctcatatttatgatgatcgtctgctactagagatcactataaccagatcatcttctttattcgtcggttaacgtctcaatcactctctggtaatttcaaatctttaagattttgcttctgaaatttttctgaatggtttcttttaaatttctcattcgatttacataaatttgctcttcttattggtgtgtctgcagttcggagttttgaatagagatc

SEQ ID NO: 39124 - DNA, 384 bp, Arabidopsis thaliana landsberg
tgttttttatttatggagattgaagacggattgtttaggtcgtttctctcgtttcttgttttctaaagttacttttgtaaactcatctcctcccaattagacagtcaatcatatagttatcttttaatatatgtctagttgataaaaaaaatgaaaaaatactggtggtagttctactaatgtttgtgtaaaaaatctgatattatgaatctaatcaatttctttgatcgtataatgtgggttaaatttagtattttttttacataaataagaactgtaatgttgatgtatattggggaatcagtatattagcttgggtaactatacttctggaaatacttgaagatttaactatttgcaaaattataatttaatccccgaaaa

SEQ ID NO: 39125 - DNA, 346 bp, Arabidopsis thaliana landsberg
ccggtaaggaagaaaacagagctgttttggagattacagttttagaagccattaaagatgatgttgaagtcgacgccatagcttttgaagtaaattagaaacagagttcaagtttcagacttgaaagcagagatccaaagaaagaaaacaaatataattccaagcttagatatttgcaatcttgtatgtatccgcgatttttcccttggaagtgtttttcaaatttgggatttggagatggataagattcgttactagatgtaaccataaccttacgtttgaatatctctgcattttcacatgtttaaccacaaaaattttcaaaaaaaaaatatctgcaagcaaa

SEQ ID NO: 39126 - DNA, 687 bp, Arabidopsis thaliana landsberg
agatttactatcttagtgaatgggttttgtgaagagagaaggagataattaaagggattgtaaattgagaagtcagaataagagcacacaaggggtgacatcttttgtgaatcaaagagaaactcatgttcatataaagtaattcacattcttatagctagtggttattagtttattactttggtgaaagccactttctcgatataccctaaattcaagtctcaatgtgggagagggaaaccctagccaactcaaaactatctcattagtcaactggagctgctcattaaaaaaaaaaaaaaaaaagcgattatgccaactatatgtatacaaaagtgctacaacgtttataaacattttcggagcataaaaaaacttcttattcaactatatacaatttaatctttttctttggtaacgactagtgacgtccacttattgaaaagatacatataaataaaattattctttattttttctccgaaccaaaatccttaattgcatcaccaacctaacccctcatcatatgatcacctttctttttttcctttaatatatatatatgctcacacacacacatatatatatacatataagcatcgcctcaagcattaaaatttttacgaaccaaacaaacaaaaattatgaataattataatatgacccatctctcttccaaaattacac

SEQ ID NO: 39127 - DNA, 726 bp, Arabidopsis thaliana landsberg
actgcatgtggatagcttaaaagaagaatgtttgaattgatcaattacttaaatgttaaattttcatttgatcttccgtcgggaagaaacacaaataggatccgatcaaaaggacaaaccaagagccaaaatggtgaaagcagcgtctcttagttgctgcaaaggatacaagccataagtattacaaaatcaaggatattttctgtaactggaacagaacatttgatgtggttacatcatgtcttaaccggcctcacaagccccattccagatccactacccaaatgcttgtactccttagcctcaaaatgatcgtcgtgctcagcgaaacccgtgcctcctttctttaacccaaccaagttcctatccttgcaaggtttgtcacacacaagacagactttgtcgacgggcataaacttctcagcacacttcttgcagaaaacatgtccgcatgagctaagtgccacgagggacattgtgttggtgagagtgactttgcagctcgggcagatgtaggatttatcataagagcttgaagatgctgattttgtcttggtctcttcctcttcgctgttgtcttctgtgaaacgaattgcaaagaggttcttaagcttgagcttctctttgccctctggacagactgtgtgagtttctggagcatctactctgaccgaagctgctggtgtagctgatgggagccagaaggctttcattgtcctaagcgct

SEQ ID NO: 39128 - DNA, 1493 bp, Arabidopsis thaliana landsberg
tcatcttccacctatgtagatttcctcacattgagatgacaaagttgtatggagatatatactcttatacgaggacatcctctacaaagttgtatgaagaatacaccaaacaatcgaaagtttgttaagagtttatctaccgattctgtctttttctttcttcaccaactcttgattgtatgtgaatgttaaatgaattatagactaattattttttattctatttttctaactacaaaaatagaaatcataacgcaaaaaaaaaaagtttcttaccattggcctttgccaaaaggatgcgcattttacatatgtacaagaagtcatcaagaaattatgattaattaggtttcatagaataagtaaaaaatatatatctgagtcattatgaacacttacttgatcaaagaggacaatttagataatcgccgaaataaaaaaagaaagaaagaaagaaataattcctttaagatcatcgcaatctcatgggatgtgcgcgtttagcgactaatccttcttgttgttttatccgcaaggaagatagtgaaggcataacatggttatcttcaggcgttggcgccattgacggctccatcatcaacttctcttcttctacgtgactaacaaactcttgtgccaaatgcatttcttctgaatatcccatcattcttcttggaccagagtccttgattttttgttctgaaaaccatacaaaaaatattgaatatttgcaacacaatggtcactatagaacaaattaaactaaaacgttctttttttattaaccaaaacattttccgctgagcccgtagcctcctaaagaccgagaatatacccttattgggcgtatttcatcccttccaagcaggattgaattggcaatgaaaggttcaacttcctttgaaggaccgagtcaacgatgatattatcgactaatagatgaagtttgatgtaacaagattggtaagaggaataccttgatcattagagagtggtggaagatttttgagagattgagaccagctaacaagcattggggtgataatggtgagaagagcccagaagaagaagatcattacgtaggcccttcctttcatttctcaacaacaatttaattttcttctgaccaaaccatcgatctttgtttcattcttaataataaaccacaaaatacaaaaatggtttaagaagaagacaacttctttcaacaaataaacgttgagctggccatgtttgcataacattctcaacactttcttcgttgtttatcttattttattgtagggttttaataatcacgcatgaagtcaagcatttcaacaaattgttagattaattaacttatgtattgtggttaggatggtggtagttttggtttcactttcggtccggtctaatcccctccaattttttttgttttggcattggtgcgactatgattagacaaatggttgaccatattcgttttttgcgttcagaaatgccatatatat

SEQ ID NO: 39129 - DNA, 686 bp, Arabidopsis thaliana landsberg
ccaccttgaactcattttgctgttctgggagatctattttcattttcccctctgagattggaggaaaagttgaagagggtgacatggtggaaggaggaagcgagaccttattgttggttggaatctccacagatgtttgacgttcacctatccatgctgcatcaagagtggctgatagatttttcataactatctggccatcagactgtgttctacgaacatcgactttattttccagaggataagatgtatctggtaaggtcttgctgggagaaacttctcccccatcatccttttcctgatacaaatctgaattcgtatccgcttctttctgaacattatttaaggagccagtgtcaccagtagaatcaccatcaggattcagattaacctcagagccagtaagaagagagttggtcccagcattcatctccgggagcgtctggctcttagccaagggaggtttctcgttctcttctctctttgtgtcatcactattctcaagcttatgtaaagtagatgcattaattaagcggtgatcccacatgtatgactgaaaaagaagttgtctgtgaatccgatatagctcaagaatgtccacgagaggttggccttcgttcacctccctgaacaaaatcttttgcatattctcctggaagaaatgtaagaagagttacaaaagcgaa

SEQ ID NO: 39130 - DNA, 594 bp, Arabidopsis thaliana landsberg
aacatcagcaacaatatgacaaaacaaagactaaaacaccaactattttccattgaattacagtatattactaaatgtaacatgaaagttgaatttctggatttttttattattgtgagataccttgcatttatataacaaagatatggatataatcatataagtcttgttatcttcaatcatcctcatcgtccttatcaagtaccatcttcagtttccttctactaagcgggctttgagtgagggaggcaccaccagctgcagagtcatcaccccaatctgctaactcgtcatcctctagttcattatctgatgaaaggtttggatcttctggcaatgaagttgaaggaccattgtcgctgatgtaaacgtctgtttcagattgtctactttccctggtgatgtagctttgatcattgtcctcttcttccccagcggtaggctcatgcagactagtttcattcctaattacaaaaagtgtgacatttatgagacttactagtgagatctagctcaaaagttcgttttagttctgagttaatcttgtctatagacccgatgagaagtcaaaatgagtggagagttttacccttc

SEQ ID NO: 39131 - DNA, 1360 bp, Arabidopsis thaliana landsberg
  unsure (1)..(1360): unsure at all n locations
gttggaccaaatctagttaagagctcatagacattccttttatatgctctgtcccttggaccgcacataatcgaccgtctagctttaaattcctaacatatattcccaaaatacccctcaagtcgcatttgaacaaatccggtttagctccggtttgtatcaccctagttactgatagagtttttttttttttttcatcagttactgatagagtaaatagcataaatgtcctatcttgtaatctgtttgatctaaataccgcacaaattgcattgaaactaatccggtttagtccggttcagatgatagggttttaattttattaccttagcgctgatggagtaaatagcataattgtccaatgttgtgacactaaggtgaagaatggagagggacagcgattgtagagaagccaccagcttcgaaagctgcggcggtttggtggtggccaacgtgctccaccggaaacctcttcttctcgacaagattctgatgttagcatgagtttcgattagagtcacctcaagatcttccataggggttttcaccgagcttgttgagccgttcctattctcttggctcggatcgtatgaatgaagaaagaactgcgatagagatagtgaagatggttgatgaggattctcttgttcaccatttgagtcttgacttgttgaagaagtaaccgactggtttaatttagcattatgatgtttttgagcttcaagagatagtaatttgtgttcaagttctttgatgaaatctatggctccaccaactattgaagcttgatcaccctttcatggggaaacaaataaatccaccaaaacaacatataagtaaacaaataaaaacccaaatatatatttaataaaaaatcaattttttagaattggccataaatattgaaaatcaaatagatttaaaccgttagaatgaatctttcataaaaaataaaactcaagatgaaaatttaatctttttcagtgaattgtaaatattaattgaaacccaaatcgaaatagtaaaccatttaaaaaaattatccataaaaattgaaaccctacttgaaactttacaaacattaaaaaatatatatatatatccataaaagttaaaccttgtgagcaaaaggttgaggcatgagagatcgcaagacagagagatgttgattcatttgtcttcttcgatttcttnnnnnnnnnnnnnnnnnnnttcgttgattctcagcttcttcctcgtttttgcaaaccctaggcttcctcctccgccgcttcttccctcgattcgtagctggtggttgcgctgtggtggcggttcttgatgagatactccgaaattgtgttctcgatatgatgcatca

SEQ ID NO: 39132 - DNA, 676 bp, Arabidopsis thaliana landsberg
ctaactttttcctaagcgacactcgaaccgacgatctctaagcttttcctaagattaccagttgatctaactacactttgaagataaatactatgtctctaaaattttaaaccaaattattcattgcatatgataaccaatattttcttgataatgtgtaggattaaagattgagaaattattattattattattcttattttttattttattttattttttgttaaagattgagtaatttttttttttgtatgattaaaaattgagtaatttagattgagaaattatctaaattaccattataagaaaattatgtttgaagagtttttgggtggtttaagaagggttcataattaggaagggtatcaaacgcaattctgtggcaatgttggatttttgctgtaatttttgaggaaagaaaaaacataacaaaaggtacttttgaaaatcacttttaatatttgtcaagttctaataaaatctacataaattgatagaaatatccattatttagataaaaatataataaatcattaaatatttagatatttacaatcttacagaaataatcttctataaaaagcctctggaatcactaatgtaataacctatttttcttaaaaatgtcagagaacaaacttttaaataaagaaaataaaaatccttatcaaaaact

SEQ ID NO: 39133 - DNA, 791 bp, Arabidopsis thaliana landsberg
  unsure (1)..(791): unsure at all n locations
gtaactaaacatttcatgcaaaaaaaaaaaaaaattacattaactgctttaattttggtacatatacgtaataatatagaatatatatgtggaagtggaataatacttgcatctttttatacagaacttaatcagaatgtattgggaaccaagcaacttgatgtccatatctctttatggacacatgaactcatagaattaataaaacttaggatatcaaaataattaaaatgtatgaaaacacaaatcatgagcattgtcttctacctcgtagctagggtagcctttttccctttttaatctgtaatttttctcattgatggcaaaatgcaaatcctagttttcttagaattctaaaaccttgaaatgtggcctaatctcttatacaatgttgggcctatcaagcaaatctagatccaataaggcttcatggcggcggtttgagtatggttttaaatttttttatttaaccttacgggcttccaaattcaaaatttaaactgcaacatttagattgtaaactttgaataggtcaaatagacgattattaatcatgatatatgataactgagtgggatatgaaaaagtttagcatgtcatcgatggatcataaaacagttccaaacaacaagcattataaatttataattaacaaaatttattgaaactgaaactctgaacatgcacaacacaagtcatttaagcataaatgattaaagtagtgaacattgacctgatnttactatatttctngttagttataatacaacccttatcgttactatgcaatg

SEQ ID NO: 39134 - DNA, 570 bp, Arabidopsis thaliana landsberg
gggcgtatcctcaatttagccgtaccggttatcccctttttgcccttatatataaaatccattaacgctacgatagcatcgctagaccttctgattctctgtttctgcaatagtctttcttccataaaaacccgttcttatctgcttcaaatcagtggcataaccagttaaaataccttttttgccaagactatacaacatattatcaataaaatgaccatactcatgggctatagtcccatcaccacgcttattggtgatattgataattttagcagctgcttcgtagtgtgccatagcactacccctacctcttgcggcaaaagcaatcgataacttaccaagacggttcaaagcggcaagttctatattgagtacctcactcatatcggccatggcgcccaaaaagtgtttcacatggcttttagcttccgtatcccttaatgcattgccatattgaacggaattaaagccaaacacattggtaataggattattaaactcatccgtacttgtagccgcatttacaaactcttccgatatggtcagtccatttgtccttttgataaa

SEQ ID NO: 39135 - DNA, 2024 bp, Arabidopsis thaliana landsberg
  unsure (1)..(2024): unsure at all n locations
gaatatcttacgtggcaacagctgtaccgttaataatgacagtttttagctgtgtttatgaataattaattacccgccaaatcactaacgctttaaaaaaaacaacaactttaagaaaacaaacaaataaataaaagagtatcaaaaggcgttcaccaaaaaaggtacaaagtcctttgggagaagatatcatcaaagagaaaagccctaattaaatctctcatcaatggcggatttggataaactcgagggtggaggaggaggaggagccgtcgtaatcgccgacattagagccgatgaaagcggaggagcggtggaggacagggagaggttaacggaacttgaaggaatttctgtgttggatttcgatttgctttgctcaacggnnnnnnnnnnnnnnnnnnngaaatggaggaagcttgagagctcggagggagaagatgcgacggaggatgattatggcggtggcgttttacggctttgggaaggcgatgttatggattgctttgaagatcgtcatctctgtatcgaatctgcttggtattgggttttctcttctcatatcattctttaattccaaaagcattttttttttgttccccagaaattgaaattcatataatttactgtaattagagcaattgagttctatatgtgattataaagcaagagacttttttttgtttatcttgtttcagctgtccatgctacagattcgggaaaaacatgacaaggactggttttggttcttgctttcttcaggtataatatcctcttaatacagttgatctctggccttttgtttaccttcgttcttgtgttgcaatcattgaaagatactgactttaactgtattttgtatgtgtcagggtgctgttcatatgattcttattgccggtttcttattcaatgttgttgcttttgctgtaactaagaggcactgctttctctatctggctattgctttcgttcttttgattggatcctacttgggtttcttccgtatgttgataagaaggaagtttaatattagagtaagcacattccttgtttttttgtttcttttctatggagtgtgttaagaatgttatttgtcttcttttctgcatcatgacttttggatactcttacttttgatagggtactgatagtttcttggacgattttatccaccatctcgtatgtccattctgtacattaactcaggtgtgtgttattcacagatcattctcttgcaaacaagttacatccgttatgtccttttggttcattttgcttgtgatgtgatgtgatgcaggaatctaaaactctggagatgaacaatgttcatgatggtatctggcatggtcgaggagacactctatgtataggcggctattccgaaggaaaagcttttctcgagctgcattcgcctccagttattgcctcaacaatgtcatcatctcaaccctaacaacacacaacagagttcattcacagaaaccgcaaccaagttctgtggcctccatagcaatctgcattggtgtcaacatcggcttatggcaattgatttgctcaacagtgtaaactgattcatgtcaagagaaaactttcatgtttagttttggaaactgtggtatatagcaaacatggaagtttgatagaaatgtcctgtaaggttctaaaaggagagaggctaagaggccatttgtatgctaatagtgaatcagtccaagttacgtatatacagccacctatttgggtcatccaccacccatcttgtggagttttttagtattgaaatacaagacatcatgcttgttgatcgtccagtagaaatcataaactgcagaataaaaatgaatagactagaaacaatgtaacaatgtattttgtgtggcattttggtcttgttcagttctgttccctaatcaaaatcagacaagaaaagcaaaaagggggaaaagaaggcaattagatacacaaagtcattcatggatgtaaacactntattcatatcttcttggccattctcaggcaacatg

SEQ ID NO: 39136 - DNA, 749 bp, Arabidopsis thaliana landsberg
  unsure (1)..(749): unsure at all n locations
tttaactcccacatgatagatcatggcttagaacaataaccgcataggaattagtttacattacttccttaatttccctagaattcctgggcatagatatttaataacacgattttggtatattatctttgagaatccatattataagactttttcgacatatcgtaaagagaaatttagtaaaggtttcttttggcttgaaggagcccaaatgtgacacatgaaccataattcattaatgtttgaaattttgacatttatatatttgaattattgaccgcgacgagtaaatatatatacaaattatacagtcttagatttagaaatatgtttcttagatttagtttaaattagacagaaaagtttcttaaacaatgtcaatgtatatatattgcattttggaaagagacgtatgtcttactcttatcgataatttttgttcttatcaacacttaatctcgtgtttaagagactgtagatgtttgaataagactataggatacaagtctatctgtattttgtgtcaaattgttaattcagtcactcttgaaacttgcttgaattcattattcatgtgtacataactttatatgtatacgggagtgtacacgtgaacgttatcgatcgaccgagatggtccaatagtcagtttgttctttctttattatgtttgtcgtcaactttattttattaggttgtgtcattgataacacaaagtcaaaacactctntccccctatgtctttatat

SEQ ID NO: 39137 - DNA, 632 bp, Arabidopsis thaliana landsberg
  unsure (1)..(632): unsure at all n locations
gggcacttatttggatggctgcttccaggatttacatttgctatctctgttaacattgggggtatggtattgctttgagatactactaatggtagtcattgcttttatttgcagatcgcatagtctcagaaataagacgagggtaacatgtcttttgtcctactggggtgagaaaatacatatcacacactatgttaagcttcatctctccgaagaggaacgagttatctttgcttcaatcttgttgctagtaaaaaaaggtttaccaaaatggagaagggccgctttgggaactttctcgataatgctaaaagtaagtttgtgaactctcatcttccttgtttttttacattcatttactaatttggccatttgggacgacaggtttggtggacgctgctgtgaagtcagatatcactcccgtactcgctctattcgcctattttgctatttnnnnnnnnnnnnnnnnnnnnnnnnnnnngtgataggggcagacccacagcataatactccttgttaaaagttagctaataacagtagcagtataaaatcatttagctcagctagactctctaatccacaccttacgttcggagttcaatacctacttagtaccacttgttttgcttatt

SEQ ID NO: 39138 - DNA, 541 bp, Arabidopsis thaliana landsberg
cttcatcgacatcatggaaagctccagcaacatcaggcgaatactttaatggtttaatcttcgacataacttccttaacctttgcgtaaatcagcgtaatctcggggtgttgattatcctctgcaagaaacacatgggtttgattacgtatccctatccagcttactccaggctccttcttaacacctctgttattcatcaaagaacgcacttttgccacaccttcccactcccttgacttggcgtggatattggataacaatacgtaaactcctgagtcgtttggatacttctcaatggcatattctgctactttttttcctaacctgtaattccggcgaacataacaagcatttagcaaagttctccatgcaacaacatcccattcaattggagctgttctcatgaaatcctcagcatccttgaacattccagccttgctcaaaagtccaacaatgcatgtataatgctgtatatcaggctggacatcaaatttcttcatcagctgattaaagtaatgaaagcccttgcttcacaaaaa

SEQ ID NO: 39139 - DNA, 397 bp, Arabidopsis thaliana landsberg
ccttagtgtaacagacttttcgtactttaggaaacaaacgaaactggacacttgtatatagtagattttaccttgaaattttgtagcttcatttgtccaaatttaattaaacgttattgaaaaattcactggatttctaattctgacaaaagcatattataccagtgggctccttttaagtcaattcactactagttaatcctcaaccatgcattattgcatctgttaaatcatgtctcatagattaaccaattgtgctgtgtgtttgatccaggttaaagtttggtgcacgaggcaggaagcaagtgtgattaatattgatatgaaagcaaacctatgttgtgttaaggtccaatcctggcttaagcaactacctttccgagtatcctttcactcc

SEQ ID NO: 39140 - DNA, 568 bp, Arabidopsis thaliana landsberg
ttttcacgatttgaaagcagtcttcttagtttttagtgttagaattttagttgcagacctaacattggtttttgtttgggccacaaacatttgctacttgctagtaatagaacttcgctgggccaaaataaatattgctctcacttttgcatctttctttgttgttttgaattttattggtgaaatggtttcattacaatttatataagttggtttaagtttagaatgttattttatcattttagatttctgatgtaaactttttagtagtaaaaatttaacattatttttgtagcattaatgactatgtaaaccataacgtcattttcgacaatacgaacattgtcgcttgaagcaaagacaatcagcattttaaactggtttatctcggctaaacccttattttataatgttaatcccgtgattaaagctcatagactaattaacatgcaagtaagcgggaaaaaaccctaagagtggtccggtgacatacattaatcaaatggtaatatactttaaaatgttcaattcgatcatccttctttcatgatcaaccggaatttctaag

SEQ ID NO: 39141 - DNA, 941 bp, Arabidopsis thaliana landsberg
gttgttgtttttataggtgctttcttgagggctacgatcctgctgaagtttttgagtttcttttcgtaaggccttatgtccatatccttcttgtaagcatttccaagatccttcaacatcacttctgatttgctcaacgttttcacctcagatttcaaaccttgaatgttcgttttcttagcctttaattcttccgcgatcatggcctcggctttatgtaagtctttttcaaatgcttcaccgagatttactactttgcgagcttcataagcgtggagaaaggcgataagggccacaacgaaaagtacgaaggagatctttgccatggtttttctagctcaggtttcccttaacaaatcaatttgaatttagattcaaatagtttgttaaaggaaaagaggtgagaagagatctgtgagttcttgtgttttgttttgatttcgagagtatcttatatacattatttatgactaataatagtatgtacaattgatggtcaaattagaattgtactgactcgggttactcaactttctttggttatccatacaactcgcaaactatttgctaaaacttttaaactaatagcgtttaccttaggaacatcaaaataccaaattttaccttctatttttagatactattttcttgcataaagggctaccaccgaaacaagtttcagtcctttcatatatttgacacaggaagatttgtgttaattgtttatcaaaaaaaaaaaaaaaacatacaaaaaaaaaaaaaagatttgtgttacgtacttaattgaaacattacaatggcaaagaattcttatgcactgtctgggttaattgtggccctagtcatcgcattggtatgcaacattgatgacgctgcagcgagagacgtgaagctagtgaagctccgcgatgtaaaacccgaaactttgaacaagttgaaag

SEQ ID NO: 39142 - DNA, 641 bp, Arabidopsis thaliana landsberg
ccatactactttattagtcgaacgtaggttctctctcatgcttctaactctagattctcaatgctaattctacataggaaatactctagctgatattgcctttcataaggctgggattttcaaggtacttttcaaaagattttctttgtctcagaattttatgaatccactatatttgtttcaaattttcccattggcagcttcatgtagaagaaattctctgatttgctttgttttcttgtatgttaatgaaagcctcaaatccccgccttcacagtaccacaactctctgaagcaatggatgttcttcagaaaacagctaataatctcgaggtaactatagtaggttctatatttcattctagttatgccatgtattcccacggttagttattactacaagttcaaaaaggttgtagttctgataagagtttatcaaatacacatgccagtgtctaggatcaatataatttaccaccagggtttctatctttggttccttggtgtcttggcctcttggattctcagttttggaaataaagcaatttaagttttaaaccttatcgtggtctttttggcgtctgtagcttagttatgcttttataaagaattgaactacaagggcgaaatattgaatgttg

SEQ ID NO: 39143 - DNA, 565 bp, Arabidopsis thaliana landsberg
cttcctgggtttacttaataaaacgacgtaacgtctcatactaagaacgtaaaacggcattaatggcgtgatccactggataacaatttcagcttgctctctttcaccttctctctctctcactacgttctcgggctccaaacgtatgaaccagaacaaagccttttagatagttccgtctgcgaaccctaaaatcattcaataaacttcgaacaaaaacgaatgcttttgttcaatcatcttctcagtttctgattccgaagaaaccctaatcaaataaatcatggactgctcatgcagtactcgtccttcgtctctgcttatctcttccgaaccatcttttcgctttcctcactctaatttctcctcgaatctcagctttcaggtttgtattagtatccttagtcttctgctttaagatttgattcgaaatcaatggagaacaattttaaagttctgagattttctattttattttccagataccgaaagatacgaagttggtgaagcagcgtttggtagtgagaagttcctctggttctgattatcaaaacggcgacgttaa

SEQ ID NO: 39144 - DNA, 686 bp, Arabidopsis thaliana landsberg
tgccttttataattcaagtacaaataatgtaactcaattcgtaagcgtgttatctttgatcccacaaccggttggggccagatgctagttgaagaattagcaactctgtaactcattcttcgtcttatgctagttgaagaatttgttttaactagtttattgaagaatttgttttaactagtttattgaacgatagttgaagaattatttttttcaatcaatgatttccatccttttgatattgatttcaatcttaccaaatatttcaccggaaggctttgaagaatctcttctaatagatcctccggtaactccacaacaagcgttgtttcgctacagctagggctttttctgctcttttcttgtttcttacgtacaagatcatcctgtatagtactggatgttggatgaacaaaaacagcatcaggcatggctttgctacatctagggctttttctgttcgtttcttgcttcttacgaaaactcaaaagtctgctaaaatttgctaaacatcggcctaaaacctgtttctttgtttttggagcttcgactgccagcttttttttctcttcactgacactcccgttcacaattgaaaaagccatagttatgatgacgttaacaatcacaactagagcataatattacacatacactaaaacaatatactgtcataaatatttgac

SEQ ID NO: 39145 - DNA, 2249 bp, Arabidopsis thaliana landsberg
cctcctcctcctcttcttccacttcaacctcctcctctatctcctcttctatctcttcaatctcctcctcctcttcaacttcttcgtattcaacttcctcctccagaatctcctcaggatcattgtcaccatcaaggtctaccctttcctcagattccatggagtcatgagcctcagaagcagcagtcctcgtccttgacatcttaaatatctagaaaagaatgcttgcagtacaactgtggaggagacacagaagcaagaagcaagtggggagagagaataaaaccgaggaaaggttggaaaagaaacaataagaggccaatagaaaagaagaataagaagttcgaattgacgctttgccataatgcggctaaaaaggtgacaaacaaatagataaagagagaagagggcgatgaaatgctcaacaggtgaaacaaaaaaagataagaaacgaaatgacccctgagagcggataaaaaccatgatatcataggccttggttagatgcaaagaaggttaaaatattcatggcaacaagaaagataagaagggctaaagtcaaaatagtatctttgcttagaaaactccagctccatgttagaatctcccacaacagacattgttcagaatttgcaagtgatattttttatgctgccaatctaacctgttaagagaatcctcagcttataactacaattctatttgattatttcacacaaattgaccacaatgatagatacaaccaagaacaacccaatacacatacaaagctataactcagagaaatgtcaatcaaaggcgtgtttaagctaacttagcaatcattggaacaaaaatgagagaaagattcagtttttaattaagataagaagagttacacaaatcccaattgtggatccccaaccaaaaaaaaagattcacgaaaggaaacgaagagaggcgcaatgagatgaaagaagaaagagcgagaaagtacctgagagagctgccggaagaaaaccctaattttgagaattacggagaggatgaagaagtgtctatcttcgcgcacctcaggtgttgaaaaatatgtatatgtgtattttgtattgatatgacctaaaagatgcctaagcgagactatcaaggaggtgtagtcactttttattatgatgcgaccaatcttatattacggcttattaccgatcttaatatacgacaaatttgatttttatgcaaaaaaaactttcaagttggatgaaaatttgcgccttatatttttttacacattgttttcaaaattaacactagttttttcttaattaacatgcagtttatacatgatctacgttatttgttaaaatcacatatggaataatttctttaaaattatagttttaccatatacaatatgttttttttatatcaatttttagccaaaacttgcctatataatctagcaaataataccctaatcaatcataattagtctacgattttgtaaaaatgaagccataaaatgtaatacaacatttcttacaaaaaaaaaaagaaaatgtggaatgaaaatattttttctttttgtataaacaataggttcacttaattacttttaatataataaaatccgcacaaaatgtgaatacctcaatttttctatatcttgggaattttgaaaagacataagaatcaacacgaaaaatctcagtctttgactcagactcccaccgcgtaattccgagctaggtttccatttctccggcgaatcggacctctctctcgctctctcttccaatttccccctttttcgtttcccaggtactgcttcttccgattctaacattttttgatcttttataaaatcggtcacattattcttgatcgtatctgcagcgatgatttgcaagtagcttccgctaataatcgcaactctctgacggatgctatggcaatgggacttattcgtcttctttttatagcttttacacttgttctactttcaatccttcctcttcatctctctctcgctggtgagtttcctttccccggataaaattggtgatgaaatgtattagttgatagaacattgtaacctgaaattgaggtttcgttttgtgtagatgagataacatctattgaatctgtacctgaccttcagaagctaatgtatgttgctgttgatgggtttccttgtgtacgtcttctcaatctgtctggagagattggatgttcaagtaagcttcttttgggcctctcagctacatgatttt

SEQ ID NO: 39146 - DNA, 502 bp, Arabidopsis thaliana landsberg
agagcctggtttctggtctggtttcttttcttgtttcgtttctgattgttaatattttgttatcctgaaatgttagctagtgttgtttcctgttgttgttattattatgtcatgagagaaacattgtcattaattatttttgttgaaatcatttccaggtagtacaagggctaaagttaccgctgagtttcattcaaaaaaaaaagttaccactgagtttggagacacagttactgtgacgcctagagcaaggcatcaggcgacaatagtttggcttcatgatctcaacgaatctggctatgagtaagcaaaattctttgttttgctagcttctttgtcttgaactagctgtgaaaagatcaaagcgatctcttgttgtctcacataaaagtcaaagaacgaaactccatcttctctcttaactctcatatgtgtctttgttacagttcctctgaattggaaagagcttctcgctttacaatgtaagatttcttcaatatat

SEQ ID NO: 39147 - DNA, 1372 bp, Arabidopsis thaliana landsberg
ctctagatgctaatgatttgctggaaagaattcttcctgtatcagtttctgattatgttgatctagttaaagctcatatagaagcaggtgagcccagatatttttttctaatacaaaaacttaagttgtttttgtttgggagatactcatacaaatgttttcaggaccaaatcatcactttgcttcgaggcagctattattgttgggtacgatgcttgatttctctgatgctatgctccacaagactgcgagctcatttgtacaggagctgctccgcagaccttttgagcaagaattagatgaagatgggaacagtattgtgattggagatggtataaaccttggtggtgataaagattgggctgaggcagtgtccaaattggctaaaaaagtccatgctgcccctggagaatatgaagaagttatacttgttgttgttgaagaagtagcgagaccctgcagggaaaggactgcggatttcctgcagtggatgcacatgctttctctgacaagtcttctcttggaaaatggaaaatctttacattcactgcaagggaaggctattgaaccagaagagatattgcatgctctattgcttccaggggtatattttctactctcctctgtttattttctactgctaaggcgccacttgttagattagataaatttgttgagactttgagttcttcttacaatcatacttgtcatgaagcagcttttttgtcattgccaatttcactttaaaatgctgatgatccatatgatctctgcatccttttgtttcatcgaaaaactgtcaaaagatgttaacagttttaaggagtggagttatgtagctaagaaacagcttatcatgcagttgaatccctttggcatgattttcgtggactctgcaaaacaagcactctttctgatatgattcatgtcatgcaggcaaaacacactcacttggatgtgcagaggattgctataaagggccttggtctttttggtttgttagagaagaagcctagcgaagagctagtaaggcagctacgtacagcgttttgcagaagccctcctccaattagtattatggcttgcaaggcactagtggatcttgggatgtggcatagcccaacagaagtcgacaaggcaataggacaagatctcttgtcacaatttgaagatgagagcattgattttgcacccatcgacttatcgaataccgaagaagatatgaactttaaaatgctcgatctcttgtatgctggacttgaaagtgatgactggagagcatctacagagagcagtgagaatgagtcagttaaagcaacagttggggaggggtttgcaaaacttcttcttctaggagaaaagtaccgaaact

SEQ ID NO: 39148 - DNA, 829 bp, Arabidopsis thaliana landsberg
  unsure (1)..(829): unsure at all n locations
gggggaaagccctttttgctagatttgttgctcttcttcttcgtcttattctttgaagatgattttcctctatcggaaatggtggttcctgtgcggattaagtaagcaagaacctctctttcttcagaggagagaacagaaacaagannnnnnnnnnnnnnnnnaagaagcttcaacacagagagagaatcatcatcttcttcgttgatatggttcgaagaagaagaagatgatgaagattgaggaggaggaggaggagatggataaactcttcctttcttcttcattatcatggtttttcttgggagagacgatgatgatgaagaacagctgtttctgtctttgatctatgcctttaccaatgtcagtggagagaagatttatttattttattttttagataagtgaagacataaaataattattgaagaaatttggactccaattatacggcccacctttattttttctttctataaaccaatttatgtaagttcttgcttttttctttccatacttttttttgtgtgtttcgtcgtattctttggatacgactgaaaaataaagataaaacttaccacatttatgtgtttttttcttaatacaactgtttattcgttcatgtatatacagaaatttactatttttatgtacactttatacacgagttgatttgaaaattttaattgtatataagaaaggttggtaaaataatttataaactcagcattattttgttattttttttcatgaatgtaatgcaaactagtggttatgaaatgtatacaaaatgtgaaccacgtcacgtttgcgggatacctctggcata

SEQ ID NO: 39149 - DNA, 606 bp, Arabidopsis thaliana landsberg
cttgtcaaaaccattcgctttatgtatatttatctttccttgcatggcttatattaggaagatacgttttgcaattccatttcttcctcttggcaagatgaaacgaaacttggaaacgtcctatttatgtccctacatttaccaagaatcttctgattagtcaatttgattcaatgcaacaatcaaagcagttggtttggatcaaagttagtcacggtgtaaattatgaactcactttagatatggcaaagtcatgttcttgatgagcgatggattcaaggatacaaagtctttccattcatctatatcgatttttccgtcgtttttgcggtctgcttgcacgaaagcctgcaaatatataccaccatttccttataaattctttatcatatcatcttcagtattggaattaatatctagtaaacaaatgtgcatcggtgtgggagtgattaccttatccaccattacttcaatcatatcttcggaaagaactagttttgattcgtgaagaagcgctactaccatctctttcaactaatcacaacgtaattcattatggtatatacatgttagatcaacacacataaacgttagcggagtaaaact

SEQ ID NO: 39150 - DNA, 680 bp, Arabidopsis thaliana landsberg
cagcatccgatagtctgtataaatttcaatacaattatacaaatttgggttgcatgactagtaatctgggtaccaaaggtcggggttgaaacatttgaccctcttgttaataataataatacttaataaacgcaggcaagaaaaagaaaaaaaagaggagatttgagagtttgagaccttcttgttgaacgatcattaatttgaccagttgagaaaaataataatataatcttagattcaattttgacggaaacgcagacacaatattgcatgggtccttcacatgccttgtttattaatttttaaggaaatcaagagtatatggtcaatatggtgagaaaatcctttgcatggtccaagatcaatgctttatgtattttatatttgataaatattatatcttaaggcctactattaaacaaatctaaatttttttatttttaattaaaaataaaaaaggagtaaaattgtatttgatcaatactaaaaaacaacgaaatcttccatatactacataaaaaaaattatatgtaaaatttattgatcaatgctaaagaaaacattaaaattcgtaataatttttcaaatcctacataaacataaatagatattcaaacatttctcgttgatatttattgattgaaaacaaaatttctgtaaacttattttgattttatacg

SEQ ID NO: 39151 - DNA, 282 bp, Arabidopsis thaliana landsberg
gcctggcaaagcctcccgaaatatttttcatgacctgttatgttatgcctccgctgagctgtgaacgggatgtaggctgagcacccgcgcataactgaaatccgcttccacccacccggccgtggttgcgaaaccttcgaggaaagctgtggtgcggttggcgatcaggaaatcatttatactgtgtacggtggaatcaacataattgaagggaagcgttttggaatgcacataattgcggatccggaaattgacagccatcgcctgcttttcatcgatctt

SEQ ID NO: 39152 - DNA, 359 bp, Arabidopsis thaliana landsberg
  unsure (1)..(359): unsure at all n locations
gggcaccactctatcaggcgcaccgggcgacacatacatgccgtctggggccgggggaggggccccattaacaggctgcccggccgcctccacctnaggtgtctttaaaacttctgggggggctgcaacaccagagccgtcaccgcgttcttgtgcgcctcccaatgcacccggaaccgctgctgaatctcatcatccgccaactggaactgcttcgacttcatccacttctcatgaccgcgcagatgcgccgcatggatgtcccagtccatcaccggcggcatatccgcatcgtgcgcacccggccgcgccaactggcggttctccgacgcgatcttgcgcgcatcgtccgtgaaccc

SEQ ID NO: 39153 - DNA, 389 bp, Arabidopsis thaliana landsberg
aattttttttttataaaaaacttgttatgttttttggccggatatatacacaaatattatacaccatatcataacatgactttgtgcaaatttctttgaaaataaagttactcgagtgttgcattaaccatattgaatgaccattgtttatttgacgtggattcaagtaatattggtgacttggtgtgtgtcgtgtttcgcagcagaactagtctagagaacgggtttggacgtttggttttaggagagcgagcgaaacttaaacctgcaccaccaaatggttaggaaatctcgaaatgagaaaaaacgttttttttttcttttctttcttccttctttaatggttctcgaccgcttcaatattttgaatactatgttcttaccaagat

SEQ ID NO: 39154 - DNA, 735 bp, Arabidopsis thaliana landsberg
ccatttttttacattttaaaagtacaaaatacttcaaaaagaattaaaaaacagttttgcaaatgtaactacaaatgtcaagtgtaaaacctagcaaaagaaaaaaaatgttacgttatgaaatatacatgctacatataaatgtaaatgtgtatacaaacaatctaaaccttaaaacatgtttcggctattctcttgcaaaagaccaatatgataatatttatggttcaaccattttagcagctatcataattaaaacttggaaacctcaaacacccttttaggcagcttcttcacaacttgaaatatgaatcgagtataaaattaatggtatatgcatttacgaacccgatgggtatttaaatatatatatattttggttagaatgcttcatttgattaaataacccaacttcaacaagttcaacatgaaaacgttgctaagcatgctttagctaagtcgtccatgccaacgcatttagcagtcctctcctctgccctcaaaattaaccgaaaactggatagtcgaggaggcgatatataatttcgttgattgctttggttatctaattcgttttgttgatgatattgaagagacttgaaacagttgtgatatggaaatagtatgagtctgcgtctgccacaagtttgtgatattgttcaaagaactaatcagtgaaaaatttcacctaatcttagttaattaagattatagtcttccaagtgcagtctcaga

SEQ ID NO: 39155 - DNA, 651 bp, Arabidopsis thaliana landsberg
taagcttttgctgggctcatacagtgtcgattgatctttcgaggccaagttctacaaatatcaaccaataaagatcataagacataactggggcagataattactggaactgtatctgagaatatatcagcaacaaaagttataagtacctggccattaatgagtttgcggggaaattcaaaagagtttccagcaattactacatgaactatctgtgctgcaaggccttgttcctgttcaaaccataaagtataaattaaggaaagaaatatgttgaacaacctgcaagttaagagatttgaacctcctcatctccgagatgcccagttatatggtcaacaagaagctgaaactgcaggggattagccgatttgcttccaatacaaaggcccgacaataacacgacatatttatcttcctctgcagatgcaatatggatgtatcatgagagattgcttatagaaatgattgagccatgaggttagcaaaaggaagagaacatagctagacttacgtagatcgataggccgctcaatctgaggtggtaaaccagcttctagtacatcctcaacaaagaattaccagcattagtttccttccatgcagtgaacaacaacaccctacatgcacgggagggcttcaacgtaattt

SEQ ID NO: 39156 - DNA, 386 bp, Arabidopsis thaliana landsberg
ggaaaacgcatgcgaattgcctttttgtttccgctcgattagttttcggaccatttctttttcgcccatccgggccggtctcccttggggcggactccaggccacacgtggttgtaggactgccaaggggatgccaagttcctttttcgggcatcactcgtgtattgccatgcaagatggggccagcgacccggatcgtcaagcgagaagctgtgcggccaggggatcaggcctggctgcccccgtgacgcccggacaggcgctggcgctcggccagcacattgtcctatgcattgcgggacagtcgtcgggaaaacatataggcttgggactggtcgcactgctggtcgcgcaaaaagttcaggtgcgcctcggtttccacgccc

SEQ ID NO: 39157 - DNA, 438 bp, Arabidopsis thaliana landsberg
gcgcaggcatcgggctggccacggggatcatgccgaaggtcggcgtgaagccggtgctgacgacttggttcttcggcgtcgcactcgggctgggcctgaccagcaccatcggggtccacacctcgtacgccggtcacgtgctgcccgggatgatcgtgctcggcctgtcctcgggcatcagcttcccgggcttcggcaacgcgtccctgcacgaggtcaccggtcaggactcgtcgctcgcggccggcgtgcagaacgcgctccagcagatcggtggcgcgctcggtctggcgacgctggtgaccctcgcgacccgccacgctgcgcaccaggtggcacacggcgtcgaccagctgaccgcacgcgtggacggcacccagctggccttccacgtcggggtggtcggctgcatcatcggcggcgtgctgatcctggcgc

SEQ ID NO: 39158 - DNA, 520 bp, Arabidopsis thaliana landsberg
aggttttatttatatatgtatctccattattcgatattttgtttttcatttaacaaacaaacaagaaagaagagatagaataatgatcgtaattgcttaaatgattattatgtttagagtgtccgtacagagccccaagtgtttgcttggctggaatctttcacgaaaagtagattccaagcaaaaataatagttaaatctttaagcctttgatactacgaatctatttattaacatttaaattcttgttcatgctatatatcatttagcttaggttcaacctctgaagaaattcatagtaaatctctacttcagaaattagtcactatcttttttagatatacacataacttaatatgtgtaaatcagtgtatatatacaccacctatatataaatctctaggaaaagtctatagtcttcatacatctaaagttaaagtatccacaaactattggaccacaatttagataatactttcatccaatttcctactttatgttctgtgttcattattctcct

SEQ ID NO: 39159 - DNA, 578 bp, Arabidopsis thaliana landsberg
  unsure (1)..(578): unsure at all n locations
tcgcggggcacaggtttagtgctttctcatcatagtaggaagtttaccacaccgaccaacagtctttgctcgacgcggccttcacttactgcccttagacaagattacttctctctctaattatgctcagtcaagaccatctactcttcaccacagataaggagaaaataattcactgaaaaaaatgaagccctaagaggggtttcactcccctcaaaggctcttgaatcttgtcaaatgtgtacccaataaatgttttagattttcactaactttctcattatagtgtctcagtcacaaacttgaggtgggtgaggataggatatcatatttttcttttctttttgattaacagtattctccataggatgcaaatcccataagatggttgcccagctgctttctctcttcttttctctcatccagttttgccttagcaacagttatttgttaaatgaatacacaaacagcacataattcagttgtttctttggctgattgaatgtcttcctttggtctncctgctacctggtcacttttctagttttacctttgaagtagttataagatcatcatca

SEQ ID NO: 39160 - DNA, 677 bp, Arabidopsis thaliana landsberg
gataaacttcaattttaattttgttgttttgaacttcactaaccacttacaccaggttaatgaatacatacgactcgtcaatttgtcatcatgtcgagagagaaataattatcatcaatatgtttaggcgtttagccaaccacttcatatattggcgagattattttcttataaatgtagcaacacataaatcaagaaattcgctttcaatatattttggccggcaaatcatataatttcaaaatccaacaatactattataaaaaaaaaatctagggaattacaatacagttgtatttacgtaatgacaattgtaatggacataattagagaactagttgccatcaatatgattagccaactacttcatatattggtgaaatttttgttttgaatccaacaactactgttggatcaagaaaacgcctaatgatacaatttcgaaatctaataaaaagtcaataactatactatttctttggtcaagaaatgtcaataactattactagtatgaagagctgaaaggtgaggtgttcgagagaataatatggagatgtggccgaaaacagagaaccaataacgaaaacttcgctccctgcctactcatataaatttcgatgaatttattagcaacctactcaactcgaaatgacttatgcagtgaaataatatacttg

SEQ ID NO: 39161 - DNA, 306 bp, Arabidopsis thaliana landsberg
gtggtaatccgacctacttaccaagtgaattttacgtaatctaacggccggtttagaccaaccgttctacaaacgaacagtaaattcaataggtgagcagaaaaaatcattaaacttctccatttgattgttttttaatttaagtagcaaatacaatatgtatcattcaaatcacttaaaattttaaacttgggttctctctttgtcggtttagagaattaaaccaattttgtaatagccacaaaagaagaagaactacggtaaggatcttgacaacctcaccaccgttcgttttagaggctctat

SEQ ID NO: 39162 - DNA, 464 bp, Arabidopsis thaliana landsberg
tttgttctatggcctccataatcattctgatacgaaatcctcggtttccctgcaattaaaccgctgaattcttgagactcttttagatccattttgacaatctctcacataaaaactcaacattcttactcaaatataaacaatttttgtccttttgttaagaatcaagaacctatcttttacatgagaatcatctaaaaaggttgaaaatggttacacaaactctgagttcaaattgaatactatacaaaatttcacatatagagaaaaaatttaaaagatttcgattcacttccactgaaatgttacaaatcaaattctatcattgtgtgaagaaatcaaaaatcaacgttaaaagatacataatttcgaatagaaacaaagaatggcataatgggatttgataaaggaaagaaattgattcgagaaatgatctaaaagagttaccggagagtgaattagcg

SEQ ID NO: 39163 - DNA, 660 bp, Arabidopsis thaliana landsberg
aaatacgttaaatgtaaattttgatattcaataaccgaaatgttagatcaaaacagtagactcgaataaatctttttattcaaaaagtacactgttgttttgtttgattcaactacaccattatttacttttcaaccaaccccatcaacaaataaccgatggtaataaatataagcatttactacaagacatacgtaaattttttaaaacacgttttttatttataatttaaggatatgcaaaattacacctaggatacaacatcgaatgaaaatagataatttaataaattttgttaaaagatagggtccacgtttctatttcgcatcatctgcatcaaactaccacacaaagtcatcgcaccaaccatacctctttgcttacttcacttgagtttcaaacccataaacaacaacaacagaaaatatatactgccaattaaagtagcattttcatctccatcgtaatgttataaatacacaaattgttgcatatatatgacaacgttgatattcatctgtattttgatttttgcactttaatatcacatgcaattattttcagaaaaaaatatcacatgccatcctaaaatagtgtcatattaagaatttaattaatccaatataatgattcttttgttgataaattttttgaagttaa

SEQ ID NO: 39164 - DNA, 481 bp, Arabidopsis thaliana landsberg
atcataataatttgcacgatatatattggctagccttttctaagttttctcgtaactaatttatatgtagcactacaaagtactataaaaccacctcatatgagttgaaaaaaagaaacacatcacatgagcccacatattaagttaggagtagttaattagcgctagattgagaagatgggaatatagattttctttagcattacattttgaagaaaaatcggaaaaatatcatagcaatattttactaatattgattattgagtacatgggttcaaaataataataaaaaatggatgaggttggcattaaatatttattgaaaatgaaacgttggccggcagtttcattttatggccccaatgtgccatgtaagtactatgtagatcatactcctaataaaaaaatgtaatttggactcgaacagcaaaaacatttgatgatagaaaaacgaataaaactgtaaattgatagaattggc

SEQ ID NO: 39165 - DNA, 332 bp, Arabidopsis thaliana landsberg
actcgtactttatcacctggacgtatgctgttgccttgcaacacgaggtgcgaggccagggtctcgagcagcgcctgtcccgcgctggtcgcggcgacgaggtcgcccagcgccggttcggccggcagtagcggcgcgccgccgatcccctcggcgaccagccgtaccgcgcgctgcgccacggagttgtcaagatatgtctgctaaaaggtacgcacttttgcaaatatatggattatcaatgaacctgtaaaagaatatcattaaaaactcaccattatagaattagctgccctgcatttgtgtgaaatcttcgaatataacagtttgag

SEQ ID NO: 39166 - DNA, 560 bp, Arabidopsis thaliana landsberg
acactaattaaaactattgcttttttttttcctgtcaaagattttaattttatgaactgtaaacaataaatttgagggaaaaggtacaataacactaaattaaaaattataaccagtaaatttgatataaaatctacaattacacttatttaaaaaattctaaaatatctctacctaattaaaatcaatatactggaaaaagcataaataagatagcattaagttaaaagataccaaatgtttagataaaaagtatctaaaaattcatttgatagaaaatcttcaataacactaacttcgaatttcctaaaatatcattatctaattaaaactgataaactggaagaggattaaacaaaagcgatgtcattaaacttaatgatacaaaatatttacataagaaaatctaaagatatttacttctttaaaaaaaaaaactcatcaactcttctaaaatataaaagattgaactcacaaaaaaaacagccactatcgtttagaaatagaacgtgcctaattttcattagccctttgatccattcaccatgaaccatcagaag

SEQ ID NO: 39167 - DNA, 1108 bp, Arabidopsis thaliana landsberg
gcggtgattttcggcttttcagtaaccggagaatatgtgttcacgggtttattgcttactatgtgttcgttgaaatgtctgactgtagacggtagtaccatctcctatgtcctggcttctgctgctgctgttgatgcgtctctttaccattggtaatcttttttatctactcaaccaaatttgactcgaaaagaatttatgattcagttgaagttttgtatactttgaatagaactaaaagtctaaaagtatgaacaggattacattaacattaagtaagtaagaatgtagtttcatgccaatggggccatgtgatttaagaactgtggaggagttagagggacggtcaacaactctgacttgcttcccaacaagtaaacttatcaaatcaattccttttttttctactttgtgaatccattttatattcttttttccttagtatctttagttgttaaaacttatgaatattgaatagaccatcagctaatctatgaaagcagggtattattattataatatacattaacataatctatagttttaagaataataaatgttttatctaatttgatgaagataagcaccacagtaacttttatttccaaggcaaatacacttttgtcactttgtctattttgattttgaccatgtatgtagatttctagctctctcctttttttggccgatttggttgagaatttgacgacgactcgtggggtcgtgtacacattggtgactggtcttttgacacgagtcgcctctcttcttctccctacccatttccatgaaaacatgagccatagctaacttttcttcttcaattgaaacccaccacgcttcttttgttcatttttaatatttaaagcttcctcctttattgctaaaagattgaagattcgcaagtttttatagtttccgttggccttttcaggtgaagaagattcatttgccttttcttctaaagtccccaacttttcagtctatctcccattgaaactcaagctttttatgggtttttagcagaagctctgctttgggataggacataattgtcgctccagtcacttgaaacaattgctgtaactctttagcttaggagaaaaag

SEQ ID NO: 39168 - DNA, 545 bp, Arabidopsis thaliana landsberg
caatgacgacataggcagaacatgaagacatgtggctttcccatctgtagaaagattcttcgaaatattatcccaaccaaaagattgcagtattcgtcttcttgaagcatttgcaaatatcttaacctgaaaactccaaaaagttagaacatatagagtcccaaaaagatggctaaaacagaaagaaaatgtctccagcattttataccccaagagctttggcaatagcaagataaacacattcttttccaatgctgtaagaaccaaccacaatcagagtcttcggttgcttcctgaggaaatcctttgtgattctcacaacataacttaacacatcttctttagaagggaatctgaacaataacataaaaaagaatggatcaaacattacattacgagcacacgctccttcaaatccatcacaagttatactatttgacaaatttttgctctcacttgtatctcggattgcaatatgttgtatccaaatacagaacatgaactcgttggttaaagaggagaggatgcgtttgcatctgtttaga

SEQ ID NO: 39169 - DNA, 483 bp, Arabidopsis thaliana landsberg
cccggaccagcggaaacccattgtatgcaatttctggcaaaccttttttggcggcttgtcagggaaaataagctgcacgcggttagcctctacgttctgcaccaggcgcaccccttttacggtaatttcttttgtcgaccattctgcggccgcccggagtgattgcaggcgctttttaaggcggttaatgtttgcgttattattcgtcagcctgtaagaagcgaagccaataccatgcaccgggtcgggggtgctgagctgctcccacaattcaggggtggcgtggggcagttgtaagaaggcagctttgttgttatttcgcaggcatttattggctgccttcataaactcttgcagggcggccagctccctgatctttttttccagcttatccgtagctgcggagtcatcggaaaacaccgcgtcgttgttttcgatagcttctgccttttgctcatagtattccgctttatcggaggcagc

SEQ ID NO: 39170 - DNA, 575 bp, Arabidopsis thaliana landsberg
tttatgctaaagaatctttttttttttgttgcaacatatcatatgatattttctatttcagttaaaagaattgaaggagaaattacctccagaagtatcagagagtgaagcatttgaatccattaactctcaagctgaagcttatctaaacgccaacaaagtatcagaaacatctccacttacaacttcgggacaagaacaagaaacatatcaaaagacagaggaacaagtaccttctaactcaagtataaccgagacatcgagttcatcaagggcaccaagtacagaagcttcatcatcaagaataagtggaaaagaaagtaaagaacaatttgagcctggtgtttatgtgacttatgaggtagacatgaatggtaacaagatctttcgacgagttagatttagtaaaaaaagatttgatgagcatcaagcagaagattggtggaccaaaaacaaagataggttgcttaagtgttatagttcaaattcatcatcatcatcatcatcgaatccaacggcttccgactcacctgttgctccacaaccaccgtctgatccgtcggtacctgaacaga

SEQ ID NO: 39171 - DNA, 425 bp, Arabidopsis thaliana landsberg
cgtgtggcatgtgttgttcttggacatcaaatactttttggctttttattgatcgactaccatcctatgtatgtataatcgattttagaagaaacatatataacatgcaaacactatactgtaaattcaattaattaaaatttgtatgtagtaaaaacatatataagtagactatgaagtatgaaccacccccgaaaatcattttttttgttacaatcatagaaattaaaaggtcgacacctcgaaaaaaaaccccctgagatatccattttgaataattgaaaacgataatagtgtgattgtgtgaatggagatattcattttgtgtaccaaatacaaaaggcaggtggtatacattgttcattgttggtacgtagaaatgatggagtaagaagaagccatgcattagatgacaaaacgatgat

SEQ ID NO: 39172 - DNA, 1026 bp, Arabidopsis thaliana landsberg
ttctctcagtgtagctagggtgcttctgaagtcactagttatcatcggagctacgctaggaatagtagtcggaaccattggcacagcagttccatggctgttccctggcatcttcacacgtgacaaggttgtcacatccgaggtatatctttacagtttttctcatatgttcccgacaacaaattttgaagaatgaagagtttctaaacagtttttcgtttcatattctaacagatgcacaaggtcataataccgtattttcttgctttatccatcactccaagtactcacagtcttgaaggcaccttactggtaaatcatacttttgtgtctcagtacatttctggatcacctgcaaacctaatctagaagaactaagactgttgtatatgaaatgaaggctggaagagatcttagatatatcagcttgtcaatgactggatgcttagcggtcgctgggcttctacttatggtactcactcctcttatcatcaatctccatcactctcttgaattctaaaatagattttgtaactctttccttttcgcattgtttaccaatttactaatagcttctgagcaatggaggatttggtttgagaggctgctggtacgctctcgtgggattccaatgggtaaaaattgctacgcctttactaagccacaatacccagaacttcatatatcttttgctcttcttaaatctaacatcaaatatttcaggctcggttttctctatctcttttccgccttctatcgagggatggtgtactgtactccgaagatacaagccgatacactgagaaagtgaaagctgcgtagctcagcaagtcaacgtatacctcacaagaaaaagtataatgaacagagaacagcttcattcagttgtagatcaatgtgttactctgtttcaagattgtattctttaagaacatgaaaatgtattcgactgaatagaaaagtcttggcattaataggccctgcttcaactcctgtgattcccctgtatataaaagatgatacaaa

SEQ ID NO: 39173 - DNA, 899 bp, Arabidopsis thaliana landsberg
aaactttcccttgcgacgactaaacatgcaatttgattaatgatcatatttcattattttcaatatattcattttattgaacaaaaggccattaggaatagatggaatgttttcagtttcatcaaactaccattgatgatttcaaaaagtaaatcttatttgcaagttttggaaaattttgtttattggtaaatgaatctctcctttttcttgttacgaaagtcaatgttatctattttatttacttgcagatataatctgacttttggtgatcatcgtgcacaacctttctgtgtaattgtcattttcaatcatttaattttgaattaagttgcctttttgaaaaaacgttcattctccaaaaccgatgcacgaattccggggagaagtttcaattatgcatcgttaaaaaagaattcagaattgtatcaccaaaactttgtaacgttaacgtaagattgactatagtacttaattacttctggtactacaatgcaaatcctttaagttaacaatgataaaatcttccaagtagaagaagttttaacagactctactttttaaggtgcctgataatgaggaattcgaaaagctaaagaaactgactgttatataaaaaaaaaaaatcaaagagaaactgacttttactagtctacaagatgacaaacattacaaaacagtttcatgtcaaattttcaaaattaaaatattttaaaattagtgaaaaacgagcaaagcaaggtcaagcgtctctacctaaaataaaaagagaaagaaaaaagcaacaaggaaattccaatggttaatttttgtgtcagcaattcgaatagtttaagataaagacgacagtgaaatgacaaaagacattgcagaaagagttaaacgtaaaaagttgtaat

SEQ ID NO: 39174 - DNA, 574 bp, Arabidopsis thaliana landsberg
  unsure (1)..(574): unsure at all n locations
tctcttgtctcgattgagcagatggagatgggttaacttggagatcctaaaccatcatacaagtatcaacataaatcattatatatagaccaactccaatacatcaaacatagaatgtctagtaaggtaagagtctgaacactaaccttaatgtcacttccacgaaaaagaatgtaatcgtaaactttatcacatggcggaatttgcggcccatctttcttcctcccctccgttccacatgatcttactgcacaaccattcaatatataatcattgaacacaagaacgccacacttgaatagcaatacaaattaacatttgcttggtaacttcacctctcatgattcactaacatagaagtttccagattttgcttagagtcacaaatttttttaactcttcactaaatatcaacacanatttggaaactatactacagagaaacaattgctcaagctctcttacatctccttgaatctaataccaaatccagaaaacataaacaaccacaagaacggaatcaaaatcaaattttcagtttcaaacgcaaacaagtgatgacatatatatatac

SEQ ID NO: 39175 - DNA, 721 bp, Arabidopsis thaliana landsberg
acacaaaccttcacgctatatgtaattgtgcagtttatcattgttatgtttataggatgatgagtttggcccacaaacatattattatttcgtactaataatagtcaaggggaattagttagttaactgtcaaattatttccttaaactaaaaacttcaaagacaaataatggaaaaatcgataaagatcaacctgtgtactttttaaaattttcaatgaatatccaaaatgttccaactgcaaaatttactaaaagtattattgcgaggcaaatagtaatcaacttcatagcaaaaattatgcactattgtttttgttttttttcaatctgcactatttatgattcacgcaatatatatagtccattggcagccaaaactaaaaaagaaggaacttgaaaagaaaaaaaaaagaacagaagataaagacaattttcactatctaggatactctcatatgggtatcgatagatcagaacctaacacaggattcaccgctaaggcaaatacagtaacataggaagaactaaacaagaccacttagaccaaatgccattcccttatgtctctcattatcaaaaccaaaaatttctggcatctagtataaccttcaagctcttattccaacaaatgtatatgttaagcaaaaaacaaaacaaaaaaatttgaagtttaccaaaaccaattctcaccttttaatccttgctcatcttcctccact

SEQ ID NO: 39176 - DNA, 679 bp, Arabidopsis thaliana landsberg
  unsure (1)..(679): unsure at all n locations
ttggttatctccttttcacaaaagtttgtgatatttctcttaagaaaactctgtttttgtttccttagataaagaagaaggtgagaaagcggagttctctatgtgacagataaagaagaaactgaagattaaaattggaaactagtggggctactactagaaaaagcttaaagaatgtcttttatttgtatcatcatcattcatcatcaacatcaacttgaggcatcacatttacacgcttgtgctcacataattaacaaatttattttatggtgaatttttaaaattggttgactaattgaaattgtatttggtgaaaaactgaaaatcataagaacagaacttttatctaaaatattaattaattaagagaatagtacaaaaataattataaaacagagaatcagttgcttctgatttctgacagatttctatcatcatttcatgaagattttactcttcatcgaaatgataaaatagctgaaaaaaagtaattagcgaattataaaacagtagcaaatgtaaacagttttaaagaatccacaaaaaggttgaccaaatggcaattacaaaaaatgcagcttcttttcctctaaagtatgcttttgactganaatatttaaacgttcttaacggacanatcaattaataaataaaaacaatttcacaatcaactaaa

SEQ ID NO: 39177 - DNA, 774 bp, Arabidopsis thaliana landsberg
gataggtttcttttcttcttttcgggtggagagttttattgaacatcaagataattgttccgcacggtgtgttcaccgtgaaccgcctcgaccaccacaaaccgcggtaacagtcccggcatgctcttctagaaccgcctcaaccgtcagcactccgtctagtgaaaccaattacggcggtacagttgcggttacgactcctcaacctctagaaggccgtccaattcatcagagaatctcatcttcaattctcaccaactcatcaaacaatctcaacctcgaactccaactttttccattatcgtcgaatcaaaaccctaatcaagaaaaccaacaacaaaaagttaaagaaccatctcatcatcataatcataatcatgataccacaaacttaaacctctccattgcaccatcatcatcatatcaacattacaacaactttgatcgtataaaagagattatggcgagcgagcaaattatgaagatagcgatgaaggagaaagcttacgctgaggaagctaaaagagaagccaagaggcaacgagagatagcggaaaacgagtttgcaaatgccaaaaagattaggcaaaaagcacaagctgaactcgagagagctaagtttttaaaggaacaatctatgaagaagataagttcaacgatcatgcaggtcacttgtcaaacatgtaaaggacagtttcaagcagttgcggttcccgcggctacggctgatgagacgtctcttgtcgtgaagtacatgtcgtcagcgaatactga

SEQ ID NO: 39178 - DNA, 916 bp, Arabidopsis thaliana landsberg
  unsure (1)..(916): unsure at all n locations
taaagcatattacgcaattttaaacatatacatataatatctatttatctatatacttttgcttgtcacaacatgcttagttggtggatagtttagaaattcatatttaaacaattaacaactaatgtacatgatcttatacaaagttaaggcgaacataggttattgagtatgaacgggggataggatatcgaaccgtcgagaatggccatggaaatgtggtggtttgcggcctccgtcgcatgaattccatcccaactcacgtaattgtgtggatcacggcaagctttggccgtcgcagaaaaatttccaatcactttggtgttgccacaaaataacttctgattgaaattgtatggacgtccaccatatccacaacaagctttaataccgtgtttcataccttagatattatcatatatgaaagcaaaacaaaaggattcggttacgtaaaataccaaaaattgaaaatttatcggtttaagtacaactaaaccagataaggttatgacataacgtaccgtaggatttggggtgttgaaagagatcaagcaatatcttgtgcgtgtctaaataaattacggtagcgttttttagttcggttctggtctgagataatgtcttattcaataacgtgttgtaatatttgactgctttgtttacaggaatgagacatccatacttgtctaaatcagcatcggtatgagtgtaaccggttaaaatcgccgggtaacatccaaccggtgctaaattcaataccaaaaatgtccgaccacctattccatatatctcctacattcaagagcaaataacttaagaggaggatatgaaccatacaaaaatcggatttccaaatggagaatacgaattataagtgggttaagataatatccatacanatgtttcgagatagtat

SEQ ID NO: 39179 - DNA, 547 bp, Arabidopsis thaliana landsberg
gaaagctttgatgtcgctttagtgattgtaactgtctaagtggtacaatacatattaaaattgtataatgttaccactcaaatccttaatttcaacatgtaaagatggtttagaaaaaaaattggatacttgagtcggtgagataactaaaaaattctaattaaatttcagggaactttgattgccacattaaacataattgtttcatgtctattaattactccctcaagatttcagtttgggggaggaatattaacaacttaatcattagtttttaggtgattaatgttgattaagcttaatgtgtttgagatcagaaactttgcacaatgattttttgttttagtcaataatactgaaattttcatttatcgcttcttgcttttctttctcggttacaactctttcatagccacgaagcaatcatagtggtctaattaaaaccatttcatgattttgggtccgctacatttaattcccataattcaaagataagcagtttaacttctgttttttttttctttcttaatctatattttggttacca

SEQ ID NO: 39180 - DNA, 467 bp, Arabidopsis thaliana landsberg
  unsure (1)..(467): unsure at all n locations
cccgaggcgcgcctgccacaacgcgcgatagctctccagccaggtgtcgaggctgtttagcggttcgggccgcaggctgtagatcctgcgctgcgcgtcgagacgcacgctccaccaggcccgcttcgcgcaggaccttcaggtgacgcgagaccccgggccgggcgatgggcagagcatcggcgagctcgccggcggtcgccgggtggtcccggaggatctccaggacggtacgtcgactctcgtcggnnnnnnnnnnnnnnnnnnnnnnnnnggcgagagcgtaaccgatcggttacgtacccacaaggttacattcagcgctcggcgcgccgctcgtggtggtcggtgaaccggggctcgccgaacggcggctggtcgtgggtgccggtgtcacgacacacccagacccacgcagcggcagcaccgaggagcagcaggacgaagatcacgacgaggaggaccat

SEQ ID NO: 39181 - DNA, 399 bp, Arabidopsis thaliana landsberg
  unsure (1)..(399): unsure at all n locations
ggattcttctattcgtgcccaggcgaagagtctcattacacctataattattgttttgaatgctacttcgggctctcagcaaacatgggggggcaagtcgcacgtagctttgcagggtttgttctaccggttcaattataattacaaagaaaaatatctatttgaaaccaatggacggtacgatggtacttcccgttttccaagagacagccgatttggctttttcccttcggtatctgcaggttggaggatatcacaggaaaagtttatgcaaggaacttcaaactggcttgacaacctgaaattgcgtgcctcctatggcactctgggtaaccagctgtggngcagggattactacccctatatttcaaccatgggaacccggatcagcgccctaca

SEQ ID NO: 39182 - DNA, 317 bp, Arabidopsis thaliana landsberg
ctactatgactgagggggttgcgacccacagcttagccatggtattgactatggatgaagccttatccagtccaactcgctgacctatctatcccaactcatacctgatatcactgatgggtgctgctctgagatggtgaaacattgatgtggcaagcgtctacgcgccattaacgggacggagttctatacccgtacgccggtgaccgcgcacagcggactctacgatgtgatcctagtcttgggtcttagcaacacctcttgctggcgatttcatactaatcgtcgcaactactgcggctggagcctcagcaagg

SEQ ID NO: 39183 - DNA, 500 bp, Arabidopsis thaliana landsberg
ttatatgtaccgacattcatataagtggtgagcttttgttgtatttgttctggaaatgaatagttaagatttattcaaacagattaaaaaaaacgctgttttacaatatatgcaaaccttaattggggtttagacataataatgtgacttacacaatacggagatggttccatgagatggcatattcgtggaaatctcgagaagggtcgaaccaaaggttaactctttgctctctatcgcctttaccatgagcaaacacattggtttgcactgtgtaaggttgtccacttcgatttcctaagaactcaaaatcaagctcgtctcgtaccgaatcggtatctgaattcatctgcgcaaattagtttcatattataaccaaaacttttgaaatgcagtgacataaacttgaaatatatgtatatatagttacgtagaaggcagtgacagtcccggcagaatcaccggggatcagtttgattttcatgctcacacggccgaac

SEQ ID NO: 39184 - DNA, 411 bp, Arabidopsis thaliana landsberg
attgattattgttatatgtttatatacatgataatatttttataccatttgtgcaggaaaaggttgggacaaaaaatagtaaatgatgcgaaagctcctgattcacgtttttcaacgttggtgacaactagtcaatatatactaaaatattttattttgtccgataccaaaacgcagaaccaaataatttggtatacttaccattttcaaaactggccacgtttttctccctcggtttcaaactacaaagacactacttacattgggtagtttatataactaataacttgttctacttatcgaacgttcaagacttgatcaatattcttagggagatggaatttatgtattcagagttaacgagattcaaactcataaacactattttagatgtgattggtaaaactgatg

SEQ ID NO: 39185 - DNA, 501 bp, Arabidopsis thaliana landsberg
accctaatcttctaaatttgcggagagcctcatagtttaactttcaagttgcctctatacacaaaactttgtcgtgtattgatgattcaagtggcatttggttggccacataattcaaaaggtatataccggggaccagtcacttttgtgatatgtttgaaggcagatattcatcggggtttggcactctattccaaacaaccggtctgaggaaattatatgtcttatagaaaacgtagttagataagatgtaataggtttatgtgttttcacgtcatattcttagtattcgatgtaacataacattttacaatgacaataaatattaatttttaaatttaataaatttataccagatgctattatatgtaaccaaatcacccaattcgggttggattagactactgtcagttttcttgcataatttctcgtagaccgacaaaaaaaatgaattaaagtttaaatttggtggttcaaactcatatcattttatggttagaa

SEQ ID NO: 39186 - DNA, 540 bp, Arabidopsis thaliana landsberg
actctcataaatacattccttcatctctacgatcaatcagttccatttggactgtcctaaccatcttgaaactggaaacgacgccgttctcaacgcgtgttaccattccaacgccgctatatggactcgggtaccaagggtgtttatcttgaacccatggattaggaggttgagggatctcaacccattcttgtaaaactggattaccaacgaaagatttataactataaaccttgttcttgatgcgagaaacaaacacatcgatccaaatcaatccattggaagaagctatatagtagtattcagaggtagggagattcggatattcttgaaatggcatgatatatgaaactagagttttgggaagatcccatgttttgcatccatggaagcctatggcttgtgtcatctcacgaagatactctgttctgaacatgatcgaccatgaggttgaggagcttcggtgaaaagatccgaagagacgtcgaaagtagcccgattctattactgatttccatcttttgcatactgacttgaacc

SEQ ID NO: 39187 - DNA, 1022 bp, Arabidopsis thaliana landsberg
aaatattagaaataaggtttgagtttggttttgtttgttcaaatccaatgacttttattgtttggtctatagttatggtttttaatatttgtactatggtacttaattccatgaacatttgtatctattttgttacatcatctccaaaaacatttatttgtttgttatagctaagaagctcgggattctatcgccaccaccatatctatcgttatcacaaaacgacgatgcatttctcagtggtataaattacgcatctggaggagctggaattctcaatgaaactggcatttacttcgtactatactcctccttttctatatactctcttaaacatttaaaaattttcaagtattttaatattgattataaatttgtgttattctgatggagatgcagatccaaaggctaactttcaatgatcaaataaattgtttcaagaaaactaaagaagttattagggcgaaaatcggagatggagctgcgaacaaacatgtaaatgatgccatgtacttcattggtttgggtataaattaaaatttacattacttgattttatctaaagtttcttccctttttccattttgtagaaaattattattaattacgataacattttttttttttgcatttttaataaataggaagcaacgattatgtaaacaatttcttgcagccatttatggcagatgggcagcaatatacacatgacgagtttgtcgaactcttgacctcaaccctactcaatcagcttacggtattccaaccaacttctaattttctttttcttttgtttaagtatagatatcaaaagtgagatattctagtgaagttgaacaaattggtaggtcgtttgcactctttttattattattattatgattattatcaaccaatatattatatatctatactttttgtcctactttggaaaatttggggtttaaatatattatacgtgcacagacacagtgaaactatacaagtgtgtgaatcatggtggaagtattttgggttttaga

SEQ ID NO: 39188 - DNA, 482 bp, Arabidopsis thaliana landsberg
  unsure (1)..(482): unsure at all n locations
tgtagtatgttgaactaccacaaaacatagtaactaacgacgttcaaaaatgttagaatttcgtttgtttcaggctattgcaacgatgtttcgacaaaggagaattcgtctgaaattaatgacaactatttgttggaaacttgtcagaaaagttgtcggatatttgttggcaatttcgaaggaatttcaaactatattacaagctaacagctgttattatcttcttatcttcaatggtgctagctaataatatcctcattagataccagccgacctatcaagccaagctcagttacgtgttatgttgtgtcatattcagncgatcacatcttcgtggaagttttgcatagaacgctagaaatccaattacaaattttctacaccgctcatcatattgttttttctactttttgatccaaaattgttttccacaggccttttaaaagaaattgganaccaagttcgttaattaaacccaactg

SEQ ID NO: 39189 - DNA, 635 bp, Arabidopsis thaliana landsberg
atcttgacttgtcttgtagatgttgtaagcttatttatatatgtgtttttgaatttttaggtggctgtgcctccaagggctaaagctttgttctggttttgctctcaaccaacgacttccgatgtgtttcctgtgtttttcctctccaaggatactgttgagccttcttataaatcactttatgtaaaggaacctcatggggtttttgggattgggaatgcattcgcttttgttcattcatcttcagttgactccaatggacatagcatgatcaaaacgtaagcttttcgttgcttagtatcaattggttgcagatgttctgaagttctgcatttcacttgaagcagttaagctaactaacttctgcagattcctctcagatgaatcagctatggtgacggcctatggttttccagatattgaattcaacaaatactctactgtaaatagcaaagatggctcttcttactttttcgttcctcaggtgaagtggcatttgactttatcatctagctgttgaatctatgaaatgtgtgtaaccagcgttcttacattgtacatggttttcaataccgaaatttcaacagattgagttagatgagcacgaggaggtctctatattagcagttacattg

SEQ ID NO: 39190 - DNA, 396 bp, Arabidopsis thaliana landsberg
  unsure (1)..(396): unsure at all n locations
accnnnnnnnnnnnnnnnnnnnnnnnnnnnnnnnnnnnnnnnngcttgttccgtaggacaggtcgcccgcgagccggtgccgcgcctctgcgagaccgaccgtctccagaagttcgagcgcgcgcggggtcagcgcatccagcgccccggcaggccgccagaactgggtggccagtccgttcggccgctgcaaggcgacgcgcacgttgtcaagcaccgaaaggtgcgggaagatcgccgagatctggaacgaccgcaccaaccccatgcgcgccaccttggccgacggcgtgcggatgatgtcctggcgaagcagtttcgatcctgccgccgctgggcggcaggaattttcgtcaacaggtttgaagaccgtggtcttgccggcgccgttggggc

SEQ ID NO: 39191 - DNA, 640 bp, Arabidopsis thaliana landsberg
gcaaaatcagacctcaagatcgataattgaaacatttttaaatatttgtcaacggaatgtattataatttagcgacatgggaatcgttgacctaaccgactaatatatatgattgtcgtgcacgtctacatttttttttaaagcattttattttttcatttctgattttgtaaacttttacttacttttaaattccttttttatatcaaattttaatgtccttttctaaatttataatttatgaatctctaaaaatatattatactatatatttcaatgttatctcctctaaaaatgtctcctttatatcttatctaaattatcttttctataaaatggtcgcatagaaataataatcttcgcgtatttgaaataattgttttgttagcccatgcaaaacgaatgagatcaaaccagtgaaagaagacacatgttgggtaaaatacttaaattgtatatgttgtatctatgaattcatacggtactaacgaacgaagttttatatttttttggttttttggtggttacgtatttcaaactttcaaccattggtttttttgtttttttataatagtacggtcaatattgaatttttattattagttagggatgataaaataatgcacattgtatcagaaaa

SEQ ID NO: 39192 - DNA, 415 bp, Arabidopsis thaliana landsberg
aaactatatacaaaaaaaaaaaaaatgcctaatacacattaatttgtgacataagaaaatataaacaaaacaaaaagggcaaaaaagacctgaaagcttagaggcacacctgcataggtcccacagttcactcgtgacaccgtaaaagcaaaaacacgaacccgccacgttatcacaaaaagcaagccacgtcaatatagtctcactgtcaactacacttaacttactattttcacatctcattttcctatctttatataaaccctccaggctcctctttaatttctttaccaccaacaacaaacatataaaccataagggaaaacagagaaagagagagagatgggaggacgacaatattaacaacaacaacacaaccgtgatcgcacctttcatcgtgaaaacatatcagatg

SEQ ID NO: 39193 - DNA, 328 bp, Arabidopsis thaliana landsberg
gaaagcttttgctgttacaattaattaaaatctatataatactttgtaacaaaactttttttaagtgttagttaatttaaaaagcgttaatcaattgaaatgtggacctcttaaaaaaactaacaaatacaaaaatgcaccatttgtccatagagtattggaaactaagtaaaccatcttcatactattggtcacaaccaaatccctttccaatttgtaacggacgactaattttggttttgtggtcaagactcaagataatgctaatttttaaacaaaattacagtgcatgaatctaatctttatttccttcttctttgaaaccttt

SEQ ID NO: 39194 - DNA, 507 bp, Arabidopsis thaliana landsberg
caacaattatgggtaagcttcattatccattttcacttttgtatataaactatataatagtaattgtataaaagcattttgcatttaaatgatctgaaaagtaaaagctttttgtcataagcacaagaactaaggagacatgaaattttgttgcatatatgtggaggaaagatgagatctttctttcttcgataaagatgaaacctaagctatttaaggaaagaaagaaaaatgagatctttgtgaagaaaaaattgtcagatttttgttgatggaaaaaaagatgaattgtttttgctgatttagacaaatcttagacctttgaaaagaacattttaaatatttttcagaccatttgacttgacttgttgatacatgtttttggaaatctttggttttgcttatattatgataaaagctgaatcttgttggtttgatgttttaaaatgagtccaggacacgagtggtgcagaagttgattgagactgtgactacaaaggagcaaat

SEQ ID NO: 39195 - DNA, 473 bp, Arabidopsis thaliana landsberg
acattgataggctctcttcaagaagaaaaacaacatttaatttcatgtttcctaatgatcagtaagatgatgggagaaatcatttcacatcattatcaatatttttaatggctaaacagctcaatttccctaaacctaatccatcaaagaattatgcaaacacaaaactttggttagttgactcttgatctctagcatgagctggacccatccaagtctaactattgattagtacttttctttgtaaagtcaaaacgaattttaaagcattataggtgcacttgatatattcgacatctaattttattctctcgattcatatcatcaatattcatatgtagaactttttctgaaactattcttttctaatttcgactccttccaactaaaggagtcagtaaagcaaacaactttacctatgagatccatctatgagtataacccttaaccactaaataggtaatactcccatt

SEQ ID NO: 39196 - DNA, 717 bp, Arabidopsis thaliana landsberg
cggatatatgtgtattcttctgctgttcatttcgtgacataggaggcagccaagaggaaactgatatatatattaccgaaaaagaagaattggtggttggttcatgccaccgcaggagccaccgccggtggattggcagttgctctgacttggccgcttggtattgtagctatgacgctttctcagccgacgggcccttctaaggtgattgacccacatctgaacatttcattggaggattatttaaggaaaacacacacacgcacgctcacaatgtaaaagcaaaaacaaaagtagacaatcaaggcataaatataaacaaaatgattttaagatgtgtgtaactaactaatcgaccaggccagacatagcctatgatcttcttcttcttcttcttcttcttcttataacttatctggtcatgtgcagcatgtcactagggtttcattgagccatgtgttcgtatcctttgtgaaatatgaagggtttatgcctccccagaatgttcatccatgcatcagcaacagccatatgttggtccacttacgaggcggccaaatctttctttcaggacctcaacggcgattcagaacggtctgataaagatcaaacggatgggacagcgaatcgatatcacaacaactaccgagtttttaaattaagctttgtttatcttgatttgttttactttatttttttgatacatattatatttac

SEQ ID NO: 39197 - DNA, 838 bp, Arabidopsis thaliana landsberg
ataatactcaacttggaaaacgatgaaagaagataaactggaacatgctgctgacctaaaatctggaagatgtgctaaatctgttgctcacagcttacataagttagtaaaaaactcaagagtaatgataagaaacactagctaatatatataaaacaaacttaataacaacttaccaaacacaggtctataagaaaactgctgaagaggaaaccatggtttgatagaaaacgtttgtgaataattagacattatagccgatttaatccctttgaaactgaactttgattctaattagatggtgtggaaataatgtttctcgatctcttgaatacagggttgagtcacgttgtttatatagtggtctgctttttttattcctaattaaatttcaattaggattttaacagaaaaaacaaacaaatatctatatgtatctagttgatttaatctttgaccaaaaaaaaaaaaaaaccctattatatagtgtacacaaaaaatctatatctagttgacttagtctttgaccaataataaaatacataaaaaaaactatagaatacgctgaaattatagtttgttacaggaaagaaaaaaaaaaaggaaaaaggaaacagcttttaaaaggtttaggcccttgaagccattaaataaccctggaaaccccccgaaaagaaaccccgaatccccgaaaaacccccgaacccccggaaaaaaaaacccccaagaaacccggaaaaccttcgaaaaccccccgaaaactttttttaaaaaaaatattttccaaaaacggggggttcttaaaaaccttttaaaaaaaacccccggaaaaaacccc

SEQ ID NO: 39198 - DNA, 537 bp, Arabidopsis thaliana landsberg
gacatgtatatatgtatataccatagaccacatcgtataactaaaagtgtcgagtaattagcagacaaattattgtctttttggtcaagattaactagtctacaattcaacacgtatcatatattattatgtaattatgataaactgtaacaattacacaaatcataagataacatgtaaattctaagacaatttcctcgaagacacaaatgagacgatcttgatacattatagcccggtccatctctatgtaatattaatattcaattcgatgtcccgtacggtttattcaaaaattaaccctagttgattgtaacacatttatttttctatttgacagaggacagctattattgtagggccgttgcaatacaatttcgcattcacatatattttcatgtcgtttttggacattccaagataatatgtttagtttagtttgacagtatttagactaggtccaatattgagcatgttctgccagaagattgactatacactttactatataactaaatatttgtagtttcttttggt

SEQ ID NO: 39199 - DNA, 125 bp, Arabidopsis thaliana landsberg
  unsure (1)..(125): unsure at all n locations
cccccccccattttcccccccccccccccccccccccccccccccccccttccccccgtttccttcccaaacacnncccccccccccccctccccctcccccccccccctcccctcccccccccc

SEQ ID NO: 39200 - DNA, 574 bp, Arabidopsis thaliana landsberg
gtctgcgccgcaccggccggcactttcgccgcgtccccatcctttaacaaggcgcggacaacgccgcggttgcctccggagccgcccgccgcgccagcctgcgcatggtcgagacgtcccggctgggcttcgattccctgttcgagcgcttcggcagcggctggggcgggctgtccgacgcccaggcgcaggccgcccgcgatcggcatggcgccaatgaagtcgaccacgagaagccgctttcctggccgcatcacctgtggctgtcctatcgcaatccgttcaacctgctgctgaccgcgctggcggtcctgtcgaggctgaccgacgtgcgcatggcggtgcccgaggaccagtcctggacggccgttgccatcatcggatcgatggtgctgatctcgaccgtgctgcgctttgtgcaggagcagcgttcgaaccgcgccgacgaagccctgaaggcgatggtgcgcaacaccgcgacggttctgcgcagcgatgcccgatcgcccgacgcgggcaatggccgcgcttcatcggcgcggacttgcacgccaccgggtcgcaacagcgtgaa

SEQ ID NO: 39201 - DNA, 558 bp, Arabidopsis thaliana landsberg
  unsure (1)..(558): unsure at all n locations
cggcagattgctccggatggtgccatttacctgctcgcttacggtaccaactggtttgcacgcaataccgactcgggcatcatgggggtggaggatgccgagggtaaccgcaatccgatagccgccgttacgacaggcaagaccattggggccgcaccattcgcggctacgctttctgccaaaggctcgaaggattacgatgccgacgacaagctgacttatgaatggaagatcgggacgaaaaagctggcgggcgaggagattaaatacacttttaccaagcctgggacttataatgtggtattgaccgtctccgaccagaacggcggaaagggaactgctaccaccgagttcaagatcggaaacacgccgccggatgtgaagatcgagacgaaggcgaaccgcagtttttactgggataatgccccatttgattacagtatcaaggttacggacaaggaagacggtaatatccagcgtaccaaaattcacgcaagcttcaattacctggctttcggaaaggaccttgcgggcgcatcgcnggttcggaggggagaa

SEQ ID NO: 39202 - DNA, 694 bp, Arabidopsis thaliana landsberg
  unsure (1)..(694): unsure at all n locations
tgtgcatgttgcccaggactaggcgatgtctctcttcctcctccgagtagaaagaaatctgagttaagtgcagttgtgtttctagatgagaaggtcgcagaatatccgggtgaaggcaccattctcgccctcggacctctaaccaacctggcattagtaagaatcatgaatcccctcctttaatcttcttaaaatccaatttgtgtactgacgatgaccgggttttttcgttataggccatcaaacgcgatagttcatttgcgagcaaggcgaagaaaattgctattcttggtggagctttcttttctttgggaaatgtcaatcctgcagctgaggctaatgtaacccctccttgtaacctcatcttaatcttctgttaatgaaaaaggaaatgctggtttcattttgttggtctctgttctatatgcagatatatggtgacccggaagcagctgatgttgttttcacatctggagcggatannnnnnnnnnnnnnnnnnnnatcacaacccaacttaaactatcaggtgaagaagcttctcccctcatctcctttagcattctggatatcacaatatagcctggtttaagtttttttttttaaatctgtttcagatgatgacctcttagagcttggcaactgcaaggggaaacactctaagttgataagcgatatgtgcaaattttatagaga

SEQ ID NO: 39203 - DNA, 503 bp, Arabidopsis thaliana landsberg
ttttttgtataacttggtttttttgcaaactataaaaattcgcgaaagtagggaatcataacttatgaggaatggagggaggagaaaaagaaggatgtgaagcggaattatcatattggtaataaacaatagatatatttacattctaatatttattgtacagtataagggagggaggtggtgtgattaactgaattttacgcttggagaagtagtagctgttccaggggcgggccattgaggcggtgatgaaggtgagcattccactacctggtagttcaagagtccattgccgatagggcgtcgcacaatgatgaccgatggcggcaagttatgaagggattgggcgaagtgattgcggaacgtgatgtacttgatggaatcgggaaggttgttgagttcttgattaaattcgaatccaaaggtcaagtgggtgatagtgttgggtaggtggtccactttctggttgaaatgatagccgaatgtaagatgtgtcacgggtg

SEQ ID NO: 39204 - DNA, 775 bp, Arabidopsis thaliana landsberg
ttatttaagtttggcctcatttttatcaagaatatgcatctacttttattttgtagacaaatcaaagttgctatcttttatgatgtccacaagttatactttttctagtattgtatacatgaccatgacccatccatgacttgtattttagttttattattagtatgtggaattcgtatggatttgtgacattattgcaatttgatcgaaatcgggatatatgttaaatatcgatgaaaccaagaagtttcgccatcattaatttggattcttgtcgaataatttagtagtagtagtagaagtagcttgcatcgataagaaatattaattaaaatttgttgttggggtattagtttaatagtattgttgtttaaccaagttgagtaaaatgatcacgtgtcctatataattgttttcccaagtttaagagatctaatgcaaccattaatgactttattctatgagagtttaggtaacgtgattcgtcctttaaataaaacatttcatgtactccactatcaattactaataaattaaaaaaattagggaaagtgttgttcgattgttgacttgtctaggtttcagacttaaggaggaatcgagaagacatggtatgagacagaaggttttcaaaagttaaagaacaaactcaaaaagactttggtcattccaacactctcactaggtaacatataaaacatcaatgtagtattctagatattgcatgttcatcaatctaacgatcaacatttgatttttgatcatcaaaacgatg

SEQ ID NO: 39205 - DNA, 523 bp, Arabidopsis thaliana landsberg
agactaatcgaatcaaaaaaaaaaattggattagacttaccaacgaccttctcttcttccgaacccatttggctgagatgattgtagtgaaattagagagtagtatctgaaggatggattcggctagagaagatgaagaagaacagagaagagagaaagagagagagtctaacagctactgttcatcagacaggatatgaattgtgaaaaatggaaggaagaaaaaagagagagagttggtcaagtgcttctagtcgtacagtggttgtattttgtaaccccactttttctccaccacttccaacaaatgtataattttaatttatttttttatgacttcgtaaagtttaattaaataatacgaaattattattttgagaattatttgtactgtcgatatctcattattgaaaaaaaaaaaaaagcactatgacaaaatatgaaccaaccataacaaagacaacaatagatggtgtagtagtggtgcttcttgctttgttttggtggttgttgtttacgctct

SEQ ID NO: 39206 - DNA, 597 bp, Arabidopsis thaliana landsberg
tatacaaagtaataattatgcataaaaaatcattatcagagacatgctaagactattacacctgctactactgtttaatagtagtatttattactatctagaaattgtaggtctatctatacgtctttttagacatatctgcatatgacagtaactaaatctaattaataagatcctttcctgtcttaattacagatagttgaagtaaaagattatcaccaagctatgaacttcatcaataacattatataattgtaattacttgaatttatgaagttttgaatacattctagtgtgccaaagtgttaattgtcttaaactgaaaacaatggccaaacagattacaatgttgatattgaccttgccaaattttagaaatttgctttactttatcttaatttaaacatatatttttcacggttaatttgtttgtttgcttagcatttttttcataacgagaaaaatattcttatgactttaaatatctaatatccgtactttttcaaggttaaaatgcacaactcctactttttatcaccttcatttcatttatgctatatttttgacactttaaataccacatttatccccttttga

SEQ ID NO: 39207 - DNA, 652 bp, Arabidopsis thaliana landsberg
  unsure (1)..(652): unsure at all n locations
ctctaaaggtacaattacaaataacaatgattctcattttttttatttcataatgatttatcattacactaaacaaataaataaagcataatttaaaagaagaaaagaataagagcaaaacgttacgtcaatagcttagaactgctctgtttaatttttgtcgtcgtgcctagctaactctcatggtagcaacttcgtagagttcttgacataagatctaatagctttttatctgatatttgtaaagaagcttctgtttctgtgtttgcatnnnnnnnnnnnnnnnnnnnnnnnnnnnnnnnnnnnngaacatcgatatcttttgcaagcttttcagcaccatctctagagagaatggtgtcgaaacaaatgtatctaccaaacgcagttttattacccaaaccttcccacaaacatacgtgagctttagccaacctgttcacatccattgtcgctaataatccgttactatacatctcttttgctcctgcatttttgcaaaacaaaatatataaataaaagtcaacaacttatcagctgtcttttgtctctttatcgaaaggaccacccgtgaactacgtacacatatgctaataggagtatatctatataacaataaacattattcttggacggttctcaatttggattc

SEQ ID NO: 39208 - DNA, 600 bp, Arabidopsis thaliana landsberg
attaccgattaacattggatcatactcataattttgtcgttaacttgagcgtaaaatattatcacgtaaacaacttattgtcatctcaaattttcttctaatggttgaaccatatatatatatattcatgtatatttcaaacggacgaaaatagtttcactccaaaccagaatttgggaaggtttgaaatcatctcttaactttaaccctttcacaaatatctttttaatattatattttatgtacaaactgtttaaattccaacttcagttatatcgggcataatgtgtaatgaatatctactataatacataattcctacaagaaacataaaatcataatttatgtgcaatatggaactgtcttcaaactcaatattcagcagttatcatgtacatattaaaaaaaaaatattatgtaaaactctatgaaatcatgagatatatatagcggtgcgcgatctcggagcacagtgaatgtatcttacatattacatatttttagaagaatataagaatactattcaacacaatatcagttactcaatgggatggtgaactttagagagacatatagaaaaggcatatataaaaaacgaat

SEQ ID NO: 39209 - DNA, 1324 bp, Arabidopsis thaliana landsberg
caaacaaaatgaaattgtgtgtaaaattcagcggaaattaattggtgaattcatcttacaatttaggataatttctttaatcttctcatctctgtcttcctctaccatcgaactacaaccggaagaattagccggagaagattttattgagtggatggaactgctcttccttgtcactttcttagatcttcctcgttgctcaccttccgccgccacgtcaaagcacatacacagccgcataactggtttcaggaatccaaaagttcttccacttgtttttggttgtgacattgttcaaagatgaaaactacaaagatcgctcaagaaatggaatcttaagaatacgaatccacgacggtggtgtctagagtcgagagatgtaaaatgtagaagatttaagtgtatcttttagtttcctacagattagggataatgactatatataaacatacaaaaggtaattacaattttgtgatttgattctttcgttattttgtttctataccaaaaagtagggcattttctgaaaattagaaagttttggtctttctagagattttttgaaggaccgtgatgtgtgttagtaatagtaatagttatttccttatttgaatgagcttattaatgtattttactaatttgttaagttttgaattgatgttaccggctaaatttgagaattcaattactgttaccacatttgtgggatacaaaatctgcggtataatatcgttattcaaaaacaaaaagaatgaacatttattgttgagaaaaatattggcgaaatcgatgctatcctttgattgaagcaatcttatagcattggtaagatttttgtttccaactactagcttttgctaagaataactatccgactttatcgctatcttttcgacttttttcgtttgcaatatattagcaaaataaatcatgcatgtaataataatataactgaaataatgataaatgatgttataagaagaaagaaagaaaattacataaatgctgcaagagtaacttgtctgtccaaaggtatgaaaataaaaaaggtagctagggcccaaaagcccaaaatacatgctgcaccatgtttctaggtcaaagcagcaacgcaatctcgagtctcgttatagtattccacttttcattgcttcatcacaccatcagatctacatcaaaggtttgggacatttaccacaacaatgtgtctcttcctatatcaatcagctcaatgacggttttgtgtcttattctaataatctatatataaccgcttgccattccaatgatgaagagggtagaaatctcgaagagcaaccttttc

SEQ ID NO: 39210 - DNA, 552 bp, Arabidopsis thaliana landsberg
gaacttccaacgcccgtagaagtacttgacttatcagttctcaaggcaggaaccttcttaacaacagctgaaccactcagaccactctcggtttctttattcttccgcgctctatcattgcttttaacgcttaaaccatcaacagatttcgctatctcactaccttctttggagctagattctgaattcacagaagcacatggttttttcttcacagccaaggcatctctctttgcagaaacagaactatccggtttggttatacctggaatctgtctactcacacttcccaatgacttccttgtcaaacttggtgtctcaactttgatcacaactgaaccttcaacactctttctccttgcaatcttccacggcttcacagcatcatcttgatcacatttcttcccatgtttacataaatcatgagtcgaacccacacgatgattcccacgataacgggactgaacctgcggtttacttatcgttccagtcgaatggcgtctcacagtcccaccttgaggcttaggcacttcaataatctctggtataatc

SEQ ID NO: 39211 - DNA, 466 bp, Arabidopsis thaliana landsberg
  unsure (1)..(466): unsure at all n locations
tgtgcagtgaccattggagaggattctgtaatctcagcttacaggttggttttatcttcattgatgttttccataggctgctttcatggtgttcttttgttggtcaaagacatcttttatgatcacttttgttaattagagttattatgttatgtttctttggaaggctctcagaagatagagggagatcacttgttggagcgatnnnnnnnnnnnnnnnnnnnnnnnnnnnnnnnncgatagcttctttctctaaactgatctggtgaagaaatgatcaatcaccaaagcgaaagcctgaaaccaagactcagtcattcgctcgaggtaggtttcatgggtctttaatccctacaactgttgaacatcctctgtggtgcttaactgtgttaaaaatgtttggtacagctatcgtccttgacatgtataaaggactacccaaggaaaggagagaagctcacgttat

SEQ ID NO: 39212 - DNA, 504 bp, Arabidopsis thaliana landsberg
agaatggttcatcatactcttacactgttacacaggtccagttctgaactaaagtgtttgtgtttttgtatcggagatgattagcaattgtgcatcaagttagttacggtctcttctcaaatccagtaaaccaaaaaatatattaaaaaatcatactctataataaacttacatcattgttaagaaatcaaatgtcctttttttaacgtttatgttgggagtacgtagtgagatttttcagatatgataaatgtttatgtttgaagttctattttgagtatcatcattttacacgtctcctatcttttcttcaatcaataaagcctttgagcccacaacttcgtaataccgttaaacccaattgttattgggcatgaaaacaaggcccaactcaagtctatctcccccacttgttcatcttctattgtcttggtgcgagtttgcgacttaaacaggtattaaattacctattacgcaataatggcggattaatcgaacctactc

SEQ ID NO: 39213 - DNA, 293 bp, Arabidopsis thaliana landsberg
  unsure (1)..(293): unsure at all n locations
nnnnnnnnnnnnnnnnnnnnnnnnnnnnnnnnnnnnnnnnnnnnnnnnnnnnnnnnnnnnnnnnnnnnnnnnnnnnnnnnnnnnnnnnnnnnnnnnnnnnnnnnnnnnnnnnnnnnnnnnnnnnnnnnnnnnnnnnnnnnnnnnnnnnnnnnnnnnnnnnnnnnnnnnnnnnnnnnnnggctgtaggatggtcaacgacagaggaataggctatcagttgaacactgcatgaccaataaaccgagcggtgtcaccacttgagctaggccatatgccagggatctcagacagag

SEQ ID NO: 39214 - DNA, 594 bp, Arabidopsis thaliana landsberg
catacaattataatgattattgataaatttttgaagtttttgtaacaatatacgaaacatcgtactcatgcattcaaacaaaaatgggacaggctgggttagataacgtgtgagggatggatttctctagagacgaagccaaatataaggcgtgactttaaatgatatcacactactgtttcatcttataacaaatcaaaagagatgaactagtgatgtaattctataaaatttaccacttagatgtactgtgtatcggctaattaattggtcataaactattactttcaaatgagttctacgtactattactatagtttaaaagtaaagtaaaatcatattcaatcaacttaggaactcaaattaatattgtctaattaacacaatgtcatcatcatatagagatttgactgcactaattaagttatcatggacactttctttctgaaaattctcattttctcactcaaataataatttcattctataaatagataatgaaatacacacacatctatcatccaccaaaaatatcatccaccactacccacgaagtaagaaaattacagagaaaacggaatatctttaagtaga

SEQ ID NO: 39215 - DNA, 691 bp, Arabidopsis thaliana landsberg
acgatttcgagtctgtacggctacagactctaaatcacactaattctaaatcaagattacccaccaatgcaggaaccaactaggaaccattatgtatacaatacctaatagtataaggcttgcgccaagagtactgcaaagataatagctctagattcagtaagcctcaatttgacaattccatatagtaagaatcatttacttgtaatcaacagtaggaagctttttgtctttctcgactccaagcctctctttcagcatcgttataacctgcaggtacattcaaagtaatttatatagatcagcaggagttctgggccggaatctaattccctttgtatagatttataggggaatctttataagtatgataactaatccatcccaatattttgagagtataccaaaagatccacaaggaaaaaagttcatgataaaggactgaataacaagaatcatcactcctggcttctgggattacatagaaggtactgaatctaatctacataagagaatagaaatggtattacctcatcatcatagcgaatatcctttatcagccccgcttccttgagcttttcgatttcgtaaactccttgattgatgaaattttcaacatcttctcgctttttccctgcatagttctaagcagaagccattcaggagaactaaaatgttataaccataacaa

SEQ ID NO: 39216 - DNA, 638 bp, Arabidopsis thaliana landsberg
atggaccgctcttttacatagaaatagagttggtctgcggttttttgttgtttatcctaaaaatagaacggactgaaccgttggcggatttgtccatcccgactaccatcaccattcaaacccttaaatgtggaacatgctttcttgatagttcttttgatccagtgttgcattagaaccaccaattttttttgtaaaagcatgaaacggctgtgaaagcatccaccatgtgttaattggacattagcctgatatgttgtcttctaattgggacagatgcaacaacataagaatcattgaccagcgtccatgtgaccactcaaaagagcaaagcactgataaactttctcagctcatggctgagatctgtcttcagcaaagaaatgatacactttttcattcatctcgatccaactgcatgcagcctggtttctttctcagtcccacttctttcattttcagtgtgactcatctttaccgtccataatagtactacatccttatagtgtaatatcattctaacattcttcatagtcttggagatatggattctcaaattgatattaaaaaaaaaaagaatcatgaatattctgcatggaattagaaaatttgcaaccttaagactattaaaacacagt

SEQ ID NO: 39217 - DNA, 340 bp, Arabidopsis thaliana landsberg
gaagcccattatcagattatctgattaaaagagtagtaagactaagatccacttgatgtacaccttttgcttgtgcctaatcgtcaacgatccgatagttgtcagtgtggtcaccaagtaagttgcaagcaattgagtcctaatatgtgcagctacaaggacattgaggtctaccctcgccacaaccctcaaaagttctgttttctatgtgtccatgcgatttgttagagatttatgattgggggcatgttaattgctaatacgttgtttcatgtttgataaattcaatatatttggttaaaacttaatcagaaaccgttatttgtttttgaattcaact

SEQ ID NO: 39218 - DNA, 697 bp, Arabidopsis thaliana landsberg
  unsure (1)..(697): unsure at all n locations
tagatcgattctgagtcaaattttacattcaaaacttctttttatttgtggcattaatttacattagtttttttggggtcatttttattttgttcaatgtgggatattgaaaataaaatatcatgattcagcgtatatttcgatcataatatcaaattgcattatttagtcaaacaattttgttaaaaaatatttcctaagatttatagaattcaatactgttttaaactattagtcaaactatatatattttactgttattaaaacaaggaataaaattatgaaatatcaaaaaatatgtaaagacatatactatgattaaatctttcaacattcaatattttaccattgaatatacaaaaatgttaactgttaactatacatacaagaccgaaatacaaattccgaaaaatttatggcgcgaatctgataccgaactaccaacgatattcactcgattcatcatctaaaaactaaaatacaacgaataaaaccaactaacttttcaattctcacctcaatttcctaccacattttcataattttccaacttctcacatttgttaccatgatagttattcactttctaaaatcttcaaattttatcttacattnttcatcttcttcaccattatatatagcctctctccttctcacacaatctccatcttacccttaaaaccacatttcttacttc

SEQ ID NO: 39219 - DNA, 476 bp, Arabidopsis thaliana landsberg
tgtcatttaccaccaaagcgaatgtgctctttcgctgtgctttatgtcgcactaatatctttgtgggcctctatgatcatcacagattttgcgggaaaaggtaaaaattcttataaatatatactgtataaaattaaactgctcttcatcttttgtcaacatatatattaaactacttcgaacactgatatgcattttaaagcattttttagaaagacttgagttaaactagtttatttactgagttaatgtttttggataaatgattcgttcaaaagtgaatatttggaactgatcgatcaaaagttttgttgactagagatagactgagagtaaactacgctatagatattctgtatgcattttttacaaagacttaagataaacttgtttattactgagttaatgttttcgataaataatttctttaaaagtaaatttttgtagttggatcaaaagttttcttgactaaaaat

SEQ ID NO: 39220 - DNA, 571 bp, Arabidopsis thaliana landsberg
tgttttattcattgtaatggaagtccatatgtgtacttctagtttatgataattgaataatatctataaattagaaagctttagtacttattgtacattgtgaagactgctgaaataagatcttccttacattatagtttcctaatcgtatagacttctgtacttgtgacttctagcttctagcttgggttggtcatggacctcatggttacctttttatctgatcaaacctctggtcctgcaggctaaccaaaggaaagtagagataaacagacttccagagcagattgtattatctgaagtccgccgtatggttgaggagatgcagaatttgaataagcagattgagaatacggttagtctctcttgtctttatcctcagtccaaagtttgcaaatggttgagtttatcacttgtttaatatcaattatatatattaagtgtggtgaaaaatgtttgagatattgtttccttcgaagtgcttttggttcgaaagcattcatagaagagaaaacgcttttagtttttggcgtttgagatatttgaaagcagatatttttggaagaaaaga

SEQ ID NO: 39221 - DNA, 382 bp, Arabidopsis thaliana landsberg
gcggggttgtacgagtcgcggacgtggcgggttcaccctcattgaactcctggtggtcattgccttctttgccgtgctgatcgcgctgctgttgcccgcggttcagcaggcccgcgaggcggcccgccgcagccagtgccggaacaacctcaagcaactgggactggcactgcacaactatcacgacacacatgccgtgttttcgccggggctgctcaacaacatcaaccagtgggcgaccctggcggtcaccgagcgaatcggctggatctcgcagatcctgccctacatcgaccaggcgccgctgtacaaccagtggaccaccgagtttcgcgccggggtcaacggattgagttacagccttcgcaagccggtggtgccg

SEQ ID NO: 39222 - DNA, 986 bp, Arabidopsis thaliana landsberg
tgaatatacataggttttagggtcggtcggtgttttgtgatggtcttttgatatgatgatattatttcgcatgtataatataaaacgtgtgtgcatagaaaactagatagtttttgatcaattataatcgtatatgcagaggccaaaattaacaaatgtatatcaaaatttgaacagcaaatcggaaaatgctaatttttaatacattaatatatgattgatttaaaaaatttgtatgagcttagactcaaaatttcttactttttttttttgaataaaaaattgtaagaggattcataaaatggacgtaccaaaacatactaataattttatccagttagtagaacacatatagtttacaatattagtttaacaataaccgacaaaaaaaaaattagcaataaccgatgcacgttaagtgacatgatagatttgtaatttttttttgacaaatagatttataaatttagaagagcaattccaccttaattgatttgttctagtagtttatttttttacggattgtgatgtttatgtttgtttgcaataaatgaatcgattatattgattccacaagatttacactgttttctttgtgtgttcctgtaacgattgagatttatagtgcatacacgaatgtatgtttttggctctaggaaatatctaaaggatttgtttttggaatgatggaaacttttcatatattttcaacggtgaagcggtccacacgcacaactgcctacggtggagcaactaccatatgttatgtctaatgtctcttttacgatatgatcgaatatccatattacataacctatattcgtttattacatacatctaagagactacccccaaaattttatctgaaagctccaaatccactatcgtcgaagttttttttttaatttttcttcaaatacaactattattattatattattataatattaatattaaatacattattagtgtccctattggtagta

SEQ ID NO: 39223 - DNA, 738 bp, Arabidopsis thaliana landsberg
actacaaataacttaataatttataggtctcgtcattatgtcaaaatgtatattattgacgaaaacattcacagcaccttaatatatccaagttctacaaaagaaaaaacaaagaaaagggtgtaatgctgtggcaatattatggttctatattttgatgaaaaaatataatctaagttagaaaattttcacaaaacatagtcatatctctccaaaattaagaaacgtttcttaatacgtactacaaatacatatccgtttggaaactttgggaagattatcttttatctaacatgttatggattgttttggtagtgaattactatttaacaaatgacataatttttacaatgcctctctattatattgacataattgataaagccttcagtgagcaaaagaccttggcagccgacactgtgatgacgttagctgcggattagttatcttgacacttattgtatactttatttgttttaattcaagattccaatatcgttttctctgctacgacttattagcatggttttgctattgcatactatgcgaatttcggatctaatcacacaatcacatattgacatatcacacgtacacaatgacatattgcatatgcttgtactgatatttacatgactatggttgtgattggcaacacaaaaattgcgtatttcaacacctaatttgtaaaacctcacttttgttaccaatcagcattatttattacacatgtacgtt

SEQ ID NO: 39224 - DNA, 518 bp, Arabidopsis thaliana landsberg
tgtctggctagactcaactttctttggaataacttttaagatagatgaatttcgttaaaagtcaatggagagagttgactccaagtcaaccttataagtcttgatttcatattgaagctgtgtcacatctcacatgtattctacaaaaccgcgttattcaactacacttgttgttgattaattcttcattctttaaatccttcacttaaacttttctatatgtacaacctaaaaccggccaatgtcaaatagaaattgagcaatggcaatagtgaagaaaacaaaattagcttcccttcttccaagtttgcttcttatatttctatctctatcctttaatgtgccagtctcggggactagactccattacgtaggttagtatctcactattccgataaattttcctcgctacacattcttgttttaccatccagtaaatattattaaaagacaatcttgagtttacttggttttaatagagttcatatcttaatacggaaaataagatgaataatcta

SEQ ID NO: 39225 - DNA, 2262 bp, Arabidopsis thaliana landsberg
  unsure (1)..(2262): unsure at all n locations
aagtctgaaccggttagattgtgttattggtcaacgtttggtttgagactttcttgcttcatactgtgagagtgtgtgaggattacgataacctctcaggctctgtttcataatttcgttttctttcttcacagctaattttgttcatacaattataagattgtccaaatttactttcatctctataatttctcataaatcaatgagaaaaccaataaatccaaatatatttatataaactcatgtatgatgtgcttactttcaaactaaaaacaacaagggaaatatttcaagaccctgtgttagtcaaaagtacagacaaacgaaaattaaacttcttcagtagcaacttcagaaaccacctctttatattccttagtctcttcatcgtacctgtacctgcacgcatattttgtaatcaaacacataaccagaattgagctgataatcgaaattatgaacacatgaataaagagattagtaatgggttttcaaaattctaaactcatcccaagtaaattttaccattttccggttgttgcgtagcagtaaagtccagtgttcgggtcataatagtaaccaaggctgctgctgtagtagtacctgcaaaaccatttatagaatacttttagataaataaaattgagattcataatgaatattgctagcaacacaatacttcggacaaaaagctgacttatgcaacaagagagcgcgagaggagagtatatacaaacataccctgaagattcatcaaacacataatcagaattaagctgagtgcccgagatggagctagacggttgtagatcagaggaaggttcaggagcattctcatcatcgccaaacatatcacaagatactatattggcagtcccattttctttcgcttgagctagtctctcatatccttctaaaagaccaacatagagaagaagaatgtgaaaagtcaagccaattgttcccgaatgttgtgaaaaggtgatatcacaaagcagaggaaacgtagctacatctacagctgatattgaaaaagtattagaatctctaacctgcttcacgttggaaaacttcttgctcctcatgataaacatcttcaatacataaaaagaggaacacatatattaacaaatggaggacatcatatttgttgttgaagtagcataagttattagagacttactgtagtcgccgttctcgataagcttgtccgcatcctcagtaagctgatcaaagataagcttggtctcagatgtcatcttctccttgcgattattcgaattccctttcaacctccttaaagctcgcaagacctgtaacatgaaaccgatttattttacgtgttcgaagtatgtataatcaacaatgctatattaaggtgacatttttaactaatacaatccatgtttcatgtttgaaacaaaaacttgttaaaacgcagaatgagtctcaccgtttctcctggttcaaggacattagcaatgcgcctctttctaactccgatttcatcttgagaaaggtcatcccctgctttttcgttcccactatcatcatccatctcagtatcatttgcagcagatcgtcccatatacattggatttttttcaatactgtcaagccatgcatcctgaaagaaaacacatataatgaaagacaatacacaagatatcttggagctaagctttacaatganagatgtgtaccttgacttccttttctctaacatattctacaaagttcccatcagcatcaaagtaaccttcttctttctctctgtccagactaaaagcttcaatctggatcccatcttctgtgcgattgccatcatcctacaatgaaataaatcacatcagcataactctttttgcaaacaaacatcattgagatctcgcaatatacacaattagcttccaggaacagtcaacaaacaaaaagaggatagtagaaatcctacctcataagtctcctgagcctgattaatnnnnnnnnnnnnnnnnnnnataaagagcttagtagtattctgattgcgaatctttgcacgctccttagcagcatcacgggctttgcggcgggctaaagcttcttcctctaagagctgttcaggtttcgacttcttcccctttggaaaccgtactcgcttttcgctgccagagagaatcctccattagaatccacattatagcgtatgcacacaaactcaagttgtaactgagacaaatttcaaagctgattaatactccaagntcaagacaatcatatgtt

SEQ ID NO: 39226 - DNA, 568 bp, Arabidopsis thaliana landsberg
tgacttcaccaaaattccgcaggaaccaaattccaggaaaagagaacataaaaaaacctcatcaaactcctcataaagcttcctcaatgaagatcataaacaccaaaaaagtagtcatggcgaagcacaaaagcagcaagatccatccctcctccaaacagcagacaacaaaaagaactcaagaaaacatgtctcctaatattcttcagaactaaccagagacaaaccagatcaatcgattcctcttcttcaaatatctagatcatcgtaaagattcgacttttcactttgaagattccgaaagttttgccccttcagctagtaatctcatcttatggtttaggtaactagcccttgattcagattgtgtaaccacaagcttttaaggagctgtgtagaataggtagaactcaagtctactcttcatagtaactatgtactcaatagttctgtagtatcaatcttgtatcatttgtatacatagagatttgaaataaagaattatgtctacttttcaatttctcattgcgtttctttcttggagtagtataggcaggaacatgagaaa

SEQ ID NO: 39227 - DNA, 888 bp, Arabidopsis thaliana landsberg
tgattctagttcgttcgaggcgtttcctgaagatatgaacaaagaaagcaaaatcttcataacagaaaatcttcagtgaagagaattcggggtcgaatcaacaaacccacccttcagatccggtactgtcgcaccaagtagccacccagaaatcctcaccaacaatattgtgtagctcatcacacgtttcagcacgcattatctgcatctcgtgaggaaatacagtaagagaacaatgataaaacgagtatcattcacgcgagaagaaagaaacactgactttttcgatcttctcatctttagaaagatcaataactttatctttcttgctgcgtacagagagtttatccttgatgatgctctttgcaagagtcagggttctgaagtaacatattaaaaactgatcagtccatggactgagacaaaatcatattgaatacatgaaaaaatctcatgttttctattatatatgcttacctttcataatttgggaaatagcgtactactttagcttgaccgagtaccattggtgtatgagaaccaaacccagaattaaactcttcactgcaatcagtataaacaatctcaactacccaagtaatcaaatgaaactaaagttcggcaattgaagttctacttaaacatagactcgcagatgctgagcctgcaagagtcactagacatcaaccattgacatatcatgggaaatggaacttgtaccttagtttgttaacccacaccactgggtcacaaggctctgaaatttgtctccatctgacagcaggggaataaacgtcttgccaagacaaaatagagcggcctgatgatctatcttctagtgaggcatatccagttgaagtttcactgaaacttgtactactacaccca

SEQ ID NO: 39228 - DNA, 625 bp, Arabidopsis thaliana landsberg
aggccattccttagaaggaacccacagatcagtactgtttgtgtaaaaaacaacgttgaatttttgtggcggactgcccacagaaatctcaccgtaaaagacaactccatcaaagttttttaaaccaacaaaagaagtacccccgacattcacagtatgccttttcagcgagatactcacagtgtcatttgagccatggcacagctgaattacgagaaacaacaacaaaatttgcatctttgtggttgtggtccttgtggagaagctcatgatcgatgatagaaaattattgaaaagtgtcaagaggagatatgggagactatgatatgtttctttgtgtacatataaatatataatttcctcttaaattagcagtctgtacgtattaaataccatgctagaatagaaacataatggttcatgcatgcatataaacttagctaaaatgttcgccataaatcaaaagtagaccgtagacattttgaaagaaatttcctaattggaaatactattaaataccatggtagaatagaaacagagtggttcatcatgcatcttaactgtagctaaaataaatgttcgatcaatatgcatcacatgatcgcaaatataatagggaaagact

SEQ ID NO: 39229 - DNA, 564 bp, Arabidopsis thaliana landsberg
tgcatgaagttaatgctattgatttcatatatttgttttggcagctaggacttgctgagaagaatatgttgagctatgattttgatcttgtgggatctgatcaaagtgatccaaacacaaatagtaccaacctgttctctgacgacacagatgatagaagtcttaggtccaccaacccacagagaggaaatttaagtcaccaggaaaatgaggtgagaaagtatttgacagtttaaagccctctgaaaatggagaagaactgattttttagcttgcgctcatgcttttgctggtagtggtctgttgctactgctcctgttcatgctcgtgatggtggtcttggtgctgatggaacagccacttcttctcttgctgttactgctatagagcctccattggatcatcttgctgggtctcaccatgagccaatgaaaagaaatagtaatccaggtgattgtttctctttgatgtctcactttctaatagctagtctctaaaagaacatttgttttagtgaattctaatatagtaggggttttgcagcgcaattgtcttcaacaccga

SEQ ID NO: 39230 - DNA, 680 bp, Arabidopsis thaliana landsberg
atacccatacacatacgcataccattcactctgcaaccacaatgttccataaaaataaacaaagacatacaaaaaatgaatggtaaacacactcgaaagagaaaagatgaacataacgctcagtttacggatcagcctagtttttccatgaatgtttctatcaacgttgcgccgttgacgatttttgttgtggcaacaatcaaatcataagccattccttcctgataaaattttatgcagaagcaagaatggaggattcagcggacaaaaagagtgtttttttgatggtaaacttttgaagtttgatatataccttagaggcgagataccgtaaagcagagatttcagcaaatgttacacctccaatgaagacaacaagaacaattgagcgtcttccatcagcaaccctgtaatcatgtcccagatgaaacctcttacacattagaatcattccatttatcattttatcgaatttacttcgcggtacaaaactaatttgttaacgagaaacttacccatttgaagctccgtgcaatgaatcaactgatggactacttgggaatccactctgcacaaagaagggacatagtgatatatttgcaaatcccacccagttgaaaagagaggttacatttataactaaaattgggtaaaggaaaaagtgtctgactcttttgtcc

SEQ ID NO: 39231 - DNA, 474 bp, Arabidopsis thaliana landsberg
tttctataaacaccaaaatgcgttatgaataattcattcggcattttcaatttttcttgatcaatccctttcgcgagagacaccagaggaattttgcgatcaagatgaatgcacaattctttttcattttttgcgcagaaatcttcgatcgccgacatcggaagacccgacacgatcatctcgatttcgtcaacagtgagttttttaacttcatcccacgacatctgccgcacaaattgttggagggagtttttggccaggaagataagtggaattttcgccgcggttaatttcatcgtagatttcttttgaacgaaccatcacgattactttctcgaaattttgtgtcaggacaaaacctatggcggtaccgaaagcaccacccgtgagaaccaacgcagttttaaattttcatagtgggataacacctttaatagggctgaccatctcatagacctgaatcacttcttccgt

SEQ ID NO: 39232 - DNA, 593 bp, Arabidopsis thaliana landsberg
caatcagaagctttttctaaacaaactcattttcatccacattaaaccagttatgtaaattatttaacaacgctgaaaaccataactgtcgttttcacaaaactctcgatccctatccgttgcgtttaaataaatcaagtctttaatcgatttcactgaatattttcaccgttagcctgatttgtaactttttgccctgattcgtatttgtttttgttataacatcctaaattatataatatataatattacttcatatattattcagtgtccttaaagataatagtataaaaattgttatataatggccaaatcatgggttttgcataaccacaaaggaacaaaataacaaagatcgatttccagtactcttattattcccaaaatgtcttcttaatttgtttacggtttaaattaagttataacattatctttgtccactcaattaatttttttttttttgcatgttgcattgcatgtaactcgataaatcttgacagctggttgtaagatttcattctactttaataataattcatcatcacatgaacattatttcattcactaggtgtcatttcgtaattaaaaaacac

SEQ ID NO: 39233 - DNA, 827 bp, Arabidopsis thaliana landsberg
tgaaacacaagatgttgtagaaacaacattggcacttgatatttatcgcagggcttgcgattgcgggagaggtgcagttttcttctctgtggccaggtaaaatttttatttttgaatggtagatggtttgggaattcattgcaatgcgtctttggttctgcttctttgtttctgtattataatactggaattgtctcttctctcctatttttggttggttaacaaatattaaagaggtttcacttttgagaaatttcaaagaaagtgatcaaattttgtatttgaactgcagggggaaagttgctgaaggtatcgattttgatcgtcattatggaagactggttgtaatgtacggagtaccattccagtatacattaagcaagtaagttgtactcaaatgaatgtttatcatttcaatttccggttttctgcttttatatttcatcgtacttgggagatgataagatggaaacgggaaaaatttcaggatattacgagcaagattggagtatttgcacgatacatttcaaatcaaagaaggcgatttcctaacttttgatgccttggtatgattcttattttatgatcttattagattttggtgtgcaactcttttacctgtttgtgactgttgttaactctttttggctttaacacagaagcaagcagcttaatgtgtagggcgagtaatccggccaaaggctgattatgggatgaatgattttgcagaccaaaggtacatgccccgccttaagttttctctctctgagtccgggccatttagattcttgcctattttaacaaaagggggatcccctttttaatcc

SEQ ID NO: 39234 - DNA, 983 bp, Arabidopsis thaliana landsberg
  unsure (1)..(983): unsure at all n locations
cctattttcttcaaactaactaaagtttacagaaactcttaatataataaatatcagaaattctggaaagatatagggtcatacaacttattggtaatgaaaataaaactatgaagtaaatatagttttagtttgggccaaagagcttcagttctaagcctatggcccatttgtaaggtgattctcaaacacatgtgatatagtttttttcatcaatctttatttannnnnnnnnnnnnnnnnnnnaattgtgattctatataaccaactacagtataatttagattaattattatttcaaacatttaaaatctttatttgattttggggtaccatgatatggtatcctttactataagctactatatatgaagcaacatacacgttaagataattcattatttaatcaattaaaagataagagaaaccggtcaacaatagaatcgttttacggttctgtttgctcagttctcctactatattactacataataacgttggcattccactgaaaaaacattaggagaatagaaaaacaaaatgagaagaaggattatataagagagacaggccaaagaatgtgacgtatattattgtcgtcatctcatttatttctatgtgtagttattgcttatccgtggatgcttcgtccacttaagttttataggattccagtgctatgctagcttgattttcaacagtacacacacaaccatatttggattttaaaaaggatagtaatattttggtctataatttataacttgaattcaaattgtatatatgattagtttgattttgaacatcttataagattcacaaaacccaatttacaaagaaaataatcagtgatacatttgaaaagaaaaacattccagataaatgttaattaaaggctcggactacgaaagatattttgatgtaataaagggaccaccagaccaatacttcggtcgtcatattcgatactagtaatgtttttt

SEQ ID NO: 39235 - DNA, 389 bp, Arabidopsis thaliana landsberg
gaagcctcccccggcgcgctcaccggttatgaacggcttgtcgttgacgacgtattccgaggtgagcaggccggcggcgccggggtctgtgcgcgccacgatcagggtcggcacgccggccacgtcggcggccaggcgcgcggtattcaacttgtcgactgctttacgggtcggcaccagcaccttgccgtccatgtggccgtacttcttcaccgaggccagctggtcctcgaagtgcacgccggcggcaccagcctcgatcattgccttcatcagctcgaacgcgttcagcacgccaccgaagccggcctcggcgttggttcacgatcggtgccagccagtcgatctcgtctcttgccttcggcgtggtgcaattgatcggcgcgcag

SEQ ID NO: 39236 - DNA, 649 bp, Arabidopsis thaliana landsberg
ctctgtctttaccaaaggagttcacacatacttggacatcgagtcttgtggtggagtgaatggtactgagctttaccctgatgtcaaatacatgaccgtgagctttgttttttgatactcttctctagaattataaaccaaacagcaaagggatcactctcatttttcagagtttaccttttacacttccaaaatttctctgtttttgagggctgaatcaatctatctcatgtagcactatctttaccctattgatctgagtttcgaccttaatcgtgtaacacattacttctgcagttctgatgatggtaaatctcaactgtttacatggtaacaagatcataggtattaggttcatgccttgatgtcttgaaatatagtaattcaccacaagaaaatcacacactaaagatcacaacaagaataaaattgtttttaaggatttaagaatttgatttacgagaggttattgagaataaacttccaatagagttggagtcaaatccaactagttggaacttaattagaagcaagcttaatcatttacttgaacaacagaagaacaaaagtagatgaaagatatttccgatattttacttaaggtagcaaatagacacagcgcgaaaggaagcaactatggcacacaacg

SEQ ID NO: 39237 - DNA, 474 bp, Arabidopsis thaliana landsberg
agcgaaggcgacaatagaaaatgagagcagacattgaagttagtggatttttctcagaatggggcctacaatgttattgcccactcagagaaatagggtcactgaaagtgatagctacttcccattgctgggatcgttgtgtactttttctaacctaaatttccctcaatgcctttttcttaacttatagaattggtcgaaacttgaaagtatatacaaatgccacagaaaaaaacatcatttaataccttcttaattgcacgatatgatatcagatgttttgtaaccaagaattggtccatgtaaacaatttattatgtggcagaggaagactcaaattcaggtggctgataaaaagtggggcttaagatatttcttgaactggaagacaatgagcgtgtgttctcattagtattacaaatcatatttacatttttttaaagcggaacatatttacattatacttcaaatgat

SEQ ID NO: 39238 - DNA, 712 bp, Arabidopsis thaliana landsberg
aaaatttagagttcaacgcgacgttacaactatgaaacttaattgagaaattgacaaaaacaaaactggagttataaaacctgacccttatattattataacatgaaacagattaagtttttttatatatattttgatttcttcttatgattgttgtaacgtgaatagataagttataataaaaatgtgaataaattaagatttcttttatgattgttgaaatgaatggcaagtgagacactcacactacttgttgactctctcattcattcccttttcgactaaataacgatatctcggccggactgattatatatataaagtaaataaaaattattgaatccaaccaaaaaataaataaattattgaatggacaatagttttcttataaagatactcgtggccaaaagatcatgacaaagaatttcgaatggtgttaattagtactagtagtcaattcgacaaagttataagaaaaagagggttaattaatcgataatacaggctggttcgacccatgcataacatatcatatttcctctgcttcctttataaattgttctctttaaaactatgcgcatgtaataccattcttaagcatcattcttatatccgcagacgcatacctgcacgcatgcgtagatttgtacgtattagtatcaattaaaagttatgaccataatatctttgtattcaatttatgtatacacta

SEQ ID NO: 39239 - DNA, 410 bp, Arabidopsis thaliana landsberg
aagcccaggaaaaactacgcgatttgaaaggtattatttctaattgagattataccaaacctgagcagggtgaagggctgaaagcaaaagttgccgaattcgcgaccgacaagatcaatgaaattgcacgtgccaaaacagccaagcatgaaagaagcgaagcatttaaagcattaaaagatgcgcttattgaaagcctgggtgaagagccagaagagctgactgtaaaattggccaaaaaatattatgaagatctgcaatgggaactggtacgtaatatgatgctggatgagcgtatccggctcgatggccgccagctgaatgaagtgcgccaactggctatggaaattgatccactggctaccccccatggttctggcctatttacaagaggagaaactcaatccctg

SEQ ID NO: 39240 - DNA, 491 bp, Arabidopsis thaliana landsberg
aaaccagaggatgtatcttaaaagtttagcttgaaaacaaatttaatgatttgtttatgtccaaatgctttactatgttgagtatctcatctcgcacaaactaaatcaatttttatatataattttttcgtttgtagaatataattgtatttatgctatatatttgaaatcattgaaatcctctattttttttctttgatccacattacaacaatatcaaccttatcatcttgtatatgagtctcgcgtaacatatttgtttgtctatggaatttcaatccggaatataattcatcgtggtggctactacactaattcatcattgctttatataacaaaagaagatttttagcaaaaaaaagttattttttgttacagataaacagtttagctaatctatcacaaatgaggaatattagattagagaataaaattgtactaaaatataggaatctactttcataaaacgcatagctttaaataaaaagaat

SEQ ID NO: 39241 - DNA, 285 bp, Arabidopsis thaliana landsberg
cgccggcggttttaacatttcacaaccttctccctcagtggtttcagcgttgccaaagtcggggagcggatatagtagtccacgctcgctgaccaggggatgatattcggtctgtccccgccattgacgataatcccatgtacccgctgagagggtagaatctgctgccggagaagagagatgtttacataggctgctacaacagcatcgagggcattgaccccttcccaaggcgccgcggcagcatgcgctggattacaggtgaaggttacgcggactttgtcg

SEQ ID NO: 39242 - DNA, 736 bp, Arabidopsis thaliana landsberg
aaacgatttactgcatgagttattttataatagatgacatgaaaagctttatgtgttagataatagataaacatgaaatgagagaagagcggccatctggttgaagagaaatacgaagatgaaaaatatttatatttttattcaaaaatgtaacaataagtaggttatagattatattttaagaaattataatctataacctacttattgttacatatttaaaaaatatattactatgttttgctttggttttgcttgttatcttgtaaatatagttctttcaaaattttcaatttccaaaaagatatataattattataaaaaatgttaggtttcaattctatagatatgttaataaaaataaaaactagatttgttagaataaaaataaatgaagagcaatgtttcgtggacggaggttgttcgtactccacgcaatctttggcgttttcgtgttatgcattttctcctgccgttctctaaaagtaaaatgattttcccgccgtttcgcacatcccaataaaactatgagcgaaaatggtttcaacatggcgattatgctctctctggtactttgggcaagcttctttatcctttctacaggtatcgaggccatacaaatgtagtaaggaaacttgacgtaacctcgctaatatgtggtttggtctcgattggtctactgttaagttaccttaattgaatatttttttttgttctggtcgtcgcttccatcttc

SEQ ID NO: 39243 - DNA, 965 bp, Arabidopsis thaliana landsberg
ttatagtttattcacttctaacttgttacatcctactattacgttaaatacaggaggcatgaagccttcactatatataaacagcatcgcgaggttagaagatcttacattatacattctaacattggtaagagatggcaaaccaaagaaaaccaatccttcctctattacttgaaaagaaaccagttgagcttgttaaaccctcaaaacacactcattgtgaaactctttccctctccactttagacaacgatcctttcaatgaagttatgtatgcaacgatttacgttttcaaagccaatggaaagaacctagatgatcctgtctctttgcttaggaaggctttgtcaagcttattttatactctctccgtatcaaattaatatcatataattaaagtaatgattcagctattaatatcatattaagtgatgatttagcttattagaagatcttgcaaatatttatttttgtaatatttaggttaatgatttttatttatttattatccaacaggtcacagagacaataaacattcgtgctggggatataaaaaggcttaaagactctatgatgaaagaatgtgagtaccttaaagagagtttcactacttatgaagtacttagttcatacatatggaaattaagatctcgagccctaaaactaaaccctgacgggatcactgtcctcggcgtggctgttggaatccgacatgttttggacccaccacttcctaaaggatactacggtaacgcttacatagacgtctacgtcgagctaactgtgagagaactcgaagaatcatcaatctctaacatcgcgaatcgtgtgaagaaagccaagaaaacagcctatgaaaagggtatatcgaggaagagctaaagaacacggagagattgatgagagatgattcaatgttcgaaggggtaagcgatggattattttcttgacggactggaggaata

SEQ ID NO: 39244 - DNA, 655 bp, Arabidopsis thaliana landsberg
tggactacaatcttagcagtagaaatgaatattttagttataaatgtcgggaccaattattccaactagggcagggttcattagttataccttggtccaaactgattcctcgttagctacagaggcttcaattaattgctggagtccagatttcttgctagaagaagggcttccatcactcccgttgatctgtgaaagcataatcatcagatatgctttttagtaccagagaaaacaacgataacgacatttagcagaagtgacaatagttactaaccatatgtagaatctgaggaatgctaggtccagattccggtgttgtgttgaccttaatagatgtgagcatgtagtgacctaaatctaattcgcgggagacctcattttcatgtcttccttccaaggaatcaacgcttgtcagatttagaccatttttctccaaatgtggtggagataagtcatccaagatttcgatgttttctgagcttccattggggctagttcttgatatcgaattctgaccagctgaagcaaatgtgtaatcagaatccttggggttcaacagatcactagctgaactgatcccagttctaacgttctgatacagcttttcctgggttccactggaaacattttgaccaacaccaccagtgatcat

SEQ ID NO: 39245 - DNA, 1541 bp, Arabidopsis thaliana landsberg
caacagacacatagagatgagccgctgcggctctcttgggctctatgccccaaatgctttgccatctctctccttgaagccacgcagtgtcaaatctcctttctgtattacatctcacaccaaacccaacgacactcttcttcatgtaagacttctctaccttagctaagtgtacaaccaatcaacatgaatctgcagaaaactctctgcttcttcaccgtgacttattattgttcactgcagaatgttaacaagatgagagcaaaggcctgtgatatacttggagcaaagaagacaatcttggcagctcaactcggggcagttcttgccacggtaagaacatacgagacctttattcactatcgaaactatgagacaacagtggtcagtaatcgaaaatcgttagtttttcagattgaccatccagccttagcaataacaggagttaacaaccagcaggaattgagcagtgttgtgctcgatatcgggatcatatccgtttggtacttcctagtaatgccagtaagtttgaggacacatacattgtattttcaaagatttagatgattcatgattatgagtgtggagcttatatattatactatggtttgtgttagccaatcatcatgaactggctaagagtaagatggtacagaaggaagttcttcgagatgtatttacagttcatgttcgtcttcatgttcttccccgggtaagcaagatcacaccatctcatttgcatcaatgcttacttactctcttactctctagtctttatcaagattatcattttgcaggctactgttatgggcaccatttctcaacttcaggaagttcccaagagatcctaatatgaagaatccttgggacaaaccaacagacccagactctataaagaacgtttacctcaaatacccatatgcgacgccagaagattacgatctcgattaacagatagatccacaagtctgtttcatatcttgagactgtatgtatatactctgcattcacatgaacacaatgtaatggcttgtgcatacacttatgttcaagagaaatccaaatcaaacatgtaataaacagaaataactttattgtcatcagggaaaaaagaagaaatataaattatctcagaaacaaattaaacagtctaaaaaaaaccttcaacaactttgaacagactctgtgattataaaaacgaaaactctcattattctcttcccctccataacccctaagttctggtcaagatgttcaaaattttgtatcttggagagtaaaaggctttaacttttaagtaattctctacaccgatgatattaagagttacctctctatatcatcctcaggtttttgattgtttcttttctcttacttcttcaaagctgtggagataacctcagtgtatttgttgatgtattcatgcagctccaatgagtccaccaggttcttcagctcgtttgtaacctccgggttggaagatagaacagctgcagcagcggctcctgcagcagctagaaccactaaagtaatggctgttc

SEQ ID NO: 39246 - DNA, 737 bp, Arabidopsis thaliana landsberg
agaaaagcatattaattgggtgttatcgactaaatttttttttgttaagacttaagagtctattggaaagttgggaagcacatgttaagcagttgaggtgagtctctttgtgaaggtgaagatgagtttatatatcttcttgtttaaactcaataaactaggctaagttagcatttatcagaactataaccaaatcgaatttgttgtatatatagattggtacagttatttatcaccaaatttagtccacttcgaaccaagtcaaagaaaaataggaaatgcacatccttaagaacctctaattgtcggttaaaaaagactaagaactgttcaaaacttatgatctcaaatggtaataatagaaagaactagccgttgtttgtttgtttttgtctcccttcaacccaaccctttgtgtatttttcctacactatattatccaatgtttgggccttaaaacatgttatcagtccccaatatgatgggctttcttgtataagtttacaaataaaactcctttttttcttcatctttttataaatagataaacctccatttgacagtaacaacaaaaatatacatgactggattgcatggtactcctgtgatatagtattttataagaaattagttagatgcatcgggtggcgagtaacaagtggaaataatgttttaatttttgaaaataaattattcttaatcccccactgattacgctgtatttaaggggcatgggg

SEQ ID NO: 39247 - DNA, 987 bp, Arabidopsis thaliana landsberg
aaggacatccctattccataaaaaagattagacttccaagttccaaatttttgtctattattaaaagaaattaaattagcggccaatgagaaagatgaaacgtcagaatcaattggttagatactgatgtccaaacaagtgtgtgtgtgtttgcttcatatatgtgtgtcggctgcttctaggcttatttaaaggccggtctttaaaagagtattcaacaagtattgtgtgatgatgtgattgctttttctcttttttggttagacatttcacctaacgactctttgatttcattttatgtaactaacgcatgttgatatctatatactctttgcgtctttttttttcccaatgtcaaacttacatattcttttcgtgtgaatcttatatctttatacttgtctcaatcttttttgtcaatcacatcatcacacaataatttgagttttcttttttgttaatgaaaatttcacatgccttcatcttctttccaccaagttcttcatttgtcatgacatctaagttcttgtcatttgtcatgccttcatattcaacagctccaaaggtggggatcgcgtcgttgaacactttaattgcatgtatctcactagaatgcaaaacggtatcatacattcatactgatcggttatggagttatacggatcggttctctatatggtctctaaacggagttatacattcatatattgattgaagtaaatcgatcagtatcaatctccgtttccagcttcttctcattctcgaatgtgatagtattgacatactacttagactttgagtaggaaacaatatcagagactcgcttaccaaaaaaaaaaaagtgggattgataatcttttggcttttaatattttaaagtctctttcaatcacctcctataattaaatcactttttctatagtacatttgtgattgagcattaatttttcccaaattccgaacctaattatctattaaaaaaaaaaa

SEQ ID NO: 39248 - DNA, 753 bp, Arabidopsis thaliana landsberg
caatccctgcatcaatcctgtgaagaatagcataaattggtttctgggtcgtcctagaatggaccaagggaggattcaacaaggaaatctcagtaaaggaagcagctttagacaaagaagctccagaggaaggagtaaaaagcgtccttgcatcgattccaatcaaacccttgactttatcaaactcaccagaatgggaggtggaaggaagagacaacaaaccaagaaagtcagaagagttgtcactaagaccaagtatcctaaaactaggttcttcgacagcaatcaaacaaccaaagggctgaactagaccgcctctttggatgttagacaagtaagctgtgatgtgttcatcaagaacgtgattgggaggtgaaataacagatttggagtagttaaaagacttgccggtgtaaatggattgagcgaaatcagcaaagagagcagcatcaacagagtattgagcagtgttggatttttgaggttgaggtttcatgttgcttgcagctgagcttgaactctcgaatcccatagcttaggggaaagtgtggagtgagtttcgaccagaagaagaagaagaagaagctgattctgtatcatttgcagcaagagaaagaaagaagtaaaaaaagtttcctttttgatatttgggattcgtttttacctcaagattcttcttttcatgttttgttttgcttccttcaatctttttttttgctactctgtttgcattctctcccacacgtacagctt

SEQ ID NO: 39249 - DNA, 825 bp, Arabidopsis thaliana landsberg
agggccaacggatatgatgatactcaactggaagttttagatgttaagtttaagctcgtcagtgtcctccgcctgagccatgggtagtctatcatcaccatacattacctgacgaacataagtttttcctgaaactcctctatttaagcaacatttcccaaaagaaaatgcaagaattctatcacatgatgcctcctctgtagcaaatagtctatatccatattcatcccactggatggctgaagtaccactcatcagtggttcgtatttacagtcttgttttggattaattttaggggaagatgtagaagtcagtccaatttggcggacagttgacattaatctacatccagaaacagaccaaactgcaagtcctctcgacttccacccaactgcaaaagcagaattatcaggcgtccatgcaatgttatttacaggcccagtgtaatccgctgaataactgcaagttttaaaacagttttattaacgatgcagccaaaatatcaagggcatgaaataaatcacagtaagacaacttgaaaactaccaaaggcgtataaacttccagttgtagtatgacaagtatgatattatggtctttacacaacaccacaataaaaactactcagatgaatagtaatactcaaacctttcaaaacaaatattaaaaaataaaggttcatcacaaaattccaccatcccttttcatagtaacaagttgcttacccccagtcatgcaaagaaactgttcgcaagagagagatcgagtgtgacagatcatataactccaccatcccttttcttgtacccacagcaagaattttg

SEQ ID NO: 39250 - DNA, 614 bp, Arabidopsis thaliana landsberg
taaagtttccatttttgtcaacaatataaaaaaaaaaatttttttcaaagaagactgttccattttttgggtttcatataaaaaaaaatgggtgatgacattttctgtaatctttcattgtatggatttgtttagattccgatcatcttcacgtcggagtacacaatctgaaaccgatcatcatcatcatcaattggggtttttaatccctagaatcagtagaaaatatcgatcattgagcttcgattctggtctccgtttgattgtttcggacaatcagagctttgagtctccgaaaaggttggttatgtcatcttctgttccaaactcggaccggaagattgttactggtcccgccggttatattcttgaagacgttcctcatttctccgacgactttcctgatcatcctgtacgtctctctgactttttaaatttcaatctataatgtgactgaaaatgcgagcgggaaaaagactgaaactttatatgattgtggtttaaagttacctttttaaaatatcatttaacgtttctctgatgaaatctattgtttgtgtcatgcgaatgtttcagacatatccaaatccattacaagacaatgcagcttactc

SEQ ID NO: 39251 - DNA, 371 bp, Arabidopsis thaliana landsberg
tagccaaagaaaaaaatggagtgcctcaagttttatcgattcttggttgatctacttcttggtcggcccatgagagatgtgatgccgaactagcaagaaactttgttatattttttcattttttttgtacatatttacctgttctcccaataatttagcacttggtaaacaaatatgacgttttgatcataacagcacacacacacacacacaaacaggagaaattttatcacacaataaatttcataacttccaaaccattatctgttttattaatgtttgtatgaataaaagtcataatttattaaatataatgtgtctattacctgccctcatttttatgcaggtggaagggagtgtcaacaattatg

SEQ ID NO: 39252 - DNA, 573 bp, Arabidopsis thaliana landsberg
atcacattctgggagactcataagattttaaaaattcacacattttatttaaaaactaaggtttagatcttcttttataccagacatgatgcaacgtagcaacgagtacacaaaaattgtaagtgaacaaaaagaaagtggtgattggaattacaataaaggacaggggtataaatgtgtgaattaatataaaaagtcaacagtaacgaccaagactgaaaaaaagctttgtgaaaccaaaactgcagcaaacccataaaaaaagtttactttcgataattagcatttattaggacgagattgttgattaagtacttattaatcatttgattatttaaagtttcaagatccaaattcaaagaaaaaacaaaagatttctccctaagcccacgacattatcagctctcttctcctcatatcccaaccatcaatcatctaactttaatttctattcgttggacaaatctgattattttttatttttgttcgatctcaagcattttaggtggcaaatgaataatatggggaaatatttaaagaaatataattatgtaaggaaataaaagaaaataa

SEQ ID NO: 39253 - DNA, 701 bp, Arabidopsis thaliana landsberg
atttttatttttatttaatttaatttttcttttgatcatcagtagtgtcttctatttaagtagctttcggctctgcaaacttgatcaaaagagaaatcacaactaaagaatttctatctctctctctctctcacagttcttctcctatcttctgatcgtcttcctccttttctctgcagcattttcccggaaaatttatcagtaagaacgtccgtacttgtaaatctttctttttatcaagcaattcaaggttaacgttacttgttatctttcgaagatcttcgagtttctagtagttccacaattttctcaatcgatttgatccttttttcctctctagttctgttagcattttcccgcttcatttctcaaaaacgacgtccgtaattatgaaactttcttgtatagcaagcaattcaagattacggtgtctttttatctttcgacgatcttcgagttctactagttctaaatttctcaaaccatttgtttctttgtttttctctctttgcagttactttttcccggaaaatctccgagaaaacaaagtccgttgatttgaatcatcctcctttctcgttggtaacgattcttggtctttcttgtagcctaatattcgtactcaatttggtgtttctctgcaagtttgttctgttaacctaatatttgtttctttttcctctgtagttttgttaatattt

SEQ ID NO: 39254 - DNA, 754 bp, Arabidopsis thaliana landsberg
tgccattgacataacctggaccacatccacataacacttatagatcatatatactctaatggatacaagtggctaggttaaattagatatagtttaatgcttacatctacttgatatttcaaacttttaatgtattcaatgatgttttcaagcttcgatgcaaggtccggctgtagataaacacacaagaaactcgatattcgaaacttgatattgtattagactctaatatataaaaaatatgaagtaaattaagtaatagttaacctttgtgcaatgattaggcatcaacccctgcaaaatatctactttatctttgatctcctttcgtcttttctacaaagtttagaaagcaaaaatataaattagctagggaatcacgtaagagaagaaggagattaagtcatcttcaccttctccatcatcatacgatattccatggaacgttgccgtttagccatacggtaactttcctcgtctggctcctcgtcgtgtttctcatgatcattgtttttggtaacaccgaatatctcttgcaaagggtttaattcactatgattttctgaacaaaacgaataaataatatcagaaagcgaacattgctcttcttcgtgagtcccctcgttgcggttgtttctctccattgatgattgactaaattgaggattttgagtttgttaaagagtgaaaagtggagggttaaggataaactagttagttcagccataagctatatatatataggggagatacg

SEQ ID NO: 39255 - DNA, 504 bp, Arabidopsis thaliana landsberg
  unsure (1)..(504): unsure at all n locations
tgcacaaccaagaattttctttattatatgttacaaattttaacatttttatacgtatttgcgattacatgtaggttatctacaatttttggttatctatgatttctataatgtaattaggttattgatccttttttttttactgtgtcttaaccttactggatgtgaatactatagcagaattaattttaatttaaaacattttaaattgatttttggtattggaatattgcaatatagcgttgacggggacagtgaactaagcacatacgtgtgcatttttctttaaagaaatatcaatattgtgcaacgatcgaaccggattaataccaaaatgttctttcacctcaaacagtagtgaattaatgttggacatgaatttagaaatcccgtttcaatagcatttgaataagctaagtagtgatcttacactaacatatattaataagctcagcactttaatatctcaggtttgatccgactntatcttgcactaacgatact

SEQ ID NO: 39256 - DNA, 543 bp, Arabidopsis thaliana landsberg
acacaacaataataaggtcatcttaatagcaaactaaacgagaaagcaaaattttcatcgccttcatgtgacaagaattataaaaacaataacatcacataaaaaaattcttttattacataaattataaaatatataaagtataaacaaatgcgccagtttagtctacatcgagagcataagcatgaatacaagagaagattgctagtacatccagcaaaccacatcaaaatgtatactttataaaatttcaagagaaccaaacaacttgtgcaacaacaccatttgattgcatagatccgatttgtgacccatgtagctgcgagcagagaaagtatctcggtgggctttagctgttgaatagaaaccgtaaataacagtgttcctttagattaatgtgaggtagactaagatgacacgtgttggtgaagagattgaataaggttttagtctagagctttaaaggtctaatcaatttatgtactttggcattataatcaaactgaaacctcttctaaagcaatatctacgacaatgttacat

SEQ ID NO: 39257 - DNA, 700 bp, Arabidopsis thaliana landsberg
  unsure (1)..(700): unsure at all n locations
gcataaaaatcttactatacgcatgtgttcatgattttaaattatcctggctaagctaccatcattaatggggtgggaaaatgatctcttcactccaaaacatcataattcacacaaacgacaagaataccctactattttacagatccaatagaatagtttgtattcagttttaaagtcccccagttatataaagaacccatcattttatatattatacaatatttctcatttcaatacaagaacgataaaagagagattgtggcatcgctatcataccgcaacggtctcatgcatggtgtggctacgtcgacaataatgaagtaaactatatttatttttagcaaaccaaacgaagtttaataattaaacaaagaaaaagaaactatataataagaaatgaatatacgaatttgctttgttggtgttagaggaagaataagttattagtatttcaacaaagaaaaaaaaatgactggacacatgatgtgtttggactaaacgacatttttgggggaacaatattcacatgtgctttcagatgtaaactttaaactgccatatacctccaatttgtaatttatacattcatctttcttactatgaattcattataacacattcaatacaatcgttatggatatatatatacatatataacagngatctgatcatattaaatatttattggctcaatcaa

SEQ ID NO: 39258 - DNA, 588 bp, Arabidopsis thaliana landsberg
aataatgcactcaaacgccacatcatattgtactacttatctctgcattattggtacgtaaaatttaaaagtttattgcgtagatatatccaaagcattggattagttttgtttttttattaactttcttctgaactaataaattacgaattttacacctcaactagctttactacagatttttttcccctacattttagatcaaactgttcctccatgtctttgcttcattgtctatctcatggaccctctaatttatatatagtgttctatatcacaacatggagcttatgtttgtacccatataaactaatttaatgaaatagcatcgagtactttgggtagagagacatgaaatggaatatataattatctttgattttatttctgtaggtatgagttggttttccactttccttgatttaagacaaaagcagtctcatgtttactgacttaatggcccatttgttttgccattttaaaatgtgaacaaaatctacttgtgattcgttaaagtctatgtctatctaaattacaagcatgtttatcaatttataattttggtcacgcaggtttatcaatttaata

SEQ ID NO: 39259 - DNA, 170 bp, Arabidopsis thaliana landsberg
gagttcagctcgtcgagatcgcccatcgcggcaacgcgcttttttggtcttggcgacgcggtcgacggtcgccagcccggaggtgccggcgtcgccggtgcgcgtgacgatcttgctgagccgattgcccatgatgcttctcgtgatgtttctggtcgatcacggcagcg

SEQ ID NO: 39260 - DNA, 543 bp, Arabidopsis thaliana landsberg
  unsure (1)..(543): unsure at all n locations
ggtccatgtgtagggaggtagttccgtcaagactctggttcccttctcctccactattttctctttcgaaagagatctcatcttcttaaactttctagtatcttcagttaaatctttgtttcctgcacaagtaacgttggaattaatattagggttgtttcctaaaatccccatatagggatctacggggaagcctttttccgaggattccgcgtctaacgagcaatgagtcgtcaagtcttccttcgccggagatttaggaacgtcgacaataggcatcacnnnnnnnnnnnnnnnnnnnnnnnnnnnnnnnnnnnnnnnnnnncttccgaacaggaccaggtatacagttttttgttcttccttgagaaatcccaaggaaacgttgttctcatgagaaatctctcgctgttcttcggccataactcttctttgactgagatttaggagcttaattaggagagagttatcgtccgaaataattttagagaaaagactcgaaaaattgtttgtgagtaaaagggattgatgagagtagtaggg

SEQ ID NO: 39261 - DNA, 1122 bp, Arabidopsis thaliana landsberg
  unsure (1)..(1122): unsure at all n locations
tttgtatagatcactaactactaagaactgtcgagagtagttgtataagataaattgatctagacaattttatcagcatgcctgcgaataataaatgtctgtaacataagtcttaccttgtcatcaaagatatatggcccataatttacacgacccatgttttcaacctataagaaacatgagcaaggtaatgacccaagtaagaatttgcttaaccaaaattttatataactgatgattctagagctccatagagaggtaaagaatcttatctgaggatccaaggattctcttaccagaataaataagctagtgtttgtggtacactcaatagttggaagagaaaataggttggttgttccatctctcagtagtaccaatgtatctcagtactcccacatcaacatcttgngaaagacatgaaacaaacacttgagctctgtcatgaacctgcaactcatcacgttagaagatgacccttatacatattgcctttggattcagacaaaaaggttcataccttgggtattcttagtgtattcccactcttttttgcgatgtatgaagattcatataaaagaaatccgaacatctgggagcaagacaataaattatcagtttatacaaaacaaaggacaataataatagaccattccatggtgagtagggagatgcttacgctgcaccgtcaagtataaggaataaagacaattgacattacatacctgtccaacagattccattgaaattgggttggcggaggtgatcacatctgcaggatctgtcatacgaactaaatcaaacagtgatgttgtcatctgcatcttgatagagccataagctttccgttgcttattggatgggctaatggggtgtggtgaagcattgtacttcttaatcactctctgaagagctgacaatagcacaaaggttaataaaggaaacaagactgcaaaatcgctaaaagcaatcataagatcagaccttggaattttggattatctatgtcaccagactccttaatgggagcatcctgaaatgacaaacaaaaacaatattactttggaatatagttaaaggatttacaaatagccgggtaaatgatgttgaaatttggcccta

SEQ ID NO: 39262 - DNA, 389 bp, Arabidopsis thaliana landsberg
tgttctttgatcaggagagagctttgaagaatgtgcagcgagagaagtaatggaggaaacaggtctaaagattgaaaagatgaagcttttgactgttacaaacaatgtcttcaaagaagcaccaacgccatcacactacgtctctgtttcgatacgtgcggtgttggtggatccaagtcaagaaccgaagaatatggaaccagagaagtgtgaaggatgggattggtatgattgggagaatctaccaaagcctttgttttggccacttgagaaattgtttggaagtggtttcaatcctttcactcatggtggtggagactaatagatgtaagagttaatgattgaaatgaaattgaatgttgcaaattgggcatttggtctagtggtat

SEQ ID NO: 39263 - DNA, 810 bp, Arabidopsis thaliana landsberg
  unsure (1)..(810): unsure at all n locations
aaatttttgagaaacgagccgagagtggtggtaattcactgtctcttctctctttttctcgtttttgctctcgctagggttttcgtttacgcgtttcctctaaagagtaacatgtcttttattctgctaaatccgaatttgaggtcttctccgtcgttcttcatctcgggttttgtgaattttgctacgcaattttcattctgggtcatggcacatgcatcatttcatgaactttttataattctttcatggaaattttcaatctttacatttggttatagaaatgtctctgtttcttttgaaaccattgacacttgtaaatttgtaatacgtctgtttcaatgttgatgtctgttcttcagtatcttgttaaggtttacaacaatctaacagcattacaatttactgttagtctaagaagatcattactgtttacataccaccaatgnnnnnnnnnnnnnnnnnnnnnnnnnnnnnnnnnnagagcgatgcttcgtcagtcgcgagcaatctccatgatgatgagattatcccttggttcttttcaagagaagagatcgaaagaaactcaccgtcaaggcgagatggcattgatttaaagactgaaactcgcctacgcaactcatactgcacatttttggaaaaactcggcgaaagattgaaactgtaagtttcttttcttctacatgcatttgttatgctgcttagcttctatcttgcgttggcatttcgtacattcatcatcttagggacacatttcctttcgacatataagctttgatctgttattctatagtgtgatactctaag

SEQ ID NO: 39264 - DNA, 450 bp, Arabidopsis thaliana landsberg
ataatgaaacatgacagaagagaaatcaaaataatcatttcaccaaatgattggaatttggtcataaacaatgaaatagactaataccagaatgttgaccacttataaatcttcttcatgattccattaacgttgtcctctgttttcttgcccccctcaatgatttggtttgtactttgtaattcaactgataattcacaaatactctgcacttggactgcttagtgttaaaacagagcatataagaaaagattgtcaagaagataacagtctcttcttgcagccaaacaagagaaacgatctctttactcagatactctgccagatttaataccccaaacatatagcgtaattgtcaaagcaaatacgatttgcttgatctcttcagccacaatcccaggcaagaacaataaccaaaattgttcacaagaaacaatctttattcagata

SEQ ID NO: 39265 - DNA, 601 bp, Arabidopsis thaliana landsberg
  unsure (1)..(601): unsure at all n locations
gcgtactcgatcctgtccacgcgtgccgatcaggctgccgaattcgcccggccaaccgccctcttgtccggttaatatgcgctcgagggcgtaccgttggtcggagtccgccttcgcgtcgatgtagagcatcagtttcatcgtggcgttgggatcgtcgatccacatgttgcccgcgaactcgccaagggcgatcacgcccaggccggcgaggtcggtgtcgccgtaatggccctcgtggacctgccaaaccagggtgaacaggcagtctccgtgggtcggttcctgggcgaaactgcaggggcagggcagtttgcagctgcacacgtcaaaccactcaccgcgcaagcgccactccactgccgtcgttgcattcacgatgcctcctcataaatacctatagggggtaggggtatgcgaatgaccgtacatggtcgcgctgagtggtgacaagtacctcgtcttgcggtgctcgcccttgccgctggaggggtggatttcgctccggcgcggngttgtgaggtgctacaccccgtcggcgaacccgtgctggcgccacgcctcgtagaccgcgacagcggcggcgttcgacaggttcagt

SEQ ID NO: 39266 - DNA, 559 bp, Arabidopsis thaliana landsberg
cttcctcctaaatagactgataaactaagaatatccatataagggtaacatatatcccttatcatatatataggcaatttcatgtagagaaaagaacaactccataaacatgtgataacataagctaaagcatataagaaccagtcctcgaaagaatacaaaagatatatggaattttttttatgtaagatcatgaaccttgaataatttgttttctccaaagctacaccaaagaaagcaaaaaaaaaactaactgaggcttaaaaatatttatgggtctcagtccaagacctccaaattaaattagttttaaatgaagaccagaacggttataaatgggatcagaaccatttggaaaaactgttggcttcatattttttttacgtttctagaaccctaagaacaatttcaaagtgatgagactttgatctaatcgttcgaacaccaataaacacaagacacaacgattcttgctaatgacgagtggtgaggaacgagtgacgttgagccgacccgttttctttggagaaggtgtctctttcttttttacacactgatt

SEQ ID NO: 39267 - DNA, 560 bp, Arabidopsis thaliana landsberg
  unsure (1)..(560): unsure at all n locations
tctgccgttgcacgacacggtgcccggcgcctatatccatttgatcgcgggcgaagcgctgcggcgcttttatccggttaatctcggctggtggccggcccttgggctggtcgtcgtcgtcatggtgccgttgctgatggcgaaccgcagtcgccggttcagcctcgctggatacaccatgttcatcgtgttgatcgcgacaaaggccttcctttcctcgcaactcatcacgatttcgatcggggcggcccttttcttcctcatggcgatcggcgccaacgccgcgcgcgcgcggggccgtgattcggcacagcgggaaaaccccatttccggcctcccgaacttcgaggcgctccgcggacaatccnnnnnnnnnnnnnnnnnnnnnnnnnnnnnnnnnnnnnnnnnnnnnnnnnnnnncgccgccttcatccccggcgacggcatcggtcagctcgtcgagcaggtcacccgccgccttcagctcgcgtcgcagggcacggtgctgcaccacgatctcgacggcaccttcgcctggctcgttccctattatcagcaca

SEQ ID NO: 39268 - DNA, 285 bp, Arabidopsis thaliana landsberg
acagttcgctttctcttcacatgaaagaaaacgaaagaagctttagagatttgccaaaaacaaatattgagacagatcattataacaaatgagaacctacctcaaccttgagcttagaggccaccttctgttgcttgcacactgaagctcaagtttcaaatcttatcagtcaatcactaaaaaacccgtagagtatattaactaacacaaaacaaatgaatcttatacctccacgagagtgagcaatcttaacaatcttctcaaatcccatctcagcatcagtga

SEQ ID NO: 39269 - DNA, 506 bp, Arabidopsis thaliana landsberg
ggaccggacacttgttagcaaaacaatgacaaccacaagttcttgaaaacctcaattattgatgctttgtctacttttcttcttgtgggttttgttgtgtggccgttacttgcaagaaaatggcttcgtgtgccatctcaaactcatttcatactgtaaccttcaagaccttgaagagaataagtccttacaacagtctattcggttggaactccggtaagaaaatagacaatatccggccgccgcaacaaccggcttaccacgacgatgtcgaaattcctttctctctttcaatggtaaacaaaaccttcctaaaaggtaaataaatttattcccttcttctcaatctaagtccttgtagcaacatgtggacttatatattctaccactaggaataagtatatttcttatctaaagttcttcaactatataacaatcttttttattaggaagagagttaaaatgttgctacaaggcaagcattgatgggtttggtgcaacaaagt

SEQ ID NO: 39270 - DNA, 556 bp, Arabidopsis thaliana landsberg
acctgaaactcatggtcaagtttgggaatttagagataattagcacatggagtagagtaattaaaatgaattgggaaacgtgcccatttagggaaagacaaagacgcacgctttctctatcatcgtcgtccgtctgtttcatttgatggtgcggagacgtctaagcgatttccatggatgacaccaccttcataagaacaatcctcaccaaacccatcttcaaatttttcttcttttgaccaccattgcatgcttacccgattgggaaactctttgttatccttattgatcttcttccaacggcgatttcccgatccaaattttgggttgattgaattcaaagtttccgtttttacaaaccaatttcgggaaagttttcatcttttttttatggctgcttacgcgaattatctccgactcgcacgacttggaggaacaagttcaggtgtaaacctgtcgactctcagatcattcggttattcaaatccagcatttgacaagactcaagagtttcgctcctcttcttcatcgttagtatcatattcttcgttcagac

SEQ ID NO: 39271 - DNA, 485 bp, Arabidopsis thaliana landsberg
tgtatcatccacctgtttattttaacccaatcattaatattacagttcaaatcattcgattgttattactaataccttaattctacaactgaaacattttcgtttttctaataaggtaaaacattttttttttttttttgttggttatgaaattaaaatgggatttatgatctaaattaccttttgaaggagagcggatttcttgtgaatgatcatcatagaggcccatggagctgttcctgagactactccaattattatagctgcccatgtttggatcaaacctgcaatagatatcttatttgtcagtataataaattaacaatgcaatattaataagtttccacataattcaaccttaatcataaataaacttagagacttagagtaaacaaaaaacctcaaaagaaccatgactgaaacctgctccgggagtgacaacggctaaaacagtaaccatgccttgaattgctccgatgacagaa

SEQ ID NO: 39272 - DNA, 778 bp, Arabidopsis thaliana landsberg
cagattttaaataataatccagtaaattttataattttttacaatatatatatttaataattgtatttccccgcactgtgcgggtaaactatctagttaattgtttaaactcataaccaaataaatataaagtgataatacttcaaactaaatagtggaacaaagattttcttttcacatttatagtaaaacacaattagaaaactagggttaaggttttcatctctttttttagaaaatcataaacaaaaatctatcaattaaacaaaaatattaacaaaacaaaaaaatattttcaagggtatttcaggctggtcagagtccggccgggcaaatccctgtaaacccttaccctgaaaggcccgattttttctggacataatttttaaagcccgagcccactatttttcagggatgggctggggtagcccgcagtatttacactaattgacttgtctacatgcatgtgccttcgttttcatcaccattttcacttgttctcttgcgttttgtaccaaaaaccttatagatctaacatatagacaagaaaatgagcaaaaataacttcatgaaagcttgaaaacagacctaattgaacaaaagaacgatgattaggataaaatatcggattactaatcctaaaggaggtttaccgatgaacttatgtaaaagtatgaattagagcttatgtatatgttcagatctcttcgcgttcacttttgatatctagtaatatccgaacgtgatcgaattttcgatattctagactcatgaccca

SEQ ID NO: 39273 - DNA, 579 bp, Arabidopsis thaliana landsberg
ttctttatttcctctctagagcggcactcctctaccgatccaaataatcctaatttggcagcaatgtcgtctataatactatgcaagtttgagtcttgcatgacgacaatccataacacataatcctaatgaatagagctccttaataatatgttgttgatttgggtgacatgagtagttctttccactccacccatgtcgtgcaaaccaacaatgccgacaccatcatcgatgaggtggtcccatgccatttcgagaatcgattcacggccaacaagtgtgactgacatgcccttcttcataataagttgtgggtttagttacggatgattgaacttgaaagaactgcaaaacggtaattttgagggttttgatatctttaagcttcaaaaaatcattgttactatacatgtaacactttcggatatttctggaggataggccacaacacatagatgttgaagttgttggtctttagaggattaaccttctcgctgtgaagagtgtttgtgctttcaatccccacctcgttcttcaacaattttgcactcacaagattttgcaattatgtgcattttg

SEQ ID NO: 39274 - DNA, 804 bp, Arabidopsis thaliana landsberg
tctccctccctaataatataaatactagcaatggtgtttgcattaatacatttgttgctgcgtctttatagattgtcttattcattggaaggaattcataacgctttataaatctatatatcaatgagtttttaattttcagtcaccaaccagaccgcaacacatctgtcgaaacggatacaccaaaaagtctaacgaagtacttagatttctagacaatcagtatgtgacagggcacatagctttaacatgcaaaaaggttatagaggctgcactgttggctcgtctaactgaacaattccgatggatcaacactcttttagcacacaccgagatttctaatcaactcaaaaaccgttcttatagtcagtagattgtccatatgggacagactcgacattaaatgcaccgtccaaagaagcaccttcgtctctagtgtctcaaggctataataaggttttgacattataagtgacataatctcacgagctatctagttacgtcaaggctatcacgttgcgttacattcgccgaaaacactttgtagtcagtcgtctaggatttatggctatagaatgtaacttataccattttctgtttgttggtgcagcatacatcatcattcagtatgcacactagttattagtaaaggtgaagtttagtgaagcaatctatcaagtgtcttaacataaagaaactgatgttggatataaacttctactaaatatattgaagattcagttatagaaatagagagaccaaaacttgatataatgaaaaacagaaaacacagaatattccgtt

SEQ ID NO: 39275 - DNA, 684 bp, Arabidopsis thaliana landsberg
  unsure (1)..(684): unsure at all n locations
gtttaatcacctgtgatcttttgcctaagttagcagtaaaataagtttcacgaaaatgttgaagatttaagtagcttcttgaaaaatttgaagtcactctagtacattttcttgaagcattttgaattttggttataggatgagcaaccagaagtccaaggaccggctgtgatggtttcagctgaaagagcagcaaccgatagtcccatcggtatgcttcattgttctcttgtcactcttttaccataaaatccaaataatcaagatgtttttttttttattactattctgtagaatatagtgacgtcgctgcataccggttgtctctatcagaagacacaaaagctcttaaccagctggtatatggctattcttcttcatttgcctcatcttagaaagactgattaaattacgatttgatatttttacggttattttgtgttaatcgtgttatatttgaatacttcaagtaagttttcaaccaattgtatatatgcagaatacacttatacaagaaggaaaagagatggcgtcaattctatacacatatagaagttgtgtcaaagcactgcctcaagtccttgtgaaatctatcactacactcctngtctccattgcatatctacctttagacattttatctgataaaatgtagctttgagaattatgctatgcgttagttct

SEQ ID NO: 39276 - DNA, 589 bp, Arabidopsis thaliana landsberg
acttacacatctagttaacactgataaccgcttgtgttaaatggttatgccactttttgttttgatttatttgcatcctatcacaaaggtatgatttataaactaagactgtttagcattgtcccatagtcccattcaatagttagtcttttaaataaagctcacatttagttttttttttttgtctgataaaaaaggctccatttagtttatatttgaaataaatgcagatgaaaagaatcttaatatttcaaaagaaactgaagaattattaatacgttattaaagggaacgatcatcaacaaagaccctcgagtcaatccaaaaaaaaacgaccttaatttctttgcaattactatacaccaccacccatcctgacctcttaaaatttcgtattttccccattaatacatgtttcttttttccgtactattacatcacaaaactcctaaaatcgcgggttgctaatttgattatgactattcctacgtccaaacaaaccatttgctccccattcgaatttaagggccgatgccccgaaggtgaccgagagaatccttttctgcacagactgaaaatccagaaacta

SEQ ID NO: 39277 - DNA, 628 bp, Arabidopsis thaliana landsberg
  unsure (1)..(628): unsure at all n locations
cacctttggattgttaaatggcacacttacaagaaaacgaccgggcatgcgctttgatgatacaaaaaacataacgacgcctgcaatcactaattctgatttgaaattagtcgcaatgtttgataatctcgttactgaaacatatttacagatattatttttatttttcataaacaagcaagtttgaagttctttgcttgagtttaggttacaagatactacttctgaattcgactatccttattgctttgtggttgcagagttcaagggtttgtatttaacacaagcgttgtgctgagattccgctagtgaaaccatttctttgattgcaactagaatagtagtgatgaatccgtgatcaaacgctctgagactcgaatgcaagctttcaaagaacctgcaggattgatcagattagagagacagtggagaatggaaatacaagcaaaggttggctgattttgaatagagaatgaaaaaagcaaataaagggaaaaaggtagcaacaaagatcatataacttgattaatagacccaagtttgaaacttaacacttgtgcttgatacgtcaagctacttttacatttgctattgcatcgtanaacaacacatctcagtgatgtttact

SEQ ID NO: 39278 - DNA, 561 bp, Arabidopsis thaliana landsberg
gaaaaacccatatagtactatcactatctaacaatgtacagttaaggttatttgtctgaatatggtttcttctcgttcgttaagaaacaagtctcatgttaaatacatctagtcatagtaaatgattggttggtaaagttcattccctaaatccgtgcgaacttttatgtctctgactctaataagtaccaaaaaccattaaagtaaagtggatttacacgagttttctaattatattattaatccacattaagtaaaaacaggaacaaagaaggatgaccttaaacagaaattactgattcaccaaattttaccaaatcccatgtcgacggaagtgtgcgccgctcttaggtttttaatttcaattttaatattcttttacaatatccaaaattccggcaggtgataagacgggaatacccctcaattggcgaaattcagaaaaggaccaagagagagaagaagacgaaacgatcgtcagagatagagagagagaaaggtcatcacccattctcactcgcagaagatttgttctcatctgattcctccgatctgccatgt

SEQ ID NO: 39279 - DNA, 531 bp, Arabidopsis thaliana landsberg
caaaactccagattgccatagttagacaagtttattgatatgtcttagattttcacacttaagaaaagtgtagttcgtagtctgagtcgaataaaatacctcggaagtaactttgtacaaagttcctgaacggtaaaattaaaccatatgacaggagcaagcaggtaaaaccaagcggtcgattgttttcggttaaagcatcaccctaattagactgttagacatatatcggagtggactatgccatgatttggtgtgtgttttttttgccaaaattcaaacatgtttaggttttaattacaagactgtataacctatggatttggtccatggcataaaaagttaagaagtattgaagcaataataatctgtgcatatacacgatttctttgatcttatgatcgtagatgcggtcacccatgcataacaagatactggtatatagaattaaatgctttgctttccatcttacagagaaacaccttaaacttgcaattgaacatggcatcaatgtgaatgtatcatcagcac

SEQ ID NO: 39280 - DNA, 881 bp, Arabidopsis thaliana landsberg
gatgacacttggaaactttcaagttgaaagtattgtccatagtttttgtttactatactaatttagatgtgaaatttgtactactatggtaggcaaatttacaaagcaaaaagaatggtatttaattctctatatgttttgtactgattacatctactatttgatcgatcgattaggcactaagcaaatacaacttttatcaccctctctatgagacacatttacaagtagtacagttttttccgttttataagttgtttttgatgggtttttcaataaattctaagactgaaatactataaaattacgatattcattagatttcaatgctataaatctaaaattggccgtttaaaatatagataaagttgtagaacagtagttgtaattttgtttcttggcaagagtagttttagtttgtcataaatccatcaattaagtagaaataaaaatcaaatatctgatattgattgccatgaatatgattgattgcgataatattttagtgggggaaaaagttggatatgctattccagccacttttaaatgctttggactattacatatatatctcaagaaactaattcaatatccttttatatatcatatattcgaacttttggcaaggtataactgttatttttatatactataaggtctaaacacagctattgcatgggaacaaattatacttttttataaatccgacagtggaaaatcaaataagcaaaattagtactgaatattccattgtaaaattataaactaaacataaagtatgaattggtctcattcatgaatatacgtggtgagaatgaaaattttgcggccgaagtttttaagtggtcatatatgatatttcatccttcacaaatgagtgc

SEQ ID NO: 39281 - DNA, 559 bp, Arabidopsis thaliana landsberg
ctattgcgttggaaacgaaactgggaaaaaattaccagccctggttggtttaactggatgatgatttcaaggtacgggattgggtcgactacagcactttttacacaaatgcaaaaattttttttggcgaagcaggccgataaaaggcctgtggttaaaaccgttggatgcatgcgggaattatacctggtcgatcaggtcgttgggaatccctctgcgttcgcctttgtaaacagcatcaccaaaagcgaggatgggataaaaaataaaaggcaaaaagaccaatccaaccataaagccgctttttttgctaaaattttttgccaggccttcggctgcaacaaatactgcaacaatgggaattaacaaccaaacaacaatccaccaggcttccttgtcgccaaccttgaggagtatgataaaattataaatagggattaatgccgcccatcccggctcacctgctttttcaaagatcttccaaaggctgattgaccatagaatcatcagcgaaaagatcagcatcagaccccatactggtggctcgttgttatgcata

SEQ ID NO: 39282 - DNA, 555 bp, Arabidopsis thaliana landsberg
  unsure (1)..(555): unsure at all n locations
tcgcttgtggtgccgctactggttgagagagggattccgtgagccggttccactcgtaatcgctccactcaatctgttctgtattagcgaacccgaggtcaagaaccgcctctctcatcgcctctgcctcgatggctgctggcgtgtcaggggtggggcgggtgtgtccagcgcgctcatacagacgcttcaatgcggcggcgtgnnnnnnnnnnnnnnnnnnnnnnnnnnnnagtgaccgggcaagctgcaaaatcttgatgcactcggaacagccatcccagctatcggcggcgatccagcggacggcggcgcggtatgcctcaagcgccaccgcatcctctgcactggtgggctggctggcgagtcggaggttccatgcggttatnnnnnnnnnnnnnnnnnnnnnnnacattccccatcgacaaccaagcaccccggaacacgctatgaagtgctgatcggcttcgtcatcatagccaatctcgatgttgacgtgtccagacgggcaaggcttgagctcctgcgttacgctctgcgcgtcctgggtcatgc

SEQ ID NO: 39283 - DNA, 688 bp, Arabidopsis thaliana landsberg
acggggttttttaggatcagcaaatctaacaattttaggcttatcagaaccctgtaaggaagacaggaatacgtgaagttatggaatagtggacgccaaagatacattgagccattgggatacaacaaaaaactatctcaactacccgtatggtaaagagtccatttaaagctttgattgccgctagtgccatctctttacaagaaaactgaacaaatgcataccctgcagagagcaaagaatttagatataagcagctctaatcaggtttcatgctatcaaaaatatcacttttaggcaatgtaaggctgtcataacagtttactatgttgaggcattcttttgttaggtctatatggaagttttacattaagttactaagcaatatgaagtatccgtaatctactagaggagaaactaactaggatatctgaaacaagtatgattcagagtcaaacaccacaatatgcaggggcaacggacataccacgacaaatcttcatgtcgtcaagtgccatataaatatcttcaatgattccgtacctagagaagacctgagaagagcacactttgagaatttattcacaatacagtaagatatttaactataaatggaggtaaaagacaatctgcacactgttctgtcaattggcagtgacaaaaaattcagaataactgaaagttaaag

SEQ ID NO: 39284 - DNA, 587 bp, Arabidopsis thaliana landsberg
ttttccctttttttctttacaagttttaagtgtacttttgctaattgtattatcataaacgataaaagcaaacagggggaatggattgctataatttttgtttgcactttgcaaaataataacatactataaaaacactgaaaatgttaaatttttgctaagaaaaaatgttaatttttaaaaaaggttttaacacataaattgggttcgaaccaaccaagaactaaatattttctatctttgagtttctttgaaaatatccgacactatattaatggaaacgtgaattggtcattagaacgatccagttatattttagctaagcctctacatatctcttccataaggctatcttcttttcataacctaagagttgagacaaacacaattatgaccataaacaacaaacttaaaagctcaaaggcattaccggtgatatttactgaaccaatgtcgtcggtttttcaatacctgcaaatactgtagtttatgaggtcaaaagaacaacataagagtttaagtgataacaatcacaaatcatgatgagacacttaactcttaaactcgattcgttgagcactctgaat

SEQ ID NO: 39285 - DNA, 801 bp, Arabidopsis thaliana landsberg
ttttcacaaatgaagaatgtcaagatcttcaaaccaaccagagctcaaattgaaatatgtgattgtcttaagagagctaaatctgttatctaagaaaaaagttgtagaatacatgattgtacttgttcctcagatcaaatcactaaaaccaatgcttatgttcaacacaaaacaatctgaaattacacaaaaaaggctctataactcacaacacagagtagttcgacagatctttctcgatttgtggattctctaactcaacctaatcttatgctagttcgatcgataatcgagcaacgtgttaattaaaaaatgtagaacggacaactatatacaaaaccacaaggagagatctaagaaattcaaactccagaaacaccacgcattgattctacgaacatgtttaggatgagaatcctaaaagagaagaagaagcggctgaagcacgacgatattaacagagcgacggaacaatggaacgaacctgtagacggaagcggcggatgctcagaagaagctaggcgaaatcgagtttgccaaagaaaaaccctagaatcggaaaactgagcgatggatttattggtgtttatatactctaaatgggccacacttaagaagctaacgtgaatttttaagcccatgtttatattttatacttttgagagttagtatgaaatacaaatatgggcttttgagtatggtccttttaagagaaaaagcccatactttagataacatatgggctttttaagtccattgaaattcacattagcttctacctttttgtcggctagcttctac

SEQ ID NO: 39286 - DNA, 361 bp, Arabidopsis thaliana landsberg
gtttgggtgggtgggggtgatagtggaaacggagacagatccgtcaccgtcactgtttttatacagacctgagcatgagattttaaccggatactggtccaagttcaattctgtcgaaggcatcgtgtccttgttctcgaacgcgaatcttctttctacttccactccgagcggaacagggactaggacaaactcgttcacgtgttcatgctgcacctgaacactttctatttatgcttataggaaaaggatatgattattaccaaacccaaacatgtgcgatcccactcacacgatcttagaacaagagcacgagatctttctaaatcattgtctttgaccctcattgatcgagaatgag

SEQ ID NO: 39287 - DNA, 519 bp, Arabidopsis thaliana landsberg
tgcgcttaaaagggctttgaaaatgcttctcagggattgaaaatgggcaaatcctgtaaatatggcaagactaaaataccatgtaataatggtcaggtccgaatggttaaatatgaccagtaaggctgccagtaaatgagcggttcccgcaagacaggctttccggcccttggggatttctttatccaataataacatccctattatgaaaacagaatacatcaggaggttgagtgcctgttgttccatccagaaaagataactgaagagcaggcctccgctaatggagacaatgaagtgcaggtgtgttcgctttttcatcggtatatatttgttttttcgggttattaattattttttatctgttctcaagagctcgctgaagcccggttatggtcataaagctatcatggaatcttgtgtatgattgtttgcgaaggctggctcatgatggtttcataaaattatttaagaggggtggggaattatttatttaagaatgacgtaattgggtaaata

SEQ ID NO: 39288 - DNA, 2605 bp, Arabidopsis thaliana landsberg
gatcatttatgactgatataatcatattaagaattcctaactactagtactaaacaaaaattaagagaaagacttcaacaaactataatccgacaaaaataataagagcttacctaacagtttatttatttttatttttattttgtcccatgttaactagttgaagagacatctctaaatattttgaattttcttagtaaaatctaggtaaaatgtagacagaaaatataaacaaagaattttgtgaatacaaatggagtggttgtagattttgaagttagaaaaaaagaaatggaaataattattgtgtaaccgtggctttgattggggaacaaaaaaaaagtattataagtggcacaactattatttttatcaatcacaaaaaacttatgaaaagtgttactctcatctcttttgtacaacttttttgtacagtttttccgtacagttttatactatttcataacagtttatctctcgaactaacaactaaaatattttgtacaactttatgttaccaatcagatacaatagagtggtcaaatctcatttttggttggaacgcattctcaaattatagtcttcccaaaaaactaacattccgataaatggaggtaggatctattcactataggtgtggaccattagaaaactgattttacgagaaagaattgttacatacaagacattgaagaaactcgagatacaataaaatttgaattattgtggctaaagtagaattagtgatgcggtgatggattgggttaaagggaggagatggccacagttctggtgtgtgcaccatgcttgtaaattagagaaatctgctttatgatgttcaagaaaaaaacataaagaaagatattgtacaattgtggtaggtcgtaaatctaaaaatagagtttgtagttacgagttgcttcgtttacggtttttgacttttacctctctctttttttttgaagaacttgtcacatatgaggttgtacgaaagtctaaggttgtggtttttataaaaattagttgtgtatggctttggatcggatcaacctaagaatttgattcgattaaatcatgtcacatgaaatcaagcaatctgaccccaagaaaccctttgtgacctttcatttatcaactccaaagtttgaaaagaagatgagcagttcttgtacacatcctccttctagtactacaagaaaataatattataagacgtaataattagtcacaataataataataaaatttatcacaaaataaacatattacgagtttttgacgatttttgagttgttgcaatacaatcaatcacaaaattttattttgtaacaaaaacgtcacaagagttgcgacaaatatatctaataatcatttcgtcccaaatagttacgacacaaaaaagtaagaaaactgtttaaattacaaactataacatcgcttcaaaatcgtaataattcgtgattaacataacatcttaattacataattatagtctcaagtggtcactagtgataattaaaaatttgtcgcatattcgaaacaattactcaaaactgtggtttttgttactatcataatgtttcagtttatcattcactatgatgaaagtaagtcttaaatggtcacaaattattactaaaaatatttgcatatggtaacaattatcaactaaaaaattaacctcaaaacactattatttattaattattgtcatagtaatacacatttcttatagtcatatacattagctatatatatatatatatatatatatatattataatttatcgccattttttagacgggtagagcacgaattcgtcaattactaatagtggatgcacagattcgacgttaactctcagatggcaacccctatgaagagatttcaggctctctagaaagtaagactcagatctttccaatggtctgtagatcaacttttgattactcttgtagcaaagaggagagaaatccgtggcgatgatgaaggttacaccatcggtaaatacatcataaagccatcttccccaactcacaaattttacattcaacgaaaactataaatcctttagtatatataagtataacatgcttcaattaaaccaacaataatcctgaagtaatatgcataatatttcaaagatcaagtattttatttatggagtatcctttcccacgctatagggacatctctattaattaaacatttacaccagaaaaaacgacatcttattagactaaattattgagaaaattttaaaacaaaaacgtgaaagagaaagagataaattactgagaaaaattgaagtgtactcaaatgaaaatgtttggtatattaataagaacccttccttcatatgtctccgtctaattggtttatcttttaaagttaaaatttaataaataattatattatactatcttaaccattaatgaaaatgctctaagcactacttcaaggcttaatatttaccatcactattttaatatgctctaatccgtatcagatcgggttttaccggaatccgatccgtttatccgaatgcccactcctaattatggtagagtattgatataaaaattaacaacaatcagaatgcat

SEQ ID NO: 39289 - DNA, 578 bp, Arabidopsis thaliana landsberg
agtcttgcatacggcaagaaatgcggctatgaggaggtggggcggctgccggactgggtctgccgcaatggcagccgccatgatgaggtcatactggtcgtcactgcggcacggtggcgcccgctgtgggaggaatatctcaagacccggaaaggttcgtgaaagcacctctttagaggcggtcaaagaccgcctcttttcttttaaaatgtcttcaaatatgccgagtaatgttcacttgttataaaagacaatatcctttatgatactttttatgagagacaagtttcttaaaccttactttccaaatgagacggaacagtccatctatgaactttgggaaaaatctggttatttcaatcctgataatttgccaggtgagcgaaaaaaaacatttactatgatgctgcctcctcctaatgtgacaggagtactccatcttggacatgcatatgaagattcactacaggacgcggttattcgatatcaacggatgcggggtaagcgagttttatggatccctggaacagattctgctgctattgctacgcaggcccgcgtcgagaagaatcttcaaa

SEQ ID NO: 39290 - DNA, 635 bp, Arabidopsis thaliana landsberg
ctcactatacaaatctcggaggctccctcctgcaagtggaacacacactcttcatcttgtgaggttattatacgttgcagtagtagccgtaagtttactaaagcttcttaggtagattatatgtcttcttgagaaacctcgtggcagattcgtcgttacggtaacacaaaacacgtaagagtgtgtttggctccatgccattccactggcctgatgttggaggcaacggaagcctcgacttagctgaagaaccatatgcttcgagggtcgttcccttgaacctctctattaaactgtctgtatctgtactgaacagaggaagcacgcctctgacagtggttgagaatttatcgatcaggtccatggctagaccgtctccgttagcccagaacatatctttcattgatttgaaatcttcttccattatctgagagtcttgtcttgtgaacgccctagagggtcctccggcaagcaggacaagtaagaagccatctaaagaggctctcataatatcggtgatgatgcgtgttcgaactctttcatgtactgtctctgctatgactgtcaaattctgttcgagttccttgaggaaaggatcgattctagaggaagagaggtctccgatgtataacccg

SEQ ID NO: 39291 - DNA, 606 bp, Arabidopsis thaliana landsberg
  unsure (1)..(606): unsure at all n locations
ccaaaattaggtcccatgtaaggctgaccagtgattttgttgcgtctaagcttgtaaagctttcgaatttcaatacggttaggccagacggagcaaaggaactcgatctcttcacttccatcaaccttggaaatgtcaacaagcaagctaatatgaagacggacatcgtgccctgaagcatctaaaccggctcttggaacattcataaacccatcaaacatagttgcttccattttgatatcctcatcttctccaaacttccctttcatcacaatgcattgctcaccgggacaatcctccacagagaacgatttgaattcagtcgctggctgcattatagttttaagtgaaacaaaaacaaatcatcagtatctcttctcttccgatttacttggatcttgaacaaataaagtctacttcttgataaacaaattgattcaaatacagtgatacttgtctccctcatctatctacttcaacagaacaactgaattacacanatccgaaatctaggactagcataaacattgattccagctgtttagatagtgattataaacgaaatagatgatccctgatgcggaggagcataatccgattgatact

SEQ ID NO: 39292 - DNA, 485 bp, Arabidopsis thaliana landsberg
  unsure (1)..(485): unsure at all n locations
gttcaaacgtgttcatagaacctcgatttcatttatgttgatagaatgagtagggaggaccattctataccgatatattaatttgtattcttacatgttttagcttgatttgatacaaattgcttgtaaggagggaacaaaactgcgccttaatcatcgtagtcttgatgaaatattgaacattctcaaaatctattttgaaaatccaagaatttgtatcgttacactgtagacatgggatatccaaaatcatgatgacattacagtttaagacaaactttaagtggatatgaaaattgngaagagtgagaaagaaaaatctatgaaggataatattcctttacaaagcaaaaacatccaaacatttgtgtntgcaactttcatcttttattctttgcatcatgttcaatattcaactcaaggaccaatataccctaaaggtntcccctttttgtggggtggggggggggggtttttttttttcc

SEQ ID NO: 39293 - DNA, 679 bp, Arabidopsis thaliana landsberg
gctcgtgggatccgattattttcttcctcctgttatcctttttcgaagttgtttttattcttcttgtgttgtgctgtacaataattctagtcgttctgtgaccagaaaaataagcattaagcggaatctcggaagcgacatgcatacttaagcttctagctttacaacgaatagccaatactaaaactatcaccctagtccccaaaaaggatcaatttataagaagcttgaaaatcgttgtgtacacacatatcatatcatatatttgtatcattagcctcaaaagagcttggccttcacattcgtttgatcatagggtggtgatatgatgaattaaaacaccttctttccaactttcacataatagaagagacatagttgtaagtagaccacaagttacaaactattttttgaatgttgtgtgttaagtttttggcactcactctctcgcgcgtgtctcaccaccacacacaccactgtccttgcttttgctaagtcattaaggacacacaatttggatatcgatcacaactttagtctttacatgcaataatacgaccatacgttcataacattcttcttttctttgccttaaatcacgctaccaaccatggatatatcacctactctttttacacattccacctcaccaaagttgcatttattaaggacaaagatg

SEQ ID NO: 39294 - DNA, 808 bp, Arabidopsis thaliana landsberg
atatccttgctctggcgcctacctcctaactgctgcatgcttatttgtagaaatggttttgtcttttcagatacattagcaaaacaagctcctctcttggaatcttcttatactctcttggttctcttaaatgtaacttctacatagaactgttgtactcttttacttcctaatatataatgaaaataggccgacaagaaaaactagattatgggcctagtgggtgcaagtggtcatagtatatcagccctttttttctgttcgccaccttgttatatacgacaaaaaacttgcatgaactctttcttttgttgtaataagacacaagaacaaatgtcacctaattatttcatttcttctggttttcttgagttggtggaaaaataactaaaatccaattttatgtaagcaaattgaggacaggtggattggatatctaagaaaatctaaacctaaactaatatgaaattttggattggattgtaccagacaagacgaactaaattgtccttcacaattcataaacccacaagtgacatttttgtatatcttgttttctccgcaaattgttaagaattttttttgtttacactagtgtttataatttgttgagtattgatttatagaggtttattttactgtatcattaaatccacattgttttcttccaaaatacagtaagtgaagagcacaacaacccacggcacctgctaaagtgaataaaaatctctataaataggatcgttcatcatttctttctcatcagcacagaagacaaggaaaactaaaccatattgcaaagaaaact

SEQ ID NO: 39295 - DNA, 531 bp, Arabidopsis thaliana landsberg
ctccctctttgagaaaaagcagatctaatccccttctattttgtaacacaacctctgacaatgaagttaaggagtcttcgagcttagttatgaactgctccaatgcccccaggtctgcatccatagctgctcttagctcattatagtaatagggctgttggataagggcagctgctcctgttccaatccctgctgctactcctatcccaacaggacagctaaagtcagggttataggttctctcttataccgagtacgatggtcaaactcatctataaaggagctatcatcatggtagatgactcggggcaccagttggaccagaatgcaaaaatcttcagtaatattaaaaattgaagtgtgaaggcagggagtaaggccggttccacaggcccaccacgtatccagagggggcactaggtactgatctgagacatctggcagggtgttaatggttttgttacagaggggctggtgttcagtaagcaccctgcctatgcatagtccagtgcccgatactgctgaaagagt

SEQ ID NO: 39296 - DNA, 265 bp, Arabidopsis thaliana landsberg
ggtctccttcagcatggcatgaaccattggatccttgctacttaccgacatgtctttttcacaattgtcatagctccttttgctctcattctcgagaggtatgtatgttaaatgatgtgtatgcatgcttgtgttggttcttatatctagagccatggtagctatttataaatgtaagtgcctttgtattaattcatcgcatactttttcaggaaaataaggcctaagatgacatggccattgttccttaggattcttgcccttg

SEQ ID NO: 39297 - DNA, 734 bp, Arabidopsis thaliana landsberg
tgcttctcctaattggagagatctcatcaactccagttggtaactgctctgttttttttttcttttcctaatgacatttagtttctaattttgggtttcttcgttggtctttgagacataaacttgattatcgagaatgggcattgcagcaaaaccctgtttatgttcttggatctgacaggatcgaaagattgattttttgtttaggttaatctgttgtttagttatattgtcttaattacagagatctattccttttagcttaatctgttatttagttatagtgtcttaatctttctagtatgaaatgttaattggtcttaacaagttttaacctttgggttgattttctgatatatatataggaaggatcctaactacaagagaacagtaatggcctgttttattcaagcagcttacttgcttgaactcgacagacaagagaatcgaaacgagcaaaacgctctcgcaccaaaatggtggattccattcaagtacaagttatcacaaacgctcattgacgagagagatggatcaatatttggtgctgttcttgaatgggacagagcagctgcaatggcagatttggttgtcatcagaccaagtggggcaccaaaagcagtacttgcgctgcgaggaacgatactaaagagtcttaccatgagacgtgacatagaagatgataaacgaaatttagcttgggagagccttaaaggttctgtaggttgatgtgc

SEQ ID NO: 39298 - DNA, 401 bp, Arabidopsis thaliana landsberg
ggatcatgtttaaacctttactacacggtataacggcagctttggcatttactttaggttgatgtgcaaatatttacacccccaaggtggacatgcccaaagaaaccacggtgcagcagccacaacccaacccccagttggccatggccgcacccaccggtggtatttacaacgcatccacctacaaccccctgtttgaggacgttcgcgcccgtcacattggcgacattctgaccattcagatcaatgaacagatcgacgcctcacagaaaaacaaaaccgcggtcaaccggtccgattctgcgtcaatcaagctgcctggcattccatttggctttggttcaaccaatcctttgaacagttcagccagcagcagcaaggcgtttgcaggtgacggtact

SEQ ID NO: 39299 - DNA, 1260 bp, Arabidopsis thaliana landsberg
cccaggtttgtggaattatggcagcctattttttgtatctatccgtcctcctacgattgcatcaatattttttttgtttttttttttctgtcttggcaggcgattatgaatgggttctgggtggttcttgaggacatagacaaagctccatcagatgttcccctcgtcttgtcatctttgctgggagggtcttgctcattcttgaccagtcaaggagaggtatacactctctttttgctgctctgttacttatcatatacctaaatatattctagggccacaacttttgaataactctgttttaggtactcgtatcatttccttgagagattgattcaattttcagagcttcttaacttttaatctgcttgcaggagatacggatagcagaaactttccaactgttttcaactatatcgacacctgaatgcagtgtgtcacacatcagagacggtatgtcttgcagacacttattaggttgaaggatattgtagttgtataagcttgaaacctgcaactttagggagtttattacttgaagcgtaaaaccaaatgctagtaggatcagaggctcaataaacgactgttataataattattcagcttggccgttttgcaaataaccaacctagctcaaagtgcatggtagattaaatatccaattttattgatgtttactacactaaagctcttatgtggtcttataactatctgtattatcgagctgaagaaaacccatcttttacttgctgcaaataaggttcagttcaaaacaccttattatttttatgtctggttttcttggatgtagctggaaattcgttgagtcctctatggaggagaattgttgtatatccaccagatcgtgagagcttgcaaagtatcctgggtgctaggtatcctaacctaggtcctgttgcagagaagcttattggtaggttcctcttgcacatacacccctttacatggaatctgtactaacagtgaaactattccatctttgcagaaacatttgaaaccatcaactctgctcttcgtccccaattttctagttcaacaactgaaaactcagctactttcagttctccaagtagattttcactgaggtaggcatatatatttctatgactttgagttgttgttattaatggatttttcattctattctttctgaattgtcatcatttccagagatctgctcaagtggtgtgaacgagttcatggcctgccctcctatgatggccatgcagtttatcagga

SEQ ID NO: 39300 - DNA, 542 bp, Arabidopsis thaliana landsberg
attacttgaataaatacattgacaatgacatgtctaaaataggaacttcatgttatattttgaccaggtatactaaaaaaactcatatgatagtcaataaagtataatgtaactgcactatatctacatgacgctgacaaaagcagccgacagaaacatttatatttttaacaagaaaataattttgtattaaccgacaagaaacaaatgaactatcattaaaaagagggataaacaaaatttgcaatttagacatacgtactactaactcgtaaattatgggatctagtaattttctagattcgatcaaatactaattaccattttttagttaaaataaattaaattctgatagaaatagatattaaaactttttgttagcaaccgaaacaaacccaaaaccaaatttgatctaaacccaaaccaactgacatctagcaataatatcaaaacatcaaaagaacattcaaaattcaaagtctaaaataagaagatgcaacatctttgttagtcaattcatcgccacatagacattctttata

SEQ ID NO: 39301 - DNA, 435 bp, Arabidopsis thaliana landsberg
aaattccgagatacaaggaatattgtcatttcatacttaaatttaacgtttttattacatgtatctaattttgggcaaatgtgctgtcatttaagatttccatatctccgatgttattacgaaattatttcatttattgtgatggatctctctgtaataatcttccacaaataacttcactaatatacattccataagtttgatcatctttttatatacacaagtctaagcccaaaacattgttacaacatgtcgcctaaaactcgccgatcgacggatcttgcggccacaatcctcatggctatcgtgatcctcgcatctccgatcataatcaacgccgaagattcttcagccgaagttgacgttaactgcataccttgtctccaaaatcaaccgccttcgcctccgtcttcgacacctccttcttgtacaccc

SEQ ID NO: 39302 - DNA, 648 bp, Arabidopsis thaliana landsberg
ttttcagttccaccatcctaaatattaaattccatgagtcatagacaccattttctatcacactaagtattagttcagaagcttgagagcaatcctaagaataataatcattatggaggttgtgttccatctcctaaccaaatggcaatgagaggagtaacctatgactgttataaatcatagtaagatattatctcttttcgatgtagaattcctaaaattcatttgttgaaaacgaggcaatagatatcttcatgcatcaaagtttgtttgcataacccatgtcaaatctgctcatttgctaatgtgcttataaagccgcaatctaccactaccaggactaatttgttctcctacagcatcttttacatgcacaaactgcagagacttttacaacataccgaggaagttaggtcatccgccttcaaagttttggcaagaccaaagtcccctgtatacaacacaaatgtaaacattatttaaaaatccccttgcattctattgcaggtcacattgagtggaacataaatcaaaaacataccaaggcgaacatcttgatcttttgtaaggaaaatgttggaacactggaagtacaaaccacaaataagtccataaaaaactaagcacgacacagtgattcaacaacta

SEQ ID NO: 39303 - DNA, 529 bp, Arabidopsis thaliana landsberg
  unsure (1)..(529): unsure at all n locations
cccccccccctccnaccccccacccccccccccccccccccncccaccccccccctccnccccgtttcccccccccaacccaacccccccccccccccccccccccccctcccccccctcccccccccccccccccccccccccccccccccccccccccccccccccccccccccccccccccccccttctctccccgttattccccccccccggcccccccaaatacaaccccccacccccccccccccccccccccccccccctcccccccccccccccctcccctctcccccccccccccccccccccccccccccccccccctccccctncctccccccccccccctcccccccccccccccccccccctccccccccccccccccccctcccccccccctccctcccccccccctcccccctccctccccccccctccgccccccccccccccccccccccccccgcccccccccccccccccctcccccccccccctcccctccctcctcccccccccccct

SEQ ID NO: 39304 - DNA, 859 bp, Arabidopsis thaliana landsberg
tttttaattttattatttacctagttggttggagctaatccaactttacacatcgcgtaatgatatattattattcatcttaaatactcaacaaaattattaattctgtcttaccaaaatgttattaattctaagaaatgataacaactactaagaacagtctacttgatcaatttcttataactttgaaaccacaacggacatacgtagggttatatttcgtattagataaaataataggtaaagattaaaatgattttaaaggacagggaccttaaattaataccagcgtcaatctcaaggattaaaaaaaaactttaataattacgttcagacaaagaagaaaaatcctcactgaaattcgagcaaaaaacactcacttcgctctttcttcgctagcttcgttaaattcagcaaatctatctctcacgatcgaacagaactgagagagagtgtgagcttagccatgtcttctgagagaccagacgaagagaaaccagagactcgcgatgttcttcgagtccaagatctgatccatggaggaggaggagcttcacctgttcaatcaccgacacgtctcggtccaacccgcttttcagaagtagctggagacaagattcttaacaccgggtcgaattgtatcgggtcggtcttgtcttggatcaacggagatccaaaccggaatttgaaaaatccggtttagagagcaaaaaggaaacgaatcagaacggcgaaaaccgccgcgtttgtaatcgaacttgctggtttcttcattttcgttaattggattatgctctctcagctccatgaaggtcgagcttggctacggagaggattctctaaaaaaacgaatcttaaa

SEQ ID NO: 39305 - DNA, 625 bp, Arabidopsis thaliana landsberg
  unsure (1)..(625): unsure at all n locations
aaaaataataatgaactggtctttcttaaaacaacttactaattctcgtgggaactctattgaataattgaattcgtaagcacaagttgatccacgaccactacattatacatatgcagatatgttaatgctataagaccatctcgtttattgtgtgacttttggagataacagaaaagggaatcttttacagataaaagagaaaagaagtctttttggttgattttgattcactgattaaaacaacacttgtcttttttatctttgccttcacgagaatcataactacactcaccgtcctcgccgatcaaaagtcctcgtgtgataagaaattcatgtgcaattttattgcaggtacgtatttttcatcaacttatcaataacgacacgtgtcgaccttcttacgtagttcttctgtatttgatcgccttggatttgctctaagacctaatttaatcacgccacatgcaacaattaactaccaagggtcccaaaaaaagaaagaaacacatactactctatttaatntgattataaacaaataaagtcccgttagtagattatgttttacatataaaaacaattaaagtcccgttagttaattatgttttacatatataaaaaa

SEQ ID NO: 39306 - DNA, 545 bp, Arabidopsis thaliana landsberg
attccgtctatagaatcattttcacaattagaaatccgaacccaaactcatcaattttacaaattctctcttatctctatggatcgtacccaccaacccgaatctccgacggcccgacccggaaacaccgtggtcctctccatcgattgtctaaaaggaagctccaaaagcgaagaatggagcggcgatatgcttcaaaccggagacatagtagaagagatccggatcgggtcaggacccggttcagctgttttcaaagctccgtttaaaggaggtaaagcttggcttcagaaagttttacacaattcttttaggaataaagaaacttcaatcgtcgtcagagttcgacgtggctccgatgatttctccgatctgtctgcttgtattgttcctaatgaatccgccgggaagagacagtatatgcttagatccattgatgacccgaattatactgttggattctcggatcgaactgagtcggattgtctcggtttgcaaggtgagttaactcggtcggtttaaatatcttcttgtctttttttgta

SEQ ID NO: 39307 - DNA, 2500 bp, Arabidopsis thaliana landsberg
gttgttctgaagtcataacttgcaaaacagacataacgtgctggcgcagaagaaaattcagaccaatgtacgtgttctgaagggtcacggtggtgctgtcactgccttgcactctgtgacaagaagggaagtctgtgatcttgtgggcgatcgcgaggatgctggttctttatcagcggtagtacagactgtctggtcggtataaaatgcttgattggaaaaatgtttatatggttatttttcattcatcagttttttaatcatctagttgacgttgctttgcacctataaatgttcttgatatctacattgagaacacataaagagtgttatattatattagatctaaatatctaaaggatggttgcattcactttctgttaggcctaaagatcattacttagagggtcaaagggtagttcgctcatttgctattaattcttatctagattaagtgaattattttgcttttattgttaccacagtcgtggatatagtaaattagaatatttggaagaataactttgccaaagtagaactggaacaataacccgcatgctgcttcttttcctgtgcaatgtgtcaacttcttatggagatagtcattgattgaaaagttttcacttaagagatgatgagctcgctcttaaataggatgttgtagtctttcacactttcatttcttgaaatttagatcgaggtaaaccttaatacagaatggtaatgacaatctagcatccccttttggttgcttcctgaatttgagcaggttaaaatttgggatccaagtctgcgtggttctgaacttcgagcaactttgaaaggacatactgggtatacactatttcttattcaccttgatggctctcgggagttatgtttttttttgttaatttttcatatgtggtggtttctttaacagcgcttcctttcttgttttcttttcaacttttgatgtagaaccgtgcgtgctataagctctgacagaggaaagatagtttcaggatcagatgatctatctgtgatcgtatgggacaaacagacaactcaacttctagaagaactgaaaggccatgattcacaggtttccactacattctagtgtttttctgtcatttgtacacagttcatgagtgggaagtattaatggtcaacacaaaataaacatataggcgtggacataattaaataaacatataactatcagttattagaatcccatttgacagaatgttcaacgacaatttgaatttgttaagttactgttgttgaccaattattaactatcagtcagtcataactcataaggcaccaaagaggaagctattattatggtgacttaccttttttctgactgtatgctacatccaaaactattctgcaggtaagttgtgtcaagatgctttcaggcgaacgtgtcctcactgctgcacatgatggaacagttaagatgtgggacgttcgaaccgatatgtgtgttgcaactgttggccgatgctctagtgccattctttcactagaatatgatgactccacaggaatcttggctgctgctggcagagatacgtatgtatgctatattactcataagtaacaaatggatttgctgtattgaatgtcactcacggattcaactataatgattggataatcatcagggttgcaaatatatgggatattcgttcaggaaagcaaatgcataagctgaaagggcataccaaatggatacggtgagccttcccttgatcttgcacaacatgtttctttttgttgtgatcgaaaaataaatacaaagccaatatacgtatggctttttcttccgttacaagtttattttataatggactatctgcaggttgtagggttgcttcatcgtattatggaactgattgatattaaccatttattattactttgtaaattgttgtaggatattataatatctcagaatctgcgacttgtttgatccaattgtgtcaattctgcagatcaattcgaatggtcgaagacactttgattactggaagtgatgactggacagcaagagtgtggtctgtctccagaggatcatgcgatgctgttttggcatgccatgccgggccagtacaatctgttgaatactccccgtttgacaaaggaataatcacaggtctatgctgatttcatctaccaccagttctcaaaagatttattaagtagcatctttttcacaaataaaatcaaagcttacgttagtgcgttgctgtcttttttcttgcaggctcggcggatgggttgctacgcttttgggaaaatgacgaaggtgagaatctcattattaacctggatccaaacccaattatcaactatcagttgcaccaaccattcccttaatatttttgttttcttggtttataggcggcattaaatgcgtgaagaacataacgctccatagttcttctatactatcaatcaacgctggtgaaaattggttaggcattggagcagcagataactcaat

SEQ ID NO: 39308 - DNA, 570 bp, Arabidopsis thaliana landsberg
gcggacacactcaagttgttctcaaaagaaaccaaaagttggaaaaataaatactgattttgtttctcacgtcacatatgcaaaaaggaggcgaatgacgacgacttagaccagacacagttttcaatattccaatcatatccttgctatacgtttacgtacgcaccaaagacaatggtctgataattaatgtaaactattcatgcttactctattgttcaagaccaactacctttgcttccatttttgaatgcacataggagaaagctcttctactatgaaaatcacttttgccttgctagttagtactaaagcacttagaccgcaccagataaatcttttgattccgcctaagcagagccaatgctgcttttaaagtaagtgtttgaaagagactatcatgcttccgtttgagccagctgaatagtagatgcgattctttaaatatcttcctaaccactttgttcgccaagaattgaattcattgaacaacaaaatttatttgtttatatatttttccgcattatccaaacaaatgaaactatccgtggaaagaattcaattgtctaa

SEQ ID NO: 39309 - DNA, 567 bp, Arabidopsis thaliana landsberg
tatatgttcctgtgacaatgataacgaaaataaggtcttggagtatcaacaatgaaagttgcacaagagcgtacaaggtagatttttctctcttgaaagccaatagttcaacattatttacgtgcttaatttagcaattagatacatatatgttcacttttgtctttccacagggtggttccacccagataaggttccaaccacgtgttggaaagtatcttgcggcttcatcagcaaatcttgtcaatgtactagatgtagaaacacaagctattcgacactctttacaggtttagtgttcaaacttttcaaacacgatgtttctgatagatacttattttgtaatatgtaccagcaaaagagagcaactaaaaaaatagcaaaagagagcaactaaaaaaacggttgactaattcgtttgtgtaggggcatgctaatccgataaactcggtttgctgggatccctctggtgacttcctggcatcggttagtgaagatatggtaaaagtatggacgctggggacaggtagtgaaggagaatgtgttcatgagctcagttgcaacggg

SEQ ID NO: 39310 - DNA, 869 bp, Arabidopsis thaliana landsberg
  unsure (1)..(869): unsure at all n locations
caccccattcgaccttctcctttagggttcctcggtctttaataagcttcaattcaccagataatccttttccaaccgcaacctcgtgtatattttcatcaggtgttatctctttggtatctgatgaatcctctgctgcatccatatcagtgtcatttacttctgtcaaaccatcaggatgctcttcttttacttcaacgggagctttgggtgctacatcttcttccatgaaaacatcttcactttcaggcttccgcacatctgaaagaccacacaaagatcaacaacaccgtaccacttctaactacaaagcatatgtttgtcgaagaaaaaaaaagtaattagcaggtaataagattgattaaactagctacaaactatttgcagacaagttagccccaagcatgtgtgtgagagagaatgtccatatatgtcatatcatatgacaccaaataaatgttccaaataacgtaggaagtgctatagcagatcaatataatagagcaaaacataaataacagtgtaactgtgtcagaagatgatttaaactttaccgttctcgcgctggagaccccagacaaagtctcccatctctgtaaaaaccactgtattttcttgtgtctcatccccggtggtggtattatcatctgttgtttgatnnnnnnnnnnnnnnnnnnnnnnnnnnnnnnnntgtggaccagatccagcttcctctttcttaatgagagctagcctcctagctttctctaacgatttgtaaagatcttcagcatcatcagccaacaccatactctcatcttcctctcttttaaaaggctgaacttgttacattctaagtagcctggatgcctcatcagctttagcaatgg

SEQ ID NO: 39311 - DNA, 730 bp, Arabidopsis thaliana landsberg
  unsure (1)..(730): unsure at all n locations
tctttgttttacctttacaaagaatcttacaatctacagaatctttttaaaaaaataattatataatgattttgttgtggttgttggttgctaccaaaaattggaaatagtaatgaggatgaaacttgacatctgaggtagtcccaactataacagccgaaaaggctcaaagcaaacatttgatttgactcttgcgtcttttattttctaaccacaattatatctctcacgcacacttcacatgtcttttcatcaatccccatttatctctcactctcgacattttgatggtttatatgaaaccctctatctacgtacatagccggtctcttcataatgtgaatgttaatgatcttcccaaacgagtccgtttttcatatagtcttgactacttgttgccatatcaattctaccatttactgattttaaaattaactatccaaccatatgtcgcagaattcgctgttataaatcatttttttaagggatcggctagacttattaagttattatcgttagaatttctgtcgcaatatgaatattcataacaccataatgcaatttaaaaaaagaatgtaaagtatttctttttttattattaattaattgtgcagctataaatgcatatacgaaacatatattatcccatatatacaaagganatacctaggtttggtgagactttaagcataacgtagatgtatttatttgaccaanaagatatcaattg

SEQ ID NO: 39312 - DNA, 434 bp, Arabidopsis thaliana landsberg
ctcattctccttgtcttattttgattgcattatattgaacttgagtttaatcatttttcattattaaggttatttatttatagacgcatgatgcatcaagtcataataatttcacccgtgatgatcacataataatactaatccaagactccatgtgtcgtaccccaaaaatttatctcaattatactatgtaccttatattgtgctatttttttaactaataatttcccgacaatttagtagttggaaatttctcgaccgtgtgatataatctataatataaaatatcataattattaaacaatgataaaatttgtgagcgacattggtatcaatttcaaatccaattattatgttgacacaagactagtgatttatagtataaacaatttaatgtctaacgtaaaaacaattactattaattgatttgctat

SEQ ID NO: 39313 - DNA, 366 bp, Arabidopsis thaliana landsberg
aagaaaaaatcttacgggtacgtttcaggcttcctggtccataacgtttctgaaaattaaccaaaattggttactaattaatcacttttcgttaagttacgagataacaataggtataaaatatagtttaaaaggtaattactagtcgattcaataataaaactgacctggctccacttcacattagatccacttgaggccataacctaaaaaacgaaaaaaagagagaggaaaaacaagtaaaattaatttcattaaaaaggctaaattaaatatattccaactaaaagtacaataatagaacccatatttgtctcatatcgctcgtcaattaggaaaacatacaaatatattatcttcaatatt

SEQ ID NO: 39314 - DNA, 116 bp, Arabidopsis thaliana landsberg
ttcgaacctgccacctcttgctccttaagcaagcgctctaccaaactgagctacgctatgtttgacatcaggcggctcgattggtgttgaattggtccagctcgatcatcgcattt

SEQ ID NO: 39315 - DNA, 658 bp, Arabidopsis thaliana landsberg
tttgtcgaatgacgacttatatatagcattacttactctattgaaaaataaatgttgctttgttaatattgaacacatacaataacaaatccataccaaaccaaacatttagttacgaatttcattccaaagtaaagcaagtcgatagtggatcaataagatccaagtcgctgctagaactatgttttgtgatgactttagtccaatgacaatcttatttgggtcgtattattactttacagtttacagtacaaaaactgacatagctagaaaataaaatttatgatagattccatttcgttttagaaaatgtcgttagaaaaacaggtaagtacattccattcacagttattgtaatttggcggtgatatacaaatatagattttttataaaattctcctaaataaacatcattattaattggagaaatcgctggtatgaagttgaaacattatatagagtttaatgataaaattaaatgaggagatgataatgttataatgtttcctctatcccccacttatttcttacaactgtacatctctgtactctctctaccttttcatttatttcaagtcggtcgatggatggatcgtgcacccccaatatacactatcaacacatattttatattcctcatccatcattaaacatatat

SEQ ID NO: 39316 - DNA, 3543 bp, Arabidopsis thaliana landsberg
ataaaaatgacaatacttgactaataacatgggcccaatataggacattaggcccattattatttcgcctgtaaataattccattataatgagagagatacagttatcgtagtgatcagccatgaaccaccttattaataatatgatcttacactttcatggaaaattaaagcttttgtaaaagtttatgatttaagagattacaaaccattagccgctagcttgttgaggagtgcgagagaattgctggacaagtacatagacgtcgtgactctcttccgaatcatcctgaccgttgatgatgacctcgtcgatgtcttttcaaacccatcaagacacgtgtccttgtcagtgagggaagagctaagccacgtagcaagatcactcatctgctgctgaaactcgctggctctgagtgtccggaggacggccaaggacttgtggagactatcaagagagtcttggagaagttcgcgacaatccgacaaagcgattcggtctcgtttcccaatcgttgaaagcctcgttttgagaaggtgtctaaggacgtctttgttgtcggttatggcaacggaaacgccggcacgtgcccatttgctgggactgttcttggcgactgatgcaaacggcaatagcgttttagcgcagaggtcttggtagcgtgtaacactacacgcgttttgaacgtagctttcgcgtttggacggtaatgatgaagttgggttgagagaaaggagaaagaagacgagtgcaaacgtgatagaagaactcatgggagttttcatgttttgtgagaattgtaatctttatacaaaattaattggtgtatcgacgagagatcgtatatatagacacgtataaatttaatttaggggttttggtaggttttaaagtgaaagtataaaaagtatggcggtccatttgtaggtgtcggagttatgatcacaacatttcgttctaacacttcgttcgattttattaattcgttgttttgccgataacaattcgttggtttagttatctcgtattatgattactatgttgaatagaaatatcattattttttttaccattttcaacaactactccaacctaataaaactagtgatcgatctatttatttatttattggtttgctaatcattgaacttattcttactctaccaggcggacttaacaaagattgaaaacgtaatttgtcgcatctcttatgcaacgaagtgataagaagagtgagtataaatccttctatgataatatttatttcatcaatggctacgaatatatgggtatatatgaaactgttcataaatggaagatgagctagttgtgtacggaaatgaggttttggtaccttacatcgaaaaaggtacattatgtagttttgtcatcgccatgaggcccatgaccatatctcttttcgaatccatttttttagttacctttttctttattcacgacatggctactttctttaggacgtgcgtgagttcttatatacaacataatcacgtaatgcgtgagcatttatgaatacagctaaagaattgaatcaaactcacatgaattgagagaacaaagtatatgtggttatgacgattcacatgattcctatgaaacaatgctcttcaacacaagaatctaaggattgcacaccagcgagaagatgactgagacactaataagagaaagctagaactctgaacttaaaatcatgaatggagatgataaaaaaggacttctgagcaaatgctgtggacactcatgaatgggggtaaatcttgacagattgtgtagtggttttcattggaaaatgaaccatacttctcggaccccgtatcaacaatataggttctattttattggtttgaaaaactagagtgaccatcacggcttcaatcttctcgcgtcaactctatttcaaacttcccatcagactctgtgaaacaatcggggacaaggaaatctagatagatgacgaaacctaagcttatgtaggaaataattatatttcaatctaacaataaaagtgacatggatttgaaaatgatacaaaagatgggtctctacgacaagacaaggcttctaagatttgagaatgacacaaaagatgggtctctacgacaagacaatgcttctaagaaaagtagaaaagtgaggtctacagtctaacatacaacataatcaatattagccatggatgtaagtgaattctgtaattcttgttttgaaatggacgaatctcatccaaaaatgtatgtaaagagcttcttattgattcaacttggccgtgaaaagagaaaacaaacagagaagcataaaaaggatccacctttcccgatcaaacaaaacgagtaagggagaagtaatccaatttcagacttacactcatacagattttttccgaagcatctcctctgatggaagctccaaagtagctcccgcgtgttcctgacttgctttcatctctacgacacagaaaaatcaaatttccaaagatatgagctttcactcacgcatttcaacaaacagatggtgcgcaagataaaaagagtcagaacgaaccgtatccgccgcgttcgttgagtttagcctggacgatcatggtggaaatgaactgcgtcgcttcacgcgcctcttctagaaggcgagtgatgtcggagttagaagccacgaggcgattctcttcgaatttcttacggatctcggacgccgaagcttttagcatctcggtatctccggcgaatgatttctttgttgccctgagcagtgctctgtacgcgatcaacgcttctccggtcaccatttctgctctttcccctttcaacctccgccgtcgtctccctcccaaaattggatttagaaatttggtcgccgacaaccttctgatcaacttcgagtttcattgggcctttacaactttcatgaataagcccaattttggcccattaatggattatttcggatcatacccgttcaagctgggttaacccgaatctttcgtatccttgagacaatttacatgtgtatacttattatggtttctcgatgagtttcaatcagcgaatgctttgtctgattgttcacttcctccctcgaagtgtcttcaccatttcaaagaggtacgattttgtgtttataatcgtagattcctttcgctgttttgatgttatcgatctgtacgaaaccctagatcattgagtctgaccaattctgaaattcgtctcttcgtttgccatttatgtttgagaaattctgatacatgttgtcatgttgatctctttatgtttggttgaccaattctgaaatctgaaattcgtctcttcgtttgccatttatgtttgagaaattctgatacacgttgatctctttatgtttggttaattcctgccagtttagatagagatggatcatgtatacaaaggtcaactgcaagcgtatgccctgcaacataatctggagctaccagtgtatgcgaatgagagaaaagggcctcctcatgctcctagatttagatgtaatgttacattctgtggacagact

SEQ ID NO: 39317 - DNA, 490 bp, Arabidopsis thaliana landsberg
  unsure (1)..(490): unsure at all n locations
atgagagtgatgcccgtaaagcagtttctacctacctttataatttttgtcttaattcagcgtttaagacagatgaccttgcaagctcaaccccatcaggagaacctaatgatggcaatggagacgttggtggagaggtttccagttctgttgttaagagctcgaacccggggagtcacctaatttatgggcaagacgttcctctgccctccaattttaattctagaagcatgcctgttgcaaattctgtttctagcactgttccaccnnnnnnnnnnnnnnnnnnnnctatttctgcaccaactgcctctgatcagacagtgaaaccttctgcatagagtcgagatccaagactgaggcttgcgaaacctgatgctgccaatgtaaccatttattcgtactcgtctggcgacgctagaaatctttcnaaagtagagctttctgcagacttggtgaacccaagaaaacaaaaagccgctgatgaattttt

SEQ ID NO: 39318 - DNA, 648 bp, Arabidopsis thaliana landsberg
  unsure (1)..(648): unsure at all n locations
acaagtgagtaccaatcacagaggcaacaatatacactcaaattcaaatatccctaaaaagactcacctgtccttcataaaggctttcaaaatttgcagtggtttggttatgaaggaaatgagcacggtcatctccactaacttgatggaaaatagattaaaaaaaaaaaacttaaggtagtattcataggcaaattcagagcgaaaagctaagcaaattagaacgaattcaatgtcaaataagacagcagataaacaaggatatacctcgaattctcccaaaatgtgagaggtccacaacctataaagcaagttttgatcaaacaaaaatgataatgcaaatccaaagagctccaaagttaagttacataccacaactccattatcaaatgcatccaaagcctcatcgtcgttatcaaaactctcaacaacaccatcttcagaaactttacctccagaaacacttattgtatccttcacaagtcgataagtaaaaatgcattagcattattatactactcagaaactcctaattcacagaaaaaattccaataactgtttcatagagctagactntaacactttgctgttcaaagaaattgaaattcgcagaagcaaacaagtgaagcttacaagaaaatcgtgatc

SEQ ID NO: 39319 - DNA, 3130 bp, Arabidopsis thaliana landsberg
cgctaacacaaaaaatataatatatttctacacaagttcctaaatatagaaacacaaaaacatagcatttttgttgggatttgaacctgtcctgactgaatcagcagaccaacaagggcttccacagcaacaactgcacaacaaaagagagtttcagatacagaaggccacaaaacactcaacaactcttaagttcacaacaacaacctctaatagccaacgatgagtgtgtcagaatcatgacttgcttaaggcgttcaatggcctcactactattcccactgtaaacatagaaaaccaatcaatatacgtttatagaaatcttaagctaccaattgaaacaaagagagaaaatggtaaaaaaagatgaaacctttcgtataaaagatcagacatggcaagcaagactgttgctttagaatcatgagaaacctgatcatcgttaggttgattcccaagacactgctcaagcactagcatcccttgagcataagattcatctgcaaaaattcagaattcacagagacccatttcgaattcagtcagagacttagagtttaaacacctaaaatccttataactatagagaaagacctgatttttgtgacctagcgtgagaaagagcgtaattaaccatctgaatagcaacatgattcgcgtttggaacgctgatttcaccgtgaatcaatctcaatggcgtcgagtatcgaataaggtttcctctaacggagatcgtgcggccacgaaacgttgccgctgcttctctggagaatttggcagctgcgcgaatcataatcgctcaatatcttcttttttcttgtcttgctcagaagtaaaggttttactcagtaaacgtcggcggagctcttcctcgccgtcgtcactaagagtggccaatttcaatcggtataatttgagtttggtttggaaaaatcggtataattggcttggttttgtgataaccaaataaaccaaaaattgacccaaaagttcctctagaattatgtttttttttttttttttttttttgtgttttttaaagaacttataatccattgttgtatatgttcactttgtaaatcattgtgcaaattcactctttacatttgcaatatgatttgaagtgttatctcaatttggtttcatatgttattttgcttcagcttgaagtaatattgagcaagtaagtactcatcaatatgttatatgtatgtcttcttgcaagatacctacctaccaaaaccttcaacctccccacctgttattaaaagcaagtctatagactctagtgacattcttggcttcgatctctattattacctttcaaaaaccaacaaaatattataagaacattaaaaagagaatgatttgttttgtgtatatatagcctttgtttaaaaacaaagcaaatcctctcattgaagtaatgcatatatgctctctgctgatttgatgtacaaagtgaaaaaggtcatagcaaaggtaagaaatgttgggacatgctaggctactagcaagtgatgaagtttatatacgcatagataacatataacataatttttgaaagaaaaacaaactgacatataaaatcaaaagttcaaaactctagtgaagcactctaacattttccttattacaattttcatatagactcaaaacagtgaattcaggtggtaacattacgacattattacaaaaattataaaactatattcaaaaatatcaaatcaatttctaagaataataaaaatgttagacaatgagattttagctaggtctgaaaattagttatggattgtaaagtataaacaaatttgccttaaagaaatgcaatgatgaagaaatctatgagtgttaatctttatccaataataaacgtttgagagacatatgaatctttctctttttctttaaatccaactttaacccattcttcatagaagaaggctcacgatcaagcctccatatctttctctttcccactaatcccatgaaagtctcagtttataaaacgttagcacttggcagttccctatacaacaatccacttcaccacaccaatattagtcttgcaacccaagtttccacttcttccttcgaccacgacgtcctcaacatattctttattaatattctcttgaaaacaaccacaacacacacaaaagcaaactttagaagtgatatatccccacacaacaacaacaacatcaacaacaatgacgaaatctgcaactctattccttctctttctcactatctcagccttcactggtacgatatctcttctccttctcgataatttatgaaatggggtttgtttctcgttttgattcctctcaataatagtgactttgttcttttgcagatggagctcagcttataatagtgaataactgccaggagagcatttggccgggaattctcggcggcggaggccaaatcacaccaagaaacggcggattccacatgggaagcggcgaagaaaccatcatagacgtaccggataaatggtccggtcgaatctggggtagacaaggctgcacctttaaccaaaacggtaaaggctcatgccaaaccggagactgcaacgacggctctatcaactgccaaggaaccggcggtgtaccaccagcaaccgtagtagaaatgacattaggctcatcttcctctccgcttcatttctacgacgtaagtctcgtcgacggtttcaatcttccggtgtcgatgaaaccaatcggcggtggagttggatgtggcgttgcggcttgtgaagtgaatttgaacatttgttgtccatcagctttggaagttaagagagatgggaaagtggttggttgtaaaagtgcttgcttggcgatgcaatcggctaagtattgttgcaccggtgaatatgcgaatcctcaggcgtgtaagccgactctgttcgcgaatctgtttaaagcgatttgtcctaaagcttatagttatgcgtttgatgattctagtagtttgaataagtgtagagcttctcgttatgttatcactttctgtcctccaaagtgagaggcttctgatttttatgttatgtttatcatgcagtagcttgatttggtacttgtacggtctgtttttaggtcattgaatgaggggg

SEQ ID NO: 39320 - DNA, 3902 bp, Arabidopsis thaliana landsberg
gttctctatgacaactttggttaaaaaaaaaggaaaaaaaaaggaaaaaaaaaggaaaaaaagagggaaaaaaaaaaaaagatttggtaaaaactcattcaaaattctttttatgaagagaaatatgtggctaaaacgtaccagtaagaagaggggcctgttgctctagtaattgaagtcgaatcttcgctaacttattctcgttcatcatcactatgttttccttctgcatgcaacaacaatagttttgtttaaacaaattccctatagaagaaacttagacatgacaagtagatggttgatattgtgatatatatgtctcacctccaaaagtgtcatcgttccaaacagtgaagcttgagtgttttcaagagtttctactctgagttccatatcacgaatcttcttttcccgattctccttagaacgtgcagctgaggctcggtttgccaacattctgaaagagcatcaatatgaataaataaatgtcaacaaccatacatcacaaaagataataataaaatatattaaagaaaaaatattgttccctaatataagtcacccagtcttgcttaccttttatatttcttagcatcatttgcacctcccgaatcagtattggttatcatcaaaacatcagcattccgattctgatcactattgttaacagcactttggttaggcatgatcatatactcagagcagaattccttcattgcttcctcattatatatgagctttccaaatccgccttcctcgccgcggcttgagtccccaaccaacatacttgatagctcactgttggtccttttatgatactttctaggcctgctaccggagactttcgcagagttggacctcgtgactggaacccgaggctgaggatgcaacgggggacggttagacatttcctccaaatgtgctgatggagatgggtgacccggcggagatgatctcaccatcggattagaggagtagacaggcgccggcggtaagaccgaaagcacaggcgacctatgaatcaacgacccttttccgcggttggagcggggaaatgaatcacgaccgaacaacggcggacagagctggccggtgctatggatgagaacacaggggaaggctgagggatcgaccatgttccggtgttggagtgagaaaatgagtctggaccgaacgacgacagagcagaactggccggtgctatccgctggacacaggggaaggctgagggatcgaccatggtccggtgttggagtgagaaaacgagtctggactgaacgacgacggagtagagcatgatgaaggactcgtctggggaaagtagaagctagacgacgaagcagagctcaccgacgcctttgagttatgggacgacgacggcgtaggaatcatttggtgaatgttggagaagctaaacgaaggtgtaaagcttgccggattattgaatgacgtcagtgaaggactcgcttgagtgaagtcggagaaggtaggggacggttgagtcgtacaccgtggtccggggctgaagtccggcgacccggctggataacggatcagtggtggtgacagagaagtccgggaagagagtgacacgccggtgctctggccaccatcatcagtactgaaaggattctgctggtattgagtcatatttccacgaccgttcatcgttgttatcggagtttctgcaatcatatggaagttttgttatttttcttaaagaagaaatcaaaaatcgaatgcataaatgggaaagagttaacaatagtccaaagctaaaattgaaatgatcaaatcgtgatattcagattaattctatgaaaactttgatcaggttgcagacaaggagaccaaaaaaaagaagaagattgaaacgttgagacttgagagagacataaagagttaaaagagaggagacctcaagcttcaacaatggataaggacagttgacaaaagaaatctctctgagaaaatgattggtgtttttttttgtctggttcaatagattgcacgaccctcctatttatatttggttaaggaaaggacacaagtctcatgtttttccccctcctcatatttaattaaggatttttccctttttatggtctcaaatattttatatctatacatttgaattatattttctataaaacagcttttacatttttaagataaaaagctatactgtactgtgttgtaaggttatacaatgaaaatttataaatctaaattttttgtgttttgctatcgagtcattagttagttattttgccgcgttatttattctagtgagttattttatcacgtttttttcagttttattaatgagttattgacacgtttatttcgttgtaatcgaactattttaccacgtttatttaagactgatcaaggaacataaatattgtttgttttctttttctgatttagatatacatttggttcatctctagaagaattaccaatgttggattttacaaatgattgttgtttgattttttacagaaagttttgtatatttttgtagtcctttgattaattgtaattgtgagatttattttttggctatattaataaatatcatatatctcctttttttgatcaactaatatttttatttttgtttattaatttattgattttagcaatcacttaattagtaaatcttttctatgcactacatggacccacattaaattacattacttaattgtagatatttcagtgaatctaaattaaattttgtaaaaaaaaatgtatttttatttggaaaaaataattgttgttagcaataaattaatagatactataaatgattgtaagtttgtttagaaattaaatttaccacatttggctaaaaattgggtaaatcaccataacagtattctatataagtaatttatcttagaccaattatgtagcgacaaatgtacattagtagatttacttccttgtttttttggggccacctttcggccacttgataagtaaaatttctttctatttgggccaaagtaaatcttattgtagaaccggtacgaaatttgactcaaccagctcatgagactcacacatattattcctcgctgaactgacacgtggcattatttcaaagaagtagagatttttaccttgaatgtaaagattttttattttagtttttccagaactctactttatagcaattcaaaattttgcaaaaaatactttccctaaaaaacagaggatctagtattttacttgggttgttacaaaatttcaaagaaaaaccaaaacccattgtaagactttttcatcttttgcttttaactaacaatatatagtacatcaatatatatatatatatatatatatatatatatatattgaactcagctcataagaggggaaaaaagaaagaaagatgtaattcgaatttttgaagatcattggtcgttggattattggaaaaaataaaatgctggataacaaacatatcacaaaagagattattagattcttgaattgatctgatagctaaccacatcaaagttatttttttgaatgaaccacactaagttttaatttgctaacgagttcgacatgatcttacttcgccgtgagacgggaatgacactgcgcgttttatcctcggcatcttcttgtcatccggagcaaccacaacggctaaactttggcagctgtttttcaccgtttcttcagttcgtttagtcgtctcggtactctgattctgcaccacacacggttctttgcttggagttgaatccacaatctgatcttgagccgcgcctgacgagaatatgaagaccgatcaagatgacatgaggaagacacatcaagaacaatgcatagtatatgaaccacccgaatcccgtgtgactctttccgagacagatccactc

SEQ ID NO: 39321 - DNA, 589 bp, Arabidopsis thaliana landsberg
aactatatacattttgtatttgatttgttagtgctatacattttttttagaacaaatacatatttcgtcgaagaccggagactaatatatcaaaccttatataaagtcatcttaatcaactatcaaacagactcaaataacaaaaggaggaattgaggtgtttatatatatatatatatatataaaaatgagcaagttgtttgatacgagagggatacatttaaatcgggggaagtttggtgaaaagagatattgactggatgaaaagctgaagtacatgagatatgagataggtagagaagagaactggaagatagaattatagaaagaaagtatacatatataaaaaaaaaacaagaggggatttagcttttgtatatatgatgagtatgagcaattggtgatgtttcaggaagtcacgtggttttagctagggatcatgggggaaataactaaatcgtaggccgtagcagatatatagattcatatcaaacgaaagatgatttatacgaaacgaaaaaaaactacagtgattcaaactaaataaaaaaaaaatcgagttattattattattaattaaggtatgatt

SEQ ID NO: 39322 - DNA, 571 bp, Arabidopsis thaliana landsberg
  unsure (1)..(571): unsure at all n locations
ccggccgaccccacaagctggtcaacaacgactacagcctgctggacgccagctgtcctggtgttcatcgacatgcccggcaccgggtgttggccgcctgctgtcgcagggcaaggatgaagccgaacgcgccaagagccacaaggaactggccaaggaatactggggcatcgacggcgatgcgcaggcgttttcgcgcttcatcacgcagtttctttcgcagtacggtcgctggaactcgcccaagttcctgttcggcgaaagctacggcaccacgcgttcggcggtgctggccaacgtgctgcagcgccagtacaacgtcgacctcaacggcgtgatgctgctgtcgcaaatcctcaacttctcgctcagcatcgacggcgccgacatgaaccccggcatcgacatgtcctacgtgaccgcgctgcccacctacgccgtcaccgcctggtaccaccacaagctgccgaagtacaccggcggcctggcgccgctgctgaggaagccacccactgggccaccaccgactacgagcaggcgctggccgnncgctcgacgctgagcgacgcga

SEQ ID NO: 39323 - DNA, 642 bp, Arabidopsis thaliana landsberg
ttattctcattgttacatattggttgggctactgttaaacatatgcatgtggaatctgtgggactaacagatatgattagtttagtgatagcaattcgctaaaaacaagaataatcaatgtccatatatgatagattagatccaaaaagtatgatactttatttcttatatgacgggttatcaaacataaccacaaagcttatcgattctcttttttatatagatatataaatacacgatttgttcatatcttactttctccagtatcaattatgttatattctatcgttattagaaggttgacaaattggttgttactttctccgtctcatgaaattaaatatcttaatcttttcacacaacgtttttttttgcaacaccttgtgtaaaaatacgaaatacttttctttatgaaacaactttttaactgtgtggtatttacgaaaacttcaattaatttgttaggtgatagatttttatgactaaacaaacatgttttggtgtcaagttttataatcagtacttaattcgaatattcgagtactagttcggtgagagttggggaccttaggggcagcgtcacttgcaatacatacttattcatatacaggattaacagaaataacggcaaatgttctatta

SEQ ID NO: 39324 - DNA, 460 bp, Arabidopsis thaliana landsberg
ctctataagatactgaagatataactttttgcgttgcagggagtggtatgtcttctggtgttaactttgctattcccattgacacagttgtccgaacagttccgtacctcattgtgtatggaacagcttatagagacagattctgaagtaaaccaaacatcttctttgcattttgtctatcactttgtctattgtttgttgataatacaattcgaaaagtttcagacttgtctctctaaatgtaaatacaaaaagttcaaaaagagtttccaatgtatacatatatcttcacaaaaacatgtgaatcattgaccatacaaagacatggaataaaattttgattttggccatgatgaagagactaaatccatgacaagacctattattggttacaacattgatgaaacttggaaagattctctcatgaagtcttaaaagaagctttactctttcagctgaa

SEQ ID NO: 39325 - DNA, 591 bp, Arabidopsis thaliana landsberg
taagaccagagacatgatgaaacaaagaggggtcaaaaaggaagctggtttcagtttggtacagattaaagacaagattcggatcttggttgcaggaggtggttatgagtttcgtaattctgatgagtataagaaagtatggacagaactacaagaagcaattgaaaaatccggttattcgcctaatacgagtgtggtgcttcatgatgttgatgaagaaaccaaagcaaattgggtttgtggacacagcgagagactcgcgacaacctactccctaatccacacaggtgaaggggttccaattaggattaccaagaatctcagagtatgtgcagactgtcattcatggatgaagattgtgtcacaagtaactaggagagtcatagtcctcagagacacaaaacgattccaccatttcgtcgacggaatctgctcatgtaaagactactggtgactgttgaggtattactcgatttgcacaagtgagtagcagaagaatctaaaaagaggtattattcagtaagaggctgcgagagtacttgtacttgctgcatcgttgttggagagtagaaatctcatagccgaagcgat

SEQ ID NO: 39326 - DNA, 438 bp, Arabidopsis thaliana landsberg
gtgaatgccagcgcccagcggacggtgtccggtagctgcgcgaagctttttttggcggtgccatccagtccttgtgtgacgacttggtagagcgcgaacaggctccgttcacgggcccgcgtgacgtcactgaaggcgaccggtttaggttccagctgccgggccaagggtccgtcgccgtggccatcggcgccgtggcaaccggcacattgctcggcgtacaactgctggccgcgggccagatttggtggctgcttcggcgacagcgcgaccggatagacggcgaggagctgtccggccaagtcgcgcgcgagggtggcaacctgatttgcgtcgacacggtcggcaatggcggtctgcagctgtgcggcgccggcgagcagcgcgtcatgctccgcgccggacggtagcgcatcgatgttgcgaagaatggtggcc

SEQ ID NO: 39327 - DNA, 877 bp, Arabidopsis thaliana landsberg
aaagcaacatccccgttgttcaagaacagatatgcttggagaggaaaacataaactaactatcgcaatggccctataggtatcaaatgggaagaaaaatatataaaggtttttaacctgtctctcattgaaaagcctgctcaagtagaaattcaagacagcacaagtagcagtacagtctaatttattcatcaaatcatgcatcacactaaaacaaagctggcactaggagaaaaagcgagagggaaaaaccatacgtaaaacatggaaaattccatcaactgcacgaatatgggacaagaagttgtttccaagaccctgtccttcatgagctcctctaacaagcccagcaatgtcatgaatttccaagaaagctggaatctgaggcatcaaaacagacagaagtcagcccattcataaagtaattcagatagtagtaatctcttccttaacagcaagtcatgaaataaagttacaaacttacctcactcttaggcttgtaagtttggcaaagccaatcgaacctctcatcggggatattcacacgtgcctcattaggctcaatggtacaaaaggggaaattctcagctggaattgaaagctttgtaagagtgttgaaaagagtagattttccaacatttggtaacccaacctgcgatgccacaaacaattcccatagtgagtaacatcaatacttctccatatcatcatatcaaccatgaacaatcaaccttaatcactgtatcaaagaagcagtttcttaaatatggattaaacatctaaaagagtacagtgacaaacacaacgaaacaaacaatatcatcatgcatcactgatgagttaatagatctctcccgggcaaactcagaagaagaaaa

SEQ ID NO: 39328 - DNA, 603 bp, Arabidopsis thaliana landsberg
caattttcttccatctatagtaaaatattttatccatctaaaatatcttttacgttacttacaggagtacttccttaaagcgaaaagctatagttggaaaatttcaaattttgtaacgtttctttaatataaaataaataatttcaaaattttaactgagagatgagagtagttcaaaagaaggaataatcagtgaaaagtgattcccactaaagagcatttgtaaaagatttaaagtcaaaaaaagaagaagagaaaaagagtaaaaattgaaaatgagaaatcatgaaagttacattggatccgcagggagaagaatatttagaatgcacaagtgatgaaaaattgaagaaataacagaagcgtaaaatttaggcctgttgatgtaaaaaaaaaaacaattaggcctgttgggcccattaggcccataaaataatttacggaatcagtcctagcgaatctttcaagaatttaaaagaaccaactaatctttgaagatcatagactcgaacaaagttccaacttcctcctctaactttcaatatagtgaatgattttgaaacctgccatatgttaaagctaaaccaatggagctaaagcaaa

SEQ ID NO: 39329 - DNA, 518 bp, Arabidopsis thaliana landsberg
cctgtctcttttgtacaattttttcggtgttcttggtcttccgggatccttcatagaacatatacatctgttatagtccagatactatactttaggggaactgaacccataatatttttaggcagatacttgagttttgtgttgtattctttaagttactgaaatccaaataacgcaacatttgcaagggaacattgtatgtgtctctgtgcgacttctgtattggtattggattcttttctggtcttaagaaagttgccgtgatacataactaatgaaaatcgggtaacctgtcgaaagaacatatcaaagataggatgtgtttctaaatagaacagtctcagctaacacaaatcattgcttacatttttgttactttcttatattttcaagttgtgttgaacaaaatgattggctttgtaggttaaaagcccaaactggtgaatttattccttgaagaagaaaggggaaatttgggaaatgaagaagatgatttagtatcataattgatttggtgt

SEQ ID NO: 39330 - DNA, 558 bp, Arabidopsis thaliana landsberg
  unsure (1)..(558): unsure at all n locations
atctctgtctaatcgccaaaccctgatcttaatacttcttctttaaccctttttattgaaaacaaaaaactaaattcttccataacacataaactaggtcccatttgcatgatctgaaaggatcccaagtattgggactcaagaactctcactcaacacatgtggtcttcaatatcaaaacattcagcctacaatatttctgaatgcataatattcaaatataggacaattttcttgggtaatggacaagcaatttatgacagttaagtattgtgttttgattaatcttcatcttctagactgaatatgagtactcaagtcatatccaaaccagattgaatatcttaaatttctcaaaggatgctcacagaattccctaaaaactgcacaatcgatctatatcgatgaaactgtaatgagatctaatatttatcaggtttcatattggctttttacagtctcctcaaaacattctctgtttaggatatcttgactagtaggataagtaaaaataaaataaaaatcatgaacagtatntccaaaattaatcttggtttc

SEQ ID NO: 39331 - DNA, 774 bp, Arabidopsis thaliana landsberg
gtttagttgttatgcaggtgcagagcttcttggtttagttcatgtatacagtcttgttggattatttagagctgtgcctgggttggggaagaagaagaggagaaagtgatctcatgatacttagattaaaactgaaagcgttggtgtcacgcctgttttaaacgagttgcttctaatgctgtggatccaccaaagagacgctatcacgcatcattgagcttgttttaagaagcaaagaggagaaaagtcgacgtgagatgaaatctattgtcctgaagcttcttagggaacagaatggagccaatgtagctgataacttcaatgatacaatctattcctcttgccaaacctgcttggattcggttctgtctctgtttaagcaagcttctgagggagagaaacctgagactgataccaaacagattgctgtagaagcagataacctcacgtggctgcttgatgtgttagcggaaagacaagctgcagaggaattctcagtcacatgggcaaaccaaaaggagctcgctttgttacatgagaagcttcctttaatgtctcgttaccatataagccgtgttacgtctcggctctttatagggattgggagaggagaattgttgccttcaaaggacactcgacttgtgctactaacaacatggttgcaaccgatggtcaatgactataactggcttcaacatggttgcagatcgtttgatggttaactagtggaggaaggaattggatcgacgatactgacactaccattgggagatc

SEQ ID NO: 39332 - DNA, 768 bp, Arabidopsis thaliana landsberg
  unsure (1)..(768): unsure at all n locations
ctatataaagttcaataaatccattctctgcacaacatctgctgtgtacttctgatggattcactctggtttttattttcgctgaccatacagcataactctcttctagcaaagaatgggaaatctgatggtttcactttatgcaaaaactgattcactgtgcattactcatttcgtcgccttgaaacaaaccaagctttatttttcctaagcacccttatctgatgagtggccccaagcaaactttttggatcaatgtacctacagatggcccaaataaaggaaactacttggtcgttcgtgcaatacagcttccttttttcaacactgggacatttgggttttcccgtttgcgatgaacttgatccatgaggcagcttatctgctctttgcctccttgaactctgtaatacaagatatgcaaggttcgtcacttcaaggaagcacttggaagtgccacggatatgaattcttatgcaggtttgcactatatatccaaagtctataaagtagcaactgtgttgattttccatttctagtttctttttgttgtacatattcgaatattcaacataacttctctgaaatagaaatactcaaaagacatcaaacgaaaaacgctagggaaattaaatatgaaaaccatctctaaaagaaaaatatcaacctgagaagtcgttccggacttcaatgcatcctcttgcagcangagaacaggacagtgtttgtctagtagcaattttaaatgtgaagactttgctttttcta

SEQ ID NO: 39333 - DNA, 536 bp, Arabidopsis thaliana landsberg
cccgcctggaaaatctagaattcgattcctggtctctcagttcatggtcaggatatcttatattcctcccagccgccatacagaacttcggtgagaaagggacccaaacaaacccaaaatcctaatttgacgaactcttaaatctgctactagctagctgtgttcaaaatcagaattgcagagactaaaccttgagatttcaaaagttgaattacgcaccgatttaacagctacttgcgatcaaatcgcttacaattgaagcagaacttgtgatcagaaccgcgaaaccctagaaaccgaaagcgagacccgtggatacggaggaagagaggacgaaacgagaagagaactcagaattggaaagtgaaaatacgattgataaggagttcgtaaagttccgattgacgacgggtggatatagattaccgcggagagggaacgaaccatggcggagagagagagagagaataacgtttttcgttcgaagctcaaagctttaggtcttcaaaaccgtgcttttcgcattctcccccctt

SEQ ID NO: 39334 - DNA, 539 bp, Arabidopsis thaliana landsberg
gaagaacatggcgatggatattggcgaatggcgacagcaagataattggttgaattgcgtgtagagttggtggactctcttttttggtttgttgtcagagatttacagaggaagaagctcggctctatttatggatgaaatgaaatggtcatcttatcatttttactgggaaacggtaccgtttttgttataacgaacgacgccgtttcaaacaacttccttattagctagctccctcccggcggcaaacaccagaagatccaccggttttgatctggttgtttgtcgtcgatatggcgaggatctcgtgtgacttgagatttcttctcatcccggcagctttcatgttcatctacatccaggtcaatctatatccgatgatctcgctttttgaagttgaaactgaaattgattccatcgctgcaacctaaatctgtctggaattatcctctcttctcttctctagatgaggcttttccagacgcaatcacagtatgcagatcgcctcagttccgctgtgagtttctacttttaccact

SEQ ID NO: 39335 - DNA, 560 bp, Arabidopsis thaliana landsberg
ttaagtttccaagtcaaagatttaatactatcattaatagttttttctttctccttgtataaaattgttttaaagtgatggaactattttaaaaattattatgctttatcaaaattagacattaatgcacattccttttttttcttgtcaacagaaattaacttttaatcattttcttgcggaagaaaatcagatattataccctaagataatctggtcaaaataaataaatttggtagtgtttggataataccaaaaatagaaaagataatgataatttccaaaaaatgtttaaaataacaaaaataataataaaagagaatcataagttgataacaaaaaagtattacgaaatagttaatacattatgataattccccaagtttaggagaatattgactccttgactcaaacgtctctcttatcttaatctctaaaatctctcttatctctctctctctatatatacacacacataatacccaaacgctctcaatgaggtgtttcttctacactgtgttcttcttcatttgctctctacttcatcaatctctctcttt

SEQ ID NO: 39336 - DNA, 595 bp, Arabidopsis thaliana landsberg
  unsure (1)..(595): unsure at all n locations
aatatattgcaattgcttccactagcaattacaaaaccagaagaccattatattttacagatatgaatcccctgatcccctaaagacccgttcaaaagtacaaaacatcttacccactcccacctctagacaacacaatctttcatgcctttaatcaagcaatccctctttctaaagtacaccgaatttgtatttatattaattaaatagtaatagtttatactagaaaacattaaagtcgcccatttatgcttatgcttaatatgtagacctataacataatagagcataataataaaaatcccaccaagtctcgatttcatacaagttagttagtctgtttttttcctattaaaggaatactactattttgctgaatagtttatgatggagtatgtttttgtagaaacccaagcttttctagttttcaataaacaacaaaacagaaaatatatcataactaagaatcaaaagattgactntaactaaaacatactcaatttatctaaaaatgtcaaaataattccttttatatatgtacacaaaagaacaggattantagggtagaggttattttggtaagaaatatcataat

SEQ ID NO: 39337 - DNA, 638 bp, Arabidopsis thaliana landsberg
aatcaatcctcatttccatctcttctagggaataagagtagtgataatgatagacagagaataagtcacttactctttgacagcggtatccccattgctacgaacagcatcgataatcgggttcacctgatagtaaaatatgaccgagcttaataagagaagtgggaaaatggtcaacgaagaagaagaagaagagtttgaaagttacagtggcgaaaatagaagagaagtcaatgcgagggcgtgacttcaaactatcaacttgggaagaactaagttcagataatctataagacttcatagagcaacaaacgtatcctgtaaaacgcaattggtcaacaaattcgttcatctatctcacaacttgcttaattaaaccaaaaattgaatcttttcattgaatttcaagtcaattagctaagattaactgaaatttgaaaaatccacatcaattctcaggcgataaagaacaaaacagagagtgaaagataagagagtgacctttccgaggagcgtgagttgaaatcgagatacgtggggactagagaagcgaaagacgagacacattgagggacatctagaggcgattcaccggattgctcatatcacgacagtgcacgcacgattgagtttgagtg

SEQ ID NO: 39338 - DNA, 337 bp, Arabidopsis thaliana landsberg
atcgaccgtctcggcccaagcgcgcgatgcacagccgccatacctggacgacgatggtcgcctgtttcatagcgcgctgccggtcgaggaccatgcccgctatctcgcggcgccgccgataacccatgccgccggggccttcgggctgatgctgatggcgaaaggcgcgaccatcctgctgcacgacggcttcgacgcgggcgcgatcctcgatgcgatcgagcgcgacaggccgacccatctctatctgccgcccaccgcgatctacaagctgctcgaacatccgggcgtgcagggccgcgactgctcgtcgctgcgcgccatcatgtacaccgcc

SEQ ID NO: 39339 - DNA, 579 bp, Arabidopsis thaliana landsberg
catgatagacccgctggccgcgcacatcaatgcttcgcaacagggcctttttttcctgcccgcttaacaggctgtcaaaggtatcaaagcccagcgccatggtaagcatgcatgccccgtcgccaaaatcgccaaaaccgctgaggccattggggtcccagctggccacatccttcgcaatggccactccccggtttgcatacctgcggtcccctgtcaaaatataagccttgcacagcagtttcatggcatccatggcatgaaagcccaggtgcttgctgctgtcctgatagtattttgtttgctggtaatcttttccggccatcgccggcaaaggcgtttcccgaggcaagggcagccggagtgccttgtcggcccgccttagaataatagccgcatctctggtatgcccctcggcctgtataaaagcgcttcgttcccgcgccgtgataaatacccgggatgtgtggcggggtatccccgccaggaacttctcaaaggaggcgggaaggctgtatcggcatcccgggcgatctgaaagaaccctgtcgcggaccaaggagcacccttcacgcggga

SEQ ID NO: 39340 - DNA, 649 bp, Arabidopsis thaliana landsberg
tccgtacattgcataagagatttccccgacgtttttcttcgatgtggtgaactctccaaccggaatatcgagccattggtcacttatgtagtcaaacatgtccacactctgttcttgcggtttctcccaagtattcggcaagtctagctttagcttcactagtgtctcccattcgaatgtgtattctaacttcactacgaacaccacctcgtaccttgtcctcggggtcaaatatcgagtgtcaaactttccagctacgtctagccagctagcacttttcaaaaatgcaatttccatcactgattcactggaaagtattgtgcttagtattagacaataaatctagaaaattatcgttataaggtatatattttcgtgataattattttgcttgtcactaaaagagttatacaaatttgagatatttctctcaatttagataagaaatacttttaagagaagttttactttgaattttggtttgcgagagtgagccaggtccaatggttggagtcctctgaccatgcaatggaaagatctcttgcgtcaatcatgaaaacgttaccctttggtctagtaaggtcgacccaaaatttgaactgtcgatatataaatctccatgtcagtttcatgaaatgatacccaataa

SEQ ID NO: 39341 - DNA, 566 bp, Arabidopsis thaliana landsberg
atgaaattttttcactttcaacaaaacattggttttattcataaacatactaaaaatcatcaatttcaaacttactaattaagcgtaaatggattcgctcatactttttgatttatttcaaatgtgaaattcctaacaaaacaagttgggacatacctgcagagagggacgcgacaagaatcgggttgatcacaaatcaaagaatggagtctaaagagttgaagcatccgcttgcaacgaagacaacccttatcgttattcctcctcttgcatacggcaaagtgacgtatcaaaagctgaagaccataacacgtggaaaacgccttacaaggctctgacttttccgcagtcattgacttcttgttgttatctactacgtttgatggcccgaccaatgtacaaccttgtgtgcatatgtgctctatgcactccattgcctcgcttagttgcatgtaaagatcctgctcctttctatgtcgtcgccttcttttcttcctctgcgttaaattataaatcgacacataagtcagaaaatgacccaaatgtttggggctaattaggtatat

SEQ ID NO: 39342 - DNA, 566 bp, Arabidopsis thaliana landsberg
  unsure (1)..(566): unsure at all n locations
aacagttttaggtttcggcggctgtggcggtagcttcttgataacaactgtcaaaacaccttgttgatatttagccgttacagaagccatatcagcatcttctggtaaccggaacttcttaaccaaattctgagcaagtctcctctcgagtctaatatacttagacccttcttcactctcatcatcatctctcttcctcttcccattactctttatcactaaagtcctctcttcctccactgtaacctaatttcccaccaaaacccccaaatcataaattaaattttttaaaaaaaacctaatttcataatcaattcaacatttctatgggattatatcaatacctggatatctgattttgaaattccggggatatcgagataaaatatgtaatctttgggagattccaaaatgtctattgggatattattgctacttcctcttccacgactctcgttattactttcgccggaacgagaaaatcggagaattagcttctcgatcgtctccggtaagccanaaaagtggttaatcgcaacagcactcatcttcttcgatcaatgact

SEQ ID NO: 39343 - DNA, 704 bp, Arabidopsis thaliana landsberg
attcataatattcacaggaaaataaaaatgtattcttgtaacaaatcaaattaaaaaaagggaatataagaatgacttaatgtttatgaagacgaaagagagaaaacatttttgtatttttattgacattttttagcagtcaagatgttagggtgaggaaatgaaaagttaatagaaacatgtatagtaaaagagacattttttcttgattgtagatagtgaatgtgcgagtatactatcaccattagattttaaaaaaaaaaaacattttgcagaattattcataaactaaaatttagaaaataatgtaggagttaggtgaaccgcttatatataataaagacccaattagtaagtagatcaaacacaaatcaaatcagccatacatggatctaatcatgctttttcttctctctgctctcttcatcttccctgttttaatcttaattaagtctcggcttcgtcccaagaacaagaagagtacagcacctatggtccccggagcatggccattgctcggtcatttacatttatttgacaccgtaaacccgactcacgttacgtttggggcaatggctgacgtgtatggaccggtgttcatggcaaagcttggctctatcaaagtcatgatcataaacagcaaagaagtggccaaagagatttacacggtccacgacatgctcctagaacgaccagaaactact

SEQ ID NO: 39344 - DNA, 597 bp, Arabidopsis thaliana landsberg
gtgtcgctataatgtaaatgtataatcattgagttatatgaataaatgtttctatgagtaaagcgtcccttagctttcgagtgcttctagaaacatccctttgacatataaacgctttaatgacttgtttcgtttcatcgggtaaacttttattcataagagtctatatgctcctttcatttaattaagtagatatggtttgtgaagggttgtatcgtaaatttaagcgaacaacagagaaatctttgaaaaagagacacacttatgtcttctcattggtgtatctacttcttgagaaggaagcaagagacaaagtgagtctattagttttggtaaggaagaggaaaagccataagaagcagaggttcttcagagatggcctgacgaagataactttaaagagtgccaatttcataaaaggggtcatatggcacacagggtgaagtcaggcaaaaagaaaaaaggaaataaaagaaaggcaaggtaaatttttacaaatatataaataagttttcagttaatttaacattcctccccattatgatttgaataagttcttctagaaaaaaatgtgataacatatctagtatatggaga

SEQ ID NO: 39345 - DNA, 116 bp, Arabidopsis thaliana landsberg
tgagtgtgtaaattcgggtttcgtcgataggagatgaaaagtcgaaatttcggtgcgagaattcataattgatggaagatcggcggcgaatttgagaggatagtgagaagaagaag

SEQ ID NO: 39346 - DNA, 478 bp, Arabidopsis thaliana landsberg
aatggctgtgtggcgtagaaagcgctaacaaaaggtattgatccattcggatcagggtattcaattcaccagtgaggactggatgctgggtgggaaagcttcataaccttgagtgcagtatgagtcgcagaggtaattgccatgacaatgctgtggctgaaagcttctttcaactactgaagcgggagaggattaaacgcaaaatatacaacgaccgggatgaagcgaaacgggatatcttcgattacaccgagttcttttacaactcaaaacgaagacacaattccaataatttgctatctccgatagactttgaaaagcagttcaatcaatcggctgaacagtgtctacaaaattagtggcgattcacttctgaaaattgctgatgcgcttggcgtaaaggtttccacattgttagataaagttgaatgctatccatagtttgagtgaaatttacttatggcaaaccaaacaagcg

SEQ ID NO: 39347 - DNA, 2410 bp, Arabidopsis thaliana landsberg
acccgagaatccgcatgtcatggcgaccaggtccacatttggaactgcttgcctttgggacttgagaagcatgggagccaaaacaccgaaaacattgtctactgttaatcatcctagggctgtgcactctgcttatttctcaccttctggcctttcacttgcaactacaaggtatcttgtcattttttccacagcctattcaatacacttcattaagaactacaagtataatctccttgatttaagtcacatcaaatgttgtttgtcattattgtggagagattaagtaatatatgttctagttttgttgaggtcataaagtctgtgcatttcggtttaaaagttgcacatatttgaaaaaacaccactgccttgaagcaattatgtctgggaactttacttagctagaaaactttgtgccttgatggttttgagacgggaaataaatacatctcataaacttttagcaacgtagacaagagtaaacatgtgtagagagagtgaaactgatgtataatgtaggtccctatgtgcatctctggggtttgctgaactcttgttttgttttgttttccttgtagccttgacaactacattggtgttctaagcggcgctaattttgagaacacttgcatgatatatcacaataataacaccaacagatggatctccaaattcaagtatgttccagtatcttgtaccttaataagcctctcagttccaatacacttcttgcttaatgtactgtgttctgacaaaagaatccacaagtaattgttatgagtctttcactatttctctgaccaatacactctttttccactcttttttgttatgagaaatgaaaagaagtaggaattgatttcgtctatttgtcgaaaaactgaagttggtaatgattttgattgcagggcagtatgggggtgggatgattcatacatctatgtgggcaatttgtcaaagaagattgatgtgatcaatccaaaactaaagcgaacagtgatggaactgcataaccctctgcagagagctataccatgcagaatccattgccatccttataatgttggaacgcttgcaggatccacagctggaggacaagtctatgtttggacaacaaagtagcatacttgacctatttgaattagcatgagatgttgtgttgttttgttatgttgtacaaagaaatggaagcaagtttaaaaaaaaaaaaactgtagctcttatagcttgcaaatccttgtaatctatattaattataaaggtgattcaacaaacaaaagtaaaatgagagaactgcatcaactagtgtatcagttccaaaagaataataacccacagaagggttacattcttcgtcatctaccacctaagtttcccttctaatcatctcagtgaggtccatcacctggtttctgtacattgcccttgtgttctttttctggctgtgatacttcttttggggagagtttagtagattgatcttcttgggttttggttggagcattccctgaaggtttcttggtttccaaaacaatttcttttattgtctcttcgatttttcccagtctctgtctcatctccattagctcttcgtgagacttggttgctgcctctacttgtaatgccttttgttcagcttcttctttctctttcttttcttcttctttccttttcttctctccaagttcctgagaattagtccaatatcatgaggcatatgctaacaataaccagaatgaagacagaggataaacattaagacatgactgaaacatcatcagaaactcatatcagtttgataatgaacaataaggagaactcacagcatccatgatcttcattttccggcgagcatattgagcaaccagatacacagctgttacaagaaacaatagccatttataaacaagtcacatttgacagaaaacattgaacataacaactaagataacgggagtgaatggcaatacctacagatggcaagcagacgatgatgaattgcaccacatgccaatcaaacctaacacaaagcaaaatccatatgagaacatactacaaacacaaagcagcacaagaactcaacttactatataagagatagtttcagaaagtcaaagagataatcgcagcagaaattgaaaaccagttcacttgtttcagcctaaagaagctcacattccacaattctacaatcctgaggttttgtagcctaaaattaacttcaaaatatacaaggtaagttgaaaaaatagggtctttccatgatttaaggcctatagaagcatgaattaaacacattatagcatctgatagactaaacaaaggacaagatcagcgaagagtgtttgcacgcattcgagagtagaaccctctttaaaccccaaatctccggtagacattacccaaa

SEQ ID NO: 39348 - DNA, 648 bp, Arabidopsis thaliana landsberg
atccatggtaataaataatcctttttgacttttaaaaaataagattaagctcttttgttgacttctgattctcctctgtttcaattcctcagggtcgatacagatactcctctcttccatcaacacagtggtgtaagtgtgttctttataactctgtattatgtttctgtgatttcgattccaattttggttctttttgttgaatgcagaacaagagtgttgatgatacttatggaattgccagcatgtctttactttttaggttatatcttcaaagtcttgattttttaacttttttctgctaaagaacttgaaagttgttgaatttgaattttgttatagacaatggattgatgaaagagatgaatgatcttggtcttccggtttcctttcgaacaaacaagcaggtaccttttcttatcaacattcatgggttttagttagtttattacattctctgagaattcaacaacttgtgtagtggaagaacacaactagaggctatcaaaagaaaggattcaaggatcgattacacgaagaggttaatgttattctcaaagaagaagacactctgaatttggtgtctgctttgaatgaggaggttgagagtccgtgttttgaggaagattgtgtacaagtaattgaagt

SEQ ID NO: 39349 - DNA, 589 bp, Arabidopsis thaliana landsberg
ttctatcatcctcctttttttatcctttttaggtttctgattcttaattcttttcacatgttcatagattagtggtgaatcgcgacgccaaattcaccaacttcgttgaggtttgctgttttcattttgtaaaatttatcattcttgaatcagattttgtataatttgattgattttaaaaagcattggcttgttgaaattgtcttaggtttgaacctgatttaggttttgtataacaagattagggctgttggagatagattattcgagatgtagtagaagtgtgattgagaaacaataatatggaatgcgttttatgtgagtgggtgtcattgtgaatgttaatgtatgaatgatgaaactgttttgcaactattttcagtttagaacacacaaggtgatatacaggcgttatgctggattgcttttctctgtgtgcgtggatataacctacaatgagttggcttacttggagagtatccatttcgtcgtggagacattggaccatttctttctgcatgtatgtgagcttagatttggtggataatttcctctcggtacttaacctctttacttatctcttatcttt

SEQ ID NO: 39350 - DNA, 722 bp, Arabidopsis thaliana landsberg
  unsure (1)..(722): unsure at all n locations
aaggaacactcatgcttataaacattgttccatctagagcaatgattatttatcaggtaggtccaacttacaagagtaccagggatgatatctgtcctatctcgtttggaattgaaccacttatattattccacatgaaatctcttcatagatgccacacgaaagaaatattagacagtcagtagtgtaaccaaaatatagggcgttccaaaataaacactttgcaaagctttacatgttgaaacttacaatatttcgagatgagctaatttttggagctctggtgacaaagtcccggagagattcatattcatcagcaggctgcttggcaataaaaggaaggatcagggaaggaatatctggtcatgtaagcaactgttccgagaaaagagaaaaaaaagacaactgaaccagcttctcccaaaagtaaagccttttagttaactccagcatatatacaagcagactaacagcgaaagcaagaaggtacataagaagaaaaaaaagaagcaaattcatacagttctcggacatgcaggtagtcgtcagtaccaatctcattaaagcagataactccagtccaatttgatctacaagggtcacctctattccagtttctcaaataatctttagggtcaagtagacttcttttaacagatcngtaagcagtgacttctgaagggtggttttttgagcatgggcaagcagaaggacgcaacaac

SEQ ID NO: 39351 - DNA, 801 bp, Arabidopsis thaliana landsberg
tagtacattacttttaagtttctttaataaatggagctttcttatattggatttttctttttggaacccggtaagggtataaagaatacgaaaaggaccgaaaatgactcatacatagagtgcaaagagctggcatgtagctgacgatgaaccctttaatgcataagtgggtcaagtcataaatcaattattccaacattagtggaaataacatggcatggtacggtgatacgtatcctatgattatatgatccaatcatttcaaatctcaagaggtatattagttaagtaacatggtttaagatgttaaatgtgtcttttggttttgtgagagcacgttttcatttgattattaaaaacagcacaaaggtaataatttctactgtgaagagcttccttcattccctctgctcaattcaacatctcaagaaaacccgacgataactttagactaaagtagctcatgtatgcttcaaactgaatccaacaatgccacaaacaaagcagatacaacaaatgcagagtttcgatatattcacattcacatcttcttgttccatgatttaaaccctatcaaacaagagcttatggatccaattaagctctgtttctctgcaccacaatacaaatctttaagcttgagctgcaatcaattaagcttctgctcaatgtaacactctctctctgattgtactaagctatcttcatcatcatcatagtatctcacatttccttcatagaattgtctcaattcatcacccattctcaatcctctcataaccatctcattcacaacaatca

SEQ ID NO: 39352 - DNA, 681 bp, Arabidopsis thaliana landsberg
aaaaaaaagcaattataccctttttttaaaaaagaaaaaaaaaaaaaggaagaagacccagattgagattgaaccatgcagagacgaccagctgttaaagatccaagcttttcaggggaaaaaaaagaagctaaaacccagaaacccctctttcagatatgttacggagaaaccaagattcaaaatcgaaaattagtagagtcacaatccaaatagagctgaagaagaggggaaaaagaagaagcttgaagctgctgcaacaggtttgattttgatttaagcaggtcaagaattatgtatgatttcaccttttccttttaatttcctttagctcataggtgagagtgagcagagaagaaaagagttgtctcgggcttttcaaatggtttcggagggtaatcaaacaaaaaaaaaaaaaaaaaacagagtaaaaagtctaaaaactgcgttgaaaaatgtaaaagcgaaagatcgtctttttagagtttttatttttattttcctcttacatctgatttattggatatttttgacaagaattgatacattaaaagtaccttttttttttacgtacattcttagagagtaaatacataaccgatcattaaaaaaaagagatgaggaagtgaatttcccacatgttttaaaccttcagaatttatatttatggggtttgcaaat

SEQ ID NO: 39353 - DNA, 1155 bp, Arabidopsis thaliana landsberg
gctctcaagcggtcagatacaaggagtaggtaacgattagttggtggacagacattgtttactttggtcaaatatgcagtcctttaaatatgtttcgttcaacgctaaatccacgtcataccagtaccttttcgccacgtcagtgatataacgattgtatctctttgcacgtcgccacgtcagtgtgctggtcatcacgcatcgtcaaccaaacgacagcgtataagggagtacaaaatgtttttttttttttttttgtaatattttcttgtacatttatttgcttagtcatgcaatagcaaacagatttagcattttagttttacgtagaagcaaaagttgaaattatgaaaaagcctttttgtatatattaatatctcagtgatacaaatgataatcgataatgtaacaacgatgattataaggaagaaaaataattaaaacagggagtgtgggaggattacaaagaaacacacatcaacttaccattaacatacatcaaaaagactgttggctgaccaccattgttgtctattgtctcgtgctctcaagtcacaagaagatgaagccggacttgtccaataacttaaattttacactccattcatcagaaagctgcccaacctgatgcagctcctgttgacttgctcgatcctgatcccgccgttgaaggaagatttttctgccgagtattaccaaatcaaggataatttagagtaaccttagagaataagaataaatgtaattaagaagacaaggtttatttaccttgagctgagatagatcagatagaggctcgttcctgcgtgattccttgcagccatcagatgcaatccttgaagcgacgggatcgtttggaggaggaggtaaaggagacctggttactccggcagctttggggggtggggcaagtgctagaggttttggcttccccgttcctgaaagagcagctgagagcatcccagtgccatttgttgttggtttcggcttcacgttgattcttatggtttcaccttccttaaaacccatcaaaacaacaatcttttcaggttctaccaagtccaaatgccaagaattttccttttccggataaatgatggagttcaatcagaattgaaatattgattctacagttacggttcccagagaaagggt

SEQ ID NO: 39354 - DNA, 669 bp, Arabidopsis thaliana landsberg
ttttagtatccgtgacacatttgtatacaacaacttttacagctttaaacagggggttacaaaccatgggaatctaagatgaacaaaaagaagcagctgagtcattaaaagggaagatgattacctcattcccatttagtgtcatgaaatagaaatgtttctgacccttgaaagcatattctttttggcgagtctcataggattgcatatcaagcacctgttataaataaacacaagttatacgcatgtattaataaaacacacagataaggaaaaaaatagaggctgaaaaagccaatctacagttgatcacatccaccaagagttgaaagatcatttcaaacacacctctccaacatattcaattaggaattgcccctctcgtacatcctcgagcaatctcaggccataacccttcttaccggattggaatctctcaaacttaacatacttccgtttttgaaactgcagaaatatgagccaaaagattgagaatgatataactgactgtgaatgtaaccctttcgcttgcaaacaagacattatacctgctgatttgaacacaaatcgccagctggacaggtaccttgaagacattcaatgttaagcattctattgaggcattcttctgccacaacccaacctaccatcaggtgatggtttgcagtt

SEQ ID NO: 39355 - DNA, 629 bp, Arabidopsis thaliana landsberg
cttacccatcacatcttcgagatcaactaacaaaacgagtaaacaatctaacctcttcttcaggatccatcttcgatatgcgcaggacagactaacctgaaatattttcagattcccaattaattccaagtgcccaaagtatgaatttctcgcgataatgagaaagattcagtgtctttcaaggtgagactccacaactactaagaacatgaaagattcagattccatagtaagagcaaatttcatagcgcattaagaaaaataattctcgggaaaatgagattgattcatcagagtctttcagtatcaaactgagactccacataacaaactaacatgaaaagattcacattccaaaatcccaattaagatcgcgcctaaaaacaattctcgggaaaattaaacaagaacaaacgagcgataatgaggaaagattcagagtctttcaaactggagattccctaatcaagtaaaagaagaccatgaaagaatccgattccaaactatgagaaaaatcagagcgtcgaacaaaatttcccgagaaagattttcccggaaaataatcaataaacgaacaatcaagcgattatgagggaaaaagattcaagagtattttacactgaaactct

SEQ ID NO: 39356 - DNA, 874 bp, Arabidopsis thaliana landsberg
agccctcgaaaattccatctatgctaactaaagataaagtttttcatgttataataatatccgacaaactttaggagtaaaactaattctacacgaccttttagatgtgcacttttgaacttaacttatatcaaacaaaataaacttgaaatatacctcaggttgtatattttcaatgagcttctttcccgaactttcattgctacctagaacaggctgaacaatatccctgttcgttttggccactagggtcactggctttgaagtcatttctgtctttggcttttgtattttcttatctaaacctgatgttttgagtaattcttgtgcagtgctttgcattgctccagtggctttctcaatgatttcctgctcaaaattcaaaaagttaagtatttgtgaagcatttaaaattaacctggcaaaaatgcagcaaagaagcatatgaaaatattactttctcgagcaaagatttgatatcggcatattgcttcttaagttcctggctctcaggctccaatcttaaggcaaactcagcatctgcgaataattttaatcaccttacatatgcagcaacatgtaataaagaaattgtatgtatcttaacagaacagaatgaatgattatatgggtgcgagggataccttctttggcttctttaatcatgccgagttcttttcttgctgttgctcggcgtgagtaagcttttatatatcgatcatccagatttaaagcttctgtgcagtcaacctcagcctctcgatatctaatgtaagaatcattttacaaagtcagaaaatatagcttaaaaaggatcagtaatggaagacagtggacacacacagagtcacaggataatgaataaaccaatgaa

SEQ ID NO: 39357 - DNA, 2210 bp, Arabidopsis thaliana landsberg
gtttaatatgcatattgttgataaaactctcagcttctctaagtcttcctgtcctccctaaagcatcgaccatgcagacataatgtcggttctctggttcgataccatagtcttttaccatcgagttgagatggaaatagctttcttcgaccaaaccaccatgactacaagcagacaagactcccacaaaagtcactttatcaggcttgaatcctttttccttcataagattgtacacttgtaacgcttcattggcctttccatgttgagcataacttgcaatcagcgctgtccacgctattaaatctgggccattgatctggctgaatgctttacagcagtcgtcaatgcttccaaatttcgaatacattgtcagtagtgagcttcctacagaaggctctgtgcacaatccaatttttgtgatgtaggcgtgaacttgagctcccagcgatgattcgtcagagagagcagcggctttaagaatggatgaaattgcaaaggagtccatagtaaaaccagacatgaccatatcacgaaatagaaggaagccatcctggattaacccgtgttgtgaatatcccgaaattaaagatgaacatgacactggatccagttcagggagcctatcgtagacctgtctagccaactttagtgagccacactttgaatacatgtttactagtgcagaaccaagatccattcccttgtcaattcccgctcttagcgtatacccatgtatttctttacctcttggcagagaaggatgagaagaacacacagttagaacagcagctagagtactctcatcagggctagtcccatcatccagcatctcgctgaatagtccaatagcttctcttagataaccgtactcattgaaaccagaaatcatggaagcccagcaagcattgtctttaaaaggtatcccctggaataatttatatgattcttccaaactaccacatttagagtacaatgtaaaaagagaacttccaacagtgagatcaagaaccaacccacttttaagggtgtaaccgtgaacctgcttacctaaattcaaacaatccaatacacttaacaaactgcatacactaaactcatcggttctcaaaccctcctgaagcattctagtaaacagtcttattgctttaccaggcttcttactttgcgaaaacgaagtgatcatcacattaactatattttgtctctgaatatcgtccagatcctcaaaaacctgttcagaaagatcaatatctccactctttgagtacatactaatcaaagcggcagccactgaggaatcaagatagaaaccactcttaaagacccaagcatggacctggcttgcttcacagaccatagaaggtctaccacaagcagagattacactagttacggtacagttgttgatctcaacacctgagtgtctcatttccttgaaaatttcaagagcagagaaagcatcattactctttgtgtaaccagacagcattactgtccaagatacaacactagggttagggatacgggagaatacttccatagcttcagccatatgcccacatttggcgtataagtcaacaattgcagtacaaacaaatacatcttctgctccgcatttgatcacccgagcttgaaccacttttccaaacctaagcttctcaagggaagcacaagcagccaaaacactggaatatgtataactatcaggtttctgaaacccaacacacatttcatggaaaagatcaaaaacagcaccataattttggtttctaagtgcccctgctatgatagtgttccaacaatacacattagcagataaagagtcacggaacactttataagcatcctcaaatcttagattcttagagaatacgtctatcaaagccgattcaacaacttcatagaagaaataacccatctttatagtatgacaacacaccagctcactaaacagaggagcttgtaaagcactacaagccgaaatcacagacccataacttatctcattagcctcaaaacccaagaaatgcatcttagaaaaaaatctcaacgattcttcaaacaaccgatgttgtttataaccagagatcataatgttacaagaaacaacatctggttgaggaattgtatcgaacaacttagctgcatcagccatgaaaaacgagtttgagtaccagctaagcaatgattagtaaggaaaacagcga

SEQ ID NO: 39358 - DNA, 641 bp, Arabidopsis thaliana landsberg
gataaacaaataaagaaaaactttattttttaataataaacactttccgaagaaagaaaaaccaattgtcgttttaaacgaaaaagaaagaaaggagaaaaactatcctctggtctcagatacactcgtacttcgtacacacacatttatagaaagatacagacaaaagattgagatgattcttgatataatacgcaaagtgaaagaaaaaaacaaactaaaagcgaaaaaaaaaagaaactccactgttgttggaagatgaaaaagaaccaaagattcttaaatattttctaggaccacagattctattatagtgacttacctccccaaaaaataaaagataaactaaagtgtaatgttttgtgctcagattcagtaagcgatgactgtgttgtcgtgagtgttgagactaagctctacgtgtattttctttattttgttacatgaattccttttcaaaaagatgatcctctctagctacttggacttcgaaatgtctgtgttcttggcctcggatctactttggttaacaattttggcattaccaaagattggtacaattttgttacattgaaccagaacgttagatatatacctcttcatgaatgacaacaaaatataatgaagaacttaaagatgtt

SEQ ID NO: 39359 - DNA, 768 bp, Arabidopsis thaliana landsberg
gtgaagtaaaagacccaaaacatcacttcagaaattcctcttctccatattctaaagtcctacgacgggtgcaggtacgaaatagagaatgaaagagatctttttctacctgaaaggttttacgtcatgtattttgttgcacatctcctcgaccactttcatcgcttcatctacatgacctccgattaacagaatctagaagggaattaacagaagataaggaaaaaacaaacatctaattagtgtgagacattaaagctttaagggaggaacatgatgacattatgagccacgaaggcaaaaatagtaatctcaggttttacctgtacaagtggatgtaatgcagccaaagatacatggggcggggactgaagagtttgccgcatatatttcactgcttccttataataagaatcattgacaatctttctgtagcaatccggatcttctggtggtttaaagggaagcaaccatggatccatgtcacctaacattgaaagaagaggaagccatagattcaacagagctggttcgggattatatcacaatgcaagataaagaaattctcagtactaaccaagaatattaataacagtgggatcaaattcaacaattccatctcccaaagaggcttcgttttcttcagagatcgcatagagttgtggtggaggtgtaacatagggagtactcatcacttttaccttcgtatccatccttgtctccgagtcactgatagacaaatgggaaacttttttatttttcatgacg

SEQ ID NO: 39360 - DNA, 669 bp, Arabidopsis thaliana landsberg
gaaaaaaaaggcgtagttcctcccactgtcagccttggaatctgaggagatcgcgacatagctctacatgggcgacgtaagtgccctgctccacaattttgccctaaaaaactatcctttcatctgatcaattagttaaaattcatcagctacatttctcgacctctccatgagtgcaagtttgcatcttatgaagaaaaggttggagcattcaaggctgcagagaagttccagaggagccttaaatctccacatccttactttgtgaaatctatggttcgctcccatgtttacagttgcttttggctggtacgttcgttcacaacacttgtgtgtgtttcttcttcaaggatttcgtgttagtaccttacttgacctacatgggtttgcttgcaaatttcaaggggcttccttcaagattctgtgcagacaattttcctgaggaaactatggaaatagaactagaggatgaagaaggcgaagtgtatgaagcagtgtacattggtagaagagctggactcagtggtggttggaaaaggtttgctcttgatcataaattggatgatggtgatgctctactctttgaattggttgaaccaaagaagttcaaagtatgtatgtgtcttgaacaagagtcatgtggttggaggtagttgacattaacacctt

SEQ ID NO: 39361 - DNA, 422 bp, Arabidopsis thaliana landsberg
cattggtacccaaaaaatggtagcaatcgatacccaaggatttcattttcgagtgacctcgaacaattgctttgtagccgtgttaaaatataatgataacaaaaagtgacacgaaaacaaaatataaattagttttaaaatccgagggaaacaaaagaaaggagaaaatagctctctgtctctctctctctctctctgtctctgtctctctctctctctctctattctatgtacattcgcagcgctaaaaatggaagaggcccaagtgagagaaagatggggaaaggcgaggagatatacgggagagagaataccattcctatatttagagtacagacacaaaagcttcaattgttggggacaaacggaatatgttttctgaagaaaggattggggggaggaagaatgaaaagcgtcaggat

SEQ ID NO: 39362 - DNA, 945 bp, Arabidopsis thaliana landsberg
acacaaccaggatgaacaaataatacatgagatattcgggatttttaagagtaaatccatacacaataatgtcttcatgaaaaaaagttaagattcatatagatcgaaggatcatgtacatgcttagcgcaggaaaaatatacaaaaagtctatatttcgaattgatggaggatagtcaaatagaacatgatttttgatttattgtcttctcacattcacattgtaaatcccaatctatactcctaatatgaaaacatactcactaaaacattttccataaaacagttcaatttttaattagacgactatcattctgatttgtttcttatcactaaaatcacaacaatatcattaaaactcaacacagattttatttttgagaaagacttaaaacatggcatatttctgttttatggcaatggaaggtaagataaatactgtgacaactatttaaacttagaatatgaccttaatattagtggataattagtggcaaattctgtcacatatagccactaataacttaaacaatcttttgacaagacgttgaatctatccatgcaatttatggtaacataaggtcacaaaattactgtgcgaacattataaaaccctaatatattttagtggatagtaagtggcaaattctgttgttgctatcattcgcgaaagcgatttctatatctgaatacattttctgggccataaagagttgtcgtttagccaaatatactcatccaaaaaaaatatcattgtcaccaatgatttagttgcgtatataaagtatttggtacttttctgtatgaataaaatttcaaattacataatatgcaaaaaacaaaactaataagtttttaactatatgtatcatatatataaaataacaataaatcatcgtattatggctgagtatagatcggtatctgatcgtcttcgagacccca

SEQ ID NO: 39363 - DNA, 1929 bp, Arabidopsis thaliana landsberg
attgggcctttactcgtaatattgggccataatgatcacgtgacttagttttgttttgtttttgttcatgtaattttaagtagtgggcttcaacttgttttgagcccatagcacatgatttccctttattgtttattggtctacttttttttttttttttttttgtgtgaacattggtctacttttaaaatcattaaactatgtaaattagaatctaaaataaattcctccattgactcccaagtcttcatcattagaacaagaatattcttgtatttattataatacttattataaacaatttccttttctggtgagaaaaaacaaaatcaaaataaaaaatttccttttcttagcgacacacatttacttaacccacaagtcgtcaacggcccaaagaatatggatggttacgagagagcgcatacaaagacgcgctcctaaccgacccaattagagaaaacacacgcttgcttacacgcgtaataaggttcttacacgtgccaaaaatccttgttatataaagaaacctaggtcacgtcaatttctcatcaccattgctttgttttgttcgtcaaatataatcaattttaaatttcttctcttctcttcaaacgaatcgcctttttcgataatctctttgcatcgatttcatcatggctactcaaacggatctcgctcagcccaagcttgatatggtaaattacgtaaatctctctcaatttcttatcgtttttcgtctcaaatcttgattttacgtttctgtgattgtaattttggaggatttttggttcaattttgttcacatgtctctacctatcgcattcatggatctgtagttcaattctttcagatcgtattcgaagtgcatgttaatgttttgtttatgtagaagattagattaatgaattgaaaacaaataatattttgtgggctaattaatttgcatgttataattattgaattgtcagaccaaggaggagaaagagaggttgaagtatttgcaattcgtgcaagctgctgctgtggaagctatgcttcgctttgctcttatttacgctaaggcaaaggacaagtctggtccttttgaaaacttggtgttgaatctgttgaaggagctgtcaagactgtcgttggtcctgtctacgagaaataccacgacgtccctgtcgaggtccttaaatacatggaccagaaggtacaattttgactctttccctatctttggatcttgctgaaagtgcctttgttgatgaacaatgaatgaatctgtgttgttgattgtatatctacttcatcgaacatatgtgattaaaaaagtacagttaaagttgtgatgatttcatatcatctctttggtagaaggttcaggtaaacgggtcaatgtcattatgttctgtagagtccctctttttgaagctgacaagtttgttttgcgttgttgcaggttgatatgtctgtgactgagcttgaccgtcgtgtcccaccagtcgtcaagcaagtgtctgcccaagccatctccgctgctcagatagcacccattgtggcacgtgcgttggcctctgaggttcgacgtgctggtgttgttgaaaccgcttctggaatggctaaatccgtctactccaagtacgagcctgctgctaaggagttgtatgcaaactatgagccaaaagcagagcagtgtgccgtttcagcttggaagaagcttaaccagcttcctctattcccaaggctggctcaagttgctgtaccaacagctgctttctgctctgagaagtacaatgatactgtggttaaggctgcagagaaagggtacagagtcacatcgtacatgccattggttccaacagagaggatctcaaaaatcttcgctgaggagaaagctgagaccgagcctttggagttccatccacttgattgatatgggtg

SEQ ID NO: 39364 - DNA, 537 bp, Arabidopsis thaliana landsberg
cccacacgctggctgccgacctgggggcgatgcccgggttcgctccggtgtccgcccgggtcttcttcatgttcccccacaccgagcacgtggaggtgctcacgctcctcgagcggacgtaacaaccgcggaacaccggcgacacgagcctccgcgacgctggtgccgtgccggcactcacccctggtcgtgacgaccccacgacgtggcgcgaccacgtcgtggtctgcggcctgcacgacgagggaatgcgcgtggtcgagcagctgcacgctgccggggtcgccgtcgtggtggtcgacgacgtccctgaccaacgtctggtcggggacctggaagcgctcggtgtcccggtggtcgccgccgactcacgccgcacggccacgctgcaggcggcgggtctcgcgcgggccactgcgctcgtgtgcgcggagagcgacgacctgcacaccctcgccaccgcgctcgcggccaaggaggtcggcgcgggccggatcgtggtccagctgcgcaaccccgcagtcgggcgtgcgctgg

SEQ ID NO: 39365 - DNA, 346 bp, Arabidopsis thaliana landsberg
gggcgccgagattcgcagccaccacagcctggagagtagaaacctgtatcaacttttttatctccagcggttaacaaagagtgaacactatgattagcagattgaatctctaacatgttgtgatccggtgacttctcccaccatctcattcctctactcataccaatcgatgatgtctttgcctgaaactaaccattttcaaacacaagtcaattagggaatctataaagtcaccaaagatttggattaaagaaactaaacacagatgttcgttccttgattgtgcttacaggagactcggaggaagaagagaaagcggattaggtttggttggtgaaatctgctg

SEQ ID NO: 39366 - DNA, 565 bp, Arabidopsis thaliana landsberg
attgctgtctctcaatccaagcctccctcccaaagtccagattaccctttatctgtctcaaatttcagtacatgaatacacaaaatcaagagtggtaagaaaataaaagatgcaaacaaatgcaaacgtaccgctcctcctttccaagttacgaattgtggctccgttcttgatggcagaacctgcactgtatcaatggcttcagttggaggtatcgcgtgaagaactctgaaacgcaaaggagagagggacataaacattagttgaacaaaatactctgtttagttggatgtgccttctggatgttagaaaacgaaatgtttggtaaaggaaacgagcaaacctttcttccactgccgctacaagacctttcgtcaaaccagcaccaccaatctgagaagccaaaagagagagagagttccaaggtaacacattcatgtatgaagagttacatggtagcacatgatttaaggaagtacatggcgaaaacttgagtgtgtaaaaaaaaaggttttcaggatctaccaattgaatgctggagaaaagcttccgtctaaggtctatg

SEQ ID NO: 39367 - DNA, 477 bp, Arabidopsis thaliana landsberg
aagaataatccccaccttcgaaatggagaatgcaccgtttggcattcaactggagatatatgattttgaagcgctgaccgatgatacgagtaagcttaccatgcacgtgatatatgaatcggtggacaaacgcgaccaactgatgcaactgccgtttaaacaaggccttaacatggcccataaccgtttacaggatgtgatgggtaagctgaaataatatgactaaccgataagcaattataacatgatacaggaatcaaaggcaaaaaaaataacttattgggtgttcacgctctggcttgcgctgggaatgatctcaaccggggtggttcagttaatgaaagctaaaaccggcgccggcggcgcggatagtgtagcccgcctgggttaccccctgtatattttaaccattattggcgtttggaagatattaggagtaatagctgtgcttacacctaagtttactttgctgaaaga

SEQ ID NO: 39368 - DNA, 717 bp, Arabidopsis thaliana landsberg
ttttatgatttatatattcttctaaatgaaatttgggttgaagtactcgttagtacaaggtgttaaacatatatcttttctctctttttaattatattattaaatctattttttccatcatgatctgaaataatttgtaacacaatttaaaagtttacttaacagtcaattgtctcccctacaacaccatcagctagtatagtagtatacaatatatttgttcgagggtggacaagaacaaatacaagtacgtacccacttgtaacttagatgatatatacattttggcttcaagctagtgttttctcttttaaacattggactggtgatattggtcatttgattgattggaatcgagattttttaaaattgtggtgagaaagtctcggaattttgcccacgtgtaaaatattgaactaacaattgtaactaaccctatcccaaaatgtcggaccagtttggaccgatcgaccagtcgaaaagtctatatcatagttaaaactgtgaatcaaatctaggccccattacaattattggaagcaactcgaccatgttctgttcaagcatttaatgtataaatcctatcacgtgttcatctgtgactctttcgccagatttctgaaaaacacactttttgcaatggacccaatgattttgtcatcgctcatctggcatactgacatactatgtttttgacaaaaaacataagttgcatag

SEQ ID NO: 39369 - DNA, 602 bp, Arabidopsis thaliana landsberg
tttcccttgcattttataatgctttttgcctttttttcccttatattagcattgcattgtcataaattcctatgtgatatgtgacaactgatgattgattttcttgttctttaattgtttatagtatatatatagagctagggagctaatttatgtatatatgtatagacatggcttctctataagcttaattgtacatgtgaaggacagaaagagaagtgtattaattgtattggactattctttctttgtcatttgataaagtggccactcttatgctatctactcattaatgtccatacacactgactcctaaacttacgtatgatgatctttgcatttacatgtatagtaatcctgcatgcgttaaactagttaaacaagagtaaaaaagttgtgtctgctagacaatgactcaaatgataacattttaaccaaaacatttgctcaccttcataagaagttgaatgtttcgataaagcttatataggttaaatcttaaaaagttagaaactagacttaattacaagtgtttcttgaatcgattagtggtatatatacataacattcatatgatttccatataatttaaaaagaggaaa

SEQ ID NO: 39370 - DNA, 736 bp, Arabidopsis thaliana landsberg
ggatcccctggttatggcgctggctatggaaatggtagtaatggtgccgggtatggtgcctatggaggttacactggttctgctggaggttatggcgctggtgctactgctggatatggagcaacgaacattccaggtgctggctatggaagtagtactggagttgctccgagaaactcatgggacactccagcttctagtggttatgggaacccaggctatgggagtggtgctgctcatagtggatatggagttcctggtgcagctcctcctacgcagtcaccatctggctatagtaaccaaggctacggttatggagggtacagtggaagtgattctggttatggaaatcaagctgcatatggtgtggttggagggcgtcctagtggtggcggttcaaacaaccctggtagtggtggctacatgggaggtggttatggtgatggatcttggcgatctgacccgtcacaaggttatggtggtgggtacaatgatggtcagggtcgacaaggccagtagtgactgtgtaaggggattatgaccgccctggtttctggatccttgtcaagaagaatttagctcaaatcaaaggttccacaacttcctaacgggttggactgcttgaatctctttataagcatgtgctatctattacaataagtcacttctattaagttattttcggttgagtgtacttttgagttttggcagagttattataactacaggctttgct

SEQ ID NO: 39371 - DNA, 782 bp, Arabidopsis thaliana landsberg
atgccttgaagctgaatccctagaagaagagaaatgaagaaagcaatgatcaaagaagcaagattcgtttcttccgtcatgcgtttccaatttcacgactgtttcgtcaatgtaaacacattaaatctttctctctgttcttaatctttactctgtttttctctctgaatttttctttgaatcataaaattcagggatgtgacgcatctctgttgcttgacgacacaccaaacatgcttggtgaaaaactatcactttccaacatcgattcactaagatctttcgaagtcgttgacgacattaaagaagctctagagaaagcttgtccagctactgtttcttgtgccgatatcgttatcatggccgctcgtgacgccgttgctcttgtaagtcaaaattcaatttacccggtttagtgaaatttcggttttgtaactttggtctttgaaaaaaccagacaggaggaccagattgggaagtgaagctagggaggaaagacagtttaacagcgagtcagcaagattccgacgatataatgccaagtccaagagccaacgcaactttcttgattgatctcttcgaaagattcaatctttctgtaaaagacatggttgctttatcagggtcacactcaataggtcaaggtcggtgtttttcaatcatgttcagaccttataaccaatccggttgtggtaaaccggatccagctcttgaaccgagttaccgtaagaagcttgacaacctctgtcctttgggtggagatgagaatgtgactggagatc

SEQ ID NO: 39372 - DNA, 772 bp, Arabidopsis thaliana landsberg
tctacgttcatcgacccgtcagaaagatttcttttgtcaggtaataaaaggaaccctttgttctgaaatgatatggatcttggaaaagcatcaatagtttgattagattaagatgatctaatttcatttggcttgggtgtttaattcaagaggagatgactgctatactcgcatttggagtatcaaatctggtcaacttatgtctgaaaataaattctccaactctgtcccttcagttgtgtgttggtctgctgctgaaagtacttacacactgacctttctcctgcttcataacttcttatattgttttttcttatctttagtggaaacagaaacctcttatgttggtatttcaggacaaagagaccggaaagatagcattggtcacggggcatggcttggatcacgcgaagcgatattcaacttgttgtaagaaggttttaggacaatggaagctgttgctagagatcatattcaatagaatgcagcagaaccatgatcttgaggatattaatttactttcttttagccttgtaacagcaatcatagaatcagttgttttgaaattgtaaagaagacaaatacgtctgttctttcttccgttttcaatgctaatgagttttggaatacaagctcgtaaatacaacactggatttagttaagcagcagactcaataccagaatcatatcaggaaatgaaaagttgaaccagataacgttcaaaacataaatgcaatgctctttgaaatcaacactgactcaaaaactgata

SEQ ID NO: 39373 - DNA, 398 bp, Arabidopsis thaliana landsberg
gctaacagacttctggaacaaacctcacatggccaaagcagacaggtctggtggataattttcggatcagagctgcctgacttgccatgtcgggtaatactcccaacaatgaggctcaataaagacgaaagcaaagagaacgatcctgccaggacatgatcaggacctgagcccatgagcgcattctctggagaagaacatgataaccatatcaatactgagttgaagaaaacaagaaagagacagataaattgaacaattgcaaaatgaatggatgattgcaaacggacgaggaacaagcccacaacattttgcagaaccatcaacaaagcctacataaacatcttactaccccgcaggacgtggaacagaggtatggacattattcacagagagag

SEQ ID NO: 39374 - DNA, 563 bp, Arabidopsis thaliana landsberg
  unsure (1)..(563): unsure at all n locations
aaacctgaatatctctagtctcgaagacagaaaacggagataaatttgaagaaattccatctgttgttgaatgtgctggattagatgagaccacagacaggctaactcttctggatgtagaatcagtggtgaagcaatctcttgatactccttctgaagaggaaacaagcaaaaccatagatgagaagatcgaagataaaccaaaagaagaagtaacattgcatcaagaaggtcgagaggaaggttcttatggattagacacaaaagatgaggcagtttcagtactagaaagtagggagctcggagaacaaccccagcaagaagaattatgcctggcaaatgagcaagaaaacgaaacaaagttgcaggaagagcaagtagacaagcatgaaccaacgaaggaagaagtttctaatgaccagcagagtcctgttgaagaaatatctaatgaagttatacaagtttcgtctgcatcactttcagagggaccagaatatgagaccgttgttgaagccgaaaagattgnggaagaacaagtagcagacaagatccagaaaagtttt

SEQ ID NO: 39375 - DNA, 585 bp, Arabidopsis thaliana landsberg
  unsure (1)..(585): unsure at all n locations
acgccatctaatatatagaaaatattatttatatttaaatccattgaatttagacgtagtaccatggtcttaggtggaacaaaagccaacctagtcgtttcgggttgttttcataaagacggctaaatagatatccacaatgtcaacaatttttaatctaatacctatatatatgtttcaagaatgcaaatgacaagaaattgaacaaatttacgaaagatgtaattttttttggatatgtaggttagagagtggagtcgtgataaattgataaaacagttggtggaatctttgtcttgaggagccaacgtttcagttgaaaggtcaaaaacacaactatattttgatattttcaccaaaaagagaaacactatcaatcaatgcggtgaacgtgaagaggacttccttctactattcctccaacctaaggaagtcgttgtccgatacagttttacattaaccgttctctcattacctcattntgttttaatttatagtttcatatatgtgtatgtgttacattaaaatatacagaaatgaaagtannnnnnnnnnnnnnnnnnaatccaggaacaaacatgagct

SEQ ID NO: 39376 - DNA, 569 bp, Arabidopsis thaliana landsberg
  unsure (1)..(569): unsure at all n locations
ggaaccaaacttgggaacggcgagggcacggcgtttaagcagccggcggataatgtaacggtgattttgacggtgttaaagggatcgagtgttaagttaaagagctcgtcgcgtaaagagttaacggaatcgcagaagaaaggaaaagtgccgtttggtctgagaattaaagcgccggttaagtttaaggttggctccgttacaacgtggacgatgaccattacggtggattgcaaaataacagtggatannnnnnnnnnnnnnnnnnctgtgaagacggaaaattgcgaaacgggcttgagcctgttgtaaaatttgagctagttttgtttatgccttgatgggctttgttcgaattatgttatttttagtttgtttgattcaatatatatttttgaattaaaattgaaatttgctatgttcaaattggaagtttgaattttagttttacatttggaaaagagaaatatattgactgaaatattttgaaatgactaaaattagtagaaaatctaggtgaaattagattcttaataagaaaaaatcataaattcggcattaatgcattt

SEQ ID NO: 39377 - DNA, 510 bp, Arabidopsis thaliana landsberg
cctgtaaaatcatccgttgactctattttttttttgtatctcagtttgtagtttcattttattatcttgtttaagtaaattgatattttgatagatttgggactaatttatcagtaacattgaacaaaaatcttcaattattatgtgcttatccccgagtacgactatttcaaaatcaccacccgatcttatcgattttgtaagattggatatgaatgatataattaatattcaggatccgtgagaatcggatccatatgtttaattgtatatagtattacacttcattgtctttttacttttggcaacatatgatactctgttattattattattatatatatttttctgtcaatacaacatataaagagtttcttacaaaaattacaaaagtgtttttaatttttttctctgtccacatcttgtttgttttctgcttgtcttgttttgtttgattttaacgtatccggattcgttgctacccataagggttcggaaatccggattatg

SEQ ID NO: 39378 - DNA, 1544 bp, Arabidopsis thaliana landsberg
acttcctcttttctaatataaatatggatattaattatacaataaccataatggaaattaaaaaaaaaggaaatgtgagaccatgagaagacgtgaattcactgtcaacttttaagagaatgcatgaaaatgtgtagagagaaaaaaggggtcggcaaaagaaaatgaatggctcttcctctccaattccattacaccacatttctccgtggatttatgtcaatatctttgaaaattttgtgtgttttgagtatagatgtgatataacaaaagaaaatgtcagaattgtaatgaacagaaaaataaatggtacccgaaaaaacaaaaacaaaaattaataagaaaaatgttgacaggaaggtagatgtgcggttgtattatttgcaatgtccctctcttgctctataattacacaaacttgtccaattcatcacacttccccaaccaaacttgtttgcttcatataaattattttataaaaagtatataatgtatgcaggcagagacatgtgtgtgtctgtgtaggctactagctacctctctttttcataaattatatcgattgattccgtgggattatgacctatgtgagactgtgacatttgaggtttttttggccctctgtgctatgtactcatcatagaatgcgacattttaaaatttatatatatatgattaatgatcaatgccaatttgggaactctagtaagtatgcttttagtggtccacccccatttctagtcttatcttttcgataatttcgtttctcatttattccattctcaacaatcttgcctgataataccaaccaatcaagtcagctccattttttaaaaaatctagaaaaaaaaatctaaacaccccaaataacagagaacattcggctatggaattagaagttgattgactgcatgtttgttatctgtctatctgatatggatccttgaaacaggcccatttagagacattataggcccaaaacgaaaataagaaataagcccattatacgatgagtgtaattaattaacacaaaattgaatatcattaagttaatactttatcagaaaaaaggcggagggttttagatatcttatccgcttgacgagtagagttttcgaaaccagcgagattaatggcatcttccaccggtctcaccgtcgccggagctctactttccggagattttcgattaccagctatatcgtctctaatacccagaaagacttcttcttcattgtcatgccttagcaacagagatttatcgtctccttataattgctgttggcgactatccagaggcaaaattttgacttctctcagtaactcacggaaatttgctgtgggaaaggaagcagaagatgggtttctatcggtacgatcaaactcttaccgtttcgattttgccttgcaatttctacagtaattgtatttgttctaggaagtaatttggtgcgaattacctgattaagtaatgcttaagaaagattagaactttagaagtgctgagtatagttggtttgacaatgccgtgtgcagaatgtgag

SEQ ID NO: 39379 - DNA, 4127 bp, Arabidopsis thaliana landsberg
gatagatcattgatatacttttttttttcttgtcaacagataattgatatacaagatgccactttgaaattaattacacagagatctctttatccactttttgtagaaaaaatcggtggcatactcaagaaaaatcacaaccataaaagaaaatatttgatttcttcctcttatcctcaattctcatacagtgtacagtacacaattcaacattaaaagtcggaactcggaagtatttttatctaaaattagtactacaaattgtagtagtattttttaagaagctaatcaaacatttttagattgttagatcacacaaataattgtgtagactcatgacgactatgacttgaccagtgatacagcaaagtaggttccaaagagtcagaaatctcctttaatttttttttgaggaacaaagaaaaatattcattattaataattgaattatgggaaacacttaaatggtgagaaagaaaaatactgaagtctctcaaagttcctaaagcttttggcaatatgataatggcgtgatacctttttctcttctctcaacaaacgcgccctctaatctctcaatctcctccaactccaatttcttgcaattcactccaacttcttcttcttcttcttcttcttctctctctctctctctctctctcagattctagatttcgtttctcacgtttacttcatcaaatatgggaacctgcttctccagctcaactaaatccacggctgagatctctccctttgacctcgtcgttaaacctcctcctccttccgccgccgccaccgcaccaccaacccaacgaatccccaccgcgaaaacagaaacatcaactggtgagcttcgccgtaacagtcagattatacggaccacctaacagtctggtgacgtcgtatctccgttttgctcttctccacaagaaagttccgctccgtttcgttccatcggaagaccaaaaaccgacgattcaagtcggatcggagactgtatcaggttctcgagaggttcttctccgttacatcgaggataagttcccggagccgcgtttgatgatttggaagtttaatctagaaggcttcgacgaagcgactccattgatagtgaagatgatttggcttcagcataggagtatgttgtggcatatggagaggatgttgagatggtcggaggatctggcggcgcgtggaggtaaaaaagcggtggatccgtctgtgggaacaccgaagatggagattaggaaatttgcaaagagttatactcatttacaggagctaatgcttgaacatgctcaaatggaagagagaatcctgttccctgttcttgaatctgttgatagaggtattaaagagaattgtttaggtttagggaatgaatttgattattgttgtcaaatgttgatattttgatctctgtgaatttgtgtgtagggatgtgtaaaagtgcaaatgaagaacatgggagagaattaccaatgatgaatggtatcaaagaagatatcaagtctattggagttttggattctgagatttgttcagaagctctctttagtcttgcttctcgtttcaaatcattgcaggtaaagttaaaataacaataacaaagagcttcacgtgtgtctgtttttgtaatgattgagaatttggaggtttttgttttgaacgcagatgatgtgtaaagcacattttgtagaggaagagaaagatttattgccaatggtggaagctgcagaaatggggaaagagaagcagaagaaattgatgaatcaaagcttagaagttatgagtgggactcattctaactcgtttgatttcctactagaaggtctcactccacaagaagctatgcagtatattgacttgctcatgacatttggtgatccaaatcttatctcatcttttctctgctctgatgttgttgactgattttatcctttttaggctcactttgtgaaaaactgttgttttgtgtggggttgtgaattttgtgtatatagagtcagatttgtcgattcaggtgttgctatgttttctcattctgttaaattaaaaacaaaacaaaaataggttatgtaactcgtaagaggacgagagatgtttctaggatggttatccaagttttcagcaagttttaattcgattattatttgataatggggactaatcttctaacttctaagcgtgtgaaaacaattgcccatcatggttaaaccacagcagtagcagacttgttcaagaatttttatgggcttaatttgtgtcggtttagagagagttgtcgattactcaagggtaatgctttttctttttacctgttttatgcttttggacttgaacaccgacaaaacaaggtaacagaaaaagtagaagaagacttgaaacataaactaactaaaaaaaaagctgaaacagaagaggaaaagctggttaaaagcgtatttacacgattcagaatccactacaaaaactacttcggcggtcacaaacattagaccggtcgtattgccaaaactaacgactccgatgtcatcaacttctcttttctcgttttctcctcttataattttaaaatcatttcttcttttaggaatctaaaagatagacgacaaaacaaaatggagacaaaaaaaaagagtggatgtaaccttttatgtgtttggaacgtcaaaattgttggtttctcctgaatcgagctgaattaaatatgtacacaaattcttggcttcttggctatgctattacccgttgagcttagttaagaactggctaagattgtactcttctgtgtactgtgattgatcccacagttcttctaagtttcctagaattgccttcattccttttccagttccagcaatctgatcattatcctctgatcccttcttcgaagacgcaccaccctacaataaagaccggttattgaggattatcaatcttcttcttccgttagagaattgctattaaatacaatgaatagcatacctttttagacgtttcagctgaagcaaacaagtcaagcaactgatcagtgttcattgtcttcatactcgcattctcagcattgattaccgtattggcaaccgacactttgaatttttggagactcatcactttctcttcaagtgtgccacgcattatcagacggtgtacatttacaactctcttctgtcccaatctatgcgctctgtccatcgcctgccagagtttgttcagctctatattagcaaacttcaaataataatacaccatctaagtgtgtgccgatactattttaaattctttccaatcaaaaacgaaagagatgtggaactcttcctccttgcaaagtgaaattttacatggacgtaagccaaagaaaaatataaatccttacctgatgatcacgcattgggttccaatcatgctccataaatacaagtgtatcagcagaggtcaggttcaacccaagcccaccaactgaaggatcagaaaggatttaattcagagaagttgcttacaatatcatctcacaatagcagaactttgttgaattgaaaaagcataccatgtgttgtcaggagcagaacatcaattgtaggatctgaattaaaggctttcacaatctcaaaccttttctccggtacaactgaaccatctagtcgcatatatgtgacactgttgtaagaataaggtgagaccgataagcaatatattgtagaagccagatttaaggatatatattaagagaggaacatggaattacaaaaaacaaactaagctcaaatcaacttaagcgaaaaaaaggctgatcagttttagacttttcaagtcacaaattaggagacctaatcagtacaaagtcctccaatagaaatatactgacaataaaaagagtaaatccacaagttgaaactcaccttttcatgtgggcttgaaacaagtccttttcaatgatatccagcaaagcctgcataacataacatggttaggtcttggacattcttgtaaggaaacaaacccaacggaaaaatggaagaaatcagagatgtaagattaatcgatatgtaattactttgtgctgtgcaaatatcagaactctgtgctggcctacactaagagtgccatctgaactagaagcatca

SEQ ID NO: 39380 - DNA, 431 bp, Arabidopsis thaliana landsberg
cgccctagaagacagtgttgtatcgtctgcgatacagagacagttagcagttatgcgtttctcaaacgtatgatcgaatagtgtgaggagcatggcgagtatctcagtgcctcggagtacaccaactagtagccgcaagtttcttaaaatctcaggccagttgatagatacaagtttcccggtttggttagctagcaaatcatcttcttgaaaaccatgtgataatgtaactaaacctgattttattatcataccaattcttggtacaacgatgacacaatctttttagcttcatcttactttacagaaactgaaaaaggtctataaacaaagaaagaaacaagaactaatcaaatcctgctctagtggttagtgatctatatcattttaactgatacattcttgaggattggcatagaagtaatcttctt

SEQ ID NO: 39381 - DNA, 577 bp, Arabidopsis thaliana landsberg
  unsure (1)..(577): unsure at all n locations
cccccccttcccccaccccccccccccccctccccccccccccccccccccttcccccacgtctacgcccccccattcacnncccccccccccccccccctcctccccccctcctccccccctcccccccctcctcccctcccctccctccccccccccctccccccccccttcccctcccccccccccccccccccccccccccccctttttctccttgttctcccnccccccttccccctcccaaaaaaaacctccccccccccccccccccccccctctctccttcccctcccctcccctccccctctctcccctcccctcccccctcccccccccccccccccccccctccccctcctccctccccctccccccccctcctctccccctccccccccccctcccccccctcccccccccccccccccccctcccctcccccccccctcccccccccctccccctcccccccccccccccccccccccccccccccccccctcccccccccctcccccccccccctccccccccctcctcccctccccctccccctcccccccctccccccccc

SEQ ID NO: 39382 - DNA, 487 bp, Arabidopsis thaliana landsberg
atattttaaaattttattattttatgtgcaaagatatttataaaacggaaaaaataatatatgaaaaagagttatgtaaaattttggaaaataatatatagaatagtattaaacttatattcttatttttattttgttaattttcttctttttcaaaaaaaaagaaatattaataggaaaatattttcaattaacactagattttttcaatatatataatcaccagatgcatctcattcgatcataatttataaattgtacacttgagtcatctgtcacgattggggctgattactactcttaataatgccgctttatatatatttttatcgcatatgccactacggatacttttctcgctgtcagactgtttttgctttatatctttgacgagttgtaaaacatgtgttggtataagatgttattaacataaaagttttgagtctcaagaagaaggattgatgacaagcgttattggtcgatgttt

SEQ ID NO: 39383 - DNA, 600 bp, Arabidopsis thaliana landsberg
  unsure (1)..(600): unsure at all n locations
agcaactatagataatgataataccctacttaaaatgatgatatactactttttctataacatatatattaaatgtttcgttaaaaatgattattattatttgttacattaaatttatttaaactaacaaaaactatttttttttaaaattcaaaatggctactaatttttaaagtagtaataataatcataatcaatatatatgagggctactaatttcttctcttaaagtgtccacctaaacaacaatattttttacaataaaattaaaaatgatttacaatgttcatttaatgcatacttataatatttattattaataaataatgattaaatctaccactaataaaagttactcattaaggcctctcaaatcatccacatcaacttttataaaatactctctcgataccacatcatcaatataactcacgtagcactcttttaatatttttctattagtgctattttcgtaataaatgaagacggtggttagatactttacgaacgatcaaacgaatcagcttcctcgtaagacataatctctcttttcttctttntttttgtcaaagatttttttttttactgcaaactgaaata

SEQ ID NO: 39384 - DNA, 707 bp, Arabidopsis thaliana landsberg
ctcagaaggctttcttgcttctcaaacaaaagaaactcaacttgacacacatttatctgttgcagcctgaagcaaaaagactcagaactaagattacaagccaaagcactaacaaacacagtatttgacaaatttgactaaccataagagtgtttttagcttcagaatccatatcttcagggaagcaagaactcagcacaataactttcctcataatgtctctacctccccatgagtacaaagctcgatcacatagaacacttgatagctttagatctatgaacaatttagtatgattacagatcatgagattaaccaggaagctatgaagaaacagatagataaaaagaggtaaagagagacctctgcaagatatggctcccgattcatcgatctcaggtacaaacgcatccaaaggcaagctgttaatagcgtgatggaagtctcgaagacagaagtttccagtaggagtgtacgcaaatttcaactgctggatccgtaaaaaaaacatgaaaaccacacacaaaccaccgaaaatagaaggaaacaacgattgatgacgaatataacctgatcgtttccagaaattcgatctttcaagatataacacataccgatccgatcagtgagagattctacccgagacgaaattgcgtgtaagttgctgagccttcaaaaaccactacaaccaaaatttgcagcaacaa

SEQ ID NO: 39385 - DNA, 2623 bp, Arabidopsis thaliana landsberg
ggatgatactttagattagatgctaaaaacagcagcaagtttttggtttcttgcaagatcggatattgttatggacctggaccaataaaagcacaaatcaagtttgctttattccttttcgttatatcgaatatttgtaaatgtccaatttgttaagtcataactaaaaacatggataacgttggtgttgttcgtttggcagcaaaaacaatggaatttgatcacaaggagctgaaattcaaaacgattgtcttaattgttccgattgatagattctatgcccactgatttaaaatgggcctcatattaaaagcccgtgtaaatcagttgtctcgaaaattgactttttggtccattttgaactatgatttggagttgcaatcaattgaaaacagcatgtaattcatctcttcaattgttttgtggtaagaaaatgatatcaaaaacgttttctaaattccaagggtgtgtagtctttgtacgtaatattcatgatgagtcaggggcataacggtccagttacttattaatttcccgaatacgtggaaaaataggttttggctcgaaatggcactgtaccgaccccttctcttgcatcatccaacttctccgtctgtaactacgtttctacgaaattacccctcgaaaccgatcaaattctccagcctgcccttccttcatcgctgccgtaagtctcgggtctcctcctcctccgctcggtgttgttcttccatggaatctcctcctgaaggatacagaagaaatgtcggcgtctgcctcatgaattcttccaaaaaggtgatgattgatgatggataattggaaacagcttcttctattttccgatgattagctccttctcacaattaagtgcagattttcactgcctcgaggttggatattcccagtgcttggcaaatgcctcaggtaatctctagattccaatttcttaagattcgaattggtttctccattttcctcatacaaagctgaaatcaatggtactcacttgttcgcatcatactgcttgacttgaataatctcaaactcccaaaacaaaatttgattatgacttccaaaacaatggatgatacgaattcaccaattttcatctttggaattgtgttttatctttcatgttaccaggtttctctactttcgacaattcatcctctaattggattcaaaatgctatgtaatcacttgaataaaatcgtgtgttgttgttgatgttgatatagggtggaatcgacgaaggtgaagatccaagagttgcagtcatgagagagcttaaagaagagactggagttcactctgctgagattctcgctgaggtgtctttagcttcttcttcttcttcgtcttcttaaacattcaacaatttaagaattcgtctaaagaactcttttttgttgttgttgttactgtaggcacctcactggataacctatgacttccctcctgatgttagggagaagcttaaggtccgatggggatccgattggaagggtcaagcacagaaatggtgagtctttctgagattatcaagaatcatgtcatttcattacgggcttgttcaaataatgtgtttcctcaggtttcttctgaaatttactgggaaagatgaagaaatcaatcttcttggcgatggtactgagaaacctgagtttggtgaatggtcctggacttctcctgatcaagtcgttgaaaatgtacgtacagttttcttctctctgtttgaccttcagcatttagattccacgactactctttcactcatattcattctatttctgttatacaggcagtggagttcaagaagccagtgtacaaggaagtcatgtcagctttcgcttctcatctccagtagcaaaataaatcgaaaactaaactctctgttttaagtttttcgtaagaaactctgagaataagctcttcttgacatatttgctcttttttgaacaatctttgaatcaaaatacaattcttgttccctctcttgataaaagtaaagtgtgagatcctgtcatgttcttattttctcatcaaagattctcgctatttgatccgctacaaccttagcaacaacctcaggagcaaaattcttgaccatgtcatctcttccacgttttcctttaaccttagcctcatcagggttactcattacacgcctcattagaaccctcagcttatccacagatggctctgcccattgatgcccttcaaaaggaccttccttcacttcactcatctcctctaccaccaacgggtaaccattccgctctgtaagatactctgttggtcctgaccagtttgttgtgatcacaggcaaagacatagccatggcttccactataggtcgtccccatccttctcctcttgtaggcaacacaaacgcatcagccgctttgtacaaccgaggtaaatcaacttgagcaatgtgtttatcaatcacatacacaaaagggtaaccattccgaggctcttctatattcatttcttctacgaaatcaagaatcttgttcccgaaatcgctgtccgagtgatacgcgttcgtcaacaaaacagagcaacattgtcttcaccagaaaactcactccagtaagctttcacaatacatccc

SEQ ID NO: 39386 - DNA, 1065 bp, Arabidopsis thaliana landsberg
  unsure (1)..(1065): unsure at all n locations
atataccaaaatatgtttgttttagaattagatataccgaatagaaatattgaccacgtataatttaagtcacagatgtattttatattatttgaaaataaaatatatctaacaaaatatccaaggaatactccatgtgaaataaacaaattattaattttgatgaaaatgaactatgttaggtctctttcatcattatagcaattcaaattatttttcgtatatttacatttatggtatcacctagtcattaccggcggatttaaataagtttttggttatttataatgcaaattgatgaggattaacttataaacaaacatttatcgacttaacaaaatatctcaaaatatctaaaaagagtactccttgttaaacagaggtaaatttgacgataatcaattttgttaggtcccttttcaccattatagcaattcaatatattttggtttcaatttatacgtaattcacaaacatttatggatttaacaaaatatctcaaaatatctaaaaactattccatgtcaaaacaagcataaatttgacgatgaataatattgttaggtcccttttcaccattatagtaattcaattattttggtttatagttatatgtacttatagattcacatagctataatcttctggattttttcctttaaaatggttatctgtgagtctgtgtgactgcatgtgtcctactctaactaattccgaacttagatatcgacaacttaagataaattcattcttttttttgttgtctcacagttttaaattaaattctcattaagactatcgaatgctactagactgctatcatttcatgtaaattgtgaatatggggaataataattaaagtgaataaagtggagaaagaggaatattgaagggaaacgataaacgtaccaccaaacttatagacattagaaacgcatgacaagcccaagtatcatccacctttcagcttcgcttaatggaatcttatgccttatctctttccctctctttntctcgatatggttattaaattgcacccaagagggcataaagtgatacaaaaat

SEQ ID NO: 39387 - DNA, 492 bp, Arabidopsis thaliana landsberg
gaaaaaaagtgaagggacttcatatagtctatatttagcttatttttatcattaaaaatgtttgttggaaggggggacttataaatttgattaaatactactattacttaactagtgcgttcaaattattagtaaacaagatccaaccttacaaaaaaaaatcacactttattggcacctcaactgaatcttttattttagtcgtcaaagaaaaaaaatggattcattcaagctgtaaatggaaatgtgtcactaaggcccataaatctattttgaaaaagcccattaaaactaggttcttaagtcttaaattgaaatatatcaatctacttttttcttaatagatataattggtcatcattaaaattcttgcattggctaattgcaaagaagaaatattcgacatgaaatttgtacatttggtgctattgtggaacgcatcttttttttcataaactttatcatataagaaagaacttgaaaaaaaaagag

SEQ ID NO: 39388 - DNA, 787 bp, Arabidopsis thaliana landsberg
acttggctaattagatagatccaagatcttttacttttttcggttttggaacaattttatggcttatttgtagctttaatatagtaatccatcatattaatttcaaatacaaaagtatgccgaccaataaaaataaaattaaaattaaaatacagtggtatgcatgcatatcactatatataacagcaaactaagtatatctcttcttctttttaatgctataggatgctttttcatctttttggtccataactttatcttctgtctcagaacgtagatttcactaactatatttgcagttacatataccataaaagaaaggaatcttaaccaaaaaaaactaagattccttcttcaacttttgtaacgaggtttagacttgcacatgttgcaaaaacaaagaacacgatcaaaaaacaaaatcccaaaacatacaataatattacataaaattatctaattggattattacgatcgaaactatcaacttttagcaaagaagaaagaaaatgttgaatacacaagctaagtctctacttcctatttgaaagtctagctaaacagtaaaaacacactaacaaaaatgatttcctttaaacatcgaagatcacgttcaacaatcatacgttcatagaagatctaaagaccaatattaaatttgagtctttgtactatccaatgttctttaagttaaaacgtaaaaactgacaagtgttcttacgaggaaacgaggattggctctccatactttgaatattaaacttaaacttctgagttacatctaatc

SEQ ID NO: 39389 - DNA, 702 bp, Arabidopsis thaliana landsberg
gctgtgtttagctgtctaattttttctcttgcaacggatattcgtcatattaaacgagaatgtaattgctcacgtatccttatccacatatttcatagcccatggcccaagccaacacaaatcattttgttttaagcccacacagttctttgaccataaataaaccacacaaccacgaaatcgggagtccaattgatacttgaacaccgaaagtgaagttcacataatcaatcacttgtatataaagcttcctttttggtcaactaattactatactgagagtactcaagaaatcaaaatggtccagaataaatacttttgttatctcgccaacaaaactcttaacaattacttttgagttaattagtttggattttatctcaggatatccaacttttgtaaaagaagtgttaatacttaaatttctctcgcacacaaaaaagaaatgagaatctttcacgtgaagatgcagcttttttcgtattgagtgtgtttcattccatgcctaaagaagtcttgtgatatatgatttacaccaataattttttctttattggatttttcttttctctgtaagttcaatatagccactgtacaattcagatttttgtctttttttttttaataagtttttgttaagcgaaaagttaaatatatttactaccgatattactacttgattagtggttcacattatacatt

SEQ ID NO: 39390 - DNA, 656 bp, Arabidopsis thaliana landsberg
tgtgaaagggctcactatcacatggctattatataagaccgtactaacatatgcaaatattatatgtggatcaaagtaccacaaattttgagtgaaccaaaaacaaaaggttagagatagaaaaatatgcatgtaaaaaataataagagatgaaagaaatattaatgggagatgggtgggaaatgaatagattggtgtcttcgtcacttttacttttttttttttttttattgtttgtttgatagtaccaagagattctctattctattctttcgtgatggtttattttagggtatattacgtgacctgtagttcatcctctccaactctcaaacccacaaattattcactatacatatatccaaagattatttattcaaagatatgactaaaaatctctatacacgtgtgtatgtaatagaaagatgcaaggattttggtgtggcaccaccttcaagactttttttttatcaagacctaactcttaccactttgaaagcagcttatcttatttctttagataaaacaattgataagcgagtgctttaaacttcacaaaaatacaatctactttttattcgataaaacaaaagatttttatagtctttttatttaggggcccaaatgataatatgttaccatcaccaaattttttt

SEQ ID NO: 39391 - DNA, 655 bp, Arabidopsis thaliana landsberg
taggttctgctgcgacacaaccagcaaagaaacagactgtgaagaaaactaatcctgcaaaagaagatttgacgaagtctaatgttaaaaaacatgaagatggcattaagactggcaagtcaagtaaaaaggagaaagcagataatggtttagcaaaaacatctgcaaagaagccacttgcagaaactatgatggtaaagcccagtggaaaaaagttagtccattcagatgctaacaaaaagaattcagaaggtgcaagcatggatacgcctattccccaatcatcaaagagcaaggtaatcagttatttgaaccatgatttcgcttatctgtatataatatactagaacttccttaaacttataatggggtaactgtgcagaagaaggattctcgtgcaacgacgcctgcaaccaaaaagtctgaacaagctcctaagagccatcccaagatgaaacggatagcaggagaggaagtggtgattattttgttgctttctctgtccatgatatgaggcattgacttctcacctgtattcatatggtatagattcctcttttcaggagtccaatacaaacgagcttggtgaagaactccttggtaagagagcatatgtctgacccacatctcacaagaagtatgttttattgttaat

SEQ ID NO: 39392 - DNA, 1153 bp, Arabidopsis thaliana landsberg
accggcgatggatgaaggagatcctaattacgacgaggaacaggtgaagaagagtggtgatgacgtgccggttgagcttgtgaaaggagaggttgaggtggctaaggaggctccggctggtgttgctagggttgaggttgatcctcgcttggtcggtcgttgagagtttgatagaggaggaagaaaaatgttggggcgaatgtgagaaagagggagaaatgtggggttggatttttaatttcgagttaatgttttagtgtaaaatgacttttcactatttctgtaaaaaataataattgatctgctagcattgaaagtcaccattcggtggtcttttttcattatccaacataactctttttattacttattgttgtcatgtgctgtgtacttgcatggaagacaattagccagaggacacaatgtgtgagttaaatttcaatttcgagttgtgtatagttaaacagtatttatttgtgtgataataattaaatagagttgtggataatgcccgtaatggaacatggtaacaaaatggcatttaattatttatgatgacaagaagtttggtctgttctattaaatatctttgtaggatatgaacgccaagtgtcgtcttgagttctttatcaaatactaaaaaactctcgtctcgagttctttatccatacttctcaagtcccgagatttagtactgattagacacgacaattaaaggaaaactaaaatctttgagaaattatgtacaacaaaagcaaaactgcaggctgtggggttcgaacccacgcgcacttatgtgcagaagaacttaagtcttcccccttaaccactcgggcaaacctgcttgttattatttttctcttcctattatatttatatacgcaaactggtgtagtagctgcatattaaccacaagccctaaaaatccttaatttcgggtccattagattatgttacaaattgacatgctaactaatcttcaatcaatgtatgttttggacagagaatttcaaatgtagattttcactagaaaagtctataaaaagacttaatatccataccactaaacacaaacaaaggtttagcacagtttcagctaccaaaacgataaagttaacaggaagaaatgctgaaaaaaaagacgactaaactg

SEQ ID NO: 39393 - DNA, 843 bp, Arabidopsis thaliana landsberg
gggccttgacacctgtcatacatgcatcaggtcaaataagaagccatttttgttaagatcaacaatatttctgtactctctatgaccatattgccgaatatgtagtgacgtgctatttacgtctgcctgctcattaacatatatggccacctcacataacctatatacacacatattgtggcatgttacaaagatcacactacagacatagaacaaagtgttataaaccatgggagaacaatgagcgctcatgtggactgacggcaagaagctcatatgtaagcgtatcatataccggagcctgactcattaagtagcgggagacataatgagtccccccagcatttgtatgcccatctgggtgcacagagagtgtactgttacgcaatgctaccaactatgttgttaacaggaggatcaacaacatctttgttttcttttgtatgtcaataagcatgcataataacaagattaaaaaaagcttcaccgtttgtgaccagcgagatcgaaaacagaggattcgaccgtggtgattccatgctatctgagtaaaagaaaatggtctatcttgaacatgtgagctgttgcgtgacgtactttgaacaggctcaccatttctgttcagaatgagaaaattattaaaacttgaaactcataatgatataaagagatcatcagacacaacatgagttatgtttttaccttcaagcgagattggtcgggacattgtaagaagctgcaaatgatttagtactgattcttgttaggtgtaaagagacttgtacatatatatcttgaagatgcaagtctatttatacaaggacaagagttgtctttatttat

SEQ ID NO: 39394 - DNA, 685 bp, Arabidopsis thaliana landsberg
gcaagcatccgaataaaacaaaagcacgcgggaccatacctgatcactggttttggagaatggctcattacacttcacgtggttggctcaaaagtgtggagtggaccatcaactcggataaccgtagtgcctacataatggaaacacaaaatctccttcttttagatcccattctttgaaccatttcttgatagattgtctgtctctcggtctcttttcagattgctataacagggaaaggcttctgcaaatcgtctgcaatcgcgacagagctgatcataagcaacattctgaggatagggaaagttaatgtgataggagatgttatattgtttctaggaaagctttgtgtgagtctcttcagtgctctctttggcttcttgatgttggattcgcaccgatatcgtgcttctcacaacaaagtctcatccccgctattacctgttttggtaaaatccttttccttgctctctagactcaattgtaaatacaaagacagatgtttttttttttagcttaaataggtttgcttgcttgtgactctctctatgcacaggcatgttgggcattgcggtatattgtggcaacacttttctttgcggtggttgagatgtcgatagacaccatcattctctccttctgtcaagactcagaggagaatcaagggaatgctcagcacgcacca

SEQ ID NO: 39395 - DNA, 607 bp, Arabidopsis thaliana landsberg
  unsure (1)..(607): unsure at all n locations
tttttccaatgatatttgcatgaccaatttcagagtgtcacttttataaagtatatataagtgacgaaaacaccttttttattgtagtgaatatacattatttcttcttgctaattgtgaattttgttttcataagactgcgaatgccaataacagaggagactcaagcttctctctatttctatttttttttatatgtacgaagtaactcactatagttgctattgaacaagcatatatattactgctttgatttccttttctacattataattaagtttataactataatcttgtgataccatctcagtctgatgagattcgtaggccgttacgtttattgatacatactatacaataaagactcaacttcattagctagctagttagactgtggtgccattgcagcttctttcgccatcttaaactcatagttattgttgatgacattgtgtttcaaagtctctggcatgttgaaatcaacagtcgacgattgtttcgctgtcttagtattgcgtatgagagattcatataaccctttgtctaaatgcanatggagtgcatcacatgagccaccataacaagtcaacggttgcagtacatggtc

SEQ ID NO: 39396 - DNA, 578 bp, Arabidopsis thaliana landsberg
  unsure (1)..(578): unsure at all n locations
tctgttgggaatttcatattagtcatatgatagaaaataatgtaatactatataaaagatattggtcaatccaatcgattgtagttgaaaactcatgaatcttcacgacgtagtaaaatgagaacaaaattttgattatttgagcaagtatccaacctgaattcaatcatatatacaaattatgtcaagatgtatgatttgatatatgactcaaaaaatatttgtttgtaaatcacatcaaaatggctgtgatcagtagagatccgtactctagacagaaatctacaacaaaccaaatttacatactaacaaaacactttaaactattcgaaaacaaaaatatgtcgtaaaatggcattttagataaagttatactgtataataaaatagaatctgagtcatttcatcatcaacatgagatagaaaaccaaaacagaccaaaagtatgattgctttggggaatctatgccaactntgaatgtgtcacatgtcattccatgatgaaaataataaggccacaataataatgcgacgatttgaaaaatcttgaatgatatattagtaccacatatgcccca

SEQ ID NO: 39397 - DNA, 652 bp, Arabidopsis thaliana landsberg
  unsure (1)..(652): unsure at all n locations
ctccggtaccagggctaggcccacctcctatacctataccaataccaataccaacaccatcaccgttgttcctatcatctcctttattcttttcatggtcattgcaatcttcttttccaccgtcgtcaccttgtcctttcccaactcctttgccatttcctcttcttcctactctaccgctttcttctcctcctgctccaccatctcccgaacttcctcctgctccattacaaccttcacagcttccttctccaccggtacaacctccacagtctctttctcttcctctgcagatttcgcagcctccttcttctacatcaccttcttgcactcttcgtgctttgttatgtccaccactttcaaacgttttgttggaacccaaaacggaagattgatcactactattaaaatatctcctcacgggtctatatcgcagcccgtggacagagcttgaactcaacaacaacacagcaccagaaactaacangaacaccacaaagcttgacattttcaccaatatctctatcgagatttttctcagtaaaagtcatctccattcccatcctttttataacccanatcaagacccacataattatattgagcaaccaaaatgagcatgcattacccatatganacctaccattttttt

SEQ ID NO: 39398 - DNA, 779 bp, Arabidopsis thaliana landsberg
aaaacatttagttattttttcttacaaaagacagctaagtaagtattaagatctagaagtaacagaaagtaatcaaaaaggaagaattaaagattaatttggtttgaatggttcaaaggagaaaataaagctgtttaagccaaaagaaaattagttaaagtgatgaaatcaaactcaacctacccaatcatctataaagagaaatgggttcccaaacttgtcattcatcagattgttttcttctaaatcaacattatttgcttatcattcaccattgtttttctcaactaaaaggggagaggaagcgagagatagagagagagagatggaatcccaaaagctaggaagaaagatgaaggagataaaaatagtaactaagatcatagcattggcatccattttctcatttatactatcttactcttccttaatctcttctcttcagcaaagactccatttgctttcaatgtatagcaatcttgtggacaagaaatacatgttcttgttatgcaatgggattgtgggctttatcttggggagtttccatgggaattctgaatccctttcgcacggtaaagccattaacatcattgaacaaacgaaagaagtagggatcaaagacttgaaagaaacaaaactcaagaaggtagtggcattacttgaagaaaagagtgtttctaaagaagaagaagaagaagaagaagaaggaggaagagttgttttatttagaggaatcgaagaagagaagttcattgttggtgagtagatgaggaatatag

SEQ ID NO: 39399 - DNA, 372 bp, Arabidopsis thaliana landsberg
ttaaaaaaaaaaaaacttgcttgtaaaaaacacttgtagcctttcgtcactttaaaggtaaaaaatggacacttgggtgaaatcccagccgaaacacttagtctaatttagtcgaagcacctagtaagaaaaacgtagcgcattttaagttgaattaaattttagcaactctagtcgttgtattactctaagtattagtcgaaccacgttatttagcaacaacacgtaggaattgttgctttagttaaattacttagtcgaagtagtttatcaaattcagtctaaaaagtacattatagaccaaaaaaaaaaaaaacatagcccactgttagttgaaatcatactaaatagcaacacttttagaagagataa

SEQ ID NO: 39400 - DNA, 539 bp, Arabidopsis thaliana landsberg
aaaaaaaaaaaaaaaaaaaaaaaaaaataaaaaaaaaaaaaaaaaaaaaaaaaaaaaaaaaaaaaaaaaaataaaaataaaaaaaaaaaaaaaaaaaaaaaaataaaaaaataaaataaaaaaaaaataaaaaaaaaaaaaaaaaaaaaaaaaaaaaaaaaaaaaaaaaaaaaaaaaaaaaaaaaaaaaaaataaaaaaaaaaaaaaataaaaaaaaaaaaaaaataaaaaaaaaaaaaaaaaaaaaaaaaaaaaaaaaaaatataaaaaaaaaaaaaaaaaaaaaaaaaaaaaaaaaaaaataaaaaaaaattaaaaaaaaaaaaaaaaaaaaaataaaaaaaaaaagtataaaaaaaaaaaaaaaattaaaaaataaaaaaaaaaaaataaaaaaataaaaaaaaaaaaaaaaaaaaaaaaaaaaataaaataaataaaaaaaaaaaacaaataaaaaataaaaaaaataaaaaaaaaataaaaaaaaaaaaaaaaaaaaaaaaaaaaaaaaaaaaaaaaaaaaaaaaaaaaaaaaa

SEQ ID NO: 39401 - DNA, 442 bp, Arabidopsis thaliana landsberg
acggtttacttatcattagtactgttttttttttctttttttttggctcaatctgtcaataatttatttataaaacataactgataattatatatatggaggggcttatttgtatttatgtttacacaacagacaggtcttttatttagccgtttctgatattaaaaaagaaagtaaactgctttcgttgatattcttaagtatcccattaattcttttccttaaaaagaaaacattaacttgttgttgggacttcgtatattagcttaagtgttggtggaagagtgcttgtaacctactccgacttcttcttcttcttcttcttatattctccctctctctctctctcctttttcttctatttctgctctgttttggtaaattgaggaaatggaagagaggcataagtgcaagttatgttggaagagcttcgctaatggaa

SEQ ID NO: 39402 - DNA, 694 bp, Arabidopsis thaliana landsberg
  unsure (1)..(694): unsure at all n locations
ctttggtacccctacattttgttctcagtttcagtgttaactttcctaaagaaacagagtaaaaatggaaacggagagaaataagtttttttaccggtaacaaaagctttctgcaattgtccactaagaccagttttccaaggacctatgctcnnnnnnnnnnnnnnnnnnnnnnnnaagataaccgctactataatcagtaaaccgacgaaagaagcaaccgcgataaccacatacagccatacatgttttgatccttttgactgtttattatcctgtggctgattcttagagatatcaggactagtactgcccttatcaggagaaggtacaggagggactaaaggtggtcttctcttctttgcattggttactgcagggaaagacccgctgcttcgaggtgaagcttcagttataatcccgggagaaggactaggagcggaaggagcaggctcagccgctaaattacttgtctcctcgagtagctcacgtcgtttgtagatatcagtttcctccaaaaagcctgcaagaatcagattgaaatgacaccttcaagtacttatctctagtttctacgttaaatttgttgaatccaaactgtctttggcttactagggaataatttcaaaaaacgtctggaggttgctttgatccggaatacaatagcttctaccttttttactcgaatgagacg

SEQ ID NO: 39403 - DNA, 673 bp, Arabidopsis thaliana landsberg
aaagagacaacggacctccaactcaaacgcatattttttctataaccaaacttaacaaacaaaatatgatagtttttatttagcggagaaaaaatgaattttgatatatggattatccatctagatgagagttacacatcgcatgcatcgactgacttaccgatcatttcgaggaggtaagccgcaagatctgaaggatcgatagacactataggcttcatctctttctttgggttttgactttttactttccttcgccttcagattttcattcctcacctccacattagcatttttctcctcaaatgaacggaaaacgtcctcaccggtaggttggtttccactggccgcctgatccgctggttttcgcttccgaatgctcttcgaggacacgactttcttccatccatggtcgtcgacgtgggagttacatttagaagtctcacatacattgtactcgatcggttccattaccttttctaaagtctctcacttttttcgttgttttttgatatttgttatcactctctctagcctctagcatacttaaaccaaagtggacgacgtgattttatcgaaggaagaagggtttttcatacctttgtgacataaacgttattagggttattaaatatctttttattattagatttgaatatttttgcttgtaccc

SEQ ID NO: 39404 - DNA, 941 bp, Arabidopsis thaliana landsberg
tagtggttgtggaagctaaggtcttttagatgacgctatgaataacccatttttttgttttccaaccattccatcttcaagatcggccagtttggtccacgttgtttcataatgaaatgtattacaagtattgctagtaaacataaaatcttcaatagttccatgcttgcttcgtcataaccatcatgtggattaataatttggcctgaaagcatcactactcgctctaaaccatctgcaattctagaagctcttggtcgattctacagagtcttataaagtcgctaatccatgatcatttatttttaattaagttttgggttttttaatttaaactacacatattttgatttataaacatggttataaaagttcatacatatgttgttcgacatgactttagttagtgatcgtttttttctctccctaattctcattatagtcaacttgattgtatttttcatatggatattttttctacttctcatttataatattatattgtgtaatttgagttttaagtctttttcttaaagtttaaactatattagttttattatttatgcatcatgatagttcatatatagattgttttatgcgataaacacttataggttccgcttacactttaatttaaagtctagcgttttctttctaaaacaccgtcactttattacaataagatttagaacgttctttcgttactaaaaagaaaaaaaaatggatacccatgagagggaggagcatatataacattctggaacactgtaacgatcctaatagatagaacaaatgtctttaatgcatattgtcataatgtgtacgtaacagaacataagagggagggctacaattacaaacataacaactctagtgtcttcatgcgatcctttcttgactatgtctcagaattggaccacaggaccatgtgatttttccaa

SEQ ID NO: 39405 - DNA, 405 bp, Arabidopsis thaliana landsberg
tttttaacacttacacatgcatatgagtcagaaaataaagaacaattgtcaatatagtttttttttttatgtttctgcatagtaagtaaatctatgtggaagctaaattcattctgcgagacatagttactttatattgttatacatatattatcatctgttgttttcgtagtctgatactctgatgtaaatcagacaaccactctttgcgcatatttgtctccgtgtatacaaatatttataagcattagcgtgatggtaggaacaatggcaaatttgtaaagaataatattaaaactaaaacaaaatcaaagcttcccgaagccggttttaacgaccttaaccaactttgtgtcttcagaatcattttatattttaacatttttattcaaaacttatttagtc

SEQ ID NO: 39406 - DNA, 2079 bp, Arabidopsis thaliana landsberg
aaccggataatgatcttagtgattggaaattgtgtctcattgttctcgttctcatgggactaatatgccgattcatagcttatttctgcatggttacattccagaagaaataatctaataattacacatgattaaaaagcttacattttgtaaaattcttctatttttcatacgttaaatattaaatgagttatataagtagtttatagaattagagaagaagggattttagaattccaattttgtaatttttatttgtagataatggtgattattcatcatgctttttctttctttatatggtaaccggttttggtaagatagagtcatacagagaatgatatacaaagaaatcggtttattttcaattacgattctttggtttatatgatccggtttaattggttactaagatgatgtcggaaagagaataggaagcggcgtgactaaaaaacacgacacgatgatgaattcggcgtttcgaaacgttcacatcactgcgtctcgtttgataaaccctaagcccttttcttcttcgattctccattttcttcctctctgttctggcgacgcttctcctcgccgttccaatcctctccggcatagaaactcggtgtctccttcatcttcctttcccttctgttcgacttcttccttttcttctttctacattcctatggcgggaggagatggtcaggtgtctcattcgcttgagaagcagttcgagagtttccgtgttcaattagaagaatctgcagctttgagagagcagattcgtgctgtggttatggagattgagtctgctactaggcttattcaagctaatcttcttctcgttcatcaatcgcgtcctattcctggtaaatgattagtctttaggttaaaaattgcatcttttagctaaatgtttgaaatggcttgatgggttcagaacttggtgatgaagttctctatgaagggaagtaactaaaaatgaagaacttgttgagaaaagaatgaatattgaattacacatagcctttgttcttttaagaaattcattggaagtgtttggttgttactaatatagattgctcgttttgttgatggatcagaggttatcgagaaagctaaggaaaaaatcgttgatttgaagcagtattatggtcggcttgctgaaattcttgaggagtgtcctggacaatactataggtaagtttgaaagctatgtgtagttagattttctttatttgcaatggttttttgttaaaaggtttttgtaatgtaggtaccatggagactggagaagtgaaacacaggcagtggtctcccagcttgcttttatgcactggctagaaactggaactcttctcgtgcataccgaagctgaagaaaaacttgggtgtatgtctctggatctcaatttactattttccttacttccaaatactgaaatacatatcatggcctagtggttgcactataaataaaaccttattttgttttgctagttctctcacaaacttttgtatagaaacttccttcccacaataggtaacaactgagctggcagtaggcaatcaatttgaaatccgttcatgactccaacatactatacgtgtaatcctgtgaccctccttttgcctgacctgtctcagttggaaaaactaaatgaacgagttttctacttttctcaataatcagattcagtttgccactagtcttcttctcttatcagtatgttaattagtctaccttttcttgctcgttgttattgattttgtccttaggctttgtttcagtctgcattttatccactgtagtgtcaaccatttagctaagatttgattttttcacctcaatagagttattagttgccgtttcccatgaactcagttattctcccttaggatggatggatgataattggaaggttggtttttcattaccttggtgtagaatagatatttgcccaagtgtcgttttgtttcaaatctgggttttgttatcttgtcaaatcaattgtctttgagtaaaataaacagaacaagttgttggtcaattcatctgccattatggctcttctaattccacttcatt

SEQ ID NO: 39407 - DNA, 696 bp, Arabidopsis thaliana landsberg
ttcccatcgtactggtacatgtactttttggaattttcatatatcaaaatcgaataagaagaaacaaagattcagagccgtattcctatatatagttaatacaaaacatgcaataactaatctgttcacacaacaaaataggttaaaatacgacttatgtccatcatcgcatgcacctatttgatagtacagtatttgttatcgttaagacacgtaaagattccccgcgcaaattacaaagcatccaatccacttaacagatattgattatacatattaagacaaaacctgttacaatcggtgatgactgaattttaaaggaaaaaaacataagctgaaatgatttaaaacgacaacagaagaacagttagaaacctggcaattaaatatgctaaccttttttttcattttagtttgtctgttatttttgtcagaacagtttttgtctgtggcgaatttagtaaaaaaaaactttgtcaagaacttaaaaccatagtcattaatattggcttatagtgatacgatcgtcattaacaggattaagaatttgataacaaaagaaaaaaacgacgaatatttgggttttaatttgtgtaattaaacgaatttaagtactccatatactataactggtggtccgttgttatcagagaggagacagaaatcttaaggtgaaaaaatgaagaatgacttttt

SEQ ID NO: 39408 - DNA, 1978 bp, Arabidopsis thaliana landsberg
aaaagtttcagtttattaaagatgtcttcatttttctacttttatttcttatcaagtatgatttagtttatcttattgatttcataaagatgaatgtctaaggtaggatcgaatatgtgatctcaattagtataatcagtccaattattcttttagtgaacactaccaataggcaataattatgtgagtaatttagttaggataacatacataattacatttttatatattttgaagtggatgatataaatctcgaatctaaatgaactgtgtttaagtgggagacgacacttgcttgtattctctctctttttggtaactatattcgtaaggatggggtccaaagaaaagcccaatattttcaagatcgtcacattgttggaagctttatttttacattatttatggatttgtttataagaaatattctgccaataagaagatgtgattctattggcaatacaaagatttgatgtctttctagaaaccccactttactcaaagtaatgagttccctctgcaaaagggttcaactctaagcgtgatcagtgcttctttttataactttcctttatcctaattacaaaccttaatattggattctacattggattaactaccaaatttttgacttttgaggtttacaaaaagacaacatgtattttgtttaacaacggccatgaaagaacctattttcttcattttttttttttggtacaacctgtctaaactaacaaaatatcttggatttaggatcattattattgcattataattatcggctatcaatttctgaaatgcactagagtagatgaagagaactagagcttaatccttgattaaataaattatatagaacacgggaccacgaaaatgtcaacctcttataaaccattcaaagcaaaatctaaggcaagttgtgtagaagatagagtgagcccattaatccatagctatataggtctaatcaattatttcacttttttgttgacatttttatcacgaaatatttttccgacttctcatgagctttgacattcgcttaaagaaaaaaagatctttatgtataaaatagtgttttccaaaaaagaaatcataagaggaaagataggaagaaggataagactttgattctcaccaaacagcgaagtttttggcaacttgcaacaccctccacattttaattatccaaataaagttaaataaaagttaaacttagacattctattccatgatgttaaaatcttgtcgtcaagttggtcttactcatatttcaacattcttaatcatacaaatacggaatcgcaaatcttatttatctgctttctttcaccaattgtaatagattattatattttgaacaaacaacatttatgactttacaatttaacaaatataagatagaaaaaaacaagttaaaaatatataatcatctgttaatatggcattaaccattcccgccaaatttccaaataagttgtataacaaaaaaaaagagcagacttgagaaaaagcccatcaatattcgaatgtgatagtacactttaggcatttaggcctttggcccaaactaagtatgttgtctccttcgctgccaaggatgaacattcttggtttcacggtgaacttcttgatccgatgcaaagtcttacccagaagaagcaatacgagttctctctcccgaaacatctccgtactcgccagttatgatcaggaggaagtatcaccgggacgatatagcaatgagttttcgaatcgtaacttggttcacgaaattttacagctttgtgctagaaacggagctgttatggaagcaaaagcttgccatgggaagattattcgtattgagttgcagggagatgttactctgtcgagtgctcttagtaatgcttattccaagtgtggttttgtggagcttgctcgccaggtgtttgatggaatgcttgatagaagctctgtgtctttgaacaccatgatt

SEQ ID NO: 39409 - DNA, 569 bp, Arabidopsis thaliana landsberg
tgatgaagtagcaatcaccatcctaaggcgatgtagaccttgtggaaccatttccactacttgctaccggtaatctcgattcaatatcttcattactttcactcttgactttatggttttgttgtttcaccttctccctttcttcttccttctcactcacctctctgtctttcccccacaatacgccatagagaccaataaccacaagtgctgatcccataaacctaatatacatatatcatataaattcatcatcatcatctcgtttatataatgtttaaacacagagagagagagataaagatgtatagaaacatacgtgccggtgtagagtttctcttcaagaagagcccagctgaaaatggcgacaactacgagaagtaaagggctgaaaacagagacgtacagaggacctttcctctgcatagcccatgacattaggcagaaagctaacgcagacgccaccactccctgcatgatccgtgttttatactagtgtcatatatttttagcttaagattggtatctaatgatcatagtatatgtatgtggacttaccgcataaaggg

SEQ ID NO: 39410 - DNA, 454 bp, Arabidopsis thaliana landsberg
gcacattcacgatgtgtgtgagagccttctcatctgatgtggaagaaggacaagacaaaacaaaacaaacacaacactttgcccttccgctggaaatgactattgcgaggtttttttttcctcttcccgtcttaatgaatgatgttgcactatgattgtattacactaaatcgccaaaaatcaaagcttaccaaatataataatatgtcaaaaagataaaaagttgtctgtctagtagttttccaattgtcaaaaaatatgaaaatattgacaccgtatcaaaggaaacaaacaaaacacaatatttaaaatagcacagacaaataatttaataacttatcgttacaagccaaaattacactgtaaatttggcatttcgagaagaagaagagggagtgatggaattgcaaggagaggaaaggcaaacgccgacgtattgcgtgacgggtgcaag

SEQ ID NO: 39411 - DNA, 755 bp, Arabidopsis thaliana landsberg
  unsure (1)..(755): unsure at all n locations
tttacagaaaaatcacaaaattagcattttaacacacacacacttacatatatttaattggaaaaaatagaactgacaggattttcttcgtgaaacaaatacaggagcacgcattcaaaaaattaaaagggtcatgcaaaaagagcttttctcaaatccgttttgtatataagaaataagaaaagaaaattgtagctttgtttgatgtcataagattcatgtgttctctttaatattattctcaactcttggaaatttgactaattaatatgtaagttgcacaaaataatgtaattataagatcaattcagagttcagaccaaatgttttgtaagatgtctcgaaatcttatactatatatccaccattttttatatatatcttccccaaaggagtatattatgttcacagccgatgaattcgttatatccgggaaagacccaaatcagttcgaaagcatattcttttgaaaaaaaggttcaaattaaacacgttgaaaaatagaacagtttaattatccgagttagtttctaaaaggcatgtgtcttaaaacttaaattgagtgatcactaactaacaacctaatttgtaactaaatttacatttatttcnatttaaataaatttatcgatggaatcataaacgtctacacatcatattggcttctgtttcagatatcacataaatcaataaatctgaatctaaaaaaacaaagaaatgaaatagcactttttttttttgagctaaagaatttt

SEQ ID NO: 39412 - DNA, 1419 bp, Arabidopsis thaliana landsberg
agaaacttcaactgctgttgatatgaaattaaacccaattttccgtgtcagcatctgtctgtgggggtttggccttgcaagctgccaaggctgcagtcaattcttctgcctgttggagcaaattgtaaatacaccaagagcaatttgcacagtgatatcatataaccaaacatgcttttaatctttctttcttttcctctactcattcatctaaccaagataagaaaaagtaaggctaacgtaggccctaccttacgagctctattaatcattatctgttcagcattctccttagaatatctcttaatcttctgctcaatcgcctcgacattgattccatctatcaagtcgaatactggtggaatagaaggtaatatatacattggtcttgtcttgcatgaatagagaaaataaggagcacaagtgaaactaacccatgcactccacttcttccaagtagtcattgtagtctttaagtgatggaaactcctcttcccgtctattgtatctgcatcaccagaaagaaagaaaaaaaaacatgatactcaagaggctgaaaatactctgcttctacagaatgaaaaaattgataccttaatataaatctatatctcatctgttagaaactgtgactaaagatctccattttatgctaaggtatgctaggaaacaatggagcatctcactgggtccatagatgggagaattgcttcattaagtgtatgcagtgaacaaagtattttctataaaaatgatcagatgtgaaatttagcgctatacatgctaagagtctatactgatcaatacgcagtagattgatcaaggggtttaaatatcacaccatttgcacaggccagcatgatatgcaacgagagaaaaagatcagaacgaagaatacatggtgagagattctccttctgacatgtatttccttattttgatgggtagaattagacaccatcaccatggttgcttctgcctgggattcttggcctttcctctacctacaaggatttagacgtgatttcgcaaataaagctgcagcaaatattacacaagtcttatttttactttcggctatagaatctttagagctgaaaaccattatcccaatagggaaaaacacatgaacgagaagaaacctacgaagaaaacaattccagatagcgaagaagataaatctgcggattttccaaggatttctgaggaactaaggaagcaagcataaagcacaatgtttatgtagactcatgtgtaggatatgaattcgacactgaagtacaatgttaagcaagcgagaacagaaagtcgcctaaaacacgatctgaggaaaatagctaatagctatatgccaattcttctattcaatagaatgctaaagaccggagagaagaaaagtgagactcacaggtagaaata

SEQ ID NO: 39413 - DNA, 551 bp, Arabidopsis thaliana landsberg
ataaaatggattactggtagataacgggttgaaccccagataataatatgttattgctcacttttagccacttttcttcacaaaatgtgctgctattttcctttcacttgatgtctttgtcactgaaactggtgtcttctgctgaacaaacccacgagcagatagggaatcttgaagcagtggtgaaactttaaactcctctatctcggaaaggccatcaagttcctattgatatacacaaaacaaaaaaaaatgtaatattttcttgggatagaaatcccaatgtaattacatgagcatatgcaaatgaaattaaactcaccacgacgagtgaatttagattgatgcaacaaccaagaaagactggtaagtgttcccaatatgattcgactaacaaagcttccaagcgagacaagttggaaaattgaggtaatgctttcaccatggagtgatagccacggatgacctgtgtatatatgtagcaagaaagaaagaatgtattcaagaaactgtataaacatatatgctatggaataaaacatttaaatgta

SEQ ID NO: 39414 - DNA, 740 bp, Arabidopsis thaliana landsberg
  unsure (1)..(740): unsure at all n locations
tacaaaactcgaatatttattggattcttgagaagaagtttctcaacgtgaaggtaactgatattacgacttttcaattgacccttatgagttatgaatttttgtgactatgtaatgccacaagttcattccctgaagtcaaggaccaggactatcaaagcaataaatcctatcatattaacatgcttttgttatctgatctgtctaggaaatgaccaaactcccccgcctattatgtgggatatggcaagctcatatcttaaaaaatttaccagcttattagaaacatcaaatccacctaaaattgcaagaaatataactcagtttcaattctaccagtataccaatcaaatttaatgcaatgattgtcccaaagttcaagttgatataatacttactatcaattccataaacattgcgccaaaaatcaatactgtgactgtatctgtcagggtgagaaataggtgccatgtataactgtcaaaagaaggcaaacaacaacctatcaaatattgccttctttcccaaagtcatcatttgatcatactgtgatataatatttaaagggattataatcatactgttgcatgtgatgggagaattaaacctccaggcttcaaccagcgatctctagctgtgataacacttnccagcatgctctacatcacatcaaaaacataatacgggaatgagagaacaggtggatcaaggagcaataataatttgtagcgtatcattta

SEQ ID NO: 39415 - DNA, 575 bp, Arabidopsis thaliana landsberg
ctcttagccattgaatttaatttgttttcacaaaaagagttactggtaacaaaaccgttttaccatatcttaactttgaaatacggttttatatcattgttttacatcaagactatggaatgttcaattaggaaattaacaaaatgtaaaacagtatttaagaaaacaaatcttaaactaaattacttttctttgtttatattttagtataacatttttgtcttattttaaattgattttaataatattacgtgttattttacaatttttaagggttttaaaaccccaaaaatacatattgtgaatgccttgagaagctcctcattttatcaactgttacgagttttttacatgttttaaaaaaattgagagtttttttactcatttttctcaaaatacacttatactatagaatatgtatattccacacttttacggagaaaaaatgattggttcttaccaatttcttttttgaaaaatacacatgaacatatcaccaatatatatacaacaaaatataatttacagagatattttttgccaaaagtgaaactatatttcaaaacgggaaaaag

SEQ ID NO: 39416 - DNA, 634 bp, Arabidopsis thaliana landsberg
cataaaaactgtctttcaatggctgctccaatcgccataggaacacgaggaaccatcggatcgcttgtacgtaaagaaatcgactacttcaaaaacttctctacatgtcatccccaattcgatccacggagaggcaattcggaagaaaacaaaaatacatttaaacaaagagatcggtcatcatcacggttgggttcttggttctctaaaactaaatggagaaagaagaagcggcagactcgtggtggcggtggcaagttttttccgagtatgtgctcggaggtggaggtttccggcgagaatcgagttccgggtttcaactataggatcttgaagagtgatcatcagaagggcttgcgtgtgtagaaaggagtcatcatttatgcggattacggcaaagacaatgagatctacatacagcttttcaaacttaaaaaaatgtctcattgtgttacatacttacaagttacaatgtcaatgagcatatattcgaacttttaaaatgaaaaaagaaaaaaaagtttatgctaaaggaattcctttttcgcttgatccggtctggcctatattcaaaattggattccgctcttattccggatcaaacgtggtatatagccgaataccctttatattc

SEQ ID NO: 39417 - DNA, 524 bp, Arabidopsis thaliana landsberg
gtaagtttccacaatctaaaaattggttcaaccaaaatatatgagtttttagtagataacatttctatacggtaattaaagggtgtaaggattgtcgcgttcattaagggttgcatagcttctacttggaacactacttattgtaatgtattactaggcaataatttgactagtcaatccatatccattgtttatttaatctattatgtctaaatttaagaatcactaaccttatataaatatctacaacaagcctatgtaactattttctaacaaagcatacattactattctattcacaatgcttggaccgatgatacttaatagtttatactagttttgtatctttctcaattggttaatgaacaccaatatgagtcttaacacatctacccttctctcttgtatttggtagatcataagaggaagaaataaagaattaaaattggtgatggctactagagactcttcttcacggagggtttaacctaattaagctcttaagccaaggagatgacccaata

SEQ ID NO: 39418 - DNA, 643 bp, Arabidopsis thaliana landsberg
caggggtctttaatttccatcttcgattccgtatccttttgactttgcaacattcccttaatagactacggaagtgggtacagataacaattttcgggatttgcttatgcctttttttgtcttctgatttgtcgttatggtaagaactaaaagattagatattcaaaatcatctcataccatatatgtaaacattctgcttataaaataccattctttttttcataggtgtatgtatatgttaagttgctaaatcacgataaatctgctgagaatacgttatcttccttctatctttagctttacatagactaagaccaaattaaccataacccataaaactctcctacaagatctctcttcttactaaaccttttttctctttaagatatattttcagatttttatgccttatcatagcattaaaagagaaaaaagagaaagaaaatccaaaagatatatatttatcaagaaaataaacaaaaggtgagtgatctcgaaaccctatatttgttctttggagtcgtccgagaaatgtgcggtttccgttaacccgcaaagactttttcatctctatctatgcgtatgtttggttttgtctccacaaacatgtctcattgtttctttttgtctttttactcaaa

SEQ ID NO: 39419 - DNA, 360 bp, Arabidopsis thaliana landsberg
gcgtagttgtttgaatttagtcctctttccgttaataatatagatttttttgctaatacttacgtggtttactattttacactttaaaatattcagtgttgtgtttttgtaccttaatgatccttagttgctctattgtctcagtctgtcacttgaaatgtttgtttttttggtcatgccagatgaaaaacacccaagagttagaacgaggagaactgaagaagctcgttgatccagtcggttccaggttcactacaacaattgccacagcgggaaccactttgatcctcgggtttgtttccggaaagactgttataggttgacaagttagatactgtgtgtcgggtttctcattaatag

SEQ ID NO: 39420 - DNA, 529 bp, Arabidopsis thaliana landsberg
tgccccagctatcgtaagtaaagtaataagtcataccataatctgtttatatatgcgtgccagctttcagttgggaaacctcacaaggttgaagaccttccaatcgcttgaagaaagcagattcagggtccttggctgcagccaactgcacaataaccacaatgtggattgctttagtacctctgcatattctaatatgccagctaattatgaaaggaaaagagctcagaacttgcataccgcattgacagttgtatccattctatacacttgaaaatgtaagaaatacatgccagctgatgtcaccttccctgttttctcactctcttcctgcataaataaatagaagcttgatactgtcatggaatcatcatgagaaatatgaaaactttttgagagctagctaaaagttttcccaggtattatgtaaaagaaaatcaaaaatagtgtgcctcttcttcatctaaagacagttccataacatggtaatactacaagaaaatactaagagcaatattcttttgtacct

SEQ ID NO: 39421 - DNA, 346 bp, Arabidopsis thaliana landsberg
tgaggtaatacagatgatgatgggaggtctatagaatggagagttgtaagctttagtttattctagaagacgtgtattttgttaatggttgcttcagatgtaaatttatataagatcatttgggtaggtatttactctataggctatagtaatatacactctacaaactggcccttttggcactcatgtataaacacgaggttttaattttcacattagtagacccgggtctggcttaataaatttattttggcattaggtccttaccttattggtggaattatttacaaacgagattaaaacaaaacacatggacatttttggataataatatttctcaacatat

SEQ ID NO: 39422 - DNA, 469 bp, Arabidopsis thaliana landsberg
aatgtgtatgtttttccttttatgtccccttgttcctccctacgcatctttttttttttttgtgcacgaagaccatacatgcttcgcgttaagacttaaatcagagaaagccgtagaaccttcttccatgttggcttcatgtttccctctctctctctctctctctcgtgtttctcctttgtcaacatagaatgtttgtttactgcctaaaattatgaaatgataatagttctgtctaatgcctcatctttttatctcgtacatttaatttgaaaactgactgttttgctcgcactaaaaacacatactaaaatgtcaactcttaataaaagatatagacccaaagacgtcaaatataggtgtgtctacactataaaaaaggtgatcatcaaccaagtttagttaatgtgacagtcaactacatgagcctaatgagatatcccatctcaccggattagaccggatcgca

SEQ ID NO: 39423 - DNA, 562 bp, Arabidopsis thaliana landsberg
tgtctccggtaagttcagacatactgatgacctttcttctgccaagactttgacacgttgtgcacattttgtttattttgatactatttaccggtgttgctgcgacgactggcgtgcctgataaaacatgaacagcagctgctcgcgtcatgttgctcattcttggcctgggtggttgctctgtgcgcagcctctcccctcgccatgagtctctttgaaaataattctggtaagacgcatttgcgaatattaactcctttttttttcccgtgttctcacccgcatgcgcagatggccttgacgaagagattcgcaaggcgcaggccgagcgtgccaaagcgcaaggcacggcggtcggcctgggctccacgggcggctttgattcgtcgctttatggtggtggttccaaggaggactacgtgacctccatcgcggtcaatgcggacgaggaggagctggaggcggactatgcggcgcggagaaagctccccagttatacagcaccgtcgcaccttgtgtccgacgtgcctcgcgacgaggtcgaccccatgaagaccaagcg

SEQ ID NO: 39424 - DNA, 548 bp, Arabidopsis thaliana landsberg
gcgatcgaatgtactttccactgatttttctagaaccttgtggaataccaaggtttgctatttcttccgccagttttacgcagagcctatttcctccagagaatgatatcatgaaacatttctactaaagcaaaactatacatatgtgcttgagcatacacaaatctgaagctaaatactggccaatattctaaccaacaaaaatatgtatttgattggcagtagacatgggataatgactgactaaaccaaatcagcttaaggcaatgagatagtgagaccgtgacattgaaaaatcaaaagtagaaataaagacctgaacttcgagctccataagtgcaagctcacttttgatgttagttatctcatgttcctgtgatttaagctgcaaaaagagttcagtagtcaacaaacaaatcaaataactcgttttgtcccttgatacaatgtctatttacaaagaaaaaagatgatgtataatagcatcaaaaatataaaattgaggattaatccaaacaagattttgttttctcaagtattaaaaaaga

SEQ ID NO: 39425 - DNA, 464 bp, Arabidopsis thaliana landsberg
gacggcgggcgaggcggtgcatctgggcaaggacatccgcaatgtcagcttagctacgctctcatgcaaacacgtgaccgagggggtgcaccacgtgcttgggctgtaccggctggtgctggcacacgcgtgattgcgcggtgccgcccgctgctcggcaccttcgtcgaaatccgcgcggatacggagctcgatggtgcggacgaggcggtggacaaggccttcgccgtggtctgcgccgtgcaggacttgatgagcttccacgcggccgacagcgagttgtcgcggctcaatcagcgggcccacgagcagccgcaatgcgtccatccgtggacgcggcgcgtgctgcttgcggcgcagcgcctgcacgcggacagtggtggggtgttcgacccggcggtggcgccgcagctggttgcgttggggatgttgccgcgcgtgattgggctgcccgtgcctgccga

SEQ ID NO: 39426 - DNA, 567 bp, Arabidopsis thaliana landsberg
caacacgtttaaaaaactctcaatttttttttcttaatttgcgtttaatcttttgagtggaaaatagcaagcaattaatctacactctctcaaagctttttcattttgaccaacacacacttctccagtccaatcaacggcgtttgatcaatcatatatttcaactctaaagatcttcttctttgctgggttttgtattttggatggtgagaaaatcttagattctgaagaacgaaaaaagatgccggtatctactcgatctaaggtgatgaaacaggagcgaaacgagcaagagaacacaaatctgaatcttccgttgagaaatccacatcaagggttgaaggaaaagatgagagctttgactctcttgtacgagcagcaaaagagagcctctttctctctcaggaaccctaatcataatcagtctccgaaacctgaagatcagagattcaagactcagctgcttgattcttccaagaaaggagacagatttcatcgcctggacggtaaagattctacctttgttgaagaagataccaaagagaacaatgtatttgaagcagatcg

SEQ ID NO: 39427 - DNA, 337 bp, Arabidopsis thaliana landsberg
tacattgacgtggtgacttcgtggattgattcattatttttgctcttggcaagtttttgagatgtttagaattctctggtccagcccttgatccttggcgttccttcttcaaatagtacaatacatattgagtttcttttggtcatctcgcaaaccagttcaaactatagtgccggctccggcctaaaacccaacaaacaaagactttaggcgccaaaatattatatattaatttgacggaatcaaaacaataaaaccactttgatatatctcataatatatatggacaaatattgacgggccacatttaccggagcattctcttccacatgttact

SEQ ID NO: 39428 - DNA, 744 bp, Arabidopsis thaliana landsberg
tccctagttgcattacatcagtttcacctacatgtcagcttccacttattttccttgcgtgtaataatttacatacatgacaaaatcttacttcttaactcgtacatgccacttgttttgttgtctgctgtttacacgtattaggttatacgcttaatcaggctggttaaccacacaactcttgatttagtagactaatctaaatctataacaatatgcattatcttggtcaatggtttgaattcaaaagatcaaaaacgctagtaaattatatatgttggtaatgttattttttgtattcacttatcatttttttttatcaaatgtaatgtcaaattaaattcaaaagaaaaatatcgttgttacatcgattttatcgtgtgtttaataattttttatacataactttaatttttttgttaaaaatcagattctttcgcataccagagttaaagactcttacgtatcttctatctctgcttgctttgtttgagaagagttgattccggacttacttatcaatccttaatcgagctagtggattcagattttctctataaattcaaaaatgctaaattagttatattggcaatgttatctttgtatctatttttcaaatagtgcatacattttcttctcataaacgatacaattagattttatgatcttcaaactcggaaaaactataaagttgagacttcagagctaaacttttgttataaaagagaaattatagcttttgga

SEQ ID NO: 39429 - DNA, 900 bp, Arabidopsis thaliana landsberg
aatattcgctcgacgtttggtgcagcgaatttgttagcattggtggctttttccttttcttttgtaaccattccctcctttgagggagagtagtgatttataaaatcttgtcgtccaaaaaaatatatttttttttataacaaaaagtaataagaaagaggatgagtaaacttaaactactaatatatactattgtgtaccagcttcaactatttctatttccggctttctcgtacttgtgtagatattggttgatcctttagagttaagcttctatctaatatcatgaaaaccaaaaactatctaatataattgatttttatatgagtgctttgaagtgaaatatttttacgtaaaataatataataatcaaaatccaaaaaatatgcagaaagtttatgagattggtaattatgctgaaagtttatgtaatcgaattgtccaactccacattatgaatttcattacaaatctcttccgtataatttttaagtttcacttgttatttattaaacgcatgcattttcacattgaaaaagaacattttttcaaaagcataataagaaccaaaataataaaatgataagaacaccaaaatgttgaattggaaaagagaaaaaaagaggaaaagaagagaaaaagaatcgaattctcgaggacctcgtgctcgtcaccaaaaccattttaagaaccaacttacctttcccaaatacgctttttcatctaaccccaaaaataatcaaaatgaccattataccctcaccttcatcttcctcgacatgtcactgcctccaaccccaccgagaaacgccagctccgtcaaatattaccaaactctcttcccctctctctttttcctaaaacccattaaccattactgataacccaacgagattacct

SEQ ID NO: 39430 - DNA, 419 bp, Arabidopsis thaliana landsberg
agaaaccggggagacatatctgcttttaactgtttcttctccatgatttacttaacatcagtctttgtgagtctgcggaaagaaattcgattcattctatggcgggaatcgcctgggaatagctgaagacagaataagtcaatccacactggagaccatgttcaatcattgagcagctaactcatagccagcgaaaccattattgcgggtggtacaacaaagaccctacgtgagcatacaccagagagagatctgatcacttattataatctcatgtgcgtactcaacataggtgcaaatatgacatatacatgagaaacctgtggtcttaatgtggatatacatgatgcctgatattttatcttgcatcaactaaaaatctggaaaaaaccctaatgtgcggtgggttctggcctaaa

SEQ ID NO: 39431 - DNA, 1468 bp, Arabidopsis thaliana landsberg
tagcttgcaaatggtgagtttagacacttattcatctaaatcacagggtattggtgatgaatgtggaaagttattttctagctattttcttggagattctttgggttggagctattgatatgtctcgttgatctttagtgtcgaagatcttctgtttcatgttagtttcacggtttcaactattgatcttatggattggtctttgaaatctgtatggaaaactcttctgtgtcatgttagaattaaggtaaactgtgttagttgatcttactatgaatctaatgtttcttggttctctttgcttttcttttgattccatcacattggatcctagcttgtaaatggtataaactatataaaatccctaaaaactatatctacattaaaacttacaataaggaaaaaaaataaaaaatctaaactaaagcataaacaacacacaaatttgttggccaaaaaattatacacacaactttgacgaaaatgttcaaggaattttgcagattagtaatgttttctagaattttagattgtttttggttcacacaatgacacaattttgaagaaaagaccttagcccacggcccagtccaaatatttaaacgacatcgttgagaactcgtccggttaaaccgggctgttgagagatttagccattatggaaggatcataagacaaaacctaaacttaaaccgaacagatttgtcacgaagaagaaatcagtgtaagcaaacaccatccctaggcaaaggtgattccttttttcccttgttttctgatctcttaaagaattattctgaggttttccgattacttgatattttttgtgttttcgtggaggtttatagatttctcgtttaggggttttgtggtttaatctgcttcttcgccactatttctgatacattatttcactttttcggtaaatcttgcaattgaaatccatgtgggctatcttttggttgttcgtgtgattactcagtgtaggtttagtgactcatgtagtggactaaaccaattgttgttggaaagctgttaacttttttttattagggatttgaggatcattctgaaatgaagaatttttcgtttgttcattattgctctgttattatgcaattttaaacttgtggctggcttcaaaatcaaaacttttactctgatttaacaataagatttatgttgatcctgaactatgtttatatactctcaggttgaatttagtttgagatttatttttctttgatttaggtagaagagaagttatgactgaattgcaaatggaggtacaggtagataccggttcttctttgcaggagcctactccgaagccgcaagtcatgtatagatgtaagaaatgtagaaggatagttgctattgaggaaaacatagtcccgcatgaaccaggaaagggtgaagaatgctttgcttggaaaaagagaagtggaaactctgaacaagtgcaatg

SEQ ID NO: 39432 - DNA, 600 bp, Arabidopsis thaliana landsberg
gacggctgacaccactctatcttcgtacgaaaaatcatttggattcatgcagattcgcgcttatatttttgtcactcttgacttaaataagttgaactacgatgtgtggcgtgagctttttgagactctttgcctaagttttggtgtccttggtcacatcgatggatcttcaacaccgactccaatgaccgagaaaagatggaaggaacgtgatggacttgtgaagatgtggatatatggcaccatcactgattcacttcttgacaccatcatcaaagtagggtgcacagctcgagacttatggctctccctagaaaatctcttccgtgataataaggaggctcgtgcacttcagtttgaaaatgaattgcgtactacgacgatcgacgatctctcggtacatgagtactgtcaaaaattgaagtcgctttcagaccttttgacaaatgtcgactctcccatctcagatcgcgttcttgttatgcatctactcaacggtctcacggagaaatatgattacatactcaacgtaatcaaacacaagtctccatttccctcattcactgaagctcgctcaatgttgcttatggaaaagagtcg

SEQ ID NO: 39433 - DNA, 510 bp, Arabidopsis thaliana landsberg
aagcgcttggcggcgctgcttgtggaccagacgtggggtttttctcgcagctgttcacgaccaattgcgattggtctgtggcaacgctgggctggatgttcacgctgtttttcgtgtttctgggtttggctgctgccatctggggtggctggcttgaacacgcaggccctcgcaaggcgggcgtcgttgctgccttctgttggggcggcggcatgttgatttctgcgctgggcatctacatgcaccagttctggatcatgattctggggtccggggttattggcggtgttggactggggttgggttacatctcaccggtgtccacgctgatcaaatggtttccagaccggcgaggcatggcaaccggcatggccatcatgggctttggtggtggtgccatgatcggttcgcccttggctgctgaactcatgaagcactttgcaacaccgaccagcgtcggtgtgtggcaaacctttgtgggtgatgggcgtgatctatcttatcgcgatg

SEQ ID NO: 39434 - DNA, 548 bp, Arabidopsis thaliana landsberg
atactcaaaaaataaaatgttgttactttcatacacatgatttcataaccaaaaacaatattctaattttagctttagagttgaattaactattaatttgtaaataaaatagcaatcactgtttaaaaataaaatttaatttttattataaattgttttactacaataattttattttataaatttcagaaaataaattagagaaaatatgaaaaagataattttttagtgaataaaaatataaagtatatattaatatgattcttttttcccagattttctttaattttttattttattttttacttatcagaattttttaaacttttaatataaaatacaccgctttaatagttaccgattataaaagcgaatatcaaaaaaattatttaaaaaattacttttaactttttttgtatagtattaccttatttagtaaaagtttactgatgaattaaaaaaataaaaacttagtatagcttcgtatcatcgatcaaaacgtgataggtggaaaataaattttataagctttgcttacgtcatcttac

SEQ ID NO: 39435 - DNA, 746 bp, Arabidopsis thaliana landsberg
ataaactatttctgcattttgatagagcatactacttttgtttttgtttttccttcaattaattgactcacgtgtgaaatttgaatgcacgtgtagtagattctagtcttttaaatttcaatttgaccatcacgaaacacatagaaatgtgtgtgaattgaatcataatacatataaagacatgtaaaatatgataacacttatagtagataatataaaatatatatacagttttgatagacaagttatttcagttttaataacatatattttaaaaaatatagttaaaataaattcaaattttaggagttgtgtgtattgtaaacctatttgatcaaattatatgtactttagcatgattatatcactacaaaacattgcagaaagaacattttagaacagctgtatattagctaggttcaaaaaaataactacaaatgtcaaatcatgggcttaggcctcttaattcgacattgttactgggtatgttgagcgacccaataagcccaacaaactgtttcccaccaatgcttgaaggccatatattggacaaaggatattagtttataaaaacatcttcatctcaaaattatgtaggagaacaactttaacatccaatagaatatgttcacttttgttaactttatatattaccctaggtcgtatcatcttttcaatgtgaaattcctaacacgttctcctcgaaataatggttttccgtccaatttcgaattgatcacactatg

SEQ ID NO: 39436 - DNA, 374 bp, Arabidopsis thaliana landsberg
aaggccataaagacgatcatactaattaatttaaaactggttcaaattgtttaatcgcattaattaagataaagagcaagccaaccgcatgttaattcagaaaaatccttacatagagcaaatggagtacaatcaaacaaacgccatgctctcaaagattctgtctgcagcaaaacaagaaaaaggaacatagctacagaagctgccaagcttcatttggtttgtcagacttttgaatcttaggtgtagattgagttacttcgtccgggtccatctttgagaggaagtttgagagaccatttggtaaggcagaggttgtgatcaaagaagctctaagtaagctagtggcctgtaacacaaaagtagtttcaaaa

SEQ ID NO: 39437 - DNA, 679 bp, Arabidopsis thaliana landsberg
ggctctttgcctttgattcaatgcatgatctctcgagtctttaccaaaccaacttgcctaattaatattccgcgtacgactctttaatccccttttttgtttgcttaaaaaaaaagattacaaattattttgtttgttgtttttttttttgttttttttaatcccctttgatacaaattattttgttattgtggaaatttaacccaaattatttgaaattctttccccgacaagcatctcttattgtggttggtctaataggattaatggtcgttttcgtgagtgatgttatcatgaaacaagttaattgaaaagtgttcataatttggtttccaaaatttaggagtatgattaggttcagagtatcataagtttgtatgtcttagtgacaaagacaagaataggtatacttacttttatgggttaaaccttttcattttatcaagctttaattaattaaaaatcacagattgaaagggaaattaaacgaatgacgagaaaaaaacaatgtatctgctgcttacctgaggtcggtcattgggttcattgcattgatcctaatatactaaatttatggttcatattcaattttatatttttagctagctccaacaaaaacaatgtttccgtacattttcgttgtcaaaaaaacaaaagatgattcatgacctcttaatta

SEQ ID NO: 39438 - DNA, 558 bp, Arabidopsis thaliana landsberg
  unsure (1)..(558): unsure at all n locations
acagtgtttcgtgannnnnnnnnnnnnnnnnnnnnnnnnnnnnnnnnnnnnnnnnnnnnnnactcttcgtctggtctaccaggtcatgtcgagcgctccttgttcaatgctgtcactatcgggtggactcgattccaggcaagcgggtgctgctgggggtgttctgtcagattcatgcacacactttcgagaccagtgcattgtcaacggccgtcctggcggggcacgtcactgtcgttcatgaaacggcaacttccctaacaacctcgacggctgcggaatcccgcctgcaccaccgcaaaatgctgatgtattgccagattgtcgggctttgatggacaaacgatgtccgatgtttgaagggcaaagctgccgtgttcttcagtaattgctgccgaccgtctaacattgctcggggctgcatggaacaaagcttgagcatcaggtttgagaagatatcgcaggttcgcaatcttgttatctgattcttgcagactaccgcgaagtagcgatcacgcaaccatcgtacttcaacttgcaggaggctgctgctgcggc

SEQ ID NO: 39439 - DNA, 3265 bp, Arabidopsis thaliana landsberg
atgagttacttgaactgaagctttgatgtcttcagagtctacacccaactgcagagtaccatgctgcagcgcgtgcagtgggtggatgcgcaatctatgtcaggtaaagctctcctctcatccttaacttgattcttgttctgactaggtaatgttttaatctgagggtttaactggagatatgtttttttttttcaaattatatgagcagtgataagccaggcaaccacaactttgatctattgaggaagctggttcttcctgatggttcagttcttcgggctaagcttccgggtaggcctacccgtgactgcttattcgctgatccagctagagatggaatcaggtttgcctgctttctaactaactcttctcttctttattttccactcctaagactaagcctaagcctaactaacacctgcggaaactgaattcttttcagcttgctcaagatctggaacatgaataagtttactggtattgttggtgtattcaattgtcaaggtgctggttggtgcaaggaaacgaagaagaaccagatccatgatacttctcctggcacactcacgggttcaatccgtgcggatgatgctgatctaatctctcaagtggctggtgaagattggagtggagattcaatagtctatgcatacagatcaggtataaaaatcaatcaatctactttcctcaaataagaaaaaaacttgaaacttcagatcaatactaaaagcatgagcttggttttgatttacaggtgaggtggtaagactacctaaaggtgcttcaattcctctcaccctcaaagtccttgaatatgaactcttccacatctctcctttgaaggtacgttttgtcttgttgtatattaccatgacttggattgataacaacttggagtcataatgtgaatgacgaaatttggctatacaggaaatcactgaaaacatttcgttcgcaccaataggacttgtagacatgttcaactcaagtggagcaatcgagtcgattgatatcaatcacgtgaccgacaagaatcctgaattcttcgatggagagatctcctcggcttctcccgcgctcagcgataaccgttctccaacagctctggtatctgtcagtgtcagaggctgtggtcgttttggagcttactcttctcagcgtcctctaaaatgcgccgttgaaagcacagagactgatttcacgtacgacgccgaggttgggcttgtgactttgaatctgccggtgacgagggaggaaatgttcagatggcatgttgagattctggtctagaccaccaataagttattttttttcaccaattttgtcattcatcattttgtagtataaaggcatcaataaattaggaaattaatggtcattcttcgctttgtaataatgtaatctcgtcaagttggggaagcaccgtccccttgtagttttgttctaataatatagtaccttaaaacaaataatttgctcctaaattcctaattaactatttttcggctttcctctcaaatgaaactgtgagtttttttagtgttggccaacctcaagtccccaattagaaatagtcgttgaagtaattatccaaaattaaatcctggttatttggtctatttggaaccaaagcctaatgattttatttttagaatattttttctgataaagagggtaattatatatatatttagaattgttggcgctttacaaatctaaagtcgtcttagccaaacaattcgaaaaccgacactcttacaagttacaatacctaaaaaatcagaagaagttccaggtagagtacgtaatttaaagggtcaatacgaataatgatgacaagtcagttatatgatgatcataaactttttgacgccttacatactattcgcaccaacgaaattaacagatactagtactattatatattttgaacaatgaaatgtgtatggattagtacgtcatcatctcgtctcttcaaacttcattttgttgtacgacaatccatatatgagctaactaatatttgtgttccatattttacttgtttggtgtaaaaaaaacgcatatacgaatattttactctgtttttttcttcatctagctattctttttttgttgatatttttccatggaacgtaacatagtgcaacattaatttcaaaaattttaaaaaccccaaaacattagttagcttataaatacacgatcaacccaatttgaagcacggaatcccaaagaattcatacgtccatgtcttttccatctttttcagtgtttaagtttatctttctttgctcttttacctacaccaagtagtaatatttaaaaaatgaaatagtgaaatagtgacatccacgaaaacgatgtgcaagttgaatcgtaaccattaattaagaaaaatacaagagataaattcaaagaaggaagcaataactaaggccaagttataacaatgactagataaatttccaaagacatgactctcgaccatacctttaggtctctcaagcaaactacgcacatgcctttaacttctgcctatttttacaccatacgcgcatctacatattaacactagtatatacaaatatttgtattaattaattggtaattacaaaacaattagataaagtataataaggataagtacgtgatcttttgtgcttattaatcgataggaatatatgtatgggcatcaagtcttcaccattgttcatgatgtcccatgcattgtagtatttttgtaggtttctttaagccgcaacccggttggccgctagtttctttgaaattatactaaaagacacctttgaaatcatagaaaacaatgcttgacatggtttcaataacaaaatactaaactttaaataattgacatattagtaaatcataagattcataactaaatttccaaagtaacttggtatttttatttttattttggaagaaaattggtattttcattatgataaattaatgtatggttttaattaactaattaatgaaccatatataccaaatttcacgagacgtgttgtactaactactaaagacttttgagactaatatttttcatcatttgggagttgaatgcaaagttgttcccgataaacttttcagttgattttcaagcaaattagatcttgttggcgttattatttaccataccatttcaatcattacattaggtatttgccgtttacgtatttacacttcttatttgaatttggtactttggcacatttacacttcttacgtatat

SEQ ID NO: 39440 - DNA, 2544 bp, Arabidopsis thaliana landsberg
attatacttgcatcctgcttataacaaaagttcattggaatgccacttttgtatgataattgcgggaaacagagcatacagcaccttaaaatcctgagaaatggcatcatagaagcttgtcaatggtacaatgttatcgaaatgaagtattggagcggaggatgccaatgcaccgattgttatgtggggatacttgagtctgaaccacgctgcaagcactgtcacaagacatgacacacaacataacatagtttatgagaaatgatgagtaataatgaggtctcatcaattgattatagcactgaaagtggtgggtgtgagcttacttccaccataagagccaccaaagacaaccacaggcgatgcctcagacgatagattctgcttcaagcttcttatcaggattgcataatcagccaacgcttgctgagagtttaggtaacccaatgtctcagctgacttatgcgacttcttcccaaatggcgttgattctccatagaaccggtgctgcaacaagcagacaaaacaccattataaacatttggagtctctttcttcaaattacagatgaggttaagtggtttgcaaaagctcatacttcaatgaaaacaagaagagcccggaacttgggagcaatatccagcatgaaaccggtgttggaagcaaaccagtcgatgtctccttcatttccagtgtaaacaaagatgggaccaccttttggccagaaacggttgctgatgaggtacttctggtggaagactttgtagctgtctggtgtgaaactgaagtggtcaagattttgagggaagtaacgagtttcaaaaggtaactcatgttttgacttggacaccttcttctttagtcttagagaagaaagatggtggaaacctcctggagaatacgttgcttctgcaacaatagagaagaacaggaaaacaagacacaaacaggcagacattttctcaccctttctctcaaaacaagaacaactcaaatacaggcaaagaggcagacgaagaagtaggtttggtcttatgctaacaaaattggttttgcattcgtcaaacttttgttttcccaagtaaactcttttggagcttgtgaagtgaaaacgtgagttgcatcagaaaaggttttgtcctttatcagaacttgtgatgattctgcctcttcctctctctcaactatcaaagcatgatgatgatataaaaaagactaaccatcaatcaaactctcacacaagtggccgaatgatccaaacaaagctaagctcaatctccaagaaaacaaacctttggtttaacaatatttcgttagaatccagttggtttctcccaaaacaatactgccaaaacacaaaaaggtctataccaatgaggctatgagatagagaaaaaaaacaccttcttatcttggaatagtttctgataagagttctcaaattaattgagatctgagaaccaataattccactcaacagaacctaggtaggctaaactgataaattgaaataatcccaccacaaaagtcacaatcttgaacaaaaacaagatacaactcacatcagtttgttgtcacaaacttagagaaagctgaatagagcaccacaaaggcacaaactttgttcccaaagttgaccactttcataattgtttcattcattctttaaaaatggttttaggcccacaatttacttttcaagcaaaacactgatgtatccttattgctgtaataaccattcagaagcatgtcattgaaaaggtagtagctaagaagaaagaatatggtttacaagtttcaactaatacaaagactagaccttttctcagatactgcttctgttgctgctctgagatctatctaatttcatcactcagactaccaattgaacagaattaatcaaaattaaaaacatataagtattattgagcaaatcagaatacccttctctcagacaggtggaagaatattcactcagccatggctgctaacaaaaaaaaggtagcaaagaagagaagacctctcttcaatgtgtacaaattttgtagccccgccaaaaaacagagcgacatcaacttctgttcagttgacttcgaatgtatcatcaaatagcctcaaagaagaagaagaagaagaagaagaagaagaaggagcagacaaaaacaggggaaaatgatagaaagagcgctaaagagatcatcattgcgcgaatgtgactcgtttgatgagatagtttcagatcattggattcgctaccaccggaaagtgagaacggctagaccattggcacttctgggagcaaagcctcatgcttaaactaatgagagaaccgagtcgattcagagagtctatgcatagtccaagtcacagcgcttctaaaagaaacaaagaagatgcatttacttacccgtgagcagaccgggatgaaccggaataaaccggattgattagtaattaacctctttttcttttttgtgcacaacagtaattaaaatcaataaataaactaaaactagaattgaaaaatagttgggttttggttta

SEQ ID NO: 39441 - DNA, 1487 bp, Arabidopsis thaliana landsberg
atccgaggctatgagaacataacaacctcccatccgatgatgatgttctgaagaattgcatccgaagggagcttttttaattggctacaatgaacaccctatagatgttgtggatcttgttgggctggacgttgaaaacctaaatatcctagaaacttttggcgggaatagtgaaagaagcagctcatacgtcatcagacgaggtctcccccaagcaccatctaaaacagaagacaggcttcctcaaaaggccatcataaaagcaggtatgtggatgaattcttgtgtattttatcaggagattgtaaatttagtgcaatcttgaattatcgattctattactccacaggtggaccaagcagcaaaaccgcaaaatccctcttgcacgaaacatgtgttgctaactgttggaagccaccacacttcgaatgttgtgaagaggaaggaccaggccacctgaaatcgtaagtaacttgatcaaacacactgctaaatctctgaacttgagcgcgctagaaacttaataaacaaaatatcggtaattggaatttaatgtcatcaattgtgtgcatgaatacagattcgtctacaaggtaatcctggaagttgaagatgcgcccaatatgacattggaatgttatggtgaggctagagtaacgaagaaaggtgcagcagagcacgctgcccaagctgctatatggtgcctcaagcattctggattcctttgctgatgatctcgagcggctatatatcggttagaaatagatgttatcataggcatatataacttttaccagagctacatattagcatatatgatcgacacctacaatttctcgaaagagaaaaaaggatgtctgaaaactaaccttaaaccatagattttggagcggagagctttcggcaaaagttctcttcgattgctcttctgaatttctgaatataagtatatgtttacttgtacttgatgaacccatagcatgataggctccaaaaatatagtttactcatctctcatgcatcaaatatgttcctgtgtgatcttaattaaacaatatatgaactaagcgttaactggtcttacattttcaaaaggtgtgaaaattttgacttgagaatagtttcagcaggagaaaggggaaacaattgacaacgaaatagagatattttttaggcaagattttgcttgcaagagtgacatcgtgaagaagaaaacaaaggaaatatgattaatctatacaagagaatcaatgagcaacttcttttggaccagatgagagacttcatcactcaactctattcacatgaaatagagttttcttagtgtgaaataaatataaaacaagaaaagcacaactaaaatatggagcaagctctcatgtttaaccacagtatgagactctccaagagtatcccataccatctttctgacatcactccctttccctttcaccgccttcatctccatgatagccattcttcagttt

SEQ ID NO: 39442 - DNA, 643 bp, Arabidopsis thaliana landsberg
ttttgtatcttctaccaggtgaatggtctttgatcttattgttgtcttgtccattgttttgtttctgcagtttgacgtattttactattactatccaagccgattggatgaagtcctttttgtagatgctccattcatatttcaaccaatttggcaattcactaaaccgttggtgaagcaatacgcttctctggtaacttccataccatattgctatgtttttatgcatcgattctaattgctatatactacatagtgtggttattcagaggactggactagatggatttatatactttgctttatgtgaaggtcaagttttgctcagcagagaccgtcagaaaggagtactttactgaagaaacattaccatcaaatttccggagctaaagaggtttataagagacctttaagcacttatttcttctgttgttgtcgatttatatgtgtatagataatttttaagtatggagaaaagggataacccttaatattaaaagaactcattgtaaaacctcaaaaaaggtatcagtatacatagagataagaacaaacaacatgaaaagccttcctaaaattaagaaaaaaaaaaaaaaggtaaacaaagcacagagagaaatcatagagaagccctgagaagtca

SEQ ID NO: 39443 - DNA, 654 bp, Arabidopsis thaliana landsberg
aagaaaccagaatatcggccaacagtaagtttgttttcattatcattgttggatcatggatgtttgccgcggtgacgattttaactaagattatgtaacatttatcctgcaggcctgcgaattgttaagaaacccatctctacaaccataccttcttcaatgccaaaacctgtcgcctatttatcttccggttttcccgataaagccggtaaatagtccgaaggataaagcaagaagaaactcattgccaggaaagtttggaaaggaaagagtttcaagagagaagagcgaggtgtcccgcagtttggaaaatctatatccattttggacgaatacagagactggatctagcagctcatcgcaaccggcatcatctacgaatggtgcagaagacaaacttgaaacaaaaagaatcgatccaagctgtgacacattgaagatttctgagtttacaagccagaagtcggatgagagcttaattgatcctgatattgcagtttactctacagaaacgccagccgaagaaaatgctctgccaaaagaaactgaaaatatattctctgaggaatctcagttacgtgatgttgatgttggggttgtgagtgcacaagaagtagcatgttcccctccaagagccatcgaagaagctgaaac

SEQ ID NO: 39444 - DNA, 3997 bp, Arabidopsis thaliana landsberg
agaactatatgttcacgctgattcgagacactgtctttctgaggtcataaaaattgatatattagaaaatgaaaaacaaaaaagaaaagctttcatgtgagatatgaaggtggataaacgcttctcagatatacaaacctgaaacccaaatatatagtggagaaaatcaagcatatcagcagtccttgtagcgggaatggggaaatcaggaggcaatttaggcaagcctggaaaatacttcaatgctgcaactgccgcttgaacctgttcacatttttttgtcataaagcaagacaagccacatagcatgcacgaatgtgtaaaatagaaaattcctcacctcagggaaagttgtagtggcatttgtcgtgacaggagcatcaaaaggaataatgttataagcaattgtgtcttcactcattgcagcgtctgaatcaataacatgcttaagctgtagaggtacaaaacaagcaattattagctgaataggagtttaattgcatcaacttttttggagtaacttttcatcctcatgattccctttcttaagttcaaaaaatgtaagaatgaaacaagatgtgctaaaagaaatctacacaacctcttcaggaatctcttttgccaactgctccaacacacttcccagaactttcagggtggcaaaaactcttttcctttttactgttttccgttccagcctggaagccaatatcaaaccgtatggacaacaattaagctatctgagttatgtttggcgttcaagaacataaaattcacagattatgtgcaaagggaaaagtaataagcgcatagtttatatacatactcgtcagtgaaagcccccgactcacggagctgtttctcctcctccttcaacgtgtcaacattgttcttttctctgtatagcctgtaaaattcttgtagtcgaagaatatcctgacttctgtctatggtcccaacctctctttttgctaatttttgctacaattaacaagtgataacaaagcatttgaatgcaaaaccatgggcaaaaatcacataaataaaattcaatgaagctgatcgtataatttacaagcaacgcatttcagtttccgaaaaacagattcggaattcaaaattatctgccacacattgatcatctattatatatatcaacgacatcacaggattcatgcagcttccaatggcataaataacatattcaatgaagtggtcggtaacaaacatatggatgactgtatctaacatacataagagaaaaataccttaataacagacatcaatccagttttgaactgtaaaacacctctgccttcactattaggatcgagattttgtgcaagtgagtaaccatgctcacatactgcagtaaaacaattgtcaagaagatcacaacagtgtcattgcacagagaaaagaaaagctaaacccgctaaggaacaaaacccaagtaagaagagcttacagattcttgcaatgttgggatcctcatcctgaatctcatcggcagctctaagaattgcatcgatgtccctattgttggatagtgaggaagggacataaccaacaatactgctttgattaccaccagcaactcctcctgttctatctctccgtaaagcagcattcaccagcctctcccaagatgactcagctcgagacattttctacaaacaaaaaacatcaaagtactcagcagcttaaactaacgtaaaacccaacactaagtaaatgaaatgtaatcaaatccaggaagacacacgtgaattatacagattcggacaagtgacctaggcacaactgaaaaaagcaaaataagttgtaaacgttgttctttaacctaggactagttgtaatcaacgaaacaaaactaaaaaaaaaatagagaaaaatttagggatcctgaatctgagcttctcgcgtctcaagttcatacgattgaaacaagtagacaacaaagacattaaaaatggataaaaccccccaaaaaaaacaaaagcgggagttacctaatcagacgtcagaaacctcagatatggagtcgaagcagaattggatcagtcatagaagagaattagccaagaatttagcgaagaaagcttagaagctagctcgcttatgtccgtctttctaagtttcaaaactttttcgttttttagggattttttgtttattttaatctaaaacattacaaagaaaggaatctggatgttttttatcaagaaaaaaaaatgaatctgacaaacaaaaatttaaccgcgtgttgacaaaacaaaaaaaaagaaatgaaaagcttagccgcgttgtcataagagagtctttgggatttgggaatggtgagagagctcaaaggcttttgctttatgtgtgtgtgtgggcgctatctagctcctgctgctgcgactactgacggtaacggagaaagctaaaattaaaaaacaaaaaatggcaaatagagagtggggcccagagtatgtagggtccagtaattaaagtaggacctacatgtgttccttgtttaacctacaatttacaaaatttgtttgagacgtttcttcttcttgtttatgcttttagatcaaaggttttttctttgagagattccgtttatcttttatgtcgttaagatcgatgtctttattcattttgttagcttgattccacaatctttgattagacgtatgctgataaatttattagatggacaaggccacaaggggtatagtagtatcaaacaatagttgatcacatttaaaacaaaaatgaaatacatattttgttgttgttgttgtgagagagaagatgaagaaactattccttttgttgtgtaataaaatatagaaaaaatgaatagtgaaagaaagagacaaagaatcaaagccttgtggatttgtgaaataacacttttttgacccaccagcgcataatattgattagctttttttttgttatttttctacccatttcccatcacttttcttttcttttttctttgccttttgtttttcctatactcaagattttgtcttcatttgaacatgtgttctttgaaatctaaatgcaacttgaacaacaagtgaaacagaaagaaaaataatgagtggtgtaagtgcaatagagaatgtaagaagagtattacaaatacgtacactcatcactctagaattcattatgatgagagttgcatgggttttaaaatgaatatagacttggtgataaagttataaatttttatcaaacgaatcatttagggagaagtctattgatacaatgacacatatggcaatgaattgagtttcttgaaaagataagatcacttgtttaattaatcttgtctctccaattccactcacttgtccgctctctttttatgccaatagtttataggaacagttgacattatgtgcttgaaagcaatgattagtgcacacagtgttttgcgagtcatataaaaccaattgtattaattcagagtacgatctatgtcttactctcagcaataagaatagtatagtttgattaagaaaacaatgttggacctcgacgctctaatcatggtgggcttcgtgagtgatactttatttgtctgtaaagtaaataaaagctgcgacgataattttatattagaattttgggaagattaaacactgctaataatgtataaaaatcttcactaactataatgaagttgaaaattctccgagcaaaagaaaaaaggaaaacaaagattataagcaacagagatagttgtcggaaaaaagacggaaataaccttcatagacggaaataaggctttcgagacgagggtgaattggggaatacggatcaggtgagactgcgcgtggattgaggggatctatgtttgggacagatttatcttttatcactctaaccaaacggtccaaaacacatgcagtgtctcgtcccttttttttttactttcctttctcattttcttgtttttggaatcgcttaagacgaattttagtgtcct

SEQ ID NO: 39445 - DNA, 875 bp, Arabidopsis thaliana landsberg
  unsure (1)..(875): unsure at all n locations
aaattggttaccaaatacatggagatcattgctccactgcaacacgtacaataaatcaacgcaaataactacttttatttcccaataataaatagctaaaatctgcaaattgttcttttcttacgttaacagagttaatagaaatggagattagagacatacctaacaaagaggaatgtagcgatatcaccagactcagaaggaggcaacacactcgcttttggttttagtctgaacccatttttaggataattactgattggccattgatgttaggtgcttaagcttgaaggagatgatgaggataagaagaagaagacttgttttcttctcagactcttttcttgcttcgcctgctgattcaacacgacggaactggcaggtaatggctgatgatagcaagcacaccacatttttcagacacaaatttcccctcctttttgttaaaattttgaccccaaagagaaaaaacagtaaccttcaaaatttcgttatctaggttcctgtcaaattttggtgaagataggctttttgccaatcttgtgtagccacgtcatcatgtatctgatgattttgtttttggagtcaaactagattaaaaaggaaccccaagtttttctagaatattatcttcatctttttatttttctttagcatatgacaagatgcatgcattaataaccatcctatatatatacttagcgttttgaaaagacttgctcattaaaaatctgagcaaagcaatatgagattaaacaaactacgagcactaataaaagttgcaaaccggtaactatgttcgtacaaattttgatttggttagtgttgcaatgtgtgtaatgtattttttcattaatgttgnaacgaatgggact

SEQ ID NO: 39446 - DNA, 640 bp, Arabidopsis thaliana landsberg
  unsure (1)..(640): unsure at all n locations
aaacgagaaacacaaagatttgcttgacatgctcttagattaatgttggtgaaagagaccatgaaatgataattcttgtctccttacttttactattggaaataccttttttttcctctcttttttgggaataatatatactattcatctgtatattgttgaaggagagaatcatttacactctttttaatggccctattattaattaatattaggaatatcaccatcatgattatcacttaacacatgctgatgcccagcaaaccaaatatggagattcactttacttccacttgcagtaaaagtcaataatcattttcaacaaagtatttcaaaaaattgattatatatttttgcccaagatataaaaattgatctttcgccaccttatttacaagttttagaccaaaagtaaagacatggtacaaaactttgctcagtccaaattgataatagacgaatatttgaggaaactaaatatttatttgattactttcgtccagttacatacaaaatatagttttttgacgttgatactattacactagttacaaaaaagactatattacactagatatcatacttgatcatatncaatgatcgattagcaaaacaaaagaatatgaatattttaacataa

SEQ ID NO: 39447 - DNA, 269 bp, Arabidopsis thaliana landsberg
aagaagaacacaagaagaagatgaagaagatgaaggaagagatgccatggattgtttctgagctctactaccacatagattccatcaattgcagttaaagtcgacaattcttgtccttcttactattttagctcaagcaggtatctatcatcatcatccagtatctccaaaaccttggaaccatgaaaatgatacccagaagtcaaaggttccaacttttcaatgacgcgtgacagagacagagtcaaaatcaaaactttttgaccttg

SEQ ID NO: 39448 - DNA, 106 bp, Arabidopsis thaliana landsberg
atgtccaatcggcatccgcaagtgagcaatcctccttctccaaatggcaactgcaaccctagagagacaaatatggagcactagtccaagagtattcttagagcca

SEQ ID NO: 39449 - DNA, 636 bp, Arabidopsis thaliana landsberg
  unsure (1)..(636): unsure at all n locations
gagacacaatcaaattagaatactagctcaagaagcaaatcttccaatctccctgaagaataattaggtcatttattacacaagtgtacatttttattggatttaagttgggatcaaaacgtgattgttctgagaatctctgactttggtattccttctgttgccctccatattatgttttccagtttcgaacatagcttcttgtagaactgcgataccacaaaacaagatatcactctaatccgcaacacagtaatgatgaaactattgttattggatatatatttataaaccttgtgatattcaagagtttcaccagcagcttttcttacgtctaccatgaaaagcgatggtgccacctcgtaaatctgcatgtaggttaatttcaatttgctaggtacccttaaactgaagcaaagcaaacttatattacaataacaacaagcaataattacctctatcacaacagctaactgtccggccttgatcgaagataatccctcgagccttgtctgttgagcacatagacgtaacanatcataacaatggtactctcttgctacatttaaaatgataattcacactaggactntcgttnttgaccgcagagatataaactaaatttccttgcaatct

SEQ ID NO: 39450 - DNA, 290 bp, Arabidopsis thaliana landsberg
cgaagcacgtgcgcgcgcaggaacttcgcgagcggttggcgcatatcgccgtcggcggccgattcggcgatgcgcgtggccaggcggatgaagcgcagcacctcgcccagcatgcgccagaagcgcggtcgcatcaggttggccggctgcgcgaagacgctggccaggttgctgccgcaccattcgagcggctggccgccgaaagcctgcggcacctgcaccgagaaggacatgtccgccgcggcggtggtcaccttcagctgtccgaacagccgtacgaggttggggta

SEQ ID NO: 39451 - DNA, 594 bp, Arabidopsis thaliana landsberg
aaagctcccaatatttttggtttacgatataaacactacataatacattaaatttcactatctaaccatttatcatcctttgtatgcttaacttttttattctcatcattttgaaaaccacattctaatcatatttctgcttttatgtgtaaaaccaacaaagatgtacatggttgatatacacacgtagacataaccttgacaagcaacatcttcgtcgttactcattttacagatttctacccatctgccttcaataaaacaaacatcaacctattagtaactgcatggtaaccaagcatacgtgagtttttgttgtaaggaccggtaaacactttgaacctataaacacctccgcctcttccaacaactcagaataatgaacaagatcacatgctaaggttttgtaatgcttcttacaaacaaaagtttatttaaaaagggaagggagagtttataaaatataaattagcattgacattggtgtgaggttcttcacataatcatatcattctgaccaaaatattagtcggaaaatggttagaaacacaccaatatgagttgttttcttgtagttctgagaaaacatagatg

SEQ ID NO: 39452 - DNA, 360 bp, Arabidopsis thaliana landsberg
gacctggctggtcgcgccgaccacgccgcccgtggtcatttgggtgttctgggtctcgccgctcaacgcgcggttattgtgccagatcaggtcgctgacgccgtcgccattgatgtcttccgcgcccgccaggacaaagcccgcgccgggattggtgttgacattgatggtgccggtctgggtggtgccattcatggtccagatcacggcgttgccgtcattcttctggaacaggatgtcgctgttgccgtccccgttgaagtcgccggtggcgatggccgtcagggcggcgcccggggcgaagctggccgcgctttcgatcgtgttgccgcgcatcaggtccaccacgatgttgttgtt

SEQ ID NO: 39453 - DNA, 713 bp, Arabidopsis thaliana landsberg
atagaaagcctttcctatcataaagcaaatcagtggtaggataagaggcacaaaacaaaattcttgaacctctagcctcttaagaacttaatcagttggtcctggcttgatttttccacgaatccttctctccagggactttacattgtgttcgtcaatttttttgtctatggtattcatcaaaaccaattaggtttttattcatcaatccaaccttggggttctatgggcccaattctattctggttcaacaaaaaggctaggattgtctctcttttttaccgtcaacgatttcgatttatagctttttttgggtcagttttctagctactttttggtcatcattttttttttcagaagtgtttatgaatttttatatagacctaactcaaacacaagtcgtaaaccagctcaaattaaaacttaagactaaaatttaaaagctctaaactactttgggatatggccatatcggactaaaacttttattttagtaattcactggttgaacactcgtcctgttggtccatgttaagattaagtcttgtccattttggttccacaaaattggataattgactggtttaagaaaataattttcttttgcgagaaggttaaaaaggtaaaaaaacaatctgcatgtaaaagattgacatgcatgtatgtttacatgtatacactaatacacatatagtttggaagaagctttatga

SEQ ID NO: 39454 - DNA, 724 bp, Arabidopsis thaliana landsberg
agctgaacgcttatctgctcttcaggtttaagaggtttagaaagaagaattaaaaaattacatttctaacagagtttggttggttagctggtcccgcgagtttttcttggagttcacttaaatccttgcgatcaatttgaaaaatccaccaagaaccacacaaaaactgatctctgtgcgtctatataatgaagagattcactgtttgctgcttctcaaacaaaatacataagaacggagatcgaaatccagacaaggtttgtctttttcccttaacaaaaaagattaaatctttgtgtgttttcttagaatttctctgttacccattagccaatttctcttgatttgatctgggtctgattctctttttgggttatgttatgttagaaatcaagagaaagcatggaggtttcaagaaaagacaatgaagaggttagggtttggatatgttcctttcttcgttgccaagtcttgttcatcttttcagacactttcttcatttctaagttaaccttttgaatcttttagtcttacctttctctgtttaatcatttcttgaacagcctgaaaaacagaacaacaacaatgtagcatctataattggttctgatcgcaccaatgtaattgtgaatcatgacttctcttccgggatgcattcgtggcatccgaattgctgtgaggccttctgtgtcaccgctgagtctaatgtctctcacggtgtttt

SEQ ID NO: 39455 - DNA, 578 bp, Arabidopsis thaliana landsberg
  unsure (1)..(578): unsure at all n locations
gtatatatataatgttagcgtatgtatttaattctagattaaagcatataactctttttccttattatctctatggatgtcttcatctccgtgagcgtctccgattacaggtccattgatgtactcaaacttgaccgatttcactaatttgtcattgtatcttactgttatcattcgagcatcgtcgtgaatcccatcatcccactcgttcccaaggacaccaccttttgcatttagtttcttgaccggaggaactaccaccaccgcaaaatttgctccgagtgcattgatacgatttacggacgaccttcctcggaaccccacaatcttatcgaacccttttgcctcaagttggaattttgtaccaaccggtttcccaaatttctcagaacttctattcattgatgttttgaaagttaaagacgagatgaatccatctttgtcgtcttgtcgacagttccctccacggatttaacatactcaccatcttgatcctttagcacanactgcaaaaaaaaggactcttaattagagcgagagggaaaaaaacaaaaaaaagaacatgaattcaagaaact

SEQ ID NO: 39456 - DNA, 693 bp, Arabidopsis thaliana landsberg
aattcctcaagttgtgctacttgatatccttctcttgtatgtttgctccgtccaatattctgctcagatactttctttttccaacaaaaagtaaatttttgtcaccaaatattatgcaccttttggattaagtatatatatttgattatattcccaatggcttggagcaatcattttatggttttaaaagtagaataagcagttatagtgtgaatgtgtgatatttattttaaaaatgtttgaaggacactcaatctgttatttccaaaattgtcccgttctattccatgttttgccccaatgtcgaccaaactatttctatgatttgccccaatgaagagaatctataaaccaaatttcatcaattttgtaatttgaaaagctaggaggtgagtttgcttcttttattgtcaggaatttcttctgtttccgtactggtgactggatctcttaggtgacgctgcttatatacaaaggtcactctgcatgttagaagttgaagggtcataagcaaatgctatagttattaattcatggttatttttggtaaaagaaacatgcaccaccacccattatttaattcatggttagttggaataaactgaaacatggggaaaaaaagactttgaacttctattgtaattagaagttcattgcttacaaaaaataaaattgatgcacaaaattttaaga

SEQ ID NO: 39457 - DNA, 584 bp, Arabidopsis thaliana landsberg
  unsure (1)..(584): unsure at all n locations
accgtcccttctggttctcaagtgtactgtcaatgggcagaacagagcagattccaaatcggtgactctctgtgtaagtttttcacactgtattgatactatttgattcgttaactgcaatcctagtttcttcgcatatgacacaaatttatacaatgcagtgttcgtctaccaatcaaaccaagattcagtgctnnnnnnnnnnnnnnnnnnnnnnnnnnnnnnnnnnnnnnnnnnnnnnnnnnnnnnnnnnnnnnnnnnnnnnnnnnnnnnnnnnnnnnnnnnnnntgggccatactatttcatcagtggaaacaaagacaactgcaagaaaaacgagaagcttgtggtcatcgtcatggctgatagaagcggcaacaaaaacaccgcatcatcaccgccgtccccagccccagctccctcaggagaatccgctccttctccacctgtctcgggaacctttgagatgaccccagcacctacgcctactacttctgaagacactccaaacagcggagcttcttccttatcctttgtcgctgctcttcttggggctgctctagcttccactctattcctacact

SEQ ID NO: 39458 - DNA, 538 bp, Arabidopsis thaliana landsberg
atgttggatatgagttttctctaatacttctctatattttacaactgccaagacaccatacatttttggtaagacatttaacataaataaaagttggcctgcaatggaacactagctaacccacagcttcaacgtaaaacatatcgtttggattgttattcccagttacttgggataacaaggtaatcatctctcatcattgttttcctcctccactgccaactgcgactatatcgatttttacacttggtcctggaacttttcaacacacatatatatttatatgatctgttagcagttgtgacaaagtacatctacaatttcgtgcttacttaaatctcaacctccatcccccgcacattcatggatgcttcttcaccatcgtcttatcaatgaagtaagcaactgcaacaacatacatgaattcacgcatcattcgttagcatcacctttgaacatacacgatagatactgaaacagatgtaagcaaaggttccaactttcttcttggacttaggaaaatgcattcacatacctc

SEQ ID NO: 39459 - DNA, 536 bp, Arabidopsis thaliana landsberg
catacgcgatccatgagatggaataactaaatcaactttttttatttttactaaaaagtaatcgtaaagggtgtgttatctttatgtggtaatgtgaaaaggataagaatttgataatggacatgttagagcatttcagaaggacacaacacattaatatgcgcattatcgttttaggaatcatatcgtaatacctttttacctaacgaacctttttggttttaagctgatgattaacacttgtaaccttaagaagcaaaattttacaatatctttgtcacgtgtcactcccacaacttagtgcaccttcacatgactgcctaaaaagagcaaagaaagaaacaacaaagacatggtccccaacaataatcaatgttggcaagattttgcccatcttttttgtttggacaagacttaaggactgtgatgtatatgcttcgtagggtcgattcataacatcaaattaaaagaaatattatagattttgtttccgtcaaaaactttaagttttaatatgtgaacattttaataatgat

SEQ ID NO: 39460 - DNA, 310 bp, Arabidopsis thaliana landsberg
tgtggaaagctttggaggtcaaagaatggaatatgtattgcacaagatatggatcttttgcgtttagtgggatcgtatggcttaggcatcaacccattagatagatttatggaaaggcagggtataacattggcgttgaacgcttgaattataacccagacgaaagaaattcatgaagcaaccaaaatgtttaaacatatactaagatgctttatgacactagtagctctaagacatgttcaagccaaaacaccaggggaagaaacccacgaaaccgcttactgggtttatactatctatgccgattacc

SEQ ID NO: 39461 - DNA, 612 bp, Arabidopsis thaliana landsberg
  unsure (1)..(612): unsure at all n locations
gagtcttatcgagtctccaacggaaggacttattttaactccatgtgaacctaattcatgcgggtggtggtcttcctcctctagcccatcttcttctcccatatcagcccaagacatttgtgcacttgccgcctcagaaacagttgactgagatgatggcattgcatgacttacattgtctgacaaagatccaaatacaaaagccccagctttcaaactatctaatgagtgagaaacacacaacttcccgtcataaatattgtccatcttgttatcaacttcttcagattccatgttatcaacttcttcagattccatgttatccaccattgaaccagaacccgctttaacttctccattctctatgttactacaatgctctgtaataaggaaacacaattacacataaggtaagagaacaaatacagaaatctcacgaagatagcttgattacatagaatattcgatatctctaatcatcacaaatctatgaattagtttagaaattattgtaactccaatgattaaattgaattcaatagctgaagaaaatntcgaaacagaacacacaacatttagtagtaaccgaaaattctcctccgtttctttaat

SEQ ID NO: 39462 - DNA, 434 bp, Arabidopsis thaliana landsberg
gctcttcgtcgacgtgacgaggatggcagcctcccgcacgcgacgcgcggtgaggcaaggttccatccgccgacaaatgcgacggacaggagcggaattgtaggcggcaaacgggtcttgaggcaagttgacgcctggatgccttgccggcccacccgtctcaatggcgccagtggcgtccgaatccgtggctggtgacaccgcccacggaaacgctgatgccgccgcggggatgctcgcaactgccgaaggccttgctgaccgtcaccgaaccgccgccaaagctgccggtacccatgtggctgccgctgatgatgccggtgctgatggaaccatgcacttgcggcgtgttgtaggcggagtcatcgcacggcggcatggtcgccccggcatcgtcggcaacgccgtcgccgctatgatcgccgtagtacacg

SEQ ID NO: 39463 - DNA, 296 bp, Arabidopsis thaliana landsberg
ttttctgtccgggcacgcgcgccaattacggttatatgcacgtactaacggtgtgacgagagggacttttcttactatttcatcagcagagtgtgggggttccataggggctgagtcactatgggggccttccatggagttatatggataaacctaaccttaacattgatcctaaacatgccctgtatgatatactatagattcagctcttgctgaacatcctacaatccatcgttacatatgacagtacaaaactagactcttgtccaaacaaagatgtatcagagtggcacaaa

SEQ ID NO: 39464 - DNA, 733 bp, Arabidopsis thaliana landsberg
tttttctttttttttctattgagtcattagctttggcaatgagttcagataattttattttattttattgctgcaaacaaatgataattgttaggcgatagaaaaaaaagagaggataaatctctatagtaaatatgctgcttacatatgatcttttgtaatgtcttttttttgttttgtctaaaatcttttgtaatgtctaatacccatatttctcaagaaaaccttcaaactcaggatccaaactactcgataagatcaattagaaaatggatatggttcctgttttcaagattcatataaaattaacaaaaattcttcagatttatcaaacttttcattgaaacttttcatcaaagagagtgtggagtccacgtcataattgtgggatccatgactacccgatccaaccacaattaattgctaagtgaagtatatcaatttcataaatctctgtttgtttgtttctttagaaaattcttgattatggaaaaaaggagagatgtgagatttgggggacctataatggttgccattacccattaggcgcactacaaaagaaatgttttttttggttttggaattagtcttgacatggaagccactcatcgattttgaatgctttcaggagccaaatcaattaaacccttgttctttgaaaacctcttatctcttggaaagggcaaagataagaaagaagatgtgatggcacccttagatagattaacccatc

SEQ ID NO: 39465 - DNA, 576 bp, Arabidopsis thaliana landsberg
cagagtttccattgctataaacatagctgtcatgcttcacaaaaatacagtttagaaaaaaaatccacagacacaaaatcacatattaaccacaagcctcacagtggctttatcataaggtataagaggtggaagaacatttaccctcccatttcagaagttgactctttacactttaacagtttccggcaatcagcaccctttaagctacaaagctttgactgcaataaagtacggatatcaatttctattagctcataaacaaagacttgtaatcataagcaaagtcaagaagataaatcattgagctaagctttgttccattatcagttataagaaccaaatgtacaaattaaagcatccagccatagaagtgactctcgctttgggaatagtcatatcttcaggaacagaatcaaagtgaaaataaacaatagcgaaatcaaataaacagatcacactcaccatgagcataataggaaattgcccaaaatcaaacttgtctctaacaacgactccatcattatacttaaagcaaacatcagccataaacgttcctgtgtacgaaatcttcgc

SEQ ID NO: 39466 - DNA, 677 bp, Arabidopsis thaliana landsberg
ttcttcccatcaaactcactcaccagctcctcaagtttcttcgtcgtcgaacggagaatcaaaccaagcttattctcctctgttttaagttgtgtcactaaatgttcacagtgcttctcaagcaccaatctcatgatacttgcttcaatgaccaatctcaaatcagtttcaatctctttctcctctaaaacacttaaccttcgagatattgactcttcaagcaaaccaatgggcttctgcttcatttcaaccactctcagtcgttcttccttcttctccagcgaggcgaccacgtcatcaaactgaagcgaaaactcaaaaattgatgaagattttgcctgaatcttgtctaggattttgagatacccttcactgttttgctcagtaacgtctgattctactgaatccccttgcattgccatattctcagagacataaaccctactttttagttaacaaaagatgggtcataaaggaagaaacttttcatgaaaaaatacaaaaatgagaatgtacagaaagaataaataatagaaacaaaaagtaggaagagaaaataaacctctcttgagtttggtcttcggttgacaccaacggtggtttctgagccggcgtgtcttctccgggaactagtaaaactttcggtttcaacatttttttcgctgtacgaacggagc

SEQ ID NO: 39467 - DNA, 556 bp, Arabidopsis thaliana landsberg
agtaactcaaatcgtcccggcttcatacattgagttcgttgaacgtctagttcttccacagttcaaagatatgccgtgtgatgaggtaagaagcaattcacattaatcgaattcttttataattagacatttttatatattttcgttgtaatgcagatcaaagagtttcatagacgcgagggcttggagcaagctagcgcctaccacataatggaaagcacccgtttcacagcgtaaatatagaaccagcttgttttgttccgctcaatatgtcaagtatgtgtacgtactattaaaatgttttgtatcttatttggacaatttgtgtgtgagatatttctgttcttgtgttgtgaagtgacggtataacttaatattacccgttaccgacgaataatggaaaacaaagtgtcatggtggggtgtggtatttgtggtgtttttgcatgtaatatcttttgatagtaacgtgacacttgattttgatgacatcgtaacacctcttggggttgaagaccaacgtgcccaatctttcatttaccttagtgtaatcgtct

SEQ ID NO: 39468 - DNA, 865 bp, Arabidopsis thaliana landsberg
ataagactgaccaactctacgactccagttaattttcatgaactgcgatgatgctaacttaacagggggctatgccacagtgctcccaagccggaaacacacaagaaataaggaataagcaataccaaaattgaaagaggagggacaactctcagacgaacgtgaaatcaaggatttttaactaaaccttctcagctagagaatcttcaaaactacgagctttctggagactcatgttatctgtaccagccacaatgtgaaacctcggtgtaaatctatcctttcgcaaaacagagaggagactgagcatctctgctgtgtgtccccctggcgattaaaaaaaaccccacaataacatatcataatatgcacgacattactgagaggcaattgaagaagacactgcattaactcttcttaccagaaccaagaacaatatgagtagtaaaagactgtgaagctccttttggaagtggtttgccacatcggtatataacatacagtacacgaaccattagaagaacgatcgccaaaataatcaataaaccaatgctgaattttgaggccatccttgagtaaacaaagttgcaaccttcctccatgatcgtacttccttttgagatttaaaacgtcaaaatccaagcgtaatggagaaacaactcaaaatcagatcacaaacaaaacgaatcgtcaaaatcgagctcgaaattagacaaaaaaacgaaattgaagattcaagacggcgattataaggtgggaagaaacaaaataaaaaactcaccggcgacggtgaatcccggcggtgacggaacgtaaaggattagagaattgaattttatctggtacggggtgtcttcttttacca

SEQ ID NO: 39469 - DNA, 932 bp, Arabidopsis thaliana landsberg
  unsure (1)..(932): unsure at all n locations
tttttcatcttaaatttaaaaatttgtgatttgtttgacattttttcccaataaaatatagtttcaatttttctattttgctaagatagcaatgtctgcttataatacaaatttggatgtataataaatattttgtctcacaactaacacgttgaaaatcgaccactacttggtacgaaaatagcaaaataaattaatttggggctttatttaaagaaaattattttatatttttctttaattttgagtttgtgtcggccttctatctctaagaagcactacccctcccgcaattgaaggttctcttcgtcgctcacatccaatctctatcgatctcagattccaatttctgcgaatattttcttcccagagagattacagattctagggtttcgaatagttctttccaatctagtcttcttccttttgtttctcgggcgaaatttcccttagggtttcgaagatccgaatctgtggacggagacaattcgacgtcttcttgagctgcaaagatgttctggcgaatggctggattatcaacggcgtctgccgtgagttttcttctccctcaccttttcttttaacggcgtctgccgtgagtttcgggagaacaggtcactccattgagatgagagttttagctgcttgtttgaatcctgtacacgtttcttattgatggatttagctattagtgcttcatttctggggatattggcagcttcctctgcttttatagacgaacaagntggaaggtgaagagattctatatcttgaccagtaatgacgggtcttcttgatgatatatgaacactgtcttactggaaagcgggagactatcccttgtagccgaaaggactgactgatttgttgcattctgcatttcatagacaagggaggtgagatgtatagagtgacgagaacttttctgacgt

SEQ ID NO: 39470 - DNA, 1458 bp, Arabidopsis thaliana landsberg
  unsure (1)..(1458): unsure at all n locations
gatataaagggttaaaaagagttgctattttagctcaagagacagagccactcctgaaaggcaccgataaaatcctggccgtggtcgatgtcttactctcatcagcaccagagaatcgcatcaaaaaccaaccaaactggtacaaaatccttcagatcgaagatctaaatgaatcatcaacagacaacgatctaatcaagaaacaataccgtcgtcttgctcttcttctccacccagacaaaaaccgtttccctttcgccgatcaagctttcagattcgtgcttgatgcatgggaagttctatcaacaccttcgaagaaatctcaattcgatggagatttgaatctcatcttcactaaagtaaatctcaacactcagaaatcgaagaagaaaacaacaacgaatgagaagatgtctacgttttggacggcgtgtccgtactgttacagtcttcatgagtatcctagggtttatcaagagtattgtattagatgtcaaaactgtcaaagagcgtttcacgctgcgagtattcctcagttgcctccgttgatacctggtaaagatgagtattattgttgctggggtttttttccgatggggtttgttggtggtaaaggaggagaagccgccattgctaatggagtagatgcagctaagttcccttattggatgcctccggttttctcatccggcggcgttgcagctcctccaagtggtaatggtgttagttttgatggatggtcaggtggtgcggcgaagagagataatgaggctgtgaggagtaataatggtgttggagttaattcagatggaacaccgaattagagaggaagaggaaggccgaagaagaatccggtttagtgatctcttttcaaactccggtcatgattgttaaaattatggagacaaaattttaaaggcaagttttttttaaggcaaggaagtttaggatcagcgtttgttgtcttagtgtaaactttattatgcatttgttgttattaccgttgtgtaattgtgttatcttgatttactttgaaacattttcctcattacataatttggcaattcgctcttttccacttcacttgttggatggattaaacactttagattctctgtaaataaaattgaggaaaaatcaagattggagagcaaaatagtgtcaaagatataactctactaaaagcagcaacacctacaaagtttagttcttcaagtgatgatcaaaagtgtattctttaacgagtctataagtgaaagcaaaggactgttgataagacttctacttcctgacgatattgaggtcaatgtgtacatacgcaagcgaagccacaaatactaagaagaaagccgatacaagcatgaatggttccgcaagcatgtatattggttngaatgtatagtacacctgcaaaacgtcacacatgtaagcagtttatagtctttttttacagaatcg

SEQ ID NO: 39471 - DNA, 588 bp, Arabidopsis thaliana landsberg
  unsure (1)..(588): unsure at all n locations
atcaacgtgaccactgtgaagcttgtgaggggaggaattggttttcccattaggaaggagtagaacaatgaacttataagaggtaaaacagctagaagcagaaatggggatggcatttctaaattgtactctacagcagaaagtaatggtggcactgataatttgttgtcccattgattagcttgccgcataagagcgaacattatgacggcaaatgagaagccaactatctgcaatatcagacgcaacatgaagaaatgttcaatccctaataagaaaaatctatctcatatttaagaaacaaaaggttatcaagtttggagaggaagtcctgtggcaagtgacacacaggctcatccactgtaataattttatgtagcacaatactattacagcttaattagtaccatgtgagtgcgtacacaaattattaaagatactcaagaggttaaagataaaatacctgaggaccatatagaaggacannnnnnnnnnnnnnnnnnnnnnnnnnnnnnnnnnnnnnnnnnnnnnnnnnnnnnnnnnnnnnnnnnnnnnnnnnnnnnnnnnnnnnnnnnnnnnnnnnnnnnt

SEQ ID NO: 39472 - DNA, 319 bp, Arabidopsis thaliana landsberg
gttttgtgaacttactattttcggctcttttttgtgcatttcctcaagagctttgtcaaaagaaccactgtcctcaagcaaggaaaccggaaacgaaaaaaaaatccagatgagatttcctgcagctacagctatgaaaaatgtgctaatgccaactgtaggttgctcaaacagggaagtttcagggggaaagagtgaacagaacaccaccactccaggtggcttggagagactttccagggttcatatccaattatacttgagagaagtatgcttttgtcacaaaagaatacaggtgtgattcacaaaatgtatgata

SEQ ID NO: 39473 - DNA, 967 bp, Arabidopsis thaliana landsberg
gtttcatgaaatgcagaattcagatgttgagcctgataatgtttccctagctaatgctctctcagcttgtgctcagctcggagcactcgagcaagggaaatggatccattcctatcttaataagacaagaatcagaatggactctgttttgggttgtgttcttatagatatgtatgcaaagtgcggtgaaatggaagaagctttggaagttttcaagaatattaagaaaaaatcagtgcaagcatggacagctttgatttcaggatatgcataccatggccatggaagagaagctattagcaaattcatggagatgcaaaagatgggaattaagccaaatgtgatcactttcactgcggttctcacggcttgcagctacacaggactagttgaagaaggaaagttgatattctacagcatggagagagattacaacctgaaaccgaccatcgagcattatggctgtattgttgatttactcggtcgagctggattgcttgatgaagcaaaacgtttcattcaggagatgccattgaagccaaatgctgtgatatggggtgcgttgctcaaagcctgtcgaattcacaaaaacatcgaattgggagaggaaattggagaaatcttaattgcaatagatccatatcatggcggaagatatgttcataaggcaaatattcatgctatgggtaaaaagtgggacaaagcagctgaaacaagaagattgatgaaagaacaaggagtagcaaaagttccaggatgtagtacaattagcttggaagggaccacacacgagtttttagcgggagaccgatcacacccagagatagagaaaattcaatctaaatggagaatcatgagaaggaaacttgaggaaaacgggtacgtaccagagttagaagatatactgcttgatctagttgatgatgatgaaagagaggctactgtgcatcagcatagcgagaaattg

SEQ ID NO: 39474 - DNA, 504 bp, Arabidopsis thaliana landsberg
ttgtcaggattgacccacgagcgtaacggttatactgattctttaagggcagtcacaagggcgaattagggtcatatgaactgaaaaatcaaacttcaagggcacaagctaatcccagtaattataacactctcattagttagtttcattgtgttcccgcctagagtactctgtccataacactagagaaagagaaaatcaacgataaatcgagaagcaaacctcagattctagcttggcgatgtaagcgattaaggcagctttatccctattcttgatcgattgttcatcaaacccagcatctttgagccgcttccacatgatttcttcagtgagagggcttttcaaaaccctagaattaggcgtaatcgtcaatctattagtagccgccgtactcggcgttatcggaaatcgctccgaacgagaagaagttgccatagtctctcccaatatcacaattacggagaatcgaacctaaattcctccgatctccgatcaaaagca

SEQ ID NO: 39475 - DNA, 641 bp, Arabidopsis thaliana landsberg
tttcatatttgtttcctttaatactattacttagcagtatttttcatgtgaattatgtagtctgacaaattgggtggatgaattaagtagctaaatgttagttgaaaatggttaaacacaatcactacataaaacgaatttgttcatctaacactgcatatatagtagacaaaatgtgtgcatgaactaattagctaaatattttgttaaaaatggttatatataaaaacactaaataaaaataatctgttcatatattaattttctcctttaattcatataaacagctaacagaacaattgaagtagcacctctttagtttcaaagattcataaaccaactttgaaaattttagctgagcaaagtgtaattaatcacaattaatgtttttggataatgtttcctctcattgaaaattattttctcaaatcttgaatgtatatttttgattatacaatttcaccagaattcataaataaaagaataataacactcattaaaaaaaagaagctagaagatcaatgcatctcttgcgacatgttccaaccaattcgcatgttccgacatagttggttgttgattcggatcctaccgtacacacaactctgccacgtcagcaagtttcaacaacggctccacgt

SEQ ID NO: 39476 - DNA, 896 bp, Arabidopsis thaliana landsberg
gttgaattatacaaccggggatccaactttctttttatgcatagtgtttctactcgatcaatttggggttcagggcatgataaactaacttgttttacgtcaaatcctttattttcagtttgttgttgtctaacagggagatgtttttcgtattatttatctaatgtaactattaattgttgctaaccaaaatatcatttgatcctaaacctaaactaaaagggcagaaaattgcttagaatcactagtgtctcaatcattgcataattcatacaattagatgttttagagtgcattggtagaaggatttcaccaaaaccactggctcctaccatcctattttttaggtgatggtgttttgattcaagcaggtctggttagaagacatcatcaagggtgaagagttttgttaatgacaactatatagtagagctattattattattaatttgtagtactagtttaaaaccacaattagtcgaacaattgggattcttttgtaagaagcaaaatcaaatcatcaaaactgaaaatcaaaagacagatacatgcgaaaaggtccaaaaacaaaaattggttaaaaatcaagttttaatcatcttatagcccaagattctcagcccaattttgtctttgttggtgggccttgtattcacttttatttttattagagtcaaccagatcaacagactacagtcaccactcaccgtatcagaaagtcgagaaatgaaaaacgtagaacaaatcattacacttacgtttatttcatcaataattgtatcgaaagtagacaacactcaaaagcaaagagatcatcaacatttgtctaaaaagtaaaaacaattgaacatgaaaaaaaaaaaaaactctcgttattgtaactataatcaataatc

SEQ ID NO: 39477 - DNA, 436 bp, Arabidopsis thaliana landsberg
gggcatatatatttccattaatattacatcgttttatatttcttacttgaattttcagagatttcaaacatttatattggggaccctcaaacatctacgtcaaaatcatgccactatctctaccattcagccctcaagtagcatgctcagcatcactctctgatatcaattatttcgactcccaagttgatggtttgacacatgttggtcatctcgatgatcctcaaactcttgattcgacaaatcttggtcaatgatatcagaaccctaggtttgtaatatattaattatcgtgacgctcaaaccctttggttcatcataacttagtcatcagtcatcacgatcctagaactcttgattcgcaataatttagtcatcactccctcaaatagatggtttgggacatctctctctcaccacgactattaatatgtta

SEQ ID NO: 39478 - DNA, 684 bp, Arabidopsis thaliana landsberg
tgtgataatgttttttttaatcatagaagagacagcgataagattcttcgttttgtttgtttatatacaaaatattgtatccttgttaagacgtgatactagtatccatcatagaaaacaaaacagtatcatccaacttcgatattacaattatttcatgagaaatcttcattggaccccatattatgattttgtgtagtttagattgaaaaggctacttaaatatgtgcacgtttgtatatttatatatcactggttgaacaattcaaccaatattttttgtttttagaaactatataaatttgataactagtgattatctacctgattagttactatggttttgggttttgaaggatgtgaagttagaagaaaatgagcaaaatatgatgacaaaagaaattcaagaagaaaagaaagagaagaagaagagaagaggaagtgggttttcctcatggataaggaaaatgcaaagacaaccaagaaaatccaaatgcatatttctcatttgtcttcctcatcttatcaaagcttcttgagattcaaaccaatcattttgggatattggttacacaatattggagcaatgtatgcaagatcatatgccaatttctatccttttttgcttgtatatttattatatatataatatggatttttctgaacatagaagtttttattgaa

SEQ ID NO: 39479 - DNA, 586 bp, Arabidopsis thaliana landsberg
gttttttcatcttagattttgaaagtatataagccaaaaaaatagaaaaaattcaaagttatatgtgaaaaaaacgataagttaagatgagcaaataattatttgccttcaaatggttgttattatcattttggaaatttatataactgtttgcaattccatgaaatttctgaagctctagtggttcctgcaatttaaggaaacttgttgctattttaaggcaacaaaaaagtcgaaggttcataagtctttggaagatcaagttttacgaggaaactataaccaacacgttattcgtactactaaagatttagggaaaacttgttttcgtaaaacaacattgaagtatatattatgacatctaacaggtgatttgtcaaatggcatgcaagataaaaacacattaatattatgatgcagatagatcagagacgtgatttttacatgataaggttaagaaggttagaactttggtgcactagcaagccttcacacatcacacattcacaccgatagatcttaattcttattcgtctgggccaatagtgtcgttcttccattatctctgtttcacaccgatagtttt

SEQ ID NO: 39480 - DNA, 359 bp, Arabidopsis thaliana landsberg
agaaatatgttgtaagcagcacgacgtccacgagttttaagaatcctcaatccgatatagaacaactgtgaatcatggcttgattggtagttacgaaatccaggagttgttctcgagaaacctacgccctgtgagtaacattgggagaatgagctgaggataattacaaaagaattatagatagaaaaagtttccatcaagggatagcatgtgcctgagttaaggtgatgaacacatgaattggtaaagatgcatcaaaaccagttgccctcagcctgaattgtggattttgatgccatgagctataatcttggcagccaccggcactataacctcgccattggccatttacagagtag

SEQ ID NO: 39481 - DNA, 719 bp, Arabidopsis thaliana landsberg
tttgtagttactgaagtgtttataataacacctttgatacttcttctttaggttgcctgatgaattggccaagagttcaagagtatttttggtcgacccagtgcttgccacaggtaagaaagtcttatcattttagccacctccatattagaagtatagttagggtttgatgttcaaatgtacacgataatatgtgaatgtgaacgcatgacatggtaatacgaatgtttcatagctagaagcgtaggtttagtaacttagtaacttgtattttaggtggtaccataatggcggcgatggatctattgaaggaacgtggtttgtctgttcagcaaatcaaagtggtaagcatatatataggaaacagcttttgtcagaaatcgaagtgttaattgttttgatttttctgattacagatttgtgcgattgctgcacctcctgcactatcgaagcttaacgagaaattccccgggtaatcaatagcagaagatcaactctcaccttgcttaccatttagttaactctctttttactaaactgtgtggctactatttgaaacatttcaggcttcatgtatatgctggaattattgatcctgaagtcaatgaaaaggggtaagtcattaggttctgtggctgtgcatatgaaaactgggcgatgtattttatgtccttatgtatttgtcatgaactaggtacataatcccttgggcttggaga

SEQ ID NO: 39482 - DNA, 659 bp, Arabidopsis thaliana landsberg
tagatttcccgctaaaattgaaattaatctcctgtttttttgtttctttatgttaagccctaaattttaattagtttgggtgagttttagagttgaaaaaggcatccaaacttgtagacctacccattatgcagtatgcaatgcattcttaaactaacctacctcaaaatcaattctaccatatatattttaattttataggtttaaatgtgtaataacggttgaaaatgtattacaaattttacatgaaggtaaaaacgggaaatttataaagtatatcacaaagattttttttttaacaaatatattacaaagttcacattgatattttctatataagtaaaaataagagaaagaggaaaaaaaaaaaaaaggacagatcgagaagcaatgtaaaatggtctcacacatcaattaattgtctcgactaaaggagagcaaggaccatttaaggattaatattcacatgacaccacgcgaccgtaacgccttctgttgacatgtcttcacagaacaaacatacaaagagaagtataattaaaacgtaaaatatcttttatatttcactgaaattaaccaattttataggcaacctttgctaaaatggtaaatatttaaaaggattgggctgaatacaaaactttttttttttttttttt

SEQ ID NO: 39483 - DNA, 837 bp, Arabidopsis thaliana landsberg
  unsure (1)..(837): unsure at all n locations
gaccatcggtatcgcctccaacagaatttgaaggtgtaagctaaagacttgttttgtttgatctcagctatcggggggactgggaccttaggcaagtccaagatcctctggttaagtcaagagaaaggacatctccattggatctttgttactaccaagaacgtagatgtttacagctcgaagattcccggtttgctcttggaagaaaccattcccggtttcaagacaactcaatagagctggacaagttcagatactctgaaagaagcagcctgctttctcaagactttccttttcaaacaaatcatcatcgtcaagaacagttccatgaaagctctacccgtcgcaccagagtttcgccggatatatatgacgagataatacaaagaatgttgacacggaccagttttcctcatctgtacgctggagagtcgccagagagacatcgcctgctttgtcaagactttccagttcaagctagtcaagaaccactatccgannnnnnnnnnnnnnnnnnnnnnnnttctcgtgaaatttataactgggaagtacgaagaatgtcaacaagtaccagctttcctcatccgtacactggagaatcacaagaacgaagcttgagtaggcagagtaacctcatcactcaccctccacagcattggtaagttaagttattattctttgcgtgtttatgacaaaatggatatgaaaattttccaggtaacttatcttcgaaagaacttctcaggatacggtgatggaaacaaggtgagtgaagcttggagtgactcaagcatctttaagaatggcgnngattatggtatattctggttcttagca

SEQ ID NO: 39484 - DNA, 942 bp, Arabidopsis thaliana landsberg
  unsure (1)..(942): unsure at all n locations
aaacaaccctattaactctaaactgaaaaacatgaatttgtaaagtatttgcaaatagcaaacgaactaaggcgtccagaactgaacactcttaaatctccaatatttattttaaagactcaagattggctttctcagccacgccgtctcctccttcacaagctcaaactgtggttgtggctgttgttgttgctgctgatgttgtannnnnnnnnnnnnnnnnaccattaaaggtgtattgataattaccactaatagtactgtaattaattgaaggtgcatgatctgtcattgtagaaaccggaaacacaatctgacgatgaccagtatttacggccgtacaagggaaaacgttattaataatattatcaccattaaaggtgtaactaggaaaattcctatttggctggatatcttcattggaggtggtggtgataccatgtcccgtggctgcgaaaatggcaggctcggcattctggaggagccaaccgacagtttcaccatcggttttaaagccgagttcttttgtcaatctaaatagttggggagcaacactcggcgggatccgaatgcgacgatcacggccaccaattttcaaatggcggtcttttggagtccttcttgccttttggctgttgttaattccatttttcgaatccatttttgtctctgttttttttctttttcttatgtaaatggaagtggaaaaatatgtttgtttcacttggattatatagaaaagttatagaagactctatttctatttatgttatgtatggaaaacaataatggtgtaacaaactaataattaaactaattggtaaatagaagaaatcttaaattctatataggtatatttgagaatgaaatattatcatgtaatataatatgtagtatagaaaatatatttagtggacctgaaaaaaagaagttatattggaa

SEQ ID NO: 39485 - DNA, 611 bp, Arabidopsis thaliana landsberg
  unsure (1)..(611): unsure at all n locations
gcgcccgccgtggcagggttacgccattgtcgcggtcggcagcttcctcggcgtcgtgctcgaaggcttcatcatcgacaccgaccactggcgcagcttcttcctccagctcggcgtgatctggggtttggcggccgcgacccgggccatggttccatcccggactttcggtgcttccccggttgcgccgcgataggcgcatccctatagtccgcgccgttccggtcggggcgtggcgcagcccggttagcgcactagtctgggagactaggggtcgtgagttcaaatctcgccgccccgaccaacacttagcccgatttctaaaggaccgaatggaccatcgggtaacgtctcgggtacctttggctaattgtccctccgacgacgctcttgttcatcatttgtggaccgtctgcgtttttcttcgtcccgcaatcccgatcttctttaatatatgtggactntntctcgctgtcgtccggcgaccatttgtgaccttcttcctgctttttaggctgcagttgcatcatgtcgacccctcctccccatttagaagctaggcgcgcggctatctancaacgttagcgcgcgcgaaagatgagaaaatgcta

SEQ ID NO: 39486 - DNA, 478 bp, Arabidopsis thaliana landsberg
cctttcactgtaggccacagatcacacacatcttccactgtaaaagaatatgcaatgtttccactattacaacgagcaacgggaacaatataaagagaagacatcttaatactaacgaacaagtagagtttaagatcagaaacaaaagaaatcatcatgatcagttcccttcaggaatggatgctcatttctaggcacttttagcttcattcatgagtataacctgaccaaccaacaacctaacagattcatatcatctgatttgatccttcacctacattgagaaactttccactaatatatagctatgacatcgcaaaatgtggcagaaaaaaaaaaggagaaataagatcctaatcgaatgcagcaatcgtagagaaacaaaacccctagaaatgtacacatttgaaaaaaattggggagaaattcaccggcggcgacgagacgatcgcaggaattcttaatcgtctggaactga

SEQ ID NO: 39487 - DNA, 815 bp, Arabidopsis thaliana landsberg
  unsure (1)..(815): unsure at all n locations
gtaaaacctcatcctacccaggtaaaggctttagagaaatagttactcanatttttgatccaatggaagaaaaatatggctggagaatcttttattcctaacctaaacaaaacaaacagaacatgatgcatagtcctttattacattacagcttctactcctaaacctttatatggtgatgatggatgttattacttttgcagtgtctggtaaacaaagataaagcagacgagagagagcaaaatatgtctgaattctattcggaactcgttgttgcttaccgagatcctgcactttctgcatcacaggactcgagagatatctcaccttgagatcacctttttacttgagctattgaagtttgcttatgttgaagctgttggtttactatacctggtgcaatccatgaaagaacacactaaaccggttgtcttgtacattgcgtcttaaccgacaatcaagcggtttttgtcttgtacatttgcttacacttggcttgtgtaaaaaagaaaaaaagtttatgtcaatgtatctctctaaaccggtttaagacggtacacactctttgaaacatgccaaaacaaaacggcggttaataattttaccacagagaatatttagcaaaaagacgatgactagatgccacgtacgcatgggggtatatattgctaatagtcgtgactcggggcgtcatttagatcaagattgatccgcttatggaaccaaaaatcaaataacttcgtctgtgatacttgcttgcgccttatangctacaggagcgcgagcaacgaacgctagaagaagaatctatcaat

SEQ ID NO: 39488 - DNA, 842 bp, Arabidopsis thaliana landsberg
tatgtctttaaaaagattataatgattagttaatttttctcttttccatgaataaagtgcagaatgtgagggaagtgctctaagaactccaaaaaaaaaaaaaaagaagaagaaggaaatgcctgaaactttccatctttccgttaatagactagcaagaactcgaacaaaatgtgtgttcacacatcttctacgatattttttcccaaacgaaaggtttatcattttccccaaaaattaggatacatattcgactagagacgttcacctacgatcaccaattcattaggaattcttgattatacaaaatattataaaatcattatatttagacaatccaaatccaaatccacaagatacaaaatcgtgatagtttgacgtttcataatgcctcatgtggcttacaatatgcttagggtttgaacccatatctaaaatgcacatgctcttagtatataaaccaatgacttggccaatatagacccattgaatatttgtattggttaacttctaacgacgaaatttctcaatattttgtttttagctattgccttttatatagatttggtgaatttttgcgcagtattgctaataattaaataagtatttatttttaaaacatattaaaaccaaaggtcaaatgcatgcgagtggccgtactggattatgcggattacgtgcctcgaatttcatattttctataatacaattaaggttttgacattccataagccaaccattgcttcatcaagaataatttcttttaccaaagtagcgacgctctaatcaaaattaaagttaagatttaattttagccatgaatttagtattaacatgtcata

SEQ ID NO: 39489 - DNA, 656 bp, Arabidopsis thaliana landsberg
gtatcttgtgaccaatggcaaaacatactatacggtcttacggatgatccctgagtatgactgttttggactcaaaatcgaatttcgattatgtgacactatgggcttgatgataactgttttcgttttgacccatgttcaatccaataccgaatgtttgtggaacgtcggaccaggactcaaccaatattaagtgggccaataacataacacgtaaaaatgagcctagctcatcctaattcctttttttctttttttttgatttgtggacagggaagtcaaacttcgatagttggaccgtagttaccatcatatctatatttggattaaaacaaatacgccaaaaaagttcaacatctaatcgtgattttcgtttgcaaatcttttttacgaattttgcattagatacaactagtccatgtatagcgaatgggatataataagaatacatatagtataaaattcgtaggaacaaaagcaaagagacattcctactacaaaccctacagaaaaaaagggaatgaaacaaaagttgaaagcaaaagtcagttgtggcccattcacacctcatctgcaatgatgacgaaacagagtgggaaacccaaaaagtttggcttttatttatacattttcactaattaatagactaataccat

SEQ ID NO: 39490 - DNA, 580 bp, Arabidopsis thaliana landsberg
  unsure (1)..(580): unsure at all n locations
tagatcaaatgcgtatagataaaaagaaaaaaccctaatatatttcccatgatgactagctacaagtagaaattggtatcatctattaaatcgtgattaaaacaaaaaataaactttaaaatctaacattcatgttctattgtcaatgacaaatctaaatattttctcgaaaaaaaaatatcaactattttcaaaacccattttagactccaatacacatgatcacggtgtgacgaaagagagatagctctatatataaattcagacaacgattgataggcactgatggctcaacgaatatactttaaaattgcaatacaataggattgtgaagaatatctcaaccagcaacattacggtgaaaactttaaaaaacaagcaccgatattatataaagaaattgcatgcattagtcatacgttatatgtatatatattgtgtgaaaactcataccttatactatttgatatagaatatgaatgtcataaaccacaagcatttgttaagtataattttttgtatacttattatcttatctttctgattatttatagattntaagaaataaatcttttttttg

SEQ ID NO: 39491 - DNA, 724 bp, Arabidopsis thaliana landsberg
  unsure (1)..(724): unsure at all n locations
ggatgacaaacgagccaactctgcctgtctaatcaggttgttcgtcatcatcgtcattatccttgcttataagtttgtagagctgccaatcttcatctctagaaccaaacgtatcctcgcctttccctctatcaaaggctgctgtcgtcagcagacgcattctctccctctgtgcagcactgagtcgctcgcctcgcccaacacctccagacttgttattcccgttactggacccgtttgttttcagacgcttcttctgctcaactctctccaacacttccttgtactgagcttgcaactcctctaagtaagactctgggttctcactacaaccagaaaacagacaaaaacaaaggattaatatttgctccctttttccctttctaacattgacttatgaattggcatacataccgacgtctttcctcctctaattgatttcttttctctttttcgagttcctcctcattacgcttttgtctagctcgtagccggccctctgctgttgttttaagaaacatttgcctcttcttgtccttaagctgcaagcagcaaatgaaaaaagtcatgaaaattaagccagactctcaaatgagtaaaggatttctcatcattctggaaacaaacctgctcaggagtaagaatatcatcggngacattcataagtggatacttttcattattaagagaatcagggttttcttcatactcagctggttcattc

SEQ ID NO: 39492 - DNA, 513 bp, Arabidopsis thaliana landsberg
ttatcccttcttttagtctatgtttgtttacgtattagtgagaccgtagtttctcgtacggttttatggcaaatgatttcatcataatttagtgtgttatggcattttcccgtgtatttgattcaatctttagctactaatgacataccacgcatatgcgtaatgtgtatttatggttaaaattacatcacatgagagtatcggacaatttacaaaaatgtatacgaggtagtgtataagacggtgtttgggataattcatatggttcagtacaaaataatattctaggctgtgtacatgaagggatgtatgatatggtataaacagaggtgtataagatgatgtgcaagataatgtgagattatgtaaaagatagtatacaagatggtgtgtttaactctgtacaaatggtatataatactgtgtaagggatggtatttgagacaatgtataaatcaatgtacaagatgagatgagctgtgaaatttatgtatttactctaacgtccatgag

SEQ ID NO: 39493 - DNA, 482 bp, Arabidopsis thaliana landsberg
actattcggtattgcggggcaggcagcggaatagaataattccaataagcccacgaccagctatatttatcaaaaatcgacgtagcatcccgggcccgctcaccaccacctttttcctcagaatagtatgtcgccccaaattctccgacaaaaataggaacaccatatcgaacactaaaccgatgaaccaccgcggcatcttcctctaagtaatgcttatctctagccgattgatagtcgattttgttatccagagaatattttccaagatctccgaaagctcttggaacgtatgtgtggaacgaataaaccacattatttgcttcaattggttccatccatttaaaattatctgcccgccctcctagcccaaccccctccactacaatcactttatctggggctattttatttatcattagagccaacctagaaactaaagaaaaataatcgcggctcgtaccgcgccatctttccggaaa

SEQ ID NO: 39494 - DNA, 858 bp, Arabidopsis thaliana landsberg
agtcaatttaactagatcactagggttgtgtgtgtttagtttataaacagatttcctttgtttatctctttagtcctcttttgcttttggaactaggttttggtgatcttactcaaatgctttctttatgtgtggtttttagtcactttcacatcaaaagagcaatccaattatgattttttcataaatatgtgtgagtatgtaaataccaaagctgaagagatgaatgaaaaaagtagagagggataattagactggtgaatatatcatcacatatacaaccttaattagtggtacttgagacaaatatatatctcttggagaacacacaacaaaaatgacaaaatatcattgaaacttacatttgtagaataatcaatattggatattgcaaatcgatcatttacacacaaaaatataaaaacacaaaagctgaagattgaagaatatagtttggtagtaaagacatatgtctgattattttaggactaaagatatgatgcaaactatcatactttaaatactataatttatttatacttgtaaagtaattaaactatataattgaagccccacttccgcatacatgcaaagtatgagaatttattctcactctcaaaaggagttcttcacttttacagccacgcatccatcggtcggtctccgatgcattttctttagagagtaatgttattttaaatctcgtatagatcatattgtatgttagctatatacgaatgtgtacgtacgtggtaagagcatgttataatttatatacacgagaggttgtacttgtaaatccccatttcttagctacttcctatattccctctttccttttttttttaatttttttta

SEQ ID NO: 39495 - DNA, 621 bp, Arabidopsis thaliana landsberg
  unsure (1)..(621): unsure at all n locations
caaaacccattgaacagagcattatattgctgttggctattctgacgtaagttcccaattcacagagctcaagtcaaagtataagtctgatctaaaggataacactaactcgtgacatgattaacaacagattcataacagaagcttttcaagaaaccaacaatttttcaactatcagatttttctgcatccaaattagacattgcctcaatgacagagcaaaaggagctgtcattaggaacaatgccttcacttttcatttcccttagcagctcctctgctagttcaccctcctggtttttactcaaaccttttaacagagcattgtaagtgagaagagtaggattaaacccgagactcaacatctcatcacgaaccatgaaagcatgctttgtatcccctttcttactatacccacttattagagtgttgtaactaatgtggtcaggtttgattcctcttctcttcatctctcccatcagctcacgagcttcctcaaatttcccttctccacatagccctcgcatcaaacaattgtatgtcacatcatcaggattgatattcatcatgtccatctctttaagaagcgaatatgcacggtccatgtngcctatagcacag

SEQ ID NO: 39496 - DNA, 544 bp, Arabidopsis thaliana landsberg
gctttcttaacagcgccaagcatgggctggcccattcccaccaatgtacagactgccaccgtgtcttttgtgacccgcgcaaagagtcacgaagcgatgcacccggattgtacggacggacagattgtgcaagcggtacaggtttccgcgtatccggctaagtacgaccaagcgcaaagtcaagcggcggcattactgacacaagtctccggaaccaacccgattacggtaggcacggcggaaaccgctagcctactagatccggttggttccggagctaaacaattcatatctaagctgacgaaatgggaaacttgggctcaggtcggaatgattctcggcggcggcattctcgtattcgttggtttgggtcttattgcacgtgagactaaagccggtcaagctgtcagtaaggcagcggtggacgttgctaaggtggctatgaaatgaacaccactagtctaattctgttgctgggaatcatcgtggttgctggccggtggtctcagaagaagaagttcagcgggaaggttgtagttggtct

SEQ ID NO: 39497 - DNA, 641 bp, Arabidopsis thaliana landsberg
aaaaaatactatgttgatactcaacatacatgaggtaattaatttgcagatataacatggagtctcaacaggctgggtacataatatcttcaaacaagcataacgcacacagtagcaaaagacatatgatataagtacataacccaaaagagaatgagaacaacttctacaagtgatgtcttcaaatgtttcttaactcatccccatttgctaaagataactcatttctaagattataagaagaagaaataactaaaaggaatcatcttttgcatctgagaaggcagggaaatgggaaaagctaagtggtcatgagaataagaaatagctatcgtatgaaatagattggactagatgacaaactaatggagcagaatacacttcaagaaggcttcagagaagcaaatgtaagactttagaaacccatttctataagcttataaacatgtccagggtctaaataactaccacatagagacttgtagagaaaacgtaccatgttcaagttgtttgatccgagcctttagattctcattttcatctaaattaagatccataatttgatctgcagaagatcaaatcaacactttgaaaagtaaacaacttgcttggaaattacagactttttgagcagattttgg

SEQ ID NO: 39498 - DNA, 800 bp, Arabidopsis thaliana landsberg
gtatgatcgatcaattttcaattctaacaagtctttatttagagagagagagatggttgaaagacatgacatatgacttatgggaagatgggtgtagttaagttgttatgtcactgtccgccaaaccttccaaatcaaacagaagcgtgactgctcagacaaccaaaccaaaccacccaaacgtctgtttccatgtttcaccgtcaactgcttaaaatccacattaatttctttaaaaatatatatattttttccaaccctcacaattcctttattggtcaacaaatcccataagaaacaaaagtttatgtttgtgataaatttgggatattgtcaaacccatcccctaaatgattaatttttgtgttttatgtttttgctaacgaaaacaagagacatatcaaatcaaagaatttaagttatagcttgcttatgaaaagataatacgaactgcatgtgcattctaatcgggacattttttttgtttttattattttaatttacgtaaatgctcctgagatttttgttctcacctgcaaagagaaaacatgatgcgtatgttcaccaacaaaatagcatatatattttggaaagtcttctttgaaatacaccctcatacacatatattttcgggataattgggttagaaagatatttctaatcccaaaggattgcgaattaaaggcctaaaactttttgggaatcttaattaaaaaggattcagacttttctcaatagaaaaaatgtggtattttttctcaagtatttattttgggcaaaatttttttaaatttttttta

SEQ ID NO: 39499 - DNA, 546 bp, Arabidopsis thaliana landsberg
aggctcgtgatgcatccgatagagaatgtaagagtgagaaccctgagaatcccttcacgcctgcacgagaaagaatgtcttcgcgttgccttcggtaaaagataggagttgttttgagcttaataggtttaaaacagagaggatcatcttgtggtctgctgctagatattgaaactttagcagacggatcagccaaccaccgtgatttgatcgggggataagaaaccaccgcctcgatcaaacaatctagcccagcttcaagatcaggactctcaaacaagattttccatgaggctctcacgtctctgcatccaacaagatacattttcccaacatgctcatcgtaaagaccttccaagtaaagaacagagaagttaccgaaattttcccctgtaagtgagatttgacctgatacgttcagaagaagctgtttctcagtgtattcagcttttgtgcggtaaggagttgtctgatccgcgatggaaaagttcgaagcacgccagaaaagtccgaataaaggaccgagcgagagaacatccatgccga

SEQ ID NO: 39500 - DNA, 649 bp, Arabidopsis thaliana landsberg
tgtgggtatggctctccagagtgtcatcataacgtcttttgttacctgaatccttataagggagggatctcggggactgtacacgggcccttaatctctgaaggtctcataagtttctcccgtgttcggggaattgaagctgtgctccattcaattcgtcgatcatagccctgagagtcatccctagtcgtatgatgatttgagtagcgagcatttgcaggtgggttccagttctgagatcgagaattgtcaatacgacgccaagcatgtttagaattagcatttacaacttgtttgccttctgtttttctcctgcggtagtcagaggttgttgggtcttctttagcttgtgttggcttgaccaagtcaggtctccaccacgaagggtgaatccttccatttgtgctgagctggagagttgcagtaggagtagaaagagttaacttcttccctgaagtcagctttcccaagcttttgtcattatctttttcaaacggtaacgtctccttctgagccacaaggtttaaaggacaagattcttgttcgttgtagatcctatgacaaagcttacaccacctaaagagtctcttggagccgagagatacccaaacaagctcacccgaagggatttaagtctttttgcggaatc

SEQ ID NO: 39501 - DNA, 311 bp, Arabidopsis thaliana landsberg
  unsure (1)..(311): unsure at all n locations
ctaatctcgttctctctctctctctctcctctcttccccctttctctttctcctcctaaacaggcgttttggatttgtgttttcttacgtattttttcttcagaaaaaaataaaaaataaaaactctacatgtgagtgattgtgaactcgcacgtgctgagaattccgtgctttttctgatgattactgaacaagnttgggcgaataggtaaatgggccataataggcccaactatgagtcacgtctcaaaacgacagcgtttcttaaacatatatgaacgagttctgtttgtaaatttctcactttattc

SEQ ID NO: 39502 - DNA, 588 bp, Arabidopsis thaliana landsberg
  unsure (1)..(588): unsure at all n locations
ggatttgaacccatctccagagtcgcagtaaatcgagagagatgcctcgctcttcagcatctttttgggtctttctttctaaatccgtccaaagtcttcaactttaggttcaattgggtcgtcgttcacagattcctcgattgttatttgtgggttcttgattcggaggaccccaagacaacgaccaaacgaagatgattttgaggttcttaggtgaccgacccagttagagaaacaagataagtggggttctgttagatttcctgagaaacggcaaaactcaggaaaggatcttttagtatcatattgtttacaaattattccttaactttatgttttgtctatttgacccatcactccgaagcaaaaactaatctgttcttttgttcaagaaatcatcaattagtctcggttttatactaagcatacaatttttctaacgtatatcaacatttcaatttcggtttaagtatttgtgtacttacatattcaaaaaattagtttgggttcgatttggaaggaacanaagttttgtgactcgtgattaaataaagaaagaagggatatccacatgagttttgacctttc

SEQ ID NO: 39503 - DNA, 2242 bp, Arabidopsis thaliana landsberg
gagttcgtctttgctatatttttgttgtcaatttggttaacttatttatataggccaagggtgtgtaaactttctaacaaaactttaaggaaacgaattgtcttttatgaatctagcatttaaaggacacgatatctaaagaaataaattctaaccttttaagagatattctaaaataacattttagtgtgtatttgtgtatttgttatcttaaaatttgtgaatattagaattaacaatttgacacctattcaaacatatctagttgtcataatctaaatataagaaaactaaacaggtgtaattttatcccaaaaaaagaaatataaacaactttactcatcacatacatatagattatattctccaccttagatatggtttttcatattttccggaaaactttttccacaaatcaaatcacagtggttttaattttgggaaatatggccatattaaaactaggtaaacgacaaatcagtaagttgaaatatataggaacatgcaaaagagtaggacagaaacaagatttggttgagacttgagaaataggttaggttatggccttttgggctgaagaataggctagattatgagcaaactattagaagaaaaacacaagtttcggtctggatgtagaaccaatcagaaacacttacattatgtcaacgagcagcacttatttatgtatttaaatgtgaggcataaactagtcgattacaagttaacaactattctattcatccaaaaagaaaatagaacactttctaagatatcactggcagtaacatcctccaatatcatagttacaataaccaccatttccaccacatgtactaaagcacatttcgtccgaccagcacggcggtccgctattgatcactgcgtttggcaaccaacaaacgcacttaccgtttttgttgcagagaccaccgtgtgaacaaacgtttgtgcaatccatggcttgtacacattgccgattcccaagcaccaccgtagtcattaacgcttctctcccatttgccaaagaaagaaacaaaacaaaaaagtgtttgacgtcagttttaagatttgaaaggcgtctagttgaataataaatgatagagaagcctaaatctcaattgttttaactacgatatatgtgtttgcgattatatgagattcaacaatagcaaaataaaaaaaaatcatttgaaattaaaaaaaaaaagaaaaaaaaaatcagttttcatttggaagtggtaaaggtaaacactaaaatgtatatgcaaacaatataatgtaaactgaaacaaacaatcatggacatataaatatctataaaacaatcatggacatttaaatatcaatcgctcagacacatgcacagagtaaacataagattttaaggaagaagaaagagttcgaaccagatgcaagaagataagcgagggcaatgaaagaagtggcattagccattggaactgtatttagtcgtctaaatttgaataattcaaacaaatatagcattgggttttagcgagattttcgtgtgggaactaaaatctattcaatattgactaagttagattatggattaaaaagccatttcgtaactttctcagtatatccttcaacatattctgatattcccaaattttatcaatatcttacctcttaagttattgtattttttatatgaagaagagaacgataattaaagagttaacaactccaaacaatatcatatcattttgaggtttgtactgttttatcggcgtgcatggcttgaaattactattagttcattgatcgattatatatcatagctactactagtgcctagtggaatacaaaaaataagggtaccaattcaattcagtggtattgcgcatgtcagacctaaatctcactttcggcttcacgttgatatcaattcaagggcttatgcatgtcgtatccaacaatcggctaaaaaagaaaaagattattggtggtgcatgcttttaaacatttgggagttcataacgatataaccattggaattaagttttgttcacgtgtcaacgatccaccatttgtttgtaccaacacacgtgccatacgatacaccaccagcatatttattgatgtggctgttctatgttacgcgtgtgtgagtgatcgggtaaagtgattctgacacataccatcttttgcttttatgggccagaaacatatacattaatctttagtcttacgattcttactttatttcaacaaa

SEQ ID NO: 39504 - DNA, 1035 bp, Arabidopsis thaliana landsberg
taatttaacttataaattgattttcatatgtaagttaatttttttagttatattattaattaagtttaaacatcacaattacaaaatatttaaatttagaatagaattttaatttaaaagtaaaaaacatgaatatacctgacttgtccatataatgagtataacaatatgaagttaaagaaacatgttttggggtttagggtaatcatgtggccaacgaaaatcagtggcgaattggagatttggtggaggccaaatcttaaattagagacgttgggctcaagttaaggccttatgggttccacgtgctaccatgatccgtatcgcagacaagggaatcaccattattaactcaaggatcgataataaaatatatgtttctgtgatgaacggtaccactctccaacatctctaacacattctccaaaaccattctcaatatcagtatcacgatctctgtttgttgtggtttttgatatctgtgattgcaaacgatcccactgagttgtctaaatttataggcgcttatgcttttgttcttcttcatctttcaccaaattgacaccaaaccaaattaacaaagactacatgatttcgtttatgcttttgggtctaagctacagtgtttcgttttcacacgtctaaaatcacatcaacttgtagactagtctttaaagtcgaaacaaaactgagcaatactgtcaaatagtgtgtgggaaatggaacgaacatgtttttggacaaaacggtgatgcggcacttaggagggaactggttcaagcgtggcctgctcatgccactcaccgtttaagtttgactgccacaatttgaccattccatcacttgcagtgctagctaaagtcatgccactcatgttccattccatctgccaaacctgacaaggaaaaacaaaaactagtgtaatttagttatgtcttatgccaaaattgcaaatcaaaccctataattaagttctcagcggaatttgatacctcgccttgatggacagaaagcgaggagaccttctttactgga

SEQ ID NO: 39505 - DNA, 549 bp, Arabidopsis thaliana landsberg
  unsure (1)..(549): unsure at all n locations
gtggagtactaaaaatgtagcaaaaataaaaagtagatgaaactgtttttttgcggatctttttttatggctgcattgtgatcgatggactaattaaacgagtctccgaaaatcataagctttatagaaatagttgctttttgcatgctcagatatgtatttatctttataaattcaattttcactctatctgagattttttttccataaaatttggaagtatcttgaaatggaagtattgcatacgaaattttgattgtcatgaaaacaaactgattccttgtagaataaaaacaaacataaggaaaatatagagaggggttaataacaaacacacaaggcgccagtctcgtgtaagaatgtggcatacatttatatgtattcacgtgcgtatgtgaatggcggttgtcggtcaatctcccaaatccatatcaaccccaaaatacactacatttctcggtattgacaagaaattaaaaaaaggaaaatatctcatgttttcttcattttttgatataactntttttcttatattctctctggcatata

SEQ ID NO: 39506 - DNA, 430 bp, Arabidopsis thaliana landsberg
  unsure (1)..(430): unsure at all n locations
attatttttgtcccggacgtagttcgggcttcataccattaatgcatatattttggaaagttctatgctggttttttcaatgaaaaagtgaagaagaatagtggcacaattctccaaaacggttaccaattaaaatttcagtgacttttgttaagtcgtccattgtaggccgcttattgggccataaaagcgataatagtcagcaaaatccagtagccgtatttactaaactcgatatatgatgaagaatgaagatgaacctgtatccaaacactccatattttttgaatacagataaccatgcagccaaacgttgcttaacctctgcgttcgttatcggcgatttcgaaattcgaatcatcatcatcttcctcgatagtcccgcgctcagtcgaaattcaaaactctctcttnctgaacgatcacattc

SEQ ID NO: 39507 - DNA, 479 bp, Arabidopsis thaliana landsberg
gcttcacttacgacattattggttatcactcatcggctgatgtgggtcgatgtatcatccatggaaagtgcttatttggcggcatcagggagcactttaccacattttggagacgttatgctactctgctatcgctggcttgacgttaggcggtatgtttgtttaaatttcggttaggctaattaattagatgcatgataaggaagatggattttgttagaagcatatcttggttaatgcggtagggacatgcaagcattctataggaagacgatagaacaacacgaggcccaatggcctacactttttggttgatgcatgctagctagggaccattccaagcaaacattctacaaaaatttccttgtatgacgagtacacacggcaacacaagcatatataaaccaatcagaattttaaaaatattttataaacttgtgtcatgtttggtcgacactcgttagcgacaacactaaata

SEQ ID NO: 39508 - DNA, 602 bp, Arabidopsis thaliana landsberg
cggaattacattgaaaatcctaacagcaaccacgggatatacttcttccagtatatcatggttagcgctgtttaatttgcagataagctgattgagtaataccatgaaaccaaccatttcctttggctgcaacaatacacatacacagtaagactttttgttgaagaagtaatcaaattagtgtgcagcatcattgcccgaaatgacgtatcttgattagtagatattactcccaggtaagtaagtgaatcgtaggagttcaacttaatattaattaaaggaaatgaaagcagtggagcattgaataataaggggagctttgaaattttcgttttacctcactgtcagcaagtagctgttccaaagccttgggaagataagggaacacagcggatccaagggtatcaaccatacggtgtatgaatgatgtgacctacagaaaaggggaacaagctaatcactgacctgtgaatcaataacttaatggaaaagaatatgcaacactactgattacaatatgtctacttaataaaatacaactaaactcataccttactccgcaaaggctcgacctttggaaattcaattagcacccttagaag

SEQ ID NO: 39509 - DNA, 558 bp, Arabidopsis thaliana landsberg
tttccttttcagttcatggtagttaattcacctcattaaggaaaaatttattttggtgtttaccttcgtaaatgctttctaatccttcaactcattataatggtcatggcttgtaaatgaaaaccaggaaatggagaaggtgcaacaaatgacaaacaacaaaggaatcatgaaggttgaaattcatagccatttcaattctgcggtggaagtgggttcccgtgggctatctcgtcagacaagcatgaccaagaccaactgcctttgctcaccaaccactcaccctggttctttccggtgtaggattcaccgttctctttcgttgcaacgtaccaagagtatcgaggctgcatctctattggattctccaccaaagccagcggattcccctagtaccgctacatagattcatgcatgaatccatgacattaccaaatgtttgttgtacttgtaatttgatcattatatggaggagtaggcttttattttccaacaatacgcatgaattacgcgttaatcaatggcattacaattgttcatatgaaaacatgatccgat

SEQ ID NO: 39510 - DNA, 565 bp, Arabidopsis thaliana landsberg
caacaccttaaattatgatagtctcacgactataatttatattttccaaattctgtaatctctagtataaatcagtaatgaggatagacacagaaaagaagaaaagatacatatttgtgcatttatcaactaaattgacatcgacaaaaaaagaccacaaaccagataaagcttcaaacgatagattttttttgaaagctctatagaattgaagctgattactgtacagaagaagaaaagagtagctggcttactagaggatgtcgacggctgaagaagaagaaggtagacgtagaaagagttttgagttcgaaatttgggaggtttttttgattagggatctatttattacagaatgaaacgacgtctttaatattttgggccactaataaggcccattattgacgtagttcgtttgccgggaacaaataattgaaaaaaaatcttcattttccagcatcttatgaagaacaatattccctctcttcaaaattggaggaagagatgaagcgaatctcaaattcgaagatgaagaaagcgatggtggtggtgataggtagctgtc

SEQ ID NO: 39511 - DNA, 677 bp, Arabidopsis thaliana landsberg
tcgattgtttaatgtcataagaaagaaaatatcgccatgccataatctcaatcgcaaaattgacatcgaataatgctacaaaagctcattttcattaatattgtgacctagcatttctgcactaacatgggaagaacatcaaaatgtatcacctcatttgcagcagccttgaagcgaacatatataacagatgcctcgacaccctccgagacagatgttttgtttccacctgtcccacgaaatgctgtctgaacctgacaatggaatataatttgtatgtcttagtgaaactaaggtataaccttacctaacaattcactctacctgcatagattacatgcataaagatatgcaatatatgaatatacacagttatgagaaccatttacatgcttactgtaagctgtaaaagaatagatgcatattagaaagagaaaatacctgagaagcagccgttttaagcactgcaaggatgtaagttcgaatcatgcccaaggcccgtgactgtaacatatataaatgttagtatattctataacaaattacaagatactaatctccctataaattctggaaacaatgtatgagtttgtgcatgcgtatgaactgtaacccacgcgtctctctgtgagacaaagagagggaagagagacagagacaggaagggctctttgact

SEQ ID NO: 39512 - DNA, 1096 bp, Arabidopsis thaliana landsberg
tgaaagcatgataagaaatgatattaaatgtttaaaaaataaaatttgaaataactatattatgggaaacaaagtccatatttaagtcacctataaaaaagcatgatatgaaataataataaatgtttaaaataataacataatatctgatggtatttgaaataatgtatgtgtttgaagatgttataaaaatgttaaaaataaaaatataattatcaatattgataataatattcatattgatatgaagaaatgatattatttccaactacaatttatttacttttcaatgtgatgtgaataaataaagaataatcatgttttagctaatgtttcaaaatagaaaaattaatataaccaaatactgtaacctaaaattgtaaaaaataccactctagtaaataccaatattaccccggttagctgctactaacattaagggtgaagttgtcatttgatacagtgatcacgcacttttcacttgtcttctttattagttttttttccttgttttttaaagacatcacttgtgaccaaaaaacaaatccactaagaaagaaaaacaaattaataaaaaaaaaagatcagaaattagtttgtgcagaaatcgaattggagaaaccgagtaactatggtagccacagatgagttcatcgtttttgaccagatctgattgttttcgtctttgccgttgaaataatcctccgctccttcttctcatcgatttctccgatcgcgattttggtttctcgctctcctctctcgctgtggattttgactccgagagaaggtttgattttcggtggatttcatctgacagacatgtcagacgctctttctgcgattccggccgcagttcatcgcaatctctccgataaactctatgagaagcgcaaaaatgctgcgcttgaggtttcaattgtctcatctcctctctctttctttcttttgcctcttagggtttttctagtatctgaaattatagtgtgttttttatgccttttgatgaagcttgagaatattgtgaagaatctaactttttcgggtgaacatgacatgatctcgaaagtaattgagatgtcggttaaagaatttg

SEQ ID NO: 39513 - DNA, 1409 bp, Arabidopsis thaliana landsberg
attggtcttgtctttaaaaatatggctgtctagtcgcgatcatacgcttcttggaactggatgatagagacttcaacatgattatattgcggttatggaatgtattatctagttctgaattcatgtgtgtatttctcgatgaatacgatgaacgactgaatcttgtgaggaactatataatgaacaaatttcttaccaactaatgattgttttttttttggggaaatacaacgtttttcagatctcaagtagtattgttgtcggaccaaaacaaaaatttgtactaatatatgaatcaagtagataagcacaatgtatcaaattacaattttaagataacagtttccacagttaatcatttgagcgtcaaataaagtaatatcatttgaacattgaagcacgaggtactttactttcagagctgagactaaagatagttcgagaagatcttattttaatacttggaagttggaaatacggaaatgaaatcatatacattaaaatataaaacatagttacttcatcagatagaccacgactaagtcgtttcgatacggattggaagattacttgttcaacaatttgaatagttacgtagaaagttgccatcattcaaattttattctagaaacataaaaatgtaaaaattaccaaacacacaaaatagccgttgttgtctacaatatgatgatggtaccattgtttatttgtttttatataacagcatacgagatgttgaaaaatgtttacatatattttagttagttagtttaaataataataaaataatttgtactttttatttaatttactctattttttaataattttatgtttttttttattttatgtgacattcgatttacgtccgtaatcagattgagaatacaaaaacgtctcatacctcagaaaaaatttatagttctgcattttgctttttttttgcgagagtcggcggcatctctgtcacactgaacagtagagagaaaaagatatttaggatttattttaatcgtgtatttatactgtgttttttgggctgggtcttaaacaaatctgcccaaaaaatatatatatatatatatatatatattttattttatctcttgggaaaatatgtaaacaatttattttttttgtgctgaatgattaataggtgaatgcaagggtccaagtttaagaaaatatatactcgatttgatccgacgaaatcatatggaattgcgagcaatacatttatcaagggtttaaaaattgagatttcaaaataacgcttttgttattattacgaccaacaaaataaaccatatttcttatagaaaaaaaatagttcgttctaaatttgtacatgactcaatatcttattttttaaatcccatatagtatcaaaaagtattaaattattaatg

SEQ ID NO: 39514 - DNA, 326 bp, Arabidopsis thaliana landsberg
ttgcgggtcccagctggctacgccacaagattccaaaaggttatctgcgacgaatagactactgcaaccatgacgtgtgggctaactggatataaaaattacagaaggtaaaactataggaaaccaaatcgatcagctcatagaaagatacgggaatgcgtaaggcgacaaaacaaggtattccactcacgaggtgcacctatcaatgtgaagctctggatctaccatagaccaagcgcatgtggcctgtatgagggagtgtcgtatacaccgacaattctgagatttatgctactattttcacgagacatgagacaccgagggca

SEQ ID NO: 39515 - DNA, 510 bp, Arabidopsis thaliana landsberg
acctttctaatatttaaatgttattttgtctatcttaattgtttaaaattttatgtaagagaccgtggataaagatggtctatatcaaaattaggattaccatataagttaacgtagcaaaatgtcaaacaaacaaaaagttgacgtcgcggtatttttgcatggggatcggaaacgagtaaacaagggttactaatgaaccttgtattgactttgcttaattagcttggagactaggaggactttgtaactagcgtcaataagatgctgataaatttggattttataacataggaaacatgagatttcttggaacatatgcgagaggcgagataatagtgccaaatataacgacacacacctaccgaggtaatgtgtctctctcttccaccatttataaatatcataaatctcatatattactcaaaaacaaatcccgtcaaagctaaacacaacttagataaacatttagtaaataacaaactctaattaatttaatgtcaaaaatat

SEQ ID NO: 39516 - DNA, 951 bp, Arabidopsis thaliana landsberg
ccaaaacatttttcaatctaaatgctaaaaatgtatactgtattttctcttgttaaggtcaacttaaaattaatagtctgaagaataagatttatcacatcttaatacttgtttggttagatagctttgagtaggttaggtagtagaaaagatgagcttttttcatgtttctttctgattattatttttaagaaatagaagtcttaactaatttggccatcatcctcgttaatcaccacccttgtcttttctacttttttaatttgtatgattactagtaaaagattataacgtgcgtgcactaaacaaccaagtgattaattaacccaaatcaacggttacatgactattttggagaaatgtccaagtggatcctgagaacagtaattctaatataataatatttcaagggaaagttaaaaaaaaaaaaaaaaaaaaaaacagtcagtccaaactgtctagcatgactggccatatctataaatgcagtgttcttcttacatcagatagattttgtggatcttttgagaatttatcaatatttcgtgattcgtcattgtggaatcttatactagatattgttatgtgttttcatcatttcatgagtttggttttcgtaagcatgagaacttctgaagaatgcacatctagttttagattatggtatatactaattggaccccattggcagagacctggcctgctggcccaaatttgattttttttttttggtaaaattacttttggggttttccattctttatcgggctggcccaaattatatatgttatctatcaacatgattcaattatgaaactcacaataaaattcttaaaaacaccttgattaatgaaaataaataaaggattatataattagagacaaatattgaatcctcttaagattttgaaagttgattccactgtaagatacagatcagaagattcggag

SEQ ID NO: 39517 - DNA, 635 bp, Arabidopsis thaliana landsberg
gaaaagttgtcaatgaatgttttttttttccttttttaaattatcattgtcaatgaaatagtcgttgcctcggtggggtttagtggtttgccaaaattgtaaaggtcaacgtcacgtatgcatgaatcaagtgttaaattcagtttcattatcaataaataataaaaatacatatgctttttctaagtttggaaaataaggaaaaggatgataaagacgttacttaggcgcattacaaattttcattggtctcactcatgaacgtgtcccctcaacaacgctacatttttcttttctcgtcattttcataacgatttaatgtttcattaatttgtgtaagtttcaaagtatatatgaatggtaggttgaactcaagaatctacaatggagctcaaatcctccgcgaaaaaagagagaaacaagaataaaataaaagcatatacactacaaaaactatgcatcataattcatatacaataaaaatagaccattaaaaattaacacataaagtaacatatactaacagagaatctgtttcaatcttaattgtgtccaaataactcagattcgatatttattaatagcagtactactatatcactatataataacttatcaggggacgaactttcaca

SEQ ID NO: 39518 - DNA, 573 bp, Arabidopsis thaliana landsberg
  unsure (1)..(573): unsure at all n locations
aactttcatgaatacctaatacctttcagatgtttgacagatggttgtcggtttgtcggagtgtcggagtttcatcagaatggtcattgtcgaaatctttgcagaaagtgatgaaccacaattctcagtttctgatcggacatttcttagtttgttcattgaacagcgtatggcagtaaagctatatgcacataatatatttagacacatagattcacgtcgacttcggtaaagagcctttgtcaaatgtcgtctctaagcaccgcaaaaatcggacctgttccacttgtgggacttggtgtatatcgttctccaccgggttcggcaacatacaatgctgttttaagcgctcttgagctaggatatcgtcatatcgataccgcggaattttattctaacgaagaggatgtgggaagagccgtgagagattcgggaattcctcgagaggaaatttttatcactacaaagctatggacggngcaggcatcgccaggaggtgatggttataagcatgcaattactggtgtcgacaaggcactcaagaaaatgcagatggattacattgatctaatg

SEQ ID NO: 39519 - DNA, 558 bp, Arabidopsis thaliana landsberg
catcgaagtcaaaatccgcgtccgccgccatatccagtcgccttgctatggcgtgcaaatcaagagtggggatgacatcgccctgtgggccggcacaacacaaaacatggaaatcgacatggcgcccgtcgatccaggcatttacacctgccactggaatctagggctcaacttcaccggcaaccgttacgtcattgccatcggcatcggtgatctcgacagcggcgagtaccaccgccactcgcgcttgccctacgcggggcatgtggatgtgattccggtgccacacacagggcacggctggctggcaccgacacccgaattcgcacttcacaacgaggctgactgacatgtcccacgaccccgtcaaatcacgcttccgagccatggtcatcggctggtacggcgcccccaatgttggcgacgaagccctgctggccgtccttgtagcgcatatccactcgctcggtggtgaggtggttgtcgtcagcgtcgatcccgcgctcactcgccgaatgcacggcattgaggccgtggattattacaaccttggcgaaa

SEQ ID NO: 39520 - DNA, 526 bp, Arabidopsis thaliana landsberg
cctatacaagacccatacactaacttaaactccgagaaattcggtgtactaatcacattgcttttgcattttcattttcattataagatcatatggtagatacatatctatcgctgtatcacattatagctaaagctgcataaatgtagtctataatgcggaaggggacaaccctatggttttcatgtaagcggaatttataagaaagtgcattaagttcgaatatatagagttatagactaaggaccaatttaaagtaattcacttttagtaaaacaaaattgcccatatctttgcagcaactttgtagcagaagatttgccattcatatataaaggaattaaatattaaatagaccctataacattagagacaagatggattccaaaccaaaaaaaatatatttttaagagatattctaatgcttaaaattattgtagcaaaggacatattcacccaaaaagacaagcaaaaagatttgcctaagcatcatttttcctcttctgtaaattataggttcagaaaa

SEQ ID NO: 39521 - DNA, 795 bp, Arabidopsis thaliana landsberg
gtccaagcccaaaactattactagtataactctgattttattcgagctcttataactattgcccatagggtatggatagctagcccaacataattactcaatactccaaaccaatagtctaaccctacctgggatactacactgatcagttagccctgacagaaaccagttgacaaaaataccgaaccttcatagaactgaaaataatagagataaaaggttcatgcaatacgtaggtttgatttacaatccgctattgtaattagtaatcgtttttgtgaaaatgaaacatgtaagtttatcaaattcaacctcttatcaaaacctatttaatttgaatagatactatgctttttttttggcaaaggaatagatactatgctttaaataacaaaattcactttaaaatgaatccacaaccacaagattaatcatttttggaaaataatataaattgagttgtggaaccaaatttcttaggagttagtctttgatctgacaatctgatcgaaagttgatccatatgagtgtcaatatatcagtaaactttgacactagaaatatctgtatggagtcttagtacattaacatgtttctaacttttaaccaaaaaaaaatcatgtttcaaactacaatcaaattgtatttgcatataggcacttaagagttaagacattagacgtttgataacttacaaaattacaacgaatattattttaggctaacattatttcagtgatctttttgtttactggatttacgctattgatttaaacataacacggtggcacctag

SEQ ID NO: 39522 - DNA, 543 bp, Arabidopsis thaliana landsberg
  unsure (1)..(543): unsure at all n locations
aagacagagatgctttctttagagcttcgagtttattatagttaaagaaccaaaaaaagagaaaaatttttttacagaggaaagagtgtgaaggacagaggtaaggcccagacaacgcaaagatggtgaagctatgactattgtctactccattatttttttaattatttttaggaataattctctaataattgcaattattgataaaaaaaaattaaaaaattaaatgattaatagttgcaataattcaatgatcttcaaattcttcaatttcatgaaaaaaggaaagaataaaataagatcattctagtttatttgttagaaaaatgaaataaactcctatgtgtatattgaaagttgaaaaaaaaaaaaaaaagagaaatccacttccttgctctcttattgttgnttataggtaacctaatgtgtatgagtcattcttgaagtggtcaaagtggactagagaaggggacaagaccattttattagtctaagaaatagaattgtcgagagagcaagtacacatttgatatattatctgat

SEQ ID NO: 39523 - DNA, 1102 bp, Arabidopsis thaliana landsberg
aatagtatcttattaatatatgttaaagctttttaaaaggaaaaaaaatgtatgtagaggattacaaattcaatggaaatattactccttttgtttggaaatttgaataaattagtaggctacaagtataagataaagatatccccaccaccaaatgtagcataaagagaagcttcatgtcattgctattaatggcaaatactatagactacaagtattaaacacacaacaaacaaagtatagactatagaatacaagtctaataactaataagtaataaccctcatatgtgagagatcgataaacggatttccattcaattaagtgatctttttttttgttaaggaaaatctaatgatcttaactttataatctcaataattatataaaagaagcaaaccatttgaaatttgggtttgattttttgttacaatttgtatcgaatatataacaatcgatgggttttataaaaatcaattgaaaaggtggtttgtacaatctaccagacttccactgttccatacacttaggtatagaaaacaataattttaaaatatatacatatatatatacttttaaaatatatattcatgctacatagcctacatttaaatgtcaatatatatatatatatatgctatatttttcttttttcaaataacattaaaaatatatataaataagatctgatggaaaaaaaaaacatctattttgtaaaaaattattctgttgctaaataaacacaattttaagagaaattatacgcctattttgtttttgtataagagcgaaaagtccaaaaaacaaaaaacgaaaaacgaaaaccaagtgaaaaaaattcacatggtccacaacgacatgaaatggaacagttagatttgattgattgactcaacatttctccttctttattaagtaaccattcaaaaacacactccactggtcatcttttccctctctgtccccatccagttttgtacctctgtcacaagttaccccttgccgctaacttctttcaggggtaatctcgtcttttccctacaggtgttgtccactcacaccaagaaccaaagccatcgtcactatattctttgctgcccaa

SEQ ID NO: 39524 - DNA, 468 bp, Arabidopsis thaliana landsberg
  unsure (1)..(468): unsure at all n locations
ataacaatgaaactggaagtaattcacaacaaaacttttgtggaaatagatgatatgtataactattttacctcacacagttttccaaatgatataagcctttcacagagatcataatagagatatgcagctgcaaaagatgaattaccagagagtgatgcctgcaatgacattcattagcaaaattggataatcaccgtagatattcttttgcgaggaaaaacctctatataacttaaatttcgtacactggagatgagttctgatgctgcatctttaatatcgtcaattgtgatgtctgattgaaagggaccttcatccttattatgtaaatcatgnnnnnnnnnnnnnnnnnnnattaactttgcttttgaatctttcaggcaatccatccagaaatcaatgcatgtggatttgtcagcacaattctctgataaggtctggataaaggcatcacttatggaggaa

SEQ ID NO: 39525 - DNA, 569 bp, Arabidopsis thaliana landsberg
aatataacaaatttgtcaagctaacaaaaccctttgcctattgttgtctctccatctagcaatcaagtcaaaacaaaatgacactcattctgccgatccagagacgatcaatctattctaggctagcttcaaattcttgtgttcgctgagaaaagtcaacaaactcaccatttgtccaccaatgtagcctcctatagctccataacacacacatataggccattcctgtcgggaaaaataatataaggattagttcattcttgcaataactgcgaaaaaagggagcaataaagttcagaaacaagcccttgactgtatgttgagaagaaataaacattacctgccatggtctttcccagtcaagtggcataggccaagctccaaaccatcctccaataattgctccatatgctggaactaagagcatatgttctataattccgattggtctaaaagaaaaaaaatggattaacaacaacataaagtgtgtgaattatcatactaggtagcataagtgacttactttagtgaagcaaagatacgatgcccatctatccatgatgcaccta

SEQ ID NO: 39526 - DNA, 966 bp, Arabidopsis thaliana landsberg
gctttgatatcatagaatcttccatcgtagatcttttccctctgaaactacagtacccacagctcaaacttccatcatcactgtcattgcacgtaacatatattaaagaccacttaaaaacaaaagaaaaaagtagaaaccaatactttcacattgatccaaagatatagacaattaacgattgcttacataacaatataaaacttcaacgtataatggaacttagtttcttacatgacataatcatccgtataacaaaataacttggtgaaagaaatgacaatcttgctagcatttcacactttaaatataaattgatatcttcaaaacaagtaatattttaacagccctatatatatacctaaggcatttgctacattcagcacaacgatacaaagacacggaatctaaaaaaatgagaaacaactcactttttccacccaccaccgatgtatccaccatcatcaactttctcaggcggcatatcaactaaggatatacgtttctctccagcagaagtatcaaccatcatcttcgcactagttctaaatccaattccactggttgttctaaatccaatcacactagttctaaatccaaaacccacactcaaagtcttcttaatatgaataaactgatgtcttccttgagccaacaccccaatacaacaaccagcttgaacaatgaaactccttatgaaactgctgcataccatctaagtagccaaatcttaccttaaattagtttctccaatgcaggagctgcatatagaaaaaattcaatctgtcattagtaataatacgattcctaaatcagaaaacgaagatacgagctacttcaacaacacagaacattatcatcatcaacataagagctaaaatacagatcctggatccctaaaaaccaaattaagataacaaaccctatctatctatatggataagttgagaaatgttgttaaactga

SEQ ID NO: 39527 - DNA, 1272 bp, Arabidopsis thaliana landsberg
caaaaaaaaaatgtttaacacatattgttgagttatggatcaacagcaggaatttagttatgtctattcatttttgactttttgcttcaagtctagatagtcacaaatagttaaaattcttttagttgaattatatatgcttaaaggtttttaaaaatctggcaaagataattaagaataaattatttcgctcatttttttgacatttaaaactatttcgatgctacaaagctagaacgaccgtgtcaatttacgtttgctttactttaaaagttgaagttgatattaagattgatgatatcatctcgagaaaacgtatttgcacaccaatgcaatagttttgagagaataaagtagtttggttataatacataaagcttttttcgtgataatgtatttaatttgtagacaaagaggattgagtctttaggttggcgaatacgttcttgtttaccacgtgacaaaaacttccagtcaccaaaatgtacaatgacgaaacagagattatatagaatgtagttatatataataacttaatgacgttgattaactttgcttaactctatgattttcctaagtttttcctggtttctagtttttgtttttctggtgagtaatgttttactggttaagctaatttataactattacatactttctcattttctttttgatgaaatttacatttgtacaaaaaaaaaagccattaatttatataggatcttttaatctaggcggtgtaactttagataaacaatatttttaagcgttctttaatgcaacacatgattatgagctaccatttcaagttgttgcgatgcaatcgatcgatttcttggtttgcgttgtttcttggacaagaaggaagaacaaacaggtccccacgcactcagaggaagcttgttgcccaatttgtgatttatgctatatggaagcagcgttaaaacgtcctacccaaccagattctcatttggccatcaattatcttcaaaaaaattgatagagagatcaagaattttaatcaatgccagaaagatagatcaagaattttaatcaatgccagaaagatcaaacaagcggttcacggtgcttatgagtctttggtgccctgaagattgaccctttcccaactcttaaaatctattggatttcttggtttttagctttttattagggtggagggtcccatgtaaaaaaccaaacctggttcatattcttattgatatttaaccttttcttttgcgaaaaaaaaaaaaaaatggggttttaggg

SEQ ID NO: 39528 - DNA, 748 bp, Arabidopsis thaliana landsberg
  unsure (1)..(748): unsure at all n locations
caaaacattattaaattttaaatgatttcttatcttaagagtgaataataattaccattctcatcattgttgggaataaatttcaatttataagagggagtgaatagtaaaacgccatgtggccatccacaatcatcaagttcctttatatatagtctcgaagaacatattttgctacctcgttcgaacagatagatttgaggaatttccaagaaaattagtgttcaggtgatactggggtttggggagaatgtcggagaacgatagtagcgagagtgatattgaaatggaccctgaagaagaaaaagtgtatagacggcaagttgaagagtccgatgtaataactctctctctctctttctaagttgctttcgtcataattagattgatcggtgcttttctcaaaatttgggattagtctgatgatacattcttggaattgtgaacgtggacagggttttgatgttgattactttagatatgctgggataaagccctgtccattgaaagatgagaatgcttatacttatgatattgaactttttggaagattgggacttcactgttacaatcttcttcacgaggtaaacaaacaatatcttccattgtttctaattttttaaaaaatnttgtttgtaatagttttttatagtgatttcttcgtgacgtagttcctttatttaatggttgaattctatctctactttagggaaccaacctcaactcatgtgcattcccagtacacact

SEQ ID NO: 39529 - DNA, 584 bp, Arabidopsis thaliana landsberg
ggattcgaattctggtgggaaatgttacaaacacttcccctgctctctttgccttttttgttgtttgtaatctctaatttgcctttttttttttttttttttttttttttggataacccagatatcctaacactcctcgacaagtcggttcgctcagactagccacgtggctggccaaatggcactccacgtggctggccaaatggcactccacgtgtcggctcctggaacgctgcagcatgtgaattccgcagtgaccggggctcgaactcgtgatggcgggtatctcagctgagggtcctataccaccagagctagaggctctggtttgccttcatcttgtcgttattaaacgtggtctaagtccaatttacaaaataaagcacatttcgttacagttgaaaaaagctacttatttggataactagataaatatggaattgtaagactttgcggcccgtgggtttatttattcataaagaaatgtgattgagaaattgaaaagagacacgttgaaaatgtgaagtgcgtggtggatgtagaggtggaatcaattttggtaaagtggtccttattattaagca

SEQ ID NO: 39530 - DNA, 627 bp, Arabidopsis thaliana landsberg
caaaacacatttgcgactaacgcgattactatcacgcgctgacacgtaaaaaggtgtgatccggctgtactgtgcaattaagtacctgaagccacagatgaatcatggaagctgtgatacccgtcagaaggtgataatgcggcgggagatgagataagctcgtctgagataccaaccggtggtacgaatccttctaattataaaccaatgcggttgcagtcgatttcgactgattctcccgtcacacaagttgtaagtttcgagctttcagttgatacaagggctcgtaattctggcattgccatactttcaaatatctgaggacgcaagagtttgagtagaatcaatgcattttcctgcatactttttttacctttttaagttgatgctattttacaatcaagaaatgagtctctctaaaatggattctgatagagacgtacctgccaaaggaaatcatcgatggtagaatctgattgtagtgatagaatctactcgctatcaatgaaaaagcaaagaaccatagaatctggaatcaaggcacacagatattgcttcccagtgaggactttcgtagagtcccaatgtactaccgtgagaaaaagtaggatgcatcgagtgagtgtt

SEQ ID NO: 39531 - DNA, 901 bp, Arabidopsis thaliana landsberg
aaaatcaccatcgaaccaaccaactagatagttttatatttcatatacattgatgtagtgaattattaccggtttggcctgaattacaggaataatgtcgactttcattcctggtaagtagccaatcgtcaacagtatagcaaaatttgcaacatcgaacaattcatcatcacttgtggaatgcagtctgacctgtaaacgtaatataacacgaacataagctaaaaaaacttagagaaacaaaaatccacaatacttaacgataagaaaacaataaaacctctccagccttgtcattgcatgcttcctttcctaagattccagtaacaacagatacaatgataggaacccttgatcccactctttctgttatctacatcatgtgcattacaatgagtgtaaggaacttaaaaatagactctttagaaataataacaaacagatgaaatagaaagaagaaccaaaccagtgtcaaagtttcttccatgttcccacatgtaatgtttgcgatcacaaactgtggtcgaattggctcagacaaaaccttatcaagtacttcttctccagctctctgtttaccaaattcaaaagtttcattctttaggaagaacacatactagacattacaattggccaagccttgtgaagagctctaagaactagcatgaagagaagttttgagtttttttttcgatctggaaaatcaaaattcaactaaacaggaaacttacaagttgatcaggattacgagagaaagcagatatcattttggggcgagagagaattcgattgcagacgctgctccagaatcggttaacacatgaagcgaaagcaaacgattttgccggcaatctcaagagaatgttgtggagaaggtcttcgttcatggcggcgattggaa

SEQ ID NO: 39532 - DNA, 460 bp, Arabidopsis thaliana landsberg
agctggcagtttaaattgtatcatttgttcatcacatttttaatgacgtgattgtaaactaatctgagcgctatatttgatcatttgaggatgtttaattttatagttcaaacccataaaagaattcactttcaattttaaattattgttgttgtggtactttccggattttcgactatgtaaagggcctaaattagttagataatagcttgacccttatccaaaagtcaaccacacgtcccgacaaaacaaacagctcttgaagggtttttttggtcataagatttttgttccccatgtttcttcaaacatcaaaatctttacgatattaaaattctctgaccccaactttaggattatattttttatttttgactattttcttgcaaacatagatttcaatttctttaagatgtatccatgttaaaattatctaaaaccaggttacaattcttgaccc

SEQ ID NO: 39533 - DNA, 491 bp, Arabidopsis thaliana landsberg
attactcactaatctttttggattctattattcattggtttattttttaggcaataagtacggaatcaaaaacattccactttctgaccaaaaagaaaaaggaagaaaaaaaaaaatcgtatatctctcagcgcgagggaagaagaagaagatgaagctaaaatgggaatcaatctctaatcttcaacaaaacacatatctcataaaactcgtcgctgcaacacttataacttgtctcgcttttcgtttcttcgtcttccgcttcggccaattttccccagttcaagtgtcggtgaccggaaactccaattcccagatttctccgacgtctgttatcttatcggataacgaagatcaaattcccgtcggtaagatttcaattatatcaataacattaacgatttcgctgtgtagaattttgttaaccttgttttttacggaaacttctgagatctagggttcttaaagatagtttacaactttagaagagt

SEQ ID NO: 39534 - DNA, 690 bp, Arabidopsis thaliana landsberg
ctctcttcctctttctaagaaaccgaaccaaaaaaaaaaaaaaccaactaaaaacttagtcttttgtctgcaaaaatctgaagagaaaaaatgggagattgtagacctctaggtttcttaataggactaccatttgctcttgttgctctcgttctcgccctcgtcggtgctgttatctggatcattgggtacgtgtccgtttcttttttctttaatacgtatatacaaaattcatactatcattgggtattatgtctgttttttagatccagttatcttcattttcaatctccaatttcggttgatatattgttccattgcgtaaatatagtttataaattttcttcttacattacaatggagaaggaataataaaacattgataaaaatgaataaaacttttgcaggacggtattgagttgtttgtgcccatgttgcttctgtttcgctgcgctggctaacttcgccgttgatctcatcaaacttcctatcaaagtcctccgttggtttacccactccattccttgttaacaaaaccacttgttgtatttctttcttaatttatcactaattactttgtttattccttctcgtatacatgtaattttcttgtgtaatccaattacttctttctttgaaagacgggcttatatgatataagacaaccgatttcgtcacaaatccataatt

SEQ ID NO: 39535 - DNA, 686 bp, Arabidopsis thaliana landsberg
ttgtgtagtttttttgatatcaacacatttctatttatttggtttcaaaatacttttcataagagcaggtctatggcatatattataatttatgtgataaagataaagatcacgatttcccgattgacaaagaaaaccttatgaaatatgaaaaacatgatatgaaacacatcatatgtttctcattcgtcaagtattttttatatgatatataaaactttctttctttctagaattcatggctcttgtataaggtagattgtctaactcgttactctagatagtatattatatgaaatttgtttcgtaaatatttttccttaagattggactatcaattatgaagtaatattttaactaatgtgtggttgacaaaatatagaaaaaatcaagaatccaaccacatgttgagaaaaaaaacttctactccaaatacacttacttatttttattatttagtcaacggaatattaatttatttatggacatattttttaaaataccataaaattaatttttgttataaaatattattagtagtttatattcttttgaaagtaccactaaaatatattattttctgaaaataccacaaaattacttttacagttttcaaaactagatcctaaactctaaaaaataaaccctaaaccccaaaaaacttaactcaaacccaaacatttaat

SEQ ID NO: 39536 - DNA, 777 bp, Arabidopsis thaliana landsberg
atttgcgattctctgcttcacaagtgaaattttattttttattatgcgtctaaaatgcaggggatgggctcatattttgtattttttaccaattgagtatatattctttttgatattcactcccttacccttaaactttctcttcttattcgctctcctcctctttctatcttcctgtgtgagctcagactcatccttaatgtcacctttcccggaaaagatttcctctggggcaagcattgctgcatctgagactgccacgggcgccacctacacagtacacatggaacaagttgataagtataatggtctccaatcccaattaccaaacaaacaatcaaaaaaaaggaaaggacttagaattacctcttccattgctatggctgaaacgtttggtatagacatttcttcaatcacctgaaagtttggagaaaataaaaagtttcagtccagaacagctatgtctagacacttgaggtgatcatcatttaggatctaagcaagaaacatactggtttaggtgtgaagtggaagtgggagagagcatccaacttcaggcatagtttcttgaacaacatgcttgcctgatttaacgtttataagtaagagaatgtgatatatacactaacaatgaaaggagaagataaatatgcaaacacaaaaacccaggaaaaataagtatcaaatcaagttggaacctctttctttagttcatcagagtgagttaatgggacaaaagctggattagccttctgaaagtattctgcctacaagtaa

SEQ ID NO: 39537 - DNA, 1330 bp, Arabidopsis thaliana landsberg
agcctattccttattgacttctcttctcctcatgacctcccatgttttagaggaagaaaaaccattatcttttcacattttgaacaacccaaccataggaatgtgccgtgtccgattgcaatggaagggcaatagttgataagtaagtgtgtaattgaagctcaacatcataacgtggtgatggcaaaatccaactattttccacaatagctttagtaacagaggacaccacagggatccgcaatctccttggaccctcttcacctagaaacttaatcagtggcccaaaaggagaccaattgtccctccagaaacttgcattcaacccattaccaagataacacttaataaaacgttctgcgagtggtcttaggcgtaagaggcacttccaattccaagtatcctgcaatcttttctttatgaaccagtaatgtctatgccaagcgacccaaagagagttactattagagaataagagccagatgagctttagactaagtgtaacattccactctgtgaatcttcgaaggcctagccccccttcggattttggcaagcagacaacagaccaagccacttttgctttattgtaatataattacaacaattttgactttttgttttttttgtatgttttggaaagtacaaaagatgtcaaagctttacttagagatgacagagacgctctcgaaatgcggaaagatggatcaactcaactggtgtaagtccaactagccaccacatacgcttgacgtgtgatacttgcaaattacgatttcatcctttaaagtttatttaccattcgattaaaaatacaactgagcaagtttacttgtcatgataattaaaaatttaacattgaccaattcaagaatttgactgtctgactgatattaatgtgtttgctgatgaaaggagaaccaaaagaaaagttaaaacttaagaaaaaaatacaaatattcagggtaaaatttaaaaatttccaagattcctttctttattttattcagattttgttttttgataattcttatttaaatcctatcgaaaacagaaatttgattttgttttgagttgactacgaacatagactaaacatgggaaatatccaaaaatttaaggtaaaacaataaatttctagattcctcattctctttttttataattaaattcaaaattgtttatggtaattatataatttatttctaggacgacttttgattcccgacgttaacatgaaaacataggggctttggacataattttgaaaatttaatatctcaaagaaaatataattaaaattctcaagattcttcatttgatgtaaaat

SEQ ID NO: 39538 - DNA, 571 bp, Arabidopsis thaliana landsberg
ttggcttttactttcgtttgcattttctggatgttactaaaacctagtatatttcatagccaatatgatttttcaatactgttagtgttataacttatgatttaccattaaaattataaaattaatataaacataaaagatatgtaaccatcattattaagcataccacaaaatggaacaaaaggactagagaacaatgcaagctctattactgattctgctttggtatcaaaaagagacttaacaagacattatgggttaagacagataacgctttataggagaatgataagacataacataagactccacgaaattggaaccgggtgagcatgtgggacgaacagaaacgggcattcagatactaacatctaacattaggacaacctttttgggaccatcttatggttgtggctttggagaaaaaacaattaaaacatcaacatccccttcccaccagaaaccaaacaagtttctctccaacttgtctagagagcagaaatgatatcttcaagataagacaatatcagcaatttgtttaaagattcttcaatcctaaaatccctcaccc

SEQ ID NO: 39539 - DNA, 779 bp, Arabidopsis thaliana landsberg
gaaggttcactaatcatatattgcaagttttaatttgtatttatcctgactagacatgtattttctgcctatacggtgtacatatgtatactgaaatgaaatatgattatgaatgttatacaaactccataactagagtttcatgtcaatgaaattcaaatctttttgattttttcaggaatttgatagaagttacggatcggggtggcagtgcatcgtggggacgcatttcggatctttcgtgactcattgcagtggctgcttcatccatttctcagttggcagccttaccattttgctttttaagggatcagtcggtgaaccggcccccccccggaccgatgctctagctaatttagacagtattgtaaaataatcaagtccttttcgattgatgtagtgttaaagttaaagagtattcaagttctttcactgtaatatcaatcatgattcgtcgttatggatgtcttcaataacaagaaaacactgctttctcaaattacatagacaaaaacgtctagaggtcaaaaactttatcttatgttttcattagagctgtattgtgtgtagaaatcatgtggttatagatcaattttatttagcttctgccttaccagccggttagctctcagttagtttgattaatatggaatttacatcgttaaacatcctaaaacctaatattagtattcggtacatgtgaacaagatctaagtttcaataacttttcttgcaccaccaattccgatgacgaccttcatcaccatttaaccggactc

SEQ ID NO: 39540 - DNA, 897 bp, Arabidopsis thaliana landsberg
aaaatagacatgcattatagcaaattaagatggaatgttatcttttcagaggaggacgatagagtccaacgttgttggtgcataaaaatgctacatccaaactaaccctatagttttttttttttttttttatcgagttgcttgtttttcgtttgtattgcgattataaacattgtatgcgttcttttatttcactcgaaaaccgtttataaaataagactataggattatgatcacaaaaactttactggccttgtgatcggaaacaaatatcaaatatttaatttgttgcatgtaacggctaaaaatgttaggttcaagttcaacactccataagttctccgataaaaaaaatgatctatttagttgttttatgccatataatactaataatttataggaaaatgtattttaattcagtgactttaaatttaaggaatgtctttatgagtaaatgttcatgtcacttgaccaatgtggtttcaaagaaattgcaatttgaaaaatcttcataaacaaatgtataactgttttggaatttcttgatccaagtgattggctttattgaaaaaatttacattcattttttttctttttctgaacagatatattagaaataaaaagactaaaatatgaaggggacaagtaactaacctttttgattatctccagttacaagacggcatgtgaggccgtacatggtgcaggattttctgggtacgtctaaatatgtttactttttgaacaaatttaaagtaaacagatatatctggatttgttggactgtttatagatattttagaatattataatttcaaaacttcctgtaaattttctttacaacattacaagcgttcaagtacatatattcgattcattttcaaattagttggattg

SEQ ID NO: 39541 - DNA, 1534 bp, Arabidopsis thaliana landsberg
aagaaaaagaatataaaagggctcttttttttgtcgacaatataaaaatgctaccacctcaagagaaataagagatgaaaagcaagaatgttgagcactagacgcaaccactccatgaattgttgagaatgggtacaatcataattcaaaagtgataaagagaaatctttacaaagacagatacctaaaaaccccatgataaactcaacttacaataacagcaaagctttacaaaaaagccacagcttattgtctttgatgaacaaagagagtgattggctcagtaaggaacaagaacacgaacagaaggtggaccagatctcatatcttcaagtaacagatcaagaagcgcctttgctataggaccttcttttcctgagtcagacagaaagaaacccatctttaatcagccaatctatccatcatgtaagtaattaaaagtgaggcttttaaaatgtttatatgataatcttacttaccttcaccaataaattcttcatcccattgaatcacaggtctgatcggaattccactaccaataagcatcatctcatctgctttctttccatcttcgactgtcacatccattactttcacacttttaagaatccccttgcttacaagctgttcagcgagtgtaagtgttctctttgctgtacatccgctcaaaacgttatcaaaccgcggcatcacaagctccttaccaccattaacaacaaacgccacattcatgttcgggccttctgcaataaacccatctttacacacccaaatacctgcataagctcctttggcctcagcttccatttgtgagagtacgttagggaggtagttaacacttttcaccgtggcaaactctggaggctttatggggatggacgaggtcactaccttgacacctattgggttaatggcgaagttcgtttttataacaatggcatagagagttggtttgagacattgagatggagataggaggaaatcccctggccctgcagagagccagtatcttagagatccatctctacatccagaaacgctcacggtttgaatgagaattcttttaatagtttctcgatcgaatggaagtgggatcttagccattgatgcagatcgcaagatacggtcaaggtgctgatccaattcataaaggtatctgcttattcgcaggacaacaagcgaagctcagatgattgagtaataagacaaattagaaaagggggctactatttaaagtgactaacccattgatgatcagggcagtgtcaaagactccatgaccacggtgaaccatgtgatcatccaatggaagaaccatcgctgctggatcggttgtaattccatcaacaacacttgagtacatggccaagaactgttgtcctcctcttgctagttttagcctctcaccaaccttttaaaccaaacatacttcactgatactcaatcaatcaacgcctctaaacataaacggataacaaacaaatgtcgcaatccttcattacgggctgcatctataatttcattgacaaaacac

SEQ ID NO: 39542 - DNA, 821 bp, Arabidopsis thaliana landsberg
aattccaatactaaccatagatctagaaacttgtccacaacttcaggggaaccttctttgaagagttcgacagttataagtccttttgatgtgtttatatcctacatgagataggaaaatagaagcaagatatcattaaaatcaatattcagataagacacatcacattttttttacttcaaaaactgatgaacagaacataataccatgatgagaaataagaacaaggattaaaacaagaaacttaagcaagcaaacagggagattaacttacagcaaaaccaggaagatcgtaagttttttgccctgacagcaatattagtgtcctgaagcagaaaccaaagccagatcacatatgtgtaataccctaaactctaaacctaagtgctcggaaggtcatcaggatcaaaactcaaaagctatacattaaaaaatctctcaagaaaatacctcaaatctctgactccgagtttcatgttcaattgtgtttcttgacctaggagatataaccaatgatatcctttttagtttatagataatcacataaagtaaaaggagaatctactataacagaagtaatgaaaaaggaacaattcaaagatgaaagcaaacctttgggaccaatggcgataggttgtgaccaacgataatatgactacagcaactacaagattacagacaataatagtggaaatacttatgcgacttggacccttcttcttcttgctttgatttagaagagcctgcggttttatcttcgccattgcaccttagtttcgcagaaagcaaacgagggatacaacttgtctctgcaaaccata

SEQ ID NO: 39543 - DNA, 660 bp, Arabidopsis thaliana landsberg
tttctttgtacttatatgtatccccaacagaattttggctttttgaaccacgtttaatttatgtcatggtttttagatctatgtcatcttgctcacatcctttaaaaacatttatattgaacactcttttaaaagaaaaaaatctttatgttcacttataaaacttaccgaggaaaaaacctctttataggctctacaagtacaattatcttataaaacttatcatttactttctaccatagtttctgtaaatgtattttacaataacatcatgatcttataaacttatcttataaatgtattttacaataacatcatgatacttattctatagaaattctttaaaattctatagaaaattaaagaagtaataaccttctaaatatatttaaagaaactatagaacttgagtttaatttgggtttggtccaattaataataatgtcatcatggatgatcaataaaatcttattttacttcaatatttgcttgcatcttctccaataatgtagaagattatattcactctctagaatgactaaagaaatagaacaccgaatattatctctagatacattgacattttaatcacatggtttggaatcttgatcccctagctgaaagagtattgtcagtgtcgactcaatctaagaatctaaa

SEQ ID NO: 39544 - DNA, 135 bp, Arabidopsis thaliana landsberg
  unsure (1)..(135): unsure at all n locations
gcctgtacattcttttgctgaacagagaaagtnctantcgaagataacaaaacatacaaagaatggtgttattgctacaagtaaatgccatagattgaatcgaaccaagaaaaaaagaagcagattttgattggt

SEQ ID NO: 39545 - DNA, 534 bp, Arabidopsis thaliana landsberg
gaaaaaagggctgtttcaaattggtgttttaggaggaggattcgggtcatacatgaactgagagtgtttcaatcgagtttagcttgaggagttattcacgttgcttcttgcgcaagaataaacgataaacagttcttattatgggaaaaagggcctttctcgatttaaaagcgcacggtttcaacttatacaaatgactagtgctgatttatataaacgctttcaaatttaaaaaaaaaaatacttgaaattggcttttgaaacaatgtcataaaagtgtgcatagctacacgttctcactactatatgtttgttgtgaattaaaatgttttgcagattgcgttttctaaagacgatatcattcttacaactggacaagctgtggtcgagaataagctgttggcagaggcagttcttgaatcaatcattggaagtaatggggtgtctcctgcgactaggctaagtcttgcagagagattggctcaggtgatcgatgaataagaacaaggtcgaagaagaagcaaaagagaacaa

SEQ ID NO: 39546 - DNA, 559 bp, Arabidopsis thaliana landsberg
tgcttggttgttcaagttgatgcaacctatgaaggtattcttctcttttcttgaaattagtatgtattctatagatagatgatgattcactaggaagctggaatcggattttcattgcaatatatgctcaagttgtttggggctttaacattgtaggctcttcttgaagtgaaagatgtattgcaaaagagcttgggaagagagcctagggaagctgaaatagccggggagatcaatatgactgcgggtgaagtaaaaaagaaaatcgaaataggtagagctgcaagaaacaaacttattaaggtgagtgtgtcaaaagatttgtaccattacatttgcttataaaggctatttgttatggtgataactctttgaacttattgtgtgtgttttttccttctatgttgcagcacaatctccggcttgtcttgtttgttatgaacaaatactttcatgagtttaccaacggaccaaaattccaagacctttgtcaaccccgtccagagggcttatccagcaattgaaaacttaaaccgaaaaggaagtttcgtcttcaact

SEQ ID NO: 39547 - DNA, 654 bp, Arabidopsis thaliana landsberg
aaagaaattacatatatgtgttgtgtgtgtggtacttgtcatttgttagctctttttctttcagaaggggcgagggcgaaatcacataacggattcactatgattctataactaacagataatacaaacaaagcccaactaacgacccatcatagtaaatcacagaaaaagatgataactaaacagatcgtgcaaagaaagcccaactaacggcccatcataataaattacaaaaagaaagaatccggaagaaaattgaaatcttatccagagagtgtagagagaaagaagcggagtcacaaaaaccccttatcctcttcttcttcatcatcatctctaattcaaatatccgacgcagacattttagacaaagttactctctttctttctcatgttcttttcggacagaacaaaactccctaatccaaatgtcaattcctttggtctctctctgaataatcatctctcttcaaaccctattcaattttaactatcgatcttcggctaagtctccaatggcggcggcgtttgcctctcttcccacatttagtgtcgtcaattcctccagatttcccagaagaagaatcggtttttcttgctccaaaaagcccctcgaagttcgttgttcttcccgcaatactcgttacactaagc

SEQ ID NO: 39548 - DNA, 792 bp, Arabidopsis thaliana landsberg
aacgcatcctcaaaaagattcggttacaagaggacatatctcaaacaacattctcaaagtagacagccaatgatctcttgcctttactgatttttcgagtcgaattcactccagatgatcggtgcaggcttaaacaggtgaaaagagcagagcaaaacatttcaaaggtttattagcctcttcaatttaagtctacgatgttttgcttttattctttgaagcttagggatagactctgtacaaaattgtaatttaaggtaaaataatacatttataaggtttcaagtcccttagaatgcaacataagcatatcatgcttaaaccgttcaagacaaaatgtgtaaaagcagaacccttatgggttactttcctacaaatttcattatttagagttgataactgataagagtgatacattcaattttataggttatgataaatatgtttacgccacaataactgcttccagtttccttaaaaagtgtcagattctgatcctatcctctcagttacttcctctcaggttctgtgaccggtacatagaagccattcaagtggaccattgaagctgtgtctctttctcaaccggttcttaaacttgtgtctacttgatttctacgaacacatctttcttgaatttcttgcgtagtgcctgtgcagctgagtccatccgtgcattatcctgtataaacaaaataacaaaatcttgtcagcctcggaaaatgaggaaagacatgaaaccagaacttgtatatttgaacctttcccgttaagccaaatgaagaatgggac

SEQ ID NO: 39549 - DNA, 616 bp, Arabidopsis thaliana landsberg
attcactatatcaaaacattcaatcaattgaataacatttttttttggtttaattaagaagcaagtttacatcggaaaatgcagtctctattaaataggaaaactaccataatctttttaaggaaactaataattcatccctcaccataattatactaattaacttgccattctccttcgcctcctcttctagtcttcttatgattatttttcttcctcatcttgttttttttttttcagacaaaaacctagatagctaaacatgccttgtttgttcatcttcatagctttgcttctaagttcttgtattggaacgttgaaagcccttgatcagacttgtggcaacaaagtcgtgaacacaatcgtcgtcgatcaagccggttcaggtaagttccgtactgttcaagctgccattgattcggttggtgaattgaattctctatggatcaaaatcaaagtaaaacgaggtgtttacgtgtaagtaaataccaactctctactgtttttctttttccaattttagaactcagcgttcttgtccacaattttctagcatttgatttgtttcgaatgtaaatcattactgtcgttggtgtagaaatagtgaccaagcagc

SEQ ID NO: 39550 - DNA, 465 bp, Arabidopsis thaliana landsberg
cctattgtttcattactgagtggttgcgaggcgtcttcgttttttgtcgaactgagtaaaaatcagaggggtgctatggtattgtttaagtgattctcaggccttttgtgttgaacttgttctgttatgtggatccatttgcttcgagttaacatggtgcttaccgatgcccttatgtttgtgagtgttttggctagtaacaaatttgtgccttattgtatattgtaatgtctacggatctttaagtggatagtgtaagggtctttatgggtcaatcctctgttaagaagcttcttgtttcgcctgatggtgttattatctcaagtaaccaaatacgtggttgtttgattcgctctcttcatatggttttttgacagttgatttgaacctattatatgctgctcgagtccagtggttgtaagagtgtgtaacagtatatatatgtgggtaaaactcacagtcaaa

SEQ ID NO: 39551 - DNA, 845 bp, Arabidopsis thaliana landsberg
aaaaaatggccaatgaacatgtaagtgagtaatttttatgtacaatagacactaccatatatatacttctcttcttattttggcttatttgcaataatgtagaaattgcatacataaaaatatttgtaggtcgaatttagaagagaataaaagaaagacgttttccttttgggaaatggttaagtggagcaatttggttgttacaagtaaattacaaaaggacttgattcaatttgtttgattgacatgtgccctaaaaattgtactccacagaatcgcataaatcacaaaaacttttataaagtatctctcctctaatttaaattattaatctaatgaatgtatttaaactcatttcgacattttattgggtggggatttatgaaaagataaagaaaagtggggtctcttttatgtttgtcctaatcataatcagaatgttctctgagagacttattctttgttccattgtgcataacttaaacttgtaatgattagattttccaatgtcattagctagctattaggctttcttgtaaactttgcttttaatatattgaaaaaaggttcgaacataactaataatccaatgaaattggttttgcttggctgagcttacttttttttagctaaaaaagataacattttcaaaatgttttgcactaattaaaagcttttgttaaactaattcgaattaggccaccttagttttgtacaaaattgtaaaagcctcgtgtcatggcaactttttgacaagttaacttcgttcctcaccctaaagtgatccactgattagaaacaaatattccatatgataaagaaaattatttgtgaatattagtatc

SEQ ID NO: 39552 - DNA, 780 bp, Arabidopsis thaliana landsberg
gggttgtccagagcagttatttaggtggaaccaattttctatgtgttgcttctttttacagctgatttgttatgaaaaaacatttcacttttaaaacatgtaaaaataaaacattacaaacgatacatatttcatttttgttgctttaattttcacctttttaatggattaggttagacaataagcagatatgcttatggtaatgccatggaccatagtttggaccaaaaaggcctacattatattatgggcctttatgaagtccattagtttcgttcataaaaagacaatttaatctgaagtcccacatttttaaaaatgtttaattttaatctttcagcaagaaaaagaaaagggcaaatggttttgctatgcaagtgaaaaaaatattgaaaagaaagaaatttttgaaagaaaagtaatactacttagtaagagttagaaaagtaagagattaatgattaatcaaaggcgttaattgctgtcaaaagtagcaaattactgcgtaaagagttgtctaattaagactaggagttcagcaatattgcagtactcttaaccaaagatttaatattgagtaatctattcgttagttgaggatgaaagttgaattttgataggtactagtgaaaacacctttattcgatgataccaataattgggttttaagataacaatagttgatattataatggatttcactcaaatgaaaacacatttctttctctaatagtaaataccttctttcttttttgtaaagattactaatattttttagtt

SEQ ID NO: 39553 - DNA, 594 bp, Arabidopsis thaliana landsberg
agtcacctcgtcttgcgtcccttttactttcatacctgaccaaactttcaacttcaatagcatgtttcataacatatgaataaactttttttcaagcgttacactttatcaattcagcgaattttaaattggatcacatcacaccctatagaggacacttgttgaaactaaggtcacatttgttgacttagatcgtgtaagtaagaactatcatatatttagtaatattaaatttgtttgtaattttacaactttttcagatgtaaataaagttcctaggaaatttaaaaaaaaaaaaaaaaatgacttggtttgcagttttcttacaactttgatgtactaaataacaaagttttagcttgggtaggtagaaagacttatcattgggtaaattaggagatcgagatacaagtctttccaataagatttcaatctcccacatgttccggtgattagtataggtttcagtactagatattcgacctattaaaaaaggatttcaaaacatgaaaaagctcaaaagaggttagagagaagaaaaagtttagtgacgacctatgccaatataacttttccacatagagagagagagag

SEQ ID NO: 39554 - DNA, 1630 bp, Arabidopsis thaliana landsberg
aagctcaaatgaacaagtttgcaatgaggcttatctctatgtctaaagtgaagtatagcggcctacatctaatccaattcgggtttcactaacatcacaagcattttgaatagagtgaagttctgttaattatcgttaagtccataagattagttccgaatcatatgaaaaaataaagcatcttgataagaacaagacattctagatcctgtatgatacacaatcaagaaactgcatgttattactcaccggagagtagttgccaagcaatgctacaagctcttcatcgatccctagcctttgagagaagaagtgttaacaccactgatcagtacatactgactaaatactgtattttcaatgcaaaacgaatttactctaagacactaaaatcacagcgttgagatatttaaagcttacttctttccttcaacgtctacgccatgcaccagaaactcatctgaaaatcctccaagaaactccaatgatttctcgtcaaggatgacgtcgctgaacttctgccatctatcagtaacaattgcgtatcttccatcctgcgcaacaaaataaccatataaatacctcaaatgccgatcttcttttcatgaccaataacattaaactgaagatgaaactagtcagagaatcaccttctttctgcagctaaggtccaatatcagtctttgtttcccaacagtgctcacaatatctttgagtctttcaagatcaatctttccattgttaaatacatactgaaatacaaaacgaaaacataattatcatcagctatacttactatgataacatattcaatcaagctagatgacagctataccgaagtgacaatgacatggcttgctccctcctcaatataactcatgcaattctcagaattgattccacctccaacttgcaaaccgtctagaattcatcatcttgtatcatatataacacatcaaaactttacatttcaaattcaaacaatataaaacaaacaccatgtgacattcaactaaacacataccaggataagcatgtaatgctccaatagctgcagcttggcttaaagggtctgctccaagcattatcacatgaccacccgtaagcccatcttctttgtacatctgtgcatactcttccgcagacttatccgattcaaaattcgtaacgagaactgaaccatcctctttcaagtcactaagtgtggatccaactatctgtttcacttttccctatcgaaaatcacatcacacagagatagatccataaatgaattcactgcactcaacagccagtgaggattttctaatcggtgaaattgatttcataccttatgaatatcgatgcacggacggaattgaacagcagatatgagctgaaccctcgatggtttagagactctgagatgcttgatgaacagagagctctgattcttcttctggaaccaagtgagaccaccattggagtataattgggagctcaaagttctcatctttggaactgaaactgtaatcagtaagcaccagtgacgtatctggttctagatattctagggtttagatatcggtttaaaatatcggtttattccggtttgggttaaaattgaaaatcgataaaatgcccaacatta

SEQ ID NO: 39555 - DNA, 2213 bp, Arabidopsis thaliana landsberg
aatatttaagttattatcctaatggagaaattaatctgctgagtcagagaggggaaaaaaatgagcctgctacgaggaaataaactaaaaaaggtcaaatactaactacttttcttgtttatcttgaaacttttcgtatatatacgatttattttattttatctgattttgaataacaattagatatatcggtggctttttgtttaggataataaacactcttaaatcttaggaactggagtaatagatttacgtatatgagctaaaataaaacccagtaagcgctcttggtgatttggtgttagcctatggctagtggccttttttttgctaagagacacagcatcaatgagaatgatcatagttataataaagtacttgatgatgtatatgtcgctatcaatgagaatgaccagaggtttgatgatgattatattgctatcaatgagaatgaccagaggttagctttggctgatatcctaagaatgaggatactttgtgaagacagttatgcaaatgagaagccatttgcaacaactcaaattttgactgttacgataacacgtacatccgtacgactataagatttcatgaagtgattgcattgttttgaagcttcttaaatctcagaagctacataaagcagaagaacgtaagctagaatttcttctgctgtaagaatacactccaatacgcaaattaagttgaaagaatgattacaataacggaactcagacttcaaagttgaaagaatggtccaattgtcaacatggaagctcccaatagccgagatttgaatcaaggtgatgccgtctactcgagttagtagaaggagaaaaaccaacgaacagtagtgaagctttctaatcttctattgcacacagacgctctggaaaaaaaaaccatgaaagagtgaaacatgtcagaggagcagctagcatttcaaaagaagaatcttggttggttttgagagtggctcaaagtgagattttgggtataaaagaaaagaactcttacttaagtattcgtaagtcaatatcatcgaggttccccaagccgacatgctaaagaatcttgggcccaaacccctatagaatcctttccagccatcttctgctagcagttttttcaccacttgtttcgctgaaggtctattttcttgatgtcccatgacctgcacagagattttaccgtttgtttagcatagtttctatgtagcaatacccgaagttatctatttgagaaccaggacagcacgcacggaagctcttctatattcattagagttaaaaaaagtaaatgcaaaataaaatcaagtttttactatgaatgggaacactttatacctgcagtcgcgttttgattgtgtctaatggtgttgtaattgaggatgctgttgcaccagcaataattcctccagcagcctggaccataacaatttttgacttactaggagcagcagttgcatccgagtcaccaccataacctaagaatctgcccaacagtagcagatattgtatcagcggaattgtagctttggtagcaaatccaaattccaggaacgactgaaatgcaagttcttgcaatcaaactaaaatggaaactatcatcaattaactagaacattcatggctaacctccagataacacgttggcttgatccatagctagcccaccaagcggcacttgaaggagaataggtcataacagacagaccaaaccctctgtataatccccttacaccatatgacttaatgatttttgtggcaacatcgataccaccagtatatgtagcatgacctgagtatccttgtaccatcaacttttggctaacctgcagaaaataggagaaatatggttttcagcaactcatagtgatagaacattcacagcatttacaaatcttacaaagcggtagtgttgtatataatacatacaacatcaattgggacaaacacagcctgtgagaaaagagatgctgtcatgccagcaattccatttgcaatggcggcttgtgtaggttcacttaactccaaaggtgcaaccaacttaaaagcagaaatcttagtggtctcaagagcagttagaaatatgattcttgcaggtacagcacctgtaatgacagtaccaaaaccttggtgcagaccaggaacaccatcattctttaaaattcctttaactacagaaaaggcacttctctcagcaatctcttt

SEQ ID NO: 39556 - DNA, 664 bp, Arabidopsis thaliana landsberg
gtgcaagagaaaaggaagaaacaattgttttgaaaatatgagaggctggatggcctaagcgagaattccattcaactagggatggtttcgatgatgaggatgcaaagaacgaattgattgtggaaggggaagctgatactcgtagagatcactattatttttgcctcggagtaatggggcccgcgagttcagatccttcacctcaaagtgagtagggaaaaatccaacagagaccttattagtgttgcatagacgataaactgatataaggtttttgtgaatgttagggacacaaagaacattggataaggataagttgttagagggagggtagagatagtgaacaagtgtgtgtgataaagagatctgaaccatcaccaataagaaaagagtcatcgccatgataccgttgatgcagcgccaggttatgaaggtcacttatcatttggtgtgtggctccgctgtcaagtagccacaaatttgtaggatgcagatttcctagagtcagatttgtgcgtggttgccaaggcttaaatggggagggcaacaagccgttatgcgtcgcagattggtcttgttggaacagtgaacactttttggtactatgaacaaatacttcacatagttgacacttcccttggtatcccctggtcgtttgagtctc

SEQ ID NO: 39557 - DNA, 580 bp, Arabidopsis thaliana landsberg
gagctacgatcgttgatcaaaccgtttggatatcggtctacggtgtctatttacatgaatctaacaatcttatacaagaagaagactatagtgttacggtaacattaaaaacaatacttactaggttactttaggttataagccaaagattctcgaaaatgtttctttgtaggtgactcgttcagacgcgtttgcttcatcgcctggagaggccataaccgtggctcaacaagttgtgcagacgatgttagctaaaggctacgttttaagcaaagacgcgattggtaaagccaaagctttggatgagtctcagagattttcaagcttggtagcgaccaaattggcagagatcagccattaccttggcctcacacagaacattcagtcgagtatggaactcgtgagatcagcggacgagaagtatcatttctcggatttcactaaatccgcggttcttgtcacgggcacagctgctgtagccgcagccaccattacagggaaagtggctgcagctgcagcgactagtgtggtcaacagtcgttactttgctaatggggctttatggttctcagatgctttg

SEQ ID NO: 39558 - DNA, 460 bp, Arabidopsis thaliana landsberg
  unsure (1)..(460): unsure at all n locations
acccgcccgctggcacagatctccatcgccgagctggtggtctagctgttccagaccgcgcgccgcttcgagctgaccatccagccgcagctgatcctgctgcagaagaccctgctcaacatcgagggcgtgggccggctgctcgacccggacatcgacatctgggcggtagcacaccccgtgctcaagcgcatcctgcgcgagcgctacagcccgctgcgcnnnnnnnnnnnnnnnnnnnnnnnnnnnnnnnnatggttccacctggcaccgaagctgcccgagctgttgcacgacgcgctgcaaagcgtggcccgcggcgagcagcgcctgctggccgacgccgattcgctcagccaccagagccggctggtgcaccgcatgctgcacatgatgggtagcggcgcgctgggcgcctcgctgatcgtcagcgccacgctgctgtgggcgctggcgccgc

SEQ ID NO: 39559 - DNA, 377 bp, Arabidopsis thaliana landsberg
cccttcttctgcaagcatagaactttaattttggtccacctcaaaggaaaaaaacaactcaaaagctgcactcgtgtgaaacatattgggatattgtcagaagactacaccaccttcgaatttcgtcgttcaccaccttacaagatcaagggtcccttcttctacacgcatgacttatttcttgttttggcagacgaagatcataaatcaaaatttaagaataattttgtggacttgtaaatattgtttatgctaagaaaaagagtgcatcagaaagatcaatgatctatacaaaataagacgatcaactataagactatcatcactaaatgatccaataatcttttacagctcttaaatagtattttttaacgata

SEQ ID NO: 39560 - DNA, 738 bp, Arabidopsis thaliana landsberg
  unsure (1)..(738): unsure at all n locations
aaagttattattctgtggtggcgttaaaaattggttaaaacttaaaactgaagcttaaagaggtgtttcattactcgacgcaattcttaatttttgtagttaaatattatgtttttatccttgaatctccggtttcgtattctcatgatgcttagtttttctattntgctgcattgttctcatttcctcagtactaaaaaatgatcataagtcattattcagtttataagaaatataataatattcgcatgaataattatgatgattgtcaagtgtacgaaacaataaacatccttagacttggaaggaaaggtgttctcataatttggacggtggacctaacttgcttccgtgtggaataagttatacatatcttcctcttcttctctttggtttttggtaaattatttcaattatttctatagtttggtaagttaattttttttttgttacgttaagttcctttatatatatattgatgcgatatgtttactaatagatattttcaacaagtacatgcgatggttcgaactcaaaaaccctaagaaaaaaactagccgaagccttatttattctgttttatcccaacctcaaattattttcactttaagttcaaagttatacctcttaatcccaatatcccatcatagcatcattgttcattaatcacacacacacacaaaaaacanaaagttgtgacacttagatttattaaaagatgctaataaattgatttag

SEQ ID NO: 39561 - DNA, 1072 bp, Arabidopsis thaliana landsberg
aactcctactacattacaatattggaattcttaatatatatatatatatatatatatatataacatatattctaaaacaaaaatgatcgtaacatgtgtgcagagataaaaaatagttaaatgatgctaatggtccctgatcgccatttgagtagtagcttgtcagaagtcactgactactagtgatcaaatatactctctcaatataacatattcctccctaacttataaacttttcacattcatcacaatgtaatgcattacttaactacattaggtggttaaaactcctacttaatctcatcaaatgtttccggacaaatcatattttaaggaatataatagaaatacactgagacttaaccatttcaaaactttagtatacattacacactatatacagatatactgtctaactgataatgttattttgccctgtatgattactaattagagtttacgtctaaaaccgtcccttaacttagctaggtagctttagcttatgaaactttgacagactcaatcaattcatcacacacgataaatacaaagaactacctctattaaagacgagtaatatcaaagtacgaggaaatgtgtgaaacctgaccattgaaccaagtgactttaatgctatcgccagatgaaattgattgcaaatgtatgatatgataggaatataggaggacaccactacagataatattgatttttatagggacatcagaagttaatatatcaatcacttcaaaacgtttttcagattattaattgtgaaatcgaccaccgtaacattcctttccaactaggaaaaggacaatgatgcttcgcagatacaacatgtggtaccatcaccaattattattatttttatagggaaaaattatttaatggcacacaaaaaaagaagagaaattatttcatttttttgtttaaatctgttcaaataatatctttgtcctaaacagataatatctcatttttcatattaattatatattttccacgttatgaaaaaagaaaaactgatatttatttgtttacatgatacatttacaaaccaaaaataaaa

SEQ ID NO: 39562 - DNA, 720 bp, Arabidopsis thaliana landsberg
  unsure (1)..(720): unsure at all n locations
aacaggtttcgcttttctttttaattcgttaacgatttgttttaattcgtttcctcttgattttgaggggcgggtcaattacgagccgcttctattcgtcaaatttccctttttctgtctaattcgtcaaaaaaataaaagggcaagagctttttgaaattgttgttaatggacactaattgttactacaacattgacaaatacagatgattttgttgcctactgatgatttttgtttcttaggtagaatcattgacaaatacagaagaggttgagctacgttctaagattgaagctcttggtttagaagtcactaaagtgccatcnnnnnnnnnnnnnnnnnncaatgaggtctgtatcctgtgttcactcatatatctggtacacattgtaatgtaaatctgaggctttgtgtgtgattgtttgtgttttcaggtggagatagctaaggaattggacaagttatcagcaaagttagatgatgtggatgagatgatatcatcagctatagcttctgatccacaggttcagacgcttcttagcggcacagctgatgtttggatgccggttatcactgccggcgccgaagagagactcaacttcacagcctctcttgctgatgatgatgacctttctaacaggagactactatccgacataccagcagctcttaatcccattttctttttgatanactcatgtcgaaggtttctattttgc

SEQ ID NO: 39563 - DNA, 542 bp, Arabidopsis thaliana landsberg
ggtatacccctctctgcgtaataaagtattataaacatatgatttactaaattttaagaacttttaaatttaaatggttacaatctgtctgacaggactgaccaatacgatatcgagaagtcccattgtatatatcacacttccaatttcctttattcctcgtagaacttctgatttgagttctgacttagtgccccagtttagttgctctcgtataagcttcatacaacctttaaatgaaacaccaaacatatcagtaaatataacatcacagaaaatcgaaacacaacaagactactgcaaccgggcattaacctgtaacaccaccatcaaaagaaagcaatccaatggacttgggcaatgcttcttgcaatccagagatcattggctcaagtgttgctatctgaaagttttaagacaaaagagctattttagctggttcctttgtataattagtacttcacaaaaggaataaatggtacaaaaagtgcaaatataccttatttgatatatggtccagtaaagctcttatttgccaaggc

SEQ ID NO: 39564 - DNA, 733 bp, Arabidopsis thaliana landsberg
ggtattcgtgactctgcatacatctttgtcagttcatccttctgagaacacctcataaaaatgaagaagaccatagaacttaacgtgagaggaaacaggaaaccccaggatcaaaacaaagagccaaacctgctttcagttacctgacaggatcttaatatttccctgtctgatggcattctattaaatttctcgaagctgatacgaactagtaatgtcctgcaaagcattgtattgcagctaaatcggtcacgagccagaaaaatacaatgaaatcactagagcaaagctaaaatcaatcagaaagaaagagtaccaaaatcttgcaggaaatgacaaagactctatgtatagactcaaacaagtctgccgacatgaatctacaagacaactgaaacaccagctggatgaatcttcaaacattacagaaagcaaccaggattcactgatttagaacaaaaccttacgtccttacctcgtttcaaaaggtgaaaataactcaacagtgatgctagtcttaaaacatgccccaagtataagcacttctccccaaggaaatttagtattcacaaaatgaacatttctgataaaaatctgcactaaaattaatcaaaacaatcaaagatctcaaactagcaaagacacaccaatctgaagtaaagaggggaagtcttacaagggaaccagttcggatactatgtgatctgttgagtatctgatcagtcagcaaaag

SEQ ID NO: 39565 - DNA, 644 bp, Arabidopsis thaliana landsberg
  unsure (1)..(644): unsure at all n locations
aaacaaggagggaagaagaagaagaacatggcaggggcggcctcagcgctgtttttgctcgatatcaaaggtcgtgttctcgtgtggcgcgattaccgtggtgatgtcaccgctgctcaagctgagcgtttcttcaccaaactcatcgagacagaggtgaagttttaaaatttggaactaatgaacaagcttgatcagtgcttaaaaggattcaatttgatnnnnnnnnnnnnnnnnnnnnnnnnnnnnnnnnnnnnnnnnntgcgggtttgcttactttcgtctaatatgttcagggtgattcacagtcaaatgatccggttgcttatgataatggcgtgacctacatgtttgtacagcatagtaacatttacctcatgatagcgtccagacagaactgtaatgctgccagtcttctcttcttcttgcatcgtgtagtcgatgtaagcatccctagtgattcagttttttgcatttccatctgttttctgaatttgaagaaaaaagaacggcactgtttcatatgttacagtcttatactgatcgtaggtcttcaagcattacttcgaggagttagaggaagaatctttgagagataactttgtggtagtggtaagttaatgcttctcacatctcttcttata

SEQ ID NO: 39566 - DNA, 596 bp, Arabidopsis thaliana landsberg
  unsure (1)..(596): unsure at all n locations
tcaccggggttgagccagagggtccagccttgccactcagtgcactggttcaagccggtcaagaagattttccccccggatacaggcttcattcagtcaccgttccagcaagtcttcaaaccgaaagcctgcgattgaactggacccctttcgaagacaaggcacattcaatggccaccgatgaacacgccagccacagcggcggtggcatgcgcaaaagtagccggcccgcctttgtactgcctgacaacaccctgatacagtacatcaacccgcacaatggttctgtgattgggcagatggcattgtcggatcaatttgcacaatggagcaagcggctgcattcacgcctgctggccggaaagaccttgcgctgggtcagtgaacnnnnnnnnnnnnnnnnnnnntggatgctgggaaccgggctgtggatgtgggccttgcgtcgccctctttcaagccacaggcaaaggttgaaacgctggcacattgggctaggtttgggctttggcgcaatcaccatggtgatgactggcaccgggctgacctggagcaactacgcaggccagcaggtccgggcattggtcaaaactacc

SEQ ID NO: 39567 - DNA, 589 bp, Arabidopsis thaliana landsberg
atgtcggtctacaatgccgatcaaaacctcgaaccgaaccagacccaagaacacggaaatcttgacattttaaaggaaagtgtagacaactacaatcaccaagcacatttgcatcacaaccttcactatccattgtcatctaccccaaatctagagaataacaatgcctatatgcttcaaatgcgagatcaaaacatcgaatatttcggatctacgagcttctctagtgatctaggaactagtatcaactacaattttccagcatctggctcggcttctcactcagcatcaaactctccgtccaccgtccctttggaatccccgtttgaaagctatgatccaaatcatccatatggaggatttggtgggttctattcttagttatctacttaagggagggacggaactttttacatgacctcttgattaaagagagagttttcataatagctaatcaatttcctattcaaatatccgagttttttttctaatcatgtttatcaattgtcttattacagaaggcttattttcaggtctatgttgaaataaatggatttgtactcgtaggtatgatccttgttatctagct

SEQ ID NO: 39568 - DNA, 1638 bp, Arabidopsis thaliana landsberg
gacagatgatttgcttgtgggataagctggtgttgacaggcaaacctcagtgctgcaacatgagatgacacataccaaatccttttctttggtttataaaaggaaatagaagtccgaagagttctttttttttgggtagtagtttatagcatatagtttcggttgtattatatcatctttgatttttagtaacgaatctaaaatggatgttttcttttggtcgaattctctattaatattcattctttcctttaaacttattatgtgcccatgaaagcctttgctaaaccgtagttttgtccaacgacgagttttggtcttcctaagccgtagcttcaataagaattaatatttcttgttaaaatgaatcataagaataatgtgtaaaaatgtttaacaataattaaaacactcatatcttttaaaattaataaaatttttagaaccggtttaatattgcggcacctttttcaccatatatataagcccaattttaagaaggtctatacatgatcagactatagatgtatggcatttttgtgggtagtgtgaattccactaccagcgaattggtagagatataataacacatacattgtgttctcgacttgacccaaaattgccaagactaatttaaaacttttcacttacaaccttttttaatgcatttttttttataaattagaagtccatatagaagaaaataatcaaacatgtctcataacagttaaataaggagtaaaatattccaaaatactttgtgagaagtcatttttattttaattatgctattttcgtagttatctactacaattatttttgtttgattttttatcataatatttgtctgaaatatttgtttttggcaaaaaataacctcatcttacatagtttcctattcttggcaacaaaatacacatatataaaataatatatatatatatatatatatatgtaagtatgtttgggtgtgtttatttttgcataattggattcaataactgtaaaagaaatttggaaccggtatcatcaaaaaggagaaaatggtgttcaagaaagtggttcttcttgcccttttgttgtgtctttcatgtgagtccatccttttagtttaaataaataatcttttattatgttcttttgttttcaaaacataattgatgcccaaatttgattctggtttagttgcattgcgtggtagaaataaagttaattgttttttcttttgtttctataatctacattttaagttgattctacaagaatctcttttggatataatcttttaatttagcaacgcttatttaaagtaatgcatcaaaatggttattattcaactatttgtatgtttacatgcttataggttaatgggaagctaaagcattagaaggagaatcaaaagttaatggacaagtgagggatgaaacaccgcatgtatggtattgcaagtacgatgataattgtcgtgataattgtccaggttgtactatcactaaatgtaactacggagtttgcatttgttcaaactgttaccatccctaatcagatttaggtgatgaatcgcatatgtaacttttataacaacaataataatgattaaagtactatataaactattttcacatcttatttggttta

SEQ ID NO: 39569 - DNA, 593 bp, Arabidopsis thaliana landsberg
  unsure (1)..(593): unsure at all n locations
gaaaaagcaaacctttttttttttcttctttccggttggtccacttttatataaagcttggttggttcttgacttggtgggcaaaatcctaaatcccaaataaacaaacagagaaaaaagggagaaatatttaacaacactaggagtctacaagtccacggcttgatcaatttgttcttcatctatttcctttttctcagggaaatccagggtttttgaattcgtactctctctctcgttgtccctctcaaatcagaaaagtatctgccttttttaaaattcattccccttcgatctttgctttttcatcgctgattgttcttaaaaggaatctctactttttcaataagcattaacattgtccgtttcctcatctttggttcttcgattctcttaaagaggattttatacttgattctgttgaatccctttttctggggttttgtctgcgtttgtttccttcttctaatccagaattaaaactagctctctgcgctcaaagntntaagttttattcaatctgggcacgtcttatgggctaaatcggtcaaagaggtgtaagcaaattctccaattgatgatcaactgttaaa

SEQ ID NO: 39570 - DNA, 632 bp, Arabidopsis thaliana landsberg
aagagtatgacaccaaaaagaagaggctgccgaagacggcatttctcttctctctttacacacaactgttctattacgggtccgtaagtcatggactcacagtactggaccattctcatcatagtttaacacaaatcatatataattctaatttataatttttgttttgaaattaatgttttcattcctagtatattagcatatcgttttagtcaaaataacatagtattatcatgacttaatattttaaaaataataatatgagaataatatatggttatccttaatctatatatataactcaagaattagacattactagaacataattttttttgtaatatatagacatagaaaattttgcatatatcttgtatgattgtgtatgcatgaggtgtgaacaaactttaaacttttggacttttctactgtttcaaaaagttgactaaacaataagaccacaacgtacatttctttttcagtcgatcgattacacatggtttacattccatttcgttatgaaaaagttcttatatatacccgtataatgaaataagatgaaaatcagttcttttcttctatattgaattttttaataaactaaaatcacagcgagcacaagttaggagctt

SEQ ID NO: 39571 - DNA, 574 bp, Arabidopsis thaliana landsberg
tttaaacttttacattacattggtatctttgtataaattcatttaggcatgaatatctgatccagtttctttttgtttcacagccaattacatttccagacttctttttggcagatattctgacctccatggtaaaggtatagagagcttcctaacttctaatatttatatggttaggaactaagatattggtagcaaaggaggctcagtataactaatgctttttttttatctggccaactaatggaattggttccacatttctcttttgcatggtattttttgatgataactattattctgctgatacttgattcttattcatgatttgacatcggtaactatatgcaggtattttccgacttggagcgttctgtttgccggatggtgcatagacaggtaattggtttactctgtcaattcttttttagtgacatctaatatagattagaaatctcttatgctagaggaactagttcgtcatttcctatgatttgaaatatatagatagctctgcagctaccaaaaatttatcctcaaagactaaaaaacagcgggatatgacttattagca

SEQ ID NO: 39572 - DNA, 564 bp, Arabidopsis thaliana landsberg
cttttcttttcttttctctctcgtctaactcttttttggatataacggcttgaaacttaccccatgggatgaagagtttacaaggatatgaagaagattagcacaataatttacaatggcagatgttttaggtgtacagaaaaaaaatgagaagcttacggttgaggtgagctaaaaacagcgtaaatagtatattaaaaagaactgtgtatccaagcaaggcagcgacaccgatccaataccagtagttcccagagaacaaacttctttctttcagcaatgccaaaccaagagagtcgctagtgtgattcccagcagtcttcagagacaagaaaaacaaccattaactacaattgtatatttcaccttctaagaccgaaaaagttataaatagttttggttatattttcaccttttgccaattatgaccaaggaactcattcacagaagctgcgtttgagcatacatcaatggagaaatccagtaaccccatatccaccagcttggtatgctatctgtgaaagcgaacaagaaaatgaatattcatgtgggtaaggagagagc

SEQ ID NO: 39573 - DNA, 646 bp, Arabidopsis thaliana landsberg
attatattaaaattatgtaacattctgaatatctacaacggaataagtgtaactgatgatgtgtttatctaacaacttaaaccagattttttgtaagttaaatgatcgcaaaatggttagtttttaatgttcaaataagaaacaaaacttaaatcgaatagtgtgttgaaagcgtttgccaccaatcgaatacgtcttccatgcttcaccgtttaaactttactttctattaagaaattttgcacaaaattttattgattctcttaataatataactcttaattgtgatgattatgaacgtgattgaggaagaggatatcgactttatacctaattgccagcatcagcacttacttaggatttaatcgtctcatgaaaaatgatttgctgtctctcatcaaacctcatattttccattaaatcaatgatatgtcgtatgtatgtctccctctccaatgtccatgccagataattttattacgaatatattatagttaatggtaattattacggaatctttgtactttatgacgcaaaaaatttcagaaataaaaagttgaaaacgtttcccattgttctgcgatcattcgaaccttaaatgtatacactccctattaaacaagagtctgccctagcaatattatta

SEQ ID NO: 39574 - DNA, 191 bp, Arabidopsis thaliana landsberg
cattaaacggcggtaacttgtcaacgcccaggcttttgcgttttgtggcgtgagccgtggccaattgggattggtttgcgacagatacagctcccactaaaaccatggtgagctctcccgcttggattgcttgtgccatatcattaaaggcgtagaggtcttaggtctaggcagcttaccaggagaaactt

SEQ ID NO: 39575 - DNA, 527 bp, Arabidopsis thaliana landsberg
cctcagtgagtggcgtagacttggaatttccaaacttgtgtttggtttgtgttgtttacgccgtacacacactgctggaacattagctcactcaaaaccactttgtgatgtgtgtaaatgtggtgctgatgtggcggcgctgactgtaaaataccaaatatacttttttgtcatgcacaacaggtttttgttttttccctcatattttctcaattaacaatttttaaaaaatctagaaattcacactagttaaattaaatatcgtcgatgagaattaatcagtcaacaaaaaactaatcattttatttggataactaaatcgtatcaaatgggaacatatgtttacaaccttttagaaagaaaaatgaagatatgttgatacaaaagatgtttctcttttccaaataatctaacaaacgaatcagaagaaaaaaaaacaatattgtgacaacaatcatcaaacctctgcaactgcattcttcacacaatcaacattacacaaccgaactgatctcaccatttcaccc

SEQ ID NO: 39576 - DNA, 984 bp, Arabidopsis thaliana landsberg
cttattgttaatattagtactatttaatcaaggcccacttttcgttcgacccaacgtcatgaccgaatttatggtctatgaaatatgcatatatcatattgtttataaatggtcttggtgttgaaacataaatgtatatacagttgatgcattcgtttaaaaaaattccagagtcctattgtggtaaagaaatagactatatataatatagtgaaaactagtgttgtatgtctataatttcaaattagtctatttcagttttgacaaatcgttatccaataaacaaaatttagtaatcatatcaaaaatgtagaaacctaattcaatctgcactgcggcataccatttaaaccccgaatgattaaactttattcattggtgattttttttttcttagtttgaaaatatggtttacctaaacaacggaaaacaaaaaaagaataaagttttgatgaattattgcaaacacaactacacaaggaacaacaagtaggagattaaagtctcgaaaccatattaaaaggagattggtgacataagtgctctgaaattaccgttgtatgtaaaaagaacgagttttttggagagcactgtacgatgtaagttgtagcaagttggggagggtacagcacgagcgacgatcatgaagtctattaccaaatgaaattgtgatttagggtgctgatattcataaacttgggttaagtcgttgtttaaaattgtgttttggctgttagcgatgaattatagtaaaacaagaaagagttctagtaaaaaacaaaagttgcttagtactaataaaattcacaagaccattcacactatacaacaataatccttcgttgccagcaacctattgggactgtgttataggttaatctctctttcacggactattaatttttggctcaacctcaatgtaatttatttaaattatattttaacgcatacacgtgaatttatacatcttttcataagatttgc

SEQ ID NO: 39577 - DNA, 564 bp, Arabidopsis thaliana landsberg
gaaaaggctcccacaagaccttcaacatacatttacaggtggttatcagcatactaccataacatttataaaaatgacagcaggattctgtttctgcctcgtaccttgtgcatattattataattcacttcaagatcacatgaaaccaaactctccatatttttttcggccagattagctcgcaggagaaagtttctcataagaacttcaagaagcataccgttacatccccactgcatgagaataaagagacgagaagtctttagaagaagtagctcaaaaatttcaagatgaccagtggcatatatagtgcaaaagctaatagacaaggagctcacagacaatcagggaagaatatatgttctagacaaaagaacgcagacccttgcaaaatatttaaaaccaaccaaaattcacccatcaaatcaagctcatcggtgaagaaaaattaaactcatcatctcaagctctaattacaaagaagaaccattaaattcatacattaactgatcacgaagacaaacacacccaagtgcaaggtatatgttaatgaatcatttgatg

SEQ ID NO: 39578 - DNA, 494 bp, Arabidopsis thaliana landsberg
atccaacaattcaaaccatcgtatcaaactcggggagtgttttcttaaatacgataatctccataaaaaaggcgaagagaacaaattcaatgatcaacatggaaacagaagaacaaaaaattggaatctagaagccaatgtgaatcacactatggataacgcattccaatgatttacaagcaaggagctttagtcatcaaccaaagaattacatctaaacaggtcaatccataatccatcaataaactcaaatgttcatttccttctggacgaaagaaggaatcagagaagccaagtataccaaattcatccaaacaaatcaataataacaaattcagtgaaaccttaaatactaaaaccaacgtaataaaccaagagaaaaaaatatattgatcagatgctgtatattacagaaacgcttaaaacacaacaaaattttcaatgctaagaacaaacaaagctctttggttaagaaaacataaatttcagaatgc

SEQ ID NO: 39579 - DNA, 798 bp, Arabidopsis thaliana landsberg
gtatgttttctattaacaaaactcttacatctacgagactacgaccctcattttttttgcttctactacggtttgatttagtaggatactagcataaactacgcaatttggaacgtgaacaagattatatatagtattctcgttttaccacaaccaagtaataacatgtgtatgtgaaactgtggaagcaatttcaattttaaaagggttaaaattgtgtgacaaatttttcttgaaagcttaagagcagcggtgatcaaacacaaaatcaataaagcttctcgatttacacctgttatttttttaaggataataaataggtgattcaccctttcatgcattggcctccaatctaaaaatgatgcttgacatgatttggcgctagttcttcataaccaataagagaatttttttaaaacaaagacgtagaacattcatgatacatcatacatccatgttaaacattacccatttgcactctaatttactatatcatttctttttatcaataacatattcacatgtaatgggaatctcgatttaacaaaatatcccctcatttgtttaatgatgaccggaatccgaaaacaacgtctacactaacttccgaaatttttatagccgcttcttgaatttcacacattgatccctagattaagtgactaaccgtacctggtttaatcccaaaaaaatcttgggcttgaactccgcctagcaaggattgatcttcgatgatgtatgtatagactaaccttacttggtttattccaaaattcttagggctcttgatattcctat

SEQ ID NO: 39580 - DNA, 735 bp, Arabidopsis thaliana landsberg
actttatttcaccatttttagtaaactgatgattttcttgacatttttcttatataataacctttttttttttatttttcgttcagcaataataacatttgttttattatcttaaaatacaagttcataagaaaactttacaacacctaatctactttttgactttaaaattacttaaaaatgcagaactggaatcaccaaagggaaaatactcgggttagttgaaccaggaggaagtaatacctaagcaggtatagatgacgttgagtcttcacactgtttcacaagcttttagttgagtactggatcaaggggatagaacaacaactggatttaagcttgaggatgttcttgaagaagatttgattctgtccaagagtaaccgagcatcggttagcgaacatccctgattcatttcgatagctactggatattgcgacgatctgttcatttctaccaccattattccctgcagtaacataaaaatgaacattttgaaaaaaactagtcttccgaagtatggtcttcatatccagtcctaagcctagtttctagattcaacttatgtctgaaagtaacttatgtttgatgtatctgatcatataacaaagacagtctaaaactgatatgttaggaaacacaagttagcaggttttacctcaaagtcagcgagaaacaaactggaagcgtttcagtttctcttcatcatggcatttagtgatgttggagctgacg

SEQ ID NO: 39581 - DNA, 405 bp, Arabidopsis thaliana landsberg
cctaaacgccctgttgagctcattgaacgagcaagggacgcagtcgaggtttgaacagcagatattacgggtgcagcttgctttggagggattataggagcactcaaaggccttgacataggaggtgctggttgttccacaggtttcggagaagcgattttctgtatatcagctctaggacccactgtttgcaactgagcttcacgagatggtgatgcatgatgtgatgaaggtgatttaacagatatgactttcctgtttggaaccgcctcaacatttgaaacaccctttttctccggttttccttgcactggagacggaggattccaaggagcagctctggatggggaaagtaccgcagcacttttctctttcatctgaatcatgttgggatcctgcaaaata

SEQ ID NO: 39582 - DNA, 746 bp, Arabidopsis thaliana landsberg
cttttttttttgtctctcaacattgtctctcctatataatacttaaccgatcgtgagagctagctgggattctgcaatgttcttctgttcttgagagacatctactgcttgttgagataatccactcacactagtttctaaggcgtttgtcacactaaccacgttttgaacccgaacatctaggagaccctaaagaatcatgaatcatgcttgaggtctgtattaaagcatcagatttactctccaagatatccaatttatcttctgtatactgagctgtattcttgagctcattcacgagcctctctatctcatttttgaacgcattactcctgccataccaaaaagaagcaaattgagaatccattttggcaaacaaaagtaataacagctagaaaaatattcatggtaaattgtttttcttactgtaattgttggcagatggtgttggtttcaagcaagaaatcgagatagatcttatgctcatgatcatcaagcttcttgaggcaactcatcattactgattcatctttacaggttggaaacgccggtcttcccgagtctttgatgaagcaatcgctcaaataccaagcaaatctctttctcttttcttctgtagcaatcgtttctttgcagccagccaagaggtaactataagcattttgccagcaactggttagaccaacaagcttgttttcaaggacttgaaccgccttctgatcactgaaaacttccatggagaagtc

SEQ ID NO: 39583 - DNA, 541 bp, Arabidopsis thaliana landsberg
gagacatgcagagaaaagaggataaaagagaagtctaactatacaagcccatgtagccgattttatgcttggccatatatagagtgcggtgagtgacttgcctacgaaatccgatatgttgtacacagtgatgagcaaaatgggataccaactttggagaagttgggacttcaaattctcagctataaatcctggaaatatcgataaggtaacagagtagattattagcatacccgaagctggccacttgatttttctcccaaccatccatattgtcagagtcgaatgcaaaggttgatgaaacttgaggtgttgttgcattactggtagcttgtgtagcacgttacaagaaatgaagcaacataggaggatggtagagctgactatgaaataggaatgagcactggttcgcatcccctgcggtgtttgtggcagcgaagctttagtcgcaatcctaaggagggagatgataatacctaagcaaaacagagataacctaataagcttttgacaagttaaatgactcaactcattggttaac

SEQ ID NO: 39584 - DNA, 512 bp, Arabidopsis thaliana landsberg
gaaggcatgttcaaacacaacgccgacgtagcttggggtgcagtatatggcacgttctggcaggcagagttgctcagcgcaggtccacaccggcggagaggcaattcgacacatgtcagaggttgcgtttctcttgtagcgtcatgttgaccggggctggagcccggatccatttgctgcatcccgggtgttgacagcaagagattttggcccgctgtgtcaacgtggcagcaacactgtatcgcacagttcaagaaagtgccactgtgctcagcaagcaactgtaacccctccatcagccagcgccaagatgtgaccatcagaccgccatatgagctgcgcagcaacttgccactgggcacacccacaatccaaacacaacccaccccaccccaccccaccccacccaccgttccccgacctaccttgtccagcatgtcggtgagctccgcgggattgttgggcaggtcctcaaacttggccttgagcgcatcgctcaacgggtggttggc

SEQ ID NO: 39585 - DNA, 505 bp, Arabidopsis thaliana landsberg
cgaatactcaaaaacgagtgtggataaaacgtgttctccacccgccaatcaaattccatcaaaatctcaatgcattcctcattacatatctttagattaccatccaatcataatcctcaatttccggttttactaaaccggtttttacccgatttgatttttcagcctcaaatctgacaaatcatattcacaacgatctccttcttccacatcgcaacccaatccctctctgtctcttcctcaattcctaatctctctcgcaaaggtttggtttttttgcagacaaagagaggagatttgagattttgggtttcaatggcggtttcaagtgctttcgttggttgtccaaagcttgagactttattgaatcaccataatctatctccttcttcttcttcttcgtcctctgtttcacagacaccattgggtcttaatggggttcgtgttcttccgaagaacaatagaaccagacgaggtttgatccaaaaagctcgttgtgagctct

SEQ ID NO: 39586 - DNA, 586 bp, Arabidopsis thaliana landsberg
ccccacacttggtctaactaccaaccgttaactttttaaaaacacaaccccaaccggaaaaggggaatataaataccgaatcacaacttcctcaaaaaaaaacatctcggactccgaatgagataaaccttacaaaatacttctatcccgatatgaaagaaacccatactcttaccctacccagacatccttctccttttgcgaccccatcttccattacaacaacgaccaccgtcacatcaccatttctcctcccctcctctcttccttctctaaccaacaacaacagcatcacctcaccctctacggacagaccaacagcaacaaccagtttcttcatcatcaccatcaccaccactccttgtacgggtccaccaccaccaccactccttacggcgcctccgatcccatctaccatccccactcttccgctccgccagcctccttgttctcctacgaccagacaggaccgggctcgggatccggatcttcctacaacttcctcatccccaagacagaagtggatttcacgtccaacaggatcgggctgaacctgggaggccgtacgtacttctcagcggcggac

SEQ ID NO: 39587 - DNA, 735 bp, Arabidopsis thaliana landsberg
gccggggcgccataatttacaaactctacatatataagtgctttgttgctaggcgtaccatattgtattattggtaagatcctatggagccggtcacgcgttgacaagcaagaccttagacctctctcacgactaatctatggcatggtaaaaaaatacagtatccatattctttcacttcatcagaaggattagaatgaattaccggtatataccaaaataaactggatatccactagttcctcactaataatctacacttaactttgtttcagtttatattgaaactcttcaaattcaaatattgatatacattatacaatatatatatgtatctgtaaattttctactacataaatgattttttacctctatcgatcgatatgtaagtatataatgatgataaatgccgaagcataaagaaccatttgaattaataacatacatgtgcgtgagagagaagggtcaaaaagggcaaggtgggtcgtcaaagactgttgggggcaaaagaagagaggaataatgaaagagtgcacgtagggctttgcgtgttgtcctaactttctctaacatggaaaaaaaaaaaggtccctatgttgataccattcctccctctttcattaggtgattgtgtatataatatatatggcctatgattaatgtataatcctccttcagccacacatggactcaggataggtaaatatgatctctagataatggtcttactatagc

SEQ ID NO: 39588 - DNA, 513 bp, Arabidopsis thaliana landsberg
aagatccgtatttcctaatttaacgcttttcccaagtaagcacaacttacaagtggaattagagaaagattgaaggcaagaatctaaatagtctggggaactttatcttgaaccacagcaggattctattgatagtttcaccaattttgaaaacatagaagacgttaagatcaatgtggcttctattagtattataacggacactctcagcatcacttttcattagacagacaactagtcacaactcttcctacctcaatttttatccatttatgatcactgtttttgcatgcaactttaaaatggaaaaacaatatggttattaagtgatttcatacatgaaacaaattttgagcatgtcgattataaaagatatgtcaaatactcttaccagtccagcaattttcttaataatagtagctggctttgagttcaatccactgacaagttttggtaatcaactgcttctgcctgaaaagctttttatctttctgaaaatcaactagaatcaca

SEQ ID NO: 39589 - DNA, 848 bp, Arabidopsis thaliana landsberg
agagatctacttacttttctcagtttctgataattttatctcgtggatgtgataaagttctaaaagagaggaggaagaaatctgtagggattagttttgtagaagatgcctcctttcaagcaacagcgtttaattttgagcctaattgctaaatgtgacttctggaatcaccagaatctgtatttagggttttgtatagtatagcttgccagatggaatctgatcagaagtagattgatccatcaaatatatgggtaatggaccaattcaacccatttagctaatggactgtactaatccatttggatatgaaacttatattttctctctaaagggaaaatagtaacatgcagcccatcaaattctaattggggatgaaacgacgtcgttagaaatgggggcgataagcatccaaaacgacacagtttagctaaaaggaaagacttcgaaacgacacagtttcaagaaaatatagccgttagagacaagagacgggggaaaggaaaaaaataaggccgttaagagtaagtatgtgaagaagccattattcaaaatatatatgaccgttagtgatccttccttgtccttcttctttttttatttctggttacagacagatacattccctctgagaaccaagaaaacaaaataataataaaaaaccctaattccccgctccacttctctctctcacgctctctctgtgattttagtatggaagcaacggcggaggaatcagttagtactcttgttacgacgatggttgatgagacgtatgagttattagcgcctcgatggtttgatttcgttaatggagagactgaagatgagtctcgccgagaagaact

SEQ ID NO: 39590 - DNA, 579 bp, Arabidopsis thaliana landsberg
  unsure (1)..(579): unsure at all n locations
atacccacaaacaagttctctgctaacaatatctatatatgnnnnnnnnnnnnnnnnnnnnnnnnnnnnnnnnnnnnnnnnnnnnnnnnnnnnnnnnnnnnnnnnnnnnnnnnntcaatgggagactctgaattttaaaacaactgaagctccaacatcaacaacattcaaatgacccttgatgctaaacataaaagagttttacaaaaaaaaaattgttcttcgtagctcaagcagttgtaccaagttaccaaagtattcaatatgccataaaattatactatatccaaagatgttggaggaatgaagcttagttggcatatataggtctcaagctagaagatacagaataaataaatggacatgtctccttattctaggtttaagtttggttagtatatcaatatgatctcttgagtcaaatagcggtttagtgtagctccgttttttttgtttgaatttggttttgaattttttttttggttctaaaacaaaatttcattttaattgtaaatgttcatgcatttataaattagttgaagaaaaatcactcagtcatttttctgaagaaattacatt

SEQ ID NO: 39591 - DNA, 556 bp, Arabidopsis thaliana landsberg
cagcttcgctacctcgacgaccattatggctgtcttcatcagtttttcagtgaacatttgggacgtctttgaccgaacatactgtaaaagggacccaacaaaacaattaagattaaaaaacacggaattatagaccaaatttgacctaaatttcaatacttaccatcgtcttcgctctcaggttctgtatcaatttcgtcttcgctaaaatcgtaaactttaggttttctgtttaaccatttattcatcacaattgatggccaaaacctctgttttacatcaaagacgagaaaacatcagaatctttgtaatcagagaattaaagaaacaagaataaaaaagagagagaatcttaatcttgtgtacctcaggacgtttcccacgtcttgttttcatcttcttagatctcagaaaaagattttgtttctttgggggagtttcgaggagaatttgaacagaagaaaatgtcagagtttgatatttataatagtgacagagagttaaagaagagacacgaactagagcaagaacaagaagaaggacacaaagaaaaaaa

SEQ ID NO: 39592 - DNA, 705 bp, Arabidopsis thaliana landsberg
gcatttatcagccactacggtaattacattatttgtacacaaaaggagaaaaaaatacgataaaaccaattttttaaaaaatagcaaaagtagtgaaggcgaaacacgagaattgaaccatttaatctctcggtcccaagcattaactcgtgacatattacattttgtggtcttgtgtctacactctacagttacaagtgcccttttctttagggaagatacattttagttacaattgattttaattcattttagtttatcaaaagaaaggagacaattagggttttgtatttgtaagaaataaactaacaacaaaagaatgcacatggcgggaacggttaaactacaacttttaaggggttaatgctattctaattcagatgtctaaagagttaaagacaaatttttaaaatagatgagtttataacttgaagacttgaattgaatccaactgtctctcaaggacttgaggagggctcttctattctttgacccaggatggcctacaactatactaaattaacgaaaatatccaaaaacttttgttttctttctgatttgtgacagtctgacagattagattggaattagcatattttaaacctaggattaatgaggttaaacttttttagtcattgctcagctgagacagtcatgaatttaaaccctaagattacaagccgacttaaaaagtcttagtgctga

SEQ ID NO: 39593 - DNA, 867 bp, Arabidopsis thaliana landsberg
aaaaacagagtgatctaccagatatttttcttaaattttgttttatttttaaaaaagtatactacaaattacgtgaactatttccatttatgattttaataaattgattgcgaaaaagatttctcttggacctatatagttaattagttatgggtctagtgggccgggtattcttaggttttttaaggactctagttattaacttttttttgcgaaaactaggaacttttttttaatgattttaatatttctgtgatttcttaaattactcacaattattctagatatgttcttcactgtttgttttgagaaccgcacaaatgggaaaaacttgaactggagtcaaatcggtatattgaaccaaaatactaacaatatatcatcattcatgaagtgggcattaactgctatacatcgtatacactatacagcatgcagctaagttcgtcaaaataataaaaataagtgtaacgtagagaataggtacagtagaagcccaatatggcccaaaactggtacacttgttctacacattcaatcttgcatgtacgtacaaacaacactactacctacgtacacaatgcaaaagacaaataacacggatatccatctttttatataaaaaaaatgatagtgaaagatttgctgagctatttaggggtttgagagagatttaagaatcagagaaatacgaagggatcggatatcaatctttagataaaggatacattcttgctataattaacaatcacttatcacatatctcagtatcaattgaaatacatcttctaccatgcaaatgcaatccatatgcataatctttcgcttacgacttgcagattaaaaacatcttatactgaaaatgca

SEQ ID NO: 39594 - DNA, 536 bp, Arabidopsis thaliana landsberg
  unsure (1)..(536): unsure at all n locations
tctaaacaaataaccattcattcgtccatatgtgtttaatcagtaaacgaatacaggcgcgtacgcaattactcatggcatggggtttagtgatgtatattagtactttattttttgccatgcatctattgtaaaaagtcaaaacatgaaattaatataaatcatttgtttatattttgttcttacgcgtaataacaaatgatttatacaataatttatgatttttggtagtttataactggaagattccaaaccaaaatctaaattaacgtgttattcaaagaaatgaaaatttgtccatatggtaattaatgttttatataggacttgagtatgtgttgggccatacgcaaaaagtggattcagttaggcctatgtatttctttaacaatgggcctgagtattggaaacgcaaattatatatgtatccaattatatttttgttaaagaacgcanattatcttgatcgtgattattttcgtactgaccgagaccttgaaaatcaaactattttctttgacaacttatattttaaa

SEQ ID NO: 39595 - DNA, 520 bp, Arabidopsis thaliana landsberg
cacaatcggttcaactaaaattgatttacaatgtttggagattgtcaaatcttgaaatgttatggatcagtcgatctctttggttaaccactatatgcaaaaggaacaaagacaggtttaatggatttattcgatcctacttggcccgtttccggtaagatgggtactatacatgtatcagattggacctcacctgattatgattttttccaaaagctcagaaaaataaatccgatcttgacataactggattagggaagtccacaaatttttggcgtaccagaaacatcactaatcttggataagtgtgaacatataaaaggaagaaatttagttaacatgtgtggttgacgttatttagtccatcaaagtcaagcaaccatgtgacgatctctttcttctttacgttctatcaaaactttaagaccttaacttcttgtgatgtctctctcttaagtagtttgtgtttaaaacacaactagccgtaaaatgatagcttcttgaatctatacgaataatt

SEQ ID NO: 39596 - DNA, 789 bp, Arabidopsis thaliana landsberg
tatgtatcttcttctgatccttggattcattcttcataggccacaagccttgtttcttaggttgttctgttggtttttcagattgaaaatgttcgttccgataacactacttgcttttggagttttggttcctgtcaattggactggagaaactctagaaaatatcgatgacttgacattcagtaacgtcgataagctgtcaatatcaaatgttccaccaggatcgccgaggtattattcactactgctttctctcagttcagggtatatgttagcaccttgctaagtttggtggactgttgttatctgcaagttacagactgtgtcaataaaaagggtttcttttttacaaagtgtgtgatggtattgtgcagctttctattttatcaactaagacgggtggaagtttcttggttccaggttttgggcacatataactatgacatacgtgattacattctggacttgccacatattatatatggaatataaggctgtggctaatatgagattgagacatctagcagcagaaagtcgtcgtcctgatcaactcactgtgagttattctatctgttgtgtttatctttactgatatgtagaaacttacttctcttttccttgaacaaagatcttgcaaacataatatatttgggagtgatgcctctatgtatgtatgctttaaggacaatggttgttcgtggtcataacatggttggacatcccccatacacgacagatatctcacttattctgtcggtaatggaatatgaatcggcgacccgatactgg

SEQ ID NO: 39597 - DNA, 1105 bp, Arabidopsis thaliana landsberg
  unsure (1)..(1105): unsure at all n locations
tgaaatattgaagtaaggaataaattgggaaaactaattgttgctaattaattaccttcccaaaggggaaaccaactgctgcagagctgctattctgtctcctaacttttctttcctcacctgtttttcaatttcacaacgtataaacactacaatgatcattcaatggattatcttaacatttgactatatatattttttaaaattaatatcctccaattagaaaaatttctttcattttttttttcttcttaactactaaattttattcaggctttatttaatttctccaaaaaaaacatttataattaattgcatgtatttttttaaaaacaaaagtaataaccttgaagggtgggcaagaggagcgtgattccacgcgcggtttcttggaagcattttctcctgcttttgttgccatcaagaagttatgcctcttcccttcacttgtttgaggttcattgctgaacatttccatcttcaacccaaaccaaaaccccataagtaatgcacacacatatatatgtatgcaagtatcaaataacgttcattattgctattcgatgtaaaggataataatagaacgtaacgtaataattaatacccccgacaatgagagaaaaaaatgttaagaaaagagattcataaaaagacaataaaacaaagtaaggaataaagagaaaggaaaagaaaagatagaacaaaggttgatgtttcagcttaaagagtgctgcttatgaattatgttaaaaggttttttagctcaagctttggccctccaaccaagaatcacaacaacaaagtaaaagatgaatcaaaagaggttaaaagtttttacatatatatttaaatattatctctctattcataactttgttgcaaagcttcaatattgcacaaaggtctcgcactttacactaatctgattaatctatctatacttcgngattataatatttcagtatatattttttttggtttttgctatttctcaagttcttttttttttcttttttttttttctgatttatgccacaaactttttaatgaacatgatatttttatcccaccttaattgaattatgattttacggtttacaaaaaa

SEQ ID NO: 39598 - DNA, 508 bp, Arabidopsis thaliana landsberg
gccggtccgaggcgcggcgcaagggccaggtcgcgcggtcgtcggacctcaacggggcggtcgtgatgctgggcgggctgctgacgctgggcgccgtcgggccggctgtggcgtcgcggctgggggacgcgatgcgcggcgccctggtgcaggcgtcggacccgtcggtggtctcgcgcgggtcgatcgggcacgtgctctcgcaggccgcggcggcggcggcgctggcggtcgcgcccgtggcgggcgcgtgcgcgctggcgggcatcgtcgtcaacctcgtgcaggtcggcctcaagccgagcgcgcacgcgctgaagcccgaccccaagcggctgaacccgatccagggcgcgaaggggatcttcgggcccaactcgctcgtcgagctgttcaagtcgctgtcgaaggtcgcggtcgtgggcgcggtggtgttcgcgttcgtcgcgccggaagtggtgacgattgcctcgggggtcgggatggcgcccgtgacgctcgcgggcct

SEQ ID NO: 39599 - DNA, 875 bp, Arabidopsis thaliana landsberg
tacgtatataaaccctcactagtagtactcaaaaacacaccttttttttttctctattcaacactcaacagtcgggagggtcaccttgagatggttatgattcatatcttcctcaccgtgatggtggttggaggcgtcagtctcttcccggagacggcagaagcgatcgtgatgggaccgtcgatgcagaagctgacgtggcattactataaagtttacaacacttgcgagaatgcagagaattttgtgaggcaccaagttgagatattttacaagaacgataaaagtattgctcctaagctccttcgtctcctctactcagactgctttgtttccgtacgtttttcttattcttgtcttatcatttaatcaattatgaacccaatggcatatagaagtgtaagtttgtaaccacaaaactaatcgagtgctaagaaagtttaattagaagatttactaattactgctctcacattgtgcgacactatctataatgatagggatgcgatgcatcagttcttctagaaggtccaaactcagagaaaatggcgccacaaaacagaggacttggaggattcgttctcatagacaaaatcaaaatagtcttggaacagagatgtcctggtgttgtctcttgcgccgacattccttaatcttgcaactcgtgatgctgttcatttggtaatctctctttcttctgcacctatagctgtacatggatcattaatagatactgaccagcttagagaactgattcattcaggcgggtgcaccatcttatcctgtggacacaggcaggagagatggattgacgtctgataagcagaccgcggacctaccatcgacatccatcttatgggaccaagccatgtctt

SEQ ID NO: 39600 - DNA, 509 bp, Arabidopsis thaliana landsberg
gacatcctggagacgctcgccggggagagcgcgtgctttttcttcccgagttaccgctacgggggacatcattgggctttgcccgtggacgcggcggtgcaatgcgccgccgtgaggcctgatctgatggaagaaagaccgcttccccgggactgggaggaagttttcgcgctgggagcgggactgcgggcccggggccggtggctcgggatggccttgtgtcccaccgactgcagctgcacgtttttaaccctcaccgctcagctgggatcgcccctcaccggcgaaggcccccggctggtggaccctgccaccggcctggaggcgctcggcatgctcagaaggctccggaccgcgtctcatcccggcagcctgggttggtccccggtagatctgttgggccatatgtctacggaggacgacatcccctacacgcccttagccttcgggtatacccactactcccgcgtgggagattttcggaaacgccttacgtttggggatgcccc

SEQ ID NO: 39601 - DNA, 605 bp, Arabidopsis thaliana landsberg
ggaaaacaaaacgaagatctaaactcgaatctgctagtggagatcaaatttgccattgataaatctaagatagagaatgtcgttccactaccactctccaacttcttccaagtaaaaggcttacccaaaggtaagcaccttgtgcagcttaaatccagtcgtcctttgatctcccacaaagtagaatcggagattattgaagttgatttcgagaccaatgcccaaatccatattggtccacttcgatacagcattgtggcagatcatcagagtcaggtaaatagataacttacataatcttcgacattttttccattattcttgtttgctcattgtggtttgatttgtatcgacttcaggaagtgacacctgcagctatattgccactggttattggagtttcggcaattgctctattcctcagcatccccaggtaataatttattaccaaactgtaacatttgtaatttggaacatttccacaactagtaatccacatgcttataaaaaaaaggttcaaagacatctaccaagccacggttggtataacgtctcacgggttcactacatctgccaagagagaacctcgaaaaggtgttgctaga

SEQ ID NO: 39602 - DNA, 557 bp, Arabidopsis thaliana landsberg
  unsure (1)..(557): unsure at all n locations
ctgtttttgtttttgtatactttaatttttatcagggaagttttaggaggtggtggtagagatccttttggtggtggttttgggggtccttttggtggttttggaggtggctcttttggtggttttggaagaggttcctttggtggatttggtggccctaatggtcctccgagtctcatgtctaattttttcggaggaagagatccatttgacgaccctttcttcactcagccttttggtggtggcatgtttcaatccaacttctttggtcccagcatgaatccttttgcagaaatgcatcgtctgccacagggttttattgagaataatcagccttcaggaccgagtagatcacgcggaccggttattgaagagattgattcagatgatgagaaagaaggagaaggtgataaagagaagaaaggaagtctagggaaacatggcaggtcaagcagtgaggctgaaactgaagatgcttgagtgcgaggtgataccttttttctatttctaccttggttttaaagnggaatgaaatccttcttttctttggactgatt

SEQ ID NO: 39603 - DNA, 774 bp, Arabidopsis thaliana landsberg
gtgctttcgtcttcttgaaacaatctccgacgcccaagccttgcctatattagtctggaacttccctgaatcaaacagtaacaagcttaaagccttcaaccatattcagattatctatttagagtataatgacatacaacaaaaattacctgctgttgattggaaaaactcttctagatctttcccttgatctgcgttaaatagcaaacaaaaaacaatatgagtattagtttctgctaaatctcttatcgaaagagagtttcttttattggtcattcattaccttgttcatattccaaagcttgtagtatcagctcaactttatcgaaatctttaacaactttggcttcaggtgaagagttctcttcgtattctctccaaagctcagcgatttcttttgctgcaattacgatatatacatttttagaagtgatgataagtgttatacaaatgagcataagaaggtcgaacgaagatacataaggtatttcaacaatagaagagaaacagacctctttcgcctccacccaagagtttgcacatgtgctcaagtgcttcgctttctcttcggtttttctcttctttagatatcccacaagaaggtgtaatgtctcctacaatggctgctcaacaacaactcgtgattaagaaaatcgatgattaacaatctctaaaagtgaaagaactaaccttctgcaatatcatgaacaatcgccattttcatgcatctatagaaagaaaagcatgtatataagaagagttttttcacagcag

SEQ ID NO: 39604 - DNA, 528 bp, Arabidopsis thaliana landsberg
catgccctcgcggctgtccggcgccacgatatttagggttttctggcggccgcccgtcagcgcgtcctgcgcgctgttcagctgcgactggctcatcgcgcccgggtggaaggcggtgatctggttgttgtcgagatcggtggtgatcatcgcctgcgcggtgaacgtctccggcagcgtgcggatgtgatccgtgacgatgccgaggctgcgcaggtaatccaggtacggaccggcgtcctcgcccacggtgcccatgatcagcggctcgccgccgagcatcttgagcgtataggcgatgttgccggcgcagccgccgaattcgcgccgtatgcccggcaccaggaacgacacgttcagcatgtggatctggtccggcaggatgtgttcgcggaagcgcccgtcgaacgtcatgatggtgtcgtaggcaacggagccacagatcaggctgggcattctttctcgcaatcgattacggttgatacggtgaaaaagaccccgcccgtgcagagacgggcggcgttcgta

SEQ ID NO: 39605 - DNA, 787 bp, Arabidopsis thaliana landsberg
ggggaaacgattcatcagtggttttttttttaataaacgatttaaattcttgaaaaaaatttcctcaattttatcaatatccttagatttatactaaaagggttttgtacggggatactacagaatatgccaaaatacgtatacgcagcaaaacgtacgtgcattagatacggaggggtgtttttgtcatcttaaccattcaacttattccgggcgaatttactaactgactccggccgaagtggactcgcagacacgtacccagcagagaagctttgagggtagtgtcgacttttctcaattcaatagtatcgtatcttagccacatgttaagaacgaacaccgttgatctcacgacacgtgcccttgatcattttacagatttagctatttcgaacacgtaggatacacacgtgtacatcaaatctctttccctttataaaacctccccaaaacaaagcttatcctctttagtctttactcttcgccacatcacagattttgttttcttccgtttctcgaaattcagtttcatcatcatcctctctggatttataaattttcaatctacctttcaatcgccgggggataatcgaaacccgatctgtgtaaaaaaaatgatgaaatcgacggcgagatttgcgtctgattgtcggtataatgatcacaaaagcataaaagcgtgacgtttccgcgtcttcgcgtatctcggaaactttaatccgtatctaaagagctaaatttgaagcgatctttctctttttctttgtaatattggtttatttcc

SEQ ID NO: 39606 - DNA, 545 bp, Arabidopsis thaliana landsberg
aaaaccgagatgacctgtatttttttactatagtatataggatatgttttaagtgtgtatagaccgtgtttttattaggggtaatatctaacattcgttattatcaatatgaaggaaataagagaaagttggccaagtagtggtatatcgatcgacatgcctacttttatacatgtaagtatagtatattctttgattaacgattaagttattgaatttgataattttaatttatttctattaacttcttcaaaatactttattaaacatttaaagagtttgatacgtgtgaaattcgaaataatctcaaactgtagtaatggctgatcctaacatgaaatctatttaataataaggtgacacgtttactattaaaaacctaattaactcctacatcaaatggaaatattgcggcttgttcatgtgttctagtttgtggtttcgaatacacaagttatttgaaaaatctataaaacttgtcctcgtaatactagatatcaatcatattacctagaccctacgttatcaatgttgttcatccaaac

SEQ ID NO: 39607 - DNA, 688 bp, Arabidopsis thaliana landsberg
aaactttcttcacgtttactcccatttttttgttctaaccaatgacctagtttttgagtttagaatgaatggtctagtttttagtgccaatcattttttagggttaaaagcatgctcaagcatctcgatcgacatatatatgaattccggaaatggtgatttgatattaaaaaatatgctagggcctaaaaagatccagtctattttgcagttcattaaatgattctcgaatgatctcatcttactttttaaatttctttatatcatttgcttataattggtacaaatcatgcaattataacatttaaatgtttgaggaggttatctttgggaaaaatcgaagtgaccagaaacatttgtggatgttagatagactctcatgatccattgcttgttctcgaattgacatgtatcaccttcctttcgtatgatttatcttatcgtgatcccgtaagaagattaataaaataagaaaattatcatataataaccacgataaacgcaaaatggaagtgtataatcagcataagtcattataatggaacacaatgaggttagtggagatacgtcagcagcccacagcccacaatagcaaggatcgaactgaaagtaagttagccaatataatccagaatggtcatatagcaatccttgttcgttgtctttttacaaatatgcaactatattt

SEQ ID NO: 39608 - DNA, 587 bp, Arabidopsis thaliana landsberg
cctcaaacaatttatagatctcgattataacctatcatttgaaacaagcctaattatagtattcctcagatacctgagggctgaagcacttacctctggagcggcataatttggacttccacaacttgtcttcaaaaaatgaccatctcgcattatgttgctcaggccaaaatcagcaatctttacattgcatttagagtccaaaagcaagttttcaggcttgaggtctctgtgaaccaccatgtttcgatggcagtattccactcctgatattatctacatcaaagccaagtagctaattcttaactctcaaatataatataaaatcgaatggttgcttggaaagttacatgttgataaaataaaataaaaacatacctgctgaaaaaagttcctcgcctcatcctcctgcaatctacccttctcaacaatatagtcaaatagctcaccagagttcacatactccatgacaagataaatatctgtgggagtctctataacctcatagagacggatgatgtgaggatgcataaatagtctcaagaatttgatctctctcctcactgcatcaaagaccaaataagttc

SEQ ID NO: 39609 - DNA, 324 bp, Arabidopsis thaliana landsberg
  unsure (1)..(324): unsure at all n locations
taaatagagtataaagaacacggaaatgatatgtatggaacatacaatgtttgatggagatgaaagatttatcttgatgctggtccgttccagcgactttggttccggattcccatgagctttcttccattctttcgctcgcatgaaaactaaaagagtgacgcttccgggtgtagaaagcctaaccagagtctaaccataggtttgatgcaaatgcaaagagcttcttttttgagaaaactaccctagaaatttaatgtcannnnnnnnnnnnnnnnnnnnnnnnnaacttccatctatctttagcttccaaacaaactggtc

SEQ ID NO: 39610 - DNA, 713 bp, Arabidopsis thaliana landsberg
cacactgccacacacgtgtaaaaacaaaagtattttgttcaaattccaagaaattattatctggagaaaaacaaaacaaaggatagcgagaaagggtatagataaggcaaattaaaaaccaatctttgactacccattcgttgtcatttgattaaatgataaaatataaatcattgatttaaaatgagagatagaggtaaaacaaaatatagaaaagtagcatcaaatggctgttagcacgaaaactattgagtgaaagaaaccctaaatctttaagttccactatagaattagataacgatcataatatagtgatatatttgatatctcgtctctgtgactccgtctaatcttttgaaatgatgtcctcttcctcacttcacttcatcaaaaaaaaaaatgtcatatatatgtatgcttaaactttcataaaaaatttaatgatttcagtaaaatgttctagggttagattatattataatataaatttcaagaaaaattcattcgtaaatttttttcatttatgaaataccacaactgcatgaaaactaatcaatggataaatatagacaaaaaaaattacatcaatacgtgatcttataaaacaaaatctgaatatatgtatagggtctatagctcacttcaatttcgattatattatatgcaaactaaatgtggattacttatttttcggttaagatgtttgatctatg

SEQ ID NO: 39611 - DNA, 390 bp, Arabidopsis thaliana landsberg
gggattgctaggcctaatatatactatgacatagaattctttgagacatttgccaaggtcataattttggtggtccaaaaagctgatcacacttttaggagtatcctgggattatcagattccagtactaaggagaagattttgaagttgaagaacaacccaaaatgggatagtttaaaaccactggtcaaatctttctttcgaagtaccttgcatcttgttaagcaggcaggagacttggagataatatcttttacccttacccaacttagagtctctatcgtgtttttggccgcatttccagatcttctgaaaaaattgatcaaggtacactctatatattcactgtctaccacacaggaatttttttatatattggactacactcat

SEQ ID NO: 39612 - DNA, 871 bp, Arabidopsis thaliana landsberg
ctgcctgcataacggatgcgttaaataactgatttttgctatttatgtaaattagtatatgtattatgtgacgctaaggcattgctatatatattccatctgtttcttggacagttatcactatactgtgtaccaaagtatgcattgaaaagaaatgactaatttttcacttcagccaaaacgttcaaactatttactaagtaattcacttctcccaatttatggatatgatgaaaacagtggatagatgatgaagacatacagaccaattatataggatgagaatgcattcattattatacctcttgataagttttctgtttttccaaatgagtaaataaaacttttggagagcaaaagaagaaagaaagaaataatggagtaatgaagacaaacgagagaagacatgaaactcaaattgtcaatgcttcttcaatctcaagagcttttgccctattgtagtgggttactttattagttacctctcaaatagtcaaaagataaggataaacctaaacatctcgatttacttttagatatatgcgatccctataaacattttactttcttctcacacaaacgatctatttcaaaaccaataaatgatgtcatgactcattcacgtcacatcaaataataatgttcgaaaaagtaacttgtttccagaatcttactagacttaatacaaaacaatatgttttgtttaggtatatgacaatatgtcttgttttttgctgattacaaaaaatttgctgattacaaaaaaaaaatattgtcggtaaaaaattgtatatgaaattttagcgcaatttttttagattaaacatgtcatatattttattatgagtttaaaatggccacaatataaaat

SEQ ID NO: 39613 - DNA, 589 bp, Arabidopsis thaliana landsberg
ataacgtagatagacttccagtagtgtacgaagatgtttggattggtttggtggtggacatgggttccatggaaggcaagcttgtgacaacttcgatttcgatggcgctttctgatttctatcatgtcaacaatggctatagaacaagagtctctgtcttatccagagactctcatggtgaccctctccaagctctcgctgcaggtacgtcctagattgttttcttcagaacaagaagctcatagtttcagtgaatcactgaagatagacaactcgcagcaataattaaaactgttaagaccatgattcgaatcttgccactgcaatttcaatctgattttcgttaacctggtgaaatgttcatttctcattttgattgattctatggagatgtaatttttaaacagccatggacctcctgcaaactgaacaagtggaagcacttgttggtggacaatcgttgcttgaagcaaaaaatttagcagagcttggggagaaaactaaagttccagtgatttcttctttccaagttcctagctcgttgagcttggcccaatataattactttattcaagctactcatgataca

SEQ ID NO: 39614 - DNA, 248 bp, Arabidopsis thaliana landsberg
tgcaaccaccctgggcttcgggcgcgaggccctacacctgacggtggcacaccttattccgaagttacggtgtcaatttgcctagttccttaacctgggttctctcgaacgcctcggtgttctccaccagcccacctgagtcggtttgcggtacggtcacgaaccaatcaacgcagaacgcggcttttctcgggagcatgggatcaatcacttcggtccgaaggccttcgtcatcacctctcgggcgt

SEQ ID NO: 39615 - DNA, 918 bp, Arabidopsis thaliana landsberg
attatatgacattcgcatgttgcatttataacttttgttttttcgagagatgaatataggacttcgggttgcataaaacgttgaatgcagtagtttttttgtttttcgtttattcttagagtacttttataccttatgattcggggttaagcaaacgaaaagtggtcgaggtcatctttttataaaacataaagtagatgctttaaacatagagttgtgaatcgttcacagaatcgaatataattgaaataccggataaatcaaacttttcattgaggtcaatgaacctttaccatagctttatgcatgcatacatactatatacatatatccacgggatacatcataaatagtatccagctatactatatacagggttcgttctaatccttaaattatgtcttgttatatgatactaattcatgtggcaatttttattttcttggtaacaaggaaggaaacgtataatgcaaagacattatttaacaaaaaatgataatagtgatggcgaaaataatgatgatggagagacattccatgtgatttggttgtggactgtatgagaaacagaacaacctagatctcacaacttgtaacacacagacaaaaatagtactttacataatgatttgactcagtaacttggtgattcttttaccaaaaatagtatcaaatcgatattaaaacagcagccacacaaaaaaaaaatgtggcaaatttcacttttaaaataaaaataggttttttctttcttttttgttagttagaattaactatagaaaattatagcatagtattctttatatattataaagcatgattttaaaaataatgttttgattatgtgttatcattaaaggaaaaaataagaaattattttgtggtaaactaatccgaactggacccaaaactttaaag

SEQ ID NO: 39616 - DNA, 435 bp, Arabidopsis thaliana landsberg
ggaaatgcaggtgtatggaaagtctagttttcagcaagaagagaaaggctcgaaggcaaagcatcagagtcttctagtttcggaaaatgcattaccgacttcttgattatagttccgaaagagaactcttcgtttctctcaaggatagcaccagcatcatctaacttcgagtaactataaaacggatgcgaagccgaagagtggaagtaattctgcatatccataggctccacaagcttctcaaacgacaaagggaagaaagacggagtcaaattcttctcagtgtttaggcaggagaatgttcctacaagtatacttcgctgccttatagaaaaagtagttggaatatacaaacaaatacgagcgttgcagacatcgacttggcctctgctgcaaccaaccaaacataacttgcccgtagacggttttcaaatt

SEQ ID NO: 39617 - DNA, 262 bp, Arabidopsis thaliana landsberg
tgtttctggccttcctcctgcaaaatgtttcgtgttcgaatgattgcgaatagagccactactagagaaaacacacatccacccaagaaacctgaaaccaagttctgcattagcaattgatggagaatcgaaatcagcataaagtcgtaaaatgaaggccacctgtggagaatgaaattcgatggctctcttggttagctatgggcctaaagatgttcattccttttgatctgctagcattggagaaatgcttaataaacgt

SEQ ID NO: 39618 - DNA, 641 bp, Arabidopsis thaliana landsberg
  unsure (1)..(641): unsure at all n locations
tatgtgtataaacgaaaccttactaaaaacgttattaaaacatagcgtgattttacttctcactttttcacttcacgctttcgaaaccttttcctttagatcccaatcacatgtatgatgtatgaagctgcgtttcttttagccgtccatcacccaaaagccaaaaaaacaaaaataattccaattatttaaaaagatctctagtagctagataggttcaaatatttaatttcaatctagaaattttaatatagacagaaaagaaaactatctgaatccaactgtattctctaagcnnnnnnnnnnnnnnnnnnnnnnnnnnnaacagcttcttctttctttttaaaaacctcttttggctatagaatcttcttgtacataaccccccaagcttgcattccaattaacgacatttcacataaataaagctcaacattctcagtgtttcacactgttattgtcccatttaactttacgaaagcaactataaacattaaaaaatactaatacctagaatactttctaaattaatttcgagtttcagttttgttgttaggcattaaaagaattagtagacttcagaacatggataaacccccagtcattttactataaattttgcgtacaatagattaattaat

SEQ ID NO: 39619 - DNA, 826 bp, Arabidopsis thaliana landsberg
cccgccacccctactgccaaatgaaacctggcgagaagctggtacgtctcatccatatccagaggcagatgttttatttctttgagtgacattttttcatgccgagaagttatcgtcaagtctttctccacacatttgaatggttttcttatatagatggtattgtagcttttttctgtcagattgcatgcactcttaactctaaattcttgcttgtttctagattgagataaaagagttagatgactttgctcaagctgctcttcatggttacaagtctttaaaccgtattcagagtcgcatatttcagacagtttaccacaccaatgagaatatattggtgagtcatatgatttttttttgtccatactgctacaatgccaattacgtagtcaagcataacatgattctgaactttgcaggtctgtgctccaacaggagctggtaaaacaaatatagctatgatttctgttctacatgaggtaagtttttgatttacctggttgatatatttttgtctgaatctgtttttaatcacagaccgtgctggaaagagttgatatttactttacaaagagcgtgatatttttttgttagatgtggtttatctagtagaaaaggtgatctattgtttaatcacactgacttattttatattttactcatagatattttggaaattatcttgcagatcatacaacacttcagggatggctacttgcacaaaaatgagtttaaaattgtttatgtagcttctatgaaagtaaaaccaaggtaaaataatcttatggatgactttcttttgtaatattttattttactattt

SEQ ID NO: 39620 - DNA, 777 bp, Arabidopsis thaliana landsberg
aatgctttggattatgtctgaaggtaacaaagaggatatgaatatttttttattacgggggtggcttgattccgacggggatggtgattttatgagccttggtggtggtacgtttgtttttcttcttattttgtaattttaacaaatgaattgacagaatttgagtttacaacacagaatttacgccgtcgcgaggaacaacaccggtgcatcacaaattctgtgaccaaactcctcaccaaggagaggagaacaaacacggagaagaagaagaagaagcgtctcctaccgataacaagaagaggctcctcgaactctttaaagagacacaagacgaagaggatgaagaggaagaagattacgtggcagaaggcaaagcaagagcatgtctctggataagaacacctgttagatcttctgcgccggccactccttataataacaacaaagaaagacagcaaaaattcaagagagtgagatcagctgctcttggtcgctgcgttccgcgtttggtttcctgtagtagcttcactgatcggcgacggaatatgatgactagtcatgcccctattgacgtccaacgctaaagaagacaaaaagaaagaaaaaaaaaactttaaataatattaaattactatacattatgtttcttaatttgtcctttattgttgttttccaaaggatcgaacaatgttgtctcgtaatgcttatgatgcattgcattaattgtaaaggatcaagggaaagagggggaacctccgatgaaaagtcgaaatg

SEQ ID NO: 39621 - DNA, 1415 bp, Arabidopsis thaliana landsberg
agggaataatatttttttaacttcacccaataacttaatatacattttttcataaaaaaaagcatatgaagttagtaataatagatcgagtttggtataacgtccttatcgttgacagaaactgatgatagaatccacatagaagataagaatatgaaaataaataaccacacaaagacaaagtttacataatggtggtttgtcacgtgttctaccattttggtaggaagaattaaagacgtagttttagcctcagtgctttgaattctagtaccgtataaataagtgtgacgacatttaagctgactaagaaactaatttggacattagcatattataaaatttccgagatcatgtacataaatgtaaatgtgtaatatttgcttttgtaccatttgcgcatggatccattagagaaaatttaaaatataagaaaattgagaatgaaacccatcaattagtttggttcgtataaaacactaattaatatcacatacaataagtccattactcttttgtatatctattaaatttctccataatatctttgaggtatgaattccaattcgaacccaccaactcattttcacagaaaggagtctttaacaatagagctattggaccttttcatttgaatccaccacctctttttcactttaacgagtctttaagaatagagttatattggaagttttcataattaaaggcctctaaatttaatattaacacattcaaggccacaaacacatgcttgtgtagcttctattgagggcgggctctgaatataactcctaattattaattgacttgtaataaggtttagattttttttcttaagtacgtccaatttctacacctttgtatgtattgaataagcaagcagcttctccaatttctacaccttttgtattgaataagaaaacactttctccaatttctatactatctttgacgtttcaacctaactatactcattacaaatcttcaatacgtattaaagtgtaatgaggtatattgtttaatttgtttgaatggtataaaccatatatatatgtttctctttcgaggatgctactatagatcttgacataattgtaaaacaaaatatatttaggtttcaactagagtgcgattttttaaattcgtgtttgtatgtatatagcaaaatctaaatatagacctacgttaaatttttttaaaaatgttatgatctaaaactaacaaagtgtatagtaatagaacgctatattttaagacttaaatctccaactacctacttatattgactacttttcaaatttcagtctaccaaaaatatatatacattcacaagaatatcaatctatctatattacactatataaattatcctaacccctcaccaatctttcataacactaaaaccattatcttct

SEQ ID NO: 39622 - DNA, 576 bp, Arabidopsis thaliana landsberg
tgtgcttttgtataaagcacacgacagataaaaaacttcctatagtttaaaggttacaaaaatgattgataaatgttttgcatacacagtttaaatagtgtatatcttttacatgattgagcctgtgatatattttactatattatagatatgtatgtatacatcttccttctccaaaaatatttttctagtttcgattattcacaaacgctgatttatgtgtataggaaaaattcatgtgcgtttaaatttaacaaaaaatattttaaaatatcataaatagtaccactaacctaatttttaatttattttggtatacttgagtgatgaattaaaattgttttcgcatgaagaaatatctcaaccaacgttatagtatgtagatttatgaaattcctaaacagttccagctactttataatctgagtgtcaatatatggaatcaattaagagtggtcgagtaatcaattatatgattaactaatttaacgttagaccaaaaaaaaataattatatgattaacttaaaattttatattttccaaaactttggtgcagtgtttaactataatccgag

SEQ ID NO: 39623 - DNA, 914 bp, Arabidopsis thaliana landsberg
tgtcggggtttccatttggtcaatccaattccgttggaggattctcattcggatcttcttctgcaactaattcctcttctgcttcatctaccacttctccgttatctttctcctttaaccaatcttcaaaccctagctccaccggattcggtttcggatcctccgtatcatcaactcctgcttcctccactactccatcgtttggattcggagcttcctctactccttccttcggattcggttcttctgcttcttcatcgactccatcgttcggattcggatcttctgcctccgtgactcctgcttccacaactccatcgtttggatttggaaccgccgcttcttcatctgctcctgctccgtcgctgtttggttcatctaccaccaatgcttcttcagctgctcctggttcttctcctttcggatttgtaacttcctcggcctcttccaccgcaactccatcgtcatctctatttggagcttccgcttcttccgccgcaactccatcgtcatctccattcggagctgctccagccagtggttcaacacctctctttggatcttccccttccttattctctgctccttcatctgcctccgcctctaattcttctctcttcggagcatcctcatccgccgctacttcaacatctcctcttttcggcgcgccatcatcagcaccggcgcaacaccgtcctttagcgtggcctcatcagcacctggctcctcatcatccatctttggagctaccggctcgtcaccttccttcagtgttgcctcatcgacctctggctcctcaccgtcaatctttggagctaccggttcttcaccgtcaatctttggttcgtcttcttcagccggttcaactccgtctctctttgcatcttcctcgtcaggcgcaacaacttcttcac

SEQ ID NO: 39624 - DNA, 1002 bp, Arabidopsis thaliana landsberg
ttgcgtaaccatttttgacaattgtatgtatactaagggtaactatatattccttttacatacttttacaaaaaaaaaaaaaatgcttttctttttaaaaaaatatattacaattgtatcgaagattatatgtcgaaaatctatgcttttaataatgagaaactatatcttagatattattctcaataagaccgaacaatattctaacaaaatgataaacaaataaataactaatatgtaacattccactccaatgttgttaggcaattggggttaaacattatgattaagccccatttagacccgagtgaaacaaatcacaagaattgtgagggggtgaatagacgaagaaaaagctgatgattgcgagcatgatgatcatgtatagctagtgtatgtgaatctatattaacgttaactaataactttgtattagtccaacgatcaataaaatccactcaactcttactcaatctcttgccccttattaagcaaaccttctctacggtttacagttttggggtactcttacgaccatgaggagaattattcttatatttctttgtatttattttaaacataatttgaatggatgcatcaaatgcaattcttccaccatcatcacttttgtctagctaatctaacttaaacatgtatatttgctgatggtaaaatagtcacaaaactaccacaattccactaaatgtggtactttcaaaaagcaattattgaatgtggtacaaagtaaacctttttccaaggatatggtagaagtgactaaaatcccttctatatatctacctattgataaataagtgatttcttatataaaaatgtgttagttctttttgcaattttcaagaaatgctagtctgcgaattaagaagatattagtctgcacctaatttcttgagaatcaacctaccaagcttgtagcttataccgaattatgagagacatgagcgaaaatagaagatgattaaggtctctttgcactgttag

SEQ ID NO: 39625 - DNA, 662 bp, Arabidopsis thaliana landsberg
gagggtcatagatgaagaagatgaaaagccagaaagatccttatcattatagctagatatatcttttctaaactcataaaaatcatatatattcttactagggtttccactcctaatgagtgaagtcaatgatgccttgaagcaaaacaacttcatcttcttcgctggagatcataaactacacaaattcttgaaatctttggcttctacgtacactcttttatgtagaacttttctcatgaaagcagtttaatagttccttttacttggctatggtggtagttttagaaattttctctattgtacaactttttgaaactgtactctcttagaattgtcatatcaatatagctttttgatgatcttcacgttcatccaatgctcgttgttcctttggcgttgtctgtcccacataagttttatgtattacttgctcagctcgttaatgtgataagctgacctcaatactcactatcagtgttttgagcttgatctttaacaggttcaacgacattgtctcctcattctctaattctcttgagcggatttcttgcggtggtatcagtgaacacagtgatcgtgttctacatctgtatggccatgaaagaacctgcagataaacacaaaccagacgctgcatttctcgctgaggccaaagatag

SEQ ID NO: 39626 - DNA, 592 bp, Arabidopsis thaliana landsberg
gacgacatcattatgccatctaactcgatatgaatgttctgattatgtgttttagagatcacatccatgcagtttttttttttttttttttttgctaaagcacatccatccaacgtacgtacgctaacagttgttctctaattgaaaccatttttccagcttttatgactttaacgtacgttagaacttggaagaaagtcttggtgcctcgagcgaccttcactgttttctatatggtgcaagtttataattcaaagatcgatcggtttccaaagatgttcaagagtagctaggagcaaaaatccaaataagaaaaaagacaaccgatctagactgaaagtttatacaatgttatgaactcatttgaattcggaagtcaattttagctacagagaccgaaagagtgagcagccattgaattacaaattgacgactatgtatctgttgcgtaagccgtgtaacaataacattacatagaattttaaggcttgtcttatctatactcgttgacaatgtcaaataaatatagcataggaattttatactatatggtcctactaattacatggaacccttatatatacgactgtta

SEQ ID NO: 39627 - DNA, 120 bp, Arabidopsis thaliana landsberg
cgcaaggcaagccgattctcacagactggtgagacttttttggactagaactgctttataaactcatagaagggggacaacaccgagcgccggatgagccaacgtaataggccaacgtgg

SEQ ID NO: 39628 - DNA, 565 bp, Arabidopsis thaliana landsberg
gaaggcctatattgaactatatttagactatttctactagttcttagttgaaggacggcctcataaaaatttcgggcaatatcacggctgataaattttagaataatgagatgaatgaaatttgtcaatacccttagctagataataaagttaatagcatttgtctccaaagtttgttgaaaatgtttattaataccaaattctgccaagttataaaaaaaaaaaatcaagcaagaattgagaaacttgatgatgcaacaacagtttcaacttcataaatgaggtagtgacatcctaattaagcttgcggttacacgtagtccaaataatcaatgcaagtgccaaaatctcagccatagtgtgttaaaatttttaatttagaagaaggcatgcattctgctattagaagaggactctatgatcatctattaatgatgaagaatgaagaatacatgcaataaattaaatataattgtttcacgtagccaaagagcttattgtgtatgagtcagtgagtgtaaaatgtccattatgtctccactaagcatgcactcgactcttaata

SEQ ID NO: 39629 - DNA, 619 bp, Arabidopsis thaliana landsberg
  unsure (1)..(619): unsure at all n locations
ggtctaggaaagcttgacacggaagaagagagaaacgcgtaatggtgactagaaatgaactgtaaatcaaacccaatcatccaaatccacaagggaaagagagaaaaagattgtatttttctaaggaacaaaaggagaacttttaggagaatctgaataagaaaatacccagaattataggtaggttgcaaacaagaatccagggaaaaagattgcaacttttttttttttgtttgtttatgagtagaagaagaagaagaactcaagtcggtttctcaacatcttcctttgtaccaaacacgaaacaagtttgggttttgttaaggacaaaatcggattagattaagagacaaaaacatgatatgtttgtttaaagaacttgtgccggtgagaaaaatggctagcttgaccaaatgtgagaaagcaagctgtcacaaaaaccgaacattggggctatgattggtgacatagattcttattagcaattcctttttaagtttcatttatttaaagtagttttcattttagactaattnttttgtttttacgatttcagtataagtttttctctcttattttttgccatatttatattattattatcaggaaaaacagaata

SEQ ID NO: 39630 - DNA, 513 bp, Arabidopsis thaliana landsberg
caccgccaggtcagctattgagttgcagcaatcttgggatagagctatgccgcgggagaaccaggatttctcgctcatggccgcgacctgatccatcgtgtagaccttcgtactgcccgcctcggtgaatgccagcgtcacttcgcgtggcgacacattgttcatgcggatgttgcggatgtagcccttttggaccgcctgccgaaagtggtaggcgtaaatagtttttccatccaccggcttgccatccgaacggaacggtgtggcagtcaggccgatgactttagcctgttcaaagaatctgatcagctcttggtaggtgttggcggcctggtgatgggcttcatcaatgacgattaggtcgatgagatctttgctggttccgaaccacttctcaatatcctggaacttgtggtagttggccacgactatctggtgatcttgaatgtcggtgcgattcactttttgggtgaggggaagcacatatatatccgacgacgcaagctgctcgtc

SEQ ID NO: 39631 - DNA, 663 bp, Arabidopsis thaliana landsberg
agaacttcctattcccctgccttagccattccttctctctcctcttctcagccactcaccattcttttcacccaatccaagttcgtccagaccggtcttctcaatgggtttgttccactcctcactctgatttctgctctctaaacaaagctaatctttattactcttttttttttgtagcaaaattaggccttgcccttccacgaacccaggatgtgtatcgacgaatccaacctcatcttccttctcttttccattgacgatcccagaaaccgatacacaggatcccattgaggtatatttcctcctatcttcatcaatttagcatcgtttctgattatttgttcaacgcagaaactgaaagaagcaataatgagcacccagaagaaccccaagtttgtggttcttgaagatactccctatggtaaattatttctcaccacaattgaattttaaatgattcccacccaggatttgaggaaagatcacgcacaattgcatttgcagggaggtatgtggaggcagaggtagaaggaggaggatttagcagagatgtcatggagtttttggtgaagcaagatgtggttgctaacaggtgtatggccactaaggtcactgttgtgtatcatgtcttcacaccctagtcatctcacgaagcacagg

SEQ ID NO: 39632 - DNA, 549 bp, Arabidopsis thaliana landsberg
ttaaacttcttactagctaagtgctatttagaaactacatgcttattcatgtgaagatgagacacttagctgaatcactgctagcatgtagtgtagaagaaacaccgttaagtctgatttgtggtaattcttcacatggaagccatatgtgtatgacttaaaaaagctactgttacacaaaaaatattattgttaactgttttttttgtttgtttgtttttggtttttttttcatgtaagaatcctctcatgagcctgctgattggttttgtggctgatggactttcatatgtgctgcatgtgagaggcttctctggcttattatgacataataaccttggattctgagactccatagaagcctttatggcacttgggacagaaaaatgcctctgtttactgtatgctttctggaggacagagaggttgcacgtttttgaaggttctgtgacattctacacatctgtgtgattttaggactcaatggagtctctcatgatcctcagatgtagaggttactttataattctgacaaacaaggacagactc

SEQ ID NO: 39633 - DNA, 474 bp, Arabidopsis thaliana landsberg
aagaattcaaataaaataataattaatgaacgtatcatttagtttcaattttcgtctatttaagttaaacaaaaattaagttatcatttttcgaaaagtttctttgctcgatttttatttgttattgtttggttttggtattaacccaagtaagacttcttttgatatttacaagttcaaaaaaggatgcaatttgcaagtccgtactgtacggaatatagctcatacgtaaatgattctctagaacatactatgatcgtgtggtcagtgttgctcgatcttaattggttaaaagaaatgggggccatgaaagctggatgaaaatgaattgtactcccactaaacaagtgactttacctcttccattcacacaatttttttatataatttaaatactgaatttacatagttttcatgatccacacataatgaaaaaggataaaaatgagaaagaaaaataaggaagaaaccaag

SEQ ID NO: 39634 - DNA, 723 bp, Arabidopsis thaliana landsberg
gttttaattagccacaacattaacccagcacacaatcaaaaagccaacacacaggtaacaaagtgcaaacacattcacgcatataaaaatgcgtaggcggaaatcacatacccttgcacgcctcaacaaatgaacgcaatgcaaaaactgaatcaacacgaacagggagatcaggatcgcgcagtcccgaaacaacactgtgcaatgctttacgaaagttgttctgatctgagaaattgatgtgtgcatattgcccagctacccatgcagcctacatccaaaaaatgcaaccgtcaaacagatcaaaggagatcacaaagaatatgacatcaaatactgggtaacaacgggaagtctatactaaactatcgacagcaatgcagtagccaactaagcaacaatgctaagcgttctagaataaattgaagtacaacagacttcgtggaaatgcaaaacaaaatcctcattctggtaagctagtaacaatggattactgagatatccacaacacagattaaagccaaaaatacctttgctctaagatgtccaactggactattgaaatcaggaaaaatatgttgcaccaacattagctctagttgagatttatagggatccgtttgcttcaatttgtcacaaagagctccaacagccagcatcgcaccatctttttggcgataaggcttctcctctacagtagctttttcataactacaaacagtg

SEQ ID NO: 39635 - DNA, 103 bp, Arabidopsis thaliana landsberg
taaaccgcccgactcggccacagcggctggtggcgacacagacaccgtaaacgatgaggctatactggtttttgtcgccgcttaacagggtacatatggccgg

SEQ ID NO: 39636 - DNA, 830 bp, Arabidopsis thaliana landsberg
  unsure (1)..(830): unsure at all n locations
cagcgatacgcttgacactgtttttcctgacgccagatacaggctcatgccggcttctatattgctgatgatattgctcaccatctcctgcagcttctgcgcataacgcctcatctgtgtgatcgcgtcctgcgccctgcgcaatttggccgcactcaccatcttcattgccttggagatctgctgcgtgctctgtacactttgaatacggttacgaacctcttttaactgtcctgcgatgagggttgtttatgcaaaactgccggttccagaataaaaaacccttgcctttaccggtagctcctgattatggctgcaaaagtagcagaaatgaaggtaaaaacaatactcacccgcttttggcagcggtccggtacaacctgcctgcttatcagggtaactacaggatccggacaggcaaaacccgggtttagattcggctaaggaagcgcttaggcagggcttaggttcgggtttcttcggcttaggttcgactgtggttcgactaaggaaggactaaagaaggactaaggaagggcttaggtagggacggcatagcgatttttttatatatggcttatcctgaaatagctatacaaaccccggtatgttcatccgacgggatgttttaccggtttttacagttcttccaccgcgatagataattacttattggtattctgtaagttaagtatttgataaagatgattgtgttctccttcacaatgctttctccaaccaaatgttgtacctttggcggccgttgggaacagtngaacaatagaaccagggacaaggaattaagaacaggaactaacccttcgtattct

SEQ ID NO: 39637 - DNA, 872 bp, Arabidopsis thaliana landsberg
agatatttatggtagtagttaaaagataaatatatttaaaaggtaaattcaaatattttaataaaaaaaggataccaaagataaaaatttataattaatgcgttaaacctacttgaaccaatccatctataaaatggagtagagtagtaacaaaaacaacaccaacaacaaaaaaaacatctctctaaaactaagaaatgggtcgtagaaaaatagagataaaatttattgaagatagcatcgaaaggaaagcgacgttttcaagacgccgaaatggcatttttaagaaggctgatgaactcgcgaagttgtgtaatgtagagattgctgtcttggtcatctcccccactaatataccatacacatacggttatccatgcttcaacgatgtggttgagcgtattcaaaatcctagtgcttcgtccaaactcaggagtctcatgaaagaattggaacaaatcaaagagtttcaggaggtatgtttcccattattaatataatctcatccgttagttttccttcttttttgttctcctatagattataaagataggtttgctattatacatagattaaataatctttaatttattttatattatataatatttttttgtctttatttttttttgtcaattttaggatttgaggaagagacagcaaagaaaccttgaaaagtccaatatgaaagagaatgtagatctgaaattggaggacttacttgctttcaaggcgaaactcgaggcctatcaagcaggtttaaagaggaaacatgtagagatggaggatttgtcttctccatcgatactctcaaagaatacaaagaataagatgatgaggaccgagtattcgtctggacagagcaaaggaat

SEQ ID NO: 39638 - DNA, 144 bp, Arabidopsis thaliana landsberg
  unsure (1)..(144): unsure at all n locations
tgagtctgtcatgtacttgactattttataactatgtgttttcaacattgtaactgctttaaggttgtggttattccaaccactttttgttttcactattatnnnnnnnnnnnnnnnnnnnnnnnaagttaaggcaggagagac

SEQ ID NO: 39639 - DNA, 785 bp, Arabidopsis thaliana landsberg
ggaatatcaaacatgtaagttatttcttaaaactagaacaaaggttgtggggctagacgaagcaacttctgcaataatcagtttacagtatagtttcttttatcaacaaatattctaatgaaagaatttacaaggagaatctccacataatgattaggaaatgatgcacgtatattaatctcagtattaataatagagcaagtgaaagcctctatggagaactacaactaaacagacagttactaaacattgatcactcagaataaagttaacaatatacacgaaaaaatgttcctaatatctcatgaagaatacactgaagggaaaggatgctatatcatacctttcatcattagaagcggttctatatgaaccatttgtgagccctctaacaccaaactgactatcacctttcagtgtccgtgttctacgtgacagtggttgtgagctcattcgactagctgcaacagctgttgtcgttggtacttcatcatctctttcatatatgcttgacgcaactgaactgcagcataaacatggtcaagaacagaagaattgtgcactgaaagaagtgatgaggcaaacaatcaaacaagcaggccactagatccgaggataaaaagcagcacagcttctgaaatttgcttatagaattgcaaaagaaacctacctgtattcacctctattgaataggtgtgcatgcaaatcatctagaattttgaagaaaagggctccccgcacttagttagctagatctgacatcttgagagcaccaacctaggtac

SEQ ID NO: 39640 - DNA, 521 bp, Arabidopsis thaliana landsberg
  unsure (1)..(521): unsure at all n locations
aaacaaaaagcttaccttatcataaatatacacatttttatttaaaaattggggttttctattatatacaaatggaaagctaaaaatagaaaactatactaacgaaataagaagnnnnnnnnnnnnnnnnnnnnnaaatcataaacataaccataataaaaccttttttagctgcaaactactatataattaacattattcttatactatatatgatagaacaatctaagataaattgtgttgttgatgaaaattctacaatcgtcaatatgatttcaccgttccaaaggataaccgatgaaaaatataagtttcggtttgtaagatttaagtctaacagagatttttttctttgacacaaaaaaagaagagatatttcaatagtctaattttttttaaaaatgaggttttcttaactttttttcgaattgacatgaacatgataaccttttataataacaatctatgaatgtatgacaaattaaatcgtgttgttacgttggatatttgctctcttctat

SEQ ID NO: 39641 - DNA, 343 bp, Arabidopsis thaliana landsberg
aaaaatcctcaagaaatatgaggatgggtgatattcatctagtgggggaagatccaaagactgatgatggtctttttaagcacttgtttattcaatatgtttggcatctttgtgttgcagattcatgagtctaggcaaggacaagcgtttaagactcaggtccagaaaatgcgaatagaaatccttcagtcaccgtggctctgcgagcttatggcgtttcacatcaatctgaaagaatctaagaaggaatctggagctactataacttctcctcctcctcctgttcatgcattgtttgatgggtgcgctttgactttcgaccatgggaagcctttactttcct

SEQ ID NO: 39642 - DNA, 581 bp, Arabidopsis thaliana landsberg
agccataagtcatagatcaacttcaccatctgaaaagatataatacctcttgaacttttaagccttgacgctgagcgattcctttttctatttcagtgacaccacatccataacttacacctccaattgaacatttgaagaactccatcaaatttcttgtcagtgttccagttttatcggaaaatatgtattccacctgaatgataccgtagtaattgcaactgaagtgagaacaataccaaagtatatctttaaaataattatttagcaacagatgggatactagcaacagaaacggatatctatatcatacaagtaacaatctgtggcatggtttactagtggaaatacgcagcatggaatgatatctacctgtccaagctcctcgttcaaattagaagtcctggccgaggcaggggtatttgtttcagcatgatacatattaagatcgcggttgataaactgggtcgactggataaacttgatcatctgggtgtaaggaaacaaaatagagatcattcaaattgctagtccttgtagtgcagatagttagaagaggatgatactaggagagacatacc

SEQ ID NO: 39643 - DNA, 762 bp, Arabidopsis thaliana landsberg
gctagctagcttctgtctctgagattttattttataatctttatgggtctatcctcggggctttgtacttatcctagctatcttatctttattgtaagaatgtgcttcaagtacttgtatcctttgtttctcctcttttgggtttgattgaatgaaatcaattatgttttgcacaaaaaaaaaagacaatttgacaaacacgtgaatgcaatttgattgagttaagattaattagtacaaaacataataattgaaacccatgtaagtttggttgattctatgtaaacaaccgtttttctcaaaaggtatatattttttgtttttggcattcaaaagctatagtttgtttctaaagtaatcatttttagctgatcaaaaccaagtaaaccgattaattattgtgtgaatgatagttaggtgttgcatttgtgtgtaaatgaccttaatgtatagtagaacggaaggttgctgttacatgattatctaaccggttctcagatggaatcgaaagtagaaaattcatatggaaccgaagttatgcgattcaataaaaccatatcaaatgtacaatatatttacacggtaagtacattgcattagtaagtaggtatgaactcctgactccatgtatagtagaaaagggattgattacataaaatacattgactgcgtgaaatgtatgataagagcttggtccttagtcctttgttgtgtataaggagcaagttatcgggttttcgatcataaaatgatatttgtcat

SEQ ID NO: 39644 - DNA, 720 bp, Arabidopsis thaliana landsberg
atattttgcaatcgccagtctgctctttttttatcattgtgtcaattctcatgaatatcaactcaaacaggaactcctggatctaaatcaaaggcatcgctcgggaactcagcttgtccaagaaataagaaagcaggctgatgatgtaatgttttccctcggattcaatttcatttctctgtcttttcttcttttctttctatttgtactaaattcaactttaaaacctgtacaggccaggtcttctactctgtctatgccatatcgagtgcagcgaatagaagagtttgtgaaagaactcgattcaggcgatctgaaactccgtgttcgggttcttgaggtaaagcagttttttcatggtctaatcaccctgacagaactggtattaaagtaaataagctttgtcatggttttgtaaagcaatagatacccattgtggattttgtttgttcgtattggttcagtcggaaagagcagcccggaaagcgacaatactgcagatggcgacgatgtatacagttcttggaggaactctacttaatattggggttacatttagcaaccaaggaagtcagcttgttgccaatggatccttcattggagcaggtatcaaagctgttgtacacacgtgcatgtagatgtatatgcaggtatatttcaggtctatgacaaggatacataagcttcataaatattcttttgtgtgcagggatattcatg

SEQ ID NO: 39645 - DNA, 471 bp, Arabidopsis thaliana landsberg
tcgcatctgaaatcccccaccggaggttattatttaatttcaagagccagtttctattataattttacctgcacaagctgtttcttgagccgaacgttggtattcttcaaatccgaagtggctccatcgacctacaacaatcatggaatcattatatctctagcgttttgataacaccacctaatgataaagatcaaatttaaaactaagggaagagacaaacaccaaatattttttatcgtaatcatcaaaggaaaaaagaatctcacctttgtttccatttcttccatcaatgggacttgcttgtcaagttcctgaaatcgaaaaacgtaaattataaatctccatcggatagggaaaaactcggttacatagggcatgagtaaacaacaaacctcgttcatgtcacgcgctaagatctttagtgcatccaaaccttctgatatgatatcaagaccctcatcctaaagt

SEQ ID NO: 39646 - DNA, 549 bp, Arabidopsis thaliana landsberg
tggaacgcgtggtcatgactagatgattccctcttgcccataatagttcaccacatatctcatcatgtccatcaaaatcatactaattttagattttatatgtatttttaaatattagttcgtatgaaactatctgttaaattctttacattgagtgaaattataaacacatctttactacacacaaaaaaaaaaatcaattgaaacacatgaatatattcgattatttgagatagaaatttaaaaagcacgtgagtggatcaggcgttgaaggcggcgaggttaggaagggcaggtgacagtaacagagaaaggcggtgatcgagacatggccggtctctgagattcacgcttccttaacgaatcacgacgctacatgttaaattcctcatattttagttaactttctgatttttttattatgaataatttctaacccaaaaaaactgtttgctagattttttaataattaaatgtgataaaatatgttggtgaaagatataagtgggcagccccgaatattggacaaataatatcagagtgcttaag

SEQ ID NO: 39647 - DNA, 520 bp, Arabidopsis thaliana landsberg
gttttggaatcttgagtgtatcacattgtggttgttgttccccttttgggtctgataatttcctacctttgcttcagaatctgcatcagaacgcaaactgatcccaacatcgagtttctgaaacctagctggtgatggttgctttgccttggctttactgctctcggctctggtcttcttaacaccaccttgacgtatgtgtagtgcatgccttatgtgttcctcctcgatctcagggaagagctttcgagcgcttaacttctgatgattttgaaatgcctctgaagagttatcagtgtgaagcctgtggttattttctgctgatgggttcaatggaacagttgaaaaggatttgactactggtactctagctggaaaaggtgttcttgaaaccggaaggttttgggtaacgtcgggcttattcctacttttgatggttcatgccccgtctgtggatagtgatctcctaaaaggacaaggatttaacctctcttctgctagattcggcatcccggggctt

SEQ ID NO: 39648 - DNA, 697 bp, Arabidopsis thaliana landsberg
aaaaataaaaagcaaaaccatagcaaaacatatagagtaataatgtgtttttcaattgttttataatatttagttaagagataaattataattttaaaaacctataaataattaattattaaatatacatatgtccggtcaaaaactttgctatatccactggtctcatcaaacagtttttgctttgactaactacattttgttggccaattaatatacctcttgttcttgttttctcattctgttacttttcatgtaaatggttgtttttaaaaaaagtcgcatttaaacaaagtagaatagtagtttacgtatataataatattgttaacgtataatgtgaataggagtgtggaggaaatgcttcgttgctggtttcagaaaatgaacacaatgaccttgttggatataaccctgtctcagccgccacaagtgatgtgtttccttcaccactaatagagaattcaaacaccgatcaagagacattgacaagaacttcatcaagctttgatcaagagacagccatagtagcacacaatcaaagctttcatcaagatgacgactattctaagtatttgaccactgcagaaaactttaatgacatggtaagaacactactatacttataacacttgttccactaaaataatgcatataactaatgacataccattcaatatgtactaatcttataatt

SEQ ID NO: 39649 - DNA, 559 bp, Arabidopsis thaliana landsberg
aaattggttaaccctataggaaaaaagcaggaatcaggggggggacaaatatactcaagtactaatgtgcttgaagaagaactagagcctaacctctcggatgagctcaagaagtgacagcaaacgattctgtagctcaggcatctttccaccatagtcaatcatcacaactggtctcattcctgtgcataatgccagaacatctggtccaagaaacccgatttagcatcgtttacagattcaagcatatgacaacaaattgagataatactagaatctagtgttgatatatgaacgctttataatgcacgaaatggctttattctttgggttcttaaacagagcaatcaaagcaccatcaaacttaagaattcctcaaggaattgttaagagcatatactcatataaactataacccaaattcccaaattgaatcatgaatatcaaagagtcgcaaaacataagaaaaaagtggaattcatgagacctatttcgagacggcgtttggaattgctcttgagtcgccatttgatctgagagaggcaagaactcagaaact

SEQ ID NO: 39650 - DNA, 380 bp, Arabidopsis thaliana landsberg
  unsure (1)..(380): unsure at all n locations
ctaagaaacaaaaaaaaaaacatgtgttgtatgaaaagtatgagttgcgaccaaatacgcaaacaattcatttggtaattagtaataggcgatttgatgatccaagatattactcgtaacacatttgaaaacttgagacacggattatgttgattttttggggagactgaatcattttaatacatttttatcagagttgatcagatcagtcaatatcgtatataaaaaaaaaaagtgatataaatttctttcactaaaatactgaaaatagtagtcatctttttagatttactggaaaaaaggattttggtctgtttttttttctcggatcagataaataactttnttgtgtaaaccatcgaaatttaaattcataattt

SEQ ID NO: 39651 - DNA, 677 bp, Arabidopsis thaliana landsberg
tggaaagctacaatattattatttagaaggtagaaccaaaattaatgactaaaaatatttttctttgtataaaatatacctcatatggaaaatattttttcagacaaaaacataactcctttcctttttaacagcaaaaccgaaaacataaattcaaagatacatgtcgattttacacacaaagtgtgcgatcagacaagactcaagggagagatcgagaatggtgaagatggcctgaaaattcttctctccggtaagaacttgcatttacatgtttttatatatatctcggatatttttcttaactatgtgtgtacttcttagttctcgaaaatgtagtttacaatagtttctcttttgaattaagtcgagataatcgcaatactactcgggttttactagatgcattctctatttacctgtgttacagagatgaatccttaatcttgtatttatggatatgctttaaacagttttacaattaatattggtttatatttgttatctcctcgcctaatattccattgtttagaagaacactcccatctttttacaaagttgatgatgtgctgatccgtaatccatttcgatctacaacagacttgtgttgtttatagttatccatgttgtgttttttttattcttgcagctggatgaaaaattctttgaaagaaagg

SEQ ID NO: 39652 - DNA, 556 bp, Arabidopsis thaliana landsberg
cgatcatgtcctgaagctaaaagaaagtgaaggatgctaggatctctttcgttcatatactccttttgaaactgcaactcctcttcttctaccattctctataaagacaagaaaatggaatcaagatccaaagagcatgaacaattcttgaacttaaactccgagttataccttgcatgttgcaatcaaatcatcaagtgtgtgattgattaatttcaaggaagtagcaactttcctctgacgtggggaaatatctttccaaatgggtatgtcccaaacaggaataggtgaaacacttatgtcttcagcttgtcttagaacagtgtacactgcctaacaaagagaacacaagaagcatttgatctttactgatccaacacacaaaaaggttaaagaaaactgaaggcaaagagggatagtcatgagggaacctcgatcacaccggtttcattagtaagggagtcaaagtcgtaattgaacaccgccttgccaataatattaagtgtcaaacgagagaagagtgattccatctctactttttgcctttcaatgcagc

SEQ ID NO: 39653 - DNA, 731 bp, Arabidopsis thaliana landsberg
aacacttttttgttctgcaggggatcataataaatataaggctttcctgcattttcgcctctcttcagagcatacatacattctgcgggaagttccgcattgtctttatcagagaacagcgcgggaaaaatattgcgcaggtcatcacgttcatgctgcatcacaaataactggttggcctgctggttccagtcaagacctaccacattgcgcaatcctgttgcataccgcacaccatcaccatatgtttggatggtattcgatgcactgaactgccagatgcctcctgccgaatcgagtacggggcatggcatcctgcccagtgaacctgattgcctgtccctctcctggcaggaattggaataggcgccgatgtttacataaatattaccctggttatccagcacaaccgatttggattcatgctggcggcggttgatcagtcccgtaatgatcttttcgggctgagatgggttgatcacatttcctttatcatccagtttgtacctgaaaacctcttcatcggaggatgcatataaatagccgtccttgatagtaatacctgttccgccataatcaccgaaaccggtaacctggtcggccttgccatcaccatctgtatcatgcacgcgtgtgatgccttttccatttacgcgggcattgatctttacatacacatctgcctggggagttacggtaagatgccttgccttacccaagttctctgccac

SEQ ID NO: 39654 - DNA, 725 bp, Arabidopsis thaliana landsberg
accctctctcgatgatatctcaccacccaagcttcgtctcagagaacatcactcatttcttctgcacaccgaattaaagaagaaggaattattccttcttctttgcaaaacgatcccacacgaaaagcttagcttgaagactctattgtattggcctgggacagggttcctagattctatattctgagaaaacctgtattacaagtaatgaataatattaacaaaaaaaaaaaggatggacaaacaatttaattaagagtgggatgcatggtccattcgagaagaggaaaaaacaattggttctattttaaattaatgcagaaaactatctaaaaattaaacaatttttcattcagtcaaaatatatttaactctgtctctctatatctcgctctctctttaatttaattattaatttacagcccaaaaaaattgtataagaaatttaggggaaactatctatgatatattatgtagaagaaccatatatacgattgatatataaaacatattttccttgagaatgatggatctacaattttcttataaacattttacatacgcgttgagtacaatatatgagagcaagaaaataaaataaaattaacaagttactaagaagaaacgattcttctgtacttatagggaactctcatcatgctccagatctcagttgtttccatttcactaaacgttgcaagaactccataacctgataataatta

SEQ ID NO: 39655 - DNA, 306 bp, Arabidopsis thaliana landsberg
  unsure (1)..(306): unsure at all n locations
cgccaaaaaagaccgtccttaccaaaggtacccaaaactatcaaaggagggacataaaggacagagccgacagaaacgaacccaaaacaagaccacaaccagagcagagaccacaaaaancacaaaggcangcaaaagagaccaagagaaccaccccaacaggggcncaccggaacaaaccaaaaaaccgacagggaactgcggaggaacacaacaggccaacgcggcaaaaacaaccacgagaagacaccaaaacaagggacacaactcgacagacatggggaggggggctatccgagactgcag

SEQ ID NO: 39656 - DNA, 1923 bp, Arabidopsis thaliana landsberg
tttgttttcttacatttctatgcgaatataaatatattttgattttgttaccacatattttgctttatataacttctcattggctgaataatatttaatatcttgtttttagtgtgaaaaaattatgtagttttcattttatatcaatacaaatacaacagtataatgttctttattaatgtgtggttgccaaaaaacaatgctctttgttatactataaacttgtgattttactttccatgtaaagttctatttaatagatattttaatataactatatattcaatactaaattatattttaaaagcataagattataatgttatgaaatctcattgctatgaataatacaaactcaaacaatttagtgaattctataaatttgttttagggttaatagtacaatggtagagtttagatttgattagtttctagggttagaaattaagatttgggttagagtgtaaacaattctggcacaaatattcttaatttgttagtctcctaatattgaaagttagtcggccatttcgtttagtaatcatgggtcgttaggaaaagaaatggacatcgccgcataagctaagaaaatgattttttttatttttcagttttccgtcgaatttactcgtgagatctcgtgatagtatcaaagtacattattgttcttttctttagtgttctaaaacactgagtacacagatgtttaagtagtgtcttggatcttgatgtaacgcggtgatcgaatgtaattttatatttcatccgtttcataaaaataaattatttagaaaaccaaaattgtttcacaaaaataatttttttatatcatatctcactatttttttgatgtattatcttctgttaattagagttcaaataactacaagtgctaggcattcgttcactaacaagcttgaggacactgattattattgttcatattgtttgttacaatgaaattcacttatgaactagtatatcacacagacacaagtgaaatcaatactcattcgataatcgatagtacatataattatgtctgtgtcatgtgtgttttagtaagataccaaaatagaataaaaaacaagaaaacacactatattatcggaccggtttttcacgatagtcaaagaaaacgaaaaacatttcgtgtagatacatatatagataccgtacggtcatttgcttaagttaaaccaaagcgattaggttaaattgtgaatcaatcatttttatttcgcacgtgaaaaacagccaaagctttttatgaccacaaggcgctgtctgattggctcaactataaagttaattaacaaaaaaaattatgataccaattattactagctctataaatacgtagccactctctaggttgcatgactcacaaatcaaccatttctcctttcttcttatttctgagcaaagttttttcttcctttcatattgtgaggatgtccaaaaccaatatgaaattttgcaatagttattttctggtcgatccgaccaaagcaagttttcttgatctccttttgcttttgttttcctccaacctgaccagtgcaagattcatcgattctcctccggatacgcttaaaggcttccggagaagtttcgcgagtcgatggatccttgcgttggccatcttccttcaaaaagtattaatgctcttaagtaaaccttttgcattcattggtcaaaagctcacatattggctcaaccttcttacggcaaatggaggcttcttcaacttgatacttaaccttatgtcaagtgagaaaaattaacaatatagcatacctttagttcggtatatttaacttatcccttattaccaaaatacttgaaactcgaaagaaaaataacaatggaatttcttttcttaccatatgaaataaggtatccccaaaaggttttttaaaa

SEQ ID NO: 39657 - DNA, 571 bp, Arabidopsis thaliana landsberg
taagataactggtgataagccttgggataatggtgaatcccaaactctagataacaacaacaatcattgaggaggtgatgaagttttaagccagagaacgtgatcaaatggagatactagtttggattgtgtttcttcttttgatgtattgccaaggttgagagatgtttccatctctgagaagcaagaactgtttcttaagaagcttagactatgttgtctagtgtttgattttgtagctgagcctcaacagaacttcaaggagaaagagatcaaaaggcaaacacttcttgaagttgtggattatgttatctcttcagggaatggcaagttccctgaatcagttattcaagaagctaccaagatgatttcggcgaatctctgtagtaatcctcatcgacaatggaagaacaaaactcctgaggcattggatttggaagaagaagaaggatctttgaatccttcttggcctcacttgcagattgtttatgagttccttttgagaatcgttgcatctcccacacagaccccaagatatcccagaatacatcgatcatacattcgtctcaac

SEQ ID NO: 39658 - DNA, 710 bp, Arabidopsis thaliana landsberg
caaataagatgtcattatccccaagtcgattggagtaaagttatttggtttaaccaaggtatacctagatgcagtttcatcacttggttagctgttcgtgatcggctagctacagggatgcgtatgcatagctggggacataaccaaccgtgtgtcttctgtggagagccggacgaattgtgtgatcatcttttctttgcgtgcccatacacgttcatgaatttgtcggaagttgcagggcgtctgctccagcatcggcaagaccctgactggcatattactctcacttcgttgatcaacggctcaggcgatcatctaagggacatttttctggtgtggcaggagcgaaatagtcggatacacgggaagggctatgaaacttatactcagctgactcgtcgtattgacaaactcgttcgtaacaggatctcttctttagattatcatagcaagcaaagactccgctattctccttcaaagttggttcgagttctcgccaactgtgacgtaataccctgaagctgctctcctcttcttgtattcttttaatattccgctgcttcttctgtttttgtggctcaaaggaccttgtctcacagtattttgttcttgtgagagggccatcacccttgtaaaatattttctttttttgatcaatcaatacaccgtaaaaaaattgttatattcgcttattatataagaaaaaaact

SEQ ID NO: 39659 - DNA, 574 bp, Arabidopsis thaliana landsberg
cctttgcatacattagattattcaataagttcactttaaagtttttgttttcgaaaaaaagtgtacggagatacagtaatcacattgtttagttgtccacatatgtgtacgtcttaaagcatatgtgagaatgtgacttgccttgtcttttcttccttgacctaaatgacgtcctccactttctctcatccatctttggagctttccacccaagttttccttacactttccctgaaaattcaatctaatattaaaaaaatgctaaaaaccaaaactttacaaaaaattaatattaaaaacataaaactttcttgttcaccactcaccaaaactctatataaacatatacacaactctttcacttttgcatcatcttccttcttctcttaagcacaaatggcgactctttatagtcaagttccttctgtatcagcagttttctctctttacacatctttttccgcaatcacgatgctttttcgaacaatcctcaacgagattgtgcctaaaagaatcagagagtacatagctatgaaagctgtagacttcttctcttcttactttcaatctgatt

SEQ ID NO: 39660 - DNA, 818 bp, Arabidopsis thaliana landsberg
aatactaatgtaaaatgaaaaatttctctatgtaaaagtttcatgctgataaatgtgattggatagatagttttaacaaatgatgtaacaatattcataattttgtctttttattcgaatttaatacaataactaaaacaaatgttacttggaaacattatacatatcgatagtaatacttattcatacacagttacacataattcagatatcattgggttcatacttttatcagatttcagtttttcaataaataatataaatagtacattttggtcataaaattggtatcttgacataaaagaaattccaaaatatagttaaattttaatttctccatatctatgctattccagaaatgttgccatatattttatcttcttgtcatttttaaattcaaaagtctcgttttttttagcaatcaaaagtatagttataaaatcatatatttaccagaataagaatttgtattctacattcgacaaccaaagtaaataaatggttttactcacagcttgtgttcgacttgttgcatgtcggaaaagagcaaatttcaaagcctctctgtaacttccaaaacctaccatcaaccaaaatactaatcctaaccacatttaaatatctgtttacctcataaaacatgcttccttccaaatcgaaaccatagctaggttatataaaaacgttactatgtacccccaaaatgattagttaagaaaaaaggaagaaaaaagacttgtcaattccctaaccatcttcacaagccaccatttttactatcttcattatcgccttccatgttagaagaatcttcgacg

SEQ ID NO: 39661 - DNA, 644 bp, Arabidopsis thaliana landsberg
gccattttctctggctcgtagtcgcagacgagtgacgaagaacataactttcgtagctttctctgtttctctctttcaaaaccggtttttatacgacaagacatttatagcttgtttgggcctaatccgatttcattgggccaaagtctgatttatataagcccagagttctttttaatcaattttttatatttattttgtatattagttaagttcactcaatgtgattatttttccaccaaaatctttcatttattcttatgaatttacctaataaatagaatataaaagtgtgaaaagaaaaaaaatcatgcttgaaaatatctctgttaaaaagaaacgtaatgattcagagtgcgtgcgaaatcacgtatgataacaagcttgcaactcagaaaaagtacttgacgtttgaagaaagccataattttgatcatatgaaattatgaatgattatcgtaatttctttaaaacaaaaaatacaaagattgattaagtgatacacaattcagttggaagccaatcatatttcaaaaactatgagattttatcatttttcagaaagaaagaaaaaacataagaattcatcgattttttttaaaaaaaatcatatttattaagttgaaggattatcacaaataaaa

SEQ ID NO: 39662 - DNA, 827 bp, Arabidopsis thaliana landsberg
tttttcataaaggattctttgaacttctaattaatatcgttaacgggtatatattaaatagaatttactttaggtaaaagaaaataaataaacaatacattgttgaaaaagaaaaaaaaaactacttccaatattcattgacatgagatgtaatttaagtgtcatattacgccaaaaaatattgccattatatgttgagattgatatttgtgggtacggtgatacctttcacgggggaaccccgtggccctactatgatttgaagggtaccataatggattatggatatataaaattatgtacactatatcatcgccatcttcaattcttcattattcatcttcttgaagatgatatcaacattcaccgttattgtttcagtgtgtcaaatcatggttggaccacgtccacgaaatatatatcgagtaaaagtatcattgttgaagagtaatgatacatggtgttccttttcggagccaatgatacatgtttgatttaaaataaaaaaaatttgataaacataatggtacatgatattactaggaacaaaatatataccataaaaaaaaatttcatcaactgcgacgtttctttatgaaagacaaaaccgattgaaaaatacatgcataagagattgtagtttattcctacatgaaaactacattcactttccaccaccataaatttcaataaaacaatgtgatacaaatttggtagtatatatttcttttctttttgctcttcagcaacaacaaaaaggtgaaaactgtaaattagagagattaaattcttatacaacatgcttaaaatacctatgtgctctagtg

SEQ ID NO: 39663 - DNA, 555 bp, Arabidopsis thaliana landsberg
  unsure (1)..(555): unsure at all n locations
ttaaaaagagacacaaaacgccgaacagaatacagaataatcacgcagacgaaaatacgttacaagcatctcaattctagagaatgtaataagaaaccacaatgggaaaaaatgcgagaagaaaacataaactctagattcagctacaaacacagatacgacatcaagcaaagaatacaatctacgataattttaccaacaaaatggttgcgacaaaagcaaatcgcagtcgtcgtcggcggagacttttgacgggctataagaagtgagagtgactggaaaaaaaaaagaattcttaaatcttttcgcggtaaataaagttcattgtcaatatatttggcggaaaacggatgatcagtattcagtagagagatctcttaatgtaaaattatatgtgatcagtagagagatgtataattataaattttgatccacagagtaaaggatcaaagtattgacttattgtatttncttaaactttgatagatcaacataacacaaaaaaaaaaaaaacagtttaacttataactaacctggacaaatttatcacctccc

SEQ ID NO: 39664 - DNA, 311 bp, Arabidopsis thaliana landsberg
caccgcgaaccggaggcggggcacaaccccggacctcggacccaaggcccgcctggcggatcgacccgagacggaggacacggggaggcggagagagaaggacccgacgacacaccacccacaaagacaacgcaggggccctaacaagagcacaacgagaacagaaaacacgcgggcaacaaaaggacaaaagcacgaaagacacgaaaaggaacacaacaacgaaccgacaaagcgaggccaaaaaaaccaaacaaccaaagaaaaagaaagctaaagaagaaagaaaagacaccacaaccagaacaggg

SEQ ID NO: 39665 - DNA, 1015 bp, Arabidopsis thaliana landsberg
gatacaggacatatagacgtctgtaacgtaaagtatccaaggccgcctctgacatataagtgaatctaatgggctactatgtaacttataagcctaaactaaagccctatattgtgaaatgaaactgacccatacaatgatattacatcagaacatcaaaatggcccatacaaattgtatcatacaaagatgtaaactggcacagcattaacatattttttgtttttcaggactatacaaattttcaattcaacggttgcaccagcatgactagaagaactaaaaaccaaccttttaaactattgctgaaaatagttattttctaatagggctcgaatgtataacacatgaaaaccatgagatacaaattaagaccacgaagtacaaggcttgggttctttcatatttgttcgtacaaaaaaaaactttcaagattttcaaaaccgttagttaacttcttcccttatcttatctataacgacttgttcccttatatgcaacgacttgttgtggttgaactgcatatatagcttcgtaatccaagtcaatatatttatataaaggtaccaagaatcttaaggatgtggtttgaaacattcaaaagatcatacgactttttctttgttataaacaaaacaaatgctcacaagtcttcatttagaagaattcaaagtcaacggtatgaaacttcgccaaaacaaataagccgtcgtactagttttggttgcatctatttacattaaggaattggtgacgaaatcaactctgtaattttctataatcagtttttcgtacggactttcgttcttgactattgacatgaatcccacctttatgtttcatttatccttaaactaaatcatgtaacaagaattctaaatttagttcaaatttcatttgctttagaacaaacaaatattgatttgttcataacgttaaatttgaatatttctcattatataactagtctgaactcataacttatgtcagaaaaaaaaatatgcagaggaaatct

SEQ ID NO: 39666 - DNA, 705 bp, Arabidopsis thaliana landsberg
ttgagtgaataatacgaattgaacaaacacaaactctacaagtacactctcatacatctaacaagttcagaatggcacaatacgaataattctttgtcacacctgattctatatgcacccattgactataacaaaccgattctaatataccttttagtttctccatatgcattggatctttaacaaggtccatgaataatccgacggctaagaaacacaatcacataagatgctggtgatgatgatcgttagatgaagaaccggggagaccttgaccggtccaatattgattggattgattccctggagatgtcaacccggaaaccgggcggcttatattacccaaatggttgtcctccattttcacctgagcagtttgagaaaccctagtagcaccaatagaagataatcccatatttacctcgttagggaaattatataatcccatggttcgatcgaacaaagcaaagtggctggatgatccaagagaagtcattaggttattctcgttgttggtacccatgaccggacctgaagtgttaccaccatgaaaaaaccctaagtcattcaagaaacttgagctagtgttaccatttccaccattatttccattaatggcggctaagtttaaaccaataccaccaagttgagtgaaggttttgagagtgggcaaaaatgggaattggctattttgttggagcttgg

SEQ ID NO: 39667 - DNA, 1341 bp, Arabidopsis thaliana landsberg
  unsure (1)..(1341): unsure at all n locations
acttgactagtgcttgctatgtgcgataaccttgtgaagttatggaaaaatgtagtttttagaggatttattatattgtaaatactgggattgcatttgtattgttccctgagtgtagttatcttgaggttattcttcgtaaccccatgaagtatcaccccaggtggacgcgtttaatcggatttattgatatccttgacagtggtggcagaaaagtgactggactggatacaaagagttaggtattgtactcttatcctactctacttgaaatcatcaaggatgactcttaggtattgatagatgtaatattggaagcattgaaactgttggaagttcaattgatatcattttgttttgctgcaattcctttccctttgccccttatcccttgttactgatgattaatgagtgtgtcaaagctctgttttttttttgtttacgaattctcatttcagtggagtgtactttttgtaggtgtggagaaatctggtaaaaattctgagggtgactcttggtgggaaacttggcaagaagtccttcatcaagatgagtggaggtctatgttataacattccctttaccagatatagcttcgttgccaacggttntcgcgctgctagattcttacagtcctctcattgtcaacttgatcaaatttcagtaatctagcaaggattgaaaggagtgcacaaaagcaagcaaaatcaggaactgaaaatgctggttggtacgagaaatggtaggtcaataacaacaccagttgctaatattaccctgcagtgtttgcttttgtttgatgtaaaggtgaagcttattcttctactggactaaaactatcattcactgaaaatcaggtgggagaagtacgatgctaaagggtggacagagaaaggagcacataagtatggtagacttaatgagcagtcatggtgggagaagtggggggagcattatgatggaagaggatctgttctcaaatggttttctattctaactactctctagtcctcaattttttccttactggtttatatataaggctccttgttagccagagttacttgaacattaatttgtgaaattcttgagatcaaaaagattgtgttaatgattttgattttgttgttggtgaacaatccacaggacagacaagtgggctgagacagagttggggaccaaatggggagacaagtgggaagagaaatttttcagtgggattggttcacgtcagggggagacatggcatgtatcacctaacagcgaccgtcagttccttcttcttcttcttcttcttcttcttctttaaattcctttgtttgactatgtttgtatccgcca

SEQ ID NO: 39668 - DNA, 490 bp, Arabidopsis thaliana landsberg
taacacacggtgcaaagattaacatcacagacaaggttttgtagcttcttaatgtcttgttgcttgtgatcatcaacacacaaacaaactttttttggtgtggcttttaggttggttgcactccgcttcacagggcagcaagcgtgggaaagttagaagtttgtgaatttcttattgaagaaggagcagagatcgatgctacggataaaatgggtcaaactgcactcatgcattcagttatctgcgatgacaaacaggtaaaattttcaatctaatcaaccttaaaagcaacatttctttaaagttaaaagtttccatggatcaggttgcgttcctgcttataagacatggtgcagatgtggatgtagaagacaaggaaggctacactgttctaggccgagctaccaatgaattccgacctgcacttatcgatgctgctaaggccatgctttgaggataaaatgactctggattactttaaaacttacta

SEQ ID NO: 39669 - DNA, 502 bp, Arabidopsis thaliana landsberg
  unsure (1)..(502): unsure at all n locations
atacctcggacccaagtgttgctacttgctagtgcttagctagagattttttgcccattttagcattttgacattaatgtctcatttggttttaatatacttaaataggattaaaatcttaatgcattatatatacatagctatttctctcctcccttgttagtagtggatttggtacgcatatatatatatatatatatatatatatataagttttagcaataatgcaggattagattgtttttaaaaaaagagaaaaatgttgccaaaggaaaattgtgacgcacaaaaaaaggaacgatcctgaaattgtcagaagtagacagaaacaagaaaacttgtggagaacaataaaatatcggattcagaacagagattaaaaaaaaatattaaaaaaatagaaatcgataagtaataataatattatctcttcttctctgcttccattntgggtatcgataaaccaccacatccttccctgataccctaaccacaacaatcg

SEQ ID NO: 39670 - DNA, 1050 bp, Arabidopsis thaliana landsberg
gtgatcgtagtagtccgatagaaattgaggtttcaaatttttatagtgaaaagataactctttggacgtcggggtttagcttcgcgcctttaaatgggccttgggtcaacaactcaaaagtgtcaaatttgggccagtatactgcagacttcgccgttttgaacattttctatacgggcctataaagtataaactatcctccttaatagatcatgcccaagttttatcccattacaaaagttttagagtccatccacgttacaaaggtgaacaaaaaatcatacatattatatacatgcatttgatcacacttacccttttactactttttattatgttggatactaagtatgtagatataatataacaaacttaattatttccaaaacattttccgactcagacatcatagcttttagttttcaaaagttcatctatcattctatttttaaagtaaagtacatattctttttcacaatcaaataatatgaacattgaaccttaacattcataaaatgattatcggctttcaattcattatgtcaatcttagtcatggaacatctattatcttacttttcgatcgtaactgcacacaacaaatagtaacacgcaactatcggaatagtggaaaataagtagggatacataattgcaaattatgaaacaaatgttataaaataaacaaaagaaaacacgatcgaaaagacttaacgggataagagaaaaagatatggtccagccttatctcttacctggaaattgccacgtgtcagacacaaccagaacatagcctctcttgctaccacaaacatttcttcaaatcttttttgattacttttccattaatttaaagaacacacattgatgcttttgttatgttggatacgctactacaaaaccctacaccagaaaatatgttcatattaaatccacgtgtcggataatcattggtcacatgcttgacgaacagctagattctggcagacgaacctttttaagagttgtgagttgtgatggaccaacccacacgtggtgtattacagctgac

SEQ ID NO: 39671 - DNA, 614 bp, Arabidopsis thaliana landsberg
gcaaaaacactgacaaaaaacaaattccagcctataaataacttattaatctttcatattactactttattggataaaagtacaggaaatagttgacaaacaaacagaaattgaatgattactcgtgtggtatataaatagttgagactcaaaattaaaaagaaacaacgagttcttttaatttttgtttttttagatgaccgttgaactgaatcaagtgtgattcactgccacacaattaaaacattgggcattggctataaaattcaccaagaaaatctatttaccataaatttcctaaaacatttatttaaaggttagttttaaacgaaaataaaagaattgtttttccaccgaaaaataaattattaatatttagtggtacgatacatcttttcagcaaaaaaataaaaaaaaaattagaaacccaacttttagcctttaggcttgaagttatatatattactcttttgaagcgaactgattcttaatttctcactttctttttctctatatctatttttttatagatatatattttgtcttggttggattttgttctcgggggttacttacttgagagaacctcgagacctgtcttgtctttatgctta

SEQ ID NO: 39672 - DNA, 563 bp, Arabidopsis thaliana landsberg
cctggctctcgttgaatcagatactgtcacaattttgtttacatatatatcccctcgagctatattatctgagtttgagtaggagacaattgaatttaaaatccttgttagccacaattctgattagtatcgttcgttttctctctgaatctgaggccaacattgtctgttttgcttgaagaaccctgttctcttgtagactcattaaccgcttttgttatagctgaatattctatttctaagctgcactacatgattcttaatttcttttgtctacatgttatcttattgattgttgttcatcactatgcttatttgcttcttatgtgcttgaaaaatgcagtaacatgacaatattattgattagcttgttttgcttggtctttgtttaaagataaaaaatgggagcttcgaaactttccgggatgcaaaagcaagtcttgagtctctcagaggatttctaagagcagctcgttcaagaccaatagaagacaggaagagaatgggatgattgtgtcacagagttccgccacaactctaagaggtcgaccgtagaattttca

SEQ ID NO: 39673 - DNA, 704 bp, Arabidopsis thaliana landsberg
cacgacgatcgagaaagttgtcatgtgtgatattgatcaggttaacctcatacctccaattgttttaacaaaaatatacgttcatgcatgatcttaacaaataaatgtttttttttcttcttttaggaagttgttgatttttgcagaagatttctgaccgttaacagcgatgctttctgtaacaaaaagcttgaacttgtgatcaaagatgcaaagtaaggaacctaaaacaaaacaaaacaaaagttttatctgagtctgacgtttaaaatctctaaaaaatatataatctgaaatgtgaaaaagggctgaattagagaaaagggaagagaagtttgatatcatagtgggagatttagctgatccagtggaaggtggaccttgttatcagctctacaccaaatccttctaccaaaacattctcaaacccaagcttagccctaatggcatttttgtcacccaggtctttcgtcttttttttttcttctaatcattgtttgataaatattaaaaattcaaaagtatgataacaaaagactaaatttacttacttaaatcatacataggctggaccagcaggaatattcactcataaggaagtcttcacatcaatctacaacaccatgaagcaagtcttcaagtgtaagcaaattaaagcctgtttcgtgtgtgttcttgtaatgacattatttggatccattttt

SEQ ID NO: 39674 - DNA, 298 bp, Arabidopsis thaliana landsberg
ttcgacattcgcgttgtcataacatcaatttgcttatgtaaagcatgcatgccttgatgactgaccttgactcatcaaatccgcacattgatttttggcaattctgtgaaaactagtatgatcaccatatgcttagtaaacccatatgttttattccagccactataaccaatagaaacaaaagcatcacacccaccttgtttctcagcttgatctctgaataaataacaacataggcaaaaggctttctctttttaccacactatactctaaccaatcatcaccatatcgatcatac

SEQ ID NO: 39675 - DNA, 144 bp, Arabidopsis thaliana landsberg
agtcatagttgctcccgccgcctacccgcgcttggccgaattcccgcacagatacattcagagcaccgagcagaaaccacacggggttagtatccacagggaccagcgcaacgccatgaccaaatgaaaccagacggacacccc

SEQ ID NO: 39676 - DNA, 505 bp, Arabidopsis thaliana landsberg
ttataattcactgagttaagcgtcctacaaacttgtaaaaaactcaccaaacgagggaagcccaaagagagagagagagagagaaccaaaatgggcgtcacagagttgctacaatggaatccatcgtataaaaggggttcatcctctgattcactctctcacactttcatctgatatctcctcatcttctcttccattcaaatctgacattccctcttcacaacaacagcttcgtattcgctcatcttcttcgctttctagcatcacatcttaatcaccatctatctcctttcaatcattctatgttcccagattttgcgtctaacaacgactttttattgttttatctccatatcttggaaatcgcaggcattgttcgtctactcgaggatttcaattttggtcatacaaggcactctttctttcgatctatttgaacccagaatcagacttcatctcagaactctggatctttgataaaactctgaaatttgggatttttttt

SEQ ID NO: 39677 - DNA, 688 bp, Arabidopsis thaliana landsberg
  unsure (1)..(688): unsure at all n locations
aaacccaaanagaaggaaaaacaagggaaaaaaaaacaatttaaaaaaaattaaaaaaaaaaaaccaaaaaagggcacaaaaaggggaaaannnaaaacaaaaaaacaccaacaaaacaaaccaaaaaaaaacaaaacaaaaaaaaaaaaaaaaacaacaaaaaaaacaaaaaacaaaaaaaaaagcaacaacaaaaaaacaaaccaaaaaaagaaaaaaaaaaaaaaaaaaaaaagaaaaaaaaaaaaaaaaaacacaaaaacaaaaagaaagaaaaaaaaaaaaaaagacacaaaaaaacaacaacgaaaaaaaaaaaaaaaaaaaaaaagaaaacaccaaaaaaaaacaaaaaacgaaaaaaaagaaacacaaaaaaaaaaaaaaacacacaaacacaaaaaaaaaccagaaaaaaaaaaaaaaaaaaaacgcaaacgacaagaaaaaagaaaaaaaaaagcacgccaacaaaaaaanacaaccaaagaaaaaaaaggaaaaaaaaaaaagaaaaaaacaacaaaaaaaacaacaagaaaaaaaaaaaaaaacaaaaaaacaacacaaaaaaaaaaaaaaaaaaaacaaaaaaacaagaaaaacaaaaaaaaaaaaacaaaaaaaaaaaaaccaaaaaaaaaaaaaaaacacaaaaaaacaaaaaaaaaaacaaaaaaaaacaaa

SEQ ID NO: 39678 - DNA, 430 bp, Arabidopsis thaliana landsberg
aactccgcgtagggattggtatacatttcctttccttagactatttactttgaatcattctgatttgatgatgttaaattggttatagacgtcgacctattataagtttttaacaaaggcagaggcccaaaaatcgactacgtaacattgacttggatatatggtttatggcccacgaatgaaataagcttaaacaaagcccacggaaagaagaaaagaattgaattcaattgcctttactcaatcataaataggaaaacaaaggctcacatcacacatgttatttttttatgaacaatgaacaatcaatgtgtaaatttctctaaccgtaaaaaaaagatagagagagaccaaatcatatcctctgttttctcaagctcttgaaagaactatcctattctcaaaaaaatcatcattatcatcacgacaa

SEQ ID NO: 39679 - DNA, 798 bp, Arabidopsis thaliana landsberg
tatttgtgagatgagatggtatacattttgtagtcgaagtcgataccaattgacagaaatgctaagtctggtcataagcactgcccatatttaataccgtaaggacatcgaaatcgtgtttgtatatatatgtgctcattaatcgtaactaaatatatctaagcgccgaattatatagtgtagtttaatttagtggtttttcatctaagggctgtatttatgtagaacattgttcgttaatgtggaactcagatgatgtattagataccgagcttgatttgaatatcggccatctaaacctcgtcccgtggaggaaaaacaacagacaatagagtgaacaagtccaagataaactcatgatgcagaaggagaagtaacaaaatatgaataaaataaattaaggtcaatgacatattagatgtcgtcgcttcagaaaaagcaagccattgagattcggggaagtcggtaagatattgaagtcaaacacaatctctttatgttgttccaaaatatacaaaacatatgtcgaaacttcaaattgcgactcctctacaatctacatcgaggcatgcttataagtttggcccaagactttgttgcctacaaaactgcggattacatgggatgaactaattatattttcatatattaatataacgaaaaatgttacaacataatttttacaaattaaaaaataaaattacaaatcataatttatttttccttctaaatttctgcaaataaaattagttttttttttattactagtcattaacaattcggagaggaataaacatt

SEQ ID NO: 39680 - DNA, 1015 bp, Arabidopsis thaliana landsberg
  unsure (1)..(1015): unsure at all n locations
ccacacagggaaagtatacagcatgaaacagcagtagcattttacagtgttagatatgaaaggccccggaagaggaccgggttgtaatagttgcccaccttgaagctaccacatagcatagagcaaaatggacaagaacaatcctccctaactgcatgacaatacagaaaaaaatagtaaataacaaatcatctagagaaacatagacattgacatcgaattttgtcgacgaacagaaaaagactaaccttcagttttctgtaatgtgttattacaatccttatagttgaaaactaccatcccagtagatcttgacctaaccaaaacacaattttataaaatgtaagtttatagcatgaacaaagaagaaaccattcattatgtccatatctactcaacaaagataaaataggtcatcagcttccatattagaagtaagataaataacatatcactgtagcagctacattcaagaagaaaacatactntcttttgcgctttgctccaatgttgtagctcaagcatcttggaagaaacgatggctgcaacaacaaacaacaagttcaaatttaggagacaaaagaagcacacactcgccatgaatcagaccataatcagcttagcaaactcaaactattagtgggtgatctacacaggagatgaaagattactgagctaatatgatgagagaggaaggcaaatcatacgttgcctagagagcgaaggtgaaagatgttatatagtcgaacaggtttacaatatatcaagagattctcatcagttgaaatcacttcctccggtgaggatttcgcgcgacaattctgcctacacattcttgttcaattacactcaacaacgtcaagagccgattatgaagttagtgcaaactctgaggcctcccctaaattagaatttccctacgtcatagcgataaactcaatgcaacaattagaaccgcctcttctgcaatatgcttatatagaatgtcttggattgaggcctgtgtaataaagaa

SEQ ID NO: 39681 - DNA, 719 bp, Arabidopsis thaliana landsberg
  unsure (1)..(719): unsure at all n locations
ccccccccccccccccccccccccccgcccccccccccccctaatttccccgcgcccccccccccccccccccacttccccgacccccccgcccccccccccccccccancccccccccccccacccccccncccccccccccccctcctttctccccnccccccgcgggctccaccccgcccccccccccacccccccccccnncccccccccccccccccccccccccccccccccccccccccccccccccctcccccccccccccccgtccccccccccccctccccccccccccccctctcccccccccccccccccccccccccgcccccccccccccccctcttttccccccgggggtgtggccccccccccccccccccccccccccccacacacaacaaccacacntnccccccgcgcccctccccccccccccccctccccccccccccttccccgcccacccccctccccacccccccccccgccccgccgcccccccccccgcccccccccccccccnccccccccccccccccccccccccccccccccgccccccccccacctcccccccccccccccacttgtgtcgcccccccccccacgtccgcggcccccccccacccgacctccccccccccccccccccccccaccccccccccccccctccccccccccccccccgcgcccaccccccctcccccccc

SEQ ID NO: 39682 - DNA, 1038 bp, Arabidopsis thaliana landsberg
gggctatggttgaaattttgatcttttaacttgatccattttgtttttaattgaagcttcacttgagaccttagtcggagagattgtgtacaccttaagtctttgaaaatagtgatttattctttcccttttttggtatcctcttagagactgcctaagacagtgacatctttttttcagattacgtgtgtggttggactgtatatatggtgtgcggcttcagatcctgcagaccgtggagttttccggtctaagaagtaccttaaaattcctgaaaatgggaaatttcctctagcaaaggatataaaagatggatgtggatcagctacaggtggtgctaaatctcatgatggcacgtgtgtagaggatacagaaaatggaagtaacaagaaattggagtcatcagaaagatcttctctcctgcgtttgctctgctctccttgtgcattgctatgtagttgttgcagtggaaaagatgaatcttctgagcagatgagtgaggatgggatgttttattgcagtctgtgtgaagttgaggtgcggggaacatttataaacacagacatgtcttttcattggctttagagttttcttgtgacaagaaagcttcacatattctcaggagtagtcaacaattattgtcttccttttgcaggtcttcaaatacagcaagcattgcagagtttgtgacaaatgtgtggaccgttttgatcatcactgcagggtattcaaaggatttgcttaaaaatttcatggtttatcttaaatggttaaacccttccttctgttttaattattttatctttgtttttgtatgacttttgtagtggctaaacaactgcattggcaagcggaattaccgaaaattcttcagccttatggtatcagctatttttttggtaaggttgtgttgatctttcatgatgtcctgaaagaatatcttccgcctatctttctgtcatgaaatgttctcaataataattccttggtgggtgaaatgaagagttagttctcataaagttagatggatttttcccg

SEQ ID NO: 39683 - DNA, 645 bp, Arabidopsis thaliana landsberg
gcctgcaaccatttgtaaagaaacagagtaaagcagtagctaacttttggcaattgcgtatttactatgttttgattgatttgtgggataaattctcttacaaccatcatgccaaagttatattagctaaaataaaaataaaagctagattaatttataatttatgataattatcaaactaaatattggattaattaacatcatttagttaactacatatctaccaattattaagtaacttgtaaaaccatcaagtagaaacgtttcaaaattgtataaaaatttgttgatcgattacgactaactcaaatccaagtgatcaatatataacataatgacgtgaaattcgaagattagtctataatttagatcatgaaaataaaatactattttcttcttctgacccttagaattttacccctttcacagaaatgaggttatcaaatttggagggttggaggcacagaatatggaaacatcaataatagatgcgaatgagcactttggttcccttcaagacttggatacacaccattttgcaatcacatggcactatatatgtattcatctctggaatatatgtagtatttacaccactttcaaaaaccaaagataaaataattaatgaaaaaaacgtaaattcta

SEQ ID NO: 39684 - DNA, 709 bp, Arabidopsis thaliana landsberg
  unsure (1)..(709): unsure at all n locations
tctcctcctcaagcttgattcgagttccctgacttgttcctttatctccatcagaacgtctctgatcgtgctgcagatatcaagaacctcgatgaatccgtcagaaacatcttcaaatcctgtgaaagacttttgagttttagtcgtttgaaaacggaggaaaacttcgacaacctcgtacagattctttaaaactccaagtttccgacgagcggactctggtcttttctttagtaacagaagatgatcttcgatggctcgagacagaggattaacgtcttcggaccagcttgttgaacgcacgtgtgcaccagatgatgaagtacaagccatggctgattcactctatagagataataatgtatagtcaacgaatgaaaaggtttagcttctcattaaaacgtactctcaccaatatatatgtatgtgtctctatgtacatgcatgattaagtttgaatatacatatacttgcacgtagaggtaagtcaataggtcgacgaatatagatacaggctggaattggctgttgcaattaagtttcttccgacagtctaacgacaaatctacactcttctccttcatgataaattttccctcttttttnttttggcttggcattaaatattcatatatggctgaaacaaccaattaatcacataggtgaacatgctgcttagcaaatgattttcatgcaagatcatcatgga

SEQ ID NO: 39685 - DNA, 659 bp, Arabidopsis thaliana landsberg
ttgtttttccttagccattttccaagcatccctgttttaacaatgttgattgttttggattgatacgtctatagcagcaaattctcggatgtttttgatgaagatcacttcatcaatgctttatcaaaagatataagagtcatcaagaagctcccaaaaggcattgatggattaacaaaggtggttaagcatttcaaaagctactcaggattgagttactaccaaaatgagatagctagtatgtgggatgaatataaagtgatccgagccgcgaaatccgattctcgtctagcaaacaacaacctacctcctgatattcagaagctgcgatgtcgtgcttgttatgaggctctacgcttctctactaaaatcagatcaatgggagaagtaaaactattgatttaactataaggctataaccatctcatatgtcatcttcctctcttacagtttgagtttcatgcagcttttggtcgataggatgaggtcttatggtctatacatcgcattgcatttgaggttcgagaaagagatgctagcattcagcggctgcaaccatggtctatccgcttctgaagctgctgagctaaggaggataaggtcaccaaaacagaatgtacttttctatgacatttcttgcgagttcgtgtttttggagt

SEQ ID NO: 39686 - DNA, 609 bp, Arabidopsis thaliana landsberg
cattctctattgttcgtttcttgtttaaatataattgtctttcttttgtttatcaatctgtatttgcttctttaatagggggtaggtttgttttcttttactttatgtgtgtaataaatggtgataagaagttgttgtttaaaaggtttgaccattattttagattttcataatgttcttctatatgattgtggttttgtcgaatgatattcttttatatgatcataagtctgaagacttttgggtctcactatgaggataagtaaatttcccaaagatctgcaaatttgaaatgccagagactggtgagatgtagaatctaactttgtttttacataagcacgttatctactatctacagattggatatagattaatctaacaacgtatacatattttagtagactaatgaatacttgattgatatgtcaaactttttcattgacttctttcatgaaatgcaatagaaatattatcatttactcacagagtaacagtggagattcttttaatacgttttcatgctaaattaagcggccgagtggttttttcttcttaattactactacactattatcgtttatcaatgactaattcacacaaacatcg

SEQ ID NO: 39687 - DNA, 785 bp, Arabidopsis thaliana landsberg
taccgacaataattctttgtctacaagaaaatgatttttttgaaagggtttttgagataagcttagggtaattaatcaagttgatatttatcactaaattgataaatgatatagttcttgaagacatttttgttactatgagaagaagttgaaaattattcatgatttaaatttgacatgattcttgtttgtgtttttgattgaattaagagagctcagaattattaacaaaagaaaagtgttataaagaactaaaataagaagtagaagaagaaattacctgttcaggatccatccatgtaacaaaggatcgaagcaacgattacttatgtttccttttaataattagcaattatggtagaaattttgctcaaattctagggaaccagagagagagagagaaagagagagtttgaggtgagcaaatatgaatagaggagaagagcacggttcttaatatataaagcaaatatagataaagtgtgtcctttttaatatgatttttatttataattcaaattgattttctatttgttttgtagctagttgttgttttacatatattaatatgatactattcacgacagaaaaaaaacgatactattcacatttaagtcgagatttttttgcaaaagtcttcagcaatataaactagtaatacttttgttgataactctctctttgtatggtggttactttagaatttgaacattgcgatataaaacgaaaactacaaacgtaagtagtcattttttctcatttatttctcatttgttaattacaat

SEQ ID NO: 39688 - DNA, 537 bp, Arabidopsis thaliana landsberg
actatacgtaaaacaaaattttattttacatatcatacttttgattgatactaacacaaacttcacaaataaattcgtataattatgtaattttaggttatttagagattataactagtatttagaaaaatcgcaaaatcatataagaaaaaaaatggaatttgtttttggttcagattatatttatttttcccgctattcatattatagttatgaaccaaaaatcaagatagaaataaaaaccactaggattttttttttgctaagatgaaaatttagttatacacttatgtttatttatttaaatattacattaaactaataaaaagtattaattattctaataactttttgtcagttttaaaattaggccaaaagtaaaaaactaatacagctaatataatatacttaaggaaggatatttcaactttttcttttcttcccagtttcagagtttatacaaataaggtaaaattcgcagaaacagaaaatcataaagtaattaaaataatacaaccgaggaagtaaaaagatttc

SEQ ID NO: 39689 - DNA, 772 bp, Arabidopsis thaliana landsberg
tctatcatcacatgcaacagcatgtaatgatgtggtgcccgaataggcggattccatcgatgttgatcagacgatgctttagatcaaagaccggcgtgagctgagacggatggctctggcttataatgtcaccactatgattaccaaagtgtttgctgctttgatcacggccgagggagtaaagagcttgaagtcaagtgttattcaaatgattgtcattcagcactccttttctaggtgaaggatcttgcctatgcgcttctctaaaaccgtttttttctatttttatgttgtcgatggaaacgtctcttatttttatcttgaattgaaccgaatctgcaattaggaccctcttgaatcttgagtggtctatgtcgtaatcaggttttagaaaagatgagattggagcgacgagtagagagaagggaagagtggagtgactttttgtgaacacgttcacaccatttagagttcgaaacggttcttttttctttttgtgtgtgtgtgtgggaaattggctgtaacattactgagctcctctttcattccgtgtgggtctcgtttgttttatgtataatccttatcttactttagcctaaaaagaaattcaaagcaactatagcttcaaaagaataaaaatactataatatcaaaaagacaaccaaaaaaaaacaaaaaaagagagaggtaccgctacagatttcatctagacgtaataatacatttttcaaagatgcgacgacttttagaaaaatacatagttacttagata

SEQ ID NO: 39690 - DNA, 723 bp, Arabidopsis thaliana landsberg
actacttgtgcatgcgtcttcaaatttcagttagagatgttatgtattgtaacatcatcactccctgttagatatgctgtatatacaaatatggtctttgcatactctgcttggctgacttcaccatcattcacatgtataaactcttatatttgtgctctttcttttgtctttgagaacatactgtttttatttttttccggttttcgttcctgtgtaaaactgatctgtaatcttttataacacaggtataactggagtcctatgtagcaaattttgccgtaaagttatttttactgaccacaacgatgaagtgctcaaggcaagattacgttactgaagatttgatatgggaattcaacattggtagaatataatgaggtcttttaaatgaacttttcagatactgaagaaaaacattgaccttcatggacattcaagtggtcccaaaccctcagctggtgagaaagaaaatcaactaagctattgactctcattgttcatattattgatgtgttctgtttctcatttctacctacagaattagaggctgcaaagcttgaatggggaaatagtgatcagcttggtcaaattttaaagaaacacaatgatggctttgatcttattcttggagctgatatctatatccttatgttcgttaacgaattccttatctaaccgctaggacagtggttgatcttagttttatccatagttgaagtt

SEQ ID NO: 39691 - DNA, 289 bp, Arabidopsis thaliana landsberg
atgctgatgaggttggtgatgcctcgatagattagtttgttttcattcaattgtcctgaatccggagccatgaacacaaatttttatctcattgtcgctaacagggtcatttgttgacttgtagataaaaacgcctgaacaaatccagagaatgcgtgaaacctgtaaagttagtgttattttctttccttcctgtaatgccagtggactacatttcccactgagcttttttcaagattttttatttgaaaatattctgttatcagattgccagagaggtcctggatgc

SEQ ID NO: 39692 - DNA, 1481 bp, Arabidopsis thaliana landsberg
ttcgaatcaaaatcaccattctgagataagaagaaatgtttctaagaaaagtacaacatagtactaaaactgataagtttgtacttataaatagacatgcttaatatagtaacaagattgttttgaacaaaagcagcaagcaaattaagaatttggtttgatcatgatcacgattctaagaattagattcaaaattagtttgtatcgcctatataacgttttagattccaatttattcaatcagagtatactgataattattcgatatgtagtcaatattttccgacatatatatcctttaattatattaaaaaaacgttttcacatagtttgcttccaaatatgaatctattacaagaatcaaactggttctgctttttctgtaccgctgtctaaatatttgtccaaaaaaatactaaagaatgtaacaagaataaaaatgagtaataaataacaagaatttattaaaaaggaaaaaagagtacaatagctctctagtaaagtcaacttgcgtgttcacactcgtcccacaagtttcgtcttctcatccccaaaaaaaatttcttcagatttcttatttatgaaccctcaaaaaaattaatcttcttctacactccaaaaattcaagacctttcagagacaaaaacgtgaaacaacacaacttcgatgaaagccgccgttttccgtaacgaagacggagacgaggaggaggaagaagaagaagaagaagaagtctgtaatgttttcgacggcggcgaggtagagtctaagagaaacaacgaaaccaaaaacctcaaaggatttttcacttctttgcttttgatggaggagcacgagaagcaagaccaggaagctcgtaacgctgcttctcgccgtgaaatgtctgattttcaatctaattaccggaaaagagctagaactatgtccgattactactccgatctcaacgattactacgctgatgctgaggaaagtggagatatcaatctgaagaagtcacgcgtctcacgcgccgtcgcttccgttgctgttgctgctgcttcggagattgaggcggagagcagtgagataaccggatccggatcggttcgtggtaccggttcgggtcagcaaagacggttatgggttaaagatcggagcagagcttggtgggaagagtgtagccgattggattatccatgaagaagatttcaaataagcgtttcgaatgtctaaatcaacgtttgagttaatctgcgatgagcttaattcagcggttgctaaagtagacaccgcgttaagaaacgcgattccagtgcgtcagcgagtcgcggtttgtatatggagattagccaccggtgagccacttcgtcttgtctccaagaagtttggtttaggaatctcaacttgtcacaagcttgttcttgaggtatgtaaagctattaaggacgttttaatgcctaagtatcttcaatggccagatgatgaatctcttagaaaca

SEQ ID NO: 39693 - DNA, 497 bp, Arabidopsis thaliana landsberg
cagtaaatactgttgaccagagacatgtcacggttaggtgagagatacaaatcaaagagcgagaggaatccaaagcatcgcgaaagtccatcaaaatcaaaagattcgacacgacatacattgtctctaaaatgagcaagatgtttagatctagcaactctgacaaagcggagtccacaaggtgggaagttggcttcattagagatgttagacgccatgatttcatcacacacgtgagagggattataaactctcgcgcagaaaacaaaaggctagcgaaaaaggagaagagtcaaaggcttcttctttaatcgaagagggtttcgttttgagagaaaaatctggtgagaaatggacacggtcatctgtccttttcgagatgtttgagctctgactgttgctatggagaagatttcatgaaagcttctccggtacttcgacgagattggatacattggaataataccagagagagagagaaagaggaaattcagatt

SEQ ID NO: 39694 - DNA, 613 bp, Arabidopsis thaliana landsberg
ggcaagacttcctagcaaaaagccgcgccaatctctaccgatttcctcactccaaccatttctgggactcaaagaccgcttcacgcgtcggcgagaagcttgggttacgtttaagagagcttggtgttgacgtagtctccattgatgcagacgaagaaatctctcggcctattcaccatcgcaaaagagttcttccgttgttcgattccgttcgtcgtaccggtatcagagtcgacggaactgagcaattgaacgatattagtgtcccaattattcccaaaaattagggttacgaattagggtttttttgttttgttcgtacagtttcttgtattagtgagagatttacagaaactaaatttgattattttcgacaataaaaaagtactaacaaagaaaaaattagtacaatataagagtcaagtaaatttactggccaaatttttttttaatctaattttgtattcatacaaaaaaaaaaatgaaccatcaagataataattaaaaagagaaatgaagatggaaacttcaatttcatcattgcattgcaatactacattacgcaaaaaagttttgtatttgacatctttttttagcttatgttgttggctgc

SEQ ID NO: 39695 - DNA, 400 bp, Arabidopsis thaliana landsberg
cctggcattgcgcctagtgaacattgggatggtccacgtgaatttcagactttaggttcctcgggtggtggattctccacagcggtagcagcaggatcagtttgggcaactacaaatgcatcaacaatcgttaagaaatccacaatccaaaaaattgacaaaaccctagcgcacagtgaaaacatcaatttctacacccccagcactatccacaagtgctgaagcatctacatcaaaccaaataagagtagaacacagacgagaagtagaataagtagatcgaattcaattaaacacgaaaatgttaccttccataggctgaggtccctcgaccaaatccggattcggaacaagcatctcctcgtcttcctgctgctgtcaaaaccggaagaagaaaaat

SEQ ID NO: 39696 - DNA, 488 bp, Arabidopsis thaliana landsberg
gagacaactatgcttgttaagaattatactgcaagtctctcttctggtatgaacctgtcaggtgtgggaattttgagggtttctatggcaaatagaggcaagaaacagaaactattgtacgttaagctaataggaatccaaactcatgatcagaactaaatagatagcagattcttggcgaacttgagcctgtagagaactttaaagattcgcgccatcattcctttgttctttttggtaatgaaagaatgatattatcatcttttctttacatgacatcgtttctctgaccttgggcgctgcgtatgggatttttcatccgattgtcgataaagtttcatacttgtgccaggtgcagcctctaaagctgatattatcaccaaattatttcttttccagagtactaacccgttgtgttattgaactgcgatcagcttacagatgggagggttatcaaagtatgcactgaaagattccaagcacctgaa

SEQ ID NO: 39697 - DNA, 596 bp, Arabidopsis thaliana landsberg
aaaaggattaaaaacattgaattattgcatagaaaaatgttacttttcacttattttgcaaaaaaataaaatggtaaagctacaaataatgtaaaacagagggagtaagagaatatgcaagaaaaccttccccatgtaaagagtgcgaaaaacatgtagcacagaaaattggaaacacattaattgtcagacatatcatggacatatgtctttataatgtgtatcatcaccatcttgtgcgacactgcgactgataggttacatcacctaattatatcaacaagatcagcggttatgagaaggccaaacacgagattcgaaaaccccatatccgaacatggggatatatctttctatagacaattagacagacttcttaagttctatcaaagaggatcctaaaaaaaaaaaaagcgcatacataaaaacatgagtattatagagcttcccaactgctactttgcacaagagttgtttattccccagaggttgatggacctgcacaattatccatagatacaaatttcattcgagctaaacataaatatctatacgaaaatcattatccaaaaaacataaacgttatcgtatttttc

SEQ ID NO: 39698 - DNA, 696 bp, Arabidopsis thaliana landsberg
ttggcaaagaaacacaaattaatcaataagaaaaaacagatcttctctgttttgcaccaataccaaaagggaagaaacatatcacttataattgtataagcaaagttagtgtctttgatgttcagtgtgtatgggagcatatcacttataactgtataaatccttttgagttgatcaactaaatactatagaaagggtgtacagaatagcgaaatatgctgaaattggtataagaatacgatttatttatggtttggacaaaactcaatgtatcgttttgtccattatagcatgaaatatatagattgaatcaggatattcaaaacaaagatcaccaatgttgtgtgatgttttgagtattgttcatcgttactacatttgtttgctcaatcctttcggtggatcagtttttctttccaaaagtactaatttcgagttttgtgccctttaacagccaaatagtgcaaacaaaaaccaattaccaattgacgagtcatgtaaaaacgataaaactggaaacttatcacagcatcttttccaaaacatcaagaaagttcttacacaaaaacatcaaagctgctcaatcttggtctgcacattgattatgtgtcggacagagactatcgagtaatacccagtagtcaattatctgggttttgatcgatttcatcaaaaattgatctttttttttttttg

SEQ ID NO: 39699 - DNA, 793 bp, Arabidopsis thaliana landsberg
ggaaagctatagagttggggctctggtgtagaagctaatttccgattttcggattaacaatgggagctggctgggaagcttcaaaagaccttttccggtaaaacacactttgagttaaagtttctagtcttatctttgtagtaatggctctaagggtgtctatgattctgtctctatagatggtttagtgtagaatccgggagtgtagatagtcctcctgttatactcatccatggattcccatctcaggtacgtaataatattttcctttgaacacatcttacagcgaatagcttacggatatttttgtgtgactaggcttattcttaccggaaaactcttcccgttctttcaaagaactaccgcgccattgctttcgattggctaggtaacttcttttcctgaagtttttttcttttgttgaagttctgttgctgatcctttttcatgacaggatttggattttctgacaagcctcaggctggatatggattcaactatacaatggacggtaacatgatcttaaaccccgcttctcgatcaacagaccttaacccgagagagtatccagatttatcagaataatctgtggctttgcagagtttgtttcttcgcttgagtcattcattgatgaagtaactactagtaaggtgtcacttgtcgtgcaggtaggtagcatcactgaagaaacaagatatttcagatttttcagtgttaacttctctactttggtgttttgtcagggctacttctcagctgctgttgtaaagtatgcaagaaacagaccagacaa

SEQ ID NO: 39700 - DNA, 541 bp, Arabidopsis thaliana landsberg
tctaagtctcatttgtgaatttcatccctttttcgacattcttcttcgaattagagtattctgcctgagaaattcatcaaagggttagctacagcgagtttgcaaggacgagcacaggtcgtccctgatcaatatactgaatctcggacttcaggagatctagtattttatctggatggagctcacagtccagaaagcatggaagcatgcgccaaatggttttcggttgcggttaagggagacaaccagtcagggagttcaggacatttggttaatggctctgcaggatcctctcatgataaatggtcaaatgaaacctgtgaacaggtaaggtccgggtttcgtggtctgtcttggatttataaatcatatgagagactgaatgaattcacaggaaaaggattgggtttagagtatcttcttatgtctatgcctgtctttctctagtttctcagctttttaaatatctgaacgagagcatctggctgctttgcagatatttgttgttcaattgtatgtcagtttcggacccaaatctact

SEQ ID NO: 39701 - DNA, 981 bp, Arabidopsis thaliana landsberg
tagctcttataacagttttaataaaggcactggtggctcggaaatgttgggatctctaggaatttcacagtcaggtttatctctcaattctaagctttaatgtggacaccatgtcatgtaaaattcaatattaaattttgaagtaccttttctatctggcaggttcgtggcgttgttataaccaggacaaaaatggtgttagtgaagaggaggatacttccatagttataccaaagtatgacatagattcgatcatcaaggaagaatccacttcccaggtttcttcttaaacttggacataatttttatgaaatatagacaatgaaacttgtttaacacgtctttgactttggtacgtagggctcctcgtcaaagacctctagtcttatagcatctctgactaaaattgttgagaagcataggaaagaaaagtggtcttctggtgtaagtgtaagtgtaaccaaaggagcttcttccacacaaacatcagagaccgtagagaagctaaaagtgacattgaaaaagtatcgtggtttaagtgcgcgtgagctcgtggctcgttcagatttcgaagagatactggcgactgctgcacgttatgaggagctgagctcggcctcagtaagccacatttcgaggctgggcatgtacagaagtgtgatcaaagaaggaatcaaggcctctcagcgagttcagcttgcgtatgctcgtactagattgctcaaagaaatggccgtggagaagcagaaaaatgtagacgctgagttagcattagtcaaggctttggctgagagaggagacatgttgtacgtgaaaatatttgcgatcaagaaactgatttcgaaacttgaggccgagaagtatgaggttgatatgactttcgaaaagacagttgcgaatctatcacgcgttatagaagaggcttctcaagcttacgaggagtatcatgtggtcgtgcgtaagtggaaagaggaacaagca

SEQ ID NO: 39702 - DNA, 996 bp, Arabidopsis thaliana landsberg
gtttctttgattgaatcttctgattttggtgaatgattttgtttttgtgacataattcgtttttgtagcagacttacttaatttttcatgcaattaaatgagatttctctctcggaacagttaatctgtgttactttctttaatgtttcttgcatgtgaagtaatctccgtttagagttaatcttgtcagttttaatttggagaatccatcgactagctagattaacagagcattgagtttggtagaaaaatattgtttatgacacacacaaatttgttttcgcagcagaaacttagcttagttaatttgttaatcagatttaacttcatttatctttcttaagtgtttcttgcagactaagtattgaaaaaactattggttaacaagatggatattgaggtaattttaaatagttttttttttttcagtttagttcgtgcaatgttgcgttttactgtaaaatctattgggttattggttgtcaacaaaaaagaagaagacatattgttatcgttaagttgaaaatcttgtttaatgacctttacttagggtgatgatcaattggacttggatgtggaagcttattcacgaaactacgaaggacgaaacctagtgctgaggctacttcatatcgcagagaattctgttggcacgatgttcactgacgatttggaacttgaagcccttcgacttgcctatgatcttatccggaatgacggaattgtctgtgacatgcgtttgttcacagttatagctgaaaaaatacaaggcagattaggagaaggttatctcttggatgaaaaatggcgtcttactaagaacaacaatttcgtcaaacaagacagcattctaagaaacgacttagaaagtgctacggtaaggaaaagtgactataaaactttgcttgcgcaacaagattccatattgtacatctaatcttctattcttttgcaggacgaactcgaaaaagaccgtcttgcacttcgtcagtgttg

SEQ ID NO: 39703 - DNA, 664 bp, Arabidopsis thaliana landsberg
  unsure (1)..(664): unsure at all n locations
tttttttttttttcctctcctcacaacctatttagaagctattttaatgaagttgataagattttaatgttttaatgaaatttttacaaaacctaaggtgaaaagccttagacatattcttgaggatgataaaactgagacacatatattcttaatgatatcaggttttgagactcacaacattagaccattggactcgtgtcgtcccataaaatcaacatctacactctctattatgtcaaagtagcatgtctgaagaaagatattttcatcagaatatattttctgtttgctataccgtgttaatcttttattaggtttctcatttctctaatatctatcagttgtctataatgaataagggtaatagaaattttttgatggcgcagacaacaatccggtgtaagtattttgggaggttgcaactggacatatcgctcaaagagacaaagacatggacacgtgtgatgagagttgactttgaccgggtcccttacaaaactcccgcccgtgtggtagacatagctntggtcttctttcgggcttacaaagtgggttgtgtagaccagagatcttggcccatttttactggtgaaagtaaacgacactgtcttgacgactttgcaattctacaatttttcccatctcacgctttgaatatttt

SEQ ID NO: 39704 - DNA, 701 bp, Arabidopsis thaliana landsberg
agagaatcattatccttcaactcattatccagtttcctcgattttctcttctttttccccgatctcttcttatgcttatcaatcaattctggattcgtttgaccgtcatttgagtttccagtttctgaaagtgtttccactgaaacactctccattactcctttaatttagtcggaaatcagctgcagttcaaaactatcaagggaaacgttttctcaagtttagcacaagcttgagagcacaagtgaagtgatgattcacaaagaacagataaattaacataaatccatcaaacggtagctctagaaaacccaaaacggagctcttaagtgatttggaaactgagcaatagagactgtgtattaaatgtgaatcaaacaattccaaccaaagaagcagccatccagaaaatcatgcactttctaataccattgttcgtgaaaagatgattggcagtgttcttattcacaaaaacaccaaaacgcttcttaacaaaaaccattaacaagagaaaaacgaaaaactgccagattcaatcgagctgaggatattccacataaatgatggcaaccttaaaaccagaagttttagtaactgggtcacatcttaaatctgaatttgaaaaacaaaaatcaccctctgagaagagacggacatgtcaaggtatcaacccgaattagagcacagggcactgtctcaaa

SEQ ID NO: 39705 - DNA, 528 bp, Arabidopsis thaliana landsberg
tggggtttcaaaaagaaattgtaggtcaaatactgtgtcgatgtcctgaaatatttggctgcagcattgagaaaaccctgcagaaaaagctcatctttctcactcgttttggtgtttccactacacattttccccgaatcataaagaaataccctgaatttctcatatacgacgcagacaaaacagtacttccacggtatctatcttgacccaaatagcacatcatcttagtgaatctatctctagaaaatgacccctaattttgtaaacatatgctcttacaggctaaagtacttaatggagattgggatatcagagagagagattgccttcatgattcgcaaattctcaccgatcttaggatatagcatcgacaaagtgttgagaccgaagtttgaatttctggtgaacagcatggagaagccggtaagagaggtaatagaatacccaaggtacttcagttaatcgctaaaaaaaaggataaaaccgcggtttagggtactcaaagggaggaacagagaatgtaca

SEQ ID NO: 39706 - DNA, 287 bp, Arabidopsis thaliana landsberg
acatttaattccactttgtggaaaaaagagagcaatttaatcataaatcaaagctcctgatgtaatctttgtttaaacaatgtaaaacctgccgagttgatctaatgtcaaagcttcataaactatatgatatatctgccaacgacttgtacttaacaacaacttggtggatttaatacattttgttgactttcacctcaattataatcgcaatacctctgcaataatgtaaaattcttggtcttcaaaaataaactaagattagtcttttcttgacaaaccctaat

SEQ ID NO: 39707 - DNA, 600 bp, Arabidopsis thaliana landsberg
cgacgaaaatatacaaagttttttttaatacaatcgacattgaaaaaaaaaaaaaaagaacacaaattacttaacttgatacaaaagacgaccacttgtatatcacatcgcatcacatcacacatagtgacatagagacacataaagtcaactgaaaatagaagaaaatatctcacacttcataattcactcttgtctttctactttttcttaagtcgacaacggagaagacttgaccggaaatactctattaccggcggaagaaacgccacctccttcttcaccgtcaacaccgccatctcttctcttctccaacttctttttcatcatcttctccttctgcttcttctgcatgacttgaagttgtgcatagtttgctcccatcgaagacattttgtgattatagttcgattatatgttagttaatttgattattataatgaacaaagagaatgtgtggttaaaggaataacgaagtgaaggatgagtttggttataatgatgaagagaagctgccgcaatttatagagaaaggacttatgctctatggccgctggatatgattccattctcatcattatgcttctccatgctcattct

SEQ ID NO: 39708 - DNA, 296 bp, Arabidopsis thaliana landsberg
ggaaaacttgaaaaaacaatctgtataaaacttaacaagtttttttcttttgctaaactaacttaagaagagatatgatgagtttttttctcagtaacaataaatcacatacaagtattgtcaccctcttacaattatacaatgtaaacaatttaaattataacatttaaacattcttacaaccagcggaaattaactttgagtctgaaatgataagttttcattcaaaaatgaaacaaaaaaaagagacttgaaagactacctttcatatacatgctattattcataaacataat

SEQ ID NO: 39709 - DNA, 2012 bp, Arabidopsis thaliana landsberg
tcggtcttagaggtgaaagtatcttgatagatttgtttatgaaactgactgtttgagtctatgacagggtctgaagcagaagtttctgccaatggaccaatggttttttgccatagaatgtcgccggaaaacgaatctaacgcgaaaacgagtgatttgataggaaaaacgacgtagactagaccgttattccccggtgtaacagtgaagaatcgatccactagactaaaatcttgaatccattggtagtaagtgccacggagagataacgagtagagttctccttcattgtttgaaatctgaagaaattaaaacagagcaaaaatcattgaagaaacgtgaatggagaataacaagagggtcagagatctcttacatagatgcttccttcgcaagaatcaatcactggtcgagaattgaatgtacaattatcaaaatcttttcgacaacctagtaggtacccgaatcgttcgattttaggctctgcaatccagagttgctgccgaaacatattataagcgtagagaccgtgattcttaaccgtgatgtacacggaagaactcgataccctttaccgcgaaaccgagaatcgtttcaccaggatcgaagaacaattccggttcagatttggttccgtttcttggaaaaatgactctcaggatacgattttctgcaagaagaagcatctgaaaaaacaaatatcactttaagcagaaattcagaggaaaaaacaaaaacagagtgattgttcatgaatgtacctggttgaaaccagagtaaaccggggcaaaatcggtgttacatttgaaattcatgtgtaccgaccaagcgattgatccgttagactcgaaggagaagaagtcgttgtctgagcaagcgtagactctgccgtcatcgccaatgagtatcttcgagaggattcgaacagatttcttagtcgcagtttggtctgaagattttgaaattaaactattttacttctttgcgggaaataaaaactgtcgcatgtggcaggagaaagaatttaccttgtaattgagagattctttaccttgtaattgagagactccggagaagaagacgaagaagaagaagaagaagaagaagaagaagaagaagggtaaggggatataaacgaatctaaaagccaccattgtcgcagatttttgcagagaggtgtgccaacgagattagggtttcttcatcataacgagatcaattcgacgcagtagttagatacgattagatccagactaatcataataaggtcgaaagtagtacttagggtttatcaatctttgtaacttgagatcgacgaaaacattagaaagaggggaaaacttacaggggacgggaaatgaaccatcgtttcatttacttcttcaaatctactccgaaacagagagtactgcttgtaacggtttactacaaattcgcacactgtgccgtttatccatttagaacaagaactgcaaaccgttcagtgttaaatcgcatccactcgaatttaccgcgtgtggtggtgattaccgattactaaattctgtgtaaataaattttattttatgagagtattttgagtatctcactaaaacatttaacatacaaatcaaaacttctaggcgagttaattgggccatggcttctaattgattttgtaatccaaagcacaaaaatattgtgttattggattcttgatttttaaatctttgtcgaaaacacgtgttaatgattcaatgatttctaatgatttattattaaattcaacttaaacaaatgagcctataaggtctcttagttttattcagacacttgaaacaacaacaacaaaactctagaatacaaagggaatgagagccttgatatgcttggggaagtcatcaaacttggaaagataccaagttcttgtagcataactccgaccacactgagatagagcattgttcccatagcgaaaaaaaatgaataaatggtctgagagatgagaaagaagctccaaaaggcgtggctct

SEQ ID NO: 39710 - DNA, 271 bp, Arabidopsis thaliana landsberg
caccacacacgtatagcttctgatacaggaaccataggccttaaatgtgaaatctctatatatgttttgtatctggagacaacttcgactagctttatccaatcatgatattgctcctgctaagaaatgggaaagacaaaatacaagagagttaagcttaccacctcaagaaaaaaaaaccctgaactctaatgggtctcagaaatttggaataccgatagaagaaattagaaccctcaagaaaaatttacgggtaaccctgatggaaaat

SEQ ID NO: 39711 - DNA, 715 bp, Arabidopsis thaliana landsberg
tgcgtaagattattttagttctaaacttcattttgtatatgttaggtcattggccaggaaagattcaatattggttctttgttaattctcgttggtttgtttttagtatgggctagatccaaaacaggtcatggactgggccgtaaactctatccaaaattcttcatgtttttccatctttcaaaaatctttatccaccattccattactagggtgttggttttattttatttgttgattaattatgtattagaaaatgtaaagcaatattcaattgtaacatgcatcatctaacaccaatatcttgtactaaccttttgtaattttcctataaacactttaaaaggctaatttaaataaaaattacaataaacgtgataactcactttcgtaacgcatatttattcaaatataccaaaatttaccattttaagtaagagaatctttttaaaattaattttcaatttcattaattaagaaacaaagaatttactgaaacctatattttattaaattttaataaaatatatgactaaaataacgtcacgtgaatctttctcagccgttcgataatcgaatactttattgactaagtatttatttagaaaattttaaacaacacttaatttctagaaacaaagagagcctcatatgtataaaaatcttcttcttatccttctttctttcttatagtctttatttttacttaattact

SEQ ID NO: 39712 - DNA, 490 bp, Arabidopsis thaliana landsberg
agctttcgtgccggtcggcatggtgaccagcgtcgatgagcaggacgaccgcaccgcggtggtcacggtcaagctctacttcgacaacaaggggcgcttgggggacaaccccagcgcgaccattcgcccgaccacgctgctcggcggtaactacttcctggacatccagccgggtggggatctgaacaagcagttcacccgggacgagattccgcagaccaacacgcacctgccggaggagctggacaagatcatcaacgccttccagccgaacgcgttggccggtcagcgtggtgcgatcaccaagctcgacgagtcgttgaagggtggcagcgcggcggcgttgcagcggttcctggcctcggcgcccgggtcgttgaagccggccggcaccgttctcgacgcggtgcgcggcgagaacccggcgacggacctgaccgacgtggtctccggtctggagtcgacttcgcagcagctgtccgagcccaac

SEQ ID NO: 39713 - DNA, 357 bp, Arabidopsis thaliana landsberg
gatccggaacatagaagtccctttttattattaccatactcgcttcacttcccatttggccatgcaaatttggcgggtggagactacaaccagaatgccattgcaaatccgtttgttgaaccgtaagctatcccaccatttcaacaaatgaacgtaccttcacctgatcctcaggttgaccgaatctaggaggcacattgcaacacaaccagcatgaagaagcatcgaaatcgggagagaaaagaaaacaaccatttgggaatgattcaatgcttttatgaagcattgttgtctataaaaaaaattccaagctttctacatgaagctttgctttccaccaaaaaacttatttacaac

SEQ ID NO: 39714 - DNA, 677 bp, Arabidopsis thaliana landsberg
  unsure (1)..(677): unsure at all n locations
tgaccacttccgtgatgcagatcacaacatcctgtcccaaaccatatatctcaaatatctgagcaccacaataactgaacaaagaaaaatgttaagtcagtagttgtaaaaatctaagatagaatatattagaggagataaatggaaccttgaaagcaatgagattcccatcttagaaagaattttaagaagccctgcattaaccgcctgcaagataagccatgtgtaagtcagaatcctctataattttttaacaactaaaagatgagtctttaagaatccttaaggtcaaagacttgtgaaaacatcttaagaacgtgtactgaaattcttaccttagtgtagttcttctgagcttgctcaatggttacagtaggaattttcccgttacgcatgaaggccacagttttgttacttaagcgccattgcctacatgtctccagtgccaagtatgggcatacagcactgtggggaaatttcaaaagtatacttgttaatgaaatggatatgatggtggaacatattctaaagtaagagttgtcgttactatcacttggcagggaaaattttcgaatattcagaacanaccaaagagactaaccttgcaccatatncaaaccaaacagcaaatgatgtgtgctgaagcattggcggtatcagcaacatagaagctgaca

SEQ ID NO: 39715 - DNA, 582 bp, Arabidopsis thaliana landsberg
cttgtttctggtttcaaaaatcaaagcgaaatatattataattatggtcactagggaggtggaagagggtgatgtgcacgtggggatgtgttagcaatagcattcatttactccaccgaaaaggccctgactctgatagagagagtggtcttaaaaaaataaaaataaaaagagttggtgagaaaaataaaaaaatatctcagttgccagatatctattttcattttggtgacagtctgttgtttgtttcactcgtggctcctctcccacctctttcttcttcttcttctacatctcttcccatctgtctctcatagatccatccatggcttccttcgtggaatctggttggcaggtactctctctctctctctctctctttcttcatcataatctcatctatctaatcctgcttccgattccctcgttttccggcgatttcctccgtctcgatgacttaagttcactgtattgtgatacatgcgttttttttttttttagtaatccaccggtctggatccatcggattcaatttggtttcgtgtcattgcagtactgctttagatctgaatttgactatgc

SEQ ID NO: 39716 - DNA, 522 bp, Arabidopsis thaliana landsberg
cctttccatatgcatctatcactgtagtataagtgattgcgttcgtttttacaccctttttcgtcatcatctcaatgacaccagcagcttccttgctaaaaccagctctaacataagcagcaacaagctcattatatgtcacagaatctgctgggcagctattttcctccatctctttcaaaacactcaacgcttctgtataaactcctgctttaccaaaaacttgcaacaaagcattgtacgtaacagtaccaggctcatagccgcatgacttaagttcagcgaaaaactgcttggactctcttaacaaaccttctcttgcacatgcaagagagcacagtactacaagtaaactcatcaaacttcaatcctttgcttctcatttcatctaaaacccctagaatttaccgccaagatcgacccattttcccgaaaacatcgagaatcacattggaagtcaccaaagtaggtgaaggacccaactctttcatcctctaaacaaatcgatagccttttcatact

SEQ ID NO: 39717 - DNA, 501 bp, Arabidopsis thaliana landsberg
acttccatttgattaggcgaaacgatactatgttctaatcctgctaaaagggggctattcgacggctacaccaacccataaaacgagaaagctaattattaaaaaaaaactacctagtgtcgatattcaaacattagtcttcagcatcgagtcatatggttttgtggggtcctctaccattcgatccttcttaaattgcacacttctctcttgtttttaagagaagaaagacatacgcttttaaaggaagatcctcacaaaaacagaaagttgtcaagtgatggtgtctcgcggttgttcaatcacagttttgtttcgctttcttatagttcttttggtgatacaagtacactttgagaatacaaaagcagctcgacatgcaccagttgtttcgtggtcaccacctgagccgcctaaggatgattttgtgtggtaccacaagatcaaccgcttcaaaaacatagaacaagatgcatttcgaccaaccccaccaggtcctag

SEQ ID NO: 39718 - DNA, 401 bp, Arabidopsis thaliana landsberg
  unsure (1)..(401): unsure at all n locations
cgacagcattgcaatctttcccaaccggagaagcaaccggtgttggtccactactctcagccttctctttaattgattcattggcttgcacaaccttttcttgcacctctttctcttctttctcatattttggttcttctatatcatgatcagaaacttgtaaatgatcactctcaaccttgagaatctcctcctgatgatcctcctgagcagacgacatagaagcagaatccaaggcaatctctttatcagatgctttctttatcctaacattttcagagccttcctttttgctctttgaagaagtgctgctactgttcaaaccgctcttctttggcgccacagnnnnnnnnnnnnnnnnnnnacctccttttggaacgtttttactcccatggaaagac

SEQ ID NO: 39719 - DNA, 655 bp, Arabidopsis thaliana landsberg
aaaaatctcccaacacaatcactcaaaccatggaactaaatccgacacaaccattagacccacacactttcaaaataaaatagacatacataaaagaaatgagaaattcataagctttttcttttggatgagttcttcataagcttttttagatttactagttattctgttaaaaaaacaaaactaactatttgacaaatttggaaaattcattcaaatatattagtttataaaatgatcgtcccttcgaatcgacgaaacttcccactcataacaccttcttttttaaccggacccattctcgtacacttttgctgttcttcacttttacaacattaattaactttattattatataaattcgtattcctgtcttagatcaaacgaaacgatatttaattctatacaaatcatatcataagatatgtgcttaacgtgtatgagtaacataaatatgcttagaaaacgagaacttcattaatatttagcaactagcataaatatatgtattactaattaataaactaaaaaaaatcatcaaatttcttctataagtcaataatatttcgtctattagtatattggaaacacacaaaattctgagtcgcagagcttgcacgcatgtgtagactgcagttacaagaaaatgacagct

SEQ ID NO: 39720 - DNA, 322 bp, Arabidopsis thaliana landsberg
tagccattttatactaacgccaatcagaatgcctatacgaggactgatcaggcccggcgtcgcctgaacagtaacgcttaccaaaagctatgatggcacatcagacatgctactgaccattcaggagttgaccgtatccccattgaagggaagcaggacattggaaatggaatggtctgctctctgtgaaggtagccttcctttgatgggtgagggaacacccatccatgggaaactctagggaacaggtggagatatgcgttgtagtcaatacacatagggcctaccttcatatggtatgggaaaccagcattgttctgct

SEQ ID NO: 39721 - DNA, 565 bp, Arabidopsis thaliana landsberg
gcccaccggcccgatcggcatggtgttcattccctgtctgggcttgtcgcagccactgccccgaagaatggatcgagggggcccagttgctggacggcacgcgcgtgctgtatgaaactgtgcgcgaactcgaccgccgcctggccggctgaacacgcgcggcgcccgcccgggcgccgccgaatgcgctatcgtccgtactccgccacgacaccgcccgccgcatgcagcagaccgacctgaccgacagcaccgccgaccgctatctgctcgacgcccccggcctgtcgctgctggccttccacagccgcacctgcgccacctgcaaggtggcccgcgaacagttgccgcagctggacctgccggtcgagcggctgtgctggatcgacgccggcgacaacggcgggctggtggcgcgctacgaagtcttccacctgccggccctgttcctggtgcgcgacggcgccttctacggcccggtcaacgcgtcgctggccgaatgggacctgcgccagcagatcggtctggcgctgacagctacccggtcgaacttgtctgaatgaaa

SEQ ID NO: 39722 - DNA, 956 bp, Arabidopsis thaliana landsberg
ctccgtttacgtaagtgagctgattatcgtgaggccgtggctgaatcttgccgccatagctgcacataaacttcaccttgtagctatgttgctgctggttctggttctgatcatcccatggaggcggcgggttatcgaattcgatctcacgagatctcggtgacgagtcggttgaatctggataagagttgtacgagaatttctccatctctccgcgaaaattaaatgactttttttgttggtttggcttaattcatgaagagaagaaattagaaagaaatgaagaagactgttgtgatgaaatggtttttattatgtatcggtgatggtggtgttggaaaatgttaagttgacaggacgtagtacgtgaacttattgctcatttacacgtggcctgtcagattttatgagttttaaggcggtgatgagattatgtgacggttctgtgacgttagctgaatctctccatggattaatatgacttttggggacactgtgaatgggcccaacactagtgttttgatacttcgacgttgaaagaggccagcttttagccttttacatgttttttcttaatattttgttaaatcaacattagtgaagcaatatttttaaggttaagtgataaataaatagttaagaaaaagggaaaaacaaaagtcgttgtcgtcgatctttcgcctgatcaggcttagatatgttttatgattgtgttattggatttcttttgtgtataacaaatatttgaatgtttgaatcatcatcattcatcaactgtattacacatccgaatagtcctttgggttagttctagaagatagatgttttctagtttgtcaacatgcagaagaaaactgtaaaagggtcaaaaaaaaattgttatgttatactaacatcaagaatataagataatttaaatttgacaccggtgagtgtatactcactttctcgattgt

SEQ ID NO: 39723 - DNA, 700 bp, Arabidopsis thaliana landsberg
taatcaaataataaaatagatattacaaaaatttgttaaattttaaataccaaatcctggaagccctgggatcgggatacttatattaaaacaaaattaatctacaaaaaggacaaatcaaatatagatttttttcgtcagttagaatggttattcggtggtgtagcgcaaattttccatatttttgaaaattaatacaagtaaagactattctaaatcggaacgtatatgagttaagggtttaacttagcaataaaaatatttgtggggttaaaatgaaagatccaaatatttagtttcggagaaaaaaagaggcttttggccggagaagacaactttcccatttccacaacttggaaatcgaaatccatttcgaattttggttagcagcgatttcaaattccaaacgtaagaattatggcgggagtgaatcaagcgtgtatcttctgtgagatcgtgcgaaatccaaccactactcgtctccttcacaccgttatcttcttcttcccttctcttgtttgtttggttcatcatcagaggctaaattgaacaagttttcttacgtctgcgattatctgtttttcaggatgagaaagtcatcgcctttcaaggcatcgaacctgcagcccagaggtttgtgtctctgttcgctcgctttgctctatcgagttttgtgaattgagtttgattccgtttactt

SEQ ID NO: 39724 - DNA, 537 bp, Arabidopsis thaliana landsberg
aataatgaataaaaaatttggaatcaaaatcaatctttgttagaaggagctttgcaagaaactagactgggaatactattcttccttttagacacaatcttatcatcggcaatgtttatatcattagaaccctgctttctcatcgcagtaaaaaaagggtcatcatcgtcaatttttttgtatcgtttgaacactttctcaacgcaataagaaaaggatcatctttttcttttcgtctctttcccgtctttttccatttcattatacacgatgatttaactaacgaggaagatctagccaactgttttgatgataacggatatggtggtggcaaaggtagcaatgatggtaccaccattttatcatcaacatttgttggcatagctaactctaattcatctctattagatattgatgatgacaaaagcaatttattttttgtgtgaggacatggttttgttatgcgattagtgatcaaatcgattagtgaaatgaagagtttgatagactagacttgcgaaatgcatgcaaactata

SEQ ID NO: 39725 - DNA, 766 bp, Arabidopsis thaliana landsberg
ttcacggctatgcaaaaatgaaacagtcataagttgtgaaaagcgaaaaagaaaaggttcattgtaggaagaaatatcaagaagatttgtgatagtcaagccagattagtggggggggggggctttaggccttttttcaggttgtatttttgtagaattttggaaatcaaaacaaaggaacttaaagcaaaaagtaaaaggaataatatcaaactgatacacacaaccctaaaaaaattcaagtacacaatttctgatggatacatgaccgtgaaaatcgaacttcccatactctctttttgcataaatatttgttcaattatcaagaaagattttgcataggatatggtgagaagaagaagaacaaatctcattgcttaaaagaaaaagaatcactaaagtatttttagaaagaaaaaaaaatagaactaaactcaaaaagtgttcaataaccttctagttcctttgaagagtcacatccttagttgagttccaacactctggtctatctgcccataatcctcaattctttctactttagaattttaaaaatgagcaataaagttgttgtttctctttaattagaaatagtatttagaagtagttaaatagccatccatttataggtctgtgatctattcatatttttacaaactacaataaagatcaatagttttgtgagtttatcatcattagactattttagtagtataaaactagtatacaataattatgataaattagctgtagatttttacatgggagt

SEQ ID NO: 39726 - DNA, 812 bp, Arabidopsis thaliana landsberg
atttcatttataagattctcacttctcaccaagaatatatccaaactactttatatatatatatatattgtcccactacacaacagaaaacgactaagatttcatattcattacaacaactaagagctttctagtagtctttctatacttgtctgaagaattcatatacggaatatactagtctttctaagatttcatattcattacaacaactaagagctaaacccaagcagagaactgccaaacagatataacatgcataaagtttttcaatgatacacaactactgtatagaatgtataggggttatatgaatttcttcaaaaaggaatgagaaacacaactgactctaaactctctctaccaagaaccaaggaacatgcaaatttcaatctcaaaaaagagacaaaatgggaataagagaaggacattgcttctttgaacattagaaatacataaggcttatgcaaatggtagtcacataatgtttcagatcagcaaatgtagaagagggacacataatacacaaacagtataaataagcaaaatggcaataatcaattctcctgcctctgtttccttctctcatcatgatactcataataatcaattctccttcgtttgtgactctctctattcaaagaaggattataattatagacgtatatcgaatcttcttctatctgggctagagcccgattgggctcataaaagcccatcatcattctattctaccaagcccagaagagacaaactgtgagctctcgccccgccgtttgagatttaaaaggtagcatactgagtgagtgagt

SEQ ID NO: 39727 - DNA, 697 bp, Arabidopsis thaliana landsberg
actccattctagcaaagggtattatatagctaaagattcgtctgactacattagcgatgaaaaaacactctagatgtgttgctcattcatagcaaatacattgccatttagcaacaaattaaatccaataaggaaattatgggtatggcaatggatgatgataaggaaatctttgccgattagcaacgatttagagtcctagccaactgtcactatagggtaaggtttggtgacaaagttgttgtgactacttctttacatgagttcttaaaacgtttggacacaactacgatggagaatcatttatatttaaagagatttatgggtagctatattgcatgaatatgtcatgcataacgttgtgttttttctggcgaaacatcatcaagcatggtaggaaataaaagaaatataaagaattgttgtcctattccagttgaagttgatcaggttgacaatagtgttgatgcgaaaacatctatctcacgaatttctttaaccaatcatttaatcaatctgctttggactctagccaaaaataataacggtgagcttttcaaattgcatttgcattgcatatgtttgttgtgtttttatattttttgacttatagctctgaatggtcgttgttgtgatatcccaactttagagtgggaactggtcgtgattatgatcccattagtagagttgatactgg

SEQ ID NO: 39728 - DNA, 745 bp, Arabidopsis thaliana landsberg
ggcgaatatgctgatggagtcagaagtgaatccgtttgatggccaagaggcaaagccgtatttcatttccgtatatattttttgttgaacactcgttttggttcgttgcttcatagttggctctctgcaggtacaaaaacgaccctgagattttggcaatgacaaatttgatcgcagcatatcaacgaaatgagatcatagagtttgagagaatactaaaggtaaaaagtgaagtattattgggttgttttttcaactcattatatatgaaaacgacactcatggaatggtttttggaatgtagagtaaccggaggacgataatggatgatccattcatcagaaactacatggaagatctgctgaagaaagtgagaacacaagtgttactgaagctgattaagccatacacaaagatagggattccgttcatatcaaaggaactgaacgtgccagagacggatgtgacggagttactagtgtcgctgatactcgacagcagaatcgatggtcacattgatgaaatgaaccgttacttactgagaggcgacagtggcaatggaaggaagttgcataaggcggttgataaatggaactcacagctcaagtctctttcttcaaatatcaccagccgagtctgttaacttggaaacctctcttttggatagattttgtgatttggcgttgattctttgtggattatctgtttctcttcacatagctggatttatggagtttataaccac

SEQ ID NO: 39729 - DNA, 529 bp, Arabidopsis thaliana landsberg
tatgatgtatatgacattgccgttgcccgttggcaccacaagtcaaggttgtgatttcataagttacattaaatagtttggctacagatttgaattctactaaactaaacattagtaattttgcaaatcaagaaagacgatatatagtcaaatgtcgtttagtggtccactttcccatgcatgtatggctaaatctttttaatagtaatgtggatccagggttaacatcaagccaaagttacatggctgtgtggccccggttttatggccgaaaatcataaatttaggtttaaccaccaagtcaaaacacacagagttatacgtccatcttcatacaattaaaatcttttaactgaacctaactttattcagactacttaactcatacatgacacctataaacattttgtgtttactaatatttttccttttccaaattttatccaaaaaaacaattaatttcttcttagtattttagaccacattcattctagatatactggtagtggtgacatgcatgggagagttg

SEQ ID NO: 39730 - DNA, 972 bp, Arabidopsis thaliana landsberg
gattttttaaaaagttgattaatgtacgtaccttaaaaatagatataggtacagctctgtttcgaccacatatctaaacttgaagatagcttattaggccatgcaccatttgtcacgactggttcggcctattaattctttaacacccacattaccggtaaaactaaataaaattaagaccgaacattttgatttttagtatatgaaacaattggctgtaaatgtaatagagtaagtcactaaccatctcactctaaattatctaccacgcgataggatcaaaatcttgacctattaagtctgtgagtaatattggacccactaataaatgatcaaattaatttcaaaaacaataatgaatgcttatcaagtcgaattcaaaacacaaatgccttcaatttattttttggtttcgttggtcttcattatacatggaactagttagttggtcattactcgaatttctcgctgtcgagttattactatatatgaattcaactacgatagtacatggtctatcttgtgaatactatagacatagtatagcatctataatatcgttgttttatgtatatcaaaattgctcgttttataatcttttcctacggattaaaatattatgggagcatgcatcgcaaacatttcttctaatttaacaaaatcacttaagatattttaatccactattttttttttggcagcctgtaaaagaaaaattataaatattgcaactatctacaaattaatgtagtatgatattcatttaaaagatgaaaagcaatataagacggataaaccctaaagcatttgaagatatttatatattttttgctcgtacatgtttatagaagaaacataattatgttagatagtggttgggagataagataatatggctgtgtgaatcattaaatcaaatctcacattctagtagccttgccgatatatcatagtcttaattaactagcatga

SEQ ID NO: 39731 - DNA, 507 bp, Arabidopsis thaliana landsberg
agcaaaaccttttttttccttcttaatttgagccttggtcattagttaaggttttgttgatgattgttgaacatgttgggatgtgggcaaaaatcttttagttataggctttggcgtggaaatgtaataagcgttgtcttcattgttgtctaagttatccacatcaacaaagttaatttcagcctgcaagaaaagataaaaataagtaatagtaaagggatgtgaattagtgataaattgagtttacaacctgagttgtggtcccgattgaagtccccactgaatttccagagacagtgattatttcttgttcaatagcattctaaaagcaacaaacaaaagcaaataataagaattgaatatatgaatggatcatatttaaatttcacttgttttgcatacttaccaaagtagaagcactttcaaagaaactttgaataacattgagaacatcagtaagacttatcattttgtatgtagaagattggattatgctatgcctcatgt

SEQ ID NO: 39732 - DNA, 161 bp, Arabidopsis thaliana landsberg
ttacaaaccgccggaaaaaatggacaaaattaatatcccgccccaaaacaaaagggcctaattcacaaggaaggtaatccgttccttctatacgcgcaaccattcaaaaccgattgataaacaagaacctctagcgacacaataaaacccaaaaataaaaa

SEQ ID NO: 39733 - DNA, 589 bp, Arabidopsis thaliana landsberg
cccaaaaccaagttcgaaacgatctcgaattttgttaattttcaacttaacaaaacaaaattaatctgattttaacatattgtgatctccggcccaatccaataggcttaatgatcttacatctttttttttttggggcaaatccaatagcctttaatgatcaaactttttctgtagttacaccaaaaaaactgaatatctattctacttcctaaatgcattaatgttaggcaatcatagtcaatgttgtagttgaatagactaactaatctaagccctatgcacacacatgtaaaaatgagatgcaacaatatttatgtgaagcacgaaagaaaaatgagttcgttaatcaatctgatatctcaatccattccctaattcgagtcataacataaattgtttgctaggtaggataacaacaaaggtttccagaataacaatataattacactacaatttagctaggtaacaaataaatcagtgaattattaatataattagtggttcaagtagtatatacatcgttgcatgtccatgaaatacaagatgtggagattgttcgttccagcaccgaggatgatattatgca

SEQ ID NO: 39734 - DNA, 621 bp, Arabidopsis thaliana landsberg
tatgttcggtaaagatggcaacgtgagtagtacattagtttttgcacttccatctttatccatttgaaaaataaagttcactataatttagaagcacctaataggccttgacacgataaacgatacaaaataacacaaggaaaataatccaaatcgggaaaaactaacagtacagttgtcataaatctgttgagttgtcataaagcataaaaaagtttctcagtatgagaagagtgggcacttgttttgatgtttctaaacactagcaaggcgaaagatacttggctaaatgtttgtaaacccagaaaggaaggtggcttgggattaatttatccgaactgaacacttatattgaaacttatatggagacttgtttatgctaaggactcactttgggtctattggatccgcacaaacttgctctggaatatgtcaataagttcgcctcctcgtactagtaattcaggtttgtggacgtggaagaaaaacttagaataagaatataaggccaaataaatattaataaatgtcatcaaatagtagtatgaaaattgaaaactatccaatgtttaccgataagctattggtccagtggtaaatcttttaggtagagatgttagg

SEQ ID NO: 39735 - DNA, 1054 bp, Arabidopsis thaliana landsberg
tagttatatcatactatttcgaatatggagaaggccaaagaattttaagtttcaaggattttattattgatactaatcacaccatcattgattattctcaagtaatcattttcttaaaactgatatgcagttagattatcaaaattctagtaataatttccaataaaatataaaaactatatcattttttacaggcatttcaagaagcatggaaaggattatgcgaagatgaaacacccaacggctcagctttagtgatacgaaagaacgaaacatatactttacaaccatcaacttttcgaggtccatgcgtatcttctaacattcatattcaggtacttttgaagatgttaagtgatgtatataaagatcttgcaaaaaatctctttgcttcaaaacatgtttatgttaacaaagttgtaagaagtattttattttattaaacaaaaaaaaaagtattttattttaatgaatagatagatactatatatatcgagccaaacacttggtgcacatataagaacatatacatacatacatacataatattaacatgcatgtatgattctttttctttttgataagattgatggaaaactcgaagggccaaggaagccgatatattggaaaaacaaagaaaacaggagttggttaggtttcaaggatgtagaaggtctcgtcatcaacggctcaggagttcttaatcctcatggggaagcttggtggaaatctgttagtctctctaaacgaccaacagtaagtcattcccaacacaatccttttagtatatcttttacatttctatatgaatccacacaaatgaatttattcgtgtatgaacaagtgctaacttttataaataacttttcaagtgacaatcagggccgggttatactaaagtaaacaagtgctaattttgcttattaataacttattacgttttgtatctacagacaattagttttgcgtcatgcatggacattgtatataatggactacatcacataaatagtccaagaaattacatttcaatttatggttgcaccaatgcaac

SEQ ID NO: 39736 - DNA, 713 bp, Arabidopsis thaliana landsberg
ggctagaatactgcgggttatatttgatagttgtatttgatgagattagtttttttgtcaactaaaaaaaaatccaatttattgttttcaagatatttttgacaaataacaaaacatacaattatatataaacttgcttggttatacagaaaaaaaacaacaacagttttaaaatataaaatgtccaagtagattagggcaaacatgtcccctcgaggcctctttgcttggttacatgtgtagtgtttaattatggctaaccctacattaatcaataaattacgcattggggtatgatgtctaatttattatatgtatatatttgtgtaaagtattagatcttgcttgatcctagtagtaagattcacgaatttaaagtctcttttgaaaaattcaaaatttcgatgattgttctgctcaaatccacaaattaaatacttgatgaccactacctgagttttttaatctcacgcgactcaatcttgttgtctacataatggttcacaaaatctctaataataattgaaaagtctaatatcagcgcttaattgacttaaaatatgatgattatgactgagattacacaaaataactaaatcgttgtggtcttgttttcttggtttagttaaaggctgataatttggtctaactagattgagattctaaatcaccataaaaattcaaatgacgatccaattcttttgatttttttc

SEQ ID NO: 39737 - DNA, 566 bp, Arabidopsis thaliana landsberg
agttttagattgcaatcaagaacatagctttcaccttttttttagacctacacagtcttctaggttgttaggtaaaggaggtggaacttctgttacaatcctatgcaaaaaggtctacggtagctatagaaaaacataggtcttgctaaagccttggactatcttagtaccttattctctcctcttctcagtttgtccgttttttatgttgttatttgtcaatggagagcacatgaatgattgtgctctttcacacacaacattcaataaatgtttctataaacagatgcaaacatgtagatgtagtaaaatattgatctttctcgccttctcatcagcccctgttcttcactagttgcaaccactgtacaacttttttttttgccagtttttattacggactcatattctgttgttagttggtttggctctatattcctataagttaatttctctgtggcctatcccaggtgtctttcaacaatacttttgtttatcaagtccagaaaatacgtctccaggtacaaaagctcaatagcttaagtgatatacacatagtttactac

SEQ ID NO: 39738 - DNA, 847 bp, Arabidopsis thaliana landsberg
gtttcccaacatgtccaaaaagtttatgcgggcttaaataacgaataaagtgacaggaaatttaggtaaaaattaaatttacatttttttgtttcagtttgctgaggaaaaagggttgcaaatggtagagcaacaagattcccttcaaacatagcctgcaacaagataacgggaaaaaaccattatgagtttaatataccagataaaaaccaactgtgaataacgacaaaagggcaaattcaataatttttctgggaaagcaccgagttatacgcctactaattctatttgcatgaaaaacattgcgagtagtgtattaaaaatcaaatgtggcgtacactgtaagcattatagtttgctttgggtcctatatataaaagttttcaggagtaaaaaatggtaaattataagagttccgcatcaaggccaccaatcaaataccatacttttgcgaggagactgccgagaaaatgaaagaactggagatgctgttcatgtatcattcctgatccaggattaggataaagcatgtgatcagcggtctcctgaaagaaagcatgtacaatattcagagaaagatagacgtactaaatgcaaagatgatggagtaaggtaaattatcaaatccacaaaaacttgggtgagcaaaactagacatatgaccttaaacaacccgtattgcacatcaaaggctgctcgggtaattttctccatgaagtctttgaaaatgccaccaccatcaataccagcttcctcaactccgagttcattcacaaatgtcacacgaatctacagccagtagttatttgcatcacaagcatcgcaaaagataaacaaatcagagaga

SEQ ID NO: 39739 - DNA, 832 bp, Arabidopsis thaliana landsberg
gagtcctgtaaaaagaatcttcagaaaacatagtagccaactcttccgctttaaagcagagaaagaaaaagtgcagggagaaaacttctactgcttatttaccttgctgaaatatactttccctttctcttcgagcaatggcttgacgaaatccctgtctcccattgaaacaccaccagaagttaaaataatatcaactccagaggatacggcctcgtccaaaaccttctcaagttcttttctatcatctctaacaattccaaggtcaacaactttgcattgctgctgcatcactgctgccactaacattgctcgatttgagtccctaatctgcagagagctcattattaagcctctaaagatattataagggttcaatacctatttgcaattattacacaggtataactttcatatgcatcaggaatcttagttctacataatacctgcccacgacctaaagtcccagctgtcggctcaccagttcatctccagtagagagaatagcaactattggcataggatatacctaccaggaaagttttttttcacccctttttttggacttatcttttagtacctctgttaaaataaaaatgatatccagcaatcccttccccatggtaactcctgcggttgctagcaagccgatttttaaggcaccaattctttctccagttgttagtacagttgcatctttctcaatatcacaaccctagcatataaattgtcaaccaataatgaacatatgacgattgtatctcctccaaccagctgaaaaagctgcttttcatcacctacttagatttgatggttaatacgagagaaacat

SEQ ID NO: 39740 - DNA, 1147 bp, Arabidopsis thaliana landsberg
cctgcatttacaagtttttttttccgtttttctgaattgatcttacaaaactactgaatcttaacatgggggtggggcaactctgaaaaactagttaccttgtatacttggccttcagaaactagatatctcagctggttttccaaccgctccctaaaatcttcctgtaactcgttcctttcctgcaatttatattaaccacaagaacatgatggttagttgatcaagaacaacggaggaatcaacaaaaccaagactttaaaaggaagacttttaggggatggaacatgaagtcaaattttcagatcctaatgttccattgtgtaatcccgctattgactcacatttcagaaccaatatacactactcatgagatatgaccatgaaacacagatacttatagagacagagagatcctcctaaccttgataaaagtgaaaatcgcatcgacatcaagaccattatgattctcgtagactgtttctaaagcctgaaagatcaattcatcagtcgtaaacctgaaacaaaaccaacaaaaaaagagtaatatcaaaacatagatagaccagagaaaacaaagattggtggttaaagaatcgagaaggtcacaaacccagagggaccccggtcttcttctgaatctatcatcatgagcctttcaagctgttcactgaaaatgagataacaaatcaatcaaaacataaccagaaaagcaaagatcaattctaaaagattggttctaaagaatacaataaaattcactaacgcataggaagaaggttctgaagaatccgtagccgctggagaagaaggaaggtctctgaaaaaaagagaaagaaattgacattattagttgaagcagagctttaagcatcgatcgatctctctcatttccacaaaattggctttgggaaatacaaaagttcacgaacccataagtaacgttgttcgcatccgattttgtatctccagaaaccatggccactgaagaaggatcgtcgctgaacaaaaagaaagaaactgacacgttagagatcaagcaattgaagcatcgatctttttgatatcttcaaaattgccttcgattgaataaaactacgccattttcgtcttgaaatcgcatgatatgagacgtatttggatcatt

SEQ ID NO: 39741 - DNA, 462 bp, Arabidopsis thaliana landsberg
cgggtgtctcataactctgaccagcgtcttaagattactggattaggatctgtaattggcagtgttcactatttatgataatatcctattcgaagataatgtttccattttgccttgaattctgttagaaatctcaaagctagtataacatgagagactaaagtagtgtatcaaagatatgaattcatctagctattagcaagtggatttgggttaaaacttcaataattttagacaaagattttagaatttacttcttgaaaattcaaatgaatccgagtccttcaaggtttaggacattggaattaagtgaattctatatacaatgaaaaaatatatagtcaaatgcaaaaattgatgaaaatttgtaggtttaggaaattgtattttcagatcaaagtttcaccaagggacatgtcaaacatctgttttcctatgctttagtattggtccatctcataa

SEQ ID NO: 39742 - DNA, 138 bp, Arabidopsis thaliana landsberg
ctagtggatcccccgggctgcagggggggggaaagccaccttgtggctcagaccctttcaatatacactgcacacgagaaaaacacatgatgaggaacactaaaactgtgtgcttacataaacagaaatacaaggggc

SEQ ID NO: 39743 - DNA, 367 bp, Arabidopsis thaliana landsberg
aaccttgcgtctatcttgtcgatgaggcggctaagaaacgaatgcagactgcttcaggttttaatataattgatgagtgtttacatgtggagagcgggctttctgaggaatgtcagtttctttttaaagatttcaggaggcaaacgcattgtgcgccgaccgttgtgacatataatattctagtatctgtttatggtcgacttttgatggtaaagaatatggaagcagcttttgaagagttacaaaaagtgaagcttcctcctaattctgtcacttacaactttctaattgcggggtacatgactgcctggaattgggataaaatggaagctacttttcaagaaattgaagaggggtccagttgagc

SEQ ID NO: 39744 - DNA, 919 bp, Arabidopsis thaliana landsberg
cagtatctcacctttcctccaacaaggtttccaaatatagaaggaaacggtaattttaccgtaagaggacaacgcgaaaccgatagattgcaaaacaacggtttccctttggtggttgcctgttcgtaagatgcatcaaccgcattcttcacttctgaaaccaatgcttctttatcttctgatctaagggctccaagtatacacattgactcaaccgcttgattgtcttctacatcttcagttacttccggcgttagtgcttgcaaactcgttaaaagagtattctctaattgcttccctgctaatgtaggagctggcattgcagaatctaaaatcgccactatgttttgtctaccacgacccgttaaaagctgtacaagtgtattaacatccatagaatttgacacttcacttgaatctgagctagtgggttgcattcggaaaggtattgtgcttgaatgtagagcagcggcgtacactgcactgcttcgataaggtttctcatcaccgagattaagaaattttgatgctttacctttaaaaatcaacaaaacagataaacaagacacatgaaatcgtcagttgcattgagagaaaatcaaaagagttatgtttcaatgagagttagaatgttgcgtacttcctgtcaaagatggtaaaccgattggagtgaagagtttacaaaaggatgagagtcaagaaaacgatatcgcatcgtgaagcttgtttgaaactgtctttttcgagctcatctgtgacattggagtccttacggaatatagcaatacaggtacattcgtgtactcatctgccatgttttcaaggaaatctgctgctacagcggaaaatcctcccgaatcatccactaggaacttaataccctgtaatcatcattaacgtatactatttgttagaaagt

SEQ ID NO: 39745 - DNA, 761 bp, Arabidopsis thaliana landsberg
  unsure (1)..(761): unsure at all n locations
tcagcccccctcctttattttgaagacacacttgcaaaacatggttacttttacatagtaaccaaagttttcaaggtaacttaaaacagttccataattatactgttaacaacatgcattactcatattgttttgctaatattttgtccttaaggaaatgagcaaggaatgtcataacaagatacataaatcttgggatgaaatagacaggattgctgccaaacctaacagtctctcaatcctcagcaaaaatttcaagctgtgcaagtaaaaagatttctcccaatttatagagagtataaaagaatctatcatattttaatattctttttatctttttatattgatttattagtcctttgaacgacattatcgaactcaaaagctatgtgagagttacatatacgcgaggacagctcaatacagcgacaatcagttctcggttgccaggttgtgtgaggctattaacacaagcccaccaaacactaagagtgatctactagaccagatcttcgcaggtacttttttttattccttttgttatatccaaataatgctgagggataaatagctcggcatgatgatgaggcttcataaaagtttcttcgtcgcaggtgtggttgcttctagaggaaatatttcttgttatggtatgtcgtcgccgtcgtatcagatgacaaatgacgatagggcatggggatggcaagtgaagttttctgttacanaatatattaaaatctagtagttaatatacacaacaa

SEQ ID NO: 39746 - DNA, 367 bp, Arabidopsis thaliana landsberg
cggttgcgcccacccagagcccctaagggcgcggttctttctcctgctgcaagccggctagctcgggcagtttgaacttctggatcttgccggaggcggtcttcggcagctcgatagaaacggatcgcgcgcgggatcttgtaggcggtcagcgattcgcggcagtgcgcgatcagcgcctaggccgtgacctcgacgccgggacgcaactcgacgaacgcgcacggtgcctcgccccactttggatcgggcatcgcgaccacggcgacggcggcgacggccgggtgccggtacagggcgtcctcgacttcgatgctggagatgttctcgccgccggagatgatgatgtccttgctgcggtcgcgaa

SEQ ID NO: 39747 - DNA, 119 bp, Arabidopsis thaliana landsberg
gcgcttatgtagcgcatggtaagcgccgccgtggcgcgccttgtcctgcgacagcgtctggtagattttccggatgaccggctcggtgtgccactcgggggttcgccagaaccagtggt

SEQ ID NO: 39748 - DNA, 766 bp, Arabidopsis thaliana landsberg
aaggtaacatcgaaatcggggactaataagacttcggaactcgacctaacctctattgctgttatgtaagtcattcatgtcttgtgatgatggtttatattctttgaatatctccatgactccattagtatactataaattatttgtttacacaaattacacttaatttatggagcgaagtagcaatcagctttctgaaagcatggatccatgtttcccgatatatatcctccttttcaactttaagcagtgaacctttctatagtgataacgacggtctgactcttaacactcgtgtttagggaatcatcatttcagtctctcaatcagtctccattaagttttatatatatatattttatttaaagattcttttctgctaatatcactacttcaggtgattttaacatgcaacatttattttaaagatatgtttaaaactagaggtattccaccattttcgcagactttaaacgtacttgtaaattgttaatgttgtaaacttttcaaaacaaagagtgtaaagttttcattacatatccttttagcttacaaattgacatgtggtgtaatgtgcttagtttagtatatcaagaatttagtcaaaacatgtatctagattgttgataaattagaaaaacgacatgagcaaaaaatgttggacaaacatcataaatatctattattaatttattacaaataaattattttgaatgtcgaaaatatcacatatagttaccattttagtgaagaaacaaaattcctt

SEQ ID NO: 39749 - DNA, 462 bp, Arabidopsis thaliana landsberg
tggaaaataaaatgctttatgatggagattgtcctctctgtatgcgtgaggtctaagttagacctctgtttcttgtttatgtttgttcataaagtgtttttgatactgaatttttgtctttttattggtgaatgaaggttaatatgcttatggaaaggaatgaaaaacatggaactataaagtttgtcgacataagttcaaatgattattccccggaagataatcaagggcttgattacaaaacagtaaatttactgtcttttaatctggttcaattttgtttcatcttctgtttgatgttcgagctttcggatttgatcgagatctttattaggtaatggggcagattcatgccattcagtctgatggtaacgttgtaaggttgggggaggtaagcttaatagcatcattgtattatactaaccatttcatatttatcattttgggtgaaacgtttttagg

SEQ ID NO: 39750 - DNA, 746 bp, Arabidopsis thaliana landsberg
  unsure (1)..(746): unsure at all n locations
ttttttattcttcttaacgcttccaacttctctctgttcgagtagtagtcataccttttggcatttgtccgttgttaggtcggaccaactggtagagtttaagaatcacgaaagaaaataaaaaactcttctttattgaaatagaaacaaattagaactatatcaccaaaatctgttagaaacgtttctcttggcaaagccgataagaaagcttaaaaagcttttctctcgattgaaaagagaaccgataacctccaacgctctctctctaccctggatgagaatcacagacgaaatctcatccttacttatgccagtacctaataaaaagtattctagttaaaaaaaaaaactagtcaagaaatggaaattctaaatattttcctaaatcaagaaattgaagttaaggaacataaatctaaaaagtatcacatatgtttccctttttctgactacttgaccatgatacatgttcaaatggcactaattttcttctgtttgcaccatgtctttgcgttgtttaagaggttaagcattgttaccaaccaatcaaggtttcattgacggatggcatgataaaggtacaatttaatatacatcaactcagttggctttggctttaataccatctatgtagctcaaactttatctttgcaggttgcaaacacttactttgtcaacacaacagaagaattggagtttagctggacaattcatggngatggtcttgaacttggatctgggac

SEQ ID NO: 39751 - DNA, 1017 bp, Arabidopsis thaliana landsberg
  unsure (1)..(1017): unsure at all n locations
tataacaacacaaacattcataagccataacacaaacattaatgaagtgtttattttattttatcttaaaatatatttttttcaacccaaatgagtctcaaaaagtaccaaagatgcatataaatattcaaaaaggtgttatctacccaaatttctagaaaaaaaagaaagaattgaactgttttcattttcacctaccaaaattacataagaggctaaagttatattatctaaaaacaatcactcatctacctagagctgttatttttcttatgactaagcagtaaacgaccagacacattcttgtttaggccaaaacgtagtaaaacataaacaagaagacggtagccaaaagccatcgctagcaacacaagcatgttcctccatttggcatttgtgtctggagatatttggtaatttccttggattgcttggtaacccgatatactcctcacttctccgaccgcaaacacttccccgaggtactcgttctccaaaagaccctacaacattcaaagcatacaagaatgttcttgagttttccctgggagaaaacagagattgtttgttttgagagttgattatgtaacctcaatggagtaggtgtggaacgagatgtaagcaaacgggtaagtccagacaggtttgggcaaggcggtacggattctgaagtgtcctgctgcgagcatcatgatcacctgcaatgatgcatatgaagaatgaaaatcctaaggcatgaataatcttaaggcaggcactaatcactctcatttctaatctaagtgattagtaagcaatagttgcaagttctataagctaataataatataatcactcctaacttcagctctcattgacttgagttaagaagcattctagctctggttggtgaatttcattgaacgctgttgagcataaatttccgtaagtcgtaaatctagtactatntagcagtcagtgtacaaatcacgttcaatccatgcaaatttagataggagagaagacagtagagacatg

SEQ ID NO: 39752 - DNA, 629 bp, Arabidopsis thaliana landsberg
  unsure (1)..(629): unsure at all n locations
atacttatatatatatatatatatatatatatatattaatattaactacaattttgttttgtcaagattcgtatagcctcctaaagtaaaattaacctgactcaaactagaataccaggtaaatgacgagtgagtcaagtttgactcgatctgtatgaaacactcaaaagagtatttcacttattttcttggtgttttgtgatagttggtcgacatgttaattctaagcatgcaagagaaaaaaggatcgtttgctaagttcaaacatattttataatctatgaagttcttttaatttgttcctttcatatctcttatgacgcgtgtaaaagagatacggtaagttcaatttaatagaacgaacacatgagtacattttaagatattttgagtataataagaatctgaatcatgccgtcttaattaagagtttcatgagtacaattaacgatgaaaatagttggatggtttcatttattgatggtcatatgaccacagaccacatgggttcttcatcagaatagtactggtgtactacccactgacgagaattcaagtaatgatggtcttactaatcaagttatctagacgatcancagggtccgttcatgtatatctataattggctc

SEQ ID NO: 39753 - DNA, 614 bp, Arabidopsis thaliana landsberg
tctaccgactatacaaaactgccacacaccaaaaatctaaaattattctaccgactacaaattatggagtatctcatttcaggtgaaaaacttcaacgttaattttgttatttatctactagtagtatttttttaggtatatataattcgtgtaattgtaacatatttattattttgcaaagtaacgaacaaaaaaaatactttgtttgtttgcaaaacttttttttttaatttcataaatgcaaactgttatttttaaaaactattcaattttaagtatttctttatctattctgaaatatccatagaaaaggtttctgaaataatgtgcacaccgtactaactctcatgtagatggcatgatcagttacagaaaaaggaaacaaataaataaatacaaccagtttaaatttactctgcactgatttatacatttccataaagatagcaggaaaatattttttgcctttttcagtaaaaaataaggcaacaaatgttccagttcacgttttgagaaaaatccaaaaaaaaacaaaaatcagattaaggtaataataatcgaaaacgtttagaaaagtaaaaaaatcaaaaaatgatgtgaaaaaaataagtct

SEQ ID NO: 39754 - DNA, 537 bp, Arabidopsis thaliana landsberg
cagacgaggacctagtgaacaaatttcttcaggttaaatttcctcactattctactgtgtttttgttctcagaatcctcgaaaatcgtaatatggtttttcgtatgctcctaaaatctgggcaattcattagatttcgttgcgtagataaacttaagcttgatgtattctttggtacaatgtaattctgtttagttctataacttggaatcactctaagtgtaatgtatattgatgcgaagtcaaatgttgctgaatttttgctctcctgcatttttccccaattttttctgagccagtattgtgaaaaattggagtctgagaaaactgaaaagtttaatggattctcatttaatcagtgttcatagattcactagttgtttgagcagggcttaggcttaatcattcttgtgacacttggttttctcttaaatctgttttgatgttcagttttctttggaagctacatacccataatcataaaatgaataaagatggaaacttccgctgatatagtcttggtttttctttctttctc

SEQ ID NO: 39755 - DNA, 464 bp, Arabidopsis thaliana landsberg
tttatcaatgtttatggctgtctcaattacatgtttatttccttttcacatactcatcttacagagaattgttgatggaaaaacagtagctttaatcattacagatcatgaatatagagctattaaagactatccaaatatgtcacttagttcttcattgttgtgagtctcatactcatgaaagaagtgtttctccacgcaatgttgctcccaaatcgcattgaaaatttgaaataagcaaccaattagtaccctcaaatgcacaattatcatatactaaaagcaattaaacatgaagtttaatggcaatcggaaagaataattaataagacctttttaattttcagaaaattcacaattgaaatcgagaccaagaataacaagaaatcagattatcatcatacaacaacatctaattcctgtctattgctcctaaatcaaaaacaaattctattaccaaaaca

SEQ ID NO: 39756 - DNA, 657 bp, Arabidopsis thaliana landsberg
atttacggaaaaacatgtcgaattttccagtggaatcttcaacgcatgcaaatcgaaacccaatctccactatataataaagaaatcgattcacacaaaaaaacctcaacaagtagaacaatcaccccaattttgcatcattttaaccgagagagagagatcattcatacactttggattcaacacgaaatcacaccaaatcgatacgaaatcaagtaaggtaaaatcacagattaacaaaaaaagagaatcaatcgatgtaccctgtatggatccatgatgcttgaagacaattttgatccgaattcttcttcttttgcgatttttaggtgagactgtgtgtatctcgcaaatcggcgtgtgtctgcactgttgtcgattttttttttatagcgagagccaaaatatcttattttagctcaacaccaaaacacgtatgtgttttgtctttgttaatccttatccaaatgataatcctcgtattaatagtcaaactaattacgtgtggatgatatcgtctttgatttcgccagatactataccataattagacaattgttgatccatttcaggattctccttaaaataatacatgttcaattacgggatcttctcttttttttttctgaattaataatatgtataaacgaccaccat

SEQ ID NO: 39757 - DNA, 1883 bp, Arabidopsis thaliana landsberg
  unsure (1)..(1883): unsure at all n locations
gtcctttttttaatagtttgcgaattttgctattttcacagaaatgtgatttaacatacgttttatttgttgtgtattagcttagcggttgtagttatatatctaaatatatatatttttaagtgttaaaaatgataaattcgtaagattttaataaagatgataaattcaaaagatttgatgaaaatagtaaaatcaataatagtcccatactgtattatattgctgttgaaaaaagaaaaatgatatttacaataacaccaatattcaataaacacacataataagaatgaaataacgagcattaaatttagaagagaagtaccgtgaagtcgcaagaagttgcaagatgctctatcttaatggtgttaaggtgggacatgcttcacgtgattttctcttcgaaattttctcacgtaccatcttatgaagatattgagttttatatatatatatatatatatatatatatatatatatatgctatggaaaaaaaggttatgtatatgcattttctgtttttcatatagtacctacatttattctatacatgataatatttatattgatgaatccttcaatttcactacggtctacgtacatcatcatatgtcacatgcaactccatacttggccggttggccctagagcttgatagtgagatatctacgcagctacctaatttattaaacttctgggatatatgcagaaaatttatgtcaaaatttctttacacaaaattgatgttattttatgttgatttactaaaagtaactaacttcatactttgcataggttaagtctatttgaacttcgcattagaaaaggtaaaaaatatttatcttctattttccatgtatttaacatgacaaaaaaaaacgttgaagtgatcataattttgtatatatatatatatatatatatatatgttaacccttaaattaccaatcgttgtatgaggaaatagaccatagggccggtccatggtccacaacataccaaaaaaaaactaccaccgggttaggttcagcaacgattacaccgtcttctagtcctatatatgtgtactaatatcattagattacatttattttaagtgattggtaacgctagtaattattgtgttggtgattaaataatccctattaatgattgatagaattcgtttacgtgtgcacgtacgcaaattagcttatttagaacagcataatacatgtgtcaattgctagttcaattgtcggtttgtcgacttcttgtttcgaacgttttttcaaagaacaggaataatatttgatcaccaagcttagatttggtatagcacaacggcgaactaaaaaacaactggtctatattttatatggttcacttagaaatattattagtcgtttgctttattgaaaacactcatggatttaatatcaaattagaccagctgctttgtacgcgatgacagaccaatatataaattaattggtcatgtcattatgcaaataaatattcgaatcgatttccaaaatagacaaatactattaagtagagaaccaaattcataacgattctaatcaaatattctaacatttaatcttcgtttgatcaatgtctcatctccttagactgcagaaaatttagcaatccaaataatattttacatcacaaccaaaaaaaatttagcagcctgaggatcgagtcgagctctcttcaactagtcagtaacacaaattcaagagcaaccatattaaaacttcaatgcaacttattggatatttacaagttctattttgatttttggactatctttttcgctatattataagaattatcaatgtgttagctaagagattcactaaacggattttagttnntatataaagcagacaaccctg

SEQ ID NO: 39758 - DNA, 873 bp, Arabidopsis thaliana landsberg
tgcggcattgttggttgtatattaggtatatttctcaagtttcctacgttggtttgtttataatatgatgattttgctcttatgattgtacataaaaaccagtctgttgctgaatgattgtagtaaggcctcttggcatcaagataatgaaagtagggattcatatagtaagagacattgtcataatctcatacaagaggattatatatcagatcaaagtaaaatattgcaatcacagtttcattctccaaccaccgaggatggaaaatgaaaggttttagttttcttacatagaatcagaaacacacagcttacaagatataacaacaaattacataaaagagagtttttagtcttgaagaaacagaggaaagaagagtaaaaaagagagataaagaggtgatgaatacctctcacctgaaattcctaaccatggttggtcaactggtttggttgattgttatgagaagaacctaaagggaaccaaaatatctcccaagaggcaaaaatacatgcaaatgcaagaaccccacaatccattagtggggttggttcaagatatgatgagcaatctaaattttgaatcttaaaaatgatcttaatctaagttagctcaagtgtggctattactccaaagcttagccaccgagaatatacatgtgttagcaattcctttatcctcaaaggaagtttatgttctagcgttctactacaagacaatgtgtaacaacatggtcctagatctaataatcctaagactgcacattaaaatggatatagcgtgaagtagtgtgcacacctttgcacacactacttcaacacttccaggtggtggcaattcacttcttgtgcctttcccgggaaatccttatt

SEQ ID NO: 39759 - DNA, 500 bp, Arabidopsis thaliana landsberg
cagcaaaatttgtttgaacatttaactcaggatcaattgaaccccttcttcgaaccccttcttctttaagaattagtgggtctgccactccaatcaactcattcgaggaagacaacattctcttggaaagcaagactattatctccaacggtattaaacgaaaaaacgctctacatttatatagattttatatcgtatataactctttaactgttattgtttgtaggttttatatgtcttcttaataaatcggtcctttgatggccggatcattattttagaaaattttaacgatttatcgataattttgcaaattaccgtaatatttttttttgtgttttatactcattcacatattactaaaagataacttctaagtaagttcattcttcaatttctccaattcaaccatgattaactgtggatatatagtaactgtgggtatattttgatagatatcgttttgtttttcttggtcaacctgatatagttaaatcaaa

SEQ ID NO: 39760 - DNA, 631 bp, Arabidopsis thaliana landsberg
acacataattcttttaaaatattgaaaaatcttttcaggagtttggtatgttatcacccacaataatgttattaaaaatgtgttacgtatttgaaacagtctgatacatatatagttattatttttggccgcaatttgtgtctttttcttttcatgttttagtgtaacacagaaacgtaaacgcaaattaaacaatcataattattctctaatatggcataaacaatttaaccacaatgcaagaagtggttaccaatcaaattagatgcatattcatggtttcaaattaatctactctaaattattttgatatagtttatgaggtttttcaactcaaaactaaaactaactattagtgaatgaatcgcatcttgcattacatattagtttaggtctatttgtaattttgacttgggttcttgatacgtttaatctcaattcgctaacttggagaccaaactaccgatttgataagcctctaaaacattgtttccaaagtgcaataattcgagtcatatatataattatatactcataagtagagggatagagattatagtgaagaggtcaaaatggtagaggagttcttttgatcacttccattaaacaccgttaagaaaagccagcttta

SEQ ID NO: 39761 - DNA, 709 bp, Arabidopsis thaliana landsberg
gatgaacattgtccgtggactatctagtttgaactcatgggtgaaatgtttgattctgtttctgtttttacaagttaattaagaaggcagagagtgtgtcgtcttacaattttatcgatatggcttctacctttatagaaacaaaactgaaagcactatcccaaaacatggctaatgaagtttatttctagagcctactaccctttagccctctactcttatcacactgctacaatatcatcaacttattatgcccttagcagtctccaagcactgcataacaagctcatagcttctgaagtttctcaagaagatacaaatggagaaactgcagaaacattttggcagtctgacgatgaaattgtaaatgctgtttggactcttgtccgagtgtctgcctctgatgaagccgatagtatgagacttttggtgtctgattttctttccagggtaactgtcattcgcttgtggtcagtatctcttgcaatttgaatatatggtcttattttctgttcttttactgtagattggtattagggacccccacactgttgttttccatcttcctgggaacttagtctccatgcatggtcttcaaggttttggccataatactggatcaaaagtcagatctttgactgagaacggcatatccgatgaaacccttatcacactgctaaattgtctgaagaagtatcttttggatgac

SEQ ID NO: 39762 - DNA, 514 bp, Arabidopsis thaliana landsberg
ggttgttaattgttatataattattgagatgtaattaaaattaattatactacaatgattgagaagaaaagtcacgtttcgggtcaaaggcacaaaatactaataaactaaatgttacgaattatgaacagactagcaaattaagataatgcgaacgcgcctgcctacaccggatgtgtacttctgcgtgccgcgtacgtatatgtattaccgaattggaaagttctaggaaaaatacacatgcatgtgtaaaatcctaaattgtatatttaaaagtcaaaacttgttttctaatttataatttttaaaaatacgtgaatgtgtgaactcataaactatattttcttacataaatttctaagaaaagattatatataggatgaatttataaactacactattaacctatttcaaatatcggtttatgtatttatctatcatacggtttacttaataatcattagaccacgcctccctgattatttggtttggtttggtttggtttcggttagta

SEQ ID NO: 39763 - DNA, 725 bp, Arabidopsis thaliana landsberg
aaagacttttagatttccattttgcaagatgagcgaaaggatataacacttctaagatatattcctgttcctgaaaacgacggcaaataatggaggaggaaaatgacataattggcacttgctatgtttttgtctgatcctacagtagcagttgaggccccagctacttgtccatagttgctaaaatagaaaaatgggtgcattcacatagggattttacaagaacgagtaaattaacttgatttgataaaaccaataaaatgcattttctaaagtatccaacgatctatctatcagtttcaaagaaaagaaacagagcatgaaacaaccatgaggactagagaagagaagaagagattaccaatgactgaaatctccaacagaaacagagcaccaagagaaggagagaatttgaaaaagtggtgttttacaatgaaaccatcacgaaattcacttggttatcttccttcctcttcaagacggttactttaatatacacaagagtgaagtctactgtcagatttgcatcactgaagtgaaattgcctgtctttatctttgcgtcattgagattacctgtcttttatctgtaatccataataaagctactttacttctctctctgtctttgctatgggagatccgaatgcgggaagttatggtgcgtctggattgatatgcccatggatcgtgtgcggactgcgctcgctggcctgacctatggaa

SEQ ID NO: 39764 - DNA, 667 bp, Arabidopsis thaliana landsberg
  unsure (1)..(667): unsure at all n locations
gcaggtcgactctagaggatcccccaaaaagacaagacacagaaacaaacaaacaccaccaaaaaaacacaaacaaaaaatttctcagttccagaaccaccagtcaaacaaaaataacaagacatcctatgaagaaagcaagacttcaaagtcctctttgttcacgagtaaacaataaaattgcagcttaccaaagtcacaccgtgtaattgactatgatctttccaaactacgtaaaatcaaaaacaacaagcagttaagaaatataataaccctgagtagatgatgaagcaaatacctgctgcagcaacagcagtagcagctaacatatcaggaggcgccatatcaaatccacttctcctcttgctgaaagagcaaaatataattggttagacatcagtagagacgagttcgaaaaaataatgccaagtaaacgtatgaaacacacataaacatcaatgacccagatcagactaaaatattggtaatcatataaggagggaccgttcaacccagtagaagaccatgataatcatattgtgtcaacaaaacaaagacatcaaatactaaacaataatggttntatttgatttgacatcaatatcataacacatntgaatgtggccacggaaaggactagttagaaaagataaaaatagcaggagaa

SEQ ID NO: 39765 - DNA, 592 bp, Arabidopsis thaliana landsberg
ctgacgatagcaaaaatgacaagcaatccctaatttcgcctcaaaaaatcccaaaaagcttcgttcttttttagtcatcatcatcttcttcttttcttcttcttcggttgctaaatcggagatggcgactgctctggtttctcctcttacttcacaactcaaccatgaagctgtctgttccaagtttgtgttacccaaatcgccgttcatatcgggatctaagctcttttcatcgaacatgccttgctctactgttcctagacgcacaagaagatcacactgctttgcttctgctaaagatatgagctttgaccatatccctaaacaatttcgtggagacaatctcaaagacggaggttttcattttctctcatctttttttttcaccttctgatagatttgttctttgattctatttggtgttgaattgagtcacaaagctatgtatttgacctttgtttagcttaaaccaagtacctgataggccttagcgacccatttatctgcaatcatactaagtgtagcaaagcttgtttctttgggggtttaattccgtttgccagacctctatgttggttatcatctgagtcta

SEQ ID NO: 39766 - DNA, 863 bp, Arabidopsis thaliana landsberg
acaccattttccgcacgtgtacgatctgggaccgtcgttgtgctcattgtcatttgttgatccctttctagatgttcattaaagttactggatttatatccagtccttctacttttagttttttgatactttaatccctgttgttttaatgatacttcattcagtatccatccaaaatcaaattaaatccatagattaagatgtacatttttgaaaataataaatggtttattataatatgttactaaatttatggtatttttcgctcttgtattgacttttacatggatacattaattttaatcttctttgatttctgttaattttctttgaattcattttatatatttattagtgaactattctaaaaattaacaaaatcatttaaaccgacaaaaaaaactttaaaagatcagcgtattataaaccaacgggggatagtttgcattaagtattggacatctgggggtaaatagagcgaaacaaaagttgaggcttgtttttcaacattttcattttattgtgtgctatttaaactgcgtcgtatttggaggcatattcgccggtcaagcgtatcaaatacccaatcacgcgaacttttctccgcctcttctccactccaaaattcttctccgtctttctcccgtcaccgtcgaataaagcctgagatctccgaattctgatcagcaactatgcattcaagtcatctccttctcgaggaaccgatcaggatgacttcaatcctcgaaccttctaaatcagtgagctatttatttctccttctctcgctctgtgtgttttctgtaggttgttttgatttccttagctcgttgttgattatcgattacgtttggatctgttgc

SEQ ID NO: 39767 - DNA, 620 bp, Arabidopsis thaliana landsberg
gaaagcttcacaactgaattcagtaactgtcaaagtacattactaaaccctttgctatttcgaggacagtaacaagaaaattatctcttggtcgctcttgaagtttaaaatcttcaatgttaatagatcatatgcacaaataaacttttgtctttttttctttctttcattgttcggagaccaaaggtctaaccttagaagcagatgttgtggccttgctctgaggtttgtgagatgtcttattagtgtcctgaagagagataacagtttcaaaagcaccaataagagctttcactttgtgcttcctcacctttgttagcttattcactgtctcctcaatcacattgttaaacaatgttatcattttcttcttcccttctacttttcgatgcctcagaacaactttctcacgtttacttccttcacaagaatctgttttcgtctcaacacccaatcttctatctttaagattcttcttcttcccttcggattgcgttttcagttcctgcaccaccctctttttgaacttgatccatctcggagaagaatcctcgggtttaggatcaagaaccttttctttcttgaaagtcatctgctgagctagactcaccttttactct

SEQ ID NO: 39768 - DNA, 873 bp, Arabidopsis thaliana landsberg
gctatgctggaactaaaaactgcagatgaaaaacaagatggggaaataaaaagcaataggacagttcagattggcaaagaaactgaagctcagaagaagaaagatgatgttgtgaagacgattaatatcataggagacaaaaagtatgaagtcaaggagaagcataacgttttgaaagtgatgatgcagaaagtgaaattgattgagatgaatttatcgcttcttgaggattctgtaaagaaaatgaatgacaaacaaccagaggttagcttggagatgaagaaaaccctagtacttgtggagaaaagcaaagctgacatcagagagatcacagaatggaaagggaaaatggtaaattcaataatttcttatgattaagtctttgtccgttgaagaaactaccaatgaatttgatattctttgagcaggaaaaggaacttagagacctagagctatggaaaactcttgtagcttcccgtgtagaatcattggctagaggaaactctgcattgaggtcagtactcttttttattcctaaatagagaaaacagaggatttgaaatctcaagcggagagctatcccatgacttgaaacgtattcttagttgaccccatatttcttcttgtttcttgatatcagattggatgtagagaagattgtgaaagaacaagctaatctagagagtaaagagctgggagttctattgataagcctctttttcgtggtcttagcaacgattcggttagtctcaacacgactctgggcatttctggggatgtctattacggataaagctcgatcactatggccggatagtggctgggtcatgatactgctaagcagcagcatcatgattttcatttatttactct

SEQ ID NO: 39769 - DNA, 496 bp, Arabidopsis thaliana landsberg
agaggtggaagagtaacggttcattattttcttttcggtccatgattgtcatgtagcgaggagggcatccgcggccgccaaacatctctctgagacgtaggtcttctccgaccttcctaactgagctttcatgtttctaccataagatgcctattccggcgttggatgtagttagtatctatggacctcaaaaaatgggactcatctaggtttatcaatggcgccattatttttcgcttcaattttggaaatgtcctccaatgagtaactggaatgcttgttggtacatgtagcaagaacaacacagatttaaaagctcaacattgacagggtagatagataggggctacctatttgcacgtcacaccgataccggttgacatgatctgcctataccttgaagcctggccaaatcctttattatggttgcgcaatttctgcacaaataacactgaaaattacattttatcggtatcgaagtgatacttgcttgctc

SEQ ID NO: 39770 - DNA, 624 bp, Arabidopsis thaliana landsberg
aaactatgtccggccaatctccgaccgtccacgtctctcttatgtctttcaactcgaagatttccctctcatgggtctcggttccactgatcgatcttttctcatccaacaaatccaccaagcttgtgcccgattcggattttttcaggtacctaattataattatatatacgtttagatcacgcatgagctttttgcttctattaaaaagatatgtgtgttttcttttgttgtagttggttaaaaagtggtacataattagcatgaaccttctataatcaaatagattatatataaaattctacaaaaaaaacaacaactttatgatggttgactagttctatgctgactattatcattcggaacttatatacaaagtggttaattttttttattttcgtggttaatcattcgaggtcataaatcacggagttaacaaacaaataatagatgagatggtgagtgttgcgcgtgagttctttagcatgtctatggaagaaaaaatgaagctatattcagacgatccaacgaagacaacaagattatcgacgagcttcaatgtgaagaaagaagaagtcaacaattggagagactatctaagactccattgttatcctatccaca

SEQ ID NO: 39771 - DNA, 1027 bp, Arabidopsis thaliana landsberg
aaccgaaacaaacgaagcttacatgaaattaaaattcgtttaatctttcctgatgaacattgatctgcttggctactaggttgtttctttctataatccttatttgaatattactagtattatgaggatatggatttctatatttattagtacattgttttgattttaaccagaaacatcaaaataaccaaaccatatgaaatcagacaagatgaatttcagtactaattctatcaaaactatttataacccaaacgtaataagcaaatatcgaaccctagtgcttgttgttatcataacaaatttagatgaattggaaaagatacaaaaggtcgaatcatattcgtagaaaatgaccaagcatccttggtgtttatgggccacatcccacatgttaaaaaaagatttgtgtttcgagtggcttaaactctcaaccaaacatttgaatatattgcttaaagttatttgacttaataaactatatatgtcaatgaatcattttattatatgtattgaggttctccacccacacaatctaggctttcagattttaactactccgagaaaaaacgaacaaacgttttctatttcgttaattacatcatcgtcgagtcgccaatgataacatgtcactacaaaagaatttaaaatctctctttttatcaagtgaaaatgaaaccttactttaattgaatataggtgtcgttttttacgtggatgtgattagagctactttatcaagacacgcattagctcgtcatgtaaaacttctaaactaaatgtgtttttgtcgttttgactacacgttaaagtctgccgaaaaatactaaactatatatagtaaaagcaaatgacacgtcgtcggtgaaattgatgtcaaacaaaaatgtagtcacgtcgaaataaatatttatctattcgtattcgttttggttcttaatagagtatcatattggatgtcatactaattttatctattcatattgtgtgtatttggatattcgaattgtgcccattgctggagata

SEQ ID NO: 39772 - DNA, 573 bp, Arabidopsis thaliana landsberg
cgtgaaatctttcagaacgtcggcacggctgttgcggcgctcgttgaacagcgttcccactgaggcatcgagctggcgcacgaagatctggacttctccggccgtggccaacgttcctacactgccggctaccaacagttttccatccggatcgagtagacggaatttgccttcgcttcccgcctccagcgaaagatcttcgccaacgagatctgcgggaagcttcaggcgcgaaacctcaatgacctgcgcaccccaggcaaatcgaccgagaccgaacagcgatgtgagaccatcgcggtgctgcgcaatgaagcgaccgaagatcgggaaataatccggctcggcttcgatctccaggttcaggtcttcgatgaccttggtcaggatcatgcggctttgcagaatctcaatctctgccgccgtctccattggcgtgccgaacagtgaagcgagatcgcccatggatgccgtaagcgctccgctttgctgatcctgttccacctgtacgagaccatccgcttcatagatcggtcgcgccgcaatgtagtagatcgcgcccagcagcagcgt

SEQ ID NO: 39773 - DNA, 437 bp, Arabidopsis thaliana landsberg
  unsure (1)..(437): unsure at all n locations
gtctataataaggaaaggttcatattaataatatgttcataacaattatcacgtcttgagttgatgatttaattgataatttcgtttgcccaccttcaaatccttttagctgtatgcagcggaaatccaaccttaatttccaagttggtggcctcctcatgatgacacaccaccttgataatttcttaggaacattcaatatttatttatatataaaaaaaaggaaatgcaattaaaaaatattttataagaaattggatgtacgatcatgtagtactatatatgttcttgtttcgtcttaattaattataaaccaattaacgtctctttggcaaaaaannnnnnnnnnnnnnnnnnnnnnnnnnnnnnnnttattctcgaaatctaataaagttaaatatttcgttaactaacatatagattgtgatgtaaaaaag

SEQ ID NO: 39774 - DNA, 778 bp, Arabidopsis thaliana landsberg
  unsure (1)..(778): unsure at all n locations
ttctgtgatcagatgtgggacctgcatcttctgtcattggttacacttgtacggttgatacggtggcttgagatcttctagctgctctgtagggcaagcaaatatttgagtgacatgtgttatgattaatcatgtcggcaaatacaattacgaacgaattatcatcattatcttcacttctttggctaaattgctaatggatattggaggaatttattaggttttaatccgacatataagagtatatacaaaagaaaaatattaatttttcaaattttattttagaaaaagtttcatgaaatattttgcgttaactgctactatagtaaattcgtgattgttacttaatggtctaatttatcctttaaaaaaccaaaacaaatcatttttgtgtgattagttgttgtagctaagacattgtcattttattttcagtataagttactaaattcgtttatatatataattaaattgcaaagtatgctacagtatgacatataatgagtgcagaaaaataaaagatgatgccataatactatagtgaatgagaaaagcctgcggatattcatgcctaataaaagtctttaactccttatggataagatatatatgggaatacaaaacatttaatttatatttattttttatcttacgttccactgacggattataaataaattttttaggaaaaactttatatttgtttgtgtgtgcaaactttatattacatatattagtcatcaaatgcttacananccatgcatcagacaataatgaa

SEQ ID NO: 39775 - DNA, 609 bp, Arabidopsis thaliana landsberg
tttacaattttatccaaatattcagatgcttgagaatgggtaaaaactatactatcagaaaaatagatatatgaatacaagatattttcaatattatctggtaagatgtcaatatacactttactaaagatattttcattttgtgtataatctacatttaattcatgaagtgaaccaaaacttaacgatattttctatattttctttttgtgtataatctatacttaatataaaaagatgaacaaaaccaaaagataaatttagtttaattcatgaagtgatccaaaacttaagattcttctctagaataatttgaacatcataacgaatccaagaaaaaaaaaagagaaaagaatattaaaaaatgctaaagaaaatgaaagatagttccaaaaatatttaaagaaacataaagggaacagaacaaggagaaaaaatgcatgtagagtgatggtcgagctgaatttggaatagccaagaaactctcggctatcatgtgaccgagctggacatgagaggaagtggtcagatgcaaaccgtccggttaaagaggagggcctctggcgacaacgcaatacacgttctcaagatcagtcgtcggttagcttt

SEQ ID NO: 39776 - DNA, 507 bp, Arabidopsis thaliana landsberg
acactagacacaaatatctatagtagaagagttgtttgaacaaattaagacagccagattatcatttgttttaaaaagaattgttatcgaaaaaacggaacaaattttgtagaaaggtcatgttctttcaacatgatacactagtattccaaatactcaaaagtctctgatatttcatatatagatacgattacgaatatggaccgtagctaagaaaacagttcaaataactaaacacaaatacagctattatataaaaatacatcccgacagaaagaatatagttaaaagaaaatcaagagattaaaacgttgacaaaggaagggaaattggggatggacggacgcacgccggcctcaccgccctgtcaacctttgcggccttctaagctatcgcaaatctcaaccactgactttaccttgtatttcaaacttatcggaccaaagacgtatgaatacgtgcatgtacaccatatgtacacaatatgaaatcatttaaaatacgtat

SEQ ID NO: 39777 - DNA, 539 bp, Arabidopsis thaliana landsberg
ggcttgacctatctggttcaatgatatgtaggaacaactcaatttgcaaagttttattaaaagactctttagttgtcgtcaaggtttaacttgtagtagttggtaagaaattctacgtgaaataggcaacattacaaaaacaaaaatcaattcgaaatcatacaaaacgaaaccaagtagtaaccaactacactattatgacattaatgattagacattcccaaatcatacaagttcctgtcatgaaggaaacgatggtccgtatttgcaaacgattacaaaaattcaaaccaaaaatgaaaaaacgagttaaattatttggtttataaaaatagtaatgtcaacagaagactagattgggaaacctgaagcgaacagagcttttaaaaacgagtttgaacggctgggatcatttggtacaatacccaccgtaagttttaccctagggatgcaaaagccaaaggcccaaatcagttactacttactgctacaaccatcgtctcagctttttgtctcagctttttactaatgaagcatac

SEQ ID NO: 39778 - DNA, 739 bp, Arabidopsis thaliana landsberg
ttctcacatcgacactcacggataaggatccagtccgtttcatatgataaatttggctcaccataagctcaagccaaattcttattttctcctgaattcataatacaacaaaccatgtcaaaacaaaatattatgttcaaaattatatccaaaggcatgcatgttgcttgtacttgtacctgagcgagacttgatatatggtagctaagatgagggtaactcattccaccaacccaataatctcttttaaacatgcttaatttaggggcttcaactgagtagccaaaacagtagatagatttgatgtcaaaaatcaccaaacgaggtgtattcacttccatcctattcatcagacaaggccaagtcacttgcaagaattctaatttcttgttttcgatcttcaacgcacttgcttggtttaagaatgtgatttgcaacacaagcacctcaagagaggagcaagctttgaaaacgttgctaaggacactaacatcggacatgatgtcataaagcttcaggatcttaagattgcagcagttcttgaaggctttctcgagtaacttatatcgagtaagtgagagtgaagtgaggctaggatgacagaatgcacttggggacaagtgaagactattatatctaacaaaaggtgtcatgcaacctatattgttgacaagagtaatctccttggtttgtttctcacgagtcactgtttggatccacctatcgatgaacaaaaaaa

SEQ ID NO: 39779 - DNA, 598 bp, Arabidopsis thaliana landsberg
ttaattagttatctaaaactaaagacctgtttttggatattttcttccaacattaacaaaaaaggcccgaaaaggagaagaacaaaagcttttaaaaaaactttgatcaccccgttctataccaattgatgtatctttaatggaagagaaccattataaatagaaacgaattaacaccaaatgcaccgtgacacgaaagatattgagtgtaagaaaccccaaattccttgttatattcgcttagaattatttttacagcaccatgtacatgtgatcacaagatatcaattaaagttagctaattaactttatttttcattttttgggctactagtttgctaattaactttttaccgagaaaaaactatcagtagaaagccaaaaaattcaatgaataagaaaaaaaaaaaaaaagcctaaacttacatacatatatgatatatctacgataaatttgctgataaacgatctgacttctaactaagattcctgttttacctattttaaaaaaaaatcgagaaccatgaatcaaagctcaactatgttaatcatgattgaaatcacgtacgttctcgaatgcttaaaataatatgttaat

SEQ ID NO: 39780 - DNA, 568 bp, Arabidopsis thaliana landsberg
acatgcctttgaaggaatctcattgatgaaacaagaagctacatttcgcatttcttgactctttccatatttctactaaaacagctatcaccgggactattatcaccacactactaaactgcaccaagctcttcttctgtttctgccatgatgatgatgatgatatatcttctttttcctgcatttcacactgtttcaatcatacttgttaatgtttttttttttttttttttcatttatgtcaacattagatgctttgcttatggagatgatggttgatgtaacttgaacgaaacatcttaccttcctatggcttgcttctccttctctgccatttgagtttctttttgtattgtttagggttatgagaggcttcctcaatctcgtctgcaggcggattctcctctgagcagtcccctgagcacttaaattagccggttcttcctctacgacctgcacattcatcaacggtcatttgaaaggtcattccaagttgatcacaacactagcaggatgactgaattctaccttggacatggcagattgtacttcatcttcttcttcatag

SEQ ID NO: 39781 - DNA, 958 bp, Arabidopsis thaliana landsberg
gcttctgataacgaggaagacgtgatgcaggatgtgaaggaagattctgcaaaaattgatacagaagctcttccgcttatccgaagagcagaattcagttgttggctccaagaaagtgtcagtcaccgtgtacaagaagatgtgagtgatctaaatggttctagctaccttgagcacttattctttcttctaactggacgagagcttgattcagctgtggaacttgccatatctaagggagatgttagacttgcttgtttgttgagccaggctggtggatcaactgtaaaccgcaatgatatcttgcagcagcttcacctttggagaaggaatgggctggattttaatttcatcgagaaggagagaattaagctttacgaattgcttgctggtaatatccatgatgcgttacaagattttacaattgactggaagagattcctagggttgttaatgtggtatcatctacctcccgacagttcattacctatcatcttcagaagctatcagctcctactaaatcaggcaaaagctccgtggcccgtcccaatatatattgatgaaggacctgcagatgggtttgtaagcgacaacaagcattctgacatcttgtattatcttatgcttctacacagcaaagaagaggaagaatttggtttcctgcagactatgttcagtgccttctcttcaactgatgatccacttgactatcatatgatctggcaccaccgaggaattctagaagcagttggagctttcacttcagatgatcttcacactctagatatgggatttgttgcacagcttctctctcagggcctttgtcattgggctatctacgttgttcttcacatacccttccgtgaagatcatccatatctacacgtcactgtcattcgggaaatcctgtttcaatactgtgaaacttggagttctatggaatcacaacggcaattta

SEQ ID NO: 39782 - DNA, 426 bp, Arabidopsis thaliana landsberg
aaccaaatcacgcggacaggaatctcgacacgtcacacgtgggcatattgatttaagtccgactaattgaaaccaaaaccaaagaacaattaataaatatcaaattgctaattttataatcaaaagaaaaattaatttgaaaatttgatgccaacgtttattaatgaccaataaaaatcataagattgattagtcattagaaaaaaactaaaactgtatacatattgggggataaagacggtccaaaatgtccagcacaaacgtattccatgcagtctttgacaactagcaacaagcttaattatataatcaaaatgttaaatgattatgctttatacataaaccaaattatgttatctctaattgacttgatagaggaggttatcttctatggtggagccattttgattaatttatcattaaata

SEQ ID NO: 39783 - DNA, 1461 bp, Arabidopsis thaliana landsberg
acggcggtggaacatcaagacgattcaccaagaagcggattcacttgtccaacttccattacaaaagggttgaaactgtttttgaagggttttggtgtaataaaagccaacacgaaactgtttttttagctgtaatcaaaccattggctgcaattttatattttaaacaatcatagaccaagtcacatataagtcataaaaatagtattgtcccctacacataatattcaaattacttttaaacatctcgatcatgaattttattacgaataacctaattaaaaaaataaattgtatacctagatcacatctttttcattaagtttttgaccatcgagcaacataaatagtcaataaattgatttacgatcatcatcttttgttttcgtataatactctctgttgtttctttgtatgtgtctttaataaaattaattttagacgacaaaaacaaaatcagctaaactaatgtttaatatttgtcagtaattaacttttctatcaacgaaataatttttcatagacacaggctctctcctctccttaattgtctccaatatggtctcattcttctactcccacaaatctctcccttccataacttgaaacacacgcaacccccaaatgagcaacctccacctctacacctccgcacggttccgcaatttcccgacaacattctccctccgtcaccaccacaacgaccccaacaaccaacgccgtcgatccatcttctccaagctccgtgacaaaactctcgaccctggcggtgacctaatcacgagatggaaccacattttcctcatcacatgcctcctcgctctcttcctcgatcctctctacttctatctccccattgtccaagccggaaccgcatgtatgtccatcgacgtccgtttcggcattttcgtcacattcttccgaaacctagccgatctctccttcctcatccacattctcctcaaattcaaaaccgcttttgtatccaaatcctctagagtctttggtcgtggagagcttgttatggaccgccgtgaaatcgctatccgttacctcaaatctgagttcgtcatcgacctagccgccacccttcctcttcctcaggttcaattcagcttatttttattttcctagggctcatataggtaacaatggcagaatagtgttactgatgaaacatttcaaaaccaaccggtgacaaattcaaggccaagaattattgatattatgttctgttctttaaattgaaatctctctgtttttctcagataatgatttggtttgtgatacccaaatgctggagaattcagatacgcagctcaccagaaccacacactttcattgatcgtccttatacaatatgtgcctcgcttcctcgtcatgcttcctctcaaccgtcgaatcattaaagccaccggagtcgcagccaaaacagcctgagtgattgcggtatgcgggcat

SEQ ID NO: 39784 - DNA, 734 bp, Arabidopsis thaliana landsberg
  unsure (1)..(734): unsure at all n locations
aaaagacgagtaatactcaacatcgagtaagtgaggaaaaaatacagtataatgatctctcgaaaaaaaactgtgaataggaaaaaaatgaattcccgacagggacttgtgcatttgatcgtgaacttttgacacattcacgtttttctttgtatactttagattttaaaattggagtgtcgttgttttatccaacacgaagccgtgcaattattaaattttgtaacctggtttatttacaaatatcttcatggcagttatacgttgggtctcttttgagttaactctatttatgattgtcatatttgggattaagttagtggtcatattcagtaacaaatgttgaactgtaacatctgttacgtggcttgcatgattggtgaaccaaaaaaaataagttcaagatacttttttttttggctaaatgtaaatttctagaagcatgcaagagaaagtgacaagaatccgatatgtgatttgtttacaataattcagtccatttttttttatttttttttataaatgaacaatatgatatatttgaacttaacatgcgtttccagcctaaaacgaattggcaatagatgtagtaattctaaaattttatataatacttgataatttctccaccttccgatattggacattctttattaagatccttcctcacgttcatgcatcactggctttgaaacgtgggtatatgtgaaattacatctacngngtgacccaac

SEQ ID NO: 39785 - DNA, 496 bp, Arabidopsis thaliana landsberg
  unsure (1)..(496): unsure at all n locations
tcggaagagaggtcgttttgtttttcagatttccactctgtaaattcttagtatgaaaagaatcaaattaagcttcatgtattcctccttggctggtaaatttttttgtagtatatttgacaaagcctactactatttaattttgcattctagacaatcttgaagctttacactatggactttgttctggtttccacactttgcattattgctattgacgttaaaaggtaggtaacacaatttattgtgtcgaaattctacaagaaaatatcatagcacctcatttggtaacaaactacacttgtattaattttgttattggaaagactgtctgtgtctaaagtttatcaaaaatatcctatatgtagtaatgtgagttgcaaaattcgccaatcttttagtaactagttgtagctccgctaaataanttttcgtattctatagatccgcccatgataacacccacatttcaacttgaataaagttgtactaagcg

SEQ ID NO: 39786 - DNA, 545 bp, Arabidopsis thaliana landsberg
aatgatattttggttgttaacgtggatcaagtcaaagatatgattgtggcgtattactctcaccttctcggctctgaaaatgactcaactattcctttatctattaaagttataaaggtcttacatcctttcgggtgtgatgagtctttggctactctgttgtctgctattcctactgatgaagagattatagggtcagtgttctcaatgcctaagaacaaggcgcccaatccatatggttttcgtgtggattttttttgggattcgtgggctgtggtgaacgatactgttatttttgctgtgagggaattctttcttacatctattgaagaagttcaatgcaactgccattactcttattcttaaggaatgtgggacagacaaattatctaagttcagaccggtttcttgttggaatacaatttacaaaatttactggaatcatttccaagcgcctcaagctgttcagaactcaagcagttcaagagaaatcaagtgggttttataaaaggaaggatgctttgtgtacatcagtcggtcgattc

SEQ ID NO: 39787 - DNA, 664 bp, Arabidopsis thaliana landsberg
  unsure (1)..(664): unsure at all n locations
tttattttcaaaaatattttgttaaatcggtaattgtaataaaaaaatcaaccttaagagaatatatgttaactaagtttttaaatacttataaaccattaatatgtataagtgagataatgttttgttttaccaattaaacaataaataagattggaaatacatgagtagtaaaaagcgcacataatgaaaactacatgaaaaatatttataattaaaatctttcgaatttataaaggggcattttctatatgaaaaatactttatttagttgtacattttcaaaacttcccttcattaaaagcgttaaattgtttttgggactctgagagcgttaaattgtcaaaagattatacagtccaaaagatcatacatgttttggtttgatttttaaaattgaagggaaaaaatggtcaaattcatattatcccagttgttgttatgcttatatgagaaacatattcgtagtcatctgtacatcttcctttaaaaataagaaaattgacgttactgttgttggaaatcataagttttaatattaaatataaattaagccttatggctattaatttttctcttttttgccttgcttttcagctgctaagcaactagtggaccaacacgcaatgcanagtgattcangtagtcgtctatacattctggc

SEQ ID NO: 39788 - DNA, 1157 bp, Arabidopsis thaliana landsberg
taatactttgcgaaacatttggagctataattgtttttccagaaacaaaaagcaaagaaaataggaaaataaaggctctttctcaatcacttgtatcatacctatcaagcccaaacctgacaaggcacgaagcggcatcgtctctattacaatatttacatcctttggcaattcgacagggtaaatcaattatgtcagccagtacctgcatgcaccaaatagaagatataaaatactttttttctttggaacattcaactatcagtaacctatttttttctaatcaataacaccacttttctcattcaacgttcttcatatgtattccaataaaaacaaatggatgatgcacaataatttatatgatcatttcacaagatgtcttaaatgtcatcggaataccatcaaagttgggatctcactttgaagagtaaagctcgatgtctgcagagtccaacagaaaggctacctatgggaaccaccactttaaagatttcttttagaccatcaatgcactccttccacatgggaaccaactcatcttcccccatgataactggacccctgaagaagtgagaattaacgagtaccaagaaatgtgagaaatcacaggaagatataaaaatataagttcaaagggatcgtaaggattgtatgagtactaaccccatacgattgcagataagctttgccagctgatcaacaacctcttttgtggtaatgcagctacaagatatgtcgtggactctattgtgaagttccttgaaggctggatcactacgcctatcaactatgatcgcttcaagcgaagaatcaacaccagaatcaacagctcttaatgattcaattgaagggatgcgaccactttcatgcaggtcgatgcataaggtccaaatatagggatccagaccattcatcatataaaacccatcaggaactttatcatagtacgataagcagccattaacctgatgcagcacacaaaacaatcatactctgcaatgtatctaaacaacatatctcatctgctactaaaagagttttggtaaggagatctaactgaaacttcggaaacaagaggaccatatctctataaccacgattcaataattttgggaaacaaagcttaacaggaacaaatacccagaaacgatgtg

SEQ ID NO: 39789 - DNA, 491 bp, Arabidopsis thaliana landsberg
  unsure (1)..(491): unsure at all n locations
cgccggatctcctgctattcccgctcataaatccgttctggttcgttctcacatcactaaaaccctaatttctctgaaattatttgattaatttgatttgaaatttgtagaattgacttgtgataatctctgtttttgatggtttagatatgaatctatttgatagattagaaatagagagaaagagaaagaaaaaatattagggctttgttgttacttaggaaccatttggctaattttgagagttagggctctgttcttgtgttctatgttttaggaagaagagcagtgttttttgtacacttgtgctgaaattgatgatatgtgtgaatattgctaccaggtgaagtcgttctccagttttcaaagcaatgcttgagaatgaaatggaagagagtctaagcggcacgatcaagatcgncgacgtatcttatgacgctcttcnngacttcgtatattatctctatacagctgaagcatgtcttgatgag

SEQ ID NO: 39790 - DNA, 909 bp, Arabidopsis thaliana landsberg
gatcttcaacatcagtttccagagccgttaaccgtaacgcgagaaactcttcctccacaatctgctgtttctttacttcaatagtagcagatttctcacagactcgaataaatttctccttgaaactggtacacgctgcagcacgccttggtctcttcgtcctaggtacatcttctacctcttgaatctctggaagtggtctcttctttcgcttcgcagctttagccccattttccaccattttcaaaatccctagtttcaaaatcaaaattaccaacaaaatcatcactataacgcaattggactataaaattttcacacaaatctatgtaatcgaagcgttcactacatcgcattgactaaaccgacgcaaataataacaaagcccaggaaaatttccgagtctagggtttaacaatcactgtagttagactgaaatcgacacagattatagagaaaaacttacgttgagaagcgaaatctactggaagattgcgaaaccctaattggtctgagagatagagaggttgaagaaagcagtgatgtgtgatttgagaggaagagtgggagagagagagagggggtaataataaaaggagacgagacgaggagcgaaaacgacgcgcggcaataaacggcgctaaaaacttttttaaaatgaaaacgaaataagaaaaaaagccgcgcctgaatatttagggctaccataaatggctttttatgattcaatgattttatcttttggggaatattccgtataaataatcctaattttaagatttttacagatttgtttctatctctaatgtttatattctaatatctttccatcagtcaacagtcaaagtatacgagtattattttgattaagatttttatttgactacaaagtatagatatttttttgat

SEQ ID NO: 39791 - DNA, 199 bp, Arabidopsis thaliana landsberg
agagacctcacagttcacccccttgtgcattgttctaagcactgaagtaacttgttccacttgctctttactagaacaagccgaaagaagaaccttggctgttccttcatctggtgcacaactctgaatcaatcatctcttcaaaaaccttcagacattttacatacagtttcttccttgtgtaagcaccaatcctcga

SEQ ID NO: 39792 - DNA, 601 bp, Arabidopsis thaliana landsberg
tgtttttttccgctacccaattaatttataatcggcttatttgcattgccagcaacttatctgaccattagtactctacaacattcatcctttgatgctctccatcccttacatcagatgctgttaactaaatgttgaactaatcgataatatatatatatatgttcttttagaaccctcgtggtacgcatgaaaatttggttttggatagtttgcttgtaaaatcatagattttttcagaagagaatgcaacatgcaacatgcaacatctccaaccaaaatattttcttccacctgatttttttttttttttttttttggttctttccactgaacaaacagttgacaattcggccaagcagcatcacattttgtttagactgttttatatcgttatataacgtaaacataataccaaacatgttttctagaagaagctcatgtgagtcgggtaacaatgaaaagtcattgggtcacgaatatataagcccagtgttcaatagcccatatattcgtgaaagcaacctcaaatgtttcatgtcgtgaaagcaacctgaaatgtttcataaccaaatctttgttcatgattctgaagaattag

SEQ ID NO: 39793 - DNA, 798 bp, Arabidopsis thaliana landsberg
  unsure (1)..(798): unsure at all n locations
cagaaaccagacagagttttctgaaaatccgtatttttttaagtaataactaaaaggcgaatcttttttttttctcttccaccatctgacttttcttgagggattatattaaaaagtctgaaaaatatatttcaacctccattctcatcggtctctatacaatggacccagttgaatgaagataaacttaatatttacagacgacaatggaacacaagaaacaaaacagaaaggtttggtttcttcaagatttctctaaccaaactaacccattaatataaaaaaagttgtctagttgataaaatgttattaaaaaaggaagttgcttttatgtgttttctttgacccattacacaatttacttagtgccacaagtcattacccatttcctgcataagtctgcttccatcttcatcactgctgtctcaacccaacacactcacatccaaaaaagcaaattttgccttttattttaatttttgttttcttttttcttttctttccttctcacaacaacaacaacaacaacaacaacaacagcaacaacatgatgtgtccttcttttctgcttctttgtccttctctgacttctcctcacattgatattagacttctacacgaaacccagaaccttcctctttctcatttctctctttcctctgttttcatcttttgctcttcatctctctctttctctccttgngtgattctgtaatttactcatctgatgaatccaactcacggagatttcactcccttgaactctaatcatttcgaggatccaaaggtcaggtttag

SEQ ID NO: 39794 - DNA, 523 bp, Arabidopsis thaliana landsberg
ggcctttctctcctctctcttctcctctgccatgaaaatcgcagttcctcaagacaaaacctcctcagaaatgtcccatctttgatgacttttgcttccttagttttcactttcttgtccgaacgctctcaaaaactttgagaccaccccaataaacgaattaaacagactattatcaatcaatacacaacacaacaatcaaaccaaaccccatggctgagaatcttgcttgtggtgaaaccagcgagtcatggatcattgacaacgacgatgatgatatcaactatggcggcggatttacgaacgagattgattacaatcaccaactttttgctaaagacgactactttggcggcaacggatcaattccgatgatgggttcttcttcatcgtccttgagtgaagacagaatcaaagagatgttggtgagagagattgagttttgccctggaactgattatgttaagagattgctttctggtgatttggatttgtctgttcgaaaccaagctcttgattggat

SEQ ID NO: 39795 - DNA, 530 bp, Arabidopsis thaliana landsberg
tcaagtacaaactgctgagcaactaattcaagtaagaacacattcgatctgtatatatatatatatactttctgcgacgtggcattgtataagcactaagattatgcttgctttgcatcctaccccgcctgcttcatcataaccgtattcttttgtttacgtgtgtgtaggagttcatcagcaatcacaaggaaccagtttcggtatcagggggatatgccagaatcgactctggatatgtacctgcatatcctcctcagctaagtaaccgtcaagagccgctcccgagcacctacatgggcacagagccggtgcagtacagaccaacagcatactctcagctggggggtccttctacctacacaccgaccctgactgggcaaacttatggttcggaatatagaccagcttctgatgttggtggctacagcagttataatctttgaattggttgctgtgtttaagtttatttgcagattaatttctctttagagaaaggctcatttataatataatagagaggggaaagg

SEQ ID NO: 39796 - DNA, 636 bp, Arabidopsis thaliana landsberg
  unsure (1)..(636): unsure at all n locations
aacaaagacctgacagtgtgttcttgaaaaccttttctttgctagacaacaatagttccatatagacctgctatatatattatctcatcttccatatataatatccttttttgtttctaacaaagcaaaactatattgtgttgttttggaaatgcaaggtgggattggcaacataagaaataaggcatatatattagttaccttaagtagatctctcttaccttactgatcttgatgttgtgactcttgttcacttattgaaatagaagcttgtggatctattaatgtcttgataaagactgccaaaaacctgagatcaaatgctcaatgttatcacatgaaacaagatacccacaaaagttctttgtcagatctttatgtataacaaataaaaataaacgggaggatatgttaacataaaggtgaaaaaaaaaactgtaagctgaaacaaacctnnnnnnnnnnnnnnnnnnnngaatccaaataatctatacatagggagagagagagagagggaaagaatagtcgctgattgccgatgcaggatcatgaagattctcattttcatagagaactctgcggagagtgaatcaccaccgtccatcaacagatgtgaatactgatgatgccacatca

SEQ ID NO: 39797 - DNA, 617 bp, Arabidopsis thaliana landsberg
  unsure (1)..(617): unsure at all n locations
cgtacacgtggtagcatacataagtacgttaaataattttatttagcaaataattttattataatcatctttgatcaccaagatcatgttgggccatccaagccacgactttagtaatgtgaaaacaatatcataaggaacgaaacactgttcatttcatacaattaaaatacaactttttcctacacattttctcaagagtttagtaagtgagagacgaatgatttgagaaaacagtttttacttttttcgatttgtttctcaaacgcagtattttcggatttctaatccagattaaaagttctgaataaaatcacggggtatggagcaaagccgatataagtaaaaacctttccatattgatagacactagatttttttttagttcataagatagatactagatttagtttgagtataatggattaatgtggaactagttgtattgtttagtatgtgtatgttgtatgatttagtgaccgtcttcagttttcttgatgtctttccacgttttacaaattcttgaaagaactgagaactcaaatgtatgatacataaccattgaaaaaatatttccaccatcataaatagagttttacgaatcgnttcacaacttt

SEQ ID NO: 39798 - DNA, 956 bp, Arabidopsis thaliana landsberg
aatcgttactaattgcaatgatgttatggggacagacttgtctatttttatctttatcataggattgatgaccaaagaatgaattttgttttaagtcaagtctttctttgttttaactttgaagttaactaaaagagtatcattgtctttaatcttaatccactcaccagtcaaatctcctttttggctggcactatgatatagtactataattgtaacattattatcatactacattgaaataatttaaaagtgtgtaactgtgaaaaaccactagtgaggagggggcagagacatgaggtgggtcaatgggttaagaatcccatgaaatttgtctggctaatttttgaccaccttcaatctttgcaaaattatagtaactttctttagtcttgtgttccgtacaaaatgtaattcttaatcccttttttcgtttgctttactttatctttctggtctttggttccatagtttgttagcaactacactaactactaactagttgggtgttatttcatgattttgtcatttatgaatttgatatgttatacatgttaaatacagtctactactatgttaattttatttattgatattatacagagacatctgcttgatgttgatgacttggtgcattaactatttatcatgcaagagcgtttctgaaattccttattaaatgaagcaaacattttttggtaaacgaagcaaacattttttggtaaacgaagcaaacatttatgatttatccgcttttatgtgtatttattaaaaactatactaaattactagcatctcggtttagatgttttactatgggccagttccatgtcaaagaaaatattatattatgggctttactaaatgggctcaagactaaaaatttgttgtcgatgtgacaacgcttttatcgttggaatctgattcttataaagtgtcgattatttgtatactga

SEQ ID NO: 39799 - DNA, 142 bp, Arabidopsis thaliana landsberg
gaaacctaatcgggatatcaagctttctagaactttcaagaagtcctaaccgaacaaggaatgatcaaacaggggctgttagaaaccatcatcaccataagaatcttaaaactcactacaagccatggtttctcttcctata

SEQ ID NO: 39800 - DNA, 330 bp, Arabidopsis thaliana landsberg
acccaaaacccctagtatgtttggtggttgaaaaattttggtgaggcctttaacattctaaattattgctatgcagttgcatgaccaaaggttgccttggtacatttatttgagcacctctatggccagctgttacttattcaaatattcaaagtatgtaaatgaaagaatatagatgttagtgtatgttcttgatgaaaagaagtagtaaaagcgtaatcttcgagatcataaattactgagttgttctacttattgctttcatacttttggcatgcgcaatcattcaacagtgataaataatagaattttacaagagtagtttgagcc

SEQ ID NO: 39801 - DNA, 458 bp, Arabidopsis thaliana landsberg
  unsure (1)..(458): unsure at all n locations
acaaagctgagacatttcaaggatggtccaatgttgaactcgaagtacaatgttctatacaaatccggcattaattaagtctacatagcatacaattctgaactagttacgtactaattaatttatatttccagttttcgcgttgtcaaaatcgttaagtgcttacataagtctaagttctcgtttgatggttgttcaactgaactgatcaattagaagttctggtagtagcgacttgaggctaacaccaattagaagttttgattgtacctaatatatgtaaattagatatgatggtaacatttattagataagatatagctttttcttttataataagtatagatctcttagtgcagatagacagttgatgtgggtgcttcctagcgtttcttgagaatgtggatagattcattcgctcatcacgtntcatagacattatttgcatatgatagctg

SEQ ID NO: 39802 - DNA, 500 bp, Arabidopsis thaliana landsberg
tttttttttggtcatcatttcaactgcaatttgggatccaaaaaacaaccaattgtaaatacttcacattggtgggtgagaataaaagtgtcaacttcattttccatctctttatctatctaatcaaagaattctatcaaatcaatgatgaagaaacttcaactttgcatgtcttgagaaaaaaagatattccagcatatcaatgtcgaatcatgtgatttgaaaggataaaagtatattgctcacaaaatttctaagtgttttcgcggaaaataataataatatatgcgattctattcttttctttgtcaattgttccaaaaatacattacgaaattttacggtagagcaccaaaaaaaaaaacgatattgctcaataaaacattcacatcaagaagttattgctcaataaaaaataaattgttttgtaataaaaaaaacttttcttttaatatatttttatttttgtaactgtgaggttcaaccataaaatttttttt

SEQ ID NO: 39803 - DNA, 635 bp, Arabidopsis thaliana landsberg
tcttttgtcattggtgtaatgaaataaattcaagagtcaattttggttttaagcctttatgctagtaagtaataatcaactttgcacagaatttataattatcatgtcataacgacattttcagtagcgcattatcttgcaagtcatgttaaagtgaactatatacccgaactaccaaaatgaacccacaaaaaaatccaagaaaaatggataaaacgccgaagttaacaccaaaatcgtgacctcaaaatttatgaagtcgacggccatgtgtcgctaaatgaaagcgtgagctcactgaaaagccggaaacttagaagtaagctgcatgtgcttatggaaagggcggagcttattcaaaaccgtttggcttctaataagcaaatgggaggtgaaatgaatttcaagctctcgaaatttagtccaaagactacgcattcatttgtgatgcgtccacttgttcatcaaatacaagaattttctcacatattaatttactttttttgattaaatgcttgtctacaaagatctaggagtatttgaccctttttgatatataagatcccgaaaactctttttatgaatcagagaatgcacaatatatatctggtttctgattttctgccccataattc

SEQ ID NO: 39804 - DNA, 493 bp, Arabidopsis thaliana landsberg
gctgcacgactgggatgcggatcgaagtcccggctgcgaacgacgaacggtgcgctgatcgcgctgctgcggacgggcaacatgcccgcgttcctccgcgccgtggaggaactctgaatggccaatatgcgaggccgcgatcaggatgggcaggcggcgcagccggccatccacttcggccgcatctgtaaccagaaacccgacgaactcgctggcctgctcatgggcgtgatcgccgatggcgagatcaacgccagtgaggcgcgattcgtgatcgaatggttcaaggccaactgggattacatcgggcagtggccgttcaatgtgctctacgagcgcttctcggcggccatcgcagacggaacgataaccagcgacgaggaacgcgagcttctgcgtgtcgttgccgagcacgtcggcggtggatatcgcggagccgggataaagcccagcagtcagctgctttgcgacgacccggtgccggagatcattt

SEQ ID NO: 39805 - DNA, 768 bp, Arabidopsis thaliana landsberg
catgtcagtgactgttaagcaacccaggaaaccgttctatatttatccaactccaaatgtaacacaccaatgaggcggggatgggacgaaattattctcaattattgaccacaaaaacctacaccaaaccaaacaatatccagaattattttatcataatctgattctagtctctttaacccctcccacagtaactgacttgtggtgtgttatgctcatctggaaacttagacgcaatcctatccagagggtctacaatagctatagaagatacccaggaaaactaggcttcatagttgcttgctgaactattaatttctgacctcgactttctgaacaacttctctaaaatcaaatctcttctcacttctactctcatcaacgtctatgaaaaaaagttaaagtagatagattaaaccagttaggatagagcaagcaagttttactttctatatatgtcttacctcggccatgatctaaatttgtgaacccattgtcactgagatccagttcttgcaacattttaagatctttcagtactgccaggcaaaataaacattcttaggagaaaaacccagaatacatttgattgccttctttaagccataagtcacttctgcaagaacagttttataacacttaccatgagtagatagcgtgtggttgaatttatttcctcgtaatttcaagacttgtaactgttggaggctttctaaacctgaagatccgggagaacgcaagttataattggagggttctcagaaatgg

SEQ ID NO: 39806 - DNA, 662 bp, Arabidopsis thaliana landsberg
aaaaagctataacaggaaagcgaaaagaagcatgacttactttccctgtgtaagtctaatttcattttcaaaacgtggaccgcctttgtgcgttgcttttatcggttctttccaatttcctgtgaaatccccaaccaacaatacctcctccccctgtaaaccaaggtgtaacttaaaacacagaggctagttgctcaaccctacagatcacgagttccataaagaattgcagcaaagtaataaaagcatgtgaagcaacagtcacctcatgtccattccacacaaaggttacagagtgtgttggagtcccatcatgtttgccatcgtccaccatagcgataagatcccatgttgcccaagcaattgcaggtctgtgaaaaaatacatataacttgtctgatgttttcattaaaacagaaaagctatccatggtctgcaggttaatggtcaagacagagataagatggataaaaacctgtcaggtttgcaagcgtgcaatccagtaacgaaactataagcagcatgaagagaggtatcagtcatccagtgcagataagcaatcacacaagcggatgaccggtcaaaaccagtggtacaagttacaaagacacgatggttctttttcagtaaccgtagtaagagcccaacacaaagtggtagct

SEQ ID NO: 39807 - DNA, 763 bp, Arabidopsis thaliana landsberg
ttcttccggaatctgatgggtgtttttaaaatatgcgaggacttggaaaatgttgatggccttcacatgatattcaacattgtcaagggaatcagttagtattcacaaacattataattattcatgtcttagatccacatatatcagaattatcttttgatgtccattatttcttttatctttttgtacgcagttttgcttaacagttctcagatcttggagaaaatatttggagatgaattgattatggagattatcggatgccttgaatgtaagtttgatgtcattgatcaaagttaatgatagaaatattgtaaaaataatgacaggcattaccttcagaatgtagcggttagatatatgttgcataggccttctagacactaattagattctgttgggacttatattgggaatttcttgcccataaaatgctgaggattttaattgtggtttcatatcttaagtcgttcatggacaccaaaaacttaggtttctttaattactggtggatagttccttgctggatcatatagccatgttcttaagggtttgcatttgcgactgcatatattatatccagtttgtttgtttctcttatcttggccgttgcctatatttagctatatatgacgctgcatgttgtttcacttcacagatgatcctggtgttcctcactctcagcatcaccggaattttctgaaggagcatgttgtttttaaggaggtaacacaatcttgcctatgctattgattttgacgtg

SEQ ID NO: 39808 - DNA, 603 bp, Arabidopsis thaliana landsberg
  unsure (1)..(603): unsure at all n locations
agtacttccctggtgaacatccccaccttgaacaacaaagaaaaccaaaactcaattttctaaatctatctcatgcaactttaccaaatggatctctcacccacaagtaaggattaaaaacaagagtcgatcttacttgggccatgacttgaactttagttcgtcaagacgagcttgagatgggttttgctcgacgatgattcttggattttgatctgccatttattcttttctcctttatttctgatcaacaatttttattttccaaagagacgagagaaatgagaaacctaagaggagataagtatgagagtgtgtaatcgttaatgctttcttttgacgtatttattcagtcaagatatggatcgatgcagtaagaaagagaaaatatctctattgactaggaaaaaaaaatgaagaacaaaaaaggaaaagcagatgactccaataatggctatgaaattttcagaattttggagaatacaaaccanaatttcaccatttaataagtattattattagggttagttccttctttataatgctaatcttgccatagtttgaaatgttattattagttgactgaaaatcttactaaaaagc

SEQ ID NO: 39809 - DNA, 588 bp, Arabidopsis thaliana landsberg
ctgtaagatttaccagtggaccaacagcttgttggtaaaaatatacattattataaatcgttaatattctctttttcttgataaagatttatacattcttcttttttttttttgtcaaacatacattcttctcttttaagtacaagcattttttataaagttttttttttttaataaagttaaaacctttgttatttttcttgtcccatatcttaatttaaagtatacttatcaacaataaattaatatattggtaaagttaattacataagctgaaacaagttaggtgattcacctacctatacgttataatgcatgtggcaaaatgagagtaacacatgtttggttgtttattttttctcttcttgtaataaaataagaaaatagctaatttctgatgtgtgagactcatttctagaagcttttaaaagagatttatatggattggttaaacggggatagaatatatagtttatgcttaaattagtggacaattaaatttaaacactttctaataaggatcataaaaacaattatcatctagatgtagataagatcaatattttctaactctttctaggatcatac

SEQ ID NO: 39810 - DNA, 846 bp, Arabidopsis thaliana landsberg
  unsure (1)..(846): unsure at all n locations
agtatgtttcatatgcacaatctgtcttgagtatatcagaaatcgatgcagaacagaatgtaatttgagccaagacagagaattttcacattcctaattggttacctccgatgctctcctctcaatggctgcttccagacattgtatgacacgttcttgctctgcttctgagtttatgggaagtccatccacatgacggatgtaaaattcctgcagcaaaacactcatattattgttagaagagagatcccaacagacggccgttgagtagttacctgataagcctccactggttctgtgctgaccatgccatggaacaccacatactgcatatcagtcaaagtacagactacgtcaaacacaagctttggtctatctttggacctcatggtaacaacggtataatccttctcaatgttcattagtgtgacactgggccttgacgccgatgtccttgctcttttgactccctcgtagtccctatcatcaaacatgatctgatgcaaccgtctctccctgtgtgtatcagaacaagagaagactgttttcgcagctcttgagccgctgtttgtcctcactacattgcacagcagctccttgatggtggaaaggcgaatagggtcagtaatggcagaatgagttgaattgtnnnnnnnnnnnnnnnnnnnnncagctctggtgttgtgagtccatatctcagcgttcacaacgttgcagtgaaggtctgtgagaacagcagatacttcagacaagagaccgggtctgtcagtttcagcgagctcaatggatgtgtattcgtcagtgggcatcacaccaactgagcttctcaaaggtggaatgaaccac

SEQ ID NO: 39811 - DNA, 1333 bp, Arabidopsis thaliana landsberg
ccagtatctcatattagctgagaaggagccaatcaaatacataaaaaaaaaagcacactaaagattgcaaaagctaaataagtttctgttataaaatcaacaaaagaaatcagaggaaaaacttaaagagctcttcatgattttgtagacgcgtctgaattcacggttcgcacgaactggcctttcactcgaggacgttgttctgctagcttcttcctgctctggtaccgaacctgtaatccatttttatacatctccattgaatcagtttgatcttgtatttgtttcagatgctgtttttatgatgaagcttgtgtgtctcttacctttttgtcaaagcatcgatctttcctcttcaaccggaacttcatcaatgcagcttctctctggcttctactccaacgttgtttcgcactttcttcttcctttggtttctctgtgctactgctttgtccagcaatccgcctcattggtgctttgagaaccagcttctacttccttgctagctgctttctcgcgatttgattctacaggtatgggtgaatcttgcttctgattcgttactgtggactgaagaacttggttacggaagcttacgcttgatgatccgatattctcctggttgctgctcgttgtggcgcttccttgatcagatgttacttttctcaacttttcatgtgatttggttggtgtctttggctcacctgaagtactctcctctaaagcaacgacggctttttctgctgacttgctttcctcaaatctgcaagttaagtagagttattgattaaaaacactaattacaagatttgaggcattctttattcaagcaaggaaacatgcataccttgagaaggccgacgcatcagagaggctaagcttttgatgcttgctttcatcttggttctcaaaacttacagagcaagatcttttcagagaaagtccaagctcagggccaacacactcatctcgactcttgtctttataaatactatcaggacgcttgtcaattccaccaatcaaatccattgtcacatcaaaagtttccttaaactcgtctctttcatccactgatttgccattctccatcagcttattgtgaccattgtaattgatagcctgcataagcatgtacacgatattagcttctactaaaatgagataaacatgagatatacaatgcaatctcaagatgaaaatctcacaactcatacaaaacacaattcagaaggaccagaacatatattatgtaaaactcagatggtaatatttattatacctgagcaccacttccttgatctgaatgatatctggaatcttcacaagtttcatc

SEQ ID NO: 39812 - DNA, 309 bp, Arabidopsis thaliana landsberg
ccgaactcgtggagctgggggcgcggcacggtatgccgcggatcgcggtcgagcagggacagctggtgttgtcgacgcgcaatccgcgcgactgcaggaccaacaagtggcgacgggtcgatgcacggccgtatggcggcggtcccggcatggtgatggaggccgagccggtcgcggcatcggtggccgatgcccgcaaggcgatcggtgcggcgcgggtcgtgtatctgtcgccagagggcagtcgtttcgaccagcgatgggcggagcgactgaccgcggagccggcattgattctgctctgcgggc

SEQ ID NO: 39813 - DNA, 444 bp, Arabidopsis thaliana landsberg
aaatccatatatgacttaattggggttcggcaccctatattttttccattgcttactcaggtggtgtttcatgtttgtagtttttttattctgatttggggaagttcgttgagaacgtggttgcttgatgggtagattacaccgtcgacaaagcagtgatgtataaaaacatatagtggaaagacataaaccccaatttcaaggttagagaaactgaaattagactgtcaatcaaacttgattattttctacctattttttaatccaaaatcgtgatatgatctcataattccacgataattagggattccaagcattgtttcagagagatatggggtgacaaaggaacatgtcgaagctttggtcgtaattcaaggatttcaatttctgtcttattagcgagatatttgatcttttacttggggcttttgttcattttttttt

SEQ ID NO: 39814 - DNA, 162 bp, Arabidopsis thaliana landsberg
ccccccacccccaccccgtcgtcatgcgtagcgggcggcgcgaaagctcagtttcaatcttatttctctgtttgaaagatatgtgtcatcatgcgtaactgagaggtgaaactgacctattgatcgatacaaatctagccaatgcgtgcgttataacataca

SEQ ID NO: 39815 - DNA, 609 bp, Arabidopsis thaliana landsberg
tgcgttctcttatttctcacgatttaaattttataatgtatagaacgtgtcctatatctttaggagtttattacgtaaatgacaattgaaaataatctacattggtaaagtgataatagaacttatttaatcagaatcatatatgttggtggcgggagagtgttttctgattaagctttagccctactattggtagatctctttaaaactacgaaatcttgctgaagattgtatgctataagtgtgtgtaccgtgtactattccgaacaaagtgagaatgtctaattgtggccaagccgccaagtagctgccttaaatgtttgaagacacattcatcatttaaaagggactttacaatgaaattgaatatgtatacctctattaaataaatggcatttacaaaggaaatcactcagtcgatgagatatgttttagtggcgctacgtgaaaacataggtaaatgaactttgtgcatcattgttggaacgaaggatatggctatacaaaaaaaatttggtttccgcgatggatatgatatacaattcaaagttttgaagttgaatattacacatttttcttaacatatatgttttctttttagtaacttct

SEQ ID NO: 39816 - DNA, 487 bp, Arabidopsis thaliana landsberg
tcagctcttttttgtgtgtgtgcaccagatacaaataaactttagatgtaccttttagcggtttatatttttagatgatcacatatgttagttaccatgcactacatttccttgttcacacgcactacaccagccaataaacttacctaatcattttccaatcatttaattacattgtaagagaaaaaagaagaagggtgtttgattgtttgaacaatgggtggacaaagacaaaaaaaaactaactagtgtatactaataatacctaaccccatctattcaaacaaaacgcaataaaattattataaattgtaaacaaagggtgtgatcatatgtaaccatcgccttatggacaaataattatctattaaaatagtaatcaatcgaggtccctctcttaaatgataaggatataaagcattattttaaaacaagtagagattaaattgacatatgctcgcacgttctcattcatacacaacccctc

SEQ ID NO: 39817 - DNA, 802 bp, Arabidopsis thaliana landsberg
  unsure (1)..(802): unsure at all n locations
atactatatactaatggctcgtttaatttttttcttttaataaattttttgacttaaataataaattagttttttaagggttaagagaaaatacgttatgctgtcaaaattaaaaataagatagaaaatatgttgtatatttagttatttactaaaagcaattgaatggagtaaaatttgccacggtcagagttattctttctaaagttcactattttaggtcctcaattaattgaggccaatttgtctttttgtaatctcattatattcatcttcttgctctttctcatcgcaccaaaaatgccttttgcccctctctctctatatccaacccatgtctcctctttatctctctaactttccccttagagagattcctctttctctcaaactagggtttcctctctgaaaacaacaaaaatatcccaataattgcaaaatctacttgaagatttttcattctcctttcttataattaatgcccaagagagaaacaaagaatatcaaaccttctcaagaagttatcaaagaaggaccttttcttgttgcgatccatttaaaggtaagaccaagagtttttcattctgtacagccaattcactcacacttgcataatatatatactctctatatatgttgattgattatataaatttagagagtttagatcatgaaaatttgatcactggtctagaactaccaagttataatttggacgaccttttttctttacanaagatagaagaagttacaattgaaagggaaatcaggaattcgggacttctatatacagtgaaagtat

SEQ ID NO: 39818 - DNA, 576 bp, Arabidopsis thaliana landsberg
tctgttgttccaggcctgtctcggacgttacgagtgacttaaccattgaagtcggctctgcgaccttttcccttcacaaggtaaccaaattcaataaactcagaagaaaaaagagaaactgctttacacaaactcgttctcttttgcagtttcctctcgtctctcggagtggaagaatccggaaacttgttctggaatcaaaagacacgaacctgaacctagccgctgttccaggcggctcagaatcgttcgagcttgctgcaaagttctgctacggcgttggcgtccaatataactcgtccaacattgcggcgctgcgatgcgtggctcattacctggagatgacagaagacttgtcagagaagaacctcgaggcgagaacagaggcctacctgaaagactccattttcaatgacatatcgaattcgatcactgttcttcactcctgcgagaggctactgcctgtagctgaagagatcaacctcgtcgggaggctggtcaacgcaatcgctgtaaacgcctgcaaagaacagctagcctctggtttgctcaagcttgatcagagtttcagctgcg

SEQ ID NO: 39819 - DNA, 515 bp, Arabidopsis thaliana landsberg
cttctacttacttgactgcatgcttcgctgggattcatccctccaagtgtttttgaatacataaataataacaagacgtacctgctggtactcaatgctgtctaatttcccaccctgaaaaatagggatatagatggaatcagcatgcaataacgaccagtagaacctctgtatcttttgtttgctatattcatgaatttcagttaatgttaacagttataagcaaggaaaagagaaaaagtcttagtggtggtcacataattctggtagtcagacatgtttttgctcgagatgacaatgaagaaacaataaaaaggaaatttttaacagcagtatacgcaccataccaccaaagatgctatgcattgcgccaaaatcatctccaatgttagcaagatcctcaagagccaaacccacctgctccataggtctgaaaattgttaataccactctcgaaagaagaactctttaaacctatttataatcaatgccatattgatacatttaacctggac

SEQ ID NO: 39820 - DNA, 382 bp, Arabidopsis thaliana landsberg
cagagttattaaatgctcagatcaaaatgtcttaacatgttaaatatatcgctaaattcaaaatttgaccattttgattcagcaattagaatgtgtcgaggtcatctggagcaatctggatatgactcatcttcgtgttttcatgggctttatatttacgtcgtatgtacctcatctcctagtttattttgtcgttgacacttaatgggttttcattgggctggctggatttgtgctaaatccaataccaacaatttttccctagttattggagggagctagtatattcggagaactaaccattactgcaccacaattatgtcacatcaaagatttgaatcttgtgctcccatggcacaccttctttgggatgtgtttacat

SEQ ID NO: 39821 - DNA, 611 bp, Arabidopsis thaliana landsberg
cacagagtccgttggtctgtaggtttagtgacggagtctatgatttctttttagccagatgatataaatcgaagccttttcaggagataattttaagcaatttctcgggtcttgatcctacgattgaactggtcagtcgaagaacagatgagagtaagtttctggagttgaactgtaaaatatgcacataggatccgtttggagatttgaattaatgatccgattctttgttgggcatcgattgaaaaccaacccactagccaagtgaggagctgatgttttgggattctctatgatttgaaagtaagtgtctcttaggatttgattttctttttgttgtgtttgtttcttctgttacatccattaaaatttacacccgattgtagctgaattttgtactctaaaccgtaagataaatacctaagcttaattaaggaatattctaggtaatattttaggatcaaaatttcttccactgggttctccgagtaggtcaactttgtggatcttttctttgtgagaatctgttgggaagacttcttcttttttatcttcatcaaaatctgttaaccagtggacccccaaaaaaaccgttttttggccctttgatg

SEQ ID NO: 39822 - DNA, 506 bp, Arabidopsis thaliana landsberg
  unsure (1)..(506): unsure at all n locations
ccaattttgtgttgggttgtgttacaaaaggcccaattctcgtttgggttgtgtttgttttttgtctgttaattatatccaatctaaccgatccgatttaaccggacttaaatcaaaatccgaaattgccgttatccgttttgaaatctcaggaagattgatgattgatttgcacaagagagtactctgcttctgtgtctttatatcttcttaggaaacagttgcactttacacctacatttctgactttgttaagtcaatgttttagattacacaagggaatattactgaaataaatcatataagctttttcttattattacgaaatatatacatctaaaatggtttgtnnnnnnnnnnnnnnnnnnnnnnnnnnnnnnnnnnnnnnnnnnnnnatgagtattactttgacagctactaccaaagactaacactttgaagaaagagaaaataaagagaaaaaatggctgaccagttaagaggagacccaatgaacagtggagaca

SEQ ID NO: 39823 - DNA, 711 bp, Arabidopsis thaliana landsberg
  unsure (1)..(711): unsure at all n locations
catagataaccataacattatgacatcgtagattactactttttttaggctacgttggtataaatgcatacatgtgcggtcttggaattttgtaagccgtgttcatatctatacctatgagattgaaaactcgagactctcgtgggattgttgtgtccacgtctgttgataaaagaattagtgtggataggtttccgagtagaaaattggaaatttgtttcttttgtaataagtactactttgagtttttttcttctgcttcttgtcagtgtggaacgtggataagtttcgagtggaaaattggaacttcgtatcgtttagtaagaagtggttgagctttcttttgccacctcacctattcgtagataaaaaaagaaaatccttcgaacgtaggcattcatatttattttttctttcaaacattcatattctttaatcacattaccagccaattaattctattatcctgataactataaaacaataaactgatctgatacatatattataaaattgtggaccatcataagtccatgatatttagtgacttagtctagtggtcgcggtcgacataaaaatcaatgccatgcaggctgcagccatcatcgacttanaaggtttgtgacatcctataagatatagttgaggttgaaaatgaaaagaaaattagagtttgaaattacagaaaatatgtttgggaataacattttt

SEQ ID NO: 39824 - DNA, 1309 bp, Arabidopsis thaliana landsberg
tttctaagctaatgacaacagaagatggggaaaagagcatgattacagaaagatctaaacgttgctgcttaaaactcattaatggatgacaccaaacagatctctaagagagcatgaatacagaaagatcgagattatagaacaatccgttgctcattaacgagcagcgagaccaataagacctctaagacagaatcattacagaaagatcgagactttagaacactcgattactcaagactgataattagatgaattgtcaagcaatggatccaagaatactaaccgtgcggccatcaatgatgtgtttgtccatgatgactctctcggcaacagaaggatctgcaaaaacgataaacccaaagccacgggcacgtccggtagtacggtctctcatgatcacagcttcaaccaaatctccatacttgccaaaatactcttgcagtcgttcttcatctgtgtcccatgaaatcccgccaatgaagagcttgcccagatccgatgcagattccatcttttgctcctgcaaaaccccaaagtcgatccaatgaatccgatctcacaaatacggatcagatttgcgaaaatgacgattgcccatttcatctaacaattcgattttttacttcgatcgtgttttaagattcaaaaaagctcaaagttctgagatttatgaagaattgttcaatgttttacctccagattcatcttattgaaaatcaaacgggaaagagacagggaaatctacttttgtctgaaacagaatccaaattctagtccccgatcaaataggaattgagtgtcttcaaatctgacaatggatcatcaaagcatccaatcaaaactattgaaaaaaaaaaaacagaaatgaaacagaacaatcaatgggaagagaaacggaaaatgagcagagacaatatatatagaagagaaaaaaaacgccagatttgatgaacaaaaacatcaaacttgtaaagatggagaattcaccattaaggagaggacccagatgataaaatgtggaaaaccttaagatctggaaaaagggacaaggacaagagaaacagaggatgttttgttcattctataagacatccatccactctctctgtctctctctttctctttctctataagggttcttcttctcttatcaaaatatggcctctctctcttttctctctctatatctctctctcaaagaagcttattaaaaaacttttcttttttattttgtgtaatgctttcttaattgatttacccaatccattaagaaggattcctttttttttttctttaggcccaagat

SEQ ID NO: 39825 - DNA, 237 bp, Arabidopsis thaliana landsberg
gctctaaaggacaaaaccccttatgaatggtttaaagacaagaagccagtccctgatcatgtccgaatctttggatgtattgcatacgccaagataggacaggccgcatcttgaagaaaacttgtcgacagatcaaagatgcttgttcatttgggaatagaaccgggatccaaagcctatcgtttactcgatccgccagcaaggaaaataacagtaagtcgggatgttgtgtttgat

SEQ ID NO: 39826 - DNA, 363 bp, Arabidopsis thaliana landsberg
ctttttctttatgcttcagcttcttttctatttcattaaccttttcctctctttgattcaggtttttcttctgctcagttatggattcttcctttccttgaagctttttctcccattcattaaggtactctctttgcttttggaaagtcccttcatatgattctcgcctgtggtgcaataacaataacatacacgtaagactaagaaaaagaattgaacttttcagacgtataactgatatctatacttactctttagtaaatgaaagccgttcttgttgcaggacactttcacgagtctccactatctttaaactcaatttcagctcggagctctttctagctgcctctgcgagcttgcttt

SEQ ID NO: 39827 - DNA, 971 bp, Arabidopsis thaliana landsberg
  unsure (1)..(971): unsure at all n locations
cacacccttaattaacagctcgaagcaatatcttaatcggatagtgaagacaaatttttatttttttatagagccaacttctgcccattagatttagatctaaccttgtaaacatcaagtacaaggttataagtattgaactaatgttcacttaataaaatctgaaggacaaaatctataaattttagaaatcacgcatagacaaatccaagataatttctttataaacttttttgatccctctccgtaattatatagggtggcacgagcacatataatattatgttgggtgaacacaaactgtcacatcatatatagtagttgtatattgaaactaaatttgtgtagacgagatcgatataaataactcaataagcagagcttagataaacaatagaatatgtgttgccattttatacagaaaatattcaatattcaataattaatgttatactagcgatagaagaagattatttagatacaaaaattcgtattaagaaatgggatagggcaagttggcgacaacaccgaccactataaccagtgactaggagacgcatgtttggttaattcttgatttcccaactcaaagaagaaagcatatattgtgagacttaccatattgatcttttcaaactctctccacacattttcctattggctcccatgtgggtaattaattaacttttgtactttggagatactcaacctttttagcgtttgtactttctagcttcccacattctatgtgtatttttttggtttctgattttgtttggtgactaatcttgttaaagataataaaattcggcagtgattaaatgtatgtaaccagcccataaaaaaaaaaacatacggctaatgaaagttacaatgacttgatcaaatatggccacatgctcttttctgttggcccagcccaaaatatcgtaaatccacaaccaaattgggctagcgtanatattttctta

SEQ ID NO: 39828 - DNA, 917 bp, Arabidopsis thaliana landsberg
  unsure (1)..(917): unsure at all n locations
cgaatggaatagtcttttcaatggctaatattagttttcacttctgatcacttagtaaaatcatgaaagacacatacattagaattgtgtccatattgaggaaaagagaaagagaatggtgtacatacataaatttaatacatgtttattatgagaaagcaacgtacgtaatacattactttgtctctaggtaacaaattgtggatttccattggttggtaacagaaaaaagaacgattgggggataaactacaatatgtgagttttttttgttcaaactagatgtgaactatatattggtgaatacctttgaaaatattacaaacattactatccatcccatagcgtcgtcaccttactcatgacttcaattatagtctgacaatataggactgaaaaacatgattgcaaatgttgtgaatacatttattttagcacaaagttttaaaagttattggtctattatacgttgaaccttaaatgaacgttgaaatatctacgccctttcaccacccgacccaccgacatttctttggtttttgtttttttagatatatatatatatatttaattcaaacatgtaaattgaattaaactggaagataaacaaagctgcaccaggaattcgagccgaacttacgaggtggccttagagctatgttactatgtctacgtacacccaaagtttgaagtacagaattaggttatagatctgtcttgtggaaagaaaaacttattgctaatttaggttgactcagattataactgtagttgagatgagacagtcaatggagacagatctataacaaattgatgttttggcaaataaaggtatgatatataatgtagttatatgataataaaaaaaagctatgatatatcctacatatatataatgcatgtngatgtttaaataa

SEQ ID NO: 39829 - DNA, 520 bp, Arabidopsis thaliana landsberg
tcgaagaaaaaacaaaggtgacactatttgctgttttactttttatttcatgaggacggaggacccatttttttaatttagtttaaaagagcaaccgtatcagttgattacggagtccagcagagaaaagcatgctcaactgtcaaaaacaacctaacaattagggaatcccgtaaaaccggcaaatcacgagggcagcattacattacattacattacatgtcccacaaatcactttccctcccatgcttttccacttccacctatcattaccaacacctattacctaaaggactttaagccagagagttttcaaatcccgtaccgtgattggtgcactatgaagtggaaaggaatacgatgaaaaacaaactgttttctcaatacattttcaccgacaccaatcatgaagcaaatagctgcaattattttttcttacgttttacgacatgaatattattaaactacttattatctttacatcttaataaagagttagtatttctaccaacacttctga

SEQ ID NO: 39830 - DNA, 1372 bp, Arabidopsis thaliana landsberg
cacaaaaatatttcacttttgtcaaaaaataaaataaatttgatatgacattactgctagaattgtttatattagaaaaatattgaggctatatcacgagttttatatcagaataactagaaaagagagaatattttatcaaaatgcaataatctccatttttctcacaatcatttctaattatatatgacatcttttgttaatatatgtgatattagacaaatggaatgtataactagcaatgtataaatatcaaaaataattagaaaaagaaacaaaaaatccaaattttatctttattttcatgtttaaaactgtttatcctgaaacaattgttaaaaccacaccaaaatcataattagtaatttagcctaactctatgaattcataattcgtaaatacacacactcgtagttttcaaagaatagtccaacgccagacccattacaagcccaataagtaaggcccacatcaaacaagatccgaatccgcatcttccgaacaaattgaacgcaaatttagccttgtcggaataaaccacttgttttcgctcgctcgctttctatttctcctccgatctgctgaggcgtgcgttcattacgtgcttcctcaatggcggcacgatccctatggagaacccgtacgaagctcctcgttgttggtaccgccttatgcggtggttccggcgccgccttcattgcttcctccgatgacccatcaacaaccctcaagctttgcacctccatccccgttcgtctctaccgcaataccgttaccgccgcctctattgcttttggtacggaaactaaaccattaaaggataatactttacatgatttgtttcgcttcaatgcctaaatttcacctttttcaattgatttggttctgtgctttgattaatgagactggctttgcactaatcttattggaaagctttaagtttgtggaattaaacattaatcgttttcaatttctgacaattgggatttgcatagttgaatcaatatatatttttgtggtttgtgttgtgttagattatgagtactcattgttgggtttggctgagggaagcagtgagagagctaaggtcaaacatgaagtccacctaaggtcagctcaaaagcttcaagagctctgttttaaaaatggaggaatctatatcaaactcggccaacatataggacaactagtatgtaaagctttttcttctttctgtagcattgaatgtctcaagttgtaataatgattatgttatgttaagaaaaccaacgggttttacggttttcttgattcaaggaatatcttgtgcctgaagagtatgttcgtactatgagggagtccatgttgaacaaatgccctatttcttcatatg

SEQ ID NO: 39831 - DNA, 563 bp, Arabidopsis thaliana landsberg
catgctttcgtttatccgttgaccattatgtatcagagaatgacaattttgacctaaacggtgcaaccccattagatcacaaacattttttttaatgaaatcgattttgtataacatataaacgatgattttgatagtggttataaaggggatggtaatggaagtagagaataatggagggaaatgatactatgaaatgtaatgtatgtcatgtgggaaaacacttggttctaatttacttctttttacgtatattcatgaatcatgcatatttctttggaaaaagtatattcataggattgataataattcgaaaaaggactatattacttttggatctttatgtgtattatcatatggttggattccacttcggtctctttcaaaccaagtggatggccgccctactctgatttatatatcttttttatgaacgattttcatttttttctagtaaattctttgccatatcctataatatactcaaaagtgcattttcatacaccaattagattttttcggctttcctcatccagcgaaaagactcctatgggctgtcatga

SEQ ID NO: 39832 - DNA, 559 bp, Arabidopsis thaliana landsberg
ccttattaatcgacttgggcccaatgtacttggaaagttccaagtcaaccacttgaggagtcaatattagcgaaataaatttgaaattacaattttccaattttgaaagtttcagaatttttttgtttggtattaccattttatatatatagttttagagagttgacataaaaacaatactattagttttaggagcaaggaattagaatggtaaatggggatccaagtccaacacatcaaaacgtcacacataaacatcactaaagatttaatgtactcccaatcttcccaaaatcaaagaatccaaatcaagtctcatcatgagttcctccacaatcgaaggtaatatgcacattcagactgtaatatccatcttcttgaatcaacttatctttatctctttggtaatatgcaagcagctccaccgattctaactatgaacaccgaggaagacatcaaagcaaagacagaagaagttgttaacgccccgtgttgaacaaactgggtggcggatatatcaatataatttgatttttgatagaattaatcaaagttacta

SEQ ID NO: 39833 - DNA, 551 bp, Arabidopsis thaliana landsberg
ccaatcattatacacaggtaaaaaaaaagcaaaaaaaaaaaagacagcaaaaattacggaccataaaaaacggccacgtgttcatcatgttcaccgtcaacgaaagagattccgattaagagagatgtcgaaggagataagagagaaaggggacccaaaaaaagggttaggtggatctctcatgaaatcggtggagctcccccatatcttttttaaatagctttcttcttttggccccttacccagagatagattcttatatactactgagaatcttcaatttctgcaacttttgtatctcttcctggtgagcccttctcttcctctcgccacttttttagggttcgggttttctttaaaatctgacctttttgcttgcctctgtttttattattcgtgttagggtttgttggtttttcactttctgactctgccatctggaatttatctgattgggacactctgattctgtttatacaaacagtagttttatttactgaggggtcaaacttgaatctgattttagggtttgactctttgtgtattatatg

SEQ ID NO: 39834 - DNA, 559 bp, Arabidopsis thaliana landsberg
  unsure (1)..(559): unsure at all n locations
atttaatgctcccaacaaatgcaagagcttcctctaggactccatagttcttgccgtggtgttcagctaatctcattgctagtaatattctgctctgttcaagccgagcaatcgcaacatctttctctgttcgctgctgtgtatgtatagtctgcagagcaaagagaaagaagttttacatattgtctttcaggttcagatagtaaacgagagacatatgagactgaccagaagcaatgagtggcaaagagaaagaacaaatcaatctcctatatatgcaaaatagcttgtgtattcttcttcactggtctatgataaatacacatgcgtctataatgtgttgtgaaatggattctgcataactatctctacttcttttgatctttacataagactatagcattcttcatgcacataaaacacctgaatctagattcatctccctgctttgactccatgaacaaagagtttccaataaccaatgctcaganctacattgtacaatgttttttttgtctaaaattgtgctcagaattttcataagaatctgataattact

SEQ ID NO: 39835 - DNA, 669 bp, Arabidopsis thaliana landsberg
aaatggaatccccatctctggacttttcacctgtgttcttcgaatgcatagaagaaaacgtccatgcttggtttaattaacatgtttctcaatgtaatagaaacataattctaccaatctacatgatcaaaacaattcaatgaaacacagaaaaactagcctccagttctactagatgaagcaatgtcgggtttccaagagactaaccttgagaatcaggcttgagcttattatcattgggattgattgtcacctctaacaaaagtcttagctgcagcattatccccttgaaacgattccacggactcttgatacagacgagctgtttcatcctccgctctctgcatttaccataaatttattcaaaccaatagaggctattgaggattttggtagctaagaaaagaagaaacaaaccttcttcttggcttcttcttcttctctgtgtttctggaacggtgttttcttccagggtgatcgagaaagaactcatctttcaccatccaacttttctcagaatcggaaatttgtcaatcgataatagcacggcaccaaaatggtctctagtctcaacgcagattgagagataaaggttaaaatgctccagaaaataccttcttcagagttcagtcttaacccagtttttttcttggtaaagagaataataca

SEQ ID NO: 39836 - DNA, 633 bp, Arabidopsis thaliana landsberg
cttggagcgattggactgtgtattgatatgagattactgttttggtctttttatagattgttgtattcttatggacacgaatcaaactttattatttattcaaacttttgttttcaataattttttcgttcaataatgattttagtcaaaattaataaatttcattttaataaattttttaaaaatttttttactgtaatatatatatctcagctctgtttgtctttggttcttttgcacatccggtcttttctgttaaccaacattaacgatttctttggaaagtttggtgggaggtcctttaggaacatttgggcggtttagggcattggcttctttattttccttagcaaactctgttttatactttattatggtttgttaccttttgatgtggtttagtttacggagagtttacacatttctctaaattatatttccgagatttatctttcgttcttggacttaacttccctcgtttgggctttaaactctggggatatctctgttttccgctggcttatgtttgtatctcatgtatctcttcaagtttcttattaatataatcagatggcacaaaaaaaaaaagaaatttcaacttccaatctttacttacagttctgtgctccctgt

SEQ ID NO: 39837 - DNA, 406 bp, Arabidopsis thaliana landsberg
actttataagatttagagactaaaaaactttttaaaataagtataacatagattgttgcctaaacgaatattgttacgtaactgtaaggtttggctttgattttggtccacaacagttgagctttagccttttacccatgttcgatcagctgtggatgctaagatatagagagggggcatagaccttactcttcactcttcaaattgataatgtcatgggtcagtagatcgatcaacgcaaatagtgaaagcctactgagtggccaatcatcaaaatttgagcgatttaatcggaacaaccaaaaagaagacattggagcttaatacttttagcccataaacgtagcaatttatttaattcgtaagtattaagccacgttctataaaccttattttaccttgtgaa

SEQ ID NO: 39838 - DNA, 541 bp, Arabidopsis thaliana landsberg
aaaaaaaagaaaaatacaataacaaaaaaaaaaaaaaaccaaaaaaaaaaacaaaaaaaaaaaaaaaaaaaaaaaaaaaacaaataaagaaaaaaaaaaaaaatgaaaaaaatttaaaaaaaaaaaaaaaaaacaaaaaaaaaaaaaaaaaaaaccaaaaaaaaaaaaaaacaaaaacaaaaaaaaaaaaaaaaaaaaaaaaaaaaaaaaaaaaaaaacaaaaaaaaacaaaaaagaaaaaaaacacaaaatagaaaagaaaaagaaaaaaaaaaaaaaaatgagaaaaaaaaaaaaaaaggaaagaaaaaaaagaaccaaaagaaaaaacaaacaaaaaagaaaaaagagaaaaacaagcgaaaaaaaaaaaacaaaaaaaaaagcagaaaaaaagaaaaaaaaaaaccagtcaaaaaaaaacaagagaaaagaaaaaaaaaaaataaaaaaaaaaagaaaaaggaaaaaaaaaaaagggaaaaaaaaaaaacaaaaaaaacaaaacaaaaaagcaagaaaaacaataaaaaaaaaaaaa

SEQ ID NO: 39839 - DNA, 1012 bp, Arabidopsis thaliana landsberg
ttcctttacgcgtttcgtatctctcaccgaaggaagcttcgtctcttctatataaaaataatctcgatttttcaactccgatcaaaggttttgctaattcgtcgccttaatttcgttcaagcttctacaaaagtcccagatttgttcacctttttcggtattgaatcatgatgaattcaatcttcggaaagcgaaaaactcccgcaggttattatcctcctttctctcaatttcgtctcttgtcggatctgtgttgcttattaagtttgtaattagtgaaatattcgatgatcgcaagttttgatcttgtaatttttatacttgatttgaaattagatcaatttaggtttgattctgaggaatatgatctcttcgttgattatgagttcattaggttacatgttgcgcaattgtttttataggttatatgtggttttgaatcatgtatagctcagtgtaagtaaaatggtttggagttataaagcatttgattgatttgatgattatgagttcatttgttttcatgtgcatagatcattaggttacatgtagtgcaattgtttgtgtagctttaagtgtggttttgaatcatgtatagagtaaaatgattttgtcggttgcagaacttctgcgggagaacaagcggatgctggataagtctatcagagagatagagagggagagacaaggccttcaaacacaagaaaagaaactcattaacgagattaaaaagaccgcaaagcaaggccaaatggttcgtttctctttcgtagcgtatataggtaccatgtataggattacttctcattcttgaatagttggacatcttcttgaatacatttgttggatactttctctcacagggagctgttaaagtgatggcataggatcttataagaacgcggcaccagattgaagatgttttacaagcttaaatctcaacttcaaggtgtatctctcaggatccaaggttgctttatttttaccaagagtcgaattggtttatttattt

SEQ ID NO: 39840 - DNA, 707 bp, Arabidopsis thaliana landsberg
  unsure (1)..(707): unsure at all n locations
attaatctggcctattgagctttcactctactcaataagatacctgcaaaagctccaagacatgtgttgggtggatgagttaataaggaccattgtcctacatatgtactctatcgcatggattaagatttatgtggtagtaaattattctatttttgatcaatagaatatccgcgacgctagagttttatcagaattcaaaaatacttttaattagtggatatttagatttcatttgcaggttaattacaaatttccgactagaatacaacaattttaattcgttttaaaatgtttattatagtttagatattattttgtcacgaatactatatatatgccacctatgtgttaaaattttcataaattaccaagaaaaagtatgattttgtccttttgaaatgaaaatcaatcaaaaaatttatatacacatttgaatatctaatgaattttagttgaaattttggaaagacacaattcagtaataaaatgtgtatttctttgattttttttggtttgtgtggtcaaattgcgtggaaatacttaaaaatgtgttgaaaattgaaatgattaatcttaattacatcacatgaatattgactaaaatgaaataatagtatatgatatgtngccataaatgttatgatgaattaactttataattttcgccgtgtataaataaaccgtaaaataaaggaaccgttact

SEQ ID NO: 39841 - DNA, 506 bp, Arabidopsis thaliana landsberg
tatactctttcgtatcctaaagaagggtgtgtcaccgaaagcgtataatcaaattttttatccgatcattagggctgcgaaattcggattcgttcgaatcaacaaaacctaagatttgatggcttctttggtcgccttcgttgatgagaaagttcgattattattgagaaattgatgggtttataattgggattgcttcataatggtgaactctcttagatataaaaaagtgagagatgttcaagtttccggagcaaatattaaactggccagaatttaacagctctgtgtttaattttactattttcacagagttacctgtcttctggtatatatcatcttagtttgattcttcttatttatggatactttctgattattgtttcccaaatgttgaagtcgcccaccaaaccaacttactaaaccggattggatcaccattttattgaccattaaactaaacaaaaccaaatccagaaaaatcagattttacataaattgatcca

SEQ ID NO: 39842 - DNA, 538 bp, Arabidopsis thaliana landsberg
ttcttgtttgcgtggcgctaaccccgcctgaagaaaaatccatcaagggcttaaacattagctgattggaataatcactactcttttgttgagaatcaccttgattaacacctcccttaccttctagtaatggatataacgcgtttgaagattgcaccaatccggtagtgttgatcaagaaagggaattgctgagcttgttgtgatggaggtattctccatgcatccaagatcccaccactagaactcataccacttatcatgttgcttatttgagttccaccaaaatctaatccagtgttgcttgaattgtaatctccaaggctttggagaggaggcaagatgggcaagttggaattaaactccgggatttgaccgtagctatgaaacttgctagggtttgagtaacttgggcgagaagtaagtgatgaagtactagtagtattatcagtcgagaccacgaccgtagatttcgatctggatttgcttctcttgttcctcctaaagcctcctccaacaggaacattccttagggaacc

SEQ ID NO: 39843 - DNA, 839 bp, Arabidopsis thaliana landsberg
tcttcttcaggcactccacttcttgaatctctgtgatctctatactatggttttgtaaatcttgagcttgattctttagattctcagcttttgtttctgctttatcaagctttgatagccccaatgtcttctcttcttcaatcagtttgatccgtctctttaggtttcccactgatcttgagaatatgatatattcaatctctgcctccaccttttgctggaagatgtcttctatcccgatctctgttcctccgttacacgtctctgaaacgtttatggtagattcgagttcacggatttgtgtttctttaacctcgagaatacgctttgcttcttctagtttgatctccagatgctctacattgttcaccaggtttagtatctcggaatctagagaagttaattccatttctcccatcttttcagacccaaaccggtaagaagagcttgcttcactagctccttcgtgtcctgcgtgtatgcaactgctgctttctcctccatcatgcagtgatgttataggttcttctttcccaagctcttggaatttttgaagttctgaaaagggaaaaagaacaggagtttagtcaaactcgaaacacaatcatgttaatattacacggcatcataaggaaccagtgttagagtcattcaagttttagttgattaggactactacaatgcagcaacaatcaaattccaaatgaaaatctgtctttatgaaattgataccttcttggagggcttcttgcaaagtctggaaactggtgacggctactattaatggatccagatggtctgatgaaccattgctcttgattgagactcttcacacagtc

SEQ ID NO: 39844 - DNA, 537 bp, Arabidopsis thaliana landsberg
gtttggaagctagctcaaccgtgagaaacacagaaggtactaagcttacaaagtaagttttggacatttaagaaccgaacagtagcaattgggttttgattgtggcttcggtagatgtatacatacgccttctcgaaattgctcattggcgcaagattcgttacataatgcgttaccatttttctttaaacagttcccaggtggcgcaaacctgcttagtaccttctcacaataaggactagtacctagagcatgtccttttggcattcctgattactcaaaaaatatatatataatcgttatgatttgggtttgaattgtttcaaaaattaatttttgcatttgcgtttccatttacaagtattattgtttttgattttttaaatatgtaaaatttaaatgctttttttgtggaatatattactctttcgtacttgtttatcatttaaaattaatttgaataaattgtttaagctgcttaattgctaaattatttaaacaaacacggtagatacacaacttataaatacaaacaca

SEQ ID NO: 39845 - DNA, 369 bp, Arabidopsis thaliana landsberg
aaacaagcaacacccgaacttgaactgaaaagctaaggaccaaacacaaattacgagtaaaattagaaaaagaaaccttatcgagcaagaaattagggtaaagctgattattggtgaggtgttggctacaacagggacaatcactcttgttcctaagatgtgtgatgatacacatatagcagaaactatgaccacaagccgtgaggaaagcatctttaataatctgcatacaaatcggacaaagcaagtctttatccagatccggtgctccaatctcagaaccgccgcttcctccgtcgtcattttcatgacgattagcaccttcaccaactgaagatgttctcgggtcaggtttcaccgctggaacaa

SEQ ID NO: 39846 - DNA, 592 bp, Arabidopsis thaliana landsberg
gggcatatcatatttattatattgttgaccaatgttaagtttttgtatatcttcaaattttaatttgtttatgaacgtgtgatatccatgcctcgagacttgtagagcctttgaaattttatcattatatggtttgttgaaactgaaaattactctattaattaaaaattgttgaagatttgaatattaattagtagaaaaggatttatatctaattatgccataattagtagtaaatgtatatcactaccagattcaatttcggttaggtgaccatgacttcaaagctgtgatgccgattgtaatcaatggttgatcgaatcattgaaattcttctctataatcatcaaatttctctctttctcggttaaacttagaatcaagcgaaatttcgatttcgtatcttaagaatatcgactgcattgtgttagtcgattgagacttcaactaaacccttgtttcgaccagttgatggtaagaactaacaacatcacatgcacaaaattaaataaagacagtttaaaatccttttgaaatatgataatttaacttttaagcttcagaaaagtaaaattttggaaaattttatatt

SEQ ID NO: 39847 - DNA, 678 bp, Arabidopsis thaliana landsberg
tttaacaaattgttgtgcctcatccgtgttcttgaatttgaatgtcaacttctcaaaacgtgcgagggcctctttatggaaattcaaaagatagacagcaactactaccctgaggtaggttggatttttcggattcattaacagcttcatatcaacaaggaatggatgtaattctggtcggtttggctctagactttgcatcgcctcttcgttgtcaatgccagttctggattccggatgttgtggcttgcactcaagacctttcttgatgctcggacattggccaaagttcaagtaataagcatatgccactcggtgctcgcttttcgtttagtcacagatttctttacctaaaatgatgtttgttgttgtaggtgctaggacccaattaccttggagagctacttgaagcaatagaaccaaggtctaaaacctttttctgatttgttttctctactaaattcagtgaaaagatttgtttcataaatgaggaacctcaggaatatttgtgtttgatttctgaaaacagcaacttaccaacatttcttggaggaaattgcacctgttcagatcatggaggctgtcttttcagtgtttatagaccctggaaatgatccaggcttaagggttattatccaggtttggtgcccaattaccatttattgtaacttttatcta

SEQ ID NO: 39848 - DNA, 782 bp, Arabidopsis thaliana landsberg
  unsure (1)..(782): unsure at all n locations
gcaaaaacccctcgcttactaatggagcttttttttaggcttgcagtaaaaaaaggaagcattcaggagtcgaggcagaaaattctgtttttgaattgagaatccctcacaatcacttgagaagcccgatttcattgaannnnnnnnnnnnnnnnnnnnnnnnnacacttctcaccattgtaagctcttttaactctttactatcaaaattcagctttttgtcgacactgttgaaaacttagtagaaagttattagttacttgaatcctacttataatcaccatagttcttctttgtgattatgttataacaatatgataggttatcaaatatcttcttttcttttgggtttcagggtggtgcattgggatcggatagctggagagagtctgttgataatcttcttctgaccactgcaacaaatgcctgtgaagggagatgggccaatgctgaaacctaccattgtttacccaataagtctacgacggatctagttgagtttcagcttgcagcactccgtgccttttcggcatctctcgtttctccatcacgagtacgccctgcatttttagctgaaggacttgagcttttcagaacaggtaactaagattgttggcatgaattaaaactaagctttaaaccgcagagatctagagtagttgatgcatatatatcggctttgaacaggtaaacttcaggcaggaatgaaagttgctggattctgtgctcacgctctcatgtcccttgaagttgttatacatccgagggcactttcactcgat

SEQ ID NO: 39849 - DNA, 747 bp, Arabidopsis thaliana landsberg
tccctttctcttcactgaatttgaatccagggagattcctgttctattctctctactcaccattcccaaattgcgactggttttatctacaaacacatacgtagatgcttcaccagttaaatccaaaacctcattctcttcgctagggttccgaatcttcctcggccgtccacgcttcctctttattttattcccggaggttccctgaatcagaacgttctgaatcgaatcaagattaggtctctgataaacatagctgttataatggatctgaccttcgttatcttcgagctcttcctctccttcgtcttcttcctctttactctgattcgaatcgacattgaacagagatctgagaagcgacgcgacttgcgtttgttcttcacgggaagaatcgtctctctgacgttgcggcgaaagaggttcctccggtggttgagggtggcgcgcaaggcggagaccgagaaatgtctgtttccggctaccagcggactcattgaaaactgtgcgatcgatctctggtgtctaatcgacgactgcaccggcggaagcggcgagagaccctgaataagatggagatagagaagaacactgagagagagcgcgaagttctgactgggacaaaagacgcggatcgattaacgggctagatttcgctgattaacggttaccagcaccaccctggaagttatggtggttgcataccgggataccgatgtgcatagccggggcctccaaggacacgtt

SEQ ID NO: 39850 - DNA, 839 bp, Arabidopsis thaliana landsberg
aaagccccgttaaaattgacgatctctttgcgtattatttttacaattatatatcacacagaattcttttgacatagggatttgttcagtaaactggtttaaaggttagacatttagtataatttcaaaagttggcaaaaatgtatatcgttctatataattgtacaaatactaatatgatgttgattcagtggtaaatctttcaagtatagagataatgagttcgacgtctattagggaaataaatttaatttagtatagattatgtctctaaaaaacgtaaagtttttgagtttttgggtttaaacttttagatattctaaaaagaaaaagaaaacttatacacgttctagatcataaaattttgtactagtaaatattaatatataattgtattttatacgcatgcataaattgttggaaatgtgattaggaaaattaattaattgaagaaattggggagaactaagtaggagttgtcttaagtagacttaattcacttagattagttagatagcttattgggacaaaaagataaacgatacgaccattgaactttcaaagagacgtgataaacttatttctccccatggaattatatgtcgaattacgtgagacatacgataacttgaaattcaataataaattaaagctctacatttttttcgttatataaaatttcgattatgtgtcgagtctttgtgtgtatatgtgttgtgtggtttggaggtgttctatctgcaatcaaaataaggtggaagaaggtgaaacgtaacgcatgaatgaattggtacattggatatataaattatcatcattaaacaaatggattttattat

SEQ ID NO: 39851 - DNA, 576 bp, Arabidopsis thaliana landsberg
gaaaacttggagctaaccttctgacgcttagctctggattcattatcaggtttagatttcccactcttggacgccattactaaatcaggtttagatttaccacctttagacgccattactaacgcctttaagcaaaaccttccaagaagaagatggttagtgactgcagagtgcaaactgtgtgactgcacaaagcccaagaaattagggtttccacttcagcgcaaaaaaacccaagcaacgatttcatcactaggttcccgtcacccaaaacattacagtaatattcgattccaaatcttaaatctagctgaaatttgttttcctcaagaatcgaacgggaacaagattagtgttttttttcttctcaaatctcttcacttcattcttactaagatggtgtgatttgagatcgaagaaaactaaaaatgggagatacgaattggtaaaaaaaggaagaagctttggttttgagatttttttttttttaatctagaagagcctctgcttcagagagaaagaaacccgagctcgcggcgcaacagatgtagaaaattgcaactcgatacccttttt

SEQ ID NO: 39852 - DNA, 500 bp, Arabidopsis thaliana landsberg
ggaacttgccaccttcttcaacccactaaaggaggagagacactgtccaccatcaactaacccacaatgcctctaaccgccacgatcaagccgaagaaccaaaaaggttctgagacttgcctccaaaagagactctcgccggtttcaaacacactaccaccgcagctggaggaaaaactaaggtaagagagaccgagaagagaaggtctgcttaacaaggctcccgctgatgtgccaaaaacacgaggaacgacgacaagtgaagaaatccggcgatgcaccaccggtttcacagaaatggaggatggtctcgccgttaagagccacgaccctgctacaaacgccggatcaaaaccaaaaccagaaacggagaaccctatacgcacaacgatagatctgatgcccaactcgccggaggttaagccttaaaccagcgcccgccatgagcgtcgaaattcaaagttcaccaggaaagcaagcaatctattccaactgagcgt

SEQ ID NO: 39853 - DNA, 565 bp, Arabidopsis thaliana landsberg
  unsure (1)..(565): unsure at all n locations
tctctctatctaggaacaagagttttttttttgggtgccatttcttgatttttatagatttttaggtatgtcggagacgagcttgaaagaggaagaggtaacgttaggtggtgttaaagagacgagagaagaagaatgttccgacgataaacttgtgttggatatttgtctgaaaaggaagagattagatgaagaagaagaagaagaagaagaagttgtggaggaagagaatgatgggttcaagacaccgactcgtccggagaatagaatccctatagttagagaatgtccaccggcgccgatgaaacgttcgtcggagatgtttagaggtagaacaatgtnnnnnnnnnnnnnnnnnnnnnnnnnnnnnnnnnnnnnnnnnnnnncgtttataacggatttgcagtggaggacgacaacaatgacgatcaagaaataagattaatgagagagagaaagatttttaactttagttnttatgatttttattttgatgaccatctttaggtcacgtttggaaaatatctgaacgttttttttcccgaaatagaataaaagaaacata

SEQ ID NO: 39854 - DNA, 724 bp, Arabidopsis thaliana landsberg
aagagcatactgcaaagtattgttggttgatcccacccatcaaagataccatcgagaactttattataggcgccggaaactcggctagtatggatgccaaattaggtcgatcaaagtgatttctcaagcaaagaatcagattaattagctccaccggatatatgatagctctagggctaagaaggggtataaggcgaaacctgaagggcaatactagaggacaagccgcaaatggcaagggggagatagaggcaacctaagatcttgtccttgtccacaacgacttcgtcagggacaataggtatagtcttaaccgagcttaaagtagcggtagtactgtgcattaagctcataatgagagctcccatcacacacaacactgtccctcccatcgtaactctactatacatacaacttagcttcactttctccatccttaacaattacaatttattcaaataacacattaatgaaagctctaatcttcaaacactaaacagattagattaacacaaaagtaaaagatttacccagcagcccaagcaatgacaaaaatgaaagcagggcagagattaggcatagctgtagccattgaagcagaggtgtgtttcattccttccaagaataacccctggaacagagtcactctgtttcaaacacaacttctctcttaattaaatccctggaatgaatttttaatcttcttcttctcttaacggataga

SEQ ID NO: 39855 - DNA, 1218 bp, Arabidopsis thaliana landsberg
aagagaaaaaacaatagtaatgaagagagggaaggtgaaaaacgaaatatatgtgaggtttgtcatattcttcctatttcgttttctttaggctgcgtcattttgatttgtccctttctttgattttttttatatataaaattgattagtgaaataattgtttttataatgcatgttgattaatttagtaatgcttaaaatggaaatttattttttcttctttttttgtttgttcacactagttgcctttccttatgtctctatcaacataattttttttcttttacgtccatttcatgtgcttcatgtaatcattaatagggagaatgtagtaggcatgcaaatatttatatgtcgaaataatttaagacattaaatagtataccaattagttggaaaatttatagattttctatgattaattaagaacggttgctaaaaacaatgaatgatatgcataagttaccacatggtggtgcatttgaacttttctatgatacaagatgggagtgggacgataagtatatactaatctctaaaggtaaggttttggcagtgagatctatacatttcttcagactttatatttttttcttaatacgatattattaaaataagatgtatatttatatttatatatatatatatatatataacatattttcatcaaagattttgtatatttgttttccttcaaattggatgtcaatcaatgaatcatcttttaatttaatagttttggttgacaaacaaacattagtattattgataaatccaacttccgataaatcaaatatgtgaacaaattaatccaactaacaagagtaagataaaaaacaaataacaaaaaaaaaattattaaagaataaaaggagagagtacagtatatactatatagtagtggggaacaaaataaaagaataaatctgctgctaggttgtcagaaaaaatatatacttataaacaaataaaatagacagtagtgaccaaaacaagaaagaaaggaacctttttctaacatttggagtgtagataatgatacgttacttatttttccaactaatcatacgttactttacacttcttcgttttagcaaattatacgagtccccaggttttttttagatcccccaaaactcatttgtctctgtaccgtttaaaatgtatattagtcaagatctactgacgctatattctaaaactcccgttatttttctc

SEQ ID NO: 39856 - DNA, 524 bp, Arabidopsis thaliana landsberg
gttgacttgaaaaaagcagcgatgaaggatatggaagcaggacctgactttgatcttgagatggcttctacgaaagcagacaagatggatgagaatctgtcatctttcttagaagaagcagagtatgtgaaagcagagatgggtttgattagtgagacgctggctcggatcgaacagtaccatgaagagagtaaaggtgttcacaaggcagagtctgtgaagtctcttcgtaacaagatctctaacgagattgtgtctggtttgaggaaggcgaaatcgattaagtcgaagctggaagagatggataaagccaacaaggagattaaaaggctctctgggactccggtttataggagcagaaccgctgtgactaatgggctgaggaagaaacttaaggaagtgatgatggagtttcaggggctgaggcaaaagatgatgagtgagtacaaggagactgttgagagaaggtacttcactgtcactggagacatgctatgatgagatgatgaagaagatcatcactg

SEQ ID NO: 39857 - DNA, 706 bp, Arabidopsis thaliana landsberg
tcaaagatcgtgacgtgaaacaaaacatatatgttcgtataagtgattgtactaatggtaatagaataatggatcgaattaaagtattgtttcccattaacttcgaatgtgctagattcgatttttcttttcatcgaatttttgcagaagaagagtatttattcaatttaaagcagaaggaacaagttcggggaacgaacacaataagctacaaatgtgtagcacaagagtttgaagcatatattattggtgtaatttgtgtttatgagaatattggcccacgagaaatgtattataacaatctttttaaaacgattcaaaaagtaatatcaacatgctttacaacaaaaaaatgagaggcaaacatcaacttttttcgtaaaggcaaatatcaacgttttaatttggccactttaatttttttgtgcgcaaattattgagaaaagtgatgctgcttcttaaataatggttgtaaattacagcattagaatccgatgattctatgataggttactattgatgataattgatattattttcttgtaacttttaattaaaaataatggtaaaaaataaatcaatcttgatacaaagaaaaaataaatatcaaggactttcttttagatgttctaaacttttttttctcttttcttaatgaaacttttcctgacccaaactaaagaacaacaagttttggctaatgtgt

SEQ ID NO: 39858 - DNA, 509 bp, Arabidopsis thaliana landsberg
gacctggagcgtgatttgtgaactcccccctccacgctcagctgatgattcccgcgcttctttgtgtttgctctttgtctttttttgactgcagaatttgttggcttcagttttacgtcaccttctcaagcttgcccttttccaccacgattgacgacgatgaaattgacatttccggcctggctgctgctgctgctgcttcggcagctttggagtaagttatctttcactgaagatgaccttttgtctgcttctgtcaacggggagacctcaatcatcagagttatcgctggggctatcgatgaattaacacacaccggtaaccttttgatcgtcgtttttccctggtatttcgctggcaattgtcatgcgattattaaacgttttcaccaccaggagtaattaaactgctgccactgacctttttcaggggttttacacacagcccccgctggtttggtgccgtttcatttctgtttccataatcctttccttccccaaaaagggac

SEQ ID NO: 39859 - DNA, 548 bp, Arabidopsis thaliana landsberg
ttttgtattgccgggaaacattttcctggcttttaatggatttaattttcttcaacagctactctgttatgggttataagacaaattaaaaccaacaactgagaaaatgactaacgtaagaaatgtaatttcgaaattccttttcctttataccactaagaaaattacgaaatcatgtacttttgatacagatccgtttcaacaattctgatagttgaaaatgtgaactaaatgtgcatctttttttacagtaaagatagatcagaggcaactaaaggtcatgttgacttccccttttacgtcttctcgatttccccggcgaagctgacaagtaaaactgttgaatctcatacagtatatcgacgtttagcatcacgatcaagagtctttgcatcctcctgaaaaacaaattggataagtcacaatagcacaaacctatgtagtttaggagaacaaaaagatgttgcagaaatagtacatgaactataaatccgattgtcttattgtagccaagaagctccttccactgcttcccaatgcttagctgg

SEQ ID NO: 39860 - DNA, 552 bp, Arabidopsis thaliana landsberg
tgatacgaaaacaaagaagcaaatgtattttaggttcaaaattgtggtttgtattttatttacatagacttatatgtgaaactctattcaagacttttagacgaggtttatcaaatattgtacacaactaagattacctagtacttcatttcgtgctcttgaagttttgtaaataccactgtaggtgtattcgttttttttttatataaaagatgttcttcaaaatcgtaagttggtcctcgaagatgtaaaattagtcgaatccacctctagtgaagtttttatttgctgaacgtaaaagtctttttcaccgtcaatgaaatttagtggttgaacaaaattcagaataaaacactattatgatacaaatatattaaataccacacaataataatatatattgggatggttgagcacttacttaatgtattaagttgttacttcagccctataaaagagaggaattggcctaatatatgtccgaccaaacccttcaattatggtctgctacaaattattttcttaatttttggttgctaattcccaagttcg

SEQ ID NO: 39861 - DNA, 568 bp, Arabidopsis thaliana landsberg
  unsure (1)..(568): unsure at all n locations
gcctggtaagggtcaaacacttcagtctcagatacttgcagaaaagtcgccaaacaaacatgctgccatgaaaataacaatctataagcttaaaccgattcagatacaaatccatcatcacaagaaagatttgcacaaagatttttacagttgactaaccttaaccaatgcagtagcaaggtaaacaacagcagctttcacggaggttccaagtgtatcatattcagatctgcagattcattttccgattacaattctaattccgtgaagaaacaataacaattcacagattcaannnnnnnnnnnnnnnnnnnnnnnnntggctagcttatactaagccttaagattctagatcatgaagcgaaagaagatctaagtacaattttagattaggtatgactaaactaacagattttacagatcgagaaaagaggatttgttcatacaagggagtggcggagtagtagacagcgtgaggaccgaatgtgagaatcgcacagttgaagaagtgaaaaagcgtcatcgtccaccgtcgcactctctttctggtaccaaatcagtagctaca

SEQ ID NO: 39862 - DNA, 437 bp, Arabidopsis thaliana landsberg
ataaaataccacccggagtatatcatttgactttgaaatttatcgagtcaaatcattttttttatttttggtaaaaacaattattatgaggactttgaaaggtttttagtgattttaattacaaaaattagtcaatgctggtctggttatccatccattggaagagaaaatacgaccttttcaatgctagctgataaaaaaagttctcggccctatccctcatcttataaagatattattcatacgcttagggattcaattcacagaagattcaaaaatacatggaatataggatattaccataataattatggttcaacaacaatttcgatttctaatttgaataatggaaattgagatcaaaaatagttccgactcatagataaattgacatgtgccaaatgttacgttaaccatgaagaggacaaagtcaacac

SEQ ID NO: 39863 - DNA, 582 bp, Arabidopsis thaliana landsberg
caactccttagatttgataatttgtttaggtttgagagagttatatagagtgtttacaaagaagcaaagtttgtgattataaaattatttccattgaactaaagttttcaatagtttattcttgactttaataataataactattttgcccccagctagtcacatactcatgattgcaaaatctctctctctctctgcctctctatatattaacctttcttcttcctttactttctcatcttctatctctcaaaagaaaagcagacaactttatttgcaaaaacagagtttttttctttcttttcttgagaaagttcaacagaagatgatgttggagaaagacgatctgggtctaagcttaggcttgaattttccaaagaaacagatcaatctcaaatcaaatccatctgtttctgttactccttcttcttcttcttttggattattcagaagatcttcatggaacgagagttttacttcttcaggtacttcatcgctttcttcgttcctctgttttttttcccccgtaaaaaaccttaaaagatctcaccttttactctacttttaatcttatgcatgcag

SEQ ID NO: 39864 - DNA, 441 bp, Arabidopsis thaliana landsberg
tcgtcgacgtcagccgtttcgcgtggagagttgaggccgatgctgactgaatcgccgactagtaaagattccttttattttatgcctttttttgtactttttctttgatatataattcatttttatttaaaatattatgatagattcttccactctgcaaggaacctcattggctgacgtaataggatttgcctcttggaacatcataaaaatcacaatttcattcatttaaaagaaaatagtcgttcgtctttattgtggtcctttggcgacaattttcatcacaccacgacaaaacaattggtatcaaattatataaataaattgttcttacttcttcttctcccagcgcacatctaacatttgggttctctcattaatcacttcaattatcttccaacgaagaaatatttcatttacgtacatcaatgatattatttg

SEQ ID NO: 39865 - DNA, 520 bp, Arabidopsis thaliana landsberg
  unsure (1)..(520): unsure at all n locations
gtgtatcctatccatgccatactgaattgaagtcttattgggtgcaggtcgaaggggatcccagtgatgcgcatctggcgccgctcaggaaaggtgtcgatcttggcgacttcatcaccaagccggccagggtgcgcaggatcgatgccccgttaggattatggcccagattcccgcccattcgcgaacgcaaggctatccccaccagctggctggaggtcatcatcgcagagggcaagaaccgtcaggtgcgacgcatgacagccaaggtcggtttcccgacactgcggctgatccgttacgcgatcggccagcatacgctggaaggcttggcccctggtacctggaaacgcttgtgaaacccatttctgaaggagggtaagatgaaaccggtggtcgtgttccggcacgctttggcacagggtgccggctatcttggggcgttgttgacggagaaggcgattccctggcatatggtgcgcatcgatcagggtgagcacgtnccggacgatgcccgagc

SEQ ID NO: 39866 - DNA, 797 bp, Arabidopsis thaliana landsberg
ataaattagtaatttattgatgaaaaaaccactaaatacattaataacgtcatttccagtcaattctattttaaattaaataactagcttatttatttaactattgtaaaactgctgaatttttaattgcttaacactaaaaataattttgttttactaaattagaaattttattacagtcgtatttaattagacagacatgcaaaattatgaaagagaaaagaaggtaagggttagagagaacttgacagagagagaaaaaaggtttacaggcacaaaggaggcttctctcagacgaaacgaataaagaacaaaaaaaaaagctgagaagaatccataaaaggtgacaaaagcaagaaggagaagcaaacatgtatccatatcttgtcttctgattcacacacgtactattcttctttttcttcttcttcttcttcttcatcatcattattcaccaataccactcttcttccttctcacttgttagtatactttatgtcttatctgattttgttttttacttccttcccttgatttttgtttggtagaagaaaagaatggagggtatcgatcagcattactgcaacaatggtagtgggtttcaagaagagcattttctttagagaagaagaaaaaatagtttcataactcttcaatgtcgctgatcagattcatttctatgtctttaatgtaataatctcattaaacaaaaaatagtgtgacggtttgggaagtagtgatattggcggaaaggctcaatctccttgtcacattattaaatcactttctttgttttc

SEQ ID NO: 39867 - DNA, 419 bp, Arabidopsis thaliana landsberg
agtctttgggacacttcccaccacaaaagcccccagaaaagagctttagtagtaaaaggcaaaaactaaaaagatgtttgtaatacatttaatttaatcttaagttattaatcatccttctgaattttgagatgtttaatctgaggtttcatttggatcactgtcttttgtagtttgtaaatcaatacttcacaatcctaatataatatttttctgcgaaagcaataaaaaatctactaacatgaacatctgtgtcttgactttggccatatatatatttcttgaattgacagacattttgcaataaatatccgaagtttaaaagacaaccaaatatgggaagagaaactaaaaattaaaaaaaatcgttattgggctgggcctgggtaaagaaataaaatcaacactcactcaccgac

SEQ ID NO: 39868 - DNA, 683 bp, Arabidopsis thaliana landsberg
aatcaatcaataagccgcatcaaatacggcccttttttaatatttataaaaccaccatagatatccaaaattgagcttgtgtaccaaacaccataacaccacgatatcaaatcttcaactctatcccttttggatattaaccaaccaccaaaaataaaaacaatccacctaatgatttaaccgattaagtatcactgctatatcaaatcccaatttaaacaaagatacttcatatctgacccttggaaaatcttgagaatcaaaccaccagtgtagagaagacatatcccactgctgctccacctgagagaaaatctgattaccgtaaaaaccagctgaacaagtatcacctgaagaaccaattgcattgtctagttaaaaatctagtgtcgtcgttagtatctcgagagcgttttattttttcttttaaataaagtgtgtatcggtgtatataaaaaaaattagtatcaaaagaaatgcatatgtatttttattttattttttttgggaaaatgaaaaaaaaaaacatttttgatgaaataataaacttttaagaatagatctaaattacaatgtttctaagttctttccttcacaactattgaaaaacattcaaattttagttttcagattatgggacgagcataccacatttgaagaaaatcaatcctactatttatttg

SEQ ID NO: 39869 - DNA, 665 bp, Arabidopsis thaliana landsberg
tgcacaatgtcatgttactgaaacatatcagagacttcagacaacattggttccactttggactgacttactgaagcgctaaacggcaaactgtgtaaacgggacttctttgtgttatacactgacttatattaaacttcaatgctcgctcaggttatctgaatgaatttatcttatttacctgctcacctggatgatatggtcgatctgttgtaaagacaactccttttgaagatttatcataatccaggaacgtctcaacctttccaagcagattttgaaatattgattaccataagtcaatcatgctttctgcttaaggacactctaggagctgattggctcataaagattagtggaagtccctcacatttttgattaagcatatctgcccatggaactaaggcaaatcttccatccatagaaggcaaccgcacctgtgttagagaagcttaagtctgaattgcagagacaagcacgcatcacacggtaggaaagagagacgaaacaatgcactattttgggtgtgagtgagcattgtacaaacaataaattgttggagacagctatattatgcacagagtcatgctgagattaatagaacacgtctgatgcatacaattcaagacatgtcgatttacatcctttatcgagagtatgattgc

SEQ ID NO: 39870 - DNA, 497 bp, Arabidopsis thaliana landsberg
ccgggcctgctcgatgcgatcgacaccgcgctcgcggccgcctttctttccgccgccgcctcaggccgttaacggggaggcggcggtgtccggcggggggcggcggcggtactgcatcggcgaggccgcgaaccagcgccggcaggcgcgaaagaaattgctctgatcggcgaagccgagcagaaacgacacatgcgccatcgacagccgcgcgtcgcgcagatagcgcgtcgccagttcgcgacgtgtcagatcgaccacgtcttgatagcgcgtgccctccgcctgcaggcggcggcgcagcgtgcgctcgctcatgcgcagcgcgccggcaacagcctcgacgctgatatcgccatcgctgagccttcgctgcacctcggagcggacttgccgcgttaccagatgctgtgccagccgctcgagcttctcagcggcaacgcgctcatgcatctcgcacagctgcggattggacagctgcaacggcagctcgagat

SEQ ID NO: 39871 - DNA, 564 bp, Arabidopsis thaliana landsberg
tcaggcgcccggcgccatgtccgtgatggactggaagagcacctcacggaggccgatcgcactgcgccgtaaactggcggattcctgttccagctttgcttctgttgtcacgtgaccgctttcgcaacgtcgacaatcgcctttgccgcgatactctcaagtcacgattacaccgttattgccgcttgtaaactggcatccgcatccgccatcttctgtctgagcccctgccggcagggtcaactcggggtgcggtcagatttctgttcgcggataccggaacgggagacatccatggctgacggcacggctactcaggtcacgacgaaggcgagcccgcggccggtggccgagacggtcacgcggctgaccggcatcctgtccgccaagggcctgaaggtcttcgccgtcatcgaccagcgcgaacaggcccgcgacgccgggcttgagctgcgggagacgaccctggtgatctttggcgacccggcggcgggaaccccggtgatggacgccgcgccgctggcccgcctcgacctgccgctgaaggtgctgatctgggacgac

SEQ ID NO: 39872 - DNA, 621 bp, Arabidopsis thaliana landsberg
taacgcaactgccctcttctaacttgtcaatgatgtcaatgcataagatataaaatttaaagcctaaagatttgagagtttgatgctggagaaaaatatcaacaaaatgtttttttagagtgatgggttaaagtataaatgaaactgctaaatttggccccaatgtataacctacattcatgttgcctggattattcaccagattcttgctcacattgtctacatgcattccttcttttcctctctttttcttcttttacttttaagctttttttgtcagaaagcttttgttgtctctgtttttttttctctcaataataaaagtcgcatgtgaccccctctgatgaaaaatgacataaagataagcaccaccgccacgtttacacgagatccacaccgtggacatcatatcttgttcctcaattactcaaagtgcatagtacgtattacaagtcgttaaaaacacgattagagatttgaaattaatgtgcaagaacatgtatttatgcggaagagttattacaaaatatagtttgactttcttttcttttttttaaaattgtgagtcttatcctatctatatgactatgacacctgcctaattctggaaatattttttaa

SEQ ID NO: 39873 - DNA, 780 bp, Arabidopsis thaliana landsberg
caggtatgcggttggtaatggtatcatttttctcatatatataactgattttattttaagaattaataactttttcatgtatttcttttttatagatgtgtatttgtgatgtatgacgtccgtctccataacagtggtccgtggagccctgtccgaatctatccacccaacagatatatcacgacttcaccttttccacttggtcaatgaccaacgacatcttcgtccttacctcatttatctatatctttattatatatgctctcaaacacacgtagatcaataaagttttactttccgaataatcttatacgaatatttatcaacgtccacaaaatatgatttaatcgttagcgactgactagatacccaacccatagaatggagccttgatgtctcctagtacgtattggagcattttgctcctcgtaagatttatagccattaggaatatcactagaccaacgaatcttattcgtgaaagttttaggagagttgattcaacgttttctaaactttttttaaaaagagataaagctttttctcatttttttattttcgttgattattaattattctgattcttgttgtatataatgtttctacctactctttacttacaaattccgactctcgttggataccattaatcaataaaagggattattttttatttacaaaagtgaaactcatgaatatataagagggtcgtattgggatatgaatggataacactggagatattcaaattaatggtcaagcattatcagcattatagcg

SEQ ID NO: 39874 - DNA, 860 bp, Arabidopsis thaliana landsberg
tcctctggatctcataaaatcttctccggatagcacattttcctcacactttcattatccatcttctccattccaaaacaagtttctgttagactgttcagctcggcgataatcgaaatggtcctgtcttggaacagtatccatgctctgaagatggaggaaatgagggttaatagacaaatactgttcttcttgaagtttaagcctctgaaaattttcttcttcgatatccctccaagtcataggtgattgatagtgagacagaggctgcgaatgtggcaggtaatgctgccgctgagcaggtgagatccctgaagacaagtttggaaggtatccaacttgttgcagcttcctgaacattaccggatcgagttttcttgaatcaaacttgtcatatacacaaggtgagttacttggtgagtggtaagaatggttaatgaacaaaggatggggagactctggagtgtgatttgggattccaaagtgtaagttagcctcggaaaatgaagtggtaaaggcacggtcatcaggaagatattgatcaaccttcttgatggattgtgatctgcttgagctcaaacatatagggaaatggttatagtcgtttcctgaagtaacttttggaatctctcctagaagcttctcaaattcatcaagctcatttcctcttctctgatccatctcgaactcgatactatctacactcactagtagagaaaaatgcaacctttcacctccaaattactcttgacaactgcaacaaagccacaacaacacttaaaagcttaaaaccgataaaacatcgtagtgtcacaagttggtgttcttattcttaattcttattggaaggtttcttataa

SEQ ID NO: 39875 - DNA, 395 bp, Arabidopsis thaliana landsberg
tatgtgttttagcaatcactaaaataatgcaaacattaatacatgtaggtgagttgtgagttcaaataatattagtcaatactcaatagtcactgtaattgatattttgaatggcttatcctatgaaaatttagtactttcatagagagaaaaaaaaaacaaatgttaatctaaagacgacaatttagattttagcagtcgcaccagaactagtaccaggaaacataagataatatatacaggactagctacttcattatctttacgtagtttatgacaaagattgttgtataatcttcatcagctgacttctttatttatgaatgaagtggttagaactcaacttgtcggctaataattcaagcaacccaacacaatgtttgggattatcctgt

SEQ ID NO: 39876 - DNA, 391 bp, Arabidopsis thaliana landsberg
tgtgtgtctccaaggccagtctctcagaatgatcaatcatgttcactgacagttcaatctttagcatcagaagtcgttgaaacttctccagaacttgttaggcttgatctaatgaagggaggcaatgatggaagaaaggtggatccattcgattcttcaaaatcttgtgcatcttttgatgctaaaaactctgacttgccttctgaaacttcatcaattagttcaacttctgaaggaagcagatgtgatagtaccattgagaagaactgtatggttgcttcaaatttagtaaactcaggcactagtcctcaagcgtttgttgatagtcaaactggtaaacagttacctatcgctgatactgattttgagacaaactctatagttgcttgtt

SEQ ID NO: 39877 - DNA, 897 bp, Arabidopsis thaliana landsberg
ctattcatatcaacaaattatatactcaaaaattattatgcctatgtgtttagactccaaagctaatgtagtagaagaaaaaccaccaaagcctaagaagaagaatcgaaggccaaagaagaatatgaagaagaatgagacctccaacaatgtcaataggagaaagagaagaagatgaaggaaaaaaagaatgacagctcaccaccttctttcaatgtcaacaacttcggtgattctcagtttcataggttcttcttgaaccattgttgtctctctctcgctttggcattccatcaaacacatttcgtgcttgactttttatttttcttctaactcccgctaagagtatttgggccgtactattaggcctttacttttgtttctttgacggaccgttatgacttttctttttggggtttattaccaaaatgaacatcaattatctctatctatgggatctcaaatctatgaatttctctctctaaaatgttttcttgttttacaattagcttagatttgcttagtaagatagtaaaaagatcacagggcctgggcttcattcctcattgcctataactctctcaagtctcaaaccaaatcacctcgtagaatatttgcaacgcaaccagtgaaccgaaatcatatagggcttcccaatatgaattctacaacgttattatcttattacaatctcataatcctactaggcatggagtctaaaccgaatcatatatggtttgcaatttcttctcaagccttttgttctccaatctcccctttccttttaccaaaaattaggtaggatccggacggattaaattgtatacttgaaattcatttttcatttcgttaacactaatatgtttgatgtatgtatgtaatataaatagagaatca

SEQ ID NO: 39878 - DNA, 400 bp, Arabidopsis thaliana landsberg
ccatatgattcaggatgatggggtcaacgttcctccacctggggagccaccgactgatgatcctattgctaaggagttcgagcccattgattctggaagcgaacttgaggaagacggtacgtttttctcctctgtctttgattcgattttagattcacgctggattgattagtttttcgaagttggtatttaggaaattcgaaattagggcagaaattagggtttggagtggtgaatttgggagaactaattatacctatgaagaatcttagttcttggaacaaacatcattagttcatcattaacgatatgcttgtgtaaagcttcagattctctactaattcatgtctacgaaactgattttacctacgaagaatcttagtttgctttgatcatcatc

SEQ ID NO: 39879 - DNA, 823 bp, Arabidopsis thaliana landsberg
ggtttcgttttttttaacttaaaaccaatcctattttattgaggttcttactaaatctgatatttacgtgtctcttactgtttcaaggtttctttgaagacaatggagagcaaattggttccaaatcttttctttgcgggagaggtaaacactgcaacaatgcttcaatcattcatttgtgcatttagtatagcaatgcatttggaacatggacacatgacatgtggaagtaggcatccatgtacacacgcacacacatgacatgataaatgtaacatatctttacttgcatttgtgtattcaggtactaaatgtagatggagttacaggaggattcaatttccaggtgcacttttagttatagcattggaatatcttttactcaaatgtattaaacgaaacaacaaaaaccatatcttttactttcctaaatgaaatttcacacctgcagaatgcttggtcaggtggttatatcgcaggcacaaacatcggcgaattagcaagtagtagcagaataagttcgaaagaaagaaaagttactataggattgtagttttcttataagaaaagtactgtcaacattttttttctttttgtcaaaatacagtttctatttatctatgtaggagcattattggacattattattgtagctatgatatggttgcaacacgcacaagctgaaaaggtgtcaactttgtatcataaaccactgaaagcagagtctaagcatttcaacaaaccatttcaatcaatcatggcatcacacagaaggtcttacattagcagagggtatagaaacatcatattccccacaaacata

SEQ ID NO: 39880 - DNA, 615 bp, Arabidopsis thaliana landsberg
gaatcaagcattcctgttaaacaacaacgttcgacgttgttttttgtccaatcggattttagttctgcatatttgcgttaagatgtatcatgtgtatatgaagccaaatatggttaattagagtacaattttgtggtgtttccaataacaaggtgcaaaagaagacagtatataaactctctgtgaaaagatagacaatataaaaaaaaattaaaaaaacaagaagcaaacataaagtaacaatatcttattaacaaggactatataaatgctaaacacacttcctctggaaaggataaaggcttatttcttgaataataaatatttttgtggaccttactgaaattttcatataactaacttcatagtaaaaggtgtggacagattccaaatgatggccacaaacaatccaagtataaatcattatgctaattaagggttttctttttgtcaactctttttattataaagggatcggaacagattcattaaaatgtacacattctcaacatagagacatatatctacgagtggtagaaacttaacaactatgttaaaaacatcctacgaaattctgtagtaatctggtttcgttgtttggaaagaaaaaaaaaa

SEQ ID NO: 39881 - DNA, 287 bp, Arabidopsis thaliana landsberg
atcgcaaaaaagttgatcacctgggggcatattacaaagtatagagcaaacaaccgtcccattagacatcttcaagtatacagaactcgagcagcgggctttacattcattgcagaacggtcgagtgctactacggttgcaaataacttccacagtacttgaacgtatgtcatcgaacttgtagcctggattcatataagcaaatttcccaaatacacactcacagtggatagtgatgttagctttgttacatgtgtagaaccattcctttgggatctaaattttct

SEQ ID NO: 39882 - DNA, 636 bp, Arabidopsis thaliana landsberg
gtagtttacttttgataaaactattaaatatattaactctatatttcactaaaatctatcttttttttatgagttgcaaatttttatctaatgatgttgatatcttatacttaagaagattattaaagatataacatttcaaattatatattatcatttgttcattcatctagtcagattaagcggttaccatttgaactttaaattatcaagctagattttgcaacaaaaaaaaaaaaaaattattatgttagaataattcagcgagattgagttggattttgtaattaaaatatatatttaatagtagtttttccagggcatatgtttttttaatggtaacatgtgtttggatgaattgttgaggagttttggagcaaaacacaattttcaatcataattaatataacaacaaaatgatactaataatgacaatttcttttgcgagagattcatatacttcaaaacaaatttgaatatttgtcgaccagattgtagtatcattcatatgttggaatatctatatacatatagagttaattacatagataagtaatatttaactcagatatgcataataattacttcattcaactatggacgatagaatgacagactatgtgagacaagattcat

SEQ ID NO: 39883 - DNA, 949 bp, Arabidopsis thaliana landsberg
aactccctgaatcaaaatcacagccacacaaggagcttaacgcaagtgttgtttgagctcaaccttgagatacgtttaaggaactttctccaaacgttttttggaacaatgaagctgactctttaggacagggcttatatgttccaaatacattgtattgaaaatcttcttttgttgttgttgttatttatgtcttctttcttcttgttgtttctcccttacacaaatttggaagaatgtttaaactgaatctctatttttgaacatttcctcttctttggataatatttcagttttgatgacaaatattttgaaatgaaaacaacagaagattttatgaaaatttaattattctgcttaaaatactcaaaacctacgagattttgattggtacctagtataattgtagaccaacaattcaacatgatgtgatcaattatatatatatatattaaaaaaaatcatgatttatgtttagctattttgtatgatattgtaagtttttatttatttaaagatattgtcagtttattgacttaactttaaaagaaatttatgaattaagttatcctttgattttttgcagtttgatcaagtttactgagtcatttctcaactttattagatgttcagaaaccagaatgcaaatcaacctaaaattaatattccaaattccaaaagctagataaagatgacaatgatgatgatgcggataagtgaaaacgattcgtggaaaactacaaagaaataaatttcgttaactaatggtatattactgattccaacgttgactgtaaattagattctgtatattcgaattacaaagtttatccaccagatgacaaaagaaaaagtttccactatgattatactcgaatgtctttatgtctaaacgccatcttatgaataaattacagtcagcttgacacatacacacaccaaaaaaaag

SEQ ID NO: 39884 - DNA, 219 bp, Arabidopsis thaliana landsberg
ttacagattactaatgatggggaattaggagaccaattatatcagtggggcactaagtagtcaaaagtgatgaatccagatttatacgtgtgtattaagtgctaggtcgagagcgctaacaagggatgcagcatatatacctatcgttcctgctgattgttcatgtacatagccgtgcgctacacgatgcttattcactcgcaaatcaatgaccatcaa

SEQ ID NO: 39885 - DNA, 1115 bp, Arabidopsis thaliana landsberg
aaacgctctctctggttaatgttaagcctattgtagaagacatcgctcttgtcatcatactttgcttccgaacactcggaagcgggctctaccgcgtcacttatcatggagtaatatctcttaaaagcggtggctcttcctttacgctgcggcgaggaagaagttgacggaggacttgatggccccgttaaaaccgctaagattgcttgcgtcattgcttcttcctcacgttgacggttacggaacaaaggctcttgatgctgtggatggatcatattgatcggagctagcggtggaagtaccggaacgttaacggcctcagtcgtcgttgaaggtttagggatgagtgggaacaaaagagaggaatattcggagacgttgttgggactaagagaagaagaacatgaagagggataatgcggtggccggagataatcggagtttgcaggagaagactttctattgaaatcttcagggaaccattctcgaagacttgcttcaattttcatctgttcttgagtcaatgacatattagagactattatataaagattttagagaaagacaaagacatatatattaaaatcttcatgcaattaataaatgcatatggttttataaaatggaaaaaaaaaaagattcatacatttgtagcatcatacgtcattccgagttcgatctcgccgctccggcaacccatgaatatcaccgtctgatccattacacatttaaaacattaaatttacatgtattagtgagattttgttgaaatattatgaagatgaaaataatgtacctgaatcctggcttcctgcgaccagtaatgaaaatagatgaagaatcgattgttagtgaatatcatagtaagaaaaataatttgaaataaaaatggtgttgtagtaatgcttgtaactaacaatatatgacctgatagaagagacgttgtgtgtcgttaaaagcaagtctttgactctcttgtggtcgaatttctacgtatggaagattgttcatgaacgccatgcttggcacatgcctaaaattataacattgttgattatatattttcttgttactaaaacataaatattggtaaatataaattgcatatacgactc

SEQ ID NO: 39886 - DNA, 840 bp, Arabidopsis thaliana landsberg
gaagccccagtaaacaaattacgtctgaaggttaacatctatctttatctgagagatttccacctgatatttgctaactccaggtcttttttttcattgacatgcacacattaacatcatattttgttttcaaaaggaggcaatacgttttgatgtatgtattatggtgcaaatgtcgtttaagtatgtattttgttatataaataagttcataggggattagtgtatttcagctagacttttagcttcttgggacgatgctaacataactacgtctctaaagtagtttagtcttggaagaagcctttacccatagatactgaaattggtttcttaactgcattgtccttctctagaggtgcattcttgagattatttatttcatacatctagtaaaggagtataatgactattgtatgtttaaatggtgaaattctatttaagtccgctctctgatcctattaccttgtaaagatgatcctttaagctctctttcatatgaagttttgttgaagtcacaataatctttagtctcttttcttttcttactgattctttcgtggttctgtttcagatttaagtagctatgcaacaaatcttatagaacagaatgtacaagcttttagtcaaattagagctaatctctcctcatataaggtaagttatagattaccttgtttaaaggaatgcaaatgtgttcttgctaaatccgctccgtaatgataattgcaaacaggcaggggataacctagatctctttcgtcaggcaaaaaacaaccttatcaccatccaaaatgagtaagttgatactttaaacattttgtgtataagttttatgag

SEQ ID NO: 39887 - DNA, 578 bp, Arabidopsis thaliana landsberg
gagtactccacaataacagaacttaaaagttagttacaaaatagttataataacttgataaaatattctcaaatatgtttaaatggttgcataatttttcttccatttctattttcgttcttatgccaaattttgtgaactgtaataatgttcattataatatcttaaaatataactaaattacatacagagagagtagagcaacctcaaagcacacaacacatcctctctttcaaaagacacaatcaaaagtctcacaatatttcttaacctgtgatttatttttctttttaatcctaattgaatacactagagaggtttagacgcagcattgtctatgtaagcctcagcttcttctatagagaatcttccccctttcacaagtccccttattaaagtgttggcataggcttttgcaggaggtctatagggatctcacccgatttgaatttctcaacaacagaaagcgtgcaactgcaaaacacaaagttattgagaaaaaatgaaagttgaaagagagcattcgttagcagtttaagactctgtttctgagctagcaaggaataacgaatgatgaa

SEQ ID NO: 39888 - DNA, 804 bp, Arabidopsis thaliana landsberg
tattactacgtggctcttgtgcccacttaaaaagttgtctagctaggtaaaaagtaacttgccacatatgtatggttcgatctagatccttctatatatatatgtatatcaccgtccatacaagaacatcttgagcaattaaccatcgatcaaccgctttcagagttattatgcaaagtaataaaaattagaagcaacgaatttaaaatgttatcgaaccttccggtaagtatgtataggtacgtcattcccttttgtttcttataaccgttcttcgagatttaatttgagacctattttggttatataatcaatcattaccagttgactttcacgaaaccaaaaatatatattgaacccaactaaaaggtgattttataagccctacatgaaactaaactaaaccggcacattaaaccaaacaaaaatgtaaaccggcatgtagaaagaacctttttaatgataatttggactcggatctcaaaacatagttgaaatgattactaagacacgacaagtgtatggatgtgtgatagtggtgtgtcgaaggggttgactttagatgaaagaaacatcaaagagtgagagtgaactaataaatgtgtagataagctctagctaatttggcagttatccattcttgtggtgaatttcggttataatataaaagaaagtataaagaagattaaatacatggcactctaaatttctcagaaattttggctgattgattttataaagttgtagatccaaaactaattcatttcttaatctaagactgctgttgttagtctgcataagttt

SEQ ID NO: 39889 - DNA, 589 bp, Arabidopsis thaliana landsberg
atccgccatttccgaactccttgcaacttcatggtcatcatgggggacatcgatttcgcaagttcgatccggttattaagagcttgtttaatttctatcttcatagcaaaacttccaaaatgcaagactaaacttataaacgctgctactcccaaagaccctcctggttgccctcttggttacacgttcgaattccaagacattttgaggatttgattgagtttttttgcattggtttagagctttctccacatatctcttatttatcagtgttcgttttttttttttttttgagaaatctcttaaactttagtacctataacatattacatgtcaaatcttctgtctcttaaaaacacatcttgtgaatgataaaatggagtattaaaggatccatatctcagtatgcagaaatataaaaaggaaaaaaaagaaagactaacataaggagattatatatatcatttgattggttaacatcacaatcaaacatattaaaacgtgatctaacccaaattgaaaagctacaaaaagaaaattaaaccgtgaaaatatcctcctttttcgtcttaacatttccaagctgaga

SEQ ID NO: 39890 - DNA, 699 bp, Arabidopsis thaliana landsberg
gtgatataattttgttctgaaatccaatctatataagaaatcttgtcagtgacctcgtaattcttcaacttatggaagtaaggtttgcgcaacttagatttgctatggcaattatacagttgagttaactcttcctgtaacatataagcagcagggactacttttctaacatcaccagagagggatgaaactccttcgaggaaaggtgtctgctccagtagaacaagaacaattataaatatagatacaagtgacaaccttttttcttaagtattgtaaaatgcttagggacaaaccagtctttctccataaaaccgatgtagcagcatggccgagatcatcatacattcgggtaaccatttggagaaaactgggacaaactcgttgatctctacttttgcgatgacggtatagttcatttgcaagcagagctagagcatgcgtacgctcaccatgagatttcacgtaagcaaaatgcgcagcctaggaggataaaatatcgaattaaagtatatctttacatcataagatagaacgataaaagaagtggcttatacagtatagaaaattagaaatacaagtaaccaatacaaactgaccctggcacatgcacctttgatagagttctgaacataggattgtatcttatcactaacatcatcactcaaggtaatcagctttgatagctgctaaagaaaa

SEQ ID NO: 39891 - DNA, 336 bp, Arabidopsis thaliana landsberg
  unsure (1)..(336): unsure at all n locations
tgtttcccaattccaattatattttgagaaaggaagagtgngacctcaaggctctcaagttttcgggggagtttttttcaaaaagatataggttttataacataagtacatgacttcatatgtacttgagatttgaggaaaaatgtatgctcaaacgatacaacagcttaaaaataaacttctcaagattcaagaatgacagagtctcttagacaagagagaaaccactgtaaaggaagaaaacagagaatgttcttttattgggcctttaatcaactaggcagtttcgtttaattaattatccaaacgaatggtctttcttattttattgggcct

SEQ ID NO: 39892 - DNA, 496 bp, Arabidopsis thaliana landsberg
  unsure (1)..(496): unsure at all n locations
nnnnnnnnnnnnnnnnnnnnnnnnnnnnnnnnnccacgcgtccgataaattcaacgatagctatagttttaaaattaaccatttttttagttgcaactggaacacaggtttctttcaatgaaataatattaatatcaatttaataagctggtaatgtaaaatactgctaatgttaatatgaagtttggatggtcttattggcagaagatgctaggtggtgttcatcaatattctgaaaggtaaaacgattttggtttttaatgataatataaccatgaatctaacatcagacattgaacgctacacatcaaaaataaatcgagccaacgcatttaattgtaagtgtctttatattacctgtgttttgtgacattcttttgcataattttggcactaagtcttttttgatagaaattgtgaagatgtactgttatcattgtatcaactatattgtgcccttctttttttacttgatttgcaaacacgggttcttttc

SEQ ID NO: 39893 - DNA, 229 bp, Arabidopsis thaliana landsberg
attttaaatgataaattcatttaatatgtgataatgataactaggcttccatgaatctatgattgtaaaatcatgtattttagtttatgatattccgacgcattctttaatttcgtgcatagcgaatttgatttacatttttctacaaaatttttatttttattttttggtatatacagaaattgggaggatagtttggttaccaacaaaaatatattattgggagggg

SEQ ID NO: 39894 - DNA, 655 bp, Arabidopsis thaliana landsberg
caaatgcgtattattgattttataaaatttgttaaaactgatgtaaaaacaaaatatttgtcaactctctaccttcgagattaaactttctgctgtaacgattattaaaatttcaagaagcttcgaacttttgtatcagtgtccatttaaataatctgaccctcatcatccctccagtttgataaaaatatgtgttcatagctttcactttacttgacttcttcgtttttgttacaatttcctagcatgtgttaacatagaaacaaatttcaggtttagatgcaatatagtcttcttaacagtgattctcgatgtttgggcatgcatacaaaataccatcacaagtataaataaaagtcattaaaaaggtataatagaagtaatcaaatatgagcattataaatagatgagattgggtccaaagttttaggccgtgttttgctctcttgaaattcaaagttcacatttattagagagagcaaatctcaagtaagatatcaactttaagctcacataatgcagataaccagacataaaaatattttacaagttaactgtgacaatgatacatatgtcacaagtcgtatttattttggggacttcgtggcataaattggttacaaagttacggtgggtgaccctgtttctttttcac

SEQ ID NO: 39895 - DNA, 541 bp, Arabidopsis thaliana landsberg
tatacaagttattaattgggtttgaaatggtaaccaaaacaagagaaataggtgtagatatggatatagttacggtttattttttttgaatcattaattaaattctgattatatttactagtactattttttttcctcaatttgattcaaattcattttcagcttctttaaaaaaataagaaaacacacttttcttaaaaattggacaattaaatccagttcatgttaaaatcggagattaattaatccttttgtagaagttgaaaattgaattaccctcgtataatatatttacacaaatgatattcgtataggaaaaaatgaacaaccattaactgttgcttctttttctttctttctaatcggaagcacaaagagaaatgagaatcatcatcttcttcttcttcatggaaaaagatcgatctcgatcaaaccatcttcctctgcatgaaaatcaatctctgttttactcatcatcttcctattatggctataatgatcgagctttatctcaatcaaaccttcacatccaattccaccc

SEQ ID NO: 39896 - DNA, 670 bp, Arabidopsis thaliana landsberg
aaaaaaactcgacgacaaaccatatgggttctttttgggtaaaccagctttaaaacttttgttgaaatatgcaagtgttggagacttggagtaatattttgattgttttatttattctccaccaaccgtactaaacacactaacctaatttgtttcgtactaatcctatagattgtaatgttttatctactgcaatcatttagtactgttatattccccagaagttctcttaattttctcttttcggccacttaatgtcttaacgttgcaaaagtgacttataaatcccaagagatcagactatttggttaacgttacaaatttaatcttcattttaagagagtcgataggtgatgtatcatgtatggtccaaattaagggacaatccgaaaagccaaaaaaaagttaaacatgtgaaaaacatgatggtttaaattcatactttaaattgatgcgaacaactctctcttttatatataccgactattttaaattatttgtttttttgtcagaattattttgtataatatcccagttaataaaaaatcatccaattttaggttgaagtatatatgaaaatttcccacttcctcaatagtaccgactatccatcatatatatatttagcatattgttttggattcaatttaattttcttagtatagcatca

SEQ ID NO: 39897 - DNA, 362 bp, Arabidopsis thaliana landsberg
gtctttgggcacccggacctgggcgaaggagaaggtgccgttgtcgactccgggcagcccacccttgggtccgttgtcgccgatcgtcacgccgggcaatggttttccggcttcgtcgcgcacgggcacaagcacggcgtggacgccgtggtcgccgtcgtcggtgaccagctgcgcgaagacgaccgccatccgggcgtcgcgtgctgcgttgccgatgtaggtcttcacggcactctcgctgggtgtgttgatgcgcagctcgtgggtcgaatcgtcatacgtggcagtggtttcgagtgcttgaacgttgcttccgtggccgacctcggtcatcgcgaaggagccgagcaaccgcccgg

SEQ ID NO: 39898 - DNA, 406 bp, Arabidopsis thaliana landsberg
cttggtgtttttctactcgtcgtggacgtggacctaacgtcgacagatattttgtgtgttacccgattgatttagtgctttagtttgacgaaacaatagtatgtgtggcaacttacatgtctttttattcttccaaatacgtatggtgtttgaggcttaatttgttttgaaaagtttctactgctccacttgtttgcttgaaaattaattcaagatttccaattttgtcctaattaagttttgttacgtaagaccttttgtttctataaatttgttaattatgtagactagactatattcttaagagcttttttatgaccagactatatatactttaaaactttaggttgttgaatatgtttaatctctttgcttaaaatgcccttcataaattttgtaggaaatg

SEQ ID NO: 39899 - DNA, 717 bp, Arabidopsis thaliana landsberg
ttcctcctgtggcgccacttaatggaaagaccgctggaatacacagggtttctggccaacaagctgtggtgcagccttctcctcctgtgccgcgactcaatggcaaaattgctggaacacatcgcaaacagaaggtgtttgcccaacaagcagttgtgcagcctcgtcctcctgtgctgccacttaatggcaatatcgctggcacacatttcagacatgagtcgtttggccaacaagctgtgttgcagcctcttcctcctctgcggccagtcaatggaagtattggtggaactcattttagagataggttgtttgaccaacaagtacttgtggagcctcgtcctcttctgccgccattcagtggcagtatcgctgaaacgcatttcagacataggtcatttccccaagaagcagttctggaccctcgtccttctgtgcagtcgcgcaacgtttactcacaacaacttcaccataactacagaaacggtttcagcggtcctcctgaagaacattacagcaaaagactttgtttgggaaaccgctacagagctctagaagaaacgggtcactgtagagaggaagagagatacgaagatcccaaaggaaaacgaagcaggtatgtcggaaactttaatgggttagaagagtttcgtgaaatcccccggtttggaatccatagtaaccctttagatgatccttatagacaagtccatttga

SEQ ID NO: 39900 - DNA, 709 bp, Arabidopsis thaliana landsberg
tgcttttctgtacaagagttttcatgtctgctttctcttgctcggttcatgatacattccaatgctttcaggttgaaggctatagagaaagccattgtgaattctgatcttggtgtgacccctaataacgatggagatgttattcgactgtccttgcctcccctcacatctgacagaagaaaggtatctcttcctggcatataatctctgtcagttgattttttttgcaatgtgcattttctaaactgccgtattaccttttaattgtaccactgcaggaactatcaaaggttgttgctaaacagtctgaagaagggaaggtcagtagtagtgtttgcctatagtgtgacttaaaagtatttgggattttccacaaaagtttgttacttttagggtgcataaggatgtgctaaaacttcatgttcctttatttcagcccttcttttttcgtatttggattcttataggttgcactgaggaacattagcagagatgccttgaaatcttatgataaactcgagaaggtgccaaccctattttagttttatttttttcttgttggccattccttgtgatcttattcgttaaaagtcgaagcttcatttttgtaggagaagaaactgtcagaagacaacgtaaaggatttgtcaagtgatttccaggtaaaccaaaccacacaggagtaggtttgttcactcctgtagagcac

SEQ ID NO: 39901 - DNA, 662 bp, Arabidopsis thaliana landsberg
gttttaaatgtaaagctaccttaatcttcaaatctcttgccaattcattgaattcattgtacaccattgtgcacataagctttggatcaataggcttaaaaccacccaatagatcaactatatcactttgctggctcaaattctgcagaaaagtaaactagaaattatagaaaaccactacgataactacgtgactacaagaatgtaagtcaaaacataccaaaacagtgagtttctgtccgatccagtgtgcaagattttgaactagtgtcgttttcccagtccctgtttctcctactaagagaactggctcattgtactcgacagagcgagctattttctcaagtaaccgtgtagatgtgcgtgtttcaacaaacctagaccgatcatgtgactgagataaaaaaaaagcagatcaacaagaggcttcaatagatgaataattgtataagaaagaagggcgtgcttataaactaaccgcagtttcaccaagtggaagagaaactctaccaatttttagaatcccggaaaattcctgcagttcaatgaatatttagaaaaaaaaatctcaaagcagcaagctaaaacactgtcaaggatactaggtacctgaattgggggcttatcatgagattctggaacagcgacattccaaatactag

SEQ ID NO: 39902 - DNA, 596 bp, Arabidopsis thaliana landsberg
gtatgtaatcaactaatcatgaattaattatcatcccttttggtttgtttgaatgttattttttttcttttaattacattaaacagtttatcattatcttcgatttcaggtatattagcaacacactagccacataacacatgccttaagattgaaagttaactacaccaatcagtaacaattctccaaaagaaaatagactgaatttagtttttttttttgtagctaaataacccgtggatataatccataacattagctataaaactaattcatggttaagaagtagctagttatctacgaaaaagcacaaatttttattcgctatttaatttttgatttttttttagttgaaatatctacaaatttatccgcgactatacgaaatcctaaaaccaaacaaattttggaattttgttggcatgctcaataaatcatagtatatctgtgtataatgtatacaagatagattgaatattgatactcacttacgtggaattgggcaaaagaaattggacttgacgttcaagtcttgaacatagattaatgaaatgacaaaaaaacgaagttcaatttgcaaagacaaagagatccac

SEQ ID NO: 39903 - DNA, 442 bp, Arabidopsis thaliana landsberg
ggggtgaaggacgggcggctttggcgttttgtcctgaagacggacagcgtgtctcaggttgaatcaaagttcaggagcatcgcggccggaagattggcatcggaacggtgaacggcgggttttattccaaacaaaaaggaaatcttccgcgaagttgcgtttggatgagtcgccacttgctcccgccgcggctttgttggtaaacacgcttgtgcttcaatccggccgcgaacgacctgcttcccgcaatccctgggcctggattcccacgttgtatctggcggaaggactgccgaacgcgattgtcaccacggttgccgtcgtgctttacaaagcctttggagttcccaatgccgagatcacgttcttcaccggcctcttctatctgccctgggtcatcaaaccgctctggagtccggacgtcgatctcctgaaaacccgc

SEQ ID NO: 39904 - DNA, 586 bp, Arabidopsis thaliana landsberg
ataatatgcaattcacaatttatcatgatttttaatctattatctatgtatcatgcaaaatagcacctaaaaatatgaaggtgaaataagtcattcatgaaatgttttaaacaatattaacgataatggccgttttggcagtccatatagacgaactagaatgtcaaaaatgattccataaactattttttctgtgttgacccaaaaataaaaactactagtctttatctttctaaacatcaacataaacacaaactctattgaaacgttttctaaatagattttattatcatgcttgaaaaaaccttcctacgatgataaaagcaataaataagcatttgtttataataatatactgtactacgtacaagtacaaaaaccattcaaacatatgtaagatcccgagacacactaatatcttatacgtggatcacaatcactcgtgtacttgcatgtcttagcatcattcattgtccttaagttatctagtgttgcttgatgtgtcaatgaagtggtgcatttgcattgcccatttatacatagaggtggccttcccaagcagggaaagtttacacagtcatatgtt

SEQ ID NO: 39905 - DNA, 456 bp, Arabidopsis thaliana landsberg
actaaatctcacatctgtatcctctccataactaagagttcaagaagaaaaaagcgtagagattactggttatgtttttatcttagtctcagagagttcgcctgagagttaccggtccatttaataagaaaagctttagtttagtcatcttcatcttcatactccagttcatcagaactacctcctcccatcactgatacgtaaatgacgacagctagaaactgagcagctagaaagaaccttgctcttttcttaaattttttctcctcttcggtcttttctacctttggtttgctctttggcttcgaacctgaacaaaagatgaaattcacttccttcacaggcttaaacatatccaatgaatgttgcatatatgacagatatataatatgatgaaatatatatgatatggacgttgaaggttagatgtgtcttactctttcttggaaatgagga

SEQ ID NO: 39906 - DNA, 931 bp, Arabidopsis thaliana landsberg
aaagttaaagccgagagccattagcaatccaaatatgaaagattcatgaaacttaaggaaaactgttgaattgaaatatcataactaataattttgagtcaagaaaatgttaagaagaatttcagaccaatgtattttgtttgtatctcttacttagagcatccccattggtgagataccatgtaggtatctcaccaaattaatattaatatttttatagaaattgtttttgagaatcctaatttaaatttatatctccattggtgtgaaatccatttaagtattttatcaatataattttattttattaatgttaattaaattaacactttatctaaattttcattaatattctcatagacatttcaaattatatcttaaatatatccataatctaagttataaaagaaaagaaaacactagaaatatcatgggtaacaatagtaaagacatgaaatctatataaataaagaaataaagtaataaatatacataaatttatcaaagaaataaagtaataaatatacaactcacatgctatatgtaatttgttacacaagcgtatctcaacaattaagtgaataacatatataacatatgactgaaaaaaaatctaccaaatattaaatattctaaaatgaacaaaaaatgatataggaaaccaaaagaatgtaaggattattatttataatcaaccaagaaaattggtgaccatagacaaaggaactaaacaaagcccttttttcttcaagtctattggtagtccaccttggtttggcactgcactcactcttttctcctatgtaagattatcgcatcgtaaattcttgttagaagtcggaatataattggtataacatatgattgaattaactatactaaggtaaattatatagttaatatgtttcttacatcatcacccacaatacca

SEQ ID NO: 39907 - DNA, 211 bp, Arabidopsis thaliana landsberg
  unsure (1)..(211): unsure at all n locations
ggaagnaccgcccgcggaaccacaaaagccacgggccaacgagccaaacggcaaacggcacagacaagacgcccagacgccacacgaggaaaancacaacccggcggggcaaaaagcggacacgcacccgaaaaggaggcccaagccaccacacaaaacaagagcgagacagagacggagcgagcaancaccaaccccaacccaagaaaag

SEQ ID NO: 39908 - DNA, 832 bp, Arabidopsis thaliana landsberg
ggtaatgggatgaccaataaatctagattttccaaggtgataatactaaaatacgtagaaatggctgacacgtggcaattaaaatggagaattaggtgaagggtgttgatctaacggaggtatagatagtatataggattgagatgagatctttcttgcgtttcacatagtgtttggtcaattaattaatgtttttaatagattcttcgaatgttggtagcgatatagtgattgtatgtatcgcaagcaaatgtgtacctagataaactattcgcattttcttttgttttcgcgaccgaagacgattgcttatgctaaactgcctaaaagttgcaaattgcaataattccggaaccccaactaattctaccaaatataatataaaacttttatttgataaagtagctagatttgtatttgacttaggaatataggaaccccttttagctatgaagactacacacaatttcaaagttatttttctgtatttcttgattatttagttggtaacggtggaacattctttaccaaactcaaataccgtgtttggtctttgtttcctctgttttattcacagtatacagaagctgataaaacatttttgttttgttttgtaaagggtggagtggtggtttaagagaaatataataaaaatcgtcaagtttgttgctaaaattaaacatgcatgcgaaaattacacgagaatcataaagatggtgtcacatttcaaatactatttgttaagaaagtaaaaatagtgatgtctttgatccatccagggaaagaagaaacagatcaaaaggttagggcacttcctcttaagtagtacttg

SEQ ID NO: 39909 - DNA, 807 bp, Arabidopsis thaliana landsberg
accctgatcttgaacgtgtatgtttcttcacattctctaaatcttcttagttaatacatattatggtctaatttgtgacagggtctctttttctatttgaagattgactggcttaacaagcttattggccatatgtggccttatatggacaaagtaagtcttcttcttagctttcatgtttgttttattgttgtcttttatcttcttcaatactgtaacttgttaaacaatgttccttgtaatgtttatttcaggctatctgtaagatggccaagtcaatagccaaacccattatcgctgagcaaattccaaactacaaaatcgattcagttgaatttgaaatgctcactttgggttcattaccaccaagtttccaaggtttctacttttgtttaatactcatagatacacatttcagttccttaattagttcatgaatgtttcgctgtgatattatcactatcattcgcaggaatgaaagtatatgcaactgatgacaaagaaattatcatggagttgtcagtgaaatgggcagggaaccctaatatcattgttgaagccaaagcactagggttaaaagctactgatcaagtaagtttctcatcgctgcatcgcaagaaaataagtaactattgtctgattacttgcaaggaggcttcatcacgggattgaattgcacgtttacgctactacaaggattactctgaagcctttggttccatcattccactgctgtgccaaaatattctgtctctcttatggataatgtatactataaaccggaccaaccttatattgcataatacc

SEQ ID NO: 39910 - DNA, 606 bp, Arabidopsis thaliana landsberg
accaactaaacgactcacgagtgcttctcacgtggtgtcgacttaaacctctctcaagtgagaccttccgctttaacgagatactttaacctttatagcacaagtcttccatcaattttttatttcaatcttttttctaaaaggaaaagacattcacaaaatttgagaggttgagaagaaatagacaaggtacgctggaaaagcctgccacgtccgaaagatggagattgacgtagcaaaagaaaaaaagaagcataccatgtgcagacccacctaaatctccaaattcccactagaatctctttgtctttataaatcctttttacattatgacatataaattttcctctagaatatacaaaaaattttttgacacactttgtattcttacatgaatttaagtagattccgtatcgatcgttgttaattgttatagttgcgattacgtatataccaacgcgtaacgtatccaccgataattaaagataccaaacacacgtacattatattaaaaaataaatagtttacaaattctttacctattttctttcttttcttacctaattaatttccctaataatatattttccatagacatatacgaaa

SEQ ID NO: 39911 - DNA, 271 bp, Arabidopsis thaliana landsberg
gagccagcatacgcgtcactcttgtgacgacggcgatgctaataagagcctttctcagcacgctgctcttctcactacctacctactcacgtgttataggatatgtgtgaccttactacagaaacgtgactgatgaaatagctaccatgtatcacgagcttagcttatgacttcgcgctactttaaagcccaaagacccatgctgcgacaagccgctagtgtggtgacgtgaaaatatggacgagtggcttgttagtcggttaggctttat

SEQ ID NO: 39912 - DNA, 474 bp, Arabidopsis thaliana landsberg
gccatagttttcatgtaatcagctgagcgtttatcatattgatttttagttattgatccgatacattttgaagctaacatgtaaaattctcatgatcacattgacttttgcctacaaattttaaaagagtatacaaataattgcttaatgaagatagcttccatagagaaagagtaacagctttatacggaggcatagctttagacacgatctctgctcttgtgttttttgtttaacactgaatccacagtgaaattactgctcattttttttcatttattacatttttttttttacttttttatttattacaatctacagttctaccaacttattcaacctagtggtaccatatcgaccccaacattaatcaatctaattacaaggtagaaatagaaagattttatcaaaggagacaactctgatcgataatatgttgcaataaaaccatgaaaaactgtaaaaaatattgaa

SEQ ID NO: 39913 - DNA, 170 bp, Arabidopsis thaliana landsberg
aatcgccaatcgacatcaaatcctaaagtgccccgttaagttttgttgtaaagtcaatgatcataaaaaattattattatagagtttaatatggtaatccatcgaccatttatagacaaaggcccctacatatttttggataaatgccgaaagcttatatattttatgac

SEQ ID NO: 39914 - DNA, 421 bp, Arabidopsis thaliana landsberg
tataaaccagttctctacctatcaaagacaaattttgttttggtaaagcgtagttcgtccaaatatgatattttctttagtatttcaggataacaaaacaagtggacaatcgacttactcaacatgaaattattttactctagtttagtttctttttaacatattttttgtttgtttgtttggtgtaaaaaaagagtaaatcggagtaatgaatttttgtttaatatggttcagccatattacaaatttaaaccaatcacacccataatttaatgatcgaaatagcaaatgttataagaaaatcgaataatataactaaataaaaatcttaacactaaaataatgacttgaccgacaaaaaatgataactgcaattagtagtttgataaattttattagtgatcaccatattagatcacat

SEQ ID NO: 39915 - DNA, 474 bp, Arabidopsis thaliana landsberg
ccccatagaatccatgtttccccacaatgatatatattatttttcgataatgagaaaacattacattttaatacaccaagctttggtttaacccaacgattgttctgcctcataaattgactggtcatacaattagaaacttgatggttggacgtattttgtttccaaagccacctcttcccatttcccgattagttcccactctttattgaatgaatagtaccatctttagtatatgcccacggctcaggagaaaaagatctaattcgcataccgatataccatcacaaggagggaaaagacttagttaagagttgtggatcccattatacttgatcccttattagatgagacatcttgagattaaatcgattaaaaggttctttgttaaaagcatcaaaaccccacacatccatccaaatgctagtatagttttcatctctgatggattacagaagtccacattccaacaac

SEQ ID NO: 39916 - DNA, 323 bp, Arabidopsis thaliana landsberg
agaaatgatcttcttgatggatttttcttcttcttgccgcttggaaacgacgagggccgggtttttgagaagagagaagaatgttgccgtttttaagaaagaggaaagtgtttgctctacgaagctcctctctatatactagttttcatttgagaaatcagaacactacaataaattattctttttaatactattgaccaataattggtcaattttttcgtatcaagttcttctttagaacaactattggtcttgaaattcaagaagctgctcctcctataaagcaaaagaaaatctggtatcttacttctaatagatatctt

SEQ ID NO: 39917 - DNA, 315 bp, Arabidopsis thaliana landsberg
cagtgattgcatggcaaagttaggcagggttggagccgagggacaagcaacaccttcgtcaacaaaaccattgagtacacccagtgaatcctgaacatcaccgaaataccttacttcaacaccgaatttggtaccggcaggaatcaactggttgaattcgaaaccaactacaccacccgtcagccagctggtttgaccggtgaacgagctgttcatgatcaggttcctggttgccagaacaagagtagtaggataacctgcagatgtaagtgaaacaggtttactaccagggtatcgttcattccggaattgttt

SEQ ID NO: 39918 - DNA, 574 bp, Arabidopsis thaliana landsberg
  unsure (1)..(574): unsure at all n locations
aaactaacacttttatggtatccctttttaaaaatactactaagagttaaaaaattcaaaaatatcattgtatagcatgtattataaacaatataaaattttctacaatttgtaaaaccttataaacattttataacatgcattataaaatctgtaaaactctataaaatattttgtgaacatgctctataacagtaatatttaaaaagtggtatcagaaattaaaaattaatagaggtatacagttgtactatatttaaattaacataaatgaagatatgcacacaatcttagatattttttgaatatttaccattgatttagtaaaacattttgtcttcacaccaatatttatatagagaaattaattgaaatgattatactcttatagatagtttctaatttatataagaaatattttaaatttaagtaaaggcgccacatggtcaaacgttgtcttagatcctccgaaatctatgcaaagccacacacgtgagtgatccatctncactggcacctaagtatggtccccgaatactgtcctgcatagtatcaaaattgaaactatggatag

SEQ ID NO: 39919 - DNA, 781 bp, Arabidopsis thaliana landsberg
  unsure (1)..(781): unsure at all n locations
aagagccaataagagtaatactaaacatgtttctgcaaataatacctcttgttccaagcgttctgatactgatttagagcaagtaggggcagaagctgccttcttatcttcctcaggctgttgaattaagaacaaaataaataaaagtttaaaaaaattggaatacaaggatagacttgatcaagctaaacacaatatgagctcatgtagccagattgttccgcattaccgcatcaagtttcacaagcctttgctaacaagcatgccagaccagaaatggtagtttatttagataccttatttggtggaaccacatatgatatcggataagataccggattatcctttggattcttcccttctttttcatcaaatgacaatttcccatatgagatttctcccaccaacatagatccttggggggtattctgcaggtgaaattaaaattgtacatttgagagagatatgctcatttgatcagaacatcaattatacaacaatctattaaaccttgggtagcttgtcctttgttggtgggcccagataaaatgcttccttcaccctgcagggtgataattgaggtgataaacacgttcagagaacaaccaacgtagcaaccagaaaagtataaattggtaagtgagccaaaagagtaccctggcattagaacagaggacttaaaggcaccatttccagtgaacggaccatctggttcagaatgtaaattcagccgaatctcctgcatcgncagcataataaatggaanaaaatcagctctttt

SEQ ID NO: 39920 - DNA, 928 bp, Arabidopsis thaliana landsberg
  unsure (1)..(928): unsure at all n locations
ggaacaggtttgttgtagattacaatcgattttacaataacattaatttgtagaatatatacaactttgaatactgttaaaaccagaaaatatttgttttatcgaaatgaaaatacttgaaatattgcaacaaacacattttattttcatctcgcaaatgatttttttttttttttaaataaattttagagtttgattaatattctaatacacacttaataaactaagaaatattattggttgcaattgtgtgatattaaaataagccgacgacattatagtatgtgtgtccggttcctactctcaacctaattttcccctttaatttgacagacaaaatccaactgcatatatgcagttacattttaaattgtatatcttatatagttaagcactgatgtttgcgtatataatatacatctagagttcatgatacaaactgaagatatcattaaaaaaaaaacctaactttttggtatatatagttgtcggacataaactatcttttctatgaaagttttattcaagattgtgaaaactcgaactcgtgagctttagaagattgtacctggtttaaatcatcagccaatgcctggatattttcacaagattgtgcttagagacaggcccaagttagggtccatgtatcaattggatattatagtatcacggaactaggtctgaaagtctcatgctaattatatatgtgcttatatgatgagagtacattacatccatagtctcttgtccatagtatacactcgcattctataatataatttcgtaaagagaagatatataataatagcattcatctgtccatatggagcagattacttttaaactgtcaagtccattacaaacttaattgcagcatttgtttaagccatcttattngngtcagtactcatacattattcttgccata

SEQ ID NO: 39921 - DNA, 688 bp, Arabidopsis thaliana landsberg
aacaatcttaacaatccttctctctcttaatcttgattgccataagtcaaacttgagattatttaattactatatggagcccaattatcgcatgtaaatgaggttaatataaataggcagatttaaactaacatatatgtcaatggaatttgaataactaagagttgtttactatttcacagcaatgcaaatatacaggttttaagaacaatatgcaaatgaatttaagggatatataaaaagttcttaaagaaaattccatagccacatatataaagaatttgttaacttaagctatcatatacttctttttagtataaactttttttgaaaaatttgcatgtgagttcataaaggtttcaacgagttcctaaataaaatctagctaagaggcaataatattattagatgagtatagtgaagaccaagtgagtatatcttttggcagacatatgcaaatcttgtgaatatgattggattgatattattcaacggatcataaagaaagagcttgattggaggattaaacagcatataaacaaatatgatattaaacaaaaaataacatataaaattatagggaaagcctgcacaggtaatattgaccaacaatagcttctttctaactagacaaggccatgtgtgttgtaggacctcccaatatatattttctataaatatttcatca

SEQ ID NO: 39922 - DNA, 1252 bp, Arabidopsis thaliana landsberg
cttctatcaaaattttgtacttgtatttatattgtttttgacatgtgctcagcatctgtatagaaccatacaattactatacaagccaacatgtcattatagaaccataatatataagtgtgaaaacttcgcctcaaatattttaaaatgtaaaaggaaagaaaaatattttaaagtatgcgacttttaccgaatttaagcacgtgtcaataattggtatagttaaataaaaaaaaaacaaattcgtggatttatacatagcgtacgtgtaaatcagtgagaagttttctttgggggaaacaaaaaaacagtgagaagtgagaacaatgattaacgcggctcaactatattaagtgtgaaaccgaaacaaattataaatgattgtatcttacatatcctttaatatatgttctacatgataaatgaagtttgatactttatttttgcatccatggaagtatatccgaactattaatttgatctccggtttatatatatatatttatttatttatttatttttaatcaattcggtcgacaaaaatttgatcaataacccaattcttattacgagtaggtagaatattgactaaaataaaagtttttttgaaagtatcacatatgagttttttgtatatataataaacaaaagtcacatgaagactttaatttgtagaagtcccaaaacatttgagatatgatcctgaggatctccaataattgtcttaatcttgtaaatctgtggctgaaattgaaaaacaaaaacaaaataaaagatgaaaaaaaacaagataaggttgatgttgttgcgagtctttcttgggatgtcttatggctgtcccatgtggagcaacatgataggcctgaaatatagagattttaattccaaaagccattttttactctaatagatctatctttttttttgttaaactactttaatagatctgtcaatgtttttttccagattaattcgtcccaaaaatcccggacagtcaaacagagatggacaaccaatttgccaagacatgtaaagaatattgaaagtacaaaaataactgtcgtctgtgaagatgggtgagagatcgagatatccatacttgaaaaggatatgtttcaactttgtttagttttattttctttatacattttaggatgtcatgttgtgtatgatatgtatattctaattctatatcggttcaagcttctttgtaaatcagattttttttttaccgtatgtggacgcaaacaaa

SEQ ID NO: 39923 - DNA, 697 bp, Arabidopsis thaliana landsberg
ttacgttggtgcattgttttggatgaaagttctgtaaatttcattgtcatgactagagtataaacccatctgttaagaacagagattacatatatttaattaccggaagaactactcattgtttggtgattctagagtctcaaacaaagtgataactactcatgatttggtgacgacaataccttaaaaaaaatagaaccgataaaactttcagaatagatctgttttttgctccttagagattatttgcagttccttttggtgacgaatatgtatcatcaattgacactttgtttgagactagggtggcatacatattttggtagtaatggtaaatgaacattttaatttaatgtcgacacattgatgtccatacctatgctagaatgtatttgtttgcatatacaatagtttgtttggaaatagagaaatttccatttttcaaatgtcaataaaaaaagaagtcaactaacaccctttaactgatcttttttgatgggtttttaatttatctttccttctatttacttaaactctgtgaagtctttatcaatagtttaatcttgtggtggacaattgtatctgtagcccttctttgccatgccgctgtctgtgtcttgatttatgatagaacactcaaaagtcttaagttcagttataatatggaataacaaatttgtggccatagcataaatgt

SEQ ID NO: 39924 - DNA, 1415 bp, Arabidopsis thaliana landsberg
tgtttgaaaaatcactaggcatgtttggattccataccaacatgtttttattagcgactgtttaatatatccctcatattatagtagtaataatataatatagcccttccctaatagattggaatgtgattatgaaacaatttctaacgatcggaatatcgcgcgtactcgtacgtttataaaaatataaagaaaagattatttaattaaatcctcatttgatttttctaattctgtcgaaatcaactaaagcgttgaatatcaatgaccgcctttatgttttctatttagtaatataaaaatgaagtatatgacaaacatatagatcaaatatgtttttttgttaataccgcatgcagcacataattgaaaagaaagcttgtattccggatgtcgatattttatacgaattgtttttccaaccaaaggttctattcaaaaaactttattttgaccatcagaagtgtttaagaaaaagaaaaaaaagtatttaagaaagctgtggttcttcatatttttaatcattacttaacatttaatattttctatgagaatcgaaattcgtgtcttccaaaatacctatattttcagcttacatggattcaactactagtacaatcccacgttaatttttttttcatttcgtttgttttctattgtttgctttgttcgtttcagccgtatatacactagccatattaattttggtttgatccggtattccggttgcttgtttgttatacactattatctagctgtcaccattgtcataggagacaagtgtggttatacagtttttcatgtgtaactcacgtgaatatttgtgtaatgatcatattacgacaatataggagatcagatttgcacaggtggatatgcatcactgcgatcctgcggctttggttaaatggatcaggacgagattacaccagtgggacacgaggacaacagtgcgacaaagatttgatctttgatttattttcattataaaactagttttgatctgtgcagatatgtgatatgttccatgtgtgacattacttagtccatgtgatatgttctccatcgcactggaaggttgacagtgacgcaaatccctttgtaatgaataatcgattagtcctcattttttaacattaaatcactgaacttggccatacgatatatgggttcactaatccattaattaattgtaacgcattgatcacatgcgctgtaaaagaggctcctgaattagcgtatagcgtccatctatggctccatcattagcgtaccatattattagtatcgacccacctgcacagtaatctatagtgtttcaatagtccctgtacgcagcggcaaatcccatagctagattccgcaatatgattcgacaataaacacaataatctatctttgtcgagggttttgtt

SEQ ID NO: 39925 - DNA, 524 bp, Arabidopsis thaliana landsberg
accctaaaagcatatccctcttcacctacaacaaattctggccatgaaagcaaactcaccccaagctttaaatgcaaagtagcgaaacatcccatcccatctcctccctctctctcttaaccactaagcaaaaatcccatctttctatataaacctctctcccaactctgctacttcccaccgtaaatcgtttctgggttcttaagaataacatggcctcgtcatcatcatcatcttatagattccaatctgggtcttaccctctttcgtcaagtccttctcttgggaatttcgtcgaacgcattaaagacgcttgtcatttccttgtctctgctgttttgggtaccattatctccgcgatcttgaccttcttcttcgcactaggtttgttttcgtttcttgtaactcttcttgagattgtatgtagttctaaaactcgattttggatctaattgctgctcatcttcgattggattgagttggatcattgaattgatttgattattagaaagtttgaacaaaat

SEQ ID NO: 39926 - DNA, 611 bp, Arabidopsis thaliana landsberg
gtatctaacattctgattcttggtttgatgcagcaccttattgatcttgctgggtctgaaagttctaaaactgaaataactggacagcgaaggaaagagggctcttctatcaataaaagtttactcactcttggcactgtaaggaagttctttttcagtataacatttactcttctcgatatatgcgtgtgtaaacttctaatctccatcttcaggttatatctaaattgacagacaccaaggcagctcatataccctacagggattctaaacttacgcgtctcttgcagtcaacactaagtggtcatggacgagtgtcagtaagtgctctaagcttccctaattaatcaatctctagacgagcctgtcaataatgatttgtttgtgaagtttcttaaggccaggtttttgtttttgctttgtttttatgaactttcatttgatgacatagctctctcttgtaagtatgagaccgtgtctaatattggcgttctaacccctctgattttggttttttctagcttatttgcactatcacacctgcatccagcacaagtgaagagacgcacaacacactgtaattcgctcagaggtgcaagcatgttgaaatc

SEQ ID NO: 39927 - DNA, 626 bp, Arabidopsis thaliana landsberg
aattaacaaaagcctagtagcttaatgatgatcagaacatgggtaaccacagaagaaacttacagagaactgattagacatcataggtgatggatcgcaagtcccaggagtgatttgccactgcttaaactcccctctgaagcccctagatatgcttccacttctgcaattacaagcacgattggtcaaacctaaattacgaaactatgccaaataaaaccaaaaatcagaggctatctgctatgtaccccattcctccgagtggaacaccttgggatgcagatggtttgcagctctctttggtgaagggatcgataggtgctttctgtagtaatcataagttaaatctccgcaaacaaagaccaaaactttgtaccataaatatgtaaatcaagaaactttattgatcaagggagttacccttccatgggaggcctcttctctgacataagaccataatcgtatccccaagcgtacctgtaattccgaaaataagaagtaaagagacgccccatacaacaacgaagcgaaggaaatatacacacgatgtctctttggttaccattataatggcgttcctaacagtaatagtgaattcttttaagaattggcatggcagtttaatc

SEQ ID NO: 39928 - DNA, 188 bp, Arabidopsis thaliana landsberg
ttgccgatctcttggtcagcctcggaagttgatgttgattactctgtgtctttatcatctaaagcgggtcacgctattaagttaaagtgctgaacgatgttaactttacatgggggtgacatgctaatacattattttgttgaataccaaaggacctatgctcataccagaaggtgaaacatgtagca

SEQ ID NO: 39929 - DNA, 614 bp, Arabidopsis thaliana landsberg
ccctaaaatcatgccttttgtgtttttttatttgttgttttgtctttttatatataaatgttttaaattaacatgaatatcaacagattggtactaattattattaaatgttttcttttgcagttttttctccactcattgaactctaattactttcctcgcctacaaaggtagacaactacttttgtggatggtaacacggctaaacaaataatcggttagacatcttttaattcgatatatatatatatatatatatatataatttaacttgcattaaatgtaaaaatgagaaaaaagaacaaacacatccaaatacattgaaaaacataccaatctgttaatattcatgttaatttttaccatttttcaacagtctgttttaaagatcactgttgcatgctagtttttgactatgcatactataactcatataacggtttctacttatgagtgtagtggagaaaattttctttgtacattcattatttccatgatagaactgatttctatgttgtggatttgtgatgatacaaatgtgacttcttgatttgagctgatttctatgttagagcttcgcatatgatagatatcttaatcattggtatttcttc

SEQ ID NO: 39930 - DNA, 869 bp, Arabidopsis thaliana landsberg
  unsure (1)..(869): unsure at all n locations
ctacccgtcctgagcttgaaagctcatgggatcagctgggtttcagatgtgtgagccataccgtagtcaaaactcgacgcatttatggcaaaatcagcgttggagtcagattcgactccttctggttccgtagacataacgagcaccaacaaaaatccctagacaacgaagaaacaaaaaaaagcagaaattgcttcagtatatgcttccattaaagcaaaaacagtacatcatacgagagacgaagaaaataatcggagagcaaaaaaggtggacagaacctccggtggcggttacggtttcgccggcgacgaaagcttagattttgggtaatgaagaaatgacagagtttctttcgttttgagggggtttatgagagagctacgtgtacgtcacgaaatattccacgtggcagtacttgattttgtctcgactcatcacaaccatacattattacattgagtgaggttcaaaattttcaaacttttgcttttccctctttatttgaacttgaatttgacttgtttttactgatattaaatagaatagaattttactacaagtagaatagaattttactacaagtagtttaattctaaagaattaaatttgttaattttatgtttaatcagaaccaaatgttttcctacaacattaagacactttttttataagttttctaaacttgttgaattgttttactaaaaagtgatactttgaaaaacctcttttggggatatttttaaatactcctcatagactaacaaaataatatatcaattcatatattagcactataacaccgtntattgtgtaaagtgcttagctctctcaatggtcaaaaaatgcaaaatccattttcttgttat

SEQ ID NO: 39931 - DNA, 629 bp, Arabidopsis thaliana landsberg
  unsure (1)..(629): unsure at all n locations
acaaaatgggatggctgtcatgtacccaaccatgactttgcttgagtttaacactctgtaaatctttgccagttccgttgttctgtcaggtctcaaaacctcgatgtcaaacccgatcctctgagccattttcaccattaggtcctcgtttgttatccctcgagacccggttcttgaaaacaatgctagttttggcctcttagcctttcttctcttttctagtcttgcgtggaatcgttgctcctctaatctgtccagtctgttgattcggggtctataagctcgatcaagtacatttctgaactcattgatggtagttccatcatcttgcatctgagaaggatcgacggttaactcaccatggattctaagaccaacaatggcttccttgaagcagtgagttctcttgtctttgttgaaatcgataagagagtaatcagagagctgagagagaacatctccatacttcatctcccaccacttgtgatactcagcaatcacaaagacaacctttttgttgaaacgtttagatgttatatacaaaggaatacgcccgtcgttgaactcatgatagaggtttccggtataccctncggtagagaatagcatggccggtactttatggatca

SEQ ID NO: 39932 - DNA, 523 bp, Arabidopsis thaliana landsberg
ggtttttttatacccaaacataataatataactagatttattactgttgtcgattttattatttttttcataattcattgttgatttgttgggtaattatttaatttgttttaagtttggttaaattataaatatatggattaagttgcaaatacatgttgttatgtagttgcaaatatgtgggataaatgataaagttttattatcgaattgctaatatttaaaagtatcaaaacttatttaaaaccatctcaatatatgatcttaacaactccatttaactactcacaatattaactttgtgttgattaaaaaatgtaagtaacctaataaatagagaatataattttttaaacaaaagattaagattttaacaatggatattttgtacgtataatttaaactttttattcttgttttcgatgaacaacgtttaccgattaaagaagtaaacacaaagtaaactattgaagatcgcacacaggctctccttgaaaattcttaaaaagaacgatctcaatgt

SEQ ID NO: 39933 - DNA, 558 bp, Arabidopsis thaliana landsberg
caatataatggtcttggaaaccgtcgtattgatgtcctccatatctttcccaaatcacatggacaaggtcatctctcattgtaacacttgaaacagtttcttttgttttttttcccttagtttatgcaattttatgattattatatctttatttctaaattccaagctttctaaatatgtttaccactcattaatttgacgttatcatgtcgttttcattatcaagctcttttactcaaagggaaacaactacaaaacatgaatgggcaagcataacttctgctgatgatcagatgaatatgtaggtaaacatctatctaggtaacgacctacgaaagtgttcacaatcatcctttggagacataaagacttttagtcctctccttaggcaactttatctccttaaccagagtttctgatccatacattaaatgttatttagtggtgcatacttaactaaatatagtttaatcactccattgaccgccatgcatctccgaaaagagataaatgtatataacaaatctgagatcatagatgctttatgtttattgagat

SEQ ID NO: 39934 - DNA, 561 bp, Arabidopsis thaliana landsberg
tgatcactttcatgtaattaagtttttaccaaaaagaggaatagactagtagtctacacaacaccaaaactcgcctaatctattgacttaataaaaaggcagtactagtacacgcccttcctcaagcttaggctactttcatcatctcatcgcagcccttggctctaaagctctcgttaacgtcaacgtatgataccatcatgaggaataccctaacaacgtatatatctcacggacttaagctatcccatacattaaagataacatttagtttgtagcctttgtcccttggagggatcttttaacctttttcccgtgaaagaacatcatcatattcatatacatgaagggttcaaatttactagactggttattctttatttctttcacataaaaaaggggaaatacaattacattaaacatacgaatatataattaacatgaccaagattttcatcccgtaattaaaagacagggaagattgatgagttggtctttaaaaccggcaccgtcagatggagttacatgacgatccggaggacagcgagaccaacggctgag

SEQ ID NO: 39935 - DNA, 869 bp, Arabidopsis thaliana landsberg
  unsure (1)..(869): unsure at all n locations
ccccacgaaactatacacattttgttcgatacctataaaattgtattaaagtatatatacgtaacttacatggactaagagtatttttcatggccgaacctgggtctttttggatcttaattaatattataaatataatgtgtaagttagtgttttatcaaggagataatccattgttattcacatggatctacatatatacatgaatcgagtttacatgtatccttgccaaaagtgtataaggtaatggtttcctcccaataaaaagaagaataataagacttttcctaatctctctaaacattcccatacattttctctagacatcgcactattattttacacctctattggtttctataaacccaattttctgattcattaactaatacaccagtgtaacttacaattattctcttgtactattaattattaggatatcttaaacatactgtactatataaatctaatctaagagtttgttcaaatcacaatatatagttatatatataccatccctctctctctctctacaaagtatacatgaaaatgggaggtcacgggaggaggaggaaatcatcatcatctttttctgtagtaaaatcgttgtttgcgcgttgttcgaaggaaaaagacaattggaacgaagagagaatgatcaatgttagaccaagaatcatgaccaccgacgatgatggatgttcttggacgattgctgagccttgtattgataggagagccacggcttttattgctaagtttcacgaaactccaatacaagatactgaatagaaaggattattgctccttaagatgtaatatatatatgtcttaatgattagtactctntttcttagactttttggttt

SEQ ID NO: 39936 - DNA, 764 bp, Arabidopsis thaliana landsberg
ttttctcttcatttaacttgattaggttttgttgtactaactttttttttattgtttttatctaataaaatcgtttataatataacatatcgtatattaatacacatgatacaccaatcaatagacaattttttaaaatttgttagattcttgtatgaatattaatatattgcttttttattattttggttcaattgttcaacctttcagaatatccaatgcaaaacaatcgaaccgattggttttgaatcaaacctaattaatcctgaacgagtaaccaactctcaaccgatctgaatagattttaaaacgatatatcacaaaatctccaatatcactttaagagctttgagaaaatattattgatatattattattcgaccgtaaagtttgattttctccttttcacttgggctttttaatcttatacaatttagttttattttagtttacaaacgacaacatattaaagtatcaggtgacttctcaacttgatcctctcttcattaccatcgatgcttataaagttataatgagatcgtaccaactgcaatgggtcagtgccgggccatattcaatcagggcctccctgattgggttgtaatatgatttcaagttagtaatatgaaatagcacacagtcacgcacacaaaagagcctatataaggagagatataccacaaacagcccaagacccagttgtttttgggccggccaacaagacacttagatgaaccaaaattgtatggaaatatttaatattt

SEQ ID NO: 39937 - DNA, 752 bp, Arabidopsis thaliana landsberg
ccaagggagctattatgttttgacacggattttggaatttcatataattggcaaacaatgacagaattcgggggtgggagcatgcactatggatggtattacaatgcaaggaaagaaaagaacctgaagctattcatttgcagaatccatgatgagtttagtttgtcaaatcagggaaactgtgttgactcaataagcagcgtatctgagcacagacctgtatggcatcttgagtctgtttcaaaacatgcaaacacatggattatacccacttgaacatgaaacaactgaaagaggaaccatgaaaaacaagtgacaagaacctggttaacacatcacagacatatctggaaacatatgagttgttcgtcggagttctgatgcttaggtagagaagcagtattccttgacttcagctgacaatgttgaacagaagaagaaaaacgatagcagacaaagagagtgtggacacaccatttatttatcgtaatcgtcccaagcctatgaacataatacatcagaatagaaaacagagatgtgtttattcactgccaaatgcacaaattgttcaatctgtcttattttcacaggattattacaaatcagattttgttgtgctagaacattttcccaacaccatcttttcttggaacggattctgaaacattcatccgggaccaattacccatcagagatgccatttgatcaaccttatcatacaacccaagaagcccaccagtgtgtatgaacaa

SEQ ID NO: 39938 - DNA, 1061 bp, Arabidopsis thaliana landsberg
  unsure (1)..(1061): unsure at all n locations
ctcagcaaacatatccaatgacaattttcaccaatctgtttctccagattttggattcctggctttgttcttgacagtgatgcttcatcaaacttttcgtttctttttgtttcttgttttccatatattttgttttgccatgttacagattaaaaaaaaatgtaaaacaaagacgaagaatatagacttaattagaaaacaaaaagcgctgctctatatatatttattattgtacgcatgtaaatggtgtagaagattaccacaagtcaaatacaagatacaaaattataaaggaaatgagaatggtcaatgagatgtatcaaaaatcatgctttagtttttactgcattctttccgagcattatattctttattgctttatgtttgtgtaaggcttcacatccaaaagaaaaaagaaaaaaaaagagtctatgaataacaagggtaatttcataaaaaatgttacaaattatcatagcagattagtggtaagttatagtacattagtggtaaattaccataaattaaacataagaaaatcaaaaccatgtacttggttgatttttccttctttttttttaaatgtttattagttttggttattagttaaaagtgaaaattaatttaaaataggtgaaataaaataagatattccaattaaaatgttgttaaaataactaatgatcaatgaaattgaagaaaaattgtatgtaaattttgtaaatttatgaaatattgtcttaaactaattgaatattttgaattatttttggtttacagttatgataaattatttcatttaatttttaaataattaagcattaatatttttggtgcaaaagaaaaaagcattaatatttttaacaatgtataataactcttgaaaatctattatttagaaacagaatgtgtaaaaataatggcaacttttaaaaactgagcaattgtagggaaaaatgtcttatatgaaattggctagaaaacatatttctaattaaaaataaattgctagtcccttgaaaacataaattaatttaatgcaatgngaagggcaagtgatc

SEQ ID NO: 39939 - DNA, 503 bp, Arabidopsis thaliana landsberg
ggacagctgcctgctgctcgaagcctatacgcgtcgctacggccgcgtcggcctcgttgcacgttgtgttcgcggtgccaagtcgaaactgcgcggcgtcctgcaaccgtactcgccgctgctgctgagctggagcgcggccggcgagcttggcacggtgaccggcgccgaagccgccggtccgccgctgatgctcgccggtgaacgcgtgttctacggctggtatctcaacgaactgatgctgcgcctgttgcagcgccaggacgcgcatccgctgctgttcgatgtctatgcgctggccttgcagcaactgccgggcgagatcaccgccgtgcaggacgccttgcgcattttcgagcgcgacctgctcgccgagatcggctacggtctgctgttgccggacgatctgcagccacaacggcgttatcgctatcacgccgaacacggtcccttgccggtcgcggcggacacgcccggcgggtacagcggcgccagcctgatgg

SEQ ID NO: 39940 - DNA, 854 bp, Arabidopsis thaliana landsberg
tgagaattctccgaatcgtctcctctctttgagctatgaggctgctttttcaatccggagagaacctctgctatttcgatctccaagtcgtcctcaaccgtgccggaggatttcggtggtttgggtatccgggatttggatccgtttacaatctgggcaaatcggaacaaaatgatattagacggaaatcatttctatgttgatgatgaagaagtgaatggacccacctttctctctttgacggaaagagttgaagaagacggtgaaacgacttcgcagctatggcttcccgacgaagtccggcagtcatgcgacctctttaaacatgctgcaaccgccagaaacagaataatccggtgataaagagatctcgaaaatgcgagttataaaacagaaagaatcaactgaactcaaacctgagcgagcctttctcgggacaggtacgccgatcatttcatcggcgaccatcaaagacgccgcatgcctggggattcgacccgacgaagaactcttcctctgatgataatcgtcgtctccttgactctcatccgagctatcttcttccacatctctctcgttcctcggcgcgaacctctcgcttcttctcctcttactccgattgaacgattccggatctcgctctttcttccccggtcgatctctcaccgtcgccacctcctgatgcatctgctcacgactgttttctgaaacccatgaacataacaaaaactcgtcagaaaatagaaactaatgaaggaagaagataaagagaaggagaaggaagcaatacctgagattttctgcctccgttaagtaactcggttgaagcagccatggttgtcgttgacgtttgg

SEQ ID NO: 39941 - DNA, 504 bp, Arabidopsis thaliana landsberg
aacagtagaagcatagaggagatatgtcaatctttttatgttatcaccttcattaccctgaaaatggcattgggtgtaattgacttatagaatttaagactaaccgtctaatttcttttgttgtaatgtaaaacattattccaacaaaaaataaatatttgtagagctaattattgcttagtgaaagtaaaatgtttggtgaaagtagaagtgtttgaattgtaggcagaaacaaaattaaagaaagatatagattaaaaaaaacagaacatcagtttttggtttgaaacaaaggttggagtagtacttcgagtgggtgatttcccgggaactattcgtgttacatcgctcttaatgactcttttttagctctaattaaagcggatgacaacaaaattaataaaggttggagcatgataaatagtcctagctcaaattgaaaaccatgtcttcataagaatttattattattattattgataattcgttgatcatgaagttcta

SEQ ID NO: 39942 - DNA, 338 bp, Arabidopsis thaliana landsberg
ctttgtcgtattgtcctgcttttattttgtcaaattttgtattgtcttcttcgatttctgaaccggtgacgctaaataatcaatgttcttttggtgattgttcataagaatgtgttttttttgtggctatttcttacacttcaaacatgtaatagttttttttcttccgataaagctatatgagaagctttttctatcatataatactgtttgcatgaatcaatcgtatgccactaaaatattctaattatatatgttttttggatccatcaaacttattttgtatatactttgtttgattttagtcaaacaaaccaagagttttgtttgaaaacaca

SEQ ID NO: 39943 - DNA, 555 bp, Arabidopsis thaliana landsberg
tacgcgcttcctctctttctctctttcccttatttaaacacactttgtcttctacctctaaacaatctcaccttgggtctccctctctataacaaacattaatacacacaccaaaaaaaaacctgtttatgtctcaaagatctctgattcctcattcttcttctatagcttttggtctccattctcatctcttaatctccagtgagatcagctccaattctaactggtctctctaaataaaaaacagaaataaaaatccaacctttttcaattttcgttcaattttcccggaaaaaaaagcgatccttttgatttttcgatttctccaagtaacaattcaaaatgggtctaaagggttttgctgaaggaggaatagcttcgattgttgcgggttgttcgacccacccgcttgatctaatcaaggtccgaatgcaacttcaaggcgaatcaacttctattcaaaccaatctccgaccagctcttgcttttcaaactttgaccaccgtgaacgcgcctactctacgcgttggtgtgatcggagtcggatctcgttta

SEQ ID NO: 39944 - DNA, 841 bp, Arabidopsis thaliana landsberg
aattcgtttaaaattatgggtaaaggtttgtttcacatttaattttcaatttgtatgtccttcttcttaccagttacggcttggggaagatttatgtttatcttcttctagattcggttcattattttatgttctaattacatttctgaagatttttgtcattattattacttttgtaggtggaactcaaaatctcatcaaataatggcaatacaccgaattatgcttctttggcaagttatcaatgaataaaattctatttatcgggtcttgtttatacttcaagcttagtttatttcaaaatttgtgtggaaaaaatgataggaaatgcatgaacttcattgtaatataaatttgaaaattcttctagtcaaacaaaccctttctctatcgcaaattattcttctttgaaagaatcaagaggacataaacaaagaaccaaaagaagacaaaaaatactttggcaaaacaaaagaaagaagaagagtcgctagggttggttgcgtaaagcattttcaaattcgaaaccgcgtatcaacataggatctcatcaggatcaggatcattgtcgatgggggtcctcctttatagacccactctcatttcgcttttcgcttttcaataaatattttcaaatatatcgtcgtgtcggaaccacttaccccactcattgttgttgctcccaccttcttgtccgtccgttcacgtggcgttgcctaaccccattcattccgtttgttatccataattcaattccttgtttatatacctaacattcttttggttgcacaatcaacggtggactgtgccaacttcattcatcttcaacatcaactttaga

SEQ ID NO: 39945 - DNA, 667 bp, Arabidopsis thaliana landsberg
acaaatggataatgtggttgaaagagacattttaggttttgtgttcaactgttttgttttcttgctgaaaagggacattttaccacttgtgcaaatatagacaatcaatacaaaatatctgtttttgttattgctacaaagaaacaaccagaaattatattcttctctttgttttatctatcttacacatttgctgatgatcttcatatatagaaccaccacacaaaggaaacttccttgaggaatttatactctttgtcttttcgagctcatgcgtggcgcgaacccttttaaaaagccgagtcaaagatgatcagatcagcttaaacattctcaaaaccactttctcatggattaagtgagcttctttcaccttataatccttatcccatatagtgttgtttccacacctaaagacgtatagtggtcactattttcgtcacatggcactatattcaaatctggtagcaagaaattgccatctgtcttgcaattctcatcctttgccaaattctgaatatgattcatctgaaataaaagaaccaaccaaagggtttagttctttagtataatcaccaagtcaacaacaattagagaaagagagtaaagtagaaaatatgtgtgtgctcaccttcattctcttcagttattattctcgatgcctcgc

SEQ ID NO: 39946 - DNA, 762 bp, Arabidopsis thaliana landsberg
  unsure (1)..(762): unsure at all n locations
catcatcttatttgcgtgaacgttgatataactatcattaaaaacccattccaaggccaaacactatctttctaaaaagtcattcatcatatcaaactaagaaaatcatagtataaacttctcaacgaaatcaacatcatattctaccagataatattctttgcgacctattttgtgaaactatgaacaactaaccatctcactttgggaagctttagaatgtgacaagaaagatagagaagtttgcctaaataattaatttcaatttcgtcactacccacctattggtctgatttaccagaatccaatctaaagtccatatattttaaaaaatacttttaactgaatattcatcataactttggaaacttctaaccgtaagaataaatgtaagattactaattatgggtgaattgcgaattgtttatccaacttatcatttatatagcaaaaacatcccccaactgacaacaatttttgagtaaaactttataatctttcttatagccatatacgacagagaagggatatgtaaaggaaaatattttgtctatacagaaatttatgttttcctttgcatttgtaacatatttataccactaatattctatcaaatagttcttcagtcaaaattaatttatctataatggcagttgcgtattgtgtgtgttacgaaactattacgancatagagtttttttttctccgaacattcatatatccttaaataacccatgaataaaaaaacatatgaatgggaat

SEQ ID NO: 39947 - DNA, 682 bp, Arabidopsis thaliana landsberg
  unsure (1)..(682): unsure at all n locations
aaaaaatagaaataaaactaaaattttaaaattttaaaaaacaaaaaaaaaaaacaaaaaagaaaaaagaaaattttaaaaaaaaaancccccaacncccccanaaaaaaaaaaaaaanaaaaaaaacaaaaaaaacaaaaaaaaaaaaaaaaaaacaaaaaaaaaaaaaaaaaaaaaaaaaaactaaaaaaaaaaataaaaaaaaaataaaaaaaaaaaaaaaaaaaaaaaaaaaaaaaaaaaaacaaaaaaaaaaaaaaaaaaaaaaaaaaaaaaaaaaaaaaaaaacaaaaaaaaaaaaaaaaaaaataaaacaaaaaacataaaaaaaaaaaaaacaacaaacaaaataaaaaaaaaaaacaaataaaaaaaaaaaaatattaaaaaaaaaaaaaaaaaaaaatataaataattaaaaaaacaaaaaaaaaaataataaaacagaaaaaaaaaaaaaaaattaaaaaaaaaaaaacaaaaaaaaaatacacaataaaaaaaaataaaacaaaaaaaaaaaaaaaaaaaataacaaaaaaatataaaaaaaaacacaaaaaaaaaaaaaaaaaaaacaaaaaaaaaaaaaaacaaaaaaaaaacataaaaaaacaacaaaaaaaaaaataaaaaacaaaaaaaaaaaaacaaatcaaaaaataaaacaaaaaataaaaa

SEQ ID NO: 39948 - DNA, 787 bp, Arabidopsis thaliana landsberg
tatttatacttgaactgtttgttggtttgattcctgtcgtgtgctttggtaaacctcaaagtaaagcatattcttagtattcgtcttgtttattaattagcacttaaaataatggaacaaaaaggataataaaagaaccagaaaggataaataatgaaataaaacggtagatccctagtttacattgtatcattggaacaattcatctctcaatacacaagaaaggtggactctttacgtggatgtcaaggaaaaacaaaatgttcctcagcttttgtattgcaaagaaaaagcatataactaagttggtatatataatagggtttatggaggatacatgcagaaattaaacaagtgtatctatatcgtatatatggactgcttacagatggtgttcaagttatttccaaactggaaacgtgaggcagaagttaaaaagctcggtaagattaattaatatataggtttataacaaacaaacaaaaattaagataattttgatttcagtgaaatttgttctatgattcaaagttgcaggttacaaggttcatggcgatcctttctccaccaacacaaggcgtgtcctcgctgttctccatgagaaaagactctcttacgagcctattaccgtcaaactgcaaaccggtgaacacaaaaccgaacctttcctctctctcaacgtaaggaatgatatcgcaaaatcgaatgattagtaatttcaggatgagatattacacacctaattatagattgactttgtgccgaatcatctacatatacaaaaatt

SEQ ID NO: 39949 - DNA, 862 bp, Arabidopsis thaliana landsberg
tcaagaatatgccaaggaatttttaatactatataatattttttggccaaggaattttacgtaggtaagatttttaaatgatgttgataaattttacgttattgtatatgaacattgtatattacataatatcatattttcttaaataataaaataaaatgctccatatattttgctaaattggacaccacaaatagatgtctacctatgtttttttaagaaaataactatctacctaataagctggaattccatatctacttaactcaaatgttatttttggataaatatttgaaggtttaaccaagctaggaaatctaacataagattttagaaatgaatttgaaatctagaaattatagtatttttggaatctgtagaaattggtactagtatttttgaaataataaaaattctataagcagaaagaagtgacaacatttttgttatacatttggtcataacaaagtaagaactaaagaagtggaaaagaattgaagaaaaaaaaaaaagtccatatgattttttcttcccactagtcttcgttttctaaacacataacccatacttctctccatcatcatcatcattcatcatcgccaacatccccaaagaacctcagattagggcctctatttcactagcggatctgcaagtactgctcacaattcttccaaattcttcactactcatggtgaagcaacagaagcaactccagcggggggtgccggagctggctattttggctggtcgtgatgagcgctccgtcagaggaatcgatcttatgagagttgatcaatgtgaagagatcggcgctaaccacagaactgctctctgtgcacctgccttcacagttgctggg

SEQ ID NO: 39950 - DNA, 474 bp, Arabidopsis thaliana landsberg
  unsure (1)..(474): unsure at all n locations
tgtaccgtgaccccctctccgggacatgtccggtcctctgggccggacagtgcagttttgcgcacaacggcgtgtgcggcgccggaggcttcagggggacccgtgaacacggagaacaacagaacaggccgtcagacggacgctcagggccttctcaggcccgaacaggagcgtccgcaggatgcatgggcgcgattcatgaaggcatgctgcctgcggtgcccccgccaccgcagcacctgctgagcttgtggcgcgccgagtccggggactcggtacgctgctggccccgcagggccggcaacacccccgcctccctcacctctccgaggttgaggcggggggttcaacccttcgagaggatgacagcgcacatcacgcgctgtcacaatcagttcacagttcangagagggagcgagatgaacagaaccgagatcgcggagcaagtccgcacgacgctcggtgatcacgtc

SEQ ID NO: 39951 - DNA, 649 bp, Arabidopsis thaliana landsberg
agagattacttcagtacaagaacacaaatctatgtatggaactcaaagagtaggattttacattaagatcttagcaagaaaagtggcgaataggtaaaacagaaccatgagtggaaacaagtgaaacacggagtcatcagtgtcctacgtgaccacgcccaccacaaagtttgcacataatattaccacttccaccacaacctaaaacattagcaacaaatggttaagatgaaggtaatttgcatagaacaagtagagcatgtaggataagagaggcttacctaagcaacggactttaacaatgatgccttgactctccataatggaatctacatatagaccagttccagaacaagtggaacaaagcaatgcacctttagcttcacaacaagtgcaacgctgattatcaccaatctctctctctgacatggataatccaactggctcctcgattatttcctctggtattggtttatcataacagaacattgactcaagactgcttctttgcctgtgcacgtctctttttaaacatgactcagcctatgaatccaaagattattctcaacttagcaaataatgtttcatccaaaccaggagaaataagcttcacttttttttattcactttctcagtcaccctaatgtat

SEQ ID NO: 39952 - DNA, 530 bp, Arabidopsis thaliana landsberg
  unsure (1)..(530): unsure at all n locations
ccccaaccggaccgcaccttcgagccccatgggacccaggtgcgcgcccggccaggccaccgtcagcaccggttcatgcaggctgccgcccatcatggcctgggcacccaggccgtagccacgccgcaggatgaccgcgatcagcggcacccgcagtgccgcgccggccaccagcagccgagaagccctccgtaccagtgcttctgcttcggcagcggggccgaccatgtagccggggcagtcgaccagcgacacgatgggcaacccgaaggcgtcgcacaactgcaggaaacgtgcggccttgtcggaggctgcggcggtgatggcccccgccatcacnnnnnnnnnnnnnnnnnnnattccgactggccgaccgtcgatacgcgccagtgcggtgaccatctcgggagcgaacttctcccgcaggaacgtcaccgaatcaacgtcggcgatggtctggatgatcggtttgagcggataggcgcgccgtgcccgctcgggaatcatggtgcgcaacgcggtctggtccg

SEQ ID NO: 39953 - DNA, 703 bp, Arabidopsis thaliana landsberg
aaagaaaccaatgaaaagaacgcctttatctcataattctaatttcaatgggcagattacattgaactttgcaaagctcgagtatataagctgaaaattcccctagtctgatttatcacccacaaatatgactcactgataaaggtattcttaccatcacaataacaaaaattacaagataaaatttatagcacaactgcacaagtaaaaaagtaaaaataaaaaagaatgcatagatttgacgtgtgtagactgtaccagtatcaccacttgtaaccagtccgcagtgggtacgagactgatctacgctaacgtgcacctcttctctcttctttttgtctttttttttcttcttattttcttccgtatttttccactgtaaaatctcgtgattgaaaatgttacctccagaggttaaaaaacgttaatttttgtgccatctaattcgataacgatacttcttttttagaaaagatattttataatacaacatatgaaaactgagataggatgagaaaatagtaagaaaaaaaggctggaatacggaaagaggcttgcttttgccttgacctgatgtggtttgatttgtgatgttacatttattctgacaaggccctctacttttgttttctttcctttttcgtctatataagtttctcgttccactaatggccccatttttttcgttgaacaaatgaactag

SEQ ID NO: 39954 - DNA, 535 bp, Arabidopsis thaliana landsberg
aaagtcatagtacttgatcagtacaatgagttaatatctggggtcaaaatgatggaaacttatgcctctatgaagataagaaaacagaacaagtgtgtaccataagttcttgacggcatggattatccattggtaagccacgaaaatacagctccaaagtacaaagtaagcaatccggaacagtgggaatcgctggataaggaagaaagaagattgccattagattctaataaaaaaggcaggagattgtgtatccgcagacttcagttttgaaaacttaccaaggaattgaggcttgtgtcaccaaggagaaaaacagcgttgagagaatgcatacaaacatcgagctgcagtcaaaataacacatgtaaggaataaatatattcattgtcgacttttagtatagagactgccagaaaaaaaagtgatcatatcaaagaaatccaaatctttctaaagaatggaactcaaacggtattagagccagaacttacaaaactcagcttgtaacctttagtaaacgggtagattatcg

SEQ ID NO: 39955 - DNA, 526 bp, Arabidopsis thaliana landsberg
  unsure (1)..(526): unsure at all n locations
ttgttactttcctgccttagggaacacattatacatcagagtaaaatatcttatatatgtcattagttactaaagacttgagaaaacagacacgggttttcagaaattatgatgcaagaacaagctctgtccaggagaagctggccctatctcttcctcaagactcctcaatgcttcttgttgcttcctcccttcatcctcctcctctgcgacatctccttcagatgccgatgatttcctcctctgcgatgatgtcacgctnnnnnnnnnnnnnnnnnnnnnnnntctgaattccgtgttctcggaaccagacctttttgaaccgatcctccatgacttcttgtgcattctgctgctcccaagaaccacttctgttggtaatattggctgctcactgctcgggtttcccattagctgtgcaagcgctcgttccaatgctgttgtcactttatccattgatggtctatctttccctctcattctcacgcatttgcaagccacactcacgattcttttcaaagcttcg

SEQ ID NO: 39956 - DNA, 550 bp, Arabidopsis thaliana landsberg
  unsure (1)..(550): unsure at all n locations
tttcttccacgactggttcaagtctaatccttttcaccattaccctaattcctttttaacccctctcctcatcctcttcctcctgttactcctccctcttccttcttcttcttccctcaatccggagacctccgccgtccaccgtcgacaccaactcctcctccttctcctcctctccgagaagccctccctctcctcagcctcagccccgccaacaaacaacaagaccaccatcacaaccatgaccaccttattcaagaaccaccttcaacctccatggatgtcgactacgatcatcaccatcaagatgatcatcataacctcgatgacgatgaccatgacgtcaccgttgctcttcacataggccttccaagccctagtgctcaagagatggcctctttgctcatgatgtcttcttcttcctcttcctcgaggaccactcatcatcacgaggacatgaatcacaagaaagaccnnnnnnnnnnnnnnnnnnnnnnnnnnntcggaggaggagaagatgacgatgaagattcagtcggcggagacggcg

SEQ ID NO: 39957 - DNA, 921 bp, Arabidopsis thaliana landsberg
  unsure (1)..(921): unsure at all n locations
tctctcttgaatacatatataattcaaaagatcatatccgcataccatgatggcatgatcatacatgtaaaaaatatgtgaaatttttttctttctattaaattatagatgatgcaccaaaattgaagcctttttgtgaaagataggctcgtctttcatgtaatacaaaaatgtatgcaaatacatatgattatatatatatatatatatatatatatatgttttagttatgcctaggaggatgatgaccagggttgctataatcggcagttaaactctccgtcttggtgagtctcttcttgttttttcttttcttcaccatttctttactctctatttctaaaccattcttctcatttgcctccaccttcacatttacatgcttcaacgtctttcggttttcaattacatcttcagcatgctaagaataaaatgatgtaagtcaattttaattgatcaaaaccaatatgtctaacttatacttatttcgtaaacaaaaaaaaaatggattgagaattgagtaccatagtacgtagttaccaataccttcttggcaatttgggtaccattgcttgctccaagaccttcactatttttcatttgtggagctatatagaaattttgataagcatgataaaacttatttacatacatacgtacgtttcatacatagtaattaatttatctacacggttatgtagtagatatataccttggctattaaagtttgcattggagactttagcatgcacctgcaaaacggaaaatactaaaagatagcaaataacccttatggacaccatctcgccttccttttttctccttggcttgatgtacgtatatgaacagaaaagagtanacttgtgtgttctatatgatggagaagatgggtggagttatatagagcaacaaaaagtcaag

SEQ ID NO: 39958 - DNA, 628 bp, Arabidopsis thaliana landsberg
gtagggttattagctgtgcgtaaaatttgtaatttagcattttgtatgaatgtaatgcaagtgtgtatattatggacagctcaagcttttttggtcatgccgtaccatgtagacccttcttcttttctcttaattgaaatgaatatggttagtattactactatgaatatattgtaacacattagaatcgtgaagttccattctgcgacaggacaattgtgcttagcttagaaatgattaaaaagtaaattagtctaaaagggaacaatatagtgaaaacttaaaaatttaaattgctaaatttctagcttaatatttttaactttggtccaattttgaagaagtcaaaagagaaacagaagagtgtaagaaaaggatccttgagtgaaactttacgtggtatcaaaagataacatcatacaaagttaagcctacgttgacgacattctcatgctttctctttagaatagaccgagtgatagataataagtaaaaaaaaaagtaaaacaattatcaagtctttaagttaacacaaaagattagatttcttttttgtgtttaacaatggtaaccaaagtgagttttttttacgagcaaacgttgtcaaaggggatcctctagagtcgac

SEQ ID NO: 39959 - DNA, 613 bp, Arabidopsis thaliana landsberg
atcccaaaacctacatgatgttccaccctaggctatctattccttgccgtcgtgttctctctatagtcacgtaggctctccgcggaggcggtggtgtcgcttggaagaacggccgtaaccggttgggtcgtgtcgcgatccctggtcctcgtggcataccagtattcggcagtcttttcactctcagccgaggcttggctcatcggacgttagcagccatggcttggagccgagccaacactgagattatggcttttagccttggttcaacgccggttatcgtggcttctgagccaaacatagctcgtgagattctgatgtcgcctcacttcgcggaccggccggttaagcagtctgctaagagcctcatgttcagccgagccataggtttcgccccaaacgggacttactggcgcatgttaagaaggatcgcatcgactcacctatttgctcctcggcgtatcttagcacacgaagctgggcgccagctagactgcgctgaaatggtgaaagctgtgtcagtggagcaaaacggcgctggatcagtcgttttaaggaaacacttacaactagccgccttgaacaacatcatgggaagtgtttttgggagaag

SEQ ID NO: 39960 - DNA, 739 bp, Arabidopsis thaliana landsberg
taggtttatttatatgttttgtaagaactatctggtttttagtttaaaaccccagtgtatatttttgtacgaatttaaggttggatttttacatgaacttatacgaaatgctcctaccaaaataatacctttttagttgaaaagtgagacatttttatgtatcttattttgtattgaaatctccagtattatagttttaaaattatatacataaaaattttaaattacaatatctttacgtctttcctttcccgttcaattacaaaatatcttttcgaaaaaataattacaataaaatgaactaaaaagctaaatccagatagttgtgtgggtgagctaatgagtggtggttgattagataacaacaataataagaaagaatgcaaagttacgagacaattcaatggaagtgggagataagcgggtggctttttgcggccatctctctactcctcactacctttccttttcttctttttccctaactttttagcttatgcaacaaattttaattattgtttgtgtagatttaggattgtttttggtgttttagcttgggataatctttaggagattaaaaaaatatatcatttatcacaaaatggcaaatagacaaatagttaaaagttattatctttttttcttgtcaaacacttaaaagttactatctaaaacaccgatatgatattaaaatcattttaacgctcaagttagataactcaaaatgtgaaaagggttc

SEQ ID NO: 39961 - DNA, 611 bp, Arabidopsis thaliana landsberg
agaagaaaaaaggcataacatgcttcaaactagtctaaactagaaactacatttatcttaactttcttaaaacactccaacaagctactacaaaaccacaagatccactataaccaaacaaaacactagactttacaatcaaaacatcgatgttttattggatttctacgcgcgccttctaatgtacaatccacttgctcggtagtatcactccaatgttatctctccaatatctgagagatcccatagatcatcactttgacaagtgacattaccttgaaactcccaatcaagcaactcctcatcaaccccaaacccaacttctgaagaattacatagaccaacccaccaatctttatcattattttcatttgaattcgaacttaaaaaacttccctctctttctctttccaccgtcatatcatgatcaacctctgtgattcctacgtgaccaatctttgtctcgcttccttgttcttcttcaaacaaattaacacaacaactactattgtccccactctcacacaccttttcatcatttacttcattcacagcctcttcactagtgcattcccagacacaactactcaagagccgttctaactcaccat

SEQ ID NO: 39962 - DNA, 730 bp, Arabidopsis thaliana landsberg
ttatcctcaccaattacaaccttctatggttatggttaaacaaaccaacataccgtttacaacatcataattctcaaaatccaaattaactcatttgtgatgatcaatgtaaaaggaaaaaatcttagatggttactaaacatgtacacttttggaacttgattgcaataagaaatcaataagcatggataaacgagatcaggcaagtggagaatgatacctcaggttggaagcgaagcatgtctgcacgagccatggcttctgcttgcgcaattctctgtctgaatgtctgagccatctcctcagccttgagacagcagaaagtagcaaatgattgagacataaaagaaaatagggaaagtttttttgaatggaaatagagttaccttctcgaacacaagttttgggttacgaatcatatcaccaggtgttggctccagcttctttgtggagagacttactcttcctctgtcacggtcgtgactcaatatcataacctgtacattaaaagttagggactgttgttttaacatctgaaataaaacgtttaagagtataccttcaaagtgtccccaggctgaagaacagttgcgatatctgagacacgggcatgacttatctgactgacatgaagaagcccattgattccaccaatgtcaatgaaagcaccataaggtttcaagctctgaacaaactcgaggaccacagatccaattccaagctgagcttg

SEQ ID NO: 39963 - DNA, 849 bp, Arabidopsis thaliana landsberg
atcctctttacatattcttcttctcctttcttctctatctttcattattcttactaacaagaacaaatgaaaaacgggggggggtttaaataggaagacgttttatgtttcattcataattttttaaaacctccaaaataggttttgctgaaaatagaaagagaggctaatgaatagttcattatgtctaaatttagaatgtatagaaagatgaattcttccctatgttccaaatatatctagtgggagagtactttctagtttatacatctacactaggttaaattagatattttaattttaaatttaaaaataaaatataaaccaacaagattaaatttcctattctaataagaggtttttaaactaaaaatcatcgttttaaaaataaaaataaagatatttaagtagtgcacgcaagggacctgagtgcaaagaacagtctaaatcctaccccatgttgcaatactacggacactaatcacaagtacacatgcctagataaccatagctatgacgtcaaaaccatgccccttaactatatcttataacacctcccgagcaacatatatgaatagtgaaagattctatttagttaattaactttaggacgtatttttaacgaacgtccattacagtgtaacatttctatttgagaaaatgacaaaaaaaatctaacattttttgtagtacgatcattctaaatatctaatcatatgatttgtcatttgttcttctcatatactttttctcaatataaaaaggtttgtaattttgtgaaaaataaaataatagtcataaatagagtcaataataaggcctgggtaattatatagaaaaagtgaaagg

SEQ ID NO: 39964 - DNA, 547 bp, Arabidopsis thaliana landsberg
cttggttgagcccttgcttcgttccaaattggcttaagattaactgattaagcctttacattttttaaattaggtgattaataaattacttaattaattatgattaatgataatcacatgggattttccgtcttttctctttaccgtctaaatcccaacaacaaagcctttggagaagctattctcagattcacgacaccagttcgtcacaagcttcgagcccaggtattctctctttccctcaaaaaccctaatctcgacttataattcgatcgataaagtagaagcttcacgcaattcacatgttctctatcttctttctaactacagctcggaaaacaaaattggaacttgctgcataaagtttagtttttttattgaatttggaaggatgattgggaatccagtaattcaagttccatcatcactaatgccatcatcctccatgattgcttgtcctcgagtttcacccaatggggttccttatcttccaccaaaacctagaactaggcatttagtggtcagagctgcatccaattccgatgct

SEQ ID NO: 39965 - DNA, 1156 bp, Arabidopsis thaliana landsberg
gatcccataattttccatagtgattaaatgaagatttattgtcaagtcaaattgtatatattttaaaaatattaaaataattgaaacgtttttacatatatattatttttgtatgaattgataaagctaacttatagaacaaagacacaccttatttgcatacatagggtaagtggttcaggttgtgcagttagcaatacaaatttgttgaatatcaacgcaaaaatacattttaccaaacgattgctgaacaaacacacctttttgcatctccattttacatcaccgttcttttcttgcctttaaaatgggtgaaaccgtaagtaacagattcattttacatcacatgttaacaaaattaagaacagaaaaaagcaacaacaaaaaaaaaagtatcccaagtttttgatatcaaaaaggtaaaagcaaagtgcaacaacaacccatcaatttcattattattcgatttcattggccttttccttttcattttaatttaatttaattgatatatatataatatcatggatccaaagctcatctatgatctaacaagctatacacaaatccataaagcccaaagatttcataacactctgaaaaccagaataatagtataatcatttcttgaagataatatatgtttcctttcagtgacatgaaggcccaaaaaacagagaaataaaagagtcagttttttacactaaaatattctgcttttttgggtctctcaagtttcaacccattctcagattctgatttctccaacagagagacataataagtcaccagaaaagaacttctattttgaatcatttcccaaaaagggaaacttttttttacctgtgtaaaaataacttttaatcgtcatcatcatcaaaaaaaaaaaccggatttaaagtatagagctttgctcagaaggtatatgagtgacgaggaaacgatgcaccatttcgaagctagtgaaagttataactgctgcaagagttgttctcagtagattcgtggcgcagcctctgtaaaaaccagggaacccatctttctcaaacactttcttgatgcaatctcttactcctgagtaacgtttctcactgtggtgcccttgctctagaagcctagctcgtactacctgcacaccgcgagatcaacatgtttc

SEQ ID NO: 39966 - DNA, 595 bp, Arabidopsis thaliana landsberg
tcatcgtcgtcttgccggagcccgacgggccggcgatgacgatgcgctcgcccttcatgaccttgaggtttatgtcgcgcagtacatggaagtcgccgtaccacttgttcatgttgacgatctcgacggcgacgtccgtcgcggagaccgccatctgcggcgcctgggcttggttggccattcttgtttcctctcagttatctcttgtggctcgtgtcgagccggcgttccacgaaggccgaatagcgcgacatgccgaagcagaaaatccagaacacgaagccggcgaagatcaggcccgtcagcggcgtgaccggcgtgatccagcccgaatccccaaaactcgccttcacgatgccgagcaggtcgtacatcgagatgatcgtgacgagggacgtatccttgaacatgccgatgaaggtgttcacgatgccggggatcacgagcttgatggcctgcggaagcacgatgaaggtcattttgtggaagtagtttagaccaagggcatcggccgcttcatattgtcctttcggaatgggcttgagaccgccgcgaataacctccgccattataggcggacgcgaagatcgacacg

SEQ ID NO: 39967 - DNA, 517 bp, Arabidopsis thaliana landsberg
tacactgtacatatataacttatggagaccatatgtatgtgtagggagacgcatcagtagtagaaatgtctcctgggaaccctcttcttactcataatcggcgcctcaccgctccccggaaattcccacttcacaagatctccgtcccacgaagagcttataagcgttgggtaatatgggtgccaattacagtctcttacaggtgagctatggtgctttagcactgccactttatctccacttacctaagaacaggatcacgaatccaaggttggtcaaaacagagacaataattcagcacacaccaattggtaagaaacataaaccataaagtgctacactttttcatttgactgtctcttaaatgtgtttatgaggatttatggtttaccaagtcgtatatgtagacggaactgtcgttcgatcctgtgtagatgtacttttggccagtactgtcaacagaaagaacaaaagaagccaacacaagaattagagatataagtaaagagagtttcct

SEQ ID NO: 39968 - DNA, 583 bp, Arabidopsis thaliana landsberg
tcgatgaatatgcataaagcgcgttttcacacatccatccatcgttatttattactctaccttctagtttaatgttgaacagaaaaaagagaaggtaaactaaaaagaggaaaaaaaaaattaaaaaaaaaaaactggcaacaaaatttttcgtttcggtgaattaggtaggtaatctgtttttgaacataaattaaataaatgactacagtggcaagtaaacaagggcaattattctagaaaaggttactttaagattctcatatatcacttttgcccctagaaaaatgtgattcgcaaatatcacgtgaacatttttctgttacagataatatgttgaccaatatctgaaataataaatattttaggtaccttttttttttttggcacactgtatatgagaatcttaaagtaaccatttttgaagaaaaattggccccttttttttttttgataaaggggtttcaaaataaatgcataaaaagtatagaaatgaggttatatagttttggaaagtagatgaaagagaaaaacatacaattaaagttgattctaagattagagaaagaaaacgcaatggatt

SEQ ID NO: 39969 - DNA, 920 bp, Arabidopsis thaliana landsberg
ttaacatggacaatagtaatcattcttcttcatcagtgtatgtataacaagaatcatggggggggcaatggaaatttcttgataaaaatgtcttaaagcctcgtggttttatgagacaacacgaatcatgaagggggtaatagaatgacctcaagtccttagtgagctttggagatctttctatggtctgttttaattcgcttcatctagattcagcttgatccaatccacgcccatatcggttatgacttgccttgatcaatgatcatagagtagctatgttctatgctacatgatcaagttcaatgccaaagaagttactaaaagaataaaaacaaaaagaaagaaattaccatggattcaacacaataagacaacaacagtgaaaagtctaatacacaagttagcatatatgctgaggaagattttgcacttgcaaggacagattattacgcaagaggcacatattctacaccaagtcaaatcaaggaaaaactaagaacccagtttaatagcataacgactataaactacgaaatttaaaattctcattttttagtttcttctctttcttttagtacaggaagattcccaatgccgttgaaaaacaaattccttgtgtctaattctaaagcatttcgtactaaaataattgttagaatttaatgaccaaaatcattaacacatgtaattgccgccaaattacaaatttttttattataaatcaccatgtttacaaaacacatatagttaagttaaccgttactttctttagcttatctctaagtcttggaaacaagaagaaaaaaaagagcatcaaaaggttcagttatgcttttttgtgtatttgggatttagggtgttctttgagctgataaggatcgactggaggagctaaccagagacccaccagaatgatc

SEQ ID NO: 39970 - DNA, 563 bp, Arabidopsis thaliana landsberg
gtggtgtcacagtgcttcactgtgatttcacattgctccattgtgatgtaacagtgttccactctggtgacacagtactcgactgatgtgtcacaatgatcaactgtggtgtgagagtgctacactctggtgtcacaatgctcactgttgagtcacagtgctcccctttggtgtaaagtgctccactttggtgtctcagtgctccactgtggtgtcacagtgctccactgtgatgtctcattgctccactgtggtgtcacagtgctccactgtgacgtctcattgctccactgtggtgtcacagtgctccactgtgatgtctcagtgctccactctggtgtcacagtgctccactgtggtgacactaggctacactgttttgtcaaagtgattcactgtggaattaccatgctccaccatcgtgtcattatgctcctttgtggtgtcacagtgctccaatgtggtgtcacgtgctctactgtggtggaacggttccacactgtgctgtcacagtgcttaaaagaaaagtcacttgatcaactgtgatttcagaatgctccact

SEQ ID NO: 39971 - DNA, 686 bp, Arabidopsis thaliana landsberg
acaagtgagtgaaggttacatgatcaggactaataccatatttatccatgagctcaaaatgcttgattgcatctcttccaaacccatgagtggcataagcagcaagcattgcagtccacgccatactatctggagaagtaatctcatgaaaaaccgtagacgaatcctccaacctcccaagtttcgaatacaagtctaataacgctgtcgttatacacttgtttccactgaacccaccaaacatgattagcccatgaattccttgcgccaatctcactacacccatgtcttcacagctacggagaacagccagaaaagtggcttgatcaggctcatgcccaacccttctgctcatgttaaagtaagccagacctttttcagctaaaccgttctgcaagtgaatcacaatcatcgtattccaagaaaccaaattctttatactcaaatcctcaaacaatttgcaggatgaagtcaaatctccagtctttccataccaattgataaaagcattcacaactttaacttcctcaagtacaccaaatttcatcaccaacccatgaatacaacgtccttcttccttacttcccccgtaaacacaagccgagatcatcgacaaaacgtaactcataggtctaaaccccactcagattcatcacctagacacacctaaacatttcccaataact

SEQ ID NO: 39972 - DNA, 453 bp, Arabidopsis thaliana landsberg
tcctaccctaagagattgaattatatattgattagagaaatgtattgtattcttcgaattttatgctcatgagcacggacacggtatatgggtttactgatcatcggtttaaacatttgaaattttgaacttactatctacatatgtcttcggtgaacaaacctttatacggattgataaataatactcttcgaatttattaatcttattaagcccacttggcgtgagaagaaggtatataaatactatagtagttgaaatatactacaataattactaaagtaactgcagtagttaagatttaatttaaccatagtcaacgaaatcgacgctgatattgatatttattggaatttcgacttgcgagcctcttcacatgaatttaggctttgaaattagagttatgatcattgaagttaatgtagcgatccaagcttattattttaattttta

SEQ ID NO: 39973 - DNA, 583 bp, Arabidopsis thaliana landsberg
tgagctccctggccagggtcgtcatcagcgcgcagactgttttcgagtgcatgtaggtgtgagcatcagggggcttttaacgcaccaggctgatcaacgcatgcgtattgcgctctacccaggcagacatgttctccaccagcggcagcacggagggcgcgacaatcactttgcccatgcgcaaatccctgaacatggacgccatttccttgcgagaagcctgaataatacctggcggtctgtctgtgctcggtatccagcggtgtcttgttaatggctgatggattggcaggcacagcctcgaccacctggccattcagctgcagcatgatcatttgcctgtctgtcggcggtgaaccagccaggtccagcgagacatccagcccacgcgcaaggtctatgaccacctactgtactggcaggctttcagcttctgcatatcggccacatctttgagcacaaaccgggtacgccagaaaggaagactcatccatggcccttgcagctcatggatatacatgccgattctcacctgactcactggtattgtttttaacatgttgccggttgggttggtatatgc

SEQ ID NO: 39974 - DNA, 584 bp, Arabidopsis thaliana landsberg
agatcatgctggacaccagtaattacggtctgccgcagacgcggaatcgggggtacctcattttcgttgaccgcacggccctccccgcggccgacgggatcaccgccacgtgggtgaagctcatgaaggagatgcagtgtcgcacatccgctacaatcgaccactatctcctccccgtgggcgatccgcacctcgacgcggcacgatccgacatggagttgtcgaccacaaccgccacggcgtccgaagagtctgcaaatccgagagctgtgtcgtgggagtatagcctaatgcgccatgaaaagttccgccgggaaaaaggcatcgaaaagggcatgaacccagtcaccggcctggaagtgcatcggggccaaaccgtccacgtccaacctcggcaggaatcgtggatttcctggctgatcaagcaacccccgagagttctggactgcatcgacatcctctttcaacatggacggctccagaaggactctcctgtcgactataagtacaagtcggcaatagtggacctgagccagaacgtggaccggactcgcccccagattgggaagtccccatgccttact

SEQ ID NO: 39975 - DNA, 324 bp, Arabidopsis thaliana landsberg
attccaagactagttacatgatcaaattatgaaattcaactcaaataagctgaaactaaagagaaagagagaagaaacctaaatggagaagcagaactgtgaggagtgccatctccttcctcgctttttaattcactaagaagctctctcatggtaaatgtcttgttcccatcatcatctttcttcagaacagaagtagtagattcctgttcaacctccgtcgaccggatcgggatctcctcaaatccttccggagacagatccacatcggttaaatccggtttcgtatcggttaccacaaattgtacctcctccggcttcacc

SEQ ID NO: 39976 - DNA, 515 bp, Arabidopsis thaliana landsberg
aaccgatagattgcttgtactcagcgacagctgccaaaataggagacaaataaaacaaacatcatttttgcaatataatctcttctgaaagtatgaagacaacagcaactcaagcatgaaagattggactacgataccctatcgcaatgatgggaaaacagtgaccaaacgatgcaagcttctatataccattcatcaaggataccctgaaaggttcaaggtccgtaggatccaaaaaattggggggagcgccaatttaaaagaattccccagacaaaatgcgcagagaggcacatgagatcatgtggcatgagtatatgggtaaagtgaacgatgaatctacaccaaagcaacagtattataaccagtgtctctatgagacacgagacccaccgcgacacttttagcgtggagaacaacatactaatgtgcaacgagaggtgattatatcatcttgtggagaggaggaaaactcacctctgttttaattcgcagcagcgaaaagaatacagcag

SEQ ID NO: 39977 - DNA, 680 bp, Arabidopsis thaliana landsberg
gtgtgtttgatgcaatttgtgaaagattcagtcgatgcatgcatgtgttgttgaattcgaagttaagattacgtaactatggaattagttatagtttgtgtatgcttttgagcttgatatcgaaattttggtaggtggagccgtgaagaacattttccattttgtcccaaagaaattctgatgattttgtggtgttaagtctgtcgatgagcgactgattttctgaacaaacctaatttgtctctggtgccgaaagtttgggtaggaatataaacttttttcctaatttttacccaaaaatttaagaaccacacaaacctgttagtctaccttcttaggaattcacgaacgtcgctactttacgtaaagggaaatagaaggaataaatcgtagatggggtcattatatagaatggcaatttgcactagggttggggctggtgttttagttggcttcttgccccttcaaggtcctgaattggtgaatttacgttccatcacaaaaatattattttttgacttcctagttcctacgtgccggcctcgttttactgatcaataacttggcctataatatcgaaaagtggtagtggcatttttatttatttaaaataataaacatttacattatatagttgcaataatataaagtttttagttaaaatataagttttatacatg

SEQ ID NO: 39978 - DNA, 507 bp, Arabidopsis thaliana landsberg
tcctgtttagtatgaaaacatcacattgctcaaattctctttgatatctcataaagtatactgctttgagtcttaacaggacacagagagtagcaggaaattgtaggaaaacattataaaaatgacaccaaaagggaaagtctggagtaccagagaaggtttagtagtacggttccaaaaggagtgataaaacggcaaggtgttcaactgttcaacagcggcagaaacaagccttggctcatttcctcctgcaaggttttgggttaacaatgagggtcagaatcaaggaataccaaactgcagaaaaagaaacatcaattcatgtttagtagtattagaaggaagaatacctaaggcagtacaccataaaccagcgagagagtcaagatattttttcccagtatcatcatacacataacttccctgtaagaaaaacgtcacacttacacaactgtttgactcaacatttacactatgaaaatgagattttgacatgtacctcagact

SEQ ID NO: 39979 - DNA, 458 bp, Arabidopsis thaliana landsberg
aactaaatcaatattaacgaaaccaagattggagactttagattaaaaccaggagatgctatacaaatgcatgggcacaggtgaagaaaacacaagaattatgtttaaaacaaacaaaataatgagaagaaaacagaaagtacattctccaaattccatcatttcaaggacttgttgaggggaagcgacaatctcttctcgtaatccagcaacaaatattcctttctataacattaagattggaaagcacatcagaatcgctagagaatttggttacaggggattctaagaagacatataataagtacctctagattttcatgaatctgtagttttctgtgctcaggagccagcaaatcgttaatatcttcattataaatctccaggtacgacatacgcaacagaaactctctacttgcatcctacggggccacagaaaatgcccacccacacgcccc

SEQ ID NO: 39980 - DNA, 627 bp, Arabidopsis thaliana landsberg
  unsure (1)..(627): unsure at all n locations
actttctgatttttcatcacttcatcatataaacaactttactaaagaggtcaaggaaaaaagaagaaacaaacacttaaatggaagaaaactacattcgagttgttctctactccattttgtctctcatcttcttgataatctctttcaagttcttgaaaccaaagaaacacaattttccaccgtctcccccgggatggttgccagtaataggccatctccgccttctgaagccacccatccaccgcaccctccgctccttctccgagaccctcgaccacaacgatggtggcggcgtgatgtccctccgacttggatcccgtctagtctacgtggtgtcgtcacataaggttgcggcagaggagtgctttggcaagaannnnnnnnnnnnnnnnnnnnnnnnnnnnnnnnnnnnnnnnnnnnnnnngttggttataacaatacaaacaatgatcgctgcaccttacgggtgatcacttggcgtaacctccgtcgcctctgcactatcgagatcttttcaacacaccgccttaactgctttctttatgtccgtaccgacgaagtacgtcgccttataagccgcctctctcgtctcgcaggtatatatgtattaatgtatatgctaca

SEQ ID NO: 39981 - DNA, 760 bp, Arabidopsis thaliana landsberg
gagggtagattccctcacctctacatacaaccaaaagaatctgccaatcactcccatcttttatttccttgaaaaatatatgtacataaaaatactatatagcctaactttacaagaacatctaacatttttaaacgtttatatagacacactattttcaattcatttagggctgagctgaacatatagatattcaatatccatattgattttatatatctcgtcgtcgactcatataccggatccaagacattatgttccacaactcaacaaacgataagaaaagtttttctacccaaaagtcaaaatagaagaaaacactaaaaaaattgctatcacatagttaaaagtagctcatcagcatcatgaatacaaaagatacatggatatgtgtaaacatacgacatgcgtacatataaatttggtaatactacatatgagtctatcattttcttctgtcgacatcgatgagtctatatatatgtagattcttcgttgaaaaatgttatatgaagggacatatatacaagtatggtgggggcaacattacggaagagcaagccaagatagagatgagacacaacacaacaaaccttacactttttctttaccttctttttaggagcaattcttgtatttatacaccacctttacttaattattatacaccattatctatcctgatatattaattatacaaagaaatatccgtgtggtgaatatatcgctggtataaaataaattatagaaatcaatagat

SEQ ID NO: 39982 - DNA, 1038 bp, Arabidopsis thaliana landsberg
tcttcgcaacgatagcttcctcctcatcaaagccctccatcgtttaggtacttttactttctattttctttaacaatgtatcactcaatttatatctgatatcttactataaatattgatgtaaatatatagttatcatcaaggagatgtgcatataggagacctaacacaatttaaaccaatgatgtatccaccgagacatttctcactccccggctcttcctccatcctccagctgcaaccaccatatctttatcctccgctgtcttcaccgtttcctcaacataacaccaacataggcaacaacggtacgcgtcaccaaaccctaaccaatagcgtttgcggtggtcgtgcactacctgactcaagttacaccttcatcggtgcaccagtggccaatggttctagagttgctccacatctacctccacatcatgggctataatgataataaaaaatggaaacaaatgtatttctcttttttggatttttcttttcaaatttggttgtttattaaatgttagactttaatttatccatcaagtgtttaaaatttatctatagttttgtggcgatattgaaagagacatgacaaagtaattgaaaacgacaaaaaagtgaaatgcaaattggagagggagtgtttggggttatgtaagaagattgtattttgtatgaatcaaggagcagcttttatctatttttgttttttttttcttattatataccttttgtcttggagctgttttgtgagaccacatagtgtttataatcgttcaatatatgttttttgattattttttcctgcggtgaaaaaaaagatagaactggagtgactagagagaggagagatcaagttagacctggacgttcagaagttgagttctaactaactcgtccactttttgctgtggggattaatcttttttttcttttgaaacaatttttttctatcgcattatatttgaatttaattagttttgtaagccaaatcattgttagattatacgtaatggtcttgtggaaagaaattgaatt

SEQ ID NO: 39983 - DNA, 462 bp, Arabidopsis thaliana landsberg
aacacctccgcaccacatgacatcttctcccacgcaccagtaatacacgctgcacgtcctgagcggacttggtggacacatgcgctgtcccaaccaggtacacgacctcaggctcccggtacccgtcggtgcgccgctcaacatatttcacaggccgtgtgtacacaaccagcgtgcctaagttttacaaagcatgcaaaggtttattttaccgtcaatccgtcagttgcgagtacgccccgtcggatgcagtttgacgctctgccaacccgacggaagcacgagttgatgtgttccaagaacttcgtggtgggacaagttgcacatttacggccgcagtagctgctgcaaacaatggttgtcaggctgcataaagcgatgagcggctgaaaaagagcacggcaacgcaacgagccgcaagaatcatgcagcctgtggcaaacatttttgaccgtgcacaga

SEQ ID NO: 39984 - DNA, 548 bp, Arabidopsis thaliana landsberg
taaggctaaaacggaaccacaaagtttgcctttttctctcaagtggttataaaaaaacaattcttgagatattatctcatactctctcgagttttctcaaacactgaagcttgcaactctttttggcgtatctaaaactatgtccaaggcgtatctaaaactatgtccaagctatccaatgatttttacccgattttcagcagaacacatacactatgaaatactataaagtatgattgaaagcatattagatatcgaaatatttttccatatatcatgtacacataaccgctacaaaaaataattgctatattattaaataataccttattaaactcacaaatattgtaagaaatattttacttaattttgaatactatattgcaataaatcaatttttgatagctcaagaatagaacagggtcaaaaaattagtatagtacacgaaatccgataatttcaattaacgacgacttcatgaaaacttttcgtatatagggcgtaaagacatttatatggccggtaatgcggttggaactattttttga

SEQ ID NO: 39985 - DNA, 131 bp, Arabidopsis thaliana landsberg
agcagagcgagcagtcctgtgttgcgtgcgctaggcataaatgccttcggcacggatgctgtggtgacattcgggtatacacctaacagttgctttgattgcgcattcctgcacacaaatgtaacatacat

SEQ ID NO: 39986 - DNA, 108 bp, Arabidopsis thaliana landsberg
gatggaattttttaaccaccgcggacagagatagcatgagcacattctgttggagtatgagctgcatttactggaagacggctgatccgattatgagcgggagcaaat

SEQ ID NO: 39987 - DNA, 951 bp, Arabidopsis thaliana landsberg
agctttttttttttgttggcatgaagactacagtttcactctcatttctgtttctttatatgttaagggttcgaagatagcagaaaagggtcttgtttgattgatagaattgtgaacaaagtttccgagaaagtgaacacaatgctaatatatagggctaaattttgataagaaacgggagagtttcatgtgtgttaaaattaagatggtggaatgtttgactatgaagttgtcttggtgtttgatctaatggataattccatgggtttaatctatggaaactgatgtaggttttcagtgggaccggtattggttagttgttaactataaaggaagagcatacactcaaagagttgagccaacccttgctcttgttgaatcggagttgcctaaggaagccttcttggaagattgggagccaacaaatgactcattgttgggtaaatttctggcttaactatgagaattgtctctgaatcgagacttcaatttacgttcttgattattcattttgcagtgataagagctcctggtatgagtccgttaaagataccgttgactaggccaagctcggtagcagaaggtgtgtcgatgtgggaatggtctggctctgcttttgatgaaggagaagaagctgcgaaatggttttcagattatcttggaaaacaaagccgtttggttcggtttaataaaggtttcagtttactttcttttgaatcttttgatttgcaacaaatcttaatgcaccgagttgatcaagttatttgtctacagatactgaaactagaccttcacctcctgagtttgcagcgggttactctacaacattcatggatatgtttccgtttttggttgcatctcaggtgagccaatatctatatttccgatatcggttaatgtgaataggcatttccgcatttgatcttctttttgttttgggtggtaggggtc

SEQ ID NO: 39988 - DNA, 918 bp, Arabidopsis thaliana landsberg
  unsure (1)..(918): unsure at all n locations
tggttttgatttaaaaatctaaaatatatattataggaacatgttacacaccatctattattacatgaattagtaaaaagaattaaacccaagaagatgttatgtacatgtcatgacgtatatttgaagttatggatcttgattggggcaaaccaaatttgcatctaaagaacggtttctttgttgtgtaatggaaactagactcacgtgcattttattttcatttgtgacttgtaacacaattagggatttgggttagtagaaaaaaaatcactaattttatgtctctttcttcattcttttcccctgtatatagtatggtctggattctggaatcacaacatatatgatcactgatgatacgtatattaatatgtttgaagggaatttaaatcatgcaagctcaggtactgaatgtggtgttgttaatgcttctaatggctacatgagtagccatgtctatggatctatggtacgtaccaaactataattcattaattcaaataatatttatactacatatatgaatagaaatttaatgaaactgaaatttttgggtgaaggaacaagactgttctatgaattacaacaacgtaggtggaggatgggcaaacatggatcatcattactcatctgcaccttacaacttcttcgatagagcaaagcctctgtttggtctagaaggtcatcaagacgaagaagaatgtggtggcgatgcttatctggaacatcgacgtacgcttcctctcttccctatgcacggngaagatcacatcaacggtggtagtggtgccatctggaagtatggccaatcggaagttcgcccttgcgcttctcttgagctacgtctgaactagctcttacgccgtgtcgctcgggattaaaagctcttcctctctcttctctttcgactcgatg

SEQ ID NO: 39989 - DNA, 559 bp, Arabidopsis thaliana landsberg
tcgccgcgctgagcccgaacttgcagcgcggcgcacatgccgtttttcggctcgcacaggacccggaactgctggcgctgctgcgcgaggaactgccgctgcagttcgccgaactgcagaacgcgatcgagagcggcaaactggaagcggcgcgcgacgccgcgcacacgctgcgcggcaccgccgcgttctatcacctcgcgcaactgcggcagaccaccaccgccgtcgaggactggctgcgcgatgccgatgcgattcagcccggcccgagcacgcgccgcgccttgtccggcgtgcgcaacgcgctcgacgatgcgctggcggcgatgcgtgacacctgaaccgcgcgttcagcgcacgccgcgttcgaggatcacgtaggcgctgacgaaaccgccgtcgtcgctgagcgagacatgcgccgcaccgatccactcgcgcttcattcgtacctgcatcttgcggtcgaacaccagcaccggccggccgcccgcttcacggacgacgccgacttccttccagccgataccgtcgaaaccggtaccgagtgccttga

SEQ ID NO: 39990 - DNA, 363 bp, Arabidopsis thaliana landsberg
atcaaggcgctccagcgttttcacgggtgacttggcttggtactgagaggcccgaaatgcgctgaaatcgtgggttccaagcaaacactggctggctcgcctcatagcatccaaatcaaggggatagtgcacccaggtcatgaagggccgaaacgggtcttgcaccggtgacgagtaaaaactataccgataagttcttgcaaaggcagaaaaacgggcgtgaaattcagaaccaacacgcttggcgccggtcactgtgatggtgttcggtagcgcgtggttgacgcctttcacccaagcggacatcgggcgaactacgtctgtgtcgaagtgcaccaactgctggcgggcatgcacacccgc

SEQ ID NO: 39991 - DNA, 837 bp, Arabidopsis thaliana landsberg
taacttaggggaaaataagtcactgtcttgaaaaaggatttgaaagataatatacccaaaaccccgctgtttttcgggcgggtgcttctaaaggtatattgtaagcttttgacgtatttccctccccatcaagagcgattggtggtctataagcgccttgttcagtatcacctatacgtgtataactctccatgtttccactagcttctttattatagatgcagcatccataatcagatagcaccgcagcatactacgaagaaaaaaagtatctcagatttagtatctaaaactaaggtagtaacctcaacaacggaatttccaacagatgtaccccaaagtagagtgtgacaagagtaaatgtccacctgtttcaaaaaaaaagtttagatctttttcattcatttcaaggattcagaaatgtgagaaggaagtataatgattaaaactcactgagtatagaagtagaatatgccagctccatcgcgcacaacattggaaatgagtaaagtcaacattgcaacaaacgagaataccctaaaggcaagcaaccaaagagggtggattcttttaaaacatgtggtccaagcttcatcttggaacaatgtccctggtaattctcgctggctctcgcgttgtcttcttctcttgccttcatatttccaaatgagaacagctgctaatactattggagctaagaggattaatgcacagaggaggaccctccaattcaaccagtaacttgaagctgtggtatcagcagccatggccagtcaatacagtcctaagaatccaccaacaaagcaaaagagaacatcaccactaagaaacatattg

SEQ ID NO: 39992 - DNA, 547 bp, Arabidopsis thaliana landsberg
taaatgatatgagatattcttgttattaaccttttttttgtttcctgaaacttaacatagtattaggggctgggcaacatatgttgtcttgtttccggtcgaaaaaattgccgaccatcctactaattgatggtccaatagaattttcaattccgttgagatagataggatagtattatcaaaattttcataagaatttgtaacatatccatttgtatgaatgtttaagtgtaaacatctgtatatatttttatatgaaacccatggattaagaattattgtgaagctgaaatttattggagttgaaaacttaggtggtgtgtaatgaaggtgagatgtatatgttcaagcacatttaaaacatacgttcccattcttatttgacgtgattattaaatggccactaaatgaacagcgcaaagtttaatttaatagtattattactatcatctttaatttaatcccaactacttatattttgtggagattttagttttttcgagatcgatcactaacctatcaccacatttgtccaattaaagaggag

SEQ ID NO: 39993 - DNA, 945 bp, Arabidopsis thaliana landsberg
gattggtgaggtaagaaattagagcttatctacacacatgaaatgacaaaaaaaagatgttgccattttaggacccacgttaagaagtatcgattgtcttctttgacaaggtcccttctctcctttgatattttatatttcctataaccaaacccattggttaacacgctaattcattttccacaatatttgattgctaataaaatatttagtgataaaaacaagatttagttagctgatgattaagaagaatctttcgtaccaagttttttaagtttctataagtaatggattaagacgtctacctaagcgggtatttaaatttcttgtaaaataatacaaaaattattggtgtagataactatattcaagcttcaagtataaacttggtactaattaacagatgaacgtttttcatattttcggcttgtttattgcatctaaagtaaattaccaaattaaccacaaaacgaaaggaagaaaaaaagaagatgatgtgatgtgttatacaagttacaagtttaaagtccctttctagggataaaaatgatactaaaagatagtagtggaggttgcttgctcggaattactagtgttattccaggaaaaagcaactacgttttcatttaacaagtgtagaaagagggagtcatttaataaacacctagaatcatttatttttcttattataatttcttatcatccttgatatgatcctttacgtaatgagaatataggtgataatattaaaaaatttgaggaaagcttttcgtcgaaaatcaactaaatcaatacttgtaaaatacaaaggcaattattcaaaaacactaatattaggttatttggtagcttttagattatcagtttgcaatccattattaaaaaatcaaatgcggatgaacaaaaagcaataatcattgaacttaggcacttagcatacagaat

SEQ ID NO: 39994 - DNA, 595 bp, Arabidopsis thaliana landsberg
tccgatttgattcggatcggttaagctagtctctgttctttttcaggtgtggaagttcatgtgacgggtagggtcaaagcaagttcaccaaaaacagcagaggaagtgaacatatcagtaaacagaacaacaaacagaagtggcgtgtacaagctcgagatccctcacgtagatggcatcgattgtgtcgacggaatcgctatatcatcacaatgcagtgccaagatactcaaaacctcctctgacgacaacggaggctgcagcatccctgttttccaaactgcaaccaacgaagtatccatcaaatcaaagcaagatcgtgtctgtatctacagcttaagcgcactaagctataaaccttctcacaaaaacacatcattgtgtggaaacggagggaagaaacatcaccgaaaggacgagaaggtggagaagaagtttagagattcgaaattcttctggccttatttggcaccgtattggatcccttggccatacccggatctaccttcactgccaactctaccgccttttacgtcctttcctgtcctttctataccttccggatacccaactctggcatcgccatctttccgat

SEQ ID NO: 39995 - DNA, 104 bp, Arabidopsis thaliana landsberg
cgatcaatcaaaataccaaaaaagtttaaagcaataaaactttatgcataccctgtccttcgagagaatcatccatgaattcttggtcatggagcaccccactt

SEQ ID NO: 39996 - DNA, 538 bp, Arabidopsis thaliana landsberg
ccaaacacacgatgtgaaatataatctaatttttctttgaaatataagatttaatttcaagaaatctcggtgcataaaacatttgagtggatatacacatatacccaaaacattttccttcactgatcactttcatcagagagctaggaatgtcaaagaaagtgaccatagcttacggtggttccaatggaaacaaatttgatgatggtgtttacgagggtacttacgacggtgtgcgtaaattgatagttggagaagactttcatggcatcgtttacctcaagatccagtacgtgaaaaacggtgatgtcgttgttaaagaacacggaagagcaagaggaacacatattacagaggtttgaaatttcatttttaatattattcataattctctccccccatgatttgtttttgctcttgcttttaactgctcttttttttcttttgttttgctatgttattaagaccgagtttgaagtgaagtgcccagacgaatacattacgtctatttggggaacatgcagaaacgatcatcaca

SEQ ID NO: 39997 - DNA, 642 bp, Arabidopsis thaliana landsberg
ggttgaagagaagtttggtcttgttcttaagttgaagtctccacttgtggctattcctgttccaaggttgtccgatccaaaactctacacagcttaagtaagaaggatgttgaattgagttttcttgtttaaagtttacttttctttatctgtgtctggagttttgatgctttgtataaaagatgtgtcaagttacatttttgataacatttaatataacaaagttttacttacaataataacgcctaatagtcgatgccaaagctataaaactatattgtagttatatttttggcaagtcgattaaaattcttgggtcaacaaattacaaattagtatgaaggttatcgagtagagatttacaaactacaatttcttaatttgtttggtactatcagtgaattaattgagaatatttatattaattaatgtataattatatgacaaatacttcacgtcacactaaatgagtccttcttagcggcaaaatatgcgttattgggctaggcccatttataaacgacgccgtttacacagtctagaaactcaacatcgtcgtttctctcccggcgactttatcgccgcctttttcttctttaaactctctggctcaatttcgctttgctttgagcttgtgagcta

SEQ ID NO: 39998 - DNA, 396 bp, Arabidopsis thaliana landsberg
atgttgttgttgtttagtaagagagctttgtggtcttgttctatttcaagtacttgatgatgagactgtaaggttggctcattttgcatctgaatgcaaagaatctcggcttgagccactgctagttgcatctgaagctgcgagacttggttttgtaagtaggagattgctcctacgcagccgtagaccggatctcttactcttgcgtttgcttcaaaaaccagactattcaccgcgtcagctctttgatgaactggtagctcctgtgacaatttaaataatcatgtaaacattttctatatagaacatattttgtagcacaatttctgattcatatatgtccatatagtagtttatcaagcataactaatcaactaattaagaataaataatatg

SEQ ID NO: 39999 - DNA, 1018 bp, Arabidopsis thaliana landsberg
agacacaataataatattaaaaaaacaaaaattgagcaaactcaagtgaagtgttacgtatagtatacacagatacactacactaataagtcgctttatattcattttaaaatcataatcccagcatacattcataagttttattttgcaaaatgataagctatctagatacctcattatatatttgatatgtaatatgttgttatctcaaattcttcgtcgtctgagttaggtaagcttttaattttagctacccaaatattttaaaaaattaaatacatgaatgtataatatacacatctattttattttatttttacgacaaaaaaatcacatatttaaatacgtatatatatatatatatttttaatgatcaaagggtacaatgacagttttaacatctagtgtttttgttagttaaaagtgttaacatagagttttactatgcttttggaatctttcttctaatgtgccaactacacagaaatacatatattaccactaggaatcggaccatatcatagatatcaggattagataactagttctcgtcgctatcacttcgcattaagttctagtaattgttaaagattctaattttttactaaacaaaaacgaaatcaacatcaaatatgcaaagtgtgtgttgtccacacaagtgactcaaagtatacgcaggtgggattggaccatattattgcaaatcgtttccgaaccactcatatttctttttttctctccttttttttatccggagaattatggaaccacttcatttcaacttcaaaactaattttttggttcagtgatcaaatacaaaaaaaaaaaaagttatagatattaaatagaaaactattccaatcttaaaaatacaaatgaaaccataattttaatttatacaaaactatttaattagctaagggttgtcttaacgtttagaaaataaaaaattatgattggctgcttaaaattacaatgaatgaataaaaaaaatatgcaatgaatgaaagaataaatt

SEQ ID NO: 40000 - DNA, 698 bp, Arabidopsis thaliana landsberg
tggcgcaacgattctgaatgagtgggaaaagtatctacctctcttctggcaactggttccaccgagtgaggaagacactcctgaagcttctgctgcttacgtaagaacatccaccggggaagtcacatttcaatcggcttagagatcattcaagagcaggttgtggcagttgaaacacaaggattgatatacatcaatggtggaggactatggagagcagattaatggaaaatcattatcattcacatgtagatcaaatgtgtgggacaatattcttattgtcttgtgatctttacaacaataccatggttgctataactgtacagtaaattcagtaaaataactgctttcaactgtcataatcatatctcataaaaatttgcaatttctctttattgaataagttttccagttgaataatcattaatcagaagaagaaaaaaatgttacagatttgataaaagtctaacataaactaacaacattcactcttttaaacacttcatatcgctcattatgattggcgtaatcccaagagcataccattgatgagttcctccagtctcactttgcaatctcctctcatctgcacaaaaagaagaataaaacaatagattttagtttctcttaatgagttccatgtaagaagaacatgaccttctgatatctttagacaagtacctgaagatgtagagtgt

SEQ ID NO: 40001 - DNA, 531 bp, Arabidopsis thaliana landsberg
tagaccattcgctccaagagaaacataagatgttacaagttctaaccaaaccacattatcatcattttattcatacaacttttgttaccatgagacggttcacactctttatagaacacaggaagaaacataatcttacaactctaagcctgtttcgttaactcaatgacccacaaatgatatgcactgcatacaaagttgcaacgcggaaaacccgagttagcagccatagctacatactcggcccgcgacctctctttacctccagataattgagtgagcatcaacagatccatatcaaaagcaatgtgtggatatcacatcatgattatatgcttcatctggaggactacttccatgacaatcactttcccattctcaggtaatgctttgcatcaatttttgagaatcttttcacagtcttcagcagtccagtcatgaagtattcgctgtaaaaaaaaaaggaatgaacaatacttgagagaaaagtatcattatattagaacagagtaggctttgtggtttggttct

SEQ ID NO: 40002 - DNA, 870 bp, Arabidopsis thaliana landsberg
aaaatttcgtcttaaataagaaatgatattaataaaaatatctttggattaataacagatcaccgaaaattagaatatggttttaccaacccaattaaattctcaaattaattggaaagagaataatgttgacaacaacaaaaaggaaataaatcgcatgcaatgaaaggaatgaatcttcttcttcttcttctctattaacgcttcttcttcttctccttcttcatcaccctcctccacttctctcagtcacattggcgaccaaaaaatctctgaaatcacgtctccaagatggagaaaagcttctcggccactttcttctctccttttctccggagcttgcagagatcgctgcaagagctggatttgacttcattgtcgtctaccttgagcacggtgccggcgggattcgtgaagcgcttcactgcattcgagcaatcgaagccgctggttgctccactgtcctccgtgtacccgacattagtcaggcttgagctaagaaagcgttagatctcggacccgacggcattatgttccctttggtcgaaaccggaagatctgcatccgaggcggtctcgttttgcctgtatcgtcctgacagtgttcgcggctgtgcttactccgttgtgagagactccagcttcggatttaacgaagggtatttgggtaattacgctgataagctcttcattatgagccaggttcgatcctcaaatcccctttgattttgaattttattggacgaaattgataaatggaatcataaaatgcctacttgtgaaaaaaatggaagttagaattttcatgcaattgatatattatgcgcacattgaatcagaggaaggtatgaaaaatgtgacggagatcata

SEQ ID NO: 40003 - DNA, 969 bp, Arabidopsis thaliana landsberg
tattggtcttgtcttctatcttacaacactttttttggcttttaaatacgtccaaaccccatgaatgatcttgggtactctatatatatgttttttttaatcgaaaaagtctttaatgtatgaactaaaactgaaagatacgaaccaagaatggttattgtttcatattcagaaatttttatcagaaatattttcgattctcatgtatatatggactgaaaaatcactatacaccaaaaaatagcttgtacccatgaatttcgacgtacattcaacattatttcaaattgaatcttccatcattttgaactgcatgttggaatatcaacattacgtttttttcaaaaaagaaaagaatatcaacattccgccgacaaaacaatagggcgagaggaagtggagaagtttgagaattcaaacacatacatatataacatcaaggatatttcgctataaaaaacactaaaaatatcccaagcataaatatataatatgtccagtttagtgtccacatatatgttttatgttaatatattttgacaatttgacatttctttttaatgttaacgtacaccacaccttacatgccaacaactcataatttcatgaattttctctgtgtaatttcatctgtagattaccaaactcactgcattgtgaagaaaataacaaagattcatcaattttctcttgaatttaaccttgtaccaaaaaaaaaaatattttctttcagaagattcagtttgttttttccaaacttttggaaatgacatgttcaagataagagtgttattatcacacaatcaaaacttaaaggaaaaaaaaacagaaacaaagataataatttgagatagcagagatgtctagcaagcagagaaaaaaaacgacagttcgaagataacgagggcattagaaagggacacctgggttagagggtggtcctacgtaaactgattttttatcagcagt

SEQ ID NO: 40004 - DNA, 121 bp, Arabidopsis thaliana landsberg
acgcagtatatagaaggttttaggaaacttccctagatcaataaccacaaccatatgaattcatagtacgtgcgaggaactgagtatattacatgaattaattgaactactcaacagacaa

SEQ ID NO: 40005 - DNA, 538 bp, Arabidopsis thaliana landsberg
taactctgttgaacgaaaccattagtttggtaggtttacaaatattcaataaacctatatatatataagtttgtcagagtttgtgtcttacgtaactacgtaagtttccttcgagacattacagaaagattcatgttagaatagttactactatgagcctatgacacataccaatcgattctttttgtatttataaaactttgagttatgtagagtgatgaattatcgttcttaacaaaaacaaacacagcaaaaaaaaaagaaaaacgagatgaactatatctatcacggattcattaaaatttaaaagagatgaactatatctatcacggattcattcacggtatcaacaatgtccttctctttaagttttcttagtcaacgcttccactattttcttgatatatttctattttgcttgacatttacccatgaaaccaatacatcacaaatttataccagtatttccataattccatgatcataataaatttactattagcttaacatttttttaaaaattgacaagttttgtttg

SEQ ID NO: 40006 - DNA, 143 bp, Arabidopsis thaliana landsberg
tagacactgagacattcacctgtttggctcatacgtgcctccagatggctgaggggacttggtgtcacaagagagctgaggtgctgggaaagctaagactaaccttggctccgggtataacaactgtgctacccaatccgtca

SEQ ID NO: 40007 - DNA, 481 bp, Arabidopsis thaliana landsberg
atatgaatttaacaatggggattaagggtttctaaaacttgtttttaaattgcgattagttgggttattgagggcaaaaagtgtagttttggttgttgttgttgttgctgcatgacaggatgtatagcaacgagaccaggagcaagcaccgttgaagcttaccatttatcaacgcaccgtcaaattaataaatcaagagttcataaaattaagtcgtcaatttcgattttcaagatggttaaggttaataataatcaattgcgtatgccgtataattaatgttttaaataaatttgaaagacgaacgatcatctttattgatttcaaacaatctttataacaatctttatagtccaaaaagaagtttctaacttttgcatgtagcgttcaaaggtttattcgttgctgcccaccgaaaactcaattaattcttctcttcgtaaaccttagtgatgtaataactaacctttcgtataacaac

SEQ ID NO: 40008 - DNA, 1003 bp, Arabidopsis thaliana landsberg
gagcttccgtttcggttggaccacttccccttttaaatttatgttttcgccaagatgttttcacccactcaggcatggggcgtgtttgtcacgtgactaaaccaattaattgggtttagttctggtgtttatacatattgcgcatggctgattttatcaattaatggagtaccaaattgtggacgcttcattttgatctaaaattaccaaatttttatagtgaaatatatgtcaataagtcatgagaaatcattgttatttttttgtcataaatctgaatagttattttcttttggttttgtaatgaatttataacatattagtattacttaaaattgtcctattaattatctgataagatcagtattagaatatagatgctttattcaatgagttgtttttcttagacattggcgcgtggaagaggatatataaagttcatataaatgtgaatatgtaagaattggagaagaaaataaaatggtcccaaagagagacgaaaataaatgcatttttttgggtggaatgaatataaagaaagaaagacattagaaagaaaaaagaagcaaaaaaaatggaggaccacttaatcacctctcatgcacagtcccttagtttgggaacaattcttgacaacaattataaatactccaattctgaaaactaatagtttgttattaacgtataatctcaaagttttggatattcttatcctgtacttccttgatagtttcagttaacagtttgtaattaacacatgtatttaatttggaaacaaaaaattgaatgtatagatgatttttttttttgaattgttggtaaatatatgaacttgacgtatatagcaatagtatactatatttaagcaactgaatgtgaatattctataacacaagtaatatcaattttttgtgatattgttggctataagttatattcgaatttgtcatttataaaaaaactcactggtttagccatccaatgaaagaagaaagctttttgg

SEQ ID NO: 40009 - DNA, 510 bp, Arabidopsis thaliana landsberg
cttcctacttggttatcggaatcataaacatagatctcctgaactcgttgtaccgtgggacgctcctctccctgtccctgtagactaaaggaaccgagaaaaccgaattcacgtgagaatcaagtcaaacaacaatgaacggctgagatcaggttgacttactctctaaagcagctaagtcgacgtggtctggacgagcttggccgttggggtcgtggggaacaatgtctcttaaccacatcggataattcatcagttcaagggcaccacttgcttggtgacccattgagaccattagcttagtgaatccaatgtgagacatggtttcttctcccttgcgaccaatcaaatgtctcatagaaatcctaaatccaatgaaataaaaccctaaatttttttacaatttggaaacttcaaaatgggagagagatgtatatatataaatgtcgagttatactcttgaatcaacggtagtgatttattagttcctggtacatcatcaatgtcacg

SEQ ID NO: 40010 - DNA, 127 bp, Arabidopsis thaliana landsberg
tgggggggctgggtttgggtttctggctatatccgcgtgggtgcttttataggtaagactcggacatcggttatggacagcactgtggttgaacaacatggaatcctatcacggactgacttaatgg

SEQ ID NO: 40011 - DNA, 889 bp, Arabidopsis thaliana landsberg
ttcttcgaaacctcgacttctatctactcatgttgttatcttttatattgagcgtccaaacatgttttgggaggaaggaactcaatttgtcaacttgacgatattatacatatatatagtttttttaaatgtccaattccattttgtaactatgtacccattattcaatgtacaacaaaacaaatcattgcttttagatgtggccactaaccactttcactaacaatcaaagattaaattttggtgctaaagtgctgcgtaagcacccttccattatccatataaatcatattataatatttctctatataacacaaatatagagaaatttcttatatcacatgtagcaaaaacaaatttcttatagttaaacggtcttcaacttctgtcgatagttgcaaatagcctagtgttattacataagttgatatcttgaacatccatggttcgacctagttataaattctatatagaatggtccaaagtgagactctcccaaaaataaaacataaataaatttttgatcaaataaactattcaaaaatagaatattgatgttaatagatttttaaactataatatagaatcgatattgtacgtatatatttgtagacaattgatccaatgttttgtttgatagaatcttgcatattatatttttaaaaatatgttagaatgtagagacaaacacaattccacaagatttggattctcaaaaccttcactacaaatctttttatgatcttactgattcacatattaacacgacatcaaaacaatcatcgactcgacattgaccaatgtctagtttctatgcttcatcatgttgatcgttgaacgttgttccaccgaacacgctataggttacaaataaaattgacactctcag

SEQ ID NO: 40012 - DNA, 591 bp, Arabidopsis thaliana landsberg
ctgcgggtacactgcggtcgctttttttaccgtgaaatcacccttttcattgaggtattctttgactctctaaagaaagagtcagctataaggtaataagacgaaccatccacagttagatgtaacaaaggaatgccacgaacgactaaaagttatataacatatgaatttatttaactttcgagatatatatagggcagtagaatacaccagcagtaaaaatatacttaaataaatgaagaacaatatcttctaatattttttcaatgtaaaatgtaagataatgtagtgcatatatattcccatatatacatcccagctctaattttcatgcactccacccccatacaagtgttttgtaatattcataaactttaaggttccaactctaaccttaaagttgagatgctaccattacaatgtataggaattaaaatataggttatggggattaaatattatacgcattatatctatccaactcagtccatggctccgagcgtaatgccttatccataagtcgccgtaaaagctaactaactcgacgtctcgacattgaagaaaaaagaatgggtcactaaaaaagaatat

SEQ ID NO: 40013 - DNA, 544 bp, Arabidopsis thaliana landsberg
gttgtggatactgaaaacaaaaatgcaatacatgctttatgatataaactgaaaacaaaaatgtaatgtagtggttgtttcatctagattagcccacattgtttgctatctgtaaatctgattaattgtccatctttatctcaaaacaacgaaaacgaaatagcctttcatacaaaaagagagtatcaaggctgtatttgatggatatacattaaacaaaaatgggtgaaagtgaggaatgtgctacgataaaggtcaaaaggctgctcttgtagctgcatgagatatgtatgagaatagtgaaatgatttaatcatggaaaaaaggacgggtaaattaaacagatttagaagatattaggctgatcatgttatccttgtgagcccccatttcaagtttagatacttcaatgcatctatagtccatgcatggcctgataagagatgcacataaaggtaagataatgtatctatagtccatgcatggcctaattagcacgactgtgagttgcatatatgtatttgattagattattgacttgatg

SEQ ID NO: 40014 - DNA, 491 bp, Arabidopsis thaliana landsberg
cattatatttttaagcgcatgctctccatacatatggaaggcccaggccttgtttctaggcatcattatgatgttatatgtttgtggagttcaggttgatctcaggtcaagagtacacttattcgactgtccaagcaaatggacactcaataaacctaatttgcttgaaaattgaaacatacacttatttgacggtccaatcataatagacagttatatggtaataaataaatatatatatatataatatattatagtgtttatattataattcaccgaattatcaattaagtgtaataccagtgtaatacctaaaagctattatttagacttaaattattgaagagttccaaaactacaaagtttattattgagcagggagctgacgagttgctaataaagagatattgatcattaacctaaccccccaatttgtacgcaccatataatcaaaaactgttttacaattatcgagcataccaagcacactt

SEQ ID NO: 40015 - DNA, 1060 bp, Arabidopsis thaliana landsberg
acatcactttaagaaaacgaatgcttttaatcgtttcgtcaatagaaacgcacactattatattatcttatcactagacgcataatggagattgaaatggagcgcactagtctgtcaagccaacgtgggtcgctaggtgtatacccaactctatagtaacagtctctcataacattaaatgaatgctatttttatatcaaaaggaaaaatacaaaaaaatgaaaacgagtaattcattatggcttttacctgcgagacccacgtgcgttggaaagtagactggtcaccacgtggcgtgtgaccattcgttttctggataaccggcaagtcactccagcgttatccggaaatttgtaaaaacgacatgtaaatcaactcgtttgaatagaatggctcgagtccaccaatcaaatctcacgagccattttgtaactgaccaccgagtaatctgtaatctgagctcttttattaatcggattgaataaattcgcttggagtccgtcagtcgtgtccgtgagcgcgtgtctcactcgcttgagctgatgaagtgcgataatgacgtggcatgttgggatggagaccaaagaccagcattttattttattttatagtaactaattttaaaaaccaaacaacctgagattaaaattttaatttttactgtactgtagtaaatttgggtcctgattaagattaggcatatttatctcatagtttataacaagtagcagctgaaatttgtattactagcttatagtaattaaactaaaaactacgttccaggttttaaattattgtttaaagaagatataataatatattaagaaaatagttaattaaggtaaggaggaaagtagggtttggtctgtaggttagggttcaaagagggaagagattaggagaaaggaagcatgaaggcatgacccatttcttcaattagtgctccttaatctggtgacacgtgtaggtcccacgtgtaatcacttcacattattatttttcaaaaatcaattagtaaaaacaaaactctgtccatcatcaaatagtagtagttttttat

SEQ ID NO: 40016 - DNA, 577 bp, Arabidopsis thaliana landsberg
cgatgcactttttcccccagcctctgttgtggccatccttcccacatgtgctgcattgtcttgtcttcttctttttccatcctttgccctacaagtagatgacacgtttggttatgatagattcggaggacttaaaactatgctaagagtttagttatttaccggctcccccctcgatggaatccgaacggaccttggtctcccaactggtcttcttgtatttggtggatatacaaccactagactaatatcgttcggaacctctgtgaccttttcttttggcgggggtagaatatgttcacgctataatttacgccactctgacacgaaggcatagtctccgatcaaggagtatatgtccacgttccttacacccaccgttgctaaagcgtgacaacacgggaccattagcacatcacatactctgcaaggacatgtctttatctcaaggtcaacagtaaaaatcatgccaaaactgtcgttaacttgaaaaatccattcgtctgctgctatgaccgcacaatctggggctaatttaagatgatctattagcaaatcctcgatttttggcggacat

SEQ ID NO: 40017 - DNA, 939 bp, Arabidopsis thaliana landsberg
aatgataaagttaccaacagatatacattttcaatttttttggccgcaaccactaatcggggcgaaaggccaatgaatcaaaaggatagagagcacaaaaaccataaagatgctgcaagactggcctcttcctcgtcttcttctcccatccaatgtattgtctgtttcgccgctccaatcctccatcaaccttactgtaacattcttcgctgtgcaaccgtatatttcacacacactgccaagaacaccaaacaaaagcaccgagtttgacttaatgttgaatcttgtccattagtccatactcttactaagctaataacagacgaagatatagaattgattacctgaatcctcttaacttgaaccaggcttcagcgcaatggaaatgtgcaaggccaagctcgtttttacatttgccaccaatctcaatcaactccggacttactgacttatcatcaccagaagcctcaggtgattgatcagaaccaaaatgacaaatcctacagattctttctcctacaccactcaaatcaatagtgtggaactccttcgcctttgctttcgatatatcactctctgcctcgttgcagcttaccgcagtaacattatccgcaacttcctcatgaacaacatgagctgaaatgttactactgcaactaacaccatctttggccattcttgaatcattttcttttccctgttgtggtttctttacatcttcctcttcctcaatcaacaccttttttgatacagagtcactggtctgacccttaacatcactcgaattctcacaacttttagggtccatttaattcatatatacaacaaaagaggatggcttttgctcaagttcctacaaagtccaagacccgtaacctcttagtaagattgtattcagataaaaagccaacagaaacaacattccaataattgaaaacc

SEQ ID NO: 40018 - DNA, 559 bp, Arabidopsis thaliana landsberg
ttgcaggagaagtatattccatcatctcaagagaagaaatggttctacaaagtcaaaggaatggagcaatgttatggagggggtatcatcctcgatgaatcatggctcggcaaaagcacccactccctaccgctggctatccagaaacatcagccattggccaaaactttgatcattacgccattgctcgctatgtctcgctggcaagaagacatcgcccaactgtttagtgcaaaagtggttgtgtttggtgagggatgcacagctgaagacttgactgcttctgagtttgtcataactagtcacgcaacagtcaagagtggctacaaagcagttttttgcccacactgccgcaagcttcttagctcagccaaaccgcagcacttctgcgacagatacaaagatgtaaagaaaaaggggaaaaccatcgggccactccactcaactgaatgggaaagggtttttttggacgaaggccacctcttggaaggaggagaccaagcgatgtttgccctgaaagcaaagtttcgatggattcttaccagtacacttgacactg

SEQ ID NO: 40019 - DNA, 622 bp, Arabidopsis thaliana landsberg
tgacgactcttgtggattgcaaaatctctgccattgctactagtggaactcataccgctgctattactgaatcaggtttccacatgctttctcttcttgctacatttctgtagttgtagacatgttttcatatgtatgtacaacttgaaaagaacttaattgaagttttccaacaaaccatccccactgtgctgtcactgaggaccatatgtctatagttaccctctttttcttaaaatatagaccggttcttcttcttctttgtttcaattgtttgatatactagtattcggtctgtgtcttaatcgagcaagacttgttctttggttttaggggagctttatatgtggggaagagaagaaggagatggtagattaggactcgggccaggccgaggaccaaacgaaggtggtgggcttagtgttccttcaaaggtcaaagctttaacagttcccgtagcctctgtctcatgtggtggttttttcacaatggctcttacaaaagagggacaactctggaactggggaggtaaaacccaattcaagccttcgtttttacatttggtggtgtaaaaagaattcattggatctttttgtatcagcaaattccaattataactgga

SEQ ID NO: 40020 - DNA, 572 bp, Arabidopsis thaliana landsberg
actctgttttttctttttttttttttgtcgttttgcttttgaggagggcctttgactttctgattaccttgtcggttggtttttcttttttttgtctttttggttgttgttttcttgaaatgtaaatagagagacagtatagagactgaagttgtatgtatgtatgtatgatgtatcagcattgtagattctattctatgtatcagttgaaatttcaaggagatatgcaaaatctatgtttaatctgttcttttgtcatgtaatagatttatttttttgtcatctaatagtttcttagacatgtgaactaataacatcggtttcggacactatagatatccatggattaaggtgttcgtttatggtccgtgtggtttctcataatggatttgtcaattcattagagattgctataaaatcatgttcaactcataatcaaacaaattttggtgttttgtatttttcttgttttaaatttgacatttaactagcaaagaaacacaagtatttacattttctaccttgcaagatgttgaacaggaaaaacactacacagttcataatgagtgaga

SEQ ID NO: 40021 - DNA, 563 bp, Arabidopsis thaliana landsberg
agataagcaaagttaacacaaattctaagttgttcccactgagcaacgaaagacctacctatggttgtgttaggggtttaggggctggtctgcacagaatgggaacgggagatcgatctccaacgaaatccatggccttagcctgatactccatgagaggcccattgggatactcccgagccataaacgttatatacaccttccaactagctcctccaccagttgtagtggctctcacaatacttacaaattccacagtctttgcctaagaaagcaagaaagatgacaaatgatcaatcttattattattagagttgagaatattctgaaaacaaagcttgaattgctgagtactaaccttaaggtcgttgagtttcttaacgcacgaggaagcccgacccgccaagtactccctattagtcatgttatcataagctggtccatctagattctgaatagcgtcgatgaaattgaatggatctggtaaaaacccctaaaaatccataccaaaaaataaagattatgaaaagaaacaattggaggcaatcttgttaattagtgag

SEQ ID NO: 40022 - DNA, 580 bp, Arabidopsis thaliana landsberg
tctccctacaaagttcgtcttggtgacgaacaacgagaaacaccagaggataataagaacagggttttaattgtaaataattagtaaacgttgacaaattcaaaaacttaatataacttttggggtaaaaatgttaaaactaacaagttttgcatcagtttgaaatctttttaaaaagaggcaaggagtaaggaacatgaatgagcaagaccagaattgagtttctttgacattacatattcacatgaccttaagaccttacattaacaagaaaagacaaagaaacttaagattgattattacaaaaataattatagcatatgtcatgatatatacatatgttactttgtgatagacaaaattaaaaagcatactacaatatatttatattcccattacatgattataaaatagagtttgtttcactaagcgtcctcttgaggctgaccatctccaccaccttcaatgttactggtattgaattgtacacgaggctttcccatactgaaattaagaactcttgcatccatattgtattgtatttctccatcgaacaacatcttccttatgtaatgttcta

SEQ ID NO: 40023 - DNA, 601 bp, Arabidopsis thaliana landsberg
tagcatataccaatataatgcaaaaacaaaaatggtaaactaagtttttttattttattctaaagaatgtcaaattggatgcttttggatgtttaaacaaaaatcatggaaatttggtattttgtaagaaattgaaagcgccacaattctgagctattttaaggaattcttcaataattttgtttttttagcattatcatatatgtatcagaattaattagtgagtactggcaacattttttcccttttatttcatactctgccagcttttgtatttaaaactatgatatttttttctatatcatattatgtgatttgtttacattttcaaagcaaaatgtaataatttctatatattttatgacaatgtgcattttttactttatttttattggttggactgtgattagataaatcataaaatatcttttgatttagtaaaataaagaaaatcattaatttcttaatatggaaaaatttaaacgtttttattttgatacatagagagtaattattttgtaagtctttgggcatgataagtttttagtattcaggacttggtagaactacaagaatctcatttaaattctattggaaaaac

SEQ ID NO: 40024 - DNA, 628 bp, Arabidopsis thaliana landsberg
  unsure (1)..(628): unsure at all n locations
cgcaatcctgaccttatctattgaactttggtcccttagtccctactatgcattccattataattttctgtttctcataaaaaattatgcgacccacgaacaatcttactcatatcataccaaccactagcaagactactataccaaaaattactagaacaaaggtgcatcacatataaaagaaacttcacacaactatcaaaatagaattaaaaaaagagtgtgggtgttctagcaaatacaaacatgttatgtggaatctctatgaaacctcatcatgcaacaagttgaaaaaaataaacaaaaaggaaatgcaaaaacaaagaaaacaaaattgagaaatgatttagagagtgaaagagacagagagacaaggcacaagatgaaggtgaggngtctatgtcccttgaattgaatgataacaatgtgggctggcttcaatgcttattggacccacttttaatttcctcacccaacagctcatatttagattctcaccctatttatgtaaccttaatggaaaattctttagttagatgataaagcttagctaatgttgagatgtaaatgtttttggtttggatttgttttatactcaacaattatagaaagttatctctttagtttt

SEQ ID NO: 40025 - DNA, 708 bp, Arabidopsis thaliana landsberg
gtacccagtcaccataatcgagtcttttcttcttatatatatcagagagaaaaagccccgcggctcagaaatttcgtccacgagaggaataaattcacacgcgaacttcgataattgtcaattttcgttgaacacaagtgacgaatttgagagagagaaaaaaaaatcagagataaagaatttgagtttcttggaattaaaggatcgattttgttgaagtgaaattgaaattgattgtgaaaagagaaagagactgatggtagcagaagcagaggttgtgtttcaacagagtttaccggcggttctggagattgagttgtttgacggagtttcctccgccgttaaatctcccgtttcttctccgaaattgggttttactcagtcaacggcgtcggtttccggaagtttaacgacttctcctgtggtaagtcttgtttaaactttacatttttattttctgggtaccttttagagagaatttaacaagctgggttctgaaaagtaattagaaatttgttgttgtaaatatttgcaaacatatccttggatctcttaggcttagaggacctctagttcatgtgtgtttgcgtgtcgtagcaaatatagatgcttgttgtctataactttgccttaatgaagcaactttaaagctgttggagaagccctttgtagttattgtgtgttgttaactgtcatgtcttcactgct

SEQ ID NO: 40026 - DNA, 846 bp, Arabidopsis thaliana landsberg
  unsure (1)..(846): unsure at all n locations
cggttactgaataaaaagattattaagaaatattttgtttaactataagaccaatctttttattaggctataatgttgtttattcataaacttagaggcgcgtaacatacccgagcaaacgaagagcgtgagtgattgtgagagattccttaaaacacaaagaatctttagaagataaagtttggatctcgaaattagtggatgcttattgctcaccactcaaaaagtttgagcaccacgactttgggaaaatattggtccaaaagttaaatcagaaacaaaacaaaaattcagattaaaaaagaaaacttgaagagaaaatttcataaacaaacaagtagggttccaaaatatccggattatcttttgataaaaataacataaatctttgacttattttgtttccttgggatttacataaactgagtatataagaacgcactcttccaaaatgttctaaaaatatcccaatttcccacttaggaaaaaaatgagtgcacgaacctaatttatttagttcccctataataaatctctctctcaaaagattcgtcgattgtctcgttcgttagctttcctatttttgatatataaatgggaaagattcgtcgattgtctcgttcgtttcctatgttcgagtaccatttattatttccgttggaatttacatattccaagcaaaatttggtcattctgtattgaaagagaactagggttaggtgagaaactttatatggtactcgaacatatcaggtcaacattttcttttaataacaaaatcatgactatttatatggaaactaatgtgataataaactcgtctttaaaattntaaaacgggaaaac

SEQ ID NO: 40027 - DNA, 634 bp, Arabidopsis thaliana landsberg
caaggccacgaggcgagttatgcatatactgtatacaactttgcttaggtttttgttctgccgacggcatttgtgtaccatttcgtaccaaaagcagaacttagtcattcccttatgtacacgtaaagcgattttttccaattagttaactagccacgcttaggtacacgtagatattatcttttacttgaacgatgttggttaataaataatactagaagaaatatgacatgtcattacatctatgtaactggtcacttgtttagaactattgaactaagcctaatgggttttattagcctaacaattgttgctattaatcgtacaaactaaaattaaaatataaatcaaattcttgcgtcctcgataactttaaacaaaggagtatgacccatattttgtggttgataaattttagcacctaatatttcaatagtattttttatttatttcaaattctgctaaaccaaaatttttataacatatattccttgtttgtatacactctcgagacctgtagaatcatggaattacgatgcaattccagtagcttataccttgcacatcatctttatgtgcatattagtcgtcaaactgtatttaaatattctcagacgtatatttcatatgtcac

SEQ ID NO: 40028 - DNA, 595 bp, Arabidopsis thaliana landsberg
  unsure (1)..(595): unsure at all n locations
cttctggagacggtgaaaaatgccaatgtaaagccttggcaaagcacgtacaaacttcttatagacaagctgctaaaggggaagaggagtgaagaagcactagatcttcttcagatgatgaagaagcaaaattaccctgcgtatgcagaagcttttgatggataccttgcaaagtttgggactttggaagacgctaagaagttcttggatgtgcttagctcaaaggattctcnnnnnnnnnnnnnnnnnnnnnnnnnnnnnnnnnnnnnntatcgagaaggaagactcactgatgcgaaaaatcttctcttcatatgtccccatcactttaaaactcaccctaaaatctccgaactctttggtgctgcagcttgaggtattatgtcacccaattgttccgcagagacatgttcatcccattcagctacaagaatacaaccaagaggtcatctactgtttggaagtctttccattcaacctttctggaataaaactctactctctttgcgaataatgtccattcctctgttctacgtgctgcagggtagtaagatgattttgtaggctttgttaggaactaaagatgggtaggatt

SEQ ID NO: 40029 - DNA, 535 bp, Arabidopsis thaliana landsberg
aacaaatcatgcgtattcatgaagtgaacatcaaatgcaactaccaaagttcacaaacatgtctagtaccccaacatcagtgtaagaaatttattactttgattgtttaaaaattgatttatccagtgtagtgaaacttaattgtgtttaatcttttgtccaattatagggggacactgctaaacaatcaatgcctaagtccttttgcatcgactccaactattttgacgcatccagagtaataatcttacactaacgaagtatataaaaagtgattttacttttgtttagttgcttatatacattctaattattaaattacttacaaatgaagagtttcgaatgttcacaggacaggaaattactcaccatttacgcataggtcatatcagcctgactcatttgcttatgccttccataaatcaagctcgttaaaccctactcgccggccccgtggaaggtgacatcattgacttaccctatacatgttgtgcttaacttttccatatgatccattgaaagattatgtattaca

SEQ ID NO: 40030 - DNA, 601 bp, Arabidopsis thaliana landsberg
gttcaccaattccaagatggacattgttcttgcagaggtttctggtgaacattgaactgtctatgtattgtaaacattgttcttaccagaccggtttaagattggaacagtcctgatgtaatcattgaaaattgaagcaattagaacatatactaaaggaaaacataaccaccattttatgaccaggctggatctttgatggagctatatatcttcatgatagtatcattgcttcaaaggaaaacataaccaccatttttcattaactcgattactttatacattcaagtgtttgttacaacttttcaatcattaataatttggtcaaggtactaagacctaaccaatgacacgttttctatttttggaccaattgaaccatgttcgaacgcatgtgcagtattacataaacacaactcatgaaagaacaatgtttgttgaagaaaataattgataagaataattcaataattattacaaaataatcctttaaccacttacacctaaaaaaaaaaatataacaatatctgaaaataaactactaaattaacgtattaaacccactcaaatgtaaaatcaaagtgaaatagaaaaaaaaaat

SEQ ID NO: 40031 - DNA, 488 bp, Arabidopsis thaliana landsberg
aagatattaatgggcttttctctttggcccaacgaatacacatgttaatcaattaacaaaaaacggtttggttttgtcggtttttaaggcatttgaattaacaaaaccggtttggttaaaccttagtgtctctctagcacagaagcacacaattccgttggtcgacgtattaagtttcccagcgaaataaaaggttgtcccttcgtctgcttctgtgagctttctctctgttccaccattaatctttcccctttttctcttattcaaacttttcttcctccttcttcttcctcgggacaaatcttatcggtgcctttttttctttctttcctcctgcatgatctttctcttctttgtgactttcgcctgctttgtgctcattttgatgaattcttctcttgtttcgacgcaaacacccatttttgtttcctctgttactgctgcgaaagacccctttttaaaaaaaaaacatcttccgttacagtgaa

SEQ ID NO: 40032 - DNA, 786 bp, Arabidopsis thaliana landsberg
acacattctgaagcattaaaacttttgagttaatataataatatgtttagtatacaatagcttatactattttttgacgtcatcttaaatgtcaaagtattgatctgaacttcaacttgagatattccagctatataaaataaatgcaaaaaactatcatagtggaaaatatagatttaattttgaatcagatcttttagttataaaaaaggaaaattttagcaaaaattattgaattcataaatacactaatttgactatgagcaatatattcatacaattaatttattgtttctcggtattcaatgaaactgcaaaaatcatggtaatttgtttatgaatttcttgttagttttgtttattagggcttgaaacttgaaagaaaaaaaaaatctatataaaatgaacaaaagaatatagaaagatcttatcttactgtggaaactggaaagtagaaaggcaataaacgaaattaactcctgatcatccataatacataaattataaagaataaagaagattaagaataaacatccaaaaccaaaactaattaattaatattaaacatatagtttagggcaaaattcaaagctttcaaagtcgatgtaaaattgtaaatctctgaaaaagcaaaataataataataaacaatagatatactaagaaacttaaatcacataaacaaaaaagttactcaggaaaccccaaatccacaaaccccacttgcaatttctcccacatctctctcccatcgtacctctctctctctctcgtcttcttcggctg

SEQ ID NO: 40033 - DNA, 645 bp, Arabidopsis thaliana landsberg
tccattggatggtcaagtagacagtagcttgattagagctgtgattaagaatcagttctcgaagcttcatggtgatttggatgtttcagttagtcagagagaaggaatcagtgtagttcatcatggtgttggacctcctattgttggccttgaagagtttagcatatgtggtgatatcaggattgtgaagccacctcttgtattggagagcttagcacttttcagcagcgccagggctaatgcttgtatttggaaaggaaaatggatgtatgaagtcgctttagagacctcgggaattcaacaacttggatgggcaacacttgcttgtcctttcactgaccagaaaggtgtgggtgatgctgatgattcatatgcttttgatggtcgaagggtaagcaaatggaacaaggaagctgaaccttatggtcaatcatgggttgctggggatgtcatcggttgctgcatagatttgaactgtgatgagatttacttctacaggaatggtgtctccctcggggctgcatttactggtattagaaaacttggacctggatttgggtattaccctgctatatctctctcccaaggtgagagatgtgagttaaatttcggcgcttacccgtttaagtaccctgttgacgggtt

SEQ ID NO: 40034 - DNA, 278 bp, Arabidopsis thaliana landsberg
cgaattcgcgcagccacggctcgtcggccggttgcaacgactccaagatgcgcaacaccagcaccgtggcgtgttcgccgaccgcgacctcgatctgcggcaggcgatcgatgaccgacagtttcgcgatcagctgctgcaacggcacgataagcgcggagacgtgcggcggcagcacttcgcagctgtccatgtgcgcaacgtaactgctggccttttcattgaaaccgaccagcacgccgccttttttcggtacatggcgcacgcgcaggcgcgcc

SEQ ID NO: 40035 - DNA, 742 bp, Arabidopsis thaliana landsberg
tctatcaaatcaattcatggtggatagtggaataatataacataggaagatctcttatccatactaagaccaaaataggttttttgattggattcgaaaccccctctattcttttttcattcttttctacttttgcttttctatatgtataacccaaaatctttcttatcttatccaatttcacttcctttttcttatagttatacatacaattatgtatgtattatatgaccaactttctatgggtcacatagacatcccaataagcagtagaagtagaaatgagatggagaaaagaggatcttaaataaaaaggatcccatatttaaatttaggaaaaagagcgtttgcttggtttttattttattaggttactatccatatacgctttttggggtctaaagatgagagcaaatccataaaaaaaggagtcggcaaatggagtgagaatgaggtggattctttccaattatatacacaaacaaagttggaactagaaaatggaaggggtgcggtttaacccccaaaaagtaactaattagatgaaattcattctctaacaataaacgaataccgtttatgtatggattccggttaaataccggtacttgatttcataagagtcgtataggaagttaagatgaggggtggtttcattataaaaaatgggagtgtatccttaattattccaatccacgtatgatttgtatgcctttcttattaccggaagtagtgcaaaaaa

SEQ ID NO: 40036 - DNA, 934 bp, Arabidopsis thaliana landsberg
  unsure (1)..(934): unsure at all n locations
atactaaaaaccgtcatttaagatcatgtaaaaggagaaaaagctcatgagtgagagtttttttcacctttattttcaaggacaggatccgcaacaacatttcttcctagcttaatcccagggaggtacttgacattctcctactcaagaaaccaataaatagtaaaatggaaactaaaactcataaatcaatgaagaccaaaattatccatttgttcttcttacattggtcttgttgataacatcagtgagcttctcaccatttggtagaaccttctcaaacacccacatcctcactttatctgaaaatcattgggtattcatcaaaaccatttctttttcaaccattcaaaacttgaacaattctcaacattgcccaaagtttcaattttttcacagataaaagtatgagttttgcagaaacaatgtttcaaaaaaaaacagagcattgagatgataatgacacaaaccaaatcattaaccatattatataaagagaaagatcccaaatttgtaacgaggagcgacagaaacgttaattaccatggaaagaaggaagcttgagggcattagaagcaatgagcttagcagcaacacttccccaattgccactaccaacgaccgtgaccttagatttcgaatcatcnnnnnnnnnnnnnnnnnnnnnnnnnnnnnnctcgagagcaggagacatagcggcggagagagaggagaaaggagaggaagaaagagaaggagagcgagaatgtgaaagggagaagatagaggaggagaagaagaatgatcggaagcgcatggaagatggtgatttgaaaggggacacgtttgacgttgagagagagagagaaacgtttacgtggaagtaacagttgtagtgtcttcaattctctataagccgccatgtttggatcgttggatcttggcgatttgctct

SEQ ID NO: 40037 - DNA, 788 bp, Arabidopsis thaliana landsberg
gtgatttatatgcaagcatgaacccatactctaaggaatgaattaatcaatggttcttatttttaatcatgttagttagatgcaaaccaaatcaatcttgaataatgctgataaaccgtcttaattcatgcgatgtctccactagtctcggatttctataaaatattcaatattgacttatagctaagtctcaagtccgtagaattattgtatatttttgtattccccgaaaacactatttgccttattgctttgtggtccaaaatgtttatcagtgagcggcaagtcttgtaaactagtgaataatgcctcgcaaattgtccagattcattgtgttttggcttattattgtatatgccacaaaacgactgagagtgacgatgattcgctacgtttttttttctataataaagtttataattattgatgtggttaccacttagatattaaaatcaattatatccttttcaatgattctaatgacgattggataattaaatttagataatgcttttttgtttgctacttttttcttttgtaatgaagattgaaatgctttgcactagttgggatcgaatctgcttatagtatagtacttatattcccacagtacatccccgacttctttttaatggtatttgcaactgatcatgtgtacaagaatggactgattaatctctgaaacatgaattataatttaagctaagaaaagtaaagaaagtacctaaaatagatagtaaaaccttataaacataaatctagatactactttaactgataaacttttt

SEQ ID NO: 40038 - DNA, 988 bp, Arabidopsis thaliana landsberg
atgaaatctggcaagaaattggaatgagatcgtaagacaaaactgtaaactatgtgaaagtaagatttggtttaaaacagagacaacaaaatatcaaaaaaatcatcttgtgatttatgtctttttatcaaacgtatcattaaagtatcaggcgagtgtgtccacgcccttttggtcgagtggaataaaaggacaagaacacagagtttaggacaacaaggagatgactggatgaggacgagttgcaaactcaagtggtggtacgccgtgaatatgtgattggtgccagattaagcagtgcttatttaatagtacatattttgttttatttatggctcgacgacgtcataatttttaatcatattgtttgcttctttgtcttacttactatagacaagaaaatgtccttaagatacacctaaataaaagtaattaagtggactaattagcataatccgagggggctgtttatgtcaatttcttattatagaatatgattatactattcttcattgttgggtaggcaaaccatatcttgctgacggagataatttaaatttattattgcaatacatcagctttaggattgtgggattgtctcaaatcccactttttaaaaaatagtttaacagcaaactgagaatctttctttctttttgttgttggtcagaaatacaaactgagaatctgatcatgtattaaaacaaactaaccaaatagtgcttttttattaaggtttcatgaaatgtgacgccttagcgaggctaacgaaaacaagaagtgtcatgagaaacacaaaaatcaaaaccacatatgaatgagcgattcatctcatttagctagcaacaccttttcagagtatatatcacatatgctatggagtatctagattggtgaatttaaattgcatcgtcataaaacccgagggaaaaagccacaataatcaatcaaaaaattaggtcaatatcaaatagctaattttgcaaaa

SEQ ID NO: 40039 - DNA, 296 bp, Arabidopsis thaliana landsberg
aaagccctcgcgctggcaatcacccgcagccgcggaatcggcaatgagctaacccgggcctggctgctgttttggttccgtcgaaggcggtgcggtttcccacgcccgattcatcgttttcagctccgactccagcgttgcgatttgaaccgacaaccgcgtttgcagctcctgcacaatctccgtccattccagggcacgctcgaagtgataaacattcagcatcgacgaaccctccggcttttcctcagccaaaaacttgtcgagcccgcgcgtaatcttcgccacgtcatcga

SEQ ID NO: 40040 - DNA, 863 bp, Arabidopsis thaliana landsberg
ctttaccgtttcgtaaactgctttcgtaaatgccttcctcacggcatcataattatgcagcccccctaatttctctggaattttcctcattatatgtgtcagactgaatctgtgatgagatcttgggaacacttgagagatggcagcctctaaaggcttgcatctgtctgtgacaatagtttgaggagaacgcttcatgacactgagccatactttaagcaaccaatggtaagactccattgtctctccagcaagaagaccacaactaagcaatgtagttttcccatggtgattcactccggtaaatgtcaccagtggaatctcgaattttcctgatatataagaactgtcgatgaagatgacatcgccaaagtaactgcaggaaactttagagaaagcatctgcccagaatacattccgtagttgaccttcatcattcacatccatcaagtaaaaaaagtttggatttgtcaattgcatacggcaaaagtagttgtaaatggctgcagaatctcctctcttaaggttcagcaaatcaggtgacccagtagaattctgaaacttcttgttaagagtcgagtttgggttcacattgctcccattatccaccacacaagctcggtacagcttaatcgtcttagcgtctgagactggactagatacacacttcctcttccttttaaccgatttatataacttacaaccgagtaaatggttatgatcaagtgtaacttcaactacccgccacctcttagaatcaacctgtctcattcttatcatagcaggacaaccagttcgagtttcctttctaacacgattcacatcgttaatcctcttaaaaccttgactactacaacaaagca

SEQ ID NO: 40041 - DNA, 499 bp, Arabidopsis thaliana landsberg
tctggaacatggatcgcaactctttcaccattatcatcatcccactcttcttccaagaatggtgcatatttgctctttgtattgtttgcttgaagaacactctacacaatacatacgcatctatatgcatcccataaacacaagtcacagatatataaagagtttattccggaatcataagagatttgatcaaatccacttctaagtcaagaacattatgtgtaataaaaaaccaaataggcttaaaatgtggtaccacatgcatgatttaagaagcaaatagatcatcaactcaaaaggatcttgtagagaacatatatctcaccggaacgccttcgtcatttttagcgaggtgatactcattcatcacccaatcggttcccagaccgtttggactacgccccctgtgaaacacaagagtcttcatcgtaccaatggtcaaccttaccgtctcctccttggcggattttcccgtctgttccagtgactttccagtagc

SEQ ID NO: 40042 - DNA, 726 bp, Arabidopsis thaliana landsberg
attaaatatactgaaagacaaacggtttgactaaatattgatcatttaattagtgatcatatttactttctttatatataatataatatcttggcttttgttaatgttttgaaactatttaaaataaaaactaacatatacttgatagaatcattaattatcctatacacttgaacatcatcaagtgaaactgatatttttgtataccgaaactacgtagcaatcctatacatatgcagaaaacaagcgaagttccttttttattatattaaatctatatatatatatatatatatattatctatttttgagttcaagttccgttgcttgtttcatttcacaccattcttctatcttccaacatctaaactccaagacaagtgccttgaccttgggacggatcatcatcatccggagggttctgatttccagaatctggattgccctcggtagactccaaagttatgtcaaaaatactccggcgtttctccttcttattgtccgatttttgccttttgtaatactgtgcatggcttgacacttgccgtggagtctttgtcttcacaaaattcgttgatatcaacgtcgaagctccttccccatactttttcaatccttgcagaaacaatctgaaatatatcattaaacaatcaaaatcataagaattaataacctagatattatcataatcagcatcatcatgttaaaattaatataaatcaaatt

SEQ ID NO: 40043 - DNA, 769 bp, Arabidopsis thaliana landsberg
cgacccatacattgctcccagctaagaggatgaggaaaaccttttgcatgttagcatgatgcttgcaagctttattaaaagacagattagtcggattagaaatcggacggtgttgtcagttatgaagacagattattcagactgagatcgagttttctttttacctgtctggtcgccatgattgcagcaaatgttagagcaccaaatgtcctaattgtgtaagaaatgaagaactggctcgctgttgcaacctgcacattattagtctctggtaagttcagtggtaaacaaagacaagacaggaagattgtatcatgagacgtcatcaaagccttttgtttcggattatagatttatggatttgttttatgaatatacatgcatgcatcttgtggatcttaaaactaatttggtcgaaacgacatggcaatgcatttactaagtagaagaatagaggaagcttaaaacttactgtggaaagcagagcgatgtcgagtaaacaatccctatgcagagaaacaaaatctacagctggtagtagatgcccttgcaatataagtcctacatcaaccataagatttacataatggtaagaacagagaatgattgaccacattgatcttctttttgagggtctaagcattgaggtcttttatgcataagagatgaattctgactatgagacacattcagaaacagaggaaacttaaaatagttgcgactaaagacattgtgatacacttacataaaacctcacttagcctagtag

SEQ ID NO: 40044 - DNA, 296 bp, Arabidopsis thaliana landsberg
aaaaacactcttattaactccatatcttccctttttttgttggttcgtcttttaggaagttctttttttttagctgttgagtcatttgtttgtactattcgcacatttttgtgttcttgaaggtgaagaactctattgaggttctttggtaaagttagattacagtgatatgtgttactctatggcttcttctatttgcttgcattggtgttaactccgtaaaaccaactgaaacttcttcaatgaacatgtatgtattcagtcaggttttttaatctacgctgaacttaatgcat

SEQ ID NO: 40045 - DNA, 237 bp, Arabidopsis thaliana landsberg
accgcaccaccaacccttcgaatccccaccgggacatacagagacactgacggcgagcctcgcccaagcagacagattattcgggccacctagccatctggtgacgagctttcaccgcattgctgttatgcacaggaaagcagcgctccgtctcgataccacggatgaccaaaatccgaccagtgatgtcggcacgatgacggtatcatgtcatcgagaggttctgcttcatcacac

SEQ ID NO: 40046 - DNA, 533 bp, Arabidopsis thaliana landsberg
tcataagaagatttggtggtaaaagacttggcattacacttactctcaagatgagcccgcacaaatccaggtgggggaccacaattttcatgctccctagaacgaaacaataccacttcacagaaagagcaagacaaagaattaaaactaaatctccgacagaggctgtcccttagagaaaatctgataaaatagaggctgtccagttctagcatgattataaagagaagggaacataccataacttccatcgtcattacgacgccaataacgtacatagcagaggtcacgaggccacacaaccctacagccatttggataacgtgagtatgactaaacagagttcttggaaacaaccaagtcatattccgactgaaaacgagtggatcacaaatggtaactagtataatggccctcttaactcctatctacgggttttcagtagcatcggattatggtaagcaagataaataaaaacacatctgcataacccttgatctccccgggataactggtctacttcaatactatag

SEQ ID NO: 40047 - DNA, 541 bp, Arabidopsis thaliana landsberg
tgctctacagtatttgatatctaacagtgaaaccaaatttattctgttatgaatactttgtccagtctgctttgcttattaataattttcttaggaattgcttcctttgcattttgattaggttgtatatggggaaggtgaaatagcatatcaaataggcgagacaacatcaattctgtcaagtggttatctttgtgctacacctcattgtgttcgggtaatattcttcataccttcgcggatggttacattctattgtactcagtttcggaactttgcaccaacacaacctataatttcttgtttatgtgttcaggcgccacaaggagaggagactcgtggtctagagcgatcgacattcgcattgttcatgcaacctgactggtattattctgaactaagataacttttgattgatattaacattgcaacatctgtgaagaatttgttcgttatacaaaagttaataacgacgaaaagtgtgaatgtggttgttttagggatcagaagcttacattcccaaaagaagttacaatacatg

SEQ ID NO: 40048 - DNA, 820 bp, Arabidopsis thaliana landsberg
  unsure (1)..(820): unsure at all n locations
cctatataactaacccgcagccttatttcttaaaaacctgagcagcttcctgatgcatagagcctcgtttacaacaagttataagagtgttgtaagtatacgcatccggagcaatcccatcactcttcatcttctcaacaagagacgtaatcttattccaaggagtacccattttcccaaacacattcaagataacattatacgttatcaaagtcggtttacaaccatcttcctccatcttcttgaacacatttacagcttccctataccttccgctattagcaaacgctgatatcaacgaagtataagagtagacatcaagcgaaaacccgtcttcctgcaaaccattgaacatatttgcagcggaagatactctgccttctttacctagcatactgatgattatagcaacaacagagttatccaacatggattgataatccttttgcttcataaaccaatcaaaagcacgcagagccaaatcgaatttcttatgaaatcctaatcctttaagaaaagctagtaactccgacgaggtagactctggtttatccttaaaaggctcgaatagctcagagagtacagaatctaattgaccggaatcaaaattgggttcgatgagggaacgaagaacttgctgaccttgtggagaaagaccatggtaagaccaaggtttaccgaggttagggtcacgtgacttgccaattcgagtccggttacggtttctagatgtttgagagctgatgggttgtctggaattaaggttctggtgaaggaaaacatcgtggaggagaggctctacaggcngaggaggtggtga

SEQ ID NO: 40049 - DNA, 700 bp, Arabidopsis thaliana landsberg
aaatttttataacaagagagaattttatcaactcctcgtaatagatcagtcacaattcaatgtatgacaccttgttttgaatagattgagttgttgttacgcgcagagttttaattgtattgttttaggttttaaaatacaatatttttaattttgtaggaaagtttgaaagtgtttagaaactaaaagcattaacgactctaatataaaattttagtaacccctcttaatcatacaatttttggtattttggaatttggtaatgttgatggtaattatgaaaaataaacgaaaacttttgtatttttgagagtaatccttttattgttttaatacacagatttacaaattgtctatatgattttattttaatagaaattatttattcagcaacaaacagaaatttagtttatgaagcttttgcttttaataaaaaatatatcgggagatctcgaacagaagttcatacttaaaaactcttgaacttatagaaaaacatgtactcatttgcttatatttttttataaataaaaaatataaaccatttattcttttcctttaaagtatttgcattggccgattataattaaaaatctttcagcttagattcgagatattatgtacccactcgcagaattcacgtataaaaaattgttcacgtcaaattagtatacctttaaaaaaaagaaagaaaatatag

SEQ ID NO: 40050 - DNA, 132 bp, Arabidopsis thaliana landsberg
  unsure (1)..(132): unsure at all n locations
gagagaatcggcggcaacaaaattcaagagtttccagattccggttgattgtttgctcgcacaccnnnnnnnnnnnnnnnnnnnnagaaccggtgtttcatgtgacataccatcatgcaaacatctttgatt

SEQ ID NO: 40051 - DNA, 398 bp, Arabidopsis thaliana landsberg
tgcgcggcggctcgcctcaacaggtctttgttctcgcccaccttgtcggctgtaacaggcgggttttataagaacacggggctgaccaagcggcgctatagccgcgggatgtgcagcacgtgggacaggtacgcctcggcggggcccagcagcgaccggtcgttggtgcccgggtgctgcgggtgacggcccgccaggtatgcttcgacatcatccacctcctgtggtgtgggcaccgcatgggccagggcctgcaactgctccaggctgaagcagctgtcgtcgcatgccagcagcgctgctgcgatgttcgcgtgcgacatgtggatgcctacgagggacagcggagcaaggagtcggctcggactgttgcgtgtgcaagaatgcagccaagacat

SEQ ID NO: 40052 - DNA, 805 bp, Arabidopsis thaliana landsberg
  unsure (1)..(805): unsure at all n locations
cgtcaagagatagatcattcatgtctcctgacaattaaacgatattctaattatccacaagtcgcatctatcgtgatcattgttttgttagctgaactaacaaagtaggtaatgatcctcctcttccaaatcatgtgatctaaagggcataaccaaagtaaaccggggagagatgttgaactaaggaggttttggtttggtttagcaaatagatgatcatcatttgataagggattggatttcagacatatgacttccacaaaacatgaaacaaatattgaaaaatccacttacaatatccttttgagctaacaagggcacaatagaaacactaattccgatatcaaaagcttgtctcgacaaagttgaaagctttcttttatcagaagctactgataagtgtggaaccagtgaaccctcttctttcagtctactagtgaactacaccatataagagacttgatcaacgagaggcgtctctatgctctccaccattaattaaaccaatccagaataatgccccaattcattaacctcgctattttacacattcaagctctcaactaactaacataaagtatgtttctgagcgggcggaactacactttcttgcaacaaccctaggctacaagtcaatggtattgcacgcattataagtaacaagaactatacgtctctaaactttcgaccaattactaaaacgaagcttagagaaattcagaatgcatcaacttgttcacatccctctcctttaaacgtaatgcagctctcaactaaccaacataagggtctgtntctgagttgg

SEQ ID NO: 40053 - DNA, 1038 bp, Arabidopsis thaliana landsberg
tctccgaagtctgagactcgccggaaaagcttgtattggcttcttttcgatttcttgcggaagtaaggatatcacgggagctatgaagttcctcatgcaatccatttctggtatgcttttatggacttttcatcctcgtgactaactagatagatcccattttgcatctgtcatgaatcgatctttatccttttgattcaatcgactgcacattcgtccttaatgttagtttttgattcgacggaaacagggaggaatcgatctctggttcgagctctagttagtcggcgttacttcgcttcatcgccggaggaaatcgcaaagagaaattacgccaacgatctgtcggaatacaacaccgctgtcaactccgtcacagctcagcgcaggtttattttccccccttgatttgtattgctcattgtgttcagaacatggggggatccaatatgaatgtgatgagatattgagattgagaactcttttgccatgataatatatacttggttacttcattggtccatgcttaaatatatgataaatattttcttttttgttaggcactatttgctgagggatgtttatgatgatatgaagcttgatggtgtgcagcctacagctgatatcttccattcatttgtcgtgggaacgatgaagggtgctcggttaagcgatgcgttcttttccggaagaaagaagccatgtgatgctcagatgtatggctatgagctgtgtttttactctcacattgcatagaataaactcgtcttgttgatttatgttcctaagaacaggtgaaatatagaatatctagcagctgattgagcgattccttattcaatgatttagactctacagaatgagtccgttcattcgtggcttgtgttgttcaccgtgcgttcattcttgtggtgaacttgacaactttttattttcacatgtggaaagcaaaatggaaggagaatccagttgtatcttcattgcttatggagactttttttctataatccttgatttatcataagaacttaggtgcta

SEQ ID NO: 40054 - DNA, 456 bp, Arabidopsis thaliana landsberg
aaggatgacagttatcatgaacttagaaaaggtgcatatgaccagtggaatgttactttgttctactatcaaaaagttagttttacttgcttccatatatctggctctggcagactcctcaactaatgcatttattaattggtttaaggttgccgaagcatattcgaaaggagggagggatcatgcggcttacctttctgacaaggtgcatatcacggtttacatatatcatggtatcatggcattttgtttgacagtatgacagaaacttgtgttgtttttcttttagggaagagtggcatctaaacaagctcaacgggctgatgagagggcaagccaagatatattcgttgcaaggttagctgttttgatgcattatcaaagtatgctgatgcgcttaaacattttgcggtggactaagccattgtttatgactatgcagaaacaaaggtatag

SEQ ID NO: 40055 - DNA, 873 bp, Arabidopsis thaliana landsberg
catctcatctcatgttgtatattatatgacttttggtctagtattaacgttatgcttgtatgttcctagaaaattgagaagaaaataaaagctaaaaacattatatttgataattattacatagtttctcttttcattttctggtcacattatataaaatttgttgattattcaatttttagaatatttttttttaggccatatggggatctctctaggtcatctgagttccgcctcttccctttggcttggccttcttagcaaacttctttcggatgagtgagtgagattttttccggttgtttggcttctcaatgatggacatcgctcaattgcattcgaaaaataaaacatttaaacaatttctattttctacccatgacatcattgtactcatcttgaattccaaacttttaacttcagtttttggtcttcctttaatgtggttttaagatgattttatacactatagttgcatgttaagcagtataaaaagcaattttctattagtaaacatcccttggtttgtgcgtatccatttggggtctattccggccataattggcatttgctaaaaataatggtcacaactcacaagagctttcgctaaccttatttcacaattatgagagagtttagtttaccttttatgggttttgttgtgatctacagtatgtgggatgtatattattcttggattatttttttcccttacaatagagtctcttttcatgaattatgctgtctataatatacaaaataaagcaaagtgaagttaacgtatcttgtgcagtattcaaattcgcgcaacacaatgaacatatatataagaccgtgtactcatggacctctttcatttaatatggaagcctc

SEQ ID NO: 40056 - DNA, 679 bp, Arabidopsis thaliana landsberg
gacgcttccttatggtctctctgataaacctgccgttttgaaggtactctttctgggagtttcgaattttgttgtttctagaattcgaatttgtgattttgcggaactttgaattgatatttgtgttggttgattgtctaagtgttgttggttcttattagattttttcggatattgtagatttaatgtaaagttggtgtgagattattatttcaagcttcttttaattcaaaggcttttaaagctaatgctacagtgaaattgaatgcttagaagattgtttggaacgaaaacagattttggcatttttgtggatgatgtgttatgttgaaacgttgtctcattttcatgttgtattgtaggtgcgggattggtatttggaatctttcagggacatgagagcatttcctgagattaaggattcgggtgacgagaaagatttcactcagatgattaaggctgtcaaagtaaggcataacaatgtggttcccatgatggctttgggtgttaatcagctcaagaaaggaatgaattctggaaatcttgatgagattcatcagtttcttgatcgtttctacttgtcgcgaatcgggatccggatgcttattggtaagacttgtttctatttctttttcaatctcttttccctgacttgaaacgcttttggttgctgatgttg

SEQ ID NO: 40057 - DNA, 361 bp, Arabidopsis thaliana landsberg
gatttgtagaaaccctatttgtcgacagaagtcatttttcccgccataagagaattgttagcaaaaaataaatcacttacgggaacttgaacccggccctcgaaggttagaagttcgaacttagaaccaatagagacaatatcagttggctataataattcataaaaatatatataatttttttctctgtagtaagtgttatttttctttaataccgagtggttctgaatcaaaattcataatactttcaggcccgaaacagataatgttagttccgttccaagcatgaattaaaatgttctatatattgcaggtgtttttttaatcaatcttgaacatgctttttgtgatttggattcgg

SEQ ID NO: 40058 - DNA, 707 bp, Arabidopsis thaliana landsberg
ctaccgacggagacaaagaagaaaaacgtaaacgagaagccttaccatggctacgttggtcaaatgcctgtgatccctcttcatgaaggccttggagttgactatgttaccaacaaagaaattgctcagagattcactcatctcatgtggcctcaaggaaacgatcggttttggtatgtcttagctcgattatttatagttttcatatcaaatgaagccaagaactaaagtaatatataagagatatggaccaaagatctcaacgccaattagcttttgacttagaccaattctaacttatattttctcactttaggtcaatagattgctctgtttgaaaccctaactcggtattggtatcttgcctttgcagcaacaccgtgcacactttctcaaacgcagttgcggaattagaccgactagtggtgaggatgatatttgagaactatggtgttgagaaacactacgaatcgcacgtcgggtcaaagacttacctactaaagttcctcaagtacttggcttcaccagaatctatctcgatgccagcttttcctcagcacaccgataagacctttctatcaatacttcacccaaatgatgtacatggtcttacaggtgaaatccaacagacggctgaatgggattttccctttcaacttcccacccccaaattcataccctaggtcattggggccgggggacccttc

SEQ ID NO: 40059 - DNA, 586 bp, Arabidopsis thaliana landsberg
aaccgtcgcatctgtcgctgttgcaacggatctcccgtgccgagtctcccttttgttcgacgtgtggtgctgttcagtgagggtccgggtctgggacggtcgctcgacggggtcgcgaccgtattgccgcattatccggttgcaccgacgcgcctgcatctgcgcgacggccgttgggtggcgtgacgtgaccgcatcctccgcctccggcaatgcctccatcctgctggttgccacccgacgcgtggatcgccgggcgctgttcgacgtgctggacgggcagggattctccccgttgtacacggcgcgcgatgtcgtccaggcacgcaccttgttgtcgcaatctccgccattggacctggtgctgctggaattttccggccaggcacgtgaatcggcggctttttgcgcacagttgcgcggcatgggtgaataccgccatacgccagtcatcggattgctggcgcccgacgtgcaacagagggtgtgtggatcgccgcaacacgccgccggtggtggatgccggctgggtggacatgccggtggatgccgtcgaggtattgtcccgcgtcgatgaggcattgag

SEQ ID NO: 40060 - DNA, 672 bp, Arabidopsis thaliana landsberg
tctacaacatacgcacacttatcaaacttgaatttaagtttacagcgacaacactaaatccgagtgatgatacgacggtggcactagtacagaaacactatcataatgtttttaagatattagcaagagaagttacttagatacacgaccaatattaggagactttaactaatactctggcgatctaactattataatttatcagttgatttaggcgttaggcatttgctatctatcaacaatgtgggcatatggtctaattcttgtgagatgataatacaattaaaaacaaagaaaatcttttttttaggaactaaacctaaacttaaagtctttctaatcagttgctatttaagtattttcataataaatcaagaaatgcaaattgtacatgaattcgaaaagcctctcgttaagaaaacttatgattaagaatataatattcaaatactagtttataacaccaaatgcattgaaacgcttttgtgtcacttagcatcaaacattaaacacttataccaagttgaatttaacatggcaacaaccattatcagaaaacaaaatctatcgcgtatataaatcggttaagtattttggtcagatgcaactttttttttttttttttttttggtctaatgttaaatgcaacttattgttccctttctctatgat

SEQ ID NO: 40061 - DNA, 812 bp, Arabidopsis thaliana landsberg
  unsure (1)..(812): unsure at all n locations
aaatattatttacatatatatatatttatatttatatagcgtaggatatatacatgcattattggccaatttatacatattaatatcggcattacgaaaaaatgaaaataaaaaagtgaattaactcacgcttattcttcactatcttctaagtatgtgtcagaacatggccatttgatcggtgtatacaacattttcaccaatccagagcagtctgtaaagaatgtaacatacgtcttttattcaacgatcaaaacccaccccacaacagtacttccaactcggaatattgtggcgacatacatactcattcgaagattgcagcaatattagagcaatattatactactactgaaaaaacgtcttgttctttttatctaatcataatatgaaaatgtaattataaaatgtaaatactattaaaataacacaatttcatttatttatatatatatatatatattatataaccataatattaatacataattatagaaataatctttaaaaatgtaccgtagattaaatcatagttgaaccataattacgtaacagatcaagcttgtaataacaaccataatattgggcttcattgataatattaattacagggcgggccactttaaactttagcccaatcacttatataaattatttttatagtaagacaaaaaaaaacatttaatttcgcgtagtttctctctgtctttcatcttctccaaacttgaaaccccaaattcgaaaaatacaaaatcccgctcttcgtcttcttctacaaaaaccctaacgacngtgcaattgaaatcgactac

SEQ ID NO: 40062 - DNA, 916 bp, Arabidopsis thaliana landsberg
cgggcttttaagcataatccactttcctggaaatctcatcttgtttccttaaagtaaagaggtttgcaggctgttacatgctttgctcataaaattgaatcatagtctcagtggcactctagcttttcgaatggctgacagagatgtattcttgtagctgtagtgccaggaaggaagaacttcttacatctgcttgaggattcagaggtatgacagattgctaaatcattctattctcttctttgttgtccacttttctagggtatcaaatttgttgtttggaactcaccttattggctgaattgcttgttccaggaagctactaaaagagcccaagaaaaagcttttgaacgcatccggattctcgaagaagattttgcgaaggctaggtatatttatcatcctcttgtcttttgtctttcatttcttactgggcaagtgattatttttgtgcaaaaagttttgtttgataaactagggtacctctgggtatgtaacacattttctagttggatagtcaagttgagagctaggacccagactattctagcgaaggaaataaagtgtggaaagcgtagtatctagtgtgaaacgtgtttgcagatgcaggtggattgctgaaaatactaatctgagcttatgtgtttgcaatcccagtgtcgatgtcctatagaagttataattcgacgtcttgattcatagagaaacaacatgataaactggattgactcttatgcatcataaccatgaaacgtaaactgtagttattgattttggcattgtttcctgtacacttatttactgaccattataactgcgttgatttcatctttccctttggatttttaggagtgaagttttgcaataggctgaacgggataagtggttatggaggaaatttgctagggaaaatata

SEQ ID NO: 40063 - DNA, 676 bp, Arabidopsis thaliana landsberg
cgcgcgcgaagcttcgttttgaattaactatttacagtgggtcccagtataatccaggtgctgccacggcgttacataacgacacgtgtcagtatctagactgttcgactcatcaaggtttttaaatccagctcgtggtggttgatcggtcatttttatgtgtttatcaatgggttccacttcagatatacgacgtcgtatggggtatttaatacactatattagtgtgggattttctgattggttattatgtggacacgtgtctacgtggaacgtaatatgcggtgatgatacacgtggacaaggaaaagtcttgttaggcccatttccgtttggtctcttttccatgtttaaatttctttcctatggtagtttgtctgaccgaagaccgaccgactatttacggcatatgtggacgttaaaatcaaatatattttttaattgcatgactcaaaaactcataaggttatgtttcgttatttttaatttaattttattttagtttgtttctgtcaagtaggtattacttatctgcattcaacaaaaaaaaaaattttgtgttaggttccatataaaaaaaaatgtgtgtagttcctctcaatttgtattttttatagctattaaattaacttttaatctaacattttatcaattatacttttaaatttttcggaga

SEQ ID NO: 40064 - DNA, 705 bp, Arabidopsis thaliana landsberg
cagaaatggttagagaaggtgaagaagaagaagagatgatgatgatgatggcaacgaaacctgcatggcttgaaggtttaatggcggagactttcttctcaagctgtggaatccacgaaactcgccgtaaaagtgaaaagaacgttttttgcttactctgttgtctcagtgtttgtcctcactgtctcccttctcatcgctctcatcctcttcttcaggtaaccaaacttaaaaaaattctgccccatgattcgattccttgacaatttcaatactcatgttttttttttgtgtgaattgtaattatatttttgtgatgaaatctgtacttacactgaatcactgtgtacgtatgatttctcaaagaaatttctctctttcataagagatgtttggattgtagcgaaatatgtatatactcacaaacgttagcaaattgttaaatttaacaataaaccattgttttttttttcttggtaattttcccggaaaattctcaattccgggagtagtctggagttcggtttaagattttccctgttaacaaaaaagaatgcaattatagagcttttcgcactttctttaatggacctttcattatcataaactttttcttctccccaaaaatatgtttcttcataatgttcatctacttaaagatcctctagccatctttctaaagtttcataatataattttcctcta

SEQ ID NO: 40065 - DNA, 541 bp, Arabidopsis thaliana landsberg
tttgtgagttataagagatccacatgcaatggcatgtgtgtttatttggaacttaagagcgggtgatatattgtgatatatgacaatgccttttataatattttgacgtgaaataaagagagaagaggagccccaccaatgttaaaagaagtcacatggaatttctacgttaactaattaaatttactattcatttcataattattcctttgagaattttgcaaaagcccctttttctttgatatagtatggtccatcacattctctccaattgatcatttatgatttgtgcctttccatcgttttcctacgataatacttttctcaaagttaattctatgacttatggcagatcatattactttgtcgtctaaagcagtttctattttcgttttacaaacatgttttggaatttgtttaacttttgaaaactttatcatagtactttatgaaactaatgtcgatgtaattaccaaattagtggaatgacggaaaaactagtgttcggtttattattattacgatttcaatcatagctacg

SEQ ID NO: 40066 - DNA, 727 bp, Arabidopsis thaliana landsberg
taaaaatgtgaaaattggtagtcattccaacacatctaaattagaattagaaattttaaacgttataaaaactgtttacaacggttactagctagcattacaaaataacggtatttaaaccgttaacaacggttaataactagaatcataaagttttaagcgaaaatctaaactaacttctttttaatataaaattaattttatataaaaaaggttttctttcttattatccatatctatagactatagagcagaaaagaaaagctaaattttacatagatagacaaaatatcgattttatttaccttcttatattatctctgtatgtacagacaacatatacatacacagcgaaacttcaacatttaatttatatattttctattaactgggacaggccacatattaattaggaaacggtaaaaagaaaaaaaaagttttctaaacaatccttaatttccctaattattccgtgaccagtaaaaagacttcataaaatcacaaactctacctctacttctctcatttccagtctctatctggatcaaaacgagagcatcatttccttgtcaatgtcgaactcaacgccctgcatcactccctttccggtcaccaagactccgtagcggcaccagccacggtggtggagggtgtcaacgacgcgaattcaacgcccatctctccctttccggtcaccaagactgcgtagcggcaccagccacggtgg

SEQ ID NO: 40067 - DNA, 631 bp, Arabidopsis thaliana landsberg
aggttatgattgtatctcaagtgatggaattagaataatggagccacttgtgaatatactcatagggaaggtattgaagagacctctctgcttatcaggttgggaacaacgggagacatggctgctgcggctgctttcttagcatcagatgattcttcttacatcactggggaaacgttggttgtcgctggaggaatgccttcaagactctaaacaatttcacatcaataatagcgtaaagaatgcaatcagggtatcaagtaagtagagatgttttttttagagttttcaactaaacaagactttaagaaacgaaagatgttccaataatatcacgaggccattggatacttgttggtcttgtaaaagataatttcttcatcagaaagactcgtttgggtttaattcagtggtagaacaataaagtttgggtttcgcatgtatgtgtatatgtaacgattagggttttattgtttgtgtaggtttacttctgtgtttatgttttttgtgtttactacttttttcctcctaagccgctgactagctttcgacaaagtcacgcaagagttgaaatgcatctatcgagtgagcattgatcttgccgcataaaaggtgcgttagttacttgttt

SEQ ID NO: 40068 - DNA, 524 bp, Arabidopsis thaliana landsberg
gtttcatagtaagttgctgagagaaatctatctttcactgagtgatatttgtgaaacttatccttcatactaccaatttaagtagctaacttccggtcatgatagtaatgtgtttgcttgaacctacatgggatctgagcgtgaacctgatctctttcccttcatgtctttatcgaatgattaggtgaacaatagagacatgtccattgctgttctaagggaatttctatcgaaacgcaagcaagagcatgaggctaagtcatctaaaagaactagaccagcttccaaagtgattgagaaggatgcttctgaagcttccaaggaagaaactcctagcgagaacggtatgaataatggtgatcacgaagtagcatctgaagatggaccaagctctgtatcaaaagaccctgctaagacaacagaacgatttgcacctagagaacccaagccaccaaaagttcttgaggtcttcctatattttttattcggtgtcttgcttcataccgcttatgtgtctagcaggc

SEQ ID NO: 40069 - DNA, 446 bp, Arabidopsis thaliana landsberg
tctcagagttgaattgtattgtgcattttagcatataaccaaagcattccacatgaaagatataaatataattacatatttgcattaatgaatattaacaaaacctatctctctgtctatatatacacacacacacacacatatatctcctatcattcatcgtacacacacacactctctatgacatagctccccaacatgacgacaacactcaaccatctatttgatctgccggggcagatttgccatgtccagtgtggtttttgcaccactattttgctggtataccttaacttcttctcttattctctcccttcctttctcccttcctctctttatatatatgatcatgagtttaatgagtgtaaatgtgttgcaggtcagtgtaccgtttacaagcttgtcaatggtggtgactgtgagatgtgggcattgcacaagccttc

SEQ ID NO: 40070 - DNA, 694 bp, Arabidopsis thaliana landsberg
tctggtagttgcgttcgatagaatattagtttagacgacttcttttggtcaaactactagaattttcaaccttttaggtaattgctcttatataaatatacattacttctaagttctcaaccttcattacaaatcctctcaattcaggtttcttttctaacaagcaaaaactccaacctttactttatttttgttttgttttgtaaccctctcagatcttaattctcaaagaagtatgaagagagaaagatctgatttcgaagaatccctcaagaatattgacattgctaaatgtctgatgatactagcacaaacctccatggtcaaacagatcggtttgaaccaacataccgagagccatacaagcaaccaattcgaatgcaaaacatgtaacaagagattttcttcgtttcaagcccttggtggccaccgggcaagccataagaagccaaagctcaccgttgagcagaaagatgtgaaacatcttagcaacgattataaaggaaatcatttccacaagtgttccatatgcagtcagagttttgggaccggacaggctttaggtggtcacatgagacggcataggtcaagcatgacggtcgagccatcgttcatctctccgatgattccatccatgccggttttgaaacgatgcggtagtagtaagaggattttgagtttggatttgaatctg

SEQ ID NO: 40071 - DNA, 548 bp, Arabidopsis thaliana landsberg
gtacctggtttgctggtccgtagaagcaaagaataaaacatttcttcttttctctgaatatatctctaattggcaaagagttcccaagattcttcaaattggtttgttctgtggaaaactctgaaaaagacctacaagaatctgagagaattatacttggattgatggatgttgcaaagtctttatgttgaagcaaaaatataccgaaacgcttaaaattattctgagtttcagtatttttatttagtgcatttggaaaataactcaatgtggacccatcggtccaaccctattgaagttgcggttatcctattcttaaggctgggaaaaaatcagtaataattttaaaccgacacatataggactaatccgaagttaaaccggcttataccagaccaaggttaagactagtttaagctttcctcgcccatgtaaaaaaagttcttgctatgttttttttttttccttttaaggtctaaaggattatgtggttgtgcttgtaatgctttaaatatcatggttgtaatagattcggggttctgattttt

SEQ ID NO: 40072 - DNA, 860 bp, Arabidopsis thaliana landsberg
tgattctcttttaaaatacaatcatttggattggatgacacacatgaaccagaaaagtaacatgcttttatctcagtctaaatattattttatctgtaatgaacttaaaaaataacatgttatgtagataatatatgcaaagcaattggtcgtattatattatatgataatgcactaagtaataaaataacatgattatgggaaacgtaacaaaacataataaaagaaactttgccacttgatccttttattttagtactgcagcgttagtagcgtctttatttactaatactacaacgttagttgtcctaagtgttccaccattgtgtgaacctttttgtcgctatcttaatttctcacttttaaaaaaagaagaagatgacggtttatatataaagttttatgtttatcatataaaacaagtgtgtatagtatacatgtacatatcatataaaacaatataaattcattgacagtgtgtcttatgagagaattcggacaatgtgaactgtgaagtgtttctgtaagtcgttgcccattgccagtgtgtaataagtttttaatagttgtaatattaattgtctgccgagagcatgtgagttttcaaattttgaatgtttatttatatcatattcatcaggggttagaattcaccaccaaactaaatatttttgtagacgttaaataaaagaatcaaatcgaataagcaatcttagttgaccgtcatcaattgtcatagaataaatataaagattttaaattagtaatcagaccaggtaggcaaatttcacctcacaaaaaacgtgtgagaatcgacaaaagaaaaaaaaaatccactacacttctacctactgttgtac

SEQ ID NO: 40073 - DNA, 855 bp, Arabidopsis thaliana landsberg
  unsure (1)..(855): unsure at all n locations
aggagagcagagcggaagcggagagatcggaagtagagagtgatgatttgcagatcctttggtttgttcaacgaagagagagacaaatactggtattgaacactgcttatgttgtacacgtactattcaatgaccgtgcgggtctactttgtcatttggctccgccgagtttgataaatgacttgccagacttcagatatattcatagcaattgacttattcgaaatttttttcagatgatttatgactgagcttgtaaactgtagctagccagggaaattgatagtgtaacaaatatcgaattttgttggggattttctatgtgagaaaaaaaagcatctgaagacaataataacaaatggttcatcaaattatatagctttgacctgccccggttttattaatcatgtcactttgctcagctaaacactgaaatagttacaacttttggtttgcaatggggatatgtggagttgaaatgttgattatgcccattgatttccattaacttcggcgaaatcaagagtaatatgtctttagttaaagtcacgcttttggtatataagctgatggcaaataattccttatgctgtaattttcctcggttgttatcagtgtgctaaggtagttatcttatccaaacctatggcttaatctcatcacaatccaatgatgtaaaggtagactaatgcagattgattctgtttttcttgtggaatagtcatgagtcagatttctgaattcttttaatgatntcaacttattgaattagtcagagaataatgtgaccatacaattngtttgtttcaagttaaactaagcaagaaataatcatcaattacaagttttaattcc

SEQ ID NO: 40074 - DNA, 591 bp, Arabidopsis thaliana landsberg
tcctcgagcttctattcattgtgatttaggcgtatcttttcgttgcaagtctaggcgtattttgtctattcattgtgatttaggcttttcacaatctcgattttaataagaaattttgatgttggtttgagattctcgttgatttctgcacgtggtagcctgtttgatgttcaaatacttggatcaacactgagttgtgttgtaattgagtggcatttaatgtattagcatcttcgagatgtagatcttatagttccgaggtcgggttgatgatttttttcaattggtatctaaaatgtgatactgaaagtgtcacacatggcttcttttgctgatggtcagtttcagctcaaaattgttattgccttttgtgatattggagatcatgagatctagctttaatgcttttgctcctctgccttcttacgctcgcaagtagtgtgacatttaaagtcgattccaactatatattttctgcgtgaaagatgatagataaaggcgggttatgcattattcaagagcaatctggtagcattattcaagagccattatttctatggaaccatcatttgtgtgaagactttaactcct

SEQ ID NO: 40075 - DNA, 408 bp, Arabidopsis thaliana landsberg
atttgattgaactctaacagatctaggattatgtttatggaagaagaaagtgctcatgctggactgtttcctgcttctgtacttgtggaaacctctgatgactctatacttgatcatgcggatggttttgagagtatatttcggctgggggatttaacaagaagaaaaatagagataggatgccaaaattgttttcagctgaacatattaattggcatatcaatacgacatcatctcatgtctaaatcttttgtgtatttcagtactgatgcttcattacttctatcgaaaattgaggttgatctaactgtggaaaatttaatgtgaaatgaaaaacggatttgcctaatttatcattattcgatcatttgcccattatttcctatcgtacgtcgttcaaattattat

SEQ ID NO: 40076 - DNA, 554 bp, Arabidopsis thaliana landsberg
gagtaaatcatacacatatcatacacataaaattcaattactcacatcaaactcaagacacatcataattctattcttgatatataaaaagttgttgcttgtaacaagatagattcgaaattcggtttattacaagatgattaaatattactttttttttttgaaaagacaaaagttaaccggtttatttcccttaattatttttggcatttgaatgatatgaagctttttattttgtttatctaattaaaaaattccgcaaaccggttttaattatcaaatttattggttgataagcacatgtaacaccacgataagcaaagcataaaatcgtaagagagaaaaagaaacattgtttaatttgtctagatggaacctataaaaataagactagttaataagagatagagagagagagtggggatcaggtggtatctagttcaggctccttctctctttttctctttcactcagccacgaacgaaccttccccttgaggcttaatccaatcttcttcttacataaacacctctcctgccccaccgtttccaaaa

SEQ ID NO: 40077 - DNA, 778 bp, Arabidopsis thaliana landsberg
gaaaaatgtccgaaggcccttcagataataaaagttcatgaatttcaaaagcttccttcataagggtagaagcgtgattttaaaaagacccctttcatatatatatccttgcgattattattagccgtcatcgtctagggttggttgttctgcaatatagttttttttgtgtgttttttataatctgcagcatcgtttcttataatctgaggaattgtttttcagactgcacgatcggttaattttgttacgttggttgcttctttgaagtgaaaaacggcgagggatgatgattcaattacaggtgcgaatggtttcatcatgagctcaaaaactttatttggcattttataatctgacttcgccgtcaactctttttttttttgttttttctattgaaaatttggaggaatggtaaatggatgatgattcaattagatgtgcgaatggtttcatcatgacctcaaaaactctatttggcaatttatctgacatctcccatttctctatgttcaatccaatgtatctcctttatgtggttttaactcgatattgttttattgtctgcgaaatgtttgataatgatgagttaacttttatagagtgttacataattattttacttattcatattgtagttacgccattgaaaaacagtttgattgtttatctgtttggagtttgcgttgatatatgatgtttatcccttttgtaatgataaaacttgcaaattgatatgtaacctcaagattaagcatagagttatttatttcgaagt

SEQ ID NO: 40078 - DNA, 609 bp, Arabidopsis thaliana landsberg
cttaaagcagtcctatgtgacaaaacagctccaagaaaccaatatttttgtttttaattagagaaaaaatgttgattgaataaatctttcaaacttgttaagaatgtgcaaatactagtgtatcaaacgtagggttgggcatggaacagatcttcagctatttgttgtctctgttagatttgcttcgatgacgagtagggcaatttaaatgaacaatttagagggtaaagaagaacctcaagaagaataaatataacttttgcgacatgggacactcgttctttatgataaacggttcaatctcagtcacaaactctggagtaaaaggacatgaaaagatccagaaaacccaacttcaaaatgtacaaaggatatgatgtgtgacggatgtgtgagataaatattttgtagtcttggatatgtttctatggtaccatgaaccttgcatgatgtgttgaacgacttctcctgaactcaggcatagatatattattattaccttctttgatgtgggctgtaccattagaaggcttgtcgtcgacgagtggagtgtcctcatgagcataaatcgtcctgcgcggtatatataatgaagttaacaagtgtttg

SEQ ID NO: 40079 - DNA, 697 bp, Arabidopsis thaliana landsberg
catgccagtgtaaagaaaacatgcaattatcgttctttattttaagtccttaattatatggcttttatgttgtgtttgtgcatgtttcaccaaacatcccattatgaaaaatatattcaaagctgaaaataactttattgatgcatggtcatctaaaaccacgatctgtgtcccattttgaaagtgaaaacttggtcatcatcataatagtaaaaggtgcctagaaattaaatattcaaaataaataaatttgaaacaattattacatgacaataagaggagacaataattacaaaaaaaaacgcattaacaaataaaataatactccacaaaagagttttatttatgactttcgaagttgttggaggaaatatagaagactctacggggaccaataacaagagaagtatagacgaagcccaaatgcaaatcatctccgtaatttttttgtcttgttgcaacaaattattattattattttatttttattttatttatttttgttgcaaaaaattatgatgaagagaacgatatatttttggaaatatctttcgaattcttgagttgttgaatatacaaaccaagtggagtaactgtctagtgaaaataatgtaggaaactttggataaaaaatgtatcttgtagacctttaaaatatcaaattagtggcgaaaattgttccaaaacttgccctttt

SEQ ID NO: 40080 - DNA, 536 bp, Arabidopsis thaliana landsberg
ccaccgccaccttctgtaccccgccgagacggacagttttgatttttccatcacgacgaccgacgacaacgccgcggcgtagaaacacgctcgccatgcagaacccctttggccccggccccacgcccacgtcctcctcctttggccacggcgacaccgcctggccctcgcggccgaccacgcgcgatggctccgccgtctcctcggccctgggcctgctgagcggcaccctctccaaggagcgcaagacgtccttttcccgcaagtcctcgctgtcgggctcccgccgccgcagcagcatctccaacccgggcgacgccgccgacgccatcatgacggacaactcggtgccgcccgcgctgcccgactacgcgctcgccgcagccgtcaagattgcgccccgcggcggcggcggcggcggcggcggcggcggcgatccgatacgcagcccgatcagcccggacagcgcgcccatatcggccgtcagccggtcgacgtcgggcgcggtgtcatgatgccgccgcagacgccctcga

SEQ ID NO: 40081 - DNA, 573 bp, Arabidopsis thaliana landsberg
aactcaatcccgcggccaggagttaggagactcgggcatctagctggtgtgtacataggtgttgcctgggattccgaagagaggaggttctttggctaggttctcatgcaggcatatatagacagaaaataaaggagggaataacagaaaagaccactgccaagttctcgtctcaaaatatttaattttgtttgaaaaggatacattcccaacttccctccataacacatcactccggcccaccagcagggacacactcgcacaggcacacacacacatgtaaggccaaagggctgctgtctgcttccacctctgcagctgggacaaagggcttttctcctggcctctttcccacggcaaaggtagggagaggggctgctggaatgcagctcccagggaggatgcagagcccacacactctaccaatcacatgcacttagaaaaataaaaccaagtggtgttctggcatccaacaccaaaagacagcaatctctacctggaaatcatctttgcctttttctagaaaattttattgcacttaattaacagatgttaaagaagctgtgggtaggg

SEQ ID NO: 40082 - DNA, 704 bp, Arabidopsis thaliana landsberg
ccttaatacctaaaagcactctttccacactataataaaacaagccaaatgcaatgcacttttctattgataattctaatttcttggtttcttttgttaaatgtataattttagtgcacttttctatgaataattaaaatttctaaacaccaaaaatagtatataaacgtggttgtgtgtgctatctcctcttatcctaacttcctattatataaaacgcgctatttaatcttgtcacaactatttaatacaagcctaatgcaatgcgtttttctattgatagataataacgaatttcttcatttccacgtcataataatcagaatcttactagtatttaagtctacatctagctacaaatgactacaaaacaaaattttaacaaactttttatttgaaacactattaacttttttttcttctattcataacttacatatgaatagacctataagactataatgaacatccatataacatattcataacacatgccagttaaatcaatcataattcacaaacctgtggttacacactctgattgatcataggtatacacaatacaaaaactcatcaactacattgtgctaattgactatacgaatatcgatttcttttgccgttgcttatgaaagtttatagaaatatgttacaacaacacattactagacttgaatccccatttttctttctatataagggat

SEQ ID NO: 40083 - DNA, 481 bp, Arabidopsis thaliana landsberg
ggtaagctatctagtttctgtcttaaacaagctagcaattttgttttattatgtatcactatatttttacatggactgctgttcaatttcactgtatagaaactttagtgttgcggttaaatgaagtagctaaagattgtagatttcaggtttcctatgcaaacttacttgtaatgctaaagtattaagggatgatctttctgtggttgaaaacttacaggccaaagaagcagtggaaatggctttgaaggatgagaaacagttaatggtgagttttgttgcaatggtctgttttaaaatggatgtacgaaaacacgttatttttcgtgatccaaaggaacccttttacaggaaattgagttcccaacatctggtctagcatctgtgccaggttataatcttttttcttcttatacaatttttcattgaaggcttttctcttcttgctttttcatcttagcaacattgttttttagttctt

SEQ ID NO: 40084 - DNA, 378 bp, Arabidopsis thaliana landsberg
tttgctatcctatatgattattcaattgatattaagaaaaaccacgatatatttatatcttccattgcctgccatcgactcaacggaatgacagcgtctcaacttaactatgagagaatccgattccaacaacagtagctactaggatgccgtgtaggttattgaaaactacatgaaccaattgatgattgtctagtggctctgcttctgctgatccaaaccaaatggtatcaattctgactagatgaacacattctacccactgtaaataacatcaaacgggtgtgaagaaacgttcattcggaatatagtgaactaactttatcacatgtctcagagactactgctctcacgactctggcgataccaagtctactc

SEQ ID NO: 40085 - DNA, 643 bp, Arabidopsis thaliana landsberg
tttgattgcacagacatgaacttcagttgcttgaacagctcacattgaggctatggacaacatcaatctctttatccgtgaaaacgcgagacggcattgataaaccaagaacagatttgtgtccatatagaccttaattcgctgcatttcaatataaggaagacatcgctttgtcgggttgactatcatatatgttcaagttgagaattcaaccccaagttttcattttcctcttttgatttgaccgtgcacttatcaaaattggtagaaacaaattttacgccatgtccaagaaataaaaacaaagtcacaattagtataccacaagtcaaattacattcggtaacgcgaatcacgctatattatgagcttattaattaatttggaaaattagttttttttttacatcttcttaattctttaatcgttgacaattgagtttcactttagagatttttagcctacttaaacacactaaccataaagcgcgtccacgtttggaggaagtcggcatcataaaatacaaaaaacctgtcgatacaaaaagacataagtacccttttattttacaaaactactatatgaaatctctcgcattgtacggattgatttatgtagctattcaatttctcctttctttatt

SEQ ID NO: 40086 - DNA, 232 bp, Arabidopsis thaliana landsberg
taatcgcttcacatactgacgttagcctaggagattgttcctttttcgatacttgtcgtcacatgaaggtaacttttttttggtcacaattgtgtgatagtacttcggttaagtgtagatatatggtaacagagcaaccattattttgaatttggacagacttgcaaatacgtgcattacgagctcgacatggctgacgctatgatggctggtccagataaggcattgaagc

SEQ ID NO: 40087 - DNA, 836 bp, Arabidopsis thaliana landsberg
  unsure (1)..(836): unsure at all n locations
cataacatgaatcatagatatttatatctgtactttgagtaattcatttgcatgaatagatattgggccttaatgggctataacatatatcaaacaagttggcccaaatgcaaattggctcacttaaaaagaagaattacgagctctatggtcagagtattaacaaaacccattctttaacatgttttttcttctttgtgtggcttttgttagttggttacgtcttgcatgagctccagttttcaagtatttgtgtatctccagttactaataattgcagggtgtttactggttgattattggtttttcagtattcatgtattttcgggatagatagctaatcatatattatatactccgatcaaattatgaatatcgaatttgtttataatattatcgataggattaaaatattaataaaggtaaaacagttttatgaatgtatatttttgttgcttagttactaattcgtttgtgtctctttttcctcatgcatggaagtttttggattagatatggaatatgaaatttttattgatggtggctcaaaattagcacttcaccaaagaactacgatttttagcagttcctagttttccggtttatcatgctgttttttatatatatatnccgtcgttttataacttttgttttccttattttatttatattatatcttaacggttgatccgattagcttacagagtagattacttttgatccaagtagaattggacaaccacattgtttgatctgagtttggaatgtcttccgactaccaaataaattaattaggtcaaagtataacttacagatttcacaaagtaattatgttt

SEQ ID NO: 40088 - DNA, 702 bp, Arabidopsis thaliana landsberg
  unsure (1)..(702): unsure at all n locations
tcaaaatatatgcatcacattgcaggataagcaagttttacattttgataaacttttatatgcaattaaacaaatgattcttcacatcctatcataaagatcgtaaacactattcaatacaagccacaagtccacaacatatcacccaaaaaatcagtatccttaaatttacattctgttgtccaaagtttattttcatctgctctaatggtgctatgcagttcaggtaccgacaagaaacacctaatgtgtttttccaagtcttgtagttacgatcggatcaaagatctatctgaagatgttttgagattgaagaagatctcaaaatggagattgatatggaggaagatattgatgatgaatcaaaagaagataaataagatttttgatcatcgtgttcgttatgatcctttcgcttattcccaaaacttcgagaatgatggaactatcgcatatcatgaagatcctgatgtgtcttccaagtctttttctgctagatttgntgtgtcttctaaagttttcaatcttaattatagttgagcttctttcttgtactcaattttggattcaagtgtttagacatttcaattagcactatactatgtgtgtaagaaatggacagngtagtaaattttcagcttctactttttgttattcatattagagaaatcaatcttacaagatgaacaacatcttttcatg

SEQ ID NO: 40089 - DNA, 974 bp, Arabidopsis thaliana landsberg
ggaatccttagctgcatgtgacatagctgtcttcgtgtatgtcatgtatatgtcctgctgtttgattggtggaaggatacctctctgtatgtagtttgtacgtaataattgagttcattgttttctccagttctgatgagtcgtcatggaagagagcgacccagttgcttgtagaagttgcaaattatggtgaggccactgggtatgaggtcccttgcctcatggtttcagcaaaagacgatcttgattcatctcctatttccatacaagaatccaccagggtagggttcttattgaactcagactcaatgaatatagctcgaataattccatacatatatatttatgcacacggatcttttcgcagatgacacaagatatgggaatagagcctccggtatcaatcagctccaaattgggggatttcaacaatttattccgcaaaatcttaactgcagcacaacatcctcatttgagcattccagagaccgaagcaggcaaaagccgcaaacattacaacaggctaatcaaccgctctcttatggccgtttccagtacgttttctttcctagaattctgaatcttgactcaatttttgtcccaaacaaagaaaaacctgtaacggcttcagacccatgttgggtatacttaaatttcaatctcatgctatgtaaacaattcgctaatttctacctcgtgatttgtaaacagttggtgctgctgctgtggtcgttgggctggctgcataccgtgtgtatgccacaagaaagagctcgtctgcctgagaagattgagaatgaacaatccaatctcttaaggtatgaacacggaaagaggatagcaaatctcgtgtactgagtttgtccatcgttctcaaggttttacaacttgatccagagtactgctgagtactgttcttagaagtttaatggaaatgggctttgtttgaagtaattgtggaagaagatctgtag

SEQ ID NO: 40090 - DNA, 421 bp, Arabidopsis thaliana landsberg
agggtcatgatttttataattaaactaatcacagattagttagatgagctagtggtccttttgtgttggtcctatgaaagttgagcaacatattattgactttattatcatagccaatcaacaagataagagcgcaaaatttaccattttctatacaagctaattcaatcaaatcaataatccatgacaattttttttttataacaaaccatgacaaaatgtttaatattgttcttttacgtcatattcttcttacgtaacagtgtacgtcattacgcaagagaaatagagaaagacattcttgttttcccatcatgcatggtctttcactcgagagaaaggaagacgaaaccaccgaaaaaggtgaaaatgagagggtaaagtatttttttgacttgaatcaaagtttaacaagtccacc

SEQ ID NO: 40091 - DNA, 532 bp, Arabidopsis thaliana landsberg
aacacccataggtgaacacctttcttgccacagaagagaaattgatcttttttgttcatcgacgatttgcccagacattggttctccaaattgatcaacatgttgcaaaagagaaactctgatagctcgatcattggaagcaaaaagcttgacaattgttggtagtacctaaaatcataaaagggagtacctttagacaataactgaaaagtatacatacagcattggagtgtatagagcgtttaaacagaaatttagcatggctgaacaaaccttgacactgaaatcttcagttgataaccacgaacccatcttaagtaaggcagttaatgcaggagcagcagctgaaccaaattcaagggaagaagctaataaaggaagaagctgcattaaccaaaaggttaaagtcaaaaagcataacacaaaaccttcaactcataaggtaaattgttatcctagtacccaataaaattcagattcataccttcttaagcacaatctcccgaggaagctgttcaacaacattttggaa

SEQ ID NO: 40092 - DNA, 687 bp, Arabidopsis thaliana landsberg
ttttctaagtcctctgtatttgtttgcacgtttttcaactaattttcaatatgaatcatttcttctataaagaaatgatattttcatcaggtaatgatacattgtgccgaaataaaacgtcaatactcattagtcaaattatctgttcacataatttaaaactgtgttaatccatccagttattttcttacaacaaaataatcttttctatcaacttttaaaataattaaacgcagtactaagataatctaaaatcttgatttagaaatccattatggtttctggtcaactgaaatccataatttcctttaacatccaaaatccaaatttgctactatgataatagatttcacacgaatatttgcaagttactatataaaacactataatggtcaacagattaaaaaaggcgaatgaagatatgttacgtaaaaagaaaatactataattataaattattactttcaaaagctttaaaatctggccacatgtttttaaagagtggtgtgacgtaacgactagagtcagcaaaatccattattggatcataaatattctcatctataaattacctaaacccttacaagtagtgtcccaaccaaacaaatcgagaaagacgaacacttaccaaacaaaatctctttgtgagctttagcgatcgtaacaatggcgaacgaggtgattctt

SEQ ID NO: 40093 - DNA, 584 bp, Arabidopsis thaliana landsberg
tggcattttgttgtatatcttaaaaatcctcgaaaatgttattatcagaaatggatacttgtttttagttggtttcataaagtgtgccatttttgtataacaacaatacaaccataattcaagttcatttttactagtaactacagtacttttttttatgaatctgaatcctcaaccaacagagccaaattcaaccaatacaacaactacaataaatgtgtacatttaccttatgtactagcagaaatattctaaaactttgggttaagcgattgtcaaggttttaaactctcttttttcactactagttctcctttcttggtaacaaatgtcaagttaagcaaatttaaacactcgattaagtaatcagaaccgaaatttagttggtctctacgattaggtcatcactttttacgtacgacctaacctaacgaagaagcgtgcaaagagaaaaaagaatggttatcatgatcatataacatttaaaacattagtcaatttggagagagaacaagaatgggaaatgaatagaagcaagtgggtcgtggttgcatattgcattgttgtaattactgttgagcaga

SEQ ID NO: 40094 - DNA, 796 bp, Arabidopsis thaliana landsberg
tcctgactgtgtttaaaaactattagtacaaggtaaaatgatcaaaatattttaagttttacacaaatttttcgtaactttttttaaaactgaaagcactttcaagcactgagatgcacaaaaaaggagacaaaatggaacattgatctctgcaggtccaaaaaaaatattatgatttggttgtcattaaatttttgatgcgtaataatggaaacgaaatttattctctaggttcaattgtaaacatggtcattgttttttgtaaactataatctcagtttgtgttgatgacaactaataatatttattttcactaatataaattcttagaaatacatgaggcttgtgtcaacctaaaaaagttgcttatcgaaatagtaagaaaattagaaagtatgagatgttgatcacgtgatcgagtgtgagtcgaattcgatcaccgagtaaatggggccctcgtaacatttatgttactctagaaattatatttaaataattctaatgttttatttaagtttacccttcttccttagtgcaccatcatttcctttaagttttctttgtctccattctctctgtcactgtcttttctccaccagaaaggtatgaagaaacaaaagtttttcttctgaatttttttcttttctgtgcgatttgttgttctcaaatagtgtttttgccataaaaaagaacgaggtttttgtgtcaaaaacacttttgatgtaaaaaaaaaacccactttttttcttacatagattttcgttcttttggtttgttgatgtttattggagcagta

SEQ ID NO: 40095 - DNA, 531 bp, Arabidopsis thaliana landsberg
tggaatcaagttgacttgtttcagtgtatatagcaagaacagtcgtgctaagtgctaactacatctacatgggtataaaaccaacagaacatctctaagtcggatgctagatgctttgagctatgctagagttctgttttttttttttgtggttttgctcgagtctgcggttgtgaacactcaggttttcatcttaatcttcgtcttgtgaatcaaaaggaacttcatgccggggtctgttgtacttctcacgcaattgtttgacagggatgaaatctccagctgtgtcggctccatagtagagaaaagaaacgtatggatgatcaaacctttcctgcacataccaaccagaaacatgagtcaaacagttgcaatgaggattaaattgtccatattgagcctactaaccttatcgggtttttcaggagctaacagattgtcttcagcaactgcaatatcagatccattgtcaagtaaaagtgagattgttcagtggttaagggttgtgcagcagggaagatttttgaggat

SEQ ID NO: 40096 - DNA, 592 bp, Arabidopsis thaliana landsberg
ggatgacaaaaaaaaaacaaaaaaacaaattttagctgtctgaaacctaataaaattgattaatatacaattatacatacctctttttaaaaaatatagagtatatgcatatctcattatatgtgtttggcatccatttcccatttcacattgtccccattcttgtatcttttgtgcatctaacgacaaaaataaaataaccaataaacgattaaacaaataaacggtgtagaatgagtttgcatggtaagatataataactatttgcttttaacattttttccaatacttcaacaatcaaatgattaaatgacttatctttgggccaaatatccaacgatttttagatgtgtctggttaaaaagttcttaatcggggtttgctaatcggatttagtttcacttcagtttttttttctttggctcaaagttttcacttagtttgtttcattcttgtattcttcttttcgaccggtttagcatttctcctgggtatttaactaagttaatcatattttttgaatcacgatcgtcaaatcttgttcacatgtgaggttattcatttgatcaacgaatttaatctttatcatata

SEQ ID NO: 40097 - DNA, 955 bp, Arabidopsis thaliana landsberg
tcatgcaaaaaaacctgaccctgcaatacctgatgtagtttgggcctgggtatcgattaccatgcgcccgatgagtaccccattgccgattctgagactcatttcggtctgtttaccaaatttctggagcccgaaaaatcgcaggaagtgcattttgagctgggccgttcgctggtgggacaatgcggcagcctcattacccgcgtagtgtttatcaaacgggggatcaaaaccaatttcatgatcgtggacgcaggtatgacggagttgctgcgtccggccctgtacggggctttccacaagatccaaaacctcaccaaaggcaacgggatcctgaacaaggaattttatgatgtggtgggacctgtttgcgaaagcagcgacaggtttggtaagcgaatcagtttacctgtatcggagcgcggtcatatcattgccatccgttcggccggagcttattgggaggtcatggccagccattataatctcagggaattgaacccggctttttattattgatgtcgatacaggattggcttgcgaaaaaaatttgtcatgaaagccctaggcaatcgggaggttcaaggttttaacccgaatttaaggcaacccttgaattgcctttctcgtctaatacgcagttaaccaatctttatgaacaaactattactccccctttttgccctcgccaccttgagcgcaagcgcacaaacagtaggcattacagccgagcattacgatgctttaaaagccaatgggcagctcaaccccaaagcgcagtacaggattaccgacctgaacagctccacactcttcaagtacaagccggccaatcacaccaaggctttgcagacccgttcgaccttgcgatgtttattgtcactggacagtacctatacgattgccatggcgcccaatgacgacttctcaagtgacatcatttacctgccgttta

SEQ ID NO: 40098 - DNA, 358 bp, Arabidopsis thaliana landsberg
aggaaggtttcccgtcatcactgtatgacgtcctccttctttggggggggggggggggggaaagaacgagtaccaagcaatgaatggcgggtagatgaatcaaagcctcagaagtgtaagtgcataggagcaagcggttgtgccatggagcagtagcaacgaaaattagcattgagagaagtgtagcgaagatgtacaggtgtttatttagcgcgactaaattcctgcagcaggaatcgtatgaaagagacccgaaagagatgaaacgtgttggttaatagaccctggctaagcgtacgtacgtgttgtgaggtaggcacaaacacgtgggtatgccgtaaaaagcctaagtggagag

SEQ ID NO: 40099 - DNA, 833 bp, Arabidopsis thaliana landsberg
aaagttcaacttttaattttggggtttagtgttcaaatttggagtttagagtttaaatttggggtttagaatttaaatttggggtttaaaaacacaatccaaaattttacacaatctggtttactaataccataatattacacaatcttataatacaatatcggttttggtacaaaaacacaaactgaacctattacacagtctaagtttcacacgaactttatttcatcatttggccatgctacaactgaacctattgcatcagaaatgtattcgatctctgaattttgcctccagaccattgcattaccaatcttagccacttcaacccagaccttgcttgcattaggacctaggggtacattatggcaagcatcgttcgggtctgttgaaagtactcttccttcagctaccttatgtccagaattgctgcaatctaaaagaaaacacttctactttggactttttgtggaactgttgctgcctggactctacaactcaaagccaataataaaagcaagttccaacatcaatgaaagttctaacatcaaccagcagacaaacaaatgaattaacaaggttacaataacaaacctggactttaggtagtgttgcatctgtagtggtggcagccgtgacgtcaatctttaggactggccatgcgattttctcgttaattgcatcacccattaaacaaatatcagtagttggcctccacaaatgagcattaccattgaacaccttcacaacttgaatactaacagcacttggtcctagaggtatattgttaaccttcttttggagttagatgaggacacaacaccttcagcaat

SEQ ID NO: 40100 - DNA, 517 bp, Arabidopsis thaliana landsberg
ggagcacaccatgggcttggggcgtcttatgccctggaaaccttggttctctacatatctgatctttgcaacaactcattttcgggacctcttgaggtaatgccattatgaaactgcctttgttctgtcaagattgcttcttcaatcttactgactggtcttcttgcatctgtaggttctctatcgttttcttgagttctttagtgagttcgactggcagaatttttgtcttagcctctggggccctgttccagttagttcactaccagatgtaacaggtatttacgaactgatgtccatcatacttttgcattagctgcgcttcttaactgtctctagtactgattgtcttgctatgcaattttttggcagcggagcctccacgaagggatgttggagagttacgagttagtgaagcgttctatagagcttgtagtacagtttatgcagctaatattgctcctcaagagatacagggcctgcctcttgtgccaaacatttcatgttatagaccctt

SEQ ID NO: 40101 - DNA, 430 bp, Arabidopsis thaliana landsberg
cgctgagctgccaaactgattttacaattgttggagcttaatgcaaccctgttttcactttttattatggtctccagtgacatttgtattttctagtttcagttcatctcgtaactaaagtataattttgttcgctatctttgagagtttgtctccaacctctgcacattgccaatctcatttaggatgcaccacatggtttaaaattgttttcttttccgagaattctttatcagttacaacaggaagagtaaaaggtttctctttgcaatacaacagcttactttgttgaagaatgagcacaagttgttgctcaacgaagtgtctcacagagccggataataaaaaccgttcctttatgaacactcacgagaccttgccgcaaaatcaaacggctaatgtatcatcaccacgaaagtgaggtactctc

SEQ ID NO: 40102 - DNA, 491 bp, Arabidopsis thaliana landsberg
  unsure (1)..(491): unsure at all n locations
ttccgtttcggaacgcaatggtgggctgggccttaccgacttctgtttatcggcactcgaagggaacgaagggaaaaggtcggtgaattcagggatcccgctcaacaattcgggacataatttcgtggtctcggtcacacccgatggcaatacacttttggttgggaacacnnnnnnnnnnnnnnnnnnnnnnnnnnngtcgggggtttccattgccgtaaaacgcaacggtgtatggtcggtgcccgaggaacaacgtatagacgggtacgttaaccgcaacgagtacagcagttttttcctgacccccgatggtacccggctgatcatgtcgctggagaacgatgagtcgcacggtgacaaagatttttttatcagcacgctcaaagaggacaacacctggtcgagaccacagcgcttatgcgatgccatcaattcctttggatccgattttgcgccttttctggcagcagatgggaaaaccctttttt

SEQ ID NO: 40103 - DNA, 381 bp, Arabidopsis thaliana landsberg
taattttgtttacctattgggccatgtatattatactacttgataacaacacatcgcatcattatcacattatcatttacttaattgcagtctatgccaatgttatatacaccgaattaactcaaaaaaatctagatcttgtaagaagtatattcgtaaaagtggatatggccgaataaatttcttagtctaaagcataagaaaaaaaaaaggttagtaagaaagaaagaaagaaagaaagaaagcacttggaaatactcttttggctttgggatcatatgccctggatggagcacacacaggtcccatttggatggatggatcaaccaacgatgagagatccaacggttctaaagaaattctcaaaatcaaaaatgctat

SEQ ID NO: 40104 - DNA, 685 bp, Arabidopsis thaliana landsberg
aaaagtgtttagggttatagatttaaagattaaaagaaagtagatgttagtttggatttatagaaaaatgtttaggatttatatttgacatttaaacaaattatatgttaatttggatttattaaaattaggtttagattttacaattaaataaaattatatcttggtttaagtttataaaagaatgattaggatttaaaatttataattaaatatatatgtcggcttgggtttgtagagattttgtttctataatttgttttattttatttttattttagttttgatttattttaaatatagtatgatatgtcatattgtttattattattatttagttaaaagggggtgaataaaagaggttcacctctaggagtgaacccaatatataaatttttttctgtccaaatgtcagtctattatatccaaaagattttaaatatttgtttatcaatattacaaattatcacatgatctttttcatgttttgtttttattcatacatatccaagagactttaaatatttgtttatcaatattacaaattatcacataatatattcgtgttttgcttttattcatatgattccaaaaatcacttattaaaagctattcattttaaacttgttccaacctaaacatctttatttttaaagtcttttcagaatattagaccaaaaatatt

SEQ ID NO: 40105 - DNA, 452 bp, Arabidopsis thaliana landsberg
acaccgccatgactccgatcatagcaacggatgcgatttgtaagatcacctctagcgcattgagatatttgtaagctttcttgcagctgctgcagttctcaacatgcgaccaatacctggaacacgcaacttttatcattaggatgtttagcactacttttcattaaacctcacaagcgagataaataacctgtcgaagagctgttctcggggaggcgtaggaggaagaagaaatggatcaaactttcctctccaatcgactcgagcctcgctgtacttgttaaaccatctcctgaatgtaaccacattagcgtctgattttgttgggataaagcaagctttttgccagttttcagggcctctctccagtatcttccgctcctacacacattccattacaagatacaaatcagtctggtacattgatcagcctctactcagaacaatgtgtg

SEQ ID NO: 40106 - DNA, 418 bp, Arabidopsis thaliana landsberg
gtcttatccatttttctgaaatctccattacatatctgaagactttgtattctataaaccatatatatatacactcatatagagtcacaacacaaaggttgcttcagtgtcgtttaattttgggttcattgttaaattcggctcttcgaattctgtgcgtgtttatatttcgaacctaattgcttaaccctttcatatacccttttcttgtactaataaaaccgtttcacattcaattctactcataattaggatcttaaatatcatatttgaaacttcaaattattacctttaattcggtatagaaaactagtttactcactgtaaaataaaatatcttggtcattctatggttaaaccaaattattgccaatattaaaacacgtgaggttttatcaagatattagtatattactga

SEQ ID NO: 40107 - DNA, 821 bp, Arabidopsis thaliana landsberg
atttataaattgtccgcagctgaggatttgaatccaaaatcttctcaaaacatttaggtattttatagttttttctgacaatggttcagtttttagtcatcagaaaaattcgtttaacaacaggtgttgagggacacttgaacaaacaataacaattataaattgaattgttgcaatggaaaacactgatcgggagatatctttattctttacaaagttatttccaatatcaatttttcaagagttaagtagaagagtacttggcttgggaaaattataattttgtaagaaaagtgatatgaaaattatataattgtgtggtgttttgtatttcagattttaaattggttatagttgtatttatgcaatcaatttttatcttcttttttttcataatttcctttgtttgttgtactaaatagcctaatattaaccttatatatgttcaaaccaacaaatatgttttcacactttaaagcagcagtaatttggcaacacttaagaagaaaatatccaagatatgatttggcaacactttagaagaaaatatccttcaatatcttggatcgtgaggccctttggacatattaatgatgacaattttgaattgatagaaaaaacaagttaagggtttgtgctttaacgtgtttggtccttagtcatagtgtcatacgattcgagctgctggggacactctttcgcttctgagctggtttgaagtgggcactcagatattattactcagaaacaatgaaataattgtatttagtcctgcatggcttttcattcataacaaagtaatatcatataacataatatat

SEQ ID NO: 40108 - DNA, 538 bp, Arabidopsis thaliana landsberg
  unsure (1)..(538): unsure at all n locations
cgccggctgcttcttgaacgcctcgcaggctttgcgcgtggtttcgaggttcttgttcttgagcgacggatttttcgcgatggctttcttgctgtagcgcttcatgaaggggtaatcgaggccccaccaggccagccccagaaccggcacccagatgagttcctgcttgatgaagaacttgaagaacggcgcacgtgttccaaacgaatgcatcagcacgaaaatgtcgttccaggtctggtgattggagcagaccaggtattgccccttgggcgagacgttgacgtccatgcgcaggtcccactcgatccgcatcaggnnnnnnnnnnnnnnnnnnnnnnnnnnngcccaatgctgcgccagccacgcggtcgccgatgacaccccatcgcgcgcagcgcccctggnnnnnnnnnnnnnnnnnnnnnnnnnnnnnnnnnnnnnnnccgcccagcacagggtattgacgatgaataacagcatgatgatgacgccatgcacgggcgccggcagaaaactcaacattgcatccccctgc

SEQ ID NO: 40109 - DNA, 396 bp, Arabidopsis thaliana landsberg
actccagcgcatgcgcatgctgcgtttacacaagacaacaccttaaaccaagtttctttaaacagccctctttctttcgatgatcaagactttttttgcttaccagtttggagaacaatgcgagttcggcgtatagatgaagccatcccttctcttcttctaactttgaatctttcatctgtaccatatcaacaacatcaaatccttaatattttaatctttaacacatgaaaaatcttacctcatagtattgcagcttatcccttcccgttagtgcatcttccggcatccactcgggcataccacctttgaagaaatcatccacgagatctttgttccatccaaaatatgtgtcttcctcctctaagagacacaacttgacataactaatatagc

SEQ ID NO: 40110 - DNA, 552 bp, Arabidopsis thaliana landsberg
cctaaccccagatactccatagcctcgatcatcgtcttgagatacctcttcaagcccaacatctgcaggactaactgagtctgcacacaagaatgaccaaaaaacaaatcacacttctgcttataaaacaaacattccccaaattctaacttcaactctcaccacaatgaaccataaaatcactgatcctagtagtccctctatgaagaatagattgatatattaatatatgatatttcttctctaaaaatcctaaatttgcatcatgtatacatcaaagttacaagatttgcacttctcagagactctgacgatttcaaattgtgaatctgcaattggccagatttggtggatcaaatgagtttccacatttattcaaatccaacaaaacaacgttaaaccctttaactaggtcactgattcgatcaaaactagctgcaattgcaataaccctatcgcagtaggagaaaatcaaacagagacaaaagaagaaagaaaaatacccaacacagagcatagcttttggatagccatggaagcaggagaaggagc

SEQ ID NO: 40111 - DNA, 465 bp, Arabidopsis thaliana landsberg
ccaccacaaatttccgagcgtccatatcatataatctctacatttgatttaaaaaaatccttcaattaacgttaaacggaaataatattatatatgttttataacataccttgagctggttgcggaggtggctaatcatgtcatcgacgaaagtttcaggagtttgtgttagtcttgcttgagccgcgacaaaagggactaggtaattgttgagaaaatcgtttgaaccgataactacagaaaataaggatctctttctaatgtaatctctagctttatcttgacccaaaagcttatcaaactgcttccttgtattggtaaagtaatcaacttgtatgtccattcctaaccgattcacctatgaaattgtaattttcaaattgtaaaacatatacacaagtccatttgtatattatgtacacggacaaaataaattttgagtcaaaacgcaaaatttaacacata

SEQ ID NO: 40112 - DNA, 1038 bp, Arabidopsis thaliana landsberg
tggctctcagttataaatctatggaactactatggctggtctcaaggtattgtctttcaccacactgttaacattcatatctttcaatggtgttaatgaacatgccctttgtttctgatgttgattctttcaggctgtgggttatgactttgattacgacgattttcatgggtactgaacttaacctgtctttcatatttgctttacatgtcttgtaaaatataaagtgtgtggaaacttgagattcctctttggttttacagttttgttcatgggaggttgccatactcaacactaaagcctgacccaattctgagaaatattattcttagcttgcctattcggaaagttgtatgtgttttgactccttgatgctaagctcttaaatttggtttccaatcagtttcttctctgatcttctaaacctgctcacaggttttcacgaatgcagacaaggctcatgcagccaagattattgccaggctaggcctagagggctgctttgaaaaaatcatatctttcgagactctgaaccccatcaccaaaactgaatctcctgttgatacccaaaccagagaaatcttcgacatgatcagttacatggcaaatcctgactcaagcattgaacttccaaagacttcggttgtatgcaaaccttctgaaggagcattcgaacaggttttcaagatggccaacatcaatcctaagaagacagtaagaacagatcgctgcttctttttacctaaaccatttcacactgaagcttactaaatttcaaatatcttgggtgttttcagttgttctttgatgatagcatccgcaacattcaaactgggaagcgtgttggtctccacaccgtatgggtaagtaaaagaagcagagctcaataagtgtaaaagagaacttatcattcccaaagctcacctttttaaaatcttgttgtattattaggttgggacctcacacagagaagaaggagttgatattgcattggagcatattcacacatacgtgaagctcttcctgactatgggatgc

SEQ ID NO: 40113 - DNA, 467 bp, Arabidopsis thaliana landsberg
ctaattatattgcagtgatctaataaatgcaaaatacagaaatatataggaaactctgaacacaatgactactacgcaataaataaataaagaaaccatttaaagaaatttcaactgttagtcgacaaccttgtaacttgtaagaaaagaaaaataattgttttcaagtccagaaataacatttaatcatgaaatacattttgatttcaatgtacatttatatatattttccaaactgaaatacataaaacttactaaaagaaaataatatgtatttgtagaagaataaaggaaactattacgtaataagcagaatctaggcgaatctaaaatctgcattagtaagtttgtaaacgcagaaaattgcatagaagatgagacatatgcagttctgaacaattctgctgacgctacacttagctctgcctcatagccttcatttaattccttcaactgttcacttggcc

SEQ ID NO: 40114 - DNA, 1091 bp, Arabidopsis thaliana landsberg
  unsure (1)..(1091): unsure at all n locations
gaattttgaatatattctgttggtaaacaggtccagaattgtctaacagatgaatacgtcatatagttccgatcgacccacaatttgtaacgatgttacatgtgatttttcaatatgtctttagaagattcgaatacatcatagacgacatagacataagcctatataagtcataatcatctttatcttttccctcatcatgtggtgttatctctgtgtcaaaagtccatataacatcttagcctctaataatcttctgttcgtgatcactccctaacagttaattaaaaactgttctagctacaatcactaactaaatttgaaccgatcagctaactcttgtcttcaaagaatatgtgtgtttgattatttattgtatgatactaattaattttaaagtatataagaataaagtgtgggagggtcagaaaacccataatgagctggttccagatcatctttgttgaataaacaaaagatactatatactgtagggatccatttagaagctatattgctttttagatgattgactatatacatcgaactgaccttttgtgtttttggattctcaagtgttgctattatcttatatgattgttagaagatacatactaacacattagattattaaactctcaaacgagtccaactttgaggcctttgacaaagaatgcgaatgagaagagtcgacaaaccgcccacaaaatatgaaaattgggatctagtgttttatttttataacaatagtctttggttttggtcagctgaaaagttaggtatttcaattgttattttgattcttaagtataaagtacaaagactaaaaagtagccgatagaaacattatatgaaattatgaatcatcttaaatcctaaatttcattctaatattcaaaaacaatttttttctatgacacagacggcttattattttattgggctacaaatgacacaagcgctttcatttgattgggctaaaaacgaaaagatccggcccattgagctgnggttatcgctcacctttggaagtgtatttcttcttcatcttccgaatcgcattcttcgatcgaatcgccgacggagaaatg

SEQ ID NO: 40115 - DNA, 327 bp, Arabidopsis thaliana landsberg
  unsure (1)..(327): unsure at all n locations
acgctcgcgccgctggccgaggtactttgttataggcacttcgccgacgcccggaaggnnnnnnnnnnnnnnnnnnnnnnnnnnnnnnnnnnnnnnnnnnnnnnnnnnnnnnnnngatcgtccgagcggtggttaaacggtggagggcgcggccgccgggcgcatgagcagtgtgaatctcaacgacgagcagggcaacccgtaccagccggattttgtctatcgcggtttgcaagacgtagtcgcacttcggcatcgagcaggggctggccgtataccagggggggacgcgcgttaacgaggcatttggcgacgtcgataactggg

SEQ ID NO: 40116 - DNA, 724 bp, Arabidopsis thaliana landsberg
ggattctggggtgttcttcagggaactggtaagtaacaaatttttgcaggacactgatgcatttccataattgagtcttcctcttccttttctcagattcagataaaaatgagcgtgcaatggacataatcaatcggttcattggcaattgttgttggatgaacatacatatcgttccaccacatggtgaagtgttcgagataagagtagctcaaggctatggagcacgttggtctcgagatggaaccaaagtatgtatatgggtgagacttgaagtatgtatctttcagacgtgtctgatcatcaattgttttgttgctgtttatttttattggcagttcattggatttcttgagccttacatggaggatggtcactccatggcctggaagcattaagaccgcacctgtaaacatctctgtgtctttaggactttgtgaactttctcttgtagttgaatcgttttttctttcaacaagtgtaaatttgtaacgcttcttttcttgtgacaaaaaaaatcaaatttattttttttctaagaaggattttgtgggtgatcttgttatgattagggtatgaaaagaaaatatgaggaccaaagtgttaagacaaactgtaaattgggcaaaactgtgaagggacattaaagcgatatatgattgggccttaaagcccattgtttgataaatcgtccagagggtaaatatggcatttcaggtttacg

SEQ ID NO: 40117 - DNA, 574 bp, Arabidopsis thaliana landsberg
cagtattacactcttaccggttgaaacaacaacttgatgggacagggaagtgagaatcttttttgccttttcggtcttagaaagaatgtacatttgcgatgagagtaagagcaagaatttaaaaaagaacaaagaggaaaagccgaagaaattgacattgtttttgcttataaacatttgcagtcacttgcttgttgattaagttgattttgaggttaattgacaactataacaaatcagaagatttaagttgcaattatgtgcgctaagctaaggcttttagactcttatcatcatgtagtaacatcaagccaagtgccaatacctttatgcagatactttctgaatacaacaaaattggacacaatgatctgagtttcatattatataatatcaattaactaaaccgatttctcaaccacacatttgctaaaggctgaatataaattaattaaccctaatccttcttcttcgaccttttatttggcgccaaacccgcagatacatgtttttattttccgctcgagcaaattgatctgatccgagtctttcagcggggagagaaagagagaga

SEQ ID NO: 40118 - DNA, 606 bp, Arabidopsis thaliana landsberg
ttcttatagtacatatacggtgtgatttcctatccacaagggtcagggtaaattgtctctcaaatcattctaaatcatatcatatataattttactacaaaatccgagttttgcacatttttataaatgattaatcaaataaccatatatttggattgattttaacaaatggtaaattcaataaggtaggattttaatacattttagaaaatcattggtgctataaggggagattgtttatagaacataaataatctcaaatcaataattctatgcccctattaatgataaaaataagcaataattaaattaaatataaataacattgaaataacaataaatagatagagttaaaccattaatagtattatatatatggtttctttagtaaaatgttaaatacaacattatatgttttttgttttttcaaaattaacaaactttaaaatatcaaatgtttctgggcgtagcccgaattctaccctagtatagataaaattgtttatgttaaaacgacaagtagatgcattatgaacaataaggcaacttcttgcatgattctcttttaacttagggtgcatatactttggctgaatggtatctaac

SEQ ID NO: 40119 - DNA, 956 bp, Arabidopsis thaliana landsberg
tataagatattatcagaacaggagatcgatttaataagaaaacaatgctagaaagaatatatagtagcttagagatttttctcaagaagtaaagacaaaaagagagctagtctctaaagaatgatcgagttaggaggatctaatgttatagtgttgttcacatggtttgagtttggaggatcaaatgtttagtgttgttcacatggtttcagttatttgagggaaatgaaccctgcgaaacgccctatacaagatatttttagaaacaataaaagcttgtggcgaatgctagttttagtgtgttttgaaaatttaattttaaaaattagaactcttttttggtgtcatccttaaaaattagaaattctgattactgattatgatgataaagaaatttgaatatggacaacactaaatcaattttttcaatttctctagtgtttttcaaaatattttattagtagtcatctcattgcagtttggataccagaaaatataacttgtttcaaatcgaactaaaatgttttgtcgcgaataagttatactctgatctcttaaaacgagttgtctaaaagttcggacactctctttttaactagtaaaacaaactattgaaacaaaattttaacatcataaagtgtgagttgttttcaattgttctaatcgttttctcaatgtgtttgactaatcgagaaaaagcaaatgataggaacttgaccaaataaactttgatccaaatagactgtgcaaaaacatgggaccatttttgttatctcatctataatttttaaaattatcattgatgagataattgagacctcaggcatatggtttggtatgttgtttccagctttttttcattggggtttcccactttcctttttgatgatatataaaattctctgtactcctctaatatatcattaaaatatttaaaaacgtaaaatttgtatgtt

SEQ ID NO: 40120 - DNA, 663 bp, Arabidopsis thaliana landsberg
aggcaaaaccgcactggatattttttcagcatctccttactaggtaattgaactttctcagtaggacgttcccattctagacaaagaaaaattcagggcatataaaccatgttagagatatgaacaaacactgaattgttttcatttcaaaaccaactgttgaataagagcttgcttgcttaatttcttactcggttctttggggtttgaagtaaatgattcaccactaggtcgagaaacacgaaattttgttaaatcactttttcttcatataatccattttgatctataaattggttaattatctcctaaccccaaaagttatagtcacatggctttaaatttcttaaaaacaaaacaaacaatatgatggcattcaacattgtttcaaaatgtagaaatgacttgccgtaaaatacacgcatagggcgagggaaattacctagtataaaattcaaaagtaaaagactaatttccattagaagcttaattaatgcattttttatcttcattggactaatgagcgagagagtaatgttctacatcgcgtcaagagtagctagaactggccgtaggattcacgcatccggcgagagatcgccctcacagtttaaaacattttccttctcgctaccccatcaaggcgaccatttccattcatgt

SEQ ID NO: 40121 - DNA, 598 bp, Arabidopsis thaliana landsberg
ggaacccgactgtgtgtaaataatctaaaggttgctttcctatggtcactgcactgaagtcacttagaggctaaggaacaccaaaaaagaaaagcacgcaaccattaaggacagtactagtgatcttctaagactctattagtacattggcaatcaaagcatgcaagagagaaacaaaactgagaattgcaatggcataaaagatagagaattgagtaaaacgcaataaccaagtgtttagcattgtgatagttacctgcactctgttgaggattgatcccgatcccatctgcacacatgaatacagatacatcatcacatcagaaatcttgagaattgatgaatatggattacatcagccgaaactaataatcaatgactaaacacacccaaaataatcatagattagttatgagaactataattctattcgaaacaaatccctttaagattttccagcaccagaaagctttaaacttgtaaactttgtagatacataaagagctcaaggaaaagatttacatgattcatgtctaagataacattctcgtgaatgcacaaacatatgaagatgaaatgaatcaaatttgaagggaca

SEQ ID NO: 40122 - DNA, 650 bp, Arabidopsis thaliana landsberg
ttacttaattagtgttctatatccattgtagtgtccaatgtacattccctctctgcaagcttttactctatggtttttcactttttctaaatcttcactctttttatcttcaagatctaacattgacttttcatcaacatatattatataaaatatttgacttttcaaaattctaatttattccttcaggatgaatgggtgatctctagggttttccagaaaaccactttagccagcaccggtgccgtcggaggagaaggaggaggagcaactgtgagcgtaagcagcggtactggtccatctaaaaagacgaaggtaccctcaacagtctcaagaaactatcaagaacaaccaagctctccttcctccgtctcactcccacctctcttggatccgaccactaccctcggctacaccgacagcagttgctcctacgacagccgtagcaccaacacaaccgtcacagccagcgcaataactgagcacgtgtcctgtttctccactgtccctactactactacggccttgggcttagacgttaactcattcagccgtcttccaccgccggctaggtttgactttgacccttttcctcgtttcgtctctagaaacgtctcgactcaatctaacttcagatcgttcaagaaaac

SEQ ID NO: 40123 - DNA, 412 bp, Arabidopsis thaliana landsberg
taaccgccatagagcatatttgcttatttcctaaagtctttaaatagtgtagagtattgagtgggatcagcacattatcagttgttactctatttggtacaaatgctgattgatatttagaagatctctcttgaacgactggctggagtcgttaggaaagcaatttggagatgattttttagaaaaccgtacataaagcaattggtctgtagtcaaccatgtttagtggactatggatctttggtagaagcatgatgtgagtattattgatggttctttgtaggctagtagaagagaagaaagactttatttctaggacaatatgaggaccaactgctttccaatacgtttggaagaaacttgctgataaaccatcaggcccttgtgccttgtcagcacgaatggagaaaac

SEQ ID NO: 40124 - DNA, 494 bp, Arabidopsis thaliana landsberg
  unsure (1)..(494): unsure at all n locations
tgaacggtaacgacaaaaccgacatcgggatggtggtaagtctctcgattctgtgtccctttgtcgttaatcttctgctgctcttgactgatgttttactttggttttgggagcaggtgattagaggaaacagcattgtcactgttgaagctcttgaaccagtgggcagatcttcttagctcgttatattcattggttatgatctttttgtactaagcactagctatgagaaatcttggtggtagattcgcagttacgatgaattgattctgtaagaagtctacatgaatactcttttcttgtactaaaaagattgcaatgaacccccaccgatgaatgtgatggcttgtacttttcactcttgatacaatgctcaaacctctattagtcatcttcttagcttggnttatgcatccatagtcatctttgttttggtactaaacattaattctgaggaaacttgatggtagatttgcagttattataaattgatc

SEQ ID NO: 40125 - DNA, 791 bp, Arabidopsis thaliana landsberg
ttcattctttagaccggtgttgaaataatcaacaaaccaaatatataaatagactgactgtactttatgacatattcagaacaaatccaaggaaacaaaaacaaaacaaaacaatgagatgattatagtcacaagttctgcatagcaaaactcttacaacacaaataatatacagataagataacctcttttggtggaacataaccaaagttgaataatcctctcatactagtctgttcccggcattggaaccatcatatgctgctgagcctacaattataccgagtccaatgtcaaattagttcacagattttgaggtattcatagattataacataagtgatgctttacaagttttcaattcttaacaaattagaagagaatgatgcgtattgcttgagtgtgaagagaagagaggaaagtttacttgagagttcccataaggaccttggtgagcaagctgcgagaactgccaaatggtaaacaaaccccatgaatgtcagactaacttagctaaagcggaagagagaatacgtgcagatgaatgcgaagacgaaaaaatggtcaaaggcatgagatttgagacatatacctggccattttggcttgattgcacatctttctttgcatttggatccccaccttttgctgatccctttgtgtcaccctattgatcattgaaaaggataaggaaagcataaatagtttgatacataagttgacaaaaagagatgattcacggaagccataaagatcatagatcgttgcaagttttaagaatgaacaagaaa

SEQ ID NO: 40126 - DNA, 612 bp, Arabidopsis thaliana landsberg
catgcttctttacgaattcgatgacctgcagagcgacacacaatatcacattaaaccacaccaaacttacaaaaagatcaaatgttggtcttgatattaaaatatcacatgtgtctttaccttttgctcagcttccctttcagttatcgcactgaggagcactttcttcgtcaaccctgaaatgattgtccagatgtcatgcagatcaaatctatgggaaacacagaagttctagtacggcgaatatcaggagaggaacttaccactagctccatgatgagtttgacaccagtcatccattttatccaaacagtctttcgtttgatgtacaactaaatctggaccctgacaacagagaagctaactcagtaacaaatccggatggcggagcaagtgtttcatctaaaagtgggtgagaagtctcctgaaaacagtgttatatccacaactgaatactatgtagttccacattcttacaagaactttctgctctcttttgccctctgattacaatgattttgagacacatacaatataccattggtcaaaatctatccttctcttagaaagtttctcgacattatagcttatcgactatgaaactaccacttt

SEQ ID NO: 40127 - DNA, 566 bp, Arabidopsis thaliana landsberg
ccttgccgccgggaaagtagtggaacagctggctctcggaggtctgggtgcgtgcccggatgtcatcgagcgtggtggccgacaccccgccggtgcggatctctgcggcggcgccctcgatgatccgccaccgagtggcagctcctttgctggtcaatttctggacttgcaggtccattttgataggtgaactatctggactcatgagtccaaacagtacgcggcttgtaggccgcacagcattgatcaccggttctaccgccggactaggggccggtatcgccaccgcgctcgccgagggtggcgcgtcggtcctagttagcgggcgcgatccgaaacgcggcaacgacgtcgtgcagcgcatcgaatcagcgggcggcagggcggcgttcatcggcgccgatctgggcgccggcgaggctgaggtcacccggttggccgccgaggcgacagccgccgctggcggtccgatcgacatcctggtcaacaacgccgccatgatcctgatgccgtcgcccaccgaggaggttcccgagacacagattcgcgacgcattcgcgatcaat

SEQ ID NO: 40128 - DNA, 588 bp, Arabidopsis thaliana landsberg
aaaataaaattaaaactcaatatcatgcatatatatcagcaacctagaataatcaatgaaattttttcgaggataatcaatatccaactcaacgataatcaaaagcctaataatagatcaatgaaatcaaataactaaacatagtaatatacattgatttgtgttaaacagaataatatacattataatagtatgaaaatatgaatataatgagataagaggcgtatatgttacaactacagatcaccatccacaattaacaatccgattggtgcgggccattgtttcgatatttgccaactgtgattgatgtgactgccagctggcatattttcccctcctgattacgtttttaccctttcctcttctgttttaccgttaattcaattttactatttgtaccgctgtctttcaccctttttaagaaaaccgaacccgaaatcataactataccgaaatcacatgtcttcatggagacgtaactagacttattttccggttgaatttggttttacctattgagattgtgctaaccgaatacagaaacggttatgacgccaacgaggcaagaggggtaaaacgagaaag

SEQ ID NO: 40129 - DNA, 477 bp, Arabidopsis thaliana landsberg
caacacacataaaaactttgcaaattgatcatggtggtccatttgttttctttttagggaatttagatatatttgtcataaatgtcaactgttaagtattaaaacttaaattggaaatgggccattcttcttgttaatgaaagtaaagaagagagtgacttttttttttataataaggatttggtatgttagaggaaaggatggtagtgagtgatgtttctttttggatgctcgcaattaatctagtgtagtgatagccaatgggtttcaagtttgaaaaatttaggttgaggagacacttggtacatcagaatataaaactcttttgattctttccaattccattgtcaaggaaaaacttttaaatagggaattagtaaagagagcccacattgtggtgacatgattctgaatacataaatatttcatgtcctttgagggaattctaaaggactagtctggtgatctagtacttga

SEQ ID NO: 40130 - DNA, 792 bp, Arabidopsis thaliana landsberg
  unsure (1)..(792): unsure at all n locations
ctttgccaagcacagggcagttctacattcgttttcaacaataacataaagtttttatatcaatcaatacctttagacctaaatcataaaactagctacaagatcataaaacttctactaccaagaccagttgctcatgaggattccattcaatcttaagattctagttgattctgaacccttaaactaaaattaattgaaccttagataaatcactaaacactatgctcctcttttctctccgttaagaaaacgaatagaagaagagaacaagaaccctatcataacaaacccaaaatcaacactcactcctataaagtccaagatgaagtaaaacccagaaaccaaaagattggaattcaccaaattccctttaaaccctaatccaacaaaatttccaaaccctagctagagaaacgaacaaacaaatcgataaaaggattcacagtgaaattcaccttaaaatcgaacttcggaagaggaggcaagtcctttagaaagtcagctggcttcttagagctccgacgcatctcttcctccaccaaacggtctacctccgacttaatcaatggattgccatagtcgtcgtctatataaggaagcgcatcgataacttctgcattcgccgcactagcccagggcctcgcagcctccggcgtcgcctccaacatcaagacannnnnnnnnnnnnnnnnnnnagtcgtctctcaacttcagaaatcgaaagtgtccagatagtgagaactgagaaagatggagagacccaagttaataaaaaagaagaagttaata

SEQ ID NO: 40131 - DNA, 497 bp, Arabidopsis thaliana landsberg
aaaacattgacacatgtgacatgaagtagacagagaaactcttgatagtaccttgacttaaaacaaagaatctagagacggaaggataactcagcacataccaacatgagggcacaagcctttgtaatatatgacttcactaaactgctctgaagactcattagcttatcagcatccttaagagcaagctgcaggaaatatcaagttttccaggatatgagtcgatgaagtttgcaactgctagtaacagtttaagtaagtagaatacatacttcaccaagcatcgacatatcaaaaccattcagaggtttatattcagaaattgatgcagatctctgcttcagatattggccaaatctataatcgaaaaaaggatggagatggagagaaattagaatatgtcaacacggtttaatacttatacagagagtacaaaggcaaaactagctacacaatccaatgtaatcttatatcaaaacaacatgacaacttcattg

SEQ ID NO: 40132 - DNA, 556 bp, Arabidopsis thaliana landsberg
  unsure (1)..(556): unsure at all n locations
tctccagtcgaactcttcgaccgggtcggtcttggcgccataggtcaggcgcgccagcgtgcgtggcatcgccaggccgagagaacgcgaatcgtcggattcacgcaacgcccgccacgaggcatattccggcgtcgagaaaatcttggccaggtcgcgcggattggacagctcgttccagctttcgaatccgagcagcgagtggttggccgccgccaggaacggtgcatgcgcggccgccgccacctgggcgatgccgcccagcatttacacgtcctgcgggctgtggtcgaagtagaagtcgccgaccaggcaaccatagggctcgccgccgagctggccgtattcctcttcgtacaccttcttgaagatcgggctctggtcccacgcggtgcccttgtaacgcttcaggttcttgccgagttccttcttggaaatgtngaacacccngnatcttgagctgctggtcggtctccgtgttgttgacgaggtagtgcagcccgcgccacgcgctttccagtttctttaaatccgcgtgatgcatcacgaggttcat

SEQ ID NO: 40133 - DNA, 472 bp, Arabidopsis thaliana landsberg
tactttttgaatgccaacttagcaatgaatcaataagcaaaaagtggcaaaaagagtcctttgctttcaagttaaatgtgttatctttagaaggaatcttgcaccaatctgccatgtgtctctgttgttcatgaaactgctttgaacagattctctctttgaactccaaagaggaggttaccttattgaatacgtatagtggcataaaagccaatctcaaaagtggagttttacaatttcgtaaagcagcattttgaggaaatttaatatagagatgactgaaatttactgtttcttttcatacaaatcatcttaatttgccattgtaataccataatctgaattacaaatgcaaagaatataatttggctaatcatgttctttatctttcactgaattatcagaaaatgaacctaacaatagatagatcagccttttagtattcagaccagagtttaacatctttcatagg

SEQ ID NO: 40134 - DNA, 357 bp, Arabidopsis thaliana landsberg
tatgcgagcaaaaagagtaacaaaacaagaacccaaaaagttaactaatttattttcattattttccctcttcaacaagtagaagaagatggaggcttttagggtaagacatgagtgttcatctctccgaggtactttgttggattcaagatatactaaggcagtgcaatgccttgtagaacaagttatcgatataggtggtagagaggttgagcttctcaacaacattctaatcaatcagctgtttccaggaaggagaagacccggttttgctttgtcttccgaaatcaaatccgaactttgcagatctggtttcatgtctctgcctgagaatcatgacattcatatgacaatcac

SEQ ID NO: 40135 - DNA, 614 bp, Arabidopsis thaliana landsberg
cgccctcggcgcggtgatccgcggcggcactccgcacttcgaatacgttgccggcgagtgcaccaagggcctgttttaggtttccctgcagttcaacgtgccggtggccttcggcgtgctgaccgtcgactccatcgagcaggccatcgagcgctccggcaccaaggccggcaacaagggcgccgaggccgcgctgtccgccctggaaatggtgagcctgctgtcgcaactggaggccaagtgagcagcaacgacaacggcgctccgtccaagccggccaagcccaacaagatcgccatgcgccgcaaggcccgcagcctcgcggtgcaggccctgtactcctggcagatggccggccagccgctgaacgagatcgaggcggccttccgcaccgacaacgacttcagcgacgtcgacggcgcctacttccacgagatcctccacggcgtgccgcgcctgaagaccgagctggaccaggaattcaccccctgcctggaccgcccgctggaagagatcgacccggtcgagctggccatcctgcgcctggccacctacgagctgcgcaaccgccaggacgtgccctacaaggtggtgatcaacgaaggcatcgagct

SEQ ID NO: 40136 - DNA, 591 bp, Arabidopsis thaliana landsberg
cctgcccgatgaatccttcatccaacctgttcctgattggcccgaccggggccggcaaaacgtccatcgggcgacgcctggccgcgcacttccagcgtccctttctggatctggatgccgaaatcgaagccagcacgggcgtcgacattccacgcattttcgaagtggaaggcgaagcgggctttcgccgccgcgaggccgaactgctcaacgccctcagtcaacgcgaaggcatcatcctggccagcggcgccggcgccattctcgacgccgtcaaccggcaacgtctggcggcacgcggcttcgtgttgtggctggatgtcagcgtggcgcagcaactggcgcgactggcactggatcgctcgcgccccctgctggccgcgccggatcgccaacaacggctcgaaaccatggccgccacgcgcacggcgctgtaccaatccatcgccgacttgcacattctctgccacgacgaagccgtcgaccaggcggtccggcgcacgcaggccctgctcgaagccgtctggatcccactcaatccggtatctccatgaccgtccaccaacatctgaacgtcgaactcggcacgcg

SEQ ID NO: 40137 - DNA, 564 bp, Arabidopsis thaliana landsberg
ttgacttttcattttaatccctaacttttattgacttatcaatttgagtatttcattaaattttagattacataattacatcacggctgtgccacacaaaaaaaacatattatcctacgaatgttgcattatcaattctaaggtctgtgacatacgtcatctttcattccttttaacacaatgataaacgattacggattgttagattttccttacatcggtgattgtctgtcttggcgagggtggaaggataaaaactactactatgttgtttggatagagctcttgccaacgaagattggcacaaaatgttttacaaatcatatgtagaatatttacgtatggtagccttggatcataaacaattagtagcgataattaaggataaagtacttcggggaaagaaaagtgttagatttgataaaagatgggtcagaaaagaaggtttaatggaaaccatcgtggaaggatgtcaatataataatacggatgaggaaggtcattttgtacataaactaacaaattgtcggcattccatatctaaatggcggaacaatttgacat

SEQ ID NO: 40138 - DNA, 534 bp, Arabidopsis thaliana landsberg
cgttagattcaactaacattgtactagcattcgatcgtatgaaatatacaaattcactcacacattagcaaagcctttgacaaaaaaaacacacacttaacattactacattagcattaaatatagcggatacataaagcacacattttttattgaaaaatactataggcttgttagtatagatccaaattttgtgatatgaacgaaaattcttgagaaatgttatgaaataatatagacttaattaatcagttaaataatgtagacttcttatagatcctttatgaacgtgtggagatataattgaatgcatattgtcaagcccacctcatggacttgatttatttgtaagttgtaacgtatctctctccactctgtctcattggttgactatggttatatgtgatcttatacaactagaggaattaaaagtgacttattactataaaaagactaatgagaggatttagacagcttctagacctatttgtttgagtgacatgtatatgcgggtttacattcagatgatgaaat

SEQ ID NO: 40139 - DNA, 774 bp, Arabidopsis thaliana landsberg
ttaatcaatacgagagaaacatgaaaactgtctaatttcgctatttgtctgaatacaacatcagctaattaggtaatacttaacgctgaatataataactaaaattatcaatcaagtcacggattttgcaagattctatatcagatcatgggccacttgtggaccagatgcagtcatacacctcattccaagtcatcaaataaagttatggaaaaaaacagtaattaaagaataacgtaatcaatttattaatgaccaattcagttaaaaagctcgttatactttaactttaatcaattaattaacgactagttcctcgtgttatcactccaagttgcttttgttgacttagtagttttaaacaaaaagaaaagagagaaacgaagaagataattggtcgaagccatgggaccaactacccccatacatttatattgccattggttgagaagctgatatcaaaggagccacattattgtaataaattaatgaagtttccatttctttaacatttattcatttttgtgtagattagtgtcataagttttaaataaatttacatgatacttttgaaatattatttgataatatgtagaatgaaagaatttaaaactcatttcatatcccattttcatatcataatatggctggatattggattcgccctacccagtatttctccaaatttacttaaaataaaaatttggaaaaccttcccattggtttttaatttttcccctttttcccttcaaatttatattttttccttttttt

SEQ ID NO: 40140 - DNA, 576 bp, Arabidopsis thaliana landsberg
gtcttctgtttaccgcgggttaaaacctagtataatgtgtgggagcaggctataatagttaaaaaattgttactaccaaacaacgaaagaacacaatgaagtattatgtattattgtcaaacaaaatgatctcacacattcaagtgcgcttttaattagtagaaattgttaaaggctaagaaaatcaaaactagttgtgtagaatagaaaaattaaataagttttttttgttctttaaagagagataatgtaatagtaatggttcacgacttcacatgatggagcaagacggttgttcctcttcgtaatgtgatctgccaccatattgcgatggtggtggttgccaacctccgtagctattgtaaatgggtctttcatcatacccattgggtcgggaccatccgtagttaggcccatcagaccaaggcaccggatggcccatcatcggcggtggattatacccatgtgtcacccgttgagaacttggatcgccttgagctggagctgctgctgggctgggcttctctggttctttaggttactcagcatctttgggcttctcaggctctttgggct

SEQ ID NO: 40141 - DNA, 769 bp, Arabidopsis thaliana landsberg
atatatgaaaaacttaggattttagttcttatatgatagtatttatatgaaaatataagtgtatccggatcgaccgattcagattgggcacacccttaaaggagaagtagataaatgattgatcgtctggtcgattaccattataaatctcatgaaatacgtatgtctttcctctttttcgttgaaggactaacttttttcaagagagatttacccgttcgattgctactggtcttagtttcttcttactcgaactcgttattctcttcttggttctttgcttgttcccatctatagagtgtgtgcttcagatagtttcatagacctattaaaagataatatatatttgcaatgcatatgctctaggatcttaaattcaaatcaaaactaaaaatacaaaaaaagaaaagaaaaaacaaaaaaaagaagacataaacctagttgtttaaaccactaaaatacaaacgcataaacttactacacatgaaaatgaaacgactacatacgactgactactttgcatatatatatttgtgaattactcttcactttttctctatatataataacaacttgaagacaaagacaaaataataaaataaccttatctcttctctatatattagttcttgagatctctccaacaactctactttgtctttactcaagtatttcactaagaaagatagaatcacaaaaaggaaagagaaaatgagaggagaaatcgatgaagctaatcttgctcctgaaacttcacttattaacaaag

SEQ ID NO: 40142 - DNA, 250 bp, Arabidopsis thaliana landsberg
cccgattacacagacggatctgcacggattccgaaacgctctttcgctccctgccaatgaaccagatatcggcttggattatcaagcgacagagcggctgtctacacccatgcagctcagagaatggacacctctgaaacacatatcgtttgtggaactgcaagatccagacctagactgctgtgccacttggccacttcatatagactttactagtgatcctatagagagttactccattgggaaccac

SEQ ID NO: 40143 - DNA, 930 bp, Arabidopsis thaliana landsberg
tagcacagacgttaatattaataaaaccaaaatgctacaacaccagctttctgcttgtttattaggtagtggagatgatgtttcagctgatatgcgatccgtctggcctggtggttgaaactacattgaaagaactacttcctgcagtgataaaatggggtaacaggctggatcatatcttgagaggtcttctctctcacactttgagctcagctcaggtatagactcaatacattatccatttttaaaattgtaagtgaggatagctcatattaagttattttcatttgcagcactgcccacctctttctggagttgaagggtcattggagtctcatctacgagtcttaggtgaacgggagcgatggaacattgatgtcctactacgaatgctcatggagttgcttccagctatacaccagaaggcaatgacaacatgtccgttttcttccatctcaaagtcagaggaatctgcattctctgtttccttgcttgagatctatgccgagtaagcttctcaaccccctcaatcactctgggcaacaaaaagttcttcaagtttctgacgtcttcttgtatgtaattttaatacgtcttatctgactggaaattctgaccaggggacgttctgagtggcctatgtttgagtggatgcatgttgattgctttgctaacttgttgcaactggcatgcatgttgccccagaaggaagaccatttgagaaatcggataacaaaggtatggtttgtgctgacaactgctctcttatcttgtattgatcttaggggtaattaattacactaatctttataaattctctgtggtggtaaccagtttctcttggctgtatctgaacgttttagaagttcctacctaactcacattgagttacctgtatttttggtggccgctggagatgatgaggctgat

SEQ ID NO: 40144 - DNA, 245 bp, Arabidopsis thaliana landsberg
ctctcttccacggaaggtataataaagctcatacataacaatgtatatcaaaataagctcttatgaactatatgtatatatgtaaggatttggatcatcaatggttttttttagctcgcttctgtaatgtcttttaatggatatgtttttagggagatatgggagcagagtaaggagagttttaaagaaaagaaattggatgtacacgcgaggctaatgcaaaggtacaaacaagttccagagtg

SEQ ID NO: 40145 - DNA, 457 bp, Arabidopsis thaliana landsberg
acttgccaggctaaacgtaccacatatatatgtcaaactatgctttgcaatgtggcccgtgcgcgcgcacgcgttccacgtacagcacttgagcacgtagctgttgacctcaacggctagatcaagcacgccctgtaggagaactctaggtgacggtcaatccattagccataatccaatgacacaagtagccaaatgtaccaggtgattaacaggcctgcacttacgaacgttcgttacctgtacagtcttgcttcctatcatgccggttatgccctcgcttgacaagagcttgagccgataggccgatgcgcttgtcgatgtgtcttggcagacgtgatctatttcagctattcacttcgtttgggactgctcgcagaaatgaaagcttgtcagcttcggctatcaaaccaatgcttttacggtaagatcggacacacacataacttacagcaat

SEQ ID NO: 40146 - DNA, 136 bp, Arabidopsis thaliana landsberg
acgcgcgcaccgtgccgacggccatactcttgcttctcctcggccattcgtgcggccggggcggcgaccgttgagttaatctcgcccgacgcggcgaattgatggcagtgggccagttaacaaagacagcgcgcct

SEQ ID NO: 40147 - DNA, 506 bp, Arabidopsis thaliana landsberg
atcctctgcgatttccatggagttatctcttctccgtccgacgacttatttgcttcttccgtcgttttcgaagcccagtctgcgattaaatgtttataagcctcttagactccgttgttcagtggccggtggaccaaccgtcggatcttcaaaaatcgaaggcggaggaggcaccaccatcacgacggattgtgtgattgtcggcggaggtattagtggtctttgcatcgctcaggcgcttgctactaagcatcctgatgctgctccgaatttaattgtgaccgaggctaaggatcgtgttggaggcaacattatcactcgtgaagagaatggttttctctgggaagaaggtcccaatagttttcaaccgtctgatcctatgctcactatggtggtaagttcttgaaacaatctgattcgttaatactgagaacaatgtatttgtgaattgtttgatttgtggatttagccttctctgtttatggttagagtaggtagatagtggt

SEQ ID NO: 40148 - DNA, 358 bp, Arabidopsis thaliana landsberg
atccctccggggcttgttgcccgcccggcaaagctgctgctgctgagatgagggtttcgccgacacgcgcaccggttcgggaggaacgtatctttcctgtcttgtgtcgccgatatcgatcaggcgatcgatcaccgtacgccgggcgtgatacggcgtcagcgtatggtctgattcggcagcaagccgtacaggccttctatgccggcaagccgggcgccgaccgggccgaaatggcgcgcgatttccttgaagctcatattgccgtacgaggtaaccaggagatcccgaatcctttgggcgtatagatcgagcttccatcgctccatgcgaggccgccacagcaccatggagggat

SEQ ID NO: 40149 - DNA, 343 bp, Arabidopsis thaliana landsberg
ctacatgcagtcgcttatcttcttataggaaattgagggatgcaagtggaacttctgttatgacctgtttgtgcctagattcccttgtctcggtgcattgggagtttttgattatggatattgcagatcttgaaatttacaagtagatagattgtgtaatgttttaattgcaaggattattgataaagaggaccaagtccacaattgaccatcaagaccaaattgggcacccacaccatccattgaggtggagttagtgaagggaaattcagagaattgactatcaatagggattggaacatgagaaagattcaacttagatgtttctgttctctcttttgcg

SEQ ID NO: 40150 - DNA, 342 bp, Arabidopsis thaliana landsberg
tgaagctatacaaatacaagtgcatttactgagtttgcatttctttgctaatattatagacgaagatagaaaaatagatcaatatatactagtatcacttccatatacaaaatcgttgaatattctatcgtatacatactctaacacagatcatatacacgccctctatattttgttgaagttttaaccctaaaatcgtataagaaaaaaaaagcgtgagacagccttaaacgcgtttgcgactcgcgtagcttttgcccacatagtgataataattactattgctctgatttttactcccaccactagagcttttaccgcgcagtaaatatgacaacgccc

SEQ ID NO: 40151 - DNA, 598 bp, Arabidopsis thaliana landsberg
  unsure (1)..(598): unsure at all n locations
gactttgtgataatcatatcacaattcatttcgcgaagaactcacattttattcccattcgaaacagattgataataggtatcattgaatacataatgtggttgagaaagttaaattggaatatatatatgataatgcaactcatatgataacaatgtcattaccgagaggaggaaagctttttggttttcaaaggatagccgggatgactatttactccgcttaagaaagagannnnnnnnnnnnnnnnnnnnnnnnnnnnnnnnnnnnnnnnnnggataagagaacgaaaacttggggctaatttaattcataatgttattcttggactatggcttaggtgagagtatataaacaacatttgacctaatttttgtattaaaagaaatgaaaagaaaaggtgattttggaagcaagagaaagaaaaatatattggttagggtttgctgttttgaaagtttgagctcatgactgttttttggaaggtatcttcttgacttagntgtctttagaattaaacgggaaagattatgtttgaacggttggtttgagacacatatgggatttagtatggatggtcatgactgaaattttcgat

SEQ ID NO: 40152 - DNA, 495 bp, Arabidopsis thaliana landsberg
gaaagagggagccggtccaccgctacatggcagattaaatgataccgatcaattactgaatccaagaccagactagaaaaagctagaacaagactggattgaactagtaaagagtaatgtttgtttttacctcaattttctgacatttaatttctcgatctttcttttgatgggagccacccatgccatatctactgcacaaacattccgcatgaacggacgtgtggtggaaatcagctcatggtacactacgtagttaggcatcattccgtcattgtcggcactcaatacagatgatggatgcacctagaatcaaccaaaaacgtcaatatgtcgatgatcatacgaaactggaaatgcttacatatctgagctactgatgtaatagaaaatctaacactgtaacagataaatgagacttggattgagaagtaatgcctggactagctgggactggaaactaagagtcccgtatccattgtgacgaagcattct

SEQ ID NO: 40153 - DNA, 199 bp, Arabidopsis thaliana landsberg
cgtcatcactgtatgacgtcctccttcgttgggggggggggggggggggacgtgtgataaatggacgtggaaatgacaggacacctagtgcaagcggcgttaaggtaaggttaaacgcatgataggttcgccgaaaaatgaaaggtgcaggtaggagcatgtgtagcgttaaaaagtaaggatgacgttaaggggtgaa

SEQ ID NO: 40154 - DNA, 468 bp, Arabidopsis thaliana landsberg
cgcaggccgcggacgcgggaaagactcgcttcgggagcggttgggcctgtctggtgaagaccgcgggcggtgaggtgcaggtgacgagcaccccgaaccaggactcgccctacatggaggggaacacgccccttctcggcctcgacgtctgggagcacgcctactacctcaagtaccagaaccgccgacccgactacatcgaggcatggtggaacacggtgaactgggacgcggtcgcggctcgattctgagacggaagagggaacaggaactgaggggggccgatatccgtaggggatgtcggccccgtccttttcccggggtccggatttggttaactgtaggatactccggaaagcggtcgtgaagtggacgtcattcccgcggacgcgggaatccagggtgaatgaacgagtgtcggcgcatttcaccctggttccccgcgttcgcggggatgacgatcctttc

SEQ ID NO: 40155 - DNA, 568 bp, Arabidopsis thaliana landsberg
cctaaaaaaaattacgatcatgcatgcatgtttggatgagccatccacatatgtaagattttacgaccaaagtttcattgtcaaatcagaatttttatcaaatcattctgaagtatgttatttaaatattcaaaagatgacaaagaagattatggaacaagtataaatggaaaataatatttggatgattggagcaacatggttacggaacgtgacaattggagaagaatacggatcgaaattggaccaatgatcacaccgaaaggttctttaaatttctccaaaattaaatttctttcgtatacttgaatgttttcttaagtcaaacatttgattactcacatttttcaagttcatgcatttaaattaacgtgctaatggcgagactaagaaagataagatttttaactactcgaatatacttttccggtaattacttaattaatattcaaggtcaattggaggatcatgatgccgaatgagtactaattgcattcatgttcaagggatcgaagttgatttgtgactcaaccctttgcttaaacctagaagagtggtgctatatgaa

SEQ ID NO: 40156 - DNA, 718 bp, Arabidopsis thaliana landsberg
gactattgttcaatcagatatatgcaaacaaaattccaagtgttattatgaaaggggaatcaagtaatcttgtcccaaaaatgacaaacgcacaatcacctatataccaaacgatttctgtgatttgaatgtttaagatgcctaaaacacattggactccaatgaacaaacatattattatgataccactaagctttaatagcttcaaaacttgttgacagcttcagacctagattctagacaggaaaaaccatgcttgaaagtccagaagtaaattttaatatgtacgcacctctgggcgggctgcggtaaaaggtggaattccagttaataattcaaacaagacaattccaacagaccaccaatccgcagcataacctgcaagcaacaccaataaggtaaatacaatttactggtgcttcatgaaagcctgatttaaaggttgtatccaaaccgtgttcagttccaagaagaatctctggtgccaagtagtcaggtgtcccaacagccgaatgccgaattctttcttcttcttggttcttctgaaaatgatgaggatttgttcttggggatacatctgactcatgaccagataaatcaattgtgttgtttataagaccaatctttgaaagcccaaagtctgttagctggtaccaaaaataataataagttaggttggtaaacaaagtacttcaacacccaaaagggaaacaatata

SEQ ID NO: 40157 - DNA, 931 bp, Arabidopsis thaliana landsberg
caacattcattttcatttgctctctaacctcaaacaaaatcggcctgtccatttaaaacacattcacatatcaataaagtttaatattcatttcttatctatacactttaaattaaatacacctttctctatttatctctaataacccatctctctctctctctatgactaaattcttttttcttcttttccacaaacataaaactgtttccatcttcatccatttcacttacttattaaattaattacttgtatataaaatatatccatactgataaacaacacttttgcccattctcaatctcttgctcctccacaaaccttgaccactcaccctcatggcacaaaaatcaattttcacaatgctccaaaaactgctattactaaactttattctcatttctaggttaaaaccaccaagacgcgtgttcaaaagaaagcagtatcaatccaaggtcaggaaactgaagtccctgcccgtgaagcagaacctgcatcaactaagaaacagaagaatggacagaaaccaaaaaggttgttcttttgccaatctttatttcttctttctctgtctcttcttttcgggtttacttaaattgaaaacctttgctcttgtatcaggagactccaacctgcttcttctgtgttattaacaagagaaataaacaccttggaaatagaggatgatatcgccgagccaaaggtatgaccgaactagacacaaagaagcaaacttcgacaatgttggtaaaaagtttatagatcgaaatcatgtgattaagttgtcaacttcacttgcaggtgaacagaggtggaaagaagacgacagtgtcacaaccgagaagccagggagtgcactttcttccgctctcacaacaatcttatctctacattatcaacaaactgcataacatatatataccttcttgct

SEQ ID NO: 40158 - DNA, 662 bp, Arabidopsis thaliana landsberg
ttttccccaccgtttttttttatagctgccactgaaggcgacgtcgcaaaacctgatttgaagaaagttgattatatcagaaaagtcaacaccggacaaataatattggatatgaagaaatccaacctaggccaacagtagagaaaccataagtttagtcaaattccaaagaaagctccaacaactaaagaagttaaaaaaggattttgactatctcttctctctaccttcaaagatatgtgaaaaacgacccaaagccaaagttacactcctatgtctaaagaattcgtttgccgaaagtgatccgcttaatatgatctaaaattatttacaatagagagtgttgaattgatttaataggatattgcaaatgatgatgaaaatgaggtggattaaattgtgttaaaaaacaatagttggttttgatttgctttttttttttggtatcaggaattcaatctctggatttcatcgtcaatgtattatgatcctcaattgaaaaatggcaaaagattttatttaatacaatatttttgcgttctctcttctaattcatttcatgggtttcatgtagagactgtttccaatttatttatttgtgtgctggaatactctatgattttgatttatttttagtttggaacatattgtttctatctcat

SEQ ID NO: 40159 - DNA, 456 bp, Arabidopsis thaliana landsberg
cacggtgggcgcttgtgtactttttgtttatgttgtttctcctcaaaaatcagtgttggcctaaaaagtatttgtatccttaaatttacttttggaatttcttttcgtgcaatgacttgaatgatcaattagtgaaaatcctaactagctcctttgtgtgtatttgtatcatttgttttgctaaatatctcttttaaagtcatatatattctccctataagaacttcgatatcaaaaagcctaaagaacaaaaactaacttcaaaacatggtcacgactaaggatgttacaaacctaagaaaccatagagagctctcatcaatacgagctagaagctactattactctattacacaacacaagagtatacatagcaaaaaatatgggaccaacataattcattacataactatcaggatttatcatcatgctcaaaatcttgttcaccgatccggg

SEQ ID NO: 40160 - DNA, 430 bp, Arabidopsis thaliana landsberg
tctggtcttgtctccatgaccagattttatttaaagaactgaacaattcaaagagggacggagagatgcagtgaacaccgcactgtccaaaacagggcagtgcttgagagtacactgctaaggtgtacggcaacaccatgaaaatctaaacaaatttggagtcagtcgctggcaaactaaaacactctctctctctcctttccaggtaataataacactcgagataggtagtgcagagttgagagtaacggataaagtgagagcgagagcatgagtaaagtaaaaagcacaggcaaacaggaaagcaagagcaacagcaactgcagcagcagcacacctgaagcgaatgtgaacaggatgcattgatcactttcacttaacggccgacaaatgcaaaaacactcttaccatttaccattcacacctacac

SEQ ID NO: 40161 - DNA, 619 bp, Arabidopsis thaliana landsberg
gctcttttcttttatacgatttagatagttgtattcaaacattatgccaatgatcgttctaatcgtttatgtttacagggccgaaccaattgaaaatgaccccgaagatctgttattatatttgctctggaggttgtggtacagacaaaagatgtgaccatcgctgtaagaaatgttgtggttggtcttagacttgtggaacttttgttagatttttaatcttttgatctagttgtttattgtttttgatgtttttcatgttaggatgtaatttgacaataaaagatttaatataaacatattaagaaataataaggaaaccagtttcttggaaaaatgtgatgtacaggagaactgcttgtatcaaaaactattttcatgtgacattttttaacccaagctctaatctttacattttatcaacctacaaaaaaaaaaaattgattataatgcatcatttttttgattaactattttctgtaactacaagtaattcacttatttttctttaaatttacagttcatcatcattaactaatagaatgcatctaaaaactaaatttttttttatctttttgaagcaatgtttttttaaaaactttgttttattagcaacatg

SEQ ID NO: 40162 - DNA, 466 bp, Arabidopsis thaliana landsberg
ttttctcaaaaatgcttgatcaaagttataaaaaccagaccacaaatttataacattataatcttaagaaagaccataaacattttttttttttctgaatttaagatacatatggggtctgggttagatacggacgtacatgtgctggtgctgctgtgagatgagactcatgagagtgacaggagaagataaaaacgtaacgtgaaactgaaagaacaaacactatgtaacgccaaagtcaataggttcttcttccatattcaaccattgggagattcaaacctggttccaaagctcacatcacatggcctagtggtgaatccaatttcctcttccattcgctgtatactatttatttcttgtattggcacacacacatgcatgtaccaatacatgcaagaaacactttacaaaaaaaaactctaatgggttttcctataaaaatacaagtgtagagattgaacaa

SEQ ID NO: 40163 - DNA, 654 bp, Arabidopsis thaliana landsberg
ttaaattgtatactagtataaatatttaatatcaactatttatgaacaactatatattaaaatctgtcgcatgctaatgtaaaataaaaaggttatatttttctatttaacgtcagttcacgtatcgtcacagaaaaagaaatgtgatataatgaatctcttgtagagatatatgttcactggtgtgaattttttgtactcacgcatttttattctccgagatcttgcattattatatatgtacatgtgaaaataatttaaagttattagaaaagaaaatatgttacgttttgatttggtttccgattatacatttttttttttgaattgtctaattttgaagatgaatgtttatatagaaaaaaatgaaatctaacgatttgactaaaaagtggtattaaaattgaattttcaaaaaattagtagatgagagaaattagaaaaagactttggagccaaccaatctccatagtaatcataacatgctattttatagaagtaatttgataaatttatttagaatatatgaactaggccaattatttaattaatttggtctggatgattgagccagccttgcataattacccatctttgttttctatccacaaagtagacgcgttttcaaaaacgcaaagtcgtcgaaccaaaagt

SEQ ID NO: 40164 - DNA, 500 bp, Arabidopsis thaliana landsberg
tcagataaggatcagcaaactaaattggatcgggccgattgtgaatcagactctaatactatattagatataatcctccaactcaacatcaattgtttatgagtagatgaactcatatctcttatatattgtcatgatatttgctcaacttctcatgtagaatattgttatccctaatacatatagtaaacttttttttgactttctgattaattaccaaactttcgttgacttcattattttggttatgccattgatttgatggaacaaacaactgattatcgactagtccattataaacatcgtggtggtggttgatgaagggatggtggtgaaggatgaagggattttggtggtttagggaattggggaaactctagtttttttatatgggaattttagtttaatatatataactgtttttaaataatcaatagaacgtcttaactcaatcgataatatatcaattgatttatttaggggtgttaaaatgagttaaa

SEQ ID NO: 40165 - DNA, 600 bp, Arabidopsis thaliana landsberg
aaaatggtcagaaatctcatatgttttattcccgtaagtattggagattttatgattctctaattacgactgtaagaaattaggggaaatccattttgttaccaaaatctcttatcatgtttcaattactttaaatgcatgaatacatgccaaagattttgttattaacaacacaaacacttgattatatatctccttggtataatatacagaacagacacaatcttaggctcctccttctctcgctctcttccctctgttgctcggaaagctttggcctttttggttttcttatggctaattctcttctcaaaactattcgtatctgagagagattgagataataaatatagagagagatccaaaccagaagcaatctttttttgtttgtctctctgtgaagattcgtatcatttttctccggcacactaacggcggcgatccactcttctctatagcttctattatgtcggttttatcttcttctctggaagaaatgaacaagtttggctttttcgctttcatgaatgtgatccggtctatattagggttggttatataatcaaaatccagttttcgattttggctccactttttggc

SEQ ID NO: 40166 - DNA, 399 bp, Arabidopsis thaliana landsberg
tcgggccttgaggcgcgccgcgatcgcggccacgcgcgcggcgtactgcttcaccttttccagatcgccgacggacatctcgtcgacaccggcatccgacggcgactgcaacagcgcaccgagcgagccgcccagattgttgacgtcgctgcgggtcgcggccttgctgttggccggcagcatgccgaggctgacccagatgccgccgtgctgcgacgccagcgtctgcagatagatcaacgagacttgcttgtcgccgttgaggctggcgctgttggtgaagccgccgaacaccttgtcattccaggcacgcgtgaaccacttcttcgaagtggcgtcggcgaacttcttaaattgccaggcaaccgagcccatataggtcggcgagccgaacacgat

SEQ ID NO: 40167 - DNA, 566 bp, Arabidopsis thaliana landsberg
gtatctttaatctcaacgttgtttcttaagtagctgttgacacaatcccactgcaaaacataaaacaacatatcgctcatgtatagattaccaaaagaaaggcaaggaaatgcttatttgttttgggttatgaaaggtaattgaagaggttcacagtaaccataccagtaacgtgctgcacatttcaattgtgtaaactgttaacttctttaatccaggtgaggtttgcagtagccttgctataccaggaaagtgcagtgtgcctcagagtctctcaatctcaaataatgaatatgtggcgccacgatctgcatagactgcattggttctcgaaaacaggatctgcgttctatctccaatcttgtcaagcgcagtgatttagtcagatcaagatacttgagtgactcacaaatgttcaaactcaagctttcgaggattggacaaccagacagaatcttaagaaaggatatatccgagagtttacaccgggtcaaagacaagtcccttagtgaggtccaagacacaatgcaactgaaagtcaaactagcagatctcaactcgactcg

SEQ ID NO: 40168 - DNA, 516 bp, Arabidopsis thaliana landsberg
  unsure (1)..(516): unsure at all n locations
cctgtacttctgtaggctcctgcgcatccatgcgcccgcctacataccgtgcatcctgtacataaaaattgccgccggggaacggcggctttttcacatcggaaaacctatttcttcaactcgccatgcacgctgggcgtatagaggtcgctcgtctgcgcgccgaagaactgcgccagctcatggatttcctgcgggctcaggccggcggcctgaccgttcatgatggcgttcttgcgcgtgcctgccttgtactcggtaagggcgtgctcgagatagttggggtactggccggccagcaccggatacatctcgttggtgctgtggccattctggccgtggcaagcgaagcaggtcacagccttttcaggttgcgccacatcgccgtcggcccagactgcggtggaagcgaggcccaacagggcgatcattgcaatgtgtttcatcaaggtcaccttacttgtgggccgnggagtgctcaaaatacgaggcgatatcctcgatatcctgatcgct

SEQ ID NO: 40169 - DNA, 324 bp, Arabidopsis thaliana landsberg
catcagaactttatgaaaataaattgaataaatcatcagaagcatatcctaagatgaagtaaaaataatttatagttaagataaaaaaaaaagcaaagaaataatagaggaaataatttgttatatattaaaataaaataaagcagtaataatgttgcctttgcgtgagcttgacaaaagtcaacctgagaatgcctttgtcttgctgcgtggaatacaagagacatccatcatcatcattttccagctcgaacaaatgattctctccatctatttctcttctttttattttattataactattagtattttctttcattcgca

SEQ ID NO: 40170 - DNA, 571 bp, Arabidopsis thaliana landsberg
  unsure (1)..(571): unsure at all n locations
ctgcaatggtaagccttgtgcgactgagggttttgatccctctccggtgcgatcgacgttttgtcggtttccggggcccccgccgtgacggcgggggcttttttgtggccgatgcttttccaaaggttggtactgggcagggcgccgcgacacgttgtttattattattaacttaaattatttatttatataattataaaaaatgacgatgaatttcttgaactcgagtgtggcattcagggtcattagcagcattaacggaannnnnnnnnnnnnnnnnnnnncgtaaagtcgccacgacgctgtccgcgagtctcgccgtctcactcctgctggccgcctgcgcgacgcaggagcccattgattctcgcccggacatttccgcccctgccgaggccgctgcgccgcagccggcagccgcaacgcctgcggcggcatcgcccnnnnnnnnnnnnnnnnnnnnnnnnnnnnnnnnnnnnnnnnnnnnnnnnnnnnnnnnnnnnnnnnnctttggcggcgccagcgaaggaatcggcaaggcgatcgaaaaagcatttagcgattacgggcg

SEQ ID NO: 40171 - DNA, 915 bp, Arabidopsis thaliana landsberg
  unsure (1)..(915): unsure at all n locations
ctacttttgatcttgccatacgaagtgcttgttgaacttgtgactcggcatgaggtatgtttgaactacattgtattggcatcattttctttgtatattctggttggatatgttgcatagggtttaatgtcagcgtattatcttatagtttaatagcagaaggttacataatatctattaagtcaataagaaaaatgtatgtgcttggattttttggctttgacttttttttcttcttgcaggatcttcctcaggttttattgtacaaagtacagtttctcagagatacacttctaaaaccagctcttataaatgctgatctaaaaattatctctggcctggcatgcttgatgtctgaaatcggacaagctgtgagtactagactacttgttccactttatcccctcatggatgtacatccaatgctgtgacgttattactctttacttacgttatttgttgctctttgtgaggctcatgtcggtttgcaatatgttgcaggcaccatgcttgatagttgaagctagttctgaagcgcttattttgactgatgcgattttgaggtgaatcttgggccttgattgcttgtgtgcgtttatatttagtgtgtatttttccatataaatttgcaacatatagcatactaacctaaattcctttttgcaaacagtagattcttctcggtttatatttgcacttaaaaaaatgttgttttcaattttcttttcacatgaaaacgcaaaactcaaaacttggcgtttgaaataattagggccttaatcatatgacacagtctaagtattcacacgttggtgcaatattaagctgattcgctcaatttctttttcctcaatgcgtttatttttttctccaaacacgactttttcgtaggtgggcattaatatctnttacaca

SEQ ID NO: 40172 - DNA, 564 bp, Arabidopsis thaliana landsberg
cgatatctgcttttgggtgattgtttttatcgggatgaaccttcaaagctgaacataaataaagcatgttattagctcagatttataccataacaaaaaaattatagctaatcaaaagtcaaatttgaatatttgataacgtaacatgaaatagaatcagacctaatttgtgatatcgtttacgtatgaccttcacctctgcatcttcctgaatctgttattttgttcataatgttctctttttctttatttttctaacttgaataaaacgcaataaaaagttcgtccaatcttatttagataaattgagaaaaaagaaagaaaagaaagaacatatacatacaccgagaatgagataccagtcgatgaaacatgaaccggatgagatgcgattgatgtgaatgcaagagattggtgatctcgatagcgctaaaatatctgagaccaatgccgcttttggatccggtccgggtcggatcttacccatcgcaacaaaagtttcaggacaatggaggtgaaggcaaaacaaaatatggcaggagtgagttgacagaaagagagaga

SEQ ID NO: 40173 - DNA, 484 bp, Arabidopsis thaliana landsberg
gtaatttgtgaatgcacctaaagaaacttagaaaaggacagtttcctttgttatccagaaacctactcctttggggttctactgtttctaccaattttgtgatgttggtttggctttcttaggtttggtgggagtttgaagcttctggcattttagtctgtgaaagatgatgcccgtgactgccatgcaaatttttgtttatgcactttcatgcatcagtaattatgtttggtctattcccatttatattctccgattaccaataaatccagtactgtatcccaaaagcgtttttctcgcttgaataattgtgtttctatgtgggtaaggtcataaggtagctgaaaaggatcacttagacaatctagccactaaagcaatttatgtgtgaattactaagttatactattaattacaaataaatgtgtaaaagataggaaaaaaaaaaaccgtatagtccattttttaaccatagagattaagt

SEQ ID NO: 40174 - DNA, 508 bp, Arabidopsis thaliana landsberg
tagagaaattgagagagttaaagaggcatgttctttattaaacacgaaatggataagagaagctggggggaccacaatggtctctccgagaagatgcttgaagttgtctctaaaagcacgcatgaaatccgcatagcattgcacaggtgttctacctttgagaacagggagtgtatcagcgccaagtgatatatactcatgggtccttcttccccactgatcagtgtatgcaaggtctggatccttgtcaacctcttcaacaacccactgaggcagaggaatactggaaaaaaataaaaaaaattccatattagaacatacaaaatctcattagtgaatgataagacaatgacatcttcactcctatatgaagtaactctatattcaaaacaaacaaataactcattagtcaatctaaaagaaacgtctttatacagaatccatcttttgtaatcaatcttgaaagagacataaagggcctcaaagttaagagtttcgtaaggggaaa

SEQ ID NO: 40175 - DNA, 828 bp, Arabidopsis thaliana landsberg
ggattccgctaaagtggtaaaagagagatcagttcctggggagggcctttgttcagcttgttctcacttgacctagaggaccagtcaagacattatagcttgaaagtttcatcattgacatagcaaattctctgcggaacaacaacggatcagaagcatatgccctcacccacatctcagtcacttcactacccattagttgctggtcagaagacatcaaccctctattctgcattagtcttcggaagtagcgtgttccaaaattttcatcaccaccttcattgttgtagctcaagtcgatcacttcatcattcctgtttcctgagctcataccgtagctgttttcggaatctgatgcaggtaaggacggtggtaaaccaatgtcaggggaagcagatggagatgaagccgagacagagaaggggcatttcgttttcagttcttggaggaaccctggattgagttcaggatcaggcttcccggttgctgagaagttgtagaggcggttcttaaaaaatgtgcaatgcgtgataccaatgctgtgtgctcctgcattaagatcattcagaagaaaagaatcatgtcacaaagagagccattccaaagaagtgagtcataccccaataccgaaagatttagctaagcaaagagagatgctgacatcgaaaagtgagaaattaccgaataagctcacggtttctctctcgttgaatcctctgaaagaaaaacgttgaagaatcatcgaaagagtagcgtctggaacaggaagctcgtgttctgcaaaatccctgtaggctgctgcactatccttccttccagtttcgagag

SEQ ID NO: 40176 - DNA, 616 bp, Arabidopsis thaliana landsberg
tttaaacaaattcacaacaaaacgacctatttgtcaaattcctcaagaaacaggttttaagagttaaagagggaccacgtttggacccgacccgatacaggacccggtcctcaaagcctaaattaagaaaactagtgggcgttttattaaatgggcttaatatgggccttaatgaatgaactctagatttgcattgtaacacgtagtcgcacacgtgccattgactacaggctctaggctgtccacgtgtcatttcatgcacatgtctctctcctgcagatactttctcaccaaggattttgacggaaacgaattccaaacacttcaccagcttttgatcaagcgaacagagaatgtcgtctgtcttgcggttgttggggcggagaatctgtaatccagcggcggagaaagtgcgtttgagcagtagcctaagcggtggtggagattttccaatcttaaatggacataaagcggctcaagacttatccaaagatactctaaaatcccaagacataacgaaagagaaagaaggtatgaataaagctaaaataaaatctgaataactacttcttaaaagagcagttttttcaaatatatccgctgatttcacaggcca

SEQ ID NO: 40177 - DNA, 424 bp, Arabidopsis thaliana landsberg
ggaaattggtcgcgcgcaaccgccactgagcatccacatgtgtttcggcacgaccagcggtttggcgtgttcgtcgatctgtgcatcgtcgagcaaggcgagatcacggcgtgcgaacagcgccgacggccgccatgcggcgccggcgacgaacagttcagcgagcccgagcaacaggccacgcatgccgccgccgttgccgtcgagcgacagcgcaacggcgtccttgccggcaagcgtctgccgcgccatgttggcgacgatgcctttcgggccgagttcgacgaacagccggcagccggaggcatgcatcgcgtcgatttcggcgacgaattcgaccgggctcagcatgtgctggtcgagcagcgcgcggatcgccgacgcggtggccggataacgctgcgcggtctggttggaatagacc

SEQ ID NO: 40178 - DNA, 212 bp, Arabidopsis thaliana landsberg
ccggtcagctgacgggcgatcagtcgatcgactaatggcgacctgcgggtcgccttttcgtttgaggctttcttcgcaataccttcgtggtcacacagcgaattcgtcccatcccgcatcggcaggcgcaatgaccggcgcaacggccggcaggcttcggtttgaaaccggagtccccgtcgctggccgcatcgcggtgaagccatccgcat

SEQ ID NO: 40179 - DNA, 818 bp, Arabidopsis thaliana landsberg
aattcatatatatattcatgaacatcataaacttaattaagctttaggtctcgagagaaagcacacgtaaacattttggtctcatcgcataaaaatgtactgtgttcatacaatgccaatacatgcagaggttgtgaatttttttctttaaaagttgcaaacttgatatattcgaatatttattattttaatatatagggaaaatgtatatcgatgattcgattcagttggcaatgtatgagcacggccacgatatgtcgatatggagcatgaatctacctgtttccacctgacgaaaattattttaaagccattaaaaatagaaaaacaagttagtcgtgtgttgaactattgtttaaaacatgttatatgttataacatttgcgtatctccgtaaccatacatctgtttacaatgcttgcatacgatatatagattcttaagaagaagaaaaaaaagattcgtaagaatccaatattgaataaacatattaaaagtaatattgcaactaatgttttaggggatcggagacaggagagcaagtggataaagaggttatatatttctgcaaacctagaaaaattattgtgcaaaaatatatggttcatcgtttgtggctatctattaccatttttttgttcgcaactataccttttcacaaaatcatgagacgacacaacctacaaccaaaataaactaaatagagcgagaaatagtaacttcatttttccccaagaattgccgagagaagaaataaactaaataaaaagtagagaatctaattgcaaaaaaaaaaattgacaagaaaaggatatatg

SEQ ID NO: 40180 - DNA, 1406 bp, Arabidopsis thaliana landsberg
gcctatgtttatttggaggccaccctgatacttgcatgattcttcaactttcccgctttgatctacctctgccctatgtaagagatcgacgtgtgatttgccattttcttgcatgggaccatcacaaggtcgatgtgggtcagggtgaacgatgtgagatctaggagtctcataaacttgtgttctcccttaaacgtcttttagcttgatccattccgctacatgctatgttgcttctcccctttattctcaaatgtaatccaaattttattcttttgtaaggggaggattataaattatgaatttaaactatatattgtatatctatctattgaaacccataattacaaaaaaaaactaaaaaaagttttctagtgccgaaattcgatcccggaaacttttcaaatccggaaagccatcaatcaattaaaccggagaaacaacaatcgagataaattaaatccttgtgttacagcggatcttttgataagcaatgaatttacactgtatatatatatttacacaaataacaacagataaattaaaaaagtttccgctgccaggattcaaacctagaaagcgatcaatcgattaaactagagaaacagcaatcaagatgaattaaacccttgtactacaacggatgtttttgataagcaatgaatttacactgtatatatttttacacaaataattacatatttctttttaaaaaagttttcttatgccacagatcgaatatgagagacgaattcttttgataggcaatgaatttggtttgtggatttcaaatttaggaaagttatcaatcaagatgaatttaaccattgtgctatagtgaaactattgttaaactaggaatttacactatattagggaaagactaacatgaccgaataaatgaaacacaaaagacgactaacattaacgaataaatgaaacacaaaaaaacgagtttaattaggaattgaagttcagttcaaaattagaaagatttgtatcacgaaagttcaacatagcaaaacaatagatgagatcgaaccatgtgacataacgaggtttaattaagcacaatcctagattctattccttagcccaccaaataacaactaattaagtttcatgacactgttttatgttaaacttctatggaaacagtgtcaagtaaatcaattgatggcattcgtagattctattcaagtcaatcacctaattatgttaaactctatctgaaaataagattatgtaataggcttactaatcatcctagcatcgcctcatggctaaataatggaaaacttattagatttatgttaagtaaattcataacggccataacccttcttttggacatggaaaagcctaaatgaactgtatgatcaaacttaatctttgtggagaatgat

SEQ ID NO: 40181 - DNA, 296 bp, Arabidopsis thaliana landsberg
tagtcgtttttgctaaaatctaggttattacataacttagcaaacgataacataattgatgtaatcctagttcaattatatttctgtaaaaaaaaattcatacataactttttccaacaaatatgaactaaactatcgataccataaaaagtaaccccacatgtgtttggtaccaaaagatgctgcgtagatatgagtgcgagactgagcttgacacacaaattttatgaaaaacaaacacacacacacactcattatataaatatgtgtatgcgtgtgttgataatgagagagga

SEQ ID NO: 40182 - DNA, 516 bp, Arabidopsis thaliana landsberg
aaataacacaagggcacaaccatccatccaataacacaatcacaatatttgtttcccaacatttatgcaaccttatttttagtggacactaaccatagaagaacaaatgtcagttgtagtgttacaaagtccattaaaattacgcgttatcaattacaaaaccacatctgttttttttttttttaaacactttaaattttgtgtcagataaaatgaatatatgttatgacagcaatcactttcaaaaggcctatcaaatgggtcccaaatgtataatcctaatgtcaatcacaagtaacctaagttcggcccaaatacctgatggtccactttacaatttttcattaaataaatattaagtaaataaaataacagtaaaaaaaaagagttattcagtctgaagaacattaaattaaggttattaacgtcaaagaaaagataatcattttctctggtggcggcgttttaaaaacatagatttgaaatttttaactttattctataaaactaaaaagc

SEQ ID NO: 40183 - DNA, 251 bp, Arabidopsis thaliana landsberg
aatgtattaacctatgctatattatttttaactcagttgacaaaacggccattgggggcgcgtgattaacacttaggattcctatcaagaatacgaacaggagggtgattatgtcttgagcagtaaaaatgtatcggattgaacgttggaaagggaggaaaaaatgactaaaaggattggcatgaggaaaagatagagaaggcgaacacatcaagtgatcgatacttatgattagaccacacattaataat

SEQ ID NO: 40184 - DNA, 349 bp, Arabidopsis thaliana landsberg
  unsure (1)..(349): unsure at all n locations
cagatgatgtgacagnnnnnnnnnnnnnnnnnnnnnnnnnnnnnnnnnnnnnnnnnnnnnnnnnnnnnnnnnnnnnnnntatactgcgcagtacaacgcctttgatagttgaccttagaatataacggatacctttgcacgtatctttgcaagcctgtacccttaaatggctagattatctgttcctggaacaaggatgctataaggaaaaacatggatgtggcactgctcgttagacatatacagagagtttgtaatgcgtggagaggcacatatattttcatatcctctagacacaaggcagacgagcttgcaatctaagatcttgaatcaaacacatgacatcctt

SEQ ID NO: 40185 - DNA, 325 bp, Arabidopsis thaliana landsberg
tagtatttggatgcaccggttaacttcatcatcacgtccaatgagaggagggagttttccttgtctagccatctcggttaaatcacttccatatgtttcaagtgcttcatgcttagcatcagtctacatatagaaaaaacaccatataagaaactaagataatcactaacctagtcaaaagaaaaaaacgtatgatgattaattaatgacataatgaatcaaaatcaaccacgaacctgatttgctttatccgagaagcggcgcaaagacgggaattggagagaaagaggtaagagttgtccacgagaacgagaagtggcttgag

SEQ ID NO: 40186 - DNA, 601 bp, Arabidopsis thaliana landsberg
  unsure (1)..(601): unsure at all n locations
ttattggatgacaaactagaattattattctggtgtattaaaggtactcatatgtctcattgaataatttacttttaagattttaaatatacatattttcatataacttgagaattactcgagtcatatcattgtggtacagtggtaccgtacgagtagtaaaggtatagctcctaaaatttcaaatttgaattgtggtttaagtataatcgaatacaatgcaaattgcaaagttgtattagtttgaagttaagcattagagattccagaatatagttaaaagtgtaaagagggattttaaattaaatgacggaaacaaaaagtactttagttactttgtacctgaaggttgatgtagtcatgtaacacaaattttgcatacattaaagtgtaaaactaattcaaagaaattgactaatttcatccacaaatttctttctcgattaggctttttggatattgaaaagataaaaccaaataatcttgaagtgtagaaagattgactcgattttcagatcggtttggttttggtttatgcanatttttaaccgttcaactggattcattacatcagatcaccacagcaacaaacacaaatttg

SEQ ID NO: 40187 - DNA, 520 bp, Arabidopsis thaliana landsberg
tattaaactcttgctatgcagataatgaaaagggaacaatctcagctatcactttaagcacatgaatgcgttgaagggatccccgaactgtgtaaaatggttggtggagttcaggcactcggtgagtatgtccactcattaggttctaaagatggcatttaaaaggaaactcggtgaactaatacactatcaactcgtaaaaacagtttcacagtgtgaagatctaaagcagaagtacagtgaagagcaagcaaaacgaaaggagctgtacaaccatatacaggagacgaaaggcaatgaattttaactttcagattgatttgctttagcttctttacatcatactttaataatttactgatagcattcgtatatcaggcaatattagggtcttttgtcgctgccgccctttgaatacggaggagacatcaaccaagtctgccacaattgttgactttgatggagcaaaagatggagagcttggtgttattacaggaaataattccaagaaaagtttcaa

SEQ ID NO: 40188 - DNA, 643 bp, Arabidopsis thaliana landsberg
gataaaaaaaagggaagacgaagcaaaactcttttgtatgtttcttctcattagcaaaggctggggtaaaacttagaagttgacttgaaagccactgcgtctgcgatgacctgcaccgccttttgatctgtttgagtttctttcatattggtatcgcatccccaaacccttaccgcaagcctacgacatttgggtgatgattctctgaaataggttttgtaccaactgatcacatctttcttctgtatacttcttagttcttctgcttctttgtgggagaaatcaaacatgtacctgtgagagagttaactccattttcattcgccagtgaccgttgtggatatggatccaagtaaatcattgaaagttctatagatactacaggtcacataacttcaaacccttgagatccttaccttttgtcaacaatctgactccataagtcatttgtctcggacaagagagagggatcgttttccagcaatctagcaatcataccacttcggtaatcttcataggattcatcatcagttgtcctgcaattacagtcggattacatatgtggagcgaggtaagatttacaagacaatcaatatatctttttgattcagcctgtcagaagccttcgatacgtttatgaaat

SEQ ID NO: 40189 - DNA, 679 bp, Arabidopsis thaliana landsberg
cccagcccattcagcaggcaaccttgaaggatcatctcccttctgcaacgactcaagcttctccataaccaattggcactttccagtcacagggtaaggctctctccaatcaggctcttgctcagcttcatgaattttatcagccatttcaacccatttcggatccgacaactcaagcccgtagatcttgtacttcaacttcccctttcgtttaggaagggagatactcctagattcaacttcatcagaaggaacaaacccttcttcttctacttctccatccacagtttcagattccctaatcgaattatccaaatcacgttgctgttccaaactctcataaaactcagcgtcgtccattttctctcttgcccatttaaatctaagttctctaagcaaatcaccacgaataccaatctctccagcaaacctacacatctccatcacttcaggagattgaacgtattgcttcatcttctccttcttcctctctttctccatatctttcaacactgtattactaacttcccagatagtagcccatagatcatcgctaaactccgatgacggtgaaggtggagctgatccaactttattgaatccacctctttcgatttcttgcacgactttctcaacaataagcagaagcataccatcaatcatcttcttgtcacaatct

SEQ ID NO: 40190 - DNA, 827 bp, Arabidopsis thaliana landsberg
  unsure (1)..(827): unsure at all n locations
cacatagacatgattctataaatatatattaacataacatcattatcccttaaaacttagattaaacctataaatgcaactacgtagttcaacaatgtaaaaaaccctacgtgaatcgctgtagttctcatacgatcacttattgcgggtttagacgtatatattttgcaattagtactagatttaaatactttcccaagtatccagttgaaattaatttaccgagaccaagccatacagtatatgatactatatgtatgttataaacttaaaataagcttattttacgacacgtatgcatattaatatattatgaatactctcaaatatatataatattattggatttgataggttaaacttaaacattaatgtgggacattattcaacggatcgtagacactgtgacgaatatcgtttctttgacggctagggtggaccatcacagttttagacttttagtttcatgaacatattatctaaagttgacaattttctaaaaatctatatatgagtgtgtaccgcaaaagaagcaattcagcaaaaatattaaaatgtctcgcataaaccattagaagttacttttttctgtcaaattattaaaattttcttgacaaaattttatagttacatgcaacagcattttaatattttatatgcgagacattttacaaatgtttgtatctaagactatgaactggttaaacatatatactttttttttttaaacatatatactttctttagactatattgagttttcatttacgaagttgagttttttcatgggatgaacttatttatggntttaaaaggcattctgagta

SEQ ID NO: 40191 - DNA, 551 bp, Arabidopsis thaliana landsberg
taacttgttttataagaaaatcataagttcaatgagttaggtcatcaaccccacttccgaactcatgtttttgacacgtgtaaccaaccaactttgcactcatagatttagtattttcctaacaagtcttaaaaaggaagacaattttgcaaagactaattatgaagtgagaaaattcgctattatcctctaattaaaagtttaacttcgcagataaattatagttatttgttgagataataacatgacaccagatttcacgtgcatcaaagctggatgaacaaatgaacaagaagtgtatgtgagatttcttccaagtaaaaggcataccaaagacaatatagaacaataaaagtcagattatataaatctactttaagattcgaacttatcagaaaaaatccattaccaccagctttatgaaccctttagctataatatttggatatataataaattaataatgtgtaaatgtggttagaaagagaccaagttcacttgccttgttcatgtgggcacgtatgtttaaaaagctttcattgagatactat

SEQ ID NO: 40192 - DNA, 250 bp, Arabidopsis thaliana landsberg
agaagtcccgtgctgggattcaatttccccaacaccctgggcctgccctccagttttttgtttctcaccagtattgtattcctggggagcccatccaacaccgggatactaataaggaccaacatgagtgtcagggcacatggagtagaagaatcataagaatgacaatcctcatctaaagatactggaaaatttaattaaatgatcaatgtgtgatcaccaatacaaacgagggaaactggatcaaaac

SEQ ID NO: 40193 - DNA, 764 bp, Arabidopsis thaliana landsberg
actctgattcgaaagtttggaattcttttccatctggtttattacatacgtttgatattctttcgaggtaggaggttccatagaaatgatgttacaactcgcttaatgttagacatcatagataatcactatagttatgggtgaggagtagagcaacgtaacacctaagtctcccaacttttaaagacacccatcttatctgaaattaaacaaacaaaactcaaaaggaacattatcacatcgttcgaaaaaccataacattcttaagagataaaaaaaaaaaaaaagatatgaacagttggaaaaatcataacattctcaagataaataatacatgaagtggtacataatatgaagccaacatgtgagtatgtatgaagactccaacaccaaccatgaaattttgaacctgagtaagatgttgcttcttgaagaggttcatgtctctatgtgatgtgagaaaaagcactagaatcacgagtccatcctattcattgcagaccatatagattaacataacagctagagctttaagaatttagccactttctgaaagtgactccaacatttataaattacaatgatttgaagaggtcggtagaacctcgattgttttttgtttctcaaagttattttggtttgatatagcctgtaggccatgttgaggaaatccacgacgcccaagagtaaaagaagttctcacgaccttataacccctaaaccctatcaagtacttcatctgccttattagctagccattacac

SEQ ID NO: 40194 - DNA, 432 bp, Arabidopsis thaliana landsberg
cgtaattgttattgtttttttgatgtatggaaacttttttagcaagaaagcttggaataatttcggctgggttttttccttcactctcaaaaggcccaaaaaaaaaaatattctctctggaaaagacgataaatcaaaataccttctttgtcttactaattgatagttacttttctgttcaatatctttttaattaagtaatgaaaatggcaatatataacttttgtcgtgctaattatttcaatttgttttagattatttagcctttttgattaattctgaatttggtaatactaaaatgaaaatttgaaacacatataaaagaaaaatgaacaacgctaaacttttaaatctccatattttaatattttttttatttaaaaaatatctggctttaatcttattttttctaattaatgtgataagatgcta

SEQ ID NO: 40195 - DNA, 739 bp, Arabidopsis thaliana landsberg
  unsure (1)..(739): unsure at all n locations
actgaaacataccagcagattttagagcagagcatgtgacaagtgaaatctaagcatgagcttattaataaacattcattggactgtattctaagaacaaatttgacgaagtactaaaccagtttgactttttgtagtgaagtgagggaatcaaacactaattgatatgatagaagacacataaaacaattttgtttcttacttgtaagagaagacacatgtgttgatatgagcaaaacctttattacttgtaagagaagacacatcgtcgtgggcaaaacctttcttcttttccgagcatttctaaatcaacataacgtgggcaaaatctttgttaattgatataatttttaatgtgtttatatataagtctttccacataaacaggataatatatatgttgatcgataagattcctatttttactaggattagaattaaaattaaatataatactttttaaagtttatctaataagaaaaatagtctttatctcatctaaaatattataacaaaaataaattaagataataacggtttgaaatatttttaaataaatgaagatgataactttttaaatgttgttaatcagtccacattgggacaaaattgtaacaaaattacgaaactatttataacaaaatattttgtcactcattggtatcaatccatgactactatttagtcactctaatgtcacanattgtgacttccatattcattacaaatttcgtaacta

SEQ ID NO: 40196 - DNA, 153 bp, Arabidopsis thaliana landsberg
aaatcaaattttacaagagacggattcagagataataaattgtcgaagagagttaaatcaaaagggattgatagaagatacctaatcaatggatcgagctcctccggtggttcagacaataagaaggacgccgacttgaaatttccttttttt

SEQ ID NO: 40197 - DNA, 138 bp, Arabidopsis thaliana landsberg
aaaccgagaagtggacagttcacatccactggtgagggatgcctcggaaagataaggattagtaaacgggatcagaaatagagaggattcggacgtatacagtacgcgaggagggtgatcaaaacaggaagaagatga

SEQ ID NO: 40198 - DNA, 454 bp, Arabidopsis thaliana landsberg
acccatgagttggcttgacttggatctgaatttggataagtgggccttcgatagttttcttttttgctccacgttttaaattttgtaactgattaatacaagatttgaatcagtcaatgcaagaaagtctcaaatctgtaaaagctcatgagattctccttaatgtcgtaattacgctttattattgcggtaatcaagtatatgtgggtttcatctcatacagaaattcacaacgataactctactagtctctccttctctcagagtttgcactaatgaaggtgtttgttggagatgctagtgatgagacaaacaaatcaagtgtatgtgatgtcatcgtttgatatctgatttgtgtctagtgttgtaagcgcatgtgttacgcctgacaaatttagtggatgtgccggatttaatatgtggaattactatcaagtggcctcttaaattgttt

SEQ ID NO: 40199 - DNA, 502 bp, Arabidopsis thaliana landsberg
atacccgccattttgagctcggacgtccacgtcggtctaatccaattgcctacgttacgcggttctttctgcgtgaattatgtcactctttctcttttatggggtgttcattagtacactagacaaacaaatatactctatctcaaagtaatatttatctagaactatgtacatgtatacaattattatatattgcaatacgataaaaagagtaccatatctagaaaagtggaatggtttatacgtttgttgatgcttaaagtaaaattttaatttatgacataatttgggagaattctcatctgaatatataatagtagttgttcgaatttaattaacttgaaggtaaagtgtgcaagtcataattttatgttacatcctaacttacacttcccaaaataaattacattcgtaaagtttcgtataatacgtaatccatacgagtcagacaaaaaaaaaaaaaaaaaaaaaaactcaactgtggaaaaaatatttttgataa

SEQ ID NO: 40200 - DNA, 743 bp, Arabidopsis thaliana landsberg
cgcaaagttaaataattttgtaagagaagaagtataaattataaacaaaactcttttccaacttcgtaattttatatcatacttttcatagagtcacctgaaaaggaaaatatatgattatatatccatcaagataaattaagataatcaactaatgtagcttatacatacgataatgatgcttaattacgggagttgtgtaagaagttacagtaataattagtactaagacaaaggcatagaagtacatgacatttataagaccaacatcgcttgcttctaaactaagactgtcattgagaatgacttgagtgctactttactaaccatcatcttacttcttttccaagaaacatatttacacacattctctacttattaacattggaaaactcggcgttctgacgtatttttaatatgtttcattccataattttttatatgccagaaagaaaaaaaattagtgcaaacaaggaaagtcttattataagactatacttcgatgaaatcactctccacatctaattaagtagtcatctatcatcatctctaatgactaaaaatgaaaattattatcttgttagatagtttgttcttccatataacattgtatatttttaattagttagtattatttacatgtagaaatttgaaattaaccatttagcgaatgatggttcacgtacggaatcgtctggtttgacctctgggactggaatgacatgtaccgatgaagtcatgaa

SEQ ID NO: 40201 - DNA, 542 bp, Arabidopsis thaliana landsberg
  unsure (1)..(542): unsure at all n locations
ttaaggtagtgaatcgagttcacgcaattaaataaactagttaaacgagtaatttggacgagggtgaagttgctacatgatcatagtggagtttaatgtacaaaagaataggataacaaaactatatatatatatatatatataacgtagtgtcaaataaattaattagtgtgttattttcaaatatacccataaaatccttttattttctaaagaaaacacaaaataaataatcgaatttaagtatgatttttatccattatttttgccaaatagagggttctttactgcatatattccttaaataaaggaaagaggtgactattatcctaatttcttaagtaagaatgcgattgtgaaggttttgatatatccaactttacaaaaaaagaaaaaaaagcattgcatgtgatgagaatccatcttccccatccttccacccattctttccaactcaaccatctcctttttcttcctattaataaagatcatctcctttntgggtctctttttattttttaaagaaaaataaaacttttaaa

SEQ ID NO: 40202 - DNA, 518 bp, Arabidopsis thaliana landsberg
aatacaaacagcgacctagatagtacggtgttcttaccaatttttttttagattgtgtcctcctgttaccattgtttcggcatagtctttctcgttgtcggtgaacttcttggactggtagaaatgaagtcccgtagtgttgactggcgggtccgttgtggacaaggtgaattgatcatacctcatgaataaggatcgcacctcctgagcattaagccaccggttttgagaagccaagagtatctccctaacacctgaattaatcatggtccaaacaggggcggagacactatatggtcataggggtcaattgaccctggtgaaaaaaaaaatatagcttaacttctattaaattgaccctcatccaaaaagaatattgacctttgtaaaaatttatgtgacaagacttataaaagcccaacaactatattgtatttaattgtacttgtatgtagaattaagcccaataaaagtttgggataaaataatactccctctgtttctaaatatttgtactt

SEQ ID NO: 40203 - DNA, 664 bp, Arabidopsis thaliana landsberg
aaaacttcaatgattcgttgaataagtagcttactttaagggttttgtgttatcttcatatctctctctcagtgatgggttgtgcttattccaaaacttgtattggtcagatttgtgctacgaaagagaatagtatcaggcaaacgcatcaacaagctccgtccagaggtggcacgagagctactgcggcggcggcggcggttgaggaggataatccggtgtttaatttctcttcagatgcggtggatgatgtagataacgacgaaattcatcagcttggtttgagtagagaccaggaatgggggattactcggctttctagggtttcttctcaatttctaccacctgatgggtcaagggttgtcaaggttccgtcttgtaactatgaaatgagatgctcgtttttgtctcaaagagggtattatcctgatgctcttgataaggccaatcaagatagtttcgctattcatactccttttgggagtaattcggatgatcatttctttggggtttttgatgggcatggtgagtttggtgctcagtgttctcagtttgtaagcggaggttgtgtgagaatcttcttagacatggtatgtttcgtgtggatcctgctgaggcttgtagttcggctttattgtccaagaattctcagtaacatgctgat

SEQ ID NO: 40204 - DNA, 540 bp, Arabidopsis thaliana landsberg
agttctgccgacaaaaaaaggaaatatagttacatggtccactttatataaatagtaatcttacctttaaaagaaaacaatgaacgatttaaagtcttcgattctaaaatctgttttgctgaattcatcgccaactacgcaacaaaggacgatgtaacctcttttcgcttcgataatagagtaacccaaactgtttttcattgtatctctgacgatagaaacacttggaactaaagcaacaataacatttagattttttttttaataattattttagattcccactatttgtgtacatataatagctgtcaaaacaatgtacgtataataagtgggaaacagagaaaataaattcaactaaaatggacccacaaatttgatctatatattcatcccaatccctcactcttaaatttccaaaccacactcacctttcaccaacttctttttacattttaccacctattgtctctatttgcatctcttttcataattaccatcatatttttctcctgtaaactttttgataacatgtcacta

SEQ ID NO: 40205 - DNA, 689 bp, Arabidopsis thaliana landsberg
atcaagattgcccttgatcaaaatgattcacggccgttgatattatgcgagtatgttagatcaatttcttcatttttcctgaattgcatttggcatcatataggccaatttattgcatcattgtttagatttcatgtttcttttgtgtctacttaagagattttcttcttaataaaacacaggtatcaacatgctatgggtaacagcaacgggaatatagatgagtactgggaggcaattgacaatacctttggcctgcaaggaggtttcatatgggactgggttgaccaggttcatatcttaaattttagtatactctgattcttcatacaatagttaagcccataaaattaaattgaacctcttaatctcttctcttatcaatgatctgaaagtttttattcttgtaacataaagataaagtaggtaagatcctatagtaatgagcgcagtagatatatatggtcagccaaatccatgcataaaattagtcttttgctatcatttaggggctattgaaactggggtcagatggcattaagcgttgggcatatggaggggactttggtgaccagcctaatgatttgaacttctgtctcaatgagcttatatggcctgaccgaactcctcatccagcactccatggtaacatcttgatatagctcttgatatagctaagaattaaaaac

SEQ ID NO: 40206 - DNA, 717 bp, Arabidopsis thaliana landsberg
  unsure (1)..(717): unsure at all n locations
ggtacttgatgttgtttctctgaccttatcgtgattaagatatcatctcagaacccattgaatttataagatccacaggctgtctgatgtaggactgactccactgtcatggttatattgaatgaggcattggtttaacatctctggttgacattggtgttatttcttaattttcagaaactcatccggaagcttgtgcatataaatattgggctagtttttatgctttgctggccgctgttcaggtaataatacggagtgaaaggatcgatttgtgacgaagtagcttgcttttctgcttcaccagtttattccaatatcattgtttcagttctggaatccaaggagcgcttntcgcatctcttgtacctggactcaatatagtaaggatgctattactgnggctcngagtgtaccacgatgaangaacaatcaagtcaatgagtagacatggagatcgcaggtagctgaatcgaacaagtgtctgtcacaatatccaacaatctcttagcattcttggtatctatgatcaagattcggtttgtctgtttattattgcttttgtcacttcacaaagtgtctgtagtcgctctctgcatcagggaactacttaaggggccgctttactatgtactgtcaatcacatcagcctgcatttactattggaaatcatccccgatcgcgattgccgcgatatgcaacctttgcgcaagacat

SEQ ID NO: 40207 - DNA, 745 bp, Arabidopsis thaliana landsberg
aggcatgatctaatttctaataatgcattgtctaatacgtaatcattactgccattattataagttatgcacatgcataaacaatatctatcagctttttgaaatctttgttatcttgaaattttagctatgagctgaccaatggatgaataataagatcgatggcgaaccacgccttcacaccaaatgtcagcaaaccaaatgttagtttggactcttgtattttatcgcttacaaattgcaatgaagtaatgatcacatattcgataagttggatttatcatgtaaaactttgtttaaagcatgtagttataattgcgaatcaaaactttagctttgttttgcctttggattccagattccaccaattagtatctccaaaaagggcatacacagtcaactttgacacgtgagttcccacacgtgtatcatagacattcctataaaccgcacgataaaatgtaaagcatcacgagactcataattgggatttcctctcttctttctttgctttaatattcttttcaaaatgagagatcacacgagacacacgagaacgtccacataccgaatcatttgtttttgtttttgtttggtcaacaatcactatttgttgttatatgatcatctttaactgtataaaacgtccgtgaaagtttttttatgcggagttgggtaaaagatccggttggaaaaacgggacacataaaaatgattcatataatttgggcctgaaaaaatgggc

SEQ ID NO: 40208 - DNA, 655 bp, Arabidopsis thaliana landsberg
acaaccgaatccagaagatgattttaaatgggttcctaaaatgattagtagggatagagatcttgccaaggatagagatcttcgccaaggattgtcaagaactcagatcttcaattggtaattatttccaattttatatttaagttttgttttcactgaattttgtcaccaaataggaatttgattaacaaaactataatctagattaaaatctaaatctaagcctaattctttcttataatagtttggttataattttagcactcattaattttgtttctatatagatttctatttattacaaacataatgatgttgacaaaagaagaggatgaacaaagataagttttatgaatccattattacaaaacaatagatctttaaatatatatatatatatatatatatatatatatgtaaacctcatgctacaaagtatattgtattcagggcaagaatcatttatgagtaacattcttatggaggaggcagatttgatgttgcctttggagctattcataaatcttaaagtaaaggttagcgagataatacatgataacacttttgttaattagagaagcaaatatatctactgttattcattttgaactagatgaataaatatagaaaacgttgttttgcccaagtcgaagca

SEQ ID NO: 40209 - DNA, 527 bp, Arabidopsis thaliana landsberg
cgccttgggaggaagaatgaatgttcgatcattcccactcggctgtgcaaagagctaatacttatttcatctttaagatcatcaaaaccctaatgtcatcttcatgtatattttcttcaacttcatagtcaagaaaaatatcttattcaagtcaagacaaaagttctttttaacttgttgcatacatcaaaacggtattttcttatgtcggcaactgaaaaactacttacagtatttcgagagatacagtacattgtaattaacctccccaatacaaatattttgttttccttctatagttaaaacttccttccatatagagaattttagaaaaagattactactttattttcttgtgtcaacgtttactttaagctaatttccattttctttgtggtaacaatttccaaaaagcttttgattattccgaaaggaaagaaattaatgggtagctttttccagttcatatcgttttcacgacatcaattaataagttaaaacctttcacaggtctaccacacaatcat

SEQ ID NO: 40210 - DNA, 685 bp, Arabidopsis thaliana landsberg
  unsure (1)..(685): unsure at all n locations
ccgtttccaattccccaacaaaatatgaaaagacaagtaataatacatgaacaaaaaactaaagtttaaattcgtaaaacttatctcatttcactcggagaaaactaatctctacttgcacctatttaaactcatcatgagtccatgtggtttcactttattcaagaagcaaatttgtaacacaccaaaaaaatgggagaagagctttctgtagggtttaggttctatccgaccgaagtagagcttcttacgtattacctaagaatccagcttggtggaggaaatgccaccattcacagtctcataccgatcctcgatgtgtttagcgttgagcctactcagcttccaagtacgtatccaatcattagctataaataatgtcgatgatatgtttgtcgtatatatgtgtagtcaataattacgagcatttatgtcacgtcttgagattgtatgcatgagatttaggttattgtttcttgatttcgtggttaattataagttacaaaaaaaacacttcacaaacaatcacatttctacaattaaacagtttcattttcgacaaagtttaaatttacatgtaatataattaaggaaaacatatacaaattgagaggtgtgttattggattgtgtgtttttgtntgtagatcttgcgggagagaggtgtcgaggagatgcagaacaat

SEQ ID NO: 40211 - DNA, 324 bp, Arabidopsis thaliana landsberg
atgtaagattgcttgttatgtttttttgttcttgaccttaaatgatcgtcattaaatctaaatttatccacccatcttcttttaccaaaaaaaaaaaacatccatctttcttcttaaaattttgatcatttaattttgtgtttattttttctcatgagcatgttgttgttccactacattgattcttctcctttagcaacttcgttttaataaatttttgccaaagttctttttttatacatgtttaaaactgaaaatagtttatgtcaatattgaatattcccattttatatatcaagttttaatatatttttgaccaataac

SEQ ID NO: 40212 - DNA, 643 bp, Arabidopsis thaliana landsberg
cttagaaagaggatgtgatgatctctagcatgtgtggtttacatggtctagctggaaggccagttattgggtttttgttgagaacatagtcttccttaatacatcaaagtcacttgattgataactaaagttccctatatacgtacattatccaacaaaagaagatgaaaatacgatatatctgaggaaaataagatacccgaaagagactttggaagcgcctcgtatttgtctggatgtctatcctgtaattaatatgagtagaaattatcacctgttacccctcataatgcttggcaatgcaatattaagtagccagagactctaaaaaactattataccatttcttaacaaactataaaatcattagttaaaatatgccaatgccactactacagatccaaaccacacaattaagcctagtgaggtatacacactgaaccaagcgagtcaacaagagtgaagatgctaatttgctatgccaaagttcataaatttttaccagaacacatttgttgctccctgcaccagagccgaagaatatcgcaggagtatttcttgattgtcaagcacaacctcaaacagctgagaagaatatagaagaaacacattaaacattattgactcagtcgacaaactaatg

SEQ ID NO: 40213 - DNA, 1517 bp, Arabidopsis thaliana landsberg
  unsure (1)..(1517): unsure at all n locations
gcccgatctacgttcaacgacagaaccttattcctaatttcacgctcgttgttcgcaaacttaacaactcttacttagcattttcctatctccattccggaaacccgcatacatgacaatcattgttggcctaaaaacacgctaaatctattttgacacacatgaatagcatggactaccatggaaaagagacctatatccatttaattgtaggatcatgcgtcttaactgatattcgttttaaccatggtcactttccttcaatatggctaataacaggccagaggaccggaaaatctgtacgttatactcggaagtgactggttgagttcataattgtaggagtaacaagatttctaattttctacccttgtagttcttatggatcataactttagacatcttaataccacagtaacacggtcggacatgtttcctcggtgaaatacaactcacaactagggattttgggttgaaattttgcggacagccaggctcggttctggataggacggcccgagctggaccattttcattttgtcacaattggaccccgattaagtctaatcccgcttttttcattgcactttccaggtaagatgggggccagagacaaacaagaccatactaaatcctaaaactcaagcctaaataaggaccggcctaatcagtgcatcaaattgagccgggccaggttggcccatcaaaacacactgaggggcaaaatatcaaaaataaataaaattacaaggggatgactttaaaccgggtccaaatccgggtccgactgaaccaggttgccccatttttttttttttttttttttttttgaatgtcaaaaaagaaaatatgagatgcaaccaactctcaatcagggaatggacattttgatggcatttgtattgtcacttataagctactaatcacaatctacaaactgtgtttatggtagcatttctcctcagtggtaaatagaatctatggatacaaaatatttacctgttcttgaagatgcttaaaacattccactatcattcagattcttaccccaacttttcttgctcgagcttttcaactatagccttcttnnnnnnnnnnnnnnnnnnnnnnnnnnnnnnnncagatttatctccgatatcatccttcaaaaaccaaacaagattatagatgattagtattatgacattttggtactttcataaatagcaaagacctctatgaaagcttgtacagggcttatcttcagagaggaacaatgtaccttaataggctgagtaaactttcttccagcaaatactannnnnnnnnnnnnnnnnnttcctagcaacaccagttttacctcatcattcatcagaccactctgcaaattcaatataccaatttaagtcaggccaatttaacaaataccaagatcccccaagttaagggaaattgaagctttctctttagagaaacgacgcagcagaattgatctcaggagtctaggcagctaaagcaggatatcttaatcaaacaag

SEQ ID NO: 40214 - DNA, 542 bp, Arabidopsis thaliana landsberg
tggttctcctttcccttccgttttttgctccttacatcacatacacctgctccaagaacgtcctctttttcttcagtgttttcatctgtttccttctctttagtttttccgagattctgaataccgttttcctccccagttacaaaattttccgtctgacttgccgaataactaattaactctcggccaccattcccatcattattttccacacgctctactggcccgcttttcatggaagtagataaagtatttcctaatgggtcacacacctctattgtttcggtctttctcttctttcttctcttggctttaggatcctgagtttgggccacagtttcactgatgttgacatctgtgcactctttttgttccactgtatcatccttggatttcagacaactacttatcacaacactagcaacagatttttcctctttagtcgtcgattttgatccttcagcttcagaaatagtatcgtatttaacttcacgaacgtcctctttaacttcagtgcttccatctttttccttattcccatc

SEQ ID NO: 40215 - DNA, 589 bp, Arabidopsis thaliana landsberg
  unsure (1)..(589): unsure at all n locations
gatattataattttttgcgtgaattttgaaaatttgattatagaattctcgacaatatcgatgaggagagcacttgaattaatggaaacctctttgggttgtgttcacttttgaataataaattaaatttttgtctatctatatttttctagtgtttgttttactttagttttaggaaaattataagtaatctaatacataacaatcttactaaatcttggtcttttgctatagactttttgagttctatatgtcaaaattttgcccaaaaagtagaagattataaggtttttgtatgtttatgcatatctttttggggttgcaagattttaagacaatgacaacatttagtttaaccactccattatacaagtacaaccatatggaacatgacacatgtgataataatttattaatttggaaatgaaagatcatactaatgcaccttgtgacattattcttaaatagaattattgcctaacaagacaccgcaaccaaatatattaattttgttttagtggctggcanaaattgatagatgcaatagtgaagtttgggaaatgatgatatataggattaaataagtaac

SEQ ID NO: 40216 - DNA, 880 bp, Arabidopsis thaliana landsberg
ttatccgaaacctcctcgcatctttgtttatcttgctgatatctatatattggtgatgtacaagaatattaaaagcatgtggcacataatattgatttttttatgatggcatttacattcatcagaatatatgagttaaaacatgtacactaacatatacaacatcatatcaacaatcgagctaatattttgaaacaaacctcttttaacacgaagcctagctatggacggaaaatttgtagggtttttcgttcttcgtttcatattacaaaacgaatcgttctcaaccttgtcttgtatcacaaggaacaatcacaagactcacatgtatacatattaaactaaatatgtatacaatacaaacgataaatagtaaacttctttgatttaatattcgataataacaaatattcttttttagatatatcaaatatattaaaacaaatatatgaggagaatgtacaatttcatatgtatgtaaaaaataaagagatgaggacaattgacaatttaaatattctcagaaattagtaaccataatattatgttctgaaaaataacatatatttctctctgtggatgaacatattttgaaaaatgaatattattcatttagattgtcaaagcaagcaatcaatcacgatattttgttcaaatatattataaagataattgttttatagctaattgtggtagaactatatctcaaatataatcgcgtctattcgataactaatgaggatgactatcaaccaaagttattaacgctacaaagttgaattatattatgaaacacattatatacatttaatattatattagatacgtcaaaaaataaaatagcaataactatacgggccatatatatcacaccgttttc

SEQ ID NO: 40217 - DNA, 471 bp, Arabidopsis thaliana landsberg
gtcaccaatggactaaacggaacgtactcataaattcggtcgacgaaatgaaaggccattaggcgctgacctccgtagtcgcgccgtctccagcactggcaaagagactgccatccagtttccgcttaacaatgccgcagaatacctccacggtaaaaagcgccggcaactcacgaagggccataccttcacgccaggcaccaggatcaatttccggtaggagttctttgagccgctcgatgcctttcgcttggagtacgccatctacttcaaactcctctggttcgagtccaccacgggcctgacgctcgatctcacgctgaggaatcttgatttcgaactctttttctaatcgaaacattatgtcgaggaagtcgatagattcggccccgaggtccgtgatgagacccgacttaagtgtcacgtcttcaaggtcgacacacagggactcggcgattaccttccgcactc

SEQ ID NO: 40218 - DNA, 791 bp, Arabidopsis thaliana landsberg
gacaaattacctaatgaattacaccgagatgatacactattattttaacttaaactccacttttttaaataggttcgacttttgataggtgatcaaatgggtgctaaagcagatttaatatgttaatatttttgttacatgtctagaaaaatctaaatctgatgcaacaccaaaattttggttattaaattgtgtaaaattcaaactttctagggaaagagatatgttaagttgacttattttggcatgtcattggtaagatcaccttttttttatgttgaactggtgaagaactcttatcttttcttctttgttttttaggaactcttattttaaaattgattgaattccggaaatttacaaatgttacacattctttttttttatgttaaagatgttacacattactatttcggtaaataaatttcgatgcgtttgtttattatatacatatatatttattctgataagccgaaaatgtttacttttaatttttgtatatggcacaacctcgtgccttctacggaagctatagtaatgtttaaggagtagtaacgtaacccgaccgagagtaaatagtaaattatctatcgcagaatattcaaacttaaatagttacaagaatattagtgtttaatctagcgattgaagaaaaatcaagtaacgttaatgaagacatccatcacattctttttacaaaacatcataatttacaggtcttcggagatacatatatagatagttgaagatgaattcaattcggaccatctgcatattgaactcaaataatc

SEQ ID NO: 40219 - DNA, 448 bp, Arabidopsis thaliana landsberg
atagaatgttttcacatttttatgcatatatttattttcataacattaaaaactatctaataaaaaaaagtttaaaagccaaagatcaatcgcaattcatattgatggcttccgaaatttcaatgtgaccgtttagtattctttttctaataattgagtctcgtttattaaatgataattttgtttaagttttttatttttgtttttaatatgtgtgttttaaccaaaacaacatatatttgaaatacttcgtaactttttcaatgaatattaaagaaaatctatttatctaatttaagaaatttaattagagtttttaatacggaaaataacttaaactttatgaaagttttttttatcgacaatcatagtacatattttatattgttttaggaatttaatatcatcattttttctaatgaaagccctataaatacccactaaacac

SEQ ID NO: 40220 - DNA, 879 bp, Arabidopsis thaliana landsberg
tttacttacatcattatagcaggatagtcatagatgtcgcaaaacaaatgcagagcggagctctcatggttgcggtgatgttccaaataaaatttctgaggatttggttaaatgtctgtcaaacattttcatgagaatgagctcaataaagagatccatggttacaaaatctcaagaaaacgataaagatacggcattcagggatccttatggaatttgctctagttttagaagaagggatattggtcgatataagaatttcagtgatgttgaagaagcctcacttaaccaaaacagaacgtcaagttcctctttgtttctcatccgccaactgaagtaagcgcggtttgaaaaatcctacttgctaaaatgaaagtttattttcttgatttgtgtatccatcaattctttttttttttttttgaaatttttcagacgattgcttggaagactttctttagtcaacatgcagaaacttaatcaacaagagaagttagctttctggataaacatttataacagcagcatgatgaatgtaagcactaagcaatatctatgtagtaatagatatattcctgtctttggtttattaacttgtgttacaatgaaaacattagggtttccttgaacatggaataccggagagccctgatatggtgacattaatgcaaaaggtaagtctatgatattaaaaatctctgcatgtaaaagatacatagaaaattattatcagtgtttctaattgagatggccccttgtgcttgcaggcgactataaatgtaggaggacactttctcaatgcaatcacgatcgaacacttcatcctccgcttaccgcatcactcaaaatatgtaagctattcgttcgttggtcccttcc

SEQ ID NO: 40221 - DNA, 579 bp, Arabidopsis thaliana landsberg
  unsure (1)..(579): unsure at all n locations
ttaattattgtatcatgaagtacagtgtttttgttgagatttacactgaatagtttttttcaaggtctctgtaaaaagtcgcgaaacaatttaacaaacttaatcttaattttaatgtttttattaattaatcttcattaatgtttttataaattgatattactattatttgatatcataatcattttaaaatgaattcatgattcatatcatctggtcaaagatctgaagcttttcttttaacttattattgattacgagacgataatggagtccagttaatgtcaatataatgatgataagaatattatcaaaataatgggcatgatgcttctatagatcttgcaaacaccaataatgtctggaactctactcgaattttgttttttctttagctttattaatttattattttattcctttttgcattttatggcagtatttggtggcagtatttttttctgcatgctttctgggtttttgtctctttgatggaagaaagattccctcttgacaaaaatatnttgttaggataatatatgtccccattttatttctacagaaactttaaatcaaatt

SEQ ID NO: 40222 - DNA, 674 bp, Arabidopsis thaliana landsberg
ttagccctgaccaaaaaatgggcctgattacgagaactcagtcctttgttgtctgtcgctgggtctagagatgattatctcggataataccgaacttatttaatacgaaccagagatgtttgaattcaacggttttatattcgtcgagtttcaaaaaacagagactatttgtgcaaaaagacaattttttattcttttgcaatttgtcgtgttcgcgagtttatgttcccaaaattagaaagtccaaagattagcttgggtcttacttagatcgccaattttgtctcatagcaaaaatgaatctcaggtttcatttaaatgaatttcctctgttcttcgctaaaaacgaaatcttgaagtcctctattatacatcggaatcttttctttttctatgttatcttgcagatccctatgcctcccatcacttgctgtctcatctttctcaatttcattcctcggtgggttagcgatatctccttctcttctctaatgggtttgaaaaaatcgattttttgattcatctgattctggtcttacagacaaaattggcatctgggttcgattctttgtgtccgtcgtaaaaaccagtgattaggttctcgtcttcgagtcggagacaatggatataagcaacgaagcaggcgttgatgcgttctcaattataggaccctt

SEQ ID NO: 40223 - DNA, 730 bp, Arabidopsis thaliana landsberg
caattataatattattttcccaaaacaaatcaatatttatcccatggaagatatatataatagtctcaatgattttttgcttgagtgaactttgtaacgaaaatgaaatgttagtaaccatatgaaaggttcacaacccacaagaaatagacttcttaatgtttaatagatacaaaatcaaagacctttatgaacaaagcaacatagcatgtccaccaccagtctagattttttctattgaatcaaaagatcaattgacaaacataaccaaaataggtaatcactcaaaactagtatataatctaagaaatataatgaatcctcctatttttatcccaaataaaacctaaacaaagaaaacatttgggagctaaaaataataaattttaaaataaaaacatagaaaccatccacaaacaaataatgacggatatccatccttagcggtgaatttctaaaattggagattacttcttaatcaagtttatttaaacatcaaaccttcacattttacaaaattcgcagtacgattcatcatcttaaaggctttaggctctaaaagaaaaaatagaaaaaaaaaagcgacctaaagccatgtcgaaagcttagtaaatttctccatataaaatcttaaccccttaagaaaacaaggaaaaaaaaagaagagattgtttaaatattatataaaaaacctatttttctgagaaagaaattttttgaaaaccaaaaa

SEQ ID NO: 40224 - DNA, 548 bp, Arabidopsis thaliana landsberg
tgaacccattcattgacgtaccaatgcttgatgtcaaacccgaaccggttattccaaacagttccccaacttcatctgaaagcagcagcttggggcataaatcgccttcgtctcctgccgtgcgagcactctttgaagaggatgtggagtttgtgggagtagaaccagaaggaacagagaaagcaatggatcaagctttaaaagaagggatagtcggtgaagctggaccgttgaagcgtaatgttgttcagaaagttccggaaaacgaaaaccaggcagagaattcgggtgtgacagaattcaacgatgcaaatttctggagggttgatcaagaagttacagttttggagtaaaaggtaaaaacaaccatacaaaatctcgtattgttgatgctctgtttttgcattcttaatttaaagccaattgttatagtttttttttttttaatgtctctgatttgctcgtttgccaattatactactttgggatcatacataccttcatacaaaacaccttatatcaactgattgcagtttttttttaactga

SEQ ID NO: 40225 - DNA, 529 bp, Arabidopsis thaliana landsberg
gtggcgaagaactgctgggcgcgaaggcgtactacgtgcgcgccggctacttcaagaacgtcgttgcgtttgctgtactcgcacgtcggcgccggcttcggcacgagctacggcagtcccggcatgagcggtatggtctcggtcaagtacaacttccacggcgaggccgcgcacagcgcgatggcgccgtggcgcggccgcagcgcgctcgacgccgtcgagctgatggatgtcggcatgaatttccgccgcgagcatctgcggctgtcgcagcgcacgcattacgtgatcagcaacggcggcgaccagcccaacgtggtaccgcccgaagccagcgtctggtactacttccgagagaccgactacccgcacatcaaagggctctgggagatcggcgacaagacggcgcaaggcgcgtcgctgatgaccgacacgagttgggacgagaccgtgctcggtagcgcctggccgggctacttcaacaagccgatggccgaagacgcctacgagaacatcaagctcgtcggca

SEQ ID NO: 40226 - DNA, 102 bp, Arabidopsis thaliana landsberg
cttgcggtcttacttaacgtctacatggctatatgctgtgctctccaaagtgcggggcttgcccggactgcgacaattatgcggactgtgtgctgaagacgc

SEQ ID NO: 40227 - DNA, 300 bp, Arabidopsis thaliana landsberg
aaatagcatttaacatttgtctcatattcaagtatggtactgttgaatgggcactttatactatcaaaattcaactataattcttgttgtcaaaataaatatgcttatttttcggtatacactgtacatacaacacacctatacgtcatgggtagagaattgtgatataaatttatagttcggctatatattattaattttgctctccggaataccaattctgatcagactctttgagtttagtaactgcataccaaacattagattaaacttatgtataaaaataaatatttttttcat

SEQ ID NO: 40228 - DNA, 386 bp, Arabidopsis thaliana landsberg
  unsure (1)..(386): unsure at all n locations
ctccttctaccccatcctgcgtgtggccgttttcttatcgttccgtgttggattatgagacggtgccttgtatatcaagaccacggagatattactaagaatgtgatcagtctgctcatagtcatcagcgaagagcctcaacgtactgcttgtatatgggaagtacacacggtatccggaaatgctccttttcattgagaagccatattgattgattccaatcgctttactcaatgaccgtaccctttgcatccgtacggttggctcactctgaatagaatacggaccacccatagaaatcatgccttctgcaatgctnnnnnnnnnnnnnnnnnnnnnnnnnnnnnncgtattatcattgagcttgaggccaccagcctgatggg

SEQ ID NO: 40229 - DNA, 563 bp, Arabidopsis thaliana landsberg
accaaacgcagagttgctgttttgtcgttcttttgcctctaaatactgtatgatttatggaagaagaaggattccattggctagaagattgtgagtatttcccagacatttacaacttacaaggttggcttgacttctgatttgaggttacaaccttaaccacattgcattttctgtcgatacaaaatcggatgtttctcctcgtaatttccaagtgaatcctcgcaggttctgcttcatattgcattttctgtccatacaaaatcaaatgtttttccttgtaatttccaagattaaatcttcgaggctttggatacttgctttattactggcccaattattgttatttggcgaactatttcttaaatctaatttatccatcaatatatatataacatccaaatacatagatggttgttattctgtcgtcatggaagattcgattcaagagagcttgtccacccatgatattataatgtatcatagacttaaatcaatctaaaggttaattttggggatcatttttctttgattgggatcacatcaggatctattttgacacc

SEQ ID NO: 40230 - DNA, 275 bp, Arabidopsis thaliana landsberg
ctgggcccgcggtgggcggcctgctgtttacgctgcacctgacgggcgcactgacggagtggaatggcgcggcggtggtgtatgggtttacgctggccacgttgctggggtttgtggcgctggtgggggcgatgcggaccaagccggtgcgcgtggtgaagaacgcgttcaacctggagacgatgctagccgggttcaaatacgtgtggcagaccaagctgctgctggggtcgatctcgctggacctgttcgcggtgctgctgggcggcgcgacg

SEQ ID NO: 40231 - DNA, 615 bp, Arabidopsis thaliana landsberg
aaatagccagccaatgcggtccttaagatttcaatattctttaagcgcagaaaggatatatctaataaaacaatagtcaagtcaaacaaacgagggtcgaaatggtaataacattctaactccatgaccatgctaattccaaattgcgtcgcagccaccttcgacgtttttcatttaaataccaatgttagtttcattttaccttttgttcttgtcctatcaaaacttgagccatctctcattctctctcgccaatagttcacatgcagacacttacgcctaacgccgacatattccatgcaaaacgcagacgtttcacttgcaatactcaaacctcgactttgatcccgacgaagccgctcacggttttccctgcgagaaaaaccaacaaagaacatctcagaaaccttgagaacgttcttagaacttcgtcaaactctatagatcatgtcgaaaatgtaacttctcgtcaagagaagacgacgaagaatacatcgacgtcatcacttctcggaggtctgaatttggcgcgaatctggcaacagatgaaagcagccgtcgacgaaatgtcgccaaagaatgtgaaacgactgccaaaggcttctctaaaagtca

SEQ ID NO: 40232 - DNA, 108 bp, Arabidopsis thaliana landsberg
ctcgcggcaagcgctggctgatggacaatgcagctgttgttgagcgaaacctgcggtgatatctacacaaacggccactatgccgatcgcatgccaagtggacagaaa

SEQ ID NO: 40233 - DNA, 1306 bp, Arabidopsis thaliana landsberg
cgaagatctatcattttgcttaagtttcttgggctcttttgtttgttgttttgcagggtaaggttgttccggatggtgagaaggaatttgagcattgtgagtatggctcagacatagctacaagttatggagctggtgcatttgtgcttctcttcattagtcaagtcattattatggtggctagtcggtgtttctgctgcggcaaagctcttaaacccggtggttcaagagcttgtggcattatgctcttccttatttgctggtaaaactctatacttaaacacaatctctataatttatgactttgacttgacacatcattctacacttggttttgaacagggtgtttttcttgattgctgaggtatgtttgctcgcgggatcaatcagaaacgcgtaccacactacgtacagaaggatgtggaacatcgaaaaccctcctagctgtgaagtgatccgtaaaggagtgtttgctgctggtgcttcctttgctctcttcactgctattgtctctcagttctattacatctcctattctcgtgcccgagacggttaccaaaccccacattactagtgagtagtgagatccagaacaagaaaagctaaacccttaacgaatttgtccatttatccactcactgatcaataggatattaaaatttgatgatgttagtcattttgcttcttgcttgaatcacatttgcttttttgttttcttgtgatgtataaaatcttattaatatagacagctattctacatttcagtatctaagcttgtttatacattttagagttcataacctggaaacagagcttgtgttggatcattcatgtcgagtaacatgtaggccattcctccaatgccttcaaagagagaaaagggtctatctcctctatgcatttgaccttctgaaattaacttctctgatttatcgagtaggaaagacgcgaaagctttagcgcggtataaatactctggttttcctgttaaccggtatagagaaagaaacacgtatgtgtttccgctgataccgtgacagattcctactcgtttaagcaagccacggttccacacaacttctcctgcctccattgctgcctctacaaattccttagtcttaaaaacctgacgatatccagaaaatgagtttttcattgtggttttacttactgataagagtatttcaatcaacaaatgattacctgagctgcctttacaagtgtgagagcaacaccaggagcgccgtgacaccagtgaacaaggcgatctgattcccttccttcactagataggtaattcccgctc

SEQ ID NO: 40234 - DNA, 788 bp, Arabidopsis thaliana landsberg
  unsure (1)..(788): unsure at all n locations
acaataactattttcaattatgtgggcaacgttctacgatcaatatacaatatgcatccctaacgatatacaccaagaacagtattcaatattcaatcctcaaggcaagagaaagaggtatctaataagaatactctaatccgattatgtgagatatagggacatataaggtgatatataatatacaagcnctgtgatgtaatcgaaagataccagtgttcctttgaacgcattatcaacccattcagctaattcaagagtagctttgtcctctgctgataacgcaaaccgattaactgcctcttctccaatgtcatacttagctctttgcatacagctgcagaatgagagttaatgtcttaaaaaagtggcaagaggaagccaagtattactcagataatatcaatttgggaactctggcagagataatacgggaacaagtaacaagtaatgatatacaaaaaaaacagttgcaccttgaaataagtttaattcattaactatttcatcagcacagctagaaagaacccttgttctttagcaacatatgtaggtgataaaaactgcagatatcagctcagcttcttactataaaaaaagaaacttcaccacagacctttaacttttcagcccttttaaccatacaggttacacatgcacactggctctagataaaatagttcaggcaacttgatattcattatatagtaacccaaattccccaaaaaacaaacagattgtatttaacgttttctacatcagagatcatctgaattttgacttcgttt

SEQ ID NO: 40235 - DNA, 436 bp, Arabidopsis thaliana landsberg
gagaacctgatcagaaggtacggcatctaacgcgtaagtagtacctgggcatactcttggtgaaggacactttggaggcattaaagcatgactgacagactggcttatcatgcttgaaatgcgaagcctagactataactaaactgacacataactatggtagacatataagagtataagtgactaacattaacatactgtagattcatattacaaccgtataaaataggcctacactattgtaggaccatcaaatagagcttataggacacagagatactgtgactgcatattaaagccaaatgtaccaatgaatccaccttgagtaacgaaaggacaggcatctaaaatacagccagaaacatatagaagacaccgaccactatagcagtccataaatatgccactcacagaaacactaccaatcatctgtcac

SEQ ID NO: 40236 - DNA, 248 bp, Arabidopsis thaliana landsberg
  unsure (1)..(248): unsure at all n locations
agcttctactagcttcacaaagccaagccgggtacctcaaacaccatatactaacnnnnnnnnnnnnnnnnnnnnnnnnnnnnnnnnnnnnnnnnnnnnggagaaaaccgcagatactggcgtcatacttatacctacacatgacattaagtcatacatgactgccaaaaacaaacctaacaacatcatgtcaatgaccgctgtaacgggtcatcccaagagcatatgagtcgacgaattagtatata

SEQ ID NO: 40237 - DNA, 595 bp, Arabidopsis thaliana landsberg
gagatttctcatcctgatgaccattttcattctcaaggtttacccccaccttcacctttaccgtttattatcattccacattctatggccgcaaaagaagacctcgaaagaagggctggcggtgcaaggcattctcagaggctttccccgaggcatgaagaaagagagaaacgacgctctgaagagaatttatcagtttctgtggatgatgcaaaacgtagaagagatgatgatattagggaccgaaagcgagatgaccgagaaacaatcactgtgaaggtatagctccctctttacatattaggaactgcagaatatcggcagtagctgcatcatcatggttctttgtcttatctatttttttgttatggttattcgtttctgatttctttaagtggttattttgtttgatacatttggttagtttttatcattaaaagggagaaactcgatgaagtgttttccgcagagatctccctatttgactataggaataaacatcttatctactctatgcagggagaagaaagagaaagggaaagggaaaaagagaaggaaagagaaaaaagcctccctttgaaagaggattttggag

SEQ ID NO: 40238 - DNA, 669 bp, Arabidopsis thaliana landsberg
acttcaaacactcatccagaacagccaacacattggatgatgttggagctaataaaatccacggtttatataatatggttgatgctctcagaatttttactactctgtaaatttctcccactgagagagcatagctcttccctggtcacacagaatcagaataagtcacggatgaaaatggcctcaatgcaagaggattaatgggctaatggttggtaccttgaggtttagataggatttcttcttggacatcatttttaatcacctgcttccaaatggatgcagcatgtcgcaattcttgagcacaggtcgaagaaatttcaaaccaagttgaagcgtatttcgactgttgctcaagagaacccaagtttatgatcttcagggtcagtgtggcgtgtttgagtagttcgattgttgatttccagtccttctctgcctatgaaaaaatgttcattatttcttcagcgtaaatatttcacgttaaaaccattcatctcaatatacagggcaccgagaactccgacagaacttaactgataacaatctctctgtcaggagatcttctgaatcaagttctcgaaactttggctcctggagagccttataaagttcagtcatgccagaagatcctggttgaagactttctacgtgactccactgataaaacat

SEQ ID NO: 40239 - DNA, 170 bp, Arabidopsis thaliana landsberg
ttgcctgtggctagggcagaaaatgaggttgttttaactatccacggcgcagacgggcgtagattgttacctactcctcaggatgggggggcttgctctccgtatacagccacttatgggtcctttagcgccttacacccgttaactgaaggcttggatcgatcaactcc

SEQ ID NO: 40240 - DNA, 591 bp, Arabidopsis thaliana landsberg
cgcttaagtaattcattttcatgaacattaagagcttttgcatctgtgggttcttgatttttggggatacatggttatgtcacctctacttgatgaactagataataagttcgctgcattcgaacactctttcaccttctgtttatctacacacatcaaattgtaagcagaaagcattttactagacagaaaaaggatctaatgtgtggaactctcaccagagacattgagagaatctccactacacacagacaaatccaaaacaagatcaatctgaggagaaaaacattctcgttcttgctcttcctctgaaacatgacattaacaaatcaataaccaacaaaaatgacacttgcatagaacaactacaaagaaactgcaagcaagaactcacttaaaacttgttcttctctcttcttatgagcaagtgggtacatcttctttaacagaaaataaaggcttctggcacacagagggaaagtgaacatacgggtctctacatatcggacaatgagactcccgaaagccattcatggacttatgtacgcaccaaaaacatgatagatgaccacaagcttcaataccgattcc

SEQ ID NO: 40241 - DNA, 603 bp, Arabidopsis thaliana landsberg
agtcttctcaattgtgttatttggtgttgtgtaaaattttatatttgaaaactcatttttactacctaaacatgtagtgcttgtgaccggattaccgccttctgcttcgtggcaggaccttaaggtaagggacactatatagtctttttctctgaatgttggttctctatatcatgttttggatttatctcttttctgaaatgatgttatttgctatttacgggtgattaggatcacatgcgcaaagctggagatgtctgcttctctgaagttttccctgaccgtaaaggtgagttgacattcgatagtttggataagcttttgattgatgtgttagtaaattagtctttgtgaaggagaataggtgttaagcatctgaactgctaaactcacattcagtatttctttgtaggcatgtctggggttgtggattatagcaactatgatgatatgaagtacgcagtaagttttatatctttgcaacgcaaatgttcctggacttatgccttagactgcttttgtttcatagtataccgagctgaatttatcttcctggaggccagtgttggatctttgatgttcccttaaaatttttgatgtgac

SEQ ID NO: 40242 - DNA, 652 bp, Arabidopsis thaliana landsberg
taaacttccattctccctcgtttagggctgcgtccctcctcttctatatactccttcatttctatagtcgcaacatactatttactttacgttttaatatagttttaaggtgttattctgcttccccattttttttatacttttatttatgtattttatagctttagatctttgatttcttggagacaactcctttaatactctgctcctctcttacaatgatcgcatgtaccttagtcatgcgtgagtagctttaacatggaatatactgatcggtgagcatgactacaccaagtggtaccatttcgtttaacaacggttgaggaatccccaaacagatgcgtttttagattctctttaggtgcatgctttagtgttataatttggttgttctctgactctgggctgcttagctttggtcggaatacaaattgatcacctaagaccaaaatctccactagtcttgcctcataaggctactggatgaagtgtatctatctagagaaagacaaactctaaagacagttattgtttgtataatcatttagacatctgattataatgcttgaattatttcctctcataaaagttcaaataattctcttacctagcggacctgccctaatttttctgtatggtccaacaagtacta

SEQ ID NO: 40243 - DNA, 401 bp, Arabidopsis thaliana landsberg
ccagacctgaaatcagtagttaggtttagttctatgtttactctcaatctaatgcataatatgtactgaaagcacatcctcattcgtcaagctaagagttagtgttcagcttccgaactacggcatcagactatatttttcacaatgaaaagaataagaaagacatgataatctgttttcatgcatattaatcttagactaagcatgatttccactaattacctcttggagatccgttgaaaagagcagaggtgaaccttcataaacacccttttttatcctggtgtctatcagagttctgctcgtaaaatcatcaatcttgaccccttgaagattttcggaaagtaacctatttagggatgcaaactcctttgaagctaaaacatgggacagaacatgct

SEQ ID NO: 40244 - DNA, 737 bp, Arabidopsis thaliana landsberg
  unsure (1)..(737): unsure at all n locations
ttattaccacagtgtgatgaaagatctccactctgctgggtaagtaacccatctcattttaatggatccatcaaacattgaaaacattttatgacaaagcaataataggatgtttggaaaagaaaaatcaacgcaccacactgattttcgctttttcttatcaaattatactctagtattctttttatttttgttaaaatataaatacaacattatttactataaaatctgaaatctaactaaaagcaaaaaaaaagtaatatatctatagttttatgtatgagcatgtgatagttttaatcaatatacctttagggattctgaatatcaaactaataaatcatgaaaagaatatcatttcgtttatgttaaaggggttctgaaaagaataccattttagatatttttcaaaactccttaaaagcttacttatgcaccacggcttatgcagggctaccacagtacaagctaaatattgggccaatgacgagagggtacgtgaagctcttcaaataagaaaggtatatgacattaattttgtcgagggaaataaataatgtcaatatcatttaaagatcaatgacacatcatcattagagagcatatgaaaagttaatatatgttcaaccattacttgcatattaaatcagttaatatgaatntattgatataaaaagtcacaaaacaaaaacatataatatttttttgaatctaatccaaaaatatttaaaatgtaa

SEQ ID NO: 40245 - DNA, 337 bp, Arabidopsis thaliana landsberg
  unsure (1)..(337): unsure at all n locations
ttgctgaactggcaccacctcttttaagccaacataatgggatcgccatgggtctaacatnnnnnnnnnnnnnnnnnnnagctgcactggctcagtctatgtcaaaccttgaagttgaacagggctggactgcaccgaatcggggttacacatcatatgggcaaggaacctgccacattttcagaaataacaagctatctctattgggctgtcaccacgttttaacaccatgtagcaatctccatactgatggcgccattacagttacagtacgttttctaaggcgccatactgctgcggagcctgaaccatgataaccgtctgtggagatgagcag

SEQ ID NO: 40246 - DNA, 598 bp, Arabidopsis thaliana landsberg
ttcccactcactattgaaaatgtacctgtcaggctcttcttctccttcaatcactccaataacattctcaatcttggcaataacagtttccccctgaaaccaagacccaacaaaactcaaatccaagtaagtaacacacatctcaaacagaaactcactcactcacaatgtagctgaggttcaagaccccaggtccaggccccactggataaacatctccatcagaaacatctccaacaactgtcttcagaatcacttcagcatcagcagctgagacaggcaacgacggtataagcggaacatcaccgctcaattcaaccgcctcgtccgataatctctcacacccatcaacacttgcccatccaggagtcgttggatcacctaacccattataaacagtaccaacttgaaccccactcggtggcatccatttactcgccggaaaccactcatctccgccgtaatctctcttatcagtatatatcacaacccctacagctcctgcctcgtaagcgttcttcacaatgtctcctctgtatatctgaccgtacctcgcgattacaacggctccagagacattcacgcccatatctttctt

SEQ ID NO: 40247 - DNA, 627 bp, Arabidopsis thaliana landsberg
agatgtttgtttctgagaccacatgatctaatatagaagaatatttgtttttattttgtggttgtctacttgtttgtattggtttgccttaagcagttacttatatgctttcgtcaatgaaatgacaaaaaatattatctctcatagaatagatattggttaattacgtaccttcacatattcacaacatgcatcttttaggaaattaatggaattcaaaatataatcggtagtgcattgagttaaatatgactccaaagatgaatagcttgagttttcactaaaactttttaatattttatatgagatttatttattttgattggtaaataatacagaattgtagaacgatgaaatttgaaaaaatcatagaaattacaaaataatataaatattaaacgaagatggaaactcaatttgagagatcaacaaaattagtttgacgctactaaatttctgtaacttccatccacaactaattttaaaaaataacaaaataatataatataatggtctagcataaattaagattaaactaaaaattgtatgaatgctaaaaaaaaaaaaaagaaactaaaaccacatgtttgacaaaaaaaaaaaaaaaaaaaaccacataatcccttc

SEQ ID NO: 40248 - DNA, 1006 bp, Arabidopsis thaliana landsberg
  unsure (1)..(1006): unsure at all n locations
ccgagccatagccttcgaggagtttaatgggccttttagccgaatttaaatgtcttggcccatgaaagaaatgttttgggtaaaaagggattaatcaaagatttgatggcctctaataaataaaaaatgatagttagtacagtcttaataggaccaaatgttgtttggcttggacttccatatctcacatgcatcattttttgtttgtttcgaatttgacgtttaaccacgaacaatatatcacaaaactatacataaattccaagaaaaaaactcacggctaaaatggtatatggaccaagatgatccgcgaatcattccatgcaatctctcttatcattggttgacaaaacttttggaaccacaatacttaaatgcttataaaatttaatcactcaagtgggaagacaatgttgtggttagatttgtctgaagatgtctttttctttagtcaactgtctcaaagttgcctttgttgttcaacaatctttagccaagtccaaatcaattgccctccttcctccaattagaaagattaccaaaacatgttttgttttcttgttgtagttactagttacattgaatatgtgaatagaaaaagacttccatttttattttatctatcgtctcgcaaataataatacaacgtttgaatacaagcaaaacacaatgacaacaatttagacaaactctatttctgaagatggtcaactatgtattgaccaagaacagagcacaaatgacttggactgcaagtaaaacaatctgattttataacttctcacaataatggtgttggacaaccgaaattgtccagtaaatgaaaacaaaacacttgaaatttttgttcagatagatggttgattcattgactgctgcagaatcctaagaatcccatgaattcatggntatgtatcatctttatgctcttctctatcccaatcactcccattgtgagagcacttgcacaaatgactcctgagagaacgaaaacgattatggaagc

SEQ ID NO: 40249 - DNA, 513 bp, Arabidopsis thaliana landsberg
atttattatatattggttgagttaatgtcttttgatacataaatattacatacttttgaaatgaacttgtgaaaaacaagattacttgatcgagctttatatgaaagactacttcacatttcacagatttgtgttttttttcccattgtgaatcattctttcctcgagaagagaagataagagtacaattgtaaaagaatcttgattggatgacaaatgatttattttgataacaaaaaccaaaaactgactaaaaaagtagttaccatttaagttaaggtctcaatttattctctattgtaattgatcgtaaaattaaaatcttgacgagtcggataagttccgcaaaggcgaaaactatgtggaaaagagtattctttacttgcgtggaagaaaaattaccattcaatacaaagaaaagaacataattcaactcatttcacgttaaggatccatatgtcccattccataattaaacgtagaaagagggagacctttgtatcagaatttctt

SEQ ID NO: 40250 - DNA, 811 bp, Arabidopsis thaliana landsberg
tagagttctgtgtaagaataaaaagttacctagttttatatataaacacaacaaaatcaaacgaattaagtgtgtgctagcttaaacagaagatgagtccatgcatgtttatatatattattataccatgatgtcatggcctctgttcttaagagtggcatttgaaggattatagtctctattaagccttccaagatgagaaacaatgttaactctctcgttcataagatctatgggagattgcatctctccttttccacacatttcccattccggtttaagttctccccatctctctggccccttctcatcgttcttcttgtagttaaactcgtgttcgtcctctacatcaccattgagcaaattaaagattttcataattaaacctaatttggaagatatataaatagagagaagtttaaagcttacgtaccaacttctccatgacttgttgtagcagcactcgaaatcgaaacaattgtgaaaatactgaacagagccacaaacaagatgcatctgaatttgattgatgagtagttcaccatctttgttttataaaagagttgataattttagtctttaaaattttgattattcgataagttatattgagcttggttgggaaagacatgcaactataaatacttattgagacagatgattttgtatggatcgtcggattactagtccacaagacttcccatgctttcttacttccttccggatgacatctttgacttccccgtagaaaagattttttatataatctgggaatagaaggcagggtgtgaatcaaagcgtaattcatcat

SEQ ID NO: 40251 - DNA, 847 bp, Arabidopsis thaliana landsberg
ttatcgaatttttattcaaatcatgcaatgaaaacatggggacaatgggggaattcaatataccttttagcatataggcatggtcataaactaattaataagaatattgtttcttttgttgataaaatattgttcgtctccgaagaaatatatgtagggagatattaagttattatgatcgtttctaatgaagtgagacattaagacttattactaatagtagctaacttaaatggaaaaatgtaaaccgtgaaaactataatacttctatcaaacaaatgaaaaaggagacacatcttcctcttttatacttttaccctttttagattttattagatgtggacatgcaatgttgcataagccaaacagtaaaagttgtactaaacattatataaatgctcaactaaacaaagagaaacagacattataataatcgctagttttgtacttaagtgtggttgcgtgatagaaatatttgttttatagccatggtacgtattacctaagtacgtaggatcgtaaatgggttgagagaatgaatgttcttgatcccattttcttatgacagtattttgattttatgaaaatagggatttctcaattaattaagctggtatcatgagtaaaaaatcatttcaagcataaacaatcttaaacttttaaattgtttacgactaaagcttttttgttttcgtaaacacattacatttatcacaagatgcaaccaaaaagatttgccaaattctcaaaaaaaaaaattgatcaaagcgtttgcgttttatctttccttttattctttttgatgaaaaataatgaagaaaacaatttcatgcaataaattacttgg

SEQ ID NO: 40252 - DNA, 602 bp, Arabidopsis thaliana landsberg
catccacggttctaaagctggaaaattgctgacaaaacaaccaagagccaagtagatagtagcaaacagattgcggcatgcaacacaaggaagacaatatacagaaaggaataaggacaatacataaaaatctctaggtacatttattcaagctatatcaggaccaattccgactatagtgaaacacactgactgggattagttctattctattttacctttgagcatgctgctgcaagagaaagtccattcttttctcgtatggcaactggggagcccgacccaggatttgagaagccaacctctgctgctggtaagccaatttcagcctcatcatctcctcgtgctgcctaacaaagttctccattttcctaggcgagtcagcgacaatgccattaccatccatattatccggatatccaccgtggataaacttgcagctttctccattcttgcacaaacctctactaaaatacacacatggtttgcatccaccaccaaatccatcatcttcggacacaaaagacgcatcacatgagaaactcctcctgtgcagatgggtttcaccatcaccatctacagagtaatccaaaggaatgcta

SEQ ID NO: 40253 - DNA, 581 bp, Arabidopsis thaliana landsberg
cactcgccaagatcaaacactcatcctcatcagttcgatccgtcactgttacctccgttttcttaatcacatacggtttcaagtaattatcacctatacaaacaaaaacaataatcatcagattaaattcaaacgtgtaattcaaaatagcctaaaaaagtcaaatcacaagagagattcactcaccaattgctctagacatggcaagaactccaagaaccctagctccatcccaatatataactcgcccaccagcttgttggatccgaatcaattcatcgggtcgatccggctgttcatcacaaaacaaaaactcttagaaccatgccatcttgattcatactaaccaattcgtaattctatataagacataattttaactaccttgtgatctacggagagaggaatggctacaccgttacgacaaagcacagcccgtgaatcaccgcaattagaaacaatgatcttctccggcgtgacaaccgatacaacagcggtggatccgacggcgtcacactgaggagactgcaattcacatctacaagaatttttcatactccgagtagcaccattaacaacta

SEQ ID NO: 40254 - DNA, 356 bp, Arabidopsis thaliana landsberg
  unsure (1)..(356): unsure at all n locations
nnnnnnnnnnnnnnnnnnnnnnnnnnnnnnnnnnnnnnnnnnnnnnnnnnnnnnnnnnnnnnnnnnnnnnnnnnnnnnnnnnnnnnnnnnnnnnnnnnnnnnnnnnnnnnnnnnnnnnnnnnnnnnnnnnnnnnnnnnnnnnnnnnnnnnnnnnnnnnnnnnnnnnnnnnnnnnnnnnnnnnnnnnnnnnnnnnnnnnnnnnnnnnnnnnnnnnnnnnnnnnnnnnnnnnnnnnnnnnnnnnnnttaaaagtactatatgaaaaatcaaaaaggcgatggatataacagatatatacataaactgaaatataccagaaggtcactgcactctattttgacaaaagatccatcccca

SEQ ID NO: 40255 - DNA, 448 bp, Arabidopsis thaliana landsberg
gaacatattatcaaagaataaatatttttgaaacaaaaactttaaaatatggtattttagagaattccctatttttagcatataattgacaaaatattattaaagaattaatatttcgagactagaaagttagataatttaaatattatgaaaatattatattaaataatgaggttccgattcaaataggtttggatcacacaaatgcaagaaaggctcataaatagagagtcgtgaggccattatataggctcaactcaatcttataacttttaagaaaaccgggtcaaaaattaggaaggatcaaaccaacttctcaatcgcagagcggagagcacggttagggacaagagtgagaagtgaaagtcggacatttgacatcggcgacgactggcgacctgtgctaaggcatatcctaatagatactgcttcggatgtgaatccatac

SEQ ID NO: 40256 - DNA, 842 bp, Arabidopsis thaliana landsberg
  unsure (1)..(842): unsure at all n locations
taacgattcgccgacatcaataaatatattgttggcaacgaaaaatagacatgagtaataatttaatataatacttaccagtaagtttacaataattttgattgtcttctgatctaataaattgttggccaaaaaaagacctaataaattcgtggacttggagttgatgcagatctttagcagtatggtggtgttgaattcaatctttttggtccgaatgtctttaaaattgttcttgatattcatatccataaaattaatcgaattccggattatccataataaaaacaaaactagatacattttctaagtacattaacacataagaatatcatttttgtactaccaaaaaaaaagtaaaaacttatgtccatggtattattataattggtggtaaatcagtaaattagttgttagcaaaaaaataaaatttagttaaaaagtagtggcaccttattggcccaaaagagtaacgaagcaaaacggaatctgaaaactgttaaaacttaaaagaatagataattgagatataatatcgtatgatcggacggctgtgatctgatgccatcggatgggcacgtgtcagaagtgtactccaggtatcattctctctgcctcatgacatcagccgatggtaccctcgatacggcgccggcaaggctcatgtaatccattcaatttatgttttttctgctagcaaatagatttgccattgatttgatactctcaataatattatccgattaaggtatcatccatattgntcaatataatttaagcatataactggttccagattaaacaatataattataagagaactgtatactttacttaaaagt

SEQ ID NO: 40257 - DNA, 1063 bp, Arabidopsis thaliana landsberg
ttttgacgaattatcctaaaaatcaaaatacacacaaagattcgtcgatggaagtctatttcatcatatatttgaatttgaattttttatatagcattcttttgtatgttatgacattttctccatattgatcaaactctcttttcctaaataaaatttcatactgtccaatgactgtatattattccaaacaaatattcccattcccattttcattggcagaattgtctgtctattcaacaatgcttttcacttttgcctcgtagaaaaatagggccaaattcattttcttaatctccatttagtgatggtaggtttttcaataatgtcaacatccattattatacgacaacttttccaaacaaatcgaaagtttatttataattaaggtagttattttgacgatatatcatttaataaaacagtatttaattttgtgattctttttttttcaattgattcaagaaaaggctgcggacaagcttttgagaccccagttcatgtggggagatgcatatgtaacgtatttacatatcttaaaacaaaaacaaaaaccccactctttggtttaagaacattgtagtatagttatagtctagttgtttcgttttgtttgtcaattcttattggccacacacacactctttgatattgcggtattcacgtgatgattgtatcaagattagtcccaaatctgatctagtagatacatacatatatgtaataaagaaaagacttcactattgatggcgatgcttctttgataattgcttctaactacttacttgttctgtcctcttctaccgacagtcgaccatttattttagctcctaccgattttttttagtgtgtttgtgtgatttcgtttgatgattatatctttggtccacactccacagcacaagcctcgagttggtcgattctctcgtggagacaccacaaccacttaaatttaatctcttagggtaatgtatatgatatcatttcccgccaccccttggtcccattatgattctccaaaaaggcaatcaccaagtttgagttattcttgattattgtaatg

SEQ ID NO: 40258 - DNA, 939 bp, Arabidopsis thaliana landsberg
tatctaacaatattcaaaatatacgaacatgttcaaaatctaaaacaaatacctaaaaatactcaaaatatttaaaaatatcgaaaaggtataaaccgacataaccagatccgaatcaaaatcgaattgcatttatgttagtgcttacatgaatcataaactacaaaaccgctaggctcttatttattctggctgatatggggaaataaaggtagataaaaaacaagaaatatatcgttatttagttatttcaataataccacgtgtcaagttctaaaagtatagcctgactgctgacgcgttacgccatcattctcctcgcttgcacttcacattttccgcaaaagattttggtgaactttaggacaagatttgtcgttttgggtgcagcaatcactttcttttattactttgtatttgagacttttgcagaaccatgcaccgacacaagtcagattcactattctcagtggttgagagaatccaacggcatacaaacaaaacataactcgattatccacggttactgtttcatgttttatttggtaatgcgttccaaaacgctctatttttcaatttggtttaaattccaaaacactctttcacgtcatagtgtttttgatggggccctacattctccacacgtgtgatttcaggtgtcagcatgtgcactactcattttagattcttgtactataccaatgagttttacaaattttacaacaatatatttacttatatgtattaaatgtgtgaaaatcagttggtaagtatttaaaagtaattcttttatgtgaagggttttgcaaagttcttgccgatgcagttacaatgtcttttgctccttgcacatagttaagctaggctagccaaacccatgttttgtccataaaaaaaattgcaaagttcatattttaatataattaatcaattaataaa

SEQ ID NO: 40259 - DNA, 536 bp, Arabidopsis thaliana landsberg
tttcttgaaaacaggttcaattattgccacgtgggttataaaaattgtaacaatttgaagcttttttcaaattcacattatgctatttttgtaaaatcattttcttattggatgttgaaaggtggaagagagttgccagctaagttcagtagatgacattgcaggagcagttcaccacatgctaagtatcattgaagaggagcctttttgttgctcatcaatgtcagaattaccatttgacttctctttgaatcactcaaatgtcactcattctctctgagaaatctcttttttgttgttgttattccttcttttaattttatcacatagcacatctttagtttttttttttcagaatgaagaaacacataagctttcttttaaaatcctaggttctttttctgactttgtaaaggctaaatgtgaatttataatggcacataacatattagttgttttactcttaattttatgcattttctgatagtaattaagttataaattagtacacttgtgagtgtttgaattgtttaata

SEQ ID NO: 40260 - DNA, 260 bp, Arabidopsis thaliana landsberg
ggttttacattataacgtatgacgcctactcgtctactaatgtcaacaagaaacatttagggtaagcaaacaatttctagtaattaatcagttgttgacctatttacacattggggttgcacaatcaggcacatattccggaagcgagaagacatacgcatgctcttacgaataattgacaatacccattatatagatatctaccatgcatgaccatgttctgtttattatattagcctgtgaagattaatttattcaat

SEQ ID NO: 40261 - DNA, 123 bp, Arabidopsis thaliana landsberg
acatgaaaactgtggagcatatttgacatttccggaggagttagaggccttacacctttaacctgtaagaagccctgcaataataccgaataacagatattgaatcgattcagtaaccttcct

SEQ ID NO: 40262 - DNA, 232 bp, Arabidopsis thaliana landsberg
atcttttagacctggactgcaactattttattcatcctacaaacctacatgggagacacatattatagaagttgctggagctaggcagcgacaacacctataactgatttcgcattggcttcagcttcgttacgctccattatccaagcctctactttactgtgcccacatgagtactgtatcatgatcagacctgtgtgcagatcatcccgctgtggcccacggtgaccca

SEQ ID NO: 40263 - DNA, 785 bp, Arabidopsis thaliana landsberg
gtatatatcaataattcaatatcattgagccaacctactcacacttatattcccgtgacatgtggtgtaaaactagcttgccaaatctattctaatcctactctaagtcgacaagtcatgaaccacgtaaagttggatacgaatttagatgacatatactgaaatgcccaaaatcgcatagaaacttgtatatctagatttcagatacaaaaagtcgatcatctagagtagacaattctattgttgaattgtcatacatcaactttttagctaagtaagacgctatattaataaaattgtcatacaaaaagtaagaaaacgtttcacaacatcattactatcataagcatctcttttatagttttgatcagaaatgctactacaagaaaaactgtttaaacatctagacaacgccaaatgtcatggtaaataggattatatattttataaccttcagttactttttgtaagtttaaaagcttgttttgtttttcaaatacacatttttggtatataggtacctatttatcgtaagtgctatattaaaaatgaaaagcaaccaaagatgcaaatcatgtttaatctgtgatgctcacaattctgctcagccaatgcaacatattagtaatatggtaattcacaaagtaagaaaacgtcatcacaccattaccatcataaactaagttttaataagaaacacctagacaacgccaaatttcatagtcatgaggaacaaatccaacgagatcagaccactcgaccgttccatggatttctactccact

SEQ ID NO: 40264 - DNA, 961 bp, Arabidopsis thaliana landsberg
tttatttctatgctaaaattaaaacttaagcccatatatacttgatagattatctttaacaaatcacgtgatatcctgacatggcaaatggcactataaaccactattaattgcttccaataaataatataaaaaaaaatctagggttttcgcttagattcgcaatcgcatttgtatttgatttgcttcaatagtgcgacacaaataataacgtttgtgatctatgttttaaaacgaatagaaagaatattgcattttgtgtgtgtgtgtgtatgtgtgtctactgtgtcatatgtaacgaatagaaggaaatttgcatgtctagttcttatatctagtcatatgtaaggaatcatgttaattttgatcacaaaaacgccgatttattactttgacaacacgattgtggtgtggaaaaaaaagaaaagaaaaaccgtttgtgggtgggggcaaattttgggagaaaattttgtgaagtgttttctgaactttttatacccacccgactttagattttcggaatatttcggggagggtttcatctttcagttgtcatattatggggtcttattttcgatatccatcttcactattgagaaaacattgtggctcatcgaaaactcttcggggcagtagaaatacgtacatgaaatttatgttaaagtaagagtagcaagccaatctagttcaaaagaatgatctaatttgaaaatggggatgtgattatatattaccaatcattgttttacttgtataatatgatttatgatcatttgagagacatgggagctacgccgcataagattgtgttgaatatctattcaggatatatgaagttgtcgtggaggtgatacggaatataaatatgattctagcttagtgtaccaaagtttttaaaaatccaaatcacgaaccatataatctagaatatagacgtttggataatcatttcttgtcatgt

SEQ ID NO: 40265 - DNA, 442 bp, Arabidopsis thaliana landsberg
ttgctgatcacttcctgcgcattggacccgggtctttgtttgatcatgatggaagcagatggttgttcatccgtccaggaagtcatatcataatcctgcgtgccgaattcaatatctgcaatgtctttcagccgcagcactgaaccattctgttctgcgcggagaaccaggttgccgtattctttgggcttggtgaacttgccggtttaccggagcacatattgcatcggctgcacctgtttgcccgaactctcaccggtctttcccggcgctgcttccacattctgcgcgcgcatggcggtgatgatctcattcgcgctgatctggtaggcattcatcctgtcgggcttcagccatacccgcatcgcataatcgcgcgagcccatgatatgtgcaaagcctacaccatcaatacgctttagctctttcagcacgttgattt

SEQ ID NO: 40266 - DNA, 168 bp, Arabidopsis thaliana landsberg
aggttctggagcatgatgagcatgccacgtattatggagactggattgggctacggatcctgaggctcgactctactaagtcactgtctatgaggcgtcggtgaacactttatcaggctcacacctagaggccaaggatcatgctactgaccgagaggtgacagacgg

SEQ ID NO: 40267 - DNA, 884 bp, Arabidopsis thaliana landsberg
tacatctaatacacacacaatataaccctatacatacatctacacgtcattcatgatctcttccataccttatacatacatctatacacacataataaccttatacacacatgataaccctatacatacatctacgcatcattcataccctctatctatatacgtagtaatctagtctcttgcaccagtttagcaagagatggaaattctagactaagacacgtacttactatacataaacgaatcaacgttctctcgttccaccgccatcttccaaatggaacgaatttcaatttccgtgacaatccattttcctccttttttctccagcctctacaacacaaacaaaaaacaaaacatttcagacatcagtttgataattttttccaattaaaactaacaattgttctactatcataacataaatgttttcttaggcataaatagaggacattatatatcaaaccaatttgtttacttttctactccatcttaacacatcgcatacaacatttatgaagacaacaacatttcaagccctcatcttatgaacacttttttttaacacacttatataagagcagtatctaaaagactaaaacatggtcatggttccaaaaactatactattaattaagccaaacaccatagctaaacagaaaaaaaaaatgatggaaccagagtcttaccttctacgatgatgatgcctttatgtttgtctctgagaaagtgagagaactaaaaaagagtctgagttggatattcaagtggaataacatattaagaaacaaaagcagagttttagacatttgaaagaaaaggaaaaatgaatggaaagaatttgaccttgaacgaaatgtaggggtatgatcacatttttaatt

SEQ ID NO: 40268 - DNA, 859 bp, Arabidopsis thaliana landsberg
aacaggtatcgggctattggtcagaacattgtaaacagtttctctgagattaccatcttaagaaaagatctaacaccactttacatagctaagttgagacttctgtaatcatttaataataagttccactatctgattagattgcttcagagaatgctcggtttgagcaaatatggcggagtaggaagggaaacaaggaaggcatccatgagaagtgtcatttctttgacgttattcgtgttgatactgaagaaagacgagacaatgcacaagagtaagtcccctagtaatgtgcatttgtaattaagatctcagagtcagaaatagattagctgtagttcaataaacacagtatgtaaaggtttactctttctgtaggtttacatccctggaggaccagaaaatgctcgctagtttcttgcctctccttagcggttgtattccttcggctgctggagtgattgtagctgatatcctatctagtcgctccgttgaatacgtttctgattcttatgctgtgggcgaagagatggatgtcagcgaagatagttccaagattcagtttcctctgtgcgtattcgttttcgtcctttactttttcgtcctttgctttttcgtctttgtctcttgtgtcgcacctgttgatatggtttttttgttgtttttcagtgtcatagtccagtggttaagaagaattctgtgatggatctgatgcatcaggctacgcctctgatgattcaaacggtactctttttttcttccatatgacttttcttcactcttttttaaacgtcttagaccccttgtacgttactggttgtagtgtttacgtttgctttttccacggtccctgtttcgt

SEQ ID NO: 40269 - DNA, 429 bp, Arabidopsis thaliana landsberg
  unsure (1)..(429): unsure at all n locations
acaatagtattggtcaaaagattcaataatttatttgtaattttgtgacaactggtaccaaaagttgtgtgagtggtgctaagatagacttatatcaaactttcgtataataagaaagtttttttttttgtacgtttgtcaacaacaacatgcaaaaacatgatattttcaaataaaaatagcatttttcatacagacagtgcaagtttaacgaatcaaatatagccttttcattcataactaatgccgaatctaatctaaacgcacgatgatgcaaaatacaatcaaaaccccacgacttctttcaagaattatgaggccatttactttctcttttgtttttctttggtacgtaaatntacaaatgtgattgatttgcctactaaacgaatttttttgatctacccttatgtattctgatagtaaatg

SEQ ID NO: 40270 - DNA, 514 bp, Arabidopsis thaliana landsberg
ctgttacgtttctgacacttcccattgtccaacaaactcttaaaaccattccctaactcattctaacataccactataacaccctttcttttcactatccttattatcccaattcacaatcctagattcctccaccgcccatttctccatccggttcaaatacttcaagtaaatcaatatcaaagaaggaaccagtgaacaatcaaagcctaacttctcagccactacttcccacaaccttttcctagacacagtatcaaacccttccctctccctcaccaatacaaacagcttaaacaaatcaacatttttgccatcacctataactgcagggagaggctttatactaccctcttcctcaagaaaaaccaacaaagcttgatcaaacaatctccttaacctctcctcacattcatcaacatacttaatctcaacatcaacatatgaacatgaagtatcattaaaacttcccatcctgccattaaaccctttacctcaatttcattgctctaat

SEQ ID NO: 40271 - DNA, 301 bp, Arabidopsis thaliana landsberg
  unsure (1)..(301): unsure at all n locations
ggaggtcttataccaggacggcagagaaacttggtccgatttcttttttcaagaaagtttttggaaatttcgctttccaattccaattcgggtgtgaatcacctctnnnnnnnnnnnnnnnnnnnnnnnnnnnnnnnnnnnnnnnnnnnnnnnnnnnnnnnnnnnnnnnnnnnnnnnnnnnnnnnnnnnnnnnnnnnnnnnnnnnnnnnnnnnnacgcgtactcaaattcgacggccgagcagatggaacaacatgggcgatggtgaagggatcttcattgaccaaaacggttagcgaagg

SEQ ID NO: 40272 - DNA, 514 bp, Arabidopsis thaliana landsberg
taaagcatccatagagttgaagtccaaggaatacaattcctcaacctgcacacctttcacttgcatttgttgtataatctcagtgaaaatacctaaaaatatagaatacagaaaaccaaaaaatatgaagaaataacaaacaagaaagcgacattggtcttactcacatatatggcacaatggctatcgagagacactaatccacttagtataagacaaacaccattggtgatatataatttcaaaaagcatcaatacttttattttccaatcctcacacagtaagtatcacctcttgtatatgcagaaaaaactattttcaacattttttggcttctaatttgacaaaatccaaacataaatcagattctacaggaagccaagactattttccaaacatttttagtgctccactattaaaaccttgttactgacattagctctgtatatagacacaaaacaggagccccaaattggccaagagaatatataccatgatcagattctacatgaa

SEQ ID NO: 40273 - DNA, 787 bp, Arabidopsis thaliana landsberg
gagttgaaagcaattcttttccaacattggctggatctaaccaattaatcatcttttgtaaatgagtctaatgcaagcttagagagcttagaaaataattttttcaatcagtgattttgaaaataaaaataataggttagagcaaatgtatttatattcaataacaatttaccaaataccaagataatatataaagtaattaaagttttcagttctgcttagttttgagcaaatatagtgataataagacattttactttttaaaactcggaaaggatgccttgtttttattaaacctaaaagcagtatttaaaatttcaaatattttttaaaatttataaacgaaattcaagttttgtgcaaatttgtttttaatataggatagagtgataaataagtataaactgaagtatacgtaacttaattctgctttgtatcctttaaagtgttgctaattgttaacagctcattatttgttcaaacaatattaatttatgtatctatattttaagaaaatttatctataatatataaaagaaatatattctttctaatattatataggaattgacaacaaaaaaaaatcacttattagtaatatatcaaaaattgtactaaatttattttttatgaaatcggatccggtatgcttgcttagattatactagtactttataactaataccatttgccaaggaggaaaacggtgtctgagaaaaaaaaaaaatctggtttgataataaattcattcatgtaagaggtattattgtttccaattcaatttcta

SEQ ID NO: 40274 - DNA, 3913 bp, Arabidopsis thaliana landsberg
  unsure (1)..(3913): unsure at all n locations
gtgatggtttaaggtaacagatttctagctatacttagattttagaattaattgaagaatacaaaggttttaaagacaacatacgttagttttaattgacgtgttgacctattttctcgcaaaacttcacaattaccatgtttaaagatgatgactaattacaacttggaaaaggttaatcgccatttacgttccaccgatctccgtaaactcttttcttcatttggccacttttatctaatcagaattccatttttttctcaaccaaaagggaaaaaatggagttcaataaaaccaatcggatcatcgtgatcttcacggtttctattttggtcaccatttctacgcatgtagaatccagatcagattctccattnnnnnnnnnnnnnnnnnnnnnnnnnnntatgaaacctatcgctagtcctgcaaattctccggcggagatatatacagactctcccgctgcgtctctagaagctccggcnnnnnnnnnnnnnnnnnnaatcctccgtccgagatagatatctactctcccgcaacgtcaccagaggctcttgtcgcatcaccagaagctcttgcggagtcttcctctgctgcaccatctggaatcaaagtnnnnnnnnnnnnnnnnnnnnnnnnnaacccgccattgttatctccggagatcaaaaccatttgcggcaaaaccgataaccctccgttatgcgaatcttccgttagtcctctgttaacgcctcaactgaaaccagacacttcctcggtcctcattctcgctattcaagcttcgatcaccgcgaccaaggcggccatggccaccgtcgaaaaagtcgacgacgcctccgattgtcaggagttatatgatgacgcagttgtgaatttggaagaggcagttaacgccgtcaagtcaagtgacattgccaccgttaacacaaacttgagcgcagcgatgacagattacagcacgtgtaacgacggttttgaagaatcgggagagcctaacccgttggctgacgtggccgataagcttacgaagatggttagtaactgtctcgccatctctacgttgatcaagtgaaatacgacagcgttttgaatcgtgaggatataaaagtgtctttgttttctttaaatttgggccttggctgggtttgaacatggtactacgtcgttttcgaatatccaaagttccaagtaaagaacgtgagagctctacttaggcttacggtgtaagtcggtaacgttatcatgtatctcattgttgtgttgtcatatgtggatgttatattctcgtgaaacaaagtgatatatacatatatatatatatatataaaaatatatacaaaaatgtatatgtagagatagcgactcgtttttgaatctggtaaaactgaatcgattgtacaaatgttaggttacttcttgaagatgaattaacaatgtgcactaatttatttgaaaatatcagttatgtcaataatgtgcaccaatttatttgaaaaaatttctcaaaagactattcatttcatatatatgatatttataatttagcaaaaaaaacaatttgcaccaacaatattcggggaatgaatagtcttttgagattttttaatatgtttaggctaattggactccacactatatttactaattgggttatcagtatagtgagagaatgaggagaatttgagtgaaaaggtaataataaacgaaagacttttagtctgatatttattttcagtcaagagatattttaaatcaaaaagaaaaatgtttttaccaaaaaaaccaaaacaaaaaatgatatagttctcttttctctctcatctcctatcttgtttgtgttctatttcacatctctctcacttctctccctctttattatttatacattacctttacccattggataatagccttaagttcctaacaattcattttccgaaaatcttgaaaaaaatgtgcgatcttcctttaggtcgattaaagcatctcatgaaaatttataaacatgtgtttcttaaataaaattaaagtatgaatatagataaatcatttttgtaatcatgagtttcttaaatttataaaaacttagcttaattatctcttaattagcttaattttcctcaaatattttatttttaatcaaagtcaattatataggtctgaaccgactagaaagtagaaactgaataatttacctgaaccgaagtctaatagaaatcggtagaaatcacatatttggtttggtttagctcatattttacgagccttgaaataattgggccttaatattttaagggcccaacccaaaagctgaatcgtcgctcgtcttagtcaacaaccccgacaaagaaacgatgagcgtttcgccgacatatttaacgggacggcatgtaagtgaagacccgaaaaaaaaaaggctaaaaagaaaaaaagaagggaagagagaaaatcagaaaaatggagtagataaagattttgggacatctcttccacatttacccttcacttaaagccaatcctctctcgagagacttcttcttcttcttcttcttcttcttctcaactccattatctaattctagggtttttctctccttcttcttcgcacttctctttctctctcccgccgcttgtttcttctttccctcgaaacactggtgttactgtgagattctcgtttgaatttaggggatttcttaacgaattcactgagaagcactaattgcgaagaaggtgttgttagaggtgggtttagtgtatgcttattcgttctttaggtttagatatcattctacttgagtagatgcttgatggttttggcttctctggtttcattagttttgtgtcaattttgagaatgctatgtctaattcaattttgagaatgctatgactaattcaatttgagaaagtgcatgtagttcaattttaaactatctttctctctggggaaaaaagattctgaggcttagttatgttcataaattgctttgagtaaacatttttcatgcagttgttatagttcagttacatgtgtatattgaccttgtttactgtggtcaggtattttgctgcatctacgcttgtcctgataatggaggactctggaggttctgcttctactttagctggctttacgggtaggagaaggagaagcgctctgcctcgtcgaccccgcgatattaaagggagcttgcatagtttcaagtttctgccaccctcaacgcagacaaacactgctcttagcaatgaagctaacccaagttttaggaataccaatagtttatgtgggtctgtgagtgagaacaaactgaaagtgaagcttaagcttggtgctggtgttacccgtacgttgcaaaccaactctgaggcgggtacttataccaaagctttggtaaaggtcttatctgttaaaagctttgagtttgtccttcattatacttattgttagctttctttctttgctgatatacgagagtaatgcaggataatggacaaaaaccatttcaaagtaaggtaaaaggcaatggtcatgttcagaaaacactgtttctaggagatatacatcaatctagaggatatccgtctaagactgagaatggtgcgtccatgtccgagaagagcaaacgaggtcttaagaaacgtgtattggatccagagccagacagtgatgatggagatgaggaaatcagatacctcgtaaagttaaagtctaaaagggtcagggtctctcatgaaggtaaagagagtgaaggaggcagaaggatacacagcagtggtcatgacatggaagacggaaaacatctctcatcagacaaacttgctgtgtccggaaggaaaaagccggtgatgggaatggttgatccgctcccggcaggagaaacaagcggacaaattcaaactacaaaaac

SEQ ID NO: 40275 - DNA, 577 bp, Arabidopsis thaliana landsberg
cgaacatatcacactatcaacattgcttagcctgcttatatcctataagctaaattaaagatagaaagaaactcacaggttgagaataagagagaggcatcatagacttgaggatagacagaaaatgattcatctgttttctccggttacgctcgacggcaatgtgattcatcctttgattctctttatctacaatcgttttttcacttctccttctcctcttccgcgacagaaagtcaccgcaaccatatctttctcgtagaggagataacttttcagttaagtgagatttttgctctgttatggagcaggagagtgtcgctgatgaataagaagaggacgaaatggaattttgctgtgacgccacgtcttcagagttcgaaacgacgatgttttgaaagtaatccaacatttcgtaacttaaggatgtttccacgagtgaaaagccatgagggtaatcttgttggaacatcatatataggccttttttttttaaacaaacgagcacaaaaagaaatgaaggagtaaatgcttaaaggtaatcggtacgttatctttacacaaagtatagttatgc

SEQ ID NO: 40276 - DNA, 103 bp, Arabidopsis thaliana landsberg
gcaaaaataaacttaataggagaggtttcattgaaatccagcatcccaaagcccggtgcagaaacgctatagcgtaatgtgattattgaggcgcatgttcata

SEQ ID NO: 40277 - DNA, 578 bp, Arabidopsis thaliana landsberg
attacacgatcttgcaggacaagaatcgtttaactagttaatgatgattaaccgcggtatagtaaacatttcgcgtagatgcaatatctgcatgcatgtaaaagtatatcaaattaattaagaagaagcgacagaattcccaaggttaaataagtaaaaccatatgatatgaaaacaaaatattttttgttggaacgtagcaattgaagggagagggtaaggaagcgacggtcgagaaggaaggagaagtgaccggagagtggtgatacttgtgaccggtaaggaccaagttgacggaagttggcgtcattagggaaagcagcgtctaaagagagcgaaggtggtgaagaagaaattgacggcaacgtccactcctgatatcttattaacggctgatatttattgttcttttgttagtttcagtttcctctgcgtatttaattagttcatgtccttgtcgatgtgcttctcttgtatcatgtttgattttctggttattacaattccattagcttactaaatatgctttaacaatagatatgtacggaattgtctagtagtcccatgtgtaattacag

SEQ ID NO: 40278 - DNA, 668 bp, Arabidopsis thaliana landsberg
  unsure (1)..(668): unsure at all n locations
tctctctctctttccccgagtatggtgagagtactagttagcagtaatggagagagcaagagactttaaaaccctctttctctttctctctcttttctattttttcttctgtcaatttaaaaacccatcagttacgccaatttctaaagagagagttttcttttagcgaatctgtaatgaatgttgaagaagcaacaaaaggggtttgggagcactaatggcggctttagcttaggtgagaaagtctttacaaggaagagatcatatactatctcactttctctttctagggtggctctgtagagaactaagaagagacattattacggctaaaataaaaaaaaacctatctctttcggatttgtaaaaattccttttttttcttttgttttcgtaatcaatttcttgcctaaagcgaaaccttttcactcccgaaatcatcgcctttgcactcttctctttcagattctcttccgtttcggtttttccttcttttaatctctcttcctcttctctaaagtttgaacctttttttgtttgtgtgtgtgtgttgctctcatgtgggttgtgtgaatggcgacagtggtgtaaaaggtccattagtagttgtggttgggtgaaagtaagagnataagactgttactgctttcgaaacataattttaaaat

SEQ ID NO: 40279 - DNA, 470 bp, Arabidopsis thaliana landsberg
gatcgctctcctggcgacgcgaatcggaagctccttatgttatttctgagcagaaatcaaaagattcctctcagtaggtttggaaccaaactccatcatgtatctaaggctaacaccggtttgcttcatgcaaccccatttgtgaacatcttcgatcaaactcttcgggaacatttcgcaggctttcttcactgccataagcgtctaagagagagaaatgattagaaaccctaacgtcgcccgcctccgtcgttctccaccgttattatcatcgactggacgaaagaagtgcgaagatgattggtggacatccagaaacagagaagaagaggattggctttggcttatggcaatcaacatgtgctgctaatatcgttgttttttttgttttggccgctaattttcttggattaggatttttactctttctggatgaatatttttttagtatttacctgatttggtaaaaa

SEQ ID NO: 40280 - DNA, 1053 bp, Arabidopsis thaliana landsberg
gcccattgcgtacactgtacatcatttctcggtaaattacacataattataagttgattaaccttttaatgttttaaacaatgatgtaagtaacttattaaaaattggtttttaaaaattgaaagttatatactcaagttggaaaaatattttacaaatatactcgattccactactactgtaattttgtgtggaataccagtcaaacagaatcgttataactgttaaaaattagtaaaactgtataaagtaattttaattcgcgggaaatcaatattcggaagcaactttaacaaaaaaaataaagaaatgtgaagagaaaaaaaaaactctgaaaacttcctttataatgtcatcatcactgcgagacccaaagatctaaacagtttctctctctccctcacagggctctctcatggcggagctaatctgtctatttcactggtgattctgtttcactatctgagaatttgtttagagtttccgttaccgagtcgatgatgagtgaactcgatctcgtaacgagtcagaggatgacggaaacacaccgcacgacgacgacgtttcttgatttgctccgacgacagatgagcggtcacgatctcaccagaaggaaacggacgttaaaagaacggttgagattcaaatgcatcggatgctgtggtccaacctggaatctccgtctaactaacaacaccactcttcacagtccaacctcaagagacgacgaaatcgaagaattacaaattgaaaccggactcgttctcgaatcggatcatggatcgggtacgggtatgaatctcgcgacggcgttagaagctgagaggtataaccgtggagaatcgacggaggcggaggcagatatgacgccgaggagagtttcgttgatgagattgttggcagagacggcggagaaaatctgtgatgacgacggaaagaaacggagttttaacggcgtctattggacgttacgggtaatgttcggtggtgtgcgtgtgatgggagaaaggaaggccttggtttattcatgtggtatacttttgcgagtgtgtt

SEQ ID NO: 40281 - DNA, 668 bp, Arabidopsis thaliana landsberg
tttttttaaaaaaaaaaaaagaagataagagttcattatctaatttaatacaaaaatatatattcaccttaatatagatattataactaacaattgttttatttcatatctgaataacacgtttaatgctaaagaacatatctcaaagtcacttatgtatcgtctccatcttaaagtcacttctgtatcatctccttacaccaatcaaaggttagttataatgtaaatctttttaggcagatcgttcaaatactttctaaccaaatacttatgagtctgatgatgaatcatgccaccgtatgaataaaataaatcagagaaatctatattaacatcatgattacaataagttaaatacaataagataaatcaaaaaggaaaacgatttatactaaaacagagtgtcagataattacatgtgcaacaaccaatactaactatagtgtttcaccagttgtgttggtattgtggcgccacgaatgatgtatttttcacctgcactcgccaagccgtcttgcacggcctgatgagaacatgttagtacagttggccaaatgaattacgaaaatgggctatgttgaaattgttttcatgggcttaagaaagagagactagacttgatcttgcaagttctccttattaatatttatataagaaaggttgttgtc

SEQ ID NO: 40282 - DNA, 550 bp, Arabidopsis thaliana landsberg
ggtccgttaaaccgttccaaatctataaatatatcaccgatttgaaaattgaaactttttgcgatttctaagatctccaatggcataatgatttggagttcagattcatgcttcaaatccaggaaacaccaatgtcttatcttcctcaagctatgttcctcaattaaacaccttctacagatccatggtcaaatccatgtctcctctctccaaaatgacagctttatcatcagcgagcttgtacgggtttcatcactatccctcgccaaagaccttgcctttgcgcgaacccttctgcttcactcttcagattcgactccttctacttggaatatgctcagtagaggctattcttcaagtgattctcctgtggaatcgatttgggtttactctgagatgaagagacgaggaatcaaacctaataagctcacttttccttttcttctcaaggcttgtgcttcgtttttaggtctcactgctgggagacagattcaagttgaggttttgaaacatgggtttgattttgatgtatatgttgggaacaatttga

SEQ ID NO: 40283 - DNA, 986 bp, Arabidopsis thaliana landsberg
tgttatcttcgcatgttgttttcataatcactatataataatagtatatctttagtgagagctttttaggtttggatttggttagagtctgtcttttatataataaaaaagattgtaagtttgctagctattgtactgacttacaactccaatatgattttatgtggtgttgtttataaccgagagaatgataaatattatggtttcgaatgaagagggtggaactaaacgaagtggataaagaacggaaaaatggggttgaatggtttaaaaatagtagaaacttgggattacacatctcagtttaggaagaatacacacaaatctgaccataggcaatttatgctgtgttttgaaaaacaaccctctcaacgggatgtttcaacatgatgtgaggttaaatccatgttttggttcacttaaagcatattttaacatgtctagttgttccaataactacctggaatattttatcgtttgtaaatattcaaatactataaaatccaaaggaatgtctctgtctcttgttctgaaccgtcatgcttcggttgacaccataatatgaagtccatgttctcatataccgatgttgatgggatagaaacactcccaaaatcgaaggtacagcagatcattgtgattaatcgtctccgatcccgctctggtccgtaacgggacagaagatatcatagttacatcccacaatctcttaatctaaaatttactaccatataatctaaaatggtgttccaacaaaagtgttttaagtttcgaaagctagctctctaatttttcatgtttgaatattcagataaatcaaattcggctttccaccgagactaaatgaatctgatatgattagaggacatgttaacaaatatattctgatcataaaccactaataattgatcatacaccatcaagattaatctattttaaaaccctggacttacttttaatagaaaaacccctcaactaaaaacttt

SEQ ID NO: 40284 - DNA, 258 bp, Arabidopsis thaliana landsberg
cacagagcttaatgacgagggcgtttcatctgatcattgactgcattactggagacactggatctattcaaatgctcgttacgaatctttatgacttacccggagaatatgtgccgatgaatcctgagatctttagcgcaatgagagcagggaacgtaaagtttttggataagatgaagactaacaacaatacaccattggcatgtttcaggaacgaaacaggagatttcactcttcaccttgctgctgcttggggtc

SEQ ID NO: 40285 - DNA, 771 bp, Arabidopsis thaliana landsberg
  unsure (1)..(771): unsure at all n locations
gaaaatcccgagttttaagaagaagaaaaaatatagatataggattgaatggtaggacattagttttaggctaaccggttggtcaaaagtaacacacacaaaaaaaacaagaaagaaagaataaaaacaaaaatagacatccacaaaccgtataaacaatagactaatcgattcattttagtatcttcatgtgcaaggatgacctacctatgactaagaggaagacctacatggttttctttttatttttaattcataatatatagtaagtttcaggtagagaaaacatattttttaaagagtattttgtatcaaagaaacatcacctagaaaatttaactttcgaaaannnnnnnnnnnnnnnnnnnnnnnnnnnnnnnnnnnnnaaatattaaagaatgtgagtgggtgtgcatatgtgtcatgtgtatctctttgcatcttccatcatcactgtcatacatcacccacgattttaattattttatttattattatccaaaaattttggtataacaacaaaattttaaataatcccataatcacctgatgccataatataatatatgtgacttcattttccattaccaaatatatgatattcccggatatcttgggatatttcctgatctaatctaaaataatgttttaaattagattataatgttttgcaaaaaaaagttatgtttttttatccaatatttctttatttagtctaaaataaagatttaaaataagaaatgctttgtggtacatatgtttatgtaattt

SEQ ID NO: 40286 - DNA, 1060 bp, Arabidopsis thaliana landsberg
aatggggttaagcataaggacgacgacttgggcctcaaattttgtatgcgtttgcatttttaaaaaatgaatctttagtctcaagtaattgaacaattcgttcttctttgctgctaactcagtctaaacgcaaatgcacaacacacaaaccaaccaaaaaaaaaaaactttagtttgcacttcatgttgtctcttcatgaatgcatttctacatgtagatgcatgcaaacgcaagaaattgatttttgtaattgtcccatgtagatgtttattgtaaattttttttttcatccggattgaacaaccaatcatggagattggagattggagtctggagagtaatatcttaattttattagtgttattgacaaagctattctgttccggatataggaaattttcaaacgtgtaatactaactttgatgcattcttagaaactgtattacttacctaaaagagtcgatttgtggttgtattgaaattccaatggctcttcttaacagataaacacacaaataaagaaaatcttcatagaagacaagcaaaaacattacaataatcactaatcattaccatgacttacaatgatacaaataaccatatcattacacaaatctcacctaaaccttaacattcattattaatgtaaccactatagtagtatattactaaccaaaaaatctcaatgagatttggcatcattgatctcaaacatgaacaatcaaaaatgaattttgaagtataacaatttaaacaaacaacaacataatacatacctgtttaaaactgttgttagtaagaatcaaactctagatataatcctgtccaaaactccatcaatagcaatatcaacagcatctttcttattcatcaatcccattgaagctccatgtcttctatacataactctaggcatcatctctataactctttctctcattctagtaacttcttctttaggtatactcatcaacacatcttgtattctaactcctctaaacactacatcttccttcggaatcgtaaccgaaaactccgcgaattccgactccggtaaat

SEQ ID NO: 40287 - DNA, 559 bp, Arabidopsis thaliana landsberg
aatatgaattcgtgcagctagatttcacctttcttagggatgaggtgaaattctaaaaggtaattatgtttaaaaatcagcgcagataaacctttgaggatataacactgtatagaacttatgtcaaacttaaaacgtgaaacttcagacccaccaatttgttgaatatagacgatacaaggaggaagcttttccttatgcaaatgaggaaagtgttctaactccatcgctgaaacctgtcagtaattagaatcatttaggagagattccaggttaccttcatttatcaattaaaggaacttatcacatagaacaaacctcctgcagaaattctggcaactcctcatatatttgcctgagctcatccaactggtaaaataagaaatgagttacttgcaaaaaacaaaagattagtggtatgacaacctgaacaaaatgaacttctatgataaccttagcacagaatacttctttaaccaaagtttgatatcccctctctttgcttgtagtgacatcaatgactgcaatgacctgaggagttattgtctgttgttactaa

SEQ ID NO: 40288 - DNA, 707 bp, Arabidopsis thaliana landsberg
gatctctactatgcttcttcttggagcctgctcaagttctttgtttaactgtctacctccagtactccaaggggcaagagatagtgaacaacaaaacgacagcggatgttgtggggaatgttcttctggtgactatcgaaggcgatgatgctcgtatggtcagcattgatgtcttgcatctggtaagtggatcacacacctaattggtttcgttagatgatgtaaataataaatatattgctaaaagatgttttggagaaatgccgatgattaggttgtaggttgtcgtgcttttgagaattttcttttgacgtgaatgtaaatggatcagcagggccatgtcaaggcaatatcttcagtggcagcctaatgcattaggagaaagagcacatgtgtgtttgtttcctttctcctttccctgacactgcctctcttttccctactctctccctcacacttccctttatcagatatatattctaggatttgtgagatatggtcttacataggtgtagttagtgtttttgtttgatatcataggcaggggccagctctaccttacataggtgtagttagtatttttgtttgatatgataggatgctactctatctgtatctgcacatcttttgtgatataggactgtgtcatactttatgtgactgatgaatctatctagaggttcatcaatctgctaaccttttgggct

SEQ ID NO: 40289 - DNA, 391 bp, Arabidopsis thaliana landsberg
tcggcccaggcccgggccatccggccgggtgtgtcgcgcaggtgttcggagtcgagtccgacgccgagcgcgtccaggaaatcggcggctgctcgttcggcccgtcccagatcgatccggtccgtggccggcgctgcgacgtggagcgcgggaaattcgaccgtgttcgccagggtcatcgcgtgctcccggtggacgcgtcggcccgtttcggggcgccgagcggtcgatcgtaggtcgaggccagccgtgccagagccagcgcgccgaccaacagccccaggtctcgcagcgccacgtcgtagtagccggagtaggtcagaaaattgatgatgatgccggcgagccagagcgccaccacgtaagcggcgtaacgcggtttgagtgccac

SEQ ID NO: 40290 - DNA, 637 bp, Arabidopsis thaliana landsberg
gatgtcaagaaaatgtttgattagctgtagcaattagaaatccaaattttatccatggaagaactttttattcatgtcaatattttaaatccctgtgaactaataattacatctcaaagttactaagaaaaataactttttaaaaataatttttaatctatgttattatcatacaaaccaagaaaactaagctttgtatgttaaaataaagattatacaaagtaagtattcatcatcttaattttaatgactatggtttacttgatcctgaggttgttgaggatctatctttatcaatagaggctcacttaaatccgtcgaagtatcatcagtaacggtcagctccggtaaggctgcaaccgcttcgtttatgtctcctccgtgctctgctaaagcttttcttagagcgtctttcgccacctttgtaacacacaccattaatatcactgcaaagaaacatataaaagaaagtgctggtaacattagtgattctgcggactcaaaggaacttgtaacattagttatgtcaaactaaccggatattacaaggctcgaaattaagaacgcctgcaaatttcggaacacgggtcagaaaagagattgaaacaagaagctgagaatgtgattacacaaatag

SEQ ID NO: 40291 - DNA, 224 bp, Arabidopsis thaliana landsberg
  unsure (1)..(224): unsure at all n locations
caccggaccccaaggagggataaacgagaaaataccgccagacaacccganggaaagaaaagcaaaagggccaccccgacaaacggcgccggaccaaacagcacacaaacggacggcggnaaacaacgaanaggaaaaaagacacccacggacaccaacaaggaaagaagacanggccacacacgcaaaggggagaaaaggacaaccaacgacaggaaccagac

SEQ ID NO: 40292 - DNA, 161 bp, Arabidopsis thaliana landsberg
gcttaccaacctgatcttgtggccgcgggcaacaaacatcccagaaccatttcccgtgggatgtgtccagactgtgcaatgactgcatggtgagctctcattgttgcggacggaacgctgcggctgtgaagacgagtcgccgcactgttacggggtgggga

SEQ ID NO: 40293 - DNA, 810 bp, Arabidopsis thaliana landsberg
tacgaagttcttcatcttttccaatcagtattattgactctggaaaggtcaactgcggaaccctcaatcatattctttttcttttgcatactctcttaacttcactctgagagatgttttgaacagtgtctacttctagatgcaattgaatggaatagaaaaattgagaagcaacgggaaaaggatccatcgagaattgattttctggatgagaaagattgcagagcattgaacattaatggggtaggaacgtttcttttcttactaaaaaggagtttgcagttataattcaagatatgactgtctttaagtgttaactcactttcctagtcttttttttctcgtatgtgccttcatctgcatatgcgtccatacaaatgtacattaaatatctttcacaccgatgcttcccaaactgtttccatgaatatgccataggaatcatcagttagtgattcagtgcgagctggagaaactcccccgcagcaaattgttgctgttgttcgacctgctagcttcgcatcttcaaaagtgttgaaaaagttggatcagaaacatatcttgaagatggatggaaacatgctcatggaagtagaatttcaagacacaaacataaattcaagggatacgaacaccaaacttttgtattcacataactgtttacctacatcttgtagcgggttccatggtctctacatctttccacttgtcgaagttcccgaacatgttcaagaaaaacaggcatttacaacttatgtttctctattgtaagtaatgttataatctttatctgccatttaaattttccga

SEQ ID NO: 40294 - DNA, 908 bp, Arabidopsis thaliana landsberg
  unsure (1)..(908): unsure at all n locations
agttaaataagtttgcgaatagccgcccgtaaaaaggaacccacccgcatccgcgtggatattttagtttggtaatggcaatggcaatgtcaatttttagacgtagcttagccagtggcagagtggtaatttctggtaaaagtacctatcaagtgagcccaaactgatgccgtgatccttaagagtatttcccaacgtaaagtgatgactgcacaagtcgagtcgttcggcgttttatgtgcgctggtcttgtcgttttgcattctttgtctttttcctcgttatgttttttcttttagtttttagtttttaccaaagcgacgaatcgaatataaatgggtataatatcggtaccttccaaattaaacgtcaaatttcttttcactattctttccttgttcttttgatataaaccaaaaaattcatcggctgttatgacactttaggtacgtctctttcacgtgtttggttataatataactaatgaattcacatgtccaagaaattgactatagaaacaattacgataaaaaagcttttggttgttggcgaaaacaaatagaaaataagtttttggtcaaatgtaagcaaccatagagaactatgaaagtcaatgttaggaagcaaaaatttcatatggagaatgtgaagttcgttcatctgtaagaatttagttgatagaatggatgaaagatgagatttcgagctcaatcgttgttgcaatatttgagtgttatgttgcgattgcgaatggtgaaaaagaaccgcatttgtgacaatagttatattactcaccatatgatcgatcataatgctagtgtaacacaagtcacaagccgattattcaagctcatcaancagaacgtaaagaccgactcagctcaatacatgacacggactacgatgat

SEQ ID NO: 40295 - DNA, 3490 bp, Arabidopsis thaliana landsberg
  unsure (1)..(3490): unsure at all n locations
gcatgcctgcaggtcgactctagaggatccccaaaatagttttttcactgtcaagtattcggttcatattgtacatgagcttttcaaactcaaacatgaatatcaaaacttcaaagtgtttgaaaggtcactaaaaaattaatacagcattactaaacacaacatatgtatataaatatcatcatatactttggtcactctttcttttaacttctttttttttatttggttaaagaatttggaattatgttgtagtgcatgtgaataagtggggtctagacgaaaaagattttcctgttttaagtgcgagtccatgacgagctttttcatcgtatttcccatatccgaccatgtttatgacaacgatatgacattaatatatatccccacaaatacaaaagcataatttttttcttatcctattatagtttcagaaactatattgtccacaaaaatcttcatgttctatttttcttttattccaattaaaatcatacagcgatgaaatgattggcgatggaaaaaaaaaaaaccaaagggacaactaaaaataatactacaaaagacaaaattacttaatacacgtctaaattagcaattgacgtcgctaaccatgtttttccataattaccaattttcgaaacgataaacatggagtattctcagaacataatcagaccaaaacaagtgaaaaacaatagccattgattcaaaccaaaatgagttttacttcacacaataagtaaacaaaaggcgaagacattgtaatgataccgttgtaaaagtaagtcgacaaaacagatgaggaactaaaccctaacacttatgagtaatctctcagttacggtacctgcttccacgttcgcgaccgtagtctctgtctctgtcccgatcatggtcatagtcatagtcacgctccttgcctctttccctctctcggcttctgcttctgcttctgcgtctatccttatcgtagtgatgatctctaccacggtctctttgcctgtctctgcttctctctcttccatctttatcaatacctgccacattcatataaattatgaacaactacattggatcatgacctttttatttttggggaagcagcaataaacattcttttctatcttcctctatatctattcagttaaaagaagaaaactctaacaaggaacaacactgtttattggagatccccactaggcttgggctataggcaagttagctgcaagcttaatgtaaaatttcaaacaaatccctccctgcatatatgttaagtttcactcaagtgtctagatgacaagcagaaactttctttgaagactatacacagagagtagatatagatcgagccaaataaatctctattatagtggaaaggttctgttcataagctcaacctatttgatgattgcatagatttagttcatatgagttaaaattaaacagaacttacctagttcctcgacttcccacccagcacgaccagcagcaacagcaggtctggtgtcagcttggtttgttttaacacggtacttcttctttagattcccaaactcatcatacatttcaccatcatcctgaaagatattagacgtataagtcaaatggaatatacaaaaaactgagagctcatccgaattgcaacaaacaaacaaaaaacaaagaactcttcaggaaaagcatatcttacttcttcagcctcacgcctgcgtctcttcgtttcctctaattcttgttcatctaattccttgtaaccaccaccacgacctcccctatttagagggaaaaaaaaatgaataagcactggtcttttaagagaaaaacaaccttccaaactcaaaccttaatgtttcttaatgcaactctaatttggccaaaataaaacattacaagtgggatatatcaattgtcgaagaaaacaagcactcgttcaaattgcagaagagagtattgagactttttccaaggtatctattaggccctgtctaaaagcagaataaatataccctgctgacaacaaaactacaaacatcgaacagaaaatctatgacctctcctacattcactgtnaaatcatttataatccaaatcctcagctcgaacattgcaagataacaatacaaggcaatcttatcactggctttgagtcatacctcacaccaccttcattctgaccaggtttattggtgttgcagatattacattttagacgtttcgcccagttgacattgccacacctgaaagaattagcgcaaaaagaaaaagtgcattatgcataagaactcacattcacacagtgcagcctcttagttaagctactcgatgacacatagcataacttgcacattaaactaaaacatagtccattttttgaatcagacacagaaaattgaaggcagccaatcttcacaaatataacttcctagaaggatcaagactacaacctacccacgtttcaaattacatttttcagattaacagccatctgaaggaaaattacgaaattagaatcaacattcaaaaaagaaggaaaaaatatgtgcctccacacataatttggaccagtttaagagacacagcacagcagagcgggccatcacttctttctaagtaaagagtcaactgacatcatcaaaagcattgatatacaagctatattccttccatacataagacaaattaattttatatccagcaacgctatatgccatctgaatgttctcttttgctactgatgaaatataaattgtttcttgcgatgtgttttaatcaagtaccaaacgctcattatcctctgatactgaactaactatttcaaacctaatcggaatgcttacattggacaagcccaatcatttggaccaaagagaccagtaggagcaccactgggctgcttccctgggggcccaccatcagcgcctccacctcgaccccttccgcgaccagcacccatgctgccaccagatgcaccagctggtctagcagttccacagcggttacaaaccccacggaatgcaaaattcacatttgtacaactgccaatacaagagtatgagaacactaccgctaaagactatgaaatatataaaaacttgcaaattaacggaaacaagagctagatgaagctcctcaccgatatcacatcacagaccttgtattagggcacatccagtcaccatcttgctgccatggctttgccgaagaatcagcctgacccctcccccttccagcacctccatttgtttcgtcagcacctccatcaaattcaacaaactcaactgcatcaccagcatttttattcttggactcggccataaaaactccaatggtgtttccatgaaaatctttgttattgaaccattcaacagcagccaaagcagcatgcggatcctcataggtaacagtagcatctcccttgggctcatcagtctctttatcccggtaacaggccatacccttgggaagtgaccagattccgtttggtctt

SEQ ID NO: 40296 - DNA, 272 bp, Arabidopsis thaliana landsberg
ctccttacatttgccatggatcatcgggcgtggacaaccgggttaaagcgggctgattgcgtaaccctgagttattgctggaggccagctatttaatcgacccagaagacaatgctctgtgggccaaaagaagcacgtagggcacgagggacatgcagagcagcaccatggacacgactgcctcggtcaccgcgttgggctggctcatgagcatgaacaccgcatgttgtggcgttaccaaaagatgggcgcatgacttaaaagcgagcgcc

SEQ ID NO: 40297 - DNA, 525 bp, Arabidopsis thaliana landsberg
tatatatatatatatatatatgtatatatgtattagatttactcaagaattttctaaccccttatgttacagaattttgctggaaatgaagcagagactactgataaactagtcgatctaataataataataaagctgaagagagccaagtgggcggaagaggaccaagatttgctccacaccaactttccctggctatggctatcccctttttcctattttcctttctgtttgtgaaacgtgacgacccaactgccactacccatgcttgctttataagctctcctcctggcgctgtctctcggcgccatcgttcccttctatgcacccccaatcgagctcctcgcctgcagcagaccctcctctggtgcgccgcgcgtgcgccgtcggcgagatgtcgaacgtaagccgcgcccgcgctgctcgcataggacgagatctggtttctttctgacggccgtacgtgtgcgcaaagctggtcgcctttccagaggcacggagttaggatcggatcttgctttggaa

SEQ ID NO: 40298 - DNA, 276 bp, Arabidopsis thaliana landsberg
  unsure (1)..(276): unsure at all n locations
tgccggtggtgctgagcggaaagagcaagttgcagttagtacagttgagaaaaagttaattagtgaggatgcattgacactgcagcagagtgaagagtnnnnnnnnnnnnnnnnnnnnnnnnnnnnnnnnnnnnnnnnnnnnnnnnnnnnnnnnnnnnnnnnnnnnnnnnnnnnnnnnnnnnnnnnnnnnnnnnnnaaaaaactgggatggaactggtggaaacaaccatgctgctgagcactacaaagagacagcctaccctcttgctgtaaagc

SEQ ID NO: 40299 - DNA, 460 bp, Arabidopsis thaliana landsberg
  unsure (1)..(460): unsure at all n locations
taccactactattgcaaaatcctttaaactaactttgaatcatcacttgctaggttctaaaggctctgattgtcacagttaagcttcttaaacaagatatattcctcatcagatttgtgtaaacaaagcgttagaagaaaagcaaaaagctgaacaaggtgcagacctgataagtaccttgaaggattaaagcacaaattcatgaataaacttgtcaacaagattctccttgtcgtcgaagggacacttttcacagctaactcatgtaaattcgannnnnnnnnnnnnnnnnnnnnnnnnaataatcaaacagccaaaaagtaacataaacatcaaaattctccaagaaatcaacaaatcttaatgtctgattcaaaatgagaagtttctgcaaaagatttgtccaaaagttaaaagctttacggtgaatttatacctaaccgtcgatttcacacataac

SEQ ID NO: 40300 - DNA, 1081 bp, Arabidopsis thaliana landsberg
tttaaacaataatatgatatatacattagctcacaaatctagtgtatcaccaaataaattttaaagttttgattaatttactaattgcaaaaactagaaaatgcaacaaagtagaattccgatagttattagaaaaggtaatgcaatgctttctccaagtagactctgagctgaatgattttggtaaagactaatgtttgagatcatgtgcacaacattataggcttatttcgtatttccacaatttgatgagccaaagataaagtatcggaaattctcttcataacatccatcagcactgtaataagtctaagtgtgactattatatttgctcggcttaaaaataaaaccaagtttcatcatttagtgaaaaatgcataaaccagaaactgtttattaaaatactagagattatgtgaattctttttcacagtttttttttaactacatttgtaatacaacgatctacttaacatatcattacttcttctttttattttatcgaaaacatatgacgcaaatggttgaaagtaacaatggttgtcattcctcctcaatttgttcatctcttgtttgttaaacaaaagatttcatatttttccttatctcattatatgttcctctaactgacctatacaatttatagggtggaatagggtgaatattatttttcctcacaaaaaaaaattctaaatcgagaggaagaaaattcttcttttttttttttcttttgtggtgtttaaacattgttagccaaatttattaaaaaaaaaaaattcaatcaatggttaaggtttaatttctgtatgtctatttataagatgtcatttgaaattttctccattcatagttacaaagatcctaaatagtctcatcctcactgtgtatataatcaatctttctcttcttatcttttttttggtttaaatataatcaaatctttctcttcaagcttgttaaatccttagcaaattaattttcaccgagatggctttcagaatcaccgtaagttttttttttccttgtctattgaaatgtaaatgttgattaccttttcaataatttccttgtctttctctat

SEQ ID NO: 40301 - DNA, 402 bp, Arabidopsis thaliana landsberg
atttctattgacaaagtaaactataaatggtcacttttcattgttacttttcttttcattaattgaaagagcaaaagaaaatatatttatgcaaaacgtagtaatatatcatcgattcatattgttaaaaagggagaaaataaaggttggcaatttatgaggaaaatagccacaaagagtcgtaattataaacgaggaaacgaagctcatgtctcatgacatgacatgagataggaggccgttgaaaggctttaactatttgaaaacttaatagaatttcatttcgaatatcttagtttttttttttttaaaccaaaaaaaaaaagaaagaataataaagattgtggaaggaggttggttagtaatgtgatattttttgtgttatataaccaaaaatgggag

SEQ ID NO: 40302 - DNA, 494 bp, Arabidopsis thaliana landsberg
  unsure (1)..(494): unsure at all n locations
atcttccagatcttccacagaagcagatgaagtaactgtacagcctgaaactatttctgactttgaatcaaacacaaacacaatcatcttcaaagcttctttttgctgcgaagatcaacccgaagcaatctcagagattattagagttctcacaaagcttcaactcgaaacaatccaagcagagataatctctgttgggggaagaatgagaatcaatttcatcttaaaagatagcaactgcaatgagactacaaacatnnnnnnnnnnnnnnnnnnnnnnnnnnnnnnnnnnnnnnnnnnnnnnnnncgaatcacatcttcttctacgactacttcttcagtttgcagaatcagaagtaaaagacagagatggttcctctcttctcattattctcacaatgaataaatttcacaatatacatatacatagtataacacaaacctcattattactaaaggttttttccgcattttggtttagattttgtcctact

SEQ ID NO: 40303 - DNA, 4853 bp, Arabidopsis thaliana landsberg
agtaagtcacttttcgaagcttcgacgttgcgtggttttgcaagctggtcaaattcttcaacccctggacgtggattctctggtaaaggtaagaacttggtttgtttccgtttcgtcagtttaaggttacttgccctaatttggtttgcttgatttgagaagatgccgcaaagcctagtggtcgattgttcgcaccttattctatcttcaaaggaagagctgctctctctgttgaacctgttcttcccagtttcaccgaaatcgatgtaagctcaaaatccatttctttttagttttgtgtgttctctttaaaagcttcttcttttagattctcattacttactgtgagtacacttgtttagtcgggaaatcttcggatagatcgtcgtggatccttaatgatgacttttatgcctgctattggtgagcgtaagtacgactgggaaaagaaacaggtattgatttttttcacactctctatcttcttcacttgtgtcttctttctcctctgataaatttggtttgtttgctacatttttgcagaaatttgctttgtcacctactgaagttggatctttgattagcatgggttccaaagacagctccgagtttttccatgacccttccatgaaatcaaggtttgtctttttttgcttcaatacattatatttttatcgcagcattttcatgttctgacatacacttgtctttgactcctcagtaatgctggtcaagtcaggaagtcactgtcagttaagccccacgcagatggtagcggctacttcatctcattgagtaaggcttctatcaaattaacatggatcatcagtactgaatagttagttatgggagctttctgtttagtaaatttagaagcttgcacttgtattagttttgtattatggcgataacagttttcgcacagaatagctgttttataacaataggaatgctgaattctgaatgctgtataaacacttaccttctgctgttttgttgcaggcgttaacaatagcatcctcaaaaccaatgactatttcgtggttcctgtcacaaaagctgaatttgcagtgatgaagacagcttttagtgtaagattagattttaattttgctttctctctattctattactataataacagttcaagaaccaaaagcattgctatttgctattctgtcagttttagcacatgaatctgaaacaagtatatatacttgaaggatgggctatttgtgattgtcttttaaccagattttgtattttgtgcagtttgcccttccacacatcatgggttggaatcggttaactggtcaagttaatactgaagctctgccgtcgaggaatgtttctcatctaaagactgaaccacagttagagctggagtgggataaatgaagtgatgagagtagtaggaacggagtaaattgaaaatgcatgtgttcttttttctggcatttggtgcacacgaaactcggcatgctctgtttttgaaactaatatgtcctctctaagacttctaaatcatgggtcttcttgttttcattagcacatatgttatttagtaaaagcattttggtggtaacttgatactcaatactcatagatagataggttcaatcattataacatacaacttcaaagaagcacgaaaaccaaaagaaactagtgaaggagtgtcatctgttggacattgacaggatatgcgtcgaaaggtggaccatagaaagctcgtctagccagaatggaaatagcagtctgagtaggatggaatgcatcccaaaagacatactgatttctgttgggacaaggagtctgcaacggcagacatgtaatttgtccttggttcctcccaatcccgcaacaagccctgtctactacgctaaatcctgtaccatataaaccatgtttgatcagagtagaaatcatagaagaaactcctttgacaaccatgttatccgagaataagtgtaccgtaagcagctgggttgtttaagatgtcaccaattgcgctataggtgttgccgtatacatagatggctccaggtgatcgctggttcagctgatcaacaagtgactttagcccttggttaaatgtgcctagaatctgattcacgctgtcaacacatctatcaggtggcgagatacctctggctcgttggtttggtatgcagcctagtggtgctactccaggtataaatatttttcttagacctaggctgtaaagagtctacacatagattcaaaagattatcagaagattgattaataaaataataccatatgaagatttgatgtaaaacattaccagaagctggcgagcgtattgactgagaagtagattggcaaagtcaggtggtctgaatcttatgctggaatcgtagagattaggcataaggtagttgttgatatagtcattgcttccaaaaacgagaaccacaagcgaccttgctaagtaatccgtaaagttttggggactcatcatcgttcgcagttggcttagtgtcgtctctagattcaccatttgctggttcaggctgaatcttccaccctgcacaccacattatcgttcctctttccatttaacactaacgtatctttgaacaaaaagttacgacacaaaactcaaaaacatacatagttgtagcctgatacatcgaggatgccagcagctgcagacgcgtagttaactccttggaggattctattgcctgatgtggttggatccgcaaagggagggggtgatggaatttctaacaaccgagctgttttttacagaagaaattgtgttttttagtaagataagagaatactaagacaaactgatgaatcttgacgaaatgaactgcgttcaagtgtctgaaatcttacctagcagatcaatgaaagtcaggccgttgctaaatctgccagtaggctggtagttcatgtcgatgccataagggaggaaattggctcgagctacagtttgtagaaagtagttgttaccagcatcgaccaatgagtctccaagtacaaacatagcaggaactctagcttgtccagtgaccaactcaggctgctgtaatataacagaagccgtcaaggcaagtatcaacacatatcctccaatatggactttcatcttctttctgtttgtgttcattttacttaacttgtgaacatggaaagattgttatataaaaggctctaagcaaaacatgctgcatgtgacacaaaggagttatcttccggaatttctgattcactttgtaactgcttactctctcacgtttcgactgcttgcatgtaagcgagtcaaaaagcttgcatcatgcttgaaatttccttaataagagactaaaactgcatacgcaaggagacatgaccatgacgaaaatttttctaaacctcttcagataaagatcaaaagaaataaatgagcacaggattatctgagactaacggatagagttgccacgagcggatcataatgaatttcttaaggctgacaggttttggaaatagatttttaagaagatgagcaataagcataaacaactaacatctatactacttttcatatacatttaatgaatcattgtcaactacaatttaatatttgttccttcttgagcttctagttaaaacatgcacacgccactagattatacaaatttggcactttttatcaatcacctctcggtgttggttttctgagctgcttgttttcctgagttgctggtgtagactcttcatttacaaacggtaaaacaatgacaggagctgctggtaccatctcccaacgttcccgtaagaaagcattaaatttcttgaccatttctttccggaactcgagctcccgagtaaattgatcgtagagaacaaaagccagaacatacttgaaagggacaatgactagaaccgttgcaatagatagcatagccagtgctacttcagtagttatctgagaaaagtttcaaatcgcgtcaccaggttatataacaacaaaaaatagttacctatcacgaccactatcaatggcaaaacaatcacatgattcttatcccaattccaaaattaccaagtaagagaaggaatggcaataaaaagctctgaaacctgatccagtgattagaacatacctgaggatgaccagataatacaattgtccgtagttttagaagcactacattcaccttttggagatagctctccagattttgcatggcgtctttgacagcaattattttttgaatagtatttgaagatggctgatctcgaatgctaattattccaaacaatcttcctagacggccttgtcgtctgagtcccttcaacgtaagcatcccagttgccaaaaatatcaaagacacaggaaaaacgtactgcaaaaggttcctgaggtgcaaaaaagtatcctcagtggtatcaaatcattactaagcagcaatgaggatataacaatatctaactttaagcagcaatgagaataagatttctctgcatgcgattacaagtcttaaacctgaggatcattctgaatgtaacgagcatgagatacatggtatcacatgtcggtgaaccaacctgaagattatcgttgatgcaaatgctaaaaacgagaccgtcatgtaaggctcctcccagcacctgagtttctcaaactctgtggcagttatactcagtggtagaatgagttcctgggattgaaaaataagagtagccggacaacattgagtcactacggtctctacttatttaattttatgtaatagtttgcaaggtaatgaaaaatactacaaataccgagtccattgcacacaagagatgaaagttgtctaaacatgaagaataggaaaccgttcgaaaca

SEQ ID NO: 40304 - DNA, 654 bp, Arabidopsis thaliana landsberg
catttcgaggagaaacaccatctgatatgagatagacaactgcccgcatgtgatctgcaatcacttttaaacttgtctttgccttgtcatttgcagagtcatatgagatattcgccaactctgagatctttgcaatgattggatatatcaaatctgtctcgtagttgtttggaaccttctgaaggatttgagctatacgttccaaaccaagaccagtatctatattcttctgtttcaagggctcaagcaatccatcttccgtcttgttatactgcatgaaaaccaaattatagaactcaataaatctggtatcatccccaagatcaacatcttcatcataacctctctcaggatagaagtcatagtacaactcagagcatggaccacaaggaccagttggtccactagtccaaaagttgtcagcttcacccattctctttatccgctcaacagaaacaccaacttcattcttccagatttcaaaagcttcatcatcgtcttcatatatactaacccaaactctattagctggtagcccaaactcaatagttgaaagctcccatgcccattttatcgcttctttcttgaagtaatcaacaaagctaaagttcccaagcatctcaaagaaagtatggtgcctagccgttttcccaa

SEQ ID NO: 40305 - DNA, 993 bp, Arabidopsis thaliana landsberg
ttttgtttcctagttaaattaaaaagttttcaaaatccttttttacttcatggcagggttaggtaatcaatttgtctttgatctagcttaaagctgctgtacttagactagctgcagaacatgcagtagaaggaagctggttccatcaattcagagttgtggcaatcttttgggttttaacagaaaacaatagggatctaccttgtgtggcaagaaatagggttccttttcacaattacaaataatctttcactgttttgactctgtttgcttactcaagaattaagatatatgcatttcgtctcttctcgacctcttggctttggttattacacaatagattagtctcaacattattagttaatacacgtttttctgtatatcccaccaatcacatgtcgaattttggatccctaactgcaaccaattgtactcaaactttgaaacctaaaatactgaattcacaaacggaattaaatcatcctgacggtagtaaaaaaaaggggtacaagtacaagtatgagttctgcgtttgaaagttattaagcttggctcattttattcaaacaattaattccttcttccatatagtcctctctattgatccagaactctggtgcgtcctgcaacatcgaatccaaattctcttaacatcataacacagactaaaatttcatgctttcgtgttaaaagagagaatagcattgaacttttctcttaccttcatgattcctgcaagaacagcacctccgaggtataccatgtgtttccttctcggtggatcttcgatccgcaatctgagtttctgattgataagaaaaacgaagataaatgttaaaaactgagctaatgactgacagtgatcatggcattatcagaatcatcttttttaccttcaagccatctttgtttccttttagaactgtgtcgagataccgatcctgtatttctttctcaagactgaaacaaacagagaataaaagacaatgaaac

SEQ ID NO: 40306 - DNA, 679 bp, Arabidopsis thaliana landsberg
cgagaggtatcatacgcatcacttcggtcaagtgtcagcgaatcaattatgattcccattttttactagccgaaccgcacctttcgaccgaacaatatcgtgtgtgtgtgtctagttcattgttcatttgttaaaagtagaacataaaatagtgagggacacaattcgtcataactattaaaaaataacataacaaatgtgtgcatatatatatactatctgctagctttactctatattattactattattaaatcaaggaaagaaagtgcaagctatataccgtccaatagacgaaaagtcgtggctggctgtcatgataatgatccgggaaaacctaaacaatgggaaaatcaaaaactaattttactcatttgtccatctttgcagtaaacgaacaattgtgatcataatatagagaaaaaaaaaagagagagaagaaaagaagcagtaaaattacctgccaaccagcctcgactgtgttgaggtcggaatcgttgtaatgtgcagcgacgagccaaatttgggacaaactaaattcgtttgttccatgtttctacagatggattccaaacgttcatagttgccactgttccatatattccccgcagatataccacctctccaatcgcgtactattattgacatcaaattaatccaaaactaaaaggtcaaatga

SEQ ID NO: 40307 - DNA, 493 bp, Arabidopsis thaliana landsberg
ctagtcaattggataataatgggcttttgggcttcatttttaatgaaacgtaaatctcaaagcccaatacatccaaatgaaatgtttttgactttttcatggattggatggatacatggtcacggacggtggtaataactagataacctacttggtagtactagtgttatgacttatgaccccaagttagtacatgtaagctttccctagtaatcaaattttatcccacaaccgtatgaagctggatgatgaagacagtatacacttggaagtaatgttttcttatagaagatattaaacacgatcgattaaaaggcgagtaccgagtaagaaatgaaatatgtcaaactaagcaagtaaacgagaatctacggatatttaagacacgagatacacaaataaattagtaaataaagaaaatctacggacagttatatcagactgacacgttacaaattaaaatctctgttattaaggaataatttctgttgca

SEQ ID NO: 40308 - DNA, 569 bp, Arabidopsis thaliana landsberg
  unsure (1)..(569): unsure at all n locations
gagtcccagaaacacagaaacttgagcaagctatcaccgctttgactggtactgccattaactggtggcaaatagctcagtatcgtgaaaagatctcaacttggaaggattttcgtgacaaattcaaggtccgtttcaaaccagcccgaggagcggccaccattgatcaactgttcacgattttccagagaggaagtgttgaagagtaccgtaatcgatttgaagagatagcagtggagcttcctcatgtgacagacgatgtgcttgagtcagcttttctgaatgggttgaaacgaagtttgcgggatcaggtgttgagaagcagacctgcaaacatgactgacattgtggagatggcgcgaatcattgaagcacagaatcaggagaatgcgagttatcaggctagatccttccagaggaaccaaacgacagtgatgtcaccttattctggacacggtcaagggcaatcttctcgtcgaccgtttgagggcagcagggaagggaagaaacctgttgtcgggtctgaanatcgtggtactaatccatgtcgtttttgtggggagagatgg

SEQ ID NO: 40309 - DNA, 801 bp, Arabidopsis thaliana landsberg
ccgtttatattcaaattttcggttatatctctggttttttttttagtcgagagtctatatatttcactttcgggtctcgtattttacatttttagttgaatttagggtttcgaaatcgagcattcatttggtgttcttcatgttattatggtctggttcttcaattatgctcttatacagattttggacttgtttaacttcaaactttagtttcagctagatctgtgataattttgcataagctgaaattatctgctctgtctaaaattcttaggtttatcattgtttatcgcatctttctggaggatctagccgctgctatcatgaagttcttagagtacaccaacctagacaggttaaaatttcgtttttgttgttgtcaaattgagttattgcttttttgtgaatcatgggaatcagatttttccaatttttggaatatttatatgatattgaaaacctttgcttccagattgaatgtttttctgggtcatctaaatctcggggaaaggactatcaaaggttgcttggaagcttattcttgtaagaagcacctgtctgtgttctctctatcaattattggtctgggctacaaggaaaacaagctaaagctttttgtttttgcttttgataggcaaacatgcaggaagtgataaaagattgtctcttagtttggagaatgaggtattcattcgattgcaattgacttgcatctaataattgcaatcaagcatgtgtctcggacttgaatcattgaatgtgtacagatgctgcttgcgttgacctagttgttttatctat

SEQ ID NO: 40310 - DNA, 431 bp, Arabidopsis thaliana landsberg
tccttatctgtgaaatagtagacggctgatttcctacacagatgattcaagaaaaggacaaagtgtaagcactcgttctcgacagcatgcgattacttttcatctcgaggatcttcttgatagttagcactccaagcatcctcaatcagacgggctctcatgcaagcaccaggagccagagattccatctacattggcaagcatgaacaaataaccgcacgattgatcacagcgattttgtgagtggatgaaaccgacttctgactcactcttagtaattggagacagtcgcgagtaacacgtgcgtagggtacaggccagagccagaaggcttgaattgtctgcattgctcgcttgatgaataccaaatcggaaataggagcctatgagcacaaaggcaaaacaccagagacagaagaggtcacaataac

SEQ ID NO: 40311 - DNA, 870 bp, Arabidopsis thaliana landsberg
aactagtgatatacatttggcttttgtttacaaatctctcaacttcagatttgttattttgtgtcccatttgattcatctttacctcctttgcacgttctgtttcaaaactggatttgtggtcctttcttttcaccattgtagttttgtggcccagatctttttttttttttttttcttttttttcttattttgtggcccagatcaatttatgaataaagttctttttttttctgttgcattttctttcactggtcttaagtttgatgtaacatctcaaccttattattaggagactatggtgcgattggtttaatccaatttaattacttgcttttaatctcttgtgttcttgatgtgacaggcttttgggtaaagtggcattgatcactggaggagccacagggataggtgagagcattgttcgtctgttccacaagcacggtgccagagtatgcattgttgatctgcaagatgatctcggaggtgaggtgtgtaaaagtctgcttcgtggtgagtccaaggagacggcttttttcatccatggcgatgttagagtggaagatgacattagcaatgcggttgactttgcagtcaaaaattttgggacgcttgatatacttatcaacaatgcaggattatgtggagcaccgtgccctgatattcgtaattatagtttgagtgagttcgagatgacctttgatgtgaatgtgaaaggagcttttctaagcatgaaacatgcagctcgtgtaatgataccggagaagaaagggtcgatagtttccttatgtagtgtgggaggtgttgtgggaggcgttggtcacattcttatgttggttcaagcatgctgttctaggcttgactaggagtg

SEQ ID NO: 40312 - DNA, 729 bp, Arabidopsis thaliana landsberg
  unsure (1)..(729): unsure at all n locations
gccttggctgtacagaattaggtagctaggagatttgtaccaactggtagctttctagtattccttgtacaatgtgatccaagtaaaagaaagaatcggttaaaattttcaatataaaactttaaaatagactactagtactagtttgagctagaaagtgactcatgtagaaacaatctctacaacataaaatctacgaaccaaaccggttaccaaacgttcatctcaatctcaccaatcggtttaagctgaaaacccgaattagcaaaatcttcgttcggtctgtttcggttaatccggtttacatgttatctcatcgctaattttcattttcccgcgatgacagagcgcgtaaaaaacctcaaaaccctaaaaaatgtcgaacataatacaaatcattacctttatgagattttctccaacaaaatcaatggcggaagaagaagaatcaatccgaccagagtttccaatcggaagagtaaagaaaatcatgaaactggacaaagacatcaacaaaatcaactcagaagctcttcacgtcatcacttactccaccgaactcttcctccacttcctcgccgagaaatcagctgttgttacggcggagaagaagcgtaagactgttaatctcgatcatttaagaatcgccgtgaaaagacaccaacctactagtgatttcctcttagactcgcttncgttgcccgctcagcctgtcaaacataccaaatc

SEQ ID NO: 40313 - DNA, 627 bp, Arabidopsis thaliana landsberg
tttatattaacaaactcgattaccgtaaatattttaattgttgagataaaaaaacgaaagtaatattggttgcaaatattttaattgtttaatttatctttgtaagtagttgtttaaaagatttgttgtctaattatcccaataacgtagtttgtcttattcacttaatagaagttacgcaaagtacaccaataatgcaagtacacaattacaagtacagctcctaaagtgggattgtcaacataatgtatttcatgtgattattgaatagaaaatgtaaatattcttcaccttaattttttaacattaaaactatgctaaagaatgaagttgtttataatatatcgagcacgtatccctaatctttcacagaaggacatggtttgaccttgggatgatgatttagatcttaattaagtatgtcttctaatcagttgattaaagctaattgtttattgaaaagaaaaagaaaagttattcaacaattaaagatgcaaattggttggttataaccaaaaaaaaagatgcatggtaaatgaaatatcaccttatacttaaaattatcatttatcggttctgataaacgtatactccatgagttagaaagaaaaaacgtctattaaaaga

SEQ ID NO: 40314 - DNA, 425 bp, Arabidopsis thaliana landsberg
  unsure (1)..(425): unsure at all n locations
cccccccccccccattccccacgcccccccccccccccccccccccccccccccctccccaggttactcnccaacaaccccccccccccccccccccccccccccccccccccccctccctcccccccccccctccccccccccccccccccccccccccctcccccccccccccctcctcttcttgtcttccccccctccccccccccccaaaaaacaacccccccccctccccccccccccccccccccttccccccccctcccccccccctcccccccccccccccccccctcccccctctcccctccccctcccccccccctcccctctcccctccctcccccccctcccctccccccccccccctctccccccctccctccccccctcttcctcccctcccccctccccccccccccccc

SEQ ID NO: 40315 - DNA, 826 bp, Arabidopsis thaliana landsberg
atatatagaggcttctgttcatttcatgttctgtttaagagctaaactgtcttttacatctttatcaaggctttttattattgcactttcatataaatgtccaggagatctttatctaggagggaagactcctacatttgccaaaacaaaaactgtttaaaatattgtcagatcgtgatcaaaatacttgcagaaaaaaattggttaaaatatggacacttacctcaatttgatcttggagaatagacatctttttttaccgtacgcgcatcattaccttcataaaactatgtggcaatatttgcatcttttttatgcaaatccccacattcacattcatgattcttttcttttttcgtattttcttgggaggagtttaacattatagcatttttatcttaagtatcttcaaaaacacacctggagatatctttctcttcttggcttcgggaaatttaattctcttagacttggtaatgttgaatgagaggagatcatcaacaggaactctaagagttctcttagcctttggaatctcaaggagagaaaatcatgcactggaacgacatcatcgtaagcgagaatagtgagaagaccctggaacaactcataactttcgaagatgttgctaagatttttcagaagttgttggtgtccttggagaataaacaccatctttgccatagtatcggcatcacattccctacaagtttattagtagattaattaggtcaatcatcacaaaatcagaaggaaaaaaaaaggaaagaatgaaaatttaattacttaggatcaaagatcggtaaaaaggttttatatttttccg

SEQ ID NO: 40316 - DNA, 462 bp, Arabidopsis thaliana landsberg
  unsure (1)..(462): unsure at all n locations
agactaatgaaatgctttggatatggtctttataagttctctgacgcttagttttttttattaatattaaacatgtgaaacttagagaacaagcttgaacttatccagaactacttagttaacaaggactttagctcgaatcctttataaacttcaagaactttctttaatacgacatcggttttggctctaacatttctttactttctccatgaaaagtaatgtgacaagtctcctaagattcgattatacagtcaaacaaaaagtgttttattaagacttatgttaattaattaactacttaacctctaaaggttggaccaattgctgaagctgatgaaccacatgtgacatccttggacgcattgatggcacattctgagtacaagaataaaccaagtcaacaactttctgaaccacacatgcttncggtaaaccgcatgtaataccggatcaagaatc

SEQ ID NO: 40317 - DNA, 268 bp, Arabidopsis thaliana landsberg
tacgttgatggaatttgttttatcaacaagttgtgttctgtacaaacaatctgccaaacattttatttatctttcaacaaaaagcaaaacaaaattcaatttttgttcagatagaaatattactcctatgatcacaattcacaacttcttaatatatgatttatggcttttcacattggacaaatgaatggaaaaaaataggcgatttaaaataaaaagattatggattttgtattgactaatgactattgaggaatctggtcatata

SEQ ID NO: 40318 - DNA, 484 bp, Arabidopsis thaliana landsberg
ggaagagaagaagaaaaaatgttgggaagcataagcctcatctcctgcaacttctctcgccttccacgtcttcttaaaccctccactcgacctcaaaccctaacacaatcctcaagcctccttcttcttcttcaatcacgagcttcttcttcaccacatagaattgcccttttcccgaaatacgagaagaaagtcacattcttccatatctgcaaaagctcttcaaacaacccagaagaaccagagaagactcaaattcaagatgaaggaagagactggtctagctcaattttgctttttgcgctttggggtgcgctcttgtactattgcttcaatctcgcgtcctgatcaaacacccgtacgcaatcttcaaatacttcataaagttacgattttgcaatcataatataatcttaggtttttgtattgcagacacacgacttgtactttttgaaaaagcttttgaatttgaaggtgatgatgg

SEQ ID NO: 40319 - DNA, 540 bp, Arabidopsis thaliana landsberg
caaaagaaaaagacccgttaggtctgccgtttgatctggtgtattagagggctttgttctttttttcgttacggctcaatattggcggaacactggtgaaaagcttccaatctctatggttttctatgattcggtctttgataacatgcatcttcttccttgatgtttcatctagggaaatcctcaatcgcttatcacttcatgttttttttttctcccatgttttctattcttctttctagccatatgggacaaatctgtaatattttacttcattgtaggtttttacattttttgcagtttataattgttaacatattcctcaaagaattcctatccattagtcaataaacctaaatgatatatacatgcataactcattatatatctaatctatttttgaattccaatcatttcttcataatatataaatgtatctcatcactcatgtcaccccttccgtgcggttaaggtaatgacttcgggcatgatgtgactggcaatgtgtacaaggaccgataacgaattcacctccgtacg

SEQ ID NO: 40320 - DNA, 900 bp, Arabidopsis thaliana landsberg
  unsure (1)..(900): unsure at all n locations
caattttttgctatttgaaacggtgatgataaaaaattggtgaggtcttttatgttccatcatcaaaaaattaagtttcaagacccatcagccaaaccaaagttgcagaaactatatggttatattgacaaaaaagaaatagatttgatgatggatataataaacaagaatgttctaacatgaagaaatggaagactacatgagaatttttagtcttcttcaaacaggaaactttttaagagttttttatatatgaatcatatgattgctccaattcatatatatgattcatcgaaaatttatatgaaagggatttgtgtgtatatatatgtaaataatcaaaatcaatcgagaaaagtttagcatataatcaagaatatgtgaataatcatctataatcaatcaagaaataataagatgttttacctgtaacttgcttgatgatttactaccgaacaacattgttgtttgaataccaaaacagcctccggctgtcattagttgccggcgactccggctttataatgtcaaaaaaataaactatttttttggtatttctgttgaaaaattcaaaataaaaaatgaatatttacagacttgttcaaagccttacagctgaagaaattaataaagaatgacatcacaatcgtgcagagcaaatcttattagggttttgagattcaggacttatggaactttctcaagaaagagagagccaaaggaaaactaatgttgaatatgtcttttttatgggcaaatttctctaacaccttactataacctatctgtnctttttttattaaaacttttttctgttattttttttcacccgggtattacctattattatttttttgggaaaagtagcttaaaacgatataattctttttctctcatatc

SEQ ID NO: 40321 - DNA, 644 bp, Arabidopsis thaliana landsberg
gctccatcatatgaggaagctaatggagtgtttgcatctcaagatgcatgacacgtcaacagatagcatgggttacttcttaggagaggtatgcttttcagtctttaataccttccttttagagttaaaactttggtttatattggtagtaaaagtatcaaagagataattggattataagttctccacgtatgaactggatgtacataaactgtttttgattagagaaccaaaaagacaggctacatctagattccttttggtcctcattgatgtgccattataacatattatttccctttttaaaaacgttttcaggtcttgttcccatatcacggtgtgacagatgtcgagctcagcttatcaactggtgaatacgttgttgttagaaaggttcgatagtaaaccaactcccacatgagaaaaaccaacaaagtctcctttaattcatattaaccaatacggttattcagtagtgtttgtttgatataccacttctctatttgtcattgccaggttacaggcagtggatgggccgaaggtgaatgcaaaggcaaagctggttggttccttaatgggtacaaaaaaaaacgggaacgagttcttgctagcaaagtgtccaaagttttctgagaattggaagg

SEQ ID NO: 40322 - DNA, 453 bp, Arabidopsis thaliana landsberg
cactctgatgctacaaaagtataaattcattgtagtgaactcaaattcaagttcatttgtttaggtccttctgtaataaaatcaacttgacttgctagcttgcgcagcttatgtcaacattatggttttcggaaaaataggatcaatacaaatgttatgcttccttctttgaaaacattaatccagtcttctaagcaagtactcaatttggacttcctttgtgaggggcatgatcctttctccatagagttttgcaactaagctaggttgtattttgtaggaaggatcagcttcagtttctgggtcgttaatcgttatgtcttgaccaaaaattctggctttgatctcaactctcttcttgactacttcttcaaccgtttcgtacgttagaagttgcatcagctgtgtccggtcctggaaagattcaagccagttaatgacaaaagaagattg

SEQ ID NO: 40323 - DNA, 4919 bp, Arabidopsis thaliana landsberg
caccattatactatagagatagcaaaaggttgaaataaattgaggctgttggccaattgtatttaagtaatagaatggtattacatcatcacgaaaagtgacgttacatttgaaattataaagtcttacaattttttcgtcatgacaataaatgatatttaaatgtaataatacatattttttaagtttcaagtatacataaaaaagggtcacaaacgatcgttgttaaatacttggtggaaaacaagtgcgttacgcgtgaacatgagtgcgtatggcataagagaagtcgaccacaccattaatgactttaaatcaagcccaaaagttctttcttttaacagtggaaacaaacctcggaccaatctcagccacacaaattctcctttttattttatgttgttttttcttgacgttgatgaattcttgtttttggttataaattttttatattacttccattactcagcactttcgtaaaatttaatgaattgatgatactagttgagtctccctcctctctaattgtttatgtgttttttttcatttgtttatgtgcttctcactatcaccttagattttttgtgttttacgaaacttgtttgggtttctcgttttcttgtttaacgtgtcaacttttctacaaatccaatagttttgtttcctttacactttataggattgtgagtctctcaagtaatcttctaaaacaatgcatcaagaaatttatattcatttgtacaagtatattattgtttttttccaacacattttatccataataaggatagattttttaaaaaatactccgtatgctaaccagaaaacattttagctccataattacatagaagttttaatctaatacagtgctacaattcaacgcatttctattttactataataaacacaagtacgtaagaatcagcacaagatatcatactataaaagaatcgatcgtcgacaggaaatataaatactatattacaagaaccacgtctatattactacctttaatcgtgtattttttttggtcggtttgaatttaaatgttaaaatccacacttatgttaaaaataaaaaataaaaacaatttgatttggaaaaacatttgaaaaatacaaatgaaagaaaagaagataataaaagagtaaagcaaagcaaaagcagagaataactcttaattcgcttctttgccaagcaaaccaccaaaacctctcaattgttttttcttcttcctcctccttaagcaaagatcatcattcacgaaatgtctgattcgattcaccggagaaaagtttcgaatcctgtaggaaatggaggtcggagctccagaacaagacgaacagctttcagatatgtttccgacaagaataatcgctctaaatcgagtaataaggttttcgagagaagcttctcagagccgagtcttaatcgccaccgcgacggacagagtaatcacttgcggcgaccatcgccgatgagaggtttaccgatggaagaagaaacaaaaccgatcgtttacttgcctaggattcgctctgaggttttcgcttcgtctccgtcgttgttgaacttatattcgccctcgtcttcatctccgatcaatcaagaggtcagagtcgtttgcttctattttttcaaatcaacaaattcatgatttcaactctgtaagagaatttaacttttagtccacaaagatttaaaagtttacagtttaagcctaatattataaaatatttcaatataaccattatataggcttaacaaagagttttaagttcagctgcaaattctagagtcagttctccagttcatgttatcagatcgtgagaaatataccaaaaattgacatttcgattaaatttctaaaatcagagaacctcattttgttattatttttcgaaacaaaatcagggtaatacaaaagaagcaccaaaagtaataatcagtgtagcagtagaaggaagtcctggaccggtaagagcaatggttaaactgagttgcaacgtcgaagaaacgatcaaaattgtcgttgacaaatactgtaaagaaggaagaactccaaaactcgatcgagattctgcctttgaattgcatcagtcacatttcagcatccagtgtaagatatattaattatccaaaaataataattgtttttacatatagaattaataaaataaaagcacaaatgatgttttggttgaaattttgaatcagttgttttcagtttgacgtagattgattggattaaatatctatactccatgatatctagttttgctttaatcaccaacggttatggaaaatatcaaaactactcatggctcatgtgaacatagaaacatcacataattcatgagttatataacctataataaagaaaatggtgactaaacctaatgatttacctctctttttgtcacataattgaatggttaagacaatcaaaatatacttaagtttgatgtaatgtaattttcaggtttggagaaaagagaaataattggagaattaggcagtagaagcttctacatgagaaagaaagctcctgaaaccggaggttcgttcgccgggatttctccagcgagaacgagcctaattccgtcgtcgaatttgatcggatcgtgcatcgctcagttgattgggaaaatcatgaggagaacaagaaggatatggaacatattggtatgtgtgcaatgagatagaccaaagtatacacttttgagcgtggcacataatattttttagtttgtgttttgctccactctcatcaaataagggaaccttgtactttatgaaattgtattataagtgtgtatatatttgtgacgatagatggatatggttctacgaaattattgatttatgaggaaaaaattcatacacacttcgagaaaataaaagaaaattgacttttgaattataattatgagaaaaatgagagatcaaaccttctgtttgagtcagagtctttaggaagtatcttcttcttctgcgaattgcaaaacccaaacaggtttataacagagagaagttgccgtcgctatcgccgacgcctccaccactactcggcgatcactgtagtcctcatactctctctttcgggtaaaattgctctcattctattttaggaagcctttcttatattattcaggatataaaccgtaaagttttagattcgaaattaaaattttgactcggtgcatcaagcacaaacttattggactttctctagaaaagagctgaaattaggaactgaggcatcaatgtaatgtatgacgattgttttgatagtggaaggtctttggtagattggttcttgtgttggttttagagtttgtttcacaaatgttggattctaagctgagattcttccttcaaagatgtgtagtgcttgaacaggcgaagcaagttcatgcacagttagtagtgaaccgctataaccatcttgaacccatcttggttcaccaaactcttcacttcactaaagagttctctaggaatattgtaacctatgttaaaagaatcctcaaggggtttaatggtcatgattctttctcctgggggtgtttagttcggttcttaagccagcataggaagtttaaagaaacggttgacgtgtatattgatatgcataactctgggattcctccaagttcacatgctgtaacctcagtgttaagagcctgtggtaaaatggagaatatggttgatggtaaaccgattcatgctcaggctctgaaaaatggattgtgtggttgtgtttatgttcagacaggtctagtgggtttgtattctagacttggttacattgagctggcaaagaaggcgtttgatgatattgctgagaagaacacagtttcgtggaactcgctattacacgggtatctggaaagcggggaactagatgaggctcgcagagtctttgacaagatccctgagaaagatgctgtgtcatggaatctgattatctcgagctatgcaaaaaaaggtgacatgggcaatgcatgctctttgttttcagcaatgcctttgaaaagtccggcttcttggaatatattgataggcgggtatgtgaattgcagggaaatgaaactagcaagaacctacttcgatgcaatgccccagaagaatggtgtctcttggattacaatgatttcagggtacacaaaattgggagatgttcagtctgctgaggagctctttagactgatgtctaaaaaagacaaactcgtctatgatgccatgatagcttgttatactcaaaacggcaagccaaaggatgctctgaagctattcgctcagatgcttgaaaggaattcatatgttcagccggatgagatcacactctcaagtgttgtatcagctaattcacagttgggtaataccagttttggtacatgggttgagtcatatataaccgaacatggaatcaagatcgatgatctcttaagtacctctctaattgatctttacatgaaaggcggagactttgccaaggcattcaaaatgttcagcaatctaaacaaaaaggacacagtttcttactctgctatgatcatgggctgcgggataaacggcatggccacagaagcaaacagtttgtttacagcgatgattgaaaagaagatccctccaaatgtagtaacattcacaggactattatcagcgtatagccattcaggtcttgttcaagaaggctacaaatgctttaactccatgaaagaccacaacttggaaccctccgctgatcattatgggataatggtggatatgttgggacgagccgggaggctagaagaagcatatgagctgatcaagagtatgccgacgcagccaaatgctccagtttggggagctaaaacttttagccagtaaattacacaacaacgttgaatttgcagagattgcgccca

SEQ ID NO: 40324 - DNA, 346 bp, Arabidopsis thaliana landsberg
acacaaaagcaagccgataacgggggttgaaccctttgatatttactctagaacgaccaagcagaagccagccaacaaaagaagctagcacataaaagaaagccgataacggggggtctacaagaagccagcaaacaaaagaaagccgatacaaaaagcaagcaaaagaaagccaataaaagatagcacacaaaagcaagccgataacgggggtcgaacccgcagataaaacttttgaacgaccaagcagaagccagccaacaaaagaagctagcacataaaagaaagccgataacggggggtctacaagaagccagcaaacaaaagaaagccgatacaaacagca

SEQ ID NO: 40325 - DNA, 496 bp, Arabidopsis thaliana landsberg
acttgcctcaagatccttgactgcttgttctcttttaactcccttttgctggcgagcacgcttcataaagccgatgcggagaacttcctgaagttcagacaacgatcaaagattgacagtgagaaacataaacgggaactcatatatcgaaaaacaaaggaagtgattgcccaagaagctcatttttcaagttagaaatagccctacagattcgctaaccaccacatcaagcatctattgttcagagttgggagttatccaagtgatcctaaaggtctggggacaaagcgtcaacatgagttcttacaacaaaccaagaatcgttttcaagggaaatgcattcttataagcaagatgcaaccacaaggcacaaactaatacgaaaagattcaacaattagcgagagcagagagggaataagcagatgtgatataataggatgaatggtgatagcgcacagaaatgacatatataacaccacaagcacgaagcaagt

SEQ ID NO: 40326 - DNA, 588 bp, Arabidopsis thaliana landsberg
ttcttctagttccctcctctgcttctccacctccttctccattttcatagtcctatcgtctctcgcttttatttcacttccaagtcgacttatctccgactctagctcactcacctttctgcttaacgtctctatgcatctctctttctctaccttttccagtgtcagcacctcgatttcgctcttcagcttttcctcctcttctattttctcattgttcacctttcttatctcatcttcaagataacgcacattggcttccagctctttgaattggtcatcccggtgtattttttcttccaacagctttgctatctcggctttgacctgtgccttctccgggaaaatcttctcttctgcgtcagacaatgctgcatttaaatccctgaactcatgatctctacctgctaaactcgatttcaacaaggagattttatcaagcagcttcaccacctctcttttatctgcactagccttgcttttccatgctgcagcttctttctgtgccgactcaagcaatgtctgcagactcttgagatttggctcatcagacttgcttgtcctcgacctcttttctatgaaccgttt

SEQ ID NO: 40327 - DNA, 1086 bp, Arabidopsis thaliana landsberg
taatcgagaaggaatccccacatttccttcagaattaacagattgctgaaaagtgcaaacacacaacaaagtacatgctttcgtgaacaagtttctgaattaaacaaagaatgtatcaacttgaactagccttactcttggctctgcatcattctcagaagacaagtgacatggaacaagttcagcatctttcaccttaaaacacaaatggaaggttattaattttaaacaattattaggacatgcacagccttagaacaagcagatactcccaagacataattagtaaacaacatagcagccaggcactacatttttgcttggcacaggagactcgctggattcttctgcgctggcttctcttctgggatttacaaggttgcaagaatcaacatcgacatttctctgaaaatatgtggctagcaataaatatctttggcagatatgagaagtgaagtattaaggagaaaataaataaaaacttactaccacgttaggcacaggagacttgctggattcttctgagccagcttctcttcttgcctcgataaggttgcaagaatcatcatcggcatttctctgaaaatttgtggttaaagcaaatatctttggcgggtatgagaagtgaagtattaagaagaaaacatttccaaacttactaccacgttaggcacaggagtctcgcttgattcttctgctccagcttctcttcttgcctttataaggttgcaagaatcatcatcgacattcctctgaaaatttctgattagaaatgaatatctttggcaggtatgagaagtaaagtattaagaagaaaacatatccaaatttacttcattagtcaaagccgcgtcaacctctaagagttcttttgcatttacaatgacttctacctcaggtatacatggctctgccagacaagaggacttgagactgatcaactctgtctccaatccaagagattttagctgttctcttcgaaggctatccttgagagtgaaaatttcaccttcagcaacctaagatgataaaaaaaagaagaaaaattgagatatttcaactgtgacacatcatagcttcaagaaa

SEQ ID NO: 40328 - DNA, 982 bp, Arabidopsis thaliana landsberg
aagttgggtttgaatgaatatgaacaaaatttatctgtgcaccttttaaaactccaagctttttttttatcactcttcagttccaggtaccagattcatgtcttctttttaaggttctctgcttttccttttttgaaagaagaatgttctttgtttttccttgcactcaatctacttgtttagagtccaaatttctcccttaagcaacttcctctgtttcttacatccctcaatttacttgtttagagtcagaattcttgagcttagtcctgttctgtttttcaacagctattaatctatttagctactcagtagttacgaaaaatagattgccagaaacttttggaccttttgacattgattggtacataacctctgtgccgagcaagttaaaaatctctgcacttaatataaattatctcattgtcagtttagttttagtgatctgtattttacaccaactttaaaggtttttgaagacttcttttatttagtaatcttcatatccaataaaagtcggatttttaatgataagtaaataagtccaaaacactgaaaaagtttttcaccacacggttttaagtgtttaacattttgacagtagtcggtacagaataatatattttttttagtccaaaaacaaattccatgaaatccttcatccaacggacaggattcattggatggtgggagcaacggcagcagatcttaatattttttccttttgtttaagatatttgaatatatccttattttcatgattaacataattaaagtatcctttccgatcttctctattttccttctcttattccaacgaattaatgcaatattatctatttatttactaattagaaaatttccattttttcaccaaaccaaaatcctgatcaaatttagggtttaattataaatactgctctatggagttagataacttttagacaaaataaaaaaaaataaggagtttgatgccaagtac

SEQ ID NO: 40329 - DNA, 613 bp, Arabidopsis thaliana landsberg
cgcgagctttcggatctcggcgggcgtgatcacgcgctagagcataagccgacgggccgcggcccgtgcggtctcgtgaaactgcggcatcacacgcgccgccacatgagccggcatgccatgcgggtcgccaacctcgacgagcgggtgcacatcgacatcgtacggaacctcgagcgcggccaggcgtggcccgagcgcaccgcgccgccgcgcgagctcgagtgccaagcgcgcttcgggcacgctgccgacgcactcgaacggggtgtgatcgccgaggccgagcaggtcgcgaaagtggccggcgttgccaggccgctcgccgaaattatcgccgaacgtcgcgtcgacgacgtgcgctggcaggtgcgcggcgaactgcagccagacatacgcacacttcgcgcactcgccgcaccacggcttcttgatgttgcaagagtgcgtgagcggagcgagctcggcatcgcgcgcgagcaattcgaagatgacctcgtcgtgaatcggtgcgaggacgctgaagtagcggacgttggcgaggagctgcgactgcacgtagtgatcgagcagcagcttggccgcccagctctttgcccattgatgattgacg

SEQ ID NO: 40330 - DNA, 518 bp, Arabidopsis thaliana landsberg
acaaaatttgttattgatactttgttatttttttttaaagtaagaacgtgtaatatgcatttatgtatttatgtatggatgcctatgtgaaaagagttaacacttaagagtatattgtgcatgatgtgttacgtttccattatgtatacaatatgataatacataaatttacacgcataatatacctattgggcgcaaagttatacacattttaaaatgggaaaatattaatcgtgcttttggggccttggcatatgagctgattatatatggtcggatccatatgtacgtggttggatgtattgattgtatatatgcttctttaattgattgtatgttcatcctactttttcgaataatttatgtttacctcaatgtcggattgtgcgaagcatttagctggaaaccatttgatgttaataataagtaagaattagcatagatggatttataaggatataagaattaatacctaaccattttgaccaatgaaaaagtttggatcaccaaataaatga

SEQ ID NO: 40331 - DNA, 506 bp, Arabidopsis thaliana landsberg
gagacaaacttattgccatgggcattccagcggatcaaattctttttattcatgatgcaaagactgatttgcagaaaagcaaattgttcgatgaaatgaataggggtacagccagaattcttcttggctctacagcaaagatgggggccggcacaaatgtacagcgcaaacttgttgcagagcatcacttggatgcgccttggcgcccttcggatctggaacagcgtgagggccgtattattcggcaaggtaatgaattttatgaaactgatcctgatggctttgaagttgagattttaagatatgccacggaaaaaacttatgacggtcgtatgtggcaaacaatcgaagttaaggcgactggtattgagcaattccgtagaggggatgcattgcagcgtgtgattgaagatgtgtcgagcgaagcggctaatgcagcagaaatgaaagcagcggccaccggcaatccacttatttttatgcaagttcagctgagtgctgacctg

SEQ ID NO: 40332 - DNA, 556 bp, Arabidopsis thaliana landsberg
taaaaccgggttaaaccaaaaccccatatcaagtttcataatgttgacaaaataatccagctgaagtctccaaaaccaaatctttgtataaaatttgtaactttcttgttcacttgggtctaattctgatccgtgtctaatcaccatgacacgttattaaagaggactatacctccttataactttagcttatataaatcctactgacgaatcatgagtcttctcagttctcatacatcattgttataagttatttcaaaacaagaatggagcttgagatcacgataacttctcaagaactcgtcaagccctcttctcgaaaccttaatcatcttccatgccatcatcatctctctttccttgatcagctttctcctcccattttcatgcctttccttttcttttaccataacaagactaatctctcagacaaagaacgaagtgatcacatcaagagttctttgtctgaaatattgaatctcttttaccccttggcaggacgcatcaagaactcgggtgatgttgttatgtgcaacgatgtgggtgtgtctttcgt

SEQ ID NO: 40333 - DNA, 445 bp, Arabidopsis thaliana landsberg
ccaaggggaacagttaaagctctctcctctttcttagttagtgctgtttacgtctgaataaaccgccgttttggtccatctcgctctctctgtctttttcgaatcttttcttcgcttttaaatcttctctttttccttattttatttagttttcgattaaagttatagattcgttggatttatcttttcaaattaaagtaattttattattctagatgattatttccaccaccagtagaataaaaaggaaaaacgttatgtttttgtcgaattttaatcttataattgaagtaataagatttttaaggttaagcaaatcgaccaaaaaaacaaatcgaaaaggttgtcttgattacacgagacagaatgtgaaattattagttaattagtactatatgatttataaattaaaaaaaaacaataatagtagatggaatcatatgta

SEQ ID NO: 40334 - DNA, 628 bp, Arabidopsis thaliana landsberg
ttatatgattactaaatatctgaacatgtatcatagctgtgagttacaatgttaaaagaatgagattaccctttctttgcgagcttctttcttctgttcaatctcctcaagagcacgggcacgtcgaacttcaagggctttaagctcttgttccttgaaaggccagtcattgggtatacctgggtctttctctactcttggcttacggtgaaggccaagctttttagcatcctttgccttcttcttgtggtgctccttcacctttttcaggaccttatgcttctgcttcaaggtcaccctcttactcttactctctgcaaaaaaccatcaaaccaatcaataaaaccccagtaggaatcctgaactgaatgatatgattcaaattcattcaataagacagatccagaatatcaatatgattgaaggatgtatcttacttttactccgtttcaccatctttctcgccctgggatgagagcgacgcaaacagaaaaactgagtaggttaaaagaaaagggtttatggagaaggaagatggacatatcggcgccaaattagggttttgctattagatgtacttggatcattacccgacccgttatagttgacccgaatcaacttaaaaatc

SEQ ID NO: 40335 - DNA, 411 bp, Arabidopsis thaliana landsberg
ccctaaggtaagggtgcctcttacctctattcatcatttaatatttacttttaatgttgtattaatctaagagacagctaaaatcctcccgttgaggatgctctaacgaatctaaaatcactttcccccgaaaaaaaataaaaaagggttagggttcttcatctgttgatcgacgatgtgtgatatcgatggaagtacgatttcgaatttcgttaatgttaagtttttaaggtttataatataactctatcgattccaatttacaatgtctcaggttgggttgcgtggctcgaacctgcgtttttcctgtggaaacctgggggccgtggctatgttagaccttcatgcatgactaggacggaggaagataagcctgagctcacaccagaggaagaacttgcccatatacca

SEQ ID NO: 40336 - DNA, 599 bp, Arabidopsis thaliana landsberg
  unsure (1)..(599): unsure at all n locations
ttactgccaactcacactttaatgacaaccactaactatatgcctacaacgtcacgttctcttttatatagtactaaaacttattctactgtacttatataatcccttgttgatagttttactatcttactatttcttttttatgacagcaccatcttactaattaacgttttgtattaaaggtaaatagtaaacgataatttgaagcatcggttttaagataactaataaagtaatgagtgtaactaagagttaggtggatgtaaattcacatgtgaagtaagattaaaaagctttaagtttgatttgtctctttgtgacgacaagtttatacttgccaggctggtcgttgacccgttgaccaaagtaaacgattcaatagataatagcgcgtttactttcgctctattccataactagactttatataaatcgccagataaaaaaactatgatttacataattaaaaaaacatttagtgttagtaaaaattagttatatatttgagtctctttagactggttgatcattttttacaatcataattttttntaaaaaattgtcatcaaaatcgaacaggtttatgatccaaaataata

SEQ ID NO: 40337 - DNA, 276 bp, Arabidopsis thaliana landsberg
ccataagcttgaagaccttagcaatgaaacttcagcatttgtttttcaaccataggaccactagctaaagccaggagtcttaagccataagccataagccataagccataagccataagccatacgccataagccatttgtcataggcaccaagccatttgccactagccattagccataatcgtgaagatcttagcattgcaacttcagcatctgctttagcactcgcagtgtgccacaactagcactagcaaaaagggtgtaactttagagctt

SEQ ID NO: 40338 - DNA, 614 bp, Arabidopsis thaliana landsberg
atctggactaaagtccccactatagctgatgatgtgtttgagataattatgcaggtaaagaaatctcgtgttaagctcttgattcaatctgtttcttggtgtgatgtatatatatgtatcttgtagatcactgacttgtgtgttactttggtttcttcagaacgctgctcgtttggacagtgagatcatctatgaccgtgattttgaatatgattactttggatttaaaactcttgagagatcgtacctcttgaaagtccaagggactgttgttgaaaggcctcaacacatgctgatgagggttgctgttgggatccacaaggatgatattgattccgtgatccaaacttaccatttgatgtctcagagatggtttactcatgcatctcctactctcttcaatgcaggaacgccaaggcctcaagtaaatacctatcacttgatatttatgtattatataagggggtttactttaatatgagtctctgctgatctgctattgaaaataattgacatttgccagaaaggaagctgcttcctaggctgcatgaaagatgacagcattgagggcatatatgaaactctcaatgagagtgctgttataagcacatctg

SEQ ID NO: 40339 - DNA, 402 bp, Arabidopsis thaliana landsberg
tgcaactgcaaagtgatcattaagattttttgttttgaaaatatttccaaacaaattacgataattacgataaaaaaaagtcttcattgacgcaaaaagttgttgatattgagaatgagaaggttgttgatactaaaaatgagaaggttcatgttagataactatatgcataagagaggttcttcttagataactatatgcataagagaggttcatgttaaataactcaataagcataagaggttatgactatacacatatctgttaataaagtcagctacaacaaatagaaggtctaatatcatagacgataccaccatgaaaaatcatcatttctcatagtattcatgaaaaacatcaagtggaatttttatgagaccatcaacttcttacatttagtga

SEQ ID NO: 40340 - DNA, 615 bp, Arabidopsis thaliana landsberg
cgaccacataatttagttatttatattttatagtatagatagaagattctcttttttgtttctcactagtggtccaatgcaatgagattacttagatttttcgtctttgagtcaagtttttgtttggaggtacgttaagatatgcttaattttgaatgggttggtgttaaatcattatcttatttcattattacctaagtaattttgaatgatatgaactgatttggttgacgaaaatcataaaaccattaaatttagtcaaattgatatcatcgtgaaaaggagaagtggtatctcaacaccgagacattagcttgacgatcactacgtagccaaaaaaattgtaagtttgttctcaagccgataaatttgtagttcattacaagctttgcattgaaaaatagaaattatactttaaattaagaaaaaattttcatcataaccaaaagggaatttgaggaactcaatagagcaataacacagtgtacttagaaacaagcaaaacaatcatgtctctgattaatcgttaaaattgttggcaaagaaaaaatttgcttacaagtaacatccaatagaattgtttaagctagcagccatcacaagacatgattgtgc

SEQ ID NO: 40341 - DNA, 852 bp, Arabidopsis thaliana landsberg
ggatcgtggatctaattagacatttatgttttcgtttctcgtattcaatgttcaattatgtttgactcctaatagtaaataaatagtcttcaagttggttagacccaccatatcttcttgctgagtacaccaccgactgcaaagtattgtggattttatggttgagtgtcccaaattttcataagaccccattaatttaaaaccaaaactatatataggccactcatacctcactcccttgtaagaaacatacttatcaatcaataactcattttaaaaaatatggatttatgtttattaattagtatcatgagcgatttaagttcaaatttagacccaattcataagatggaggaaagggtcagaattccatataaaaaaaaacacaacgtaaatgaatattgtgagattgatatcggggagctgaataattatgttcaatcgaaatctgatttgggtcatcaagtgacatgacatgttattatcatgttttggttttctagtcaatatacattcgtacaaaaagttgtttagtctaagcttacaatggctgatgaatttgtttttattactccttttatttcatattatatcggaaagctaaagaatcgtcgacatctattcatatacttttaaaccttttgagtttcaccaaaactcacttcatatttgccaaggttatcaagatatgttataagctctattgtttttggatagcctattgattaggaaatatttatcacacccatcgtgttttacttttaccaatggatggctaatgattatgagccatattcattgaagcactctcttctgtttttagtaaaaaaaaattttgtctagattttaaat

SEQ ID NO: 40342 - DNA, 181 bp, Arabidopsis thaliana landsberg
aagtggatgtgacctgtctgtctacacaatattacaaagatgttttgctattactcctacaaaaaataatactaggcataacaattattgaaaaattattcatcacttttgtatctttcaaactttcacagttcacaccacctaaaaaacagttaaaagtaacaacattatcactttccac

SEQ ID NO: 40343 - DNA, 537 bp, Arabidopsis thaliana landsberg
taagttattaatttttagtattcaaaaaagaaaaaaacggtacaaccaaattaacgaattaatatctaaaactttttaatcaaaagttcaaaacaaatgatataaccaactactaggaagtaccaatagtcgagtagttcgactccaaataatcgtattaccctcattgtaagaatttggttatggatcatgttttgtcgatccaaatgacgattaaaaagaagaaaaaataaaaacgatttcgccaaatcagtttttgattaaagaaaacaacacaatttcatcaatctatcgctaataaattaataattcatcactcaacttgaagacaattaacgaattgttaacaacaattaatgcctaacacatcaacaccttccttcgaactttgattttgaaccgtcagatcatcgactattcgacacaaccccagagaaaatacacgtggcgctcatctgttttcttatcatctgcgccgcatagtagggaatcatctgtgtatttgatgcttgactcgatgatcaacgaacgcttaac

SEQ ID NO: 40344 - DNA, 651 bp, Arabidopsis thaliana landsberg
ggctttctcgggtaagccagcgtcagcatcagctagtcgggtatgccaatctccaatatgagcaaccaaaaccgaacactgctgccgtgtttccgacttttttaaaaaaatgagttttccgggtatctatgttgttgagcttctgaatcgatgatcaaaccagagttcaaccggcaaatgcagagcataatgtatggtaccagaacagagaaaacttatcttgggggaaatccggtttgacgtgccctatggcttctatccaatggtccagggccgagtattcccagcgagttagagtttgttatcgttggtcgctcagtctgaacatcgttttctgttcttcttcttcgtttccacgcttcaaactttgctgtgtcaatgcccttgtgaacctgctgtgatccttgggagttccctgctgttttgaatttttgttgcctctggaagttcctagaaccattgaggtgcgatggcccgaccccttcctcttcctctttctcctgcttcaatttggagtagatttgattgagtcgatcccccgacaaatttgagaaagttgatacatagttccacaatctcattgtcattcctgcaatttgatttcccgtaatgatacaaccatgggcattaacatggttatctgagaaaagt

SEQ ID NO: 40345 - DNA, 356 bp, Arabidopsis thaliana landsberg
tgtgcttttggcttctttttttgctaatatgctttaggaataaaccagatgctctttagtcaactgatgttgtcatagcaattgtgtttacttatttttttcgctctcgctttagtgtgcaattgacccttttcgtgattaagatggtcaatcttggccatggcttttgttccatcctcatattttcttctaatcatttggtgttcggatggcgtattgatacaatgagatccatgtgcgattttgtatccatatgtggaatttaggactattgtttaagattattcactacagtctacaactagaatttttgcgtcgtaaaatgcattcaccctaggtccctaagcattcaccct

SEQ ID NO: 40346 - DNA, 150 bp, Arabidopsis thaliana landsberg
gctgtcgaggttcttgctattaagagtcttatttagacctataaccacaaactaatgagtggtaattacgatatcactcacgagacaaaacaaataaagaatcgtgttcagtcgacaacataaacttttaattcaatttgtacttatggt

SEQ ID NO: 40347 - DNA, 582 bp, Arabidopsis thaliana landsberg
  unsure (1)..(582): unsure at all n locations
ttcttcgtaccagaaatttattaaccgtctcactagatgatacagaagagaagacagtcacgtacaagtacaacgttagcggtcaaagctataagattatcataagtcaaaagtacaacatgcttaagatctaaacaatatttttataatagaaataaaataactgaataggagtattatactaatcgtgacgagacgacaaattgtagaccatgtatttaaaatttgcctccgggttatgcgaaaaaaggaaaaagcattcacatgtctctctcctgacatgcacgaaccaactaataacttcttattatactaatcacgttattatcttattaaaaaataaacccattttgaccacaacctttctctatataaacattttagtctcctcctctctctctataaccacaacgattttctctctctcacgatttaaaaagctaaacaaaaaccattgttttctctatctttcttctccaaaaatggcagaaacaacaacagtaacatcttcattgaagcgtcaaagagatgagcangaacaaganatcatcaaaacacangaagaaacgaaaagacaaaagc

SEQ ID NO: 40348 - DNA, 535 bp, Arabidopsis thaliana landsberg
tggaatcattttgtacaaaaaaataattaattatttttaacaaataactacccaacatcagcaatattatataatagacatgtcaaaacagcttaattttaattaataatatatgtaaacaaattgtctcgcggtattctccacgcatgatcagctggtagatgcactaaccaaactactcctagattcgtgattcaaagttctaatgcaagcttggactctctcaagatcttccattttgagggatcgggtgtttaatgggtacataattatcatatgtagactaatcagtatttcttgctaattcggttagtctagctactaatctctgattatctcattggataatgtgttacttgaatagtgatgactctgttcgattgaaaggcatttaaaaagaggcaagtgaagggcattctatttctctaccattgccatgcatgtatcggagtatgcacgacatgcatgaatgaacataatctagctgtgatcatgcactttgtatcatggtgatcttggtccccactctgagact

SEQ ID NO: 40349 - DNA, 1147 bp, Arabidopsis thaliana landsberg
tctgtattcttgatgcactgggttgaccattattttgttttactaagaatatatctaaatgactttttatttttgattgaaatatgcccgtaatgggtgcaaaatactctacattcactcgttttcacttggaaaaatattttattttattttaacaagagaaaaaatgttttgtcaacttcttagatatggcattttttattgaccaaaatggtagaaattcattcttatttcagtatgacgtatgttttctattgtcatagaatgcaaatagtccctgataactcacacacataaccatcaaaactgtgtgaaggatgactggataagtcatgctttacattgaaacgatacacaaatttcttttcaccaaaattctgtaatttttgtttttcttagagaagttatttttgttaggaaaagagttattagtaagttttcaccaaatgtttttttttttttttttacatgaaagttttctgacgattgatggaactaggttgtaatcacataaatgtttatgtctttaaagacgagagaatggaagacgaaattagtgagacaaacgtaaaaactcttgaaagattttctctatatatatacgtgcaaaaaaccttcataaactgtggagatcatcatgtttatacaatggtgatgttgcatttgttcaacttaaaatccaatttcacattaaaaccaaaaacaaaaaatccaattaacaatcgagaaatcacagaactatactttgtttctgtctgattcccgtttggatggcgatacaagccaaagaaacaaccaggattaactcttgaaagccacaagcaaacaaattgcaatataaagaaaaagggacttaccggcgtttcttgggaccgtgaacatgacgagctcaagaacatgcacctagctaacgaacaccatatatttagcttttcaattcaccaccatttctgaaaacaatattacaaccgtttttttagattttaaatagattaaaaattccccaagaacatggtacgcataaacatttagacttattatgtattatgaaatatttaagatagtttattatctttaaaaaatataattcttattcgttattgaacaagtaatatatcctttgaaattccaacatcacaccgtcagt

SEQ ID NO: 40350 - DNA, 849 bp, Arabidopsis thaliana landsberg
gggcaccatgtctctttaaactatagatactaagaaatctaagctattgttaaaccaggaacgtgtatcaaacataggttacaatgttgttaacggcatttgcactccagtcaaagatcaatcagctccagtctatatcaccattggtgatggaggcaatattgagggcttggctaccaagtaagctaacatttcttctcaatggagccgattttttatattagattctatagattatgagtttaaatgtgtgatatggtttcttgtagaatgactgagcctcagcctaagtactctgcctttagagaagcaagcttcgggcatgcgatattctcgataaagaacaggacgcatgctcactatggatggcataggaaccatgatggttatgctgtggagggtgacagaatgtggttttataacagattttggcatcctgttgatgattctccttcttgtaattcttgagaatctatgaggaataggatttgttgtatctctatgattgaacaaccatccaaataaatgaattgtttgagagttcttgtgccaaacagaaaaagttaaaacagagatcggacagaaacttatttacaaaccgtttggtttcattgttctgaaatccaaaaattcagaaccgattgtgaataaccaaaccataccgaaccgaataaacctaaccgaaatcaaatcggattacaaaaggttacctatggtttagtaattttgtttttatgaaaccgataaacatgaaaaccggaaaacccaaatggaaccaatccagcatcatccaccacactcttcacattttctaagaggagtttcaaatatcgtggagttttctgcaag

SEQ ID NO: 40351 - DNA, 367 bp, Arabidopsis thaliana landsberg
agtataatacttgataatttctctaatttccgagtgtaactttctctcattaacaactaaccattcgattattttaagaactttggttttgatacggttcagtttggtcagttattaaaattattgggtttttttgcccatgcctatatctcccaaaatcacaatattcaaataaaaacttttaccacttgaaccatggttctagtttagaatggtttgtttggaaaagacaatagacacctaactcgtaattttgtgctttatcacttatgagtttcacttttaaatcagtcacttaacaaaaaccggacgtgacaatatattatgtccagatattaatttgggattagcctataacatccaatca

SEQ ID NO: 40352 - DNA, 623 bp, Arabidopsis thaliana landsberg
  unsure (1)..(623): unsure at all n locations
tgttgagagacaaaaaaaaaaggagagaaatgtttagaaatttatcttcatcaatcatcatacatgataaatgttaatatattaaataaataaataaaaacagaacaaaaatgtattttgaaggaaatgaaatttactgttaatgaattttctaaaataaacttttagtttggggcaaagtgaataatactataacttgttggtcgtgcgattgaatgcaattactcggtggtaaactattttataccgccgaaaaatggttaatatatatatatatatatatatatatattgccacaaaatttatagtaaaaaaagaaataatagtaacaacaatatcatataatttgaaaatatgtgttctttttttaaaacaagataatattagaaaacatttaaaatatcaagattagaagacatttaaaatatgtaaatttgtcttaaaaatatattttcaactgtctggttcccatgtctttgatacttaaaaacaactgtntaaaaaaaaaaaaaaaaaattaaaaaaaaaaaacttacgtggatattgattaagaaacagaaatngagagataaaaattactcgactatgcaagtttcgaatgttcgtaaaatgatgatgatcaa

SEQ ID NO: 40353 - DNA, 809 bp, Arabidopsis thaliana landsberg
caaattctaaaagccttttatgtcatttcttggggtcaacaaaaagttgaagctccacattttgttttgtaatatttccatccagaatatttagtttgtataattgtatttgatttatgaaatttaaaatccagcctatatagtagactttgtaaccagattctgaaggcatcatttattcctatggggatttaagacttaggccatatgatagatcacatattcaataaaaaccatgaacattgttacgagtatgaaaccatatatttaaatggctatatacgctatcttacaatataaatttgtatgcaattaactatttccatatacaaaattaactaacttttccacacttcatccatatttaatttctagcttattatttaatatattgaaaatataattattaacgaggggatcttttgataaaaaaaaaacgaggggatctatctttctctacaccttatattttgagtaggattaaagaaagaaatgtcaaaattggatatgtaaaaattttccaaagtggaattggatatccagtcttagttgaagtaggataatagatgattagatgaaatgatattaactacatgtacatgatataggattacaaagtatatggattaatctaaacaaagatatataacccttttttttaatttgcttgaatgaaaattgtattttgaacattatattggcctcttgtaaattataatcagtttaccatgaataatgttattattttcctgataactacttgtaattaattttacaacatcattaagatatatgttgggttgctcatg

SEQ ID NO: 40354 - DNA, 598 bp, Arabidopsis thaliana landsberg
tcggagtcgctgccttacacttaccaattgtctccgtctgatttaaacctataggcttacgttcattacaactatatcacaagttaacaaaaataaaatttctaatatgttttttctggtacattctctaaactggccaaaatggttgtcatttgcaataatatgccttacgtaatagacccttgtcatgcataatgtttttaaaagttgtgttatattatacgttggaatgataagatttttatttgtactttgaaatggatctttttacttttaaatacgaaacaaaagtcgatggctgccagaaaaaaattgtggttaagaaggtagttgccgtcaattgggtgatctaaaaaaagaaatagaaaatcaacgaaaatggaaataatttgcggagaggggaagaaataatctggtggagtcggcgcattgtgttcacgtgatgacgtgacactttgtgggactcatttttatgcaatacagctcattttccgattaccataagatggcgggaacctctctccacccgtcgtttccggtggaacaaatgggtccgaaaccgtacggaggaaaagcgtacacgtggaaaccatgccaa

SEQ ID NO: 40355 - DNA, 588 bp, Arabidopsis thaliana landsberg
  unsure (1)..(588): unsure at all n locations
taaacatattgaaccgaatgaccaattctttctcaatccttttcataactctatctgatgtgtgccttttttatctgagcttacgagatcattacttttgcactttgtaccttactcaacagacattatcactatccaatacaatttttctgtacagttataaatccaaacttctaatcatgactaccataatcaccagcttccaacaaaactagtggaaaatttagctattttttgcgtatcagtttaatttatgtatctatctttgtataaaacaaaataaaaatctaaaatatgtaatttggaaaatggagagggagtgatattttgaccataatgttccacttaaccctactaattatactaaagcttagtcacaaacacaccaactgtatttattattcacaatcttaatgtttgttccagctgatatgaagaagaaagtacactaaactgaagcagaattaaagacaaagatctcactatgtggcttattgtctcccattcgggtctttctttaggacacatcactggccccttctcttgggattagctagggaccaccaattatcataacacnccatgctt

SEQ ID NO: 40356 - DNA, 790 bp, Arabidopsis thaliana landsberg
agccaaccaccgaagacattatttttatgtattgcattgcctagtactatttattggtcatcaagcaaatgtttttataaatcaccattgcctaaaaagtatttaaaagaggtgataatatacatagggctctttatatgattgaaaaagttaacaattgggagtctcacatatacatatcaatcagaaacaaatgaaccatagtattagggatggtgattttgaaagctggtaattgtagtacttttgttaatcttagggtaaatcattgtggtttgtcaaatcattatatagggtgtattttatacgtaacatctcaattccaaaatatcacacaaacgagtcattgaaaatatatataattgttcatatttcgttttaactataaagctcacattggcaaagttactttctctcatagatgctgaaaatttaaaacttgaaaaattttcatcctttgcttaaaccaacaaagataaaagctaggaatccacaatgtcagatcatagcagattaaaactaaaatctaaattttatttactcccatcgttaatacgatgtttattgtaacgtccaaaagacgaaacaaagttacttaaataataatattccaaaaaacattgtgattacgtagatcccgtgaactccatctttgtaatctctcaacagaatataaggtttacccgtattcctctgtatcttttagaactaatggaaactccctccccattgtccatggtcttcttttcaaaccccaattggataccaattccttattcttaattttcaa

SEQ ID NO: 40357 - DNA, 863 bp, Arabidopsis thaliana landsberg
aacgtgttgtcttatcaagaatgccagattacaactagtaaatacctaaagagaagatcaatgcatacctatcctcttggacatcaatcaattttctgttttatgttctctaaccgattaatgccttgataatttggagattttttttttttttgtgcaatgcgtttttcgtgaattggaatcaaaaaacaaaaaaacatcggaaatcatctaccgtagaccattataaattaaatatatttggaaaattctgtatgaaatttaaatgcattatttatccgaaacaaatagtgagcacacgttaattatattgttgaagaagacctcttatggaagttgaatttctcttgtctaattgttaaactatgattatatccaaaagatatctaagattctgacatcatcttttatctaccacttgttcatacctatgaatcactctttgaattccttaaactcttcataatatattgtagtaaataaatagaaaggtgaaatactcctttgtaaagtttttttcttttttcttttggcatcgatatttaattgacccttcgttaatttctagttttgacatccctcatgtctccaacgcactccagagaccatagttaaagaaacatagaataataaccaatttcaaaatcattctagaatataagaaacaaaaacaggattttgctacaaatctatgatcaatccaaaagctggctatatattacacggaaacaattacttttgcaaattagtataggtgaacatcggtgaagcttagtccgaatgtatcccaagacatgatatcttagagcgccacatgtactctaaataggtgaacaattctaccataactatgaaacactaat

SEQ ID NO: 40358 - DNA, 574 bp, Arabidopsis thaliana landsberg
  unsure (1)..(574): unsure at all n locations
gagcgaacgaacacggcggccacgatgaggatcgagccaaacatccacgcgattattttcatttgctgcacgaagcccttgatcgaatgctccttgccgtgcggcgtggcgcggtacagatcgtccgcagccgacaacgccgcattgatggccagcagcacgaagacgacgatcagcgccagcgtgatggccgacaccacggcttcggccctggccggcacgcccggcaccgcctgcaagccgaacttgatgaccagcatcgggatgacttgtgccaggcgcaggaacacgccgcgcttgaccatggcatcgtcccaccgccactgcgtgcgccgactgatcacgcccgtcacggcaatcattgcgcgccgcgtcacccagctggtcagccaagccagcagcagcagggccacacagcccagcaacgtatgcatccacgcctgacccaacagttgttcaaacctcatcatcaccttgccttaccatgccaacaacgccaccaccatataggacatgngccatgcctgcagtgcanacggcgcgcccgtcgcgctgatcaccggcggggacgccg

SEQ ID NO: 40359 - DNA, 536 bp, Arabidopsis thaliana landsberg
accgccttctgcagcgcgcgcagggcgtcctcgacgtcggagccgcccgattcgctggaggacgactattcttctttgggctcgtcagcaaagctggccagggaggtcgcgcggctgccgcgcacttggatcttgaagtgcgcgcgcttcatgagccgctgcagctccagatctgagcagcaccagacaggttgccgcgtttatatttatactgggggaccgctgcacgtcaacatgtacgggaccagcagccagcttgcagtggcaagcttgtaaacagaccgcgaagaggatgtgcacgcaaccgcgctaggcccgctgtgcaggcatatgcataatgtcatcatgcaaggaggctgctcactatctgcttcgcaagtttcgatgtatggacagcaggaatgcacttccacaggttacggctctgaccacgccatccagcagaatccttgatcatcagaacaacctcaacgcgcagctgattgaatgtatgaagcagcagagcttgcgtgaatgtcaagcagtctggggcttgt

SEQ ID NO: 40360 - DNA, 870 bp, Arabidopsis thaliana landsberg
cttttttttttttatcaaaagcccaactattttctctttcccgaaaaaaaagaagagaaagttagcacactttttagtagtatcacacgtgagagaataaaaaaaaataactttttataagttgttcagtcacatgccataaaaagccatacaatgttcaaggccacgcaaaatttgatggaaagcaatcaattaaaacatatttcaaaagtaatgaagaaaagaaaagaaacttcactcttcaggtttcttcaccttaaaggattcgtctatctttttgtgggttttcttcaacttccaagctcacatatgtgacaaaagcagctgcagtaccttgctgtgtattttttaggtttcgtatagccaatgaaatgattataagtaaaagtgatttgattttgcttttcgtacccatgtctgatgtctctaaaaagattgtggaaacaataatattttgtaaaagcattgagatatgtcctgaatagtagtacatttttgtgagtacatttatttttggatagttcatatgacaatcacacgttctggtctatcaaaattaatttgaaggcataaaaattcagggtaactaaagagagatttaaaagtacttaaagacttttcctttttccgtgctagaaaagcatttgaacttataatgtatgtaaataaatgcaaaattttaattaaaagtttctttatcaaaggagatatgcgactttgaggttgacaaagtgtagcttcaaaatgaagaaactgatatcattagatagaataaaagcaagagctagcgcctccttaaatactttaaatatagaaaatattttttagtcaacttcgttatcgattacgagtgatgaactttgaattttt

SEQ ID NO: 40361 - DNA, 246 bp, Arabidopsis thaliana landsberg
  unsure (1)..(246): unsure at all n locations
gaaataaactgcgtcgaaaattgcaatcagtgcagcaatttgcgacatatagacttcttaatcgacaacggtagatccggaccgagacttgagaatggggaaacacgtgataagcttgctctcgatgatcacttatccgtctaaccactatccttacttttcgcactacttatttacttcacattttgtnnnnnnnnnnnnnnnnnnnnnnnnnnnnnctaagattttcgcggcactataatagac

SEQ ID NO: 40362 - DNA, 702 bp, Arabidopsis thaliana landsberg
agagtgtagaagtggtccattacagaatttaatttcattgaaaattcttcttctttttcttttcttttgatgttttgtggtccaattttggaagtggacaaagcctaactttgagtgttaataagagaagcggacacttacgccactcttatattagcaagacatatgacatgttttatgttactctgtactatttaggcaatactattgttgatttagtgtattaatattattttttgtgtcgtcatccaactttagacctaataatccatgttattaacacaagtaaaaagtgattatattactatatatcctagttcatctgtgtttatcttttattcttctaaatatatactctaagaacctcaacaattcaacgtttcattgtcaataatctacaaaaatgtgaatatggccacattctcacgtctccatctcactaatgtacaattcaaaagtatataataagataaaaagcttataaaactacacttatttcgcttatacatctcatcaaaagttatataagagaaaggttggatggggacacatttacaacattatttgatcaagaatgaactcttgtttctgacaaaatatatatattgcatgactcactgattatgtatgacatatttttttctttaatctgttatccatcaatattaaaatattatatatgtataactagtggtaatacac

SEQ ID NO: 40363 - DNA, 828 bp, Arabidopsis thaliana landsberg
aactcagatgatggctcttatatatgtagacaagagagcattacattctacttaaagatgaaatgattttgcattcaactatgaccaggaacatgtaaacccaatattcaaaaaacattactagtatctaactctagaaaacctgaagaggttacagttctatgcctctggaagtagaaatattctcacttgcagtagtctcaacctcaatttgtatcaactaatgactcacgacaaggaaagagtaaaagctctggaaaaaaatttccattgagaaacaagatttagaaattaaaaggaactagttgctaacttgtgcaatttaccaccatctctcatctaacaaaggcttatataacataactacatcaacatggtactcatcaccacagaaagacagacatacatgatctaataatcttaggctatagaatgtgccacagcaaatacaaaaacggaaacaatcgtaagactaacctcgagaattcgacgccattcttttccaatttgctgccagtacatgtaaaaacaaacaccaaataagaataatcaggcatcaatgaaaagaagctaagcaagaagacgcaaaacaaggttagtttctaacaacctgagcaggggatgttcccaagacatatcttctgacaaaccataggcaaaaataagatgaatgtatcagaaaaccaacagggttaacaaagatccaataaaactaaccttatgcaacacaatatcaaacggaccctgctctgaaagtggcaaattataatctattgccacaaataatatccccttattcctgcacaaaacacataactacagtaacta

SEQ ID NO: 40364 - DNA, 807 bp, Arabidopsis thaliana landsberg
ttatgatggttggaaaaaaattactctgcttttatatgggatcgaaattaaaattaattatacgacgtggggtcgtattgtaaatattctgaaaaatacattaattgtcgaattaaatgtcactacttaagtataataatcactgcatatggaccatatctaacactatagctgagtgactacactcactttcgtctttacggctatctaatgtttcttgcttgtgttatgtctcttctctttacttttagtttactgctctcacagaaaaatctaaggtataagacttgactacgtaggactaaggacttaccacacttaacggtaggtccactaaagatacaagtagatgaaccaaattatagaagacatcgaatgtacatttccaaacaattttctacctttcgtactaattttaaacagaatcgtacattctactacattttgtcttcattaacaaaactcacacctgtatttgggcttaattttacttaatggcccaaatagccttctttgacttttgttttggaaaacttaaacaatctagggttttaaagctcgatgtgtacttctattcaccagaaagctgttaactaggtgccattttatccttgttgtgttgttgcaatatcaacttatcggtggttatagtcttatgtacacttatctatccgttcctttgttttattcataaattttttttatttccctttgagataatcttaagattggtggttgttttgaaaaagtatttacattgggaccatcttaacttataagtcttgtttagagtgaaaattggtttct

SEQ ID NO: 40365 - DNA, 200 bp, Arabidopsis thaliana landsberg
gcatttgtcaacattaaagtctttgttttctaataaaaaaaagttgccaaatacttcaatacaatagataacaacgttttacatatccaaacaaaaggcacaatatagaaaagatagagagtgacagagtaagagagagatgaagaagaagatggttttacataagatgataagacatgatggatacagctacttattat

SEQ ID NO: 40366 - DNA, 763 bp, Arabidopsis thaliana landsberg
ctgaaaatacttaaatataatagcatgactagatgaattcaaacttgactttctttattaagcaagttgcctaatcatgacggtgtagtgcaaactaacaaattatgacgtaaaaagtcgagttcctcaaaatgtttttaacaagaacaaattatttacaaatagaataatgaaaaagagaagatgccttgatgacagaataagcacaaggctttgaagaggggaccgatgaatccaaacaaatctcaaatcgtttcttttaaccaaacttttaatcaatcaatgaaattccttcaattaccaattaaagtaatatcatatatcatattggtaatcataagcttaaaataacaattttgcaataaagcaaacaaataattaataattatggttcagttttttaactcatgaaagtcatgttgccaccattatctacgataaaataattagtctgtctttatagaaacaacaaaagataattatgcaatgttcatatcatcatatgcatatatgtacttagttgattgcatttaatttatctacacctattaaattaagtatggctttagtgcaaactttgataggtaatgaatcataagctcaaaagaagtttgtccataattattgtaatacaacctcacacacttctcatcaaatctttctttaattgtctccgcaatcattatttactgcttcacttattactagtgttttgctttaaatttggatttatttgtcttttagcctgtaagtgacctgtcaa

SEQ ID NO: 40367 - DNA, 471 bp, Arabidopsis thaliana landsberg
tctagtgttctccgcaagatgaggtatctcctcttcatcttttttcaacaaatatcattcattatgcattttactatttgctccttcataatgaaatgattttcttcttgctgattcctcttgctttttgtttctttgcaggcctggtggtgctggtgcatcccataagaagaagggatgcgctgactctggttcaacgctctgtttcttctaaaccagttttctgttttttgaattttttgcagaaccttgggtttcctttggatattcagaagcaaagataattaaatgttgaagcgacaccattatgacttttgagccagctgtcttcaggtgtggctatttacggaccaatctggcatgaaacgagtttttcttgaccccattttgtagtctttctataaatagagcctacttcgagagttcaaatattcgttacaatgatgatttgcatactcaatgtcgatgtgc

SEQ ID NO: 40368 - DNA, 609 bp, Arabidopsis thaliana landsberg
  unsure (1)..(609): unsure at all n locations
cccaaaaaagaaattgtttcacaccattcattaattggcttaatccgtagaacatcctaactttactaattggaaaccctaattagaactctctcgtaaatttcagacactacatacacacatacatatatccaagactcctcgatatcttagaaatataaatgaaatgtcataataaatatatggtgtgaactaactatgaacacttggacattagactcatgagtaaacgactcttcgttttctaatgacgttttggagactgctccaccttccttcacacactatttccaagactcctcaatagatctagtaagtcataataacattgatttcgctttattcttttttctctcaatatattaacaatcttccaggttcattaggactagaatagttgtagatgaattaaggtcgtagttgagtagaataattggttcatgcacaggagattctacaattgtgaataactggagagaacatcctccttcttcttactccctcaagatcaacaaactttctcagcttacttttgacaaatatgaatctcatcgcttcttgtccggnggatacaactgggtatgtgatcttgtataaacggattacttc

SEQ ID NO: 40369 - DNA, 829 bp, Arabidopsis thaliana landsberg
aacaaaagataaagaaagaaacaatattggcgcattcaaacagctagcgacttatatttaagcccacaatggaccctctaggcgtataacgactaacatatatttaaataagctaacaacaaatccaatagaaggcaaatatatagtcttctgagctggcaaataaatcaagcggaatctgtaccaaacatttaatagcaaaaccgaaaaacaattgtttataaattcctcgtttgatcattattgttcaaaaccaatctaaagcctataaacttatgaaagtttaacatccaatctaaatcctttttgtactcagaataagaagttgccgcacactcaagctatagagcctaaaaaacccctaaaagccttgcatgaaggttgatatactgtagcggtgaatgaaatagagaacgttttacttggctaagcgcaagttgttcactgacaaagcgattgtcaatgtgattggtgcgggtggtagtgaactggattggaggagagatgaatacaattttggttattgggccgagtaaggcctattaaagagaaattaaataattcattttaatctcccaatcagagaattctaaccataacataccgaatcggagcaaaccgtccgaccataatgcgaattttaatttcaaatccttacaacaaatcgaaacgttatacattaaaaccgtaaagggccaaaggcccataaagccgcctaataataacaaagaagggtgaaaaatggaaataacaaaaagtagttttaaaaaaaggaaactttgaatccaaaaaacaggagtctataaatatagagagtctcaagccttct

SEQ ID NO: 40370 - DNA, 557 bp, Arabidopsis thaliana landsberg
ttcagaattagttagtacatttacccttaattaatttgtcgggaaaaaattaaaatgagaatgtttatcatagtggaataattcttctgctgttggcaagaaaagtcaagacttattgggcagtcacctgtggaacaacataaacttattggattttaaaatttatatgcactatacactgtagacttgtaatagaggtatatacctaaatgggcctaagaaattgttacataacttacattataaacatcaaagagaagattaatgagtaagcaatgtagaagttgaagcaaaggtttttattgaaatagacaatcactgatcccttgcaataaagtccttatttgtcgatactattgaaactacaaaatctcaaccaaacaaatggacgtttcatagtgagtccgtacataacgctcttgaaattttcctattcgaaaccgttttttgatcaagtgaaggaaaatagtaatgagactatgacgatgatgctgggtattcctctttctctaacgtaaatcccttgggatatcaaaacattaactgatatttaatcc

SEQ ID NO: 40371 - DNA, 692 bp, Arabidopsis thaliana landsberg
tttattcaatgcccgagttctaattctctgcagggctgattcaattatccgacttatttttcttaccattaaatgtacaagtttcaaattctatgaatgtatgtatattgaatgtgttgtaacttgcaagtcattggactgtgtcagttgattcatatagcatataaatagtctctttaccattattaatttgtaaggttaatagaaataaattattggggtttctagaaaatttattcgaatttctaaaatataagaaataactataattactaatttggagcacctaaaattccatactaaaaatagaaaatgcttataaacaaagaatgaaacatgagagtctaaatctgtaggaggttaggtgttgaaatcacaattacacttcactttctccctacaataattcgaatcactactctcaggtcaaatccacaaatttatttacaaaagaacatagacacgtgacacgtggcagttgcacatggagttgcaatagtttatttgtagtaaaaatgagattttgactagtcaaagaaactgaatagttgagtgtatcataactgtaaacaacaacgactctacggtttaaaagaaggtgcatataagtatacaactctaaaacaaattaaagactattggtaacctcgtttatcaaaacgggcacaaattgttccgcaatttgaaagaag

SEQ ID NO: 40372 - DNA, 444 bp, Arabidopsis thaliana landsberg
ggcttttccaatttaagaaaacatcttcatctccctcctattaaacacaacgacctaaccatattacagcagtaagctctagatacatatcccttcattttttatacatcttttcatagtctagcctaagaaacccggtaaactaagaaagcacaaaacttcttcagattcttggaatgatgagatggggaagaaagaaacctgtttcttcttcttcttcttccgggttgtctcgtgctcttcctgtttcttggttttcaaagttaagtggttcttctgacttgaaacctgcaaaagagaagaagcaagatgaaaaagctagccagaacatatctgtaaaaacttccttgggttctactacacgtcgaagtgatattcatgagaacagcaaaaggtttcaaagagtatcagtagaaaaggagaactctgcaacaagatcagcaa

SEQ ID NO: 40373 - DNA, 662 bp, Arabidopsis thaliana landsberg
tcgccgttctcaccgccgtatcaccttcaccgtcgaaacttcgttttactagcgagtccccgccgtttacgccgccgggccggcgctggtggtcctccttctcctccaggccctgatccgcctccgcctgaggacaccactcagctagaaggttcgattcttcttgcccagattgatattttggtcctttgaatcctactttgtttggttggtctttgttgtacttgcttttcagttttcactttaactgttgtgttttgggtcgaaagtttcaatttttatccgatagtttgatataagtatggagtcttttaggttagtacttggtattgaatcgtgctgagattgttattgtatcatgaaacttccaaaacatgaggatgatttcatccaattagttgttgtgtccatggaaccaaagttcaaatcttgtgacatgattttggcttaggcaattaggattgtggaatttactccttatgatccaaaatggctaccattttatgtggggattttctcttaagatgtaaaattgtgcagtagttgtatgttcattggttctgcaattagcccatatgttatgttgaatagctttggtgatgattcctttataacatagaaggataggctggaaatagaaaaaactgcactcatgactgata

SEQ ID NO: 40374 - DNA, 1673 bp, Arabidopsis thaliana landsberg
agtgtatgcttggggtagtaggtttagatatacctgaaatatccatattcaacccttacccgctattacctgggggtatggccttaatgcacatgcctagttctacaattcatctgacaaagtagacaagattgagcataaaaagaaagttgaatagagcacacttacgtcgagacgagcatgagatgtggactttgagaacgattcatatgcgtcatattctggaagcgatgccttctgaaggagttcaaaatgctgtataaatttctgcatgtcaaggaaaatgggtagttgaagtcatacacaggaagggataaaaccactcacccattactaaggctgaggatttttatcttacacattaattcaataactatgcaacagataaagagacttatgcttacctcattttcggtattaaaaggtccttgactctttaaacacattccttcatttctcaaagctgcaatcatctacgggtaaatacacaaggtttggtcaggtttagagtacttgatatcagcaatagaaggagctggaaaccaagagattgaagacaaaattaccactgtgaggccttgtgcaagacaggtctgacatttgagaaacaatacccatagactaatccgatcttcccgagccatgtccctagaatactccttattcctctttgcttttctttcctctgatccagatgaagacaaatgcattataaaaagatataaatacacactatgcagttatgccaaaccaattactgtacagatggttcatctccgaaacactaggacacaaaataaaaacaaatggatatatgaatgcttaccagtgttgacaacgattaagaccctgaaacgtgccctttctgcaagcttccagagtataatatacatgtaccagtataccatgcaatattcacttgccgagtagaggtctaggtcaaatcccagcatgagaaagcgaattgccacccaattaatttgctcttctaatccaccatatatatggtttaaaatgagtagagacttatcctgaaaggtacataaatgcaagttaacacaaaattcaatatctgcttatcaatagagccaaaattttccgaaagagaaaacagaagttgtaggaattttgactactggtttgttcatgctaacaatgaatagacagccgtcaactagattcaggtagaggtttgattaaatggacctggcgtctttgcaacgcatagtgatggtagtaaacctaccccgtttttcgaactgcgtgatgtatcttgctgcatcatttgaccaacagcaatccccatctgccaaataaaggaacatgtatgaatgagatcttgacacaaaaacccaaatcaatatgcaaacaattttagggtacgcgagcttacatatagttaagtaaagaataatacagttccaacaaaggcacaaatggtataacctgcacatggaatacgctccagtcatttaagattttcccaagcttacgcctctgccatggggtattagcgcatagtattttaagtagattaaccatcaactgcaccacaaaatgagaatagagatcaaacagagattctagaaagactattgataatatccacttttcagatcagagctacaaacataaacataacagctctatcaagtccataaacaatattgtgt

SEQ ID NO: 40375 - DNA, 683 bp, Arabidopsis thaliana landsberg
ttagacgtaaaataaacctttggttttaagtatgatatctcatccgtgattaccttaaacaatctcaatgtccgatcttttagaggcagtggctacagtaacagtttctgcatctggatgcacaaatcaacacaaagaaaaacaaagaattgatcaatgagccaaaaaagggaaaatttattcttgttagtatcatttgctagtacagaacaggcatagtatacatttctcatgcgatggttataccgtgggaattaactaaagcaacagaggaggatagccccggagtgggcttctaatatgtgggaacacgatccagccgaactccataccctgatcagaagaaaaaccaaggcatctaagattcttgccaatttcgaaagccactcaaaacgatagaaaactatcaaaagcctctaagattaaataaatatgtcagatgatcaccttcctaatccgtcatagcacccagtcaaaatgaacctgcaaataacaacagcgagatgaagagggccactatacacaatcattaaaaccaagaacaaatgactatattcatccttagatattatccggattcactggatgggccttgaatggaacaaatggagactaattctcacaaccttttgaattggcagtccaatatttttaaccaacggatgcaggggctattgattttt

SEQ ID NO: 40376 - DNA, 136 bp, Arabidopsis thaliana landsberg
ctgtcgcgctcgacggcgcttcgctcgaagacgccgcgcactcgagtatgttcctgcctaactcctgatcaacccattaggcttatgatatatctcagggtagaaaaggataccaacgatctctatctcgctataa

SEQ ID NO: 40377 - DNA, 553 bp, Arabidopsis thaliana landsberg
ggaatgtcttcgggggtttgtttaggtacctaaaacctctttctcctccaattcaagatactcaacttctcagcgattcattcccagttgcagaggaaaaaacagagaggatcctctctccagctcttcaccgtactctatacttggcgtagagccaagctgctcatcttccgagctaaaggcagcttttcgtgccaaagtatgcatccaagaatcactaatctgtacttttctttccgctaagtaatttcttttgatacgatttataaatgggttctgagagtgagttgttctttacacactttgacttgtctttttttcttcgcctcctcgttgcttaagttttggatttttaatatgtattagtcttgttgactactttgtgctttgtaaaggtgaaacaataccatccagatgtaaacaaagacggaagcaactctgatattatgatccgtcgcataatccaggcatatgaggttactaaaccttgttctatactatgtgagcaggtacagtagctcaatactattattctttgcagatgttaacaaac

SEQ ID NO: 40378 - DNA, 880 bp, Arabidopsis thaliana landsberg
caggggggtcagtatttaatgaattttccttgatcaggaaaaaaatctttcttgggagaattaatctccgaaaatgttttaaccaaacttgtgtcgtatataattttttctctgtgtgtcttcaaatggaagcctgattagagacaccagtagttcacgtcactttccttaacaaaatcatctatgtatctcgttaacttgtgtatctagttattgtcatacattgcatgcttaaaatcctgtaattatcagtttagtttaatgcaatggtttaatgatcttatatatgtatgctttaaccaggacactcattactagtttttagtttctgtttcactcattacttgttgtatactagacttcacaaatatttcggatcattggtaagaaaatagtagaatgactcgttgggttttactaccccttcacgtataacttgtacttatatatatgctcataaatttttgtcccagtctgctacttttatcgtcatcatgggagacttttctgcaaatgtgttagcttgttgaacagtcgtagaagcgaatgagcactcaattttggatattaggaatcataaatagtattgccatccgtaaatacgttttcatttactaacaaattagttaaaattagaggtaaagtagggagcacgattgcataaaaattccgacctaatctcaactactagtaaattggatctttccctggaacttccgaataacatgtcctcttaagtaagccacgtacgcgtcaagcttaatagataaagagagagataggtgtacaacgcaacgtttatttgaacccgtcaagttaaacgtaagaataaactaatgggtagggagaaagcggttaattaacataataatataaagac

SEQ ID NO: 40379 - DNA, 487 bp, Arabidopsis thaliana landsberg
gcctacttcggcccgccggccgacggcctgcggcacttcttctcagcccggctgggcccacgtgttccaggcattcgaggccgagccagaccgggactgggccggggaataccgcggatcgacgtactgcgcccagtacgtcacggccgcgtgccaggccggcccgtcaaccacggcggccgcccggcccgtgccgccaccgccgccgcggcccaggaatcggctggcccagctgtccaccctggtcaggcggtacctgtccgtcatcgcctcggaccgcacctacgtggcggtcctggcgctgctgccggtcatcctcggcataacggtccggtcggtaccggatcggctaggactggccggcaatcatgacaacttctacgcgtcggaggtgctgctgatcctggtcgtgggtgcctgcctcatcgggatagcgagcgcggtctgggagctggtgaaggaacgggcgatctatacccgggagcga

SEQ ID NO: 40380 - DNA, 436 bp, Arabidopsis thaliana landsberg
  unsure (1)..(436): unsure at all n locations
ttgatggaaaaaatatgggggttccctgaatataatgattcttgatttaaaaaaaaaaaaaccttccacgatccaatttcaactcaatctctttaaaaaaagttttaaggacaatgaaataaaaggttcatgttaatgaaacaaacaacggttaatgttagagactacttttcagtcattaaaactgcacacctgaagacaacaccttgatttttatattagattcttgacttggctgcagctccaaagcaaacaccacaatgttctatacttcttctccnnnnnnnnnnnnnnnnnnnnagaggaaaataagaaccagatattcaaaggcaaacagtttttcactacaataacaactacagttttgaaaactaaaaaaggttgacaactacaatttgtaatgtaaaaatatacatcttattgatcctatgctcat

SEQ ID NO: 40381 - DNA, 630 bp, Arabidopsis thaliana landsberg
caacccctaatttaatatcaataaggaaaattctcccatatttgtaatcctaatttttaaggtttatatattttactacaaatgtctagatgagttcgcccgatttatttgcgagtaaaatggatttcatgtccatattgaccgttttgaatttgagtgtaaccatatctgaaccattataatttggacttgtctagctcatagtcgtgagaccaatttgacatccctagagataatgataatgacatcaagatgatggcatccttgaggtttatattattttggacagtttagcgtacatagtagaataaattcaatatgttcattttatgttgtagcacgaatcattatattgtagttatatgtatttcatcaaatttgtctatcagaaaaggaaactaaaaagtaattcatcaacttatcatcatattaggcaaacatgcaagatatcaatctacattggatgcatatcaaaacacacctttactcttaacaacaaaaccaaagcataacgatcacaacaccctctcgggcactaacatcgagacgctcttcccattcagcctttccggcgctgcgaagcttatgcttgccggcgtcgggacatagcctccctgtgtgtctgctgcg

SEQ ID NO: 40382 - DNA, 494 bp, Arabidopsis thaliana landsberg
  unsure (1)..(494): unsure at all n locations
aacacgtaccgcgacacgaagttgacctgttacgcacgctttagtacaagaggtcagtgggtgacactcggacgacagtgggcgatgggcaatgggtttcggacggaatggttgggccatattcggtcgggtgtggggtgagataattcgagatggcgtccgggcgcaaatttgtggacgggtacgggtacgggtacagttacgagatgcagggcaaggcagtatcgaggagtacgcggggtgcggttgtggggactcacggcggtcatgcgcaggacgttgctcatgatgaggttccagctctgctcggcggacttgcagaagctctttccgtccacggcaatgcagatgtacgcgttcttggtcaggaacttgatgaacttttcgaagcaccacatgcagcagttcaaacagcacagaagaaacttcaccaggccgttatcgttggtgtgttgcttgatcttcgttgncatgtacgtgagaatccacttgat

SEQ ID NO: 40383 - DNA, 351 bp, Arabidopsis thaliana landsberg
ttccagccatctatgatggggggaattgtttttgccttcggggcctgttctgccggaggctggaatcctgaggtcgcgataggtcacctgataggtggcgtagttgagcattgtctgctttggctcgacgatgagctggtcactgtctcggtagtcacgcaggtcgatcaagaacaggctcagaccgtcggttcgcctggcaacctcggcacgggctgaggttcgagccagaagcaggagcaagtcggactgctcgacccggctcgtccagctcttccggccattgatgacatagctgtcgccgtcgcgaaccgcgagtgtcgaaatgcttgtcgtatcggagccagcttc

SEQ ID NO: 40384 - DNA, 604 bp, Arabidopsis thaliana landsberg
cagaaatgcaaatggagagacatatataatgaacaataccgctacaaaaaagttccaagcattccctgttctcctgatcgaatctctaaccaaatcacaatttcggatatctgacgtagttttaagcatttagaataacatatagcttggtttttgtccgagggagtgtccatgtctattttactattcttgacttttacttaagtgttctcaacaacactcagttgaaatgctatgtcaaaaggcagctttcaagcctcctgctatagtgttatgatctgttatactatttcttagttgcattttagtgatagcagtatcaaggtcaatttctagttacatactcttactaacatttgcttccaatttcagtgtcaattttcttagtagcttcattacacttttctcttgtctcacactagacattggcatgctatgttcttaatcttccgtagatttgaccaatgattgtttccagttggggtttattacagagtatcctattcgtaatcttttctgtcattatagccagtgggataccctatgctaaattcgttttacctttaactcctatataatttctgttttgacagtcaatcattac

SEQ ID NO: 40385 - DNA, 519 bp, Arabidopsis thaliana landsberg
ttgtctacactgcatccattcttagtcttattttcaagaaaccacttcatcaaatgtgtccaatcattacataaatcaatttattttattcacaatagttatgaatgtcgagccacatgtcatcttactcaaccaaaaaaacgccgaagttgtcccaaactacacgtgtgaaacgctgaattttaaacatgcacgatcatacattacatattatataattttagtataatgtatgtccatgtaggaaagtttacaaaaataaaaatttatatagttttaatcttttcgattcatcatatctccgattttaatatgtacgatagtaaaagtaattagatattctagatcaatgatgaaatcaacagttgaagtacaattttcctagttagaaaaatatagatattttcttgatgtgtataattgtaattactgatgataacacatgtcagttctatatggtgaatttcatctctctatattgaatacacataagtttttatatctcttacttttctaaac

SEQ ID NO: 40386 - DNA, 549 bp, Arabidopsis thaliana landsberg
tgcctgtttcttattttatcacaaaaacgcagaggattttgtggtggtggccctgcgaatgctacacctgacaaacattctagctcctgctacttctagtgtctgcaaatacaagaagctgtcttaacaactccgaaggaagtacatgattctaaagtttccatctttattccatgacaaacagatcccaaagaagaatgcatttttgctaattatctttgcaagttttggctagatgaaaaattgtccattcttgatcaaggagagacaaagttattttcctgttgaggacagtagaggagtttctgttgcaagaaacaaggtaacattcacaaatccaagacattttgttatcactgtcttatccactttaagcttattatcaatttcgagaagatgggtcattacatacaatacaagtaaaacaaaaaagcctgaagaaatctacaactttgcgaccattttgagcatgtttgctgcatctttggcgttatcagggataggtagattacagataagtgtaactctagaggaagatattaagatttt

SEQ ID NO: 40387 - DNA, 426 bp, Arabidopsis thaliana landsberg
tgcttctttttttcagttctcgattaatatgttatcaagcaatccaatgacctggaaactctcccacatggtggttccaggtaaaaactccactatttcgccggattatttcacggctagtcgaacaagtcctttagatatgatgaaattcccgtcgcctggaagttcgaagaggtacgataatggcggtggaattggtttaggtatcgtcgctgcgcttgagaaatccagcatcgggatcaatccggtttgccataccggtgccggttccaaaggatttgacctggctcgatattccaagagattccaattcgcggcggggattgatctatctgactctgaggaatacacttgcgtcacgactcgtgatggcctgaccaaagtctattacaaggaagaagagtttgaatttggtcataatctatt

SEQ ID NO: 40388 - DNA, 693 bp, Arabidopsis thaliana landsberg
ttagttatattttaaagctttttagccgcttcgtcctccgctccacctttaattttttcaccaattggatttggatctgtcaaaaatattggcctctttctctctttctctcttgctctctttctttgttgggttgatctcttcttccatggcgatccctacggagacacaacaccaggagaaggtactctttcaccattccatgattccttcgtgtcgtttttagccaaatcttttttccgtttctttcgatttttctttgttcttccttttcttttgcacgattttagggtttgaaacttttgtgaatttgaacaatcgatttatgtttggaatagaaagagaatcaattagggcagatgttcaaaaattgctcaatttcaaagcagattcgtttctagcgatgatctgaaaattggtttttatcaggaggcttcagatgcttctgcagcagctgcacaaaagagatggactttaagcgatttcgacatcggtaagcctcttggcagaggcaaattcggtcacgtctatctcgccagagaaaaacgggtcagtatataacaatctatcatcttccaccatctttcaaatttttgttgttaaaatccaaacttaaaaagcatttgttttagatccttgattgtttttccttccaccaatctcacacatacatgcaaaatgtgaaacagagca

SEQ ID NO: 40389 - DNA, 643 bp, Arabidopsis thaliana landsberg
gttcacataatcaaacacagaaaactgtcatctttcattttaatattttatttaacgtgagacaaaaaaaaaaattgaattggtagagtgactttgtcatcgtttttttgtcaacataatcacgtttataattaaacaaaatacatttaaaaacgttttattctggcaatacaaacgttcatatggagatctcgaaggtttggtttgactgacagttactctttaccacttgattttgcatgactcacatgtgtattgaaaacaacatattcagcagaataatagacaatcctttgattattttgtatcaaacatgtttagttgtaagattttcccataaatggccctacaagtggattacaaaaataaatgtcttaggctccgattattaatcatttttgaggaaaatatgagtacgaaagtcgcgttcatctatgatcctcagtttttctttatcatttgcaaggtatattctgtttcattttcagacatatgggtcctacatttttttttatcattcctaaaaaaaagaatggtagaacaaaattgtttcactccaaaattgtataggaaccaagagaaacaaaaaaaataaaattccgttggtatttattaaaaacatctaaaataccctttatcataa

SEQ ID NO: 40390 - DNA, 556 bp, Arabidopsis thaliana landsberg
gaagattttattccacaaatacatcggataagaatcttttatttactcggctgattcttatttagtcagtagttatccataccaagcttcattacaagttacaaattacaacttgtcaatcttttacgtacgttacatgaaaaaaggactacttgccaccataacatcttatgagattgatttgttttgggcagtggttaaaactttaaaagtaaaaaagcggttgtgaattgtgatttacagatgcacttgctattatttatttgataaacgcagcaaatacaaccattaatttctaacgttacaattaattttcatggagtattaaataaaaataaaaataataatgtctttataattttattaaatgacatattcctgaagagcataggatttgtgctagttcaacttataaccctagccgtaaaattaaaaaccaatctagcatcatagtaacttattcttcaagaaactaatcccttgacttcttctaatcggatcattaacagacaacatattaccctacaataagctcactcattacaattgatagtct

SEQ ID NO: 40391 - DNA, 854 bp, Arabidopsis thaliana landsberg
  unsure (1)..(854): unsure at all n locations
actgttgtttagaattttttgttgtcactttgattttaaggccaattttagggtttttattgttcttgctgaggtgacgggcttttagttcttacttcagtttgaggttgttttttatgttatttataagcaaggattgtcgttgcttaagcatggggtttttcacctttgccttgattttcctctgttcgtcctctcacaactaaaaaaagaaaagctttcattgttttcaatctgtgtggttgattttgtaacaatgtgctcatttatggtgactttttttttgcttagaactgagattttcgtttcctttatgatttgatttcatgggttttgtgttcctgctataaatctcaagtcttttgttgtttttgaatcaggtttgcagttttttaacagtggaagttcagaaagtcttcatctttgagtggaggagagacagaataaatggagaaactcaaagctgatgctgccgaaataatgatctgcgccggtcaactgaaaggtttactcaaccatttgcgcatgggtgaagccaacattgagaagagctctcgagagctagatttaaaggagaaggagctgcaaattttgagctcagaccttgagcaaaagagtcatgcttttgaagcatagaaatctgaagttggtgatttgaagaaaatggtggaagagtgtactgaagaactgaggtcaaagaggaatctactgactgtgaagctggattcgttgataagggttcagagagagcttgagttaaaggataaccaattggtacaggttatggctgagcttaagaggcgttacagtgaggctcgtcatgttcaaaagcngtagagagaaatggaagatga

SEQ ID NO: 40392 - DNA, 602 bp, Arabidopsis thaliana landsberg
tctaaacaacaacaaagtctctcttccttctgtctttcacatttcctcttcccctaaaaacagaactcaaaaccaaaacaaaatgactcgctcctctagattccttggtacggcgtcgcctccaccaccggaagaaatcctcgccgccgaaaccgacatggttgtgattctctcagcacttctctgcgctctcgtatgcgtacacggtttagccgccgtagctcgctgcgcttggctccgccgtctcaccggagttaatcccgccgccgtcggagaagctccaccgcctaacaaaggcctcaagaaaaaagcacttcaagctctccctaaatcaacttacaccgcctctgcctctaccgccgccgccgctgacgatctaccgtgctcttcagtcggagacggagattcatccaccgagtgtgcaatatgcataacggaattttcggagggcgaagaaatcagaatcttaccgctgtgtagtcacgccttccacgtggcgtgtatagacaagtggttgacttcacggtcgtcgtgtccgtcttgtcgtcggatattggtgccggtgaagtgtgataggtgtgggcacatgcttcgacggcgga

SEQ ID NO: 40393 - DNA, 522 bp, Arabidopsis thaliana landsberg
  unsure (1)..(522): unsure at all n locations
agaccaaaataaacaataagttaccacacatggttaacactttgaaaataagttttatacatacagataaaaagggtggaagactatgaaatttaccacatactcaatttcttttaaccacattccatttgaaatctcgaaaaaatagtaccaataatgttaggcatcgggtcgatataatgtcattttcagtgggaattatttaagagcatggccacatgcatgctgctttaatcatatctttaaaagggaaataatgaagaaaataaaattgatgggtccaagtttcatatgactggagaagaatgaaggagtgcaagaaggatcatagaaaataaatagtatggctgaatcaaacttttttgtaaaaggggttcacaaaagatgttgagctgacacatatccatgcaccatgtttttctttccattggattttttatgtctctcagatcttggtcacataaaagaaaagattnttatacctttgattaattagggttgagtgattagcatattcaaatc

SEQ ID NO: 40394 - DNA, 774 bp, Arabidopsis thaliana landsberg
cggtacggtgaaatcaaacttgatatacaaatgacttcgacgtcagtaaacaacttatccacctaacctgatattaaatttaaagatcaatcacatatcactttacaaaaaccattaagcatataccataaaacgcgttaaagaaattggcttcatgagttagtaaacacatgattttaatattttggaagaaaggaaaaattgtgtaccaattcttctaatgttttcggtgcggtgctctgctttgaaagtgaggtcacggttaaggccgtgacggacattgtcgccgtcgagtgtgtaagtaagtttgcctctttcaaacaatgctttacttagtgcacaagcaacagtgcttttccctgaaccactgagaccagtgatccaaacgacacaacccttttgttgaagaagttgttgtctgtcgcatctgcatatcgaactctcgtgccacacgatgttctctgctttctcttttccgttatttcttccctctttcagtatagtttctgcgcaaacacaaagttaaagagattgtaaaaatggtcagaaaaaaacaacaacacgatttgtggagatgcttaaacgtaaattgctttttctgaaatgtgaacgatctgctatatgacgaaacagagagagatgggagaacctgaaagggcgggaaaatcagcggtgagggaagcttgagcagagacgttaacggctgagattggatgaaggaagtagaatcgctactattttcggctgtccgcggaatagagacgcaggcacttg

SEQ ID NO: 40395 - DNA, 436 bp, Arabidopsis thaliana landsberg
tttcggctttttgttggtgttattgttacggtatcggagagaaagttgtcggtaatgatcggaaactttgatcgacttgtagattaatcgaatctgtctgcgattggagctcttggtgttggttgttggagtcattgatgcgtgtgaacaaccaaaccctaattgaaaatttgtttgagaacgactcaaatccataaacgttgaagatgatgaagatttgggatttgtttttttgacctaattcgcttttttggttctgtggatttgagaagaagagaaggaacaaataaatgagaaaggagattaccgggtaccggtattagagagttatgtatttggacgcttttcaggtttgattagcttatgcggaggacctggtcgactggcaatagcccgtagtagtaggatccgtgtaatttgatgaaaaagtgggttc

SEQ ID NO: 40396 - DNA, 779 bp, Arabidopsis thaliana landsberg
aggcattagcatattcagcaagggttgatcattagcctctccaagtatactagatctagaagtaccctgatctcataagaatgcaaagggaagaataaattaactctgaaatcaaaaagtaaggaaaaacaaaaaaccgtagaagcgataccatagcgacaacaatcttataaagtttttcatcaaattgcttggtcctagtatcctgaagcagccttgtagtttcatagataggatccccccacttgcaagttccatttctgacaagtgctttagttgtctttgctgtagcttttacggagtcagcgggaatgaaagatataaatagtttgtcccaacccgcttgtggaaccttaaataatataaacaaagcacacatgagatcacaatgtacattaaaaacagaaaacgcagcatcaacatcttattgaactcctcagaagtaaatagttgcacaccaacagcataagaacacaatcaaaccaatcggaaagtgttgacttacatgggtagcgtgaaactgcaatcgaaagacgaccttgactttggctttctccagcttccatttagccagtctcgacattactcaaaaaaatcaaaacagcttcacctgcaaacacacacatgaaacgagcacagttttcattttcgtgctcatcttcttgtatctatatgttccggcaacaaacagagacttcaatcatagaagaatgaaaccatacatacaaacttagatccaaattactcagctgttcaaaattttcagatgctgaattcac

SEQ ID NO: 40397 - DNA, 571 bp, Arabidopsis thaliana landsberg
gcccacttaagtatgggtttggtttattaagtggtttaggttaacttaacaatgattcttaccgtccaacggagagatgcgtggatgcgggcccatggtaagattccaacaacgtctacaccagatgatttactcccgtttccttaattagaaagttgttgggtcatactatatgtttacaaattacaaatgggccttatccaaactaaacattgccctatttgtttgtggatctgactgcattctgatttgcgggacaaaatcctcgagtttagttcgcaaatataaatattttcgactaatacataattatcgaaaatattatttcgaatttatagaacaacatttaaatttggtgaaatagtagttagctagagcctaacatttagagtatatacatatagaactctagctatttaaacatacagttacgttaatcaaactaatgtaataatcgcacatgttactatctatacggtttatattatattatcagagttaaggacaaaaatgatttcccaaataatcattttattcatctttttttattagagtcgaatcatttaattcg

SEQ ID NO: 40398 - DNA, 463 bp, Arabidopsis thaliana landsberg
gagtctcggttttttcgtcgattcacgcattgacatgagatgtcgcaactgacgcgatctttttttcgttatgttgcgatctgaagcgttcaaatatcctgcggtacgaaacctgcgtgccagcggagagaccaagaaaatccgtactacggtagtatcttgcgattacagcggaaacacttcctggctcatgcgtagttttggattgcgcgctaacgttgccgaggaaggcgctatacttcgctagaaattctggagtgcccggagcggaggaggggtatgcggtctttttccccttcatcctgaatcgcaaacgctgctttccgcgagcgtcggtaaaatatccgcagtacctaggcagcacgcgcttgcggttcattgaatgctcccggtcggcagcaataccgagtcccactcgttgttgtcgtttgctgcaacggggggctgctcgctgaacaaagca

SEQ ID NO: 40399 - DNA, 910 bp, Arabidopsis thaliana landsberg
aacaactgcgtgtttttttgccctatttcctcatatgttctgtacttacggtttttttttctattgtcaaattttgtaaatacaagttttttttccttctaaaagattctctatggagttgtacaaagtcaaagttattaggttaacttcgttgccggtcaacgatctaagtcgagtttgatgaatcaatgcacccaggatatcatggttcgtgaatgttctggagattgtatacacctggtctacgaacctgtccttcgaaatgagtcctctttcatgatcgattagttgaagtgaaattttctaagtttgtttcgtttgcattatttttgtctatacttaatcttaatacacgtggtcatccgaaattcttcaaaattttccggacggatttttggtttttgaccaatgtatccgattggttaaacctgtcgaaatggacctttccatctaaaatccaacggttttcaccatcggatctgagctgtttatgatgcatacgtcttctcgtacaaatccactaaatacctttgtccacttaccgaaaaatggtcagcttggcaaaaagtttgaaaagtgattctaatctctttttttttgttacattaatcttatttaatatacgtttcatgttattatacgttaatcatgtttttaaacgatacaatcaattaattttccatacatgcgggcctaatataacattggtgacaaggtgatgttagcagataaaaaggttgtagtagtaatgactatgcaagtcacaggcttcttgatatatcttatatcaataaaattagcgatggtatcattttgatactgtttgattgctgcagtgatacaaaatactatatgcgaattaacttctttctttttttaagaacccgaaggaagaagaaaaaaaaccctg

SEQ ID NO: 40400 - DNA, 407 bp, Arabidopsis thaliana landsberg
  unsure (1)..(407): unsure at all n locations
cccacccgggtggaaaatcgaggggcccgcggccgctctttaataactctcgaggtttttttttttttttttgttaatgaaaatgacttgaaagactgcattagcttgcagcacttaaaaccacggcaagatgttgagtcagtacaacaatgaactcaactccaatttacaaaaactaaaattatcccagaccgtttatatgattagaacaaaatcattcacttgtgataactatatatacatctacaaactatgtaatattatattcatggaggattcaggctaccattaccttgaagtcttccatatcaacaacactcccacgactttatgacgtgaatggcatatatagcacccnnnnnnnnnnnnnnnnnnnnnnnnnnngatatgcttcttgaggaagaacc

SEQ ID NO: 40401 - DNA, 566 bp, Arabidopsis thaliana landsberg
ttctttctgttcgatacagattgcctgggaagagaagtttaccatggggatccaacaggagatagtttgcatatggaactctatgatcaaggtgtacgtgaaggtgcacttggtttgctactaaactctgtaagaatcgttataataacctgttttttaactgcactgctcttcaaaattcaattactggcccgatattgaattttcttcttccctgtttccgtaggttgttcttgggatcagctcatttctcattgaaccaatgtgtcagcggatgggtgctcgggttgtatgggctttgagcaattttactgtatttgcctgcatggcaggaacagctgtaatcagcttgatgtctctcagtgatgacaaaaatggaattgaatacataatgcgtggaaacgaaacaacaagaaccgcagccgtaatcgtttttgcactccttggttttcccctagctgtatgtgctttctttcaaccgtaattctctttattcttttcgtggtgccacatttctctaaaatatgtgataaaaccattctttaatgcaaatcacatacagtgtc

SEQ ID NO: 40402 - DNA, 458 bp, Arabidopsis thaliana landsberg
cctaaggttgattaatcatatggttcattgacttcattctagaattgtgtagttggaccagtataaagaatcaaagttataaaacattgtaattggatttccaaattaatctaatgaataaatgtgctttgcactttgaatgtccctgacctgatagttcttgatatattatagagcttaagctggaaatatatagaacagatcacatgatacacagttacacataatgtatacaaattcaagatttttttagatttatttgaaaaaatcttgtaatttcagtaagtgtatcatgtaattacataaaatatcatactcaaatctctgtagctcttttgcttcctagctatgctatgcttccaagttattattactttctttgatggcttgaacaggaaccaatcagctcttgaagttagataaatgatccatacatattagtagtcatcatgtttcgg

SEQ ID NO: 40403 - DNA, 685 bp, Arabidopsis thaliana landsberg
caaaccgatattcaatctcatcaatcataaaattgaaatcttaacttttttttataactgatatataatttttttatggcaaattatattttctaattaaattaatttaatattatttattaggtggtagattttgattggctagaataaaaaagttcacccaagtatttttcaaaacaagtactaaccccatcaacttatgtgaccaaccgttattgaataaatgctttttatcctctcagcctaagaggtaacaacagcctgatattctagcacttaggacgactgtgaattggccagccgacataaccgaaagagttcaatatatagtgaagcccaaagttgagttaaagattaggaaagagatttgctattattaaaggtaatgcgatgtattttaaaatagttaactaaaccaatttttatgtctttcttcaaaagtgaactcttgagctatcctaaacctgtgtgtcgttcttctcacagacttatttggtggacacacgatttgtttagtcaaagcaaacaaaaaaagtcccacttccctattagaaaatcaattctttgttaaaaagaaattaaaactaattttcgccacgtgtagaaacgatatcacttctttacaactataaatagtcagcctttcttctccaaaaggcccaacccattccatataaaaaatatt

SEQ ID NO: 40404 - DNA, 598 bp, Arabidopsis thaliana landsberg
  unsure (1)..(598): unsure at all n locations
aagacgttttaaaaatacacgtacatatgatagaacacgagtcatccttatacaaacacatgagctaaaaaagatggttttgatcctgggtttttaacgaaagggaatttgattcctgtgactgctcaaatgtgcagcagccaagagccatgtgaatcgaaactggttactttctcaagtgaggcggtttcatctacaacaacatgactaaggggaggatcaagatgtgtatgggacaaaaaagtgtgcaacgtaccagtattttgaatggtgtgaaaatgagatatttttttttcagtaatggttccagagcagacgtctgttcatggctggtggagctaggcccacacccggtatgtcgcgaatgtctttgttgtttgggttcacaatctatacaaaagaaataaaaagaagaagttacatgtatgataatgtgaacaagataacagcgttggaaggaaagatattgcagatgaatctagaagtgagatcaaattaacaatcacataggagacaactttatatattgcataactgaataatggagaaagacaaaattgtgggtatttgtgctttntataggttcttcgatcaacaa

SEQ ID NO: 40405 - DNA, 486 bp, Arabidopsis thaliana landsberg
gaaactgttgcgccggatcgtcttgacctcgacgccatagccttgcttgcccatgtccatgacgcgcttgccgatgcaataggccgaagccgggatcaccaccgaatgcaggcgcggctggctcttttccagggcctcctgctcggcgtccgtggcaccgtggaagaagccgcggaacatcttgtaatgctcctcgcggaaactgcggatgcgcttgatgacgcgcgtcagcggtacgccgagcagtaccagcgcatgcgaggccagcatcaggctaccttcgagcacttccggcaccacttcggtcgcgccagcggcgcggaaggcctccatattggtgtcgtccaccgtgcgcacgatgaccggcaggtccggatggttctcctgcagcacatgcaggatcttcatggtgccgtgcacatcgttgtaactgatgatgagcgcgcgcgcgcgctccaagccggcagtccgtagcacgatacgccg

SEQ ID NO: 40406 - DNA, 632 bp, Arabidopsis thaliana landsberg
ttacagtatcattttaatggtggagtggcttataacaaatcggcgcgtttgacgtcccagcgttaaacctgacgtccaattatgggttatttagattctaaaccaaaaaaaaagcttcaccaagatgatatcaatcaaattttgattaaaactacgacatattatgatttagctgtcaaaatttagacgttcacacaatctaagcatatgttaaaatttcaacataactatgcgtgtcttataaaccaaaccaaaccacatggtaagtttcatatagtctatacatacgtgcaacttcacttctcacaagacaatataccacgtgtcaaaacacaagaaatccgtacacattttaattagaaagaacaatgagtgaaaagaataaaagcttaaagaaaaatatgtacacacactatattaataaagtggattggaaaaagattattgtcatctatatttggcatacaattgtatgctttgaaatagcataattttttgatactttttaattgatataaaccacgctatcttattcttaaccaagtctacacaaataaacataaatatatcaactttagtttattaaacctcttttacggtattcggtggagatgaggcgtcaatacaacaat

SEQ ID NO: 40407 - DNA, 740 bp, Arabidopsis thaliana landsberg
taaattatcttgtgaccaacaagcaaagttctaacttatcctttttttttcgtatatcgcatagaaataatcaatgattaattttagaaaacttatatagttttcaaagtctgtgtttatagcatttcaatgaaacctcatatacattttataacacaactatttgtttattttattttaaaagactaattagttaaatttttggttgagtgaatatgttatatagtttgtatttattttattttctcctaatgtctatatatatatatatatatatatatatatatatatattataattgcatttaatttataattttcttatatagtttaattaatgtaataggaacgtttttcatattcgcgggtatcggtggagcagcgttgctttttatatgggtgctcgttccagaaacgaaaggattatcactcgaagaaatacaagtttcacttattcatcagcccgatgaaagaaatcaaacttaatttgaattatcttattttattataaaaatgatcaaattcagtttatggtgttatatttgtttatttacaaacaaggattttttttttttcattatgtaattactactttatttttctgggtaattacccccatttttatgatgcatatttacgagatgtaaaacttggccctacgtacatggtgtatttttaatcctcctaaaattggcaaaatgtaaattatttttttggggaccattttttttaaaaaaaaag

SEQ ID NO: 40408 - DNA, 666 bp, Arabidopsis thaliana landsberg
agaatcttccattgaggggggggtttcttatagtctagacagcgttgtgttcacagatgattctgatcttcgaaaaaggcagatcatggactgtagacttgaaacgaaagaactcatgtccaactacttacatcaaacgaggatggggaagtttctgtaatgccaatggatttagagctggaagtttctttagtttcaaactgttccaaagaggtggaactccaggtttacgttcatcccacagagaggtagaagaagaagctattacaatagagtatctttccacagaacctgaccgtaaccaagacgagagaagctcacagatatggaaagcttcttcttcaccatctcaaaaccgttttatgacagtaactcttaaaccaattaatcactctcaaattgtttccatataagtgtcaaattattagcaacctttttgaaagtttctataaaaacctatttacaaatttttattaggcctaaactgtgtagtagatctcaaaggtataataaaggattttgtgcaaaaaaaaactcaactttataatatattttttttttttggtaaaaacaaatcaaatttccaaattcatagctaagttagcacatatggagaaaaagagttcgtatgttttcagctgctagtactgctttgcttgttattct

SEQ ID NO: 40409 - DNA, 149 bp, Arabidopsis thaliana landsberg
gccggggggatcaacaggggcttacataattatatattcattcttacacaatttatcggataatgcgataatttggtgagaacatatatatatactcccatatatatccatatatatatatatatatatatatatatatatatatatat

SEQ ID NO: 40410 - DNA, 742 bp, Arabidopsis thaliana landsberg
gatttagccagtcagtattagtatttagctgtcaatttatttttatattaatgttgatttaaacctgtccacatacccacatacgctcgttttaactcaatcgtcatttctgttccatatttctaaccgtcttttctttgaccttcatcttaaaaccgcaaaaactttttaaatgatgttaccaatccaacttaacaatgtttttaaccattattattatttaaccactcatttctcgtctgctatcttttaccatcttctctttaactgcctttaattttgcacaaccgctaaaaaacttttaaccaccttgtttgaacgatgttacgatcgaaccctatgtcagttaaacttgtaaataactctataaagagccttaagtttagtttgcttctccaatccaaagttcgagaagaaaaatggaagcaataactaaaaatgggtcgctctctcaaactcttgttcattgtgggccaaaaagcttgagctcgttcatcccagttcgctgtcttaggttttctaaaaatccgttccccaaaaagttggtcgtaactagagctaggacgagcattaacagtgatcatgaagccgcaaatcgtccgttatttcagtttccaccttccctattggatgatcgcttcctttccatttccgccaaccagtcggtatgcaaagatatgacctctttaagaatataatatatatctttcaatagctacatatttgatgtgcttaaaaaagt

SEQ ID NO: 40411 - DNA, 258 bp, Arabidopsis thaliana landsberg
  unsure (1)..(258): unsure at all n locations
ttattcggaataccgagaaaactagagtctctcatatctgngtantcctcaatacaagaaacgagaaaacgtgagaaattcgcggattctctgcgaatacacgaatcctacgtcttcttataatcggtgaaatctttcaagaactaccgaaaagagaagagtattctaaaaactcgctaatctaacagactcttcctctgaatacaaaagaatgtataaacgtcttatttatagtatagcctacgactccgactattc

SEQ ID NO: 40412 - DNA, 459 bp, Arabidopsis thaliana landsberg
cccggctgtatagacctctgcgctattttctgtttgatcaccacccggcactcctagtatgcgatcttttaacttacgactatttgcaacagccaatgaccttgaattaactattccagcaccaggcatggaccaatcaatacagggactatctggtatcaagcgaaccgtttgatcagttataactcttagcctacttgaggtcgtagccgacggctcaggtatgccgtggtaaaagattttagatttgccatcgcggaacacccggtcagtatcaatatcgaaataaaaatcgaaccacgtatgcaaatgcattacttgactcgcatgacttatatcctataaactgtctgcagacgggaatacaccacctctagccactaactaaacccgcactgagcgtactttgatttagtttaaggcggctggtactaaccaggaaaatgcctcatgcatatt

SEQ ID NO: 40413 - DNA, 644 bp, Arabidopsis thaliana landsberg
tggttacgaatcgtttgaggaatatgtgtgttaaattcacagcgtttcattcattttcctttttgtctacatcatcttcaagataccttaaattaattgttgaaatgtctttcatgtaaatttgacctacaatatcccttagaaatctctagtatatcacttccatgagggtcttaacaccgagtacttgaccgttcaagatcacagtattcttttttaaaaaattaaagacggagtatgatcaataatataaatcacattatgttcaaatctctgaagcgaatgtgacattttgttttgggaataaaagaaccatgataataacactagtcgaggaaatggttttaaaaataatcgtgaatgtggatatgatattagataagatcacggtcaatagaatcacgatcaagatcgagtagtttctttcaataatccatattctcaccagaaatgagaaaataaagatggtaacaaacaatagatatatctctcatctaaccaaaaaaataaaaatgatagtggtgagtacgatatgagataaagtataaatattattgaaggctcttgaagagtttatatattatcccctgtggaaactcaatttgaaatcaatctgaagctgtgtgtcatgctgataaaaacct

SEQ ID NO: 40414 - DNA, 631 bp, Arabidopsis thaliana landsberg
ttaatgttctaaaccaattgtatgtactttcacattcatttatcaataagacttttgcagaggtattaatacttgtccaagtccgtataatgggagaaatgtttgggaggtgatacaaatagatgtgtatattttgcaaaatgaatgcatactttggttttgttgacatatgattagaaaaaatgataatgaccaaacttgtattgtatcattgtatcatatacaagtggaaccaaacagatatagatctttacaatccaagatataaattggtaaggtccacgcggtttcaccttaattagaaagggacatctcagcaataaaaaaaaaaaatgaaggaaatatagttagacaaatatggaaccaaaatagcaaaacttgataatcttctttgtttttttcatatatatttgctaatgctggcctttcaatttagaactaaaccaaaaaaaaaatacattatgtgattataaaccaaaccggtgataaaaatgataagatgaaatcttgaccggtcaaatgatccaacggtggtgcgaaactggatgaatatcactctcactctctcagcctatgtgaggctctctctctgtttgggtttggtagaaccaaaaagttcaaaccttttact

SEQ ID NO: 40415 - DNA, 494 bp, Arabidopsis thaliana landsberg
  unsure (1)..(494): unsure at all n locations
attgctactctgcccttctttctcgatttttcctcattcatcatgagctttttttactcnctactagtctttgattcatcagggggtgctttctctgtctttgattcatcaaacgccaacaactgcaacagcaacaaaacaaagaagaagaagaagaccataagctcactaatcctttacatcttaatctacaaccaaaaacacgataagcaaacagaaggtaacaggaaggttcttctgtttgggttgcataattgcgtttacaacaatagatacatcgaaatctagaaggactagaaaacaaaccggtttgatgtcaccgttccaaatgcagtgagaagccaagaacccaattacggctgggacaatgtataacaaagcaggctgaaacaaaggcaaaacaaaaaccaaaacctatcagagagaaatcccaaaataggttgcaataaatagatgacaacaattaagacacaaaaactgacctgtgctgcttg

SEQ ID NO: 40416 - DNA, 710 bp, Arabidopsis thaliana landsberg
  unsure (1)..(710): unsure at all n locations
taattaaggggggatatatgtactttactgttttaaaatggacagatctcatttacgtgttcgggggatttataatcctctaggccataattatatattagaagattacgcaaatattttgttgtagaaactaacgtgaaatagagtaaaatcagtctcgattccgtttaaatactggaaaaaacaaaatatggtaaaaatttgtttatatggcaaagaattattagttaaaaacatacctcaaggagataagagcagacggtcaaagtcctagaagatcgaagatcattaagaagatgggaaagaatatctccagcttctttaggtgaataggttggttcgtcattttcatgctctataaaaaaatctaaggtaaacctctttcaacaatatcatattcactttctgaaaatcgaagacgatgacatttccggagtacttgaagatttctatgttaggtaggtttaacaaacaatacatggtagggataatgcagttatcaatgatcagttctctgactctaatttgcccagctaacttaacctcatcaaggtagcaagagataatactcagactctcaagcaaaggaaactttgatagcaaagaatcgatcaaatcaagtctaagccaaccaatagagagcgttcttagtcctacgtttgtgaatctcngaggaggggantngngatgtcgaaacggattaggatgag

SEQ ID NO: 40417 - DNA, 544 bp, Arabidopsis thaliana landsberg
acataaaaataaattagagtatttcttaggcagacggaaaaaaagaagatttactatttcttgggttaatatgccaaaaaaaataaaaatatgtataggtaagcattaatgttttggtgataagagatttcaaaatggggtatgtacacgtactctttatccataaaatcataaatgctagaagacctttccacaacaacaaaaaatgagccctttgtaattattttatccaaacataattttggaacaattttgtgtaatcatatatatgttaaaaatgcagcaaggcagctcggatttgaggatccaaatgaatacccacaactatgcaaattagcaaatggatatttgttgaaaacaaaagggtatgatgagaatgtggatgagtatttggagaatgaagctgagcgtgattctctctatgttcatctccttgaagaatttgatagatgcattctcacttatttttctttcaattggacccaatcttccaacctcatctctcaggtactttgatttcaatcaaattcagtatatttttatt

SEQ ID NO: 40418 - DNA, 420 bp, Arabidopsis thaliana landsberg
gaaagcaatcgtgagtaatgatttttgcttgtccttttctatttgtctgtttttattagatctcagagtggggacaaatgcaatgggggcatttcaggtaccatggctccactctaatatcagcaagtttgtccgggtaggataaatattgttcctcatatgttctttctagaagtgctaaagattccttcttttccctaacaaagttcgtttgttgatccagccttcccccgctacaccaaaattttgatttacctgcaccatttgcgttgcacacagattgccctcattattggcgatctcatcttccaggtatgaatgatccttactgccatatcaaacagtaaaagcatctgttattataacctttgaattgcttggtcacgccatacggaagaagagttttcaaccagattagcc

SEQ ID NO: 40419 - DNA, 568 bp, Arabidopsis thaliana landsberg
gtcttttgattttgatgatatcattcccactggtagaatgcatttctccataaatgttttgtgatagcaataatgcaaaaaggaaaggaaaagcttaaatcttgacactttcattcagtatcagagaatgtatctatgatagactatttgtgtaggcttgttgagttggttgtgcaatgttgatatggatccaatgtttactgatccattttattagtaagtgtcgctatcaaagctaggaaaaacttaataatgctgtcctactgtaatgaaacaagaataaaattgtttgcaaagttttaatcatgtagtttaaatttcaaccgtatcacctaatccctgagtccctgtttcagttgtgcagtacatcctatgtattatactaaaagcaagactgagcgctttgaacggagctatgatatatatatatcctcagaaacctaaatctacttctgatgtttaatttttcagaataggttgaatataacaaaaacagttcgcaagtttccaattgatccgcatttaaggtccaccggcgcagaattccactctggccttgcattacata

SEQ ID NO: 40420 - DNA, 575 bp, Arabidopsis thaliana landsberg
accgttttccttgatttttatatatagtattcttaaacttttaatgtattaatgttaaatctaaaagaaggaacgcgttggttggtttattttctttaaaaattctcttcttttcaaacaacaacatcatttatatcgtctgtgtaaagagatattaacaagattcccataatcctaaaacatacttaacaataaacgacttttactaatttatggcaccattctttatttgatttcagaaccgaaccggtcagaaacatagtgtctctctcataaatacataaatagtaatcgatgcacattcatcaagaaactaaaacgcagaaagatatatatcaagatcgaattaattgactgagaggataactaacacaggatcatgatcggttatatttcgtgccacgatcacttatacgctgtccacaagtttcctattttttcaaaatcttaattatgtctcgacaatacttcaaagtcggttcgatgttgctgtccgaatgtattggcccggtccctacgttgcctttggaacagcttatgttatgattaatgcttcgacgaaagacagtgaaaca

SEQ ID NO: 40421 - DNA, 208 bp, Arabidopsis thaliana landsberg
  unsure (1)..(208): unsure at all n locations
gtgttcgctggtcgtccgcggtgctgggggccacccgtgnctgtccgtattggcagcatattgcgaaggccctatgattcccggttctggggtggacctcgtcctgcgcaacatgaacattgtgtcacgcaacacggatcacaaccccatgtcacggtgtcgtgcgcagcctgcacctcacatgcctcacctttccaatgcagcgctt

SEQ ID NO: 40422 - DNA, 688 bp, Arabidopsis thaliana landsberg
taattaactgcttgcaagaaaaccagcgttgctcaagaacttatcctccggacttctaactcgatgtaacccagttggccacatgatttccccaaatacataccgaccagagaaaatctcagtgggcttgaatgtaacataatatgagtgttcttgttggcacttcgagaacaccagaatccgcggccagatcaaaacttccactcccacgggtctaatgatgtccacgaaataaactgtgtttttgtttggaccgacgttgcttacagtacgttttattgtcctggttaatctcaagctcggtatggtaatagacggatagttgaaatctgcatttgttcggtacgagtgagacggaagacatgttgtcgaaggctctgggtggagaaccatggacttaatttcttggtccgtgtagccaatgttgcacatgaagagcacatagtcgtcggttctggtattgtaaaccagacctgggtccatggatttcaaagggattatatgcccggcaccaatatcaaactggtcagtggacttcatctaaccaccagagaggatcaagtcatagcttgtgtctcttgtatacgctggaaacggaaataagatataacaatatcatacttgggtttgtaagaacaacatatgatgagggcctattagaaatagaacctgtggtcatgatagcgct

SEQ ID NO: 40423 - DNA, 627 bp, Arabidopsis thaliana landsberg
aaaactaggaaagagaatcactagtagtctagtacacataaggagataacttgggtattttctattttcctgatattgagagacgctagcaagaatgttttggcttcattgtttcggatgtaaccgaggcgcaagagattcgctctagagggaaattatggtcttaaggatttttgaatagaacattcgtattccctttatctggttctttactctattagatacctaaggcagaagcgaatcatcaaaaagacaatctgaagttgtaaaacgcagagaatacaagaagaacatggcatgataaaaaaaccaaaagataaaccatgcgtatcagatacatgcaaaagcaaaagcgtctctactttatgttaagccacctcaatgaagagataatcgctgtccctgcttccatgtatgacactctgaagcacatcactcttccctgccaacaccattttctatgcaattagatcccaagacaatgttttaaaacatttggcgcaaaataaactaacgattcagctgtgtagaactcaacgagagaattcagctatagaggccaatgaaaagctgtcaatattcatgtctaatgaaaaatgggatgcaaattgggtagacaatggcgat

SEQ ID NO: 40424 - DNA, 443 bp, Arabidopsis thaliana landsberg
  unsure (1)..(443): unsure at all n locations
ggatcaaaccgtgcctgtgctgaaggccacgagcgcagagggcaaggagatcgccctcatctttggctacgcatgccactgcaccacgctgggccaccagaagttcagcggcgactatgcgggctacgcgcagcaggcctnnnnnnnnnnnnnnnnnnnggctgtggcgctgttcatgaacggctgcagtggtgatcagaatccgtatccgcgccgcaccatggagttcgctcaggcgcacggccagtccctggccactgcagtggaggcggcgctgaccacaaagatgcgccggctccagggcatgatccgtgccgcgtatcgcgagatcccgctggcgtatgacacgctgcccacgaaggaaaagctgctggaggaagagaaatcctccaacaaatatctggcagcccacgggcggcgcctgctggagcggctggaaaaag

SEQ ID NO: 40425 - DNA, 529 bp, Arabidopsis thaliana landsberg
agattgattactataattctaactcgaattaaatgatataatcaattttgatgtatataattcattcttacaagaaaattaaagagcaacaccaatatggatcactaaataagtaaacatgtatacgtagatttgaagtcattcattgatattctgcctcaatgagagattaaaagccaacactgtatttcctcattttcaaaaacaggatgctataagcgtttgtgtcaccttctaattataacaaataatcaacattggaaaacaaaagttatgaagtagaatttggttatgatctcaaaagactcagttttaaagtacatcatcaaagtcatagattcttctatataaaatctaggagttgagtttagtgtgatagagtcattggtgtcacctaaaagtttgattttgaaatagtgacagttttgatatgagtatatatgaaaaaattagttgaatgatggggtgactattaaaatgaacattctcttgactgaatggacaaaaacaaaaatatttaatgctaaat

SEQ ID NO: 40426 - DNA, 572 bp, Arabidopsis thaliana landsberg
ttgcacggactagttactttccttacatgctgtggactttcaacatattttttctcttctgcaatcgcatttatgaaggatattctttctccattttcgggtgagttatgtaaatctcacatttgacacacatacttggagttgttgtatggttgctgtgaagcttaacactttgataatttctctctttgtccaaggcaacagtttgaattcctggataactttcggggcacatttagatggcatatatgcttcaactttggtattgttttatccactctacacttgactgcaattttctatgtgaaaaacacaatctggctggagtatgttgttcatttataattttgttgcagttgttttgcgcatgttaagttttggatatgattatcactggagccaactggattctcattttgatcaggaggtgatatatagtcttcctatctaacactctctgtcctttctgataaatcttttaccggtctctcagtagtattggaataggtgtagccatctcttatttttctatttcattattgcagaaacacgtaatgcgctgctccttatgt

SEQ ID NO: 40427 - DNA, 122 bp, Arabidopsis thaliana landsberg
  unsure (1)..(122): unsure at all n locations
gcatgcggcatcatttctaggtgtacacgaanctcattagagctctaaggaacgcgcataacggggggtttttatacaaggggcccctttttccccctcccaatcacttgtttttttttcct

SEQ ID NO: 40428 - DNA, 349 bp, Arabidopsis thaliana landsberg
gatcgacagcacaaaccacaccaataactcgaatacaaacgacgcataaatctaaaacattctatcaatacaagacaagataagaacccggcggagggcaggccaaagattatcacattataagaacaactaagaagcaggggtcgaagagatcagggcaatacgcatgctccaagctcccagggacgtcatgaacacaccaatttctccatcattgaagacataaagcatagcggctgcaccaatagccaacaacggaaaaacgctagatgccagcacagataatacctcctacaccgaaacgtaactaaaatcgagtgaacgaactaggagataaaaaaaaaaaaaa

SEQ ID NO: 40429 - DNA, 230 bp, Arabidopsis thaliana landsberg
ttcttccgatcaaaacagcttttcaggtattctttcatatgtctagaagagattgatgaagccggagaagtagaagaagatgattgttcttcacttgaatgatttgcaaacggagaattttcaaaagagagattttctgttcttctgggttttgggctttcgggtttgattggaggttcttgctttcgtcactgccgaatctttgacttacactttactcattttttatt

SEQ ID NO: 40430 - DNA, 546 bp, Arabidopsis thaliana landsberg
agcgcgtggaagttaaaaagtcattctcctaaatgaaccaagtcttcttgtcttaactacttcctaaagacaattagaagtttagaaccaaaacaaacgaaacttctctgcaatagccttctccaaatttcctcactttcacgcgtttcagtcttctctatataaacttgtttcatcaacccatcaaaatcccactcaaattctgtttcagtgttcttcaaattctcaatctttctctcaattcatctaaagggttcctcaaagtttcaatctttctctctgaatctaaaccatggctcgttgtagcaacaatctcgtagggatactcaatttcctagtatttcttctctcgatcccaatcttagctggtggaatctggctaagccaaaaagggtcaacagagtgtgaaagattcctagacaaaccagtgattgctcttggtgttttccttatgggttgtagcaatagctggtctaataggttcatgttgtagagtcacatggcttctttgggtttatctctttggcatgttccttttgattctcc

SEQ ID NO: 40431 - DNA, 570 bp, Arabidopsis thaliana landsberg
gagttagaatttacaagaatggtatttggttatgtttcatgtaaaatgtttctaagtgaatttgcgtggcttttggttttcatataatgttacattagtttttagcaaaagaagtatgcttttttttttcagtttaatgtcaaatataaatttggttattttggggggttttggttacttttggatgtttttggataaaaaataaccaacccaaaccgtgtacaagttcttttggattttcacacggttctcaatatgaacaacaaaaccgacttgaacctgaatagaatgaacccaaaaccgaaccaaaaatttacaacatctgaacgggacctaagcctcatgatctaaagatccaattcaaatggaatcaaaccaatccgatctgagtactcgaatgcctatgacttctttctttctatctctcattcacgcaaaaaaatattcgagaatagaatataaaaaataaaaaataaattaaaaagagaggccgaatgctcttgtggatgagagggagagagtattaacattcacatccccatgaccccatgtatttgtatcaatgatttt

SEQ ID NO: 40432 - DNA, 1546 bp, Arabidopsis thaliana landsberg
acgctttggatggaatcttttcaaatgacctaagataaaacgctttttcataaccttccgtactgcttctggtgtaactggagtgtaaaagaaagggctgctatatattagcacaatgatagagataccttaaaagagcttcatcaagcaaatcctttctgtttgtcattccaatcagcaaaacattgtttaaggcctccacaccatctatctataaaaaaaggtgttagtcacgtccgtgaaaactccgaataaactgataatagcttgatctttgactgacctttgtcaaaagctggtttacaatactatcatggacacctgtgccatctctggttgaacctcttgactgaaaatcacaaagcatacaatcgttaatttattgtttaaactcataaccactagatcacttgaaagtatacccaaaatccagagaaaaatacagtcacaacacagagtagcaagatttcttacccagatttaatgggactggtggtcaaaactaaaagcatatttacaacttcaaataagcaaaatcatcaaagataagaaaagataaagttgtgtaccttgcaaatagcatcaatctcatcaaaaataatgacatgcaactcactagcatcacctgagaaaataagaatgcccaattagtatatgcactggaaaaagaaaacacaaaagcacagatcagaaagaacaatgtttccttaccaagggtcctctggtcttgctcagcatcagcaaataagtctctgacattcttttctgtctcaccaacaaacttgctcagcacctcaggcccattaacgatctatataatgccagcaaaagaacaaaggaagcattaaacatgtggatttcaggaataaaaggcagtgaatgaaacattaaaatgtcgtaaactattgatgcaaacaattaaaataggatctgcggctgccaatgtatgaaggaaatagtgagataattaaacagtcaatagcatgttctcacagaaggtgtacatccaaccagggtaacaaatcatgaagtgataatatatttaggtaaatgcgagtgcaatcctgggtaacaaacttacaaaaaacatacaaatgaaattaaggactacaagcaagtaagttatcataattcttcttgatagactattatgaaaatcagaaatacctttggatcctttccattaagcatctttccaatctgccgtgccataagggttttgccagtaccaggaggtccaaaaagaagcatccctttaacatgctttattcccagtctgcaagatcaacaaagataaacttagaaggaatatatatctacaaatacagtctaacacttgcttgaagaatgagccagaaacctgctggtgacatgaggaggaaatacacgagaagcaaaagctcttctaaatatatcagcaaactctgcaccaagaccacctattcccagcgactcaaggttaaattccttatgtttgaatatattgctgctagcaagcttcccgttgggttgaccaattctgcataaagaaaacgtacaaagtttt

SEQ ID NO: 40433 - DNA, 595 bp, Arabidopsis thaliana landsberg
cttgcatcactttcaaaaacaaaaaaaaaaaaaaaaaataaaagccaagatagaaggatgtccatagcacatcccaatcctatccttctcctttttaatgagggagattcggcgtattttgaagggtccgctggggatgtctcgttacacatccacagccaaattgttgcctcatctcacctcctgcttttttttttcacaaactttttttcattgtttaaggaagaaaatataatattatacagatgtaaaattttaatttgcctattttaagtaagaaatatttagtgatcacaaactactatggcagccaacatggcgacaagtttaatttgcgcccccagttgtcgacacaggtcaccctttctgcaaaatcataggcaatgaaatattcacacccaaattcaggggaatctgatattttataacaaaataggttttctatggcgaatctccctggatgtctcgttacacaagctctggacatccttcataggatagttttatactaaaatagttattttggcatttgatttatcattttatttttcgcgttcaaattctcgaatagccattctaggagaaaatccatttg

SEQ ID NO: 40434 - DNA, 493 bp, Arabidopsis thaliana landsberg
tcgtcaggtcgaggccggcaagctcgagatgcgccccgagaccactcagctcgagcgtctggtggaagggctgcggggcatgttcctgccgttggccgagcacaaggggctggcgttcgaggtcacggtcgatcgccaggtgccggccactttgttcaccgatcgccagcgcctggagcaaattctcaagaacctgctgtcgaatgccatcaagttcaccgagcgcgggcaggttagcctgagcatcagccatgagcctgccaacggtatcgtgttcgccgtgcgcgacagcggcatcggcatcgctcccgaccagcaacaggccatcttcggtgccttccaccaggtcgatggcaccagcaaccgtcgttatggcggcacgggcctgggcctgtcgatttcccgcgatctggcccatttgctgggtggccagatcagtgtgcagagtgcgctgggccaaggcagcgtgttcagcctggtggtgcccgagcgc

SEQ ID NO: 40435 - DNA, 863 bp, Arabidopsis thaliana landsberg
tatgattccactcttacttaagacaaatgttcatcatacattatacatctttaaacatttattttggattttaaaactctatgattttaatgattatgtatagtattattcgcttatggtttatagattattaacaaatataattatgcaataatttttttttgaatatattttctgacctagccactgttatatattgtggccaatttctggtacattttattttttgtaaagtcattttgtggttatatgtggctaagacaaaaaatgtttttggagcaattagacttagacacacggatatgtggtgtccttttgatggctatattgatggctagctacaagaattgtggtaattaacaactttacgtacaccaaacgttaagaacatcaaaatcactccatctagtataacatattttttaatctttgccgtgcaaatacaaattacacggtgattaatacttccaccaccaaacaaacacagcacactaatttttagaggaaaggaataaagcaaaaacaaaatctctgaccacaaagtgtgtggatcgaaccaagctacggccagtgaaagtgtaatatcagacacttgaaaggctagcccatttgcctacttcgtaaggatccgcatagtaatatagcttgatcctgtttgctaaagacagtcctgcagcaaaaggagacgcccggctgctcaaatcaacagcctctgctggctcatctgtaaaagctgctacatctcctagcagtttaaacgatactctctgtgcttgtatctgtttagggaagtcaaaatacaactttgttccatctctcgcatcaggcaatctggattcggcggatgttacaatttggaatgc

SEQ ID NO: 40436 - DNA, 575 bp, Arabidopsis thaliana landsberg
tcagtggattttccaccagatgacagctttctgcaccatagtttgtaggaccttcttctctgcaacagtagatgctgaaaataagctaatgcattgttcaatcacattactccttagaggagtagatttcaatgtgcataccttcctgaagagctttaatagtagattgtaaatcttgacgatctttctctaagctctgcaattttttcctattgaagttgataggtaagataaaatagaacccagaaagccataaaagttacagactgaatccataggtagttttccagtatcccacggttctttttggatcaaacatcatgtaaaggtgaagttacggacatgaatagaatacagtaaagagcctacttgtaagataacatttctgtttgtgccttctccagttccctctccagctttaactcattagatctgagtctgagagcctaatatatgttccaagaaaaatccaagctaaacaggtaagcatctgaaggtagacgaaacagatatttcacagctgaaatattcaaaaactaaactaaacatgtcactgcacacttttgcagctaagt

SEQ ID NO: 40437 - DNA, 965 bp, Arabidopsis thaliana landsberg
accgaatggctcattagtttctgttggacctttggcctcatatataacaggattgtcttgtgcactccaagaagagggttacatggttgaagttatattgccaaagtatgagtcaaatccttcagaaaaatatactttataatatcaactgtgaagcagagtcttattaactatattcattaacagatattctacacttgatttggacgaaattgaagggcttcgtgaaatcgaagccgatgcatattcttattttgatggccagctgcatgcaaaccgaatatggaacgggtgagtgagctgttgcaagttattcttcttataatgttgatatttttcagtgtttgtaaaagaagaattggtaaaatattgtcaaaacattccatttcttcctaaatttaaggcaaagagaaccttgtttatgcagagttgtctctggaataggagtgacacttattcaaccagtgtattactcgtcaatgtttagccgtgataaagtatacgggtatcaggacgattttgataggtcagtacttcaatttgatatagttgagcttgaatctacatttgttttcagactggtttggtttatatgtgttatctgagaacaaaatcagatttgcatacttctctcgtgcttcattggattacattgcaaaatctggaaagcagcctgatgttttacacattcacaactggcaaactgcaatagttggaccgttgttttgggatgtttttgttaatcaggtaaaacacctcttcaaactttcagcgtttgttcacctcatagttttcttattgccatctctttgcaaactttgtagggacttgaaggtactagaatactcttgacatgccaagactttgacaaggcatgccactttgctttttccctctatactactttatacactctacagtctacattggcaaaattgacaaagaactcttgtgcttgtgctttt

SEQ ID NO: 40438 - DNA, 352 bp, Arabidopsis thaliana landsberg
  unsure (1)..(352): unsure at all n locations
ccccccccccccccccccccccccccccccccccccccccccctttttcccccccccccccccccccccccccccccccccccccccccccccccccccctttccccctgtttcccnccccgcggccccccccacccaccccaccccccccccccccncccccccnncccccccccccccccccccccccccccccccccccccccccccccccccccccccccccccccccccccccccccccccccccccccccccccccgccccanctggccgggcccgacacaaacccccccccccccccccccccccacgaccgccccccccccccccccccccccccccccccccc

SEQ ID NO: 40439 - DNA, 578 bp, Arabidopsis thaliana landsberg
gcaactaccatttgtttgagaaatgcacaaagtttgaaattctagtcattccaacagtgaggatgcttcttgggattccttacgtagacaagacggttctttccaactctgttcttgagaggtgactcttatctctgaatctatcattgcttgtacgcacatttttacttctttctgatcaggttaatgctcacatttacagaggcaagcaggataaaagcaaactattgttagtcgacaaatgccattatgagcttgatgttgaaggtatgttccattcttttatcaccataattgaaatttgtgtcattttgtagaccgtacaaaggaatatagatggtttaattcgactatgtttgtgatatgtagacaaatgctcacatatattatcatgagtttatatgagcattgtgtctcttattggagtggttcctgatttccaaaaagttggggttcactttggagtacttttaaaatgtagtcctcttttggaaaacacacatgttttatttaaaactatataaccaccgattaagttaggcctactatatatcacttactaaccatgaacctaatag

SEQ ID NO: 40440 - DNA, 864 bp, Arabidopsis thaliana landsberg
  unsure (1)..(864): unsure at all n locations
catggcttttcaaattggcgcatcttgggtgctacttgtgtgttgttagatcctttttgccaagtggatgtactgcatctatcactatgaagacaagctgttatgtgtcttatattatgagccgaagcgaaacaatatgaggggtgttgacgtcgaaggtactttacctaatgatacaaggcgttacagatttgttataatctggactattccggatcatgttcagaacacaatgtatttgtattagacactaatannnnnnnnnnnnnnnnnnnnnctttactaatatgatcaaatttcttttaccaaaaaaaataaaaaaaatatggtcaaatatgtaatgataaaaatagaggctacatatttagcctattttacagagtagtctggtcgtgggttttgtttttttaaaaccataaccctgaaaacatgtttttcaaccaaacagaggctacatatttagcctattttaaaactttcgttaagacactattattcaaaacaatttttttcaacaaaattggtaatttttttgacatttttctctttttcacttacaccaaatatcttacaaagacaccatctaccatattcattattccataattcatcatatgggtaatatttgatctagaagatatgatccaaatatctataataatgatgctagaagagaggagacaagcgtgacgtcaaagagactccaaaacgacacagagttgcaaagtttgattagatttgtttgaagatccaatcctaaagatagaacattttttgagagaaagagtcagagattaaaaataaaaataaaaaccgttaaagagcatataaaccctgcatcactccaacttaatgtagtcaacg

SEQ ID NO: 40441 - DNA, 435 bp, Arabidopsis thaliana landsberg
catatacaaaggaacagctaaattggcccattagtgagattgacattaagttcatggtgggctttggtttaggatccatcaagttgcactaaagtccaaagaggttattgagaaggaagagtactacttttgatcatatcatatctttgggcaaacaagaaaccaatattactcctgaactatgacagctttcactactgaatgatataatgcgtgtgttttgtttcttcgtcaagagttcaaatatacactgatacacacgtatttgaagccacttccaatttgggcaccaaggcatgaattaataacaaacccaattgggtgaaaatgttacagatgtatttggtccagttatgggggccctcttggtaccactaatctattattaattcaacgcgttaaatgtatattttggtttttaagtttttttttttt

SEQ ID NO: 40442 - DNA, 827 bp, Arabidopsis thaliana landsberg
acatccaacttcgtgattacatgtttcgttatacttgaaatacatgatgaatttttgtcttagtagggtgggtgatttacttaaagagttcataagaatgttttacttgagtcaatatcccaaatatattaacgttttcgtttgtggtgtgttataatcaaatagaaataaaactccataatgccgaggcttgacccgaattctgtatttcatagaatatttcttcagttaactaaattagtaaataatttaaaaaaaaactaaattatactgttattatttatttctaataattttcttcactaattaacttattcatagacttacttttctactataaaacataagatttgtagagttatacttttgacatacatggtgcaactttcttaaacatttatattttgaatacggaggatctcacacaaaactccgattaatacttggactctatagaagaaacaagtttttattctattttacccacatggtcctcgactaatgacctatataaactagatttctataaatatcatgatggtacttagatccttgagatccctccctcgaggttgcaaaatagctaaaagttcacaaaatttattgtgaacatgttcgaaatttttttgattctaaggaagcttctttgtgtttatacactcaaaacttttgattttttttttctttcttcctgattaaaagacaaaacgcaaagagaacaaaaaaaaaacttgttatttgttaactagatttaggatcattttggaacaaaaaaaattagaaagcaaaggtttatttattggttcctgaaagacaaacaagggttg

SEQ ID NO: 40443 - DNA, 776 bp, Arabidopsis thaliana landsberg
agtttagggtgttagtattgtgtagatcaaggctattgtctgggctttgatgttgaagtgaaacaagttgttttggtttttgctatcagagatattcgacgattgtgcaggttgcatttccgatgagcagatagttttatttaggactccattatgggttggtttaacaagatctttaaaggctctaaccaaaggctccgggttgggaataataagcacaatcacaatgtttattacgataattatccgactgcttcacatgatgatgagcctagtgcggcggatacagatgctgataatgatgaacctcatcatactcaggaaccatctacatctgaggtgagtttggggatcatgaagtagtgaaaagaaccacatatatagttgacggtttatcatagctctggtctgtactgttatttcaacttttgtggtttttctttactaggataatacatcgaatgaccaggaaaatgaagacatagaccgtgcaattgcattgtcgcttttagaagagaatcaagaacagacaagtataagcggtgagttcattttcaggattgttttagccaaaacagatatatgaagacatggttttgttatcggattcggtttgctacaattcctttaaaaaaagtaatggacacagggaaatactcgatgccggtggatgaagatgagcaacttgctagagccctacaagaaagtatggtagttgggaattcaccccgtcacaaaagttgaagtacatatgataatgggaatgcatatggagc

SEQ ID NO: 40444 - DNA, 461 bp, Arabidopsis thaliana landsberg
cccgccgtccgggcggcgggcgctgccgcatcggcggctgtcggttcggcggcaacaaccgaattggcgaaggtgacggtcgccctggcgccgtcgtcgtcggatatgagcaggctctgggcatgcgccgccaccggggtcagcagggatgcggcaagcagcagggccttgaagcgcggatcagccatgattcgcacctcccgtcagtgccgccggaagttcggcattggcgcccggaatggtcgcgccgttggccttgacctgaatcggtgcgtccggctgcgaggcgaattccttttcgccgatccagccgatcgagtagcggagcgcacggaaagtctcggtgaaggtccagaggccgaacttggatcgtgccggcgaagaagccgagccgcacctggcggcgattgaggcgatcctggagcacggcctggtccgaatacatgaggtcggccatcacc

SEQ ID NO: 40445 - DNA, 209 bp, Arabidopsis thaliana landsberg
gccatggccgacaagagaggatgttctcaattcttatgaacgagacataaaaaatcagaatcaagcatgcaacgggaacgcggctgagactaaggaaagaaagggaccaaaacggcttgagaaaatgatcccaaacatgttaaaagggacggtcacaatacattccaaacatcatcgggtctacactcggacagaagagccaaacgagc

SEQ ID NO: 40446 - DNA, 501 bp, Arabidopsis thaliana landsberg
accttcgcagggcgttttcaaggcctggcaagtaacttgggttgtcattatagtctgggagggcgacgcattcgaggtcttggaaatagctcgtttgcgagatgaatgaacagatcgagtgagacgcgatcacacgaacattaaattgtgtttggatcaccataaactggtccacttcctctggtgtcggaagttgaccaaacaccaaagaaagtttcggtttctgttgttccatggcgctctccttgtcgaccaatcggacgtgactcttaaacttcttctcgcaacagacttgtcgcgctttgccctgatctaaaatgcgcgattgccttgcgcttggtctgggtggcctgaagttgctgacgggcctggtccagatgggttgccaacatcggttcgagtttggcgttttgttctgcaatctcttgccacatttccatcaagtaggaagtggtggcctcagcatccgcttgttctactagagcttcagcagcgcggtag

SEQ ID NO: 40447 - DNA, 962 bp, Arabidopsis thaliana landsberg
aattgtataccactacgcatcacataggccacgattatgagaaatgtgcttttaaaaattaatggttgcaaatcctagtaaataattttgagttttggtccggtatttcccggttattgaaaaaaaacaatctttattcaataagatgaatgaagaaataatccgtggatacacaaagtaataaattcaagaacatagcctacaaaagcaacaatactcttttaagaaaatacataacaaataatggtgttgttaatggttggaagagaatgaaatcagcaaaagatataaaacgcaaaagctaatgggaaaattataagattgagaaaaagagaataaggtgcactgcttggtgcatcgcttcctctactagccgaaggacccgacccaaatcctcctggtgattctgcacctatccaaatttcaatcactatggttaattaatgggttgacaaagtaccgaaccgaaccaaaccaaaatacaattcttttattcaaagtacaaaaataatttgatttttttactgtggtgaattttctctttaaccggttcaagaatctaaaaagagaaatgaagtggatcgtttacctgacatcgaacctggagcataggctggggaggctccctcgtctcccatagctacaggtgctccaacaggaattccaaaaactggtaataacagaaatttaattagaactcttgttgagaagataatttgagtcactcatcaattagtaagaactttgttcttttgatttgcatgaatctgagcttaaagtagatgaattataaagttgtggggtaaatctatatttcagtaactttaacatcaagaaagggcaataaaataagacacaaagaaatacttttcgacgaccgacaaaagtggttgagtagtaaagttggatggctcgcccaatcaataaatgattcacattttttatcgattcttaatttaaca

SEQ ID NO: 40448 - DNA, 258 bp, Arabidopsis thaliana landsberg
agctgcacaaggaacacgatagttagagcaaaatcacaggaaaaaacaaacaagcaaaagcatataacaaaatctttatattgaaactaaccttctctcatcttggcatcaagctctcgaagagtaggctcgatcaactcccattcttctgggtacttgactcggttagttttaacctttggcattttctacagaacgcaaattacacccgttaaacaaaggaacaaattaagtaaaatgggacactttaaccaaaac

SEQ ID NO: 40449 - DNA, 586 bp, Arabidopsis thaliana landsberg
aaaaaaaaaaaaaagagagagaacctaaaatacaagcttattgtcatcacttctcacttattcaaggtgttacaaactctgattgattaagccataatttatattgaacgagataccgtcaagaggattatacagagaaatggtatggctccaatgatttcaacgaaacagtaacatgtggcaggcagacttaaaagaagcgacaaccctatatattaagaagcttggataaaagaaagagaaaaataaaggactatctgattcatagacacaacaagtatatctcaaccttgttcatttatctctcaaactccttggcttatgttttacatatctggggttagattttgcgttaatacgaataatcgcgtgagcaccctgtttgacgaatttagacaacgcttcgttgaaaaatctcaccttctgatggcccaaatcgtacccacaattcgtgcataaacgtttccccttccaccaagggtttccttccactgtgagatgatacgatgcaaaagctcacaagtagaaaccttgatgtctaatgaaaggtgatatattgttgaagtttgctcaaccacgcagtgga

SEQ ID NO: 40450 - DNA, 1004 bp, Arabidopsis thaliana landsberg
  unsure (1)..(1004): unsure at all n locations
cgtggccaaaaaacactaacaaaagagaaatgtaacgacgcatgcctctatacattttcttttcattattgcactctacttgttgttttttaaaacatcccaaaatttttaggatcgttgatcgtttataggacgagtttgtaaaacgtataatcgttctaattgagatattatcggttcttccactacatcacgtagaaaaagaagttgattttggacttctaattaaccacacttacaaagtgattatattcgaaccaatgcagttgcaaactatgatgcaacgggtaaagaattaacgatatataatagaaatgaatgtgtgtgatttcaaaatatagtatagcattaagctcactcacgtacgtacggagtctttaagatatgtatgcataagcgataatttaggtgattagttgggaaataatgaattcctttttggaactttatggatcatcgaataaatgtgagatatttaattcacccaaccttaatgatgaaaagtgaatctataatggcaagcaaccatcatgatacaaaccttatatgcccttaagtcaatttctacagctataactttatatatatagcattgacaaaagataatttattttttcattgtgttactgtgtttttagtaaagaaaagaaaaaatatcataagaaatagacatcgtgaccccaaaaaaaatacgtataagcaaaaggcatagcttggatttcctagtagtatcaaataaataaatgagacaaaatatttctagtagaacgggattacgggaccatgtgtttgagatattttatgaaaatcaatagaaatagtaaatagaaaaatatgagaatataacttgtgttcataatatgatgatgtatatacaagattaacatgtnaattaaagaatgaagagacctagctcgacacattatttttagtagagcagaacaggtgatngagataattcatgttcataattatgaattcacgaggtaataaactcgtaaata

SEQ ID NO: 40451 - DNA, 647 bp, Arabidopsis thaliana landsberg
aacccagctcctagacttctattcctagcttcagtagaagcagaaagatacattttttttagttacaacaaaactattttactcacaatgataacaacaactcggtctttttaaaatttcaacttaaactcaaagatatttgtgaagaaaatattttaaattggttaaaatatttgaaactgcaagttaagatcatgtcccccccacgtgacaatataaaacttctacacaagtttccatcaagagattttcgtaattaattaagtcaatagagacattaattaacataagaaatgagagaatggtaaatgaagagttaagagcatgcatgtaatgtaaatggaaatgcaaatgagaaaacaaatattaaggcagcaactttaaacattcttctgcttcttggactgcacgacggtgcagagtgtttgaatcgatggcagtgtagattgattgctatttaacagttagctgcaacatttttagtgtagttctgagcctatcactaggcacatatcatacctacttctatacatatatatttcatgtatctgtatttatctatacgtatgtattcattatacatatatacatgtagagatgtggtggataactgacgtagaatcccgagataaatcggaagaaaggta

SEQ ID NO: 40452 - DNA, 854 bp, Arabidopsis thaliana landsberg
cagagcaccatgggctttttcttggttgagtgagctcgtcgatggatcgagtttctgggagtccaatgagatggggaagcagatataagacgaggaagaggaataacaatgcagcagatactgtccccattgctggtctgagctttgtggatttgagatgtgactgttatgaagctaacagtgtgtatatttatatatgtatgtggggtgggccaagacagaacttgttgtgaaatgacaagttaggcatcaaatatgtacttttctttatggcgcttcaaagatcaaaattctctgttctgactcttcctttttcagggcaaagacaactccagcaagcaaagaagcatcaatatgtattttatacacacactctgtatttcacctcctaacgaacatgttctccgagaattgagtgaatgcaacgatgaccagacaaacttcctctagatttgacaatgtaacactaatgtactcttgagaaaaaagtatatcactttattactcgaaacaactgaaacatctgaaatatgtaaagcatacaactatcggtcactagcaaaacacctatgagtacacaacactatttgacacaatacaaagaaaagactcgctaatggtccaaagccactctttcggcttaacacactaaacacgctctaatccacctcttcgatcttgggacctccagcagcacctgagctactgaaatcaccatctgtcggcatacctacagcagcagcaccaccctgatacatctttgagatgattgggttgcaaataccttctaactctttcaacttgtactcaaactcatcaacttccgccagctgggttccttcggtccattcaat

SEQ ID NO: 40453 - DNA, 529 bp, Arabidopsis thaliana landsberg
  unsure (1)..(529): unsure at all n locations
accctatttggcatgttcacctgatctcggtctcacgagctgttaggaatctacacgctatcaagttgtgtcaacgaaatattcacgtctactcctcggacatatataactcgttccaacaccagatatcttcctaaattctacaagctatctatattctaaagactcaacaaatcaaccagcttgtagtatacttgaacatgcccaacctttacgacaacaagggtaggccccagacttgctcactttgttaccgcccctctgactatcccacggagaagaagtctgtccccgtcaatatacccgctgggggcggtggcaagggcatagagaagagggcgaaaggtgggaatgggaaggataaggatacgggaggcgaatctggatatgaaggggacgacgagaagaaaaagaagaacaagaaggagagccgcgacaggatggtgatatagacatgaattagttgagcatgnttgggattggngcagtagttaaatagttatgtacgcagagaaacatcgcttttagc

SEQ ID NO: 40454 - DNA, 675 bp, Arabidopsis thaliana landsberg
gaattgtatataacaacgcaaaaagacaactcgaaaatgaaagaatttaagcggagagttttatgacctgttctctaaattcaggaccctttgggtttgataagagataacgagaacgatacaaacccgagtttttgttttcatttcatgtctttatcatacccaaagcttgttgtaagatgaaataccgtcataaaggcattgaaattcctgcggtttcagatagaaaaggttaacttttaaatgcataaagataagcaacaagttcatatcaaatataagaagactccacaagatgaaaccaatgcccaagaactaaacatgatgcatatgccaaagtattaaacataaccaaaactgcaaatacaagtaaactataagccaacaaagacaacaatttcaatcacaagtagagttttcatgacaagtaacaacaatctaagaatgtaaaagaggcaagaactatccttgatataaataacgcatggaacgagaaggtattcatcagatttacaaacagattgaaaaggcgctaacataatctatgcaactgctaagataaccagctaaaacatactttcccaatcaagaactgataacagccattgccatagaaccccaccaaatgtctaaaactggcacacaaggaatcaacatcaaagttgcaacaccgag

SEQ ID NO: 40455 - DNA, 531 bp, Arabidopsis thaliana landsberg
tagactttatatccgccaaagccttgaagaagaagtcaacctcacaaggaagaacaatgggtccatcgtgtctatatccatactcagtctcagcatcttctaacaagttcttgaacaaaggatggttcagaagttttgtcttcacaacaattctttgtttcgtgggaccaacgtaaaccgtgaaaaatccatgtgacggcgactctttcttcggctttccttttgattcgttgctcttagcatcctcgagacgaaaagagccatggcaagacttgctcttcgtgaacgagggtgtggtcgaagagctcgtatgcccaaaagacttcacttttctccatgtcttcaatatcggattcttcattgtttctctcttccaatgagaggatgatgtatccaaaaattaaaaagttttcttttcaatgacagaatcaagaagtgtttgtgggtcagacaagttttggttgaccgtttggtgtcttttttttggttttaaaaaattattcggcttcttcaatctttcctttatatata

SEQ ID NO: 40456 - DNA, 734 bp, Arabidopsis thaliana landsberg
taggactaattaatggatatccattaacacaaccatacatcttaatatgaaatgtgtgtaccttttccaaatatacgtcgtcgccaacaactatacaatggataattaaatataaagcagaacatttggataaaggccaatatttgattaaagacttggatataatgtgaaggcatatatttgtttttggatagaataaaactaaaaaaagtgtgtgcttaggaaagttcgtccgacgtgtatatgaatcagcaaatacttatcttgatcctctccgtgtgggtcccatttcgacgtgttctcattttccaccaattaatcaatttagaccattataaatagtctcccgctcgctttgctctcttctttctcttattttcctattcttgaaaacacacaacacatctcatttctccgctgtttcgtcggcaaattttcccatttttgattccgaagataatagatattatcaacagaggataaggataaaacccaaaacaatcattataatttagtggtgaagttgaccaaatttataaactgatccaattttaaaaatctgtaagtcgtcaatatttctgggtttttttcttagatctataaaactggaaattcttaaaaattggttaaaatcttttttcttttagaatcccaataatttggaaacttccctaaggcattttttcaataaccaaaaattttggaaattcctgggagtttttttttttaacccc

SEQ ID NO: 40457 - DNA, 744 bp, Arabidopsis thaliana landsberg
gaatctaataagagtgttttgggttaaaattaacaactttttttcattaacacaattgtgttcctaattctcatcacactgtctataaagtattttcctataatcagtatcaccgcatatacttaatggttgttcatccatatgcattctagaaccaatatcttcatatgatcaaagtaattaatcaacaatatcttgtgagacaaaagatgtcatatagtcaaaaatgttcaaaaatctataatatccttggcatagaatgaatcaaccccataaagatcctaagtaataggaggaatcctaatagtctaatttattcattctcatgcatgtaactttaactaaacaaacctttgtgtcctgtcgcttgataacttctgtttatatgagattaaccattatccgataagctaagagtaaataaagtactctatactattcaatagcttaatttaatacacttaacgtctatatatgtatatagaacctgtcgtgggatctaagacagtaagacatcaatcatcgcattatcttataaaaaaattacttaaatgctcgtgcttcatttggtatatcttttaagtcttaagtttgcaaacattgaaacaatcatctgtgtggatgctatttggtttggaatatatttaacataaacccaaaaaaggcttacatgccttttgaatcatttgataggattctaatgacttttcttagtcttaagccgagttcttaaggggcaaaatt

SEQ ID NO: 40458 - DNA, 565 bp, Arabidopsis thaliana landsberg
  unsure (1)..(565): unsure at all n locations
atataaacagtattttaatcactttatcataaaaaattttgaaatttttaacggatctcaatcaaatggcattgggggacaacacacacacacaagcatctccataagggattggaaaacaatcttgttttgtttgacatggtcctttgaaatcagaatcgtgttttgttatgaattatagacactagtactatttttttgttaaatgaaaataaagatgaaagacatctcacgaatcgattgcacatgttaataaggagagaaagaataatgagaagagcaacaaattgaatcttcgaggacaccatttttcgatgaactttttactttacaagttgatatgaactatctttgatccaatgcatgaataaactaagagctgatggttcttactacatgttattatcacacacacacacacacacatgcacaaaaacacacatatattgttaaacatattcagaaagaaacngatagagaatgtgtagaaaaaacgtattgtattttaataacttaatgatttattgtgcaaccgaagatagcttcattctttatatattgacag

SEQ ID NO: 40459 - DNA, 429 bp, Arabidopsis thaliana landsberg
gaggaccccgacgcgttgttgaacgtcaatgtccgcgcgccggtgctttcggcccatttggcgatcccgcacctgaaggggggcgggggcatcgtctcgatcggctcgtgcctggccgaacgcgtgcccttcgccggaccgacggtctattcgatgaccaagtcggcgctgctggccttcacgcgcggtctctcgcgcgagctcggggcgcgggacatcaccgtcaacctggtgcagccgggggcagtcgacaccgacatgaacccggccgatggcgaacactccgatggcctgcgggcgatgacggcgctcgggcgctatggcgaaacccgcgacatcgctgaggcggtggcgttcctcgccagtcccgccgcgaagtaccttaccggatcgatcgttacggtggatggcggcttcaacgcctgatga

SEQ ID NO: 40460 - DNA, 604 bp, Arabidopsis thaliana landsberg
cacttcttccatatgctacacgatcttacacatggcttcatctcattaccttctaccgacttacgaatattttccgacttacgaggaaagtaaccaaaaccaacttgcccttatacaaatcatccacatttatttccacgattttgtatactttgcatttttgtataaatggtactatttctcaatttctttttccatgccgtcaatttgagcaggaatagttgtatacatgatgaaccttaacatttgttttatttataaaccacgaaactagtatttggtattaaaagttaagtactatttgttcaccaaaaaaaaagagtgtgtcatttgtatataaagttgatcatttgtttgtattagcgcctaataccaacgatataaaaacataaaatctagatgaatgatacgtccaccaaagttatatcatacacgatatattccgaacttcttcatgaatcattgatcatacaagatatggacgaaaaatgagattacatataaaaattattcatctcaaatcaaatttttacccatcaggcattggtttggtgacctatgcattcatctattataattatgaagatggatcatgaatcatcaa

SEQ ID NO: 40461 - DNA, 323 bp, Arabidopsis thaliana landsberg
  unsure (1)..(323): unsure at all n locations
atgaacctttggaaagaaaacgaagaaagcttctgcagatttctccaaagaatgtctctgctacattttaaaagatcttgaggacnnnnnnnnnnnnnnnnnnngatctcaaactttttttctaccaagaatctcttacaaaatctaaatcacaaatacctcttgtttaagaatatacagatcgatactcttgaatatcaatagataactgagtcaaaagagaaggaaaacaaaaacaaaaaactgtttcgctaaagtttaagagaagagacatgaattaagcttaagataacaacacctaatatgtgaaagttaaacacaat

SEQ ID NO: 40462 - DNA, 1628 bp, Arabidopsis thaliana landsberg
gagacttcatgatatgcacttgtagctcgtgagctccacgttgatcgttttctctggctgattctttggcaagacaagagtaaatatcttcgtttcctggtaaagaaagagaatccattagtctgagaatatcagaagtagaacaacgagaacttggattttgcggttgaatctgaggttgttgaataacgacgacaggttctgatttttggtgtttaggtttccttagaagaagttgaacatcgaagttggttctgacatcattcccgacgcttcgtgcggtggaattgtagttaaaagaaggaactaaagacggtggagatggaggtaaagctaattccaaagttttcatctgaaattttcttttgcagtcgcagagcttaaagagaagaaagattcataacgaatattttgtagaagaagaagatgaacaaagctacaaaagccaagccggttcggttcttttgtttgaaataattttaggtccggtttgattataaatccactaattaacgttaaatatgacgaactacgcacagatttcgcgcgtgtacatcactgccacaaaacttgcttatgtttgcaggcgcgtgtgtttgtttatgtgttatataaacgtgtttaaggaaactaattaaaataaaaatccattggattttgtactaaacaaaggtaattaatagtgacacctcttaaagagataatgagtgtacgttagtaaaatgcacacgtcacatctcttcttcttcttcttcttttccacttcagactctgtttttagctctgtgatttgagtttttattttgcggtggcgttgtatggctatggcctttcctctttcttatactccgacgattactgttaaaccagtaacgtactctcggagatcgaactttgtagttttctcgtcgagttctaatggacgagatcctttagaggagaattcagtacctaatggtgtgaaaagcttggagaagcttcaagaagagaagcgtcgtgctgagttatctgctaggattgcttctggagctttcactgtacggaaatctaggtgaattcccatttaccaaatcaagaagcatgtattgtcctaatggagcattgattctgtaaatgttttgtcttgattctcttttggttcttgtgtgtttttgttttggtttgtacaagttttccatctacagtgaagaatggtttatctaagattggaataccaagcaatgttcttgatttcatgtttgattggactggttctgaccaagactaccccaaggttcctgaggctaaaggctcgattcaggcggtccggaacgaagctttcttcatccctttgtatgagcttttccttacttatggtggaattttcaggttgacctttgggcctaaggtttgtttctttctttatcttctgatttcttaactacagagtaaaaagtattggttaaagaatccaatcattttgtgtttgctatttgtattggtagtctttcttgatcgtgtcggatccttctattgctaaacatatattgaaggacaatgcaaaagcttactccaaggtaataaccactagcaataccaacattttttaccaatgaatggtctcgttttgtgatttttcttatacatca

SEQ ID NO: 40463 - DNA, 805 bp, Arabidopsis thaliana landsberg
ccagccacattttctacagtcttgccatttgaatggtccatgtggatgatcttttcatgagaactgctggtaaaaataatgggatttgttcctaagcttatatatatcatcttcaaagaaagagagaagcttgttcttatgtttgagcataaaagcccataacactaccttctagtattaacatttgctgtatttttggcggaatccgtattgacaagctcaattggacatgatctagtctttaatcctggtaacgcgtctttaatatcatgtctgcatgttgaagataaaggaaagagtgaaaagatatagttacacaggtgaagaagaaaagaaatactacctcgtatcatttgtagggttcaaacttgacccaatgttttctcggataactggctgaatctctgtttcaattggagaagactcaagcacatgggattcaggtttttctggcttcttaaaaaatctggatctgataagtcctaaatctttgttttgcatggccctcaaattatcgagccctgccatgctgcactcagtttacagtatactgcagttagatatatatttcatcttcaaaaattactggcagaatgacaaagtactcataaagtttctaacctgtgggacggatccagtggtagcttttcactcaaatcttgtaccttggcagtttggcttgtacgagtgcctggagatattttgcctgagagggttgttagagaatgtccagcatctgagttatacagagcgtctttagtgttatcctgtatttctgcctgagtgtctgtactcattacttcct

SEQ ID NO: 40464 - DNA, 168 bp, Arabidopsis thaliana landsberg
gttattgcttgctttcaaccgatggataattgtcaggtttgtcgcagcaaaaatgatattatactctttgttgggtcacatttcatctcatagtcctgtgtttcttatctaacacttttgtctctgttccacttgcaggctgaatactttagacatatactcaaacca

SEQ ID NO: 40465 - DNA, 825 bp, Arabidopsis thaliana landsberg
aaacaccttaacagctatctaagaaatgttccatataaaggcgttaaagaagttttttagcttcttagtacacattcttctatatgttgtttgtaacagactcaaaatccacttaaacacctgaccagtcacatcccttttaacaaacctagtcttctttcttttagtagcataacaaacttactcttctgctccgcttatactaataacatgctaactttaaattgaagggaatcacacatctgccaacttttaagggaatcacgaacgataaagcacataacaatttatgcaatctcaatgggatcaacacagcaaacatatacatcccaacagctctttcaattttaagcaagaacctctttttcaaacttcaacaaaagaaaacataacaattatcaaaacagaaaaaaacttctaagcgaaatcataatacttaaccaataaccagactagactctacaacaacaacaaataaaaatgtggtattaaacagactacaaagcaaacagaacaggcaatgaaactagacagaaacaaacacaagttaacacaacaaagattatcaacatgtgtaaaagataatgctaccaaaaccataagcaaaaggcataacccaaataaaagagaactccatgactatgctctcacaaagagattaagtaaaaccaaaataactctttgaacttgaagtatgtcctctgcaacaccaaaattaaagtgtgttctctaattctacaagttttgaaactgtgtttaactgttaaacagaaaacagcaccgtaccaacctttctcactttcattcactaactaacgctcttct

SEQ ID NO: 40466 - DNA, 258 bp, Arabidopsis thaliana landsberg
acataccgccacaacttttccaagtctgtatgtacctaacaaaaccggtttatcatagaaacggtcaacacaccaaaaataggtgaccaacaactacccaagtgatatccctttaaaaggagtcgcatatgtgttaccaagttccatcattcaacctaataacacacaacactaaatctctttcccaaaaaaagattaagaagtcaacgatggagaatctcagaaatggagaagataacagctcttttatcccattta

SEQ ID NO: 40467 - DNA, 708 bp, Arabidopsis thaliana landsberg
agagaataacacgcagttaacgacaagaaaaaagaaaaaagaaaggacaagaaggcaaataaatcattttcttggtgaatggtttccaaattatattatatacagtatatagcataagttatcatgtaccaaatgattctctcgcattaaagtgaatagagaacaaaatgggtccaaagagcaatgtaagtatgtgccgtcgtggagaccaaggcgtaaggttaggcatgtcgtagagacttatctactacatatacacatttatatatttctctcttgcgcatgaagtaaatgtattgtgtcataccttatgtcacttgaccaccctcttattataagtactatataatatttatgaattttgaattgataccatatagtgtatcacaatctcgtaacattatataggtactatataatagtgtttgaatatgctcaactcgggacaagacatctaagaacatgttatatcttattgctctgttctcgcaaaaagacaactctgacactcatatgggttgtgtttaattacttttgggtttatatatatgccattttgttgtttttactggccagtttaactttaatattcataacaattagattatatgtgaaatatatcaccagatctaaaaacattaatttatgatcgataaaccaaagcatttttttcctttttgtgagaaaatgttaaaacataattcttat

SEQ ID NO: 40468 - DNA, 360 bp, Arabidopsis thaliana landsberg
ccatggcctccctttgcccaaggtccttctctgtgttaattgacaagatttagagagctagcaataagaagaattacatggtatttttcaacacgcaaattgaaaagctgatcctaacaagccattgccatctaaacctcgaaatggcgaaaatatgtgttatgttaacaaatagattaaattcctcaacaccaagacatctaaaatgaaaaatatatgcaaaaagagtcataaccatctagagcagatatttcatgaacacataacaaatccaacacaaagagatcatagttcacagaaaatataaaagatgaaagttaccattgtagcaaactggccattaagaaaaatagtttgcat

SEQ ID NO: 40469 - DNA, 625 bp, Arabidopsis thaliana landsberg
gcctgattccccaataaatcgaggattcgcacttttaccgtcgtgcgtaccaagcgcgaggatcctgtcagcttcaacgatgcaggaagcatcatccttagatagcaacgcaggaacgttgccacccatcctctgatatttgagacgtggctcctcctcagcctcatctccgttctcttcttcttcttcttcttcttcctcctcctcgtcctcttcttcttcctctctttcgtcatctccgtccacgccgttttcaggcggaaccgcagccattaccaccgtgcaattgcagtaaacccctcctccgcaatagctccgatcagatcaatcagacttcaacagagaataacagatctgcctcttcctttctgaattgaatcttcttctccgttcaaaattttgattctggttttggtaaaaattaaattaaaattattggtgatgacagcagagaaaataaataaatggaaatttaattaatgatttggaaggcgacaaagaaaaaggtgccacgtgtgcgattgttacattaatctcctttacctgacccttttctgtttagatagagacgtggtgtagtcccagcaacatgaaactctccgaattttactagtctagagttttt

SEQ ID NO: 40470 - DNA, 657 bp, Arabidopsis thaliana landsberg
atggcggaattgggagtttggttcttgatacaactggtcatacttttttccaacgataccataacagagttgttgaggggaaacctgcaacttcactctgcttcaatatatcactctttatgaaaaaatttagaaacactatatcatttttcattggacttactgtgaactgacatctcagcacgaagcgggtcatttcttggtggcctacttagtcgggattctaccacgcggatacacgctctctagccttgaagctttacagaaagaaggatctctcaacattcaagctggctcagcttttgtagactatgaattccttgaagaagtacataacctctctttcttctttcacatcctctgaagaagcagaaactcattcaaatccaagcttctaatacttttttcccaacttgacaatgcaggttaattctggaaaagtctccgctacggtttgttttcttatacttcccataaaaaagttctaaacctttttaaaatcttcagcctaacaagaaactgtgtttgctattccaaaaccagatgctgaacagattctcatgcattgctctggctggtgtagccacagaacccctcctgtatggttatgctgaaggaggccttgacgatatcagcaaggtctcttttcttataccc

SEQ ID NO: 40471 - DNA, 517 bp, Arabidopsis thaliana landsberg
ctgccaccgatggacagctgcaggccctggaactcggtgcttgcatcgaaggcttctcgccaggtcgctcggcacgtgccagcgcaggcggcccgatcggccacgtcgggcaggatcgcggcaaactcgtcgccgcccagccgcgccagcgtatcgcccgcgcggacgccctgctggagccgttgcgccacgaagtgcaacaaggcgtctccggctgcgtggcccagcgtgtcgttgatgcgcttgaagtcgttgaggtcgatgaccagcatcgccatgcgcccgccgctttcgcgcgcgcgccggagcgcgtgctcgagccggttggcgaacacgcgccggttcggcaggccggtcagcgcgtcgtgctgggaggcatgttcggcgtggccgatctgctcttccagcaaggtgaagatcatgcccgtggcgaccaggaacttgggcaggttccatgcctcgtcctggatgccccagctcgcccagccacggatcgagaacggacgccaccgggaca

SEQ ID NO: 40472 - DNA, 467 bp, Arabidopsis thaliana landsberg
ggcgctccccagcgcgagccgcagcggctcgtcggcgatcggccgtttgtggacggcgaggtccccgggccgcatgtcctacgggcgggtccggaactgccgggcgccgatctccaggtcggcggcgccgccgtccagcggcagcccgtgcagctcgtcggtcacgtgggtgaggtggaacctgacatcgggatgccccgcgcgaaagctccgcaccaggtccggtaccagccacgagccgagcgtctgcgggaaggcgatcgagacggtgcccgtttccggcgacacgaactgtgccaccgcgtccaggccctccgtgaactgccccagcattcggtccacgtagggcttgaacacctccccggccggggtcagccgcagccgccggccggacttccgcagcagcggcgtgccgacttccgcctcgatgcgcgctagcgcgcgggacacgccggactgtgtcaccg

SEQ ID NO: 40473 - DNA, 766 bp, Arabidopsis thaliana landsberg
acattgtgatccggcgagattcgtgtttacaatagtcggagtaattaacggcgaaggatgacggaatgtttccaagcttttcttgcaacacgtttcatctacgtatctttgtgtttgacacgtgtattgagcaaaattttatctttaagtgatgtagccatttgggccattaatgggttgtaaccattgtgatgtggattttaataaaactaaaccttcagtgaaaaaaaaaaaaaagctgattaatattaaaaatccaaccagtttataatccagaacaacggttttcttaaattgactagtgacccaaattcttaaataggctacaaaaaccgcaggcccatttagtaatatctatttttcgtttgactgagagaaaacaaaacaccatccaattccaacgcacaaaaaaaaaaaaaataaaccttatcggaaacagaaaaaagaagagagagagctatcaatcgatcattgattgattgcagagaagcagggaaagagacatttccaaatctaatctaaatccaatccaattgaggttttttccatctgtctctgttgagctacttctgaattagcttcttctatgttcgatttccagctgctgatagtttagctcgagaatcaatttcgaatttcatcttggggcagccattttagtaatttaggttttgaatcttccttttgaggcgttgtagggttgttgctaccttaacgaatgacgacgacttctgtttgcccgttctccaaagctgctcgtcctgac

SEQ ID NO: 40474 - DNA, 523 bp, Arabidopsis thaliana landsberg
ccctccactcccactcacagtcaaccttatcttttcccataataaattatttttttacactatacacattccactctctcctcttttgtgctcccaaaccaaacataacactcacaatttaactctctctgtctctctctcatatctctcacttcttctctttctttttaagtccccaaaataacctcgagatcgatggactcaaatctgttcataactcccacttcttctctcaaatcccaagccttggtctcttcatcatcctaactatataaggtatgaatattctttcatctttctttattggttttctttggaaatctaagactctcaatttctatgttcttggattaattgacaattctttctcaatatttgaagttatgatgtttgatcaacaattgttagcatggtttgataacctttaaattagatatgaatgggtcacatatattattgccattttgtgttaacaacttaagtttaacttttgcttttttacctctcttcgctttgctcaaaa

SEQ ID NO: 40475 - DNA, 487 bp, Arabidopsis thaliana landsberg
atctgtcacaacataaaacaactttgtcataacacaaattttttttctttaaaaaacaaatctgctggcaaacgagggacattctaaatataacacgtaataaatattttataatatttttatcacgatctcttttaaatttggttttaaattttctggacaaaatttgcaatggatagattgataatatatcttactcctatatatcattttcgatttctgatatggaatctctaacattctgtgcacaattatcattcaatccttgtaataaagtcatatatgtggaattattagtttcatatgttttttacaactacttacgaacaataactacaactattttttgcttctgcagaaacatggtgaattcaatgtagatgaaataaatttctctttttatatgcaaaatcagtaacaaaaaatagtattcttgaggctaacagctcttttttttattttgataaccgaacaatatgttcggttc

SEQ ID NO: 40476 - DNA, 411 bp, Arabidopsis thaliana landsberg
agaaggtttgctttcgcgatcgtgcctcatgcattcactatttcgagtctgccgacatgataccgctgggtgcatacgggggttcgtcaggcgaagactatgctcgcatggcggtggccgggcccgtcatcattgctgtaatggctgctgccgagaccggcctggacagcaagtagccttgaatatcgtcacagcctagacgtcgtagcgcatcgatctgctcggaagtttcaatcccctctgccgtcgtcttcagccctttagcctgcgcgagattgatcatagcgcgcacgatatccttacttcctccgggtttggccatactctccacaaagcactgtgggattttgatccggtctaccttcatgccctggaggcgcccgaacgacgagaattccgtaccaaagtcat

SEQ ID NO: 40477 - DNA, 638 bp, Arabidopsis thaliana landsberg
aacataatctgcatcatcatcaatctgtaaaataattactccattgaattgttttataatactcgagggtataccaaaagtacaaagaccgcgatacaggtaatcaaaccctggaaaattcgtcgcggaaaaccaaaaggtcagactaataagaatgtacgatctaaaaagaataaattcatccaatcatattaagcatagtcatattcgtggggtccattattcacacgacaccaacacaaatttatatttctcctttatataatttttatttatttatatggaaatacacctttctattttacatatctgatatctgaactaccacttttttttttttttttttacatttctttcacattaatataatcatatttagtcaatagtcaaaaactcaaaattagtagaaaaatgatttattttattaccatgagcttgttactcttttctatataaagacacaatttattgtaatatagagtatagtacataaaaattaaaattatgtaatcaattgttaacataaaatcatcacataatctaattatagtaggagtagtaacgtaaatttaatttaacaacccattaaagaaaagaagaaaatggaaaaagaagctttccgtttcattgtttagctt

SEQ ID NO: 40478 - DNA, 521 bp, Arabidopsis thaliana landsberg
ttggacatatttgtgttcatattgcagtagaatgaagcatgtggtcatactctttagtactaaaaaattatatgtttgtagattcacgtatgttattagttttcaaatccctacatcatattatcatttttttaattatttttttgggtcaaaacatcatattatcatttttaaaaattgattttaaattataagtgccgaggtttaaggtaatgaaatcgaagaaacgttcaacacaccaaagatctctcaaactgaagattttattagaagatttgtcagaatttctccctcaagcagtcttctttatatctcctctatagctcagatttttttcccattcattcttttttacattgtgctcaacatttgaagcaacatgcgcaatggaactggaaagtttctaatttagattggtgttcaccaaactcttgttccttctgtatcaataaacacatcaagagatagagagagattcaagctttcttagctcttttaattaagctttattgattgcacaa

SEQ ID NO: 40479 - DNA, 602 bp, Arabidopsis thaliana landsberg
aaagactaactcaaatcccacttacctattggcctctatgcttcttttttaaatatctttacctgaaactcagggtatgggattaatatgattataaaccaccatccgaatttagtagtgatatgcaaaaaatatgcacatctaaactcaattatcaattttaaatttagcaacacactagactataatcacaagtgaatttggtatatttgtattaagtagttgatacacttttatttccctaagtattagaatataaataatattaggaaatcttcaacctttgcttgttccttacggtaacgacagtcacagacttcaaccgcaagaaacaaaccctaattgatggagatatccaaaggagaaatgttccaaagagaatttatttaaagaatcatacactataccatataagtcatcccaccttgcaatatgttcatatgatggaacaaggaaattctcaattccagttttggaattttttctttataaacgcttagaattaataaatcacagcctttttaacaaaaactaattttccttcgccttaaattctcaagagccaataaatacttatccccatatctgtgtttttttaaaat

SEQ ID NO: 40480 - DNA, 792 bp, Arabidopsis thaliana landsberg
cgttctgttatataattatgagtttgcagaggaacttacttttctttttattctgtgttttgtctgatattgtgaaaaagggctttatctcataacaaatgaaggaattggcttacagctttcttcctctatttcttctctgttttctacgacactctaagcaatctttgcatggtggcgtttcgtaattgtaagaggaaactaatttcagcttttcgggtgaaactttgagatcttctatgattatccttcgaagcttttcgttctcttccattacttcatcaatgagtttctgatgtttcagcacctacacaatcaatttcgtgtatacataaccatggactactaaatctgataaactgtaacagaaaaaagaaagaaactggaagtcaagaaggagacgataccatttgaagcattaagctctccgattctagttgtgtgacctatcaatgtcatgaaacaaaaggaagttcaaggatggctttctgagatcaacgcagagagggggaaacattctgtgatagaatcattacctgtcgttcttccgcagctgagtcctggtgtttcagaatatggctgtcgagaaaactgcagatcactttataacgccatagtgccaaacgcactctgaagtaccatagtaaccactgattttggatgaagctttcagcccgacatgtttcaagctaccagaaacatatgggtatgctagagatacagccgtgcttagacaagtttagactagacctaatcaaaattccgcataactaaaggagacttcatttacga

SEQ ID NO: 40481 - DNA, 665 bp, Arabidopsis thaliana landsberg
cagaaagcttataagcaggaacctggagatagatatagttacacaaaacatgagtttagagtattccatcattctaaaagttttcaaatcatctgtttaaatgagaaacttacttgagacgatggatcagaaatgaagcattgattcttcgtccaagatcaactgaagatgtatcgaccgacgaaaaatgcttgtatgcaccaagttctcttgttctccactctgagcagttattatatggatccaacacaatgtccttggacgagctaatcctcaagataatagtcacaagacatttcagtaaatcctctgaaactctgtttgctacatttccactttgcagtgtcttgtcttccgaagatgatcctgacacactctcttgagctttgtcctgatctgctaatctatcatctagctgaacaacagaaaaaccaaaaaggcgaaaactttcagaaaaattctatagattcatgcattagtgcaagcgtaaatgttgtaaatacctgcaatttggttgattctgagtgtttatccgctgcagcctccggcttaatcaaaggtttcttcttcttcacagatgtcaagaatctgccaagcttcttctcaggtgattctttatttttcttgtcttttgaagcattactagaggtctgattctctttcca

SEQ ID NO: 40482 - DNA, 555 bp, Arabidopsis thaliana landsberg
aaatgcataccagtatatttagtaagtttgaaagagggtaagtagtttcttggctctagttgatatatggagtgatgggaaatgttctattatgatgtcgttttggtccgtgaccgttacacttataacgaggttcataaacaaacatcgtttcatctttcgttagattcggacaaaaagtgttgatctataatgatgataaaacagcccgacccattttcacttgttgttattacaacttttagcaaattttctagctactcatttattgtctcgaaataaatttttacagagacttctgattttattttaagtaaaattttacaagaaaatgcatgtcaaataattctactgttcacacatatgaccaatactcagagtagtccatatcaaattttatatagaactggtcgttggattctaagtaattaagtatttagtctagttgaccttaaaaatagatagttaaaaacacctaatattcatgagagataaataaatagccactcatcaaattgttgtgcattattcatgtgtgtttagtataaaatttga

SEQ ID NO: 40483 - DNA, 728 bp, Arabidopsis thaliana landsberg
ctgtaaacttcctatccgcaatcttcttggccgtctttagttccccatcctgcaagaattagtgcattggtgtttctgagacatactaatatgagtaagtagaagtttagagaggcgtttttacgggtttggtatcggattctcccaagtcgaagttgtctttataagccaaagcacgaacagtaggacgaagtttgatctcaggtggtggagcaaagatgttatgaccacttagttccttacacttcgcatctgagaattgcttgttaagcttagcatcagattgatactccaatgtaccactaagctcacgttgctttgcaacttctggcaccgtcgctggctttttcggtgtaacaatctcttcttctccaaatgaaatgtgactcacaattgctgctggtggttgctgaaacaatccaaacacataaaagtgatcaaaacaaactacaaaatgtatccaattctctcaagaaagagacagacacaaacctggaaagttcttgatttgccgtttgtggcggaattagcacttgctaactcagaatcatcattttcttcatacacagagaatattccactccctgtgatctctttcatcttgtaatttgaacaaggcttcctacaaattgtgtactcaaccaaaaaaaataacactgaatctatctataacatgtcatagtaacgttttcattgaatgtaacatgtgtacaaagtgagcttaaata

SEQ ID NO: 40484 - DNA, 559 bp, Arabidopsis thaliana landsberg
  unsure (1)..(559): unsure at all n locations
gcgacctgccgagcatattaacacgtttgactggacaagaagagagagagcctactttttatatgtcactagagaggattctagttgcacttggctatattcgataggcactaagatcatacatattaaaattgtcactctgcatatcttgcttcattcttagggttgccttcccttcctcaatgatgcctcgtctcatttcatcaaaaagttttagagattcttcaataggtctgtccctccaggggctgttcattttcttctctctgtactcttttatctcatcagcagtctaaaagtgtaaaaacaattactcgataggataagttttagtgtggataaagttccagactgacttgcagtacagcttagaactaaagaatgacatataattggtaaaagtaacaggaatccatatgtcagaaattttaaattgattcaacctgatgatcaacataagcatgacctctccgaatcaactccactgccaaatcatacagttcctgganataatcactggtgtatgtaatctaaaaaaaagattgataaacgtcagatg

SEQ ID NO: 40485 - DNA, 359 bp, Arabidopsis thaliana landsberg
aggccgaagccgtcaaacgcgccaacgacaccgaatatggcctcgtcgcgtatctctatacgaaggacatcggccgcggcatgcgggtgtccgagaaactggacttcggcatgatcggcctcaatcgcggtctcgtttccgatccggcggcgccgttcggcggcaccaagcagtccggcgtcggccgcgaaggcggccatgagggtctgctggagttcatggaaacgcagtacatctcgctgaactggtgagatggggagcaatcgccgtcatccttcgaggcgcgctgcgcgcgcacctcaggatgacgggaaaagagaaacgagcggcgttggttgaatggacatcctgatgccgca

SEQ ID NO: 40486 - DNA, 584 bp, Arabidopsis thaliana landsberg
ttctgtgcagcggctagctgccgcagcaaatctggtatccagaatgaactgaatccagagttactcacaaaccagttttcatcatcctctgtgagaatctctatacatacatggggatcatccttgcccctaggcaccagacgaatgcccttacggtcacctttaaactcaactggcatgttcgtctccttcagtgatggcgcgacgggcaatgtttcgaatgaatgcatattgcagccatgccgcctgcgcttggccgttaacgcggcccggattaccgccgatatcttggataatctcctccaatgccttccggtacctagtcctctctctacctgcatcgcgaagggccgtcaaaagattcttacgagccttcatcaggggcgccatactcgccccctcggtccagttcgtgtatacctgctcccgagcaaagattcctgcggtcgtctccagctcgtcaaccaggtcctctatagacttactcatgttcggcttcttcggtgagtgcgcgggcgattcgccgctcaaacacactcttcatggtcgttatataggccttcacagtcccttttcggtgagga

SEQ ID NO: 40487 - DNA, 611 bp, Arabidopsis thaliana landsberg
aacgaacatattcatccttattcaattaaaacgtaacagctcttaatcaccaacaaataaaaaagaagtcaggatactttaggaagaaaagaaagccaagagatataccttgctagcagtaatcacaagttgaggttttaaaggttgtgtcctgatttcgttcactgaatctccatgacccacaagactctgcacatttgcgagcacagattatacaagaaagatatagaatcatttgctaggatacatagaacatccataaaaatgcaataataccttatgaatcgtttcactgttgacgtcaatgactcggattataccttttactcctccagccgcaacatatgggttcccattaacgccacacgcccaacttaccgtgtaaaacgactcttccttctgctctccagaggacatagtcaaaatataaccaaatggcctcagtgaaacatcacttactttaatttgatggaaaagctaatatgtatgcttccttacatcttcatcagcataggattgcaatgctgatatggcaccatctccgagacaattgtacagagtaatctacataataagagatacaccaatggcagtcatgagattcatgaact

SEQ ID NO: 40488 - DNA, 492 bp, Arabidopsis thaliana landsberg
  unsure (1)..(492): unsure at all n locations
ggaaatggcaaggccagcttcgccgaccagtcgttcctcatgggcacccgcctggttgcggtcaactcgatcaactgggcgcggatcatggcccagatcgtctactacttccacgctgccctgcagctgggtggcccggcgcgttccgtggcgttctcggtgccgaccggcaacttcggcgacatcttcgccggctnnnnnnnnnnnnnnnnnngcctgccggtaagccagctgatcgtcgccaccaaccgcaacgacattctgcaccgnnnnnnnnnnnnnnnnnnnnnnnnnnnnnaaaccctgcacgcgaccctgtcgccgtcgatggacatcatggtctcgtccaacttcgagcgcctgctgttcgacctgcacggtcgnnnnnnnnnnnnnnnnnnnnnnnnnatggccaacttcaagcaaggtggcggcttcagcgtcgagcaagaccgctggaccgaagcgccgcaggctgtcgactcgctggca

SEQ ID NO: 40489 - DNA, 917 bp, Arabidopsis thaliana landsberg
ctccctcgtctcctgatttgatttgtgctgccattgctgaaagcagtttcacttcaaagaacaaatactctctctttgtctctttcttttctgcttatatccattttaatgttcttgtcgaacatttaacagtaaaaatggtcgaacggtagcaacaagtttatgttttgtaacattctttattgtttagtctctagataataaataatttgccttaaacatgaaaaatgaagggtaaaattgtaagttacgcttatcttatgtaagtatgacgtgatgctgagaaatgtgtttttgactgtttggtaagtctttgttacagtttgctctgtttttttttcctttgtaagtaattgttctctctaatggcttatggcttggtttgtttcgtcctaaaccaggaacatcctctggtttaatccggtcagggtcttccttcttcattctttaacacaataacaaagattttttagatagcctgaatcgcgctgttgcctttactcaaatctgcaccattaaccgagccattcgagtgaaacgctgatggccttgagggctctagtctcaaagatagcggggaaggggaagtttcggtttcgtgtcttgtcgccattcctatgctaagctgagacataccgtccaactcgtccatgttcacacgttctttagcaaatccaggttttggttttaggacctgatgctgctgagaagaagtctcagcgtttaaggcatgttctgttccgtgaagtgacgcagggagccaaatcgtgtaagtctctggaaaacaaggaggaaagaagccacccgggactagcattggtgaaacaccatttgatggttctatagcttcttgagatttttcctgtcgtggcgccgtggctacgacctcttcggcttctgtggcgattattgagtgt

SEQ ID NO: 40490 - DNA, 657 bp, Arabidopsis thaliana landsberg
ggaagaccacaacccgcagaaccatcaatttcattgagagattagcttttagagctggatacgaaatatatggtgatgatgctctaatcattatccattactatgaaagccactgtccattgctcgattttctccagttatacatacatacatatatgcccatcttcatactaccatgacattatcaaacatcctcatcatacatttcaagattaattccacaatcatcaagccattaaatcatataatctacagctaatcagtcaaatgtatctacgttttgaaagcaaaataaaatgcatctacgttttgaaagtaccacctttactttatccacttgaagatgaaaaatatctcacttctcctttctcatgatcaatttaatgtttcaacttcaactacacgattctcaatcccatgttgagttgcaatttagttagttgccaactaagacttatatccgtgattcgaaatagcttctacaagatttcggcttcaatcgaacttgttcctcaaccaaacaatgcaatctcgtcaaaatttaatctataatgattagtctcagaaacacactaataaatgatgaacttatcccaccgttaaaaatttagcttagtagtaccataaattctcacaaagtttcatcccgattagaag

SEQ ID NO: 40491 - DNA, 765 bp, Arabidopsis thaliana landsberg
gataccaacacgagaaaagagtagttgaagtaggtttgaatcaaacataagccaaaagccataattacaaagaaaaaaagagaatcagttggttcatcaactcaaaatctaccttcaccactttattctcacactactcctccacctttcttacttagtccttattttttcgcctccaaaacccttttaaaaaccacccaaacaaatctttttcaatcaacacacattcaaatttggcgacatgaagttctgcgcgatattcgtgttattcatcgttcttgcaatcaacggctacgattgcaagatagtccaatttatatttggagattcattgtctgatgtaggcaacaataagaatctacctaggagtttagcgacggcgaatctgcccttttacggtattgattttggcaatggtttgcctaatggaaggttcactaatggccgcactgtttcagacattataggtaagtcatgagtatggaattaattattagtcaatgatatatatatcatgtgaattacgttttagtacaagcttataatgggtttgttgaaatttaaaggtgataaaattggattgccaagaccagtagccttcttggatccatcaatgaatgaagatgtaatacttgaaaatggagtgaactatgcttcaggaggtgggtggaatcttgaacgaaactggtggttatttcgtaagtctcatgaaataataagttgtcattattacttgcataaaaataaatgaaaaagaatcatcaa

SEQ ID NO: 40492 - DNA, 2658 bp, Arabidopsis thaliana landsberg
  unsure (1)..(2658): unsure at all n locations
tttcagggtttagagctgacatctcacagcacaatgcagataaacaatcataatctgatcataaagcaggctagtagcaaatacgtttcaaagctttcgtaacaaaataaggaaaagcgtagttagagaatacgcaccggtttttggtcctgtctcttccttagcttgatccagataaacctgagatcataaagtacaaacgaaaatgaagatctacatactttgtattgatcgtataaactcgtctgattgaatatgaaaatacaacaaacacacacattggacaaaatgcaagagaaagggatcaaaaaccagctcgacgaaaaattaaacggaattcgaagtgatcaactattacatagaaatcaaagacattagatagaaaagttcaccagattgttgccggatgtcaagtagtaataggagaatccaccggaaagtgccgcgattgcaccggtggagaatcggaaagcgccagaaccagatttgctttgagatccaaatgcgacagggaatgtaatcggagctgacctagcgagtcgccggaagaaggaagtagccatgatggtttagatctctgagaaagaacaaaatggtttggaggaggactagggagggggttttagaatctggggaaggagagtgaatgctacgctatggagatgtgtactctaagaacagtggaattctcatttgttaacttttttttttgttttacaaccagaacattaggaagaagcagtaaacatctgatttcgaagaacacagccactaaagaaaaacgaactataaaactcaaatttattgaggtcaatctttgattaatttttattgatctaaatcgtcgttgcaaagaaataacttcgagcgaagtccacacacttaggactcagcaattcaaaataagcatagaagccatagcaaacgtttggtttctaagcatctaagttcatctttctagctacaaacttgagagagagacacccgcttgttgttttgagtgaacatcgtcaggagcctgatttacccatgctgagatcaggtggtgcgcgatggcaaatggccccgggataaacatnnnnnnnnnnnnnnnnnnnnnaagattgaaatcagttgatagactctggcttctctccacacctttacagatctgctctacctttgcagctgctgttctttgagccttcctgtattctgcaaccgccaatgctttcttcacctcttctctactgtgccattgagcatctgcgcaacaacaataacacacaaacatgttaagaatgtgatggacttaaaacaaaactctggcactccaaagagttgtttgagaacatatattataccttctaactcttctttgtctacgtttatgttgagcgtcttggcgaaagcaaagaaaccgagcatcaattggcatggcatgctacttggtcccactacaatttcagaaacccatattctcgtttatgttaaacttgcatttcgaaaacaatttgaaagaacttttggcattaaaatcaagagtcctaactacctagaataaagcagtggcaaccactgtagaggcatactaagctctacacatggaaaagcataaaaacagaatgtgacaggacagctatcggaagacataataataaggttaaattgaataagtttcaaatctatacattaaagaatactttgctacgagatgcaaatttgctcataaggaaattctccttttcattctgctctattactaaattgctcatcaatagcagtattttatgaggactacgtggtaaaggaattataacactcatgaatgcatgcattgtacattagctaaatataaacttcgtaagctaataaacatagatagatatataaatgtgaggcagaagaaacccaaaccaaaaatcatattaatttcttaactactcaattaccaggccaaggctgagagctgtggtatacaacatctcctacttcaatgcctgtctcttcccatgtttcccgcctcacagcctcttctaagctttcccctggctagcaaaagcagcatagattatacatacaaatctccatgcaagagtaaaataagtggaatggcctatccaggggagttggatgaaaaaatgacaaagagaaagttattattaaatatcgagttgagatgatttcgcagtgaggttttcatacctcaataaatccagctaaacaactccacattctcggtacatatctagattgcctgcttaaaagtgcgcgatcattttctcgatcaataactaacattataaccacctgtaatagacggatgaccaatcagccagaaggtccacaatggccatactcttagtgaaatctacaaaatgtaagaagcaccaatataccggatcaacacggggatagaccctctttctgcatgtttcgtctgagcattgatttctccttcctgcttcctttggaaaagttttacttccacatgatccacaaaattgtgacacgttgtgccattcaagtaacgccctggcctgtcattaggtatataagcaccaatacaatgggattatcaatattgtgggagaaaagcgagaaactatccccaaagtttgaaatgcagcaggttcagcaaataagctctaataataatagcattcaaagaacttttag

SEQ ID NO: 40493 - DNA, 893 bp, Arabidopsis thaliana landsberg
ttcatctcctctcgttttctcctaagtttaaatataatagttagaggacaatgtgttcttattctcttaactcatggacataatgacacgtagtaggttctctagttcttatcttttggtttctgttaacgcctatgttcattaggagctgctagtctcaatgccttcgattaattttgtcaacatattttagctacgagcttgtcgagatttcagtttgttaattctattcaacacatagtattcgcgagaattttgaaattctctactcaatttttatttaatctcattacttttagcattggccccatttagattgtctccctctaatcctataattaagtgttatgttctctagtaatggcgtcatcgttagttattctgacactaataaatgattttattaatattgctcaaagcctcaaagtcgtccatcgatcttctctcccccagaattttctattttagcggagactttccaaaatccctagttctttctttcctcgttaagtttgccaaaatagggtaaagaatatgtttatctcgtagaccaaatggatcttcctaatgcttaatagcttttttatatatatattttaagttatatttcgttcggctattattttaatgcaacatttgaacctgccacgatcgtcttttttctcaattatataaacaaaggttcaaatactataattggtgcacagctacaataattatcgatatctacttccgcaacgtgaagcgagaaatatctaatgaattacattttcataatataacactgtactcacttacttaatatgatagtgaaaatactaaatcggatgaatattacagcagtatgtaattaccatattattgaaacccgatatctgtatataaccatatac

SEQ ID NO: 40494 - DNA, 140 bp, Arabidopsis thaliana landsberg
tttccagtggcattggctccgattggcaatccattttaggtgcgattaagatctgatggtcaagagcgatgtgattagctagaaatatgaatggaaatgtgattcaaccccgatgtcattatcctatattcttgaatggt

SEQ ID NO: 40495 - DNA, 827 bp, Arabidopsis thaliana landsberg
  unsure (1)..(827): unsure at all n locations
acaagacactgtttgcagaatcctatatgtattttttctatctttttctatgtgtgttaggtccaacaagaaaaagtgatccgacagatatatctgtatgtgttctcttgctttctcaagaaatcagattttattttactgtcgctgatagcaacaaaagaaaacatgacttgatttgtgaggggtatcgttatatataatttatttgtttcttaggatgcaagcatctatatagtttcacacatataatctagattttttctaaggccatgttctgattaacttactttaaatgtaaaacattcatgcagaggaataatagtagactaggttgcaaattctgtagggcaaaggatacgattatccgcaattagttaaagttttatatgtaaacacagacacaaataatcaattactatctaaatggctgtatgttgagattatccgcaggttatgaaatgacgttacataggcccaagtcttgaatcacgcatttacgaaacgagagtatggtcaaaactctacataatatggcaaaacattaaacttattattataagaagaagaaccataaattttgttgtcgtttatagaaaacaaacaatcatatacaacttttggtgtatgcttccttccatgtatgtgcttctttagcaaaaggaaagatgggagagttaaaagacaaaacgtcatgactcttgatccattaatccttttacgtgcgtatgagtacttggaatcattggtcattaccaacattaatcttatatttntaatataaatctcatacgtataaaatatgtatgctgagaatttttaaaagcatg

SEQ ID NO: 40496 - DNA, 624 bp, Arabidopsis thaliana landsberg
gaccgttacagtacctacaaacacagctgtgagccactgatctgattcgtcactactcacatagcaaccggcgacgtgtttgtccctaatcgcttatcttcttactaacaattttatacaaaagttgcaaaaaaagaaacaaaacaaaattgatttgtaataaaagtcattggtctttatctgttacagcaatgcaaacaatgtgatatcccaaatatgaaaaataaagtcgaatattcgctttttattacaagagttgaagtaaaatagtattacaaaaatattataaaaaggaataaaatgagggtgatgttgttgtttgcatacaaaattacaaattggaatgtgagaatgaatgtgagatctctctacatcagaaatcactatcttttgctccacactttggtgatttcagaaccatacgggtttgagagaattggagatcccaccatgcaagagagtggcattatcatcacatattcgtagtatggaccagaaacttagtctagaaggaaattaaacaagggtttctagtattgcgtttttagctgtctaatagtattacatttgctttaaaaaaaatatgcttagagcatttgaagtgagtaaagcgttgtaaaatac

SEQ ID NO: 40497 - DNA, 539 bp, Arabidopsis thaliana landsberg
gacgaagatgtacccgcatctgttcgacctgatctgggaagtgtaccgccagagcggctcgaaggattacatcaacgtcgtctgcggtttccgttcgcccggcaccaacgccatgctgaaggcgcgttcgcggaattccggcgtcgccgaaaagagccagcacatgctcggcaaggcgatggacttcttcattcccgatgtgaagctcgcaacgctgcgcgccatcggcatgaagatgcaggtcggcggcgtcggcttctatccgaagtccggttcgcccttcgtgcacatggatgtcggcggcgttcgcgcctggccgcgcatgagccgcgacgagctggtccggcttttcccgaacggcaacaccctgcatatcccggctgacggcacgccgcttccgggctaccagcaggcactcgccgactacaagcgccgcgtcaattccgacacgctcgttgctgccgttggcggcgataaccttgcttcgtccaagaagccgaagacgctgtttgcggcgctgttcggcggtggtgctgatg

SEQ ID NO: 40498 - DNA, 555 bp, Arabidopsis thaliana landsberg
acgccccgattgtttgatacttacctacatgcccatagaagttgtgagttcttttattttgggaaattctttgtgtttcgttttgaactatacatttttaaacctatagagttcaaacttttatggaaaaagaaaaacttcccacgtgtgtttcgaacatcaaaattcgagcatcaaagtattataacaacatggaccacattttcgattatatcaacatgtatatcttcgtggaactaatcaacagtcaaaatgttgagtttatcatattttcgtggaactaatcaacagtcaaaatattgtgtttatcatattcccacatagtatcgataatatcaccaaaaagttttttttcattccttcaaaactgaacaacttcgatcatgcattcactttgaaagtagcagctggctattcctttaactgatttaattgtgactataaatcgttaactcttagttactgtttcgataaatttactaatcaaatcaagaatattttacccatagacgtcacgtttcactcagaattacttagaccattctcaatgactaa

SEQ ID NO: 40499 - DNA, 565 bp, Arabidopsis thaliana landsberg
aagccggacttccgcctgatgagctggactcacctggggatgtacgactacaacctcatcgagttcatcgccctggcggtcgccgtcgtctccgggctgctggtcctgcgctccaccaccgctcccgcgcacgagcgtgtcggcttcgtgtgcttcgtcctcatcgaggtcgtgatggcctcgtggcagttctggggcagcgtcttcggcgacggaagaacctacatcgagtcgttcctgatggccatcgtcctcctcctggccactcccgcggtgcgccccgacggcgcgaagtggtggcaggccgtcacgaacaggcgcctgggcgggatagcggccgtcgccgtcgtcgtcctgctcctggtcgcgaggcgccgcgtcctgttccagtaacgaggaccacctcgccccgcgaaagagaagacgtaagtacacttgtgacatacatacaagtgactaacgtatttgtgacttctaggggtgacggtggcacaacttcctgtcaagcccgcctgggtgtacgaccgcgacttcgaatggtccgcgctcatgagattcacgcgat

SEQ ID NO: 40500 - DNA, 877 bp, Arabidopsis thaliana landsberg
ggacatatgttaatgttagatgactgaattgattgcttcattaataataaaatgacagcaattattttactttgtttttaacatttcatctgcaaaacataaaaaaaattaaaacactttttatgaatacattctcatttttcaattttcagaaaatcttaactggtcctatatctttttcttccacatcaattatatttattatgtcatctatgggtttaccaattcatcaacatcatatatatcatcaacgaaaaacacaacgagttaatagtgttgcaagaaaaaatgaagactacaaagctaagataaattaggctcatacaaatgttgttttctatgacaagtatttgtatttggatcaaaagttaaagcctatgaatagaaatatcaagatcttgcaattttgtatgcaagaaaacacgaaacaaaaaaatcatcttttcagattgagaatttaatttactacaaaatatgaaaagaaaaggctccatatatagacaataatagcaacgtctatgtaattaaaatcaccgtcggcgagaccaaccgtcgtcgaaattcagatgatagctccggagatcataactacactgaatattattatgatcactcttacgagaccaccttaagcgcgatttaagcctccaaacaaactgcttcacgagaacacgtggttttccacaacatgagaacgcaaacgccacaatcgttctttcctcggggttttctagcgttgctgaagccggcgtcgagcttccgattcgctttccccatcttcggaactgaagtctcttcaaacttgttggtcatagcttttagagttagtttactctgtgtgtgagatttgtgagagtgagaaactgtgtaagaagta

SEQ ID NO: 40501 - DNA, 287 bp, Arabidopsis thaliana landsberg
gcgcgccgaagttgccggcaccgaagcgctggccctggaactgtggcccctgcacgctgatcgaaccgctgcgctgcggaatcaacgcccagctgcgttcgatgaccttgtaggtgtagccgtcacgatcggtcgtgtattgatgatcgcgatcgagcttgaccagccgcgcaccatcgacgctcggatcacccagcgtgccatcgatgcccggcaggtagaacaggcgcaccgtgtacacggtttcctgtccgacataaggcgagctcgacagcacgctcgcctgc

SEQ ID NO: 40502 - DNA, 185 bp, Arabidopsis thaliana landsberg
cggagcgaccttttgagtggtggtgcgacactttccgcgagtcaatagcggccatctggttggtgctgctggtgatgacgccatgggacgcgcctttgccgctgacgcgggcgaggagtctgcttgagatatacagacccatcctggctgtagtcactataaccagagttcttccctatagagac

SEQ ID NO: 40503 - DNA, 650 bp, Arabidopsis thaliana landsberg
aagaactttatccgaagttaaacttttgaagtgataccaaattttttagttttgtataataagttgatttttttttagtgtaaatgttatttttggattacaagtttggagttattctaataatcgttgtttagcctataataaatttattattgtgaaatcgattgtacttgaaagtaaattctctaaaacaagacaataaattgacaaaaaaaaaataacttcattgaaaattaacctcaatgaccaaaaaaaaagctagtagctagtacttcagctaaattgaatgttcatcgtaccgcgaaataaataaacagaaccaaaccgttggagctgttataaagcctgttggtttaagccggtccaaaattgagaatattggatcgcatttataacttcgcgacttggggacatgaaagatatgtgatataataagtaaggctattattgtggtcgtatttaattcaaccaaatatgttgttacattagaaagtttttactttcttgtccataattttatattttttgtccataatcttaaagcatgtaacaagtataataaatcaatcattctacaaagtacaaagtgaattagtgaatgaattgtgttcgtattaatttcagactctttaggatacgtgtatagattt

SEQ ID NO: 40504 - DNA, 554 bp, Arabidopsis thaliana landsberg
caaaactttcgaataggttactaataaaataatatgaaatttcttttattaagcaaaattttaaaaaaatatttctgttaatacaatgaaaagatatagtcaaacttaatattgcagatcacgctagcacattgagacttcaaacacaataaataaaaatgtgagaaataaactaaatttagtatgggtttatatactaaaattattttcttaaatttcaattcgtatggatttagaattctgattcttttaaaatgtaacctaaccggatttttgttatagatataatgtggagctacaagcctacacgtatgaaaattttgtatatgaatgtgtttgtcaaggtacaaatatgatcgaagctcgtttccttgtcaacattcatttattcttacaggataatatttaacttcattaacggggtgatgttacaatacacaagaggaaagaaaaaagttaaaaacaaaaacaaaaacgaaaaaaaagttttaggtcctctttaaccaaaaaaaaagaaagaaaagaaaagaacttctgtagtccccacaatatga

SEQ ID NO: 40505 - DNA, 454 bp, Arabidopsis thaliana landsberg
ctaataaagttaacactattgagttttgttttttacaaactgaatagagattgaaaaaaaaaaaaaaaaatctaaaaaaacaagatgggactgatacaaaaaaaaaaagttggggtatcaagaataatgggaaccactcctgcatgcataggtcccctgtatgaaaaactcgtgtagctagacttcttggcatcatagtaagcggtgttcgtagctcccattataaaatcgtcaatcggctggaaatcatggttgtaaaccacgatttccagatcgcgcatataagcaattttggcactattcgaaaggtatccagatcccatctgagtagtcgtgtgtcggccagataaattggcgtttactatttcaccgtcctatttaacctttcctgcatagatgctgaggcaagtaaagattctcggtcggccaatagccaactggtgtaagtacaatg

SEQ ID NO: 40506 - DNA, 126 bp, Arabidopsis thaliana landsberg
aagtgggatgagtacataattggggtgtggcatactacatcctactaaactttcattctggttccaatatgaaaaagtaatcagaacgagcggtgttatgctctacattatcctggcgaccagcta

SEQ ID NO: 40507 - DNA, 737 bp, Arabidopsis thaliana landsberg
ggttatgaagagttgaagactgttggttcccaatctatagattattattatgcattcgaaagtcgcaactagtttcagtgatctgttccaaggttatgattatattttgacatatatatgtaattatgtattatggatttgccagatagatttttttctaattaagctagtacttagcgcaattattatacgtaatgttattaaataaaaagttactgtatggtttattttttattataaaaaaaaagagaaataattaatgttatgtccgtctctcatcgaccaaatcatgtttctctcgggtcattcatgtatctctttgtctttttctgcacttttttcccattatctgatgattcacagtttaatattcgtacacgattctatatcacttgtatagttatatatatatttttaaacactcgaatatataatttggaatcggtctgttctcttgattctctacactctaataaaaacaagaattgatttcaaatggaaaaaagagttggtaaaagaattcattcataaaaaaatcattgctacaaataaatagtgtgacaaaacaagaacaatgaccttacaaaactgccagtgatgacgtttgccttgaccttttgtacttaactataagaaccgacaaaataaacagagaagagaacagagaaaacgaaagaaacgctttaaaccccctcaagaacacatgaactcttctccttcttcttcttcttcccctt

SEQ ID NO: 40508 - DNA, 812 bp, Arabidopsis thaliana landsberg
atttcaagccaccctctaacctgggacagaattattgaaataccttgataatgcacatgcttcctttaacctccagaaatataatagttttgaaaattcaatacatacaccatgaggtgatatatatatttaaatgcatgagggatataaattttaattaccacatgtgagaacattttcttgtatatatggacagttgcaattatgatttcttcttttcaaatatttgatgcttaagatagaaagatatataaggttcctactaacgtccacaatctgatggattcaaatgtcgatagtatatacatatattagcaaagacctcaattcttttctttttttttgaatctaaattgagatgttatgaaattgtgtgtatgtgtatcttacaacgcaaccacacaaattcttgtttttaccaaccatttttataaactacaaacatgaaaaccaaacaaaacgaaaggtttatggagaactttgatttgcattttgttaaagaatttaatgaaaagttctgaaatagaaagtatttttagaaaaaaataaaaatattttggagcaattgatgtctatatcgcagctgaaataagtaactaagattatgagggtaggataggtttacctcggcctgtatggtgtaaactagcctatcatcatcaatagaggagatggagttaagaaggcagagaccatattcactaagcacttgaagaacactcgaataccgttgttggccacgcagcagcgtgtactcatcatgattccacgccaatcatacactgtcgaccaccacatgatgtttccactta

SEQ ID NO: 40509 - DNA, 549 bp, Arabidopsis thaliana landsberg
  unsure (1)..(549): unsure at all n locations
gcagacgggttgacctcagggacaaagtgaagtgtgtttgctttttaaacaggactgcatgcttaatgcctgtgaggaggaatgtacccagccaagtctgattttagtgcacagtgaagtttaaagagaatgtagtaaaacacaaaatcagaattttgtcagaccttctgtgagtcacataaacacaggaaggacccaagccaacacttatccagtgagttggacatcttaagtgggtgtggtggcagggcagctatagtccccattcaggaaggcccatgcaggaggacaagttccagactatattaaatgtctatggtaattgagccatacttcctataaaatggaccaagtggcttatagtttccacaaaacacataatcttacatgtttgcatgcacagagttggtaattcctttgtgggttcttgtgaatactgaaatgtaaaagatagaaagtaaacatgtcctttttttctaacaaaaacctacccatttctaatatatttaactnttaaagaaattccaagagccatagactatctaatat

SEQ ID NO: 40510 - DNA, 758 bp, Arabidopsis thaliana landsberg
acattgactggatctaattgcagctccgcctcagaaccttgtgcgtttttaactattacaaaagagaaaataggagttaaacctaactataattgcgatggtagatgatgagttatatgcatgcaaaaatgtatatacttacattcatgtaaaggaacgaggaaaatcatgaagaggcaaaggatagcaaaatataatgatgacattgttgttgtgatatattcttcttaaaattataccgaaacgttgtttgttataggttggtcgaaatccacacaagtaatagggttttatatagtactaaactactaattaaaagtgcacgtctcttgttatagtgatgcacaaaaaaacgcttagagctagttgttttattagttttagttctttgctattccttagtaatatgaccttttctcttaaaagaaaattgtttttgaaagaaatactaatcagacctaaaaccattagaagtttaatttggtcgacaagaataaatgaagaatcatccatcaaatagtggtttcaatggaaactaaagtataatggaatatctataatttatatatatattaaaaaaaaaaaaaatttgaatgttgaatgtgtttcatccaagaattgaagttgaatgatggcggcataaataaatagaataaaatgaagttggattgtctgaccgctatgactaaagaagcgaccactcatcaacgccatcggccatagctgttaattatttgttggatccgcgaaggagctta

SEQ ID NO: 40511 - DNA, 158 bp, Arabidopsis thaliana landsberg
gggggtgattgcctggagggtccaatacacgaagtcgccggagagggttatcttgtcgcctttatcctgtttggcgcggaacagcatgttgtggcgggctgggccgccgtagacatcgccatactgctgggtgttgcaaggcgcgttcgccgtggtgt

SEQ ID NO: 40512 - DNA, 759 bp, Arabidopsis thaliana landsberg
aagttttagtagaatttataggaccaagggttatgtatgaattgcagttgtaggctggttttggacattttgtttagattacaaaattatagatgataaactttttcttaacaagtttacctcatatatagagtgacaatcggatatggctaatctagatattctgaactattaaaattacggataggatggatataatttgcaccccaaaaaaagtataattctgatatcagatgatatattggaaagaaacaatccgagtatacaagtatatatcgaaatattcactatcccaaaaactctcattgaaacggatcattgtcaaattcagctagtagtctatataattttggatgatatttaatattttagttacccaagtaggtattttatatgtgtataattctaattacttctttgatcgcttatgtatgaaattcttttaaacctacttatgtgtgtttatttgttcttggttgagaagtctctctttctataggtataacaacatgtgaaatgtacattaaatttgagtgaattggttttgtttagacaaagagtgtgaaaaaaaagtgcatggaacacgaattacacagggtaagcagtgaagagttgatggacgatagtcgatggaagaaagctggtggtttaaaacgtgtaattaggagaccctaataacgacaaggatatgatggtagaaaataggattctgtacgttagttaactcaggacacgagattggcaataagcaaagaattg

SEQ ID NO: 40513 - DNA, 657 bp, Arabidopsis thaliana landsberg
ttgggtattaagattattataacccattttttggagactttatgtctaatagcacatacaagtaaggtaatgggtccaaaagcttagtcaagatgttggtaactataatagcacatatatatgttttgaaaaagatcttatagccataaaaatttgtatattcactattattgccattttgaattaaaaatgaaagaaaaaacagaaaatattaaattaaagaaaacctaatttttttttttttttacttcgtttggttagcgacaacagttgagggcaaaaaaaacctccgactataatttttctaaggaaaacatagtttctgacgaggctaacaatttcagtgatgtttatcgaatagcatttcatctacttccacggttgaggagtttgatcaggcaaggtctcggattttagaagattagttgtcgtaattttctaggtattttcaataagaatatcggttttatcttttactatgtgatattgatagttggtttgatggtcgagatgttcaggtcggccgctgctatatctttggatattctattgttcactagggtttacataggttcaatcatttagttttcttgatcattcaagattgatgttatctagttttgatctgatgcttctcgtctctatattttatatatg

SEQ ID NO: 40514 - DNA, 757 bp, Arabidopsis thaliana landsberg
cacatgaagactcgaaccaaatcattaatagatgattgatggtgagagacttggaggtgtgcaatgacaggccaggagatatacaatccaacacactaatcgggagacaatgatgcataaaacatgccgcgaacaagatcttctgaccatgccatgccaaaaatctctcaaaaaatccaaaaaccccaggatgaagcaaactagattgacctggaatgtagtgtccactctgcctcctttcatagctgtaaagttgcatcacgatcaacacagcaagagattcccagacattatccagcaatggggctttagagttgtaacccaaataaaagtagagatcaataaatccagataaccaaagctgcaagctgacaaagctacttaagcagtagataaacataaacaccaaaactgcatatgctttcaaagggaaccacaagcgtctcttagtttcttcaaacagttgtcttccagtaatccacagcaagagaaggaaaatatatccaaatgatacataattgggtttgaccagctatacacttatgagaatagcgatgaaagcaatgtatgttccacacgatcggtacataaacagaaacttttgcccaattgccactcataaatgaatcaatatgcctctctgtaaagaaataatggtgaatcgtaagcctaaaaaatatgatgaccagaaaaaaaactgtatgtttgttaatggtcgggcaccgctttaaaggaactaattggcctgccccaaaat

SEQ ID NO: 40515 - DNA, 498 bp, Arabidopsis thaliana landsberg
gctggtactgctggacgaagcggaccggcgtgatgcttccacctggctgcgctacctccacgatcattgcgtcatcgtatggaacagcgtgccagtgctgctggacatgctgctggtggtcgccgaaggcgacggacggcccttaccgctgcgcctggcgatggcctccggcgactggatcgggctggacctgcccgcacgcctgcacgccgccgcaccgctggccaagctgctcgccatgggcggcgccaccgaagcggcgatctggtcgaacctgtgcgaagtgtccgcgccgctgcccgcgcactggcgctcgatcccgtatggccgtccgcttgccaaccagcgctaccgcgtggtcgatgcccagggtcgtgattgtcccgattgggtgcccggcgagctgtggatcggcggcgttggcgtggccgagggctaccgtggcgcgcccgagctgaccgccaagcgcttagtccaccacaaaatgcctggcgctgg

SEQ ID NO: 40516 - DNA, 576 bp, Arabidopsis thaliana landsberg
aaacatattagtttgcaaacaaactctataaactacaactttttttgttgttttataagaaaatatatccaaaagttccacaaaaaaaaaaagaaaatatatccaaaaaaagtaataatgaaaacgaaatgttttcaatttgtaacgcttggtgttccagttgttcacgagaaggaaagtgttgttttatggctataattccaggaaatactgatatccatgttttttttacttttaattttggtgcttttaatgacaaatcattatctaaccaataatattatttaaattttcaatgccggcagtaattgttcccacctacggttttaaaattgaggaaaacccaggtaatggatgggagggtatgatcaaagtggatccagaaataatccaagaagccagagattctataaacttttcattgtgttttacgattgcagaatatgtctcaaacgacgaatccgaggcaaaaaacaaattattcaattcgttaatttcagctggagtcaatatacatgaatttgaggcatggataaacaagagcattgatactgctagatgagtttttactacaac

SEQ ID NO: 40517 - DNA, 653 bp, Arabidopsis thaliana landsberg
ttcgtcattcaagttctctaatatttaagcatttatagaaaatctgatgttggaagtttgaattgtctaaaacaggtgattttgttagtgggagaccaggaacaggttggtttgatcttccgccatcgctaaaaccgcctcctgagcaaggctatcctcagcttcccttcatagactggggatagatataaattctctgaataatgctcagtttcaacattgatgattctacttgaaaggaaaagactaatctttgtctcgttgtgctctgccattaccaagcttttagccacaagcttgtctcttttcagactcgaggttgggagaatgtcaaccaaattgtcgtcttgttactcaatttgtcgtcaactttagagacattgttcggagtttggacatggcaaatttgcaatttaacatactgtgcgatattctgataaaattctttaaatttcgttggctcgtccctattcattgcgtgatgataggatatcgctaattcgctatccgcttcctggccatgtgctaaacaagacttcccaagccaaactatcaaaatatttgacaaagttggagcaattcctaaagctgtagattaattacaaagttggaacactttttttcctagaaaatacattattgagaaacagagt

SEQ ID NO: 40518 - DNA, 551 bp, Arabidopsis thaliana landsberg
aaaaaacgccatgaaaataaaaaccatctatgaaatacacacttttggtttatattatagatgaaaacaataatgggggaggggtaattgcgtactgatattacatcattgcattaaaagaggaattgaccaaattaatttaaacatgaagaacccatattttacactccagctgcacatgaatatatttcacatttctctttcagcctcatgttatgcgtatctaaccctagatttggtttgtgcattgatcgatgtagatcttcttaaaacattccaaatctatatgattaacttatcacaagaacaatgtgtttaactttagtatggtatttaacaatttgtttaactttacgtatggtatttaactaaaaaaaactttactatgatgctcttcggacgtaacactttgcgtctaatgaatgggattaaaaccctctgttttaggtttaactgaactcatgacagtggtcgttcttcttgtagaagcgatagacaaaataaataaacccatttatgatcctgtctctttttttaatagaatgtctgct

SEQ ID NO: 40519 - DNA, 984 bp, Arabidopsis thaliana landsberg
tatatatgcttatgtatatgtttgcatgtaagtatacaatgtttgtcgacattattacccagatattattggatccttcatttctaccccgaataacttgatctagctagtaaccgattatataatttaataactattttaagttttgaataactattttaaattttacattttctgatggtattaagtttgaaatggttatatagactcgttgtaagaagatgtagttaatatgaaaattctccaacgataatcaattgtctggtgttatatttttttgttatagatttcttggatggaaagtttataatgccggccaattctaagcgcacaaatgaaaagaaattatttgtacgtgacccacactctaactgctaacctcgcttgaagttggaatagtatctagtattatttttgccatctgatagtagattgatcttaaagatttacctaactaaaagagatccttaaatcaagctttcaattcttatttttccaaaaatataactgtcttgtgtgtaagttttttattatgttttgtagaaagcctcaagattgcaatatagttctgaaattgcaacaaattttgttttatttataaccaagattaagtaatggttgattaacggtaacgttcgattctactcagttttcagtatacatatatagatcggaaacttcctacctaatttaaaccaaaaaattgatctaaatatcaaactatatcgatcttacctaaatataaaaagattttttatacgtacctgaaaagtggaaaccaaacccaccatgaaataatttgaactgaaatttaactttatttggaaaaacaaatgtatgtattttgattaaaagaaccaaaatttaaaactacaatcatatcacggcgccaaattctcctatttaaatatgattaccgtagaagcattgaaatattttataacttgtaaactatacattatcatgctgttggataatagtata

SEQ ID NO: 40520 - DNA, 683 bp, Arabidopsis thaliana landsberg
aaaatttgaaataggttatttgttaaaatattataatacatttcaactaaatttttttatttaattagttaaaattcacatctattaaaattcaataaaataaaaacaaatttttgtaatactgtatatactagttttattataaaagagttattcctaagtttcttaataatttttctatatatttacttaaacagccatgcataaactcaatatgttagtgtcacaaatatataacattgtttcaaaaattgctggcttctttgaatatgatcactcatgcatgtatgaatgaactcaagcaaagtaaataaacattaaaaaaacatatatacacacatatgtaaagccgatatacttaaattagtccacattatggctttgatgttttgcagcatgggttagataggctactcccaaaagctagctcatatcactaaaatcaaagggtggatagcatcacttattttctatatttacatccgtcgtcgaatgatacaaatgagttaccatcacttatataattgatatcaaaagtggcaatgggattttagtacttctaaaaatatatatattgatatgagatatattttctcctccatttatataaacttataaatacacacatgcataatatatatcagaccataaatagcacacaatgacaaaaatattttattata

SEQ ID NO: 40521 - DNA, 703 bp, Arabidopsis thaliana landsberg
  unsure (1)..(703): unsure at all n locations
tgatcttaatttggtgtattgtgaaatggtatctgcagatttcgcagtcaaggaagagatcaggtgttgaaataatcgagcagcgcaagaaaaggttgaatgatactcaaccatcatcatgataacttgtttttatatttttgtttacatttctgtttcttcagaaggctttttcttaagttatgtatcatcatcattagtctttcgcgacatgtacttccaaattttttaaaaagttttgattttgatttttatacgtccaactatactgaagttttagactaaattttatgaatctattgcgtacgtcttaactttgttacatgaataatgtaagagtaagacaatgctttttcttagagacaacggcgctgtcccacatatcctatcaaaagaacatttcacttttataatatttgatctctttttttttcttgatgcatgagtacgcctaaagaaatattcttttcttcctcatcatttctaaaaaatggtaacaataatagccttgaatgggaattttctagttggagacgttcttactatttacaaactcggtatcgtttacaatgtattttagtcagcgagtttatttgataacaagttgtatattgtatagttttctttggaaaaataaaattttaaaaatgtatattctgttcgtatttctgatttccatacttgtatccgaanaaaatttgag

SEQ ID NO: 40522 - DNA, 512 bp, Arabidopsis thaliana landsberg
cagccgacatgacgacagaaaaaaaaaagggaacaagagacatttttatgatttatatcaaatacgatcggaaggggctaaaggtcttcgtgaccgctgaaattgtatactagaggcagggccggtcctagaatatatgtggcctaaagcttactttggctttgaaacaaaaatagaaaaaaaaattaataacacaatgaaaaatgacaaaaactcaaccatggagactcaaaactgtgaggagatcaatattttccattgaggtttaaccactatactatatatatggctctattataagcattttataagcatcagaagatgctcaagtcaaaaaatactaatttaaattcacgaaaaagaacaatgcatggactgattattcgatctttaattaagaatcgtgggttcaattttgagatccctttcatattgggtttggactggtattttatagagtttaacatttttgggttaccaaaacattaatttatgagatggataggtcgacc

SEQ ID NO: 40523 - DNA, 744 bp, Arabidopsis thaliana landsberg
aatcaattagtatattgatggatctttctaacataataaagaaacttttttgagaagatataagtatttattcgacaatagcattattgtgcatgcatctctagtaaagttataatcatatgttcctttgtttggtgaacaacttacgaaaatgttattttaactagaaccaattaggttcgcactggaaaaagaaaagtttagtaaactaggttgaaaaaatggaagaaagttgaaatatcccaatttgcatgacgaaagcaaacgtgttgctattggcacgcctctgtctctagtctttgatttggttcggccgcccgttttcgtaaataaaataccacaagtacaatgaaatgaatccgtagtacattttctgtttactaaggtgtgaataatagttgaatttgccttttaatatttgtaccgctaactagctagcaacgaagagtggtgaacgtatgttacaatataagaaatttggtctatatcttattgcggttggactgcataaatgtggtacaacaaattaataattctatgttaaaatgtataaaattatactttggactagtactggtgagcgtcatatattatccctttaaaggagagatggctccctaattcaactattcggtctcaaacgtattaaaatgtataaaactgaaatgagctcaactgtttaacaatataattctctctattctatagctgtttcatgtttgaatagagaaccatattttttat

SEQ ID NO: 40524 - DNA, 479 bp, Arabidopsis thaliana landsberg
ctcgcccaatcaattgatcaatgcgccgatccaagcagacgagtcctttattgtcatggacgcgttctcccggatcagcaactacgcctgcgatcatgacaacatggacttgcagccgattatggaaatccacgacgatctgacgttcctgtgggaagttgatcttgtggacgagtacgcgccgatcgtgattgagcacatggtcagcgttccattcgattgggcgcactgcgttccgatcgaaattgaaatgtcgattgggaagaattgggctgaccaaaaggaaatcggcaaattccgttgctgatacgtggaagaagaatggtgacagcgtggaggactatgactgatggaccacaggatgtcgggacgatcgaagagctttggcattgggcatatgtggccggaaggcaagcgcacgcctaagccgtaaacttacactgtgcagatcgcacgcgttggcgtcatgcacgccgtct

SEQ ID NO: 40525 - DNA, 440 bp, Arabidopsis thaliana landsberg
agattttaaatcatatgtaacgtaaaagttgtaatcttcattatacttgggcaagaaaaagagtcaagggacttggtttgaggcgggcactaggagttcttttgaaccgtttattttcttgtcacaacaaataacgagggataacaggaattatatatttgtaaatatgggtcaagtgacaacgaagattaattcctgttacaaacaaagagattcaaaaacaataaaataaataaatgacagagattcaaacttcatcacctaaccaattccgcttcaacttcggaccagtaggtccttcctctccaaaaacttcgttaggcaatcctttaatcgcactcctaaacgtagtcttaagacctccccaaccataattttcactccttaattatttatgaccatataatctttgtcccatgtctattattcaccaccggtct

SEQ ID NO: 40526 - DNA, 677 bp, Arabidopsis thaliana landsberg
gtttaggatctgaaacaagattttgaaaaaaaaggatgaactttttgcagtagttcagagaatgttgaatcggcaaatcaaaacataccaatgaatccgcaattgctccactttcccctgaaagcacacgtcttagcacatccgcattgtagtctggacctccacctcgcaaatcctcaagagtacaacgaggaataccaaagtccactgtcaaaaagaaataagcttcaatttcattaagctgcatctgcaatattcattttagagaagggataaaaagctagaggaaacattacatgggtcgaatgagaattcttcgatcttttccggagttacatcataaactagtcctcctcctgtttttcgttaagccatgattggttaataattgttcaataataaaagccatcaattttaggaagagataatcttacctaacggactcatttcgtcgagaccacatgaatgaaccaccagtgctcttttcattccaaatcgttgcagcgcctttgccatcttaacaacctatgaaaccacacaagcaaatggtaagtaaatgtcttgtttttgttgatgaacaactagtttcagcaataagtaaatgtaccagatctttgtggtatacaccaacgacagcataagacactctagcaggattaagcataggtcccaatatg

SEQ ID NO: 40527 - DNA, 468 bp, Arabidopsis thaliana landsberg
attaatacatgaatagagatgaaaagcttatgactttaacatgcttttatatttgacgatttttccatttcattggggatcaagggccataatgtgttcttcttttcataaaaaaaagtcgagtttaaaaacaattaaacaactaatctgataaaccttaagaaacaaacacaccataatagataattttatagatatgatgatatttcattcccacgtagcagacatcatggaattggcaacaccagactgctccaaggttaagttagattcatactccaatgtctttgattcacctggaatcgcttgtgttagcttcaatggcttcttcctctctgattcctcaagctgggaatagcagaatgaccagagaagctacagtggagacagcaataacatcagaaaatatcagacaaaaatatagaacaagaaccattgttgtttcttaaggatttgcagacctgaatt

SEQ ID NO: 40528 - DNA, 420 bp, Arabidopsis thaliana landsberg
  unsure (1)..(420): unsure at all n locations
gccgctacccctgagacccacagaaatanaaatacgtgcgccgagacaaaacggcacggggaaggggacacaacaacggagggagagggacaccaaaaagacaccgggaagggaaagaggcacccaaccagcaacgacaaaaccagcccaaagccaacaacagccagacaccaaaacaagcagggagaccaagcggaaacaaaccanagaggcaagcgcacggagcagaaaaaggcgaagacaggagcggagaaaacaagaagaccaaggaacaaaaaagagacaagcaaacagcagacccaggaaacaacccgaaggggccaaaaaaacaaccagaacgagaaacaaagcggagaaccaacccgggcaaacggaccaacaaacccgcacacgcgccgaaagacgcaccaccgacgagcc

SEQ ID NO: 40529 - DNA, 163 bp, Arabidopsis thaliana landsberg
gcacggaacgtacggaggagccagggctatactgcgcaactatttttaggcgcaagcagcagaacacaatacacaagcttacctgaagtacagagtgaatgctctaagggcataacctatagctaaaagcttgcaatattttattaccaatgtatgccaccag

SEQ ID NO: 40530 - DNA, 668 bp, Arabidopsis thaliana landsberg
  unsure (1)..(668): unsure at all n locations
aacaacaatcagcaaaagtgacaagaaaacgtcgttgtgtcctgtgtctctcaaagttttgggttccttttgttatttcttggttcttctgtttttgtctgtgtctatgaggctctgatgatatcatcgtttaggaaaatctgcagaaaacaatatactgtattcatcatatttctttgtatcgcatttcgcatattaaatctcatatttttctttgaaaattggcatgtttattttaaaactcacatagttccgagcatcgagtattaaactacatgcgtttctcattatttttcaaaagttcccacaaacgacgtcatagacttgtaagttgtaactaacatgagagtttaagaagaagaaaaagacagaggacttatctggattattgtcttggatatgtgaaaatctgaatatttttgctatctaaaatgttaatcataattccttaaccagacatgattaaaattgtaacgaaatagtttgacacctgatttccatcctctaataaattactaatcattaaaccaacatgaattggtataccgaaattaaattgttaggcgtactcgtgagattagaatgaactcattaaagttcatgtcgaaaagtgcatatngctatgttgtggacttttaataactagggtcatgtcagtatcaatactt

SEQ ID NO: 40531 - DNA, 743 bp, Arabidopsis thaliana landsberg
cctaattttgcaagatctacaataaataaagaaagataactaaaaaagcttgacctatatcacaatatgttgcattttaaaaataattacaaaggaataatcgaagggtggtttcaatttgggtatagaaggtgaatacctttttgttgtggtgaaatggaaacacacaactcatggctaagcagagactctctctcttacctgttttttattttattttgtttgactattttattccaaaagagtgaatcctcagttttccacatcatttgatatgaccattcagttaaattttttatatttctactttcttacatttatacactcaccaaccttcaatctactttcaggaagaaaaaaatgtagcattagtgagttcatcacttgttatacaattctttcttctcaaatattcaatttcattacaaaaattcataattagtcttactttcttgaaaattttccaaatcaaaatttataatttccttttcagtattggcgtcaaggattataggaaaggcaaggaattaagtttttcagtataaacgactaaagtcactaaataatcatcaagaaataaaatcaaattcatatattgggccagtttaggcccattaatatagagttggatatatgctccatccattttcacttgtgggctcaatattttggtctaagtacatttgttttggcaactaaaacttagttttatgagattttttgtgttaatgagaatataatca

SEQ ID NO: 40532 - DNA, 626 bp, Arabidopsis thaliana landsberg
gaaaacagcactccgtttttccttttaccattttttcataatacacccaacaaccactgccctactaaatggaagcacatataattcacactacactaaagcgcaatgaaatgaaagtagccagagttgaatattaatattagagagatgaatataattttgatcatcaatttcaattatatcaaagtgaaagcaatgagttgatttcactgaacggtaatacaactcaagaaccatgaataaaccatgaacaaagaagagaatcctgtgacgaaaaccaaatcaacaaagagatcatgaaaagcaaagatcaatgttcaaaagcaacataatccaatagaaataatttacaaatatagatgaagaactttaaacatggaatcacacaccaattcaaacaaaacagattcagaaaaagggcaccacctagagttaaaacagatccaccaagacggaaccactgattcaaatccctaaagtaacaatcatgaatttcaaaactctaagcgatatcaaacttaaatataattcaagcgaacccagtttccaatcaacaaacagttcaaattattgttacgcaggaacgaaatcaactcaatgcccaaaaccctaagaaaaattcgagt

SEQ ID NO: 40533 - DNA, 428 bp, Arabidopsis thaliana landsberg
cgctccgacgcgcgccgaagcgttgaggttattatcagcagcgcccgcgcactcctctcggtcgacgcgagctcgagcatggatgagatcgccgcggcggcggttgtctcgcgccatacctttctatgcacacttgcccttgcgcgaggcacttgtcaccgcgatcgtgaacgcgcaacgagccgacgggctggccaccctcgaggccgccggactcgaggacctgtcaccggtcgatgcggtgcaccggttcctcgacatcagctgggagatcgccgagcggttcccactcgtgctcgatccctccgtcgccaagacacccgggcccgacggcagcgatccgcacgacccggtcggccgacacctcgagcggatcatcgtgcgcggtcagcagtccgaggagttcgaccgactgctccccgcgtcgt

SEQ ID NO: 40534 - DNA, 708 bp, Arabidopsis thaliana landsberg
gcttcccggaaacacccacggagtcattgacttcactggaactgtctatccccatttggaaaaccttgatgatagcatcgcttcaatggctgtgtttcttaaccaatacaacaatgccttccatgaatcgcttcaatggtgctaattacaaggatgacgtgacttggatggaattgaagcattcaagggttccagagagaagacaaacataaaattggcagacagtagctaacgaatggcaatcaattacttcagatccagagagaagacgacgcgaatcgcgcagatcatagaaccaaattgtgagatttcattccgaacaaaaggcaaatgtttcgttcacagaatcacagagagtgagcttctaccttcgttccttgagaatgacgagcagatatgtgaagacggtgccgccgggagaagtcttcgtgataagagccgagatcacaaatgaagagaattgagcaaggattctggaagagagtttagagggagatgaagaaattagggagagaaccaattttctgagatccttgtttgatgacttctattctcctctgcaggagaagcttacaattacttgagaaagcttagcttaacttaatctctacgtcttatttcagcccaacatgagcccaacatctcttatattctgcaatcatatttttggatccatttgattagttcgtttcgagggtctttaggata

SEQ ID NO: 40535 - DNA, 349 bp, Arabidopsis thaliana landsberg
atgatacttggttatacgataaaaaaagtgagagagttttgaagaacattatgttttataaatagtatctataagttccacatatttttctttgatttaaagaataaggctatatactgattcgttgagaaataacttttgttaagcaatacatttgttggttaaaacatcattttctcattctcagctacatttctaagtaaataagtatcaacgtcaaacttgaccgttggatctctactttttatattatctttagtttatcggggactcatctttgtaagctgtgacctatttattgactataatacccataaaaagggcgcgttttactcataactgaaggagg

SEQ ID NO: 40536 - DNA, 522 bp, Arabidopsis thaliana landsberg
taagtgttagttgttgagtgtagatggatatatagtagtaatgttttcttttagataatggtataaaatttaatatatatattaaaaaaggctggaaacaaacttatttcatttctgaggagagtgaaaacatgtgctggtgccagagtattaaatatgcaaatggaagaagtagatagggcatttacgatgagtggtcaattgcatttaactacttggacacgtcgacgtacgtacgcaacaacaatagcccatatatactcatacgttgttcagtgttaaaatgttcatacaaatcataactcaaagaaaaacaacccctcaacggtcgatgtgtgatcccattagagaagatggctctaacaaaagaggcgccgtgagtaaggaaaaaaggccgtatattcatagagaatggtcgtgggccgatataatacgagcgttaaccgttatcaatgtgcactttttgtgtctcttggcaccatttaactacaaatgggaagcattacggttcggtttcgtgct

SEQ ID NO: 40537 - DNA, 508 bp, Arabidopsis thaliana landsberg
ctcgatgaagcaatgtacattacctgcaagccttcttgactatataaacagttttgcatcagcaattgtatgggtggtacacaaattgccttctgaatcatacgataattgcattgattcggttgataccccaaagactgttgcactaaagtaatgagataccaaaagaggtaagagatgggatagcacacgagagacaatttatacttccaaaacaaatattccgagaagagcaaagttacaattgcataggcgcagtttcacccttttcaacattgatcttatcgattaagcatgtaaatagttggatgaacaatgcaaccttcacagaatctaacaactaagagatagtatctaagacattaaatatagatgtttgaagacaagtaactatagtataactgcaagaatgaacacattgggtcatggctcaatagcccaatcttgtaaatatgaagtgtttagcttccacggaaacacatagctttgagactgaaaaacagagaga

SEQ ID NO: 40538 - DNA, 648 bp, Arabidopsis thaliana landsberg
taaaaagcatatttcaccaatttatcacataccaaacaagaattatgaaaagaacaccaaaaatgagggggacgggaaaaaattaccatcacggttatatgagatttcacttccagcggagagactgtctaatgccggtgaagatgagtccgactgatctaccgatcaaggtgacgagaaagaaggatatgacgctactcactttatccaacaccactctgataattggcatcccgatgtctgataactccagaaatagactgaagtagtacctcctgtacacatcaacactttcatatgtggaattctcatggaatttttggttttgtgatcaaggtaaaagaagagaggtttaccatcccgatagagctttaagctccttggttcgtttaacgggcaatgaaaagtcgctgattatggagtatcgcaagggtgatgatggggcagctttagtttttcccagtgtgaactttctccaccaactaaggctttctgtatcgtcactaccatcaaggttgttgataacctgggtttgaagaatgtagaggtcaaagcgatcttcatacatcgatacaactgctaacatattctgatgcaaccacagatatagagccaccgatcaacaggaagaaatgaaatatgagtcca

SEQ ID NO: 40539 - DNA, 459 bp, Arabidopsis thaliana landsberg
atttgcgttcttcgatatagccgacgccgcgcatatatccgatcagcgccttcgcttcctcgggcgtgacataaaggcgctcggacaacatagtcgcgtcccagtccttgtcgggattggaacggaacagcagcattccctcgagctgtacgatgctatcgatctcttcttgtataaatcgatatacgtcttctggaataaacgggtctgtcatttcgaatttacgttaatatatgcagcgctaatataaaagacaataaaatcggttactcgaacgctgtttgaggcagatgcattggattgaaaaaagttccctccatctaaaaaaaaatcttacttgccattccgcgcataaaaaaagaaaagtaagctataataatcctatcagcctttttttatatattagctcgaagacgtgaaggaaacacatgtcgaacgccgccgtagccgattaccaca

SEQ ID NO: 40540 - DNA, 803 bp, Arabidopsis thaliana landsberg
  unsure (1)..(803): unsure at all n locations
gtgacttcactgtacacggctcttgaggcgtcttcgtagtaatcatctgtataagttgttggatttctttgtacatgttttgaatatcagaggaagtgggggcggatgctcccgaagattgcaactcagaatggatttcatcaactctctgttgaagctttaagagcatgtctagagcttctttaccgtattttgctttggaatccatgtttagagttttttcatcgtcttttgctttcgaatccatgttcgtactcactcacacacaagaagacgaaacttctgtaatcaaaagacaaacaaacaaaaaaaacaaagcaaagtcaagctttgtttgacttgtatgcataagccaaaaggcgctattttgaaacttgtgaacgaagaaattaggtttggcgaagcaagcacgaagaaaataggttgaataaaaagtaaaattagggtttaaccaggaattagaagaaaaaaaactcaaaacaatggaggatcgtacgaaattcgaaaaacaatagtctaccgtagaagaatctcagtcaaagcttcgtcattcataaggaattgaaaccggaataaagcagaaacaataagagagagagatcgacgaacctgtgtgtatcgactcgcactgtcaagaaggagattttagattntcatgttttgtgtgtttgctttgaatatatttatataagcgataatcatgaactctcctagctcagagattaaataaggaattaccggcttataattaatcaaaaagagggtttagagtacttggaaaatatattttgatggatgatgat

SEQ ID NO: 40541 - DNA, 546 bp, Arabidopsis thaliana landsberg
  unsure (1)..(546): unsure at all n locations
acttaacgaccagctcagtttggcatatatcaaaattgttgcaatttcaagcgtaacactcacaatgccaaaaggaacagagaaaaacacaaaagtatattaactgtttattaaaagaaaaaggaaaacacaatgtatgaacaaatacatacacgcacataacatgtatgtatagtcatagatatactaataatcactttgagcagatggatcttgttgtgcattgcattgagaaaaaacaggcctacgctggcctttttcttctagggtaggaagattttcgttggtgatggtcatcgtggtgcattggtttgacatcttacgctaaactgttcgtacgatcttttggacacttttacatctaccatttctcctctgtcaaaaataaacaaacttgaccacaaaatatacgatttatcatcttacgtaatccaaacgaattatcattttatctaattntctttcttctaaaggcgcctttatttggataatatttcgatgcataaatgtcagacaagaatacagttgctagtagtcgtattcatg

SEQ ID NO: 40542 - DNA, 787 bp, Arabidopsis thaliana landsberg
gtttgtgatgatttgagtgatggtcgtgttagtcagatcgctgatgcgttttatcacaagaacttgtctcccatccaggtattgttctggatcgattttctgtatgaacatatttctttgttgatatttttggataaatatagtaaagggaagaccaatcaaagcttttgctttctttagtatatatatgtaaagacaaatcaataaaaaatagtttaggttcatttcatcgttcttagtatgattaaatttcattgttaagtttttgcatatagtaacaaaagcaagacaatttttagccgaactaagataacacttatatgttaagccgttaaatttattgttcataatgggttgtgtaactcaagtattggttgtgtatgagcagtcaggttgttgtaagccaccatcggattgcaacttcgagttcagaaacgcgacgttctggataccgccgagcaaaaacgaaacggcagttgcggccgaaaacggggactgtggtacgtggagcaacgtgcaaacagagttatgtttcaactgcaacgcatgcaaagcgggtgtgttagcgaacataagagagaagtggaggaatcttcttgttttcaacatttgtctcctcattctcctcataaccgtctattcctgcggttgctgtgctcgtcgtaacaatcggacggctaggaaaagtgattctgtctgatcaacaactcaatttcagtttcttgggtttttctgttttcttagcttggttggttttttaagttaattatcttttgttttctttgga

SEQ ID NO: 40543 - DNA, 603 bp, Arabidopsis thaliana landsberg
cggaaacaaccagaagctattagaggcgggaggagatatgttttgatgattttagtttaattccacgacgcaccatttccacttgggggacacctaaacgaccgcttcggctgtataaaatcgcaaatgtttggtctcagtgtatttttccaatttccaaatacatcaattcaaattatataatatctagtggcaattataagtatatcatatattttcaaaattaattaaaaagattactaaattatgtttgactacaactattataatagttaaaaacataaacaaaaacaaagaaactattttaataaaaaaatcaagtaaacattaaaacataagcaaaaataatgttaaataaattattaattattaatttactaataattaatacctctataaattaattgttagaggtttaacgtaatttataaggaaaactaaagaagactttaacccataaagaaaaaaacaaagactgaattgaaggcccatatttagaagaagagaaagaagacccaaatatgatataaaatccagcccatttatatatttttattttgcttctggaaggaaaataagaaaatggcaaaaacgaaataatct

SEQ ID NO: 40544 - DNA, 131 bp, Arabidopsis thaliana landsberg
cttacaaaaattaaatttgttcaatatttttaggaaaccacatttttttataagttattctcttgcatatttataggaaaggaatatagtacacaaatcgattattataaataaaaattaatgtctcaaaa

SEQ ID NO: 40545 - DNA, 481 bp, Arabidopsis thaliana landsberg
tgtaacgcaccaagttaaagagggatggaaggtattctccaagtttatgaatattctgaataataataatgaaaacatctaagcaacagtcaaaagtttaaggttacacaattggtaaagttttataatatacctgctcacaagcagaagttagtcctctggtcatctctcttgtagttgaatcaatgactttgctggttttgtttacagattcttcgataattttacgcttagaagttaactctttaacttctcctagagtaattggaccagcagcttgtaacgttttctcgtacaaaatctgtttttaggtgacaacaatatcacaaaaaatgagaaggctacaaaactaaataacttgtttgaaaatcataattctacaaaaaccctaaaatcagaatgtggaatctgaattgttctattcacaaacaaactcaaaggaaaactaattaaaggtacctctttttgttttgggtctgga

SEQ ID NO: 40546 - DNA, 429 bp, Arabidopsis thaliana landsberg
gcccctaaccacatacctctagatgccataaccatctacacacacattttcccttttgccaccatggccaacatggctccggggacggggccgctgctgctgcagcacccttcgcatgagtcctcccgcagcggcatcccggccaccgccagccgccgcacgtccactgcgtccgccacccgcgccgccggcgtcgcccgcatggacgccgtcacctcgcagctcacatccctccagcgcttctggctcttctttggcatctttgtcgtcggctacgcctacggcctcgagagccaggtccgctccacctacgccccctacgccacctcgagcttcaacctgcactcgtacctcgccaccatcaacgtcctccgcagcgtcgtcgccgttgccgcccagcctaccgccgtcaagattgccgacgtcttt

SEQ ID NO: 40547 - DNA, 594 bp, Arabidopsis thaliana landsberg
cttcttccatggttgcttttttattttcatgaatttcctttgtagagttttctttacctggcatcccttcttctatcttatcatctttggaaccttcttttgtagagttttctttaccttccttcccttcttctatcttaccatctttggaaccttcttcagttgaaagttcctcacctgcattaatttcaactgtcttaccatcctcggagccttcttttatggaatcttctttacctccatttctttcaactatgttactatctttgaaaccttcttcaggtgaaacttccttacctccattttcatttgttttgccatctttagactcttcgtgtcttcctttaacttctatagttttactattctctttacctacttcatctccattatcttctttgccctttactttattatcttctagcgattctccaatctttgcttgagaatctgcttgcattaatatttcattcttagattcgtcactatctgtctcagaatctgcttgagaatctgcttgcattaatatttcattcttagattcgtcactatctgcttgagaatcttgatgagaatctgcttgagaatctgctt

SEQ ID NO: 40548 - DNA, 1010 bp, Arabidopsis thaliana landsberg
  unsure (1)..(1010): unsure at all n locations
actttttctcttcttctcctctaatctcgttcttgtatatatatatatatataaaaacacattcccataaacttatactctcttttgatccatctattgattttgattctctgttttatccggaagtctaaattggatggtgataaagggaatgcgtgttggtaagtacgagcttgggaggacactcggagagggaaattccgcaaaagttaaatttgctatagatactcttaccggcgaatcattcgccatcaaaatcatcgagaagtcgtgtatcacacgtcttaacgtctcttttcaggtttccattttcgatctttatttctctttttggttaacggtggattttaactcttacctactcttgatttttttttgtgatttttatagattaagagagagattcgaacactcaaagttttgaagcatccaaacattgtccgattacatgaggtaataatactacttgtaatgcttcattttatgtagaaactcaattactgctcgaggcaatatgaattcgattcaaattttggtatcagatttttgagatatactttgattaaacgataataatgttttgatgaaagaccaaacattaaacctatgaaagtttttttgttagcttgcgtagaacggtagaagtatattaaaaagttaaccgtcattttggtaaattaatatattatttttcgttttgtttttttgtaactagttttattcgtgaccacgcaattgcctcttcacgttgcttattagccctacgtaacgtatacaataattattttcaaatactttgtcctcctgactaattcattggcagtcgacaatagatgtgatgaccatgacctattcaattatgaggtaggtcccaaaaaatcgacccatttggggtaatgaccatggcaatgcaatcatcatcacaatttccctatcgttgggattaaattccaatctttntcatgcttaccctcatagcgataacttgtaaatcttactcaaaactcgtt

SEQ ID NO: 40549 - DNA, 253 bp, Arabidopsis thaliana landsberg
caaatctatctgattatgtccaaaaacctaccaatattaacctaggttaggcgacaagattcatcgatcacttgggagggtcggtcaaatgactttccctattccatttacaaaaccgtatacgagcgctagagatatagctccaagcctacaagtgtaacgagagatgggcgtttcagatcctatttagctcgtgggggtcctggggtggtccacacaccaattgaagatgaaaagaggagaccagattact

SEQ ID NO: 40550 - DNA, 469 bp, Arabidopsis thaliana landsberg
tggtcgacaaaataattttccacgctacccttccagccgtccattcactatttgccctcaacgttaccaaataacggtccagattcctagggcaagatctaacggttagcaagtaaagtcgtaccatcagaaagaataacaattctttcacaaagtaaacataaccaacggttaacaagttcttagggttaaatcagtaagatccaacggatattaaattgcaaggcccaaatagtttttttgcagcagataataactcgtccccactggcgagtgacgaccgagactctgtgaccctatttttcgagacgataaaagggcaaacaatcgctcttttcaaagctcgcctcttcaccacagagaaaacttcgtctctcttctctgcttcgccctctcatttcctgtgagataaaggcggagtctctttccagttattttgctcatccatcgattcttaggtatgactcgt

SEQ ID NO: 40551 - DNA, 585 bp, Arabidopsis thaliana landsberg
aaattatattcctaatattatttttaaagaaataagagtcttgccttgtctcatgaaatctttgacaatttagtccaccactcaaaacttagagagaaagcgagaaagattcatttggctcatctataaattaaatctaactaaaacgtaaacatttcgaagtcaagaccctgaaaattttaaattgttcttaatcatttgtaatgatttgattttgtgattagcttttatacggtgcttataatgcgtttaaaagttcatgtacataaaaatttatctttatccactatggtagaaagtacaacacgtaatttatttatgaatggaatgattaagtaatcttgttttacagccacaattatatattatcgtcatgtcttaatctacctttttttattcggccatagtcttaaatatagcttttaaatttaacatatggaaacatgtgtacattcattaatgggtacacgactctaaaatatttaacgaccacatttaattaggaaatatttaacgaccacatttttgatctcaaggaataactgataccagtcgggttagtcgagtaccttggttggatagaga

SEQ ID NO: 40552 - DNA, 557 bp, Arabidopsis thaliana landsberg
atctttttaactgttgacttacttttttttgtttatcaatttttaatttaatgtgtttacttgtttattcaccgtagacttactttattctacgttgtcttatcatgaaatctatttataaaatgtcgagttaaattttatttttgtcaattaaatttatttcttttgatttattttaaaatagtcgacttatattttgttaattgtttttttatgtagtcaaatttttgaaagtgtttacttaattttttgtttgttgaattataaatttttttcgtcgatttttttattcttagtaaaattatttcatctaaaatagcaacaaaactgattctttgccaaacatttacaaggtccacttgactattggatttaagtacatttatactcataccaatattaaattttcttctccgcattatgagacgtgacaagatctacattatttccgcgttgcttcaaggttgactgacttttcattttgttgctatataacgattatccagtagctaatacttgtagatcggtgacacaacattctctaatcttgagcaaga

SEQ ID NO: 40553 - DNA, 501 bp, Arabidopsis thaliana landsberg
ttggaatgtcttgacgacaagtgagataacctctgttttttgttttttctccatctctctctctctgcctttcacgagaacttttttctatttcttgcttcttccatgtctctgcttttcaactctcagagaaaaccattaacagaggcaaactctgtttttgatcagtgtcaatagagcagcatctaattactgacatcaacattgaattcttattcacaaattttgacccttctttatctcctgcaaaaagggttcaatttcagttgtttttacatcacaagagatacaatacaaggacctgtaaaatcaatggaatatactaagaaagatacaaaagccattagttggcaaaaacgtgtggtcaggtttaattagatctagatataattaatgagcaattaaagatcaaacaagcattaatgagtatagtgtgattgacttagcaaccttattcaggcttctgacttgtgcagaagattaaacatatagcttacgatt

SEQ ID NO: 40554 - DNA, 377 bp, Arabidopsis thaliana landsberg
cccactgcactgtgcagagtggtggcctttgttttgtggggcgcacgctcgcccagtaaagttgcccgaggtctcccgcggaccatacggcgtcaatccgtagcaaacccagaagaatcaattcaggagaaaaccccaatggctaaggcgaagttcgagcggacaaagccgcacatgaacatcggcaccatcggtcacatcgaccacggcaagacgacgcttaccgcggcgatcaccaaggtgctgcacgacaagtggccggatctgaacgaggactacgcgttcgatcagatcgacaaggcccccgaagagaagcagcgcggcatcacgatctcgatcgcgcacgtcgagtaccagacggagaaccgtcactacgc

SEQ ID NO: 40555 - DNA, 553 bp, Arabidopsis thaliana landsberg
gcggccggcgccaaacgtacttttaactggaagatttcccctttcactatcgacagcgcatcggccggggggctggcgctgttttatgataccaccgatatgtcgggtgccaggggtaaaaagcaggtgaagtatgtggctgtggactaaaagatcaggataacaggttctgcctggcaaggaactcgagtttttcatttgcctcgatcagcttctctgtcagctctttgttttgcctccgcagttcgagtacttcaaaggctttgaagatgaagttttttacatcttcttcattccagggtttggagaggtatttgtatacctgtcctacgttgagggcatcgatcacggcattgatatctgtataaccggtgatcagtatgcggatgggttcgggatgtgtggcgagtatggattggaagaactcgatgcccgtcattttaggcatgcgctggtcgctcaggataacatcaaccggttcggtgtccaggatcttcattccttctttggcagaatcggccgttgaagatggtgaacgttctcctgaacgcag

SEQ ID NO: 40556 - DNA, 914 bp, Arabidopsis thaliana landsberg
aaaaatagagtgttttctctaatccaggcttgtgttttttctagtccatgtttgtgatcttgcttctttgagactggaagaatatatttggacggtcgagattagtcttaaaaattctgaacagatcaagatttaattttaaatctgtatagtgggccatgtttaggcccaataaaagcttttgatgaggccttctaaatggtatatatttcgacttgaagagaaagaaaaaacaactagaaaatcggaagaataaatggacggtggaagaaggaagcccttctcgccggactagccaagcacggttccggaaaatggacaagtattttagacgatccagagttcgcggctcaacttctagatcgcacaaacattaacctcaaggtaatcgaaaattcccaaaatcccattcgtcttccatggaaatcgatttttgagatttattatgtggaattaggtcgaaatttgggtattaatgttgtattgtttattcttattgcccaaatttcaaggataaatggcgtaatataaagaaatcaaggacacaatcactcgaatctacctccattttcacttcaccttcagagacttctcgttctgttgttagctatgaggcttctcctagtagttcatctgatatgagcaatgatgctaggtttgttatatttagagattttttagaattggtatgttctaagttctaacaggttcttctctaccttgttgcaaggtatgatgcgatggtttttgaggctgtatcaacaattaatgatgaaaatggttccaatctcaaagagattctcagatttatcgaggtgaagaggatatatacattgaagtcccttgtgtctctcatggtttatatttgacattcattagtcaggttatctcaatttcttgtcatagttatttcc

SEQ ID NO: 40557 - DNA, 594 bp, Arabidopsis thaliana landsberg
aatccgaccaaaaacacacacaaaacattagatcgaattcaggaatcgtaatctaaaactgaaacgacaagtaatcgtttgtttgaaccagaccttaatacccatggcggttacagagaaagttagcgaatgcgaaggtgttgtctctctctctctctctcagggaactttgccaatttggtctcctcacgccggcgatgataattgttttcccgcctcctcaacacgtgtgggcgctagagtctgattaactttatgaggcctttaaacctaatgagcccatcaggttgttaaggcccatcatatagttaaggcccatgagtcatagtccaaagaaatgttagtggaatcgaaactctcttttaagatgcatcttatatgactatatactttttggagctataaagttataagttgagagagagaatgttcaatgtagcccatataaatgttctgagtttcgttatatgtaagggtatgctattcttttggcattttatttccctaccaatacagtgatgtcttttttgctggagacaaatccattctaagatccgatttggatctgaagccttcaaaaaacatatgattcct

SEQ ID NO: 40558 - DNA, 823 bp, Arabidopsis thaliana landsberg
agcattagatccggtgaagttaagggagaaacttgaagagaagacaaagaagaaagtcgatttggtttctcctcaaccaaaaaaggaaaaagagaaagagaacaaaaacaaaaacgatgaagacaaaaaaaaatcagaggagaagaagaaaccagacaacaatgacaaaaaacccaaagaggtaatctcatttgctttttactatattgtttttatctctgaagaatctgattctcaaaaatgtttttgttttgctgattagtataatgagagcatgtttttttgtttctgacatttttgtaatgtttatagactccggtaacaacggcggtgttgaagctgaacttccattgtcaaggttgtattgggaaaatccaaaagactgtcacaaaaaccaaaggttagagacaaaaatctgtacgattcgcgttatcaaaacgcggcgtttgctaacagcggttttgtgaaacgcaggtgttaatggtttatcaatggacaaagagaagaatttgctgacggttcaaggaacaatggatgttataaagctcgctgagattttgagtgagaagctgaaacgtgcggtggagattgtgccgccgaagatagagcaagatatagagaatggtaacgattatggcgagaagaagaaaggtgtcggcggagacggtggtgggaaagagaaaaccggtaacaaaggcggtggtgagggagtgaatatgatggagtacatggcggctcacccagcccacgggtatgggtattacccgggtgaacattaaaaatatccgattcaggcccacgcgccgcagatttttagcggtga

SEQ ID NO: 40559 - DNA, 885 bp, Arabidopsis thaliana landsberg
ctttcatatatccgagggttcttgattagtgatgttagcttttaatttgttttgtacatctagagattggtttcttgactcgatgcaagttgaactaaatgcaaatctgataatatttgttttcatcaaatgatcaaacacataccaaaaacactaaatatacttaatattgataccaaaaaaaagaaagaaaagagatcacacttaagagacatgcagacattataagatacgtcgagcgcataatctatataaaaagcatacaaggcaaaggaagataagttacatttaacagaggaccaaagtccaaacctaataatcttttaatattgcaaacgcttatactcctcccaaaatattatagttgggagaaattaccaaatcaaacgtccttacggatgaatcttactaccatggctcaaagcggcaacttcaccgttgaaaccaccaccaccaccaccgacaccagaccgaccatttgcgcttccgtaaccatatccaccaccacgtgctccaccacctccagaaccatatccatacccggtacctgatcccgatccagatccataaccgtatccggatcctcttccccatcctgttggtgatctacctgagcctgccccgtaaccccatccagatcctggagcagagccccaaccccaattgtactcccaattcggcccacggcccgacccactttcgcctggcatgttacctctcgaccatgcaaacggacgtgaaacagaagtctttgcagtgattaaaaagaaaaaaaccaacaagaaccctttgatcattttcgatatattcttagggtttattttcttttatgttttacttcaaatcttgttttggtatgaaagtattgtaagaaagcttctgcca

SEQ ID NO: 40560 - DNA, 4873 bp, Arabidopsis thaliana landsberg
aggcattagaatgtttgtttgatttaccatgtctattcgtcttttcaatagatgacttcagaagtcctgtgaagtttttcgatcgtttgactggcataagcgttgcgaagttcggcatcatacttgagctctgaatgctgtgaatctttacttacggcagataactgattgcagctctgggattttctatttttctcatgtgctgatttctgactgtagtgctcaaaatcaagggctttttggttctggtctttccccagcctctcggagatgtcacgtttgtcatttttaaagttattctttgttgtattctctgtgtcatcaaacaactgtccaataaaattttggcgttctcgtaggttgtcgtgaccagaagtaaaatgttcctgccctgaaatgccaacttctccatttgcagtgggactggtaccagttgttgtttccattttccagttattatcagaatttttttttctgtcagcgtcagaaccatgaccctcatctgaactgttcccctcgacatcaactgtatcagacccatgaccatcaatatcaactgcatcagaatcatgaccgtcaatgtcaacagcatcagaattatgaccctcgatttcaactgcactagaaccatgacctgggagatcaattgcatcctgttcaagggactgtgttgtcagtagaggctctctgtcaccatcactcatgatatccacgtcctcatcagaaccgtccttactgttagaagaagcctcactatcactgctgctcccactgtcacttccagctgcacttttactgtcactcccactgtcactgttatcactatcactgtcactatcactagagctacgagcctgggcttctctattctcagatcgtttttcctcatgaaaaataccaggtgaatgatgctcaatgtcaacattttcctgcgtactcagttgctctactagatgcacaggtaaacagtctagtgaaccttctccgttctgctcgcacaaagaaaatttctctgtgttatttcttcctggaacaggtaactgatcgcgactgcactcagtgactggcagcaattgttggtgttcaggtgaactgaaaaataaaaattctactaagaacagatacagcaaaaaggggaagacgacacagtagaagtatagaagatgcatatgttgtagtttatagcttctcgagttcactccatactaaattggataataaaattattcaattagagttcaagctacactaaaagaagcaatgttgcttcgtattattctttagattttatcctcatgcacctacttaattttgtaaatacgttttatttatgcgaatatgccgattctactttctagaatttagagtgtcatattctgcagggaaaattcaaaactatcatctacagtacacgtaccttccgctatcaggtgaatgttttttatagctttccaactctgcttctggttttaagaaataccttggagcttggaaatttgcgatctggttatcaacaacaattagggacacaataatacataccaaagaaagaaaaacaccaatcttttcaagacttacccttttcaaaattggttcaatcttctttgcgggattaggaactttatctccaacagctttctctaaagcctagagagaaatggagagagtggcgttaatcgcggaggaaacacatattggattcgaaaatagccataaatctggtgtttcatcaatgtattaccttcaagctcattggagcctcttttaggatatcaacgagcagtgactgcaagtcaatttctttattaacattaattgcttcgcgcccagatgtgtcccttaatacattatttttccaggctgatggttctttttcgatcatgttcactctgccctttgtctggactggtgtgacattctcgttagctgcatgagttttagccatattcccaatcccatatggaggggtattgtattgattactaggagacggtccgggtgaagctgatagcctatttttcatagtaggggtagaagcccctggtctgaaagaaggctttggacctccgactggaactgtcacagtaccacaagtgaaaaactgtagcattagaaaaacagcaagggaatataaatagcatccaacagtatttgaaaccctaatgtgttaccacaggctcgttgcaaagtttgtttatatatacctggtggtggatcaactttccgcttcttaggtggaggttccttcttctgtttatttgacattctccatggacttcctgaaagtacatggtagatgttacaatattattggtatacccaaatataatcacatgctagataataaaaagttttgaacccaaaagataagaaaacctgccacatagtaaaattaagcgcatgggtttcagtttcaaacaagaatggctatctactctcatgttcttaaaccgccgcattgaaaagaaaaggagaaatgttaccttcagcatgagctaactgcttcgttactgatggattcccaggatctaaaacaatggccctgacaaaagcaaaagtataagggtatttcaggcacaaccactttgattagactaaagttatggacacaaaagtatgcaatttgttacacacagtgagaaattttctgtgagtctggctttcacgaaacagctcaaaatacctcaagttgaaaaaatatgagtaagctaaaagagaaacccatttaagccataactaactccaaatgtaagtagagactgacatccacagcagcttagctgcaataagatgaacaatgcgtataccgatagtttgttcacaactccaccaaaggttatatccttatatgctactgtgccaagacccataaaaagactaccctacctatagaagactgcaaaaccagaaaaactaagagagcagacacctttgcagctaaaggacagggtatgcagataaaaagttatagacattgagatgcaacaaaaatgtttggttagaacttgtacttgcgtgatttggttctctgttcagcttcaactgagcgcatcttcatatggcttgtggttgactcatctagagttcgtaggacgttcaattttcgccaagcacatccagcctcaatcagcaaaccatttccatcttcaccactttgatgttcttcatatatatcacataactcacctttctccccagaccaagtaaatttgaactcctttccaccaacattaattatctgtttatatcaagatccaaaacagcttcacggtgtcaaaattcaaaaaaaactaaataaaaacccaaaacgatacctgaaggaaaggcatagtaacaacaaaacccagatgcagtgggagacaaatgaccaaaagaaatgcagaagggcgttgataaattcaattgacaaccagtactaccggcaaaaccacagttatacaaagaaacaaagttaccagtagagtaaagagacaccaaagcagcaattcaatgagtaaaccaacataccatacaatacatgctcaaccaataagcaagtcaacgtctacaaagaattggccaaggaatttatgatacaatagtcacccaagtagcaacggaatcttcatcaacaattctatgcaacaaataatcttctccagggctataatttagaatggcgtaaaaggttttccacaggataggaacagctatagagatgccaaacactattgggttcttgtccaatatcacattaccatctaatttctataggaacaattgtccccaatttcacttatctagggtaccttgattccagtgaattgccaatatgttcgaggggtataaactaccaaaggaagcaaattcaagattcagccaacaaaaaagagcaactagcttgaagcaattcaactcaatctagagaaatcctctatctctagattttagaattcagtagaaactcacattctcagtgctattgttaggaaacgcatcgaacttgatcttggcagctccaccttgtgcctccacacgcttgatctcatccaccaaatcaggagataaccttataatcattccaaaagccgaagaactctccctcggaacaagattaaacgtttcctcaaccgtccgcgacgacaccgtagtcgacgcagccgccttaacgctagtagaattactccgctggcgtggagcggcggagccaccaccaccaccaccagaagacatcctcccgatgggagaaggatgtcggtttgtaggaggagggaatgaattacggttacgggaaggtccactgcccccaccaccacttcctcctctaccgccacgtttcgacgatcctttgaacataattccggtcaaaattactccgccgtcactgcaattgcgttaccaacatgtattgatgcatacgtgtattgtagagattgaactgattgagacgcgcgagcagagaagagagacgagagacgatgatttgaagaaagagagagagagagagggacccaaagagcgcttctgttcttcttcttcttcctcttctttttttttcctttaattttagatttatttttatgtcagcaaaacgctgccgtattgggttttaggtctgttgtctttctgaagcaagatggtgatcaaacccgacccgaatcaacccggatggacccaaccggttcggatactggcatatatagagccgaagaaagaagaagaagggaagttttttttttttgatatagcttgccttggcttcaagaaagaaatcaatctcgtttctcttcagcatcaaacaatgttaacaggtgaaacccgttcccccttcttcgttacgcgatgtatgtaatataaaaaagttgtccctgctgatttaaggaatgatggttca

SEQ ID NO: 40561 - DNA, 497 bp, Arabidopsis thaliana landsberg
agaagatgcgatgatataaaccatgaaaaagcacaaccgcacagttttgctgttggtatcaaaacaaaagagaagaggagatacagtgagaagaaccagcaaaacaaaacagttgcaactactcatgaacacgacgtcttaactaatgatggaagaacagaagcccgcgattctgatttcggtgagggaagaagtgggcaaggatgtttccatgagaataaccagcaaacgaaagtgtcgtctactgaaagatgcgagcaggaaatccctaggaccaataaaagagtgtcactcggttctggattaggggaggggcgatatcgggagggaagacatattgaaaagaatcagcataccgaaactgttaaaactgaaactcatgggaaggaagtttctaaggataggaagagaaagcgggaaagaggagtggaaagagatggggatgagttctatttggcggagaatcaagacagacaatgccaagctgatatgagaaa

SEQ ID NO: 40562 - DNA, 667 bp, Arabidopsis thaliana landsberg
tttccaacaagattcaccacctcttgggccatgcagatcaagacgacgataacggccaggaccaagacaagaacaaggctatagtcctctacagcagcaaggcatccacaatggctcatcatgaggaatatgacgttcacgaggaggaaagcgacaagtatcctgatctgaggcacacgttgttcgaaggagaggaggacttcggggacttggaggaggaaggtcaaggtagttctgtgatagatatggtgaggacctcgaaggaagaagaaggagagaatttcaagctagaagatgagatcaaccatgtcgcggatctctttatttctaggtttcataagcagatgaagcttcagaaactcttgtccttcaagaggtatcaagaaatgctagcccgaggcacctaaacccatatccatattaatatgttggcaatagatatgaataatagattcatattatgatctttgctaacgtacgttcttattttgtgttgtctttgataaatccttcgagttcccttattttctaggatcgaaatattacggtctcttaattagatgtgttttcatttacatgttgaagttgaggaaggactgttttgtggatatgtttcttcatcttgaggcgtgctgtgaagatcttgagtgtacatatgagcatatgt

SEQ ID NO: 40563 - DNA, 320 bp, Arabidopsis thaliana landsberg
  unsure (1)..(320): unsure at all n locations
taacatttttacggtaccaagatatataaattttttcaattttttttaacaacaaatttgtcatttttgtccgatgtgaaattgaccattttgtatagactatttcaaatctatacattgaacataaaatttaatggatatatcgcccnnnnnnnnnnnnnnnnnnnnnncatatatatttggagactttttttttatatccatcccttagcgactaactaatttacttcaaattttttgaatgaatttcaaaatacttcaattagatttatatttgacacattaatctacttaaaaccattgctttggtgataactttg

SEQ ID NO: 40564 - DNA, 525 bp, Arabidopsis thaliana landsberg
ttcagcttccaccatttttgtgattctacaaacctccgagaagaagaaaaaaaaacctaaaactctttactgtttgaagagtgtgggaggagactgtgacgaataaaagcgtgtgcttcagatttaatcccaccccttgatttaaaacatttaatccagtccgtttgattcgggtctgggcctcgagtaggtaaccgtccacggtggaaaatcaaactatttattttgtagcagatgtaacatatttggcgtggaactaacggtcgttaattaatgtgaatattcccgataacgtctccgttagtggaacgttagatgtcggcggataggatccagcattgggcccatttatgggattgttggtacagtattaaggcccatttattactgatccatttcatagtaaaaataaaaaattgttaggcatagtaaaattgttatgagaatatgttgatagaatgaaaatgctcctagatgaaagatgatcatacacctgttgattaaacattacaaggacacagatta

SEQ ID NO: 40565 - DNA, 609 bp, Arabidopsis thaliana landsberg
atatcttgattacaaataacactgttgaaaagaacagtaaagagagatagtgatttgttttttctgcctcttcggaaccccgaaacgatgtggcaaaaacattacattcttatttgtatacatattcggatatagtgccaaatctaaatgcttattctatagtcacgtgtgaaatgtattgtacttaactattcagtgagtcatgcataatatggtttaaacttttggaatagattagatgctctgtattttctaaactatatcaactaaacaaataattaggaaatatttttagtcaaatggttaacggtaagtcattaaaccgaaacgtccacaaatgacgaagatcctaggatatttgtaaaaatttagtactttttaaaaacaaggacgaaacgttcgaactacttttttttgggctacgttggttttttgttatatagtcaacaaaaaacttaaagaaaatggtgtagttgttatgccaattgtcaagctaaaagaaaaataagagattcccgatcttctgttctgtcaaatcaaatctataagtctatctaccgttcggggaatgtaataatattcagtaaagatgtcatgtcttaaagaaac

SEQ ID NO: 40566 - DNA, 284 bp, Arabidopsis thaliana landsberg
  unsure (1)..(284): unsure at all n locations
nnnnnnnnnnnnnnnnnnnnnnnnnnnnnnnnnnnggaggctttttctttttcatccttgctttgtttcgccgttagatttgggttgtgttactttgcggtttggtggtgggtcgattctcagaaagcatggctttgctacatttctgcgtctttcgggaactttttagttaggtaaattttgcatgttttggccaaactttagttctttgtgttgtcagtcactgtcaatgagcttgtaattatttttttggatactttggtttatcgaattctggttgactc

SEQ ID NO: 40567 - DNA, 650 bp, Arabidopsis thaliana landsberg
gagcacgaacacttccgacatgttcggcacatctagccctgtcaacgattcaggtatcgacccgaacaagatgtttggcggtgcagaccgtaaacccccgaccaccatcgtcaatctcagcgaagcactagcgcatctaccgactgccaagcagtacccgatgccgactattcccgagcgattttctccgtcattcgggcgttgggggcactacgtgcttcccgatgttgacggcaagcccggaacatccacatacccccgtgtcaccactatcggtaagactttggatgacacagagttcttggataagtggaaaacagggaagctcatccaaggattgagcaagttccgagatgtactcgacttgatcgacccgcaagctctcgcggacggtgatcgtactgccagcgacacggagaacgccctagcagaacgtgtacgcgaagctgtgggaggtagtgacgcgggaaggttcggagacagcgttcacgcctggacagagttcatcgaccttgggctgggcaccattgatgaatgtcctgacgttgtgcgctcctacgttcaggcatacctgaacgcctgccgtgcggcgggtattcgtgcggaaccgcgttacgtagaacgaatccgccacaccgcgctacaggagc

SEQ ID NO: 40568 - DNA, 559 bp, Arabidopsis thaliana landsberg
cacctcaagtctatattttccaggcaatatgtccgtaaatagaaattgactgctctcgtcggttaaagcaggggtttttttgtcacgatcaccagcccctcccacaagcaccactgagacagaaggaccacatttctccttgcaagtaacagaaccatgcacattgactctggcctgcatcaacacccaaaaaaagtttaacagaaagaaaacatcctgaacatgtggaagtatattggccatccaactcctatatatacaatgctacaaaaacatttccaagagagtagagtcattcaaagcgaatcacctgagagaattctatgttcaacaaaggacttttaacggcaacatcaacataagctggcaaaaacagaagctcagaagcaccctttggtgtagcagccaaagcagacagcctatattcgcctggtggaacctggaatatatatgatggaaataaaataaatagatgaaaaagaatgtgttacagagtaagaaataaagaactcagtcataaacagagaagcaacgagatcccacataagccagaaacaac

SEQ ID NO: 40569 - DNA, 878 bp, Arabidopsis thaliana landsberg
aaaattaatgaagataaacctcatcatagaccaaaaagaatcaatacgtgtttttgttgcggatgctttagtagaaagagcgatagtaggcagagcgttggggtcagatgttttcctcgcacaagcgagtagaagtgacataagagatattccatcgctatagatacgtcaactgaatcttcaagcaaaatgaatataaattcagatacagtgaaatgaattctttaatacttattttgaagaaattatacacatatatcgtaaatatgtgtgagaattccatttttacttgttacatagcaagttgggcgtagggataaactatatgatgaccaatataccagagaagcgagggaacttgatcactgagttcatgattcaataatattgttctagtttaagtagttgatcaattcgcttcacatgatattacatatgaattaatagtaaatactattttcaatctttttttggtattctaatattcttgttgttcttatatcctcatcatcgttattatactacttttggctattattttcttgtttaataatttctcaatatgatgaattgggttcgcatgaaaaaccgatcgacattatagaatttttgaaatcgcaaggttttgcaatcgttcccgacaagagtttgcgttaaggatctaggctttagatctttactttgactgaatttaaaattctataaagactcctgataatactagtagtagatttttttgctagataagtatatatcggtggttgtagttatttttttttgctcaaacatcagttttgtttttctttggccttcttctgtctttaaatatttcattaaagacttttgatttctcctgtcatgtcagatgtgatcatttc

SEQ ID NO: 40570 - DNA, 460 bp, Arabidopsis thaliana landsberg
  unsure (1)..(460): unsure at all n locations
ctgcgtgtcctcgcgtaacgcgggcacctgcgagcgatcccannnnnnnnnnnnnnnnnnnnntgttcaggccgaaggcggggaggactgcgtttcgnnnnnnnnnnnnnnnnnnnnnnnnnnnnnnnnnnnnnnnnnnnnnnnnnnnnnnnnnnnnnnnnnnnnnnnnnnnnnnnnnnnnnnnnnnnnnnnnnncatcgcagacggccgcaagtcacagatgatagtgtcatgtggctttactcttgggagaaagctaaaagttacaaacaacctgcttactctgatggtttccgcataccattggtgatcaaaataaagtcatcttcaggctcaaaagccaagatggcatcgataataccaattactgattgtgacggagaggtttcagtcttcgcggcaatgagttgctgctttaagctttttattccagaataatagccatactcccataattgcg

SEQ ID NO: 40571 - DNA, 753 bp, Arabidopsis thaliana landsberg
tattgactctgactttgaggaaatggtatcgtttaggcagaaactgtgtggagtggttggagctctagtggttgtagttagctctatgccaattgctgggccattgttagtttggtttggtttattaatatatgtgtttggattctcgtttagacaaatcataagggtctactttagatgtagcggttctctattattagtttttgtttcatgtgaggataatatagaaaatttctttgtttgacgtgcgggtggttcttttgggtttgatgctcaataaactaatcgaactctggtttggttagagaatggaatcttatcatgcttttgtctcgtttagctagaggatggaatcttagcattgtttaagtttctttttggttggattcaattggttaggggagttgttggatttattttgatcaaagaaacgcattgcttcagaggacttgaaaattaggaatctatcatcatgtctaagtgtttgagaaatgataacacaatgctacaaatgttctgcagggttcttctgttcttcccattcggtttctcaatcaagaaactcattctcatgatatcttcaactctgattctacttttgtgacatcatcacgcgctgaaccaacgatgttgtcaagtagatgtcgtggccatcttccacgctcttaccctgatgatcttaccgaggtagaatgttcttgccaaataggtgccttgtctttcttgcatctggtaaaatgttattagatttga

SEQ ID NO: 40572 - DNA, 505 bp, Arabidopsis thaliana landsberg
tttattgcgcatttagagtcattatgtaataatcaagggaagtacacagtatcacagtctctgattggtcgctgtacgaacatttctatcagaattctgaaacttctaaccagggccaatattttcagaatttaacttttacatttggattttgatttaactgcaaccgtttgccaaacttttactcaatagtttggaaaaccatataaatttatacagtgatgatactgaagccaaacgaaaatcaactatgttgttgaacttagataatgacaagatcagtatacagcttactttgttatctttgtagggaaagtgaatggtaagcccttgaggtcatcacggttgaagttgagaactggttgaggaggcttaggtattccgccctgcataaagcgaacgcaagaatgtagtcaattattccgagcccactcccctgtatcaccagtgatgtgatctataataccaaaaactgaagaattagagcaagcgcgatagtaggatc

SEQ ID NO: 40573 - DNA, 797 bp, Arabidopsis thaliana landsberg
agagccttttttttatttggcacaaaggagaagaaactgtgagaatttgttccctaagagtcgatggctaaagatcgtcggacaaatcgacctttcattctcggccttttgtcggcgttaacctttctaacctcgtaccttatcttcttctcgaacaaacgattcttccttttatctctgtatctccaaactctagcttctctctcacttcttactctcttctcctctatcccctgcaatcaacaaccattacaataagtttctttgatagattgggttcaattttctcaatttgaaacaatataatatcatttttgtaagaactcggaagattaggcgcttactggaggaactagctggaagctacttgtgttgttttttacatctctaggagattcttgtttatcccaagctgctataacattttcgtaattcagtctaagtaacatgttcctctggcttgcattattctcataacaatcttcaatttcttctgtctttgctgaaaccgttatgacattgtcgtaatctttcttgcagctcatcaaatattgtccaggacatgcttcagctccatcagttttatcttcttcttctccattgtaatatagatcctccattgtgtcagcttcttcttcaaagttgaattgtttcgttgtttcttcagttccattgtggctgctcaagaagaattccatccatgttaattccctcaaactctgtcacatgagaagccatatcatcatcatttgcttctcgtatgataaccatcacatccctattcaatcttcgggaaa

SEQ ID NO: 40574 - DNA, 652 bp, Arabidopsis thaliana landsberg
  unsure (1)..(652): unsure at all n locations
gtctcacaataacctggaaaaaaacaaggaacaggatatgaaatcaagcagtttatgtaatctgatattataacatggatacttgttaaggaaaacatacctccttgagtgaatgaaggagaatatattgctttttctgttgattatcgatctggtccaatataaacggtagataattggatagattgccaacggcaatgtttccaagagcatatgaagctgcggactttatttcttcaaaaggagattggaaagactcaatgacgattgtttcaatgccagcatgtgcgctgagatctttccttctcccaatctcaccaagagataacagggcaagatgttgttttgcctgcacgagaaaacatcagtacaaaaataagcctttaagtagctgtagatctactaaggaagataaagcctgaatctaattccctaatggctctcaaactaacaaaaattcaaagtgcttactgaatttgtgccgctgtcatctttaaggatttccatgagcattttaactgtagacgaacaattcttatcacccgctgcgagacaaagaaccgccacacactgtgcaattgaatatagtgcttgctttgggacacctncagactgaggagaaggcttagcacaagatagcaatgattccagc

SEQ ID NO: 40575 - DNA, 893 bp, Arabidopsis thaliana landsberg
gcatggtgacggtggtatagtgcaccattgactatggaaaccgacaccataagcttactacaaattcacatgcgagtcaactgtgtgcaaacattcatctctatacattatgaattactattcaaatgtcttatctgagatgagattgacaaaaacttcctacaaaaaaacatgttcactctctagattaatcactaatcacttcgacgagaaaatttattaaatgtgaaatacatatataagatacaatgcatgcatcctttttatttgagtttaaaaaaaaaacaaaccgactactataagtatagagggaacaatccacctaatctacaatagaaaacgatataaggaacacaatacaagtattgcttttctttttctctctatactctttcacatttgctgaggtattcatgaaaacttaacataatgtaactattatatcctaagaaatatatatatatataatactttgttatacaaatgtaaacaaaaagcagatcatacaagccacttttagttatgacaacaactttatatgagatccacattgtataagatttataggtccaccattttgacctttcgaacccaaaattgtaggaaaagtttgaaacgtaacatatattatatggcgtaaaaaatctaaacaaagataatcaaaacaaaacatcaaggaggcaatgtacatgtgttaggtttcttctgtcgcttaaattgttacaagatcgagtacaaaaattaaactaaatgtaatactggatgatgcttcggtagtaatgacgtctaatttccgtctgattgcatgctaatccagatatgtacatccaattatctggataatatatacataacattcatattgtctaaatgatcgtttaatacaataatta

SEQ ID NO: 40576 - DNA, 796 bp, Arabidopsis thaliana landsberg
agttttaagatcctcctatacttgaagtaattctccagagacaactacgtgattcagtgattgctgacaaaacctagaacaacgcaagtgccaaccctcataaaacgaccattgaacttacagctaccacaggagcccataaactggcaacagtcagagcattgtagttttctgcaacgaggtaaaaaaaaatattagagcatgcgaaacttagtacaccaaaaaaatttcacggagaacgatatattactctagattatcagaacagcccttaacacaaaacccaatagtagagttaataacatccctagaaggaccttactgaatattttttgagttcggctttgatgtcctataccgcgaacaagcataggtgtacaattccagagagaactaacagactacaccacaatccttctagcaactaggcttactaaatattaagcatcgtaatgaaaaagcaatgtctatggtcaactctactcacgaaacaaaatctacaaattccatacttacttctcgacacaaaatcatgccaggagtacggaatattgttctgtttcactatcatccttgtggggccaacgagcggcttaatctgcaaatttatcagcataagaaaaataagtaattcgagtcgcactttaactgcccaacaaagcatcttgccatgtttatcgaataattacttcaacatgtgactacaagagatcacaataaagagaaatatccgtcaattcttagatgaatatttttctttctgtaataaaattcacgcctgcattcataaattact

SEQ ID NO: 40577 - DNA, 229 bp, Arabidopsis thaliana landsberg
  unsure (1)..(229): unsure at all n locations
ctattaatcacactagactagtatacgggggtgatatacacctaaacagggtgcggtggtctaatcagtaccatgcatcgttaattattaagaagccatgaacnnnnnnnnnnnnnnnnnnnnnnnnnnnnnnnnnnnnnnnnnnnnnngaacttccatctcccagggctaagaagagggtatcttgttgtggatcacatatgatgcgatcatttataaccgtcacgaa

SEQ ID NO: 40578 - DNA, 930 bp, Arabidopsis thaliana landsberg
  unsure (1)..(930): unsure at all n locations
gtagcatgcgaaaacataacgagcaatgaaactctccattcgatcttgccactgtcccgagactgtagcaattaaaacagaccagtttgtagagtatttggccttgtaaatcttttttgctatgttttctcatatttctgctgcaaaccaaattcatatattttctgtaccgatagtttttgtttttctttaaccaatttcaactattttctatttcggtgacaaatttttaacccgaataaacaaaaaaaattgattacaccgatctaaataaactgaaccgactaagtttatgcatgagacatagtgttttgattttacgagaatttattgatatggcgaatgataaaaatatatatttttaataaaatgctaaaatctagtttttgtaaattgaagaccttttgtcaaatttttattttaacactaaatcaaatggtagatatgagatatcaaattgcaataatggagcaagaactttctaaacacaatgaatatacttttttaaaaatatattaaaatatcagaacttttcagcaatggaaaatggaaatagttataagtctctcacaaccaattaatgtgatgactatataatagtttataatacatactttttgtgaaaagaaaaaccaaaaaaggaataaaatttgacgaaattgattaatatttttggtggaaaaataatagtgaaagagagagagagataagaccaaagaaggacagaaagatatttttaaaataccaaaaaaaaggaaataatcaaataaaattagaaaattccaagagggttccttgaacccaacgcttcttcttaggctcggngctggttcgggattaggttcggaaatattatacattgtcgacattggtaggataagtaggactctttctcattgctnttcgcttcgtcttcttctctctaaaact

SEQ ID NO: 40579 - DNA, 720 bp, Arabidopsis thaliana landsberg
tatagtatgaattagtgtcacttggccaaccagaagctccaccttctgaaccatactgatcaaacaaaagataaaaattgtcattttacttatgtcaagagtgattgtaaagataactgatctagaggtttctagcctacttaaagcaaaataatttggatacttctaaaattgtataggcctcaaaatatgtatctttgtgctcacctgcaattgcgccatctcagcatctgtatcagtgaaagccatgaagtcgttgaagaaagcatcctctggtgctgcagactgcagcattttagcagatgaaaatatcccatttggtgagactgctggattctctcgactgatcgattcctcgcaagagaagtcatcagggttattgaacacctcctccaacaattctgttagtgatacatctggttcgctggtaccatcttgaaattggaatccaatctcatcgtaactgaaatcaccagcatatatagaatccatacacggtagtggtgccttttgatcttcaaggtcacaagataaccaaagattctcttcaggtgcctatgaacacaaaactcaaaattagtcaagtcactcaaaaaagcctaattaattattcaagagtttccattcatacctcaatcattgtcccatctgcggtactattactatgagcataaccgcatccacctgaataatctgatggtttctcaacagcagcatcag

SEQ ID NO: 40580 - DNA, 587 bp, Arabidopsis thaliana landsberg
atatacgtccaaaatttgtgtttctactttaattggctcatgtctctttcagtttaagtcgtatttcatttagatgtgaactaatcatctaactactgataatattttcatactttttttcctttataatataagtattatcagcttttatatgtttcatggaagtgatcaagtgaatgataacgtgggttgacaataaaacgggcgaactggctttggttacatcaattaatcaccatacatattttactttttaacagtttggccgttcctaagaaaaatgaagcagtttataatgaaacaaaaaaaaaactcgattattttgcttttcttgcatataaaaggcatttttgaaaatagaatttagcagcagcctagatgatcgttgtactatgttttaacatgcaacaacgtatatcatcatttaacatgtgactgccaaggccttgcgatacttttattagtcaagataatattgatagataatcattacgaaagagagagaaagacggatcgtattaagcaataattttattcgattgtgtaacgagattccacgttcacatatcaggatgtttgacgggtgt

SEQ ID NO: 40581 - DNA, 567 bp, Arabidopsis thaliana landsberg
tctctcgtgaatccaaaaaccatagatatgaaaagccctccggaacatgaagacaccacccattttccaaacgcgttaggtttgtgtcatatatggaaagtcgcctatctcatcccttgtgtgccttcgagagctatacattaaaaccaagacagccagtttacaagattcctccccacaagagccaaactgtaccttaacacatgggaaaccttcagacccaagacttgccttttacggagccaagcacattcaaacaccaacggttctttcctttgcatctctcatgcgttttggatgctttttcagtgcatctagatatccaaagaaacttcgcactcaagctctcaagactaaacatactttccttatctcgaccgatttcacattaaaactccaacggcttgttttctttatttagtttcttattttaggattttagaatgctgattaagctcaggttttccccattgtaaaacccaagtatcgttcaagtctttttgcaataaacctttgtgttttggttaaatacgtgtagtcttttgtgtccttgtcaattcaaatcta

SEQ ID NO: 40582 - DNA, 724 bp, Arabidopsis thaliana landsberg
atgtccatttcaattaccatttattgtgcagactattaactatggctttactctacatttataaaggattgggcatgactattatcttatttcaataatctgcataactttttttttaaaggatcaaaagaagattgaataacatgcaagttcatttttgaaattttattatcaaaaacatggaagttcttaaaattaaaattacaaagcatattaagttggtaattaattctgtagttacttactaagttgtaccataatattattttttgtccgtgtaataatcaaccgtagctgaaatatgttaagacaaacaaaattacttgatgatgacacttgtgggtagttaatttggcttctttagagacatgtccaataatagaataagatccgagttgtgtgctcgttagagaaatcgggagtcctaaggaccagcgagcgagagagattcaaaaatagaaatttcacgtaaagagaattagaggtgcagcgtgaaaagaggcaacaattccgtgcataccaaggtaccttcacctgcataaataggtattcacaacatcaccaaaagattcgtcaagagcaagagaacatagtttcttcttgcttttgagaaaaaataattatatatttttatataggaaagggttaatttattaataaaaaaaataaaaagaagccgaaaagagataatgcagggtggtaggcttttgacggtgttggtgtg

SEQ ID NO: 40583 - DNA, 635 bp, Arabidopsis thaliana landsberg
atcattaattatttagtttatcgtaatttggtcaaagcttcatggtggcactaactcaatatgcatgaacctggtctagactcttacagtaggttatagttagtttaaagttgtcgctgctttttgatcaagaattctaaaattagttgagcactgtatagtttattaatttgtttctcactttcactattctttcctttaaaacaaaacctactgaataatattttgaacccatccaatgttcaatgactgaaggacatatacatggtaaacgttggtacggagatctataacaattttcgtgacagaataatgcataatgtgacaagcatatcgataggcgcacccagtcagaaagagacaagatcagtttctcctctagggactacgggtgtttaatctgatcggaaccgaaatattcaatccaaaaatcgcatcatttcgaaaatagagtttaaatgaatccatgttttctatatccgatgaatgaatgtgaatacgaaaatcgcgccaaagaatcaatatggaaaagtcttgatctataatcgacagatcttaaaaaagtatagatacttttgactaaatcgagattccaaactgaaattgcaccaacttccggtctgtctcgacgatgg

SEQ ID NO: 40584 - DNA, 530 bp, Arabidopsis thaliana landsberg
ttccggaaaacttcttgaaaacttccacaagctactggtagctttttgattttggataccgcttcatgatgctacattgcgctttttgaagctgttgagagcttcttcaaatgataacgaatcaaactattaattccaagatgttgggtatataagatcatatatagaaatagtacattttaatgcatgagaatattaaaaaccgtatcatatggtttagattttagacaacgctcttgattcttggtcattagaacctctcccaaaaacaaaaacaaaaacaaagctaattgcaaaaaacttgaaggcaatgaatggtgcatgcgttttgttcaaagccaagccattattccaagttccaacacctatcttaccgacttcagtttctttttcagttttcatcaatctctaatttttactctttttatctccttcatggagaaaatgaaacaaataaagtaatcaatgtaattctcaggtttaagccaaaacaaacacacaaaattagttaatggaagaagggcacgcgg

SEQ ID NO: 40585 - DNA, 786 bp, Arabidopsis thaliana landsberg
ggggggacagttgataaaacattttcgatctccaaaatatgccttccatcgaacggcttcttctactgtaggtgcgaggaagcggaaatcctggcggcttctctttggtttcgtgaagcaagacaggccacaagaacccttgcctattggataagcatgcacagtgaaatgcctaagaccaacattgtatgtcacctggaaaacatagataagtttgttgactcagttctccaaaacacagagttaattagttcattgcaaggccaacaaaaacctaccgagacaacatcgttaagctgtagcatgtcagaaccccaaaccaaagcgctgcttgtaagctttgcatcaactgctttcttaatagagatgtccgtagcggctggttgctgtatctctgttgcatcttttccactcgcagatttcctcttatccaacacaagcttcccagcgtaaacaagactacctaacaaatctgatttctcatcccctccaccaatatcgatccgatgctcatcaggcttcggtttcacctgtggatcattagtaacctcaccacgtctcgaagatgccttcaccttcttatttctcttttcagggaatactataggagatgactgctgagatccacccgtagctatttgggagcaaaaacctaaacgtctaagcgactgttgtgcctgaggaatggctactttcaaagaagggttccgattaacaccactcttctgcatatccgtacactaacaatctctctgctcttgagttccgcggacgaaacagacgaca

SEQ ID NO: 40586 - DNA, 473 bp, Arabidopsis thaliana landsberg
gtttgatcaacataaagcaattgatttcatcgatctcaatgatctttaacgatttttgcttttaggagacatcaattcaatgacagcgcaggagaaacaaaaataaaaataagaagattctagagaaggaggtgggtagttttacaaaacgacgaccctttgagtttcgatgtattcctcattgagaagacaacaaccactcatcttgtctgcgactagtcgacaaatgtggggagatgagttagcaaaaaaatatggtgtgaagtggctatgaggtggggactccatagttgtttgacgacgacgtttcgtgaccagccgatggaacattgttctttctcctgtttcttcttccgccattgtttttccctttcttgaactcttgctgatggtccacctgctgatccaccaacaccaattcatcattcatcaagaagagtattataaagtgactctaaagaggaagagttgaa

SEQ ID NO: 40587 - DNA, 545 bp, Arabidopsis thaliana landsberg
atttctctgacgataaaacaagtacatatttttccacgaacgacgaaaaggtttatatggaccgtggacattccgtttggtctgcaggtcacgggaaacaacttaaatcatttgcatcaatcttcacatgcttttacgccatctgctgtgagatcatattactttattttatgtcaaaatacaagattttggacagtacaagacatgtaatattggctgtttcttagtataatttagttgtttaggatcctgcttattttattttagtgtttttggtatggttgtttaggaatattgcactagatttcgcatattattactcaaaagaaatcaccttatatacgggaacaaatttcatatcactatttaaaatttcgttttttactatagtactattacatgtagaaataatcttactgtcgacataaagaaatgatacttattagaaatgtaaactgaatatatacattttcctagacctattatggagggttctattatttaagaggagatatcagaaaatattattaatcagtcatatgata

SEQ ID NO: 40588 - DNA, 585 bp, Arabidopsis thaliana landsberg
  unsure (1)..(585): unsure at all n locations
caaaatataaggggatggggtcacatttatcaattaactctgtatagcaaagtgattgatcacagatcaagttgaatatatatttacctttctaagagattacaaatcggtgattgatcaaactatagaccaaagatacacaaccaactctcatggagcttcacgagaaactcctcagtcagacacacaatttatttctcctcatctcttagaattctcatattgtctatccaatttcgtttagtgtgtctgactcaaaaacactcgagtatcgtcaaaagtaacgtcagcagtattatattgtagcgtacgttattcttctagtattttttattacaaagaaaactaaactgtaacattagatttttgtcattgaaacccatctatataaaccaatcagcatcactttgaaaaccatcgtaataacgtgtttaacaaaatacctttatttctacgtctaatatttgacttggtttaagtagtttagagactgttcttacgagacacanaaatcaaaaaactcttgttctacacaaccgatataaaccgatgtcaattctttgctttcaaaattaatgaactttt

SEQ ID NO: 40589 - DNA, 1068 bp, Arabidopsis thaliana landsberg
  unsure (1)..(1068): unsure at all n locations
aattaatattaatattatgtatatttacaatataaaaaaacaatactcattattttatgtatattaagttggacataatatctaattatataaaaaatattatgtatacttacaataaattaattagagacaacatccaatcaattttggttttctttggaaacaaacatgtcaatcttcttctaaatatctcagtcacagatcgtaaagatcctacttttaagcaatccatagcagccttacaagtaaagcactattctcaccaacatatcaaaaggacatcagtntcagtttaatcaaccacaacanagtttctgaatccgcaattagatatatttggagcgtanatgtttccaaggatcttttgttaacggtcacataagaccatacaattaagaactntntataaccttatttggaccaccaactattgtataactgagtcccacaaggaactccatcaagacatatgtcaatgtcaaaacgatattgttttataaccccatgtgttaatctagtggcaaagcaatatatgcgcaaggcgagaagtgtggagccatggaccacaaagactatagccgaaaaaatgtaagaacaatatggacattataccttcatcatggaaagaaaagcagctactcattgtttataagcatcatcgtaggcggagagtagactcttattgtctaaagacgaagagaggatccgcgatgagctagaaatggaaatcgaaagaaatttgggaggggaattcaaggacgggatctacaatctcgcactcaagctgcgtcgactttatgaacaaagacgagaaagagaggagttgtccgatgtttcaatgagaaagagcaagagagtattggaggtgaacataaatataaagatggaaggagataccaagattgagatcacagagaagaagaaggaagtagacaacgaaaagacgaaaaaggcagagaattcggacaagagaaagaagtttgtagcagtgggtgaagataaaacaggaaaagaaaagatgaagaatcaaacgagggctcatgagctcagatggaaatggtaaagaga

SEQ ID NO: 40590 - DNA, 607 bp, Arabidopsis thaliana landsberg
gaaaacagatgacttaatggacatagaggaacttctcttctgttggaagaattttattagtcctgtcttcattgaacttgtctcaagattttatggagaactctgtagagacttgttttcaggtgaatgaacagatctagttaaattgatcaaaacaaaaatgttttaaatctgtatctgtcagtacttgtggtttgacaattattgaatacaacatctaaggtttctaagtttaaagttgggaacaatgtgtgaagactataaaagattgtatgtttcggtcaataccggtcggaccggttcaaccggatttacttaccaaactcgtctcttgcaattttattgttgaataaaaaaattatcacaactgtgtggacacgtgtggttctccgtcctcactcctcaagcccctttcattttatcccaactgtgtctggtctgattaatgaaaaaataaaacaaattcgaagaaatataaatgagatttttgtagctagctcctccaaatccaaatcgttgcgttaaggtttcttcaagtttcaatctttttgcaatgaattgcccagccatgactgcttctccttcttcttcctcttcttcttcctac

SEQ ID NO: 40591 - DNA, 778 bp, Arabidopsis thaliana landsberg
atcaccatcatatcattatcatcatacaataatcatcactatcatcttctctttttgttcaaaaaaaaaaatatatcatcttctcacgtatgatcatcatcaatccatcaccattcccaacaattttatatgattaacaagttgtggtccttctagagttaatatatttttgtgttgatccttcttctggtccttagttgtgatacatttttcctttagatttttttttccgaaatgaaacatgaagaacatactttaaaaaaaatcatagtgaatattaaacaaaaaatataaattcatgattaagcaaaaaatgaaatatgcaaattgcattttcattgatcactaatgaattatacatttgtggatattttgctactccatttatatataattttaaaatctatatttgccatattccatgaatgaaacacatttatctcctgtgtcttcaccaagccataactcttctcttcagctccttcctacaaatacacaaacaaatcaacacattgttaagaccaaaatctatgcagaaaccgaagttttccaaaccggtactgactcaatcaaagtgttaaacgggtgaacttgcctgttatagaaccggaaactatataatcaatgactaaaccagagtgttaaactgaggagttacctcataagttggcggtctaaagcacctgtggacatcataccccgattctcatatgcccgccggataaggtatggaattgcagtatcaaccggcccgtatggcatgtacttactcacattg

SEQ ID NO: 40592 - DNA, 849 bp, Arabidopsis thaliana landsberg
cgcagattcagcatctcaaggatgcgattgagaagcttttgatcttttgatttctgctcagtatgaagagtctctgcaatggggaatggctctgactgaagttagtttgtgtgatttacctatttgaagaatgtattgtgactggtgttaatgcttagtatgtggatcatcatcgctcatttgtgcaattgagtttcttagatttttattttggtgcttgccaagcactgcttggtttgtgttgagacataacaggtaaagagccgtcatggttctttaactgtctgtttattacactaacgatctatccttaagtcccattacgaaaaaatcgaaaattattcttatcttccaacacttgctacatttttcatcgctttgctttgtccacaaacaaacacattcttttattcgtttgttccagacttcacttatacaaatgaaaatctatgttcttcacaaagctttttataaagtattgcaatcttatgtagtcagcaaaaccatcctccattttacaagcaatggcatcctcatatatgtcaattacgcaaacaatgttttcatctaaactatgttcagggataaatagctttagctcatgctcaatttacacgaagaattctcgcgtgtcaattcgaaagggttctaccaacacgagttttcatctggatctatcacactcacatcgaagcactttgaagcattacacaagggtaagaaaatcggaatcagattgggaagagagcatagatgaagagaaatcagatcaggaagagagagaagatgaagagaatgacgataataaggaacactatcgagcgaaggagacgattctatagcaaaaca

SEQ ID NO: 40593 - DNA, 859 bp, Arabidopsis thaliana landsberg
agttttttcaatttacaagatttgatcatgatatgttaatttctatttgcatcatcttgtaaaaagtttaacatgctttcgagacaataattctaatcccttcatgtggaaccaaatctcaagattggacatgcaacatatcattcttaggttactccacccggatcaataacctagattctcaagtttaatagagaccctaactcaaaactaaataacaattaatgaattagtgtatctcatttaaatattactttagattccatctaactttagatgtaggatcctaacaatagaacatactatagttcattacatatcttaaattttatcaatgaatgatagtatttgtatatagatcaaaatattgttgaacaagaaaagctgatcggatatttatttggttgtttgttataaagatcataatcaaaagagaaacataacttttgaaatattgtttgaatatcaaatcgttttcagttactctcttcataaagagcaagtcattttctcacattattcatcgatgatcgatccgtgacacataaaccaatctttcacaaaagcaaatgaagaaactatctcgaaagatagggaaagaaacctacaaaagttataaaaaaacgcatctatttagagaaacttttgtcctattaacaaccaccattattattgttccatatttgggattcaattattgaacattgatccaagaaattataaaatcagaaacgaaatggagacagaaaatgatcattatggtctagagtcaagtggtgttgccactaagtgtgtgtgtgtatggttctactaagcacatgggtggtgttgtctctttgcttactacaccagctaatag

SEQ ID NO: 40594 - DNA, 616 bp, Arabidopsis thaliana landsberg
gaatccacagtaccaaagcaaacctagcacacctggtcaagaacaatcaaaacataactagttaatacaaaataaacaatgccaataacaatgttgcccaaacgagaggtttgagaatcttcaaaggaatctaatgcaaactacgtttcacaagtgatccaagagaagctaaggttaacaaaagagagccttcaatgaattgaggactaattatatcaacctctaatacatttagtgttgcagagtaatgcaaaatcacaaccatgtccaatcactttgcctacacgaatcatctgtacaatttctagataacatcttatcattcaccaaaaaactaaaattacaaaaaaatatcactttaactccataagcattcaagtttcagtaagaatacacagtttagcaaacaattcaacacctaaaaccccttcaatcactatccaatgaaaacgcccaattttttactagctaggccttcaaacaccaaagcgattcaataacataaacccagatggaaaaatctcctaaaaccaccaaaagaacaaaacttgagaaagaagaagagataattattacttacagggaaccctagttgacgacgaaacagagagaaaag

SEQ ID NO: 40595 - DNA, 781 bp, Arabidopsis thaliana landsberg
tttagataacaatccagtcctttcgatttctcctccagtaaaggttgagtcactgttgtttcagagctcttaacggaaccagagtcctcatcctccaaatgtctcacagaagctgaatcttcgattgcgataaccgaaccaaaaggcataccgaactctgaactcaattgctgagacattgtaagaagagcctcagaatcctttatcgattctgaatcattcacagcgcgaacagagttaaattcatctccgcaaaggtatgatctaaccgagctccatcgtttcttctctcctagattgcctcttccctgaaaacattacaacatttgaagtagtagataaaacaaaaaccagaacgatgatgggtttttgatgaaaatgacaaccacatacattgttgtagtcatgagctccaaatgatttgttcctgaagaaaatgcttctgactaatcctcctgtaacacccattgtttctctctatgtttcagaacaatttggataaagaacttgggaattgagaaatgggaacaaacacacatgtgatgagattgattactctatataaaagctatgaaagaagaaaaaagaaaaagaaaggtgcattattttagaatcacaagcacatgagtcatgtacaagagtacatgtaaaaagagattcaaaggacattgtattagagagaaaaagaagaaaagctgaaacatagcgtatagtgcaattagtgatgattgtgatccagaagaaaagcatctctgtaaatgagagaaatatatttatataa

SEQ ID NO: 40596 - DNA, 555 bp, Arabidopsis thaliana landsberg
tccccaattctcttcctatcctcttcaacacatgaaaagttcacaatccaatgatcgaagatatgaatctctgtgtttcgtaatttcttacacttccccagctaacttttgattcttccaagtaaaagaatatatggcttaccagttgctggtttcaggggacttggtgttggccgtaaacaaagagagttataaagccaaatataactcaccaagaatggcacacttcataaagaaaacgtttctcatcaatatcaagaatcaagatgtgagcaaccaagtgtagcagagagacaagacatatgtgtatggacagaaactcttaagagaagaacttctgaacaatacagagttgaattaaaagtgcattttgcacatactgcttacccaaaagcaaatctattattccaaaacatacatcatttagaggaattctaaaaggtgagaataataatggtatatatattatatatagtacatgacaaggaagatcaaacaatgatctagagaagaaagaagaactatctaatttcttgtctactctgattttgtagc

SEQ ID NO: 40597 - DNA, 818 bp, Arabidopsis thaliana landsberg
ctaaccataaaaaatgctgacgaggcatgacttatttactcactcgactaaacacaaccttttccatgtccattgggactggtcgttaacatgttacatataaataggcttgtaacgttacgataatcttgtccaattactctacaacgaggcatatcaaattgtgcatctaggaatattaagttatgataaatccgctatttttccatccatgggcttgatcgatgatgttcatggctaagggtggtgatgaactagtctcgtcttcaattggttgctccaataactgattgagtatgttcttgaagcttcattctgtacaataagcatggtcggaacctcaacattttcggcatccttactcgagtaattatttgggaatgcaatgactaaccgactcacaggtagaagcataagtacacttaacaaagggtagccacatctctttcacataagtaactttcttccttttgcttattcaatatagccatgtatgatttggagcacattcttccacttacaaggattggacaaatttgggtatgacgcgaaactatttcatgatatacaaagaagaaaagaaaaaaagagactaaaggtaaaggtcctgtaacgtgaaatggcgagtaaagaataatgagatgaaaaaggaagaaaaataatagaagaaacgaaaacgtaattagaaaggaagataggaggaatttaatacttcgtgattcaagaatcgatgtggatggtaacttcgttttactctatcatttgttgatcggaatcgatgtggcccaaaatgtctggacagtctacccatgatccat

SEQ ID NO: 40598 - DNA, 326 bp, Arabidopsis thaliana landsberg
ctcccaaaccgcgtatgtttaccagtccggtaggcatattggaattacgcgatccgtgttcgatccgcggcataatgcgagatggtattgtatttcacgcgggcatcgtatcctccgacagtcgcatagaggtaaccaaattcatcatagaaacttttacgaccgatattttgcaggaaaatatcacccatatagtagttgaaatccagcgacaaagcagtgcgttctttcaaaacgattcccaaacttccgtagaaattataattgaactgatctcctttgatctgattgcgataattgctgtaataggcattttgtctaagctt

SEQ ID NO: 40599 - DNA, 254 bp, Arabidopsis thaliana landsberg
atttagtttatcatttaagctttgatttctttatttttaaaaagaaaaacaatgagaaatttatataagataagcattcatactaaatataaaggttgtaatgtaaatttgcaaaatgaaaagtgtgaaatctcacattgcattaatacaatttcaacccacgaatagacgatttagattcataacccgtgttacaacatgggttaaaattattttcgttatactagtgctttaaggtttgctaacaaaagcta

SEQ ID NO: 40600 - DNA, 335 bp, Arabidopsis thaliana landsberg
tgaagccggctggcgccaagcttctctgcaggatatctggatcctctaattcggcctgcgcgtgcccgtgcgcacccgccccccgcgcaactagattgcaagaaaaaactacttagactcgtactgttgtatgtatccagcggcggcggcgcgcaacgaagctatgtccaagcgcaaaatcaaagaagagatgctccaggtcatcgcgccggagatctatggccccccgaagaaggaagagcaggattacaagccccgaaagctaaagcgggtcaaaaaggaaaagaaagatgatgatgatgaacttgacgaccaggtggaactggtgcacgcaa

SEQ ID NO: 40601 - DNA, 671 bp, Arabidopsis thaliana landsberg
gttgtagtaatgtggtaaaagtcttatcaaatgaaacaaatttcatttttataagactaaattggcacaacatttggttgggagcaaaaagtccaaacctagcgaaagggctaagcattgatcctataattatgacacatgggtgtcaataatatttttgtctaagaaaaaagggtttcaaaatatacaatatgatccatatttaaaaatttaattataatataagatacggtctattaaaggaaaccaaattatatggtgactttagccatccgtgtggtggctgcggttgcatggacaataatgggccataacgaatctgtgggcttcaactacaattattattaaagttttttaaaattttaatatattcttttgaacaaacaataaattatttatgtattttgctgtataacaagctggcaacaatgaaatggtaatggatttttcgaatgataacgaaatttagtatatatatactatatattatacggtaaggatatgtacatcatgccactagtttattacatcactcttagttgctcatcacactgaaaattgtaaatttctgacatcagcagatttctgcttaactcacagaagaactaccaatacctaccatagttatactgatgtaaacactagaatgatcgtatttatgataatatgac

SEQ ID NO: 40602 - DNA, 137 bp, Arabidopsis thaliana landsberg
tcatctaacaaataagtacaagagaaaagcaaaatgcactctataaatgacatcaatcttgattcgcagaatacataccggagtaattacagcgctgtaacgtgaccaaacatgtccagtacctgtgatcactgata

SEQ ID NO: 40603 - DNA, 137 bp, Arabidopsis thaliana landsberg
  unsure (1)..(137): unsure at all n locations
cgacggaccaagagcgctagaatccttccgcaggcctccncgagaccaagccgacaacggataacagttcctttacgaagttttgaggcggaccatcccctaccccaaaaccggaactctacacaccaaaaaatgca

SEQ ID NO: 40604 - DNA, 486 bp, Arabidopsis thaliana landsberg
aaaccgaaatcgatggcgccaaggctcatgaggtttgtatgatatttcaaatacattcatgaggccaatggcgaacaacgtagctaaaggaatcaccgatgccaccaccaaacccgcccgcaggttgcccaggaaaagcacgagtataaaaatgacaataagcgccccttcgagcaaattggattttacagtattaatggctttgctcaccagcttttcgcggtccaggaaaggttcgatcaccactccttcgggcaatgttttttcaatttgtctgacgcgttctttcacattgtcgatgacctgcgaagagttggcgcctttcagcatcatgataatgctcgcccacggcctcgcctttgtcgttataagtgagcgcaccataacggatggcatgaccgatgtgcacctggccaatattgctgatcaataccgggatgccgctgttcagctttttgaccacatagttaccaatgtcatcaatgc

SEQ ID NO: 40605 - DNA, 554 bp, Arabidopsis thaliana landsberg
tttatgactatgatcacataatgaaaacactgtttccttccatttgttttgaaaactatagtctctttatgagggagcctgagggatttatttgcttctcctcatggtatgataatatctttgagtcatataaaggatgtaccaataaggaagatttgttcattgtagtgatttctctcctaggctacaaatagcagaatagtatcagcatctttagtcctcttcgtgtagatcattgcatccgttacttatctgctgattatcgtgaagttttcagcaccatttctgtctctacatgccaggatagtatcaacttctcagatctcttctctttgtgaagcattgcatccgttactttgcaaattctcagtccttcaactctttctcttcttcatattttgcagctgctgctacattttctggaacgtagttgtggcattcgtcatcgtcgacattgcagagaagttggttttgtcaagctctaaaatttttggacctagttagtgttgtggtgtatgctgcttgttcatcgcattgagatagctactgttttc

SEQ ID NO: 40606 - DNA, 192 bp, Arabidopsis thaliana landsberg
gataaacagatttagttaagttatattatatgccccctctattataacccatttggagttggtgttataagtgtaaagtatggtaaagtaagaagctaacttacgctagatcttttaaagagtctgctttgttgatagatttccctaccggtagtcaaagataagaatgatgcgctattatctcctttattc

SEQ ID NO: 40607 - DNA, 532 bp, Arabidopsis thaliana landsberg
ccggtctgtttctcgaatccgctgaggcagtccaccttggggtcgttcgagccgttctccacgtagcctttccacgcgaggatcgacaccgtgccctcggtcttgcttagcttgtcgagcggaccggtggcgacgccgccacccccgccaccacaggctgccaacagcagcgtcaatccgaccgccgcagcggctttccctgtcacgtgcatgtcgtgctcctcccctgagtgaatgtgactgttggtgaatctcaggccagttcgaccaggtcctgtgccgtccacgtggccacgacgcggtcgccgcgggcccgctccgagccgtccccactcgactgcagcgcgatgagcggcgttccgtcgtccaggcggacgtggatccggtggccggtgccgaggtagatcgactcctcgacctcgccgacgacctggaacgctccgtcgtcacccgcgggcgcgccggaacttcgcagcgagacctttttcggacgaagcgcatgtgcgccgccgcgtccgagcaaccggctcga

SEQ ID NO: 40608 - DNA, 426 bp, Arabidopsis thaliana landsberg
tgccatgcacaaagaaattgtaaattgaatcctatattgtcaacgaatatctacgatatttattttggtatatctaactcattaactctgtctactattctacatgaaccggtgggggataataactcacttggtgacttatctttgtatatatatacacgacttccacgatctgttcgtctatctgatcattcgttttctaacaccaaggcgaactgagagagattctttaagcacaaaagagagaaaaaagatctaatgttttctccacatgatggaacactctgttctaaaaagagggatcatatgaaagtttttggagaatcgtttcatggttctttcaaaaggagcaaacaaggagatcaaaaacaaaccaaacttgagaagaacactactactctgttctttcaaagatcaaagtcagat

SEQ ID NO: 40609 - DNA, 887 bp, Arabidopsis thaliana landsberg
  unsure (1)..(887): unsure at all n locations
aaaaatttatgcattatctataacttatatttacatgcatagtttagtcctactaatttcaatacttatatttttttgtactatgaatttttgcagtggcacagataaaatttgactttaattggttttagtccggtacattgtcaactttaatatttgagcttctctttcacaccaaatatatgttttacaatggaaaattagttcttgcattaaaatatgcactgctgatgtattcttgctctccgttgaagctttgatgtcatatataaatgattgggtgatggtaaattggcactaatataaaatttccatagaacaaacagtttatggacggtcaagattttcagatacacgaggaaatgaaaaacagatttctaatattttttattataaattcacaatcatagacattagacacatcacacatgaaacttaataatagacacatgagcaaacatagtccaatttaattcccaaaaaccggaaagaaaacacacatgaagacgatctaaaatataattttcttcccattgtacatactattatttaaagatgattctttcggtagcaactgaatcttaaacatttcaagatccactataccaccaaaatcaaatcaatagaactcgaaaaacacgagcctgatgccgatatatgacttgccgttttgtctcctccttgcttctcatggccaagctaaacaaactgttggggagattttccaaactgaggttcctctgtctcttccttaaatggctttgtctgcattttttctaccggtttcattcccttgaagataaattttatccattatttggttcnaggttttgtattaaggaggtaaaagggtggaatctctatctaaagaagctaatatatagaga

SEQ ID NO: 40610 - DNA, 789 bp, Arabidopsis thaliana landsberg
aatagaaattcaaaaattcatcagcgaatcgcgcaaatctaggtttatttagcatcccttatcgaatagaaatctataatcgaaatacaatcaactaacaaacgccacagattgttagcaaaaatcgaatccatctatttttggaatcaaaattcaaatattcctcaaaaatcagcaaatcgaatttctctctatttcctcaatttttgcacaaatctatgtctatttagaatcagtaatcgaaacaaaatcaactaacaaacaccgcaaattgttaccaaaatttgaatccatctatttttggaatcaaaattcaaatattactcaaaaatcagcgaatcgaatttctctctagttcctcaattttcgtacaaatatatgtctatttagcatcaataagaaaaacacaatcaaccaacaaacgccgctgattgttactaaaactttaatttcatctatattgaaatcaaaattcaatattcctcaaaaattagcggatcgaaattctctctacttcctcaattttcgcacaaatctatgtcttttttttttttgggcaaacttatcttatcataaaagagaaagagttttaacctctaccaacagaggatacaacatagcaacaacaagtcgaaaaagctaaaacatcgacaaacatagagatcgaacataagcgaaagctagcaacaacaacaatgctcaaaaagagacttggggataagggtgaacccaaaggttctagcaaagcagcaactaaccaagagcatccaaaaaagcaaacacctttag

SEQ ID NO: 40611 - DNA, 498 bp, Arabidopsis thaliana landsberg
  unsure (1)..(498): unsure at all n locations
taccatttttgaaaattaaaagcgggcaactagcctgacacgctgaaagaagtatttatctgcatcatttttcattgaaccgactattggacacttgagagcagattatattgtggcgggaaactggtcttctcgctagattttggtcttattctaggttgcgtaatgatagggctcgttgaatcgcacctcttttgatgcgtatggggttctaactgtctcatgaaaactcgaaaggcgttgatttttcaactaactctgatttttatcgcgagtgttcttaccacttggtactggacaaactattccagttnnnnnnnnnnnnnnnnnnnnnnnnnnnnnnnnnnnnnnnnnaaattgtatggtgctgaaaatgccgagcaagttgctgatttagagctgatttttggcttggtggttagttttgcattttacttagtgatggccattgttatttgccgtatatccaaggttggtgactgaccgaaaacacaaact

SEQ ID NO: 40612 - DNA, 607 bp, Arabidopsis thaliana landsberg
atatcctcaatctctacttgtgtattctttttgagacctggacttcaattttagtaatcaggcaattcaaaacctttggagcctattaagttaaatgcgatcgacaaacgtatcgggtatcactaggcttgtgatctatgtataagtgggttaacgtatatatactgacaagttcatatatatgcgtaatttgtgtaatatattatgtggaaactttatcattttaaaatatattttttataactgatgtgaagctatttgctttttcccttaaccaatgataagttctgctctgataaatcgaaatgtcttgggagtagtaagttacttctattgtgataagtttgagttacttaatttggagagtttggtttactcagtttggtatatttatcatgttccctaactagagtttccatgataaatattaattattataaacaaattaaaattttatacagtacttctagatagatcctacaaggggttaaaagttatgaaacctgatgatatgttgcactaattaagctgttggtctttgtagtttagaataacacatttatgctataataggttgctatcaaaccttgggtagtggtcgttgttg

SEQ ID NO: 40613 - DNA, 1133 bp, Arabidopsis thaliana landsberg
  unsure (1)..(1133): unsure at all n locations
ttttagacatatgttcactaaattttgccagcaacgcatcccttaaaatgtataatgtttaattagcatgatttactaaaatagacttgtatttaatatgttaaaacaaaatacgcagtttttgttcgctgacaatgttccaaaacaataatattctttaagcaaaaaatagaaattcatataattatattacagttaagggaaacaaaaagaggaagaattcgttggcaacaattgacaaatacctaaagcgtgcgaggtcagtaaatcacacgcttgagcagttagtgccggttagaacggtaaataaaggagacggaattaacaagtaatcacgttaaaaaaagctaaacgaagaatcaaattgtgtaggagacgacgtcgtatagatacataacggccgtctgtcttaacggctctttttggtgtcgtcttcttttatttttattttggtctcccaccagattctataagaggaccaatatatctccaaactcgtacattcactgtctttaactctcactactctctctctctctctcctctgttctaattctctaggaacagagtaaaagactttggctcagcttctgcctctccaatggcggttcttccgacatggcttttagcaatgatgtgtttactcttcttcgtcggagctatggagaacactacacacgacaacatctcttctctccctaggtttttatctctactacaatctctctcttatttttttatgaaatgttaagatccatgtttctttcaatacagagaatcagatttttattattatctgcattagtaatttgatatatttttcattctcgagctacattttgctcagattccacaataaatcttccgaaaataaattcttcgctttcacattagttatttgttatagttttcattcgttctagctacattttccatcggattccaaaaataatttccaaaagtataaaaatattaaatttactgttttagttctattcaaccgacaaaattatcaacgagagaaaatagttnttgtttttttcaccttttcgatatctactacaatattccctcccttcttcaaagtaaatgatctgagccgttaaattgtgtatgatctagatcaacgatct

SEQ ID NO: 40614 - DNA, 537 bp, Arabidopsis thaliana landsberg
ttctgagtcgcttactactctatcacttctcttgtgttaatactaggctttggaaattaggacatggtttgtattaataagtaagtatacttgtataaagattatattgaaaaattgggaggatttgtgtggtaaaagaagttaaccagtcaattggggtggtattaatatagtatatgattccgctgaagaataagatcggaccgaaagttgtcatattcactcaagttaacaaaagctaaacatcaagtaaaatgaataaattatattttttaagctgaaaataaataaataaaaatattcagattaattacgacatcattaaggttttctcaagcgattagagggtccaacaaaacacgtgtcagatatctggacaataaaagtggggcttagtcatgtgggttatctttgtcaaatgtggtttgctacacttgtcactcgactattatactagcctgtagcgaatgattcactagctactagatactttgtgctctcataggatatttatggtacttccttaatatgcatagc

SEQ ID NO: 40615 - DNA, 827 bp, Arabidopsis thaliana landsberg
acatatcggatgccaagatacataataatatatgacctgtcatcaactcattttttttccatcgtatgttgtgtggtatggtaaacattcatatcatataccatctattagagttggatgaatatatatgttctatgactgattaataattccaaaaagacatccctaagtaattacccaagtatgatactatgtatcattataaagcaatgaaataatatgcatgaacaaaagacacatcaacacactagataatcacaaggccgagctatattaatagtagaacaaagcaacaacctaaacttgaatggatagccaatatcgaaataaggaagatcgtcacccacaaccacagcttgcgttacaactcttctatcttgtttctcttcttcatcatctccgtacattttaatttgacttcgtggattcaacaggtttgacgacatgaacggaaatgagtgtgattatcacgagacaatggccagacaaaaagccctcaaaataagagtaattgatttggtttagccaaatagttttggttaatcttcttatcgttttgcagtttttgtgtcttgcttcaatttaatggcaataagctttagagaaagctaacatgtatacatattcattatttgtttattcatgtctttgctggaaactcaaaagtcacaaaattttagacttacgggattggatcaaacagtgaaagttccagtatttaggcacggacaggttaaggccggcttttaaggttttgtactttaaaatccaactgaagctaaatgatgataccaatgggactggtgaatattttttaagctcaaatc

SEQ ID NO: 40616 - DNA, 631 bp, Arabidopsis thaliana landsberg
aatcttataaactaaataaaggcaaaattgtggtcttgtaagaaattagaaagtgaattattaattggataatttcagtattggttactttagaaactcatttaatcgatagtgatatagaaaaatgaaagagatgatggagatttgaaaatctcgagattaagagattaatgagtcttttcttttgtttaagatgaacacatgcacgcatgtggggtcatttgtatcttcaaacatactcattgtgttgattcttgatattagcaaatacacttttgttttccaatttcatttcttaaatgtggggtttaattttgtcctaatctttactcaaagaatccaatctttcccactaacttttggcgtgcgattgcggttatatatacttaagtgtttcactccctatctcaaaattttgaattctgataattaaataaaatattttatttactagtttattcttagattttgattcatttatacttagagttgaacactatgtgtttatgataattttcgtgaccttcgatctcaaaaaatttcgtatggatatatgttctgttgtcaacacctatgtagtaaatcattaacacatagtgttcaactcgtatacaaactatatcatctagtc

SEQ ID NO: 40617 - DNA, 459 bp, Arabidopsis thaliana landsberg
ggacaaacaaatagagcaaagcagacagaaaagaccatggcgagtcacattaataaaagcataaacattgggacagcgggctgcacggtgtgattcagcccagaggtccatcacagaatagatgggctagtgagtggaacgagatgaattttctggggagattcttggaaaagaacgcggtgtgaaaaaggacttggggagaggctatcaaaacacagaggagagagtcgggagacaaatacaggcagacttgaatttctaagtcaaaaatcacagcacaggttgcactaagcacatggtactgttttttgtaacactaccaagggcagggaagcctacagagaaactgtatgtacctctgtgggatctcagccattggagagtaatgtcagtcgatccactgtgtgccaccataaggtctgagaagagcaaaagccgtacgcaatgagagggagaagg

SEQ ID NO: 40618 - DNA, 965 bp, Arabidopsis thaliana landsberg
  unsure (1)..(965): unsure at all n locations
ttcccttgtgttcaaaaataactatcacatcttaatatttatgagtctcaccaaatacaaaacgaatcatattttcaccataaccattatagaactcgaacctaaattttttgaaaattgtcggcgacactattaccaatctctagctgatgagttggggctgatgaacgactatgctgatggcgatgaattattaattttggcctaattataaaaattgcaataataccataaccgaagaaattggtgatccttttgaacactaacgacaaaagacaccaaaaaacaaacaaaatttattcgttgttgcattatccggggagcacgtaagtgggttgactttggaagtaaacggacccaaacgacttctcacttcttccaagacaatctatcaagtagatacgtatttatggagttattgtccatgaagatatccattacacatagaaagagaagttctctggaccaatttgttttttgttaaagtccattggaccaaatttcaaattccaaaagcaacacttacaagttacaactttcctcatcaacgattctcaaaatccgtattttaaaaggataaataagataagcccactggaccaaattccaaaagcaagccctcgtccaatgctttacgttgcccaaagattacgaaatccatgagaaaaaggcttttgtgaggaaaagcaaagaaagtttggttacatgataggtactagaatgagctcttaagtatgtaaatttacaaataatttgtaatctttatctatttctcttcgatcaatttgttcattgttggcattacacgctgattgatgatcgtgagtgataagcttagttcaacaaaacanagctgatggttaaaatctcaccctacaaaaatctcacttnctgaatgtgactttgggagattttttttgttctcttccggaaagcagaatcttattaaaaacggctcaccccat

SEQ ID NO: 40619 - DNA, 725 bp, Arabidopsis thaliana landsberg
agggtggggaggctatttaggcaaaaccatccggatctgtcttatgaacccttacattcattagtcaacggagcgggtcatttagggggccttaagctggtaatacaggtcttgaatttccacataaagaatcaagctaatcccctcggttatcaaaaaagacacatccttattcggctcctgaactccacaggtttcaacataaatttcaacataattcatatataaaccttataaacaaacgctacaaatagcaatttctaagtccaagtcaatggaaaatatacatgtcctacatcatctcctaaaaaattgtaagttgtaaatccattaaatattaatcaaatgtttattccaagaattccaagctttgtgacagctcattcaattagtttctgcctacattttcccatgtgaaaatccatgaagaacaaaaaaaccagcgaatcacagaccctagatctgaattcacgaatcacatgaagctagatttgcgtgagcctcgacggaatcatatagagtatgaaggaactcacaaatcagagagaaaacgcgatatatacctttaaaccttggatcgagatctagatcccctgcatctgcaaatccgaggaatggaggtaaccaaaacacggcggagagaaacacagcagcagaaaaagcaagaatcaaaacgcatctgagactaaagtagctagagatccaatcgcagcaacaacatgtgc

SEQ ID NO: 40620 - DNA, 467 bp, Arabidopsis thaliana landsberg
aatgtgaaatttctaaaaaatttatcgtaaaacatattttatagcttttagacgttcaaaagtagagggtatttttagtctaatacaagtatttacatacagtataaattagatctatacactttgaagattgctgtaattaagtttaaaaagtcgttttgtgcatttatatgcgttgatgatgaacttttactttgaccacaataaggttgaccacagtattcaaacaatagttcaatttaaaacaaaaagtcaaacacaagtgtatgttgttcttgtggtcaataagacgttgatgctactaccgataagtgtgaagtgtcctatgaccaatcgccttttcaatttcaaggtcaaaggtttatgtagatgagttttaataaattgtgttggtgtagaaaattgacgcaattacgtctaacgtctttgatagtcgtacttcgaagtgtttttgatatttcatctga

SEQ ID NO: 40621 - DNA, 930 bp, Arabidopsis thaliana landsberg
actctccccttcgtttttctatcgggccgatcgttcattttcccaaaatgtttgcttcagttcttcaggtcgtaaaagtctgtccacgaagtctcgaagacaaccatttcaataacataatcgccccttggcttttaaccaagcgacctagagatgaaatgtaatacgatgggcaatcggtaatttctgatatcaaatcatttgttgtgttacgatcgaatgggtcctcaagagttacttgtgtttttttagtggggtcagtttgggataacgtcaaacatatagattctaaagaaaagataaggtataaattcttagaaacaaaaaaataaaataaaagttctaataggatacattgtatagtagtgaatgtaattagataagtttatctaaaaacttgagaacatacgaaaatgtattgatttttttttttttgggacaaacgcgaaaatgtattgatttgattgtaattataggaacatttacgaaactaaaatatcatgaattttttttgtcatcattcaattgcaagtgacgaaaaataaataaaaatttcaagtatgaaattttcatggatgcgggatagtagattttaattttttatttatttataaaattgtgttgattttgttttaaacctcgtgatgtgaagttttatagaaatttgtcaacttaattttttttctcagagctacccaaacaatcatgaaaaggggataaaattattagtactaaaacttttaacatatgtggagtactagtcgtccccacttacctactactaaaagatgaaagaacacatttattctcgacgagggctcttttcttaatttcaacttctttttgtgataatggggtttaatttcaacttcataatactattttttttgctgtaacatcgatttgaccctacacacttaacattacata

SEQ ID NO: 40622 - DNA, 122 bp, Arabidopsis thaliana landsberg
tctgaacccattcctagagacctgaaattgtccaagtgtcaatctgttacgctgagtcaaatgacaagttggggctggcggtgcctggaagcacctcacccccccttgcgccccccctcagt

SEQ ID NO: 40623 - DNA, 476 bp, Arabidopsis thaliana landsberg
agaaggtcctgatggtgaaaaaagcatctatgctcatatatgttacgcgtaatgtaaagttattggattcatggtttttgtattggcattgcagcaactccgggaagttttagcaaagcaggctgagttaggtgttgaagttgcagaagttccttcgcattatttatccaataatgatgaacaagttaatggagatagaggaaacaacaatgggcgaaagggacgattccagaataatagacgtaataagagaagacatgacagaaaagataagtttgataataagaaaccaagattggaagacaaaaaatcgtgtcaagattcttccataacgactagaaaacctacattgcttgagaagctcctaagcgcagacataaagagagacaaaagcccgttattacaggtcttccccttcatggtaatgaattcatagttgaaggagtttccagagcaacctctgaagttacctttga

SEQ ID NO: 40624 - DNA, 790 bp, Arabidopsis thaliana landsberg
atcattcattcagcgtttagcatcacatttgaactttatcctgttttggggatcctaaccatataaagggattaatgttaagtcaaatatatcatcaaatcatgctaaaaaaaatgcacaacaaataaaatcgaaaaataagataacaacattgtcaaaattatcatttgcattgtgttgaacgaagtattatgtcgaatttatagaggattaagtgaataatactgttttgaaaacttctgtaaaatgaatatctaattgatttgcgatcttttattttcttgtcgaaaaacgtagatctaactttttttttctcgtttttcatcttcatgacatatatgtgattgcaaagtaaagaagtggtgcgcaagtcctcttctttggcgacagtgtggtgtggtgtagatgtataacaatgtggttgtgacgcaggcctaagcatattggagaagttttaactgtcgaatcatttctgatcaaagatgtcagaagtcttgttgagaagcttctcgtagttcaactatttatgataccgttatgaaccttatattcatcgatataagtattggtgggatctctgctttccgttagtcatctatatttgatcttgaccaccagcgatatatctttcgattaatctttacgttttgtatctgttaattttttgtaagttggtggactgaaatcccatatatattaagttgataaataaagcattaaatatctattgaaaaacaaaactaatcacgcatttgttaactagataccatacttaaccaattacttcgaa

SEQ ID NO: 40625 - DNA, 575 bp, Arabidopsis thaliana landsberg
gaggtgcctgcctgcgcgctgccagtggaacgcttggagatctgtccgcctgtggcttcggtgatgctcgcagtcgggagttcgtggacggtgacttcggcgcacacgatgcccgtgatccctgtccacaagtcgccgatggcgaggttccaggtggcctgcgcggagtccagggtgccgagcccgctggtgtagagcccgtaggaccagatgtcaccgttcgtgctgccgatcgcccgatggtggaagagcgccatgggaggtcacctccttgtcctgaaactgccctagctgtctcacatgatggcacagatggttgcattctgcaccatacgtagggctaggctcgtgccatggcccgacctagtagatggatcagatatattcatggcgacacggcagactcgaccgagttcgccgccgtcatcgcgcaccttctgcccggcgagacgctcacgcggactcacctaatcgtccgtcagctggcggtgaaccccgtagcggtgcatgccatcgtgatgcccgtcctctgtctcgcactgatccaggctggcaccttcccccgtttacgacgc

SEQ ID NO: 40626 - DNA, 623 bp, Arabidopsis thaliana landsberg
aactcaatcattttgttaacaagaactacatatcaaagattcatttatggttttcatgtagttttcaacaattttatttgccaacggattcaaagattcaaagggaatacaaaatttcgttaagaactttttcaaaaaccaagatttcgatttgtgtatgtagcttttgtattaaaaaacaatagtatatgaaagagacagagactggaccagtaaacgtagaagggaatgattaaaaactaaaaaagagagcctgaaagtgaagagagtgttttgtgtaaatcatgctttgtcttttatctgtttcctcatgctttgtcttcttctttcagctttttgttgatcacattcacaacaacgctttgttaattgtaataaacaaacgaagattcttgtaaaattcggagccatatgattaattacacagacaatgatcagttgtgtttttttccaagataattccttcctatttaaaaaaacattttaccacataaaaagagaagcttttgttacatagaagcaaaagtgacgtggattattcaagtgtatttaaccagctcggtataataatctcgtttaaaacatgttcccttttttattttcatatgatttacctggaaaat

SEQ ID NO: 40627 - DNA, 559 bp, Arabidopsis thaliana landsberg
tggtgtagcccttccaaccttacgcttttgtgaagttgtatagtcgaaaagggggcatggtaccagatactttccctgacgtccagtcacgaatgaagagcataagaaaaagccaacctgcccgcaaagcagtggcagcggcaacaacaagggctataatctggccgacagagttgatggctgatgatggctgtaggttcgagcctcgaatggccatatcagctgcactcatggaagtgagtgcgagcacgccgtgaagagtgtacatagaagacgtagtagcagggtactcgctgtaggaggcaggcagtccatcgatgctgtcattgggatacgtgatggaaaccaacacgccgcccttctgctgaatctccgttccctcgtcgccgcattttggctcagcttcgtggaactcctgagtgttatagagagagtgaaacaggtctgagcgaatatcaagcaccgaagactgcagtatacccagaatagagctcgttcgttctgggatggttgacagttcgtgatccatgcccaccagaataccgtcaagcagggacag

SEQ ID NO: 40628 - DNA, 545 bp, Arabidopsis thaliana landsberg
gggcaaaaacctgaggagaaacacttccaagtcaaatcctaatcttcctttttctttttaccccaacccctcttctctctatacacataatagtttctacatctaccacggtccacaagttcgtaccgtcaaagagtccataatatcttccaccaatgcttcttttttggtctatcaatccaactagttagttcaatccattttaaaacagccggtcattttggtcaatcactctaaaaagaaataaaaaatagaaagcaataagcatcaacgttccagttatgctgattttcgtagctaagggatgaagtatggagtgtctcttttgcagtttttttatttatttagatatgttgtgagtacagatcggttcaaactttactctcttcagagacttgttgtaagattgccacaacttgaatttgtagcatgtaaaaggtacatatatgtaacccttatctttatgtatatgagtacaactttatatgtacttatatatgtagcatgtaaaaagtacatatatgtaacccttatctttatgtata

SEQ ID NO: 40629 - DNA, 770 bp, Arabidopsis thaliana landsberg
agagagagacacgtttcaggtaacattgagaaccagggactttatacaaactaaaatatttaccacatggctaacagatctttaaagttttctgtcatactacagatacaaaaacgagacaagaacatgattcataataagatcttgaagagtttttagccgctgtaccgataaaaaggcccttgactggaactatatccgataaaaaggatttaagggcctctgagaataaggcaaaaagtttaaaagttttctgcagtgaatttttaaaaccttctatcagcttattactacttacttaacttagctttagcctctagtcctcattatcgtgatgcttccttttcctccttcggtgcggattttagtctttccaacaacgggtttccctgagaatgctgaagtttggatcactgcaggctcttctatgtgtgcctttggttttgctggtggatttcggattttctggtttatgtccttgagagtcattccaccgtgaaccccacatggtttgatgaatgcaaatggatagatgattgaagatggtagctttgaaactggccttgaaaacgatttcctacctgctattaccaattaacattacaataatgttttgttttctcattttcgtcgtgaaataggtgtgtatgagactcatttgtgactaaaccattttattattatacctttaaagataacatttggagaagatcgagtcacaggccgctgaacttccctagtctttgtttctggtggcacattcaaatact

SEQ ID NO: 40630 - DNA, 281 bp, Arabidopsis thaliana landsberg
gcggccttcaccgatattgccgatgacggcgccgactttgtccggcgcctgcgtgaagccgaaggtcgtgacgaaggccatcatgaaggcgacggtgagcgcgccgccgaaattgccgataaagacgaggccccagtttctgagcacgccctccacggtgacgcccgggcgcctgtcgatcaaagcgagcggtgcgagcacgaagacgccggtcataagatcgaagccgaagaggtacagtatgcaaaagccgactgtgaacagaacccgcgccgcgagcg

SEQ ID NO: 40631 - DNA, 607 bp, Arabidopsis thaliana landsberg
  unsure (1)..(607): unsure at all n locations
tgaagaatctaattcagcctgaaaccacaaaagactcaatcagatgatatcttaaaacgattatatgtaaactcaatcactgatgaatttactaaaccataacagagaaattttcaggacaagaattagacctaaggggaaaatgtgaaccagtttgctagtaaaagccctttcgaaactggacgatgagtaaattagggttttaaaagaaaaatcaagttcgcggcaaataagttgacagtagcagcagcaaaaaaagagaaagagggaaggaagagagaagagagaagagagaagagagaagagagaagagagaattacacggtggtcacgagaacgtacgactgggaagaggtcgaggagactacgaaactcttggtcgtccatggcttccctttttcttcgatttctcctccgattctctcttaaatctgatatcttctaatttctttcttccctggtgaaggtttcgacagagtccaatttttatttttattttattgacaggaaaaaaggaaaatttcataaataacaaactntaatctccctttttagttttaatctgatgttagactagaacaaactacgtattggatattatggtcta

SEQ ID NO: 40632 - DNA, 743 bp, Arabidopsis thaliana landsberg
gaaagagtcgtagtttttacgtttgtagaaaaaattgctaacaaatgacacggatttctagatcattaagtgcgtaagcaaacatgcatgggtggagccacgtcttggaacggaatgacgagggtggacttttggggttaatttaccttagccattgtaacgactatcgagtaagcatgtgcattagataaagtcacaggcgagttagttggtccgttactaatttcgtcatgtaggtccttttcttaccgttttctaatccattttccatggatatccgcttcttctttgtaatatagctatatgtagatgatgatacggattcctactatatactatacacaaccttgcggtggtatataatatagctatatgtagattattgacaaagaatttcacaacttttaagcaacttcaagaaaatgctatattatgtgctttagtagctgacggtggaacattagtagcggaaacttagttacttagaatggcatttctgtttgagattaatcatcttcgagttgttttaacggaatatatatgtgctttcgtctcaaaatcccaaaattgtcatgggaatttatgaaataatatctcagaaaaatattagacaattacagtaacgccacgtaagtggcgattggggtgtgatgacaggtgaggtaattgaagaataagaatcacatgcccgagtggcccccgatctcattatgctccttttggacaatgccatatgaatgctg

SEQ ID NO: 40633 - DNA, 762 bp, Arabidopsis thaliana landsberg
ttataagcgtcattaagagcagatactacaagaatccataaatatgatcaggcaggaataacgttcatgaactaaatatgaaattttacaaccacctctctgatttcaagatcggatcacaacgtttttaaatgattcaataagaacactcaccgtcttggctatcggtttttgcaagaacaacggacgtgaagattccgaaacatgcaatgaagacatgtacgatccgctgcagatttggtgccatgatccgacagttttaagctcagaaatcaaaatctgtaaataacaaaagagatgatccagagagaaacccagggctggttccgggtttccttggggatgaaggaaacacacgaaaaccaaaggagaggaaacaaagaagctagataggtcatgaaagaaaactaaattggaaatggtgtggcagtaaccaaaaatggcaaattcagtttcttctgttttcttttaggatttttgaatgacgttattgagtgaaaaggcgaataaatctggacgtgtgaatagagaaatgtacagctaaaaatgaagcagacaccgaaacattaggagagagaccacaactgtgtccaagtcccgatccaactgcaaaacacacacataaacaagtttgtttcaacgtatattcaatttcaagcacacgtgtgtgtgaacaaacaaaaattacaacaatttcattcaattggtctgaaatttggtgagaaaaacaagggcttgactgtaaaatacaagtgtctgtag

SEQ ID NO: 40634 - DNA, 495 bp, Arabidopsis thaliana landsberg
gcgcactgtctgttgcagctcgccgggcgtatcgccgaagaagcgggcgtaatcgaacagtgccgacttttgttccgcgtgatgcgcttcctcggcgggggcgcactgaccgcgctcgctgttcttggacatgacgatcagcttgttcagcatttcgatggtatcgactgtgttcatggcgtttctcctcatgcagccggacacaagccgggcctgaggtgccatgacgagccgcgatcgaccgaaacgcgttgcggacgggtccggcatcgcaggggcggctgatcgagcctagcgcgcgcagccggacgcgcaagtgcatttcgtcggctggcaggccgcatacttcaccgccaacatgcaaacctcgaatgacaaagcgaaaaggccggcgatgcgcgacggcgtcggcgccagctcgattcatctgccggccggcggctggccgcagctgctcgattttctcgccgagcgcttcgccggaatcggccgcga

SEQ ID NO: 40635 - DNA, 454 bp, Arabidopsis thaliana landsberg
tcggtcaaactgccataactgagacacacgagtcatgggagttttactctaaggccgtcgaagcacataagtaattcctcaacaggagtttttactattatgtaaatgctgtcgactctctagagctcacaacaagcaagtgttgatgcacacacagatgaagttcctgttggaagtgtaattcagctcactttacatcttaattgatattgtatctcgtgtttcgaagagaccagcgtcgatacatttttagattcagatttgtaatttgtcgttgattgtttactcgttcaaaaatacattatcaattcagagtctaatcgtcacatttaaaaaggaacctaacttcgaatcttcaagacaaataaaataaagcgaaagcagaaattaaaattaaaatcatactaattaattaacttccactaattaatggagaataatatttgcataactt

SEQ ID NO: 40636 - DNA, 568 bp, Arabidopsis thaliana landsberg
  unsure (1)..(568): unsure at all n locations
tgctggtcatcgtgtcgcaggcgatcgacgccatcaccgtctccttgcgcggcacgatgccttgccaggggaactctcgggcgcccatgggcttggctttcaggccgacgaattcgatcggctggaacatcatgcggatcgcgacgatcttggtcgcgtagccgatgatggcggcgacgaacggcatcgacgcatacagcatccagttctcgcgaacgtcgatgacgacttcgtgcatgttgagcatcttcaactccccctgctattgactgaannnnnnnnnnnnnnnnnnnnnnnnnnnnnnnnnctggcacatgttccagatcaccatgcccaggtccgacatccgcagcgtgcgtcgcacgatgcgcgcacgttcgccgttcttctcgatgcgcgcgatggccttgcgcacaccgtcgtcggtttccagcatttcgtactgcgtgcgttgcgcgtcgttctccggcgcggtctcggtcagcccccaggcggcgagatggcgcacgtaggccggcgtcagttcccggcacagcacgccggcattgcggccgacgctgctgacata

SEQ ID NO: 40637 - DNA, 954 bp, Arabidopsis thaliana landsberg
ctcggcgagatggctccgcttgccatcccgctttccgttcggtatgggaacaagaagaactggctgtgggtcgaaccgcctgtgccaccgccgctggtcatggcgttcttgagccgcgtctgttcgtagaacaggactagaaccgcaatctgaaccggaagtctctatttatgcgccgcgtggctgcttgcgtcctgcgacagtttcttacagctgactgtcttgcagagacggtaacgttccgaatctttcatgtgggggtgaacctaatacaaaaccgtaacacagcaatcaaaatcatacaacactcattatcaaaagcagactctgatataccttgaggaagagatcaacggctcggtagaggccatcgcagacgacgcgagcatggtcagggagaagctctgcgagtgctataaacttggagggaggaaggctagagtccagagccacctcagcgagataactatccatcagcttcgacaccttgaagatggagctctgtttcggtgactcagccccctcgaaatcgtacatggccatctcgctctcgtccaccgcgtcctcctcgtcgtcatcatcatctctgtagtcgcactcgtcaaggttcaagaacattgagaaaatcctctgcaccgagtcggtgtcgtacatggcgccgatgttcgccggaataaggatgtcttcaaggatggcctggtcgagcaggtggctgatccgtctctccagatcggatctgcaagagacggaggtgccagatcctatagcggtcttcaacaagctagagaggaaggagatcggaatcgagcttttgttcgcttgcgttgggaggagcccgacgaccgcttcaaggacgattcgctgtttcctctgaagatcggaatctgatttgacgagattcggatctctgatgatctgcagtgtattgcgagcgtagctcataaggatgtcact

SEQ ID NO: 40638 - DNA, 535 bp, Arabidopsis thaliana landsberg
tggagtggactattactatatgaaaatttaatctaaaaatctatttggcatggcaactctcgcaataaatgcatcgcggatggggcattttatcttacactgctagtgagcttcttcattatatatctttttagaaataataaaacgctatactaacttgaacttcacgagtagaatacatggttaattacttactctgatgtacaacaatataaatgaaaaaggagagttacgcattgttagttaaaaccaactgcaaatcattgcaatagtttgtaacatattgaagaattagtgaccaaacattttatcgatgaaaatagaatgtcgaaaaacataggtacttttgtatggaacggtactttttgtatgtgtctgccatggccatgagccatgacccgtagctaaagccatgtttttagggcttgttattttaattcacctaacatgttatcttttattactctttccgattaacaaagaggatcgatctttctttctctgttgagacattactaatttgacttttcaaact

SEQ ID NO: 40639 - DNA, 892 bp, Arabidopsis thaliana landsberg
aatcatctctcccactacgacatcgtttcggtcgagaagcaattctctgctgatactgaaatggaatggctcgtcgtcggactcattgtgagaaggatagtttctgaaaatcattcgagatattattttgaagaatggaagtgagtgaggactaaggatgatgagtgaaagaggaagagttgtacctatttatagtactacaaatgtgggtggtaattctgtaattctgtatgtagtctaaaactggatggttatgtgggagaggaaaaactgaattttgtttcatgtatattaattgacaattaatggtataagaagggaaagtattgtttacccaattagcatgaattgcatgacatggttttgttactaaccttatctctttaagtaactttttttttttaatttattcaccaccatatgtcatgattttcttgtaatcttatctttaagtaaatttttttcataaatatgtttaacacctttctttttaatttttcatataaccgttactctatactgactatacatatacattgtggacccgatatgtaaatatgcaactcttttagaagaaaaaaaactttatgcatgacgtgcacaaatgtataccacgagaaaaaatggtaaaattggaaaaactacattatttttcaatttctatttttttattttataaaaaatatatatatatatatatatattaatgtatttatttgtatcgccaataattttaatgataaaatagaaggtggcacagttagaatgaaggcgataaatattttttttttaaaagtgttctatgatcataagtattaaaaataatagattcactaataatttttgttttctttagttagctaagaaattatgtgccgatacatcttgtaag

SEQ ID NO: 40640 - DNA, 244 bp, Arabidopsis thaliana landsberg
aaaatatatcgagagctgtgtcctaatacttttaatgcccctaacaaacaagaaaagtgtatatatagtctgtcatctaacttttatatgagggaatacaaaaagtaagtgactttgttttgtgaaataaagtgcttttgcaatggtgagaaaataaagtgttgttattgttaaataagttttacgaaattataaacttatattagtgaatatttgaattattcaaaaatgttatgatattttt

SEQ ID NO: 40641 - DNA, 354 bp, Arabidopsis thaliana landsberg
ttttgatcccactatcatcatctccttcttcttcttcatccagcatcttttcaagatcatccgcatattcctccatatgtttatccaatgtggatcttgaatcatgactttgaagaggaaactctggatgttgttgttgaatggccctatcatcatcttcttcttgttcttcatcaagcatattttcgagctcatccgcatattcctccatgttttgatccattgtggatcctgaaaccatattgttgtgtagtggtggttgctcaacgaggttgttgttgttctctgtcgggaacttaaattggtcaaggacgttcttcttcatacggatattacacaaggcaactcttggaa

SEQ ID NO: 40642 - DNA, 597 bp, Arabidopsis thaliana landsberg
ttgccgcaatggctgcagcgcaacctgggctacaccgccacctgggccggtttcgccgccgcgccgctgggcatcatcccggtgatgctgaccttcatcgtgggcaagtatgcgatgcgcttcgacctgcgcctgctcaccagtgccgccttcgtggtgatgggcgcgacctgcttcatccgcgccagtttcttcatcggcatcgacttctaccatgttgccgccgtgcagttgctgatggggctgggcgtggcgctgttcttcatgccggtaacggtgatcctgctgtccgacctgaaccaggacgagatcgcctccggctccggcttggcaaccttcctgcgcacgctgggtggcagcttcgccgcctcgatcaccaccttgctgtgggatcgccgtgcggtactccaccacgcgcaactgagcgaacacatcaccgcctacagccccagcgtgcgcacggcgctgggcgaatatggccacggcaatacgcaaaccggcgccgccgtggtgaacggcatgatcacccagcagagctaccagatcgccttcaacgaactgttccactcgctgggctggaacttccttggcctgatc

SEQ ID NO: 40643 - DNA, 595 bp, Arabidopsis thaliana landsberg
gttcagtatgaggtgtgtatcttagtaaaacactagagtaggtattgctagcaggacgaaagttagtcgctctttctttgtgacattgtaaagttgcattatgtgaggttgcatgaatcttgaaacacatgatatttgtttcttttgtctttactttgttttcagagccactcataggcaacacatatatgctatttgctgttacaatcataaatatttggtttgttttctggaataagtgtcgtttctgttaatcatttggaactaattgacaggctagtgaagacttggaaactgctgatagaagaaaaacgagcaagtattttggtaaagataaaacaaaagttaaagatgagaaagaggtggaagcaattcctgccaagaggaaacttaagactgagtctgatgatttagtcaagcctcgtccaagaaaggttacaaaggttgttgatgatgatgatgatgattttgatgtacctatttcaaggaagactcgtgatccactcccagcaaaaaactaaagtcggggtcaggtagaggaattgcaagtaaaactgttgataacgacgatgatgatgatggtgaagataaggag

SEQ ID NO: 40644 - DNA, 652 bp, Arabidopsis thaliana landsberg
tattgtaattttctggtaaccacattaatttaagaattttttggtttactcacaatgtgttttcttccgttgcaggtttttaccacagcggcatatgacgaccacaaaaatattgtgtttttgtcctttgaaattatcgagaagattattcgagaatatttcccatacatcactgagacagaaaccaccacttttacagattgtgtgaattgcctagttgcattcaccaataacagatttagcaaggatatcagtctcagttctatagctttcctccggtattgtgcaacaaagcttgcagaaggagatcttaactcgccatcaacaaacaaatacaagggaacttctggaaagattcctcagtcatctctccacagtggaaaaagtgggaaacaagagaacggagagattgtaaacaacaatcatctttatttttggtttcccttactatcaggtataacactataatttatcgagaagattactttaagttgaagattctattcatgtgtttcaccttcctctgtctaatgtgcaggtttatcagagcttagtttcgatccaagaccagaaatcaggacaagcgcactacagattatgtttgataccttacgcaaccatggccatttattttctctgccgttatgggaaa

SEQ ID NO: 40645 - DNA, 572 bp, Arabidopsis thaliana landsberg
tgtgtaaagctttgaactttcctatttccaataaaactttagttttaagaggtgaatttctttatccctagtttcaggtaaagatgtagtatatgaaaattacctaaaatctttttcaaaatcctttcttaaaagggttgggacatttttgaataacaatggatttgatttgagtttcacaaatcattgattgaatagaagaaaaggatggtaaatgattttgaattattttacataaatcaataattaataacaggtgattaataaaaaagactctaaatcttcaaagagcatctccataagagtatcttaacaataaaatgatattatttctatagaatttagttgtttaattaaatttaaatttgttacaaaattaacccaacaatcaagtgacatgggtaaaatagagtttctaaatcataagtttctcaaaagttacatgtgtaatataccggctatgctttggtttctgttgtctgtaaaaatgatccctctggaaggtctcgaaggcttcctctgaacaccccttcgattcatgtttctgtattgacgcgatgtctaggtcttcc

SEQ ID NO: 40646 - DNA, 539 bp, Arabidopsis thaliana landsberg
acgactcaacagagcacccaattactgtagccatctttaccttgtaattttacctctcaacacaaaagtaaaacagtgaatttcagaacctggagtaaattttaaggtcaacatctatcaatagctctcactttgataaccctgcaacttaggataatgtcattgagaagaatgtttttctcattagccttaaacaaactttgtggtccttaaacagttttgacatttaaaccattcttgttacttttccgcatttttctcgcgtcaaggttcgctgtcgacagtccccaaatgcactaaacccatttaagctagttacaagttttaaacacttctcactaaaactcaattatcttacactagggtctaaaagatgctcaaggtttcttattacaggtatcctattgagtgatggtttcttgaaagctacaaagttcttattgttttgtcttacttacggtcttgcctacaactagttaccctaataaggtacactactttatgaaaacgtgtttattgattacttcgattcacatttt

SEQ ID NO: 40647 - DNA, 471 bp, Arabidopsis thaliana landsberg
  unsure (1)..(471): unsure at all n locations
aaaagtcaaagtacattatgagagtatacaagtatttcaaagttattttcatttaagaattttccggagcaaccgtggcccaaaggaatttgagttcatattaaagagcctacaacactactcgnctcaatggatgatatattatncatacatgtataagatttggggttacacacttgcgtcattacatgcatcatttatctactgtattaatcttaattaagacatttaaactagaaaacagctgcaaattcataatgtgcagatttatacatgttaagtgttaacatcaataatccatagggcacacattctcaactaattntataattatgactaaagaataaaaatacacgaaaaatatataaggattaattatgacttagaaaagntggtagagaatcaacattagntgaaaataaattncttacaatnnaaaatgaaaataaactaaaaattatatggcatatt

SEQ ID NO: 40648 - DNA, 454 bp, Arabidopsis thaliana landsberg
acgtacgaaaatgtatgtattcacacgcttcttttaagatttcatgctttgtttggtaatagtgtacgaaaatatatatatatacaaagtaaagatagtgttcaagatttttttaattttgggtaaataataagattgattggaaatgttataagaaaaaggaaaacaggagagaatagtgaatagagagaccaaacaacaaataagatttgatggcgtgaattgctttttctgcttttctacttttgcttggctcttagtttttaaatttaaatacgactttagggtaatggacaaagcctgaaaattcactttttgcttcataaaacaaaatttgtcaagggtattttatttctttcagctgaaataagacgtaaatggtggtttgcttgtttttgttgcaaaacgaatagtatattcgagcgacaaacccatgcaaattgcaaagtgatgc

SEQ ID NO: 40649 - DNA, 458 bp, Arabidopsis thaliana landsberg
aatgactctttgtttcttctcggtaataaacatatagtttcgtgtgccggttgattattaaacccaatataccaacatttgttttagtaaaaggtcaattaagttaccaatataccaacatgataacaacagcccaacaattctgaaatctctttcattaactaaaagagtaaattaatactaagattatgggcagcaatcaaggcgtgcgtggacatctagaggggaatgttcgtgaactgaaaatatgcatgcatcatccacgagaaaaacatatattaaaaaaaaaaaaaaaagttgtgtcaaaaacacgcttacccaacaacgctgtatctgaatgcaaagaacaaaactcattttctgcccacttgttatgacctaaaaataaaatacccctaaattacatcactttattgaaaaaaccggatcaaaacataagtgggttatttaacgggtta

SEQ ID NO: 40650 - DNA, 592 bp, Arabidopsis thaliana landsberg
aatgatcatctatctaaatctcaatatttgatcgaatttattagtggaggaggagtgtgatcgtttcttgaattttcgttggggataaaatgggtttaaatgagggaagatggacccattcttgattctttggaaacatctaaatctttctagttgcatgcatgcgacgactagtacgtcgtgttcttttaatgttagcaatacaagtgcccctatcgttacggatttggcttagcatttcactttcctcaatgtgtcataaataagaaccaatggaatagagttagtcgtggccataatatgtcacactagtataatagacttcaactactacatcttttctcaagttctgatctgcactgcaaagatacgaaatcgtattaaaaaatttggataaactaccatttattaagaaaatgattgattatcatcagtttgtaacttcgtaacaacgaaaatatgcgtgggaaaaagacgggatataaaacaaaagtcacatagttacgattttattgtcaatcttgactgtgttgctttcgacatgtgaccattgtttcaaacatgaatggaagctcaatcatttttgttctat

SEQ ID NO: 40651 - DNA, 152 bp, Arabidopsis thaliana landsberg
agcatggccacaattcaacgagggaagcgagggctggggcggttttttagcgcccgcaatcccaattcgctaggttcgacgcatgaacgatcagtctccgtccctggtggagatgctgcacgtcaacaagcacttcgttaccctgcacgtgc

SEQ ID NO: 40652 - DNA, 641 bp, Arabidopsis thaliana landsberg
ccaaattataagaaactttcaacaattttgtttttctccaaatctctgcaaagcaagcacggcaattttaaaaagttattttagatataaaaaacagagctaagaaaagagagagccgagagtaagtgactaacctaaagtaataaaaagggtttggaattacaaaaaggagaagattagtaagtgagatatagacaacaaattaaatgaatctcatttccaggattttcatgcatatcaattgttttttggaaaatggctttaattttttcatctacactcctatatcatttaaagaaaaaatttaaaaacacaaaaaaaatggatgaatttgagtttttttttttctttttctatatatgcttaaacctaaaattgattgggaattaacctcctaccaattgaaaaaaagaaaaaaaaaaacttttttttaaaagtttttacctgaatattttttttaatgggagagaatgatggagtcgccgtgtgcctatgtcgatgatgattaatgagaatgtgtaaatttttcaatgtaggatttttattttatttatagagagtaaagacgaaacgtttgaaagagatcatgaaattgtaaaagtagtagatgataaatttttggggttttttgaaaaagttat

SEQ ID NO: 40653 - DNA, 984 bp, Arabidopsis thaliana landsberg
taatgcgcaattgcttatactctttttaaaaaaaagatatactttttaattatatgacttttgtttctgaaagtttcggtaaaaatttgatgatttactataaactatctattattttcacttttaattataacaaaaagttgtgattatagtttgcgaaaagtaggatatattctggctgagtaaaaaactaataaaatagtttaacactaactaaaaaggaaaagaaaactcaataaacaacaacatacaaagccaaaaaagcctaatcaaataaataaaaaataattacatcaatcaacactaaaaaaaaaaaatcccaattgaaaaaagtgaacttccaacaatgctaaagccaaaagtttgaattaaataaaatatttgtccatcactttcaccattagctaattttactattttaaaaaatttccactttccaattaacaaaaataaaaaattacgcatttgttctttcttcgtcttctctcctcctctctatgtgcccctctctctgttgaaaaaaaaacaaaaagtcttcaattttccattttcttctcctctgattcctcaatttcgtaccctgaaaaaacgaaaggatctgacctttattgttcactcgccggaataatcgcctgagtttcaagaaagttgagcttttgatctcggagaagtaataaagactataattgacgatttgggtttgtgttgatttggagattattgggtttcttgtggaagagaaatgatagatatccctggaacaccagggactttgactggtttagtcttgagaatctctcagtgtgtttttgctgctggttccatttcttatatggttacttctggtggcttctttagcttcactgctttctgagaaagtctttttgttctgcttgatcagattttaggatcgttaagttcttggattagtgtgggatggtagatgaaccgtatagatccaatccccagaaaagtgtttagcat

SEQ ID NO: 40654 - DNA, 410 bp, Arabidopsis thaliana landsberg
tggctaataaatcttgcccatcccgagtgaagcatgcttggggaaagtctaccattctgcagccagacttcatttgcctaatctgtgtgattggatgggccttcggcggcttcatctgtgagccaaggcaacacttctgtccaggttggactccaaatactatctgatttttcagccttttgtgcccgaggatggtccacttttctctctgacctgaacaaccaggctgagcttcccaatttcagcatagactctgacttgatgttaggtacctttacaaagatcatgatgcttaatctatcacgtcaggttacatcacaacattcaagattaaaacgctggggcacattcactggagcaggggtccataccatggcgtcggagctgttatccaacccatagcggagtgt

SEQ ID NO: 40655 - DNA, 308 bp, Arabidopsis thaliana landsberg
aacaaaagcatcatccgtaaaaaacacaaacaacgaaggttttttttgcactcgccatggtgtctcatcttcaatgtatggcatccacattgtttacttgaggtacaagcaaaacgtctaagctcgtcaacctcctcttaatggcttcaagttcaacttcattcccgttaaccaccgccccaccgcagggtgtcaggtttaaccggagaaaaccgaggttaaccgtgtgggctaagcaaacggcgtttcaactcgggaaaacgaagggtgatgatgactcggaggggaaacaaaaagggaacaacccg

SEQ ID NO: 40656 - DNA, 953 bp, Arabidopsis thaliana landsberg
gccatgtgcctcttaaagaatcattttgtgaaaaaaagaaaagaaccataaaaactgattttctcattagtttcaaacaatgaatttataattgtttatatcaactctcacataagctcaattgcaagtaactaacttctccttcacgttgcttcattctacatatatgtatgttttatacacttattcaaactatgaaacttcacactcttcatctcctcttattgctaagacaatcaccattatcttaacttgtataaatcaataggatcttgctacaatcctctttaaccaccggagaagaaaatttctcttattttctcaaatacaaatattactttctttatctaaatctatcttttgcttcatctcaacagtggtcaactactattgtgcaatcagtgagttttccagcgattttaatcttttcctatgaatttcccgatccacattgaagttctaacttttgttttaacatggtaccataaccatcaattttacatatgtattgatatggttacattttgttgttgttgccataataacactttttgagtttcgacttgcaaaataggcacttttacatttttgtaattttatatctctgatatagaacataacatttcaggaagcgaaagtttattgttcagggtctttcagcttccgtggatagaagaccaaagaaaggattggtactcgcagagttcaacagaaacgcagcgtctcgaagccggttgatgtctgagtcacgtttcgatagagataagaactcagatccttcctctctcttgaatccacaaagttccatgaactcaataccttttttatatcttacaattctctcatggaacaagcggttcgtgagacaggttcttatgtatctgtcttcgactggctattttgccacgttcctcacaattgtcagaagcgtttcaaataccctcctcgtgatt

SEQ ID NO: 40657 - DNA, 883 bp, Arabidopsis thaliana landsberg
  unsure (1)..(883): unsure at all n locations
accggacatgggtggtctagtacatgtcatacatatgtaacggtgatttgttttttcccaacaaatggacattttaaaaaagttctaacatgttttctaacacaagaattctaaaatcttaggtccgaaaaatttacacaatagggaccgtaacattaaacaatctattctgtaaatagaaatttgaatcccaaaatatatttttgttaaaaaaatgtttgaataatcatccatgttcataaaagtggacacttttttgtttgtttgttaatgtggcgacttgcattttaacaacactacaaattatactaaactatttctcgctataagaatatcatttagtaacgaaatataattaccaaatagctcatatgaattaaaactaattaagcaccctataatctatagacgttgctgcatacatgcaaaacactaatcccccattacaagcttaattaattatgtatattaggcctaatttatattccaattctatatataatatatgcatggatcgttcctcaaagcagttgcaagaaaaaatctaactaaaaaattattgtaataacctagtggctcttacgattgattaataagtcatctacgtacccggtcaataaccctcaaattagtgtctaattaatagagtatgttatacgttttaaaaaataattttgataccacccaactacctatttttatactaattaattaacttagatttattatccccgaattcatttatctatctctttctataatttcatgcatgcacattactagattngaatatatagataaaattaggaaaagtcagtaggctaagaactccgatcattatcaagaaattcanacacnaaaatataagttcttttttttttta

SEQ ID NO: 40658 - DNA, 565 bp, Arabidopsis thaliana landsberg
tatgtcactgaaccaatataacaaggtctagattttactacaatttattttttttacaaactttcaatatgcgtattagttcgttataaaaagatttatatgcaacataatactgaggcctgagggtaaacaaggtttcgatcctaagtgagagccacttcgatgaaaaccttcaaacgtatgtatgaacatgaaatgtcactcaacattcttaaagatacagtataatccaacgagatagatatctcaaggttttgtatagggccggttttaaaatttagggtcccaaactaaaaaagttttacagggaattttttttatagacaagttttaggaaataaaatcaaatttaaaaactatcagaaattgggggcttatactggggcttttataatattgggtacattttgggccataaattagagaaagagcacattatgattgggcttatgaagataggcagtttttgggaaataaattgaccaaattgcccctgcaatttcactccttcttctaaattgttttgcagaatctctttgaattgttttgcagagcctatattgat

SEQ ID NO: 40659 - DNA, 227 bp, Arabidopsis thaliana landsberg
aattttaatctataacattagttactttcggtttaggttcgtatgtttggcgccatctatttcaactgcttgaactgatgatatttggaatttgaaagaggaacttatgtaacagcttgtgtgaggttattaaaatctttgcacctcacgccttcaatatttcgatcttttgtaggttggcccagtcaatataatagttggttctcatgtttggattgaagattcct

SEQ ID NO: 40660 - DNA, 851 bp, Arabidopsis thaliana landsberg
tgctgaacctaagacctccttcttgagactgcttttaagatttccccattactaagactttcttcttcttccttttttgcctctagagcacaatcttcttctctaacaacctcagtcaacaaaccatcaacatgatcaacaacaacttcttcttcttcttctacatgtgcatcatcatcatcattgccatcatggtcacgatcatcaacaaccgtagtcgaagaagacactagagggaaagtattctccaatttgagagaaccagaagcgtagatatgaggagaaggcttacagaaacagatgaaagaagggcactggatcttacacagcaaaaccctcatcaaaacatatgttgggtctttaaaacacccgatcatcaaattccaaactttccctctattctctttataaagttacaaccttttcgtgcccattgatatgcccagattggactcaaaaagcttggaggatttcgatctctggatttctgaaacaaacaaaaaaaaaacacaaaagagcaacaaaggtttttcgaggaagaattaataaccacaatatataatatcacacttcaatagaatccaaagaccataaattaagcgttgatcagatgaggaagcagacaaaagtacagggaccacgcaatgctaatattactaattgagaaagaacagattccacaattgagaacaatcagccatggccattaaaaaaaaaaaggaaattgagagaaaggcatttacttcttatgaatttgtgttgtgtgagagacaaaagagtgactgaccaagtttttaagaatttatgaaaaagtgtttgcttctttttctctgagaagaagataaagtagt

SEQ ID NO: 40661 - DNA, 224 bp, Arabidopsis thaliana landsberg
aaagggtgatgagcgggaatcccttttcaaactaaggattctgggggttctaggggatccagttccgggaaacccaggaccggagggttttccccccttttcccgcccaaacttttttcaaaggtgggttttaagaatgagtgatggcccttttccaaccttaattgccaaacctgggaggggacagttaaggcattccatttatggaacagggttttatggtc

SEQ ID NO: 40662 - DNA, 799 bp, Arabidopsis thaliana landsberg
attttgtagtttgggaaatatggttttagtcttgtggttaatggttcatgatctggaatctttgccactttattaggttgattatagttaagttgcgttgactcacaaaatatagattggtataggggtaggatcttgtcgacctattatgatgttaaaaaaaaaaaatatcttgtaaatttgtttgttgccagtttccagtcttttccatgaagtcgatgttgttttacttcaaaatttaagaaatatatatgtatatgtgagaaaacattgtataactgagttaaatatatatcattcaaacatgtactattttataaaatatagacattccttttaatgttttaatactaaatatgtttaatttataaatttatgaagagatgatagataacacacatgaaaaggatgaaaaaaaaaatgaaaaaaaaataacagacatgaaaagatgatagttgatattaacacacataaaaacgcaatcctaaccaacatgcatataagaaaattgtgttctatttgtttcttgagattaaagtcttgatccaagatatagttctaaaaatattactaaaactcgatcatggttttgacattaatattgcgttattaattatacattttgtagaagttctgattttacactactgcatgtatatatcacatatgtggcttatcagccggacaaggataaacgcaaacacatgttccagaaccaccatcttggtcacagaagccacgtgcttgtgggccaaatctagaaatgcattccccactacaggcgggaaatcacaccaca

SEQ ID NO: 40663 - DNA, 1078 bp, Arabidopsis thaliana landsberg
  unsure (1)..(1078): unsure at all n locations
aaaatcactataaaattattatgattagctaacagatttaaattgtaaacttatttaaaaaaaaaaattaagctggtcttttgagtttttacaaaagattttggtggatcaaacgtgtagcccataaaatctatttttgttgtttggtactaatacgttttttcttggttttatatcaagccaatctccgtcacttatttctgatatcgaaaatcacttttttttttaacagtttaaaactttattatctcctttttcgcaaatatatgagttgtttttatcaaaatagtatatggaatataatggttcggatgtttagatctaatcatccagaaatttatgcggtggtgatagtggaggtacaaattacaagtttgtcgcggaacgcaacttttctctatctttcggaatatggtgtatgaacatattttgatcgtaagcttcatgtaattgctaattctttattgattattctccaaagcagctagtgtctgaggcaataaaaattttcgtaaatgacttttaaatacatatataatctctcagatactaaatataatatattcttaatatgaactaccctcacaagcatggatgtcgggaacaacaacatttcgacgcacctgaatcaaattccattttcattcgaacaaaaactggagaggtttgatcccagtcaccaaccgactcatccttgtaggctagatcccaaacactacttttctcaaccttccatttctgaccactcaaaccggttcaaaacgccctacgacgaccaacggttcaattcggcaagaattagcttttacaagaagcttacgatctaaatctgctctagcaccatactccgagagaaagagaaaggttgcgttccgcgacacgctttgtacgttcgtcatcaccaccgcaccaacgtttgtacaattggatctaaccatccgaaccattgtatttcgtgtaattttttgaataagaacaactcangtatttgtgagaaaaggagatactagggtttagatttttagagaaataagtgatttctaatatcagaaataagtgacggagatgagcttgatat

SEQ ID NO: 40664 - DNA, 531 bp, Arabidopsis thaliana landsberg
tcaccacgcgtatgcgcaatatgcaccgtctgaatcgtctggtcggtgatcaccagcggctcttcgccttcaaacatgtattcatactcacccagccggcgaccgttggtcagtgtcacatgcatttcttgcaagggtggcacaaacatgaactggtacataaaactcaacaggtcttgcgtattcacacgcaaatccagcctttgctcacctttgctcgttttcaaggtgatgatattggtttcccaatcaaatgttgcttcataggttttactggcgcggctgccaaacgcataccggtaaaaatgtggttttaatccatgcgggctgatttcaccctggctttgttgttccagcgatggatagagtaattttaacagccccttcccctcgaccagccaacgcaaactgtaatgaccggactcgtctcgcagatactcaatgttggcattgcctgccggtcgctcttcaccaataacgaaaatggaaaagtcagtactcacatgctggtacggcggtggttgagactca

SEQ ID NO: 40665 - DNA, 839 bp, Arabidopsis thaliana landsberg
atagcaccatggacgatccaacgttattgaaggctctattcatgttataacgtttcccctctttttaatgttattgaaactttgattgaaaaaaaagttattgaaactcatatatcataaataaatcataaacaaccaaaaaacatatattataactataaaaaattatctaaataaaatactactttaataatctggtaggagttaaaagttcaaaataaaaaaaactaactaatgcaaatctattgggggagatcaacagtttttactctatttaattttttatatatatatcaattttgttttaaaaaatcaaaatctcaatgtccatacaaattttggatcctagttcatggctttttttttttttttttttttgggggtgtcaaagatcctaatctatatatgccttaaggtgcttataccatggactttgagtataagtaaaattttaaacccaatattttcacatcataatttcgagctttggcgatggtaacctcaactttcataactcatatagcacaatttaggtacattaaattcaaaattcttacgacgagtgacgacatcacaaactttgtcatgaaaataccacatgagtgatgagtacttaatacacaaccatgttcttttcaaaaccgatgcgaccagtgtcggcaacaataaaaatatatactatcacaacggcaaacacaacatcggcgagacactaacattaaggtgatgacaacttgacaagtagtgttgatcaaattcgaagctaaagatatcagtgacacgagctcgttttttctgtcactatatgtctttgcttttgaaatggagatcagaaaccg

SEQ ID NO: 40666 - DNA, 848 bp, Arabidopsis thaliana landsberg
ggtttcaggttttatttgttgtttaggtttcgtttttgtgattcagaaccatacaaaaagtttgaacttttctgaatataaaataaggaaaaagtttcgatttttataatgaattgtttactagatcgaagtaggtgacaaaggttattgtgtggagaagcatattttctgggcttgactttgaattttgtttctcatgcatgcaacttatcaatcagctggtgggttttgttggaagaagcagaatctaaagctccactctttatcaggttcgttagggttttatgggtttttgaaattaaatactcaatcatcttagtctcattattctattggttgaatcacattttctaatttggaatttatgagacaatgtatgttggacttagttgaagttcttctctttggttatagttgaagtgttactgatgttgtttagctctttacaccaatatatacacccaattttgcagaaatccgagttctgcgttgtgattcgagtaaagttgtcgcaaaaccgaagtttaggaacaatcttgttaggcctgatggtcaaggatcttcattgttgttgtatccaaaacataagtcgagatttcgggttaatgccactgcgggtcagcccgaggctttcgactcgaatagcaaacagaagtcttttagagactcgttagatgcgttttacaggttttctaggcctcatacagttattggcacagttaagtttctctttaaaaatgtaactcttttaaaacgcaatctttcagggttttcaaggagataacattagctctgtgattggatttgcaggtgcttagcatttgatctgtaacttcttactgagagca

SEQ ID NO: 40667 - DNA, 854 bp, Arabidopsis thaliana landsberg
caatagaaaaatcgccaaaaggccccaaacccataaacattttcaaagacactcttcaccacacttgataagcgtgaaaccaaagtaacaacaagaagtaactgaacgtaaagaagtttaatccgtaacataatctgtcaaaatacacacaaattcttattttctacaacctccaacaaaaccctaatctgacaaaagagagattttaattgggcaaagaaagaatctcaaaatcttgaagaagaatctgatctttaaacccagcaagaaactgacataaaccctcaagaaacagagccgcttgatgctcacttgtagctccaacaatgtccataatcacactcttcctcaaacgattcgcatcaacgaaaatattcacaagctcttccatctcaatctttgctgcttcatccaccgacgttgaagccgtcgcaaccgtcgcagtaagcttcttcttcttcccaacttgatacgacgagacccaactctcagaaactcgagccacgaaacttctctgtgttttcctcatacgatccattaaaccaggaaccataagtctcattgtacactcaatctgatcgattcttttaaccaactcatcagaaggatctttccacgccatcgtcatctttaacggttgattcacaagatcaagagaagtttcctcgtcttcgtcgtcggaatcttgattctcacggtcgatgaaagaacggaggagattggtgaggaggtaaggatggatatcgccgaggaaaagaaacggagtctcgagagagttacgccatgaagggaagagaaggtaaggaatggtgttgtgatcggcagcaagatctagggtttcgtagtataagact

SEQ ID NO: 40668 - DNA, 214 bp, Arabidopsis thaliana landsberg
gcaaacactttagagccggcgacgttcttggcatatacttcacatccttttaatcaagcttcagtaattattatactatcttgttacacataaaccacaagaagttaagctttctaatcttcatatccactagggatgtatccatatcatggctggcttctaagtatggccaacgaaggtgcttttgtataaagcacacgacaaatataaaact

SEQ ID NO: 40669 - DNA, 724 bp, Arabidopsis thaliana landsberg
  unsure (1)..(724): unsure at all n locations
tttgggattataccttaaatatggagcccattatcgttcttagtagtgagtagagcttgttcacgttcatgttaagatctttttgctaaatttcatgttacgatcgtgtgttgatagaagaatgttttcacttgtcttcgactgaatcagtgttgccttctctcaggttatatctttcgtctatgctttcgtcaaggcatcaaattcatcaaatgtggtatatagagcgtatttaacctcatatacactattgagttcctataaagcaatggtaccttcaatatgagacaaaaattatatattaaatctgccttgaaagcaaagtgaaatttttgtctccaattataaagtaacataactattataatgagcttttgctattttgatctaatgttatcatatttttacctctacaacgttcatcatattctagcggttgatgttgttcatcttttgcatgcggatcatatatgcgtgtaatctggtcgttgtcgtttttgatgattacatctgcaaatttttattaattagcatttcaagccattgccattgtcaacgaatattcagtatttattagaaaaatcaacagaaatttaatatctatntagttctgttgaaatttaaagatataaatcaatatttactatatatttaattttagtaatatttttccgacttagatttgttattcccgttttttatatcgtcagtttagcgcttttag

SEQ ID NO: 40670 - DNA, 721 bp, Arabidopsis thaliana landsberg
ccgatacttatactattgtaaaatacataaacacaattattatgaaaaattataattttaaaatacaaagtgtgaacaatatgaattaagcatattaaatttcaatctcttacatctctttctcttgagttttcttttggaaaaaaataaaataaaaatccgcacatgtatgttccaactgctccgacgagctcatggactttgcatgccgtcctctctctacttctcgcgtctcataaaccgctctttactctcaaagtctccaactttagccaaaatcgtccatgcccagctcctggaagctggattcgtacgcactacttattggggaaatcgctgccttcagctctacttcaaatccggatccgtcatcaatgccctccaactgttcgacgatattcctgataagaacaccataacctggaacgtttgcttaaagggtttgtttaaaaatggttatctcaataacgcacttgacctgttcgacgaaatgcctgaacgagatgttgttagctggaatacaatgatttcagggttggtttcttgtgggtttcatgaatatgggattagggttttcttcgatatgcagagatgggagattagaccaacggagtttactttttcgattctagcttctcttgttacttgtgttcgacatggggaacagattcatggtaatgctatttgtagtggtgtgagtaggtataattcggttgtgcgg

SEQ ID NO: 40671 - DNA, 650 bp, Arabidopsis thaliana landsberg
cttgtgttcttttgtttctctccatttgtgcaacttattttttgccgtgaagattcttttgcattttaaggatgttgactctattgtactaaataaattgaagaagaaagcttaattaatcatatgatgacatctaaagtttgtgtcctcgacagccaaattcaacctaaagatagaaatatactcgcactgcacttgttttttttttctttggatcaaatctcgcactgcacttgttacatacatatatttcagaaagaaaatatatgcagttaggcatgtcccaagctcattatcttctacatcattctcaacatatctttatcttttaaatataaccgtccatgaggccaaataaagaaagtttatgcatgcggcccttatttcgttatatatgtaatctgcccctattttaacataactgtttaaataggctaatggtaaaacgcatacatgcagagctcgaaccccaagtctctaatttgattgtttttctcatttttagaaatatttacaaaaataagccttaaattttacaaaaattacatttatcaaaacatcacattaaataaaataaaaaatcgattgtatagcacgggaatcacctattatttattggaaattggctctaacaacccatagtgttattt

SEQ ID NO: 40672 - DNA, 428 bp, Arabidopsis thaliana landsberg
ctctcgattatagcttttggttgtggattaaaaatgattatagtttcattagcaacgatcgaatatcgtctcgaacaagaaaagatccttatgtttcttggtttaaaggacatggtttatagtagaacgatgttttcttctctttaaattataacatcaatacttttgtttttgagaatttttatttgatatctgtaaaatatagacgttttgtttttttaattatatttttcttattttaaagtaatcgtcgaaaatcatgtgtcagttaaggtcttgcttcttcgtgctagttttaatacttgttgtcatgtttaattacatacatacagtgatacagacatggagaaaagttaaccgctaatactggtagttagtagttacacgagattttaaactgaagttaggctggagtgtgggttaccaca

SEQ ID NO: 40673 - DNA, 873 bp, Arabidopsis thaliana landsberg
atcagattttctggaatcttaagttgaaagaacacactgtcgagcaaatgaaaatgtacaaaataccatagactaaacgcaacgtttgtgactagtaagaaatcacaaaacaagtatcacttcaggatcgtagccagtatttgtgtacaagaccgcataatttcccccaagtccagctatttacccataagaatcaatcagaaagttacaagacacaaagctttttcgaaaggccaacgtaaaacataatgctaataataagattgcttatctatctacggttatagcatcaaactaataatcaaactccacgctgaagatccaaagcaaaatcaagctctttgaacaattgactaagataggaaccattttagaatcctactgttctgttatcctcatcaggattttataaatcgggtagacaaaatcacgcaaaagcaacctttactagtaacaatatgatgattttgcttcaagaatccaactgaaagttaaactaagcgtaagtaatctgggcgaaagaagtatcagtccatggtcgtagcaagcatttgagtaaaatgactgtataaattcccaaaatctagctatctaaccataagaatcgatcagaaagatgaaaaagacaaagctaacacaaacctaaactaaaatgctaataccattgaatcggcctggagaaaatcctgatcaaacaaactctacggactcataaaccatcgattcagtaagaaaactaacgaaattgaatacctgatagtgtcttccgtcgagctttctaataccgtaacccaattcgaccttgccaaaggatttgatctcggtgaggacgccatttctgctgttaaccgtgttaccaatgcgcgcaacgag

SEQ ID NO: 40674 - DNA, 866 bp, Arabidopsis thaliana landsberg
atgagacctggttcacatgatttgatctttcaacccaacctctctttagttttaagtttatgtggatgcagactttcaatttcaaagtttgggtgttttaaaaataaatctttatatacataattaagattatgagagtgatcgatctatatccttaatatctttaaaatatatgctcttatatgccttttttgtttatcttcatacattaatcaataattaattagtcgcctaacaataaataaataattgtatggctcaaaaaaatttaaaacataaagtgggtttttccttaagaagctagattatactagcctcagaaatcagaataaacctgatttgcaccattgaaggaaacctagtacagcaacccactcgaacaaacctgatcgatctgcaccattgaaggaaacctagtacagtggcccaactcgaacaaccacatacacacaaagaactagagagacatatatgtaggtaatatatctaatttagtgttttatcatatgacaacacataagacatacaaaaatctagtgagacatatttgtggatgtagattatcctaagatatatataatctatatctctaactctaatagaatgtatattgattgcataccctactttttaacccattgattaagccatttatcaatgagaaaaagagattctcatgtgatgcagtgatgctaacaaaaagtttacatactaatttatactaaaaaattatgacgctaatataagtttatgtactaaattataccgaaatattatgtataataaattattagaatgcaggaaataaaagaatcactgacaacttaacaagtaacaacagctccaatatgccacgattatgtaat

SEQ ID NO: 40675 - DNA, 675 bp, Arabidopsis thaliana landsberg
aattcaattgtgtatggaacatgaaaaagagtgaagtaatcaccagagatttgtttgaccttaagaacggtaactatctcggaagtgcaaagtaacttttatatttaagagtatagtcactcaactacaagagacaaaacacacattcaccatgacaaaaacaaccattattaccgaagagcaaaacacacatcatttcataagtgaccttgtcaaatgttctcttgcagtcgcgagtgcttgacttatcgtctgaaggaaaaaaaaaacaccgcagagaaatgtatcaagttcattagtgatggtgttacttgagagttcggatcaatgtaactatttcaaagtttgtatcaagatgatgtaattatcaagaaaaatatgatcacaatttcaaaaccactgtacctgctcggatagaggagcgttagggtcagtgctattgatccctgctttacctgctattacatttgcatccgtctccagaacaatactgaaatataagatagttttatttgactatgtaacctatgaaacagtccatttatgatctaatggttttagtaatgtcgaaaagaagatttttttttatacccgccatcgataatttcatcaaagcttagaaagatgagatcaaggttgtctagtgcctctctcttatcaacattgcttctgtaa

SEQ ID NO: 40676 - DNA, 236 bp, Arabidopsis thaliana landsberg
  unsure (1)..(236): unsure at all n locations
ggacattgaacccattttatatgatgggagatcgacggagtactggtcgcgggactgctatgcgctatacaaggagctactgtagaaaaaactttatgagaagatggagaaggcgcaaacacatgacgagctcataacccatctgaagccggaaaaacatattaaatgataacaggtannnnnnnnnnnnnnnnnnnnnnnnnnnnnnnnnnnnnnnnnnnnnnnnngttacattt

SEQ ID NO: 40677 - DNA, 523 bp, Arabidopsis thaliana landsberg
aaatcctataagataacaacgtaaaaatgtaataaaacataaggcgtgaattgaaacataaggagtttatcaacgtcaaaccagtatctatcattcagatttcagaatcaatctaaaacacaatcatcctcaatattctgtagtccggtcgccgcatcaagtccaggaacaagagcgtttgagaccagtgccgtgcttaggactttagaggcctgtgtccaaatccatttatgttgagtatatgcactagttattcatgctatgctttagttatatataaatatattgagttctctttatctccttgaaacgcatcatttgaaacaacaacataaacttcaccaaatcactcttacaacaacatatcaataactttttttatcactgtcacaatgacatatcatcaacaaaattctaccttttcttttgcttttgctttcttacatataataacttttttgtaacgaagtggtaacgaaatatccttaaaacccctaatttcctaactagtacatgccggatt

SEQ ID NO: 40678 - DNA, 559 bp, Arabidopsis thaliana landsberg
ttttcttaaatcccaattcgaattttaaacatgtgaaattaagaactatcgcatttatcaacattaggtcagtctacgtatatttggaaatgaaaaatgacgaagatcgcaaatgacacaacattctgatgaccgtttattttaaacataaacatgtaaaatctcgcgtgcattttgggaaatatgaacttggctaacttatataaaaagaacgaatagaaatcaacataaggtttaattataatgtgattaactaagccttgaagtgatcaatctggatattctcaacctcgagtttcttgaaatcacttctgtttcttgaaacaaagaactttccccaattgtactttttataacaaggcagggttttcctcacttataaactcctacaatggctcaatattggcttcatgtgatgggaagaaggagaatggtcttgagaatctctctatgcttgcaatcacgaccactctatgttgagcactacaatactcatcacttgtccacacctacctcacaccagattattttcactcatcaactcttatatcatacatcg

SEQ ID NO: 40679 - DNA, 575 bp, Arabidopsis thaliana landsberg
aaatctactctgaatattcgaaaagtgtatcttgtgaaatagttttaaatagctttctaaaaaaaaactgttttaaattagttgacaaaacaatattttggattttaaaaatgagacaggctttagagagagcaagcatgcttgagattgggaagtgcgttacacgcttgagcgtgcatcaaaactctttctttcgtacagttgcagattaaaatcggttcttaaaattatttaatatatgtgataattaaattaaaattcgtatggtaaaattaaaatcaacgacgatattcgtttctttgaccttttttttcttttgccatcgatttcttttcacttaaaagtttttctaaaagaaagaaaaaaaaaaaaaatcttgaactttaagttttctattgcaaatcaaagttaagaaaactgcacatgtgcaagtgcaagaacagaaaatggagaatttcgaacaacgttctcttgtacaagaacaggtgtttcaatatgcggttaagtatagtttttcaaggcaaagtatttgttttcaaaatcacaatatctgttaatagtgacattttaaaaaa

SEQ ID NO: 40680 - DNA, 574 bp, Arabidopsis thaliana landsberg
gatgtggacgatgatgtaacggtcgatcttgttcatgccctgcccgcgcgcttggccaccagccagagggcaaggctgagcatcagcacatgcacccaccagagtccgatcccggccggaacatgtcccttggcgatccaggcctggcccaccgcgatcagctgtgagtacaccaggtaggccagaatgcccagaatcaatttgccgtagcggccctggcgcgggcggatgtgcgacagcggcaccgccagcagcgccagaatcagcaccgaaatcggcgcagcgaaccgccactggagttcggcgcggtcctctggatcggcagagccccacagttcgccggtctggtacaggcggcgcttgctgctggtgaagacgaaattgggcggctggatgaaggtcttgaattcaccgaagcgcacgatgtcgaattgcgcctggccggcttcgccgcgataacggtagccgtcattcagggtcacttcgcgctcgccggtatccggattggcctgctggtgcccacgcttggcaatgatcagggtgtcgccatcctttttatgcacgcgccgcaaac

SEQ ID NO: 40681 - DNA, 607 bp, Arabidopsis thaliana landsberg
  unsure (1)..(607): unsure at all n locations
tttttctttcccaaaaaaacaaaaaaacttaactcaatatagacaactagaatggataccaactaagcaaaagaaattcaaaagacaaatatatattggatatgaagttacattattttcaaactttatatactactaaaagcctaaaaatttgttctaaaatgatatccaaataaatggaaggcatgaatgtcatatgactaaaagagaaaaacacacctgtatataagtattggatcatgctgcctccgagtgacaaaacatacgatgtgggtctttattgggccatacttaaatggaaaaaggagaaaaaaaattgggcaatgtctatggtcgaaatttatatgttttacatcaataaaatcaatatttaattttatatagtgtgggtcttaatctagtattatctacatagattaaatcaaagtactgcatatggtccataataatacaaccaaagcaaattaaaattttgtggcacaaaacgacatcattttactcagaagtaatatgcaatntcgtttacgcacacacgtatacgcgctaataacccgtggtgcttctcaaatcacataataattaaagnctttctcttcttctcttctct

SEQ ID NO: 40682 - DNA, 774 bp, Arabidopsis thaliana landsberg
catttctaattcgttatatattattgcaatggattcgggagtgtattgggattgatattatgatatatatatggtccccatgtattaatacaatagatttcaatgttttctaaatctaaaacgataataaatatataatttaagtattaaaaatatttttttttcttttatgataggattcataatgataataaagttataaaataagactgtgaccatgtagcccatcaacatttatagtagtagatgaccttgctcatagatcacaatcaataaagaatcaatttttattttttttgcgtgtgtgtgttttaagttttttttttttttggaacaacaatgtatgtgtgagaaatacctaatttatatggtttgagtcacaatttttattttattttaaattttcctaatgatatgcgaattcatatcaaattttcattttacatgattataatatataactcacaagttaattctaatatgaccacgtcggcaaacgcaagctgttcattgtaaacgttttgcatgtaagaagatagatttgtaaatatggtttattaattttgtaaacaggttgatgtcatttagtggaatccaaaaaatttcatgaaacttacactcccaccaaaccaatactctttcaatttttaatctttaataaaattatgtctggttcgttgaatatccaaaaaaacatgtttatctcatggcatgtcgtcacaatatattaatttccgattatgagactacgcctgtattcaaatttaaagtggg

SEQ ID NO: 40683 - DNA, 366 bp, Arabidopsis thaliana landsberg
agtgaaaatccagaccaacaaataaaaatatagatgattcgattttcagaagttggtaacaaacttgcacgatctaagtgaatccaaaacaatagataaaatatggtttttaataaaaacaattaaaataaaatataattatagttataatttaattacctatgttaattttttatatgttttcttagaactaatattatatgtccacgagaaagaaacaaaagcaaacacaatttgtgtttagttttcagttccgctatttttgcagtttttcctccacgagaccaacaatcttccaaactcgaaaaggtttgagcattttcctgaagcaaattttgattcataatcacagatttctgaaaaatg

SEQ ID NO: 40684 - DNA, 826 bp, Arabidopsis thaliana landsberg
ctttgaaacaccaaagagctctctttttctttacctatctgtctctctagatgtgttagtgaagaaagtttggtacattgagttctttgtttttgttttttttttaggttccaatgagatttattaagtttctaaatcactatattaaatatcatctcacgaaccaatattatcaagagttaaattataatttcattaaagttaaatgcccaaaaaaataaacttaaaagcaaagttttagataaatttacaaaattatttgataataattactaaatcttataaacttattttaattgaaaaaactaactcgatgcaattatttaatataatgtcataaacattttttatacttttgataaaataaaagataataataaccgtcaagtgcccacttccccacaatcatgatcaaaccccacttactcctacaaactctcaaatcctctgttttcactcattatgagcaaattcatctttgaagtttcagatacaaacgaacagaacacgatacaatgttttgttttttattcggatggcgaagaacctccaagtgtaagagtgtggtcaaacagcttcaatgtcgtctaaacctactcaagaacaagaaatacgctatttcttcacatttacgtaacgacatagctcagttactacgtattggtgaacgagaccgtgctcttcatcgtgctcaacaactcttccttgatgagaatctaatgtctctctaccacttgttgcttcacttctccgacaaaatccttctcaacctctcttacatccggagacgtagagaccttcctgatggcatcaatgaagctgattc

SEQ ID NO: 40685 - DNA, 558 bp, Arabidopsis thaliana landsberg
ggcatagttccacttccttgatgaagtatcttctgattacctccataatcgttttcttcagtcattgaatctatacaaactggccagaaaatacaagaagattaaaaaactgtaacaatacatccttccacagaaaattacaaataacaacattctacacaatatccttgcttgcttttttacatgaccaacttaaaaaaaaaatacatcttttcaaagaaattacaactctgccaattcaattaggctgagactttgttacaagccattatcaatatgtccgaattaaaataaaaaagaggaactttagattacagatctgaaaaatttgggatctagctcgattttttaaacaagggtgttacaagatttcataaatacatatagaagagatcaaattacatacatagtgtgacttacaatgaaggggctacacaaattttaaccctttccgagaaatctataaacattagggttcttacaaaatcggaaaagaaacaaactagatctacgaggaaagtacagttcaacgagagagtaagaacatcgaattgaatt

SEQ ID NO: 40686 - DNA, 513 bp, Arabidopsis thaliana landsberg
gaagtaatggtatgttttgctgttcgggttttgagttttgttttgactacattttatctggggtcctgactaaaaatcccatcacaggccctaccagatgatctaaagaacaagcttagcttagatgaggatttggtgtctagttcaagccctaaggaagcactcttacgagcgtctgcagatagagtagccatgagaaataagaacctcaaaaggtacacatcttttgaggagtgtgtgagaaagctttgttacttccaacccatgtgtccttagttatgccatttattatacacagaggcatgtcacactcatattcaacccaaagagataagaatctgtccaagcttgctggttattcttcaagcgataggaggtacgaagaaagaaatcacgactcgccagcgaacgaggttcaaatttgttctctttcattccctcttggcaactttgaagtcttccttttaacttaagggtgcacttcttctggttttcgacaaatgttaatacttt

SEQ ID NO: 40687 - DNA, 398 bp, Arabidopsis thaliana landsberg
gcggctatcgtaaccaagcccaatcatctcaagctcctcctcagtaaacttatccggatgactactgataatctgactccgactcttgtcagggttattgtacaatctataaaacaaagattccgctagcttcttcgacttttcacgagcattcctcttcacctgcttcctcatatccgaatctccttctatccttccaccagatgaacctcctccaagctttttcttgctcctcccggccaatgcccgcacgtctcgccggaatccaccatcttctctgagcaaaagctccgaccttttgacactaaacgcataattcctgtcggtaattgccggtaaaaccgaaacgatccttcgtaccccggaattgagtggagatttactgaaggaaaagctag

SEQ ID NO: 40688 - DNA, 614 bp, Arabidopsis thaliana landsberg
tatagaaaggtatttttaaatgtaaaaagcaaattataggaaggctgtaacagaaaaatacatataagatttaagggaaaatatagatataaaagctttctaaataagaagatttatatcaatttattttcattttattagttgtcttgtgtttgttagtctaatgaacctgtaaaaagaggaaggtaatatttgcctattaatgtccctatatatgttttaccatataaacaagtttgaactttttttttcttacactagaccaatcagaaagaggatatgatgagttgtatatttgtaatgttgtagacatgcattttctttacataattttattatactactgacaacaagaaattaatttatcctacatgtcagttaaacattataattggtaatcacagaagcctatgcgtggacaaaaaaaaaagttgttgaaaaactctgtgagatttaaaaatatatacaaaaggcaatatgtaataaaagttatgtaattatcaataagagtatctctaattttgtctttttacatttaattacattgtattaaatattttcttccattattagtcataatagtctcattacattacttgatttaaacttttcta

SEQ ID NO: 40689 - DNA, 469 bp, Arabidopsis thaliana landsberg
tcggcgcgctggccgcgcgtcagttcggtggcatcgcggcgtttttgcgcagcttcttcacgcaaggggcgttcgagccgctcggtttcactcttgaatgctttgccggcatcgggcggacgacgcagcagcgcggccagagtgccgccgacaaaagcgccgacaacggcgaccagcaagaccatgacgagattcatggccgcattctaatggcgacagccgacggcgcgtgtcgcatgccgtcggctgccgctgacattccctagttgttggccagcaggtcgatgaccgacaggatcaggaacgtgctcgggtcatagaccacgctgtagccctggtagtagccaacgcgatagccgcgtggcgccgcctgcacgcgataacggtaggccgccggaaccgcctgtatcgcgtgacgataaccgaccggtaccgagcgaccacggtagaacaccggcttgcgtacgta

SEQ ID NO: 40690 - DNA, 888 bp, Arabidopsis thaliana landsberg
ggtgattcaaagtcccatgggagatggaggactatacttttatcttatcactattgaatcagcgttgttgtgaaaagaccacacgactatataaagttattgtctacacactttttaaagtaaagctatttaagaaccatacttctcggatctttcttgataatagtgtttatccatttcactaaatgttattagttgtgctaagtaagatgatattcctttacgtgtataggtcttatgatactttaatttgctctctttctggatatatgccaatataagcacttatattattaagatatttttattctagttatgataatggatggttctgtttctaagatgtcatggtttggtttcagggtaggggcggcgaaacttcttatcgagaaggaaaactttaagcagagaaagaatcttaacaataatgaggccttggggcgcaatatattccagatagataatatattgcaagttgccaagatattgtgctagtaggcattggggcaatgttgatattctgatcgtcacgatgcttcacagcgacgttctttgcctaggtattgtaatggtaaaaaaggatcactttccccacatttaagtcataagtttaggtaaattcgttagctgtgaaagcgataatcttgagttcataaggtcgattattttgttgttgagcaagatggttatttttactttctctctgccccttttaaaattggtagatacgttgcatcagtaaacgcttgagggttttattgtgatatctccaggtcttgagtgatcattgctgagaattgacccggagtagcttacaaggaatctgtatgaaaagtaaggtaaaagagtaagcattttaatttgttacaaaatatctgtcgggtttag

SEQ ID NO: 40691 - DNA, 674 bp, Arabidopsis thaliana landsberg
ctagagtaaacaaaatggtgttcacgcgataaaccatcatcctaaatacttttgattatatacatcaccttctaaattggttcgaaaatgatatgcatgcgtatatggagatatgtaagatggtacctacacatattagttagagctccactcttgttggttggtcaaagatatatatgatcataatcatggtgattaagctatgaagaagaaggtggaaagacctttggaccaagggatatttccattttagtgcataaatttccattttagtcactcatctgtatcatcatcatctattctcttcttgtttttattatgtttttagcgaattaattaaaatgaaaatgaagagttaattcaaacttttaccaaaaaaagaagaaaatggagagttataaatgggttatattataggagatgatgggtgggtaaatgcagatattatagggcaagagacctaccttcttttctccctttgactcacttttccctatttcttttttcagtttcatgacatttacaattgacatgttaatgctatagcctatagtctataccctaaccatcttttaggcctcgagggttctttacgatattcttcgttttatataagggaatataatacttttgcttcatcatccatccaatcacataaaaatcaacgatttacg

SEQ ID NO: 40692 - DNA, 412 bp, Arabidopsis thaliana landsberg
ccagcatcccatcttcggtctccactcagtgtttggcaattgataagactttgaggaatcgtcttttgtcctttccttcctcagacatgcgctcttccactactcttcttcagttttacttctcttgtatctcttatctcaagtaacatttgtctgactgttcctatgttattgggtttacagtatgtaatttaggttgtaacctcacgtttggtataaaatcttaacattagaacaaaaaaaaaaaaaactgttcggcgacgggactgaggtaagtatatataatggccccataaaatttaaacaataggacaaattctagcgaccataacatatactgacatagtctgggtgagtccttaacgcaggattggtctggtcttacgtggttggtataaccctcattttacgt

SEQ ID NO: 40693 - DNA, 409 bp, Arabidopsis thaliana landsberg
actgaactgagcatatctgctccaaccgtacggcaaactcgcagcatcagaaacatttatagtacatggacaaatgatcaacattgttccctttcgggaaaattaatatgcgcctgcataagcaaatccaaaaaggtgtcaaccaatcaaaatgcatactggacaaacaatggcaagaaaaaagtacactagagataggtatacactactattaccatttgtaacctccaacgacaaatacatcggagtaatggcttcctgggtgttttgcctagagaaattagggatagtccacgtgaatttcagagtaggaggatcctcagctgactggttcttcacagtactcgcaacagcttcggtttgggtaactattaatgcattaacaattaatggaaaaattacaccacgg

SEQ ID NO: 40694 - DNA, 742 bp, Arabidopsis thaliana landsberg
ggccgtcattatatttatatttaaaaacttcgtcgaggaagacttgaaagcgttcgataaatgggatatatgcaatatcaacctagcaaacaaaatcgagtaattttgtaaccatagtgacacattcaaaaaaggttcattcgcacttaacattgtgataagactaatataccaaactaagctcgccaagggagaaaggaccatcatcaaactttttcagaggacattttccacgtaaccgaaggttgatgctgcgtcaaaaccacacatgtttaagccttcagatgcccaaaacaattgacaagacacacaaaaatcaaccctacctgtttctttaaccgggtcacctttgaaagagccaaacacagtttttacaaatgtttcatcgacatatttcaacaattcttcaccaaactctctctttgcagaatcctagaccaaaaatttcaaaaaaacagcatctcatcgaaatattgttacttacatgacaagaacaagtctataacatcccaacaaggtcttacctcagggtaaagtgaaggtccatcaaaattgctatcgacatatttgattatatcaagactctccccagtgatttttccattgtgttcaagggcaggaacctacatacatcattatcacaatcttttagagtcttctattgtcacttttgaaagaacgttaattagtttataaggattaatcataaaaataaacggcaccttgtttgcaggattaactt

SEQ ID NO: 40695 - DNA, 352 bp, Arabidopsis thaliana landsberg
aagcatcccagactatggcataaagatctcccccatttccattcatgtgaggctcaacaactccttccatagcgttcgccgcaatcgcggcatccacagcatttccaccggcttttaaaatatccagcgccacctgcgtggtcagaggatgagatgtagccgccattccatgctgggcgatcacctgggaacgggttgcccataattttccgtagtagcgatcctgggcataagcgccaagcggcaataagaacaaaaccagaatatacttcatcatagctaatctattgttaaagatacttttttattattaagatgtttcgggcacccgctccaggaatttatagccttt

SEQ ID NO: 40696 - DNA, 475 bp, Arabidopsis thaliana landsberg
acattcgatttttataagattcctcttgtgataaatccaatgtaactatatgatgatttcaaaataatacaaatatagaaattgatctcaatgtaccttccaaagaaaaatgacaacctgtggggctaaaagttgctgtacaatcatatctgacaccttgattccatttttttttaatacaccaaacaatgattagagcataaaggcctttcgtattacaagcatttattacttaccatatataaaataacaaaacttaccatattattgtcgatctagtatatatatagatcgatatttctacgtataaatagggcgatgttgtgtgacatgtctttcagtcaccacttttggcgggttctcgtcgacagagattgatcaaatctaattatttattgttgatgatagaaaagttgtcatgcatagatttcttaagcgagaatattcattaatacaggattctcattttttttta

SEQ ID NO: 40697 - DNA, 1132 bp, Arabidopsis thaliana landsberg
gactgtacaaacaaaaagaactctggagacctaaagatccaacctatgcaaaataaaaattcggtcggaccaatttaatctagcgaacccgaatccttatagtcaactatttaccgatacatttccatataacacagtacacaccattaaatcaaacattattggaagaacaagatagaatattggcttaatctcgaacgattagagttatcatagagcctcggagcttttgtcacatataatataaactatggtatatataaacatgactctcatttgtatttatcgcaaggtacaattccaccaatttttttcgtcccactcatacagctttaattgtgaaatcaatccataaaaaaccaacatgtaacatggtctttataactataactataagatagtaaaaaattcacatcaacataaaagaaaaccaatcatattggctaaaaaaaactaacggtcgaaaaacgtataaccacaaaaccaaaccggtccaaccggtgtccccaatcactatcaaagcattaactaactttcacaaggaaaagcatagttcagtttcttaacatcgcttcccatcctcttaaccctgtttactcgaatcatccaccgttggatcaaacacgcgctacagagtctagcgcgtgaccgaggtttttacacagtggaatattaccatgcattggaaagcggcgtctacaacaaacggcgggtcatgtcaccgtcaaaatcaacctttcttaattcctaacgccgttacttatctccgtttactaaaaacgttaatgcgtgtgagagtgaagatcatatactaattagaagtggctaatgttttaacgtgacattattatcatagttaatggttcgatcagagttttaagtagtaaatgatataagtgtgtgtatataattgcatacatatatactctctcactctgacagatttgtcgtggtcttagtattctctttcatggctagttatatagggctctagtacattatctctctctccccatttctctgtctctctcttcttaacatctctggctctgcatttcttgcagttcacgctaatcacctgttgtggtaccctcttctctctgcacaatggcagaacaagcctgaagtttcg

SEQ ID NO: 40698 - DNA, 455 bp, Arabidopsis thaliana landsberg
tgtgtgtaagtgagagatgatgcagattaccatctttcaatttagttgactttaactccacttggacgtttcccttccatcgcgtcttttttgtcacgacaatctgtgcataagaacggtccttgccacggttttagacttgtcgagaagattgaacctgcgtggactgatattccctcgcttggagctaggtctagttggcatatggcacacgtgaatatccctcctcctgttgttgattccttagaacagtcacctgatcctaacctgtagaaaatttgttagagaaaacgtaaacacaacaattttatacgtattgaagagaagtaaaaggagtgacctttcagcgagcattgccgaaccttcttcgaagagctcttcaacaataccaacagtggaaagtttcttggagagtttattagatgagtttgatttctttctgaagagtaatgatt

SEQ ID NO: 40699 - DNA, 524 bp, Arabidopsis thaliana landsberg
  unsure (1)..(524): unsure at all n locations
atttcattttcactcttttgatcttgaactctaaaacaactgttcattaccatgtgttttctcggtttttaatgtgtgtatttgtgtgaaacaaggccaataatctatatacgaaaataaagaaaatggttctttacaccaaaacttccgtattaaaaaaaacatttaaaatctgttatcgtcactgtaataaacaatgtcaatggttacttatgtataagaagtagaagaagatgacggaaaacaatctttgtcactcttttgcaaggactgatcatcttcttcttcagttnnnnnnnnnnnnnnnnnnnnnnnnnnnnnnnnnnnataataatcagtccctgcgactctgcaaagcatcctcgagatcaagttctaatccaacacgattccttatagacgcagctgcatgacaagacgacgtcattttaaataacctctccaattccttaaacccttgccagtcaaacttatgactcttcacaacttnctctgtctcgacaagaagagccttttcatgaaat

SEQ ID NO: 40700 - DNA, 573 bp, Arabidopsis thaliana landsberg
tttgctttcggttaatggcattgagttgaccacggatattgttatattcagcaacacgaacctgaataaaatgtgcaatcagagtcgttaacaccaccatttgaaccaaagcaattcatttgatcatcgtaagaaactggaattgcaaattttataccatcggtctcatgcagctaatctttctgcttaaaggtgaagcttccgctttttttacaataaaacaaaaggtttaagctacaataccttgagatcatcctcaatttttgcaacctgagactgaatattgtccacaacctccttcagaggtgacattgttgggtacttagcttcatcccacacaaaccttgagtccaccaatcaacaaaagtttcgttctttaacaattcgatcaccaccaaattagcaattaactccttctgagacggaaaatcacaaatacctggtgagataagaatcaacaggaactccatcaactgtaagagcgttgctctcaacaccagaaatcctctccaattcttcgatctgtctcctgatcttttgcgaaactccttccacaaagctgttcaactacaa

SEQ ID NO: 40701 - DNA, 609 bp, Arabidopsis thaliana landsberg
  unsure (1)..(609): unsure at all n locations
tctataccagtgatcttactttcagtcttcaacatggtaaatacagaattgcttttcttcaatcacataatcacaatatgctaaaatctgtttgaaaacgctgcagatatcagtttcctcgagtttaaaccatcggtgattgcaggcgcggcacttctctttgcttctttcgagctctgtcctctacagtttccatgtttcagtaacagaatcaaccaatgcacatatgtaaataaggtaaagaagtcttgaacaagtaaaccatctcaaatcgagcctttttttcatcgcggtactaagcgagcattaaaccgtggttgcaggatgagttaatggagtgttacaaagcaatacaagagagagatattatagttggagaaaacgaaggaagcactgaaacagcagtaaatgtgcttgatcagcaattctcgagttgtgaaagcgataagagcatcacaatcacagcttcttcttcacctaagaggaggaaaactagtactcgtcgttactaagctgnaaagggtggtaatggtcaaacataatcgtcagatgaaatcaatcacttagctacttcanaaaccacttctggtccccttatgaaaatgacac

SEQ ID NO: 40702 - DNA, 383 bp, Arabidopsis thaliana landsberg
ccgacaaacgtgcagactaaatctaagaaagcacatgatgataaaagttggaaaaagactagttaaattaatttagatcgaagtcggaccattatttgtttaaactttaaactattgaagtaaacaaagagtccgcatggttttataatttatacttcacacttgggattgttggggcatgtgtgatgcgtttaacgattctaacagtatatgaaattatattttatggccttgggacttgcttagcagcctatatttttcttgtaagaatattgtatgagttttttctcgaaaagggaaaaaatgtttttctcaacccttggccggcatttgaacaggcggacttccatgaaaagatgggtgccacgaacatcttcgttacg

SEQ ID NO: 40703 - DNA, 713 bp, Arabidopsis thaliana landsberg
atgtgtgacggtgcagcaccggataagtcattcctttccataacctttttcttttcaaacggaacatcatcacgtttaagttttcctaatccttttctgataagagaatgaaacgtatttactctaatttagtaagaaaatattactaattataatcaacgttacaaattaaaagtaggtataaagtagcgtggcagtattttctatgaatatacttctttatcattaaaaaaaatatatatggatatacttttgtgtattggttcacggaaaatcaactgttgtctgagtatttatgttattttaacaactgctgattgattttacttttgaaaaaaaaaatagaactattgagtaaattttcatggctgatttctagaggtttataaaaaaacagtggaaaaaagtaaaactccaatgttgtatgatattggtgtgaaaaaacccataaaattagcataaaggcccataattatacatgaaattgttcagaaccggtagatttccttaggttaaagtttactccatacacagaccaaaacatcaaaacaaactttgcagatagattaaaaaacaaacttcaaggaaagatgaagaagcaaagatcttctgaattaggtaaaaagagcaaatacaattagagaaaaaaaaatgaaaatgaaacatgccacctgattgttgttggagccgataaatcaaaatttggtaaatta

SEQ ID NO: 40704 - DNA, 253 bp, Arabidopsis thaliana landsberg
agttaaatatttaacatttaacacgtcaaacaaacaatgcaacatttcttaaagtttgcctaaaatttaatttattaacataatttacattcatataagaaaatatatatagcttgtcatcaataaatatgcattgcgcgatcgacttttactatggtgttctacatgttgtctacttagagtcacggaccacacaacttgcaatatattccattttcaaagattcattatggtctattaaatattcaagaat

SEQ ID NO: 40705 - DNA, 565 bp, Arabidopsis thaliana landsberg
aaaaaatattcgctgcggcgacttgacaccgtcagcttttaactcttaaacagtgctttttttttttttcctaccattcattcatgtcaagatttcgaatcctataaatttgatcacagcaaaattaaacatagttaagggcaagggaaaaaaaaaagaatgcatgcatttatttatttattttgacataaagaaaacattcaagatgtgttagtatttcataatcaaatactactaacaaataactataatcttaattgtcttttgtcggccaataaactcgatccaaaattctttgtcgatccaaataggtaaaaaagaaactcgaataaaaattcatatacgatatgaaaaatattacgtacgtagtctgaactctaaacaaaaatattagtatttttcttttacattgagaaagatcttgactatggttaattctatttttggaaatagagaaatctatatatgtatggttcttagtgttttaataaataaatatttggtgtttctaactccatcagcaacttcttcacaggcccaggtaattctctaatacactctgatg

SEQ ID NO: 40706 - DNA, 723 bp, Arabidopsis thaliana landsberg
ctacagaaatacccccaaattgttcatgctcctagcctcatgtccacacataatgccaattgccaaattaaccaaccatatggcttgttcaacagccttagtttgttttgttgtttaagtattagttttgtatgctattgcatgatatatataacttaataatttatatttagaatttagaaattaatctcgaacaaaataaatgctgattttgttatctcgaatcgcatcaacaaaattatttatcgaaataagaataatataactgcggaccatatagttgttgaactgcataaacgtattgtataagcattgtaagaactcgaaattcatgaataatattttaccatacaagtatacaactgtcacttgtcgccaagattgcataaataatcaatatttaacaaatcatcttctatagattctcttattacacaacttttataagctttttttaatctaaaatctgctaagaactaaaaatgtataaaacaaaaactccatatgtataagttttttttatataaaatctatgtgaattgtatattaacaagtgacaagatatcaccccgattaataaaactatgtagatatccacgagtagtctttagaatctatgtcaccaattctttcttcaaatctgtccgagaaaaagaaattacgaatctttttaccacgccgtgttacagtaatttctgtggtgaaaattgctttgacaggcct

SEQ ID NO: 40707 - DNA, 239 bp, Arabidopsis thaliana landsberg
tgtcttttttttcatgtaagagtgattgctttgtacgatctgtctctcctcgtaactctatcaatgaatgtgatttgaataagaattgcttcagcaataagatatcatcatgaggtgttagtgtggaataaatctcctctttcatcattatagctttaatgggtaacgttgtatcatcttacaatgtgtaccacttcttaccgctttctcgtaccaccacaaaacttgtccacattgtg

SEQ ID NO: 40708 - DNA, 626 bp, Arabidopsis thaliana landsberg
ggaaggcgcaatggaaaggtaaatacacctatctttcagtttagaaagtttatggaagatattaggggcggggttagtccaaactgaaacatgaacttaatgacgtgctagatagttccccttattattacagtctttctccaaaagtactgcacccacactgctgtaacaacatccttttgctttagatcaggcttgaagttgttactactaattggagagcaaaaagttcttcttcatagaaacccaagaaaatcagatttgaatatacaacatagatctcacgggtcacggcacatggctgattccaaaatggacagagttaagagagagaatataaatgccattgatatgctgatgctttgttctcttgtaggtgcccaagcttcttgcccataggatgtttccaaatgctcgctattctttatggattgacggaaaactagaacttgtcggccatccatatcaaattcttgaaaggtgaggcctatcatattttttctcagtgtaagatgaatcccaagaaaactctagtgatatgctgtatgtagcgttcccaatcttccactgagaccattttcaattgtggtggctccgcagcttgcatagattaccaaaacaccaac

SEQ ID NO: 40709 - DNA, 733 bp, Arabidopsis thaliana landsberg
gatcgacatgtactagcattttgatttatcttttcttgtgttaatgaacgaattatgaatgtgtttaggttcaatcataaaacgttagtttcattatactagacaagtagttgctaagctttggggtgattgttcttatgatcccaacgaaaggtttcaaaagcaaactttctcttgtcagctaaatcgccagggactgtcatgattccgtaagtcgctaagagcatatcgattgtctcttcgctcattttctcatagtcttcttttttgtaacacggatagagaagaggcatctcagacgaaggtggtggtaatggctgctgtggttgcgattttcggatcaattgcggtggtgactgttgaggctgaggtacagcagcaatctcctctttcggattggttgaagaagaagagcctttcgagtccttgtttcccatctctttgaatttgattgatattcacttgattaattgcccttacttggtccttcccttataatcatttctaagtaacatgcttgccgtaataaagagagttttattaccttttttgcacgtatttcaccgaaatacatttagtaggaacttgcatacgagaccccaacatgaattactttggttggcgagaacttttattcatgaatgacatatattcaacaacttcaaagaatattataatcagcgaatgaaaccgatctaattggggttaggagtgaccattcacccttagaatg

SEQ ID NO: 40710 - DNA, 563 bp, Arabidopsis thaliana landsberg
ttgaaaatttatgtactcgaatttcgggtttgatcttctccaagaggttcccaaagtcaaatagtgcttggaggaactagtgaagattgactgcaaacataaccgcccacacctcagaaagtcagagataatatttcgtgatacttcatgaatgatggaaacttggggtttaattaggtcccaaatttttcggtatatgtgattaaaagggtttaaaagtcttaggtaaagaaacattaaaagccaattcggttttattgtttgtgttatgttactagagtaccttacactatttcgtgtctttgatcttaattttaaatcgcatggatgatccctagctagaatgattgtatcataagcaaaatgatcaagagtggggctcacttgcctaatgcgttttttgcagcatctctaaccctactctatcttttctctaaaactctattttagaatacattggcttcaacttctctctatatgtcactctaaaatatagtaaatggtaggattgttctagatatatagtaactctattttatttacactgcctctattttagagtg

SEQ ID NO: 40711 - DNA, 1109 bp, Arabidopsis thaliana landsberg
tgatccccatggtcgacatctccaagattcttgcacgacaaggcaacatcgttaccatagttacaacccctcaaaatgcttctaggtttgcgaagacagttgaccgagcaagattagagtcgggtctcgaaatcaaatgcgttaaatttccaattccttacaaagaattcggtcttcccaaagattgtgagactctggacactttgccctccaaagacctcctacgaagattctatgacgctgtggataaactccaagagcccttggaacggtttcttgagcaacaagatatccctccaagttgcataatctccgataaatgccttttttggacgtcaagaaccgcaaagaggttcaaaatcccgaggatcgtgttccatggaatgtgttgctggtctcttttgagttcgcacaatatccatcttcatagcccgcacctctcggtttcttcggccgtagagccattccctataccaggaatgccacataggattgagatagctagagctcagttacctggtgcttttgagaagttagcaaatatggatgacgttcgcgagaagatgcgtgaatctgaatcagaagcctttggggttattgttaatagcttccaggaattggagcctggctatgcagaggcctacgctgaggccatcaataagaaggtatggttcgttggacccgtttctttatgcaacgaccgtatggctgacctattcgatagaggaagtaatggtaacatcgcaataagcgagaccgaatgcttgcagtttctcgactcgatgagaccaaggtcagtcttatatgtttctcttggtagcctctgtcgactaatacctaatcaattgatagaactaggtttagggttagaagaatcgggaaaaccctttatttgggtgataaagaccgaggaaaaacacatgattgagctagacgaatggctaaaacgcgaaaattttgaagagcgagttagaggaagagggatagtaataaagggttggagtcctcaggctatgatactctcacatggttcaaccggcgggttcttgactcattgcggttgggattctacaatagaagcgatatgttttggtgtaccaatgatcaca

SEQ ID NO: 40712 - DNA, 1044 bp, Arabidopsis thaliana landsberg
atcccagttgggggaaaataattgccagaagaagataaagaatgtaggtccgtaagaatattattcagagtgggccaaattgtttctgtggctgtaattgtcattttaacatattcttacaaaaatatattaatgccaaaggaatccaatatttaatttgcacagaaatactaatcacgttttggtttttagttatttatcattctttttttttttttttaattttctttagcagaagagtattttaaggtggaaattcgaaattagaatcttcttaatacgactagaatttgtttcttttatttattaaaaaatataattggtgtatggagacgtaatttggaccatgtattgtttgttggatattgagaagacagaaatagatttttagaagattgagaaaagtctctactgtatttaaagattgcctcccaccatacaaacattttttttaatatttatgtgctttattattttcttactataggaatggaaatataaaaagccaatggtaatctgcaaatttgattcgtgagaaattgttttcttagctcacagaatttcatgataccaactaacggtgtttgtacgagattacgataaaatacaaatgatcaagtaatataaatgttttcaaatgtatcttattataatagattactaatggttgtcaatgttataatcaaggaaagtcggtttattttttcttttgctaaacattcaaatagaagaaaagtcgactgaattatttttaaatttttgtattcttctgcgggaggtggtaattcaaaagaaccggaatcacggatggagattaaattaaactcatttttttataagtatgggtcattagttttttgactaaactgacctttgaagttttatggatacccgatatgagtaataaacaaaagataatcacaactcttgtgatcaaacaattacgttgaaaagtcttaaacgggaccaactatgaaaatgaaaagagctcgtgcctattacaatcaaaattcgactctccttaattcttaaacaagatgatca

SEQ ID NO: 40713 - DNA, 705 bp, Arabidopsis thaliana landsberg
tcgacgctcatcagctcatgtatatgtatgtatcatgtatatgtacatattatataaaacctttatagatgtgcatgtaaaagaatggtagatagtagtagtaggtgtgtaaggagaaagatctagggggcttcaaaaaaaggagagaaaaggacagagcatgtgaaaagagacagagaaacaaacagaggagtgaacagtcttactctttttttttctatgcacttaatgaacccaaccctctctgtatatttctgattcttcacatgtcttcctcttcttttttattccgaaaacttttcttcagtaaaaaccaatgccgaaaaaaatacataataaaaacgacaaaatatctaacattttttatataaaaaggacaaaagtactttcacttcacttgcaaccaaacaaacctattaccctcctttattcaatggactctgccctgctatctatatgtcatctaaacacccttttctttctttcttaattaccactacgccaacttatgtaaaccatgtttatatgaaaatgtgaaaatctaatcaaaatctctcttttgcattgacgtcagaaactcgaaaataataaaactctctttcaagtcagcatataactctggatacttctcccgagacaaaaattcgtgcagtgatgatacatgaagctcataccgaattctttgcataaatactcgcatttcct

SEQ ID NO: 40714 - DNA, 366 bp, Arabidopsis thaliana landsberg
aatttgcatgcacaaggcgtcgcccagtttttcgaatgcggtccgggcaaggtgctctgtggcctgttcaagcgcatttccgccgacatcaaaaatggcgcgctggaagatgcggccagcctcaacgccgccgcggaactggtgaaggcaggctaggcgttcctgtgttatattttcaagaatagatacttttacacttagaataaaacagtattgcaggccgccgtgggttggcgcctggaagcatggagaacacattgatgagcgttcaaggagacttggccctggtgaccggcgccagccgtggcatcggtcgcgcgattgcgatgcgtcttgcgcaggacggcgccaaggtgattggcaccg

SEQ ID NO: 40715 - DNA, 475 bp, Arabidopsis thaliana landsberg
ttttatccactgttttcaccccaaagtaggctcttcgctctaccattttatctgctcgtcctctatgtgcccattcgggtatatctcggcacactccattgacaacgcctgcatccaaataaaccgccaagggaatgttggtttgtacaaggtaattaagaagactatcaactttggtattcactaattcgctagaaacttgtgtcatgtaagcttacatttcttcgtcttcgtgaaagttccacccacatgtttgctcttcattttaagaaccacctatttcaaaatcaagagcctatgagtatgaggaacatcatatatatcattttttgatgaaagttcttaaaaaaaaaaaaaaaaaaaacttacttgccaattggaattgatgttaaaagatacttgcttccaatgaagatcccctgccaccaaatatcctcggaaacttaccctgacagattcatcacatgatcaaaac

SEQ ID NO: 40716 - DNA, 469 bp, Arabidopsis thaliana landsberg
atggccggattggaaatccttcgttgagtgcatgatcggttctggttacgctaaagagtgtttaagcatctataaaagtatcaggaaatcgatcatcgacgaagggatttatcgtttagaagtggagaagacgagtactgggaaggtgaagaaaatgtcatgggaagttatggagttgaagatcagaatctgggtaaaagcagacaaagtttctgtggagactcttttcaaaggtgagaagattttgggtgatcatgtctttgaatcctctgatgctattagagagtcttgctttactgatatctctcgagacggtgcgcttcttctctttggattcccggagatcattggttctaaaactagcaagaaacactcttcgccggagaaggttttccggctgcttgacatgtacaccgccattgtcggaaactggcaagcgattgagtctatcctctcgtttgattctagc

SEQ ID NO: 40717 - DNA, 704 bp, Arabidopsis thaliana landsberg
ctcactctctaaaaacggatctctagtagcttcttatcctggatttctctctacctgcactgtcagctcgcattgattcctctgactcgatagcactctcatcttccgaactactggtatcagactccttttgcacatcttccgaattactggtatcagactcttttcccccatcttccgaactttctgattccttaacatccactggcttttttgctttattcagcttcccacctttaagggctcctttttcatcttccctgtcacttgcctctgctttttcactcaactcacaggcacggtttctgaaaacgagcttccttttcccctttaccacacgtctctgtctcccactcgcttggaaaccaacgttcttcttcctccttgacctcaacctggatttccaaccatccggggcatccgaatctccatcctcatttctcttccctttctctatactactggaactcttattaaaacgctgccttttctttggtggcggaggagaagcatccaggatggacggaatcttcctgaccctagagctccgccgaagttcagagtcagcacaagctaacccagacccaccatctctgtcctgggactctccatgatttttcttgtattcctcctcacatattgcagcaagcttcttacttttcttcccagaaggagaacccgaatgattctctgtaacctcatgc

SEQ ID NO: 40718 - DNA, 503 bp, Arabidopsis thaliana landsberg
tccttaatctccaacgttagcatgttttgtttttttattaaaaacatatttaaggctcaccgtgtaagacatgctattaaacagtaaacagaaatgggtgtatagtttaccaaagaaacaacaataactatatatatatatgggtatatatcctaaaaattaacttgggaaatatatatgtatgtatatatgcaggtgtaacatactagaaatgggtcaaagatgcaaggcctgccagatttttttgttgtggatctaacttcacagtttttaaagtagatcatgtaaaggtatatatactgtgcatctatagtagttatacacacatacacagattgattactgtaataaagattctattacctttttcaaaaaaaatctgtaagaaattaagtgggcatcgacattgtcagacgttatctagggttctatcacttttaattaaataaaaattggttgtatcaagtgcagtgtacggttcgttagaggttgtttaaacgtct

SEQ ID NO: 40719 - DNA, 737 bp, Arabidopsis thaliana landsberg
aaagacaaaaaacacagctcacaacttcttttcaatttttcaattcagctttttttttcttcttcttcttcatcttccctgggcttctttgccagttcttcttcatctttcgtcgttttcttagtgccacccaaagatcttcgtgcaggttcgtacttctttctacctcgatcgattttgactaaatgtatggatcatctgatttccgatttgatcgtggttgttccttgctctgtttcatgatctgtgaatctgagtttctcgatctggctgcgtctttttcggaaaagtcgagaattttttcctgctgggtcttctgaatcacatttgatcaattcctggaaatcgcaaagttttgagtttttctaatttctaaaggttgatcgagccaaaatcctttacgtgtctgtgtctgactctctgtagacctttcctgtttcttgatcactagctagctttcgagattggatttaaaattttctagatgaatctcaaattataattacagaattgaccaatgctttgcttgagaaacagtccaagaagaaatgcttgagatccttcatctccaagtaaatgggaggatttggttgattatctgctcattttcttaactttgttccgtatttttttttttgactcaacaggttcattggcgtttgtagtacataaatcttccctgacacacagaaaaagaggatttgactgttatacaatgtcaacaaaagtgttggatc

SEQ ID NO: 40720 - DNA, 253 bp, Arabidopsis thaliana landsberg
ttaatttaagcccctgattgtctcatagcatataatagtactcggaacagcattcatataattttaaattttaaataaactagatgaattgtatatagaatgtagactttacaattaaacaaaattatatgttagttcgagtttatattataaatattagatttagattttaaaattaataaaaattatgtggtcgtttggaattataaaaaatgggattaaaattgagatttcctatttaacaaaattattt

SEQ ID NO: 40721 - DNA, 576 bp, Arabidopsis thaliana landsberg
taaagaataacaattaaagcaaaaccaaactttgaatgacttctaaaatagatccgatcacaaactagaggtgtggcaactaagtagtcattatcactacgaaaatgggacatatgagtccttccaactaatgcatgtcttgtagtttaaagagacaaaattccttaacaatgattgtataaggtgtgagttaagttaacaacgttagtgcctcctcaagttcgtatatatgatacacgtggtgtcaaacaccatccgaatcatgatgaattccagcttgctatgcatggaggtaatgaagtgaacaatcatatccgtccaatctagggtggtaatagggcagagcaaaaacctcctaagatcgataagattttgtatatatatgggcacaataagaagggatatggtctcgtgtttcttcacattctgcatataaaatacaactttttcacttcccatgctcgtattaactcttgtgttgttaaattgttctttgtcgcagaccatgtaataaacaagcaatgaggaactccatggacaacaaatgagatctctccaagttaccttatatatgtc

SEQ ID NO: 40722 - DNA, 626 bp, Arabidopsis thaliana landsberg
gaaaacaaacatatgcagtgaatgaaagaataaattttgtacatccgatttaatgagaaaatgaattttgcacaaaccactcaagaattcaaaacaattgtcaaagttttgttctcagccgtgtgccctcctttcctagccgtcacatctcacacactaatgctcaccacgcgatgtaaccgtaagcgctgagtttttgcattccagatttcacttacaccaatcaaaacacgccacgtcatcaatacgaatcattccgtataaacgtctagattctttacagcttaaaatgttctcttctttggtcgggcattatttaacgctttgaacctaaatctagcccagccaacgaagaagacgaagcaaatctaaaccaaagatctccattttcgtagtttctttaagctttttcagtatcatagagacactttttttttattagaaatggctttagctggtacttcttcttcaactgcaatctctggatcgagtttctctcgttctggagcttcttctgaatctaaaggtactaactgtctctttcattctctctggaaaataaccaaaatcgattctttgattgctcattggtatacccatttgctggattcatgtgaatctaatcg

SEQ ID NO: 40723 - DNA, 417 bp, Arabidopsis thaliana landsberg
aacatcagtttgcatttttttctttcttatgacaatggttttttgaaaatatatattcggcatttagtatatgcgccagcgagctcaaatgaagcaaattgtttgtaaaagaagaactcaactatccattatacataggtactgattactaactcccaaaatgatgaaatcacccacgaatatttaccagtcataagttttgtataattttatgtttatacattattccattcagcaagattagtgacaaaataatcttttgaaggaaattcatatcatagttttgtaacaaaactaaattttcttggcttagtagttctctatttctccactattaagttttaattataccacgaccataagtaagaatccatttcagttataattatctaacaatatgaagaatttactaaccgc

SEQ ID NO: 40724 - DNA, 890 bp, Arabidopsis thaliana landsberg
aatattaacttgaataattgataggtacacaatctattatattaggtttaacataattggtctagtaggtatctgatgattagtctaaagttctaattataattttttatcgaaaaaatggcataaaactaataaatgataaacttacgtacgtacgtcgataaaaatgtaagtaggcctccaagcttcaacgacgtattatatttatatggccaacagaaaaaaaaaatgttattgagatcaatagtttcacaaaaatattttgcttgtacatccataaaatttcaataccggttctgattatggacataggccgtccgaagttttttgttactaagaaataatggtattaagatcatgtacgaaccatatttttaatgaatatatatgcatgctacatattactaatggtataaccttttttcttgaactaattataatttgagatttttaagaagtactcttcatcttgaagacaactaatgtttgattttaaatcctgatactattaaagtattaattaacccaaaaaaaaactaaaaatcctgatactagtgggggtaatgggagaccaaaattcaaacttgaatatataaaataatggtttggtgaaatagatcttcatacagttgtcatggctgatgaatttagtttttcattcgcgagaattaatttgtgagggttggttttatggaattacgttccgtttgacacgtgaatggagatgctctatgcatgtgaattttaacttgctttaggtaaattaattaaccaaaagaatatctatgattccccgataatgaaaagaaagaaagataaagttttagtgcccaagaatgaaatttcaagagaaaagtgaatgaaatgtgagacttaaataaaagaatgag

SEQ ID NO: 40725 - DNA, 461 bp, Arabidopsis thaliana landsberg
ccgatacgggtaatgccatttgtcccttgggcagattcctttttttcatttttggacacaccgacatgaagtcgtcgtccatagttggataagatttcaggagtctatccctggtcggagtcacttgcaaatgacctcttcaaacttttacttacttagttaataaaaagtttcttagataaatgaaccatataattcatcttttatgacagcatgacatttaatttaatgtttatatcaaaccatattcatgaattgagtgatcgatctgtattaattttataacatgcaactgctagaatatatgcttgctttatagagtactaaagacgattcacgtttctcttaaatggtgttgtataatgcgatagatggttcaacatctaacatttaacacatctctcgtgatcttcattgttctcctcacaaaccccacgcatcttttccatttttaaggttct

SEQ ID NO: 40726 - DNA, 626 bp, Arabidopsis thaliana landsberg
acgtaatgcaaattgcataaattgtaatttgatggaacatctgacgtaagcgtctttaatttaattagtgataaccattgattagtacacgtggtagttattaattaatgacaacgtcctcatgaattaccattgattacctaggacccaattatagacctgcttttgtttttgtcattttacttaaatgcattctcattgtcaattgttttttcccaatattattatattatgaatctgttcattcatattcacgacactaattaaaatcattttgattagctgtcattttttggggttaattgctagttaaaattaaagaaaaggtttgttttacaacaatactcatagcatagcagacaaaagttggaatcaacatagctaaattagctgattttgattcttaaaagaagaaatttgtgcaattgattcgttctcattttttgtaagttagccaaagcaaagacgaaaagtaagatagtgcggctctattgtttgaaaatagaatggcatagacataataaaaaagggagtatgttttggtgttatacaatcacccgccacggtaaggaattttaggaattcagaaaatataaatctagtttggcaagactggttgtcactta

SEQ ID NO: 40727 - DNA, 224 bp, Arabidopsis thaliana landsberg
tgcgggttttacaaaaccatgtcgacagcattagcagccactcgttgtggcggtaaagtctgtcttgctgaatgggtcacggtataatgactgtccctgtcactcctgcagctgcaaggtaacctcctttgaccatcatagtaagaaactttctaacttttgaaaagtacaatcacataataaccaagtaaatgtgttggtttggagacagggaggtagatgtg

SEQ ID NO: 40728 - DNA, 565 bp, Arabidopsis thaliana landsberg
tggttgtatgctaattttttattttaccatattttcaatacgtttaacacattcaaactcatgaggtcgagaaaaagttgacatagtccataaatataacaaacaatcaaacagatatgaataatctatataataggaatatgatcatgtataataggaatgtgaatataacaaacaatcaaccaaaaaaaaaatgatctatataataggaaagtagttactgtaatagctcatcagtcatcactaaacacattaaaatgtaatcaatcaattgttcaaaatggtttatatatttatctaaaaacaaattgagatcattttgtcacatcaccataactataatgtcatatttcttttggagtgaataattctttctgcaaaagtgtgatgtgtgtcacatcttcagaactttgaaacctttaactgttgtttgtgtcaaattaagtgggactaaagggtagattccaattaccgggaattctatatttctgaatatttttaatatgttaggcttgcctatttcatttatatattttgggaattcaaagcgaatgattttattgga

SEQ ID NO: 40729 - DNA, 921 bp, Arabidopsis thaliana landsberg
atatcgccactattattacttcctaaaacatccatatcgttttgagaaaattaccatcttacccaattttttttccactggcaatttagaaagcttggctccagtttctgttaaaattccatgctgattgattgaaattaaggcatgaagagaatctaaggcttgcattattatttggggaggattttgtactagcaaatatttttcaacctcattacaaaaacttataaatctattcaatagtctcaaaagcaataagtacctccattgcttggcattgtagtcacataatcaacacaaatcattcatctttgatagccttttgtcaaagtcggtttagacaaaattcgttcaactaaatcacttttgagttgctagttaaaaactagccaagtctattaaataactctttttttactccaaatgtttttatttatttccgaaatatagtttttttttacaataaaattttaatatatttttttggtaaatttattttatttaaaagttttaaagtcggtacatcggacgagttcaaatctaatttcttataaaatttagtttatttataaaaatatacaaaactataagtgaatacgatccctctaaattggcaaaaaatcattataaaattctaaattaatctttgggtgttgttggaaagaaaagagagatagaatatttagctattttagatgaatacatgaagtaggtccaatggtcaaactcatgaaacatgatttttgacaaagagtacggttccttgattcttgcacaacggttatctcggtactgcatcgcaaaagacatattataacatggaaaaggaacaacaaaacaaaagcgagacgttttattcgaagacaagacaaattttcactttagtctttttgatgctgagtaatagacacaaaagataca

SEQ ID NO: 40730 - DNA, 142 bp, Arabidopsis thaliana landsberg
ctgccacaaatataacaacattgggagataaaatatcgagtaaaattgtaagaatacaagataaacactcactatccatttcaggaaaaccaatcacaaaaatgtatcttgtttatgtaaatattctcgatctagaagaagc

SEQ ID NO: 40731 - DNA, 676 bp, Arabidopsis thaliana landsberg
aggtttatatggatatttttcaagatcggatcaattgtgtttatcaattatctaacgcattttgggctcgtgtgaaggaagcttatgagaatgaaaaaatgcaacttggagtgaacatattcaataatctatccaatgtctaattcaagctattgagaaagcaacaaaacaaattcatgcatgtatcaacaatgtgaaaactgacatcaaagtggtacttcaaatgatgatattgtaagtcttattattattattatagatataattttatgaatgatgatattctaagtctcattattattattattagatatatataattttataaatatttcagattttaaataactaaattttgtttaagtaattaaattttgtttttaatggtctttagttacatcaagctaaatcaatgttaagtgaagatccaagcattcatggaggttggaaatatgatcatgttcggtgtattattaagaattttgaaaaatttaaagatggtgccactccttctaaacgtgtatcaatccaatgttattattgatatacatctttagagttagaaaatcctacccttgcttctcctacactaaaaaattcagatttgcattcattttctgcaaatgatgattaggggcgccactatggataacccaactgaagctaactcttaatg

SEQ ID NO: 40732 - DNA, 505 bp, Arabidopsis thaliana landsberg
tcctaattacaaaagttcgccggagttgctcagagagactccgactgcgactgcgacgaaggtaatgggagagtgttgaaagcgcgagatggagattgggagcttcaatttcgtctctctgggccttctctctttcttcttcatcatcctccagtggtaaactatattgacgaattaggtcttcttcttcttcactcaatagataaatcgcagattattgtttgcatttttttttctcgctgagcttttgttttgattctaagtacggataaaagttgcatcttttaaactatttctataacttcttgccatttttcttgcaatctaaaacaaatccttattttttgcttgaaggaatacagcagctctgcttttagtgtgtaatcagaggagactgtgatgtcgcttaaacatgaaactcaccaaactgcttattagacagagactcgtcatctctattcttagtatgctcaatattcttattgcctgtttcttattttatcac

SEQ ID NO: 40733 - DNA, 588 bp, Arabidopsis thaliana landsberg
cattaactttttatttcaaaaagaaaggaagaaaattgtatgctcaaggactatactgtatttggatttcgtttggtagcatcaaagtaacactctcattcctagtaagaggttaactttattgaaaatacacataatgtggggttagaaattgtgttgaacaatttcttgatttagaacgaaacttaaaaagagtggaaattctttaatgagttggttggcatggtaggtggccattaagaagatccatgaattggtgaagttgaggtttatatcatgtattagcctcggtatatagtgtgtaaaccttgatatttagtatgtagaagtatgactatagcttgtataagcgcggccatatctgaactcagattttgcttatatgaatctggctacaagaagcatttgtaaatatggtagttgcaaactttcacctgcaatatgtataaagcttaggtagaagtgcacaacacagtaatctaagtacataatgaagcctcttatattgtgtaaacacaggtagataataatgcactgagtccctttttcgattattcacccaaattgtatgcaagttttttgtatgat

SEQ ID NO: 40734 - DNA, 677 bp, Arabidopsis thaliana landsberg
gagagtattatatagctaactctgatttcatcaggtcaagagaggagatgaaccactgcatttgacatcagaagcatcagaaaggcgttgtcttggagagagtgttgtaatcgctgcaacatctacgtcgagattcactatgagcttcctcttctgcgactctgatacactgctccttctctcttctgatccttcagcaatgggactcaaagtctgtgtctctgctgctccaacgacttctacatctgctgcgtataggattctttttatggaaccaacaagctgcttgacaaagtaagagtgacgatgagaatttaaaacttttatggagtttgttgaattgagacagacgagagattttgcatacaggtaagtgctctgtgtcatgggttttgacagagaatctctacatctctgagttgagagaaaaagaaatctctctctttctctaagctgtcaatgtaaagtcacagttctgtgatctgagaatcaaagaagagagttactgagcttttagactatggtgtagaataagaaatgagtgtgtcaaaaagacttaccttttcatatacgcatgcactggtttagatagtttagctgatggtcttgaagagtggtggtgattcccagttgatgaatggcgagtaccggagacgatggattgtggctgatgctta

SEQ ID NO: 40735 - DNA, 431 bp, Arabidopsis thaliana landsberg
gctcaggggctgtcgttgcccatgtacgagggcgatcaggcggtggaagtgcggcaggtcttcctcggtgagcaggttgagggccagggcgatgcggacggtgtccggcaggccgcgggcggcctcgcgggtacgcatcagctcggcctcggcttcctcgccggcctgttcgtcggttggcaccaggtcattcgggaaccacagcttgcggctgtccttgtgcagttcgatctggtcgcgcaccagcggttccaggtgcctgagcacctcgatctggtcgggcgttccaaagcggtttgacgacatcacggcggacatgggcttgcggcctcgtagctggggaaacgggcaccggagtacgatgcggacatgcacaatatacactcgtgcattagttcgcaatatacacttgtgcagttacgccatgatga

SEQ ID NO: 40736 - DNA, 989 bp, Arabidopsis thaliana landsberg
agatggctgttgttgattaatctgcatttgctgttgttgttgctgctgctgctgcatctgctgttgtggttgctgctgtagttgctgctgcatctgttgtagttgttgttgggaatgggattggttcatctgcgactggcctaattgtgattgttgctgctgctgttgtattatctgtgatatctgctgctgattcaaggacatagaagattgatgtaactgaggagaggacagttgttgttgttgctgctgctgctgctgtaagagaagagcctgtctttgactcggttggagtcggaatgaattggggctcgttattcccgacatttgcttcagccattgctgctgtgacaaagagttttgcatcatgccagcttgtccattctgggccaaacccgatagctgaggattcataaatgcgagagaagatgttctctggaggttctggacctacacaggggattacaaaaagttaccaagtgaagaggatacaggatacatgagattcgacgcaactctattttttaacttgaaacgaaagaaacacatgctcacaaaatgatcaggaatttgcatattgcacaacataaatgtattagtacctctatagatacataggccagattttacaattacacggtaaatctgtcaaatttaaggatcattcccgcgtcattcaggtattttagttgccaattacagatattggaaaaactctgcaagtcaatattaagtgattgattaaagtaccaaaacctcatggatcagtttaattaagactgtgcaacaataagtcaaaagaagtgaaaggatccaacacgagaattcatttgtatctatgagccataagatataacaagtagtcaataaaaaagttcacaatgtgagagaaagaagttcgtaagccacgaccctttaaaactcatacctgaggtgaagataagagagttttgctgtgacaattgctgtctcatctgccccgggttatt

SEQ ID NO: 40737 - DNA, 932 bp, Arabidopsis thaliana landsberg
ttgaaaaaaggaccttccttaaagatataaaaaattgtggcatccgcgaagtgtggcatcatcagaggttgtttttgaccttggtccatttttcatcgattttttattagggtcaagataattaattaatcacgtgtattatgatgtactttgcttgaatatataataaacactataatggaaagaatgaaactcgttaagttcctaaaaataaaccagtcgttgagtccctttctggtttacacatatatcctcatacacacacatacaagtgcggagtgccacaatagtcttctacgcctcattttcattattcaacgtcactttaaaatcaaactacttcaaagttcataaaatggaacaactagaaagacttgaggatttaaaaggataggccacttttgtagggtttagagttataaatttaaggtttattgagaaaacttaggatttagagtttgtttagtgtttagattcgttcttagtttctaagaatctagattatttggctataaaaattaggcatgttatcccttgtaaaaaaaaatttgctttcagttaagaaactaaaaaaattcaaaatgaaaattacaatcgaattgaaaataaaagctggatcttacaaatggggtaaaaaacagcagagcagttaaatatttgtagtaattctctcgacatgcgtgttctagatcctctaaccaaacaaaatcaacaacttcaaataatccagataacgatattgcacaaagagaagaaaacattttggttggattctttttctataagatagcttcgatgtctaactccaagtaagagcatggatcagggatgtcaaagttgttcaaaacctgatggaaacaaaagaaaagaaaaacgatttgaaaaattattgcagctatttggatcaagccaggagacttaaatgagtgata

SEQ ID NO: 40738 - DNA, 478 bp, Arabidopsis thaliana landsberg
atattttgtcaataaaaatttaataagctgtttatattgttcgtgagaaaaatcaaaaattggtttgtgaatcggaaaaaaagacgaagaaaaattaatttatctacgtagcgcaagagacggagtgttgtttatttaaagaaaagaaagaaaaaaaaagaacgaatattaaaatggcgagtcgctctcttttctctatctcaatctcaccttctcaatttacagttttgccatccatcaacaacgagagacgacgccttgctatcgccgctcgatctcaccgactatcacgccggaagattcgtaagagacctcctgatagagatatgtcctccatagtttcaatcccggagcttcctcgccggcgggattctgaggaaagcctgcttttagattctcgaatcagtaagttcttaaagcaacagaatcctcagaaattggcatttgggattaggttttgcaagtatcgaagcttcat

SEQ ID NO: 40739 - DNA, 599 bp, Arabidopsis thaliana landsberg
ttctctcttttttagctaaaaccataaatcaatcgattgagagaaccaagtttaacaaaattggtaatgttaaatttaattaccttatgagatgttatctgagttgggtgtatcgtttgaagtttttaatccttaacccaaattttttaactattgctatgcataaatgttcaatataatatatttttctttaacaggccactatagtttgtactttaggttaatggtgataagttctcgttgaacttcaggttaatggttcataattttttgtaggtttaaaaaatggattaattaaaattataaatatcccatgtataatatggttagccgcactaagcacaaggacgcacattccgtagtggaaatgcttgtgatgggtggaccatccgtcgtatttaattcaacggctcccctaagaaacgaataattaatattcattgtaattaggttctatataactagctaaatcacccaattgttgacaaactaaactattagaaatctttaattcccttcttaattaaaacaatcacttatactttaaatatttctacaaagagcttatactttaaatatatacacatgatatcgccatc

SEQ ID NO: 40740 - DNA, 761 bp, Arabidopsis thaliana landsberg
ataacattcttaaaattgccgacaaaccttcgtctcaaacactatctatgactattctctgttgtccatggaaacaccaggtgatcaggtttcaaatctcgaccatttcgtgcaaaaatcccttttccaaagtagaatccccgatcagtgacagaatcttagaactaaactgagttggtctctccaaagaaactctccaacatgaatcctacacacccctcactaaagcacgataacctctcctagtcagaatcgcgacattgacgaaccgtcccaagaaaatgtttgtttatttctatcgcatccatcaatattgtgcacgtcctcatgcacaagaagaatctttataattgtacattgtatcattgtggcttaaaccgtacccccatcaattcgacgagtcgtccccttgcattagttttcctaaaaatctagctcaccccaatgcacgtactcttcgcccttggacgagtagcatgggttcatcacttaccactatgtcgtttacctttctcaccaacgtaggaggctccttgtctaccctgcttgggtattggaaagaaataatacacacctttattgaatttgattctactcatcattaaattttttcggaaaatcgtgcgtttatcaacaatctccacgattaacaacccaaccttcgtctcatggactatcagcgactagttcatacacttattggctttagatcacgattagttagtgcaggtatgaactactccattctttaaatcaatatg

SEQ ID NO: 40741 - DNA, 536 bp, Arabidopsis thaliana landsberg
acttcctttaaaagtttaatcatttccataatagtgattacttcatcgtttctatgacagtaataggaccactatgtataggagatagtgtttcactacataattttctacatctgagtttctgagtataataatatcgggatattcactgcgagacaacggttaaaaaacctatcacaaaaactgtataagaaatctcactgctgtctcatagtaaaaaaacaaagacgactatctggatttgttgactttgacctataacaatgaccgtttcgttacgccgttgacttctccgcgccttaaatatacgacgtgttttttcctcattggttccgacaaaaccgtcggtcacaataaccgttttttaaaacaccgtcatttgaaaaagccaatcgcttcacgagacaaacgacgaacaacgcaattacgcgttcttatctttctgggtatttcttaattatattactctatataaataaaaatacccagaaacgtaatttcgtcgagttcaaaaattcaattgaaagaataatttc

SEQ ID NO: 40742 - DNA, 583 bp, Arabidopsis thaliana landsberg
tagttagatcatgagaattgagggagcatgagaccgccataatggagtcacaaacgtggtcgtattataaaaatggcgacgcgtataccacgtgaagagacgctacgattgcataaaaagaagtcggcattggtatacatgtgtctctctgattcgtccacacggttttgtcgcatttgttggagaaaagataagtcttttaaacagaggtcggtatggtatgtatttggtttcaaggattcatgaaattgatatatgattgtgatgtaagttattgattttttcttcattcattacacgtcatgggctgagagaagaaatcaaaagagaggatttgtatctttgagcccaaaaaaaaaaggcaccatcttggaccattggtttggttggaccaaataatataatgatgtggtgaaaagttttttagcggttatgaaaatcaaaaaaaaaaaaaaaggcggtaagaaaaatggcaatgcagtagaaatggtggttcaaaaatggttttagaagtgagatcatctttatgctcatttatcttgggtttgttcgggctctaacaccatgtacaattttaatcatt

SEQ ID NO: 40743 - DNA, 576 bp, Arabidopsis thaliana landsberg
gactatattattgttagccaattttaacatatattcgtcaactatgaattctaaggcagtttactttattaactagatcctttagaatttttttttaaagttatttttgtaaactccccatttcgattatacaatcaatcatggagttaattttaataaatttttggttgataaaaaaaaaatgtaaacaagtcattgggatgggaacatcaaaaatcttgcatggtataagcttaatttgtagaatttaatctggtatactaccacctataaatagtcaaatttgggctaacgtagtttaaaattttgtaagcccatttatcttgtcatatggcttagtcctcgtaaaagagaatctcatgacccaactagaaatgggcaatgtccgaggtgggctgttccctaacgaaccttcttaataagaaaacccacaaaaatacttgtcagttatgcatcattctccaaagtttattatgcactgtaatatagcaacatctacgaaattttcaacattacttttattatacttaaatgtatgaagttttacaacaaatttactactcaatccaacacagt

SEQ ID NO: 40744 - DNA, 440 bp, Arabidopsis thaliana landsberg
cttaattcacataccttagattggtttcatcgtcttataatttcgcgtgataaaggtctttcttcatggggctggaatctgaatggccagcattcaacttatcatgctctatttcctcgggcttggactatatatgatggtacgaccctgcagggattcgtcatttaaagctagcatatttctgtcggtgtatctcttgtaacgattcttctgtttctaggtgagcctgatccagagttaaagatttcctgccggcaaatatcaccttttataccaaacaattatcgagatagtagtcttccagcagctgtttttgtatatactgtaagtaatccgttcatctagtgcctattcacattgagttggtgcctgcttctttgaaagcagtgaaataagaatggatatatgcatattccacatgtagggatctgtagtgatgc

SEQ ID NO: 40745 - DNA, 769 bp, Arabidopsis thaliana landsberg
gagctttgtcttggtaggtctccttggtgatttttgatcttcccttgcttaagagtctgttcctccacactgtttggttttcaaatcatgctatatgtgatgtgatgatggatggttgccctcagcttgaagaattatacatacatcacaattacattgaagatagagatgaagaattcaacattcatacagcacctcattatatagcccacaacataaagaaactcacagtttgctacaataacgatgttcaggctcctcgcgttttgtcaatctacacaccaaatcttgtttacctagactactctgattatctaacttgtttatataattcggagaatcacttcaatgatcttttagaagcccgccttgatcttgctttcgcaagggctgggagatggggtgatgaacacgacacctgtttaaaaatcatgaattctatcaccaatgttcaaatccttcacctctcttgttttactgttgaggtatgtctctctcaatctaaatttctttcctttttctttctttctttgtcttgttggatgatgctttttttgttgctttgatgtgttgaaggtgatatatgaatgccttgatcttgctgagattccattgtttaagaacttggccactctacattttgagggtaatattggcaattgctttgcaatatgattgaaaaatctccaaagctagaaactctagtcctcgagggtttgtgcggtataagcgactgtgaggttggaattgatggtgggaatatggtgaa

SEQ ID NO: 40746 - DNA, 625 bp, Arabidopsis thaliana landsberg
tatcgaaagagaagttaaaaaataagaggtaaaaaagttatatgtgttgttaaaatattaaaactatgtcagagttggggctaaaacggtgtataatctgcaaatctgccactatagcttttgtgtcactcagctctcctttagcttttgcttttatagactaacaaataaaaggtaaatattgtgcttattactaccaatctactttattttttaaaataactgaactttgtaaaactaaaaccctctacacatatatcaacgggatagttttgaaaagtattttttgtctagtttattgttaacaaaatttactttaatttgccaatatattgtcgccaactatatagaaattctagaaacatgcatagtttggaatcaaagcaaatttatttatttatttattgagaatattgaaaagcaaagagatgagaaacccaaaaaaaataaaaagttaaataaaataatattaatacaggttactttacagaggctctgtctttttatcatctctgatcttagtcctattttacttttattgtgaaaagcacccccaaaagtgcacttctgttcccaaaattttgaacagttatataaaaagactgataaatcatcaaaaacattt

SEQ ID NO: 40747 - DNA, 386 bp, Arabidopsis thaliana landsberg
ttcgatagtggttgctcgtacacttacttcaatgcactagcgtaccaagctgttctcgatcttgtatgggataatttcttctttggaaaaaaaagattagcttcaccgtttatgtttttccacttttttatgactaatttggtctcctacagataagaaaagacttgaatgggaagcctttgacggacacaaaagatgataaaagcttaccagtctgctggaaaggcaaaaaacctttgaaatcacttgatgaggttaagaaatacttcaagacgattactttacgatttgggaatcaaaagaatggtcagctatttcaggttccacctgagtcgtatctcataatcaccgtaagtcacacatatactggcctagatatgacttga

SEQ ID NO: 40748 - DNA, 757 bp, Arabidopsis thaliana landsberg
atgaacatttcatcattagacttcttgtttgacagttgttgcattgattcaaacactttcgtatcaactttcctctcagaggtggtcaatgattgaagtgcctttttcttctcctcgagtattttctcatactcatcaagagtcatttcctgtcgaaacacaagtcaataaacaatcagtgaaaaaaaaaaaaaaactgataccagtatagtaaagactaaagaggagcctagcatttctattccattctctgtttaccttatcctcaggctctttctcctcaacaacagtattctccttgttagcatcagcagctacatcatcaacagctggcttctctccaacatccgtctgagtctcaacaccagctactgcttcagtctcacttaaaatccagagaaagcttcttttagtccaaattcccaatcacaatcacattaatacatacttttttaaacaaatgcaataaaccataaacaattacttacgcagctatctcttcccctggagttccccaattcccacgaccagatccgtcacgcttgaagtcactcctatccaaaatacaaactccaacttatgagattgacacagtcatttcaatggcagattatgccacaacagaataagactgaccctctgccagttccactacgacgctcataggtccttcgaggacgctccccttcaccaccctcattgctgaatccaccacgacgaccaccaccaggtccaccaccttcaccacggaaggaac

SEQ ID NO: 40749 - DNA, 440 bp, Arabidopsis thaliana landsberg
cgcatatgtctcgacacaagcactatatatacagagaccaaattattctgtaagaataaaaaacacactttacaagtgcattatagccaacaagcgtattattaattagatattccaaaactacaagcctacaaccgccaagtcatcaccatgcctatctgtttctccttccaatgcacgagaaaactcagaagcataatcaagtattgatcaattttctaacttgtaatccaccatttcttcagtacgtaattgtcaaggatacaatcgtatcatgttttcattacctcaatatcttatttccttgttcattagtctttctataatcaccttaacctagaaccttctagtactcgatgtatatatatgtgtgtaacctcttttgaaaagatatgcaatacacaatattcacagtaatgaccaaacagtattatcttagt

SEQ ID NO: 40750 - DNA, 419 bp, Arabidopsis thaliana landsberg
tttattgatatccggtctgaaaaaggtttggctaatgatatgatagaaattgttagtttttctccctaatcgcatgttgataaaatagtgtggcattagttttacatggattaacatgttcagtgctcctctatctgcttgtttccacctatatatctttttaatttccttagttacaatattcacattgattagaagatcccccttaaacgcaaattaaaagtcgtatagaacttgataatagactaggataatctttactctgatatcgacatccaataagatactacaagagaactagagaagtaccgagcacttgcatactataataacaaaaattggtaacaatcccctattagtcttctcataggcatgcacctagagagcacttagcgttcatgtttctcttttctttttat

SEQ ID NO: 40751 - DNA, 595 bp, Arabidopsis thaliana landsberg
cggttttgctgtttgtgtatcgccggcaggtggccactttgggacgctattaaatggttactttgacttgtttatgcgcgggccttgccgcgaataatcaccgaagtgtgctttcaccgggtgcaggtctgattttgctacctttttcttccttttccgtccgcttcgccaccagcgcttgttttcgctctctctgtgaggagtgccagccagtgctgctccagcttttctattttttgttcgccctggccaagccgctcggtaaggagttgcgtttccttttcttgtgcggccagggccatgcgcgcttcggtgaacgcttggtgggttgtatccaagtgcccttgaaggtcccggcgtgccgaagtgctctcctgaagctgataagacagttgatcgcactcagacttggttgcggtcgtttgttcctgcgcacgccgtgttacttcctgcagtcgcgtattttcttcggtcaagcgagtcagctgcatctcctgatgcccgatcgtcgactgttgggcgggcctttgctgttgcgcgcccgccaactcttgttccaagcgcgctatgcactgcgctgatgcctgctgttcct

SEQ ID NO: 40752 - DNA, 587 bp, Arabidopsis thaliana landsberg
cttcttcattttttatgcatatatgcttaattatattatatcacatttttttttaaaaagaatcatcgaagttctctagtgtaaaggtatatgtggttggctagatacagacagaatagtgtcgattgaaagagcacatggatgctcaacgaatctccctatatcaaaagaagtggattacaaaagaacctttttatataattttttctcatatttaaaaattttctttggattttattatattactctacagttgcctctcacttcacatatgcactttgattatcatattcatataccatcatcactttttgccataagtttttttttctcttaaagtgaacatagtaatatccaacctaaatcaaaattttatgtgctagctatttcttagtttatgcacatgatttttcacatgaatcaaccggtacatgtaatcaaagcatgagaaatgaagaccaacaaatggctaaacaaatggcactctaggtttagacgattattttaaattggagtttatatatttagatgcatttgacatgagtgttcaaagtacacaatctctaaatgtacacttcaaattttca

SEQ ID NO: 40753 - DNA, 607 bp, Arabidopsis thaliana landsberg
tgttgcagaacgtgagtgaagaattaaacaaagtggctgaggtatagaaaataaactcaatgtgaaaaaagaaaattaatgtttggtgcattctaattctaaagcatattttatgatgaatggccagttgtgcacgaaagaagaaaaaaatcattgtttgaaagacacagagaaatcgttcaagttttattgggagatttttcgtaacttgttgtcataatttgtgatgagcttccggtggcaacaaaaagtggcgggaaggccatcaagtgtacgtatgaaaacaaaatctaaaataattggactaagtctccaagcacatgtctttactctatcccataataataataataggaagtctatgtggttaccgaaatgtaggaatcccacttccttagttgttcacttgtttcttttccacttccacgtttatatgagctaaaccctgattctaatttaattaatcttttggctctacaagttggtcaattggttagcatcgagcctaatgccatcaactattaagaaattccaacaaagagaaatcaaaagagatgataccaaagaaacataagagaagaaagagagagacatcgtgatagaaaga

SEQ ID NO: 40754 - DNA, 755 bp, Arabidopsis thaliana landsberg
aaaaacaaaactaaatttaaacttgttattgataggttaaattaacataactgaacattctaagtttatgtaacctttatgtttcttgttaaaattaaatctactaaccaatatgtaagaaaattttgcaccaagtaaatagagtctacaagtaattaaagaaaaaaagaaatgttttctatcaacgggctaatataaaacaaacggcttttaaagtaaatatacaaaaaacaaacaaaaacaaaattactaaatttatctctcaaagaagtaaaatcatcaagtttataagtcactgcgagtagctccatgttctccatgcatgaaatcattctcggaaaatctcacactgcattatgtgttccatttcgagaacacaaaccattgctcataaaaggattttgagttccaagtgaaaagactcttggcatccatcaaaactatctatgaatccctcaaacaacaacatgcatcttaattagtcctgagaatttatcgtcgcacttccaaggaacacaaagaaaaaatcttgctcatttcccaccggttcatgttggataataacatatgagttatgactgcaccatccgggattcgtgagcttcctcccaagctatgctctccgtctttgcattttaagttcatctttcataatttctcatttaaattacttttatagaggttatgaggataaatatcgacttcagtatgtatgcatgtgtgggagtgttataggtcatatataatagatatta

SEQ ID NO: 40755 - DNA, 683 bp, Arabidopsis thaliana landsberg
tcagcagttagcatgcttcaagtggttctgattcaatttaacaaatgttataccttatgtatactgtgttttgatattttatgtgtccgtagtaatatgtgtgcttggaaattatatctttttcgcttaaattctttttcctctatatgtaggaggaagagttgaaattgaagcctgttgtttcatttgattgcggtacgtatctatataacttgatctttacttttcatgtaattatgttgcttggtttctttcagtcacattcttaatattatgatgtctgaacaaacaagactaaaaagtagaaaccaattgatttctacaaaatgtgttgagcagtaattaggtccaaaatggttggctctcaatagtgaaaacgtttattggttgaaccccatagagaaattacattttgtgaagtgaagcttacatcttactttatgttgtcctatgaatttgcatgttgatgacgagaaaactgcatctcccacaacttaaaattattgtctagttatacatcctactgactgttattattttttttccaaaaattgaagctgaaattagggagcgtgattggtgcaatgttgttacttgccatatggatacagcagaagcatatgtatggagacttcagaactttgtacttggagagcatatcctcaaaccatgcgctagaatcc

SEQ ID NO: 40756 - DNA, 679 bp, Arabidopsis thaliana landsberg
ttgatttatgaccttttacacgcccacccatttctactctcatgtcaccaaattgacttatttacataatattacttctcaccaacaacagaaagttcatgtaaacttacatcggatatagctttatatagactatgtggatataagattatttcgttcacactcaatctactgttggtttatttctaacaagcagaattcaacaaataaaacgtcatatgattaatagtttgcgaaatgactaacgttagattgagtagccttgaatagcctattagcttctagtgtacattgaaggttcgattttttcaacatattgccaagtataacatgttagaatgaatttttgatacatgtgatgataaaaacttagggtaggaaaaaagaatagtttttcgtcttcgaggactttaaagtataagatgttgattggtgagtagttgcaagcttgacaagtgggtgttcaaatttcagtagaacaagtaagcgttcattgtatctaaccacacttattgagcagataaacaaaaatctaattttgttagatattttcttaatagaaggatccatacccatatctttatctttataaagtagagaaatataaagaaagaggaggaaataagtgcttaaagtacaaaataccattcctaaattacgtaaagagaccactattcga

SEQ ID NO: 40757 - DNA, 846 bp, Arabidopsis thaliana landsberg
  unsure (1)..(846): unsure at all n locations
ctgtcttttcaacttcaacccgttaatatcattggctaatcctcatgttttcagaataaaagttgtttttatcagaaaataaaaaaataaaatctgaatacactcattcttgaattaatttttaattatgaattaggtttactactctagtacaatagtactatagcagactattttctaatatatatatatatatatatatagaaaatagagtatttttgtctttctgaaagtttgtgtcgtatagctaaaacttaattacttaagaagtaagagtaataaagaatagaaaaaaatcagaaatggtaaagatcgatattgggattgacagatgaaaagactaggtcatgggatctggaagatggccctcgaaataacacacttgacgtaactaagtgggatgggacccagtttcccttnnnnnnnnnnnnnnnnnnnnnnnnnnnnnnnnnnnnnnnnnnnnncttttacttatctttctacatcatctcatctaatctcattttatggatgtgcatattaatatagtttcaaactttcaattatcaacccacccagatctttttttttttttttccctgaactgatgccttttcattgataacccacccagatctctgaatagaccaacccaaacaatgttaaaagccacacaaaatatgactagacatacatatagatgcatgtatattatttttttattaaccaaaaaattttgaatttagatccatgaacatgtatgtattttttagtattatttgataaaatgaactgtaagtaatatggaatatttttttgtaaaaaagtaatatggaatatattgcagaaactattctgagacgatca

SEQ ID NO: 40758 - DNA, 595 bp, Arabidopsis thaliana landsberg
gactcaatttcatgctagccacaattgaaataacataaccgactctgccaatgattttttaatagttcggtttattctagacgaccctactaaatcattttgggctttaatttatgtataaacaaaacaatatggcccaacagtacaaatttgttacaaaagaagccattttctactaatttgggtcttgtaccaagtagagatttttacttccatggtggtgatatggcccaaactctggttttttccttgtgatattcttcataagtttttttaaaaagcttatgacttttctatgtacaagaaaggaaataaaccatgatggctgaagcacactttaagaaagaagaaaggaaaagacaaaaccatgatggtttaaccacaatctttgaggtggatgccacattacccaatacattattacaagaacaacaactaaaagttggtggagctcacactttgttataatgatattgtgccaatattcaactttgatttcctcaaacatatgatctcttatcaagaaaactgtatcctatcagaattgtatattgatgccatccacggttcaacagaaaccagaattagattattg

SEQ ID NO: 40759 - DNA, 700 bp, Arabidopsis thaliana landsberg
cggctggcatttctatgtttttgacggcccccttcgattcattcaggtgattatttgtgggaaagtagggcaagcaccgttacagaagatcttaaggaacgggcggacagtaacgatctttacagtaggaacaggtgggatgtttgatcagaggcttgtaggagctactaatcagccaaaaccagctcagtggcatagaatcgctgtgcacaatgaagtgcttggctcttacgctgtccaaaaactcgctaaaaagtaagttttattatatgcttaactatcttgaacaaagaagagtattaacaatagtttaagagttataatttcagattaactaagtgataaatccgttggttaagatataatcagctcatatgtgtgtgaatgtgtaaaagtgtacacagaaactcttaagttgaataatatcttctacattatctgtcttcaatctctctgtttcgtctttagtcgctctatgtaatgctggtagcagtgtctaaataggaagtgaaaggtgtaggttttcatctaaacttctttgctggtgctttgttacagctcgtcggtttatgtggaaggtgatattgagactagagtgtataatgatagcatcagcagtgaagtgaagagtattcctgagatttgcgttcgtcgtgatggtatgtatgttcatattgttgatcccgaacatcaatttgtt

SEQ ID NO: 40760 - DNA, 524 bp, Arabidopsis thaliana landsberg
ttcgtagtataagttaggtatgaagagaaactacgtggactcgtttagtcaacttgatcaccattttaattatatttactcctttcatttattgtacgcaaatcttacttacatataaaaattttacacacgaaacgacgtcgcgcttgactcaatgtttgtattagtgtaataaattagtttttttttatatttttgttgttattcgtaaactatacataattcagattagtttggtttattactttattctatccttctttcttctttggggtaaaaggctcgtacgaatacgcaaaatgaatattgatctccatatacaaacattttatttcgtattactatatgtaacttagaaaattataaaactgacaggaattcaaacggaacagaagtttataagatcatttacttgatgatattttgatcaaaatagagtatatgaaaatacagaaacttccaactgacttacacaaaaatatataccaatatttaacaataaatagaccaaaatggcattatta

SEQ ID NO: 40761 - DNA, 337 bp, Arabidopsis thaliana landsberg
ttattgtggtgttgtcaataacaaaagtgttatttacttgctaatttgaaacgcaattccaaaagcataaacaaacatggccttaataacgacttaagttaagagaaggtcaaacaagatgtaataccattaactagaggtttccaacttggttaataagaaaatcaaaagcatatgattagtcgaatattttagacatttaatttcaaaactaatctataaattaattaaaacaagattcccaaatgtcatcagcacctctatatatctccctaatctccaaaaacccaccatgtctccattacacaacacacagagatagaaacaccaagaacag

SEQ ID NO: 40762 - DNA, 784 bp, Arabidopsis thaliana landsberg
ccctaacaaaatcaagagccatagcaacacaatcatttgatcatgtcaaatagataatggattcaaattcgcatgggcgaagatttattatcggaaaactacgatcgaattgttgaatcaaaattgagaaagctcgagaagaaggacaaagtcagaataacaaacttgttgttgagaagcggcgtaatcggcgtcgtcagagagatcttgtagctccgttgcttccatactcatggtgatttcaggagaagagagaggtgatgagagagatcagattaccctggagacgaagtaagtaattagagaggaagcttacgcgtcgttgagaatattcgattacgtgtgtgtatcttcattaattttgcagttaaaaaggttttaattacaggtcggcgttgtaaccgaaccgaaccaagttgtaatcgaatcgaatttagtcaactttataataatccgaataatacgaaataagtttctttactatagtagtaaaatgcgaatttggtgtaacagaaccacattaaccagaatttatcagaaatgcatatttttagttgagtaacatactaatcaaacagagcaaattaatatttccttttagttaaaaccaaagcaaattgatctgtaactttaaacaattagtttatgctgcggctttttagtaacttttctgggctctgatcactcacatagtcacattcatatatttcagtcataacttttgctattttgttttgttagtaacttgtcaaaactacaaatgatcaagctgaaatctgttttg

SEQ ID NO: 40763 - DNA, 560 bp, Arabidopsis thaliana landsberg
gaactcatacattaaattactacaaatttaatcataaagaaaaaacacaaaattgtaataaggttttaatttttaaagtcagaggaaaaagagaaaacaagtttcgatgttccaccgaagtgggcaaattcttaaaccgtaccaaactcccataaagactccaatacacttagaatgaaaaagcaagagacaaattggttggagcccaaacccatgtgggtcaaagtctctctaaggagttacttactgctgggcacattgcaccctttgagcaccacccggatggtcatcatcattcatcgccattatcataagcctctctttgagcttgagccttcctcctcatctcatcctcaatgttgacatcgtggagcgtggtctcctcgcattcatctatctccatgtcactcaactgagctgttgacggcttaggtagaacagcttccagtgctttggtctgatctgggctcaacgagtccgggaactccactgtgaagtggatgtagagcttaccccttcatgaatggcctctggtatatcggcattctttatcgtttatt

SEQ ID NO: 40764 - DNA, 355 bp, Arabidopsis thaliana landsberg
  unsure (1)..(355): unsure at all n locations
ttctggagataaaaggcacattgatagatccgcaggtcggatctatgatcatatggaccatgtagggagtctaatggaccttctatgtacgatggaattggtgtttgtttgnnnnnnnnnnnnnnnnnnnnnnnnnnnnnnnnnnnnnnnnnnnnnnnnnnatgttacaccgtaaagtctgataaatatattgcgataactgatgagtttgggctgccttatcaccattgcatttacataattctcatggagatgaagctcagcctctgtagtgccggtttctgttcgatgatgaactaaagcatactatatacgtagaaactagctcgttacctagaatcaactgtcggtgcaa

SEQ ID NO: 40765 - DNA, 707 bp, Arabidopsis thaliana landsberg
atttttatttatataatataatagcatatagtctttggtttttatttttgttttctagatttggtgcgttttgatttggtcaatatacccaaaatattgctaatggaatggagcaaccctagcaaaaagagaacggtgctgtcaaaaaaaaaaaaaaaaaaaaaaaagagaacggtaagaggtgtaccgttactacgtttggttacaaacggtaaaagttattgaaaaatatttgacaatgtatgcaaactaatattttcctaaatgtaagaatttctcttaaaattatatttgaaaactgaaacacataaaaatagccgttaaaaatattggtgtggatgtaagatgagttcttataaaaaaagtaaaaaagtaaaaattcatgaatgatttcaaaatacgtatgaatctgaactctgatttttgaacaaacaaatttacatgacataaaggtacaaaggaaaatttaaatctttttttttttgtttatagagcacacagagagagagagagagagacttcaagaaaatttgaaaaaagaaacagtgcatacacacaccaaaatgttacaaggagaacttttaaacagcggctttcaaggctcctatggctgctttccgtctaaattgaatcttgtttcccgctgcctcggaagtaacatatacaacttgcttggttcccacaaaaacaaaacccattcccaaaag

SEQ ID NO: 40766 - DNA, 799 bp, Arabidopsis thaliana landsberg
tgacatcaggaagaaccatgctgtactcgtatatgtcgaccacgacattgattggcggctgaatgttaatctcagtcacaggctccccttgttccgctacttccataatttctttagctttgtctacggggaactcattatatactaaaactttccctccgaagaatatggtcagctgcgaacttcctggctgtgattcactgcaaaccaaaaacagatttcagaacaaaaccaattttaaccggattaaccgattatccttttctctaatctccaataaccaaaaacaacaagtattcccaaggaacaaaaggagagacctgaggtcagcaacatctttgactttgcctcctgatgaggtagagggttcgcctttggaatgccctgccttatgcatcgcattttgtttccctgcataaagagaataaaaactttcgtgaactataataactttagaaaaatgatatagcatcttatatctttggaattttatgaaccacatctcaatcaatttctatatcaacttattcgttatttttgttacttgtcttcataattacaaggagaaattatttctgaagtaaggaactgacttacaaatgaagaaacaatacaaaagtagtaaatctggcaaaagcaagtagtaacagaactgagtttttaaagtactattaccaagtggcggccatgaaagaagaaagagataataaaagtacctggtggatcgaattttccgggcaacgcgagactggaatcgggttttcggtataagccaagatcaatgttttccgaaactacc

SEQ ID NO: 40767 - DNA, 414 bp, Arabidopsis thaliana landsberg
ctctaaacataatttattttcgactatgtctaattgacttctccatgtaagccttcgtggtttccactttccatctttgtttgaatagtaaactataactgacttgtaatgtttggtaattgaaaattcacagcattgaccaatccagttgaactggccaacaaattaaatccacaaaaaaaaaaaagtatgagaactttacttgattcactgcattgaccaatccagttacaaacgctgtgaggttttatctttacttgacggttttacccatatcgattgctgtaatttacgagaataacccaacctctgttttcaacgaacggtcccctcaagagatccaagccgtcgtcgagcctgacaattgagtgagctagatttgttgcaatctctgattcaacgtctttgttaaag

SEQ ID NO: 40768 - DNA, 1029 bp, Arabidopsis thaliana landsberg
  unsure (1)..(1029): unsure at all n locations
catataacataactactacatttcgttttacataattttttttaatattttactttaaaatgctttgacgttcttaatctttgacctatctatatgatggttggtttaatacacggttatatcttaaaacataataaaaaaaaatcattatatgattttaaaataaaatatgtatatcagaaacaccctacacacgacggcagatgatatttatcattattgtaaaaattaaaaatttttaaaaaattaaaataagctaattggttgtagaagtagaacaataatttagagcacgcgtaagaaacaattgcatgattagtgtccgcctccgaaagctaactaacaatggggtttagttggtgttgttgatattttatttcatttgtatattactttctttcttttctttcattttctcttaaacttttggttttatatgcagttttcttttttctctttgttgctgactcgctgtcttattattttgttattgtcttgcagttgttgggtttacatcatcatgtcctactagcatataatttagtctaaaattaatgtattagggtcttaacaacaatgatttataatattttaaacaataataacaaggattcagtgattgcttaagctctatttttgtctcttaagtataacatgcatgcatccaaatcataacaacaatattgtcggaagtttgttcaagaaaaatatcacaagttacataaaatggatagtgcggccattggggatagaatctgagcttcttaataaaatcgtcactttttcataagtagcataaactacccaaaacacaaaaatccacattaaactatccattcctcattattgtttttgggtgttcttcaagtgaccattatgcgaagaagctcatataggttatgggctatgtttgcttaatgcagttgcttacctctatgctttagtttgcgcattttcgctttgacatggctgnatcaaaacaccttatgtacattttctcaagtctcttacttcctgattattaccgta

SEQ ID NO: 40769 - DNA, 788 bp, Arabidopsis thaliana landsberg
attagaaacgtacagtattgaaattaatttaatctcctttgtttcgtatatcatccgacaacacattgtagggtacgttgttagattatcaaattccccattttaattttattggaatatttgtttagtaactaccaagatgatcaacgcttcatgtgataaaattcttgtcacaatatatacgtatctatttttttatttattttttgaataatttgaagaatcagaaatactcctacatagccaacagctttttggctgtcaagaagaggactctgtcgaatcacatatatgtgtgttcatcacatgatattttactattgcagaatagtaaatgaatgattaaccacataatttattattattctaaaaatccaggatgaaatttaaataatacagtatagtattagtcaatttgctctgttatgacaaaacaagtatacttagattttttctcattacagcatttgaagttagcattcttttgtatttattttttaattggactaggttttacttgacagagaaatggtgtaaaactattagcacacaaagcttttcctgaatcccaaagatggtttatgctgatccgtgcatgcttgatgattgcaaatgtatatatcaacaaatgtctcaatatttttcagttttaattaacttggtttattaattagctggtcataattgaaaattagcaacatataacagtataacactaatccgagaaccatctatttttctatttgatttttgtggcttgatcatcaaatactcaaatattctaaaaa

SEQ ID NO: 40770 - DNA, 1334 bp, Arabidopsis thaliana landsberg
taggataagagattttcctatatttttcaataagtatatccaatcgtgtttagtagttattatgtgtaaaactattatttgactgtggaattacaattaaattagtcaggctaactagaccgatttgaaacttgttatacatatgatgagttcttctttttttttttttttgaacaaaacatatgatgatttctaaagatagaagaatattaattaagctttggcttattctagaagacctttactttgtttatggttgcctcgaatgtaaatatatatatatatatatatatatatatataagatcattttggtaggtctttcctctatagtaatcttcttttttttttttgttgctaagattgtaaatattcattttacaataaaatttaaggttacacaaaaaacataacccttatgtagctattaacaaactggccattttggcactcatgtatagtgcctacaacattagtagacacggtcctgcttccataaatctattttgacatcagtttgtatcctcattgtcatcattgtttactaacgagattaaaaaagaaaagaaaacttggacattgttggataataatatttcttctacatattgatctcgctttgatcctagccaatagatcaacacatttgttactctcgataatcactagctcctgtgtgttttaatgtaatggtgaaggttagggttttttatgtttcctttcaaagtgtagtactatagtttcaaataggtagcacatactaaaatcccaaagattaatgcactatatttaacctcttctgcatcaactccatttgaagtcggtataatccatccaaaacaatcatatcttgcgctttccatatccgaaattatgtgaagcgtcataattagacttcatccacccttctgtcggcatcctccatggcattgattttggagcttcataaacatatttaattttggtttgtattaaatatttatgaaaatccatagacacaaggatagagaggttgaaactagagagatcttacgattctttttatttaagcaacatactagtatctatgttacttttatttatttatcattcttttctttttcttttggagctatagcaacctaccaatagtatttaatttattcagagcgttcgtaagaatatgtttgataaaatatgttcacgaagtttctttcttggttgagaaaatttatagcaaaatgaatgttatacgtacattgttcaactcataatgataattttgttttcagatctagtagtatagtatgggttattatccgtactacaatatgagttaaatttatagctagatct

SEQ ID NO: 40771 - DNA, 824 bp, Arabidopsis thaliana landsberg
taatattagtaaataaaaataaaaaaaaaaaaaaagaaaaaaaataaaaaaaacttaaaaacactttaaagaataaacatctaatctagctaaaaaatttataccgccattaacaaaaaacgaacccaaaccgaactcaaacccagacccaaacccatgcccatacacaaatcacgaatgcctaggcttactagtgaccgaaaccgaattgaatcatatatagtttcaggtcacctgttgcacaatctctgctcagccctaaaagcttactcctttcaactttctggaggccttctcgtagcctagggtcatagatggatttgatggagaagaacttggagttagtggagattcagaaactcgaaggccacaccgatcgtgtttggagcgtagcttggaaccccgtttcttctcacgccgacggtgtttcaccgattcttgcttcttgcagtggcgataacactgttcgaatctgggaacaaagctctctctctcgctcctggacttgcaagggctctatctcatttctctttctcgcaagaaagttctagccttttttggacctagcaagttcaattcacacaaatctattgattctctagatcagtcttacattacaatttgtgggttttgtttcgattcactaaagagattaacttgaccttaaacatggaatcgactggtgatttggatatggtgtaggactgatgtgttagttcttgtgctatttctctagaaagatttattgattgtatattgtgaatcttcagacagttttggaagagacgcatacaaaaactgtgaggtcgtgcgcttggtcaccc

SEQ ID NO: 40772 - DNA, 725 bp, Arabidopsis thaliana landsberg
aataaattgtttatacatttttaatttgaaagctattttactatcacaatatacttcgcaacatatgtgtaagatatatattagtttataatattttcctacgtaaaacaaaaaggtttcagtacagaaacaacagacgaatgatgtagattaataattatactcagaaaatgaaacaatcatatataaacaaacgaaaaaactgagagtattcatgaaaaaaaaatacgaggaaacaaaagcctggtgctacacagtacacccacatcgtgggattgaacatgagagtgatgtttcaacattctctttcttcactactttcgtatagtattgcttctctaagcaagctttttttgtacttagaacaaggaaatttataatttcttgtgaccaaatcatgaaaattctgtttttgtcccacttttgcaatcatcattctactacaaaatgatgctctcttactttagtttcgccctcttttattcgtcctcatttttccctttcattgacgtcgtttgtttgttttttactaactatttttatgagttttcgaaaacaagtaactaattcattgacatgcatgttatttttgaatgttatttactttaataggagtacattattaacaattaaattaagaaataaggttcaagtcaacatgcattgttaagtaaattattttctccctctctcacttttaaccttaaaactggcacaatgattta

SEQ ID NO: 40773 - DNA, 992 bp, Arabidopsis thaliana landsberg
ggatcaacaaaaaacaatgttgaaaaattcatatatatatatatttatatatataaaccttctacatttatagtagtattctaaaaatatttcctccttccatttattaaaaattgtttatattttttcatgttttccatattaatgaattctaagctaataaaaatattttaaattagtctcagaaaaaatcattaaaaaatgtaatgataagaaaataatgataaatcatggaaaagtcaattactatattttattgtatcattgtatggttaggaactaatctggattgtaaaaaagtgatcagtatagtataatactaacaaaactgtgtttgctccaataaaaaaaacatttgtataaattactggtatgaatacatataattattaagtcttactaatttagtatactagttaatattttaatagacttatcttaaaaaaatgttaagcccaaagccagtgcattttgcatgtggaggagaaggaacacgaaggtatctatggcagagaaagacacgtgtcaaaagcccgttttgccacctactgtatgtacgccaatggcctatgctacaaaactgttgcatagattgttacaaatatggaaacctaatacgaagatgtggaccgaccatgtgctttttatcctcatcaatctctgaataatccccttttatttctcacgcatattactttcatacgtttctctaattttaattttttgcccttagttagtaaactgtttcttaattttttcactgtcttatacgcacacgtgatattttttgtctatcaccattcagtattcactggcgaaactaattattagatcactaaatcatttctttcttgtacggaagttttgaaaagttgggtacgtgtttcttttgttttgtattaatactaaatactaaccattaaaatgaccaaaatgagagaaaaaagaaatattaagactgcagcagaaataggttttccgtctattctttc

SEQ ID NO: 40774 - DNA, 210 bp, Arabidopsis thaliana landsberg
gactcaacggacccttttttatacttaaaaagagcatttttgccctttacgtcgagccccagcagaggttcccggatgtcgcttacctggctcctcacgggcctactgacacgttgactctcacgcgtgtcggacggagtgtggccggatggatgacagttaaaagggggaaccgacgggcccccccccgaatggcgcttgtgccttagt

SEQ ID NO: 40775 - DNA, 446 bp, Arabidopsis thaliana landsberg
gcttgagttcggcgatggccttgatggtgccgaagacggacgcgccgccgcacatgtcgaatttcatttcgtccatcttcgcggcgggcttgatcgaaatgccgccggcgtcgaaggtcaggcccttgccgacgagggcgatcggcttttcgtccttggggccatgcaggtattccatgatgatcagcttggcgggttggcggctgcctttggccaccgacagcagcgagcccatgcccagctgttccatgtcggattcttcgagcaccttggtggtgatgggatattgctcggacagcttcaccgcctgttccgccagataggtcggggtgcagaggttgcccggcaggttgcccaggtccttggcgaaattgacgcccttgctgattgccagggcttcgcccaggcctttttcccccgacggcaggtcggagcggcgcggcacg

SEQ ID NO: 40776 - DNA, 572 bp, Arabidopsis thaliana landsberg
agcattagttcctgcggggttgagcatttctcttacaattaatcatatggaagaactgccctggatgaatcagtaacttgattttgaaccatttgttgtggtaggtcatgtaagccatttttactatgatacttgactgctgactctatgatacattcatttgtagtaatgttgtttgaatggtgtgattctgttacctaaccattgatttcactggtcacgactccttatgtttattgatgttgacgaaaatttccacaactcaattgacttattacgtgtctaattcagtctctatatgctaagattaatgcaattttttaggattgcatactgtattataaggtataacataatcttgatatattggatgttcttcgttttcttgtattactctttctttgtgggctctttgcgaattgttttggagctctttgagtttactattatgaacttattttcgtaacctcttgatttccaaattctatcatctccaggaatctcctgctgtcgtacagtcctactttgacaagagaaatatcggatgccgtggtggtgaaagcggtaagtta

SEQ ID NO: 40777 - DNA, 561 bp, Arabidopsis thaliana landsberg
tccctttctacgagatttctttcaccactttttcaattgtgttttgcacctctttctctctattttgcaattaccttttctgtgtgaaatccatacacctttgtaatttgttgtgtcatttgttcatttcagacttcaaatagaagtgcaaaggtttcactcgatcagatagatcctacccgctggttgcaagtaagcttactctttaacagtatttacaacgttgaaaattgtttgaaagtacactcattaatcatgccgccaagctgattattgtacgtgagttagaatcttattttatcaactattttcccccgaatacgacttcatatataatgattctaagaattctgtcttcaagctgttcatgtgtggaaagtgaataaatcgtcttaatagtattattcccttaacaaagtagtgctttgatgttcttgtgttagtagaagctcgactatttaaccaggaaactaatactccacataacttttcttgatggatgtttcattgtttcatgttgtagcatacctggcaataaaactattttcttctttgcttttt

SEQ ID NO: 40778 - DNA, 455 bp, Arabidopsis thaliana landsberg
agatcagaataagttagcaaccgcaaggttcatttacaaagcaatagaataacatggacaagaaatagtgaccacaaaaatctacctgggtttggcaatcacaacatcctttggcgaaacaatatagtacagtggttcatcaccagctgcccactgtcccccagcgtagctactacctacactcacatcaattttccgagtaagtattcaaacatatgctttccttcccctagaaaacaaactactttccaaacaaatctctgacctgggaaaggagcatgagcaagggaatagtctttcgccttgtaatgctcaaagccgtgtacaggaagagcatccattgtgagttcatcattgttccatgatacaatgcgtatttcaggcctctgggcatttccttggattacttaaaatcagactcaaccacttcccaaaagacatgcccaaatttatgt

SEQ ID NO: 40779 - DNA, 1018 bp, Arabidopsis thaliana landsberg
tgtttgtttaatgcaagttagtagtctataaaaaaaaatttctactgcattttttcatttgtacttaactttaaaaagagaaaattgtgtgtttcttttaattactttgttgatatcgcctaaagataaaaacatcagtaaaaaagattacaaatccaatgttaaatatcaaaacgataaattagatatttgaccgacatcatgcatgatttttacaaacaaataaaaacgttccaaatatatagttaacgttgagatacaaaattttgttttatagtcattgatagataaatgttttcttatctcatgatttttacaaataaataaagacgttacagatttatagttaacgttgatgtacaaaattttgttgtatagtcattgatagataaatattttcttatctcatgatttttacaaataataaagacgttacgaatatataattaacgttggtatataaaaaatttgtttgtattgttgatagataaaagtttattaacttgttgacattctctaaagactaaagcgtcatttttgtaaatggtaaagacgttggatatttcaaaattagggtttataaatatatttttatggttgatggataatatgttttatttattgttagcatctccttaagataaagacacaagtaaagagattctaaatacaattgtaaatataaacctaacatagagaaatataattatgatgtattatcattgttaaagaatatatactttattaccttgttggaaccctctaaagacaaaacatgcaataggaagatttcaaatacaaagtaaaataccaaaagaaacagatgtttgtttgaaattaaacgtgatttttatgaatagtaaagacgttacaatatataaaattagtgtaaataaatataaagacaaaagatgcagtgaagaaatttcatatacaaagctaaataccaaaaaacaaaagtagatgtttgtctaaaatcatgcgtgattcttataaataaataagacgttacgaacat

SEQ ID NO: 40780 - DNA, 516 bp, Arabidopsis thaliana landsberg
tttttgttctcgttctagttatgtttatttcttcactagattaggttgacgtggagtttttggcttgagtaatcaacgatccaagaagacaagtgttttggttatcctttggatcaacgaactcttgtatttatcgtagcttgagctacaccagtaacttgcatgatgtgtggcaaattctcttacatttctatccaaccatggtaactaaccatccagttcttcaatagggcaagcaccttcttccgttaaccgagcatttgacccatctctttatccaatgtctccggagggagcagttagtgcccgtgcctagggaagattatgtgtaacttcccattaaataccagtcatatataaatctggcccggtactccggtctataaaccacgcagagctgagtaatggctgatcatgcaaccatggccaagcacaaaattagctgtcttaagcctcacaactctgatgagtttttttggtcatgcgatacttttctccacggttttccattagtct

SEQ ID NO: 40781 - DNA, 924 bp, Arabidopsis thaliana landsberg
taggttttaacgggaattgtatacaattttgttcatcaaaactgtatcgtcgtaccattttgatggtttcttaataaaatagtcatttttgcaaatataatttagctggaaaattggaattctttccgttttagttttaggtcaatattgaattccaccgtaaataatacggaaaaatgatataaaggagaatttggtttctcaccgaaacacattagcactaattttgaccacaatacaattactgaagagagagacaattaaagtaaatgggttgaaaaaaataaaaaaatgggttgaattattttctaattggctacgaattttgggctatctaagactaagaaaacgaaataataagtatgaaaaggtaaaaaaaagattggactggagaaatatttagcaaagttgaagttaaagctttgaccgacataactgcttttacttgagacttatttcagttatttgcagataacctaattcaaaaccaaagtcaatagttacttcttcgtttaggccgagattagctcttccattttaagattttatttatttttataacaaagctcttcatgttttgggagacgaccaaaattgtcaaattgttagccaattttttcccttcacataagaaataaatttatggatttacctaatacaaacaaaacttttgttattacggtgtttcttatacacatcattgattaattattattaataaataagaatatacattaacatatttaccaaacagtagagtaattaaaataagcctaaaaataataattaaacctagctacaacgtgatttaattgataagcatacatagtatggaaattgcagagtaagtgacagaagaaaataatatttttcaaaacccgagaccttaatagtccaacggagaaccgatccaaccaacaaatg

SEQ ID NO: 40782 - DNA, 1134 bp, Arabidopsis thaliana landsberg
gatagccatattatttaagcagataattattattttttgatataacggaagggaccatcatgttccgttgtttccaagagtttacgaacagatacaagttatctagaagattagttccaaatcataatatatatatatttttaatacaagtatacaagtttccacatcttttgttgactgtttattcgagaagaaacaaagataacaccttttgtccgtgtaatcatatatcaactcgtgggtcatgactcatgtatgatcaaacctaaacatcttcaaaaccggtaaaaaaatcagtaagtaaaacaaatattgagctgtaaaaaaaattcttagaattgttttaggcagatttatctttagaatttagagataaaacaaaaattgttaaaccaacaaatggatccacaaaacaaaaccatgagctctcaagtcaatctcaccagtcaccatgactcacttactacgtgtatctgtcttttttacatatattttgaaagtttcatcctttatcccgatggatgcgaataatacaaataacctaacaaaactcgaatcagagaattccagatattacttacataagacaattttagcaattagctttcaaatctcatctctttattctctctctctatctcttctcctcaagaaccctaaaaatctccagaaaaaagatcccaaatttcgtatttcaacgatctgaatctctctctctttcgggtttattttgtttcccgatatggtttagaatttgtgatttaaatggaagctgacgtgtcaatttcctgaaaaaacccttatcgcgaaattttccagattaccaaaaaaaaaaagattgaaacttttttcgatttgtttgaagaagaagcacggtaggaacgacgacgatgaatcgtgctttggtcctacttttatatgtttgtactgtttcttgtttagcttcaagcaaagttattttgatgaggaataacatcactctctcttttgatgacatcgaagctaacttcggtgagtctcttccttatcactctgttttcatttcagatttttgatgaattgaatctgtaattggggtcaacgcataaaaaagaagagatttttaatctgtttcttgcaacagctccgtcagtg

SEQ ID NO: 40783 - DNA, 787 bp, Arabidopsis thaliana landsberg
  unsure (1)..(787): unsure at all n locations
attcctcttgccatagtacagcattgcatacaagaaaggaatatgctatatactatcatttacctctcaaggtcaagaacacaatctgcataaagtttgttccacctctcattcgaatactccttgggcatctcacctaacagatttagcaaattttggcaagctgtgaacttccgattgtccagcagtgacacatgtgcctctagaaaggcttctgatttaagctttccagataagttagcaattgaactttcaagcataattaacacctctgaccaatctgatgaagaatcaaagtttacttcttcagtaatatccttgaaaaacgtttctgctgtcattttcagtacgtgagaaaaactcggggccaaatacctgcgaacaaactagttgtcgaaaaactcaaatgaatgtctggatatagcgcttaaagaaacaaagtaaatatggaattggaacttcgcacaatgaaagatgacttacttcgtgttcatacagtactgaatcaaatagaagtccaaacgagaactgttccaaccctattttcttcttttgagagcccttgtctacattattttcccagccaagagtagacataaccactccgttcaatatacaaggaacggaactacctattagctgagacaggaaattcttcaatttcttttttcctgcatgggggcaccaaagatcaatatgctggctaagaacccacagacgcatagtaggcaaacacttgccgttgatgccaganaaccctagaacccactgatcagtgtcttttatc

SEQ ID NO: 40784 - DNA, 491 bp, Arabidopsis thaliana landsberg
acactctaaccaaattaaccatgaaccggaatcaacacaaacctatgtatgttacattcctgattattattcttctcctccaacttgtaaaccttaccaatgcattaccatccccaccaataacagccctatacggcctttggcgactccacggtggattccggccacaacaattacattcccactcttttccagagcaaccatcctccctatggtaaatcctttccgtccaaactctccaccggaaggttctccgacggaaaactcgccactgacttcattgtctcctctctaggactcaaacccactctaccagcttacctcaacccttcggtcaaacctgtagatcttttgaccggtgttagtttcgcctcggacggaggtggattagatgatcggacggcaaagtcatcattgactattaccatggacaagcaatggagttacttcgcagaggcgctgggtaaaaagaagagttagcgtggagactc

SEQ ID NO: 40785 - DNA, 775 bp, Arabidopsis thaliana landsberg
cccgacctccgacggtgccacatgctaaggtgtctgcgagagtgaatccgttttgccgttacggatattgaagtcccgaggccctcgtctcgagtcttattacagctgtcgtcttttattggctgatagcgctaaactgaatcttcccgcgaacaggatcaggttctttggttacttgttgtgacatgtcaagggacagaagataaggcccaataatcccttttgggcctttttcttactttcagaagaaaagcctgcaaagcttttgtgaaagatgctaacgggagacctctccaaaagtaggttaattaaccttaaccatatgttttgctctagcattaagataaaagcttaattaaacacaatgttttcaacaaaaatatttaatacttaatgccttacacaaagatgcttacgtttgtcttctgaatcaaatctccttcagattatatgttacaattacaaatatgattttattacatcgtgtcccacattgattatgtttttgactgcgtatatatatactgctgacataatatatagtttaagttttttttctttttcttagaaatttatatgaaacgtaacgagtaaatggcccggcagaatctattggtttcatgtcaacaaacaatttattatgttaataagagatgctaaattattggaggagacatgggaacaatggtaacagttttgggaagatataatatatttaaattccctttaacaaaaaaaaaaatctattttattttaaattaattaaactaatcct

SEQ ID NO: 40786 - DNA, 534 bp, Arabidopsis thaliana landsberg
  unsure (1)..(534): unsure at all n locations
caaacctagctatataatatatacatcactcaatggtcaacacttgtatattaaattgctatagatcatatatggtgaagataatagtatttggaggaccaatattcaactatttcctgtaatttagaacatttatttttttcttaaatatatgttttttgcttatatatagtcgtaatttttagaagttccataatccatatacttgaacttctaaagctatagtcgcaagcaccttattgttgttgtttaataaaagttctaattttggtagacaagtgaaaaaacaaaattaaactatctggtgtttacatatatgaaaaatatacatttccagcagtgaatttttggttttgcatgaaaaatacataaatagcaattcactgcangcaggggtcagaatatagaaacatgaaccacacacataaaaaaaaagtagattctgactagatcaatctgaattaaaaactagtaaattttgacaacgngacgtggccgtggaagaagtagaaagagacaatgagagatggagaa

SEQ ID NO: 40787 - DNA, 637 bp, Arabidopsis thaliana landsberg
tggacctacgtttttttttttttttgtcgtaatctggacataagttaaaacatacaaattgaaatagtataatttaaaaatctcaataattgaagcaacacaccgatcttgactttatctctcctttatctacgttcaatgttgataattaattcgataaaatagtagtaaaacgatttggatcgcatcacatgataaatattgtagatccgtttaatatggtaacattttgtttgtcgtatataattgaaaaactcaactgattatagtactattcaacactttgatgacttgttggccgaagtttctggttcccaccctcacacatcaatacatatggggtcatgtactttccaaactgcagtttatacaatatgtagagaaaaaaatatgagaagacatggggaacaactttcaacagcgactaacctcatcaaggacatcgatcgaacatttcgatctcaaaactcatggtaaaggcaagcttgatgatgctttgcgtgaatggtttaccacacgacgtctctaatatttcaaaatacaaactggttttcctaattaaaatttaagctctacatttaaatttaaacaaattgttgcatttaatgtaaacaaagttactggatgtaggtttaaa

SEQ ID NO: 40788 - DNA, 623 bp, Arabidopsis thaliana landsberg
ttgacgtgtttgtaatattttttttttgtctgtcatattttaatttattcattattttgttacaaatgatcgatcttctcaactaacaaatcattcatgcagttttacttgatgagggatttcatatacaattttacaattgacactacaaagagtcaaagatttacattagaaggttctctctacaccatgctaatgatagacaaatttaccctttgacagaccggaccactcatcagacgtggccgtcatcagccgagttaactccttgtaatctttctcaaaagcagtatcggttaaagatagtgaaatgaggaatgtcatcacctagaaaagagattcaaactttgcatgaggggataaacagtgtttgaaactctctaaactaagttgaataatgtggttgttcagagccaacatttccatctaaagctaatgtagtttaatgatggctcgaacactacgatcaaccgtacaaaccaaaagattaataccaagtggaaaatattgataatttatgtgtgtttcttttggacgtacacgtttcaatagttcgaagaatttgttaggtaaaccataaattatatatgtatatatatatatatatatatatatatatgctt

SEQ ID NO: 40789 - DNA, 349 bp, Arabidopsis thaliana landsberg
  unsure (1)..(349): unsure at all n locations
ctttttctatggatgaaccgatgcaaagaggacttaattcagtgactaatgaaaattagactctgttcagccgtaatataaatcaaagtgtgttttgtcataactatggctcttgctgatggactcatcaagaacctgctaatgttttcaaaacattaccaggttaacctcagtaaggaaaagatgcatccttttcaacatgtctcaacctcagcagtctatcaaaggtaacatctaatctaagaacaggaatagaggtgaaaacgaaataaatcacagaggcacaaaactatcggcctctatcacacacatncagaaacagcaagaaaatcagctcatagcaatcacg

SEQ ID NO: 40790 - DNA, 297 bp, Arabidopsis thaliana landsberg
  unsure (1)..(297): unsure at all n locations
aacaaagataatgttattgagagatggcaatgttgttaccttgatgatgcctttgcgtggagcatgaatggctaannnnnnnnnnnnnnnnnnnnnnnnnnnnnnnnnnnnnnnnnnnnnnnnnnctttatctttttttgctaacatctccatgaacacacagcttgcgtcacgataaccctaacaaagaaagttcaaattttaaagaaaacagagaggtaatttaagcatagaagtatttaggatgttaaaacaaaccttccatagccggacaactacaagagcttgtgtgtctag

SEQ ID NO: 40791 - DNA, 879 bp, Arabidopsis thaliana landsberg
ctccggttctccgccaatttcaagttccaaaattgggtaatggaggtggattagggatggtgattgagtgttcgtcgaggccacagaagaaatcgacagctcatcacaggaagacgaggccgaagaagactcagccttgggacattaagagaaagcctactgtgtatgctcctcttcctcctcttccggcggaatggagtccgtttactcttgcttccgacgacggtggtgccgccgttgctgcttctcctgccggagatttggtttcaggctctgcctagttatatgagctatctggtggtttggttgtaatctagtttgagagcttttgttggtgtttgtttctgttaatgtttttcagttttctgctgtctgtttcttattatccggtttatgtttggctggtgaatgaatgtcaatggaccaaactgcaatttttttaaaggtttacgcttttctctgttttgggtttaaatgtctcagctttatacacatcatcatgatgaaaagacaagaaccgatgaacactaaaaggaaatgtagtatgaaagtaaaagtggggttgagtttgatcttgagagtcaaattagaaacaaggccaacgaaatccaagtagagaaggagcagtcgtagtatgaaaattatctgtttattgatatcggaaatgtagctctcatcattcatggtcatctatcttgttattctttgttttcttaaaaagacttgggcttcttcttattttctggttaattctatacgtagcacggtagcaattatgcttggatgataagagtcagtggttgctatataaaaaggtaaaagcatttgttcacgcaaattctctatccgatggcacgacagtgggaatggtttgaatac

SEQ ID NO: 40792 - DNA, 738 bp, Arabidopsis thaliana landsberg
aacgaacaatgtaattggaagaaacattctttagaacaaaaacactaatagcattaaactattgggtcttcaggagtatagagtaccaaccttgtcactagaagaagtatccagccaaaaagtatcacttcctctattcttcccaaagagttccataaatatatttcttgctccaccaactttatgcgtaaggcgttcatgcttcttccatttcaacctcagcaattttgtatgtgattttggatatgatgaatccaccatatcaaagacgtctacaccatttgtcttggctgaaaacagagacttagggttcccaaaatagctagaaccatttcctgtacatcgagttctagaaagttctttcagcaattgagtagcaccaggcacctgcatgtttgctaaagaatatttattattgacgagaagctccaagacagttcattaaaaaataattccacaggttactaaaacaaaaataggtcttcaaaattgaataatagaagaaagaggcggaaatgacaatctagtactaatgaaatcattaagcttaaaggagctcaccggtgtcatttatgtttcttcgacgcatggatgtagatttgcactgactccaataatccacagttatgtccttgaaattgataaataactgactaccataggtagtagcaatactctctggatgacactgctaggacaaggcatgtctaagagcagaacaatggagttaacttattc

SEQ ID NO: 40793 - DNA, 850 bp, Arabidopsis thaliana landsberg
ccaaactctgttttcttcaggacaaggtcatgttatggagattttatttctttgtaggagcagtcaagagtgccgagaagctggctccctagctaactttggctgtatatatatatatggactgggatgttgagatggtgtgatgggctaaaccggctagttttttcgttttcttgattagtccggttagtccatctagtagttggtcttacatggacggttaacttataaaaatcggttctgatcttgtaagactttgatatgtcaaagattgagttggccggtctgcagattatttttggtgtagtccaatctctcttttttatgtgtatgcaaaagaacaatctctatgcatggtatatatacatggtcttcaatgtcttgtcttgtattcttcgtgagtaagataagaagagcactgagtatatagatagttttgttcttgaattttctgtgattgaggaccctatcgagtgttgttgtatttaccaaagatgatccctacgtttgtgtaagttaaaagtcggttttcacgaatataaaatcttatatgaaagaaatagaaataaactgtagatgaagtgaaaaaatatttgaaaatagtaaatatctgatagtatgtaaatccaaatttagactttttttgttggtgagaaagagagacaattacaaccgaacataacgtagaaattctgtcccatgaagaccctctaacaaaaaaaactcattgaccacaacatgatatgaataaaaaaaaatgcataacccatctgttaaacgattaattttttatacgacttaaaataatatgtattaattttattatttgttttaatcgtttgttatgata

SEQ ID NO: 40794 - DNA, 666 bp, Arabidopsis thaliana landsberg
tcaacgaatatcaaaatacacttgcaagtgcagtcttattcgttaatttcactactggtaatattactactagtactagataaaaccggtcctctgggtttgcgttggtctgattcagatgtgtctgtgcctagtgatttacatcagaaacctgagtttcccagaataataatccaaatcttcccagctttagatcattgtgcttttgttttttactcagcagcttccagttcagctgcaaactggtctaaccgttcggcttccaaatcaaaatccctaactgtagcatggttcactgatccatcatcgaggctcgcatgtatctgtctctttgcatacctgcattcatccagaaacagaaagaagtacatgtaagcatcagactcaagaccgactctaatggcaattaggcggaaatgatgactcaggagagtttgtaccatcgaccgttcattgcttctatacatttctgtgcatctctccgatccttgaatcttacaagaacaacaccctgtggatgatgctcacatacctgtaaagaagagattcgattggtactccaaaataatctcaagttttccacaaagctatatgcagcaagcaagaccaccagcttaagataaaaagaaatcatattattaccttcactgagtcgaacggtccatg

SEQ ID NO: 40795 - DNA, 338 bp, Arabidopsis thaliana landsberg
aatacttcttatgtatgcacttagtagattttgatggtaattatatatttgaaactcacaaatgttcgcactctccattccttatgaatcttcttgagttctataattgaaactcatatacgcttaccaagatattagaatcatcgcaacacatgtcctttcacactttttttttggtgtaatatacgcattgtcaatcatttaataagctatggtctaaacaggttagctagaaaaaataatgtctctgtactaaggaaaaaaagtaacaatactgccagatacttaaatatcataagtttagcggcgtttgcgtcgaatatatcatcattaaattc

SEQ ID NO: 40796 - DNA, 614 bp, Arabidopsis thaliana landsberg
accctaacgcaataattgattaatttgttctttctctgttttttattgttttgttttttggttattttgtaagggactttacgaccttaaatgccgtgtgaatgtgtgtgtactagcatgatttgatttttgatatatgttgttttgtggtcgctgcttataaagtgtaaacaagattggaatcaaaataaacatcaaccctaagcaaccctaagttgtcatgatactaaataaatctaatcaccggattttgaatatactctctttgaggttgtctcagcagtccggttgtcatgtctctacgggtatccccacgcacatatactgtgccaagcaaggatgctagtgtgtccttcttgaatccgcaaacggatgatctttctctattctcatgttgtagttatgattttcttaacttcgttcgtaatcaagtgaatactttcaataacagacttgtatacacactttttggttttttacggtttactattacagtattaatcgattttctaccataaaattaaactgtttatctagtaattaaaaaaaaaactgacacaatatgaaaataaaaatggtcacaaaaaatagaattttttagtaaaatgaaaaaa

SEQ ID NO: 40797 - DNA, 440 bp, Arabidopsis thaliana landsberg
taaagtcatgctggaaatgctcaacaacaaggtaactaaactcatctatatactgcgtaagtatgaaaggtagcattttttaaaacactgtttcttcatctccgaagcactataggcttctaataccttggtggggagacacaggcgatggcataacatagactttgcatgaaacttcctttatatggaaggaagtgggagaatacacaaaagccttgttttctatacccataactactctggagaaatgccatatactcttttatactaaaaaaagcttaataagctgtatgatcaaatccatcaaatgaatatgtacatagtatggtattatctatattaattatatatggagagacgacgattgtgaacaaaagagaggtgccagaggtttactaatcacggtctgacagggacaaaaactagctcacctgcataca

SEQ ID NO: 40798 - DNA, 770 bp, Arabidopsis thaliana landsberg
gtaaaaatgggaatcgacccagacaatcatggtctccaccatcacaccaactacatttgtagacgtcaccctccattcttcacataaggaacatgaaaccaagattattagtgatcaatcttcttcggtatccgaatcatgtggtgtaacaattttgcccattccaagtaccaattgctcggaggatagtactagtaccggacgaagtcatttgcctgacctaaacattggtctcatcccggccgtgacttctttgccttcaggactctagcgaatcctctaccaatggttcaacaggtcaagaaacgcttcttctattccgatgagaaatggtgtatgtctttgtacacatttgttatattacaaatgcacatattataatattcactagagagatggtataacgatgtttgaaatatgttaatcctgaattggaccggctggtcattgaacaactattctcttaaatgtccggttctgttttcagtgattagtattatagtagatcgttaataactaaccgacgataaccgctgcttatttgatcaatcaagctgtaagaaattatatcttatacagcaatgttaacggtgcacatatgccggaagttttaattaactctcttaaaaatggacaagcatgttcattttcctccaaactacctttactctttatcaaaagcaaatttaaactctcgttcgcacaaggaatctattaatacaaaaattccttactaaagaaattaaggaagccaataacttaacttataa

SEQ ID NO: 40799 - DNA, 451 bp, Arabidopsis thaliana landsberg
tggagaagatgctctggtatctgctgtgtctggtttttattttattttatagtcatgtcagtaatctgaagcctcgtagataaactaacaaagaaaaaattcaaaaattcaattgactaacatttttggctagccttttcccttttctacgagtttccttcccctcaatggtctcatcctctggaaacatcaaactatgatcatcattcaccgagtacacactgacagtgtattccacacatatgcacaataaaaacagggaagaaattaccgattttgagctcgcgagacagagtggtagcataatctctcacgatatctctcgcttctttctcaagaacggagatatcgatggagtcgtcttcgtcatccgaataatcatctgcgaagttatcttcagcatattggtcgaattcctcgaaatctagctcttcctcagcagaggaaccat

SEQ ID NO: 40800 - DNA, 728 bp, Arabidopsis thaliana landsberg
tgtctttattaaataacttaataatatagtatattttggtggtttacgaatattaatcacctagcaataacgtataagaatcatattttttccacaagagcagtcgtcattaagttctctcctaccaaaatcatcagttgaacagatacttaaaactatcgaatcattagtttaacctaatgaaaaatccgtttaaagaattaattgattaaattataaaccaataaacatcgaaaagtttatttgagtgcaaattgtaggatctgactttggacggttcgagttaaattggcatctgcaatgctctttctttaccaaggcatctttgatcttcactaagactctacctttttatgcttgtttatattttttcatagccttttgcaatttacaaccatccatggagttttatttattttacctttttggtcaagagaacattcacctttgcactttgaatggaccatgtgaccaaaaaaaaccctacattcggtcataatacataaaaataggtgattttttccttcttattatagtgatataagctaaagttattccatcgtttaacctaaatttgatttacaaatgtgagaaaaatatcctacttagctagttttggtgttgattacttacctgaattatttttacagttattttagccatattttgttacgtgaaagtatgtgtcttcgagtcaaaaggcaactattggttaactgacacaagaa

SEQ ID NO: 40801 - DNA, 554 bp, Arabidopsis thaliana landsberg
gtatttattggctcaaatgctagtattataacttttgttaatcttttggtcatcaaatctagtcgtttctagctggcttagctgcttcaggagcattaacctctggactgaggctggtcataaaagcagcattcaaaaactcaagggatggccttcgcaaaggagctagtacgtttttatacctatattcttttaaaatacaagttcattatttcaattttgacctttaaaatcatctagttataacatttttttgccaatatttaatttgcagctttattctttgccatgtctgcgtcgttcgagttggattgcgttctgttatatgcatatgtatttcccaggataccggtcgtgaagtactatcgcgcaaaggctatcattcaaggatcgagaactgtatgggccgaccttgcagctggaggcatccaagtgcaaccaataacccaggtacatcattgtcaaattatgggtggatgaaaaaccttaatcgaaagaaccaaatgtttaaaccaacacccaaatttatttataaggttatttagttaaactac

SEQ ID NO: 40802 - DNA, 534 bp, Arabidopsis thaliana landsberg
ggtgattaatttgtagaactggcgttcacggccggcttcggtcactttcatgcgcagcgccatcgaatccagcatgagccggattcccttacgcgaaatcgggtgtagatcgaatactaatactttaagggtattctcttgtttcattgtcacggggcggtctgttttcacagtgcaaagattcaccaaccccggatgttttgcggtggctctccgccgacccgtttgtagctttgcagccacatggctccattatcctgtctgcgtaccctcactccggaaacggtacaaaaagggagccttgttggcagccccggtgaacttctttttccagccgttcgagcacattcaggtcgaggatctttttctgaaagttattgcgggcaaaggcgcggtcgaaaatcgactcataaagctcctgtacttcacgcatagtgaaagttttgggcaggagattaaaagcaatgagcttttggtcgaggttcagctgcaaggtttccaaggcgcatttgaccattttatgatggcccatga

SEQ ID NO: 40803 - DNA, 573 bp, Arabidopsis thaliana landsberg
tcccctacagattttccggtgttagtcacatcgacgcagaaggaacagagaagaagacgagagtcagcatcattatcaactttagttcttcgacgtctacgcacatgaaccgacggcgacttttggtatcggcgacactgctctcgtatttgctctacggcatggctctcgtctccgttgaagcctccggtggtacgaaattccttaaattaaacgtagattcacttgtttcttaaacactctgttatgcttaggttaaacttagattccttaaccaaatgttatcttctgagtgttaatggtggaaaatctcgtggttataggtgaaaagcttagagataatctggatttgactaaaacgacgacgtcgtcaccgagcatatcacatcggaaaatgctgcttctctctcctggtactggtaaggggattttgatttttttagactccagttttacattttaccaaatcggtgattgattctctaatgtgttgattttgttaaatttgtcttggttcctccattttcgttaagaacctcgtgaaatggtgaattgttgttttgtctgtctgtt

SEQ ID NO: 40804 - DNA, 587 bp, Arabidopsis thaliana landsberg
aacgtaggcctaaaagaatttatttttgctagttaattccttgcttgaagttcttaaaaaaaggtatagataacttttgaaaagcaaaataatcatcgtttttgtatatcttgatttaaaaaataaaatgtttgcacataatcaatatgggtgaaagtgaaacatttgatattaaaaaaaaatatcaacttaatttataggggtatacagcgacacaggattctatacataatttcgaaaatctatttactggaaaattatgaatattttatttgaacaatggagctagggagtattaatttgaaaatgtagtacttaatttacatgaaagaagataaacattgctacgttcacgcacgggctcaaaagtcaaaaagctgaggagctctataagtttatttatattagtgtccccaaaatgcgatgctttgggatttgataattatgagtcatatgactattcgtggatgatgattccgatcatctttatttttatcagcaattatatgaactaaaaagactacatattatgcaatctttaagttttgggctgaaaatggattatcttctggttgattatcagttgg

SEQ ID NO: 40805 - DNA, 496 bp, Arabidopsis thaliana landsberg
ggacctttaagaaataaatgatgggtctcttgtcagttgaaaatatgtagtcttttggtgacaattatggcttgtcaacaaaaggcaaaaggagaggtcttcctttggataagaaccttagctcatatctctccaccaccacactttccctcaccctacattttagttacgcgtaccacattttaaccgaacgaagccaaataatcgaatcgaatcaaaatgatcttttcttgaagttacattatagtttgctgacaaatgacataatttaaacagattaagatgaaatatctcaaaattaattaaaaatgggaaagacaaaagagagagatgtctcattagtttctcaacaacaacaactagagagagccaaaagtgcagcttattagaaccaactcagctgtttaactaacaccgatgctcccaaaacatacatccactgttccacctaaccacccaaataacatcttttgaacccaaaattaaaaaaagaaaa

SEQ ID NO: 40806 - DNA, 619 bp, Arabidopsis thaliana landsberg
gtcagttccttgattcgaacttggtttctcaaaattcttcttttttggtttgatacggtttggttgatttgtaaaccggctcatttttggtcaacttcggatttgggttctaatgtcctttttttttttttttgttatatctaatgtccataatatattagtttggtaccacttcaaatatgatatttaagactataacgttgatttggatttggtttaatgtttctctatacggttctgttccaattcgatacttttgattcgagtattttgcccagagctaacagtgatcattaactcctaactattatggtaacgaatgtatatagtcaaaacaaaagttttatattactattttttattttttattgctaacttatttttgttttattcttttcgaaaaacttaatatcgatatttcataccaccaaatttgtattgtaatcattttcgtatcactagtcaactatcgcatacacggatcgagtttacatatatgtgagtggtagaattaaaccaaaaatactttttaggttaataatgttaaaattcaagtggtgactataaaacgattgacgtccaaaaaaagagataggaaaatggaagatggaagctgatg

SEQ ID NO: 40807 - DNA, 598 bp, Arabidopsis thaliana landsberg
cataattactatgaaattatcctactaatatttgtatagaataacgataaataagcaaaataatcacctatttttagtgtggtaggtgaaccactcaaatctcttcaaaataatcaggacgtaatacttttctcttacgccttcaatgccgtaccacactttttaaatctccattcacacttttttcttattataatctctattcacacttaaaaatcgttattttctatgatgttaattttaaatatatttctgtaaaatattccagtttatgtactagtgattatatatgtaaatttgtcacagaaaaaaaaaatccaataaatgacagaaatataatgaaataaaaacatatttgaatattgtactagtattagtgtattactatgtcttttattagcgtaatatctatgatactaaaactacaactacaactataactccgaagattatggtatggtactactaagtactaagtaaaataattctaaaataatatatagaaatgaatgattaaaatgatattgtagtatatttagtgtcacacgagttttgatttgactcttgtgtagagacaagtgggaacgaatgtgatatt

SEQ ID NO: 40808 - DNA, 616 bp, Arabidopsis thaliana landsberg
acatgtagacgcaacccaccctcaccccacccttacttctatctgtccatctcccatctagctcttccaactaggcaataaaggaaagaggccgggtcagatgacactgctggtgctaaacaagctatacaacaaacagctaaaaatgacaacacatgaagtaaacactttgaagtgcctcatgcaaataatcacaataactcagtgcaagagacatgtctgctcccagaacaacacagccttcctagtcagttgccacatgcagggctaccttcccctcacaccaacttcatctgggtcactgcagtgtgtctgcttattttctggtgagactgagagaaagagaatgtactctagtttccaaacagtactagaatagctcgctcccatctgtgacaaccatcagccctagttaccaagtcactcactatcttctatgcttttgttcttaatctgaacaaacatagtttatgataaattaatctcttgagacacctagaaatcactgagtaaaaacatcagagagaggcagacactgggtgatctgcttgttagaaaccaaccaaagacctggtatcagatacataagatggatgacgggttacagtattttaaa

SEQ ID NO: 40809 - DNA, 461 bp, Arabidopsis thaliana landsberg
tgttctgttatataacatggatttactaatagttagtgtagatcttttagaaataatagatattgaaatagtgcggaagcttaataaataataaagcaataaggagacagacaaaagattgaggtattggttggttcaatttcaatccaaccactagttcaatggctttttaattagttgtaatcatactaaatggttttcttaaagttaatacatgctatatttaattgaccaataagacattttaattattattttttgtcaatttttgttaagaaaattaaaattaatctttttagatataaacatataaattattgttttaatttagggaataaaaactagtacaaacatcaaaactgcttctgcccaattcttctcggaaattcttagtagcctaaatgagaacatccatttgaaagatgaaatttcttagtccaagattttcaaaattagtagga

SEQ ID NO: 40810 - DNA, 504 bp, Arabidopsis thaliana landsberg
accagataaaactataaaaccgtatgaaatactgaaaatcccaataggtatgtacataatgatgtatgatatatctgatcaagtataaggattcgagtatgcgaccatatagtcatataccaatcatcaaactatatatagattttcaaatattatttattttacagactcataattatgttgtctatggctgatcacatgcattgcaagatctcaaaaatatcatgtataaattcacgtaacacatttattacgcatgcatatatgctttgccgcatttatgtagaaggacatcatgttgagttcatgtgtctctttgattgttacgtattttgtctaaatactgaccaaatattagttgtttcgttacgtaattatgttagttgaggttggagactgattttcagaagcaatttacaccttaattagtaaatatcattaaccgcagtaacatactgatatttactggcactggtccttcaatcttctaattatagttaaact

SEQ ID NO: 40811 - DNA, 550 bp, Arabidopsis thaliana landsberg
ttatgtctcttgtggacttattcattccatgagggaagaaatctccaatctttaaaattggatcattgattttatcacaaattcacaatctcatctggatgatttagtgtaaatgtgatagaatctccaccatactaaactataccactacattaataactgtggcaataaaaaacactatgtttttcttaagaaaaattattgttttttgtttaactctgccatgcatcattaatggtcttctaagagtttatatatggctttcaatcataaagaatctagtttacaagaatcaactaatcaatatacacactaaactatgatggatagcaatatgaatttacgtatatattttatacaaaatgatatccatcttattttcaaaacaactatgattaatagcaatacatattcttaaaaatcagcaactggataaagctgatttgtggattaggtatgatcaaaacgatatggacgaaatgttctcacaatggagtaagaaatcaaaatgaattatttggacacagtgaatgaggcttattcattcgtt

SEQ ID NO: 40812 - DNA, 304 bp, Arabidopsis thaliana landsberg
gacatagctaaaaacaaccgacacttttacattttgttttccactcgagttattgtttgttagtattaaacaacaacctataaatagtcttttgaagtttggaattgttggcccatattatgttgtaggtaatatggaatcagccggtacactggaccacagaggattgtctttccgtctacagtctacagaatcagtcggtctagttttggaacttttgtttaaaagagctattattatttgtaatcttagtttttaagttacaactttatgcatggacattatgtggacaaaatcgaaaagt

SEQ ID NO: 40813 - DNA, 909 bp, Arabidopsis thaliana landsberg
aaatattgacttttatttatatttgataaaaaaaggatgacataattttctgtaatcaccataagtccatagcgtttgcatttaaattatcaaagactaagataagcctagaataatttacaatgtaaactatagtatacgtcaggacctacagatacaaccttcctcgtataatccctaaacagaattttaattaaacatttccttatctaatttgcttcttaatttaacttttaaattccttccaccatcgaatcacaatctctctctctctcgcttgctgttactcgctttttcccagaaccggcttcgatttttctaaagcagccgaaatttacgattcccagaattttccctactgacaaaatttcacttcaaatacaaatctcgtcttcatgagtcttcttcttcgtccaaattgaattttctccgcacacgagagttgaattttgattttcggctgtttatatggtctccggtcccttagggttttaattcttctgcagatctctcacgatgagcgttgcgaaatcccaagtatggcagccatgcaagaagaagaggtcctcctcctgattcaatagagatctatctatatatatataagagaccgagatatatatatagagagagagatggcttctcgaacaacgccttcacgatcgactccttcacgatcaacgccttctggtagttcttctggtggtaggacacgagttggtaagtatgagcttggacgaactttgggtgaaggaactttcgctaaggtcaaattcgctagaaatgttgagaatggtgataatgtcgctattaaggttattgataaagagaaagttctgaaaaataagatgatcgctcaggtatgtattatacaattctccagctgctgtgttcttattgggaatctga

SEQ ID NO: 40814 - DNA, 435 bp, Arabidopsis thaliana landsberg
ttgacattatgttgtgtgtttgcatgaaaaaatgtcgacatagtttcgccgttgcccactttacatataagtcccaaaaccaaccctaatgcgttactggtctctgtatttcttcttcattttctctctctctctcgctctctcctaacatgttgaagaaaatagaaactctgttatctaatgttgcctatatgatgatttatggccatggaaggtctgagaggagagacccttcttctctattttttttatttcctcttcattttcatgctaagagttttcactgagtctgttgtttcgtagagtagaacagtccatgatcgatgttaatcctttgcatcttctagattgtgtatacaatagcaatctctggtctagagagagcctagagaagtatggatctttctatatgtataccacaaacaaatggcctaa

SEQ ID NO: 40815 - DNA, 323 bp, Arabidopsis thaliana landsberg
gtctcggcgagggagctaagaaaagaagggcacacagtgctggtgttggagcaaaacgaagacgtaggaggtcaagggttctatcaaccaaacgtagaacaagaagacccctcaggaagaagtagcggcaccattaatggtgatctgaaggtccatgggatcgttgactcttccttgaggctaacctcaccgatagagagaaggggacattcgcattgttcgcaggtggcgaaaaaagggagagatttgaggaggagaccagggcataaggagctttggttgtgtcttaaggactatagtgaagctttcgcgttaagagagat

SEQ ID NO: 40816 - DNA, 552 bp, Arabidopsis thaliana landsberg
gaacaaatatagccttttcttcttctttttttctcatgttgttagttccaaggtggagatgatggccggttatgaaatcttgggaagatgagccgccgtagttaaggtcgaggttctggagctgctccatgagctgcgaacgtctttccttgaagaaatcaagacgtgttgttaactctaccagagctgctgatgcagcagctgacggatgattaagccttgggtactctgttatctgcaaaacctcaagcatgttagtgtgcaatgtcattgcttaagatgtttccttagaatttttaagagcagtcagctttaatttgctaggcagaaagcgatcgtgcatgtctctgtagttactattgaaaccaggtaaggccaatcacagaattgcacacaatactacgcaacccaaaagtgaagggaatgatacataacaaggagcaaaaggtcttacatctaatactcttgaagtcgacggaatagatggagaatctttggatgagagcttgttcacggatatctttccagactctttactgattttagagtcag

SEQ ID NO: 40817 - DNA, 839 bp, Arabidopsis thaliana landsberg
  unsure (1)..(839): unsure at all n locations
caaccttgaatcgagttaaaaaaaaatccaagactagtctcagcatttgtctaaaacatttctgtttctgaaaccaataaagaactacaaaatctaccgtacaactttacctacgcatatacttgagtcagtgagtgtatcactgaaaacaataccgtggaaccttatgtttctatcataagcacaatcaaaaatttcccatcaaaaactcaaggatgaatgacttggaacctctatataactgcagtccaaaatattaccaagtcctactcactattcttatttcttagattccgattgtggctcattgcagcttatcatgaccatcacttaattgttgatattcaaatgatcatagattcatcaatcaaagaagaaacagaagcattacatgctacactcccacattgacacgaaaacgtccatttgcttacaacaaacacggagatctaagccatactctccattgaatgaaataaagcaccacaaaaacataggatagagactctccaagtttcttttcgctgtatttcaaaatcgaaacaaagccaaaaacactacaaaattcacagggttcccatatttcttcttgcttgcttcaaaatgtgatgaattttgggtagttctctagccaaaacactacaaattctcctcaaaatcaacatagactgccagaaacagtcctatgcattacatatagtagcacattctcctcaaaatgaaactactatgcattatgaaattcacaaagctgagagagtggccatttantgcattcacattatacatctctaaaactatattatgagttcattatacatattttntattaacatata

SEQ ID NO: 40818 - DNA, 576 bp, Arabidopsis thaliana landsberg
atgcagattctatgacttgagagatagatgtataaacccagttccttcaatgacagattaaaagaatcgattttgataccaattccaaggatacagaagattatatataagtgagaagaatcacaaaaccttgtgtaaatcgcttcttctgcaagttgagagagaaaagaaaaaagttttgttttttctggagaagaagaagaagaagaaggagaaggagaataacactcacacacactattccgcgtgttggacgtatagcgatagttcaaggaccacgtagttaatgctgccccatccacccataaagccaaaaatcaacggtcaggatcttttaagcattaaaaagaggaaagaatatttgtttctctattgttcgtttctgttagttcagagtatctacaatagaagaaaagattggtcttttcagtttctcctcccaaagtcaaaatattgccataactttttcttttaatagaccaagtttggaactttaagcttctttaaaaaaaatgtatatatttaggtcttgataacggagtcttaaaacttttgggactttctttaaaatgttct

SEQ ID NO: 40819 - DNA, 618 bp, Arabidopsis thaliana landsberg
atataagtcccacataagatgtaattatgacaataaccaatttattattatatatgtgtggtaaaaaatgggcaggggaatatataaacactcaaaaacctagaacttaagaaacaagaacactatcagatctagctagctacaaatgtgtgtgtgggtgaaaataatggtcagtcaaatataataacacacaaaaacaccaggaacttaagaaacaatatataacaatgtcaacaagtaaaagcttaggctgcacaaaaataaaataaaaatgaaatcatatgctaaagaagacataaataatgcatacacaaaatacatgtacatatatattcaggatcaagttcatatagattcatacacaaaacatgataaattcaaacactgacacatgtgatgcaaataaggacgtcagtaatttatagtcagaccaatcaaagattttgctaagagacttaaaaagctacttatgcagaacataattaaccagaaattaaagatcattaccaacattattaacattatcatcaaagaggaaaatgggttcataaattaaacaatgaaaaccttgtctttaaatttctcagggataattaagctaaattaaaccctgtgatc

SEQ ID NO: 40820 - DNA, 786 bp, Arabidopsis thaliana landsberg
gcttctgtcctgaacacggataaaacaacacctgttaacgcaatagctccaacagcaccaaccagaccgattccacccgacacagagccatcctttttgcaggttgacgggttgtctcaaatctgacgatcgaacaaacagtcaactaccaataaaagagcaaacaaaacaaaaaaaaaaaacgtaccatagcgaagaatatcttcaggaagtgggtcgaaggttttggcaacagtgaatatgacagcaagtaccaccgcggttgttaggctgccaaatatttagacaatgttattcaacataagccaaacctcaagagagataactaattttacaatgtgaaatcagctaaagcaacgagattatataatgagtttacattaacagagtaaaaaagagcaaagaatacacaaaagagtagtatttttttggttacccttgatccaggaacaaaatctccgccttatcgtccaaggtcagtttctcaacgtcgattcctaaaaacggtatgactgccatctcggttaatcctgtcaaaacaaaactgcctgggaacaaaattaatctcacttcatgcattacacagagaatagtcactgaacattaaactatttaaccataatagagagattatctttcagatcagtctactcaaccatcacatttatcttagcacacagtctatgtactttcatcaaactccaaccctaagtcattaaaagggaaagcttttgatgagagtaccttagtgcacaagcaaacgaagttaacgaaactgtctgccat

SEQ ID NO: 40821 - DNA, 859 bp, Arabidopsis thaliana landsberg
  unsure (1)..(859): unsure at all n locations
gcatgaaaacactaaaataagactctataataacgtaaatattcatatgaaaaatataaataaggaatttataatactgattccttgtattagcaaactatatatataaaactaaaataaaaaccaagaataagataattaaattctcaaaataaaatgatagacgtacaactagttcttcttctacttccaagttccaagacaccaacgttaaaaggcgtttttgtcctaagaaagaaccaacatttcttgtagctaaaaaaggtttgagtagtcannnnnnnnnnnnnnnnnnnnnnnnnnnnnnnnnnnnnnnnnnnnnnncatcgactgatcaatgtcctggtccacattaaaataacaagagctcaccggaaattccacgtggtggtttgccgtggtgaccggaaattgtagttgggaaagtactcggaagcaacatccttaatctgaggataatcctatatttacaatcacaaaaccaaaaacacatatcagaccactattgtctatacaaaaactattttggtttagataatagatgtaggtacctttgacgaatcaaggatgaaatcaggagaaatccaaatgcttgaagagtcgtttgtagtagaagaaggcttgaacgattgaatctgcgacgcttcatcgcgacaaggagaggtcgcgaggctagagtaacaagaaccaatgtcttgttcgtttttatttttcaaacttttcgaatttttcttcagttcattcttcttaactacgcgacataacgcaaaagctccctaaaattcaaacatatatatggtttttaggcttctttccattagttcataacaatgaatattatcaagttggatccaatgaa

SEQ ID NO: 40822 - DNA, 545 bp, Arabidopsis thaliana landsberg
tggccgtgttggtcgagccggtacagggtgaaggcgggatcaacatccccaaggatgccaagggctatctttcaggcctgcgcaaactctgtgacgcccatggctggctgttgatgctggacgaagtgcagagcggcatcggccgtaccggcacctggttcgccttccagcataccgacatcaagcccgatgtcatgacattggccaagggcctgggttcgggcgtgccgatcggcgcctgtgtcgctgccggtgccgcggcaacggtcttcacctacggcaagcatgggtcgaccttcggcggcaatccgctggcgaccgccgcaggctacgtcaccttgcagaccattgccgaagacgggctctgccagcatgccgaagagatcggagactggatctgcgaggcgttccgcgcccaactcgcagaggtgcctggtgtggtgaccatccgcaacgctggcctcatgatcggcatcgagctcgatcggccctgcggcgaactcgtcaagcaggcgctggaagccaggttgctgatcaatgtcacg

SEQ ID NO: 40823 - DNA, 433 bp, Arabidopsis thaliana landsberg
  unsure (1)..(433): unsure at all n locations
aaacacaggaagnacaccagaancggggggcaaagaccgcggggagccggcggcaccacgcagaagagagcccccggcaaagaacgccgccgccaaaaaaagaacccaaaacccccgcgggcaaaccaacaccaagcaacgggcaacccagaaacnaagcgaggacccacaaacgaaaacacaaacccaaacaacaacccagcgaaaagggcagccacaaagcaaaaaaccccggaaanggccacgacaaagaagacaaccggcagncaaaaccaaacccgnaaacagaaagcgaccaaaaggggaaaaccacnnccaaaacccccacaaaannccaaacaccaaacgacaggacccggcccgcnaacaaccgaaaacccnagaaacgcnaaaacaaaaaagagaaccggaaaaacaaacaaaaccgaacaaa

SEQ ID NO: 40824 - DNA, 570 bp, Arabidopsis thaliana landsberg
actattgaaggatgaataagaagaagacgagaataataataataagaagaagaaacgattgaaattagaataatctcaggattcgtcgctatcccaagagcaaaaaaacaaatgaaaacacgagaaacgtgaagagacagctcctcgtctcctttatccaaattccaaacctttttcattttcccaggaaaattgagtaataattataaaactcatcgtcctcattgagctgcagatcccataacctctctcgccaatcatctcccttgcatcttaagcaaaggtatctctttcttctctctccgtccaatcgattggtacaacaatcgtaaggaacctgatcacagatttctcgattttagatgttggggttttgattgggttgagtcgcatctgaatttcagcgtcattggttggcaactgcgagactttctggtgccactgagattttaacaaaattggggttttcgattcaaaaagtcttttctttgtggggtacttttcgttgaacccttttaggtagagtttctgttttcgaagaaaagtcatggttttaaggggtttaggtta

SEQ ID NO: 40825 - DNA, 619 bp, Arabidopsis thaliana landsberg
caagcttacttgaatcctataatattctcctatatatttagcaccagaagacactcaaacataacatgacacttacattgaaatcacataaacaagagctgaaatctaccattaaatctaattccttcacatcaagatcatcacaatcaccacaacaatcgaatagtttacaatgttacgaaaactcacccggaaggctggagaaggaaacctaggcgcttcggagatagatttgagcagcgtctcctcttcgtttccgatcaattgagaacgaccttggatcacaagctgcggagtaaacatcgtatccagattcaacgcctctatatacgccttctgcctcaccgtccattggctcgatccatacggatctttccaccccttgtaatcccaataatccacatgaaacaccaaaaccatcgtcggagatccagatccaccatcttcgccacggatctgagcgtcgaaatcacctcgacctagccgggacatcaacatctccgccgcgggcgatgttttacatccctgagacgagaatagctggacgagaacgggaccatctccggcgggaatttctgcggctacggcggcggaattgttaccaccggagataggttta

SEQ ID NO: 40826 - DNA, 544 bp, Arabidopsis thaliana landsberg
tcctctatttagcggattagttggtctgaagaaaccgaatgatcatggagttccttattcccttaccgaagagttcgttagtgtttacaggatgcattgtcttctaccagagacacttatactccgagatatgaactctgagaatgtagacaaagaaaaccctgcaatagaacgagagtaagatataggatgttgtgtacagtttttttaggtcaatccaagcgcagtttttcttgacatatacagttttgttttataggataccgatgacggaactgatcgggaaaaaagcaggagaaaaggcttcgaaacttgggtttgagcagttacttgtttcaatgggacaccaatcttgtggcgcattgacattgtggaactaccctaattggatgaggaaccttgtcgctcaagatatcgacggagaagatagacctcaccttatagacatggctgccttggagagtaagtcaccatcaatgtttcctcttctatacatcaaaaattctctaaccgattgattgattttttcctcagtttatagagg

SEQ ID NO: 40827 - DNA, 1344 bp, Arabidopsis thaliana landsberg
agaagacgccattgttgatgccactttagactgccacacaaatacaaacgaatcagataaatgttaacaaaaacaacaatccaaaaccctgaaaaccctaaggaatgatcataattgagatgcaaaaaaatcctctctttttgacaaatagcttcgatcaaacgagattgaagacgaaaggtgactcgcgtacctcattataacctatcgaaacagcggaattccgaacagaatccttgaaatcctccgtcctgtctctgaatctcgacatcttgtacccaaaattcagatcgatcaatgcttattcttccttatcaatcaatcagtcaatagcttcaaaaaaacagtctctttagattcaaagaagggtttttttctccggcgattcggagaagaaacccaaaggaaatcgaagaagaagagggtcacagagaagatcggagaggagaagagaagcgagaagagagagagagagagagaaaaaggcctttcatttttttctgtttcgtaaaaaataaaataaagtgagaaatccattcgacgacaccgttttggggatcgtaaagttctgattctctcctttaggtttatctctcgttaacgtcgctcttggtcacgaggcgactctcactgtggagttcgatattcaggcaatctcaaaagcttccacgacaaaggtgtcaaatttggtcatcatgacgggtgagttcgatcaatttacttcaaaagtttcttaatttcttcgtttaacatcgaatctttgattccttaagcttatcattagatgggagagtaattagattccgattgatcttgatttctgacagattgatttgagaattattgggtgttatgttgtgtctcttgtagagtataagcaggagcaggaaatggagattgaagctcttgaagctatacttatggatgagtttaaaggtgagttttttttagtttccttgtatgttcatcattgagccgatgatgagagcattgaatccttaacgactgttttgtgaacagaaattcattctagtgaaagtgggcttaatacttcgaatcgatgctttcagattacagtgactcctcaggtagacaacaccattcatctatttccttcactttgtttgtcatttgtgaaaagcttatgtgttataagtgtagaaatgtcaactgaaatatcttctgcttcttctttggtctttataggatgatgaactggaggaattagcaatcccaccaggttattggtctttaaagaagataccttgttgtatcatatgcctctcctgtactttctcagtcttatagctctcaatttgtcctgcagttcagctggctttggca

SEQ ID NO: 40828 - DNA, 312 bp, Arabidopsis thaliana landsberg
gtttgcttcacgtaagtattttttgagttctgaagaaatatagagagacctttgatatatatgactttctcagagtttccaaatgcgataaccgggaatggagtatcgacgatgttcattgaaatgttttaacggtatagtctggtttgttacagagacgggattcatttgtcagcacaaggaagcaaaatagtagcgggagagatactaagagtggttaaagaagcggaatggcatccatcacttcactggaaatcaatgccaacagaattcgcagatgactctccttatgatcttgtttcagcagatggc

SEQ ID NO: 40829 - DNA, 970 bp, Arabidopsis thaliana landsberg
ggggaaaagcccctgaccctgaagatgacaactttaagctatgggttctgcatcagaccaatgatttcttctccgaggattctaagggacatttctgtttgtaagttcagatatatatatatatatagtgtagttttcatttagtataccaccaatatctgtatagatcttcttttaaacttcatcaatatcaaaagtgtgttcatcaatgttaccaaagatttttgcagaacagagtgattattgttaatgaatcttgtatatctgcctcttatgctcatcattaatatctgtgggtctttcttgtctctcttcatagttccgtatgatagtttctatatgtctctgacaatgtcactctttgtccataatatccaaactagtttgtaagatcagaaatttgagcccaagtttgaatctcagagtatcacactcaacgaatattaattgctaatgtctgatatctgtttccatgtgttgaatatctctactagtaaagcccaagtttattttggcaagtgttgtttacctttgacacatctagggtaaccattttcaatggttttatgaatagttgaattttactgagacactgatgtagttgtggttttgaaattgctatatggatttaatcatctctatgaagccgcggaacccttgtgctagttatgcttactaagtcttgattatgcaaatggttatctccaatcatcgtttgtttattgaatctgattctaagtgattatgaagaaggagcttggatagttaatggttgatgtttcagagttgtagcatgcctctgtcgccttttttgagacacgatttccctctaaactcagctgaaagttcagccattaaatctactggattgaaagcactaaagaggaccttaatattcttgcagtatggtatgtttcaagacatggtcgattgtcaaagatatatatatatatagactcttaacatgtga

SEQ ID NO: 40830 - DNA, 1931 bp, Arabidopsis thaliana landsberg
aatttccttgtaattctgtttactcttaactaactttattaggtccaaattatcaggcatcgtaaattacggaatattcagtaggtatgtgttatgtgtatgtgtacgtggaaaccatattttgttgttttatggtgaaatatattttatggttgcaactttctaaattatgtataaacagttattggaaattcagttaaaagaaaattttattttgtaaaattcaacttcatacgtgtatagttgtactacatataatatatatatatatatatataagtgcaatcatgtactatatatttatatattaagatcaaattgtgaacgcaaagaaagacagatgaataaaagaggtagggtccaaatcattttacaggattgagacaagttcctaaattagcttatctcaaagaaacagataatgatgtcaatatgtcattcatggagcaattatttgtttcactattttaacttttaataattgactatactcgtttcggaactgtacattagtacaatttttttgtctttatagatataaaccttatgttttgtttctttaaccaaatttataagaagcaaaacaaattccagtagttgattttatgttcactaactggaattcttaaatctgaacaaagtgaaatcattttacacaaggcaagttgtctttttgggccgaatcgctaagatagtgggcttcataggtcgagttatagacacctgcatttagtttaattgattggccttttaactgggccgagaccacgaacctgcttagtttctcgtgacagtgtgcacactataaaacaataaattagttggggaattgggttgaacaaagtgatcgacaagtaaaacaataattccaattgtttaaaatacagtattttggcctgtacatattcaacacgtgactaaatgagttgttcatatcttctcaaccaaagagtgtctatgtccctgtcacatacatttaaaatatctcccatacattaaaaaaaaataaagcaaatcgaataatttatttatcagaaagattttcttctttaaaataattctttatccagttcatatccatcatgtcaagatccaatctgattataaaaatgttcttcgaattaatcagagttagttatgaatatgagtcatatctcatatgacactttgtatcatttaattatctcactaattaacgtgtaactacaagtaatctttatttttggtcaacacctacaattaacctaactaattaatgagcatttttactaaatcagtaattaaaccacctgagaatgagatcaccacataaactgtccaattaacatttaagatattgaaaaatgacaaccggagatacaatttaattctctttctttttactaataactttcataagatgtgtaaccaaaaaaactataattagatattgcttaaagaagcctcaaggaactataaataattgacgtcgtcgccggagatcatcaaacaaattccgagactcgctttttccggcgccgttattacatcgtctgtacgaagccaacatcatcttcgtcgaagcctctagttcttttctatcatcaatcaacatctgactttctctgcactctctactacaaaatcccaaatctcctctgttttcaacaaaaaaaaaaaaaattgagaatcaagaacagaacatatttcgtttacaaagactatataatatagtaataaaaaataataatatcgtacctgtacatgtaaacatctttgtcttgatggagttgtttattgcagagatgacatgttttgaggaaacaaagctccgagatgtttggattggatcggtttagtctcagtgaagatttgatcactatgttgttaagtttttcctttgaatctcttgtcacaagttgcaatccaacggagattttagtcattctctc

SEQ ID NO: 40831 - DNA, 551 bp, Arabidopsis thaliana landsberg
ggtagaatatgaataacgtagtataaaatagaaattgtgatattacatataaaaatttcatacgagtacaattcaagcacatattattattgtataacaattgtctcaatagaaagacaataaaatcatacttcattgaattgttatagaatataaatagataagaggattatcaaggcgtggtgagccaacaactttcggcccacatttcttaaaatcattctctttttttggtggtttccatttggacccttgtcacatgcatcactactgatactattattattcttgtactaatccgtaataatcaattccgctttaaccttattgagtttgacatttcatggccgtagtctgttccgcaattaggcccgtttctttattaaggcccaatatagttcatacatcgaaatggaaataggctggatagctacgtttgagaagttaacatgtcgttctttcaactacagttcaagaatgctaggattagaaacttatccatgtggttctaaccaaccccgtgtaatatgctatataatatctatacaatg

SEQ ID NO: 40832 - DNA, 352 bp, Arabidopsis thaliana landsberg
  unsure (1)..(352): unsure at all n locations
accnnnnnnnnnnnnnnnnnnnnnnnnnnnnnnnnnnnnnnnnnnnnnnnnnnnnnnnnnnnnnnnnnnnnnnnnnnnnnnnnnnnnnnnnnnnnnnnnnnnnnnnnnnnnnnnnnnnnnnnnnnnnnnnnnnnnnnnnnnnagtaatttaaaagaatttaaaataacgctcagattcatgttattgttgccctcggtatccaatgataaaatcccgggtttcaaatatcggcatcttttcccctaagtcgaaaagcaccgaattttcaactcctagtccgcttttcgaaaatttcccccaattattattgtttttccctctaccaaaattttctttcgaattttcagcttc

SEQ ID NO: 40833 - DNA, 305 bp, Arabidopsis thaliana landsberg
tgggggctacacctttactttatacatgtcctactctagaaccacgaacgcgaccctgtatttatgaggacagggcgatgctcatccagtttgctataccaacatatctgtcgaaactggtgattgagatcacagcgggctcaccgtaagctgcccaaacccagtccttgcttactagggaagagtgctcgaggttctgctattcacactatcggattacaggctgccaacagcacgaccacgatgctagcccaccgtacgctccacgtgaaggaaaaagcaggcgagctcttgtgaccttaacc

SEQ ID NO: 40834 - DNA, 255 bp, Arabidopsis thaliana landsberg
aggcctattaaggttggccttttctgttagacgacactatcttccagatcaaatctacacaagatttaacccaacacaaacgactctcacattaagcatctttgatttgtttccaacacaaatgtacatttctttgactatgtttccttacacttgaagaaactgctcagatgccgaaccaagctagctatgaaaaactcaaacactagaaggcacagtacaacgcaacacataaggaagaagaaaattcttccc

SEQ ID NO: 40835 - DNA, 703 bp, Arabidopsis thaliana landsberg
catccgctttctctactccatcacaaattattaaaaaccaatatctcaggagatgttaagatgggtcggtttaccttttttcaccacaatactatagcttactactactatttggcttcctaacatatatatcaatttgctacttacaggagctccatagctcctttacttgtcccacctcatctctttcttcctcctcttctgtccacgtacttccccgagaagctcttgaagttcttcacaaagaggttctggagtaagctgaatgatctcatcatcatcaccatcactatcctcctctggctccgtctccttctcctttggatcctctggctcggtctccttctcctctggatccgtttcctcctcaggatccgtctcctcctcatcaattagccatccacaatgaagattctccacacctaatcaattattttgaccgcagtaaaagaatgtttcatttcttatgttgagattggtatggatatgagtaaaaaagcttttattaccttgaacagaactttgtgcataatctgatgatgcttctccaaaatgaatagctgctggtgatgggtcattgactgcttcgctattgattgataactcatcagcttggtctctttccatactaaatatgcatgtcctgctcctgctcctgtattacaaaagatggatcatgctgcatgttacataccatttgggt

SEQ ID NO: 40836 - DNA, 809 bp, Arabidopsis thaliana landsberg
attttgttttgatctttatgaactgtctataggtattgagggttccaataaagacatttaagcagaggtttaaagagggcctagtaatagtatggtacctagttgtaggatttggatcttttttggggtctggtttcatatttgtaggacctctctcctcctctctcattctttcctcatcttaattaaccctgtatattatttatttttaacttaaaaagccagtaatttttcaatgttcccaatcacaaactattgacaaaattatttacagctccagtgaaacaacaacctatcttttactttaatcattgcttatagctttaaaccacatcacatgtactttcttgtatttttaaacacacatcacatgtcctgactcatgacctgagttatgctcgtttccacaaaattttagaaactggtcattgttagaaatttcaaatttgtatgccattgaatcatacatatgatacaagagatctgttttggtagttcatagacatatataatcaaatgaataaaatcacatgcttcagttgacatttctgtttactttactatataggacacttactattcaaggacgggccttcttctcaagcaaagaaggatttatgggctttctgaaaagcccaaaatgttctaagacatatataggaagtggaaagaacaaagtaaatggcacacaaaggaaatatttgtataaagaattcgaatcagtagcgacgagtaatttcaaatgggttataagcacccacttatggtttagtgtcaccgagtcaacgtctttcagtcgatatgctcac

SEQ ID NO: 40837 - DNA, 532 bp, Arabidopsis thaliana landsberg
cgcacaaattcttgagttgtcgccagtccaacctttttgaataaatgatttatatttttttattttaaaagttgattgaaaagtaaccggtcaaaagcttatggatcatggtaccgatttaactgagtttattacctttttgtaaaacaatttaatcgtcataacaaaaattcttgctttatttaataagaagatgaaagtacacttatacacaaggaatatctacttaattagtagtaatttaacaagatatatatacagtatctagtattaaaaataaacttaaactataattccgacattcttcattaagctggtacatttaaatccgccacgacaaatttatatagtaaacaatcaaattgtggacgatcaagtgcattggttagaatgtcagcaatgttattggttgcgtatgtctgtatatgctaaatgaagaatgtggatgaccaagtgtctttgtaagaatgtcaacgtacaatatctttccaaatataaatatgttaggtccttttgtgaaagattgaataga

SEQ ID NO: 40838 - DNA, 415 bp, Arabidopsis thaliana landsberg
gtacttgagagtgtatattgccggtctaattgagtgtccagcataagcggccgtagttgtcatatatgcatgcttgacttcttttctttttgtgatattatcaattgttttaagaaattaaattaaatttacagccttttcaaaaaaattattatcgtttttcttttatataccattatcgtggagagtttagtttggcatgaagaagttgttggatagctgaatatttagaaacaaagaaaattgcatatagattggatcattggatgaataagcagaaggcgtttttttttttcttttgctaaatgaataagctcaagatatgtgttatacactttattagggtaggctcgataaattcagagtcttaaaaaactagtcatctttatactaaaaaaaggaccaaatcttaaaa

SEQ ID NO: 40839 - DNA, 529 bp, Arabidopsis thaliana landsberg
cacctgcttatctacttcttacctttccattatattataagagccataaggaatatatacctccatatttcatatacccaaaaggctctttaaacaccacttccccttactgattttgcacataaccatgtattcacatcacatgggacatgtgatctaatgcgtactataggatatatgttgaacttttgcatctgtagagtgaaatctcttatctacaaaataaaatggttacaactggttgcaacttgcaagtgaaatcacttgcaatttggtatataaacatgcatttcaataatgtaaaagttacttttattttactaggaagaaagatgtagatgctatatattattatagagagctgtgtccaaaaccaacatggttgcagaacacctgtctatggtagatgtacacagacacaggatacctatctatataccctcgtttgtgcccgcctagctcccatcaaaaccctcagttctcatttgggagtaccctttacaatcaattatttatgttgggattgatt

SEQ ID NO: 40840 - DNA, 460 bp, Arabidopsis thaliana landsberg
  unsure (1)..(460): unsure at all n locations
cgaatcttcgtgatactattactgaccattcataaattaaacgcgttttttgtttgtcataacccttagaaataacttttcattaatctatttaccggtgattgccttagaatgcataactatgcaataaattaaattgtggtaccttactgaaaatagaaaagaaaacattgaaaaatgattatgacaagtcttttttcgggaaagaataatttctcttttttttctgttcaacaattccttttgttgcacattaaatattattgactaacanatgaaaaatcagaaatataattaattcttccaaaactcaataataaagcacagcatgtttttgattggtcaaaattagaagaaaaagnaaaacagaactactgattgtatttataaatggttccttttgaacgataattgaataacataatcatgtgagtcctgacagttgacactgcttgacgta

SEQ ID NO: 40841 - DNA, 862 bp, Arabidopsis thaliana landsberg
gataataaattatgtgtgttatttcgaaaatcatcatttaactcgcgggttcagcaaatgactgtattcagtgagcgaatcaacatattagagttttacgtgtgtttttgaaggaaaaatcttggattattttatcatataatcaaatactcccctccacagaatttctaaaccaataaggtttaatatagcactcagtttgcccagagcgtttatttttagatttgggatgagacccataaaatattttaacagttatcatttatgcaggcctgttattaattatataactgcaaatctcgaattcacaaccagccaaattcatcatagtcatacatacgtgttatccttccaattatggccttctgtatatgaaaaaataatataaactccaatcaaaaggtcaagaacaaaacatataaattgacaaaacaaatcgatacatggataatggggttattggatatattgtagccaattctatacggatagggagccctacgtttccacaaatatattgggatggatattaaagcattttaaaaacttactgaaaataaacattgaatattatatagtcaatcagccatcgtcatggggttagaataaaacaagcactcctttcaagttgatgctttgttttaatcaaacgtcatgatcccaatactaatattccattttaacgtcacttaataacgtaattaaagtcaagataatttacgattgatttttttagcataagtttaacctaatcttcaaattatgttgataatccccgcttaagttcttctttattttaatcaagtctactaaaactaataatgtattatgactcgattgccttgataaaaagggtaaactg

SEQ ID NO: 40842 - DNA, 996 bp, Arabidopsis thaliana landsberg
gatacaagagtaacacttcaagtaccaatacttaaacagtttacttatgctagattattttacatattttcaaattttttagagaatgtgacgcttatctaagtgtttactttctcccaaacataactaatcacatttatctatcttcttcttttttttctgtttctctttgttttcttgtgcttctttttaagtttttgtatatttctctgtttagttactagctcaagatacttgatgaagaatgtatttatttgcacacttaaatcaacaagcactcccacacttaaatcatccccattaaaaacaccaaaaaggtttctcctatacaagttcaagatacttgatgaacaatgtatttatttgcacacttcacgaccaaactcctcttcctcccatgacaccaaaaactatggcaattgtagcaacaacagcctgtgaaagtataaagtgttaaaaagtgattaaatcacaagattaatgtattaaacacgattatcttttagtgaaagactcactgcaatggtacaagctacgtatcctggtttctctcgtggatcgatcctagcacatactagaatgaatacgcctacataccatggaattgcaccaaggaggaaaccaatgatgaacctttaccaaaaaaggattgagttttttcagacaaaatgtattgaaacaaagtctaatttgagattgctcgggaaaaacaagaacttacaagaaccaaccgaggccaagaccacaacaaggaagacggttttgtcttgcaggtcttccttgagaaacagggtaacctgcaacatacttttaactttttgtgtagtactaatgtagaaacagagagagcttcccaacattgaatatagttttaagcttttgcttctggaagagataaactctgatatcatttgttaagaatcttacaactcttgtcaatgagaagtaactttactacagagatcttattttgcgcaattgatccaaactaaagtg

SEQ ID NO: 40843 - DNA, 580 bp, Arabidopsis thaliana landsberg
agggcaccttgaggtgtgtggaagctgttaatgagatgggcagtggcagtaccacttggatatgtttttttgaagtccacgatcatgatctttcgaagaggaacgacggagaaaagaccaagaaagctaacgacaaagagaaatcctatcatccaacccaaatgtggattctttatgttcaacggagtattggcttccgcagattgtttagcaacaacatcactcattccaaacagataactaccaaacccacctgttcaaacacaaacacacaatctttaagccaaactatggtcgtaaatacaccaagagagaaccaaacatattggaaacaaatttcattcatgtatagttatggttagcaaacacaaaatattgttaaggtaggtattaaatcttgtgaacatgttagatgtgaattgatttctttaaattaaaaaccaagccaaaatctaatcataacgtataccacaaactaaagttcctatataatagtatgaaattaaaggtcatgtgccaaatctaggttcccatttgacacacatggtgggcatagcatgtcaacctttattaaaaaaaa

SEQ ID NO: 40844 - DNA, 524 bp, Arabidopsis thaliana landsberg
gttagtttcttttatgtatgttttataaatgttttcagaacgctaattaaaaaaatcttccatttaattaataaatttatttcattataaaaaaaaacagaaaaacaatcatttgaaaaacctaaaaagaatgtgggttcattcagaagtttatcatcctaatgagatcaactatcatttagagaaaaaggtaaaaattctttactatgaaatcccttattctttaggccatgattcaaaagttgatgctggctcctcttttactctgttgtaccgctcaatgattgttttcatactattcaggttcgaaaagataacaatgttattaatcatacattaattaacatattaaaattaactcaacagacaacagtaagtaatataacttaagtaactcaaatttgtcgtttgaattattttttaaaatttgtgaattttgatatcaattatataagatagatacaagtttaacaaagccaattccagtatatgcatgaagtttgtctacctatatgtttgagcac

SEQ ID NO: 40845 - DNA, 609 bp, Arabidopsis thaliana landsberg
  unsure (1)..(609): unsure at all n locations
acataattcatgacaaatacctaatgtttatgcgttccccattactattactctacatactctttttttattcaaaagtttaaatgatggcaacaaattaaatgaaatcatcaaactatttttatttggctagccaaaatggtacatcattttagatccattagaaaaatcgattgaatgagttatttgacgactatactcattttgaagggattatttggatcaatccttgtttatgaagcaaataacaaataaatgaactagtgcatgcatgttaaaccgttcatagctcaattagattagatattttagactaatcctttgtctaaatatatataatgattttttttttttgaacacgatatatatatatatatatatatagtatatattctctctgtttattacttgatcttttattacaaaaagttattttaaaatagatttttttttattggttttgacagtttatattctgcatattaattttacaattagttaaatcttatgttttaaatagttaataaataatatcggtttgccaaaacttaaaacatcaaatataatatacagatggagtgttagncaaaaatctttttcatccttctg

SEQ ID NO: 40846 - DNA, 771 bp, Arabidopsis thaliana landsberg
gctatcgcaatcttcatcaccatcttcttcttcttcttcttcttcttcttcttcttcaagtgttgatcgttagggttaaaaaatcagaactttggatatcacaaaataggaagttagagaggtattggatattatatagaacgtactagaaactttagagaaaaggaaatagaaggaagtttacttttgagccaaggaaacttaatccaaaacaaaatcataatctgaccaggatattgcaataaggatacacacatagatcttgttgttgcttcattaattgcgttattctcaagttacagctgtgaaattaatttattatttgctgttgttaagtttaattttatttttgggctatgttgcacttttataaacgtttggggatattttaacatttagtagaaatagatatgggtatcgtcttcgagttcgagatacacgctaaaaggaaaatctgtggactttgatgagcttttacttcaatggcagagtcaattcgaactttttcgcttcaatggcggatactgtcactgatcatcgctttacttgtgtactttccgattctgtcgggaagttactttaaaccgttcaatgtgagctacgatcaccgggctttaatcatcgccggcaagaggcgcatgctcgtctcagctggaattcactaccctcgagccactcctgaggtaacaatctctttcaccgaccttagctcaacaattttttattttttgatgaaatgctgatagaagaattggcattgttaattggtta

SEQ ID NO: 40847 - DNA, 591 bp, Arabidopsis thaliana landsberg
acaaaactcaccatagcagattagttaactttgtcttaaaaaattactggaactggctcagccaccacaaaagcatcaagataacccttcacctataatgctaactctttcttagaatgatctagagcaaaaacgacagctagacaacttctaaactggagtttcttacatgaatacatagaacataaggtcgatgcagaatctttgaaatgagtacctgaactaatggctttggaacacgagagtcatggctttcccaaccaagaactgaagcatgaaacccaaccgtatggtggcttaagaacagcaagattgatctccctctgcacaaaacacgcattcaagcaatgcaacatgtaatccaaaaacatttcagactaatgagtagtcttcagattaagtaagtaactgaaagtctagcgactagccttacaaagcagaggctttatcagttttggactccagtagtaacccatcagagatggactcaggattaggtgtatgtatggtatgggcggagtaggaaaaatcttactcaaatcttgcgcatctcaacacttgcaaacaccaaaaccttacaaatccaacatc

SEQ ID NO: 40848 - DNA, 493 bp, Arabidopsis thaliana landsberg
  unsure (1)..(493): unsure at all n locations
tgtttgttgtcaataaaaataatggttagaaatcgtataaacgacagtagacacaacagaagtgtttcatatttgatcatgcaaataaaaactacctggataatggcaacatggaggaggacgccacggaggccaacggcataagaagcaacgagcatgacggcaggtccaacgacaaatctcatagccgccgcaaaagctgctcttctgtttccacaagctattattcttgggtttaacgccatgaacaaccctttaacacatccaaaaaaagccacaaatttaaacaaataatttattattggtttgctttttggttaatttaagtttatacactgtttttagctgcaaaagagtgacataaaaataatcatcacagccactgatccaccaccacaacattaacatcatcattatcgttatcctaaactattcattttccataaagtcatgattaagcacaaattntataatcagttgatggaagtctact

SEQ ID NO: 40849 - DNA, 558 bp, Arabidopsis thaliana landsberg
agcaaaagtaacaccagctgttacagagccagaacaacccactgctgcacccacggaacaacaacaacattaacccgttgtcactgtaccttctgaacagcaacaaccacaaccagtatcagctcaacccgaaccagtcagtgctactgcctctgctcctgctgaaacacaagagcaaagcactcaagcaagccaagaaaaagaagaggaagaagaaactacacaagcagatgaagaggaaacggaatactaaataataaagacgatggtgtagatagggtaaagggtagcctccctcaagaaaccaacaacaataaccggcataatcttctttatgttaattgtttgtgttagttcgttaaataaatactaaaactattgaatgttgttaactggaggtggacgtgaagcaagagcagcaatctgttcgtgaattgcggcttgttcttcgtgttgtatttgcaactgataagcttcacgcttcgcattgcgagcttcgatacgcgataaatgcttgcgatagatcttacgcaatgctgcgatcttgtgctgaactta

SEQ ID NO: 40850 - DNA, 955 bp, Arabidopsis thaliana landsberg
atatatatataattcaacaataagtaagtcaatacttttctgtaaatttgaatttcttcctcagggcatgagggtattaggccaccacaagcccaatttaattagtccatatcatattaagccaccataagcccaataacttacagtgaagccccatttagtactgagcccggttcgtacttgtaaagtagttaagtagcgaataaaatattgccacgtattcgtttcaagcaaatttgactaacttatttttcagttttggaaatttcgattcggttaccatatcaaatttgggcgggcgaggaataaaccaaaccggtcgagagttcacgagccacggagagatcttggcgatgagttgtcggagattcttctcgatcccggtccttttggtgattctggtgatgggtttcgtgtattacgtcacactgtttgttttcatcgatgattgggttggtttacaaagctcagctgggaaattaaacgccttactcttcagcttattggcgtctctctgtttcttctcgctctcaatttgcgttcttgtagatccaggtcgtgttcctgcatcttatgctcctgatgttgaggactctggctggtccaatagtaacgtaagctctcccctgtgtacctctgaatttgaagcatttggggatttatgttttgttgctcttttgaactagtagtagtgatgaatctgtgaatctttggggtttgctagttcttagaatttcactgattaagaaagattgatccttttgccttgatcgatcggtaacagattcttatagtgtcattgaagaagtttagtcttttgaatttcataataggtgaaagtcgatggcttttttctttggtgttacaaaaggaggtttgatgttaatgttaagcttaggaagaatggctttatcgttgatgctgtttgatataaagtagctgcttaaattttctg

SEQ ID NO: 40851 - DNA, 573 bp, Arabidopsis thaliana landsberg
  unsure (1)..(573): unsure at all n locations
agacaaattattgtattctcttctgtatttctgtgttctaatttctctgtttcccattgtgtaaattataactcttctcgccagattgtgcgtgaacaagcagaaatagcatctgttcaagggcctcatgcggaaggcattattgatgcttctgaggtgctgactcgttctgacactgcatcgactgcagctccgactggtctaccaagccaaacttcaacctctgagggcgttgagaaactaactcttacttctgatttgaagcagccagcttcagttcctggaagttcttcaccggtcgaaaatgttgatcgagttcagatgagtgcagatgaaacatcacaattgtgtgatacttcagaaaccgatggtctttctgtccctgtgactgaaacttctgctgctacattgtactgacagttgtagcaattttatctccctttctcttttattctatntagttntagttgtgagtatcacgacctaaataagtttctatcatctatctttgcagggttgagaaggacgaaatttcagtcgggaacagtggagattcagatgacatgtcaacta

SEQ ID NO: 40852 - DNA, 598 bp, Arabidopsis thaliana landsberg
gatggccgattgtgtatcggtcttttcttgctcgcagaattataatccatatccatcaatccatcaacatcacttcctccaccttcgtgccttattttccgactctcttgactcttctccacaaccaatagcgttctattccttactacttctcgtaagcttcgtgctaaaaaatcaaaatgtttatatatcaagaactcattattgggtaatatattttgatattcaaccaaaaaacaagaagaagattcattcaaattatacttgatatagctagaaactcgtgaggtgagcgcgcttgtgtgtatatatatattagctataaatttaccttgagtaggagaggaaatgaagagtatgagaagaagtgcgacgaggaaagacttgtgggaaaccctaattgccatttttggaagagagttttttttctttggttatatagaattatcttttgttagacctttttgtgtttatatatagagatgaatgattctatgatcagtgttatggtcccaattttatatcggaattgaataacgttttggaagttatttagacatatgggtctaaggatttgacgtcgatatttatctgtctt

SEQ ID NO: 40853 - DNA, 578 bp, Arabidopsis thaliana landsberg
aggcatgttaaggctcctaccaaatctcccgttaccgcagcacgcttcgtttgatactacaagacctgcaaaaagaagaactaaaactcagtactgatatatagaaataagagtaaacccttataaatagggattgaggtcattttaccatatctagaaggattcacaaccatatcatgaaatagatcaaagacgttttgatagacaaagaaagatcctggcagagttgtgttgagagtatttgctagatctttcagacggctattgaacattgaaaccatattgttgatttttgtcacacacccgctggtgttgttgccagttaccatagatagctgactaggtatgcaacctaatggtcctgacccagctaacaccatttttcttgcacctaagttgtatagtctctgcaaaatgtttgtaaaagaacacagtttttcactttttgagtatgagatgaatatctgcatcactattggcaattttgtactaagagatgatgggagagtcataaaagatcattgacttacggatatttgagctgagagagtcttgatcaagagatctgcataatcttt

SEQ ID NO: 40854 - DNA, 661 bp, Arabidopsis thaliana landsberg
tttctagattgtagaaatcgaaagagcttttattagcttatgcatctgttttcaccagtaatgtttccctgcttgattatgtatgttataaagtgtataaaaattgggagttcctcagtttccgatagtgagaggttgttaatgtctcttccacaagtctcaaggataatgtctctgttttaccacagtgagagtaaaacagagcaagcatcagatctaaacagaagtaatgcaaatcttaagctgagaagacggtgaaagcttaactaaactgatggatcaataatacaaacacagcttaatctctgttccaacaaatccatccattattcaagagatagagatagagatagataagatagataacgagtcccgcaactatgaaccatctctataaaactcgagcttatcattccatccgaaaaaagatacaagtgcagttgtagatgcaagcccattaatattccaacagtctcaccgaagctggctttaatcctttcgcagctggtagcttcctttctacatacacaactttgcatggccaaacctccttttttagcagcctcggtcatgtgaaattctgtgttccattaacaaacttaagcacacatttgatctatagttcctgcttagagcttgaaagaggagataccgttttctt

SEQ ID NO: 40855 - DNA, 737 bp, Arabidopsis thaliana landsberg
aaagagacaaattccaaacttcactaatagaaacactagtgctatctcaaactcagtagctttttattcgggttttgatttctcccttgttacatattgttgtaggatcaagaatgctactaataagaaatctccagtagggaagtttcctgcttcctcaccaggtaaattctctctctgattctcacacatatattcacaagcaataagtataataggtcacaacagaagctgtaaaggataattaattaagttttgtaatcttgtcgaattttcattacattatcggatcaaaagttctttgtgtcaccaaggtagttttaggtcctgcagattgtgtaatgtgtaatctttgttttgtgtaatgtaggagattggaggaaaatgtcactcccagcaatgctactaggagagactgtaaatgaaatcttacaagcctcacaggtcacaagagacattgtggacgccatagcaccaaagaagagtagaaagtccaggagattaacaatgtcacaagaagacgatggccctaaaacacccgagacacaacaaaaatcccgggaacagaatcctgaaactgtcagtagcaatatcaaagcaagaaggaagaaagagaagcagaacagacgatcagaatcagattctcctccatctctacaaagggcacgctcaagaattgcgttcagaaccatctctccacaagtaaagggaaataatggtgagaatagttttcggct

SEQ ID NO: 40856 - DNA, 500 bp, Arabidopsis thaliana landsberg
tatcaaattatttatagtataaactgtagttagtagctttctgtcttactttttgttttcctaaataatcaaatcgtttacatcttttcttttggcgaacagtcaactattgttagacataatttttcagtttttttttttttctcaaaatagtaatcttattttgttgtctcatctaaaaaaatattatactaaaaaatttcaaagaaaatatacattattagttataaaaattatgaattgttgtttttcaagtttttttatttcatatatatggaatcatttttattcgcttctggtctctatgacaatatggatgcctttgagtcttatccatcatccaatctctctataatgcaggtcaacacaatttgctaaattgttggagtcgaatatctgtaaataaaagccggaaatatttaagcacttaacttaaagcacttcctcacttagtcacttagttatacataagacgctagacttatatataagtgacattg

SEQ ID NO: 40857 - DNA, 152 bp, Arabidopsis thaliana landsberg
tttattcatgcgttaatatttctttctctatcttctgtgtagaaaagtttgacacttaatggatttcgttttgacaattatggtttttttgtttgtgatatgatgtacggaaggagatgatggggaggagagtctatgagtttttaggaact

SEQ ID NO: 40858 - DNA, 711 bp, Arabidopsis thaliana landsberg
acctgatgaatgttataactgagtgaaagattatgaatgttatcaaaacgcgtataaatagtatagcctaagctaccatgtaatggctatgaggatagttgaaataccaatggatgcaagttgcaactattatttactttatgtacaaccatcaactaacaccagcatgtgggctttttattcctaaagtccaagtatatagaaaagaaaatgatgaaattggagaaatagtctctctcgcataaaacgaaaaaaaaagtcaaacgaaataacccgaattaagctgatagagatttggaaatatggaaagaaggaaactagcaagttaaattacctttagcaacgctgcttttgcgggtttgccctttgtattggatctcaacatatggatctatcttacctacaatcatacaaaaccaagaaaaatataaattgttgtaaaagggttttttaaatgatcaaaggatacgaaatctgagagaatagagagatcattaccaagaaaatcagagcgcttgagacctttgccactgatcagactaacctcaaggattccaacagccatctctgtagagttattttttaagtttttggggtttgtgttgtttctaaagaaaaagaagaagaagaagaagaagaagaagaaaaagaagaagaagaaggagaaagagaaacgattgatgaagtggatgtgtcagacaaagtctttaa

SEQ ID NO: 40859 - DNA, 618 bp, Arabidopsis thaliana landsberg
tcaaattatgtcttactggtttgagaattcaaataaagatatgcgggttagtgagttactgtatcagagcgatttggatgatcctgatttcaccgttccagagagtgagagcaatgtcgacggaggaagtggtagcggggatgagggagacgacgataatgattataggaattttaagaaaaatgtaagttgatggtgaaattttcagagcagaaaagtttgggggagggggaggggaacaaggctgaaaatcaggcaatccatataactttattttttaataaattggtaatgttaaattagaaattcaaagaaaaatcgtttttacacaatgtgcaatgtttatatagaaatgtttgaaaattttaaaatttagaaagaaacttcagactcttccgcctctagctccttgaagcaaaccaaatttgaaagcaattgtcgtaacgccggtctccgcttgcttggattgaggagagcttgtttctgatgtgctttatatctatagcatccaaaacttttgtttaaaaaactagactacatgaagattgttgtgatctttgatgatataaaatacaattatatttctctctacattgatatatagaagaatatattagc

SEQ ID NO: 40860 - DNA, 555 bp, Arabidopsis thaliana landsberg
agcatttctagcacaattctggtcagaggaagaataccagtctctcctgttactagcaccccatctacttcctctcttcacgtgaactctttcattgcattctccacacttgatttgttgataagatttgataattttcaacaacttatccaaatcaacatatttatcaaaatggacacaagatcttttttctgtcattgtcacagcaaactcctcagttacttccacgctttgctcagattgcttctcggagaccgttgcagcaaacctcatatatggaggcttttgacccttttttaatctctttcccattcgttactaattataaatataccaaactttcaaagccagacaatggagactgcgtaaagacaccattatacagaaagatgttagcttcatccgaataatcaaatcacagcttagcaaataaataatgaagcattagacgaaacaaacagagaaggagtaacaatcaacttgtacattaatgaaaatcaaacaaaccccaggattcttttagcacacacattgcaaaaaggttccaactttcac

SEQ ID NO: 40861 - DNA, 583 bp, Arabidopsis thaliana landsberg
ttttgtatattttatactctgatttgtaacacatatatggtaaaatattatttttaatgcgattataaaaaatttaccaatcaaaattttttttgcagaatacttgtcaaaacgcaaaaacaaaagattttgtggtttcatctaaaacaaatacaagtaaaaaattattataaaaaataagtgagtatgcagttatttattttattatctgatttttttttaaaaaaaaaattattatctgattttctagtatgcagttttcattctacgagttttagttctgtgaattctcataatgcaaatttttataaatttgagagatgatttaattatttatccatatgcaaatacatattatatacagtggtttagtaacgtccacgcaacagccacgattatacgataaataccctatgataataactggttgcaacattaaataaaacaatcctttttggcttttgggtccacacaacacaataatatactgtcactgaagataacaatggcctctatgagacaaattctaaattaatactaacttatagcattttaaaacggcattattagattcaaaataata

SEQ ID NO: 40862 - DNA, 2577 bp, Arabidopsis thaliana landsberg
actcatattgtcaaattaaatgcttacaacgatccataaatcaaaagtgttcatctctgtatcctaactttgttttggttctagtttgagatgtatactcttgggaaggagaaaaaagcttataaaattttatgaattgtactctctgtgcctatctgtagctaagctgacaaagtttcatggtacattctaagctaatgggcagtttcaaaagtgtcgctctctctttccctaccaatggtccaattttagtttgtttggttactattgtcttggcttggtttaaagagatttgtaggttatggacagagaacaaaaaagagaagctagctatggaagaaggactgatccatccatttagtaattcaattattatattaaaaagaacaaaaggtatgatatgttttcacattgtttgactttttttatgatcacaggttcattaatttctcatttttttactaattctagattcttgtttttgttattaacccttggttattaactttgtttggtttggtttggattgcaagttgaagccatttttatcaaatcaggtatcttgtgtagatctcacaaactcatgagtacttttagaatatatgttagaaccaaaatcatttgtcaattactatatatatacacatatacctaccctatatatacacagtttacacatgtatatgtataaattgatatattattttacgtggacgtaaggaacttttaaatgctgtctctacggatcataattttcaccctaagctgttcaataggttattgacgtgttcattggttgattatacatgtttatagtttcccatactaaaattgactggtacttgcagcatattaaaagtatgatcccacacaacatgctaactaggaactctcagatcatgcttcacgaacaaggaattttttttttttttgttgttgttgtcatatctactatatatatgtatgtcagattgtcagtatgtgcatatatacatgaggttaccggtccatgtacataaacacattcaggtaaataactagaaaggttgggagaattactattctgcatgtagtccatgaatatatggtaagattgcgttaattaagtgttaaatttttaatctttggcatgaaagatcaaatcgacaagtcatttaacagaatgtatttccctcccattgcatagacatacttcagtacaccttatattatccatatcctttgtgatagttcatgtaactaagcactcgagactcaaatcttcagtagatgcatgtgtttgtttttctttagctgctaattcggatcggatatgacatagcggattttgtatatctttagagagtatgagggtccgtataatttgtgatcgaatgatcctaaaataagataaatatatgaacctacatcattataagtagggttaagtgtgtatgattgtgtatgcgtataaaaatactcccttgaccgtaaacatgaaacatgtaatatataagatatatagacatggagactatatcatataaacatacatatatatatatgttagttatatgtgtagcccacatttttcgatataggggaacaaagttacgaataatgtatatgttagttatatgtataaaacatttgcaaagggatgatacaatggaatatgtaaatacgtattccaaatagtctacaagtagcaatgatattgtgtagatatgtctcataaaggcttgtgctattatattgtgtagatgtgtctcaaaaggcttgtgcatagttgtcaaaagaatataaaatgcattttaatattcaaaagaatgcatgcatagactgatagaaaagaagaaataatgaaaattaaaaggggaggtattagtgaaaagtacggaggtattaaaattatgaaaatgactaaaggaaataatattgtaacacatctaaatgattagttgtgtaagaagaataaagagaattaatgacatgctccaattattgttaaataaaataaaataattcattctcattagattcctgacctaaaagagactgcaaatatgtaggccggttagggttttcataggcatgattaatgatgataaggaaacttcgtattgggggttaatgggttctttccctttctaatacatttctaaataaagtaataatcaaatattaaacttttaacttaccgtttcatttttatgttgagtttacttatattgaaaggaaactattttatctaaacctcattgtcaaatctttcattttgtagccatatgctaattacatgcaacaaaaggagttttttttgtttggtgtggcaaacgaagatttatttacctttcttatttaatcaaactaaataaatttcttcactgttgaattgtaataaataatttattttcttataaacttatccatcacaactcacaagtcatgaactatatatagaaagtaacacgacagtaataatattagtgaaccactagacttttcagtaagtgtggtaaattctgaagactaaataatttagacttaatatgtatatctttatctgaggcctataataatgttcattcatgaacc

SEQ ID NO: 40863 - DNA, 772 bp, Arabidopsis thaliana landsberg
  unsure (1)..(772): unsure at all n locations
gtcaagtattaagctttattcttatgaaaaattactatcacgcatgtgttggtgcaattagattgtttaagaagtcaaatgagtagaagaaacctattgaattaataatacatctcatcaaatagagcaagaaactacgaatattagcttctttaatagtggaatttgatatcaatttttattaatttattccttttattgtttgtattgcagattgtactctacttggagctatacgtaagtacttcttggattcgtccatcacttgactttaattcatattttataaaaattggaatcccatgactctttttgtcaagaaaagtacataactacagagattccaagttgtgttttaaaaaaaacaaacaagaaaagagatctcaagtatgtgaccccatgttgtgaaacacgttagcaaagggtcccatagattctgccactagttctagatttggcactacctgaagctgctntaaacttttctctttgtttcattttgttccttcataaagcttatatactttngacgtcactaaagtagcaaagatatattttagatggaaatgatccctaaaaagcttcttaaaagctactagtgtgaaatgattagttgaatagtgactatatagtagatactagatgatacatctgcagacttgacatgagtctattcatattttcaggcatgctgtgtggaatatataatattggagagtgataatttgtcttcattatatccaaatgctgccttaagtattggaggatttca

SEQ ID NO: 40864 - DNA, 388 bp, Arabidopsis thaliana landsberg
  unsure (1)..(388): unsure at all n locations
ttttttctttctaaaaatccttttaataataaaatgacacgtgtcgatcttacatcttaactgcgatgtttgacatgggtccacatgcgcacagagcacgcactctttgcattgcacttgcacgtgagatgtccgtactatgacggtccatcttacataaattttcctattcaattaattaagctatatatatatgtgtgttttacaaaatttagtatataatattattgtaagttatacacataagtagagctgtagatgagtacgtattattcttatttcaatctttttatgagatttatagatatcaaagttnnnnnnnnnnnnnnnnnnnnnnnnnnnnncgaggatgaacaaaaatttttggtaaagagtttctcacaaacca

SEQ ID NO: 40865 - DNA, 676 bp, Arabidopsis thaliana landsberg
agataacctggcaacttgggcatatatttcacaagctcatcattatgttccaaactcttattgacacattcctttcgacgactatgacttgaacgtttcgttttcacccgattgtcattgtctgtgccacttgctttaccctccttttctgccatctctgatgttctttagccctgctacagaatatctctaaactcaattcttgtagccattattgatctacaaagaagaagcaatgaaacttatctccattaaacaaatatagcaataaataaagaaactttcactatgattacgtacacactctcagatttatgcataaactaaatcacgagagactcggatattattgaccacaatgtagaaaagactaattcaattccaactcttgacaaaaaaaatgaaaaatgaaacctttattagcaaagatttcgaaacaaatgtcgtacagtttcacaaccgataaagtaatagaggaaacagcattcaagctcgaaaaaccctaaatttaagctgctctaatcctaacctttcttattcaccaaatcaaagcaagcctcactagacactacttgtgttctcggaaaagaaaacgaatatagaggagaaaagaaacatacccattagtactatttaccaaaaatccacaaacatttcattaaactgagactcgagt

SEQ ID NO: 40866 - DNA, 281 bp, Arabidopsis thaliana landsberg
cgtcgatgtaaatgacggcaccatccctataaggcaccacagaccgaccattcctagggtgaaatctgatcggaacagcacgacctttctcaacgttgaaagcgaagattgctttcaagccatatttctcaagaatagatcgaacctcgagctgatcctgctcataaccgccgagatttgacttgaacacatcgatcggaccttttccacacttatacagatgaatctccaccttaggaaccttcgccgccgtggtcgtcgatctcaattcactttccggc

SEQ ID NO: 40867 - DNA, 469 bp, Arabidopsis thaliana landsberg
  unsure (1)..(469): unsure at all n locations
ctgaaaagacgagaattcggagagggaagagaaggacagagaagattcatnnnnnnnnnnnnnnnnnnnnnnnnnnnactttgcttcttccctttagctctcatccattcactccttcgttttgatactttttaaaccggtggttatcaatcggtttattaaaccgaattaatttcaatcacgtatattagtatcccggttaaagataaatataaccgggtatccaaacgaaccccatcgtgatgtttggtgtccttcatgtaaacggacactaacctatacgataataattccataaatacatgnggtttgccacattaatcgcatcatttaggtctctgtctctacaatttattcgagcgatcttcaacgctagtttttcgtttggtaagctcattttcttctctcctaatntttcgtttcttcttcttctttacgtcgatcgttgacaaggtcaacaaacatttat

SEQ ID NO: 40868 - DNA, 771 bp, Arabidopsis thaliana landsberg
  unsure (1)..(771): unsure at all n locations
gttcgataattgttttgtttttgtgaatcccaaggcttgtgtctcttctgggccaattcgatgttcagagattcgtaacggagatagataagactaaagcttttggtcgagggtcttcgtctacagtagcttctcgtttaaacacaattggcaagcatttgaaggataaatctttgtacgcattgggtttttgttctgagtttttgttatcaccagatgatactttgcttcttagctatgatacttacaaaggtgatctcgataagaatcctagagctaaggctatcttcaatcacgaggcaatttctctgttaccctcttttcaatttcttgactctgttaataatatttcactatttggttggcaatgtgattcattgttgatttggatcataccaattggttgctgaggtaatgaagtccgctacactttgttctgactcacgtctctattttttgctggtttcagnnnnnnnnnnnnnnnnnnnnnncagaagcggtttggcctggactttttgtggataaacatggtgaatattgggatgtgccactctcaatggctattgatctagcatctcttcctgctgaatctagtccaagctaccatttatgtttacaccattacaacggatcacccaagaagttacattctgatactatggaagagcctccaccgtcactgcttactgggttggctctgaaaattgcagtctcttataggacaaacatggatctctggagggggtccactccaaagctcgaaacttgcaa

SEQ ID NO: 40869 - DNA, 633 bp, Arabidopsis thaliana landsberg
agaaaaaagaaagaaaaaaacctttgtattatagtccatgtttaaagttttctacactttggcgttagcttgtccttttccaacttaaaaaagtaaacgaatatcatatcattttcttaaacaacattcgaaccatttaatggaaagtaattctttaaagttctttttgttgttagctttgtccctgacctatacaacaggagatcaagttttgccgacacgaaatcaattagaaaatcagcaaaagttagagagaggaggggagcgtgaagcttcttatctttttatacaagaaaactgaatcagtgttagtttcttcagtaccttgaacatgtcgtgtggctaatacatatggaacccttacccacgtgtgatctcttcttatgctccaagtgtagtgcagtcacaaatcaactagccgggaaataggaaagaaagagatcaaatcaaaactttatttgtttcttactgtttaccacatgccaaatgggataaaatggaatgatccaactttttgtgtgttctgttttaggcactcatcaagaataaaacaacttcttgttttgctatctaatgacgtctgttacacatcctttcttcaacttcctgctggagaaatcaccaataaagata

SEQ ID NO: 40870 - DNA, 671 bp, Arabidopsis thaliana landsberg
gggaaatgcatgtgcacaaaatctacggtagatattatttaatgtattttaaacaagttttggtgtatagattagtgcactatgctttatggtattatgctactacgatatataatttagtggtttataactttatattaatgtcgtcactgtaactttgagaatttaaacaacattcatggaatttcgatcagaattatatcagaaggttttataatcgtcctatccataaataccgatttcttcttttgctttatttatagcgaatttgaaagttttgtatactgttgaaaatagtaatcactaaaatatgatcgatacgaccaaattgtccaaaaggaccaaaacgggctagtaaatagagagaactcgggaattctatgtccgcaggtagagaccgaagacggattatctcaatcgttcgtgtgtttaggtaaatattactactaccattcaaaatcaaaaactattaaacatatcactaaattaataaatgttacttgtaaatcaaattgaaagtggcgtcattactaagaaagaatattaattcgttagcatctgacctacaagtgtcacacacctgttagttccttgtcttattaaaaatgtgaccctttactacttaaatattgtttatggagttattaataaggctaggagagatgttcggg

SEQ ID NO: 40871 - DNA, 529 bp, Arabidopsis thaliana landsberg
agctttcttgacataacatttgtcatgtttgataaaccaagaaccttagagatcatgacttttgctgtaccccttaattgattagaatagtattaatcttttggagggtccacggctaatattaaatttcttattcatcagttggtgagatctaccaaacctactaaaaaacccactaataatttaatcaaagttgaagaattgattccagcagcagtattcaaataccttgtgtatctcgagaatcctattttaaaaagatgttaacataaaagcaatcctgaaactatattctataacacactagttttgccttctggtatcacctaatggacacaacaaacaaagcataaccaagagacaactatgctgatgatactgataataatgatgaatgatgacggtaaatgcataaaaatattcaagtgtgtttggtaccttggggtaataccgacagcccttttcaccaagagtgactaacaacagctttcaagttgggatgccacaaagtcaacgcggtctcatcatc

SEQ ID NO: 40872 - DNA, 2726 bp, Arabidopsis thaliana landsberg
atgtttgaaaatttcaaaagtctacagtttttttgtttatcgagtttcaataaaacacaaatgtaagaccaatatgaataattcaaagttttatcatattttgaaaagctcaaaagtttcatagacttttgaagtctacaatttgttttttttatcgagtttcaacaacaacaacaaaatgtaagaacaaaaagaattattcaaagtgatatcatgttttaaaatttcaaaagtttcatagactctaaacagactttgtagacatgctacatttttttttctttacttttttttgatatacaagacttgactattatagagagttagagacctacatagcacaaccgtggtctgttcttattgatcttgaaacaaagaaggcattttaacaaagtcaccaaacttttattacctatgaatttcttttgataataagacagttttctagtataacaaaagaaataatcatcagcgtaagaccaaaattcaattatcctaaacaatcagatttaattgatttatgagttttacggtttagtagttctctcagcattcaattctcacagctccactctcagaggatatgaatttaggttttctaatgactggttccatgcattgaatcacatctcccactctaaaatcattccaatctccaaacacaagcccacactcgttccctttcccgacctgttccacgtcttgtttctcccgtttcagcgacgcacacgagccttcgaagaccacttctccgcttcgtaacagcctcatgagtccgcttctacatacccgaccatccatcactttgcaacctgcgatgtttactccatcttcttcggttcttctctttcctaagatcttgaatatgctaagtacctcggcctcaccagacacctccatctccgaaactcctggtgctttttctacgatcaagttcccgatgtcttcgagtaaatggtatatcacacggtgatggaatacctaataagagattaccatcggttacaatgttaaacgctatctccatgatatgaatgtggacgccaacgcacaagttggcaatggaaattatcaaagctaaatacgtatgaattctttataacagaacggcataccttgacgctgccttgagccgcagatagattaccagtacttccacccttaacgttaaacccaacaatacacgcaccgcaagcttgtgccaagtccaaatcagagtgagatattgctcccactccgctatgaacaatgttcacagacacctatcaacaatataaacaataggcaaaatcacaaaacaataagccacaatcaccataaaccaatatttccgttttacgtacctgtgggctatttaatgttcttaacgcatcagcaacagcctgtgcagtcccttgcacatctgatttcactactataggtaattcaacccgaacaaacccttcttcagactctgtttccaatctcgctgctgcttcctctaatctcgcttcctctgctttcaacaaccgatctttctcatattttcttttcctcccttcgctcagcattcttgcacgttcctctgattccaccacaattacatcgtcgccagccattggaagacctttaagcccttcaatctcaacaggcatcgccggtgttgctcggtctgttgtcttaccgatcatgtcccgaatagccctgagtcttccccactgacacccaatgactacatgctgacccctaaccaaagttccggcttttacaataatggtggctaatggtccacggcctttgtcaagccgagcctccaccacatatgcttgagctggtccatccacacgtgctttaaggtccatatcaacagcttggagaagcagagcttcttctaatttgtctagtcctgtactcttcgctgcagatacctcaacagcctgaaacaacaagtcaaatcatattaacaaaccaagtccaaattgaaacaaaaaccatattaaaccgaaccaaaccggattatctttcacctgaacagttcctccaatatcctcaagctctatcccctcagacgtgagctggtacttaactttttccggattagctccaggtttatcgcatttattgatcgcaaccacaatcggaacatttgctgatctagcgtgcgcaatagcctcgagtgtctgcggcattaccccatcatcagcagcaaccaccaagacgactatatcagtcacagcagctccccgagctcgcatctcgctgaaagcggcatggccaggtgtgtcgaggaatgtgattgaagttccagaatccggcatgcctaccacgaaagcacccacgtgctgagtgattccaccagcttctcttgctgcaacagaggtgtttcttaaagcatcgagcaacgaggtttttccatgatcgacatggcccattacggttacaactggaggccgtggaagaatctcagatccttctgtagaatgttgcctccttacgttgatcccgatttcctgcaaaggatgagttaattgacctgtgaaatctattatcatggactagaggtagaatcaccttaccatagcaagaagctcggcgacatcaacactgattgtgtcgaattctgaactaaaagcttccccaacattaatgagaatgctctgcaaaaccgccactgactcaccagtacgcttggagagctcaagtagggtcatcccttcatatatgtcgacagtcttctcaggcaatcc

SEQ ID NO: 40873 - DNA, 770 bp, Arabidopsis thaliana landsberg
cttacatagtcgcatactagcgctcgcagttcattatccacgcgatagcaatacctttttctccaaaccccattctttcaagcactcataaactctcttagctatttcctcaccattgtgtggaggcttaagatcacaaaaagctaatatcttattgttcagcctccatgattcatcaatatagtgcgaagttacacaaatatatcctgtcactgtacttcgagacgaccataaatctgctgttaaacacacccgaccgttgtgtttagcgaaaacatctatcaacttagctttctctatctcaaacctcttaaacacatcgagtgcaactgtttgtctacatataggcttacagcccggctcttaaaaatttatctctagccctcaccttttcatattcaacatatcgaaaaggcatatcatgatatattattatctcagaagtcatctctcgatcaactttatgatcatacttaggtctagtttcaggctgaggtctttcggggcaatgtgttagatggcggttcatagctgatgttccatatgacttttctactaccaacttaataccacaatggtgacatctagccctttcttttccatcttcctctattcctacggatgtaaatgcatgccaacacaaagctctctgttttttacgtacccgcttagctctttgacatggttgagagacactttctgttgggttctgcccttgagtttcaactttagcattcatcttcatcttcgcgcgttcattttcagcttgt

SEQ ID NO: 40874 - DNA, 706 bp, Arabidopsis thaliana landsberg
ttgttttaaaataacatcttgcacatgtctatcctctttatccagagtgtactcacgctgatcacggtcactatactcaaacctctcctgtataacaatcaaaatttcaatataccataacatcaagcagagaaacttgttagaccaaaatgcatgtaaaattacccgaatgcgagcgttatcgaccaaagtgatgagaggtatgatcttaagaaaacgatcaatctcatcctgatgtttcctgaactggtaaacaatgttccaacccatagccaacaagtaaagatagctccggtctctacagctattgaccagaaggtaagaccttctcaaagcatcctcaagcccttcgagaggctctcgagtctcaggatacttcttcatctcagagatcttcagctgttcaagcaaattcccaatgagtttgagatgttgagcgaattgacgacaattcttcttatgcatccaagcagtattcgcagctttgactatgagaccaatcaacttgaccgcatctaaaccagtcagctgagccactgacgcaatctccccaagaccattccatgaatgtgacattatcttcttctactcaaagttcctggtcgatagaaaccgaatcatcattatgcacaggaaacataacttgaagatccaaaaacatggaattatcgagattgttggaaattttaccttcgctgagctgata

SEQ ID NO: 40875 - DNA, 761 bp, Arabidopsis thaliana landsberg
  unsure (1)..(761): unsure at all n locations
tgcgcacatacaactttgggggactaaactcatcttggcagaaacatacaagtgctacataagacttcttttaaaaatttgaaacacattaagttacaagattgtaacactgaacaatataccttgcgaatattaggatcagagaaaacaggacgaagaatactcattacatcatgtaacgcaattgtgtccaccaaaaagtcttcctcatgtgtagaaatctgcaagtttcagagaagaattaaaaatcacaacttcaacggttaaaaaaaactacaacgattcttacaagttggttacctgaattagagcagtgaaaccaagaaacgaccgcaaactatgctgctcagtgtcaaccgcaaaaacttgttcttttgctaatatttctgcaagttcctttaactgcgactctgtctcaacccacacatatgaatcactcatttccaatgaacactctcctctcaaaaatccaaactcaatctgaggattctctaacaaaacagtgatctcagtttcatatggatgaccattcgaaggtttctctgcattagtttcaaatataaaacaccaaaaatcaaaatgcaaattcataaacattaaaaagcattcaaaacttgagatattgaatcccacctaaggaagaangaagaagcatcaacgagcttcaagtgtttgaattcagaataagagttatccgcaagaacacgtttaaaacaaaactgaggctttagctcaaaatgcagataacacgagcttaaaga

SEQ ID NO: 40876 - DNA, 716 bp, Arabidopsis thaliana landsberg
taggattaatatgcattacattgttaaattacatttaaggagaaaatgtaaaaaaattagtttagaggagaaacaaagcaataggtgggcgcacttagaagaagaagaagtgagataatggattagatatgtatccacctatgcacctccatttctccatgatcatgatcatcatcatcattaattcatcaacatcatcatcagctacctttctaatttgtccgtttcacaactgagcaatctctctcttccatgtgacacacttcccttggcttcttccttcccctttgttgttccaatctccgtacgtcaaggtttcttctggtaaagtctctcttcctcttcgtcttttcgttttccataaagactcaactctctccttcgattttcttcttcccctctctactctgcttctctgattgtgatatctcttgtgtgttcttctttctctgttttttcttccattgttgcttttgtctctgtacttcttgaatttcatcatctgggtttcatggttttcactcaaagcttgtggctttgagcttattcagatttcttgtagaccaagcactctgctttataattgccacagtgttctggtcctgaatctttgcttatgccatcaatgaaatgctcatcttcttcctgaaaatgaaaaatttctgaatctctgttagtttctcaggctgcttttgtgctctgtcttcgaatttcga

SEQ ID NO: 40877 - DNA, 451 bp, Arabidopsis thaliana landsberg
atccggcttttttttcgtttttgtctctccagtttcctgaacagttttccttcaagtctcatctctatcgaggatccacgggtcagcttcgagctctggttttgtataaacaagaaacttagaatgcatctgacaaaagattgacttggttttatttggttttgttggatgatcagacaccagagaatgacattgggaagagctcattcaactactttcaggttccattcacttctttagtttatcaacaaagtatttacactttcaagatggatatataaactcattagagacggtttctttatatgcagattcgatcagcctttgcaatggccttgtctacactaacaaacacaaaagccatcctatcgttaggaccaaaccggagcatcctcggcactatcatcagaccagaccgggtcctatcagaacgcaaaggaggacaaaatgg

SEQ ID NO: 40878 - DNA, 717 bp, Arabidopsis thaliana landsberg
cggtggacgggtttcatgatttgacccaaccgtaaaatggtcgatgcatctcaattcttcatcatctccctctcttgatttcctctgttttcttccttttgagactttcctctcataaacattgtacactgcccattctccagacacctgtttaacccattattatcacacattccaatgtctttcttacagtagtctagagtagttattgtgtaccttagccgacgcaaatcccgcaagacaatactctgtcatgctccatctagttttgttgcaataagaagaagacttgtttgtttcatagaaagcaagtgttcttctaatcccaaatgttttaccacaggcaatgattggtctctctttaccaataggtttccaataaccatcaccagaggaaatcttgattctatgctcattacttgacacttctctcttcttgcaaaagaagtacctctgcttctccttttggtcccctgaaagcaaaacttcttcagttttagcatcagacaccccggatctagacccaaacataagatagaccattttgaacaaaaaacagttgaggaaaacgaggagacatatacacacatagaggctttgacagaaggaacatagagagagagagagagagagagaaagagacctgggaaagtaagaggatgagagaagaagaggtcaaagacagggatgatggaggaaggcaaaggagaagcaaag

SEQ ID NO: 40879 - DNA, 956 bp, Arabidopsis thaliana landsberg
cgccctggggctgttactgaggtatttcgttcgattttctttcttaactcaattttatgaactgtatttgtaacttgagaacctgctgatatcatagcatcctttacatccagtcatatatcctttttttttggtgtaggaaatgagggaactgatagagcttcaaaggatgctgtatacatttcttcatgttatagccacacacgatctatcttatgtattgcttacgccgaaaagtagggcgtatctagattctatgatgcaactggatatgaatactttttgtaatcacaaggatattaccgtacgtaaggtttgtaacactttccctttggttgcatattcatttaattttgatgatctttttcgcttacttattatccacttgttttactctttgccataaaaataggcgtgcgtgcagatatttataaagcttattaaagattggtgtgccgagccatatagcgaggagaaggtaggcttgttaaataatttttattaaccttcttttcttcatgaaagaaggacaaatgtcataatcaagaactatttttgctttcaggttccaggttttcagaatttcgtgatcgaagcgtttgcaacaaactgttgtttgtacagtgtgctagataaatccttcaaattgtcagtgatgcaaatacggtaagcttaagaaacttcaattctcttttcattttggagttttatctgtccgttgcagttgtataaacttctgaattgtttccacaactgactgggtttcttccttcgctatgcatcgcagcacgcattgttcggggaaatcatcacggctcagaaagtaatgtatgaaaaatttggtaatacgtttctcatgcatcttatgtcgaaaagtttcccatcagcacatattccacaagatttggcggagcagtattgccaaaagttgcaggtttgttaagttttactcttta

SEQ ID NO: 40880 - DNA, 639 bp, Arabidopsis thaliana landsberg
  unsure (1)..(639): unsure at all n locations
aggcttcctataccaaaatgcacatcaactacgtactctcaaccaataataactagacaagattatcatgttaataattcaacgtaaatcatattttagactaataatttcatggggtaaacttgtgattgtgttgtgtgattaaatttgcatgggtaaaatttgttatcttatagttcgttttcctactcaaattgtaaaatctggctttgatatatacaaaacataagcacactaattctttttaaaaactaaaaagaactaaaataaacaaaggaaaacacagttaggcaatgataagtgggttatttgagaattcgtaaaattattagcataatcataactattatgattaggactggcaatatatagttgtaaaaattggcagtaatagtggttagtggagcaagaccttagtaaagtttacaagtatcttagcatatttgttttggcctttctccatatctttctattaaattagagaaatgatggactacggtcgtgcctaagatacaataatttaatagatcatgtagttttgtaatatttgattatctgatnaagattatttaaacaagagatcaaattacaccgcaaatatttataaaagtagggtatatatatatatatatatatata

SEQ ID NO: 40881 - DNA, 482 bp, Arabidopsis thaliana landsberg
catacatagcacaccaagcaaaagaattccatttagatataatcaaaagagtcaaaccttgacggaattgtggacaagctgaatagctttgcgacaatcctcttcaaccttagtccaatccctaaatttgatgcaagcaaagaagccaaacatgaaccataaagtatttgggcattaggattgcctaatcagaagtatgtataaaatttgcttgacagaacaatactcactttcgcttcatgtggcaaagtgctcgattggtccaataagcaggaacatttggagacaaagctattgcctactcaattacacaaaaaaaaaatgataagaaaaccactacaattgaataagcctgaagtttcttgatgacttataacgatgagcacataaaagattcataaattccatcaaatgtctattctcgaattgtacactccatcaaaacctaatttggatgcaattaagttctgattcacaaacga

SEQ ID NO: 40882 - DNA, 610 bp, Arabidopsis thaliana landsberg
gatatggttacagatatagggatctcgcgtccatccttagccaacctaaccgtctcgaaatgttcaacgcgtcttccgtttttaatgctattaagtataatatcttcttcttgccgtcttgatgccggaatgagtatcaaaatagattttcctaccgcttccgcctccgtgtacccgaagatacgctcggcagcgcaattccaagtttttattgtaccgtctaaccctttgctaataatagcatcgtccgaagattctacaatagcggaaagaaatgcgtttcttacttcctgttcatggttttcagtaacgtcaattaaagcattatgagcaccatttaaaacaccttgttcattaaagatgggccgagagaatatctttaaatttttaaaggttccgtttggttgcttaatagtgactaaactattttcctgaggcttaccggtctttactgtcatcgccattgggcaattatctaacgcaatcggcgacccatcaggataaaaaatatccgaagaaccacaccatcgatcttttcctaattctggcgatctaccccaaataacggcacatgcaggattataataggtaataaatccgtctttatcac

SEQ ID NO: 40883 - DNA, 576 bp, Arabidopsis thaliana landsberg
tttccgccggtcaaatacaaatgatgagttttcactttttatttaattgacatcaccaaatcattttcaactttatgtttgacaacttagcttttttatttatatcttgttccaacttctaactgttaagtttcagcttattattaagtcagcaaaaaagaacaggaaaaagtctaagtccgaccattactttgaaatcgaaaattgctcacaaaacaaagaaagtcaagtgaattttcattaatttcccatctctttttgctaaagtggattttttctaaacctacatttgtatatgagtagcaaataatttttgtggaaatagagtattgttctatatatgtaagctctcatttatttccaaatccaagtaggtttatgagcatttagaacaaaacctagaaaacgtacaatgtatcattaaatttttccaaccttcaatacggacatacaagggtcgattatacaatgttgaaattaaattacgcagaatatttgaaaaaagaaaaaaaaaatgtaatgcatgggactgatggacaacgagaccgtttgcattaatatgtgtcacagacttaa

SEQ ID NO: 40884 - DNA, 590 bp, Arabidopsis thaliana landsberg
accttctcaaactctaaccctaacaacgacaatggtagattcttttcatcttcaggagcaagaaaccttggagccactaccacaacagacgcggcactccccacagaacgaagacaacaacattcacaatctctcggatttagagatacacagatgctcaaaatcttccatcgatcatgccgttcagggaattacatcgaatctctacacttactcgagaccatggtacgcaaaggttacaatcctgatgtgatactctgcactaagctcattaaagggttcttcactctaagaaacatccctaaagctgttagggttatggagattctcgagaaattcggacagcctgatgtttttgcttacaacgctctgattaatgggttttgtaagatgaatcgaatcgatgatgctacgagagttcttgataggatgagaagtaaagatttttcaccagataccgtgacttacaacataatgattggtagtttgtgtagtagaggtaaacttgatcttgctttgaaggttttaaatcagttgttaagtgataatggccaacctactgtcattacttacacgaatttgatcgaagc

SEQ ID NO: 40885 - DNA, 844 bp, Arabidopsis thaliana landsberg
  unsure (1)..(844): unsure at all n locations
acatatagattaacacactcgatcatgtgagtattcaaaactttatcaacgatcgcaaaattcattattgattatgtagaaaaatttacaaatacaacaaatttagccatcccactttgattgtcttcactgttaaaatctctatcctgtcttttatttccgcaaaagtaattattaattttcaccacatgatcatactttaaaatcattctatgttccccaatttcttccacctttatcgttcccttttcatatgttaattaaaataattggtattctcttatgcattgataattattgaagttgccacattaactcgtacttgatatatggagaagctcaaggagtctatgttaagagtaattatggcttatttttgggacaagtataaggaagtaagttctatgtaaatcaaacgtgtatatataggcaagacttttatcaacttagataaagttgctatagaagtaatttttttcaatgagtctttcgcatgtgattacacctaacgacctaaaagtatttaaatacagttagctaacagaaataacatattttgtatcaaatgtgtatgtattttatttatttttctacttttagccgcaatctcttttgtaaatttagtactatgtccgaccccaatctttaatataacaatttaaaaacctaatgaaactaatgatacaccttgcatgcgttacgcgtattcgtactgtttgcttataaatttgtaaaaaatattatacaaattntatcgacatttgtacttacttagtattatttctttttctcgttgagatacctttctagataaaataagtggaaatgggaagatataaataac

SEQ ID NO: 40886 - DNA, 171 bp, Arabidopsis thaliana landsberg
tggaatatatggacgattgtaattattactacatagagaaaattccacatattgtgtcagaatcatatgaaagtgggacttaacgataacaaattaaaaactaatgatgataaagaaatgttgtggcgccgcgtatgaattaggaatatattgataagtttcatggagata

SEQ ID NO: 40887 - DNA, 188 bp, Arabidopsis thaliana landsberg
cctaataaagggcacattgacgacattccctaatactgacctctctatgtctctctataaaagcacgtccctctaaaccctaatcacttgaactctcagtcaaatcctactagccgccacctttcataatttcaatccttgcttttcgtttgacgtttattcttctttagaacgctttcgaaaggcgc

SEQ ID NO: 40888 - DNA, 621 bp, Arabidopsis thaliana landsberg
  unsure (1)..(621): unsure at all n locations
acatataagaaaaggccataactatttgatttgtcaataatatccattatacgggattaagcatgaagcatctaaaaagttgagcaccatgacccaacctccttactaaatagagaagaagagttctaatttgggctacttttggtggtcatgaccacccgttctcaaatgaggaatccaacgtgtttcgtagccaaaaaaacgaaaaatatctacgatcaacagatgattaaactagacaaaataaacactagtgaacattttcatctacttgcaatacataaattagtttccaactactggtactagtgaacatttttaaatcatataacaccaaagtattgggagaaaacatagtataccaaaatgtgtcaatatccacaaaactttcttgatcattttgatggatttgtcttcgaaagttctcaaatctaaaactttcatgatatcagtttgcaaactgtaacgataactgatttaatttgatgaataacttgattgaaatttccactttcatgaatatntattactatgggtcctccaaacataatttcatgttaactggttatgaataatattcacatgagggaatttngatggtgaatatcaataaattagaat

SEQ ID NO: 40889 - DNA, 931 bp, Arabidopsis thaliana landsberg
cacaattccattatgatacttgagtaaaaatcacctgtcctttaatttggaaatctctctttcttacccatttattttctactttttttcattaaaattaaatttcaattatcaatcatcgttcaatttgataaagatttaacattttttgtcacagggctagtaaaagcaatctttacataattcatctttcttacatatatatattacctttttcttcattagtattctatttgattatgattattttgtcataaagctagtaaattaaacactcgatatgagaattatattacttcacgctaattaactcttaacacaacaagaactagtgcatattcaactttcaaagcatatactatatattgagaatatagaccacgaaagtcaatcaaaagacctaccagctctcatcaagttctttcttgaaatgattttgcagaatttccaacttaattaattcgacatgaatgtgaaaatgtgtgttgctcgttaagaaaattgaatagaagtacaatgaaaatgatgaggaatgggcaaaacacaaaagagtttcctttcgtaactacaattaattaatgcaaatctgagaaagggttcatggataatgactacacacatgattagtcattccccgtgggctctctgctttcatttactttattagtttcatcttctctaattatattgtcgcatatatgatgcagttcttttgtctaaattacgtaatatgatgtaattaattatcaaaataaatattcaaattgccgttggactaacctaatgtccaagattaagacttgaacataagaattttggaaaaactaaaccagttataacatatactgttaaattgccatttttgaacacaaccaaattataatatatactatttacagtttttttaattggaaagaacactgaatcttat

SEQ ID NO: 40890 - DNA, 469 bp, Arabidopsis thaliana landsberg
tatctatgatacaaatactagatcatatcatcatatgtgtacagatgtgagcgatttttgagcctttgttgttaaaaagtgtttcttgctttgaaacaaaccctaatatttttgatgatatctttgaaacgttggatatatcatatatccattatcgcgtacgagtacaacagtttattttgagaaattctgttgacaatgttgtgaatagtcttctactttttgtagtataatttcgttttgaatatataagaaaatcgaaaagtcaggtcaaaaactcaaagtgtgttaaatacaactcagaataaatgacaacgtgtgtgtgatagtggactgacgaagaaacgactcgtgggaagatcggttattgatgtgggggcaaattatttctatatggatatatgatgtagaaaaccaaccactggcgctgtgttttgggtagccaggattttatctcatattttaattt

SEQ ID NO: 40891 - DNA, 103 bp, Arabidopsis thaliana landsberg
atctacgtatgagacctccaccgggttctgaccagagactttttttgattcatgcgaggcttgaacgagaagctggatttacaaagcaacactggagtcatgc

SEQ ID NO: 40892 - DNA, 781 bp, Arabidopsis thaliana landsberg
  unsure (1)..(781): unsure at all n locations
atgtcctgtccacattatgaaagttttcaactctttgatgtataaagtttgatctctggtcgttaaaaagaaatatccttatactttgataatcggataaactcgtatagaatcatgccaatgatgccatataaaatacaattaggagttaggaaatacatttaaataaatatctaacggctgccggaaacttcttatcgacagtctttaaatagagtgcataaacttgttattatatgtaccgaacgttgaaggtttgctcgacaactccaaaacattataaaattttgtcagctaacttgccactaattatttcgatcgagtgaggagtcaccttcatattcttatctatatttttatatatataacagaaaatttataaattcttgtcaactaacttgccactaattattcgagtggagtccccttcatatattcatagatacatataactacaatttattatgtcagctaaccgttggtattagtatgagttaccaaaaaggcaaagattcgaatttatgacaagttctgtttattgatagacgaaagaaacaaaattgtccctatattcaagataaaaagaacgactttaattacatgtacgtatttgtatttgctggacgataataaacatacaaattcaattttgaggagttgaaaatattccctagcttcattccagataattatatgagtttttgtatatctactattgaattattacgtaaaattatgaatacgtgaagagaatgtnatacatactatgaaacagctagct

SEQ ID NO: 40893 - DNA, 860 bp, Arabidopsis thaliana landsberg
ggtcatcttcacccctaaatactctcaatatcagcctgatgaagcacaacaataccattaggatctatatttcctacaatcctgtgtactcttcgcagcaatcccaaaccctaacggaacatcagacatcgagaacacaacaacaccatctccaggaacaatactatcagtaatcctcgctaatccacctttcaagacatggttcccataaagaaacgacatctccgaagtgggtttaagccataccttgtgtttagcattcgccgccaagatattgagtgacataatcgtcagatggaaactaccggcgtgagtgtatttcccgatgcaggttccgaaggagactaggtttttcctggagatgtttgtggctcgcttcacgagggcttcgctgacgtagtagactctgtttttctggaggcggaagcagtagctgccgggtgtagattcgggtccttcgtctgatgggttctcgacgatcttcttgaggttgttgccgacgaatttgaagagcttctcgaagacgacggttgtctcggtctcgtctaaaggacgcatcttcggggaagaaagtgatgaataatggagaaagaagagaagctctctgtttctaagagggattgtgtttttttttagggttttagggatttaggaccaaacctaatgcggccgatgagttttgttatttcgactttggtcctttgttttaaaaatatctattgtcatttcaacctcgaaattattatttttgttaaatccaacccatgaataattcactttgaatatttggactttggaggataactgaaagttataacaaatttgatagttcatgtagtttattgaaaagatgtttagtt

SEQ ID NO: 40894 - DNA, 792 bp, Arabidopsis thaliana landsberg
gagtccattgtgttaaaatcttatggtttatctttgtttcaaattacagcaatgtgcttcgcttatgatgatttctaagacatatcaaagaaacggactttggggtttttcatattgctttccttgctaactatgaagcgtgagatgaaagcacctactactccactagagagtctccaaggtgacctcaaaggaaaacaagggtacgcttacatctctcttccttttcttctattgggtttcaatgttgaagttggattgcttttggcaccaaattttgcattcaactagacattctcaggttaataatgatgcaagctctttgtgacattttcataggaggacatctggccctgctagacgatctaccaaaggacaatggacacctgaagaggtgcgttccgttcctgtgtcttttttgttgtctatctgattcttccatgcttcatattatgtatcctggaacactgcctgagcttaatcagttgtctctgtaacaccctattgttgcttcgcacagttccatttaactagttgacattagctatcctttgcatctattgaagaattcgtctctatgaagttttctgttgtatcaattctgtttttctggatcaggacgaagtcttgtgtaaagctgttgagcgttttcaaggaaagaactggaagaagataggtaaatcgaatagcaaattctgatttcttcttgttttcccagtttgtttttccagcgtatgttaagatcatattaataataatctactttagctgccatgtttatttgtagtcttt

SEQ ID NO: 40895 - DNA, 1357 bp, Arabidopsis thaliana landsberg
acaactatacatggtgtatctctaaattctaaaactacatatatgattggttatgttgacagtaaacatgtaatttgcttaccgacgagaaatcatgataatatataattgcacatgtacatatatctatatctctatatttaataattttgaaaaattggacgtacctcaccagatacatgtttaattgataataaataaaaatttgacatgtgtcttcccagatttttgaacatccaactaatagcacatgtgcatgtaaccttcatcacaaacgaaatcgtgataattaaattcagaattcgaattaaactatactaaaccatagttaattagtaaatacttcaattattacacgatattttcatatataactcttgacatttctccagtttatttatcagcgactagtcgattacatcattagaatgcaaacataaaagatagcttgacaaaacgaatttcgacatccaatttacagttacaaatgatgtactgtatgttaatttcttaagaaagcaaaaaaaaaaaatgataataaattccatgtgcctactcaagtgtaggagtcagattccgacctatatgaaagaccttagcatgtgctacttcattcactagcaccacaaattcaactctctcttttttatccctttctaataaaggagaatagttctagtattatagacatgaaagttcataaaagttaaatcacataattgaacttgtgtgatatatcaaggtttttagtagtgacatataagtgaaaactctccattattgttagattatatatgtactgcacctagctataatttccactattggagaaaaatataaagatataaaaagtgtctacctgaattcagatatataaaccaatgaaacatttaagagttgaatgtctactcgaattatattagtataagttgttttcattgaaatcaggacatatatatatatatatatatatatatataataggggtaaaagaacaataataattttgtaatatgaataaatatcaatattaacgaataagaatataaaataggtacatttaatgattaaaggagagatattaattgttgaaaatatgaatcctatgttttgttttctaaacgatattgttaaaaaaagtctaatcatcatgagtcatgattaagtgaaccaaaacaagtttaaaatcttctgaaaacgacaaaacaacacataggaaaaaaagaagagaaagttaatttcaagggacttttaatttcaacttctttatatagcaaatatgaaagagtgataacttaccaaacaaacaaatttaaattttatttcatctttacacgaaaaaaaaaaagagaaaaaa

SEQ ID NO: 40896 - DNA, 467 bp, Arabidopsis thaliana landsberg
gttgatccataattcttttcgaacataaaatcatatacttaggccattttcaactgtcaaaactcgaatccgagaaccaaatttcaccattttccaaaaatgatgagtgtcgaccaaatggggtactactgtctaatcaggaactcgtgaacaaattttcaacctttttcaaataagacgagtgtcaaccaactttttccaaccaagagatattgggttgctacacaaatacttaatagccattgcatatttatgcatatgcaaatgcagggtcgtggcgtcagaaagaaacataggaccctcaacatatttaatattttgggagctatatttgactatttcatatagaaaataataataaaaaagtggtggttttatatcaaattgtaatttacgaaaaacttatgcttttgcgcaatgatttttgtaaagtatctactatgtttaagtgtttacattgattagta

SEQ ID NO: 40897 - DNA, 743 bp, Arabidopsis thaliana landsberg
cttcactccgaacaacccgaatagaccagatcgcaccgcaatgaagatgcattgctcagctatgctgcttcaagaatcttttttccgctatctttcatctgagctggctcagtagcttgctcttccaatgtttgtttcgtcttgccaagtttaagctctgagaacatctcagtcagtgaatctgcagtatctgaagtcgctggtaggacctgagaactttcactttcaaggtccatctctagttccagtaattcttcttcgatatcttcatcatcaatatctggatatggagctgattctgccgcattaacagaaaaaatctagctaaacacaaaagttgatgaagtaatcgtgtatgtatgtttaaacgacaaaacaccacttaccgagagctttttcgacttgcttctgtgattcaatagtttcctcaagttcttctagatagtcatgaacatcatctgcactgatcttgatgtccttcataaccctagctccagttttaattgcttctgagacctgccaaacacacatagatacttctaaaatccataattgatactattacatagacccaaacatggtcgttcgacctatggggtttctcagtgtttgaagtaccattttcgtagattcggaatccgctatagtgttcaacacttcttctactctgttcagaagtgacgtgcatttttctctgctctcagtcaccaccttcaattcccttgcatgccttagagcaactt

SEQ ID NO: 40898 - DNA, 749 bp, Arabidopsis thaliana landsberg
acttgataaactcatagactatatgattatgcacttgatgaatacttaaaagggatatgtaattacaaatctacgagtgcttgagcagagaaaaaggactgacaatccttttagcgtcgtgcgaactgaaaactttaagggagagatcgaaagaaagttttaggttttggatcttttattttttggtgaataacagattaatgttgattgtatattttattttaaaaatgatcaagctgtaaaagtaattcatgattctattatctataccattttcttattcttttctatgtgtttgtttaatttaccttttcgctatcatcatcagtcaataatgatcaatatcctcatctcgatctatctagcaacactttcttgtatagtttatcttcatttcttttggctagaacgtgttatataaaaataccaaacactctttttgtggatttatttgattatatataatcatgatatcatatataatcgatgtggaacactttttggagtagttttcgaaaactttgtaatttccatataccagtagagaagtacatgattagtcgcttcttatttcccaagtcgttcctccttaggcttgaaataaccaacattcgagaacctaaaccaataaccgccatatagttttattgtatatttgtatgaacttatatctttactatgtaagaacaatttgtagtagtatttataatttgagatactaattgtaaattttggacattcttttacaa

SEQ ID NO: 40899 - DNA, 608 bp, Arabidopsis thaliana landsberg
caccggcgaagtggccgtgggcgctatcattgccgggttgcctgctgacggccctggtttcggcgctgtttttgcggatgccaccggcaagctctatgcattccacaatagcacgggaagattctacaaaatagatccggtaagcagttcggccagctttatgtcgacctcgacgccctcgggcagcaacgacggcgcgaactgtgtgactgcaaccatttgcgatattgagctcacacagcctgatccgcaaatgcagacaacccaggtcggtacccctgcttcgtttacggtaactgcagccggtaccggcacgcttatttaccagtggcaggacagcaccgatgggggggcgacatggaccaatctggtcccgggcggagcaaccgatgccaacgggacctattgcggagctgccactgattcactgtcgcttacgccatgcaccaccgcgagggatggataccaataccgtgtgatcgtttacagcgaaagtgacatttggacgctgacctacgcaataggtacgctctacgtgaagccactgcctgtacacttgttcgttcagcgaagaagggtaggaaacagcgcaaagagcattttcatgc

SEQ ID NO: 40900 - DNA, 209 bp, Arabidopsis thaliana landsberg
aagttgttgctgtttactatttgcgcatttctttcttgctcaaaggaagcagacaaaaattctcctattgattcatacatggattccttatgctgagtttttatcagccctttcacgtaagtgcttctcaaattgaaactgaacagattctcgactttttcttcttagcctaatacttattcagaaaagcctatgtgttaaactaccta

SEQ ID NO: 40901 - DNA, 888 bp, Arabidopsis thaliana landsberg
  unsure (1)..(888): unsure at all n locations
caaaaactcccaaactctcttcattgctcccacttctcttctcttccatcttgttttctacattgttggctttcgcatgttgtcttttcttgctcttcttagtatgctcgtcatttttcttgcgtttgtggcttgtagacgaaccctccatcgataaagaaacgtgagatgatgagatttggagtgaattgagaattaaatttataaatggccaatgatgaaaaagtgggaggggaggagagggagtcacgccttcttacccgtatgtatctgtcatttagcattttaaaagcaaaccaaccaaatccttttgtgttgttttcgtgttttccttcttttacgttctcatttctctctctcccaaccacacaagcaaattataaaacgtattgagatatatatcaaggatgaggtggacattaagaaacaaatggctatttttagtttctttaatttcactcactgcccttcaaacactgatcttcacttatgataactaaatggaaatagaacacatattattctcagttaatatgacaattaagtatcttaaaagcaatttatgttgttctaaacccttgttaaaaaatattgagttgctccatatactataacaattgtgagcttcaatcatgaaaagagaatnnnnnnnnnnnnnnnnnnnnnttggaattcacataattttcatacattattttataataatctaatcgttttatgacctaaagatatagcttcacttctagtattggagcgtgtcttacgtctttacatgtcgagaacgtggaaaatgcacaaaaagaagatgcaaaacagcgcattggacatgtactccagagatctgacatgtgttgaataccaaattggatgatctttttttttgaacat

SEQ ID NO: 40902 - DNA, 739 bp, Arabidopsis thaliana landsberg
aggtcgaattttaacccaaagattacactacaatggtatttaatctatgagagctaaaaaaaatctcacaaaactttacaaaattaactcaaaagaaaagattgttctgtttgggtttctaaattaactaagacattggtaaataccgtaaattgtaatcgaataaaagaaagcaacaaaaatagttaacaattggtacataagaattataggcattgtacgtagaaaatttcacaaggactcaaatcacaattatcaatttaacattctttcaaaaaatcaagttgtctagctaaatacctaagattgtaaactgcaattcaaattcaagaaattaaaaatggacatatataggaagttatgggcatgtatgtgatctcgtacatcccctagagcgaggtctagaccatcatttggaaagctaaccccttccaacaccaatcgaacacatgacttctaaaatctctacgtttttggtaatcaaggggatttaccactagaacaactcgtcgttgacggttaattctaccaggaatgctagatagaattagatgcccaaatataaagtgccaagttgacggttcttgggaatgtaaactctacttctaggttatgttggatatgctttcaggaggaatctatgaccctattggtaggatttaagtcccatcgcaaaaatattactctgctcattttcttgaatttcttatatgggctatgaagaccattctatcaagtg

SEQ ID NO: 40903 - DNA, 499 bp, Arabidopsis thaliana landsberg
gaatatcatatcaaggttgataaacaatatttttcatacattaataagactacaaaacccttttgtacatgccaatatattgaaaaaagcaacattttatcatggaaaaataaaatatcatcatatactacgtacatgcacatggattgattcaaaagctagcatctcaatggaaaggtgatgatccattatggtttgaggccaaaccagaggacctgaacggccacaaatgccacaatggatttttccggctattatttcggtcttgtggaagttctttgcggcagacggggcaagtattacgctggactaaccacgggagtatacattcagaatggtagatatgtttacgcggcatttttcttgcatctgatccgatttcaaactggtcttggcaaaccggacaatagggatctaaaccaaaatgcttctgcctgattttgatcttttgcaatgagttaatcgcggctagtagaactgtaggaggacaacgacggtc

SEQ ID NO: 40904 - DNA, 884 bp, Arabidopsis thaliana landsberg
  unsure (1)..(884): unsure at all n locations
gtcacgttaccaggaaccgttatacgcataatgaagaatctccgagtatgcaaagattgtcacaaagtaacgaatctcatatcttagatatacaagagggatattgtaatgagagataggacaaggttccatcatttcagagatgggaaatgcagttgtggggactactggcaaaatttgggagaggaaataaaacttttattgcttaagaaaatggatccactggacattataagtttaaagtacaatgttttcaaccgatgctgagaannnnnnnnnnnnnnnnnnnnnntcccggctctagcttgacatccccaagctgagaattaaaaatgacaaggaagagttataaacttttgagtctataagttttgtaaagaggaaagacttaagtgtaaactgatatacctttgcattttccacgcacacaaagtctctgtaacaagcctccatctgagtatgcgggttccacaagaccgcatccgaccaactgcatttttcaaaaacaagtagtactcatgaggcacagaacgaaacatagaccctgtagaaagccatataagtgtctcagtaaatgtactttgtgtttttgatgattattttatcacccaagccattatcaaactgcaattcattgggagcatcaagatagacggtatccacaaatccaggaaaagtgactgcatccctgaaatgttagaaattaaggagttacaaccatgaaacaagtgaaataaaataaataagatctgtagttaatggagaaaaacaaataccaaaccaacctgtcttctttaccctctattgggttcttagggactggatccttattgagagttttacaaccctttagacctctcacggaggcccccgcaaaaaaagcc

SEQ ID NO: 40905 - DNA, 486 bp, Arabidopsis thaliana landsberg
gcccatgacgacgtcaccaacgggcgcatgctcggttatgtggaaggcagctttggcccggtggtggcggcgcgtgccgcggattcccgcgccggggcgccgaatacggagtacacgccgctggtcgcgggttcgctgaactttctgcgggcgcagacggtaagtggaaccgtgagttacgtgcagacccgccccaacggcactaaggctgaagagatgaccgtcagaatttccagcgcacctctgcactggaagattgacacctacctggcctggtcaggatgcaatatcgtagcgaccgtgccttgtgaaggtgaagtgtacggccatgacggtcaattggtgggcaccatcacagagctgaccgtgggggccatgctgccgttcggtgccaaggggaataatccggatgtaggctggttactttcattcggcggcataagcgctgcgggcggcgattttttttcatcgtcgctgctgggaagc

SEQ ID NO: 40906 - DNA, 689 bp, Arabidopsis thaliana landsberg
catcaatgtacctttctcagttccgactttggctctgcttcatcatcacaaccttggtctcattgtcatcttcaacaagatggtatgatgatcatatctcattgaaagagattcacgcagaagaaactttccattttccaaaaaactttctctttggcacagcttcttctgcttaccaggttcttagttcttctttcttttttacttcagtcctcaagtataatacaatcttgtgttttaacattagttttgttgtgtgctcttatggtatattcagtatgaaggagcttacttaactgacggcaaaaccctaagcaactgggacgttttcacaaacatctctggtaagatctcatgaaaccattttgtaaattgtgatttaagctataacaaaaaattcaaaacttttagggtttttgttaccattcttgtctctcaagtcaccataagaaactggcgtatacctttcttgatatatctttgtacaggaaaaattgcggatggaagccatgggaaagtcgctgttgatcattaccatcgatatccggtaactaactgtaaatctatacatcaaatatcaattttcgatacaaatctcacagtaataagtgtctagcaagaaacaagttgtaattcttacgttaacagggagatttggatctgatggaagatcttggagttaatagcta

SEQ ID NO: 40907 - DNA, 112 bp, Arabidopsis thaliana landsberg
gtgtcccaaatattgccaccaagaaacagaccaatttccggtgaaccattttctccatcgtagataccgtacatgaaactagcttttatgagactatttctttgcctcttcc

SEQ ID NO: 40908 - DNA, 974 bp, Arabidopsis thaliana landsberg
gggttcaaagacagagaaaacagctttatcactctaccaaaatgcattttcctctggcatcaacagaagcaacagtccagcaaaaaagttcatagcctgcaaattttacaggatcattgttagcttagccttgaaacaattgtaacaactattaatgctattgggtactcaaatatgcttttcctagcccaagtcacctgacagtagccaacagatgggttgtgacaagcataagctagaagtatccgccttaacgaatctcgaccattttcattcaaagcaggatggcctgggaatgtccgaggtatatcctgttatagatcatgatggcaataagaaaacgttccagattcaaaagactgagtcatgaccaaagtataaacatgcatttatctaatcaaaaccttttcaatttgttttttccactttctttggacatcagatgagttttcatcagagttagttatttgagccaacaaatcctgatagtatctctcaactcttcttgcttttacacctacgaaggcttgccaaacctgtaaatgcaaaagttaggcaagaaaagtgaaaatttattccaattagataagttagtatgaactttacctctcctctaagatcctttggcactcccaaacgaacaagtacctcaagttcttcataccaagggaaaaatggctctggagaaacactaccctgagcttcgttttcttcctttatcgaatgggatctacttgtggaagtctcactgtcacggtcattttccccagattcttcaatggaagacagcgatccttttatcgatgaagcatggtcatctactatattcttctgaccatttttagtagactttacgttcttaacacgagaacacatcatatcctctatggacgcaagacaaggtctaatatgagcccattctataactgaacgaggagccttggtttctttttgtgctttttcttcatgtcccg

SEQ ID NO: 40909 - DNA, 116 bp, Arabidopsis thaliana landsberg
acatatgtagatgacttggcacgagcatgagtagataattcaatttcacttgaatgtagataccttcaccacaaaatcatacattagtgcgagaacttttcaggcttttttgccct

SEQ ID NO: 40910 - DNA, 302 bp, Arabidopsis thaliana landsberg
caacccactgcttatttgcctcgattccatttcttttaaaagctagattccttttgttaatattctgttaactctgaaacaagctctacgtaagtggctaatctggtttgatgtgattttgaagatcctatcaagtgatgatgaagacattaaagcggaagaagaagaggtcatacgactacgggcagaacaacttggatccataacagcagctgatgctgggttagacgatgatagtgaagaagatagcgacagagaattaaccatggaggtgggtcatgggtgttacaaagtactatcat

SEQ ID NO: 40911 - DNA, 880 bp, Arabidopsis thaliana landsberg
attccctcaattgtccacttcaaatgcggttcaccggtgattttcgactttgctaattttgttacataaccaactgcacattgatacagttgaccaactactcaaagcaccacattatgatataatctattctgtaactatgttttcttagactcatttgaattattaggtttagataaacataataaagaaacaaatttaattagcacttcgacaaccgacatgtttagattaggtcaatgatattcgttgaagcgaggttgaacatattttcttcacgaggctaacaacgaacaatcaacgtatttcctacaaaagctaaataaaggttccgatcgactttattctcctaacatgttgaatgtcgataaatagttaaaacatatccaatacgaccccacacggttccatatagtttggtaatatgcatataggtcacccatcgtggacatgtgctctcgtttttttaatggatgcgaatgcaaatgactgcaaaagttaatcttgttataacgttaaaacctaatacatggagtaaccatgcaaaaaaaaataaaaatcgtgcgtagattggacataaaaaatttgatatatttgtttcgcagatgatacttttattttctcgtttttcttaacaaggtaaacttgttttctctgatttagtacaaaatttataacgatgctatcatatatgtatttgaatattattatttgttaacgatcattatactttttatattttctgatggtattgactaagaaagtcattggataaggtagttaggaattccatctttagtggagattatcgaaactatgaacttttagccatacaagaaaacgaattttgttttagggaaagatgagagtgaagagggat

SEQ ID NO: 40912 - DNA, 237 bp, Arabidopsis thaliana landsberg
tgtaaataacgctcaatcgcaagacaatgctccttaaatttatatctcttatatagatcatccattagatgcttgtcgattctctttgctgcctcggttacaagatgttcaagtgcatctgtttcaccatacccgagacctcctcgcctagttgttgtcccagaggcagctgctgcttctgaagctgcatcagcccacccgtggtcatcacagcaaacacgaagaaagtttatagat

SEQ ID NO: 40913 - DNA, 1615 bp, Arabidopsis thaliana landsberg
tgtttagactagatacatgcgacgcgtgttttttattatatttttggtaaatatttaattagaccattaataatcattgaagtattatattttatatatcagaattgtaataatatacatttaatgatatataataaaactatagcatctttaatatcttaaatgttgaaattacatatgagaccattattttaattaatataaatacgcagttcagaaaaactttagtagggtaaatctagaaaatgaattgattatcacaacaataatctataatttctatattgtgatagattttttttgttaatatataagatgttttaatatgaatagttaataatttttagtttttctttgtaatattcatgatagttatatatctaggggtgtgaaaatggataacttaattcaactaaactcatttttgttttgatgaaatgttaaatttatctgataaaaagaaagagagtttatgaacaaaagcatggaaactatttaagaaaaagagtaagaactaaaacaagattatgtgattcccctagcttgaaaccatttttggaaaagtagtctcaaattcagagagtctcgatagcgaagtgaaactacgcatcgtcaaaccgtttttgtcaattatactaatcaattgagtcaccatacgttgagtagctccatgccgccggtagtttcactccctccacaaaaagtaaattgttgcttggaatgctaaacggagaaggatgtggctaagctagtctctgtttttattgaactattgtaatgtttgttcccaatccgggtcgggttgagcgtctagcaaattcccgacaatgtcgctccaaattgtgaacgtgtatcggcgcacgaagaataagtgatcccatgactcatctagttctcggcaaaagaggcatggttgattacctaatgggtttagagttcatgatttaacgcgattcatttaacaactaagttggattaacccaaaaccccatttaatttgatgggttaaatgattaaatagattgacgcattaaagtaataattaacataaaaataatgacaatgcatcttcatcatcattaacactaccattatcatcatacttttaagatcataacattatcatcatcactatcaacataacatatacttttgggcgagaaaatatatgttcatgttgtttgaggatttgcaattttgatgaaaaaaattatattcacgatttttgtgaaaaagttacggatttaagtttttcaccgaaaattatgaaatgatgatgatgatggcaatataatgacgactatgatatgttgatatgatgatgttgttatgaatatgcaggtatgacgataatgatgattatattgggttgatgataatgaagaaattgatgggttagtggttaactcatgaacaattatttatcaactcatttagtggtgcgttgatccattttgatatctccggtcatgtcattgattaaaagtaaatatttgtattttccatttatgttacttgattaagagtctatgagaaagaacaaattcatatcgttgacacaacaaaaaaaataattttaattggaaaaatggctatggactcacatttaattttt

SEQ ID NO: 40914 - DNA, 1628 bp, Arabidopsis thaliana landsberg
ttttttttccccttcccggggtacaaaaagaatgaaaaacattgcaaatagttcgggcaaagggtccaccctccacacatttgtctgcacatctatccaatattcattcataggttcaaccacaactttatctactacatatatattttttattttattgaacgaatttatattcgttttccatttctgtcatatatcatagtagatgttgatagttgggtaatggagcaagtgaaagattgatggttggtagaccatagattcatgcattcataccataaggtatactgatggtgattgggtaaatttttgagtcagctattacaattgaaaagttcatcaaatgacaaaactattacaacttagatctttgacagccaaaagaaaaaaaaaaaaaaaaagagaaaaaaaaaacctaaattgttgttagaaattagaagtcagaagtaagaagactcccataggaatacagttctggcaaccaatttcttagttctttattgggcattcatatcttagttgggcctgactcatatatattttgaactttttgtacgcaattgtatctaacactatagtcttacattgttcatatatttaatgttttatattgattgctacctatatattttgatatgatgtagatccaactatttctaggttgaattgtcttttcgaacagattttgtttccggattcaccataaaaaaaaaaaaaaacttatgtgacagaaagtactatagaaagaatcgtgtttacaacaataaagagacttgacccaaacaaaaaacgtttacaacaataaagagttgaacaataatacggtacgattgtgtatgttgaatcatctcctccacttggacgtgtccatttgacaacggaaaaaagtgtggccgtgttatctttctttgtaacgtttacagtttcaattgtttagtttgatcaaataattaacttgtgaattttatggatgcaatatcttgaaaactaggaaatcatatctgatcatcctgctataaaaaaaaaaatacatgcattttaatattcatggtttcacatgaatacttcggtcatccatttttcaattacacgagtgtaaatctgtaatatcaatattcatttataattataacgggttgtgatttgtgaaattgtgggtatagataaaacttcaaaacctattgaaatgaatatctatatacttggaatagtagtagacacattttgtaatgagtaacttaagcacaccggttctcactcacactcgtctaatggagaaaaatggtatattatatacctcatataggaacatgatcatatgatttaggagtcataagcatgagattaacaagatattttggtccacattaggaatctactaaaggaactattttcttataacctaaaaatcttggtttggtaaaaagaacaaccttagattatttggtcttttatcgattcatgtaattgcgtatcaaatgattaaaatctaatgcatcctactcaaacacgtcatttaagaaaccctatatagtacaaacacgatccaatctccaaattaacccatagtatatcatagacgagcataatatttttggtcaaatataaaattagatgcactagttccc

SEQ ID NO: 40915 - DNA, 515 bp, Arabidopsis thaliana landsberg
ttccaccttgaagatactcatagacaagactccacccctctggacatgctccaattagcgtaatgatatttggatgcctcattttacttaggacatcaacctgcaatgccgcaagaataagtcaaagctcctccacagcgaacactataaaatcaaaactacagtagaactgtgtttcaaagtcccctttttcgtagaggcagcagtttgtgcacaataaaccagtaaacaatgatgatgaaactaaacaagaaatttcactaataatatgtcaagaaaatacctcctgttgatattctacagggccttgcgaactgttaggattcaacatttttatagccacctgagtatgacgcagtaaaccaacgtagatgctttcatatccaccttccccaatctttagggtcgaatcaaagtgattagttgctttctcaatctcggaaaatgagaaattcgtgaagtactgaggcaactgtagggttgaggtttttgcgtgactccttaactcctcaagc

SEQ ID NO: 40916 - DNA, 561 bp, Arabidopsis thaliana landsberg
tgaaatccaagaggcagaaaactttcttggttcatgtctttcgtctgaagtgctgggcctcgagtgaaaactatggcgtgattttgattctcaggctttccctctccaatgttaggtggtccaggaagtttgacacggtaaatttcctagattatcaaaatcaagtttggtcatcgactgttactatgattttacagttcaacttgtacatcaaattatcaagcattgtaggaaagttattgatacctgatcgaaaccgttaacagcttttaccaatatagagtagtaaaccttctttggaacatccaacacgatttcttccctctcctcaacgtatgcaacacggagagatggatacctaagtgcaacagtcatgtaacagtgctttagggaagcatgtacaactttggctactaaatctaactgagatcatgtacaactttaaaagcttactttatcatcaggtcaagtatatcctgcgcgtgaggatccccagatgattgttgggctccaaacatttgtgaagaaacaacatacgtgaatttcatatttgccaatgca

SEQ ID NO: 40917 - DNA, 206 bp, Arabidopsis thaliana landsberg
  unsure (1)..(206): unsure at all n locations
acgacgcccgnnnnnnnnnnnnnnnnnnnnnnnnnnnnnnnnnnnnnnnnnnnnnnnnnnnnnnnnnnnnnnnnnnnngcgagcgtacggacgacgcgccaatccgatgacgtggacacgtttacttcaggcgagcgggaaggacgcacgaggcgggcaggtcaannnnnnnnnnnnnnnnnnnaccgggattgggccgggcgtgc

SEQ ID NO: 40918 - DNA, 657 bp, Arabidopsis thaliana landsberg
  unsure (1)..(657): unsure at all n locations
gcttgacaacaatgagatgatgggtaaggagatagttaaagaggcgtttaggttatttgatgagaatcaggatgggtttatagatgaaaatgagttaaaacatgtgttgagtttgttaggatacgatgagtgtacaaagatggagtgtaggaagatggttaaggtttatgatgagaatagagatggaaaaattgatttttatgagtttgtgaagcttatagagaagagcttttcgtgaagtagattggaataataataataataataataatagttatgttgttggctaattatacgacttgtctaatatatttcttcttctttagtgggtcgtcctctaatgaactttattttcctctaataaacttatttacgttgatatattcatgcttctctgaatttccaagaaagtgataatatataacaacgtaaatttaaatttgtgatgaattttgcatggtgatttccagttaggtttggatatcgtctttatctataatattgaagggaaaaaagtacggaccataatcgaacagataaacttaattttaaaaaaactacaattaaaaatagttccttgaattcacgagttctctctagtagactntgataagagtctttgatggatagaatttgtatttactttcatacttaata

SEQ ID NO: 40919 - DNA, 444 bp, Arabidopsis thaliana landsberg
gactcagatcctcaagagcttgccagagataataaaggtcatactatggttcaaatgcaaggttccctatgtttcttatagtttccttacttcatttagtttggatattaacaccaacgctcaatgcctacccagtatagaatagagatgacattatgagagcaggtaaacaaaacccttcttgaaatttctagatctcgatataaccaccagctgtaaggtctccctaacttctagaaatcccaacataaatcattagatttaaatatgtacattttcctaaacatcatccataatatagaactcaggaaatgacagaaacttttctgctatgcaccatcaatttgtgggctgtcttagaaattacttttccctaacagtgaactttagagaaaaaaagataagagagaccttcacttcatccgccattagtttgttatttgt

SEQ ID NO: 40920 - DNA, 859 bp, Arabidopsis thaliana landsberg
attctcggagtatttgcagacatttatgaagttcgactatttctttataatctttccgcaaatgcttgtgatacttggcccttgggttttaagtcttctaatattatgatggaaatgtgttttggttcttaatacaaattatctaatgcctaatctactaatcaaaagagctacagaaacttctaaaggttaaacgacaataatatatctataagttcttctgcttctccaatctccctttatacgccatatctctttaacgctttgcttaaactcggcattacattgtaggcatggtaagatcttctgagttcaataatggaaccaacctgtacacaaacaatagagattattaacacaacgacatcaatactgctaaactgaatgatattgatacgtggaaagaacacttacaatgatcaaaacagatgtaaatccgatagaaaagccttgattgatgctgcgtagatagtggtcaagtacagtagaagctgttgccaaaaagctcaacagaaggccacctgcatcaaaccaaatgaaatggtttttagagattatacttgtaccatatacgcaatatatctaaaatgaaacagcttaacttaccccaaaacctagttgatgcttgtatcttcgttaagtactcgattgtggctttcccaggctttatgttcggtattctcgcccccattttgtttaaataatccgctatttcctttggcaagttggcctacataacaaaacaagaaacccggtaaatgtaatgtttaatgttcattgggagactgaaattcagactgagaaaaagtgtaatggatttactcacaatgtcaaatatgttgaagagaaagacgaaaac

SEQ ID NO: 40921 - DNA, 812 bp, Arabidopsis thaliana landsberg
ttttgatgtcggtgagagctatgtgtatatatatatatatatatatgtgattgttgtaaggagaaagagaggttgatatctgacccctttccgagcacagaatcctctaaagggaaggaagaactgatgcgcctcttcttggttgtcatgtggtgcttctgtgttttctcctgccccaaatcctgtttcaagagttttcattagattgatggattgataacaatgatgatgatgatgatgatgccattacgtactcagtttggtttgaacatggagaaggatacagtttggagaatcgatgatgatattatcaacagcccatttcaaagcgtgttggctgttcttatctttatcaatggctatggcggtaactgctttgctgtcttttcctttgagtcttcttgcagccattgtttctcagccctcgagatgattgctggaaacttttgcttctggagaaactagaaagacattgtggtacggtctttcaattaccctcagaaggaggaaataaggaggccgaatgataatgaaaatgataacaaggaattaagaagagaagaggagaggagagctgttttgtttgttgagaaaatttaaacttataatggttttggcactttgctaaaattagaaggtttttcttttctccaacaatctaaacagtcataacgaacagagaggcagacaaaaagaggatttttttaattttagttgacgacttatctttaaaggatattccatatcatatcttgtagacaaaaagaggattttttatttttagatttgtgtaatggcatcatatattgata

SEQ ID NO: 40922 - DNA, 756 bp, Arabidopsis thaliana landsberg
cgactaaacatattatcatttattacatacataggatttgattagtaacgtacgtttaaaacttcaaaaccattctcatttatgttatgtgttaacatatattatatgcttggttggtaataaaaatcaatattagtgatattcatatatgattaccaaatatatgattgaatttgaagccttcatatcttagtaaaaattttaactatgcattaatcattataatagaatttttcacttcaaatattaatattaatcatatcaaaacaagaattttctgtaaattccaaaactttttggttaccagaaaaagacaatgaaaagaagaagaaaaactatttggttgttttttttccaacgaaatatttgttaaattcctcgaatcatacctataatgaagcccgtaaaacttataataggcctatttctctaaggcccatcagcatcaacacttggtttggagcaaaggctttctctctcagctcaatcccagttttagctatgcgagtattcaaatgacacgaaatttttcgataacacatctttaatttcttttactacaactagtatttttattttattacagttatactcataaacgagtgcctcttaagctctttttatttcttctcttattaaagggcatatattccaaaatctagtaaataagattacacttatacgtacatccaccagccttgcacagttacactattaaagaatatcaaaacaagctcaaatattatcaaataaaga

SEQ ID NO: 40923 - DNA, 211 bp, Arabidopsis thaliana landsberg
ccccccccactccctctcccccccccccctttcccccaccccccccccccccccttccccccccccccccccccttcccccgcgttacggcgccccaaccaaccccccccctctccctccccccccccccccccccccccctccctccttcccctccctccccccccccccccccccctccccccccctccccctcttcccccctcccccc

SEQ ID NO: 40924 - DNA, 544 bp, Arabidopsis thaliana landsberg
agtggggcgaatctgaatctctggtgcaaaccggaggtctgcgatgcgatcattttatttcatctacggacggattttgatggagacggtctgcggcggctggcgcggcagacgaaggatgccgctcaggcgcgccgactgctggcgctggcgtcgatctacgatggaggctcgcgttccgatgccgcccgcctcggtaacgtcacgctgcagattgtccgtgactgggtcatgcggttcaacgaacgcggtccccaaggtctgatcaatggcaaggctcccggcccacaatcgcggttgaacgatcagcagcgtgcggccctggcgcaggccatcgagcgtgggccgacaccctatctcgacggcgtcgttcgctggcgtctgtgcgatctggcgcaatggctgtgggaggagtttcgcgtttcggtgagcgagcagacgctcagccgcgaagtccgggccatgggctatcgcaagctcgctgttcggtccaaacatcacgcgcaagaccctcaagccattgagggttttaaaaaagcttccc

SEQ ID NO: 40925 - DNA, 997 bp, Arabidopsis thaliana landsberg
tgatttacactccctaaggccatatttctcgagggccggtgttttgtatcaaccataaatactttattttttagggactttttttttcaaaaactaaaatttcctttttctctaccttaatcaaatcggggatatgaaattttaccgcactttcctttttcaaaacaaaaacactatacattgaaattttacagtactttaaataaaaacttaagaaaatataaaaatcctcgttcaagttgttgattacaaatttgtccatagactatatgtgaatcatcgagtttcaaaggtgtaaatgtggtatagatattagcccatatgttaggcggagttaaatgatattatggacaacaaaaacaaggaaaacgggataactcgtaagtgataagggagtatgtatctggaccattatctaattcgtcatttggtacagttgtcactgaatcagccacgagttcaacgtgtgcgtaataaagagttctaaaatcaaatttcattatttgatcatatagtgtaaccacttccacgactctatgtaacacttctaattaaaatatcatattaatgaatttttaatgccgacaaaacaaaaaatttgcaaaacaagagccgagaggtttgaccattagaacccatttcatatttatcatatgcaaatcctggagtactctttgaccattaaaatgtcaacgaatccttcaagtagttagttgccttttcactacaaacaaactacaaagaccataaagactaatcccctctctatatatatcattcctcttaatacgacaatccttaacttttccagcttcaaaaaaaaaaaagtctcgatctctatgaaaaatatgggaagatctctaatcaattcttgttttccgataatccgtagacgccaaggaatagtcacgcttgttttctttgagcatgtatcaacaaaaaccctatgtggcttcaagaacatgttgctggagaaatcatgtttgagttttctgat

SEQ ID NO: 40926 - DNA, 524 bp, Arabidopsis thaliana landsberg
caaaaaaaataatatatatatatatatatatgtagttacagctttaaattatattaaaatcattaattgacaatggatagatatttagaaccagaatataaaatggttttatttaatcttaaaacatgcagctaaaaaggtcagaacatttaatattaccttctacattttgtttttatgtaaacattaccaatttaccatatactttccttgtacatatttagctaagaaattgtggactcgaaattgtattttgattttagcaaattatttttttttctctcttgattgaattaaagtttacatttttttcttataatcacttgtgtgataccactattaagtcaaaaccagattttgtttttcaactgaaaattacttatatattttttattctaataatttggagagcatgatgatcgtctctgtccgatctcttcaactactgcttcttttagtgatgttactggtttgccgacgctatcactttacctcctcaaaagttttccatgtatgctcttgct

SEQ ID NO: 40927 - DNA, 363 bp, Arabidopsis thaliana landsberg
cggagcgtgtaccgttggccctgctcgtgggggtaaccgcgtttcgtcttcagcccgttgacgatgtgcctgggctggagtctgatgtcggggcgtccgatcactctccgtgacatcgctcagtgtgacgccgacccgggaccgggccgccggttccaggaccaccgtcacccggtcgatatgccggtgacgcttacgggatgctacgttgcgctccggtgacgcgggctcgagatccgccttccgcttgactacgtatatgcgtagcttagtccgtacttgcgtagttcgcaagattcgtgcttgcatgtgccctatgacaaacaccgcgctgtttggccttcgtgtgctcgacctggccac

SEQ ID NO: 40928 - DNA, 535 bp, Arabidopsis thaliana landsberg
  unsure (1)..(535): unsure at all n locations
acgtttgatttgaaactgcctttgagatggttacgtttgcttcaaggccttatatattccttgaggtgggtgaaataaaacgtactcaacttggacttcatttccaatcaaatttcctgtaatattttatacgttaatatatgtgtttatatatatgtaaatgtatatatcattcaaaccaaaaaaaaaaacactattgtatatatctggtataacaattgtttttcgtgttcagatcttgtgtgttatggaaaatagatctataggtgtgttttgatttcatctttcctacacattaaaagagaagtccttattaaaaaaatgtatagcaaatttgtatgaaagatgattactttttagccagttaatctcatcgtgattctatatactttcgttttgttttcattacataagatttctagagttaatttcaaagtttgaaatattcttacaagaaaaatcaatcatttagattagtgcacactaacacttganatactattacgagatatacatattntaattaatggtttta

SEQ ID NO: 40929 - DNA, 186 bp, Arabidopsis thaliana landsberg
cactagatttcgtggtaattgacgagcccgcttattacctgtttttgttgccctgattaacgatctagcggcgtttaacattcaccgctaatattcacacattcttcaacgttggcatttttatggtctcgctccggcctggatataactcctcctgtgagctggtgtcactgctctaccatatga

SEQ ID NO: 40930 - DNA, 117 bp, Arabidopsis thaliana landsberg
cataaattatatatatatgagcatatgtgaacgcaccactataaaacaacaacattttctaaaatggactactatatggcactcactcctttgtacggcctcttcgaacccctatat

SEQ ID NO: 40931 - DNA, 433 bp, Arabidopsis thaliana landsberg
tacagcatcaacgtgcccatttgtttcttcagcacggatcgaagacgaaagaagagcggtttcgaactctaatgacattctcgaaaccggaacactcgattctacccgcaccggcggataccaggggctttccggcgcacgtacgcgttgcggtgcccgcggtgccctctctttcgctggttttttgagattcaaaacagtttcgatcgtcagggtcccttttctccgcatttcttccagttcgttgtgctttgaccggagaataccgtatgcggctcgtgacactcccgatgcttccaggatttttccgagagtctgatcatcggttccgtactccgtcgcttcactcacgcgatccaaaaattccagtatttccccaggagcggtattctttagggttgtctgatagtttggccacggatgttcctcttta

SEQ ID NO: 40932 - DNA, 715 bp, Arabidopsis thaliana landsberg
atctgctcgtcacacatcctagtaacggtggctgctgcccttaaacaatatcaccacaagtgttcaagtaagagtgaccaccatttcttacaaaccaaaagaggccaatatgaatatacctagttcaagaatcagatcaacttacaatcttttcgatgaatatatcggcatcattcttatctgaaacacgcaaccttctcaacatttactacccactgagcttttggtgcagaaaatatcaagctggctcctgatactaatcttaacgttctctgactaagaaaataagatatcgctttcgactgccagatattccatcttaaaagctcaataggctgttgtcccaaactaagcaaaaaaaggaatcaaattaagctcatcaacaagtacaccaagattattgcaatacttagaaagccaaacataccccaagaaagatgcatcattgtcttctgtatgtagggactctttaggctctatgtgcttagaaaggatcttcaaaccagtttcaagtgctgatacacaggacacaacagattgcctcttacagagtttcccatcaattatctctgtaataccgtcacctgattccaccgcagcaactagaatagcttggagttgtttatccttcaatgacgagttatacatcaaatgctctaagacaaactctctcccctttgaaagattatctgatgataaatgctgcaaaccctga

SEQ ID NO: 40933 - DNA, 398 bp, Arabidopsis thaliana landsberg
aattgcttatttggagtattaaacagattcttaagaattcgaataaaccaccttgctccatgaagctgtagtctcttagcactatcacggaaacgttctgactcaaacagagagttcggtcttggagatcaagataccatcactatcagcatatagccactctccatgtgtaatcaaagttcctccaatatgaaccggcacattcttctcaccatgacctttcttagtagacttcaacgggttagatcccaatgccctgaccccaacatcgcagtcattgaattcatccacatctctaacgcattcattgacaacaattcccgaccacccgttgttctgagctaactgtccgaggttttctccaacaagcgcgcatttgatgcttccaccaccgttta

SEQ ID NO: 40934 - DNA, 694 bp, Arabidopsis thaliana landsberg
ctgcgttatgtctatatttgttttttaaaagcatattaaaacaatatattataattataatgtgtgcaaataaaatggaaaaaaagagtatgatagggtgtcgtcctctgccgttttcagtgtcttcagatcggccacgtccctctcctctccccattcctctctcttttgtcttttcttctatttcataatctttcatataataccggcaaatacatttatttagtgaaatatatatgacatttcgataattataatgaaaaaatgatacttggaaatattttctaagtacttatcatttgacaaaagaatcgtaattaccctagtgggttatatatattttctctaattaggactatgacatgagaataccacgttaggtttgtttcatgaatttgttagatcaaaaccgattatatattgtcaaaaaaatcgaacatatattgccattttataaattaaaatatataaatgaaaatcaactaggtttcgcagactaggtttgttttgttttcgtagcctaacaggttcaactattcgagtaacaaaattttaaaaaaaacaaacaagaaagatggggaaacaggtctttttatcaaagaaaaaacaacacatagctacatcttctacaagaaaaggaaaagacaagcaaaagtcaagtatcatatctaatgggggatcatctagagtcgac

SEQ ID NO: 40935 - DNA, 570 bp, Arabidopsis thaliana landsberg
aaaccaactgcgcccataaaatgtcttcgcttcatatttatataaccttcctttttatcgctgaaatgactggtgcgccgcttgcgccgtattcacgtcgattgatctgttaatcctcatgccgctagccccagtaaggccaaagtgatccgaggatggcgcgccggcgaatgtttagaatatcggccgccataaacggcaaatctccctctccattcggatctgtatctcggcccgttatgtacaatccgccgcgcaacacgagattcgtgaacagacggccatcgtgaagctttacgtccacccaatgcacgtccatcttcatttccggtccgagcttcggagtcaaatgcctgggaacttcgatcttagccataagagaattcactgaggtttaacgtttagcttgaggggccgcccggcggcgaagccgacggggtaccgagaagcgcagcttctcggcggtcccctcgaagcgatggttagccgcggacttagctatgcacccaagcaccgagttgccccacgtaataggtttgaaattctgcaaccgcgaggccatacacaaca

SEQ ID NO: 40936 - DNA, 496 bp, Arabidopsis thaliana landsberg
tttttcttctcacattaggcgatgaccacgtaacgcgaaatttttcctgttccttcaagcaaaccatcgggatcgggtaattcagcacctctgttaaaacctaatttcaatccttttttagaaggaatgatcgcacaaaccaggtcgacatattttggtccgtatacataatggaccattttggctgataggtctacctgtccggtaatccccggcaggttttccaggattaccttcttcagcagcagggcctgttcaagaaccggctcatcgtattgcgacaggaaatcatctgcggttggcttcatggtgcacacaaatatacttattcacggggtaaaagcgatctcatgcagggttgtatttattgcatgcgaaacggaataaacattaaccagattaggcagagccaaaagctgggcccgtagcctttacgcgcgaccaatacaatgtgtttaatacccgctgtgatcaactttttgacgcatgaccacca

SEQ ID NO: 40937 - DNA, 1393 bp, Arabidopsis thaliana landsberg
tcgttatcaaaaattgctgtgagctcatttcgtgataagtgtttagtctatattttaacttattttatttttggtttgttagaattccacatcaagggatacaaaaagtctaaagtaatatattaatgatagatcaactcatttagtagcaattagtatcgaattgaaaagctcatgaaagttaatatgattacaaaaaatgatagttctatttcgataaatttcattagaattgttttttaaagaaaattcaagcaaacttaaatttcaatttagtaggtatcatgtacgaagaggtcacatacaatacaagtaagtatgtcgtcatgtagatctcacgtggcatacgttttgcgaatagcgaatacgtgaacaaaacacgttttctctatacgtgccaggcgtcgcatataaaaacggatgcatattaacacttgtaggtggttctgtaattaaggaattatagataaattttttttttttaaactgttctatagttgtaaaactgactgtagtggaacgttatagtattcaattcttacgatttagttccttaaattcaaagtgttcgtgacacaaaaaacaaaaatccattaaaagtgtgctatcattttttgaacaacctttttttgcctcattgaccgactttggggattaaggtctttttcttttgaatatttaaatttaatctttctttttttgtcgaaaggtttttaaatttatctaaaattcttctttgaaaaaaacatttttcttttttataaaaaacaattgtgaaagaaacacctatatacaaacttatgcaacgtgggtggtggtgccattatagggtggatttaagagaggaatgagataagatcgaattgtttagagcaaaagtattaccgagacttgctcttcagtgagccattattcgaatctttgatgcaaatatatccatcgaagctttaggttggccttaaaccgatgttcctcaatatccaaggagttaccaaaccaggactcattttctttttcctctcatacctcgattgtttgaaatttattatcaaagaggcttatcattgttggattagatctgcatttttccagtcacgaaaaaatatatatatatatatatatttttaaaaaacttaatatattacgccaaatctgcagagagtacggagaaaatgagaaggtagaaattataaactgagcagagatttgaaaaattaagagagataaagatttattactttctgactatcaaagtattaactctataaatagaaaagtagaaaataattaagaaagtaaaagataagatggtttcaaaaccatatagtttccggaatatttggcgatttacagagagacttaaaatacctaagatgaaattacaatttaacta

SEQ ID NO: 40938 - DNA, 627 bp, Arabidopsis thaliana landsberg
tgagttaacaaacatattattaaaacataaatttgtcattatgggcacatgaggtcgcacgtgtttgctttgggatcaccgccgtcacgtgattcaagaaagccgaactaggaatttgttggagtgaagcacgatgataatattcgtaggtacgtatatcatcaaaatgaatgaataatcagaatcagagattcttcttatctcagaggacgaataaaagtaagtggaaccactaccactacgaaatcgaaaaagagagacgcttggggtgaagataatcgcaccgtacgtagatgtacttactatgtatgatacatacgatacgaatattatcatcgtgcttcatcacttcaacaaatgttttctcgcagaagagactgaaccatgacaggctgggtccactaagcattgtcacattctccctacactcgtttttctcgctcgtctttcttgtttttaatatttcacataatttagatatttttgaattaagtttgaatttctttttcataaatcatatctcttcattaaagagaaatctatttttttatgattagtttctctataattgtgtttctttgtgggcagctaggaattctgacgtttggtcaacttattggcttacat

SEQ ID NO: 40939 - DNA, 267 bp, Arabidopsis thaliana landsberg
cggactggggattacgaatgtcaaaggccttcttttggatccataggacaatcaaaggtctgtgaggccgaaaccttatccaagcatctgacagattctcagcactaggaaggcgtacatgaagagtatacaaacgctgactctggatcatgcaccagggatacagtactccggtttttttaaagggcttgtagtactggttatggtacaagctaatacacatgccatttatcactaatggacttactcccagtaacaaagctgctt

SEQ ID NO: 40940 - DNA, 767 bp, Arabidopsis thaliana landsberg
ccaaaaagtaaagctaagcacataatgatataaccatttcatgctttcctaatttataatcatattttggaaacataaacagttatcgtcacgtattctcacaaatttctatatctataataactaattgtatacgcatgtccttatgtcgaatttggcacaatacataatatatagtatctacctagttccgatcaagcttattatattcctcaccgtattcttttttaatgtatttagcagtctagtaccatttataataaaatataaaattataagagctcccctatgcaaaacatcgaataatatatgttgatctgtcgagattttagcaatcttgtacattaacaaaacatattaattatgcgttaatcacattagccattctttatgtatcttaagatttgcacattttaaagttttctgaaataaagatgagaatgacaagattgactagacccatgattaaaaattgttccttgggaataatattttgtatcactgtcacatagcagccataatttatcccatagtttatataaatatagggccaatgaagcataaggtacataattcatctcatcgatcaaatttgttaagattttacatgaatcccacttcaaaataaattacctttcctaaaaaagttgaatgtatatttgtcctgagaatcttatgcctttgtgtgttactcactagcttctagtcgaagtaactgaaaaaatggcacttacatattcattttatcattaacgagattaaaatac

SEQ ID NO: 40941 - DNA, 542 bp, Arabidopsis thaliana landsberg
ttacaatacctaccaattccagtatcttccattatcaattgctcattaaatttagctaaattggcagggtcgattctcaagtcctgaaaagattataatataatataacatgtttcccaccttaagtaattttttcgtttttaaaattgtcatgggaaacacaaacctcagcttcaacaagttgatcagaaagagaagccaaagtaaagagcacagcttctcttaactaacaaatggaaaaatatgaaagtaagttgtaaagttaagaaaataaaaactgaacatgggagaaaaaaaaggttgaatttcacggaattggggacaatgttaaaatatcagagaaaaaatggctagtcaaacctttcaagaaatacaataacaaagagaattaggtgcacttactctccaccaggacagagaactagctgaattttcacgttgagactcttggaatcgttttccggcagcatctacaacagcattgatcccttcattccaaaagtattgataacttcctccaacaaaagtattcctgtggtgaa

SEQ ID NO: 40942 - DNA, 572 bp, Arabidopsis thaliana landsberg
  unsure (1)..(572): unsure at all n locations
ggttttttttgtgtggtggttttcaagttggttgatgtgtcatgtaataatgggaggaaattgttactttcccatttaagtttcataatttgtgattctacctaatttaagaaactatgaacgtaacattttctaattagaacagagatcgaaatttcccttaacctgagggagggtcattttgtcatatgttacaagatggcacaatggtccaaccttttattaacgattataccgcttttataaaaattactgaattctttttgacaataaacatggaatcctaaacggcatatcgccacttctcatacacttcaacacatcatatttaaatcggttagatgaaactgaaactattctcctctaaccatatactacaagaaaatactgtatatgccgacaaccatttccgacgacaaattccgaagatttagacatgattcgacggatttagaccaattccgaaaaaataaccttagtagaaatttcgtcggaaatacaaaacagatccaataaaatataccttgttaaaaattggtcgggaaaagtcgatanaaatacgttggtccatc

SEQ ID NO: 40943 - DNA, 475 bp, Arabidopsis thaliana landsberg
gtaaaatctaaatgatgcatctacagagcccagcatatccaagcctccacgccttgcttcaatctaaagtacattttaacattctccttactaaagaatatagagaatgaaaaacaaaatcagatactataatataactgaggaaacacaaaaaaccttttcgaaaaaggaaagagtttgctgcacatcttcatcaataggaatggataagtagagcatcattcgtcttgcatactttccaaccagacctttctcatcactgccagaaaagaatatttccttgaggtacttaacctataatccaaatccaagattaagtaccaaatccaaacccaacctaactctcttttgatgatgcagagaaattgaacaatctgtgaattaccttatcgagaagtatcggaagcgattcagaggagacgtaatgagccaaatacatagcagaagacaaactcaaaccaagactcttcaaaaa

SEQ ID NO: 40944 - DNA, 671 bp, Arabidopsis thaliana landsberg
  unsure (1)..(671): unsure at all n locations
ccctttcccattgatcatgaaccgcggttatctacgaaaacggttgacccgtgcgtcttttaaggccttcacgacatggctgacaaagccttttcgcaggtcgttcccttgaaagctgatatatatctgagggcgtggtcgtcgtcgcaaagctggcatcgtcatggcacgtagacgaagtttgatcggcaaaaagagaacaacgaaatttcataaaatgattggtgattatgttttgtgcttaattacctctgcgactgtatagccttatagagtcataggttttatttaaaaatatacagacgtctaatattattatttctcttgtatggatacgttaatgctaatgacattttgatgaatcttcttcgtcttttcatattttgaataaggattccattttctctttactatccagaatacttacaaaagttaattaattttggaaatcattactaattaatttacaaaagttaatttgaaaagttcaatgttcaatctactctgctcattccaaccatttgttgttttccaaaagttaacctcattcatatgttttaatcgctagtccactacagntggttgtgaaactttcaattagatcccattaagaaagtaatataaaactaatgaaaaggtagtataaaatcttatggcatcatgatcaacat

SEQ ID NO: 40945 - DNA, 345 bp, Arabidopsis thaliana landsberg
ctttctttgcaaaagctgacgtttgttttatcctttttttctcttcccctttcaccagcttccgttactgctacagtcattgttcgtcaaggctttggtccgtaccctatgcaggtgagtcgctggttttcagtttgctttcaaactgactaaaacatgtgttaattgctataataagtgacctgcactaactgcaatgctgctgttatgaccgagaccagtgcttctcctggtctgctgacttggcttttttctggcactctgcttttcgttgggtacgttactttgtcatttattatgaagtatttgctaatgaatttgtttaatcaaattagatgttggctc

SEQ ID NO: 40946 - DNA, 1240 bp, Arabidopsis thaliana landsberg
  unsure (1)..(1240): unsure at all n locations
gagcgggtaagatcttatcccaccggtcctactcatttattactaggattgttacatcaccgatccacatagaacttttgtaaaagatagatccatattaaattctatagtcaaaaagtggtcctaagattaatctcatctttgtaatcaactgttccaatctttctcaacagtcaattagttctgactttgattatttcataccatctatcatctataaataaaattaaatgtgcatatataatatatgtgtaattgtatagcatttgcccccttgattttaagatcctcgggaataagtccacaaccacttggtttggtagttgtgctgcccaatacgtgaatttgagcaccgtccttatttaagttttcggtttagtttattctgtttcaaataatgcatacctgaattttttctctggtttgatttggattatatacggggttttttttttttgtcaaggattatatacggttttaaataaataaaagagaaatttgttatttgtattaatattttttcttatatgcctttaaatatcattaatgaatgatgaaaatggtttgtagtatattcatttgttttaatacatataacacacatattgagccaaaacaaatatcatccaaagtttttggtgattgtgcccattgagtatgcctgcttttaagaaatgcattaaccaagctagaattttggttcaaatcaattatatatatatatatatatttcattttaaatatataaccattttgactaaattatttaattgtaagataattaaagtattagaactgaaacttctaatttttttatccggtttaattcgattttacgctaattctggtttcgaattaatttcgatttgaattaccgttaataaaaaaaatgtcattgtttcaaaaaagtaaaattaatactgtgtttgaccaaaaaaataatttctaatataaataagggtaaatataaataagggtatttttaatataaataagggtccggtttatttattaatttccccacatcccaaatgtgtaccggtctagacgcaaagtcgcaaagtcgcaaacgttgagtcttcttcttcgttcttcccttctctagtcttcttgaactaaaagttggttcaatcttctctttcgtgtttctcaccatgttccgtctcagagctcacggaaagaaacccataaccattaccaccaccaccaccaccgncttcattttctttactggtcaccg

SEQ ID NO: 40947 - DNA, 827 bp, Arabidopsis thaliana landsberg
ctgacaacctaaatatgttctcagaattttaagaagggatgactttcagcgaatggtataccagatagtaacaaactataggaatgtctaagcaaggtctctccaaattcacttgtatctaggctagtgatgtcaagagaaagacaacataatatggcacaaagcttacctgggtttggagagaatcttctaaaatcatcagcagatcgaaggaagagggtattttttggattgaatatctcctgacataccagatagaaccattctcgtagaacaccaggacctgtagcttcctcattcttgaattccatgaacagtccaccatgaagtgcttcagggcttgcgcccactatgtactcaaatgattctgatagcaaattggaccgatcaatgagcatttcgtgcatctcctcaaagtcttctttcacgtcaggaaacaagagcattgccaaatgcctcctagcttcaaagttggtagcttccttatactcaaagatccattggtggtcatctcctcttttagcaaatttcacaacgagggcggagaatgaaaccttgtttttatttaacataacagctagctgtcccttagcaccttgataaatgttagacattgaattgataatcttcagaatggaaagatactgagaccacgatgaagacatagtttcactgtttccaacttctttatcagccaacgaagactcgaccctacacatacaaaggtccatagtcgtcaacaagcttccaaataaccgatgaagatgtctgatctccgcctccaatgcagtactttgcataggtaacacaatgggaatgggaaaggc

SEQ ID NO: 40948 - DNA, 1189 bp, Arabidopsis thaliana landsberg
gggttctgatttggtccgaattggatctggcgagatccagagttgttttcggttggtgatgaatatgatagtgattgattgctctggacatagctactagaatccacaactaattcatattttccaatatacccttcttcgtatctttattttaaaaacaaatctttttttatgtgtcattaacttaaataaataaataaagagttttgagtcaaatattttctaaaaattcaaattaattctcaaaaacaaaaagaaaatttaacttatagtaatgaaataaattttcaatttcttaatttgttgggagctttctgaaattatttttacacttattcacaataagtcaaccattatatagaattgtgattttcttctctaaacaagtcctttcatgtgaaatggtttccaaagctttgtgcattctgttgagaatcctctccatagtctttctcatagacttaatctcattctctgttttctttatctttctttcccttgactctatcttcttccttcttcccacaactttctttctcttttgttcaccttttaactccattgcctgtatagtatattacagaattggctaattcggtaaatcatatattcataataaaatggaatcaagaaatccggttagacctgaatctggtcgcgtaagtccttggtagaaggtaacgatttccacagagaggctttagaaggagcattaacaaacacttgatctctctcacattcaaattccctttgcttcctactatatgtttcttcatcgattgtgattgtgcttgtggtatttaaatatggccatttcttgaaagtatataaattccacatctgctctagatcaataataaacagattaattagaaaaacatcgaacttggtaaaacacatgcaaagtacaacgacaccttcaatttttaatagtataatagaaatttgttacactaattaacctgttcttcaacttgtgcaagcgatgaaccagagtcgatatccttatttggattcagcatcttaagaaggcgtctctcaccaccatccatacaatgcgcattgtgtaacatctgatggtttagattctgtattatatagtaaaagaagatctgtttgtataacactttgaaatcattaataatcatagatcaaactaaggatatatatgtgataagggtttctcaca

SEQ ID NO: 40949 - DNA, 494 bp, Arabidopsis thaliana landsberg
acagtatttatgttctatagaattacagctactttaatttccttcaaatattatccatataatcggactaacgtaaacaaatttaaatattttttgtcgtctacaacttcacatcgcatattttcaaagttaaactctacttatagcataacaattaacgacgacaataatcaaatcacgagactacaaaagaagatgattgattgttacccgattctcgagttcgtcaacatctacaagatatatatgattgcaagattctatcggagggttacaagttatgcaactaggttgatcttgagaccaagttgctatatacaagattcttgttaaagtatgattcgagtcccatacattatacaacgaaacaataaacatcatatactctggataatcgaaaacctaaagataagttgggacacataaagatagtgtgtgtttcaagtttacatatcctttccaaaaatatccatctcattatgcgtggttccttt

SEQ ID NO: 40950 - DNA, 704 bp, Arabidopsis thaliana landsberg
ataaaacaacattagtctaagaaacattatacgaaatagaaatttcctggagctgtattgttaggtagagtaagacatacaagaaagaaagacctgagaggccagcgacgaggtgagggacttgcccggataaaagattcctgctaagccgcctacaagacttaaccttgtaagaaaataacaattgcaacattaagtaaatccagaatctttgcatcaaactcacaagtagtttaagtgagttaagaaccctaaagaagctgggatttcaccactaaaccgattccccgataaatcaagcgtttcaagctcagagagttggcctaactcagaaggaatcggaccagttaactgattattctgaagtaacctacaataataacaagtaaccccattagttacaacaacacatacttgaattccaagattaaccacaaattcatttaactcacaaagtatgaagatgagttaattccccaatactagtagatagtatccctgataatcctttactagccatctctctgcattaaagatttcaataaactcagcaaagaaacgtttgtcagagacatttagtcgaacaagtggtgtgcaaaagatactcacagagaaaccacaaaaccttcagaagaacaaccaaccatgttccaagtacaaggatcaacagagttaatatcccaaccagacaaaacctctttctc

SEQ ID NO: 40951 - DNA, 657 bp, Arabidopsis thaliana landsberg
ataaatttgttgtatctaactaataaagttcgtagcctttggttttgcaaagtcctttcacacactcacgcggggaatcacatttacaactttaatactaccatgaaagcataaactaaaacaatcaaattaaaatatttgcatgcgcgtgcatctttacgcggtcgatcatatatcgttacatatggaggaaagtttacgtaatagacctataatatcaaactataacttgagatttttttttatttactttatgtggattagatgaaactaagtcttgttgaacatgaccaatcctgagatagtcagatcttattataaattgttaaaacccaaaaaaaaacaaaaattgttggaccaatacttaaaagtttcaacacaaatagaaatggaactgggagcatatacatagacgcagtatagaaatcagactcgttcaactttgattttgggaatattacttctctggttcagatttagatttaaattttagatttcatatttcttcactggtttgggcgagaagaatttgtttttgtgttcactaaatttttctgaacaaaaatcataaatcaaggaccataatgattgagtccttagtatttcacattaactccaatccttgtattgagagagtcaaccaagttgagatattgg

SEQ ID NO: 40952 - DNA, 617 bp, Arabidopsis thaliana landsberg
ctcagaattttcttcattttcatctccccctacaatttaaagaagtaacacacacaagaagtaacgaaaattaatcacataattaagaaatataacggaaaattacaaaagtcaaaccaaagaaaacataacggaaatgcaaaattctagttaactaacctgaaacgtcatgttaataaccatccgtccagggccaacccgttgacccggtccgacacgacccgaattccgccactccaacggagctctagcaccgccaagagaagccaaaatgatctcagcattacgaagagacaaaggcaaagatgggattttgggaaatctccgagtgaccaattcgtcatccaagctcagtttttctcctccgacaactccgggccaacccgggctaaccggatctccgattcctctcataaccgtacctctctcaatcccgccaaatccaccaccgtcattctcggcgtatattagcactcccagcgcacctttagcttctgctattttcacaattgctcctcttcccaagttttcacctttcctcgctaaaaccacacaccctttaacgctcacaccaatagactcaagcgcatgatagtctctctcctcgccgtgattca

SEQ ID NO: 40953 - DNA, 732 bp, Arabidopsis thaliana landsberg
agggacaccaatggcttgggtgattctaaacaaagtgatgaggagattgaagaaactttttttttggctcgatataaccggtctgtctcagcttcgtaaagatgctcatcctcctgctttcagtgggaaccattctggcaatgactgtagccataggtgtctccctggttagcctgatacttggtacctgctctatgactctactcttctatcttcttaattaattcctttctcatcaatgtataagttaacttaaaacaacaatcaattatttttagttatcttttcactatggttgtttgtttcttgactgaaacaactcttaaataagaccaacgcacttgactctgtgaaatgagaaaacatgtcaagaaaagattatacaacggaggatgaagaatttagtatgctaatgaaattttccgagtaataagctaaatgggggcttagagtaagatatattgggcctaatagagatgagtgggcgggcctgaagaagcccatatctgatgaagtggtcggctggttcgtagtagagataaaatcatgagactatgagaggcaaaagtgcaccggaaagactccacgtgcacatgtacggaaagatacgtggaggatagcaagaactattgctcgctaatattgaaactgatctcttccacaagctgagtcatcgtgcctctcctacacgttaatagtaaactcacacgtacacacctttttcaatcttat

SEQ ID NO: 40954 - DNA, 542 bp, Arabidopsis thaliana landsberg
ccgcgtctcggccgcggtgacggccccttcaggtaaccgggatggctggttgacgtttctgatccggagaaatacagtttttgatccatataggcagcacggaggtgcggatggccgttattctgatgcgggcgttcggatggcggcccatccggtgtaacaaaatcccctgtccatattttgtcattgtaatacgtagcggccttcgcttcttctccaaaataagcggcaagttgttccagcaccagctccctacgctgcccgcggctgtatttcgtcgcattcggagacaaaaaacctgccaatccgaactgctggacttgggcatcgctctggtcatacatttcatttacaaggccggtatgggcatacaatacgcccgaataacctttttcgcgccagaatggcgtcgggtattccaccacgaatttcgtcgagccagccatccaggtatgaactgagcccatagtcgctttcacatctgagggtagctccggcgaaaatgaaatgcttttttcagcaagtttgggtggaaggcaaat

SEQ ID NO: 40955 - DNA, 557 bp, Arabidopsis thaliana landsberg
  unsure (1)..(557): unsure at all n locations
aattcctagcatttccatactctcttttttttatatcatatacgttttagttttgtaaaattgtttatatataatgattttcttctataatgcagggaatgtcatctcggctttgtacgtcctctctctcgcgtgagactacttaatttctctcttcattattatatatacatatgcatgaaatctagatgagtgataatgatttttatccagtcgatcggtggagttatttgaattgttatagaatgttatatagtctctaaccaaatttacgtctaggccgacgtattggaagatttggatggatcgaacaacgggggagcgccaattctggcctttgatctgtacgttggtgagcacagcgacttggatgatctatggtttcttgaccaatcaattctcgatcttttacatcaacttgttcggatttggtgctcacttcatctatctcttaattttcgccgcacacggaccaagagctnaaggcgtaagtaatatgacattagcagctgttattaaatctctatttatcaaaattgttcatgtcagcaccatat

SEQ ID NO: 40956 - DNA, 422 bp, Arabidopsis thaliana landsberg
gatctcacggttcaacttctatagggtaaacaataagtataacctatgcacggagagcattaatgaataaattgacttgtagtccttttcggttaaaagttgacttatcgtttcgttaaaaagaatggagaaagtcagaagtcggagtttcgatacgacgaattaacatgactctggccttttttcatcatgtcatgctcaaattgtttgacaaattcaatttgttacgcgaagcgtagagatttgacccaaaacgattcgcatgtggattggagatatgtatatccttttcttattaagtgtgtagaagatgttttcccactgacgggtgtttttctattatattagaaaacttttttattttgataaggattagaaaacttttcagtgacccccttgtcattttttcggcgtcagtttaa

SEQ ID NO: 40957 - DNA, 622 bp, Arabidopsis thaliana landsberg
aaagttattgaccggtaggagtttatattttttttttctttgaaaatcacttttgttttaaacaataataagtttagatagatggtggcaaggggtgagttacaaagccatgatttcgaagtatgacttttggaggcaattttgcatgaaagagtaatgcaagaagagcttttaggtaataatgcaagataataccattttagtcaaattttccagctttagtcatgagtctaattgattaacattaccatttcttgccagaaaaaaaaaaacattaccacgttctatggatcttcttaattttcaacgcagggagtaatcagaaattctatactgataaagatgggttaacaatatttcttccaagttttgtaattttttgcatccaattttaaataaataaatacaaataactttcttaaaaaaactatcatttttaataaatgaaaacttagtgagaaacaagagttaaattggtaaatcgcaaaaataattttttttttttatgtaaaaacatatccgtaaaaatttagctagtcatttaccggactgaacagttaaaaatattttatccaacatcgttgtagatggatgtaaccactaagttaaacctttaaattat

SEQ ID NO: 40958 - DNA, 758 bp, Arabidopsis thaliana landsberg
ccgtgggtgccctataagatcagtaatttcatcttcgagtagttgtaactaatatgaagaaaagcttaaaagagggggttcactatttgtatcataaattgaagacaaaataaactaggtgtattatcataaggtgtttgttttaccctaataaatttccaatttgaagacaatgttaggaattagttacaaaaataaatgcgagtaatgataaagtgtaattatatcgactaatctacgaatttttcaaagtcttaactcttaactggtcgaaccagccatgaatgatttgggcataattacaaaagatcctgcaggttgtggggtttgcaaaatcgaccccatatcttaccattaaagtgtaataagagaagcccaaagttattaattgtgtttggatccaaactcagttaatatttactgaaatactaatgctttctcttatttcattttctttgcgatccaatagaaaatcgacaaacaactaagaaaaattattttaaaaagaattcaaactatgtaagacgagaaagtaaataagtaaatggaaccaacacttctcctaatacagccaaaacacaacctcgggaacctcttcctcctgccaactataaaaacagacaccaacaaaaggatccattgattttataaattttgtttgcttaaaacaatatatgttttgatgtgattttaatacccaattagtccctacccccatggcaatttgtttgttggaccgaagccaaaattgattctag

SEQ ID NO: 40959 - DNA, 336 bp, Arabidopsis thaliana landsberg
ctgattcacgcatattgaagtataagctgatgtttacagctgacttatagctacacctttcaacaacaagtatagctaaaatgattaaggttgatattttaggggattcatacataaggagcgtggaaaagaaatatttatatatatacctgattgtatacttaattgttcaccactggcaactacaggacgagaccacgcaaagaaaatatagcacgttggagccaacattctcgtgaagcattgaaatcaagcccttcaatgtttggtataactataagcttcaagactagattgaaagataagtaaccttacctaataccggcttttatgcca

SEQ ID NO: 40960 - DNA, 394 bp, Arabidopsis thaliana landsberg
atctcaatttatgaccatgattaataccagcgacgagtatgtgttaaaaatagaatcaaattaccaattataccaatttaagagaactatgcaagaccaaaactacaccatcataatctcaaaagtaatcataactgaatataatctcagtgacctagagagttctctgaaaatttaaattaaataataacgaagagaagtagagacagacaccggttgtagtcattaagcagtaattacttcatactcgaccagagagagattgttggcccggttaacctcgaacgaaacaggaccggttatttcaatgcgtccccatctgtcaacagccattctcatagtgtccttgaacaagtcgatcttcgcattcctcagtataactgttgttccagtc

SEQ ID NO: 40961 - DNA, 686 bp, Arabidopsis thaliana landsberg
  unsure (1)..(686): unsure at all n locations
tgactttactcgcgtagtcacacttgatgcgaaagcattcgatgatccaaagtcaaagttaatagtttgtgacatttactatccatttagtttcgggtacgctttcctcaatccattcaataacgatcacatgctatcaagatggagttggaatgccaattccacaagcgaggaaatcgtcgatatgggaatcactactgaaatggtgtacaagaactttactttcaagcctgtgcctgattttgcaggaccaaatcccatgggatctcaaatcagtgtagtgannnnnnnnnnnnnnnnnnnnnnnnnnnnnnnnnnnnnnnnnnnnnnnnactatagagaatgggttgtagtcgtagatttgaaacaatggagagtgaaaagcgtagttagagcagccaaagctttgtacgcattcaagttgttctggaccaaagattaaatttaatcattgcaactcttccaattgactttctttgctccaaagagttttgtttgttagtacttttatactcttctttactcgctgtctttgttccgccgaaattccttgcaatctatcaagtgcttctaaaagaattctagttgataaactgttgtcaccgtttcccccaagatcgatgttgtagcatcaaatatcatactcatcttggcttcttatcggtgataacagatctactataatt

SEQ ID NO: 40962 - DNA, 469 bp, Arabidopsis thaliana landsberg
aaatcgatttactgtaaaatctttgtcggtgtctgaaaggctacatgattatatacttttcccttattttcggtaaaaacttgataattaggcaccgaaatgccacatgcaacatattatatgtacaccgaacacgtgtgagcataaagtacattggtatacatacattacgatatagctactcatactaattaaggacctctctatacgtgtaagaaattgcagtatatttcctgaaacatagtgaaaaatgaatgcctcaagtctgaaatgaaaatgacagtgacgtagatgtggaaaagtattaagagaggattttttatcaattaactttgattcacaaaacttatgattaagtttcaaacgtaaaatgtaaaatgtaaaatgctacacaatttatgatggatattgatgaccaagttgtcaaagactcaaagtagcttatttaaactactaaaacacatatgat

SEQ ID NO: 40963 - DNA, 2703 bp, Arabidopsis thaliana landsberg
tagacatttcctttttctcacgtaattattttctgcagataaatgataatttaagcactgaatcaaaatcccaaaaaaaaagtaaggagcctaagagctttttatctggctccagacgatcttcactaccccgacatgatgacggaaaaaggatgaggatatcgtggttaagggagttaataatacagaggtaaaggctgttgtagaggtctcgacaagtgaggataagaattcatcaacgtcagatgtggcatctgacactcagaaaccgtctaagttatccgatgcaccgggaggaagtaaaaggcactggggccgtacccctgtaagtttctttttcctctgcctttattacctatctcttaagggatccagacatttagtaaacgtttggtgttttatgtgctcaggggaagaaaaacttgtcaatggaatctattgatttctcagtggaagtggacgaggacaagtaagtatcatcatctctacaaatgatttacatctttatgtttctttcaaaacttcaaatttgtttggactagaattaatgtgggctacatggttcttcttctgacaatgttaatattctgcagtgctgacattgagagacttgagtcaaccaaattagagcttgcaagcagaattacagaagaggtcacgataagtccttttgagtatttttgcttttgcgaactcggtgtgttatacaggtggtgattttgacgagtatgtgatctctaacaacctccatgtttggtacaacaggtaaaaagcaatgcagttctacaggctagtttggagcgacggaagaaggctttgtacgggcggcgccaagcactagagcaagatgtaagtgtaaaataaaaccttatcttagcaatgtgaagtttgttatttattgagtgtttaaattttagttatatgaatgtgctttacctttgactaggtgggaagactacaagaacagttgcagcaagagagagacaggaaattagctctggaaacaggactgaacatgtcaaaagggaatcaacctattccagaaacaatcgatgaaaatgttgctcctcttcatttttgtctagcaactagttgatttttgtcaggctaaaagtacatatatctaacttgggagacattttacagttgaagaaagatctgcaagaggtagctcaagcggaggctgatattgccaagttggaacataaggttgatgatcttgaaaataggcttggtcaccatgacggaaaagcctctggttctacgcatagtgccagcaaagaatctcggaaattgccagagcacaatgcgaagatgtacggattcatcaacagattcacatttaacctcacaacctatggtttaaataatatcaaagctaattactcgtcttctttcaaatttgtcactcaggaaggagaaacaaaaagatactgaagcagcctctactcacatttctgaaagatcaacgtccaaggtaaccactgtaaacatttgtctatcaattttgtgttttcttcctctgtatttatcctctacagacgggtaacatattgcaggatgggcaaggggctgcaagagaaaatgagacagagaagcaacaggattcacggagcaaaagctcgcaacaagaaacatcacgtggcagctcaaaactggtgggcttgtcaaagaggtctggcacaaagggagaggtaagtttcatagtgtaaccattaaatttcatccaaatatcgttcaaagctagaaactgagtgaaataaacagggaagcacaacaacaacttctgcactttccaaattgacaatgagactcaacttcctcaaggagagacgtagtcagatcgcgaacgagctccaaaacatggacaaaggaaaaaccctagggcaacccagtccaacctcgggacaaaaccgtgtatcagaagaaactgaaaaaggatcagggtcgaaccaggatccagacagcagcaaactacagagccctcacattcttgacagaggaagatccgagaacggaggagacagaggcagaggatcatctggaggaaaccatcccaacactacaccaaggaccttctccagatgatactctttatcaacaaccccttccctcagatgtacagccgcgatttaacaacaccacctccagttatgcttattcgtcaccccccaacaaccaaataacagattctttcttctttttagtctcattcttatcttgcttcagcatttttttaagaccaaataaactacactctctttttttgttgtgttttaactgtgcgttggatctgttgttttggtagtgacatttcacatcagtatagaaactaaaattgaattgtatttaacaacaatgcttgaacaaaaaatatattgaatccccctcttcctagttccttcttgtgttcactatttcaaaaatgaataaatcaatataaatagtcgccatcatcatcatcaataaaagaatggtatcaaaaatctcgaagcagcttcctaacttgctccaacgtaacgaagagaacaacagtgaaaggaccttgcctacaaactgtaggaacaaagcctttataaagagccatggctccttccgctttaaccgtcttcaccgcacaatcccacgcgccgtcgtacgctcccaccttcatattcatcactctcgtctttatcacatccaccggattagacgcaactgaag

SEQ ID NO: 40964 - DNA, 151 bp, Arabidopsis thaliana landsberg
atggtacaggcgctggccagatgactcactgtctaactatctgctaacagggagacactactcaggacagtaggatagggcaccggaggaagagggtatcctgaatcagacacctgacatgtaacgagctcacagcactggccatcaaagc

SEQ ID NO: 40965 - DNA, 600 bp, Arabidopsis thaliana landsberg
ttgctcaggatatcgatatgaccagaggaaaacgactatacctgaatgaagaacgttatgctgctttaacttacttggtaaatgtttgtctcaacaatcaaaagaagaaacttttgtttgtatggtaaaatatataattgttctgctttgtgcttttcaggttggttctcatggacttgatcgcagttcaaaagttctcggccaaaccacaattggagccgtcttacattaaacgatctgcgccatatttctcagacattgatctctatgagatggtatgcatatgttgctttgaaatcatcagttaagattctaaagatttgagagcttttctgatgattttatttatctgatttctgtcactttggttgatttctttatttgtggatatatgcgatcatgtttgtaaatagagtattatttcttggccgttgcctaaggattattttaacaataatattggttagtctcggtgcgcagatttgcatcgtttcttttattttattcaggtctactaatttgttcctgaaaaaggtcgataaacatcccaatgattaaaaaaataagggttgattatgagaaggtttatttgtaaaaatt

SEQ ID NO: 40966 - DNA, 1766 bp, Arabidopsis thaliana landsberg
gatgaaattaggtgttctcttcttgagtaatcaactaatcattatacttagtccggtttaacgatcggtttggcgtttgtctagtgtccatgagtataccggacacgtcggctgtaagagacaaagagtatcagattctaacttgagcgtatccgacatgtcaccggccaatgaaagccagatgtcggtgagattctctctattgtgatctcttatgctttcttgatatttatcattaattcataaaacagtgtaaacttgtcaagtatctaaatactaacaagtatacaagtataaatgtatcatttattatttacatggacaactatgatctatgatactatttcaattcaatattgcaatatcaatctttttataaaaatatattaattaatatatcctcttaatcagtcttatcttgtcttgtctttaaatcagttttatccaaacaataaaatatcctcttatcaaaaacaatatacattttagcaaggataaataaattaaagtaagaattatctatatattaattaaaaaaatatgatttctattttagaaagtttacatttaatacattcattattagtttaacatatacaataacattttaaatattatattcgttaaatatttcacaaatcttttacatatattccataaatagtgataaaatattatagattaacctatattgaccttttgccattatagcaatacataaaattatttttaatgaggatcaatcaatatgactgttacacatggattactgatgattttttatctgtcaaaaggaaataaagttgtcaaaaatttgctggaattatattgaaatactaagaccgtagaaaaatatcgttagttacgtttcaacggttaaaaaaaaattgataaaccaattccatcaaatgacaaattttgttgagcagttggatttgaactcttttccgctaatgggccattaaagccttagagggttcatgtttattcctttatacgaaaatgcgaattagaattaaaataagacagtttacaagttccaatttgtaagaaactggtgtgatctttttatcaatcatgttgtgagagtgttgaaagtaacctatgatttcgttttcttggggatcaattcaaagactcatacgtctacacgaggataatttattattttaaaatatcaaaaatacgatcattcaattcggttgaaactaaaaattaccaaaaatacatttaaattaaaattctgcatagaaataaagtaaaaaaataacaaatcctacaaccccttaaaccgacgattttattacataatggtacaagcattgggttttcatcactgaatatctgcggtggataagcaaacatctccacggggtacctcggtggctggtactgatattcgttcttcttcaagtctaccactttgttcccctcctccgcggcagcaccatcgcctttagcacctcctccaccaccgttttccttggcctcttttccttctttgggctgtcccgcttcctttttcttctcgtctttgtctttcgtttctttttctttctccggaggttttggcggcggatcttgcttgacaaccgcggcatgcttcccgattctcttgtaaatgaactcaactagcttttccggcgtaaaaactcctttcacgctcacttgtgatgctttaaaatctggttccacagactccactcctatatgtataaacatgttttgactttattctctaggggatcctctagagtcgacctgca

SEQ ID NO: 40967 - DNA, 687 bp, Arabidopsis thaliana landsberg
tgccgaattgggactttttgtaggttactattcttttaaataattaattataaggaaataattacatcgggctggagggatttattttgaaataataattttaataaaatcaacttcattttggtgattatttagttatgaagtgaaaactatcgcttttttgcttgcactatttttctatctgaaaacaattgtattatatatataggaatttgctatcggatttttctgtttgaatatagtaaagacttcttctacttcttctatttttttgcactgatccagtgaccattttaactctttaatttttagtctccacgttagagagtcggacaccttttcatggaaggcaacacatgtttaatcacttgctacactcaagaaaagagttcatattaattttataacgtaaccaaaattataattttactaatttaataaatccgcgtaagattacaaatgtatttttaatggttaagacttaaaagtgtcgcacaaattttaaataaaacagaatatatttatatttttaacaccaatttgtccgttaatatcaatatcttttttatgacatgttatttatgtttatgtgaaagtgcgaaaaacattttagttaaaccatgtaattttttttgtcgtatttgtaagttgatcacctttattaaaatattttccaaattttgttac

SEQ ID NO: 40968 - DNA, 701 bp, Arabidopsis thaliana landsberg
ctccctttccttcccttaacacttaactcagttccactttctatgtaagcagtgtcgaaacattcagccacaaacccggtactgttgaaaacatgaaactcttttgagattttaagtctcctctttctccctctagcgtcacatagtcttatagaatcaccaatttggagaccagcaagaaaatcttggccttggaccgatatagtagcatcaggggaaacatgagcaggaggttctgttcctgtgaggcagagccataccaaagcaggagaaacaacatttccataagcatctttctttggtgaaattttcatcacacgcggaccaggttttaaggtaccagttctgagttttggtcctgctaaatccatatgaacgcgacatggcatctctaacatctgagaagttcttcttactcttttgatgatctcaccccaaatacttggatctccatgtgcacagtttatacggataacagatgttccagctttaagaatatcagttataaatgtttcactcaaagttgcttcttcaccaatagttaccatgatatgagtacttcttccctcacgaagtttaccaagtaatgactctttgtatgataataccctccctttatcattcttcttagtactttttcccttgcgatatacattagtccaagactcccgtcacagcgtttttgatcgttcatcaaaaag

SEQ ID NO: 40969 - DNA, 222 bp, Arabidopsis thaliana landsberg
aaaaaattcccacatgcttaattatttggatcttctgtctactgactgagtgattgattgcgcacgatgcatcatgcgcccatatttattgagctaactgaattccagacaggaaagagacagatcatgttcactcgtacccggcttgaaggatggatgatttgaatacgatgaaacatcgcgtgacagtataggcaccttaagggatatgcaaaaagattt

SEQ ID NO: 40970 - DNA, 284 bp, Arabidopsis thaliana landsberg
gttgatggtacaaaaactgatttgtctgacctggaaataataaggcatgcaggtgctgtttccatcagcggctggtctgccggcaatggcagccaccaactgagttttcttaacgggaatacaacggtaacaaaagaatggcgcagtaaagcttctttgccggtgataaatataaaaggggactgggagtttcagttgggttctaaaacgcttgcagaaacatggaccgcaaatcccgcaaaagatacgatggcattgcctgtgatgcagttcatgtcgcagtt

SEQ ID NO: 40971 - DNA, 253 bp, Arabidopsis thaliana landsberg
ttattttgatttgggacatatgacttattggataattcactttttgcaaaataggatacatcatatggagggtacccatcttcttcgatctctactatcatatggtgaagtgtaatacatacttacataattatataccgatttttaccttatatcaaatgagagctggatgtctgcgaataaatgaaacagtttgagactatcttccacacgtctcaacatctttacaacgcgctcattgatctgcatcaaa

SEQ ID NO: 40972 - DNA, 723 bp, Arabidopsis thaliana landsberg
gtaactaataataaaaatctgaagttttgaaaaatgtcaaactaattattgttttaaaactgtgcagattctccactcctcatttccaacatgtcaaactaattattgttcattactatagtttctgtaacgataccttcgagcacaccagaagaagaagatgaaattaagagtgcttaaagcggcaataaagtaatagaaacaatccaacttgcttttgtcaatatcatccgttagccaactctgtcctccacgagcagtcacactatgaacaatgctcaccatggcactgcttagataactggctagagacaaacctaagtaaagcaacgagttcccaatgcttctcatgttgattggaacttgtttgttgaagaactcggtgagaccaacaatcgtgaagacttgataaaatcccattagtacttgttgcggggttagccagaaaaccgacatgcttactccattaagcgataaatctcttctccttcgctccacaataccggatatgagcatcgtcgagatggagaaaatattcccaatgccgactttttgtagtaacgagatacctccgttttgttttggaatgatttcgatgtgtcggaccaaaacggtttcatagaaaggaagccatatacctatggttaataatgatatgaccgctatagaagcaggagggattaggtaagaagtgcctggaaaattgaggtccatttttagtgc

SEQ ID NO: 40973 - DNA, 261 bp, Arabidopsis thaliana landsberg
ttcttcgcccgggtcagggcggtgtacatttcacttttcccgctcggtcatccgtccctgggggagcacgatcacgtcgtcgtactccgacccctgcgccttgtgcgccgtgatggcgtaggcgtagtcccacaggctggagccgcggggccgctggttcggggccagcttctgcgggttgccgaactgcgccagcgcgacgtgccgcaccaagacggaggggcccgcgtcgatctcgatgaccaggtcgaccacgctctt

SEQ ID NO: 40974 - DNA, 519 bp, Arabidopsis thaliana landsberg
gtcggatatttcatatattcaaatcataatcgaaattttcactaagttacaacacgtgttattaagtatttcgggtaattatatgtaatttatagataattttggataaaatatgaaaaaacagggtctttctcaagaacggcggtgaatttcagtgctggttgcgagacggtggtttcaaacattgtaatggcgattacagtgatgatttcactagaagttttgacgaggtttctctacttcacaccaacggcgattcttgcctccataatcctctcggcgcttccaggtctcattgatgtctctggtgctttacacatttggaaactcgataaactcgattttctcgtcctcattgccgccttcttcggcgtcctctttgcctccgtcgagatcggtcttcttctcgccgtgagtttttccttatccctcactgcttttatttttcttgctttattagatttttatccatgccaacgtattactacattttaaatataaccttattttttgtaagta

SEQ ID NO: 40975 - DNA, 527 bp, Arabidopsis thaliana landsberg
  unsure (1)..(527): unsure at all n locations
tcccctctcccccccccccccccctccccccccccccccccccccccccccccccccccccccccccccccccccattcccccccccccccccccccccctcccccccccccgccccccccccccccccccccccccttcccccgtccccccccccaccacccccccccccccccccccccccccccccccccccccccccccccccccccctccccccttccccccccccccccccccccccccccccccccccccccccccccccccccccccccccccccccccctccccccccccccncccccccccctcctccccctgttcttccccccccccccccccccncccccaccaccacaccccccccccccccccccccccccccccccccccccccccccccccccccccccctcccccccccctcccccccccctccctntctccctccccccccccccccccccccccccccccccccccccccccccccccccccccccccccccccctcctccccccctc

SEQ ID NO: 40976 - DNA, 494 bp, Arabidopsis thaliana landsberg
gtggtgtttctacggttgtgcagttcgaaccaaacgagagaggacaagggttttcaagctgcttgttagacgtttcgcgtttccgggttggttcatatcaaataaaatggctaagctgttgcgttgatcaacatggttcttactggaatcttctacctctcaatggcaaacctgtgtttacggttaagaaagcgtcatgactagaataagtgttggttttgacatggcggaagagtaaaaagatctaaggaggatctagttcgggagcaagcaagaaatgagacagagattggctttaagactaatctcgaaatatgcagctacacataagagagatgtttgcttcaacactatttaggtgaactaatttttattggtatgttgttatgttatgttaactagattgtagactaaaatccatgaaaattaaagcttgaaaagctaaagtcaattccatctaacactgatatgtgataattagctaataagctaat

SEQ ID NO: 40977 - DNA, 400 bp, Arabidopsis thaliana landsberg
agaagttatctccaagttcgctaaagtctgcaaatttagatccattggtgtgttccctgaccaaaagtccaattcgaatgagatcttggtggatgataaagcaaaagaaactgagatttgtgatttcaatcacaaaccctcttcaatgattcaaacttttagttgggatgatggtgagatatcgaagcttttcgacattgtttcatcgcttaagctagcgtatcttgagtttcaacaagctcatttgccttatgatcctgacaagatcattgaagcagacaacctcgtcgtgtctcagctcgaggctttacgaataatcaagcgtctctatcttaaatcgatacagcttaacgtaaagaagaccgagattgctgcttcttgtatggataggtcgagatat

SEQ ID NO: 40978 - DNA, 596 bp, Arabidopsis thaliana landsberg
aagctgcacaaaccttagaatatcgaaacggtctttaccaaaattgatacatttttttttgaacagctctaaaatcctgaaacaaagcaactccaacattctcatcttcacctaatccaacactagacacatcaatccccaaactattcaccatatcatcatcatctctttctctcctatgatcaaagtaattctgcttcaccaatctctccatcaactccatccactccggccatggatggaccaactcaataacacctttctccttactcaactcaccagaatcaatctgaatcggctcaagcacaacacaagaatccaatttatcattagacacaacggattcaacttctctaagatccggatcttgttgtggagcagaaggaggagtttttaactgatgcgtctgtttagattgacgccaagcacgaatacgctcaagggtttcgtctttctcagagtgacgtttctcaatagcatcgatttgatcgaaaacgaagctaagacgagaagatagagaagagggtttgtgattaggttcatgggttgattcagtgttgctttgtggagaagtagagagtgatttagtgagaaat

SEQ ID NO: 40979 - DNA, 438 bp, Arabidopsis thaliana landsberg
caactttatctcacattcgaggcgtttagcatcctgaagaaccgaggttcgttttttagagtcaaatgttactagatgtgccgtgtgtgattgagtattgcaactcgaaccgcatcccgtgtttacaagcataagactcgcatgctcgatagaagactctatgacaaggactgatactgactagcgttacaccatcaaagcgtggatactcacgaggaagctcgattagagatatggggactgatacgagcacatgggatgcgtatgaaactacgatactctaactcattattagtaacatataacctactcgaacatctttactgaccgcgtattcctctgacaggtggcagacctggttgcaactgattaccactagcgggatctcagtatgatcaacattaacctcaaatcaagaacgctagctttatcctgaat

SEQ ID NO: 40980 - DNA, 928 bp, Arabidopsis thaliana landsberg
ctttgtcgctgcccattagcaattagttccatcacttgcataatctataactaactttttcaccttttagaattgtacatttcccaaacgaacaaatcaaataatccacatgatcttatctcttgctaaattcaagtattcatattacatattttatatttacttaaattgacgggccatgccgaggatacgagaattttttaatagaactaagcggatctcacacccttagcctaccgtccgacaatggtccacaccaacattgataataatgcatttagaaaatggtatggaaaaatatttctatgaactctccaataatatttaatcttttgttcgaaagcattttattatttagaatatttttaaagaaaagaagccaattatcagggatttattcatccaaataatatagttatggagagctaaggtaaatagagttacagaacaaggatttataagatataaattacaccttaagttggtcgagattacaatatgttatgtctattcaagaataattacaactgctctcagtacttattttctttctcatatacatctaccattcttcttctggcgatataatgattaacgttgaattcagttgctatttcatgtctatttcgaataagcttagtttctatgagggactggttataatcagtatatgttcctctagaactttctttcaaaacacatttcacatcctatattcataaaactcggaacgagacgagctaattcgatttaaatccatgtgtaccctaaagtttttaattacgaaatattctcgatggtccaaatatagacgataataaaaaggaaaaaaaaaaaactgaaatcaggacaggggcagattccaccgtacgtttcgtaaaatggaattgaataaactaagggaataaaaaaatatcatgaaagggga

SEQ ID NO: 40981 - DNA, 797 bp, Arabidopsis thaliana landsberg
acacctagacaaattgcaatgataattttgtctatatatcataaattcaattttctaaacagacttaatcgcttgctgaatgctgatcgcgaacgctaacatatcatatgagtcatatcccaaacttgtggatatactaatggtttatgttaatgtaactgtatgttaaaacattaatcagcaatgtatgattttataagagattcgaaaagaatctgacaatagtttgtgtgtcattataattatttctgttcaaagaactaaattttgtaagtggtccaataatcaaaaaacattttttatatgttcaatcaaccgagcattgacattaacttagtaaacgataatacactgaatttgtaatctgactttacaagtatgattgatgattttttaattattgatgaacatttcaaatatattattattatgttgggagaaagaatggttttgttgttttgaaacataaatgcttttatttcaaactaatatcatattccctgtttaattaggttactaattcatatagattttatttttttaacttttggattaatttttgacaaaggtctggatacaactcagttataaagattgaatggaagtctaactttatggcacgtgtatataacgaatataatgatatcatatactgtatatgagtcatatgacaacttcataatgtaaaattatccaaattgactatacacaattattcaatcgctaaagaaaagaacattgaaaaatttaatatataatttaaatgtattacaactctaaactctgcattgaaaaaa

SEQ ID NO: 40982 - DNA, 794 bp, Arabidopsis thaliana landsberg
atctaatcgtgtttcaactcctacaaaacaagaggacttattcaacttagaaacagtcaaacttaattgaataaaactaaagcaatgtttcttctttcaattcctcccctaaactggaacagctccttcttgtttactccttcttgtttactccttcttgctgcacactcccattctttgtctaagcttctcaaatacttcaagcttgacagctttagtcatgatgtcaaacaattgttcttgaatagtacagtaatccagcaatatgactccatctttcaccaactcccgcaagaagtgatacgttacatgaatgtgcttgcttcttccatgtaacacaggattctttgacaatttgatggtagaactgttatcatagaacaagaccgtaccttctccttgaactgacccaatttgtttcagtatattccttaaccacactacttgacatgtcccatacactgccgacacgaactcagcttccattgtggatagattcattatgggctgcttctttgacgtccatgaaactgctcctccaccaagcataaatatatacctgaagtgcttccgcgatcatcaatatcttctacataatcgctgtccacaaatccaacatgtttatgctctcctcctagcttatattgtataccatatgcagaagttgccttgcacatatctcaaaattctctttgctgctagcatatgttgctcacttggtttctccttgcacctactaaccaagtttatagagtaaaccaagtctggtctcgtaggagtaaggtaccttaaac

SEQ ID NO: 40983 - DNA, 356 bp, Arabidopsis thaliana landsberg
ggacgtccatagggtttatgctagagccatggtcagcaaaaacctgcacaagtatagtccaaatcgattctttgacgatgaatgttgcttttgatcatttgtttaagttaaattcatttttgggaaaattacctcattagtttggaagtatgtgccattcaaagggaatccacctctcattgctgttctgcaaggtatctgttaacaaacaaattagtcatttttataccttccttatatttctacttagagatattctcttgaaaattgtccaccagaatcttaccaatatagttcctcgttcagtctgtgattcctcttcccccgtcttgttgcattgaaaacatttgttttcg

SEQ ID NO: 40984 - DNA, 655 bp, Arabidopsis thaliana landsberg
gagcacgatctctgcatctatctttgttgcttcgggtccgactcgttcatcttctttttctgctacattttcgtttcagacaatggggatcacatcgtctggaccagcttccacaaggatcagtgaaggctctatgcttggatcttaaaagtgttgtattgtgattactaatgtctaggttgttttgatttacttatttgcatacgttataattgtataggaacacttcaaagctatatctacttactatttatctgagataaattatatacgcatattcaaagttgtggaatggttttaagaagttccacaagttttaatatgacatttctaggaatttagaccttcaaggtaaaattgcatatactataatgttattattatcattctcggggttgaaacaaatttaagatctcaatttcttccaatattgttgcgtgtacgtcgtctcatgcgagcttaagaaactcgtcgtgggaagaaaaataaaagcaaaagctgccacatttcttaactcaaaaattcatttgtgtgatttttatttggttatatgtacattaactttgtttgaacgttttttcatataacttttgtccacgaattaagtattagcaatttgtaaaactattatttgaaaagataacatcttttctat

SEQ ID NO: 40985 - DNA, 739 bp, Arabidopsis thaliana landsberg
ttctactgatccattgacatacaattttttatgaataggggaagtctgttatactcctacgcccattaaaaaaaaaagaaagattgatacctcaaatcatcaaaaacaaatgactcgatttcgccaactatatgcacatgctactttataattaattcatgttcttaaacatgtgcactttccctataaaagaaaaagacagtgagtactacagactacacttccttctcattcagctttttactctttagataatcttctgaaaataatcttcagccatatttaaggtaacttatccattcattggtactttcagtttgcttcttccatgcatttgtcattcagcatatactttgattccgcttttctcagattttgattttcatttctccattattcaactgagatcttcttatatgtagagagattttgattagcttctatctttattgagagccaaacatataaatggtaatagtaagcaaataacgtaaaaaaaaatatcgcgttttacaaatttcctttgttggttttccacagatttaaagaaccctaacgagagaaaaaaatggactgggattactatacgctgttgaagacgagtgtggctattattatagtgatcgttgtggccaaactcataacctcctccaaatccaagaagaaaacaagtgtcgtcccactccctccagttcttaaagcgtggcctccatttatcggatccctaatccgcttcatg

SEQ ID NO: 40986 - DNA, 574 bp, Arabidopsis thaliana landsberg
ctcctaccactgccaccaccagaaacccagcagaaccaaggcctacagaatctatcttagggtattcaggaaccctgtattatacaggagcctggatagtcttgtagaagaagaaagtaaaaattagcctcttttcctccatcttctacagtttagatcatctcggaaacaggagaaagaaggaaaagggtagttaagatgttctgtttagtgatctacaactaaatgaatctttggtcctcagtgtagatttgtctagtttcttttttttctttttttttagcttcactggaagacaacaacaaccaaacaacaacaaaaatctgctaacaatgactctagggttgtactcattcattcattgacagagtggccaaaaaatagaaacttgagtaaatgtgttctgtttttttttttttttaattatattgtgataatgtaagcccctggaaaagctgcttcctctttgttcaaagatccaagcacagagaccctggatacctcctctgggctttcagtagcctcctgttagcacctctgatcaccatcactagaagggtagtggggtcttgct

SEQ ID NO: 40987 - DNA, 923 bp, Arabidopsis thaliana landsberg
cgctcgatccgtttcttgataacagcagatagctcatcaggtgtgacatcttctttttcgattgttaacccgtctacgaaaagcttgttccattgttcctcaggagctgaaacacacataataaaccgatgtgaagtctggctggggtctatagtacatggaaaagtggttgcagaacagacctttgatcagagtttcaagaaaatgctcggcttttacaacttcgttccctgtgacaatagctatagtggatgagattatgttcgtagaaaatggtttagagtgacttggcatagttttcaaaattgggcaaatcacctttctttgcgtagctacgcttggagaggatagtagcagaatagagttgaagaactttttgcagcatagccaataaccctggtttgtctttatcttcttttgcctgaaaacaatcgtcagcctcaaacattcaaaagaatacatctattcactgtgaaggaaagacctcataagtttttgcaacgaacttgtaagtgaaataaaacaaattgttgcacttacctgccggagctgagcattaacttctgaaagaaatccttcatctaattgcccttctttttcccgttgtataatttcctgttaatacactgatctcagtaaccatgacgatatcaaatcacagaatctaagaccagataacccttctgaatataggttggatatataaaaaatgtgtacatgtagtagaaagtgaagaacaactagtataaacctttttcattagattgatggcttcaggatctcttggcggccatgaaatctcttacactccatctatagcaggtcttaaaatccctttcagaatatcagtagacgtctctatcttttcctacagggatataatgaactctcagttatccctgtttaagtaaaccctgaagaag

SEQ ID NO: 40988 - DNA, 572 bp, Arabidopsis thaliana landsberg
ccaataaacatattgaacagaaacatttaagtagatcttaagtgaactcactaacacaacagtgagatctccatagatatacaaagcacatcataatattcttcttccttcctaatcgtcgtccaccccacggcgccgttggtactacacgagtgaagataaatatccgagatcaatttacactcaatgatatcgatggttaagataagagcaaggactttgctttaataacttgtgtttttgaggattgtgtgaccttaccgtgactttcgtttgcttggtagtttggctgtttatttgttccaacagtgttataagccgttcctcagaaacctgtaaagcaaacagagtatagttcacgaactctttgatgcataacactcgtgtagtaccagcggcacttgagtagaaaccatatgatgtgtaagaattctgaactatgacattgaaaagtgactgaatttttttaccttctcaactatctgtcccatctgagcagccctcaaaataacatcctccacacctcaagctttctcaggtttcaccagagcaattcgggcaactatcgaaaa

SEQ ID NO: 40989 - DNA, 506 bp, Arabidopsis thaliana landsberg
gtctgtttcacgttgcagctcgactttccatccgcgtcaccacttgctgtagcttacttttaattagtatcctggcggtggttcgatttgaccgataacgtataaaacggcaaaaatgcagaccaaataattattcttcccttgaattagcatgtcttggtagttgaatgtccaaatcacaacctcatacagatcttagcttttacttatgcaggtcataccatttgacaaggatcattaagagatcccacatttgacaagtttataacacgtaatcattgttcaaaacacaaaacagattcttacaccgttgatgccgacttacctttttcacaatcattaacaacttcagcttggtctttcagtttcctggtggttcaaatagaaatgttacgtcagctttgtaaacaaaatctatacataccttaacaccgacatcgggcttaagttcataatacacggcgttgtccaaagagaggataatttcccagcctttcattttttta

SEQ ID NO: 40990 - DNA, 1147 bp, Arabidopsis thaliana landsberg
ctgggcctcgtgtcctggtccggagacctggacgtgcgtgccgttctccgcgctccggattagaggcccgtcccgtgcggaggtggcgacgctaggcgtgtccacgtgtcgttggatcccgctatgtgacgtccttatccttgtattggaaggaggtcaaaaggggcttccgtctctctttgactgcgaggagatcaggacatatactacgcaaaaggggcactcaagtcacacgacactgcagatcagcgttcaccaaaagaagcacatatactacgcaacaagatcgactcgtcagagtccaaattttcctgcgtgttcgttgtcgtgttccgtgcccgtacgcctgatctacctaatatctactatctatctatctatctatctatctatctatctatctatctatctatctatctatctataggagtcggcacttcaaaaatattatcagctgtatccaaaaataattaacaaataacaacccacacattaactaatagttatgtacctgccaaggatagagtttagatattcctttcttattgtatacactgcaaacttctgagggaagccaagtgctgagactcaagccatcgtaattacgatgagagcttgaaggagtatgactttcttcggattcactagaaccaactggtttcctcatgttgcttatcatagaaacagatcttacaccacgattttcctcacacagtaaaactttctttccttcgggttctggatacatcttgcctatcaaacctttatctgcctgagcattatttgcaatatcaagattttcacatcctttattaccgacgaaagcagattcagagatcctactgcttcctagagtaatgttattttgatcaaatgaagcacatcgctcttgaatacctccattaatgttcttatcttgaaacaaaagttcaagattcttgacaggaagctgatatacttctttattaaaatctctcccatgcttctccactacctttgaaaaaccaatggcatctttatcctttactctgatttcatctaaatctaaactcctctctaacttttcagtgcatttatctgttttcttgctgcatgaaagaatagttacatgttgatctctaactttagcttctacagaaccaaaatt

SEQ ID NO: 40991 - DNA, 1656 bp, Arabidopsis thaliana landsberg
  unsure (1)..(1656): unsure at all n locations
gggccgaagctttcgatctcattctccagaagctctctaacgccaatttggatttcggcaaagttatcgctgtttcaggcagcgggcaacaacacggtagtgtgtattggtcaaaaggtagttctgaggtattgagatcattggattcaaagagatcattgaaagaacaactcgaaaacgctttttcggttaaggaatctcctatatggatggatagtagtactacattgcaatgtaaagagattgagaatgctgttggtggagctatggagttgtcgaagatcactggctctcgtgcttatgagcgggttactggtccgcagatacggaagctttttatgactcagggggaggtgtataagagcacggagaggatttcgcttgttagctcttttatggcgtctttgttggttggagattatgcttgtattgatgaaactgatgctgctgggatgaatttgatggatattgagaaacgttgttggtctaaagctgcgttagaggtttgttgtgggtgactttgaggatgtagttagatatttaaaaatggctggttgttgataggttttgtttnnnnnnnnnnnnnnnnnnnnnnnaggagaaacttgggaagttagctccagcttatgctactgctggttctatttctcagtattttgttcagaggttagtatcgattgtgatcaggatggatatgatatgcactttcacatgtcagattcagagattcttttggttatgttgcaggttcggttttgaaaagaactgtgtggttgtgcagtggtcgggagataatcctaatagcttggcaggtacatattcaacaacataagcttggggagaagttcctatgcattttcaaattgttattgacttgggcttttgagtagcaactgcgacatttatgatgaaatggagagtgtatcttgcgactggattctgtctgtgtttgtatatgaattacaaggtaccaatgaggctataccatgtcatgcaggtctaactcttagtactcctggagatctggcgatcagtcttggaaccagtgacacggcaaggctcttgattcttgtcgagcttgctagttagttaatccagatatagactagtgttcttaccatttcacatgtcgaacattataaactcttacaggtatttgggattaccaaagaacttcaacccagtcttgagggtcatgtgttacctaatcctgtggaccctgagagttatatggtgatgttggtttacaagaatgcttctctcacccgggaaggtactcatgactgcaaactcccactcttatctgttcttatgtgctttgtttgatcctcagagacaatcaagaatgtgaatttccatttcagaaattcgtgaccgttgtgctgagggatcttgggatgtttttaataagtatttgcagcaaacacagccactaaacagtaagttgctatttcattatccttcaggtgtccatctataatatattcagattctttgttttctaaatacactactggatccattagatgggaaactcggcttctactacactgaaaatgaaattctgcccccacttcccggtatttgcttgagttattctcctttccatgctattggcctcagcaacatgctgtaagtttgctttactaatgcttc

SEQ ID NO: 40992 - DNA, 4111 bp, Arabidopsis thaliana landsberg
tggcttatgatgtttttaccgttcttgttgtcgtcgtcgtcgttattgctattgctgcatgttgttgttgttgttgttgttgttgtcgttgtcgttgtatgagagtttgaatttggaactttatttctatgaactttattatacacctatcattaagaaataacaaataaatggtgattatggatttatctaagtttttgaaatatttcatatgttgggtatggatttgggatagtaaaccaactaaccataataaattagatcatataacagttttttatatggtgattaagaagaacaagcaaccttatgttttaatcaaaaataaaaatatgaatcaagcaagcaaactcgaagatgaactacaaagacgccacgtggacgagtggggcaagtgaaagtggaagccgacgaatcaaaatggcaaagacgaattagatgtaggggcaaaataggaaaatcaggtttatgtttcgcctgcatcttcctctggtctttctttttgtctcagacggacaaaaccagagagagagagagagagaaagagaaaagagagttcgcgtgctgtttgagtatcatatctaatcccagattctttcttccttctctgtatatttccacgacggttgacctaattttcgtcaccatccaattggatttgagaagagagaaaagtattctcatcatctgaagaagaagaaagatagattgatagatagagagagaaatgggtaattcatttgggtgttctgcctccggcgagagattagtgtcggcggcgagagatggggatttcgtggaagccaagatgcttctcgattgcaatccatgtctcgccaagtattcaactttcggtggtcttaattctcctttgcatttcgctgcagctaaaggccataacgaggtttctttttcactcttcattgctcataattttactgttctcgaatttttaatataaagttttctcttttaccgatatgtgatgttagatcgtcggattgttgctcgagaacggagctgatgtgaattccagaaattattgcggccaggtaataaatctagtttcagttttttttctcaattggatttgaaattgttgagcggattctgagctgattcattgattcaagttcgattcttttgattcgacgaatcttaatttgatttagggatttgtatcattagtgaaatgtgaaatctttggctaagtttgagctcattaggctaatagatcgattttgtttgaaatctgacttagattactaatggttacaaattcgattcctacactgaatctattaaaatccaggaatatgctaagtttgcaattaatcatgtttcagacagcattgatgcaagcttgtagatacggacattgggaagttgtgcaaactcttctgcttttccgatgcaatgtgagttcttttcatcactagttgaaagaaaattataacatttggttttgattttgattcttagtatcgtctttctttgtcaaaggttacaagagctgattatttagctggaagaacagcgcttcatttcgctgctgtgaatggtcacgacaggtgtattagacttgtcttggctgattttttacctagtgataaacttagctctcttcctgaaactggtgttgtcactgcaaagaacaaatctgagcacaggtttttttttttttggaaaccatcttcatgtttgtaaggttttgattgactatgtagttccaacaaaaaaagaaattgtcttttggtgcagcgcattgtctaaatttgtgaataaggcggctgatggtggaataacagctcttcacatggctgccttgaatggattatttgattgtgtgcagcttttgcttgatcttgaggccaatgtttccgctgtgacatttcattatggaacatcaatggatatgattggtctcagctttctatccgccttcttttttattgactaaaggattctttctatactgctcccaagatgacaatcttgttcttcgttaacgttgcaggagctggaagcacgcctttacactatgctgcttgtggtgggaatctgaaatgttgtcaggtaagaacaatactattaagtttattctttttgctttggtattttggagacaaagacttgagagaatctgcattttatgtatttctccatagattcttcttgcaagaggtgcaagaaagatgacattgaactgcaacgggtaagttattccatcacaatcttctaatgttttacttcatgttcaaaatcagtttcagggaagtatttgacgtcgttagaatggaaactttccttttccaaaatatgtttgtaggtggctacctattgacatagcacggatgtggagtcgtcattggttagaaccgttgctttcaccaaattctgatgttgtcattccagcctttcctcattccaactacttatcattgccccttttgagtatcctcaacattgcaaggtaatgaagaaatctccatctgagtttatagggccaaactctggcctcaatatgatttctcttcttgttgactatttgcttgcagagagttcgggttgcagtctgcaaccattggagatgaagtcgatatctgtgccgtttgcctggaaagaacatgcacagttgctgctgaaggttcggtctaaattgttgtcatatcctttgagagatgtttattagtgtcctttgaaaaaaccgggttttgtgtttcaggttgtgagcatcagctatgtgtgagatgtgcgttatacctttgctcttcgagcaatgttccctcggtgacagttggcccgcccggatcaattccttgccctctttgtcgacatggaattacagcgtttaaacgactcccaagctccctgacaagagaaatgaagttacctatgtcactcgggttctgtgcaccatgtatgcttcacacgggagacacaacagatcaatcatcaccgacatgcccaccagcagaacaacgcagcagcaagacccgtgcagcctcggtttcatctgatatattctgtccggtaacatgcagcccattcccttcagtaaacattccaatgtgcgcctgcaacgaagggacatgtccaaactttgagacacatggaacagagagacatagcgaagaacacgtcgaatcttctccttctcgaacaacaactgaacaggagaagatagaagaagggcaaagacttgggaaaacaacaacttgttcaagtatgttctggggaagaagaagctgtagcagagagaaccaatgcaactccgagatcaatgcttgatcataaacatattatttgtatgtacagagaaagaaagaggagaatctatatgtctcccatcatttcttacttttaaaatggggatgagccacaacacagagagtcttcttgttaggtttgtaacgtttgtttttgactttggagaggctcaagttattaattatggatgatgatttgtaattgtcaacataatgatggggtcattttgcaaaatctttctattattattagttggacccatttgttatagtacatagatgaaaatattgagactttcttataattttcaacccaagaactagaagaagtcaaacaaaactaaaggtaataatgaatgattctctatagctcttgatgagaaaaatctgaccacacaaagtccaagtcattttcttcgtctgcaaataacttaatactacttttacacttattagttcttggatccaaaagaaagaaaaaacgaaaaacaaacaaacaaatgaagctatcactcaattagttggactcgaactggtttggtttcagtgatgcgccaatttcaaaaagcattcccatttttggctttgctacttcgaaatcttcatttgcagagctagtctatatgactttaaatttcaattacattaccattttttttattaacttattattatgtcatggatctataattctatatagttcaacctataatgaatttatgagaaagagtggtccactaaccttataatcaactatattcacttaattaggtttaataatctaatgggggtaaagtctttatgtgattagaaaaatggaaacagatcccaagggaaaaagc

SEQ ID NO: 40993 - DNA, 432 bp, Arabidopsis thaliana landsberg
tcaacgtagatggtgctggatcatcttttccatttccagatgttgaaaagctggagctactctgaacaaacccaatcatgtctttagttttaatgttgtagtttgtctttcatttcgcattatgaaatcaatcattgttaaacagttctcatttcccgagttagtaagagattttacctaaaatatataataataccaataaccaatttccaataaaaaatatctaaatcgtactaattgattttcaaccataacaccataacattatctatctttaagacccacgttactcgaactataatatatactgtccgtttataacaaaaactaaaactcaaattactgacttatgatgagaaaacttaggcctaaccaaataaaccgaaagtatatataaatatggcatatttgatgatggaactccttacgtat

SEQ ID NO: 40994 - DNA, 480 bp, Arabidopsis thaliana landsberg
atgatagacttcggcaaaaagaaaacaaatccctcagaagtcaacttgcaaatctttcggaagcagcgttgtcattaagaaccatgacaatttgacgcctcaatcaaaatcacaacctaagtttttattagcatttgatgcccagtttgcgttaacgtcagtgattatagatcttttgtacataaacaagacaagaaaaagaagcttataaccaagaaaaatccttggtccaataaacctcatcactactaaaataaaatccatcttctctaacggaccaagaacacttcttagtagatccacatctattgctgtctctagaaaccttaaacgcctcgaactgtttcctctttgaatcccacttcattgtacatgtgtactctgccatccatgaccacaaatcgatcttggccgtccattcgaagtcatcaccttcttgaagcgcacgaccaccgagatctccttgcggcgaagtgcacc

SEQ ID NO: 40995 - DNA, 683 bp, Arabidopsis thaliana landsberg
taattaatcaatatattgtggttagtaattaatttaaatatatagttagtttcttgcttgtttatctagagctgtaattgacataacacgaatatatatataccgtggcttccgtatccggtggggttaccataccacgtagatccggcgatagaccaatcagaatcgctggtcgtggcggctgaaatgttgaatttcttggggctaaagcaatgagttaagttcaagaggagacaagttagagcaaagagtaagttcatgagcatgtaatatcgatctacgacaagaattgtcattgtgataaatgataatattaagtaaggtaagatgggctacttatagtagtttatagattgatcaaatcccgtgaaagactctaatatgcccaactgtattaatccacgtgttactttgtctaaaaaaatactataagacacttgaagtcattcgttttttgtttagatttatttcgaagtgaatcctaattacggttaaccgttagagccatagtttatatctggttgcatcatacggtgtcgtatagcatattaattcttatttttccctaaatcaaggtaatttggaattacattgatggggaaatttgtacgctaatgacacaataaatggtggatcacttggtcgtatgaaatttaatcgcacggttgacaacatgcataaag

SEQ ID NO: 40996 - DNA, 546 bp, Arabidopsis thaliana landsberg
gcacgagattgtatcaatctactctgttcttgcacctccaaatctgactcctgctcagtccaaccgtttttgcttctcgctcgctcttcttcaggttcacatggagatttcgtcttcttatttaggatgttttatttcatgttcatatattttgctgaatccatcagatttctaatgattttctgtcttgttgttttactctgcagtgcgtagcatctcattctgacacgagaatgttatttctcaagggtaatgttctttttcttttcatcaggctaagcttaatgttatatagtatgtaccattggggatgtctattatatgctcttgtctatttgatacgagttagtggggttatctgtttattgtatatttattgcatggtttcagtttatttcgtgaagcaatacaactgatgaatttgttgttatgccttttcttcgttcttgtgcacagctcatatcccgttgtacctttatcccttccttaatacaacgagtaagtccagacctttcgaatacttgcggcttactagcctaggtgtca

SEQ ID NO: 40997 - DNA, 470 bp, Arabidopsis thaliana landsberg
aaaaaatttaacaaaacaaatcttattaaaaacttaaatatgtttattatttttatgatcgattcaaaactgaatggaaactaaaacaaaactataccaaaacaaatatattaattttagttttagtttgattactactatttaaaaaacttaaacctgagacctagaattttaaaattcataaaacttcttttaaaacctcaactagaagaagagtaagtagtaccgcaactttttgtgatgtaacgaaataaatatgggttttttccactttaaatacaccaaagacactcccaccacaagtactcagttaagcaaacacgttccacaatcaagtaccctctctctctccctccctccctctccaccatggacaccggaaccaccacatgctctgccgtagatctatctgccctactatcctcttcttctaactcaacatctttcctcgccgcggcaacctttttatg

SEQ ID NO: 40998 - DNA, 487 bp, Arabidopsis thaliana landsberg
ttttgttatccattgcgccaaaaataaaataaaaaacaacgaattatagtttgacttgtgtttatcagaagacaagtcttatgaactttgccatatttcggtgacttgctccaaagtctcatatgcgtttaccgatcttctcgattctccaattccaaaccctaacattttgattagtccttctgggtttccacagccttgaggcttgatttttttattttcgctctttcttgattcatttttgttttcggtagcgagaaaatatctgaatcggaaaaaacatatgaatctgagttttgttctttggtttgaaagttcttcaaatataatttagctgacaaactatagatgaggatgaaaaaatccttcctttttgatttttaatcattttgctgatcaattgttccgacctgtgttcttcaaaaaaaacagagattcggaaccaatgatgttgcgtgctgttataaggagagctgccagtaatggc

SEQ ID NO: 40999 - DNA, 549 bp, Arabidopsis thaliana landsberg
tggatatgattaggaagatagctccattctttattatattggaagagaatggtgaaaattttgtcacatgtcaaatctaaagttttctttaagttttttgaaatataaaataaattatttgaaattctgattacttgattttaatgaattaaattgagaaaatcatataataatagaatactaagccatatatgaattaaaatctgtaaacattaatgtggtattgatttttcttcaaattctagctcaatatataattaagggaatcattgaatgtcaaagatgttattttctagaactatgtctcatttaaactttatagttgagaatataaaaggaagacaaaactttccaagactctgtttagagagtactctattttgtaggtgaagattattatgcaaaagaacaaaagaaaaattagtagaagtatagaacaaatgtgataagaaagacatcaactaatttcaaaaaaaatccttaaatgattctactagaaaagagagggaagaaaattaacaggattgtttttgttcatatgaaaaaatg

SEQ ID NO: 41000 - DNA, 830 bp, Arabidopsis thaliana landsberg
aagcaaacctttaagattcatatctaattactactttcatggcaggaagttttaccgaggttatctccacgtttaagtgcagaactcattcagaagaagctacttgctgcctttagttgatcaattacgtgcacgacaacgaagaaaagagacgaaagcgtttgtaaggttgtactctcatctgcaagaaccgtgtttttgcttcatactttcgtttctttttcctttacaagtcagtggaaatataattgctttataaacgacgatgctgatttgcttctgactatactttttctagttctatactcttaagaaagctattgctgcattttgcttctttgactaatccattaacttgagtgatttgatagaaatgtcgccgtatttgcgttttttccttttctctgtattgtcattgtaagcttttggttctgattgttgccaatactatgacgtctactagccacgtaacttgctcagtttctttatgtctagaagaagaaaaagatttgatgaactttctttagattatgaaagttgtggttgcggcaatttgattatgagatgtttttcttacattattaggttaatcattcttagtttgaaatcatttgagaacatctctattactttcacgtaactgcaagttcttcattaacgaatttgatttgtatatctttaagcgttatctactcttagtatagattacgattggtgcaagcaacacttcattattctttccataactttcatgactgaccatgacattttacgcagtgtcattcccgatagaggtgctgcgattcaacttgttggtaacaccttgcaag

SEQ ID NO: 41001 - DNA, 824 bp, Arabidopsis thaliana landsberg
caagtagaacattgtttttgtatcataatcaaaaacataaagaagccgtttgatgttttattttataaagcagtctcacacataacctcctgattcagaaatatgtactgtcgagaagaatcataactacaataacaactcaaatccataatcataaagattaggcaagaacattcattgcctattaagctattcatcaaaactcaaaagccgagtcaccaaaagaaaacaagcaactaatcaaacaataaccctcacacaaattctcaagtcttattcttttatatacttaagacataaattgttcaagaaagacctaagaaacagcgtatcaacagctcatgagttaaaggcaaatgacataatcacaaaccaagtattgcaatgatcttgacacctactagttgatcttctaaaattcaatttgagattcaaatcaagcagcgttagtgtatagtacctagattcttccgttggaatccagttccaatatctccggtcttcaattccagtaatagacattcctctagcagaaatcgccatacaaactcgtcctgtaactctatcaatccatagttcctggaaacaaaaacacagagagttcaactaccaacagagaaaattcatccaaaccaaaatcaaaaactcagaaactaaaccctaattcccaaatccaatacatcaaaatcacaattcagtcctcataacttccaagcaaataccttattatcatcatcaaaaggaattggacgagaaagcacagcgaagatatctttcttcgagagactatgataccctttcggcggcaataaattaagcagatc

SEQ ID NO: 41002 - DNA, 543 bp, Arabidopsis thaliana landsberg
gacattcacattccactcttatcgaatcctagtaatccaaagcatgcttgtaggcttgtaggtaaacaaatgtatagtcgatatcatatcattttttatatagtatatcgcaaaaccaacaaaaaatatgattttaagaatggaatattgtagccgaccactttagtggagtgcactcgtgctggtggtcgtgctcgtgctactttgggaaagtatgtattatcaatatgagtcatatatgccattgccatcgcatgatcttgatttctattgtctaatataagacaaaaaaaacacagagaaactgaagttcggccgagtgaagaaaggcccaccgatagtctctataatcccaaataagtctatcaaaagtaaaaaagttccgttccgttcttgcctgggtgtgctttgtatcttagtgagtgtagaaaccatttaaaaaaaaaaaaatggttttaaggaactttgcatactcacctttcgatttgagcagttatttttctaatgaaaatgtctttgagcttaaagaagacaaacacttca

SEQ ID NO: 41003 - DNA, 677 bp, Arabidopsis thaliana landsberg
agcagtggtggccttaattcttgatataatagggtgaaaatcctcagctacctacacatggatgttttgactcttacaaatacgacaagatcaccagcaccattatatttaagcaaaaaagtactatatgagcatctgttatcgttcaaagaaataagcttcaattgttgaatacttactgctaaagataaagcctcagctgatttttctacttgagtgatttcttcctctatatgaattcccttaacgcgacctcgccatgaagactccatatcataaaagaattcgttcgggacattgtcacatttacttacattctgatgactttcattctcatctaaagagatcatttcaccaattgtatcagacgcccaatgacattcgttgacctggcaagaaaccgaaaactacgatttatactcatactcataagctagttggattataaaaaatggcattcaaattcaacgcttattttctgaactcgtgaagggataggaacttatcatcaaggaaaatagataagaaaacaaagcagggagacatacactcagagtcatgtttaaatgcataaacttacaaaagtgtcaaagtcaattttcaaaccagtagccacccaggtaggatccatcaatatttcaggatttcacaagctcacattgttatgcatatgtata

SEQ ID NO: 41004 - DNA, 809 bp, Arabidopsis thaliana landsberg
  unsure (1)..(809): unsure at all n locations
gattgctatgtaagttttacaagttctatttcaattttttaaaagttggagaaaaaataaacaaatttgtttaatctcaacaaatttcaatgaaaggaactcataatataactgtggcagaattcgagaatgaacttgaacaaaaactaactgaataacgaaactcattgagaagattaaggtatataaaaacactataaagagagattataatgttattcaaacattatcatataatcaagcctcaaataaaatcaaataacgatgatcacagtctttaagaaaaagaaaagccacgtggcacgaaggtttgactagttgactcttaactgtttttgctgacgtggaatattcgcgctttggcattttattaagtaccatctctctaactaaagctccttctttgatgttctctcttccgagtttcctctctgtttgttttcccggaaagcgagagaaagtgcgagaaaattccaccattcttttcttcttttctcctttcgttagacgtcggagcttaaacgtatcactttctctgcataaagcaccattattactgagagtcgagagagattatagtgatgaaaaccaaacagcaattgcgattcctcgctacaattctgctcacgacgattctatttgttctggcgaagactgatactgatccgcttgaaggtaaatttccagattctcgtttcattcttctcagtctaggagtgaatcctagctaagattcttgntcgtcgntgntctctggttcaaatttacttacttaggaaacgactgttacttgatcatcaccaaaacac

SEQ ID NO: 41005 - DNA, 723 bp, Arabidopsis thaliana landsberg
tcatctatactaatattcaaatggtcaattataaagcccaataagctaactaagcccaaaaatgaaaacacacggactcagcccatacaaattttaacacttaaggctaatgggtctgtcacgtgcggaatagactgaaaacagagcatcgcacgtgccgcatcaaaatttgaaatcacgacgacttcaaaaaaatcccaaatggtaagaaaaaaataaaaagttgcagaaaaaacagaaaaccctcttttctctctcttctctctctctcgaggaagaaaggcaacaactatggaagctatgcttgtggactgtgtaaacaacagtcttcgtcattttgtctacaaaaatgctattttcatgtgcgagcgtctctgcgctgagtttccttctgaggtaatcaccctcttctttcactctctctctctctgattttacctctctaattcaaattctgtaaatcgaagctcttggaatggtaaatttgatatttttgggtttgtaattcctctgggtatctatgaattcgtcgaaagtgcgtctctttttggatttggaattcgatagcttcactgtgttcttcgagattgattttggtttcttaccttttagccctttgttttcaagatccgtgtgttcaattaggagatgaattcgtgttcttttctctctcttgttgaatttgttttctctagtagctgtgctcaatgctcattactattt

SEQ ID NO: 41006 - DNA, 859 bp, Arabidopsis thaliana landsberg
agttaccatctctctctacttcatgtgattgccaataaaaggtttcgtctttctctctctcaccaaccccaaaccactgtcccggctcgctctcaaaacgcttgccacccaaatctatggcttacggggacatgtattaacatatatcactgagtgaaaagaagggtttattaccgttggaccagtgatcaaacgtgttttataaaaatttggaattgaaaacatgatttgacatttttaatgatggcagcagaagaaaccaacaacactaagtttaacgttcttggagtatacttttctattttcgaagaagacatataactaagctgattatttcttttcactgcgaataaaagtttgtgaacatgtcaccgtttgaacactcaacaatcataagcgttttacctttgtggggtggagaagatgaaaatgagaaagtcgtcgtacatataatttaagaaaatactattctgactctggaacgtgtaaataattatctaaacagattgcgaatgttctctactttttttttgtttacattaaaaatgcaaattttataacattttacatcgcgtaaatattcctgttttatctataattaatgaaagctactgaaaaaaacatccaggtcaggtacatgtatttcacctcaacttagtaaataaccagtaaaatccaaagtaattaccttttctctggaaattttcctcagtagtttataccagtcaaattaaaacctcaaatctgaatgttgaaaatttgatatacaagaaatattttcatttgaataaaaattaaatctgaaaatagatatttctctacctctggttttttttttcaccaacttccctactttact

SEQ ID NO: 41007 - DNA, 316 bp, Arabidopsis thaliana landsberg
  unsure (1)..(316): unsure at all n locations
caagtcgctactttatttttgttagctactttatttttgttcgatatctagtttctatttcagatatacaataaccagagttaagagtttatttctcttccnnnnnnnnnnnnnnnnnnnnnnnaagtaaaattttttttgggacacttatgtttttgagtatcaaaacttgcaatgacttgggactagaaaaacaatccacatctaatatacaatgacatgactggaggaccaaacaagaccatacccatctgtttgagccctgaattgacggaaggcgaaaaataaagacactcttgtttcacacgacatattg

SEQ ID NO: 41008 - DNA, 915 bp, Arabidopsis thaliana landsberg
ataaaaaaagtaatttattagtaattcatacaaaaaatggtaggcatacattttataataagtaattacgtatctccaattcaagatactcaaacaccgtttgagagtatggataacgagcaaaatggagataaccatcaacctcgtctataccaacccctatcaaacaaaaattatgtaataatcttttctttgattaatatcattcttaatattgttaaagatttcggatattcgactatgtgtacttggttttttttctttttgttgttgttaaaaactatgtgcactttgttccaagatatgaccaagcaaactcaaatctctgttgtccacaacaacaacaacatattatatgtgagaaattcgaatcaaattttttgttttacctgttgaatcaatgccaccaatataagaaaatataatccaaaatgccataccggattcaacattatgaaactgttctgtgttctgaccgatataattactctacttttatgacctttattgatatcgccacagctagcgcaaagctgagatgagaaatattttaatcaaaatgtcgtgactaaagcagaaaatttagaagcaaattttaattagcgacgatttcgtaaattgcatggcataatttagtttggatttatacggttttcttgtgtgttgtatcgatgactattattacattcataatttatttatacgctatttctgacttttaacgatatcgaaaagagtaaatgcccctatcgtattttgacgctgtttgattcttttgactttttgaaggttagaagatttcttgtgttgacgtcaagtaacaatatatgttatgttaggtgaaggactcatcatatgtatctaacgcccaactaaatattatctaattacatacgagctaatgatataacacac

SEQ ID NO: 41009 - DNA, 851 bp, Arabidopsis thaliana landsberg
acaaaaaaatacacttattagagtaaaatagaaaaacatatattttttaaatatacgtaaaattttctttaaacgacaattaatttaaaacggattggagtacacttcagggaagagcgatctaccacaaaaaaggttgacttttaaagtcttgaataaataatagtgtttccaaactaattggcccactcaacgctatgatgtggatctctcttgttttgaatgttgtttgtttagtctttttttgtttttacctttcttaatcatattaactttatgttaatttcataactttatgtttagtcttttttcttttcttttcttaatcataactttttgtagtatatgagtagttattaacataccattcgctataaattctataggtctatttcactataattatatgtgagaaaattagaaagtccacaagaatgaaaaggagaagtcaatgaaacaaagaaaaaaccaaaagagaaatcagtgacatagacttggtgcgacgaccgacgaataaacgttatcttcgggtttgggttataagactagcaagtagcaactgtattacaatagttgtcttctggtcaaaatgtagttagaaccagtcatattgggttgtggcattaaaatgggctaaattaatttttacatatattgcaatatgataaattacttttacaacttattacaatgcatcttatcataatttaacaaattatacattgatattttggcctaaaaacccaattgatattaagcttattcgataccatgtctatgagaccacacttattgcatattacaagcttcaacgattaaactccaaagtaccatttaaattcattttgaca

SEQ ID NO: 41010 - DNA, 581 bp, Arabidopsis thaliana landsberg
cacatactgtcactgtatatacatacgaatacgatcattcatctcactataaataatttttgtcaaatcacgtacgattcactctgacaaaatcaaacgcataatacacaagagtctttttttttgctaaatatctttctcttcctagctaaggatatttttcccaatacttagactatatatgtaaagtcaatagaacctgaactaaattgcactattacattaccggttctttgtgttatatatatattaaaaaaaaaaaaaaaaaaaaaaaaaaaaaaaaaaaaaaaaacccttcccgggttttttttcttatacttgggaggagtgggggtttttaaaacccatttattgggcaattttggggccttcttaaggccccatattaaagggatagggcccaaaccaaaattttggattctttttttaaaaaccaattttttttttttcgccaaaaatggaattttggcgaaaaatgaggaaaaatttttcgaaaagaggagggaaaaaatttacaaaacgaacctttttttccttgacccttaaaaaggtggttccctttcgggggtttgggggaaaaa

SEQ ID NO: 41011 - DNA, 545 bp, Arabidopsis thaliana landsberg
tgctctgctttgtagggacacgcgacttcttcataattctccctcgcttatggaacactgatgaatagcatttttatcggcttcaaaatccgataactaaacctcaacagacaactcgtttgcttagatgcacaaatggtcacactacccttcttgaatcatattgaagccatccccgtttgcttcaaacacatttcttcctacaaaagatattcaaaacaagatttatcttattatgtgtgaattaacagtgataaagatatactgcaatacgaccaagaacatatgtggaatcaatggagactaaccggtttcttcaaacccttctcttcctacataaaaattgaaaccagatttttcttattatttgtgataacacaacagtaacaagatatagtgcaatacgaccaaaaacaatgttcaagcaatggagactaacatcaattgaatgcaaggatctgaatatgggagacttaatatgagaggcctctgcagcagatggtgatccattgttcccagctgaataatgatttacctacaaagct

SEQ ID NO: 41012 - DNA, 2451 bp, Arabidopsis thaliana landsberg
tctatctataattggttttgattgaagcatcttcggatatttcattaaatgaatgattatacacaattaatttgaccagctttttaataaagaagccaaaacaaaaactcaaaattacaatttgaccatacaactttcgaatatttagaaaacaaaccccgtcagctttaatctggtacacagtggttgggattcctgcagattcgagccgtactctctcaagactctgacccatgccttcatccatatataactattcatcatcacaaatgtatatttaaaaattcacgcaaacaaaacaaagcttgaaaataagaaatattaaattgccgttacgaagtcttattacgtcacgtgagtttcgtgcttctctttctctctctcttcttcttcttcttcttcttcatcttcatcttcatctttatcgcgcctaaaaaaaaaacccttcctttttctctttaatggcgtgatttctcttctctgctcttgtaaaaattgaaactttctctgtaaaatcgtctcttttaaatctccgagttttcttcctccttctctaaaagaacatggcgtttcttaccgcattgttcctgtttctcttcttctctttttcgagttccgccattgttgatcttagctcggaaacaacttctctcatctccttcaagcgctcactagaaaacccatctctcctttcttcatggaacgtttcgtcttccgcgtctcactgcgattgggttggcgttacgtgtctgcttggacgagtcaactcgctctccttaccgtctttgtctctgagaggccagattccgaaggaaatttcgagtttgaagaaccttagagagctttgtcttgccggaaatcaattctccgggaagattccgcctgagatttggaatctaaaacatctccaaacccttgacctctcaggaaattctctcaccggacttctcccgaggctactcagtgagttacctcagcttctctacctcgaccttagtgacaaccacttctccggttcacttcctccatcgttcttcatcagcttacctgcactttcttctcttgacgtctccaacaactctctctccggcgaaatccctcctgaaatcgggaaactgagtaacctctccaatctttacatgggactcaactcattttccggtcaaattccgtcggagattggtaacatctcgttgctgaagaactttgctgcaccttcttgcttcttcaatggaccgttaccaaaggagatttcgaaactgaaacacttagcaaagctcgacctttcttataatccactcaagtgttccattcccaaatcgtttggagagttgcataatctgagtatactaaatcttgtctccgcagagcttattggattgatcccaccagagcttggtaattgtaaaagcctcaagtcactgatgctgtctttcaattctctctctggacctttgccattggagctttcagagattcctctgttgacgttttctgctgaaaggaatcagctttcgggttcattgccttcatggatggggaaatggaaggtactggactcacttctgttagctaacaatcggttttcaggtgaaatccctcatgagattgaggattgtccaatgttgaaacatctcagtctagctagcaacttgttaagtggttcgattcctagggagctctgtggttcaggttcgttggaggcgattgatctctctgggaatttgctttctggaacaattgaggaggtctttgatggatgttcctctcttggagagttgttacttactaataatcagatcaatggctctattcctgaggatctttggaagcttccattgatggcacttgacttggattccaacaacttcacaggagaaatcccaaagagtctctggaaatcaacgaacttgatggagtttacagcttcttataatcgtctagaaggttatttgcctgcagagattggtaatgcagcttcactgaagcggttggttctcagtgataatcagttaacaggtgaaatcccaagagagattggaaaactcacatctttgtctgtcttgaatctgaatgcaaacatgtttcaagggaagataccagttgagctcggtgattgtacttctttgactacattggatctaggcagcaacaatcttcaaggacagattccagacaaaatcactgctctcgctcagcttcagtgcctggttctctcttacaacaatctctccgggtcaattccatcaaaaccctctgcttatttccatcagattgagatgcctgatctcagctttcttcagcaccatgggatatttgatctctcctacaatagattgtctggccctataccagaagaacttggcgagtgtttggtattggtacagatttcactgagcaacaaccatctcatggaaagattccagcttcactctctcgtttgaccaacct

SEQ ID NO: 41013 - DNA, 794 bp, Arabidopsis thaliana landsberg
aagaaccgaatagaacaattcaccaagcctttttagagcagttacacacggtttcaaattggggaaaagtttatctaaacaactgataatacagaactggttaattttattgatttatacaattatacatatgtaaattatttggagcatttgaagtatttggaacaatagtcaaaatttgacaattatttcgtgacattgcacttattaggctgtacgtacattcatttttgtttcgttcaccatttgttccacaccgtttatttgcttatcccgcagtaatcaattaatcatactagtctttggttctcggttcggcaaccaattgggttttcagttatatttgtttctcatttcttactcggtttcaaccaaaaaaaaaaatcaaactgaccgatctaaccagctaaccaaaatccaaataaaccgcgataaccgagatacaccgttaattggtaaagatattataacctacagtcaaatcaattatttcatgccatgaattgtttgtaaatgttttctttcaaattgttttgtctggtagttcggttgcaaatgtaaattatttgttcggttgcaaatgtaaatcccaccaaattgttttgtcaggttgttcggttgcaaatgtaaattatttgttcggttgcaaatgttaagtcccaccaatttaaaagtgttcgggtgccaatgtaaattattatatattttttggaaatgttcttactttgcaaactgtctaaatggtaacacttctgcatctgatattaattatattaagactaataaatgattat

SEQ ID NO: 41014 - DNA, 498 bp, Arabidopsis thaliana landsberg
ccgggggactatcatttgtacagcaaaacagctttgacaaactaaatcccccaaactcacttgccaaaacttaaacgccatgcatagttcgctatgcatggcgttcaagttttctcactatcgttcgaaatgacatgttttgaaattttatcatgttatcttcctttcccgcttatatgccggttaatatttcgttataaactgccaatttattgttagaaaagcttaattggcttatttaattttatcttacaataattaattaaaaatccacctgggtatgatcggtaaaaaggttttagggaaagcggcagtagttgttgctttgggttcgatgttttgtgttggaagtgtatctgcacaacaaaaggattacccaatccagccggttccgtttacacaggtgcacgttaacgacggcttctgggaaccaaaaatggaagtgaacgccaacgtcaccatcccctatgtgctggaacaatgcaaagccaatggccg

SEQ ID NO: 41015 - DNA, 498 bp, Arabidopsis thaliana landsberg
  unsure (1)..(498): unsure at all n locations
gcgccgtgcatgaacacgagcgccccgtcgcggcgaacgcctcggcgatcgcccgaccgaggcccggtgcggctccggtcacgaccactcgctgccgggtgcgctcgccccgaccatgccggttcgacagactttcttcttcgatggggagcaccgaaaatacctatcgggaccgttcggattcgttccattaagcggtaggtagacgaattcagtgaacggcgtgctcgataaactcaattgccggacggctaagcccggcgggccgcgtagtcgcgcacgcccgatcccggcagcggcgccgagcagcggcaaacccgacggaggtcacaacacccgagaccgcgtccgcgatgagggcgtatcccggtggggatggtgctgcgcggtccgggcgactacccggatgccacccaccgcgtcctcgacgagaccttcgannnnnnnnnnnnnnnnnnnnnnnnnnnnnngtccgacgactatccctacgacgagtac

SEQ ID NO: 41016 - DNA, 845 bp, Arabidopsis thaliana landsberg
  unsure (1)..(845): unsure at all n locations
agaacaaaacagggcaccaaacagccagctaacccgtgacccaaaaaagataacaacttactgaaaacccatctataattctaaatacgaccactcaaaagagcagggattcatggcttctatatacaatcaggtgatgctggctcagggtagctctggagcatctgcagcaacagccaccgtgtatatagctcacgaggggaacacaactgctaattggccaccgaactgccagcaatttgacggattctgcgaacgcatctcgggatctctcatcggttctaactgcgcagcgatcttactcatgctcattgccatcaattccgctatctccctctctcgccactaagatatctatgcacatatatatatcgatctgattttgcagagaaatcacgcaaacgaaatgtttcttgaatatacattattaagtcttttaattttatatctaatgtaacgagtccagagatttcatgtgaagaatgaagaaagacatatatacaatacaactgaattaagcaagaaactccacaacattgtctatcgatttcaatgtcttctcgtagtaaagataggactcgtacacctttggcgtccgtacatagaaatccaactgttatatcaaaattatgaaagatatcaatattaacatgtggttaaagtttgacttccatatgatcatgtgttacaaaacgcaacattcagtgttattaacaatcaaaccttaaattagcattaaaaattactaattctggttttaatttgttcattaattatataacgtatacctcactcatgttttcgacaagctcgtttgccgnctgaacgtaatcattccggcgact

SEQ ID NO: 41017 - DNA, 1050 bp, Arabidopsis thaliana landsberg
cgtagactgaggttcttttcttcccccacaggaaaagaaataacttttatggagttgactcttgagagaaatgttgtttattcatttttatctagaaaacaacaggagttagagcctcgtgggtgcattctgactcactcctgatatattttaaacatggatctgaattctgaaggtctgctcgagagttcttgacttctgacgaagtgaacaacgacaattcgccttcattccctcttatctctgcctctggtatgaatcttatgattctaacaacggattagtatagtgaataatcagctttggtaatcatgttgatgccatagttactctgctctcaaaaaagaaatgtttgatgtttttctggacgttctattttagtcataaagcactagcagcatctctctaaagtgactttgactttcgttaggactaggccctgtttaatatacactatttgcaaggataattccttactttaagttttaaagaaaatatctgattcctcaccaccatttcttggggtttctatttcttttattggcaactttctcctcttggccctcatgtctaattgtatatatatagacatcattacagaaacactttcttataagatttccaacatccaatagtgtcatttttagtctgtagatatcaatgaggcttgatttatctgccaagtttcggcaagttcttggtcttgccaaagatcatgcatctattggcagagctattgtacaaaactacaatgaaaaagccttttttgacattgaagtggcagtggttcgagccactagccatgatgattgtcctgttgatgataaaaccatgcacgagatactcttccttgtctctaacacaccgggatcgattccttttcttgctgaacagatctctcgccgtctagccaagacaagagattgcttagtcgcgggtaaaacactgttactctttcaccgtctcttgcgtggtagcagtcgcagtatcgagcagcaattgcatattgcacacacatctggtcatcttcaaataggttgctcctggttc

SEQ ID NO: 41018 - DNA, 523 bp, Arabidopsis thaliana landsberg
gccagccggcacgtcctcgtgcatggcacggtcgatctggatggccagagccagcctgtcaccatccagcggtccggcctcctctgccgtcgccggcccggttcgttccagtatttcggggaggttgcgataaatgacggaggcttcgcgcttgccatgcaattcaggcggcaagctgccatcgggcgactcatgagcagcaagcttttgtgccattgcctcggcatcacgcaaaaatcgctcgtactcggctgcatccttgcgtgactgcttgatgaggtcgtccaacagcttggacatctgcgcataaaaccgcggatcggtaagtttttcgcggatgactgtcttgcgcacgttgttgatgatgccctcggcaacggattcccgcgtctcgtgtgcggcattcaacttgcgtgcaatggcatcgtggatgcctgtatccacgatcagttggaccagcgatttttcacccagctcgcccagcggaacggccgcatcggcttgcacataggtattcagcagt

SEQ ID NO: 41019 - DNA, 640 bp, Arabidopsis thaliana landsberg
gttattatacggctcatctctttctatatcttttacttccacacaaacaaattccttcataaatctcacttttctttctcgctcaaaatcaaaatcgtttcagagaatcaaaaggttttgaatttgtatgagatttgtgacgaatgtttgtttttccaattatcctcatcatttttgtgtctcatatatcggatatatgaatgtttgataaaccgagatttctcaggctcaggcttaacgtaagcaatttgcagttgtgtgtgttgcaaggaacatggtggactgtggtgtcgatatttaccaacttcctgttgttcctagggcatgtagatcacccagagtacgcatatacattcgaacatgatttattttgccataagttacatacattttggctcactcgattgcatcttttattttttatccagggacgcaggctaaaaattatgagaaaacaaagatcggagttcgaggttttagcccaagtggctggaagattctcaggtgagcgtaaaaaccgaattgttatcggctcgttggctcacgaaacaaaggagacgaaagacgataatgtcgtcgtcaataacttcttggagacaattggaagtgaggttaagccgcacctgttctggagaacctt

SEQ ID NO: 41020 - DNA, 970 bp, Arabidopsis thaliana landsberg
cattgaaccactcccacattatgtttatgtatccatctattttaagggctctcatatactaacttacagctgaaaagtgtaaatgggaaacagttggaacagttatataagttctgcttttgttgtcaccaacaaaaaaatgatatgcttttacatgattccaacaaaaaaaaaacagttttgtattcttgttaatgatggtgccaaaggcttataagaccataccttagattctgttgaatttagaatctgggtttctatctcttttctggaaatcttgtttctttttcttttctttttataccaaaactttgtgaaatcttaggtacttttgtttagtatcagtttactcgtttaaaaagaaccaataaacctactagatataaatagtaagaagtctataacttagggttgtgttaaatactaaacaatgcttaaaaatgtggttagacatagcgctatactaaagctaaaaagctaaagataaccataaaatcatgaagataataaatggacggatagaccaaaaagaaataatgaagcataatacaaaaaaaaaactatatcggttccaactaccacacatttaattcctttcccttttcatttaacacctgtgaagactcgttgcgagggttctctacctctttatgtcattcaaacttatcaattataaagtctcttgattttacatgttcaaccaaacacgatttttcaaacttaattttatatatcttcttcattaattatcgaatatcacttctcttgcttatagttacaaaaactaatacaatgataattatataattctatgtgtgaacaaaacgataaatttgtcaaagtatcactatcaatcccttggaattagtagacaaccaaatatggatcctttaattgatttgtgatgtttctattcatttcgaactaaatgaaaacatctcatcgtaaataatcacactgttaaatttca

SEQ ID NO: 41021 - DNA, 991 bp, Arabidopsis thaliana landsberg
acttaaccacatctaattcatcagctatatttaaaatcttactgtttttgtgagcaagagactttagaatagaaggctttctcgaggccaagaaaatattttggcagtccaagatctttgaagctaaggtaagtagtaaattattattctttaaatatgactctgcgttgtaggtaacagaagtcttcgacccaaataataatgtaaacttctcggccacctcaaataataaatggaagattggttcggcgcaataaatataaattcattttcttaacaaagaaaagacgaattaagtttaagataaataaaagtgagtgacaaacagaagagcttcatgcaaataaagaagtctacaagtagctaggcaacattaatacattctaaccacttaaatatgctgcttttacgttatttggtaatggtatacatcatcaggtctctgctcttctctaaaaatcttctgtcactattctcttatttctctaaccactagtcttcttctaattctcaaagcttcagccacacatggatttcatattgaccaatccatgctataataaatatatagccaatccaagtaaattttgttacaatcaaaaggacatggtgcatcatctctatttgactgctctgctgctttaaatgtggtttattctagaatgacgagtttaatatattgtgtgaaagcaatttttaaagatattttttggaattacggattaattattgtggacccttttcttttgggtcaaaattgttgtggaccgttagaattagattatgatagtgaaatccaaacaataatatttccctcttttttttttttttaactcgaatattttcctattcaaacatctgaaaatcttgtgaaaaaaataaagaaaatgatctacaagtagtaagcattcattgaagaaaacaattttaattttgctaattctagatctgaatacgttaaaaatgacataatataaatggtactatttcg

SEQ ID NO: 41022 - DNA, 507 bp, Arabidopsis thaliana landsberg
attcttaacataaaaataaaaacagtctctttctttctatctttgtctatctttgattattctctgtgtacccatgttctgcaacagttgagcaagtgcatgccccatatctctctgtttctcatttcccgatctttgcattaatcatatacttcgcctgagatctcgattaagccagcttatagaagaagaaacggcaccagcttctgtcgttttagttagctcgagatctgtgtttctttttttcttggcttctgagcttttggcggtggtgggtttttctggagaaacccaaacgactatcaaagttttgttttttacaattttaagtgggagttatgagtggggttggattaagtaagttacaagtatgaaggagttgaagattcgaagaagcggttttgaagtcggcgagaccaagattgcgagcttatttggctgatgatttatttcagggaagaagaaataaatctgtttgttttagggtttttagatttggttggtgaa

SEQ ID NO: 41023 - DNA, 465 bp, Arabidopsis thaliana landsberg
aatcgtttatttgtgcaaccttgaaatcgttgttaacaaagcaatttctagttgatctccgattttgtagtagacaaaaatatggtatactaactatttaaaatatcaagttaatgtttgggaggaatttaatgatattttatgtaagattcttactacaaattaatgtttttaactattagaaaatctgaaaatgaacaaatgcaaacaaatagaataaaaacataagcaaaaattcaaaaaatgataattatggtttacatttttaaaattaaaacaaaaagatgtataattgttgggaaattggtgctgttaaaagaaggtatctagcctctaaaataaagtcaattgagtttctagcataagtcaatctgacaccaataagaaaatgacaattttatttttcattctatctttctacaaaatagtcaactatttgtaacataatagaaaaaatgtttcaat

SEQ ID NO: 41024 - DNA, 603 bp, Arabidopsis thaliana landsberg
attccacaactatggccctccattcttttaatataaatcaagttctttgaaagttgctgataacgtgtttttattctactaccaatttaaaagtcttgacatacgagtttagacatgtttataagtcgaagagaaagtgagattgagagcttttccaatttgattctcatatctccataatatatctaattgcatgatgtctcctaaattctgcttcaagttctgttttttgggggctctgtttcaatacaaaacctctgttctgcagattgctcaaatgaacaattatgaagttaatggtcataatttggaactcaaagtagataaaaacttaagttacgtgatagaatttaaaaacaatgtgatgtgaatttaaaaactgccaaaaaggacttccataaaagctaagtcaaagatctcggaaaagtcttaaaaaacaatgttgattgagccgctagtgagattattttttctagtgatttgagtcttgtcttgtaggattcttgttgcttctctaccacaactatattttgtaacttttgctctctcttatctcaatttcttaaaggtttgagatggtagagttacttgactgtgaatttt

SEQ ID NO: 41025 - DNA, 545 bp, Arabidopsis thaliana landsberg
cgatatatatatgttactttgttagtagttatgcatatttcatttaagttattatatttcttttatactgctaatacaatatatcacatatattatttcttattatcttaaaaattgtttgataatttcaaacatgtgtcacactaatgtaaaatgctaacatatattaaatttttgttacatactatatgttaagatatttaatttcaaacacctcaaaccacacattattacgctaacagttaatccataagtaacaaaaaaaaaaatgaaaggagaaaaaaagtataaatacggatagaggagctaaatttgtatgctcagaacttagaatatttaggggaaaagttgtcgcaacaaattccacaacaacataaaagcaatgatggaagtttatattattgtcgtcgtacgtgtaagcaaccgttagtttggttgttatcgttggtactgtattttgctgtagcatctgttatcgttgtctcgtgacggagattaattatactcgaacatgtcactaccggcgatgacacatggaaatagat

SEQ ID NO: 41026 - DNA, 522 bp, Arabidopsis thaliana landsberg
ctcccgagcaccgtctagccgctcagcatgcagcttcgcatcacatccaggaggttcctttccacagcagcagcggcattgcatcgtaacaacacagcaatgcgaccaatgtatttgacgttcgccacgtgcaccaaaacacactgtgaccggaatgtttgtttacacatgacttgtatacacttagtcatttttacagcaattgtgtaagcattttcgtgagggacgacttcattcatagctacttgcaatcaaattaaagcataaatacaagccaaattaaagcatgaatacaagccgagtgagttcaaataaatgcaaagaatgacagagtcaatcgaacgcggcccccgcgacatggcaagaatgcaaatctaaatcacagcaagaaatggccgagtcaatcaaacactaccggccaaattcgtgcaccttccttaaactcggaagggatgggccttccaaccttgtcccaacataacaccagacatcaatataactgaatactggccatgcagaaag

SEQ ID NO: 41027 - DNA, 423 bp, Arabidopsis thaliana landsberg
tgttatgttgcagcttaacatcgttgaagggaagatgcagtacttgtatgatgagagtggtaggcgatatctggatgcctttgctggaatagtcactgtgtcgtgcggtcactgccatccggatattcttaatgcgattacggaacagagcaagctacttcagcacgcgactactatttacctgcatcatgccattggtgattttgctgaagcattggctgccaagatgcccggaaatcttaaggtacttgagagttttaaacaaacaagtctgaatgatgtagttaggtttctcttgttggtttatcgaggaatcagcatgctctatgatttggatgcaggttgtgtaccttgtgaattctggctcagaagctaatgagctagcaatgatgatggctaggctctacactggtagccttgaga

SEQ ID NO: 41028 - DNA, 583 bp, Arabidopsis thaliana landsberg
  unsure (1)..(583): unsure at all n locations
ggattacaatcaacatcgatagtatacaatcacgaatcagatgcctgactactatatcaaagttttttactatctcatatgtgaattatggtactaaattcctcttaaaaaaattaatgcctgttattaccatcacttatgatttttctaaatacatagataaaaaattatcaaaaacttttgcatgttagcttggatttcaaaacaaaattgctttctttgatataatgtcaaaacaaaaagttcacaaaacaaattataatgacaattcaaattcaacattactattactcatgctataaaacaatttcctaaattttatagtatcccaatatcttacttttgttgaagtatttactaatgttcactttatatggatcaccagagataatagtgaagttattgtgtgtgactatatatctttttttttttttgngactatattattcaacaaattgttttttttctttgataaaaatacaccaacttgacttttgttagacgatctaaacacacatcatctaattaataggcgaaccaaatcttacttatatttaacctaattttattatcataaaaaaaa

SEQ ID NO: 41029 - DNA, 346 bp, Arabidopsis thaliana landsberg
  unsure (1)..(346): unsure at all n locations
gcgttttatgtgcagaagcggcaggcggacttgttcggtggaggcggttgttttctnnnnnnnnnnnnnnnnnnnnnnnnnnntgactttcgtttccaaccgcctgaagggattgtttcccgcagtgacagatcccaaggtgctgtaccaaagcggtgattccaagaacccgagcggagcgccgctgttcgcgctctatttcgcagcatccaatccgaaacccgccgcgtttggactggcgaccaagatagccaaagggattctggacacgctatagcggtatctgggctgcctgtgggtagttgtcccatgtgcgaccttgaagcacgcgaccattcgccttctt

SEQ ID NO: 41030 - DNA, 641 bp, Arabidopsis thaliana landsberg
gagaggcatcctgtcgttggccgtgcaatctcaaactctccggcaagatttgtctcgacgatgtaacggttcttatctcctgcctgagcgtctacatactcgtacttcccagccgtgttcttaccaaatttctcccatcgggacttgcagagacctaaacacgtagattaatcttttcatttcagtataattgcacacttacaaaatactaacaaaaaaagttgcacatttaaatacaaaacatgtatgcaatatggtaccatacacatccaaaaagatgtgaatattacaacatcaaatgagataaaaattgacatacgattatcgttcataaacatatttcattagcatctcacttaatttcaggtacaacaatgcatatctaaatcctaatgtgatttgctctacatatcatggtatgctgatgtgtatggggagaaaatacttacactagccaggaactctttataagaatcaaatgactaaataaccaacctcaaagctcaaatgtgctactctatattgatcaaatttatttctgaatcatgtttttgtaatcacgccttcaatctatttcttttcagacttaattttggtttcactatttcaacctttaacaaaaattcaaataagaaaatcaa

SEQ ID NO: 41031 - DNA, 592 bp, Arabidopsis thaliana landsberg
ctctacgtgtcataataccaaacatgacaaaacaaaacatgatgagttatttggttctgaaacaagaaaaaaagaaaacaattaacaaaagctgcatcaacacattgtttagcgggaacattcaaaccatgatctccatcctccgaggttgtcatttccacttcctctatgtgttccacctctctcccatccgctctgtgcatttcctcttcctctctgtgttccacctctttgtgatctacctctgtttgatcgtcctctctgtgatggttggaaagcttgggatggcgctacatatggaggttgagaggttgctccctgagaagcttgagatggttctacttgtgatgttgctccaagagatgtttgagatggtgtaggtgctccttgggaaggttcagatggttctcgttgcaatggttgtccttgaccgaacaatatattcctcggctcctgcagccacaacataatttcattaatcaaccaccttatgcacatgataattttaaagatgacatgaaataaacctgatcttttcttgatcgacccctagatctttttggtggaggtgcaacagtctcattcttacacc

SEQ ID NO: 41032 - DNA, 894 bp, Arabidopsis thaliana landsberg
atggcattatattttctaaatagttttattttgtcaacgtttggtgtatcaactattttgcaaatagcagatactttcagtgaaattccttatcatcgaggtcatacctcctttggcatacattgtaaagtctctaacataagccaacaacttgcaagctctaatgattcacaagttgataacaccattttgcaagctctaataatgattcattaaacaaattggcaattttcaaataccaacaccaccctttttcttgttaaaattactattgtttattttattttatttaatgttaaattatatttaaaagaaaaataaccttggtacatatgaaatgctaactttttcaagagttattttaaaaaaacagaatttctaatatatctattgtcttgattcaaaccaaatttggatgccatttttgaacttcaatcctccaccaccttgaattgtgctcaaacggtttctaatattcttgtctatgatcatcacaagtatttccgttggtgatgattgctccccatgcctcctcctattctgttcattccatattgagtgtatagagttctgtagtgcataccgaagtatgtagctcttcgttttgtccacaaggttttcagataaaatcttcataacctctgtccaactcaccgagaatctgtccgagaaaattccccttgttaggtcttcccatatctttttgagtagaggcagtggaaaaataagtgttccctcgtctctactcgttcattgcaaattgttcattgcaaaaaatgcagctcgaatctacattacaattccacttcctcattctctcccctgttgcgactctgtttttcacaaacgtattggtatactttggagtagcgtatgggaaccatatctcatttt

SEQ ID NO: 41033 - DNA, 614 bp, Arabidopsis thaliana landsberg
gaggatgtgaagtgaagaagaagcagagatatgtgttgatgccgcagagcaaatgatccttaaatcttgtacctaaagttttgtgtatctctttcttctgggggaagtgaccaaccaagtgaagcaatcactctgaattttaaaggataatttccttggtggtatttttcttttgtgggattatttttgtggattttggatggatgcaggatgatctctgcaatacaaacaagagctttgactgaagaggcgttcatctacacaagagtttcgccctctccctaaaagttgtaatctttttcttttttgtatatatttcattttctaatttactcaattttagaagaaaaaaaaacaaaaaaaaaatgatgtgatttgtagtatctgtagaaacaataagagatgttttatttgacaattttatatagatagtacattttcttgtttgtaaatttttgtcttcttgcatcttatatatttggcctacgcaaaatattttttcaaagagttcttatttacacaaatattcctgattctttcttttagatattgataactctgatgattgccgacaaaaaaaaaaaagtctgatgattaccatgattgcttacact

SEQ ID NO: 41034 - DNA, 1030 bp, Arabidopsis thaliana landsberg
attttaatcatcatcttgaacttcttgttaaaaatataaaattaattcataaacttttccatgaacttaagttttttaatattttttgtatcgtatttatactaatttcgatcttctttgtttccttcgtaatcgttgttgtaatttcgtaaacctaaatttttcatatagctcctttcttctatgtatatatgttttgtacaatgtttcatatatataataacaccctttggaaaaaaaaaaaaaaaaaactttttcaatgtttatctttcgtggttattacatatagtagaaatcccaacattcaacaacaataaaaggttacaaatcctatatttaccaaaaattaagaaagtctaaaaagactaataaatacaaaaagaagaaaagaaattgtttactttttgagtgtaaaacaaattaaagttaaaaaccacataacatcccccatcccatcttttttactaataccttccgccattaacataagattgtctctcctctttcgaattgtctctcctttttcagctctctctctctgtttctccttcttcttcttcttcctccagcttctttcaatttctccggctgctaaaccctagcgcgccgtcggagtccctgcgttctcataccaacctttactcgccgtcgccgtcgctgcagaactggtaagcatatgtgtttttttgctgctctctgtattctctggaagctgaaaggtcttctcggcttgtttatctgtggtagttttgattaggatgaggttttgaagtaatagagtgagtgagtttgctccaattcttaattgcgtttagagatagaagagagagagagagagaagctatagtttccaggcggagaagaaagacaattcctttttgtttaatctggaatcaccaatagttagttatatacagtgtttttatcttcttcgtttttttcttctggatttgttcttttgtccttgtcttgctgtgactgactactccacaacagaaatcgaagcttaagatggtggataccgaaatgc

SEQ ID NO: 41035 - DNA, 817 bp, Arabidopsis thaliana landsberg
gaacgctgatttcttcaaatatttatcgaatttttttcgatgtttctctttgtaaattctctgtaattcaatgaattgaatggaataattttgtctctcttgcatttcctcagctccagcttttgtttttattagtttctaagattgctttttgtttttagggtttattctcaattcttatatagtttttgaggtttttggtgtattgatttgattcatgtgagtgattgattgatttagaatcttttttgagctgtgactgtgatttagatttgatccacttcagctataattctttgttttgatgatgattatgataattcgtaattttgagcttatttgaattcattaactaatttagtatgatgaaatcttaatcaggggaatgtcagagagtactaatgaagatagtggagcaggaagatcatcagtggaagagaattcaaatggacaaagaagtcaatcagaagaagcaatcgctgagtggcgttcgtctgaacaagttgagaatggaactccttctacatctccaccgtattgggacatcgatgatgatgacgattttggatcaaaaccatctcaactatttgggaaaaatacttggacgattgagaaattttcagatatcaacaaacgagagctccgtggcgatgtttttgaagtcgggggttacaaatggtaataatgatcactaaaccttgttgagtacttttccttaacaaaatgtttgatattcctcttgtggtggtggtgtaggtctatattaactctatccacaggggtgagatgttagcaaccatctttctttggctctatg

SEQ ID NO: 41036 - DNA, 351 bp, Arabidopsis thaliana landsberg
tagacatatgttctggggataacaaattttcactgtcttgtcattcttctcatctcctagacaaaggaaactcaggagatgagaagaaaattttggtggttttttataaactataatataatacacatcaaatctttgacacgataccaacttgaagaagaagaagaagctgcattgatcttcccaaaagatcctccatggttcaaggcatggatggttcctgtgatgatgcttttcgttttctttgtattttctattggaggaatttgtcgacgttgtcgcaattgtcgccgtggtgaaaatttttccagcatttattctattaactaattatttagatttttttttttt

SEQ ID NO: 41037 - DNA, 743 bp, Arabidopsis thaliana landsberg
  unsure (1)..(743): unsure at all n locations
ctctaacctacatatacgcacattcacatctatatatgcatacatttataattatatagatatacacattcacatctatgcgtaatactaacataggtgcatatatatcacatactttaggtgacttataagtttaacattatacattcttcatcattgccggtaaaaatgtttttcttctttggtaacctgatctccatatcgtgttatctctagatcaatgttgtaatatatatatcattttccatacataatagtaatgcagtttggtttgatagtttggtcattatttccaagccaacattgcgttgtcaaatttctcactactaaattttcttttactttctttcatttggcaggtgtttcaagaagcttcaatggcaaaaaaaaaaacacaatcgcgatgatgctatcaaacatgattattgtactcagatcttctaaacaaaattcaacgnnnnnnnnnnnnnnnnnnnnnnnnnnnnnnnnnnnnagctatagattaagaaaagaattgtctacaaacaaagttcaacaataatcttggatatgtaaattttgcattagtcatgcacacacataacaatgttaaaatcgatctttggattcgaccaacataacanatacaatntgtctatntggtatactattgtagaggcaaggagattggatgtatgaaaatagagtaaaagttctaaaattggacacacaacagaagatcgacgaagaataaattttgaatg

SEQ ID NO: 41038 - DNA, 526 bp, Arabidopsis thaliana landsberg
tcgattcaatggctgctcatttgcttcaacttcttgcatctctaccgcttttatcactttcccgtttctcctagtgaagtaaacccttacttccgcttccgaaatcggatacccttttgaaaacgtcaggaaaaccgtccgatcatctgccgccagcacaccttccttctcttttacctccattgtctctttctctctaagggccttttttgtttcgtcttcaactggaggacgaggacgaggaggaggaggagaagcaatttttacttgttgtacacttaacctattagggttttcttgttggagactcaacctgagtttcttcatatcctctatgaatttctctctctctaaagccaattgtttctccctgttgatcctatgagctgtctcgcataaatctgagaatgctcgagtgcaaacatcggtccaattctttgtcactccagcgcaaaattttttgcgttgttggttgatcaatctgagagtaaactttccttcagtaatacgtaaggagcaaatggta

SEQ ID NO: 41039 - DNA, 754 bp, Arabidopsis thaliana landsberg
tataagtatatctaatcatacctttaagaaaaaatattttctttacacaaaaaaaaatcgtggctcgcttatagacaacatcgcagccattccttttggactggtcatgaaattagacagatcaaaagttaaaaaagctatcgtgtaaaagtaaatctaaagcagtcaagaaaagcatgtcttttattcattgtttactatttctacgtataaaagtagataattacttttttgcatggcgagagtaattaaacaaatatactaatttctagttttgttaaaaaaaattacttaaagtatttgactagaataattaatgctcgtcagaaacagcggaagcagaacgtggatccttctgggaacgtgagggataactattcggtaaatatgggcaaatggatttcatatagaattaaaaaagtagttttccattatcaaatattggattccaaattttaaaaaaatataaatgttgcatacattatagtattatacatcattttaaaaattcgtagatcttgtttgattttttttccgtagatccttgatttaaatcactttttattcaacgaaatgctaaaagaaaacaaatctaagtatttaacaaattcaccaaatatatacgacatttatttttattatttgaaatattactaatgaagattagtcagtgaaccccacataaataatccatttccggcggctagaaattaaaaatacatttatgagatcttttttaataagttttaattcc

SEQ ID NO: 41040 - DNA, 516 bp, Arabidopsis thaliana landsberg
  unsure (1)..(516): unsure at all n locations
accgcaaatcaccaccatcttcttctttctcttccatgttatctcccacaacattatgactaatctgcaactttctctctgccctcctcaaaataacctgaaacacacgcatttagattttgataatgctttttgatgactttgtgttttgaaacactacgacagtcacagacctcttccacagaatgttcagtaacgaggtttatagacagcacatgactgatttgtccaattcgatgagctcgttgcaaagcttgtttatccacctgtgggttccagtcttgttcataaaatataacctgcatattcaaaagcacttgaataagcactagaaacaaatcatatttatctttctnnnnnnnnnnnnnnnnnnnnnnnnnnnnnnnnnnnnnnnnnnnnnnnnngccagaaataacgaacagtatcagcagcaacaagattcaaaccgactccccctgctcttgtagagatcatgaaaacaaaggcattgcttccatcaacttcagaatccaatcc

SEQ ID NO: 41041 - DNA, 701 bp, Arabidopsis thaliana landsberg
cccatagacaccacaaatttgacacctagttgaaaattgtcgtagtggtgaaaagccaggaggaatgagtggcgcctccgtatgaagagtttgcctgttgcgtgaaaatgcatgattggcagtgactgagaattccattgaatgatagatgaaacaagagaagaagaatagatggtgactcggggaaaaaaataaaataaaataaaattaggttttagagatctttgctctgataccatatgaagagttattgaattgattcttgtatatttcactgaatgatattcttacaacttatatacacagcccaaggcttagctagagtaattatagagaatattgagacattaatgaagaactcaattacaggaatttgacgtgtgaaggagaatcagattatgcactttccttaacactctacagtaagtaatatgtatggctacttgaattgtcctagtaatggttgatcttgtatttttttttctcgtacatgcaccattaggggataatttacatacagacactggtacaaggatgcatgtatttattttgcattctttcataaccataagaaagatgtcttaatatcatcatactacgatccattagttggtcctaagatctcagagattgaaagcaaattattcggctcagccatcaagcccatcctaatgtaaaaagaagaagaacccaaaacaacc

SEQ ID NO: 41042 - DNA, 810 bp, Arabidopsis thaliana landsberg
  unsure (1)..(810): unsure at all n locations
gaactactagccaattgttagtcggattactggtttaataagatgatcagaacaactaaacttgtaaacttccatcgattacaacaatcttgtgaggctaacttgaagtagttcaccattttggttggtgaacactatatatgtcactttcaattattcattttatttgtgtcgncgagtcgaaagtgattaattgatcgagctcaagatcttgctattaaggcgaagtaaagattgcaattcatattgctgtatcctaacaaatgtgatgatctcttatcgttctaacatctctctttcagatttatataaaaatatatatatattgtctacaaaactcattcatccacatccaaaatttaaaatttggattattacacaaaagtagataaaccactagacaaataatatctagtcgaattaattaaattactcgtctaaattattagcttttagatatatatatatatatatctaaactaaggactaaacctagatagtgtaaattcgacttttttttgttctttgaaactatgtgcaatatctattattttgaaaatgccaagataatcccgtaatgaacatgagaactactatattataagaaaaaaaatgtgatttaaataaactaatatgaatagtgattgaagaaccgaacacgttatgtttgagcagggagaggagtagagagtgcgtcggtcgggcacagaggatgagtcagagagccaggacctgattccccctttgtagggacacttttaccactctttaatgagcctattcttgtcataggcccatttagatcatatc

SEQ ID NO: 41043 - DNA, 356 bp, Arabidopsis thaliana landsberg
cgtctcatggctagtagctcccgaagaatcccgcatgcttcccgttgtcccgcttggctgctgcgcgcaatggggcattgaacgagggcggcctgcgcagcttgcgaacgtgctgcatgcgtttttctatgtccttggcatagccagggctcatctcgatcaggacgcactgtaagccttagtaggcgcatgcttcgcccgttgtccccgtgcctgcgaatggatcacagacgagtccgccgggcggcgtgacaagccttgccagccaccacatacgcctgatcggctcgacggtaggatgctctgtgccgcaccgatcgttcttgtgcgcctttgctgaccagaacaaacgctgg

SEQ ID NO: 41044 - DNA, 530 bp, Arabidopsis thaliana landsberg
ttaaactcaacaagaaaatatatttatgtagtatttccatagtttatacatatatatatatatttttttttaagttcctgaatatgcaaatatactctacaactacaagtggattcaaagttctctgaagtttagtcatcaaccattgatgtgtgtcgtgcatattatattgctcatttgtaaatcgacaattgatgattatcaagatatcatacagtagctagagtgtaaacgacatctgggaatatacttgtttttgcacgaaacagtaaaatgaagtagtgacttctatatcggcagttttgaaaatctcccaatgctacattgcataatcgaactatgataatgcctctcctcaatccaaaaaaaacataagatacgtacatcatgctaaatgtaaagacacataacacttcaaaaaaccgttttacattactttctttcagctattttttaatgttcatttcatatggtagcattggagttaactttctcacataagtctttaatatctaagcattagaaataaa

SEQ ID NO: 41045 - DNA, 1389 bp, Arabidopsis thaliana landsberg
gaccgtaacacaattatttgctgctactagctacttcggtcaatcttttatattagggtttcttgattaatgaataatggttttcctacaccaacaatattttatacggttatatatgaaactgaaaatgttggttttcctacaccaacactattttatacggttatatatgaaccttaaaatgtataaataaatagctatggaaacgttcttattactcattttgtagtaagatttctctactactatcttaaaagggagatttcttttcaattcccaaaaaaaactttttgaccatgactattatcacgaatccatccagtttcacacttgttttaatttccattacgctggtcctggctcttgctagacgttttttaagattcatgaaaccaaaaggtcagcttcctcccggaccacggggatggccaatcattgggaacatgctccaaatgatcatcaaccggccggctcacttgtggatccaccgcgtcatggaagaactgcagacggatatagcttgcttccgctttgcccgtttccatgtcatcaccgtgacctcaagcaagattgcccgtgaagtgcttagggaaaaggatgaggttctcgcagataggtcagagtcatacgcgagccatctcataagccatggctataagaacatttctttctcttcctacggagagaactggaagctggtaaagaaagtgatgaccaccaaacttatgtccccgacaacattgagcaaaaccctcggttatagaaacatagaagcggataatatcgtcacatatgtctacaatctatgccaactagggtcagtgaggaagcctattaacgtgagagatacgatattaacttattgccacgccgtgatgatgaggatgatgtttggtcagaggcattttgatgaagtggtagagaacggcggtctcgggccaaaagagaaagagcatatggacgcaatataccttgctcttgattgttttttcagctttaacttaacgaattacatcccttttcttagaggatggaacgtagataaagcagagacagaagtaagagaagcggttcatataatcaatagatgtaacgatcccatcatccaagagagaatacatttatggaggaagaaaggtggaaaagaaatggaagaagactggctcgatatcctcatcacgttaaaagatgatcaagggttgcctttgttcacatttgatgagattagggctcaatgcaaggttagtgatgttcacacataaaataaaattaggttttgtgaaaatttatagactcttcagttttatattactattgattccttctaaattcatctcgagatcctagcatggtttaaatttaacttttatgcatatatttcctatatgt

SEQ ID NO: 41046 - DNA, 876 bp, Arabidopsis thaliana landsberg
aagtttcatcttctacgaaagtaaagttgtcgccgccggcgtcttcaatttaacgtgtcgataacgttccatattcgagtttgcatatgcatgtcactggaaataatagttaaatcatctaaatcgcatccattaatgatttgatcatcataaaatttggtaaaaaaattacctaactcaaaagtaaaatataaaaattaatcgtttgagtagttaattagtttaccggtatactagttaaaagtttttttcctttgacggcgctcatatatatgttttaaagtatatcaaaatagggatttaattcttaaagttacactaatcctaattcttaaagttaaccatccataccaatttacagaagtacagaactagtgcttgatacagaggaacaattgatctcatcgaaagttgggacctttttaaaaataatactattatatatatatatatataataaatatacaaatatatttaatatttattctatatatataataaatatacaaatatatttaatatttattctatatataaatatgtgcataataacaaatctgagtatgaatagtaggaggggtgtatagggctttcaagtcttttcttacagaaactatctataactctagcagagagctcattatagaacagaacagaaacagagctttctaagtctacagcacagaaataaacctcatttacagactgtgttactttctttcctttttgagcatttcttctttctggttctttcctttgttttccatttctttccctttttgggtgtgatctctttaagacagaagaaacgtttctcaaagtttcctgtgaactcatctgcttgttctcttcttccggatttactttttcctgttc

SEQ ID NO: 41047 - DNA, 514 bp, Arabidopsis thaliana landsberg
ttgtattgaacgcatgatcaagagtcaagacagacatataaagataagatataagttaatcacgagagggaaagatgtgaaagaagccggtggtaacaagcgaaacgaagcctgaatctgagagagattactaacaaagtttaatagcgacttctcatttccacctttcacatcttatttttcatttccttcttgtaatttgtccccacctctctgcatttccttctttatctttatctgaattcaaaccatggtcgccgttgtaaaccagtaacttttgtaagtaaaattgatagtcgcatgtaaaaaagtcactatgggtgggagatatgatggttacagaaaatacggtaataaaaaaaaagagaggagagttaaaattttgtagcctctcgagaaccagaatttttgacattattttctaaaacttagcatccaatcaaataatcgactttaaagtaaatgtgtaattgaagaaaaagagagagagtaaaaatggtactaataaaccttc

SEQ ID NO: 41048 - DNA, 1665 bp, Arabidopsis thaliana landsberg
aagtgcaagaaccacccccaaaaaagaagaaaaagccagcggatgataaagtttcagcagcaaatataactgcaacacaagatatatgatgcggaattgtctgatgtaaaatgttctgtgactttgataaatttctgtatagtttcttttttaatatgcttcttgcatttccatgtaattgtaaccatagaaatagattatttgaatgaagatcttcgtcaacttttttgtatactataggttttcaacttttaagcgtagtcatgtagattgtaacaagtaatcaagagttattgtcaaaaaagaaatcaattatgagtgaggtaatgttacaggatgagtacactatgacttgtgttgaggccaaaaacgagtcactaccaataatctccacatgaacagacaccgtctttgaagtgatggaagcggttggcatctcttacaacaatcactctctctgtgatctttgagatgagtttggttacggtgtgacagtctaaacagactcgaagattctttatgatccggatttcagttcctggctcagtagctatgagtccaaaggcaatggctagcctctcgctgtgaaccttcaccatcagctccctttcttcctcctccacatcatgcagggccaactcagtctcgggttggtacccagcttccctcatcttcccttcaagcttctccagcttctcatagatttcctttacctgtggatgtgactgatcacctgaggtaaagacatgaggcgtttcacctatttctattaaggtatatccaggagctttggctagtttcctcttctttgcagtttgtctaaccgtagcagcctgtggatagtttctatcagctgagtgaatattcgacagcaaaacatggtatcctacattgtctggatctagctcaaagagcttctcatagactgttcgggcaaggtttgtgtctttgtgaatcctacaagctcctagcaatgtttcccacacagaagaaccaggctcaatcgacattgcctctataaactgcaatgctctctgtaagtgtcctgctcggccaagaatatcaaccatacaggcgtaatgcttgactgatggttcaaaaccataccggtggatcatggaattgaaaatttcatcaccttctttgaccaagccagcatgactacaagcgtaaagaacgcagaggaaagtgactggtgttggtgtaataccggaattcaacatctcatagaaaatattcagagcttcttgtccttgtccatgaagtccataaccagaaatcatcgtgttccatgtaacttcattcttctttgtcatcaagtcaaacaatcggcgtgcttctgcaatgcttccacactttgcatacataccaatcaaagcagtagacacatatatgctagactcaaaatctgtgctccttactaaatcatgaacccatttccccaaacttaaagctcctaactgcgcacaagctgatagaatacaagttattgtgacagggtttggactgaattcagacttctgcatttctctgaagagagatatcgcgttctctgtcaacccgttttgggtgtaacctgagatcattgcattccaagatggcaagctttcttccggagactcatctaaaaagctccgggctgatcttatctcattcaatttacta

SEQ ID NO: 41049 - DNA, 353 bp, Arabidopsis thaliana landsberg
ctcgttagctttttagttactactgatcatcaggggtattttagtcaatttacgatatctacatttgcttgggcttttatcctttatttgggctacttacgattgtttgttatggttgatccacatttctccttaatcgaatttaaaacatctggggtggtcctgatcacaacagcacgattggtgttattgatttagtcaaaaccgacgtcgttgaagaacaaactgtgatctaacaaccgaaatcgttggtaaccaaacggtcaaatgaaatcaagggaaagtgacatacgaccctcaattttgtctttgtatttgattttatgtcccacactgtaattaaaaagataact

SEQ ID NO: 41050 - DNA, 900 bp, Arabidopsis thaliana landsberg
cggaaaaatcaccggaaatcttaaatatgggcacaaaaatctacaggcaagaatagttaaaaggtaagagaagatgatgcatctctttcttctccgagagtcagaaacaaaaagtcgaaagtcgagacgcagaggaaaaattgtctcctccggagacttgtacgtctccatggaagctttcaacatcataacacgagtcatttcatatgtgtctccgttctcattactttagatcggaccaaacctaccaatcttttttatgttttttattttatatgttttgtttatgtgcatgatgttattatttttctttctttttctgatttgtgtatgtaccgcacgatttctcgtagtatacacatgatttgtatttgagactgaaataaaaccatgctatacgtagatttggtactacacgttatttaatttcaaatcatatttctatcattctgtccaaaagaggtggcaattagcggagctaattgagtttgatacgtatccaatttggataatgaatcttggaattcaatgttcaccaaaatctaacctaacttaaacttgttttgaaagtttggacttgagtctagtggtagtgagggtgtttaattttgaataaactaaactaatctaatttgaaccaaacaattcttatctacaaaccgaataacccataatttgagcctaatttttaagtacagatagtgaatttaaaatggtgacacgatacgatatgatattttaatggtgatacaaagacgacacacacataaaaatcattaaaactattaaataaactatttttgcttgagaattaaacatatatatctaactaaaattgaattcaaatgcgaaatcaaaactatttaaagtcatccgcaaagattggttctctactacatt

SEQ ID NO: 41051 - DNA, 1064 bp, Arabidopsis thaliana landsberg
tcatcaccaagataagcatttgtcacacagtaaatcacacgaagaggcgacgaaaggcttataagggtgaaggatttaatatatcaagcaaaaccctaatttgcaaaatgtctattctacccccaaactcggttacccaaattttaatcgaagctaaccaaaattaataactggttcaacttccgttttgtcttaaaccgaaatccaagtgtgcacagagacacaaaagataatttctttttctgctactttgaagttagaagaagaaccctaacaataatctctcttcctttctcttccgatcgcatcttcttcaaaaatttcccacctgtgtttcacaaattccatgtttatgaattcttcattgctctattcttagtcacctttgatttctctcgctttctatccgatccaattgtttgatgatcttctctgtaaaaagctcataaggtttcaatttctctagctttcttaaaattcattcttcgatttcttcaattctcgtgtcttttttatttctgcatcgtttattgacagtacctagacaggtttgagcttcatctctctggagagaatccatgggtgtctcgtttaagatatcgaaggttggtagaaagtttcgacctaagatttctactgaattggctactcctgattccccaaaagcaatcgttctatctgggaaaccaaaggtaatttaacttagaattttagttgtattgtgttccaactaaattcgcttattttggaaagttatatagaaaatttattacgtttggttcaggccactgatgatagcaatattggcgatgtttccgggttttcgaagccatctttacccgatatatctccaggtttggatctcaacgaaccactttgacacataatgttttgctaaattctagctatgttgaattgagtgcattttggtttctctgcagatcatgaagtttccttcatattgagcctctatccaaatgggtactctataggaaaaacctctgaggtatgtactgagagtatatatgaatttatttatcttgtgatttcttgtatttgagttt

SEQ ID NO: 41052 - DNA, 420 bp, Arabidopsis thaliana landsberg
aatatgactgaattgcccctgtcagtgaagtcatattacctgtttttgttggattcacctactactttacaaccaacgtcttttgtcttattgcttaccaaaccaaatcatattttacgtgaaaaatacaaatattatcatatcttttcttcctaaatttatactaattgccgtaaaaacaaactatactacatatgatcaacacttacatgaaactatatgaaaaattcattaccttcaagctgacaataaaaaaaatatcatcacctataaaatggtataaaacattcttttacgaggcacacttatatcaaaaagatatttgttgatgatttttattttgttatcttacttaaggcattgttatttgtcaatatttgttgaggaactttatagcttcaacaaagccggttcactatt

SEQ ID NO: 41053 - DNA, 959 bp, Arabidopsis thaliana landsberg
atagcattgagagaaactatatgcatctatacaaactatatataaacatctaagtataagatttatacatttaatcattaaacttaacaaacagtaatattttttaaacctatgttttctatatgttgcctcacttctgatcttctccgctctctaaataatcttcttcccctaacccctatgaccaattaattaacccaaaacatatacacaaatctcaaattatataatgcatgcaaatgaccccaccaatcggaaaaaatcttcactgtcaccggaaaattcttcacaccggcggcgaaacacatttgattaagaagagtaccaatttaaaccgggtaattggtacgatgtcgttctgaataatccatctcctaatacaccaccttgttgttgcattagtggaggtgtctcttccatcatcgaagaagacatgttcgaacaatctcctcctcctcctcctacaccgtgaaaccgtttgctcggagatgcatcttgctcctcctctgctacaggccaatacggcaccgggagagctcgcttcaaattcgccatcatcataggaccagacgacgaagcatgatttaaaccaacgacgtctgcgttattgtcgtgatccactgagtcagtaccaatattggtgatcatgccaccgccgccgtatatactcgtgttaccaccgtcagagaaaatcccgtaaccaccaccggagaatttgccagggaagaaattcattgatcttgagacattatgatgatgatggtgaagtcctgtagaagcatccgcccttgataaagatggaggaatcttcctgaaaatgtaatcgatcatatcatgatccttatcgttatcaacatggacacttgcgttgttcttcttgttgaatctacataccacccaatcatcaagcctcacaccaataaaataaattttcccaaattaagatccagatttaagaa

SEQ ID NO: 41054 - DNA, 537 bp, Arabidopsis thaliana landsberg
  unsure (1)..(537): unsure at all n locations
ggggctactcactcatatatggtcagtgactgaagaaacctgtatcatcttataaaatattatgtttgccatcttgttaaaaaccgcaaatactcatatgttgcataagagtgtaagcgggtaagtgaatatactcaattcgtatataacgcttttccaannnnnnnnnnnnnnnnnnnnnnnnnnnnnaccttaaatgttgtcaacaatgttgttaaccaatcaaaacatctacagttcaacaagttttattatttgattcgagcttttactttgtggggtttaaattaatattttaatgacccaggtttaataaaatataaaatactcctatatatatacatgcatgtatgggggcactcgtataatatgtgtaatcattcgatacgttacaaataaatatatgtttatttaggcctaagaatgttagttgaattgatctaccaacagctgcaaccatgtttcaaatcggttcaatatttcttttctttctcttataactttcttattaactacaaaaatattccctaatagcag

SEQ ID NO: 41055 - DNA, 521 bp, Arabidopsis thaliana landsberg
cgtagcaaaccattttcatcataaaagatatatttttttatcattgaataccaatcaaacccggtataataaataaaattgtaccaaattaatgcggttaggtgaattcaatttattggaaattaaagaagagaaaaaaaataacgaacaaaatttccttgacacacaaaaaaaaaaaagaagaaagaaaaaacccttactctcaattagtcaatccccttccctagtcctcctctcttcaagcttttcacagaaaaccaccacccttctctctctactgcctttttaccacagagaagagagaggatccgtcggtgtgctagtctcactgacactacatccgatcgtcgccggtaagttgatttcgttactctccgatcaatttcttttccggaggaggaacttgttttccgtgcgaaattctgacttgaactttgttgtcaattcatcaaacgctttatcttttctccatcttcaattatcttactgcttcgtcgctgatctctacttggtttcctccg

SEQ ID NO: 41056 - DNA, 123 bp, Arabidopsis thaliana landsberg
gagggatcatagactgcttatgttgccataagggataaaggcagtatctggcccacaggggttcccgagccatcagaccatgcaagctccataagcaacggtgccagaaagataccaaccact

SEQ ID NO: 41057 - DNA, 551 bp, Arabidopsis thaliana landsberg
aagttgctgcatcaaatcactatgaaggacatttacagagccaactggttgacaatgtgggctaactcaccctcgttgatatgttaattggaccgcaggcatggataagtagttgagaaaaacaaagaattcgtgtaagaaaaatctgaaccgatcaatcaagcctcgcctaaagttccaagattttcttgggacttttggcctgcccttagtgatcatttttccatattatgggccaaaaacaaaaaattgcaatatctgctacacttaaatctttgaaacaaaacttatccaaattgcttggaatttagttggatgtagatgtaaatgtatattctactgtagcgacaaaaggtaaaagaaagattatgacaattttcaggatataaatattatgacaattgtagatgtaagtatttcagaggtctcgtgaacgaacaatgagagtaaatgacgaaagaggaatcgtcggtttgtcactgtcaacacgataagggaggctcacgagtcacggacttaaaaatattaaacactgttctttttcattagag

SEQ ID NO: 41058 - DNA, 702 bp, Arabidopsis thaliana landsberg
  unsure (1)..(702): unsure at all n locations
gtgatgcggtccacttctgcttccgtagaccgagcatgtatgtgtcagcttgtccttaaattcagctctgggcatgggaaacttttgcaggacgagtgctaaaagattcatcacgacgtttccagtgcacagtgagagaaagatcctggaatatcggtggtaatccttcaatagaatggacttgagcagagaaacaacaattgaatcggcggtttcggacatgattaatagctctgagaggccaattccaaaacgatttcttctccttaggctcagccaagttgctacgactcaacggttttgttggagtcttattaggaccagcaacggaacccctaggattcttgttcacatacagagcttcgcttattttctcaacctccttcaacaatttttggctactagaagattcctcactgttaactttactcatcctggaaccagaaatctgcagaaagaattttgtcagtatcagagaagcaatctagctccacgcaacaacagtttcaaacaaagtaattggagtcttccttgtacataatcaattgagagatagagatgtgagctttgctacaagctggatgaggtccaatgactaaaaactctcaacgaatctcacgccaaaaacatttgtnattcttcagcttcttccatgaatttaagcaagcaaattaaaattaacgattaccacaagaaatttta

SEQ ID NO: 41059 - DNA, 1718 bp, Arabidopsis thaliana landsberg
tttggatatgcaatttctattcaaccgcgagttaaaacatatgcaagtaccattaccaactcgttatgattgtaacaagaagaacaaatcatttgaacttgggatgactaggtgacggttaaatatatacatactctatatgtatatatatgggccacttacataatgttaatatatgataagcgtatagatagtaaaagtaaaaataaaatgggacgagaaagggaatgatgagctcgtgatatatgggggactaattaatatttgtgaaatgaaaataaaatttgggagcatcgaaagaagtgaaggtgaggataaaagcaaacaaaagaatgttagttgtgattttggaatgcctccaaacactcctcacggggatctttatgaacaaatacccacacatatatcctcctctctctcttcacctattcctcatctctccttgtcctctctatcgcgctctctttcgttctctctctatatgtatatgtatttgcaacgccgtatacaacgcgtatatgtggatctatgcattagcaacataaatcccatttttgaacaaacaccaatgtaaagtcacatctttcaaaacacatataaaggttgatgcctaacaatttgccttcacattacatattgaatgatttgatggatcaatctaaaaaacatatctatttagatcgagttactcgtcaaacttatatatgtatgcatatacgaataaatttgtatatttaagcgtatagatatatgtagaagtatataactttggatagattagcaatggtataggatatagaagattgtatatattggagacggacaaataaacgtacccaccatttcacatgtgtgccaattaatcatcacaacacaacaacactcacacacaagtcccgttgcttcatcaaaccccttttctttcacgtctctagcttcattcatttgattttattttactatttcatctcatcttcctcctcctatacgatctgtttcttttcttttctttaatttagggtttggtgcaaaacccttgattgtttccacctctcgtctactacatgatccatatatgtgtatggttcgatagatatctatattataacaaatgatcactaataagtcaccatatatatgataaatgtgagtcacataatcacaattgatgtttgttgttgactgacttggaccagaaaccacatcatcagggttccaaatccaatttacataattgttgagtctatacatattgttgatcggtttttacattttgtaaaatgtttatacataagagttggtatatgttgtaaccgaagttttaagctgatgattagaattatacatgatgggtttataactttatatatgtgctagaaattttccataagctttatcaacactgattaattaacatatacataattaatgtagttggattatctatgttcacaaaccgtgatactattgttttcttcttacaaacatttgattggaaattaaaatatacgtggaataaatgagttacactatagagaaagggtcgctatcgacatctgaattctaatggctacaaggagttaccttgtcatcgtttcgcttctaaaagttttggcttagaaatgaccattttagaaagacaagtattttcctatcatattatctattcatttaatttatgtcattatgtaaatatatatttaaaaagaaatcgtaaa

SEQ ID NO: 41060 - DNA, 442 bp, Arabidopsis thaliana landsberg
agtttacaaactgattagttcgtattttcttacatgttacatccatttacaaccaacaagttaatcttctaaattttttttttaatgtgtgtgcaactacaaaggtaaacctgagatatgcgtaagaccctccccaccatgtggagattctccaaagggaggaggtgaagatacgccgggacataactataaaaagccttgcaaacccattccaagaccacctcctcctcgagattgctagcagctttgaattttcaacacaagtccttaatgtttttttagtaacaatatcatcgagactaatttatttgcacgatgtgcaataatatcgtttaattataccttttttctttctttcttttcgaaatttatgtgtaatttgtggaaaaaataataatttgtgcacccgtttgcttgatttaaataacccaaaaccatttac

SEQ ID NO: 41061 - DNA, 2515 bp, Arabidopsis thaliana landsberg
  unsure (1)..(2515): unsure at all n locations
atacttgatataactataagttggaatggttacagcagttagggatatatatctatttgaaccattttagtttagagataaaattgatctgcagcggtttgttatctgttttaaaaatagagttgcttaatcaattaacggtttagtccgttttttctattcatccattcaaatcctatgnnnnnnnnnnnnnnnnnnnnnnnnnnnnnnnnngtcaactttgaacacactataacttccacctagactaaggatagtatttgttaaataacgcaatttgattgtttctttctaaaataagaagtatagtgatcaggttatttagcaaaaagaaaatagtgttgcgatttctaagaaaagtgtttctgtttttatatttttgaatgaattatgtgttcacggtttatttacaaaaatattgttacgatgtttttgaaaatgaaaaaatcataaagatatatatatatatatatatatatatatatatatatatatatgctttttcatatattgaagaaattatagagagaattgttagactcttaaagaatatatttttttttggaacataagtaaaaatgttataagagaaaaatcttttttgtttgttagatgatatttgaacaatgaaaagtggttaatatttgtttgtgatcctttttttactctatgcatccattctctaaagatttagaaccgatttcgtcactaagttaggttaaatatgcgttcgaatttaacgctttcgcagaattatctatacatttcttatagatatctttcggattttaaaaacattttttttatatcgtgatacaattgcaatgtttgaattgaatggagtagaagaagaagaaatcaattttggggtcctaagattttttccggtctaagaattagaagagaggtcggtcccatttgaatggtattgggcttgggcccatggcatcacggaatatagcgatcgccgaatccgatggctaccccatcagacaggtcccctcactaaaaccactaatcaaaattgtttagatattcgacctcacatgcataattacatatgaacaaaatgcctaagtgttggaatttagtttttttttttgtttttaattctgtgtagcgagcacatgttaaacatatggaccatataatacaagagtagagctatgattgaaatatgtttttttttcatttagacatttgagcattttacaatggttatccatgattcaaataacacataaaaatatttaaaacatggttcctcgcaatttagtaaataaaattttcaattattagacttgcatatactggcttttttctaattgattgatgaaccatttgccatattttttttcttttcaataccacaaacaacactcatcaaaaagagtttattaacgtgaataatatattaaaacattatttttagtggtaattattaaaaactagttaactgttcatttttcgatacgttgtgcactaaactatttcgtgcaaattgtttgtttggccatgattgaaagtttcaaaccataaatacaacgttacatgtgtagacaaaataaatacgttatatgtgtggctcaatataaataataactatacaataaatgttttggggttgagaatagaatgattggagaacagtgatggtgcactatcgttagaataattaatttttagaggatagggccgtatctttttgttgtcttacctccatctccatgtgatgtgcatgaaatgtggcctcaaataatacatctacatatttattcacataagtagtttatcttttgtaacccaacatagattcattcttcaatctttattatataaaatagattattgtcatctcagaatccaattgctttaaccatggaacataaaacttagaaacgtatatgtttgatgagctagttgatctgttactctattattggttcaattgcaggtataatccatcaaaattttgaaaaaaaaaaaaaaaaaaactaaatgggcttttaggacaatttttcaacttcaaggtctgagcgccattatcgacccactatcattaacgataaccggaaaataccaaaccggattttagattctgtgtcggttattgatacggtatagcagacccgccatcatccctacgagtcaattaatttcatttccacaagcgatcttgcatctgagcttaaagatcttaaattgcttccaaatttgaaaacttaaggaacatatggcaaaacccagaaatctttttagggtttgctctcttctaatggcgtttttatttgcttactctgcttctgtccagcttaatgatcctggtattcaaaaatcttcttcttcttcttatattctttctctatagattatgtaaaatctcaacatttatgtgtttctgcagattggtacttttggtttccactgtacacacttgcttgtgtagttaatctaataaactacagaagaagaatcaaactattgatgatgagaacagctcttagcttgggtgtgt

SEQ ID NO: 41062 - DNA, 433 bp, Arabidopsis thaliana landsberg
gtcgtttgagacgcgaacgccgtcgctggtgcgatcgccgtcgcgttcggcgtcgacatcgccgacgtcttcgttcagcgcgtcggcaacggcgagtgtcacggagcggctgagtgcgtcgagcacgctgattgcgacgccgtcagtgtcgttccccgcgtcgcagtcgtcttccgcgtcgccgtcgtggtcggtgagttcgtctttgtcgccgagcgtgtcggtgatgccgacgctgacgaaggcgccagttgtgaccgcgtccgcgacgttctcgccaacaccgacgccgtcgttttcgagcatggcgtcgttgagcgcgtcggtgttgccaacgccgtccgacacggttgtcccgacaccaacggtgttattcagcccgtcggcgacgttttcctattcgctttcagtttccacttccaactttccgtcg

SEQ ID NO: 41063 - DNA, 593 bp, Arabidopsis thaliana landsberg
  unsure (1)..(593): unsure at all n locations
gatattatcaccaattcagattcatatacatctttgggaaaagtggaaatacgttacgtaagcatcatctccacagaacaatgttatcaaacaaaagtgtgaaagaagattctaaaggactaaaagaccttataaagcaatataatacatgggtctttaaaaggattgatatggatgtcacgatattattaatatacctggcacaaggttcgtagtttgacagcaagagcatcttacgctactagccccacgcgtatacataagcattgttctacaaccaccacatataatgtgtgccatgtctgtattcagaatcagaacccaagttataatacaattgcagagcatattaacctcatcctcaattcaaattcaacaaagaaatcgataccgtgaggtggaggaggaggacgaaccatgttgatagtgttacataacgcacaacgcacattagatgctcctctaggatacatcaataaattcctacaaccatgacacaccagctggtcctgcatatctgctactttcatccanacacacacaaatngcttcaaacaagaccacacagatgaaaccctaacatttcacatact

SEQ ID NO: 41064 - DNA, 823 bp, Arabidopsis thaliana landsberg
  unsure (1)..(823): unsure at all n locations
aagctctctcaactaactaaagaaccagaaaccataatttatatttcaggagtgaaacaaatctggagcgtcatagcaagtttcccacaaaggtacccttaccctgaatacactcatatatcacatttttgtcgacagattcaatcctagacctttgaacaacaagagaaagttagaacattgagattaacccacgaaacactaacaattatacatttctatgacattgagaagtctgtagaaaccatatgggaagataaaacaaatgatgaacacacttaaagacccaaggtcggaatgagacatcaaagccaaaatcaaagaagaattaaacatacaaatggtctcagatccgaacatagaacgaaatcgaatctaattgggcaaatcaaaaatcgcagaatcgaagcaaaacgaacaaacacaaaatctaatcagagagaaatggggaacgaagcacttacaaagatttctgagagacgacgagacgagagaaatggtgaatcgcagattgagaaacgagagagagaagcttcgaaattacaaaacccttagacccaacaaaaaaaaattaaaccctattattattaaagcccattgggctttgagcccagtaaagaatccgatcattgaaaatactcttctagtattctttggttttggttagaatcattcatcaatcatcacacttaanaggtgacaggatgaattatctacaagatcattagaacgtcttttagtccctaanagggtgatagtaagataaatatggttttagtagactatcgaatcgacaatactatttgatattctaaaataaagt

SEQ ID NO: 41065 - DNA, 636 bp, Arabidopsis thaliana landsberg
ctgctcccagaactatgtcagtttaaatttggagggccctttatgtcgcatcaatttctgccaatctgaaagatgcatgggtcgaagacatttccgctttcaaagctatttatgagtttcctgtttcgtaatatctaagtgaacattttgttttattctgcgggacatgccttacactgttattaatcaaagagttcatcgagttagacaaaacatttactttgttgcatttcctacgttggtgacctctttgagaatgttacagtgtactattttatgtactgactttgctaattgctacccgtgagtgtctttaggtatgggtcaattttaatggatggccagcatccagatgggagtttaggatacaccgtgttacacaacggtacttgtcagcatgctggtccaatctacatcaatgttatgcatgctgcgattctccgacttgctacgggtaacaagaatatgaccattcaaacccgaaaccatcctttgccccctacaaaaactcagcgcatacagcgtcatgtatgtcttttcttttggaaggtagtcccttttttgtggtattaatagacaatgggatttacctttattgaaatttatgtttcagtttgaggggtttaaggattaagt

SEQ ID NO: 41066 - DNA, 708 bp, Arabidopsis thaliana landsberg
ccttaagtattgcactcagatttaaacttccatcttctctgaaactatccaacaactttatatactgatatttcattttggtaccccagtcatcatcatcatcaccatcatcatcagaagcaacagcagaaacaacctgttggatgttggaaggattagttttgccagcatccatcatatactcttctttcactttaccacaacgaacatcttcatctttatcagcatctaagtctattacaataaactccttcttcacagctctcattgtagcagcagaattcatcaaagttctcatctttaaacggaaaacaatcagattcctgaaaatgacatagccttcactaaattaaacattagagacgaatcctaaactagaattgactcaaaatcctaaaaatgctaaatttgagttcgattcaatgaccactcaaacacacaaattctcgttggggccaaattagagcatgcaggagtagaaatttagaaaacacttacaaatgcaagaagagtggaatgggttcacttacaaatgccagaaagatctttcgtacagaagctattattccattactgaaagaagaagaatatcatttaaaagaaacatctcgatgaagagaaaccctaaatttagaaaaggaattaacttctctcatcgaacatcacgccgtagctcacattccgactcactgtactactgtagagaca

SEQ ID NO: 41067 - DNA, 117 bp, Arabidopsis thaliana landsberg
atcaaatccaaactaacacttctaatacaaataaagttcattttgactcatattggtaaaaaaataaaactttaagattcttatgtaaatttgcgtgtgaagtgaccactattattt

SEQ ID NO: 41068 - DNA, 573 bp, Arabidopsis thaliana landsberg
aacggtttactcacgcggttgcgtttgtggtctcttgccagttgccaccgcaacaaagcattggtcttcttcgtttttttctttacgtttttgtaattgtgtttgtgctttaactttatgttataacataaacatgcaaacgtaaacacacacacacacacacaaaaacggttatggtgaagctccaacaccagctccaaagttaatgactgcgtaatggaatgttttgttagaactaattggaaatcgattgcttttcgtgtctttgtaattgaaatctattgccattatttttgtaacaaataaaagttttggccttttaatttggggatactgaattttatagcctattttcacaagaatttgatttgttgtttctattggcgattttcgaaattagtagaccgttttgccttgctatttccaagttaacaggagaatcgttccaagtacatatacatatgatatgctatttgcagcgaaaaagatgatgagtggtggcatcataattaatgaccagtagttcttttacgaaagttgcacttcattttaattacaaacacacatgatatc

SEQ ID NO: 41069 - DNA, 841 bp, Arabidopsis thaliana landsberg
gttattatagtataagaaattcatccgaaacaaaaaaattgttttgtgatgaagctattggaactcacccaaaaagtaagaaaatcatacatctatttagaaactacgacaatttgatcatctatatgtatgaaaaatatgtttcacagatgaaatatgaaaaatatgtttcaaactttatattggtactttatccatatagaaaggatattcgtcatcgcccatcaaagtgcttccagttccgaaaagacttgttttcttacaactaacatcatctttttgttaagttgtaggtcaatccaacctgaattactctatcgttcggcaactttcatgaccgttctcctagaaggctagatagttttgtacgtctcattgtctattctaaatcgattctctaattttcttgttccttttcattctttcctcttatttttttccgtaaatcattctaaattatggctccgtacacaaaaaagcacaagaagagaaagtggaatatataccacatttaataaaagaaaaagttcacattttgagttgttgttaccttataaattaataatgttagaccttgagatttattgatttatagtaatattaatttataaaaagattacgcaaaatacaatttctttatttaaatttcttttaaaaaaatttctttatgctttcttgtttgtatattcaattatgttaaattttattttttatttttaattttttaatttatttttatttaatatagtatatacttatatttattacatttattaaattaaaattttattaataattttgattatttaatataaaagatataaatatttattagatatat

SEQ ID NO: 41070 - DNA, 320 bp, Arabidopsis thaliana landsberg
cggaatgttctgagaggaagaaacacgctattgacaagtgagtcttaacattgctacttaggtagaaaattttttagcaaaaaatgcatgagtaaaggtaaatatctgcaaatacaaggtaaaggggctgaagaactatggggtcctgagacaatattcaactaaagatgactatattaggtattctatggcggacgggcgtatactatgcagagtattattgggatttaagtaactgtatatgtcatagcgaatatgtacatagagatagaaaatgatcctacaaaaccactcaaaatgacagttctgagataagtttc

SEQ ID NO: 41071 - DNA, 532 bp, Arabidopsis thaliana landsberg
aacgtgatcgactcgctggcggagggaggccccggcgccgccggaagccgaccgttcaccctgctgttaccatcaccccggcgggagatcccgccatcgccgccggtgaggcggccggaggcgcgggacgctccggaaccgcggcggcggcggcgatcacgagcatcatcaccatgccgctcgcccagacgctgcgcgtcgagatccgcgcggccccggcgatgcgctcgaggagccagcacacgaacgcgatgagcgcccccgatacgagcgtgtacgccatccagaccgcgatcatggctgatcctccacgggaggcgtatccgcaccgtcgttggcccgaccgggcggcgagagctggcggtccaggagctgttgcagcgcctgcagctcctcatgcgacagtgatttgttctccaccatgtgggtgacgacgcggagcgccgatccacggaacagcttgtccacgatccgcgacagcgcgtttccgcgcgccgactgctcggtcacgctggcgaagtagtggaagagc

SEQ ID NO: 41072 - DNA, 374 bp, Arabidopsis thaliana landsberg
agaagcccccacttggatttggtaacgactgacatcaaatttggttcatatggttcagattaattggtttgatcctgttcaatttaaagtatccacttttggtttggcagaacctcgattgagagatcgaggcttccaaaaattgacgggcaggcccaaccaaagtaaggcaaggcccactcgccttgaaaattatgttcgtcaaattctgtgtcggcacgatccgccgtctctaaacgatcattgacggatcatccttcacctctgacagaaacgggttacataatttgacaaaactcattctcttatatagcccaaagaaacgctacccttctctaaaacttccgatgtgggacatttgttgatttttgttt

SEQ ID NO: 41073 - DNA, 532 bp, Arabidopsis thaliana landsberg
tgccgtccttggaaacaggtaataattagttatcaacaataatgctgtctaagaaaaaatatcatagaaaacagaggatcatgtttatgttttcagcttcattcctctgttttttgctctgctctgttttaacagaggatcaagtttatgtcttaagcctcctctgtttttggctttggtctgtttatactcagatggtcacagattgcgtcaaggcttccgggtagaaccgacaacgagatcaagaatctatggaactcaagcatcaagaagaaactgaaacaaagaggcattgacccaaacacacacaagcccatctctgaagttgagagttttagcgacaaagacaaaccaacaacaagcaacaacaaaagaagcggtaacgatcacaagtctcctagttcctcttctgcgactaaccaagacttcttcctcgaaaggccatctgatttatccgactacttcggatttcagaagcttaacttcaactccaatctaggactctctgttacaactgattcttcactctgct

SEQ ID NO: 41074 - DNA, 482 bp, Arabidopsis thaliana landsberg
tttgaaaataaaattttcttaattttcccatattattttccttttaaagcaagcaagtccaaatacgtttcttccagattataattttccttaataaggttttctacaaaaaaaaatcaacttcttatttaaaaaaccctttgcattatccttttcaccaacatcagagaagacgagaaaaaaagaagaggcgagtggttaatggagaaggttagtttcactccaaacatatatgaattgactaggttatgaaatccatatattttaattgtgtgtttatgatagatcaataacatttagggttgaattttcttgtgatctattatgttattcgtcccatgcatgatccataaaacttttatttttgaatttgtctaggaaaaccatgaggacgatgggagggggtttgccacccgaactaaatcagataaaagagcagatcgaaaaggagagatttctgcatatcaaggtaagagacattt

SEQ ID NO: 41075 - DNA, 304 bp, Arabidopsis thaliana landsberg
taatgaatagggggttgctgactcttatcatgtctgacctttccgaccatccagtccttacgcgagcgagccactgttgatagagagtttacctgttagcgaaccaacacgtgaacccgaacttttgttcaaccacagaacggacagcgtgggcaataaaatgcttgaacagaatctttaactttaaagactttctatttatcacacaaaaccaactgcctgttgagaaaaactgatgctctgccacaaaatcatccaattgagactttatttttataagaacctatctggcatcaaaagaaat

SEQ ID NO: 41076 - DNA, 723 bp, Arabidopsis thaliana landsberg
  unsure (1)..(723): unsure at all n locations
tgttttatttcctcatttttctcgagctaaatacgtagtacatatttaatttttgttattttggaacaactcacatcttgttggtcaaatttaagcaacggttgtagttgtaattgtacttgtgtcattcattggtatgcgaaccattgatcttattgatgtatagttgtggttgtatacaaaataatacaactgattttgagaaaattgcaggatttaaactttttcttttggggcaaataaggcagttttgagtttatttgtatacttgtggagatgacgtacgattgaggtatcagttgtatcatcacttgtaaatcaaatttgagtttctttttttgcatggggtctttatttctcgaacacatgtttcttttataatacaaattttaattatcatggaagtattattctagttaattagtcattcatggtctacaaaacgaagatcattagagaacactgaacacgagaaccatttactgtaatcccatcaatatagacaacaatttcttgcaaatttcagccgagtcttcgccatgcggcctctcntnttttttcttgtttgttgtttgtcccnttttttctttttgtttgtttgtttccgccttctcctttgcgtntatattcgtaggggtgtgaatntctagttgtccccgggtctggctggctggtattatcgtaacggntgtgttatagtcaccaatctgaaaacaatataca

SEQ ID NO: 41077 - DNA, 679 bp, Arabidopsis thaliana landsberg
gctaaacccttattagccttagatctatcaccaccatgccactatacgtagattcgatataacctcttgcttaattttattttttggaatagatcggaaaaatttatcgatgtaagaagaaaaaaggagtgggaggagaagggcacgtggagagagggggtgaagatcatgagagagccgacaaagagcatctctttaactcatcggagtttgtgtttatctctcccaacagttcatgcgatgcctctgcctctcttatcttcttgttcatttcttttaccctctctttctctctcactcgtggttttggaattgtcagcgacatcttcgcgctttcttgttaacagtactctctccaatgcctagtctctccctatatacacatatgtgtgtatgaacatactattttacaaagaaacacctttagatctagatgattttgacaaatggatcgtttgactatcaactaactaagctaaggctacattaatataaatatagaccaaccagtgtctattgaacgcacaacactatatcttactataaccgtgatgacaagtacaaaataacattaatgatgtggttgtttcatccaaagattaaaaggcttaaaatgaaattcatgatgaacagcacagagccactcgtactgtgaaagagctattctacatataatcat

SEQ ID NO: 41078 - DNA, 545 bp, Arabidopsis thaliana landsberg
caacaagtaaacactatcaacttcaaatctcactaacataaatagtatgctaattttcttcactatctgagtaattttctccttctttttacatcattcgattctatatttgccacaccattaaagagataagtatattggttcttactactaataatcagtttagccatatatctaattacacagttttcttttatatgttactttatatttgtacaccatcagttactatatacggaataaattacacctcatcatgtaattacaatattatcataatttttttgaaattctattctttaatattttcagtatccagaatccattttcttatatttattctggcaaaataatgtaaaatggtatcaaatatacaacaccatatatttgtttataaataacttccttaattagtgaaacaaattttcctgcagaatgtcacttaaatctttaaaacaattcacaaaagaaaagggaatagagctgaaattttttcctctttaaaagatcaagatttagtaaaaactagaaacaaagagaagatc

SEQ ID NO: 41079 - DNA, 561 bp, Arabidopsis thaliana landsberg
aagagtttttttcgagcttagagatggagaagagcgcttggtctcagtgtagagaaatcgagaattcaaagtgtggtttcatgaagaaaaaccctaattctgtccgagatagagaggtggtttcagccttgttgatgcttgcatccgcttagtgagaagtgctttgtcctaaagaagctgaaagcaaatgaaatttgtaaaagctatcatcacagttccaccgagaaaagactgactttgtttattctgttagatgattttcgattgtttgtgcctatttcgattgtttattaatgtgatagacaatgttttatcgaacttgtggttccatcatactatgagtgtaagttcatgcttcagttagataaatgagataacacaggtacttgctggtttcccgcaaagttaagtgtttgaagtagtcacgagagattcgaatacaagatgtctctcatgtcttattatgatgcaatcttacttccaacagaattaagcattgatgtataaatcattcaagacggtttaatcaaacatatattagaccttaaaacattatgtgac

SEQ ID NO: 41080 - DNA, 868 bp, Arabidopsis thaliana landsberg
tatgaaacgcgttctctcctctaactcctccgacgcacttatctttctcgcttttgttcgccctttttctcattatgatcgaatcttgcgtaaactggtaaaagtttcaatcttttttactgttttgtctccatggctttctacaagggttgattctcagtgtcttactgtgttacagggatgtaatttagctacccataagtcgaataatcgattggtgttctttgacatgctcatggttaagtgttcaggtgagacttatcaggtaaaacaatctatttgattagcattagtgtttagctaatgcttaatgttacaataagcttagttagtctttgataaaaacaaacttaattttggatggtttggtagtggtgccttggctttagagagtgttaagatatctctagaacaaatcttcttactagtggttttggtaatcgatattggttttgatcattggttcttctatgtaagtgactagttaattacatatagtagcaattgtctgtgttctgtgcaaatcagattctgaaccaggaagttgtgttttgaacacaaaatgatgagtttttgtgaggctagcttagattctacctttagattctacttagattttggatggtttgggagtgccttggctttatctagagagagtgaggatatttctagaacaaatcttcttactagttgttccgggtttggagatcactgcctcttttatgctggtgacaatttaattacatatagtaccccttttctgtgagtctattatctgcaaaaccagattttgaacccagaggttgttatttgcgcaaccacaaatgaatgaggttttttggtgggaaaccttggcttttgaatttct

SEQ ID NO: 41081 - DNA, 519 bp, Arabidopsis thaliana landsberg
tgaatgtaagcttaatgattctatttatactctcacaatttcttctctttgtaacatttgtacttccatggttgatcaaatcaaatcataatccagggtggtgaagcttctcctgtttggccaaccgatgcaacaatgcaatcaatctctactcaaaccactctcaaatgcttatcccggatgctagaggaaagcatactaaccgatgtaatcatccacacagccgatggaacactctctgctcacaaagctatcctctcagctagctcaactgttttcaaaagcatgttccaccacgacctcatggaaaaggaatcatccacaatccacatagacgacatgtcgagagaatcttgcatggctctactaagttacctctacggaaacataacccaagaagagttctggaaacacaggctcgccctcctcggcgctgcaaacaagtacgacataacggatttgaaagcagcctgcgaggagagcctaatggaagatataaactcgagtaatgtgctcgag

SEQ ID NO: 41082 - DNA, 2060 bp, Arabidopsis thaliana landsberg
tccctgagacgctctattgatcgcatccgtcacagcctcagcagtcaacttattattcccagatctcctaaacgtcttcttcggactcccatcatcttccttggcaacgctactctgactgtagtaaccgttatactcatctcctccgtaatagctacttcctccgtcgctgcttgagatcggagttctcctaacgccgatgaacatctcatctgcagattttctcataaacaccaccgaatctccagcgatgagcttcttgctattgacgaacttactccatcccgttgttagcaagtgacgcctcggtgtaccgcgatagatatgcctgaaatcccaaacagctccatggatatcagtgacgtagagcttctgaaccggtggatcgatttgaaaattaagcagagggaagacggaatcagcacagaaacgaggaacggagaagccacctccattgttagcatcagaaggcgtgagaattttggcgaaggtagtcaccttgttgttatcatcaacatcgccatcgaatctgccgaatcgtgaataattagtcggagtaaactgctgctgcgtcatcggttgaagaataaggtgagcaaagacctcgtcggtgaccggatcggcgagcaactggattgaagtgatgatacatggaaccggcgaggtggaggaaggaagagtagagaggagagggcaacagtgctcaacgtgaccttgtggaaagtagtaaaccctagagtgaaggacagggatctggacggaggctccagcacaagcgcgccagatcgtcgggtctacttcacggtggttgatgtcaccggcggttgccgacggcggtgacataggtatttgttttcagtgtaaacgaagtcagcgaatgaagaagaagaagaagaggtaggtactgtttttatagagagagaccgtgatgtcttagaaggaattgaaacgggcagagaagggaagcgaaagcggagggtgaggagataatagcgaattactgttacgatgctacgggattttgtgtttgattttattttttttgtttgtgagaaggaaattatagtttttgccacacgacaacaaacttttaatatctctcttcactaacctgattctattaaccgttcgatctttagcgcgtgcatcttactctctatctttttggtttttcttcccattatttttaggttcaattaatgatgctcttttttttattattgttattaaaactcactgaattatgaagaactaagaaatgcatttaagaaagaaaaaactgaaaagggaatattcctgtagatttttagaatgattagagaaacattaatcatgtttttgtgcttatccctcgttagctagtattttttgtcacaacagaaaagaacactacggaacttatcattattcaagacaaaaaaatttgaaataggtttgttcaagttgggatgagttattgaatatataatagaaagacaaaaaaactaatttatgttataataagaccattttcatgttttggcgaaaaagatgtgttgaaagtttcaatggcgatttttttataatcacattagtagataaaagaaaaataccactttatttgtttgtcattatcactttttattttttatgtgtgtttttttacggtacattttttgtttttatacaaaagcaaaatttgtcaatttttctacaaaatcaaagaaaatccaagtggatccgtttcaaaattatcttgtttgttgcggttgccattagcaagctgtcttacttataatatattttctgttttaattttagaacaagataaattcagaaaaagatctaaatatccaaatggaagaaaaaaaacaggatattgaaatagatacatgattccttttttctgtttatatatttgtttgttgcaattcgataatcgaaaaaagctttacaaataaaataacatataaatcgaatttaagttgttaacactaaaaaaataaattttaaaccggttgaaccaactttattaagatgtcagtaatttttatttggttatccattctacttttcacaac

SEQ ID NO: 41083 - DNA, 534 bp, Arabidopsis thaliana landsberg
  unsure (1)..(534): unsure at all n locations
tatcgataaaccggggaaaaacgcaaggttaaagttggtaagttgaacaacttggcgtaatgtgattatgatagacaaaagattacaacaattctccaatatagtcccaatacttatttttttgtatattcgttcacagttttcgagatcttaacgtaagccattattaagataatttgtgtggtgattgattaacttaacaaaatattagtagacatagtgcatataacatggcattattggaacgaaaaggttttgatatgaagtcacaagtaaatagaaagatatgccaattctgtattctgtagttaaattgtacatataaaaaaaaaatcatgtaactaaatgatgatgtatgaaccattatttgggcatcgtttctggctaattatgtgggaggaaaagtgaactagttgctaaaaactgcgtacatttaggcccttgtagatatcctaatatatattgtcacatccaaagcatattaaaagatgttngaatgatangttaagttctattcccagcatcaactaataa

SEQ ID NO: 41084 - DNA, 1050 bp, Arabidopsis thaliana landsberg
gctccatctgagatgaacagtgtaagttaaacccgactaattcaaaaatgaataaatattttgcaggaattttcatcaaattaatcttaaattagacatcaaaacaaaatccaagagtttaagtggccacacgcacacaaagtttttgctcgaagaagaatcaaccatatacttcgaaaaatttacgtccacatactttatattttacaacattttaactgtcatatggaaaaactctatttgtatggaaacaatctatttaaagtaagattctttaaccttagtttattaaatgaagataattttaaatacaatataacatttttcttagatctttttaataaattactataaatgaatgcttaaacaaatatatatatatatatatatatatatatattcagcgaatgtaattgaaaagagaatctattggattaatattaagttgaagttgagctaaagaaaaaaaaaacaattgaaaagagaatgtagtttgggcctctattgtctttaggggtctctctgatagtaaaaaaggcactgccacttctgtgaaaattcagagagtgaatggcaaattgtcaccggtgacgtcatcaagacagcaacaactactaattccacctcgatggtttatgagacatctaagcattaaaacatctctttttttttctttctcccaatttctcatctaccttttcttgttaataacaaatgaaaatcagttttttgacaaacaaaaaacaaaaattcatttttttatattatgttttcactcgaaagttgcagcctaccacaaatatttactttattaccacctatagtttatgtaccatctaagttactagggatgtgtctatattcatttggtatatagcaaatgttttttccacaagaaacatagacgaaacaaattttcaataaatgttatgtgtgttctcacatggtatcaacgttacacattaagaaaaaaaaaaatcaacgttacaaaactttgagtgtttgtttatttgtctttatttgaccatggacgagaatggcatcacataa

SEQ ID NO: 41085 - DNA, 627 bp, Arabidopsis thaliana landsberg
  unsure (1)..(627): unsure at all n locations
tagttgaaaatctggcgtactggagaatttgctttcatgggcagatttctttcagaacaaagatctttagaaaagtgatggagccaaaacagggagggttctagttgagaagttagacgatgccgccgaagctggagggaagaactctcgactctgtacgttaattttgactgaaggagactcagcaaaatctctcgctgtaagtggttttgatctatagtttctgctacctccctattttgataacaaaactcctaatactcattatggtcagttggcggggaggtctgtcttgggtaataactactgcggtgtgtttccgcttcgaggaaagctattgaatgtcagggaagccagcaccactcagattacaaacaataaggaaattgagaacctcaagaagatccttggactaaagcaaaatatgaagtacgagaatgttaactcattaagatatggccagatgatgatcatgactgatcaagtatgttaaaagtctactccctaactttacactcagtgcattattctatatggatatgttcttgacgaaatcntcctctctacctgtgcaggatctggatggttctcatatnaggggtctcttaatcaatttatccactcttt

SEQ ID NO: 41086 - DNA, 414 bp, Arabidopsis thaliana landsberg
gtattcctcttgttaacgattggtacaattgcatctagtttatctggaggcaagttctgcaaatggccactaagcttctgcttctcctcatacgtcatatctcttttatttggttcgtttgcctttggcttcttcagagcaggtgtccttccagaaggtgttgcactggtcggtgttcttccaggtgttgtagttggttggcgattactccagtctgcccggtctatcgtattcctcacattgataggtggtggtggcattgtaggacccagtctagacctcattgtaggagttggaaggttcatttcataaccagtgacaaatctcatttcacgattataatctgcctctattacagcccatctttcctcatagatctgtaatagcgtaaccgccatgagatggacatcttgt

SEQ ID NO: 41087 - DNA, 682 bp, Arabidopsis thaliana landsberg
  unsure (1)..(682): unsure at all n locations
tattataaaagtgaacatgatcgaatgccaataaagaaaaaaaaataaaaatggatcgatccgacctatattaattagagcggatcttaattataaatgttttcatccgaagttttctaaataccggaaaatcttggtatccttgagcattaaataaccgtcccaaaaaaaataatgaactttcgatactcgagaccatttccgaacaagcaagttgacttttatcagatgcagtaaaactgtattaatttcagacataagaattatatggtaactatatgtaaatatataacagaatcatatgatcatgagattaattctaaccgattgaaacaccagaaggagattgaaaataaaacaagaattagagaaatttgtggtttaaacggttaaatcgagaaatagtgttttgttttaccttgtcagattctgccataacaccatcgaaagtttggaagtatgaaacggtctcctctttgatcatgctattatatgattcagatgcgatcttgagatcaactggatctgctctttttgtttttcttctttacatcaaaaaaaaaagttattgtcgttttcttttgcctaactaggtttttataggaacccacccaaagccnncagnctttgacttagcaatttaataagnagatatacagactancaatattgtttataatgg

SEQ ID NO: 41088 - DNA, 1016 bp, Arabidopsis thaliana landsberg
  unsure (1)..(1016): unsure at all n locations
aaaaaaatcgatgcatacaacattttttccaaattatagatggaatggcaaaaaaaaagcttgtaaaagatttttagaattataattgttcatcaacccttgcgaataaaaaaaggccacatgcgaatatctcttgttttgatgtccatgagttttggttatataaaaacattgtaaaagaatataaagctatcaaaatcgattagggaattaggaatttaaatatcttttattgaataaaagagaaatatcaaagtcttacataaaggaagatcaaacatcacaataaccacctggtccaccgaaggtaaacgtttgtccataccccccaagtttatcaaaataaatcgcgtcgtaacatatacctgcgtccgcaacttcagcgaccttgttggaatcaacatcgacactcttgtaatctggtgtcacatacttaagagagtgcatataacaagtatgttttagatccacttcctcatccagcggtttgttcccgttacccataggtgggctaactatttcaaagagttgaatgttatcagatggagcattcgtcaatccaccatatataactgactccgctccgtcagtgaaaaaaggtagaagttcctctggccaataccctaagtaaatcttccccactgtcagcagcaaattgtttgtttttggatcctattatttgtgtagatcccataaaaaaagaagtgtaaggttatatttgtttttggtaaattatactaaagtttgtgaagaaattcactagttttatctagtgaaaattttcttcgagtttatcggttaaagaataatactaacggattgaaactaaagaactgttttaataatatttgagaaatttaattttaaatcaaaattttgttttgaataaatcaatatcaaaccaaaaatttagtttaactcaaaaacttagntgttatatatacttatatacctgattgattgcaaagaaagctttaaaattttggcctcccaccacagaggtgttcgcaaacccg

SEQ ID NO: 41089 - DNA, 679 bp, Arabidopsis thaliana landsberg
cacgttgatcaattgaattagtcaaatcaaatgttttccttttaataaaaacctctcgaaaggactagagaaaagataaatcacattaaatggaacatgcatgatgctagctagtgtagttgaaccgtttcagaaaacaaaacaaaaagttgttcaaagtgaaaacccaactaagcgatcgactagaagattctcaacaaatttcacagtaactttattttttaatattcaaataaaaatgattttatggagactagtgatgatgaatatgtaggataggatagtgggggaactgataaaaaaaagtatggaggtctaaaactaaaagcagagagcagagaatctatatatggagtctttaaagcaaacttatattattttttaaacatatattcgattcttcgttctcgttgataaatattctacaggttgtacatatggattgatggatcatgggattaaatatatgtacacaatacatcattttgacgtaacttataacattgttagaattttgtaatgagtctgaaagtttctacagttatcatcttagggcttactaatagctattatattattgttaagaatacgtcataacattgatgaatgcgtatgtacattttacttttaccaaacccatgatcaatttaagaaatctatacgtactgttcaagcttgg

SEQ ID NO: 41090 - DNA, 1010 bp, Arabidopsis thaliana landsberg
gctctcagtactgactcataactacgaaagacatcacatcgatatcctccataattttggtagttcaagtttatttattctcaacaatatgtcaatatcaaaagcaatatatacccattaacaaacaaaaagaaacggtatctaactgcaacatatagtgaagaaggccaaagttctacacaaacaattctccttcgtcactgtttataaacgtataaactcgtataagttcttataagcaataatccggaataacgacagtagaaaataaatgctagttgtacattttagtagttgaatctctgacaaaaaaataaaaataaaggaagaactaaatttaacagaatcataatttatgactggtaaactataattaatcatactttataattaaaatttaacaaaattaattaaataatgattttcctaggtgaagatatgatattatgatttatgatctccaataatttatgattggtaaacctacaatatagtaaatttctttatttattttttgttatttcgcccatcttgcacattaccaacgaagtcataattttatatgaaatccttagttatttatgcattacgactacccacatagaagtatgggtactcacacctagtttatttacaatttaatatgcattgcatgttctaaaatttcaacttgaagtttatgataaaatataaatacggaacagtatgtttatcgaaaaaaaaaaaacttgaagtttatatctcaccgaagaatcttccggctcatcaatggtacataaattataataaggtgctcgttcatatctagctttatcatttataacatacgaaaatgtaacagttgaattgctagcagaaaattagcagtggtggtggtggtagtggtcttgttagttgttagtgatttgtttagtctataataaatactaaagagatgttattggttcctaaagaaattttcatgaccttaataatattataaaaagtaaataaatgaaagatgaatttaa

SEQ ID NO: 41091 - DNA, 537 bp, Arabidopsis thaliana landsberg
  unsure (1)..(537): unsure at all n locations
aannnnnnnnnnnnnnnnnnnnnnnnnnnnnnnnnnnnnnnnnnnntcagtgacagcctttatgttcacctgcagtccacgtgggatatatatggacatatagttgactttcttattgacatttaattacattgattctaatgtctcccgtatcaaatgatcttttgcgttaattctaaataaaaaagatttgtcttctctaaattcttaataaacaattaatctcttcgtaattttacatattcttccttattcatgagttggttggaggcttggagctgtcacgccattaatttgactatctttttgatataataaggttaaaatttgaaacgattcaacattatgtggattaagttataagatatcgaaaagtgagttatattttggtttcaaaattttattaattaaattacgtcgggtgaattaagttatcgcatgaatgaagtcaaatattttcatcttcatttcattttaaaaattaagtaacacttatattggttaactagggattgacatgcagatgacattttattt

SEQ ID NO: 41092 - DNA, 431 bp, Arabidopsis thaliana landsberg
  unsure (1)..(431): unsure at all n locations
tttgaatctcccagctcatgacgacggatcttccgtttccttcttttgagaacaacctttttggtgatgcaagaatcgcagtttggacagtacaaatcatgtgtctcttgcttatccatcatattctccacatcatgatattcaacatcttcgaagtccacctcctcctctatcacctcaccagcgggtggatcaacagcatccaggtctttagagacatcaccatcttgtaattcttcaatttcacgagatctttcgttatcctcagaagttgaaccgttttcaggttctaactgcgtttcctccccattcaagtcagcagtttgagactcctcatgagcatcaggtatggcaccagctgactcagaacctaacagaagaacatcacgcaagaattctccaaaaactcccntacatatgatgacagctcc

SEQ ID NO: 41093 - DNA, 507 bp, Arabidopsis thaliana landsberg
tcgtggaatgacgggatggtggtacgaagccgcgcatggtcaaagttgcgcaataccttggtgaacttgccaaactgtttcgcggctgcgtaagcttgttcaggtgtttttaccgtgtctttggtatgtgatccctgtacaaacgggaacatcctgaagtaccccatcccttcttcatataccatggccctgccatcgtttgcccttacgggcgctgtaaaggaataccccgggtgtgtttcccggagatagtcggcgatctgctcaatattatgcgtgatcgcctccggttgcctgaatacttcgttattgatcttttgcaggatatatacattccctcccgattccaccttccaggtcttgttgatcaacccctggtgcaacggcagcacctgcatgctttcttcaaataaaccgaactttctgataatggcctccatcatgccttagctgataaaataaatactgtctgcgggctattaataatcatcgttcaatgcaaacacg

SEQ ID NO: 41094 - DNA, 558 bp, Arabidopsis thaliana landsberg
tcctgagaatccatgtgtgtgtgttggggttttttttttaggtttttagagaaggaaggagagaagtagtaacaggttcagtttttggggagttttaatttaaaagcaatgaatgtgagagagagagagattttggaaaacgaagaagcgaagcaaaaagcccactactacaaacaacactcacttaaccaaactaaacgacgatctggtgggtggggcccaatattatattagttagtagatacattcgtatatttgtacggattattatcattggctcattgctaattctcatgaccaacaaaattcctttaatcatatcatttggtgccttttgtttgttaccaactgattgttgttcccattatctcactaaacacaatccaacaagttaataactgatttttaggattctttctaagatcttgagtaatagatattcggatcccgtgaatggaattataagtggggttagagacaattctccatcttgcctgcatgacttctctcgccgtagaacattccagtttcagaattgaaatatatggcaactcacaa

SEQ ID NO: 41095 - DNA, 664 bp, Arabidopsis thaliana landsberg
aaagaatttgagaatggattcacttatatgaaattatactttataataaaatcaaaatccagttcgtatacgatattaagttcattacttcattgttgctttacgaataagtctgaaatttgaatatgtctatatcttatacgcatctataaatatatctatataatatatgttatattgcattttttgtttttcgttaaaaaaatattgtatagatctcaattttttagaaaagaaatatgtcaatatatatatatatatatatatatctttttttagttaaatatatttagcttttaatatttcgcctgaattttgtataattttaaatacattttataagattaacaagccataacctgtcagaaatttaataaaaaaaatagaggaatgcaaaagtattttatcgagtaaagaagagtattttgtaagtattatcacaacaaacgaaatatttgattattgaactttgatgaactcatcatcaactacattgatcaagaaattgaaaaacacacactaaagaagaaaacgaaaagaaaagagagaaagcatctgctttcattattggattatcgaacgtagatgaagtcaccatcacctatggtgataaccaaaccacaccccccttaattaagaaaaaaaaaaaagtaagataaaaagc

SEQ ID NO: 41096 - DNA, 777 bp, Arabidopsis thaliana landsberg
  unsure (1)..(777): unsure at all n locations
acggtccaaaagtctagatttattctttattagtaggactaggccaatgtctcagaacttctttatattatactttatatctaaaacttgtgattcgtaaaatcatgaaaacttgttagattttgtctgtacattttggtttattaacaaaaatgtataatactaaaaacaacttacgtattctattgggagtctctttttgccttgttggtttatttattttggacttgttgttggttcatgtttggtttatataagattttgagattgttagtggctatttgatggcatgtatcacgaaattagaagttttaacgtttctcttagttttcacttttcatgatataaagaaaaatgtgtgcgagatatgaattatttggataattaactaatatactgggcctcctaccaaaagaaaaaaactaatatactgggcctgaaggctctcaatacattcttgttttttcgtctgccatttcatttcattaatgggcctcagccgtttcgttcattttaattgacgcgtcagtcgtcacgcgtcagccgcgtatatcatcttaaaattacgatttcacccctcaacgcgtacagagctaattcgttcttaactaatggcttcatcgtaataatccaaaccccaaaatatctgacttagctaatatccttcttcattatatcataattccaaatctcgcaaactaattttttcactttcttcttcgntgatctctctgaaagcttctctttttcttctcaccatgtctgggtatcctccat

SEQ ID NO: 41097 - DNA, 794 bp, Arabidopsis thaliana landsberg
  unsure (1)..(794): unsure at all n locations
tttataaacagattgacgatcaatattcacctatccaaaatttaataattacgcttctttttttgttacagaaaataattgtgttgattggtgtgacacctcgtacacaagtatgaggtttatgcagttgatgtgacttgtttattgattatagggtttgattatacacacacatttatgggatcatactttcttcgacttcacgtatgtatattttcttggaacacatgcatctcgtcaaaaaaattattcaaccaataacaaaatggagattacaaattggtaaactaatcaaaaaagtgatgataacatgatcaacactctacctaacaatatgtcaatatacatatccaatagcatgcatcatctatgcatgattgttaaagtgatatgaaaaaacatagactttttattatacaagaaactagaaatcacattggaaaaggagttacctaatcacaacaattcttttggcctaatctcgatcccttgaacgatgattccgcctttccaaccgccttctctagtctccaatacgctcatttcgatctcctcatcatcaaaaccaacataatattcaccaagttcaatctccaaccacccatcttctctagactcttgtgttcctgacttaagaaatactcttctattgttataaacttcagatcttgtagaacgaaagctaacctccaaaggaagagactcanatccaaaggctcccatttcttgttctttgaaaacaaggtaagcaccgtaattagtggctttggagagaaagggatgtgctattttac

SEQ ID NO: 41098 - DNA, 248 bp, Arabidopsis thaliana landsberg
cgtactcctccgagcttctctttgaacgccgatgaaagcttcacagaatggttgatcatactcgcaagcaaacatggcgtttgcaatagctttgatgtgaggaagtacgatgggatcaaccaaatcagaattataaaagtccgatatctgggcatcatcttcatgtgaagaagcttcgacaataacttcatcatctagggagacaaaggactcgtggtacacaatatctttttttcgggaactaacag

SEQ ID NO: 41099 - DNA, 705 bp, Arabidopsis thaliana landsberg
gccgatttatatttttctcatagattagaaaagataaatgtttaacattttgtaaaaagaaaaatttcaagtaaccttttttgtctttatatttctgtaattcattttgacaaggaacacattctatatttatttttttcctgaaaatcgacattaatatttgaaatgtcatttattttgaaaatcatgaaaaatgtaatattttgcttcaaagaaaaagtaagtaaaagcaaatgaactttaaaacaaacacagaacaatcacaagcgaaaaaaaaaaaaaaaccggaacccaattactctaagatgaaatatgtatcatactcaaaaagtacatcaaacatggagtatccattgaaaatctgacagcttttagcaactgccaaactaaatcagacccaaaattatcgggtttttgcacacacaggttgagacaggaacatatcactacagaaatgtcagaaaaggttggtgagtgtttttcaatcggttttcaacttcagtgtcgttttgtcaaaacagaccaattctaagaaaatatcaaagaggcatattctatgcaatgttctagaccttcttagtaatcttatacatgcataagaataaagtttggtagataacaaaggaacagagcattatataccaaaagcatttcatatgcccacattgttatcatcatctcttacggtcacaaaagcattacctt

SEQ ID NO: 41100 - DNA, 841 bp, Arabidopsis thaliana landsberg
tgattgtgtcacttgcctcatcatgtctagctatatatagtgtgtatacgtctcccatacgtatatacaggaagtaaggtaataaccaactgtgaaactatgattttagcagaggtaataaatttacggttataaaatatcccattcacgagttaacacgttcagggagttaatttaaacattttgcacatgtctggaaattagtcaaattaaatcttctaatactaaatatattttgttttaaccagcatatttgctgtaaatgtaatagatcgatgcgtatctctcacatcaaattatgatttataaatatattagcattatctcttaatatttttctattatatagtgttaatgacaaagatattatacctgattttcaagatattaatttgtgtgtaatgcatatataccgcatatgacccatttagtatagttggattatctttattttaaataacatatatctgtctcaaataaaatgtttgtttcctatgatgaaaacaatcaaatatgcttagattggcttggactttattttctttaaataaagataagttttggaaaagaaactaccataagttacaatattatatatactaaatttccaattatctgttattttatagtttaccaagcaaagtgtacatatgtatattttctataatatcatatacatacaaacccgtccattcacaaggatcttcaacgcctgttacacaagatttaaatacggttcaagtcagattcacacgccatatataatgttttcgtacacggtcacaataccattactagctaaatgcgccaaacatatcccaatatgtgcacaatcactagt

SEQ ID NO: 41101 - DNA, 566 bp, Arabidopsis thaliana landsberg
agtggaaacaaaattgtagatattattttgttaattatcgacaacacgacaaacaattagaaagaaaaaaaaagcaggaaaaaaggagtttcttaattttcacaagttattaaaaaggttaaaaatcaaaaccaatgtcggatactatatcactgattaagagcccacccagtgctcctcccagaagcccagctcccactccaagcccaagcccaagccctggtttattattattattcttcggcggcacttgtgtagtcggacaaccgtatccatatcccggtgacgtcggcggcggataaccatacccgtgctgattctgcggagacgaaggcgcgaacccgtgaaacgactgtgacggttgcgtttggtggaacgaatggccgggaggcggcggataggattgatgctgcggcggagaagtactgtaatacggcggaggatataaattcgatgcagagggtggcggaggtggataaacagcgactggctgttccgggtaatgagaatggtactgatacgggttcgggtacgggtacggcggtgaggaataatgttgcggcgga

SEQ ID NO: 41102 - DNA, 504 bp, Arabidopsis thaliana landsberg
cgctccctcatgccactacttcaagccaagatggtagtagtaattgagtaggaacatcagccctagtgggtcatgaaggatcgttattatctaaatcttcccccgagcagggtacgaactagagcgcttttattttcagctagtgaatacgaagagtaataccccctttattggggcattccaaaattagtatatcgagttcttgtggataattaacgttgtgtattgtatagtcatctatacgactatactcctgccgggaataccaatatccatcccatagtctgacaaacgcccgacaccttttgcccactaggatttaatagcaataactatacctagtaggagtttaacttatcttgatttctttccaatcattattccattcctttccagcattgcatagagggtgtcaagctcatgcttatcaaattccaccatgtcttcacctaggggcccacctgctacatttcccgtcagagtcacttctttaagtaagggaaa

SEQ ID NO: 41103 - DNA, 909 bp, Arabidopsis thaliana landsberg
  unsure (1)..(909): unsure at all n locations
tgatggcgatgaaaacactatagacgaatttagcacatgactagttgttctagagttcgtttctacatgttgaccatgacggctaaccttttagcactcgaggattaactgcaacatgccaatatgccatcaccaactacgtaaaccaccagcgccaagaggaataattcgaattatattgttacacgagagttgtaacgggacaagaccttaataggtcaaacccacgggttgaaatggtcaaaagcatactctagagacaaacactatcaaaagacccactttatggacatacagtaagaattggcaaggtcatatgattggttctaaaaaaggtcttgaactcttgatccacatatatcatctggcaccccaaaataagatcgacttattctatgagattgagtcgctcctatctaggataggtaagctcataaatcttttaactatatggcactatgcatcaaacgataaagagctccctcagctctcagttagaaagaattatctcttatcacatttccaccaaatctcgagattggatcttacactacttccggctaacgatctcgaacttagaaaaacaaaacaaaatgtttagatgaactataagtttagataaacccacttaccgaatatcttgtgccaaatataccgcttgctactacaagaaaattgacatttttcttgccgacgaagttctgcaccattccaatgatactattgcaaagagaagatgggctatgactgtaagttgtttcttgtgtaaccaaacaaaccaaaatctgcaacgtaaccagaaatatatttttaggtaaagaaacataggatttaagcangattttacagtaataaataatcgagaataactagagatgctttgaatcaagtatttctcatcttaaaatc

SEQ ID NO: 41104 - DNA, 761 bp, Arabidopsis thaliana landsberg
acaaaacttatatcgattattcacacagatatggaagtaacaatgatatgatcttatatataataagagtaacgtcttactgttttctcgatgaccagataccaacttcaaacttgtcaaagcagaatctcaaaaactcatcacaaaaaggtctcttgaaaactgtcataaccaaaaaaaaatgcaaactaatataagtaacaatgtggtctcacaaataacaatgaacaaaaagaaacttacttgctcttcttccaatattaatatccgctggaacatccttgagaggagtaactatatcagcaagcaacccattaagatcaagaacaagaagttttttccttaacaccaatgaatttaccccgctgattccaccaaaaacaacacaagaatcgttgttctctaccactgaaacttcatcactactcataacagccgatataaccgaaccttcttcattcttttctatggtttcatcacccgaaacaacacaagattcgttgttctttaccactggaacttcatcattactcgtaacagccgatataacagaaccttctttattcttttctatcgtttcctcacccgaaacaacacaagaatcgttgttctttaccactggaacttcatcactactcgtaacagccaatataacacaaccttcttcgttcttttctacggtttcatcacccgaaacaacacaagaatcgttgttctttaccactggaacttcatcactactcgtaacagccgatataaca

SEQ ID NO: 41105 - DNA, 103 bp, Arabidopsis thaliana landsberg
agagatcaaaccaataatcaaaatactcctcattatatcagaaataatcaaaaaaaaaatgggatcttcatcaaagaacatcgaacaagctcaagaatgttgt

SEQ ID NO: 41106 - DNA, 549 bp, Arabidopsis thaliana landsberg
ggttattaaattcgaaagtcggttcatgaaagatgtcgtcatcatcgtaacatgatgccaccacgcagtcagcactaagcaggctatttggctttggcaccttcattcaaaaataaaacaaattttaaattcctggttcagtaaaaatgtggaccgttgttttgggggcagccaatcgcacgaatatggtggctacgccacaaagttacaaatgtacaactttgtcgggcttttccagattcattaacatcaataggcaagtaaactacaaaatgcaagttgcttaatcaataatgttgtaaagcttttacagcatcttttataccataaaatgtcaacatcatggagtttactccaattaagttctcgtacactttgatttgaataatcagtacaaaacataaccaaaccggattagatgtggttttaactattgcatacattttcggccaatggattaggattactgaaagaacattaaaaacatatatgtatgacgacgaaaacaatttcttagggcttaggttatatatatttcgcagaaatgta

SEQ ID NO: 41107 - DNA, 879 bp, Arabidopsis thaliana landsberg
gaatacatggaccatcattgttacgcattaccaacagttttctttacaatagaaatgcttctgaaataaaaaaagatatatatcatcattaataaaataatttcaattttttctaagaatttcaaattcgtctagttacagtaagttaattttctcttaatatataatctgtttctcggattcccaaaaaaaagagaaaaagaaaaaaaacattcctcataattgggccgagcgaatccgatttgggtttgcgtcaaaatcttctcctattgtcctattactaaactctattcgatttgaaagagagaaaaaaaaaactcttaaattgtcctaactgagtaataaagctatctctagttttgtttcggagctcaaatttcgtccttgaagataagttcttaattcacaaatctagttattgctagcaactctgtttctctgttctaaaccctaggactttatactttttatttctattgttgtgtgttaagtaagattagttcatgattaggctcgcaagtcacaatctcattttagtgtgaagtttctatttgaaactatcaaaatctttagatgatccagtttattctcaactttttggtgaagtctcttcttgttccttcacttgtcaatgtgttttttcactgtggaaatgatttagctctgctgtggtggtttgaggtccgtacgataagtctatgcaatgaaaggtccgttgttttatgaaatgtgctcaagaactgtttgagttttcggaaatttggcaatcagaattctacttgtatcattggatgttggctatgaggttaatgaacaatgccatgaatatagcttcatggcagagttcgaatagttgggattctctatgtaaatttaaat

SEQ ID NO: 41108 - DNA, 841 bp, Arabidopsis thaliana landsberg
aaaaaaaaaaaaaaagagaggcagaggaaactaccattattttggtaggggtccaaaggatgctataacggtgaaactccttggaaggatcaaaccaaagacggtagcgttcttcgcggccgcggtttgtgctaccgtttccatacatattcgtttgaaatcgccaaggcttcccttttaggttccctaaaaactctatgtctagttcgtcatggtccttcacaaacacatcgccatttgatgtctgcataatttacaaattgcacacgttaactcaaccatttatttccagtatatgtttataaattatttgataatcaaattcaaaaaattagtgatttacatagaaagcgacgacgataccagccgtgtaagctcctggcaactttatcaacgaactgaaaaacccatgttgatacatgcttgaagagataaacccggaccctaatcaaattcattttataaattcaatgatttgatagttatcaaaaaaaaaaatttcaatgatttgattagtgatcctctaacaagatactataaccatatatagaaaatgatagtctataaaactggaaaataaactttgcaaaattgaaaaacagtgacataaaaagatttcatctactatcattcaacttacataaagaaataatgattgactatgaataaagattttgcaaagcttcatgtttgatgaaagactgtataatgccataatcatgttacgtacaattctgaccctttcgcgttactaaacctatccagtttcatgttcatgcaatttacaaaattatatatacagattaatactatatatatagaaacatgattcatagacaag

SEQ ID NO: 41109 - DNA, 1159 bp, Arabidopsis thaliana landsberg
  unsure (1)..(1159): unsure at all n locations
ttattttcggggggttggtgaaaattaaaaaaaaaaaaaaccagcataaattgttatttgttaagtattcatttttgggcattttgtctgggtaaaatttgctttctactattgattctttcctggatttttttactcctattgggtttttatagtaaaaatacataaataaaagaaaaacaaaagttttatagattctcttaaaccccttacgataaaagttggaatcaaaataattcaggatcagatgctctttgattgattcagatgcgattacagttgcagggcaatttttctagatccgtcgtcacattttattttctgtttaaatatctaaatctgatatatgatgtcgacaaattctggtggcttatacatcacttcaactgttttcttttggctttgttagtcaacttggttttcaatacgatttgtgatttcgatcgctgaatttttaatacaagcaaactgatgttaaccacaagcaagagatgtgacctgccttattaacatcgtattacttactactagtcgtattctcaacgcaatcgtttttgtatttctcacattatgccgcttctctactctttattccttttggtccacgcattttctatttgtggcaatccctttcacaacctgatttcccactttggatcatttgtctgaagactctcttgaatcgttaccacttgtttcttgtgcatgctctgttttttagaattaatgataaaactattccatagtcttgagttttcagcttgatgattcttttgcttttggttttctgcagaaacatggccgcaggtggaagaatgccggttcctacttcttccaagaaatcggaaaccgacaccacatagcgtgtgccgcgcgagaaaccgactttctcggtgggagatctgaagaaagcaatcccgccgcattgtttcaaacgctcaatccctcgctctttctactaccttatcagtgacatcattatagcctgatgcttatactacgtcgccaccaattacttctgtctcctccctcagcctctctcttacttggcttggccactctattgtgcctgtcaaggctgtgtcctaactggtatctgggtcatatgcccacgttgcggtcaccacgcattcagngactaccaatggctggatgacac

SEQ ID NO: 41110 - DNA, 802 bp, Arabidopsis thaliana landsberg
  unsure (1)..(802): unsure at all n locations
tttcgttatagtattattgttatttttctcctcttgaattttcttgtttttttcatctataaatacatttaaaccaccaaatttttaaaaactcggtagaaaacccgtatgattcttctagcgagttaaatgtttttctcgatttatcttttctgctttgtttttttccacatcctcctctttaatctgctcattcttttattttctatttctctgcctacctcttgatcattcaagcaattactacatgattagaacgttggcaatgacgaacaaaggctaataacaacaaaatttggtgcatgtggtggagacaatcgtaacgaataacgatagcagatgggattcatgatggatcttgtcaatctatagtcttcaactggtaaactaatccgagaagtaaaaagtatgtgtgtattcggatacgtttatgcaaaacttatgttttactgaaatggggacttctctccaaaaacttttcatattataaccatgtccttataaaaaaccttaaagttgatatatatgagagttatgattatcacatctagaaaagaatgatacaaaaagtcaacaaagaccagcttccaactttcatagcctttaaaaatgcatcaatgttagtgtgcctatatatctctttaaaaacctcgtaactctcattaatcccacccanaccttcaaataaaacacaaagacatgaatcgaacacaatctcctaacacgctctattcgccgtcttggcaactcttttcttattagtcttggtgtgtgtacaaacaccatttctgcaataactttt

SEQ ID NO: 41111 - DNA, 521 bp, Arabidopsis thaliana landsberg
attatataaaaaagttcttagtttcaatatttcattatttctccacatatatcttctctcatgtttgttgttttgtttgtttattcattgtataatgatttatttacactaatatgtcttcgtcacaaaaaattcagagattttgttaaacatatattatagactatcatttttttcttatgcttgttaccttaaaattcaaagcagactatgtacgtacaccatatgtattagggtttcaattttcagagtgatgtttatatgatgtacatctaaataatatatctctagacaaaattattgtaggtgtcaacataaattaaagagtgattcaagggaggcccaaaaactaataataacctaacattaaaatcaaaccattacataaaactttccataatcacctaaatatttatcaaacatagtggataatactaaattatactatataattgcatgcggatcaacaatacaatagaacaaattaaatagatagttgattttatatatatccatcacta

SEQ ID NO: 41112 - DNA, 665 bp, Arabidopsis thaliana landsberg
caggggtgactgtctcaaggaggagaacattttccaaaacccttcaagcagagaaagataagatatcttaactactgcaatagcctgaaatttagatcctaaacagtaaaggatgagattataccttaattttgcattcatggtctcacaccttttacacaaccaagtcttctgcatctcattctgtgacaacatatagagtaagctatatatgaacaggcagcatttaaatcaattggaaaacactgaaacccttacatatttgtgttgatgttctaactttagatccttcacaagctttataagtaccccgagtatttgttccaggaccttgttcagaataaaaacgaacagtcatcagaacttactacaactaggggatacatggataattgacaagtagtagctttcatatacatgtagaaatttatctataaaaaaaaaaaatttagtaaaatatcatgcaacagcccagtaattagattttcggtttgcataatacaatatgaatattcttttcacctacattgtaatattcagcaaacttcctgtcagccgagtacaggtcctctcgtagagctgcttcatctctttcaatctcctcaattataaacttaaccctgaaatgcaagaaaaacacgtcactcatcggtactagagagcat

SEQ ID NO: 41113 - DNA, 582 bp, Arabidopsis thaliana landsberg
aacatttagaaaaacaactgtgaagacatcaggaaacttgtcgcagattcctccgtttaatatcccgaggcttcccgacagtttcagaccatcgtcaaaccctggaactggggatttcgaagctacctatgttgatgataccatgcgcataactcgcggggacagaggtgaacttagggtattcgtcattgcttaattctcaaagctttgacatgtaaagataaataaatactttctgcttgatgcagtctcatgagttttgtacaaatcatgtgaacatataaatgcgctttataagtaaatgagtgtcttgttcaatgaatcatatgaaagaatttgtatgactcagaaaattggacaatgatatagaccttccaaattttgcaccctctaatgagagacattagtgattctttcttatgtcgggagagagaaccgattgtcaaaaaaatctcgaaagtcaatgattaacagcaaaaccatatcttgatgattcaaaatatagagctaacaagctgagatgagacaatcttatacgagagagctacaacaaatggactccaaatccagctagtacaaaaa

SEQ ID NO: 41114 - DNA, 604 bp, Arabidopsis thaliana landsberg
gctctaacgcacacatgcactaaatgtgatttaaattcttttgaaaaaaaaagaaaatcagtaggttctaggtagtaaacttcacagtaacggaacttcccttcacctaaagtttatatcgtcctcagttgaaactttttatgggggaaaaaaaaaagcttctaatagcttgcttccgtaattaagagaaaacccaaaagaatcttagcctacactaaagacagcatctttaagagagtatagcaggcacctggaatacagaccatttgttacatcaacattaaatgagaaggtctggataggcaatgcaccgttcataagatggagactttcccagagttgctgggcataacgaacggttccaagcttgccgccctggtcaggcacccacagtactggaaaagtaaaatatgggccaaagcagcaaagagagctctactcaactctggagtccctggggaaaccccgtcgcacttctggagcccgcttttacttggagatgaactggtgactgcaatgcccttggagcttgcttccttccctcatgcgtgaagtcaagagtctggaggagatgggtctcaggcttctgccagtcataatattt

SEQ ID NO: 41115 - DNA, 118 bp, Arabidopsis thaliana landsberg
  unsure (1)..(118): unsure at all n locations
atacgcgattgcattctgacgatccgcctgaatcgtaccgacaagaagaacgccatcagcggcgccangtacaaatcgatgaccgacgcgatcaacgccggccatgcagacccggatg

SEQ ID NO: 41116 - DNA, 852 bp, Arabidopsis thaliana landsberg
  unsure (1)..(852): unsure at all n locations
cttcgccaaagccatcgatgctcgacttcaacttgctttccatttcaatcccaagtctcactggagaggtcactgtgacaagaaccgtgagaaatgttggaccggcccgttcagtctacagaccagtgattgagtctcctcttggtatcgagcttgctgtgaaaccgaagactcttgtgtttggttccaacataacaaagattacttttagtgtgagagtgaaatcgagtcatagagttaacactgatttttattttgggagcttgtgttggaccgatggagttcataatgtcactattcctgtttccgtgagaacaaagttcatgaggaactatgtttgatcattgttcacgtgtaatattagttttttttttttttaatttggtaatgaaactcattttttatctttaagatttatcgttggataaaatcagataatttggtttccacatatatcaaaacgtttcaagcttttgatttgtgtgcaaaagctagtttccatttaagagatcaatggatnnnnnnnnnnnnnnnnnnnnnnnnnnnaagttgtacagaatagctaaaacatctgaaaacgtatcataaggatatataggataatccgacggcaacaccatgagatctcggagacaaaatttgtgagacaaattgtgacatgcgagccaaaagtaagttagaaccacatccacgagcgcatagtgaagtgagagattgccactgtcgaaagacattttgaagttatagatgaatccaaaaccgtgaaatgttttcggcattgaagttgtgaacccgactaatttccctaaccgtcttactatactttgagtagagtgtcttgtgccggagaaa

SEQ ID NO: 41117 - DNA, 1916 bp, Arabidopsis thaliana landsberg
  unsure (1)..(1916): unsure at all n locations
atataaatttatttaaaacaaatggaggggggggtgagggggggggggggagtgttttttttttttttttcttcaaaaaaaaaaaaaaaaaaaaatttttttttataaaaaaaaaaaaaacccccccccccccaaaaaaaaaaaaaaaatttttttttaaaaaaaagggggggggtttttttttttttttatttgcaattgcagttgtaggcttgtggtattcgtttgttatggagaatgtattcaaagaaaagaacaaaatgttggtattgtgaagaagaaaaaaaaatcaatacgaggaaaagtgatagaatataagaaagaaatacaaaggaaataatgtatcatcaattcaataaaatcggctatatatatatatatatatatatatataagtgatcggtacaacttgacatttcttttggtgagattctactaggccaagttggcattgttaatgagttttaattatcacggttttaggcaacataatattaaattttaataaatatgtaatgtttacaatttctaatctatagttgtttagaagaatacctttgacgtgaaactacaactacatgtgagcagagctataaacctaaatgtttctgattccaaccaaatttaagattttgatccaaaaactgattatagactcttcttaaaaacccaaaaaaaaaaataaccatagcttgagattgcacataggcacatatgtatatatttttttaatgaaggttttaacttttaaagtttcaactattttaaattgaagaaaaagagaatgttttttacaaatgcccagtatgagttatgacgagtttatttcgagcccaattaaaatagaaaagtggataagagaaccccgacttgaaccagttcaaaagcccaactagaaggaaattgaattttctaatcagataagtgaaccgggttttaaacctgatggaccagaccgggtgattttttttgtaaatttgttgacttggtttgccgccgatccaaccgtatctttcagtcttcttcgatagagtgagaatctagggtttgggagatgagcagtcnnnnnnnnnnnnnnnnnnnnnnnnnnnnnnnnnnnnnnnnnnnnnnnnnnnnnggctgtgagtctatctgaaagcttgatttcattggcgtcgatttgcttgaggagacaatcgaagagattccggtgacgacgaagatacattgttgacttccattttcttccgaattttgaaaggttctgaagctagaagagagtacgttacgattctcgcgatcgtgttactggtaaattaattcgttgtccaaattgtttagcttttactggattcgaaagtatgagtgaggtctttgattcatgtttctccaatttcagagtccccaatcaaaggatggtgttaactgaaatgagccttgactactcaaatagggttttaggttcacaaaaggtgaaaaatattcagacctgaaccaacaattctttcccattccctgccgctgttgctaatcgagagcaacttgcaggataatgtaaaacaaatggacagagaagagacgcaggagaaagaaaatatgctattctcttcccaggaatatgctgcaaagcttcaaaaggcatttcctcttcactttaatcttgttgaatcctggcatactgtatttttctttttctgattggatttgatcttgcaggaaaacatgacactaatgaaagccctagcacaccgaaagtatgtatcttgctttcgttagaatgtgttggcttttgagttttatgaacggtgttgataatctttgttttgtgtgcttatttgtgaatacagtaaactcgtcgagttgagcggtattgagattcagaaactgaggatcaacttacggagtgtgcaggaaaagaatttgcagcttgctcaggc

SEQ ID NO: 41118 - DNA, 655 bp, Arabidopsis thaliana landsberg
aaggaaaaatgaagcataaccataacaaggggcaaccaaaaccacaaaccacaagatcagaactcaaaacttgactaagacacaatgagtttctttggttttatgcacaaacacacacagatctctttaaaatgaattcgttcaaaaaaggtaaaacgaaagggaatttttattctttcttacagtcatagtggagaatgaaagtaagattatgacactatgaatcgacaaaccccaagcagagcaaaagaataactgaaaaaagaaaaacacaattctcaaagaacacggaatctgatagtctataaacacaaaagtttgttgtcaatcgtgtatgatacactcttattaagttctaagttctaacttcagcttctataaagagaaaagggccactcccatgatcccataatcccaacacatataaaaaggtcttctttttctcaaaaccaaaaataaagttgagttttttttttgttctatcaaacatcagcagaagaagattccgtcttttcatctacccagaaagacccaatttttaaaagccaaaacagatgtgagctcagcaaatagatcgaatcaaatttccagttaccacaaattttctcaagaaaaccacttaaagcacaaaactttgccactaagatccgctaat

SEQ ID NO: 41119 - DNA, 631 bp, Arabidopsis thaliana landsberg
acgaacggagttcctcaagttaaccattgatccttcgacattttaccaagctgttcctcgtcaagttaacgaggttcctccgcaagttaaccgagttgttcctcgtccagctaacgaggttcctccgcaagttaaccggattgttcctcctcgagtttaccagcggaggaaccgtgcagcaactgctgaaactgaatcaactgcgagttcttctttcaatgtgagtaaatgttaaatcttatctctctctttctcttaaaatgtactagctactttctttataataataaagtgcttttacccctttttgcagcaaaagcctgagatcattgtagttgaataccctgatgattctgtagctgaaactgtaagattatatacaattcttttgccttttgaggtgcttgtaattgattcttgaaacgttttttgaaacattgtgctttttggttgtgttttgttaggtgagaatggttgcaacaaagacagtagtcgatgtagaacacgacacgacataagaagcaggaaccaagaagattcgtctctaatcgattgaaagtacaacacacgacttgattaaaagtacccacaaattgcatctttcttttgttttacacattttcgttctttt

SEQ ID NO: 41120 - DNA, 162 bp, Arabidopsis thaliana landsberg
tgagttctgtttgataaccaaacaatgaagttttctattgtgattcataatttatccatttgagtttttttttcaaccgtctatttctaattgattctacaacaattagtcacccaatgactatgagactcatgatagtctgaataattaaactatacaatt

SEQ ID NO: 41121 - DNA, 556 bp, Arabidopsis thaliana landsberg
ctcgaccgatcatagtgctcctctacctctcttaattgtctcttcttggtaattttactccaaatctttttctttctccaaattttgttactctgatatctgttttcagatgttaaattttttttgcatgttcatacaaaagataatttcgtttttcatagttactgcatgcattctcaaatgctgaattttcttgcagatcgtaacaagagactttctacttcagtttcccagaaaacttatgactgaaagaaactgaaatttccccaaattttataatcatgctcttcataggtaaatgccactgcctctttctggatattgttattagctattgtttgcttgtttctttaatttctctcaattttttaaaaatttctggaaatgtgtcatttttagactctgatatatttcagatgttcataagaactttatattttgtcttcacagtatttgcatgcattcactatttgagtaacaaagcatttttttgtataatgtttgtttttgttctgtttggaaccatcgaaagctacatatatgtatataagtaaat

SEQ ID NO: 41122 - DNA, 783 bp, Arabidopsis thaliana landsberg
aaatttaaaagcaacctctgattttgccattttgatttttaaaaaattggattgttaatttatgtttgtggtttccatcgacatggggacaagttctgatcttgggaaataactggtaaatatgattaagatttaattgataaaaacttagctttaatgttttggtttgtatttttaggtttttttccaaaagtgtttctctttaggattattgtctctagggatttcaacattttgcaggcttagtttcatctttttttttattataataaatttcggatgccaaaaaaaacttgtttaagaaataaaaaaataaatatttttccaaatttatgatattttgaaactaaaacttgtgtaacattttatggtagttaactaaatattaataccgatgcctgcatgagcttcaacacaattaagtacgatcaccattatgcatagtcaaaataagcaggtagatgattagaacaaatccaataaacccatacatttaccaagaaaatattgagacataagatacgtgacaaagtcatatatgcaacatgaaatataagataaagaaaacaaactcttagatcattttgcagacaacgttatacgacgaataagcaaacaaacgaaaaatgattctccaagaacatgttaaatttgatgttcatcagaagatcataattagtagtacgttggttcagacgtgtagaagaaaggaccagtccagtaaagcttgaagctcttgacgtgaagaatacggtacgtgctcaatggctgtgctctacacct

SEQ ID NO: 41123 - DNA, 414 bp, Arabidopsis thaliana landsberg
actggaaactgctatttttcaacttatttcgtagcttactctatgagctgcgtgcattgacattgttttagcgttgacgggattattctgcagtcagcttgctgggcgatggcaaaatcctggcttgatgttcaggttgatcttgaactcgcccaatcaaagcctggtttgacagaaaggtttaaaagctgcattgatgaaagccctgaagctatgcaaaatggttgtcaggcttcatttgggccagaagattggcccctccatgttctaaaccaacaaccccgcgaccttcctgctcttcttcagaaacttcattcagggtatgaataacgactactgggaaaatttctttgtcctttctgtagagagctacagcccaacttactgttttattcctggcgtagggaaatggtg

SEQ ID NO: 41124 - DNA, 880 bp, Arabidopsis thaliana landsberg
  unsure (1)..(880): unsure at all n locations
ttttttttttgttaaattttttttttcnacaccgcaaaacgatttgtttttttttttttttcttttttgttttttttttttttttttttttttattttttttgtttttttttttttttttttttttttttttttttttttttttttttttttttttttttttttttttttattttttttttttatttttcttttttttttttttttttttattttttttttttttttttatttttattttaatttttttatctattttttttttttttatttttttttttttatctccttattttgtttatgttatctttttattatattttcnttctttatttctatatttttttttccttcattaattttattttttacttttttctatttttttttttttttaaaactattaccttttttttttttttttaaaaattgaaatatttttttattttttttttggttttataattttttttttttttttttatattttagttttcttcctatttttatttttatatttttttttttttttttttggttttttttttttttttttttcatttttttttttatatttttttttttatttttttttttttttttttttttttttttttttttttttattttttttttatttttttttttttttttttcttttttttttttttatttttttttttttttttttatttttttttttttttttttttttatttttattttttatttttttatttttattctttttttttgtatgttttttttttttttttttttaatttttttattttttttttttttgtttttttatttttttttttttttttttattgttttttctttttttactttattttatttttttttttttttttttt

SEQ ID NO: 41125 - DNA, 550 bp, Arabidopsis thaliana landsberg
cgttctgagattttaatatgtttgcataattataggtaataacatatgatttcttcagaattattctagaaattttaaagtagtctatacttatactatagcaccaaagtttcattttataaaatgtcaataatctatttgaaacgtgtaatgcttttgaccatttattaagatttgtgttggtactagtggacaaatttttagtttacttactcaagatttaaaacaaaaatatacaaattaaaaaattgtgtgaatcaatcatgatacaaccataattaataataatcatgtgcatgaatgcaatggcaaggactttttttcagttgatacaattttttagtttatttactcaacatttataacaaaatatacatatttaaaaattgtgttaatcaatcatgatactcaacaataattaagtgcatgaatgcaatggcaagggccatggatctaatcatcacatacgatttattgaaaaaaaaaaacatccttatttaggagtaccagatgagagcatccagaccatgacgaaggagaatgaatccta

SEQ ID NO: 41126 - DNA, 517 bp, Arabidopsis thaliana landsberg
aagaagaggaagacgtgtcatcatgtaacgatgctcattgtgtagatacggataaggcttcaagagacggttttggtgaagaagtaaatgtggaagacgactcatgtatgtccttcgagttacaagactccaacttgatcttcagtcacaacccaatcaaaaacagagagtgccacagatctggtgaagattcaaattcatttgatgatcagagattcacatcagattgttggaacaagaacaacgatctactaccaacttcaaacattattgaggagatatttggtcaagacgattgggaagataaagatgataataacttgaaggagaagtaaataaaaagttttcttctcctctttcatggattctgcagattttttttttcttaagtgaattagataaagatgcataagtttgaaagtttcatctttaggagttctgtgttggttaaggttgaataagaaaggacttcctgattgatttgactcttgtaaaaatgctattcaaatccatgaac

SEQ ID NO: 41127 - DNA, 477 bp, Arabidopsis thaliana landsberg
aggtccacatcagtcggtttggttgaggcggtaaatgccccagtggctgcgactacaaatagcaacacttgccagtatttcccattcggccgtggaattacttccataaattgagcccgaaatgtcgcttcatgcacaataggatatgaccgatgatacagggagaagtatgcctcaacaaacggttctagttgtccgagtgaggtcaacgcaaaaggaacgctggtagtatgcgacgttatgtgttcaatattatctgcattgctcaatgactcagtctgcctgttatcagttaaccgtaggagtgctgcgccggatgcagctccttgaaaaatattagcatccgtgatcatgggccatggaaaccacctaccgagatatccaccctcatttaagctagtggttaagctagccatgccgtcaacaaatctatgtccacctccattgccaggtcgctcatcccattcaaaattactg

SEQ ID NO: 41128 - DNA, 775 bp, Arabidopsis thaliana landsberg
gactcaccagcaaaccgaaacgaagatgcatacctaggtagaaacaaaaatcatagaaaaaaaggtaaattactacaaataactaacctttcttcaaaacttgataatttagatgccaactactatcggccatttctaagtcagcaatacatagttatcacccttatttatgaagcacacctacaatataagcaataatctagacgtacatttcttttactatttgtcaacatgcctcaatcaggatttgtacaaactgatctgaaacgagcctactggtatgtaaaagtatcaaaatacagagacttatcagccaatatattaaataaacacagaccaatgctacaaaactaccaaatctcaccctgtgtaacatgaaaatctttccgcaccaactatttctatagcttcattgtcatccatccgaggcaagaaaagcatgccagcgattaattcagggttaatcatgaagcgtatctcttcctggacaagaatccaattggaagtcaatgaaaaatcctaaaccattgatttacaatagatcttttgacaaaaaaaatgaactcaagaatcatgtatgcttgtgaaatctaaaatgtaatatgatctcaaacctgcacgcaccctctacttagggaaccacctccgagaaacttgtttgcaaagtccacttcgagagcattggcagggtgatcttcaattaaccccaaaagagtgaacctattacaataaagctgtcagcaaaaaggtatgtacaagcatttgcaggatttaa

SEQ ID NO: 41129 - DNA, 441 bp, Arabidopsis thaliana landsberg
gcgatattgtgctatctgctccaggcgcaagaaaactatctgcagtttcagcactactggtgcagtgtctgacaaacgaaaatggcgcatttgatcgccaggatattgataccaacccatcgcagtcatcagcaaatgcaaaacaccgtgaggccatccaaatcgacggatcaaaaatgccccttactcccatcttggacctgagatctctcggtacaggcgacatttcactccatcactggattctatcacgtcctttcctcaacaaacagcagttgattgacgagagtctagaaattgagccattgtccaatggcgaagaacttccctgttatgatgtgccgtttgagaatgatgacagtgaagattcggtctcagtagtggaagatcttgcgcaggagggttcttttgagcatgtcattgcatcgaaacatgatgtca

SEQ ID NO: 41130 - DNA, 479 bp, Arabidopsis thaliana landsberg
ctcgatgtcggtacatctgaaaaagctgtaacgtaagatttcaactcaacctgtagtatatttggttgtagttcaaatagtctctttctaaagatttaaagtgataagaattagttatttaattgcattacaagtagatgctgatctattggagttcctcttgctgtaaagtaattagttatttaattgcatttaattacttcatcaatgtgtttgcaggtggtctgatgttcttgatacagtaaggacaatgctgccctcaaaagcttggaatagtctatcgccagacctctacgctacattttgggggcttacgctttatgatctccatgtccccagaaatcgttatgagtctgagatatctaaacagcatactgcccttaagacacttgaagaggttgctgataactctagctcagcaattaccaagaggaaaaaaaaaaaggaaaggattcaagagtctcttgatcgtctaaccg

SEQ ID NO: 41131 - DNA, 1604 bp, Arabidopsis thaliana landsberg
tgttgtgaatgttgaaggtagacaaaagagtatctctaacttttgtttgaatcagaaaagtagtttatatcagatttttagtttagattggtatatactgatagataagaaatgaacttagaagttagaactgtgttgaagctaagttaggtgtgtgtgtgtgtgttcctcttactattagatcagggtagagttaagtatacgtctttctgaagagtttaatgaactgtgttcgtagcagcaacaagaggaaacatgaagaactcggttccagtgaccttccttcgaagaagaagaataagaagaagaaaaagaagaagaatgtcgaagcaacatcgtcgtcatattaagtctgatatgttttgtatttcactttgtacttgctctatttcagcttgtgtgctcagttttgttataattggtgatggaaaatggtgatttacatattaatgaagcaatttatttttctcacaaaagcagattttaattataaagaggaacatgaaaatcgcaaaataagaagattttgcagtttcctacaacaaatgcataacaagttaacaactatgtatgaatgtcgtgtaatttacacttctccattgctgagtattttcctcagctacgcctctctgatgctgtaaatctcattcattcgcctgttgactgttagatttcaggacactgaaatggcgggcaagctccaaagtttctttctggcgatcaaaactatctcgtctttggtcgacagaggatcaccttttggagttgtctctgtggaccatttatcccatttcaataatgtcagatacttcttgatatagctaatattgtcagttgtgtcacgaattatgacaaatccttctgggcgtagtatccgatccatctcgataagcagatcttcaaagctgcatccacgtgcttgggtttctgtgaaggtgttccatgcgtggataagatcaaacgttcgtgggtatgtgtcaaaggcttcacacctgcaagggaatttcgtttaacatcatatggattatgcacaatgtttcgagatcaagtcatttacataccaatcatgagtggctccgataaggccacggtcgtaaatgatcttcattcttggagaggattgaacgggcatgacattcattacccatacatctttatcgtttagagcagctgcgaaaccgccaaggtttgagctcatgtccatcacgtttcttatggagttcttttgcaccattggtttcagcagtttccagtattctatcactctaagccgccatgtttcctacactccaataaagaagtatttggatgttgagatgcatgtcagttttgaaatataagttctcaagctctggactcaaaaagagctttcgctgtaggagagaggaaataccgtatcttcacggaattgctcaggagtgacaccaatttcttcaagacgtggtggaggagctgtcagcctccgtggccagggaacgagtccactccatctttctttgtgcatccctgggtaaatataacaaacatggaatgaataacaaacttagtgaaacttgatattatataagtttgaaataggatgcggatacttactcactgagtaa

SEQ ID NO: 41132 - DNA, 566 bp, Arabidopsis thaliana landsberg
  unsure (1)..(566): unsure at all n locations
aaagccctatcttctatttaatttaaacgacctctctttttctctaatagttttatggtacttaacgggtataatacttaagtttttctatcataacaggataaaattctctaaaatcagttcatgtatttgctcaagtatcagaagcataattaaacaaagattctatttcctcgagaaaaatcaaataaaattacaaaacaacaagaaactgtaaaatagaaagaaagaaaaaaacctcaaaagaggatttatacaaaagagcgagtatgaagaaggatttggcgtgagcctcatttacagaggaagcaaggaagagaaattttcatttcatgtctctagtttcagtacaacaccagtgatccctattggcgatttcggttggaaatgctcatccgtatccacttcttcgatctcctgtaataatatgatttaatcttttaacacatgaaactatnnnnnnnnnnnnnnnnnnnnnnnnnntgtgcttagttggatcaaacctgtactacatcctctcccttaaggactcttccaaacactataagttgatcattcagatccgg

SEQ ID NO: 41133 - DNA, 873 bp, Arabidopsis thaliana landsberg
atttgggtaatctgattcagatatatatgccaaaaatagtaataatgagaaaatttagcccatttaatttcatagtctattcaattcagttgacttataattaataaaaagttacaaaaacatttatcttaatcacttactaaagaaaagaaaagaaaaaaaacacacagaaattttataagaacttctgttaacaaacaaaccttaacactcccttcattctctttgctctctccctttctccattagtgagctcgtgtctcatcaaacaccatgaaaaacaattagaaaaccttaaattgtgacaaataaaatacatcttttgttctgtttctccttagtctctctgtgtgatttttctagaataaacgagaaacagagttaatgatgagaggtaaatttggagaagcttcgtctccttcgtctctttcacgttctccttcttctcctcttcaaacagaaccacatccccactctcccaagttttatcgtaatcattatgtctttcccagtgatcactcatcttacaacagttcgagtaggttctgtctccgatctccgtctgattactcgctttcgagttatttctcaaacgggttgtgttcttctgaggatggttcgtctcagttcgcttctcctccactcgatggctttatgaccaagtataatcttgatggtgatgatttaggtctttgcgaaagtttcgatcttcttaatgttggagaagaagacaagactcatcaccaaactcagaggagcagttttggtaactatgaagctaatggagatggtggatttcgatataactctggttttggtgttgatcaaaaggatcatcagagtcctgattctttaaatctgggaatgcagtct

SEQ ID NO: 41134 - DNA, 574 bp, Arabidopsis thaliana landsberg
  unsure (1)..(574): unsure at all n locations
tgaaaagagctgcctcgatgtatgttcaatcttctatgattgtcattgctcctgacacgaattggttccagagattctgttnnnnnnnnnnnnnnnnnnnnnttgctgcgattgattgtcttagaccggtttgccggattttcgctcggtctagttaagagatgtgtttagaaagggtgattctaattcttcttagtaattgtgtaaatattgtatataattttagattatcaaataaaatttctcaatcattcaacaagttttttttttacttcacctgaagcataagaactcatttatgaacatcatacctacgtagattaagcatcacgcccaagtcttttccttttaacgtttcttcttagctcgtttggaagaagacctcaacgtctcttttctcagattttccgtagcttttgtgtccaggaacggctgcaaaataagagcaaaatctcaaacaagttaacacatgaaaagccgggttcatcaactttcactgtttaggttccaagtctaacaatttcaaacccaacttcaagaaccctttggatttatgccctttatagttctttgc

SEQ ID NO: 41135 - DNA, 1082 bp, Arabidopsis thaliana landsberg
actgagtttaaacacgtctcttgtatataatgacaagctagtagtcttacctcaaactgttaatttttttccacagtttacaccgatttttttttttcattttcatactaatggacaattatatagtactagtagtataatgattgatgcatgtctttcgtaatattagactaaattcaatatattgcctatctgagattatccttttttgaagtatacagattgtccatgattgaaaaaaaaggaattgcatgatttatcttttgatttattggataccaatcatgtacttatcatcattatctttacgaggtacttttttctttgcctctcttttcttttgaaaaagtgaaaagtaagaaatataaatactaaagaaaaatagtttatcaattatccgaatcactaaaattagttgattcactaagtttaatcttatataatctgaaaatatatatatatttctttgttttgatgcatatagtgtcaatttatcacaaagtaaattaattcaatgagttcaaataattaaaattgtttatttcctatataaactttagttataactttcacttttacaaaagaaaaataaagagtaccgtataaagataatgatgataataaaacatgattacagaatcctattttcctaaagatagatgattcagtgaagttcttttatatatttctacagctaatgttcatgcattaattttgatattggtgtttactgtttacaatagtggaattcgacgatataggctataaatggatgttgcggttaatgcgaactaatttatcagcggtttaatctactttatatttaagatggacaataaacataaaccgttgtagattcaaattatttcaatgtaaaaatgatctatgattagtctatttgtaatcatttgaatccgtagaataaatgaatagtagaaatcttttcacttcaatagttgatcaaaagtttattaatacttattgctgtaaaaacgatcccaattaatatcttttaagtaagatgcaaattaaaaaaaaattgattgctatttttgagtaatgcgatatagacaaaaaaaaaa
